United States Patent Application Publication US 2006/0257851 A1 - sequence listing, part 12

SEQ ID NO: 384224 - RNA, 32 nt, Homo Sapiens
aucucugauccucccuuuccauugcuucuccu

SEQ ID NO: 384225 - RNA, 32 nt, Homo Sapiens
cgucgguguugcagucuguguccuuggaggug

SEQ ID NO: 384226 - RNA, 32 nt, Homo Sapiens
gcacauccuggccuuugaaagucugauauccu

SEQ ID NO: 384227 - RNA, 32 nt, Homo Sapiens
agggucggaggggcgaccucccugcccccugc

SEQ ID NO: 384228 - RNA, 32 nt, Homo Sapiens
gacugcuggggcgcagcggggaggcgggccgg

SEQ ID NO: 384229 - RNA, 32 nt, Homo Sapiens
uacauagaauaaaauguuuucacauuuuuaug

SEQ ID NO: 384230 - RNA, 32 nt, Homo Sapiens
auauacaaggcaucuacccagccccaauagug

SEQ ID NO: 384231 - RNA, 32 nt, Homo Sapiens
ugcuuaucuaaccuccccaguguucagguguu

SEQ ID NO: 384232 - RNA, 32 nt, Homo Sapiens
ugggacgugaccugugcugagggcugugagaa

SEQ ID NO: 384233 - RNA, 32 nt, Homo Sapiens
acaauuuaucuaaacugaauugagaaaaaauu

SEQ ID NO: 384234 - RNA, 31 nt, Homo Sapiens
cccauccccgacugccugaaccgcgccagga

SEQ ID NO: 384235 - RNA, 27 nt, Homo Sapiens
ccuccuuccuccuucagccuccaugca

SEQ ID NO: 384236 - RNA, 32 nt, Homo Sapiens
cuccacagcgguccggcggcggcagcgagccc

SEQ ID NO: 384237 - RNA, 32 nt, Homo Sapiens
cgauuugugucucuacuuaaaauguaagauca

SEQ ID NO: 384238 - RNA, 32 nt, Homo Sapiens
ggagcccuuccacuccucccaggucaucucuu

SEQ ID NO: 384239 - RNA, 32 nt, Homo Sapiens
agccauguucuuccugccgaggugccaggggg

SEQ ID NO: 384240 - RNA, 32 nt, Homo Sapiens
ggcgcuuccggcagcggcggcgguggugaagg

SEQ ID NO: 384241 - RNA, 32 nt, Homo Sapiens
ggaagguuguuauuuuaaaaauacuuauuguu

SEQ ID NO: 384242 - RNA, 31 nt, Homo Sapiens
uuagcauucaaugauggaacagcugguauaa

SEQ ID NO: 384243 - RNA, 32 nt, Homo Sapiens
uguuauggcucuucuaauucucauuuaauuuu

SEQ ID NO: 384244 - RNA, 32 nt, Homo Sapiens
gagcaagucucucuccuucccugguccucagu

SEQ ID NO: 384245 - RNA, 32 nt, Homo Sapiens
cuguuucuguggcugacuuuggcagucucucu

SEQ ID NO: 384246 - RNA, 32 nt, Homo Sapiens
gagccaaggggugggaguugggauaauuuuua

SEQ ID NO: 384247 - RNA, 32 nt, Homo Sapiens
ccugccagccuccuccucccugccaaccuccu

SEQ ID NO: 384248 - RNA, 32 nt, Homo Sapiens
gagggcucuaacuccgugaggaccccagcauu

SEQ ID NO: 384249 - RNA, 32 nt, Homo Sapiens
aaagagagauacuccuucuuuuuuauuuacuu

SEQ ID NO: 384250 - RNA, 32 nt, Homo Sapiens
aaggggaacaaaacuugaaaaagcccuguucu

SEQ ID NO: 384251 - RNA, 32 nt, Homo Sapiens
caaugacaugaaugucuuucuuugaaaacugc

SEQ ID NO: 384252 - RNA, 32 nt, Homo Sapiens
caccccaguagcagguuacgccaugucaccga

SEQ ID NO: 384253 - RNA, 32 nt, Homo Sapiens
ugugaugugugugaugcaccagagcacccccu

SEQ ID NO: 384254 - RNA, 29 nt, Homo Sapiens
auacuguggggauucaguuuaggcgcugg

SEQ ID NO: 384255 - RNA, 32 nt, Homo Sapiens
aaguauugaagaauuuuucuuuguaacaauuu

SEQ ID NO: 384256 - RNA, 32 nt, Homo Sapiens
uggccccccuggaauauugugaaugacuaggg

SEQ ID NO: 384257 - RNA, 32 nt, Homo Sapiens
gccucaaaaauauuuuuuaaaagaaaagagaa

SEQ ID NO: 384258 - RNA, 32 nt, Homo Sapiens
uagacacuaugugcuuuuuuuuuuuaaccaua

SEQ ID NO: 384259 - RNA, 30 nt, Homo Sapiens
uuccauucuuuaacagcccaucuuggcuug

SEQ ID NO: 384260 - RNA, 32 nt, Homo Sapiens
ugauugaagauacaucucuguuagaacauugg

SEQ ID NO: 384261 - RNA, 32 nt, Homo Sapiens
uuggggccagggcaguccuuugaaagggaagc

SEQ ID NO: 384262 - RNA, 32 nt, Homo Sapiens
uuuucuuguuuuuaucaguugagugccuauag

SEQ ID NO: 384263 - RNA, 32 nt, Homo Sapiens
ugcuuuuuguuguuuuuuaauuugggccgcgg

SEQ ID NO: 384264 - RNA, 32 nt, Homo Sapiens
aucuagacagaauuauuuaaguuuuaucaaua

SEQ ID NO: 384265 - RNA, 32 nt, Homo Sapiens
aaguuuuguuuuguuuuucagcguuaauguaa

SEQ ID NO: 384266 - RNA, 32 nt, Homo Sapiens
uaugcagcaauauauagcauucauacaaaaaa

SEQ ID NO: 384267 - RNA, 32 nt, Homo Sapiens
uuugucugccccccagcccuggacaucugcag

SEQ ID NO: 384268 - RNA, 32 nt, Homo Sapiens
ucacaggcggguggggauccuuucaacagggc

SEQ ID NO: 384269 - RNA, 32 nt, Homo Sapiens
cacugcacagacagcugcgaccagagacugga

SEQ ID NO: 384270 - RNA, 32 nt, Homo Sapiens
ccaggaggcggagaggcaggcggagcucagau

SEQ ID NO: 384271 - RNA, 32 nt, Homo Sapiens
cuccauuggucccaggcuaacuccccuguucc

SEQ ID NO: 384272 - RNA, 32 nt, Homo Sapiens
uggauucuggcaggccaauuauagacgaaugg

SEQ ID NO: 384273 - RNA, 32 nt, Homo Sapiens
uguuuuguuuuaaaaguuaaaaguaauucuug

SEQ ID NO: 384274 - RNA, 32 nt, Homo Sapiens
aucucacugugcugaugcccccgggaaggccu

SEQ ID NO: 384275 - RNA, 32 nt, Homo Sapiens
uucagauagcucuggagguggcgaguaggcca

SEQ ID NO: 384276 - RNA, 32 nt, Homo Sapiens
aagcauccccccugcccuuuuuccuugacugu

SEQ ID NO: 384277 - RNA, 32 nt, Homo Sapiens
ccccgcccccggccugccccccgcccccacug

SEQ ID NO: 384278 - RNA, 32 nt, Homo Sapiens
aaaaccagaaaaggaaauaugagugauaucac

SEQ ID NO: 384279 - RNA, 32 nt, Homo Sapiens
caaccucccuaguagcugggauuacaggugca

SEQ ID NO: 384280 - RNA, 32 nt, Homo Sapiens
ggaucugcgguggucagguuugccucugcuuu

SEQ ID NO: 384281 - RNA, 32 nt, Homo Sapiens
auccagagugauguuaucugugacagucacca

SEQ ID NO: 384282 - RNA, 32 nt, Homo Sapiens
ucccuccccgcuauaccaacacccuuccuucg

SEQ ID NO: 384283 - RNA, 32 nt, Homo Sapiens
cagcccccucagucucccuccuccucauuccc

SEQ ID NO: 384284 - RNA, 32 nt, Homo Sapiens
acggaauguaucaaugagaccuuguauaugga

SEQ ID NO: 384285 - RNA, 32 nt, Homo Sapiens
cucuuccugagccccaggucucuucagucugg

SEQ ID NO: 384286 - RNA, 32 nt, Homo Sapiens
aauaagguugcuuuuucuuucuuaguugagua

SEQ ID NO: 384287 - RNA, 32 nt, Homo Sapiens
gcacaccuggggaauggggucccggccgggag

SEQ ID NO: 384288 - RNA, 32 nt, Homo Sapiens
gguagccccccucgaucggauggggaagccca

SEQ ID NO: 384289 - RNA, 32 nt, Homo Sapiens
accugguguugggacagcaggauaggguucua

SEQ ID NO: 384290 - RNA, 32 nt, Homo Sapiens
augaguggcacuucuuuugucuuaggaauaca

SEQ ID NO: 384291 - RNA, 31 nt, Homo Sapiens
agaugaggggcccaaggucagaauuaugugu

SEQ ID NO: 384292 - RNA, 32 nt, Homo Sapiens
agaauuaguuuauuuuugucaguuacaguccu

SEQ ID NO: 384293 - RNA, 32 nt, Homo Sapiens
guuacccaaacacgccucuccuggcaggguag

SEQ ID NO: 384294 - RNA, 32 nt, Homo Sapiens
ccuuguccggaccccgcgcccggggccucccg

SEQ ID NO: 384295 - RNA, 32 nt, Homo Sapiens
gcacugcagucugcagaguucuccuggaggca

SEQ ID NO: 384296 - RNA, 32 nt, Homo Sapiens
gcagaagcuaagacauagaauucuacagcaug

SEQ ID NO: 384297 - RNA, 32 nt, Homo Sapiens
agacaaggggagaggcagcagcucuuuguccu

SEQ ID NO: 384298 - RNA, 32 nt, Homo Sapiens
aaguuaaaaugaaugugucaugagaaugggcu

SEQ ID NO: 384299 - RNA, 32 nt, Homo Sapiens
gaccgcuggagaccgagcggcguggggaagac

SEQ ID NO: 384300 - RNA, 31 nt, Homo Sapiens
auuaugaaauaaagcaaggcaguucauuuug

SEQ ID NO: 384301 - RNA, 32 nt, Homo Sapiens
cccagagcccagauagagagacacggccucac

SEQ ID NO: 384302 - RNA, 32 nt, Homo Sapiens
ccaacuuucagucuguaccccaucccaagcau

SEQ ID NO: 384303 - RNA, 32 nt, Homo Sapiens
cuaugucucauuuuaaaucacguggguggcau

SEQ ID NO: 384304 - RNA, 32 nt, Homo Sapiens
agaggggaaaacugaggcucaaagaaggcaag

SEQ ID NO: 384305 - RNA, 32 nt, Homo Sapiens
auaugggucuauuugaaauaugcaaaagguau

SEQ ID NO: 384306 - RNA, 32 nt, Homo Sapiens
agugcuguuauccagcugggggauccaacgca

SEQ ID NO: 384307 - RNA, 32 nt, Homo Sapiens
caccauuuuuaaauuauugugaaaagauuaac

SEQ ID NO: 384308 - RNA, 32 nt, Homo Sapiens
ccuuggugaacacgugcagggauuguacauuu

SEQ ID NO: 384309 - RNA, 32 nt, Homo Sapiens
gcccugggaaccccaccccaccccaccccaca

SEQ ID NO: 384310 - RNA, 32 nt, Homo Sapiens
aaaaagaaaaagacaucuaaaauaaaauguuu

SEQ ID NO: 384311 - RNA, 32 nt, Homo Sapiens
agggcuucaggcuggugacuagcagaggucca

SEQ ID NO: 384312 - RNA, 32 nt, Homo Sapiens
gcaggacuuaccuguugaguccugcuggguuu

SEQ ID NO: 384313 - RNA, 32 nt, Homo Sapiens
aaaagacucuggccucccucuugcucccucuc

SEQ ID NO: 384314 - RNA, 32 nt, Homo Sapiens
auccuuuugugcuucauaaauguggguuucca

SEQ ID NO: 384315 - RNA, 32 nt, Homo Sapiens
cagcgccaccuugggccaggcuccucuccagc

SEQ ID NO: 384316 - RNA, 32 nt, Homo Sapiens
aaauaugucuauuguucaagaguaacagguuu

SEQ ID NO: 384317 - RNA, 32 nt, Homo Sapiens
acaaauaauuuaauaauacacauguugcuucu

SEQ ID NO: 384318 - RNA, 32 nt, Homo Sapiens
gaucgggugggggacaugugggcugaccagga

SEQ ID NO: 384319 - RNA, 32 nt, Homo Sapiens
aaaccagccuacuuuguucuuaaaggagggca

SEQ ID NO: 384320 - RNA, 32 nt, Homo Sapiens
cuuccauuuuccgaccccgagaagggaaacuc

SEQ ID NO: 384321 - RNA, 32 nt, Homo Sapiens
uguaucuaacucaaaucaggaacuguauuuuu

SEQ ID NO: 384322 - RNA, 32 nt, Homo Sapiens
gggcccgaugaccucccuuucccacugcuaca

SEQ ID NO: 384323 - RNA, 30 nt, Homo Sapiens
cgucuucaggacugcaggcuccggagagug

SEQ ID NO: 384324 - RNA, 32 nt, Homo Sapiens
acgguuggggacgggcgcgccucggagcgcac

SEQ ID NO: 384325 - RNA, 32 nt, Homo Sapiens
cucggagacaugaacggcuucacgccugacga

SEQ ID NO: 384326 - RNA, 32 nt, Homo Sapiens
guuuuacuuaggacaaguuguaccuugcccuc

SEQ ID NO: 384327 - RNA, 32 nt, Homo Sapiens
aggaguggcagcacugaugggggcccucugca

SEQ ID NO: 384328 - RNA, 31 nt, Homo Sapiens
aaggacauggcacuuugugcugcuggcacug

SEQ ID NO: 384329 - RNA, 32 nt, Homo Sapiens
gcagugagcugguggggggaccgcgaggcgag

SEQ ID NO: 384330 - RNA, 32 nt, Homo Sapiens
gcaagucccuucugccuaugagcgugaaaaau

SEQ ID NO: 384331 - RNA, 32 nt, Homo Sapiens
cugcugaggaagagcuguggggcagaagugaa

SEQ ID NO: 384332 - RNA, 32 nt, Homo Sapiens
uaaggguaggauaaacuaguuuuuguauauag

SEQ ID NO: 384333 - RNA, 32 nt, Homo Sapiens
uccagccgauuuccucuuaguggcuaaugcug

SEQ ID NO: 384334 - RNA, 32 nt, Homo Sapiens
uuuuauccaaaauaaaccuccagaagaaagua

SEQ ID NO: 384335 - RNA, 32 nt, Homo Sapiens
uggggggcggggggaccuuuugcggcugaugg

SEQ ID NO: 384336 - RNA, 32 nt, Homo Sapiens
ccaggcuggcuguggaaacaguuccugaggaa

SEQ ID NO: 384337 - RNA, 32 nt, Homo Sapiens
uggaaugaaacuagauaauuucaagaaacuga

SEQ ID NO: 384338 - RNA, 32 nt, Homo Sapiens
acuccccaaaauggaaucaugggauagggaag

SEQ ID NO: 384339 - RNA, 32 nt, Homo Sapiens
uaaaucuguaaaauccccaaauccauuaaaag

SEQ ID NO: 384340 - RNA, 32 nt, Homo Sapiens
auaaaacaucaaaaacaaaaacaauuagcugg

SEQ ID NO: 384341 - RNA, 32 nt, Homo Sapiens
ggaagagggaaaaacuuuuacuuuucugauuu

SEQ ID NO: 384342 - RNA, 32 nt, Homo Sapiens
gugcagcccgcuugccaaucagagcgcggcug

SEQ ID NO: 384343 - RNA, 32 nt, Homo Sapiens
acaaaaccuugcugccuauggaggaagacugu

SEQ ID NO: 384344 - RNA, 32 nt, Homo Sapiens
uaagguuuacuacagcucuuuuuuguuguaau

SEQ ID NO: 384345 - RNA, 32 nt, Homo Sapiens
ugugggggagagaucagugaaaagugguuuuc

SEQ ID NO: 384346 - RNA, 32 nt, Homo Sapiens
uuuuucuuuuuuacuuuuuuuucuuccuuuuu

SEQ ID NO: 384347 - RNA, 32 nt, Homo Sapiens
cuucaauuaugaacuugaaauugugccacaug

SEQ ID NO: 384348 - RNA, 32 nt, Homo Sapiens
caaggaccaaagggggcccuggcuuggagugg

SEQ ID NO: 384349 - RNA, 32 nt, Homo Sapiens
ggccagcaguguucuuuggagagccacaauaa

SEQ ID NO: 384350 - RNA, 32 nt, Homo Sapiens
uuagaauuucaaaagaaaacauaugauccauu

SEQ ID NO: 384351 - RNA, 32 nt, Homo Sapiens
cauaccucugggaaacagaccuuuuucucucu

SEQ ID NO: 384352 - RNA, 32 nt, Homo Sapiens
aaugugaccauuccuauauaauuccuggacug

SEQ ID NO: 384353 - RNA, 32 nt, Homo Sapiens
agacccaaagcuuuaggcaugauuccaacugg

SEQ ID NO: 384354 - RNA, 32 nt, Homo Sapiens
gcaaaaugaaacaaaauuaaaaguggccucga

SEQ ID NO: 384355 - RNA, 32 nt, Homo Sapiens
cggaccgggccgggcgcccgcagaugagcccc

SEQ ID NO: 384356 - RNA, 32 nt, Homo Sapiens
auguguacuuuuuauuguuacuuaauagugau

SEQ ID NO: 384357 - RNA, 32 nt, Homo Sapiens
cuucuuaaauuacuacccucccgccccgcugc

SEQ ID NO: 384358 - RNA, 32 nt, Homo Sapiens
cguuaaugaacuaauaaguauugccucaagaa

SEQ ID NO: 384359 - RNA, 32 nt, Homo Sapiens
aagccagcaguuucuucugcugccgggcaacg

SEQ ID NO: 384360 - RNA, 32 nt, Homo Sapiens
ccaaucaguuguuuuucucuucgcuucaggcc

SEQ ID NO: 384361 - RNA, 32 nt, Homo Sapiens
uacccauacuuauguuuuaagaaguugagauc

SEQ ID NO: 384362 - RNA, 32 nt, Homo Sapiens
aucagggaaaaugcuuuugauguuguuggcaa

SEQ ID NO: 384363 - RNA, 32 nt, Homo Sapiens
uucuguguguagacauuguauuccacaauuuu

SEQ ID NO: 384364 - RNA, 32 nt, Homo Sapiens
uuccucuuuuucuggaggggaauguuagaaga

SEQ ID NO: 384365 - RNA, 32 nt, Homo Sapiens
ccagggcgcugggucugguggggacgcggggg

SEQ ID NO: 384366 - RNA, 32 nt, Homo Sapiens
caaaagaggaagaacuauuuggggucuguagg

SEQ ID NO: 384367 - RNA, 32 nt, Homo Sapiens
cuauggaugaucuuuaggaaaagcagcccuuu

SEQ ID NO: 384368 - RNA, 32 nt, Homo Sapiens
gccugcugacuggaggacccagguuccuucgc

SEQ ID NO: 384369 - RNA, 32 nt, Homo Sapiens
gacuggaggagguaauccauggagagagaaaa

SEQ ID NO: 384370 - RNA, 32 nt, Homo Sapiens
cuuuugaaagauugaaauuuuuguuacaguau

SEQ ID NO: 384371 - RNA, 32 nt, Homo Sapiens
aaaaaccaugagauaaagugcaacacagccca

SEQ ID NO: 384372 - RNA, 32 nt, Homo Sapiens
cccaaguguuggccauccucaacgaaggcagc

SEQ ID NO: 384373 - RNA, 32 nt, Homo Sapiens
uuuugguaaacguacaucacauauaauacuac

SEQ ID NO: 384374 - RNA, 32 nt, Homo Sapiens
uugcucaucacuguuuccuugaugcugaguaa

SEQ ID NO: 384375 - RNA, 32 nt, Homo Sapiens
uaagaagcaaauaaauaucauccugccuucau

SEQ ID NO: 384376 - RNA, 32 nt, Homo Sapiens
cuaauuaccagacacaaccaaccccaacugua

SEQ ID NO: 384377 - RNA, 32 nt, Homo Sapiens
auuuuuguaaaaauagaacuuuacuuggaagc

SEQ ID NO: 384378 - RNA, 32 nt, Homo Sapiens
gagaaguuagacagguagaucuuuagcagucu

SEQ ID NO: 384379 - RNA, 32 nt, Homo Sapiens
agcugacacugacuaaggaacugcagcauuug

SEQ ID NO: 384380 - RNA, 32 nt, Homo Sapiens
uacaucucagaauucauacaggagagagaccu

SEQ ID NO: 384381 - RNA, 32 nt, Homo Sapiens
aagccucuuucuuuccucuuccccauaagaga

SEQ ID NO: 384382 - RNA, 30 nt, Homo Sapiens
uuaauaauaaauaacaucuauugagugcuu

SEQ ID NO: 384383 - RNA, 32 nt, Homo Sapiens
aggcagcuuaaggccuggcucacaggcugugg

SEQ ID NO: 384384 - RNA, 32 nt, Homo Sapiens
cgaggcaguuuauuuugauauguaucuauuca

SEQ ID NO: 384385 - RNA, 32 nt, Homo Sapiens
gcauaggaaaggaaacagugguaauaggaauu

SEQ ID NO: 384386 - RNA, 32 nt, Homo Sapiens
uguccuuuuaaacaguagaauuguguuacaaa

SEQ ID NO: 384387 - RNA, 32 nt, Homo Sapiens
aucccugcuucuuuggggcaggggugaggcag

SEQ ID NO: 384388 - RNA, 32 nt, Homo Sapiens
uauuauauuucugggaguuucaauuuguugug

SEQ ID NO: 384389 - RNA, 27 nt, Homo Sapiens
uuaaccaauuaauucugaguuuccaaa

SEQ ID NO: 384390 - RNA, 32 nt, Homo Sapiens
ugcaauguuuccuuaacagccauucugaauua

SEQ ID NO: 384391 - RNA, 32 nt, Homo Sapiens
agugacuggaggcccugcuacugcaaauauaa

SEQ ID NO: 384392 - RNA, 32 nt, Homo Sapiens
guuaagcaggcauugcuuugcccuggagcagc

SEQ ID NO: 384393 - RNA, 32 nt, Homo Sapiens
aauguugccaaguuuaaaagagcacggcgggu

SEQ ID NO: 384394 - RNA, 32 nt, Homo Sapiens
cccuugcccuccccugccccucacaacaguca

SEQ ID NO: 384395 - RNA, 32 nt, Homo Sapiens
auuuuaauauauggcuuuuucaaaucaguuca

SEQ ID NO: 384396 - RNA, 32 nt, Homo Sapiens
gacaaggcacgcuaacguggacgcuguacacg

SEQ ID NO: 384397 - RNA, 32 nt, Homo Sapiens
gcggcgccaaacuugcuucccgucagcccccg

SEQ ID NO: 384398 - RNA, 32 nt, Homo Sapiens
agggcccucaaauggacccugaggaaauggau

SEQ ID NO: 384399 - RNA, 32 nt, Homo Sapiens
agcugcucuuauaaaagagacacaccacauuu

SEQ ID NO: 384400 - RNA, 32 nt, Homo Sapiens
ccaguucugcggcccggcagcggcgagcgggc

SEQ ID NO: 384401 - RNA, 32 nt, Homo Sapiens
cauuguaaacugugucuacaguuuauccauau

SEQ ID NO: 384402 - RNA, 32 nt, Homo Sapiens
uuccccuucccuccccuauggaugcuuuaaaa

SEQ ID NO: 384403 - RNA, 32 nt, Homo Sapiens
cuugaugugaagaucaaguucagugcuguggg

SEQ ID NO: 384404 - RNA, 32 nt, Homo Sapiens
cgguuugguuucuguaguuuuaauuuuuaaua

SEQ ID NO: 384405 - RNA, 32 nt, Homo Sapiens
uaucgcucagggcgacaggcccggggcuacgc

SEQ ID NO: 384406 - RNA, 32 nt, Homo Sapiens
uguccuuggggauuuaggaggcggagcggcgc

SEQ ID NO: 384407 - RNA, 32 nt, Homo Sapiens
aucaugugccccucagcggagccccgggagug

SEQ ID NO: 384408 - RNA, 32 nt, Homo Sapiens
agcacuucaaggaaugggaggccuuucacugg

SEQ ID NO: 384409 - RNA, 32 nt, Homo Sapiens
gcugugagccccagccccaccugacuccagca

SEQ ID NO: 384410 - RNA, 32 nt, Homo Sapiens
gagccuaucaauguaucuuuuguacaauaugu

SEQ ID NO: 384411 - RNA, 32 nt, Homo Sapiens
gauggugccgggggucgcuggcucugcugcug

SEQ ID NO: 384412 - RNA, 32 nt, Homo Sapiens
gugcauuaaaauaaauguuuuuuaucuccugg

SEQ ID NO: 384413 - RNA, 32 nt, Homo Sapiens
uguuuguuuuuuagccucccauuugaaacgug

SEQ ID NO: 384414 - RNA, 32 nt, Homo Sapiens
uugaucacaaaacugggacaucuccuagaguc

SEQ ID NO: 384415 - RNA, 32 nt, Homo Sapiens
ugcuagaggugaugaaguggaaagaaaaagac

SEQ ID NO: 384416 - RNA, 32 nt, Homo Sapiens
caugugacucuucugugucaucugugucaaaa

SEQ ID NO: 384417 - RNA, 32 nt, Homo Sapiens
gccgccugcacugcacugaggacccggugccg

SEQ ID NO: 384418 - RNA, 32 nt, Homo Sapiens
gucaacaguucaggagaagagaaggaauuuga

SEQ ID NO: 384419 - RNA, 32 nt, Homo Sapiens
gaccggcugcccgugugccuggcagguggagc

SEQ ID NO: 384420 - RNA, 32 nt, Homo Sapiens
gcccaagccugagccugagcccgccccgaggu

SEQ ID NO: 384421 - RNA, 32 nt, Homo Sapiens
acgcuacacacagguaccccugggauggcgug

SEQ ID NO: 384422 - RNA, 32 nt, Homo Sapiens
acucucccuuccuuccuucucagcccucgagg

SEQ ID NO: 384423 - RNA, 32 nt, Homo Sapiens
gaccccaucucuauuuaaaaaaugaacaaaau

SEQ ID NO: 384424 - RNA, 32 nt, Homo Sapiens
ccacccagugccucaccuccagauccugcugg

SEQ ID NO: 384425 - RNA, 32 nt, Homo Sapiens
uugauagucuuugaauuuaaucaagaaacuac

SEQ ID NO: 384426 - RNA, 32 nt, Homo Sapiens
cuaguauugcaaacacagaaaagagaguugcu

SEQ ID NO: 384427 - RNA, 32 nt, Homo Sapiens
gucuuuccucuccgccucuccuccccagccgg

SEQ ID NO: 384428 - RNA, 32 nt, Homo Sapiens
gaugguuugagcucaggcauuugaggcugucg

SEQ ID NO: 384429 - RNA, 32 nt, Homo Sapiens
aaugcaaaaaauuuguguugugauacaaauua

SEQ ID NO: 384430 - RNA, 32 nt, Homo Sapiens
uggcauacugaauaaguaacauuaacuuggga

SEQ ID NO: 384431 - RNA, 32 nt, Homo Sapiens
gaaagagagcuauguaugauaauuaaagaaaa

SEQ ID NO: 384432 - RNA, 32 nt, Homo Sapiens
cgcuacaggaggaguaggagccggucucccag

SEQ ID NO: 384433 - RNA, 32 nt, Homo Sapiens
ucgcucagguuccuccucucccggccccgccc

SEQ ID NO: 384434 - RNA, 32 nt, Homo Sapiens
ggcccccuccccucccccagaccuccaccucc

SEQ ID NO: 384435 - RNA, 32 nt, Homo Sapiens
ccugcauaauauauuuuuguugcuuuuauaaa

SEQ ID NO: 384436 - RNA, 32 nt, Homo Sapiens
aauugguaacguuaaucagaucuuuaccuaug

SEQ ID NO: 384437 - RNA, 32 nt, Homo Sapiens
gcaggcagagggugggggaccuggcgggagcc

SEQ ID NO: 384438 - RNA, 32 nt, Homo Sapiens
acauggguggcaauguguacauccucacgggc

SEQ ID NO: 384439 - RNA, 28 nt, Homo Sapiens
gagaugccgggcagcgacacggcgcuca

SEQ ID NO: 384440 - RNA, 32 nt, Homo Sapiens
uguuuuuugaauggguuuuucuuuuuugaaga

SEQ ID NO: 384441 - RNA, 32 nt, Homo Sapiens
acaacuugucuuccuaaaauuuauagugauuu

SEQ ID NO: 384442 - RNA, 27 nt, Homo Sapiens
ccauucuccugcuucagccuccugagu

SEQ ID NO: 384443 - RNA, 32 nt, Homo Sapiens
uuuucucggcccgcggcccgaacccgcugugc

SEQ ID NO: 384444 - RNA, 32 nt, Homo Sapiens
guauacacguauacguguuaucaauaauaaga

SEQ ID NO: 384445 - RNA, 32 nt, Homo Sapiens
acgggggguggcugcccuccccagaccacccc

SEQ ID NO: 384446 - RNA, 32 nt, Homo Sapiens
acguuuggugaagaaacacacccagaagagag

SEQ ID NO: 384447 - RNA, 32 nt, Homo Sapiens
cgaugcccagcuccgcgccgcgcggacccacc

SEQ ID NO: 384448 - RNA, 31 nt, Homo Sapiens
uugcaacauaugaguguuuugaaaauaaagu

SEQ ID NO: 384449 - RNA, 32 nt, Homo Sapiens
acaacagggaaguuuuaucaguaaaugccuac

SEQ ID NO: 384450 - RNA, 29 nt, Homo Sapiens
uccccuacagguuucagagggagcauggc

SEQ ID NO: 384451 - RNA, 32 nt, Homo Sapiens
ccuuugccuugauccuucgcaaggcugagcca

SEQ ID NO: 384452 - RNA, 32 nt, Homo Sapiens
gaauguugcauucuuauuuccccauagauaaa

SEQ ID NO: 384453 - RNA, 30 nt, Homo Sapiens
cucucagagaagcacguggugaggguggcc

SEQ ID NO: 384454 - RNA, 32 nt, Homo Sapiens
ucgucccggcccguucggagccgcccgagagc

SEQ ID NO: 384455 - RNA, 30 nt, Homo Sapiens
gucacugucuguggucuuggagaacuaguc

SEQ ID NO: 384456 - RNA, 32 nt, Homo Sapiens
caaacaacacccguuagauauuucagggucca

SEQ ID NO: 384457 - RNA, 32 nt, Homo Sapiens
cugcucaugucugggguauucacuuggcuccu

SEQ ID NO: 384458 - RNA, 32 nt, Homo Sapiens
uucaaagaaggaagaaaggugggagucauuuc

SEQ ID NO: 384459 - RNA, 32 nt, Homo Sapiens
aaggacgcugaggucgcagagcgggcagacgg

SEQ ID NO: 384460 - RNA, 32 nt, Homo Sapiens
agaggagcucaaaacuauaaucuuuaacaaau

SEQ ID NO: 384461 - RNA, 32 nt, Homo Sapiens
cccugccccugccugcccacccugccugagga

SEQ ID NO: 384462 - RNA, 32 nt, Homo Sapiens
uacugaagccuguucuucuccuuccuguggcu

SEQ ID NO: 384463 - RNA, 32 nt, Homo Sapiens
gaugaggaagcagagucuuuacggaaagcacg

SEQ ID NO: 384464 - RNA, 32 nt, Homo Sapiens
gguuuggugcacaggcacacaccuccacuugu

SEQ ID NO: 384465 - RNA, 32 nt, Homo Sapiens
aguuguugaugguauaagacuaccucccaaac

SEQ ID NO: 384466 - RNA, 32 nt, Homo Sapiens
gccgagcggcggugcgcucccgugcagacccg

SEQ ID NO: 384467 - RNA, 32 nt, Homo Sapiens
cgcggagaagcaaccggcacccccuuccggcc

SEQ ID NO: 384468 - RNA, 32 nt, Homo Sapiens
cuggauuugagaacaaauacccacccauuucc

SEQ ID NO: 384469 - RNA, 32 nt, Homo Sapiens
gcagugagccgagacugugcuccagccugggc

SEQ ID NO: 384470 - RNA, 32 nt, Homo Sapiens
ucugcucagaaagcauuuaucauguuccuauu

SEQ ID NO: 384471 - RNA, 32 nt, Homo Sapiens
cuauuaccacugcccaaccaaccuauaacgca

SEQ ID NO: 384472 - RNA, 32 nt, Homo Sapiens
acuacggauacgggcugcuggacgccgggcug

SEQ ID NO: 384473 - RNA, 32 nt, Homo Sapiens
gagcagggguggcagauccuggcuagaucugc

SEQ ID NO: 384474 - RNA, 32 nt, Homo Sapiens
auacauuuauuuuuuuaccaugauuuguucag

SEQ ID NO: 384475 - RNA, 32 nt, Homo Sapiens
uagaugcccagcugcacaacuugauugccuua

SEQ ID NO: 384476 - RNA, 32 nt, Homo Sapiens
cacaaagggcuuuaugugucagcucagugcga

SEQ ID NO: 384477 - RNA, 32 nt, Homo Sapiens
cgcgggcccgcggcgggagcuguccgcgaaac

SEQ ID NO: 384478 - RNA, 32 nt, Homo Sapiens
cauguuugggcagaagcugaaugucugugucu

SEQ ID NO: 384479 - RNA, 32 nt, Homo Sapiens
aauuaucuuuaucacgaacauuuuacaugcag

SEQ ID NO: 384480 - RNA, 32 nt, Homo Sapiens
uugguguucaggaagcgccagagcgccuggga

SEQ ID NO: 384481 - RNA, 32 nt, Homo Sapiens
agcacuggguugggagccggguccugguuucc

SEQ ID NO: 384482 - RNA, 32 nt, Homo Sapiens
cccugacccacccaggaguuggaccgggaguu

SEQ ID NO: 384483 - RNA, 32 nt, Homo Sapiens
gcaaggcgcucgggguaccggaccuguacaug

SEQ ID NO: 384484 - RNA, 32 nt, Homo Sapiens
agaaagucaaacuuacaaaaacuguugugaca

SEQ ID NO: 384485 - RNA, 32 nt, Homo Sapiens
aauaggucucaaagugaaugaauauaccuccu

SEQ ID NO: 384486 - RNA, 32 nt, Homo Sapiens
cugucaagcugaugcuucauugaagacuuagg

SEQ ID NO: 384487 - RNA, 32 nt, Homo Sapiens
uagacacaugcuaggauaggccccgcugggag

SEQ ID NO: 384488 - RNA, 30 nt, Homo Sapiens
cuuggugucugugcugggcaugguuggcuu

SEQ ID NO: 384489 - RNA, 32 nt, Homo Sapiens
gccgacggaaacuggacacuggaccggcagcg

SEQ ID NO: 384490 - RNA, 32 nt, Homo Sapiens
gacgcccaucugggccagguccagaggccugc

SEQ ID NO: 384491 - RNA, 32 nt, Homo Sapiens
uuccuccccaucugccuguuguucucccuguu

SEQ ID NO: 384492 - RNA, 32 nt, Homo Sapiens
aauucugccugccuccucccucccagcugcac

SEQ ID NO: 384493 - RNA, 32 nt, Homo Sapiens
aucaucuugaugucuaugauagauaauaaaca

SEQ ID NO: 384494 - RNA, 32 nt, Homo Sapiens
gugaccagacgaaagagaaggaguaaaaggau

SEQ ID NO: 384495 - RNA, 32 nt, Homo Sapiens
ugagugacauucucacgagauuaaugagauca

SEQ ID NO: 384496 - RNA, 32 nt, Homo Sapiens
uucuacacugucaagggaaaagggagacuaau

SEQ ID NO: 384497 - RNA, 32 nt, Homo Sapiens
gucauggauaugucuaucaaaaucucaauaaa

SEQ ID NO: 384498 - RNA, 32 nt, Homo Sapiens
ggcaagauucggcacgaggcuaauucugcgga

SEQ ID NO: 384499 - RNA, 32 nt, Homo Sapiens
gggaaauuucaaggccacuggcguggaccauc

SEQ ID NO: 384500 - RNA, 32 nt, Homo Sapiens
uuuuaaagagugagaaaacauaaauugagaaa

SEQ ID NO: 384501 - RNA, 32 nt, Homo Sapiens
ccugcaagcugauggguguagugccugucucc

SEQ ID NO: 384502 - RNA, 32 nt, Homo Sapiens
aaaguucugcagacagacccagccacccugcu

SEQ ID NO: 384503 - RNA, 32 nt, Homo Sapiens
ggugaauuuuuagaaaccaccuucuaggcguu

SEQ ID NO: 384504 - RNA, 29 nt, Homo Sapiens
augaaauggaguuuauauuuguuauuucu

SEQ ID NO: 384505 - RNA, 32 nt, Homo Sapiens
gucggcgaggaggguccggccggaguugaagg

SEQ ID NO: 384506 - RNA, 32 nt, Homo Sapiens
gugauuauauugcuuuguaaugguuugugaua

SEQ ID NO: 384507 - RNA, 32 nt, Homo Sapiens
caguugcucuguacaaauccuccuccauauuu

SEQ ID NO: 384508 - RNA, 32 nt, Homo Sapiens
auucaccacuauaggcuucuuugauuuucuuu

SEQ ID NO: 384509 - RNA, 32 nt, Homo Sapiens
acaauuaugcuuaauauacagucuauuaaaug

SEQ ID NO: 384510 - RNA, 32 nt, Homo Sapiens
cuggacauuguuaaauagucccugcuuuaagg

SEQ ID NO: 384511 - RNA, 32 nt, Homo Sapiens
uuuacagaauaaaacuucaaauaaaaccaauu

SEQ ID NO: 384512 - RNA, 32 nt, Homo Sapiens
uaaucaauuuuucucucuuguuuuccacgucu

SEQ ID NO: 384513 - RNA, 32 nt, Homo Sapiens
auacugauagaggaugauguagauauuaaaug

SEQ ID NO: 384514 - RNA, 32 nt, Homo Sapiens
gguggagaauuucuuacccagacuuggggcug

SEQ ID NO: 384515 - RNA, 32 nt, Homo Sapiens
aggcugaggcaggagaaucaucugaacccagg

SEQ ID NO: 384516 - RNA, 32 nt, Homo Sapiens
uuugcuucauuauuucacgaaacuacacucac

SEQ ID NO: 384517 - RNA, 32 nt, Homo Sapiens
ccagugccaaggaguuccagaucguguuugaa

SEQ ID NO: 384518 - RNA, 32 nt, Homo Sapiens
cuccucccuuacccuccucugcugggaaccua

SEQ ID NO: 384519 - RNA, 32 nt, Homo Sapiens
auacucaaugccaauuugauaucaugcuggga

SEQ ID NO: 384520 - RNA, 32 nt, Homo Sapiens
caggcccugccccugcucggcuccucgucugc

SEQ ID NO: 384521 - RNA, 32 nt, Homo Sapiens
ccguaggcccucgggacucccagcacugcaga

SEQ ID NO: 384522 - RNA, 32 nt, Homo Sapiens
ucucugcagagagcuucugggugggggcuuau

SEQ ID NO: 384523 - RNA, 32 nt, Homo Sapiens
cccgucuccaccugcccuccccaggcggcggg

SEQ ID NO: 384524 - RNA, 32 nt, Homo Sapiens
uugcaaacaucucaacgcuggcucuccaggug

SEQ ID NO: 384525 - RNA, 32 nt, Homo Sapiens
cuccggcccuggucuucccccaucccggugga

SEQ ID NO: 384526 - RNA, 32 nt, Homo Sapiens
uuccuaauguucuugauuuaauuguauagaau

SEQ ID NO: 384527 - RNA, 32 nt, Homo Sapiens
ccaagauugcaccagugcacuccagcugggcg

SEQ ID NO: 384528 - RNA, 32 nt, Homo Sapiens
ccccuccggcgcccaguccccgucccggaacu

SEQ ID NO: 384529 - RNA, 32 nt, Homo Sapiens
ccgcggccgcgcauccugcgggccccaggagg

SEQ ID NO: 384530 - RNA, 32 nt, Homo Sapiens
gagugaaacuuuggaggugcauacaguaguca

SEQ ID NO: 384531 - RNA, 32 nt, Homo Sapiens
ccgcagagugauugcuuugucaagaagggaaa

SEQ ID NO: 384532 - RNA, 32 nt, Homo Sapiens
auugggagaggcugccugaggaagguaagaua

SEQ ID NO: 384533 - RNA, 27 nt, Homo Sapiens
gggugcaacuucuucagcugucuggcc

SEQ ID NO: 384534 - RNA, 32 nt, Homo Sapiens
cucaauaaaggcauuacaauuuuuuagguuua

SEQ ID NO: 384535 - RNA, 32 nt, Homo Sapiens
uuacauagauaauuauggauacaaagcagcug

SEQ ID NO: 384536 - RNA, 32 nt, Homo Sapiens
ggagcagccagggggaggcagcugcggcucgc

SEQ ID NO: 384537 - RNA, 32 nt, Homo Sapiens
ugggagugaaacaaaaaugagugguucauggg

SEQ ID NO: 384538 - RNA, 32 nt, Homo Sapiens
cagcuaauuuuuguguuuuuaguggggauggg

SEQ ID NO: 384539 - RNA, 32 nt, Homo Sapiens
cccuaauauuuuccuugugcaauucagacuua

SEQ ID NO: 384540 - RNA, 32 nt, Homo Sapiens
gggaaaauacucagaauaauggaucugacaga

SEQ ID NO: 384541 - RNA, 32 nt, Homo Sapiens
ugcauuguaugacaugagguuauuuaagguau

SEQ ID NO: 384542 - RNA, 32 nt, Homo Sapiens
aacaagaauuguagcaccaugaaacagaccuc

SEQ ID NO: 384543 - RNA, 32 nt, Homo Sapiens
caaagaccaaagggauccugcgcuugaucaac

SEQ ID NO: 384544 - RNA, 32 nt, Homo Sapiens
guggcagcccccacaagcgugccuggaaagga

SEQ ID NO: 384545 - RNA, 32 nt, Homo Sapiens
augucacacgaggagggaagccaggcacgaau

SEQ ID NO: 384546 - RNA, 32 nt, Homo Sapiens
ggcacccguggcggaagcugguuuugcaagga

SEQ ID NO: 384547 - RNA, 32 nt, Homo Sapiens
uuagucaucuuguuaaauauauuuggauauga

SEQ ID NO: 384548 - RNA, 32 nt, Homo Sapiens
aagugaggacugucaccuccgucugagcagga

SEQ ID NO: 384549 - RNA, 32 nt, Homo Sapiens
cugggcacagagggucagguccugucaagagg

SEQ ID NO: 384550 - RNA, 32 nt, Homo Sapiens
cucuagaagaauaaaacugaaaaacucuagag

SEQ ID NO: 384551 - RNA, 32 nt, Homo Sapiens
cagucaaaugguuuuucuugcuguaaguccug

SEQ ID NO: 384552 - RNA, 32 nt, Homo Sapiens
uuauucauuuuauuuuguuuucauuuuggggu

SEQ ID NO: 384553 - RNA, 32 nt, Homo Sapiens
cagcuugauauuucuaucaaauaaaugacuuu

SEQ ID NO: 384554 - RNA, 32 nt, Homo Sapiens
ugccagucccaaguacagcugucccuuuguau

SEQ ID NO: 384555 - RNA, 32 nt, Homo Sapiens
uucuuuaauaauaauccuacaguuuaucuuaa

SEQ ID NO: 384556 - RNA, 32 nt, Homo Sapiens
cagucuccgcuagaaacgcucugggcgcgcac

SEQ ID NO: 384557 - RNA, 32 nt, Homo Sapiens
uccaacacagaaacugaacaaaaugagaugaa

SEQ ID NO: 384558 - RNA, 32 nt, Homo Sapiens
ugugggcccagcauggcugugccugugaggga

SEQ ID NO: 384559 - RNA, 32 nt, Homo Sapiens
auaugggcgucagcgcuggaaacuacggggcc

SEQ ID NO: 384560 - RNA, 32 nt, Homo Sapiens
gagguggaggggcuccggccgccacagccuga

SEQ ID NO: 384561 - RNA, 32 nt, Homo Sapiens
gaauuccccuccauccugcguccauggccacc

SEQ ID NO: 384562 - RNA, 32 nt, Homo Sapiens
aggagaguccuggggcaggcgaggggcucagg

SEQ ID NO: 384563 - RNA, 32 nt, Homo Sapiens
uguccauucagaugagaguugggucgcugagc

SEQ ID NO: 384564 - RNA, 32 nt, Homo Sapiens
uuucugugguuugaauccagggagauacuucu

SEQ ID NO: 384565 - RNA, 32 nt, Homo Sapiens
cucuaucugcacccacccauaggugcucuugu

SEQ ID NO: 384566 - RNA, 32 nt, Homo Sapiens
cuaacuuacugauaagauguuuaugaaguaug

SEQ ID NO: 384567 - RNA, 31 nt, Homo Sapiens
aaucccucacggauggaguugaggccacuuc

SEQ ID NO: 384568 - RNA, 32 nt, Homo Sapiens
ggccgcggcugcccgcgcccccauccgcagcu

SEQ ID NO: 384569 - RNA, 32 nt, Homo Sapiens
cuagguuuucucucaucaucuaauuuacuugc

SEQ ID NO: 384570 - RNA, 32 nt, Homo Sapiens
cauugagggagucuuggugcacuuaggucacu

SEQ ID NO: 384571 - RNA, 32 nt, Homo Sapiens
cgcgggcgggcgaugugagcgcggcgcucugg

SEQ ID NO: 384572 - RNA, 32 nt, Homo Sapiens
uagucguggauaugauuaaaacgcugaagacc

SEQ ID NO: 384573 - RNA, 32 nt, Homo Sapiens
ucaagacguguuggaugcuccuguucuccgaa

SEQ ID NO: 384574 - RNA, 32 nt, Homo Sapiens
uuaaaggaguaauuucauaaagaaauuuauaa

SEQ ID NO: 384575 - RNA, 32 nt, Homo Sapiens
aacacacaaagagcuuauuuuguuaggcaaau

SEQ ID NO: 384576 - RNA, 32 nt, Homo Sapiens
uuguuuucaaccagcuaaaaauguuuuauaua

SEQ ID NO: 384577 - RNA, 32 nt, Homo Sapiens
ugguguaguucuuagaccuaaggucuguaauu

SEQ ID NO: 384578 - RNA, 32 nt, Homo Sapiens
caggcucauguuucccucagacuuuuauucau

SEQ ID NO: 384579 - RNA, 32 nt, Homo Sapiens
cggcgcccgccagccugucccgcgccauggcc

SEQ ID NO: 384580 - RNA, 32 nt, Homo Sapiens
cagcuagaaaugcuagauaaaaaauuuaaaaa

SEQ ID NO: 384581 - RNA, 32 nt, Homo Sapiens
caaggaggggaagagcuaagcccggaggcagu

SEQ ID NO: 384582 - RNA, 32 nt, Homo Sapiens
cugacuugggcuagugggcagaggaaugccug

SEQ ID NO: 384583 - RNA, 32 nt, Homo Sapiens
aguggugcgaucucggcuggcugcagccucua

SEQ ID NO: 384584 - RNA, 32 nt, Homo Sapiens
gagggaagcgucagcgggcgcugcugggagca

SEQ ID NO: 384585 - RNA, 32 nt, Homo Sapiens
ccccaaaauuuaauagauaucuauuucuguua

SEQ ID NO: 384586 - RNA, 32 nt, Homo Sapiens
cgaggagaaaaaagaaccucuacuuaaaccuc

SEQ ID NO: 384587 - RNA, 32 nt, Homo Sapiens
cucaggccaagagccaacgcugugggaggccg

SEQ ID NO: 384588 - RNA, 32 nt, Homo Sapiens
cgaccccgcccgggccucggauccgaucacau

SEQ ID NO: 384589 - RNA, 32 nt, Homo Sapiens
cccagccagcagccuccuuccuacgggggucc

SEQ ID NO: 384590 - RNA, 32 nt, Homo Sapiens
cucaguugaaagauuucuucuuugaaagguca

SEQ ID NO: 384591 - RNA, 32 nt, Homo Sapiens
aaaggauuaacacaaucuuaauacacugaaaa

SEQ ID NO: 384592 - RNA, 32 nt, Homo Sapiens
gugguugugcagccagaugccuggacagagga

SEQ ID NO: 384593 - RNA, 32 nt, Homo Sapiens
aggcuuucuagccugaugugaguugucuuuac

SEQ ID NO: 384594 - RNA, 32 nt, Homo Sapiens
uggccuacaacucugcauggccgucuucuuuc

SEQ ID NO: 384595 - RNA, 32 nt, Homo Sapiens
ucccaggcagugccggcaccccuggcgccuga

SEQ ID NO: 384596 - RNA, 32 nt, Homo Sapiens
uuccucuuaaugugauuuuaaauggaguuauu

SEQ ID NO: 384597 - RNA, 30 nt, Homo Sapiens
gcagccccaguugagggggaaaauaguucu

SEQ ID NO: 384598 - RNA, 32 nt, Homo Sapiens
gaauguuuuaggugcaggauauguuugggcua

SEQ ID NO: 384599 - RNA, 32 nt, Homo Sapiens
aggaaauugacugcuuuuuuuuuuuuuuuaaa

SEQ ID NO: 384600 - RNA, 30 nt, Homo Sapiens
guaauuccgugccugccgccgcagcgccgc

SEQ ID NO: 384601 - RNA, 32 nt, Homo Sapiens
aacucuaggauuucuuuuuucuguguacguag

SEQ ID NO: 384602 - RNA, 32 nt, Homo Sapiens
aaacauuauauagauuugauaaauguuguuua

SEQ ID NO: 384603 - RNA, 32 nt, Homo Sapiens
gcuguauaaaaugaguauucccauuaauaguc

SEQ ID NO: 384604 - RNA, 30 nt, Homo Sapiens
uaucgggcgggggagccgccggcccucggg

SEQ ID NO: 384605 - RNA, 32 nt, Homo Sapiens
gggaugaaaaaucccguucucuggagaaugag

SEQ ID NO: 384606 - RNA, 32 nt, Homo Sapiens
uggugaaaaauacaugcagugccaagugauua

SEQ ID NO: 384607 - RNA, 32 nt, Homo Sapiens
cugaggcuugagcuugaaggccugcugccugg

SEQ ID NO: 384608 - RNA, 32 nt, Homo Sapiens
auggacucgccggucccggccucuauguucgc

SEQ ID NO: 384609 - RNA, 32 nt, Homo Sapiens
ugaaguccuuuuccccaaaaagagggaagagu

SEQ ID NO: 384610 - RNA, 32 nt, Homo Sapiens
ggcccagaaaggacgaugaacuacccgcagug

SEQ ID NO: 384611 - RNA, 32 nt, Homo Sapiens
agaugccugccagcugaccucguuggcaggag

SEQ ID NO: 384612 - RNA, 32 nt, Homo Sapiens
gagucucgggagccggagcgggcccccgccca

SEQ ID NO: 384613 - RNA, 32 nt, Homo Sapiens
gccacccacccucgcuuucuccggcuuccucu

SEQ ID NO: 384614 - RNA, 32 nt, Homo Sapiens
cucccgcgcgcccgcccgcccauggccgggaa

SEQ ID NO: 384615 - RNA, 32 nt, Homo Sapiens
ggggacugugcauauuugaugacaucgcagag

SEQ ID NO: 384616 - RNA, 32 nt, Homo Sapiens
aauuugccaagagccugagugacagagcaaga

SEQ ID NO: 384617 - RNA, 32 nt, Homo Sapiens
uauuuccuucgauuuuuaucugcacaaucuau

SEQ ID NO: 384618 - RNA, 32 nt, Homo Sapiens
auuuccuugagcauauaucucugccuaacacu

SEQ ID NO: 384619 - RNA, 32 nt, Homo Sapiens
uuucauuagucuuuuuauuccuuuugugggca

SEQ ID NO: 384620 - RNA, 32 nt, Homo Sapiens
gaagaguagauggugcuugagaauggugugaa

SEQ ID NO: 384621 - RNA, 30 nt, Homo Sapiens
uauauuguacagaauaaaaauguuuuauug

SEQ ID NO: 384622 - RNA, 32 nt, Homo Sapiens
gggguaccgaggggggcaagggguguccaguc

SEQ ID NO: 384623 - RNA, 32 nt, Homo Sapiens
ggugggccgcuuccuguggaagagggaagugu

SEQ ID NO: 384624 - RNA, 32 nt, Homo Sapiens
acgccccuacugcgguacugaggaagcggcag

SEQ ID NO: 384625 - RNA, 32 nt, Homo Sapiens
ugucagacugguuuauuguuaaguugcaauua

SEQ ID NO: 384626 - RNA, 32 nt, Homo Sapiens
ggccaaggccccagcaccacggucccuccugc

SEQ ID NO: 384627 - RNA, 32 nt, Homo Sapiens
aacauccccugggauuacaagaaacacugaug

SEQ ID NO: 384628 - RNA, 32 nt, Homo Sapiens
uccaggcuccagccagaacuuuacagguguag

SEQ ID NO: 384629 - RNA, 32 nt, Homo Sapiens
cuuagaggaaagggaaaggugaggccccagag

SEQ ID NO: 384630 - RNA, 32 nt, Homo Sapiens
caagaggaugcucggguagucuucgguggcug

SEQ ID NO: 384631 - RNA, 32 nt, Homo Sapiens
ugccugagucccucgagccgcgagccuucgcu

SEQ ID NO: 384632 - RNA, 32 nt, Homo Sapiens
auaugauuuaggaugcauaucaguucuaacaa

SEQ ID NO: 384633 - RNA, 32 nt, Homo Sapiens
uuagcugggcgugguggcgugugccuguaauc

SEQ ID NO: 384634 - RNA, 32 nt, Homo Sapiens
uaacuauuucaauuugauuaauccacuauuau

SEQ ID NO: 384635 - RNA, 32 nt, Homo Sapiens
uucuuggcagccucgccuccuguccaugucua

SEQ ID NO: 384636 - RNA, 32 nt, Homo Sapiens
gccagugguguuggguuuucguucugcuucca

SEQ ID NO: 384637 - RNA, 32 nt, Homo Sapiens
aaauucucaaggaaaaaaggcaauuuuagcau

SEQ ID NO: 384638 - RNA, 32 nt, Homo Sapiens
cagagggagggcgggcgccgcguuggugacgg

SEQ ID NO: 384639 - RNA, 29 nt, Homo Sapiens
auagagaaauaaaugaaaugucauagcug

SEQ ID NO: 384640 - RNA, 32 nt, Homo Sapiens
gcuggcgguggccuuggccauuugcccccagc

SEQ ID NO: 384641 - RNA, 32 nt, Homo Sapiens
gcccggccguccggccccggcgcgccgcagaa

SEQ ID NO: 384642 - RNA, 32 nt, Homo Sapiens
agacaugggaugcacagaggaacgagcugagc

SEQ ID NO: 384643 - RNA, 27 nt, Homo Sapiens
ugaugguccuucuuugucccugcaagu

SEQ ID NO: 384644 - RNA, 32 nt, Homo Sapiens
ucuuugaugcuguucagaauuaauccagaccc

SEQ ID NO: 384645 - RNA, 32 nt, Homo Sapiens
ggccgcugcugcccuccccgccgagguucuac

SEQ ID NO: 384646 - RNA, 31 nt, Homo Sapiens
accggagugaacacucuggaagccacagugg

SEQ ID NO: 384647 - RNA, 32 nt, Homo Sapiens
ucgcucuccuucccuuuuuccgcccgucccag

SEQ ID NO: 384648 - RNA, 32 nt, Homo Sapiens
uuauuuuccagaaucaaucuuucuaugucugu

SEQ ID NO: 384649 - RNA, 31 nt, Homo Sapiens
gggcggauggcuccggccgccuggcuccgca

SEQ ID NO: 384650 - RNA, 32 nt, Homo Sapiens
ccuucagccuacuuucuugagugccguaaaag

SEQ ID NO: 384651 - RNA, 32 nt, Homo Sapiens
gggaacaguggcggcuucggccggcgguccuu

SEQ ID NO: 384652 - RNA, 32 nt, Homo Sapiens
uucaugguauuacugaagguguguauacuccc

SEQ ID NO: 384653 - RNA, 32 nt, Homo Sapiens
guuaucuaaaagaaaugucuauuaaggugaua

SEQ ID NO: 384654 - RNA, 32 nt, Homo Sapiens
gggggccaggcuggaggcagggauggggacag

SEQ ID NO: 384655 - RNA, 32 nt, Homo Sapiens
caaccccccacccaggcugaguaucaucuccu

SEQ ID NO: 384656 - RNA, 32 nt, Homo Sapiens
gcuuguuccugccccaggaauaggccaggagg

SEQ ID NO: 384657 - RNA, 32 nt, Homo Sapiens
gcccuucacugccuuugcuccucccauguuau

SEQ ID NO: 384658 - RNA, 32 nt, Homo Sapiens
guggccgccgacgggggaccgggaaacuuuuc

SEQ ID NO: 384659 - RNA, 32 nt, Homo Sapiens
uaugccauggcagcugcagaggcccagggaga

SEQ ID NO: 384660 - RNA, 32 nt, Homo Sapiens
uugccgaauacucaggacggaccugaauucug

SEQ ID NO: 384661 - RNA, 28 nt, Homo Sapiens
gcaauguucuuugcauguuacugugcac

SEQ ID NO: 384662 - RNA, 32 nt, Homo Sapiens
aacuaaugaaacaaaacaucagaaccagcuaa

SEQ ID NO: 384663 - RNA, 32 nt, Homo Sapiens
cccgccccgcggcgcucuccgaccaccgccuc

SEQ ID NO: 384664 - RNA, 32 nt, Homo Sapiens
aggcccauguggccuccuccuugcuuggaagg

SEQ ID NO: 384665 - RNA, 32 nt, Homo Sapiens
guucugcugagagcuucaucucuugguuggca

SEQ ID NO: 384666 - RNA, 32 nt, Homo Sapiens
uauaauuguaaauaagaucacuauuuucuucu

SEQ ID NO: 384667 - RNA, 32 nt, Homo Sapiens
agugcaaaacugugucacaguuucaggcuuuu

SEQ ID NO: 384668 - RNA, 32 nt, Homo Sapiens
agugagccugucaucgcuccacugagccaaga

SEQ ID NO: 384669 - RNA, 30 nt, Homo Sapiens
accuuggauaaaagauuugcagaugcccca

SEQ ID NO: 384670 - RNA, 32 nt, Homo Sapiens
gcaggagagucccugaaggucuccucgcaccc

SEQ ID NO: 384671 - RNA, 32 nt, Homo Sapiens
uacuguugauucauuucccaaauuccccagac

SEQ ID NO: 384672 - RNA, 32 nt, Homo Sapiens
cuuuuugcuucuugaguugucuuuugccauua

SEQ ID NO: 384673 - RNA, 32 nt, Homo Sapiens
aucacaaagcaaacuuggguguccuuggcagc

SEQ ID NO: 384674 - RNA, 32 nt, Homo Sapiens
ucugauucuuugacucuguggcuagaaugaca

SEQ ID NO: 384675 - RNA, 32 nt, Homo Sapiens
uuucuguggaaggaauaaaaauuugaguuuca

SEQ ID NO: 384676 - RNA, 32 nt, Homo Sapiens
cccacugcaccguggucucgggcucacugugc

SEQ ID NO: 384677 - RNA, 32 nt, Homo Sapiens
aaauccaaacauuagagaauucaccaaaguaa

SEQ ID NO: 384678 - RNA, 32 nt, Homo Sapiens
ucuuuaaugcaaaaaguaauugaaaggcagug

SEQ ID NO: 384679 - RNA, 32 nt, Homo Sapiens
agcagaugacaacacaucuccuggacuggagc

SEQ ID NO: 384680 - RNA, 32 nt, Homo Sapiens
ggaucucccagggcuacucacucaaguucaag

SEQ ID NO: 384681 - RNA, 32 nt, Homo Sapiens
accccagaugaccugcagaaacagaacuguuc

SEQ ID NO: 384682 - RNA, 32 nt, Homo Sapiens
uauugugaaaauaagugcaauuuggauuucau

SEQ ID NO: 384683 - RNA, 32 nt, Homo Sapiens
ucuggggaguccguuuaaggcuuuccuuggua

SEQ ID NO: 384684 - RNA, 32 nt, Homo Sapiens
acauuuccacuuuuagauccuacuccauacca

SEQ ID NO: 384685 - RNA, 32 nt, Homo Sapiens
auagauuuagaaaacaauaaaaaauugcaugc

SEQ ID NO: 384686 - RNA, 32 nt, Homo Sapiens
uauuacauaguuuuuaaagucaaugaaagaga

SEQ ID NO: 384687 - RNA, 32 nt, Homo Sapiens
cgcuccugguaucagagcugcuuuccagaggg

SEQ ID NO: 384688 - RNA, 32 nt, Homo Sapiens
uuaaaauacaaaacgacccaacacauuuuauc

SEQ ID NO: 384689 - RNA, 32 nt, Homo Sapiens
cgugcugcaccucgaugucaagccugagaacc

SEQ ID NO: 384690 - RNA, 30 nt, Homo Sapiens
cuggccccugguggcuugcaaaauuguugg

SEQ ID NO: 384691 - RNA, 32 nt, Homo Sapiens
ccccccaauuccccccccaucaccuuaucucc

SEQ ID NO: 384692 - RNA, 32 nt, Homo Sapiens
aagaaaaucugacuguggauuaugacaaagau

SEQ ID NO: 384693 - RNA, 32 nt, Homo Sapiens
uuucagcuaguggguggaaccccaggagggaa

SEQ ID NO: 384694 - RNA, 32 nt, Homo Sapiens
uccuaagagaauagacaguuuuuccagauuca

SEQ ID NO: 384695 - RNA, 32 nt, Homo Sapiens
auaguuuggcaauuaaauuuuuugagaaaagu

SEQ ID NO: 384696 - RNA, 32 nt, Homo Sapiens
ccaggucgaggagagcguggagcaccugcugg

SEQ ID NO: 384697 - RNA, 31 nt, Homo Sapiens
ucaguggccuaggccgcaggacaccaugaag

SEQ ID NO: 384698 - RNA, 32 nt, Homo Sapiens
ggacagugcagggcuccucccuccuaccucag

SEQ ID NO: 384699 - RNA, 32 nt, Homo Sapiens
ggugcuuccuucccggcugucuccagcuuccu

SEQ ID NO: 384700 - RNA, 32 nt, Homo Sapiens
ggaacuuuagggggugggagggggcguuggau

SEQ ID NO: 384701 - RNA, 32 nt, Homo Sapiens
augauggccccggugcauugugccaccagcag

SEQ ID NO: 384702 - RNA, 32 nt, Homo Sapiens
agggcugcgggcccaccguuuacaugugcacg

SEQ ID NO: 384703 - RNA, 32 nt, Homo Sapiens
gggugggggcagaggagaggcggauacagaaa

SEQ ID NO: 384704 - RNA, 32 nt, Homo Sapiens
augacacuccucccggaccccuggacacacac

SEQ ID NO: 384705 - RNA, 32 nt, Homo Sapiens
gggaagaggaaaaugaggcaagaugcugagaa

SEQ ID NO: 384706 - RNA, 32 nt, Homo Sapiens
guggggcgcuggcguuuccguugcuuggauca

SEQ ID NO: 384707 - RNA, 32 nt, Homo Sapiens
aguccugccccggcugugcagggugagggagg

SEQ ID NO: 384708 - RNA, 32 nt, Homo Sapiens
guauaaaaugacucucaaccacuuugugaaua

SEQ ID NO: 384709 - RNA, 32 nt, Homo Sapiens
ccagaccucaaccuaaaagauggccacaggac

SEQ ID NO: 384710 - RNA, 32 nt, Homo Sapiens
ugacuggccccggccagcccagcgaggcgaca

SEQ ID NO: 384711 - RNA, 32 nt, Homo Sapiens
uucuggcaggucauuugccaucuuugcaagga

SEQ ID NO: 384712 - RNA, 32 nt, Homo Sapiens
uccuccugcagggccugugagcugcucacaac

SEQ ID NO: 384713 - RNA, 32 nt, Homo Sapiens
guguuuuguuuguacuaaaaugcaaaagcaag

SEQ ID NO: 384714 - RNA, 32 nt, Homo Sapiens
uuuucuuuuucuuuuucuuuauuuuauuuauu

SEQ ID NO: 384715 - RNA, 32 nt, Homo Sapiens
ccgggcgccgacgucagccgggcugaguggca

SEQ ID NO: 384716 - RNA, 32 nt, Homo Sapiens
aaaaaggaagcuugguccacuugcuugaagac

SEQ ID NO: 384717 - RNA, 31 nt, Homo Sapiens
uauauuuugugcuacagguauggguauguau

SEQ ID NO: 384718 - RNA, 32 nt, Homo Sapiens
ggcucucggcccccaaugccugcccaucccac

SEQ ID NO: 384719 - RNA, 32 nt, Homo Sapiens
aaccugggaccccgagcuuccucgguagcaga

SEQ ID NO: 384720 - RNA, 32 nt, Homo Sapiens
auuuuuacuuuuaaagagagugaauguuggca

SEQ ID NO: 384721 - RNA, 32 nt, Homo Sapiens
ccacuacagcaagcaggaucgcugcucagacc

SEQ ID NO: 384722 - RNA, 32 nt, Homo Sapiens
agugacuggugccucgccgccuccucucggug

SEQ ID NO: 384723 - RNA, 32 nt, Homo Sapiens
ccuuccaaguuguagaagaacaaugaucuucc

SEQ ID NO: 384724 - RNA, 32 nt, Homo Sapiens
cagugcagugggccgacgacugagacguguga

SEQ ID NO: 384725 - RNA, 32 nt, Homo Sapiens
aagaagaggaaacaccugagugacacucagcu

SEQ ID NO: 384726 - RNA, 32 nt, Homo Sapiens
uccugcuucaaacugagcugccccgcauaggc

SEQ ID NO: 384727 - RNA, 32 nt, Homo Sapiens
aaaauugucauucuagccuggauuucucccca

SEQ ID NO: 384728 - RNA, 32 nt, Homo Sapiens
cgccaggccaggccgccucacgcgcccccugc

SEQ ID NO: 384729 - RNA, 32 nt, Homo Sapiens
cccucugauggcccuccucucugcugccacuc

SEQ ID NO: 384730 - RNA, 32 nt, Homo Sapiens
guuuuguuuucuggaucugucuaguagauuac

SEQ ID NO: 384731 - RNA, 32 nt, Homo Sapiens
auuuauuugaacaaagaccagucuccaccacc

SEQ ID NO: 384732 - RNA, 31 nt, Homo Sapiens
aaaaccaaaacagagugcugaguuaaacgca

SEQ ID NO: 384733 - RNA, 32 nt, Homo Sapiens
ccaggccgcgcccccuuggcgccggguguccu

SEQ ID NO: 384734 - RNA, 32 nt, Homo Sapiens
agugauguauauucucuucuacucuucaugua

SEQ ID NO: 384735 - RNA, 32 nt, Homo Sapiens
caucccuuuccacaguauccuucuucccuccu

SEQ ID NO: 384736 - RNA, 32 nt, Homo Sapiens
gacucuuuauugucuguaaaucuaacauuauu

SEQ ID NO: 384737 - RNA, 32 nt, Homo Sapiens
uaaugagagaauaaacuuauuuuauuuaacga

SEQ ID NO: 384738 - RNA, 32 nt, Homo Sapiens
uccagaagcuacuucucaguguugcauaaucc

SEQ ID NO: 384739 - RNA, 32 nt, Homo Sapiens
gagaaagcccgaggauggagagucacagaugc

SEQ ID NO: 384740 - RNA, 32 nt, Homo Sapiens
ccaacagucaguguuacagcauuucaccuugu

SEQ ID NO: 384741 - RNA, 32 nt, Homo Sapiens
uaugcuaaauguacauuuuaauuuuagacuac

SEQ ID NO: 384742 - RNA, 32 nt, Homo Sapiens
agggcucugggugacgcaugccucuggucuaa

SEQ ID NO: 384743 - RNA, 32 nt, Homo Sapiens
gcccuagcgcucucuuccagaagaugcccucc

SEQ ID NO: 384744 - RNA, 32 nt, Homo Sapiens
aaacuucugaagacugagaacuuuuuugaggc

SEQ ID NO: 384745 - RNA, 32 nt, Homo Sapiens
caggccgagcuggagcgcaaggcggccgaacu

SEQ ID NO: 384746 - RNA, 32 nt, Homo Sapiens
guucugguuguuuuuucuuaagcaagauuagu

SEQ ID NO: 384747 - RNA, 32 nt, Homo Sapiens
agacccuauggccuguaugacccagcugccca

SEQ ID NO: 384748 - RNA, 32 nt, Homo Sapiens
guguguuuuccacuuacaagcuuccauaagca

SEQ ID NO: 384749 - RNA, 32 nt, Homo Sapiens
gguuugcuucaauguauguuuauauuuaugug

SEQ ID NO: 384750 - RNA, 32 nt, Homo Sapiens
ucuguguugaaacaccccauccccucacguuc

SEQ ID NO: 384751 - RNA, 32 nt, Homo Sapiens
ccucugaaaauauuuugaaggcuaaauuuaac

SEQ ID NO: 384752 - RNA, 32 nt, Homo Sapiens
cgggcgcuccuagcggucucccggccccugcc

SEQ ID NO: 384753 - RNA, 32 nt, Homo Sapiens
gcccccaguggggacagggagggggaccuguc

SEQ ID NO: 384754 - RNA, 32 nt, Homo Sapiens
acacuaaggaguggggggcccuggacugcccc

SEQ ID NO: 384755 - RNA, 32 nt, Homo Sapiens
aguaacuauuucuaaaaauguaaauauguauu

SEQ ID NO: 384756 - RNA, 32 nt, Homo Sapiens
auggugaaacccuaucucuacugcaaaauaca

SEQ ID NO: 384757 - RNA, 32 nt, Homo Sapiens
uguccucugggaugggccgcaggccgccuugg

SEQ ID NO: 384758 - RNA, 32 nt, Homo Sapiens
cuguuuuaaugaagaaguccgaaacauaugca

SEQ ID NO: 384759 - RNA, 32 nt, Homo Sapiens
ggcccaaggaauucagaagagcuugcaggcaa

SEQ ID NO: 384760 - RNA, 32 nt, Homo Sapiens
auaaccagcucuguaaaggaaaagcacugaug

SEQ ID NO: 384761 - RNA, 32 nt, Homo Sapiens
ccucucucuuucccuuuggcagcugcaauaca

SEQ ID NO: 384762 - RNA, 32 nt, Homo Sapiens
accgugauggagaggacagagcaggggcucca

SEQ ID NO: 384763 - RNA, 32 nt, Homo Sapiens
ugugacggguggccugugguuuccugccaaca

SEQ ID NO: 384764 - RNA, 32 nt, Homo Sapiens
cucaggcccuaccuguagagaccuccacuccu

SEQ ID NO: 384765 - RNA, 32 nt, Homo Sapiens
gacucuauauauuuagauuucgguuuucucgu

SEQ ID NO: 384766 - RNA, 32 nt, Homo Sapiens
agucacuugagcucaggaguuugagaacaacc

SEQ ID NO: 384767 - RNA, 32 nt, Homo Sapiens
agaugauguacaaauguuauugauggagaaaa

SEQ ID NO: 384768 - RNA, 32 nt, Homo Sapiens
acuuauugccaaauucuuucugauguaugugu

SEQ ID NO: 384769 - RNA, 32 nt, Homo Sapiens
uuccagccuuguccuuccugugugcucccuga

SEQ ID NO: 384770 - RNA, 32 nt, Homo Sapiens
aaaauggggauguuaagaauaccuaccgcaga

SEQ ID NO: 384771 - RNA, 32 nt, Homo Sapiens
ccacugcacccggccuuucucauuuuuauuuu

SEQ ID NO: 384772 - RNA, 32 nt, Homo Sapiens
gcuucccagcagcggccuagcgggaaaaguaa

SEQ ID NO: 384773 - RNA, 32 nt, Homo Sapiens
gggagccuucggguguggcagaacggcaugau

SEQ ID NO: 384774 - RNA, 32 nt, Homo Sapiens
aaguguacacagcagcagcaaaaucaagggau

SEQ ID NO: 384775 - RNA, 32 nt, Homo Sapiens
aagaguagaagauaaggagaaaaguacgacag

SEQ ID NO: 384776 - RNA, 32 nt, Homo Sapiens
gaaucugcuuuggagggaaaugucuauuuuuc

SEQ ID NO: 384777 - RNA, 32 nt, Homo Sapiens
uuuggcugcuaaggcagcagcauguuuaauuu

SEQ ID NO: 384778 - RNA, 32 nt, Homo Sapiens
uucuuaaaaugguuggcuucuugucugcaagc

SEQ ID NO: 384779 - RNA, 32 nt, Homo Sapiens
cacaguuuuccuguuucccacccagcuaaaaa

SEQ ID NO: 384780 - RNA, 32 nt, Homo Sapiens
uucauuuuaauccuaaguguuauuacgcacca

SEQ ID NO: 384781 - RNA, 32 nt, Homo Sapiens
agccuggccaacaugacaaaaccccgucucua

SEQ ID NO: 384782 - RNA, 32 nt, Homo Sapiens
augacuccuguaaaauaugaaauuauaaugca

SEQ ID NO: 384783 - RNA, 32 nt, Homo Sapiens
uaugcaucacacgaaucauuuauuuucaaugu

SEQ ID NO: 384784 - RNA, 32 nt, Homo Sapiens
gagauauaauuaacauaaaauaaacugaacau

SEQ ID NO: 384785 - RNA, 32 nt, Homo Sapiens
guagaagaggcaaaacacuuuuuucacccuuu

SEQ ID NO: 384786 - RNA, 32 nt, Homo Sapiens
ugaggcuuccacguugggguguuguuuuuuga

SEQ ID NO: 384787 - RNA, 31 nt, Homo Sapiens
gcccagaugggggaaccccgggcuggggccg

SEQ ID NO: 384788 - RNA, 32 nt, Homo Sapiens
ccagagagccugucuguguggagcacguagug

SEQ ID NO: 384789 - RNA, 32 nt, Homo Sapiens
uuuauuucccucuguauaacugcaucuucaau

SEQ ID NO: 384790 - RNA, 32 nt, Homo Sapiens
ccugcauaauuugaagacacagcagaaagggg

SEQ ID NO: 384791 - RNA, 31 nt, Homo Sapiens
gggcugcagcgcagcagcacccaacgcaagg

SEQ ID NO: 384792 - RNA, 32 nt, Homo Sapiens
cauauuaauaauauuaagucguucaauucaug

SEQ ID NO: 384793 - RNA, 32 nt, Homo Sapiens
uauuacuccugucuauggauguuuccuucugu

SEQ ID NO: 384794 - RNA, 32 nt, Homo Sapiens
aggggcuggggagaggaaggggcagagggacc

SEQ ID NO: 384795 - RNA, 32 nt, Homo Sapiens
cgcgccccgcccgcgagcccgccccgcacguc

SEQ ID NO: 384796 - RNA, 32 nt, Homo Sapiens
caccgccuuccguacacaggggcccgcauccc

SEQ ID NO: 384797 - RNA, 32 nt, Homo Sapiens
gaaacugauuuaccuaaguuuacuuuuuaauu

SEQ ID NO: 384798 - RNA, 32 nt, Homo Sapiens
ggaagcaccacauggauuaauuggagcagucu

SEQ ID NO: 384799 - RNA, 32 nt, Homo Sapiens
agacucuuccucucgggagaucuuguaauaau

SEQ ID NO: 384800 - RNA, 31 nt, Homo Sapiens
gcuuuuaugauggcaccgaaaccuggucugg

SEQ ID NO: 384801 - RNA, 32 nt, Homo Sapiens
ggccgauucgguuugcccuuugcuggcauguc

SEQ ID NO: 384802 - RNA, 32 nt, Homo Sapiens
auaugaaaauaugcaggucauuagcuuacuau

SEQ ID NO: 384803 - RNA, 32 nt, Homo Sapiens
aaacaucccacuuuuuacuguuucaggccauc

SEQ ID NO: 384804 - RNA, 32 nt, Homo Sapiens
cagccccacaccuccucuccccggggccugga

SEQ ID NO: 384805 - RNA, 32 nt, Homo Sapiens
acccugcaggacaggggugucuguggacacuc

SEQ ID NO: 384806 - RNA, 32 nt, Homo Sapiens
gaggcagccugaggucaccgggcccgaccccc

SEQ ID NO: 384807 - RNA, 32 nt, Homo Sapiens
caauguaaauggauuauauguauaauugguaa

SEQ ID NO: 384808 - RNA, 32 nt, Homo Sapiens
guacuuuguauuugacggcuacccaugucaua

SEQ ID NO: 384809 - RNA, 32 nt, Homo Sapiens
aucaaaugagccaguuuauaucaucagcuauu

SEQ ID NO: 384810 - RNA, 32 nt, Homo Sapiens
cugaaaccauacauuucaagugaaauaaguaa

SEQ ID NO: 384811 - RNA, 32 nt, Homo Sapiens
caguaccgaaguucuuuuucuuguggcauuug

SEQ ID NO: 384812 - RNA, 32 nt, Homo Sapiens
ugaugauaagauugauuucuggcauuauuugu

SEQ ID NO: 384813 - RNA, 32 nt, Homo Sapiens
gaaacagacauaggaccccagcccagaucuga

SEQ ID NO: 384814 - RNA, 32 nt, Homo Sapiens
uuuaacucagaauaaguaaauauuuauggcaa

SEQ ID NO: 384815 - RNA, 32 nt, Homo Sapiens
acauccucugguuuuucuaaagggcuauucau

SEQ ID NO: 384816 - RNA, 32 nt, Homo Sapiens
auuuaaaauauuauuuuagucuugggaaacua

SEQ ID NO: 384817 - RNA, 32 nt, Homo Sapiens
aaaaauugcaguuugucuguacuucuguuuga

SEQ ID NO: 384818 - RNA, 32 nt, Homo Sapiens
auugccuugugugauucuuaaucucuuuugcg

SEQ ID NO: 384819 - RNA, 32 nt, Homo Sapiens
cacuugccaaacuguuggaaugcuauuugugu

SEQ ID NO: 384820 - RNA, 32 nt, Homo Sapiens
gagucucucuucugcucuccacucagaugugg

SEQ ID NO: 384821 - RNA, 30 nt, Homo Sapiens
acccggcuaggcggcggcgggggcggcgau

SEQ ID NO: 384822 - RNA, 32 nt, Homo Sapiens
ccacccucgccauggccuccccgcccgccugc

SEQ ID NO: 384823 - RNA, 32 nt, Homo Sapiens
agcucucccggagcgagcagccgcccgcgagc

SEQ ID NO: 384824 - RNA, 32 nt, Homo Sapiens
auaggguuuugggcugcugagaauaauugaug

SEQ ID NO: 384825 - RNA, 32 nt, Homo Sapiens
caugcccugccaguuaguacuguauuuugcau

SEQ ID NO: 384826 - RNA, 32 nt, Homo Sapiens
aacuccaucaugcaucugaggcacauaaaaag

SEQ ID NO: 384827 - RNA, 32 nt, Homo Sapiens
cccuuccuacgcgcuccgcggcgguagcucgg

SEQ ID NO: 384828 - RNA, 32 nt, Homo Sapiens
gugaaucuaaggauaaugaaauaaucagugac

SEQ ID NO: 384829 - RNA, 32 nt, Homo Sapiens
gggcagagcgcgcgcccaguugcccgggcacc

SEQ ID NO: 384830 - RNA, 32 nt, Homo Sapiens
aagauaaauaguguuagaugucuaauagcagc

SEQ ID NO: 384831 - RNA, 32 nt, Homo Sapiens
gcccugcaggccaagaggaggucagcaaaggu

SEQ ID NO: 384832 - RNA, 32 nt, Homo Sapiens
aguucaagugauucaccucccuuggccuccca

SEQ ID NO: 384833 - RNA, 32 nt, Homo Sapiens
caugcagacugugaagaugcaggccgcgauau

SEQ ID NO: 384834 - RNA, 32 nt, Homo Sapiens
cguaagcaugaaaccaguguuuuuuguuuuuu

SEQ ID NO: 384835 - RNA, 32 nt, Homo Sapiens
gaugauguucugaaauggauagauuguuuuag

SEQ ID NO: 384836 - RNA, 32 nt, Homo Sapiens
ccuucggcucuggagcccacuccggcacggcc

SEQ ID NO: 384837 - RNA, 32 nt, Homo Sapiens
cacuguggagacagcgguggcggagugggucu

SEQ ID NO: 384838 - RNA, 32 nt, Homo Sapiens
uuggauugcucaugcagaacaccacccagugc

SEQ ID NO: 384839 - RNA, 32 nt, Homo Sapiens
gucugauuuuuguuuaaaucuguccguuaggu

SEQ ID NO: 384840 - RNA, 32 nt, Homo Sapiens
cccugugccucgguuuccccaguuccucgaau

SEQ ID NO: 384841 - RNA, 32 nt, Homo Sapiens
cucuguaaauguuuuaaauacuguuguuuuca

SEQ ID NO: 384842 - RNA, 32 nt, Homo Sapiens
gaaugcagucaaauaaacuaaaaacuaggaaa

SEQ ID NO: 384843 - RNA, 32 nt, Homo Sapiens
agcugaaaguucccacggaaaaacuaccaucu

SEQ ID NO: 384844 - RNA, 32 nt, Homo Sapiens
uauagcauugguugccuauuuugagauggauu

SEQ ID NO: 384845 - RNA, 32 nt, Homo Sapiens
auuugagacauuauacauaauuuguuuuuguu

SEQ ID NO: 384846 - RNA, 32 nt, Homo Sapiens
ucgaggaaacagagacaaccuuucugucuuca

SEQ ID NO: 384847 - RNA, 32 nt, Homo Sapiens
auggugcagacacugacguggcccuucugaug

SEQ ID NO: 384848 - RNA, 32 nt, Homo Sapiens
uaaaguuaaccauuuuaaagggaacaauucag

SEQ ID NO: 384849 - RNA, 32 nt, Homo Sapiens
gcaccccacugggagagcugguggugcagccu

SEQ ID NO: 384850 - RNA, 32 nt, Homo Sapiens
aggagccgguccgagggguccggagcgucccu

SEQ ID NO: 384851 - RNA, 32 nt, Homo Sapiens
ugagcauuuagacucucgacuggccaagguuu

SEQ ID NO: 384852 - RNA, 30 nt, Homo Sapiens
gacuccagugucccugccuggccaccaaag

SEQ ID NO: 384853 - RNA, 32 nt, Homo Sapiens
ccuccuccugagggcagccccuggagcaccag

SEQ ID NO: 384854 - RNA, 32 nt, Homo Sapiens
ucuuuuauaguuucuuguuuuuguuucauauu

SEQ ID NO: 384855 - RNA, 32 nt, Homo Sapiens
ccgccgcggacgucgcgccggucgccccuucc

SEQ ID NO: 384856 - RNA, 32 nt, Homo Sapiens
ucucauagugguuuuucuaugcuauaugaaaa

SEQ ID NO: 384857 - RNA, 32 nt, Homo Sapiens
uguucuuggggguggggcugcauccaaggcuu

SEQ ID NO: 384858 - RNA, 31 nt, Homo Sapiens
ccugggcugccggcacuucgcggcagucaga

SEQ ID NO: 384859 - RNA, 32 nt, Homo Sapiens
ggauauauucuaugcauagauguaaugcuaac

SEQ ID NO: 384860 - RNA, 31 nt, Homo Sapiens
ucagacagcaaagccuacccccgcgccgcgc

SEQ ID NO: 384861 - RNA, 29 nt, Homo Sapiens
acuggaggcacaaggaggacgccggcguc

SEQ ID NO: 384862 - RNA, 32 nt, Homo Sapiens
aggcugcagccccgacacgaacaggagccacc

SEQ ID NO: 384863 - RNA, 32 nt, Homo Sapiens
ucccacugcugagaccuguagggcagcuucua

SEQ ID NO: 384864 - RNA, 32 nt, Homo Sapiens
uccagaaaggauuaagaaagcuguuuaagaag

SEQ ID NO: 384865 - RNA, 32 nt, Homo Sapiens
gggucuggacggccaaugauaagauuuagaac

SEQ ID NO: 384866 - RNA, 32 nt, Homo Sapiens
gcgcacggaggcccgcgcugcuagucacuccu

SEQ ID NO: 384867 - RNA, 32 nt, Homo Sapiens
auguguguagcgggagaugugggcggagcgag

SEQ ID NO: 384868 - RNA, 32 nt, Homo Sapiens
uguuuuuguaaaauuuaauggugcuguccagg

SEQ ID NO: 384869 - RNA, 32 nt, Homo Sapiens
ucaggagcaaagagcaccaugauuccaaucuu

SEQ ID NO: 384870 - RNA, 32 nt, Homo Sapiens
aguauaaaaugaaugucaggauguucucccuc

SEQ ID NO: 384871 - RNA, 30 nt, Homo Sapiens
acccaagccacccuuuguggcccuaguguc

SEQ ID NO: 384872 - RNA, 32 nt, Homo Sapiens
guguaugcucgugugugaguguguguauugua

SEQ ID NO: 384873 - RNA, 32 nt, Homo Sapiens
uccuccuccuguucuugccuuggaccugcagg

SEQ ID NO: 384874 - RNA, 32 nt, Homo Sapiens
ucacuuuguaaaaauaaaauauugugguuuug

SEQ ID NO: 384875 - RNA, 32 nt, Homo Sapiens
uacacuuugucaagauuucuuuacauauucau

SEQ ID NO: 384876 - RNA, 32 nt, Homo Sapiens
uggauccuuuuggucauuauuucagugugcau

SEQ ID NO: 384877 - RNA, 32 nt, Homo Sapiens
cugcgggacaggaugccuugggcuaugguguu

SEQ ID NO: 384878 - RNA, 32 nt, Homo Sapiens
uaugcugcuuucucacucagcaucauuuccuu

SEQ ID NO: 384879 - RNA, 32 nt, Homo Sapiens
gaccaccgaagggaacccauggcuaggaucag

SEQ ID NO: 384880 - RNA, 32 nt, Homo Sapiens
gacacgaagaaaguacauauguuaacuauaau

SEQ ID NO: 384881 - RNA, 32 nt, Homo Sapiens
augaaucagucccagggaagcauuugguggug

SEQ ID NO: 384882 - RNA, 32 nt, Homo Sapiens
cugagagucuuaaaaguggaauuaucaccagu

SEQ ID NO: 384883 - RNA, 32 nt, Homo Sapiens
uuugccaacuaaaaugaagucuguaaauucug

SEQ ID NO: 384884 - RNA, 32 nt, Homo Sapiens
cuuagagaugacuguagaaggcugccuggaag

SEQ ID NO: 384885 - RNA, 32 nt, Homo Sapiens
acucuguugcugucugagcaaucguggugccu

SEQ ID NO: 384886 - RNA, 32 nt, Homo Sapiens
cucgaucuguugacuggcucccccgcugcaug

SEQ ID NO: 384887 - RNA, 32 nt, Homo Sapiens
aauacaaggaggaggaggguuagcaggcguuc

SEQ ID NO: 384888 - RNA, 32 nt, Homo Sapiens
acgaacccgucucacggucccgcggccaggag

SEQ ID NO: 384889 - RNA, 32 nt, Homo Sapiens
gcuugcacugccguuccugggggugugcaucu

SEQ ID NO: 384890 - RNA, 32 nt, Homo Sapiens
uacauaucucuucuugauucugcauuucauac

SEQ ID NO: 384891 - RNA, 32 nt, Homo Sapiens
cuggugcguggccuucaccacgcaucuugagc

SEQ ID NO: 384892 - RNA, 32 nt, Homo Sapiens
ggacagaggggugccugcccccugccccugcu

SEQ ID NO: 384893 - RNA, 32 nt, Homo Sapiens
cuuugcgucuguugccuccccagcccugcacg

SEQ ID NO: 384894 - RNA, 32 nt, Homo Sapiens
auuuuaauucaaacagaaagauguguaagaau

SEQ ID NO: 384895 - RNA, 32 nt, Homo Sapiens
gucagaaucugugacccagagggcaaugaaag

SEQ ID NO: 384896 - RNA, 32 nt, Homo Sapiens
cuagggacgacaugauacgcuaccuccuuuuu

SEQ ID NO: 384897 - RNA, 32 nt, Homo Sapiens
ugguugugccaaugaaaaucugcacagacaaa

SEQ ID NO: 384898 - RNA, 32 nt, Homo Sapiens
cugguaagccccaccucaaacuuguucacugg

SEQ ID NO: 384899 - RNA, 32 nt, Homo Sapiens
uggguggacuccugggcgcugcgcggagccgc

SEQ ID NO: 384900 - RNA, 32 nt, Homo Sapiens
gcgcuccggccgcuuugucgaaagccggcccg

SEQ ID NO: 384901 - RNA, 32 nt, Homo Sapiens
uuguuugccuucuucaggaccugacuggacag

SEQ ID NO: 384902 - RNA, 32 nt, Homo Sapiens
ugcaguggcucccagggcagagccucuccuug

SEQ ID NO: 384903 - RNA, 32 nt, Homo Sapiens
cuuugguccccagcgcugucugcccgaggauu

SEQ ID NO: 384904 - RNA, 32 nt, Homo Sapiens
cucucugggguggguguggggguggaguggcc

SEQ ID NO: 384905 - RNA, 32 nt, Homo Sapiens
acauaucugaccaucuucacucagcgccucug

SEQ ID NO: 384906 - RNA, 32 nt, Homo Sapiens
gggaagaaaacuuuggauuugcugggucugaa

SEQ ID NO: 384907 - RNA, 32 nt, Homo Sapiens
caaguuugcugccugcuagagccccccagggu

SEQ ID NO: 384908 - RNA, 32 nt, Homo Sapiens
cugcaggaucgugaggaccaguccauucucug

SEQ ID NO: 384909 - RNA, 32 nt, Homo Sapiens
gugcuggcaugguggcagcugcaaauguccau

SEQ ID NO: 384910 - RNA, 32 nt, Homo Sapiens
guuuccuuauguugucuucagaauaggcauga

SEQ ID NO: 384911 - RNA, 32 nt, Homo Sapiens
gauaaugaauauauuucugcauuuauuuacuu

SEQ ID NO: 384912 - RNA, 32 nt, Homo Sapiens
gcaaaguuggugggugagagaaugggacuucc

SEQ ID NO: 384913 - RNA, 32 nt, Homo Sapiens
uccuguauuacuucuuuuuuuaaguauaaacc

SEQ ID NO: 384914 - RNA, 32 nt, Homo Sapiens
gcgaugugggguuggugcuugaagauaaaugu

SEQ ID NO: 384915 - RNA, 31 nt, Homo Sapiens
cuagcccgccccucagcucgccgcagccccg

SEQ ID NO: 384916 - RNA, 32 nt, Homo Sapiens
uggacccggaaccauggacuccacuucugcuu

SEQ ID NO: 384917 - RNA, 32 nt, Homo Sapiens
aaccaugcaacaauaacacuaucggucuaucu

SEQ ID NO: 384918 - RNA, 32 nt, Homo Sapiens
gaaccucuauuuuaaaaagagaaguucaacuc

SEQ ID NO: 384919 - RNA, 32 nt, Homo Sapiens
uuaaauaaaaauuacgacauuuuaagauauuu

SEQ ID NO: 384920 - RNA, 32 nt, Homo Sapiens
aggcgucaugaauuacuuucucuucucucuuc

SEQ ID NO: 384921 - RNA, 32 nt, Homo Sapiens
uucuucgcucaguaugaagaaaagcaacccaa

SEQ ID NO: 384922 - RNA, 32 nt, Homo Sapiens
aauucaacuuugaguuaucuuuuaaauauguc

SEQ ID NO: 384923 - RNA, 32 nt, Homo Sapiens
gagccaagacccucggccuccucccccgccgc

SEQ ID NO: 384924 - RNA, 32 nt, Homo Sapiens
cugacccuugaaugguuguccuugacucugug

SEQ ID NO: 384925 - RNA, 32 nt, Homo Sapiens
cauucagucugcuuuugggcagaggaguucaa

SEQ ID NO: 384926 - RNA, 32 nt, Homo Sapiens
caggcacaggugccagcuccagcuuuugaacu

SEQ ID NO: 384927 - RNA, 32 nt, Homo Sapiens
uuuuucuuggcuucugaccaaaaaccaagcuc

SEQ ID NO: 384928 - RNA, 32 nt, Homo Sapiens
ucugggaucccggagaggccgucacaccccac

SEQ ID NO: 384929 - RNA, 32 nt, Homo Sapiens
gcugcaucuuucugccuggacucagccucauc

SEQ ID NO: 384930 - RNA, 32 nt, Homo Sapiens
uccggaggaagguucuagcggcugcaggaggu

SEQ ID NO: 384931 - RNA, 32 nt, Homo Sapiens
ggucgggacuuccuucaguuucaaaaaauaaa

SEQ ID NO: 384932 - RNA, 32 nt, Homo Sapiens
ccuccccggcccgugcagcagugucugagcug

SEQ ID NO: 384933 - RNA, 32 nt, Homo Sapiens
guauucccacaagucaggacauuuuauauaac

SEQ ID NO: 384934 - RNA, 32 nt, Homo Sapiens
cucuucccaagcccuccaauccccaucccagg

SEQ ID NO: 384935 - RNA, 32 nt, Homo Sapiens
uaccucauuuuuaaaacaaauccauaguaugg

SEQ ID NO: 384936 - RNA, 32 nt, Homo Sapiens
ccagaucaucuugaaaauauuccucuuuagua

SEQ ID NO: 384937 - RNA, 32 nt, Homo Sapiens
cagugccagcccagcucuccccuccacacugu

SEQ ID NO: 384938 - RNA, 32 nt, Homo Sapiens
guauccaaaaauagcccugcaaaaauucagag

SEQ ID NO: 384939 - RNA, 32 nt, Homo Sapiens
aagaguauuauuaaaauacaauguuuauacgu

SEQ ID NO: 384940 - RNA, 32 nt, Homo Sapiens
ggagcauuaugggaaagucccugccuuccaca

SEQ ID NO: 384941 - RNA, 27 nt, Homo Sapiens
aacauaaccuucuuccuccucuacaga

SEQ ID NO: 384942 - RNA, 32 nt, Homo Sapiens
ugaaauaaugaaauaaagguaauuaacacauc

SEQ ID NO: 384943 - RNA, 32 nt, Homo Sapiens
caggcccgcggcgcccucugcaggccacaggc

SEQ ID NO: 384944 - RNA, 32 nt, Homo Sapiens
gcaccuuucuccacuggccaucuuguccuugg

SEQ ID NO: 384945 - RNA, 32 nt, Homo Sapiens
cuggugaaggguuuccucuccuccaccauggu

SEQ ID NO: 384946 - RNA, 32 nt, Homo Sapiens
cuauugcuggccccaacaccaagucgaaguua

SEQ ID NO: 384947 - RNA, 32 nt, Homo Sapiens
ucgcugcccagaugaggccuaguuaauuacug

SEQ ID NO: 384948 - RNA, 32 nt, Homo Sapiens
gcuucccuaagagcccucugaugugccagcca

SEQ ID NO: 384949 - RNA, 32 nt, Homo Sapiens
gaauuggcccagccucagauccugucuuuagc

SEQ ID NO: 384950 - RNA, 32 nt, Homo Sapiens
agacgaaggcggcggcgauggcggcggggaua

SEQ ID NO: 384951 - RNA, 32 nt, Homo Sapiens
gccuguaaaucccagcacuuugguagccugaa

SEQ ID NO: 384952 - RNA, 32 nt, Homo Sapiens
cccuguaauuuugucccaaaucaaauaucaac

SEQ ID NO: 384953 - RNA, 32 nt, Homo Sapiens
gagaaucuacuaaguucaguccagucaagaaa

SEQ ID NO: 384954 - RNA, 32 nt, Homo Sapiens
uccugagauaaaagauucaguuuuacgaauga

SEQ ID NO: 384955 - RNA, 32 nt, Homo Sapiens
uugucguuuuaaaaggaaguugcuaaggcgau

SEQ ID NO: 384956 - RNA, 32 nt, Homo Sapiens
gaauuuuccguuuggcauucucuuuugggugg

SEQ ID NO: 384957 - RNA, 32 nt, Homo Sapiens
uaacacggcuaaaaugaaguuuuuacaguaua

SEQ ID NO: 384958 - RNA, 32 nt, Homo Sapiens
cagguuuuggguggggaaucuaucucguaucu

SEQ ID NO: 384959 - RNA, 32 nt, Homo Sapiens
caggggagggaacccagaggcuggggaugaga

SEQ ID NO: 384960 - RNA, 32 nt, Homo Sapiens
gagggccucgccuggcugcagccugcgccacc

SEQ ID NO: 384961 - RNA, 32 nt, Homo Sapiens
ugcuaucuacagcacagugugucauuugcaga

SEQ ID NO: 384962 - RNA, 28 nt, Homo Sapiens
aucgacaaagauuacauucugaguacca

SEQ ID NO: 384963 - RNA, 32 nt, Homo Sapiens
agagucauauaucgaaaaccagucaagcaucc

SEQ ID NO: 384964 - RNA, 32 nt, Homo Sapiens
acagguaaaaauuauuaacaauagaacuucaa

SEQ ID NO: 384965 - RNA, 32 nt, Homo Sapiens
gggccagugucaacacauggaccacacuuuau

SEQ ID NO: 384966 - RNA, 32 nt, Homo Sapiens
ucucugaaaaggagguuucagccacgaggcag

SEQ ID NO: 384967 - RNA, 32 nt, Homo Sapiens
cggaccggcgggccggccgccgcaccauaggc

SEQ ID NO: 384968 - RNA, 32 nt, Homo Sapiens
gccgggaccaaauggauucacugaugugcauu

SEQ ID NO: 384969 - RNA, 32 nt, Homo Sapiens
uacuuuucucauuguuucuuauauauuguucu

SEQ ID NO: 384970 - RNA, 32 nt, Homo Sapiens
aaaguacaacuacuucuguggaggagggacau

SEQ ID NO: 384971 - RNA, 32 nt, Homo Sapiens
caaaguaucugagugacccagcccucagucuu

SEQ ID NO: 384972 - RNA, 32 nt, Homo Sapiens
gccucagcugcacugcccgaaaagcauuuggg

SEQ ID NO: 384973 - RNA, 32 nt, Homo Sapiens
cucucccuuggccacuaaaucucucacagggu

SEQ ID NO: 384974 - RNA, 32 nt, Homo Sapiens
ugcuuuccaaggaaacaaagagucaaacugug

SEQ ID NO: 384975 - RNA, 32 nt, Homo Sapiens
ccccugaaggucgggagggucugagcagcccu

SEQ ID NO: 384976 - RNA, 32 nt, Homo Sapiens
uuacgggagcuugguaaugcagguggugaagg

SEQ ID NO: 384977 - RNA, 32 nt, Homo Sapiens
ucacugguuuauuugcaguaauuugcaauuug

SEQ ID NO: 384978 - RNA, 32 nt, Homo Sapiens
aaaaaagagagagcuuccuaggccugggcucu

SEQ ID NO: 384979 - RNA, 32 nt, Homo Sapiens
ugcccgcccgcccucauggaccccgcugucac

SEQ ID NO: 384980 - RNA, 32 nt, Homo Sapiens
aguccaccggcaacucgguucuuccaggugau

SEQ ID NO: 384981 - RNA, 32 nt, Homo Sapiens
aggauuauugcugaaauccuuauggaguuaac

SEQ ID NO: 384982 - RNA, 32 nt, Homo Sapiens
uauuuaacucgacaaaaucauuucauacuaua

SEQ ID NO: 384983 - RNA, 32 nt, Homo Sapiens
uguuacugcacauuuuaaauucuuaacacuaa

SEQ ID NO: 384984 - RNA, 32 nt, Homo Sapiens
ggaugcucaggguauuggggucaggguggcau

SEQ ID NO: 384985 - RNA, 32 nt, Homo Sapiens
cugaccuuuccacgcgcgccccggcccccgcc

SEQ ID NO: 384986 - RNA, 32 nt, Homo Sapiens
gcggcgcugggagagggcggagggggaggcgg

SEQ ID NO: 384987 - RNA, 32 nt, Homo Sapiens
gggaaaagaaagaucagauuguuacugugucu

SEQ ID NO: 384988 - RNA, 32 nt, Homo Sapiens
ugugugccccugagaacuucguggugacugcc

SEQ ID NO: 384989 - RNA, 32 nt, Homo Sapiens
gcauuaucccaggaaacuuauguuuucuagaa

SEQ ID NO: 384990 - RNA, 32 nt, Homo Sapiens
aaauagacaaaaaagaagaaaacuaccuucug

SEQ ID NO: 384991 - RNA, 32 nt, Homo Sapiens
gagaagucaccauccggcagcuuucacuuuga

SEQ ID NO: 384992 - RNA, 32 nt, Homo Sapiens
cucccgcccuccccaccaccauccugcuguau

SEQ ID NO: 384993 - RNA, 32 nt, Homo Sapiens
accccgguacugacaagcuguuuuugagugcc

SEQ ID NO: 384994 - RNA, 32 nt, Homo Sapiens
cugggggugagaggcuggugguugccucccgu

SEQ ID NO: 384995 - RNA, 32 nt, Homo Sapiens
uuccacgggccaggcgagcgccgcccgcccuc

SEQ ID NO: 384996 - RNA, 32 nt, Homo Sapiens
cauucuggugccuugucuuuugcuuguacaga

SEQ ID NO: 384997 - RNA, 32 nt, Homo Sapiens
aaucaucaguuaucaaugucuguuuaauugug

SEQ ID NO: 384998 - RNA, 32 nt, Homo Sapiens
cagucgguuuaauuaaaacaaacagaacaauu

SEQ ID NO: 384999 - RNA, 32 nt, Homo Sapiens
cgagagcagcaggucacgcagaaaaaacugag

SEQ ID NO: 385000 - RNA, 32 nt, Homo Sapiens
uccucccggcccggcccgaacaugcuggacgg

SEQ ID NO: 385001 - RNA, 32 nt, Homo Sapiens
ggugagggggugcccggcggccucggacaggg

SEQ ID NO: 385002 - RNA, 32 nt, Homo Sapiens
accaguguuagaccgaccuguguuagacgaac

SEQ ID NO: 385003 - RNA, 32 nt, Homo Sapiens
uuuacagcugguuuuucuugacugaagcucau

SEQ ID NO: 385004 - RNA, 32 nt, Homo Sapiens
acauuacaaguuauuucuuugacugaauagac

SEQ ID NO: 385005 - RNA, 32 nt, Homo Sapiens
cgagggccaaagcccgccgcccgccccccagc

SEQ ID NO: 385006 - RNA, 30 nt, Homo Sapiens
ccgccaccuccugccacccggacuuucccc

SEQ ID NO: 385007 - RNA, 32 nt, Homo Sapiens
ugaaguggggugggaauguuuccccucguuuu

SEQ ID NO: 385008 - RNA, 32 nt, Homo Sapiens
gaauggggacaaagccccgccgcccgccccga

SEQ ID NO: 385009 - RNA, 32 nt, Homo Sapiens
gaguugcugaccagugcccaccccggcagccc

SEQ ID NO: 385010 - RNA, 32 nt, Homo Sapiens
uauauauauaucuauauuuuuguccaaaccaa

SEQ ID NO: 385011 - RNA, 32 nt, Homo Sapiens
ucauaacauaaugacuucauuguuaugaaaaa

SEQ ID NO: 385012 - RNA, 28 nt, Homo Sapiens
ccaauggagcccaaccauccuuucuaua

SEQ ID NO: 385013 - RNA, 32 nt, Homo Sapiens
ugccgcuguccaaccccucccccggggcuugc

SEQ ID NO: 385014 - RNA, 32 nt, Homo Sapiens
uccagaaguggggcucugggagggauguucua

SEQ ID NO: 385015 - RNA, 32 nt, Homo Sapiens
aaacaaaacuugaguucuauuuaccuugcaca

SEQ ID NO: 385016 - RNA, 32 nt, Homo Sapiens
auaacauugacucuuccaaccacugacauguu

SEQ ID NO: 385017 - RNA, 32 nt, Homo Sapiens
uaaaggacaaaauaagcuguuugccaccucaa

SEQ ID NO: 385018 - RNA, 32 nt, Homo Sapiens
cacuuccuucuggccugggaggucuguaauuc

SEQ ID NO: 385019 - RNA, 32 nt, Homo Sapiens
augucucugaugaagccuggaacgagcgugcu

SEQ ID NO: 385020 - RNA, 32 nt, Homo Sapiens
augccucucagcccguguguauaauaugaaga

SEQ ID NO: 385021 - RNA, 32 nt, Homo Sapiens
uccaggacugccaagcucccaaaggcggggcu

SEQ ID NO: 385022 - RNA, 32 nt, Homo Sapiens
ccggccccgcggcucugagguugcucgcgcgc

SEQ ID NO: 385023 - RNA, 32 nt, Homo Sapiens
cagagcccggcggcuguaaugguuccaugggc

SEQ ID NO: 385024 - RNA, 32 nt, Homo Sapiens
ugugauucuuuguugcagaaaugucaauauau

SEQ ID NO: 385025 - RNA, 30 nt, Homo Sapiens
uaaagggcgcccgcggucccccagcaccuc

SEQ ID NO: 385026 - RNA, 32 nt, Homo Sapiens
acagaggugagaggaaggggagcggcuccugu

SEQ ID NO: 385027 - RNA, 32 nt, Homo Sapiens
ucucucuggagcaucaauauuacugcaguauu

SEQ ID NO: 385028 - RNA, 32 nt, Homo Sapiens
uugggaggggaagagcggggugccgagggucu

SEQ ID NO: 385029 - RNA, 32 nt, Homo Sapiens
aguuauugacauuuagugaguagaggccaggg

SEQ ID NO: 385030 - RNA, 30 nt, Homo Sapiens
cgccgcagccgccggcgcuguggagauauu

SEQ ID NO: 385031 - RNA, 32 nt, Homo Sapiens
uuaaaagugcaucaucggcacucaauagaaau

SEQ ID NO: 385032 - RNA, 32 nt, Homo Sapiens
uugagcacucaagugccuuacacuggacuucu

SEQ ID NO: 385033 - RNA, 32 nt, Homo Sapiens
uuuacuugaggaaauauaaagcuuuaaaagac

SEQ ID NO: 385034 - RNA, 32 nt, Homo Sapiens
uuaccucccucuuuucguaguuuuugucaugu

SEQ ID NO: 385035 - RNA, 32 nt, Homo Sapiens
guucccccugugucgucccccauccccccucc

SEQ ID NO: 385036 - RNA, 32 nt, Homo Sapiens
caccccucagcccgcccuccccuuuggccuuc

SEQ ID NO: 385037 - RNA, 32 nt, Homo Sapiens
cccacccuacccccauaaagcauuguuuacaa

SEQ ID NO: 385038 - RNA, 32 nt, Homo Sapiens
uuuauugauuuuuucugcuucugguguucuuu

SEQ ID NO: 385039 - RNA, 32 nt, Homo Sapiens
cuuucaucagguuugugucucaucucccugcg

SEQ ID NO: 385040 - RNA, 32 nt, Homo Sapiens
accugcagcaaagagaagcaucagucuaacaa

SEQ ID NO: 385041 - RNA, 30 nt, Homo Sapiens
gcgagugccagagcccagccggcgcggagc

SEQ ID NO: 385042 - RNA, 32 nt, Homo Sapiens
ugguuggagaacaacaacuuuagagagagcag

SEQ ID NO: 385043 - RNA, 32 nt, Homo Sapiens
ugguccccucuuaaaggcgcaggccgcggcgg

SEQ ID NO: 385044 - RNA, 32 nt, Homo Sapiens
gggaguugguucaacaguggccacaaaugcag

SEQ ID NO: 385045 - RNA, 32 nt, Homo Sapiens
guuucaucugucagcucacuccagcuucacaa

SEQ ID NO: 385046 - RNA, 32 nt, Homo Sapiens
cuuggggcgggugggaccuacccaggcucuga

SEQ ID NO: 385047 - RNA, 32 nt, Homo Sapiens
aacuguggccuaaagaacacuuauucagaaau

SEQ ID NO: 385048 - RNA, 31 nt, Homo Sapiens
gauagcuggcacugccuuccccacaauggca

SEQ ID NO: 385049 - RNA, 32 nt, Homo Sapiens
ccacuagguucuuuuccauugucaauaaggag

SEQ ID NO: 385050 - RNA, 32 nt, Homo Sapiens
agcugcccgccuuuugcugcgucaggcugggc

SEQ ID NO: 385051 - RNA, 32 nt, Homo Sapiens
uuugcgggaagcaugcaguugcuggccggagu

SEQ ID NO: 385052 - RNA, 32 nt, Homo Sapiens
acuguguugggguggggguuggguaagggaau

SEQ ID NO: 385053 - RNA, 32 nt, Homo Sapiens
ugggcgggggccugggaauacagccuguggag

SEQ ID NO: 385054 - RNA, 32 nt, Homo Sapiens
acuccugugcaaacauauguuauuaaaauuuu

SEQ ID NO: 385055 - RNA, 32 nt, Homo Sapiens
ggccgcgccgcggcgggggguggaggaagagg

SEQ ID NO: 385056 - RNA, 32 nt, Homo Sapiens
ccggggccuagagccagccgcggccgcgcagg

SEQ ID NO: 385057 - RNA, 32 nt, Homo Sapiens
gagaccuugaaggaagccuuugaaagggagaa

SEQ ID NO: 385058 - RNA, 32 nt, Homo Sapiens
cggguggcaucggcucugcugcugcggagccc

SEQ ID NO: 385059 - RNA, 32 nt, Homo Sapiens
gaguccuccccgccucgcagaguugggagaag

SEQ ID NO: 385060 - RNA, 32 nt, Homo Sapiens
ggugugagccaccacgcccggccaagaacuuu

SEQ ID NO: 385061 - RNA, 32 nt, Homo Sapiens
aggccagggcagcgcguccgggagcggagucc

SEQ ID NO: 385062 - RNA, 32 nt, Homo Sapiens
cuugggcgggcggccaguggcgacuacagcag

SEQ ID NO: 385063 - RNA, 32 nt, Homo Sapiens
accugccacuuauuuuuugucaauuuuuaaaa

SEQ ID NO: 385064 - RNA, 32 nt, Homo Sapiens
uuucuaauuacauuucuuuuauuccuguaaua

SEQ ID NO: 385065 - RNA, 32 nt, Homo Sapiens
ggcaggcucggaauugucaucuuccucaggca

SEQ ID NO: 385066 - RNA, 32 nt, Homo Sapiens
acagguacaauuuuggauaaauagcagauuua

SEQ ID NO: 385067 - RNA, 29 nt, Homo Sapiens
aaauauauauguauacauguggaagauau

SEQ ID NO: 385068 - RNA, 32 nt, Homo Sapiens
ggguuuacuuaggaagaauugggauagaaauu

SEQ ID NO: 385069 - RNA, 32 nt, Homo Sapiens
cgccaggucauugagauccauccacucacauc

SEQ ID NO: 385070 - RNA, 32 nt, Homo Sapiens
ugccccgcgccggguuuguugggggguacucg

SEQ ID NO: 385071 - RNA, 32 nt, Homo Sapiens
ccugucuccgguccgugccuccaagaugacaa

SEQ ID NO: 385072 - RNA, 32 nt, Homo Sapiens
ugguugucugaagaguagaagggaaacuaaga

SEQ ID NO: 385073 - RNA, 32 nt, Homo Sapiens
ggacuuccucauccuuuuuuucaugaaacuga

SEQ ID NO: 385074 - RNA, 32 nt, Homo Sapiens
gucccugugaucugggucucuguguggucucc

SEQ ID NO: 385075 - RNA, 32 nt, Homo Sapiens
acuucucaggucguguccccagccuucucugc

SEQ ID NO: 385076 - RNA, 32 nt, Homo Sapiens
ccccuggcucugcugagguuacugccuuaccc

SEQ ID NO: 385077 - RNA, 32 nt, Homo Sapiens
gaagucucuucuucagaggaagccuucccagu

SEQ ID NO: 385078 - RNA, 32 nt, Homo Sapiens
cagccaggugaccccugcgaucuggauguuuc

SEQ ID NO: 385079 - RNA, 32 nt, Homo Sapiens
gaggggucgcccgugcacccugucccagccgu

SEQ ID NO: 385080 - RNA, 32 nt, Homo Sapiens
gccaguuuuuaaaaugcugcuuuguccaggug

SEQ ID NO: 385081 - RNA, 32 nt, Homo Sapiens
uaggcaccacugaguuguuuucugucuuuaua

SEQ ID NO: 385082 - RNA, 32 nt, Homo Sapiens
cuaaaggcggccagguuugcagugcgggaaga

SEQ ID NO: 385083 - RNA, 32 nt, Homo Sapiens
agucuuuuuugcauuacuuuguaaccuuuuuc

SEQ ID NO: 385084 - RNA, 32 nt, Homo Sapiens
cauuuauagaagaaauaacauaauuuauggau

SEQ ID NO: 385085 - RNA, 32 nt, Homo Sapiens
gauuuuagauaaugucugauauuuuucuggcu

SEQ ID NO: 385086 - RNA, 32 nt, Homo Sapiens
uaccuccaugauucuuuuucucuugaccucug

SEQ ID NO: 385087 - RNA, 32 nt, Homo Sapiens
gguggcccuuccccggcaucugaucgucugau

SEQ ID NO: 385088 - RNA, 32 nt, Homo Sapiens
cgcugcggcucgccuccuccuccaugggaccg

SEQ ID NO: 385089 - RNA, 32 nt, Homo Sapiens
gcugccgcgggggcuuccuggagccagguccc

SEQ ID NO: 385090 - RNA, 32 nt, Homo Sapiens
uugugcuuucccuuuuucuucuguuaauacuu

SEQ ID NO: 385091 - RNA, 32 nt, Homo Sapiens
ccggacccagguuuccugacuccuggcccaag

SEQ ID NO: 385092 - RNA, 32 nt, Homo Sapiens
gcuuacuccggagccuguaccggcgccgacgg

SEQ ID NO: 385093 - RNA, 30 nt, Homo Sapiens
auccuugguuucggcgggacuucgcagggc

SEQ ID NO: 385094 - RNA, 32 nt, Homo Sapiens
auguuuuaugcaacaaggaacgaaugguagca

SEQ ID NO: 385095 - RNA, 32 nt, Homo Sapiens
aaaauaggauuacuucaauuaaaauuacaaaa

SEQ ID NO: 385096 - RNA, 32 nt, Homo Sapiens
gcggcgggacgcggaggcucccccgggauucg

SEQ ID NO: 385097 - RNA, 32 nt, Homo Sapiens
uaaaguuaauaaauaguuaaaugaaacaaagu

SEQ ID NO: 385098 - RNA, 32 nt, Homo Sapiens
acaugcacguauguccagggcauggggguggc

SEQ ID NO: 385099 - RNA, 32 nt, Homo Sapiens
ugggguccuggcacagacccaggcccagggga

SEQ ID NO: 385100 - RNA, 32 nt, Homo Sapiens
uuucauggaaccacccaccucccucucaucca

SEQ ID NO: 385101 - RNA, 32 nt, Homo Sapiens
guuucugaaaugcugcgucuccagcaagcucc

SEQ ID NO: 385102 - RNA, 32 nt, Homo Sapiens
ucagagaugaggaaacagauugcuuuguucaa

SEQ ID NO: 385103 - RNA, 32 nt, Homo Sapiens
guguccgcccucccagcuccagcccugcaggc

SEQ ID NO: 385104 - RNA, 32 nt, Homo Sapiens
guuuccaaaguacguggacaggccgccugaug

SEQ ID NO: 385105 - RNA, 32 nt, Homo Sapiens
ucuguccugcgagggccggugcgacccaguug

SEQ ID NO: 385106 - RNA, 32 nt, Homo Sapiens
gucaguuuggugcauuugcugcugcuguugcu

SEQ ID NO: 385107 - RNA, 32 nt, Homo Sapiens
gagccuuucucugcccucugugacauuuccaa

SEQ ID NO: 385108 - RNA, 32 nt, Homo Sapiens
uuauccuaccagaucggagcccugcccuuuac

SEQ ID NO: 385109 - RNA, 32 nt, Homo Sapiens
guucuagaccucugggggauaagggaguccag

SEQ ID NO: 385110 - RNA, 32 nt, Homo Sapiens
gugaauuguagaauuuugaucuucuuauucac

SEQ ID NO: 385111 - RNA, 32 nt, Homo Sapiens
acaccaggccccagcccaacgcgcuuccuuug

SEQ ID NO: 385112 - RNA, 32 nt, Homo Sapiens
ccccauauuacaugaugugauuauuacacauu

SEQ ID NO: 385113 - RNA, 31 nt, Homo Sapiens
auuugucuggcucaagaguccacuucuggcu

SEQ ID NO: 385114 - RNA, 32 nt, Homo Sapiens
uauuuuuccuuccuuaaguaguuuuacauugc

SEQ ID NO: 385115 - RNA, 32 nt, Homo Sapiens
ccgggagcgcgguggggcuaggcguggggcgc

SEQ ID NO: 385116 - RNA, 32 nt, Homo Sapiens
ucucuugccaaugggcagaaucuucacuccag

SEQ ID NO: 385117 - RNA, 31 nt, Homo Sapiens
agauagcggcacugcacuccagccuggguga

SEQ ID NO: 385118 - RNA, 32 nt, Homo Sapiens
gauacauguuuccaauuauccuuuuucaauga

SEQ ID NO: 385119 - RNA, 32 nt, Homo Sapiens
gggcugcagggccugcgugcgcucccuccccc

SEQ ID NO: 385120 - RNA, 32 nt, Homo Sapiens
ugaucagccccucccugcuucccuguguggaa

SEQ ID NO: 385121 - RNA, 32 nt, Homo Sapiens
uuuccuggaaacugaucuucaaugcacuaaga

SEQ ID NO: 385122 - RNA, 32 nt, Homo Sapiens
aaugugucccucccaccaugggccagagcuuc

SEQ ID NO: 385123 - RNA, 32 nt, Homo Sapiens
ccccacaaggacuucucugucuggagacagcc

SEQ ID NO: 385124 - RNA, 32 nt, Homo Sapiens
caccucccacucgauuccugcuccucagaccu

SEQ ID NO: 385125 - RNA, 32 nt, Homo Sapiens
auuuaauaggcuuuuuacuucauucuauuaaa

SEQ ID NO: 385126 - RNA, 29 nt, Homo Sapiens
uagcuugggugacagaggaagacugucuc

SEQ ID NO: 385127 - RNA, 32 nt, Homo Sapiens
agagaaaccugaucgauguacuguauguggga

SEQ ID NO: 385128 - RNA, 32 nt, Homo Sapiens
uugauuaagagaccucuuuuugaucuguauug

SEQ ID NO: 385129 - RNA, 32 nt, Homo Sapiens
ggaccucacaguguggauugugccuucacccu

SEQ ID NO: 385130 - RNA, 32 nt, Homo Sapiens
auuagcccaguucuuagaagagguacuucaga

SEQ ID NO: 385131 - RNA, 32 nt, Homo Sapiens
gagaaagaaacaacacugauauuucaaacaac

SEQ ID NO: 385132 - RNA, 32 nt, Homo Sapiens
uguugugccccacagcacuuuguuauaccucu

SEQ ID NO: 385133 - RNA, 32 nt, Homo Sapiens
agauccacagagcuaaacguuuuagaguacca

SEQ ID NO: 385134 - RNA, 32 nt, Homo Sapiens
gacguguacaucgugaugugggacaccaguuc

SEQ ID NO: 385135 - RNA, 32 nt, Homo Sapiens
uguucauuccaagcacaauauucauguuaggc

SEQ ID NO: 385136 - RNA, 32 nt, Homo Sapiens
ccuaggaagggccguacgaggcggcgggcccg

SEQ ID NO: 385137 - RNA, 32 nt, Homo Sapiens
cuugaugccuucucugugagcaguggcucugu

SEQ ID NO: 385138 - RNA, 32 nt, Homo Sapiens
uuaagggcucccuaaacuuuggccuuuguucg

SEQ ID NO: 385139 - RNA, 32 nt, Homo Sapiens
ugugauaggcagucccuggcagggccuucggg

SEQ ID NO: 385140 - RNA, 32 nt, Homo Sapiens
cuucucugcuccagguucacuuuggauaugau

SEQ ID NO: 385141 - RNA, 32 nt, Homo Sapiens
cgccugcaaugccagcacuuugagaggccaag

SEQ ID NO: 385142 - RNA, 32 nt, Homo Sapiens
ugugcagauaauguugaaaguaaguuaauuug

SEQ ID NO: 385143 - RNA, 32 nt, Homo Sapiens
cauacuuuuuucuugaucuggaucuacuuguc

SEQ ID NO: 385144 - RNA, 32 nt, Homo Sapiens
ggcugacucugcagcuccucaugcuggccuau

SEQ ID NO: 385145 - RNA, 32 nt, Homo Sapiens
gugcaauguuaguaauuagaaguuuuaccaca

SEQ ID NO: 385146 - RNA, 32 nt, Homo Sapiens
ccggccccaccccgaauaccccggccacgcuc

SEQ ID NO: 385147 - RNA, 32 nt, Homo Sapiens
auuauguaccucaggguauguagauccagcag

SEQ ID NO: 385148 - RNA, 32 nt, Homo Sapiens
ggaaagcuucaaacagagaauuagauuguuuc

SEQ ID NO: 385149 - RNA, 32 nt, Homo Sapiens
cccagcuugagcaacauagugaaauccugucu

SEQ ID NO: 385150 - RNA, 32 nt, Homo Sapiens
aauuaguuucacauugucaaguuuucaauaca

SEQ ID NO: 385151 - RNA, 32 nt, Homo Sapiens
caccccgucaugacucuuuuuggccuugucua

SEQ ID NO: 385152 - RNA, 32 nt, Homo Sapiens
aggggcugcuugcgccaggcgccggccgcccc

SEQ ID NO: 385153 - RNA, 32 nt, Homo Sapiens
cgcgggagugcgccagcgccgcgcguggggcu

SEQ ID NO: 385154 - RNA, 32 nt, Homo Sapiens
caagaaaguaucuauauauacauauguaaaua

SEQ ID NO: 385155 - RNA, 32 nt, Homo Sapiens
caacauuauuggcauccccggauuuuggccac

SEQ ID NO: 385156 - RNA, 32 nt, Homo Sapiens
cuggcggaagaggcacgugcgcugcugaaugg

SEQ ID NO: 385157 - RNA, 32 nt, Homo Sapiens
cggaggcaggagcauguaugucugcagguguc

SEQ ID NO: 385158 - RNA, 32 nt, Homo Sapiens
uuuuuaaguuauauuucuuugauuuuuguuaa

SEQ ID NO: 385159 - RNA, 32 nt, Homo Sapiens
uaguuuaacauauaauuuuaaauuugccaauu

SEQ ID NO: 385160 - RNA, 32 nt, Homo Sapiens
acuccaaauuucuuucugucuuucaaaccuua

SEQ ID NO: 385161 - RNA, 32 nt, Homo Sapiens
auauuaaauaccauaaaauguaacucugccuu

SEQ ID NO: 385162 - RNA, 32 nt, Homo Sapiens
cgccugcgcucuugcagccaagaaggcgggag

SEQ ID NO: 385163 - RNA, 32 nt, Homo Sapiens
aaaacaggguuuuucuuuuuuaucaccuuuga

SEQ ID NO: 385164 - RNA, 29 nt, Homo Sapiens
gaagaugcucgagggccuggggucgcccg

SEQ ID NO: 385165 - RNA, 28 nt, Homo Sapiens
gaaagaaaauuuaaacauuugguucugg

SEQ ID NO: 385166 - RNA, 32 nt, Homo Sapiens
guucauugaaaauccucaaauaaaauauaauu

SEQ ID NO: 385167 - RNA, 32 nt, Homo Sapiens
agcagugcuuugugaaaugcaguguucucucu

SEQ ID NO: 385168 - RNA, 32 nt, Homo Sapiens
agagccacgggaggugcguccuuguuuuccag

SEQ ID NO: 385169 - RNA, 32 nt, Homo Sapiens
aguuguguggagggauggaaagugggucagug

SEQ ID NO: 385170 - RNA, 32 nt, Homo Sapiens
auaagcaguugaggaagaacgguccaugaguu

SEQ ID NO: 385171 - RNA, 32 nt, Homo Sapiens
uggccuuaauauauuuccauugugaccagcag

SEQ ID NO: 385172 - RNA, 32 nt, Homo Sapiens
ucccugaaggcacacguacgcacacacgcaca

SEQ ID NO: 385173 - RNA, 32 nt, Homo Sapiens
gcuggugguccaggccguggugccugccaggu

SEQ ID NO: 385174 - RNA, 32 nt, Homo Sapiens
cacgauguaaaaacccugucuuuuugcacgau

SEQ ID NO: 385175 - RNA, 32 nt, Homo Sapiens
aaacugagauuugaacaacaaagagaaaggca

SEQ ID NO: 385176 - RNA, 32 nt, Homo Sapiens
agagaauccuuccucagcucucuucuuuccag

SEQ ID NO: 385177 - RNA, 32 nt, Homo Sapiens
ucugugugguauauuguuuaaucaguucugug

SEQ ID NO: 385178 - RNA, 32 nt, Homo Sapiens
acagaucugguaggggcggggaaaugaggggg

SEQ ID NO: 385179 - RNA, 32 nt, Homo Sapiens
ggugccgugggggucagcagggcggagcggcu

SEQ ID NO: 385180 - RNA, 32 nt, Homo Sapiens
uaggacuuaucgcuuagaugacaauagugcuc

SEQ ID NO: 385181 - RNA, 32 nt, Homo Sapiens
agagcgggcggaccggggggcugggccggugc

SEQ ID NO: 385182 - RNA, 28 nt, Homo Sapiens
ucuggaguggcuacuugaggaugcgauc

SEQ ID NO: 385183 - RNA, 32 nt, Homo Sapiens
ccuuucaugucuuuccacuucucugggucccg

SEQ ID NO: 385184 - RNA, 32 nt, Homo Sapiens
acucacggacauuuuucaggaugagucgucca

SEQ ID NO: 385185 - RNA, 32 nt, Homo Sapiens
uccuauaucuuguuuuaucaagauuuuguugu

SEQ ID NO: 385186 - RNA, 32 nt, Homo Sapiens
auguaaaucuauauccaaaucuaaauguccau

SEQ ID NO: 385187 - RNA, 32 nt, Homo Sapiens
gaauaguuuuggaggggagaagugggacaaaa

SEQ ID NO: 385188 - RNA, 32 nt, Homo Sapiens
cuccuccggcggugggggccggguucaccagc

SEQ ID NO: 385189 - RNA, 32 nt, Homo Sapiens
uuuuauaaaacaugagaauaaguaucuuuggg

SEQ ID NO: 385190 - RNA, 32 nt, Homo Sapiens
aucaugggcacggagggccgcccgccacaccc

SEQ ID NO: 385191 - RNA, 32 nt, Homo Sapiens
ugugaacuuucuaggaaauauucauuaaaacc

SEQ ID NO: 385192 - RNA, 32 nt, Homo Sapiens
cugccgcgccugggccugagcggccgccuccu

SEQ ID NO: 385193 - RNA, 32 nt, Homo Sapiens
agguaugguggugcacgcuuguaaucccagcu

SEQ ID NO: 385194 - RNA, 30 nt, Homo Sapiens
ggcaggaguggcccugggggucccgggcac

SEQ ID NO: 385195 - RNA, 32 nt, Homo Sapiens
acgcccgccucccgcagaccauguuccauguu

SEQ ID NO: 385196 - RNA, 32 nt, Homo Sapiens
caaggggagaaccugguugcaggacaaacaga

SEQ ID NO: 385197 - RNA, 32 nt, Homo Sapiens
ugugugggcagucucgggucucucgggagaca

SEQ ID NO: 385198 - RNA, 32 nt, Homo Sapiens
aggugagcacauuuacagauauuuugcuucau

SEQ ID NO: 385199 - RNA, 32 nt, Homo Sapiens
guaauaagaguggacagcuguuauauguaaau

SEQ ID NO: 385200 - RNA, 32 nt, Homo Sapiens
guggaggaauacacauacacacacaaacauac

SEQ ID NO: 385201 - RNA, 32 nt, Homo Sapiens
agcuagaggagaagucuuagauuuuaagagua

SEQ ID NO: 385202 - RNA, 32 nt, Homo Sapiens
agauaagacagaggggaggaggugggcauuuc

SEQ ID NO: 385203 - RNA, 32 nt, Homo Sapiens
uuuaacgaucugggcuuugucaugguguuuua

SEQ ID NO: 385204 - RNA, 32 nt, Homo Sapiens
ucaagaacugccuguggaccgaggcccccuac

SEQ ID NO: 385205 - RNA, 32 nt, Homo Sapiens
ggcuucggccggcuaagccgcggccacccgcg

SEQ ID NO: 385206 - RNA, 32 nt, Homo Sapiens
ucuacuaaaaauacaaaauuagucgggcguag

SEQ ID NO: 385207 - RNA, 32 nt, Homo Sapiens
uuccuaaaacucagaaagauauuuuuauauua

SEQ ID NO: 385208 - RNA, 32 nt, Homo Sapiens
gugaggcggcccggcacugggagcugcaucug

SEQ ID NO: 385209 - RNA, 32 nt, Homo Sapiens
uagaaaccaagcccacggucuuggccgugacc

SEQ ID NO: 385210 - RNA, 28 nt, Homo Sapiens
cccaucaguggaaccaggaugguuaaag

SEQ ID NO: 385211 - RNA, 32 nt, Homo Sapiens
guuuuauuguugaacuaacaaauauuugggag

SEQ ID NO: 385212 - RNA, 32 nt, Homo Sapiens
uauaugaaaaagauuuaguaaaauacagugau

SEQ ID NO: 385213 - RNA, 32 nt, Homo Sapiens
gcagucauucuuucuacuaaauccauuucaag

SEQ ID NO: 385214 - RNA, 32 nt, Homo Sapiens
cgagccccccagcccccuccccgggauccgcg

SEQ ID NO: 385215 - RNA, 32 nt, Homo Sapiens
ccccauuaagaacuuuucuuuaccaaguauuu

SEQ ID NO: 385216 - RNA, 32 nt, Homo Sapiens
ugggccugcagccuuccucuucugggacugcu

SEQ ID NO: 385217 - RNA, 32 nt, Homo Sapiens
gucuaaaagcagucuuguuuccuggaaauaaa

SEQ ID NO: 385218 - RNA, 32 nt, Homo Sapiens
uacugaaaaaauagaaaaaugacuaagauaca

SEQ ID NO: 385219 - RNA, 31 nt, Homo Sapiens
uuucuuuuugagcugugauagauuauagucu

SEQ ID NO: 385220 - RNA, 28 nt, Homo Sapiens
gugcagcggcggccgccgaggagguucg

SEQ ID NO: 385221 - RNA, 32 nt, Homo Sapiens
guucugcaaaguccuuugaggaccagaacacg

SEQ ID NO: 385222 - RNA, 32 nt, Homo Sapiens
cuagguauuccugaguuuuacucugugacaca

SEQ ID NO: 385223 - RNA, 32 nt, Homo Sapiens
agcuuuuaaaauuuaugcauacguucuucaca

SEQ ID NO: 385224 - RNA, 32 nt, Homo Sapiens
uguuuucuggcaagaugugagauggaaaaaca

SEQ ID NO: 385225 - RNA, 32 nt, Homo Sapiens
caugcgcgcgggcguccgcggcucucccgacc

SEQ ID NO: 385226 - RNA, 32 nt, Homo Sapiens
uauuuugguuuauuccuuuuuauccauaaagu

SEQ ID NO: 385227 - RNA, 32 nt, Homo Sapiens
ucagcccaucucuaauuauaaaacaugguuuu

SEQ ID NO: 385228 - RNA, 32 nt, Homo Sapiens
uggcgaggggagagcagaggagaaggugguga

SEQ ID NO: 385229 - RNA, 32 nt, Homo Sapiens
gacucgcccuuggcucggcccgcggccccggc

SEQ ID NO: 385230 - RNA, 32 nt, Homo Sapiens
uucgucagagagcauguugaaguucuauuuua

SEQ ID NO: 385231 - RNA, 32 nt, Homo Sapiens
ccuaucuuauuaugaggcaaguauguuaagau

SEQ ID NO: 385232 - RNA, 32 nt, Homo Sapiens
aaugaaugucaaguuaaaauggcauguuuucu

SEQ ID NO: 385233 - RNA, 32 nt, Homo Sapiens
cccaagcagacaccacgugcuccuccuaagcc

SEQ ID NO: 385234 - RNA, 32 nt, Homo Sapiens
uagauggcucugcgggcaggugcuggccaagg

SEQ ID NO: 385235 - RNA, 32 nt, Homo Sapiens
uccagccugccucuucccaggcuggucugaca

SEQ ID NO: 385236 - RNA, 32 nt, Homo Sapiens
cauguguggagugugcugaacacacaccaguu

SEQ ID NO: 385237 - RNA, 32 nt, Homo Sapiens
acacuaagaacaaugcauacuggcaaagugag

SEQ ID NO: 385238 - RNA, 32 nt, Homo Sapiens
aauaacaccaaaagaaucaacacagaaucucc

SEQ ID NO: 385239 - RNA, 32 nt, Homo Sapiens
ccaugcggacccagcccgccgccuccaggagc

SEQ ID NO: 385240 - RNA, 32 nt, Homo Sapiens
cccucccucaguccucccuccccucccucagu

SEQ ID NO: 385241 - RNA, 32 nt, Homo Sapiens
uuaagauuuuggucagaaaugaacucuauuaa

SEQ ID NO: 385242 - RNA, 32 nt, Homo Sapiens
uuuugcaaagcaaacauagauuuggugauaag

SEQ ID NO: 385243 - RNA, 32 nt, Homo Sapiens
gaauucuaaaauucaaaacaggcauuucauuu

SEQ ID NO: 385244 - RNA, 32 nt, Homo Sapiens
acugaguucuggaagaaauaugcaaaaguggg

SEQ ID NO: 385245 - RNA, 32 nt, Homo Sapiens
uauacguggaugggagcagcuuugucaaccca

SEQ ID NO: 385246 - RNA, 32 nt, Homo Sapiens
ccggcgcccucccucagcccggguaucaggcg

SEQ ID NO: 385247 - RNA, 32 nt, Homo Sapiens
agugucaccugugccaaccauggggugucccg

SEQ ID NO: 385248 - RNA, 32 nt, Homo Sapiens
ugccuggugccccgaggaggcugcugagcccc

SEQ ID NO: 385249 - RNA, 32 nt, Homo Sapiens
gaucccugcccccgaggcacgcacuggggcgc

SEQ ID NO: 385250 - RNA, 32 nt, Homo Sapiens
gcugccuuaaaacuuuuuucuuccaugcacaa

SEQ ID NO: 385251 - RNA, 32 nt, Homo Sapiens
aacuacccauuuucuuuuuuuggaacucauga

SEQ ID NO: 385252 - RNA, 32 nt, Homo Sapiens
gguugccucgaguccccccaccccuccccacc

SEQ ID NO: 385253 - RNA, 32 nt, Homo Sapiens
ccagggggccgcgucuucggcaaagucuucgg

SEQ ID NO: 385254 - RNA, 32 nt, Homo Sapiens
uguugcuguuuuuucuuuuuuauguuuuguuc

SEQ ID NO: 385255 - RNA, 32 nt, Homo Sapiens
ggcgcgcucccgcgcagcggcgccaugaagcg

SEQ ID NO: 385256 - RNA, 32 nt, Homo Sapiens
agcaccccaagccccacgaccaucguucugaa

SEQ ID NO: 385257 - RNA, 32 nt, Homo Sapiens
gagccaccgcucucggcccccuugcuuuuaau

SEQ ID NO: 385258 - RNA, 32 nt, Homo Sapiens
guuuuccgaggcggccccgggcggguggauug

SEQ ID NO: 385259 - RNA, 32 nt, Homo Sapiens
ugcacauagaggggagaaaaagagaauuuagg

SEQ ID NO: 385260 - RNA, 32 nt, Homo Sapiens
gcuaggagucccaauuauuuuugacuagggga

SEQ ID NO: 385261 - RNA, 32 nt, Homo Sapiens
gcgcuuggggagccgcccacuucgccgggucg

SEQ ID NO: 385262 - RNA, 32 nt, Homo Sapiens
uuaaaacuaggcaucaaugaaccuguuuuucc

SEQ ID NO: 385263 - RNA, 32 nt, Homo Sapiens
gauacuugcacguagaaagagguaauuuucau

SEQ ID NO: 385264 - RNA, 32 nt, Homo Sapiens
ugccugcccugggccagggaauggcuccuuau

SEQ ID NO: 385265 - RNA, 32 nt, Homo Sapiens
cauauuuuaaguguuaaaugaaucaaugcuca

SEQ ID NO: 385266 - RNA, 32 nt, Homo Sapiens
cuggcccgggccgggggagccggcgcugacca

SEQ ID NO: 385267 - RNA, 32 nt, Homo Sapiens
acccgcugcuccugcugcucccggggauggag

SEQ ID NO: 385268 - RNA, 32 nt, Homo Sapiens
acgcggcccuccccucgcucaugcccucccgc

SEQ ID NO: 385269 - RNA, 32 nt, Homo Sapiens
ugacuucuggucuuaaagagucccucacuuca

SEQ ID NO: 385270 - RNA, 32 nt, Homo Sapiens
gaauaacccugacuucugagcuuucauaaccc

SEQ ID NO: 385271 - RNA, 32 nt, Homo Sapiens
gaccugugcgccccgccccgcgcuggacuccg

SEQ ID NO: 385272 - RNA, 32 nt, Homo Sapiens
ucccacuugagguugaggcguacuggagacaa

SEQ ID NO: 385273 - RNA, 31 nt, Homo Sapiens
ccacaaacaaauucagguagagaaguuguag

SEQ ID NO: 385274 - RNA, 32 nt, Homo Sapiens
cucaaaaaacaucgucaguugugauucaaaua

SEQ ID NO: 385275 - RNA, 28 nt, Homo Sapiens
uccaagguuacagggcuuaucuggugag

SEQ ID NO: 385276 - RNA, 32 nt, Homo Sapiens
caccuugaucagcgucccaguuucacagccag

SEQ ID NO: 385277 - RNA, 32 nt, Homo Sapiens
cuauuaucuauuucaucaguuauugaauuaag

SEQ ID NO: 385278 - RNA, 32 nt, Homo Sapiens
uuggcgccugcgccggcggaccgugaccgagg

SEQ ID NO: 385279 - RNA, 32 nt, Homo Sapiens
ucaggcuuuuucuccacacuuguaugccaaug

SEQ ID NO: 385280 - RNA, 32 nt, Homo Sapiens
auggagaagaucuggcaccacaccuucuacga

SEQ ID NO: 385281 - RNA, 32 nt, Homo Sapiens
gagaaaugggccgggugcaguggcuaaagccu

SEQ ID NO: 385282 - RNA, 32 nt, Homo Sapiens
cacaaaccaaccccaaagcuagcagaagacaa

SEQ ID NO: 385283 - RNA, 32 nt, Homo Sapiens
ugggcugacuacucaacaaaggacaagauaaa

SEQ ID NO: 385284 - RNA, 32 nt, Homo Sapiens
gggcagggcucuuuuccuguugugucuucccc

SEQ ID NO: 385285 - RNA, 32 nt, Homo Sapiens
ucccugcuguggcucaccugcugcugucucca

SEQ ID NO: 385286 - RNA, 32 nt, Homo Sapiens
ccgcugcgauguugcgcgcugccgcccgcuuc

SEQ ID NO: 385287 - RNA, 32 nt, Homo Sapiens
cauuacgcugcuggcuggcagcggccgggccg

SEQ ID NO: 385288 - RNA, 32 nt, Homo Sapiens
aucucguuauuuauuggagguauuguuuaacc

SEQ ID NO: 385289 - RNA, 32 nt, Homo Sapiens
cgcuggcagcggccgcugaggugcuggccggc

SEQ ID NO: 385290 - RNA, 32 nt, Homo Sapiens
ucaaaaaacgauuuaauguaaaaaguguuucc

SEQ ID NO: 385291 - RNA, 32 nt, Homo Sapiens
cuaugcaguuaauacaaguauuacugugaaga

SEQ ID NO: 385292 - RNA, 32 nt, Homo Sapiens
ggcuggagugcaguggcacgauuauggcucau

SEQ ID NO: 385293 - RNA, 32 nt, Homo Sapiens
aaaccuaagaauuuauaaagcacuuccuuaca

SEQ ID NO: 385294 - RNA, 32 nt, Homo Sapiens
uccuccuguggcuacauagugcauauaacuac

SEQ ID NO: 385295 - RNA, 32 nt, Homo Sapiens
gccuuucuuuugcuuuugcuucucuccucuga

SEQ ID NO: 385296 - RNA, 32 nt, Homo Sapiens
aauguuucuaacuagauuuuugauuuguguuc

SEQ ID NO: 385297 - RNA, 32 nt, Homo Sapiens
aaaccgcagacacuacgaugcacuccucaagc

SEQ ID NO: 385298 - RNA, 32 nt, Homo Sapiens
uuuccuuauuuuacaaggucucucuucaggga

SEQ ID NO: 385299 - RNA, 32 nt, Homo Sapiens
guagagauuggaaagauuguugggaguggcac

SEQ ID NO: 385300 - RNA, 32 nt, Homo Sapiens
uaagauggcccggcgcgguggcucccgccugu

SEQ ID NO: 385301 - RNA, 32 nt, Homo Sapiens
gggcagagggccugguggggccccuugcuagg

SEQ ID NO: 385302 - RNA, 32 nt, Homo Sapiens
aagcuuaguuuauuguaagaauacaguauaaa

SEQ ID NO: 385303 - RNA, 32 nt, Homo Sapiens
aaacaggcaaauuuaaacuugggcaaguaauu

SEQ ID NO: 385304 - RNA, 32 nt, Homo Sapiens
gagaauuccuuccuccucauccuugguguugc

SEQ ID NO: 385305 - RNA, 32 nt, Homo Sapiens
cauuuguuauugucucuuuuuaauuuuagcca

SEQ ID NO: 385306 - RNA, 32 nt, Homo Sapiens
acugcccggcgccgccucgccauggacgcgcg

SEQ ID NO: 385307 - RNA, 32 nt, Homo Sapiens
gccgccaucgaugaccccggucgcggacuugc

SEQ ID NO: 385308 - RNA, 32 nt, Homo Sapiens
uuaauaggagccuggugaguggaggagacuga

SEQ ID NO: 385309 - RNA, 32 nt, Homo Sapiens
auugugauucuuuccccacgucuugcauguau

SEQ ID NO: 385310 - RNA, 32 nt, Homo Sapiens
ggcccggcgacugaggggaggggcggggccag

SEQ ID NO: 385311 - RNA, 32 nt, Homo Sapiens
ucgcgcaaccucccucgccuccccuucccccg

SEQ ID NO: 385312 - RNA, 32 nt, Homo Sapiens
gccccugcagugccguccacccgccccucugg

SEQ ID NO: 385313 - RNA, 32 nt, Homo Sapiens
ugacugcucccccaagccccucgcagaccgca

SEQ ID NO: 385314 - RNA, 32 nt, Homo Sapiens
aagagaagcuuacuggcccagcccuaauggcu

SEQ ID NO: 385315 - RNA, 32 nt, Homo Sapiens
aaguggucugcacaugcccuguugaggacguu

SEQ ID NO: 385316 - RNA, 32 nt, Homo Sapiens
agacggacaggggcucugggcggccggggagc

SEQ ID NO: 385317 - RNA, 32 nt, Homo Sapiens
cucccucuagcgccuuccccccggcccgacuc

SEQ ID NO: 385318 - RNA, 32 nt, Homo Sapiens
uuggagaaagcugguucccguuuuccagaggg

SEQ ID NO: 385319 - RNA, 32 nt, Homo Sapiens
gccaucccgucuucuccaacaccaccucucca

SEQ ID NO: 385320 - RNA, 32 nt, Homo Sapiens
gcuugguuauacugguagaggugcugggcugg

SEQ ID NO: 385321 - RNA, 32 nt, Homo Sapiens
caucaaugugaagguauuuaaugccacugaac

SEQ ID NO: 385322 - RNA, 32 nt, Homo Sapiens
aaaauaagaacuaaugauggcuaaacacuaaa

SEQ ID NO: 385323 - RNA, 32 nt, Homo Sapiens
agcccugggcgcgggggcggcgugucaggugg

SEQ ID NO: 385324 - RNA, 26 nt, Homo Sapiens
caugacccugggcagcugcugcugcg

SEQ ID NO: 385325 - RNA, 32 nt, Homo Sapiens
aggaacuagggucagaaugaugugguuugguu

SEQ ID NO: 385326 - RNA, 32 nt, Homo Sapiens
ggauaacucaacauguuuuucuuaaaugcugu

SEQ ID NO: 385327 - RNA, 32 nt, Homo Sapiens
cggucugcccggaggcggcugcaccagggcag

SEQ ID NO: 385328 - RNA, 32 nt, Homo Sapiens
cugcaaccuccgccucccggguucaagaaguu

SEQ ID NO: 385329 - RNA, 32 nt, Homo Sapiens
uccccaaacucaaauugcacccgccccagcuu

SEQ ID NO: 385330 - RNA, 32 nt, Homo Sapiens
cuuuaggcaugcgugcauauguguguaugugu

SEQ ID NO: 385331 - RNA, 32 nt, Homo Sapiens
ccuguguuuaaaaagaucuuguaccaagccaa

SEQ ID NO: 385332 - RNA, 32 nt, Homo Sapiens
uggcaggaugacccugcgaaggggcccugguc

SEQ ID NO: 385333 - RNA, 32 nt, Homo Sapiens
aauguaaaauucuuuuaccaugucaagaaauu

SEQ ID NO: 385334 - RNA, 32 nt, Homo Sapiens
gcuaauuccagaaacuugugguuuuuaguaua

SEQ ID NO: 385335 - RNA, 32 nt, Homo Sapiens
gcagcuggcccacaggugugggcuugcugguc

SEQ ID NO: 385336 - RNA, 32 nt, Homo Sapiens
gugccugagaaccacugcugcauauauuuguu

SEQ ID NO: 385337 - RNA, 32 nt, Homo Sapiens
agcccccgucugucccccaacccaggcuagcc

SEQ ID NO: 385338 - RNA, 32 nt, Homo Sapiens
ccugaagugaggcugcacacacagcuucccag

SEQ ID NO: 385339 - RNA, 32 nt, Homo Sapiens
aauauuugcugggugauuuaaauguguggguc

SEQ ID NO: 385340 - RNA, 32 nt, Homo Sapiens
ucccaucucccgccccgcacaacccgggcagg

SEQ ID NO: 385341 - RNA, 32 nt, Homo Sapiens
uuccuuccagugucauuucucauccacauacc

SEQ ID NO: 385342 - RNA, 32 nt, Homo Sapiens
cccuccccgagcuggcccagcacaaggcagac

SEQ ID NO: 385343 - RNA, 32 nt, Homo Sapiens
aagauugauguaucuguaaauauugcaguuuu

SEQ ID NO: 385344 - RNA, 32 nt, Homo Sapiens
gccaagcccugccugauguggcucugggaauu

SEQ ID NO: 385345 - RNA, 32 nt, Homo Sapiens
cccgaggcggacgugagaagggucgggccaag

SEQ ID NO: 385346 - RNA, 32 nt, Homo Sapiens
ggccggcggcguuuuccagcucgagugcucag

SEQ ID NO: 385347 - RNA, 32 nt, Homo Sapiens
gauuucugcuuuuuauuuucuauuuucuucug

SEQ ID NO: 385348 - RNA, 32 nt, Homo Sapiens
gacugcuuugugugcuggccccugcuuuacuc

SEQ ID NO: 385349 - RNA, 32 nt, Homo Sapiens
cuuaugccagaccagcaguaucucauuuggau

SEQ ID NO: 385350 - RNA, 32 nt, Homo Sapiens
gauucugcagagccugagcugcugcuguggug

SEQ ID NO: 385351 - RNA, 32 nt, Homo Sapiens
guggccagugcagcuucugacggucuucugcg

SEQ ID NO: 385352 - RNA, 32 nt, Homo Sapiens
cauaccuuuauucuuuuuuuuaaccaaaaaag

SEQ ID NO: 385353 - RNA, 32 nt, Homo Sapiens
gaagugacuccguuccacuccuccuuuauucc

SEQ ID NO: 385354 - RNA, 32 nt, Homo Sapiens
ucccagcacucaaccaaccuccccgcagagcu

SEQ ID NO: 385355 - RNA, 32 nt, Homo Sapiens
agacgcauguaaacagaauauuugaaucuuug

SEQ ID NO: 385356 - RNA, 32 nt, Homo Sapiens
uuuauaguugauacuugccuauagaaauguuu

SEQ ID NO: 385357 - RNA, 32 nt, Homo Sapiens
gccuuuuggccauccccuucaguucacaaaag

SEQ ID NO: 385358 - RNA, 32 nt, Homo Sapiens
cuuuacaggguucucagagaugugggguauac

SEQ ID NO: 385359 - RNA, 32 nt, Homo Sapiens
gacugcgccauggccuggaucugcugcagugu

SEQ ID NO: 385360 - RNA, 32 nt, Homo Sapiens
acacaggaauuccaccugaagacuuguguuaa

SEQ ID NO: 385361 - RNA, 32 nt, Homo Sapiens
uacucagagauuaacaaucucaaucauacaua

SEQ ID NO: 385362 - RNA, 32 nt, Homo Sapiens
cucucucacacacacacacacacacacagucc

SEQ ID NO: 385363 - RNA, 32 nt, Homo Sapiens
gaggcuuguaaaaauauagguuagcuugaugu

SEQ ID NO: 385364 - RNA, 32 nt, Homo Sapiens
guagcgcggcgcgcaggcuccucggaacgucc

SEQ ID NO: 385365 - RNA, 32 nt, Homo Sapiens
uauauggcaugaaaucucugguuuauuuuggg

SEQ ID NO: 385366 - RNA, 32 nt, Homo Sapiens
cuguuucugaugcguuggcguggggggugggc

SEQ ID NO: 385367 - RNA, 32 nt, Homo Sapiens
ggcugcggggagggaucauggauacuugucug

SEQ ID NO: 385368 - RNA, 32 nt, Homo Sapiens
cgcccucccuuggcguggagccagggagcggc

SEQ ID NO: 385369 - RNA, 32 nt, Homo Sapiens
gagcgcgggccaccccacccuguucauuucca

SEQ ID NO: 385370 - RNA, 32 nt, Homo Sapiens
ggccaagacgccuuaacgcuguguguaugacu

SEQ ID NO: 385371 - RNA, 32 nt, Homo Sapiens
ugcacagacucuuagcagacaagcagggaaaa

SEQ ID NO: 385372 - RNA, 32 nt, Homo Sapiens
gaccuuugcucauggcggcggcggcggcggcg

SEQ ID NO: 385373 - RNA, 32 nt, Homo Sapiens
ugugcucugagcaggagcugccaccgcccacc

SEQ ID NO: 385374 - RNA, 32 nt, Homo Sapiens
gcaaacaaaaaucugcgaacaaugaaacuaaa

SEQ ID NO: 385375 - RNA, 32 nt, Homo Sapiens
aggugcaaaaagacaacuaaaauacccauuug

SEQ ID NO: 385376 - RNA, 29 nt, Homo Sapiens
guuucuugauucauuuagaccagcacauu

SEQ ID NO: 385377 - RNA, 32 nt, Homo Sapiens
cuaggaaggggagcauucaggaacacuuuuuu

SEQ ID NO: 385378 - RNA, 32 nt, Homo Sapiens
cccaagccccacugaugauggcugagagggaa

SEQ ID NO: 385379 - RNA, 32 nt, Homo Sapiens
ggagccuuucccgaguggguccuuccaacacc

SEQ ID NO: 385380 - RNA, 32 nt, Homo Sapiens
gcugcucugcucaccagccugaccccacccag

SEQ ID NO: 385381 - RNA, 32 nt, Homo Sapiens
cuccaagauugccgggaagcuccugggggaug

SEQ ID NO: 385382 - RNA, 32 nt, Homo Sapiens
caaguuugaagaaacauccaaaaguuauguga

SEQ ID NO: 385383 - RNA, 32 nt, Homo Sapiens
ccgagcagggguggagagccggggccagcagc

SEQ ID NO: 385384 - RNA, 32 nt, Homo Sapiens
ggggaagccgagggcugccggagaacccugca

SEQ ID NO: 385385 - RNA, 32 nt, Homo Sapiens
aagggaaauggcaagggagcauuccaggagag

SEQ ID NO: 385386 - RNA, 32 nt, Homo Sapiens
agacugaguaauuuauaaagaagagguuuaau

SEQ ID NO: 385387 - RNA, 32 nt, Homo Sapiens
uaaaaacacuuuuuuucuuuuggauuucuggu

SEQ ID NO: 385388 - RNA, 32 nt, Homo Sapiens
gauaggggagguggagauuccaggggugggug

SEQ ID NO: 385389 - RNA, 32 nt, Homo Sapiens
ccauuugugucugaagggcugaagauguggac

SEQ ID NO: 385390 - RNA, 32 nt, Homo Sapiens
cauucucuugggggagucuuggcacuuugcaa

SEQ ID NO: 385391 - RNA, 32 nt, Homo Sapiens
aacacagguucugauguggaggaggcgguggc

SEQ ID NO: 385392 - RNA, 32 nt, Homo Sapiens
uugaggucugugagcuggauauuaucuuuaau

SEQ ID NO: 385393 - RNA, 32 nt, Homo Sapiens
gaaagguccacuucuaguuuugucuguuacua

SEQ ID NO: 385394 - RNA, 32 nt, Homo Sapiens
uccaauagagauaaaacaagauauacuggaaa

SEQ ID NO: 385395 - RNA, 32 nt, Homo Sapiens
caggaacuaggagguucucacugcccgagcag

SEQ ID NO: 385396 - RNA, 32 nt, Homo Sapiens
gcucagcccggcgaccccugcgggcuccagac

SEQ ID NO: 385397 - RNA, 32 nt, Homo Sapiens
cugagacccgcacccugguuguucacagcccc

SEQ ID NO: 385398 - RNA, 32 nt, Homo Sapiens
ccuccucugccagcuccaccacuuccucccag

SEQ ID NO: 385399 - RNA, 32 nt, Homo Sapiens
gccacacagaaauuauacaaucaaacuagauc

SEQ ID NO: 385400 - RNA, 32 nt, Homo Sapiens
cccuggggcagacacuaaggcagguguugaag

SEQ ID NO: 385401 - RNA, 32 nt, Homo Sapiens
acacguuuuuauuugcacaaagaaaaugcuau

SEQ ID NO: 385402 - RNA, 29 nt, Homo Sapiens
cggcgggccgggaugcggacgccgguggu

SEQ ID NO: 385403 - RNA, 32 nt, Homo Sapiens
ccucugcugcccccuuccccagcccuuagcac

SEQ ID NO: 385404 - RNA, 32 nt, Homo Sapiens
uuuuucccaagccgccaucuuccagcugacca

SEQ ID NO: 385405 - RNA, 32 nt, Homo Sapiens
uguagacauaucuaauagugguuuuccuugcg

SEQ ID NO: 385406 - RNA, 32 nt, Homo Sapiens
uuuuuuuuuuuuuuuuuuuuuagagacaggga

SEQ ID NO: 385407 - RNA, 32 nt, Homo Sapiens
uggcuaaauauguauuuguugaaacauguaua

SEQ ID NO: 385408 - RNA, 32 nt, Homo Sapiens
auuuuugucucuucugguggagcugugccugg

SEQ ID NO: 385409 - RNA, 32 nt, Homo Sapiens
acuuuucaguuuucuuuuuuuuuaauauauuu

SEQ ID NO: 385410 - RNA, 32 nt, Homo Sapiens
ccggugcggggcccgcgccccccgagcagguu

SEQ ID NO: 385411 - RNA, 32 nt, Homo Sapiens
cuugcuuguucccccaugcuuaaccccauuau

SEQ ID NO: 385412 - RNA, 32 nt, Homo Sapiens
cggcuggcuguccuggagcugcugcuggagcc

SEQ ID NO: 385413 - RNA, 32 nt, Homo Sapiens
gcccgugugcacccucgauuuggaagguccuc

SEQ ID NO: 385414 - RNA, 32 nt, Homo Sapiens
agcugguggauggucagguucuuccaauaugg

SEQ ID NO: 385415 - RNA, 32 nt, Homo Sapiens
cccuggggcgggggcggguccuggggacuggg

SEQ ID NO: 385416 - RNA, 32 nt, Homo Sapiens
caucacugucaggcugcccacagcaacaccaa

SEQ ID NO: 385417 - RNA, 32 nt, Homo Sapiens
ggucuucauuuuuuaggggugcacuaauggau

SEQ ID NO: 385418 - RNA, 32 nt, Homo Sapiens
cagcccucucucucacagcaguguuccagguu

SEQ ID NO: 385419 - RNA, 32 nt, Homo Sapiens
aaacaaccaacccuucauggcucuccuucagc

SEQ ID NO: 385420 - RNA, 32 nt, Homo Sapiens
caagcaauuuaacuuuuucuuguaaugucaug

SEQ ID NO: 385421 - RNA, 32 nt, Homo Sapiens
agaggauauugccaguuuucuaauggauuauu

SEQ ID NO: 385422 - RNA, 32 nt, Homo Sapiens
agcggacucuuccauuccuccuccucuagggg

SEQ ID NO: 385423 - RNA, 32 nt, Homo Sapiens
cuccaguguucccuucuggcugucagucgugu

SEQ ID NO: 385424 - RNA, 32 nt, Homo Sapiens
gccucauccacugucugcuagcaaagaaugua

SEQ ID NO: 385425 - RNA, 32 nt, Homo Sapiens
cggggucuggggggcucugcagcugcccagcu

SEQ ID NO: 385426 - RNA, 27 nt, Homo Sapiens
guuauuuccuucuuuuauccucuuaac

SEQ ID NO: 385427 - RNA, 32 nt, Homo Sapiens
cuccuuuggccauuccaacagcucaagucuuc

SEQ ID NO: 385428 - RNA, 32 nt, Homo Sapiens
gaaaccgcaccuccccgcagcaugggcaccag

SEQ ID NO: 385429 - RNA, 32 nt, Homo Sapiens
gaaaaccugaaaauauaaagaauaggauauga

SEQ ID NO: 385430 - RNA, 32 nt, Homo Sapiens
cuguuucuuuaaaaucccuuaauuuucccauc

SEQ ID NO: 385431 - RNA, 32 nt, Homo Sapiens
uuagaagugaauguuuuucuguaccaucuaug

SEQ ID NO: 385432 - RNA, 32 nt, Homo Sapiens
uuuucuguugagucuauucuuaagaggccuuc

SEQ ID NO: 385433 - RNA, 32 nt, Homo Sapiens
ucaccucgcagccuuccacaccuguugaucug

SEQ ID NO: 385434 - RNA, 32 nt, Homo Sapiens
uuugacuuaauccuaauaaauuuuuguuacaa

SEQ ID NO: 385435 - RNA, 32 nt, Homo Sapiens
agucuuugcaguaucugacagagaacucacag

SEQ ID NO: 385436 - RNA, 32 nt, Homo Sapiens
aucuucacccagaaacaaagaauacugaagcc

SEQ ID NO: 385437 - RNA, 32 nt, Homo Sapiens
gaagugggcuuccgcgaucgcggggaccaacg

SEQ ID NO: 385438 - RNA, 32 nt, Homo Sapiens
ucauagaaagucacuuuaauagauagggacag

SEQ ID NO: 385439 - RNA, 31 nt, Homo Sapiens
auucauauacagaaaaaauaagguguuacaa

SEQ ID NO: 385440 - RNA, 32 nt, Homo Sapiens
auucuuuccaauuuuucucuuguuuucuagaa

SEQ ID NO: 385441 - RNA, 32 nt, Homo Sapiens
uuucuuauuuuuguauccuuuuucagauguaa

SEQ ID NO: 385442 - RNA, 27 nt, Homo Sapiens
ugugugaccuucuucaaguuccugacc

SEQ ID NO: 385443 - RNA, 32 nt, Homo Sapiens
aacucaaccaugauuucuuuuucaacucuaca

SEQ ID NO: 385444 - RNA, 32 nt, Homo Sapiens
ugcuccaaccaccugaacaucuaaguaaacau

SEQ ID NO: 385445 - RNA, 32 nt, Homo Sapiens
ucagagugggggugggggcaugggaggggcag

SEQ ID NO: 385446 - RNA, 32 nt, Homo Sapiens
cugccccucccgcugcguguccagguccaaag

SEQ ID NO: 385447 - RNA, 32 nt, Homo Sapiens
caggaggagggaggagcugguagggagaugcu

SEQ ID NO: 385448 - RNA, 32 nt, Homo Sapiens
guugauaacaagaagaauaaagggcagcucac

SEQ ID NO: 385449 - RNA, 32 nt, Homo Sapiens
gauggugcaaccaaaacaaucagacucuucgu

SEQ ID NO: 385450 - RNA, 32 nt, Homo Sapiens
gacgagcaaaagaaacaaaaucuugccacgug

SEQ ID NO: 385451 - RNA, 32 nt, Homo Sapiens
cgaauucauaauguaacuuauaauuauuagaa

SEQ ID NO: 385452 - RNA, 32 nt, Homo Sapiens
aaauuggaaaauucaaagcacuauauuucaua

SEQ ID NO: 385453 - RNA, 32 nt, Homo Sapiens
aacagauguuccucagaaauccagacaauuau

SEQ ID NO: 385454 - RNA, 32 nt, Homo Sapiens
aggaacccaagccaccccggcuccccucgccu

SEQ ID NO: 385455 - RNA, 32 nt, Homo Sapiens
uccugagcauccacuaaaauuauucuuccuaa

SEQ ID NO: 385456 - RNA, 32 nt, Homo Sapiens
gcggccgcccgacgagccccucgcggcacugc

SEQ ID NO: 385457 - RNA, 32 nt, Homo Sapiens
agugacaaagaguauuauuaaaauacaauguu

SEQ ID NO: 385458 - RNA, 32 nt, Homo Sapiens
guuuaccucaguuuccucuuucagucuguggu

SEQ ID NO: 385459 - RNA, 32 nt, Homo Sapiens
uacaauauauuuuuauacugugacuuaauuug

SEQ ID NO: 385460 - RNA, 32 nt, Homo Sapiens
ugccaagaaauauauauuugucacuagggcau

SEQ ID NO: 385461 - RNA, 32 nt, Homo Sapiens
gggcugugaacagaucuuauuugaaaccagua

SEQ ID NO: 385462 - RNA, 32 nt, Homo Sapiens
uuacagggauauuuuuaaucccguuauggacu

SEQ ID NO: 385463 - RNA, 32 nt, Homo Sapiens
agagacgagucaguaagcauucauucauuagu

SEQ ID NO: 385464 - RNA, 32 nt, Homo Sapiens
agacugaaguguucuucaguaauugugcuggc

SEQ ID NO: 385465 - RNA, 32 nt, Homo Sapiens
ggagguccggccacugcaccccgaggaaaggg

SEQ ID NO: 385466 - RNA, 32 nt, Homo Sapiens
cccguccacaguggcaucacccucuuauccca

SEQ ID NO: 385467 - RNA, 32 nt, Homo Sapiens
cagugagaggaaagauucugggugcucaugaa

SEQ ID NO: 385468 - RNA, 32 nt, Homo Sapiens
cuuuaucugaagacaaacucauuuaaucaucu

SEQ ID NO: 385469 - RNA, 32 nt, Homo Sapiens
gugggcuaauuugucucucauuuugggcccuu

SEQ ID NO: 385470 - RNA, 32 nt, Homo Sapiens
ccugccaggcagggcacgugcucacagcccug

SEQ ID NO: 385471 - RNA, 32 nt, Homo Sapiens
gacaggggcccucucccuccccggcggugguu

SEQ ID NO: 385472 - RNA, 32 nt, Homo Sapiens
augcaggaauaauagaaccuguugugcaacca

SEQ ID NO: 385473 - RNA, 32 nt, Homo Sapiens
uuuguguguucauuuuaauguaagauauauaa

SEQ ID NO: 385474 - RNA, 32 nt, Homo Sapiens
cauggaucuguuucuuuuuuuauuuacacuuu

SEQ ID NO: 385475 - RNA, 32 nt, Homo Sapiens
cugcucugcccuggccucuccugcucauucuu

SEQ ID NO: 385476 - RNA, 32 nt, Homo Sapiens
gcuguacugccgggcccgggggcugcccuucc

SEQ ID NO: 385477 - RNA, 32 nt, Homo Sapiens
acaguaaacguuugugaaugaaugggagucau

SEQ ID NO: 385478 - RNA, 32 nt, Homo Sapiens
ggagauuaugaguaagcugauuugaauuuuca

SEQ ID NO: 385479 - RNA, 32 nt, Homo Sapiens
ccugggguggaggucugggcacgccgggucgg

SEQ ID NO: 385480 - RNA, 32 nt, Homo Sapiens
uggccuugcugagcuggacuuccuccuccucc

SEQ ID NO: 385481 - RNA, 32 nt, Homo Sapiens
acauaaggccucaugaaugcagcaaaugugga

SEQ ID NO: 385482 - RNA, 31 nt, Homo Sapiens
gggacgagggcgggaugucugccuccaguuc

SEQ ID NO: 385483 - RNA, 32 nt, Homo Sapiens
ucucggccccuguagacuuucucuaaagccgc

SEQ ID NO: 385484 - RNA, 32 nt, Homo Sapiens
aaaugccauuaucaaaaaucaggauaucacag

SEQ ID NO: 385485 - RNA, 32 nt, Homo Sapiens
accuggaggagccugccuggggccugccucug

SEQ ID NO: 385486 - RNA, 32 nt, Homo Sapiens
ggaggccaggacaccuggaagccgggaaaugg

SEQ ID NO: 385487 - RNA, 32 nt, Homo Sapiens
acccccucccagcccccuccccucugcucaac

SEQ ID NO: 385488 - RNA, 32 nt, Homo Sapiens
caacaugcaucucacucugggugucuuggucu

SEQ ID NO: 385489 - RNA, 32 nt, Homo Sapiens
aucaggguucucuggaguauuuguaggaccug

SEQ ID NO: 385490 - RNA, 32 nt, Homo Sapiens
aguaacacacaccauauauaaaacagccuuuc

SEQ ID NO: 385491 - RNA, 32 nt, Homo Sapiens
ggcagaucuaucagaaccccuaccacauaaua

SEQ ID NO: 385492 - RNA, 32 nt, Homo Sapiens
auuaguuuaaacaguuaagaacauuuagucca

SEQ ID NO: 385493 - RNA, 32 nt, Homo Sapiens
cccacacuucgcgacccuccucccgcgcccgg

SEQ ID NO: 385494 - RNA, 32 nt, Homo Sapiens
ccccacugcauaaaugaggaucuugagguuaa

SEQ ID NO: 385495 - RNA, 32 nt, Homo Sapiens
ugagcagccucaaccguagcugcuacagucuc

SEQ ID NO: 385496 - RNA, 32 nt, Homo Sapiens
agaccagccagacaagcacuuuauaagccuga

SEQ ID NO: 385497 - RNA, 32 nt, Homo Sapiens
gccuggacucgcgggcggcggcgagcgccuuu

SEQ ID NO: 385498 - RNA, 32 nt, Homo Sapiens
uccagcaggaagggcugcagacucggccuguu

SEQ ID NO: 385499 - RNA, 32 nt, Homo Sapiens
auguccacguauguauguguguuucaguaugu

SEQ ID NO: 385500 - RNA, 32 nt, Homo Sapiens
auauuuucucucaucuaacaaacacaauccau

SEQ ID NO: 385501 - RNA, 32 nt, Homo Sapiens
gccccuccauucuccuggcccuucuggggguc

SEQ ID NO: 385502 - RNA, 32 nt, Homo Sapiens
cgcgacugcugcugcugcugcccggacgugga

SEQ ID NO: 385503 - RNA, 32 nt, Homo Sapiens
gaggcuggagguggagauggggucaggaacau

SEQ ID NO: 385504 - RNA, 31 nt, Homo Sapiens
ucucgcgcccggagaaacaugauucccguga

SEQ ID NO: 385505 - RNA, 32 nt, Homo Sapiens
guguaucucauuauuucauacuguuuuacuaa

SEQ ID NO: 385506 - RNA, 32 nt, Homo Sapiens
cucacugcaaccuccgccucccggguuccagc

SEQ ID NO: 385507 - RNA, 32 nt, Homo Sapiens
aauucaugauaggcuucgauuuccugugacac

SEQ ID NO: 385508 - RNA, 32 nt, Homo Sapiens
aucucccaaagccccaaauuccuguuagccag

SEQ ID NO: 385509 - RNA, 32 nt, Homo Sapiens
aaacuugcuuuaggaacagcucaagaaccuug

SEQ ID NO: 385510 - RNA, 32 nt, Homo Sapiens
cacagcguuuccccccaucccuguugccugug

SEQ ID NO: 385511 - RNA, 32 nt, Homo Sapiens
aguccaauuuauugagggauagauuguaucuc

SEQ ID NO: 385512 - RNA, 32 nt, Homo Sapiens
uauuuuuguaacagacaaaaaauauuaccaua

SEQ ID NO: 385513 - RNA, 32 nt, Homo Sapiens
uacuuucauacucuucuaaguccucuuccagc

SEQ ID NO: 385514 - RNA, 32 nt, Homo Sapiens
gagaaaggagagaggaggguuggaggugcaug

SEQ ID NO: 385515 - RNA, 32 nt, Homo Sapiens
cauagacuaaugacauuuaucuucaaaacacc

SEQ ID NO: 385516 - RNA, 32 nt, Homo Sapiens
agcuaaggcucacuuuugauagauaauauaua

SEQ ID NO: 385517 - RNA, 32 nt, Homo Sapiens
cucgaggaaccuggucuccgcauccaguuacc

SEQ ID NO: 385518 - RNA, 32 nt, Homo Sapiens
uuaauaucugcucauaucuuaacaucagcgag

SEQ ID NO: 385519 - RNA, 32 nt, Homo Sapiens
agucuaccacuguacaucugguaaccucaauc

SEQ ID NO: 385520 - RNA, 32 nt, Homo Sapiens
ccacauccgaagcacaaggaccucaagucacc

SEQ ID NO: 385521 - RNA, 32 nt, Homo Sapiens
agggcccuggguaccugugcacuuccuuggug

SEQ ID NO: 385522 - RNA, 29 nt, Homo Sapiens
augaggaugaagauaaggaagauacguua

SEQ ID NO: 385523 - RNA, 32 nt, Homo Sapiens
guaaaaucgaguccaaaccaacggcucuuuuc

SEQ ID NO: 385524 - RNA, 32 nt, Homo Sapiens
ggggaccuuaguaaaugacacuaccauugugc

SEQ ID NO: 385525 - RNA, 32 nt, Homo Sapiens
ccugagcaagucccggcccugcccucagcgag

SEQ ID NO: 385526 - RNA, 32 nt, Homo Sapiens
uuuauauuuaacaugaagaccaaguuuauaua

SEQ ID NO: 385527 - RNA, 32 nt, Homo Sapiens
cccucaggaaaggcccuggucuccggaguuuc

SEQ ID NO: 385528 - RNA, 32 nt, Homo Sapiens
uuugaugauauuaaacuauguauuauuuucaa

SEQ ID NO: 385529 - RNA, 32 nt, Homo Sapiens
cuccaggacaauugcugcuugccggcucuuau

SEQ ID NO: 385530 - RNA, 32 nt, Homo Sapiens
gccgcgcugcgcaccugcugggugacuuggcc

SEQ ID NO: 385531 - RNA, 32 nt, Homo Sapiens
cugaugccggcagcagcgccucauggaguggc

SEQ ID NO: 385532 - RNA, 32 nt, Homo Sapiens
ugccugcucaggugcuaugucccaagagccau

SEQ ID NO: 385533 - RNA, 32 nt, Homo Sapiens
caagcucagaggugcucagagguacgagaugc

SEQ ID NO: 385534 - RNA, 32 nt, Homo Sapiens
gaucauagcucuuaugcuguuuuccugcucaa

SEQ ID NO: 385535 - RNA, 32 nt, Homo Sapiens
uucguuuuuuuuucuuuuuuucuuuccuuuuu

SEQ ID NO: 385536 - RNA, 32 nt, Homo Sapiens
acuaaccaaugugggaaagaaaucacacaugg

SEQ ID NO: 385537 - RNA, 32 nt, Homo Sapiens
cacuucacucugcuccuccccugccugggccu

SEQ ID NO: 385538 - RNA, 32 nt, Homo Sapiens
guuuuccucccccgcccuuguuuuccauaaaa

SEQ ID NO: 385539 - RNA, 32 nt, Homo Sapiens
gcuggagguucugacaggggcccccuggggug

SEQ ID NO: 385540 - RNA, 32 nt, Homo Sapiens
ucugauuuuuauuuucuacuuuuauuuugccu

SEQ ID NO: 385541 - RNA, 32 nt, Homo Sapiens
cagucuucgcgcgacccucgugcggugccaca

SEQ ID NO: 385542 - RNA, 31 nt, Homo Sapiens
auuuauucucaauaauaaagacuucaugaug

SEQ ID NO: 385543 - RNA, 32 nt, Homo Sapiens
gccucgcgccaggaccccgguggacuucugag

SEQ ID NO: 385544 - RNA, 32 nt, Homo Sapiens
ugucagaaccaucaugggcuggacauuggacu

SEQ ID NO: 385545 - RNA, 32 nt, Homo Sapiens
ucgcuuggcgcccuuucagcgugcgcagugaa

SEQ ID NO: 385546 - RNA, 32 nt, Homo Sapiens
gggcuguuuuuagagccacuguuaagagagaa

SEQ ID NO: 385547 - RNA, 32 nt, Homo Sapiens
gaaaaauuaaucuugcuucuucaucaggucuu

SEQ ID NO: 385548 - RNA, 32 nt, Homo Sapiens
gcuacagaaauauuuauaaaacauagcuuuuu

SEQ ID NO: 385549 - RNA, 32 nt, Homo Sapiens
ucaaagaaccuugaagaaguggcugccccuug

SEQ ID NO: 385550 - RNA, 29 nt, Homo Sapiens
cacuaugcugucagcaguugcccggggcu

SEQ ID NO: 385551 - RNA, 32 nt, Homo Sapiens
uuuuuuggauuccuuucuuuuacaaauugugc

SEQ ID NO: 385552 - RNA, 32 nt, Homo Sapiens
uaauauuaaaaucuggccccagcuuucuuucu

SEQ ID NO: 385553 - RNA, 32 nt, Homo Sapiens
uuucggagaaugagccaggucagucacuggga

SEQ ID NO: 385554 - RNA, 32 nt, Homo Sapiens
auacggguucccucacccugccagccgcccgc

SEQ ID NO: 385555 - RNA, 32 nt, Homo Sapiens
accuuccaguccaugagacaacuuguuauucu

SEQ ID NO: 385556 - RNA, 32 nt, Homo Sapiens
aagcgagugccugggagggaguggcccagggu

SEQ ID NO: 385557 - RNA, 32 nt, Homo Sapiens
cuuuucuuacuuugguuuuguuuacuuugucg

SEQ ID NO: 385558 - RNA, 32 nt, Homo Sapiens
cggcgcucgcaguggcgcgccugcucgcucuc

SEQ ID NO: 385559 - RNA, 32 nt, Homo Sapiens
auuauaggcaugagccauuaugccugacucuu

SEQ ID NO: 385560 - RNA, 32 nt, Homo Sapiens
gcuccccgcccggagcuaccuucgugcggcug

SEQ ID NO: 385561 - RNA, 32 nt, Homo Sapiens
ggaucugcagagccuuccugcccuggccacgu

SEQ ID NO: 385562 - RNA, 32 nt, Homo Sapiens
guguguacucugugugugccaaugaaaagguu

SEQ ID NO: 385563 - RNA, 27 nt, Homo Sapiens
ccuaugaguuucuucagucuccagagc

SEQ ID NO: 385564 - RNA, 32 nt, Homo Sapiens
uuaauuaauaccauuuugaauaucugaguucc

SEQ ID NO: 385565 - RNA, 32 nt, Homo Sapiens
auugcuauuguaaauucuuguuuguugaguaa

SEQ ID NO: 385566 - RNA, 32 nt, Homo Sapiens
agaagacauuuuagugaaauuguuuuacaugg

SEQ ID NO: 385567 - RNA, 32 nt, Homo Sapiens
gcguucccacuuucuuacucugcaccucccca

SEQ ID NO: 385568 - RNA, 32 nt, Homo Sapiens
gcacccacugucaucaccuagaagacaggccu

SEQ ID NO: 385569 - RNA, 32 nt, Homo Sapiens
agagaccguuugcuuuauacccacacagcaac

SEQ ID NO: 385570 - RNA, 32 nt, Homo Sapiens
uguugacauuuguuugguuauagugcaauaua

SEQ ID NO: 385571 - RNA, 32 nt, Homo Sapiens
auccuucugaagagcugaaggcuaauuaaucu

SEQ ID NO: 385572 - RNA, 32 nt, Homo Sapiens
uuuaagaagcuacuaagugcuguuccgaagaa

SEQ ID NO: 385573 - RNA, 32 nt, Homo Sapiens
gccccucucuacaaggucuuuuugguuucacu

SEQ ID NO: 385574 - RNA, 32 nt, Homo Sapiens
uagcacaauauuuuaacuauguccuuuaaaaa

SEQ ID NO: 385575 - RNA, 32 nt, Homo Sapiens
gaggugaucaauguuucuuuuauuuuguuaau

SEQ ID NO: 385576 - RNA, 32 nt, Homo Sapiens
cacauuccucuugaguucugcagcuucugugu

SEQ ID NO: 385577 - RNA, 32 nt, Homo Sapiens
cccucaugaaaacacacauacacgcaaauaca

SEQ ID NO: 385578 - RNA, 32 nt, Homo Sapiens
cugaagccugccccgcugagcccaggagccgg

SEQ ID NO: 385579 - RNA, 32 nt, Homo Sapiens
uaaguggauaaucugaguacaaugaaauuucu

SEQ ID NO: 385580 - RNA, 32 nt, Homo Sapiens
cuacuacaaccuggugaaggccccgccgugcg

SEQ ID NO: 385581 - RNA, 32 nt, Homo Sapiens
agugagucggagcucuauggagguggcagcgg

SEQ ID NO: 385582 - RNA, 32 nt, Homo Sapiens
acucuaacagcuuuugcuuuaaaauuauuaaa

SEQ ID NO: 385583 - RNA, 32 nt, Homo Sapiens
aucccacgcccccucccggccccucccugccc

SEQ ID NO: 385584 - RNA, 32 nt, Homo Sapiens
ggcgcgcuugcaggagggcaagccccuugguc

SEQ ID NO: 385585 - RNA, 32 nt, Homo Sapiens
cacugaucugcuagugcuguaauauuguaaau

SEQ ID NO: 385586 - RNA, 32 nt, Homo Sapiens
uuguguaauuuucaugugucaugaaauacugu

SEQ ID NO: 385587 - RNA, 32 nt, Homo Sapiens
caagcuauuauuaacaacuuuuguguacuuau

SEQ ID NO: 385588 - RNA, 32 nt, Homo Sapiens
ggguuagaaaaggacuauaagaauaauuucuu

SEQ ID NO: 385589 - RNA, 32 nt, Homo Sapiens
uaccaccaucucaaguaaggaccuucucccca

SEQ ID NO: 385590 - RNA, 32 nt, Homo Sapiens
aggauuuuacuuuguaauaaucucccaugaga

SEQ ID NO: 385591 - RNA, 32 nt, Homo Sapiens
aguuagcugugagccagcacucagcuguguca

SEQ ID NO: 385592 - RNA, 32 nt, Homo Sapiens
uugcuauuuaaauauaauguaucaaaaaccuu

SEQ ID NO: 385593 - RNA, 32 nt, Homo Sapiens
aaugcaauuuuguuacugaaauuaauauuuug

SEQ ID NO: 385594 - RNA, 32 nt, Homo Sapiens
ggccagcccuccccgcuggacgccuucuuccu

SEQ ID NO: 385595 - RNA, 32 nt, Homo Sapiens
aucacuuguguaguuaaauuguauuucaaaac

SEQ ID NO: 385596 - RNA, 32 nt, Homo Sapiens
ccacuaacagcaugcugccaaacuguucagau

SEQ ID NO: 385597 - RNA, 32 nt, Homo Sapiens
cccaggaaaaggaagaggucgaaccaacccug

SEQ ID NO: 385598 - RNA, 32 nt, Homo Sapiens
ggaccaguuagaauaaguuaugcugcagaaac

SEQ ID NO: 385599 - RNA, 32 nt, Homo Sapiens
gguggccccuccccaacuccuuccucuuugcu

SEQ ID NO: 385600 - RNA, 32 nt, Homo Sapiens
acuuggauaugcaggucaggcuuauuguuagg

SEQ ID NO: 385601 - RNA, 32 nt, Homo Sapiens
gggagaggaugucuuuuuuaaggcucugugcc

SEQ ID NO: 385602 - RNA, 32 nt, Homo Sapiens
uuacaggcaucucuucaggcuugcuugguacu

SEQ ID NO: 385603 - RNA, 32 nt, Homo Sapiens
gguaaccacagagcuuccuuuuugaaggcaua

SEQ ID NO: 385604 - RNA, 32 nt, Homo Sapiens
ugauggaaaaagauuauccagggaaugguaca

SEQ ID NO: 385605 - RNA, 32 nt, Homo Sapiens
gcccuuuaauaaagcauuauugagauugcugg

SEQ ID NO: 385606 - RNA, 32 nt, Homo Sapiens
ccugcggcgcauccauuaaguuccaguuaccc

SEQ ID NO: 385607 - RNA, 32 nt, Homo Sapiens
accuugaugauuuuuuguuuccacuguggaaa

SEQ ID NO: 385608 - RNA, 32 nt, Homo Sapiens
acucugcagguggauuacccaggcucaggguu

SEQ ID NO: 385609 - RNA, 32 nt, Homo Sapiens
auuuauauauauauuucauauauauauauaau

SEQ ID NO: 385610 - RNA, 32 nt, Homo Sapiens
gggaccucagagugggggcaggcagaagggag

SEQ ID NO: 385611 - RNA, 32 nt, Homo Sapiens
guggugguaugcgccugugcucccagcuacuu

SEQ ID NO: 385612 - RNA, 32 nt, Homo Sapiens
uauuuuuuuaagucaguuuugagcauuucuau

SEQ ID NO: 385613 - RNA, 29 nt, Homo Sapiens
gauaaggaauaaagguugcucugaaucuc

SEQ ID NO: 385614 - RNA, 32 nt, Homo Sapiens
uuaaaauguacaauuaaauuguuacugacuac

SEQ ID NO: 385615 - RNA, 32 nt, Homo Sapiens
aggcacagaucugguuuuaaugaugaacucua

SEQ ID NO: 385616 - RNA, 32 nt, Homo Sapiens
acgcacacaucacacaccuugcuggucacaca

SEQ ID NO: 385617 - RNA, 28 nt, Homo Sapiens
gauggacggaucagccauuugaaugacu

SEQ ID NO: 385618 - RNA, 32 nt, Homo Sapiens
acuaggagaggcauggggauagagacaguucu

SEQ ID NO: 385619 - RNA, 32 nt, Homo Sapiens
cgcaggcagaaagcggcuucgugccggcggag

SEQ ID NO: 385620 - RNA, 32 nt, Homo Sapiens
ccgugucugccggcccgagucccggcaacggu

SEQ ID NO: 385621 - RNA, 32 nt, Homo Sapiens
gauauuauuucagaggauacaaaauaaaaaua

SEQ ID NO: 385622 - RNA, 32 nt, Homo Sapiens
cuagagucaggagaucaggcccugauucuguc

SEQ ID NO: 385623 - RNA, 32 nt, Homo Sapiens
auaaauuguguauauuacuuaacaucaaacua

SEQ ID NO: 385624 - RNA, 32 nt, Homo Sapiens
gaguaaagauaaaggcgauauggagguguaca

SEQ ID NO: 385625 - RNA, 32 nt, Homo Sapiens
ugcuggcccagcugagcuccgccuagagagcu

SEQ ID NO: 385626 - RNA, 32 nt, Homo Sapiens
uugggccugugcugaacuaccugagacacggc

SEQ ID NO: 385627 - RNA, 32 nt, Homo Sapiens
gcagggcucccucagcuggaccaucgucccug

SEQ ID NO: 385628 - RNA, 32 nt, Homo Sapiens
caaggaagacuuuugguagagaaggagcagaa

SEQ ID NO: 385629 - RNA, 32 nt, Homo Sapiens
auaagcgcacaaacagcacugucugucgguaa

SEQ ID NO: 385630 - RNA, 32 nt, Homo Sapiens
gucuauuuuaaagauucuguaugggacaaaag

SEQ ID NO: 385631 - RNA, 32 nt, Homo Sapiens
accucccccaaggcgagcugccgcgguggaac

SEQ ID NO: 385632 - RNA, 32 nt, Homo Sapiens
agcuuauacagaaccucugggggaaaaaagag

SEQ ID NO: 385633 - RNA, 32 nt, Homo Sapiens
ucucugcucccuucuucaguaagcaaggagcc

SEQ ID NO: 385634 - RNA, 32 nt, Homo Sapiens
gccagggcaccccguacauacacacagcugcu

SEQ ID NO: 385635 - RNA, 32 nt, Homo Sapiens
cucgcacccugcccgaacaccccuucuggcca

SEQ ID NO: 385636 - RNA, 32 nt, Homo Sapiens
augcggccucaccuggaagagaaauaaaccac

SEQ ID NO: 385637 - RNA, 32 nt, Homo Sapiens
cguuggugcgaugugcauacaccaacucaauc

SEQ ID NO: 385638 - RNA, 32 nt, Homo Sapiens
gccccaaccaaggggauucuucgaucgugcaa

SEQ ID NO: 385639 - RNA, 32 nt, Homo Sapiens
gugcacuguaucuauuuuuaggauauuagcuu

SEQ ID NO: 385640 - RNA, 32 nt, Homo Sapiens
auacuuauagcuaucaucuauuaaaugccuau

SEQ ID NO: 385641 - RNA, 32 nt, Homo Sapiens
uuuugucuuuuuccuuuagccuuagcaguggg

SEQ ID NO: 385642 - RNA, 27 nt, Homo Sapiens
gacuucucuuucuucagccuuuugacc

SEQ ID NO: 385643 - RNA, 32 nt, Homo Sapiens
cuucauguuucauacagauaauucacauucaa

SEQ ID NO: 385644 - RNA, 32 nt, Homo Sapiens
guguuugcuucacuuuacccaucccgaugcuc

SEQ ID NO: 385645 - RNA, 32 nt, Homo Sapiens
gggcgagaugccggggccgccggcguugcggc

SEQ ID NO: 385646 - RNA, 32 nt, Homo Sapiens
cucaggaucuuguuuaccuuuggacagggagg

SEQ ID NO: 385647 - RNA, 32 nt, Homo Sapiens
agaauaaagaguaacacacaaaauauuggggg

SEQ ID NO: 385648 - RNA, 32 nt, Homo Sapiens
uaagaguauguggcaggguguuuuuucuucuu

SEQ ID NO: 385649 - RNA, 32 nt, Homo Sapiens
uuacaagagaauaauguuacauguuuaauugu

SEQ ID NO: 385650 - RNA, 32 nt, Homo Sapiens
ccaggccugugacccuccacaccagcccucag

SEQ ID NO: 385651 - RNA, 32 nt, Homo Sapiens
gcagggucaggagacggggcugacggcacggg

SEQ ID NO: 385652 - RNA, 32 nt, Homo Sapiens
agaugucugcaccuuuaucccuaagccugacu

SEQ ID NO: 385653 - RNA, 32 nt, Homo Sapiens
uuucuuuuccuccgcugugguuuucagaugaa

SEQ ID NO: 385654 - RNA, 32 nt, Homo Sapiens
auuguuguaucaucacaaacaucuaucuuuug

SEQ ID NO: 385655 - RNA, 32 nt, Homo Sapiens
aaucccgguuucagaagcugcagcuggucugu

SEQ ID NO: 385656 - RNA, 32 nt, Homo Sapiens
aaauuuuagcaaagauaucucaucucuucuuu

SEQ ID NO: 385657 - RNA, 32 nt, Homo Sapiens
gugaucccucccuccuucugaccucuuagcug

SEQ ID NO: 385658 - RNA, 32 nt, Homo Sapiens
aucuuggcuuugcauggugcucaggaagccuu

SEQ ID NO: 385659 - RNA, 32 nt, Homo Sapiens
gaacgcuucuauuugcagaaauuugcuugcau

SEQ ID NO: 385660 - RNA, 32 nt, Homo Sapiens
guuuauuuugugggaauuuaagagcaguccau

SEQ ID NO: 385661 - RNA, 32 nt, Homo Sapiens
aacuguuuucuuuuggaacuacaauuagaaua

SEQ ID NO: 385662 - RNA, 32 nt, Homo Sapiens
aaagacaauucuguguaaauguacaguugacu

SEQ ID NO: 385663 - RNA, 31 nt, Homo Sapiens
uacccacucauuugcuugccaaacuuagcuu

SEQ ID NO: 385664 - RNA, 32 nt, Homo Sapiens
agaaccagcacagcuuaggauuucauaguuca

SEQ ID NO: 385665 - RNA, 32 nt, Homo Sapiens
guuuuuuuguguuuguuuuucuuguacauuau

SEQ ID NO: 385666 - RNA, 32 nt, Homo Sapiens
ugggggaaaacuuuuaaaagauacccucauug

SEQ ID NO: 385667 - RNA, 32 nt, Homo Sapiens
uguugagacaaauaaggugaagaucaaccaaa

SEQ ID NO: 385668 - RNA, 32 nt, Homo Sapiens
ugaggacaggcauuucuguuuucgugcuuaaa

SEQ ID NO: 385669 - RNA, 32 nt, Homo Sapiens
acaaagcauaccagaucucaccagagaguccu

SEQ ID NO: 385670 - RNA, 32 nt, Homo Sapiens
ccuuccccaucccaaccccuucuuucucuaga

SEQ ID NO: 385671 - RNA, 32 nt, Homo Sapiens
cacacgcccuccccagacuccaccgucagcug

SEQ ID NO: 385672 - RNA, 27 nt, Homo Sapiens
cucccuuccuucuugguuucccauagu

SEQ ID NO: 385673 - RNA, 29 nt, Homo Sapiens
caauaauaaaguuugguuugguuuuuaca

SEQ ID NO: 385674 - RNA, 32 nt, Homo Sapiens
uauauuuaacuuaacccagauuuuauuuauau

SEQ ID NO: 385675 - RNA, 32 nt, Homo Sapiens
aaauuuacagaaugcagaauggcuacugugug

SEQ ID NO: 385676 - RNA, 32 nt, Homo Sapiens
gauaacuguuuuuauuaacugaauuguuuuuu

SEQ ID NO: 385677 - RNA, 32 nt, Homo Sapiens
uaccuguaaucccagcacuuugggaggcuacg

SEQ ID NO: 385678 - RNA, 32 nt, Homo Sapiens
aagucgaaaaagauaagaauggcaaggauaca

SEQ ID NO: 385679 - RNA, 32 nt, Homo Sapiens
auggugacugugugugaugacucucuuuccau

SEQ ID NO: 385680 - RNA, 32 nt, Homo Sapiens
gaacggagagagaauaaaucuuucuuguuuua

SEQ ID NO: 385681 - RNA, 32 nt, Homo Sapiens
gugacuuugugugcccucccccuccuuugugu

SEQ ID NO: 385682 - RNA, 32 nt, Homo Sapiens
ccccucccgagcucaucgcgggcccacggagc

SEQ ID NO: 385683 - RNA, 32 nt, Homo Sapiens
guacauggaugggcaggugggugcuggcucgc

SEQ ID NO: 385684 - RNA, 32 nt, Homo Sapiens
aaaaguccauuaugaaacuguauugccuguca

SEQ ID NO: 385685 - RNA, 32 nt, Homo Sapiens
ugcauaacugguuuuguuuuuuugcagaauua

SEQ ID NO: 385686 - RNA, 32 nt, Homo Sapiens
accucauuggcuccucacuggaucagaccaua

SEQ ID NO: 385687 - RNA, 32 nt, Homo Sapiens
gcuaaaggaaauguaagagguuuuguugucug

SEQ ID NO: 385688 - RNA, 32 nt, Homo Sapiens
agccaggcgugguggcgggcgccuuuagucgc

SEQ ID NO: 385689 - RNA, 32 nt, Homo Sapiens
acauuugguuguggaauugugugugguuuuag

SEQ ID NO: 385690 - RNA, 32 nt, Homo Sapiens
agcagagcccguugucugggccccacaccacu

SEQ ID NO: 385691 - RNA, 32 nt, Homo Sapiens
cuuuaaacagaggcugaagaaacuauagaauu

SEQ ID NO: 385692 - RNA, 32 nt, Homo Sapiens
gacauccaccgacuucugcuccuuccagcagg

SEQ ID NO: 385693 - RNA, 32 nt, Homo Sapiens
uccuuuuccuuccuuccuggcagugguuaacc

SEQ ID NO: 385694 - RNA, 32 nt, Homo Sapiens
acgguggcgcgauugggacagucgccagggau

SEQ ID NO: 385695 - RNA, 32 nt, Homo Sapiens
cuagccaacaaaccauccuuaaugugagcaac

SEQ ID NO: 385696 - RNA, 32 nt, Homo Sapiens
gagaggggugugauggggcagaggaacuuacg

SEQ ID NO: 385697 - RNA, 32 nt, Homo Sapiens
caucuguuuuuauuccuaucauuucaauuugu

SEQ ID NO: 385698 - RNA, 29 nt, Homo Sapiens
cggguguagacuagccugccgagccgccc

SEQ ID NO: 385699 - RNA, 32 nt, Homo Sapiens
cuggugcuggcugaccacccccugcccuccug

SEQ ID NO: 385700 - RNA, 32 nt, Homo Sapiens
cagugagaaaucaacaauauuccacagcagcc

SEQ ID NO: 385701 - RNA, 32 nt, Homo Sapiens
gaagcuccuugaccagggauggaagagcaguc

SEQ ID NO: 385702 - RNA, 32 nt, Homo Sapiens
acacaucggaagggcuggaugaccccaaucaa

SEQ ID NO: 385703 - RNA, 32 nt, Homo Sapiens
agacuucucuagcuugaauauugcaacauagc

SEQ ID NO: 385704 - RNA, 32 nt, Homo Sapiens
guuuuaauauccaccuugaggggucgcugcuu

SEQ ID NO: 385705 - RNA, 32 nt, Homo Sapiens
ugccaagaaaauaaaaaagcuauuaucagguc

SEQ ID NO: 385706 - RNA, 32 nt, Homo Sapiens
gcaaguuuggcccuaaaauuuauaugaaauga

SEQ ID NO: 385707 - RNA, 32 nt, Homo Sapiens
auguuuuuguuuguugcuggauuuuguuucau

SEQ ID NO: 385708 - RNA, 32 nt, Homo Sapiens
auugaacaaacauaugcaauaauccaggcaau

SEQ ID NO: 385709 - RNA, 32 nt, Homo Sapiens
uagggaaaauguuuuaaaaucuguuaaaauau

SEQ ID NO: 385710 - RNA, 30 nt, Homo Sapiens
ggugcuggagguggcugcagagagccacuu

SEQ ID NO: 385711 - RNA, 32 nt, Homo Sapiens
gcaccuuugcagagagcaaagaaacguggaau

SEQ ID NO: 385712 - RNA, 32 nt, Homo Sapiens
uugguauacugagcuuauagacuaugagagaa

SEQ ID NO: 385713 - RNA, 32 nt, Homo Sapiens
agccugcccgucuguaugcuccccuggagguc

SEQ ID NO: 385714 - RNA, 32 nt, Homo Sapiens
cauaaaacuuagcuaaguuuuguuuuguuuuu

SEQ ID NO: 385715 - RNA, 32 nt, Homo Sapiens
agcugucccugagaccccggagagaagcagcu

SEQ ID NO: 385716 - RNA, 32 nt, Homo Sapiens
auggcaggacaguaaaccccgugagcauccag

SEQ ID NO: 385717 - RNA, 32 nt, Homo Sapiens
augucaauugguuagagccagccgggaauuuc

SEQ ID NO: 385718 - RNA, 32 nt, Homo Sapiens
cagauuuauauggcuuuauugaauccaugccc

SEQ ID NO: 385719 - RNA, 32 nt, Homo Sapiens
gagaaguucuuugcagauuuggggcgaggggu

SEQ ID NO: 385720 - RNA, 32 nt, Homo Sapiens
ugggcagccugacaaccacggguuuggcaacu

SEQ ID NO: 385721 - RNA, 32 nt, Homo Sapiens
cuagccuuacuaacaagaagcauucuaauaga

SEQ ID NO: 385722 - RNA, 32 nt, Homo Sapiens
cuguccaggcugggcuugguggucaggaacag

SEQ ID NO: 385723 - RNA, 32 nt, Homo Sapiens
uucaaggaauuugaaccauaaaacacuaucug

SEQ ID NO: 385724 - RNA, 32 nt, Homo Sapiens
gaucagcuucucccuuucuucauuuucuguga

SEQ ID NO: 385725 - RNA, 31 nt, Homo Sapiens
uauuuaauuuuccagaaccaggaaugaguau

SEQ ID NO: 385726 - RNA, 32 nt, Homo Sapiens
cccagggcccggcuggagugacaggcucccug

SEQ ID NO: 385727 - RNA, 32 nt, Homo Sapiens
aaaagagaacagugacguaggcaaauguuuca

SEQ ID NO: 385728 - RNA, 29 nt, Homo Sapiens
ugguauggaaaacagacuuagcaucucca

SEQ ID NO: 385729 - RNA, 32 nt, Homo Sapiens
ugcgugagcaccaagccagagcccgaggacga

SEQ ID NO: 385730 - RNA, 32 nt, Homo Sapiens
auauuucuuuacaggcuaaugcuagguuuuug

SEQ ID NO: 385731 - RNA, 32 nt, Homo Sapiens
caguuuaaaaauaucaaguuagcugauguuuc

SEQ ID NO: 385732 - RNA, 32 nt, Homo Sapiens
auuuauaacuuacuuauuuuuaucuaauaauu

SEQ ID NO: 385733 - RNA, 32 nt, Homo Sapiens
ugucguuccccguguguccccagcccgguccc

SEQ ID NO: 385734 - RNA, 32 nt, Homo Sapiens
caaacucugaccaucuaguggcugcuaaucca

SEQ ID NO: 385735 - RNA, 32 nt, Homo Sapiens
aguccucagguccacccauuucccucaugggg

SEQ ID NO: 385736 - RNA, 32 nt, Homo Sapiens
cgugagcugccucggcgcagcccugucccgug

SEQ ID NO: 385737 - RNA, 32 nt, Homo Sapiens
ugccauacaaccuucgugucagggccacauug

SEQ ID NO: 385738 - RNA, 32 nt, Homo Sapiens
ugugaaucuguauauuauucugauggauacag

SEQ ID NO: 385739 - RNA, 32 nt, Homo Sapiens
ggaagaugagaugucagaagcuaaggacaaug

SEQ ID NO: 385740 - RNA, 32 nt, Homo Sapiens
gaccacgccgacggcccgccagcuuccuccca

SEQ ID NO: 385741 - RNA, 32 nt, Homo Sapiens
ugagcuccugucauuaaaccuaucuauaucug

SEQ ID NO: 385742 - RNA, 32 nt, Homo Sapiens
aaaaaugcaaaaauaaaaaauauaguacucaa

SEQ ID NO: 385743 - RNA, 32 nt, Homo Sapiens
aauaauucaucccacacggcuagcucacuucc

SEQ ID NO: 385744 - RNA, 32 nt, Homo Sapiens
ccaggagguggcggcugcgccauggggucaac

SEQ ID NO: 385745 - RNA, 30 nt, Homo Sapiens
cuuaaugucuguguaccggaaccuaucaaa

SEQ ID NO: 385746 - RNA, 32 nt, Homo Sapiens
gcacuaacacuggguuuccaagauauccaaau

SEQ ID NO: 385747 - RNA, 32 nt, Homo Sapiens
aaaagcauaccaaugaaccagacacggucuua

SEQ ID NO: 385748 - RNA, 29 nt, Homo Sapiens
cgaaauggcgccuccggcccccggcccgg

SEQ ID NO: 385749 - RNA, 32 nt, Homo Sapiens
gagaauuauccccacuucacagaugaggaaac

SEQ ID NO: 385750 - RNA, 32 nt, Homo Sapiens
gcuaccggcgcugggagcgggcggcgccgcug

SEQ ID NO: 385751 - RNA, 32 nt, Homo Sapiens
ccaucccuauuauaaaaaugucucagagcaac

SEQ ID NO: 385752 - RNA, 32 nt, Homo Sapiens
ucuuaaacuggucuaaaugucucuacaguacu

SEQ ID NO: 385753 - RNA, 32 nt, Homo Sapiens
auuaaaacaguauuugaguuuaaaagaguuug

SEQ ID NO: 385754 - RNA, 32 nt, Homo Sapiens
agugcaccgaggccuuggccaagcagagccug

SEQ ID NO: 385755 - RNA, 32 nt, Homo Sapiens
gccccuggcagacauagcugcuucagugcccc

SEQ ID NO: 385756 - RNA, 32 nt, Homo Sapiens
auguucauugcacaucugcuuccacuguguuc

SEQ ID NO: 385757 - RNA, 31 nt, Homo Sapiens
caggaccccggugucccuccccgcgccccga

SEQ ID NO: 385758 - RNA, 32 nt, Homo Sapiens
auaagguuucauaaguuuguacuugaaaacau

SEQ ID NO: 385759 - RNA, 32 nt, Homo Sapiens
gagccccuccuccacacccgagucccagcccc

SEQ ID NO: 385760 - RNA, 32 nt, Homo Sapiens
agccgggccugguggcgggcgccuguaguccc

SEQ ID NO: 385761 - RNA, 32 nt, Homo Sapiens
aauggauggacuucuguaaaacuucuuaauuu

SEQ ID NO: 385762 - RNA, 32 nt, Homo Sapiens
gacucggccgccggcccugcccguagaacagg

SEQ ID NO: 385763 - RNA, 32 nt, Homo Sapiens
cccacuuguugcuuuuaaaauuuuauaagcag

SEQ ID NO: 385764 - RNA, 32 nt, Homo Sapiens
ccagucucuauaauucacauggcuccaaaucc

SEQ ID NO: 385765 - RNA, 32 nt, Homo Sapiens
uuuuccaguugauaaaugaaaaucacuggccu

SEQ ID NO: 385766 - RNA, 32 nt, Homo Sapiens
aacaacccuuccaggcuucucuugucaucuuu

SEQ ID NO: 385767 - RNA, 32 nt, Homo Sapiens
gcccuccgcccggcccggagcuuaucuccgcc

SEQ ID NO: 385768 - RNA, 32 nt, Homo Sapiens
gggguugagaauagaagggccuggacagauua

SEQ ID NO: 385769 - RNA, 32 nt, Homo Sapiens
gcugaagggagccagagaaagagccuuugggg

SEQ ID NO: 385770 - RNA, 32 nt, Homo Sapiens
uuguuuuguuuguuuccuuuuaucuccuucca

SEQ ID NO: 385771 - RNA, 32 nt, Homo Sapiens
uccccaagccagcguggacccuggugucuaug

SEQ ID NO: 385772 - RNA, 32 nt, Homo Sapiens
uucaguuucccggcuggcugucccacagccug

SEQ ID NO: 385773 - RNA, 32 nt, Homo Sapiens
uuuucuuuuucagugcagaaauuaaaaguaag

SEQ ID NO: 385774 - RNA, 31 nt, Homo Sapiens
ugguacagaggcaagagcagagccugagaag

SEQ ID NO: 385775 - RNA, 32 nt, Homo Sapiens
caguacuuaccuuguuauauauauguaguugg

SEQ ID NO: 385776 - RNA, 32 nt, Homo Sapiens
gauaaguagauaucagcuauuuccugucuuac

SEQ ID NO: 385777 - RNA, 32 nt, Homo Sapiens
cgccuguaaucccagcacuuuggcaggccaag

SEQ ID NO: 385778 - RNA, 32 nt, Homo Sapiens
aguuugggcugacuggggcuggaccgggcaag

SEQ ID NO: 385779 - RNA, 32 nt, Homo Sapiens
cgccuguaaucccagcacuuugggaggccaac

SEQ ID NO: 385780 - RNA, 32 nt, Homo Sapiens
gaagguaagccugggagacacauaagcaauuc

SEQ ID NO: 385781 - RNA, 32 nt, Homo Sapiens
agacacauggacccugccuuuaugguacgaag

SEQ ID NO: 385782 - RNA, 32 nt, Homo Sapiens
auacagcacugcuggaggaagaggaagauuug

SEQ ID NO: 385783 - RNA, 32 nt, Homo Sapiens
cuggaccauaggaaacaagaccguuuggaggu

SEQ ID NO: 385784 - RNA, 32 nt, Homo Sapiens
gugaaggcucccacaaggaccugaugaccuca

SEQ ID NO: 385785 - RNA, 32 nt, Homo Sapiens
uuagaaaucaaagaauucacacaggggagaga

SEQ ID NO: 385786 - RNA, 32 nt, Homo Sapiens
gggcagcccugggccuggcgaggagccugcag

SEQ ID NO: 385787 - RNA, 32 nt, Homo Sapiens
uggugaguccuccuguccagccugcaucaaua

SEQ ID NO: 385788 - RNA, 32 nt, Homo Sapiens
cccauuuuaaacugaacuuaugcuaggaaacc

SEQ ID NO: 385789 - RNA, 32 nt, Homo Sapiens
ccaucuucagaaacagaagaaaauaaaauagc

SEQ ID NO: 385790 - RNA, 32 nt, Homo Sapiens
acucccacaaagcuuguaugugccaaaaaaua

SEQ ID NO: 385791 - RNA, 32 nt, Homo Sapiens
aauaagaaagcagcuuuuccaagaaacaauac

SEQ ID NO: 385792 - RNA, 32 nt, Homo Sapiens
gggcacugucuaaaugugcaauguacaacucu

SEQ ID NO: 385793 - RNA, 32 nt, Homo Sapiens
uuuuugcugccuugcuugaguugcuugugacu

SEQ ID NO: 385794 - RNA, 32 nt, Homo Sapiens
gcugcagaaggguggggauaucagggcacagu

SEQ ID NO: 385795 - RNA, 32 nt, Homo Sapiens
uaccgcacuggaccuagccuccccucucuaua

SEQ ID NO: 385796 - RNA, 32 nt, Homo Sapiens
uuguauaauaaaauaagaaaauagcaauaaac

SEQ ID NO: 385797 - RNA, 32 nt, Homo Sapiens
cuuagaaugggccuguuaaucuuauagaaccc

SEQ ID NO: 385798 - RNA, 32 nt, Homo Sapiens
ccaggaauucaagacuagccugcacaacauac

SEQ ID NO: 385799 - RNA, 32 nt, Homo Sapiens
auuugauauauucugguauauguuuaucauuc

SEQ ID NO: 385800 - RNA, 32 nt, Homo Sapiens
uacugaaauggcaaucaaagaugaucauuuuu

SEQ ID NO: 385801 - RNA, 32 nt, Homo Sapiens
ugaaguguuuguauauuugaaauaccucaaua

SEQ ID NO: 385802 - RNA, 32 nt, Homo Sapiens
cagcugaucaaacauuaacaaacaugaacagg

SEQ ID NO: 385803 - RNA, 30 nt, Homo Sapiens
ucucugucggcuucugcagaauucuggaaa

SEQ ID NO: 385804 - RNA, 32 nt, Homo Sapiens
agaucuuugugccaaacaaaaugagaucucau

SEQ ID NO: 385805 - RNA, 32 nt, Homo Sapiens
gacuuaagacuacugaguugugaaaauuacaa

SEQ ID NO: 385806 - RNA, 32 nt, Homo Sapiens
aucauagaaauuuuuguuuuuacacaaauuuu

SEQ ID NO: 385807 - RNA, 32 nt, Homo Sapiens
uuuguucccagccaugcuuuuguaacuugcca

SEQ ID NO: 385808 - RNA, 32 nt, Homo Sapiens
gaagaggaucgguggcugggucuguagguugu

SEQ ID NO: 385809 - RNA, 32 nt, Homo Sapiens
cagaagcuggccuggggucucuucuuugcugg

SEQ ID NO: 385810 - RNA, 31 nt, Homo Sapiens
aacaccaugaagauuauuuucccgauucuaa

SEQ ID NO: 385811 - RNA, 32 nt, Homo Sapiens
ggaaagguaguaggggcggggguggugaccuu

SEQ ID NO: 385812 - RNA, 32 nt, Homo Sapiens
ccaaaggaaggggccagcuucucugugugugu

SEQ ID NO: 385813 - RNA, 32 nt, Homo Sapiens
uucccuaccuggguggccugcuccccugccug

SEQ ID NO: 385814 - RNA, 32 nt, Homo Sapiens
auuacuuuucuuugacauaaagaaaauaacuu

SEQ ID NO: 385815 - RNA, 32 nt, Homo Sapiens
ugggggcggagggaaggagggcggcggggcac

SEQ ID NO: 385816 - RNA, 32 nt, Homo Sapiens
uuauauucauuuccuugcauuuaagaaaauau

SEQ ID NO: 385817 - RNA, 32 nt, Homo Sapiens
ggugaacacuugagugguuagagcuguagaua

SEQ ID NO: 385818 - RNA, 32 nt, Homo Sapiens
cgacuuuugucaaagaaauuacauaccaagcg

SEQ ID NO: 385819 - RNA, 32 nt, Homo Sapiens
cugcccagaccuagcagugacaucucauuguc

SEQ ID NO: 385820 - RNA, 32 nt, Homo Sapiens
ggucggccggggucggggagggggguggugaa

SEQ ID NO: 385821 - RNA, 32 nt, Homo Sapiens
ucaucgcaauaaaaagcagcucagagccgacu

SEQ ID NO: 385822 - RNA, 32 nt, Homo Sapiens
aacuacauucagcaggaacuuuucucgaggag

SEQ ID NO: 385823 - RNA, 32 nt, Homo Sapiens
uucuucugaccagcuccuguccccucagagau

SEQ ID NO: 385824 - RNA, 32 nt, Homo Sapiens
gcugagcuccuguuccucucucccucccccga

SEQ ID NO: 385825 - RNA, 32 nt, Homo Sapiens
ggguuggugaagauuccacauaaaaauuuucu

SEQ ID NO: 385826 - RNA, 32 nt, Homo Sapiens
cugaggcgugagaauggcgucccgcggccggc

SEQ ID NO: 385827 - RNA, 32 nt, Homo Sapiens
aaccggccgggccucgccgcgcggcccagcca

SEQ ID NO: 385828 - RNA, 32 nt, Homo Sapiens
ccgcacccgcggcccagcagggguuccacugc

SEQ ID NO: 385829 - RNA, 32 nt, Homo Sapiens
acgccuuguggcggcuuugcggagcugcugcu

SEQ ID NO: 385830 - RNA, 32 nt, Homo Sapiens
gaaacgucaguuccuguaacauuaccuccaca

SEQ ID NO: 385831 - RNA, 32 nt, Homo Sapiens
cauauugguauauaaccggaauuuuauauuaa

SEQ ID NO: 385832 - RNA, 32 nt, Homo Sapiens
uuuuagccaucucaaccgcaccucugaagugc

SEQ ID NO: 385833 - RNA, 32 nt, Homo Sapiens
gugucagaaaauaaauaugaaacauuaagucc

SEQ ID NO: 385834 - RNA, 32 nt, Homo Sapiens
cacuuuugaaagaacauguuaccuuaccuuuu

SEQ ID NO: 385835 - RNA, 32 nt, Homo Sapiens
uggaaauguaucucagaaaugaccuccucucc

SEQ ID NO: 385836 - RNA, 32 nt, Homo Sapiens
cccguuguugucccugcagggcagaaaaacgu

SEQ ID NO: 385837 - RNA, 32 nt, Homo Sapiens
uuuuuugugaucuguuuaaucuuuuaauuuuu

SEQ ID NO: 385838 - RNA, 32 nt, Homo Sapiens
ucauggcauccuucuuuuucuuuuuccauugg

SEQ ID NO: 385839 - RNA, 32 nt, Homo Sapiens
gagacagagucuugcucuguugcccaggcugg

SEQ ID NO: 385840 - RNA, 32 nt, Homo Sapiens
ugucucgguguaaagcccgaucguacauuugu

SEQ ID NO: 385841 - RNA, 32 nt, Homo Sapiens
agauagaugauuaguaguauauuguuacacac

SEQ ID NO: 385842 - RNA, 32 nt, Homo Sapiens
gaauuuauuuucugccaguucuggaggcugga

SEQ ID NO: 385843 - RNA, 32 nt, Homo Sapiens
agccagggcugaucuaggaggcugggagccag

SEQ ID NO: 385844 - RNA, 32 nt, Homo Sapiens
gauggagcacugccuccccaguuucugggaca

SEQ ID NO: 385845 - RNA, 32 nt, Homo Sapiens
guuaagcauacuuucuguaauugguugauugg

SEQ ID NO: 385846 - RNA, 32 nt, Homo Sapiens
gaggccucgggccaugcuguaccggugugacu

SEQ ID NO: 385847 - RNA, 32 nt, Homo Sapiens
auacucauagaauggaagugagcaaaggaaaa

SEQ ID NO: 385848 - RNA, 32 nt, Homo Sapiens
acauggcagagaucagcagagaaugggcaauc

SEQ ID NO: 385849 - RNA, 32 nt, Homo Sapiens
agcaugggcagacacccucagcagacaggagg

SEQ ID NO: 385850 - RNA, 32 nt, Homo Sapiens
guucaucugcagccuucccucuccagacagag

SEQ ID NO: 385851 - RNA, 32 nt, Homo Sapiens
uacaagugagacggagcugccuccucugacug

SEQ ID NO: 385852 - RNA, 32 nt, Homo Sapiens
cggagcuguggacaggagggacaguagccugg

SEQ ID NO: 385853 - RNA, 32 nt, Homo Sapiens
gcaucuccauggcagcacaucugcagcugccg

SEQ ID NO: 385854 - RNA, 32 nt, Homo Sapiens
cauuuuguguggaauuagauccucuuccucaa

SEQ ID NO: 385855 - RNA, 32 nt, Homo Sapiens
ccgcugacgcgcagccuccgccugcagcugcg

SEQ ID NO: 385856 - RNA, 32 nt, Homo Sapiens
aagauauguguguauauucaguuuuuuauugu

SEQ ID NO: 385857 - RNA, 32 nt, Homo Sapiens
cagacagaaaucagccucugcuuuaagaacaa

SEQ ID NO: 385858 - RNA, 32 nt, Homo Sapiens
uuguguuucugauguagucuuuauugaauuga

SEQ ID NO: 385859 - RNA, 32 nt, Homo Sapiens
guuuagucaacguagcaaaaccaugggaaauu

SEQ ID NO: 385860 - RNA, 31 nt, Homo Sapiens
cccuuggaggcagcccugccccgugccaccu

SEQ ID NO: 385861 - RNA, 32 nt, Homo Sapiens
auagcuguacaaauauaagaauaaaauguuga

SEQ ID NO: 385862 - RNA, 32 nt, Homo Sapiens
ggacaggaggcagacacugcccagaugcucgg

SEQ ID NO: 385863 - RNA, 31 nt, Homo Sapiens
ggagauaaauauaugaaggugcuguuuggca

SEQ ID NO: 385864 - RNA, 32 nt, Homo Sapiens
gaggcggaggucgcucgcucgcucgcucggcu

SEQ ID NO: 385865 - RNA, 32 nt, Homo Sapiens
gcugggaccacaggggcccaccaccgcgcccg

SEQ ID NO: 385866 - RNA, 32 nt, Homo Sapiens
cgcgaggcgcggggagccugggaccaggagcg

SEQ ID NO: 385867 - RNA, 32 nt, Homo Sapiens
agucuuugugucccuguacaguagucugacgu

SEQ ID NO: 385868 - RNA, 32 nt, Homo Sapiens
auccaagcugccacacugcccggagcagccug

SEQ ID NO: 385869 - RNA, 32 nt, Homo Sapiens
augcugcuggcugugcugcugcugcuaccccu

SEQ ID NO: 385870 - RNA, 32 nt, Homo Sapiens
cagacuucaaggaugcagcugcuacuaccgga

SEQ ID NO: 385871 - RNA, 32 nt, Homo Sapiens
cauugaggaaaugaagacuagauacuucugua

SEQ ID NO: 385872 - RNA, 32 nt, Homo Sapiens
cugccacgccccgaccccgcccgugccccccg

SEQ ID NO: 385873 - RNA, 32 nt, Homo Sapiens
guccagccaagagccaucucgugccaagacuu

SEQ ID NO: 385874 - RNA, 32 nt, Homo Sapiens
acacaggacugugaaagaaagugaugaugcga

SEQ ID NO: 385875 - RNA, 32 nt, Homo Sapiens
acauguggguacugccacuacacacacgucau

SEQ ID NO: 385876 - RNA, 31 nt, Homo Sapiens
ccagggaccggacaccugccccgcccaggcu

SEQ ID NO: 385877 - RNA, 32 nt, Homo Sapiens
ccuguaucaaggaagagguaugugcugauuug

SEQ ID NO: 385878 - RNA, 32 nt, Homo Sapiens
gacuccaggugaggccugaggaccacucugcc

SEQ ID NO: 385879 - RNA, 32 nt, Homo Sapiens
ggaacacgaacaccccaccuuuuccuucagca

SEQ ID NO: 385880 - RNA, 32 nt, Homo Sapiens
ccauucuuguuuuauuuauaccucuguggauu

SEQ ID NO: 385881 - RNA, 32 nt, Homo Sapiens
ggacaaagcagauugcagaaagucuuuucgua

SEQ ID NO: 385882 - RNA, 32 nt, Homo Sapiens
gcaugugcauucaaaaggaagaguagauagaa

SEQ ID NO: 385883 - RNA, 32 nt, Homo Sapiens
cagagaacaggagagggauuugagggcgagac

SEQ ID NO: 385884 - RNA, 32 nt, Homo Sapiens
uuucuauuuuauugguucuuuaucuuuauugu

SEQ ID NO: 385885 - RNA, 32 nt, Homo Sapiens
aguuuuccgcccggcgcugacggcugcugcgc

SEQ ID NO: 385886 - RNA, 32 nt, Homo Sapiens
gagggucccgggaagcuggaucugucagccuc

SEQ ID NO: 385887 - RNA, 32 nt, Homo Sapiens
uguuccagcuucagccagaacgauaugucugu

SEQ ID NO: 385888 - RNA, 32 nt, Homo Sapiens
uucgccgcagcccuuccgagcccaaucauccc

SEQ ID NO: 385889 - RNA, 32 nt, Homo Sapiens
ggcagggcucugcccagggcagccugccacuu

SEQ ID NO: 385890 - RNA, 32 nt, Homo Sapiens
aucacugcccccaccccuacccguguaggcca

SEQ ID NO: 385891 - RNA, 32 nt, Homo Sapiens
ggagccguuucuccgcgccgcuguuggugcug

SEQ ID NO: 385892 - RNA, 32 nt, Homo Sapiens
aacucuccugccuccgccuuccacccugggcc

SEQ ID NO: 385893 - RNA, 32 nt, Homo Sapiens
cauuauuugggaacugacuuuggcugcuuuuu

SEQ ID NO: 385894 - RNA, 32 nt, Homo Sapiens
cagggaaauaggaagaggcaguggaggccccu

SEQ ID NO: 385895 - RNA, 32 nt, Homo Sapiens
ugcaggcucccggccccagcuucucugguccu

SEQ ID NO: 385896 - RNA, 32 nt, Homo Sapiens
uacauuugucuuccagacaugcuauuaauuua

SEQ ID NO: 385897 - RNA, 32 nt, Homo Sapiens
agagacugaaacaaaugaaaugauagcuuuau

SEQ ID NO: 385898 - RNA, 32 nt, Homo Sapiens
auugaaaaugucacagaccaugauauuucaau

SEQ ID NO: 385899 - RNA, 32 nt, Homo Sapiens
ucugcauguuuuuaugcacugccaauuagcuu

SEQ ID NO: 385900 - RNA, 32 nt, Homo Sapiens
guguuugagguucuuugguuuuguuaguaaaa

SEQ ID NO: 385901 - RNA, 32 nt, Homo Sapiens
gcagcucaaaaauaaagauguauuaagggggg

SEQ ID NO: 385902 - RNA, 32 nt, Homo Sapiens
aaguuuucagguccuugugauaaaaccuccuu

SEQ ID NO: 385903 - RNA, 32 nt, Homo Sapiens
uagugagucaacauccauaacucuguaucuag

SEQ ID NO: 385904 - RNA, 32 nt, Homo Sapiens
guuuuuuuuuuuuuuuuuuuuaaacaguuuuc

SEQ ID NO: 385905 - RNA, 32 nt, Homo Sapiens
ugugcauugucaacauuauuuacaauaacaug

SEQ ID NO: 385906 - RNA, 32 nt, Homo Sapiens
uuuugugcuucuuuuucuagguucuagaggug

SEQ ID NO: 385907 - RNA, 32 nt, Homo Sapiens
gauugcacuaaauaaacuacuuugaauagagg

SEQ ID NO: 385908 - RNA, 32 nt, Homo Sapiens
uccgccgcggccguccuccgcggcucgaggac

SEQ ID NO: 385909 - RNA, 32 nt, Homo Sapiens
gugccaaugugcgcccucacgggugucaaacc

SEQ ID NO: 385910 - RNA, 32 nt, Homo Sapiens
agggcccgugauaaguuucugagcagggguug

SEQ ID NO: 385911 - RNA, 32 nt, Homo Sapiens
gccgauucaccugagcaggaccucugaaaccc

SEQ ID NO: 385912 - RNA, 32 nt, Homo Sapiens
acgcguccgcccacgcguccgcccacgcgucc

SEQ ID NO: 385913 - RNA, 32 nt, Homo Sapiens
ggguggccacggguaucgucuggggcuugguu

SEQ ID NO: 385914 - RNA, 32 nt, Homo Sapiens
ugguagggaggaucaggcugcagaagggccaa

SEQ ID NO: 385915 - RNA, 31 nt, Homo Sapiens
agaaggcugcagcccacaggaguccagggaa

SEQ ID NO: 385916 - RNA, 32 nt, Homo Sapiens
gaguagcgauacaaguuuuugcaaauugaauu

SEQ ID NO: 385917 - RNA, 32 nt, Homo Sapiens
cucuaagaauuccacauuuuauggaaaguuag

SEQ ID NO: 385918 - RNA, 32 nt, Homo Sapiens
uuacagugagucgagaucgcgccacugcacuc

SEQ ID NO: 385919 - RNA, 32 nt, Homo Sapiens
acucaguaccuccauacccagcccuauacgca

SEQ ID NO: 385920 - RNA, 32 nt, Homo Sapiens
auaaguagguauuauguuuacauauuauguuu

SEQ ID NO: 385921 - RNA, 32 nt, Homo Sapiens
aaguucuauuuaauggagaugucauguauauc

SEQ ID NO: 385922 - RNA, 32 nt, Homo Sapiens
gggggaaaggauucaguggaggcuggcagggu

SEQ ID NO: 385923 - RNA, 32 nt, Homo Sapiens
cugggggaggucgacaugggaccucugcccca

SEQ ID NO: 385924 - RNA, 32 nt, Homo Sapiens
aaccagaaugcuucugaaacucccaccuguug

SEQ ID NO: 385925 - RNA, 32 nt, Homo Sapiens
ugguuuuauugcuuguuucucuccaggauagu

SEQ ID NO: 385926 - RNA, 32 nt, Homo Sapiens
uugugaaacagagaaagauaggcggccauggu

SEQ ID NO: 385927 - RNA, 32 nt, Homo Sapiens
ggccggcaggcacaaccuccuggcacaccaga

SEQ ID NO: 385928 - RNA, 32 nt, Homo Sapiens
caacguagacugaguuccccaucuagugacac

SEQ ID NO: 385929 - RNA, 32 nt, Homo Sapiens
ggggaaaagggaggaguuagacucugggcaac

SEQ ID NO: 385930 - RNA, 32 nt, Homo Sapiens
gagcaggccgagaggagcuagcgcgcgggccc

SEQ ID NO: 385931 - RNA, 32 nt, Homo Sapiens
ugaaacauaaaauggagcaugagcaaauagag

SEQ ID NO: 385932 - RNA, 32 nt, Homo Sapiens
gcaguucucccgugagagggccuucgcggugg

SEQ ID NO: 385933 - RNA, 32 nt, Homo Sapiens
acaaaauguugaugagagaaauuaaagaagac

SEQ ID NO: 385934 - RNA, 32 nt, Homo Sapiens
auuguaaaucaucacagauuuugaagucacac

SEQ ID NO: 385935 - RNA, 32 nt, Homo Sapiens
caguauuguaaaauaaauguugacucauuuca

SEQ ID NO: 385936 - RNA, 32 nt, Homo Sapiens
aguuaaauuuauagacaguuaaguaaaaaugg

SEQ ID NO: 385937 - RNA, 32 nt, Homo Sapiens
uugcuacuugguuuuucuugaucauagcuauu

SEQ ID NO: 385938 - RNA, 32 nt, Homo Sapiens
auguggaguaguaacuuaauauguaaaguugu

SEQ ID NO: 385939 - RNA, 32 nt, Homo Sapiens
gggaggauccugaaacaugcgggaaaaggaga

SEQ ID NO: 385940 - RNA, 32 nt, Homo Sapiens
acugccucaauccuagguaacgagggcaacag

SEQ ID NO: 385941 - RNA, 32 nt, Homo Sapiens
uugaggucaggaguucgagaccagccuggcaa

SEQ ID NO: 385942 - RNA, 32 nt, Homo Sapiens
aguugguugcuacuuuuuguugauuccuuuua

SEQ ID NO: 385943 - RNA, 32 nt, Homo Sapiens
auagcuggaaccgaaaugcauggcagauucau

SEQ ID NO: 385944 - RNA, 32 nt, Homo Sapiens
uccagcuacuugggaggcugaggugggaaaau

SEQ ID NO: 385945 - RNA, 32 nt, Homo Sapiens
gcaaauauuauaaaguuauaucugaaaauaau

SEQ ID NO: 385946 - RNA, 32 nt, Homo Sapiens
cagagccugcccaggccuagccccacagacuu

SEQ ID NO: 385947 - RNA, 32 nt, Homo Sapiens
auguuaaacuuuaucuuaauuaguauacuaga

SEQ ID NO: 385948 - RNA, 32 nt, Homo Sapiens
agccgggguucccuccucccggcccgcugccg

SEQ ID NO: 385949 - RNA, 32 nt, Homo Sapiens
aucaaguuauuuaacucaacuuauuuaauuca

SEQ ID NO: 385950 - RNA, 32 nt, Homo Sapiens
gcauguacuuugugaauuauuaucuuugucua

SEQ ID NO: 385951 - RNA, 32 nt, Homo Sapiens
gccucgccccucccacugcgggcucacgggga

SEQ ID NO: 385952 - RNA, 32 nt, Homo Sapiens
gagaaguaaaaaggguuugacuuuuuaugaug

SEQ ID NO: 385953 - RNA, 32 nt, Homo Sapiens
ggacaagaggccgucugugcggcuguggucgu

SEQ ID NO: 385954 - RNA, 32 nt, Homo Sapiens
uauaguguauuuuucuuuaccuacuauaaaua

SEQ ID NO: 385955 - RNA, 32 nt, Homo Sapiens
gcgcugugcgccccgcggagcccgcgaacccc

SEQ ID NO: 385956 - RNA, 29 nt, Homo Sapiens
ugaaugucauauguaaaugcuaaaauaaa

SEQ ID NO: 385957 - RNA, 32 nt, Homo Sapiens
uacuguaguuuuuaugggcuuaagaagaagac

SEQ ID NO: 385958 - RNA, 32 nt, Homo Sapiens
gagccacaccccuggugacuucauggugcugg

SEQ ID NO: 385959 - RNA, 32 nt, Homo Sapiens
gauaggugaccguuuggcugauuauugcugcc

SEQ ID NO: 385960 - RNA, 32 nt, Homo Sapiens
aauauuucccaguauaaugauacaucguagcc

SEQ ID NO: 385961 - RNA, 28 nt, Homo Sapiens
uacauguauguuucuauuaguuuucuuc

SEQ ID NO: 385962 - RNA, 32 nt, Homo Sapiens
uguucuuaccaucuccuucuggccaaauagca

SEQ ID NO: 385963 - RNA, 32 nt, Homo Sapiens
gaggacugccccccaccccgcccaagccaaug

SEQ ID NO: 385964 - RNA, 32 nt, Homo Sapiens
gcaaggagaccaaagauugaugagaagacccc

SEQ ID NO: 385965 - RNA, 32 nt, Homo Sapiens
cuccuaaaaugaacagauuuaaagacaggugg

SEQ ID NO: 385966 - RNA, 32 nt, Homo Sapiens
acagcgaccucggauagcacagccagcuacuc

SEQ ID NO: 385967 - RNA, 32 nt, Homo Sapiens
gcgcagugaggagggggcgcgacggccaggag

SEQ ID NO: 385968 - RNA, 32 nt, Homo Sapiens
aagagcagaggcugggccaagcccuuaaguca

SEQ ID NO: 385969 - RNA, 32 nt, Homo Sapiens
ugaacuaagagcgggggcgagaucugaggaug

SEQ ID NO: 385970 - RNA, 32 nt, Homo Sapiens
cagaaaaugugauuuucacagauucagcucuu

SEQ ID NO: 385971 - RNA, 32 nt, Homo Sapiens
cguguccgcgcgccugggagacgcugccucgg

SEQ ID NO: 385972 - RNA, 32 nt, Homo Sapiens
auauggaauagaucguagauguuguagacuga

SEQ ID NO: 385973 - RNA, 32 nt, Homo Sapiens
cucaucuuuccucuccucccucuuggggcuuu

SEQ ID NO: 385974 - RNA, 32 nt, Homo Sapiens
ugguuuccugcaugugcugggugugggcgggg

SEQ ID NO: 385975 - RNA, 32 nt, Homo Sapiens
uaugggcaacaaaguaaggucaggauuagacu

SEQ ID NO: 385976 - RNA, 32 nt, Homo Sapiens
guaugaguuuggagcagugcugaggccaaagc

SEQ ID NO: 385977 - RNA, 32 nt, Homo Sapiens
ucccuguccaguguugucaugucaucaugccc

SEQ ID NO: 385978 - RNA, 32 nt, Homo Sapiens
gugggcggaccgcgcggcuggaggugugagga

SEQ ID NO: 385979 - RNA, 32 nt, Homo Sapiens
ugcgcgccugcagagcggcggcuggagacugg

SEQ ID NO: 385980 - RNA, 32 nt, Homo Sapiens
caagccugcccccgaggcgugcuuccuuccug

SEQ ID NO: 385981 - RNA, 32 nt, Homo Sapiens
auuuucuaaaaagauauguugauucaacuuug

SEQ ID NO: 385982 - RNA, 32 nt, Homo Sapiens
uaucuacaaaucuaucuuucuaucuuguucau

SEQ ID NO: 385983 - RNA, 28 nt, Homo Sapiens
ucucuguugucuaaaauagguuuucccu

SEQ ID NO: 385984 - RNA, 32 nt, Homo Sapiens
cgaaggccaagcccgaguccguguccaccugu

SEQ ID NO: 385985 - RNA, 32 nt, Homo Sapiens
cggugcccaagcaaaggaagggagcgugcuug

SEQ ID NO: 385986 - RNA, 32 nt, Homo Sapiens
acacacuggcccacccaaccuugaagagaguc

SEQ ID NO: 385987 - RNA, 29 nt, Homo Sapiens
aacuauuaaaagacagaucugguuaauuu

SEQ ID NO: 385988 - RNA, 32 nt, Homo Sapiens
gacacauggcaccaugucccaaggcugcacag

SEQ ID NO: 385989 - RNA, 32 nt, Homo Sapiens
gaucuggaaaagacaaggucaugggggccucc

SEQ ID NO: 385990 - RNA, 32 nt, Homo Sapiens
uauaaaucaguauuuuuuuuuaauuuugauau

SEQ ID NO: 385991 - RNA, 32 nt, Homo Sapiens
cauccguguggaaaaggcuccaguggcgcgcc

SEQ ID NO: 385992 - RNA, 32 nt, Homo Sapiens
aaaggagagucuuuucaacaaauggcaccgag

SEQ ID NO: 385993 - RNA, 32 nt, Homo Sapiens
uaucaggaccagacacauccacagccaggcuc

SEQ ID NO: 385994 - RNA, 32 nt, Homo Sapiens
ggagagaagggaggaggugggcacagguggug

SEQ ID NO: 385995 - RNA, 29 nt, Homo Sapiens
caacauggcggccgcgguggcggcggcac

SEQ ID NO: 385996 - RNA, 32 nt, Homo Sapiens
aguugaguagccagaugaaauucaagccuaaa

SEQ ID NO: 385997 - RNA, 32 nt, Homo Sapiens
ggcggaaaaugaagucagaaagauuuguagug

SEQ ID NO: 385998 - RNA, 32 nt, Homo Sapiens
gcccagggggagagcggagcuccgcagccggg

SEQ ID NO: 385999 - RNA, 32 nt, Homo Sapiens
uuuuucuuuguacagaagaguacuguauuuuu

SEQ ID NO: 386000 - RNA, 32 nt, Homo Sapiens
uucucccaggacuuggggguggggugaaaagc

SEQ ID NO: 386001 - RNA, 32 nt, Homo Sapiens
uggaagggcggcucuuuuuuuacuuuucugcu

SEQ ID NO: 386002 - RNA, 32 nt, Homo Sapiens
caauacuuuuucugauacgauuucaaaguuaa

SEQ ID NO: 386003 - RNA, 32 nt, Homo Sapiens
uagugcucaaacaaauacaaaauaagaucccc

SEQ ID NO: 386004 - RNA, 32 nt, Homo Sapiens
uuuuucuucuaacugacuucugcuuuccacgg

SEQ ID NO: 386005 - RNA, 32 nt, Homo Sapiens
cuccauuaacuguggauuuuacuaaauagaau

SEQ ID NO: 386006 - RNA, 32 nt, Homo Sapiens
acaguaaagaauuuuaauuaauucugucauuu

SEQ ID NO: 386007 - RNA, 32 nt, Homo Sapiens
aucuuacuauagcauuauucugaaggauuuuc

SEQ ID NO: 386008 - RNA, 32 nt, Homo Sapiens
gugaacgucuccuuccucccccguaucugccg

SEQ ID NO: 386009 - RNA, 32 nt, Homo Sapiens
ucauaggauuuaaugaugucaagcuccucacu

SEQ ID NO: 386010 - RNA, 32 nt, Homo Sapiens
gcacaccuuguacagaguuuugggguucacac

SEQ ID NO: 386011 - RNA, 32 nt, Homo Sapiens
gagcugagaucccgacaagcccgccagcccca

SEQ ID NO: 386012 - RNA, 32 nt, Homo Sapiens
gcacuggcauugagacuauagcacaucauuuu

SEQ ID NO: 386013 - RNA, 32 nt, Homo Sapiens
agccaagauugugccacugcacugcaggcugg

SEQ ID NO: 386014 - RNA, 32 nt, Homo Sapiens
cagcuggaggaagcggcggcggcggccacgau

SEQ ID NO: 386015 - RNA, 32 nt, Homo Sapiens
uacccauguacuccucaccccagcccaucuuc

SEQ ID NO: 386016 - RNA, 32 nt, Homo Sapiens
aggacccgagcggagccuccccgcggcccggc

SEQ ID NO: 386017 - RNA, 32 nt, Homo Sapiens
uccugggagaggcgcgagccaggccuggucgg

SEQ ID NO: 386018 - RNA, 32 nt, Homo Sapiens
gcucauuucuuacucuuuuucucuauauaacu

SEQ ID NO: 386019 - RNA, 31 nt, Homo Sapiens
aaaaagaaauaaaaauacuucuguauucuuc

SEQ ID NO: 386020 - RNA, 32 nt, Homo Sapiens
gguuucaccguguuggccgggcuggucucgaa

SEQ ID NO: 386021 - RNA, 32 nt, Homo Sapiens
gggagggcaggagagaggaaagaucugaguug

SEQ ID NO: 386022 - RNA, 30 nt, Homo Sapiens
gagcaugucugugcagcaguguuuuugccc

SEQ ID NO: 386023 - RNA, 32 nt, Homo Sapiens
cuuuccugaauauauacuuguuugucauaguu

SEQ ID NO: 386024 - RNA, 32 nt, Homo Sapiens
acacaaucauacugugauuuuauuuuuaauau

SEQ ID NO: 386025 - RNA, 32 nt, Homo Sapiens
caccaccaccuggccucuccgagacggccccc

SEQ ID NO: 386026 - RNA, 27 nt, Homo Sapiens
ggaugggcgcggcucccucccccacuc

SEQ ID NO: 386027 - RNA, 32 nt, Homo Sapiens
cuuucggaguggaguuuccuagcuggugccug

SEQ ID NO: 386028 - RNA, 32 nt, Homo Sapiens
acaagucucugcucaugaggccccacaggaug

SEQ ID NO: 386029 - RNA, 32 nt, Homo Sapiens
uaccuauagcuuuggucccaucuuuaauugag

SEQ ID NO: 386030 - RNA, 32 nt, Homo Sapiens
gguguucauuauuugcuuugccugagcucaga

SEQ ID NO: 386031 - RNA, 32 nt, Homo Sapiens
uucuuggauauuuagcuauuguccuccaaaga

SEQ ID NO: 386032 - RNA, 32 nt, Homo Sapiens
uaaauuaguucauaugagacaucuauuuauuu

SEQ ID NO: 386033 - RNA, 32 nt, Homo Sapiens
aaacguuucagaagcuuacucguuaaaacuaa

SEQ ID NO: 386034 - RNA, 32 nt, Homo Sapiens
cuaggcuccagaucggggccucaugcugacuu

SEQ ID NO: 386035 - RNA, 32 nt, Homo Sapiens
ggggcgcggggggcgccgggggggcccaagcg

SEQ ID NO: 386036 - RNA, 32 nt, Homo Sapiens
uucauuuuggucuuaaugcuuuguaaacaggu

SEQ ID NO: 386037 - RNA, 32 nt, Homo Sapiens
gaguuucgcucuuguuggcuaggcuggaguaa

SEQ ID NO: 386038 - RNA, 31 nt, Homo Sapiens
uguccagaaagccaacccagagccugcagaa

SEQ ID NO: 386039 - RNA, 32 nt, Homo Sapiens
gaccgcggauccgcaguucccgggccagccug

SEQ ID NO: 386040 - RNA, 32 nt, Homo Sapiens
uggucccccuggaacugcauucuucuuaccaa

SEQ ID NO: 386041 - RNA, 32 nt, Homo Sapiens
uucccuuaauuuuauuguuacaauuggccuuc

SEQ ID NO: 386042 - RNA, 32 nt, Homo Sapiens
uccuggaugaugguccauaagaauaaugaaga

SEQ ID NO: 386043 - RNA, 32 nt, Homo Sapiens
aucuagggacagaagggcuuugaaagacauuu

SEQ ID NO: 386044 - RNA, 32 nt, Homo Sapiens
cauaaaguguagaggagggauggccaagggug

SEQ ID NO: 386045 - RNA, 32 nt, Homo Sapiens
acuuacacauacuagcagcauuaucaugggaa

SEQ ID NO: 386046 - RNA, 32 nt, Homo Sapiens
acccagcguggccucccaaagugcugggauua

SEQ ID NO: 386047 - RNA, 32 nt, Homo Sapiens
uggcccgccccuccccugucacuugucgggca

SEQ ID NO: 386048 - RNA, 32 nt, Homo Sapiens
ggguccgcgcgcgguuugaccacggccggggc

SEQ ID NO: 386049 - RNA, 32 nt, Homo Sapiens
gcccaggcggcgguggaaaggcuggaggacac

SEQ ID NO: 386050 - RNA, 32 nt, Homo Sapiens
ccuggggcggcguccgcggugaggacugggag

SEQ ID NO: 386051 - RNA, 32 nt, Homo Sapiens
guacaaucagaacuuggagauuuuaagaaaag

SEQ ID NO: 386052 - RNA, 32 nt, Homo Sapiens
gugacagugacgaagggugaguccuucagaac

SEQ ID NO: 386053 - RNA, 32 nt, Homo Sapiens
cggccgcacgggggugccgaggcgucuggggg

SEQ ID NO: 386054 - RNA, 32 nt, Homo Sapiens
cagcagcagcagcagcagcaaccuuugaucag

SEQ ID NO: 386055 - RNA, 32 nt, Homo Sapiens
aucagaugaugauaauauguacauuuacucca

SEQ ID NO: 386056 - RNA, 32 nt, Homo Sapiens
aucuaccauuacuguuauuugcugauuuuguu

SEQ ID NO: 386057 - RNA, 32 nt, Homo Sapiens
aagaaauugaucucauauggcaucauagaugc

SEQ ID NO: 386058 - RNA, 32 nt, Homo Sapiens
gguguuacugaauuauaagcucacuaggcugu

SEQ ID NO: 386059 - RNA, 32 nt, Homo Sapiens
ggcggagugcgcagccuuggcugcugggaaau

SEQ ID NO: 386060 - RNA, 31 nt, Homo Sapiens
ucucgacucuccugccugcccagcugcgcgg

SEQ ID NO: 386061 - RNA, 32 nt, Homo Sapiens
ccacgcugcugaucguccugcugcugauggug

SEQ ID NO: 386062 - RNA, 32 nt, Homo Sapiens
cccccacuccugccugcuucccggugagcugc

SEQ ID NO: 386063 - RNA, 32 nt, Homo Sapiens
uccuugccccuucaguauucucucuuugcgau

SEQ ID NO: 386064 - RNA, 30 nt, Homo Sapiens
cugggcgucauguacuacaaguuuaguggc

SEQ ID NO: 386065 - RNA, 32 nt, Homo Sapiens
uaggaugaaaauauuguagagacaucugacuu

SEQ ID NO: 386066 - RNA, 32 nt, Homo Sapiens
gguguaagcagaggaggaauugguucacuuaa

SEQ ID NO: 386067 - RNA, 32 nt, Homo Sapiens
aaccuuacaaagucuguaacucuagauaaacc

SEQ ID NO: 386068 - RNA, 32 nt, Homo Sapiens
ucaucuaauuuaauauuccuggcauaccuuua

SEQ ID NO: 386069 - RNA, 32 nt, Homo Sapiens
gggucuaguggucugugcaggcugggagauga

SEQ ID NO: 386070 - RNA, 32 nt, Homo Sapiens
cucccucucccucuucaggucucacuuuuuag

SEQ ID NO: 386071 - RNA, 32 nt, Homo Sapiens
guuaacauguuuuuauuuuuauugcuuuguau

SEQ ID NO: 386072 - RNA, 32 nt, Homo Sapiens
cacagggacgccuucccuccccuccccuccag

SEQ ID NO: 386073 - RNA, 32 nt, Homo Sapiens
uccucccuggccccggcccuucccucacuucc

SEQ ID NO: 386074 - RNA, 32 nt, Homo Sapiens
guugcaguguuuugugccuguuuaaaggcuuu

SEQ ID NO: 386075 - RNA, 32 nt, Homo Sapiens
aagcgucaauuccaaaguagagauuaugaguc

SEQ ID NO: 386076 - RNA, 32 nt, Homo Sapiens
aagaagacagaaaaagaagaacucaaagauac

SEQ ID NO: 386077 - RNA, 32 nt, Homo Sapiens
aauugcaugggcggaaaggcggggguggcugc

SEQ ID NO: 386078 - RNA, 32 nt, Homo Sapiens
gaauccuaaaauugauuauuucauuugaaaca

SEQ ID NO: 386079 - RNA, 32 nt, Homo Sapiens
ucucccagugcuaucccuccccccucccccga

SEQ ID NO: 386080 - RNA, 32 nt, Homo Sapiens
auccuguuauguuaagggaaauccaaauuccc

SEQ ID NO: 386081 - RNA, 32 nt, Homo Sapiens
cucaggucuucuggguggggccccugauggga

SEQ ID NO: 386082 - RNA, 32 nt, Homo Sapiens
cuaacagggaccagcucuccgcuuugccccca

SEQ ID NO: 386083 - RNA, 32 nt, Homo Sapiens
gugccagggcuggugaggaagagcuggggggc

SEQ ID NO: 386084 - RNA, 32 nt, Homo Sapiens
ucaguuauauugcuauuguaaauucuuguuug

SEQ ID NO: 386085 - RNA, 30 nt, Homo Sapiens
gccuuacugaagaugggggaaggguaagaa

SEQ ID NO: 386086 - RNA, 32 nt, Homo Sapiens
gcuccgcggagcagcgccuagggcuggaaggc

SEQ ID NO: 386087 - RNA, 31 nt, Homo Sapiens
cagaggcaaggggugccaggaguccccagcg

SEQ ID NO: 386088 - RNA, 32 nt, Homo Sapiens
gaguagcggcggugugucaggggcuaaagagg

SEQ ID NO: 386089 - RNA, 32 nt, Homo Sapiens
ugucugccagggucuccgacugucccagacgg

SEQ ID NO: 386090 - RNA, 32 nt, Homo Sapiens
aagucuggaagccccacgaccucuuggucuca

SEQ ID NO: 386091 - RNA, 32 nt, Homo Sapiens
auauucaguuuaggggaacaguucuagggagu

SEQ ID NO: 386092 - RNA, 32 nt, Homo Sapiens
cugcagcguggcaagcacuuugcacacuugcu

SEQ ID NO: 386093 - RNA, 32 nt, Homo Sapiens
ggcacgauggcgaggaagccagccccaaggaa

SEQ ID NO: 386094 - RNA, 32 nt, Homo Sapiens
caauuuauauaauaaauggcuaacuuaacggu

SEQ ID NO: 386095 - RNA, 32 nt, Homo Sapiens
uuggaggauuacgggacagcuaccacaguaga

SEQ ID NO: 386096 - RNA, 32 nt, Homo Sapiens
agagaagauagcagggcauggcugggaaccca

SEQ ID NO: 386097 - RNA, 32 nt, Homo Sapiens
cucgccugucucggggagcccaggguaaaggc

SEQ ID NO: 386098 - RNA, 32 nt, Homo Sapiens
aguuaaaugcaaaucagggugguuuugaaaau

SEQ ID NO: 386099 - RNA, 32 nt, Homo Sapiens
aguguaguggcugagcugggggaugcccugga

SEQ ID NO: 386100 - RNA, 32 nt, Homo Sapiens
accauaguaagcuguucccauacucaaauauu

SEQ ID NO: 386101 - RNA, 32 nt, Homo Sapiens
ccagaagccaaacuugaggucuguguaccugc

SEQ ID NO: 386102 - RNA, 32 nt, Homo Sapiens
aaauagcugcuaucuuuuuuuuguacaucuuu

SEQ ID NO: 386103 - RNA, 32 nt, Homo Sapiens
agugagaagguccgccugugcgcguggaacac

SEQ ID NO: 386104 - RNA, 32 nt, Homo Sapiens
ccccagcagaggaggacaguggcucugagcag

SEQ ID NO: 386105 - RNA, 32 nt, Homo Sapiens
uacuuuucuugguuucuaaaucuuauucagug

SEQ ID NO: 386106 - RNA, 32 nt, Homo Sapiens
gagggcccacuuuaugguuugcagauggcuac

SEQ ID NO: 386107 - RNA, 32 nt, Homo Sapiens
cccucugugccccauuccugcugugagcaggg

SEQ ID NO: 386108 - RNA, 32 nt, Homo Sapiens
guggacgaguacuguggaugugaaugugggaa

SEQ ID NO: 386109 - RNA, 32 nt, Homo Sapiens
gacggcgggccugggucucgcgcgcguauugc

SEQ ID NO: 386110 - RNA, 32 nt, Homo Sapiens
aaacuugacaccugaucaggucugggagcuac

SEQ ID NO: 386111 - RNA, 32 nt, Homo Sapiens
aacgagcagcgcacgcucaucaaggccuaugg

SEQ ID NO: 386112 - RNA, 32 nt, Homo Sapiens
ucccagcuacucuggaggcuaaggcaggagaa

SEQ ID NO: 386113 - RNA, 32 nt, Homo Sapiens
gagaacauaaauuuaauaguuuucauccuuuu

SEQ ID NO: 386114 - RNA, 32 nt, Homo Sapiens
ggaaggugcagacuuuuuuggaaguuuccgag

SEQ ID NO: 386115 - RNA, 32 nt, Homo Sapiens
ucacaccgccugcucgggccuggagucccccc

SEQ ID NO: 386116 - RNA, 32 nt, Homo Sapiens
uggcaggaccucagcgcccagcccuuccgucu

SEQ ID NO: 386117 - RNA, 32 nt, Homo Sapiens
gaaagcuauaguggcauagaaaaaguauaaag

SEQ ID NO: 386118 - RNA, 32 nt, Homo Sapiens
ggccaaggguacuugggagagccccucaugga

SEQ ID NO: 386119 - RNA, 32 nt, Homo Sapiens
cccuggguuugggaaacuuaaaugcccauuac

SEQ ID NO: 386120 - RNA, 32 nt, Homo Sapiens
augcuugcaccagagaagcuuuuuaaaauaau

SEQ ID NO: 386121 - RNA, 32 nt, Homo Sapiens
gguguacagccacugugauauuagagguaaua

SEQ ID NO: 386122 - RNA, 32 nt, Homo Sapiens
cucuaucuuuuggagacauauuacaaagguau

SEQ ID NO: 386123 - RNA, 32 nt, Homo Sapiens
cccccauuccucaggacugcacagaggaggac

SEQ ID NO: 386124 - RNA, 32 nt, Homo Sapiens
caaauaaaaaauaguguuuauuuuacucuuuu

SEQ ID NO: 386125 - RNA, 32 nt, Homo Sapiens
uggugcuuccgaccgcugcgcgcggcuccugg

SEQ ID NO: 386126 - RNA, 32 nt, Homo Sapiens
uuucgauuuuacccucaaaauguaaugacuuu

SEQ ID NO: 386127 - RNA, 32 nt, Homo Sapiens
ugugccuacauguucucaugcaugucuaaccu

SEQ ID NO: 386128 - RNA, 32 nt, Homo Sapiens
uaccccuugcccccggccccgcccccuuuuug

SEQ ID NO: 386129 - RNA, 32 nt, Homo Sapiens
aaagaagauuaaaauuucauuagcaugaaugc

SEQ ID NO: 386130 - RNA, 32 nt, Homo Sapiens
uuauaagguuguuuuuaccacaguggucuuuu

SEQ ID NO: 386131 - RNA, 32 nt, Homo Sapiens
cccgugccccgcucgcucucgggagauguuua

SEQ ID NO: 386132 - RNA, 32 nt, Homo Sapiens
auuccuugcuuuucucacuuggagccgagggu

SEQ ID NO: 386133 - RNA, 32 nt, Homo Sapiens
auguguucuucuggcugcaaaggucugaguua

SEQ ID NO: 386134 - RNA, 32 nt, Homo Sapiens
uucuggcugggagcucuugguuacccccuugu

SEQ ID NO: 386135 - RNA, 32 nt, Homo Sapiens
aaaacuuaaaaauaccauuugugaauagcacc

SEQ ID NO: 386136 - RNA, 32 nt, Homo Sapiens
uuggacucuggugaaaaauacuuuacaguggu

SEQ ID NO: 386137 - RNA, 32 nt, Homo Sapiens
uuuuuaaaaauauuuuuuggggcaaaguuaag

SEQ ID NO: 386138 - RNA, 32 nt, Homo Sapiens
gggcccucaggccccagggcaggcaggcugca

SEQ ID NO: 386139 - RNA, 32 nt, Homo Sapiens
uccuggggucccacccuggugcccuggcugug

SEQ ID NO: 386140 - RNA, 32 nt, Homo Sapiens
aggaagggacacggaggccgcccucgucccgc

SEQ ID NO: 386141 - RNA, 32 nt, Homo Sapiens
guguauaugugugugaugugugcucgugugug

SEQ ID NO: 386142 - RNA, 32 nt, Homo Sapiens
ucucuacucccucucuuggaucuggggaggag

SEQ ID NO: 386143 - RNA, 30 nt, Homo Sapiens
agcgggagcgcgcagccagguggaaacuaa

SEQ ID NO: 386144 - RNA, 32 nt, Homo Sapiens
cagacagugucccucccuggaaugugacauga

SEQ ID NO: 386145 - RNA, 32 nt, Homo Sapiens
uggcuccgacagauuccuggucggguggcuuc

SEQ ID NO: 386146 - RNA, 32 nt, Homo Sapiens
cggagccggaggugggggccgaaccagccaag

SEQ ID NO: 386147 - RNA, 31 nt, Homo Sapiens
auaaaggcuuuuaugugucuaacuagagaca

SEQ ID NO: 386148 - RNA, 32 nt, Homo Sapiens
uugaccagggugagaagccaaugguauagacu

SEQ ID NO: 386149 - RNA, 32 nt, Homo Sapiens
uuuugcccagaauccauuucucuucugaauuu

SEQ ID NO: 386150 - RNA, 32 nt, Homo Sapiens
agcuugccuuuggcuuuccccaggauuucugu

SEQ ID NO: 386151 - RNA, 32 nt, Homo Sapiens
ugccaccacccccagcuaauuuuuguauuuuu

SEQ ID NO: 386152 - RNA, 32 nt, Homo Sapiens
auaaaaauuacaucauaccgucuauuuugccc

SEQ ID NO: 386153 - RNA, 32 nt, Homo Sapiens
gggagaaaaaucccaaaccagcuccauuggau

SEQ ID NO: 386154 - RNA, 32 nt, Homo Sapiens
guccugccuuaggcuccugaguagcuggggau

SEQ ID NO: 386155 - RNA, 32 nt, Homo Sapiens
agaacuccaccucugcuuugccgguguagauc

SEQ ID NO: 386156 - RNA, 30 nt, Homo Sapiens
uauauucuugacugcauccgcuaaaaaugu

SEQ ID NO: 386157 - RNA, 32 nt, Homo Sapiens
aauauugaauucccaaccauauuacagagaac

SEQ ID NO: 386158 - RNA, 32 nt, Homo Sapiens
gaaauuccgagaccgaaacggaugcgcgcugc

SEQ ID NO: 386159 - RNA, 32 nt, Homo Sapiens
gacugugaggcaccccaccuugcuccugaugc

SEQ ID NO: 386160 - RNA, 32 nt, Homo Sapiens
gccccugcgccggcugcccguugcuagcuaug

SEQ ID NO: 386161 - RNA, 32 nt, Homo Sapiens
uuuccggcccgcggcgaccgccggcaacuguu

SEQ ID NO: 386162 - RNA, 32 nt, Homo Sapiens
cccuaacccagccauaaaucugcauccuggga

SEQ ID NO: 386163 - RNA, 32 nt, Homo Sapiens
gagagggcgcggcgcggagcgcagccaggggu

SEQ ID NO: 386164 - RNA, 32 nt, Homo Sapiens
cagccggcggcggcccgggcccagcaaccaug

SEQ ID NO: 386165 - RNA, 32 nt, Homo Sapiens
auauauagaaaagaggagaggaaaacuauucc

SEQ ID NO: 386166 - RNA, 32 nt, Homo Sapiens
auaaaacacaugccaaucuguuagcaguccug

SEQ ID NO: 386167 - RNA, 32 nt, Homo Sapiens
uuuauuucacgaaaguuuuuuuaaagaacaga

SEQ ID NO: 386168 - RNA, 32 nt, Homo Sapiens
cagagcagccucuuccucuccuggucccagaa

SEQ ID NO: 386169 - RNA, 30 nt, Homo Sapiens
aggacaugcgugggcgcuaugaggcaagcc

SEQ ID NO: 386170 - RNA, 32 nt, Homo Sapiens
guuaggaaguaauuuucgugcuaacauuaaaa

SEQ ID NO: 386171 - RNA, 32 nt, Homo Sapiens
aggaggguugugccgccccaggcuguggggag

SEQ ID NO: 386172 - RNA, 32 nt, Homo Sapiens
caaaugacugugccccauuagcaagaauucag

SEQ ID NO: 386173 - RNA, 32 nt, Homo Sapiens
ggggugggaggucuugcuagaaugggaagggu

SEQ ID NO: 386174 - RNA, 32 nt, Homo Sapiens
cugcucucccaucaagcuucagaugccacguu

SEQ ID NO: 386175 - RNA, 32 nt, Homo Sapiens
accaggagcugaugaacgugaagcuggcccug

SEQ ID NO: 386176 - RNA, 32 nt, Homo Sapiens
ccucgaccgucgcuccuaccccggccaccgcu

SEQ ID NO: 386177 - RNA, 32 nt, Homo Sapiens
gggaagcacccggugucuggcuccccuuccaa

SEQ ID NO: 386178 - RNA, 32 nt, Homo Sapiens
aucuguagaaaagaagauggcccagguccugc

SEQ ID NO: 386179 - RNA, 32 nt, Homo Sapiens
caggagauauucugucagcucuuuggagaaga

SEQ ID NO: 386180 - RNA, 32 nt, Homo Sapiens
agacgaccgguucgucgccuccuugcccguga

SEQ ID NO: 386181 - RNA, 32 nt, Homo Sapiens
aguuuugagggggacauguguuaaaucacaga

SEQ ID NO: 386182 - RNA, 32 nt, Homo Sapiens
aggacugggaucccggccgcggcugcuggaag

SEQ ID NO: 386183 - RNA, 32 nt, Homo Sapiens
uuuggucugguucaaggcaaguagcaagaaua

SEQ ID NO: 386184 - RNA, 32 nt, Homo Sapiens
augagguccuuucuguuuuuuauauguaaaca

SEQ ID NO: 386185 - RNA, 32 nt, Homo Sapiens
gauaauauugauuccucacaucuuuaacuuag

SEQ ID NO: 386186 - RNA, 32 nt, Homo Sapiens
cuuagauggaaauguaucuuaugaauagagac

SEQ ID NO: 386187 - RNA, 32 nt, Homo Sapiens
guuguguugguaguuuaccuaaugcccuuacc

SEQ ID NO: 386188 - RNA, 32 nt, Homo Sapiens
uacugauaguuuuugagcuggaucuuaaaaga

SEQ ID NO: 386189 - RNA, 32 nt, Homo Sapiens
acaguuacauuuccaacagggagaagggggag

SEQ ID NO: 386190 - RNA, 32 nt, Homo Sapiens
cggcucuugggguucuggagcauugaacuucc

SEQ ID NO: 386191 - RNA, 32 nt, Homo Sapiens
aacccuuaacauuuggguaugugguccacccu

SEQ ID NO: 386192 - RNA, 32 nt, Homo Sapiens
agacuuguuucaucuccggaaaugcaaaacca

SEQ ID NO: 386193 - RNA, 32 nt, Homo Sapiens
ggcugggagcagcuucaugacuacgcggagcg

SEQ ID NO: 386194 - RNA, 32 nt, Homo Sapiens
aggaaguacaagcauuuaaaauauguaguucc

SEQ ID NO: 386195 - RNA, 32 nt, Homo Sapiens
acaguuuucuaaaacaacuucagcaaauggua

SEQ ID NO: 386196 - RNA, 32 nt, Homo Sapiens
ccucuaguuugagucaagguccaguuugaaug

SEQ ID NO: 386197 - RNA, 32 nt, Homo Sapiens
ucuuaaagucugaccagguaguccagguguuc

SEQ ID NO: 386198 - RNA, 32 nt, Homo Sapiens
uuagaguuuucguguuacaucaccuaaagaga

SEQ ID NO: 386199 - RNA, 32 nt, Homo Sapiens
ccaccacuuccacccguccuacgccacugcca

SEQ ID NO: 386200 - RNA, 32 nt, Homo Sapiens
gguuuguuuguucauccuuucugucagcaugg

SEQ ID NO: 386201 - RNA, 32 nt, Homo Sapiens
uggcuaauauauuguccuuguguacagaauau

SEQ ID NO: 386202 - RNA, 32 nt, Homo Sapiens
uucuaagaagagcggcguggggggcucggcga

SEQ ID NO: 386203 - RNA, 31 nt, Homo Sapiens
cuuccaugaaagaaaaauggauuacauuuuu

SEQ ID NO: 386204 - RNA, 29 nt, Homo Sapiens
gccaaugguaucugggcggagcucacaga

SEQ ID NO: 386205 - RNA, 31 nt, Homo Sapiens
gucuggagggcggugcgaggggccgagccga

SEQ ID NO: 386206 - RNA, 32 nt, Homo Sapiens
aaggcuuccuuccucucacucggccucaugga

SEQ ID NO: 386207 - RNA, 29 nt, Homo Sapiens
ugagaaccgauuuucaguuuaguguagca

SEQ ID NO: 386208 - RNA, 32 nt, Homo Sapiens
gcgaagcuguuucugugaaacuguauauuuug

SEQ ID NO: 386209 - RNA, 32 nt, Homo Sapiens
cccgcauaagucuguacuuccauccccucauc

SEQ ID NO: 386210 - RNA, 32 nt, Homo Sapiens
gggccugccucucucagcauccccucuagcuc

SEQ ID NO: 386211 - RNA, 32 nt, Homo Sapiens
ugccaaaugaaacuuuuuuccuaaguaacugu

SEQ ID NO: 386212 - RNA, 32 nt, Homo Sapiens
uacaaaauggaagugcuuuugcgaccugggcu

SEQ ID NO: 386213 - RNA, 32 nt, Homo Sapiens
uagcuagcuuuccuuuuugucuagggcuuccu

SEQ ID NO: 386214 - RNA, 32 nt, Homo Sapiens
guauaccaaacaagauuguuguaaaucauauu

SEQ ID NO: 386215 - RNA, 32 nt, Homo Sapiens
auacugagugggagaucggcugucuggagugu

SEQ ID NO: 386216 - RNA, 32 nt, Homo Sapiens
cuaaaucagaacucaacagccugggaaaauca

SEQ ID NO: 386217 - RNA, 32 nt, Homo Sapiens
gccagcaacugggaaggcuuggagcggcacug

SEQ ID NO: 386218 - RNA, 32 nt, Homo Sapiens
uuauuacagacaccucuuuccuuuagccagag

SEQ ID NO: 386219 - RNA, 32 nt, Homo Sapiens
ugccccaacuguaaagcagguggugggagaag

SEQ ID NO: 386220 - RNA, 32 nt, Homo Sapiens
gagccgcucccugcccugcccggagccccagu

SEQ ID NO: 386221 - RNA, 32 nt, Homo Sapiens
gccugcaccgagcuccggggccccacacccgc

SEQ ID NO: 386222 - RNA, 32 nt, Homo Sapiens
agagagcgcugcgccugccgccgccccaacag

SEQ ID NO: 386223 - RNA, 32 nt, Homo Sapiens
ggcuuaguugcuucccaccccagccugacaca

SEQ ID NO: 386224 - RNA, 31 nt, Homo Sapiens
uguucacuuuaccuucugccaaaugcagaga

SEQ ID NO: 386225 - RNA, 32 nt, Homo Sapiens
gcccuggaccuuuugccuauguguguggauuc

SEQ ID NO: 386226 - RNA, 32 nt, Homo Sapiens
ggccccaggaggaccucgggcugugggccggg

SEQ ID NO: 386227 - RNA, 32 nt, Homo Sapiens
cugcaacccccuccaggcucagaccuggggac

SEQ ID NO: 386228 - RNA, 32 nt, Homo Sapiens
gaggcuuugcgguggcugcuuggcuuggcggu

SEQ ID NO: 386229 - RNA, 32 nt, Homo Sapiens
auuacucuuuaacaugauaaaugaauuuacca

SEQ ID NO: 386230 - RNA, 32 nt, Homo Sapiens
acauggcagcggguagcuccuggggcugagcc

SEQ ID NO: 386231 - RNA, 32 nt, Homo Sapiens
ccucucugcuuccccccuccccaggcuucagu

SEQ ID NO: 386232 - RNA, 32 nt, Homo Sapiens
acaccuggaagcaaaaucauagugcaaaaaua

SEQ ID NO: 386233 - RNA, 32 nt, Homo Sapiens
aaacacccgaacuggucaacucucaagagacc

SEQ ID NO: 386234 - RNA, 32 nt, Homo Sapiens
uuugugacugguuucacuuagcauaaagucuu

SEQ ID NO: 386235 - RNA, 32 nt, Homo Sapiens
uacucugacccauagcacucuuguuugcuuug

SEQ ID NO: 386236 - RNA, 32 nt, Homo Sapiens
agcuaggcauaguaccugaggccaggaggucc

SEQ ID NO: 386237 - RNA, 32 nt, Homo Sapiens
cucggagagaauuuuuccccacagcuccugaa

SEQ ID NO: 386238 - RNA, 32 nt, Homo Sapiens
ccucacugcacccaccaagucaagcagagcug

SEQ ID NO: 386239 - RNA, 32 nt, Homo Sapiens
ccccuccccccuccgcuuuuuaccguaugggu

SEQ ID NO: 386240 - RNA, 32 nt, Homo Sapiens
gaagagcugcggcggcagcuggagacgcugag

SEQ ID NO: 386241 - RNA, 32 nt, Homo Sapiens
cauugccuucacaccacuggguuugccagaaa

SEQ ID NO: 386242 - RNA, 32 nt, Homo Sapiens
ccuggucccccggccccugccccaucuccuca

SEQ ID NO: 386243 - RNA, 32 nt, Homo Sapiens
gcuggcagguggccucacccacagcaggggag

SEQ ID NO: 386244 - RNA, 32 nt, Homo Sapiens
cggaggcagagaggcuccauggccgugcugcu

SEQ ID NO: 386245 - RNA, 32 nt, Homo Sapiens
auaagcauaugugauaguggcucuaguuuuau

SEQ ID NO: 386246 - RNA, 32 nt, Homo Sapiens
caugguggagggcacuucagguccgugggccg

SEQ ID NO: 386247 - RNA, 32 nt, Homo Sapiens
gcaaagcggugauggaagggcagguggacaga

SEQ ID NO: 386248 - RNA, 30 nt, Homo Sapiens
uaaaaugucuguguugaaguaccuaguuuc

SEQ ID NO: 386249 - RNA, 32 nt, Homo Sapiens
caccggccagcgccccaccucccuggcuggag

SEQ ID NO: 386250 - RNA, 32 nt, Homo Sapiens
cccgcgggacgccacgccugcgcgccagggau

SEQ ID NO: 386251 - RNA, 32 nt, Homo Sapiens
uguguuagcaugccuguaugugagcgcgugug

SEQ ID NO: 386252 - RNA, 32 nt, Homo Sapiens
uccggcuacuugggaggcugaggugggaggga

SEQ ID NO: 386253 - RNA, 32 nt, Homo Sapiens
gggguaggggccaaggggaaagagaccggcau

SEQ ID NO: 386254 - RNA, 29 nt, Homo Sapiens
accaaugaaaaagccaagugaacguggca

SEQ ID NO: 386255 - RNA, 32 nt, Homo Sapiens
cugaagaaaaagacauguggguuacaaacugg

SEQ ID NO: 386256 - RNA, 32 nt, Homo Sapiens
aaacugccaucuccaaacuagaaaugccaucu

SEQ ID NO: 386257 - RNA, 32 nt, Homo Sapiens
aaggaagucugcucuguacaauugucccucau

SEQ ID NO: 386258 - RNA, 32 nt, Homo Sapiens
uggccuacacggauauggggagccacugaggg

SEQ ID NO: 386259 - RNA, 32 nt, Homo Sapiens
cgccuccugccagcuuccuuagaccaggcagg

SEQ ID NO: 386260 - RNA, 32 nt, Homo Sapiens
uugguaauuacuaaaacucuguaaucuccaaa

SEQ ID NO: 386261 - RNA, 32 nt, Homo Sapiens
gccaggaggguugccccuccucaugggaaugu

SEQ ID NO: 386262 - RNA, 32 nt, Homo Sapiens
ggacgccaaccuggcaaagaggaggcacgcgg

SEQ ID NO: 386263 - RNA, 32 nt, Homo Sapiens
cuugcccucuucugcgaaauaagccucauccu

SEQ ID NO: 386264 - RNA, 32 nt, Homo Sapiens
auuuaugucuuagucuuuuuuauuacaaauua

SEQ ID NO: 386265 - RNA, 32 nt, Homo Sapiens
gaaccagaauaaaaggauuucgaaacagaaaa

SEQ ID NO: 386266 - RNA, 32 nt, Homo Sapiens
uacaggggaugaauucuucaaauaggagccga

SEQ ID NO: 386267 - RNA, 32 nt, Homo Sapiens
gccuuuguaaacaguuuccccucccccacccc

SEQ ID NO: 386268 - RNA, 32 nt, Homo Sapiens
cugccucugccgcuccuccacaucuugccgcu

SEQ ID NO: 386269 - RNA, 32 nt, Homo Sapiens
gguggugguaucccugcucugcuggagaggaa

SEQ ID NO: 386270 - RNA, 32 nt, Homo Sapiens
uggggaaguggaagggaagcuggcgggggaga

SEQ ID NO: 386271 - RNA, 32 nt, Homo Sapiens
uccaauucaaggauguuuaucggccucucuua

SEQ ID NO: 386272 - RNA, 32 nt, Homo Sapiens
uuuuccaaaaauacuucugcaacucaugaaca

SEQ ID NO: 386273 - RNA, 32 nt, Homo Sapiens
uggcgcugaucuaccuucugagauaucauccu

SEQ ID NO: 386274 - RNA, 32 nt, Homo Sapiens
guccaguggcugaccgccuugcuggagcggag

SEQ ID NO: 386275 - RNA, 32 nt, Homo Sapiens
auaaaugguguuuaaauaugcauucauuuuaa

SEQ ID NO: 386276 - RNA, 32 nt, Homo Sapiens
cuaagucaguuucuacuucaguuuuuguuauu

SEQ ID NO: 386277 - RNA, 32 nt, Homo Sapiens
gaccaugccccgagacaacauggccuccuuga

SEQ ID NO: 386278 - RNA, 32 nt, Homo Sapiens
aggaggcaggcucgccggggcuggcgcuggug

SEQ ID NO: 386279 - RNA, 32 nt, Homo Sapiens
ccggggaccgagcaucucuggugcugauguuc

SEQ ID NO: 386280 - RNA, 31 nt, Homo Sapiens
ugucuggccauauguggguguuuucuaauuu

SEQ ID NO: 386281 - RNA, 32 nt, Homo Sapiens
uucucauaguguauuugaaguaguuauacucc

SEQ ID NO: 386282 - RNA, 32 nt, Homo Sapiens
ccccugagggaacagugccgucuuagagccag

SEQ ID NO: 386283 - RNA, 32 nt, Homo Sapiens
agucuuuagggguugggcuggaugccgaggua

SEQ ID NO: 386284 - RNA, 32 nt, Homo Sapiens
aauuguagagaauuaugagacacaaugugaug

SEQ ID NO: 386285 - RNA, 32 nt, Homo Sapiens
ucuuguacaaacgaugugcuuugaagauguua

SEQ ID NO: 386286 - RNA, 32 nt, Homo Sapiens
cuccuuucuccucuccuucagccaaucauuau

SEQ ID NO: 386287 - RNA, 32 nt, Homo Sapiens
ugaacgaaaaagagguagcacuacaaacacaa

SEQ ID NO: 386288 - RNA, 30 nt, Homo Sapiens
gcucagugucuggcugcagagcagugggcc

SEQ ID NO: 386289 - RNA, 32 nt, Homo Sapiens
aggaugcauuauaaacugaagaggcuuuuaaa

SEQ ID NO: 386290 - RNA, 32 nt, Homo Sapiens
guauaguaguuaucuuaaaauauacacuccua

SEQ ID NO: 386291 - RNA, 29 nt, Homo Sapiens
ucuuuucuuaguuucagaaguacuggcau

SEQ ID NO: 386292 - RNA, 32 nt, Homo Sapiens
uucucauccuucccaacccagugccguuuauu

SEQ ID NO: 386293 - RNA, 32 nt, Homo Sapiens
agcaggagcuauuuucugaaaagugaaaagcu

SEQ ID NO: 386294 - RNA, 32 nt, Homo Sapiens
ucggccugguggccgcgaugcugcuggaaacg

SEQ ID NO: 386295 - RNA, 32 nt, Homo Sapiens
gugcaaacauagccacuuuuuugucaagaguu

SEQ ID NO: 386296 - RNA, 32 nt, Homo Sapiens
cuguauuacagaggacacauuuuuguuuguuu

SEQ ID NO: 386297 - RNA, 32 nt, Homo Sapiens
ugaucuuuccuguugaagaaauccauguuaua

SEQ ID NO: 386298 - RNA, 32 nt, Homo Sapiens
ucugugccuccuaccauguucccuuuaacugu

SEQ ID NO: 386299 - RNA, 32 nt, Homo Sapiens
cauugggaaaaguaaacugaaggaauuuuugu

SEQ ID NO: 386300 - RNA, 32 nt, Homo Sapiens
aaaaugcuaugaaagcuauaugcauuugguac

SEQ ID NO: 386301 - RNA, 32 nt, Homo Sapiens
ggacggcuucucacgcuuuguuuacucucuuc

SEQ ID NO: 386302 - RNA, 32 nt, Homo Sapiens
gugauuugugugaagaagagaauguuugucuu

SEQ ID NO: 386303 - RNA, 32 nt, Homo Sapiens
aagcgaugccccacccugcuucugcucgcccu

SEQ ID NO: 386304 - RNA, 32 nt, Homo Sapiens
cagcugggccccagaacugugccuggcccagu

SEQ ID NO: 386305 - RNA, 32 nt, Homo Sapiens
ccccagccugcgccugcugcaugcccucucag

SEQ ID NO: 386306 - RNA, 32 nt, Homo Sapiens
cauccuuaauuuuucuucuccuucuguauaua

SEQ ID NO: 386307 - RNA, 32 nt, Homo Sapiens
ggagagggaaacuggucuaaaauacuauugca

SEQ ID NO: 386308 - RNA, 32 nt, Homo Sapiens
ccugcccugguuccguugcgcgccccggaugu

SEQ ID NO: 386309 - RNA, 27 nt, Homo Sapiens
cuugguccugcagucagccccgaaagg

SEQ ID NO: 386310 - RNA, 32 nt, Homo Sapiens
cuccucccggcgucagcccgccagaggccgcg

SEQ ID NO: 386311 - RNA, 32 nt, Homo Sapiens
gcugacgaauaugauccuauguuuccuaacga

SEQ ID NO: 386312 - RNA, 32 nt, Homo Sapiens
gcucccgccagccgcuccccagcccugccgca

SEQ ID NO: 386313 - RNA, 32 nt, Homo Sapiens
cauuucacucuggguaccaaauuuaagcaaga

SEQ ID NO: 386314 - RNA, 29 nt, Homo Sapiens
ugagccauauguacauaaucuagauuuug

SEQ ID NO: 386315 - RNA, 32 nt, Homo Sapiens
aaguucuccaauucuuuuuuuuugcuuacucu

SEQ ID NO: 386316 - RNA, 32 nt, Homo Sapiens
ucacccccaggacccaggaucuucuccuuucu

SEQ ID NO: 386317 - RNA, 32 nt, Homo Sapiens
uuuuagaccccgccuccacugcccuggagccc

SEQ ID NO: 386318 - RNA, 32 nt, Homo Sapiens
ugccucccaagccugagucuccagcccaaacc

SEQ ID NO: 386319 - RNA, 32 nt, Homo Sapiens
uaucuuguuguucaguuugggugucugcuaaa

SEQ ID NO: 386320 - RNA, 32 nt, Homo Sapiens
aauuaaaaacaaaaacaacucaugccacagua

SEQ ID NO: 386321 - RNA, 32 nt, Homo Sapiens
cucauggcaccucagccagggguguagccaag

SEQ ID NO: 386322 - RNA, 32 nt, Homo Sapiens
aggacugggggaacuggaguguccuugcugua

SEQ ID NO: 386323 - RNA, 32 nt, Homo Sapiens
agcagccuucagcuccuccuucguguuccagg

SEQ ID NO: 386324 - RNA, 30 nt, Homo Sapiens
ggcggcggcggcggcggcgauccacaguga

SEQ ID NO: 386325 - RNA, 32 nt, Homo Sapiens
cgccgcccccagccaggcgccaugcugccgcu

SEQ ID NO: 386326 - RNA, 32 nt, Homo Sapiens
ggcucagguaccucacucuccugccuugugcg

SEQ ID NO: 386327 - RNA, 32 nt, Homo Sapiens
cauauuaguuuuacuuuuuuuuuuuuuuaaau

SEQ ID NO: 386328 - RNA, 32 nt, Homo Sapiens
gcugcccggaggagccgagguuggcggacagc

SEQ ID NO: 386329 - RNA, 32 nt, Homo Sapiens
gaacagcccagcugugccaacauaccuggggc

SEQ ID NO: 386330 - RNA, 32 nt, Homo Sapiens
ugcggaggugguggaaaggcuggacucagcag

SEQ ID NO: 386331 - RNA, 32 nt, Homo Sapiens
acagcccggcccgcggccccggcggccaaucg

SEQ ID NO: 386332 - RNA, 27 nt, Homo Sapiens
aaauaucauuaauucugcucaucacag

SEQ ID NO: 386333 - RNA, 32 nt, Homo Sapiens
agucugggcauguuuuucuagagcagcugugc

SEQ ID NO: 386334 - RNA, 32 nt, Homo Sapiens
acucugaccuucugccugcuguucuccccaga

SEQ ID NO: 386335 - RNA, 32 nt, Homo Sapiens
ccagcauacgauuguuauugagcaauaugaaa

SEQ ID NO: 386336 - RNA, 32 nt, Homo Sapiens
guaagggccugccugcugcucucggccugaca

SEQ ID NO: 386337 - RNA, 32 nt, Homo Sapiens
auggccccagcaccccacugcccucucuccug

SEQ ID NO: 386338 - RNA, 32 nt, Homo Sapiens
ccaacacuuuucuggcagcccuuuuuguugga

SEQ ID NO: 386339 - RNA, 32 nt, Homo Sapiens
cccaggccuugcuggggugcagggguauauca

SEQ ID NO: 386340 - RNA, 32 nt, Homo Sapiens
uguaucauggcauuugucuacuugcuuauuac

SEQ ID NO: 386341 - RNA, 28 nt, Homo Sapiens
auaaaauaaaagacauaacauuuauguc

SEQ ID NO: 386342 - RNA, 32 nt, Homo Sapiens
agacacagaaaagacaaaggaauguacuaaac

SEQ ID NO: 386343 - RNA, 32 nt, Homo Sapiens
uguccuaguuacugccuauggaggcaguguuu

SEQ ID NO: 386344 - RNA, 32 nt, Homo Sapiens
uuuguuggucugaauacaaacauuucacuucu

SEQ ID NO: 386345 - RNA, 32 nt, Homo Sapiens
ugauuacaaaauuuauaauuuaauaaauacua

SEQ ID NO: 386346 - RNA, 32 nt, Homo Sapiens
uauuuuuguaaaugauucugugcccaggagca

SEQ ID NO: 386347 - RNA, 32 nt, Homo Sapiens
cugaaaugacguggccuugguuuugcaggaga

SEQ ID NO: 386348 - RNA, 32 nt, Homo Sapiens
cgccuggaaucccagcacuuugggaggccaag

SEQ ID NO: 386349 - RNA, 32 nt, Homo Sapiens
gacgagacgacggcgcugcugcuggugaagga

SEQ ID NO: 386350 - RNA, 32 nt, Homo Sapiens
caggcggcccgaggacuuacggucggcacuuc

SEQ ID NO: 386351 - RNA, 32 nt, Homo Sapiens
agcaauaaaaauuaaagugaaggaaaauacug

SEQ ID NO: 386352 - RNA, 32 nt, Homo Sapiens
gccacccccagggaagaacauaaaggguugca

SEQ ID NO: 386353 - RNA, 32 nt, Homo Sapiens
ucugaccccucccuccucccucuggaggugau

SEQ ID NO: 386354 - RNA, 32 nt, Homo Sapiens
cucuucugccagcaccuugcuccccgcugccc

SEQ ID NO: 386355 - RNA, 32 nt, Homo Sapiens
ugggcagccccggcgagaccuccacacuucgu

SEQ ID NO: 386356 - RNA, 32 nt, Homo Sapiens
cccggccaaggcggaggcugcggcuccgacgg

SEQ ID NO: 386357 - RNA, 32 nt, Homo Sapiens
cuuagauuuuucuggggaaauguucagauaca

SEQ ID NO: 386358 - RNA, 32 nt, Homo Sapiens
ucuuagaagagaaaaugguguaauuguauuaa

SEQ ID NO: 386359 - RNA, 32 nt, Homo Sapiens
aaaugggaaaauuaaacuucuacuaacauuuc

SEQ ID NO: 386360 - RNA, 32 nt, Homo Sapiens
cggugaaggaggaggaggagccgagcgggcgc

SEQ ID NO: 386361 - RNA, 32 nt, Homo Sapiens
caacccccuguaagguuccauccaccccugcg

SEQ ID NO: 386362 - RNA, 30 nt, Homo Sapiens
gugguggcgcccgauggccggcgaggggcg

SEQ ID NO: 386363 - RNA, 32 nt, Homo Sapiens
ugugaucugugcuagcugugaggcagcucugg

SEQ ID NO: 386364 - RNA, 32 nt, Homo Sapiens
ggugggcucgcacccccucgaacccaccuaga

SEQ ID NO: 386365 - RNA, 32 nt, Homo Sapiens
ccccaccgcccucccucuccccggggcccaug

SEQ ID NO: 386366 - RNA, 32 nt, Homo Sapiens
cuggaggugcgcgucccgugggguggcaaggc

SEQ ID NO: 386367 - RNA, 32 nt, Homo Sapiens
ugugccugcugucauggagauagggugauuuc

SEQ ID NO: 386368 - RNA, 32 nt, Homo Sapiens
accuuuuuucuuuuucuuuuuuacauuuaaag

SEQ ID NO: 386369 - RNA, 32 nt, Homo Sapiens
ugucucggccccacuucccucauuugcucugu

SEQ ID NO: 386370 - RNA, 32 nt, Homo Sapiens
auccuuccuggcggccgccugcugcccugacg

SEQ ID NO: 386371 - RNA, 32 nt, Homo Sapiens
gugguagcucuggcuuagacaccaccuggagu

SEQ ID NO: 386372 - RNA, 32 nt, Homo Sapiens
ugggacuucuucccuuccuccucagcccccga

SEQ ID NO: 386373 - RNA, 32 nt, Homo Sapiens
cauuauuuuuaaaugauauguaguuguacaua

SEQ ID NO: 386374 - RNA, 32 nt, Homo Sapiens
aucacagugugucccuguccaguguuggugcu

SEQ ID NO: 386375 - RNA, 32 nt, Homo Sapiens
uaauuuuuuucuucuuuuuuaaaauauuccca

SEQ ID NO: 386376 - RNA, 32 nt, Homo Sapiens
ccguucaggccucccucugugcacuuugcaaa

SEQ ID NO: 386377 - RNA, 32 nt, Homo Sapiens
ccacggugccuccugcauguccugcugcccug

SEQ ID NO: 386378 - RNA, 32 nt, Homo Sapiens
gucccgcggccaggcccggccggagcggcggc

SEQ ID NO: 386379 - RNA, 32 nt, Homo Sapiens
gccgaggccccggcaugucaagccaucucagg

SEQ ID NO: 386380 - RNA, 32 nt, Homo Sapiens
uguguguauuucauacacacacaaggaccugg

SEQ ID NO: 386381 - RNA, 32 nt, Homo Sapiens
guuguuuuguaccuggagaacuuuuuaugaau

SEQ ID NO: 386382 - RNA, 32 nt, Homo Sapiens
cccugagagcgaggacagcgccgcccggcccg

SEQ ID NO: 386383 - RNA, 32 nt, Homo Sapiens
gccuuuucuuuaacuuuuuuucuucuacuuuu

SEQ ID NO: 386384 - RNA, 32 nt, Homo Sapiens
gaacugaucauuuggugacuggagagguggau

SEQ ID NO: 386385 - RNA, 32 nt, Homo Sapiens
cacacaagggaaggacagaaaggagaguggcc

SEQ ID NO: 386386 - RNA, 32 nt, Homo Sapiens
accccgagggcgggcgcaagggggcgggcgcu

SEQ ID NO: 386387 - RNA, 32 nt, Homo Sapiens
gacagcuugagaauagaggaaaaaauaaaagc

SEQ ID NO: 386388 - RNA, 30 nt, Homo Sapiens
ucaccggcgcccgacccgagcgcgcccaga

SEQ ID NO: 386389 - RNA, 32 nt, Homo Sapiens
gaaguguuuauuuucucucauauccaccaaac

SEQ ID NO: 386390 - RNA, 30 nt, Homo Sapiens
uuaggaccacuuguuguacaucugaauaau

SEQ ID NO: 386391 - RNA, 32 nt, Homo Sapiens
agccugaguugacaaugauaccuaguaaucuu

SEQ ID NO: 386392 - RNA, 32 nt, Homo Sapiens
gcgggggcggggggcggggacguagggcuaag

SEQ ID NO: 386393 - RNA, 32 nt, Homo Sapiens
uuaaguuagggggacaggaggcuacaggaaga

SEQ ID NO: 386394 - RNA, 32 nt, Homo Sapiens
aaacaauucccuucuuuuucaucccagaccaa

SEQ ID NO: 386395 - RNA, 32 nt, Homo Sapiens
accccaggaggccccaggccuguccugaauug

SEQ ID NO: 386396 - RNA, 32 nt, Homo Sapiens
uauuaaauaaaauuauuuuaaguuuuaguguc

SEQ ID NO: 386397 - RNA, 32 nt, Homo Sapiens
acaggaaggcguaugggguggggggugugcau

SEQ ID NO: 386398 - RNA, 32 nt, Homo Sapiens
gucacaguagccaggcuuggguggguucagca

SEQ ID NO: 386399 - RNA, 32 nt, Homo Sapiens
ccgccgguauugagggcgggugcgggugcaca

SEQ ID NO: 386400 - RNA, 32 nt, Homo Sapiens
cugaagagcacggucccccaggaggcagcuca

SEQ ID NO: 386401 - RNA, 32 nt, Homo Sapiens
aggauuucaaggacggaauuaguauugcacag

SEQ ID NO: 386402 - RNA, 32 nt, Homo Sapiens
uagaaccacccccacucugcacucucccccuc

SEQ ID NO: 386403 - RNA, 32 nt, Homo Sapiens
acugguaugauguucuguccccgggggagaug

SEQ ID NO: 386404 - RNA, 32 nt, Homo Sapiens
ccgggucucacugagcagcccgagggccacuc

SEQ ID NO: 386405 - RNA, 32 nt, Homo Sapiens
cccgcggcgugggaggcugcgcggcgaugcug

SEQ ID NO: 386406 - RNA, 32 nt, Homo Sapiens
ccagagccggcccagcugcacacacacaccau

SEQ ID NO: 386407 - RNA, 32 nt, Homo Sapiens
gcugcgcgcgccccccagucccgcacccguuc

SEQ ID NO: 386408 - RNA, 32 nt, Homo Sapiens
aagaguauaauggauuguuuguaacacaaaua

SEQ ID NO: 386409 - RNA, 32 nt, Homo Sapiens
ccccaccucugggccuggccagugggcuccug

SEQ ID NO: 386410 - RNA, 32 nt, Homo Sapiens
gaauaauauuuauguuuacaauguaacuuuuc

SEQ ID NO: 386411 - RNA, 25 nt, Homo Sapiens
acucaccgguuugaccagaaauucu

SEQ ID NO: 386412 - RNA, 32 nt, Homo Sapiens
gccaccuccuucccggccgcccccuccccacu

SEQ ID NO: 386413 - RNA, 32 nt, Homo Sapiens
guccucaguaucugcacccauccauuugaguu

SEQ ID NO: 386414 - RNA, 32 nt, Homo Sapiens
ugcucaaaauuugaaagcaaaugggaaucagu

SEQ ID NO: 386415 - RNA, 32 nt, Homo Sapiens
aauacagaauauuucaaucaacuaaaagacaa

SEQ ID NO: 386416 - RNA, 32 nt, Homo Sapiens
aucccucccugcccaggccgcgagaaugacca

SEQ ID NO: 386417 - RNA, 32 nt, Homo Sapiens
acccagcauuuuuuuuuuuuuaauuuuuuuaa

SEQ ID NO: 386418 - RNA, 32 nt, Homo Sapiens
uuccggauuccuuggugagccuggacaagccc

SEQ ID NO: 386419 - RNA, 32 nt, Homo Sapiens
auaauaaaucaucauugaucaagaugucuuca

SEQ ID NO: 386420 - RNA, 32 nt, Homo Sapiens
gaaagguuuucuucuuuuugcuucaaaaacau

SEQ ID NO: 386421 - RNA, 32 nt, Homo Sapiens
ggggagcccggccgaggcgccuuuccacguuc

SEQ ID NO: 386422 - RNA, 32 nt, Homo Sapiens
aaucugaguuuuacuugaaauuuugcagaaua

SEQ ID NO: 386423 - RNA, 32 nt, Homo Sapiens
uucuccagcugucaccucccccaggagaucag

SEQ ID NO: 386424 - RNA, 32 nt, Homo Sapiens
uauuuguaauuuaauguauuuaccacauugac

SEQ ID NO: 386425 - RNA, 32 nt, Homo Sapiens
cgcuucuccucugcgcgccggggccucgaggc

SEQ ID NO: 386426 - RNA, 32 nt, Homo Sapiens
agugucucauugucaucccugcuucuguuugg

SEQ ID NO: 386427 - RNA, 32 nt, Homo Sapiens
auauacucugcagcuguuagaaugugcaagca

SEQ ID NO: 386428 - RNA, 32 nt, Homo Sapiens
gaguaucagcaaucugggaagugacaggguua

SEQ ID NO: 386429 - RNA, 29 nt, Homo Sapiens
uauuuuguauguauguacaggcuguugug

SEQ ID NO: 386430 - RNA, 31 nt, Homo Sapiens
ggaggaggcgcagggccgacggccgaguacu

SEQ ID NO: 386431 - RNA, 32 nt, Homo Sapiens
aacuguggggccugcacacagcccuuccacag

SEQ ID NO: 386432 - RNA, 32 nt, Homo Sapiens
ugggcuugguggccaucaagagggagccaguc

SEQ ID NO: 386433 - RNA, 29 nt, Homo Sapiens
ugcagcauauguauacaugcuguaaaucu

SEQ ID NO: 386434 - RNA, 32 nt, Homo Sapiens
acaugaauaagaacugaucuggcugccugaug

SEQ ID NO: 386435 - RNA, 32 nt, Homo Sapiens
gcccagagacacaaugggguccuucuguaggc

SEQ ID NO: 386436 - RNA, 32 nt, Homo Sapiens
gcacugcucuggcucuugaccaccaccacauc

SEQ ID NO: 386437 - RNA, 32 nt, Homo Sapiens
uauucuagaaauuuauuuuggaaguacauuuu

SEQ ID NO: 386438 - RNA, 32 nt, Homo Sapiens
uuagcugggucagagagagaugugaugaugaa

SEQ ID NO: 386439 - RNA, 32 nt, Homo Sapiens
uucugggagagcccacagccguggcccuccag

SEQ ID NO: 386440 - RNA, 32 nt, Homo Sapiens
ccaccauuauauuuuuauacuuuucaguuaga

SEQ ID NO: 386441 - RNA, 32 nt, Homo Sapiens
gcucacuugucccccccaccgccccgcgcugg

SEQ ID NO: 386442 - RNA, 32 nt, Homo Sapiens
ccugccaagauuguuuuuuaaucuucacagug

SEQ ID NO: 386443 - RNA, 32 nt, Homo Sapiens
aacaucagggucuuggaacaccagagauccac

SEQ ID NO: 386444 - RNA, 32 nt, Homo Sapiens
cuccaggagagcccaccaccaccauggcccag

SEQ ID NO: 386445 - RNA, 32 nt, Homo Sapiens
caacuuacagcaaaaauaaaacaaaugaaaaa

SEQ ID NO: 386446 - RNA, 32 nt, Homo Sapiens
ccuccaucgcaguguucaaggccauccuuccc

SEQ ID NO: 386447 - RNA, 32 nt, Homo Sapiens
ugcccccgcccgggacuccuggugggugaugg

SEQ ID NO: 386448 - RNA, 32 nt, Homo Sapiens
ggcccugguguuggcucuggaaccugggcuga

SEQ ID NO: 386449 - RNA, 32 nt, Homo Sapiens
agcagugcccaugcgugccgccugcuccucac

SEQ ID NO: 386450 - RNA, 32 nt, Homo Sapiens
guguuagaaaucaacaaaacuccuuuuuaaaa

SEQ ID NO: 386451 - RNA, 32 nt, Homo Sapiens
uugauucaugaaggggaaaauuccuauaaauu

SEQ ID NO: 386452 - RNA, 32 nt, Homo Sapiens
ggaaauaggaccagcuuuuaccugcccagucc

SEQ ID NO: 386453 - RNA, 32 nt, Homo Sapiens
uugaaucuuuugcuacaaaccauguuugcguu

SEQ ID NO: 386454 - RNA, 29 nt, Homo Sapiens
agucuaagugggcucaguuugaugucagu

SEQ ID NO: 386455 - RNA, 32 nt, Homo Sapiens
agguggaggcgcgcccagcagcuccccccugu

SEQ ID NO: 386456 - RNA, 32 nt, Homo Sapiens
agcguguccgugucccgaugccgcccgccugu

SEQ ID NO: 386457 - RNA, 32 nt, Homo Sapiens
gaccgcuccgggagccagcaggccccucgcuc

SEQ ID NO: 386458 - RNA, 32 nt, Homo Sapiens
uaaggccggccgcgccaugguggacccggugg

SEQ ID NO: 386459 - RNA, 32 nt, Homo Sapiens
aguccauuacaccucuuuuucuucccagucuu

SEQ ID NO: 386460 - RNA, 32 nt, Homo Sapiens
ugguccuuuccugaugucuccucccuugucuu

SEQ ID NO: 386461 - RNA, 32 nt, Homo Sapiens
aacacaggguggaaccaccuuugucaagagca

SEQ ID NO: 386462 - RNA, 32 nt, Homo Sapiens
cacgggggccgcgccgcgccuugcugcaggga

SEQ ID NO: 386463 - RNA, 32 nt, Homo Sapiens
guccaucaugcaaugcugagcacuggggugag

SEQ ID NO: 386464 - RNA, 32 nt, Homo Sapiens
uugccucagauccaaggucacucggaagaggc

SEQ ID NO: 386465 - RNA, 32 nt, Homo Sapiens
ugucagaguuuaucugauauacaaaaaaguag

SEQ ID NO: 386466 - RNA, 32 nt, Homo Sapiens
augugggggcccugcuggccugcuccuucucu

SEQ ID NO: 386467 - RNA, 32 nt, Homo Sapiens
cggcaaccuggccauccccauuccguucuucu

SEQ ID NO: 386468 - RNA, 32 nt, Homo Sapiens
cgccauugcacuccagccugggcaacgaguga

SEQ ID NO: 386469 - RNA, 32 nt, Homo Sapiens
ugcugugguauuuuaauaaguuuucaaagaua

SEQ ID NO: 386470 - RNA, 32 nt, Homo Sapiens
uccucgcccugggcugcccugacugggucugg

SEQ ID NO: 386471 - RNA, 25 nt, Homo Sapiens
ggucugauauaaacagaagacagcc

SEQ ID NO: 386472 - RNA, 29 nt, Homo Sapiens
gugaagauagugaugguguaagagcuaaa

SEQ ID NO: 386473 - RNA, 32 nt, Homo Sapiens
ccuacuguccgagggccaccaggccgccgggg

SEQ ID NO: 386474 - RNA, 32 nt, Homo Sapiens
cauaggucuuggaauaaaauggcugguucuuu

SEQ ID NO: 386475 - RNA, 32 nt, Homo Sapiens
ccgccaccgccuucuuccgccggccccgccgc

SEQ ID NO: 386476 - RNA, 32 nt, Homo Sapiens
uugaagguagaaacuucucaacuuuuuucauu

SEQ ID NO: 386477 - RNA, 32 nt, Homo Sapiens
auuuugcucccucuguuagguccauuuucuaa

SEQ ID NO: 386478 - RNA, 32 nt, Homo Sapiens
aacaucaagcacaugcacuuugggaguccuca

SEQ ID NO: 386479 - RNA, 32 nt, Homo Sapiens
cggcggcggcggcgccuggagcggcgugcgua

SEQ ID NO: 386480 - RNA, 32 nt, Homo Sapiens
uucgugggacccgcggccggcgcggggacgua

SEQ ID NO: 386481 - RNA, 31 nt, Homo Sapiens
acauaauaguugaaagaucaagauuggcucc

SEQ ID NO: 386482 - RNA, 32 nt, Homo Sapiens
gugcaucugaagauguguauuuuauuuaaauu

SEQ ID NO: 386483 - RNA, 32 nt, Homo Sapiens
ugcuauuuggguggcucuuauuaaacugugua

SEQ ID NO: 386484 - RNA, 32 nt, Homo Sapiens
agacagccugccccacacccaggcuguggggg

SEQ ID NO: 386485 - RNA, 32 nt, Homo Sapiens
ccugccuccagggcuccugggcugccagggac

SEQ ID NO: 386486 - RNA, 32 nt, Homo Sapiens
aucaucugggcuuugaaccuuuuacauuuguc

SEQ ID NO: 386487 - RNA, 32 nt, Homo Sapiens
cgggagaggaugucuuuuuuaaggcucugugc

SEQ ID NO: 386488 - RNA, 32 nt, Homo Sapiens
ccucacugaacgccugcugaaugugccgcuga

SEQ ID NO: 386489 - RNA, 32 nt, Homo Sapiens
ucucaccuuuuagagcagcacccccgacuaau

SEQ ID NO: 386490 - RNA, 32 nt, Homo Sapiens
aucaaagaaaaaagauuaagggucucuuugcc

SEQ ID NO: 386491 - RNA, 32 nt, Homo Sapiens
cgccggaggagguggcggcggcugggagaggc

SEQ ID NO: 386492 - RNA, 32 nt, Homo Sapiens
aacuucauuucccccucacuguagcccauuuc

SEQ ID NO: 386493 - RNA, 32 nt, Homo Sapiens
aagaaagaugaccccuuccugaggcccguuag

SEQ ID NO: 386494 - RNA, 32 nt, Homo Sapiens
ucaaggucaggagaucaagaccauccuggcua

SEQ ID NO: 386495 - RNA, 32 nt, Homo Sapiens
cuuccuccaguccagacuuugguccuuuaacc

SEQ ID NO: 386496 - RNA, 31 nt, Homo Sapiens
ggcagacaggcucaaaaccaggcccccuccu

SEQ ID NO: 386497 - RNA, 32 nt, Homo Sapiens
cgacacugcccgcccgccgcucccagaccucg

SEQ ID NO: 386498 - RNA, 32 nt, Homo Sapiens
gcacagucugcaacuuccugaggccuguucug

SEQ ID NO: 386499 - RNA, 32 nt, Homo Sapiens
ccuuuuuagcuacuguuuguuuucauucaacu

SEQ ID NO: 386500 - RNA, 32 nt, Homo Sapiens
cuuauggagcagcccccuuuggagaucuccag

SEQ ID NO: 386501 - RNA, 32 nt, Homo Sapiens
cucagcguugccaggugugcugccaucugcug

SEQ ID NO: 386502 - RNA, 32 nt, Homo Sapiens
ucauugacaccuuuaagcuggugcacagggac

SEQ ID NO: 386503 - RNA, 32 nt, Homo Sapiens
cccugcguuguguguuuucagaugaguuacug

SEQ ID NO: 386504 - RNA, 32 nt, Homo Sapiens
gaguucuccuauauuucauaauaaguggucug

SEQ ID NO: 386505 - RNA, 32 nt, Homo Sapiens
cuccagcccugguuuuccuacccaugcaguua

SEQ ID NO: 386506 - RNA, 32 nt, Homo Sapiens
agugggcagucaacacuuauucaccaucaggc

SEQ ID NO: 386507 - RNA, 32 nt, Homo Sapiens
uucagcugcccggccccccacacccacagcuu

SEQ ID NO: 386508 - RNA, 32 nt, Homo Sapiens
uacgucuccagggaacccccgugggguguggg

SEQ ID NO: 386509 - RNA, 32 nt, Homo Sapiens
aggcugccccugcccccuccccgccagggagg

SEQ ID NO: 386510 - RNA, 32 nt, Homo Sapiens
aaugugcacuguuggcugaacuuauggugugg

SEQ ID NO: 386511 - RNA, 32 nt, Homo Sapiens
gagagggcuuucuggggcagggggagccccug

SEQ ID NO: 386512 - RNA, 32 nt, Homo Sapiens
uucauuucugucaaacuguaagaguagacuca

SEQ ID NO: 386513 - RNA, 28 nt, Homo Sapiens
guacagccugacgcuauggcaggcugcc

SEQ ID NO: 386514 - RNA, 32 nt, Homo Sapiens
cgacccggggcgggcugaugucuucuuggggg

SEQ ID NO: 386515 - RNA, 32 nt, Homo Sapiens
gcuggugcuuauucuuuuuuagugcagcggga

SEQ ID NO: 386516 - RNA, 29 nt, Homo Sapiens
acucucaucuugaugucuugauggaugga

SEQ ID NO: 386517 - RNA, 32 nt, Homo Sapiens
guuuuuugacauuuacuucaguuuuucucucu

SEQ ID NO: 386518 - RNA, 32 nt, Homo Sapiens
aaaagaaacucccuauugaaaacucugaaauc

SEQ ID NO: 386519 - RNA, 32 nt, Homo Sapiens
gaaucacauuuucuugcuuagucauguguccc

SEQ ID NO: 386520 - RNA, 32 nt, Homo Sapiens
ucuggcaggcgcacccaggagauggaaucccc

SEQ ID NO: 386521 - RNA, 32 nt, Homo Sapiens
uguggagagcucgaagccuucuguggagaacu

SEQ ID NO: 386522 - RNA, 32 nt, Homo Sapiens
guggcagaagcaguagaagaccagccaguggu

SEQ ID NO: 386523 - RNA, 32 nt, Homo Sapiens
uuuguaguauccacauucuucaucaaaguaca

SEQ ID NO: 386524 - RNA, 32 nt, Homo Sapiens
cccuuggcccugacaaguuuuuccgcaggaau

SEQ ID NO: 386525 - RNA, 32 nt, Homo Sapiens
ucagacgugugaccuccauacuggguuaagga

SEQ ID NO: 386526 - RNA, 32 nt, Homo Sapiens
ucuuccagcucuuuuauuuagcauccaggugc

SEQ ID NO: 386527 - RNA, 32 nt, Homo Sapiens
ucgagaccacccuggccaacguggugaaaccc

SEQ ID NO: 386528 - RNA, 30 nt, Homo Sapiens
cccucuccucugucuccagaagcuucuagc

SEQ ID NO: 386529 - RNA, 32 nt, Homo Sapiens
auauguuuuaugacgguugauuuuacaccagg

SEQ ID NO: 386530 - RNA, 32 nt, Homo Sapiens
acgccaccgaccccgccgccggaggacugggc

SEQ ID NO: 386531 - RNA, 32 nt, Homo Sapiens
ggcagcuucaaguuuagagcugugaagacagg

SEQ ID NO: 386532 - RNA, 32 nt, Homo Sapiens
agacuuuugaaugaccccugguaaaugagaca

SEQ ID NO: 386533 - RNA, 32 nt, Homo Sapiens
caaagguugcuuaacuucuaauuauuugauca

SEQ ID NO: 386534 - RNA, 32 nt, Homo Sapiens
cccgccccugugucuccgcgagccggcugugu

SEQ ID NO: 386535 - RNA, 32 nt, Homo Sapiens
cuauuuccuggcauuuuugucccuuuggaaga

SEQ ID NO: 386536 - RNA, 32 nt, Homo Sapiens
cccauccaaacacaggaucagcauaaccgcca

SEQ ID NO: 386537 - RNA, 32 nt, Homo Sapiens
gucuccugccuuguucccucccuggcccucag

SEQ ID NO: 386538 - RNA, 32 nt, Homo Sapiens
gccgcgggaccgugagacggguucguggccgg

SEQ ID NO: 386539 - RNA, 32 nt, Homo Sapiens
cugcccacgggguccaccuucugcuccagcca

SEQ ID NO: 386540 - RNA, 32 nt, Homo Sapiens
ccaaggggaagccccgaggggaccccgcgccg

SEQ ID NO: 386541 - RNA, 32 nt, Homo Sapiens
ggucugugcucuucuucauuaugcucuucugc

SEQ ID NO: 386542 - RNA, 32 nt, Homo Sapiens
gacagucauagaaaauuuggaacuuaggaaaa

SEQ ID NO: 386543 - RNA, 32 nt, Homo Sapiens
uggacucagaucugaaaagcacaagagaaucu

SEQ ID NO: 386544 - RNA, 32 nt, Homo Sapiens
aguauuuuuuaaaaauauaugaauucucucuc

SEQ ID NO: 386545 - RNA, 32 nt, Homo Sapiens
auugcuauuaaacaaguugagauccaguuaua

SEQ ID NO: 386546 - RNA, 32 nt, Homo Sapiens
ggcagugucaggcugagacccgggccaccuga

SEQ ID NO: 386547 - RNA, 32 nt, Homo Sapiens
uucacuccuugccccagggacccaggcucaug

SEQ ID NO: 386548 - RNA, 32 nt, Homo Sapiens
ccgucuccugcaguggacagcggcggggagag

SEQ ID NO: 386549 - RNA, 32 nt, Homo Sapiens
cggaaucugucccgaaccgggucugugaggaa

SEQ ID NO: 386550 - RNA, 32 nt, Homo Sapiens
cggcggaggaggagacugaggagcaggauggc

SEQ ID NO: 386551 - RNA, 32 nt, Homo Sapiens
gaucugcagcggggccuuaugcugccaugcac

SEQ ID NO: 386552 - RNA, 32 nt, Homo Sapiens
cccaaaagucaaugcuaagagcuugcaaaaga

SEQ ID NO: 386553 - RNA, 32 nt, Homo Sapiens
ugagggcggccaggagggguggcaccgcguca

SEQ ID NO: 386554 - RNA, 32 nt, Homo Sapiens
aaaugagcauauuuuuagucauguugauuagc

SEQ ID NO: 386555 - RNA, 32 nt, Homo Sapiens
ugcaguggagcgaucucggcucauugcaaccu

SEQ ID NO: 386556 - RNA, 32 nt, Homo Sapiens
ugaguagaggugagacccccuccccaaguauc

SEQ ID NO: 386557 - RNA, 32 nt, Homo Sapiens
acugugacaggaagaacaccucugaggaggga

SEQ ID NO: 386558 - RNA, 32 nt, Homo Sapiens
aacgggagagcuuguguuuuugaaguggaaaa

SEQ ID NO: 386559 - RNA, 32 nt, Homo Sapiens
ucugaccuggaggccagaggcuaggcugaggu

SEQ ID NO: 386560 - RNA, 32 nt, Homo Sapiens
cuucucuaugauugauacauggcacagugaga

SEQ ID NO: 386561 - RNA, 32 nt, Homo Sapiens
aaggaaaaauugaugaauaaaaugaaggucug

SEQ ID NO: 386562 - RNA, 32 nt, Homo Sapiens
uucagaacguucucuucaguuuuaucuuucag

SEQ ID NO: 386563 - RNA, 32 nt, Homo Sapiens
uacaaugcagucaggcuggaccagagaauucc

SEQ ID NO: 386564 - RNA, 32 nt, Homo Sapiens
uggcuuauuuaguaaauuuaggucugaaugaa

SEQ ID NO: 386565 - RNA, 32 nt, Homo Sapiens
uuuccccccucgcuagaccggguccaaaaccu

SEQ ID NO: 386566 - RNA, 32 nt, Homo Sapiens
acgccucuuuccccucacggugccagggccgg

SEQ ID NO: 386567 - RNA, 32 nt, Homo Sapiens
cuaugcccccgcagaacuggcugcugcgugug

SEQ ID NO: 386568 - RNA, 32 nt, Homo Sapiens
ggguugaagauaaauaugguagcaaugucuau

SEQ ID NO: 386569 - RNA, 32 nt, Homo Sapiens
cuggcccagaggagcaacagccaggcccccag

SEQ ID NO: 386570 - RNA, 32 nt, Homo Sapiens
cuguacauuuuucucauuucuaauugaagaag

SEQ ID NO: 386571 - RNA, 32 nt, Homo Sapiens
ugacuuucauuucccagaaaaaagauuaaugg

SEQ ID NO: 386572 - RNA, 32 nt, Homo Sapiens
ggaggggaggucugaaaaagacuuuggggcuu

SEQ ID NO: 386573 - RNA, 32 nt, Homo Sapiens
ugaaaaaguuaaacauugaaguaaugaauuuu

SEQ ID NO: 386574 - RNA, 31 nt, Homo Sapiens
gacauggaauaaaaaauuuagauaguauguc

SEQ ID NO: 386575 - RNA, 32 nt, Homo Sapiens
ccuuccaccaaaacagugccccaccuguauac

SEQ ID NO: 386576 - RNA, 31 nt, Homo Sapiens
uuugccaucaaugaucauaucaauuggcagu

SEQ ID NO: 386577 - RNA, 32 nt, Homo Sapiens
cagcccccugggaccucccccauccuuuuugc

SEQ ID NO: 386578 - RNA, 32 nt, Homo Sapiens
cauuaugugucuauaguucagaugcuugugua

SEQ ID NO: 386579 - RNA, 32 nt, Homo Sapiens
accgacugaaaauauuguuuuacaauaguucu

SEQ ID NO: 386580 - RNA, 32 nt, Homo Sapiens
aaacaguauuaaugcagaaaugugcuacuaau

SEQ ID NO: 386581 - RNA, 32 nt, Homo Sapiens
cggcagagcugggauuacgucuaagauuuguc

SEQ ID NO: 386582 - RNA, 32 nt, Homo Sapiens
cucaaauuuugcuaaaugcuuaucagcaugaa

SEQ ID NO: 386583 - RNA, 32 nt, Homo Sapiens
guucaagauucaaaaacuggaaggagcuccag

SEQ ID NO: 386584 - RNA, 32 nt, Homo Sapiens
uucuuccuuucugcgccaggauuugggaauuc

SEQ ID NO: 386585 - RNA, 32 nt, Homo Sapiens
gagccaagauuugaacccagcuagaaugugcc

SEQ ID NO: 386586 - RNA, 32 nt, Homo Sapiens
aacaacugugcuucuucagcacuaauauuucu

SEQ ID NO: 386587 - RNA, 32 nt, Homo Sapiens
ucaaccaccugacaccaauuuauggaaaaaua

SEQ ID NO: 386588 - RNA, 32 nt, Homo Sapiens
aggaaacaaaaaucacucaaacggaaucgaag

SEQ ID NO: 386589 - RNA, 32 nt, Homo Sapiens
ugcaaucaauuucaauaauauuuacaauuugu

SEQ ID NO: 386590 - RNA, 32 nt, Homo Sapiens
cucuagcucgcguauccugaggaggcgggguu

SEQ ID NO: 386591 - RNA, 32 nt, Homo Sapiens
caagaucuuaaauggacacuuguauagaaaua

SEQ ID NO: 386592 - RNA, 32 nt, Homo Sapiens
auuuucuugugacagcucuuuuugugaaguua

SEQ ID NO: 386593 - RNA, 32 nt, Homo Sapiens
gaucaggugcaaacagacaacaacccagcagg

SEQ ID NO: 386594 - RNA, 32 nt, Homo Sapiens
acccucuuccuuccuuucccagaucuucaaua

SEQ ID NO: 386595 - RNA, 32 nt, Homo Sapiens
ccacugccgggcgcagccucgccgcggcgcgu

SEQ ID NO: 386596 - RNA, 32 nt, Homo Sapiens
uuuuaaaaauucauauacuaaugugccuuaaa

SEQ ID NO: 386597 - RNA, 32 nt, Homo Sapiens
ugcccauguucugauuccaagguaauggcuca

SEQ ID NO: 386598 - RNA, 32 nt, Homo Sapiens
cggcggguggguggaggaugcggugcgcggga

SEQ ID NO: 386599 - RNA, 32 nt, Homo Sapiens
ucucaaggccuggccagcccuguggcuccuua

SEQ ID NO: 386600 - RNA, 32 nt, Homo Sapiens
ggcggaaagggucuuugcugcugcgcccgggc

SEQ ID NO: 386601 - RNA, 32 nt, Homo Sapiens
cccuaccuuuaugagaggaauuccuucuccag

SEQ ID NO: 386602 - RNA, 28 nt, Homo Sapiens
uuugggaggccaacgccgaggcgggcgg

SEQ ID NO: 386603 - RNA, 32 nt, Homo Sapiens
agaaauggauggauucuggaaauauuuugaag

SEQ ID NO: 386604 - RNA, 32 nt, Homo Sapiens
uccacgccggggugggggugggcaugagcggu

SEQ ID NO: 386605 - RNA, 32 nt, Homo Sapiens
guggcccccguccgaggaggaucguuuucuaa

SEQ ID NO: 386606 - RNA, 32 nt, Homo Sapiens
gggccuuugucugucccugucauggcuuugga

SEQ ID NO: 386607 - RNA, 29 nt, Homo Sapiens
ggaagcucguguuuccgguacuggguaaa

SEQ ID NO: 386608 - RNA, 32 nt, Homo Sapiens
gugcaaucaguauuccuggguuguaaacacug

SEQ ID NO: 386609 - RNA, 32 nt, Homo Sapiens
gccuuucaaacacaguuuuuauuagcagucuu

SEQ ID NO: 386610 - RNA, 32 nt, Homo Sapiens
ccaagauugcaaaauguccuuuaagaacaaaa

SEQ ID NO: 386611 - RNA, 32 nt, Homo Sapiens
uucuucuaagugguuuacaugcacugucucau

SEQ ID NO: 386612 - RNA, 32 nt, Homo Sapiens
agcaggaggaggaggaagccggagcugccaug

SEQ ID NO: 386613 - RNA, 32 nt, Homo Sapiens
ucuggugaugaugucuuucauggcaucugagu

SEQ ID NO: 386614 - RNA, 32 nt, Homo Sapiens
agagagagcagggcuguucgacuccguuuccc

SEQ ID NO: 386615 - RNA, 32 nt, Homo Sapiens
ccuagaagcagagcuggaguaaggacuugggu

SEQ ID NO: 386616 - RNA, 32 nt, Homo Sapiens
gauuggccgagcaagccuggaaaaugcaauug

SEQ ID NO: 386617 - RNA, 32 nt, Homo Sapiens
uuauccaccaaaaauuaggucaucauaguuga

SEQ ID NO: 386618 - RNA, 32 nt, Homo Sapiens
cggcugcuccggauuuuaaauaaacuuggagc

SEQ ID NO: 386619 - RNA, 32 nt, Homo Sapiens
cgcccaucucuggacucccauccaucccuauc

SEQ ID NO: 386620 - RNA, 32 nt, Homo Sapiens
ugguccccgcgugcaacgcgagcgccggggag

SEQ ID NO: 386621 - RNA, 32 nt, Homo Sapiens
uauagcuuuaaaaaauacaaccaauuuuuaua

SEQ ID NO: 386622 - RNA, 30 nt, Homo Sapiens
caugucaucuucgguggccuggaucccuga

SEQ ID NO: 386623 - RNA, 32 nt, Homo Sapiens
gcugcggaggaagagggggaagaggccgcgcg

SEQ ID NO: 386624 - RNA, 32 nt, Homo Sapiens
cuuuuuucuuuuucuuuuuuucuuuuuuuuuu

SEQ ID NO: 386625 - RNA, 32 nt, Homo Sapiens
agcuggccucgccccgaggcccggcccugggu

SEQ ID NO: 386626 - RNA, 32 nt, Homo Sapiens
uaaucauugaugcuugaaugauagaauuuuag

SEQ ID NO: 386627 - RNA, 30 nt, Homo Sapiens
auuuuuggagguggaauguaguuauuuuaa

SEQ ID NO: 386628 - RNA, 32 nt, Homo Sapiens
cuugggucccugcccucccacccagguuuggu

SEQ ID NO: 386629 - RNA, 32 nt, Homo Sapiens
cuucuccccauuuucauacucuucccagggau

SEQ ID NO: 386630 - RNA, 31 nt, Homo Sapiens
auugagugaaacauugaacucauaucuguaa

SEQ ID NO: 386631 - RNA, 32 nt, Homo Sapiens
aauguuuuuuaaagcuuuuguaguauguuuuu

SEQ ID NO: 386632 - RNA, 29 nt, Homo Sapiens
uugaccauagugauuagaugaaaaaauua

SEQ ID NO: 386633 - RNA, 32 nt, Homo Sapiens
augagagcacuuucuuuuuuuucuauuucacu

SEQ ID NO: 386634 - RNA, 32 nt, Homo Sapiens
cugcacguuggaucaacuaauguuguuuacaa

SEQ ID NO: 386635 - RNA, 32 nt, Homo Sapiens
ccccucuuucccugucgccugcagccacccgc

SEQ ID NO: 386636 - RNA, 32 nt, Homo Sapiens
ccuccagcagugcaauuucuucaguaauuuag

SEQ ID NO: 386637 - RNA, 32 nt, Homo Sapiens
ucaggggcgggaagaggaggcgguagacgcga

SEQ ID NO: 386638 - RNA, 32 nt, Homo Sapiens
uuuuuguaauuggugauaauucuuuuuauuuc

SEQ ID NO: 386639 - RNA, 32 nt, Homo Sapiens
agccagcgccucacagguucaggugauucucc

SEQ ID NO: 386640 - RNA, 32 nt, Homo Sapiens
cuugaaaauauguugugcaccaagacgacugc

SEQ ID NO: 386641 - RNA, 32 nt, Homo Sapiens
agauggcaaaacugaggcuuaaagagcugcuu

SEQ ID NO: 386642 - RNA, 32 nt, Homo Sapiens
uauauauguauauauugcauauucacuuuuuc

SEQ ID NO: 386643 - RNA, 30 nt, Homo Sapiens
gaugugcuauguugaggggaaaccaaauau

SEQ ID NO: 386644 - RNA, 32 nt, Homo Sapiens
agggacuccaugaagaaagaccauagguuaga

SEQ ID NO: 386645 - RNA, 32 nt, Homo Sapiens
uaagccaucucuacuaauagagauaagagaaa

SEQ ID NO: 386646 - RNA, 32 nt, Homo Sapiens
uugagauaguuggauuaagaggcuagacgaga

SEQ ID NO: 386647 - RNA, 32 nt, Homo Sapiens
cagugccuggaaaauugcccgguugcuggggu

SEQ ID NO: 386648 - RNA, 30 nt, Homo Sapiens
guugaggagcugcugccgccgcuugccgcu

SEQ ID NO: 386649 - RNA, 32 nt, Homo Sapiens
cuuucuugguaguuguuaauacaguuauggaa

SEQ ID NO: 386650 - RNA, 32 nt, Homo Sapiens
ggagggacaaagugaggaaaaggugcucauua

SEQ ID NO: 386651 - RNA, 32 nt, Homo Sapiens
gagagaaagaagccaagucugauuauaaccau

SEQ ID NO: 386652 - RNA, 32 nt, Homo Sapiens
gucucaacuauauuucuauacucuaugguacu

SEQ ID NO: 386653 - RNA, 32 nt, Homo Sapiens
ucuuagcucugcaacugccuggggccgggguu

SEQ ID NO: 386654 - RNA, 32 nt, Homo Sapiens
cuauccauuuucugcccauaauuuccaagaaa

SEQ ID NO: 386655 - RNA, 32 nt, Homo Sapiens
gauuccaaacaaaacuaacuuguuuaaaaaua

SEQ ID NO: 386656 - RNA, 32 nt, Homo Sapiens
aaaacgguccuucuguugauccugucagucuu

SEQ ID NO: 386657 - RNA, 32 nt, Homo Sapiens
gggcgcagcugcgggcggcgggagcaggcgca

SEQ ID NO: 386658 - RNA, 28 nt, Homo Sapiens
ugggguacucuguauauguguuucuucu

SEQ ID NO: 386659 - RNA, 32 nt, Homo Sapiens
aaggauggaaauuuaucauguuuaaaaauuau

SEQ ID NO: 386660 - RNA, 32 nt, Homo Sapiens
uccuggugcuccccagccgccggcccgcuccc

SEQ ID NO: 386661 - RNA, 32 nt, Homo Sapiens
uguucacuuuuaggaaguauuuucaugacaug

SEQ ID NO: 386662 - RNA, 32 nt, Homo Sapiens
ugucuuuggggccauuagcaucugggguuaua

SEQ ID NO: 386663 - RNA, 32 nt, Homo Sapiens
guugggcucuagcuccuggugcuguuccugca

SEQ ID NO: 386664 - RNA, 32 nt, Homo Sapiens
aucuuugugucugcuuccugugggacguggug

SEQ ID NO: 386665 - RNA, 32 nt, Homo Sapiens
ggaaauuuuuauuacuuuuuauaccauuucaa

SEQ ID NO: 386666 - RNA, 29 nt, Homo Sapiens
ucuacuauauggaguaauuuucuaagaac

SEQ ID NO: 386667 - RNA, 32 nt, Homo Sapiens
cagcuguguugcacuuuuuaaauggcuauugg

SEQ ID NO: 386668 - RNA, 31 nt, Homo Sapiens
ggcgccaugucccuaaucugcuccaucucua

SEQ ID NO: 386669 - RNA, 32 nt, Homo Sapiens
agcagaagcuaaggcuugugauuugaccugag

SEQ ID NO: 386670 - RNA, 32 nt, Homo Sapiens
uguuuaauucuauuauugauaauuauuuauug

SEQ ID NO: 386671 - RNA, 32 nt, Homo Sapiens
uggagaucguagcugcugcugcuugcacacua

SEQ ID NO: 386672 - RNA, 32 nt, Homo Sapiens
cacuggaugaccuagucgauuauuuaagcaua

SEQ ID NO: 386673 - RNA, 32 nt, Homo Sapiens
gugaaguggucggggcgagcagagggugcgaa

SEQ ID NO: 386674 - RNA, 32 nt, Homo Sapiens
gauagaguggcggccuccaggaccccacccua

SEQ ID NO: 386675 - RNA, 32 nt, Homo Sapiens
cccucccccuccccggucuccgggggaggcgc

SEQ ID NO: 386676 - RNA, 32 nt, Homo Sapiens
ugcugaugguaauggcggcggcgguggcggcg

SEQ ID NO: 386677 - RNA, 32 nt, Homo Sapiens
auaggagggauuucacucuucuucccagguuc

SEQ ID NO: 386678 - RNA, 32 nt, Homo Sapiens
aagggcccuucucugcccuuucugcccuccuu

SEQ ID NO: 386679 - RNA, 32 nt, Homo Sapiens
gcuaugggugucagcaccaggauuugaagcca

SEQ ID NO: 386680 - RNA, 32 nt, Homo Sapiens
gucuagcucccagggccaggccaggcauggcu

SEQ ID NO: 386681 - RNA, 32 nt, Homo Sapiens
acugcucuuuuguuuccaaccccuuccuuuug

SEQ ID NO: 386682 - RNA, 32 nt, Homo Sapiens
auuguuaagcuguauuauaaguauuguuacac

SEQ ID NO: 386683 - RNA, 32 nt, Homo Sapiens
uuucucucucagggcaccccagccccacacuc

SEQ ID NO: 386684 - RNA, 32 nt, Homo Sapiens
acagucugcauuuguggaaaucugcaguauuu

SEQ ID NO: 386685 - RNA, 32 nt, Homo Sapiens
uccugccugcuggcucugaagagagcagcaga

SEQ ID NO: 386686 - RNA, 32 nt, Homo Sapiens
uauauauuuuuuuuuuuuuuuagaauuuucua

SEQ ID NO: 386687 - RNA, 32 nt, Homo Sapiens
gucaccccauccccacuccccugguggccuga

SEQ ID NO: 386688 - RNA, 32 nt, Homo Sapiens
auggcgaguauacaccaaucaggagaggguag

SEQ ID NO: 386689 - RNA, 32 nt, Homo Sapiens
uagggucuggucuccucagccuccucaucugg

SEQ ID NO: 386690 - RNA, 32 nt, Homo Sapiens
aaauauaguugcagaauucgagucacaaauag

SEQ ID NO: 386691 - RNA, 32 nt, Homo Sapiens
gaauaugaucacauguuuuucucauuaaaacu

SEQ ID NO: 386692 - RNA, 32 nt, Homo Sapiens
ccaccagccugggcgcaguggugcugggggcg

SEQ ID NO: 386693 - RNA, 32 nt, Homo Sapiens
ccccucuccugcccggcccccgccucgagcac

SEQ ID NO: 386694 - RNA, 30 nt, Homo Sapiens
uggccguggggcggguaugggacuagcugg

SEQ ID NO: 386695 - RNA, 32 nt, Homo Sapiens
cacugggccggccacagucuggacccgcacgu

SEQ ID NO: 386696 - RNA, 32 nt, Homo Sapiens
uacccgcccggcccgcggcgcgcaccguuggc

SEQ ID NO: 386697 - RNA, 32 nt, Homo Sapiens
cgacaggaacaguggcucucacagcagccggg

SEQ ID NO: 386698 - RNA, 32 nt, Homo Sapiens
agggccugcuguggaggcagcggcggacgccg

SEQ ID NO: 386699 - RNA, 32 nt, Homo Sapiens
gaagcuguauuaccauucauucuccagccucc

SEQ ID NO: 386700 - RNA, 32 nt, Homo Sapiens
ugggccccgagcucugacccucgugucugacg

SEQ ID NO: 386701 - RNA, 32 nt, Homo Sapiens
agaaaacacacacccacccacacacacacaca

SEQ ID NO: 386702 - RNA, 32 nt, Homo Sapiens
ccagugaaaugaaaacagauauugucagaguu

SEQ ID NO: 386703 - RNA, 32 nt, Homo Sapiens
gugcacagaaggaagcgcugagcccacugugu

SEQ ID NO: 386704 - RNA, 32 nt, Homo Sapiens
cagaucacgcaccccagcuccggaagaugggg

SEQ ID NO: 386705 - RNA, 32 nt, Homo Sapiens
cguuaaggcuguucuuuuuugguuuugucuuu

SEQ ID NO: 386706 - RNA, 32 nt, Homo Sapiens
aaagacauuaaaauaugagauguaugaugaaa

SEQ ID NO: 386707 - RNA, 32 nt, Homo Sapiens
uugcucacaccuguaucccagcacuuugggag

SEQ ID NO: 386708 - RNA, 32 nt, Homo Sapiens
cauuuaagaacuuaugaauaugcugaagauuu

SEQ ID NO: 386709 - RNA, 32 nt, Homo Sapiens
gcugcagccgcggguuguuacagcugcuggag

SEQ ID NO: 386710 - RNA, 30 nt, Homo Sapiens
uggucauggcucugcuauucuccuugaucc

SEQ ID NO: 386711 - RNA, 32 nt, Homo Sapiens
gaaccuuccccuccccgugcgcucuggggacu

SEQ ID NO: 386712 - RNA, 32 nt, Homo Sapiens
uaaacaccacugaaaacuuauaaaaaauguuu

SEQ ID NO: 386713 - RNA, 32 nt, Homo Sapiens
agcaggauucagagcugcucuccccaguugca

SEQ ID NO: 386714 - RNA, 32 nt, Homo Sapiens
cuacauuuucuuuuguucuugauaguagccaa

SEQ ID NO: 386715 - RNA, 32 nt, Homo Sapiens
gaaggcagaaaaguugggagcauggcagacag

SEQ ID NO: 386716 - RNA, 32 nt, Homo Sapiens
uccagcgccgacggccagcggcuagaggccgu

SEQ ID NO: 386717 - RNA, 32 nt, Homo Sapiens
aauggagcuuucuguauauaaauguggagauu

SEQ ID NO: 386718 - RNA, 32 nt, Homo Sapiens
aguggcuucugggagaugggugucacuuuuua

SEQ ID NO: 386719 - RNA, 32 nt, Homo Sapiens
uccuggacagacaacaucauggcccaaaagug

SEQ ID NO: 386720 - RNA, 32 nt, Homo Sapiens
ucuggagaggaugguggugauggcggcacaac

SEQ ID NO: 386721 - RNA, 32 nt, Homo Sapiens
uuggaaaaaauauuuuaaaaacaaaauuugug

SEQ ID NO: 386722 - RNA, 32 nt, Homo Sapiens
caguugugcuccuggacauucauuccagagaa

SEQ ID NO: 386723 - RNA, 32 nt, Homo Sapiens
gaggacagaggggcgcggagggggcgccugug

SEQ ID NO: 386724 - RNA, 32 nt, Homo Sapiens
cgcaacuuucccuaacuuucgggcagccucag

SEQ ID NO: 386725 - RNA, 32 nt, Homo Sapiens
uuuggcgguggccuuuguuggcugcaguaaga

SEQ ID NO: 386726 - RNA, 32 nt, Homo Sapiens
augauguaaaaugucuuacaaggcaucaggua

SEQ ID NO: 386727 - RNA, 32 nt, Homo Sapiens
ccuggcgccgccugcgcagccuuggucgcggc

SEQ ID NO: 386728 - RNA, 30 nt, Homo Sapiens
cuaccuggcgggcgcgcgagggucgguccc

SEQ ID NO: 386729 - RNA, 31 nt, Homo Sapiens
aaaaauaaagucauuaccugaguuuugcagu

SEQ ID NO: 386730 - RNA, 32 nt, Homo Sapiens
gauccagaccccacaagauccagaccucggcu

SEQ ID NO: 386731 - RNA, 32 nt, Homo Sapiens
guuucuauuuaguuuguuuucucugauggaca

SEQ ID NO: 386732 - RNA, 32 nt, Homo Sapiens
gcuggggaggacauggcgcccggugcccuagg

SEQ ID NO: 386733 - RNA, 32 nt, Homo Sapiens
guuguucuguaauuauuuucuauguaaauuuu

SEQ ID NO: 386734 - RNA, 32 nt, Homo Sapiens
caaaauguaauuggaacaguuaucuuugauua

SEQ ID NO: 386735 - RNA, 32 nt, Homo Sapiens
gaaaacaucauauauuuugauguuauauuagc

SEQ ID NO: 386736 - RNA, 32 nt, Homo Sapiens
cuacacgcggugccgcgcccugagaccguuua

SEQ ID NO: 386737 - RNA, 32 nt, Homo Sapiens
gcguccucagcagggcagggcuccaccaggag

SEQ ID NO: 386738 - RNA, 32 nt, Homo Sapiens
gcauggccagcugaccaucagcugcgucuucc

SEQ ID NO: 386739 - RNA, 32 nt, Homo Sapiens
aaaugacuuucccugcccuugccguggguccg

SEQ ID NO: 386740 - RNA, 32 nt, Homo Sapiens
ccacccacaccccuaacacuguucuggaugag

SEQ ID NO: 386741 - RNA, 32 nt, Homo Sapiens
cgcgcugggaccggcgucgggggucgcgggga

SEQ ID NO: 386742 - RNA, 32 nt, Homo Sapiens
caagaaaucugugccugagaacaccagagacc

SEQ ID NO: 386743 - RNA, 27 nt, Homo Sapiens
auccaccauuaaucuggugggcacaau

SEQ ID NO: 386744 - RNA, 28 nt, Homo Sapiens
uucauggggcggcuggugaagaggaucc

SEQ ID NO: 386745 - RNA, 32 nt, Homo Sapiens
uaacaacccuggauguuacauauaaaacaaac

SEQ ID NO: 386746 - RNA, 32 nt, Homo Sapiens
ucccccggguggcaauccacagacgcaccugu

SEQ ID NO: 386747 - RNA, 32 nt, Homo Sapiens
aauuagccgggcgugguggcaugcgccuguaa

SEQ ID NO: 386748 - RNA, 32 nt, Homo Sapiens
aaaacccagcacauuaucugcacuauaagcuc

SEQ ID NO: 386749 - RNA, 32 nt, Homo Sapiens
aaugaggucuuccauguuugagggaaagucuu

SEQ ID NO: 386750 - RNA, 32 nt, Homo Sapiens
aggaagagggaagaacggggacgacuuugugg

SEQ ID NO: 386751 - RNA, 32 nt, Homo Sapiens
ccgcggcgcagccccccggcccugagagcgag

SEQ ID NO: 386752 - RNA, 32 nt, Homo Sapiens
aauaguaauucccugcuccuucugccuaagca

SEQ ID NO: 386753 - RNA, 32 nt, Homo Sapiens
uguuguaaagcaaagaugaauaaaaauuucca

SEQ ID NO: 386754 - RNA, 32 nt, Homo Sapiens
aauagaguaagaauugaagaaaaguuaagagc

SEQ ID NO: 386755 - RNA, 32 nt, Homo Sapiens
ucugacaaucgcaauuuuuucuuauuuuuuau

SEQ ID NO: 386756 - RNA, 32 nt, Homo Sapiens
gaagauauauuguaguagauguuacaauuuug

SEQ ID NO: 386757 - RNA, 32 nt, Homo Sapiens
guggaaauugauuauagcaccaugcaggaguu

SEQ ID NO: 386758 - RNA, 32 nt, Homo Sapiens
cugggaaagcggaaacaaaaccuucaccgcuc

SEQ ID NO: 386759 - RNA, 32 nt, Homo Sapiens
auaccaaguggcgccucccaggaaaggcuggg

SEQ ID NO: 386760 - RNA, 32 nt, Homo Sapiens
ucuccagcggcuugggccggggaggggacacu

SEQ ID NO: 386761 - RNA, 32 nt, Homo Sapiens
uacuacccuccgcuccugcgcucugccacugu

SEQ ID NO: 386762 - RNA, 32 nt, Homo Sapiens
cuuuuuacccauuuucuuuaaucuucaauauu

SEQ ID NO: 386763 - RNA, 32 nt, Homo Sapiens
ccgagcugugcuuguggcugcggcugcuaacu

SEQ ID NO: 386764 - RNA, 32 nt, Homo Sapiens
ucucuaaagcaucuuaccccugugcuggaggu

SEQ ID NO: 386765 - RNA, 32 nt, Homo Sapiens
gauggagacucgcucugucacccaggcuggag

SEQ ID NO: 386766 - RNA, 32 nt, Homo Sapiens
gccgccgguauccgcguccgcagcgccgccag

SEQ ID NO: 386767 - RNA, 32 nt, Homo Sapiens
gaaucagcugucaucauuuucaucauuauuau

SEQ ID NO: 386768 - RNA, 32 nt, Homo Sapiens
guuguguguguugggggagcuuccacaggagc

SEQ ID NO: 386769 - RNA, 32 nt, Homo Sapiens
cuggugcagggccuccauuccuggagcccgag

SEQ ID NO: 386770 - RNA, 32 nt, Homo Sapiens
uuacugaagcauuugaauauaaagcuauuuua

SEQ ID NO: 386771 - RNA, 32 nt, Homo Sapiens
uauuuguauauguugcuagaauuuagauugua

SEQ ID NO: 386772 - RNA, 32 nt, Homo Sapiens
gcuguauuaauaauacuuucugaaagaaaagg

SEQ ID NO: 386773 - RNA, 32 nt, Homo Sapiens
uuauucccaagccagcagaccggcccagacag

SEQ ID NO: 386774 - RNA, 32 nt, Homo Sapiens
ccuugggguguugguuugcacuucucuucauu

SEQ ID NO: 386775 - RNA, 32 nt, Homo Sapiens
gcgucccgcccccuccucccccagcacucaca

SEQ ID NO: 386776 - RNA, 32 nt, Homo Sapiens
aaaugcuaaaagauuuucuugaagaugacacu

SEQ ID NO: 386777 - RNA, 32 nt, Homo Sapiens
gucccaucccgcgggcgcggccguugcgggcg

SEQ ID NO: 386778 - RNA, 32 nt, Homo Sapiens
aaaguaguauaaauacaaaucuguaaguuauu

SEQ ID NO: 386779 - RNA, 32 nt, Homo Sapiens
cagccggauacguggugcccccggggcuggug

SEQ ID NO: 386780 - RNA, 32 nt, Homo Sapiens
ccaucagcugucuuguuucaucauuucucuga

SEQ ID NO: 386781 - RNA, 32 nt, Homo Sapiens
uaaacuuaucugggaaggcuggggaaguaggc

SEQ ID NO: 386782 - RNA, 32 nt, Homo Sapiens
ugggcaaaaugaaggcuugggugcucaucuaa

SEQ ID NO: 386783 - RNA, 32 nt, Homo Sapiens
ccccgcuucucgcugcugaggggaagggaggg

SEQ ID NO: 386784 - RNA, 32 nt, Homo Sapiens
agugcuuuauccucaacaaaauguuccucugu

SEQ ID NO: 386785 - RNA, 32 nt, Homo Sapiens
agauuggcccggaaaggccaauaaagaguuag

SEQ ID NO: 386786 - RNA, 32 nt, Homo Sapiens
cauaucuucuauuucuguauauuuguauguac

SEQ ID NO: 386787 - RNA, 31 nt, Homo Sapiens
guagcaaauaaagucaugauauuuuccuggc

SEQ ID NO: 386788 - RNA, 32 nt, Homo Sapiens
ggacucaccgccccgcgccguguucuccgagc

SEQ ID NO: 386789 - RNA, 32 nt, Homo Sapiens
aaaccugugacugcugguaaaauaauguccca

SEQ ID NO: 386790 - RNA, 32 nt, Homo Sapiens
auaaaaccuugauaucauucuguguauauaga

SEQ ID NO: 386791 - RNA, 32 nt, Homo Sapiens
cugucaaacugggaguaggagaggggacaauu

SEQ ID NO: 386792 - RNA, 32 nt, Homo Sapiens
cuuuuugugggaaugugggaggagaggaggga

SEQ ID NO: 386793 - RNA, 32 nt, Homo Sapiens
ugcauaugugguagaaagaaauggagggggaa

SEQ ID NO: 386794 - RNA, 32 nt, Homo Sapiens
cagucugagagccgcaagcacugaggcagggc

SEQ ID NO: 386795 - RNA, 32 nt, Homo Sapiens
aagggggugggaagaccccgagguggaaaaga

SEQ ID NO: 386796 - RNA, 32 nt, Homo Sapiens
cugaagcagggccaggggaggcucacucacag

SEQ ID NO: 386797 - RNA, 31 nt, Homo Sapiens
ugaauugcaaggucccagaaucugccuucuc

SEQ ID NO: 386798 - RNA, 32 nt, Homo Sapiens
gacugaccuugaugagcugugcacaaaguggc

SEQ ID NO: 386799 - RNA, 32 nt, Homo Sapiens
gaccuggaggauguugaucuccaagaacaugc

SEQ ID NO: 386800 - RNA, 32 nt, Homo Sapiens
gcaauuuaggauugcagauuucugccuugaaa

SEQ ID NO: 386801 - RNA, 32 nt, Homo Sapiens
gaaagacgauuuugcucagaggaggcagagau

SEQ ID NO: 386802 - RNA, 32 nt, Homo Sapiens
acaaucugauuucaaaaaaguuauggcuacag

SEQ ID NO: 386803 - RNA, 32 nt, Homo Sapiens
caagagaaaaaacuugaagaaaaaagaagcuu

SEQ ID NO: 386804 - RNA, 32 nt, Homo Sapiens
gaguauucaaaauuauuuggguuguuggcuua

SEQ ID NO: 386805 - RNA, 32 nt, Homo Sapiens
ggacuucuuucugcggaaauguguguguauac

SEQ ID NO: 386806 - RNA, 32 nt, Homo Sapiens
uccuaaugugaucauaugaggaccuuucauau

SEQ ID NO: 386807 - RNA, 28 nt, Homo Sapiens
uguauguguauguguauguguuucauuu

SEQ ID NO: 386808 - RNA, 32 nt, Homo Sapiens
ggcguucggcgcugcgcagagccauggaauuc

SEQ ID NO: 386809 - RNA, 32 nt, Homo Sapiens
acacaccacaguguaaauuaugccuuaucaga

SEQ ID NO: 386810 - RNA, 32 nt, Homo Sapiens
uuucuaaguauuuaaauguucuaacagaucag

SEQ ID NO: 386811 - RNA, 32 nt, Homo Sapiens
cucgucuuucucccgggaaccuugacgacgcc

SEQ ID NO: 386812 - RNA, 32 nt, Homo Sapiens
acagggguacacucacacagaccuccaagacu

SEQ ID NO: 386813 - RNA, 32 nt, Homo Sapiens
acuggaguucccuucuuccucuugcuguaggc

SEQ ID NO: 386814 - RNA, 32 nt, Homo Sapiens
cucguugcccuaauucaucuuuuaaucaugag

SEQ ID NO: 386815 - RNA, 32 nt, Homo Sapiens
uccugauucauggguccccuaguuaggcccag

SEQ ID NO: 386816 - RNA, 32 nt, Homo Sapiens
cauuuaacaauauaacaaaacuuccugauuug

SEQ ID NO: 386817 - RNA, 32 nt, Homo Sapiens
gcggacuuggcugcugcucccaccgcaguacc

SEQ ID NO: 386818 - RNA, 32 nt, Homo Sapiens
uuuuccuguuuuauaaauucccauuguuauau

SEQ ID NO: 386819 - RNA, 32 nt, Homo Sapiens
ugcuccuuuccaccagugauuuguauuaagac

SEQ ID NO: 386820 - RNA, 32 nt, Homo Sapiens
uucaagagaacacacucagugcuuguuuuuau

SEQ ID NO: 386821 - RNA, 32 nt, Homo Sapiens
augggaugccugggcccugggguuagugagga

SEQ ID NO: 386822 - RNA, 32 nt, Homo Sapiens
cuaaggcagacacacugacaccucccgaagug

SEQ ID NO: 386823 - RNA, 32 nt, Homo Sapiens
acuugacuguccccaaacucucccugcagcca

SEQ ID NO: 386824 - RNA, 32 nt, Homo Sapiens
agugugaggagcugcuauggugcugaguuucc

SEQ ID NO: 386825 - RNA, 32 nt, Homo Sapiens
gcuucugccucgccccagucuauccccaaccc

SEQ ID NO: 386826 - RNA, 32 nt, Homo Sapiens
ugggguccaaaauaaaacugguuaaaaaaaug

SEQ ID NO: 386827 - RNA, 32 nt, Homo Sapiens
ucugucaaaacuuaauccccaaugcaacaaua

SEQ ID NO: 386828 - RNA, 32 nt, Homo Sapiens
acugaagcaggugggagaagugaggcugugac

SEQ ID NO: 386829 - RNA, 32 nt, Homo Sapiens
uuuuacuagugggaucccaaauccaaagcagu

SEQ ID NO: 386830 - RNA, 32 nt, Homo Sapiens
gagccaggaugcccgcgccgcgcgcccgggag

SEQ ID NO: 386831 - RNA, 32 nt, Homo Sapiens
aggcuggaguacauuugccugaugucagcucc

SEQ ID NO: 386832 - RNA, 32 nt, Homo Sapiens
aaacaagagugaggaagaaaacacagucauca

SEQ ID NO: 386833 - RNA, 32 nt, Homo Sapiens
ugugagccagcaugccuggccccuggaaaacu

SEQ ID NO: 386834 - RNA, 32 nt, Homo Sapiens
ggaauauugcaaauggcuucagauucuaugag

SEQ ID NO: 386835 - RNA, 32 nt, Homo Sapiens
uccccggccuccgccuucuccccucccgcgag

SEQ ID NO: 386836 - RNA, 32 nt, Homo Sapiens
acacguguucugcuugaauuuacuaaauucua

SEQ ID NO: 386837 - RNA, 32 nt, Homo Sapiens
gaguuuaguuuauguuggccagcuacaacccc

SEQ ID NO: 386838 - RNA, 32 nt, Homo Sapiens
gacaggcguuguggccacugucuugcacaugc

SEQ ID NO: 386839 - RNA, 32 nt, Homo Sapiens
auuuucaauuguuuuucuuuauuuucuucagc

SEQ ID NO: 386840 - RNA, 32 nt, Homo Sapiens
guguucugucuccgcucccguuucgcugucac

SEQ ID NO: 386841 - RNA, 32 nt, Homo Sapiens
aggguuacuguaauggaauuuaugaucuuaag

SEQ ID NO: 386842 - RNA, 31 nt, Homo Sapiens
ugcguggaccccgcccugccccgcuacagaa

SEQ ID NO: 386843 - RNA, 32 nt, Homo Sapiens
aucauguacaagagugagauuaucauguacaa

SEQ ID NO: 386844 - RNA, 32 nt, Homo Sapiens
cugggagcaaaguggccugaaaccagagaaaa

SEQ ID NO: 386845 - RNA, 32 nt, Homo Sapiens
uacagaacaugaacauugaugaagacuguuaa

SEQ ID NO: 386846 - RNA, 32 nt, Homo Sapiens
augucuaaagcaacaaguauugugaaauuuug

SEQ ID NO: 386847 - RNA, 32 nt, Homo Sapiens
guguaugaaugaacauacauuuccugcauaua

SEQ ID NO: 386848 - RNA, 32 nt, Homo Sapiens
agagugaugggagaggcacaugagguuggggg

SEQ ID NO: 386849 - RNA, 32 nt, Homo Sapiens
cgccuagcucuuuugacucuguucgcgggaag

SEQ ID NO: 386850 - RNA, 32 nt, Homo Sapiens
ggccuaacucugcggacccccauccugcuggg

SEQ ID NO: 386851 - RNA, 32 nt, Homo Sapiens
uugagaugauuucuagcuuucauuuacacagu

SEQ ID NO: 386852 - RNA, 32 nt, Homo Sapiens
ggaagugcccagcccgagaggcugggagguuu

SEQ ID NO: 386853 - RNA, 32 nt, Homo Sapiens
cagcagagcagggaccccuuugccagaaccac

SEQ ID NO: 386854 - RNA, 32 nt, Homo Sapiens
gaacccaggaggaggagcuugcagugagccga

SEQ ID NO: 386855 - RNA, 32 nt, Homo Sapiens
caggccuggugcccagacuccuugcauggcuu

SEQ ID NO: 386856 - RNA, 32 nt, Homo Sapiens
aucaugggggugguuuccccuauguuguuauc

SEQ ID NO: 386857 - RNA, 32 nt, Homo Sapiens
gcaucaaacagaagauuuugacugcugugacu

SEQ ID NO: 386858 - RNA, 32 nt, Homo Sapiens
uacaauuaaguacaauuaaauguacauugugg

SEQ ID NO: 386859 - RNA, 32 nt, Homo Sapiens
ccugguuuuuaguuguuuuucuuagucacucu

SEQ ID NO: 386860 - RNA, 32 nt, Homo Sapiens
ugaucucugaauccacaaugaguucacagccu

SEQ ID NO: 386861 - RNA, 32 nt, Homo Sapiens
gugcaauauuuuucuuuuuuauuucuccuucu

SEQ ID NO: 386862 - RNA, 32 nt, Homo Sapiens
cgccccaucucgcucugugccccuccccacca

SEQ ID NO: 386863 - RNA, 32 nt, Homo Sapiens
gccagggagguugucgggaggggccggcgaau

SEQ ID NO: 386864 - RNA, 32 nt, Homo Sapiens
ucugugugaggggagggggccgugccgagaag

SEQ ID NO: 386865 - RNA, 32 nt, Homo Sapiens
ucgggggagcagaugagggcccugcccccgcc

SEQ ID NO: 386866 - RNA, 31 nt, Homo Sapiens
ggccuucggcacuguagcuuugggugguggg

SEQ ID NO: 386867 - RNA, 32 nt, Homo Sapiens
cgauuauaccaucgucuauuuccacuacgggc

SEQ ID NO: 386868 - RNA, 32 nt, Homo Sapiens
cucauugaacaaagcuggauuuggcugaugau

SEQ ID NO: 386869 - RNA, 32 nt, Homo Sapiens
uugcagugagauugcaccauugcauuccagcc

SEQ ID NO: 386870 - RNA, 32 nt, Homo Sapiens
gcuuucuauuuuuucuuggguauggagguuuc

SEQ ID NO: 386871 - RNA, 32 nt, Homo Sapiens
uguuucuuugggaagacagcuuauuggaaguu

SEQ ID NO: 386872 - RNA, 32 nt, Homo Sapiens
ccauugugcuaacagaauauuacuuaauaacg

SEQ ID NO: 386873 - RNA, 32 nt, Homo Sapiens
ugcgggccuuggggggccccguguggccagaa

SEQ ID NO: 386874 - RNA, 32 nt, Homo Sapiens
uuguuuggcaagggagugggcggcaguuuuau

SEQ ID NO: 386875 - RNA, 31 nt, Homo Sapiens
guccugauggcggcggcgacggccgcggcag

SEQ ID NO: 386876 - RNA, 32 nt, Homo Sapiens
gaccuagaacagaccuucaaucccucggaucu

SEQ ID NO: 386877 - RNA, 32 nt, Homo Sapiens
aaaagggaugguggauguuuucccucuccuac

SEQ ID NO: 386878 - RNA, 32 nt, Homo Sapiens
gcuacucuugaccacuauuuuaccauuucuuu

SEQ ID NO: 386879 - RNA, 32 nt, Homo Sapiens
gcauguauuuuugucaauuaccagaaagauaa

SEQ ID NO: 386880 - RNA, 32 nt, Homo Sapiens
uuccccucauccaccgcccacuccaggcacuc

SEQ ID NO: 386881 - RNA, 32 nt, Homo Sapiens
aucauaugaacuaaaauugucaauugugaggu

SEQ ID NO: 386882 - RNA, 32 nt, Homo Sapiens
uuuucauguuuuagcauuuguauaaagaaacu

SEQ ID NO: 386883 - RNA, 32 nt, Homo Sapiens
aggccgggacacugaggcagcagaacuagugc

SEQ ID NO: 386884 - RNA, 32 nt, Homo Sapiens
cccagagcgggugggauacucacgcacagcuu

SEQ ID NO: 386885 - RNA, 32 nt, Homo Sapiens
cggggccaggucugggucucacuccccggccc

SEQ ID NO: 386886 - RNA, 32 nt, Homo Sapiens
cguuaggugcugcucucugcgcggcguuuugc

SEQ ID NO: 386887 - RNA, 32 nt, Homo Sapiens
gggcagcucagcauggccccagcacaacuccg

SEQ ID NO: 386888 - RNA, 32 nt, Homo Sapiens
cgucauacgccccagagccgccgggacggagg

SEQ ID NO: 386889 - RNA, 32 nt, Homo Sapiens
gcuuuucugaugcauuuaaaaauaaauggaac

SEQ ID NO: 386890 - RNA, 32 nt, Homo Sapiens
aacagagaggucgggauuugcccugggggagg

SEQ ID NO: 386891 - RNA, 32 nt, Homo Sapiens
aauagaccaauacauggcucuauuuagcaaag

SEQ ID NO: 386892 - RNA, 32 nt, Homo Sapiens
uagaagaaagagaaguguuuuuuuaauugaga

SEQ ID NO: 386893 - RNA, 32 nt, Homo Sapiens
ucaagagauggcuuacaaaaagaaauauugaa

SEQ ID NO: 386894 - RNA, 32 nt, Homo Sapiens
uaauauuucauuuuauuucaguuuucuuuuga

SEQ ID NO: 386895 - RNA, 32 nt, Homo Sapiens
uacaggaacuauuuauacuaucuuaaugauuc

SEQ ID NO: 386896 - RNA, 32 nt, Homo Sapiens
acaguugagggcuuuuguuaucuuucacuuga

SEQ ID NO: 386897 - RNA, 32 nt, Homo Sapiens
ucacuaaccacccaccccuaccuggaauggag

SEQ ID NO: 386898 - RNA, 32 nt, Homo Sapiens
cugaauaaaugucuuuuuuuuaaugugcugug

SEQ ID NO: 386899 - RNA, 32 nt, Homo Sapiens
uccuggagacaccaccugcuuuccgggcggca

SEQ ID NO: 386900 - RNA, 32 nt, Homo Sapiens
aagagcuuuguacagucucgauggcccacacc

SEQ ID NO: 386901 - RNA, 32 nt, Homo Sapiens
auuuguuuuuccugaagggcauuugaaggaac

SEQ ID NO: 386902 - RNA, 32 nt, Homo Sapiens
cccagguggcaccagcaguaguggaauccagu

SEQ ID NO: 386903 - RNA, 32 nt, Homo Sapiens
gugcuacacccuuuuccagcuggaugagaauu

SEQ ID NO: 386904 - RNA, 32 nt, Homo Sapiens
uccaugggauaaaaaggaaaguguuuucucac

SEQ ID NO: 386905 - RNA, 32 nt, Homo Sapiens
aucuucacagacuggauguuaagcaaguggaa

SEQ ID NO: 386906 - RNA, 32 nt, Homo Sapiens
cuguuguaaguaauaauuuguaaauugaauaa

SEQ ID NO: 386907 - RNA, 32 nt, Homo Sapiens
cagugauuuuucugccucggccuccugaguag

SEQ ID NO: 386908 - RNA, 32 nt, Homo Sapiens
gcugcuaccacagcugcccccuggggggccag

SEQ ID NO: 386909 - RNA, 32 nt, Homo Sapiens
cucuguggggagagguacagggaaaggagcug

SEQ ID NO: 386910 - RNA, 32 nt, Homo Sapiens
auccuaggcagacugugucugaaggagcuggu

SEQ ID NO: 386911 - RNA, 32 nt, Homo Sapiens
ggggcagccuaggaggcccacccucuuuggag

SEQ ID NO: 386912 - RNA, 32 nt, Homo Sapiens
cagcagcagcuccagcagcagcaauugcagca

SEQ ID NO: 386913 - RNA, 32 nt, Homo Sapiens
cauagcacccucaucugggaauagggaaggca

SEQ ID NO: 386914 - RNA, 32 nt, Homo Sapiens
ccagggggugacugggguggcucggcucggga

SEQ ID NO: 386915 - RNA, 32 nt, Homo Sapiens
acggcggccccgggcucccgucccguccgucu

SEQ ID NO: 386916 - RNA, 32 nt, Homo Sapiens
cucuugugccccagcaccuucucucucugccc

SEQ ID NO: 386917 - RNA, 32 nt, Homo Sapiens
uguggcuggaauggaagaagaucaccuuggug

SEQ ID NO: 386918 - RNA, 32 nt, Homo Sapiens
uuaagcccacacuacccaaaacaaagaauggg

SEQ ID NO: 386919 - RNA, 32 nt, Homo Sapiens
uuaccacuuuugugguuuauucgugguccuug

SEQ ID NO: 386920 - RNA, 32 nt, Homo Sapiens
caaagauuaaucucaagacuuguuguuuuucu

SEQ ID NO: 386921 - RNA, 32 nt, Homo Sapiens
agauggccucccgggaacccaggcacccacag

SEQ ID NO: 386922 - RNA, 32 nt, Homo Sapiens
cgagaaugaacauauuugauagauuuuucuua

SEQ ID NO: 386923 - RNA, 32 nt, Homo Sapiens
auaaucuugcuucccgccuguuuauggcagua

SEQ ID NO: 386924 - RNA, 32 nt, Homo Sapiens
aggcuuuggggucagaguauauguuguuugga

SEQ ID NO: 386925 - RNA, 32 nt, Homo Sapiens
uggggaugacccccauugucaucauguugggc

SEQ ID NO: 386926 - RNA, 32 nt, Homo Sapiens
ucuuagaaugggccuguuaaucuuauagaacc

SEQ ID NO: 386927 - RNA, 32 nt, Homo Sapiens
uaguauuugacuguuacuguccuuggcgaauc

SEQ ID NO: 386928 - RNA, 32 nt, Homo Sapiens
uaauuuucaacacagcuuacucuguagcauca

SEQ ID NO: 386929 - RNA, 32 nt, Homo Sapiens
uccauggacagcagccacuccuggacauggac

SEQ ID NO: 386930 - RNA, 32 nt, Homo Sapiens
gugauguuagguuuuucucugaaacuucuuug

SEQ ID NO: 386931 - RNA, 32 nt, Homo Sapiens
uuccgagagacucggccccugcucuccucacu

SEQ ID NO: 386932 - RNA, 32 nt, Homo Sapiens
auuuguuuuuugguggcaaaaagggaaaaugg

SEQ ID NO: 386933 - RNA, 32 nt, Homo Sapiens
gaucagugaaggaaaccgugguuacugaggcc

SEQ ID NO: 386934 - RNA, 32 nt, Homo Sapiens
guaaggggccaccuuaaucauaccaaauauug

SEQ ID NO: 386935 - RNA, 32 nt, Homo Sapiens
ugucaggaaaagacaauacccuucaaacuuug

SEQ ID NO: 386936 - RNA, 32 nt, Homo Sapiens
acugcagugaagucugauucugauggagagca

SEQ ID NO: 386937 - RNA, 32 nt, Homo Sapiens
guuucucagagguacucagugugaagcuucuu

SEQ ID NO: 386938 - RNA, 32 nt, Homo Sapiens
caaaguuauuuuacaaaugcugggcuuauggu

SEQ ID NO: 386939 - RNA, 32 nt, Homo Sapiens
ggaaagugugaagcucuguggagcaugaaggu

SEQ ID NO: 386940 - RNA, 32 nt, Homo Sapiens
acaagaaacaccaugaguggacagcucccauu

SEQ ID NO: 386941 - RNA, 32 nt, Homo Sapiens
aaaaggacauuucuaucagggauauauaccuu

SEQ ID NO: 386942 - RNA, 32 nt, Homo Sapiens
gaggcucugugcugcacccccagcccacagcu

SEQ ID NO: 386943 - RNA, 32 nt, Homo Sapiens
gacgugauauuuuuaauuucuuuuuuaaaaaa

SEQ ID NO: 386944 - RNA, 32 nt, Homo Sapiens
uaugucuccugagcuuuauaaaaguuagcacu

SEQ ID NO: 386945 - RNA, 32 nt, Homo Sapiens
uaauguaaaaacaauuuugugaauagcuucuu

SEQ ID NO: 386946 - RNA, 32 nt, Homo Sapiens
uuccgugucuucugccuuccucuuggggaaag

SEQ ID NO: 386947 - RNA, 32 nt, Homo Sapiens
aucaggaguuuucucuuaggcuucucucaggu

SEQ ID NO: 386948 - RNA, 32 nt, Homo Sapiens
ucaaaagcaaaauaaaaugaauuuauuguccu

SEQ ID NO: 386949 - RNA, 32 nt, Homo Sapiens
agcuagaccgaucuccggggagccccggagua

SEQ ID NO: 386950 - RNA, 32 nt, Homo Sapiens
augguaucauccugccuauuuaaaaauauguu

SEQ ID NO: 386951 - RNA, 32 nt, Homo Sapiens
aaaacugagguacacagagguaccucagaagc

SEQ ID NO: 386952 - RNA, 32 nt, Homo Sapiens
ggcggugccgcggcgccgggacccgacucauc

SEQ ID NO: 386953 - RNA, 32 nt, Homo Sapiens
gaggauaggaugggaaugcugcccuaaaggaa

SEQ ID NO: 386954 - RNA, 32 nt, Homo Sapiens
agacuacccaaaagauuuuuggcacuuacaau

SEQ ID NO: 386955 - RNA, 31 nt, Homo Sapiens
aggcugggcggcuccaguccauagacguucc

SEQ ID NO: 386956 - RNA, 32 nt, Homo Sapiens
auacaccuggaaaccugugccuuguauucaaa

SEQ ID NO: 386957 - RNA, 32 nt, Homo Sapiens
ggcagcucugggcugggaacgcggcggggucg

SEQ ID NO: 386958 - RNA, 32 nt, Homo Sapiens
cagugccgcaacuugcuggccuuggaggggga

SEQ ID NO: 386959 - RNA, 32 nt, Homo Sapiens
uugaagccaaacuguuggaaguucacuggagu

SEQ ID NO: 386960 - RNA, 32 nt, Homo Sapiens
gugugcgcaugucugagagugucaaugugugu

SEQ ID NO: 386961 - RNA, 32 nt, Homo Sapiens
guggacaaaugaaacagacaaauauuaauuug

SEQ ID NO: 386962 - RNA, 32 nt, Homo Sapiens
gcaaugcaucggucucugaggugacacucugg

SEQ ID NO: 386963 - RNA, 32 nt, Homo Sapiens
guuacaucggaagauaccauugaaagaagagu

SEQ ID NO: 386964 - RNA, 32 nt, Homo Sapiens
cggauccccccucaccauagaucuccaacauc

SEQ ID NO: 386965 - RNA, 32 nt, Homo Sapiens
ucuuccuccaggguucaagugauucucccacc

SEQ ID NO: 386966 - RNA, 32 nt, Homo Sapiens
cccugguguugcagcuguuguuguaccgccgc

SEQ ID NO: 386967 - RNA, 32 nt, Homo Sapiens
aaaacaaaacaaacagucuucugccugcuucu

SEQ ID NO: 386968 - RNA, 32 nt, Homo Sapiens
ccagcgucaggagagcagcagacaagcuggac

SEQ ID NO: 386969 - RNA, 32 nt, Homo Sapiens
gggaaaaugacuacgcgucacucgugaugucg

SEQ ID NO: 386970 - RNA, 32 nt, Homo Sapiens
ccugcaccugcugccuggauccccggccugcc

SEQ ID NO: 386971 - RNA, 32 nt, Homo Sapiens
guggcucaggucuccccuaucccggccucccu

SEQ ID NO: 386972 - RNA, 30 nt, Homo Sapiens
uaggaagcuccgcgcggcggcgggggcggc

SEQ ID NO: 386973 - RNA, 32 nt, Homo Sapiens
aggguuuugaggauaaagaacuguauuuuuag

SEQ ID NO: 386974 - RNA, 32 nt, Homo Sapiens
ggaguuaaauauauuuaauuuaaugaucauua

SEQ ID NO: 386975 - RNA, 32 nt, Homo Sapiens
uauccccaacuuuugccagaaagcagaaaaau

SEQ ID NO: 386976 - RNA, 32 nt, Homo Sapiens
uuaaaauaagacaaaaucagcuuuacaacaau

SEQ ID NO: 386977 - RNA, 32 nt, Homo Sapiens
guguguuaacauucagaaaauccaaauauucc

SEQ ID NO: 386978 - RNA, 30 nt, Homo Sapiens
aacucggcgcccgacagccgccgcgugcug

SEQ ID NO: 386979 - RNA, 32 nt, Homo Sapiens
aaaggaccuacuaagcucauggcccugucaug

SEQ ID NO: 386980 - RNA, 32 nt, Homo Sapiens
aaacaucagacuccagguucuucgucuuuugg

SEQ ID NO: 386981 - RNA, 32 nt, Homo Sapiens
aauguuuacaaaggggcaaggaccucucaugg

SEQ ID NO: 386982 - RNA, 27 nt, Homo Sapiens
cucaacucacucuucagcuucccugcu

SEQ ID NO: 386983 - RNA, 30 nt, Homo Sapiens
agaaaggauaaaauggauccugcaccacgg

SEQ ID NO: 386984 - RNA, 32 nt, Homo Sapiens
cggacucggcacucacagcugcugugcaaacu

SEQ ID NO: 386985 - RNA, 32 nt, Homo Sapiens
gaagccacaucccacuggauccacacccgccc

SEQ ID NO: 386986 - RNA, 32 nt, Homo Sapiens
gguucagugggcuggcugugacucuccugugg

SEQ ID NO: 386987 - RNA, 32 nt, Homo Sapiens
guccccagacaaacccaccucucccuccugga

SEQ ID NO: 386988 - RNA, 32 nt, Homo Sapiens
gcccagugccccucuuccccagcccagacccc

SEQ ID NO: 386989 - RNA, 32 nt, Homo Sapiens
auuuuaagcugauagcauagugcuucagcggu

SEQ ID NO: 386990 - RNA, 32 nt, Homo Sapiens
ucucgcgauuauucucgaaucaccuccugugu

SEQ ID NO: 386991 - RNA, 32 nt, Homo Sapiens
auccauuagcccaguucuuagaagagguacuu

SEQ ID NO: 386992 - RNA, 32 nt, Homo Sapiens
uuucuacauggauucccuacuuugaagagugu

SEQ ID NO: 386993 - RNA, 32 nt, Homo Sapiens
ugggccauggccagcucuagguggauucugau

SEQ ID NO: 386994 - RNA, 32 nt, Homo Sapiens
acugagagccgccggcgccuucugcuuuguuu

SEQ ID NO: 386995 - RNA, 32 nt, Homo Sapiens
ccccgaacuugcccgcgccuggccgcgcggcc

SEQ ID NO: 386996 - RNA, 32 nt, Homo Sapiens
acauuucauuucuugacuguguagaaaauaaa

SEQ ID NO: 386997 - RNA, 32 nt, Homo Sapiens
agaguuggguuuucuuuuuuaauuauccaaac

SEQ ID NO: 386998 - RNA, 32 nt, Homo Sapiens
ggagagcuuuacgcuaaagacaaaagaaacag

SEQ ID NO: 386999 - RNA, 32 nt, Homo Sapiens
uauuuuauauauagauacauauaugaaagaag

SEQ ID NO: 387000 - RNA, 32 nt, Homo Sapiens
uugacuuuuucuggacccuggugucuacgauu

SEQ ID NO: 387001 - RNA, 32 nt, Homo Sapiens
uucauugcugggagaagaauguuguaauuuuu

SEQ ID NO: 387002 - RNA, 32 nt, Homo Sapiens
gaauuucacacuuuaaugauaauauuccacau

SEQ ID NO: 387003 - RNA, 30 nt, Homo Sapiens
guggcaggagguggcaucuugucucguccc

SEQ ID NO: 387004 - RNA, 32 nt, Homo Sapiens
agauuuuuucuuuucauuuucuccagggaggg

SEQ ID NO: 387005 - RNA, 32 nt, Homo Sapiens
aaaugcuagaauaauaauaaaaaggccaaaaa

SEQ ID NO: 387006 - RNA, 32 nt, Homo Sapiens
cccuagaaggguucugaucaccggagggcagc

SEQ ID NO: 387007 - RNA, 32 nt, Homo Sapiens
uacauacauccuuaugcugagauguugaacuu

SEQ ID NO: 387008 - RNA, 31 nt, Homo Sapiens
guggggguuguugugagccaagauugcacca

SEQ ID NO: 387009 - RNA, 32 nt, Homo Sapiens
ggcuggucacuacuccgagccugugacguuug

SEQ ID NO: 387010 - RNA, 32 nt, Homo Sapiens
ggugaaaggcacuucugacaugcugguggcaa

SEQ ID NO: 387011 - RNA, 32 nt, Homo Sapiens
gggagauugguagucucuuuugauggugauag

SEQ ID NO: 387012 - RNA, 32 nt, Homo Sapiens
aaagccacccagguugucauaucaucuguaau

SEQ ID NO: 387013 - RNA, 32 nt, Homo Sapiens
aagagggaaaauaaaaaagaaccuuuguaaaa

SEQ ID NO: 387014 - RNA, 32 nt, Homo Sapiens
uggaagccgagagaaggaaaagaaaugcuagg

SEQ ID NO: 387015 - RNA, 32 nt, Homo Sapiens
cauacgcaaagagacaacaaguaggaauuaac

SEQ ID NO: 387016 - RNA, 32 nt, Homo Sapiens
ucauuacuauuuuuagcauucuccaggcuuuu

SEQ ID NO: 387017 - RNA, 32 nt, Homo Sapiens
ucugcugcauaugucaguggcucuggagauug

SEQ ID NO: 387018 - RNA, 32 nt, Homo Sapiens
auguaucauaaucauuucugcugugcagagga

SEQ ID NO: 387019 - RNA, 32 nt, Homo Sapiens
ucaaagguaacugaucagauaauuacccaaau

SEQ ID NO: 387020 - RNA, 32 nt, Homo Sapiens
ccucaccgucccaauuguauucccuggaagag

SEQ ID NO: 387021 - RNA, 32 nt, Homo Sapiens
ccuuuucacagcacuccuuugccccagagcag

SEQ ID NO: 387022 - RNA, 32 nt, Homo Sapiens
aaaaggaccaagggggcguggacccgucuugu

SEQ ID NO: 387023 - RNA, 32 nt, Homo Sapiens
ggcuccggcgaccgaggccgagcuggggccgg

SEQ ID NO: 387024 - RNA, 32 nt, Homo Sapiens
ggagcgccgcgcccggcccgagaugccuccgc

SEQ ID NO: 387025 - RNA, 32 nt, Homo Sapiens
caccagaaaagguucauguuuuccuuuacuua

SEQ ID NO: 387026 - RNA, 32 nt, Homo Sapiens
agguuuucuuuuucuuuuuuaaacuguaugcu

SEQ ID NO: 387027 - RNA, 32 nt, Homo Sapiens
cagggacccaugagcaggcugcauggucuaga

SEQ ID NO: 387028 - RNA, 32 nt, Homo Sapiens
acagauccaaggaaauaucagccagaggcuuc

SEQ ID NO: 387029 - RNA, 32 nt, Homo Sapiens
uaccuuccucaauauucccaauguggcuguau

SEQ ID NO: 387030 - RNA, 32 nt, Homo Sapiens
agcuaaacacugggauuuuuggauaacagacu

SEQ ID NO: 387031 - RNA, 32 nt, Homo Sapiens
agggaccuggaaacugucauccaggucugcug

SEQ ID NO: 387032 - RNA, 32 nt, Homo Sapiens
guguaacauuuuaauauuguuuguaauauuca

SEQ ID NO: 387033 - RNA, 32 nt, Homo Sapiens
acaauaagaaagugauuacauauuuuauuuuu

SEQ ID NO: 387034 - RNA, 32 nt, Homo Sapiens
acucuguaccuguuguguucacuuccuuugca

SEQ ID NO: 387035 - RNA, 32 nt, Homo Sapiens
uguaucacuggaaauucuuaaucuguaucaca

SEQ ID NO: 387036 - RNA, 32 nt, Homo Sapiens
aaaaaugguaaucagaaguaaauaugaaaauu

SEQ ID NO: 387037 - RNA, 32 nt, Homo Sapiens
gccuuaaagcccccggcccagcccugcaggua

SEQ ID NO: 387038 - RNA, 32 nt, Homo Sapiens
caguaccuaugggucacagagcccuggagcau

SEQ ID NO: 387039 - RNA, 32 nt, Homo Sapiens
uaugucaauauuuuucauuugauucccuauua

SEQ ID NO: 387040 - RNA, 32 nt, Homo Sapiens
aaucuacauggaucccagugcuggggugauua

SEQ ID NO: 387041 - RNA, 32 nt, Homo Sapiens
gcccuccacaugccagguaaguagcaaacccc

SEQ ID NO: 387042 - RNA, 32 nt, Homo Sapiens
uuuccuguccuucuccccucccagcuccuggc

SEQ ID NO: 387043 - RNA, 32 nt, Homo Sapiens
aaacagcaccuggcggugccccggggcucacg

SEQ ID NO: 387044 - RNA, 32 nt, Homo Sapiens
uuuauuucuugacuaaucagauuuucaauaga

SEQ ID NO: 387045 - RNA, 32 nt, Homo Sapiens
gagagggagggagaauccuggaugcuggaugg

SEQ ID NO: 387046 - RNA, 32 nt, Homo Sapiens
ucuugaacagagcgggcuucuucauggcugcg

SEQ ID NO: 387047 - RNA, 32 nt, Homo Sapiens
uaccccuguuuucaggcacuauguuugagaac

SEQ ID NO: 387048 - RNA, 32 nt, Homo Sapiens
gcuggaggauuuagccacucuguccuccccuu

SEQ ID NO: 387049 - RNA, 32 nt, Homo Sapiens
aagcgagaaaaauuauuuuccacuccagaaau

SEQ ID NO: 387050 - RNA, 32 nt, Homo Sapiens
aggagugauauuccauuuauuuagaaagccuu

SEQ ID NO: 387051 - RNA, 32 nt, Homo Sapiens
aucgcgugccugucuccucccccugagaucga

SEQ ID NO: 387052 - RNA, 32 nt, Homo Sapiens
ucugugggcgguucgggagauaccaaaggaga

SEQ ID NO: 387053 - RNA, 32 nt, Homo Sapiens
ccuuaccagaaguagagcaaaggucguugcug

SEQ ID NO: 387054 - RNA, 32 nt, Homo Sapiens
cuuuugccuugacuacugcaauaaccuucaaa

SEQ ID NO: 387055 - RNA, 30 nt, Homo Sapiens
gaccccuucccugccacccauccacgugca

SEQ ID NO: 387056 - RNA, 32 nt, Homo Sapiens
ccuauguuggguccaagcugccccugugcugu

SEQ ID NO: 387057 - RNA, 31 nt, Homo Sapiens
agauaaaaauaaaagcagaauguauaucauc

SEQ ID NO: 387058 - RNA, 32 nt, Homo Sapiens
guuauugggagucuuauuauuuuuauaguuuu

SEQ ID NO: 387059 - RNA, 32 nt, Homo Sapiens
ugccuucuguauuguguaagcauucuaugucu

SEQ ID NO: 387060 - RNA, 32 nt, Homo Sapiens
cuugugcucugcaaagacucugcugcugggga

SEQ ID NO: 387061 - RNA, 32 nt, Homo Sapiens
ugacuggcccuggcuuccuggguggcggugcg

SEQ ID NO: 387062 - RNA, 32 nt, Homo Sapiens
ucugauuugcugucagccaugaacggauggau

SEQ ID NO: 387063 - RNA, 32 nt, Homo Sapiens
aacauaaaugaagauuugauacauuauuucau

SEQ ID NO: 387064 - RNA, 32 nt, Homo Sapiens
uggccaggcagguggcacguggcaucgcaugg

SEQ ID NO: 387065 - RNA, 32 nt, Homo Sapiens
acucccguucuauuuuaugaugguugauaaua

SEQ ID NO: 387066 - RNA, 32 nt, Homo Sapiens
aacgcuggccccagaccccugcccacccugcc

SEQ ID NO: 387067 - RNA, 32 nt, Homo Sapiens
cgguaccaguguucacuuggaaacauggcucu

SEQ ID NO: 387068 - RNA, 32 nt, Homo Sapiens
ugaguccugcagcacccuccccccaccccuca

SEQ ID NO: 387069 - RNA, 32 nt, Homo Sapiens
agacuccaaaguuuauacugagcucagugccu

SEQ ID NO: 387070 - RNA, 32 nt, Homo Sapiens
ccugggugcccucuccuuugcacccuacuuca

SEQ ID NO: 387071 - RNA, 32 nt, Homo Sapiens
agagugauggugcuuguuagggaucaagggca

SEQ ID NO: 387072 - RNA, 32 nt, Homo Sapiens
agugucucaaaggagcuuucucaaugucuucc

SEQ ID NO: 387073 - RNA, 32 nt, Homo Sapiens
cuuaaggaaaacguugucacuuuuauguuaua

SEQ ID NO: 387074 - RNA, 32 nt, Homo Sapiens
gagaacuuacucaauuugauaaagaacuacua

SEQ ID NO: 387075 - RNA, 32 nt, Homo Sapiens
cacuucccagugccuggcaugugguaggagcu

SEQ ID NO: 387076 - RNA, 32 nt, Homo Sapiens
ggguauguucuaaauuugaacuuugagaggca

SEQ ID NO: 387077 - RNA, 29 nt, Homo Sapiens
aagucuguauguauggaguggguuggggc

SEQ ID NO: 387078 - RNA, 31 nt, Homo Sapiens
uucaccucacggaaauuuucuucccuugugc

SEQ ID NO: 387079 - RNA, 32 nt, Homo Sapiens
agaucccgcccaagccgccagcugggagcacc

SEQ ID NO: 387080 - RNA, 32 nt, Homo Sapiens
uuccgccuggggaguguuggauccacaucccg

SEQ ID NO: 387081 - RNA, 32 nt, Homo Sapiens
ucagguucuuugcuguggggcugcuggggaug

SEQ ID NO: 387082 - RNA, 32 nt, Homo Sapiens
ggagcggagacgggaggccuggccugucucgg

SEQ ID NO: 387083 - RNA, 32 nt, Homo Sapiens
ggccauuuucccuuguugucuuugaaaauacu

SEQ ID NO: 387084 - RNA, 32 nt, Homo Sapiens
gccgugcgcccggcgcccaccgcagccugcau

SEQ ID NO: 387085 - RNA, 32 nt, Homo Sapiens
gguaucauaaaacaggaaaugugcuucauaug

SEQ ID NO: 387086 - RNA, 32 nt, Homo Sapiens
gagucgggcggagcggcuggggaugagcgcga

SEQ ID NO: 387087 - RNA, 32 nt, Homo Sapiens
uauggagucucguucugucacccaggcuggcg

SEQ ID NO: 387088 - RNA, 32 nt, Homo Sapiens
cuagccacgugugauugcagggacgcccaagg

SEQ ID NO: 387089 - RNA, 32 nt, Homo Sapiens
cucccggccccgcuccgcucacaauccgaugg

SEQ ID NO: 387090 - RNA, 32 nt, Homo Sapiens
gcugaaaaauaccauuugaacucuggaagaac

SEQ ID NO: 387091 - RNA, 32 nt, Homo Sapiens
uggagaaagaccgcaugaagauacuuguaagc

SEQ ID NO: 387092 - RNA, 32 nt, Homo Sapiens
ccacgaugaggagcuucccuugcacagaguuc

SEQ ID NO: 387093 - RNA, 32 nt, Homo Sapiens
gaaagggcuggacuacuauaaaaguuacaaau

SEQ ID NO: 387094 - RNA, 32 nt, Homo Sapiens
ucagggacuuuuuuuucuuuucuccugaacua

SEQ ID NO: 387095 - RNA, 32 nt, Homo Sapiens
gaggugccuccucuccucugcccaggggaggg

SEQ ID NO: 387096 - RNA, 32 nt, Homo Sapiens
uccuccucaacucccagccaucuguauaaaca

SEQ ID NO: 387097 - RNA, 32 nt, Homo Sapiens
caaauaaaugcuuuggaaauguuucaguugcu

SEQ ID NO: 387098 - RNA, 32 nt, Homo Sapiens
ccaugccuaacuuuucccuugagugcauggca

SEQ ID NO: 387099 - RNA, 32 nt, Homo Sapiens
agugugcugacuuuuuaacaugguauuaucaa

SEQ ID NO: 387100 - RNA, 32 nt, Homo Sapiens
ccaggccugggaggaggcaggggggcugggcg

SEQ ID NO: 387101 - RNA, 32 nt, Homo Sapiens
aguuguggaugagcugcaggugcagugacucc

SEQ ID NO: 387102 - RNA, 32 nt, Homo Sapiens
ucgcaggggcugaugcacuggguguggagcug

SEQ ID NO: 387103 - RNA, 32 nt, Homo Sapiens
ccuguucccuaaggggccccagccaaggagcu

SEQ ID NO: 387104 - RNA, 32 nt, Homo Sapiens
ccacauuagcacaggaagagccaguggcagcg

SEQ ID NO: 387105 - RNA, 32 nt, Homo Sapiens
gucuaaaagaucuccuuaaaccagaggggagc

SEQ ID NO: 387106 - RNA, 32 nt, Homo Sapiens
acgcacauaaagguguacauggcuauuguuuc

SEQ ID NO: 387107 - RNA, 32 nt, Homo Sapiens
ucacuaucuauuaugcagcuauuauguggucu

SEQ ID NO: 387108 - RNA, 32 nt, Homo Sapiens
gagguguugcuguguugcccaagcuggacuug

SEQ ID NO: 387109 - RNA, 32 nt, Homo Sapiens
aggcagcagcagccucuucccauggauccacc

SEQ ID NO: 387110 - RNA, 32 nt, Homo Sapiens
guccaggaauggggaggacgcugguggcuccc

SEQ ID NO: 387111 - RNA, 32 nt, Homo Sapiens
ugugggcugaagaugguugguuucaugugggg

SEQ ID NO: 387112 - RNA, 32 nt, Homo Sapiens
uaauggggaaagggggcuuugcaaagccgagg

SEQ ID NO: 387113 - RNA, 32 nt, Homo Sapiens
aacagcugcucauuucccccagccccagcccc

SEQ ID NO: 387114 - RNA, 32 nt, Homo Sapiens
ucaggaagccccaauccagaagaucgucuuca

SEQ ID NO: 387115 - RNA, 32 nt, Homo Sapiens
augaccuagacaagcugcuggaaaaaaugcaa

SEQ ID NO: 387116 - RNA, 32 nt, Homo Sapiens
gauaacagaaacaaacaacaaaguugugguga

SEQ ID NO: 387117 - RNA, 32 nt, Homo Sapiens
aaauaacacaugccuaugguaaaagucaaaca

SEQ ID NO: 387118 - RNA, 31 nt, Homo Sapiens
uccaucuauugagccagcagcuguuguaccu

SEQ ID NO: 387119 - RNA, 32 nt, Homo Sapiens
cagucucaacuccagucccucaucucacccuu

SEQ ID NO: 387120 - RNA, 32 nt, Homo Sapiens
aguugccugcuuuguauuuuugaaaucucugc

SEQ ID NO: 387121 - RNA, 32 nt, Homo Sapiens
agcaugggguuuacaaggcaaagauagucauu

SEQ ID NO: 387122 - RNA, 32 nt, Homo Sapiens
cucuggaaucaaccucuuucuaauacccucuu

SEQ ID NO: 387123 - RNA, 32 nt, Homo Sapiens
uguuaaaguauucaaguagcuuucucuggggg

SEQ ID NO: 387124 - RNA, 32 nt, Homo Sapiens
gaggggcugcugcugggaacaccuggagucuc

SEQ ID NO: 387125 - RNA, 32 nt, Homo Sapiens
ggggcaugggccaggggcgcggggugaagcgg

SEQ ID NO: 387126 - RNA, 32 nt, Homo Sapiens
ccucuaugaagaaacuaacaagaaagcagggg

SEQ ID NO: 387127 - RNA, 32 nt, Homo Sapiens
cuccaggagcaaaagaaacacaauauagaggg

SEQ ID NO: 387128 - RNA, 32 nt, Homo Sapiens
gaucuauaucuaguauaacuauucuuauuuua

SEQ ID NO: 387129 - RNA, 31 nt, Homo Sapiens
caguuccagcacugccucucccugugcauua

SEQ ID NO: 387130 - RNA, 32 nt, Homo Sapiens
uucaaaugagcagggcccgagcuggaagcgca

SEQ ID NO: 387131 - RNA, 32 nt, Homo Sapiens
cucugacuguacuuacgcugcacugucggugu

SEQ ID NO: 387132 - RNA, 30 nt, Homo Sapiens
aucagguccugcucagcagugagagcagau

SEQ ID NO: 387133 - RNA, 32 nt, Homo Sapiens
ucucaccaggacuucagguuggauaacauguc

SEQ ID NO: 387134 - RNA, 32 nt, Homo Sapiens
uucaauuuuuaaauuucuuggugcuuugucua

SEQ ID NO: 387135 - RNA, 31 nt, Homo Sapiens
agagaaaaauagcagcuaccauagacuucag

SEQ ID NO: 387136 - RNA, 32 nt, Homo Sapiens
guuguggccauguccacccugauuccugagag

SEQ ID NO: 387137 - RNA, 30 nt, Homo Sapiens
uacugguuguugagcugggaaaccguggcc

SEQ ID NO: 387138 - RNA, 32 nt, Homo Sapiens
ucuaccagcuggaaaugaguggugaagucagc

SEQ ID NO: 387139 - RNA, 32 nt, Homo Sapiens
ugccaaaacuacccuuucccccauggggugcu

SEQ ID NO: 387140 - RNA, 32 nt, Homo Sapiens
ccuauccucucaaucacuacucuucuugaagc

SEQ ID NO: 387141 - RNA, 32 nt, Homo Sapiens
acucccaccaucuucacccccaccucaggucc

SEQ ID NO: 387142 - RNA, 32 nt, Homo Sapiens
acauauuuuuaaaauucccucuccucuuggcu

SEQ ID NO: 387143 - RNA, 32 nt, Homo Sapiens
uauuuuaaauguuuuaaggaugcuucuaagga

SEQ ID NO: 387144 - RNA, 30 nt, Homo Sapiens
auccuccccgcucugccgccgcccgcuggg

SEQ ID NO: 387145 - RNA, 32 nt, Homo Sapiens
auucagaagacuuguuugaauuuggauuuuuu

SEQ ID NO: 387146 - RNA, 32 nt, Homo Sapiens
ugggauugauuugacugcaauguaauucucuc

SEQ ID NO: 387147 - RNA, 32 nt, Homo Sapiens
ccugcccagaauguggagaagagaggcgaguu

SEQ ID NO: 387148 - RNA, 32 nt, Homo Sapiens
agaguuuugguuuuacaagacaaaaggauuau

SEQ ID NO: 387149 - RNA, 32 nt, Homo Sapiens
guaccccagaaagcagaggaggcguguaaaua

SEQ ID NO: 387150 - RNA, 32 nt, Homo Sapiens
gagcccccaucccuuaucuuacccccaccgcg

SEQ ID NO: 387151 - RNA, 32 nt, Homo Sapiens
aaccccaucucuacuaaaaauagaaaccuuag

SEQ ID NO: 387152 - RNA, 29 nt, Homo Sapiens
cuaaaagagaucugggcauuaagucagug

SEQ ID NO: 387153 - RNA, 32 nt, Homo Sapiens
cccuagagaauaaggaugaaauaaucacucau

SEQ ID NO: 387154 - RNA, 32 nt, Homo Sapiens
aaaaccaucucuacuaaaaauagaaaaauuag

SEQ ID NO: 387155 - RNA, 30 nt, Homo Sapiens
gccaaggggaggcgggaugagucugcgagc

SEQ ID NO: 387156 - RNA, 32 nt, Homo Sapiens
uaauucacaacccuaaaguuccauuuacuaau

SEQ ID NO: 387157 - RNA, 32 nt, Homo Sapiens
aacaugugcugggaacccugcccagugagagc

SEQ ID NO: 387158 - RNA, 32 nt, Homo Sapiens
ggauccaaggaccuguggacagucggccuacu

SEQ ID NO: 387159 - RNA, 32 nt, Homo Sapiens
accaagcccagcaguacuauguguguagugcu

SEQ ID NO: 387160 - RNA, 32 nt, Homo Sapiens
uuuaguuauauucacugguuuuacacagagaa

SEQ ID NO: 387161 - RNA, 32 nt, Homo Sapiens
ucuacaaggccucagggaccaacuugccaaca

SEQ ID NO: 387162 - RNA, 32 nt, Homo Sapiens
guguuugaaacacacugaagauuacugcccaa

SEQ ID NO: 387163 - RNA, 32 nt, Homo Sapiens
cugcucugcauggccuggugcagggcucccgu

SEQ ID NO: 387164 - RNA, 32 nt, Homo Sapiens
caaaaggagacagugucacuuauucuugcuga

SEQ ID NO: 387165 - RNA, 32 nt, Homo Sapiens
guccauccucugccccucccccuggcuucuuu

SEQ ID NO: 387166 - RNA, 32 nt, Homo Sapiens
acaggccccguccaccgccuccacgccgcacc

SEQ ID NO: 387167 - RNA, 32 nt, Homo Sapiens
gcucgccggccgcgcgucccggccaugaacug

SEQ ID NO: 387168 - RNA, 32 nt, Homo Sapiens
uucaccccaaccucagcugauuguaguacacc

SEQ ID NO: 387169 - RNA, 32 nt, Homo Sapiens
uuuuauuguuauuuuuaacaugaaucuaaagu

SEQ ID NO: 387170 - RNA, 32 nt, Homo Sapiens
gagacuuuuuaaaaauauaacuuuuuccuuaa

SEQ ID NO: 387171 - RNA, 32 nt, Homo Sapiens
aauauuguauuacuguacauagagagacaggu

SEQ ID NO: 387172 - RNA, 32 nt, Homo Sapiens
auuuuuuacuauuaugacacaaacacagggaa

SEQ ID NO: 387173 - RNA, 32 nt, Homo Sapiens
gcccaggcucccucccaacgggcuccggcucu

SEQ ID NO: 387174 - RNA, 32 nt, Homo Sapiens
aacccaagagcagucgucaucaggccaacgug

SEQ ID NO: 387175 - RNA, 32 nt, Homo Sapiens
gucaccccuggccccauuccuugguaauuagc

SEQ ID NO: 387176 - RNA, 32 nt, Homo Sapiens
uaguuuggggcuguugguuaggcagcaauaac

SEQ ID NO: 387177 - RNA, 32 nt, Homo Sapiens
uuguuauaagccauuugaauuuuuaaaaaauu

SEQ ID NO: 387178 - RNA, 32 nt, Homo Sapiens
acaucuccaaaauaggucauaaguuaaagcau

SEQ ID NO: 387179 - RNA, 32 nt, Homo Sapiens
aucauuuucuuucucucugccagggacauguc

SEQ ID NO: 387180 - RNA, 32 nt, Homo Sapiens
gagcuagacgguuuccuuccuccccucucaaa

SEQ ID NO: 387181 - RNA, 32 nt, Homo Sapiens
guaucgcaauuguuuuguuuucauuucuugua

SEQ ID NO: 387182 - RNA, 32 nt, Homo Sapiens
caggguggaaaaaccucuuuuacuuuauccuc

SEQ ID NO: 387183 - RNA, 32 nt, Homo Sapiens
aaaacucugugacaccagcaaaaaaaaaaaaa

SEQ ID NO: 387184 - RNA, 32 nt, Homo Sapiens
gcuccccacccgccucccgccucccccgcagg

SEQ ID NO: 387185 - RNA, 32 nt, Homo Sapiens
acaaauguuagucccuaaccacuuuuuauaua

SEQ ID NO: 387186 - RNA, 32 nt, Homo Sapiens
ucuaucuagcaaaagccagaucugaaauucag

SEQ ID NO: 387187 - RNA, 32 nt, Homo Sapiens
ccaugcaacuauccgucucgaauaccagggca

SEQ ID NO: 387188 - RNA, 32 nt, Homo Sapiens
ggagguggaagacagugauauuguguccggaa

SEQ ID NO: 387189 - RNA, 32 nt, Homo Sapiens
gcucugacaaaaccccgccuccaggucggcag

SEQ ID NO: 387190 - RNA, 32 nt, Homo Sapiens
ccuggcccugguuuccuuuuucuuagcaaucu

SEQ ID NO: 387191 - RNA, 32 nt, Homo Sapiens
gauggaguuucacccuuguugcccaggcugga

SEQ ID NO: 387192 - RNA, 32 nt, Homo Sapiens
cuucuccccacuuucaccuccccacccaaacu

SEQ ID NO: 387193 - RNA, 32 nt, Homo Sapiens
guuuuuacaaauguuaaaauguguuguuccaa

SEQ ID NO: 387194 - RNA, 32 nt, Homo Sapiens
ugcuuuucauuuccauuaaguugcuaaaauag

SEQ ID NO: 387195 - RNA, 32 nt, Homo Sapiens
caugaaagaacaauuagaaaaaauccaaauug

SEQ ID NO: 387196 - RNA, 32 nt, Homo Sapiens
ccuuccaccacuuuuuacuuucugcuaucucc

SEQ ID NO: 387197 - RNA, 32 nt, Homo Sapiens
aguaaagaaugagaauggauucuguacaauac

SEQ ID NO: 387198 - RNA, 32 nt, Homo Sapiens
cauucuugauuuuggugacuagaguuguagau

SEQ ID NO: 387199 - RNA, 32 nt, Homo Sapiens
ggcgggguagagaggcgcggacgcugagcgag

SEQ ID NO: 387200 - RNA, 32 nt, Homo Sapiens
ccccacagcugccccccuccccucccuuuuug

SEQ ID NO: 387201 - RNA, 32 nt, Homo Sapiens
cuccugccgucuccaacagggcaugucccggg

SEQ ID NO: 387202 - RNA, 32 nt, Homo Sapiens
gaauuccuauuaugggauguuggcaaucuuac

SEQ ID NO: 387203 - RNA, 32 nt, Homo Sapiens
ccucucagguggcgggcucugcgacccuguga

SEQ ID NO: 387204 - RNA, 32 nt, Homo Sapiens
ugaccuucugugcuuuuuguuguuuuguuuuc

SEQ ID NO: 387205 - RNA, 32 nt, Homo Sapiens
gcuuggguccaguggaggaagaaggaaggaga

SEQ ID NO: 387206 - RNA, 32 nt, Homo Sapiens
uagagcccccugcggcucuccucacuccucgc

SEQ ID NO: 387207 - RNA, 32 nt, Homo Sapiens
aaguaauccaacacagauaugaaaaucacacu

SEQ ID NO: 387208 - RNA, 32 nt, Homo Sapiens
ucaccucugugguggcccugucguccgccuca

SEQ ID NO: 387209 - RNA, 32 nt, Homo Sapiens
gcgaggccgggcgaggccccucgggagccgga

SEQ ID NO: 387210 - RNA, 32 nt, Homo Sapiens
gcaggggccuggccuccuggguucuuugcuga

SEQ ID NO: 387211 - RNA, 32 nt, Homo Sapiens
cagaauggcuuuaaaaaguagacucaggccca

SEQ ID NO: 387212 - RNA, 32 nt, Homo Sapiens
ucugcauccuaccccaccuacccaacacacuu

SEQ ID NO: 387213 - RNA, 32 nt, Homo Sapiens
uaacggugcuaaaaaugaaaauucuaacccaa

SEQ ID NO: 387214 - RNA, 32 nt, Homo Sapiens
gaagacuggagcgcucagccugccacggaaga

SEQ ID NO: 387215 - RNA, 32 nt, Homo Sapiens
acuggcuagcuaaaccugacugaaugggaagg

SEQ ID NO: 387216 - RNA, 32 nt, Homo Sapiens
gcgcgcugccuccuuaaggaaaagcacguggg

SEQ ID NO: 387217 - RNA, 32 nt, Homo Sapiens
ccagccgccgccgccgccgccauggugucccc

SEQ ID NO: 387218 - RNA, 32 nt, Homo Sapiens
cugcucaucacagcccgggguggccacaucgg

SEQ ID NO: 387219 - RNA, 32 nt, Homo Sapiens
augagaacaacacuaccacuugaaggugaaca

SEQ ID NO: 387220 - RNA, 32 nt, Homo Sapiens
uauagauguuugcauccuuuguauuaaaauua

SEQ ID NO: 387221 - RNA, 32 nt, Homo Sapiens
uagaugcauauuauuucuuuuauuuaaaagaa

SEQ ID NO: 387222 - RNA, 32 nt, Homo Sapiens
aagaaauccuuccuuuuuauucauuaaaacaa

SEQ ID NO: 387223 - RNA, 32 nt, Homo Sapiens
aaccgucccccgcgcgcaugcgcgcgccccug

SEQ ID NO: 387224 - RNA, 32 nt, Homo Sapiens
gagccggccccggcgaggaggcgcggaaccau

SEQ ID NO: 387225 - RNA, 32 nt, Homo Sapiens
gagcccaugcccuggaggaacucuguagcugu

SEQ ID NO: 387226 - RNA, 32 nt, Homo Sapiens
gcuggacaggcggcugauccucauggaaacag

SEQ ID NO: 387227 - RNA, 32 nt, Homo Sapiens
uagccacugggcucagcccuggagcugagagc

SEQ ID NO: 387228 - RNA, 32 nt, Homo Sapiens
ccgucucgaaaauaaacaaauaaagaaagguu

SEQ ID NO: 387229 - RNA, 30 nt, Homo Sapiens
ucugguguagguggcagcugaaacuacauc

SEQ ID NO: 387230 - RNA, 32 nt, Homo Sapiens
uuccccgagggccagcagggcugggggcuccg

SEQ ID NO: 387231 - RNA, 32 nt, Homo Sapiens
ucuacaacgcggaugugguggugcuggaggug

SEQ ID NO: 387232 - RNA, 32 nt, Homo Sapiens
gcuggggcggguggauugcuugaugccaggag

SEQ ID NO: 387233 - RNA, 32 nt, Homo Sapiens
agcccaaacacccacaccucugucucccccag

SEQ ID NO: 387234 - RNA, 32 nt, Homo Sapiens
gcucaaccucucuccuucuggcgcaagagaac

SEQ ID NO: 387235 - RNA, 32 nt, Homo Sapiens
acccacaucucaccuugaagaaacuuacaggu

SEQ ID NO: 387236 - RNA, 32 nt, Homo Sapiens
gaagaaggacauuuuugcugcaucaaggaagc

SEQ ID NO: 387237 - RNA, 32 nt, Homo Sapiens
caugugacucagcaauccugcugcuggguaua

SEQ ID NO: 387238 - RNA, 32 nt, Homo Sapiens
aguccccaugcccugcuguccuccucacagga

SEQ ID NO: 387239 - RNA, 32 nt, Homo Sapiens
ggcggugaccgcgcuccagacacagcucugcg

SEQ ID NO: 387240 - RNA, 32 nt, Homo Sapiens
ggguccgccccggccucagaguugcgcaauaa

SEQ ID NO: 387241 - RNA, 32 nt, Homo Sapiens
uucauguugacagauuuguagacaauuacaaa

SEQ ID NO: 387242 - RNA, 32 nt, Homo Sapiens
gagccugcaugucgcuggcccaaggcuggacc

SEQ ID NO: 387243 - RNA, 32 nt, Homo Sapiens
uuucauggaaaugguugacauuacacauggua

SEQ ID NO: 387244 - RNA, 32 nt, Homo Sapiens
ccaucuccuggcggccuuggucggcccacagc

SEQ ID NO: 387245 - RNA, 32 nt, Homo Sapiens
gagaugggagacgggcgauggcugugguccuu

SEQ ID NO: 387246 - RNA, 32 nt, Homo Sapiens
augaaauucaguuauauuuaaucuuuguaauc

SEQ ID NO: 387247 - RNA, 32 nt, Homo Sapiens
ccaucuuguauauagguauuuuuuacaugggu

SEQ ID NO: 387248 - RNA, 32 nt, Homo Sapiens
gcacacuccgcggagcuccugccacagccguc

SEQ ID NO: 387249 - RNA, 32 nt, Homo Sapiens
gaugcaggaaauguuagaugucuuuauccacg

SEQ ID NO: 387250 - RNA, 32 nt, Homo Sapiens
cggaggggaaaacaccucuuccuuuuaauugc

SEQ ID NO: 387251 - RNA, 32 nt, Homo Sapiens
uucugaagaacaaggaugcacuaaaguuagca

SEQ ID NO: 387252 - RNA, 32 nt, Homo Sapiens
gaagugcccagcaagagggaaagcagaccccu

SEQ ID NO: 387253 - RNA, 32 nt, Homo Sapiens
uggaaaccuccugggagaccuacauuacacca

SEQ ID NO: 387254 - RNA, 32 nt, Homo Sapiens
auccugccacuucacaucuacucuuccauggc

SEQ ID NO: 387255 - RNA, 32 nt, Homo Sapiens
ggaaaugaaugggaaaugucgcuggucugugu

SEQ ID NO: 387256 - RNA, 32 nt, Homo Sapiens
uuugugguugggggcgcgcgugcgagugccag

SEQ ID NO: 387257 - RNA, 32 nt, Homo Sapiens
aucugacuacuauaaaaauauuugcauauaua

SEQ ID NO: 387258 - RNA, 32 nt, Homo Sapiens
uuacauauuuuauuuuuuuuuacaauggugga

SEQ ID NO: 387259 - RNA, 32 nt, Homo Sapiens
uuagaguuacuguauagugcauaacauuguug

SEQ ID NO: 387260 - RNA, 32 nt, Homo Sapiens
uucggcacgaggcgcccggccccuggccccag

SEQ ID NO: 387261 - RNA, 32 nt, Homo Sapiens
cagacccccguccugucccccacacccguguc

SEQ ID NO: 387262 - RNA, 30 nt, Homo Sapiens
gauuugaugaaugugggggaacucagagga

SEQ ID NO: 387263 - RNA, 32 nt, Homo Sapiens
agagcugggucccccugcuccuccucgacccc

SEQ ID NO: 387264 - RNA, 32 nt, Homo Sapiens
cugcccgaacaccccuucuggccacgcagccg

SEQ ID NO: 387265 - RNA, 32 nt, Homo Sapiens
ccccagcuccgucucggaggaccuuucgccgg

SEQ ID NO: 387266 - RNA, 32 nt, Homo Sapiens
cuucacagcugccugcuguccuccccugcacu

SEQ ID NO: 387267 - RNA, 32 nt, Homo Sapiens
uuuguaacaccguccaacauuccuuguuugua

SEQ ID NO: 387268 - RNA, 32 nt, Homo Sapiens
ugugagaccccauggggacacgggugccuaug

SEQ ID NO: 387269 - RNA, 32 nt, Homo Sapiens
aaauaaaugaaauuauuuaaggguuaugcugc

SEQ ID NO: 387270 - RNA, 32 nt, Homo Sapiens
cugggcuagggucaccuggagcuggugcccgu

SEQ ID NO: 387271 - RNA, 32 nt, Homo Sapiens
uagggucugggaggaaggcuuuugggaagaug

SEQ ID NO: 387272 - RNA, 32 nt, Homo Sapiens
ggcuggcggcgguagcugucgcccgcuugguu

SEQ ID NO: 387273 - RNA, 32 nt, Homo Sapiens
uacacacgagggagcaggcuggucauugacuu

SEQ ID NO: 387274 - RNA, 32 nt, Homo Sapiens
auaccagauuuuucuuuuucugaugacauuuu

SEQ ID NO: 387275 - RNA, 32 nt, Homo Sapiens
uucaaaugaaauguggggacauagaucuuuuu

SEQ ID NO: 387276 - RNA, 27 nt, Homo Sapiens
ggcugguccuucucccucccacaggcc

SEQ ID NO: 387277 - RNA, 30 nt, Homo Sapiens
aaaauggauaaaauacugauacauguaaca

SEQ ID NO: 387278 - RNA, 32 nt, Homo Sapiens
guaaucaucuuuccaauccagaggaacaagca

SEQ ID NO: 387279 - RNA, 32 nt, Homo Sapiens
gccccagaaaucaguguuggccaugaugacaa

SEQ ID NO: 387280 - RNA, 31 nt, Homo Sapiens
cacugugguguggcugccacggccuccuggc

SEQ ID NO: 387281 - RNA, 32 nt, Homo Sapiens
cauucuucgacgccgggacauaaagaacgcac

SEQ ID NO: 387282 - RNA, 32 nt, Homo Sapiens
ugcugcaucucugcaccaggaccucuuaagga

SEQ ID NO: 387283 - RNA, 32 nt, Homo Sapiens
gggccggcgggcgggggcugaggggcugccau

SEQ ID NO: 387284 - RNA, 32 nt, Homo Sapiens
ccacagccuacaccaaauccagcccuugauuu

SEQ ID NO: 387285 - RNA, 28 nt, Homo Sapiens
aagauggcggcggugucuggcuuggugc

SEQ ID NO: 387286 - RNA, 32 nt, Homo Sapiens
ucagcacuagagggagggagggggagggagga

SEQ ID NO: 387287 - RNA, 32 nt, Homo Sapiens
ggugguugcuugggggugaacaauuuuguggc

SEQ ID NO: 387288 - RNA, 32 nt, Homo Sapiens
caggaaacacaagcccacauucgauaucuaua

SEQ ID NO: 387289 - RNA, 32 nt, Homo Sapiens
aaauguaguguuucauuuuguaugcauuaaac

SEQ ID NO: 387290 - RNA, 32 nt, Homo Sapiens
cagggaccuggcggccgccgaucggggcugcg

SEQ ID NO: 387291 - RNA, 32 nt, Homo Sapiens
cucgccggccuggccacgggauggcccccaaa

SEQ ID NO: 387292 - RNA, 32 nt, Homo Sapiens
agccaagagugccaaggugucuggggccacac

SEQ ID NO: 387293 - RNA, 32 nt, Homo Sapiens
ccccccacuuccucaaaacaaacaagagaugg

SEQ ID NO: 387294 - RNA, 32 nt, Homo Sapiens
ggcugacaugucgucccggccugggcgcgagg

SEQ ID NO: 387295 - RNA, 32 nt, Homo Sapiens
aauguuucuuugaucaggauggaaaggaaaau

SEQ ID NO: 387296 - RNA, 32 nt, Homo Sapiens
caaaacugucaaauauaaaaggaguccuuuuu

SEQ ID NO: 387297 - RNA, 32 nt, Homo Sapiens
cacuaggcugcaccuucaacacuggggaucaa

SEQ ID NO: 387298 - RNA, 32 nt, Homo Sapiens
ccagaacaaaccgaaaucaggauacccaacca

SEQ ID NO: 387299 - RNA, 32 nt, Homo Sapiens
ggccaccacccucuccuugcuuucagcccuuc

SEQ ID NO: 387300 - RNA, 32 nt, Homo Sapiens
gucgccauggcgaccggcuguacgcuaccaca

SEQ ID NO: 387301 - RNA, 32 nt, Homo Sapiens
uauuuauuuuuggcauguuuggcccaccacac

SEQ ID NO: 387302 - RNA, 32 nt, Homo Sapiens
cggcagcgaucugcccggggucucggaggcca

SEQ ID NO: 387303 - RNA, 32 nt, Homo Sapiens
auccagggcuuuuggggagaugaagagccaag

SEQ ID NO: 387304 - RNA, 32 nt, Homo Sapiens
guaaucauuucugaugauuugcuggagugcug

SEQ ID NO: 387305 - RNA, 32 nt, Homo Sapiens
agacgggugcagugacucaugccuacaauccc

SEQ ID NO: 387306 - RNA, 32 nt, Homo Sapiens
uagucaauaaauucaucuaccauuccagauua

SEQ ID NO: 387307 - RNA, 32 nt, Homo Sapiens
uuucagaucuucauuaaauuuuuuccuuaaau

SEQ ID NO: 387308 - RNA, 32 nt, Homo Sapiens
ggaagcugcaugcaugagacccacagacucuu

SEQ ID NO: 387309 - RNA, 32 nt, Homo Sapiens
gggaggcagccaagacccccuuccuucaaaac

SEQ ID NO: 387310 - RNA, 32 nt, Homo Sapiens
uauacaccaauaauuuugauaaugaguucuag

SEQ ID NO: 387311 - RNA, 32 nt, Homo Sapiens
guuaaacaacuugucuuaggcuccacagcugg

SEQ ID NO: 387312 - RNA, 32 nt, Homo Sapiens
aaaguuaaugaaacugagaacugauuggaggg

SEQ ID NO: 387313 - RNA, 32 nt, Homo Sapiens
gcugagccccccaugccccuccccuccccgug

SEQ ID NO: 387314 - RNA, 32 nt, Homo Sapiens
ucuagggcugugcaggaugcgccuugcuaaca

SEQ ID NO: 387315 - RNA, 32 nt, Homo Sapiens
ugcauacacacacauccauacacucugacaau

SEQ ID NO: 387316 - RNA, 32 nt, Homo Sapiens
cacauccugcaccuccucccucucccuucacc

SEQ ID NO: 387317 - RNA, 32 nt, Homo Sapiens
gagacccuuuugcugcuacuucauucguucug

SEQ ID NO: 387318 - RNA, 32 nt, Homo Sapiens
cuacauuaccugcaaugcacaaugaaacaaag

SEQ ID NO: 387319 - RNA, 32 nt, Homo Sapiens
gcccagggcuccuggcuucagcaggaagugaa

SEQ ID NO: 387320 - RNA, 32 nt, Homo Sapiens
cuaaauuucugagauuugauucauggcagaua

SEQ ID NO: 387321 - RNA, 32 nt, Homo Sapiens
cacugguuuuauucuugguauuuucaaagaau

SEQ ID NO: 387322 - RNA, 32 nt, Homo Sapiens
uacacuucaaagcacgucuagcacuaaugcuc

SEQ ID NO: 387323 - RNA, 32 nt, Homo Sapiens
acgcgauugugauucuuuucucuucuugacug

SEQ ID NO: 387324 - RNA, 32 nt, Homo Sapiens
uguaaaaugaacugcaguggguucuccaaacu

SEQ ID NO: 387325 - RNA, 32 nt, Homo Sapiens
aaauaguagaacaagcaacauaaaacaaugaa

SEQ ID NO: 387326 - RNA, 32 nt, Homo Sapiens
aacaagguuugugaugaugucuguacuaguua

SEQ ID NO: 387327 - RNA, 32 nt, Homo Sapiens
ccuuagggggcgcaauggaagccccggcaugc

SEQ ID NO: 387328 - RNA, 32 nt, Homo Sapiens
ucucuuagaaaagaaagagggcagccuaaaau

SEQ ID NO: 387329 - RNA, 32 nt, Homo Sapiens
uggaaaauucccuucccauggagcuuugugga

SEQ ID NO: 387330 - RNA, 32 nt, Homo Sapiens
uuggccaauauuugugcccucuggacuuuagu

SEQ ID NO: 387331 - RNA, 32 nt, Homo Sapiens
ggggaaaguuggggacaugcugcuacaauacg

SEQ ID NO: 387332 - RNA, 32 nt, Homo Sapiens
caaagcuuuuaacugacagugauaaugauuuu

SEQ ID NO: 387333 - RNA, 32 nt, Homo Sapiens
ucuccucaauccugucuccccagcggcucugu

SEQ ID NO: 387334 - RNA, 32 nt, Homo Sapiens
agggcugcaccccggcggccucggcgccaugg

SEQ ID NO: 387335 - RNA, 32 nt, Homo Sapiens
gcugcaaggggaggagagcggccgccucagga

SEQ ID NO: 387336 - RNA, 32 nt, Homo Sapiens
aucuggauaccuuuuucuuauacuuucuccua

SEQ ID NO: 387337 - RNA, 32 nt, Homo Sapiens
uucccacacaaugaacauuugaacuguguuua

SEQ ID NO: 387338 - RNA, 32 nt, Homo Sapiens
uuuuuugcugggugcaguggcucacaccugua

SEQ ID NO: 387339 - RNA, 32 nt, Homo Sapiens
ucuggcuuccucugucccacguggcugagggu

SEQ ID NO: 387340 - RNA, 32 nt, Homo Sapiens
uaagucccuggccccaccucuucugccacaaa

SEQ ID NO: 387341 - RNA, 32 nt, Homo Sapiens
auagccagaauguccggugaaaaaauaagcau

SEQ ID NO: 387342 - RNA, 32 nt, Homo Sapiens
acaaggucaggagauugagaccauccuggcca

SEQ ID NO: 387343 - RNA, 32 nt, Homo Sapiens
acaaggucaggagacugagaccauccuggcua

SEQ ID NO: 387344 - RNA, 32 nt, Homo Sapiens
ggucgguggguucccgugcggcggcggccaag

SEQ ID NO: 387345 - RNA, 32 nt, Homo Sapiens
gggucacggccccucuccccaccccaggcgcg

SEQ ID NO: 387346 - RNA, 32 nt, Homo Sapiens
gcuguguccccucuccuccccugugccagugc

SEQ ID NO: 387347 - RNA, 32 nt, Homo Sapiens
aggccuccugcaguguucugcacagcaaaccg

SEQ ID NO: 387348 - RNA, 32 nt, Homo Sapiens
accuuaucuauuuuuagacauuucgaauuccu

SEQ ID NO: 387349 - RNA, 32 nt, Homo Sapiens
gcgguggcgacggcgaugggaccccagcgaga

SEQ ID NO: 387350 - RNA, 31 nt, Homo Sapiens
aagaggcuguguggccaaccaggacccaggg

SEQ ID NO: 387351 - RNA, 32 nt, Homo Sapiens
caccacuucauuagauaaguguugucuaccua

SEQ ID NO: 387352 - RNA, 32 nt, Homo Sapiens
uguggaaacuauuuaaaggcacuauuauaaau

SEQ ID NO: 387353 - RNA, 32 nt, Homo Sapiens
gaauucggggcgccagcuacgccgcugccgcu

SEQ ID NO: 387354 - RNA, 32 nt, Homo Sapiens
ggucuucgagcgugggggcccgcuggcuuucc

SEQ ID NO: 387355 - RNA, 32 nt, Homo Sapiens
cuaggugauuauucagaaaauacgguuacaua

SEQ ID NO: 387356 - RNA, 32 nt, Homo Sapiens
aacacgggucgccgccaccuccgccucuucag

SEQ ID NO: 387357 - RNA, 32 nt, Homo Sapiens
aaggggcacugggccuugcugcaccuuggggc

SEQ ID NO: 387358 - RNA, 32 nt, Homo Sapiens
caguacccuagauagugucacaugacaccguu

SEQ ID NO: 387359 - RNA, 32 nt, Homo Sapiens
acuuccaguucccucgugccccguggguuccg

SEQ ID NO: 387360 - RNA, 32 nt, Homo Sapiens
acaggacuucuuuuuauucucaagauguacug

SEQ ID NO: 387361 - RNA, 32 nt, Homo Sapiens
aaaagcaucccauaaaauauaaaguaguaagu

SEQ ID NO: 387362 - RNA, 32 nt, Homo Sapiens
ucauauguuaaaaauaaagagauguagaaauc

SEQ ID NO: 387363 - RNA, 32 nt, Homo Sapiens
aaagaauaacagaucaacagauaccucucaau

SEQ ID NO: 387364 - RNA, 32 nt, Homo Sapiens
cccaggagccccacgguccaucccccacacca

SEQ ID NO: 387365 - RNA, 32 nt, Homo Sapiens
ugguggaaauuucacaaauauuucaugauaau

SEQ ID NO: 387366 - RNA, 32 nt, Homo Sapiens
acuguagccuugguccuggggaccaccugccu

SEQ ID NO: 387367 - RNA, 32 nt, Homo Sapiens
gguuugggccccaguucgcugacccuccuaau

SEQ ID NO: 387368 - RNA, 32 nt, Homo Sapiens
auucaugagaaauaaacugguucugugugccu

SEQ ID NO: 387369 - RNA, 32 nt, Homo Sapiens
ucgagcaguggcgggggcggaggggugguucu

SEQ ID NO: 387370 - RNA, 32 nt, Homo Sapiens
cuggggcggcggucgagaacagcagcgccaug

SEQ ID NO: 387371 - RNA, 32 nt, Homo Sapiens
auuuuauuuuaaaauuucauagcuguacuucu

SEQ ID NO: 387372 - RNA, 32 nt, Homo Sapiens
gaggguggcauguggcagcugcaggcuguggu

SEQ ID NO: 387373 - RNA, 32 nt, Homo Sapiens
aaugcagccucaacagaagugacagaauugaa

SEQ ID NO: 387374 - RNA, 32 nt, Homo Sapiens
gguguacagcuauggacugaugcaucccaucc

SEQ ID NO: 387375 - RNA, 32 nt, Homo Sapiens
gcagugauuucuguuauaaggcacauagcaag

SEQ ID NO: 387376 - RNA, 32 nt, Homo Sapiens
uuuuauacauauuugcagcuguucuuugagcu

SEQ ID NO: 387377 - RNA, 32 nt, Homo Sapiens
aacccgcaccgugagucuggcucagcagcccc

SEQ ID NO: 387378 - RNA, 32 nt, Homo Sapiens
auugucuguuuuccuucuucccaauagaagaa

SEQ ID NO: 387379 - RNA, 32 nt, Homo Sapiens
gaugcgugucuaauguuuuucuuucuucuauu

SEQ ID NO: 387380 - RNA, 32 nt, Homo Sapiens
uaauguuuacuuugguauuaaaauuugguaug

SEQ ID NO: 387381 - RNA, 32 nt, Homo Sapiens
gcccgccuaccucggcccccucagcuucccgg

SEQ ID NO: 387382 - RNA, 32 nt, Homo Sapiens
accaaaguggaagaggaagugaaaaccagaaa

SEQ ID NO: 387383 - RNA, 32 nt, Homo Sapiens
aaucccuggcaggcagauggcuccugccccau

SEQ ID NO: 387384 - RNA, 32 nt, Homo Sapiens
ccuggcggccccaacucgggcucccggguccu

SEQ ID NO: 387385 - RNA, 32 nt, Homo Sapiens
aagcccugccagcagagcaggcuggcguuugg

SEQ ID NO: 387386 - RNA, 32 nt, Homo Sapiens
cugcaccuggccgguuauucucucuuuacaga

SEQ ID NO: 387387 - RNA, 32 nt, Homo Sapiens
gaacagaaggccacaggcuggcacuacugcau

SEQ ID NO: 387388 - RNA, 32 nt, Homo Sapiens
ggcuucacugggugccccauggaggagacagc

SEQ ID NO: 387389 - RNA, 32 nt, Homo Sapiens
cauucccaugaacauccagggccagguguggu

SEQ ID NO: 387390 - RNA, 32 nt, Homo Sapiens
ucaguaggacauuuuuauuccaucuguccuau

SEQ ID NO: 387391 - RNA, 32 nt, Homo Sapiens
agaggagaggggcuucugcucucuggagccuu

SEQ ID NO: 387392 - RNA, 32 nt, Homo Sapiens
ccugagucaaggaaacauguuacgccuucuug

SEQ ID NO: 387393 - RNA, 32 nt, Homo Sapiens
ccaccucagcccugacaccaaccccgugcguc

SEQ ID NO: 387394 - RNA, 32 nt, Homo Sapiens
cuuauuggauuaccauguacuccagcacccaa

SEQ ID NO: 387395 - RNA, 32 nt, Homo Sapiens
ggucauucguaccugcuguugucuaucuauua

SEQ ID NO: 387396 - RNA, 29 nt, Homo Sapiens
caggggcguaucugggcgccugagcgcgg

SEQ ID NO: 387397 - RNA, 32 nt, Homo Sapiens
caagaggcgcuucagggugcuccaucagagcc

SEQ ID NO: 387398 - RNA, 32 nt, Homo Sapiens
ggccuuuguucgcuucugauacuaagagcagc

SEQ ID NO: 387399 - RNA, 32 nt, Homo Sapiens
auguaagauaaaauauuugcucaauucuuuug

SEQ ID NO: 387400 - RNA, 32 nt, Homo Sapiens
gugagcaggcggcaagggggcggcaagggggc

SEQ ID NO: 387401 - RNA, 32 nt, Homo Sapiens
cuugcgcagcugucgggacgugacugcguuca

SEQ ID NO: 387402 - RNA, 32 nt, Homo Sapiens
cagaaccccccucucaacgcacaauuccuaga

SEQ ID NO: 387403 - RNA, 32 nt, Homo Sapiens
accuuaagaucagaacaguuguccucacuuuu

SEQ ID NO: 387404 - RNA, 32 nt, Homo Sapiens
acuaagagaucuuguuucuauuagcagguuuu

SEQ ID NO: 387405 - RNA, 32 nt, Homo Sapiens
ccucuaccaaccccgaagugacccaugauccu

SEQ ID NO: 387406 - RNA, 32 nt, Homo Sapiens
gggcaaauggaaaugcucuaggcggggccauu

SEQ ID NO: 387407 - RNA, 32 nt, Homo Sapiens
cacuuucccgagccaagaaauuccuugaaaaa

SEQ ID NO: 387408 - RNA, 32 nt, Homo Sapiens
cuucauggagaccccuggugcugggucccugc

SEQ ID NO: 387409 - RNA, 32 nt, Homo Sapiens
gcuacuuugugaacucuuucugagagacugca

SEQ ID NO: 387410 - RNA, 32 nt, Homo Sapiens
cuuuaaaaaaaagggggggaaauaccaaagug

SEQ ID NO: 387411 - RNA, 32 nt, Homo Sapiens
gaggacgugaggaccuggaaaaacggauaaag

SEQ ID NO: 387412 - RNA, 32 nt, Homo Sapiens
auuguacauuugcaugaguacguauguuuggc

SEQ ID NO: 387413 - RNA, 32 nt, Homo Sapiens
aacuaagccacccagacaccaucaucucgaaa

SEQ ID NO: 387414 - RNA, 32 nt, Homo Sapiens
ccauguagugaaucagaaauggcucccauccu

SEQ ID NO: 387415 - RNA, 32 nt, Homo Sapiens
gaaggccugcuuuucagccacaaacuucagga

SEQ ID NO: 387416 - RNA, 32 nt, Homo Sapiens
cauaauaaaaauugaaaugaaagaauaauugu

SEQ ID NO: 387417 - RNA, 32 nt, Homo Sapiens
ggcccgaccagcuuauacugcuccaucuuccc

SEQ ID NO: 387418 - RNA, 32 nt, Homo Sapiens
cgcguccuuccuccccgggucccggccauggc

SEQ ID NO: 387419 - RNA, 32 nt, Homo Sapiens
aguccuuaaagaaaaacuuauuucagauagca

SEQ ID NO: 387420 - RNA, 32 nt, Homo Sapiens
uuuggaauuggggugaaacacccacauggcag

SEQ ID NO: 387421 - RNA, 32 nt, Homo Sapiens
ugggggaggagcuccuggcaggacuccagcug

SEQ ID NO: 387422 - RNA, 32 nt, Homo Sapiens
auccucugaagcuugagaucuaucucaccgac

SEQ ID NO: 387423 - RNA, 32 nt, Homo Sapiens
guuauaaauaauuuauaucugaagacggagag

SEQ ID NO: 387424 - RNA, 32 nt, Homo Sapiens
gaugacccugcccucugccacccaggcugcgu

SEQ ID NO: 387425 - RNA, 32 nt, Homo Sapiens
ugggggucuacaacaagaaguguauauuuuca

SEQ ID NO: 387426 - RNA, 32 nt, Homo Sapiens
augauucaugugugaaaaaauucucagaucca

SEQ ID NO: 387427 - RNA, 32 nt, Homo Sapiens
augauaaaacaauaaccguuaacauauauuuu

SEQ ID NO: 387428 - RNA, 32 nt, Homo Sapiens
cacaugugaacauuuguugaucaugugacuac

SEQ ID NO: 387429 - RNA, 32 nt, Homo Sapiens
ggaugcgguagcggccgcugugcggaggccgc

SEQ ID NO: 387430 - RNA, 32 nt, Homo Sapiens
aggaugccuucaccagcccagccccuugccug

SEQ ID NO: 387431 - RNA, 32 nt, Homo Sapiens
gaauugccugcgccacgcagcggggccggaca

SEQ ID NO: 387432 - RNA, 32 nt, Homo Sapiens
uccucgcccuucaguuuuugccugaggugcug

SEQ ID NO: 387433 - RNA, 32 nt, Homo Sapiens
uugaggucggaaacccucuacugccccauaag

SEQ ID NO: 387434 - RNA, 32 nt, Homo Sapiens
agaguucuauguacaaguccuuugucagucgu

SEQ ID NO: 387435 - RNA, 32 nt, Homo Sapiens
aacuaagggagacuugugggcuuuugcacacu

SEQ ID NO: 387436 - RNA, 32 nt, Homo Sapiens
aguguauauucuauuaaaaaguaaauuggcug

SEQ ID NO: 387437 - RNA, 32 nt, Homo Sapiens
caaauguguauuaccaauguggguguaaauuu

SEQ ID NO: 387438 - RNA, 32 nt, Homo Sapiens
aaagcucaaguuuuuucuucauuuguauuuua

SEQ ID NO: 387439 - RNA, 32 nt, Homo Sapiens
aucacaaugacaaaggggugguuuucuuucac

SEQ ID NO: 387440 - RNA, 32 nt, Homo Sapiens
ggccagcucuggggucucggcaggugguccgc

SEQ ID NO: 387441 - RNA, 32 nt, Homo Sapiens
gcuacucuggccauauaucccacaccagaagg

SEQ ID NO: 387442 - RNA, 32 nt, Homo Sapiens
ccaccaacaacgcuugugaauguauuuuucug

SEQ ID NO: 387443 - RNA, 32 nt, Homo Sapiens
ggcaguauucccuuuuuaaaugagcuuucagg

SEQ ID NO: 387444 - RNA, 32 nt, Homo Sapiens
guggagucuaauguuuaaagacguuuuguugg

SEQ ID NO: 387445 - RNA, 32 nt, Homo Sapiens
gcuguaauauaaagcauaucaaguuuauguga

SEQ ID NO: 387446 - RNA, 32 nt, Homo Sapiens
cgucucucugcuguaccagcucuguuccaggg

SEQ ID NO: 387447 - RNA, 32 nt, Homo Sapiens
aaaccugaggcagcccuuuggaugcccucaca

SEQ ID NO: 387448 - RNA, 32 nt, Homo Sapiens
gaaggcauuaugugauuuacaauaugagaaua

SEQ ID NO: 387449 - RNA, 32 nt, Homo Sapiens
acaugggguucagaucugcacuucaucaucuu

SEQ ID NO: 387450 - RNA, 32 nt, Homo Sapiens
gaauaaugcugccccugaaggcccgcauccuu

SEQ ID NO: 387451 - RNA, 32 nt, Homo Sapiens
aucauugccugccugacuauguaagauucuug

SEQ ID NO: 387452 - RNA, 32 nt, Homo Sapiens
ggcaggcucugcaugcuaugccaggcaugugc

SEQ ID NO: 387453 - RNA, 32 nt, Homo Sapiens
gcuuccgcaccucuuccaaccacccucuuucc

SEQ ID NO: 387454 - RNA, 32 nt, Homo Sapiens
uaucauauguaauaguaucacuuuuucuacau

SEQ ID NO: 387455 - RNA, 32 nt, Homo Sapiens
cuugagauugcaguaagaagauacguuuucua

SEQ ID NO: 387456 - RNA, 32 nt, Homo Sapiens
ucuaauuuaaaagguuuguaaccauugugguu

SEQ ID NO: 387457 - RNA, 32 nt, Homo Sapiens
uucuggauacagagaccaauuuaguuuggaga

SEQ ID NO: 387458 - RNA, 32 nt, Homo Sapiens
guccuggaaugguguauucuggaugucuacuc

SEQ ID NO: 387459 - RNA, 32 nt, Homo Sapiens
uguuaaaauaaucacacccauuuauuuugugu

SEQ ID NO: 387460 - RNA, 32 nt, Homo Sapiens
agacugugguggccugcgcagcgagcaggcgu

SEQ ID NO: 387461 - RNA, 32 nt, Homo Sapiens
gacccacggggaccaaggucacacguuccgug

SEQ ID NO: 387462 - RNA, 32 nt, Homo Sapiens
cuccuugcuuugcauucuuugccugcaggaca

SEQ ID NO: 387463 - RNA, 32 nt, Homo Sapiens
gugugaaacacuucaaaacugauuuaaaagau

SEQ ID NO: 387464 - RNA, 32 nt, Homo Sapiens
ggaacaaaccaucacugauuuacugauuuaag

SEQ ID NO: 387465 - RNA, 32 nt, Homo Sapiens
caagggcccccggccuccugcgcuccugccgc

SEQ ID NO: 387466 - RNA, 32 nt, Homo Sapiens
gccuuagaaaucuuaaauuuacuaguaguauc

SEQ ID NO: 387467 - RNA, 32 nt, Homo Sapiens
gcuagaccacacgugccgugacagggggugcc

SEQ ID NO: 387468 - RNA, 32 nt, Homo Sapiens
cggugaggccgcgccgaccaucucugcacuga

SEQ ID NO: 387469 - RNA, 32 nt, Homo Sapiens
gucucagaugaggagggagagaaggaggccgc

SEQ ID NO: 387470 - RNA, 32 nt, Homo Sapiens
aggggaguacaucuugaguauuuucaaauaau

SEQ ID NO: 387471 - RNA, 32 nt, Homo Sapiens
agaaaacugucaaaaucaguauauacuauuag

SEQ ID NO: 387472 - RNA, 32 nt, Homo Sapiens
ccagcccuccgccgccucuccuuagucgccgc

SEQ ID NO: 387473 - RNA, 32 nt, Homo Sapiens
cuuauacaagauaccauuuacacugaacauag

SEQ ID NO: 387474 - RNA, 32 nt, Homo Sapiens
gagccaaguaaaccucuuuucuuuauaaauua

SEQ ID NO: 387475 - RNA, 32 nt, Homo Sapiens
agccgcccuccauuguggguuccuggaguagg

SEQ ID NO: 387476 - RNA, 32 nt, Homo Sapiens
uuaagccaugaaaucuaauuuucuggggacca

SEQ ID NO: 387477 - RNA, 32 nt, Homo Sapiens
uccuccgggagcccgcugguaacucgcguccc

SEQ ID NO: 387478 - RNA, 32 nt, Homo Sapiens
agaaagaaaacaauuaaggaaauacaauacua

SEQ ID NO: 387479 - RNA, 32 nt, Homo Sapiens
ucagggauacgcccaacaccauggccugcaac

SEQ ID NO: 387480 - RNA, 32 nt, Homo Sapiens
cuauuuaggaaguaaaauuugcuucaugguca

SEQ ID NO: 387481 - RNA, 32 nt, Homo Sapiens
aaagaaagaacagauuguucaauugaaacacu

SEQ ID NO: 387482 - RNA, 32 nt, Homo Sapiens
ggagggagcggcaugggcgaugucacucagcc

SEQ ID NO: 387483 - RNA, 32 nt, Homo Sapiens
cugagccuuucugcgcccgcgggcaccaugag

SEQ ID NO: 387484 - RNA, 32 nt, Homo Sapiens
ucauuguguacuuagucuaaguacauuuucaa

SEQ ID NO: 387485 - RNA, 32 nt, Homo Sapiens
cucuguggggacgcgccccgcgccgcggcucg

SEQ ID NO: 387486 - RNA, 32 nt, Homo Sapiens
gcagcgccgcguguguaacggcgggggcgugu

SEQ ID NO: 387487 - RNA, 32 nt, Homo Sapiens
gaugaaguuauuuuaaacacuauguuagaaua

SEQ ID NO: 387488 - RNA, 32 nt, Homo Sapiens
guuuuugguuguucuuuuuucuuuuuuuaaug

SEQ ID NO: 387489 - RNA, 32 nt, Homo Sapiens
gccggcccacccacuguucaggcugagagcgg

SEQ ID NO: 387490 - RNA, 32 nt, Homo Sapiens
uaucaccccgcacuguggggccaggcaccacu

SEQ ID NO: 387491 - RNA, 32 nt, Homo Sapiens
ugauuuuaugugaagugccauuucuuuauucu

SEQ ID NO: 387492 - RNA, 32 nt, Homo Sapiens
cucuuggacaaccccaggaacuuggaccaagg

SEQ ID NO: 387493 - RNA, 32 nt, Homo Sapiens
ccugcccaccugaguucccaauaaagaaaaac

SEQ ID NO: 387494 - RNA, 32 nt, Homo Sapiens
gugccuaggugcccggccccacaccgccagcu

SEQ ID NO: 387495 - RNA, 32 nt, Homo Sapiens
ccccugcccccgcuacugccggugauuauuau

SEQ ID NO: 387496 - RNA, 32 nt, Homo Sapiens
aaagaagacugggggcagcagcugcuuggagu

SEQ ID NO: 387497 - RNA, 32 nt, Homo Sapiens
caccagaacaacaccaucauggcccugucacc

SEQ ID NO: 387498 - RNA, 32 nt, Homo Sapiens
agaccuuuuucugcacuauaugcaaacagggu

SEQ ID NO: 387499 - RNA, 32 nt, Homo Sapiens
ucaguuugaacaaaccacuuugcccaaccuga

SEQ ID NO: 387500 - RNA, 32 nt, Homo Sapiens
uugcuugcaauguugguuuggccauugauuug

SEQ ID NO: 387501 - RNA, 32 nt, Homo Sapiens
gcagcaccucacccucacuugccgggguguug

SEQ ID NO: 387502 - RNA, 32 nt, Homo Sapiens
aguuuuccuacuuauaaaguagaaauggugag

SEQ ID NO: 387503 - RNA, 32 nt, Homo Sapiens
gaauauguauaaauguuuuacacgaauguaag

SEQ ID NO: 387504 - RNA, 32 nt, Homo Sapiens
aacggggugguggggcugcgaaaaaccgaagg

SEQ ID NO: 387505 - RNA, 32 nt, Homo Sapiens
ggcgaggccgaggcuucuccccggcccaucca

SEQ ID NO: 387506 - RNA, 32 nt, Homo Sapiens
accugaucuccuccucaugaccuucugcccug

SEQ ID NO: 387507 - RNA, 32 nt, Homo Sapiens
aagugaaaugaggaagacagauugagcaaucc

SEQ ID NO: 387508 - RNA, 32 nt, Homo Sapiens
agcagcguuuccccccaacuccuuaauuuuau

SEQ ID NO: 387509 - RNA, 32 nt, Homo Sapiens
ucugcgccugcgccgccgggaugcuggggaga

SEQ ID NO: 387510 - RNA, 32 nt, Homo Sapiens
uauauaguauauuuauacucuagaacaugcac

SEQ ID NO: 387511 - RNA, 32 nt, Homo Sapiens
cuccgcuggggcagagggucgcggcggcuggg

SEQ ID NO: 387512 - RNA, 32 nt, Homo Sapiens
gagagaggcagacaucugaacaggcagguagg

SEQ ID NO: 387513 - RNA, 32 nt, Homo Sapiens
uuacagccguucugauuuccugucguaagauu

SEQ ID NO: 387514 - RNA, 32 nt, Homo Sapiens
cauauagauaauuauccaggauguguggcuca

SEQ ID NO: 387515 - RNA, 32 nt, Homo Sapiens
acagacaucuuucuguaugaaaguauaaauug

SEQ ID NO: 387516 - RNA, 32 nt, Homo Sapiens
gcccuacucccuccccacgccagggcagcagc

SEQ ID NO: 387517 - RNA, 32 nt, Homo Sapiens
acuccagacagaggggcccuugcucaaccuca

SEQ ID NO: 387518 - RNA, 32 nt, Homo Sapiens
ugaggggauucucuacugccaagccccugccc

SEQ ID NO: 387519 - RNA, 32 nt, Homo Sapiens
ggucuucuaugcugcagagaaacuaugcauua

SEQ ID NO: 387520 - RNA, 32 nt, Homo Sapiens
cagcagagaggaauggcggcaccuggacccuu

SEQ ID NO: 387521 - RNA, 32 nt, Homo Sapiens
uuaguggcagcacuucuauugucccuucacuu

SEQ ID NO: 387522 - RNA, 32 nt, Homo Sapiens
cauguaacauacaauacauccaaauauggcug

SEQ ID NO: 387523 - RNA, 32 nt, Homo Sapiens
gaccaucagguggaagaaguauucuucagaga

SEQ ID NO: 387524 - RNA, 32 nt, Homo Sapiens
uucugggguccccagggcugucaucugaauuu

SEQ ID NO: 387525 - RNA, 32 nt, Homo Sapiens
cgaguagcugggacuacaggggcccgccacca

SEQ ID NO: 387526 - RNA, 32 nt, Homo Sapiens
gugagguggccauauccaccacaucgcauuuc

SEQ ID NO: 387527 - RNA, 32 nt, Homo Sapiens
uuuguucuuagucuaucucuuguacaaacgau

SEQ ID NO: 387528 - RNA, 32 nt, Homo Sapiens
guaucauccaacacaucuugguucggccacuc

SEQ ID NO: 387529 - RNA, 32 nt, Homo Sapiens
auaacuguuuuaaaugaaaguuuuaguaaaaa

SEQ ID NO: 387530 - RNA, 32 nt, Homo Sapiens
agagauuggagaacaaggagcugcugggucuc

SEQ ID NO: 387531 - RNA, 32 nt, Homo Sapiens
aggcauuuuacuccgcgcgucuuccuuacagc

SEQ ID NO: 387532 - RNA, 32 nt, Homo Sapiens
caaauggcugcugucuuccucuaguacuuagu

SEQ ID NO: 387533 - RNA, 32 nt, Homo Sapiens
ugugcgagccguggaccccggccaggaaccac

SEQ ID NO: 387534 - RNA, 32 nt, Homo Sapiens
ggugcucccaccacacacccagcccugcccug

SEQ ID NO: 387535 - RNA, 32 nt, Homo Sapiens
cgguugaucggucauuggggugcugcagcccc

SEQ ID NO: 387536 - RNA, 32 nt, Homo Sapiens
gagggucugggcggcgggcggcugggucugug

SEQ ID NO: 387537 - RNA, 32 nt, Homo Sapiens
cacaaauaaaauggauuuauuagaauuucaua

SEQ ID NO: 387538 - RNA, 28 nt, Homo Sapiens
ggcuucugagagucacauuugagacugu

SEQ ID NO: 387539 - RNA, 32 nt, Homo Sapiens
acccaacacacuuuuccaccugggagccugug

SEQ ID NO: 387540 - RNA, 32 nt, Homo Sapiens
ccaggugcucagucccuggugcacugaagcuc

SEQ ID NO: 387541 - RNA, 32 nt, Homo Sapiens
ccuuuuugauugcugcagaaauguccuaugca

SEQ ID NO: 387542 - RNA, 32 nt, Homo Sapiens
uaugaacuuccacugaaguucuucacaaacug

SEQ ID NO: 387543 - RNA, 25 nt, Homo Sapiens
auguggccccaaccccaccucccuc

SEQ ID NO: 387544 - RNA, 32 nt, Homo Sapiens
guuuugugagagaaauaaaauauuuuguucuc

SEQ ID NO: 387545 - RNA, 32 nt, Homo Sapiens
aacaaaagcccauaaaguuggagauagggacc

SEQ ID NO: 387546 - RNA, 32 nt, Homo Sapiens
aagggaggagcaugaagaguuguauguuuuug

SEQ ID NO: 387547 - RNA, 32 nt, Homo Sapiens
ccugcccccaccugguggucuuucucuacugg

SEQ ID NO: 387548 - RNA, 32 nt, Homo Sapiens
uguggagaugaccccucccugugccggcuggu

SEQ ID NO: 387549 - RNA, 32 nt, Homo Sapiens
aucucuuugcaccuccauuuguucaucuguga

SEQ ID NO: 387550 - RNA, 32 nt, Homo Sapiens
cugcuguugauacugaucucaaugcaccaagg

SEQ ID NO: 387551 - RNA, 32 nt, Homo Sapiens
cugaucgggacauggagugucugucucaguac

SEQ ID NO: 387552 - RNA, 32 nt, Homo Sapiens
ccuuccacagggucugucgggcagcuuaccuu

SEQ ID NO: 387553 - RNA, 32 nt, Homo Sapiens
ggcagacggccccgaucccgccagaacggccu

SEQ ID NO: 387554 - RNA, 32 nt, Homo Sapiens
guaacuucagaagcagaaaaacggaggauuaa

SEQ ID NO: 387555 - RNA, 32 nt, Homo Sapiens
cagugccucuaggaggguuugggauaggaagc

SEQ ID NO: 387556 - RNA, 32 nt, Homo Sapiens
ggcugggguccgugaagcccaggccaggcagc

SEQ ID NO: 387557 - RNA, 32 nt, Homo Sapiens
ccaggcugcggggacgggaggggacguggggg

SEQ ID NO: 387558 - RNA, 32 nt, Homo Sapiens
uaaacucuuugcuucugcuaagaagcagucua

SEQ ID NO: 387559 - RNA, 30 nt, Homo Sapiens
gcccccgauaucccuuccuguuucucucau

SEQ ID NO: 387560 - RNA, 32 nt, Homo Sapiens
uccauaagaaugccuggacuaugggucccgag

SEQ ID NO: 387561 - RNA, 32 nt, Homo Sapiens
gauacaccaagaagcuggaauuucuugcacac

SEQ ID NO: 387562 - RNA, 32 nt, Homo Sapiens
acaagcuuggcuucuucaaacgccacuacaag

SEQ ID NO: 387563 - RNA, 32 nt, Homo Sapiens
gagcuguguuugcaucacugcacuccagccug

SEQ ID NO: 387564 - RNA, 32 nt, Homo Sapiens
cuuucauuuuuccagauggcuucagaaguagg

SEQ ID NO: 387565 - RNA, 30 nt, Homo Sapiens
gaggaggagcccgugccgggcgggcccgag

SEQ ID NO: 387566 - RNA, 32 nt, Homo Sapiens
aauucuguaguuacuucuuuuauucuuucagg

SEQ ID NO: 387567 - RNA, 32 nt, Homo Sapiens
aagaagucaaggaaauguugcuuucuguacuc

SEQ ID NO: 387568 - RNA, 32 nt, Homo Sapiens
agaagugggggacagggcccaucuaccagccu

SEQ ID NO: 387569 - RNA, 32 nt, Homo Sapiens
ucaucaucuugcugagucaucaucaucaucau

SEQ ID NO: 387570 - RNA, 32 nt, Homo Sapiens
auauagguagauuugcaggaguuuuauuucau

SEQ ID NO: 387571 - RNA, 32 nt, Homo Sapiens
ugcagauuaauauauaagcuacacaugaugua

SEQ ID NO: 387572 - RNA, 32 nt, Homo Sapiens
agcaucagaacugguaugugauugauggauuu

SEQ ID NO: 387573 - RNA, 32 nt, Homo Sapiens
aacuacuuucccuuaauuuguauauuucuaau

SEQ ID NO: 387574 - RNA, 32 nt, Homo Sapiens
ugucucuuuguaucuucaguaauugaguuaua

SEQ ID NO: 387575 - RNA, 32 nt, Homo Sapiens
cugggaaggaggaggaggacccugcaccucag

SEQ ID NO: 387576 - RNA, 32 nt, Homo Sapiens
gcacuguacagugaaugugucuguaguugugu

SEQ ID NO: 387577 - RNA, 32 nt, Homo Sapiens
uuuuuugcaaauggaaacaucaacagacuaua

SEQ ID NO: 387578 - RNA, 32 nt, Homo Sapiens
ggcagcucuguuugaauggggugaaaaacagc

SEQ ID NO: 387579 - RNA, 32 nt, Homo Sapiens
ggaugggagacgggcggcugggcgcacaagga

SEQ ID NO: 387580 - RNA, 32 nt, Homo Sapiens
uauggagagauggucagaaauauccuguacau

SEQ ID NO: 387581 - RNA, 32 nt, Homo Sapiens
gauuucucaaagacauaaaagcacauagcauu

SEQ ID NO: 387582 - RNA, 32 nt, Homo Sapiens
agccgugggaggcccaccaagcccuuaaauuc

SEQ ID NO: 387583 - RNA, 32 nt, Homo Sapiens
gcaguguuuuucagcagacggcugaugggaca

SEQ ID NO: 387584 - RNA, 30 nt, Homo Sapiens
aguauuugggauggcaugccaaaaccugua

SEQ ID NO: 387585 - RNA, 31 nt, Homo Sapiens
gggcggggggcgguggaggccgugcagggag

SEQ ID NO: 387586 - RNA, 32 nt, Homo Sapiens
auggcagggagguggcucccucggaguaaccc

SEQ ID NO: 387587 - RNA, 32 nt, Homo Sapiens
caggcccuggcucugcccuucccuggggggug

SEQ ID NO: 387588 - RNA, 32 nt, Homo Sapiens
agacuggaccucugugccaagcaguaucccug

SEQ ID NO: 387589 - RNA, 32 nt, Homo Sapiens
gccuucagcaccagcucuguccugggucgaug

SEQ ID NO: 387590 - RNA, 32 nt, Homo Sapiens
auauucacauaaaaucagcauucauugacaca

SEQ ID NO: 387591 - RNA, 32 nt, Homo Sapiens
aagguaugaagcuagaagguggucaauauaau

SEQ ID NO: 387592 - RNA, 32 nt, Homo Sapiens
aaaaaacgaaacagugauaucaccauucauuu

SEQ ID NO: 387593 - RNA, 32 nt, Homo Sapiens
caugagcccuccccuccacccccugaagccac

SEQ ID NO: 387594 - RNA, 32 nt, Homo Sapiens
aagagaagguguaagguuuuuaucuuauaugc

SEQ ID NO: 387595 - RNA, 32 nt, Homo Sapiens
aaacuuauuagcuacaguaauuugggguuucc

SEQ ID NO: 387596 - RNA, 32 nt, Homo Sapiens
aggccccaccucuggggguuggagggacccug

SEQ ID NO: 387597 - RNA, 32 nt, Homo Sapiens
auccaauccccucccaucuuaucagggguaug

SEQ ID NO: 387598 - RNA, 32 nt, Homo Sapiens
cuggggccacagcuccuaccccugcccagcag

SEQ ID NO: 387599 - RNA, 32 nt, Homo Sapiens
cauaaauaaaacuacaugcaccaucaaaaaaa

SEQ ID NO: 387600 - RNA, 32 nt, Homo Sapiens
ucuacuaaaaauacaaaaauuagucgggcgug

SEQ ID NO: 387601 - RNA, 32 nt, Homo Sapiens
ucuacuaaaaauacaaaaauuggucgggcaug

SEQ ID NO: 387602 - RNA, 32 nt, Homo Sapiens
ccucgauaacagucagcuagacacacucagga

SEQ ID NO: 387603 - RNA, 30 nt, Homo Sapiens
gauuuucugcuaaugggaaaaauugacuaa

SEQ ID NO: 387604 - RNA, 32 nt, Homo Sapiens
cccaaucugagucuuaucguuguacugauaga

SEQ ID NO: 387605 - RNA, 32 nt, Homo Sapiens
ugaguggcacugggcugagacuggccaguuug

SEQ ID NO: 387606 - RNA, 32 nt, Homo Sapiens
aguccuuacugaucaauaaucaccuugaaugu

SEQ ID NO: 387607 - RNA, 32 nt, Homo Sapiens
gccuguggccccagccacucugaacgcugaga

SEQ ID NO: 387608 - RNA, 32 nt, Homo Sapiens
ggacucccauuuccaguauuaaagagagaauc

SEQ ID NO: 387609 - RNA, 32 nt, Homo Sapiens
gaugauuuaacauuaccaaaugccuuucuagc

SEQ ID NO: 387610 - RNA, 32 nt, Homo Sapiens
uugucaauuccacccugugcccgccccugccu

SEQ ID NO: 387611 - RNA, 32 nt, Homo Sapiens
gugggcgcggcgcaggcggcccgggucaccau

SEQ ID NO: 387612 - RNA, 32 nt, Homo Sapiens
uuugguucuuguccucaccaucacagcuguua

SEQ ID NO: 387613 - RNA, 32 nt, Homo Sapiens
acacuaaagauaaguucaacaaccaucacauu

SEQ ID NO: 387614 - RNA, 32 nt, Homo Sapiens
cacugcuggugcccuucucuucugaccugcug

SEQ ID NO: 387615 - RNA, 32 nt, Homo Sapiens
agcauucagaucuuucuagucaccuuagaacu

SEQ ID NO: 387616 - RNA, 25 nt, Homo Sapiens
gcagccugguuugacagcgaagcca

SEQ ID NO: 387617 - RNA, 32 nt, Homo Sapiens
gccgcgcugcgcaccgccgccgaccaugagcg

SEQ ID NO: 387618 - RNA, 32 nt, Homo Sapiens
uauuuaaggggaggggaugucucaccgggcug

SEQ ID NO: 387619 - RNA, 32 nt, Homo Sapiens
gggucuuugauaaagaaaagaaucccuguuca

SEQ ID NO: 387620 - RNA, 32 nt, Homo Sapiens
aggagacgcucgccguccccugacccccagcu

SEQ ID NO: 387621 - RNA, 32 nt, Homo Sapiens
uucccaaucccagaggccccggcggccugugc

SEQ ID NO: 387622 - RNA, 32 nt, Homo Sapiens
aaucaaaugcccuaggaugcuuccauccuggu

SEQ ID NO: 387623 - RNA, 32 nt, Homo Sapiens
ggguguugcauccugggcgccacaugcucaug

SEQ ID NO: 387624 - RNA, 32 nt, Homo Sapiens
gccaacaucuuuaugugucauguguuaugaac

SEQ ID NO: 387625 - RNA, 31 nt, Homo Sapiens
aauugucauaugugacugccccgugcucuga

SEQ ID NO: 387626 - RNA, 32 nt, Homo Sapiens
aacaauccgcuuggacacgaacaaagccacac

SEQ ID NO: 387627 - RNA, 32 nt, Homo Sapiens
augggccugacaccucuuucucauucauucuc

SEQ ID NO: 387628 - RNA, 32 nt, Homo Sapiens
gauacugaacucagaucugagacgccacccag

SEQ ID NO: 387629 - RNA, 32 nt, Homo Sapiens
aauuuucgcaaccuacucaucugacaaagggc

SEQ ID NO: 387630 - RNA, 29 nt, Homo Sapiens
gcccauggaccugcccgagggcccggugg

SEQ ID NO: 387631 - RNA, 32 nt, Homo Sapiens
cgcgaggagccgggcgcuuagaacagaggcuu

SEQ ID NO: 387632 - RNA, 32 nt, Homo Sapiens
ucuuccagacacucucuguuucugcuggaugg

SEQ ID NO: 387633 - RNA, 32 nt, Homo Sapiens
uggucccccgacccuaggagucgggcagggca

SEQ ID NO: 387634 - RNA, 32 nt, Homo Sapiens
ggaagauaguuuucuccuuuuacuucacuuca

SEQ ID NO: 387635 - RNA, 32 nt, Homo Sapiens
cuggaaguucccuuuagauuucacauuuuaua

SEQ ID NO: 387636 - RNA, 32 nt, Homo Sapiens
ugaucucuuuuuuuuucuuuuugccuaucugc

SEQ ID NO: 387637 - RNA, 31 nt, Homo Sapiens
uuagugcaugugugaguuucaguguguaugu

SEQ ID NO: 387638 - RNA, 32 nt, Homo Sapiens
ucacuuugaucaauguuuguagauuugaaggu

SEQ ID NO: 387639 - RNA, 32 nt, Homo Sapiens
uaaacuuugucaacgcacuuggaguaauuuuu

SEQ ID NO: 387640 - RNA, 32 nt, Homo Sapiens
ccacgagaacaaagaggagcgguugcucucug

SEQ ID NO: 387641 - RNA, 32 nt, Homo Sapiens
auuagccaggcgugacggugcgugccuguagu

SEQ ID NO: 387642 - RNA, 32 nt, Homo Sapiens
ucaagcagccccuguccccagcccguccaccc

SEQ ID NO: 387643 - RNA, 32 nt, Homo Sapiens
cuccugcccuccccccaacgccccaccucccc

SEQ ID NO: 387644 - RNA, 32 nt, Homo Sapiens
ccccccagagggaaugauauuuuugcuugcug

SEQ ID NO: 387645 - RNA, 32 nt, Homo Sapiens
guuccuuuuuaaaugugaauuuuuauuucuuu

SEQ ID NO: 387646 - RNA, 31 nt, Homo Sapiens
ggagccaagcucaccaccuuuggguaccuag

SEQ ID NO: 387647 - RNA, 32 nt, Homo Sapiens
agcaaagagaauauggcaaauauuuguauauu

SEQ ID NO: 387648 - RNA, 32 nt, Homo Sapiens
ccugcuggggaagccuagguguccuugagcug

SEQ ID NO: 387649 - RNA, 32 nt, Homo Sapiens
gcugauuauuagaaaugcuaccuggggauuuu

SEQ ID NO: 387650 - RNA, 32 nt, Homo Sapiens
cacucaucuuauagcuuucuuuccccagaucc

SEQ ID NO: 387651 - RNA, 32 nt, Homo Sapiens
uuugguaugaguuuugauagcucuauaaaaug

SEQ ID NO: 387652 - RNA, 32 nt, Homo Sapiens
agccaacuuguuaaaccucuucacggcugaga

SEQ ID NO: 387653 - RNA, 32 nt, Homo Sapiens
uugaaaggcaccauaggagugccaaguauuau

SEQ ID NO: 387654 - RNA, 32 nt, Homo Sapiens
cuccucccgacgucuccuaccuccucacggcu

SEQ ID NO: 387655 - RNA, 26 nt, Homo Sapiens
aaaauaaugcaaaaaaaaaaaaaaaa

SEQ ID NO: 387656 - RNA, 32 nt, Homo Sapiens
cuucaggacaguaagcagaacaaucagaaugg

SEQ ID NO: 387657 - RNA, 32 nt, Homo Sapiens
gcagaguaagugccgccucugcgcuccgacgg

SEQ ID NO: 387658 - RNA, 32 nt, Homo Sapiens
ccagggccccagccacgugucucaggggcucc

SEQ ID NO: 387659 - RNA, 32 nt, Homo Sapiens
uccggcuccccucccaggcugcagacucugac

SEQ ID NO: 387660 - RNA, 32 nt, Homo Sapiens
gcuggacucuuuuggccaguuuauugaauuau

SEQ ID NO: 387661 - RNA, 32 nt, Homo Sapiens
uagagccggagcggcccgcggagcugcggagg

SEQ ID NO: 387662 - RNA, 32 nt, Homo Sapiens
ggcccggcccccgccccgccccgccccagccc

SEQ ID NO: 387663 - RNA, 32 nt, Homo Sapiens
ucuaaggacuuccaggcacugaauccuaugaa

SEQ ID NO: 387664 - RNA, 32 nt, Homo Sapiens
gcucccuggacggcugccuuggcguuuucaac

SEQ ID NO: 387665 - RNA, 29 nt, Homo Sapiens
uauugcauuuauauguaccguaggcuuug

SEQ ID NO: 387666 - RNA, 32 nt, Homo Sapiens
ucugugccgccccguccacaccuguucuuggg

SEQ ID NO: 387667 - RNA, 32 nt, Homo Sapiens
cuccagcacuuugggcccugggcccccagagg

SEQ ID NO: 387668 - RNA, 32 nt, Homo Sapiens
acuccucagugugaccucccaggccucuuccc

SEQ ID NO: 387669 - RNA, 32 nt, Homo Sapiens
ccaugugaggcaggcccgggcugggggcccgg

SEQ ID NO: 387670 - RNA, 32 nt, Homo Sapiens
agauccugcagcgcaaggacaccuggaccccc

SEQ ID NO: 387671 - RNA, 32 nt, Homo Sapiens
aaccuacauucucgauuuuucuuaagccaaaa

SEQ ID NO: 387672 - RNA, 32 nt, Homo Sapiens
ugcaacuuuucucagagauugcaaaggauuuu

SEQ ID NO: 387673 - RNA, 32 nt, Homo Sapiens
agaaggcucccucccucacuaggccccuggcu

SEQ ID NO: 387674 - RNA, 32 nt, Homo Sapiens
aucucuggccacacuuuuccugagcuacaugc

SEQ ID NO: 387675 - RNA, 32 nt, Homo Sapiens
auuauaagaagaagggcagauaauauaugaau

SEQ ID NO: 387676 - RNA, 32 nt, Homo Sapiens
uuuccagcauuccccacagcacugccggccag

SEQ ID NO: 387677 - RNA, 32 nt, Homo Sapiens
cacugugucccucccccugcccccgcagucag

SEQ ID NO: 387678 - RNA, 32 nt, Homo Sapiens
ccaaucuccagucccaggaucccccagggcag

SEQ ID NO: 387679 - RNA, 32 nt, Homo Sapiens
uguuuuuagcaagaaaucagucuuaaaaucua

SEQ ID NO: 387680 - RNA, 32 nt, Homo Sapiens
uucgcuaagugcucuuccuguuuccaaaaaaa

SEQ ID NO: 387681 - RNA, 32 nt, Homo Sapiens
acaaggagaguuuuugugugugcgagaucucu

SEQ ID NO: 387682 - RNA, 32 nt, Homo Sapiens
gcagcugccaauggagcccuccugagacaccg

SEQ ID NO: 387683 - RNA, 32 nt, Homo Sapiens
gggguauggaugauggggggaagggcggucgc

SEQ ID NO: 387684 - RNA, 32 nt, Homo Sapiens
gaccugcccgucuccgccgccggcggcccuuc

SEQ ID NO: 387685 - RNA, 32 nt, Homo Sapiens
ugagagagagugugggggccccaggcagggca

SEQ ID NO: 387686 - RNA, 32 nt, Homo Sapiens
aggugcagcuggaggccuguguggggaccaca

SEQ ID NO: 387687 - RNA, 32 nt, Homo Sapiens
ucucugaauuguucccucccccgcaauguggg

SEQ ID NO: 387688 - RNA, 32 nt, Homo Sapiens
cacuccccacccacaccgcacacuggccccag

SEQ ID NO: 387689 - RNA, 32 nt, Homo Sapiens
cagcuccuuggaccccaccucccaugcucuca

SEQ ID NO: 387690 - RNA, 28 nt, Homo Sapiens
gacaugcugcugcugcugcugcugcugc

SEQ ID NO: 387691 - RNA, 32 nt, Homo Sapiens
cauaugaaaaauacagaaagaauuauuugaau

SEQ ID NO: 387692 - RNA, 32 nt, Homo Sapiens
uuuaucucaugguaucucugguagcaccugaa

SEQ ID NO: 387693 - RNA, 32 nt, Homo Sapiens
ucuuuaaguauuuuagacauuccucgucagua

SEQ ID NO: 387694 - RNA, 32 nt, Homo Sapiens
aaccaaagucaaaaugacucgaauugcuaugg

SEQ ID NO: 387695 - RNA, 32 nt, Homo Sapiens
aguaaguacagcauuagaaggugauuagagag

SEQ ID NO: 387696 - RNA, 32 nt, Homo Sapiens
gaaacagccgauugaagugcuguguugaaaag

SEQ ID NO: 387697 - RNA, 32 nt, Homo Sapiens
ucugcacguugcugaagguccaggcuugccuc

SEQ ID NO: 387698 - RNA, 32 nt, Homo Sapiens
auacaugcacgugcacacacauacacacacau

SEQ ID NO: 387699 - RNA, 32 nt, Homo Sapiens
cagcgcccccgccaccuguccccucccccucc

SEQ ID NO: 387700 - RNA, 32 nt, Homo Sapiens
cucucaaggucaugacuacagugugguuuggg

SEQ ID NO: 387701 - RNA, 32 nt, Homo Sapiens
ggugauaggcacauuuuuuaccagucuaucau

SEQ ID NO: 387702 - RNA, 32 nt, Homo Sapiens
caacagauauuguggcaaaucacacauaggaa

SEQ ID NO: 387703 - RNA, 32 nt, Homo Sapiens
gcgccgcccccgagacacccgaggaguccguu

SEQ ID NO: 387704 - RNA, 32 nt, Homo Sapiens
ucguucccaagcaaaagaaucagucaagaauc

SEQ ID NO: 387705 - RNA, 32 nt, Homo Sapiens
ucccaacccagcuggaggccuggucucuccuu

SEQ ID NO: 387706 - RNA, 32 nt, Homo Sapiens
ucagaaaaacaaacaaacaaacaguuuuucca

SEQ ID NO: 387707 - RNA, 32 nt, Homo Sapiens
uuugcuuugcagaggagggaacugcuccuucg

SEQ ID NO: 387708 - RNA, 32 nt, Homo Sapiens
caaauauauaaaauuuuaacuuaacguacaua

SEQ ID NO: 387709 - RNA, 32 nt, Homo Sapiens
acuacaauuaauuauagaacuucuucauuuac

SEQ ID NO: 387710 - RNA, 32 nt, Homo Sapiens
gcaacgagggcuugcucuaaaucguuuagagg

SEQ ID NO: 387711 - RNA, 32 nt, Homo Sapiens
gggugaagaggaacugcugaaugagcgggcgu

SEQ ID NO: 387712 - RNA, 32 nt, Homo Sapiens
auuugaaccagauaucucuggguagcuacaaa

SEQ ID NO: 387713 - RNA, 32 nt, Homo Sapiens
ggacggugaaacaaugauacuucuuuuuaucu

SEQ ID NO: 387714 - RNA, 32 nt, Homo Sapiens
cccaacacugucagcaaaaaccuuaggagaaa

SEQ ID NO: 387715 - RNA, 32 nt, Homo Sapiens
ccacuuccuggccagggcucucauucuggacc

SEQ ID NO: 387716 - RNA, 32 nt, Homo Sapiens
cuauccaacacagaaacugaacaaaaugagau

SEQ ID NO: 387717 - RNA, 32 nt, Homo Sapiens
gaugcauucauauaacaaacacugcugggugu

SEQ ID NO: 387718 - RNA, 32 nt, Homo Sapiens
auuuucaguugauguagaacuuuacaaaaucu

SEQ ID NO: 387719 - RNA, 32 nt, Homo Sapiens
ccuagaucaauggagugguccaaacuuggucu

SEQ ID NO: 387720 - RNA, 32 nt, Homo Sapiens
uuggcauuaauuuugaucuuuaaaaaauauug

SEQ ID NO: 387721 - RNA, 32 nt, Homo Sapiens
cuaccauagaaaguagccaaaaaauacauauc

SEQ ID NO: 387722 - RNA, 32 nt, Homo Sapiens
cuucuccgcguacugcugcagccgcuccuccu

SEQ ID NO: 387723 - RNA, 32 nt, Homo Sapiens
auugcuguccugugguuucauuagucugauag

SEQ ID NO: 387724 - RNA, 32 nt, Homo Sapiens
gaauguccaguugaauuggagaguugaugaca

SEQ ID NO: 387725 - RNA, 32 nt, Homo Sapiens
ucuuaguucgggcuucucuaacaccguaccau

SEQ ID NO: 387726 - RNA, 32 nt, Homo Sapiens
uaccuguuuggaugcuucugaauagaaauaaa

SEQ ID NO: 387727 - RNA, 32 nt, Homo Sapiens
caacuucguaagauuauugaggaugugauuau

SEQ ID NO: 387728 - RNA, 32 nt, Homo Sapiens
uuucauuacuucauuaucugaauccccccaga

SEQ ID NO: 387729 - RNA, 32 nt, Homo Sapiens
agcuagaauuguagaacuaggcucaucagaau

SEQ ID NO: 387730 - RNA, 32 nt, Homo Sapiens
aggggagcggcuuccggugcugccugcgucau

SEQ ID NO: 387731 - RNA, 32 nt, Homo Sapiens
caggcuuaaggaggcuucgggcuccugggauu

SEQ ID NO: 387732 - RNA, 32 nt, Homo Sapiens
aagaaaaagagcuuugagucuguaggggcagc

SEQ ID NO: 387733 - RNA, 32 nt, Homo Sapiens
gggcagaaagauaaaaagauuacaucagucau

SEQ ID NO: 387734 - RNA, 32 nt, Homo Sapiens
aaggguguaaaaacauuuuugagauaagguuu

SEQ ID NO: 387735 - RNA, 32 nt, Homo Sapiens
gguugggauuaccauuuacugaccacaucugu

SEQ ID NO: 387736 - RNA, 32 nt, Homo Sapiens
gggagcccaagcaguguguaggcagcaaagac

SEQ ID NO: 387737 - RNA, 32 nt, Homo Sapiens
ccaaauuucugcauucgagucuuaaccauauu

SEQ ID NO: 387738 - RNA, 32 nt, Homo Sapiens
gagguuggacuuguugaaauaauccugauaca

SEQ ID NO: 387739 - RNA, 32 nt, Homo Sapiens
gacucaaggaggaggagagagauuccgcgagc

SEQ ID NO: 387740 - RNA, 32 nt, Homo Sapiens
uccguggcucuguuggugcccagcgugcgggg

SEQ ID NO: 387741 - RNA, 32 nt, Homo Sapiens
cuaucuagaauacaggucuuccagucagcugg

SEQ ID NO: 387742 - RNA, 32 nt, Homo Sapiens
ggagguauaaaccaguggaguuuaucauugaa

SEQ ID NO: 387743 - RNA, 32 nt, Homo Sapiens
uuucaauaaaguucuauguuaaaauuggaaaa

SEQ ID NO: 387744 - RNA, 32 nt, Homo Sapiens
ugcucccggugugaccgcguccuucccuggcc

SEQ ID NO: 387745 - RNA, 32 nt, Homo Sapiens
ccuugaaggaucauuuucacuuuugcucagaa

SEQ ID NO: 387746 - RNA, 32 nt, Homo Sapiens
gucugcgauucggaagccggccugggggucgc

SEQ ID NO: 387747 - RNA, 32 nt, Homo Sapiens
gggagcgcucugagggcaaggcugugucuccg

SEQ ID NO: 387748 - RNA, 32 nt, Homo Sapiens
ccccagucaggagcaaugacugacuggcugca

SEQ ID NO: 387749 - RNA, 32 nt, Homo Sapiens
caucaagccuaaauacugaacaauaugaagau

SEQ ID NO: 387750 - RNA, 32 nt, Homo Sapiens
aggagaugccaaguggggccagggccaagucu

SEQ ID NO: 387751 - RNA, 32 nt, Homo Sapiens
acuauaaucaggcuucauuauuacuuuucaaa

SEQ ID NO: 387752 - RNA, 32 nt, Homo Sapiens
gaagcccuuggaagccagcagggccuugccag

SEQ ID NO: 387753 - RNA, 32 nt, Homo Sapiens
ccugaagauggagcggaauacgcacuccagau

SEQ ID NO: 387754 - RNA, 32 nt, Homo Sapiens
cuccgcgucugcgccgccgccggaguccacuc

SEQ ID NO: 387755 - RNA, 32 nt, Homo Sapiens
aauaaugugaaugauaauaaaacagcuuugac

SEQ ID NO: 387756 - RNA, 32 nt, Homo Sapiens
uaauaucuuugggucuuacuauuuuuacccau

SEQ ID NO: 387757 - RNA, 32 nt, Homo Sapiens
uuggaugccugccuuaugaaagauccagcugu

SEQ ID NO: 387758 - RNA, 32 nt, Homo Sapiens
ccugccucuucccucgcccaccugccugcccc

SEQ ID NO: 387759 - RNA, 32 nt, Homo Sapiens
accucuguccgcaugccuggggccuucgcccc

SEQ ID NO: 387760 - RNA, 32 nt, Homo Sapiens
agauacagagcacugcagcaaaaaagagaggg

SEQ ID NO: 387761 - RNA, 32 nt, Homo Sapiens
uggaauaaaaauuucuauaaauuauuguaacu

SEQ ID NO: 387762 - RNA, 32 nt, Homo Sapiens
caacagcauuugagcaaguuuuuaucagcaag

SEQ ID NO: 387763 - RNA, 32 nt, Homo Sapiens
ccgacggcccgcugcuggccuccgugacgcgg

SEQ ID NO: 387764 - RNA, 32 nt, Homo Sapiens
gcugcagguucuccgagguaggugcagggaau

SEQ ID NO: 387765 - RNA, 32 nt, Homo Sapiens
aaaauauauuuauaaggaaauuuuacaagggc

SEQ ID NO: 387766 - RNA, 32 nt, Homo Sapiens
uguugggaguaaaggagcauuuuuacaccccu

SEQ ID NO: 387767 - RNA, 31 nt, Homo Sapiens
ccccggccuucgaguaccgcucggggcggcc

SEQ ID NO: 387768 - RNA, 32 nt, Homo Sapiens
cucggacccugcagcucugugucccaggccac

SEQ ID NO: 387769 - RNA, 32 nt, Homo Sapiens
aucccuggagccggcccucccugcaggacugc

SEQ ID NO: 387770 - RNA, 32 nt, Homo Sapiens
acucucauucuucuccuuccugccaccaugug

SEQ ID NO: 387771 - RNA, 32 nt, Homo Sapiens
ggggcugaccgcggccggacggcgccccagca

SEQ ID NO: 387772 - RNA, 32 nt, Homo Sapiens
cucaacugcugccccaggcaccagccccaguc

SEQ ID NO: 387773 - RNA, 32 nt, Homo Sapiens
uuuuugacaagacuuaaaaccugucuuggaua

SEQ ID NO: 387774 - RNA, 32 nt, Homo Sapiens
aagugaaucuggaaagaggagaaggacaugaa

SEQ ID NO: 387775 - RNA, 32 nt, Homo Sapiens
ggguucuugaguuguuuuggaguaauauccca

SEQ ID NO: 387776 - RNA, 32 nt, Homo Sapiens
cagcgcuggugccagccuucuccccagugaga

SEQ ID NO: 387777 - RNA, 32 nt, Homo Sapiens
cucgaggcaggagucggcucuccggagccucg

SEQ ID NO: 387778 - RNA, 32 nt, Homo Sapiens
uuggcuggguugaagguuccaagcugcucucc

SEQ ID NO: 387779 - RNA, 29 nt, Homo Sapiens
guuagugaaaguuuuagaggcaaaugccu

SEQ ID NO: 387780 - RNA, 32 nt, Homo Sapiens
aucaaaggucauuuguguagaugaguaauuaa

SEQ ID NO: 387781 - RNA, 29 nt, Homo Sapiens
acucggccgguccgggcauggcagaccca

SEQ ID NO: 387782 - RNA, 32 nt, Homo Sapiens
ugcagggagagcaaagcagagaacagaggagg

SEQ ID NO: 387783 - RNA, 32 nt, Homo Sapiens
uguuaggaauaaaaagucauaaacuauuccca

SEQ ID NO: 387784 - RNA, 32 nt, Homo Sapiens
gcgccgcucccucaugcugcccgggcccuucc

SEQ ID NO: 387785 - RNA, 32 nt, Homo Sapiens
uaugaauacaguaaaaucauggaucccagcua

SEQ ID NO: 387786 - RNA, 32 nt, Homo Sapiens
ccaccgcgcgcccgccucagccguucagcccu

SEQ ID NO: 387787 - RNA, 32 nt, Homo Sapiens
uugccccgcuccuccaccaucuaggcccugcu

SEQ ID NO: 387788 - RNA, 32 nt, Homo Sapiens
ugcuaugaggauuaaauaaacagguucaugau

SEQ ID NO: 387789 - RNA, 32 nt, Homo Sapiens
gaaaauguaugaauucuucaacugucuuacaa

SEQ ID NO: 387790 - RNA, 32 nt, Homo Sapiens
uacguacuacuuguuucaaaugugucaaauac

SEQ ID NO: 387791 - RNA, 32 nt, Homo Sapiens
aaacggggaggggaaagaagggcuucugccau

SEQ ID NO: 387792 - RNA, 32 nt, Homo Sapiens
cccuuuauuucauuaaaugauuuuuucuggug

SEQ ID NO: 387793 - RNA, 32 nt, Homo Sapiens
ucgacugucuagaaaggaggcuaaauccuuag

SEQ ID NO: 387794 - RNA, 32 nt, Homo Sapiens
uguacggcagugccaucugguggcaaguggua

SEQ ID NO: 387795 - RNA, 32 nt, Homo Sapiens
guccuuagcucuuuuuaauuacaauuuuuagu

SEQ ID NO: 387796 - RNA, 32 nt, Homo Sapiens
ggagccugacuccgcugggagagugcaggagc

SEQ ID NO: 387797 - RNA, 32 nt, Homo Sapiens
uuuaucacugccaucccacuucugggauggga

SEQ ID NO: 387798 - RNA, 32 nt, Homo Sapiens
gagugguuuguagaauuuguguucauaaguuc

SEQ ID NO: 387799 - RNA, 32 nt, Homo Sapiens
ccguugggcgugcagcggcgccagucggcgga

SEQ ID NO: 387800 - RNA, 32 nt, Homo Sapiens
ggaagcugcuggucugggugcugcuggccucc

SEQ ID NO: 387801 - RNA, 32 nt, Homo Sapiens
aggcggcggcggcgucagcaucagcggccucc

SEQ ID NO: 387802 - RNA, 32 nt, Homo Sapiens
ccuugcccaagcaaaugagaggcaggggcuuc

SEQ ID NO: 387803 - RNA, 32 nt, Homo Sapiens
guugagugcagguuacaaccuauauuguuaug

SEQ ID NO: 387804 - RNA, 32 nt, Homo Sapiens
gcggccuccgggggcgcacggcagcugcagcg

SEQ ID NO: 387805 - RNA, 32 nt, Homo Sapiens
auauaagcugggugugguggcucaugccugua

SEQ ID NO: 387806 - RNA, 32 nt, Homo Sapiens
gcgcgagccccuccuccacacccgagucccag

SEQ ID NO: 387807 - RNA, 32 nt, Homo Sapiens
cccaagggggagaggaaucgcgccggccccuu

SEQ ID NO: 387808 - RNA, 32 nt, Homo Sapiens
auuuacacauaaaagaaaaaggcaagccacuu

SEQ ID NO: 387809 - RNA, 32 nt, Homo Sapiens
gcuguuugcugcgcgggcuuuuggagggggcg

SEQ ID NO: 387810 - RNA, 32 nt, Homo Sapiens
acaaugagcucaaguguagggauugugucaaa

SEQ ID NO: 387811 - RNA, 32 nt, Homo Sapiens
gcuggaggguucagucggaagcagaagccggg

SEQ ID NO: 387812 - RNA, 28 nt, Homo Sapiens
acuuggguggcugagccgagguacucgg

SEQ ID NO: 387813 - RNA, 32 nt, Homo Sapiens
aucgcguaccuuccucaccccccucccuugcc

SEQ ID NO: 387814 - RNA, 32 nt, Homo Sapiens
cgggggcgcuguuuuuaacgugcccguuugua

SEQ ID NO: 387815 - RNA, 30 nt, Homo Sapiens
gaaggaugacuucugacugcuccuccacac

SEQ ID NO: 387816 - RNA, 32 nt, Homo Sapiens
uggacugcacagccccggggcuccacauugcu

SEQ ID NO: 387817 - RNA, 32 nt, Homo Sapiens
cucaaggaguauuuauuaauggcugcugucuc

SEQ ID NO: 387818 - RNA, 32 nt, Homo Sapiens
cauuggggaacaacugaagagauucuugacuc

SEQ ID NO: 387819 - RNA, 32 nt, Homo Sapiens
caucccuucagcaauauguauuugaguucaca

SEQ ID NO: 387820 - RNA, 32 nt, Homo Sapiens
cccaagcaaccucaaguucuggcuguuacuug

SEQ ID NO: 387821 - RNA, 32 nt, Homo Sapiens
ccgggcggcuuucccccuuguacuggagaagc

SEQ ID NO: 387822 - RNA, 32 nt, Homo Sapiens
auuaugugauccuugaggucucuuccacuuau

SEQ ID NO: 387823 - RNA, 32 nt, Homo Sapiens
uauuaaaauaccauaaaaaugaaauucagaca

SEQ ID NO: 387824 - RNA, 31 nt, Homo Sapiens
uguuguagacuaggcuccugaguuaagcagc

SEQ ID NO: 387825 - RNA, 32 nt, Homo Sapiens
gacccagcgugccucaccuggaucuaccauuc

SEQ ID NO: 387826 - RNA, 32 nt, Homo Sapiens
caguaccaaagucuuaugcaauauguauuuau

SEQ ID NO: 387827 - RNA, 32 nt, Homo Sapiens
gaacuauuuaguuuugauguccguuaugugau

SEQ ID NO: 387828 - RNA, 32 nt, Homo Sapiens
ugaccccacucugagagccuggccgagcuggc

SEQ ID NO: 387829 - RNA, 32 nt, Homo Sapiens
auguaccguggggcgggggcggcggcccgggc

SEQ ID NO: 387830 - RNA, 32 nt, Homo Sapiens
gacugcagccccagcgagcccuuccuuccuug

SEQ ID NO: 387831 - RNA, 32 nt, Homo Sapiens
cuaccuguuaaaccucuucccuuucugugugu

SEQ ID NO: 387832 - RNA, 32 nt, Homo Sapiens
acgcugccgccuaagagugcaaggcugcucag

SEQ ID NO: 387833 - RNA, 32 nt, Homo Sapiens
agcacuuccgagccccgaccccugcagcugug

SEQ ID NO: 387834 - RNA, 30 nt, Homo Sapiens
aggggggugcucgcgccgccgggagaggcg

SEQ ID NO: 387835 - RNA, 32 nt, Homo Sapiens
cuggccaaggaggcuccugggguggggaucac

SEQ ID NO: 387836 - RNA, 32 nt, Homo Sapiens
ggguagaugauuauugggaaucgcuuacagua

SEQ ID NO: 387837 - RNA, 32 nt, Homo Sapiens
ucugcucaccaagggaggggaccucugggagc

SEQ ID NO: 387838 - RNA, 32 nt, Homo Sapiens
gaaucuaaaaaauaaaccaaucccuaacacgu

SEQ ID NO: 387839 - RNA, 32 nt, Homo Sapiens
uucuagaugugaauuugcuauuuauuuuaaau

SEQ ID NO: 387840 - RNA, 32 nt, Homo Sapiens
auacugugagcuuacauugaaaacagauauua

SEQ ID NO: 387841 - RNA, 32 nt, Homo Sapiens
cacuguagcuugcuggauucaacgaugaucua

SEQ ID NO: 387842 - RNA, 32 nt, Homo Sapiens
ugccugcggccaccggccggcauucagagccc

SEQ ID NO: 387843 - RNA, 32 nt, Homo Sapiens
uaccuuugucucugauggaccauuuuccauuu

SEQ ID NO: 387844 - RNA, 32 nt, Homo Sapiens
cuacccuccucucacaucuccuccugcccaag

SEQ ID NO: 387845 - RNA, 32 nt, Homo Sapiens
uuucacuuuagguaucucuuaggcaaauagag

SEQ ID NO: 387846 - RNA, 32 nt, Homo Sapiens
gucuugcuuuuucagcuggguuucuaauugag

SEQ ID NO: 387847 - RNA, 31 nt, Homo Sapiens
cgccucacugcggccuccggaguccaaaacu

SEQ ID NO: 387848 - RNA, 29 nt, Homo Sapiens
gacacugcgggacagaggguggcuggagu

SEQ ID NO: 387849 - RNA, 32 nt, Homo Sapiens
cacuugagccugaguucaacacugcagugagc

SEQ ID NO: 387850 - RNA, 32 nt, Homo Sapiens
ucccaccgccccauuugagauacuaggagcca

SEQ ID NO: 387851 - RNA, 32 nt, Homo Sapiens
aguuauugaugcaauuugauauuuuuucauaa

SEQ ID NO: 387852 - RNA, 32 nt, Homo Sapiens
uggacgguggccugggugcgcugcuccugccc

SEQ ID NO: 387853 - RNA, 32 nt, Homo Sapiens
gcuaagugggagaaggcagagaacaaaggaug

SEQ ID NO: 387854 - RNA, 32 nt, Homo Sapiens
uggcaguggagggaggcugugcuguguguccc

SEQ ID NO: 387855 - RNA, 32 nt, Homo Sapiens
acucccucccugcuccuccacggcagguugca

SEQ ID NO: 387856 - RNA, 32 nt, Homo Sapiens
cggagggagccgccgccgcugcugcugccgcu

SEQ ID NO: 387857 - RNA, 32 nt, Homo Sapiens
uacuacuguuuguugguuuaagaguagcagau

SEQ ID NO: 387858 - RNA, 32 nt, Homo Sapiens
gcucucccgccagcgcccccuccucgcggcca

SEQ ID NO: 387859 - RNA, 32 nt, Homo Sapiens
ggugagggcaggugccccucagacacuucagg

SEQ ID NO: 387860 - RNA, 30 nt, Homo Sapiens
gucgcggccgcgcagccccauccagccccg

SEQ ID NO: 387861 - RNA, 32 nt, Homo Sapiens
gccaagaaagauacauaaucucaugggacuuc

SEQ ID NO: 387862 - RNA, 30 nt, Homo Sapiens
cuacaggagaagcucugggacuggggcagc

SEQ ID NO: 387863 - RNA, 32 nt, Homo Sapiens
aauuuuuuaauuuuuuuuuuuaauaggggugg

SEQ ID NO: 387864 - RNA, 32 nt, Homo Sapiens
gcagcugugggaagagccauguagggaggcua

SEQ ID NO: 387865 - RNA, 32 nt, Homo Sapiens
gcugcccagagccccaggaggcaaaucuauaa

SEQ ID NO: 387866 - RNA, 32 nt, Homo Sapiens
cugcuucccaucacccgcuaagagggagggag

SEQ ID NO: 387867 - RNA, 32 nt, Homo Sapiens
uguggauggucccaggucccagugcucuaguu

SEQ ID NO: 387868 - RNA, 32 nt, Homo Sapiens
aggccagaggucgggccagcugccccauucuu

SEQ ID NO: 387869 - RNA, 32 nt, Homo Sapiens
cuaggcacuuuggaauuugaccucacagaugu

SEQ ID NO: 387870 - RNA, 30 nt, Homo Sapiens
acggucuucggaagcggcggcggcgcgaug

SEQ ID NO: 387871 - RNA, 32 nt, Homo Sapiens
caacucucccccacaauggaccucagagcagu

SEQ ID NO: 387872 - RNA, 32 nt, Homo Sapiens
acagagacaaggaaacacugguaacucaagaa

SEQ ID NO: 387873 - RNA, 32 nt, Homo Sapiens
uaggcgaguaauuuaauuuuguugagucagau

SEQ ID NO: 387874 - RNA, 32 nt, Homo Sapiens
aagguuugauuccucagcagcaguguccaguc

SEQ ID NO: 387875 - RNA, 32 nt, Homo Sapiens
uuagucuuuuucuuuuuuugguaaauuuuuga

SEQ ID NO: 387876 - RNA, 32 nt, Homo Sapiens
accccucucccuccccgccagagaacuggagc

SEQ ID NO: 387877 - RNA, 32 nt, Homo Sapiens
gaaagggggcggaaaccucuccccuccaaaaa

SEQ ID NO: 387878 - RNA, 32 nt, Homo Sapiens
cacagcgucuccagggguuuuccuccuuuucg

SEQ ID NO: 387879 - RNA, 32 nt, Homo Sapiens
uaucagcacugacuuccuguuguggccacacu

SEQ ID NO: 387880 - RNA, 32 nt, Homo Sapiens
guuauucuuucugcaucuuguagaauucagcu

SEQ ID NO: 387881 - RNA, 32 nt, Homo Sapiens
gguagacgcaggcggcagaggugcuggaccac

SEQ ID NO: 387882 - RNA, 32 nt, Homo Sapiens
acaaagagaacuuagagguggagcaguuggau

SEQ ID NO: 387883 - RNA, 32 nt, Homo Sapiens
ucuuucuuucuuucuuuuuuuuuuaagauaga

SEQ ID NO: 387884 - RNA, 32 nt, Homo Sapiens
guugcucgcccggcccaagcgggagcuguugc

SEQ ID NO: 387885 - RNA, 32 nt, Homo Sapiens
gcauuuuuacuuucuguacaacaaaaaucuuu

SEQ ID NO: 387886 - RNA, 32 nt, Homo Sapiens
uuguauuguauauaaugugauuuuuacacaua

SEQ ID NO: 387887 - RNA, 32 nt, Homo Sapiens
ggaaaucugguuugcuugguaugccuucuugc

SEQ ID NO: 387888 - RNA, 32 nt, Homo Sapiens
ugggugugguggcgugugccuguaaugccagc

SEQ ID NO: 387889 - RNA, 32 nt, Homo Sapiens
caucaguuauuuauucuuguuuauucaaauga

SEQ ID NO: 387890 - RNA, 32 nt, Homo Sapiens
gaaccugugaaugcauucagaacaugauugga

SEQ ID NO: 387891 - RNA, 32 nt, Homo Sapiens
ugcccgcccgcacccagagccaccccccgcca

SEQ ID NO: 387892 - RNA, 32 nt, Homo Sapiens
uuuuauaauguacugaugugguucagagagau

SEQ ID NO: 387893 - RNA, 32 nt, Homo Sapiens
auuucaacugaaguucuauuuauuugugagac

SEQ ID NO: 387894 - RNA, 32 nt, Homo Sapiens
gacgucauuccucuccuuccuugcugcaaaau

SEQ ID NO: 387895 - RNA, 32 nt, Homo Sapiens
cuagcuagaaaccucaagcccuugcuuaaggg

SEQ ID NO: 387896 - RNA, 32 nt, Homo Sapiens
caucucuaaaauugugaugcaucuuacaaauu

SEQ ID NO: 387897 - RNA, 32 nt, Homo Sapiens
cccuaggacaacacuaacuucuauggccucgu

SEQ ID NO: 387898 - RNA, 32 nt, Homo Sapiens
auuucuucccccuccaucucucagggagacaa

SEQ ID NO: 387899 - RNA, 32 nt, Homo Sapiens
augcagcuuaggaugcuauuuugagauguaug

SEQ ID NO: 387900 - RNA, 32 nt, Homo Sapiens
ucaaaugaaaauacuaguucagugaucagcau

SEQ ID NO: 387901 - RNA, 32 nt, Homo Sapiens
guuagagaaaucaacagguucuaggaauuaaa

SEQ ID NO: 387902 - RNA, 32 nt, Homo Sapiens
cagcagcagacacccacccucucacugacuaa

SEQ ID NO: 387903 - RNA, 32 nt, Homo Sapiens
aaguauuguuucuaauuaaguacuggagcaau

SEQ ID NO: 387904 - RNA, 32 nt, Homo Sapiens
cccucucugcagccugacguggcuagccaucc

SEQ ID NO: 387905 - RNA, 32 nt, Homo Sapiens
acagccugacuucaggaacauccuuaucaucu

SEQ ID NO: 387906 - RNA, 32 nt, Homo Sapiens
uacugcacuccagccuggacaacagagggaga

SEQ ID NO: 387907 - RNA, 32 nt, Homo Sapiens
auauggagacucaaaagaagaagugcuggauu

SEQ ID NO: 387908 - RNA, 32 nt, Homo Sapiens
aaaucuggcuuuugagaacacaaacuuuuccc

SEQ ID NO: 387909 - RNA, 32 nt, Homo Sapiens
cuucaucuaggauauguagaugaguuuuugcu

SEQ ID NO: 387910 - RNA, 32 nt, Homo Sapiens
gggaaacgacccggcacgggcauccugugugc

SEQ ID NO: 387911 - RNA, 32 nt, Homo Sapiens
ucaagauggauaaaaaguccuuugaaauggug

SEQ ID NO: 387912 - RNA, 32 nt, Homo Sapiens
cagccaguggagaggaagcagugcauggccag

SEQ ID NO: 387913 - RNA, 32 nt, Homo Sapiens
uuucccuuuuuugcuuuuaacaauuuauagaa

SEQ ID NO: 387914 - RNA, 32 nt, Homo Sapiens
cgaggcgcugcagucgcggggacgacgcgggc

SEQ ID NO: 387915 - RNA, 32 nt, Homo Sapiens
gcaacugcccuccuuccgcgccggcggagcga

SEQ ID NO: 387916 - RNA, 32 nt, Homo Sapiens
aauuuaaaaaauuuggguuguuagauccguau

SEQ ID NO: 387917 - RNA, 32 nt, Homo Sapiens
cuucuguuugggaaaauaauuuggaauaaaau

SEQ ID NO: 387918 - RNA, 32 nt, Homo Sapiens
acaccuuucuaaaaagacucccugugguguuc

SEQ ID NO: 387919 - RNA, 32 nt, Homo Sapiens
gccugggauagccgcugguaacuguuaggaac

SEQ ID NO: 387920 - RNA, 32 nt, Homo Sapiens
cugucccgcgcgccagcucaccagcccuaccc

SEQ ID NO: 387921 - RNA, 32 nt, Homo Sapiens
gacauggggugcccuugccuuccuuggggaga

SEQ ID NO: 387922 - RNA, 32 nt, Homo Sapiens
agcacucacaucccggcccagacacuuccugu

SEQ ID NO: 387923 - RNA, 32 nt, Homo Sapiens
guuucacuaaaugcagcugaucucucucucug

SEQ ID NO: 387924 - RNA, 32 nt, Homo Sapiens
augauuucacugacaggucuaauacauuuucu

SEQ ID NO: 387925 - RNA, 32 nt, Homo Sapiens
guuugcuuuuucccuuuuccuacagacguaua

SEQ ID NO: 387926 - RNA, 32 nt, Homo Sapiens
ugagaugauggcuagcuuuguuuaaugucuua

SEQ ID NO: 387927 - RNA, 32 nt, Homo Sapiens
auuacuggaaggcuuccacuaggguccaccag

SEQ ID NO: 387928 - RNA, 32 nt, Homo Sapiens
acuugcaccccaccccagccauggaagagcag

SEQ ID NO: 387929 - RNA, 32 nt, Homo Sapiens
uuuuuguaaccggagauaguuuuuacaaguga

SEQ ID NO: 387930 - RNA, 32 nt, Homo Sapiens
uggaggguggccuggggccuguggauagugaa

SEQ ID NO: 387931 - RNA, 32 nt, Homo Sapiens
auguggaacacuuuaaagucgaauuaauuaaa

SEQ ID NO: 387932 - RNA, 32 nt, Homo Sapiens
uuugcccucucgccuccuccuccugggaagaa

SEQ ID NO: 387933 - RNA, 32 nt, Homo Sapiens
ugaugcuccugggaagaccagguggcaggucg

SEQ ID NO: 387934 - RNA, 32 nt, Homo Sapiens
ugaacaaaacuguguuuugaguuuagcugaca

SEQ ID NO: 387935 - RNA, 32 nt, Homo Sapiens
auaaguuaucauggaacuauaugguggacgca

SEQ ID NO: 387936 - RNA, 32 nt, Homo Sapiens
gaaggucauugaagggaucaaccgagggcuga

SEQ ID NO: 387937 - RNA, 32 nt, Homo Sapiens
gugggguauuuccucuuuugcuguuugcagua

SEQ ID NO: 387938 - RNA, 32 nt, Homo Sapiens
uauauaccagcauguaccaagaaugugugugu

SEQ ID NO: 387939 - RNA, 32 nt, Homo Sapiens
aaaauggaggcugaggagggguaaaagcgcua

SEQ ID NO: 387940 - RNA, 32 nt, Homo Sapiens
ucccagcaguucuuuguagucauuccaagugg

SEQ ID NO: 387941 - RNA, 32 nt, Homo Sapiens
ggacaggagcccaagcggcaucugaggagggc

SEQ ID NO: 387942 - RNA, 32 nt, Homo Sapiens
ccauugccccucccggccccaaaccacagggg

SEQ ID NO: 387943 - RNA, 32 nt, Homo Sapiens
aggauugugauguaucacuggacccagcaccu

SEQ ID NO: 387944 - RNA, 32 nt, Homo Sapiens
agagacuuuauuaaaaauacauauguaucuau

SEQ ID NO: 387945 - RNA, 32 nt, Homo Sapiens
uuauuccugguauuuuaaccuguaggccuuag

SEQ ID NO: 387946 - RNA, 32 nt, Homo Sapiens
ccaugggaagacgaggcccucgggcccagccc

SEQ ID NO: 387947 - RNA, 32 nt, Homo Sapiens
aguaucuuacuuuaacuuguauuuuccugguc

SEQ ID NO: 387948 - RNA, 32 nt, Homo Sapiens
guuuguaauuuaauuauugcuacaagugccgg

SEQ ID NO: 387949 - RNA, 32 nt, Homo Sapiens
aauauagaaaggaaagacuguuaccagccacu

SEQ ID NO: 387950 - RNA, 32 nt, Homo Sapiens
augaaacagucccucccaguggcugccugggg

SEQ ID NO: 387951 - RNA, 32 nt, Homo Sapiens
cucugaggaaaaaaccuagaaaugaugguuag

SEQ ID NO: 387952 - RNA, 32 nt, Homo Sapiens
aagauagauaaauuuucccagcccuaaauaug

SEQ ID NO: 387953 - RNA, 32 nt, Homo Sapiens
ugaccuucugucccggccgccuuagccccggg

SEQ ID NO: 387954 - RNA, 32 nt, Homo Sapiens
acacuuuucucucagcuucucaggguuucagu

SEQ ID NO: 387955 - RNA, 32 nt, Homo Sapiens
ugacucccaagccuacaggauuucauuuugcc

SEQ ID NO: 387956 - RNA, 32 nt, Homo Sapiens
cguugaaggcauucaguauaaaacacuucgaa

SEQ ID NO: 387957 - RNA, 32 nt, Homo Sapiens
gccuuucuguuccuuguccucaccuuacuccc

SEQ ID NO: 387958 - RNA, 32 nt, Homo Sapiens
aagcuuucauuuccaaccugaacgaaaugaau

SEQ ID NO: 387959 - RNA, 32 nt, Homo Sapiens
ccccgcugacccuaacaauaccuuuggagcuc

SEQ ID NO: 387960 - RNA, 32 nt, Homo Sapiens
ggcguggagaugcggcagccgcugagcugggg

SEQ ID NO: 387961 - RNA, 32 nt, Homo Sapiens
aggauuugggaaaauaaacuguaaauguuuau

SEQ ID NO: 387962 - RNA, 32 nt, Homo Sapiens
agcuuucugugacaguuccaggucuugaagcu

SEQ ID NO: 387963 - RNA, 32 nt, Homo Sapiens
cccacacuuggauuaggguuucccuccuccua

SEQ ID NO: 387964 - RNA, 32 nt, Homo Sapiens
accaguccugcuacuucuggggugccugucuc

SEQ ID NO: 387965 - RNA, 32 nt, Homo Sapiens
uccuuugacaccugguuguauguguaggcuaa

SEQ ID NO: 387966 - RNA, 32 nt, Homo Sapiens
gagcgcggcgcccuugagcugcaccgcggcgc

SEQ ID NO: 387967 - RNA, 32 nt, Homo Sapiens
aagauggcggccuccagggggcugggaauagc

SEQ ID NO: 387968 - RNA, 32 nt, Homo Sapiens
ugacugugucacuagaggcgggccccugguaa

SEQ ID NO: 387969 - RNA, 32 nt, Homo Sapiens
aauggaauugauaaaccauuuuuuacaaaauu

SEQ ID NO: 387970 - RNA, 32 nt, Homo Sapiens
gccccaggcuccugugcugguugcacgccagg

SEQ ID NO: 387971 - RNA, 32 nt, Homo Sapiens
uaaccaggccccagccuccaggcccccaacuc

SEQ ID NO: 387972 - RNA, 32 nt, Homo Sapiens
cagcaggugucuggacgaaaacaucaauguga

SEQ ID NO: 387973 - RNA, 32 nt, Homo Sapiens
gcgggcgggugaggcugcuuugcacaccugug

SEQ ID NO: 387974 - RNA, 32 nt, Homo Sapiens
caaauccuaaucacuauuucauacuauuacag

SEQ ID NO: 387975 - RNA, 32 nt, Homo Sapiens
gguccgaggcgaggaagccggaagccaggcgc

SEQ ID NO: 387976 - RNA, 30 nt, Homo Sapiens
gguccaguccuugccucccaucuucucucc

SEQ ID NO: 387977 - RNA, 32 nt, Homo Sapiens
ggaaacuuuccacagaauuuuaaacaacugau

SEQ ID NO: 387978 - RNA, 32 nt, Homo Sapiens
agccauggaaggaggugugugcauggauggug

SEQ ID NO: 387979 - RNA, 32 nt, Homo Sapiens
agauggcuguggaguucaaaugucgaugcuac

SEQ ID NO: 387980 - RNA, 32 nt, Homo Sapiens
gcaaauguaaccucaggaacaguccauuacaa

SEQ ID NO: 387981 - RNA, 32 nt, Homo Sapiens
cugcaacuuccaccucccggguucaagcgauc

SEQ ID NO: 387982 - RNA, 32 nt, Homo Sapiens
ggagugaaagacccuggcacccgcccgacacc

SEQ ID NO: 387983 - RNA, 32 nt, Homo Sapiens
uaugccugaccagagugggacucucagucaua

SEQ ID NO: 387984 - RNA, 32 nt, Homo Sapiens
agggggaguucgcuggaaggucaugcagccuu

SEQ ID NO: 387985 - RNA, 32 nt, Homo Sapiens
ggcaccacgccgugagagagccccagccacag

SEQ ID NO: 387986 - RNA, 32 nt, Homo Sapiens
ggcgcgggaggagcgcggagcggcagccggcu

SEQ ID NO: 387987 - RNA, 32 nt, Homo Sapiens
ggcugcguugggcuugcgugcggcucgcuaag

SEQ ID NO: 387988 - RNA, 32 nt, Homo Sapiens
ccccgcgggaccagcuucuaggcugagcugcc

SEQ ID NO: 387989 - RNA, 32 nt, Homo Sapiens
gggaucacaggccgcggagacccgggagccac

SEQ ID NO: 387990 - RNA, 32 nt, Homo Sapiens
auucuuccuuaaaacuaaaaucucuggaaaau

SEQ ID NO: 387991 - RNA, 32 nt, Homo Sapiens
gggggccauccucuaucuuccauccagcggcu

SEQ ID NO: 387992 - RNA, 32 nt, Homo Sapiens
ggguugaauuuucagugguauccauuaugaaa

SEQ ID NO: 387993 - RNA, 32 nt, Homo Sapiens
accuucacaaauuuauaugaucuaguuauguu

SEQ ID NO: 387994 - RNA, 32 nt, Homo Sapiens
ucugaugaaaacaaaaucacagcacccacuac

SEQ ID NO: 387995 - RNA, 32 nt, Homo Sapiens
agccacagccccagcccaggcagcccacagug

SEQ ID NO: 387996 - RNA, 32 nt, Homo Sapiens
ccccaacuucauuugcuucucucaacaaccuc

SEQ ID NO: 387997 - RNA, 32 nt, Homo Sapiens
cuuuuagugucagggaauaaacauggugggua

SEQ ID NO: 387998 - RNA, 32 nt, Homo Sapiens
gcaauacucuuucacuuaauucuuuacaaggg

SEQ ID NO: 387999 - RNA, 32 nt, Homo Sapiens
uauagucuuuucuuucacaucuaugucuuuaa

SEQ ID NO: 388000 - RNA, 32 nt, Homo Sapiens
augacauagaaaguucauggaacucauguuuu

SEQ ID NO: 388001 - RNA, 32 nt, Homo Sapiens
gccuuagccaaggaguccagcaccugucuccc

SEQ ID NO: 388002 - RNA, 32 nt, Homo Sapiens
aaaugacgucauccugauaauuauuggacgug

SEQ ID NO: 388003 - RNA, 32 nt, Homo Sapiens
ccuaguuaauaaaucuuauucuaauggaacau

SEQ ID NO: 388004 - RNA, 32 nt, Homo Sapiens
uccgaugccuaccccacuguggagagcaucag

SEQ ID NO: 388005 - RNA, 32 nt, Homo Sapiens
gcuuuuaacgacagccguugugccccaggcuc

SEQ ID NO: 388006 - RNA, 32 nt, Homo Sapiens
ugcugaacaccuuguggaagcaaaaaucugaa

SEQ ID NO: 388007 - RNA, 32 nt, Homo Sapiens
cccagugugauugauugcuuuaucuuugguaa

SEQ ID NO: 388008 - RNA, 32 nt, Homo Sapiens
auaugacugucaauacuaaaauuuaguuguug

SEQ ID NO: 388009 - RNA, 32 nt, Homo Sapiens
uuacaaaaaugguucguguguguuaccauuau

SEQ ID NO: 388010 - RNA, 32 nt, Homo Sapiens
uucucagagaacucaaauuugcuauaguuugu

SEQ ID NO: 388011 - RNA, 32 nt, Homo Sapiens
uauuuuaguuaacuaugauuccaauuacuacu

SEQ ID NO: 388012 - RNA, 32 nt, Homo Sapiens
gaacaucacacucuggggccuguuguggggug

SEQ ID NO: 388013 - RNA, 32 nt, Homo Sapiens
aguacuggaacgaggagcugcagaugaugagg

SEQ ID NO: 388014 - RNA, 32 nt, Homo Sapiens
cugcccugagccccuuuccccaccacaaccca

SEQ ID NO: 388015 - RNA, 32 nt, Homo Sapiens
cugguguauguggggaaguucuaacggcucuc

SEQ ID NO: 388016 - RNA, 28 nt, Homo Sapiens
uauguguugucuaagaugucaguuuuau

SEQ ID NO: 388017 - RNA, 32 nt, Homo Sapiens
cagcacggccccagaccuugaggcugagcagc

SEQ ID NO: 388018 - RNA, 32 nt, Homo Sapiens
aagggucuguuucucagcaucauggaugcagg

SEQ ID NO: 388019 - RNA, 32 nt, Homo Sapiens
auuuuguccuuguuauuuuuguuuccuuugua

SEQ ID NO: 388020 - RNA, 32 nt, Homo Sapiens
gagaggcacuguggugaaauggcuccagaggu

SEQ ID NO: 388021 - RNA, 32 nt, Homo Sapiens
uuuuuauuguugaauguacaucuaccccagcc

SEQ ID NO: 388022 - RNA, 32 nt, Homo Sapiens
guuucucggcucuuccuccccgcugcccccca

SEQ ID NO: 388023 - RNA, 32 nt, Homo Sapiens
ggcaguuuccaucucugguauaaggugccauc

SEQ ID NO: 388024 - RNA, 32 nt, Homo Sapiens
ggaaggugcaggggugugugugggggcagggg

SEQ ID NO: 388025 - RNA, 32 nt, Homo Sapiens
gagaggggcaggugcugggcggcggcugacgg

SEQ ID NO: 388026 - RNA, 32 nt, Homo Sapiens
ggcgccuccgcgccugacccaggaggaguggc

SEQ ID NO: 388027 - RNA, 30 nt, Homo Sapiens
guuugucuguuggcugcagaaagaagucag

SEQ ID NO: 388028 - RNA, 32 nt, Homo Sapiens
gaaagacuugcuaaaaucaugcuuuacuuacu

SEQ ID NO: 388029 - RNA, 32 nt, Homo Sapiens
gccguccgcgcgcccgggcgcagguuugguuu

SEQ ID NO: 388030 - RNA, 32 nt, Homo Sapiens
uuuucacuuccacucauaauccaccccgcauu

SEQ ID NO: 388031 - RNA, 32 nt, Homo Sapiens
agcaggcggcagcggcggccugagcuucaggg

SEQ ID NO: 388032 - RNA, 32 nt, Homo Sapiens
ccuguuucuaaaagcugaaaaucucaguuuaa

SEQ ID NO: 388033 - RNA, 32 nt, Homo Sapiens
cuccauuuuuucccuuucuuaaacaaagcaaa

SEQ ID NO: 388034 - RNA, 31 nt, Homo Sapiens
ccggcuuugugcucagccaguucauuugagu

SEQ ID NO: 388035 - RNA, 32 nt, Homo Sapiens
ucaaaaucaacccuucuagaagaugaauuuag

SEQ ID NO: 388036 - RNA, 32 nt, Homo Sapiens
ugucuucaacccuuauuggacauaagagaauu

SEQ ID NO: 388037 - RNA, 32 nt, Homo Sapiens
aaaacagcauucaaaaaggcgacagaauagaa

SEQ ID NO: 388038 - RNA, 32 nt, Homo Sapiens
uaaccuggaaauauuaauauuuuuguaaagua

SEQ ID NO: 388039 - RNA, 29 nt, Homo Sapiens
ugaagagucuaugagugagggaugcagag

SEQ ID NO: 388040 - RNA, 32 nt, Homo Sapiens
uguccccgccccaccccgccacccauuccuag

SEQ ID NO: 388041 - RNA, 32 nt, Homo Sapiens
cccgcugcaccccgccccggcgcgagaggaga

SEQ ID NO: 388042 - RNA, 32 nt, Homo Sapiens
gagcuuuucaggucucaggcacagcaagugcc

SEQ ID NO: 388043 - RNA, 32 nt, Homo Sapiens
guggcggccgccccgcgcugucugugaggcgc

SEQ ID NO: 388044 - RNA, 32 nt, Homo Sapiens
agugccgcuccuuggugggggcuguucauggc

SEQ ID NO: 388045 - RNA, 28 nt, Homo Sapiens
gugaugaggucccggcuucugcucuccg

SEQ ID NO: 388046 - RNA, 32 nt, Homo Sapiens
cguccuggggagcgcgucauggccuuaccagu

SEQ ID NO: 388047 - RNA, 32 nt, Homo Sapiens
gugacacggugccuuccccggcgggggacggu

SEQ ID NO: 388048 - RNA, 31 nt, Homo Sapiens
cuaaugcacccaccagcucaaacacaccaau

SEQ ID NO: 388049 - RNA, 32 nt, Homo Sapiens
cccccacccaccuccacccagccccuggcccc

SEQ ID NO: 388050 - RNA, 32 nt, Homo Sapiens
gaaaugaauguuaaauacgucuguaaaugguu

SEQ ID NO: 388051 - RNA, 32 nt, Homo Sapiens
agcugaugaggccgagugucaggaagcacucc

SEQ ID NO: 388052 - RNA, 32 nt, Homo Sapiens
cuagauuguaaauuaaguuuggcauuauuguc

SEQ ID NO: 388053 - RNA, 32 nt, Homo Sapiens
cuacuuuuacacauguucacaguaacauaaca

SEQ ID NO: 388054 - RNA, 31 nt, Homo Sapiens
ccacauucaaagaaaugagauuaacucuuaa

SEQ ID NO: 388055 - RNA, 32 nt, Homo Sapiens
cccgccccgcucugggaggaccgcgagaugcc

SEQ ID NO: 388056 - RNA, 32 nt, Homo Sapiens
cccuccccugaccugggugugccucgcugcug

SEQ ID NO: 388057 - RNA, 32 nt, Homo Sapiens
ucauaaaucuucauagcagcauuauucauagc

SEQ ID NO: 388058 - RNA, 32 nt, Homo Sapiens
guauucuuuuauauuucuuucauugggcacuu

SEQ ID NO: 388059 - RNA, 32 nt, Homo Sapiens
cggcaacgaggcugggggaggggcgcccgcca

SEQ ID NO: 388060 - RNA, 32 nt, Homo Sapiens
gacacacgguuuccucuaauuagcuguuacau

SEQ ID NO: 388061 - RNA, 32 nt, Homo Sapiens
acugaacuggguuuuucugacaugccuagacu

SEQ ID NO: 388062 - RNA, 32 nt, Homo Sapiens
uuuucucccagccccaggacacugacucugua

SEQ ID NO: 388063 - RNA, 32 nt, Homo Sapiens
gguuuguaaauuuaauuucagauaacaucuug

SEQ ID NO: 388064 - RNA, 32 nt, Homo Sapiens
agaaaauuauaaaauuugcuuguuacuuucag

SEQ ID NO: 388065 - RNA, 32 nt, Homo Sapiens
acaaacuccuucccuucuggugcugcaaaaau

SEQ ID NO: 388066 - RNA, 32 nt, Homo Sapiens
ggaaaguguuugagagcaaguaguugacauuu

SEQ ID NO: 388067 - RNA, 32 nt, Homo Sapiens
uaggacccugcagcugugcugccgccaccucu

SEQ ID NO: 388068 - RNA, 32 nt, Homo Sapiens
cggaccgggaggaggggagggggcgaugcugg

SEQ ID NO: 388069 - RNA, 32 nt, Homo Sapiens
cauauugugggucuuucaguuccaugauaugu

SEQ ID NO: 388070 - RNA, 30 nt, Homo Sapiens
guuucccaaguaaauggggaaacuguccaa

SEQ ID NO: 388071 - RNA, 32 nt, Homo Sapiens
uaaugccuacuacuccgacuuuuauagaagcu

SEQ ID NO: 388072 - RNA, 32 nt, Homo Sapiens
aggaugcagcugggcaccuggaccucagagaa

SEQ ID NO: 388073 - RNA, 32 nt, Homo Sapiens
gugucacccagcuaagaaaauccgcgggcccg

SEQ ID NO: 388074 - RNA, 32 nt, Homo Sapiens
cacucacagacaccccuuaccccacccccacu

SEQ ID NO: 388075 - RNA, 32 nt, Homo Sapiens
cuuguaaaacaauaaaguacuaaagaaaaugu

SEQ ID NO: 388076 - RNA, 32 nt, Homo Sapiens
cagguguggauccaugggguagccucaacgca

SEQ ID NO: 388077 - RNA, 32 nt, Homo Sapiens
ugaagccccuucuuggugugggaggcagaggu

SEQ ID NO: 388078 - RNA, 32 nt, Homo Sapiens
cuugccaauccccagagcuguucuuccaaagc

SEQ ID NO: 388079 - RNA, 32 nt, Homo Sapiens
caaucagugcacaugcacacaccccacacgca

SEQ ID NO: 388080 - RNA, 32 nt, Homo Sapiens
auucucauuuaguuuguauuuucauuguauag

SEQ ID NO: 388081 - RNA, 32 nt, Homo Sapiens
agagccuguacuuuuugcuggcauuugaauaa

SEQ ID NO: 388082 - RNA, 32 nt, Homo Sapiens
acaugagaugacugccgugugguaaacugaug

SEQ ID NO: 388083 - RNA, 32 nt, Homo Sapiens
guuuaguucauuucaauacauuguacaugaaa

SEQ ID NO: 388084 - RNA, 32 nt, Homo Sapiens
uccccgacuccaucugcagcucugccauugug

SEQ ID NO: 388085 - RNA, 32 nt, Homo Sapiens
cugaacuacaagcaaaaauguauuuuguccaa

SEQ ID NO: 388086 - RNA, 32 nt, Homo Sapiens
gaaaagcauggugccguagggcugcuaugguu

SEQ ID NO: 388087 - RNA, 32 nt, Homo Sapiens
ggcuggagugcagugguaugaucauggcuugc

SEQ ID NO: 388088 - RNA, 32 nt, Homo Sapiens
guagaaaacauuuuauacuuuauucagaggag

SEQ ID NO: 388089 - RNA, 32 nt, Homo Sapiens
auauauuuaaauaaauuguguuaucucuugcc

SEQ ID NO: 388090 - RNA, 32 nt, Homo Sapiens
uuucaccacccaccacccugaccuccagggaa

SEQ ID NO: 388091 - RNA, 32 nt, Homo Sapiens
aaacccuguaaauguaauaaauuuagaaaaaa

SEQ ID NO: 388092 - RNA, 32 nt, Homo Sapiens
uuaugugacuaaucuucagugauaauauuuca

SEQ ID NO: 388093 - RNA, 32 nt, Homo Sapiens
gaaggggaaaauuugugcugcuguuagugcaa

SEQ ID NO: 388094 - RNA, 32 nt, Homo Sapiens
gagagccuguggaaccugcccgucuccccucc

SEQ ID NO: 388095 - RNA, 32 nt, Homo Sapiens
uucuuccauuuucucccccacgaguggaaaau

SEQ ID NO: 388096 - RNA, 32 nt, Homo Sapiens
auaggccccugccuggcuccugggagauaacc

SEQ ID NO: 388097 - RNA, 32 nt, Homo Sapiens
gagcaacucccucucagcuaaaaggccacccc

SEQ ID NO: 388098 - RNA, 32 nt, Homo Sapiens
accugacccccucuccucacuggccugggguc

SEQ ID NO: 388099 - RNA, 32 nt, Homo Sapiens
uuauuaguaaauaguauuuucuuaaucucaga

SEQ ID NO: 388100 - RNA, 32 nt, Homo Sapiens
agaaaaagggauaucuuuuuuauauuuuuuuc

SEQ ID NO: 388101 - RNA, 32 nt, Homo Sapiens
ugugccaccaugcccgucucauuuuuauauuu

SEQ ID NO: 388102 - RNA, 32 nt, Homo Sapiens
cuuccccacucuaucacucuguggcucuagaa

SEQ ID NO: 388103 - RNA, 32 nt, Homo Sapiens
uuccuuucaagcucagccugugugccugaugu

SEQ ID NO: 388104 - RNA, 32 nt, Homo Sapiens
uuuuuucuuuuuucuuuuucuuuuuuuuuuuu

SEQ ID NO: 388105 - RNA, 32 nt, Homo Sapiens
uguaaagaacuaaaaguaugaaaaugucucac

SEQ ID NO: 388106 - RNA, 32 nt, Homo Sapiens
gaugucaucuuucugcagaaaaccauuagacc

SEQ ID NO: 388107 - RNA, 32 nt, Homo Sapiens
gcacucggggagaggaggggugcccgggacag

SEQ ID NO: 388108 - RNA, 32 nt, Homo Sapiens
cagaugggauaguggaggagcgcuggacugug

SEQ ID NO: 388109 - RNA, 32 nt, Homo Sapiens
ugcauuagcaguucaaagauuaaauaugauca

SEQ ID NO: 388110 - RNA, 32 nt, Homo Sapiens
aaaacuuggcuguauuaggagcucggagcaag

SEQ ID NO: 388111 - RNA, 32 nt, Homo Sapiens
ugccacccauucuucccguucuuaacuuugaa

SEQ ID NO: 388112 - RNA, 28 nt, Homo Sapiens
agagagaaugucuuucauuugaagagug

SEQ ID NO: 388113 - RNA, 32 nt, Homo Sapiens
uccccaucccccacccccauucuucugugaug

SEQ ID NO: 388114 - RNA, 32 nt, Homo Sapiens
uucaacuaccuuagauaauauuucugaaaacc

SEQ ID NO: 388115 - RNA, 32 nt, Homo Sapiens
caauucucaacucuccuuuuccuauuugaauu

SEQ ID NO: 388116 - RNA, 32 nt, Homo Sapiens
cugagcuggugccuggccccagucuuaucugu

SEQ ID NO: 388117 - RNA, 32 nt, Homo Sapiens
gugguccuccugcaggauguucagcuucgacu

SEQ ID NO: 388118 - RNA, 32 nt, Homo Sapiens
auuggaaagcaucuaguccagugggaagccag

SEQ ID NO: 388119 - RNA, 32 nt, Homo Sapiens
gagucuccgagcucaauaacgcaaggauggcu

SEQ ID NO: 388120 - RNA, 32 nt, Homo Sapiens
uuuuugaguaauuuucugaugggaggaaagua

SEQ ID NO: 388121 - RNA, 32 nt, Homo Sapiens
guauauuauauguguauaaauaaagucuguac

SEQ ID NO: 388122 - RNA, 32 nt, Homo Sapiens
ccaagcucgagcccugggauugccagaccuga

SEQ ID NO: 388123 - RNA, 32 nt, Homo Sapiens
aagagagaccuuucuuguuucuggacuuggag

SEQ ID NO: 388124 - RNA, 32 nt, Homo Sapiens
acagcaccaaaauaaaucaucuuuauuaagua

SEQ ID NO: 388125 - RNA, 27 nt, Homo Sapiens
acaggucaugucugcagcccccagaau

SEQ ID NO: 388126 - RNA, 32 nt, Homo Sapiens
ugcgagaggcuggagguuggcgcuagaggcaa

SEQ ID NO: 388127 - RNA, 32 nt, Homo Sapiens
uagguuucacccaaagggugccggcgccgaau

SEQ ID NO: 388128 - RNA, 32 nt, Homo Sapiens
ccgcaucagaucugcgcugcggcagaggcagc

SEQ ID NO: 388129 - RNA, 32 nt, Homo Sapiens
ucguuaaagggaugguaaaaaccuggguccgu

SEQ ID NO: 388130 - RNA, 32 nt, Homo Sapiens
ugugaaggaaucuggaggaaaacugaccaggc

SEQ ID NO: 388131 - RNA, 32 nt, Homo Sapiens
uaauguauguuuaauuugauaucauguuuuaa

SEQ ID NO: 388132 - RNA, 32 nt, Homo Sapiens
auuagacuuagaaauaaauguaccugauguac

SEQ ID NO: 388133 - RNA, 32 nt, Homo Sapiens
ggcaggauucuccauguguaaacuucaccccc

SEQ ID NO: 388134 - RNA, 32 nt, Homo Sapiens
uugagccucuggagaucauuguaaccaauccu

SEQ ID NO: 388135 - RNA, 32 nt, Homo Sapiens
cccggcuccccggcccauguccucacuugcag

SEQ ID NO: 388136 - RNA, 32 nt, Homo Sapiens
gcugaggaaaaugugacggcaggugcccacuc

SEQ ID NO: 388137 - RNA, 32 nt, Homo Sapiens
cuccccuuagguguugcuuaaucugccucaug

SEQ ID NO: 388138 - RNA, 32 nt, Homo Sapiens
aaaguuauuccucuguucuccucaacuuacug

SEQ ID NO: 388139 - RNA, 32 nt, Homo Sapiens
cacuugaccuaaacuucuauuuucuuaaggaa

SEQ ID NO: 388140 - RNA, 32 nt, Homo Sapiens
cguauaaaauaccaauggaugcccucagcugg

SEQ ID NO: 388141 - RNA, 32 nt, Homo Sapiens
uuaaucuuucccuguuaggcugauuucagauu

SEQ ID NO: 388142 - RNA, 32 nt, Homo Sapiens
guacagaaccaucacugguccagguuaaugua

SEQ ID NO: 388143 - RNA, 32 nt, Homo Sapiens
ugaggccagaaagcugcucuggggucagcggg

SEQ ID NO: 388144 - RNA, 32 nt, Homo Sapiens
gauuauuugcaauaauucauagguuccaaggg

SEQ ID NO: 388145 - RNA, 32 nt, Homo Sapiens
uuuguccagaacuuaaagauuuagaugccuuc

SEQ ID NO: 388146 - RNA, 28 nt, Homo Sapiens
aaagcgcggcggccgccgggauucgggc

SEQ ID NO: 388147 - RNA, 32 nt, Homo Sapiens
uuggcuaaucuacaaauaagucuuaaaccuau

SEQ ID NO: 388148 - RNA, 32 nt, Homo Sapiens
aaaacuucaaauggagagcagcuccuuuuugg

SEQ ID NO: 388149 - RNA, 32 nt, Homo Sapiens
aauuuuguuuauuuuccugucaaugaaagcaa

SEQ ID NO: 388150 - RNA, 32 nt, Homo Sapiens
uuacgcagaccaacagaguauuugagaaaauu

SEQ ID NO: 388151 - RNA, 32 nt, Homo Sapiens
gggcgcuuaggcccgcgcggacggggaggcca

SEQ ID NO: 388152 - RNA, 32 nt, Homo Sapiens
ggcaggggaagggcacacccccugcccaugca

SEQ ID NO: 388153 - RNA, 32 nt, Homo Sapiens
uccaggcagugaaagagggugauucagcaagc

SEQ ID NO: 388154 - RNA, 32 nt, Homo Sapiens
ggcgucgaggccgcccgaggggagcgcgcgug

SEQ ID NO: 388155 - RNA, 32 nt, Homo Sapiens
uggcaccauccuggcuuuuggcagggaugagu

SEQ ID NO: 388156 - RNA, 32 nt, Homo Sapiens
acauauauggaagaggaaaaggcugguacaac

SEQ ID NO: 388157 - RNA, 32 nt, Homo Sapiens
guccgucuaccucauucuuccuggacacagga

SEQ ID NO: 388158 - RNA, 32 nt, Homo Sapiens
agucucaaaucugcccagaaauccacaccucg

SEQ ID NO: 388159 - RNA, 32 nt, Homo Sapiens
agcccuuuccucugcccccacccagcugcccu

SEQ ID NO: 388160 - RNA, 32 nt, Homo Sapiens
uccagguugguagaagcagccgaagggcuccu

SEQ ID NO: 388161 - RNA, 32 nt, Homo Sapiens
gcccagaggcgccccugcaggggggugaccca

SEQ ID NO: 388162 - RNA, 30 nt, Homo Sapiens
cggcugcgcgcgcacuucggucgcgggcgg

SEQ ID NO: 388163 - RNA, 32 nt, Homo Sapiens
cccgccucccugccggcccauccacacccugc

SEQ ID NO: 388164 - RNA, 32 nt, Homo Sapiens
ccaagaagguugaugggccaucuugauuuucu

SEQ ID NO: 388165 - RNA, 32 nt, Homo Sapiens
caaggcuguuuugacucuucugcaucucuugc

SEQ ID NO: 388166 - RNA, 32 nt, Homo Sapiens
uaaaagaaacagagacuucucucugccauggc

SEQ ID NO: 388167 - RNA, 32 nt, Homo Sapiens
uuuggguuuguuugguuuuuucccucuauuuu

SEQ ID NO: 388168 - RNA, 32 nt, Homo Sapiens
aggaugcagagggguuggggcugggugggcac

SEQ ID NO: 388169 - RNA, 32 nt, Homo Sapiens
uuauuuuaaaauucucuuuguguauuuggaau

SEQ ID NO: 388170 - RNA, 31 nt, Homo Sapiens
ugcgucggccauugccugccccgaggggcgu

SEQ ID NO: 388171 - RNA, 32 nt, Homo Sapiens
guugggaauggcagcugcuuggacaggucugu

SEQ ID NO: 388172 - RNA, 32 nt, Homo Sapiens
uguacgccgccagcugggugagcauggggcag

SEQ ID NO: 388173 - RNA, 32 nt, Homo Sapiens
augagauucccucuccucccccaccuucaagc

SEQ ID NO: 388174 - RNA, 32 nt, Homo Sapiens
cgaggagacaccuugaucagcgucccaguuuc

SEQ ID NO: 388175 - RNA, 32 nt, Homo Sapiens
guccgacuguccucggcgguuggucaguguga

SEQ ID NO: 388176 - RNA, 32 nt, Homo Sapiens
auccccuaacuucccccaacccucaaauuaaa

SEQ ID NO: 388177 - RNA, 32 nt, Homo Sapiens
cguccccacucagcucuccaccaccguggaau

SEQ ID NO: 388178 - RNA, 32 nt, Homo Sapiens
acugccuuggaauugaagcgaaugagaguggg

SEQ ID NO: 388179 - RNA, 32 nt, Homo Sapiens
uuucuaggauaaaucuaauuacuguuuacugg

SEQ ID NO: 388180 - RNA, 32 nt, Homo Sapiens
aaggcacucucguguucuccucacucugugca

SEQ ID NO: 388181 - RNA, 32 nt, Homo Sapiens
aagguuucuuagaacaacaacaaauacauggu

SEQ ID NO: 388182 - RNA, 32 nt, Homo Sapiens
aauucacuuuaaacuuuuauuaccacaguugc

SEQ ID NO: 388183 - RNA, 32 nt, Homo Sapiens
cagcgcagcgcgcuccgcggggugcugaucug

SEQ ID NO: 388184 - RNA, 32 nt, Homo Sapiens
ucuuggaugauuagacugacucugagaauauu

SEQ ID NO: 388185 - RNA, 32 nt, Homo Sapiens
uacacaugucauuuauuauuauuacuuuaaga

SEQ ID NO: 388186 - RNA, 32 nt, Homo Sapiens
acagacgcccccacuagcuacuccacgaagcc

SEQ ID NO: 388187 - RNA, 32 nt, Homo Sapiens
uaaacaagugaacaaaggucucugguuuuccu

SEQ ID NO: 388188 - RNA, 31 nt, Homo Sapiens
cuccagaaggcggugugggggauggcgguca

SEQ ID NO: 388189 - RNA, 32 nt, Homo Sapiens
aucucuagggcaggggcaaaaugccaccaguc

SEQ ID NO: 388190 - RNA, 32 nt, Homo Sapiens
cauuuguuuuguuuuucuuaugaaucagaaau

SEQ ID NO: 388191 - RNA, 32 nt, Homo Sapiens
cagggaccaggauacaggaagguucuagggac

SEQ ID NO: 388192 - RNA, 32 nt, Homo Sapiens
gcggcgacgugagcggcuccgcggaccccgag

SEQ ID NO: 388193 - RNA, 32 nt, Homo Sapiens
aggaccagacugccuauucguaaccuuucugc

SEQ ID NO: 388194 - RNA, 32 nt, Homo Sapiens
acauuuuguacaaaauggaaccuguuaaucau

SEQ ID NO: 388195 - RNA, 32 nt, Homo Sapiens
caaguggccgacuggggugcgggugcacaggu

SEQ ID NO: 388196 - RNA, 32 nt, Homo Sapiens
gaaaacccgaacuucucuauauuuguguacuu

SEQ ID NO: 388197 - RNA, 32 nt, Homo Sapiens
gccggggaagaggacacgcagaggagcagcug

SEQ ID NO: 388198 - RNA, 32 nt, Homo Sapiens
ugcccagguguuaacagggcugucuggacggg

SEQ ID NO: 388199 - RNA, 32 nt, Homo Sapiens
caccccggccucggggcuccugguggcagcac

SEQ ID NO: 388200 - RNA, 32 nt, Homo Sapiens
agccaggcugggcagagcacuccggcucaccu

SEQ ID NO: 388201 - RNA, 32 nt, Homo Sapiens
cggcgaggacgagucugugcuccaucagcugc

SEQ ID NO: 388202 - RNA, 32 nt, Homo Sapiens
cgggggagucauuuaauacuucaugauuagaa

SEQ ID NO: 388203 - RNA, 32 nt, Homo Sapiens
cugugcaggacacuuggccucaaagcccagag

SEQ ID NO: 388204 - RNA, 32 nt, Homo Sapiens
ggcucgguaccgaugcgugggcugggcuaggu

SEQ ID NO: 388205 - RNA, 32 nt, Homo Sapiens
uuacuuuaaaaauaaacuuuguaagcagaaaa

SEQ ID NO: 388206 - RNA, 32 nt, Homo Sapiens
gagucagaacuaagacgaggcugaaucgggag

SEQ ID NO: 388207 - RNA, 32 nt, Homo Sapiens
acuaaaggaaacaaagcaauagguuuggggga

SEQ ID NO: 388208 - RNA, 32 nt, Homo Sapiens
uagccuuuacacaugaggucaaaggagugacg

SEQ ID NO: 388209 - RNA, 32 nt, Homo Sapiens
cuacuuauuucuaucaauagaaaguguugugu

SEQ ID NO: 388210 - RNA, 32 nt, Homo Sapiens
uuaaaaucaugaauauucaauuuuauacaaac

SEQ ID NO: 388211 - RNA, 32 nt, Homo Sapiens
ggagggaggugauuggaucaugggggaauggu

SEQ ID NO: 388212 - RNA, 32 nt, Homo Sapiens
cauauuucagaauugacauauaagaguaaaaa

SEQ ID NO: 388213 - RNA, 32 nt, Homo Sapiens
gagcucuguuuuuauucauauuuuuucuacaa

SEQ ID NO: 388214 - RNA, 32 nt, Homo Sapiens
aaagcccaggcaucucaccucccuacaagccc

SEQ ID NO: 388215 - RNA, 32 nt, Homo Sapiens
uggaauuuguacuaauuuuucuuucucuugua

SEQ ID NO: 388216 - RNA, 32 nt, Homo Sapiens
uaugaguauaagaaagguuaggcauauuuuca

SEQ ID NO: 388217 - RNA, 32 nt, Homo Sapiens
cugucugggacagauagcacaagucagaguuu

SEQ ID NO: 388218 - RNA, 32 nt, Homo Sapiens
ucucccaaagauuaggucguuuuccaaagagc

SEQ ID NO: 388219 - RNA, 32 nt, Homo Sapiens
cugggccucaggcuucaauguauuaguuauua

SEQ ID NO: 388220 - RNA, 32 nt, Homo Sapiens
uagaugcuggacucugguugagguggggaccu

SEQ ID NO: 388221 - RNA, 32 nt, Homo Sapiens
gcacuggggcggccgccuccucaucagccgac

SEQ ID NO: 388222 - RNA, 32 nt, Homo Sapiens
uguagguacaagcuucuggcucaagaguugaa

SEQ ID NO: 388223 - RNA, 32 nt, Homo Sapiens
gcuucauuuuugggagaaaacuucucacacua

SEQ ID NO: 388224 - RNA, 32 nt, Homo Sapiens
uccggacgggcuuuuuucuccuccucuugggg

SEQ ID NO: 388225 - RNA, 32 nt, Homo Sapiens
gggcgaggagcugcgagccggaggaggccgcg

SEQ ID NO: 388226 - RNA, 32 nt, Homo Sapiens
cucugcaaagccugcgccagggaggaggcagg

SEQ ID NO: 388227 - RNA, 32 nt, Homo Sapiens
cacaucagggacccggggauggaugucggaag

SEQ ID NO: 388228 - RNA, 32 nt, Homo Sapiens
uauucauauauuucuauacuagauaaagaguu

SEQ ID NO: 388229 - RNA, 32 nt, Homo Sapiens
ugugcacguggagaagagcggggacucggcga

SEQ ID NO: 388230 - RNA, 32 nt, Homo Sapiens
uaggagauucaugugacaaagauuugccucug

SEQ ID NO: 388231 - RNA, 32 nt, Homo Sapiens
caggccccauccugcuucugcugcuguggcug

SEQ ID NO: 388232 - RNA, 32 nt, Homo Sapiens
gaaauaauauauuuacucucucuauuauacac

SEQ ID NO: 388233 - RNA, 32 nt, Homo Sapiens
caggcggccaccggcuucgggagcccgcugca

SEQ ID NO: 388234 - RNA, 32 nt, Homo Sapiens
gaaaaaacucuuaaaauucauauggaaccaac

SEQ ID NO: 388235 - RNA, 32 nt, Homo Sapiens
gaucugcagggccagugaguggugcuacggaa

SEQ ID NO: 388236 - RNA, 31 nt, Homo Sapiens
ggaaauaaauaaaagcauaaucacuaaaaaa

SEQ ID NO: 388237 - RNA, 32 nt, Homo Sapiens
cugaucugcuugugccuaagcauugcacaggu

SEQ ID NO: 388238 - RNA, 32 nt, Homo Sapiens
ucuugggcaaaauaaauaugagauuguuacag

SEQ ID NO: 388239 - RNA, 32 nt, Homo Sapiens
aaguucuccagcaaauggaaguguuuuaaaau

SEQ ID NO: 388240 - RNA, 32 nt, Homo Sapiens
uugguuuuucuuuuaauuuuuauuguaguuuu

SEQ ID NO: 388241 - RNA, 32 nt, Homo Sapiens
ugggaaaggcauuuugauuugcuggccuaauu

SEQ ID NO: 388242 - RNA, 32 nt, Homo Sapiens
uuaaaagcuacauuuuauaacacuggcacaca

SEQ ID NO: 388243 - RNA, 32 nt, Homo Sapiens
uacuuuuguuaaaaaugugacaguugucaaaa

SEQ ID NO: 388244 - RNA, 32 nt, Homo Sapiens
uuggagcccuugcgguaccagaaagcagcgag

SEQ ID NO: 388245 - RNA, 32 nt, Homo Sapiens
agcaugugagggguagugggauggugggguac

SEQ ID NO: 388246 - RNA, 32 nt, Homo Sapiens
uuuauauauauuauuucugcaguuaccauccu

SEQ ID NO: 388247 - RNA, 32 nt, Homo Sapiens
gggccaggcaagauggcucacgccugugaucc

SEQ ID NO: 388248 - RNA, 30 nt, Homo Sapiens
cugcaucaagguggcagcagaauacccugu

SEQ ID NO: 388249 - RNA, 32 nt, Homo Sapiens
gagggaaucgcuuuuuaagugauccuuacagu

SEQ ID NO: 388250 - RNA, 32 nt, Homo Sapiens
uuggcuaauaaucauuccuuaaccuagaauuc

SEQ ID NO: 388251 - RNA, 32 nt, Homo Sapiens
ggaaagguguugauuacauggauacuucuaaa

SEQ ID NO: 388252 - RNA, 32 nt, Homo Sapiens
cccgcuaaguuuuuaaauuucuuguagagaug

SEQ ID NO: 388253 - RNA, 32 nt, Homo Sapiens
cugcagccacgcgggggcgcgcgggagcucug

SEQ ID NO: 388254 - RNA, 32 nt, Homo Sapiens
aacauaacaacacagcuaccuuugaaacaaca

SEQ ID NO: 388255 - RNA, 32 nt, Homo Sapiens
guuucccacgggggcugcaguggauucacugu

SEQ ID NO: 388256 - RNA, 32 nt, Homo Sapiens
accugacagugcucgcugagaacucucaccag

SEQ ID NO: 388257 - RNA, 32 nt, Homo Sapiens
gccgcugcugccucaauaaaucugcugauuug

SEQ ID NO: 388258 - RNA, 27 nt, Homo Sapiens
gaugacaggcucuucagcucccugcaa

SEQ ID NO: 388259 - RNA, 32 nt, Homo Sapiens
ugaccgccugacugcuggcuacuauccaugca

SEQ ID NO: 388260 - RNA, 32 nt, Homo Sapiens
guaaaaaauggaaaaaaacauaaaaagcagaa

SEQ ID NO: 388261 - RNA, 32 nt, Homo Sapiens
ugccacuaacuucuaaagaaguucaaacccug

SEQ ID NO: 388262 - RNA, 32 nt, Homo Sapiens
gggaaaagaguuaaacaucaccacugaaauuc

SEQ ID NO: 388263 - RNA, 32 nt, Homo Sapiens
uagugcuuuggauacaucaguagcuaggucuc

SEQ ID NO: 388264 - RNA, 32 nt, Homo Sapiens
gcgcgccccagucccgccccgccccgcuaacc

SEQ ID NO: 388265 - RNA, 32 nt, Homo Sapiens
gccugggacauagagaucaucuggccaccccu

SEQ ID NO: 388266 - RNA, 32 nt, Homo Sapiens
ggagcucugugccuuaguggcucuuggcagga

SEQ ID NO: 388267 - RNA, 32 nt, Homo Sapiens
gauugggaaggggauucugggccuggaagccu

SEQ ID NO: 388268 - RNA, 30 nt, Homo Sapiens
uagauacuauuagcagcccaucuuaagaug

SEQ ID NO: 388269 - RNA, 32 nt, Homo Sapiens
gccugggcccaccugcugcugcugcuguugcu

SEQ ID NO: 388270 - RNA, 32 nt, Homo Sapiens
ucccuccgccccacucaggauguggauuucaa

SEQ ID NO: 388271 - RNA, 32 nt, Homo Sapiens
cuguugggagaauggaaagcagaaagggaagc

SEQ ID NO: 388272 - RNA, 32 nt, Homo Sapiens
uaucuuuggcuccaccuuauugcuccauucuc

SEQ ID NO: 388273 - RNA, 32 nt, Homo Sapiens
guuuuggcaagaccccaccuccacgggcucuc

SEQ ID NO: 388274 - RNA, 32 nt, Homo Sapiens
aauuuguacaauaguuugugaaauaucuuguu

SEQ ID NO: 388275 - RNA, 32 nt, Homo Sapiens
gccgagagaagcuguauucuggagaucagcuc

SEQ ID NO: 388276 - RNA, 32 nt, Homo Sapiens
ugaaaguguuccuggggugcugucucugaaga

SEQ ID NO: 388277 - RNA, 32 nt, Homo Sapiens
cccggcucccaccccuucccagccccagcccu

SEQ ID NO: 388278 - RNA, 32 nt, Homo Sapiens
aaagguucuuggaguugaaaauacaguaugau

SEQ ID NO: 388279 - RNA, 32 nt, Homo Sapiens
ugucccuucaccgcccucugguguccccucac

SEQ ID NO: 388280 - RNA, 32 nt, Homo Sapiens
aggacagacucuccucaccucaguugcugcug

SEQ ID NO: 388281 - RNA, 32 nt, Homo Sapiens
uuuagguucagcaguuacuuuuaacuaccuua

SEQ ID NO: 388282 - RNA, 32 nt, Homo Sapiens
ucuagcgacagccugaacgugccuucagagga

SEQ ID NO: 388283 - RNA, 32 nt, Homo Sapiens
gaacaccacuacuuuacccagacgccacaggu

SEQ ID NO: 388284 - RNA, 32 nt, Homo Sapiens
gaauagaggggaggugugcaggaaccagcaau

SEQ ID NO: 388285 - RNA, 32 nt, Homo Sapiens
guagaaaggggagggguggggcuaccagguag

SEQ ID NO: 388286 - RNA, 32 nt, Homo Sapiens
caggacuggccauacugccaccgcacacgugc

SEQ ID NO: 388287 - RNA, 32 nt, Homo Sapiens
agaguuugcguggcgggaacgcggcggcagug

SEQ ID NO: 388288 - RNA, 32 nt, Homo Sapiens
augguacccacucccacuuggaccucugagac

SEQ ID NO: 388289 - RNA, 30 nt, Homo Sapiens
uuccucuucugugcuguucugaagcuucua

SEQ ID NO: 388290 - RNA, 32 nt, Homo Sapiens
agacaacuuacucugggucucuaggcuuugga

SEQ ID NO: 388291 - RNA, 32 nt, Homo Sapiens
acagacguucccucgcggcccuggcaccucua

SEQ ID NO: 388292 - RNA, 30 nt, Homo Sapiens
uauaaauagcuaaugggggugguaggccua

SEQ ID NO: 388293 - RNA, 32 nt, Homo Sapiens
ggccccuuauuaccauguaucccacugauagg

SEQ ID NO: 388294 - RNA, 32 nt, Homo Sapiens
aucgcgggguggcgcgcaaaccuuggaaggca

SEQ ID NO: 388295 - RNA, 32 nt, Homo Sapiens
auuuugaauucuucccaaauggcugcuggauu

SEQ ID NO: 388296 - RNA, 31 nt, Homo Sapiens
cgauguggcagucaguaaccauaggugacua

SEQ ID NO: 388297 - RNA, 32 nt, Homo Sapiens
cacauacagaguugguugaggaugcuguuaac

SEQ ID NO: 388298 - RNA, 32 nt, Homo Sapiens
gcccccaaacaugggguaaaguugauuugccu

SEQ ID NO: 388299 - RNA, 32 nt, Homo Sapiens
ggagggaggggaggagcaggugggcuggacag

SEQ ID NO: 388300 - RNA, 32 nt, Homo Sapiens
aaaaaaaaaaaaacagaaguaagauaaauagc

SEQ ID NO: 388301 - RNA, 32 nt, Homo Sapiens
uagaaccucuggaggaggaggggggugccuug

SEQ ID NO: 388302 - RNA, 32 nt, Homo Sapiens
cuaauuuauaguuuaaauuuauuuguaaaaag

SEQ ID NO: 388303 - RNA, 32 nt, Homo Sapiens
ugcacaggggagaagagggguggcgcagaagg

SEQ ID NO: 388304 - RNA, 32 nt, Homo Sapiens
acuggccuaccccuuucuccagcccugacuaa

SEQ ID NO: 388305 - RNA, 32 nt, Homo Sapiens
cuucuuacauauauugauuaaugucuuauguc

SEQ ID NO: 388306 - RNA, 32 nt, Homo Sapiens
cacgcugcugucagcauguguuuucaaagugc

SEQ ID NO: 388307 - RNA, 32 nt, Homo Sapiens
aauuuaauugcauuuuaaagcauucuuugaua

SEQ ID NO: 388308 - RNA, 32 nt, Homo Sapiens
cacugcacuccagccugggcaauggagagagg

SEQ ID NO: 388309 - RNA, 32 nt, Homo Sapiens
ccuuccacuuucacagcuguccuucccuggcc

SEQ ID NO: 388310 - RNA, 32 nt, Homo Sapiens
uuuucucucuggagccccuccucccccggcug

SEQ ID NO: 388311 - RNA, 32 nt, Homo Sapiens
agcacacacuuacagagcacaaaugcaguaua

SEQ ID NO: 388312 - RNA, 32 nt, Homo Sapiens
gaggaugggaccagguuggaccacguggcauc

SEQ ID NO: 388313 - RNA, 32 nt, Homo Sapiens
acacauccccccgccuucucccucaaccuuuu

SEQ ID NO: 388314 - RNA, 32 nt, Homo Sapiens
gcuggcgccggccgaauccggcccgggaacca

SEQ ID NO: 388315 - RNA, 32 nt, Homo Sapiens
uuuuggauucagagaagagcucccuuaccagu

SEQ ID NO: 388316 - RNA, 32 nt, Homo Sapiens
caucaaggccucuggagggaaggcuaagcaua

SEQ ID NO: 388317 - RNA, 32 nt, Homo Sapiens
ggcuuccaaggccccaggucauccuguugaac

SEQ ID NO: 388318 - RNA, 32 nt, Homo Sapiens
agccucugcuuacuuaagucucuucucugaca

SEQ ID NO: 388319 - RNA, 32 nt, Homo Sapiens
aguggcacaugacggcaucccagucauaagag

SEQ ID NO: 388320 - RNA, 32 nt, Homo Sapiens
cucagcucucuccucauccaucaccaguggag

SEQ ID NO: 388321 - RNA, 32 nt, Homo Sapiens
cucccaggcgggaugccgagcuccucagggac

SEQ ID NO: 388322 - RNA, 32 nt, Homo Sapiens
agcaaaauugguuaaucuacaccuuaacucug

SEQ ID NO: 388323 - RNA, 32 nt, Homo Sapiens
aucaugaggaacaacauagauuccaugaucuu

SEQ ID NO: 388324 - RNA, 32 nt, Homo Sapiens
gccaggcccuugucggccccaccagugccucu

SEQ ID NO: 388325 - RNA, 32 nt, Homo Sapiens
gauccuugcucuugcagggcuggcauucccaa

SEQ ID NO: 388326 - RNA, 31 nt, Homo Sapiens
cuucgcgguucaguccuccuaacugacagcc

SEQ ID NO: 388327 - RNA, 32 nt, Homo Sapiens
aaacgcuuaaauauuucuaaaauauuaacuuc

SEQ ID NO: 388328 - RNA, 32 nt, Homo Sapiens
ggcggcuguggcggcgccuggcaggcuccgcc

SEQ ID NO: 388329 - RNA, 32 nt, Homo Sapiens
ccggccacguccccgcgccgggccucaggcuc

SEQ ID NO: 388330 - RNA, 32 nt, Homo Sapiens
aauaugaagaaccacaaaggauuuucucuuca

SEQ ID NO: 388331 - RNA, 32 nt, Homo Sapiens
cggaagccauuauccaauggcuccacagccug

SEQ ID NO: 388332 - RNA, 32 nt, Homo Sapiens
caggggccccccugguggggccccacggaccc

SEQ ID NO: 388333 - RNA, 32 nt, Homo Sapiens
cacagaaaggucggcuggcagcacuggccaag

SEQ ID NO: 388334 - RNA, 32 nt, Homo Sapiens
gugaucacaacuccaugagucagggccgagcc

SEQ ID NO: 388335 - RNA, 32 nt, Homo Sapiens
uacugggcugaggcgucuguggagagguggca

SEQ ID NO: 388336 - RNA, 32 nt, Homo Sapiens
auguugaguguuguuuccuucaauguuucugc

SEQ ID NO: 388337 - RNA, 32 nt, Homo Sapiens
cuguugguggagcggccgaucuauguaagggu

SEQ ID NO: 388338 - RNA, 32 nt, Homo Sapiens
aauugcuacuguacuugcuuugaaagauuacc

SEQ ID NO: 388339 - RNA, 32 nt, Homo Sapiens
aauacucaaaggaaauuggcuuuucuccugaa

SEQ ID NO: 388340 - RNA, 32 nt, Homo Sapiens
ucuaguauuuuuguuacuuuuaauauuugaug

SEQ ID NO: 388341 - RNA, 32 nt, Homo Sapiens
uuucugcuuuugcugcucuugaucccaccuuu

SEQ ID NO: 388342 - RNA, 32 nt, Homo Sapiens
guuaagugaaggaggccgccccugcccccacc

SEQ ID NO: 388343 - RNA, 32 nt, Homo Sapiens
gggcgcgcgccucauucgaggcgacgggcucc

SEQ ID NO: 388344 - RNA, 32 nt, Homo Sapiens
ccagguucaagcgauuuuccugccucagccuc

SEQ ID NO: 388345 - RNA, 32 nt, Homo Sapiens
agaagcaggcacuauuugauaaugggccagga

SEQ ID NO: 388346 - RNA, 32 nt, Homo Sapiens
agcggggcgcggcuaugggaacccgcgggccc

SEQ ID NO: 388347 - RNA, 32 nt, Homo Sapiens
cccagcccauucucucuccuguccaaccuaac

SEQ ID NO: 388348 - RNA, 27 nt, Homo Sapiens
aaugggcccuucuucacccugaugaug

SEQ ID NO: 388349 - RNA, 32 nt, Homo Sapiens
ggggaucucaggggcuguuugaggauauauuu

SEQ ID NO: 388350 - RNA, 32 nt, Homo Sapiens
gguauaacaacaaucccaucuuguugggagga

SEQ ID NO: 388351 - RNA, 32 nt, Homo Sapiens
gucagcgcuggagucggcuaggcggcuggaaa

SEQ ID NO: 388352 - RNA, 32 nt, Homo Sapiens
cacaugagaaaauuuuuguacuccaaauuuac

SEQ ID NO: 388353 - RNA, 32 nt, Homo Sapiens
ccgcaucagagguaugggaaugcagaggaccu

SEQ ID NO: 388354 - RNA, 32 nt, Homo Sapiens
uggcccauuccccucaccccagcccaagacgu

SEQ ID NO: 388355 - RNA, 32 nt, Homo Sapiens
ggagugaggcaguggcggcggcggcgguaagc

SEQ ID NO: 388356 - RNA, 32 nt, Homo Sapiens
cauuuuuuaagugaaaguauuuauugagcauc

SEQ ID NO: 388357 - RNA, 32 nt, Homo Sapiens
agaggguuucaccuuggaugaccucuagagaa

SEQ ID NO: 388358 - RNA, 32 nt, Homo Sapiens
ugaugaggccauaaacagaaacaaugugcuag

SEQ ID NO: 388359 - RNA, 32 nt, Homo Sapiens
cugaacuccuacccagguccccggcccccgcc

SEQ ID NO: 388360 - RNA, 32 nt, Homo Sapiens
auuaccugauaagggagagggaaauacaagga

SEQ ID NO: 388361 - RNA, 32 nt, Homo Sapiens
caggagcagauuuggggugcuaucuggggcug

SEQ ID NO: 388362 - RNA, 32 nt, Homo Sapiens
cagaaaucaacauuucugugaauuacuggagu

SEQ ID NO: 388363 - RNA, 32 nt, Homo Sapiens
ggagguuuuuaaaaucucauaauuaaaaaauu

SEQ ID NO: 388364 - RNA, 32 nt, Homo Sapiens
gugcaccagugcuuuccacacuugacaguggu

SEQ ID NO: 388365 - RNA, 32 nt, Homo Sapiens
cucugcuaaauauugcucaggcugguugcaaa

SEQ ID NO: 388366 - RNA, 32 nt, Homo Sapiens
uuuuuaguucaaugugauuguuuucuuuaaaa

SEQ ID NO: 388367 - RNA, 32 nt, Homo Sapiens
accauauagacgaggcacuuuggaaccacaag

SEQ ID NO: 388368 - RNA, 32 nt, Homo Sapiens
agugaggacaaaaucacauucugcauacuaac

SEQ ID NO: 388369 - RNA, 32 nt, Homo Sapiens
gacgucaucuuucugcggcgcgcggacacccg

SEQ ID NO: 388370 - RNA, 32 nt, Homo Sapiens
uguuuuuacaaguaauauacuuugaaacucuu

SEQ ID NO: 388371 - RNA, 32 nt, Homo Sapiens
cucgcucccagcugccuucucugcugggagcu

SEQ ID NO: 388372 - RNA, 32 nt, Homo Sapiens
cucccuccgcaguggaacccaggcuccugaua

SEQ ID NO: 388373 - RNA, 32 nt, Homo Sapiens
cuguuguugagcucaguaugucgugggaaucc

SEQ ID NO: 388374 - RNA, 32 nt, Homo Sapiens
uugcacaauaauauuucuuuauaacacuuaug

SEQ ID NO: 388375 - RNA, 32 nt, Homo Sapiens
cagcuagugucuaguguaugaaaguggaaaag

SEQ ID NO: 388376 - RNA, 32 nt, Homo Sapiens
aggugucacaacaugcaagaugggagaguuga

SEQ ID NO: 388377 - RNA, 32 nt, Homo Sapiens
uaggaaagaaacuaaacugaagaugaugaaga

SEQ ID NO: 388378 - RNA, 32 nt, Homo Sapiens
uguugaaaaugaaaucauuucaaugagaugac

SEQ ID NO: 388379 - RNA, 32 nt, Homo Sapiens
aagugugaagcuggacgugaugcaaaauaacc

SEQ ID NO: 388380 - RNA, 32 nt, Homo Sapiens
auuauagagucuuuugaagcaauuuuuugaga

SEQ ID NO: 388381 - RNA, 32 nt, Homo Sapiens
ccaggagcuagaaagaggcaaggaaggauucc

SEQ ID NO: 388382 - RNA, 32 nt, Homo Sapiens
ggccacagcccggacuccaucgacucccccgg

SEQ ID NO: 388383 - RNA, 32 nt, Homo Sapiens
ugguggagauauuuuuuuuucuuaagagaacu

SEQ ID NO: 388384 - RNA, 32 nt, Homo Sapiens
ggguuuaauaucuaugaagguaauaacucacc

SEQ ID NO: 388385 - RNA, 32 nt, Homo Sapiens
ggagguggaugagggaugaaaaaacuaccuau

SEQ ID NO: 388386 - RNA, 32 nt, Homo Sapiens
aauaugguauauaaaaguaacauguuuauaua

SEQ ID NO: 388387 - RNA, 32 nt, Homo Sapiens
gcacaaagaaagguggcucaaggucagaggca

SEQ ID NO: 388388 - RNA, 32 nt, Homo Sapiens
ucaaagcaguaugcgacacggggaaaagaugc

SEQ ID NO: 388389 - RNA, 32 nt, Homo Sapiens
ggccuccagcuggcagacggccccgaucccgc

SEQ ID NO: 388390 - RNA, 32 nt, Homo Sapiens
gccaguggcggcugguaucccgcggcggcucu

SEQ ID NO: 388391 - RNA, 32 nt, Homo Sapiens
ccuuagaccaucacaugccuccccucaaucac

SEQ ID NO: 388392 - RNA, 32 nt, Homo Sapiens
gguuuguagccaucuggccggucgcugggugc

SEQ ID NO: 388393 - RNA, 32 nt, Homo Sapiens
cacggugccggggcugcagguuguugagggcu

SEQ ID NO: 388394 - RNA, 32 nt, Homo Sapiens
uuuuucccuauuuauuucugugguuacugcuu

SEQ ID NO: 388395 - RNA, 32 nt, Homo Sapiens
ccauguuugucccacacucacucacuuuccua

SEQ ID NO: 388396 - RNA, 32 nt, Homo Sapiens
aucugucccucgugacaauuauaggaggaagg

SEQ ID NO: 388397 - RNA, 32 nt, Homo Sapiens
gaucucaagaugaguuauucuaggggacucau

SEQ ID NO: 388398 - RNA, 32 nt, Homo Sapiens
cuuacuuacacgguuccucaaaggcccuucuc

SEQ ID NO: 388399 - RNA, 32 nt, Homo Sapiens
agaucaagauaaaaaagauugaagaugcaucc

SEQ ID NO: 388400 - RNA, 32 nt, Homo Sapiens
acacaauaaaagguggcgcgugggagugugcc

SEQ ID NO: 388401 - RNA, 32 nt, Homo Sapiens
cuuauuucaaaaggaaggguggcuuugcauuu

SEQ ID NO: 388402 - RNA, 32 nt, Homo Sapiens
ccugggcucagccucgcgccccggugcccacc

SEQ ID NO: 388403 - RNA, 32 nt, Homo Sapiens
agaaaggcaaggaggaaaucagagcaggagcc

SEQ ID NO: 388404 - RNA, 32 nt, Homo Sapiens
agucgugguuugugcgcggccaggcgcuggag

SEQ ID NO: 388405 - RNA, 32 nt, Homo Sapiens
guagaagauauuacaagcuacuggaugcacug

SEQ ID NO: 388406 - RNA, 32 nt, Homo Sapiens
cccgcccucuccuggggugguggugggggcug

SEQ ID NO: 388407 - RNA, 32 nt, Homo Sapiens
cccuuuuuaaacaaugcugagcaggcccugag

SEQ ID NO: 388408 - RNA, 32 nt, Homo Sapiens
cagcuggucagucuuuguucaguguccagcuu

SEQ ID NO: 388409 - RNA, 32 nt, Homo Sapiens
cucuggggagcauacugugugcucuccccauc

SEQ ID NO: 388410 - RNA, 32 nt, Homo Sapiens
cgaggagaggccgccauggacugugugcuucu

SEQ ID NO: 388411 - RNA, 32 nt, Homo Sapiens
uuugagucuuuggagaaagugguuucauugua

SEQ ID NO: 388412 - RNA, 32 nt, Homo Sapiens
cgaacccaccuagaugucuccuccuccccagc

SEQ ID NO: 388413 - RNA, 32 nt, Homo Sapiens
cagaggcggcgguggcggcuacuaaggcggcg

SEQ ID NO: 388414 - RNA, 32 nt, Homo Sapiens
gucuuggcgggaggagcauggacacaggacca

SEQ ID NO: 388415 - RNA, 31 nt, Homo Sapiens
cccgugagggcgguuccucgagccugggggc

SEQ ID NO: 388416 - RNA, 32 nt, Homo Sapiens
ccguggccgcccgaggcccucccugccugggu

SEQ ID NO: 388417 - RNA, 32 nt, Homo Sapiens
uuuccaccugcuuucuccugggcccgcuuugc

SEQ ID NO: 388418 - RNA, 32 nt, Homo Sapiens
uggaucccauuguaggagagccaggcuacugc

SEQ ID NO: 388419 - RNA, 32 nt, Homo Sapiens
agagccgcgggguccugcccgugguuacuaug

SEQ ID NO: 388420 - RNA, 32 nt, Homo Sapiens
ucccgugggaaccagggcucacucugcacuuu

SEQ ID NO: 388421 - RNA, 32 nt, Homo Sapiens
agucgagcaggacgcagagagccccgggcugu

SEQ ID NO: 388422 - RNA, 32 nt, Homo Sapiens
auguaagucggaccugcccuucugccaugauu

SEQ ID NO: 388423 - RNA, 32 nt, Homo Sapiens
ggagcugccugccuguuugcuguguugaacuc

SEQ ID NO: 388424 - RNA, 32 nt, Homo Sapiens
caagccaggaggacaugggccuggacgacacg

SEQ ID NO: 388425 - RNA, 32 nt, Homo Sapiens
augagucuuugccggaggaaaagcagcucaag

SEQ ID NO: 388426 - RNA, 32 nt, Homo Sapiens
ccuuccuaagguuuccuuauccccugcggcag

SEQ ID NO: 388427 - RNA, 32 nt, Homo Sapiens
cccagcacauucacagcaguguuaaaauggcc

SEQ ID NO: 388428 - RNA, 32 nt, Homo Sapiens
cuuuucuuuuuacuucagaaauccaaacauua

SEQ ID NO: 388429 - RNA, 32 nt, Homo Sapiens
ugacacccuucuuuggcucaucuaccauguca

SEQ ID NO: 388430 - RNA, 32 nt, Homo Sapiens
auauguauuaaguuauacuaauguuucaauca

SEQ ID NO: 388431 - RNA, 32 nt, Homo Sapiens
cggaggcgugcguuugcuuuuacagauaucug

SEQ ID NO: 388432 - RNA, 32 nt, Homo Sapiens
ccaacuccugaacacgacacaauuuuauuauu

SEQ ID NO: 388433 - RNA, 32 nt, Homo Sapiens
gaucucuucuaaauauacaaggcaucuaccca

SEQ ID NO: 388434 - RNA, 32 nt, Homo Sapiens
cauggacuuuaaugagauaaugucuagaaaaa

SEQ ID NO: 388435 - RNA, 32 nt, Homo Sapiens
gggcccauguaccccacgcccaccuccacccc

SEQ ID NO: 388436 - RNA, 32 nt, Homo Sapiens
uaagaguaaaaagccaaccaacaaacacaucu

SEQ ID NO: 388437 - RNA, 32 nt, Homo Sapiens
auuguucauagaaauaaaaaacacaguuacuu

SEQ ID NO: 388438 - RNA, 32 nt, Homo Sapiens
acagucacauucaaaauagugacucuaaacaa

SEQ ID NO: 388439 - RNA, 32 nt, Homo Sapiens
aguuggggauaugauagucagcucaggcuuca

SEQ ID NO: 388440 - RNA, 32 nt, Homo Sapiens
agcgcggagguagcgggcgccugcgcaguaca

SEQ ID NO: 388441 - RNA, 32 nt, Homo Sapiens
uugcuuuauuuuuaacacuaauuaugggagca

SEQ ID NO: 388442 - RNA, 32 nt, Homo Sapiens
gaaguaugugguaauuuuuauagaaucauuca

SEQ ID NO: 388443 - RNA, 32 nt, Homo Sapiens
aaauuacaguagauuauauuaacaaaauacuu

SEQ ID NO: 388444 - RNA, 32 nt, Homo Sapiens
ucuaaguaagcaacagcaaggcuggucacagg

SEQ ID NO: 388445 - RNA, 32 nt, Homo Sapiens
gcaguaacaacaacaaaguuuauuugagagga

SEQ ID NO: 388446 - RNA, 32 nt, Homo Sapiens
cuccugcagagcuggggcuucuguggagaaua

SEQ ID NO: 388447 - RNA, 32 nt, Homo Sapiens
gcacaugucucauuuuaaaugacgcacaaacu

SEQ ID NO: 388448 - RNA, 32 nt, Homo Sapiens
ucagcuuccuucccugugccucuucugcauuu

SEQ ID NO: 388449 - RNA, 32 nt, Homo Sapiens
cucugcaggggcgggccagcccugcccacugc

SEQ ID NO: 388450 - RNA, 32 nt, Homo Sapiens
aguuggaaaggggacagagugacuacuggacu

SEQ ID NO: 388451 - RNA, 32 nt, Homo Sapiens
aauguagcuuaguggaauucuuaaauuauggg

SEQ ID NO: 388452 - RNA, 32 nt, Homo Sapiens
gaaugggugaggcugauguggaugucugugug

SEQ ID NO: 388453 - RNA, 32 nt, Homo Sapiens
acaacaacaacaacaacaaacccuuggggaau

SEQ ID NO: 388454 - RNA, 32 nt, Homo Sapiens
cuuccccaacagacuguaaauuucuugauggc

SEQ ID NO: 388455 - RNA, 32 nt, Homo Sapiens
ccaacuaauauuuggaauuuucauauaagugg

SEQ ID NO: 388456 - RNA, 32 nt, Homo Sapiens
guagagccgugguuggugacagcaugacgagc

SEQ ID NO: 388457 - RNA, 32 nt, Homo Sapiens
ggaugugagucucggcgggccaggguccuggc

SEQ ID NO: 388458 - RNA, 32 nt, Homo Sapiens
cuuauaggggaagcugcugugcaugucaaaaa

SEQ ID NO: 388459 - RNA, 32 nt, Homo Sapiens
auuaaaggccccaaguccauuuuaaggcaugg

SEQ ID NO: 388460 - RNA, 32 nt, Homo Sapiens
auuaauauaugucaaugaaaacacacuggugu

SEQ ID NO: 388461 - RNA, 32 nt, Homo Sapiens
guugggccagggugggaggauggguggucagg

SEQ ID NO: 388462 - RNA, 31 nt, Homo Sapiens
gacuuggagccccguaggagcaggaaaucca

SEQ ID NO: 388463 - RNA, 27 nt, Homo Sapiens
guaugcguugcugcugccccagcccuc

SEQ ID NO: 388464 - RNA, 32 nt, Homo Sapiens
gcaggaaaaucucaaagcucuaauggcagcau

SEQ ID NO: 388465 - RNA, 31 nt, Homo Sapiens
caccccucacggagcuccucggguccugccc

SEQ ID NO: 388466 - RNA, 32 nt, Homo Sapiens
gccuggccccccgacccuccccucgggagcag

SEQ ID NO: 388467 - RNA, 32 nt, Homo Sapiens
ucugaggagaugguacggggucugcacgccac

SEQ ID NO: 388468 - RNA, 32 nt, Homo Sapiens
gugugguuguggugcuguaugugaacucaugu

SEQ ID NO: 388469 - RNA, 32 nt, Homo Sapiens
ugcaaugcuggcccugcacgcuggggcuguug

SEQ ID NO: 388470 - RNA, 31 nt, Homo Sapiens
gcuggccugccgguuccacaggguacaguua

SEQ ID NO: 388471 - RNA, 32 nt, Homo Sapiens
acugucuuaaagauuaugcuagcuuuagaaca

SEQ ID NO: 388472 - RNA, 32 nt, Homo Sapiens
agaccaaaaguuuuagagcuacaggauuagac

SEQ ID NO: 388473 - RNA, 32 nt, Homo Sapiens
aaucacgugauacuucggcaggcguguguuac

SEQ ID NO: 388474 - RNA, 32 nt, Homo Sapiens
aggcauugaggacuuuccuuaccuguuuuucc

SEQ ID NO: 388475 - RNA, 32 nt, Homo Sapiens
caucaguagcuuaaguacuaguagcaaaaacu

SEQ ID NO: 388476 - RNA, 32 nt, Homo Sapiens
gcccgccgcccggaugggaccaccagagugcu

SEQ ID NO: 388477 - RNA, 32 nt, Homo Sapiens
agagagcaagguggcugaacuauagucuggaa

SEQ ID NO: 388478 - RNA, 32 nt, Homo Sapiens
gcaagauccaaauugauuuugggauauuaaaa

SEQ ID NO: 388479 - RNA, 32 nt, Homo Sapiens
agcacuuugacugcucuggaguaggguuguac

SEQ ID NO: 388480 - RNA, 32 nt, Homo Sapiens
accaucugcccccaugcccacucugauuguaa

SEQ ID NO: 388481 - RNA, 32 nt, Homo Sapiens
cuggagcccccuggacucuccucagcucacaa

SEQ ID NO: 388482 - RNA, 32 nt, Homo Sapiens
ccaucuuagacaugaggauauuggaacucaga

SEQ ID NO: 388483 - RNA, 32 nt, Homo Sapiens
uuugauuaagauuucuauuaacuuuuuggcug

SEQ ID NO: 388484 - RNA, 32 nt, Homo Sapiens
ggcaccaccugccugccugucgugccuuggac

SEQ ID NO: 388485 - RNA, 32 nt, Homo Sapiens
ggguguggccggggcggggccucaggggggca

SEQ ID NO: 388486 - RNA, 32 nt, Homo Sapiens
gugugggaccagcccugccaacuuccaucgug

SEQ ID NO: 388487 - RNA, 32 nt, Homo Sapiens
gcgggagugcgccagcgccgcgcguggggcug

SEQ ID NO: 388488 - RNA, 32 nt, Homo Sapiens
aaagucaaauguguauguucuaccuccaacgg

SEQ ID NO: 388489 - RNA, 32 nt, Homo Sapiens
cagaaagauaugacagaguuuuuuacugaucu

SEQ ID NO: 388490 - RNA, 32 nt, Homo Sapiens
agccauugaugaugaugacaaaacugauaaaa

SEQ ID NO: 388491 - RNA, 32 nt, Homo Sapiens
auugugaugaggaaacaaggcuggaagagcug

SEQ ID NO: 388492 - RNA, 32 nt, Homo Sapiens
ucauuaugaaaacuuauuuuagcuuuagacuc

SEQ ID NO: 388493 - RNA, 32 nt, Homo Sapiens
ggaagauuuccuuauugucauuuccuuccauc

SEQ ID NO: 388494 - RNA, 32 nt, Homo Sapiens
aaguggcuguaccugccgaugauccaaacgua

SEQ ID NO: 388495 - RNA, 32 nt, Homo Sapiens
ucaguucagaagacauacacaggagaaauugu

SEQ ID NO: 388496 - RNA, 32 nt, Homo Sapiens
agagacuuaaacuacaacaaacaauaugcuua

SEQ ID NO: 388497 - RNA, 32 nt, Homo Sapiens
agauuguacauuucuuacuacucuucuacugu

SEQ ID NO: 388498 - RNA, 32 nt, Homo Sapiens
ggcugugagagaagauuaaaacaauuacaacu

SEQ ID NO: 388499 - RNA, 32 nt, Homo Sapiens
guucaaaacacacacacacacacacacacaca

SEQ ID NO: 388500 - RNA, 32 nt, Homo Sapiens
acccccugccagcaaagagugacagucaccuc

SEQ ID NO: 388501 - RNA, 32 nt, Homo Sapiens
uuuauugauaaagcaguaauguuuacauuauu

SEQ ID NO: 388502 - RNA, 32 nt, Homo Sapiens
ggaaugaaaaggaacuaacuguugauacaaga

SEQ ID NO: 388503 - RNA, 32 nt, Homo Sapiens
ggcuuuuccgcggaggagcgcccgccggcauc

SEQ ID NO: 388504 - RNA, 32 nt, Homo Sapiens
cgugcagagaugauccuggaguguggaggcag

SEQ ID NO: 388505 - RNA, 32 nt, Homo Sapiens
ugugauauaggacucccaaauaaaaguaucag

SEQ ID NO: 388506 - RNA, 32 nt, Homo Sapiens
cuggauuuguccugggggguucucugguuugc

SEQ ID NO: 388507 - RNA, 32 nt, Homo Sapiens
cagaagcgacuuuugugccgggacuuaaaaag

SEQ ID NO: 388508 - RNA, 32 nt, Homo Sapiens
gcgugcuggguccgccgcggggcccgccucua

SEQ ID NO: 388509 - RNA, 32 nt, Homo Sapiens
uugcccagaaggaaaacgaagagccagauuga

SEQ ID NO: 388510 - RNA, 32 nt, Homo Sapiens
gggcugcuagcuugcuuucugcauuuucaaaa

SEQ ID NO: 388511 - RNA, 32 nt, Homo Sapiens
ccuccuaucuucugguuguuccuugccuucug

SEQ ID NO: 388512 - RNA, 32 nt, Homo Sapiens
ucucucucaaaauaaacuaaccuauucauauu

SEQ ID NO: 388513 - RNA, 32 nt, Homo Sapiens
ccuugcugcuguaucuccuggccucugcuuuu

SEQ ID NO: 388514 - RNA, 32 nt, Homo Sapiens
ugagacauuuuucugugucacugugggaaagc

SEQ ID NO: 388515 - RNA, 32 nt, Homo Sapiens
caagggaaaggggacugugcccuggaggcuca

SEQ ID NO: 388516 - RNA, 32 nt, Homo Sapiens
gccgcuuugugcuacaguagcagaguugaguc

SEQ ID NO: 388517 - RNA, 32 nt, Homo Sapiens
cccgggcuggccuggguucccugcccaugccc

SEQ ID NO: 388518 - RNA, 32 nt, Homo Sapiens
agucauacuagcccaaccaacauggcagcuaa

SEQ ID NO: 388519 - RNA, 32 nt, Homo Sapiens
gaacuacagcaaaaggcagagaauuacaggga

SEQ ID NO: 388520 - RNA, 32 nt, Homo Sapiens
aggauuccugggugggggugggcguggagggc

SEQ ID NO: 388521 - RNA, 32 nt, Homo Sapiens
aaugaaauaaaauaaauccacgcugacaaaaa

SEQ ID NO: 388522 - RNA, 32 nt, Homo Sapiens
ccuuaaucaaacugauauauauuguuauguau

SEQ ID NO: 388523 - RNA, 32 nt, Homo Sapiens
agagccccaagcccuuuagacccagagcccaa

SEQ ID NO: 388524 - RNA, 28 nt, Homo Sapiens
gcaucacuuacaggaccagagcaagcuc

SEQ ID NO: 388525 - RNA, 32 nt, Homo Sapiens
uggcuggauagaacugggacaaacacagaccc

SEQ ID NO: 388526 - RNA, 32 nt, Homo Sapiens
uuucuuuuuuaaaggggucuguucugcagugg

SEQ ID NO: 388527 - RNA, 32 nt, Homo Sapiens
aauccugaaaaacaaccguuauucucaacuga

SEQ ID NO: 388528 - RNA, 32 nt, Homo Sapiens
ugagcugagaucaugccacugcacuuuagccu

SEQ ID NO: 388529 - RNA, 32 nt, Homo Sapiens
gcuaguuaacugcagcaggagcauguccuuaa

SEQ ID NO: 388530 - RNA, 32 nt, Homo Sapiens
gccugaacccuggccugggccgagcaguggca

SEQ ID NO: 388531 - RNA, 32 nt, Homo Sapiens
aagaucagaauaaaaacugacuagaaauaccg

SEQ ID NO: 388532 - RNA, 32 nt, Homo Sapiens
uaucuuuuucuuucuuuuuuuuuugguguuau

SEQ ID NO: 388533 - RNA, 32 nt, Homo Sapiens
acaucuaguugccccagguuuuuggcuuucau

SEQ ID NO: 388534 - RNA, 32 nt, Homo Sapiens
caaaugugguucuaguugacuucuuuucacuu

SEQ ID NO: 388535 - RNA, 32 nt, Homo Sapiens
aguuaaaauguaugaaaagaaaacuuuccccu

SEQ ID NO: 388536 - RNA, 32 nt, Homo Sapiens
ucagcggugaauugcagugaucuuucagagaa

SEQ ID NO: 388537 - RNA, 30 nt, Homo Sapiens
gagggauccggaggcggcggagggagacgu

SEQ ID NO: 388538 - RNA, 32 nt, Homo Sapiens
acaguucuucaccuaacagcauauugcucuua

SEQ ID NO: 388539 - RNA, 32 nt, Homo Sapiens
cugcugcgaugccucugccucaucucacacug

SEQ ID NO: 388540 - RNA, 32 nt, Homo Sapiens
aauucugggacucgucaucuuacuucuugccc

SEQ ID NO: 388541 - RNA, 32 nt, Homo Sapiens
auucgcuggagucauucugauccaccauguag

SEQ ID NO: 388542 - RNA, 32 nt, Homo Sapiens
ggagccggaaacucagcccguggcagagggag

SEQ ID NO: 388543 - RNA, 32 nt, Homo Sapiens
acaaauuauuuuucucuuaccugucacuuucc

SEQ ID NO: 388544 - RNA, 32 nt, Homo Sapiens
agagcgcccucuagagggaaaagcuagaggca

SEQ ID NO: 388545 - RNA, 32 nt, Homo Sapiens
gggaaggagaugccucuuccuucccuucaaua

SEQ ID NO: 388546 - RNA, 32 nt, Homo Sapiens
auauauucuuauaaaaauguaaaaaagaaaaa

SEQ ID NO: 388547 - RNA, 32 nt, Homo Sapiens
acucuacuaauuuuuagauauucauuaauagg

SEQ ID NO: 388548 - RNA, 32 nt, Homo Sapiens
ugacuugccagccacaagcugcucuugcagag

SEQ ID NO: 388549 - RNA, 32 nt, Homo Sapiens
aagucacacuauguagccuguccucuuuagaa

SEQ ID NO: 388550 - RNA, 32 nt, Homo Sapiens
auuuuugcaagaaaaauaggaagauaugaaga

SEQ ID NO: 388551 - RNA, 32 nt, Homo Sapiens
aacccccacccuuccacacccuggacucuggc

SEQ ID NO: 388552 - RNA, 30 nt, Homo Sapiens
ccagaauuguuuucugcagaagcauggucu

SEQ ID NO: 388553 - RNA, 32 nt, Homo Sapiens
accuggaggccaccgagaggcuggggcugggg

SEQ ID NO: 388554 - RNA, 32 nt, Homo Sapiens
gugucuccacacgccagccacaggggagcccu

SEQ ID NO: 388555 - RNA, 32 nt, Homo Sapiens
gcuguaaaacuacaacuacuaccacauaaaca

SEQ ID NO: 388556 - RNA, 32 nt, Homo Sapiens
cucgucugggaccugggacagcagcugggaga

SEQ ID NO: 388557 - RNA, 29 nt, Homo Sapiens
caaagucggggacauagaugcagacaguu

SEQ ID NO: 388558 - RNA, 32 nt, Homo Sapiens
cuagcaaggggagauggauaugauagauuaca

SEQ ID NO: 388559 - RNA, 32 nt, Homo Sapiens
gaacaaggcagaccauccaaacgucuaacaga

SEQ ID NO: 388560 - RNA, 32 nt, Homo Sapiens
uuuugaaaagauuguuuccugugcuuuacgau

SEQ ID NO: 388561 - RNA, 32 nt, Homo Sapiens
gucaucuucuauuuguacagaaaugaaaauaa

SEQ ID NO: 388562 - RNA, 32 nt, Homo Sapiens
cuucccucccauucugccccagcuuccuccag

SEQ ID NO: 388563 - RNA, 32 nt, Homo Sapiens
ccccagccccgccucccuccccaccccacaau

SEQ ID NO: 388564 - RNA, 32 nt, Homo Sapiens
uaauuuggaucuuuuuguuuuugaaaaacaua

SEQ ID NO: 388565 - RNA, 32 nt, Homo Sapiens
cccguuucuacaaaaaacauuuaaaaauuagc

SEQ ID NO: 388566 - RNA, 32 nt, Homo Sapiens
cagcugugguggcagugagggagguuggguag

SEQ ID NO: 388567 - RNA, 32 nt, Homo Sapiens
aggauggccucaagugcccagcccuccuggaa

SEQ ID NO: 388568 - RNA, 32 nt, Homo Sapiens
aaaucucccucaucuucuagugccauucuccu

SEQ ID NO: 388569 - RNA, 32 nt, Homo Sapiens
cagccucauuuucuuucuguuccuucccgcuc

SEQ ID NO: 388570 - RNA, 32 nt, Homo Sapiens
guuuggcacuuguauuuaauucuucaccuuug

SEQ ID NO: 388571 - RNA, 32 nt, Homo Sapiens
ugcgcucacacagacacacacacacacacgua

SEQ ID NO: 388572 - RNA, 30 nt, Homo Sapiens
guuuccagcgugcagcacccgaggccagag

SEQ ID NO: 388573 - RNA, 32 nt, Homo Sapiens
gauaccacugaauggaacuggugcugugacuc

SEQ ID NO: 388574 - RNA, 32 nt, Homo Sapiens
gccccucccccuccccauggcaugcccagaac

SEQ ID NO: 388575 - RNA, 32 nt, Homo Sapiens
gaucacaaaaauguauuuuauaaaauguucug

SEQ ID NO: 388576 - RNA, 32 nt, Homo Sapiens
cugucugccucgguaccuguuacugcugcuac

SEQ ID NO: 388577 - RNA, 32 nt, Homo Sapiens
accucagauaccuguugucacucuucacaggu

SEQ ID NO: 388578 - RNA, 32 nt, Homo Sapiens
uuucauggucugaucuuaaguuguuugaaaaa

SEQ ID NO: 388579 - RNA, 32 nt, Homo Sapiens
aaguuugcuuccccuuccacaaugauuguaag

SEQ ID NO: 388580 - RNA, 32 nt, Homo Sapiens
gccgagaguggaucgcugggcugggcuaacgg

SEQ ID NO: 388581 - RNA, 30 nt, Homo Sapiens
cagagaugccugggaaaagagaauuggaug

SEQ ID NO: 388582 - RNA, 32 nt, Homo Sapiens
aucuucccaagcccuaaaaugcucaaauccug

SEQ ID NO: 388583 - RNA, 32 nt, Homo Sapiens
cucaugccucuugcaacgugccgaagugucag

SEQ ID NO: 388584 - RNA, 32 nt, Homo Sapiens
gaaauagaugaaaaaauuaaugaaaugaaauc

SEQ ID NO: 388585 - RNA, 32 nt, Homo Sapiens
gaggcgccuuucaagaggcgccuuucauggaa

SEQ ID NO: 388586 - RNA, 32 nt, Homo Sapiens
caagcaauauggaagcaaccagcaaauuaacu

SEQ ID NO: 388587 - RNA, 32 nt, Homo Sapiens
uuacagcuauuaaacuaacaaaggagaucaaa

SEQ ID NO: 388588 - RNA, 32 nt, Homo Sapiens
cccgcccggcuaggcgcagagaggcggccucc

SEQ ID NO: 388589 - RNA, 32 nt, Homo Sapiens
gggugugcgacgucacggaagaauaaagacgu

SEQ ID NO: 388590 - RNA, 32 nt, Homo Sapiens
uccuacuguacccccaagagccugcagaccag

SEQ ID NO: 388591 - RNA, 32 nt, Homo Sapiens
guuuuugcaauaaauguuuaaaauauuucaau

SEQ ID NO: 388592 - RNA, 32 nt, Homo Sapiens
caauuauagacaauuugcccuaucauuuauuu

SEQ ID NO: 388593 - RNA, 32 nt, Homo Sapiens
aauucccccuuugaaaguggguucuuugaacu

SEQ ID NO: 388594 - RNA, 32 nt, Homo Sapiens
aaugguccaugagcggaaggugaggcaccuga

SEQ ID NO: 388595 - RNA, 32 nt, Homo Sapiens
cugcugcugccugccuggacuugccccugcca

SEQ ID NO: 388596 - RNA, 32 nt, Homo Sapiens
ugcgccagaguccgcgcgauggagccccggcc

SEQ ID NO: 388597 - RNA, 28 nt, Homo Sapiens
gagaugcucccucuccccucaugcuccc

SEQ ID NO: 388598 - RNA, 32 nt, Homo Sapiens
uaccauagaccauauauagucucacauugaua

SEQ ID NO: 388599 - RNA, 32 nt, Homo Sapiens
guauguugcauucuuucccccaucaugaaaaa

SEQ ID NO: 388600 - RNA, 32 nt, Homo Sapiens
uuuguggauaaaacuuucaaaagcaauuuaag

SEQ ID NO: 388601 - RNA, 32 nt, Homo Sapiens
uccauaguuuggaaaauaaaaaucaugucauc

SEQ ID NO: 388602 - RNA, 32 nt, Homo Sapiens
auugcucggcccggggaguuucgcccccugcc

SEQ ID NO: 388603 - RNA, 32 nt, Homo Sapiens
cucuuuucucuguacauagugaagcccguaug

SEQ ID NO: 388604 - RNA, 32 nt, Homo Sapiens
cccaccucccuuuuccucucugggugucccuc

SEQ ID NO: 388605 - RNA, 32 nt, Homo Sapiens
aggccaaucugugggcaagggagguggggagu

SEQ ID NO: 388606 - RNA, 32 nt, Homo Sapiens
aguguuuucuccaucagauacuccaugaaagg

SEQ ID NO: 388607 - RNA, 32 nt, Homo Sapiens
aacuggugacauucuacuauugaauuauguac

SEQ ID NO: 388608 - RNA, 32 nt, Homo Sapiens
ugagauacauacuaugaaaugaagauagacac

SEQ ID NO: 388609 - RNA, 32 nt, Homo Sapiens
uuauauuuauugacaugucaauuaaaaagaug

SEQ ID NO: 388610 - RNA, 32 nt, Homo Sapiens
caguacauuuuugucuuuaucucaaguauaua

SEQ ID NO: 388611 - RNA, 32 nt, Homo Sapiens
gacacacagcuauauuuugaaaaauucacucu

SEQ ID NO: 388612 - RNA, 32 nt, Homo Sapiens
uaauaugaauaaggauggauaggccgggcgug

SEQ ID NO: 388613 - RNA, 32 nt, Homo Sapiens
ucggauuccuuccugucagcugugacccauuu

SEQ ID NO: 388614 - RNA, 32 nt, Homo Sapiens
ggcacuugcaggagaugaccaagauggccagc

SEQ ID NO: 388615 - RNA, 32 nt, Homo Sapiens
uugacagaugagaaaacagaagccugcaaagg

SEQ ID NO: 388616 - RNA, 32 nt, Homo Sapiens
cuggccaccccuccccaguacaggggugcugc

SEQ ID NO: 388617 - RNA, 32 nt, Homo Sapiens
ugaguaggucagucuaggaagaaagagaaagu

SEQ ID NO: 388618 - RNA, 31 nt, Homo Sapiens
cuuuuacaagagguaugaacauuuguagggu

SEQ ID NO: 388619 - RNA, 32 nt, Homo Sapiens
ggaggugacagccccaggauuggcggccaggg

SEQ ID NO: 388620 - RNA, 32 nt, Homo Sapiens
aaauuucuguuguuaagccguccacuguggga

SEQ ID NO: 388621 - RNA, 32 nt, Homo Sapiens
uuugaaucuuggaaaacuaguuuuauuauauu

SEQ ID NO: 388622 - RNA, 32 nt, Homo Sapiens
cagcagcccccuccuccuggcugggaagaaug

SEQ ID NO: 388623 - RNA, 32 nt, Homo Sapiens
cugcacacauucugcccuuaauccaaguguug

SEQ ID NO: 388624 - RNA, 32 nt, Homo Sapiens
ugugccuggcauugcacccuggcuucugugcc

SEQ ID NO: 388625 - RNA, 32 nt, Homo Sapiens
auuaaauaauuguguauauacauccuagcuac

SEQ ID NO: 388626 - RNA, 32 nt, Homo Sapiens
aggggucugugccucuccucauuccccgcucu

SEQ ID NO: 388627 - RNA, 32 nt, Homo Sapiens
cuuggugaggaguuaaccagguccugugguuu

SEQ ID NO: 388628 - RNA, 32 nt, Homo Sapiens
cugcagaaacaaaaaauuacaguguuuucuag

SEQ ID NO: 388629 - RNA, 32 nt, Homo Sapiens
ucacagaugcaucaaaagaagauuaaugguuu

SEQ ID NO: 388630 - RNA, 32 nt, Homo Sapiens
gcgggggacugcugggggcggggcuugguggu

SEQ ID NO: 388631 - RNA, 32 nt, Homo Sapiens
caggcgcaguucgcgggacccgggccaugggc

SEQ ID NO: 388632 - RNA, 32 nt, Homo Sapiens
caagugaaaauauuuugcuauaacuuuaaaau

SEQ ID NO: 388633 - RNA, 32 nt, Homo Sapiens
ccgaagcguggcggccacagacuguggguacc

SEQ ID NO: 388634 - RNA, 32 nt, Homo Sapiens
aauccuaauaauauagauacuaguuaaaggcu

SEQ ID NO: 388635 - RNA, 32 nt, Homo Sapiens
ccugcuugucaucuuuagguccugcugccccu

SEQ ID NO: 388636 - RNA, 32 nt, Homo Sapiens
auuuuccugccaggcaugguggcccacgcacu

SEQ ID NO: 388637 - RNA, 32 nt, Homo Sapiens
agaagcaucaagucucuuucuuaccaaagucu

SEQ ID NO: 388638 - RNA, 32 nt, Homo Sapiens
ugcugucagagguacaggagcugggagagucc

SEQ ID NO: 388639 - RNA, 32 nt, Homo Sapiens
cuuuccaaguacccucccagggauagccgggu

SEQ ID NO: 388640 - RNA, 32 nt, Homo Sapiens
cccauuucaaggauccuuuugucuuacuauaa

SEQ ID NO: 388641 - RNA, 32 nt, Homo Sapiens
gacagauuaugaaaaagaauuauuggaaaaaa

SEQ ID NO: 388642 - RNA, 32 nt, Homo Sapiens
aggugccuguuguucacacuuaagggaaguuu

SEQ ID NO: 388643 - RNA, 32 nt, Homo Sapiens
uuguuuuacccauugucuuuuuaaauuuuuua

SEQ ID NO: 388644 - RNA, 32 nt, Homo Sapiens
cugagcuuaugaacacccccacagguagaagu

SEQ ID NO: 388645 - RNA, 32 nt, Homo Sapiens
ucccgugcaccccccaggacccuggucucauc

SEQ ID NO: 388646 - RNA, 32 nt, Homo Sapiens
gaaagacaggaauggaggaaaaccgcagauug

SEQ ID NO: 388647 - RNA, 32 nt, Homo Sapiens
acagagccaggcccggcccucccgcccccgac

SEQ ID NO: 388648 - RNA, 32 nt, Homo Sapiens
gcgggccccccagcacccgggaggccgagcug

SEQ ID NO: 388649 - RNA, 31 nt, Homo Sapiens
ggcgcugcggcguucacuccccgcgcagccu

SEQ ID NO: 388650 - RNA, 32 nt, Homo Sapiens
gggccaaaaaauacuuucauaacacuuaagac

SEQ ID NO: 388651 - RNA, 31 nt, Homo Sapiens
agcggucuccccagccugcccugcucaggcc

SEQ ID NO: 388652 - RNA, 32 nt, Homo Sapiens
cuucacagaauuuaagcaagaaauauuuuaau

SEQ ID NO: 388653 - RNA, 32 nt, Homo Sapiens
cucugcacacaggcgauggccuuggagacacc

SEQ ID NO: 388654 - RNA, 32 nt, Homo Sapiens
cagccugggcgacagagccagacccugucuca

SEQ ID NO: 388655 - RNA, 32 nt, Homo Sapiens
ggaucuagaugaugaugaacaugauuaugaag

SEQ ID NO: 388656 - RNA, 32 nt, Homo Sapiens
gaaaagguacaaaguccucagugggcuuagaa

SEQ ID NO: 388657 - RNA, 32 nt, Homo Sapiens
uuuucuauuuccccaguacuuuuagccaaccu

SEQ ID NO: 388658 - RNA, 32 nt, Homo Sapiens
cugcuugaacaaaugggagggaaguugucaau

SEQ ID NO: 388659 - RNA, 32 nt, Homo Sapiens
cuuggccccucuauuuugauuccugccuuucc

SEQ ID NO: 388660 - RNA, 32 nt, Homo Sapiens
gccaggcgcgcgcgucgcugcugcugcugcgg

SEQ ID NO: 388661 - RNA, 32 nt, Homo Sapiens
uggugcucucccacccaggggcccugggugug

SEQ ID NO: 388662 - RNA, 32 nt, Homo Sapiens
uaagagauccugaaaccucugucauggaaaag

SEQ ID NO: 388663 - RNA, 32 nt, Homo Sapiens
aaaagaagugccuuuaauuugcuacugucauu

SEQ ID NO: 388664 - RNA, 32 nt, Homo Sapiens
cucccaguccccagcccuucacauuuuuuaug

SEQ ID NO: 388665 - RNA, 32 nt, Homo Sapiens
cacuggugaacagugucugugggcugcugugg

SEQ ID NO: 388666 - RNA, 32 nt, Homo Sapiens
cgcuccugcgccccguuugccuccagcacucg

SEQ ID NO: 388667 - RNA, 32 nt, Homo Sapiens
caggggagggcgcuguggagcggcugucgccc

SEQ ID NO: 388668 - RNA, 31 nt, Homo Sapiens
acccgggcaggcccaucucagaauuaacgcu

SEQ ID NO: 388669 - RNA, 32 nt, Homo Sapiens
gccagaguccaguugacacuuacuuugacaaa

SEQ ID NO: 388670 - RNA, 32 nt, Homo Sapiens
aagcaggaagcaguugacaagacacauccuca

SEQ ID NO: 388671 - RNA, 32 nt, Homo Sapiens
cugaaaaaccaccaggaaaacacuaagaagau

SEQ ID NO: 388672 - RNA, 32 nt, Homo Sapiens
cccauuccggcucccacccgacgcugcuuuug

SEQ ID NO: 388673 - RNA, 32 nt, Homo Sapiens
ccaccccucucgccuggugcugucccaggccc

SEQ ID NO: 388674 - RNA, 32 nt, Homo Sapiens
caugccucauuucuaggaaauaaaagauagag

SEQ ID NO: 388675 - RNA, 32 nt, Homo Sapiens
ccuguguuugcccuuccagcagugacccuccc

SEQ ID NO: 388676 - RNA, 32 nt, Homo Sapiens
ucccgugucuggacuuucuccuccacccucuu

SEQ ID NO: 388677 - RNA, 32 nt, Homo Sapiens
uaaaacaugauuaucuuaauuccugugaagug

SEQ ID NO: 388678 - RNA, 32 nt, Homo Sapiens
uagguaaaucauauuagcuguauuguauugug

SEQ ID NO: 388679 - RNA, 32 nt, Homo Sapiens
gguuuagauugugguuguuuguuuugcuucua

SEQ ID NO: 388680 - RNA, 32 nt, Homo Sapiens
guguauuuucuuuaccuccaaggaaagaacua

SEQ ID NO: 388681 - RNA, 32 nt, Homo Sapiens
aucauuuuucuagagcagagucuuaaaaucag

SEQ ID NO: 388682 - RNA, 32 nt, Homo Sapiens
uccccuuccccucccccuccccaacucagauc

SEQ ID NO: 388683 - RNA, 32 nt, Homo Sapiens
gaaccgagcccccagacacgcagucacagggc

SEQ ID NO: 388684 - RNA, 32 nt, Homo Sapiens
aauaauuauaaacuuuuguaauuuauaagugc

SEQ ID NO: 388685 - RNA, 32 nt, Homo Sapiens
uuuuuggacaccuuuacuaacucugguuuaau

SEQ ID NO: 388686 - RNA, 32 nt, Homo Sapiens
gaaacaggaaauguggccgggaagcagaguuc

SEQ ID NO: 388687 - RNA, 32 nt, Homo Sapiens
guuggcuccuaaauuagacaauccauucucuu

SEQ ID NO: 388688 - RNA, 32 nt, Homo Sapiens
gcugccuuuuuuuuuucuugguacacauuuaa

SEQ ID NO: 388689 - RNA, 32 nt, Homo Sapiens
gucgcggugcggggggagggccgcccggcagu

SEQ ID NO: 388690 - RNA, 32 nt, Homo Sapiens
uggcuuuuuuucuauuuguuuaauaauccuug

SEQ ID NO: 388691 - RNA, 32 nt, Homo Sapiens
ugcagauguacuucuucagugugauucuucag

SEQ ID NO: 388692 - RNA, 32 nt, Homo Sapiens
ugucccugucucccugcccauuuccuaugcau

SEQ ID NO: 388693 - RNA, 32 nt, Homo Sapiens
uucagaaaacaucaaaacacugcagcaguucc

SEQ ID NO: 388694 - RNA, 32 nt, Homo Sapiens
cccuguuuuccagcugcagaugcugacccucc

SEQ ID NO: 388695 - RNA, 32 nt, Homo Sapiens
cuggagagaaaccuuacaagugcaaugagugu

SEQ ID NO: 388696 - RNA, 32 nt, Homo Sapiens
ugcccauccaguuuucuauauuucauagucaa

SEQ ID NO: 388697 - RNA, 32 nt, Homo Sapiens
gugcccuccggauaucuguccggcgccuugcu

SEQ ID NO: 388698 - RNA, 32 nt, Homo Sapiens
cuuucaugagagagacuauaagaagaagggca

SEQ ID NO: 388699 - RNA, 32 nt, Homo Sapiens
caauuacauuggucagcaacacugaagaauua

SEQ ID NO: 388700 - RNA, 32 nt, Homo Sapiens
gccauuugcuuuugauuuuacuggcucauagg

SEQ ID NO: 388701 - RNA, 32 nt, Homo Sapiens
acaagucuggaaagaacccugcccuuggagag

SEQ ID NO: 388702 - RNA, 32 nt, Homo Sapiens
uguguauuuuuaauuuuuuucuuaaauuaaca

SEQ ID NO: 388703 - RNA, 32 nt, Homo Sapiens
ggccgccgcucccgucccgacggcggcuuccc

SEQ ID NO: 388704 - RNA, 32 nt, Homo Sapiens
agucaacaaaaauugguuaaaaacaauauaug

SEQ ID NO: 388705 - RNA, 32 nt, Homo Sapiens
ccaaauuucuacagccucuuuccucuucucau

SEQ ID NO: 388706 - RNA, 32 nt, Homo Sapiens
accuuuuuguauauuucuaauauggagugaua

SEQ ID NO: 388707 - RNA, 32 nt, Homo Sapiens
ucuggucuucccuuucuggcuucuaggacauc

SEQ ID NO: 388708 - RNA, 32 nt, Homo Sapiens
uggcuccuugcacagcagcugcacgcgccgug

SEQ ID NO: 388709 - RNA, 32 nt, Homo Sapiens
cuccugcacugacuccugaggacuuuugucug

SEQ ID NO: 388710 - RNA, 32 nt, Homo Sapiens
ugggccguaauuguugaugaggucuuggagcc

SEQ ID NO: 388711 - RNA, 32 nt, Homo Sapiens
gucagaauauuuuugguuuuaaacuuucuuau

SEQ ID NO: 388712 - RNA, 32 nt, Homo Sapiens
aagacaggauugcauuuaauagauaaaacguu

SEQ ID NO: 388713 - RNA, 32 nt, Homo Sapiens
ucggauggagacgggcgcuuuucgacgagaua

SEQ ID NO: 388714 - RNA, 32 nt, Homo Sapiens
auuuugccauuaaauaggugucuuucacucuu

SEQ ID NO: 388715 - RNA, 32 nt, Homo Sapiens
gguugagaggggcaagaguucuguggagagag

SEQ ID NO: 388716 - RNA, 32 nt, Homo Sapiens
auggaaaggugcaaaaaucuaucaccagcaac

SEQ ID NO: 388717 - RNA, 32 nt, Homo Sapiens
guaaucuuaccaaucauagauaaucacuguca

SEQ ID NO: 388718 - RNA, 32 nt, Homo Sapiens
gucugcccaaccccuagacaccccuuaucucc

SEQ ID NO: 388719 - RNA, 32 nt, Homo Sapiens
ucaaccagugaugauuaaacaaaagaaaaacc

SEQ ID NO: 388720 - RNA, 32 nt, Homo Sapiens
gaccucaagugauccgcccacuucggucuccc

SEQ ID NO: 388721 - RNA, 32 nt, Homo Sapiens
gggcggcucggcggucagcugccgcccccaca

SEQ ID NO: 388722 - RNA, 32 nt, Homo Sapiens
ggggacccauucuucccaggcucccagcuggu

SEQ ID NO: 388723 - RNA, 32 nt, Homo Sapiens
ugaugcaccacguguuuagacacagcacaguc

SEQ ID NO: 388724 - RNA, 32 nt, Homo Sapiens
uggagguggaccggcggcuggagcggcugagc

SEQ ID NO: 388725 - RNA, 32 nt, Homo Sapiens
ccuugucagcuacuccucuccugggcaauauu

SEQ ID NO: 388726 - RNA, 32 nt, Homo Sapiens
guggaacgccuggcuuuccccggccaccccag

SEQ ID NO: 388727 - RNA, 32 nt, Homo Sapiens
gaaaccccaucucuacuaaaaauagaaaaauu

SEQ ID NO: 388728 - RNA, 32 nt, Homo Sapiens
acggggccuggguggggggugcgggugugggu

SEQ ID NO: 388729 - RNA, 32 nt, Homo Sapiens
cucaacuccugccaagauguccugccagcaga

SEQ ID NO: 388730 - RNA, 32 nt, Homo Sapiens
cugaacccccuccuggggagccaggcucacag

SEQ ID NO: 388731 - RNA, 32 nt, Homo Sapiens
gggucagaggagacagcagagaaagauucaug

SEQ ID NO: 388732 - RNA, 32 nt, Homo Sapiens
aggucauguuuuuauugcuugcuaauccgagg

SEQ ID NO: 388733 - RNA, 32 nt, Homo Sapiens
ccauuuucgcgcccggccgcaggggcucuugg

SEQ ID NO: 388734 - RNA, 31 nt, Homo Sapiens
ucccuagugaugcugcgagugcuguuggucc

SEQ ID NO: 388735 - RNA, 32 nt, Homo Sapiens
uaauuuuuuuuguauuuuuuuaguagagaugg

SEQ ID NO: 388736 - RNA, 32 nt, Homo Sapiens
ucuaugagaaugaguuuguagcuguuucaaau

SEQ ID NO: 388737 - RNA, 32 nt, Homo Sapiens
uugcuaaugauaguuauucuauaaucuccaca

SEQ ID NO: 388738 - RNA, 32 nt, Homo Sapiens
caugugcacggccagcacauucauuuucuaua

SEQ ID NO: 388739 - RNA, 32 nt, Homo Sapiens
ggaaauuuuccacaucuuucaguguuugaacu

SEQ ID NO: 388740 - RNA, 32 nt, Homo Sapiens
uugucucuacauuucuuuaucauuccaguggg

SEQ ID NO: 388741 - RNA, 32 nt, Homo Sapiens
gcggguuccgccuuugcagugcccuccacccu

SEQ ID NO: 388742 - RNA, 32 nt, Homo Sapiens
aucuugccauuugaaucagggucuccaguuuc

SEQ ID NO: 388743 - RNA, 32 nt, Homo Sapiens
uccuccaaaaggagagugcaucugagacugau

SEQ ID NO: 388744 - RNA, 32 nt, Homo Sapiens
agugcugggguuacaggcgugugucacugugc

SEQ ID NO: 388745 - RNA, 32 nt, Homo Sapiens
aggaccgagccggcuuuccccucccccagagc

SEQ ID NO: 388746 - RNA, 32 nt, Homo Sapiens
gcggcacccaggcccaguggcaccauuuccca

SEQ ID NO: 388747 - RNA, 28 nt, Homo Sapiens
agacaaugaguaaauauuauaaaaucug

SEQ ID NO: 388748 - RNA, 32 nt, Homo Sapiens
ccaaaacaaaacaaaacagguugcaaguaaau

SEQ ID NO: 388749 - RNA, 32 nt, Homo Sapiens
cuuggagggcagaccuaggagccccucugacc

SEQ ID NO: 388750 - RNA, 32 nt, Homo Sapiens
agguggaggcgaccgagugcugagaggaaccu

SEQ ID NO: 388751 - RNA, 32 nt, Homo Sapiens
ucugagugcucuaugauaaaucaguugcaucu

SEQ ID NO: 388752 - RNA, 32 nt, Homo Sapiens
ggcgcagacuucaccuucuggaccuucuccua

SEQ ID NO: 388753 - RNA, 32 nt, Homo Sapiens
ucuuuuagagaaauaaagauugucggcagaaa

SEQ ID NO: 388754 - RNA, 32 nt, Homo Sapiens
cgaccgucgucuccgcggcagcagcgcgggcc

SEQ ID NO: 388755 - RNA, 32 nt, Homo Sapiens
acacuuggcuaauuuuuguauuauuaguagag

SEQ ID NO: 388756 - RNA, 32 nt, Homo Sapiens
cagcgccgccccacuucagcccggcccgcgcc

SEQ ID NO: 388757 - RNA, 32 nt, Homo Sapiens
agugacaaauggcccucaaaugucugguuuca

SEQ ID NO: 388758 - RNA, 32 nt, Homo Sapiens
cgcugcuccgcggccgccuuggccgagcgccg

SEQ ID NO: 388759 - RNA, 32 nt, Homo Sapiens
ccagggcagggagagcggcagcggggcugcgc

SEQ ID NO: 388760 - RNA, 29 nt, Homo Sapiens
aaguauggggucugcuggcuugucgcggc

SEQ ID NO: 388761 - RNA, 32 nt, Homo Sapiens
uugacgacugauuuaaauaaaauauuugcuuc

SEQ ID NO: 388762 - RNA, 32 nt, Homo Sapiens
auauguacaaauaauauugccuugauguuucu

SEQ ID NO: 388763 - RNA, 32 nt, Homo Sapiens
uccgagucauggucucgggccuguaggguggg

SEQ ID NO: 388764 - RNA, 32 nt, Homo Sapiens
auguaacagaaaaggucagaaaauauuaagca

SEQ ID NO: 388765 - RNA, 32 nt, Homo Sapiens
acgagaucaucucuucuagaaauaucaaccuu

SEQ ID NO: 388766 - RNA, 32 nt, Homo Sapiens
ccuaauguuuaguuauguugaucaucuuuuca

SEQ ID NO: 388767 - RNA, 32 nt, Homo Sapiens
cggaagccggccugggggucgcgucgggagcc

SEQ ID NO: 388768 - RNA, 31 nt, Homo Sapiens
cggcggcagcgcaacaacuagaaccgugaga

SEQ ID NO: 388769 - RNA, 32 nt, Homo Sapiens
cgguucuuuaguaaagauuaauaagggauccc

SEQ ID NO: 388770 - RNA, 32 nt, Homo Sapiens
aacccagccgaggggacggugcauaacucucc

SEQ ID NO: 388771 - RNA, 32 nt, Homo Sapiens
cgggugaaaauggggaugacagcuagaggcug

SEQ ID NO: 388772 - RNA, 32 nt, Homo Sapiens
uccaggagacccagcuggaaaccuggcuucuc

SEQ ID NO: 388773 - RNA, 32 nt, Homo Sapiens
auacguacacugaguuccugucuacccaagag

SEQ ID NO: 388774 - RNA, 32 nt, Homo Sapiens
ggagacucauugccggagcugcacagccugug

SEQ ID NO: 388775 - RNA, 32 nt, Homo Sapiens
cacaaguucagcaucaccugcuuugaaauuag

SEQ ID NO: 388776 - RNA, 32 nt, Homo Sapiens
acuucagcugauugcagagauauaaugauuac

SEQ ID NO: 388777 - RNA, 32 nt, Homo Sapiens
aauuuuauuucugugaaacuaauuggcucaua

SEQ ID NO: 388778 - RNA, 32 nt, Homo Sapiens
caggucucagcgcuccucccccugcuccgcuc

SEQ ID NO: 388779 - RNA, 32 nt, Homo Sapiens
ucucacuuuccccaucuguaaaacaggguuug

SEQ ID NO: 388780 - RNA, 32 nt, Homo Sapiens
cacaggcgggcccagaccggcuucucggcuug

SEQ ID NO: 388781 - RNA, 32 nt, Homo Sapiens
agcucugcauucaggcagcugcaacauuccag

SEQ ID NO: 388782 - RNA, 32 nt, Homo Sapiens
cucugaugagagagugcugagaaggacaccuc

SEQ ID NO: 388783 - RNA, 32 nt, Homo Sapiens
aaagaaauggcgcuuccuccccgcuuccccca

SEQ ID NO: 388784 - RNA, 32 nt, Homo Sapiens
accuucaacccuccccgccaaggccuggcucu

SEQ ID NO: 388785 - RNA, 32 nt, Homo Sapiens
cuccuacgugggagcgggaggggcgggguccc

SEQ ID NO: 388786 - RNA, 32 nt, Homo Sapiens
uugugcaauggcaaaccuagugccuucuugga

SEQ ID NO: 388787 - RNA, 32 nt, Homo Sapiens
ucagaagauugugaagaggccggcuucaacaa

SEQ ID NO: 388788 - RNA, 32 nt, Homo Sapiens
ggcgaggcucugggcuucggcucccgcccggc

SEQ ID NO: 388789 - RNA, 32 nt, Homo Sapiens
gcuaccugaggaggaggcagggcagaagggca

SEQ ID NO: 388790 - RNA, 32 nt, Homo Sapiens
uaggcagcugggggcgggcugcggccgcugau

SEQ ID NO: 388791 - RNA, 32 nt, Homo Sapiens
uggcgcuugagcccgcaagggccacguuggau

SEQ ID NO: 388792 - RNA, 30 nt, Homo Sapiens
uuggcgcccgcgcagcccucuuuggacaca

SEQ ID NO: 388793 - RNA, 32 nt, Homo Sapiens
aguguauaacuaaacuaacaagauuaaauauc

SEQ ID NO: 388794 - RNA, 32 nt, Homo Sapiens
ggugaagggaagagccugugccugcugcgugg

SEQ ID NO: 388795 - RNA, 32 nt, Homo Sapiens
uccuugaagcauuuaaauuugcuagugaugaa

SEQ ID NO: 388796 - RNA, 32 nt, Homo Sapiens
auuagacaaaaauauagaauuaaaaccuuugg

SEQ ID NO: 388797 - RNA, 32 nt, Homo Sapiens
gggcagcucuguccccuccugcucuccaucuu

SEQ ID NO: 388798 - RNA, 32 nt, Homo Sapiens
agagcggagucuccugccucccgccccccacc

SEQ ID NO: 388799 - RNA, 32 nt, Homo Sapiens
cuuauguggcauuuucuguuucucauugguaa

SEQ ID NO: 388800 - RNA, 32 nt, Homo Sapiens
cgaugacucggguuucgagcgccuggugggcg

SEQ ID NO: 388801 - RNA, 30 nt, Homo Sapiens
gguaaugagaagcuuugguucugccaucuc

SEQ ID NO: 388802 - RNA, 32 nt, Homo Sapiens
agcuucaaaccagacucugugcugcuucugcu

SEQ ID NO: 388803 - RNA, 32 nt, Homo Sapiens
caucuucgucguccccguggaccucccccuuc

SEQ ID NO: 388804 - RNA, 32 nt, Homo Sapiens
uucagacccuggguagggaagagaaggggcau

SEQ ID NO: 388805 - RNA, 32 nt, Homo Sapiens
ggaggcugccaccaccuggggccucuccaccu

SEQ ID NO: 388806 - RNA, 32 nt, Homo Sapiens
gcuggaguugcaccgcggcagcuccauggaaa

SEQ ID NO: 388807 - RNA, 32 nt, Homo Sapiens
ucggagccgggcggcuacgggcggggugucgc

SEQ ID NO: 388808 - RNA, 32 nt, Homo Sapiens
acauaauccacauuuguagucaaggacgcaau

SEQ ID NO: 388809 - RNA, 32 nt, Homo Sapiens
gacacauaguuggcacuggcaaugcacauacu

SEQ ID NO: 388810 - RNA, 32 nt, Homo Sapiens
uuucccaauagaacuucaaaucucugaggacg

SEQ ID NO: 388811 - RNA, 32 nt, Homo Sapiens
ccaggucucugggccuucagcgcggguccugg

SEQ ID NO: 388812 - RNA, 32 nt, Homo Sapiens
uuuucuucuuuuucuuuuuuucuuucuuuuuu

SEQ ID NO: 388813 - RNA, 32 nt, Homo Sapiens
gcgccucgaucucuggagcccaccgcaugccg

SEQ ID NO: 388814 - RNA, 32 nt, Homo Sapiens
ucccucuugaguuggcucugauuugaaaucgg

SEQ ID NO: 388815 - RNA, 31 nt, Homo Sapiens
uuuuuguacuuuugcagaagaaacuucagca

SEQ ID NO: 388816 - RNA, 32 nt, Homo Sapiens
uguuaguaaacuuauaaaaggcugcuauggua

SEQ ID NO: 388817 - RNA, 32 nt, Homo Sapiens
uccgggagccagcaggccccucgcucaacccc

SEQ ID NO: 388818 - RNA, 32 nt, Homo Sapiens
uuucuggcgcggugcgauggagguaguggagg

SEQ ID NO: 388819 - RNA, 32 nt, Homo Sapiens
acuccacagccaggccuggcccugcccuucac

SEQ ID NO: 388820 - RNA, 32 nt, Homo Sapiens
aggugcugacuuccauggaauggggcagcagg

SEQ ID NO: 388821 - RNA, 32 nt, Homo Sapiens
ccuaaaugauguuucaugauagcuuuggguga

SEQ ID NO: 388822 - RNA, 32 nt, Homo Sapiens
aauagcaucuccucccaccucccaccagagac

SEQ ID NO: 388823 - RNA, 32 nt, Homo Sapiens
uuaccuuccuucccuuccugcucccagacagu

SEQ ID NO: 388824 - RNA, 32 nt, Homo Sapiens
cuugcuugcuugagcuucagcggaauucgaaa

SEQ ID NO: 388825 - RNA, 32 nt, Homo Sapiens
aauuccgggagcgggcgggcugcgaggccgcg

SEQ ID NO: 388826 - RNA, 29 nt, Homo Sapiens
agcacgaggcugcuguggacgaggaggau

SEQ ID NO: 388827 - RNA, 32 nt, Homo Sapiens
ucaucuaacuuauagcaaacuaccacaauaca

SEQ ID NO: 388828 - RNA, 32 nt, Homo Sapiens
cuucuggacguugcccuguguaccucuucgac

SEQ ID NO: 388829 - RNA, 32 nt, Homo Sapiens
gaaaaaucaggauucccuuauaaagaaagugc

SEQ ID NO: 388830 - RNA, 32 nt, Homo Sapiens
uggggagccucgggggcagaggugauagaugu

SEQ ID NO: 388831 - RNA, 32 nt, Homo Sapiens
uguauaacaaaauaaaaguuuacccaaaagua

SEQ ID NO: 388832 - RNA, 32 nt, Homo Sapiens
guccucucagcgcccgccggcggccgcgucca

SEQ ID NO: 388833 - RNA, 32 nt, Homo Sapiens
aauaauccaaaauaauuccagugccgaacccu

SEQ ID NO: 388834 - RNA, 32 nt, Homo Sapiens
gcuuggggcccacccucagaccucugagaacu

SEQ ID NO: 388835 - RNA, 32 nt, Homo Sapiens
accuugggguaaaucaaaauaguccuccuucu

SEQ ID NO: 388836 - RNA, 32 nt, Homo Sapiens
cccaacccuugaugauauguauuuauucauuu

SEQ ID NO: 388837 - RNA, 32 nt, Homo Sapiens
ggcccccgcucccgggaaccguucccgggccg

SEQ ID NO: 388838 - RNA, 32 nt, Homo Sapiens
gggacacgcagggccuggcugagaagccucgc

SEQ ID NO: 388839 - RNA, 32 nt, Homo Sapiens
ggcagugacaccugggagcuuguuaggaaugc

SEQ ID NO: 388840 - RNA, 32 nt, Homo Sapiens
cccaccggaagagacuguccccugccaggucu

SEQ ID NO: 388841 - RNA, 32 nt, Homo Sapiens
ugaccaaaaugaagcuuguaacgacccaugga

SEQ ID NO: 388842 - RNA, 32 nt, Homo Sapiens
aucaagguaaggaaacaggacuauugacagga

SEQ ID NO: 388843 - RNA, 32 nt, Homo Sapiens
gggcguggaguuuugucuuguauuuuggccuu

SEQ ID NO: 388844 - RNA, 32 nt, Homo Sapiens
gccauguggucccaggcuggucucaaacuccu

SEQ ID NO: 388845 - RNA, 32 nt, Homo Sapiens
agcccaacaucggcaccucccaacgcccccuc

SEQ ID NO: 388846 - RNA, 32 nt, Homo Sapiens
gcuaguccacuacuccaagguaacuaucgacu

SEQ ID NO: 388847 - RNA, 32 nt, Homo Sapiens
gggcaguauagugagaucuuuucucuacaaaa

SEQ ID NO: 388848 - RNA, 32 nt, Homo Sapiens
cccugcuuaauccuaauaauuuuccucauuag

SEQ ID NO: 388849 - RNA, 32 nt, Homo Sapiens
gucugguccaaucugcaucuuguuguguccca

SEQ ID NO: 388850 - RNA, 32 nt, Homo Sapiens
cccacucaccuagccuuccccaucccugucug

SEQ ID NO: 388851 - RNA, 32 nt, Homo Sapiens
aggucucaucuacagcucuuagcuucucagua

SEQ ID NO: 388852 - RNA, 32 nt, Homo Sapiens
ggggcagauaauguggagagugucccaauuac

SEQ ID NO: 388853 - RNA, 32 nt, Homo Sapiens
ccgccccgaugcccagcuccgcgccucgcgga

SEQ ID NO: 388854 - RNA, 32 nt, Homo Sapiens
cauguugaagagcuaauauacuguguagauuu

SEQ ID NO: 388855 - RNA, 32 nt, Homo Sapiens
ccacagugccuuuuaagggggaccucaccucc

SEQ ID NO: 388856 - RNA, 32 nt, Homo Sapiens
caguuguccucuucuuuuuguuauagcaucuc

SEQ ID NO: 388857 - RNA, 32 nt, Homo Sapiens
uuucuugagaauaaauuuugacuuguaacacc

SEQ ID NO: 388858 - RNA, 32 nt, Homo Sapiens
gugccuuuggaguuuaugucugcacauggcau

SEQ ID NO: 388859 - RNA, 32 nt, Homo Sapiens
caaaagaaaguugucuucauuguacaaacaua

SEQ ID NO: 388860 - RNA, 32 nt, Homo Sapiens
auuuaaagacagcgcagaaaacaucguguaaa

SEQ ID NO: 388861 - RNA, 32 nt, Homo Sapiens
ucuaccagugugcuuggguuugccaugaugcg

SEQ ID NO: 388862 - RNA, 32 nt, Homo Sapiens
cgagccguccugagcugggugaaacacgacgu

SEQ ID NO: 388863 - RNA, 32 nt, Homo Sapiens
uugcugaggugcauugugaacaauaccuuuag

SEQ ID NO: 388864 - RNA, 31 nt, Homo Sapiens
ucuuuuuccuugauagaacuuaccacaauuu

SEQ ID NO: 388865 - RNA, 32 nt, Homo Sapiens
gccgagaggaggagaacgcugaggucggucgg

SEQ ID NO: 388866 - RNA, 32 nt, Homo Sapiens
gucaaaugugugccacccuuuauaauacagcu

SEQ ID NO: 388867 - RNA, 32 nt, Homo Sapiens
ugaauaaaucauccauacauuucaguccucuu

SEQ ID NO: 388868 - RNA, 32 nt, Homo Sapiens
cagaguggccccagcuccacggcgucugcaug

SEQ ID NO: 388869 - RNA, 32 nt, Homo Sapiens
acagaaaauaccagcaaggaagaagacaguga

SEQ ID NO: 388870 - RNA, 32 nt, Homo Sapiens
ucaaucuguuuaauaaagacgugcgaauagag

SEQ ID NO: 388871 - RNA, 32 nt, Homo Sapiens
gggggcaaggucagcugcccccugcccucucu

SEQ ID NO: 388872 - RNA, 31 nt, Homo Sapiens
agauguucaagcucaaguucagguauuaucc

SEQ ID NO: 388873 - RNA, 32 nt, Homo Sapiens
ggccguggguuccugaugucggugcaggagcu

SEQ ID NO: 388874 - RNA, 32 nt, Homo Sapiens
cccaggaaggucucugggugggauaaagccaa

SEQ ID NO: 388875 - RNA, 32 nt, Homo Sapiens
ggcaggaaggauuguuucuggugacugcagcc

SEQ ID NO: 388876 - RNA, 32 nt, Homo Sapiens
gccgggcugcgguggcggcagcggugggagau

SEQ ID NO: 388877 - RNA, 32 nt, Homo Sapiens
gaaucugcuugagggagggcagaauacuucau

SEQ ID NO: 388878 - RNA, 32 nt, Homo Sapiens
cacgucuagcacuaaugcucuccggaugauga

SEQ ID NO: 388879 - RNA, 32 nt, Homo Sapiens
gacguccggcgccccagccccacuaucagugu

SEQ ID NO: 388880 - RNA, 32 nt, Homo Sapiens
cccuuucugcgggggacgauuucgucgguggu

SEQ ID NO: 388881 - RNA, 32 nt, Homo Sapiens
cauagcuuuagaauagagauuuucucagaaau

SEQ ID NO: 388882 - RNA, 32 nt, Homo Sapiens
gccgcgccccgcgcgccgcuugcuccacacuc

SEQ ID NO: 388883 - RNA, 32 nt, Homo Sapiens
ccauucauuugccugagcguggcacaguuuua

SEQ ID NO: 388884 - RNA, 32 nt, Homo Sapiens
ugcucgguccugggugcucgcugcugugcaag

SEQ ID NO: 388885 - RNA, 32 nt, Homo Sapiens
cagggcgggaggaggggcacacaugccccagg

SEQ ID NO: 388886 - RNA, 32 nt, Homo Sapiens
ugucuaauuuuuguacuuuucguagagauggg

SEQ ID NO: 388887 - RNA, 32 nt, Homo Sapiens
ggggcggcauauauuuaguucauauauauuua

SEQ ID NO: 388888 - RNA, 32 nt, Homo Sapiens
ucaaucaauuaacguuaacaucaauaaaacau

SEQ ID NO: 388889 - RNA, 32 nt, Homo Sapiens
cagcgagggccucggccauccaagggucuccc

SEQ ID NO: 388890 - RNA, 32 nt, Homo Sapiens
aacuuuuacccauguaauucuagcugaacuca

SEQ ID NO: 388891 - RNA, 32 nt, Homo Sapiens
uaagagggaucuuuucucaucuccuggacagu

SEQ ID NO: 388892 - RNA, 32 nt, Homo Sapiens
cuguugauccugagacuaacaauuggagacug

SEQ ID NO: 388893 - RNA, 32 nt, Homo Sapiens
accucucagggucagcaguucccagcgcuccu

SEQ ID NO: 388894 - RNA, 32 nt, Homo Sapiens
acaaauaggggaggggcaggcaauggcugaua

SEQ ID NO: 388895 - RNA, 32 nt, Homo Sapiens
gccuuuuauuuuuucccuuuuuguuuugguag

SEQ ID NO: 388896 - RNA, 32 nt, Homo Sapiens
cuccaagcgaggacaacaggaagagggaucca

SEQ ID NO: 388897 - RNA, 32 nt, Homo Sapiens
caacuuauguaauuaucccaaucaugugaaau

SEQ ID NO: 388898 - RNA, 32 nt, Homo Sapiens
cuuguccuucuuccucgaaucuccaucccuaa

SEQ ID NO: 388899 - RNA, 32 nt, Homo Sapiens
ggucgacgcccggcugccagcccaagccuccg

SEQ ID NO: 388900 - RNA, 32 nt, Homo Sapiens
gaggauaaacaagauaugaaaacugcuucauc

SEQ ID NO: 388901 - RNA, 32 nt, Homo Sapiens
ccuaagaacaaaaugaaagaaaaccaaauagc

SEQ ID NO: 388902 - RNA, 32 nt, Homo Sapiens
ugauaauacaugucaguuuuuauuuuuggaug

SEQ ID NO: 388903 - RNA, 32 nt, Homo Sapiens
uacuugcccuuacagguggaguaucuucguca

SEQ ID NO: 388904 - RNA, 32 nt, Homo Sapiens
cacuucaggguaggguggccaagcucuggggu

SEQ ID NO: 388905 - RNA, 32 nt, Homo Sapiens
caaguguucaacaaauaguagcucccuuuccc

SEQ ID NO: 388906 - RNA, 32 nt, Homo Sapiens
gggcgcgcgggccuccuguucgcgacaagccc

SEQ ID NO: 388907 - RNA, 32 nt, Homo Sapiens
cuuaaaagugaaagugguaauacuguugguuu

SEQ ID NO: 388908 - RNA, 32 nt, Homo Sapiens
agaaaccgacagauguugaggagaauggugug

SEQ ID NO: 388909 - RNA, 32 nt, Homo Sapiens
cuggagcaccucagaagacaaggaggaaaaca

SEQ ID NO: 388910 - RNA, 32 nt, Homo Sapiens
ccauccuugggguugaaccaugauuccgguga

SEQ ID NO: 388911 - RNA, 32 nt, Homo Sapiens
cugccccacagucccccagagcccuggcucag

SEQ ID NO: 388912 - RNA, 32 nt, Homo Sapiens
agcuccuccccuuggcccccagccugugccag

SEQ ID NO: 388913 - RNA, 32 nt, Homo Sapiens
uaucaaauacuaucaaaauguacuaugacauu

SEQ ID NO: 388914 - RNA, 32 nt, Homo Sapiens
ugacuugugggaagagcguacugcagagccua

SEQ ID NO: 388915 - RNA, 32 nt, Homo Sapiens
gcugggcccugcaguggggcgggccgccagcc

SEQ ID NO: 388916 - RNA, 32 nt, Homo Sapiens
cgggaaagaguuuaauggaauauuuuuguacc

SEQ ID NO: 388917 - RNA, 32 nt, Homo Sapiens
cccugggaugcugcaucuccaggcaacuaugc

SEQ ID NO: 388918 - RNA, 32 nt, Homo Sapiens
uucaccccauuuguuucuaaccccgcugccca

SEQ ID NO: 388919 - RNA, 32 nt, Homo Sapiens
aacacucacuauucuucaggcuucaguaaauc

SEQ ID NO: 388920 - RNA, 32 nt, Homo Sapiens
cuagacaagccugggaaacauagcaagaucuc

SEQ ID NO: 388921 - RNA, 32 nt, Homo Sapiens
gacauucaucaaucaugauauaugaguaguuc

SEQ ID NO: 388922 - RNA, 32 nt, Homo Sapiens
ucuaguaacaauacaugagaaagaugucuaug

SEQ ID NO: 388923 - RNA, 32 nt, Homo Sapiens
accccaaagguauuuuugauaacagagcuaug

SEQ ID NO: 388924 - RNA, 32 nt, Homo Sapiens
cugugagacugcuggaggaaauguagcagaca

SEQ ID NO: 388925 - RNA, 32 nt, Homo Sapiens
aagccccgcccggcccuacccagggcggcucc

SEQ ID NO: 388926 - RNA, 32 nt, Homo Sapiens
aguuccugcaagagcagaagccaggcagccuc

SEQ ID NO: 388927 - RNA, 32 nt, Homo Sapiens
agaagcaugcaguggaauuuaaccaaguggca

SEQ ID NO: 388928 - RNA, 30 nt, Homo Sapiens
aauguaggagguggucagcaggcaaucucc

SEQ ID NO: 388929 - RNA, 32 nt, Homo Sapiens
cuucaucacagcagggauuugggcuagacauu

SEQ ID NO: 388930 - RNA, 32 nt, Homo Sapiens
cucgucugcgcggcgggcgugccaguuccccg

SEQ ID NO: 388931 - RNA, 32 nt, Homo Sapiens
ucuaauuggcugugagucagucuuucauuuac

SEQ ID NO: 388932 - RNA, 32 nt, Homo Sapiens
gggugggcuggcgagccgacgcggcggcggag

SEQ ID NO: 388933 - RNA, 32 nt, Homo Sapiens
ggcaagguuugguuuggugaaaacgaaggaua

SEQ ID NO: 388934 - RNA, 32 nt, Homo Sapiens
cggagucuugcuguguuguccaggcuggagug

SEQ ID NO: 388935 - RNA, 32 nt, Homo Sapiens
cuuuuuuuuuuuuuuucuugacccguucagug

SEQ ID NO: 388936 - RNA, 32 nt, Homo Sapiens
cgucccuggggcuaaagccagacccauuucug

SEQ ID NO: 388937 - RNA, 32 nt, Homo Sapiens
caggcguaaggucagcagcaauuugucuaaua

SEQ ID NO: 388938 - RNA, 32 nt, Homo Sapiens
aacgccgggcucccggccggccugacccggaa

SEQ ID NO: 388939 - RNA, 29 nt, Homo Sapiens
ugcauuuggggacagggacuggaaaaggg

SEQ ID NO: 388940 - RNA, 32 nt, Homo Sapiens
uguccuuuacuucauccacaccuaugaagcua

SEQ ID NO: 388941 - RNA, 32 nt, Homo Sapiens
uaccuuucuuguauauuuuuugagaucgaaga

SEQ ID NO: 388942 - RNA, 32 nt, Homo Sapiens
ccugaauuaaaggagccuuuugacccaaucau

SEQ ID NO: 388943 - RNA, 32 nt, Homo Sapiens
uuccgggcuguguucacaugacugcugucuag

SEQ ID NO: 388944 - RNA, 32 nt, Homo Sapiens
cacuucugagugugggggcccuggcuagggag

SEQ ID NO: 388945 - RNA, 32 nt, Homo Sapiens
aaucgaaaaaucacacaggcugggugcagugg

SEQ ID NO: 388946 - RNA, 32 nt, Homo Sapiens
gggcugcaggaugaguaagagauacuuacaga

SEQ ID NO: 388947 - RNA, 32 nt, Homo Sapiens
ccuguccagccgagggaccgccggcagccucc

SEQ ID NO: 388948 - RNA, 32 nt, Homo Sapiens
uacaggcaggaaaauguuuuaacugguuuaca

SEQ ID NO: 388949 - RNA, 32 nt, Homo Sapiens
gguuuguuuuugcuccucccucuuuacccucc

SEQ ID NO: 388950 - RNA, 32 nt, Homo Sapiens
ugcacucaagcagagaagaaauccacaaguac

SEQ ID NO: 388951 - RNA, 32 nt, Homo Sapiens
gucugccugugcuccauggggggacggcucca

SEQ ID NO: 388952 - RNA, 32 nt, Homo Sapiens
ccguggugcugaauucacugugacgucacucc

SEQ ID NO: 388953 - RNA, 32 nt, Homo Sapiens
gguguguucugugauaaugaaaagcaucagaa

SEQ ID NO: 388954 - RNA, 32 nt, Homo Sapiens
gaugccccaucccccuccccaucaccuuuggu

SEQ ID NO: 388955 - RNA, 32 nt, Homo Sapiens
auguugaacaacaugggaaggucgcagcguac

SEQ ID NO: 388956 - RNA, 32 nt, Homo Sapiens
gccuggucuugaacuccugaccucaggugauc

SEQ ID NO: 388957 - RNA, 32 nt, Homo Sapiens
ggcccauggccaggcccggcauggagcggugg

SEQ ID NO: 388958 - RNA, 32 nt, Homo Sapiens
agagaucugcaccucccggacuucaggccugc

SEQ ID NO: 388959 - RNA, 32 nt, Homo Sapiens
agaaaguugcagccgcaggagccccggaggcc

SEQ ID NO: 388960 - RNA, 32 nt, Homo Sapiens
uucccagaaggcuuauacagugacucagucgg

SEQ ID NO: 388961 - RNA, 32 nt, Homo Sapiens
uggcccacccugcuccuccaggugcugggcag

SEQ ID NO: 388962 - RNA, 29 nt, Homo Sapiens
ugcucucuauguauguagcguacggguug

SEQ ID NO: 388963 - RNA, 30 nt, Homo Sapiens
cgccaaggcaggcuugggcugggccaggac

SEQ ID NO: 388964 - RNA, 32 nt, Homo Sapiens
uugaccuugaguuuuaguaguagaauguuuuc

SEQ ID NO: 388965 - RNA, 32 nt, Homo Sapiens
cuccugagcagcgccaugggccugcuggccuu

SEQ ID NO: 388966 - RNA, 32 nt, Homo Sapiens
gaagcugaggaagaucuagaaguaaaagaaaa

SEQ ID NO: 388967 - RNA, 32 nt, Homo Sapiens
ugcaggggauggcccugcugcugcuuccgggg

SEQ ID NO: 388968 - RNA, 32 nt, Homo Sapiens
aggcuuucuguaaaagguacuauagaagggcg

SEQ ID NO: 388969 - RNA, 32 nt, Homo Sapiens
aguucgccgcuugcaccgggaccgaugccauc

SEQ ID NO: 388970 - RNA, 32 nt, Homo Sapiens
ggcucccucacuccuggguuccaggucacugc

SEQ ID NO: 388971 - RNA, 32 nt, Homo Sapiens
aauccaaaaaauauucuuaaacuguguauggu

SEQ ID NO: 388972 - RNA, 32 nt, Homo Sapiens
gauucugaugcacacuaaauucaacuguuuua

SEQ ID NO: 388973 - RNA, 32 nt, Homo Sapiens
auuacagggaagcuccuggaauuguacaugga

SEQ ID NO: 388974 - RNA, 32 nt, Homo Sapiens
uagggcaaucccaacuccaucuguggggcugc

SEQ ID NO: 388975 - RNA, 32 nt, Homo Sapiens
guuccuugccagcacggcugcuaacagacugc

SEQ ID NO: 388976 - RNA, 32 nt, Homo Sapiens
aaucauucacaaacagaauaaaacagagccaa

SEQ ID NO: 388977 - RNA, 32 nt, Homo Sapiens
agcgcugagugagggcgggcgggcgggcggga

SEQ ID NO: 388978 - RNA, 32 nt, Homo Sapiens
ugcuggaaaguguauuugugcauaaauaaagu

SEQ ID NO: 388979 - RNA, 32 nt, Homo Sapiens
cccucccagacacucccuguggcugcccuuug

SEQ ID NO: 388980 - RNA, 32 nt, Homo Sapiens
acccaaguuucauccgaggaaauguccccgca

SEQ ID NO: 388981 - RNA, 32 nt, Homo Sapiens
gauaucuaggaggacucuucucucccaaacua

SEQ ID NO: 388982 - RNA, 32 nt, Homo Sapiens
aagggggagcagccacugcugcucaccaacgc

SEQ ID NO: 388983 - RNA, 31 nt, Homo Sapiens
aagccgcaggguugacaaccauacuugaugc

SEQ ID NO: 388984 - RNA, 32 nt, Homo Sapiens
ucugcuuccaacaggcaccucuaaucagaccu

SEQ ID NO: 388985 - RNA, 32 nt, Homo Sapiens
gcccuucccuccccguuuuucauggccugcug

SEQ ID NO: 388986 - RNA, 32 nt, Homo Sapiens
ugcgcgccaucggugcgccggggccaggcaga

SEQ ID NO: 388987 - RNA, 32 nt, Homo Sapiens
ccuaagugcuuauguuuuaacuuauguuagug

SEQ ID NO: 388988 - RNA, 32 nt, Homo Sapiens
cggcccgggugcccugcccccguccaggagcc

SEQ ID NO: 388989 - RNA, 32 nt, Homo Sapiens
gccuggagcauggccaagagccagcuugcacc

SEQ ID NO: 388990 - RNA, 32 nt, Homo Sapiens
ggauuuuuuauuuugggggagguaaugcccug

SEQ ID NO: 388991 - RNA, 30 nt, Homo Sapiens
gcgccggccguuccguguccagaaccuccc

SEQ ID NO: 388992 - RNA, 32 nt, Homo Sapiens
ugccuggggcuggcugcagacggugugguugg

SEQ ID NO: 388993 - RNA, 32 nt, Homo Sapiens
cggaaagcucuugcagaauugcagcuuggacu

SEQ ID NO: 388994 - RNA, 32 nt, Homo Sapiens
uuuugugugcaggcugucucauuuauuuuuag

SEQ ID NO: 388995 - RNA, 32 nt, Homo Sapiens
uuguggaagugggggcgccagaguaguguguc

SEQ ID NO: 388996 - RNA, 32 nt, Homo Sapiens
caugugucuaagucaugucuuuuacauagugu

SEQ ID NO: 388997 - RNA, 32 nt, Homo Sapiens
ggcuuuaccuauucuggauauuucauauaaau

SEQ ID NO: 388998 - RNA, 32 nt, Homo Sapiens
ucugggcgguuguggcagcugaaggcggacgu

SEQ ID NO: 388999 - RNA, 32 nt, Homo Sapiens
uuuuuguuguuuucuuuuuaaagcauaguuuu

SEQ ID NO: 389000 - RNA, 32 nt, Homo Sapiens
aauggcacagaaaugguaugaagaaaccccga

SEQ ID NO: 389001 - RNA, 32 nt, Homo Sapiens
acacagauccaugcagaauggcccugcgagca

SEQ ID NO: 389002 - RNA, 32 nt, Homo Sapiens
guucuauucagcaacauaguucauggauuuug

SEQ ID NO: 389003 - RNA, 32 nt, Homo Sapiens
ccccuggcaguaccacagcaucaucccuuggu

SEQ ID NO: 389004 - RNA, 32 nt, Homo Sapiens
aaaagggaaggauaaaaccuuugacauccccu

SEQ ID NO: 389005 - RNA, 32 nt, Homo Sapiens
gugcugggccccaggccagccucugccuggga

SEQ ID NO: 389006 - RNA, 32 nt, Homo Sapiens
uaugucagucaucaaagaaaaugcugucaccu

SEQ ID NO: 389007 - RNA, 32 nt, Homo Sapiens
gcuguagguucaaugaguaguuucauccucuc

SEQ ID NO: 389008 - RNA, 32 nt, Homo Sapiens
cguuggcuccagacaaauaaacauggagucca

SEQ ID NO: 389009 - RNA, 32 nt, Homo Sapiens
cgcgcgcacacacacacacacacacacacaca

SEQ ID NO: 389010 - RNA, 32 nt, Homo Sapiens
uuguagaaggauuuuucucaugcucuuauauu

SEQ ID NO: 389011 - RNA, 32 nt, Homo Sapiens
gggggcaaagauuaaucuaccuugcaguguag

SEQ ID NO: 389012 - RNA, 32 nt, Homo Sapiens
augugagccgaguuuggaaacuguagugauag

SEQ ID NO: 389013 - RNA, 32 nt, Homo Sapiens
aaagcuuaaauuauaauauugcugcuuuguau

SEQ ID NO: 389014 - RNA, 32 nt, Homo Sapiens
cuugcggccugugucuauggucgggcccucug

SEQ ID NO: 389015 - RNA, 32 nt, Homo Sapiens
uuuuuaauuuaaaaguuaaucuuucugggccg

SEQ ID NO: 389016 - RNA, 32 nt, Homo Sapiens
agcuucccggugccuccgccgggcgcccaggg

SEQ ID NO: 389017 - RNA, 32 nt, Homo Sapiens
cauuguccugcaagcaggagccagggcaauau

SEQ ID NO: 389018 - RNA, 32 nt, Homo Sapiens
gaaaaaguuuugggauaacuuauuuguauguu

SEQ ID NO: 389019 - RNA, 32 nt, Homo Sapiens
gagcuaucuguuccucauagugccaguguguu

SEQ ID NO: 389020 - RNA, 32 nt, Homo Sapiens
ccgccagugucuggauucugccucuugccaaa

SEQ ID NO: 389021 - RNA, 32 nt, Homo Sapiens
uucuuuuggaauguauuugauugauaagaaag

SEQ ID NO: 389022 - RNA, 32 nt, Homo Sapiens
auuauuguaaaaagcuuagcuuuuguuuuaaa

SEQ ID NO: 389023 - RNA, 32 nt, Homo Sapiens
uacagagaaaagacauaagcaaagacuaugag

SEQ ID NO: 389024 - RNA, 32 nt, Homo Sapiens
caaaaaauauuaccauauaauuuaagaaaaga

SEQ ID NO: 389025 - RNA, 32 nt, Homo Sapiens
auuuuguuucaaauacaguauauugucuauuu

SEQ ID NO: 389026 - RNA, 32 nt, Homo Sapiens
cgccuggggcaagcuggcgugugccagggcuc

SEQ ID NO: 389027 - RNA, 32 nt, Homo Sapiens
guuuacagaaaaggaagugcaggaacauuuca

SEQ ID NO: 389028 - RNA, 29 nt, Homo Sapiens
guggauaagaagguugagagugccaagga

SEQ ID NO: 389029 - RNA, 32 nt, Homo Sapiens
ccugcucgaccccaucccccacaaaaaaggau

SEQ ID NO: 389030 - RNA, 32 nt, Homo Sapiens
caggugccaagagguuaugauacggguuucuu

SEQ ID NO: 389031 - RNA, 31 nt, Homo Sapiens
cuagcagaauaaaacauguaccacauuugcu

SEQ ID NO: 389032 - RNA, 32 nt, Homo Sapiens
caucaaauuuaaaaccacuuugauacauuuuu

SEQ ID NO: 389033 - RNA, 32 nt, Homo Sapiens
ggcuugcaagcacagcagcacccagaggcuaa

SEQ ID NO: 389034 - RNA, 32 nt, Homo Sapiens
aguguaauaaaugugacagauuuuucagauau

SEQ ID NO: 389035 - RNA, 32 nt, Homo Sapiens
uuaagauggaaauuuauguucuuucuauuaua

SEQ ID NO: 389036 - RNA, 32 nt, Homo Sapiens
cuccagcccuccccugcccccagcccgucccc

SEQ ID NO: 389037 - RNA, 32 nt, Homo Sapiens
uguagaaaaaaauuauucauuuaguauuaacu

SEQ ID NO: 389038 - RNA, 32 nt, Homo Sapiens
cucugaaauuuuguugauaccaucuaaauacc

SEQ ID NO: 389039 - RNA, 32 nt, Homo Sapiens
caaaauucaguaaaccacacaaaucagguaag

SEQ ID NO: 389040 - RNA, 32 nt, Homo Sapiens
gcaguguagagcugagccuuggcuuucuaaaa

SEQ ID NO: 389041 - RNA, 32 nt, Homo Sapiens
ugagaaauuaugguuauauaaauaacagauau

SEQ ID NO: 389042 - RNA, 30 nt, Homo Sapiens
aauaaaaauggaauuuuuuacccauacaaa

SEQ ID NO: 389043 - RNA, 32 nt, Homo Sapiens
uuuaaagcauuuuuuauguuauuuucaaacuu

SEQ ID NO: 389044 - RNA, 30 nt, Homo Sapiens
agauccacucaauaaaaaccaggcaaaugu

SEQ ID NO: 389045 - RNA, 32 nt, Homo Sapiens
aaaagcuacagaaccaggccaauauauuuuga

SEQ ID NO: 389046 - RNA, 32 nt, Homo Sapiens
agaacuuaauaaaauuguucagugcuuauuau

SEQ ID NO: 389047 - RNA, 32 nt, Homo Sapiens
acuucuuccagggccucuggcagccaggacag

SEQ ID NO: 389048 - RNA, 32 nt, Homo Sapiens
cacaugcuuuuuucuuuuuuuccuuuuuuuug

SEQ ID NO: 389049 - RNA, 30 nt, Homo Sapiens
ggaacaugcacuuuuccauucccgaaaccg

SEQ ID NO: 389050 - RNA, 32 nt, Homo Sapiens
auccuagccccgagacaccauccugagccagg

SEQ ID NO: 389051 - RNA, 32 nt, Homo Sapiens
gccuggugcgggccaaggagggggccgaggag

SEQ ID NO: 389052 - RNA, 32 nt, Homo Sapiens
ggagcugcgcagaaggcagagccccccagacc

SEQ ID NO: 389053 - RNA, 32 nt, Homo Sapiens
agccaucccaaaccaguaucugucccaagaga

SEQ ID NO: 389054 - RNA, 32 nt, Homo Sapiens
acaccagaguguuucccagagcccaugccggg

SEQ ID NO: 389055 - RNA, 32 nt, Homo Sapiens
cagcgcugguggccaugcucuuggagcacuac

SEQ ID NO: 389056 - RNA, 32 nt, Homo Sapiens
cuuccccauccucacccuggcuccauccaguc

SEQ ID NO: 389057 - RNA, 32 nt, Homo Sapiens
gcccgccggucgggccugggcggccgcaugaa

SEQ ID NO: 389058 - RNA, 32 nt, Homo Sapiens
agaaacacccucaccaacacacguggaaauaa

SEQ ID NO: 389059 - RNA, 32 nt, Homo Sapiens
ccaauagcuugaggccuuugcugcuggaugau

SEQ ID NO: 389060 - RNA, 32 nt, Homo Sapiens
gucugucaacugggagggggagagggggguga

SEQ ID NO: 389061 - RNA, 32 nt, Homo Sapiens
agccucugcccccgaguuucugagugaccugg

SEQ ID NO: 389062 - RNA, 32 nt, Homo Sapiens
uuuacuguguguauagcuacaugaugaaauua

SEQ ID NO: 389063 - RNA, 32 nt, Homo Sapiens
gagggauauuaccauggcaacccuugcauucc

SEQ ID NO: 389064 - RNA, 32 nt, Homo Sapiens
gcagcugguaaaaccagaggcuacauccagua

SEQ ID NO: 389065 - RNA, 32 nt, Homo Sapiens
gaguggggcugcccauacgcaaagagacaaca

SEQ ID NO: 389066 - RNA, 32 nt, Homo Sapiens
agacauaaggaggccagaggcugcaaggagcg

SEQ ID NO: 389067 - RNA, 32 nt, Homo Sapiens
ccccuggaauccaaccaguaagcuguuaucag

SEQ ID NO: 389068 - RNA, 32 nt, Homo Sapiens
cuuggcuaaaggucacagcuccugucacccug

SEQ ID NO: 389069 - RNA, 32 nt, Homo Sapiens
aaugcaauucuacagcauucaaaugaagaaaa

SEQ ID NO: 389070 - RNA, 32 nt, Homo Sapiens
cccgcaguggugaugccugaggccugggguug

SEQ ID NO: 389071 - RNA, 32 nt, Homo Sapiens
uguugugugcaugaaaaggauuccuugguuau

SEQ ID NO: 389072 - RNA, 32 nt, Homo Sapiens
acugcuuucaggauuccuauguagaaguuaca

SEQ ID NO: 389073 - RNA, 32 nt, Homo Sapiens
gugagacagacuuucccaacccucugcccggc

SEQ ID NO: 389074 - RNA, 32 nt, Homo Sapiens
ugcccauccugccggcucagcugcuggagguc

SEQ ID NO: 389075 - RNA, 32 nt, Homo Sapiens
cugcugcccuccccaggaggccuccauggcuu

SEQ ID NO: 389076 - RNA, 32 nt, Homo Sapiens
aggccgccagugucgacaugcugcuggaggag

SEQ ID NO: 389077 - RNA, 32 nt, Homo Sapiens
ucccaggacaaagcugagacugacgggugaug

SEQ ID NO: 389078 - RNA, 32 nt, Homo Sapiens
uuuuaaugauuucuaacauuucuuaacaguca

SEQ ID NO: 389079 - RNA, 32 nt, Homo Sapiens
cugaggucaggagaucaagaccagccuggcca

SEQ ID NO: 389080 - RNA, 32 nt, Homo Sapiens
accaguauaacacguggaggucgaagucuuca

SEQ ID NO: 389081 - RNA, 32 nt, Homo Sapiens
ugaaucucauacugagaacaaacaaccauugu

SEQ ID NO: 389082 - RNA, 32 nt, Homo Sapiens
guuucuuacauaucagacuucuuacuugaaug

SEQ ID NO: 389083 - RNA, 32 nt, Homo Sapiens
gggaaagaaaauuuaaaugaacuaaagcagua

SEQ ID NO: 389084 - RNA, 32 nt, Homo Sapiens
cucaagccaagcccagaggcaguggcuggggu

SEQ ID NO: 389085 - RNA, 32 nt, Homo Sapiens
ucaguggacuauaauaauaguggaggguugag

SEQ ID NO: 389086 - RNA, 30 nt, Homo Sapiens
ucacgcggcgcgcagcucugauuggccucg

SEQ ID NO: 389087 - RNA, 32 nt, Homo Sapiens
auacuuuagagcaaaacaaauuuuacaaccac

SEQ ID NO: 389088 - RNA, 32 nt, Homo Sapiens
acagaagcaaccgaaacucagagagguuuuga

SEQ ID NO: 389089 - RNA, 32 nt, Homo Sapiens
gggaugcugaggagaccgcgggcccgcgccag

SEQ ID NO: 389090 - RNA, 32 nt, Homo Sapiens
ugcucaguggguguaaccuuaucccuucugag

SEQ ID NO: 389091 - RNA, 32 nt, Homo Sapiens
cucccagcugcucugaccccaauaucaggaac

SEQ ID NO: 389092 - RNA, 32 nt, Homo Sapiens
cugaucuccagauguacaugggcagcaggagu

SEQ ID NO: 389093 - RNA, 32 nt, Homo Sapiens
ucuccucugaagauaacuugagauucuaggca

SEQ ID NO: 389094 - RNA, 32 nt, Homo Sapiens
uuuuucaguauuuugagaauugccauauuaau

SEQ ID NO: 389095 - RNA, 32 nt, Homo Sapiens
agugcugcaauaaacauaaaguaugcaugugu

SEQ ID NO: 389096 - RNA, 32 nt, Homo Sapiens
gugaccagcggcuccuaacgugucugugugau

SEQ ID NO: 389097 - RNA, 32 nt, Homo Sapiens
uuggauauuuggaggagugaacaucauuguuu

SEQ ID NO: 389098 - RNA, 32 nt, Homo Sapiens
ggaaugcucugugccagaaacagugggagccc

SEQ ID NO: 389099 - RNA, 32 nt, Homo Sapiens
ggaaaaugcaauacauuuuuuauuauacaaac

SEQ ID NO: 389100 - RNA, 30 nt, Homo Sapiens
ggaggggcgucggaccagccggcgcaagcg

SEQ ID NO: 389101 - RNA, 32 nt, Homo Sapiens
cagcauuuuauuuaaacaaaauuuagaauuug

SEQ ID NO: 389102 - RNA, 32 nt, Homo Sapiens
aagaauggaaaaccaaauauuguauguucuca

SEQ ID NO: 389103 - RNA, 32 nt, Homo Sapiens
ucuugguuaaagaaugucacauauuggugaua

SEQ ID NO: 389104 - RNA, 32 nt, Homo Sapiens
ccagccguguccuccagcccagcccugacccc

SEQ ID NO: 389105 - RNA, 32 nt, Homo Sapiens
ccaccacccccuccuucagacggcggaguuau

SEQ ID NO: 389106 - RNA, 32 nt, Homo Sapiens
agaaucugaaagcaugaccugcacuuucauug

SEQ ID NO: 389107 - RNA, 32 nt, Homo Sapiens
cugucguucaugauagacacaaugaaauccac

SEQ ID NO: 389108 - RNA, 32 nt, Homo Sapiens
uaucuauuugagaacuagaaucacucaacacu

SEQ ID NO: 389109 - RNA, 32 nt, Homo Sapiens
ucaacaaugcugcaugggucacagcggcagca

SEQ ID NO: 389110 - RNA, 32 nt, Homo Sapiens
gugauauaauuuaugcuuaguguuaacugguc

SEQ ID NO: 389111 - RNA, 32 nt, Homo Sapiens
uaaaagaugaaggucugagguuucuucugacu

SEQ ID NO: 389112 - RNA, 32 nt, Homo Sapiens
gcuuuccagaaagcccgugucugcagaacccc

SEQ ID NO: 389113 - RNA, 32 nt, Homo Sapiens
gggcgggcgggaagaugcugagcagguugaug

SEQ ID NO: 389114 - RNA, 32 nt, Homo Sapiens
ccccaaggccccagaggcagcggcacuaaauc

SEQ ID NO: 389115 - RNA, 32 nt, Homo Sapiens
cgggcagaugaacacggaggcucucuguuguc

SEQ ID NO: 389116 - RNA, 32 nt, Homo Sapiens
cucagccuggggaggagaagcuggcagcccuc

SEQ ID NO: 389117 - RNA, 32 nt, Homo Sapiens
ucacagaaauauauuucagaaagacgucaaac

SEQ ID NO: 389118 - RNA, 30 nt, Homo Sapiens
gguggguucccgugcggcggcggccaagga

SEQ ID NO: 389119 - RNA, 32 nt, Homo Sapiens
gaaauguuaguagguguaggagugcugaugag

SEQ ID NO: 389120 - RNA, 32 nt, Homo Sapiens
ccaccagggagggacccccacccccaagcacu

SEQ ID NO: 389121 - RNA, 32 nt, Homo Sapiens
uauauuggauaccaccucuugagaguccuucu

SEQ ID NO: 389122 - RNA, 32 nt, Homo Sapiens
ccaaagaggcuaguaagcaagaaaggaucugc

SEQ ID NO: 389123 - RNA, 32 nt, Homo Sapiens
aaaccagaaacggaauaauguuacuuuggaug

SEQ ID NO: 389124 - RNA, 32 nt, Homo Sapiens
ucugcggcuguacggagccaucuugcagguga

SEQ ID NO: 389125 - RNA, 32 nt, Homo Sapiens
guaauugacuaaagcauuccaguguccucuuu

SEQ ID NO: 389126 - RNA, 32 nt, Homo Sapiens
gcgggugccuccccgccucaccgcuucgcagg

SEQ ID NO: 389127 - RNA, 32 nt, Homo Sapiens
gugucaccuuccuuuuuccuucuauguccccu

SEQ ID NO: 389128 - RNA, 32 nt, Homo Sapiens
guuuuuagcuuuaagccugugcauguggacaa

SEQ ID NO: 389129 - RNA, 32 nt, Homo Sapiens
ugguugcgguuacaguggggcugggguguuua

SEQ ID NO: 389130 - RNA, 32 nt, Homo Sapiens
guguccaaaaacuccaccauauucuagaaaua

SEQ ID NO: 389131 - RNA, 32 nt, Homo Sapiens
uggccuggccaucucccuccccagaaacagug

SEQ ID NO: 389132 - RNA, 32 nt, Homo Sapiens
aaauacuugauugccuauaaauuuaaggaaau

SEQ ID NO: 389133 - RNA, 32 nt, Homo Sapiens
gcugagcuaaaauggcugaggagagagucgcg

SEQ ID NO: 389134 - RNA, 32 nt, Homo Sapiens
ugagaagaaggcgucgaggcugucugaggagg

SEQ ID NO: 389135 - RNA, 32 nt, Homo Sapiens
agcauccguccgucccucucccagaccucucc

SEQ ID NO: 389136 - RNA, 32 nt, Homo Sapiens
auaaucuuagcugccaaguaaauagcaacaug

SEQ ID NO: 389137 - RNA, 31 nt, Homo Sapiens
augcaguauuaucauugacauaccucugucc

SEQ ID NO: 389138 - RNA, 32 nt, Homo Sapiens
agcgguugucggguuuggggcuggaggugaag

SEQ ID NO: 389139 - RNA, 32 nt, Homo Sapiens
agcaggacgccagagucccagcccuggaaccg

SEQ ID NO: 389140 - RNA, 28 nt, Homo Sapiens
aucaugcugaagagggaggggaaggucc

SEQ ID NO: 389141 - RNA, 32 nt, Homo Sapiens
gcugggguuccagcauggggccccaggggacc

SEQ ID NO: 389142 - RNA, 32 nt, Homo Sapiens
ugagcucacagcacaaguguaucacuguuuaa

SEQ ID NO: 389143 - RNA, 32 nt, Homo Sapiens
ugcagccgcgcucaccuccgcgguccgccccg

SEQ ID NO: 389144 - RNA, 32 nt, Homo Sapiens
agagaagggaaaaguugcuggagcacggagug

SEQ ID NO: 389145 - RNA, 32 nt, Homo Sapiens
cugucucuacccacaggauccucuggcggucg

SEQ ID NO: 389146 - RNA, 32 nt, Homo Sapiens
ggcgaucagggaucuuguugcauugggagcag

SEQ ID NO: 389147 - RNA, 32 nt, Homo Sapiens
gccgcugcccccacccugcuucugcugccugu

SEQ ID NO: 389148 - RNA, 32 nt, Homo Sapiens
ggauagaacccauacaugaauuaaaugaugca

SEQ ID NO: 389149 - RNA, 32 nt, Homo Sapiens
uauccuguucaaguuaaucaacaucaaacaca

SEQ ID NO: 389150 - RNA, 32 nt, Homo Sapiens
cgcagccaggacugggguaugggcgcuguccu

SEQ ID NO: 389151 - RNA, 32 nt, Homo Sapiens
augguggcgggugccuguggucccagcugcuc

SEQ ID NO: 389152 - RNA, 32 nt, Homo Sapiens
caucagcacuaaugcuccacuccauuggcacu

SEQ ID NO: 389153 - RNA, 32 nt, Homo Sapiens
ugaauuccacccaaggagcgggcgccugggau

SEQ ID NO: 389154 - RNA, 31 nt, Homo Sapiens
guuagggcauccacugcuggaguccaugccc

SEQ ID NO: 389155 - RNA, 32 nt, Homo Sapiens
ggccuugugcaaauacgauauguugcuuaggc

SEQ ID NO: 389156 - RNA, 32 nt, Homo Sapiens
cagcgugcacccagacgcuggugccauggcga

SEQ ID NO: 389157 - RNA, 32 nt, Homo Sapiens
cccuaguacuugauauagaacacauaaaaaug

SEQ ID NO: 389158 - RNA, 32 nt, Homo Sapiens
uauauauaaaaugguggucccauaagauuaua

SEQ ID NO: 389159 - RNA, 32 nt, Homo Sapiens
aagggaaacauggcucuagcgcggccggugcg

SEQ ID NO: 389160 - RNA, 32 nt, Homo Sapiens
cccuuccguucccucccugucagggcguaauu

SEQ ID NO: 389161 - RNA, 32 nt, Homo Sapiens
uuggcaaaaaagauuaaaaaacuaaagaaaag

SEQ ID NO: 389162 - RNA, 32 nt, Homo Sapiens
uuaguggagacgggguuucaccauguuggcca

SEQ ID NO: 389163 - RNA, 32 nt, Homo Sapiens
ggcguccgcgcgcugcacaauggcggcucuga

SEQ ID NO: 389164 - RNA, 32 nt, Homo Sapiens
gcuaaagaaaaauuauuuuacaaaaauuacuu

SEQ ID NO: 389165 - RNA, 32 nt, Homo Sapiens
aauaaacaggguuaguuccaugugaaucuguc

SEQ ID NO: 389166 - RNA, 32 nt, Homo Sapiens
cccgcuucccuccagccccccauccuuggcau

SEQ ID NO: 389167 - RNA, 32 nt, Homo Sapiens
gcaagcauuucuuuucuuuuagggaugucuga

SEQ ID NO: 389168 - RNA, 32 nt, Homo Sapiens
gaugaaauuuauaugaaagcauuuuuaucaca

SEQ ID NO: 389169 - RNA, 32 nt, Homo Sapiens
gaugauucaaccaagccugcaaaucucccucu

SEQ ID NO: 389170 - RNA, 30 nt, Homo Sapiens
uggauuugugucccugcccaaaucuuaugg

SEQ ID NO: 389171 - RNA, 32 nt, Homo Sapiens
gauuuuaauauaucucuuucuuuuucuuccga

SEQ ID NO: 389172 - RNA, 32 nt, Homo Sapiens
gucccagugugggacagaacgggccuugcaca

SEQ ID NO: 389173 - RNA, 32 nt, Homo Sapiens
guccuuugguugcuccuccuugguuugauuuu

SEQ ID NO: 389174 - RNA, 32 nt, Homo Sapiens
acaccacauuuuaaaacuguaauucaguuaag

SEQ ID NO: 389175 - RNA, 32 nt, Homo Sapiens
cacgaggcgggaaguggcgggcggagucccgg

SEQ ID NO: 389176 - RNA, 30 nt, Homo Sapiens
aagagauucuguuugggggaacuuaaguca

SEQ ID NO: 389177 - RNA, 32 nt, Homo Sapiens
gaagucguggcaaagaucuuuccagugaucaa

SEQ ID NO: 389178 - RNA, 32 nt, Homo Sapiens
uuuauuugauucaggggaccuguauuuccaug

SEQ ID NO: 389179 - RNA, 32 nt, Homo Sapiens
aggguuuccgaauauauucgauucaaagcuuc

SEQ ID NO: 389180 - RNA, 32 nt, Homo Sapiens
cacuccaggugggagccaccccggugaggggg

SEQ ID NO: 389181 - RNA, 32 nt, Homo Sapiens
ucagcaucagccucauaagaaaaccaggccaa

SEQ ID NO: 389182 - RNA, 32 nt, Homo Sapiens
uacuuguuugaugacagagaucuucauuaaca

SEQ ID NO: 389183 - RNA, 32 nt, Homo Sapiens
uuuuuacuuauauauuugauacauauaauucu

SEQ ID NO: 389184 - RNA, 32 nt, Homo Sapiens
uuugaauuuuuggaacacuuuuacaauuaaaa

SEQ ID NO: 389185 - RNA, 32 nt, Homo Sapiens
ccgcugccccacccccucccagccccugcacg

SEQ ID NO: 389186 - RNA, 32 nt, Homo Sapiens
auuuauucauauauuccuguccaaagccacac

SEQ ID NO: 389187 - RNA, 32 nt, Homo Sapiens
ugucucuuaggacuucagugccucagcugccu

SEQ ID NO: 389188 - RNA, 32 nt, Homo Sapiens
uuuggaggggagaggggaagguggcuggccgg

SEQ ID NO: 389189 - RNA, 32 nt, Homo Sapiens
cugcccucggccucgccccgggcccgggugga

SEQ ID NO: 389190 - RNA, 32 nt, Homo Sapiens
ucagauaauauguuuuuuccuacuucaacaga

SEQ ID NO: 389191 - RNA, 32 nt, Homo Sapiens
aggcaagccggcccccaccucucccugggggu

SEQ ID NO: 389192 - RNA, 32 nt, Homo Sapiens
cauuauuucuucaguuuucuuuucuugcacug

SEQ ID NO: 389193 - RNA, 32 nt, Homo Sapiens
auuccuuuuucucuccucuccccaugauguuu

SEQ ID NO: 389194 - RNA, 32 nt, Homo Sapiens
gcuauuuaucccaucgacucccuguuguuuua

SEQ ID NO: 389195 - RNA, 32 nt, Homo Sapiens
agcgccgccuggcgcgcaggugccgggacgug

SEQ ID NO: 389196 - RNA, 32 nt, Homo Sapiens
gguguuccccggggcgggggaggaggggcaag

SEQ ID NO: 389197 - RNA, 32 nt, Homo Sapiens
cugugugaucucaacagcacccaguguguucc

SEQ ID NO: 389198 - RNA, 32 nt, Homo Sapiens
uuacguacuugagcuuuuuuuuuuuuuuuuuu

SEQ ID NO: 389199 - RNA, 32 nt, Homo Sapiens
aacugguguggugguguuuucuuuucuuuuug

SEQ ID NO: 389200 - RNA, 32 nt, Homo Sapiens
ugugugaccuugacaagucuaacuggucugug

SEQ ID NO: 389201 - RNA, 32 nt, Homo Sapiens
gcugugagcuuuacagcucucaucuaacuucu

SEQ ID NO: 389202 - RNA, 32 nt, Homo Sapiens
ggagaacuuacauugugaaacuucuguacauu

SEQ ID NO: 389203 - RNA, 32 nt, Homo Sapiens
uugcccucucauuuuucaguacuucuacagaa

SEQ ID NO: 389204 - RNA, 32 nt, Homo Sapiens
gccaccucucagugccucaccucccccugccu

SEQ ID NO: 389205 - RNA, 32 nt, Homo Sapiens
gccucaccugcugcugccccucuaggucuggg

SEQ ID NO: 389206 - RNA, 32 nt, Homo Sapiens
ugagggguugcgccagcugcugggggaggaga

SEQ ID NO: 389207 - RNA, 32 nt, Homo Sapiens
acauaacuaauaggauauauguauauaugaaa

SEQ ID NO: 389208 - RNA, 32 nt, Homo Sapiens
uuuaaucagaauaaagauuauauccauaaaau

SEQ ID NO: 389209 - RNA, 32 nt, Homo Sapiens
uucauuacaaauaagauuguuaugucaguauu

SEQ ID NO: 389210 - RNA, 32 nt, Homo Sapiens
ccuccccacccccacaccaucuugcaccuguu

SEQ ID NO: 389211 - RNA, 32 nt, Homo Sapiens
ggagaggggguucccuguugcuuuugugucug

SEQ ID NO: 389212 - RNA, 32 nt, Homo Sapiens
cugcugccccccagggcucuccaugugagaca

SEQ ID NO: 389213 - RNA, 32 nt, Homo Sapiens
gaaucagagcaucuugacaugacugcugaccu

SEQ ID NO: 389214 - RNA, 32 nt, Homo Sapiens
agcucgaggcggacgcggcccgggccccgugg

SEQ ID NO: 389215 - RNA, 32 nt, Homo Sapiens
aggucggcggggggcugcugggaggcgcggcg

SEQ ID NO: 389216 - RNA, 32 nt, Homo Sapiens
cgcugggaucgacuucgauaaauacuuuugcc

SEQ ID NO: 389217 - RNA, 32 nt, Homo Sapiens
gguaugcuguuauagcagcacaaaacagacua

SEQ ID NO: 389218 - RNA, 32 nt, Homo Sapiens
ccccugccggcgggcuccguggggcccuggag

SEQ ID NO: 389219 - RNA, 32 nt, Homo Sapiens
aacuacacccucaguaaagcaaacaggaguug

SEQ ID NO: 389220 - RNA, 32 nt, Homo Sapiens
ccacacucaggcuccuccccagccuccagcuc

SEQ ID NO: 389221 - RNA, 32 nt, Homo Sapiens
uuugccacuaguaaaugugugaucuucggcaa

SEQ ID NO: 389222 - RNA, 32 nt, Homo Sapiens
accacaacucaauaugaaaacuauuuaacuua

SEQ ID NO: 389223 - RNA, 32 nt, Homo Sapiens
guugcugguccauucugcccucgcugccuggu

SEQ ID NO: 389224 - RNA, 32 nt, Homo Sapiens
ggaggcagaaaagaggcacagguggcccauac

SEQ ID NO: 389225 - RNA, 32 nt, Homo Sapiens
ugggacgccgagcagcccgagaaccccggggu

SEQ ID NO: 389226 - RNA, 32 nt, Homo Sapiens
agaaccaugccuuuuuuaguguguccuauuuc

SEQ ID NO: 389227 - RNA, 32 nt, Homo Sapiens
guccggccucuggcccgccccggagcagggag

SEQ ID NO: 389228 - RNA, 32 nt, Homo Sapiens
ugcaccucccguuuccgcugcugcugacguuu

SEQ ID NO: 389229 - RNA, 32 nt, Homo Sapiens
gggugcggcgaggcggaauggcggcggcugcg

SEQ ID NO: 389230 - RNA, 32 nt, Homo Sapiens
gugaguacauuggcauaaauauagaaauuuau

SEQ ID NO: 389231 - RNA, 32 nt, Homo Sapiens
ucuuuccccuuuucuucaucuuuuuuuuuuuu

SEQ ID NO: 389232 - RNA, 32 nt, Homo Sapiens
ggcucuaguggucaaggcaaacuuuccuuagg

SEQ ID NO: 389233 - RNA, 32 nt, Homo Sapiens
cgaccaugagagagacgagaguucacggagcc

SEQ ID NO: 389234 - RNA, 32 nt, Homo Sapiens
ggcgaugcccagcagauaagccaggcaaaccu

SEQ ID NO: 389235 - RNA, 32 nt, Homo Sapiens
ccuacuccugucauuacauuuacuuuauuaaa

SEQ ID NO: 389236 - RNA, 32 nt, Homo Sapiens
uuuaugugaagauaguucuguaaaguuguuuc

SEQ ID NO: 389237 - RNA, 32 nt, Homo Sapiens
acagugugaagauaaggagaguggaaccagga

SEQ ID NO: 389238 - RNA, 32 nt, Homo Sapiens
cuggguaauaccuggugucugagugauucucu

SEQ ID NO: 389239 - RNA, 32 nt, Homo Sapiens
acuugaagacugggcuuuggaucugggacugg

SEQ ID NO: 389240 - RNA, 32 nt, Homo Sapiens
acauuucuauaaagauauaacaaaauuuaagc

SEQ ID NO: 389241 - RNA, 32 nt, Homo Sapiens
uaaaaguuuuaacuucaaaauauguuaugcac

SEQ ID NO: 389242 - RNA, 32 nt, Homo Sapiens
acugcugcuccuuauuuuaacuuugucuugca

SEQ ID NO: 389243 - RNA, 32 nt, Homo Sapiens
ugguggcccgucucuugucuuuccugguuuau

SEQ ID NO: 389244 - RNA, 32 nt, Homo Sapiens
aaauuucucuacauagaucucauucgaaaaca

SEQ ID NO: 389245 - RNA, 32 nt, Homo Sapiens
gacagggucugucuuuguuacccaggcuggag

SEQ ID NO: 389246 - RNA, 32 nt, Homo Sapiens
uuccuguaccgggucaugguaauuuuugguug

SEQ ID NO: 389247 - RNA, 32 nt, Homo Sapiens
cggccgggaggcgcccucggacacuugcgggu

SEQ ID NO: 389248 - RNA, 32 nt, Homo Sapiens
auguaauuuauaggaaccuuguccucugguau

SEQ ID NO: 389249 - RNA, 32 nt, Homo Sapiens
gguccagaucugccuccagccccucgaaacca

SEQ ID NO: 389250 - RNA, 32 nt, Homo Sapiens
cccgccccgagccccagucagcccgucuuccu

SEQ ID NO: 389251 - RNA, 32 nt, Homo Sapiens
gcaaagaaauggauagggaauauuuuaguucu

SEQ ID NO: 389252 - RNA, 32 nt, Homo Sapiens
gcaguucugccagccguggcagggcugcuaug

SEQ ID NO: 389253 - RNA, 32 nt, Homo Sapiens
cccaccgaggccccggcagcagucuuguucac

SEQ ID NO: 389254 - RNA, 32 nt, Homo Sapiens
ugggaauguaaaaugguaaaaucacuuuugaa

SEQ ID NO: 389255 - RNA, 32 nt, Homo Sapiens
cuuuaucuuaggaugcuguuacuaucucuuag

SEQ ID NO: 389256 - RNA, 32 nt, Homo Sapiens
uacaucuccauauguuguaguguugugaaaau

SEQ ID NO: 389257 - RNA, 32 nt, Homo Sapiens
uaaacaugucauuuuugaaaaaggauccucau

SEQ ID NO: 389258 - RNA, 32 nt, Homo Sapiens
caagaagucaacacagacucauuuucuacucc

SEQ ID NO: 389259 - RNA, 32 nt, Homo Sapiens
acgcugcggcccggcaacaaggcccgacucgg

SEQ ID NO: 389260 - RNA, 32 nt, Homo Sapiens
uuucucccacccaaaacuaugucaacaauugg

SEQ ID NO: 389261 - RNA, 32 nt, Homo Sapiens
uccucugcccaggggagggaguguggacagua

SEQ ID NO: 389262 - RNA, 32 nt, Homo Sapiens
ccauggucagcuugcuuggaauccagcaggca

SEQ ID NO: 389263 - RNA, 32 nt, Homo Sapiens
cggaggcggccugggcgauggcggcggaguuu

SEQ ID NO: 389264 - RNA, 32 nt, Homo Sapiens
ccaagagaggucgggucacagccagcagcuau

SEQ ID NO: 389265 - RNA, 32 nt, Homo Sapiens
aaauuaucauuucacugaguauaaacaaaccu

SEQ ID NO: 389266 - RNA, 32 nt, Homo Sapiens
auucuggauaguuaucaugacuucaagcaucc

SEQ ID NO: 389267 - RNA, 32 nt, Homo Sapiens
gaacugaucucuguaucccauuauuacuauaa

SEQ ID NO: 389268 - RNA, 32 nt, Homo Sapiens
ugaaucaacuagaaacaaacucaguggucaaa

SEQ ID NO: 389269 - RNA, 32 nt, Homo Sapiens
cuauauuuucuuuacagguauuuauaauauac

SEQ ID NO: 389270 - RNA, 32 nt, Homo Sapiens
augucuguuguacucuuuauaccuguuucugu

SEQ ID NO: 389271 - RNA, 32 nt, Homo Sapiens
cccagagaugaccguccuauuugcccaccgaa

SEQ ID NO: 389272 - RNA, 32 nt, Homo Sapiens
ggucacagacaaaacagcaagaccagauucau

SEQ ID NO: 389273 - RNA, 32 nt, Homo Sapiens
agaagccagaaagcauuuguuaaacgcagcuu

SEQ ID NO: 389274 - RNA, 32 nt, Homo Sapiens
aaauuagcuggguauagugguaugugccugua

SEQ ID NO: 389275 - RNA, 32 nt, Homo Sapiens
gauuucugucuucucccaggucucucuugggu

SEQ ID NO: 389276 - RNA, 30 nt, Homo Sapiens
ucuagccuuuuggugggggaaaagauccag

SEQ ID NO: 389277 - RNA, 32 nt, Homo Sapiens
guuagcugguaccccugagcucccucauccca

SEQ ID NO: 389278 - RNA, 32 nt, Homo Sapiens
agcuccgggcgccgcaggccggcgggguccac

SEQ ID NO: 389279 - RNA, 29 nt, Homo Sapiens
acauauguauguaugauauauucauauau

SEQ ID NO: 389280 - RNA, 32 nt, Homo Sapiens
gacgcuaucuacgaccacaucaacgaggggaa

SEQ ID NO: 389281 - RNA, 32 nt, Homo Sapiens
aacauggcaacgcuggaagcaaaguaaacguu

SEQ ID NO: 389282 - RNA, 32 nt, Homo Sapiens
cuuuggaauaauuuuuaaaucuguaaaugucu

SEQ ID NO: 389283 - RNA, 32 nt, Homo Sapiens
acaucagacugacuugcuggcgucaagagcag

SEQ ID NO: 389284 - RNA, 32 nt, Homo Sapiens
acaguaaacaaauaaguuccugucccaugacc

SEQ ID NO: 389285 - RNA, 32 nt, Homo Sapiens
cuggagcaaucagaucacacggcggcuuggag

SEQ ID NO: 389286 - RNA, 32 nt, Homo Sapiens
uucucuucguuguuguuguuuuuaauuguaaa

SEQ ID NO: 389287 - RNA, 32 nt, Homo Sapiens
uauaaugcaaauguaacuuauguuuucauuuu

SEQ ID NO: 389288 - RNA, 32 nt, Homo Sapiens
agcuuggaauugccugucccacagcaagaggc

SEQ ID NO: 389289 - RNA, 32 nt, Homo Sapiens
agauuacaaaaauaugacaaucuuguaaguag

SEQ ID NO: 389290 - RNA, 32 nt, Homo Sapiens
gcgagccgcgggagccgaccccggggccucga

SEQ ID NO: 389291 - RNA, 30 nt, Homo Sapiens
ggagaagcaggcauagacagauucagauaa

SEQ ID NO: 389292 - RNA, 32 nt, Homo Sapiens
aaauggaggcuccagcagcauauuguaccgcu

SEQ ID NO: 389293 - RNA, 32 nt, Homo Sapiens
ccguacagcucugcgcuccauguucguaagag

SEQ ID NO: 389294 - RNA, 32 nt, Homo Sapiens
ggggcgugguggcuagagggaagagaagaaac

SEQ ID NO: 389295 - RNA, 32 nt, Homo Sapiens
ucacguggccauggaagaaaaugucuuuuggg

SEQ ID NO: 389296 - RNA, 32 nt, Homo Sapiens
ggcacgagggugggacaaagccuggggcuggg

SEQ ID NO: 389297 - RNA, 32 nt, Homo Sapiens
aggagucugaccagcccaaaucugcccuggcc

SEQ ID NO: 389298 - RNA, 32 nt, Homo Sapiens
ccccaaacgcuguugcgccgcgcgccccgccc

SEQ ID NO: 389299 - RNA, 32 nt, Homo Sapiens
aguucagguuugucagaagcagggucuggaau

SEQ ID NO: 389300 - RNA, 32 nt, Homo Sapiens
aguuuuuggggaucauuuugaguggaacaaag

SEQ ID NO: 389301 - RNA, 32 nt, Homo Sapiens
gccuaucaacggaugccugugauucccuggua

SEQ ID NO: 389302 - RNA, 32 nt, Homo Sapiens
uuagcagaguucaugccuuucccacaacucua

SEQ ID NO: 389303 - RNA, 32 nt, Homo Sapiens
aggaugcauuuuggguucaucuuucuugagug

SEQ ID NO: 389304 - RNA, 32 nt, Homo Sapiens
agccaggggucuguucuguagcagccaccccc

SEQ ID NO: 389305 - RNA, 32 nt, Homo Sapiens
caccaggcucaaaagaggaaauuuagaauuuc

SEQ ID NO: 389306 - RNA, 32 nt, Homo Sapiens
ucugagaaaaaguucaaggaauaaagauuguu

SEQ ID NO: 389307 - RNA, 32 nt, Homo Sapiens
caaauaagagaaaauuucaaaagcaagaguau

SEQ ID NO: 389308 - RNA, 32 nt, Homo Sapiens
agaauauaguauuuugaguucuaguaguacug

SEQ ID NO: 389309 - RNA, 32 nt, Homo Sapiens
cacacacuuaggauggauuuauguuaagggaa

SEQ ID NO: 389310 - RNA, 32 nt, Homo Sapiens
gcacaagucuuuccagaggaguuucuuaauga

SEQ ID NO: 389311 - RNA, 32 nt, Homo Sapiens
uacuggccgagcugcuggcgcacaggccucuu

SEQ ID NO: 389312 - RNA, 32 nt, Homo Sapiens
uguguaauauccacaaucauagacaaccaaag

SEQ ID NO: 389313 - RNA, 32 nt, Homo Sapiens
cuacuaguguuaaauuggaaaauaucaauaau

SEQ ID NO: 389314 - RNA, 32 nt, Homo Sapiens
aaaaauccauucucugagccuugcuugguugu

SEQ ID NO: 389315 - RNA, 32 nt, Homo Sapiens
guugaauagcuuuucuucugcaaugggaguug

SEQ ID NO: 389316 - RNA, 32 nt, Homo Sapiens
cacaguucaaccauuuaaccagaaauuaaaau

SEQ ID NO: 389317 - RNA, 32 nt, Homo Sapiens
cucuuguugugagcccccauggagaagaggag

SEQ ID NO: 389318 - RNA, 29 nt, Homo Sapiens
ucaauaaauauccaauacccagaguccug

SEQ ID NO: 389319 - RNA, 32 nt, Homo Sapiens
ugggcgcggaucugguguggggaaggcggcgg

SEQ ID NO: 389320 - RNA, 32 nt, Homo Sapiens
gguaguaacugggaagacggaaaugaagaaaa

SEQ ID NO: 389321 - RNA, 32 nt, Homo Sapiens
gcucacagcuaaggagcugugauucagaccca

SEQ ID NO: 389322 - RNA, 29 nt, Homo Sapiens
guaauauuguguuuccugccaagaguuug

SEQ ID NO: 389323 - RNA, 30 nt, Homo Sapiens
cugggaaagaaugacaugcaaaauaagagg

SEQ ID NO: 389324 - RNA, 32 nt, Homo Sapiens
uggugcucuaaugccaaguuauacacgggaca

SEQ ID NO: 389325 - RNA, 32 nt, Homo Sapiens
cuaacaucgaggaggacagucugcauuacuca

SEQ ID NO: 389326 - RNA, 32 nt, Homo Sapiens
cucucagaugcauuauguuaauggagagaaaa

SEQ ID NO: 389327 - RNA, 32 nt, Homo Sapiens
ucagggucucgugcugcccuucccucccacag

SEQ ID NO: 389328 - RNA, 32 nt, Homo Sapiens
aaagucugguaguucuucaaaugguuaaaugu

SEQ ID NO: 389329 - RNA, 32 nt, Homo Sapiens
uuuaaguugcucaggagccugauggaaccaug

SEQ ID NO: 389330 - RNA, 32 nt, Homo Sapiens
uuaagaaguaaagaucaggacuuuuuaauuac

SEQ ID NO: 389331 - RNA, 32 nt, Homo Sapiens
agcaugaaggcacccaccacuucccgagccaa

SEQ ID NO: 389332 - RNA, 32 nt, Homo Sapiens
acaaccuuaaugaaauuaaaagaauugagaag

SEQ ID NO: 389333 - RNA, 32 nt, Homo Sapiens
cuuucuuaguucuccuucuuacugaaagagag

SEQ ID NO: 389334 - RNA, 32 nt, Homo Sapiens
ccacccccaucccugccccuucugagacucac

SEQ ID NO: 389335 - RNA, 32 nt, Homo Sapiens
gcccuucagcagagacccauuugugcccagac

SEQ ID NO: 389336 - RNA, 32 nt, Homo Sapiens
ccccaagccccggcuccgcaggcccacagcgc

SEQ ID NO: 389337 - RNA, 32 nt, Homo Sapiens
cuacugccaagagcuaguucuuguguucauau

SEQ ID NO: 389338 - RNA, 32 nt, Homo Sapiens
gaagucccauucucccuuccaguuaugagaaa

SEQ ID NO: 389339 - RNA, 32 nt, Homo Sapiens
uacaagugaaugaagaaugaaagggaaagaau

SEQ ID NO: 389340 - RNA, 32 nt, Homo Sapiens
gaagagaagcugggaggaaaagagacccagca

SEQ ID NO: 389341 - RNA, 32 nt, Homo Sapiens
ggcagaaaaggauccuaggaaauaagucucuu

SEQ ID NO: 389342 - RNA, 32 nt, Homo Sapiens
ccugaagggucccuucccaagcccuuagggac

SEQ ID NO: 389343 - RNA, 32 nt, Homo Sapiens
gccuccugccugcugcagcugcaggcauucug

SEQ ID NO: 389344 - RNA, 32 nt, Homo Sapiens
uggagaccaacuaccacauagcaagagcccag

SEQ ID NO: 389345 - RNA, 32 nt, Homo Sapiens
aggucuggcccguuggggaucucagcaguggg

SEQ ID NO: 389346 - RNA, 32 nt, Homo Sapiens
gucgggaggagcauaagaagaagcacccagau

SEQ ID NO: 389347 - RNA, 32 nt, Homo Sapiens
uagacgugcacuuauaaguauuugauggggug

SEQ ID NO: 389348 - RNA, 32 nt, Homo Sapiens
cgcggggcgcggcgggacccaggcuacgagcg

SEQ ID NO: 389349 - RNA, 32 nt, Homo Sapiens
ucccauuacuuugauaucugaucaaauguaua

SEQ ID NO: 389350 - RNA, 32 nt, Homo Sapiens
guucuguauucugggaaagguauacagggugg

SEQ ID NO: 389351 - RNA, 32 nt, Homo Sapiens
ucuuccuugggaugacuugauuguggguggau

SEQ ID NO: 389352 - RNA, 32 nt, Homo Sapiens
guggcuccaucuucccuucucugccagccgcg

SEQ ID NO: 389353 - RNA, 32 nt, Homo Sapiens
ugcucuugccuuuucccacugagagaaggcug

SEQ ID NO: 389354 - RNA, 32 nt, Homo Sapiens
ccauggguuauagcaccuuguuuuccagcuag

SEQ ID NO: 389355 - RNA, 32 nt, Homo Sapiens
ccuagauuucgacugcccuuacggaucggcuc

SEQ ID NO: 389356 - RNA, 32 nt, Homo Sapiens
uggagaaaaaaguugaaaaggugguuguguca

SEQ ID NO: 389357 - RNA, 30 nt, Homo Sapiens
aggccgggugcggagccgccgguggcccag

SEQ ID NO: 389358 - RNA, 32 nt, Homo Sapiens
guguaauaugaaauaaaauuacacaguaaguc

SEQ ID NO: 389359 - RNA, 32 nt, Homo Sapiens
ugagaaggaaugggcgcguggaucguagccug

SEQ ID NO: 389360 - RNA, 32 nt, Homo Sapiens
gauuuagagcaucuggcagaagaaauuucuaa

SEQ ID NO: 389361 - RNA, 32 nt, Homo Sapiens
auuacugacuuuucuuuuuaauuggagucuca

SEQ ID NO: 389362 - RNA, 32 nt, Homo Sapiens
uugccgucggagcgcuuguuugcugccucgua

SEQ ID NO: 389363 - RNA, 32 nt, Homo Sapiens
cuuccacggaggggcugcugcccccucugccc

SEQ ID NO: 389364 - RNA, 32 nt, Homo Sapiens
uguacuuuguacccucacauacaaagggauca

SEQ ID NO: 389365 - RNA, 32 nt, Homo Sapiens
cgccucugugcucagggccccuggaggagggg

SEQ ID NO: 389366 - RNA, 32 nt, Homo Sapiens
uuauuuuuaaacauuccauuugaacaguauuc

SEQ ID NO: 389367 - RNA, 29 nt, Homo Sapiens
ucacuccgcgggcggaggacgcacgucgg

SEQ ID NO: 389368 - RNA, 32 nt, Homo Sapiens
ugaaugaagauaaguuggauucuuucagagca

SEQ ID NO: 389369 - RNA, 32 nt, Homo Sapiens
uauucugaguuuugaaacaauguauuuccuau

SEQ ID NO: 389370 - RNA, 32 nt, Homo Sapiens
auuaguaccuggugcuagagaauagaacccuc

SEQ ID NO: 389371 - RNA, 32 nt, Homo Sapiens
ugugggaggggagguguuagugcaugcaaggg

SEQ ID NO: 389372 - RNA, 32 nt, Homo Sapiens
uguacagugucuuuuuuuguauaguuaacaca

SEQ ID NO: 389373 - RNA, 32 nt, Homo Sapiens
agcuugcccagcugcugccugggcccccauuc

SEQ ID NO: 389374 - RNA, 32 nt, Homo Sapiens
gcccggaggggaacuguuuucuccggaaguga

SEQ ID NO: 389375 - RNA, 32 nt, Homo Sapiens
gcaagaggaauauccuucccaacaucaccacu

SEQ ID NO: 389376 - RNA, 32 nt, Homo Sapiens
uaccucccauccccugaggugguccccauucc

SEQ ID NO: 389377 - RNA, 32 nt, Homo Sapiens
ccccugcccuccccccaccaguugugccuugg

SEQ ID NO: 389378 - RNA, 32 nt, Homo Sapiens
agccagggggaccgcgaggagccgagcguccu

SEQ ID NO: 389379 - RNA, 32 nt, Homo Sapiens
caucucuacuaauaauacaaaaauuagccagg

SEQ ID NO: 389380 - RNA, 30 nt, Homo Sapiens
aggaaucuggacuuuauucugagggccuug

SEQ ID NO: 389381 - RNA, 32 nt, Homo Sapiens
uucuaaugccuguucagggcugguuuucugca

SEQ ID NO: 389382 - RNA, 32 nt, Homo Sapiens
accauucagaguggagauaguggacccagugg

SEQ ID NO: 389383 - RNA, 32 nt, Homo Sapiens
cuucaaguauaaaauuuuggugaauguguacc

SEQ ID NO: 389384 - RNA, 32 nt, Homo Sapiens
cccaggaaguagugucuucuuuugcaagcugg

SEQ ID NO: 389385 - RNA, 31 nt, Homo Sapiens
cugccacaagcugcugcuccaaggccuggcc

SEQ ID NO: 389386 - RNA, 32 nt, Homo Sapiens
uuauuuaauauuuggguacugauuauauccac

SEQ ID NO: 389387 - RNA, 30 nt, Homo Sapiens
uguaugaucuucggagccugcugcaucgga

SEQ ID NO: 389388 - RNA, 32 nt, Homo Sapiens
ugcaagggccccuguuuguugaugcagcuuuu

SEQ ID NO: 389389 - RNA, 32 nt, Homo Sapiens
aaaucagagaggaauaaaagacauuuuauauu

SEQ ID NO: 389390 - RNA, 32 nt, Homo Sapiens
aaacuacaaaaauucuagaagauaucauuggc

SEQ ID NO: 389391 - RNA, 32 nt, Homo Sapiens
ugguagucgccgguguggcugcaccucaccaa

SEQ ID NO: 389392 - RNA, 32 nt, Homo Sapiens
ccaaguuuucccuuuuuauuaagacaccaguc

SEQ ID NO: 389393 - RNA, 32 nt, Homo Sapiens
accgccuguacuuuuuugaaccauccagccuu

SEQ ID NO: 389394 - RNA, 32 nt, Homo Sapiens
uguccuuaguuguuuugugucuacccccauua

SEQ ID NO: 389395 - RNA, 32 nt, Homo Sapiens
gaugcaaaaagcugagggggccugcugggagu

SEQ ID NO: 389396 - RNA, 32 nt, Homo Sapiens
aucggggacuucgggaugacucgggacgugua

SEQ ID NO: 389397 - RNA, 32 nt, Homo Sapiens
uuggucuaaaaauuauauuaaacauuuauuuu

SEQ ID NO: 389398 - RNA, 32 nt, Homo Sapiens
ccugggaucucacugcucugcacaugugcacu

SEQ ID NO: 389399 - RNA, 32 nt, Homo Sapiens
gccacaguuuggugcuugugcacgggacucaa

SEQ ID NO: 389400 - RNA, 32 nt, Homo Sapiens
ggcagugccgugguggccaaccggacccaggc

SEQ ID NO: 389401 - RNA, 32 nt, Homo Sapiens
aucugaaaaagccagugagaaaacauuuuuga

SEQ ID NO: 389402 - RNA, 32 nt, Homo Sapiens
uuagacuagucauuaacuuaugauuagcucua

SEQ ID NO: 389403 - RNA, 32 nt, Homo Sapiens
acuggccaggaggcugcagaacgugugucucc

SEQ ID NO: 389404 - RNA, 32 nt, Homo Sapiens
auaaggucuggauaucaguacaugacaacaua

SEQ ID NO: 389405 - RNA, 32 nt, Homo Sapiens
caggccugcccccggcugguccccgcaccgag

SEQ ID NO: 389406 - RNA, 32 nt, Homo Sapiens
cgcagcugcugccgccgccgcugcugcugcug

SEQ ID NO: 389407 - RNA, 32 nt, Homo Sapiens
uggaugcuuugugaguuggggauuguugcguc

SEQ ID NO: 389408 - RNA, 32 nt, Homo Sapiens
accuaaaauggcauccugcucugaaucuagac

SEQ ID NO: 389409 - RNA, 32 nt, Homo Sapiens
ggcacgagggcuuccacaugugucaagcggcu

SEQ ID NO: 389410 - RNA, 32 nt, Homo Sapiens
gaacugcauaaauauuugcaauccauugagaa

SEQ ID NO: 389411 - RNA, 32 nt, Homo Sapiens
uuuucgcggcuaaaggccgcgcggcugacugc

SEQ ID NO: 389412 - RNA, 32 nt, Homo Sapiens
guuuauuaucuuucuuuaaaucuuauuggcca

SEQ ID NO: 389413 - RNA, 32 nt, Homo Sapiens
auggcuuuguucuuuucuuaagcucccaauuu

SEQ ID NO: 389414 - RNA, 32 nt, Homo Sapiens
caggggaagauaaagauggucacacaaacagu

SEQ ID NO: 389415 - RNA, 32 nt, Homo Sapiens
guguuaagauauuuuuaagugguaugugaucg

SEQ ID NO: 389416 - RNA, 32 nt, Homo Sapiens
uucuuugugucugcuuuccucagcccuuuucu

SEQ ID NO: 389417 - RNA, 32 nt, Homo Sapiens
auuggguacucaucgucucacccauuauaucu

SEQ ID NO: 389418 - RNA, 32 nt, Homo Sapiens
gauaacacuuuuaagauugauuagauugagac

SEQ ID NO: 389419 - RNA, 32 nt, Homo Sapiens
uguuuuuuuuuguuuguuuucuuaaaaguacc

SEQ ID NO: 389420 - RNA, 32 nt, Homo Sapiens
cucugucggccgcggaagccuggagugggcgg

SEQ ID NO: 389421 - RNA, 32 nt, Homo Sapiens
cccguuuaauaaaagaauauggaaacugaaca

SEQ ID NO: 389422 - RNA, 32 nt, Homo Sapiens
uguaaagcauauauuucuaaugacugcagacu

SEQ ID NO: 389423 - RNA, 32 nt, Homo Sapiens
ugcgucaugggcuucacgcagaagagcaacau

SEQ ID NO: 389424 - RNA, 32 nt, Homo Sapiens
aagcugcuucucuguuuccccagccuagcaac

SEQ ID NO: 389425 - RNA, 32 nt, Homo Sapiens
uucagccgcccggagccgcucccggagcccgg

SEQ ID NO: 389426 - RNA, 32 nt, Homo Sapiens
cucccuucuggccucuccugcugcugaccuga

SEQ ID NO: 389427 - RNA, 32 nt, Homo Sapiens
ugaaucuccuaaugcuaucccuccccccuucc

SEQ ID NO: 389428 - RNA, 32 nt, Homo Sapiens
guguuacagaauuaguguaucuguggaaaauu

SEQ ID NO: 389429 - RNA, 32 nt, Homo Sapiens
aagcuuauaauggaacuaagguguacaugugc

SEQ ID NO: 389430 - RNA, 32 nt, Homo Sapiens
cuuuucccauccccugcuacccuggcccagca

SEQ ID NO: 389431 - RNA, 32 nt, Homo Sapiens
uaucauuuucuuuuuuaaccgguaagaguuuc

SEQ ID NO: 389432 - RNA, 32 nt, Homo Sapiens
uaaacugagaaugcugagugccaggcauucac

SEQ ID NO: 389433 - RNA, 32 nt, Homo Sapiens
aacccuccauccucaagcagucucuucuuuau

SEQ ID NO: 389434 - RNA, 32 nt, Homo Sapiens
gagacaagaagccugaugccaaguacuccagg

SEQ ID NO: 389435 - RNA, 32 nt, Homo Sapiens
gcaguugacagcaggugggaaaugguaugagc

SEQ ID NO: 389436 - RNA, 32 nt, Homo Sapiens
ccaguauuuaguaaaccaauuuuuuauucauu

SEQ ID NO: 389437 - RNA, 32 nt, Homo Sapiens
gaaauaaagggagagaguaugcagauuauugc

SEQ ID NO: 389438 - RNA, 32 nt, Homo Sapiens
ggagaaacucugggcgggauuacggugaaaau

SEQ ID NO: 389439 - RNA, 32 nt, Homo Sapiens
cuggaggcagcugggugaggguccugguucca

SEQ ID NO: 389440 - RNA, 32 nt, Homo Sapiens
caauguuuucuuuuucaggugaguaguugccg

SEQ ID NO: 389441 - RNA, 32 nt, Homo Sapiens
ggaaagaaaaagacaauaaaauuguaauauaa

SEQ ID NO: 389442 - RNA, 32 nt, Homo Sapiens
uaauuuuccuuuccucacacagaugugcuuuc

SEQ ID NO: 389443 - RNA, 32 nt, Homo Sapiens
cacuaccucuacuacugguuaaagcaccacua

SEQ ID NO: 389444 - RNA, 32 nt, Homo Sapiens
gcaggucugggguggggacccaggugggggcu

SEQ ID NO: 389445 - RNA, 32 nt, Homo Sapiens
aaaggaugacuauaugaugaggagaaacuggg

SEQ ID NO: 389446 - RNA, 32 nt, Homo Sapiens
aagguaaucuguuagucuuaaaauaguuaaaa

SEQ ID NO: 389447 - RNA, 32 nt, Homo Sapiens
aauaagugggucucgccugggcagaaaaggaa

SEQ ID NO: 389448 - RNA, 32 nt, Homo Sapiens
ccgagcaccaggcgcaggcccggcgcccgccu

SEQ ID NO: 389449 - RNA, 32 nt, Homo Sapiens
guguggcuucuaugagcccagaucaccaccug

SEQ ID NO: 389450 - RNA, 32 nt, Homo Sapiens
acuguacuccagcccggcacuccagccuggcg

SEQ ID NO: 389451 - RNA, 32 nt, Homo Sapiens
aagcuuuaguuuuagccuaguagaacaacugu

SEQ ID NO: 389452 - RNA, 32 nt, Homo Sapiens
uucuuuccuuucucuucuuuuaucuccaaggu

SEQ ID NO: 389453 - RNA, 32 nt, Homo Sapiens
aucgugaggucuugcacaagccacguggggca

SEQ ID NO: 389454 - RNA, 32 nt, Homo Sapiens
aaaauucuagcagaagaagacaauauaugaaa

SEQ ID NO: 389455 - RNA, 32 nt, Homo Sapiens
ccggcuggagugcaguggugugaucuugccuc

SEQ ID NO: 389456 - RNA, 32 nt, Homo Sapiens
guaaagugaagacuaugauuagucuuuuugau

SEQ ID NO: 389457 - RNA, 32 nt, Homo Sapiens
gggggagcaggguaaggcaggaggaagugggu

SEQ ID NO: 389458 - RNA, 32 nt, Homo Sapiens
guugguccagguagcaaugaugagacccuuuu

SEQ ID NO: 389459 - RNA, 32 nt, Homo Sapiens
ggggagaggggaggggacgggcagggucucug

SEQ ID NO: 389460 - RNA, 32 nt, Homo Sapiens
uuggcuacaacuugaggagaaaaaucaccccc

SEQ ID NO: 389461 - RNA, 32 nt, Homo Sapiens
aaaugcccaugcauuucuuuaagcagaaauau

SEQ ID NO: 389462 - RNA, 32 nt, Homo Sapiens
agggccggaggcccaaggagggcgcgccuugg

SEQ ID NO: 389463 - RNA, 32 nt, Homo Sapiens
uuauaaucaauacaaaccagcaacuaauaaaa

SEQ ID NO: 389464 - RNA, 32 nt, Homo Sapiens
gaggaguuugaaaacuuuuuauguucuugagu

SEQ ID NO: 389465 - RNA, 32 nt, Homo Sapiens
ucauuauggccuucuuuuuuuuggccauauua

SEQ ID NO: 389466 - RNA, 32 nt, Homo Sapiens
ccucugagcacaugcauaguggcaucagcagc

SEQ ID NO: 389467 - RNA, 30 nt, Homo Sapiens
gggcggcggcgucuccugggucccggcagc

SEQ ID NO: 389468 - RNA, 32 nt, Homo Sapiens
caguggauguaccccaccucuuugcuuaaaaa

SEQ ID NO: 389469 - RNA, 32 nt, Homo Sapiens
ugcuccaccauuaucuuuugcauuccaauaac

SEQ ID NO: 389470 - RNA, 32 nt, Homo Sapiens
aaaggaguuguguugaguccacagcaggagcc

SEQ ID NO: 389471 - RNA, 32 nt, Homo Sapiens
gcccugugguggcuguggugccauggaggggc

SEQ ID NO: 389472 - RNA, 32 nt, Homo Sapiens
cgcccgggccgcgcuguccguccacggggugc

SEQ ID NO: 389473 - RNA, 32 nt, Homo Sapiens
aaaaauuugaaaacaaggaaaaguacuuaaag

SEQ ID NO: 389474 - RNA, 32 nt, Homo Sapiens
agcaggaccccaucgccaucccugugucucua

SEQ ID NO: 389475 - RNA, 32 nt, Homo Sapiens
ggggucggugcuggccgagggggcgccggcug

SEQ ID NO: 389476 - RNA, 32 nt, Homo Sapiens
cucgcacagcuaggucggccuguugggaucgg

SEQ ID NO: 389477 - RNA, 32 nt, Homo Sapiens
agggcagaccccggucucuccuccacaccggg

SEQ ID NO: 389478 - RNA, 32 nt, Homo Sapiens
aaucuuuugggguuccucugugaguauaggaa

SEQ ID NO: 389479 - RNA, 32 nt, Homo Sapiens
auaauaaguggaauaugauacaauuguuauuu

SEQ ID NO: 389480 - RNA, 32 nt, Homo Sapiens
gaagugaaauauaaauauguauacauauauaa

SEQ ID NO: 389481 - RNA, 32 nt, Homo Sapiens
cgucccgggcgcccacggaccauggagagggc

SEQ ID NO: 389482 - RNA, 32 nt, Homo Sapiens
acaaaugcauuaccaguccuagauacaaagcu

SEQ ID NO: 389483 - RNA, 32 nt, Homo Sapiens
ccacuguauuccagacugggugacagagugag

SEQ ID NO: 389484 - RNA, 32 nt, Homo Sapiens
ggacgggcccuccuucccuccugugccccagc

SEQ ID NO: 389485 - RNA, 32 nt, Homo Sapiens
ccccacagcccccacagccuggcgccagggcu

SEQ ID NO: 389486 - RNA, 32 nt, Homo Sapiens
augaugaugaggagauaggagguccaaaagaa

SEQ ID NO: 389487 - RNA, 32 nt, Homo Sapiens
uugcccucauucuccuguuucagguuugcuuc

SEQ ID NO: 389488 - RNA, 32 nt, Homo Sapiens
aaguaaacaaguggaaagugaccuacacuuuu

SEQ ID NO: 389489 - RNA, 32 nt, Homo Sapiens
aagggcuuagggugcugguguggaguuugcac

SEQ ID NO: 389490 - RNA, 29 nt, Homo Sapiens
ccuuuauuaagcucuuggacgagguucac

SEQ ID NO: 389491 - RNA, 32 nt, Homo Sapiens
agcggaggcucaugguggggcuggggccccag

SEQ ID NO: 389492 - RNA, 32 nt, Homo Sapiens
ggcgagugcgccccgaucccccugcgcaggaa

SEQ ID NO: 389493 - RNA, 31 nt, Homo Sapiens
ccuuccuccaccucagcucagagcacaguga

SEQ ID NO: 389494 - RNA, 32 nt, Homo Sapiens
agaagagagaaauucaaacaaaauauugcugu

SEQ ID NO: 389495 - RNA, 32 nt, Homo Sapiens
gcucugcuggcggagauccccuuccuucuggg

SEQ ID NO: 389496 - RNA, 32 nt, Homo Sapiens
gccagcuuacccccaaaccuggcuccugggga

SEQ ID NO: 389497 - RNA, 32 nt, Homo Sapiens
aaaccucuuuuuggaauuuuuaaugaacuugc

SEQ ID NO: 389498 - RNA, 32 nt, Homo Sapiens
ucacuguagugggccaucauuuguuuccuucu

SEQ ID NO: 389499 - RNA, 32 nt, Homo Sapiens
agcacauaugcaaugccugauggguuccuugc

SEQ ID NO: 389500 - RNA, 32 nt, Homo Sapiens
auaauuuucccauuuuaaaaucuaaacuagac

SEQ ID NO: 389501 - RNA, 32 nt, Homo Sapiens
ccaggacuauugcacaggccugcugagcucua

SEQ ID NO: 389502 - RNA, 32 nt, Homo Sapiens
gcaggcucggccgggggcgcguaucaggcagc

SEQ ID NO: 389503 - RNA, 32 nt, Homo Sapiens
ccgcggggcggcuccgguggugcggggaaacc

SEQ ID NO: 389504 - RNA, 32 nt, Homo Sapiens
cagaggaaauagagaaauuuugaaagagaaau

SEQ ID NO: 389505 - RNA, 32 nt, Homo Sapiens
uugaauugcauucuuguaauauccccuugcuc

SEQ ID NO: 389506 - RNA, 30 nt, Homo Sapiens
gggcuagagaagcagauggccuuguuuuug

SEQ ID NO: 389507 - RNA, 32 nt, Homo Sapiens
uucacaacuauagacucauacacgcgaagugc

SEQ ID NO: 389508 - RNA, 32 nt, Homo Sapiens
auuucuagaauguuuucuuagcuuuugggguu

SEQ ID NO: 389509 - RNA, 32 nt, Homo Sapiens
gaagacccuagcguccagcuccccucaacgcu

SEQ ID NO: 389510 - RNA, 30 nt, Homo Sapiens
accaaaggcaggccugucgugcugaagcuc

SEQ ID NO: 389511 - RNA, 32 nt, Homo Sapiens
cacucuuggugcaauuucuugaggaugggaac

SEQ ID NO: 389512 - RNA, 32 nt, Homo Sapiens
ccucguggaugccucccggcggcggcgggccc

SEQ ID NO: 389513 - RNA, 32 nt, Homo Sapiens
uguacaggaaaguuaagaauaccugaaaaacu

SEQ ID NO: 389514 - RNA, 32 nt, Homo Sapiens
ucggacugggcugcccggggccacugcagcuc

SEQ ID NO: 389515 - RNA, 32 nt, Homo Sapiens
agcccucccaguuuccgcgcgccucuuuggca

SEQ ID NO: 389516 - RNA, 32 nt, Homo Sapiens
cgcucuucgauuaugacugcugcaguuuuacc

SEQ ID NO: 389517 - RNA, 32 nt, Homo Sapiens
agagccgcuccccucuccucgccccgccaccg

SEQ ID NO: 389518 - RNA, 32 nt, Homo Sapiens
ccucaggagacgguggggccgcugcauuucgg

SEQ ID NO: 389519 - RNA, 32 nt, Homo Sapiens
augggaaggaagcaugggauauagaaaagcga

SEQ ID NO: 389520 - RNA, 32 nt, Homo Sapiens
uuguagcccauuauuuuuccugugcuucccca

SEQ ID NO: 389521 - RNA, 32 nt, Homo Sapiens
cgugguacucacuggaugcacccaggccggcc

SEQ ID NO: 389522 - RNA, 32 nt, Homo Sapiens
uucaaaauucagugaaacaaacuuuuugccaa

SEQ ID NO: 389523 - RNA, 32 nt, Homo Sapiens
cugucccgcagcgcacucuacucuccagccac

SEQ ID NO: 389524 - RNA, 30 nt, Homo Sapiens
cuacugggcuuccucccuagccagagagcu

SEQ ID NO: 389525 - RNA, 32 nt, Homo Sapiens
caaaauuccagaagguaaugaagauuuaaacc

SEQ ID NO: 389526 - RNA, 32 nt, Homo Sapiens
ugugaugugugugcagagugaacagaggacuc

SEQ ID NO: 389527 - RNA, 32 nt, Homo Sapiens
cgucacccacgcugcgggcaagccauggcggg

SEQ ID NO: 389528 - RNA, 32 nt, Homo Sapiens
aauucagauaaaauuugccuauguucugcuau

SEQ ID NO: 389529 - RNA, 32 nt, Homo Sapiens
aagagauagaacacaaacauggccgacagugg

SEQ ID NO: 389530 - RNA, 32 nt, Homo Sapiens
cuccacguguucugguggaaugagaugcuccu

SEQ ID NO: 389531 - RNA, 32 nt, Homo Sapiens
ggccucucaaccaaauaacaucucagagauua

SEQ ID NO: 389532 - RNA, 32 nt, Homo Sapiens
ccaggccugccagacgcucccgccccggcacu

SEQ ID NO: 389533 - RNA, 32 nt, Homo Sapiens
caccaccaucaucaaagagcugcucaagaaau

SEQ ID NO: 389534 - RNA, 32 nt, Homo Sapiens
gaggcgaaccugggcuuagggcgccaccuaga

SEQ ID NO: 389535 - RNA, 32 nt, Homo Sapiens
caccuguaaucccagcacuuugagaggccaag

SEQ ID NO: 389536 - RNA, 32 nt, Homo Sapiens
acaauaggaugcugguuaaauaagguaugaua

SEQ ID NO: 389537 - RNA, 32 nt, Homo Sapiens
cacaaauuugaaauaauuucugaaguugauua

SEQ ID NO: 389538 - RNA, 32 nt, Homo Sapiens
gauguccaucuuccaggagagagacggucucg

SEQ ID NO: 389539 - RNA, 32 nt, Homo Sapiens
ggcaggaagcgguggcucaugccuguaauccc

SEQ ID NO: 389540 - RNA, 32 nt, Homo Sapiens
uauguagcucauuuuuuuuuuaguguagaaua

SEQ ID NO: 389541 - RNA, 32 nt, Homo Sapiens
uauuaugccaggcuucuguuccuugguuuuuu

SEQ ID NO: 389542 - RNA, 32 nt, Homo Sapiens
gcugccaggacacagggucuggccuggcucac

SEQ ID NO: 389543 - RNA, 32 nt, Homo Sapiens
aagagcuugcccaggcuuccucucucucccuu

SEQ ID NO: 389544 - RNA, 32 nt, Homo Sapiens
gauaucaaaccaaaaacuagagggggcagggc

SEQ ID NO: 389545 - RNA, 32 nt, Homo Sapiens
aauacaagggcagagcugguaucccggggagc

SEQ ID NO: 389546 - RNA, 32 nt, Homo Sapiens
gaaggagugcgugccugcuacgaacgcuccaa

SEQ ID NO: 389547 - RNA, 32 nt, Homo Sapiens
uucaucagauuguugaaagauaauuuuuggga

SEQ ID NO: 389548 - RNA, 32 nt, Homo Sapiens
gcacaggaguagcagcagcaggacaggcaaga

SEQ ID NO: 389549 - RNA, 32 nt, Homo Sapiens
ucaggugagcgcggggcugggagucuaaccug

SEQ ID NO: 389550 - RNA, 32 nt, Homo Sapiens
gugcuguaaacuaaaacaaauugugcauuccu

SEQ ID NO: 389551 - RNA, 32 nt, Homo Sapiens
agguuggccugccucugucagagguguuuaaa

SEQ ID NO: 389552 - RNA, 32 nt, Homo Sapiens
agcgucuacucgugcacugaauaaaaacagaa

SEQ ID NO: 389553 - RNA, 32 nt, Homo Sapiens
agccgagauugugccauugcacugcagccugg

SEQ ID NO: 389554 - RNA, 32 nt, Homo Sapiens
cccuggccucagggcucugacucugccagggu

SEQ ID NO: 389555 - RNA, 32 nt, Homo Sapiens
gauggaacuguacagcuuaguguacagguaau

SEQ ID NO: 389556 - RNA, 32 nt, Homo Sapiens
gagucacaaccugugugugcgcgcaagguuag

SEQ ID NO: 389557 - RNA, 32 nt, Homo Sapiens
gauaauugaaguaaauaucuuuuauacaaaca

SEQ ID NO: 389558 - RNA, 32 nt, Homo Sapiens
uacuuaaacucagucucagcuuccucaucugu

SEQ ID NO: 389559 - RNA, 32 nt, Homo Sapiens
gcgagccggcgcccagcccagccuggcgacug

SEQ ID NO: 389560 - RNA, 32 nt, Homo Sapiens
gaauuuuugaguucgccagauagagaaaucag

SEQ ID NO: 389561 - RNA, 32 nt, Homo Sapiens
uaccgcccggcgggagcgccucuccuccgcgu

SEQ ID NO: 389562 - RNA, 32 nt, Homo Sapiens
ggucauugguaugggcugaacuguguaucccc

SEQ ID NO: 389563 - RNA, 32 nt, Homo Sapiens
ggaaagagauguuuuucuuaguugucuacuuu

SEQ ID NO: 389564 - RNA, 32 nt, Homo Sapiens
aagaagacaauuuucucaaguaaacuacacau

SEQ ID NO: 389565 - RNA, 32 nt, Homo Sapiens
ccaucaggauccagucuggaaaacagaaacca

SEQ ID NO: 389566 - RNA, 32 nt, Homo Sapiens
uuuuacuuuuucuguuacaguuuugcuaauuu

SEQ ID NO: 389567 - RNA, 32 nt, Homo Sapiens
auuaacuucuguacaugaaaugucuaauaaaa

SEQ ID NO: 389568 - RNA, 32 nt, Homo Sapiens
caaauaaaaagagaggaagaaaaacuaucucu

SEQ ID NO: 389569 - RNA, 32 nt, Homo Sapiens
aacuauaauuuaaugcaaaauauccuuuuaug

SEQ ID NO: 389570 - RNA, 32 nt, Homo Sapiens
gggucccaaggugggaccacaucagacauguu

SEQ ID NO: 389571 - RNA, 32 nt, Homo Sapiens
cccucagagcucacacauccacgaacaaauga

SEQ ID NO: 389572 - RNA, 32 nt, Homo Sapiens
auggauaggguggucauccuuuccgaucaucu

SEQ ID NO: 389573 - RNA, 32 nt, Homo Sapiens
acuugaggccuauaauacaaucugcuacuuua

SEQ ID NO: 389574 - RNA, 32 nt, Homo Sapiens
cagaguuugaauucgugagcugacaaagagua

SEQ ID NO: 389575 - RNA, 32 nt, Homo Sapiens
gaaacuuguggaugcugugaccucaagaagac

SEQ ID NO: 389576 - RNA, 32 nt, Homo Sapiens
ugaugcaaucuuuuuuuuuuuaauuuaauuua

SEQ ID NO: 389577 - RNA, 32 nt, Homo Sapiens
uugguccggcggcaggggaggggguuuugauu

SEQ ID NO: 389578 - RNA, 32 nt, Homo Sapiens
uuuuugaauugcaaaaucagaccuuggccaug

SEQ ID NO: 389579 - RNA, 32 nt, Homo Sapiens
cugggguguugcacuuugggggauggagucuc

SEQ ID NO: 389580 - RNA, 32 nt, Homo Sapiens
cccguacucuccagaguacugaagauucuccc

SEQ ID NO: 389581 - RNA, 32 nt, Homo Sapiens
ggaaagcagggggacaugugucccucagcuca

SEQ ID NO: 389582 - RNA, 32 nt, Homo Sapiens
cacuacuacuuuuuuauuaaacgauguuaaau

SEQ ID NO: 389583 - RNA, 32 nt, Homo Sapiens
aaauaagaugacugggaaaaagacacacccac

SEQ ID NO: 389584 - RNA, 32 nt, Homo Sapiens
uucuuauguuuuucucuuuucccuucagagcu

SEQ ID NO: 389585 - RNA, 32 nt, Homo Sapiens
gcaggcucccgcugcggccgggaccucgcauc

SEQ ID NO: 389586 - RNA, 32 nt, Homo Sapiens
ggcauucaauuccugcagaaaccggaaaucuu

SEQ ID NO: 389587 - RNA, 32 nt, Homo Sapiens
cagugcaucgaguucuguuuccguggaaaaug

SEQ ID NO: 389588 - RNA, 32 nt, Homo Sapiens
agaccaauuucugcuucaaaaagcacugaaug

SEQ ID NO: 389589 - RNA, 32 nt, Homo Sapiens
ggccggacgcgguggcuuacgcuuguaguccc

SEQ ID NO: 389590 - RNA, 32 nt, Homo Sapiens
agcgcgcuccgggucuggcucugguagucacu

SEQ ID NO: 389591 - RNA, 32 nt, Homo Sapiens
aaauagcuggaagacaguacuuuagaaacaaa

SEQ ID NO: 389592 - RNA, 32 nt, Homo Sapiens
ucagcuguuucucccagcaucauaccucaaga

SEQ ID NO: 389593 - RNA, 32 nt, Homo Sapiens
aggaaaauugucuuaggccacacauaaaauac

SEQ ID NO: 389594 - RNA, 32 nt, Homo Sapiens
aauuucuggcaaugggcaauggucaucgauug

SEQ ID NO: 389595 - RNA, 30 nt, Homo Sapiens
uucugcgucgcggaagcgggucccgcaggu

SEQ ID NO: 389596 - RNA, 32 nt, Homo Sapiens
ccagcaccaaggcgagcuccgggcucagacca

SEQ ID NO: 389597 - RNA, 32 nt, Homo Sapiens
acuucucucagacuuacuuuacucauuuuuuu

SEQ ID NO: 389598 - RNA, 32 nt, Homo Sapiens
gcauuaagguaacccauugccaaguaucauuc

SEQ ID NO: 389599 - RNA, 32 nt, Homo Sapiens
cuaaacaaagauugugccaccgaaguguguag

SEQ ID NO: 389600 - RNA, 32 nt, Homo Sapiens
gcgcuccuccuccagcccccagcccgcagggu

SEQ ID NO: 389601 - RNA, 32 nt, Homo Sapiens
ucuugucuuuuuucuuuuugguauaaguucuu

SEQ ID NO: 389602 - RNA, 32 nt, Homo Sapiens
uguauaaaguuccacauggaagcuggguugcc

SEQ ID NO: 389603 - RNA, 32 nt, Homo Sapiens
auguuuaccuugcuccacggagcugcuaaccu

SEQ ID NO: 389604 - RNA, 32 nt, Homo Sapiens
agggaaacuugacuaacguaaugauucucaca

SEQ ID NO: 389605 - RNA, 32 nt, Homo Sapiens
gacaucaccggcugcacgcagcugccacacau

SEQ ID NO: 389606 - RNA, 32 nt, Homo Sapiens
aaucaaaauuuuuugccuuccauuuuucuggg

SEQ ID NO: 389607 - RNA, 32 nt, Homo Sapiens
ggcauuuggaagguuagguggaugcuguggcg

SEQ ID NO: 389608 - RNA, 32 nt, Homo Sapiens
cccucugagugaaacugcuagaguauauguca

SEQ ID NO: 389609 - RNA, 32 nt, Homo Sapiens
agaccuucugccucuggcucugccuacucauu

SEQ ID NO: 389610 - RNA, 32 nt, Homo Sapiens
agggcggagggcgggggccuucggggugggcg

SEQ ID NO: 389611 - RNA, 32 nt, Homo Sapiens
ucuacuaaaaauacaaaaaauuagcugggcau

SEQ ID NO: 389612 - RNA, 32 nt, Homo Sapiens
cuuucuuccagaaggagauuuaaccauaguag

SEQ ID NO: 389613 - RNA, 32 nt, Homo Sapiens
uuucuuuccuucccucuccagagauguugguu

SEQ ID NO: 389614 - RNA, 32 nt, Homo Sapiens
ucaaugcaaauaaacauucacuuuuuaccuaa

SEQ ID NO: 389615 - RNA, 32 nt, Homo Sapiens
gcccuggcuuucccuuuccacggguaacgcug

SEQ ID NO: 389616 - RNA, 32 nt, Homo Sapiens
cucccaccaaccccacgcagcccucucuaucc

SEQ ID NO: 389617 - RNA, 32 nt, Homo Sapiens
ccguugugcugcggcgccgcgcggccugcagu

SEQ ID NO: 389618 - RNA, 32 nt, Homo Sapiens
acacgccccccacucagcccagcccgccuguc

SEQ ID NO: 389619 - RNA, 32 nt, Homo Sapiens
gguggacacgcagcugcaggcgcuugcucucu

SEQ ID NO: 389620 - RNA, 32 nt, Homo Sapiens
ugauacccacuuuuugugaauaccuacccccu

SEQ ID NO: 389621 - RNA, 32 nt, Homo Sapiens
aaaagcuguuuaggaaaccuaagucagcagaa

SEQ ID NO: 389622 - RNA, 32 nt, Homo Sapiens
cguguggccggggccccaggggcaggagcugc

SEQ ID NO: 389623 - RNA, 28 nt, Homo Sapiens
ucagaaguggcuacgaggugauguaggg

SEQ ID NO: 389624 - RNA, 32 nt, Homo Sapiens
ggcccuguguggaacggugcuggaccaccugg

SEQ ID NO: 389625 - RNA, 32 nt, Homo Sapiens
uuaccugacucaaggagugucuggagcaccuc

SEQ ID NO: 389626 - RNA, 32 nt, Homo Sapiens
aauccaggucccauccucuccucacucaaggg

SEQ ID NO: 389627 - RNA, 32 nt, Homo Sapiens
acacugcucaaagagauuggagaugacacaaa

SEQ ID NO: 389628 - RNA, 32 nt, Homo Sapiens
gggcggaucacgaggucagaucaagaacaucc

SEQ ID NO: 389629 - RNA, 32 nt, Homo Sapiens
aaggcggggacaugacugauccccucagagca

SEQ ID NO: 389630 - RNA, 32 nt, Homo Sapiens
aucccuucuuuuccuuuugcaaucagauaaau

SEQ ID NO: 389631 - RNA, 32 nt, Homo Sapiens
acgaggucaggagaucgacaccauccuggcua

SEQ ID NO: 389632 - RNA, 29 nt, Homo Sapiens
cuauagggacguccucaguucuuucuguu

SEQ ID NO: 389633 - RNA, 32 nt, Homo Sapiens
cauuugguaaugucuguacaggcuguacugaa

SEQ ID NO: 389634 - RNA, 32 nt, Homo Sapiens
cacuuccccccuccccuccgccgcgccugggc

SEQ ID NO: 389635 - RNA, 32 nt, Homo Sapiens
cuggguucaagcgauucuccuaccucagccuc

SEQ ID NO: 389636 - RNA, 32 nt, Homo Sapiens
uaagacuggaaguccuauuuuauuuaaucagu

SEQ ID NO: 389637 - RNA, 32 nt, Homo Sapiens
uuacauaagcuguguauacacacacacacaca

SEQ ID NO: 389638 - RNA, 32 nt, Homo Sapiens
uuaucuggaaguauuucuuuuugugaagccau

SEQ ID NO: 389639 - RNA, 31 nt, Homo Sapiens
cccuuuaaauaaaaauauuagaucaaauacu

SEQ ID NO: 389640 - RNA, 32 nt, Homo Sapiens
agguguucugucaucacacucucuuuacuaga

SEQ ID NO: 389641 - RNA, 32 nt, Homo Sapiens
cuugcccacuucuccuucgcuuuccugagccc

SEQ ID NO: 389642 - RNA, 31 nt, Homo Sapiens
ccccuucccagcugccugccugcccuagcca

SEQ ID NO: 389643 - RNA, 32 nt, Homo Sapiens
uuggguagcucuugcuuuaauauucuguuugg

SEQ ID NO: 389644 - RNA, 32 nt, Homo Sapiens
auaaaguacuuucuaauacauucuauugacuc

SEQ ID NO: 389645 - RNA, 32 nt, Homo Sapiens
acuggauuuucuucuucaguaugugcuucucc

SEQ ID NO: 389646 - RNA, 32 nt, Homo Sapiens
aagaagaagcugccaagaagugacccuugccc

SEQ ID NO: 389647 - RNA, 32 nt, Homo Sapiens
cggcggcgacgacgaggaagacgccgaggccu

SEQ ID NO: 389648 - RNA, 32 nt, Homo Sapiens
uccaguagacuagacgaaucuucuuuccauag

SEQ ID NO: 389649 - RNA, 32 nt, Homo Sapiens
agaaaugauauuacgguuuuuaaaagaaacau

SEQ ID NO: 389650 - RNA, 32 nt, Homo Sapiens
caaaggugaccaaaaagaccacacugcaugac

SEQ ID NO: 389651 - RNA, 32 nt, Homo Sapiens
uaggucuauaauuuuuuuuuuaauuuuucuuc

SEQ ID NO: 389652 - RNA, 32 nt, Homo Sapiens
uugucgacauucagcucauauggcaucuguuc

SEQ ID NO: 389653 - RNA, 32 nt, Homo Sapiens
ccgcucggaccccaggccgccggugcugucgc

SEQ ID NO: 389654 - RNA, 32 nt, Homo Sapiens
ucaucccaaaugacaaggaauguggcucagag

SEQ ID NO: 389655 - RNA, 32 nt, Homo Sapiens
aauucuccuucauagacauuuuauaaagcucu

SEQ ID NO: 389656 - RNA, 32 nt, Homo Sapiens
guuuauggcuguaaucugcaaacucugggagg

SEQ ID NO: 389657 - RNA, 32 nt, Homo Sapiens
uuauaucaucuuacaaauaaugguguccacuc

SEQ ID NO: 389658 - RNA, 32 nt, Homo Sapiens
acacacggccccagccaccugcaacuuaugug

SEQ ID NO: 389659 - RNA, 32 nt, Homo Sapiens
ccggauuugcucccaccacggggucugcagca

SEQ ID NO: 389660 - RNA, 32 nt, Homo Sapiens
aauaacuuacacaaugcuaaacugugaguaug

SEQ ID NO: 389661 - RNA, 32 nt, Homo Sapiens
cucugucagaauuguguguacucuguaacauc

SEQ ID NO: 389662 - RNA, 32 nt, Homo Sapiens
augucuugacuucccuuccauuuuugucagca

SEQ ID NO: 389663 - RNA, 32 nt, Homo Sapiens
guuggugaugguuuuuucuuccuuguuggacc

SEQ ID NO: 389664 - RNA, 32 nt, Homo Sapiens
aaaaguuauuuuuguuucuuaguguuguguug

SEQ ID NO: 389665 - RNA, 32 nt, Homo Sapiens
aauugaaggguggucaguaguuucauuuccuu

SEQ ID NO: 389666 - RNA, 32 nt, Homo Sapiens
gauccaaaaaaauuauugccaaauccaguguu

SEQ ID NO: 389667 - RNA, 32 nt, Homo Sapiens
cccugagccaccagcccugcagccugcccuau

SEQ ID NO: 389668 - RNA, 32 nt, Homo Sapiens
acuauauucuuuguuaauuuuaauuuuguccu

SEQ ID NO: 389669 - RNA, 32 nt, Homo Sapiens
acaacuaaauguucaaucaguuuguuugccua

SEQ ID NO: 389670 - RNA, 32 nt, Homo Sapiens
aggaucuucccacuuccugcucccuguguucc

SEQ ID NO: 389671 - RNA, 32 nt, Homo Sapiens
uuuuuauauugacucugcggcgcgggcccuuu

SEQ ID NO: 389672 - RNA, 32 nt, Homo Sapiens
ucucaaaaacaguaaaaaaugaaaauggcauu

SEQ ID NO: 389673 - RNA, 32 nt, Homo Sapiens
caggaggagcagcacccgagcccuggaguggc

SEQ ID NO: 389674 - RNA, 32 nt, Homo Sapiens
acuccccaugcgggcgcgggacacuccaucuc

SEQ ID NO: 389675 - RNA, 32 nt, Homo Sapiens
guuggcuucagggugagaagugagaagcagcu

SEQ ID NO: 389676 - RNA, 32 nt, Homo Sapiens
gagcccuugcggugcugguguccguggcgugc

SEQ ID NO: 389677 - RNA, 32 nt, Homo Sapiens
uuauuccagacguaucucuguaaauucuucua

SEQ ID NO: 389678 - RNA, 32 nt, Homo Sapiens
cccgucuccaacccaacucaauaaaaaaugau

SEQ ID NO: 389679 - RNA, 32 nt, Homo Sapiens
guugcuuugauucuauuggauuuuuggcauuu

SEQ ID NO: 389680 - RNA, 32 nt, Homo Sapiens
ccaggagguucaguaaaugguccaaguacucc

SEQ ID NO: 389681 - RNA, 32 nt, Homo Sapiens
uauuuucccuuauaaagguugguuacuuuucc

SEQ ID NO: 389682 - RNA, 32 nt, Homo Sapiens
gggacugggggcggggccgcgcggagggcaag

SEQ ID NO: 389683 - RNA, 32 nt, Homo Sapiens
uccugaccucaggugaucugcccgccucgguc

SEQ ID NO: 389684 - RNA, 32 nt, Homo Sapiens
aaagaaacaacaaccccaggagaugggaccug

SEQ ID NO: 389685 - RNA, 32 nt, Homo Sapiens
guggcgaaggcacagcucagagacauaaagag

SEQ ID NO: 389686 - RNA, 32 nt, Homo Sapiens
agggcgcgggagcuaccagcuuggaggggagg

SEQ ID NO: 389687 - RNA, 32 nt, Homo Sapiens
uaccuguggccugcgccgcgcgggcaggcacc

SEQ ID NO: 389688 - RNA, 32 nt, Homo Sapiens
caccuggccugcgggaggcuguguacacuugg

SEQ ID NO: 389689 - RNA, 32 nt, Homo Sapiens
ggauggcgguccuuugauaagacccauaggca

SEQ ID NO: 389690 - RNA, 32 nt, Homo Sapiens
gcaguuuugaaaaagaaauugcuuaaucacaa

SEQ ID NO: 389691 - RNA, 32 nt, Homo Sapiens
acuagggucagggucucuggcucucagcugcc

SEQ ID NO: 389692 - RNA, 32 nt, Homo Sapiens
aaaauacaaaaauuagccaggugugguggggg

SEQ ID NO: 389693 - RNA, 32 nt, Homo Sapiens
uauggucuugccaaccuccccaguuauguuuu

SEQ ID NO: 389694 - RNA, 32 nt, Homo Sapiens
cccagccccacacucacauguacgaaguucuc

SEQ ID NO: 389695 - RNA, 32 nt, Homo Sapiens
uugcuguggugcccaacguccuggccaacgug

SEQ ID NO: 389696 - RNA, 32 nt, Homo Sapiens
cacaaauuuucuuccacuucugccacuccuga

SEQ ID NO: 389697 - RNA, 32 nt, Homo Sapiens
uccuugucaaggcauggaccagggucauucag

SEQ ID NO: 389698 - RNA, 32 nt, Homo Sapiens
ugaacgccacaccucaggauuccuccuccuug

SEQ ID NO: 389699 - RNA, 32 nt, Homo Sapiens
caaauuacaaaacaccgguguugggcagaauu

SEQ ID NO: 389700 - RNA, 32 nt, Homo Sapiens
cauaauaaugagccaguuuuuaccauccauau

SEQ ID NO: 389701 - RNA, 32 nt, Homo Sapiens
uuuugaaugaacuaguuuaauguggauccaaa

SEQ ID NO: 389702 - RNA, 32 nt, Homo Sapiens
cucccagccgucugcugcugcugcaggaggcu

SEQ ID NO: 389703 - RNA, 32 nt, Homo Sapiens
gcagugagaaccgcacgcuggugcuggagguu

SEQ ID NO: 389704 - RNA, 32 nt, Homo Sapiens
cacagcuccucggggggcccaggccgauggca

SEQ ID NO: 389705 - RNA, 32 nt, Homo Sapiens
uaaaaugaauuuuaaaugcauuuuuucuuuag

SEQ ID NO: 389706 - RNA, 32 nt, Homo Sapiens
gaauaagaugacucacaucuguuuaacuugaa

SEQ ID NO: 389707 - RNA, 32 nt, Homo Sapiens
gugaccuaggguccaggggagggcuggaucgc

SEQ ID NO: 389708 - RNA, 32 nt, Homo Sapiens
guagaaucuugagcuccauuccaggucaacug

SEQ ID NO: 389709 - RNA, 32 nt, Homo Sapiens
aaaccuguauaaauuacuggugcauaacuuaa

SEQ ID NO: 389710 - RNA, 32 nt, Homo Sapiens
cccgcgcagcccagcccugcccugcccugccc

SEQ ID NO: 389711 - RNA, 27 nt, Homo Sapiens
ccucuccccuacagcagcccccuuccu

SEQ ID NO: 389712 - RNA, 32 nt, Homo Sapiens
gccgacccgcggcgccuuccccccgcguccua

SEQ ID NO: 389713 - RNA, 32 nt, Homo Sapiens
guggaggggcccagugggggccccgcagcccc

SEQ ID NO: 389714 - RNA, 30 nt, Homo Sapiens
ggagaaauauuuuccuacaagaguacugaa

SEQ ID NO: 389715 - RNA, 32 nt, Homo Sapiens
gauucaucuuccgggcagacacacccuguucg

SEQ ID NO: 389716 - RNA, 32 nt, Homo Sapiens
uguccagacguagccaccuggccucuguuucu

SEQ ID NO: 389717 - RNA, 32 nt, Homo Sapiens
gaaaguuucuucaacucugaaucaaaagcuga

SEQ ID NO: 389718 - RNA, 32 nt, Homo Sapiens
acugaaauaccaggagauuucuacacaaaucu

SEQ ID NO: 389719 - RNA, 32 nt, Homo Sapiens
ggaaucuaugcaaggaguaaaguaaaaccauc

SEQ ID NO: 389720 - RNA, 32 nt, Homo Sapiens
cgccgcguacgcgcgcccuacccaguggugga

SEQ ID NO: 389721 - RNA, 32 nt, Homo Sapiens
cauuaagaauccaaagauuagagucuaccaaa

SEQ ID NO: 389722 - RNA, 32 nt, Homo Sapiens
aaaguucagcaccagcagcagaggaaacccag

SEQ ID NO: 389723 - RNA, 32 nt, Homo Sapiens
cacaaaccauugcccggcacuggcccgugcug

SEQ ID NO: 389724 - RNA, 32 nt, Homo Sapiens
agagaagcauuugguaagcuuuaugauauaua

SEQ ID NO: 389725 - RNA, 32 nt, Homo Sapiens
ggcucuuccuguuuuuacuccuccuuuucauu

SEQ ID NO: 389726 - RNA, 30 nt, Homo Sapiens
cuauuuggaucuuuugcccaucuuaaauug

SEQ ID NO: 389727 - RNA, 32 nt, Homo Sapiens
ucccuuugucagucucuucccucccccagucu

SEQ ID NO: 389728 - RNA, 32 nt, Homo Sapiens
ccacuagccccggcuggggcccuucccugacu

SEQ ID NO: 389729 - RNA, 32 nt, Homo Sapiens
gauauagcauagugguucucagcacagucucc

SEQ ID NO: 389730 - RNA, 32 nt, Homo Sapiens
cgagggggcccucaggcccacccuggcugucc

SEQ ID NO: 389731 - RNA, 32 nt, Homo Sapiens
ugccaucaacuuuguuuccucaucucaaauaa

SEQ ID NO: 389732 - RNA, 32 nt, Homo Sapiens
uagugaagaagcugggggaagacugcuucagc

SEQ ID NO: 389733 - RNA, 32 nt, Homo Sapiens
ccuucccuuuccuaaggcaauagugcacaacu

SEQ ID NO: 389734 - RNA, 32 nt, Homo Sapiens
ggccucccuggccaugcugaacucuucaguca

SEQ ID NO: 389735 - RNA, 32 nt, Homo Sapiens
gccaggauccuccacagccacguagaucguag

SEQ ID NO: 389736 - RNA, 32 nt, Homo Sapiens
agucauugaaguuuuuuuuucuuuacauaaau

SEQ ID NO: 389737 - RNA, 32 nt, Homo Sapiens
ucccacuccuccuggggugcugccugccacca

SEQ ID NO: 389738 - RNA, 32 nt, Homo Sapiens
gcggcaucugucaucaucugucagcaguacca

SEQ ID NO: 389739 - RNA, 27 nt, Homo Sapiens
cuuucuucauucuucagcauauuaucc

SEQ ID NO: 389740 - RNA, 32 nt, Homo Sapiens
uucugcuuauacaaaauccuuaacaccucaug

SEQ ID NO: 389741 - RNA, 32 nt, Homo Sapiens
caccgcauguaaagucaaaauaaaauauacaa

SEQ ID NO: 389742 - RNA, 32 nt, Homo Sapiens
cugggggcggccagcccucccagcaguggcuu

SEQ ID NO: 389743 - RNA, 32 nt, Homo Sapiens
agagccgcagcgggaccugcccggcccccggg

SEQ ID NO: 389744 - RNA, 32 nt, Homo Sapiens
ggccaccccccucuucaggcugcugcaggagg

SEQ ID NO: 389745 - RNA, 32 nt, Homo Sapiens
ucucagccuucuccccgcggccagcugggucu

SEQ ID NO: 389746 - RNA, 32 nt, Homo Sapiens
ccuaggcuugacaauacuuaaauugaacauuu

SEQ ID NO: 389747 - RNA, 29 nt, Homo Sapiens
cuuuuaaaaauauauuuggcuuuuaaagu

SEQ ID NO: 389748 - RNA, 32 nt, Homo Sapiens
cuccugggaaaggggccgcugcugucuggugc

SEQ ID NO: 389749 - RNA, 32 nt, Homo Sapiens
cccggcccggccuggcccuucaggggauggcc

SEQ ID NO: 389750 - RNA, 32 nt, Homo Sapiens
cauguaccugaacgccccggcgcucgcucugc

SEQ ID NO: 389751 - RNA, 32 nt, Homo Sapiens
aauugauguuuccauuaaucuuuuucuggggg

SEQ ID NO: 389752 - RNA, 32 nt, Homo Sapiens
gugccucuuuuggagaagacauguuuauuuuu

SEQ ID NO: 389753 - RNA, 32 nt, Homo Sapiens
uuuccuuuuauuauuucucuguauguuguauu

SEQ ID NO: 389754 - RNA, 32 nt, Homo Sapiens
gggucacccucucccuccccagcccugaaggc

SEQ ID NO: 389755 - RNA, 32 nt, Homo Sapiens
gugcuguaaaauuuauacuaaaauguggacua

SEQ ID NO: 389756 - RNA, 32 nt, Homo Sapiens
agacuaucagcggcagaucucuccagggaaga

SEQ ID NO: 389757 - RNA, 32 nt, Homo Sapiens
cccuuucacucuugaggccugggaggugaaaa

SEQ ID NO: 389758 - RNA, 32 nt, Homo Sapiens
ugaaguauauaaagaaguuuuauauucucuca

SEQ ID NO: 389759 - RNA, 32 nt, Homo Sapiens
aucagugcgaagaaaaucauuggcucagauug

SEQ ID NO: 389760 - RNA, 32 nt, Homo Sapiens
ccaacuuguaaaaagaaaagugccuguaaaga

SEQ ID NO: 389761 - RNA, 32 nt, Homo Sapiens
uucaaugcacugaaaagucaucugaaaaaaua

SEQ ID NO: 389762 - RNA, 32 nt, Homo Sapiens
ggacaagacaccuccaggagcccagcucacag

SEQ ID NO: 389763 - RNA, 32 nt, Homo Sapiens
gagaauuaaaauaaaacguuaucucauugcaa

SEQ ID NO: 389764 - RNA, 32 nt, Homo Sapiens
aggcgcccggugccggccacgacgaccgccac

SEQ ID NO: 389765 - RNA, 32 nt, Homo Sapiens
acagucagcucucuccuuucagggccaauccc

SEQ ID NO: 389766 - RNA, 32 nt, Homo Sapiens
aagagucuuuugcauuuguucugugacaccuu

SEQ ID NO: 389767 - RNA, 32 nt, Homo Sapiens
cacccacaccaaucaaauaaaggauuugggca

SEQ ID NO: 389768 - RNA, 32 nt, Homo Sapiens
uggcaaauuguuucuuuuuuauguuuugggug

SEQ ID NO: 389769 - RNA, 32 nt, Homo Sapiens
uaggugaguaauuuaauuuuguucagucagau

SEQ ID NO: 389770 - RNA, 32 nt, Homo Sapiens
aaggggugaggguggggggcacuguacccuuc

SEQ ID NO: 389771 - RNA, 32 nt, Homo Sapiens
aauaggguguccaccucuccccggugcucgcc

SEQ ID NO: 389772 - RNA, 32 nt, Homo Sapiens
ccccucuuuuucugcccuccccuccaacucag

SEQ ID NO: 389773 - RNA, 32 nt, Homo Sapiens
uggccuuauuuuuuuacccaggccccauguca

SEQ ID NO: 389774 - RNA, 32 nt, Homo Sapiens
ugggggcuucuuccucacacugcuguccucuc

SEQ ID NO: 389775 - RNA, 32 nt, Homo Sapiens
guagucauagaauacagaaauaguuuagggac

SEQ ID NO: 389776 - RNA, 32 nt, Homo Sapiens
uuuggacauuuaagguguaguguuaaauagga

SEQ ID NO: 389777 - RNA, 32 nt, Homo Sapiens
augcagcagagucuccuccaucuugaacaaac

SEQ ID NO: 389778 - RNA, 32 nt, Homo Sapiens
agaaaaaauaaucaaaaauguugggauuuuag

SEQ ID NO: 389779 - RNA, 32 nt, Homo Sapiens
aggugggcuugguccagcucuugcugggccuu

SEQ ID NO: 389780 - RNA, 32 nt, Homo Sapiens
uauuguggaaauuuauagaauaguauacacca

SEQ ID NO: 389781 - RNA, 32 nt, Homo Sapiens
gucagagggcaguuaagagggaucacaggccc

SEQ ID NO: 389782 - RNA, 29 nt, Homo Sapiens
gaguuaacugugaaauaccacaagccuga

SEQ ID NO: 389783 - RNA, 32 nt, Homo Sapiens
gccuguuucccucucagccuggaggcuggcug

SEQ ID NO: 389784 - RNA, 32 nt, Homo Sapiens
cuuugagcccuuugguaucuuuuccacaacag

SEQ ID NO: 389785 - RNA, 32 nt, Homo Sapiens
gaggaccgaaaucccggcuccaggccucgggg

SEQ ID NO: 389786 - RNA, 32 nt, Homo Sapiens
agggaagaguuccuagucuguuguguucaaac

SEQ ID NO: 389787 - RNA, 32 nt, Homo Sapiens
uggacugaagugcaauuuguugaaagggaaca

SEQ ID NO: 389788 - RNA, 32 nt, Homo Sapiens
aauguguugcugucagacugauguagaaugag

SEQ ID NO: 389789 - RNA, 32 nt, Homo Sapiens
ggcgagcagcgggaggugcgggcucugucuag

SEQ ID NO: 389790 - RNA, 32 nt, Homo Sapiens
guaaaaagaacaacacuuguuaugagggcaug

SEQ ID NO: 389791 - RNA, 32 nt, Homo Sapiens
uccaggcaacugagcccuacucgcagguccuc

SEQ ID NO: 389792 - RNA, 32 nt, Homo Sapiens
gaaggaaaaccuuuuccauacacccaggcuau

SEQ ID NO: 389793 - RNA, 32 nt, Homo Sapiens
cacacggaauaugcuaagaaaacuaucagaua

SEQ ID NO: 389794 - RNA, 31 nt, Homo Sapiens
cucuaggagccccaguagcccaggagcuugg

SEQ ID NO: 389795 - RNA, 31 nt, Homo Sapiens
ugucaucugccgguucucuuagggcucccgg

SEQ ID NO: 389796 - RNA, 32 nt, Homo Sapiens
cauauggauauuaaaaauggggaauugcacau

SEQ ID NO: 389797 - RNA, 32 nt, Homo Sapiens
cugcaucaguauacauaacaugaaggaauaaa

SEQ ID NO: 389798 - RNA, 32 nt, Homo Sapiens
auuguuugcacuuaauccuuaacuguauuaac

SEQ ID NO: 389799 - RNA, 32 nt, Homo Sapiens
agcccacucauccuuuccccagcccucuucag

SEQ ID NO: 389800 - RNA, 32 nt, Homo Sapiens
aacaacuucaucaccuggacaaacaccaaauu

SEQ ID NO: 389801 - RNA, 32 nt, Homo Sapiens
ccugcccucgaccuucccaccuccucagaucc

SEQ ID NO: 389802 - RNA, 32 nt, Homo Sapiens
agcagagagguaugggaagcagacacggagag

SEQ ID NO: 389803 - RNA, 32 nt, Homo Sapiens
ugccuccccacgcuccuccugcggauccuuca

SEQ ID NO: 389804 - RNA, 32 nt, Homo Sapiens
gggccaaggaacccgggcgcuccgaacuccca

SEQ ID NO: 389805 - RNA, 32 nt, Homo Sapiens
cucagugcggggagcaggcugcugcugcugac

SEQ ID NO: 389806 - RNA, 32 nt, Homo Sapiens
uaauuuuucccaugguacuugcuagugacugu

SEQ ID NO: 389807 - RNA, 32 nt, Homo Sapiens
ccauccagaagcgcuuccugcagcaggaaucc

SEQ ID NO: 389808 - RNA, 32 nt, Homo Sapiens
acccuguucugagacuucugaggcugccccca

SEQ ID NO: 389809 - RNA, 32 nt, Homo Sapiens
uccaauugccagcaaccucugcuuguccggaa

SEQ ID NO: 389810 - RNA, 32 nt, Homo Sapiens
gcguucucucaaaggaaagcuaugcaucgcug

SEQ ID NO: 389811 - RNA, 32 nt, Homo Sapiens
ccucugcagcccacugcugagguccuccagac

SEQ ID NO: 389812 - RNA, 32 nt, Homo Sapiens
aggacugaggccuggguuccgaguggggcggc

SEQ ID NO: 389813 - RNA, 32 nt, Homo Sapiens
uguucacauuauggcuuuaaaauaaugaauau

SEQ ID NO: 389814 - RNA, 32 nt, Homo Sapiens
aagucccuucgaggcuccgccggcgcggggcg

SEQ ID NO: 389815 - RNA, 32 nt, Homo Sapiens
ugauaaauacaggugaauaaaaugaaugauua

SEQ ID NO: 389816 - RNA, 32 nt, Homo Sapiens
cugcggaauagacguuuuagcugcugaguaug

SEQ ID NO: 389817 - RNA, 32 nt, Homo Sapiens
ucagacgccucccuggagagccaagcuggugu

SEQ ID NO: 389818 - RNA, 32 nt, Homo Sapiens
gucacuagaauggcagcggcagcaaauagggc

SEQ ID NO: 389819 - RNA, 32 nt, Homo Sapiens
gugaagcagaggugauggggcugggcugagcc

SEQ ID NO: 389820 - RNA, 32 nt, Homo Sapiens
ggagcuccggugcugcagccgccacgaauggg

SEQ ID NO: 389821 - RNA, 32 nt, Homo Sapiens
agaggaagggaagaauuggggggcagccggag

SEQ ID NO: 389822 - RNA, 32 nt, Homo Sapiens
aucagaugaagaagaagaagaugaugaagaau

SEQ ID NO: 389823 - RNA, 32 nt, Homo Sapiens
guccgagcguguuucuggcccgcuggacuaua

SEQ ID NO: 389824 - RNA, 32 nt, Homo Sapiens
uugauuguuugaauuugaaaaauacacacgaa

SEQ ID NO: 389825 - RNA, 32 nt, Homo Sapiens
agucagacgcagcaaaaacuguuucaggguga

SEQ ID NO: 389826 - RNA, 32 nt, Homo Sapiens
cgugccaguggcggcugguaucccgcggcggc

SEQ ID NO: 389827 - RNA, 32 nt, Homo Sapiens
gugcagguagacaacgcccauaaacagagaug

SEQ ID NO: 389828 - RNA, 32 nt, Homo Sapiens
accacaccuuggccuucugggaacucuccuuu

SEQ ID NO: 389829 - RNA, 32 nt, Homo Sapiens
cuuuaagauaaaaaugcauacgauuuuuacac

SEQ ID NO: 389830 - RNA, 32 nt, Homo Sapiens
cagagggguugccgaggcaaccuccaaguccc

SEQ ID NO: 389831 - RNA, 32 nt, Homo Sapiens
uuccccgcgccggacccaaaagaugaacggaa

SEQ ID NO: 389832 - RNA, 32 nt, Homo Sapiens
cagacuguggggugggggugggagcaggugug

SEQ ID NO: 389833 - RNA, 32 nt, Homo Sapiens
auaaggagauaaauguuucuuuaugcacuuag

SEQ ID NO: 389834 - RNA, 32 nt, Homo Sapiens
gcaugggacugaaccagcuggugguggcccga

SEQ ID NO: 389835 - RNA, 32 nt, Homo Sapiens
ggggugccaggaacacacacauccuccauccc

SEQ ID NO: 389836 - RNA, 32 nt, Homo Sapiens
cuccgcucuugcccgaaggaccucugaaguac

SEQ ID NO: 389837 - RNA, 32 nt, Homo Sapiens
cuuuccaguuuaaugaaagcuuaaaugucccu

SEQ ID NO: 389838 - RNA, 32 nt, Homo Sapiens
aucccagccccgagacccaaaacaagaagcau

SEQ ID NO: 389839 - RNA, 32 nt, Homo Sapiens
uccccacuucuucaguguacgcugcucauagu

SEQ ID NO: 389840 - RNA, 32 nt, Homo Sapiens
guucacaaggccaguuucugaucguccgcccc

SEQ ID NO: 389841 - RNA, 32 nt, Homo Sapiens
cuuucagaggauaaagaccuuaaugaaugugc

SEQ ID NO: 389842 - RNA, 32 nt, Homo Sapiens
ccuucacacccucacagaggcaucaugcaaag

SEQ ID NO: 389843 - RNA, 32 nt, Homo Sapiens
agugguggccccucagcccacccucccggcag

SEQ ID NO: 389844 - RNA, 32 nt, Homo Sapiens
gccuacacagacaaaucaggagggaacagaau

SEQ ID NO: 389845 - RNA, 32 nt, Homo Sapiens
gacuuggggacaccccagaauccccuggggag

SEQ ID NO: 389846 - RNA, 32 nt, Homo Sapiens
cccaguggaaauuguggauuucaccaaagacu

SEQ ID NO: 389847 - RNA, 32 nt, Homo Sapiens
agcagucacacuguuacuccacagcggaggag

SEQ ID NO: 389848 - RNA, 32 nt, Homo Sapiens
agagaaaguauuuuguguucaaauaaacuuua

SEQ ID NO: 389849 - RNA, 32 nt, Homo Sapiens
aaugcccacauuuuaacuuuuaaacuucugaa

SEQ ID NO: 389850 - RNA, 32 nt, Homo Sapiens
cggcaucugccagcucagcacagaagacaccg

SEQ ID NO: 389851 - RNA, 32 nt, Homo Sapiens
gccggggcccagggcugcguuugcuccuggcc

SEQ ID NO: 389852 - RNA, 32 nt, Homo Sapiens
ugucacacagaggcugcugggaggaaggagga

SEQ ID NO: 389853 - RNA, 32 nt, Homo Sapiens
ucuacucugaugcccccaagaugcaacugggc

SEQ ID NO: 389854 - RNA, 32 nt, Homo Sapiens
aauuaaaaacgaaagacuuuuaaaaacauaca

SEQ ID NO: 389855 - RNA, 32 nt, Homo Sapiens
aaaauuacaucuaaauucugguaaacucuugc

SEQ ID NO: 389856 - RNA, 32 nt, Homo Sapiens
ugggccccguuucuaggaaguaccagccccau

SEQ ID NO: 389857 - RNA, 32 nt, Homo Sapiens
ucuccugaggcugagggaggguggagggucuc

SEQ ID NO: 389858 - RNA, 32 nt, Homo Sapiens
ucucuacucaucuccuucucauuaucuaccug

SEQ ID NO: 389859 - RNA, 32 nt, Homo Sapiens
auaauuccuauuauuucuauaauuggauacuc

SEQ ID NO: 389860 - RNA, 31 nt, Homo Sapiens
aaacgugaaaacacucaaggccuagggggag

SEQ ID NO: 389861 - RNA, 32 nt, Homo Sapiens
aucuuacugcuuaauguauaaacucucaccac

SEQ ID NO: 389862 - RNA, 32 nt, Homo Sapiens
ugugguguuauagugguaacugcaguuccucc

SEQ ID NO: 389863 - RNA, 32 nt, Homo Sapiens
gcuugcauccuccuuuccuccuccuccucaca

SEQ ID NO: 389864 - RNA, 32 nt, Homo Sapiens
ggucccaggcugcugacuggccccacacugug

SEQ ID NO: 389865 - RNA, 32 nt, Homo Sapiens
aaaacaaaacaaaacacuguaucagcuguucu

SEQ ID NO: 389866 - RNA, 32 nt, Homo Sapiens
gcgcggccgggcgcgcggcgccgccacaaguu

SEQ ID NO: 389867 - RNA, 32 nt, Homo Sapiens
gcuaucgcuagggaacccacggugacugaauc

SEQ ID NO: 389868 - RNA, 32 nt, Homo Sapiens
aggcuuuuuuaaaaaauguuguguaucuguau

SEQ ID NO: 389869 - RNA, 32 nt, Homo Sapiens
uagacauguuucccuauugcuuucauaggcac

SEQ ID NO: 389870 - RNA, 32 nt, Homo Sapiens
uguaguuugaaauguaaaaauguucuaauauc

SEQ ID NO: 389871 - RNA, 32 nt, Homo Sapiens
ggggacagccuucagcagcagcucacacccua

SEQ ID NO: 389872 - RNA, 32 nt, Homo Sapiens
acuuuugucugcacauaacucuuuuuucacaa

SEQ ID NO: 389873 - RNA, 32 nt, Homo Sapiens
gcgccucucugugccagggaggcugggagagc

SEQ ID NO: 389874 - RNA, 32 nt, Homo Sapiens
caccucccucccccggccccugguaggcaugg

SEQ ID NO: 389875 - RNA, 32 nt, Homo Sapiens
ggaccuuuccaaugcgucucuuucuccuguua

SEQ ID NO: 389876 - RNA, 32 nt, Homo Sapiens
ggcccuggguuagagucugggcguggacgcgc

SEQ ID NO: 389877 - RNA, 32 nt, Homo Sapiens
gcgggccggcucggcuucugaccuggcaccgc

SEQ ID NO: 389878 - RNA, 32 nt, Homo Sapiens
gagccccgcacaguccagugugaggggagcgg

SEQ ID NO: 389879 - RNA, 32 nt, Homo Sapiens
ccucugcuccgccaccggcuuccuccuccuga

SEQ ID NO: 389880 - RNA, 32 nt, Homo Sapiens
uuaggaaacaaauuggaauaugaucuguuacc

SEQ ID NO: 389881 - RNA, 32 nt, Homo Sapiens
uuagauuugaugacucuuuuucugccuccaaa

SEQ ID NO: 389882 - RNA, 32 nt, Homo Sapiens
uuaguucucauuuaagcacuacuggaauuuuu

SEQ ID NO: 389883 - RNA, 32 nt, Homo Sapiens
cgcccuucccucuucuccuuacauauuauagg

SEQ ID NO: 389884 - RNA, 32 nt, Homo Sapiens
cacagggugggcagcgccuucucccggcuucc

SEQ ID NO: 389885 - RNA, 32 nt, Homo Sapiens
gcgaaugccagaccaaugauacccagagcuac

SEQ ID NO: 389886 - RNA, 32 nt, Homo Sapiens
cuuuauuauagaagaaguauuaaugaaggacu

SEQ ID NO: 389887 - RNA, 32 nt, Homo Sapiens
ucuagucugaaucagcuguuauuccaagcuau

SEQ ID NO: 389888 - RNA, 32 nt, Homo Sapiens
agacagcgggcuccugucucgggacgcuggga

SEQ ID NO: 389889 - RNA, 32 nt, Homo Sapiens
ugcccggcccugugguucugcggccgcgcagu

SEQ ID NO: 389890 - RNA, 32 nt, Homo Sapiens
cccucccuccaagagguccugcucccucugcc

SEQ ID NO: 389891 - RNA, 32 nt, Homo Sapiens
aauuugagaggaaugucuuugguuuuaaaugc

SEQ ID NO: 389892 - RNA, 32 nt, Homo Sapiens
ucuuccccacccagcggcagccggaagcagcu

SEQ ID NO: 389893 - RNA, 32 nt, Homo Sapiens
acguggcaccaguggauagugugagagaauua

SEQ ID NO: 389894 - RNA, 32 nt, Homo Sapiens
ugaggaugaaaagccaauauguuaaggacaug

SEQ ID NO: 389895 - RNA, 32 nt, Homo Sapiens
cucaccgcgggcccaugcccgguuuggcacgu

SEQ ID NO: 389896 - RNA, 32 nt, Homo Sapiens
caggggcagcuagaggaugaggggggaggaua

SEQ ID NO: 389897 - RNA, 32 nt, Homo Sapiens
augugucagaggagggccuuggugggagauga

SEQ ID NO: 389898 - RNA, 32 nt, Homo Sapiens
uccccgccgcggcugagccaugcggcucccug

SEQ ID NO: 389899 - RNA, 32 nt, Homo Sapiens
ccaguaugugcuacuacuaacauucuucaugu

SEQ ID NO: 389900 - RNA, 32 nt, Homo Sapiens
cacccauuucuacuuuuugcaccuuauuuucu

SEQ ID NO: 389901 - RNA, 32 nt, Homo Sapiens
gggccccaaugcaccgucccucagcucaggag

SEQ ID NO: 389902 - RNA, 32 nt, Homo Sapiens
guuuuauacuaaauaaaacccaucagcauggg

SEQ ID NO: 389903 - RNA, 32 nt, Homo Sapiens
guuugcuucugggacgucugugccccgcaagu

SEQ ID NO: 389904 - RNA, 32 nt, Homo Sapiens
ucucugcuuccuuagucggaaguguuuucaac

SEQ ID NO: 389905 - RNA, 32 nt, Homo Sapiens
agcaaucuguuguuucuugccugccuuuuggg

SEQ ID NO: 389906 - RNA, 32 nt, Homo Sapiens
cccgggccagcugccccaccccugcccaugcc

SEQ ID NO: 389907 - RNA, 32 nt, Homo Sapiens
uauaugguuugugaauucagagacauuaccag

SEQ ID NO: 389908 - RNA, 32 nt, Homo Sapiens
uuacuucaaaaauuaaauucaacuucuuauaa

SEQ ID NO: 389909 - RNA, 32 nt, Homo Sapiens
auuccccgcgcccuucccgcccggcaccccac

SEQ ID NO: 389910 - RNA, 32 nt, Homo Sapiens
ccgcucgcugcugcugacgugccuggugccgg

SEQ ID NO: 389911 - RNA, 30 nt, Homo Sapiens
ccuccaggcaggcuuuuuggugcuaggccc

SEQ ID NO: 389912 - RNA, 32 nt, Homo Sapiens
uccuccacucagcauuccauggaccaaauugu

SEQ ID NO: 389913 - RNA, 32 nt, Homo Sapiens
ucaaaugugagccuauggaucaagacgguuac

SEQ ID NO: 389914 - RNA, 32 nt, Homo Sapiens
ggcaagauacuuguuuguuucuuucuuucuuu

SEQ ID NO: 389915 - RNA, 32 nt, Homo Sapiens
acgcgcuccgcggcgguagcucgggcucuccg

SEQ ID NO: 389916 - RNA, 32 nt, Homo Sapiens
gucuggugguggcaaggaccagguuugcuuug

SEQ ID NO: 389917 - RNA, 32 nt, Homo Sapiens
aggaagaggaggagcgcagucggagcgcggcg

SEQ ID NO: 389918 - RNA, 32 nt, Homo Sapiens
gggggucuagcuuuggccccagcagccacuuu

SEQ ID NO: 389919 - RNA, 32 nt, Homo Sapiens
cgcccccagcacccccucuccucuucaccucu

SEQ ID NO: 389920 - RNA, 32 nt, Homo Sapiens
cuaggcagagaagaggcgauggcggcgauggc

SEQ ID NO: 389921 - RNA, 32 nt, Homo Sapiens
uuuucaggccccacccuuauugauucugauca

SEQ ID NO: 389922 - RNA, 32 nt, Homo Sapiens
ccaauggggggaggagaucaauacaauucccc

SEQ ID NO: 389923 - RNA, 32 nt, Homo Sapiens
auuuccacuuuuagauccuacuccauaccaca

SEQ ID NO: 389924 - RNA, 32 nt, Homo Sapiens
acauccgccucccggguucaggugauucuccu

SEQ ID NO: 389925 - RNA, 32 nt, Homo Sapiens
acucucuggagcgucgugucuccaucacuuag

SEQ ID NO: 389926 - RNA, 32 nt, Homo Sapiens
aaguugaauuuuccuuuuuuuucauugaaaua

SEQ ID NO: 389927 - RNA, 32 nt, Homo Sapiens
caguccucgcguccggccgccccgcgcucagu

SEQ ID NO: 389928 - RNA, 29 nt, Homo Sapiens
uuauuucuuuugauucggacgaggugcac

SEQ ID NO: 389929 - RNA, 32 nt, Homo Sapiens
ggccgccugccagcuaugggcccccacacccu

SEQ ID NO: 389930 - RNA, 32 nt, Homo Sapiens
gaugcggguguccugagcaagcaauaaugcca

SEQ ID NO: 389931 - RNA, 32 nt, Homo Sapiens
aucccaacuggggcuccuggggguacaggaau

SEQ ID NO: 389932 - RNA, 32 nt, Homo Sapiens
aagcccacacuccgcgcgacuccaggcgcacg

SEQ ID NO: 389933 - RNA, 32 nt, Homo Sapiens
guagcugggauuacaggcaugcacuaccacac

SEQ ID NO: 389934 - RNA, 32 nt, Homo Sapiens
agguuuucacugcuuuuucuuuuacauaauau

SEQ ID NO: 389935 - RNA, 32 nt, Homo Sapiens
gcucccuccgcugcacgcccaggccugagcag

SEQ ID NO: 389936 - RNA, 32 nt, Homo Sapiens
cuaaagugcucuuaugagagacuugugggcca

SEQ ID NO: 389937 - RNA, 32 nt, Homo Sapiens
aauguaaaaugguaaaaucacuuuugaaaaca

SEQ ID NO: 389938 - RNA, 32 nt, Homo Sapiens
uuagaucucuaaaugcagcaaaacacugccug

SEQ ID NO: 389939 - RNA, 32 nt, Homo Sapiens
cuguuacucccugggagaaaggcgcugagcgu

SEQ ID NO: 389940 - RNA, 32 nt, Homo Sapiens
gaugaaaaugucaguuuuugaaggguccaugc

SEQ ID NO: 389941 - RNA, 32 nt, Homo Sapiens
cccccuguucuuccucccaacgaaagcaugga

SEQ ID NO: 389942 - RNA, 32 nt, Homo Sapiens
cuaccccaagacccgggcuucgcgccagguga

SEQ ID NO: 389943 - RNA, 32 nt, Homo Sapiens
cuaccaaaaguacuugaccucaaguaaccaau

SEQ ID NO: 389944 - RNA, 31 nt, Homo Sapiens
agcacaaaauaaaaagcaucuguauuaaugu

SEQ ID NO: 389945 - RNA, 32 nt, Homo Sapiens
cuccucuugggguacaggugguuuuguguccu

SEQ ID NO: 389946 - RNA, 30 nt, Homo Sapiens
cugccccacugugcuggcaggagcugacug

SEQ ID NO: 389947 - RNA, 32 nt, Homo Sapiens
ucuggcccccaggagcaagaccucugaugaug

SEQ ID NO: 389948 - RNA, 32 nt, Homo Sapiens
aucugccuuugucaucacugggugggaccacg

SEQ ID NO: 389949 - RNA, 32 nt, Homo Sapiens
caacacccacccacuucucacacuggccuuaa

SEQ ID NO: 389950 - RNA, 32 nt, Homo Sapiens
cuuuagagaaaguuaagucuguguucugcuua

SEQ ID NO: 389951 - RNA, 32 nt, Homo Sapiens
uccuuucugauggggagcgucugagugcagau

SEQ ID NO: 389952 - RNA, 32 nt, Homo Sapiens
aagaccuccuuaggguccgagugucgcuuccc

SEQ ID NO: 389953 - RNA, 32 nt, Homo Sapiens
acuuagugggucuaauaaaguauguugauuca

SEQ ID NO: 389954 - RNA, 32 nt, Homo Sapiens
ccaugggagaaaguaaccucuggccuuacuug

SEQ ID NO: 389955 - RNA, 32 nt, Homo Sapiens
aggagugugggaaugaaggaauucuggagcuu

SEQ ID NO: 389956 - RNA, 32 nt, Homo Sapiens
gcagauguuguuaaacguaccucugcauacag

SEQ ID NO: 389957 - RNA, 32 nt, Homo Sapiens
gcuaugauguuugagaccaaucuuuaacaucu

SEQ ID NO: 389958 - RNA, 32 nt, Homo Sapiens
ccugugguccugcucugagacucgucccuggg

SEQ ID NO: 389959 - RNA, 32 nt, Homo Sapiens
cgacagggccccacccugcuagccuuugaacu

SEQ ID NO: 389960 - RNA, 32 nt, Homo Sapiens
auaagccuaccuuugguuauuacccuggaaaa

SEQ ID NO: 389961 - RNA, 32 nt, Homo Sapiens
cacccuagacagagacccacccgugauacucu

SEQ ID NO: 389962 - RNA, 32 nt, Homo Sapiens
ccuguacuucucugcugguuugcugcccuaug

SEQ ID NO: 389963 - RNA, 32 nt, Homo Sapiens
gcucucccuccccacaccccacccaaagcaua

SEQ ID NO: 389964 - RNA, 32 nt, Homo Sapiens
aguggaguaacuauucagauuaugagagcauc

SEQ ID NO: 389965 - RNA, 32 nt, Homo Sapiens
gcugcccucccacccccauucccggccaacuc

SEQ ID NO: 389966 - RNA, 32 nt, Homo Sapiens
gggaaaggccagcgucagguauuccuaggagg

SEQ ID NO: 389967 - RNA, 32 nt, Homo Sapiens
aacccaugcagggccucggacuccccaagaag

SEQ ID NO: 389968 - RNA, 32 nt, Homo Sapiens
uuguuaugcaauauuauaucaccaacccagua

SEQ ID NO: 389969 - RNA, 32 nt, Homo Sapiens
gccgcuucccgaugggaaugggcuggaagacg

SEQ ID NO: 389970 - RNA, 32 nt, Homo Sapiens
cuuugaaguggaagaaagaugaacccaggaaa

SEQ ID NO: 389971 - RNA, 32 nt, Homo Sapiens
cggggcggucacgugagagcacugccgcggug

SEQ ID NO: 389972 - RNA, 32 nt, Homo Sapiens
ugccccgccguccuccuucccgcggccgugag

SEQ ID NO: 389973 - RNA, 32 nt, Homo Sapiens
ccugguuaggaauuauuuucaauacacaauca

SEQ ID NO: 389974 - RNA, 32 nt, Homo Sapiens
uuugcauuuuaaugggaaauuuucaacccuua

SEQ ID NO: 389975 - RNA, 32 nt, Homo Sapiens
uucuaguauuuugauuauuugaaucuuacagc

SEQ ID NO: 389976 - RNA, 32 nt, Homo Sapiens
ggacugaugcuguggggugcugguggagcagc

SEQ ID NO: 389977 - RNA, 32 nt, Homo Sapiens
ugagucaagagcauccugcuucuaccaugugg

SEQ ID NO: 389978 - RNA, 32 nt, Homo Sapiens
gcaucaagauuacgaggcaucaccucucaauc

SEQ ID NO: 389979 - RNA, 32 nt, Homo Sapiens
aaauauuuaaaguggauacaaaauuauuucag

SEQ ID NO: 389980 - RNA, 32 nt, Homo Sapiens
cugguggguuugaugugauggaugcuggcucg

SEQ ID NO: 389981 - RNA, 32 nt, Homo Sapiens
cggggcggggguggaggacgagagagcggucg

SEQ ID NO: 389982 - RNA, 32 nt, Homo Sapiens
uuggaucuauagaacauccagaguaagugaug

SEQ ID NO: 389983 - RNA, 32 nt, Homo Sapiens
gucccuguccccagcccaccauggcuuggggu

SEQ ID NO: 389984 - RNA, 29 nt, Homo Sapiens
gaaaauauuguguaauauuuucugcaauc

SEQ ID NO: 389985 - RNA, 32 nt, Homo Sapiens
uggacucuucagucuggaggguccuggccucc

SEQ ID NO: 389986 - RNA, 32 nt, Homo Sapiens
gacuucgugauuuuuguuuugcacuaaaguuu

SEQ ID NO: 389987 - RNA, 32 nt, Homo Sapiens
ugccucuuugaaaaauacaaaaauuagcugga

SEQ ID NO: 389988 - RNA, 32 nt, Homo Sapiens
agccaacaaauuauauuuauugguuggcuugc

SEQ ID NO: 389989 - RNA, 32 nt, Homo Sapiens
uggacgaccagcguuguccccuggacgauggc

SEQ ID NO: 389990 - RNA, 32 nt, Homo Sapiens
aaggggccuagaaggacaaaaggcuuucauuc

SEQ ID NO: 389991 - RNA, 32 nt, Homo Sapiens
guuauuuuuaugucuuuuaugcccuugauuau

SEQ ID NO: 389992 - RNA, 32 nt, Homo Sapiens
cugcaaguuuagcuugaauuaagggauuuggg

SEQ ID NO: 389993 - RNA, 32 nt, Homo Sapiens
cagcugccaugugugcuaaggcuggugucccu

SEQ ID NO: 389994 - RNA, 32 nt, Homo Sapiens
ucgcaccgccccggcuccccagcccaccgcca

SEQ ID NO: 389995 - RNA, 32 nt, Homo Sapiens
uucucuuacaguguuucuaccaucucagaaaa

SEQ ID NO: 389996 - RNA, 32 nt, Homo Sapiens
ugaucgguguggcggcggcggcggcggcggcc

SEQ ID NO: 389997 - RNA, 32 nt, Homo Sapiens
gcccggucucguggcaucaggcaugacuucca

SEQ ID NO: 389998 - RNA, 32 nt, Homo Sapiens
uucaugcuuuucucaugguauuaucuaguagg

SEQ ID NO: 389999 - RNA, 32 nt, Homo Sapiens
aacaaccauaugguuguuccauuuucauaaaa

SEQ ID NO: 390000 - RNA, 32 nt, Homo Sapiens
ugcuuugggaaaucacaccaaccccgcacccc

SEQ ID NO: 390001 - RNA, 31 nt, Homo Sapiens
aguccgauggcagcggcugugccgaggcgcc

SEQ ID NO: 390002 - RNA, 32 nt, Homo Sapiens
uuguaauugugcuagugcugggugcugagcuc

SEQ ID NO: 390003 - RNA, 32 nt, Homo Sapiens
gucgccgcgggccaggccucggacugccgcgu

SEQ ID NO: 390004 - RNA, 32 nt, Homo Sapiens
uaaauauaucugauagcaacacuuaagauauu

SEQ ID NO: 390005 - RNA, 32 nt, Homo Sapiens
cgcucgcuugaccgcggcgcccgcccccggcc

SEQ ID NO: 390006 - RNA, 32 nt, Homo Sapiens
agcagugagugaguaaggaaaccuggcugccc

SEQ ID NO: 390007 - RNA, 32 nt, Homo Sapiens
aauaaugcaaacaaaauugggcuaauaaaaau

SEQ ID NO: 390008 - RNA, 32 nt, Homo Sapiens
cauugcuaaaugaguucugcuuucuuuuugga

SEQ ID NO: 390009 - RNA, 32 nt, Homo Sapiens
ucucggccaugccugccuugggaagcacuacc

SEQ ID NO: 390010 - RNA, 32 nt, Homo Sapiens
auuaaugguuauuucuuuuucuuggauuucca

SEQ ID NO: 390011 - RNA, 32 nt, Homo Sapiens
uucuuagaaauauuuuaaugcuaacuuguuag

SEQ ID NO: 390012 - RNA, 32 nt, Homo Sapiens
caacagguacuauuugucacauaacuaacuuu

SEQ ID NO: 390013 - RNA, 32 nt, Homo Sapiens
gucucuaccugcggcccggccuggugagccca

SEQ ID NO: 390014 - RNA, 32 nt, Homo Sapiens
uuauacauauauauacacacguguauaugaga

SEQ ID NO: 390015 - RNA, 32 nt, Homo Sapiens
accaucucuaccccacccaaauaaaaaugcac

SEQ ID NO: 390016 - RNA, 32 nt, Homo Sapiens
augaaauguaaauaaacuuuggacagaaaaua

SEQ ID NO: 390017 - RNA, 32 nt, Homo Sapiens
agagcccacuccuuccuccccacugauucccu

SEQ ID NO: 390018 - RNA, 32 nt, Homo Sapiens
cuauagaauauuaagauaagaaggauguaugu

SEQ ID NO: 390019 - RNA, 32 nt, Homo Sapiens
augaauuuaguuuuuugacagcagccauucug

SEQ ID NO: 390020 - RNA, 32 nt, Homo Sapiens
cgcgugucugcgccugugugcgcagccaguuu

SEQ ID NO: 390021 - RNA, 32 nt, Homo Sapiens
auaaggacuggcaaccagagccucagcaucca

SEQ ID NO: 390022 - RNA, 32 nt, Homo Sapiens
ggcuagcagggagaggggcggagaggcagcga

SEQ ID NO: 390023 - RNA, 32 nt, Homo Sapiens
cuccugggugucaaguacucuguugugugcuu

SEQ ID NO: 390024 - RNA, 32 nt, Homo Sapiens
gcucuauauugcuugaagucugcaucuaaaua

SEQ ID NO: 390025 - RNA, 32 nt, Homo Sapiens
ccccaaacuuccagguuccauccaccaccuug

SEQ ID NO: 390026 - RNA, 32 nt, Homo Sapiens
gccgcccgccugcaacgugcacuuccuguccu

SEQ ID NO: 390027 - RNA, 32 nt, Homo Sapiens
uggauuuacaagcacccaucaugaguuugcag

SEQ ID NO: 390028 - RNA, 32 nt, Homo Sapiens
cgggcccgcggcgucgggcggugcggaugucg

SEQ ID NO: 390029 - RNA, 32 nt, Homo Sapiens
auacccugaaaagaagugaugacuuguugcuu

SEQ ID NO: 390030 - RNA, 32 nt, Homo Sapiens
cagcuguuuuuggcuaagggcuuuuggagcug

SEQ ID NO: 390031 - RNA, 32 nt, Homo Sapiens
aauuaaaagggaaaacaaaaccaaaaaaacca

SEQ ID NO: 390032 - RNA, 32 nt, Homo Sapiens
gguguugccugaagcccuccguggccucuugc

SEQ ID NO: 390033 - RNA, 32 nt, Homo Sapiens
ggggccacaaaauaaacuucaccuuccauuaa

SEQ ID NO: 390034 - RNA, 32 nt, Homo Sapiens
ucagccggcagacaagcagacagauguccuua

SEQ ID NO: 390035 - RNA, 32 nt, Homo Sapiens
gacugcuuucccuuuagucuuuaugcauagcu

SEQ ID NO: 390036 - RNA, 32 nt, Homo Sapiens
acaccuacaucauccuaacuuacaucacacug

SEQ ID NO: 390037 - RNA, 32 nt, Homo Sapiens
uagggacaggguauagcuuagaugguggaaag

SEQ ID NO: 390038 - RNA, 32 nt, Homo Sapiens
uagaaaaauauucuauuuuuuauucagugcug

SEQ ID NO: 390039 - RNA, 32 nt, Homo Sapiens
cacaccagcgcugaugcccaauaaagaugccc

SEQ ID NO: 390040 - RNA, 32 nt, Homo Sapiens
ccucuggccucccacacggucuucaacggggc

SEQ ID NO: 390041 - RNA, 32 nt, Homo Sapiens
ucaguuuccccauuuuacccuuccacacaaua

SEQ ID NO: 390042 - RNA, 32 nt, Homo Sapiens
cgucccugcccccaggcauuggcaucaacaaa

SEQ ID NO: 390043 - RNA, 32 nt, Homo Sapiens
ccuagaaagaaggaugaacacucuuccacaga

SEQ ID NO: 390044 - RNA, 32 nt, Homo Sapiens
cauuaggucccaaaugggggccccauuucacc

SEQ ID NO: 390045 - RNA, 32 nt, Homo Sapiens
ccuucuucauuuccacccacgcucccagccuc

SEQ ID NO: 390046 - RNA, 32 nt, Homo Sapiens
cagagcccacaagccaaagacggagugggccg

SEQ ID NO: 390047 - RNA, 32 nt, Homo Sapiens
cuacaagaauuauagcuuuaaaaaauacaacc

SEQ ID NO: 390048 - RNA, 32 nt, Homo Sapiens
ugcagaaacuuauuaaugaaauccauuuaaac

SEQ ID NO: 390049 - RNA, 32 nt, Homo Sapiens
cuguuuuaauauauuuuugugacuuucaaaaa

SEQ ID NO: 390050 - RNA, 32 nt, Homo Sapiens
cgguggcgccaugucguucugcagcuucuucg

SEQ ID NO: 390051 - RNA, 32 nt, Homo Sapiens
cauccugcaaaggcccuugucauugccuucgc

SEQ ID NO: 390052 - RNA, 32 nt, Homo Sapiens
ggacucugacaguccuuuguauaaaggacuaa

SEQ ID NO: 390053 - RNA, 32 nt, Homo Sapiens
ugagugaaacuaaauuaaugagaagaauaaaa

SEQ ID NO: 390054 - RNA, 30 nt, Homo Sapiens
uaaauaggagguggagggcaagccauccug

SEQ ID NO: 390055 - RNA, 32 nt, Homo Sapiens
cuugcugcagggagccgagagucgacgcgucg

SEQ ID NO: 390056 - RNA, 32 nt, Homo Sapiens
gcaguuuucuuaccuuugccugcccugccuuu

SEQ ID NO: 390057 - RNA, 32 nt, Homo Sapiens
gacccuaagcgucaggacguggcauuggucga

SEQ ID NO: 390058 - RNA, 32 nt, Homo Sapiens
agcccaugaagaugacaucaccggggaacccu

SEQ ID NO: 390059 - RNA, 32 nt, Homo Sapiens
ccgcggcucuccccuuccccagccucgaagcc

SEQ ID NO: 390060 - RNA, 32 nt, Homo Sapiens
gauaguucugccucuuuuuuuuuuuuuuccug

SEQ ID NO: 390061 - RNA, 32 nt, Homo Sapiens
gaaaauugaauuacuuguuuccugaaauauuc

SEQ ID NO: 390062 - RNA, 32 nt, Homo Sapiens
ggcacgaggcgcuggccgggcuggcugcggcc

SEQ ID NO: 390063 - RNA, 32 nt, Homo Sapiens
cauuuuccuaaauuauuuucugauacaauaaa

SEQ ID NO: 390064 - RNA, 32 nt, Homo Sapiens
ucuuuuaguguguaucauuuuccuuuuagaaa

SEQ ID NO: 390065 - RNA, 31 nt, Homo Sapiens
gagcuggagccccagaagggaacagagcuag

SEQ ID NO: 390066 - RNA, 32 nt, Homo Sapiens
aacccccauggaugaggucagcuccuugucug

SEQ ID NO: 390067 - RNA, 32 nt, Homo Sapiens
acaaggccuaauuugcaguaacuauugcuguu

SEQ ID NO: 390068 - RNA, 32 nt, Homo Sapiens
accacgauuggcgaagcgccgucauuucggag

SEQ ID NO: 390069 - RNA, 32 nt, Homo Sapiens
uggggaguguucauaaaauuauagauguuugu

SEQ ID NO: 390070 - RNA, 32 nt, Homo Sapiens
uugcucccgucuccgacgagagaggcggcgac

SEQ ID NO: 390071 - RNA, 32 nt, Homo Sapiens
aggauuaugagacuacccuuuagguugaaguu

SEQ ID NO: 390072 - RNA, 32 nt, Homo Sapiens
agugggaucgagggcccggggcggcggcggag

SEQ ID NO: 390073 - RNA, 32 nt, Homo Sapiens
gauauagcauaaaagauugagaugaaaauaua

SEQ ID NO: 390074 - RNA, 32 nt, Homo Sapiens
gggaagguagggugugagcugcugcugaaggc

SEQ ID NO: 390075 - RNA, 32 nt, Homo Sapiens
cugaauuucugcaucugcaucuuaacaauggg

SEQ ID NO: 390076 - RNA, 32 nt, Homo Sapiens
agaugaagaugaugaagaggaccaugacauca

SEQ ID NO: 390077 - RNA, 32 nt, Homo Sapiens
ucuguggcgccggcugcuucuggagcagggug

SEQ ID NO: 390078 - RNA, 32 nt, Homo Sapiens
ggcugagcaaguaccagugacaauggccauuu

SEQ ID NO: 390079 - RNA, 32 nt, Homo Sapiens
uuugcuuguuuuaaucuagccuguuccuccac

SEQ ID NO: 390080 - RNA, 32 nt, Homo Sapiens
caugaagauaaugccugugguuaugcugaaua

SEQ ID NO: 390081 - RNA, 32 nt, Homo Sapiens
ggauaauggggaacaguggggcugggaccggg

SEQ ID NO: 390082 - RNA, 32 nt, Homo Sapiens
acauuucugauuugguuucuuaucuuucauuu

SEQ ID NO: 390083 - RNA, 32 nt, Homo Sapiens
caguguuaaugaucuaggaaacccugggcuga

SEQ ID NO: 390084 - RNA, 32 nt, Homo Sapiens
accuccgcgggcacucacccaggccggccgcu

SEQ ID NO: 390085 - RNA, 32 nt, Homo Sapiens
uucuaagaaauccacuagaaaacuauuaaaac

SEQ ID NO: 390086 - RNA, 32 nt, Homo Sapiens
ucucccccgagaccaccgcccggccccaccug

SEQ ID NO: 390087 - RNA, 32 nt, Homo Sapiens
cuccaggcuucacagcagcagcccugggggcu

SEQ ID NO: 390088 - RNA, 32 nt, Homo Sapiens
aggggucugcagagccggguaugcagggugac

SEQ ID NO: 390089 - RNA, 32 nt, Homo Sapiens
agauguuuuuaaaaguuucaaugugauucuaa

SEQ ID NO: 390090 - RNA, 32 nt, Homo Sapiens
uccugagagagaaaauuaaguacuguauauag

SEQ ID NO: 390091 - RNA, 32 nt, Homo Sapiens
accagggcugccugggucaccgggcuccccag

SEQ ID NO: 390092 - RNA, 32 nt, Homo Sapiens
caaagcaucauuccugaaaaaucagaaucaua

SEQ ID NO: 390093 - RNA, 32 nt, Homo Sapiens
uuucuuuuucaauuucaugauuguagguuauu

SEQ ID NO: 390094 - RNA, 32 nt, Homo Sapiens
gauuccugagagaugucucuggaagggaaagu

SEQ ID NO: 390095 - RNA, 31 nt, Homo Sapiens
uugcagcauagcuaccuucagaauuuagugu

SEQ ID NO: 390096 - RNA, 32 nt, Homo Sapiens
aaccaguuauuuacaguuaccuuuuuccuuua

SEQ ID NO: 390097 - RNA, 32 nt, Homo Sapiens
aaaagucauuggcagacauauauguccuugaa

SEQ ID NO: 390098 - RNA, 32 nt, Homo Sapiens
ccugcucccuccuggggaggcugacgggugug

SEQ ID NO: 390099 - RNA, 32 nt, Homo Sapiens
ugcauugagcgcgcuccagcugccgggacgga

SEQ ID NO: 390100 - RNA, 32 nt, Homo Sapiens
ucuguaugccacccacuguuaguucaaauuga

SEQ ID NO: 390101 - RNA, 32 nt, Homo Sapiens
augugucucaaguuuaacucuacaaaaauuug

SEQ ID NO: 390102 - RNA, 32 nt, Homo Sapiens
caaccguguugagcgcucaccagccaccaggc

SEQ ID NO: 390103 - RNA, 32 nt, Homo Sapiens
uaaaaaauuauuaaaaguuaaauugugacuua

SEQ ID NO: 390104 - RNA, 32 nt, Homo Sapiens
guaagggccuggggauacccccugccuggccc

SEQ ID NO: 390105 - RNA, 32 nt, Homo Sapiens
uugggcaauaaauguuuuugcuuuuuguuuga

SEQ ID NO: 390106 - RNA, 32 nt, Homo Sapiens
caaauuuuacacaaggacuaauccuggguguc

SEQ ID NO: 390107 - RNA, 32 nt, Homo Sapiens
auuuaaagauaauuguucaacaauaucauauc

SEQ ID NO: 390108 - RNA, 32 nt, Homo Sapiens
aggaugaaaccuauguuugccaaauaccagcu

SEQ ID NO: 390109 - RNA, 32 nt, Homo Sapiens
ccccagccauaccaccacaacccccuguuaaa

SEQ ID NO: 390110 - RNA, 32 nt, Homo Sapiens
gggaagggaggaauucuucaguaaauaaaucc

SEQ ID NO: 390111 - RNA, 32 nt, Homo Sapiens
cagcuucucucgcaccugcgccagaaaaguac

SEQ ID NO: 390112 - RNA, 32 nt, Homo Sapiens
accagugaguugaaaaaacuggucuuaaguug

SEQ ID NO: 390113 - RNA, 32 nt, Homo Sapiens
uguccuggccgcgaccugagaccuccaugagu

SEQ ID NO: 390114 - RNA, 32 nt, Homo Sapiens
ggagagaaacuggacuggaacuucuggaagau

SEQ ID NO: 390115 - RNA, 32 nt, Homo Sapiens
aagaccucgucuuugcuuguccugcucagaug

SEQ ID NO: 390116 - RNA, 32 nt, Homo Sapiens
ccacccccgucuuggcccagguccugggggcu

SEQ ID NO: 390117 - RNA, 32 nt, Homo Sapiens
cgcguagccgccggagcccgccgcccgggaca

SEQ ID NO: 390118 - RNA, 32 nt, Homo Sapiens
agagguucaacccacaccuccacuuugcuucu

SEQ ID NO: 390119 - RNA, 32 nt, Homo Sapiens
aggaaucauuuucucaucauuaauuaugcacu

SEQ ID NO: 390120 - RNA, 32 nt, Homo Sapiens
uggcgggccccgaggcucccagagcagccucu

SEQ ID NO: 390121 - RNA, 32 nt, Homo Sapiens
gauugcugacaguagguguauaugacaauuug

SEQ ID NO: 390122 - RNA, 32 nt, Homo Sapiens
ggagcagaagacgcgccugggcuccgcgcucu

SEQ ID NO: 390123 - RNA, 32 nt, Homo Sapiens
cauccuggccuuucuucaguccccacgugcga

SEQ ID NO: 390124 - RNA, 32 nt, Homo Sapiens
acaaccauuauuucucuucauuugcuuggcuu

SEQ ID NO: 390125 - RNA, 32 nt, Homo Sapiens
agcagcacccuaagcucugugcuaucgccuca

SEQ ID NO: 390126 - RNA, 32 nt, Homo Sapiens
agacuggaauuguuuucuuaacuucauuuuuu

SEQ ID NO: 390127 - RNA, 31 nt, Homo Sapiens
agcagcagccugcaccugccccgugugugug

SEQ ID NO: 390128 - RNA, 32 nt, Homo Sapiens
cacuuacagaauuaugaagagguaucuguuua

SEQ ID NO: 390129 - RNA, 32 nt, Homo Sapiens
caggugucagcuggugggucucccaggagcug

SEQ ID NO: 390130 - RNA, 32 nt, Homo Sapiens
cccagcagcauccgccgccugcaccgcgcgug

SEQ ID NO: 390131 - RNA, 32 nt, Homo Sapiens
uccgccgccgcccgcccggggcuccuccacag

SEQ ID NO: 390132 - RNA, 32 nt, Homo Sapiens
ucucuggaucucaguugucucaucuguaaaaa

SEQ ID NO: 390133 - RNA, 32 nt, Homo Sapiens
gcaaccauaauuccucuuucccaagguguguc

SEQ ID NO: 390134 - RNA, 32 nt, Homo Sapiens
ggaaaguuuagccuggaagcaguuggccacac

SEQ ID NO: 390135 - RNA, 32 nt, Homo Sapiens
cgcucucccugcgcucuccgcaccgcgcuuaa

SEQ ID NO: 390136 - RNA, 32 nt, Homo Sapiens
ccggacgcaggcggcagauuugcagcccggga

SEQ ID NO: 390137 - RNA, 32 nt, Homo Sapiens
uggagugccguggcgugaucucagcucacugc

SEQ ID NO: 390138 - RNA, 32 nt, Homo Sapiens
cugacuuccccgagacgcgccgcggucggcac

SEQ ID NO: 390139 - RNA, 32 nt, Homo Sapiens
uuggaguguuguuuuucucacucucaggcagg

SEQ ID NO: 390140 - RNA, 32 nt, Homo Sapiens
uuggggcugccugagcugguggcacccucccc

SEQ ID NO: 390141 - RNA, 32 nt, Homo Sapiens
ccucccgccccggcccugccucaaccuucaua

SEQ ID NO: 390142 - RNA, 32 nt, Homo Sapiens
uuccuggacuggcuugccuccuccccaccucc

SEQ ID NO: 390143 - RNA, 32 nt, Homo Sapiens
ggaucuauuuuuuuuucuuguuguucugagga

SEQ ID NO: 390144 - RNA, 32 nt, Homo Sapiens
cagauaaccacuaauuuaaacaaaauuaaauc

SEQ ID NO: 390145 - RNA, 32 nt, Homo Sapiens
gucuacuuggggagacagaaaagggaagagau

SEQ ID NO: 390146 - RNA, 32 nt, Homo Sapiens
ucggaggggacgggacgcaccggagggcaggc

SEQ ID NO: 390147 - RNA, 32 nt, Homo Sapiens
cagaagcgauuaugaaagcaacaaagaaaucc

SEQ ID NO: 390148 - RNA, 32 nt, Homo Sapiens
ugagccucuggccccgggcccccagggugcac

SEQ ID NO: 390149 - RNA, 32 nt, Homo Sapiens
agcggaguaggggggaggcggcggcagcggca

SEQ ID NO: 390150 - RNA, 32 nt, Homo Sapiens
gaggaggcauuuuuggggggcuuuccucugcu

SEQ ID NO: 390151 - RNA, 32 nt, Homo Sapiens
ccccacccugaagagagggugaaagagucgcu

SEQ ID NO: 390152 - RNA, 32 nt, Homo Sapiens
ccaaucagaugcagcuuucuccuccgucuggu

SEQ ID NO: 390153 - RNA, 32 nt, Homo Sapiens
ucuaucaggaaauuucaaguguuuccuguuau

SEQ ID NO: 390154 - RNA, 32 nt, Homo Sapiens
gacacccugcaaaagcacuucuaaauggcagg

SEQ ID NO: 390155 - RNA, 32 nt, Homo Sapiens
guauucuuuucucucugugggagugauacagu

SEQ ID NO: 390156 - RNA, 30 nt, Homo Sapiens
cgagcacugcgcaugcgggaaacccacccu

SEQ ID NO: 390157 - RNA, 32 nt, Homo Sapiens
guuuuauuuuauuuuucuuuuaauaguuauau

SEQ ID NO: 390158 - RNA, 32 nt, Homo Sapiens
gccaauucccagaauuuccccaggcaauuugu

SEQ ID NO: 390159 - RNA, 32 nt, Homo Sapiens
ccccguaccaaggcacagcaucaggauacccu

SEQ ID NO: 390160 - RNA, 32 nt, Homo Sapiens
aacugcucagagcuugagaugaaaugacauac

SEQ ID NO: 390161 - RNA, 32 nt, Homo Sapiens
gggcuguuucgcguccggccugaggcggcugg

SEQ ID NO: 390162 - RNA, 32 nt, Homo Sapiens
ccacacucauuucuggcauagaagauuccgcc

SEQ ID NO: 390163 - RNA, 30 nt, Homo Sapiens
cccugggaguuuaugggucauugaggacac

SEQ ID NO: 390164 - RNA, 32 nt, Homo Sapiens
ccuggucucgcacugccacugcauggccuccu

SEQ ID NO: 390165 - RNA, 32 nt, Homo Sapiens
cucgccccugugucggccccagcugagcaccc

SEQ ID NO: 390166 - RNA, 32 nt, Homo Sapiens
guuauuggaaaacagagcagugaccacuuccu

SEQ ID NO: 390167 - RNA, 32 nt, Homo Sapiens
cgccgccgcugccgccgccgcgcgcggauucu

SEQ ID NO: 390168 - RNA, 32 nt, Homo Sapiens
cuuuauucuucuuuaaaauuuuuaaaaucagc

SEQ ID NO: 390169 - RNA, 31 nt, Homo Sapiens
agcuccccgcagcuccugccccagcguggac

SEQ ID NO: 390170 - RNA, 32 nt, Homo Sapiens
uauaaaagggcaagcugcuugccauggaaccu

SEQ ID NO: 390171 - RNA, 32 nt, Homo Sapiens
gcacuguccccauggagcugguggcugacaaa

SEQ ID NO: 390172 - RNA, 32 nt, Homo Sapiens
gcugccccugggguuugcagggugcugcauug

SEQ ID NO: 390173 - RNA, 32 nt, Homo Sapiens
guggagcugggguuucucuccuccccaguccc

SEQ ID NO: 390174 - RNA, 32 nt, Homo Sapiens
uucccacauuuuagcaacauguucauggagag

SEQ ID NO: 390175 - RNA, 32 nt, Homo Sapiens
cuuuagguugcuucagcugauccuucaacucu

SEQ ID NO: 390176 - RNA, 32 nt, Homo Sapiens
acaaaggcaaugauguugaguauuuuauaucg

SEQ ID NO: 390177 - RNA, 32 nt, Homo Sapiens
gaaguuuaaucuuuaaacucuuuggaaauaaa

SEQ ID NO: 390178 - RNA, 32 nt, Homo Sapiens
ccucuugaaguggcuccacagcuccugucccu

SEQ ID NO: 390179 - RNA, 32 nt, Homo Sapiens
agugcuccauucucucuccacaggcagcccga

SEQ ID NO: 390180 - RNA, 32 nt, Homo Sapiens
uuagaaacaucaguuuuuguauggaagccacc

SEQ ID NO: 390181 - RNA, 32 nt, Homo Sapiens
auuuuauuugguuuuuguuuuguuuugguuuu

SEQ ID NO: 390182 - RNA, 32 nt, Homo Sapiens
agaauuuguuuuauuaaauuaauauaaaaauc

SEQ ID NO: 390183 - RNA, 32 nt, Homo Sapiens
ugggggaaagcuguuauuuuuauauuaaaaua

SEQ ID NO: 390184 - RNA, 32 nt, Homo Sapiens
acccaagguucagugacacagggugguuugga

SEQ ID NO: 390185 - RNA, 32 nt, Homo Sapiens
gaggagagcggcggccuggaugccccagcgcc

SEQ ID NO: 390186 - RNA, 32 nt, Homo Sapiens
caacgcuaguauuaagugcacuggccuuuagu

SEQ ID NO: 390187 - RNA, 32 nt, Homo Sapiens
ucugagaaaaggaaguuuugcuaagugagaga

SEQ ID NO: 390188 - RNA, 32 nt, Homo Sapiens
acuaaccauauaacuuuuauguuucuuccagu

SEQ ID NO: 390189 - RNA, 32 nt, Homo Sapiens
ccccaccccacccgccagcaggucuggggugg

SEQ ID NO: 390190 - RNA, 30 nt, Homo Sapiens
cacugaguguccgugggggaauccucguga

SEQ ID NO: 390191 - RNA, 32 nt, Homo Sapiens
uuaagaccucaacgugucuuucugggggauac

SEQ ID NO: 390192 - RNA, 32 nt, Homo Sapiens
uuuaaaucugcuucuguaaauuaugcugaaag

SEQ ID NO: 390193 - RNA, 32 nt, Homo Sapiens
cgcagugcucacccguguccccgccccgcccc

SEQ ID NO: 390194 - RNA, 32 nt, Homo Sapiens
aaguuuuaaaagcuucuaaaugucuaauauaa

SEQ ID NO: 390195 - RNA, 32 nt, Homo Sapiens
uccuuugcuucuuuuauuagacuaguguugac

SEQ ID NO: 390196 - RNA, 32 nt, Homo Sapiens
uccucccgcgcgcacgcuccgcgccugauggc

SEQ ID NO: 390197 - RNA, 32 nt, Homo Sapiens
agcagccccccuugccccaccucccccuuccc

SEQ ID NO: 390198 - RNA, 32 nt, Homo Sapiens
uguuuaaacagacaaaauauaaaguauugagu

SEQ ID NO: 390199 - RNA, 32 nt, Homo Sapiens
gcgcaccgcccggcguccaggugagucuccca

SEQ ID NO: 390200 - RNA, 32 nt, Homo Sapiens
uaaauucaauuuagaguacauaaaaaaagaaa

SEQ ID NO: 390201 - RNA, 32 nt, Homo Sapiens
agagucuuauacaaaggcauugaaagacacac

SEQ ID NO: 390202 - RNA, 32 nt, Homo Sapiens
aacuguuuauacauuuaaauucauauauguaa

SEQ ID NO: 390203 - RNA, 32 nt, Homo Sapiens
ugaguauguggaccucuuuuauaaggaaaaau

SEQ ID NO: 390204 - RNA, 32 nt, Homo Sapiens
cacacuaguccuuggaggaagguugagaccaa

SEQ ID NO: 390205 - RNA, 32 nt, Homo Sapiens
cccuuccaauauggcuagagccagacugucug

SEQ ID NO: 390206 - RNA, 32 nt, Homo Sapiens
cacugucugaugcgucaacaaaauugagccau

SEQ ID NO: 390207 - RNA, 32 nt, Homo Sapiens
ggcaggaggcggacguggggugucgugcaaua

SEQ ID NO: 390208 - RNA, 32 nt, Homo Sapiens
aggagagccaggcauggcugucugcagugugc

SEQ ID NO: 390209 - RNA, 32 nt, Homo Sapiens
uuugucacggaaaacauccucuccaaaguugg

SEQ ID NO: 390210 - RNA, 32 nt, Homo Sapiens
uccuucacucguccugaaaaucugcaaguuac

SEQ ID NO: 390211 - RNA, 32 nt, Homo Sapiens
aaaacauaaaaagcagaauuuuaaugugaaga

SEQ ID NO: 390212 - RNA, 32 nt, Homo Sapiens
cccagcgccccgaaucuugguggccgcugcug

SEQ ID NO: 390213 - RNA, 32 nt, Homo Sapiens
uuccuuucuaaagauuaauuucuugggagcaa

SEQ ID NO: 390214 - RNA, 32 nt, Homo Sapiens
auucaguccaaaaugaaauuauagggcaguuu

SEQ ID NO: 390215 - RNA, 32 nt, Homo Sapiens
aucuuuuccuucccaaucaucuuccagauugc

SEQ ID NO: 390216 - RNA, 32 nt, Homo Sapiens
uguaguauuucuguagcauucagcgcugcugu

SEQ ID NO: 390217 - RNA, 32 nt, Homo Sapiens
uucaaguucagcugauuuguugguaagccgca

SEQ ID NO: 390218 - RNA, 32 nt, Homo Sapiens
cguuaugccaccuggagcaucauaauggacuc

SEQ ID NO: 390219 - RNA, 32 nt, Homo Sapiens
gaggaaggcagaccugccgucacacgugugcu

SEQ ID NO: 390220 - RNA, 32 nt, Homo Sapiens
cucaggaauggaaagugaaauaccauauguuc

SEQ ID NO: 390221 - RNA, 32 nt, Homo Sapiens
gcguucccaccucuccuccuugggagguucca

SEQ ID NO: 390222 - RNA, 32 nt, Homo Sapiens
cuagagguccuggauucuggcuccuggcacac

SEQ ID NO: 390223 - RNA, 32 nt, Homo Sapiens
ugagagguuuguggaaaagauggcaaaugggg

SEQ ID NO: 390224 - RNA, 32 nt, Homo Sapiens
ugaaucugcauaauguucacugccaaacuccu

SEQ ID NO: 390225 - RNA, 32 nt, Homo Sapiens
ggaugcccgagggccagaugggcuuagcuagg

SEQ ID NO: 390226 - RNA, 32 nt, Homo Sapiens
cccggagcguggagcccuugggggguggucgg

SEQ ID NO: 390227 - RNA, 32 nt, Homo Sapiens
uuccuuuugggcuuauacaucucgucccuggc

SEQ ID NO: 390228 - RNA, 32 nt, Homo Sapiens
agcaugaugagcugagcuucaaggcuggggau

SEQ ID NO: 390229 - RNA, 32 nt, Homo Sapiens
cgccuggagcccaggccaguguuguuuccagc

SEQ ID NO: 390230 - RNA, 32 nt, Homo Sapiens
gggcguuggagcccgcgcgcgcauggaggcgu

SEQ ID NO: 390231 - RNA, 32 nt, Homo Sapiens
cuaggcaaaauucaaacuuauagugguaaaga

SEQ ID NO: 390232 - RNA, 32 nt, Homo Sapiens
gaucugggggaagaggaggaggagggccgauc

SEQ ID NO: 390233 - RNA, 32 nt, Homo Sapiens
auccacagaggggagagaagggucauagcuaa

SEQ ID NO: 390234 - RNA, 32 nt, Homo Sapiens
gaggucucuaucucuagaggacaguaccacag

SEQ ID NO: 390235 - RNA, 32 nt, Homo Sapiens
agagucuguuugcugcagacacccuugcuccu

SEQ ID NO: 390236 - RNA, 32 nt, Homo Sapiens
agccaugacaauuauacaccacaggcauugua

SEQ ID NO: 390237 - RNA, 32 nt, Homo Sapiens
uaaucagauuuuaccuuggagaaaugaaaauu

SEQ ID NO: 390238 - RNA, 32 nt, Homo Sapiens
uuguguuuuaucuuaaccaccagaccauuccu

SEQ ID NO: 390239 - RNA, 32 nt, Homo Sapiens
gcagaugcaagagcuccugggcaggggugccu

SEQ ID NO: 390240 - RNA, 32 nt, Homo Sapiens
aguaaaaaacaaaggcaaacuuuguacuaucc

SEQ ID NO: 390241 - RNA, 32 nt, Homo Sapiens
uccugagaaggggaacauggaaggcacauuug

SEQ ID NO: 390242 - RNA, 29 nt, Homo Sapiens
gauucauggggacagcaggcacugguuag

SEQ ID NO: 390243 - RNA, 32 nt, Homo Sapiens
aaaauacaaaaauuagauggguguaguggcac

SEQ ID NO: 390244 - RNA, 27 nt, Homo Sapiens
guagaauccuucuuuacuuuuuaaguc

SEQ ID NO: 390245 - RNA, 32 nt, Homo Sapiens
uugauucuuuguggucaucauugaauauacag

SEQ ID NO: 390246 - RNA, 32 nt, Homo Sapiens
gggauccgggugugguggcuucugccugaaau

SEQ ID NO: 390247 - RNA, 32 nt, Homo Sapiens
ucaguaacugguuucuuuaucccuaacaugaa

SEQ ID NO: 390248 - RNA, 32 nt, Homo Sapiens
accggagacuccuuuaccuaucccuaucuguu

SEQ ID NO: 390249 - RNA, 32 nt, Homo Sapiens
cccuccuccaccccauaccacacugggggguc

SEQ ID NO: 390250 - RNA, 31 nt, Homo Sapiens
guuugagcagcauuguuagagccuguggaaa

SEQ ID NO: 390251 - RNA, 32 nt, Homo Sapiens
aaggaucugggcacuuguuucuuguggggggu

SEQ ID NO: 390252 - RNA, 32 nt, Homo Sapiens
auuguuuucugcacucucaggugacggcucac

SEQ ID NO: 390253 - RNA, 32 nt, Homo Sapiens
cgcgaggagugcgggcgccgcgccgccuuuaa

SEQ ID NO: 390254 - RNA, 32 nt, Homo Sapiens
uguaaaugaagacgaauccacauggcacagga

SEQ ID NO: 390255 - RNA, 32 nt, Homo Sapiens
gcaaaugccgccucuguuugaacguuuuggua

SEQ ID NO: 390256 - RNA, 32 nt, Homo Sapiens
cgcugcucuccgcuccuuccuguaguaacagc

SEQ ID NO: 390257 - RNA, 32 nt, Homo Sapiens
auuaaggagugagucuucuuuuuuacaauaau

SEQ ID NO: 390258 - RNA, 32 nt, Homo Sapiens
gccuuaaaaaauacuaggcuaaacuuaagugg

SEQ ID NO: 390259 - RNA, 32 nt, Homo Sapiens
ccuuuuaggccauguuccauuaucucuuaaaa

SEQ ID NO: 390260 - RNA, 32 nt, Homo Sapiens
ucagauuauguucauggguuuguguguauaca

SEQ ID NO: 390261 - RNA, 32 nt, Homo Sapiens
gcagcccugggggcuccugggguucggaggca

SEQ ID NO: 390262 - RNA, 32 nt, Homo Sapiens
ccgugugcuggcccugccccagccuagcugag

SEQ ID NO: 390263 - RNA, 32 nt, Homo Sapiens
ugcuacugcaugccagccugggugacaaagcg

SEQ ID NO: 390264 - RNA, 32 nt, Homo Sapiens
ggucugggcggcgggcggcugggucugugcau

SEQ ID NO: 390265 - RNA, 32 nt, Homo Sapiens
ucccaggguucguacuucuccuccauuggucc

SEQ ID NO: 390266 - RNA, 32 nt, Homo Sapiens
ucugagcauccacguacuugcaagaacucuug

SEQ ID NO: 390267 - RNA, 32 nt, Homo Sapiens
uggacgagugcggcugccgcuacccggggcgg

SEQ ID NO: 390268 - RNA, 32 nt, Homo Sapiens
acuuuuuuguugacuuucaaguaaagugauuu

SEQ ID NO: 390269 - RNA, 32 nt, Homo Sapiens
gccgcucggccacugcacggggccccaagccg

SEQ ID NO: 390270 - RNA, 32 nt, Homo Sapiens
caguaucuauagaccaggucugugccaccucc

SEQ ID NO: 390271 - RNA, 32 nt, Homo Sapiens
uugcagaaaaggaaagggggcuggccuaaagg

SEQ ID NO: 390272 - RNA, 32 nt, Homo Sapiens
uuugaaauccaggaauuaaaucaucccuuaau

SEQ ID NO: 390273 - RNA, 32 nt, Homo Sapiens
guaccguggugccaccugaugaaauaacaguu

SEQ ID NO: 390274 - RNA, 32 nt, Homo Sapiens
augaagaauggcaaccaucaaaucaagaaauu

SEQ ID NO: 390275 - RNA, 32 nt, Homo Sapiens
gauuagacguucuuguucugggauguuaaaaa

SEQ ID NO: 390276 - RNA, 32 nt, Homo Sapiens
guggccagagucaagcauaauuuuaacuucuu

SEQ ID NO: 390277 - RNA, 32 nt, Homo Sapiens
caggugcugaaucgcaauggucuguuuagguc

SEQ ID NO: 390278 - RNA, 32 nt, Homo Sapiens
ucuuuuccaucuauugcaacuuucucaagcau

SEQ ID NO: 390279 - RNA, 32 nt, Homo Sapiens
uauaaucguaguuuaaauuuuuugauauccau

SEQ ID NO: 390280 - RNA, 32 nt, Homo Sapiens
uccuaggaaggggacugaggauugcggugggg

SEQ ID NO: 390281 - RNA, 32 nt, Homo Sapiens
auugucaaccuuaacacccaucaccaaaucgg

SEQ ID NO: 390282 - RNA, 32 nt, Homo Sapiens
augaugaagaaccucugcauucuaguuacccu

SEQ ID NO: 390283 - RNA, 27 nt, Homo Sapiens
ccauggccccgccgcuccugcugcugc

SEQ ID NO: 390284 - RNA, 32 nt, Homo Sapiens
gggcucgugauuaugcugacauuccagcauga

SEQ ID NO: 390285 - RNA, 32 nt, Homo Sapiens
uuagaagagaaaagagcaacagauuuucagcg

SEQ ID NO: 390286 - RNA, 32 nt, Homo Sapiens
ucccagccuugagggagggaacaacacuguag

SEQ ID NO: 390287 - RNA, 32 nt, Homo Sapiens
aguggccaaagagaagcagugcagggaugggu

SEQ ID NO: 390288 - RNA, 32 nt, Homo Sapiens
acuugggagaugauggugcagaugaugaaacu

SEQ ID NO: 390289 - RNA, 32 nt, Homo Sapiens
ucaaggugcccgccuggcugguuuguguggag

SEQ ID NO: 390290 - RNA, 32 nt, Homo Sapiens
aucagccaccucagccccuaguauuuuuucua

SEQ ID NO: 390291 - RNA, 32 nt, Homo Sapiens
aaguuuugagaacugugaaauguuuaggaaca

SEQ ID NO: 390292 - RNA, 32 nt, Homo Sapiens
acaaagccaucuguucaucugcagcuuuuaga

SEQ ID NO: 390293 - RNA, 32 nt, Homo Sapiens
gguaacuucucuccugcucaugugucaguguc

SEQ ID NO: 390294 - RNA, 32 nt, Homo Sapiens
ccuguccaaccccagcaggggcgcagcgggac

SEQ ID NO: 390295 - RNA, 32 nt, Homo Sapiens
ugccgaggaggaggaguaccgccagcagcugu

SEQ ID NO: 390296 - RNA, 32 nt, Homo Sapiens
uuaaguucuucucuuauuuucccuuuaguuug

SEQ ID NO: 390297 - RNA, 32 nt, Homo Sapiens
ugauguggggaagagcuauuguaggcuccccc

SEQ ID NO: 390298 - RNA, 32 nt, Homo Sapiens
ccgccauuccgggccucaagcccauaaagaaa

SEQ ID NO: 390299 - RNA, 32 nt, Homo Sapiens
aauccccugucccccuccuccuccccacucaa

SEQ ID NO: 390300 - RNA, 32 nt, Homo Sapiens
gagagccaccgccccggacuucucccucuguc

SEQ ID NO: 390301 - RNA, 32 nt, Homo Sapiens
guugguuuggcauggcauuacauauuauaugu

SEQ ID NO: 390302 - RNA, 32 nt, Homo Sapiens
uggcauccaacugcuuggagcuccacacuucc

SEQ ID NO: 390303 - RNA, 32 nt, Homo Sapiens
ucgaggaggaggaggaggccgggguggagggg

SEQ ID NO: 390304 - RNA, 32 nt, Homo Sapiens
cuccugggaaagggcagggcaugcaaauucga

SEQ ID NO: 390305 - RNA, 32 nt, Homo Sapiens
uguauguacagcuguguacuugagucuuuuuu

SEQ ID NO: 390306 - RNA, 32 nt, Homo Sapiens
auaaaguugcaauugaaauauuauuaacagaa

SEQ ID NO: 390307 - RNA, 32 nt, Homo Sapiens
ggccacaggucguuuuaccaugucuggacgug

SEQ ID NO: 390308 - RNA, 32 nt, Homo Sapiens
ugagcuaauaauauguuuuaacucuuaacacc

SEQ ID NO: 390309 - RNA, 32 nt, Homo Sapiens
ccggagccuccgccuggcaucagcuccacgua

SEQ ID NO: 390310 - RNA, 32 nt, Homo Sapiens
uucuccaaaaagcagccaacaucagccucccc

SEQ ID NO: 390311 - RNA, 32 nt, Homo Sapiens
ugugcauguaauauuuucaaagaucaacacag

SEQ ID NO: 390312 - RNA, 32 nt, Homo Sapiens
cuccuguguuuugaaucucuaaaugaauucug

SEQ ID NO: 390313 - RNA, 32 nt, Homo Sapiens
ggguuuucgccccaugcugcaucguguuguau

SEQ ID NO: 390314 - RNA, 32 nt, Homo Sapiens
uggcugcugcccucagcuccgccucaucagcu

SEQ ID NO: 390315 - RNA, 32 nt, Homo Sapiens
gggcccucaaggggaagcccaggccaggaugg

SEQ ID NO: 390316 - RNA, 32 nt, Homo Sapiens
acggcaagaacaccuugaaugaugugcuguuc

SEQ ID NO: 390317 - RNA, 27 nt, Homo Sapiens
gucucauccuucuuagugccucaaacu

SEQ ID NO: 390318 - RNA, 32 nt, Homo Sapiens
uaaaaacaaccuucagcuccguuucaaucaau

SEQ ID NO: 390319 - RNA, 32 nt, Homo Sapiens
gagcaguugugcugcgggcuugcugggggaga

SEQ ID NO: 390320 - RNA, 32 nt, Homo Sapiens
uaaacuaugcuguuuuauuuaucuucccaacc

SEQ ID NO: 390321 - RNA, 32 nt, Homo Sapiens
gucggugacccggcugcgcuuccgcuugucug

SEQ ID NO: 390322 - RNA, 28 nt, Homo Sapiens
uuuggggggcggccggugggggaauccc

SEQ ID NO: 390323 - RNA, 30 nt, Homo Sapiens
cugugccaugcucgugguuucaguguccgu

SEQ ID NO: 390324 - RNA, 32 nt, Homo Sapiens
ccagucaccacccuccuggaccacacucggcc

SEQ ID NO: 390325 - RNA, 32 nt, Homo Sapiens
auggccucucaaccucagacuucucagccugc

SEQ ID NO: 390326 - RNA, 32 nt, Homo Sapiens
cuuauucuggaacaugguauguugcuucauuu

SEQ ID NO: 390327 - RNA, 32 nt, Homo Sapiens
ccauuauuguacuugccuuauuagagugucuu

SEQ ID NO: 390328 - RNA, 32 nt, Homo Sapiens
uuuuuccuuuuggccagauagcuagguuucug

SEQ ID NO: 390329 - RNA, 32 nt, Homo Sapiens
ccgggcccaucccccgcgcgucuccccggcug

SEQ ID NO: 390330 - RNA, 31 nt, Homo Sapiens
ccagcugugccaccugcaggaguucgcucuu

SEQ ID NO: 390331 - RNA, 32 nt, Homo Sapiens
agaguaaaacaaagauguguaagugugagucu

SEQ ID NO: 390332 - RNA, 32 nt, Homo Sapiens
ccggcuaggcggcggcgggggcggcgauguuc

SEQ ID NO: 390333 - RNA, 32 nt, Homo Sapiens
gauucccagccauggcagauuccuccgggcag

SEQ ID NO: 390334 - RNA, 30 nt, Homo Sapiens
gaccuagcgccgccgccgccggggcccaau

SEQ ID NO: 390335 - RNA, 32 nt, Homo Sapiens
gguuaacacacaaacugugaaugcaguguaaa

SEQ ID NO: 390336 - RNA, 32 nt, Homo Sapiens
acaggaccugggcuucgucuccaggggacaag

SEQ ID NO: 390337 - RNA, 32 nt, Homo Sapiens
agauuggaaugggcagcucaucucugucccac

SEQ ID NO: 390338 - RNA, 28 nt, Homo Sapiens
gccaugggucauuucacagaggaggaca

SEQ ID NO: 390339 - RNA, 32 nt, Homo Sapiens
ucucuggaauccagcagaccucggggucuagu

SEQ ID NO: 390340 - RNA, 32 nt, Homo Sapiens
acgcccauucucauguaaaugucagugccaac

SEQ ID NO: 390341 - RNA, 30 nt, Homo Sapiens
ugguuguggggcggguuuugaagcgaugag

SEQ ID NO: 390342 - RNA, 32 nt, Homo Sapiens
uucucaaggauucuacgugucugugggaggca

SEQ ID NO: 390343 - RNA, 32 nt, Homo Sapiens
uaaauuaccuccaggguuuuucuggggguuua

SEQ ID NO: 390344 - RNA, 32 nt, Homo Sapiens
cuuuuuguuguuguuguuguuuuuaagaugga

SEQ ID NO: 390345 - RNA, 32 nt, Homo Sapiens
guucucugccccaccccgcaacuccugaaagc

SEQ ID NO: 390346 - RNA, 32 nt, Homo Sapiens
gagcugggguuggccccggcccaggcuucugu

SEQ ID NO: 390347 - RNA, 32 nt, Homo Sapiens
uuuacaccaaaaaauaaauucgaauuuuuaaa

SEQ ID NO: 390348 - RNA, 32 nt, Homo Sapiens
gaguaugugggguguguaaaagaaauuugcuu

SEQ ID NO: 390349 - RNA, 32 nt, Homo Sapiens
aaaggaaucaguauauugaaacgguguccaca

SEQ ID NO: 390350 - RNA, 32 nt, Homo Sapiens
gcagcauacuccggaaagucucauacuucuug

SEQ ID NO: 390351 - RNA, 32 nt, Homo Sapiens
ccuccccgucugucagaauggccacuugcagg

SEQ ID NO: 390352 - RNA, 32 nt, Homo Sapiens
guugugggauugugaccccccaucccaagggg

SEQ ID NO: 390353 - RNA, 32 nt, Homo Sapiens
gagcagcggcggugacgcagguguagagauuu

SEQ ID NO: 390354 - RNA, 32 nt, Homo Sapiens
gguuuaagaaccgcccucuagaggcagcccuc

SEQ ID NO: 390355 - RNA, 32 nt, Homo Sapiens
auauuagacauucuguaggagucuuagguuuu

SEQ ID NO: 390356 - RNA, 32 nt, Homo Sapiens
gagugucuccuuuugauagggauuguuucugg

SEQ ID NO: 390357 - RNA, 32 nt, Homo Sapiens
gagacagagucuugcucugucgccaaguugga

SEQ ID NO: 390358 - RNA, 28 nt, Homo Sapiens
ugggcugugcggccgccuaggugucugg

SEQ ID NO: 390359 - RNA, 32 nt, Homo Sapiens
agccaggucccucucauuuagccuguccuguc

SEQ ID NO: 390360 - RNA, 32 nt, Homo Sapiens
uacugcaccugccugcucuggguggcagaggg

SEQ ID NO: 390361 - RNA, 32 nt, Homo Sapiens
uuaaaacaacacaaaaucauuaucuuacaguu

SEQ ID NO: 390362 - RNA, 32 nt, Homo Sapiens
caggcauuagagguccaccucccccaggaaug

SEQ ID NO: 390363 - RNA, 32 nt, Homo Sapiens
guccccgcaccucggcgcgcucgcaguccugg

SEQ ID NO: 390364 - RNA, 32 nt, Homo Sapiens
ccaaggcggcggugucagcucgcgagccuacc

SEQ ID NO: 390365 - RNA, 32 nt, Homo Sapiens
cuuguaggugcccugccuggccccacccaugc

SEQ ID NO: 390366 - RNA, 31 nt, Homo Sapiens
uauguacaaaagaaaaaggucuuauauucuu

SEQ ID NO: 390367 - RNA, 32 nt, Homo Sapiens
cgagcagggcggggcgggggcuugaggugauu

SEQ ID NO: 390368 - RNA, 32 nt, Homo Sapiens
gaccaaaaucauucuacaaaauguagaaauga

SEQ ID NO: 390369 - RNA, 32 nt, Homo Sapiens
uuggauugcucauuuucuuauuguugaauuuu

SEQ ID NO: 390370 - RNA, 32 nt, Homo Sapiens
cccaauaagaucugggucucaccccugggggg

SEQ ID NO: 390371 - RNA, 28 nt, Homo Sapiens
acguaagagagggaacauuugggguugg

SEQ ID NO: 390372 - RNA, 32 nt, Homo Sapiens
aguuuucuuaccuguuuacacccauuauuuau

SEQ ID NO: 390373 - RNA, 32 nt, Homo Sapiens
gaauacaucuauuugcaaauggguuuugaagc

SEQ ID NO: 390374 - RNA, 32 nt, Homo Sapiens
ucaguuuuuauuaaucuacuguaucaauaaaa

SEQ ID NO: 390375 - RNA, 32 nt, Homo Sapiens
auggucauaaauguuugccgcucuauauuaca

SEQ ID NO: 390376 - RNA, 32 nt, Homo Sapiens
uuuggcugcauaaaugucuucuuuugagaagu

SEQ ID NO: 390377 - RNA, 32 nt, Homo Sapiens
uaaaugcauuuuucuuuuuucguuaauguucu

SEQ ID NO: 390378 - RNA, 32 nt, Homo Sapiens
gucauguguugcaccguucucuguauguuuac

SEQ ID NO: 390379 - RNA, 32 nt, Homo Sapiens
auguuagaagauuguuuugagaagugcaugga

SEQ ID NO: 390380 - RNA, 32 nt, Homo Sapiens
ccugaugucauccuuacucgaagagcuuagaa

SEQ ID NO: 390381 - RNA, 32 nt, Homo Sapiens
caguggaagcuggcaucccuccccuugugggu

SEQ ID NO: 390382 - RNA, 32 nt, Homo Sapiens
uccaucccucugucccuugcucuucuucaagc

SEQ ID NO: 390383 - RNA, 32 nt, Homo Sapiens
ggucuuugacuucuuucugaacucaaucuucc

SEQ ID NO: 390384 - RNA, 32 nt, Homo Sapiens
uucuacagcaggguuaaucuauuaucaagaac

SEQ ID NO: 390385 - RNA, 32 nt, Homo Sapiens
uaaauuacaccugugugcaccuguauuacuga

SEQ ID NO: 390386 - RNA, 32 nt, Homo Sapiens
caagagaccggcucuaggaucccaaggcccaa

SEQ ID NO: 390387 - RNA, 32 nt, Homo Sapiens
gcugcuugggcuugcuggccucaagugccgaa

SEQ ID NO: 390388 - RNA, 32 nt, Homo Sapiens
ggacaccaaaccccaaggcccucaucugccuu

SEQ ID NO: 390389 - RNA, 32 nt, Homo Sapiens
cuuaauuaauuuuuauacuuaacucuucagua

SEQ ID NO: 390390 - RNA, 32 nt, Homo Sapiens
agcagucgacugccggagacucgggaggcuga

SEQ ID NO: 390391 - RNA, 32 nt, Homo Sapiens
aagguggcuccgcgccgagcgcggccggcgac

SEQ ID NO: 390392 - RNA, 32 nt, Homo Sapiens
agcucauacggugugucugucaucucagucug

SEQ ID NO: 390393 - RNA, 32 nt, Homo Sapiens
gaagaagugucuggaauacccguucuauguaa

SEQ ID NO: 390394 - RNA, 32 nt, Homo Sapiens
gagcgggguccggcgcugcgacacccggcccg

SEQ ID NO: 390395 - RNA, 32 nt, Homo Sapiens
ggccguggagcaccccaccugcccccgagacc

SEQ ID NO: 390396 - RNA, 32 nt, Homo Sapiens
gaaaaaccuucagaucuaccucacaccuucga

SEQ ID NO: 390397 - RNA, 32 nt, Homo Sapiens
cucuuggaugagaagucugcaaguguuuacug

SEQ ID NO: 390398 - RNA, 32 nt, Homo Sapiens
aagaaacagcaagcucaggucuguggguuccc

SEQ ID NO: 390399 - RNA, 32 nt, Homo Sapiens
aguauuuuuaaucaucagccaagcauuguuag

SEQ ID NO: 390400 - RNA, 32 nt, Homo Sapiens
ccacugggcucccuuugaacccggcccaaucu

SEQ ID NO: 390401 - RNA, 28 nt, Homo Sapiens
auccugguugcuaccagugggugcugau

SEQ ID NO: 390402 - RNA, 32 nt, Homo Sapiens
augggggcgggggugguggugaagagaguugg

SEQ ID NO: 390403 - RNA, 32 nt, Homo Sapiens
agcuauuuggaaagacgucuguguuuuugaag

SEQ ID NO: 390404 - RNA, 32 nt, Homo Sapiens
ggaagcagcucugaaacacaccgcgaugcuuu

SEQ ID NO: 390405 - RNA, 32 nt, Homo Sapiens
cagaauuaaugaagcauguuagcuuuaauuuu

SEQ ID NO: 390406 - RNA, 32 nt, Homo Sapiens
auacauauuuagauauagcugguuaaaaaaug

SEQ ID NO: 390407 - RNA, 32 nt, Homo Sapiens
uuuguuuaauuuuugacaacaagcauguauua

SEQ ID NO: 390408 - RNA, 32 nt, Homo Sapiens
cugguguaggaagaggggcauggggcuugagg

SEQ ID NO: 390409 - RNA, 32 nt, Homo Sapiens
cccucuucccacugcccuccccagccccagcu

SEQ ID NO: 390410 - RNA, 32 nt, Homo Sapiens
uuuuccaggcccagccccugucccaucuggag

SEQ ID NO: 390411 - RNA, 32 nt, Homo Sapiens
ccuuuuuaaaaauuauuuuauuauuuuuuaau

SEQ ID NO: 390412 - RNA, 29 nt, Homo Sapiens
ggaggccgggcucucaguuugggguguuu

SEQ ID NO: 390413 - RNA, 32 nt, Homo Sapiens
ccucccggccgcucuacccagcaacuuuccgu

SEQ ID NO: 390414 - RNA, 32 nt, Homo Sapiens
gcgcgcuaguggccgcucuuccgcgggcuagc

SEQ ID NO: 390415 - RNA, 32 nt, Homo Sapiens
aacugaagacaauuuccuuuucugucauaaaa

SEQ ID NO: 390416 - RNA, 32 nt, Homo Sapiens
augucuuuucacgcagaaagugccauauagac

SEQ ID NO: 390417 - RNA, 32 nt, Homo Sapiens
ccuggcuggcauggaaauacagugggaaaacc

SEQ ID NO: 390418 - RNA, 32 nt, Homo Sapiens
uuuuauuggccauaauugcuacucuucauaca

SEQ ID NO: 390419 - RNA, 32 nt, Homo Sapiens
aaccucauuucuacuaaaaguacagaaauuag

SEQ ID NO: 390420 - RNA, 32 nt, Homo Sapiens
gcacuaccagcaggcucucaccagcgcacagu

SEQ ID NO: 390421 - RNA, 31 nt, Homo Sapiens
ugggaaaauaaauuucuguuguuuaagccac

SEQ ID NO: 390422 - RNA, 32 nt, Homo Sapiens
gucgcugugggcagguggucagggcgcaggag

SEQ ID NO: 390423 - RNA, 32 nt, Homo Sapiens
aaaugcaacaagacaaauaaaaagagaaauaa

SEQ ID NO: 390424 - RNA, 32 nt, Homo Sapiens
uuauaccaggagauuucuuuuaagauucugag

SEQ ID NO: 390425 - RNA, 32 nt, Homo Sapiens
ccuuuuguaaaaccucucucaucuccauuucc

SEQ ID NO: 390426 - RNA, 32 nt, Homo Sapiens
agggaacagcuauucaccgaagccauggaggu

SEQ ID NO: 390427 - RNA, 32 nt, Homo Sapiens
uuagugaauacagaggaaaggaaaaacaagua

SEQ ID NO: 390428 - RNA, 32 nt, Homo Sapiens
gacacucucuggaagcccuggagacccucgcc

SEQ ID NO: 390429 - RNA, 28 nt, Homo Sapiens
auccuaguuacaggacucugccagcuuu

SEQ ID NO: 390430 - RNA, 28 nt, Homo Sapiens
augccucggaugccgccgacgcggugcu

SEQ ID NO: 390431 - RNA, 32 nt, Homo Sapiens
gacggcuccuccccgauccccgacaguggcuc

SEQ ID NO: 390432 - RNA, 32 nt, Homo Sapiens
uucccuccuggccugcccugcuggggcucuac

SEQ ID NO: 390433 - RNA, 32 nt, Homo Sapiens
gcccucugcccccagcugcuccucgcaguucg

SEQ ID NO: 390434 - RNA, 32 nt, Homo Sapiens
guguuaaguauuuucauaaguauuucaaauug

SEQ ID NO: 390435 - RNA, 32 nt, Homo Sapiens
uacucccagccagcugcccagugggcccaccg

SEQ ID NO: 390436 - RNA, 32 nt, Homo Sapiens
cagacauuuggcaaaaucaaggcccuuagacc

SEQ ID NO: 390437 - RNA, 32 nt, Homo Sapiens
gcuaugggagggguggggggcuggggugcugc

SEQ ID NO: 390438 - RNA, 32 nt, Homo Sapiens
caggccaccuccugggagugcauuggggacuc

SEQ ID NO: 390439 - RNA, 32 nt, Homo Sapiens
uagguggaauaacaggagcaugugcugccaau

SEQ ID NO: 390440 - RNA, 32 nt, Homo Sapiens
agcuccgccucccaggaucaagugauucuccu

SEQ ID NO: 390441 - RNA, 32 nt, Homo Sapiens
gacugaggguacaaaaucauguugaaacaaca

SEQ ID NO: 390442 - RNA, 32 nt, Homo Sapiens
ucccaugagugcuucgcagagcaacaaaggag

SEQ ID NO: 390443 - RNA, 32 nt, Homo Sapiens
uguauagccucugaagucaggaucucaggaag

SEQ ID NO: 390444 - RNA, 32 nt, Homo Sapiens
ccauuggcucugcagggcaggggugaggcagg

SEQ ID NO: 390445 - RNA, 32 nt, Homo Sapiens
guacccgggcagccagcucugucuccagggag

SEQ ID NO: 390446 - RNA, 32 nt, Homo Sapiens
ggguggcagcgggcagugcggggcggcaaggc

SEQ ID NO: 390447 - RNA, 32 nt, Homo Sapiens
aggcuuuggugcccuccgggagugccgaccca

SEQ ID NO: 390448 - RNA, 32 nt, Homo Sapiens
ccugcugccucuuagcaacaagaggggucaag

SEQ ID NO: 390449 - RNA, 32 nt, Homo Sapiens
aaguaaaggauaaauucaaaaaauagccucau

SEQ ID NO: 390450 - RNA, 32 nt, Homo Sapiens
guauaaaguauugugaaaaauauauagagcag

SEQ ID NO: 390451 - RNA, 32 nt, Homo Sapiens
acuuucuuauugcaugaaaaagauggagaaac

SEQ ID NO: 390452 - RNA, 32 nt, Homo Sapiens
gggugguaggguacguggccagacacagucac

SEQ ID NO: 390453 - RNA, 32 nt, Homo Sapiens
cccaaccgucucugcccucuucugcugccccu

SEQ ID NO: 390454 - RNA, 32 nt, Homo Sapiens
ggacugaguauuuuauauugguaugcacuuuu

SEQ ID NO: 390455 - RNA, 32 nt, Homo Sapiens
gaacuaguauuggauugaugaauagucuucca

SEQ ID NO: 390456 - RNA, 32 nt, Homo Sapiens
ccggcucugcauggccccggcugcugacauga

SEQ ID NO: 390457 - RNA, 32 nt, Homo Sapiens
guaacaccaccuauguuaugcauguagauaua

SEQ ID NO: 390458 - RNA, 32 nt, Homo Sapiens
caggcaccuuuuucacagggcggcaggaugaa

SEQ ID NO: 390459 - RNA, 32 nt, Homo Sapiens
gcaugucagguaauagucuugauugugauagc

SEQ ID NO: 390460 - RNA, 32 nt, Homo Sapiens
auggacacacaaugaugaauuuuuuggccauu

SEQ ID NO: 390461 - RNA, 32 nt, Homo Sapiens
acugccugccuugggacccgcuucccaccugc

SEQ ID NO: 390462 - RNA, 32 nt, Homo Sapiens
ccagcaacaagcgcauccugugcucagauaag

SEQ ID NO: 390463 - RNA, 32 nt, Homo Sapiens
ccuguggugccugccgaguggucacugucagu

SEQ ID NO: 390464 - RNA, 32 nt, Homo Sapiens
ucuaggaagggguaggggaggggcgucuggag

SEQ ID NO: 390465 - RNA, 32 nt, Homo Sapiens
caagugaaaaauuuuugcuucaaaggagcuca

SEQ ID NO: 390466 - RNA, 31 nt, Homo Sapiens
gcggugggcacagcagggcgcacagaggagg

SEQ ID NO: 390467 - RNA, 32 nt, Homo Sapiens
ccagugcugccccuccucccuucggccucucc

SEQ ID NO: 390468 - RNA, 32 nt, Homo Sapiens
cucuggccccuggacuucuccucggugcuccu

SEQ ID NO: 390469 - RNA, 30 nt, Homo Sapiens
ucaauguaccuguguguccaucuuauauuu

SEQ ID NO: 390470 - RNA, 32 nt, Homo Sapiens
agaacccuccaaggcaggcuucccuuuacaga

SEQ ID NO: 390471 - RNA, 32 nt, Homo Sapiens
gaaagcacaaggugauacucauuuuuaugguc

SEQ ID NO: 390472 - RNA, 32 nt, Homo Sapiens
guauguuuaaguggucaagcaaggcucuagga

SEQ ID NO: 390473 - RNA, 32 nt, Homo Sapiens
ugcauauugcuguuaauaagcauuguaaucau

SEQ ID NO: 390474 - RNA, 32 nt, Homo Sapiens
uugucuuauauaguccaguuuuccaagauaag

SEQ ID NO: 390475 - RNA, 32 nt, Homo Sapiens
accuuuccauacucuuuuuuuuucucaacuuc

SEQ ID NO: 390476 - RNA, 32 nt, Homo Sapiens
uuaguaugucauuuugaaguuggcacauaacu

SEQ ID NO: 390477 - RNA, 32 nt, Homo Sapiens
cgcggcguccccagggcgccacguucgcccuc

SEQ ID NO: 390478 - RNA, 32 nt, Homo Sapiens
uucacaauauaaacagaaauacaaauaaauac

SEQ ID NO: 390479 - RNA, 32 nt, Homo Sapiens
ucucauaaaaauuaauaaauaaaaagucucag

SEQ ID NO: 390480 - RNA, 32 nt, Homo Sapiens
accaaugaaccagagcugggauaccagcaaaa

SEQ ID NO: 390481 - RNA, 32 nt, Homo Sapiens
ccgaggcugaagauggaaacauugaauauaaa

SEQ ID NO: 390482 - RNA, 32 nt, Homo Sapiens
gauaacuuuuaaaagugucuguaaaucuucag

SEQ ID NO: 390483 - RNA, 32 nt, Homo Sapiens
gauuauaucaguuuuuucauaggucaggaacu

SEQ ID NO: 390484 - RNA, 32 nt, Homo Sapiens
cacgcaaccccuuccacccccacaucuuccuu

SEQ ID NO: 390485 - RNA, 31 nt, Homo Sapiens
ugaccaacacggagaaacccuaucucuacua

SEQ ID NO: 390486 - RNA, 32 nt, Homo Sapiens
aguuagacuaccucagaauguagucaagaauu

SEQ ID NO: 390487 - RNA, 32 nt, Homo Sapiens
auauguuaugaaaucagcugguaauuccuccu

SEQ ID NO: 390488 - RNA, 32 nt, Homo Sapiens
gcaggaggcaugagcaggcgaggagcuggccu

SEQ ID NO: 390489 - RNA, 32 nt, Homo Sapiens
agaaugggaguacccagugggggagcagcugu

SEQ ID NO: 390490 - RNA, 32 nt, Homo Sapiens
uauuaggaaacccugacaaaaugauggaagac

SEQ ID NO: 390491 - RNA, 32 nt, Homo Sapiens
aggaucagaaaagauugggaacuggaacccug

SEQ ID NO: 390492 - RNA, 32 nt, Homo Sapiens
augcuugaaggcaugccuggaaguugucaugu

SEQ ID NO: 390493 - RNA, 32 nt, Homo Sapiens
ucaccaccccaauaaacuuagacaaugauaaa

SEQ ID NO: 390494 - RNA, 32 nt, Homo Sapiens
acaagcaccagcugcggggacuccaacagcau

SEQ ID NO: 390495 - RNA, 32 nt, Homo Sapiens
ccccgccucauucccacccccaacaaagcacu

SEQ ID NO: 390496 - RNA, 31 nt, Homo Sapiens
ugguuucagcgcagcauggcuguggucaucc

SEQ ID NO: 390497 - RNA, 32 nt, Homo Sapiens
gugggaaguuuaaucuaacaaacugcuguuua

SEQ ID NO: 390498 - RNA, 32 nt, Homo Sapiens
aacucuguuuuaagggguauguuguaaucuaa

SEQ ID NO: 390499 - RNA, 32 nt, Homo Sapiens
uucaagcauaaugcacaucuaaugagacauca

SEQ ID NO: 390500 - RNA, 32 nt, Homo Sapiens
ccccguuauuuguuauuuuuuauuugcauuga

SEQ ID NO: 390501 - RNA, 32 nt, Homo Sapiens
gagcuuguucccucccucccugugcaugcaaa

SEQ ID NO: 390502 - RNA, 32 nt, Homo Sapiens
ucgaagcagggccgcagucuuaagcacaagac

SEQ ID NO: 390503 - RNA, 32 nt, Homo Sapiens
cuaaaauucuuauuuuaauuauuauauuuaag

SEQ ID NO: 390504 - RNA, 32 nt, Homo Sapiens
aagauccauaaagcugccucccggggacaagu

SEQ ID NO: 390505 - RNA, 32 nt, Homo Sapiens
cacugaaaacucccagcccugcugcacacuag

SEQ ID NO: 390506 - RNA, 32 nt, Homo Sapiens
ccuagcacccccacaucccccaucuaguaaca

SEQ ID NO: 390507 - RNA, 32 nt, Homo Sapiens
gaagggaaauaccaucaaaagacugaacaucc

SEQ ID NO: 390508 - RNA, 32 nt, Homo Sapiens
gggacuuugaaaagauaggaaaaaauagaaau

SEQ ID NO: 390509 - RNA, 32 nt, Homo Sapiens
gcaucccagcuacuccaggggcugaggugaca

SEQ ID NO: 390510 - RNA, 32 nt, Homo Sapiens
uaggccuccacggcuguggagagauccugcca

SEQ ID NO: 390511 - RNA, 32 nt, Homo Sapiens
gauggcccaucccagccccugaagcucuaugc

SEQ ID NO: 390512 - RNA, 32 nt, Homo Sapiens
cuguaucugccauuuuaagccuguaguccauu

SEQ ID NO: 390513 - RNA, 32 nt, Homo Sapiens
gauguuuuugugguuuuucacuuuuuaugggu

SEQ ID NO: 390514 - RNA, 32 nt, Homo Sapiens
gggaacaguugucacugcccccggggagaggg

SEQ ID NO: 390515 - RNA, 32 nt, Homo Sapiens
accgaacuuccccuccuccccuauuuaaacca

SEQ ID NO: 390516 - RNA, 32 nt, Homo Sapiens
ggcgagcugcccuggggcucggucagcagccc

SEQ ID NO: 390517 - RNA, 32 nt, Homo Sapiens
ggugaagaacugaguucagcgcugucaggauu

SEQ ID NO: 390518 - RNA, 32 nt, Homo Sapiens
uaaccuauucuauuguauuauaaugaugauuc

SEQ ID NO: 390519 - RNA, 32 nt, Homo Sapiens
gacugcuccccgcccgcucgggccccugagga

SEQ ID NO: 390520 - RNA, 32 nt, Homo Sapiens
ggcucugcugggagacccggcgcuggcggcug

SEQ ID NO: 390521 - RNA, 32 nt, Homo Sapiens
uuucuuuuguuuccaaugaccuugaaauguua

SEQ ID NO: 390522 - RNA, 32 nt, Homo Sapiens
aaggacuccaugaaagaugacagaagaaguua

SEQ ID NO: 390523 - RNA, 32 nt, Homo Sapiens
uaucaaggccaaugaauauuaaggugauugcu

SEQ ID NO: 390524 - RNA, 32 nt, Homo Sapiens
aaacaacuuguuuccuuuuggccacccccagg

SEQ ID NO: 390525 - RNA, 32 nt, Homo Sapiens
gguggagccugccugcccgugggccuuuacaa

SEQ ID NO: 390526 - RNA, 32 nt, Homo Sapiens
aaaguuuacaacauaaucuaguuuacagaaaa

SEQ ID NO: 390527 - RNA, 32 nt, Homo Sapiens
ggcuccuuucccuuggagggugcuucaaaaga

SEQ ID NO: 390528 - RNA, 30 nt, Homo Sapiens
ugucugcaccggcagcaccaugucgcucau

SEQ ID NO: 390529 - RNA, 32 nt, Homo Sapiens
cuuggguagacugagaucauggcuaggaaacg

SEQ ID NO: 390530 - RNA, 32 nt, Homo Sapiens
cccaccgagugccggcucccgcgcucugcggc

SEQ ID NO: 390531 - RNA, 32 nt, Homo Sapiens
uugggagaacuaauuugaacuuaaucaccacu

SEQ ID NO: 390532 - RNA, 32 nt, Homo Sapiens
cacguauagagggcugcccggcugcccacaga

SEQ ID NO: 390533 - RNA, 32 nt, Homo Sapiens
ugcgagguucccucccaaagcucagcccucug

SEQ ID NO: 390534 - RNA, 32 nt, Homo Sapiens
gugaguucucccuguacaguguuaccaucccc

SEQ ID NO: 390535 - RNA, 32 nt, Homo Sapiens
cccagucgguggccgaagaccuacagcucagg

SEQ ID NO: 390536 - RNA, 32 nt, Homo Sapiens
cagacaguucucuuccuucucuguacugcgua

SEQ ID NO: 390537 - RNA, 32 nt, Homo Sapiens
aaagaagaaagauaaaugugaagugcugggaa

SEQ ID NO: 390538 - RNA, 32 nt, Homo Sapiens
ucuauauaaaaaguuucuuuuucagaacacug

SEQ ID NO: 390539 - RNA, 32 nt, Homo Sapiens
gucgcuaucccacccagccaugcuggaauaaa

SEQ ID NO: 390540 - RNA, 32 nt, Homo Sapiens
cauuuauucagcaaauauuuauugagcaucuc

SEQ ID NO: 390541 - RNA, 32 nt, Homo Sapiens
gagguccugcugcgcacagugcuggaggucgg

SEQ ID NO: 390542 - RNA, 31 nt, Homo Sapiens
aggcagaguacaaggagauacauguaacaag

SEQ ID NO: 390543 - RNA, 32 nt, Homo Sapiens
aaucuggugaaguaaccagaagacuuucagau

SEQ ID NO: 390544 - RNA, 32 nt, Homo Sapiens
guugcuuguaaaaauaaacaaacaccuucaaa

SEQ ID NO: 390545 - RNA, 32 nt, Homo Sapiens
cuuuaaaucuaauuagaucuugaaagaaaaua

SEQ ID NO: 390546 - RNA, 32 nt, Homo Sapiens
aaaggcaggugggcucgcuaggcggagcucag

SEQ ID NO: 390547 - RNA, 32 nt, Homo Sapiens
cuguggggaaaagaaagagagaucagacuguu

SEQ ID NO: 390548 - RNA, 30 nt, Homo Sapiens
ggccaagagaagcuggagcagagagcuggc

SEQ ID NO: 390549 - RNA, 32 nt, Homo Sapiens
cuguucuuuuuugguuuugucuuuaaucuuaa

SEQ ID NO: 390550 - RNA, 32 nt, Homo Sapiens
gggcuccgcugcgccucagcugugggggccuc

SEQ ID NO: 390551 - RNA, 32 nt, Homo Sapiens
ggaagugagcggcggcagcugcgaggcucgga

SEQ ID NO: 390552 - RNA, 32 nt, Homo Sapiens
aauaaccuggguguggacuuugaaaaucacac

SEQ ID NO: 390553 - RNA, 29 nt, Homo Sapiens
cauuuuuaaaguuucuuuucuaauuuuac

SEQ ID NO: 390554 - RNA, 32 nt, Homo Sapiens
uggggaaaaaacaaggccauauguaaaaaccc

SEQ ID NO: 390555 - RNA, 32 nt, Homo Sapiens
uaacagauauaauaaugaaaaagucugagaug

SEQ ID NO: 390556 - RNA, 32 nt, Homo Sapiens
cucaaaaauagauguuucuguuaugcucucuc

SEQ ID NO: 390557 - RNA, 32 nt, Homo Sapiens
ggcccucuacaaugccgccuucugccuaaaca

SEQ ID NO: 390558 - RNA, 32 nt, Homo Sapiens
uaaaugaauuugcgguaaggugagcugcacgg

SEQ ID NO: 390559 - RNA, 31 nt, Homo Sapiens
agucaucccuugacuuuucaaaugacagaau

SEQ ID NO: 390560 - RNA, 32 nt, Homo Sapiens
aaaaauuaaaucaaccuugcuuugauggaaua

SEQ ID NO: 390561 - RNA, 32 nt, Homo Sapiens
uaaaaaucucaaagcugauuuuucuuguuaua

SEQ ID NO: 390562 - RNA, 32 nt, Homo Sapiens
auuuaaaaacaaaaagcaacaguaaucuaugu

SEQ ID NO: 390563 - RNA, 32 nt, Homo Sapiens
gccuuucugcaccccuucucuccuggggagcu

SEQ ID NO: 390564 - RNA, 32 nt, Homo Sapiens
ugggcagggcugggcagugcugccggagcaaa

SEQ ID NO: 390565 - RNA, 32 nt, Homo Sapiens
aacuccccgaagccuucccuuuggaaucccau

SEQ ID NO: 390566 - RNA, 32 nt, Homo Sapiens
cucuugacugccucucucuuaccuguucaguu

SEQ ID NO: 390567 - RNA, 32 nt, Homo Sapiens
uugggaaugaauuguccuuuucuaggaagcac

SEQ ID NO: 390568 - RNA, 32 nt, Homo Sapiens
uggucacuugggcuugcccagggaaccucauc

SEQ ID NO: 390569 - RNA, 32 nt, Homo Sapiens
ccuccguggcucccagccccagcuuagucuuu

SEQ ID NO: 390570 - RNA, 32 nt, Homo Sapiens
cucuuccaauacucugcuuuuugcuaaugaaa

SEQ ID NO: 390571 - RNA, 32 nt, Homo Sapiens
cccugacccacccaggaaaggaugggggucca

SEQ ID NO: 390572 - RNA, 32 nt, Homo Sapiens
cacccauuaaggaaacagauuuguuauaaauu

SEQ ID NO: 390573 - RNA, 32 nt, Homo Sapiens
auuacugugaauauuuaacaaacacuuacuug

SEQ ID NO: 390574 - RNA, 32 nt, Homo Sapiens
gaagccuguucccugcccuucucugugcucuu

SEQ ID NO: 390575 - RNA, 32 nt, Homo Sapiens
uacauuguaaaauaaaguugagcuuaguuuuu

SEQ ID NO: 390576 - RNA, 32 nt, Homo Sapiens
gugauccaccugccucagccucccagacuguu

SEQ ID NO: 390577 - RNA, 32 nt, Homo Sapiens
uuaacauuuuccuuagauacucucuuagaaaa

SEQ ID NO: 390578 - RNA, 32 nt, Homo Sapiens
gucgagcuuuaaaguccauaauuguuaucuuc

SEQ ID NO: 390579 - RNA, 32 nt, Homo Sapiens
acugaagaugauuuuaaagaugauguuaucua

SEQ ID NO: 390580 - RNA, 32 nt, Homo Sapiens
aacuacugaucuuuagaaucuaaaauuguaua

SEQ ID NO: 390581 - RNA, 32 nt, Homo Sapiens
cggcggcuggacgaccaccagacggugcgcga

SEQ ID NO: 390582 - RNA, 32 nt, Homo Sapiens
guuuccaucuucuguaaucuuccaaagaauua

SEQ ID NO: 390583 - RNA, 32 nt, Homo Sapiens
ccccgcccggccccugcccccuccaacccuuc

SEQ ID NO: 390584 - RNA, 32 nt, Homo Sapiens
ccuggugaacucuggcuuuuuauccucugaga

SEQ ID NO: 390585 - RNA, 32 nt, Homo Sapiens
ccgagccagaaucccggaucugcuucuaaaug

SEQ ID NO: 390586 - RNA, 32 nt, Homo Sapiens
ccuguuuuauugaguucugaagguuggaacug

SEQ ID NO: 390587 - RNA, 32 nt, Homo Sapiens
gcccgcagccagaggaaaccacguucuggagu

SEQ ID NO: 390588 - RNA, 32 nt, Homo Sapiens
augugaggaaccccaagugaaauacuccacgu

SEQ ID NO: 390589 - RNA, 32 nt, Homo Sapiens
ucuagcucucagagaguccagaugaacacccu

SEQ ID NO: 390590 - RNA, 32 nt, Homo Sapiens
gcugugucucaaagcggcuuuagaaguaaaua

SEQ ID NO: 390591 - RNA, 32 nt, Homo Sapiens
ggaaagucugggauacaaaaucaauguucaaa

SEQ ID NO: 390592 - RNA, 32 nt, Homo Sapiens
ugauucuggccauuuuaaauauuugacacaga

SEQ ID NO: 390593 - RNA, 32 nt, Homo Sapiens
cacagucuggagcucccuggcucccacacggu

SEQ ID NO: 390594 - RNA, 32 nt, Homo Sapiens
gacuuagauggacagcgcuugguuucaguugg

SEQ ID NO: 390595 - RNA, 32 nt, Homo Sapiens
uuaugaagaauaaugcugaggacuagagauau

SEQ ID NO: 390596 - RNA, 32 nt, Homo Sapiens
gauucaaauaguauauauacaagguguacagu

SEQ ID NO: 390597 - RNA, 32 nt, Homo Sapiens
cguccgugugugccgccucuguuuccuguacc

SEQ ID NO: 390598 - RNA, 32 nt, Homo Sapiens
ggagccgcuguccucguccccagcggucccgc

SEQ ID NO: 390599 - RNA, 32 nt, Homo Sapiens
aaaagcccacccaggacuuagccucaguugau

SEQ ID NO: 390600 - RNA, 30 nt, Homo Sapiens
cggagaugggggcgacgggggcggcggagc

SEQ ID NO: 390601 - RNA, 32 nt, Homo Sapiens
acuaaaggaccagcagcaaacaaaacguuugg

SEQ ID NO: 390602 - RNA, 32 nt, Homo Sapiens
aucaugguauuccacacagcauugccucugac

SEQ ID NO: 390603 - RNA, 32 nt, Homo Sapiens
uaaaugagaacacguggacacauagagggaaa

SEQ ID NO: 390604 - RNA, 32 nt, Homo Sapiens
ccacagaccagaacugguugcauguuacuuua

SEQ ID NO: 390605 - RNA, 32 nt, Homo Sapiens
cagggcagccuccaccuugcucuucuuucuga

SEQ ID NO: 390606 - RNA, 31 nt, Homo Sapiens
ccaaagagaaguguuuuuaaucugacagucu

SEQ ID NO: 390607 - RNA, 32 nt, Homo Sapiens
ucacaaaggugaugaagacugucuugggagca

SEQ ID NO: 390608 - RNA, 31 nt, Homo Sapiens
guugagauacagaguaaacgauaccaccgcg

SEQ ID NO: 390609 - RNA, 32 nt, Homo Sapiens
aaggccaggccccccucgggccccagggcucc

SEQ ID NO: 390610 - RNA, 32 nt, Homo Sapiens
ucuauaagauauauuucauuuuagacaugccu

SEQ ID NO: 390611 - RNA, 32 nt, Homo Sapiens
cagggaaacaacagcacaccaggcagaugcag

SEQ ID NO: 390612 - RNA, 32 nt, Homo Sapiens
cuccaccuuucuguaguucagggcuggcagga

SEQ ID NO: 390613 - RNA, 32 nt, Homo Sapiens
acauuccagugaugugugagcuaugcaaacaa

SEQ ID NO: 390614 - RNA, 32 nt, Homo Sapiens
guugcugugggaacgagaggggaagaguguac

SEQ ID NO: 390615 - RNA, 32 nt, Homo Sapiens
uuacuggaagcaguauuguaaguaaugaggua

SEQ ID NO: 390616 - RNA, 32 nt, Homo Sapiens
guccugcgagcgacgcgcggcggggcggcgag

SEQ ID NO: 390617 - RNA, 32 nt, Homo Sapiens
uuugugucuaaaguuucuggaacuuuccuccu

SEQ ID NO: 390618 - RNA, 32 nt, Homo Sapiens
aucagggcagcuguuaauuccaaauauuuguu

SEQ ID NO: 390619 - RNA, 32 nt, Homo Sapiens
cugcuucuugccuaccacuuggccagugccca

SEQ ID NO: 390620 - RNA, 32 nt, Homo Sapiens
uuuauaagaaagagaacugaaaaguagcgugc

SEQ ID NO: 390621 - RNA, 32 nt, Homo Sapiens
gccggaaaggauucaggauaaacauuauuaug

SEQ ID NO: 390622 - RNA, 32 nt, Homo Sapiens
caccucccagggugggagaccccaggccuuuc

SEQ ID NO: 390623 - RNA, 32 nt, Homo Sapiens
ucugcccugcucagcagucaccauagcagcug

SEQ ID NO: 390624 - RNA, 32 nt, Homo Sapiens
gggcuugugauuuccauuucugaugucuccag

SEQ ID NO: 390625 - RNA, 32 nt, Homo Sapiens
ccugcaugguagcacauagugauaggguagcg

SEQ ID NO: 390626 - RNA, 29 nt, Homo Sapiens
cagcauguguccuggggugaugggugugg

SEQ ID NO: 390627 - RNA, 32 nt, Homo Sapiens
auguguaugugcaugcacacacgugcauauac

SEQ ID NO: 390628 - RNA, 31 nt, Homo Sapiens
aguggugcaagguccuucccaggggaaccua

SEQ ID NO: 390629 - RNA, 32 nt, Homo Sapiens
uugccccuagcgcucccgcgcugcugcuccag

SEQ ID NO: 390630 - RNA, 32 nt, Homo Sapiens
ccaaaugagagaaugguacuuagggauggaaa

SEQ ID NO: 390631 - RNA, 32 nt, Homo Sapiens
cuccagcacaucccccucuccucucccccagg

SEQ ID NO: 390632 - RNA, 32 nt, Homo Sapiens
uaggcacauuuuaaaagguuauguacuagguu

SEQ ID NO: 390633 - RNA, 32 nt, Homo Sapiens
ucaugucccuguauguucugauuaagucuuau

SEQ ID NO: 390634 - RNA, 32 nt, Homo Sapiens
cauuucuaagaauuaaaugccuagauggauua

SEQ ID NO: 390635 - RNA, 32 nt, Homo Sapiens
guguacuauugguuuucuuauuauuaaacauu

SEQ ID NO: 390636 - RNA, 32 nt, Homo Sapiens
uucaagaaggauuuggcauuuucucuucuuga

SEQ ID NO: 390637 - RNA, 32 nt, Homo Sapiens
gucuggacugaucuccauguccuguugugggg

SEQ ID NO: 390638 - RNA, 32 nt, Homo Sapiens
uauaggggaauauaaucucauauuuuaacaug

SEQ ID NO: 390639 - RNA, 32 nt, Homo Sapiens
ugcuguccuggggacaugugugaggcgcugca

SEQ ID NO: 390640 - RNA, 32 nt, Homo Sapiens
cacacuccuggacagggcucuggucaguugau

SEQ ID NO: 390641 - RNA, 32 nt, Homo Sapiens
acugcugggcagccuucccaccaccgcagcag

SEQ ID NO: 390642 - RNA, 32 nt, Homo Sapiens
uucuggugguggcccguuugaaaguaaaaacc

SEQ ID NO: 390643 - RNA, 32 nt, Homo Sapiens
cucgccccgcggccugccgcaggauauguuuu

SEQ ID NO: 390644 - RNA, 32 nt, Homo Sapiens
acaguauaucuauauauacuuaacacuguaac

SEQ ID NO: 390645 - RNA, 32 nt, Homo Sapiens
gcgcgcuggcccggcacggcgguggucuugcg

SEQ ID NO: 390646 - RNA, 32 nt, Homo Sapiens
agucaauaaaccugggcaagugaggcaagaga

SEQ ID NO: 390647 - RNA, 27 nt, Homo Sapiens
agcccaccuagagcuggccgcggccgc

SEQ ID NO: 390648 - RNA, 32 nt, Homo Sapiens
ggcucugccggcccgcggcccgcgggguccau

SEQ ID NO: 390649 - RNA, 32 nt, Homo Sapiens
ucauuucagcaguggccugucuggagcagcug

SEQ ID NO: 390650 - RNA, 32 nt, Homo Sapiens
acgucuggaaggaacuucgguuguguaaaggg

SEQ ID NO: 390651 - RNA, 32 nt, Homo Sapiens
gaauugacacuccagccaaugauccuuccuuc

SEQ ID NO: 390652 - RNA, 32 nt, Homo Sapiens
uucccuuccggcagccucuuggcuucuaauuu

SEQ ID NO: 390653 - RNA, 32 nt, Homo Sapiens
accggccgugggacuccggcgccgggcggacg

SEQ ID NO: 390654 - RNA, 32 nt, Homo Sapiens
ccugagcaugcagagugugcagagcacgagcu

SEQ ID NO: 390655 - RNA, 32 nt, Homo Sapiens
uuuaacaaaccauagaggcauugaaggguuuu

SEQ ID NO: 390656 - RNA, 32 nt, Homo Sapiens
ggugcccauaguccccuggacugaguccccca

SEQ ID NO: 390657 - RNA, 32 nt, Homo Sapiens
ugcauagauaaaacauuuaccaccaaaaccca

SEQ ID NO: 390658 - RNA, 32 nt, Homo Sapiens
gcggccucauguaaacauuuuauuuucaaaug

SEQ ID NO: 390659 - RNA, 30 nt, Homo Sapiens
gaucugcagcuugccacaucagcuuaaaau

SEQ ID NO: 390660 - RNA, 32 nt, Homo Sapiens
auuaaaaaaaauuuaaaaaaaaaaaagaaaau

SEQ ID NO: 390661 - RNA, 32 nt, Homo Sapiens
ccgcccggcgcgcagcagcaccaugggcacgg

SEQ ID NO: 390662 - RNA, 32 nt, Homo Sapiens
guaagugggcaaccauaauuggucaaugugua

SEQ ID NO: 390663 - RNA, 32 nt, Homo Sapiens
cugcucaagcuggaggacccaggcggcagggc

SEQ ID NO: 390664 - RNA, 32 nt, Homo Sapiens
cccaguguucccuuuuucccgcacugucucca

SEQ ID NO: 390665 - RNA, 32 nt, Homo Sapiens
cucugacauucuuuuuaaaaacaccacaaagc

SEQ ID NO: 390666 - RNA, 32 nt, Homo Sapiens
gaccucacuguacagagcugacuccccaaauc

SEQ ID NO: 390667 - RNA, 27 nt, Homo Sapiens
caauggcggcggugcucggggcgcucg

SEQ ID NO: 390668 - RNA, 32 nt, Homo Sapiens
ugcugugcuaucuacauaaaugucuaaguugu

SEQ ID NO: 390669 - RNA, 32 nt, Homo Sapiens
uggagucuugcucugucgcccaggcucgagug

SEQ ID NO: 390670 - RNA, 32 nt, Homo Sapiens
cuuacuauacugaacauucuguuuccuccucc

SEQ ID NO: 390671 - RNA, 32 nt, Homo Sapiens
ccagauuuucugcagcuguccauccugugucu

SEQ ID NO: 390672 - RNA, 32 nt, Homo Sapiens
ggagcggcaggauggaaggagacacggggcag

SEQ ID NO: 390673 - RNA, 32 nt, Homo Sapiens
guccaguuaugaacagcaaguguugaacucuu

SEQ ID NO: 390674 - RNA, 32 nt, Homo Sapiens
gucuucaaaauauuuacuuaaauuuugguuug

SEQ ID NO: 390675 - RNA, 32 nt, Homo Sapiens
gacuccauuuuucaugauaaaauggcaguggu

SEQ ID NO: 390676 - RNA, 32 nt, Homo Sapiens
gggugguguuuguaacaaucacuguucuauag

SEQ ID NO: 390677 - RNA, 32 nt, Homo Sapiens
guaucacuaucacuugggcuaguuagagaucc

SEQ ID NO: 390678 - RNA, 32 nt, Homo Sapiens
gccucuguccuggcccgggagccgcaggggcc

SEQ ID NO: 390679 - RNA, 32 nt, Homo Sapiens
uguaaauaaaauguuuaaacuugaaauacaaa

SEQ ID NO: 390680 - RNA, 32 nt, Homo Sapiens
aagguggaauaauugacggggagauagcgccu

SEQ ID NO: 390681 - RNA, 32 nt, Homo Sapiens
caggccacuggggucagcauuugagcucagcu

SEQ ID NO: 390682 - RNA, 32 nt, Homo Sapiens
augccaccaucccaccucugagacuccaguga

SEQ ID NO: 390683 - RNA, 32 nt, Homo Sapiens
cacacagccuugcuccucccggccuggcuugc

SEQ ID NO: 390684 - RNA, 32 nt, Homo Sapiens
uucuucaggcccagcucuuccuccuggcggug

SEQ ID NO: 390685 - RNA, 32 nt, Homo Sapiens
ugggcagagaguauuguggggaggcauggcca

SEQ ID NO: 390686 - RNA, 28 nt, Homo Sapiens
uucuggaagauguuacauuugaucugaa

SEQ ID NO: 390687 - RNA, 32 nt, Homo Sapiens
uuggcuaaauguuaugaugcagucuaguacga

SEQ ID NO: 390688 - RNA, 32 nt, Homo Sapiens
uaaauauaucuagaacuaucauuuuuacacua

SEQ ID NO: 390689 - RNA, 32 nt, Homo Sapiens
uaccaaggugacugugcagagccucagcccgg

SEQ ID NO: 390690 - RNA, 32 nt, Homo Sapiens
gucuuucauuggcagaucuugguagcacuuua

SEQ ID NO: 390691 - RNA, 32 nt, Homo Sapiens
caccccccacccaccgcaagcuuugaguggga

SEQ ID NO: 390692 - RNA, 32 nt, Homo Sapiens
guuuugucagagcauaaucauugucugcaaag

SEQ ID NO: 390693 - RNA, 32 nt, Homo Sapiens
caugugaugcgcguccccuccgcgagcuuucg

SEQ ID NO: 390694 - RNA, 32 nt, Homo Sapiens
cuggcaucaaccccaggccacgcucgcucuuu

SEQ ID NO: 390695 - RNA, 32 nt, Homo Sapiens
aaauauguuacaaaaccaaguacuuaaucuuu

SEQ ID NO: 390696 - RNA, 32 nt, Homo Sapiens
augaguaaggccaguugagcauugcuuacuua

SEQ ID NO: 390697 - RNA, 32 nt, Homo Sapiens
cacaaauauagagauuuuuuaaccauggcagg

SEQ ID NO: 390698 - RNA, 30 nt, Homo Sapiens
aucuguuaaguguugggggaaaaagcagca

SEQ ID NO: 390699 - RNA, 32 nt, Homo Sapiens
cguggcgagaggggcgggguggccggggcugg

SEQ ID NO: 390700 - RNA, 32 nt, Homo Sapiens
ggcuucuccucugagcugggaagauccaacuu

SEQ ID NO: 390701 - RNA, 32 nt, Homo Sapiens
cuaggagguggagguugcauucaacugagauc

SEQ ID NO: 390702 - RNA, 32 nt, Homo Sapiens
cccuagggugccacgcagugaggcuggugccc

SEQ ID NO: 390703 - RNA, 32 nt, Homo Sapiens
augaaauacuaguguauuggaucuucaguaac

SEQ ID NO: 390704 - RNA, 32 nt, Homo Sapiens
uuuaugugaagaagaaagcucagaggaaaugg

SEQ ID NO: 390705 - RNA, 32 nt, Homo Sapiens
gugcuuagucucaccuccccagcccacgcugg

SEQ ID NO: 390706 - RNA, 32 nt, Homo Sapiens
augguucaccucugcguaaacugcaagucuua

SEQ ID NO: 390707 - RNA, 32 nt, Homo Sapiens
aguuuugccaacuccugggaaccucgauauuc

SEQ ID NO: 390708 - RNA, 32 nt, Homo Sapiens
agaguccgcccgggucgugcccgccguagacg

SEQ ID NO: 390709 - RNA, 32 nt, Homo Sapiens
augcauguauauggauggaauaaaauuccaga

SEQ ID NO: 390710 - RNA, 32 nt, Homo Sapiens
caaccaauugcgaugcuguccuguuccuuuuu

SEQ ID NO: 390711 - RNA, 32 nt, Homo Sapiens
aaaccacagcuuccuuggcucuuuuugcccau

SEQ ID NO: 390712 - RNA, 32 nt, Homo Sapiens
cagaggacucugcauccagaaaacagaagcaa

SEQ ID NO: 390713 - RNA, 32 nt, Homo Sapiens
agaggacggucuuuuuuucucuucagaccuuc

SEQ ID NO: 390714 - RNA, 32 nt, Homo Sapiens
acauuucugaugcucuuagugagcgggauaaa

SEQ ID NO: 390715 - RNA, 32 nt, Homo Sapiens
aagcuucagagguaguaacugucauucuucaa

SEQ ID NO: 390716 - RNA, 32 nt, Homo Sapiens
ccccuggagagccgcaguucagugggcuccac

SEQ ID NO: 390717 - RNA, 29 nt, Homo Sapiens
ccaacagggaucugggcagagagucugug

SEQ ID NO: 390718 - RNA, 32 nt, Homo Sapiens
uucuguucgccucaaccaacccuaaagugcuc

SEQ ID NO: 390719 - RNA, 32 nt, Homo Sapiens
aggaaauguaaauuagugucauuaguguguug

SEQ ID NO: 390720 - RNA, 32 nt, Homo Sapiens
ucuacaccaaaauaaaccuuugaaauuauugc

SEQ ID NO: 390721 - RNA, 32 nt, Homo Sapiens
agucuguacaauugaguagaaauaucacaaau

SEQ ID NO: 390722 - RNA, 32 nt, Homo Sapiens
uccuguaaaauacuauuggacagacacagagg

SEQ ID NO: 390723 - RNA, 32 nt, Homo Sapiens
guggggaugggggaggggagggguagagcaca

SEQ ID NO: 390724 - RNA, 32 nt, Homo Sapiens
ggaguagugucugcccugagcugccagugcug

SEQ ID NO: 390725 - RNA, 32 nt, Homo Sapiens
uuccccuuaaaaugggccauuguggaguaggu

SEQ ID NO: 390726 - RNA, 32 nt, Homo Sapiens
gagcuggaggugaguggaccgggggcuguguu

SEQ ID NO: 390727 - RNA, 32 nt, Homo Sapiens
accauauguguauaauuaacaaaccuguguau

SEQ ID NO: 390728 - RNA, 32 nt, Homo Sapiens
cuguucuucauuagauguuuauuuagaaccug

SEQ ID NO: 390729 - RNA, 32 nt, Homo Sapiens
cugcgcaagggccugggcgcgcggggccaaug

SEQ ID NO: 390730 - RNA, 32 nt, Homo Sapiens
gaauuagucaaggggagcuguagugauccagc

SEQ ID NO: 390731 - RNA, 32 nt, Homo Sapiens
caggcugccaggugcugguuggggggcacaga

SEQ ID NO: 390732 - RNA, 32 nt, Homo Sapiens
aagacaagauaaaaaauuuugagauguaauca

SEQ ID NO: 390733 - RNA, 32 nt, Homo Sapiens
ucuucuacugucugagaucagaauaugacauu

SEQ ID NO: 390734 - RNA, 32 nt, Homo Sapiens
aacuauccaaaaacuuagaugagcagaaugac

SEQ ID NO: 390735 - RNA, 32 nt, Homo Sapiens
auucaauuaaagagaggagagaauugaauggc

SEQ ID NO: 390736 - RNA, 32 nt, Homo Sapiens
accggggcgccagguuaugcuggggcugcacc

SEQ ID NO: 390737 - RNA, 32 nt, Homo Sapiens
uaugucacuauuuuuguaaaugagguuuacgu

SEQ ID NO: 390738 - RNA, 32 nt, Homo Sapiens
ucacauaaacaaaacuaaagauaaaaaccaug

SEQ ID NO: 390739 - RNA, 32 nt, Homo Sapiens
gaacugucucacucuuuuccacagcagcugua

SEQ ID NO: 390740 - RNA, 32 nt, Homo Sapiens
cccagguuuuucuggccugcuuuugugcaauc

SEQ ID NO: 390741 - RNA, 32 nt, Homo Sapiens
cggagaaggcuggggcugcgggugcugaccag

SEQ ID NO: 390742 - RNA, 32 nt, Homo Sapiens
gaguuugggggaggagcccagggcaccugaug

SEQ ID NO: 390743 - RNA, 32 nt, Homo Sapiens
agauacacaaaaccauauuuaauuuccagguu

SEQ ID NO: 390744 - RNA, 32 nt, Homo Sapiens
cuagaagaaaaaagauggaacuuuuccaauuc

SEQ ID NO: 390745 - RNA, 32 nt, Homo Sapiens
caauggucgcucccucuuuuuaucuguuggca

SEQ ID NO: 390746 - RNA, 32 nt, Homo Sapiens
acugagaagggggcguauguuugacgaagguu

SEQ ID NO: 390747 - RNA, 29 nt, Homo Sapiens
acuuguguucauuugggaaagcuaccauu

SEQ ID NO: 390748 - RNA, 32 nt, Homo Sapiens
uuuucgugcaggugucguuguuuagucggcuu

SEQ ID NO: 390749 - RNA, 32 nt, Homo Sapiens
cuaacuuugguuaugugugucuauucagaaua

SEQ ID NO: 390750 - RNA, 32 nt, Homo Sapiens
cuguuuuauuuuuucuuaauuuuauuaaagga

SEQ ID NO: 390751 - RNA, 32 nt, Homo Sapiens
cuggauaguccgucucugcuuauccguuagcc

SEQ ID NO: 390752 - RNA, 32 nt, Homo Sapiens
caguggggaaagcgggccagggggcgggagug

SEQ ID NO: 390753 - RNA, 32 nt, Homo Sapiens
acgccuuuuuuuuuuucuuuuccugucgccaa

SEQ ID NO: 390754 - RNA, 32 nt, Homo Sapiens
acaacagcagcugaacuguuguaaccagcaug

SEQ ID NO: 390755 - RNA, 32 nt, Homo Sapiens
agacauucuggugaugauuuaggggcuuuuua

SEQ ID NO: 390756 - RNA, 32 nt, Homo Sapiens
ggcuccucccccaccccauucugccaccaugu

SEQ ID NO: 390757 - RNA, 32 nt, Homo Sapiens
guaggguggauguggguagggcugggaggagg

SEQ ID NO: 390758 - RNA, 32 nt, Homo Sapiens
ggcagaggucccucggccuccugacugacuga

SEQ ID NO: 390759 - RNA, 32 nt, Homo Sapiens
cugggcggugcagcuuccagagagcgagcgcc

SEQ ID NO: 390760 - RNA, 32 nt, Homo Sapiens
ccacucaugggaagaugugucagcugcccaca

SEQ ID NO: 390761 - RNA, 32 nt, Homo Sapiens
aaaugacaaagggaauguuaccacugacccca

SEQ ID NO: 390762 - RNA, 32 nt, Homo Sapiens
uuauuaccugaagagguggaggguugaucuca

SEQ ID NO: 390763 - RNA, 32 nt, Homo Sapiens
cuacuuaugucugaaucuuaccucugaucuuu

SEQ ID NO: 390764 - RNA, 32 nt, Homo Sapiens
gcucaacuucacacugagacacuuggacguca

SEQ ID NO: 390765 - RNA, 32 nt, Homo Sapiens
guuaacagcauuaaagugauucacccgaagcu

SEQ ID NO: 390766 - RNA, 31 nt, Homo Sapiens
cacauuauuaggccuuugccagauaccugca

SEQ ID NO: 390767 - RNA, 32 nt, Homo Sapiens
ccugguggucagucuccuggggucuguguguu

SEQ ID NO: 390768 - RNA, 32 nt, Homo Sapiens
guaauucccugcuccuucugccuaagcagaca

SEQ ID NO: 390769 - RNA, 32 nt, Homo Sapiens
acuuaaaaugugguuuuaaauucuauuuaaac

SEQ ID NO: 390770 - RNA, 31 nt, Homo Sapiens
auggagccugaagggaaucaggcaaggaaau

SEQ ID NO: 390771 - RNA, 32 nt, Homo Sapiens
auggccacaggccccccuccccacuuggccac

SEQ ID NO: 390772 - RNA, 32 nt, Homo Sapiens
gcccaggcccaucaggacuaagagggaggucg

SEQ ID NO: 390773 - RNA, 32 nt, Homo Sapiens
agggccucccggcuugucccagccccucuuuu

SEQ ID NO: 390774 - RNA, 32 nt, Homo Sapiens
ccugccgccuguccagcccugagagugagguc

SEQ ID NO: 390775 - RNA, 32 nt, Homo Sapiens
caaagcuguuuuuauaacacuaagacauuauu

SEQ ID NO: 390776 - RNA, 32 nt, Homo Sapiens
gguggcuuugccuugacccagccuuuaacaau

SEQ ID NO: 390777 - RNA, 32 nt, Homo Sapiens
uucgcugcagggcaugguggacaguaaugcug

SEQ ID NO: 390778 - RNA, 32 nt, Homo Sapiens
ugcaaggaugacccuggcccaugccagcaucc

SEQ ID NO: 390779 - RNA, 32 nt, Homo Sapiens
uuuuacuuauauauuugauacauauaauucuu

SEQ ID NO: 390780 - RNA, 32 nt, Homo Sapiens
auuauacuaugagaaaucaugccuaguuauuc

SEQ ID NO: 390781 - RNA, 32 nt, Homo Sapiens
uuuauuacuguuuaaucaauagauaucauaug

SEQ ID NO: 390782 - RNA, 32 nt, Homo Sapiens
cgagagagccggagacccccacccccgaucug

SEQ ID NO: 390783 - RNA, 32 nt, Homo Sapiens
aucuccugcugacuuugagagcugagcauugg

SEQ ID NO: 390784 - RNA, 32 nt, Homo Sapiens
uugggacgacccggccccagcgcagcuaugaa

SEQ ID NO: 390785 - RNA, 29 nt, Homo Sapiens
cggcaugucuguggaugagaagccugacu

SEQ ID NO: 390786 - RNA, 32 nt, Homo Sapiens
caggccagcgccagcccaggcuugccauggac

SEQ ID NO: 390787 - RNA, 32 nt, Homo Sapiens
uggacaagggcuccucacggggguggagggag

SEQ ID NO: 390788 - RNA, 32 nt, Homo Sapiens
ggcggcaggcccggggagacggagcccuggcu

SEQ ID NO: 390789 - RNA, 31 nt, Homo Sapiens
ugguagaugauaguggugacaccugcagguc

SEQ ID NO: 390790 - RNA, 32 nt, Homo Sapiens
uugccacccuucccuguccacugcugcccccc

SEQ ID NO: 390791 - RNA, 32 nt, Homo Sapiens
uaagacaaaugggacuaauaucaucuugagcu

SEQ ID NO: 390792 - RNA, 32 nt, Homo Sapiens
aggaggaggaggagaagaaacuauuucgcgau

SEQ ID NO: 390793 - RNA, 32 nt, Homo Sapiens
guaugcauuuauauaacuguuuuguuauuuga

SEQ ID NO: 390794 - RNA, 32 nt, Homo Sapiens
aaugcagcuauuaccacuggugguccaggcuc

SEQ ID NO: 390795 - RNA, 32 nt, Homo Sapiens
guuucccucgcagucgauuuggaccaagacua

SEQ ID NO: 390796 - RNA, 32 nt, Homo Sapiens
agcucuggggggcaucccccgauguggucugg

SEQ ID NO: 390797 - RNA, 32 nt, Homo Sapiens
gcccacccaaccccaagccagcccggccgcuc

SEQ ID NO: 390798 - RNA, 32 nt, Homo Sapiens
aguuaccuggggaaacaaaacagggaucuuuu

SEQ ID NO: 390799 - RNA, 32 nt, Homo Sapiens
cagcuugcgggggacccuccccagcccauucc

SEQ ID NO: 390800 - RNA, 30 nt, Homo Sapiens
cucccugcuucaagcuauucucccaccuca

SEQ ID NO: 390801 - RNA, 32 nt, Homo Sapiens
cauaauagucaaaacagucuugaaagacaaaa

SEQ ID NO: 390802 - RNA, 32 nt, Homo Sapiens
uagagaugggaggaaacccagcuccucacuuc

SEQ ID NO: 390803 - RNA, 32 nt, Homo Sapiens
ugagauuuugauacaccuaaggucacgcagcu

SEQ ID NO: 390804 - RNA, 32 nt, Homo Sapiens
auaaguauaucaaugucuacuucaauaguauc

SEQ ID NO: 390805 - RNA, 32 nt, Homo Sapiens
guaaaaugaagauguggaaccauauuacuuug

SEQ ID NO: 390806 - RNA, 32 nt, Homo Sapiens
caaauguaauaaaauugaggcuccacggaggc

SEQ ID NO: 390807 - RNA, 32 nt, Homo Sapiens
ggggcggugagggcauggggugaggcauggcg

SEQ ID NO: 390808 - RNA, 32 nt, Homo Sapiens
cugcacuuuuccacauuauacuccauaugagu

SEQ ID NO: 390809 - RNA, 32 nt, Homo Sapiens
cugugagaaaauaaauuucucuuauuuaaacc

SEQ ID NO: 390810 - RNA, 32 nt, Homo Sapiens
aaaugacguggccuugguuuugcaggagaacg

SEQ ID NO: 390811 - RNA, 32 nt, Homo Sapiens
agcgcuugccagccgagaugggagccuagcua

SEQ ID NO: 390812 - RNA, 32 nt, Homo Sapiens
uccacgaggaggagccacacaggguggccucc

SEQ ID NO: 390813 - RNA, 28 nt, Homo Sapiens
aagccaaaauuuugacauuugagugcuu

SEQ ID NO: 390814 - RNA, 32 nt, Homo Sapiens
caguucaguuugucugcacagcagccacccug

SEQ ID NO: 390815 - RNA, 32 nt, Homo Sapiens
gccaggcggggugcagacggcugcugauucug

SEQ ID NO: 390816 - RNA, 32 nt, Homo Sapiens
auuguccccgcacuaguagagaauccaugucg

SEQ ID NO: 390817 - RNA, 32 nt, Homo Sapiens
caccuuuuuuaaaaauaaugcuucuagaaaca

SEQ ID NO: 390818 - RNA, 32 nt, Homo Sapiens
uuaauuaaaaauuauggaaucauuaaaguccu

SEQ ID NO: 390819 - RNA, 32 nt, Homo Sapiens
cuuccgaggagcuuucuggcugccuaaacugg

SEQ ID NO: 390820 - RNA, 32 nt, Homo Sapiens
agucucuauagaccucgccccuggacagagca

SEQ ID NO: 390821 - RNA, 32 nt, Homo Sapiens
uaugaugagaaauaaacguucgcugagguuuu

SEQ ID NO: 390822 - RNA, 32 nt, Homo Sapiens
gaaguuuauaugggucuauuuauuugucuaac

SEQ ID NO: 390823 - RNA, 32 nt, Homo Sapiens
uucggccgccccaccaagcucugucuccaaaa

SEQ ID NO: 390824 - RNA, 32 nt, Homo Sapiens
uaccucacaacacaaacagguaguucguuggg

SEQ ID NO: 390825 - RNA, 32 nt, Homo Sapiens
aggggcgagccgggcgcaggagggggcgcgcu

SEQ ID NO: 390826 - RNA, 32 nt, Homo Sapiens
acugaacccagcuaucuugcaaaccuucagug

SEQ ID NO: 390827 - RNA, 32 nt, Homo Sapiens
cuggcccggucgcccagucucgcgagaguugg

SEQ ID NO: 390828 - RNA, 32 nt, Homo Sapiens
augcugggaaauaugaaauguauuuuaaaauu

SEQ ID NO: 390829 - RNA, 32 nt, Homo Sapiens
aaaguuaauaauaguaaauauuuaaagcauag

SEQ ID NO: 390830 - RNA, 32 nt, Homo Sapiens
ugcaauuuucuuuuuauuaaggaugaaucuaa

SEQ ID NO: 390831 - RNA, 32 nt, Homo Sapiens
agccagucccgcccuuuacagagcagcccuua

SEQ ID NO: 390832 - RNA, 32 nt, Homo Sapiens
ucaaaaaagauuuacugcuaauaauccucaac

SEQ ID NO: 390833 - RNA, 32 nt, Homo Sapiens
gaggggcagaggguguggguauucccagggcc

SEQ ID NO: 390834 - RNA, 32 nt, Homo Sapiens
uuuugagcugucuuacuuugauaucuguugug

SEQ ID NO: 390835 - RNA, 32 nt, Homo Sapiens
caucauuggccauugcuuuuucacuugccaug

SEQ ID NO: 390836 - RNA, 32 nt, Homo Sapiens
aaucagguuacaaagcaaaaccacaauaucag

SEQ ID NO: 390837 - RNA, 32 nt, Homo Sapiens
ucccaggcgggcgggagugugcgauacucggg

SEQ ID NO: 390838 - RNA, 32 nt, Homo Sapiens
aacaagaaccggagagaagugauuggaaauga

SEQ ID NO: 390839 - RNA, 32 nt, Homo Sapiens
ucuuguaguuucuuuuuauauuagcuccucac

SEQ ID NO: 390840 - RNA, 32 nt, Homo Sapiens
cugccucccccuccccgcccgacccgcgggug

SEQ ID NO: 390841 - RNA, 31 nt, Homo Sapiens
cacaguggguggagccaauccacuccuuccu

SEQ ID NO: 390842 - RNA, 32 nt, Homo Sapiens
ucuguccacguaguccucuccaucugcccgua

SEQ ID NO: 390843 - RNA, 32 nt, Homo Sapiens
cugagccccauuugcuucccagcccuggaguu

SEQ ID NO: 390844 - RNA, 32 nt, Homo Sapiens
aaagaacucaaaaggagaacugugcucuccca

SEQ ID NO: 390845 - RNA, 32 nt, Homo Sapiens
aguuggaaagacuuugcauaugcuaacuacaa

SEQ ID NO: 390846 - RNA, 32 nt, Homo Sapiens
acugguccgcgcggcccgaagcugggcgcgcg

SEQ ID NO: 390847 - RNA, 32 nt, Homo Sapiens
gaacaaggcuuugaaacugaacaagauaacuu

SEQ ID NO: 390848 - RNA, 32 nt, Homo Sapiens
cugggcccuugugcuuccugugggugggguga

SEQ ID NO: 390849 - RNA, 32 nt, Homo Sapiens
uucagacucugccccagguuccaggaauccga

SEQ ID NO: 390850 - RNA, 32 nt, Homo Sapiens
aagaucggagagcgccuggccgagauggagga

SEQ ID NO: 390851 - RNA, 32 nt, Homo Sapiens
ccaauggaauuuucuucaguguuggaaauggu

SEQ ID NO: 390852 - RNA, 32 nt, Homo Sapiens
ucuccaagggcugccuggggccccgcgcccgu

SEQ ID NO: 390853 - RNA, 32 nt, Homo Sapiens
aauggugguuaaauggaaauguucaagccauu

SEQ ID NO: 390854 - RNA, 32 nt, Homo Sapiens
ucucuuuucuuacauuaugacguuuguuuuca

SEQ ID NO: 390855 - RNA, 32 nt, Homo Sapiens
gucucaagauggacaaccgggauguugcagga

SEQ ID NO: 390856 - RNA, 32 nt, Homo Sapiens
ucugaaagcugcagugucaucagauccacggc

SEQ ID NO: 390857 - RNA, 32 nt, Homo Sapiens
uggcgccuugccugacacccagcccccucucc

SEQ ID NO: 390858 - RNA, 32 nt, Homo Sapiens
gccagugccuugccagugugcacggucccaca

SEQ ID NO: 390859 - RNA, 32 nt, Homo Sapiens
cuagacaucuucucccucccuugccucaggga

SEQ ID NO: 390860 - RNA, 32 nt, Homo Sapiens
guaagagcauuuguggcuugaacuugccagau

SEQ ID NO: 390861 - RNA, 32 nt, Homo Sapiens
aauugugugcugcuuaggccaagcagcccucc

SEQ ID NO: 390862 - RNA, 32 nt, Homo Sapiens
aagcacuuucuuccggcugcugugauucagug

SEQ ID NO: 390863 - RNA, 27 nt, Homo Sapiens
uuuccuaccuucuucaggcugccuaag

SEQ ID NO: 390864 - RNA, 32 nt, Homo Sapiens
aaauugaguggcauauuguaaauaucagaucu

SEQ ID NO: 390865 - RNA, 32 nt, Homo Sapiens
aaggccaggcugccucccagcccccaggcccu

SEQ ID NO: 390866 - RNA, 32 nt, Homo Sapiens
gacuucagugaauauuuuuguauuuuacaugg

SEQ ID NO: 390867 - RNA, 32 nt, Homo Sapiens
ggcagguaaacgcagugugggaaaggaaugug

SEQ ID NO: 390868 - RNA, 31 nt, Homo Sapiens
ccccauuugaauacggccagagccugcuggu

SEQ ID NO: 390869 - RNA, 32 nt, Homo Sapiens
cagcgccccuggacgggccgggcuaaaaaagg

SEQ ID NO: 390870 - RNA, 32 nt, Homo Sapiens
aagucauccugacaccaaacugagaagcugau

SEQ ID NO: 390871 - RNA, 32 nt, Homo Sapiens
ccccgcugguguacgcccugcugcugcagcgc

SEQ ID NO: 390872 - RNA, 32 nt, Homo Sapiens
gccugugggcaccagcagcaagggcugccaug

SEQ ID NO: 390873 - RNA, 32 nt, Homo Sapiens
uuucuagcugaauaaaccacaucaaaggaaag

SEQ ID NO: 390874 - RNA, 32 nt, Homo Sapiens
cggcccgggaagugcagcaggcagcuuuucuu

SEQ ID NO: 390875 - RNA, 32 nt, Homo Sapiens
auucccccuaaaaacagagugaccuggaagua

SEQ ID NO: 390876 - RNA, 32 nt, Homo Sapiens
uggguuugaggaguucagugacugcuauugaa

SEQ ID NO: 390877 - RNA, 32 nt, Homo Sapiens
cucuagugacugaagaaauugugaguacauaa

SEQ ID NO: 390878 - RNA, 32 nt, Homo Sapiens
aaaaaauggagagcucuuauuuuuguacagau

SEQ ID NO: 390879 - RNA, 32 nt, Homo Sapiens
ucaaaacuuuccaaguuuuuccuuauguggaa

SEQ ID NO: 390880 - RNA, 32 nt, Homo Sapiens
caucugacauggccacuaaaucuuuagacuug

SEQ ID NO: 390881 - RNA, 32 nt, Homo Sapiens
ucaguccaggguuugggggaaacgugcucacc

SEQ ID NO: 390882 - RNA, 31 nt, Homo Sapiens
aauagaaauuaaaacaaggugcuguuuucac

SEQ ID NO: 390883 - RNA, 32 nt, Homo Sapiens
ccaccagaacagauaccuacauaaacuagagg

SEQ ID NO: 390884 - RNA, 32 nt, Homo Sapiens
uguaaaacaaacuacugguaauuauuuuuaau

SEQ ID NO: 390885 - RNA, 32 nt, Homo Sapiens
ucccaggaccccucagcuccccggcacugcag

SEQ ID NO: 390886 - RNA, 32 nt, Homo Sapiens
gacagggggucucggccgucggcgucaugguu

SEQ ID NO: 390887 - RNA, 32 nt, Homo Sapiens
acucagaaaacugauuauauuccuggucccug

SEQ ID NO: 390888 - RNA, 32 nt, Homo Sapiens
uacauuggaggcuuuauuuugaacuaauuucu

SEQ ID NO: 390889 - RNA, 32 nt, Homo Sapiens
guagaaaaauucaaaacaaaaugucaggaauc

SEQ ID NO: 390890 - RNA, 32 nt, Homo Sapiens
aaggaagucagcugggccacccgccauccacc

SEQ ID NO: 390891 - RNA, 32 nt, Homo Sapiens
augccuucacugacaguuuggcucaaaaagua

SEQ ID NO: 390892 - RNA, 32 nt, Homo Sapiens
cugggauuauguuguaguuuaacauuuuguaa

SEQ ID NO: 390893 - RNA, 32 nt, Homo Sapiens
uggcuggaaacacucacacuacugccuguccc

SEQ ID NO: 390894 - RNA, 32 nt, Homo Sapiens
caaaguuuugcucugucaccaaggcuggagug

SEQ ID NO: 390895 - RNA, 32 nt, Homo Sapiens
uaugugguggguucugacauuauucuuccaua

SEQ ID NO: 390896 - RNA, 32 nt, Homo Sapiens
cuggagaaaaucaagcagccgaagaugaacua

SEQ ID NO: 390897 - RNA, 32 nt, Homo Sapiens
aucugucaauggggauaauaaaagcaccuguc

SEQ ID NO: 390898 - RNA, 32 nt, Homo Sapiens
guuuacucagcaugcaugcagcaggaucccuu

SEQ ID NO: 390899 - RNA, 32 nt, Homo Sapiens
gcuaggaggcugccgccuccgccagcgccugu

SEQ ID NO: 390900 - RNA, 32 nt, Homo Sapiens
auuacagaagaagaggcauugaagauaaagga

SEQ ID NO: 390901 - RNA, 32 nt, Homo Sapiens
cagcaacagcaccagcagcaacagcaaaaaac

SEQ ID NO: 390902 - RNA, 29 nt, Homo Sapiens
uuuucaguauguauguauuuaauaguauc

SEQ ID NO: 390903 - RNA, 31 nt, Homo Sapiens
gccuggagucaggugucgaggccacauugcu

SEQ ID NO: 390904 - RNA, 32 nt, Homo Sapiens
cuccugagggcugugucacgggccauggucac

SEQ ID NO: 390905 - RNA, 32 nt, Homo Sapiens
cuuuaaaacaaauuugugcaaacacugcuaga

SEQ ID NO: 390906 - RNA, 32 nt, Homo Sapiens
gggcgugguggugcaugcccguaaucccagcu

SEQ ID NO: 390907 - RNA, 32 nt, Homo Sapiens
ucggggauggagaggacgcgagccccgcggca

SEQ ID NO: 390908 - RNA, 32 nt, Homo Sapiens
cagguggcauggauacugauuuuacugaccuu

SEQ ID NO: 390909 - RNA, 32 nt, Homo Sapiens
augaccgugucugcaggcagcacccagaacug

SEQ ID NO: 390910 - RNA, 32 nt, Homo Sapiens
auguauuuauuacuugauguaauaaagcuuau

SEQ ID NO: 390911 - RNA, 31 nt, Homo Sapiens
gguuucaguuugacuuuguauauaaaguugg

SEQ ID NO: 390912 - RNA, 32 nt, Homo Sapiens
uuccauuaaaaauaauagcuggcuauuauaga

SEQ ID NO: 390913 - RNA, 32 nt, Homo Sapiens
auuuccccuggccacccucucaccuaaucagu

SEQ ID NO: 390914 - RNA, 31 nt, Homo Sapiens
uuuaucagugcagaucaucagaauuaaaguu

SEQ ID NO: 390915 - RNA, 30 nt, Homo Sapiens
aacugaugcuccacaagaugguucccagga

SEQ ID NO: 390916 - RNA, 32 nt, Homo Sapiens
acaaauauuguaaaaaucaccuuauaauuacc

SEQ ID NO: 390917 - RNA, 32 nt, Homo Sapiens
cugacucugccggccagccccccgcccugggc

SEQ ID NO: 390918 - RNA, 32 nt, Homo Sapiens
ggcccggagcuggcccgggacagccagggcgg

SEQ ID NO: 390919 - RNA, 32 nt, Homo Sapiens
ccacuggagaggauuuggaugaacuagaagaa

SEQ ID NO: 390920 - RNA, 32 nt, Homo Sapiens
uauuguguuuuuauugcguuugcaauauuuuu

SEQ ID NO: 390921 - RNA, 32 nt, Homo Sapiens
uccaguuguauccucugacacccuuuaauguu

SEQ ID NO: 390922 - RNA, 32 nt, Homo Sapiens
auaaaugcuucagugaaaaugcagcuuuacuc

SEQ ID NO: 390923 - RNA, 32 nt, Homo Sapiens
auccuggcugccaacuggcccgcggcucccuc

SEQ ID NO: 390924 - RNA, 32 nt, Homo Sapiens
agccauuccagaaguagcuuauccuagacuug

SEQ ID NO: 390925 - RNA, 29 nt, Homo Sapiens
guuggaacuugucucaguuuccccgcucc

SEQ ID NO: 390926 - RNA, 32 nt, Homo Sapiens
gcaggugucggcacaggcuagcuccuccuggu

SEQ ID NO: 390927 - RNA, 32 nt, Homo Sapiens
aguucagaugagaauacguguccaguuugaau

SEQ ID NO: 390928 - RNA, 32 nt, Homo Sapiens
aguccccugcugucugucugugggagucggac

SEQ ID NO: 390929 - RNA, 30 nt, Homo Sapiens
ugcgaccugcugagcgaccagucggaggau

SEQ ID NO: 390930 - RNA, 32 nt, Homo Sapiens
acuuuacacaaucauuauucuucaauagugga

SEQ ID NO: 390931 - RNA, 32 nt, Homo Sapiens
ggaggagggcuuugaaucugggacugugccug

SEQ ID NO: 390932 - RNA, 32 nt, Homo Sapiens
ccagaagccugacacagagcuacuucacuguc

SEQ ID NO: 390933 - RNA, 32 nt, Homo Sapiens
uuuaguauuuuuguauuuuuaguugaugcaga

SEQ ID NO: 390934 - RNA, 32 nt, Homo Sapiens
uuccaugcgaaugauuugauauuuucauccuu

SEQ ID NO: 390935 - RNA, 32 nt, Homo Sapiens
aggacccguccaaagaugccccggggaggggu

SEQ ID NO: 390936 - RNA, 32 nt, Homo Sapiens
agugccaccuccccggugacaggcccccagcc

SEQ ID NO: 390937 - RNA, 32 nt, Homo Sapiens
aauucaauucuuccuuuuuuuauuacuauuuc

SEQ ID NO: 390938 - RNA, 32 nt, Homo Sapiens
acuguauaauuucguuguaaaaucuguaaguu

SEQ ID NO: 390939 - RNA, 32 nt, Homo Sapiens
agaagcugaaguaugggcucaggaagugacag

SEQ ID NO: 390940 - RNA, 32 nt, Homo Sapiens
guuguauucuuccaucuucauugucuuaccuc

SEQ ID NO: 390941 - RNA, 32 nt, Homo Sapiens
aucucugugucgaagaagaaaagugaagugag

SEQ ID NO: 390942 - RNA, 32 nt, Homo Sapiens
uuugugcguucaucucuuauuaaaacauguca

SEQ ID NO: 390943 - RNA, 32 nt, Homo Sapiens
cacugggcaaauauaaaagacaacauauuauu

SEQ ID NO: 390944 - RNA, 32 nt, Homo Sapiens
cgccaaggcagacacaagcugcgggcugugcg

SEQ ID NO: 390945 - RNA, 32 nt, Homo Sapiens
aaaagaaccuguguucuuaaucacaugcaaga

SEQ ID NO: 390946 - RNA, 32 nt, Homo Sapiens
uuguaucccccuguagcagcauuacugaaaua

SEQ ID NO: 390947 - RNA, 32 nt, Homo Sapiens
augagaugaggaucuuuuucugaguguucuaa

SEQ ID NO: 390948 - RNA, 32 nt, Homo Sapiens
cucuggaucacaaacagcacaaauuaaaaagg

SEQ ID NO: 390949 - RNA, 32 nt, Homo Sapiens
ugcgggcgcuggggcgggucccaggucucccc

SEQ ID NO: 390950 - RNA, 32 nt, Homo Sapiens
aaaggaggaugaugauaucuaggcauaaccua

SEQ ID NO: 390951 - RNA, 32 nt, Homo Sapiens
aaaugaccaaaaucaagauugcucaaaagggu

SEQ ID NO: 390952 - RNA, 32 nt, Homo Sapiens
ccucaugcauaucuccugggaauauuucaaac

SEQ ID NO: 390953 - RNA, 30 nt, Homo Sapiens
cgcgcagcggcaggcggcggcgggauggag

SEQ ID NO: 390954 - RNA, 32 nt, Homo Sapiens
aaauccgcgggccggagccacgcgccugugaa

SEQ ID NO: 390955 - RNA, 31 nt, Homo Sapiens
ugaccccagcgcagccccgggcacgcggcac

SEQ ID NO: 390956 - RNA, 27 nt, Homo Sapiens
ccauggaggagccgcagccgccccgcc

SEQ ID NO: 390957 - RNA, 32 nt, Homo Sapiens
ugugagcggcggugugagcgcggugggugcgg

SEQ ID NO: 390958 - RNA, 32 nt, Homo Sapiens
uuuuaaaaaugaaaaaguacucaaaagugaga

SEQ ID NO: 390959 - RNA, 32 nt, Homo Sapiens
auauuuugaugcauguguaucaccuuauuuug

SEQ ID NO: 390960 - RNA, 32 nt, Homo Sapiens
ccagccccuggccuuuacuuucuuccuugccu

SEQ ID NO: 390961 - RNA, 32 nt, Homo Sapiens
uccaaagcgccuggcuuucucacuucacauuc

SEQ ID NO: 390962 - RNA, 32 nt, Homo Sapiens
ccugccugagcuuccuuccccagcuuugcugc

SEQ ID NO: 390963 - RNA, 32 nt, Homo Sapiens
cagcucuccguuuaugacaguuuaaacuuaau

SEQ ID NO: 390964 - RNA, 32 nt, Homo Sapiens
auucagcagucagauguuuacugcacaccuau

SEQ ID NO: 390965 - RNA, 32 nt, Homo Sapiens
auggcacgcccguaaugcugcagaccacgugu

SEQ ID NO: 390966 - RNA, 32 nt, Homo Sapiens
gagcugggacaaagcugccuuugccgcugggc

SEQ ID NO: 390967 - RNA, 32 nt, Homo Sapiens
gaggggauuuggggguucagacugcggggaag

SEQ ID NO: 390968 - RNA, 32 nt, Homo Sapiens
uaaguauauccuguauacuuuuccaggcugga

SEQ ID NO: 390969 - RNA, 32 nt, Homo Sapiens
gauggcucauacauuuaucuagagaagcacac

SEQ ID NO: 390970 - RNA, 32 nt, Homo Sapiens
uuuucaugggucaaaaucaucuuccgaagaaa

SEQ ID NO: 390971 - RNA, 32 nt, Homo Sapiens
gagaauuaaggaacauucuuugaaaugccucu

SEQ ID NO: 390972 - RNA, 32 nt, Homo Sapiens
aaaaaauuuacuuuaaacuacauuagguugug

SEQ ID NO: 390973 - RNA, 32 nt, Homo Sapiens
agaagaguaucaaaguauaauaaaauaaaaau

SEQ ID NO: 390974 - RNA, 32 nt, Homo Sapiens
ugagggccgagccgaggcggcgcgggugcagg

SEQ ID NO: 390975 - RNA, 32 nt, Homo Sapiens
acacucauugguuuuuauugauuauaguauug

SEQ ID NO: 390976 - RNA, 32 nt, Homo Sapiens
gggcugggacaggaaggcucucuucuucaccu

SEQ ID NO: 390977 - RNA, 32 nt, Homo Sapiens
cgaccccauggcgcugcagacgcugcagagcu

SEQ ID NO: 390978 - RNA, 32 nt, Homo Sapiens
uggcccauuucuucuuuuuuugacccauacuu

SEQ ID NO: 390979 - RNA, 32 nt, Homo Sapiens
cuuugggcagugccagucuccuguuugcagua

SEQ ID NO: 390980 - RNA, 32 nt, Homo Sapiens
uaagacagacuguagaugcauuuuaaauauuu

SEQ ID NO: 390981 - RNA, 32 nt, Homo Sapiens
caggaagcugaauucagcaagaacaauggagg

SEQ ID NO: 390982 - RNA, 32 nt, Homo Sapiens
aggagcagagggccuaggaggaccccgggcgu

SEQ ID NO: 390983 - RNA, 32 nt, Homo Sapiens
ccucgagacaccucccagaccccacauccccu

SEQ ID NO: 390984 - RNA, 32 nt, Homo Sapiens
auuguuauaucgucugucuugcgugugucaga

SEQ ID NO: 390985 - RNA, 32 nt, Homo Sapiens
agagcugcuaggcuugaggccuugacuguugu

SEQ ID NO: 390986 - RNA, 32 nt, Homo Sapiens
aguucucccaaaagccaugucccggcccuugc

SEQ ID NO: 390987 - RNA, 32 nt, Homo Sapiens
auguuacuucuuguuauguaugcgggggaacc

SEQ ID NO: 390988 - RNA, 32 nt, Homo Sapiens
accugggucugcauguugaaauccaaggcaga

SEQ ID NO: 390989 - RNA, 28 nt, Homo Sapiens
ugugguagugguaccaggaauaaaaaau

SEQ ID NO: 390990 - RNA, 32 nt, Homo Sapiens
gccgauggccccagcaucccccaggugccugc

SEQ ID NO: 390991 - RNA, 32 nt, Homo Sapiens
cuuuuaaaaaauacagugugauuucaugcuuu

SEQ ID NO: 390992 - RNA, 32 nt, Homo Sapiens
uaagucuguucccuucaauucuguaucauaca

SEQ ID NO: 390993 - RNA, 32 nt, Homo Sapiens
cccuggaggacgcgggcuggcugcugggcgag

SEQ ID NO: 390994 - RNA, 32 nt, Homo Sapiens
gcugggcaccacaggcugccucaugacccucc

SEQ ID NO: 390995 - RNA, 31 nt, Homo Sapiens
ggucaucauuugauuuucggaaaucuaaaag

SEQ ID NO: 390996 - RNA, 32 nt, Homo Sapiens
uaaacuuugugauuuaaauuuacugaauuuaa

SEQ ID NO: 390997 - RNA, 32 nt, Homo Sapiens
ucuuugcccagagcuucccuuucuggccgcca

SEQ ID NO: 390998 - RNA, 32 nt, Homo Sapiens
cgccgcggcucgugguugucccgccauggcac

SEQ ID NO: 390999 - RNA, 32 nt, Homo Sapiens
agugauggaacaugugcuuggccacaggcagg

SEQ ID NO: 391000 - RNA, 32 nt, Homo Sapiens
gcagacggaccgacggacucgcgccgcgucca

SEQ ID NO: 391001 - RNA, 32 nt, Homo Sapiens
ugccuugggcccagccccuggugaucacaggg

SEQ ID NO: 391002 - RNA, 32 nt, Homo Sapiens
ccucgugugggacuuuuagaauguagcaacca

SEQ ID NO: 391003 - RNA, 32 nt, Homo Sapiens
acguggagggcaucguggggcuggaacaggug

SEQ ID NO: 391004 - RNA, 32 nt, Homo Sapiens
cucgcucgcggcgcgcgccggccgccagacuc

SEQ ID NO: 391005 - RNA, 32 nt, Homo Sapiens
gacuuauggcagugacacaucugauuucccac

SEQ ID NO: 391006 - RNA, 32 nt, Homo Sapiens
aaagccggcugcccagccccagccucaccacc

SEQ ID NO: 391007 - RNA, 32 nt, Homo Sapiens
agggaccugugcuucaagcugguagagaaggc

SEQ ID NO: 391008 - RNA, 32 nt, Homo Sapiens
ggauggcucaagcauguuuuccuccuucucuc

SEQ ID NO: 391009 - RNA, 32 nt, Homo Sapiens
cucucugcgggaagugagccgccggccuccgg

SEQ ID NO: 391010 - RNA, 32 nt, Homo Sapiens
cucuaugcacucaagcuagaaaaccuaaaaga

SEQ ID NO: 391011 - RNA, 32 nt, Homo Sapiens
gaggggucugagaggagugggugcuugucccc

SEQ ID NO: 391012 - RNA, 31 nt, Homo Sapiens
auaaauacgagaacgaaauccacuccgcagu

SEQ ID NO: 391013 - RNA, 32 nt, Homo Sapiens
acugcagggaccccggaggugugaguacaagu

SEQ ID NO: 391014 - RNA, 32 nt, Homo Sapiens
accaggcacuauauuucaucuuugaggcuuuu

SEQ ID NO: 391015 - RNA, 32 nt, Homo Sapiens
gcugcugacacggaucggccgcggccgccacc

SEQ ID NO: 391016 - RNA, 32 nt, Homo Sapiens
ucuaauuaccuuucuuuuucuccuuacagacc

SEQ ID NO: 391017 - RNA, 32 nt, Homo Sapiens
cccugccaucuuaaccuuccagauggguggua

SEQ ID NO: 391018 - RNA, 32 nt, Homo Sapiens
auuaacuuuucaguuugguuugcaaugagaaa

SEQ ID NO: 391019 - RNA, 32 nt, Homo Sapiens
cguccuuccuucccuucacccucacuggaucu

SEQ ID NO: 391020 - RNA, 32 nt, Homo Sapiens
guucacugucauuguguuucccagccucucca

SEQ ID NO: 391021 - RNA, 32 nt, Homo Sapiens
ucuaucuuauguauuucuuuuaaguauuacca

SEQ ID NO: 391022 - RNA, 32 nt, Homo Sapiens
uuagacccaagcccugaaggccugaggccugu

SEQ ID NO: 391023 - RNA, 32 nt, Homo Sapiens
augaaccugaagaugcugggaccagagaccca

SEQ ID NO: 391024 - RNA, 32 nt, Homo Sapiens
agaaguggacuggagggaaaggguagcugagu

SEQ ID NO: 391025 - RNA, 32 nt, Homo Sapiens
uagcuaaauuauauuucuuuauagagaaagua

SEQ ID NO: 391026 - RNA, 32 nt, Homo Sapiens
ucuuuuuucccuaagggauaugaauuguuuuu

SEQ ID NO: 391027 - RNA, 32 nt, Homo Sapiens
uguacagaaaagauuauauaaaauuuaaaucc

SEQ ID NO: 391028 - RNA, 32 nt, Homo Sapiens
ugugguuggguggaggucugucugcacuggga

SEQ ID NO: 391029 - RNA, 32 nt, Homo Sapiens
cuacucaauauuaaagggucuggaaaauagaa

SEQ ID NO: 391030 - RNA, 32 nt, Homo Sapiens
uagaaauuguuuuauuuuuaaauuaauuugcu

SEQ ID NO: 391031 - RNA, 32 nt, Homo Sapiens
ccucacagcaaccugaggaguagaccaggccu

SEQ ID NO: 391032 - RNA, 32 nt, Homo Sapiens
caggaaggcagcugucugcugcugagucagau

SEQ ID NO: 391033 - RNA, 25 nt, Homo Sapiens
augggcccacugaugguucuuuuuu

SEQ ID NO: 391034 - RNA, 32 nt, Homo Sapiens
cuaugaauaaccaacaguauucaagaagcaac

SEQ ID NO: 391035 - RNA, 32 nt, Homo Sapiens
uggugcacauggcuuccuccccggcgguggac

SEQ ID NO: 391036 - RNA, 32 nt, Homo Sapiens
aaacagaauucauaacacuuggcacuuguucu

SEQ ID NO: 391037 - RNA, 32 nt, Homo Sapiens
cccgcauucuuccuccuucuucuggugcuaca

SEQ ID NO: 391038 - RNA, 27 nt, Homo Sapiens
cccuguaucugcuucagccuccugccc

SEQ ID NO: 391039 - RNA, 32 nt, Homo Sapiens
aucuguguaaaaaguuugcauuuuuaauauag

SEQ ID NO: 391040 - RNA, 32 nt, Homo Sapiens
uuuauuugcuucaaaauagaaucggauaaguu

SEQ ID NO: 391041 - RNA, 32 nt, Homo Sapiens
uuaguacucuuaagagcaucuuccaagacucc

SEQ ID NO: 391042 - RNA, 32 nt, Homo Sapiens
cugaggacaaaguggaggagggccgagguggg

SEQ ID NO: 391043 - RNA, 32 nt, Homo Sapiens
uaccucaucucuagaagcugggauggacuuac

SEQ ID NO: 391044 - RNA, 32 nt, Homo Sapiens
cuccccacagccuuccuccccaccaucccgug

SEQ ID NO: 391045 - RNA, 32 nt, Homo Sapiens
guuuauuguccacccuaguccgagggcugcag

SEQ ID NO: 391046 - RNA, 32 nt, Homo Sapiens
cccuuuccuaaaacuucuaacaauaagaaaaa

SEQ ID NO: 391047 - RNA, 32 nt, Homo Sapiens
cgucuccgcuccugggggaccgcagaaauaag

SEQ ID NO: 391048 - RNA, 32 nt, Homo Sapiens
uucagggccuccagcccucucacugugucccu

SEQ ID NO: 391049 - RNA, 32 nt, Homo Sapiens
cuacaccuuguacuuuuugugcaugaccugga

SEQ ID NO: 391050 - RNA, 32 nt, Homo Sapiens
ucccaucucugcuccuucuugcugugugacuu

SEQ ID NO: 391051 - RNA, 32 nt, Homo Sapiens
ccaccccccaucugugagccaagccucccuug

SEQ ID NO: 391052 - RNA, 32 nt, Homo Sapiens
uauguacauacagacauacugaagggauuagu

SEQ ID NO: 391053 - RNA, 32 nt, Homo Sapiens
gucagugccgcgcgcccgccgccccgcgccuu

SEQ ID NO: 391054 - RNA, 32 nt, Homo Sapiens
auuuuucgaggccucccucccccaaccaaagg

SEQ ID NO: 391055 - RNA, 32 nt, Homo Sapiens
gggagaaagggagcgaggucagaggagccggc

SEQ ID NO: 391056 - RNA, 32 nt, Homo Sapiens
uuuuauuuuaaccaaaguuacuguuguuuaca

SEQ ID NO: 391057 - RNA, 32 nt, Homo Sapiens
aaagcagucugcuuugaggaggcgagaaggca

SEQ ID NO: 391058 - RNA, 32 nt, Homo Sapiens
cugggggcugggggcgggugggccgagcagca

SEQ ID NO: 391059 - RNA, 32 nt, Homo Sapiens
cggguggcaccucgcuggccaggcucucccga

SEQ ID NO: 391060 - RNA, 32 nt, Homo Sapiens
gcaaggauccugauaccugccucauauugugg

SEQ ID NO: 391061 - RNA, 32 nt, Homo Sapiens
cuacaauacugauuuuaucugugcaaagaagu

SEQ ID NO: 391062 - RNA, 32 nt, Homo Sapiens
ggggcgaugggcgcuacgugcuuaaugggcac

SEQ ID NO: 391063 - RNA, 32 nt, Homo Sapiens
cuguuuuguuuuccuuguuuguuuguuucaug

SEQ ID NO: 391064 - RNA, 32 nt, Homo Sapiens
uaaccaagcuucuauuaugccuuuuucuaaca

SEQ ID NO: 391065 - RNA, 30 nt, Homo Sapiens
ggccuucuggacuaaggcagccugggggga

SEQ ID NO: 391066 - RNA, 30 nt, Homo Sapiens
cacggccugggagggugugagucugacgug

SEQ ID NO: 391067 - RNA, 32 nt, Homo Sapiens
accaacuguacuucccaaaggcuaccugaccg

SEQ ID NO: 391068 - RNA, 32 nt, Homo Sapiens
ccacguugauucaagaucagccagaucaaccu

SEQ ID NO: 391069 - RNA, 32 nt, Homo Sapiens
ggagaaacucagaucuugguaagauuuacugg

SEQ ID NO: 391070 - RNA, 32 nt, Homo Sapiens
cuccugggaauuuaguugugagugaaugugaa

SEQ ID NO: 391071 - RNA, 32 nt, Homo Sapiens
aaacauauuaaaccucugggauacagcaaaag

SEQ ID NO: 391072 - RNA, 32 nt, Homo Sapiens
uuaacuuuuuaaaagaagcuagacuucuucag

SEQ ID NO: 391073 - RNA, 32 nt, Homo Sapiens
uccucggaaccaggaccucggcguggccuagc

SEQ ID NO: 391074 - RNA, 32 nt, Homo Sapiens
aaaggagcaaauuaaacaauaaaccagacagc

SEQ ID NO: 391075 - RNA, 32 nt, Homo Sapiens
auguagggagggacggggaggggagccaggac

SEQ ID NO: 391076 - RNA, 32 nt, Homo Sapiens
cccuccacccccugaauggguguggcuugugg

SEQ ID NO: 391077 - RNA, 32 nt, Homo Sapiens
ucauguuuuuaaaauauauguaacucauuuua

SEQ ID NO: 391078 - RNA, 31 nt, Homo Sapiens
ggguugguuccccuucauucuugagcugguu

SEQ ID NO: 391079 - RNA, 32 nt, Homo Sapiens
caccggaugugcugaggccuaaauguuagcag

SEQ ID NO: 391080 - RNA, 32 nt, Homo Sapiens
ugugcccgccgcggagcgcagucugcgcgccc

SEQ ID NO: 391081 - RNA, 32 nt, Homo Sapiens
acaaagauauucuggaggcuagaguaggauug

SEQ ID NO: 391082 - RNA, 32 nt, Homo Sapiens
gagcuccccuggggcucuggaaccugaagccc

SEQ ID NO: 391083 - RNA, 32 nt, Homo Sapiens
aagcucccugacagccgagacuggcagcccuc

SEQ ID NO: 391084 - RNA, 32 nt, Homo Sapiens
cgucggcucccaagcucucccggagcgagcag

SEQ ID NO: 391085 - RNA, 32 nt, Homo Sapiens
ggaugauaaccaaagccaaggcaacaugcaga

SEQ ID NO: 391086 - RNA, 32 nt, Homo Sapiens
uuuucucccuccccuuccuuccugcagguuug

SEQ ID NO: 391087 - RNA, 32 nt, Homo Sapiens
ccucuuccucccucauuccaccuucccaugcc

SEQ ID NO: 391088 - RNA, 30 nt, Homo Sapiens
gacaaccucuuuucugcagaaaagcuccag

SEQ ID NO: 391089 - RNA, 32 nt, Homo Sapiens
caaacgugugucccgacugcccgccccuuccc

SEQ ID NO: 391090 - RNA, 32 nt, Homo Sapiens
gggacagaggcggggguccuagcugacggcuu

SEQ ID NO: 391091 - RNA, 32 nt, Homo Sapiens
cccugccgcccggaauccuccaaggaggcuug

SEQ ID NO: 391092 - RNA, 32 nt, Homo Sapiens
agugugaccacugaagcaccacagggaggggu

SEQ ID NO: 391093 - RNA, 32 nt, Homo Sapiens
gaggugggaagaucauuucaacccaggaguuc

SEQ ID NO: 391094 - RNA, 32 nt, Homo Sapiens
ccaguucagguggggucuuccucgguugcgua

SEQ ID NO: 391095 - RNA, 32 nt, Homo Sapiens
ucuagaagagugaagccacgauuauuuugggg

SEQ ID NO: 391096 - RNA, 32 nt, Homo Sapiens
ugugccccgaccaccuugggcacauguucuca

SEQ ID NO: 391097 - RNA, 32 nt, Homo Sapiens
ugugagcagggccguccgggcuuccuguggau

SEQ ID NO: 391098 - RNA, 32 nt, Homo Sapiens
cauaguguucugucaaaacacuugcuuccauu

SEQ ID NO: 391099 - RNA, 32 nt, Homo Sapiens
uagucuuuuguuuuuaauaaguuucuuacuau

SEQ ID NO: 391100 - RNA, 32 nt, Homo Sapiens
ccuugaggcacggggcagcugugccugcccug

SEQ ID NO: 391101 - RNA, 32 nt, Homo Sapiens
cuuggguagcuuggugccauuauccuguggaa

SEQ ID NO: 391102 - RNA, 32 nt, Homo Sapiens
ucauuggggauacauuuaguacauucauguga

SEQ ID NO: 391103 - RNA, 32 nt, Homo Sapiens
gcucuggcucugccucaggaggucaccugccg

SEQ ID NO: 391104 - RNA, 32 nt, Homo Sapiens
cuucccaggaccaucgcgccccucccucccgu

SEQ ID NO: 391105 - RNA, 32 nt, Homo Sapiens
aacguacuuuucauaucuuuuaccaguuguua

SEQ ID NO: 391106 - RNA, 32 nt, Homo Sapiens
cugaccugucuccuucacauaguccauaucac

SEQ ID NO: 391107 - RNA, 32 nt, Homo Sapiens
ucaaaucuacaguuuuacaaaauguuuuccuu

SEQ ID NO: 391108 - RNA, 32 nt, Homo Sapiens
uuucgaaacaacaaagauaaagaaaagguuga

SEQ ID NO: 391109 - RNA, 32 nt, Homo Sapiens
cugagcagggagauuauaacagcuggguucgc

SEQ ID NO: 391110 - RNA, 32 nt, Homo Sapiens
ggcagaggacccugaggccuucugcaguguuu

SEQ ID NO: 391111 - RNA, 32 nt, Homo Sapiens
auauuuacagaaaagacucugaccagagaucg

SEQ ID NO: 391112 - RNA, 32 nt, Homo Sapiens
agggcagccagugaggguggggugggacugaa

SEQ ID NO: 391113 - RNA, 32 nt, Homo Sapiens
gcggggcaggggcgcgccccugcagagugggg

SEQ ID NO: 391114 - RNA, 32 nt, Homo Sapiens
cgcuuagaacagaggcuugcacagguggagau

SEQ ID NO: 391115 - RNA, 32 nt, Homo Sapiens
augggggcggggugggcggggaggcuagauug

SEQ ID NO: 391116 - RNA, 32 nt, Homo Sapiens
uuucugccccccaccccaaacuucugucgagg

SEQ ID NO: 391117 - RNA, 32 nt, Homo Sapiens
cggccaaucuccaagcucccugggccgcaacu

SEQ ID NO: 391118 - RNA, 32 nt, Homo Sapiens
uucaaaaaauaccuucauuguuuggaccugca

SEQ ID NO: 391119 - RNA, 32 nt, Homo Sapiens
aacgaacacaagauuaagcuuugucagguuaa

SEQ ID NO: 391120 - RNA, 32 nt, Homo Sapiens
cgccgcgggaggaggaggagccggagccucug

SEQ ID NO: 391121 - RNA, 32 nt, Homo Sapiens
gacuuauccaacuuauaaauaacauauuucuu

SEQ ID NO: 391122 - RNA, 32 nt, Homo Sapiens
gagccugcaguuacauugaauuguagguguuu

SEQ ID NO: 391123 - RNA, 32 nt, Homo Sapiens
cuugaaggucgguggcggaggggguggcucuc

SEQ ID NO: 391124 - RNA, 32 nt, Homo Sapiens
aggcccucuuccgagagccuuccuccucgggc

SEQ ID NO: 391125 - RNA, 32 nt, Homo Sapiens
cauagccccucuaccaggggcucuccaaauag

SEQ ID NO: 391126 - RNA, 32 nt, Homo Sapiens
gaccgcacgcccgccgcgggacauggcacacg

SEQ ID NO: 391127 - RNA, 32 nt, Homo Sapiens
ugcccgcuccccuccgcagccaggcagcgccu

SEQ ID NO: 391128 - RNA, 32 nt, Homo Sapiens
agcaguccggugccccccgugccggagcgcag

SEQ ID NO: 391129 - RNA, 32 nt, Homo Sapiens
ucucccgcccgaacggucgccgcggccaacug

SEQ ID NO: 391130 - RNA, 32 nt, Homo Sapiens
uucucgagccuuaagcucccagguagcuggga

SEQ ID NO: 391131 - RNA, 32 nt, Homo Sapiens
caucacaucccucuccucuccuccucugugcu

SEQ ID NO: 391132 - RNA, 32 nt, Homo Sapiens
ccugauagcgcggcguguggaccggccgaaga

SEQ ID NO: 391133 - RNA, 32 nt, Homo Sapiens
uccucgcccugggcugccccagcuggaucugg

SEQ ID NO: 391134 - RNA, 32 nt, Homo Sapiens
accagagccgaccagcaaagugucucaccauc

SEQ ID NO: 391135 - RNA, 32 nt, Homo Sapiens
gcggggauaugauauaauauuguauuuccuua

SEQ ID NO: 391136 - RNA, 31 nt, Homo Sapiens
ugcaucauggaaacucuuucuaaugcaagug

SEQ ID NO: 391137 - RNA, 32 nt, Homo Sapiens
cuuguggccucuaucugcuaccaucuguguuu

SEQ ID NO: 391138 - RNA, 32 nt, Homo Sapiens
cugcccugcagggcugagauguggcaggagcu

SEQ ID NO: 391139 - RNA, 32 nt, Homo Sapiens
gggggcugacacccccaccucccucccagacg

SEQ ID NO: 391140 - RNA, 32 nt, Homo Sapiens
cgugagcgccugugcacacacacacacaugca

SEQ ID NO: 391141 - RNA, 32 nt, Homo Sapiens
auuuagaauuguauaaccuuuucauauauuua

SEQ ID NO: 391142 - RNA, 32 nt, Homo Sapiens
gcccugucugccucugguuccugcaucaccuu

SEQ ID NO: 391143 - RNA, 32 nt, Homo Sapiens
cacagcagagagugcccuggcuccauggggcc

SEQ ID NO: 391144 - RNA, 32 nt, Homo Sapiens
ugcuacaugaauuguaaaauuaauuauaaaau

SEQ ID NO: 391145 - RNA, 30 nt, Homo Sapiens
ugccaugccugugcugcuugggcuugcugg

SEQ ID NO: 391146 - RNA, 32 nt, Homo Sapiens
caccugcccuccccacccccugccccucgggc

SEQ ID NO: 391147 - RNA, 32 nt, Homo Sapiens
ccgaugcuggaacgucguugcagggcccccug

SEQ ID NO: 391148 - RNA, 32 nt, Homo Sapiens
uccaguagcugaugucagacaagcuuguccua

SEQ ID NO: 391149 - RNA, 32 nt, Homo Sapiens
ccacugcacugccccagcccagccccagccuc

SEQ ID NO: 391150 - RNA, 32 nt, Homo Sapiens
aagauauaccuuccgaagaggaggaagcuuac

SEQ ID NO: 391151 - RNA, 32 nt, Homo Sapiens
ugcggaggggagaagguccuuucucggcugcc

SEQ ID NO: 391152 - RNA, 32 nt, Homo Sapiens
uggguccugccagggcacuggaucuggagagu

SEQ ID NO: 391153 - RNA, 32 nt, Homo Sapiens
ugugauucauuccaauaaagguacaauguugg

SEQ ID NO: 391154 - RNA, 32 nt, Homo Sapiens
uugaggucaggaguuugagaccaguguggcca

SEQ ID NO: 391155 - RNA, 32 nt, Homo Sapiens
ucaguccggcccgguccggccucccagccgcc

SEQ ID NO: 391156 - RNA, 32 nt, Homo Sapiens
gauucacaauauuuagguguauuuucaauacc

SEQ ID NO: 391157 - RNA, 32 nt, Homo Sapiens
gcucccuuccuggucugagacuagcucugggg

SEQ ID NO: 391158 - RNA, 32 nt, Homo Sapiens
uuccugcuguaacauuuuaacuuuuuagaauu

SEQ ID NO: 391159 - RNA, 32 nt, Homo Sapiens
aucagauucuucauuuuuugcagcuacgaugu

SEQ ID NO: 391160 - RNA, 29 nt, Homo Sapiens
ccaaacaugaauguacauuuucuaacaaa

SEQ ID NO: 391161 - RNA, 32 nt, Homo Sapiens
gggcuugucuguagauuuuagacccuauugcu

SEQ ID NO: 391162 - RNA, 32 nt, Homo Sapiens
cccaaguccuccuccgccuccuccucucugca

SEQ ID NO: 391163 - RNA, 32 nt, Homo Sapiens
acccauuuaaguggacaagcuccaaaaugaaa

SEQ ID NO: 391164 - RNA, 32 nt, Homo Sapiens
ugggggugacagagugcugaucacuuccccuc

SEQ ID NO: 391165 - RNA, 32 nt, Homo Sapiens
caaccuguacaacauuucuacacuuuauggau

SEQ ID NO: 391166 - RNA, 32 nt, Homo Sapiens
uccauuccauuuccauuucugcagcuuagcuu

SEQ ID NO: 391167 - RNA, 32 nt, Homo Sapiens
ucgagaccauccuggcuaacguggugaaaccc

SEQ ID NO: 391168 - RNA, 32 nt, Homo Sapiens
cuucuccuggaaagcugccaucccccaguaga

SEQ ID NO: 391169 - RNA, 32 nt, Homo Sapiens
guagcauuugugaauaaauguguaggugcugu

SEQ ID NO: 391170 - RNA, 32 nt, Homo Sapiens
gcugccgaaggggacagacuccacugccagac

SEQ ID NO: 391171 - RNA, 32 nt, Homo Sapiens
cgcucacucccucuuggaggaccuuggccugu

SEQ ID NO: 391172 - RNA, 32 nt, Homo Sapiens
gaacccgggagguggagguugcggugagccaa

SEQ ID NO: 391173 - RNA, 32 nt, Homo Sapiens
gaacccaggagguggagguuguggugagcuga

SEQ ID NO: 391174 - RNA, 32 nt, Homo Sapiens
gaaccugggagguggagguuguggugagccaa

SEQ ID NO: 391175 - RNA, 32 nt, Homo Sapiens
aaacuugagagaaugagauuucugcuuguaua

SEQ ID NO: 391176 - RNA, 32 nt, Homo Sapiens
uuucuuguuaacauauggauaacuauuucuaa

SEQ ID NO: 391177 - RNA, 32 nt, Homo Sapiens
guuuuucaaauuauguguuucucagguuaaca

SEQ ID NO: 391178 - RNA, 32 nt, Homo Sapiens
ucuugucauguguauaaaaauaaaaaagaucc

SEQ ID NO: 391179 - RNA, 32 nt, Homo Sapiens
auccuuaaaugauguuucaauuuuauauguuu

SEQ ID NO: 391180 - RNA, 32 nt, Homo Sapiens
ucccagaugcucugcugguaccaguggccguc

SEQ ID NO: 391181 - RNA, 32 nt, Homo Sapiens
ugcagaagugguccaugaugccagauguugca

SEQ ID NO: 391182 - RNA, 32 nt, Homo Sapiens
agguuagguuuuggucucucuugcuccacugc

SEQ ID NO: 391183 - RNA, 32 nt, Homo Sapiens
aagaggacaauggauucuggaacucgcccagu

SEQ ID NO: 391184 - RNA, 32 nt, Homo Sapiens
gcuccucagcaaugugaagaaucaaagucagg

SEQ ID NO: 391185 - RNA, 32 nt, Homo Sapiens
gaggcauggccagugggacuaguguucccucc

SEQ ID NO: 391186 - RNA, 32 nt, Homo Sapiens
gauagauggcuacuuugccuuucuucuugaac

SEQ ID NO: 391187 - RNA, 32 nt, Homo Sapiens
acagcguuuaaugaaugaagcauuccagccag

SEQ ID NO: 391188 - RNA, 32 nt, Homo Sapiens
guucugcacaaaaccuuaauucuucaaggacu

SEQ ID NO: 391189 - RNA, 32 nt, Homo Sapiens
uaaaaugaauuuucuuuuuuuuuuaagacaga

SEQ ID NO: 391190 - RNA, 32 nt, Homo Sapiens
ccccuaccucaucgugcgcggguggggucggc

SEQ ID NO: 391191 - RNA, 32 nt, Homo Sapiens
cccacccggcaagcccgccccaucccagacag

SEQ ID NO: 391192 - RNA, 32 nt, Homo Sapiens
cccaucacuagcaauuuuccugauucacccac

SEQ ID NO: 391193 - RNA, 32 nt, Homo Sapiens
uuugaagucacaauuaaaaugccaacuaggug

SEQ ID NO: 391194 - RNA, 32 nt, Homo Sapiens
uaaauauuuauuucuaugcuuuguugccucug

SEQ ID NO: 391195 - RNA, 32 nt, Homo Sapiens
caacuuugaaaacaaacccuggucucuccuuu

SEQ ID NO: 391196 - RNA, 32 nt, Homo Sapiens
guuucauucuucuuucuuccugucaccuugug

SEQ ID NO: 391197 - RNA, 32 nt, Homo Sapiens
aucugcauuguuaaaugagggcuuaucuuccu

SEQ ID NO: 391198 - RNA, 32 nt, Homo Sapiens
cugaaaauauuuuucucuugcuauuuauauau

SEQ ID NO: 391199 - RNA, 32 nt, Homo Sapiens
uucugagaaggggccggccggagggaggggac

SEQ ID NO: 391200 - RNA, 32 nt, Homo Sapiens
uuuuuaaaccacuggaggaaaaaugagauauu

SEQ ID NO: 391201 - RNA, 32 nt, Homo Sapiens
aauuugggaaaagggauucaguucugugggaa

SEQ ID NO: 391202 - RNA, 32 nt, Homo Sapiens
cacgagggagacggcaaccuggguuccggaag

SEQ ID NO: 391203 - RNA, 32 nt, Homo Sapiens
ucagccuccgaguugcuuuucccucuggcccu

SEQ ID NO: 391204 - RNA, 32 nt, Homo Sapiens
uguucaaaacgaagacuacuauuaaaauuuca

SEQ ID NO: 391205 - RNA, 32 nt, Homo Sapiens
gaggcgugggguuucggcugagcccacagggc

SEQ ID NO: 391206 - RNA, 32 nt, Homo Sapiens
ggguagccuuuuuaccaauuauaaggaaaauu

SEQ ID NO: 391207 - RNA, 32 nt, Homo Sapiens
aagcauuuguauugcuuuuucaucucagaaaa

SEQ ID NO: 391208 - RNA, 29 nt, Homo Sapiens
ugacaauaaaguucucuauuuuuggaaaa

SEQ ID NO: 391209 - RNA, 32 nt, Homo Sapiens
uucacagaggacaggaggaaagugaggacagg

SEQ ID NO: 391210 - RNA, 32 nt, Homo Sapiens
aaacuuauucuauugacagacaugguguacug

SEQ ID NO: 391211 - RNA, 32 nt, Homo Sapiens
ggaaggcugaaggagggaaagggcacaaguac

SEQ ID NO: 391212 - RNA, 32 nt, Homo Sapiens
acauguggcaaaauaugguuugguuuuucuuu

SEQ ID NO: 391213 - RNA, 32 nt, Homo Sapiens
cgcagcgucuggcgcgcugggaccugcacagg

SEQ ID NO: 391214 - RNA, 32 nt, Homo Sapiens
cgcagccgucgccgcuucuccaccucggcccg

SEQ ID NO: 391215 - RNA, 32 nt, Homo Sapiens
cuuuccagacugcccccacacuggggcucuaa

SEQ ID NO: 391216 - RNA, 32 nt, Homo Sapiens
uucugggguuggauuggugcugccccaggaca

SEQ ID NO: 391217 - RNA, 32 nt, Homo Sapiens
acuaucgggggaagcacgcagagaggggucac

SEQ ID NO: 391218 - RNA, 32 nt, Homo Sapiens
uaauaugcgucuuuuucacaauauccuaugau

SEQ ID NO: 391219 - RNA, 32 nt, Homo Sapiens
cacuuaaacaauuugaguuccuucaaaucaac

SEQ ID NO: 391220 - RNA, 32 nt, Homo Sapiens
agagagugaugaugaagaagauagucuagaac

SEQ ID NO: 391221 - RNA, 32 nt, Homo Sapiens
ggggaugagaacugugugcugcgacccuucga

SEQ ID NO: 391222 - RNA, 32 nt, Homo Sapiens
cccgggccuuccagugaucuggaccaggaaga

SEQ ID NO: 391223 - RNA, 32 nt, Homo Sapiens
gucagagagauaacaaugaaauccccaaugcc

SEQ ID NO: 391224 - RNA, 32 nt, Homo Sapiens
cuguugaaagacuucagaaaauauaggccuuu

SEQ ID NO: 391225 - RNA, 32 nt, Homo Sapiens
ucaucacagaaaagaugaaaagagaaaagaaa

SEQ ID NO: 391226 - RNA, 32 nt, Homo Sapiens
ucaugcucagaauuucagguuuuuguacucca

SEQ ID NO: 391227 - RNA, 32 nt, Homo Sapiens
ucaggaaugcucuuguacauagacuuauuuac

SEQ ID NO: 391228 - RNA, 32 nt, Homo Sapiens
ggcggcagcguggcaggagcgaggggcgcccc

SEQ ID NO: 391229 - RNA, 32 nt, Homo Sapiens
ggugggggucgggcucccuucuccugggguga

SEQ ID NO: 391230 - RNA, 32 nt, Homo Sapiens
ccagucauuguuagacaacugcauuucauuca

SEQ ID NO: 391231 - RNA, 32 nt, Homo Sapiens
guaugacaccaauuggcacaaaguuauaggaa

SEQ ID NO: 391232 - RNA, 25 nt, Homo Sapiens
augaagcuauuggagaacucgagcu

SEQ ID NO: 391233 - RNA, 32 nt, Homo Sapiens
cgcaacccuguccucugcugggcccccagcaa

SEQ ID NO: 391234 - RNA, 32 nt, Homo Sapiens
gcagaagcuccagagcccagacuugcaggcuc

SEQ ID NO: 391235 - RNA, 32 nt, Homo Sapiens
ccccgcacuuucggcccggcucgggguucucg

SEQ ID NO: 391236 - RNA, 32 nt, Homo Sapiens
cguccccgcccggcuccgccaaauggugagcg

SEQ ID NO: 391237 - RNA, 32 nt, Homo Sapiens
gggcugcagaggaagcggggcuggggaggcug

SEQ ID NO: 391238 - RNA, 32 nt, Homo Sapiens
guauucuguguuuuccucuuuuuugguccacu

SEQ ID NO: 391239 - RNA, 32 nt, Homo Sapiens
aauaugaaaaucaaaagcuuuaguauuccuca

SEQ ID NO: 391240 - RNA, 32 nt, Homo Sapiens
ugcagcggccccuccccuccccuccccccucc

SEQ ID NO: 391241 - RNA, 31 nt, Homo Sapiens
aaggguguggcagaggcagugcuguguuuau

SEQ ID NO: 391242 - RNA, 32 nt, Homo Sapiens
aguuggagugagaaucaagacagccggaccac

SEQ ID NO: 391243 - RNA, 32 nt, Homo Sapiens
gccacucucagcaucacccugaaccaaaggcc

SEQ ID NO: 391244 - RNA, 32 nt, Homo Sapiens
ggcaggggucuuaauucuucuuaugaucaaca

SEQ ID NO: 391245 - RNA, 32 nt, Homo Sapiens
gaaacaaaaauauauuaaaaauaagacuuuuc

SEQ ID NO: 391246 - RNA, 32 nt, Homo Sapiens
aauuuuuuaccuuguuuuggcauguuuguaug

SEQ ID NO: 391247 - RNA, 32 nt, Homo Sapiens
guguagucaacaguaaguucuuuuaaugaaua

SEQ ID NO: 391248 - RNA, 32 nt, Homo Sapiens
cacucuacccacagugacgugguaucugauga

SEQ ID NO: 391249 - RNA, 32 nt, Homo Sapiens
auaugucugaagagcaaagacuacaugcauuu

SEQ ID NO: 391250 - RNA, 32 nt, Homo Sapiens
gacguugaaaacaguaauguggcuacacaguu

SEQ ID NO: 391251 - RNA, 30 nt, Homo Sapiens
ggcaggggcgcgcagagccacgguuugcuc

SEQ ID NO: 391252 - RNA, 32 nt, Homo Sapiens
ucggcagcgggaagagacccggagagaugcau

SEQ ID NO: 391253 - RNA, 32 nt, Homo Sapiens
cacaaccuguuuuguuuuuguaaaacauagga

SEQ ID NO: 391254 - RNA, 32 nt, Homo Sapiens
ucagccccaagcagagcagcugcagggccccu

SEQ ID NO: 391255 - RNA, 32 nt, Homo Sapiens
guuacgggauggacagccugcccgccauggcc

SEQ ID NO: 391256 - RNA, 32 nt, Homo Sapiens
aagcagaaggugcuuuggaacaguccggugcu

SEQ ID NO: 391257 - RNA, 32 nt, Homo Sapiens
cggugcuauacaagucaaaaaauacaugccug

SEQ ID NO: 391258 - RNA, 31 nt, Homo Sapiens
cugggaagccgcagccacuaccaagggccuu

SEQ ID NO: 391259 - RNA, 32 nt, Homo Sapiens
gccuggccagcauggugaaaccucaucccucu

SEQ ID NO: 391260 - RNA, 32 nt, Homo Sapiens
gauacccucaauaaaacagggauugccaagaa

SEQ ID NO: 391261 - RNA, 32 nt, Homo Sapiens
uuacacaguuuguaacaagaaaacagucucuc

SEQ ID NO: 391262 - RNA, 32 nt, Homo Sapiens
cguucccucccggcugccgccagggggcgguc

SEQ ID NO: 391263 - RNA, 32 nt, Homo Sapiens
accugaaugcuguugucaagagacucugaaau

SEQ ID NO: 391264 - RNA, 32 nt, Homo Sapiens
uaacaacuauaaauguaguuuauguguuauaa

SEQ ID NO: 391265 - RNA, 32 nt, Homo Sapiens
ggaagaaaauuuaaaucuuuuacauacaaaua

SEQ ID NO: 391266 - RNA, 32 nt, Homo Sapiens
uuugcuguuuuaaaauuuuugcuauuuuuuca

SEQ ID NO: 391267 - RNA, 32 nt, Homo Sapiens
ucaacacuuaaguagcauacacugcccuacaa

SEQ ID NO: 391268 - RNA, 32 nt, Homo Sapiens
cucucuugggcuuucuuacacuaacucuguac

SEQ ID NO: 391269 - RNA, 32 nt, Homo Sapiens
ggcaccauauuuuuauaucuauuuuugacauu

SEQ ID NO: 391270 - RNA, 32 nt, Homo Sapiens
ucccccuccccuccccaggugaccugcucucu

SEQ ID NO: 391271 - RNA, 32 nt, Homo Sapiens
aacgugaucccagggguagacacguggcgcug

SEQ ID NO: 391272 - RNA, 32 nt, Homo Sapiens
auuuucauuccaguacuuuuuaugauuuuuua

SEQ ID NO: 391273 - RNA, 32 nt, Homo Sapiens
gagugggaggagggcacguaccgggugccagc

SEQ ID NO: 391274 - RNA, 32 nt, Homo Sapiens
uggggaucauaacaccuaccucauggaguugu

SEQ ID NO: 391275 - RNA, 32 nt, Homo Sapiens
agugcuuuccuccucugcaggauguaagguuu

SEQ ID NO: 391276 - RNA, 32 nt, Homo Sapiens
uugccaugugucaaaaucaugguuuuguaauu

SEQ ID NO: 391277 - RNA, 31 nt, Homo Sapiens
accgccuggccgggggcuccaagggcucuag

SEQ ID NO: 391278 - RNA, 32 nt, Homo Sapiens
gaaauacaaaaauuagccaggugugguggcgg

SEQ ID NO: 391279 - RNA, 32 nt, Homo Sapiens
acuugguuucuuccauccuccuccuccccuua

SEQ ID NO: 391280 - RNA, 32 nt, Homo Sapiens
ucaaacuuucuuuucuaugaaaaugacaugga

SEQ ID NO: 391281 - RNA, 30 nt, Homo Sapiens
ccaggaucuuuaauaaucuauaggaaauag

SEQ ID NO: 391282 - RNA, 32 nt, Homo Sapiens
cgucuuuaguuuugauuuuggaaagauguuaa

SEQ ID NO: 391283 - RNA, 32 nt, Homo Sapiens
cucacauacuuaugugcugcuagucucuacuc

SEQ ID NO: 391284 - RNA, 32 nt, Homo Sapiens
ggcuacuuaggaccauauggauguuguacuga

SEQ ID NO: 391285 - RNA, 28 nt, Homo Sapiens
aggcgagagcggccgccgcuggugcuua

SEQ ID NO: 391286 - RNA, 32 nt, Homo Sapiens
uggcagcgccgacguccugcccaccacgcacu

SEQ ID NO: 391287 - RNA, 32 nt, Homo Sapiens
cauucuuuuuauguaguaaaaaguauaaggcc

SEQ ID NO: 391288 - RNA, 32 nt, Homo Sapiens
uuuagguauuaagacugagaaauauuuaaagc

SEQ ID NO: 391289 - RNA, 32 nt, Homo Sapiens
gcagaacacaucacacauuuaauccaaauaau

SEQ ID NO: 391290 - RNA, 32 nt, Homo Sapiens
gugguaauguggcagcugggaccauggccagc

SEQ ID NO: 391291 - RNA, 31 nt, Homo Sapiens
cgguugcggcgcagccccgccgcagugcgca

SEQ ID NO: 391292 - RNA, 32 nt, Homo Sapiens
cccagcuacugaggaggcugaggugggaggau

SEQ ID NO: 391293 - RNA, 32 nt, Homo Sapiens
ccugccagccagcagcuggcccuccaccaucu

SEQ ID NO: 391294 - RNA, 32 nt, Homo Sapiens
aggaguaucuggggaagaaucuauuuccacau

SEQ ID NO: 391295 - RNA, 32 nt, Homo Sapiens
guuuuuguauuuaugaaaauaguuucauuguc

SEQ ID NO: 391296 - RNA, 32 nt, Homo Sapiens
guaacaucagcugccuaugccuaugauaaggu

SEQ ID NO: 391297 - RNA, 32 nt, Homo Sapiens
uccggaagagguguaagauggugcugguggag

SEQ ID NO: 391298 - RNA, 32 nt, Homo Sapiens
cugaagaggacacuucaaaacaaaagaaacaa

SEQ ID NO: 391299 - RNA, 32 nt, Homo Sapiens
ggcccaccuuuaacagagcaccccuuugaaag

SEQ ID NO: 391300 - RNA, 32 nt, Homo Sapiens
uaauaaagucuguauauacauguacacuuuga

SEQ ID NO: 391301 - RNA, 32 nt, Homo Sapiens
cuuagcuccccuccccaguccacagagccauc

SEQ ID NO: 391302 - RNA, 32 nt, Homo Sapiens
uccuggguucaagcgauucuucugccucagcc

SEQ ID NO: 391303 - RNA, 32 nt, Homo Sapiens
uaagucuuaggaccaaagguguuuuuaaugag

SEQ ID NO: 391304 - RNA, 32 nt, Homo Sapiens
gccagcaaugcaagauuagaucucuaaaugca

SEQ ID NO: 391305 - RNA, 32 nt, Homo Sapiens
caauuauuucgagagucaaaauguggauuucc

SEQ ID NO: 391306 - RNA, 32 nt, Homo Sapiens
acuagccugggcaacauagugagacucggucu

SEQ ID NO: 391307 - RNA, 32 nt, Homo Sapiens
ugcacacggugauuucauguuauauaugcaaa

SEQ ID NO: 391308 - RNA, 32 nt, Homo Sapiens
ccccgggcacgcggcacuuuacaugggggcag

SEQ ID NO: 391309 - RNA, 32 nt, Homo Sapiens
uucuccaaagauaguauuuccaaacuguuaua

SEQ ID NO: 391310 - RNA, 32 nt, Homo Sapiens
ccaagcccuuugcuguucgcagcccucacauu

SEQ ID NO: 391311 - RNA, 32 nt, Homo Sapiens
cagaagaggagcuucucgucuuguucaccgcu

SEQ ID NO: 391312 - RNA, 31 nt, Homo Sapiens
cugcagcuagcauuucaaccauauguggauc

SEQ ID NO: 391313 - RNA, 30 nt, Homo Sapiens
cccuauuagggaguuaugcaaaauuugucc

SEQ ID NO: 391314 - RNA, 32 nt, Homo Sapiens
uucagggcuucuccgcgacuggaccgggcgcc

SEQ ID NO: 391315 - RNA, 32 nt, Homo Sapiens
ggacccucaacaaauauauaaaaauauguugc

SEQ ID NO: 391316 - RNA, 32 nt, Homo Sapiens
agucuuccucaauugaugguucauaccccauu

SEQ ID NO: 391317 - RNA, 32 nt, Homo Sapiens
aaaggguaaaaguuuucaggaauauucgggcu

SEQ ID NO: 391318 - RNA, 32 nt, Homo Sapiens
ggguucuugcagcuggcaccagcccucccggc

SEQ ID NO: 391319 - RNA, 32 nt, Homo Sapiens
gccgcucgcgcccuuucccaccgcugccggga

SEQ ID NO: 391320 - RNA, 32 nt, Homo Sapiens
cagcugguuuaaaaauauccuuuuuugcugaa

SEQ ID NO: 391321 - RNA, 31 nt, Homo Sapiens
ugaagaaaagagguuuaauuggcucacgguu

SEQ ID NO: 391322 - RNA, 32 nt, Homo Sapiens
uuggcaaugaugucauuaaaaguauaugaaua

SEQ ID NO: 391323 - RNA, 32 nt, Homo Sapiens
cacaggguggggguggggaggggcgguguuaa

SEQ ID NO: 391324 - RNA, 32 nt, Homo Sapiens
cugcaucaucuuccuggacuguuucuguuguu

SEQ ID NO: 391325 - RNA, 32 nt, Homo Sapiens
gugggggcucugcuacugcuggcgcucaucac

SEQ ID NO: 391326 - RNA, 32 nt, Homo Sapiens
uauccauugaagccgaaaucugcauaaggaag

SEQ ID NO: 391327 - RNA, 32 nt, Homo Sapiens
ucaaccacucuccuaaugauuggaacaaaagc

SEQ ID NO: 391328 - RNA, 32 nt, Homo Sapiens
uacaugugcagggguugcugcuuucccagugc

SEQ ID NO: 391329 - RNA, 32 nt, Homo Sapiens
auuugcacccaugccauagaaacugaggccau

SEQ ID NO: 391330 - RNA, 32 nt, Homo Sapiens
uaccugcagcuguggcggcugcuccuguaccg

SEQ ID NO: 391331 - RNA, 32 nt, Homo Sapiens
agguggaguaggcugugccuucugaagcagua

SEQ ID NO: 391332 - RNA, 32 nt, Homo Sapiens
uguuuuuuuuuaaguucucaucauuauuacau

SEQ ID NO: 391333 - RNA, 32 nt, Homo Sapiens
ggaggauuugaaauaggaauugagacacauuu

SEQ ID NO: 391334 - RNA, 32 nt, Homo Sapiens
agggguacagagaggagcccccuuggcaccgc

SEQ ID NO: 391335 - RNA, 32 nt, Homo Sapiens
uggcauucacugugguuuugguaaauaauugc

SEQ ID NO: 391336 - RNA, 32 nt, Homo Sapiens
gccagccgcaguuugucuauuccugaagacuc

SEQ ID NO: 391337 - RNA, 32 nt, Homo Sapiens
uaauauaauuguagggaucuuuaaaaguugaa

SEQ ID NO: 391338 - RNA, 32 nt, Homo Sapiens
cugcaacauccacuuccugcucccgaucuccc

SEQ ID NO: 391339 - RNA, 32 nt, Homo Sapiens
uacaaaagcaaaaauauaaguaccuacaaaug

SEQ ID NO: 391340 - RNA, 32 nt, Homo Sapiens
gacucugagucugauuacgaaaaguacucuau

SEQ ID NO: 391341 - RNA, 32 nt, Homo Sapiens
cuuugucagaacucaguucuguggggagaggg

SEQ ID NO: 391342 - RNA, 32 nt, Homo Sapiens
auggcaauauaaauccagucuuuauucucccu

SEQ ID NO: 391343 - RNA, 32 nt, Homo Sapiens
acacaccccccucccgggucacgcagacaccc

SEQ ID NO: 391344 - RNA, 32 nt, Homo Sapiens
cuacaaaacaucuuggcauauuuaagaguggc

SEQ ID NO: 391345 - RNA, 32 nt, Homo Sapiens
uacuuuacaacuucagaccggagaaaaggcca

SEQ ID NO: 391346 - RNA, 32 nt, Homo Sapiens
gaauggcuccaccccucccccagcccugcuuc

SEQ ID NO: 391347 - RNA, 32 nt, Homo Sapiens
cggcagggggcuagcguccggcugagcccggc

SEQ ID NO: 391348 - RNA, 32 nt, Homo Sapiens
ggccuaguuccuauacuuuucuuaauucuuca

SEQ ID NO: 391349 - RNA, 32 nt, Homo Sapiens
uuucccgggcgucugcagcugcccugcccgug

SEQ ID NO: 391350 - RNA, 32 nt, Homo Sapiens
gaauugaaguuaacauucuuauuuucaagaga

SEQ ID NO: 391351 - RNA, 32 nt, Homo Sapiens
agaacuucuguaauuuuauuccaguugaacua

SEQ ID NO: 391352 - RNA, 32 nt, Homo Sapiens
acgaaucggcccggccgucgcgugcaccaugu

SEQ ID NO: 391353 - RNA, 32 nt, Homo Sapiens
caauccaggcuuaugaagaugcuggacagacu

SEQ ID NO: 391354 - RNA, 32 nt, Homo Sapiens
uuuucagagugacggaugaccgggccaagcaa

SEQ ID NO: 391355 - RNA, 32 nt, Homo Sapiens
cugcguucucugccaaagacucgugggggccg

SEQ ID NO: 391356 - RNA, 32 nt, Homo Sapiens
acucucacgcagaacugagaaaugcacuagcu

SEQ ID NO: 391357 - RNA, 32 nt, Homo Sapiens
gaacuagauaaaacuauuuuaaaauucauaca

SEQ ID NO: 391358 - RNA, 32 nt, Homo Sapiens
ccagucagaaaaggagagaggaaauuagcaga

SEQ ID NO: 391359 - RNA, 32 nt, Homo Sapiens
cuggccgagggcggggggcagcggggggucuc

SEQ ID NO: 391360 - RNA, 32 nt, Homo Sapiens
caagugugaagaauguggcaaaacuuuuaauu

SEQ ID NO: 391361 - RNA, 32 nt, Homo Sapiens
ccaacauaaaaauuauaauaggaauaauuuga

SEQ ID NO: 391362 - RNA, 32 nt, Homo Sapiens
guaucucauacuuauaaacaguaugagauagg

SEQ ID NO: 391363 - RNA, 32 nt, Homo Sapiens
aguuaccaaacacaguggccgggacucuaaaa

SEQ ID NO: 391364 - RNA, 32 nt, Homo Sapiens
uguccucaccuucaaaaauauuuauauuguca

SEQ ID NO: 391365 - RNA, 32 nt, Homo Sapiens
gaggaagacuagcugcugcugcugcugcugcu

SEQ ID NO: 391366 - RNA, 32 nt, Homo Sapiens
accuucaucuguccuuuuuuuguuguuguuga

SEQ ID NO: 391367 - RNA, 32 nt, Homo Sapiens
cacuucugaccccuguaacucuacccacugug

SEQ ID NO: 391368 - RNA, 32 nt, Homo Sapiens
aaacggggaucgcugcuccccaacguacacau

SEQ ID NO: 391369 - RNA, 32 nt, Homo Sapiens
uugcugagguuuuaaaagacuacaucaagcca

SEQ ID NO: 391370 - RNA, 26 nt, Homo Sapiens
uacaguuaauaaauuugauugccacu

SEQ ID NO: 391371 - RNA, 32 nt, Homo Sapiens
uucaguguagaccaccagcuccccuccccauc

SEQ ID NO: 391372 - RNA, 32 nt, Homo Sapiens
cacauuucuuggacuuuuuuuagcuguuauuc

SEQ ID NO: 391373 - RNA, 32 nt, Homo Sapiens
aaaagaaggaaucccggcugcagccuccugcc

SEQ ID NO: 391374 - RNA, 32 nt, Homo Sapiens
gcccucggcaagcugcugcagcgcuagacgcc

SEQ ID NO: 391375 - RNA, 32 nt, Homo Sapiens
cuggagucuuuaauucauccacagccaucaua

SEQ ID NO: 391376 - RNA, 32 nt, Homo Sapiens
auccagcucguggaccagcugcagcaccagag

SEQ ID NO: 391377 - RNA, 32 nt, Homo Sapiens
ggggauaaaauacacuuuuuaaggacccaagu

SEQ ID NO: 391378 - RNA, 32 nt, Homo Sapiens
ggaggaggucgugggacggggagggugggaug

SEQ ID NO: 391379 - RNA, 32 nt, Homo Sapiens
uugcauuccugauuuauuuuuauuuuauaugu

SEQ ID NO: 391380 - RNA, 32 nt, Homo Sapiens
aaaaccgcaacaaaaacauguaagaaauaaaa

SEQ ID NO: 391381 - RNA, 32 nt, Homo Sapiens
ggccuggcgugguggcucaugccuguaauccc

SEQ ID NO: 391382 - RNA, 32 nt, Homo Sapiens
ggggucccgcggcucucugcuccucguggaag

SEQ ID NO: 391383 - RNA, 32 nt, Homo Sapiens
agugaugcgcugaguucuucucaugcuuugaa

SEQ ID NO: 391384 - RNA, 32 nt, Homo Sapiens
cuuccuuugccaauaugggaaacauacugcaa

SEQ ID NO: 391385 - RNA, 31 nt, Homo Sapiens
accagcacaaagaucugaaugaugcacccca

SEQ ID NO: 391386 - RNA, 32 nt, Homo Sapiens
cugcaccauuuaaaaacaggcagcucauaaga

SEQ ID NO: 391387 - RNA, 32 nt, Homo Sapiens
ugguggacauacaauuuuacuguuucauugca

SEQ ID NO: 391388 - RNA, 32 nt, Homo Sapiens
agugugaagcagaaacaaaacacaauggugga

SEQ ID NO: 391389 - RNA, 32 nt, Homo Sapiens
ggagggacugagauccuggggaugccuggagc

SEQ ID NO: 391390 - RNA, 32 nt, Homo Sapiens
aaaaaacaaaacaaaaacaaaauguagaaaaa

SEQ ID NO: 391391 - RNA, 32 nt, Homo Sapiens
cccacccugccagcuggccccagcgggcauga

SEQ ID NO: 391392 - RNA, 32 nt, Homo Sapiens
aagggcagggacuuaaucaacgcaagcuuaug

SEQ ID NO: 391393 - RNA, 32 nt, Homo Sapiens
gguuuauagagugauguaauucaacugaagaa

SEQ ID NO: 391394 - RNA, 32 nt, Homo Sapiens
gagauuauaaauauuucuuccccagauuacgc

SEQ ID NO: 391395 - RNA, 32 nt, Homo Sapiens
uuggucaauauuugaucuaaguugcaucuuua

SEQ ID NO: 391396 - RNA, 32 nt, Homo Sapiens
agauagagggcagacagauuccugcuagcagc

SEQ ID NO: 391397 - RNA, 31 nt, Homo Sapiens
uagaagacaaagaaagaugcuauuaauguua

SEQ ID NO: 391398 - RNA, 32 nt, Homo Sapiens
ggcuuuacuuuauguuuauacagugcucaggg

SEQ ID NO: 391399 - RNA, 32 nt, Homo Sapiens
uguuucugagaaauguggguauggaggugggu

SEQ ID NO: 391400 - RNA, 32 nt, Homo Sapiens
uuuuuaaaucacauuaauuuuaccaagugaaa

SEQ ID NO: 391401 - RNA, 32 nt, Homo Sapiens
caaguauacucuuaagacccacucuguuuaaa

SEQ ID NO: 391402 - RNA, 32 nt, Homo Sapiens
uuaguuuacugauagguuuuaugcugcuaaga

SEQ ID NO: 391403 - RNA, 32 nt, Homo Sapiens
accauccuggcuaauacagugaaaccccaugu

SEQ ID NO: 391404 - RNA, 31 nt, Homo Sapiens
agccgagcgggcccuguggaaaugagaugua

SEQ ID NO: 391405 - RNA, 32 nt, Homo Sapiens
uggauggggcaggccaccuggcucucaccucu

SEQ ID NO: 391406 - RNA, 32 nt, Homo Sapiens
uuacaggugugagccacugcgcccagccagca

SEQ ID NO: 391407 - RNA, 32 nt, Homo Sapiens
ucacguaaaaggaagaucuguagacauaauaa

SEQ ID NO: 391408 - RNA, 32 nt, Homo Sapiens
gagaacuuguggcucuggggcuggggugaggg

SEQ ID NO: 391409 - RNA, 32 nt, Homo Sapiens
cugugguucccucucauuugucccaguuacua

SEQ ID NO: 391410 - RNA, 32 nt, Homo Sapiens
cccuaaaagagaaaguagaaaacuauucuaac

SEQ ID NO: 391411 - RNA, 32 nt, Homo Sapiens
aggaaaggcugauguuuccauauagcuugcuc

SEQ ID NO: 391412 - RNA, 32 nt, Homo Sapiens
ccaacggccccgcuccuuagcuaacccagcuu

SEQ ID NO: 391413 - RNA, 28 nt, Homo Sapiens
cgucugaguugccuuaggaugacagugc

SEQ ID NO: 391414 - RNA, 32 nt, Homo Sapiens
aggccaagaugggaggaucauuugagcccagg

SEQ ID NO: 391415 - RNA, 32 nt, Homo Sapiens
caccacauggcugggccuggcucccaggacca

SEQ ID NO: 391416 - RNA, 32 nt, Homo Sapiens
gggcaguguguccauccuuuaccaucccucag

SEQ ID NO: 391417 - RNA, 32 nt, Homo Sapiens
uucucuccauuaugaauuaucuuacgauuaga

SEQ ID NO: 391418 - RNA, 32 nt, Homo Sapiens
caccuaugaaaagaagcggggaaaacaacaac

SEQ ID NO: 391419 - RNA, 32 nt, Homo Sapiens
guggaaggcaauuuuuccacggacccgggugg

SEQ ID NO: 391420 - RNA, 32 nt, Homo Sapiens
uguuguauucuuauuucaguguuuccuuccag

SEQ ID NO: 391421 - RNA, 32 nt, Homo Sapiens
aaaguggcucaggaggaaggagcugaacccua

SEQ ID NO: 391422 - RNA, 32 nt, Homo Sapiens
aucuacgaguccucgggaugcagugacugaga

SEQ ID NO: 391423 - RNA, 32 nt, Homo Sapiens
gugggcacuggacaggcauagcagacucucuu

SEQ ID NO: 391424 - RNA, 32 nt, Homo Sapiens
gcuagggagagaucugaagaaauacuagaaau

SEQ ID NO: 391425 - RNA, 32 nt, Homo Sapiens
uuuaagaaguacuaagcaaacaagcaauaaaa

SEQ ID NO: 391426 - RNA, 32 nt, Homo Sapiens
ggcaccucagugugucccucaggcaccuggac

SEQ ID NO: 391427 - RNA, 32 nt, Homo Sapiens
cgaguggggcggggcggccggcaccaugucga

SEQ ID NO: 391428 - RNA, 32 nt, Homo Sapiens
uaccuaccaagauauaccugauauauccacca

SEQ ID NO: 391429 - RNA, 32 nt, Homo Sapiens
gagaaaagcuguauauuuugagauaugggaug

SEQ ID NO: 391430 - RNA, 32 nt, Homo Sapiens
uuuuguaauggacuuuucaagccuuccuucca

SEQ ID NO: 391431 - RNA, 32 nt, Homo Sapiens
acaagcagugauuccuuuggugccauauacca

SEQ ID NO: 391432 - RNA, 32 nt, Homo Sapiens
uugagucgugagauccaucaguucuugauauu

SEQ ID NO: 391433 - RNA, 32 nt, Homo Sapiens
caagaagccggggccaccauugggugcugcca

SEQ ID NO: 391434 - RNA, 32 nt, Homo Sapiens
acucaggggcucuggaggggucagcuggagcc

SEQ ID NO: 391435 - RNA, 32 nt, Homo Sapiens
gaccaaaacuaaacugaaauuuaaaauguucu

SEQ ID NO: 391436 - RNA, 32 nt, Homo Sapiens
ggcacccaacacccucccucuuucugggguuu

SEQ ID NO: 391437 - RNA, 32 nt, Homo Sapiens
uuuggggaugacauuuucaccgugacauuuuu

SEQ ID NO: 391438 - RNA, 32 nt, Homo Sapiens
gccagcaaguuugagaccugcccgcccuccuc

SEQ ID NO: 391439 - RNA, 32 nt, Homo Sapiens
uugaucugggcaagaggaccccugcccugaau

SEQ ID NO: 391440 - RNA, 32 nt, Homo Sapiens
caccucucucagcaguuaaucccuuuaucuau

SEQ ID NO: 391441 - RNA, 32 nt, Homo Sapiens
guagaaaaugagaauacuaaaaaugugaaguu

SEQ ID NO: 391442 - RNA, 30 nt, Homo Sapiens
augcacccagcuggcaugcaauacaaggcu

SEQ ID NO: 391443 - RNA, 32 nt, Homo Sapiens
ggccagugugugcgcgcaccgugcgcgagccg

SEQ ID NO: 391444 - RNA, 32 nt, Homo Sapiens
gagcacgggcaccgaagcugggacagcaggcu

SEQ ID NO: 391445 - RNA, 32 nt, Homo Sapiens
gggagggagagagcuuccugguggaggacgca

SEQ ID NO: 391446 - RNA, 32 nt, Homo Sapiens
gaaagaaaauuccuuuugaagcuauuaaacca

SEQ ID NO: 391447 - RNA, 32 nt, Homo Sapiens
ccccagcacuagguacggggcccaacacgugg

SEQ ID NO: 391448 - RNA, 32 nt, Homo Sapiens
aaauaaaaccaucagcauccugcuggauugau

SEQ ID NO: 391449 - RNA, 32 nt, Homo Sapiens
cucccaggagcucuuagugaccaagugaaggu

SEQ ID NO: 391450 - RNA, 32 nt, Homo Sapiens
cgcucuuuaucucuccuucuguacacuucuua

SEQ ID NO: 391451 - RNA, 32 nt, Homo Sapiens
aggcucuucuucugccccgucuccccucaaag

SEQ ID NO: 391452 - RNA, 32 nt, Homo Sapiens
cagcauuuucuuucguucucaggcuaaauagu

SEQ ID NO: 391453 - RNA, 32 nt, Homo Sapiens
accuuugagcguuucuucugguaaaaauguga

SEQ ID NO: 391454 - RNA, 32 nt, Homo Sapiens
uuuuuucuaaaugucauuaaauuuauuuguac

SEQ ID NO: 391455 - RNA, 32 nt, Homo Sapiens
uuauauuuauacauagagaggauuuucuaaua

SEQ ID NO: 391456 - RNA, 32 nt, Homo Sapiens
ccuggaaucuuuucacauccacuaugaacacc

SEQ ID NO: 391457 - RNA, 32 nt, Homo Sapiens
agacaguuaauuuuuuuaaaucuugagaaauu

SEQ ID NO: 391458 - RNA, 32 nt, Homo Sapiens
auggcacucuguuguauuuucuuacugaaguu

SEQ ID NO: 391459 - RNA, 32 nt, Homo Sapiens
gggaauugguaguucaaguauaaguuaauuaa

SEQ ID NO: 391460 - RNA, 32 nt, Homo Sapiens
cacaaggacuugcacaaagaaaacauucaaua

SEQ ID NO: 391461 - RNA, 32 nt, Homo Sapiens
acacuugcuucuuugcagauuuugcauugacu

SEQ ID NO: 391462 - RNA, 32 nt, Homo Sapiens
uauuaagcucuuucugcaguugauaucugggc

SEQ ID NO: 391463 - RNA, 32 nt, Homo Sapiens
uucccuuguuccuggggugucugcagcaaggg

SEQ ID NO: 391464 - RNA, 32 nt, Homo Sapiens
uugauggccgggagcuggcccugcgccaggag

SEQ ID NO: 391465 - RNA, 30 nt, Homo Sapiens
uggcugcagauguugggggaaaaaguacgu

SEQ ID NO: 391466 - RNA, 32 nt, Homo Sapiens
aggcgggcgcgggcggccggccaugaucgcgu

SEQ ID NO: 391467 - RNA, 27 nt, Homo Sapiens
gagucugcccgcagcccccuggccccu

SEQ ID NO: 391468 - RNA, 32 nt, Homo Sapiens
agcauggcaaauuuaaaaaauaacacaauuuc

SEQ ID NO: 391469 - RNA, 32 nt, Homo Sapiens
augacgugccaggcagcgugcuggccccugcg

SEQ ID NO: 391470 - RNA, 32 nt, Homo Sapiens
ucgccccugacuguccugcuggagugacaacc

SEQ ID NO: 391471 - RNA, 32 nt, Homo Sapiens
cagcucccaagcaucaugggccucgcagccgg

SEQ ID NO: 391472 - RNA, 32 nt, Homo Sapiens
ccaccuucugucuccuacgacuccaugagcag

SEQ ID NO: 391473 - RNA, 32 nt, Homo Sapiens
uguaguggcaugaucucggcuuauugcaaccu

SEQ ID NO: 391474 - RNA, 32 nt, Homo Sapiens
ugccaguuccucacugcggggaccagcaaagg

SEQ ID NO: 391475 - RNA, 32 nt, Homo Sapiens
gggcacaggagggagagcugcagaguguccug

SEQ ID NO: 391476 - RNA, 32 nt, Homo Sapiens
acucauucgacaaaucuuucugagguaagagc

SEQ ID NO: 391477 - RNA, 32 nt, Homo Sapiens
cguguucaguuccagccgggggccguaugacu

SEQ ID NO: 391478 - RNA, 32 nt, Homo Sapiens
acccugucccuccucagaguauuuuuugaagu

SEQ ID NO: 391479 - RNA, 32 nt, Homo Sapiens
aguggagggaagucuuccuuccugaaggaaaa

SEQ ID NO: 391480 - RNA, 32 nt, Homo Sapiens
ucgucucagaucugguugugcucgagcuaugc

SEQ ID NO: 391481 - RNA, 32 nt, Homo Sapiens
uuugggaagcagcaccugggaaugcugccucg

SEQ ID NO: 391482 - RNA, 32 nt, Homo Sapiens
uuugggaguuuaauuacuucaggggaagagaa

SEQ ID NO: 391483 - RNA, 32 nt, Homo Sapiens
cagcccaggcgcgggggcgacgacagguuaaa

SEQ ID NO: 391484 - RNA, 32 nt, Homo Sapiens
cuuuauuugcagcuauucuggaugucaguuua

SEQ ID NO: 391485 - RNA, 32 nt, Homo Sapiens
aagcacaauauaaaaaacaauuagagcaguua

SEQ ID NO: 391486 - RNA, 32 nt, Homo Sapiens
guguugugaacagagacuuguuuggauuaugc

SEQ ID NO: 391487 - RNA, 32 nt, Homo Sapiens
agcagcaggaggagaaagaacauggcgggcgc

SEQ ID NO: 391488 - RNA, 32 nt, Homo Sapiens
ccgacgaggcggagaaguacaaucugguccug

SEQ ID NO: 391489 - RNA, 32 nt, Homo Sapiens
cuuccaccacaguuugaagaaaacaggucuga

SEQ ID NO: 391490 - RNA, 32 nt, Homo Sapiens
guucugaggcagccuuugucuggcuggaacac

SEQ ID NO: 391491 - RNA, 32 nt, Homo Sapiens
uagacuauguauuauucuaacauguaggcuga

SEQ ID NO: 391492 - RNA, 28 nt, Homo Sapiens
gcuaugcagcggggccggcgggguccac

SEQ ID NO: 391493 - RNA, 32 nt, Homo Sapiens
gccaaacggugcaacagaaggguagguuagau

SEQ ID NO: 391494 - RNA, 32 nt, Homo Sapiens
ucucugcagccuuccccagcgugaaucagaac

SEQ ID NO: 391495 - RNA, 32 nt, Homo Sapiens
aaucacuguaaaacaucagagaauuaacuugg

SEQ ID NO: 391496 - RNA, 32 nt, Homo Sapiens
ucaggaagcacauuuauucagauucucaguaa

SEQ ID NO: 391497 - RNA, 32 nt, Homo Sapiens
cacucucugaaucccuccuauucaccuugcug

SEQ ID NO: 391498 - RNA, 32 nt, Homo Sapiens
cucugggccuuuccgccuccucaccacugugc

SEQ ID NO: 391499 - RNA, 32 nt, Homo Sapiens
uuccuggaaauauaccugauaauuaccaccug

SEQ ID NO: 391500 - RNA, 32 nt, Homo Sapiens
gcaggcagaggcccagagccccugccagugcu

SEQ ID NO: 391501 - RNA, 32 nt, Homo Sapiens
uggcugacauaguggauugagccaaggcugug

SEQ ID NO: 391502 - RNA, 32 nt, Homo Sapiens
ggggcggggacugggggugcuauuuaggggaa

SEQ ID NO: 391503 - RNA, 32 nt, Homo Sapiens
augcauaauguuucauuaauuuuuugcugaca

SEQ ID NO: 391504 - RNA, 32 nt, Homo Sapiens
agaagaagcucuuccugaacugucucaaaagu

SEQ ID NO: 391505 - RNA, 32 nt, Homo Sapiens
cgcggggcgcagccuucucgucccggccucug

SEQ ID NO: 391506 - RNA, 32 nt, Homo Sapiens
cucagaaaaaagacaggaagauguggggaaga

SEQ ID NO: 391507 - RNA, 32 nt, Homo Sapiens
caggggccggcacgcacuggcaccuggcccca

SEQ ID NO: 391508 - RNA, 32 nt, Homo Sapiens
ugucuguaaucccagcacuuuugagaggccaa

SEQ ID NO: 391509 - RNA, 32 nt, Homo Sapiens
uggccggcgggcccggcugacugcgccucugc

SEQ ID NO: 391510 - RNA, 32 nt, Homo Sapiens
gggccguggaggugggggcgguggugcuggac

SEQ ID NO: 391511 - RNA, 32 nt, Homo Sapiens
acaaucgcaauuuuuucuuauuuuuuauaaau

SEQ ID NO: 391512 - RNA, 32 nt, Homo Sapiens
gcccacagagaggagacacuucuccaaggcug

SEQ ID NO: 391513 - RNA, 32 nt, Homo Sapiens
aggagggaaaacggaggcuccaggucuacaca

SEQ ID NO: 391514 - RNA, 32 nt, Homo Sapiens
cugcuguuuugauuaauuauguuuccuuuaau

SEQ ID NO: 391515 - RNA, 32 nt, Homo Sapiens
cacccacccgaucccggccgcacccugcucug

SEQ ID NO: 391516 - RNA, 32 nt, Homo Sapiens
agcaguacagagcaugagacccugcauaaaga

SEQ ID NO: 391517 - RNA, 32 nt, Homo Sapiens
gggggagaugacauacaaaaagggcaggaccu

SEQ ID NO: 391518 - RNA, 32 nt, Homo Sapiens
gaggaagcaaggaaagugccugguaggacuga

SEQ ID NO: 391519 - RNA, 32 nt, Homo Sapiens
ucccauccuucccaccccggcuaggugucguc

SEQ ID NO: 391520 - RNA, 32 nt, Homo Sapiens
ucgcgauggacccaggcauccuggaccuuggc

SEQ ID NO: 391521 - RNA, 32 nt, Homo Sapiens
aauaugucagaaguuucuuuuuacauucauau

SEQ ID NO: 391522 - RNA, 32 nt, Homo Sapiens
cggcuggagcggagcgcaccgcggcgguggug

SEQ ID NO: 391523 - RNA, 32 nt, Homo Sapiens
ggugccgugaagggcagaugggcuugugggcc

SEQ ID NO: 391524 - RNA, 32 nt, Homo Sapiens
ucucggguucaagugacucuucugccucagcc

SEQ ID NO: 391525 - RNA, 32 nt, Homo Sapiens
gacagcaagccgugggagggagcccgcucagg

SEQ ID NO: 391526 - RNA, 32 nt, Homo Sapiens
agucgaggagucaaggcagcaaugaaucgugu

SEQ ID NO: 391527 - RNA, 32 nt, Homo Sapiens
aauuacaugauuaugauacuaaucuuuuaagu

SEQ ID NO: 391528 - RNA, 32 nt, Homo Sapiens
gacuguggguggccacaugcagucguggagga

SEQ ID NO: 391529 - RNA, 32 nt, Homo Sapiens
ggguagaugucagaaaugggaauagaaggagu

SEQ ID NO: 391530 - RNA, 32 nt, Homo Sapiens
guagggcaaggccagcaggauccuagagugag

SEQ ID NO: 391531 - RNA, 32 nt, Homo Sapiens
aaccaucaaccaccaggcagccaggccaucag

SEQ ID NO: 391532 - RNA, 32 nt, Homo Sapiens
cagcucagggcacaggcaggcugggguccucg

SEQ ID NO: 391533 - RNA, 32 nt, Homo Sapiens
aaaauguaagauuauagauucuaaagauucua

SEQ ID NO: 391534 - RNA, 32 nt, Homo Sapiens
gguggacugugauuuuuccaguauuaaauaug

SEQ ID NO: 391535 - RNA, 32 nt, Homo Sapiens
cugcaagggccagaguuccacaaaucuauauu

SEQ ID NO: 391536 - RNA, 32 nt, Homo Sapiens
gaaacuuccucuuuaggguaaccaucauguau

SEQ ID NO: 391537 - RNA, 27 nt, Homo Sapiens
agcacacauaguuucugguauauuugu

SEQ ID NO: 391538 - RNA, 32 nt, Homo Sapiens
uggaggagaagcugcguggcggccugaaugag

SEQ ID NO: 391539 - RNA, 32 nt, Homo Sapiens
ggauuucaggagaggcuggcuccuccccaagg

SEQ ID NO: 391540 - RNA, 32 nt, Homo Sapiens
auucugaguuucacaagaauguaccugggugc

SEQ ID NO: 391541 - RNA, 32 nt, Homo Sapiens
cgcgcggucccggcccagccggcucuccuggc

SEQ ID NO: 391542 - RNA, 32 nt, Homo Sapiens
aaaaccaggaccaguuguuaaauuuccaccag

SEQ ID NO: 391543 - RNA, 32 nt, Homo Sapiens
agcacucccuggccggcgccggacccucgggg

SEQ ID NO: 391544 - RNA, 32 nt, Homo Sapiens
uccguguucaaaaaauacaaaaauuagcuagg

SEQ ID NO: 391545 - RNA, 32 nt, Homo Sapiens
uauucuggucagaaaaccuguguguuuccuac

SEQ ID NO: 391546 - RNA, 29 nt, Homo Sapiens
uggguugcgggacagaguagccagguucu

SEQ ID NO: 391547 - RNA, 32 nt, Homo Sapiens
uuauacuuaauaaaacaaaacauaccuguaua

SEQ ID NO: 391548 - RNA, 32 nt, Homo Sapiens
gccagugaaaauagacuguagguccucagagc

SEQ ID NO: 391549 - RNA, 32 nt, Homo Sapiens
ggccaguguugcaggcugaagugggggauguc

SEQ ID NO: 391550 - RNA, 32 nt, Homo Sapiens
auuacugucugcugcuggcucugcccuguggc

SEQ ID NO: 391551 - RNA, 32 nt, Homo Sapiens
cagcccccugcagcugauggagcugugucacc

SEQ ID NO: 391552 - RNA, 31 nt, Homo Sapiens
agcugacccucaguuccucaaacacagaccc

SEQ ID NO: 391553 - RNA, 32 nt, Homo Sapiens
acugggaaacagagaaguugugacuugaacau

SEQ ID NO: 391554 - RNA, 32 nt, Homo Sapiens
cauugaggaaaugaagacuggauacuucugua

SEQ ID NO: 391555 - RNA, 32 nt, Homo Sapiens
agaaucuguccgucuguaaggcguagaaugag

SEQ ID NO: 391556 - RNA, 32 nt, Homo Sapiens
uuguuuuacaacuguguuuucauuuuuucaaa

SEQ ID NO: 391557 - RNA, 32 nt, Homo Sapiens
aguuuccuucuugguuaugcagaaacaguaga

SEQ ID NO: 391558 - RNA, 32 nt, Homo Sapiens
guucuuuuuuaaauucuuucucucuuucaugu

SEQ ID NO: 391559 - RNA, 32 nt, Homo Sapiens
aggagggaaaagagacccgaugccuuaauggg

SEQ ID NO: 391560 - RNA, 32 nt, Homo Sapiens
ccaaaaacuuggagugaaggaugaugcuauuu

SEQ ID NO: 391561 - RNA, 32 nt, Homo Sapiens
aaugucccuuucuucucccccauccuacgagu

SEQ ID NO: 391562 - RNA, 32 nt, Homo Sapiens
gaccccaggccgcgcucugugggccucugagg

SEQ ID NO: 391563 - RNA, 32 nt, Homo Sapiens
aaaacggaugcggcccggcccgcagagcucag

SEQ ID NO: 391564 - RNA, 32 nt, Homo Sapiens
guugcacuagaaaacuaagugguucauauuuc

SEQ ID NO: 391565 - RNA, 32 nt, Homo Sapiens
ggcauagagggagaggaagcacacugcagggc

SEQ ID NO: 391566 - RNA, 32 nt, Homo Sapiens
caauugugcagacaagguagaguguguggucc

SEQ ID NO: 391567 - RNA, 32 nt, Homo Sapiens
cgaaggacgagccaugggguuuugaaagcagg

SEQ ID NO: 391568 - RNA, 32 nt, Homo Sapiens
acucacugcaacuucugccacccagguucaag

SEQ ID NO: 391569 - RNA, 32 nt, Homo Sapiens
aagggcgcggcacguagggggcccguaggauc

SEQ ID NO: 391570 - RNA, 32 nt, Homo Sapiens
aaaggcagcccauuuuaccauugccagccagg

SEQ ID NO: 391571 - RNA, 32 nt, Homo Sapiens
acuuaaucaggauuaaauuuucuaugaauaau

SEQ ID NO: 391572 - RNA, 32 nt, Homo Sapiens
acuuucaaaaauaagcuagaauauauuaaaga

SEQ ID NO: 391573 - RNA, 32 nt, Homo Sapiens
uucuggaagggagaguggauuuggcugggccu

SEQ ID NO: 391574 - RNA, 32 nt, Homo Sapiens
augcagguguaugugucuuuuucacauaauga

SEQ ID NO: 391575 - RNA, 32 nt, Homo Sapiens
agucccugucuccugccacaguuuacaccggu

SEQ ID NO: 391576 - RNA, 31 nt, Homo Sapiens
accggcacugaagggcugccccgcccccgcc

SEQ ID NO: 391577 - RNA, 32 nt, Homo Sapiens
auucaagguaguggccaaauguaacacaucaa

SEQ ID NO: 391578 - RNA, 32 nt, Homo Sapiens
auuuauaccuuucagguacugaagauuuaaua

SEQ ID NO: 391579 - RNA, 32 nt, Homo Sapiens
cuaaaauguggggcaguggggggugggguuua

SEQ ID NO: 391580 - RNA, 32 nt, Homo Sapiens
gucugcugucuacgugguggguuguggggaug

SEQ ID NO: 391581 - RNA, 32 nt, Homo Sapiens
cuucuuuuccaaaaauacuucugcaacucaug

SEQ ID NO: 391582 - RNA, 31 nt, Homo Sapiens
gcggcucggguuugccugccccgaccccccg

SEQ ID NO: 391583 - RNA, 32 nt, Homo Sapiens
gcguggagcugccgccgccgccggggagaagg

SEQ ID NO: 391584 - RNA, 32 nt, Homo Sapiens
ucaacagagcucuggagaaacagaugaauuca

SEQ ID NO: 391585 - RNA, 32 nt, Homo Sapiens
uaauuguucacagauuuuaaaagcgguagcac

SEQ ID NO: 391586 - RNA, 32 nt, Homo Sapiens
agucaaggauuuauuucuuuuggaagcccagu

SEQ ID NO: 391587 - RNA, 32 nt, Homo Sapiens
ucgaagcccucccgccuccugcccacaauggc

SEQ ID NO: 391588 - RNA, 32 nt, Homo Sapiens
ccgacgccugcgcaauguaugcggagagccac

SEQ ID NO: 391589 - RNA, 32 nt, Homo Sapiens
auccuggugaauucuguguccuuugggggcug

SEQ ID NO: 391590 - RNA, 31 nt, Homo Sapiens
gacacccagccccaggagccagaccacuccu

SEQ ID NO: 391591 - RNA, 32 nt, Homo Sapiens
uaauauaaaaauuagcuaggugcagugguuca

SEQ ID NO: 391592 - RNA, 32 nt, Homo Sapiens
ucauauucaucaaugcugauaauuguccaaag

SEQ ID NO: 391593 - RNA, 32 nt, Homo Sapiens
uuuaaucugucuuuuuacauuagcuuuuguuu

SEQ ID NO: 391594 - RNA, 32 nt, Homo Sapiens
uggcuggaccucuguuggcugagaagagcauc

SEQ ID NO: 391595 - RNA, 32 nt, Homo Sapiens
aguuuuuaaagaauacgggucuguggugauaa

SEQ ID NO: 391596 - RNA, 32 nt, Homo Sapiens
ccagcgcgugcccuuccacuccgccccgaggu

SEQ ID NO: 391597 - RNA, 32 nt, Homo Sapiens
gcuacuucgagggcuuccuggagggcgugggc

SEQ ID NO: 391598 - RNA, 32 nt, Homo Sapiens
aaugugcacugccgaggagaaugccagccagg

SEQ ID NO: 391599 - RNA, 31 nt, Homo Sapiens
gucgucgcgcugagaaaguuuucugccuccu

SEQ ID NO: 391600 - RNA, 32 nt, Homo Sapiens
aacacuaccucuuuugagacuuugcccagggu

SEQ ID NO: 391601 - RNA, 32 nt, Homo Sapiens
cccccuggguuugggggugcugcccuacuggg

SEQ ID NO: 391602 - RNA, 32 nt, Homo Sapiens
uucuguaaauauguauuuuucauaauguuuaa

SEQ ID NO: 391603 - RNA, 32 nt, Homo Sapiens
agacgagccagguggccccggccuagaccugc

SEQ ID NO: 391604 - RNA, 32 nt, Homo Sapiens
gaggaagaaggggacacuuguacaauaugucu

SEQ ID NO: 391605 - RNA, 32 nt, Homo Sapiens
agacaguucaacagaaugagauuccuuuucau

SEQ ID NO: 391606 - RNA, 32 nt, Homo Sapiens
ccuuuggccuuaggugaguccuuugcaucucu

SEQ ID NO: 391607 - RNA, 32 nt, Homo Sapiens
uuguuuguucuguuuucaggcuuugucauugc

SEQ ID NO: 391608 - RNA, 32 nt, Homo Sapiens
caccacgcagagaggggaggugggaggacagu

SEQ ID NO: 391609 - RNA, 32 nt, Homo Sapiens
gcaucaaauggcaacauggaauauuguccucc

SEQ ID NO: 391610 - RNA, 32 nt, Homo Sapiens
ugaagaagacaaaguauaaccagucacaccaa

SEQ ID NO: 391611 - RNA, 32 nt, Homo Sapiens
cucagaaagguggggcccgaaccaugagcucc

SEQ ID NO: 391612 - RNA, 32 nt, Homo Sapiens
acuuuauguacaacugaaguuuuguuuuaguu

SEQ ID NO: 391613 - RNA, 32 nt, Homo Sapiens
gggggaagccccacgacccagacagcaggugg

SEQ ID NO: 391614 - RNA, 32 nt, Homo Sapiens
ggggagggcgacccugcaggggcccaggagca

SEQ ID NO: 391615 - RNA, 32 nt, Homo Sapiens
augaucuagagcagcauggagcuguugguaga

SEQ ID NO: 391616 - RNA, 32 nt, Homo Sapiens
aaauguugauguuuaagggcuguugauugcug

SEQ ID NO: 391617 - RNA, 32 nt, Homo Sapiens
aggcuugccucaaguuccaugcuugagcaaua

SEQ ID NO: 391618 - RNA, 32 nt, Homo Sapiens
gcuccgcagggcugcuggcguugcugcuguug

SEQ ID NO: 391619 - RNA, 32 nt, Homo Sapiens
cggccgaccccgccacgaugcugcugaagaag

SEQ ID NO: 391620 - RNA, 32 nt, Homo Sapiens
uuuugugugagacuuaaaacauggugccuaua

SEQ ID NO: 391621 - RNA, 32 nt, Homo Sapiens
cugccuugccuugcccucugccuuuggagacc

SEQ ID NO: 391622 - RNA, 32 nt, Homo Sapiens
aagaggaaagaguauuaagagcaauucaaaaa

SEQ ID NO: 391623 - RNA, 32 nt, Homo Sapiens
gugacagagugagacuccguguaaaaaaaaaa

SEQ ID NO: 391624 - RNA, 32 nt, Homo Sapiens
uauccuaguguuccuauagugaaauaaguagg

SEQ ID NO: 391625 - RNA, 32 nt, Homo Sapiens
acaaaauuaugccaugcuggggcuugagcuug

SEQ ID NO: 391626 - RNA, 32 nt, Homo Sapiens
auggacaguggggccuucuucuuaauacuucu

SEQ ID NO: 391627 - RNA, 32 nt, Homo Sapiens
acuggacuauagcagggcugggcucugucuuc

SEQ ID NO: 391628 - RNA, 32 nt, Homo Sapiens
aaguucugcaucuuuuauuucuuaauuaucuu

SEQ ID NO: 391629 - RNA, 32 nt, Homo Sapiens
ccagacuuggggugggggcccugccagcucca

SEQ ID NO: 391630 - RNA, 32 nt, Homo Sapiens
aaguaucccccgagagcagaauaguacuccac

SEQ ID NO: 391631 - RNA, 32 nt, Homo Sapiens
gagaagcugccugacuccauggcaccuccugu

SEQ ID NO: 391632 - RNA, 32 nt, Homo Sapiens
uuuaagauuguuaacccuguuuuucagaaggg

SEQ ID NO: 391633 - RNA, 32 nt, Homo Sapiens
ucuggcugcugaaaccacuuugggccaggaag

SEQ ID NO: 391634 - RNA, 29 nt, Homo Sapiens
agauuaaaaugaggauauuuucuccuaga

SEQ ID NO: 391635 - RNA, 32 nt, Homo Sapiens
gcuggguucauggaugucaucagcauugacaa

SEQ ID NO: 391636 - RNA, 32 nt, Homo Sapiens
gcaagcaaaggaaccccacgaugaacuugcuc

SEQ ID NO: 391637 - RNA, 32 nt, Homo Sapiens
agccugggugacagcgagauccugucucaaaa

SEQ ID NO: 391638 - RNA, 32 nt, Homo Sapiens
cagugggcacaauuuuacugcugcugacuguc

SEQ ID NO: 391639 - RNA, 32 nt, Homo Sapiens
gcagccaacuguaaaugucuauuuugaaauuc

SEQ ID NO: 391640 - RNA, 32 nt, Homo Sapiens
ccgggcggggggcugaccccccugccucccuc

SEQ ID NO: 391641 - RNA, 30 nt, Homo Sapiens
uguccuuauuccacugacaagaguuguucu

SEQ ID NO: 391642 - RNA, 28 nt, Homo Sapiens
ugagcaacaacaggaccagcgauggcuc

SEQ ID NO: 391643 - RNA, 32 nt, Homo Sapiens
cuggaaggcagacaaaaaugagagccugaagc

SEQ ID NO: 391644 - RNA, 29 nt, Homo Sapiens
uagucauguuuuauguaccauguuuucac

SEQ ID NO: 391645 - RNA, 32 nt, Homo Sapiens
gggggucuuuuuagauuuuaaucccuacuuuc

SEQ ID NO: 391646 - RNA, 31 nt, Homo Sapiens
gcucugcagcgcaacgccugaggcagugggc

SEQ ID NO: 391647 - RNA, 32 nt, Homo Sapiens
auauauauauauauuuggaggucaguaauuuc

SEQ ID NO: 391648 - RNA, 32 nt, Homo Sapiens
acgagcccgccgccucuucgccgcccgccgcc

SEQ ID NO: 391649 - RNA, 32 nt, Homo Sapiens
aggucgucacacucagaaggacaggcuugucu

SEQ ID NO: 391650 - RNA, 32 nt, Homo Sapiens
aguucgaggucuuccagccgggugacuaccuc

SEQ ID NO: 391651 - RNA, 32 nt, Homo Sapiens
uuuuauuuugcugcacacaaucuagcaggaau

SEQ ID NO: 391652 - RNA, 32 nt, Homo Sapiens
augacauggaagaucugggggaggaaguucaa

SEQ ID NO: 391653 - RNA, 32 nt, Homo Sapiens
ggagcugggcgcaugcgccgcguaaggggccc

SEQ ID NO: 391654 - RNA, 32 nt, Homo Sapiens
ccgcggcggcccggaggcgccgggugggccgu

SEQ ID NO: 391655 - RNA, 32 nt, Homo Sapiens
uaauggacacuacaauaaguauauggaaagug

SEQ ID NO: 391656 - RNA, 32 nt, Homo Sapiens
gauguggcauuuucgucaucugaagcaugagu

SEQ ID NO: 391657 - RNA, 32 nt, Homo Sapiens
ugauuugaguagacagcaaugaucuuuacaua

SEQ ID NO: 391658 - RNA, 32 nt, Homo Sapiens
ccagccccuggccccaggaccuggcugccaua

SEQ ID NO: 391659 - RNA, 32 nt, Homo Sapiens
agcagaguucccuauuccccuggcauaaagaa

SEQ ID NO: 391660 - RNA, 32 nt, Homo Sapiens
uagcaauacuucauugaauauuagaaaauuuu

SEQ ID NO: 391661 - RNA, 32 nt, Homo Sapiens
auuuuaaaaauauuuuuagaacuccaauacuc

SEQ ID NO: 391662 - RNA, 32 nt, Homo Sapiens
agagaagaugaaaaacaaaagcaagggagaag

SEQ ID NO: 391663 - RNA, 32 nt, Homo Sapiens
ucccacaaaagcuaggcugguucugauucuua

SEQ ID NO: 391664 - RNA, 32 nt, Homo Sapiens
ccauugguccauugcucuguaccuccaacccc

SEQ ID NO: 391665 - RNA, 32 nt, Homo Sapiens
gggccucucgggcggcagcaauggagccgcga

SEQ ID NO: 391666 - RNA, 32 nt, Homo Sapiens
gaauccuucuauuauaugaagcucaauguuuu

SEQ ID NO: 391667 - RNA, 31 nt, Homo Sapiens
gcauacuguugaaguugagugcuguuuugcu

SEQ ID NO: 391668 - RNA, 32 nt, Homo Sapiens
gaggccugggucggcucgggccgcaccgcgcg

SEQ ID NO: 391669 - RNA, 32 nt, Homo Sapiens
cauccaggguaugguguaaauaaaccuguguu

SEQ ID NO: 391670 - RNA, 32 nt, Homo Sapiens
ccuuuggacgucacggccuccucguugguaga

SEQ ID NO: 391671 - RNA, 32 nt, Homo Sapiens
gaaucucuauaguuaccauuuacaauuuuaua

SEQ ID NO: 391672 - RNA, 32 nt, Homo Sapiens
uucaaaauauauauuuuuuuccauuuaaaacu

SEQ ID NO: 391673 - RNA, 32 nt, Homo Sapiens
aagccggugggaaguuuggaugggaaggagau

SEQ ID NO: 391674 - RNA, 32 nt, Homo Sapiens
ccuuccuccugcagacacuuggacugagccaa

SEQ ID NO: 391675 - RNA, 32 nt, Homo Sapiens
uggccgaagucuuuuuuaccuccugggggcag

SEQ ID NO: 391676 - RNA, 32 nt, Homo Sapiens
uacaauuuuaauuuauacaaguauuggccccu

SEQ ID NO: 391677 - RNA, 32 nt, Homo Sapiens
gguaccgccccgagccuugauuuagacacggc

SEQ ID NO: 391678 - RNA, 32 nt, Homo Sapiens
aaggacugguaguuuacugauguagaugugaa

SEQ ID NO: 391679 - RNA, 32 nt, Homo Sapiens
auguucuuuccacuucauguuacugccaccaa

SEQ ID NO: 391680 - RNA, 32 nt, Homo Sapiens
cauuagcugaagauccccuugauuucauccag

SEQ ID NO: 391681 - RNA, 32 nt, Homo Sapiens
auggcaaguucagaaguuggaacuugucucag

SEQ ID NO: 391682 - RNA, 32 nt, Homo Sapiens
cuacugcagagauucugagcuaccucagcuuu

SEQ ID NO: 391683 - RNA, 32 nt, Homo Sapiens
gucgccgccgccgccugccgggacuggagcgc

SEQ ID NO: 391684 - RNA, 32 nt, Homo Sapiens
uuaagugauuauauuucuuccacuguuuuuga

SEQ ID NO: 391685 - RNA, 32 nt, Homo Sapiens
auccuaagcauuuuaauaaaaaguuaaaacaa

SEQ ID NO: 391686 - RNA, 32 nt, Homo Sapiens
aggacaccagggugggggugaaggagacacua

SEQ ID NO: 391687 - RNA, 32 nt, Homo Sapiens
gagauugaaauuacuguuuuuaucauauuuaa

SEQ ID NO: 391688 - RNA, 32 nt, Homo Sapiens
uggaagauugguuaaggaaaagcaccccccau

SEQ ID NO: 391689 - RNA, 32 nt, Homo Sapiens
cucccccggcccggugugcagcaggagcgacc

SEQ ID NO: 391690 - RNA, 32 nt, Homo Sapiens
uagagauacaagcagcuucuaccuucaaauua

SEQ ID NO: 391691 - RNA, 32 nt, Homo Sapiens
uucuccccucauuuccucuucuccuuacuaag

SEQ ID NO: 391692 - RNA, 32 nt, Homo Sapiens
uguauauauauuccgggcaauauaugagugca

SEQ ID NO: 391693 - RNA, 32 nt, Homo Sapiens
ggcgcuuucagcugucucucgcagcagcucag

SEQ ID NO: 391694 - RNA, 32 nt, Homo Sapiens
gguugcuagagcuccuuguagaauauuuccga

SEQ ID NO: 391695 - RNA, 32 nt, Homo Sapiens
auucaaagaacucagucugauaaucugccucc

SEQ ID NO: 391696 - RNA, 32 nt, Homo Sapiens
ccagaaaguguucaagccuguuguguucccaa

SEQ ID NO: 391697 - RNA, 32 nt, Homo Sapiens
uugauuugcauauccaauaucuccucgaaacc

SEQ ID NO: 391698 - RNA, 31 nt, Homo Sapiens
gcaccccuggaacugaaccagggauagacgg

SEQ ID NO: 391699 - RNA, 32 nt, Homo Sapiens
cccgggccgcgcgggggccggaggguuccaag

SEQ ID NO: 391700 - RNA, 32 nt, Homo Sapiens
ggcgagcauggggggcaagcagagcacggcgg

SEQ ID NO: 391701 - RNA, 32 nt, Homo Sapiens
ugaaggaaucaucucuacuucucugaggacaa

SEQ ID NO: 391702 - RNA, 32 nt, Homo Sapiens
agaggagacauucugcgcugcagaggcacucc

SEQ ID NO: 391703 - RNA, 32 nt, Homo Sapiens
uuaaagucuuaaugccaguucaguggcauuaa

SEQ ID NO: 391704 - RNA, 32 nt, Homo Sapiens
caucccuuuuucugcuaauucgagucauggcu

SEQ ID NO: 391705 - RNA, 32 nt, Homo Sapiens
cugccaguauauucuguaaaaccuucuauuug

SEQ ID NO: 391706 - RNA, 32 nt, Homo Sapiens
uggucaggagaugagcaaaggauugguaugug

SEQ ID NO: 391707 - RNA, 32 nt, Homo Sapiens
aaguuggaagacauuucaaacaacagguuguu

SEQ ID NO: 391708 - RNA, 32 nt, Homo Sapiens
ucuuacagugauuucaauugcaccaugacuuc

SEQ ID NO: 391709 - RNA, 32 nt, Homo Sapiens
ucuaaugggcagcugggggagaaccaugggaa

SEQ ID NO: 391710 - RNA, 32 nt, Homo Sapiens
ggaggauguggcaggggagggcugggagugag

SEQ ID NO: 391711 - RNA, 32 nt, Homo Sapiens
aaugaagccaguuccuuggauauauccacggg

SEQ ID NO: 391712 - RNA, 32 nt, Homo Sapiens
uuuuugucauuuugaagcauucaaaaauuuuu

SEQ ID NO: 391713 - RNA, 32 nt, Homo Sapiens
uugggucaggaugaggggcagaggaaacacuu

SEQ ID NO: 391714 - RNA, 32 nt, Homo Sapiens
uuuguacaaagacaggcaugaggagugccuau

SEQ ID NO: 391715 - RNA, 32 nt, Homo Sapiens
ccuuaaagcugcagaaaaggugucacacggcu

SEQ ID NO: 391716 - RNA, 32 nt, Homo Sapiens
gaagccugggaggacgguggcuugccggucug

SEQ ID NO: 391717 - RNA, 32 nt, Homo Sapiens
ccacccuccccuccccgcacaccaacugaaca

SEQ ID NO: 391718 - RNA, 32 nt, Homo Sapiens
ugcggaccggagcggcugaggacggggcagag

SEQ ID NO: 391719 - RNA, 32 nt, Homo Sapiens
cauacuauucucagaaggcuaacuugagaggu

SEQ ID NO: 391720 - RNA, 30 nt, Homo Sapiens
cagggaggcuaauuuggggaaacugccugg

SEQ ID NO: 391721 - RNA, 32 nt, Homo Sapiens
gcgccggagccgggagcuagcggccgccgcca

SEQ ID NO: 391722 - RNA, 31 nt, Homo Sapiens
guauggaaauaaaagaaaauuuauccgaaaa

SEQ ID NO: 391723 - RNA, 32 nt, Homo Sapiens
aguguuaagcggggcucucggaagccggugga

SEQ ID NO: 391724 - RNA, 32 nt, Homo Sapiens
cgagugcgguucucuuucccccacuggggggc

SEQ ID NO: 391725 - RNA, 32 nt, Homo Sapiens
gagcuuucacucagccaaguguuagagucagg

SEQ ID NO: 391726 - RNA, 32 nt, Homo Sapiens
cuuggauuagguggagaggcaguuggggggcc

SEQ ID NO: 391727 - RNA, 32 nt, Homo Sapiens
gcugggcagccgccaccaggccccacccuuca

SEQ ID NO: 391728 - RNA, 32 nt, Homo Sapiens
gauccuggggccugggugggcugggggacagc

SEQ ID NO: 391729 - RNA, 32 nt, Homo Sapiens
gacgggcucucacucugucacccaggcuggag

SEQ ID NO: 391730 - RNA, 32 nt, Homo Sapiens
agguggccauggugcccggcccugccucauag

SEQ ID NO: 391731 - RNA, 32 nt, Homo Sapiens
aagauuuuuggguccacauuuuccacucaaaa

SEQ ID NO: 391732 - RNA, 32 nt, Homo Sapiens
cucuaauauguaauaaagacgccaguuggugg

SEQ ID NO: 391733 - RNA, 32 nt, Homo Sapiens
uucgugucucggcacucacucccggccgcccg

SEQ ID NO: 391734 - RNA, 32 nt, Homo Sapiens
ucuagacggagggguuuuuguuuucuggguuu

SEQ ID NO: 391735 - RNA, 32 nt, Homo Sapiens
ggaagcuccagccccaggauggggcugcccug

SEQ ID NO: 391736 - RNA, 32 nt, Homo Sapiens
aauguguucuauuugcuuuauacauuuauauu

SEQ ID NO: 391737 - RNA, 32 nt, Homo Sapiens
aacagaggguucggaccccagaacuguccugu

SEQ ID NO: 391738 - RNA, 32 nt, Homo Sapiens
agguuacacucugggauccuggccaugagguu

SEQ ID NO: 391739 - RNA, 32 nt, Homo Sapiens
acuuaagcccuccccacccccauccuauuccu

SEQ ID NO: 391740 - RNA, 31 nt, Homo Sapiens
gguuauaguuugacuuuaagauaagaaauuu

SEQ ID NO: 391741 - RNA, 32 nt, Homo Sapiens
acgaaucaguugcuuuguguuuguuucuuugu

SEQ ID NO: 391742 - RNA, 32 nt, Homo Sapiens
gccgcccugacgugcccggcccugugguucug

SEQ ID NO: 391743 - RNA, 32 nt, Homo Sapiens
aaauauuuaagugaaggagaagucuaacgcug

SEQ ID NO: 391744 - RNA, 32 nt, Homo Sapiens
accaggugaugcuggggugaugcugaugcccu

SEQ ID NO: 391745 - RNA, 32 nt, Homo Sapiens
acagccgcuccgccucccggcccgcagauccc

SEQ ID NO: 391746 - RNA, 32 nt, Homo Sapiens
cugguacucccucucaggauccaagcuaagca

SEQ ID NO: 391747 - RNA, 32 nt, Homo Sapiens
uuguccaccuauuaauuguuuacaauauuugu

SEQ ID NO: 391748 - RNA, 32 nt, Homo Sapiens
ucccagccacccgcucccuuucuggggccaug

SEQ ID NO: 391749 - RNA, 32 nt, Homo Sapiens
cagauucagagguggggaaacugaguccacca

SEQ ID NO: 391750 - RNA, 32 nt, Homo Sapiens
aaguuugcgcugcgguucgugagcgcagggug

SEQ ID NO: 391751 - RNA, 32 nt, Homo Sapiens
gggcuuugccuuucccugcggaggaaggagaa

SEQ ID NO: 391752 - RNA, 32 nt, Homo Sapiens
ugacacaaaugugacaaauagauguuuucuua

SEQ ID NO: 391753 - RNA, 32 nt, Homo Sapiens
ccagagggagggguggggaggggauccugauc

SEQ ID NO: 391754 - RNA, 32 nt, Homo Sapiens
uccauggcagaaaaauauauuucauuuucuag

SEQ ID NO: 391755 - RNA, 32 nt, Homo Sapiens
uucauggcuuuuucuuuuuuugcauauuaaag

SEQ ID NO: 391756 - RNA, 32 nt, Homo Sapiens
ccagaaaacgggcaaugcugugagagccauug

SEQ ID NO: 391757 - RNA, 32 nt, Homo Sapiens
aguuuuuuugagcuaaugauagauagaaaugc

SEQ ID NO: 391758 - RNA, 32 nt, Homo Sapiens
aauaugcaccucaagauuuuaaggagauaaug

SEQ ID NO: 391759 - RNA, 32 nt, Homo Sapiens
aagaucucuaccauuuaauuaagaaagcaguu

SEQ ID NO: 391760 - RNA, 31 nt, Homo Sapiens
ccuaugacaaauuguuugguuggguuguuuu

SEQ ID NO: 391761 - RNA, 32 nt, Homo Sapiens
gcacggucaaccccaauuaccaauuuaguuga

SEQ ID NO: 391762 - RNA, 32 nt, Homo Sapiens
agacccugccagcauccuugagccaggaucuc

SEQ ID NO: 391763 - RNA, 32 nt, Homo Sapiens
accuagcaguuguuugcugguuuuaggaacag

SEQ ID NO: 391764 - RNA, 32 nt, Homo Sapiens
caguccgcccagcguucuuguuuaccaguuga

SEQ ID NO: 391765 - RNA, 32 nt, Homo Sapiens
uuagguacagucuggaucauggcauguagaaa

SEQ ID NO: 391766 - RNA, 32 nt, Homo Sapiens
cccuacaacaaggauggcggugacgggcgcag

SEQ ID NO: 391767 - RNA, 32 nt, Homo Sapiens
auuuacuaauauauuuuuguaaauaaauugua

SEQ ID NO: 391768 - RNA, 32 nt, Homo Sapiens
acgucauuauaccuaaaaucugcaucauaccu

SEQ ID NO: 391769 - RNA, 32 nt, Homo Sapiens
cccuaguuaugcuccuucucauaucacuaacu

SEQ ID NO: 391770 - RNA, 32 nt, Homo Sapiens
accagguccccggccagcugggccccucccag

SEQ ID NO: 391771 - RNA, 32 nt, Homo Sapiens
ggucgucaacuuuccucaaaucaaaaacaggc

SEQ ID NO: 391772 - RNA, 32 nt, Homo Sapiens
aacacaaugauaaugauaauuuauugcccccu

SEQ ID NO: 391773 - RNA, 32 nt, Homo Sapiens
uuucagguuaacaagaggcauuugugcacaca

SEQ ID NO: 391774 - RNA, 32 nt, Homo Sapiens
gugcugcgggacggaugguggcggcggggcgc

SEQ ID NO: 391775 - RNA, 32 nt, Homo Sapiens
ccaucugucuuggguuuaauucuguagauaug

SEQ ID NO: 391776 - RNA, 32 nt, Homo Sapiens
augaggaugaccagcucugguuuucuaggagc

SEQ ID NO: 391777 - RNA, 32 nt, Homo Sapiens
uaugguggagagggggguacccugcccaccuu

SEQ ID NO: 391778 - RNA, 32 nt, Homo Sapiens
ugguccccuuugcuccucccugggacuuuggg

SEQ ID NO: 391779 - RNA, 32 nt, Homo Sapiens
aauaucaggcgugccaacucuugcugaguuuu

SEQ ID NO: 391780 - RNA, 32 nt, Homo Sapiens
uccucuugucuuuuuuuuuuuauuuuuauuac

SEQ ID NO: 391781 - RNA, 32 nt, Homo Sapiens
ucuggguguuuucuuaaccagaucauugugaa

SEQ ID NO: 391782 - RNA, 32 nt, Homo Sapiens
gauuuuuaaaauuuauuucaguauacuuugcc

SEQ ID NO: 391783 - RNA, 32 nt, Homo Sapiens
gcauggaguaggaugcagucaaauuugccuua

SEQ ID NO: 391784 - RNA, 26 nt, Homo Sapiens
caugggcugggugggcgggcggcgcc

SEQ ID NO: 391785 - RNA, 32 nt, Homo Sapiens
cucccauuagguagaugagaaaacaggcucac

SEQ ID NO: 391786 - RNA, 31 nt, Homo Sapiens
acagggcaaguggugucgauggagucgaagc

SEQ ID NO: 391787 - RNA, 32 nt, Homo Sapiens
aaauauacuuaaaauauuuucuuuccuuaugu

SEQ ID NO: 391788 - RNA, 32 nt, Homo Sapiens
acugcgugauucggcccggugggggcgggcag

SEQ ID NO: 391789 - RNA, 32 nt, Homo Sapiens
aguggcugacagagcaggucugcaggccacca

SEQ ID NO: 391790 - RNA, 32 nt, Homo Sapiens
aagagauguuugucuaaggguuugagcccuag

SEQ ID NO: 391791 - RNA, 32 nt, Homo Sapiens
ugaaugcuugcaaagauguggagaagagggaa

SEQ ID NO: 391792 - RNA, 32 nt, Homo Sapiens
gucauuaaaggccaugcugaucuugcauaacu

SEQ ID NO: 391793 - RNA, 32 nt, Homo Sapiens
gaggaucaugcaaacuguggagaucacuaagc

SEQ ID NO: 391794 - RNA, 32 nt, Homo Sapiens
cauaaaugucacaaaaacuuuaaaagaagugc

SEQ ID NO: 391795 - RNA, 32 nt, Homo Sapiens
gucgaaagcguuucuuuuuauuugcuucuuuu

SEQ ID NO: 391796 - RNA, 32 nt, Homo Sapiens
aaaggaaaaaacaaaauaaggacuucaaucca

SEQ ID NO: 391797 - RNA, 32 nt, Homo Sapiens
aaauuuucuucuccugcaaggaucucggugga

SEQ ID NO: 391798 - RNA, 32 nt, Homo Sapiens
aaggcgggcuuuauuugugucuguuggacacc

SEQ ID NO: 391799 - RNA, 32 nt, Homo Sapiens
ggagcugccgacggacggagcgcccccgcccc

SEQ ID NO: 391800 - RNA, 32 nt, Homo Sapiens
ccuuaggguaggagucgcgccggcagcagcca

SEQ ID NO: 391801 - RNA, 32 nt, Homo Sapiens
ugcuccucagggcagcccggcgcggccaggua

SEQ ID NO: 391802 - RNA, 32 nt, Homo Sapiens
ucagaaaaccauccaacagcagcaggauaacu

SEQ ID NO: 391803 - RNA, 32 nt, Homo Sapiens
uuguuuuuaaguguugauagugaacgaaaaga

SEQ ID NO: 391804 - RNA, 32 nt, Homo Sapiens
ggugcccggggccuggccccaggccugaaugc

SEQ ID NO: 391805 - RNA, 32 nt, Homo Sapiens
gcacaaccucauccucccagugguuccucuug

SEQ ID NO: 391806 - RNA, 32 nt, Homo Sapiens
uuucaaaugauuaugauuaguuaugucuuuua

SEQ ID NO: 391807 - RNA, 32 nt, Homo Sapiens
cuccaguacuguaugcuugcuacuucaacccc

SEQ ID NO: 391808 - RNA, 32 nt, Homo Sapiens
uggaagcuccgaccgacaucacggagcagccu

SEQ ID NO: 391809 - RNA, 32 nt, Homo Sapiens
ccuccagccugggaucucacugcucugcacau

SEQ ID NO: 391810 - RNA, 32 nt, Homo Sapiens
cccucacagcuagguccaguuuaugcaaaagu

SEQ ID NO: 391811 - RNA, 32 nt, Homo Sapiens
ggucauggcggagcaacaaacccggcgcggac

SEQ ID NO: 391812 - RNA, 32 nt, Homo Sapiens
cauguaaaauguuuaauggugaaaguuggaaa

SEQ ID NO: 391813 - RNA, 32 nt, Homo Sapiens
acaaaugcaccugguucuuuuacuaaguguuc

SEQ ID NO: 391814 - RNA, 32 nt, Homo Sapiens
cagagcucagcggcggccuuucccucccuccg

SEQ ID NO: 391815 - RNA, 32 nt, Homo Sapiens
cuaauggccuuuauaggaccaaugcugauuuu

SEQ ID NO: 391816 - RNA, 32 nt, Homo Sapiens
accggucggaagggcgucgcgcggccucgggu

SEQ ID NO: 391817 - RNA, 32 nt, Homo Sapiens
uauauauacuggguauuaaaauuaaaagcaag

SEQ ID NO: 391818 - RNA, 32 nt, Homo Sapiens
gccccaggucccagcccuggcccuucccagac

SEQ ID NO: 391819 - RNA, 32 nt, Homo Sapiens
augggggcgggggcucuggagugguggggaag

SEQ ID NO: 391820 - RNA, 32 nt, Homo Sapiens
aauucuacagcuuucagagcagacagagaaga

SEQ ID NO: 391821 - RNA, 32 nt, Homo Sapiens
cucccaggcgggggcgccugcagcucagcuga

SEQ ID NO: 391822 - RNA, 32 nt, Homo Sapiens
auaggggcuaucaaauuaccuauauuggcauu

SEQ ID NO: 391823 - RNA, 32 nt, Homo Sapiens
ccugcucagacuccuccacgcucgcccugauc

SEQ ID NO: 391824 - RNA, 31 nt, Homo Sapiens
ucauuccuccggagaaagccggguugguuua

SEQ ID NO: 391825 - RNA, 32 nt, Homo Sapiens
cuauauacauaaaucaagacaagaaggugggc

SEQ ID NO: 391826 - RNA, 32 nt, Homo Sapiens
cgcaaaaauccaguuguacuuuucugccgaga

SEQ ID NO: 391827 - RNA, 32 nt, Homo Sapiens
uguggggucguacucccuccccucccgucccc

SEQ ID NO: 391828 - RNA, 32 nt, Homo Sapiens
acccuucuuuggcucaucuaccaugucaggca

SEQ ID NO: 391829 - RNA, 32 nt, Homo Sapiens
ggccugugggccgcaugcggcccaggauggcu

SEQ ID NO: 391830 - RNA, 32 nt, Homo Sapiens
cguaacucauuucuuccaaugaagaaacacca

SEQ ID NO: 391831 - RNA, 32 nt, Homo Sapiens
ccacuccucccccaucauguccuuccaaggag

SEQ ID NO: 391832 - RNA, 32 nt, Homo Sapiens
cuuccucugaugcugacaagguggggaacaau

SEQ ID NO: 391833 - RNA, 32 nt, Homo Sapiens
cgugaaggaccgcgcugcggugcggaggcagg

SEQ ID NO: 391834 - RNA, 32 nt, Homo Sapiens
aucacaaggugaugggauucauuugaagcacu

SEQ ID NO: 391835 - RNA, 32 nt, Homo Sapiens
gcuccugccagccccaacccccggccccggug

SEQ ID NO: 391836 - RNA, 32 nt, Homo Sapiens
gaauugauguuuaguuugcuuuagucauuuaa

SEQ ID NO: 391837 - RNA, 32 nt, Homo Sapiens
gacuagaaagagaaacugguauuugcuuuaac

SEQ ID NO: 391838 - RNA, 32 nt, Homo Sapiens
caucuugggcccggcgcgcagacccgcggagu

SEQ ID NO: 391839 - RNA, 32 nt, Homo Sapiens
aaagcuuucuucauuagucaagguguuuugau

SEQ ID NO: 391840 - RNA, 32 nt, Homo Sapiens
cagacuuugaugaaauggcaaguucuucccca

SEQ ID NO: 391841 - RNA, 32 nt, Homo Sapiens
cggacagcccccagccccaugaggacccucag

SEQ ID NO: 391842 - RNA, 32 nt, Homo Sapiens
aguugucaguuaucacuguagaugagcaacuc

SEQ ID NO: 391843 - RNA, 32 nt, Homo Sapiens
uacuauguauacauuuauugugguaaaauuua

SEQ ID NO: 391844 - RNA, 32 nt, Homo Sapiens
acgcccggccccacucccaccaucuuguaaga

SEQ ID NO: 391845 - RNA, 32 nt, Homo Sapiens
ugacauguaaaaagcauaucguuuauugaggu

SEQ ID NO: 391846 - RNA, 32 nt, Homo Sapiens
ugauauuuauggaaaaguacuuucaaguacaa

SEQ ID NO: 391847 - RNA, 32 nt, Homo Sapiens
gcgugcggucaccugcucuucccgcggcgggu

SEQ ID NO: 391848 - RNA, 32 nt, Homo Sapiens
gggagauauggccagggcuguacacucuacua

SEQ ID NO: 391849 - RNA, 32 nt, Homo Sapiens
gguagaguagacagcccccuccccuacucacc

SEQ ID NO: 391850 - RNA, 32 nt, Homo Sapiens
agcgcgccgggcgcugggcgcagcgagcgaga

SEQ ID NO: 391851 - RNA, 32 nt, Homo Sapiens
agguccccaagccaugucaggcaucuccacca

SEQ ID NO: 391852 - RNA, 32 nt, Homo Sapiens
uccagagcuguuauguaacacuguauauaaau

SEQ ID NO: 391853 - RNA, 32 nt, Homo Sapiens
uguuuucagaggcauucccagcccuucacuua

SEQ ID NO: 391854 - RNA, 32 nt, Homo Sapiens
uaacugaaucauauaucuuuuaucauguuauc

SEQ ID NO: 391855 - RNA, 32 nt, Homo Sapiens
aguuucgguggucaugcugagggccggcuccc

SEQ ID NO: 391856 - RNA, 32 nt, Homo Sapiens
gaaauguacaagcucaaauugaaaacauuugu

SEQ ID NO: 391857 - RNA, 32 nt, Homo Sapiens
ugugcuugcugcuguuuauagaucuucuccgg

SEQ ID NO: 391858 - RNA, 32 nt, Homo Sapiens
caaugcccccuugacuuucucaucucacauga

SEQ ID NO: 391859 - RNA, 32 nt, Homo Sapiens
ggggaugaucugggucccauucuggucuuaag

SEQ ID NO: 391860 - RNA, 32 nt, Homo Sapiens
auacauuucacagauaaacuguaacaggugaa

SEQ ID NO: 391861 - RNA, 32 nt, Homo Sapiens
guuguggugaagcuauaauaugcaaacuuacc

SEQ ID NO: 391862 - RNA, 32 nt, Homo Sapiens
gaacuuuagaaccagaugaucccgguuggaau

SEQ ID NO: 391863 - RNA, 32 nt, Homo Sapiens
ucucccgagcgcuggcugcgccgcccgagccg

SEQ ID NO: 391864 - RNA, 32 nt, Homo Sapiens
accagucucgccucuggccuucucuggccacu

SEQ ID NO: 391865 - RNA, 30 nt, Homo Sapiens
ggagcccucggucugccccguccggucucu

SEQ ID NO: 391866 - RNA, 32 nt, Homo Sapiens
ggcugaggcugcggcagaggcggcgaggcgcg

SEQ ID NO: 391867 - RNA, 32 nt, Homo Sapiens
cagacugcaccccaagcucccgacuccagguc

SEQ ID NO: 391868 - RNA, 32 nt, Homo Sapiens
gcucauguucuucaucuucucaaaucaucaga

SEQ ID NO: 391869 - RNA, 32 nt, Homo Sapiens
aaaucauaguaaaauauuaccuguuuucaugg

SEQ ID NO: 391870 - RNA, 32 nt, Homo Sapiens
ucuggcugcuuggggcagcugcaggacugagc

SEQ ID NO: 391871 - RNA, 32 nt, Homo Sapiens
caccauaaauuaauuuuaaagcaaaacauaug

SEQ ID NO: 391872 - RNA, 32 nt, Homo Sapiens
caccugccugcuugcuucucuggcugccuggu

SEQ ID NO: 391873 - RNA, 32 nt, Homo Sapiens
uuugcucccuccuagcugggagugacgggugg

SEQ ID NO: 391874 - RNA, 32 nt, Homo Sapiens
agagaggagcaauucagauauuaaauuggugg

SEQ ID NO: 391875 - RNA, 32 nt, Homo Sapiens
gaggguucaagccccaagcuuuggcagcuucc

SEQ ID NO: 391876 - RNA, 32 nt, Homo Sapiens
cuguuuuguaagucugcauuuuuguauaucgg

SEQ ID NO: 391877 - RNA, 32 nt, Homo Sapiens
guauaauaucaaaagcacuuuuucuggaaaca

SEQ ID NO: 391878 - RNA, 32 nt, Homo Sapiens
agggccgggguggggcgcuggcguuuccguug

SEQ ID NO: 391879 - RNA, 32 nt, Homo Sapiens
aaaggcaggccaaggacuuacacaucaaaagu

SEQ ID NO: 391880 - RNA, 32 nt, Homo Sapiens
ccacugccccacuucagaggguaagagccaaa

SEQ ID NO: 391881 - RNA, 32 nt, Homo Sapiens
aaaucuaucucccuagugcagugucuccaggc

SEQ ID NO: 391882 - RNA, 32 nt, Homo Sapiens
aaggagucacccggcgaugagccccggcaccc

SEQ ID NO: 391883 - RNA, 32 nt, Homo Sapiens
gccaggacaaaagaaguuaaagagcgcccaau

SEQ ID NO: 391884 - RNA, 32 nt, Homo Sapiens
gauuguuggccaugucuccccaacuccacaau

SEQ ID NO: 391885 - RNA, 32 nt, Homo Sapiens
ugagcuccugggcuaccaaguagcugggacuu

SEQ ID NO: 391886 - RNA, 32 nt, Homo Sapiens
gacgucuguacuuuuuauacuuagaacauuug

SEQ ID NO: 391887 - RNA, 32 nt, Homo Sapiens
gauguuuacauaauaagacuuucuuaugugac

SEQ ID NO: 391888 - RNA, 32 nt, Homo Sapiens
uuagaguauucgguacuggacaaaaagacugg

SEQ ID NO: 391889 - RNA, 32 nt, Homo Sapiens
uacaggaggagcuacagcugcugcaggaauag

SEQ ID NO: 391890 - RNA, 32 nt, Homo Sapiens
ccuuucaaaucccagugccgcucuguucucuu

SEQ ID NO: 391891 - RNA, 32 nt, Homo Sapiens
gguacaugaggaagaaacccggaaggggaaga

SEQ ID NO: 391892 - RNA, 32 nt, Homo Sapiens
cuuaaacccagcuguuuacacagcagcuacaa

SEQ ID NO: 391893 - RNA, 32 nt, Homo Sapiens
caacaaccguuucuggagagaaugggaggauu

SEQ ID NO: 391894 - RNA, 32 nt, Homo Sapiens
aaccaucacagcggaggugacacacaccgcau

SEQ ID NO: 391895 - RNA, 29 nt, Homo Sapiens
guuguucggggacagccaccgccuugagu

SEQ ID NO: 391896 - RNA, 32 nt, Homo Sapiens
cucaggaacccgcgccccggcuccucggcgau

SEQ ID NO: 391897 - RNA, 32 nt, Homo Sapiens
cgggugaacgcggcguuugccgcgcgguacaa

SEQ ID NO: 391898 - RNA, 32 nt, Homo Sapiens
gacagacgagaaaaaagaaaacagagucagag

SEQ ID NO: 391899 - RNA, 32 nt, Homo Sapiens
gcuccauauaauuauuguuuucagauuucaac

SEQ ID NO: 391900 - RNA, 32 nt, Homo Sapiens
cggcccgcaguagcugcagacuccgcccgcga

SEQ ID NO: 391901 - RNA, 32 nt, Homo Sapiens
gggggagagaauauucauaacuugugggcuuu

SEQ ID NO: 391902 - RNA, 32 nt, Homo Sapiens
caaugcuagauuuagacuauagcaaucuagca

SEQ ID NO: 391903 - RNA, 32 nt, Homo Sapiens
cagcauggggcacgcuaugccugucgaauuca

SEQ ID NO: 391904 - RNA, 32 nt, Homo Sapiens
uuugccaacuagaaagucuuuguuuucagcug

SEQ ID NO: 391905 - RNA, 32 nt, Homo Sapiens
cccuguuuucacauucaccauggcaucccaga

SEQ ID NO: 391906 - RNA, 32 nt, Homo Sapiens
ccucgccucuuccauccacgucuuccaaggcc

SEQ ID NO: 391907 - RNA, 32 nt, Homo Sapiens
ucucccaauuucuccuuuuagcuuacuuucua

SEQ ID NO: 391908 - RNA, 32 nt, Homo Sapiens
gaugaaaguucccccaucaguucccccaguac

SEQ ID NO: 391909 - RNA, 32 nt, Homo Sapiens
uguuuuuguagagauaggguccugcuacauug

SEQ ID NO: 391910 - RNA, 32 nt, Homo Sapiens
cgcggugaaccugggcggccaccccucugcca

SEQ ID NO: 391911 - RNA, 32 nt, Homo Sapiens
cgggagcagggccugcaugagaccccgacaga

SEQ ID NO: 391912 - RNA, 32 nt, Homo Sapiens
ugaaauaaaaauuauauuacgaaauuuccuuc

SEQ ID NO: 391913 - RNA, 32 nt, Homo Sapiens
uacaggcagacaccaucacgcccagcuaauuu

SEQ ID NO: 391914 - RNA, 32 nt, Homo Sapiens
cggccaaguauuuuuauauuucagaucauauc

SEQ ID NO: 391915 - RNA, 32 nt, Homo Sapiens
gggugggaaacuggcauacuguguguauagca

SEQ ID NO: 391916 - RNA, 32 nt, Homo Sapiens
uacuguggcguaugaggaccugucugaggacu

SEQ ID NO: 391917 - RNA, 32 nt, Homo Sapiens
uaggagcucaagggcuguuugaaacucaaaug

SEQ ID NO: 391918 - RNA, 32 nt, Homo Sapiens
cuuucuauuucccccaguucuuuaagcaguca

SEQ ID NO: 391919 - RNA, 32 nt, Homo Sapiens
cccugucgcggggcgcgccgccaccucaccgu

SEQ ID NO: 391920 - RNA, 32 nt, Homo Sapiens
gcugcuuccuuccuuccuuccacaccaccaac

SEQ ID NO: 391921 - RNA, 32 nt, Homo Sapiens
uccacaagccccaauuucacuuucucagagga

SEQ ID NO: 391922 - RNA, 32 nt, Homo Sapiens
gggcacaugcuucagcugauuggggccugugg

SEQ ID NO: 391923 - RNA, 32 nt, Homo Sapiens
ggcccuggcugagggcagcugcgcgggcuuau

SEQ ID NO: 391924 - RNA, 32 nt, Homo Sapiens
agaacggauggagggaagcagcuccuacgaag

SEQ ID NO: 391925 - RNA, 32 nt, Homo Sapiens
ucgaaaugccgaugaaguggaugcaauuuccu

SEQ ID NO: 391926 - RNA, 32 nt, Homo Sapiens
ccggccgugcacacuuucaucaucgucggaca

SEQ ID NO: 391927 - RNA, 32 nt, Homo Sapiens
aacugagagauuaaaggaacagcagcacuuag

SEQ ID NO: 391928 - RNA, 32 nt, Homo Sapiens
cuguucccacgcuuccucucucucgaggccac

SEQ ID NO: 391929 - RNA, 32 nt, Homo Sapiens
ugccgccugccaguuggcugaccccacuccca

SEQ ID NO: 391930 - RNA, 32 nt, Homo Sapiens
ucaagaggcagaugaggcucaguuggacucca

SEQ ID NO: 391931 - RNA, 32 nt, Homo Sapiens
cugacacggccugugccggccggcgcggaccu

SEQ ID NO: 391932 - RNA, 32 nt, Homo Sapiens
ggucucccggugcccgaaccgccgcuggggcc

SEQ ID NO: 391933 - RNA, 32 nt, Homo Sapiens
guuuuuacuuuuuguauaaugggguggggugg

SEQ ID NO: 391934 - RNA, 32 nt, Homo Sapiens
aaaguuuggaaugggagaaaaauucucaaagc

SEQ ID NO: 391935 - RNA, 32 nt, Homo Sapiens
ccuguuggaccuucgagccuagcugcucgcac

SEQ ID NO: 391936 - RNA, 32 nt, Homo Sapiens
ggaggaggaggagaccggcagcaacucugagg

SEQ ID NO: 391937 - RNA, 32 nt, Homo Sapiens
gcugccaguaggggcgggaggaaaggcggagg

SEQ ID NO: 391938 - RNA, 32 nt, Homo Sapiens
accaagcauuuucagccuccauuuugaaggcu

SEQ ID NO: 391939 - RNA, 32 nt, Homo Sapiens
cuucuagaugcauauuguggggagcagaugaa

SEQ ID NO: 391940 - RNA, 32 nt, Homo Sapiens
gagcgguggagccgcacagcccacccgcacca

SEQ ID NO: 391941 - RNA, 32 nt, Homo Sapiens
ucacuuauguuaaaaagaaccaaaagacucuu

SEQ ID NO: 391942 - RNA, 32 nt, Homo Sapiens
aaaauucaaugaguaaaacaaaagcuagucaa

SEQ ID NO: 391943 - RNA, 32 nt, Homo Sapiens
cauauucuccucccaccuuuuaccacagccag

SEQ ID NO: 391944 - RNA, 32 nt, Homo Sapiens
ccagaagugggacccuccccuuccucaccaga

SEQ ID NO: 391945 - RNA, 32 nt, Homo Sapiens
agcccgagggugggaagggggagucugucugg

SEQ ID NO: 391946 - RNA, 32 nt, Homo Sapiens
uuguaaugguuuuccugaucuugccgcaucac

SEQ ID NO: 391947 - RNA, 32 nt, Homo Sapiens
agugguccaaacuuggucugggagcaagcagc

SEQ ID NO: 391948 - RNA, 32 nt, Homo Sapiens
gucuaaccucucuggagugaggggaauagauu

SEQ ID NO: 391949 - RNA, 32 nt, Homo Sapiens
cugggaaugggcagggucacucguccgaacag

SEQ ID NO: 391950 - RNA, 32 nt, Homo Sapiens
ccuggucccuagcaagguauagauagccucug

SEQ ID NO: 391951 - RNA, 32 nt, Homo Sapiens
gcuuucuacuacaaugugaacaagccuacgaa

SEQ ID NO: 391952 - RNA, 32 nt, Homo Sapiens
ccgggccgcccgcgugcccaagcccacgugag

SEQ ID NO: 391953 - RNA, 32 nt, Homo Sapiens
ggguuaaauuacuucaccucuugcacuuuuag

SEQ ID NO: 391954 - RNA, 32 nt, Homo Sapiens
uauuuuaaaaagaaaaguuuuggccgggagcg

SEQ ID NO: 391955 - RNA, 32 nt, Homo Sapiens
uguguauuucauaaguuauuacagguauaaaa

SEQ ID NO: 391956 - RNA, 31 nt, Homo Sapiens
augccagaaauguucccgggaguccaggcca

SEQ ID NO: 391957 - RNA, 32 nt, Homo Sapiens
gauguuugaacauuuuaauuugugugaugaug

SEQ ID NO: 391958 - RNA, 32 nt, Homo Sapiens
uucugaaaguguguaucagauguacggugaac

SEQ ID NO: 391959 - RNA, 32 nt, Homo Sapiens
aucaugcuaaaauuaugcaaagugaaacaagc

SEQ ID NO: 391960 - RNA, 32 nt, Homo Sapiens
caauauaauuccauuccaauccagggcuuuug

SEQ ID NO: 391961 - RNA, 32 nt, Homo Sapiens
ugugugggccggggcccucccuccugcacugg

SEQ ID NO: 391962 - RNA, 32 nt, Homo Sapiens
ccuuuguguacaaaaggguauguuuguuuaac

SEQ ID NO: 391963 - RNA, 32 nt, Homo Sapiens
uuaauuguuucauguuagauauucuauguguu

SEQ ID NO: 391964 - RNA, 32 nt, Homo Sapiens
guuaugcuggauaucagacucuguacacuaau

SEQ ID NO: 391965 - RNA, 32 nt, Homo Sapiens
ccgccgccaugacgcugcgcgcggccgucuuc

SEQ ID NO: 391966 - RNA, 32 nt, Homo Sapiens
gacuacugggcggggcucggcgcgggggcggg

SEQ ID NO: 391967 - RNA, 32 nt, Homo Sapiens
ccagagguucagggagaacagcugcguugcuc

SEQ ID NO: 391968 - RNA, 32 nt, Homo Sapiens
auuguggaagcagugacaacuugaugaagcuc

SEQ ID NO: 391969 - RNA, 32 nt, Homo Sapiens
uguuaacaucuucauguguuucauucugaucu

SEQ ID NO: 391970 - RNA, 32 nt, Homo Sapiens
ucgauggacagccucacccaccccaccugggc

SEQ ID NO: 391971 - RNA, 32 nt, Homo Sapiens
uuacaggugugagccaucacacucggccaaag

SEQ ID NO: 391972 - RNA, 32 nt, Homo Sapiens
cuucccucugcguguccuuguuuuuguguaau

SEQ ID NO: 391973 - RNA, 32 nt, Homo Sapiens
ucauuuaaauuaugauuuuaaaugguauaaac

SEQ ID NO: 391974 - RNA, 32 nt, Homo Sapiens
agccuccggaagcagcccuacaacaaccugaa

SEQ ID NO: 391975 - RNA, 32 nt, Homo Sapiens
acaugagugucugaagaugacuucugugagug

SEQ ID NO: 391976 - RNA, 30 nt, Homo Sapiens
ggacagugucaccacuuuacagaagaggga

SEQ ID NO: 391977 - RNA, 32 nt, Homo Sapiens
gcagcaacaguggagaccuggugcuggcgcug

SEQ ID NO: 391978 - RNA, 32 nt, Homo Sapiens
aaaauucuagucccccgccaaccccguuagcc

SEQ ID NO: 391979 - RNA, 32 nt, Homo Sapiens
gcuucccgguguuugaggguucgggccucccg

SEQ ID NO: 391980 - RNA, 32 nt, Homo Sapiens
cuaauuuuuauauuuuuagaauuuuagaagag

SEQ ID NO: 391981 - RNA, 32 nt, Homo Sapiens
auguggauggccuggggacuccuggguuuucu

SEQ ID NO: 391982 - RNA, 32 nt, Homo Sapiens
ggaauugcaugacccacccuggaccaaaagag

SEQ ID NO: 391983 - RNA, 32 nt, Homo Sapiens
accggguagaucugggugaugucugguggcuc

SEQ ID NO: 391984 - RNA, 32 nt, Homo Sapiens
cuaccugucccaguacacgaaagggcgcuggu

SEQ ID NO: 391985 - RNA, 32 nt, Homo Sapiens
ggugcccgcgcgcguggugagcagcugcacca

SEQ ID NO: 391986 - RNA, 32 nt, Homo Sapiens
ggaaggaccugccugugaccuuugcccugucc

SEQ ID NO: 391987 - RNA, 32 nt, Homo Sapiens
agugccggccccagauccucacacccagggag

SEQ ID NO: 391988 - RNA, 32 nt, Homo Sapiens
cucauguuuguguuuucuuaguacugucuauu

SEQ ID NO: 391989 - RNA, 32 nt, Homo Sapiens
ugauauuuauagaacaguugauuucccccauc

SEQ ID NO: 391990 - RNA, 32 nt, Homo Sapiens
uccccgcccucccugaccagggagcagcucgc

SEQ ID NO: 391991 - RNA, 32 nt, Homo Sapiens
auccuuggcuggaaggccgaggccuggaggag

SEQ ID NO: 391992 - RNA, 32 nt, Homo Sapiens
gcugcucgcucccggaccaccugcccagcguu

SEQ ID NO: 391993 - RNA, 32 nt, Homo Sapiens
cacauuuacaaauuuuucaagagguuagccac

SEQ ID NO: 391994 - RNA, 32 nt, Homo Sapiens
uuuugugauauauaaguagugaacacacaugu

SEQ ID NO: 391995 - RNA, 32 nt, Homo Sapiens
cuuuguuuuuugugcuauuaggaaauucugau

SEQ ID NO: 391996 - RNA, 32 nt, Homo Sapiens
uuucaagcaguucuccagcaucagccucccga

SEQ ID NO: 391997 - RNA, 32 nt, Homo Sapiens
ggcaggcagcuaggcagggagggggcugggaa

SEQ ID NO: 391998 - RNA, 32 nt, Homo Sapiens
ucggcugacuacuuuaagauuaugccacagcc

SEQ ID NO: 391999 - RNA, 32 nt, Homo Sapiens
gcucgccuguuaaauuucaaauguccuguuug

SEQ ID NO: 392000 - RNA, 32 nt, Homo Sapiens
cgcgcagccaggcuggugggggcccccggcag

SEQ ID NO: 392001 - RNA, 32 nt, Homo Sapiens
aguggaagucauucccgcguugccaagacugc

SEQ ID NO: 392002 - RNA, 32 nt, Homo Sapiens
uaaaaucuugguuuuuguuaauuuaucucaau

SEQ ID NO: 392003 - RNA, 32 nt, Homo Sapiens
cuugggggcagcucugggagggucccuguuug

SEQ ID NO: 392004 - RNA, 32 nt, Homo Sapiens
uuucaggcuaaggagcucccuaucuacccuca

SEQ ID NO: 392005 - RNA, 32 nt, Homo Sapiens
ucauuaucucuuuccuuuuuuauguuaaugag

SEQ ID NO: 392006 - RNA, 32 nt, Homo Sapiens
uucuagugguuugauccaaaucccauuacagu

SEQ ID NO: 392007 - RNA, 32 nt, Homo Sapiens
caucguaggccagccauuuguaauuuuuaacu

SEQ ID NO: 392008 - RNA, 32 nt, Homo Sapiens
gaaggagguggcaucgccguccgcgccggccc

SEQ ID NO: 392009 - RNA, 32 nt, Homo Sapiens
cacccuucuugcuuaaauccauaggcauuugu

SEQ ID NO: 392010 - RNA, 32 nt, Homo Sapiens
cugccggugcccuccgcaggccgggccuccug

SEQ ID NO: 392011 - RNA, 32 nt, Homo Sapiens
aggaauuuccaagucagaguccccuuugaacc

SEQ ID NO: 392012 - RNA, 32 nt, Homo Sapiens
aaaaucggugcaguuuuuuaugguuuuuacac

SEQ ID NO: 392013 - RNA, 32 nt, Homo Sapiens
cuaggagagcuuugggaccucugucccaagca

SEQ ID NO: 392014 - RNA, 32 nt, Homo Sapiens
uaaucagaauaaagauuauauccauaaaauuu

SEQ ID NO: 392015 - RNA, 32 nt, Homo Sapiens
cugcagugucuggucgagaguacccgugggag

SEQ ID NO: 392016 - RNA, 32 nt, Homo Sapiens
aaaggagucagggauggcucuuccucaggguc

SEQ ID NO: 392017 - RNA, 32 nt, Homo Sapiens
uguguggagggagaggcccccagaaccacucu

SEQ ID NO: 392018 - RNA, 32 nt, Homo Sapiens
gcacguauuguuuugauaaacaucuuaacagg

SEQ ID NO: 392019 - RNA, 30 nt, Homo Sapiens
agaccauggcccggccucuguguacccugc

SEQ ID NO: 392020 - RNA, 30 nt, Homo Sapiens
cacgccgccgcagccuucgcccuggaugcc

SEQ ID NO: 392021 - RNA, 32 nt, Homo Sapiens
caguuccuaucauucacccauuucacugugca

SEQ ID NO: 392022 - RNA, 32 nt, Homo Sapiens
aaugagcuggaacgucugagcaaucugguagg

SEQ ID NO: 392023 - RNA, 32 nt, Homo Sapiens
gcucccucccggcuccuccccaucccagaggg

SEQ ID NO: 392024 - RNA, 32 nt, Homo Sapiens
agagaucaucauauauaucuccuuuguguucc

SEQ ID NO: 392025 - RNA, 32 nt, Homo Sapiens
ggcggaggcccaggagggcccgcggcuccuga

SEQ ID NO: 392026 - RNA, 32 nt, Homo Sapiens
ccccacucuucauagacacauuuguuacucua

SEQ ID NO: 392027 - RNA, 32 nt, Homo Sapiens
gguggccugcagcuucccuuucuggaaccgac

SEQ ID NO: 392028 - RNA, 32 nt, Homo Sapiens
cuaacgaagaacucaaggucuuaauggacgag

SEQ ID NO: 392029 - RNA, 32 nt, Homo Sapiens
aacggagucucauucugucacccaggcuggag

SEQ ID NO: 392030 - RNA, 32 nt, Homo Sapiens
auaauuuaauguuuuucuuccuuuucauuacc

SEQ ID NO: 392031 - RNA, 32 nt, Homo Sapiens
ccugagcagaaagaggccuucuggauggccaa

SEQ ID NO: 392032 - RNA, 32 nt, Homo Sapiens
uuaggagcugggaaguugaaucuuacaacaaa

SEQ ID NO: 392033 - RNA, 32 nt, Homo Sapiens
gucauguguguauuuuuucauagucccaccuu

SEQ ID NO: 392034 - RNA, 32 nt, Homo Sapiens
ggccguggccugaggcucagggccccccgccc

SEQ ID NO: 392035 - RNA, 32 nt, Homo Sapiens
gugccugagcccggcgucccucgccccccgcc

SEQ ID NO: 392036 - RNA, 32 nt, Homo Sapiens
uguuuuugacaauaaacuucuugugcaguuuu

SEQ ID NO: 392037 - RNA, 32 nt, Homo Sapiens
ugcaaaugaaaaauccacuguacaauaacaag

SEQ ID NO: 392038 - RNA, 32 nt, Homo Sapiens
cccuggcgcaugccugcuccugucccuggauu

SEQ ID NO: 392039 - RNA, 32 nt, Homo Sapiens
gcagacguccccggcguccugcgagcgccagc

SEQ ID NO: 392040 - RNA, 32 nt, Homo Sapiens
cccagcugcaggagcaggcuccgauggccgga

SEQ ID NO: 392041 - RNA, 32 nt, Homo Sapiens
uuucucuggugcccucacucugcucggaaauc

SEQ ID NO: 392042 - RNA, 32 nt, Homo Sapiens
gucccuggcugugugacuucacugcuuuaagc

SEQ ID NO: 392043 - RNA, 32 nt, Homo Sapiens
cugauuuuugucuugagcaggcaccaucccug

SEQ ID NO: 392044 - RNA, 32 nt, Homo Sapiens
uuauaagaaagaucaaagacuuuaagacuuuc

SEQ ID NO: 392045 - RNA, 32 nt, Homo Sapiens
gagaguugaaccuggggugaugcuagggaucu

SEQ ID NO: 392046 - RNA, 28 nt, Homo Sapiens
gucacugggcggccgccgagguccccga

SEQ ID NO: 392047 - RNA, 32 nt, Homo Sapiens
ccccacccacuccaucaucuccaggugcccca

SEQ ID NO: 392048 - RNA, 32 nt, Homo Sapiens
auaucaaaaaucagauugcugguagguguguu

SEQ ID NO: 392049 - RNA, 32 nt, Homo Sapiens
cuuauagcuagaauaaaucacuauuuaauugc

SEQ ID NO: 392050 - RNA, 32 nt, Homo Sapiens
uacaucugaguauuuuauuuuauuuaauuuuc

SEQ ID NO: 392051 - RNA, 32 nt, Homo Sapiens
ugaggcgugugggggcggcugccugugucagc

SEQ ID NO: 392052 - RNA, 32 nt, Homo Sapiens
aagcguaaacaaaacaaaucaacggaacacua

SEQ ID NO: 392053 - RNA, 32 nt, Homo Sapiens
uucuguuuucaaauuuauccugaggcuuuguu

SEQ ID NO: 392054 - RNA, 32 nt, Homo Sapiens
cagaccuaucuuguuuucacccccugucucuu

SEQ ID NO: 392055 - RNA, 32 nt, Homo Sapiens
uuuuccucuaccaugcugaaggcugaaagaca

SEQ ID NO: 392056 - RNA, 32 nt, Homo Sapiens
uugaaagggacugaggcucacccaggucucca

SEQ ID NO: 392057 - RNA, 32 nt, Homo Sapiens
ggguuuuguuccuuuuucauuuucaagguuua

SEQ ID NO: 392058 - RNA, 32 nt, Homo Sapiens
gcaauaaaugucccaaauaaauuuauaacaau

SEQ ID NO: 392059 - RNA, 32 nt, Homo Sapiens
uguaauaaugaaaacugaaaauggaguaauug

SEQ ID NO: 392060 - RNA, 32 nt, Homo Sapiens
cuguagagauaaagcugaggaggaggcugugu

SEQ ID NO: 392061 - RNA, 32 nt, Homo Sapiens
uaaaucccaucccuuccucagccagcaggggc

SEQ ID NO: 392062 - RNA, 32 nt, Homo Sapiens
ccccugccauccagcccuccccgcuugaggcc

SEQ ID NO: 392063 - RNA, 32 nt, Homo Sapiens
ccgcucuuuccacggucucccucugaugccga

SEQ ID NO: 392064 - RNA, 32 nt, Homo Sapiens
cgagcuugaagugcccauggaacuuguaccau

SEQ ID NO: 392065 - RNA, 32 nt, Homo Sapiens
uauuaauugacugucuuguaagccacuuguuu

SEQ ID NO: 392066 - RNA, 32 nt, Homo Sapiens
gcucggcccugcugcuggcccggugggaagua

SEQ ID NO: 392067 - RNA, 32 nt, Homo Sapiens
cgcguaggcgccgaacgcucccggcccgccca

SEQ ID NO: 392068 - RNA, 32 nt, Homo Sapiens
ugcacaagggaagacgaguguggaggauaggu

SEQ ID NO: 392069 - RNA, 32 nt, Homo Sapiens
aaaaagcaugaacuuguauuaauccuauauaa

SEQ ID NO: 392070 - RNA, 32 nt, Homo Sapiens
uauuccccacuacucuucucucuaucagauac

SEQ ID NO: 392071 - RNA, 32 nt, Homo Sapiens
guuccugggagccgagggccagagacuaaguu

SEQ ID NO: 392072 - RNA, 32 nt, Homo Sapiens
aauaugaggaagaggguguggcccaacccuca

SEQ ID NO: 392073 - RNA, 32 nt, Homo Sapiens
auccagcgaaucagaucacuuccgcugucgug

SEQ ID NO: 392074 - RNA, 32 nt, Homo Sapiens
gagcuagcgcucaagcagagcccagcgcggug

SEQ ID NO: 392075 - RNA, 32 nt, Homo Sapiens
ucgaguaaccuggucccggcagccgggcccca

SEQ ID NO: 392076 - RNA, 32 nt, Homo Sapiens
cccgacagcagcgaccgagacccggugggaca

SEQ ID NO: 392077 - RNA, 32 nt, Homo Sapiens
gggaagucccuggcuggcccccgggggagagg

SEQ ID NO: 392078 - RNA, 32 nt, Homo Sapiens
gaagaagcggaggcgccggccggucggccggg

SEQ ID NO: 392079 - RNA, 28 nt, Homo Sapiens
ugggaaaucgauaucauuauaagguuau

SEQ ID NO: 392080 - RNA, 32 nt, Homo Sapiens
cuguucauccugaaacaggcacaggugaugca

SEQ ID NO: 392081 - RNA, 32 nt, Homo Sapiens
uucuucaauauuuggaauagacguguucucaa

SEQ ID NO: 392082 - RNA, 32 nt, Homo Sapiens
agcugccaguagcaccaccuccuccagccgca

SEQ ID NO: 392083 - RNA, 32 nt, Homo Sapiens
ccgacuccaaaaaucucaggaauuaaacuuuu

SEQ ID NO: 392084 - RNA, 32 nt, Homo Sapiens
aguugcaauauuuacugguuuuuaguagguuu

SEQ ID NO: 392085 - RNA, 32 nt, Homo Sapiens
uaggcccuggggauucagacacaaagcaggua

SEQ ID NO: 392086 - RNA, 32 nt, Homo Sapiens
auuaaccucauggauauuuagauggaaaguga

SEQ ID NO: 392087 - RNA, 32 nt, Homo Sapiens
cgcacgccggccgcgcccacgugaccgguccg

SEQ ID NO: 392088 - RNA, 32 nt, Homo Sapiens
caccacggcuccgacacaucucacugugcugc

SEQ ID NO: 392089 - RNA, 32 nt, Homo Sapiens
cuugaaauuuaaaucaagaaaaaauuucugac

SEQ ID NO: 392090 - RNA, 32 nt, Homo Sapiens
cccacccccaucgccugcuccuaugcccagcc

SEQ ID NO: 392091 - RNA, 30 nt, Homo Sapiens
uagcugccgucgccgccgccggggcucuau

SEQ ID NO: 392092 - RNA, 32 nt, Homo Sapiens
guugaaaagcauccauuaugagcugaggucag

SEQ ID NO: 392093 - RNA, 32 nt, Homo Sapiens
cggagcucacuauaguauucagcccucagucc

SEQ ID NO: 392094 - RNA, 32 nt, Homo Sapiens
cuauguuugaagaagaauguguguacauuuca

SEQ ID NO: 392095 - RNA, 32 nt, Homo Sapiens
ccgcaaccaggcccgcgccgccaccauguuuc

SEQ ID NO: 392096 - RNA, 32 nt, Homo Sapiens
gccaggaccccauuacagaggcgcugccugcc

SEQ ID NO: 392097 - RNA, 32 nt, Homo Sapiens
agaaacaaaacaaaacaaaacaacaaaaaaag

SEQ ID NO: 392098 - RNA, 32 nt, Homo Sapiens
uccgcggcguccccgcugccggccacggcgcu

SEQ ID NO: 392099 - RNA, 32 nt, Homo Sapiens
agggugagggucauagggcagguuuuggguuu

SEQ ID NO: 392100 - RNA, 32 nt, Homo Sapiens
aggacacagaaggugccaacacugucgcuaca

SEQ ID NO: 392101 - RNA, 32 nt, Homo Sapiens
gagcucugacuucccaacugucccauucuaug

SEQ ID NO: 392102 - RNA, 32 nt, Homo Sapiens
auuuuuaguggagacaggauuuuaccauguug

SEQ ID NO: 392103 - RNA, 32 nt, Homo Sapiens
agccaaguagcuggucccacuggagcggugag

SEQ ID NO: 392104 - RNA, 32 nt, Homo Sapiens
ggcaaaaauuuauggugaaugaauauggcuuu

SEQ ID NO: 392105 - RNA, 32 nt, Homo Sapiens
uguaucagaaagauucuagcuauuauuuucuu

SEQ ID NO: 392106 - RNA, 31 nt, Homo Sapiens
ccggacugcugcucccugccccucccuugcg

SEQ ID NO: 392107 - RNA, 32 nt, Homo Sapiens
uucaaucuaaaauagcagcuuuugagaaaaca

SEQ ID NO: 392108 - RNA, 32 nt, Homo Sapiens
gagaugaaaugaauacuugagcuucuucagug

SEQ ID NO: 392109 - RNA, 32 nt, Homo Sapiens
acccauaucccuguagcauccucuuagcugaa

SEQ ID NO: 392110 - RNA, 32 nt, Homo Sapiens
aaguggacaccacguggcaugauccuugaucc

SEQ ID NO: 392111 - RNA, 32 nt, Homo Sapiens
gcugcccuuuccucuucugucaucucaccgcc

SEQ ID NO: 392112 - RNA, 32 nt, Homo Sapiens
uccugggccccgagucaggaagacagcgucac

SEQ ID NO: 392113 - RNA, 28 nt, Homo Sapiens
ugcaauaaaaucaagcugcuuuuguugg

SEQ ID NO: 392114 - RNA, 32 nt, Homo Sapiens
ccgcgccccaaacuuugccucccgcggcggcu

SEQ ID NO: 392115 - RNA, 32 nt, Homo Sapiens
cuauguuuugaaaguggugacuucuaccgaau

SEQ ID NO: 392116 - RNA, 32 nt, Homo Sapiens
gcugauguucuuccaacucaguugagugauuu

SEQ ID NO: 392117 - RNA, 32 nt, Homo Sapiens
gucaggccuccuggugggggccccuggacaca

SEQ ID NO: 392118 - RNA, 32 nt, Homo Sapiens
agccaaguaugaucuuugauaauuccuuaaac

SEQ ID NO: 392119 - RNA, 29 nt, Homo Sapiens
caagauguccaagcugcugaacccagagg

SEQ ID NO: 392120 - RNA, 32 nt, Homo Sapiens
aaaaacccaaaauacagcuaugaagugcuggg

SEQ ID NO: 392121 - RNA, 32 nt, Homo Sapiens
cuucgcauuuuggcauugacauuuaauuuuag

SEQ ID NO: 392122 - RNA, 32 nt, Homo Sapiens
cugaaucuuuguggcggguuugguaaaacaac

SEQ ID NO: 392123 - RNA, 32 nt, Homo Sapiens
gcaaguguauauucuuucuacugauuucaguc

SEQ ID NO: 392124 - RNA, 28 nt, Homo Sapiens
gacuuagucuuucauauguguuuccuua

SEQ ID NO: 392125 - RNA, 32 nt, Homo Sapiens
aguuuggcuggguauuugcaucucagugcugc

SEQ ID NO: 392126 - RNA, 32 nt, Homo Sapiens
gaagcagagcuggggagggagagccaucaccu

SEQ ID NO: 392127 - RNA, 32 nt, Homo Sapiens
caccuacccguccaagacccucugugcucccc

SEQ ID NO: 392128 - RNA, 32 nt, Homo Sapiens
auagcuacuguaaauagcaaacucuaacacug

SEQ ID NO: 392129 - RNA, 32 nt, Homo Sapiens
ugguagaaagacugcuugagccuggaagacau

SEQ ID NO: 392130 - RNA, 32 nt, Homo Sapiens
uguuuauuguuuucagaaauuauaucauguuu

SEQ ID NO: 392131 - RNA, 32 nt, Homo Sapiens
uucuccauaggccacuaggccucuuuccaggg

SEQ ID NO: 392132 - RNA, 32 nt, Homo Sapiens
gccccucccuccccagcagccccaagcuuuac

SEQ ID NO: 392133 - RNA, 32 nt, Homo Sapiens
ccacagucacugcuuccacaggagucaaagaa

SEQ ID NO: 392134 - RNA, 32 nt, Homo Sapiens
cggcggcccagcuacagcuccucccucuuugg

SEQ ID NO: 392135 - RNA, 29 nt, Homo Sapiens
ggaacggggucaggauggacgaggacgug

SEQ ID NO: 392136 - RNA, 28 nt, Homo Sapiens
guccucagugcaggaccaguggaugaaa

SEQ ID NO: 392137 - RNA, 32 nt, Homo Sapiens
cccccucagcaucuucccgcugagaguggugg

SEQ ID NO: 392138 - RNA, 32 nt, Homo Sapiens
ggccuccgaagcugcguguggccccuuagagg

SEQ ID NO: 392139 - RNA, 32 nt, Homo Sapiens
uguuuuguuauagaggacuauaguggaaguga

SEQ ID NO: 392140 - RNA, 32 nt, Homo Sapiens
ggugaguauauuaaaaaguuaggaaaaccuaa

SEQ ID NO: 392141 - RNA, 32 nt, Homo Sapiens
gcucugucuacauuuauuuguacccacacgug

SEQ ID NO: 392142 - RNA, 32 nt, Homo Sapiens
ugccuaccgcgugcccggcguccucgucgcgc

SEQ ID NO: 392143 - RNA, 32 nt, Homo Sapiens
cgagggagugacgaggaggagcuccgagcugc

SEQ ID NO: 392144 - RNA, 32 nt, Homo Sapiens
uguaaagccccucucccuucguucgaccaacc

SEQ ID NO: 392145 - RNA, 32 nt, Homo Sapiens
aagagggagaacucaagguucagggcugcucu

SEQ ID NO: 392146 - RNA, 32 nt, Homo Sapiens
ccugcaccaaagguguuugcuggguuugguua

SEQ ID NO: 392147 - RNA, 32 nt, Homo Sapiens
cuggaaaagacaccccagccaccuggcucaga

SEQ ID NO: 392148 - RNA, 32 nt, Homo Sapiens
ggcccuguaauugagaauugggcuugcaaugg

SEQ ID NO: 392149 - RNA, 32 nt, Homo Sapiens
cagcaacagcuagggacugauuagaaaugcaa

SEQ ID NO: 392150 - RNA, 32 nt, Homo Sapiens
gcccagcaguugcagcauggugugugcacacg

SEQ ID NO: 392151 - RNA, 32 nt, Homo Sapiens
aaucaggaggaagaggaaggaaggacuuaccc

SEQ ID NO: 392152 - RNA, 32 nt, Homo Sapiens
guccacuaacuguaccacaccagccauuaaaa

SEQ ID NO: 392153 - RNA, 32 nt, Homo Sapiens
cccuuuauguacuacauucuuauuuucuaacu

SEQ ID NO: 392154 - RNA, 32 nt, Homo Sapiens
gcuuuuggguguuagacugaaauauuuuaaga

SEQ ID NO: 392155 - RNA, 32 nt, Homo Sapiens
uaggcauuaugguuuccacuuuggcagaaggc

SEQ ID NO: 392156 - RNA, 25 nt, Homo Sapiens
augcucuucuauucuuuuuucaagu

SEQ ID NO: 392157 - RNA, 32 nt, Homo Sapiens
aauaauauauuguaaagauccuauagcucuuu

SEQ ID NO: 392158 - RNA, 32 nt, Homo Sapiens
ggccgggaggacccgggcgcaguaggagugca

SEQ ID NO: 392159 - RNA, 32 nt, Homo Sapiens
cccggugcgccccuccaccuccugcucggggg

SEQ ID NO: 392160 - RNA, 32 nt, Homo Sapiens
auuacucauuuuuguugaguaagcaaaauuac

SEQ ID NO: 392161 - RNA, 32 nt, Homo Sapiens
aucuacgggugagcccuguaaccuggcucuag

SEQ ID NO: 392162 - RNA, 32 nt, Homo Sapiens
uaagcuugggagugucugugugauuguaauca

SEQ ID NO: 392163 - RNA, 32 nt, Homo Sapiens
cucuguccucuacuccacucaugcccaucucu

SEQ ID NO: 392164 - RNA, 32 nt, Homo Sapiens
gacuucaccguguuggccaggcuggucuugaa

SEQ ID NO: 392165 - RNA, 32 nt, Homo Sapiens
ggcuucaccauguuggccaggcuggucuugaa

SEQ ID NO: 392166 - RNA, 32 nt, Homo Sapiens
aguccaccuucuaucccauucauguuagaucg

SEQ ID NO: 392167 - RNA, 32 nt, Homo Sapiens
ggagguaagagauacuauuuuugcugagcaac

SEQ ID NO: 392168 - RNA, 32 nt, Homo Sapiens
ugcuccuccagccccagcugcccuggcuuccc

SEQ ID NO: 392169 - RNA, 32 nt, Homo Sapiens
cgcugcccccgcuaagcccuggcggcggcgcc

SEQ ID NO: 392170 - RNA, 32 nt, Homo Sapiens
gguuucuuaaauauaugauuuauauuacuguc

SEQ ID NO: 392171 - RNA, 32 nt, Homo Sapiens
gagaucccccgaagcacccauccuccacuccc

SEQ ID NO: 392172 - RNA, 32 nt, Homo Sapiens
caguuggacacuauguuacauacucuaauaua

SEQ ID NO: 392173 - RNA, 32 nt, Homo Sapiens
uucuugauuuaaaaagaaaagucuauuuuguu

SEQ ID NO: 392174 - RNA, 32 nt, Homo Sapiens
uguguauggaauauauucuuugaaauauaauu

SEQ ID NO: 392175 - RNA, 32 nt, Homo Sapiens
cugacccacacacuuuuuacuuguauagauga

SEQ ID NO: 392176 - RNA, 32 nt, Homo Sapiens
ggcugggggcagccuuggcccagcuccguggc

SEQ ID NO: 392177 - RNA, 32 nt, Homo Sapiens
ggcccauagcccccucucugccccacaguccu

SEQ ID NO: 392178 - RNA, 30 nt, Homo Sapiens
gccccacgcgcgcaccagucgcguaagaca

SEQ ID NO: 392179 - RNA, 32 nt, Homo Sapiens
uuagaaauaaaacuuugauggacuuucaaaaa

SEQ ID NO: 392180 - RNA, 32 nt, Homo Sapiens
ucaccuagacagacuucaggagggaucuguga

SEQ ID NO: 392181 - RNA, 32 nt, Homo Sapiens
acagcauuauuccagcagcauccauucuuguu

SEQ ID NO: 392182 - RNA, 32 nt, Homo Sapiens
uuuuugucacuuugccaucauuguuuagaagu

SEQ ID NO: 392183 - RNA, 32 nt, Homo Sapiens
aaaaggggcagcuggaggcagaugagccgaau

SEQ ID NO: 392184 - RNA, 32 nt, Homo Sapiens
cuccugcccucccucagacagccuugucccuc

SEQ ID NO: 392185 - RNA, 32 nt, Homo Sapiens
cuuccguuuuugcuggguaggcgacccggacg

SEQ ID NO: 392186 - RNA, 32 nt, Homo Sapiens
uauuuuagcucugucauuauuaaauucagauc

SEQ ID NO: 392187 - RNA, 32 nt, Homo Sapiens
uauuuaggauauaaaacucuauauuaacaaau

SEQ ID NO: 392188 - RNA, 32 nt, Homo Sapiens
uuuucauuugaaaacuuugauucauggaaccu

SEQ ID NO: 392189 - RNA, 32 nt, Homo Sapiens
uuaucagcugauuuuccaacuuggggagguug

SEQ ID NO: 392190 - RNA, 32 nt, Homo Sapiens
uguucuuaaaauguauuugcugaauuauagau

SEQ ID NO: 392191 - RNA, 32 nt, Homo Sapiens
uuccaaggggagagggcggggccugagggugg

SEQ ID NO: 392192 - RNA, 32 nt, Homo Sapiens
uggcagucaucaugcuuauugcaguuagcaca

SEQ ID NO: 392193 - RNA, 32 nt, Homo Sapiens
guguuuguaacgaguuacaggauuguuucuuu

SEQ ID NO: 392194 - RNA, 32 nt, Homo Sapiens
uggaagacauauauuuuuuggaagacguggau

SEQ ID NO: 392195 - RNA, 32 nt, Homo Sapiens
aaagucuuuuguuugugaacacugaugcaaga

SEQ ID NO: 392196 - RNA, 32 nt, Homo Sapiens
caugggguuucuuuuggggaugaugaaaauau

SEQ ID NO: 392197 - RNA, 32 nt, Homo Sapiens
ugugaaaaccaaucaauuacuagaugagugga

SEQ ID NO: 392198 - RNA, 32 nt, Homo Sapiens
cuccuagcggggcgcaguggcucacgccugua

SEQ ID NO: 392199 - RNA, 32 nt, Homo Sapiens
ugcacucaugcaauuugagaacaccguugaca

SEQ ID NO: 392200 - RNA, 32 nt, Homo Sapiens
gcugccacgagucguccguuuccccagggaau

SEQ ID NO: 392201 - RNA, 32 nt, Homo Sapiens
aggggaggggagagccugcaucugggggccaa

SEQ ID NO: 392202 - RNA, 32 nt, Homo Sapiens
uuuuuuagggcuugugcagagaaggaagaaga

SEQ ID NO: 392203 - RNA, 32 nt, Homo Sapiens
ggaaccaacuguaggcaccucuccagggccua

SEQ ID NO: 392204 - RNA, 32 nt, Homo Sapiens
uccaggcagagagaagcagcucugggcugacc

SEQ ID NO: 392205 - RNA, 32 nt, Homo Sapiens
ggcgagcggugguuuggacgccggcggagacg

SEQ ID NO: 392206 - RNA, 32 nt, Homo Sapiens
ggcucagugcuggaucuuagucacugagcaua

SEQ ID NO: 392207 - RNA, 32 nt, Homo Sapiens
acacaauguuauauuucuuauaaauaccaguu

SEQ ID NO: 392208 - RNA, 32 nt, Homo Sapiens
ggcaguguaccucagguugacucuguacaucu

SEQ ID NO: 392209 - RNA, 32 nt, Homo Sapiens
acaggagcugucucccagcucauuuuuaacac

SEQ ID NO: 392210 - RNA, 32 nt, Homo Sapiens
gguugcuuuccacaacugcagaguuguauggc

SEQ ID NO: 392211 - RNA, 32 nt, Homo Sapiens
uuugugaccucagcuuugggaauaaaggaucu

SEQ ID NO: 392212 - RNA, 32 nt, Homo Sapiens
ccucccuugcuuucuuuuucuucugguggugg

SEQ ID NO: 392213 - RNA, 31 nt, Homo Sapiens
gaucuguuuaguaagaaggugcuguucagag

SEQ ID NO: 392214 - RNA, 32 nt, Homo Sapiens
ucugguaaaggcaaucuaguuuuuucuaucac

SEQ ID NO: 392215 - RNA, 32 nt, Homo Sapiens
aaagaaaggggagaaauaaacauaagacguau

SEQ ID NO: 392216 - RNA, 32 nt, Homo Sapiens
guuaauguuggguagaaagagauacagagggg

SEQ ID NO: 392217 - RNA, 32 nt, Homo Sapiens
gagcaucaugaguaacgugucugcucagacuc

SEQ ID NO: 392218 - RNA, 32 nt, Homo Sapiens
acagguggccccagcuuccucuccggagccug

SEQ ID NO: 392219 - RNA, 32 nt, Homo Sapiens
ucaucucccaaguuggauggcagcacgaucug

SEQ ID NO: 392220 - RNA, 32 nt, Homo Sapiens
ugggaggaucauaaagugaauugagaacagug

SEQ ID NO: 392221 - RNA, 32 nt, Homo Sapiens
gagaggaucugugugugauuucugggacauaa

SEQ ID NO: 392222 - RNA, 32 nt, Homo Sapiens
agucuaggaaaugucaguccagggcuucuugg

SEQ ID NO: 392223 - RNA, 32 nt, Homo Sapiens
auaaagacaaaguggcaacuguagaaaguguu

SEQ ID NO: 392224 - RNA, 32 nt, Homo Sapiens
cuggggcuuggggaggggagggggcgccuugu

SEQ ID NO: 392225 - RNA, 32 nt, Homo Sapiens
auuuuaaaacaaaagaacaagaaaaguuuaua

SEQ ID NO: 392226 - RNA, 32 nt, Homo Sapiens
uucccuugacuucuuacauuuugcucacuccu

SEQ ID NO: 392227 - RNA, 32 nt, Homo Sapiens
cuguaccaaaacuugaacauaaaagacuagaa

SEQ ID NO: 392228 - RNA, 32 nt, Homo Sapiens
caaacagcuuacugccuaguccccgccaaucc

SEQ ID NO: 392229 - RNA, 32 nt, Homo Sapiens
cugcgguggcugcugcugcugcugguuuucau

SEQ ID NO: 392230 - RNA, 32 nt, Homo Sapiens
acaugggacuggugauaaaugauccuaaacua

SEQ ID NO: 392231 - RNA, 32 nt, Homo Sapiens
aaccucagaacagccgucccucguuuccugga

SEQ ID NO: 392232 - RNA, 32 nt, Homo Sapiens
acuauuaaauuaagcccaucauaucauagcac

SEQ ID NO: 392233 - RNA, 32 nt, Homo Sapiens
cgcgcacaccccccgcgccggacccgcaccuc

SEQ ID NO: 392234 - RNA, 32 nt, Homo Sapiens
gucgacuugccccagagcugauccuugucuuu

SEQ ID NO: 392235 - RNA, 32 nt, Homo Sapiens
gguccacaggagcgucuccggaugccaggacc

SEQ ID NO: 392236 - RNA, 32 nt, Homo Sapiens
uacuguuuugcaauugauaaaaggcuuugcau

SEQ ID NO: 392237 - RNA, 32 nt, Homo Sapiens
ucaggcaugugaaacuauugaaccuuccugcu

SEQ ID NO: 392238 - RNA, 32 nt, Homo Sapiens
cuguuguggguugcagguugggugcugcuguu

SEQ ID NO: 392239 - RNA, 32 nt, Homo Sapiens
uucacuacucauauuucucauguaaguggaau

SEQ ID NO: 392240 - RNA, 32 nt, Homo Sapiens
uuuuauaaacaccacugucugaagaucuucau

SEQ ID NO: 392241 - RNA, 32 nt, Homo Sapiens
cacacaguuccaugacccagcgggcccccagg

SEQ ID NO: 392242 - RNA, 32 nt, Homo Sapiens
cauccucguccuuagugggacagguaggaauu

SEQ ID NO: 392243 - RNA, 32 nt, Homo Sapiens
ucuugaauuuaaauauacaacuuuuauaucau

SEQ ID NO: 392244 - RNA, 32 nt, Homo Sapiens
guauuucuuugucaaggauguuucuaguuuuu

SEQ ID NO: 392245 - RNA, 32 nt, Homo Sapiens
cuuguuuagguccgguacuuggcgcuuuguuu

SEQ ID NO: 392246 - RNA, 32 nt, Homo Sapiens
aucaaccaccucugcuucuacuccuucuuccu

SEQ ID NO: 392247 - RNA, 32 nt, Homo Sapiens
cggcuccuuuuuggcacuuccauccucaccac

SEQ ID NO: 392248 - RNA, 32 nt, Homo Sapiens
gaacucaugacggaagaguugagaccuaacga

SEQ ID NO: 392249 - RNA, 29 nt, Homo Sapiens
agacagagguuacagaggagccggacaca

SEQ ID NO: 392250 - RNA, 32 nt, Homo Sapiens
cacucccagcguaucauagaaaaugugaguag

SEQ ID NO: 392251 - RNA, 32 nt, Homo Sapiens
uuaagaaaacaaaaacagaaacacauaguauu

SEQ ID NO: 392252 - RNA, 32 nt, Homo Sapiens
cagggaagggaagggcggagcuggggugaggg

SEQ ID NO: 392253 - RNA, 32 nt, Homo Sapiens
uuuucuugacauuuaaacucagcugaucugau

SEQ ID NO: 392254 - RNA, 32 nt, Homo Sapiens
uaacaauugucugcccauguccugccugaaau

SEQ ID NO: 392255 - RNA, 32 nt, Homo Sapiens
aagcuccgcucccggguggacuugaaauugca

SEQ ID NO: 392256 - RNA, 32 nt, Homo Sapiens
gcgguuggcggccuccucguggagcggagcaa

SEQ ID NO: 392257 - RNA, 32 nt, Homo Sapiens
ccaagcuucccccaagauccacaucacccacg

SEQ ID NO: 392258 - RNA, 32 nt, Homo Sapiens
uggagccucugcccuccuccagcccggauggc

SEQ ID NO: 392259 - RNA, 32 nt, Homo Sapiens
gaccaaaauucaaagucucaucugaaacaagg

SEQ ID NO: 392260 - RNA, 32 nt, Homo Sapiens
gaguagcuggaaccacaggugugugcuaccgu

SEQ ID NO: 392261 - RNA, 32 nt, Homo Sapiens
aggugguauaugccuguagucccagcuacuca

SEQ ID NO: 392262 - RNA, 32 nt, Homo Sapiens
cgcccacaccuacgcccuccccuccccggccc

SEQ ID NO: 392263 - RNA, 32 nt, Homo Sapiens
ugugugagaguguguaugugucuguacaugua

SEQ ID NO: 392264 - RNA, 32 nt, Homo Sapiens
agcuuacucaggaaaugaaaacaaaugauggu

SEQ ID NO: 392265 - RNA, 32 nt, Homo Sapiens
ugguuuuuaaauuuuccaaccaaguggaaagg

SEQ ID NO: 392266 - RNA, 32 nt, Homo Sapiens
aggugaugcucaccuccgaggaccucagaacu

SEQ ID NO: 392267 - RNA, 32 nt, Homo Sapiens
ccucccugcccccacaccugcacccaaacaga

SEQ ID NO: 392268 - RNA, 32 nt, Homo Sapiens
ccacccauuucccucauggggaucccgaagcc

SEQ ID NO: 392269 - RNA, 32 nt, Homo Sapiens
guggccauccugaaaccuaguguugcugugac

SEQ ID NO: 392270 - RNA, 32 nt, Homo Sapiens
guugaaucauuguaauuuaauuuuauuuuaca

SEQ ID NO: 392271 - RNA, 32 nt, Homo Sapiens
gggcgagccgcgggcgcucgcucaggugauca

SEQ ID NO: 392272 - RNA, 32 nt, Homo Sapiens
cguauucuaguacagaaauuauagaaauauca

SEQ ID NO: 392273 - RNA, 32 nt, Homo Sapiens
uauaagcauguguugcaggugcuguuugauuu

SEQ ID NO: 392274 - RNA, 32 nt, Homo Sapiens
ugcauguccucugauuguguaaaauuaggcau

SEQ ID NO: 392275 - RNA, 32 nt, Homo Sapiens
ggccgcggggcaugcgggaggcggaggggugg

SEQ ID NO: 392276 - RNA, 32 nt, Homo Sapiens
aagcaugaacuuuagaaccagaugaucccggu

SEQ ID NO: 392277 - RNA, 29 nt, Homo Sapiens
acugaguaaaguuucauuuccugauucaa

SEQ ID NO: 392278 - RNA, 32 nt, Homo Sapiens
ugcccauggcuggccaggauccugcgcugagc

SEQ ID NO: 392279 - RNA, 32 nt, Homo Sapiens
cggcuggaggccggucuugcaggagcggggga

SEQ ID NO: 392280 - RNA, 32 nt, Homo Sapiens
uccugggaugacugaggccucaguugaggcuc

SEQ ID NO: 392281 - RNA, 32 nt, Homo Sapiens
cacugcugcuccauguguaccaagagcagcag

SEQ ID NO: 392282 - RNA, 32 nt, Homo Sapiens
ucccuccucucugcaccccaaauacgcacuuu

SEQ ID NO: 392283 - RNA, 32 nt, Homo Sapiens
uaagugaucccggacuggagcgccagcuacac

SEQ ID NO: 392284 - RNA, 31 nt, Homo Sapiens
ucaucgugaaauaaaaaguccacucuggagu

SEQ ID NO: 392285 - RNA, 32 nt, Homo Sapiens
agcuggaaccaucagggaacaugagugaauuu

SEQ ID NO: 392286 - RNA, 32 nt, Homo Sapiens
cuaaauucuaaaguaugguuauacaaaccaua

SEQ ID NO: 392287 - RNA, 32 nt, Homo Sapiens
gcagccccaagccccccucugcccagggagcc

SEQ ID NO: 392288 - RNA, 32 nt, Homo Sapiens
ggucauaaauguuuugguacuuguagauguuu

SEQ ID NO: 392289 - RNA, 32 nt, Homo Sapiens
ggcuaauaaacuguauuaaaucuuaaacaaug

SEQ ID NO: 392290 - RNA, 32 nt, Homo Sapiens
aacaacauuuguuugcagagaaaaaugaacaa

SEQ ID NO: 392291 - RNA, 30 nt, Homo Sapiens
ucaggagcugaaagacggugagugcagaua

SEQ ID NO: 392292 - RNA, 28 nt, Homo Sapiens
gcagagguuacagguuacagugagcaaa

SEQ ID NO: 392293 - RNA, 32 nt, Homo Sapiens
gaggugacgucgcgggucucggucgcggggcc

SEQ ID NO: 392294 - RNA, 32 nt, Homo Sapiens
gguuucaccauguuggucaggcuggucucaac

SEQ ID NO: 392295 - RNA, 32 nt, Homo Sapiens
uauucuaguuuggggggugggguugcaguauu

SEQ ID NO: 392296 - RNA, 32 nt, Homo Sapiens
gaaagacuuuucuagcugcaauuuaaggcagc

SEQ ID NO: 392297 - RNA, 32 nt, Homo Sapiens
caucuggaauccaaacacaggcuggacagcug

SEQ ID NO: 392298 - RNA, 32 nt, Homo Sapiens
uaccacuauggauaaauuaacuuuuacagaaa

SEQ ID NO: 392299 - RNA, 32 nt, Homo Sapiens
gcuauuugcugcaaguuguaggucuugggcuc

SEQ ID NO: 392300 - RNA, 32 nt, Homo Sapiens
gaguggggggaggaagcagaggucuucagggc

SEQ ID NO: 392301 - RNA, 32 nt, Homo Sapiens
ccccacucccacaugggcccaggccucaccau

SEQ ID NO: 392302 - RNA, 32 nt, Homo Sapiens
cuucccgguuggcgcgcgcccggggcggcggc

SEQ ID NO: 392303 - RNA, 32 nt, Homo Sapiens
uagccccgccggggcgcccuacggaacgcggu

SEQ ID NO: 392304 - RNA, 31 nt, Homo Sapiens
uuucuccugaggagaaaguccuugcucuggu

SEQ ID NO: 392305 - RNA, 32 nt, Homo Sapiens
ucgccccagcccagguggccaagcccauccug

SEQ ID NO: 392306 - RNA, 32 nt, Homo Sapiens
cuuuuguucuucauuauuuucuuuccugcauu

SEQ ID NO: 392307 - RNA, 32 nt, Homo Sapiens
ccgacggugaggggcgguggcccaacggcggg

SEQ ID NO: 392308 - RNA, 32 nt, Homo Sapiens
auccugagacgcuuccccucccugccccaccc

SEQ ID NO: 392309 - RNA, 32 nt, Homo Sapiens
gguggagcucacagacggcggcugguggaugg

SEQ ID NO: 392310 - RNA, 32 nt, Homo Sapiens
agcgcugcaagcuggaggcugcgguggcccag

SEQ ID NO: 392311 - RNA, 32 nt, Homo Sapiens
gccucucuuggguguuccuucuggccaguccc

SEQ ID NO: 392312 - RNA, 32 nt, Homo Sapiens
ccaaaauucuaccuucauccuacccagaaauu

SEQ ID NO: 392313 - RNA, 32 nt, Homo Sapiens
gaccauauuaauucuauuuacuauuuguugaa

SEQ ID NO: 392314 - RNA, 32 nt, Homo Sapiens
uuuucaguugucuccucccaucuucagaucau

SEQ ID NO: 392315 - RNA, 32 nt, Homo Sapiens
aggaauggcuuguuuucuuagacuccuccuca

SEQ ID NO: 392316 - RNA, 32 nt, Homo Sapiens
uucucucucacacacacacacacacacacaca

SEQ ID NO: 392317 - RNA, 32 nt, Homo Sapiens
cugggcccaucccugccccuuccacggccccc

SEQ ID NO: 392318 - RNA, 32 nt, Homo Sapiens
aggugauaccggguccuagguagguagggcug

SEQ ID NO: 392319 - RNA, 32 nt, Homo Sapiens
ggcccagcaucauuugucaucaaguccacugu

SEQ ID NO: 392320 - RNA, 32 nt, Homo Sapiens
uucacguguaccugugucaucuuucuuguuuc

SEQ ID NO: 392321 - RNA, 32 nt, Homo Sapiens
gauccagcuuuguugaaaagcgaagccguuag

SEQ ID NO: 392322 - RNA, 32 nt, Homo Sapiens
ccaguggaauccaguuagaugguccuaaugcu

SEQ ID NO: 392323 - RNA, 32 nt, Homo Sapiens
cuguacacugguuuuuuucccuuguguuugcu

SEQ ID NO: 392324 - RNA, 32 nt, Homo Sapiens
cccaggaggcggaggcagaggcugcagugacc

SEQ ID NO: 392325 - RNA, 32 nt, Homo Sapiens
gaaaucacauucacuaagcaguggauugaauu

SEQ ID NO: 392326 - RNA, 32 nt, Homo Sapiens
gucaauuuaagugaugagaacauuuaacuuug

SEQ ID NO: 392327 - RNA, 32 nt, Homo Sapiens
gugacgcuuuuggccuggcuggccgcuguuuu

SEQ ID NO: 392328 - RNA, 32 nt, Homo Sapiens
cgcuccuccgcagccugggguacgcgcugaag

SEQ ID NO: 392329 - RNA, 31 nt, Homo Sapiens
ggcgccauggaggccaccggggugcugccgu

SEQ ID NO: 392330 - RNA, 32 nt, Homo Sapiens
ggagcggccugccugccucccugcgcacccgc

SEQ ID NO: 392331 - RNA, 32 nt, Homo Sapiens
ccugcacaccccagcccugcacggggcccucc

SEQ ID NO: 392332 - RNA, 32 nt, Homo Sapiens
uggaggaccagaugcagcccaucuagagcaag

SEQ ID NO: 392333 - RNA, 32 nt, Homo Sapiens
ggcacugaugcaauguauggcuuuucucuugc

SEQ ID NO: 392334 - RNA, 32 nt, Homo Sapiens
ccguuucuccuuccgcuguaucuagcauuucg

SEQ ID NO: 392335 - RNA, 32 nt, Homo Sapiens
ugcccaaggggaggaaggaggucacaccaaua

SEQ ID NO: 392336 - RNA, 32 nt, Homo Sapiens
cacugguuugcaaccacuggguugcuauccuu

SEQ ID NO: 392337 - RNA, 32 nt, Homo Sapiens
cucuuagauauaucccccuuucugggugaacu

SEQ ID NO: 392338 - RNA, 32 nt, Homo Sapiens
gcaaccuccgccuccuugguuccagcaauucu

SEQ ID NO: 392339 - RNA, 32 nt, Homo Sapiens
uacccagguaugccgcagagccaggcacgccg

SEQ ID NO: 392340 - RNA, 32 nt, Homo Sapiens
ucaccuuguuauaccugcguggcaccauggca

SEQ ID NO: 392341 - RNA, 31 nt, Homo Sapiens
ucuaaauagcucuggaaccaggcuuguaauc

SEQ ID NO: 392342 - RNA, 32 nt, Homo Sapiens
gcgggggcaggggcggcuccgcggcuucuccc

SEQ ID NO: 392343 - RNA, 32 nt, Homo Sapiens
acuugagaauuacauuaauguggaaucaacag

SEQ ID NO: 392344 - RNA, 32 nt, Homo Sapiens
cacacacacacacacacacacacacacagcca

SEQ ID NO: 392345 - RNA, 32 nt, Homo Sapiens
ccgaguagcugagacuucaggugcauuccacc

SEQ ID NO: 392346 - RNA, 32 nt, Homo Sapiens
uuuuuauaauuucuaauaaccaacuccagaac

SEQ ID NO: 392347 - RNA, 32 nt, Homo Sapiens
caaaagauuuuuuccuguuuuaucugaaacau

SEQ ID NO: 392348 - RNA, 32 nt, Homo Sapiens
uaguguaaacauuauuuccuuaccggggaaug

SEQ ID NO: 392349 - RNA, 32 nt, Homo Sapiens
aauauuuacuuccuaccuuguuugcaagaagc

SEQ ID NO: 392350 - RNA, 31 nt, Homo Sapiens
ccacucagcggccccaucggaacugagaauu

SEQ ID NO: 392351 - RNA, 32 nt, Homo Sapiens
uguggcugccuugggccugcccucagccccac

SEQ ID NO: 392352 - RNA, 32 nt, Homo Sapiens
cauguuacugcuugugauacaguucuggaauu

SEQ ID NO: 392353 - RNA, 32 nt, Homo Sapiens
gcacccugccccaccccaccuccacucccacc

SEQ ID NO: 392354 - RNA, 32 nt, Homo Sapiens
gggcgagcacacggucucuuccccugccccaa

SEQ ID NO: 392355 - RNA, 32 nt, Homo Sapiens
aauugguucuuugcacuguucuccucaugugg

SEQ ID NO: 392356 - RNA, 32 nt, Homo Sapiens
aaauuuuuguuuuuauguugugaaugugcuaa

SEQ ID NO: 392357 - RNA, 29 nt, Homo Sapiens
auccauaagaguucugauuuucuauagga

SEQ ID NO: 392358 - RNA, 31 nt, Homo Sapiens
cuccgagacggcccccugccccgcgcagcca

SEQ ID NO: 392359 - RNA, 32 nt, Homo Sapiens
uauauugaguauucuuuuuuuuuuuuuuugag

SEQ ID NO: 392360 - RNA, 32 nt, Homo Sapiens
ccuucgugcagcuucuugccccuguugacgug

SEQ ID NO: 392361 - RNA, 32 nt, Homo Sapiens
augcacuuguugucugucuucuuuaaucaaau

SEQ ID NO: 392362 - RNA, 32 nt, Homo Sapiens
ugagaaaauguguuuuaauaugucauaugaau

SEQ ID NO: 392363 - RNA, 32 nt, Homo Sapiens
ugguggcgcuggcagccgugcuccugaacaac

SEQ ID NO: 392364 - RNA, 32 nt, Homo Sapiens
cccucggcuccagcccccggcgccugccgccu

SEQ ID NO: 392365 - RNA, 32 nt, Homo Sapiens
uuaugcagcaauauauagcauucauacaaaaa

SEQ ID NO: 392366 - RNA, 32 nt, Homo Sapiens
uggaccaagggaaagcaaaaagagaaggcaga

SEQ ID NO: 392367 - RNA, 32 nt, Homo Sapiens
agcagugugccuugcaccuuguagguguacaa

SEQ ID NO: 392368 - RNA, 32 nt, Homo Sapiens
auuauguacuacaugacaggcaucaaucuggg

SEQ ID NO: 392369 - RNA, 29 nt, Homo Sapiens
cuuuuuuggggacagaucccgaaguucga

SEQ ID NO: 392370 - RNA, 32 nt, Homo Sapiens
agccucaucuucuaggccuuuuccauccaacc

SEQ ID NO: 392371 - RNA, 32 nt, Homo Sapiens
cagacugcuuugcaugagucgaaccaugagug

SEQ ID NO: 392372 - RNA, 32 nt, Homo Sapiens
auuuugccaaaauuauuaauauaagaagcuuu

SEQ ID NO: 392373 - RNA, 32 nt, Homo Sapiens
aagugaaggcuuuagaugugggaccccccuaa

SEQ ID NO: 392374 - RNA, 32 nt, Homo Sapiens
auuccccucacagcugcacagcagcucggugc

SEQ ID NO: 392375 - RNA, 32 nt, Homo Sapiens
ucagugcccagggcuuuaaaaagaaugaacga

SEQ ID NO: 392376 - RNA, 32 nt, Homo Sapiens
auaaauuguaauuauuuuguguacaguucuau

SEQ ID NO: 392377 - RNA, 32 nt, Homo Sapiens
gcacuaggaaaugggagcacaguauugggaaa

SEQ ID NO: 392378 - RNA, 32 nt, Homo Sapiens
ggcucaagcugaugaaaauccaagaaaucuuc

SEQ ID NO: 392379 - RNA, 32 nt, Homo Sapiens
gggguggcgggcccgacagcggagggaggaga

SEQ ID NO: 392380 - RNA, 32 nt, Homo Sapiens
auugcacuuauuacagauucuuaugacaccau

SEQ ID NO: 392381 - RNA, 32 nt, Homo Sapiens
ccuugcccugaagugaggcgccagggaagcug

SEQ ID NO: 392382 - RNA, 32 nt, Homo Sapiens
uugaaauauaaaauaggauuuggaaccuuauu

SEQ ID NO: 392383 - RNA, 32 nt, Homo Sapiens
guucuuuugugcuuuuguauugugaauauuca

SEQ ID NO: 392384 - RNA, 30 nt, Homo Sapiens
gggcuggaugagcagagcgcccugaagcca

SEQ ID NO: 392385 - RNA, 32 nt, Homo Sapiens
gcucuuccuaccccaucccccauccccugaca

SEQ ID NO: 392386 - RNA, 32 nt, Homo Sapiens
auguguauauauauguguauauacauauauau

SEQ ID NO: 392387 - RNA, 30 nt, Homo Sapiens
cugagaccacuugggcucuguuuucucagc

SEQ ID NO: 392388 - RNA, 31 nt, Homo Sapiens
agccggcgggcgccccggccccgcgucuagu

SEQ ID NO: 392389 - RNA, 32 nt, Homo Sapiens
auaauauauaucaaguuuuuauuauuaauaug

SEQ ID NO: 392390 - RNA, 32 nt, Homo Sapiens
uuaauacaccuaauguauuaugcuggaguauu

SEQ ID NO: 392391 - RNA, 32 nt, Homo Sapiens
aguucuucgcggcuaacggcucgcgcucgggg

SEQ ID NO: 392392 - RNA, 32 nt, Homo Sapiens
uacgcccguccacagcagcacuggaucgccac

SEQ ID NO: 392393 - RNA, 32 nt, Homo Sapiens
cugccugugggucugaggaagggagaaggcag

SEQ ID NO: 392394 - RNA, 32 nt, Homo Sapiens
cuagaauuuauacuguuuuuuaucuuuaaugu

SEQ ID NO: 392395 - RNA, 32 nt, Homo Sapiens
ccaagcuucccucccccucuccuggggaucuu

SEQ ID NO: 392396 - RNA, 32 nt, Homo Sapiens
cggcgcagacucccaagccgccggcagcaggg

SEQ ID NO: 392397 - RNA, 32 nt, Homo Sapiens
acaguguucuggaaaucugugcauucguucuc

SEQ ID NO: 392398 - RNA, 32 nt, Homo Sapiens
aaugagccuaauucuuuuuuucuuuugggacu

SEQ ID NO: 392399 - RNA, 32 nt, Homo Sapiens
gccugccagacaccugcgcccuucugcagccg

SEQ ID NO: 392400 - RNA, 32 nt, Homo Sapiens
gccacugcacuccagucugggcgacagagcga

SEQ ID NO: 392401 - RNA, 32 nt, Homo Sapiens
cgucaaaaucuguaaaaucugcucuugcaugc

SEQ ID NO: 392402 - RNA, 32 nt, Homo Sapiens
agauucacgcacccucaagagugugggugaga

SEQ ID NO: 392403 - RNA, 32 nt, Homo Sapiens
acuuggggaccaggaggauuugaaaggcugca

SEQ ID NO: 392404 - RNA, 32 nt, Homo Sapiens
caagagaaccaaucauaacacuggauguauua

SEQ ID NO: 392405 - RNA, 32 nt, Homo Sapiens
gaauguugaugaugaugauauagaauuguggc

SEQ ID NO: 392406 - RNA, 32 nt, Homo Sapiens
ugcuagcagggccagguucauccuugagacag

SEQ ID NO: 392407 - RNA, 32 nt, Homo Sapiens
ccccggaggagcugggccagccgcccaccccc

SEQ ID NO: 392408 - RNA, 32 nt, Homo Sapiens
uucccuugccagcagcaccagccauucugaug

SEQ ID NO: 392409 - RNA, 32 nt, Homo Sapiens
augacgcuuguccagcaguuugcuucuuguga

SEQ ID NO: 392410 - RNA, 32 nt, Homo Sapiens
gaaguacgugaagcugcagaggccaaaaaaca

SEQ ID NO: 392411 - RNA, 32 nt, Homo Sapiens
uaauuugggaacacugauggggccuuggacag

SEQ ID NO: 392412 - RNA, 32 nt, Homo Sapiens
uucacuaaccaccuugaauuaaauuuauuucu

SEQ ID NO: 392413 - RNA, 32 nt, Homo Sapiens
agucacaugcuucccugguuuuagcacacaua

SEQ ID NO: 392414 - RNA, 31 nt, Homo Sapiens
gcagcccauggcagccaacuauaaugucuuc

SEQ ID NO: 392415 - RNA, 32 nt, Homo Sapiens
ucugggaggcgagggcucaggaacagccccuu

SEQ ID NO: 392416 - RNA, 32 nt, Homo Sapiens
uagcucuggcugugcuaucaauaaaaagauga

SEQ ID NO: 392417 - RNA, 32 nt, Homo Sapiens
gucccaaccggugccgccgccggagcuucucc

SEQ ID NO: 392418 - RNA, 32 nt, Homo Sapiens
ggaguggcuggagggagcagggggugggacag

SEQ ID NO: 392419 - RNA, 32 nt, Homo Sapiens
cucuggcugagcaggucugaccucaggggaag

SEQ ID NO: 392420 - RNA, 32 nt, Homo Sapiens
gaguuucucuucaaaucagggacgaagacaca

SEQ ID NO: 392421 - RNA, 32 nt, Homo Sapiens
uguugaggggguugcaagaauauuuuauuuua

SEQ ID NO: 392422 - RNA, 32 nt, Homo Sapiens
cugccuggggcaguguggaaugagauggucug

SEQ ID NO: 392423 - RNA, 32 nt, Homo Sapiens
uugcccuuuuugaugccccuucugccuuucuc

SEQ ID NO: 392424 - RNA, 32 nt, Homo Sapiens
cuagugucuuugucaugcgucucuggcccucg

SEQ ID NO: 392425 - RNA, 30 nt, Homo Sapiens
aaaggcauuuauaccacccauuuuauuuau

SEQ ID NO: 392426 - RNA, 32 nt, Homo Sapiens
guuuuuaaagauugggauaaauauguacuuau

SEQ ID NO: 392427 - RNA, 32 nt, Homo Sapiens
gcgucucugccuggcugcccauugucugggac

SEQ ID NO: 392428 - RNA, 32 nt, Homo Sapiens
agccucagccuggaugacuguuacccugaggc

SEQ ID NO: 392429 - RNA, 32 nt, Homo Sapiens
gaccgugucugucuuguccaccauaguauccc

SEQ ID NO: 392430 - RNA, 32 nt, Homo Sapiens
uuaaggcuuugugguuuuuagaguugcaucua

SEQ ID NO: 392431 - RNA, 32 nt, Homo Sapiens
uauucauauguaacaaaccugcacguugugca

SEQ ID NO: 392432 - RNA, 32 nt, Homo Sapiens
cuucccucccaguguagccuccugucaguggg

SEQ ID NO: 392433 - RNA, 32 nt, Homo Sapiens
cgggagaucccggccggagaagcgcccccauu

SEQ ID NO: 392434 - RNA, 28 nt, Homo Sapiens
aggcggcggcggccguggcggugaagcg

SEQ ID NO: 392435 - RNA, 32 nt, Homo Sapiens
gagaucagaaguggagauguuggggccaggca

SEQ ID NO: 392436 - RNA, 31 nt, Homo Sapiens
cucgggcaccgcagccaaacacccacugaca

SEQ ID NO: 392437 - RNA, 32 nt, Homo Sapiens
aagggggcagggguggggagggguggacaaug

SEQ ID NO: 392438 - RNA, 32 nt, Homo Sapiens
auuaccaaagauuguugguuaggccagauuga

SEQ ID NO: 392439 - RNA, 32 nt, Homo Sapiens
gcaagagggcagcugggauaugucuaugccau

SEQ ID NO: 392440 - RNA, 32 nt, Homo Sapiens
ggcauacucucaggcuuuucacuuccuuccuu

SEQ ID NO: 392441 - RNA, 32 nt, Homo Sapiens
gaacaucugccagcugugucauggacucacca

SEQ ID NO: 392442 - RNA, 32 nt, Homo Sapiens
cuucaugcaaaaaacuuggagugaagucucaa

SEQ ID NO: 392443 - RNA, 32 nt, Homo Sapiens
caaccucuuuaaaacaaacaaacaaacaaaca

SEQ ID NO: 392444 - RNA, 32 nt, Homo Sapiens
agcccgccaaaccccaccccagcccuacacag

SEQ ID NO: 392445 - RNA, 32 nt, Homo Sapiens
gcgucuggguggggcugcucggagcccgggcc

SEQ ID NO: 392446 - RNA, 32 nt, Homo Sapiens
ucuucguccgccguuagguugcggcugcugug

SEQ ID NO: 392447 - RNA, 32 nt, Homo Sapiens
gccuuccugcucgccgcaccuccgggagccgg

SEQ ID NO: 392448 - RNA, 32 nt, Homo Sapiens
uccucgcugggcucuuccuguccauguaccug

SEQ ID NO: 392449 - RNA, 32 nt, Homo Sapiens
uugucgaagauaaugacaguggagucccaguu

SEQ ID NO: 392450 - RNA, 30 nt, Homo Sapiens
caggaauagaguuuauacuuaaaauagcuu

SEQ ID NO: 392451 - RNA, 32 nt, Homo Sapiens
aggggacguguuggguuuuucuuccuuacacu

SEQ ID NO: 392452 - RNA, 32 nt, Homo Sapiens
agugggggucuuggaggcagggcugucccaca

SEQ ID NO: 392453 - RNA, 32 nt, Homo Sapiens
gaaggaaaaggacggacacaugcugaaaacgg

SEQ ID NO: 392454 - RNA, 32 nt, Homo Sapiens
uuaauacaugagucaguuuucuuuuuuccuuu

SEQ ID NO: 392455 - RNA, 32 nt, Homo Sapiens
gcuuuguguuaucugugaaacuccaaaacagg

SEQ ID NO: 392456 - RNA, 32 nt, Homo Sapiens
agugccaaacuccuccagggcagcaacuggcc

SEQ ID NO: 392457 - RNA, 32 nt, Homo Sapiens
accauaaugucauccuacucuacauuucacaa

SEQ ID NO: 392458 - RNA, 32 nt, Homo Sapiens
gaugaaggacaaagaccagggcaggucacggg

SEQ ID NO: 392459 - RNA, 32 nt, Homo Sapiens
agcagcaggggaagaggugcucucagagacag

SEQ ID NO: 392460 - RNA, 32 nt, Homo Sapiens
aaauuuaucucacaauaaguuaacuugcgcaa

SEQ ID NO: 392461 - RNA, 32 nt, Homo Sapiens
acaaaauuguuuugcuuuuaucaaauacuuua

SEQ ID NO: 392462 - RNA, 32 nt, Homo Sapiens
ggaggggggaggagguaccucccucucccucu

SEQ ID NO: 392463 - RNA, 32 nt, Homo Sapiens
gaaauuuccgccgacccuucgcucccggcucu

SEQ ID NO: 392464 - RNA, 32 nt, Homo Sapiens
gacgugucggggguccggggccugucgcgguu

SEQ ID NO: 392465 - RNA, 32 nt, Homo Sapiens
cgguggcagagcucgugggauuccugcugcuc

SEQ ID NO: 392466 - RNA, 32 nt, Homo Sapiens
ccugccgccccuccccgccugccuggacugcg

SEQ ID NO: 392467 - RNA, 29 nt, Homo Sapiens
ugauauuuuuguuucaguuggcaauugau

SEQ ID NO: 392468 - RNA, 32 nt, Homo Sapiens
uagucauuuuuauaaccuuguuuacuuggauu

SEQ ID NO: 392469 - RNA, 32 nt, Homo Sapiens
gcauugccuugagcugggaccccuagaaaugg

SEQ ID NO: 392470 - RNA, 32 nt, Homo Sapiens
gacuuugucaaacagcucuuugugccccuauc

SEQ ID NO: 392471 - RNA, 32 nt, Homo Sapiens
cauccccgcgccccagagccccggccugcgcg

SEQ ID NO: 392472 - RNA, 32 nt, Homo Sapiens
agaaagcagagcugcguaaaguuaccccgggg

SEQ ID NO: 392473 - RNA, 32 nt, Homo Sapiens
auuuuuucuaaaguuaaauuuagugcacucug

SEQ ID NO: 392474 - RNA, 32 nt, Homo Sapiens
gguccccgugacucauccaaacucccuuauau

SEQ ID NO: 392475 - RNA, 32 nt, Homo Sapiens
cuuugcuuacacaauuauccagguaaaaagac

SEQ ID NO: 392476 - RNA, 32 nt, Homo Sapiens
uuuguguuguguauauauacaugagguugaac

SEQ ID NO: 392477 - RNA, 32 nt, Homo Sapiens
gauggggaggggcucugcguuggcuucucccu

SEQ ID NO: 392478 - RNA, 32 nt, Homo Sapiens
caugccgcgggcuaggucgggcccgugcaggc

SEQ ID NO: 392479 - RNA, 32 nt, Homo Sapiens
uuuagagaaaauaaagacugcauucaucucaa

SEQ ID NO: 392480 - RNA, 32 nt, Homo Sapiens
uucuggcugagguucugagggcaccgagacag

SEQ ID NO: 392481 - RNA, 32 nt, Homo Sapiens
guccagagagaagcagcagagagaggcgcugg

SEQ ID NO: 392482 - RNA, 32 nt, Homo Sapiens
ccgagugcucugcgcccagcgcaccgagggag

SEQ ID NO: 392483 - RNA, 32 nt, Homo Sapiens
acguuucuuuucauuacuuuuaucugugagcu

SEQ ID NO: 392484 - RNA, 32 nt, Homo Sapiens
caacagcgugcgagcucagaucagcguggggu

SEQ ID NO: 392485 - RNA, 32 nt, Homo Sapiens
cuuucacuaauuuuuggcagaguucacaaucc

SEQ ID NO: 392486 - RNA, 32 nt, Homo Sapiens
acccccaggaggaggggagggugggagcgccu

SEQ ID NO: 392487 - RNA, 32 nt, Homo Sapiens
acaaaugucuucugccucucucucguuucuuc

SEQ ID NO: 392488 - RNA, 31 nt, Homo Sapiens
uauccccaagccacaccaucuggcuaaaugg

SEQ ID NO: 392489 - RNA, 32 nt, Homo Sapiens
uuagugccucaaaaaacaccuauuuugagucu

SEQ ID NO: 392490 - RNA, 32 nt, Homo Sapiens
auuuuggaauuuauuucuuuaaaaauaaugca

SEQ ID NO: 392491 - RNA, 32 nt, Homo Sapiens
uaaagauguuccccauggguuuugauuguguc

SEQ ID NO: 392492 - RNA, 32 nt, Homo Sapiens
cuacuuuuauauuauaaauguguguuacuguc

SEQ ID NO: 392493 - RNA, 32 nt, Homo Sapiens
cauccugagacuguucuacaguuucuuugacu

SEQ ID NO: 392494 - RNA, 32 nt, Homo Sapiens
ccuuccaaugccuaagugucuuucuccugcaa

SEQ ID NO: 392495 - RNA, 32 nt, Homo Sapiens
caaggucgugcagcugccgagccgaaaaacga

SEQ ID NO: 392496 - RNA, 32 nt, Homo Sapiens
caggugaggagggggcggggcaggaccgaccu

SEQ ID NO: 392497 - RNA, 32 nt, Homo Sapiens
ucccuagccaccgcggccccacccucuuccgg

SEQ ID NO: 392498 - RNA, 32 nt, Homo Sapiens
gugcugagugaaagauuugcugcccaccucua

SEQ ID NO: 392499 - RNA, 32 nt, Homo Sapiens
augcaggagaaaucgaauuggaguauagaaaa

SEQ ID NO: 392500 - RNA, 32 nt, Homo Sapiens
accuggcuggcugagcccggcgcagcagcagc

SEQ ID NO: 392501 - RNA, 32 nt, Homo Sapiens
agggaccugccagccggagagaugacugauua

SEQ ID NO: 392502 - RNA, 32 nt, Homo Sapiens
gucagaaaucuggguuucauucuugcgguagg

SEQ ID NO: 392503 - RNA, 32 nt, Homo Sapiens
aacgacuuuacuaccugcagaccugcacuaua

SEQ ID NO: 392504 - RNA, 32 nt, Homo Sapiens
ccaauucacugacagugcuuugcaaugaaaaa

SEQ ID NO: 392505 - RNA, 32 nt, Homo Sapiens
ggggugaaauuuuauuugaaaaguuuggcuuu

SEQ ID NO: 392506 - RNA, 32 nt, Homo Sapiens
aaauccacaauuugaugguaaauauauacauu

SEQ ID NO: 392507 - RNA, 32 nt, Homo Sapiens
gggaagguauugaacgcuccucacccugugcc

SEQ ID NO: 392508 - RNA, 32 nt, Homo Sapiens
ccaccgcacgcacgccggaucccgggcuuuac

SEQ ID NO: 392509 - RNA, 32 nt, Homo Sapiens
aguaaugcuucuauuucuuuugacaaauugaa

SEQ ID NO: 392510 - RNA, 32 nt, Homo Sapiens
gcgccugcacgcugugcuugccacggaguaaa

SEQ ID NO: 392511 - RNA, 32 nt, Homo Sapiens
gauaauccccugucccccuccuccuccccacu

SEQ ID NO: 392512 - RNA, 32 nt, Homo Sapiens
gauguccauuaaaaguagaaaaauauuuggga

SEQ ID NO: 392513 - RNA, 32 nt, Homo Sapiens
acugcuaaaagcugguuagauggaacagaaaa

SEQ ID NO: 392514 - RNA, 32 nt, Homo Sapiens
ucacgugcuguaaaauaagaacuagcugaaga

SEQ ID NO: 392515 - RNA, 32 nt, Homo Sapiens
uaaaugucaacaguacuucuaagaacguugcc

SEQ ID NO: 392516 - RNA, 30 nt, Homo Sapiens
ucuggcaggccgugcggcgcccugacccgg

SEQ ID NO: 392517 - RNA, 32 nt, Homo Sapiens
aaguggaagaaccuuaagcugaagguacagua

SEQ ID NO: 392518 - RNA, 32 nt, Homo Sapiens
uuuuugcguguucugcuucuguaaaaauugcu

SEQ ID NO: 392519 - RNA, 32 nt, Homo Sapiens
aggaucacuugagcgcaggaauuuaaggcugc

SEQ ID NO: 392520 - RNA, 32 nt, Homo Sapiens
ucuguuucucucccggccccacugccuucagg

SEQ ID NO: 392521 - RNA, 31 nt, Homo Sapiens
acaaagauaaagaaaauguugccuuuuucua

SEQ ID NO: 392522 - RNA, 32 nt, Homo Sapiens
cggcugcuccccgguggcccaggccucggacu

SEQ ID NO: 392523 - RNA, 32 nt, Homo Sapiens
ccggaggaugagggaaauaagauguguccauu

SEQ ID NO: 392524 - RNA, 32 nt, Homo Sapiens
ccccacaaauaaauuaucagguuaaacuuuca

SEQ ID NO: 392525 - RNA, 32 nt, Homo Sapiens
gcuuugguggauaggugcuggcacuauuuuca

SEQ ID NO: 392526 - RNA, 32 nt, Homo Sapiens
uccgacagaaaagcucagggcgggucuucucc

SEQ ID NO: 392527 - RNA, 32 nt, Homo Sapiens
agagaggucaguaggacuggaacuugguaacu

SEQ ID NO: 392528 - RNA, 32 nt, Homo Sapiens
ucaugcuucuuuucuuuuuauccccaaaguuu

SEQ ID NO: 392529 - RNA, 32 nt, Homo Sapiens
ugaauacuugaauaaaccauucaccaauuuua

SEQ ID NO: 392530 - RNA, 32 nt, Homo Sapiens
aucuuagaguauaaaaagccaaaggucaaagu

SEQ ID NO: 392531 - RNA, 32 nt, Homo Sapiens
cacucauccagccccagaucugagccuugacg

SEQ ID NO: 392532 - RNA, 32 nt, Homo Sapiens
gugggcaggcagggacuguggcagcuuauguc

SEQ ID NO: 392533 - RNA, 32 nt, Homo Sapiens
uauuuugaucuauuugauaauuuuguggguuu

SEQ ID NO: 392534 - RNA, 32 nt, Homo Sapiens
uuuuaaucuuaaacacauccagcaaauggugu

SEQ ID NO: 392535 - RNA, 32 nt, Homo Sapiens
caugccccaguaagcuuccaccguauuccgug

SEQ ID NO: 392536 - RNA, 32 nt, Homo Sapiens
agccagggauccccggcuuugccccggggcug

SEQ ID NO: 392537 - RNA, 32 nt, Homo Sapiens
aaccguggagguugcccacgggccucggcacc

SEQ ID NO: 392538 - RNA, 32 nt, Homo Sapiens
agagacacagaaagguaauccaagagggcuuu

SEQ ID NO: 392539 - RNA, 32 nt, Homo Sapiens
ugaggaaaagugaaacaagugaucugguuuua

SEQ ID NO: 392540 - RNA, 32 nt, Homo Sapiens
guuuuuaccacuguacuccaaccccguuuuua

SEQ ID NO: 392541 - RNA, 32 nt, Homo Sapiens
ucuacuaaaaauacaaaaauuaguugggcaug

SEQ ID NO: 392542 - RNA, 32 nt, Homo Sapiens
guacuguguucgcugcugcacagcaaggcccu

SEQ ID NO: 392543 - RNA, 32 nt, Homo Sapiens
gaaauuuauacaccaauugauuuuaaaccaua

SEQ ID NO: 392544 - RNA, 32 nt, Homo Sapiens
uuggccacucauauuacaauagcaacagacau

SEQ ID NO: 392545 - RNA, 32 nt, Homo Sapiens
gcuucaaaggauugguggagacuaugcauggu

SEQ ID NO: 392546 - RNA, 32 nt, Homo Sapiens
ggccagccaagagcauuuguagucuggugaca

SEQ ID NO: 392547 - RNA, 32 nt, Homo Sapiens
uccgcugcucgccggcggccgcccggucaugu

SEQ ID NO: 392548 - RNA, 32 nt, Homo Sapiens
aggauaucacagagaaggcaaguuugaauuca

SEQ ID NO: 392549 - RNA, 32 nt, Homo Sapiens
gggcgggcgguauagagcgggcggcaggaggc

SEQ ID NO: 392550 - RNA, 32 nt, Homo Sapiens
gcgucucgaaggccugcacgggcccagccucg

SEQ ID NO: 392551 - RNA, 32 nt, Homo Sapiens
ggguuccaaaguugaggccuagguuuuugcug

SEQ ID NO: 392552 - RNA, 32 nt, Homo Sapiens
caggaggacgcuccugugcugcugaccaacac

SEQ ID NO: 392553 - RNA, 32 nt, Homo Sapiens
ggaaccgacaugacccacucuuugguuugucc

SEQ ID NO: 392554 - RNA, 32 nt, Homo Sapiens
ugaauguggguaaugugggagagccuucagcc

SEQ ID NO: 392555 - RNA, 32 nt, Homo Sapiens
gggagcugcccccaguggacaccaaugaaccc

SEQ ID NO: 392556 - RNA, 32 nt, Homo Sapiens
gcaccugccauuuagagcugcugaacucccag

SEQ ID NO: 392557 - RNA, 32 nt, Homo Sapiens
uguuuuuugugaucauucuuagcuaccugugc

SEQ ID NO: 392558 - RNA, 32 nt, Homo Sapiens
guacaguuuaugaagcacuuucauacgcaggc

SEQ ID NO: 392559 - RNA, 32 nt, Homo Sapiens
ggggcccagcaugacguggaggcgcugggggg

SEQ ID NO: 392560 - RNA, 32 nt, Homo Sapiens
aaagaaaaugucauuuuagacaauuaaaauau

SEQ ID NO: 392561 - RNA, 32 nt, Homo Sapiens
caaccuggauguuuucuuucuccucuuugcuu

SEQ ID NO: 392562 - RNA, 32 nt, Homo Sapiens
uggagcuuugugcucagccugaggucagaugu

SEQ ID NO: 392563 - RNA, 32 nt, Homo Sapiens
cauagcaguuauuucuugggguaaaugcuuug

SEQ ID NO: 392564 - RNA, 32 nt, Homo Sapiens
uaaaacuuucuuucuucuuuucuauuuuuaaa

SEQ ID NO: 392565 - RNA, 32 nt, Homo Sapiens
auuuuucuaaucuugguucagcaugaaguggu

SEQ ID NO: 392566 - RNA, 30 nt, Homo Sapiens
ugcuuugucuguguuuugagucugcuuucu

SEQ ID NO: 392567 - RNA, 32 nt, Homo Sapiens
gguaaauugaacgacaauguggcauuagguau

SEQ ID NO: 392568 - RNA, 32 nt, Homo Sapiens
cugcccucuaacaucggacuccagguucuuca

SEQ ID NO: 392569 - RNA, 32 nt, Homo Sapiens
aagaaagcuguuauuagccugaugaaugugaa

SEQ ID NO: 392570 - RNA, 32 nt, Homo Sapiens
auugccuccauucuccucucucuaucccugaa

SEQ ID NO: 392571 - RNA, 32 nt, Homo Sapiens
ugcugcuccugaagccucuccuccugcuuccg

SEQ ID NO: 392572 - RNA, 32 nt, Homo Sapiens
uguuguuuuuuaaaggugugaacucuaaaucu

SEQ ID NO: 392573 - RNA, 32 nt, Homo Sapiens
acuccgccccucccccucccccucgaacaaau

SEQ ID NO: 392574 - RNA, 32 nt, Homo Sapiens
gucuggaaccccgaguauuaaggucuggagac

SEQ ID NO: 392575 - RNA, 32 nt, Homo Sapiens
gaagauauuucugaaagaccagcucuaaguag

SEQ ID NO: 392576 - RNA, 32 nt, Homo Sapiens
gcuuuaaauugucuccaaauucuuaaaauuag

SEQ ID NO: 392577 - RNA, 32 nt, Homo Sapiens
cgauacggcaaccaccacggaccuguggggac

SEQ ID NO: 392578 - RNA, 29 nt, Homo Sapiens
ggcccagaguccuucagaggcaagucugg

SEQ ID NO: 392579 - RNA, 32 nt, Homo Sapiens
ugacucagacugcauucuccacuucuuguucc

SEQ ID NO: 392580 - RNA, 32 nt, Homo Sapiens
guccucuguccugccagcaccgagggcucauc

SEQ ID NO: 392581 - RNA, 32 nt, Homo Sapiens
ugugcuucaaacuacuacuggaccuuauuuug

SEQ ID NO: 392582 - RNA, 32 nt, Homo Sapiens
gcaucccuccccaaauaaaggcuuauguacug

SEQ ID NO: 392583 - RNA, 32 nt, Homo Sapiens
ucaaaaauaagcuagaauauauuaaagaaaau

SEQ ID NO: 392584 - RNA, 32 nt, Homo Sapiens
caucagccuacacagacacacacacacacaca

SEQ ID NO: 392585 - RNA, 32 nt, Homo Sapiens
guuaccuccaaauaugaaaaucuauaacaacc

SEQ ID NO: 392586 - RNA, 32 nt, Homo Sapiens
gcuuguccggugcuaggucauccugccaaaca

SEQ ID NO: 392587 - RNA, 32 nt, Homo Sapiens
cugacagcaaaauaaaggucugauauguuggc

SEQ ID NO: 392588 - RNA, 32 nt, Homo Sapiens
gccagugccuggcuauggcccgacugcucagg

SEQ ID NO: 392589 - RNA, 32 nt, Homo Sapiens
gucagggucccaaguguccgggcccccagcua

SEQ ID NO: 392590 - RNA, 32 nt, Homo Sapiens
ccaguggagcccaacuuccaaaggucaauaug

SEQ ID NO: 392591 - RNA, 32 nt, Homo Sapiens
ugacuggggcuuuggggaagggcucuggcucu

SEQ ID NO: 392592 - RNA, 32 nt, Homo Sapiens
ucugccugccagcugcacugaugcugccccuc

SEQ ID NO: 392593 - RNA, 32 nt, Homo Sapiens
cagcgggaaggggagugguggucucacaauac

SEQ ID NO: 392594 - RNA, 32 nt, Homo Sapiens
aacauuggggcaauuuaauaacagcauuaaaa

SEQ ID NO: 392595 - RNA, 32 nt, Homo Sapiens
cauggaggcccugcccggggcuggggccuagu

SEQ ID NO: 392596 - RNA, 32 nt, Homo Sapiens
aaaaauccccacuuugcaauugcaucugguca

SEQ ID NO: 392597 - RNA, 32 nt, Homo Sapiens
auuucucaggacuugacuccuggccuugguuu

SEQ ID NO: 392598 - RNA, 32 nt, Homo Sapiens
acucuuuacccucacuaacaaaacugggcaaa

SEQ ID NO: 392599 - RNA, 32 nt, Homo Sapiens
gguccggggaggagguucgggauucccuggug

SEQ ID NO: 392600 - RNA, 32 nt, Homo Sapiens
gccagcugacuggcagagggguuguggcuguu

SEQ ID NO: 392601 - RNA, 32 nt, Homo Sapiens
cgccgcgccgugccggcaccgggcugcaggau

SEQ ID NO: 392602 - RNA, 32 nt, Homo Sapiens
acccuugugggaauuauguaauauuuauuaau

SEQ ID NO: 392603 - RNA, 32 nt, Homo Sapiens
guuggccuuugaccacgguuccuggaguagaa

SEQ ID NO: 392604 - RNA, 32 nt, Homo Sapiens
cuccggagacacaagcccacguaucuacuuuc

SEQ ID NO: 392605 - RNA, 32 nt, Homo Sapiens
guggcccugcacccucgccugcucguggaagg

SEQ ID NO: 392606 - RNA, 32 nt, Homo Sapiens
cuccugucacaugcugacguuggacuuagcag

SEQ ID NO: 392607 - RNA, 32 nt, Homo Sapiens
gcagcucucgcacucaaucccgccacacccag

SEQ ID NO: 392608 - RNA, 32 nt, Homo Sapiens
cgguuuuguagguagaggaauaaaaugaaaua

SEQ ID NO: 392609 - RNA, 32 nt, Homo Sapiens
acucguccccaccgcccgcccggggcuaggga

SEQ ID NO: 392610 - RNA, 32 nt, Homo Sapiens
uaagcugcguucccugggcugauuccaggcug

SEQ ID NO: 392611 - RNA, 32 nt, Homo Sapiens
gcauguguguggcacagauggcugggacgggu

SEQ ID NO: 392612 - RNA, 32 nt, Homo Sapiens
cucgagacgcacaugcacgccugggcguggca

SEQ ID NO: 392613 - RNA, 32 nt, Homo Sapiens
uacuuuuguguaauaauaaaaauacugcugua

SEQ ID NO: 392614 - RNA, 32 nt, Homo Sapiens
uugccaauacccguggauugggcuugucucag

SEQ ID NO: 392615 - RNA, 32 nt, Homo Sapiens
gcugcgcugaggucccauccacagcuggugcu

SEQ ID NO: 392616 - RNA, 32 nt, Homo Sapiens
cuuucgcgacugcugcugcugcugcccggacg

SEQ ID NO: 392617 - RNA, 32 nt, Homo Sapiens
auaaggauaagaacaaagauaaaccaggauga

SEQ ID NO: 392618 - RNA, 32 nt, Homo Sapiens
uggggggcagggccagcucuacgguuacaugc

SEQ ID NO: 392619 - RNA, 32 nt, Homo Sapiens
acagcuggggacggguggcggcccucgacugg

SEQ ID NO: 392620 - RNA, 32 nt, Homo Sapiens
cccgagacccucacuaucuccugcaggguguc

SEQ ID NO: 392621 - RNA, 32 nt, Homo Sapiens
ugccacucgcuuuaaccuaucccaccuuacuc

SEQ ID NO: 392622 - RNA, 32 nt, Homo Sapiens
caguuuugucuuccaauacuuugugagucugg

SEQ ID NO: 392623 - RNA, 32 nt, Homo Sapiens
auuaauguuucaugauuucuaccuccaaagug

SEQ ID NO: 392624 - RNA, 32 nt, Homo Sapiens
uugcuagagucuuccuuugucagccaggcugg

SEQ ID NO: 392625 - RNA, 32 nt, Homo Sapiens
ugcgcccucccgagacuauauaucauugucuu

SEQ ID NO: 392626 - RNA, 32 nt, Homo Sapiens
gacacagcuuugcacugcacucguggcuuauc

SEQ ID NO: 392627 - RNA, 30 nt, Homo Sapiens
gcguggccauacccugccucccucucuggc

SEQ ID NO: 392628 - RNA, 32 nt, Homo Sapiens
gguagaagagaaaggaauauuuuaaaccuuuu

SEQ ID NO: 392629 - RNA, 29 nt, Homo Sapiens
uuauagaaguguuucaaggcuaguaaaau

SEQ ID NO: 392630 - RNA, 32 nt, Homo Sapiens
cacugugcacccagcccuccaugcuuggggac

SEQ ID NO: 392631 - RNA, 32 nt, Homo Sapiens
gcgcggccauggaccccgcgucguccggcccg

SEQ ID NO: 392632 - RNA, 32 nt, Homo Sapiens
uuuucuuacacacuaaauggguauuuguucaa

SEQ ID NO: 392633 - RNA, 32 nt, Homo Sapiens
auuccacugaaguucugaaaucuuucaucaug

SEQ ID NO: 392634 - RNA, 32 nt, Homo Sapiens
guuucuuuuggcuugguuuggaccacaguccu

SEQ ID NO: 392635 - RNA, 32 nt, Homo Sapiens
ucugucauauuucaaaauacacuuaaaacuca

SEQ ID NO: 392636 - RNA, 32 nt, Homo Sapiens
caucuucuaugaaaaauaaaugauuauuaggc

SEQ ID NO: 392637 - RNA, 32 nt, Homo Sapiens
uuccaaacuuugccuuuuuuuuuuuuuuuuuu

SEQ ID NO: 392638 - RNA, 32 nt, Homo Sapiens
acaggugccagggcuccugccugcuccuccug

SEQ ID NO: 392639 - RNA, 32 nt, Homo Sapiens
uccuggagcaggauuguagaaacuaacagugu

SEQ ID NO: 392640 - RNA, 32 nt, Homo Sapiens
cuaaucugucauuguuuuuaccuuccuuuucu

SEQ ID NO: 392641 - RNA, 32 nt, Homo Sapiens
aaaccuuagccauuuucuggaacuuaaauauc

SEQ ID NO: 392642 - RNA, 32 nt, Homo Sapiens
ggaggccguggcgggcggaucaggaggucagg

SEQ ID NO: 392643 - RNA, 32 nt, Homo Sapiens
uaagcuuagaaaguaagcaaaacugauuuacu

SEQ ID NO: 392644 - RNA, 32 nt, Homo Sapiens
cagaaucguauaaagcacuuugguacuuauuu

SEQ ID NO: 392645 - RNA, 32 nt, Homo Sapiens
agaaaacuauuuacaaaaauuccacauaucag

SEQ ID NO: 392646 - RNA, 32 nt, Homo Sapiens
gagcuaagggaagggcaaaaggcucagauaug

SEQ ID NO: 392647 - RNA, 30 nt, Homo Sapiens
cgauugggaggugguagaagcacugaauga

SEQ ID NO: 392648 - RNA, 32 nt, Homo Sapiens
cacagucaccgcaggugcaggcaggaagcagc

SEQ ID NO: 392649 - RNA, 32 nt, Homo Sapiens
uuucccucaucuugcccccucaucucacugcc

SEQ ID NO: 392650 - RNA, 32 nt, Homo Sapiens
uggcgguggcggcggcggcagcuucgcgccga

SEQ ID NO: 392651 - RNA, 32 nt, Homo Sapiens
uggcaugccggggcuccguaggagguuugcua

SEQ ID NO: 392652 - RNA, 32 nt, Homo Sapiens
agggccugccugcugcucucggccugacacgc

SEQ ID NO: 392653 - RNA, 32 nt, Homo Sapiens
gcggaaccucgcgcuccgacucgccccccgcc

SEQ ID NO: 392654 - RNA, 30 nt, Homo Sapiens
ccgcuaaccaugcugccgccgccgcggccc

SEQ ID NO: 392655 - RNA, 28 nt, Homo Sapiens
agaguugguugugguauguguuugaugc

SEQ ID NO: 392656 - RNA, 32 nt, Homo Sapiens
ggaggaagggucacugcugucuccggaagcuc

SEQ ID NO: 392657 - RNA, 32 nt, Homo Sapiens
aacccuccuaaaacaacuuaugaugauuuuuc

SEQ ID NO: 392658 - RNA, 32 nt, Homo Sapiens
agaagaugaagauaaggaaaagaaaaggccau

SEQ ID NO: 392659 - RNA, 32 nt, Homo Sapiens
uucuuaucaucacuuuuugucuuuucuuguuu

SEQ ID NO: 392660 - RNA, 32 nt, Homo Sapiens
uccuaaaacaccugguaggagugugugauuuu

SEQ ID NO: 392661 - RNA, 32 nt, Homo Sapiens
ccggccaagaauuuuuuguauuuuuaguagag

SEQ ID NO: 392662 - RNA, 32 nt, Homo Sapiens
caaagagaauuguuauuuuaaaguaccuuuuu

SEQ ID NO: 392663 - RNA, 32 nt, Homo Sapiens
ugacagggcuggagacugugucugcuuucugc

SEQ ID NO: 392664 - RNA, 29 nt, Homo Sapiens
acccuaugaaaguggaauuuucuaacaaa

SEQ ID NO: 392665 - RNA, 32 nt, Homo Sapiens
gggaccguuuccccccucuuccuucacaguau

SEQ ID NO: 392666 - RNA, 32 nt, Homo Sapiens
auucuguacuaaaaucuauaauaaagcuuuuc

SEQ ID NO: 392667 - RNA, 32 nt, Homo Sapiens
ggcugcgcccccugcuggcccugaggcugcag

SEQ ID NO: 392668 - RNA, 32 nt, Homo Sapiens
ggcagggauucacgggcgcacacacacacacu

SEQ ID NO: 392669 - RNA, 31 nt, Homo Sapiens
uccgccgugacccggaaguccacuucgaguc

SEQ ID NO: 392670 - RNA, 32 nt, Homo Sapiens
acuaggucaggagaucgagaccauccuggcua

SEQ ID NO: 392671 - RNA, 29 nt, Homo Sapiens
uauaaaaagccuguauauuuuuuaaaaac

SEQ ID NO: 392672 - RNA, 32 nt, Homo Sapiens
cuguguuagugaaagcacauggaagguguugc

SEQ ID NO: 392673 - RNA, 32 nt, Homo Sapiens
gaaaggcucuccuugcagcugcuuagacgcug

SEQ ID NO: 392674 - RNA, 29 nt, Homo Sapiens
acaugugugacuuucaugcuucugggguu

SEQ ID NO: 392675 - RNA, 32 nt, Homo Sapiens
uggcucacaccuguaauuucagcacucugggg

SEQ ID NO: 392676 - RNA, 32 nt, Homo Sapiens
gaggacgcuagagaaagugcugagugucccga

SEQ ID NO: 392677 - RNA, 32 nt, Homo Sapiens
cuccgucauccaugcccucccaggacccucca

SEQ ID NO: 392678 - RNA, 32 nt, Homo Sapiens
ggccuaggagcccgccuagcccggcccagccc

SEQ ID NO: 392679 - RNA, 32 nt, Homo Sapiens
aaagauguuuauuuuccuuaagaguaaaaaac

SEQ ID NO: 392680 - RNA, 32 nt, Homo Sapiens
caggaagaaaaaaggguauauggcagaugggu

SEQ ID NO: 392681 - RNA, 32 nt, Homo Sapiens
auuauucuccaaguugagagauguccuugggu

SEQ ID NO: 392682 - RNA, 32 nt, Homo Sapiens
guauacacuaucuggugaaacuuggauucuuu

SEQ ID NO: 392683 - RNA, 32 nt, Homo Sapiens
ccagaagggagggaaacugaaaaagaaucagg

SEQ ID NO: 392684 - RNA, 32 nt, Homo Sapiens
caguggggcaggccucgcugcagaaugcccag

SEQ ID NO: 392685 - RNA, 32 nt, Homo Sapiens
uaucuaaauagugacugcuuugccauuucauu

SEQ ID NO: 392686 - RNA, 32 nt, Homo Sapiens
cuggaucucgccuucccggcguggggcgcagg

SEQ ID NO: 392687 - RNA, 32 nt, Homo Sapiens
agguuuucuaugucuucaagcacuauaucaua

SEQ ID NO: 392688 - RNA, 32 nt, Homo Sapiens
gggagugacaccacugaugccacagaagccuu

SEQ ID NO: 392689 - RNA, 32 nt, Homo Sapiens
gugggaccggucgcuccgcccugcugcgcaga

SEQ ID NO: 392690 - RNA, 32 nt, Homo Sapiens
cacgcagcgcgcgcccuuggaugccgucccgc

SEQ ID NO: 392691 - RNA, 32 nt, Homo Sapiens
gguacacuaauucucacucaaauauuuucaug

SEQ ID NO: 392692 - RNA, 32 nt, Homo Sapiens
agaagauuguucucaucaccaaguaccuuguc

SEQ ID NO: 392693 - RNA, 31 nt, Homo Sapiens
ugauagacugggucgugugugagacgcaugu

SEQ ID NO: 392694 - RNA, 32 nt, Homo Sapiens
auccacauuauaaacauagaucaaaauaccac

SEQ ID NO: 392695 - RNA, 32 nt, Homo Sapiens
ugcccugcuuuggucccagagaggcccucugc

SEQ ID NO: 392696 - RNA, 32 nt, Homo Sapiens
aacacauuucugguuuauaaucuccuuuuaug

SEQ ID NO: 392697 - RNA, 32 nt, Homo Sapiens
cccccagcucuucccacacguguguuaggaaa

SEQ ID NO: 392698 - RNA, 32 nt, Homo Sapiens
agaggcauuaaguauugccucagucuuaauau

SEQ ID NO: 392699 - RNA, 32 nt, Homo Sapiens
cuguuaaaaaaauuauauaauacagaagcaca

SEQ ID NO: 392700 - RNA, 32 nt, Homo Sapiens
aacuuuuguaaaaauuaaauuuggaauuacuu

SEQ ID NO: 392701 - RNA, 32 nt, Homo Sapiens
ccugggugccagcagcccugcugccauguuca

SEQ ID NO: 392702 - RNA, 32 nt, Homo Sapiens
gaacuguaaaagaucaaguaugcuaauuuuaa

SEQ ID NO: 392703 - RNA, 32 nt, Homo Sapiens
acuccagcgguugccuuuuuuaucauuucuac

SEQ ID NO: 392704 - RNA, 29 nt, Homo Sapiens
ggaagccugggucacagaggcagguacca

SEQ ID NO: 392705 - RNA, 31 nt, Homo Sapiens
uugacuuccuucauuucccuaacugaaauac

SEQ ID NO: 392706 - RNA, 32 nt, Homo Sapiens
ggcacguggcccaggcgucuccugucaauccg

SEQ ID NO: 392707 - RNA, 32 nt, Homo Sapiens
uuuuuaaaacacaacuuuuaaaaaauguauca

SEQ ID NO: 392708 - RNA, 32 nt, Homo Sapiens
cagccccaggacucaguacugcgguugccaac

SEQ ID NO: 392709 - RNA, 32 nt, Homo Sapiens
ccacaggcgucacucaaggagucugcauagcc

SEQ ID NO: 392710 - RNA, 32 nt, Homo Sapiens
aggcggcccgcgcugacggugucccuggggcu

SEQ ID NO: 392711 - RNA, 32 nt, Homo Sapiens
acugugacauccugcacccauccucaccccuc

SEQ ID NO: 392712 - RNA, 32 nt, Homo Sapiens
auugaagucugaaaaggaaguaguuauuuuag

SEQ ID NO: 392713 - RNA, 32 nt, Homo Sapiens
cucggccagcugccuccagggaccgcccgucc

SEQ ID NO: 392714 - RNA, 32 nt, Homo Sapiens
uuguguauaguuucuaucauuuauuuuuccac

SEQ ID NO: 392715 - RNA, 32 nt, Homo Sapiens
agugccaaauccccggcuccagcucccgacuc

SEQ ID NO: 392716 - RNA, 32 nt, Homo Sapiens
gccccccgcgcacggacccccauuacacucgc

SEQ ID NO: 392717 - RNA, 32 nt, Homo Sapiens
cguacagcccaguccacgaagggcgccacggg

SEQ ID NO: 392718 - RNA, 32 nt, Homo Sapiens
gccagcagggcaaggcagcuccccucaauaga

SEQ ID NO: 392719 - RNA, 32 nt, Homo Sapiens
gccgcuuucuccgcgcggugccugcagggcuc

SEQ ID NO: 392720 - RNA, 32 nt, Homo Sapiens
uucugcugaacgacuuuuaacuuucauugucu

SEQ ID NO: 392721 - RNA, 32 nt, Homo Sapiens
ugggggaggggaggauacaguucaggauaccc

SEQ ID NO: 392722 - RNA, 32 nt, Homo Sapiens
uccucuuaagguuuccucuacaaccccaagga

SEQ ID NO: 392723 - RNA, 32 nt, Homo Sapiens
acuuucuugggguucuggccaugcacuucuua

SEQ ID NO: 392724 - RNA, 30 nt, Homo Sapiens
gacgugggcgggcgcgcgugagcucgggcu

SEQ ID NO: 392725 - RNA, 32 nt, Homo Sapiens
ugaccucccugggaccccggcgucugaggcuc

SEQ ID NO: 392726 - RNA, 32 nt, Homo Sapiens
ugaccagucugugccuaggaaugucuuggaau

SEQ ID NO: 392727 - RNA, 32 nt, Homo Sapiens
ugaagauauaaaacccuagaaugcuuaaaugu

SEQ ID NO: 392728 - RNA, 32 nt, Homo Sapiens
auugugcugccuuuaauaaaauuugagugaug

SEQ ID NO: 392729 - RNA, 32 nt, Homo Sapiens
ccacccuguccuuuccucuacacugggaaccg

SEQ ID NO: 392730 - RNA, 32 nt, Homo Sapiens
ccacgcccggcuaauuuuguauuuucagucga

SEQ ID NO: 392731 - RNA, 32 nt, Homo Sapiens
ggacgcugaaauaguucagccggugcaggcuc

SEQ ID NO: 392732 - RNA, 32 nt, Homo Sapiens
acccacccacccaaagagccaaagaauaguuc

SEQ ID NO: 392733 - RNA, 32 nt, Homo Sapiens
cuugucaggguaguaacauuuugcaaccaaau

SEQ ID NO: 392734 - RNA, 32 nt, Homo Sapiens
cccagaggagaacgugccagugaggcagugcc

SEQ ID NO: 392735 - RNA, 32 nt, Homo Sapiens
gagaaaaugcaaacaugagcagaaaauauuuu

SEQ ID NO: 392736 - RNA, 32 nt, Homo Sapiens
ccaggcaucaacauuucuuuuuucauuccuca

SEQ ID NO: 392737 - RNA, 32 nt, Homo Sapiens
auggcgguggagguggugguuguagugugaug

SEQ ID NO: 392738 - RNA, 32 nt, Homo Sapiens
augauuacaguauuauuuuaaaccuuaaguag

SEQ ID NO: 392739 - RNA, 32 nt, Homo Sapiens
uuuacugugaaugugaaaaggugaaacuguug

SEQ ID NO: 392740 - RNA, 32 nt, Homo Sapiens
uuuucuucucccuuuuuccauuuuuaggccau

SEQ ID NO: 392741 - RNA, 32 nt, Homo Sapiens
uuuuaaagacacauccacggaccugaguuuac

SEQ ID NO: 392742 - RNA, 32 nt, Homo Sapiens
gcgccaguucccuugagcaguaaaggcccuuu

SEQ ID NO: 392743 - RNA, 32 nt, Homo Sapiens
gggggaaggcaggcuguugccaugguggccug

SEQ ID NO: 392744 - RNA, 30 nt, Homo Sapiens
aacccggcuuguaggaccucacaggaaccc

SEQ ID NO: 392745 - RNA, 32 nt, Homo Sapiens
aucaggaaaggcuuucuguuuugaucuggagc

SEQ ID NO: 392746 - RNA, 32 nt, Homo Sapiens
uauuggauaaauaugaauaaauauuuucucuc

SEQ ID NO: 392747 - RNA, 32 nt, Homo Sapiens
ggauaugauagauaguauucuuuuuacauguu

SEQ ID NO: 392748 - RNA, 32 nt, Homo Sapiens
ucugcucuccagcaucuucuguuuccuggcaa

SEQ ID NO: 392749 - RNA, 32 nt, Homo Sapiens
cggacugucuuuccuccacccgcccauggaga

SEQ ID NO: 392750 - RNA, 30 nt, Homo Sapiens
uggcuucuggacugcgcgaugacuggacgc

SEQ ID NO: 392751 - RNA, 32 nt, Homo Sapiens
gccccagggaugccagcucagggcugaccaca

SEQ ID NO: 392752 - RNA, 32 nt, Homo Sapiens
aaucaagacaccuuccagcccuaccaucagcu

SEQ ID NO: 392753 - RNA, 32 nt, Homo Sapiens
uucaacaauggcaguuaagucuacacagccuc

SEQ ID NO: 392754 - RNA, 32 nt, Homo Sapiens
uuuacauguuucaguuuguccuuccugacugu

SEQ ID NO: 392755 - RNA, 32 nt, Homo Sapiens
auguggagcuggaaggucuuguggccacagga

SEQ ID NO: 392756 - RNA, 32 nt, Homo Sapiens
gccgcuccaagcccagccugccccgcugccgc

SEQ ID NO: 392757 - RNA, 32 nt, Homo Sapiens
uuucuccgggaaccgugccgggagagcgcgcg

SEQ ID NO: 392758 - RNA, 32 nt, Homo Sapiens
uuagagcaauacuagcauacguuuuucuuaau

SEQ ID NO: 392759 - RNA, 32 nt, Homo Sapiens
gcuccucuuccgaccuguccacccgggaggaa

SEQ ID NO: 392760 - RNA, 31 nt, Homo Sapiens
cugugggguccagccuggcaaaagcaagaug

SEQ ID NO: 392761 - RNA, 32 nt, Homo Sapiens
cagccgcuuggaacagaccccggaggaggggg

SEQ ID NO: 392762 - RNA, 32 nt, Homo Sapiens
gguggccaguggcuaccauauuggaccgcaca

SEQ ID NO: 392763 - RNA, 32 nt, Homo Sapiens
cagcugggagugcugcuggcuggccauuuacu

SEQ ID NO: 392764 - RNA, 32 nt, Homo Sapiens
uggcuguuaggauacauaguauagguauauua

SEQ ID NO: 392765 - RNA, 32 nt, Homo Sapiens
uaccuuuuuucccccacacuuguuuucuuugu

SEQ ID NO: 392766 - RNA, 32 nt, Homo Sapiens
ggcagaacccuucuccagauguguguaacuua

SEQ ID NO: 392767 - RNA, 32 nt, Homo Sapiens
uaucuuuguuuccccaccucaggccucacacu

SEQ ID NO: 392768 - RNA, 32 nt, Homo Sapiens
aagugaaagguaauuuuggacacgccaggcau

SEQ ID NO: 392769 - RNA, 32 nt, Homo Sapiens
caauagauguccugaggccugccccucuccca

SEQ ID NO: 392770 - RNA, 32 nt, Homo Sapiens
ggccaauuucuuccuuuuagaaugggaauguu

SEQ ID NO: 392771 - RNA, 31 nt, Homo Sapiens
aaccagaugcaaacagauucauuaucuccau

SEQ ID NO: 392772 - RNA, 32 nt, Homo Sapiens
ucucccuuucuguuuuuuuuuaagugagcuuu

SEQ ID NO: 392773 - RNA, 32 nt, Homo Sapiens
uucugaauuuucugcccuuuuauucauugcau

SEQ ID NO: 392774 - RNA, 32 nt, Homo Sapiens
cuacguuuuuauuaaaaguaaaugucaguaaa

SEQ ID NO: 392775 - RNA, 32 nt, Homo Sapiens
aauaacucagguguaugagaagaaauuagaaa

SEQ ID NO: 392776 - RNA, 32 nt, Homo Sapiens
aaggaaaucaccguggccgccgcugugaacgc

SEQ ID NO: 392777 - RNA, 32 nt, Homo Sapiens
ccaugcagcucuuugacaaugucaucuagccc

SEQ ID NO: 392778 - RNA, 27 nt, Homo Sapiens
uguguguccuucuccaucuacacggcc

SEQ ID NO: 392779 - RNA, 32 nt, Homo Sapiens
uuucuugacuaugucucucuucugggacauuu

SEQ ID NO: 392780 - RNA, 32 nt, Homo Sapiens
ggcuccagggguuccuuggcuggugacggcac

SEQ ID NO: 392781 - RNA, 32 nt, Homo Sapiens
cucuuucuuacuucuuuuuucaauucuguucc

SEQ ID NO: 392782 - RNA, 31 nt, Homo Sapiens
caauagaugcaaacaacugauuuagagcaaa

SEQ ID NO: 392783 - RNA, 32 nt, Homo Sapiens
acuaguggccccaguauaccugggauggacau

SEQ ID NO: 392784 - RNA, 31 nt, Homo Sapiens
ccccguggcccuacgaucccccgcgcguccg

SEQ ID NO: 392785 - RNA, 32 nt, Homo Sapiens
aaacauguagcuauaacauauuuuaaaaauaa

SEQ ID NO: 392786 - RNA, 31 nt, Homo Sapiens
gaagccucgugggagagcagagccugaaaaa

SEQ ID NO: 392787 - RNA, 32 nt, Homo Sapiens
cucuggugccuuaaggugguguagaaggaaaa

SEQ ID NO: 392788 - RNA, 32 nt, Homo Sapiens
gcucaugccucccggcggccuucccaagcccc

SEQ ID NO: 392789 - RNA, 32 nt, Homo Sapiens
ugaaagcuaugaaauuggaugaaagugucuca

SEQ ID NO: 392790 - RNA, 32 nt, Homo Sapiens
gcugcccggagccgcgcgagggaggacccgac

SEQ ID NO: 392791 - RNA, 32 nt, Homo Sapiens
gucucacucaucuuggugccccgguguuuaca

SEQ ID NO: 392792 - RNA, 32 nt, Homo Sapiens
uaucgccgcccccaccgacgccgccgccggga

SEQ ID NO: 392793 - RNA, 30 nt, Homo Sapiens
gacaaaggcaggcugcccggcuggccgccu

SEQ ID NO: 392794 - RNA, 32 nt, Homo Sapiens
uucaacuauggacuuuuuaagccuaaugaaau

SEQ ID NO: 392795 - RNA, 32 nt, Homo Sapiens
cacgcugagaggagucagaauuagcauuuuuc

SEQ ID NO: 392796 - RNA, 32 nt, Homo Sapiens
acgcgcgugcgcgcuuguggcauagccuuccu

SEQ ID NO: 392797 - RNA, 32 nt, Homo Sapiens
auuuuaaagagcucauuugcaaugcacuugua

SEQ ID NO: 392798 - RNA, 32 nt, Homo Sapiens
ccgucuggacuuccaccuccagugccagaaac

SEQ ID NO: 392799 - RNA, 32 nt, Homo Sapiens
gagccaccacgcccggccaaggcaguuuuuaa

SEQ ID NO: 392800 - RNA, 32 nt, Homo Sapiens
aauggggaugugggcgcgggagccccguuccg

SEQ ID NO: 392801 - RNA, 32 nt, Homo Sapiens
cauauggaacugaguucccagcaucaucuuau

SEQ ID NO: 392802 - RNA, 32 nt, Homo Sapiens
cuaucuaauaucuauguauuuauuucgcuggu

SEQ ID NO: 392803 - RNA, 32 nt, Homo Sapiens
gguuuauaaugcaaagaccagcuccuuugcgg

SEQ ID NO: 392804 - RNA, 32 nt, Homo Sapiens
gaaaaugagagaaacaggaaacaaagaaugcc

SEQ ID NO: 392805 - RNA, 32 nt, Homo Sapiens
acagcuccccacgcccagccugccuugagaaa

SEQ ID NO: 392806 - RNA, 32 nt, Homo Sapiens
cugcuagucaagagggugaggcaggagaaucg

SEQ ID NO: 392807 - RNA, 32 nt, Homo Sapiens
agaccuggcugugaagaggggaggcggacacc

SEQ ID NO: 392808 - RNA, 32 nt, Homo Sapiens
gcuuguaaauguuuugucuaauguucuauugu

SEQ ID NO: 392809 - RNA, 32 nt, Homo Sapiens
auacgagagaagguuguacugaagacacgaga

SEQ ID NO: 392810 - RNA, 32 nt, Homo Sapiens
auaugauagacauacuguguaaaauuaaauaa

SEQ ID NO: 392811 - RNA, 32 nt, Homo Sapiens
uuucaaagauaaagaaaguguacugcgaaaau

SEQ ID NO: 392812 - RNA, 32 nt, Homo Sapiens
gcugaggcggguaggaggagcccgagccguaa

SEQ ID NO: 392813 - RNA, 32 nt, Homo Sapiens
ugcaaaagccucugcccuuccaucucgaaucc

SEQ ID NO: 392814 - RNA, 32 nt, Homo Sapiens
gaguaacaccuucuuguauuaaggaauuuuaa

SEQ ID NO: 392815 - RNA, 32 nt, Homo Sapiens
agacagugccucggauucuaugcaaaaccugg

SEQ ID NO: 392816 - RNA, 32 nt, Homo Sapiens
ugguucaauuugaguuuguuuucaugauuuga

SEQ ID NO: 392817 - RNA, 32 nt, Homo Sapiens
ucagaggugucggcagggaggcacucuuucuc

SEQ ID NO: 392818 - RNA, 32 nt, Homo Sapiens
gaugcguacaugagugugauguuuccugcuga

SEQ ID NO: 392819 - RNA, 32 nt, Homo Sapiens
uuauaugccugccuuugguacuuaauuuuaca

SEQ ID NO: 392820 - RNA, 29 nt, Homo Sapiens
gccgggcagggacagagcugucggggagu

SEQ ID NO: 392821 - RNA, 32 nt, Homo Sapiens
uaccugaugcuaaaauaugugccucggccaca

SEQ ID NO: 392822 - RNA, 32 nt, Homo Sapiens
aaaugagaauguugaauaugagcauuaaaguc

SEQ ID NO: 392823 - RNA, 32 nt, Homo Sapiens
gacggcagggcagggggcgccuggccggggag

SEQ ID NO: 392824 - RNA, 32 nt, Homo Sapiens
cugaugaaaauccaagaaaucuucuuaggagc

SEQ ID NO: 392825 - RNA, 32 nt, Homo Sapiens
agggaguaggagagaagaaacaugucagggug

SEQ ID NO: 392826 - RNA, 32 nt, Homo Sapiens
uguagccuguauauauuuuccauauguagagc

SEQ ID NO: 392827 - RNA, 32 nt, Homo Sapiens
ccgcgcuccagaugaagugugagcacugcacg

SEQ ID NO: 392828 - RNA, 32 nt, Homo Sapiens
augccugcccagggacccccagcccccucccg

SEQ ID NO: 392829 - RNA, 32 nt, Homo Sapiens
ggugucgcuguggggagcuggugcuguucuca

SEQ ID NO: 392830 - RNA, 32 nt, Homo Sapiens
auugcacaauauauuuuuacugcuuucugaau

SEQ ID NO: 392831 - RNA, 32 nt, Homo Sapiens
gaggcaaaaagaggcaggcaguggagucuccc

SEQ ID NO: 392832 - RNA, 32 nt, Homo Sapiens
ugaaagagcaggagccagacacauuugggggu

SEQ ID NO: 392833 - RNA, 32 nt, Homo Sapiens
gauuaggucagaagcucauguucugauaguuc

SEQ ID NO: 392834 - RNA, 32 nt, Homo Sapiens
uauucucuguuugcuuuugaacguaugugcuc

SEQ ID NO: 392835 - RNA, 32 nt, Homo Sapiens
uuugaaguucccucccaaacuugucccaagag

SEQ ID NO: 392836 - RNA, 32 nt, Homo Sapiens
gugggacccgcggccggcgcggggacguacgg

SEQ ID NO: 392837 - RNA, 32 nt, Homo Sapiens
uggagggaaauacucccuaccccuaauuuugu

SEQ ID NO: 392838 - RNA, 32 nt, Homo Sapiens
agaggcuuauagucuucaguacccuaacagca

SEQ ID NO: 392839 - RNA, 32 nt, Homo Sapiens
gacagugccauccccaccuucaccucggaggg

SEQ ID NO: 392840 - RNA, 32 nt, Homo Sapiens
aaggaauggccuuucaccuucuccugguggca

SEQ ID NO: 392841 - RNA, 32 nt, Homo Sapiens
gucuuccuccaaggaguuagaauuucccaguu

SEQ ID NO: 392842 - RNA, 32 nt, Homo Sapiens
ucugugcguggaguccccaauaaaccuguggu

SEQ ID NO: 392843 - RNA, 32 nt, Homo Sapiens
ucuagacugugcuacagccugggcgacacagu

SEQ ID NO: 392844 - RNA, 32 nt, Homo Sapiens
gagcacacauaaaagcacaaagacagagacgc

SEQ ID NO: 392845 - RNA, 31 nt, Homo Sapiens
gcagcucagcgcagcccagggcuccaaguga

SEQ ID NO: 392846 - RNA, 32 nt, Homo Sapiens
acauaagauuaaauaaauacaaacuuguacca

SEQ ID NO: 392847 - RNA, 32 nt, Homo Sapiens
uugccacuuuccuccacuggcuuggaaauccu

SEQ ID NO: 392848 - RNA, 32 nt, Homo Sapiens
augcaaugacagacaagcagcuccacaggagg

SEQ ID NO: 392849 - RNA, 32 nt, Homo Sapiens
ugcgagugcggccucggcuggcggcggcacca

SEQ ID NO: 392850 - RNA, 32 nt, Homo Sapiens
gagcgagacuccaucucaaaaaaauaauaaag

SEQ ID NO: 392851 - RNA, 32 nt, Homo Sapiens
auuuggacaacauaaagcaacaaaauuugaga

SEQ ID NO: 392852 - RNA, 32 nt, Homo Sapiens
gagaccccuggccucugagcaccuucuagcuc

SEQ ID NO: 392853 - RNA, 32 nt, Homo Sapiens
ucaauaucaggcugccccacuccacguucccc

SEQ ID NO: 392854 - RNA, 32 nt, Homo Sapiens
gcuucaagagguuauauaaacauguucauggu

SEQ ID NO: 392855 - RNA, 32 nt, Homo Sapiens
cggaccccaucccacucagccaagugucuuuc

SEQ ID NO: 392856 - RNA, 32 nt, Homo Sapiens
uuggaaaaaucgucacgaauugacuuagagca

SEQ ID NO: 392857 - RNA, 32 nt, Homo Sapiens
cacugcacuccagccugggugacagagcguga

SEQ ID NO: 392858 - RNA, 32 nt, Homo Sapiens
cauaaagaaaguuuuauuuguauuuuacuacu

SEQ ID NO: 392859 - RNA, 32 nt, Homo Sapiens
cacugcacuccagccugggcgucagagugaga

SEQ ID NO: 392860 - RNA, 32 nt, Homo Sapiens
gagacccugcccguccuccccgcggggcuccu

SEQ ID NO: 392861 - RNA, 32 nt, Homo Sapiens
aaaguguccaacaaggaauucacaccucugcc

SEQ ID NO: 392862 - RNA, 32 nt, Homo Sapiens
caauaaggagaugccuuguucuuuucaccaug

SEQ ID NO: 392863 - RNA, 32 nt, Homo Sapiens
accuuugccagccagagcugcugccagagcug

SEQ ID NO: 392864 - RNA, 32 nt, Homo Sapiens
cuagcgucucggcccuugccgccccgugccug

SEQ ID NO: 392865 - RNA, 32 nt, Homo Sapiens
cggagcccggggcgcccggagccccgccaugu

SEQ ID NO: 392866 - RNA, 32 nt, Homo Sapiens
cugccuuuccccugcgcccccauccucucacg

SEQ ID NO: 392867 - RNA, 32 nt, Homo Sapiens
cugcaggaggccuggggccggcgagaaaucuc

SEQ ID NO: 392868 - RNA, 32 nt, Homo Sapiens
caagucuuugcgcauuuuuagcaggacuuaau

SEQ ID NO: 392869 - RNA, 32 nt, Homo Sapiens
auguuuggaugaaguuucaaugggagaagcac

SEQ ID NO: 392870 - RNA, 32 nt, Homo Sapiens
ccgcugcuagagaggccgaggugguccggcca

SEQ ID NO: 392871 - RNA, 29 nt, Homo Sapiens
gaacuuuucaucugcagaggcaagaaaaa

SEQ ID NO: 392872 - RNA, 32 nt, Homo Sapiens
auuccaaggggccagcagcacuuuggcccaaa

SEQ ID NO: 392873 - RNA, 32 nt, Homo Sapiens
cuugagaggacucaccccaagcaagggaaaau

SEQ ID NO: 392874 - RNA, 32 nt, Homo Sapiens
gaauccaggaggaggagguugcagugagccga

SEQ ID NO: 392875 - RNA, 32 nt, Homo Sapiens
aaugcuuggugcccugcgggaaccgguggcca

SEQ ID NO: 392876 - RNA, 29 nt, Homo Sapiens
gaaaauggcagacaauuuuucgcuccaug

SEQ ID NO: 392877 - RNA, 32 nt, Homo Sapiens
cgagguccgggcggggacggggcggggaccga

SEQ ID NO: 392878 - RNA, 31 nt, Homo Sapiens
auuucagugucaacuauucagaauugaaaau

SEQ ID NO: 392879 - RNA, 32 nt, Homo Sapiens
agaauaacugguuuuaaaauuuucugcaauac

SEQ ID NO: 392880 - RNA, 32 nt, Homo Sapiens
gcggggagugcucauguggacaucagggccag

SEQ ID NO: 392881 - RNA, 32 nt, Homo Sapiens
ccaaaaggccccaggcacugcccaucaucaua

SEQ ID NO: 392882 - RNA, 32 nt, Homo Sapiens
ggauuguuagacauugauguuaaagcaucuua

SEQ ID NO: 392883 - RNA, 32 nt, Homo Sapiens
cuggagccagaaugccaggguucuaacuucag

SEQ ID NO: 392884 - RNA, 32 nt, Homo Sapiens
uccuuuuaaggguggguuuaauaacauauuau

SEQ ID NO: 392885 - RNA, 32 nt, Homo Sapiens
auuuuuaaagaaauauauaugguauguauccu

SEQ ID NO: 392886 - RNA, 32 nt, Homo Sapiens
uauccacaaggugacagugguuacucacgagg

SEQ ID NO: 392887 - RNA, 32 nt, Homo Sapiens
cccagcacuuugggaggcaggggcggguggau

SEQ ID NO: 392888 - RNA, 32 nt, Homo Sapiens
ugccacacucgcgggcgcugcccgguaauggc

SEQ ID NO: 392889 - RNA, 32 nt, Homo Sapiens
gaacuugauuguauaauuuucuuauaaauuac

SEQ ID NO: 392890 - RNA, 32 nt, Homo Sapiens
aaaacaucuuugaaaucaggaaaucaggccgg

SEQ ID NO: 392891 - RNA, 32 nt, Homo Sapiens
ggccggcggcggugugggagcggcgcgucaug

SEQ ID NO: 392892 - RNA, 32 nt, Homo Sapiens
cuggaucccucccucccaggucugggcugugc

SEQ ID NO: 392893 - RNA, 32 nt, Homo Sapiens
cuaacuucauacauuuaucggcauuguccaaa

SEQ ID NO: 392894 - RNA, 32 nt, Homo Sapiens
acuuuuaucacuguugcauauaccaguuguga

SEQ ID NO: 392895 - RNA, 30 nt, Homo Sapiens
auuucgggugaaaaagaugagucugaaguu

SEQ ID NO: 392896 - RNA, 32 nt, Homo Sapiens
uugugucccggcucggaccccggcgcccagcc

SEQ ID NO: 392897 - RNA, 32 nt, Homo Sapiens
guuuucuguauauugcauagcauuacacauuu

SEQ ID NO: 392898 - RNA, 32 nt, Homo Sapiens
ucaaauacaauuuuaguucuuacaagauaaug

SEQ ID NO: 392899 - RNA, 32 nt, Homo Sapiens
aaaccacacuggcuccaacuuccuccucaugg

SEQ ID NO: 392900 - RNA, 32 nt, Homo Sapiens
aguccaaaaugaaauuauagggcaguuuggug

SEQ ID NO: 392901 - RNA, 32 nt, Homo Sapiens
uuucaacaucgucauuuuuucuuagaacuuca

SEQ ID NO: 392902 - RNA, 32 nt, Homo Sapiens
gggccagggggaggaaucuuuuaagggccaag

SEQ ID NO: 392903 - RNA, 32 nt, Homo Sapiens
agaaaacaaaccauugcuuaugcuguuauaua

SEQ ID NO: 392904 - RNA, 32 nt, Homo Sapiens
ggggggacuggagaagggaggcggcgggcgaa

SEQ ID NO: 392905 - RNA, 32 nt, Homo Sapiens
aauucuaaaucugggaagaaccagagaaaguc

SEQ ID NO: 392906 - RNA, 32 nt, Homo Sapiens
caacuuaugaauuguggaacaccagagcaaga

SEQ ID NO: 392907 - RNA, 32 nt, Homo Sapiens
auagugauccaaguuccuaagaacccaguagc

SEQ ID NO: 392908 - RNA, 30 nt, Homo Sapiens
uuacuuuuguguuugggggaaaauacgagg

SEQ ID NO: 392909 - RNA, 32 nt, Homo Sapiens
uauacuugaggguggaggguggcaggagggug

SEQ ID NO: 392910 - RNA, 32 nt, Homo Sapiens
uuuaaaaccuuuuuaugucaauuaccaucuug

SEQ ID NO: 392911 - RNA, 32 nt, Homo Sapiens
ugugcaauuggaauaauaaaaauacuacuccc

SEQ ID NO: 392912 - RNA, 32 nt, Homo Sapiens
ucaaugacugucagccaaagauggccagguuc

SEQ ID NO: 392913 - RNA, 32 nt, Homo Sapiens
aauguaccaaaaaacaaguaucaagcuguuua

SEQ ID NO: 392914 - RNA, 32 nt, Homo Sapiens
cuuauggcaugaugauagcauauguguucagg

SEQ ID NO: 392915 - RNA, 32 nt, Homo Sapiens
ucuuggaggucuugcagagcuaggugugugac

SEQ ID NO: 392916 - RNA, 32 nt, Homo Sapiens
cgccaaggagaugacccaucuuuugcagugca

SEQ ID NO: 392917 - RNA, 32 nt, Homo Sapiens
uggaccuggugccccugcucacugggcccgag

SEQ ID NO: 392918 - RNA, 32 nt, Homo Sapiens
cuggaagguuugucauuucucuaaaguuugua

SEQ ID NO: 392919 - RNA, 32 nt, Homo Sapiens
cuggcaagggugagcccagagagccuucccuc

SEQ ID NO: 392920 - RNA, 32 nt, Homo Sapiens
gcaaggugugcgggcgggaaggggcacgggca

SEQ ID NO: 392921 - RNA, 32 nt, Homo Sapiens
gaaggcagccccacucccaguacauuucagug

SEQ ID NO: 392922 - RNA, 32 nt, Homo Sapiens
aguccauucuucccuuucuccauagcgacagg

SEQ ID NO: 392923 - RNA, 32 nt, Homo Sapiens
ucucucccuauccaaggcucuaucuucugcug

SEQ ID NO: 392924 - RNA, 32 nt, Homo Sapiens
cagagggggagaacgccagagcccuggcuggu

SEQ ID NO: 392925 - RNA, 32 nt, Homo Sapiens
gagucccaggcgcacaccccccauucuggguc

SEQ ID NO: 392926 - RNA, 27 nt, Homo Sapiens
cacgugucuaaguucagccccaaaccc

SEQ ID NO: 392927 - RNA, 30 nt, Homo Sapiens
aucccccccgguaggauggacgugagccau

SEQ ID NO: 392928 - RNA, 30 nt, Homo Sapiens
ugugguccuccucgcuauguuggaaaugug

SEQ ID NO: 392929 - RNA, 32 nt, Homo Sapiens
ccagauaaaauaaccuuguaaaacagaucuuu

SEQ ID NO: 392930 - RNA, 32 nt, Homo Sapiens
guuaagcccucuucuuuacucuuaauuuuuuu

SEQ ID NO: 392931 - RNA, 32 nt, Homo Sapiens
caucaugcccacucccacuccauccugucccc

SEQ ID NO: 392932 - RNA, 31 nt, Homo Sapiens
cucucuggguuccuuggugcuaggaggagcc

SEQ ID NO: 392933 - RNA, 32 nt, Homo Sapiens
caucuggcuaccugcccucccugccuucccca

SEQ ID NO: 392934 - RNA, 32 nt, Homo Sapiens
ugcgccgagcgagccccuccccggcuccagcc

SEQ ID NO: 392935 - RNA, 32 nt, Homo Sapiens
auucuuuauuuucucuuccuguccugcacaua

SEQ ID NO: 392936 - RNA, 31 nt, Homo Sapiens
ugugcgcugaacuuugggccccgcgggagca

SEQ ID NO: 392937 - RNA, 32 nt, Homo Sapiens
guccuggugcuggcggagcccaggcgcaagcc

SEQ ID NO: 392938 - RNA, 32 nt, Homo Sapiens
acacucccacccaggacagcccccagcccaac

SEQ ID NO: 392939 - RNA, 32 nt, Homo Sapiens
ucaacaaaaugaagaggcaacccacagaacug

SEQ ID NO: 392940 - RNA, 32 nt, Homo Sapiens
gguagaugcugggggcugcggccacggucaga

SEQ ID NO: 392941 - RNA, 32 nt, Homo Sapiens
uaaauguauacaccaagugguaaugaaauuuc

SEQ ID NO: 392942 - RNA, 32 nt, Homo Sapiens
aacaguuguaaaaaaugugauuucugguauau

SEQ ID NO: 392943 - RNA, 32 nt, Homo Sapiens
gggagggagggagagaagaagggggucuuugc

SEQ ID NO: 392944 - RNA, 32 nt, Homo Sapiens
ucugaagacacagcuuccagcccuggcuuugu

SEQ ID NO: 392945 - RNA, 32 nt, Homo Sapiens
guaguagaacaaugggauuaugcugucacaaa

SEQ ID NO: 392946 - RNA, 32 nt, Homo Sapiens
cucuuccgcucgccggcugcggcgccugggac

SEQ ID NO: 392947 - RNA, 30 nt, Homo Sapiens
gcugugucaugagcugcagacaguucuccu

SEQ ID NO: 392948 - RNA, 32 nt, Homo Sapiens
cucaaguaguucuuuacugcaagaugucuuuc

SEQ ID NO: 392949 - RNA, 32 nt, Homo Sapiens
aggaaggcugagaggagagagacuccagcugg

SEQ ID NO: 392950 - RNA, 32 nt, Homo Sapiens
cuuugcucuugggaagaccagcuuugcaguga

SEQ ID NO: 392951 - RNA, 32 nt, Homo Sapiens
auuccaauuguucaccucuacuguagggcuca

SEQ ID NO: 392952 - RNA, 32 nt, Homo Sapiens
ccgccuccaagccccugagguuuccggggacc

SEQ ID NO: 392953 - RNA, 32 nt, Homo Sapiens
aguagcauggcaacuggagaaaaugggaggaa

SEQ ID NO: 392954 - RNA, 32 nt, Homo Sapiens
uucuugucuuaggccugaaccaaaaaacaaca

SEQ ID NO: 392955 - RNA, 32 nt, Homo Sapiens
ccccuccccccuccuaggggaugucagaagcu

SEQ ID NO: 392956 - RNA, 32 nt, Homo Sapiens
aacacuugaaaauucuaugcaagagcaccagg

SEQ ID NO: 392957 - RNA, 32 nt, Homo Sapiens
uugaggucaggaguuugagaccagccuggcca

SEQ ID NO: 392958 - RNA, 32 nt, Homo Sapiens
cugacacuucagacauuacacaaaaucagagu

SEQ ID NO: 392959 - RNA, 32 nt, Homo Sapiens
cugaggucaggaguuugagaccagucuggcca

SEQ ID NO: 392960 - RNA, 32 nt, Homo Sapiens
aaggaaauauauuauuuguuagucuguaucug

SEQ ID NO: 392961 - RNA, 32 nt, Homo Sapiens
uuauuuggacuuugauuacauaaauauuacca

SEQ ID NO: 392962 - RNA, 32 nt, Homo Sapiens
ggaggaugcgccgacgccccgagcgcccggcc

SEQ ID NO: 392963 - RNA, 32 nt, Homo Sapiens
uccuaccuggggcagcuggggcugccauccca

SEQ ID NO: 392964 - RNA, 32 nt, Homo Sapiens
acugugccccggcaacaagaccugggcugagg

SEQ ID NO: 392965 - RNA, 32 nt, Homo Sapiens
uacccaaaauuaacuuaugcucauauauuagg

SEQ ID NO: 392966 - RNA, 32 nt, Homo Sapiens
aggccaacggauuuuuaaugugguuuucauau

SEQ ID NO: 392967 - RNA, 32 nt, Homo Sapiens
acuauagaucauaguuauuauacaauguagug

SEQ ID NO: 392968 - RNA, 32 nt, Homo Sapiens
guuuaaugcaagaaguaagaggccuguaguga

SEQ ID NO: 392969 - RNA, 32 nt, Homo Sapiens
ccggccccugucacagucagucgucucauuug

SEQ ID NO: 392970 - RNA, 32 nt, Homo Sapiens
uuugucucugagaccucuuaaguucuaagauu

SEQ ID NO: 392971 - RNA, 32 nt, Homo Sapiens
gcuucucugaggugcuguacacgcgcguuaac

SEQ ID NO: 392972 - RNA, 32 nt, Homo Sapiens
caagaggacuccugggccuguggcuguccagg

SEQ ID NO: 392973 - RNA, 32 nt, Homo Sapiens
uugcacuugggguugacaaggugcucacacca

SEQ ID NO: 392974 - RNA, 32 nt, Homo Sapiens
ggcucggcguccccggccguggcugagcucug

SEQ ID NO: 392975 - RNA, 32 nt, Homo Sapiens
caggccacuggcacguugggccaggcagaagg

SEQ ID NO: 392976 - RNA, 32 nt, Homo Sapiens
acugcccuuuggauguuuaucuucauuaauaa

SEQ ID NO: 392977 - RNA, 32 nt, Homo Sapiens
ggcguagggcuggagggcaggggcgggcccug

SEQ ID NO: 392978 - RNA, 32 nt, Homo Sapiens
gagcuaguuuuaaaauaaugaucucagauuuu

SEQ ID NO: 392979 - RNA, 32 nt, Homo Sapiens
agagggaccagauugggggguagguccacggg

SEQ ID NO: 392980 - RNA, 32 nt, Homo Sapiens
ggucaugaggguuuuuccccccgguuuggggg

SEQ ID NO: 392981 - RNA, 32 nt, Homo Sapiens
gcgccgacuccuucagcagccuggccagcucc

SEQ ID NO: 392982 - RNA, 32 nt, Homo Sapiens
augcuagcccuuuggguccuuaccuccugccc

SEQ ID NO: 392983 - RNA, 32 nt, Homo Sapiens
cccacuccauugucacuaacguccggcuccau

SEQ ID NO: 392984 - RNA, 32 nt, Homo Sapiens
uccucuacagccuccuggccccggcgcaggcu

SEQ ID NO: 392985 - RNA, 31 nt, Homo Sapiens
acaugucauuugauuguaaauuaaguguucu

SEQ ID NO: 392986 - RNA, 32 nt, Homo Sapiens
uuuugucuaggagaauauaacaguguuaccca

SEQ ID NO: 392987 - RNA, 32 nt, Homo Sapiens
auaaccuugaguugaugaaacucugaggcaag

SEQ ID NO: 392988 - RNA, 32 nt, Homo Sapiens
cuguagcuuguuguuugggggaccaaauuuuc

SEQ ID NO: 392989 - RNA, 32 nt, Homo Sapiens
ucacuucccaugaucacgcagcugagcaguuu

SEQ ID NO: 392990 - RNA, 32 nt, Homo Sapiens
aggcgggcguaucaccugaggucaggaguuca

SEQ ID NO: 392991 - RNA, 32 nt, Homo Sapiens
ggagggccuggcgggggcgcuggcuuccgugc

SEQ ID NO: 392992 - RNA, 32 nt, Homo Sapiens
caguggccaucccaggccuccacggaucaacc

SEQ ID NO: 392993 - RNA, 32 nt, Homo Sapiens
uccuguacaaccucagaagacaccuagacacu

SEQ ID NO: 392994 - RNA, 32 nt, Homo Sapiens
aucgauucccguaaacaaaacaaccaucaugu

SEQ ID NO: 392995 - RNA, 32 nt, Homo Sapiens
ugccaggaagcagagaugcagaccccaaggag

SEQ ID NO: 392996 - RNA, 32 nt, Homo Sapiens
acguaccacggcauuucugcaugggcucuuca

SEQ ID NO: 392997 - RNA, 32 nt, Homo Sapiens
acucauccuugccuccucucccuggguuuugu

SEQ ID NO: 392998 - RNA, 32 nt, Homo Sapiens
uuuuucuuauaaaaauauuggagcuauucauu

SEQ ID NO: 392999 - RNA, 32 nt, Homo Sapiens
gccugggcgcgguggcucacgcuuguaauccc

SEQ ID NO: 393000 - RNA, 32 nt, Homo Sapiens
aggaguggaaggcaauggcccacuggccuuuu

SEQ ID NO: 393001 - RNA, 32 nt, Homo Sapiens
ugaccaccguggaaacaaacgccucuuguauu

SEQ ID NO: 393002 - RNA, 32 nt, Homo Sapiens
aaucucaaagauuugcagugcaaguaauagua

SEQ ID NO: 393003 - RNA, 32 nt, Homo Sapiens
ugucucuuaaaggaugauacaauaauauaacc

SEQ ID NO: 393004 - RNA, 30 nt, Homo Sapiens
uguucaggcaggcuuucugggugugacuga

SEQ ID NO: 393005 - RNA, 32 nt, Homo Sapiens
caucuguccguggucagaaguggggucagugu

SEQ ID NO: 393006 - RNA, 32 nt, Homo Sapiens
aaaaaagucauguauauauacacauaaaggca

SEQ ID NO: 393007 - RNA, 32 nt, Homo Sapiens
augccuggucucacggggcuaguuuugacccc

SEQ ID NO: 393008 - RNA, 32 nt, Homo Sapiens
gacugcuggguggguuuggaguucuuggcuuu

SEQ ID NO: 393009 - RNA, 32 nt, Homo Sapiens
ggcucgucucaaacuccugaccucaggugauc

SEQ ID NO: 393010 - RNA, 32 nt, Homo Sapiens
gaagacuugaaaaaacaguauacucagugacc

SEQ ID NO: 393011 - RNA, 32 nt, Homo Sapiens
ggcgugaggagcgggcgggccagcgccgcgga

SEQ ID NO: 393012 - RNA, 25 nt, Homo Sapiens
gggguucgguuugacuaccgucaug

SEQ ID NO: 393013 - RNA, 32 nt, Homo Sapiens
augaauuaucuaauagaaauaaacagugucac

SEQ ID NO: 393014 - RNA, 32 nt, Homo Sapiens
gaugccguuuugcaguguggacacguguuuga

SEQ ID NO: 393015 - RNA, 32 nt, Homo Sapiens
augagcccggcccacacccgacaccagcccug

SEQ ID NO: 393016 - RNA, 32 nt, Homo Sapiens
ggucaucgcgcccuuuccccugccgguguccu

SEQ ID NO: 393017 - RNA, 32 nt, Homo Sapiens
gcugaggguccgcgggacccagggaacgcggc

SEQ ID NO: 393018 - RNA, 32 nt, Homo Sapiens
auuuauuucauccucagcaaauuucauccugg

SEQ ID NO: 393019 - RNA, 32 nt, Homo Sapiens
ucacuuugcaaauuauuuuuuaaaugcauuca

SEQ ID NO: 393020 - RNA, 32 nt, Homo Sapiens
gaaauaaguaauuuauauaagaaaauaaauuu

SEQ ID NO: 393021 - RNA, 32 nt, Homo Sapiens
aacauaucuaucuauuauuucauuugauuguc

SEQ ID NO: 393022 - RNA, 32 nt, Homo Sapiens
agcugggcuccggacgcgggcgccaggugcac

SEQ ID NO: 393023 - RNA, 32 nt, Homo Sapiens
uuuccuuuagccagagaaugguucaaaugucu

SEQ ID NO: 393024 - RNA, 32 nt, Homo Sapiens
uuggaucccauucaccugaggcacccgaagaa

SEQ ID NO: 393025 - RNA, 32 nt, Homo Sapiens
ccaagauuaaggaaaccacaguguacuuugac

SEQ ID NO: 393026 - RNA, 32 nt, Homo Sapiens
gagaggagcugagcccuguggagcagaacggg

SEQ ID NO: 393027 - RNA, 32 nt, Homo Sapiens
cauugugguccguccuuaacccauccacucuu

SEQ ID NO: 393028 - RNA, 32 nt, Homo Sapiens
uuagagacauuuuacucuuccauccaccuuuu

SEQ ID NO: 393029 - RNA, 32 nt, Homo Sapiens
guuuccuuuuccuuucucugguaacuccuccu

SEQ ID NO: 393030 - RNA, 32 nt, Homo Sapiens
uugcaggaggucgguuuucauggucauucagu

SEQ ID NO: 393031 - RNA, 32 nt, Homo Sapiens
gaucuuuccuggauaucccuccaggugggacu

SEQ ID NO: 393032 - RNA, 32 nt, Homo Sapiens
gcccucuaggucuccaugcauucuuccugccc

SEQ ID NO: 393033 - RNA, 32 nt, Homo Sapiens
agcugaucguuguuuauguucaaaugaguaaa

SEQ ID NO: 393034 - RNA, 32 nt, Homo Sapiens
ugccccccgagcugucccuccggggcgucuua

SEQ ID NO: 393035 - RNA, 32 nt, Homo Sapiens
gcccugcagaguggcuggauagagauauggag

SEQ ID NO: 393036 - RNA, 32 nt, Homo Sapiens
agacuaccaaaauguaugguuguccuuuuuuu

SEQ ID NO: 393037 - RNA, 32 nt, Homo Sapiens
uggccaagcugaucucaaacuccugaccucaa

SEQ ID NO: 393038 - RNA, 32 nt, Homo Sapiens
auaaacccacaugggaagagccagaucacaga

SEQ ID NO: 393039 - RNA, 32 nt, Homo Sapiens
gagcaaaauacauguuuauugagugagugaaa

SEQ ID NO: 393040 - RNA, 32 nt, Homo Sapiens
gccacgcgcgcucggcggcuccuuccagcagg

SEQ ID NO: 393041 - RNA, 32 nt, Homo Sapiens
cuguggcccucucccuuacccugggaaggccu

SEQ ID NO: 393042 - RNA, 32 nt, Homo Sapiens
agcaaagguuugggaagaaagacucauauucc

SEQ ID NO: 393043 - RNA, 32 nt, Homo Sapiens
ccccccuuuuuuucuuuuucuuuuucuuuuuc

SEQ ID NO: 393044 - RNA, 32 nt, Homo Sapiens
guccggccugggagccgucagagcagcccugc

SEQ ID NO: 393045 - RNA, 32 nt, Homo Sapiens
uuucacaagaauguuugcugacccucauggca

SEQ ID NO: 393046 - RNA, 32 nt, Homo Sapiens
acuaugaugcucuacauggacauuugagucuu

SEQ ID NO: 393047 - RNA, 32 nt, Homo Sapiens
ggaagaagcugauggaauucauauaucugucu

SEQ ID NO: 393048 - RNA, 32 nt, Homo Sapiens
agggugugggggugggggcgccgcuggggcag

SEQ ID NO: 393049 - RNA, 32 nt, Homo Sapiens
aucagcugguccuuugugaagaacguagagag

SEQ ID NO: 393050 - RNA, 32 nt, Homo Sapiens
gcacccuggggagaggaccagggaugggaacc

SEQ ID NO: 393051 - RNA, 32 nt, Homo Sapiens
acucggcggggaucgcggcggaggcggcggcg

SEQ ID NO: 393052 - RNA, 32 nt, Homo Sapiens
aggaacucucuuucuucucuuggcacuggggg

SEQ ID NO: 393053 - RNA, 32 nt, Homo Sapiens
ccgauuuggccccaugguggguuucggggcca

SEQ ID NO: 393054 - RNA, 32 nt, Homo Sapiens
aaaccgagccacccgggcguccagcgugccgg

SEQ ID NO: 393055 - RNA, 32 nt, Homo Sapiens
ggccaggugcggugacucaugccuguaauccc

SEQ ID NO: 393056 - RNA, 32 nt, Homo Sapiens
cccauuggagagaaaaaacuuaaguagauaag

SEQ ID NO: 393057 - RNA, 32 nt, Homo Sapiens
cccggcgcccucaggaccccccagagaccccc

SEQ ID NO: 393058 - RNA, 32 nt, Homo Sapiens
caggggacagaagcuuccgacgcgcgaggccu

SEQ ID NO: 393059 - RNA, 32 nt, Homo Sapiens
cccagccauccuccccgccuugggggcuccau

SEQ ID NO: 393060 - RNA, 32 nt, Homo Sapiens
uaugaauuaagaguacaaaauccucugagaug

SEQ ID NO: 393061 - RNA, 32 nt, Homo Sapiens
uuaaaaucaaggaaguaauaaaucauaacauu

SEQ ID NO: 393062 - RNA, 32 nt, Homo Sapiens
ucuguacugacaucuccuccccugaaaugcuu

SEQ ID NO: 393063 - RNA, 32 nt, Homo Sapiens
gacuacaauuuaaacaugugaugugcuuauuc

SEQ ID NO: 393064 - RNA, 32 nt, Homo Sapiens
gugcuucccacccccaggaccugacacaucuc

SEQ ID NO: 393065 - RNA, 32 nt, Homo Sapiens
ugcccucuccccugcuccuggcacucuacacg

SEQ ID NO: 393066 - RNA, 32 nt, Homo Sapiens
aaauuugccaaauauaugagacucuaaaucug

SEQ ID NO: 393067 - RNA, 32 nt, Homo Sapiens
uuuuuaccauugaugaaaccacaggggacauu

SEQ ID NO: 393068 - RNA, 32 nt, Homo Sapiens
gugcaguggcgcagucucggcucgcugcaacc

SEQ ID NO: 393069 - RNA, 30 nt, Homo Sapiens
aggggagagaugcaugggauaugcacccag

SEQ ID NO: 393070 - RNA, 32 nt, Homo Sapiens
gggaggagaaacaaacucagagaugggccccu

SEQ ID NO: 393071 - RNA, 32 nt, Homo Sapiens
aagcauccaucacagaaccuccccuucccugc

SEQ ID NO: 393072 - RNA, 32 nt, Homo Sapiens
ugaucuuuauuagauagcaguggcaugcuuua

SEQ ID NO: 393073 - RNA, 32 nt, Homo Sapiens
ugcauuguuuuaugccugaaauccaauagucu

SEQ ID NO: 393074 - RNA, 32 nt, Homo Sapiens
uugaggagcaucuauuuagggguuaauuacuu

SEQ ID NO: 393075 - RNA, 32 nt, Homo Sapiens
caccugcuuccuuccagacagugucgcuaagu

SEQ ID NO: 393076 - RNA, 32 nt, Homo Sapiens
uuguuaaaacaaagaacuagaugugcaguaau

SEQ ID NO: 393077 - RNA, 32 nt, Homo Sapiens
ccaccacaccgggcuaauuuuuguauuuuuag

SEQ ID NO: 393078 - RNA, 32 nt, Homo Sapiens
agauuauuuucacuucucuauuacaaagaaag

SEQ ID NO: 393079 - RNA, 32 nt, Homo Sapiens
cccauggccuguuuuucuguaccugcugcucu

SEQ ID NO: 393080 - RNA, 32 nt, Homo Sapiens
uuugucugacuucuacucugucaaucucuuug

SEQ ID NO: 393081 - RNA, 32 nt, Homo Sapiens
ccguagugggggaggcggcggcagcguuaagu

SEQ ID NO: 393082 - RNA, 32 nt, Homo Sapiens
ccauuuucaaguguacagccacagcaaggagc

SEQ ID NO: 393083 - RNA, 32 nt, Homo Sapiens
ggauaaaaacaauacuuauaguauaccacuaa

SEQ ID NO: 393084 - RNA, 32 nt, Homo Sapiens
ggcguggcgcugagaggcgcggcggccccugc

SEQ ID NO: 393085 - RNA, 32 nt, Homo Sapiens
caggaugcagccuucccccacccaugcccuuu

SEQ ID NO: 393086 - RNA, 32 nt, Homo Sapiens
caccaggacccaauagagagggcaagcugagc

SEQ ID NO: 393087 - RNA, 29 nt, Homo Sapiens
ucaggguuuuguuucagagggauauaaau

SEQ ID NO: 393088 - RNA, 32 nt, Homo Sapiens
uaggaaaaucugaguuuucuuaucuuugaccu

SEQ ID NO: 393089 - RNA, 32 nt, Homo Sapiens
cacuuuccaagcaugcagcuuuggcaguuucu

SEQ ID NO: 393090 - RNA, 27 nt, Homo Sapiens
uucuuccauuaauuacauguguaaaau

SEQ ID NO: 393091 - RNA, 32 nt, Homo Sapiens
gugaccuugggaucuugugcugugaagacauu

SEQ ID NO: 393092 - RNA, 32 nt, Homo Sapiens
agaauguauuaggacauaaaauagaggcugac

SEQ ID NO: 393093 - RNA, 32 nt, Homo Sapiens
ucugcuguccccacugcccccggcuaggauca

SEQ ID NO: 393094 - RNA, 32 nt, Homo Sapiens
guucuuuuauuuuuauucuuuuuucuuuugag

SEQ ID NO: 393095 - RNA, 32 nt, Homo Sapiens
agccaugucugccauggguccagaaaugggaa

SEQ ID NO: 393096 - RNA, 32 nt, Homo Sapiens
uuaaaugauguuucaauuuuauauguuuucua

SEQ ID NO: 393097 - RNA, 32 nt, Homo Sapiens
guacuguuccgcucccagaagccccgggcggc

SEQ ID NO: 393098 - RNA, 32 nt, Homo Sapiens
agacccugcccccagggaucucuucacaugug

SEQ ID NO: 393099 - RNA, 32 nt, Homo Sapiens
ggcugcugguuuugaaacaugaaucuuucgcu

SEQ ID NO: 393100 - RNA, 32 nt, Homo Sapiens
uccaggcacgacccccuuccccggccccucgg

SEQ ID NO: 393101 - RNA, 32 nt, Homo Sapiens
uccgaugaggacuauagucauagaggaugcuu

SEQ ID NO: 393102 - RNA, 29 nt, Homo Sapiens
cuguaugguuacaugugagcucuuugaaa

SEQ ID NO: 393103 - RNA, 32 nt, Homo Sapiens
acgcccggccccggcacugcccggggcaucug

SEQ ID NO: 393104 - RNA, 32 nt, Homo Sapiens
acacaaucaacacaauaaacucuagcauucac

SEQ ID NO: 393105 - RNA, 32 nt, Homo Sapiens
uuacuauguaaaguauagauggucauuuuaau

SEQ ID NO: 393106 - RNA, 32 nt, Homo Sapiens
cacuuuguccugcuucacggaccuccccaaag

SEQ ID NO: 393107 - RNA, 32 nt, Homo Sapiens
gaaguuucuggugcuauuuuuguguuguaaug

SEQ ID NO: 393108 - RNA, 32 nt, Homo Sapiens
cugaagccgaacuuaucacucuuggggcagcc

SEQ ID NO: 393109 - RNA, 32 nt, Homo Sapiens
acuaaggagguaaaagaucuguucaaggaaaa

SEQ ID NO: 393110 - RNA, 32 nt, Homo Sapiens
uuaacacagugucauuaucuugcaauauaaac

SEQ ID NO: 393111 - RNA, 32 nt, Homo Sapiens
gaagccauccugaaacucuuuggagaauacuu

SEQ ID NO: 393112 - RNA, 32 nt, Homo Sapiens
gaggcuggcugcccuccccacaggggguggug

SEQ ID NO: 393113 - RNA, 30 nt, Homo Sapiens
uuucuuaaguacccugccuccacucuauag

SEQ ID NO: 393114 - RNA, 32 nt, Homo Sapiens
ugaguggaaugucauggccagcuccucggaca

SEQ ID NO: 393115 - RNA, 32 nt, Homo Sapiens
agucccagccccaaccacgucccggcccccga

SEQ ID NO: 393116 - RNA, 32 nt, Homo Sapiens
gauuuaaggauuuuaauagaaagucaugaugu

SEQ ID NO: 393117 - RNA, 32 nt, Homo Sapiens
agaaccuuaaacauguggauauuuuugccaac

SEQ ID NO: 393118 - RNA, 32 nt, Homo Sapiens
uuguuuuguuuuacccagaaauaagauaacuc

SEQ ID NO: 393119 - RNA, 32 nt, Homo Sapiens
uaggaaggauuuucuuuuuaacuuuaccaaau

SEQ ID NO: 393120 - RNA, 32 nt, Homo Sapiens
aaugguugaucucauguugccuugcuuacuuu

SEQ ID NO: 393121 - RNA, 32 nt, Homo Sapiens
ggggcagccagacuugccagaggggucucucc

SEQ ID NO: 393122 - RNA, 32 nt, Homo Sapiens
cccaacacuccagccccuugguccuguggaug

SEQ ID NO: 393123 - RNA, 32 nt, Homo Sapiens
aaaucagagaauguaauuuauagaaagaaugc

SEQ ID NO: 393124 - RNA, 32 nt, Homo Sapiens
gggaugagcccgccugagugccccacagcaag

SEQ ID NO: 393125 - RNA, 32 nt, Homo Sapiens
ggauugcgcgcaggagcccggcguggaggagu

SEQ ID NO: 393126 - RNA, 32 nt, Homo Sapiens
gcccgugaagacuuuggccuagcaaauugugu

SEQ ID NO: 393127 - RNA, 32 nt, Homo Sapiens
ugguuuugacuaaugacaaaccucuuuuuaag

SEQ ID NO: 393128 - RNA, 32 nt, Homo Sapiens
cugcacgcacuccagccugggcgacagagcga

SEQ ID NO: 393129 - RNA, 32 nt, Homo Sapiens
ggaugauugggcgggggugggggauuagaugu

SEQ ID NO: 393130 - RNA, 32 nt, Homo Sapiens
uuuuucuuucuuuuuuaaaagaagaugguuuc

SEQ ID NO: 393131 - RNA, 32 nt, Homo Sapiens
cucugcgaacguuaaguccguccccagcgcuu

SEQ ID NO: 393132 - RNA, 32 nt, Homo Sapiens
cuccucugacugcgcgggaggugaagcaaauu

SEQ ID NO: 393133 - RNA, 32 nt, Homo Sapiens
cccgaggccuuggaaggccggaugcccugugu

SEQ ID NO: 393134 - RNA, 32 nt, Homo Sapiens
ucaauuuuuauuauuuuuuuuauagagacagg

SEQ ID NO: 393135 - RNA, 32 nt, Homo Sapiens
cacccccuaacucacagcacaaacccugcaaa

SEQ ID NO: 393136 - RNA, 32 nt, Homo Sapiens
gggucaggcgcggagaggagcggcgggagagc

SEQ ID NO: 393137 - RNA, 32 nt, Homo Sapiens
aagcaacaggcacugccaaauucagggaacag

SEQ ID NO: 393138 - RNA, 32 nt, Homo Sapiens
uauucauucaucaaauacaugggacuucacaa

SEQ ID NO: 393139 - RNA, 32 nt, Homo Sapiens
cccgcugcacgacgacgcgacgccccugcugc

SEQ ID NO: 393140 - RNA, 32 nt, Homo Sapiens
gggggcggguccgugacccuccggcugcucgg

SEQ ID NO: 393141 - RNA, 32 nt, Homo Sapiens
uuggugggcggggugauuucgggcagucaggu

SEQ ID NO: 393142 - RNA, 32 nt, Homo Sapiens
caguagccacuacucccccugccuggcccuga

SEQ ID NO: 393143 - RNA, 32 nt, Homo Sapiens
uccuugcaccucagccugcagauggccuauug

SEQ ID NO: 393144 - RNA, 32 nt, Homo Sapiens
cucuguggcugaggugggagggggaggguggg

SEQ ID NO: 393145 - RNA, 32 nt, Homo Sapiens
gcccccucacagagaccucuuugcccccuggg

SEQ ID NO: 393146 - RNA, 32 nt, Homo Sapiens
aaucucucacuuuauuuuguagaaccauuuga

SEQ ID NO: 393147 - RNA, 32 nt, Homo Sapiens
ugugucaaaggcgccaugagcaagaucagcga

SEQ ID NO: 393148 - RNA, 32 nt, Homo Sapiens
aagacgggggcaguccugggggugcugcggcu

SEQ ID NO: 393149 - RNA, 32 nt, Homo Sapiens
gaaugaguuuccaauuacccugaugugacaau

SEQ ID NO: 393150 - RNA, 32 nt, Homo Sapiens
agacugauugaaaagagaugcuauagaguuuc

SEQ ID NO: 393151 - RNA, 32 nt, Homo Sapiens
cggccgccgggcacuuccuguggaggccgcag

SEQ ID NO: 393152 - RNA, 32 nt, Homo Sapiens
ccauggggcccucccaggccccugccccaacu

SEQ ID NO: 393153 - RNA, 32 nt, Homo Sapiens
caucuuauuuuugauuaauugaauauaucuau

SEQ ID NO: 393154 - RNA, 32 nt, Homo Sapiens
ggcacgaggguggucagcacaggggccggcac

SEQ ID NO: 393155 - RNA, 32 nt, Homo Sapiens
uguauugcauugaaccacuugucuacaaacca

SEQ ID NO: 393156 - RNA, 32 nt, Homo Sapiens
ugucaagaauaaagaaguccggacgaacucug

SEQ ID NO: 393157 - RNA, 32 nt, Homo Sapiens
cuacaguaugauguuagugaacuauuaauaau

SEQ ID NO: 393158 - RNA, 32 nt, Homo Sapiens
ggugcuggaggcgggcuugguguccggcucaa

SEQ ID NO: 393159 - RNA, 32 nt, Homo Sapiens
gccacuugcaagcaacaucugcucuguuccuc

SEQ ID NO: 393160 - RNA, 32 nt, Homo Sapiens
agugaauuggaagacagaaauaauuucugaaa

SEQ ID NO: 393161 - RNA, 32 nt, Homo Sapiens
caacaucaaaacuguuaacauagcggcggcgg

SEQ ID NO: 393162 - RNA, 32 nt, Homo Sapiens
ccucaggaucuugugccuggaaauagccugag

SEQ ID NO: 393163 - RNA, 32 nt, Homo Sapiens
aacuuugaaaucaaaaucauuugguugaaaca

SEQ ID NO: 393164 - RNA, 32 nt, Homo Sapiens
ugggaucaguggccccucuggacaugccucuc

SEQ ID NO: 393165 - RNA, 32 nt, Homo Sapiens
cacaguacugaauaccuaucucaucaaaugcc

SEQ ID NO: 393166 - RNA, 32 nt, Homo Sapiens
augguuaaaacaaccugagauggagaggccag

SEQ ID NO: 393167 - RNA, 32 nt, Homo Sapiens
guuuuacauuaauacugcaugcuuuucuaugu

SEQ ID NO: 393168 - RNA, 28 nt, Homo Sapiens
gacaaggggcggcuggucggaguggcgg

SEQ ID NO: 393169 - RNA, 32 nt, Homo Sapiens
ucugagcuuagggauuccauuuucuuuguuca

SEQ ID NO: 393170 - RNA, 32 nt, Homo Sapiens
aaggccccccuacuccacucaguguccaggga

SEQ ID NO: 393171 - RNA, 32 nt, Homo Sapiens
aguaccagcugaugcaucuccugauucuaagu

SEQ ID NO: 393172 - RNA, 32 nt, Homo Sapiens
gcagcucugcucuguguccucaggaagucaca

SEQ ID NO: 393173 - RNA, 32 nt, Homo Sapiens
uuguuaccaaaauaucaaaaccacuuugaguu

SEQ ID NO: 393174 - RNA, 32 nt, Homo Sapiens
ugcccuccagcaugccuggcugauuuuuguau

SEQ ID NO: 393175 - RNA, 31 nt, Homo Sapiens
uauuuaaaauaaaacacagguauagcaguau

SEQ ID NO: 393176 - RNA, 32 nt, Homo Sapiens
cuugcuuugcuuuccucucuaugaugugauaa

SEQ ID NO: 393177 - RNA, 32 nt, Homo Sapiens
uauuuuuaaaacugauuguaucauugccucac

SEQ ID NO: 393178 - RNA, 32 nt, Homo Sapiens
aauaggugcuucuuggauguucuuggguuugg

SEQ ID NO: 393179 - RNA, 32 nt, Homo Sapiens
cacaggagggcuuuuuuggggggaugaccagu

SEQ ID NO: 393180 - RNA, 32 nt, Homo Sapiens
cagcuuucauaaguagaaccaauauaaggacg

SEQ ID NO: 393181 - RNA, 32 nt, Homo Sapiens
ggccaggcgggguggcucacgccuguaauccc

SEQ ID NO: 393182 - RNA, 32 nt, Homo Sapiens
ggccaggcgugguggcucacgccuggaauccc

SEQ ID NO: 393183 - RNA, 32 nt, Homo Sapiens
ccuucuuugcacuugcuucucauuuggcuauu

SEQ ID NO: 393184 - RNA, 32 nt, Homo Sapiens
agcgccacaacggugccagccggagcagccgg

SEQ ID NO: 393185 - RNA, 32 nt, Homo Sapiens
auggugcccugggcuguguccuccccuaggga

SEQ ID NO: 393186 - RNA, 32 nt, Homo Sapiens
cauugaaauauguuuuguauaaauuugucaug

SEQ ID NO: 393187 - RNA, 32 nt, Homo Sapiens
cugugccuugguuuccugagccaccuuuacuc

SEQ ID NO: 393188 - RNA, 32 nt, Homo Sapiens
ggcuccaccuuguuaaauaaauuggauguaug

SEQ ID NO: 393189 - RNA, 32 nt, Homo Sapiens
acccacccacccaccacacuggacuuuucuag

SEQ ID NO: 393190 - RNA, 32 nt, Homo Sapiens
cuucccgauccggaugugaugaaaaagagcaa

SEQ ID NO: 393191 - RNA, 32 nt, Homo Sapiens
auuaugcuuugaaaaauaauuauggggaaaua

SEQ ID NO: 393192 - RNA, 32 nt, Homo Sapiens
uggacccucagccuggguggguucucuggcug

SEQ ID NO: 393193 - RNA, 32 nt, Homo Sapiens
gaaguauucuaccugauuccagaguucauucc

SEQ ID NO: 393194 - RNA, 32 nt, Homo Sapiens
auuuuaucuucagcuucuguuauuaauucuua

SEQ ID NO: 393195 - RNA, 32 nt, Homo Sapiens
ggccugcugagguggggguggggcugacucug

SEQ ID NO: 393196 - RNA, 32 nt, Homo Sapiens
cuacaagagcagccucuccggcuacggagccg

SEQ ID NO: 393197 - RNA, 30 nt, Homo Sapiens
cgcucggugauccgcggcggcggcagcggc

SEQ ID NO: 393198 - RNA, 32 nt, Homo Sapiens
aacgcaaacgauuuauuauccagauuauuugg

SEQ ID NO: 393199 - RNA, 30 nt, Homo Sapiens
ccugacggagccgcggcgccggcgaagucg

SEQ ID NO: 393200 - RNA, 32 nt, Homo Sapiens
cguuggggcccgguggcccacccuuuccguag

SEQ ID NO: 393201 - RNA, 32 nt, Homo Sapiens
caucaugucuucugcuuucacgugucugggau

SEQ ID NO: 393202 - RNA, 32 nt, Homo Sapiens
acagauauauaaaaguguuaaucuuugugcua

SEQ ID NO: 393203 - RNA, 32 nt, Homo Sapiens
ccuggagcccauccccggggcgcacaucuccg

SEQ ID NO: 393204 - RNA, 32 nt, Homo Sapiens
uagagcuguauaacuauaguuugaacuagcaa

SEQ ID NO: 393205 - RNA, 32 nt, Homo Sapiens
aaaaucaaaaauuuucacauuugauuaugaaa

SEQ ID NO: 393206 - RNA, 32 nt, Homo Sapiens
gggcggcagcgguggcggcgguagccagcgcc

SEQ ID NO: 393207 - RNA, 32 nt, Homo Sapiens
gagagggauugagaaagagacgcugaugggau

SEQ ID NO: 393208 - RNA, 32 nt, Homo Sapiens
aggguuacuuuucucuggggaccucccccauc

SEQ ID NO: 393209 - RNA, 32 nt, Homo Sapiens
gagaccccuaguaacagucuccagcugccuac

SEQ ID NO: 393210 - RNA, 32 nt, Homo Sapiens
uucaggacauggggcauagaaacugaggagua

SEQ ID NO: 393211 - RNA, 32 nt, Homo Sapiens
acacagugguaacagacugccaguguucaucc

SEQ ID NO: 393212 - RNA, 31 nt, Homo Sapiens
uaagaaagaaacacuuuugaccugugagaga

SEQ ID NO: 393213 - RNA, 32 nt, Homo Sapiens
uaaggaagaaauauauuacaaaaguauaaaau

SEQ ID NO: 393214 - RNA, 32 nt, Homo Sapiens
uuuuuuaguuguugagacagaguuucacucuu

SEQ ID NO: 393215 - RNA, 32 nt, Homo Sapiens
ccuagcccgaagaaaacgccgcacaaaacagu

SEQ ID NO: 393216 - RNA, 32 nt, Homo Sapiens
uagagacggcuuucuugugccccucccugggg

SEQ ID NO: 393217 - RNA, 31 nt, Homo Sapiens
cgcucggcccgcgaccugccccgagcccucu

SEQ ID NO: 393218 - RNA, 28 nt, Homo Sapiens
uuaugguggccuuccaggauguggcucg

SEQ ID NO: 393219 - RNA, 32 nt, Homo Sapiens
gcccagugcuuggccuggcaguggcuucagag

SEQ ID NO: 393220 - RNA, 32 nt, Homo Sapiens
uagccaaguaucuuaaacucugcacacuugaa

SEQ ID NO: 393221 - RNA, 32 nt, Homo Sapiens
acauuaaaauaauuauugauauuuuagggcuu

SEQ ID NO: 393222 - RNA, 32 nt, Homo Sapiens
ccccaggaccucugcggaacaagauccggauu

SEQ ID NO: 393223 - RNA, 32 nt, Homo Sapiens
auugcagaaaauaacauuguaauagcaaguaa

SEQ ID NO: 393224 - RNA, 32 nt, Homo Sapiens
gccucacuuuaaaaacaaaaacacaaaaaacc

SEQ ID NO: 393225 - RNA, 32 nt, Homo Sapiens
caccccggagagcucccuccccggccuuguuu

SEQ ID NO: 393226 - RNA, 32 nt, Homo Sapiens
ugaugggaugaaaacuccauggacuuguaagu

SEQ ID NO: 393227 - RNA, 32 nt, Homo Sapiens
ggauuugaacaaguaagagguuaugccaaaau

SEQ ID NO: 393228 - RNA, 32 nt, Homo Sapiens
cacacuuaucccagacacaacaccaugugguc

SEQ ID NO: 393229 - RNA, 32 nt, Homo Sapiens
ggcgccccaucccccaacagaacucccgggcc

SEQ ID NO: 393230 - RNA, 32 nt, Homo Sapiens
ccuuuaggaaaugcuaucuuugcucuucuccu

SEQ ID NO: 393231 - RNA, 32 nt, Homo Sapiens
ucugggagggucagggccggaugguggacaga

SEQ ID NO: 393232 - RNA, 32 nt, Homo Sapiens
uuuucuuaauuuauguauaaauccauaugauu

SEQ ID NO: 393233 - RNA, 32 nt, Homo Sapiens
ucugugaguuaccaccucaaguucuaugaagc

SEQ ID NO: 393234 - RNA, 32 nt, Homo Sapiens
aauauuugucuccuaucauuuucuucccuuuc

SEQ ID NO: 393235 - RNA, 32 nt, Homo Sapiens
uucuguguguucguagaaaugauucaauaccu

SEQ ID NO: 393236 - RNA, 32 nt, Homo Sapiens
gggacaaggcauuuuuucaugauucgucagua

SEQ ID NO: 393237 - RNA, 32 nt, Homo Sapiens
gucauugacaauguauaaacuaauuguugguu

SEQ ID NO: 393238 - RNA, 32 nt, Homo Sapiens
cucuggccuuucugggucgacacgcacguaga

SEQ ID NO: 393239 - RNA, 32 nt, Homo Sapiens
aucggcaauguaaaaauccccaaacaucuuau

SEQ ID NO: 393240 - RNA, 31 nt, Homo Sapiens
cccggccuccgcagccagaccuugacacaaa

SEQ ID NO: 393241 - RNA, 32 nt, Homo Sapiens
gcaggguggaggaggccuggugugggcccuug

SEQ ID NO: 393242 - RNA, 32 nt, Homo Sapiens
augcugagggcuuuguucaucuggucaucgug

SEQ ID NO: 393243 - RNA, 32 nt, Homo Sapiens
ugguggccuugauggggacaaugguuuauucc

SEQ ID NO: 393244 - RNA, 32 nt, Homo Sapiens
cagggcaggaaggacccugugcuccccgcccc

SEQ ID NO: 393245 - RNA, 31 nt, Homo Sapiens
uaucaccagguagcccacugaguuaauauuu

SEQ ID NO: 393246 - RNA, 32 nt, Homo Sapiens
agagaaacucagccucuuucuguauaaacuua

SEQ ID NO: 393247 - RNA, 32 nt, Homo Sapiens
acaugcaauauuuggcuguuucuguguuaauu

SEQ ID NO: 393248 - RNA, 32 nt, Homo Sapiens
uucuccggcugccaagcaggaccuuugcccuc

SEQ ID NO: 393249 - RNA, 32 nt, Homo Sapiens
cuuuaaaaagagaaugucuguuguuuuauaaa

SEQ ID NO: 393250 - RNA, 32 nt, Homo Sapiens
auugcaucgugagcugcagcaguugcacucuu

SEQ ID NO: 393251 - RNA, 32 nt, Homo Sapiens
uugaaugcuucuuuuuccuucaauguuguuug

SEQ ID NO: 393252 - RNA, 32 nt, Homo Sapiens
aauuuucuguguaauugaggcauuccauauaa

SEQ ID NO: 393253 - RNA, 32 nt, Homo Sapiens
auuaguucuguccccuucacaaugagaagugu

SEQ ID NO: 393254 - RNA, 32 nt, Homo Sapiens
gggcaccuucgccaccuucgagcgggcgaggu

SEQ ID NO: 393255 - RNA, 32 nt, Homo Sapiens
ccccaauuccgcccugcccccgccgcggcggc

SEQ ID NO: 393256 - RNA, 32 nt, Homo Sapiens
caugggucuaacuacauugaugaugagaguuu

SEQ ID NO: 393257 - RNA, 32 nt, Homo Sapiens
gggcucuccaugagcaggcggcggcggcgacg

SEQ ID NO: 393258 - RNA, 32 nt, Homo Sapiens
caagugcggagcaccaagcggugguggcugug

SEQ ID NO: 393259 - RNA, 32 nt, Homo Sapiens
cagcccugcccggcugcucugcuuccggucgu

SEQ ID NO: 393260 - RNA, 32 nt, Homo Sapiens
aggcggcggcgcaggcggcggcggcggcauag

SEQ ID NO: 393261 - RNA, 32 nt, Homo Sapiens
cuguugccuaggcuggaguacaguggcaagau

SEQ ID NO: 393262 - RNA, 32 nt, Homo Sapiens
cuggcaugagugacuguguccaggccacaugc

SEQ ID NO: 393263 - RNA, 32 nt, Homo Sapiens
ggcagcggacuaauaaaggccauggcgccagc

SEQ ID NO: 393264 - RNA, 32 nt, Homo Sapiens
cuucuaggccaugaggcccauccagugccucg

SEQ ID NO: 393265 - RNA, 32 nt, Homo Sapiens
ccagccucagagcagaucuuggcacauuuuuc

SEQ ID NO: 393266 - RNA, 32 nt, Homo Sapiens
guaguuaagagaauaaacuagaucuagaauca

SEQ ID NO: 393267 - RNA, 32 nt, Homo Sapiens
cucagagcuuggacagaauuuuuuguauuugu

SEQ ID NO: 393268 - RNA, 32 nt, Homo Sapiens
cagugagcggagcgccugggcggcggcggcgg

SEQ ID NO: 393269 - RNA, 32 nt, Homo Sapiens
cuguuuuccagucucucugugugucugucucu

SEQ ID NO: 393270 - RNA, 32 nt, Homo Sapiens
ucauuccagaggaugcugagaaauguguaggg

SEQ ID NO: 393271 - RNA, 32 nt, Homo Sapiens
gaaguucugaagauggaucauggccgugacug

SEQ ID NO: 393272 - RNA, 32 nt, Homo Sapiens
gaguggguuucuguccuugcagaugggcaauu

SEQ ID NO: 393273 - RNA, 32 nt, Homo Sapiens
cgucgcccacccaccuguggaccggcgaggug

SEQ ID NO: 393274 - RNA, 32 nt, Homo Sapiens
accucucuuagccucaauuugcuccucugaga

SEQ ID NO: 393275 - RNA, 32 nt, Homo Sapiens
cugacccaaugcacgaagccaccccaaaauac

SEQ ID NO: 393276 - RNA, 32 nt, Homo Sapiens
auuggggguccucauucccuucuguaugacag

SEQ ID NO: 393277 - RNA, 32 nt, Homo Sapiens
aauuucccuauuccaauguaugaugaauuucc

SEQ ID NO: 393278 - RNA, 32 nt, Homo Sapiens
uaaaagaaagcagaugcaaucaauggaaaaau

SEQ ID NO: 393279 - RNA, 32 nt, Homo Sapiens
guaugaacuuguuuuucuuaaucuuuaagaug

SEQ ID NO: 393280 - RNA, 32 nt, Homo Sapiens
uccaacauccugacguauucucuucuaccuuc

SEQ ID NO: 393281 - RNA, 32 nt, Homo Sapiens
aauugucaguuauaugaauaaauuacauguca

SEQ ID NO: 393282 - RNA, 32 nt, Homo Sapiens
cgcgcccgcggcccgcgcgccgagauguucua

SEQ ID NO: 393283 - RNA, 32 nt, Homo Sapiens
gcacauaaugguuuuuuguuguuguuguuuuu

SEQ ID NO: 393284 - RNA, 32 nt, Homo Sapiens
gagccgggcuggagaguggggagcacggagac

SEQ ID NO: 393285 - RNA, 32 nt, Homo Sapiens
uuuaaaacaucagauuaaauaauuacacuguu

SEQ ID NO: 393286 - RNA, 32 nt, Homo Sapiens
gguaugccaaacuugaugaggaagcagaaaac

SEQ ID NO: 393287 - RNA, 32 nt, Homo Sapiens
augcaucagaaucaccuguguauuucagugug

SEQ ID NO: 393288 - RNA, 32 nt, Homo Sapiens
ccuucgacaaugagauugucaugaugaaucac

SEQ ID NO: 393289 - RNA, 32 nt, Homo Sapiens
ugauguggucuuccucaccauuggcuauggau

SEQ ID NO: 393290 - RNA, 32 nt, Homo Sapiens
cauuauacuuuauaacuaauagauaacaguuu

SEQ ID NO: 393291 - RNA, 32 nt, Homo Sapiens
guacauaaacauuccacauugugugugaugaa

SEQ ID NO: 393292 - RNA, 30 nt, Homo Sapiens
ucccauuuuaagaugggggaaaauuaaggu

SEQ ID NO: 393293 - RNA, 32 nt, Homo Sapiens
uugcuuucaugacaaauaauacacuuaaggau

SEQ ID NO: 393294 - RNA, 32 nt, Homo Sapiens
aagaaauauagagacuauagcaagaccccggg

SEQ ID NO: 393295 - RNA, 32 nt, Homo Sapiens
aaaaggacaagaggagugucagaaguaggaau

SEQ ID NO: 393296 - RNA, 32 nt, Homo Sapiens
ucaguuucuuuugauccaagaagugcuuacug

SEQ ID NO: 393297 - RNA, 32 nt, Homo Sapiens
gugaucgccgcggcgaugccggaggaggguuc

SEQ ID NO: 393298 - RNA, 32 nt, Homo Sapiens
cauuucaucagcuuuaaucucuaguaaaauua

SEQ ID NO: 393299 - RNA, 32 nt, Homo Sapiens
agucuucccucaugaaaaucacucccagucau

SEQ ID NO: 393300 - RNA, 32 nt, Homo Sapiens
aguuagaggaagaaggucuuggggacuacggg

SEQ ID NO: 393301 - RNA, 30 nt, Homo Sapiens
ucgggagagaagccucccgacccugugccc

SEQ ID NO: 393302 - RNA, 32 nt, Homo Sapiens
gucccuccagacccucuggccgccgccuccuc

SEQ ID NO: 393303 - RNA, 32 nt, Homo Sapiens
gucaucugaucacuggauggauagcucagccu

SEQ ID NO: 393304 - RNA, 32 nt, Homo Sapiens
guaguuuucaccaugacagucuugcacauauu

SEQ ID NO: 393305 - RNA, 32 nt, Homo Sapiens
ggggcuaguuggcacugccauguaucucaggc

SEQ ID NO: 393306 - RNA, 32 nt, Homo Sapiens
auuucaacgaguuugucagcuuuauuaauguu

SEQ ID NO: 393307 - RNA, 32 nt, Homo Sapiens
agggauuuacuauuugugugagguggcaucua

SEQ ID NO: 393308 - RNA, 32 nt, Homo Sapiens
agccugcauuuauaucugaauuauuaccucca

SEQ ID NO: 393309 - RNA, 32 nt, Homo Sapiens
cacacacacacacacacacacacacacccggg

SEQ ID NO: 393310 - RNA, 32 nt, Homo Sapiens
aaaagugcuuucacacugggguguccccucuc

SEQ ID NO: 393311 - RNA, 32 nt, Homo Sapiens
ccucggggaaagggaagcggacgggcaucugg

SEQ ID NO: 393312 - RNA, 32 nt, Homo Sapiens
uuaauaucacgguuaaaagcugcugccaguua

SEQ ID NO: 393313 - RNA, 32 nt, Homo Sapiens
ugguuaaguauuuuguaaacugucacuaaauu

SEQ ID NO: 393314 - RNA, 32 nt, Homo Sapiens
cacaggcgugugccaccacaccuggcuaacuu

SEQ ID NO: 393315 - RNA, 32 nt, Homo Sapiens
uuccagccucgccugagcccgccgggcccgcg

SEQ ID NO: 393316 - RNA, 32 nt, Homo Sapiens
uuuguugaugucaucaaagaucaccagggcau

SEQ ID NO: 393317 - RNA, 32 nt, Homo Sapiens
accuacagaaugggagaaaauauuugcaaacu

SEQ ID NO: 393318 - RNA, 31 nt, Homo Sapiens
uggagccaagccacuacauucuguggaagga

SEQ ID NO: 393319 - RNA, 32 nt, Homo Sapiens
accagggccuucuggaggaguggcacuacccc

SEQ ID NO: 393320 - RNA, 32 nt, Homo Sapiens
cgccgagcccgcguccccggcggcgggcgggc

SEQ ID NO: 393321 - RNA, 32 nt, Homo Sapiens
uaaguaaacugggauuggacaguaguggugca

SEQ ID NO: 393322 - RNA, 32 nt, Homo Sapiens
cuguguauuuuuaaaauauauacauccauacu

SEQ ID NO: 393323 - RNA, 32 nt, Homo Sapiens
gcggcccggccugugagcggccggcgacccug

SEQ ID NO: 393324 - RNA, 32 nt, Homo Sapiens
ugcucagugcacuggcugagcugcaagacauc

SEQ ID NO: 393325 - RNA, 32 nt, Homo Sapiens
augaagacaaauauguauaccuggcauagaga

SEQ ID NO: 393326 - RNA, 27 nt, Homo Sapiens
ugcgccugcuucuucagggcccagucc

SEQ ID NO: 393327 - RNA, 32 nt, Homo Sapiens
caagcccgccccaucccagacaggaagcagag

SEQ ID NO: 393328 - RNA, 32 nt, Homo Sapiens
caaaacauugauuagaagucuuucuuggcggg

SEQ ID NO: 393329 - RNA, 32 nt, Homo Sapiens
uuauggaaagaaucauggcauuacugaggagu

SEQ ID NO: 393330 - RNA, 32 nt, Homo Sapiens
gcuccucagggcagcccggcgcggccagguag

SEQ ID NO: 393331 - RNA, 32 nt, Homo Sapiens
gaggggcugcugcggcagcugcaggggccgac

SEQ ID NO: 393332 - RNA, 32 nt, Homo Sapiens
gaaaccaggaccacuuuugucuguggcuuaaa

SEQ ID NO: 393333 - RNA, 32 nt, Homo Sapiens
cauuugaguagauuucugaaaaacaauguuau

SEQ ID NO: 393334 - RNA, 32 nt, Homo Sapiens
caccccgccaggcugcacucggucgggccucc

SEQ ID NO: 393335 - RNA, 30 nt, Homo Sapiens
uguacagucgucugaagaagcucuggggcg

SEQ ID NO: 393336 - RNA, 32 nt, Homo Sapiens
ugggaggcggccuggggagcccccaacuuaug

SEQ ID NO: 393337 - RNA, 32 nt, Homo Sapiens
uagcacacacugacacaggggccuggacaagc

SEQ ID NO: 393338 - RNA, 32 nt, Homo Sapiens
gauauuaaugaaacaauuuugaacacugauag

SEQ ID NO: 393339 - RNA, 32 nt, Homo Sapiens
gcugcgcuccucccggcccgagccugcccuac

SEQ ID NO: 393340 - RNA, 32 nt, Homo Sapiens
uacugcgccucgugcuggcggacgcagcuggg

SEQ ID NO: 393341 - RNA, 32 nt, Homo Sapiens
aacuaacagcgccucccaccaguguccaggca

SEQ ID NO: 393342 - RNA, 32 nt, Homo Sapiens
cgcuccagacgcgccaccugggcgcuccaaga

SEQ ID NO: 393343 - RNA, 32 nt, Homo Sapiens
gaggucuguuuuucuagacaccaagggggagu

SEQ ID NO: 393344 - RNA, 32 nt, Homo Sapiens
gcacgugugggaggccguuuugugcagcgcca

SEQ ID NO: 393345 - RNA, 32 nt, Homo Sapiens
ugagugagaagcugaggauaaggaaagagcaa

SEQ ID NO: 393346 - RNA, 32 nt, Homo Sapiens
auguggauccagaaagaaaaacaaagguuaag

SEQ ID NO: 393347 - RNA, 32 nt, Homo Sapiens
uugccuguaaaaaguaaaugcauuuuacuaau

SEQ ID NO: 393348 - RNA, 32 nt, Homo Sapiens
cgcuccccaugggcuggcccggaccccaguga

SEQ ID NO: 393349 - RNA, 32 nt, Homo Sapiens
aguggaaaacaauuuuuucagagaauguauuu

SEQ ID NO: 393350 - RNA, 32 nt, Homo Sapiens
agauguccugguuuccugccuccauuucucug

SEQ ID NO: 393351 - RNA, 32 nt, Homo Sapiens
gugugcuuuacuacacaguuugguuacaggac

SEQ ID NO: 393352 - RNA, 32 nt, Homo Sapiens
agacaauuucucuggcacaucuucccacauuu

SEQ ID NO: 393353 - RNA, 32 nt, Homo Sapiens
accccuuggaaucuuuccuccaggcuuccuga

SEQ ID NO: 393354 - RNA, 32 nt, Homo Sapiens
ccucagugccagcagccccgcuccgcucugcc

SEQ ID NO: 393355 - RNA, 32 nt, Homo Sapiens
gucccuguccaggcugcccagggcuucucaua

SEQ ID NO: 393356 - RNA, 32 nt, Homo Sapiens
uugguccaugcagugaagcucuuccaaccugg

SEQ ID NO: 393357 - RNA, 32 nt, Homo Sapiens
ucaguuucuuucaaauacaguuauccccuaau

SEQ ID NO: 393358 - RNA, 32 nt, Homo Sapiens
cccuggcugggcggggaagcuggggugaggga

SEQ ID NO: 393359 - RNA, 32 nt, Homo Sapiens
guaaaaaagaccgaaauuaucaagguaucuua

SEQ ID NO: 393360 - RNA, 32 nt, Homo Sapiens
cugacuucuccugaccugagggcccuggcaca

SEQ ID NO: 393361 - RNA, 32 nt, Homo Sapiens
gucccugugaaaagagguuuguagccuuucag

SEQ ID NO: 393362 - RNA, 32 nt, Homo Sapiens
ccuuuuuucuucagagcuuguugucuuuuucg

SEQ ID NO: 393363 - RNA, 32 nt, Homo Sapiens
agaaacgcuuggagugcuucugaagauacaga

SEQ ID NO: 393364 - RNA, 32 nt, Homo Sapiens
aaaagcuccucuccccaccuccaccuugucac

SEQ ID NO: 393365 - RNA, 32 nt, Homo Sapiens
gggaugacagcggcgacgcagccccggcuguu

SEQ ID NO: 393366 - RNA, 32 nt, Homo Sapiens
cgagcacccgcagcuccggcgccgcggcgaga

SEQ ID NO: 393367 - RNA, 32 nt, Homo Sapiens
gaagccugcagagccccgcuguccuugccccu

SEQ ID NO: 393368 - RNA, 32 nt, Homo Sapiens
cucccugcugcuuugcauucacuuccuuggcc

SEQ ID NO: 393369 - RNA, 32 nt, Homo Sapiens
gggugaaagagcuuccuuuuacuagugagguu

SEQ ID NO: 393370 - RNA, 32 nt, Homo Sapiens
acaaaccaaaauuuaaaugaucagaauuggca

SEQ ID NO: 393371 - RNA, 32 nt, Homo Sapiens
cccaagaagagccucuggcccgggggcugcug

SEQ ID NO: 393372 - RNA, 32 nt, Homo Sapiens
uggauggagccgcccucaccgccgggcccgug

SEQ ID NO: 393373 - RNA, 32 nt, Homo Sapiens
gcugcuccgagcuccgcgucgcgucgcguaga

SEQ ID NO: 393374 - RNA, 32 nt, Homo Sapiens
ccuuggugucagggaccugagaguaagcacau

SEQ ID NO: 393375 - RNA, 31 nt, Homo Sapiens
uccccggagccccuggcccgccuggcccuag

SEQ ID NO: 393376 - RNA, 32 nt, Homo Sapiens
agaaaaaccacuuuuuaaguacuaagucauca

SEQ ID NO: 393377 - RNA, 32 nt, Homo Sapiens
ucaaaagguuaaaaauucuuaauccuacagaa

SEQ ID NO: 393378 - RNA, 32 nt, Homo Sapiens
gccggaacgugcggaccggccggagcaggggu

SEQ ID NO: 393379 - RNA, 32 nt, Homo Sapiens
uucccgcggcagccgcggaucccggccaaggc

SEQ ID NO: 393380 - RNA, 32 nt, Homo Sapiens
gaggaggacgcggcgccggcugccggcgggag

SEQ ID NO: 393381 - RNA, 32 nt, Homo Sapiens
ugcugcgcuucgcuuggugagugcguacuuuu

SEQ ID NO: 393382 - RNA, 32 nt, Homo Sapiens
uaagcagaaaccgaaauggcuuucugguguuc

SEQ ID NO: 393383 - RNA, 32 nt, Homo Sapiens
uauuuagaaauauaaaacuuauccuuuaugau

SEQ ID NO: 393384 - RNA, 32 nt, Homo Sapiens
agugcacaagauaccaucuuggaugcagagac

SEQ ID NO: 393385 - RNA, 32 nt, Homo Sapiens
ggaccuggauacuugauaccugggcauuuaac

SEQ ID NO: 393386 - RNA, 32 nt, Homo Sapiens
gccuggcauguguucagacauauccuaaaaag

SEQ ID NO: 393387 - RNA, 32 nt, Homo Sapiens
uggggcgggcggcgcgugucugcagcugcucc

SEQ ID NO: 393388 - RNA, 32 nt, Homo Sapiens
aaagaaauuaacacccaaaagaauuaaauuga

SEQ ID NO: 393389 - RNA, 32 nt, Homo Sapiens
ugaugcccagcuuggaaauaguugcuuuccau

SEQ ID NO: 393390 - RNA, 32 nt, Homo Sapiens
uuuccuuaaguuccucauuaauucauaugaag

SEQ ID NO: 393391 - RNA, 32 nt, Homo Sapiens
gagagagacagagaagcagagacagaaaguca

SEQ ID NO: 393392 - RNA, 32 nt, Homo Sapiens
gcaaggcgaggguggccccgagcagcuccucc

SEQ ID NO: 393393 - RNA, 32 nt, Homo Sapiens
ugaugcucccuguaaagguggcugggagagaa

SEQ ID NO: 393394 - RNA, 32 nt, Homo Sapiens
ucauuaaagaaaaaccacagauacugaaacau

SEQ ID NO: 393395 - RNA, 32 nt, Homo Sapiens
uccaagagcgggcaggaacagcagcuggccug

SEQ ID NO: 393396 - RNA, 32 nt, Homo Sapiens
agucccuucccucucccuucuaggguccacca

SEQ ID NO: 393397 - RNA, 32 nt, Homo Sapiens
augggaccuggggcaaaggcuaagcgaaggag

SEQ ID NO: 393398 - RNA, 32 nt, Homo Sapiens
accguuaaugugaaguuuuucuuuagucacag

SEQ ID NO: 393399 - RNA, 32 nt, Homo Sapiens
gagcuccgaggcucuccggggcgacgugaccg

SEQ ID NO: 393400 - RNA, 32 nt, Homo Sapiens
uuuaaacuagaucccuucauuauucuuuaugc

SEQ ID NO: 393401 - RNA, 32 nt, Homo Sapiens
cacgguggcugagacugaaugaaaggugagcu

SEQ ID NO: 393402 - RNA, 32 nt, Homo Sapiens
aauaagcaaauauugcuuccuugcuuggaauc

SEQ ID NO: 393403 - RNA, 32 nt, Homo Sapiens
cugggcuccuggcaccauggccccacugaaga

SEQ ID NO: 393404 - RNA, 32 nt, Homo Sapiens
gaaccucaaccuuguuguguuuaccuggcuau

SEQ ID NO: 393405 - RNA, 32 nt, Homo Sapiens
uucaauuauaugauuauaucacaauuuaucca

SEQ ID NO: 393406 - RNA, 32 nt, Homo Sapiens
uggagcugcugcuucacacugacuuacacggu

SEQ ID NO: 393407 - RNA, 32 nt, Homo Sapiens
aucugguggccacagcagccaagccuagagcc

SEQ ID NO: 393408 - RNA, 32 nt, Homo Sapiens
acacagaacaggaaaaguuuccuugucauaaa

SEQ ID NO: 393409 - RNA, 32 nt, Homo Sapiens
aacuucacaugugaaccgugugcaaagccuuu

SEQ ID NO: 393410 - RNA, 32 nt, Homo Sapiens
ccucaucucaauagcaccuccucccuuuucuc

SEQ ID NO: 393411 - RNA, 32 nt, Homo Sapiens
ccaaacacuccuuccuggccuaucucggacug

SEQ ID NO: 393412 - RNA, 32 nt, Homo Sapiens
ggugggaggugauuggauuacggggacaaguc

SEQ ID NO: 393413 - RNA, 32 nt, Homo Sapiens
gcuguggagggagaggaaacagagaccuguag

SEQ ID NO: 393414 - RNA, 32 nt, Homo Sapiens
aguggucuugaaggauucauuuagucacccuc

SEQ ID NO: 393415 - RNA, 32 nt, Homo Sapiens
uuaacauuauuuaccaagaaggacuuaaggga

SEQ ID NO: 393416 - RNA, 32 nt, Homo Sapiens
accccccuuccaggugcuucuaauggguguug

SEQ ID NO: 393417 - RNA, 32 nt, Homo Sapiens
aagaugggcagaagugacaaagggagacacaa

SEQ ID NO: 393418 - RNA, 32 nt, Homo Sapiens
ggcuagaagggucagggaagugggcuaaagga

SEQ ID NO: 393419 - RNA, 32 nt, Homo Sapiens
ccggaggacaaaguacaaacggcagaagcugg

SEQ ID NO: 393420 - RNA, 32 nt, Homo Sapiens
auguauaugucuguaccccagcccccaccuuu

SEQ ID NO: 393421 - RNA, 32 nt, Homo Sapiens
cccagcuucagccccaggcccuaagccagcgu

SEQ ID NO: 393422 - RNA, 30 nt, Homo Sapiens
aggggacagaagcuuuuugucuggagcugc

SEQ ID NO: 393423 - RNA, 32 nt, Homo Sapiens
ucggcuuucugacuucauagauguccagaggc

SEQ ID NO: 393424 - RNA, 32 nt, Homo Sapiens
gugaauuuccuucuguuuggguuccuuguguc

SEQ ID NO: 393425 - RNA, 32 nt, Homo Sapiens
ccagccccuggccuugcccucuuccuuuaggc

SEQ ID NO: 393426 - RNA, 32 nt, Homo Sapiens
gcgggggcgagggagggcgaacugucgaaugu

SEQ ID NO: 393427 - RNA, 32 nt, Homo Sapiens
ccaggcugcgagagagcuaaaaaggaacaaga

SEQ ID NO: 393428 - RNA, 32 nt, Homo Sapiens
ggccaccgcggucuccggccugucugcacccu

SEQ ID NO: 393429 - RNA, 30 nt, Homo Sapiens
gugggucguggcgguggcggcagcggcggu

SEQ ID NO: 393430 - RNA, 32 nt, Homo Sapiens
aaaauugguggucauuucaaugguugacauau

SEQ ID NO: 393431 - RNA, 32 nt, Homo Sapiens
acguuuacuauuucagaggaaauaucuugcca

SEQ ID NO: 393432 - RNA, 32 nt, Homo Sapiens
gccuuggaguuugcuaaauccaaauaugaaaa

SEQ ID NO: 393433 - RNA, 32 nt, Homo Sapiens
ugguuucccucauacaguguguccuccgucuc

SEQ ID NO: 393434 - RNA, 32 nt, Homo Sapiens
ccacgccggggccgccgagaucgggugcccgg

SEQ ID NO: 393435 - RNA, 32 nt, Homo Sapiens
uuugaggucucacuacacuuugaggaaggcag

SEQ ID NO: 393436 - RNA, 32 nt, Homo Sapiens
gcacuuuacauaucaauccaugcugccugauc

SEQ ID NO: 393437 - RNA, 32 nt, Homo Sapiens
aaggaccugcucccuuuccccggccagcucac

SEQ ID NO: 393438 - RNA, 32 nt, Homo Sapiens
uuugucuuuuuugaucuuuguugguuuaaagu

SEQ ID NO: 393439 - RNA, 32 nt, Homo Sapiens
cugauaaagcgugcugugcugugcaguaggaa

SEQ ID NO: 393440 - RNA, 32 nt, Homo Sapiens
gucccucgccccagcccccugcccgccccacu

SEQ ID NO: 393441 - RNA, 32 nt, Homo Sapiens
cccuggagccccagcccugccuucaugcucag

SEQ ID NO: 393442 - RNA, 32 nt, Homo Sapiens
ugcccgcucgcccuuccggccagaccucuauu

SEQ ID NO: 393443 - RNA, 32 nt, Homo Sapiens
uaaugugauggguugguguccgggccacacug

SEQ ID NO: 393444 - RNA, 32 nt, Homo Sapiens
uuuuugcugcuaaagaaaggaacuaagucagg

SEQ ID NO: 393445 - RNA, 32 nt, Homo Sapiens
guuucuuuccccaaaaauugacuuagauauua

SEQ ID NO: 393446 - RNA, 32 nt, Homo Sapiens
cacccagugccuccagccaccaucaccacuga

SEQ ID NO: 393447 - RNA, 32 nt, Homo Sapiens
aauaaaugcuuguauagccuucaucuagauuc

SEQ ID NO: 393448 - RNA, 32 nt, Homo Sapiens
gggggcugaggcaggcagaucgcuugagcuca

SEQ ID NO: 393449 - RNA, 32 nt, Homo Sapiens
gggauuuaauaaauacuuucaagcuucugguu

SEQ ID NO: 393450 - RNA, 32 nt, Homo Sapiens
ggcccuuggggagaggugauucucagggcugg

SEQ ID NO: 393451 - RNA, 32 nt, Homo Sapiens
acagcagauuuuucgaugaaaucuucagagcu

SEQ ID NO: 393452 - RNA, 32 nt, Homo Sapiens
agaggcugggagaagagacgaccgcuggagac

SEQ ID NO: 393453 - RNA, 32 nt, Homo Sapiens
ccagugugguagacuuaaggcuucauuguggg

SEQ ID NO: 393454 - RNA, 32 nt, Homo Sapiens
uuauuuauguaacuaaaucacuguuuuauaaa

SEQ ID NO: 393455 - RNA, 32 nt, Homo Sapiens
gcguuaggagaauaguugugguauggugacuu

SEQ ID NO: 393456 - RNA, 32 nt, Homo Sapiens
ugacaguuuaacaaagauaaaauucugaacug

SEQ ID NO: 393457 - RNA, 32 nt, Homo Sapiens
uguauuuaacuuauguaaaagauaagucugga

SEQ ID NO: 393458 - RNA, 32 nt, Homo Sapiens
uuaaaauauggacgucugaaaaauaaaauauu

SEQ ID NO: 393459 - RNA, 32 nt, Homo Sapiens
cuccgccgcgccccgcccgggcugggguaaag

SEQ ID NO: 393460 - RNA, 32 nt, Homo Sapiens
uuugcuaauagcuaagacaaauuuguaauaaa

SEQ ID NO: 393461 - RNA, 32 nt, Homo Sapiens
uaggacugcccccuuccacgaagaccaaucuc

SEQ ID NO: 393462 - RNA, 32 nt, Homo Sapiens
cucaccacagagcugcuuucuuauacauaaga

SEQ ID NO: 393463 - RNA, 32 nt, Homo Sapiens
acugacuuuuccuucaaucucuucccaaggcu

SEQ ID NO: 393464 - RNA, 32 nt, Homo Sapiens
gguccuugcccuugcuacaaucuccaccaucc

SEQ ID NO: 393465 - RNA, 32 nt, Homo Sapiens
gcugggggugcuaauuacauggcaggaagaau

SEQ ID NO: 393466 - RNA, 32 nt, Homo Sapiens
aacauauauuauauauuauauagagagaggga

SEQ ID NO: 393467 - RNA, 32 nt, Homo Sapiens
cagauaugguggaaacagcaaaagaaauagaa

SEQ ID NO: 393468 - RNA, 32 nt, Homo Sapiens
guugaccuggagacuguggccuuggagcugaa

SEQ ID NO: 393469 - RNA, 32 nt, Homo Sapiens
ugcugaccccucaucuaaaaaauaggcuauac

SEQ ID NO: 393470 - RNA, 32 nt, Homo Sapiens
ucagggguuugugaaaauugugccuauuggcc

SEQ ID NO: 393471 - RNA, 32 nt, Homo Sapiens
acuuuguguuuuuaaauguuuugacgauuuca

SEQ ID NO: 393472 - RNA, 32 nt, Homo Sapiens
cacuuuugaaaugaaauuuuuauaauuguaug

SEQ ID NO: 393473 - RNA, 30 nt, Homo Sapiens
cuuauguaugucccagcagaagccaccgcu

SEQ ID NO: 393474 - RNA, 32 nt, Homo Sapiens
ucccccaggaggacuggauuugguaugaucaa

SEQ ID NO: 393475 - RNA, 32 nt, Homo Sapiens
gcggccaggcccgccccuccccucgugauggu

SEQ ID NO: 393476 - RNA, 32 nt, Homo Sapiens
uaaaaagcaaaauaaaagaaugcauaucuuuc

SEQ ID NO: 393477 - RNA, 32 nt, Homo Sapiens
cccccugcgcgaggaagauccgcagauucaug

SEQ ID NO: 393478 - RNA, 32 nt, Homo Sapiens
uggggaugcggaagaaauggggguccuaacug

SEQ ID NO: 393479 - RNA, 32 nt, Homo Sapiens
uaagcaaaaggagauagagaucugaaauaauu

SEQ ID NO: 393480 - RNA, 32 nt, Homo Sapiens
aagugaaaauuccuucugguucagcaucuugg

SEQ ID NO: 393481 - RNA, 32 nt, Homo Sapiens
gggccugcgcauucuuugagcucucagaugcc

SEQ ID NO: 393482 - RNA, 32 nt, Homo Sapiens
gaaaagcccuucuccuugccccgcacacauuu

SEQ ID NO: 393483 - RNA, 32 nt, Homo Sapiens
augaacauuaucaaaacaaaauguauaauuuc

SEQ ID NO: 393484 - RNA, 32 nt, Homo Sapiens
cauaaucugccauuuuaagaguaagauuugcu

SEQ ID NO: 393485 - RNA, 32 nt, Homo Sapiens
cgaggacacaaacaggcagagagggacgugua

SEQ ID NO: 393486 - RNA, 30 nt, Homo Sapiens
auaagaugucaucggcgagcgcuggacuug

SEQ ID NO: 393487 - RNA, 32 nt, Homo Sapiens
ggagggcagauugcccuucaccuaccucugcg

SEQ ID NO: 393488 - RNA, 32 nt, Homo Sapiens
gaggggcugcaggaaucucuggagagccuggu

SEQ ID NO: 393489 - RNA, 32 nt, Homo Sapiens
cacuuucuuuugccccccagacagcugucugu

SEQ ID NO: 393490 - RNA, 32 nt, Homo Sapiens
gcagccagggugagagcagcccacugccuggg

SEQ ID NO: 393491 - RNA, 32 nt, Homo Sapiens
cccacgucacaggccucccaguaaaggcccug

SEQ ID NO: 393492 - RNA, 32 nt, Homo Sapiens
ggcgucuccgcggcgggcaucccccgaggccg

SEQ ID NO: 393493 - RNA, 32 nt, Homo Sapiens
gcacaggcguccuguccacacccagcucagca

SEQ ID NO: 393494 - RNA, 32 nt, Homo Sapiens
ugucaccuuuuuccucauuagaaggaaaguag

SEQ ID NO: 393495 - RNA, 29 nt, Homo Sapiens
ugccaaaugaagauuuuuaggagugauua

SEQ ID NO: 393496 - RNA, 32 nt, Homo Sapiens
cugccauuguuccacaucucguuauugcuguu

SEQ ID NO: 393497 - RNA, 32 nt, Homo Sapiens
uuuguuacaucaucuuucuguuucuauuuuua

SEQ ID NO: 393498 - RNA, 32 nt, Homo Sapiens
gucacuuccagaugccugugcuuacagcauug

SEQ ID NO: 393499 - RNA, 32 nt, Homo Sapiens
uauuaccucacagcuguuaggauggcuuuuau

SEQ ID NO: 393500 - RNA, 32 nt, Homo Sapiens
uuuuguuuuuguuuuucucagucuuaccugug

SEQ ID NO: 393501 - RNA, 32 nt, Homo Sapiens
ccacaaucagaaaaaggacaaggacaugagac

SEQ ID NO: 393502 - RNA, 32 nt, Homo Sapiens
ucccauucacuuugauuuucuacauguaauua

SEQ ID NO: 393503 - RNA, 32 nt, Homo Sapiens
gugccaaaggcugacccggcccgggcugcgua

SEQ ID NO: 393504 - RNA, 32 nt, Homo Sapiens
cuugaagggaaugucagauucauuuuucuuga

SEQ ID NO: 393505 - RNA, 32 nt, Homo Sapiens
ccaaugaaauuugacaucacuaaacaagcaaa

SEQ ID NO: 393506 - RNA, 32 nt, Homo Sapiens
ccuucccuuggggcuggcgggcggcggcuuac

SEQ ID NO: 393507 - RNA, 32 nt, Homo Sapiens
agugaaaggaggcgcuucggcugcuggaugug

SEQ ID NO: 393508 - RNA, 32 nt, Homo Sapiens
gugggggcguaagcccgggggaugcugggcuc

SEQ ID NO: 393509 - RNA, 32 nt, Homo Sapiens
aaguaucuagguguucucaaauaaaaagcuuu

SEQ ID NO: 393510 - RNA, 32 nt, Homo Sapiens
gaggauggugugggcccuccccgccggccccc

SEQ ID NO: 393511 - RNA, 32 nt, Homo Sapiens
ucagugacgaggaggaggauaccugagugggc

SEQ ID NO: 393512 - RNA, 32 nt, Homo Sapiens
cccugggcgcccgcccaagacccuggcggacc

SEQ ID NO: 393513 - RNA, 32 nt, Homo Sapiens
gaagucucaucccacccauccguuaucaguca

SEQ ID NO: 393514 - RNA, 32 nt, Homo Sapiens
auuuuuauaaaaauuuuuuuuacaaucuaaua

SEQ ID NO: 393515 - RNA, 32 nt, Homo Sapiens
gccuccccuacuccccgcaucuuuggggaauc

SEQ ID NO: 393516 - RNA, 32 nt, Homo Sapiens
cuuguuauauauauguaguuggcauuugguuc

SEQ ID NO: 393517 - RNA, 32 nt, Homo Sapiens
aaauaggauuuacuuuuuucuaauucugaccu

SEQ ID NO: 393518 - RNA, 32 nt, Homo Sapiens
aagggccccggugguccuagggaccccauggc

SEQ ID NO: 393519 - RNA, 32 nt, Homo Sapiens
uuaaaauaucucuaaaauagguaaauguauuu

SEQ ID NO: 393520 - RNA, 32 nt, Homo Sapiens
uaggugcgguauuaaagugaaagggaagguga

SEQ ID NO: 393521 - RNA, 32 nt, Homo Sapiens
gagggagugacccugcugcugcugcuguauau

SEQ ID NO: 393522 - RNA, 32 nt, Homo Sapiens
uuacaggugugagccacagcacucggccuaaa

SEQ ID NO: 393523 - RNA, 32 nt, Homo Sapiens
gagaaaugauuuuaaaacccauuugacauauu

SEQ ID NO: 393524 - RNA, 32 nt, Homo Sapiens
auauuccccuuggaagaugcuuccccaggcua

SEQ ID NO: 393525 - RNA, 32 nt, Homo Sapiens
uccccaggccccccuaagcugcucucccuugg

SEQ ID NO: 393526 - RNA, 32 nt, Homo Sapiens
gugguuugggacagaaagaaauggaaugucuu

SEQ ID NO: 393527 - RNA, 32 nt, Homo Sapiens
gagccgggccgcgccugggcgaacggccggag

SEQ ID NO: 393528 - RNA, 32 nt, Homo Sapiens
gauugcaccuggauaccaggcuuuuguaauag

SEQ ID NO: 393529 - RNA, 32 nt, Homo Sapiens
augucuuuuauaguggaaaaacacauggggaa

SEQ ID NO: 393530 - RNA, 32 nt, Homo Sapiens
ugagaaaaggcacaacugcugccccgcccagu

SEQ ID NO: 393531 - RNA, 32 nt, Homo Sapiens
ggaucauugcauugauauuagcacuggccauu

SEQ ID NO: 393532 - RNA, 31 nt, Homo Sapiens
cgcuuguguaacaguccuguuuuguugaguu

SEQ ID NO: 393533 - RNA, 32 nt, Homo Sapiens
auccuuugugaaauauaauucuagguauuuga

SEQ ID NO: 393534 - RNA, 32 nt, Homo Sapiens
ccaggagccaguuucucaccugcacaaacugu

SEQ ID NO: 393535 - RNA, 32 nt, Homo Sapiens
ucuccaucuuaccaaguugaaaaggggaauau

SEQ ID NO: 393536 - RNA, 32 nt, Homo Sapiens
gccugcacugcgguuguccacggucacaucug

SEQ ID NO: 393537 - RNA, 32 nt, Homo Sapiens
ggaggggagcugcuggccauggcugcuuugua

SEQ ID NO: 393538 - RNA, 32 nt, Homo Sapiens
accaguccccccacccucauucuacugaaaag

SEQ ID NO: 393539 - RNA, 32 nt, Homo Sapiens
cuuuucccugggauguuccugcgccuggcuga

SEQ ID NO: 393540 - RNA, 32 nt, Homo Sapiens
cugugaaguuugguggugucaaguuaugcgcu

SEQ ID NO: 393541 - RNA, 32 nt, Homo Sapiens
gcgcgcugagcaggcccggccgcgcagcgccu

SEQ ID NO: 393542 - RNA, 32 nt, Homo Sapiens
ggccucccgagcucccaggaccccgcgcgcuu

SEQ ID NO: 393543 - RNA, 32 nt, Homo Sapiens
cugccacuucuaugucucuggaccacaggaug

SEQ ID NO: 393544 - RNA, 32 nt, Homo Sapiens
gacaugagccaccacacucagcccuuuaaacc

SEQ ID NO: 393545 - RNA, 32 nt, Homo Sapiens
cuuuuacuuccaugaguauacucuguaaauag

SEQ ID NO: 393546 - RNA, 32 nt, Homo Sapiens
uuuaucuugugauaaauugauuaauguuuaca

SEQ ID NO: 393547 - RNA, 32 nt, Homo Sapiens
cuaccccuuccaugucccaccccacucccacc

SEQ ID NO: 393548 - RNA, 32 nt, Homo Sapiens
gccccgagugcaaucgcgggaagccaggguuu

SEQ ID NO: 393549 - RNA, 32 nt, Homo Sapiens
auuauauucagauagccuuguuuuuuaaaaag

SEQ ID NO: 393550 - RNA, 32 nt, Homo Sapiens
aacuuguuuggaacaaauacucacuuaaaacu

SEQ ID NO: 393551 - RNA, 32 nt, Homo Sapiens
cugcauuaaaaauacuagagauuaggccaggc

SEQ ID NO: 393552 - RNA, 32 nt, Homo Sapiens
cgggaccagcacuggaggaagacaaggauccc

SEQ ID NO: 393553 - RNA, 32 nt, Homo Sapiens
auuaaguuauuuaaaaauauucuucauugaug

SEQ ID NO: 393554 - RNA, 32 nt, Homo Sapiens
gaguuaacggugugggccacuccagcuugccc

SEQ ID NO: 393555 - RNA, 32 nt, Homo Sapiens
ucuuucuuuuuuucuuuuuuaaaguaauuucc

SEQ ID NO: 393556 - RNA, 32 nt, Homo Sapiens
cuggggacacugcugaggaaaagggagaaaaa

SEQ ID NO: 393557 - RNA, 32 nt, Homo Sapiens
uaaaaugaaacacaccuaaaagugugguuguu

SEQ ID NO: 393558 - RNA, 32 nt, Homo Sapiens
aaugaauauuccagguccuggggugugucugu

SEQ ID NO: 393559 - RNA, 32 nt, Homo Sapiens
ccaacuugccagccauguaagggagccaucuu

SEQ ID NO: 393560 - RNA, 31 nt, Homo Sapiens
ccgagaucugcugggucaccaagggcccacg

SEQ ID NO: 393561 - RNA, 32 nt, Homo Sapiens
aggcgucggccgcgacaggcccaguccgcgcc

SEQ ID NO: 393562 - RNA, 31 nt, Homo Sapiens
cagcugcucccuggguggccccgcgcgccgc

SEQ ID NO: 393563 - RNA, 32 nt, Homo Sapiens
cagagccaggcagucacuguuccuccuccugg

SEQ ID NO: 393564 - RNA, 32 nt, Homo Sapiens
ggcauuuugcuaccaagccucuucccaacgcc

SEQ ID NO: 393565 - RNA, 32 nt, Homo Sapiens
cuacagcaacagcagcugggcaagccagauag

SEQ ID NO: 393566 - RNA, 32 nt, Homo Sapiens
uuuuuuuuuuuggaaagcacaaacuucuguaa

SEQ ID NO: 393567 - RNA, 32 nt, Homo Sapiens
ccccggcccgucuccgcgcucaccacgccugc

SEQ ID NO: 393568 - RNA, 28 nt, Homo Sapiens
gaacagucugcaggaccagugacagcac

SEQ ID NO: 393569 - RNA, 32 nt, Homo Sapiens
gagucucaugcaccaccuaucacacucccuca

SEQ ID NO: 393570 - RNA, 32 nt, Homo Sapiens
cauaugauaaccugaacauacugaaugcugcc

SEQ ID NO: 393571 - RNA, 32 nt, Homo Sapiens
cccucccaacuuuucuucccaguaacgccugc

SEQ ID NO: 393572 - RNA, 32 nt, Homo Sapiens
ugccuggccccucccuccaggccagcagggag

SEQ ID NO: 393573 - RNA, 32 nt, Homo Sapiens
ucgcucuuguugcccaggcccgagugcagugg

SEQ ID NO: 393574 - RNA, 32 nt, Homo Sapiens
uugugauuauaaaauacaguuuuguaacauau

SEQ ID NO: 393575 - RNA, 32 nt, Homo Sapiens
uaggcuaagaaacagguuaucagugaaaaguu

SEQ ID NO: 393576 - RNA, 32 nt, Homo Sapiens
gagcccugguucuuccucuccuuuagugucuu

SEQ ID NO: 393577 - RNA, 32 nt, Homo Sapiens
gcaggccacagugaaguguguugcuucuguca

SEQ ID NO: 393578 - RNA, 32 nt, Homo Sapiens
acagaucaacuguguaaucuuuuacuauucaa

SEQ ID NO: 393579 - RNA, 32 nt, Homo Sapiens
gcggcaggaugcaggaggagcuggcgugggag

SEQ ID NO: 393580 - RNA, 32 nt, Homo Sapiens
ccucuggaggcugcggaaauagagccugcuuu

SEQ ID NO: 393581 - RNA, 32 nt, Homo Sapiens
gccacccccacacuccucccacggcuuguggc

SEQ ID NO: 393582 - RNA, 32 nt, Homo Sapiens
gaaauaacguuaugcaucuagauggaagcugc

SEQ ID NO: 393583 - RNA, 32 nt, Homo Sapiens
auuuuuauuaaacuucugguuuaccugaugcu

SEQ ID NO: 393584 - RNA, 32 nt, Homo Sapiens
gcccccucaguuagccuuuuugaggcaaugcc

SEQ ID NO: 393585 - RNA, 32 nt, Homo Sapiens
aaugcccccuccccuugcccuuacuggacuug

SEQ ID NO: 393586 - RNA, 32 nt, Homo Sapiens
ggucacugcagaaugacagagaaggugaagcu

SEQ ID NO: 393587 - RNA, 32 nt, Homo Sapiens
guguccucugucccuuacccagccccaacucc

SEQ ID NO: 393588 - RNA, 32 nt, Homo Sapiens
uuuguauggcagugucagauauuuuuauuuua

SEQ ID NO: 393589 - RNA, 32 nt, Homo Sapiens
ggcaauugaauuacagaugcuuuacaugaaug

SEQ ID NO: 393590 - RNA, 32 nt, Homo Sapiens
acuuuccacccccucccuggccuguucuguuu

SEQ ID NO: 393591 - RNA, 32 nt, Homo Sapiens
cugcucugcugcgguuuaggauggggcuugag

SEQ ID NO: 393592 - RNA, 32 nt, Homo Sapiens
caaaccagaaacuucagagauuuugaaagcaa

SEQ ID NO: 393593 - RNA, 32 nt, Homo Sapiens
uuguuacagauuuuaauacuguggaucaagga

SEQ ID NO: 393594 - RNA, 32 nt, Homo Sapiens
caacagcgugucugcuggaacuucccccaaga

SEQ ID NO: 393595 - RNA, 32 nt, Homo Sapiens
acgcgcacuccagcgcagcgcgugcggugcaa

SEQ ID NO: 393596 - RNA, 32 nt, Homo Sapiens
gggagugguuuaaagcacuucaugaaugaugu

SEQ ID NO: 393597 - RNA, 32 nt, Homo Sapiens
uaauaucccucaugauuugacaccuugucagg

SEQ ID NO: 393598 - RNA, 32 nt, Homo Sapiens
gagauaugggaguugggugaucaguguauuua

SEQ ID NO: 393599 - RNA, 32 nt, Homo Sapiens
cagcaagugggcugucuguauaaaccuccccu

SEQ ID NO: 393600 - RNA, 32 nt, Homo Sapiens
cagcuccgagcagcccgggggccccgcuguug

SEQ ID NO: 393601 - RNA, 32 nt, Homo Sapiens
uggaggguggccuggggccuguggacagugaa

SEQ ID NO: 393602 - RNA, 30 nt, Homo Sapiens
ggagcguggggcgggcaggcagggguuagu

SEQ ID NO: 393603 - RNA, 32 nt, Homo Sapiens
gacaguuguuauuacuguguauaauauuuaca

SEQ ID NO: 393604 - RNA, 32 nt, Homo Sapiens
auugcugcccaccuccuccccuccccacuuga

SEQ ID NO: 393605 - RNA, 32 nt, Homo Sapiens
cacugguguugagcuuuuuuucauauguuugu

SEQ ID NO: 393606 - RNA, 32 nt, Homo Sapiens
aguuacuacugauuuuaaaaugaauaauuuau

SEQ ID NO: 393607 - RNA, 32 nt, Homo Sapiens
cugguggaggggauuugaaauaaucccagcuc

SEQ ID NO: 393608 - RNA, 32 nt, Homo Sapiens
gaagagaagaggaaaaggaauuaaagucucca

SEQ ID NO: 393609 - RNA, 29 nt, Homo Sapiens
ucucaugggguuuuauauuuucauuuguu

SEQ ID NO: 393610 - RNA, 32 nt, Homo Sapiens
acagcgaagggguuccccaccccuacccuaca

SEQ ID NO: 393611 - RNA, 32 nt, Homo Sapiens
ugugacaauauuuuaucuggacugacaugccu

SEQ ID NO: 393612 - RNA, 32 nt, Homo Sapiens
gauaaagcuguaaauaaaauucuuuugaugaa

SEQ ID NO: 393613 - RNA, 32 nt, Homo Sapiens
aggagcgagcaugucguggacacacacagacu

SEQ ID NO: 393614 - RNA, 32 nt, Homo Sapiens
ugugucacaagaccagucuuucugggaggcau

SEQ ID NO: 393615 - RNA, 32 nt, Homo Sapiens
aacagcuuagggauuaauguccuccauuuaua

SEQ ID NO: 393616 - RNA, 32 nt, Homo Sapiens
acguggcaugacuuagggcuagucccaccagc

SEQ ID NO: 393617 - RNA, 32 nt, Homo Sapiens
uuuuaaauggucuguaucuggauuuuaagagc

SEQ ID NO: 393618 - RNA, 31 nt, Homo Sapiens
acuucaacaaagaaaauuuuugguuauagga

SEQ ID NO: 393619 - RNA, 32 nt, Homo Sapiens
cacguccaaacucagcugaaaugccaaacugc

SEQ ID NO: 393620 - RNA, 32 nt, Homo Sapiens
uaauacacuaccaaaugugucuuuagauggcc

SEQ ID NO: 393621 - RNA, 32 nt, Homo Sapiens
gugaucgcugccguggucgccauggggaaguc

SEQ ID NO: 393622 - RNA, 32 nt, Homo Sapiens
cucucuuguuaauuaugaugcugagaaagccu

SEQ ID NO: 393623 - RNA, 32 nt, Homo Sapiens
gggaagguuguugucagcaccgcccccggcuc

SEQ ID NO: 393624 - RNA, 32 nt, Homo Sapiens
caggugaucugccugccuuggccucccgaagu

SEQ ID NO: 393625 - RNA, 32 nt, Homo Sapiens
cacgagggagcccggguggugcccugagccuc

SEQ ID NO: 393626 - RNA, 32 nt, Homo Sapiens
ggcagcggcucggcccugcugcuggcccggug

SEQ ID NO: 393627 - RNA, 32 nt, Homo Sapiens
ugugugcgcgcccccucugcaauguaugcccc

SEQ ID NO: 393628 - RNA, 32 nt, Homo Sapiens
ccguaaauacucaggauuggagcugcuuguaa

SEQ ID NO: 393629 - RNA, 29 nt, Homo Sapiens
uuuguaugaaguuuauccuguuucuaaga

SEQ ID NO: 393630 - RNA, 32 nt, Homo Sapiens
auauuuuaguagcguuacauauauuauaaauu

SEQ ID NO: 393631 - RNA, 32 nt, Homo Sapiens
ugcucuuccuuccugcagcuucaugcuccaau

SEQ ID NO: 393632 - RNA, 32 nt, Homo Sapiens
cugggcaugcuucguagagggccaggagcagc

SEQ ID NO: 393633 - RNA, 32 nt, Homo Sapiens
gccugcaggaggaggaacagagaagccugggc

SEQ ID NO: 393634 - RNA, 32 nt, Homo Sapiens
cacucccucuggccggcccagggcgccuucag

SEQ ID NO: 393635 - RNA, 32 nt, Homo Sapiens
guccuacagcuggcagagacagaugccucggu

SEQ ID NO: 393636 - RNA, 32 nt, Homo Sapiens
uccauguacuuagacuccuuuauuuguuaaau

SEQ ID NO: 393637 - RNA, 32 nt, Homo Sapiens
uucacgccccacucgcccaccggagccuagac

SEQ ID NO: 393638 - RNA, 32 nt, Homo Sapiens
gugugaugcuguccuuccuggaccccauucug

SEQ ID NO: 393639 - RNA, 32 nt, Homo Sapiens
uuucagguuggaagaagaaaaauagccucaau

SEQ ID NO: 393640 - RNA, 32 nt, Homo Sapiens
ggugacgaggccacccagagccaggcggugca

SEQ ID NO: 393641 - RNA, 32 nt, Homo Sapiens
cagugcucuucauagacacaucuugcagcauu

SEQ ID NO: 393642 - RNA, 32 nt, Homo Sapiens
acuuuaaaauuuguccuacauucgaaaaauag

SEQ ID NO: 393643 - RNA, 32 nt, Homo Sapiens
gccccuccuuggggucugcgggcugagugugc

SEQ ID NO: 393644 - RNA, 32 nt, Homo Sapiens
cauggccaucuaucuaaauauuauaucaacug

SEQ ID NO: 393645 - RNA, 32 nt, Homo Sapiens
gccagcaauaccgcugcccccuggcgacaggg

SEQ ID NO: 393646 - RNA, 32 nt, Homo Sapiens
gggagcccccugcuccucccaacaaacuccag

SEQ ID NO: 393647 - RNA, 32 nt, Homo Sapiens
cuguggcuuagaggaaagaaauggucuaucaa

SEQ ID NO: 393648 - RNA, 32 nt, Homo Sapiens
ggggcuguggccugggggccacuguggacaga

SEQ ID NO: 393649 - RNA, 32 nt, Homo Sapiens
cagugcccggcgggcaucugugcacugugggc

SEQ ID NO: 393650 - RNA, 32 nt, Homo Sapiens
aggugggggcacagggcccaccccgcccggga

SEQ ID NO: 393651 - RNA, 32 nt, Homo Sapiens
ggugaugagcuccacacccccacacccauugc

SEQ ID NO: 393652 - RNA, 32 nt, Homo Sapiens
agcagagagagaauugcagagaaucagacucc

SEQ ID NO: 393653 - RNA, 32 nt, Homo Sapiens
cuaucaaacaauugaauauuauaucaauaaau

SEQ ID NO: 393654 - RNA, 32 nt, Homo Sapiens
gcgucuugguggcaugcaugugucucaucauc

SEQ ID NO: 393655 - RNA, 32 nt, Homo Sapiens
uggcuggguggaagaaggguguggaagguaug

SEQ ID NO: 393656 - RNA, 32 nt, Homo Sapiens
cagagccggugggaagcggggaggggcugcgu

SEQ ID NO: 393657 - RNA, 32 nt, Homo Sapiens
ugaggcagcuugugaggcaagcauucuggaga

SEQ ID NO: 393658 - RNA, 32 nt, Homo Sapiens
gugggccgcccuccccccgaaaccugggcugg

SEQ ID NO: 393659 - RNA, 32 nt, Homo Sapiens
uuaaaggguuuucuuucuuuuuuaauaaaaca

SEQ ID NO: 393660 - RNA, 32 nt, Homo Sapiens
uugcugaauugaucucuuuaucguuuuauaau

SEQ ID NO: 393661 - RNA, 32 nt, Homo Sapiens
cagaggacuuccugccaaucucuucugugagg

SEQ ID NO: 393662 - RNA, 32 nt, Homo Sapiens
ucaggaaacgaaaccuuugugcucugcagccu

SEQ ID NO: 393663 - RNA, 32 nt, Homo Sapiens
acugcauccuaccaccaacucauccaacugac

SEQ ID NO: 393664 - RNA, 32 nt, Homo Sapiens
aucuggaacugggaggcuggagaaagggaagu

SEQ ID NO: 393665 - RNA, 32 nt, Homo Sapiens
ccugccagcccauaaauggacuauuuauugua

SEQ ID NO: 393666 - RNA, 32 nt, Homo Sapiens
ucuuugagugggggaggcagggacgagggaag

SEQ ID NO: 393667 - RNA, 32 nt, Homo Sapiens
cggucuagcgcugcgugggccauggugcagcu

SEQ ID NO: 393668 - RNA, 32 nt, Homo Sapiens
ucuguugugggcacccaugccuggacaagggg

SEQ ID NO: 393669 - RNA, 32 nt, Homo Sapiens
augagaaauggcauggccucuuccauggccag

SEQ ID NO: 393670 - RNA, 32 nt, Homo Sapiens
cccuagugguggcccagcuggcuggaguccag

SEQ ID NO: 393671 - RNA, 32 nt, Homo Sapiens
uuagcaccaaacuucuacaaaccaagcucagg

SEQ ID NO: 393672 - RNA, 32 nt, Homo Sapiens
cgggcuccgguggugcggggcccucucagguu

SEQ ID NO: 393673 - RNA, 32 nt, Homo Sapiens
gggcacaugaaagaaagaacagcaaauuacca

SEQ ID NO: 393674 - RNA, 32 nt, Homo Sapiens
aagggaagcuuuuccucucucuaauuagcuuu

SEQ ID NO: 393675 - RNA, 32 nt, Homo Sapiens
uggcccugugcacgcacgcacacacacacaca

SEQ ID NO: 393676 - RNA, 32 nt, Homo Sapiens
uccuacgccuucccucagcucugcuacucaau

SEQ ID NO: 393677 - RNA, 32 nt, Homo Sapiens
aacacugccaggugucucugguuugggaugcu

SEQ ID NO: 393678 - RNA, 32 nt, Homo Sapiens
cuagagaggcagaggagaaggguuuccagagu

SEQ ID NO: 393679 - RNA, 32 nt, Homo Sapiens
uggcucgggaggugcuguguuugcgcaggcgu

SEQ ID NO: 393680 - RNA, 32 nt, Homo Sapiens
ggcggcggcaagggcgggagggagcggucgcc

SEQ ID NO: 393681 - RNA, 32 nt, Homo Sapiens
ucaaaguaaauuuuaauucaaaucaugucugu

SEQ ID NO: 393682 - RNA, 32 nt, Homo Sapiens
ccgccucgguuuuccaaagagcugggauuaca

SEQ ID NO: 393683 - RNA, 32 nt, Homo Sapiens
cugcacuuuuucugucugcccuucaucgucaa

SEQ ID NO: 393684 - RNA, 32 nt, Homo Sapiens
uggaacgugccggaacuuuuuguccauucccu

SEQ ID NO: 393685 - RNA, 32 nt, Homo Sapiens
guccugugugugggcucugaaggcucagcccu

SEQ ID NO: 393686 - RNA, 32 nt, Homo Sapiens
agcaccugccuccuggugucucccaggccauc

SEQ ID NO: 393687 - RNA, 32 nt, Homo Sapiens
gcacguuucauuaauccaaccaaaaauaauga

SEQ ID NO: 393688 - RNA, 32 nt, Homo Sapiens
uuuguguaugugggaguacucucaucacuaca

SEQ ID NO: 393689 - RNA, 32 nt, Homo Sapiens
cuauuuuuguguuugaaagugaaaccaacauc

SEQ ID NO: 393690 - RNA, 32 nt, Homo Sapiens
ggucucaccauguuacccaggcuggucucaaa

SEQ ID NO: 393691 - RNA, 28 nt, Homo Sapiens
cagaggggcggggccaggauggcguguc

SEQ ID NO: 393692 - RNA, 32 nt, Homo Sapiens
accaguaacuuuacuguaaauuuacuuuguuu

SEQ ID NO: 393693 - RNA, 32 nt, Homo Sapiens
agcgcagcggcgggcugaagggcuccuccagc

SEQ ID NO: 393694 - RNA, 32 nt, Homo Sapiens
cgaccugcccgucuccgccgccggcggcccuu

SEQ ID NO: 393695 - RNA, 31 nt, Homo Sapiens
aggagaagcccccagaaccaggcccccaacu

SEQ ID NO: 393696 - RNA, 30 nt, Homo Sapiens
cuuuucuucuuuaggaccugggcgcugacu

SEQ ID NO: 393697 - RNA, 32 nt, Homo Sapiens
cgccuuccacuccaucauuucauuucacaccc

SEQ ID NO: 393698 - RNA, 32 nt, Homo Sapiens
uguaugaaugacuuuguaaauuuuguucuaua

SEQ ID NO: 393699 - RNA, 32 nt, Homo Sapiens
uguccccgccccagccguccuccuggggugga

SEQ ID NO: 393700 - RNA, 32 nt, Homo Sapiens
ucaggcuccaacauccucccccugucaagaug

SEQ ID NO: 393701 - RNA, 32 nt, Homo Sapiens
uuuuagccucaucgugggaaaggugguaaagg

SEQ ID NO: 393702 - RNA, 32 nt, Homo Sapiens
cauuauagagagaggagaggaggggaagagcc

SEQ ID NO: 393703 - RNA, 32 nt, Homo Sapiens
guuuucugaacccuuaaacuuuuuuagcaugu

SEQ ID NO: 393704 - RNA, 32 nt, Homo Sapiens
augcugaaauguuugggauauguuuguugaca

SEQ ID NO: 393705 - RNA, 32 nt, Homo Sapiens
ggugacacuguuagaagcugugaugguugugu

SEQ ID NO: 393706 - RNA, 32 nt, Homo Sapiens
gugcuuuuacagcuucauuuuccacuauuuua

SEQ ID NO: 393707 - RNA, 32 nt, Homo Sapiens
cacugguaauauuaagagucuuucucagggua

SEQ ID NO: 393708 - RNA, 32 nt, Homo Sapiens
gaucuuuuggcuuuguaauauauucaguucca

SEQ ID NO: 393709 - RNA, 32 nt, Homo Sapiens
cuguguggccacgcccagggcgcggaaggcca

SEQ ID NO: 393710 - RNA, 32 nt, Homo Sapiens
uucgucucaaacaaacaaaaaaauuagccggg

SEQ ID NO: 393711 - RNA, 32 nt, Homo Sapiens
auuuaaaaauauauuuuuagcagucguaaugu

SEQ ID NO: 393712 - RNA, 32 nt, Homo Sapiens
guagauagucagaugucuuuugaaaauguguu

SEQ ID NO: 393713 - RNA, 32 nt, Homo Sapiens
gcuugguuuuaaaauccuuagccuggucugac

SEQ ID NO: 393714 - RNA, 32 nt, Homo Sapiens
cuguucuggaauccuuggcugcggcuuugugu

SEQ ID NO: 393715 - RNA, 32 nt, Homo Sapiens
gggcagggggaagccugcacagacggcggcau

SEQ ID NO: 393716 - RNA, 32 nt, Homo Sapiens
ugggauugcuaugcacugggcagacccgucac

SEQ ID NO: 393717 - RNA, 32 nt, Homo Sapiens
uggacacuuaggagcugccuggacugcaggca

SEQ ID NO: 393718 - RNA, 32 nt, Homo Sapiens
uagcuguguuggaugguaaacacacaggcccg

SEQ ID NO: 393719 - RNA, 31 nt, Homo Sapiens
cagaaaacaaauugcguuggcauguacgugg

SEQ ID NO: 393720 - RNA, 32 nt, Homo Sapiens
gguggggugcccauccugggggcuguguguca

SEQ ID NO: 393721 - RNA, 32 nt, Homo Sapiens
ccagcauccaucucugucaucaucuucaucac

SEQ ID NO: 393722 - RNA, 32 nt, Homo Sapiens
gcuucauacacacaaacauauuuguuuauccc

SEQ ID NO: 393723 - RNA, 32 nt, Homo Sapiens
acagagggaaaggcugaacauaaaucaguuaa

SEQ ID NO: 393724 - RNA, 32 nt, Homo Sapiens
cagagugaggauggaccucaaaaguuugaucc

SEQ ID NO: 393725 - RNA, 32 nt, Homo Sapiens
ugguugcuauggcuuacaugacaacgaauugu

SEQ ID NO: 393726 - RNA, 32 nt, Homo Sapiens
aauuguagcaucuaaugaauguuccaccauug

SEQ ID NO: 393727 - RNA, 32 nt, Homo Sapiens
cugcuguauacuuaucagggacagugagcacc

SEQ ID NO: 393728 - RNA, 32 nt, Homo Sapiens
uugauucuaagccccaugucccuggcacagga

SEQ ID NO: 393729 - RNA, 32 nt, Homo Sapiens
cagcccuggccgccuacuuuguaugugacccu

SEQ ID NO: 393730 - RNA, 32 nt, Homo Sapiens
cccagagcuggacacgaggcaccaugaucaga

SEQ ID NO: 393731 - RNA, 32 nt, Homo Sapiens
agcucccggcccggcagccgagccccagcaca

SEQ ID NO: 393732 - RNA, 32 nt, Homo Sapiens
cugcuggcccaccucccuggaccccguuccac

SEQ ID NO: 393733 - RNA, 32 nt, Homo Sapiens
acucugcuugaagagaugacucuugaccugug

SEQ ID NO: 393734 - RNA, 32 nt, Homo Sapiens
ccaccagagacacacugggaaccgucagaguc

SEQ ID NO: 393735 - RNA, 32 nt, Homo Sapiens
cuguuccugcagcagagcggcccggacgccuc

SEQ ID NO: 393736 - RNA, 32 nt, Homo Sapiens
aaaaauggacacuuuagccaucgccugacuuu

SEQ ID NO: 393737 - RNA, 32 nt, Homo Sapiens
augucauuguauguauaccaaacaagauuguu

SEQ ID NO: 393738 - RNA, 32 nt, Homo Sapiens
acauccugacuuccaaaaacgcaauuuccacu

SEQ ID NO: 393739 - RNA, 32 nt, Homo Sapiens
guaaguaauaucuauuauuauaaaaauaauau

SEQ ID NO: 393740 - RNA, 32 nt, Homo Sapiens
guuucgcugcgcuccgcccgggcccggcucag

SEQ ID NO: 393741 - RNA, 32 nt, Homo Sapiens
cuaacaggggcuggugggcaccaagagccaau

SEQ ID NO: 393742 - RNA, 32 nt, Homo Sapiens
gaagcagggagagaugauuugcugguggggcu

SEQ ID NO: 393743 - RNA, 32 nt, Homo Sapiens
uguggcugggggcccaggauggggcccggcca

SEQ ID NO: 393744 - RNA, 32 nt, Homo Sapiens
auuauacuugggggguugggggauggugggau

SEQ ID NO: 393745 - RNA, 32 nt, Homo Sapiens
aagauauucuaccauauuuuuauaauagcuua

SEQ ID NO: 393746 - RNA, 32 nt, Homo Sapiens
cugagccaaugauucuggaacuguggccuaaa

SEQ ID NO: 393747 - RNA, 32 nt, Homo Sapiens
ucaccccauuuauccaggucuuucuggaucug

SEQ ID NO: 393748 - RNA, 32 nt, Homo Sapiens
gcgccaaaggccagcugucaggugcuaugcgg

SEQ ID NO: 393749 - RNA, 32 nt, Homo Sapiens
caaagaugaguggugaaaaaauaugcuuuccu

SEQ ID NO: 393750 - RNA, 32 nt, Homo Sapiens
uacugcacuccagccccagcugggugacagag

SEQ ID NO: 393751 - RNA, 32 nt, Homo Sapiens
uuuguuguauucuuuauguauugucuugaugu

SEQ ID NO: 393752 - RNA, 32 nt, Homo Sapiens
uuaguccuucugccauuuuuuauuuucaguua

SEQ ID NO: 393753 - RNA, 32 nt, Homo Sapiens
gauucugggaggcuucaguuaccgcuggccga

SEQ ID NO: 393754 - RNA, 32 nt, Homo Sapiens
aacccugcucugcaugaggggacacaggggag

SEQ ID NO: 393755 - RNA, 32 nt, Homo Sapiens
cggcggcggcggcgcgggagcugggguuggug

SEQ ID NO: 393756 - RNA, 32 nt, Homo Sapiens
ugcugggggccaggcuggguguccucacagga

SEQ ID NO: 393757 - RNA, 32 nt, Homo Sapiens
acgccuuuugaccccugaauuauuuaaaaguc

SEQ ID NO: 393758 - RNA, 32 nt, Homo Sapiens
aaagaagauaaaaaguuuugaaucaauuuuua

SEQ ID NO: 393759 - RNA, 32 nt, Homo Sapiens
aggccacaugaaacuuacuuucuuagccacuc

SEQ ID NO: 393760 - RNA, 32 nt, Homo Sapiens
uuaauuuuauuuccaaccugucagagaauguu

SEQ ID NO: 393761 - RNA, 32 nt, Homo Sapiens
uaugacaauucacugauauuuauguguacauu

SEQ ID NO: 393762 - RNA, 32 nt, Homo Sapiens
gucccgcgcgcccucucccuacccgcuguagc

SEQ ID NO: 393763 - RNA, 32 nt, Homo Sapiens
ucggccucaggucgcuccugugguugguccag

SEQ ID NO: 393764 - RNA, 32 nt, Homo Sapiens
uggcuucuugucaggguaguaacauuuugcaa

SEQ ID NO: 393765 - RNA, 32 nt, Homo Sapiens
uuguaacaauauuguagauggcacauagaggc

SEQ ID NO: 393766 - RNA, 32 nt, Homo Sapiens
cucucucuccagccuuuccccaggcaggaguu

SEQ ID NO: 393767 - RNA, 30 nt, Homo Sapiens
cugcuuuucugugcuguugguucccaaaac

SEQ ID NO: 393768 - RNA, 32 nt, Homo Sapiens
aggguucucacggggcgcuuacuuagauuuuu

SEQ ID NO: 393769 - RNA, 32 nt, Homo Sapiens
aagggggaggcccagggcuggugagucuagaa

SEQ ID NO: 393770 - RNA, 32 nt, Homo Sapiens
cuacaguuucaaauaaaugacuuuuuaauugu

SEQ ID NO: 393771 - RNA, 32 nt, Homo Sapiens
uggcucagauacagccaguagcuccucuaagg

SEQ ID NO: 393772 - RNA, 30 nt, Homo Sapiens
uuccuucacugugcugagaauuucuagaua

SEQ ID NO: 393773 - RNA, 32 nt, Homo Sapiens
uguggcagugaaaauguugaauguggcagcac

SEQ ID NO: 393774 - RNA, 32 nt, Homo Sapiens
ugugucaggguggaagguaagagguuggugug

SEQ ID NO: 393775 - RNA, 32 nt, Homo Sapiens
cugcagcgcccggcacccgcccaggagcgcgc

SEQ ID NO: 393776 - RNA, 32 nt, Homo Sapiens
ugagcggcgggcggggauggcggagcaauggg

SEQ ID NO: 393777 - RNA, 32 nt, Homo Sapiens
aauuguaaauauauuugguuuauuacaguaaa

SEQ ID NO: 393778 - RNA, 32 nt, Homo Sapiens
caagcaccccguccccaucccccuccccuccc

SEQ ID NO: 393779 - RNA, 32 nt, Homo Sapiens
aucugagagcaccacuucuccucucucuccug

SEQ ID NO: 393780 - RNA, 32 nt, Homo Sapiens
uccugcgggggcgaggccccucccaguaaggg

SEQ ID NO: 393781 - RNA, 32 nt, Homo Sapiens
guguccacguauguucccuuuugccuuacuau

SEQ ID NO: 393782 - RNA, 32 nt, Homo Sapiens
cagggaggauuuaguuauucugcuacuuacac

SEQ ID NO: 393783 - RNA, 32 nt, Homo Sapiens
gugaaucaacugugucucuuuuuugacuuggu

SEQ ID NO: 393784 - RNA, 32 nt, Homo Sapiens
uuugaagucugcucauuccgagggugaaacaa

SEQ ID NO: 393785 - RNA, 32 nt, Homo Sapiens
cugcucccugaguccaguccccgcccccaaac

SEQ ID NO: 393786 - RNA, 32 nt, Homo Sapiens
gcucuauuaaaaaggaaacagauuccauagau

SEQ ID NO: 393787 - RNA, 32 nt, Homo Sapiens
cucccagagcugcuaggcaacaccggacucuu

SEQ ID NO: 393788 - RNA, 32 nt, Homo Sapiens
cugugggugagugccaggggccugcugggugg

SEQ ID NO: 393789 - RNA, 32 nt, Homo Sapiens
agggacucguguggcaggaagaacucagagcc

SEQ ID NO: 393790 - RNA, 32 nt, Homo Sapiens
cgaaaagcugcgguuaaggagaguccgguuua

SEQ ID NO: 393791 - RNA, 32 nt, Homo Sapiens
cugucgggcuccuccgacuccucgggcuggac

SEQ ID NO: 393792 - RNA, 32 nt, Homo Sapiens
acaccgcucccucgaucaccccagcccccuuc

SEQ ID NO: 393793 - RNA, 32 nt, Homo Sapiens
uuccauuagucugcuauucuguuuccuucaac

SEQ ID NO: 393794 - RNA, 32 nt, Homo Sapiens
ucucuuguuucauuaucuuccauucuaaccuc

SEQ ID NO: 393795 - RNA, 32 nt, Homo Sapiens
cccauguuaaauuccuucuccuuuuucauucu

SEQ ID NO: 393796 - RNA, 32 nt, Homo Sapiens
uuugcauuuccacaggcauccggcagauucug

SEQ ID NO: 393797 - RNA, 32 nt, Homo Sapiens
cacggugaccgucacccgccugccggcaccau

SEQ ID NO: 393798 - RNA, 32 nt, Homo Sapiens
guuugagacucugaaccuuagcacuaaggaga

SEQ ID NO: 393799 - RNA, 32 nt, Homo Sapiens
ugcuuguaauggaugaaauagcaccagauaug

SEQ ID NO: 393800 - RNA, 32 nt, Homo Sapiens
cuccagcccucccccucgcccugcgaaaacuc

SEQ ID NO: 393801 - RNA, 32 nt, Homo Sapiens
caaucggcuuucauuuugcauuuuguaguuuu

SEQ ID NO: 393802 - RNA, 32 nt, Homo Sapiens
uaucuguugggauauaaucagagaacugaaaa

SEQ ID NO: 393803 - RNA, 32 nt, Homo Sapiens
aaaauaaauuuuuauuugauauuucaucuaug

SEQ ID NO: 393804 - RNA, 32 nt, Homo Sapiens
ucagaccuuuuaaugaauuuucauggaugcug

SEQ ID NO: 393805 - RNA, 32 nt, Homo Sapiens
uggacucccgcgcugggcgcgcugaggcggcc

SEQ ID NO: 393806 - RNA, 32 nt, Homo Sapiens
cgcggaggccuggcccggagcccggccacacu

SEQ ID NO: 393807 - RNA, 32 nt, Homo Sapiens
ggucaaggaggggucuaggagcucugucccuu

SEQ ID NO: 393808 - RNA, 32 nt, Homo Sapiens
cugucguuuuguuuguuuuucuaugauaauuu

SEQ ID NO: 393809 - RNA, 32 nt, Homo Sapiens
uggcgggcgggcugcgcggaggcucgggagcu

SEQ ID NO: 393810 - RNA, 32 nt, Homo Sapiens
gcuggguucauacacgugcacacacacgcaua

SEQ ID NO: 393811 - RNA, 32 nt, Homo Sapiens
uggcccugagggugggaaagcaagggaugacu

SEQ ID NO: 393812 - RNA, 32 nt, Homo Sapiens
gagccacugugucuacauggggugcuggguua

SEQ ID NO: 393813 - RNA, 32 nt, Homo Sapiens
ggcugggcgggggagaggaaggggcggggcag

SEQ ID NO: 393814 - RNA, 32 nt, Homo Sapiens
acucagaagaugaagacugugcucuaccuguu

SEQ ID NO: 393815 - RNA, 32 nt, Homo Sapiens
uaauggaauauguaaauagaaacguguauauu

SEQ ID NO: 393816 - RNA, 32 nt, Homo Sapiens
gccacucccaaguuugagaugacagccaugug

SEQ ID NO: 393817 - RNA, 32 nt, Homo Sapiens
cacuccucccaccccaccuaccucacaggguu

SEQ ID NO: 393818 - RNA, 32 nt, Homo Sapiens
gcuuuugcugcuauuaaaaugguauuauuaau

SEQ ID NO: 393819 - RNA, 32 nt, Homo Sapiens
aggcccccgguacgacaagauccggacuccgg

SEQ ID NO: 393820 - RNA, 32 nt, Homo Sapiens
agcagaauauauuugcagcuauugacuuugua

SEQ ID NO: 393821 - RNA, 31 nt, Homo Sapiens
uuauagucaccaucaccugcuucagaauggu

SEQ ID NO: 393822 - RNA, 32 nt, Homo Sapiens
uucuucuuuuucuuggaaccugccccuguucu

SEQ ID NO: 393823 - RNA, 32 nt, Homo Sapiens
gucaguauggaugugucugaaugugugaggcc

SEQ ID NO: 393824 - RNA, 32 nt, Homo Sapiens
aacuuuguuaaaaaacaaaaaaagugauggaa

SEQ ID NO: 393825 - RNA, 32 nt, Homo Sapiens
uggagcgugucugaaugcuggaggaagaaggg

SEQ ID NO: 393826 - RNA, 32 nt, Homo Sapiens
guucucuaucagaaaggggaugcugaacaaaa

SEQ ID NO: 393827 - RNA, 32 nt, Homo Sapiens
ccggcugggaucauauguuccacacauguuug

SEQ ID NO: 393828 - RNA, 32 nt, Homo Sapiens
ugccugagggugguuggggaggugaggcccga

SEQ ID NO: 393829 - RNA, 32 nt, Homo Sapiens
aaaaugugugaaaacauauuugaaauaaaguu

SEQ ID NO: 393830 - RNA, 32 nt, Homo Sapiens
cuuugcuguccacuguucuccacacacgcaac

SEQ ID NO: 393831 - RNA, 32 nt, Homo Sapiens
uggcugaaauguuuuauuuaccauaguuuuau

SEQ ID NO: 393832 - RNA, 32 nt, Homo Sapiens
cacggcgacccgacauagugagacccugucuc

SEQ ID NO: 393833 - RNA, 32 nt, Homo Sapiens
gggcccuaagaacacgagcuccucuucccaag

SEQ ID NO: 393834 - RNA, 32 nt, Homo Sapiens
accgggugucagcagcgagaggguucgaagau

SEQ ID NO: 393835 - RNA, 32 nt, Homo Sapiens
ugucccaugcucucuaaugacucuacauuuuc

SEQ ID NO: 393836 - RNA, 32 nt, Homo Sapiens
aggccgcagaacagggugggcggcucgcaggg

SEQ ID NO: 393837 - RNA, 32 nt, Homo Sapiens
uguuaauuuguuuuuucuugcuuuucauuuga

SEQ ID NO: 393838 - RNA, 32 nt, Homo Sapiens
gacagccaggacuugaagcucuccacaaucau

SEQ ID NO: 393839 - RNA, 32 nt, Homo Sapiens
gauguuuucauuuuuuacucuuucuagaccaa

SEQ ID NO: 393840 - RNA, 29 nt, Homo Sapiens
ugguuccggggacaguuagggcggcggau

SEQ ID NO: 393841 - RNA, 32 nt, Homo Sapiens
gauguccucuucauucuucucagcugaggccc

SEQ ID NO: 393842 - RNA, 32 nt, Homo Sapiens
caacgggaucaucaaagaucacuucaagacgc

SEQ ID NO: 393843 - RNA, 32 nt, Homo Sapiens
cucaaauguauuauuuuaacaggaaucauguu

SEQ ID NO: 393844 - RNA, 30 nt, Homo Sapiens
auaaauaauaaaagacuguuauuagcacuu

SEQ ID NO: 393845 - RNA, 32 nt, Homo Sapiens
gaccgcuccauccccuccuccuccuuaggaug

SEQ ID NO: 393846 - RNA, 32 nt, Homo Sapiens
caacccuuggggugacuggccauggugacauu

SEQ ID NO: 393847 - RNA, 30 nt, Homo Sapiens
gcucggggcaggcgcgccgauggcguuucu

SEQ ID NO: 393848 - RNA, 32 nt, Homo Sapiens
aaaguuuagaagaaacaaaccauuuugcuucu

SEQ ID NO: 393849 - RNA, 32 nt, Homo Sapiens
auucagaggcugagaccugugcaugcucaucu

SEQ ID NO: 393850 - RNA, 32 nt, Homo Sapiens
uucuuguuuuggaaacaaaccagugcauucua

SEQ ID NO: 393851 - RNA, 32 nt, Homo Sapiens
cagacgcgcaggccaaggccuacguggcccgc

SEQ ID NO: 393852 - RNA, 32 nt, Homo Sapiens
ugcccaucucaaccauggguugucaaccaucc

SEQ ID NO: 393853 - RNA, 32 nt, Homo Sapiens
ggacugcgggugcggcccugcccgccaccaga

SEQ ID NO: 393854 - RNA, 32 nt, Homo Sapiens
gaagagauaauuacaauguaugugauaaauuc

SEQ ID NO: 393855 - RNA, 32 nt, Homo Sapiens
auauaucuauauccauaacucugauuaugaau

SEQ ID NO: 393856 - RNA, 32 nt, Homo Sapiens
guagcacucacagggacgaugugcuguauuuc

SEQ ID NO: 393857 - RNA, 32 nt, Homo Sapiens
ggcagcucugcgaggcagcggcuggagaggga

SEQ ID NO: 393858 - RNA, 32 nt, Homo Sapiens
uucuguccucuccucauuccuuugguuuuggc

SEQ ID NO: 393859 - RNA, 32 nt, Homo Sapiens
gcgcggggccgcguuggcgcgcacgcgccuga

SEQ ID NO: 393860 - RNA, 32 nt, Homo Sapiens
acaaaagggagggcuuaauaaaaggaauuuca

SEQ ID NO: 393861 - RNA, 32 nt, Homo Sapiens
auucauuugacaucugucucuuuucauuucuu

SEQ ID NO: 393862 - RNA, 32 nt, Homo Sapiens
cugauaucaaaauaaucauugaaauacaauuc

SEQ ID NO: 393863 - RNA, 32 nt, Homo Sapiens
gcuugcagcugcuccauccuccccugaauuug

SEQ ID NO: 393864 - RNA, 32 nt, Homo Sapiens
gccuccauacgaaagcacuguugcagauagaa

SEQ ID NO: 393865 - RNA, 32 nt, Homo Sapiens
cuucaugcuucuucccuggcuccccuagaaug

SEQ ID NO: 393866 - RNA, 32 nt, Homo Sapiens
ggucauuuuuaaaaaacuuguacccucuuauc

SEQ ID NO: 393867 - RNA, 32 nt, Homo Sapiens
uugugugaugacuggugacucugggauuguca

SEQ ID NO: 393868 - RNA, 32 nt, Homo Sapiens
aggaacucaauccuuuuuuaaucaucccucca

SEQ ID NO: 393869 - RNA, 32 nt, Homo Sapiens
ggaccggccccgcaguacugccugcaggaacu

SEQ ID NO: 393870 - RNA, 32 nt, Homo Sapiens
ccuccugaggcuuuggcaaauaaaccuccuaa

SEQ ID NO: 393871 - RNA, 32 nt, Homo Sapiens
cagccucuaagggauuugaucugcucaucuuc

SEQ ID NO: 393872 - RNA, 32 nt, Homo Sapiens
guccucgggaucagcccucuccgcgaagcgca

SEQ ID NO: 393873 - RNA, 32 nt, Homo Sapiens
cuuagccuccugaguaucuggguuuacaggug

SEQ ID NO: 393874 - RNA, 32 nt, Homo Sapiens
uuugcuauaaauacuuuuuuauacucuacuuu

SEQ ID NO: 393875 - RNA, 32 nt, Homo Sapiens
ggugcauguucuuauaaauauaggaaggucca

SEQ ID NO: 393876 - RNA, 32 nt, Homo Sapiens
auaagguucuuugcuugucaugucccaaagca

SEQ ID NO: 393877 - RNA, 32 nt, Homo Sapiens
agccucucgcacgcugccccuggagggaaguc

SEQ ID NO: 393878 - RNA, 32 nt, Homo Sapiens
uuccccaaaccacuucccaguuuccuuucagu

SEQ ID NO: 393879 - RNA, 32 nt, Homo Sapiens
gcgcaugccucccaggccaccucagucucacc

SEQ ID NO: 393880 - RNA, 32 nt, Homo Sapiens
ccggagcugccggccggcgcgcgggaggagga

SEQ ID NO: 393881 - RNA, 32 nt, Homo Sapiens
accagaugcuuaggauccuggugcuggguuag

SEQ ID NO: 393882 - RNA, 32 nt, Homo Sapiens
aucccaccaugaaauauuugguaaauuuaugu

SEQ ID NO: 393883 - RNA, 32 nt, Homo Sapiens
gagagauagaaagggauacuugaaacugggaa

SEQ ID NO: 393884 - RNA, 32 nt, Homo Sapiens
cuguuauauuucaucaugauaauucagcaggc

SEQ ID NO: 393885 - RNA, 32 nt, Homo Sapiens
uuaagcugccuuuuuuuuuuuaacuuccuacu

SEQ ID NO: 393886 - RNA, 32 nt, Homo Sapiens
cggcccugcgcugucacugacaucucauuaaa

SEQ ID NO: 393887 - RNA, 32 nt, Homo Sapiens
cuaucaaaccaccaaugacauucuucacagaa

SEQ ID NO: 393888 - RNA, 32 nt, Homo Sapiens
aauacuggauuuauuuugauaacguauuguuu

SEQ ID NO: 393889 - RNA, 32 nt, Homo Sapiens
agaccacccuaucgguucuccuccaccuggac

SEQ ID NO: 393890 - RNA, 32 nt, Homo Sapiens
guuauguccugugucgaggagagacgacgcaa

SEQ ID NO: 393891 - RNA, 31 nt, Homo Sapiens
acuggaggcaacucagccugaguuaauucac

SEQ ID NO: 393892 - RNA, 32 nt, Homo Sapiens
gaaucugaauguuuauucauuauauuguuaca

SEQ ID NO: 393893 - RNA, 32 nt, Homo Sapiens
uacgaagccaucugcgggggugaugugaaaaa

SEQ ID NO: 393894 - RNA, 32 nt, Homo Sapiens
cggagcaggauggggaggagcugagccggacc

SEQ ID NO: 393895 - RNA, 32 nt, Homo Sapiens
ccgugugggaggggcgggucugggugcggcug

SEQ ID NO: 393896 - RNA, 32 nt, Homo Sapiens
uucccuuccagaagcucuccugcuugucauga

SEQ ID NO: 393897 - RNA, 32 nt, Homo Sapiens
gggacgacgcgcgggcugugcggggccggcag

SEQ ID NO: 393898 - RNA, 32 nt, Homo Sapiens
aacacccuccccacccagucuccccgccccca

SEQ ID NO: 393899 - RNA, 32 nt, Homo Sapiens
gagguaccgccugcugcccccgccuggcguca

SEQ ID NO: 393900 - RNA, 32 nt, Homo Sapiens
accugcauuucccacaugacuuucuggaagcc

SEQ ID NO: 393901 - RNA, 32 nt, Homo Sapiens
gaugaagacgaaaaacaggacuguaacuccga

SEQ ID NO: 393902 - RNA, 32 nt, Homo Sapiens
ugggaugccuccuggggaagguuuccgggcgu

SEQ ID NO: 393903 - RNA, 32 nt, Homo Sapiens
cuguuuugcaacccgcuugaugauuggucuag

SEQ ID NO: 393904 - RNA, 32 nt, Homo Sapiens
caugggaucugccugcaaaugcuguuuagggu

SEQ ID NO: 393905 - RNA, 32 nt, Homo Sapiens
uaauuuuuaauuuguaaaggugaaugugguca

SEQ ID NO: 393906 - RNA, 32 nt, Homo Sapiens
aacuguugacauuuuaaucacaugaaaaguua

SEQ ID NO: 393907 - RNA, 32 nt, Homo Sapiens
gagauuaaaaacagaaauauggaaaagcuaug

SEQ ID NO: 393908 - RNA, 32 nt, Homo Sapiens
ucugugaggauacauaacauuuucucuacaau

SEQ ID NO: 393909 - RNA, 32 nt, Homo Sapiens
gcagaugcugcuacgagugaccagugcugugu

SEQ ID NO: 393910 - RNA, 32 nt, Homo Sapiens
uauuguuacacauuaaguaaucaauaaagaaa

SEQ ID NO: 393911 - RNA, 32 nt, Homo Sapiens
cgcgcggcgcaucccagccugggcgggacgcu

SEQ ID NO: 393912 - RNA, 32 nt, Homo Sapiens
cggugugaggagcaucuguucuucccacucuc

SEQ ID NO: 393913 - RNA, 32 nt, Homo Sapiens
guucugggucauuuagagagauaauggggcgu

SEQ ID NO: 393914 - RNA, 32 nt, Homo Sapiens
agcacagaaagguuaagaaacuugcccaaggu

SEQ ID NO: 393915 - RNA, 32 nt, Homo Sapiens
gacccuugguauaaaaucacuuuuggcgcuuu

SEQ ID NO: 393916 - RNA, 32 nt, Homo Sapiens
gagugucccccgcucccagaccacuccaagcu

SEQ ID NO: 393917 - RNA, 32 nt, Homo Sapiens
guguccccacccaaaucucaccuuguguugua

SEQ ID NO: 393918 - RNA, 32 nt, Homo Sapiens
agaugucuaacagcuuccugggagcaggagga

SEQ ID NO: 393919 - RNA, 32 nt, Homo Sapiens
aacaaaacaaugacacaaaaccacaaucauca

SEQ ID NO: 393920 - RNA, 32 nt, Homo Sapiens
gucaauaugagauauuaaaauaagcacagaaa

SEQ ID NO: 393921 - RNA, 32 nt, Homo Sapiens
uaccauugacauuuauacuauuauucacuuaa

SEQ ID NO: 393922 - RNA, 32 nt, Homo Sapiens
uaucauugcuuuuccaucuagagcaguuacag

SEQ ID NO: 393923 - RNA, 32 nt, Homo Sapiens
ggggagagcauggcggcgggcgagcuugaggg

SEQ ID NO: 393924 - RNA, 32 nt, Homo Sapiens
aagcuuuugauuuuuguauuguuugcaucccc

SEQ ID NO: 393925 - RNA, 32 nt, Homo Sapiens
uuggugagaaugggaagcauccauucauugcg

SEQ ID NO: 393926 - RNA, 32 nt, Homo Sapiens
gaacaaaaaauauauaugucucuuuaaauuua

SEQ ID NO: 393927 - RNA, 29 nt, Homo Sapiens
ugggaugugacuuucgggugucggggcag

SEQ ID NO: 393928 - RNA, 32 nt, Homo Sapiens
ggugggagggucacuugaagcuaggaguuuga

SEQ ID NO: 393929 - RNA, 32 nt, Homo Sapiens
gaaggccacucucacaucugaguguuggguac

SEQ ID NO: 393930 - RNA, 32 nt, Homo Sapiens
aaaaaauuuuuuguaccucauacucuauauaa

SEQ ID NO: 393931 - RNA, 32 nt, Homo Sapiens
ggagagcugccagcugcaccgggcguguuccg

SEQ ID NO: 393932 - RNA, 32 nt, Homo Sapiens
ccgacugcguccccacgaacgccccguccuua

SEQ ID NO: 393933 - RNA, 32 nt, Homo Sapiens
ccucccuggcugcccuggcccugagguguggg

SEQ ID NO: 393934 - RNA, 31 nt, Homo Sapiens
auggauucauaaauacauaaguauuuuguac

SEQ ID NO: 393935 - RNA, 32 nt, Homo Sapiens
cuuugucgacaaagucccacuuccccgaguau

SEQ ID NO: 393936 - RNA, 32 nt, Homo Sapiens
gccauagggaaauggauuugguccugggggug

SEQ ID NO: 393937 - RNA, 32 nt, Homo Sapiens
ccugggcaggggcagccaaggcugggaaauga

SEQ ID NO: 393938 - RNA, 32 nt, Homo Sapiens
gguugucaccggcgccgccgccgaggaagcca

SEQ ID NO: 393939 - RNA, 32 nt, Homo Sapiens
cauuuacuuaggacuacauuuugcucugugaa

SEQ ID NO: 393940 - RNA, 32 nt, Homo Sapiens
aaagaaacaguacagccccuuccacugcccau

SEQ ID NO: 393941 - RNA, 32 nt, Homo Sapiens
auuaauaaaaauucuuucuuagauuuuauucu

SEQ ID NO: 393942 - RNA, 32 nt, Homo Sapiens
cuuccuucccccuggccugagggugggugggg

SEQ ID NO: 393943 - RNA, 32 nt, Homo Sapiens
ucugaguaagauauaucucauggcauuaguua

SEQ ID NO: 393944 - RNA, 32 nt, Homo Sapiens
uugguugaugcagcugcauucugauuaguggu

SEQ ID NO: 393945 - RNA, 32 nt, Homo Sapiens
ugcucuugcccuugcccacgggcccccagccc

SEQ ID NO: 393946 - RNA, 32 nt, Homo Sapiens
cuuucuaccaaaaccaaguuucaggaaaauaa

SEQ ID NO: 393947 - RNA, 32 nt, Homo Sapiens
ccgucccugcucgggggcgcgcugagacggcg

SEQ ID NO: 393948 - RNA, 31 nt, Homo Sapiens
ggaagaacaaauuguaugcauguaggcaaag

SEQ ID NO: 393949 - RNA, 32 nt, Homo Sapiens
ccagaucauuuucuucuuagauuaugccauaa

SEQ ID NO: 393950 - RNA, 32 nt, Homo Sapiens
ccgcgugggccgcggggugcugguaggagugg

SEQ ID NO: 393951 - RNA, 28 nt, Homo Sapiens
acacccgauuaaaacuuuuuauuucagc

SEQ ID NO: 393952 - RNA, 32 nt, Homo Sapiens
gaaggcugcuagggauguuagaccucggccag

SEQ ID NO: 393953 - RNA, 32 nt, Homo Sapiens
uuacccuggauuuuucugucuuuacgugacca

SEQ ID NO: 393954 - RNA, 32 nt, Homo Sapiens
cucuccaucuucuuccugcgccggccucaucu

SEQ ID NO: 393955 - RNA, 32 nt, Homo Sapiens
cucaaacauaacauuuaauaaauaaugugaua

SEQ ID NO: 393956 - RNA, 32 nt, Homo Sapiens
aauaagggggcuccaggacucccucuaagugg

SEQ ID NO: 393957 - RNA, 32 nt, Homo Sapiens
cguaccuguucucugcugugggccgugggcgc

SEQ ID NO: 393958 - RNA, 32 nt, Homo Sapiens
cggacgucucagggcugcugugccccuugggu

SEQ ID NO: 393959 - RNA, 32 nt, Homo Sapiens
guuacuauaugauauuuucugacaugguauuu

SEQ ID NO: 393960 - RNA, 32 nt, Homo Sapiens
ucagugacaaaguuaaucaggacccaagucug

SEQ ID NO: 393961 - RNA, 23 nt, Homo Sapiens
ggcggcgaagggugcgggaggag

SEQ ID NO: 393962 - RNA, 32 nt, Homo Sapiens
acacgcccuucucugugagcugccaguuucau

SEQ ID NO: 393963 - RNA, 32 nt, Homo Sapiens
ucuauauuuguaaaguuauugggauaagaaac

SEQ ID NO: 393964 - RNA, 32 nt, Homo Sapiens
ucagacaccaaaagccaaucuaaacaacuccc

SEQ ID NO: 393965 - RNA, 32 nt, Homo Sapiens
cccaccccuggccuuggacacuucauggaaac

SEQ ID NO: 393966 - RNA, 32 nt, Homo Sapiens
cccugucccucuucuuugaucguaauucaauu

SEQ ID NO: 393967 - RNA, 32 nt, Homo Sapiens
acucugcuucaguccacuucugcucugguuag

SEQ ID NO: 393968 - RNA, 29 nt, Homo Sapiens
aauauuuuugaauuuuuccagacccagcc

SEQ ID NO: 393969 - RNA, 32 nt, Homo Sapiens
accggccaugcgcccggccuuggcggugggcc

SEQ ID NO: 393970 - RNA, 32 nt, Homo Sapiens
agcaccgcacccucacuagccaggguguugau

SEQ ID NO: 393971 - RNA, 32 nt, Homo Sapiens
guccaccccguccugacccccucugccuguuc

SEQ ID NO: 393972 - RNA, 32 nt, Homo Sapiens
ucacucuacuaaaaaauuauuuuaaaaggcug

SEQ ID NO: 393973 - RNA, 32 nt, Homo Sapiens
ccauuugguaugagguauuaauuuagcuuaac

SEQ ID NO: 393974 - RNA, 32 nt, Homo Sapiens
uucacuaacaauaugugaugguuguuguaacu

SEQ ID NO: 393975 - RNA, 32 nt, Homo Sapiens
cuguuucuugguagcagccaauugggaagagu

SEQ ID NO: 393976 - RNA, 31 nt, Homo Sapiens
gcuuugcggacgggcuguccccgcgcgaacg

SEQ ID NO: 393977 - RNA, 32 nt, Homo Sapiens
gguccgcugggcccgccgccggcgagauggac

SEQ ID NO: 393978 - RNA, 32 nt, Homo Sapiens
ucacauuaaugagaagaguuuucucagagauu

SEQ ID NO: 393979 - RNA, 32 nt, Homo Sapiens
gucuuggaccauugccccucccggccccaaac

SEQ ID NO: 393980 - RNA, 32 nt, Homo Sapiens
agaccucccugggccuggccccacugcccugu

SEQ ID NO: 393981 - RNA, 32 nt, Homo Sapiens
acaaauuuacugaguucucugggugcccugca

SEQ ID NO: 393982 - RNA, 32 nt, Homo Sapiens
agaucacaccaauuuagaaugaauauuaaagu

SEQ ID NO: 393983 - RNA, 32 nt, Homo Sapiens
aaaacccaugcacagugcugcagaaacuggac

SEQ ID NO: 393984 - RNA, 32 nt, Homo Sapiens
ugagcaaaauaggaguuuauuuuuguacuauc

SEQ ID NO: 393985 - RNA, 32 nt, Homo Sapiens
agugcagggaggaaaagugcaaguccauuauc

SEQ ID NO: 393986 - RNA, 32 nt, Homo Sapiens
caauuuaugagaaagcucccaguugggacuuu

SEQ ID NO: 393987 - RNA, 32 nt, Homo Sapiens
gguccuguccugcugacccauccuucgacugc

SEQ ID NO: 393988 - RNA, 32 nt, Homo Sapiens
aaaggauguguguagcacacacucaucaugga

SEQ ID NO: 393989 - RNA, 32 nt, Homo Sapiens
ccuccuuuuccuuugacuggaccgcugccacc

SEQ ID NO: 393990 - RNA, 32 nt, Homo Sapiens
caguuccauguuuuccuuguucccucccaugc

SEQ ID NO: 393991 - RNA, 32 nt, Homo Sapiens
uggauuuugacuggcauuguuagcuggggaca

SEQ ID NO: 393992 - RNA, 29 nt, Homo Sapiens
cagaaauaaaguugccauucccugcuuuu

SEQ ID NO: 393993 - RNA, 30 nt, Homo Sapiens
uguaccucuccccugggggaaacgguucca

SEQ ID NO: 393994 - RNA, 32 nt, Homo Sapiens
cccagggcucugcaggccacugugagcgcugg

SEQ ID NO: 393995 - RNA, 32 nt, Homo Sapiens
ugagugcacacacuaugcgaggagcaagcauu

SEQ ID NO: 393996 - RNA, 32 nt, Homo Sapiens
gauuaauuuagaagauaauguacaauaugugu

SEQ ID NO: 393997 - RNA, 32 nt, Homo Sapiens
uuggcauugcaaugaagugcuuuguaucagga

SEQ ID NO: 393998 - RNA, 32 nt, Homo Sapiens
auugcuucuagccuuuucagcggacagaacug

SEQ ID NO: 393999 - RNA, 32 nt, Homo Sapiens
ugugacuuaccucuccuuccugagcccugccc

SEQ ID NO: 394000 - RNA, 32 nt, Homo Sapiens
cucguauggugcuagaguuagauuaaucugca

SEQ ID NO: 394001 - RNA, 32 nt, Homo Sapiens
agauggcaguugccggaguuggaggccgggcg

SEQ ID NO: 394002 - RNA, 32 nt, Homo Sapiens
uugagaauauucuauuuggugcucuacuguau

SEQ ID NO: 394003 - RNA, 32 nt, Homo Sapiens
acuggggccggugccgagcgggcucucccaga

SEQ ID NO: 394004 - RNA, 32 nt, Homo Sapiens
ggaagacaagccaaacacucuugcaugguaac

SEQ ID NO: 394005 - RNA, 32 nt, Homo Sapiens
ugcuggggucauugggggagggggguggggcu

SEQ ID NO: 394006 - RNA, 32 nt, Homo Sapiens
gcauccccauccccaugcccucaucccgaccu

SEQ ID NO: 394007 - RNA, 32 nt, Homo Sapiens
ugacccaaggaaccuuccagaauggaugaaau

SEQ ID NO: 394008 - RNA, 32 nt, Homo Sapiens
aagcucuuugaacuagcaaugcuacuccuaag

SEQ ID NO: 394009 - RNA, 32 nt, Homo Sapiens
acuaacgcgaguuugccccaccuacucuguaa

SEQ ID NO: 394010 - RNA, 32 nt, Homo Sapiens
cagccuggguaacagugagaggccucauuuca

SEQ ID NO: 394011 - RNA, 32 nt, Homo Sapiens
ugauuuucauaucccgugaaaguuuuuaauuc

SEQ ID NO: 394012 - RNA, 32 nt, Homo Sapiens
cggagcgcguggcgggcgucagcgcgguggcc

SEQ ID NO: 394013 - RNA, 32 nt, Homo Sapiens
agaaaacaaaaaucaaaugccuauaauaccau

SEQ ID NO: 394014 - RNA, 31 nt, Homo Sapiens
cugggggcggcgaccaccgugagcgucccgg

SEQ ID NO: 394015 - RNA, 32 nt, Homo Sapiens
uuacaauuagcuaugcuucuuccuccucagac

SEQ ID NO: 394016 - RNA, 32 nt, Homo Sapiens
uggguuggggugcuuguauauguaucuuccuc

SEQ ID NO: 394017 - RNA, 32 nt, Homo Sapiens
ggagcaaaggacccggcugcccagucccucau

SEQ ID NO: 394018 - RNA, 31 nt, Homo Sapiens
cuaggcuguucugugccuccaaggacugucu

SEQ ID NO: 394019 - RNA, 32 nt, Homo Sapiens
agguguaaaaggaaaggugaaaaucgggccag

SEQ ID NO: 394020 - RNA, 32 nt, Homo Sapiens
ggaaggcauccacgagggagcuccuggccagc

SEQ ID NO: 394021 - RNA, 32 nt, Homo Sapiens
gaccugguguucacgguguugcugcaccugaa

SEQ ID NO: 394022 - RNA, 32 nt, Homo Sapiens
aaugccccucaucauugggaguggggucgggu

SEQ ID NO: 394023 - RNA, 32 nt, Homo Sapiens
ggccggagucggagggcggggagcuaggagga

SEQ ID NO: 394024 - RNA, 32 nt, Homo Sapiens
ggcuggcgcgcccagccucgcagaaccagggc

SEQ ID NO: 394025 - RNA, 32 nt, Homo Sapiens
uguucucggaauccgggugcugcggauugagg

SEQ ID NO: 394026 - RNA, 32 nt, Homo Sapiens
gcugcagagaagaggccuggaacucgggcagc

SEQ ID NO: 394027 - RNA, 32 nt, Homo Sapiens
ccucagugucaugcagaaaaaauguauucaga

SEQ ID NO: 394028 - RNA, 32 nt, Homo Sapiens
cucagugugaaguugggaacugagaggggaug

SEQ ID NO: 394029 - RNA, 32 nt, Homo Sapiens
gggugucgcggguggggggucacugcugaggc

SEQ ID NO: 394030 - RNA, 32 nt, Homo Sapiens
gucauugucacgcuuuuguauuuuguaucuac

SEQ ID NO: 394031 - RNA, 32 nt, Homo Sapiens
aguguggacacgucugcugcgccccgcuucuc

SEQ ID NO: 394032 - RNA, 32 nt, Homo Sapiens
ugggagugggagaggaagccacgugcuggaga

SEQ ID NO: 394033 - RNA, 32 nt, Homo Sapiens
gacagccucggccgugaaugagaagaagugca

SEQ ID NO: 394034 - RNA, 32 nt, Homo Sapiens
aaauucagaaauccaauaaaggaaaggacggu

SEQ ID NO: 394035 - RNA, 32 nt, Homo Sapiens
gcagagaaaaaugaacaaaaccccuuuuugau

SEQ ID NO: 394036 - RNA, 32 nt, Homo Sapiens
ggguacaggaggaggcuggggcagguccccuu

SEQ ID NO: 394037 - RNA, 32 nt, Homo Sapiens
auaccugucccucucuggcuugguccccuucc

SEQ ID NO: 394038 - RNA, 32 nt, Homo Sapiens
ucuuuauauggacccuuuacauuuucaguauu

SEQ ID NO: 394039 - RNA, 32 nt, Homo Sapiens
uuuauuugcacaaagaaauugcuauuuucgga

SEQ ID NO: 394040 - RNA, 32 nt, Homo Sapiens
aggagcgagcgcgacgggggaggccgcccugg

SEQ ID NO: 394041 - RNA, 32 nt, Homo Sapiens
gggacuucgcuuuacccaaacaguaccccaca

SEQ ID NO: 394042 - RNA, 32 nt, Homo Sapiens
uagcacagccuggcccugaucuccgggcagcc

SEQ ID NO: 394043 - RNA, 32 nt, Homo Sapiens
cugcuugggaaauuauuuuauguuuguuuuug

SEQ ID NO: 394044 - RNA, 32 nt, Homo Sapiens
gaaggauagaaaguugcacuacuaauuuuuug

SEQ ID NO: 394045 - RNA, 32 nt, Homo Sapiens
uacuucauacuuugaagaauugauguaugccu

SEQ ID NO: 394046 - RNA, 32 nt, Homo Sapiens
cagagcccuuggaguguugguggagaucagag

SEQ ID NO: 394047 - RNA, 32 nt, Homo Sapiens
ccacuuugcccccaaguuuucagguuaaguag

SEQ ID NO: 394048 - RNA, 32 nt, Homo Sapiens
uuuacagcaaucauugcuacuuuacguuccaa

SEQ ID NO: 394049 - RNA, 32 nt, Homo Sapiens
uucggggguggcuucguuugccuggaguggcc

SEQ ID NO: 394050 - RNA, 32 nt, Homo Sapiens
uacucuguuucaucaguaugcuuugcacaucc

SEQ ID NO: 394051 - RNA, 32 nt, Homo Sapiens
cacccuuuauucuuaaauuuguguguguccaa

SEQ ID NO: 394052 - RNA, 32 nt, Homo Sapiens
cccugagaacagagaaacguaacccuguaggg

SEQ ID NO: 394053 - RNA, 32 nt, Homo Sapiens
aagaaacccacccacugugaucaauagggaga

SEQ ID NO: 394054 - RNA, 32 nt, Homo Sapiens
acgcgcccuccccucugaccccggccugggcu

SEQ ID NO: 394055 - RNA, 32 nt, Homo Sapiens
cuuuucuuuuuuaauuuuuuuauuauuauuau

SEQ ID NO: 394056 - RNA, 32 nt, Homo Sapiens
uucuauaauguuuacugaucuuuauauuacag

SEQ ID NO: 394057 - RNA, 32 nt, Homo Sapiens
gaagggggccgcgugcgguggcucacgccugu

SEQ ID NO: 394058 - RNA, 32 nt, Homo Sapiens
cuuuuguucuaccuguauugucugacuucuca

SEQ ID NO: 394059 - RNA, 32 nt, Homo Sapiens
uggccugaagcaagugaagaaucacaaaagaa

SEQ ID NO: 394060 - RNA, 32 nt, Homo Sapiens
uuuuagauacccagaagcuuguucugggagaa

SEQ ID NO: 394061 - RNA, 32 nt, Homo Sapiens
cucucccggacggggcggcuggccaggcagag

SEQ ID NO: 394062 - RNA, 32 nt, Homo Sapiens
gaucagacugucagcacuccaggaugcguguc

SEQ ID NO: 394063 - RNA, 32 nt, Homo Sapiens
cgagccccuccguccucgcgucucgguccucg

SEQ ID NO: 394064 - RNA, 32 nt, Homo Sapiens
agucauuaaaagacauauaggaacccuaaaug

SEQ ID NO: 394065 - RNA, 32 nt, Homo Sapiens
cacugcacccccagcccugcacccucagcucc

SEQ ID NO: 394066 - RNA, 32 nt, Homo Sapiens
aagaaagauaaaauguuauucuacaaaagcuu

SEQ ID NO: 394067 - RNA, 32 nt, Homo Sapiens
cuggguggguuguuuuuuuuuaaagugccauu

SEQ ID NO: 394068 - RNA, 32 nt, Homo Sapiens
cucccccgccccauccccggucuucguguugu

SEQ ID NO: 394069 - RNA, 32 nt, Homo Sapiens
aauagcccauacauuugaucguuguaaaccau

SEQ ID NO: 394070 - RNA, 32 nt, Homo Sapiens
cuccuuccauucuuuacucacuggccucaugg

SEQ ID NO: 394071 - RNA, 32 nt, Homo Sapiens
auacgggccgcgccgggcaagaagauggcggg

SEQ ID NO: 394072 - RNA, 32 nt, Homo Sapiens
guuuugguucuagcuuuagauuuuggauuuuc

SEQ ID NO: 394073 - RNA, 29 nt, Homo Sapiens
ucacgucugcgucucagaucuaacguggu

SEQ ID NO: 394074 - RNA, 32 nt, Homo Sapiens
aucagcgaucucuuugaugccuaugauuugga

SEQ ID NO: 394075 - RNA, 31 nt, Homo Sapiens
ggagaaagggcggugaacucuggcucuuugc

SEQ ID NO: 394076 - RNA, 32 nt, Homo Sapiens
guagcuaauauguuuuaugcaugagaauuauu

SEQ ID NO: 394077 - RNA, 32 nt, Homo Sapiens
uaugucugcaugauaauuuaaaauggaagauu

SEQ ID NO: 394078 - RNA, 32 nt, Homo Sapiens
auagcccucacagcagucagucacguuccugg

SEQ ID NO: 394079 - RNA, 32 nt, Homo Sapiens
uggauggggucucauuaagaaugugggaaaua

SEQ ID NO: 394080 - RNA, 32 nt, Homo Sapiens
aucaggcuugucagcuggcccgccacguccuc

SEQ ID NO: 394081 - RNA, 32 nt, Homo Sapiens
cucuggcugugacugcuuuaucacagggagug

SEQ ID NO: 394082 - RNA, 32 nt, Homo Sapiens
cccagggccuuaaaauuacauccuucacugug

SEQ ID NO: 394083 - RNA, 32 nt, Homo Sapiens
ccgccuucugcaggguucccaggcccccgcuc

SEQ ID NO: 394084 - RNA, 32 nt, Homo Sapiens
cguucacucagaccaucugugcucugcccuga

SEQ ID NO: 394085 - RNA, 32 nt, Homo Sapiens
gucauccgcuccccaggugggcacugauaaag

SEQ ID NO: 394086 - RNA, 32 nt, Homo Sapiens
gaaccccacccuuucuccuccuccuuccucug

SEQ ID NO: 394087 - RNA, 32 nt, Homo Sapiens
uguuugucaaguguauguaacuugcuuuaaau

SEQ ID NO: 394088 - RNA, 32 nt, Homo Sapiens
guaaauaaacacagaucuggauuaaacaucca

SEQ ID NO: 394089 - RNA, 32 nt, Homo Sapiens
cucacccugccccucugggagcaagaagaaaa

SEQ ID NO: 394090 - RNA, 32 nt, Homo Sapiens
uagaaacaaaauucucuaguacucauccagga

SEQ ID NO: 394091 - RNA, 32 nt, Homo Sapiens
uggggggcucacccuggugcugccucccgcac

SEQ ID NO: 394092 - RNA, 32 nt, Homo Sapiens
aggaccauuauguuuggaucauuaaauaccua

SEQ ID NO: 394093 - RNA, 32 nt, Homo Sapiens
aguuggacccuuuuuucuuuuucuuuuuuuuu

SEQ ID NO: 394094 - RNA, 32 nt, Homo Sapiens
ccugugugccccaccauucaugaccucuguau

SEQ ID NO: 394095 - RNA, 32 nt, Homo Sapiens
agggaagguggaggaguggauagaacuuggga

SEQ ID NO: 394096 - RNA, 32 nt, Homo Sapiens
aggucaggccgaggccggcgcggagaaucugc

SEQ ID NO: 394097 - RNA, 32 nt, Homo Sapiens
gaccgcggccuccaggagucucauggaaggga

SEQ ID NO: 394098 - RNA, 32 nt, Homo Sapiens
aacguccccuguccccgcacugggcuugggga

SEQ ID NO: 394099 - RNA, 32 nt, Homo Sapiens
cucuacacagcuuuugcauacuuacaguuucu

SEQ ID NO: 394100 - RNA, 32 nt, Homo Sapiens
aaaggggcuuuucuaagcaagaaggccuauac

SEQ ID NO: 394101 - RNA, 32 nt, Homo Sapiens
gucugaggcucggccgccugagccgcggacgg

SEQ ID NO: 394102 - RNA, 32 nt, Homo Sapiens
cccucgaggagcuuucauucugauggagagaa

SEQ ID NO: 394103 - RNA, 30 nt, Homo Sapiens
ugcugccuggacugcucagugagguggggg

SEQ ID NO: 394104 - RNA, 32 nt, Homo Sapiens
gugggacccagcccucaccucccccagagcua

SEQ ID NO: 394105 - RNA, 32 nt, Homo Sapiens
ucuagcugcucacauguacaaaucacuucuag

SEQ ID NO: 394106 - RNA, 32 nt, Homo Sapiens
cucgaguccuccccgacgcguccucuaggcca

SEQ ID NO: 394107 - RNA, 32 nt, Homo Sapiens
gauauacuugcucuccgugucuucccagggcu

SEQ ID NO: 394108 - RNA, 28 nt, Homo Sapiens
auaaagaaagauuagcugggacauggug

SEQ ID NO: 394109 - RNA, 32 nt, Homo Sapiens
aucuguccuugacaguggcugucaucuugacu

SEQ ID NO: 394110 - RNA, 32 nt, Homo Sapiens
ucgccucggcgcccgcagccacgaugaaccgg

SEQ ID NO: 394111 - RNA, 32 nt, Homo Sapiens
aaaauaugcaacaaaauggaugacuuagugga

SEQ ID NO: 394112 - RNA, 32 nt, Homo Sapiens
aaaacaauuguauguauaaucuguauuugaaa

SEQ ID NO: 394113 - RNA, 32 nt, Homo Sapiens
cugcguccugacgcccugcguuggagccacuc

SEQ ID NO: 394114 - RNA, 32 nt, Homo Sapiens
ccgaaagcccucuggauugaggcagcaggauc

SEQ ID NO: 394115 - RNA, 32 nt, Homo Sapiens
ccuguccuaaugccuucuucccuaacaucacc

SEQ ID NO: 394116 - RNA, 32 nt, Homo Sapiens
ugacaugaugcagucuuccucauggggcaccu

SEQ ID NO: 394117 - RNA, 32 nt, Homo Sapiens
cccugccucuguucuccuuucugacccacugg

SEQ ID NO: 394118 - RNA, 32 nt, Homo Sapiens
aaaucucggucccacugugcagcucaaaugug

SEQ ID NO: 394119 - RNA, 32 nt, Homo Sapiens
cccgugcuccuuaccuccccgguggucgggcg

SEQ ID NO: 394120 - RNA, 32 nt, Homo Sapiens
ggccagcguuccugugcagagccccauccacu

SEQ ID NO: 394121 - RNA, 32 nt, Homo Sapiens
ucucauucucuuucuuuuucugucucucuugc

SEQ ID NO: 394122 - RNA, 32 nt, Homo Sapiens
uguuaggaauaaaacugcuuguuaagcacauu

SEQ ID NO: 394123 - RNA, 32 nt, Homo Sapiens
aggaaaccucaaucuuuuuuuuuuuucgccuu

SEQ ID NO: 394124 - RNA, 32 nt, Homo Sapiens
uccgggcgggagaaagcccacccucucccgcg

SEQ ID NO: 394125 - RNA, 32 nt, Homo Sapiens
uuggguaaccucagugauucccauugguguag

SEQ ID NO: 394126 - RNA, 32 nt, Homo Sapiens
acuauugaaaauaaaucaaauuauucaaagac

SEQ ID NO: 394127 - RNA, 32 nt, Homo Sapiens
acugcugugaaugcuguaugguguguguucuc

SEQ ID NO: 394128 - RNA, 28 nt, Homo Sapiens
cuggcgguggcuacggugacggccuggc

SEQ ID NO: 394129 - RNA, 32 nt, Homo Sapiens
uuaguuagaugucuuauuauuaaaguuaccua

SEQ ID NO: 394130 - RNA, 32 nt, Homo Sapiens
gggagugggauguagggcugguauucuuugcu

SEQ ID NO: 394131 - RNA, 32 nt, Homo Sapiens
uugccaggacaugcaauaaaauuuaaaaaaua

SEQ ID NO: 394132 - RNA, 32 nt, Homo Sapiens
guuuuacaucccuuuauugccauuacucguua

SEQ ID NO: 394133 - RNA, 32 nt, Homo Sapiens
aaaaacaucauucagaaaacuuuauaaucguc

SEQ ID NO: 394134 - RNA, 32 nt, Homo Sapiens
ggccccuugaaucucaccgcgaggaaggcacc

SEQ ID NO: 394135 - RNA, 32 nt, Homo Sapiens
uggcaaaugugguuuucuuuuuucagccuuug

SEQ ID NO: 394136 - RNA, 32 nt, Homo Sapiens
caguggcauaaugguaacuaucuuggaugauu

SEQ ID NO: 394137 - RNA, 32 nt, Homo Sapiens
cuggaaaccuuugaaugcacaaauaaaacagg

SEQ ID NO: 394138 - RNA, 32 nt, Homo Sapiens
gggacucggcguuggcggaagccccggaaggg

SEQ ID NO: 394139 - RNA, 32 nt, Homo Sapiens
ugcgaaguaaagaacgucacuuugaaacccau

SEQ ID NO: 394140 - RNA, 32 nt, Homo Sapiens
ccaaauuuuauuauuucauaguguuuugauuu

SEQ ID NO: 394141 - RNA, 32 nt, Homo Sapiens
ucaggaguuccagaccagccuggccaucaugg

SEQ ID NO: 394142 - RNA, 29 nt, Homo Sapiens
uauuauacuaugaaagcuguaaguaacuu

SEQ ID NO: 394143 - RNA, 32 nt, Homo Sapiens
acggccugcguggcgcugccgucccccacgug

SEQ ID NO: 394144 - RNA, 32 nt, Homo Sapiens
agguggcaacaaagucgugcagugggagccgc

SEQ ID NO: 394145 - RNA, 32 nt, Homo Sapiens
uucugugcucucauaaugcuuaaccaugucuu

SEQ ID NO: 394146 - RNA, 32 nt, Homo Sapiens
gaggauucgcagugaagcgacagcugcuauuc

SEQ ID NO: 394147 - RNA, 32 nt, Homo Sapiens
agagugcccgccccgccgcuuggcggccccug

SEQ ID NO: 394148 - RNA, 32 nt, Homo Sapiens
gugacgcuucccagcucuggcuuuuugaaagc

SEQ ID NO: 394149 - RNA, 32 nt, Homo Sapiens
gaccuaggcucauggacgagaugggaaggcac

SEQ ID NO: 394150 - RNA, 32 nt, Homo Sapiens
ugugucuuucuaagggcacauuauggccauuu

SEQ ID NO: 394151 - RNA, 32 nt, Homo Sapiens
ucauucccauuacuccuucuggcuguuacacu

SEQ ID NO: 394152 - RNA, 32 nt, Homo Sapiens
agauggagacugaggcccacgcuugggucccc

SEQ ID NO: 394153 - RNA, 32 nt, Homo Sapiens
guugauuucuugucuuuuuuuuuuauuucuua

SEQ ID NO: 394154 - RNA, 29 nt, Homo Sapiens
ccucacuugggguuuugucucaccacugu

SEQ ID NO: 394155 - RNA, 30 nt, Homo Sapiens
ggaacggcgcccggccguagccgccugcgg

SEQ ID NO: 394156 - RNA, 31 nt, Homo Sapiens
gugcaaggccacugccugccgaggacgugcc

SEQ ID NO: 394157 - RNA, 32 nt, Homo Sapiens
uuuuguuauuuuuagaauggucaguauauugc

SEQ ID NO: 394158 - RNA, 32 nt, Homo Sapiens
gagagauuggauuauuuauuucuuauauuuuu

SEQ ID NO: 394159 - RNA, 32 nt, Homo Sapiens
ggcccggguccucacaccccuccuuggcccuu

SEQ ID NO: 394160 - RNA, 29 nt, Homo Sapiens
ucuggauaaaguuugguuguuugcucuua

SEQ ID NO: 394161 - RNA, 32 nt, Homo Sapiens
gcaucggcgcggccguggcccgggcccugguc

SEQ ID NO: 394162 - RNA, 32 nt, Homo Sapiens
ugagcagagagaaacauuauaauguaguaagu

SEQ ID NO: 394163 - RNA, 32 nt, Homo Sapiens
uaccauccgagaccuggguguguggucugucu

SEQ ID NO: 394164 - RNA, 32 nt, Homo Sapiens
uuuuggucuuguuuuuaaucuugugcaugaua

SEQ ID NO: 394165 - RNA, 32 nt, Homo Sapiens
auaucauuugaaaggaaauugccgacaugaug

SEQ ID NO: 394166 - RNA, 32 nt, Homo Sapiens
uucguuauccaugacucuccaguguuuuuucu

SEQ ID NO: 394167 - RNA, 32 nt, Homo Sapiens
aaauuauuugaaaacaaacuuauggguaauaa

SEQ ID NO: 394168 - RNA, 32 nt, Homo Sapiens
ggggccagcaguagaccccccacucuccccac

SEQ ID NO: 394169 - RNA, 32 nt, Homo Sapiens
cucgagcggcagccagaagagaacacgccucu

SEQ ID NO: 394170 - RNA, 32 nt, Homo Sapiens
ugaacgguaauaucuauaggcaucauggauau

SEQ ID NO: 394171 - RNA, 30 nt, Homo Sapiens
ccagcaggcaggcacuguggcccuucuguc

SEQ ID NO: 394172 - RNA, 32 nt, Homo Sapiens
cgcagaggaggcggcccggcccgggcagcugc

SEQ ID NO: 394173 - RNA, 32 nt, Homo Sapiens
caaagaaagcuccugccuccuccucuguguca

SEQ ID NO: 394174 - RNA, 32 nt, Homo Sapiens
auacggaaaaaauuauagauuuacuuguagcu

SEQ ID NO: 394175 - RNA, 32 nt, Homo Sapiens
uaagggaugagaggcugcuuguuauggacgag

SEQ ID NO: 394176 - RNA, 32 nt, Homo Sapiens
ggaaaaguacauuuaauacagcagugucauca

SEQ ID NO: 394177 - RNA, 32 nt, Homo Sapiens
cgcuccgcccccagcccgccuuccucccgccg

SEQ ID NO: 394178 - RNA, 30 nt, Homo Sapiens
cuccaaggagguggcaggaaaccgcugcaa

SEQ ID NO: 394179 - RNA, 32 nt, Homo Sapiens
agcucugugaauguaagcauugugggaaagca

SEQ ID NO: 394180 - RNA, 32 nt, Homo Sapiens
uggugucaggggcgagccaaccccaccucuau

SEQ ID NO: 394181 - RNA, 32 nt, Homo Sapiens
cuacguggugcaccccaccagcuucaucaagg

SEQ ID NO: 394182 - RNA, 32 nt, Homo Sapiens
agcugcccggcgggcugguccccgcgcccgag

SEQ ID NO: 394183 - RNA, 32 nt, Homo Sapiens
gcugcuugcccucuccagccucagggccucuu

SEQ ID NO: 394184 - RNA, 32 nt, Homo Sapiens
ugaauagcaaugacaugaugagcugcaccucc

SEQ ID NO: 394185 - RNA, 32 nt, Homo Sapiens
ucacgccauucuccugccccagccucccaagu

SEQ ID NO: 394186 - RNA, 32 nt, Homo Sapiens
acgaguacgccagcuuuuuuuuuuuuuuuuuu

SEQ ID NO: 394187 - RNA, 32 nt, Homo Sapiens
uacuggacucccagcccugccugucccggggg

SEQ ID NO: 394188 - RNA, 32 nt, Homo Sapiens
gugcugaagggagaggaguaacagccagacac

SEQ ID NO: 394189 - RNA, 30 nt, Homo Sapiens
ucccuuaagacuagaaccuauaggaaacua

SEQ ID NO: 394190 - RNA, 32 nt, Homo Sapiens
cgucacccgcgggaccccgggagcacagacuc

SEQ ID NO: 394191 - RNA, 32 nt, Homo Sapiens
ccggggacucgcgggcuucugcugggucccgc

SEQ ID NO: 394192 - RNA, 32 nt, Homo Sapiens
ggcccaggagucucgugucuucugccagcauc

SEQ ID NO: 394193 - RNA, 32 nt, Homo Sapiens
ugugguuucuucaucaucauggauuucuuuug

SEQ ID NO: 394194 - RNA, 32 nt, Homo Sapiens
acuuuuacaauuuuaacaguaaaauuaguuuc

SEQ ID NO: 394195 - RNA, 32 nt, Homo Sapiens
agcuuuuaaaacuagaaaccauuguucuaaca

SEQ ID NO: 394196 - RNA, 32 nt, Homo Sapiens
cucaucgucucacccauuauaucuggauuucu

SEQ ID NO: 394197 - RNA, 32 nt, Homo Sapiens
cucaugccagaagcggcuggacaguggcugcc

SEQ ID NO: 394198 - RNA, 32 nt, Homo Sapiens
ccgggaccuugccugccucccucuggagccuu

SEQ ID NO: 394199 - RNA, 32 nt, Homo Sapiens
cugaaagggaaguuaagguacaugguaccaug

SEQ ID NO: 394200 - RNA, 28 nt, Homo Sapiens
cgguggcggcggccguagguguggggcg

SEQ ID NO: 394201 - RNA, 32 nt, Homo Sapiens
uuacuggagccacaccugcaggcgcuguguuc

SEQ ID NO: 394202 - RNA, 32 nt, Homo Sapiens
cugucacggaacagaucuuguucuuugcugga

SEQ ID NO: 394203 - RNA, 32 nt, Homo Sapiens
cagcaagcaugugugacugaaaugguauccag

SEQ ID NO: 394204 - RNA, 32 nt, Homo Sapiens
cuaucccgucuugagacucgcgcgcgugugug

SEQ ID NO: 394205 - RNA, 32 nt, Homo Sapiens
gauucauaauaaauaucuguacuucuucgauc

SEQ ID NO: 394206 - RNA, 32 nt, Homo Sapiens
ggagcaguguuccauuccauuaagcuuccuug

SEQ ID NO: 394207 - RNA, 32 nt, Homo Sapiens
cacugaaaccagcugaggcauccugaaagccu

SEQ ID NO: 394208 - RNA, 32 nt, Homo Sapiens
guuuccacugucagcauccucccuggaccgcg

SEQ ID NO: 394209 - RNA, 32 nt, Homo Sapiens
auucuuugaaaauuauauuacuuuuauuucua

SEQ ID NO: 394210 - RNA, 32 nt, Homo Sapiens
cuuacuaauuuuugugauauuuucauguucaa

SEQ ID NO: 394211 - RNA, 32 nt, Homo Sapiens
ggggcccuuggcugagcccaccccgcuggcuc

SEQ ID NO: 394212 - RNA, 32 nt, Homo Sapiens
uuuugaauagacuggaauauaaaacauuuaua

SEQ ID NO: 394213 - RNA, 30 nt, Homo Sapiens
ggggggucgggcugugggggucccggcacc

SEQ ID NO: 394214 - RNA, 32 nt, Homo Sapiens
ccuugucucucuaucagacuguugcuccuuga

SEQ ID NO: 394215 - RNA, 32 nt, Homo Sapiens
gcaggcagcuaggcagggagggggcugggaaa

SEQ ID NO: 394216 - RNA, 30 nt, Homo Sapiens
ggagugaagcugcgcgcgggaccuggaggc

SEQ ID NO: 394217 - RNA, 32 nt, Homo Sapiens
aagugaugagacagugaaguaaaauugagugc

SEQ ID NO: 394218 - RNA, 32 nt, Homo Sapiens
cggcggcggcggugguggcggcaccauguuuc

SEQ ID NO: 394219 - RNA, 32 nt, Homo Sapiens
agugccuuauuacccaggaagauuuuaaagga

SEQ ID NO: 394220 - RNA, 32 nt, Homo Sapiens
gcuuccagcugagaugauuugagucuguccua

SEQ ID NO: 394221 - RNA, 32 nt, Homo Sapiens
ggaugaaaacucaaaacaaaaagaaauaccuc

SEQ ID NO: 394222 - RNA, 29 nt, Homo Sapiens
ggcuggaugaagauuccaucaguaauuca

SEQ ID NO: 394223 - RNA, 32 nt, Homo Sapiens
ggcccaugcacccaccuggacggaucggcgcc

SEQ ID NO: 394224 - RNA, 32 nt, Homo Sapiens
uauuaggaggauaaacugaucuauguaagggu

SEQ ID NO: 394225 - RNA, 32 nt, Homo Sapiens
acccggcccuuguaucucuggugcacuguauc

SEQ ID NO: 394226 - RNA, 32 nt, Homo Sapiens
agucagauuuuaggaaggcagucaauuaugga

SEQ ID NO: 394227 - RNA, 32 nt, Homo Sapiens
agcgcucagaucugguuaaacaucagagaauc

SEQ ID NO: 394228 - RNA, 32 nt, Homo Sapiens
acugcaaucaguacuaugcgaucguccuagag

SEQ ID NO: 394229 - RNA, 32 nt, Homo Sapiens
cagcgccgggcgaccccgcccgggccucggau

SEQ ID NO: 394230 - RNA, 32 nt, Homo Sapiens
cuuccucuauaaacaaugaccaauuagacguu

SEQ ID NO: 394231 - RNA, 32 nt, Homo Sapiens
aaccugcggggcagaggcggcggccgcagcgg

SEQ ID NO: 394232 - RNA, 32 nt, Homo Sapiens
ccugcucaaugagagaaaaguuggacacaaaa

SEQ ID NO: 394233 - RNA, 32 nt, Homo Sapiens
ugcccggcccccagcccaccuugcccccugac

SEQ ID NO: 394234 - RNA, 32 nt, Homo Sapiens
gcaaccaaaucgaaucucucauuuucuccugu

SEQ ID NO: 394235 - RNA, 32 nt, Homo Sapiens
gcagccagagcggcgagcugaguaacaggggu

SEQ ID NO: 394236 - RNA, 32 nt, Homo Sapiens
ucucaacaaaaauaaaaaauuaaauaaauacu

SEQ ID NO: 394237 - RNA, 32 nt, Homo Sapiens
agaaugucuccauacgcguucuaggcauacaa

SEQ ID NO: 394238 - RNA, 32 nt, Homo Sapiens
gagggaaaggaagaggagugggccugaggagc

SEQ ID NO: 394239 - RNA, 32 nt, Homo Sapiens
gagggggaaagggucuuaauucuauguacagc

SEQ ID NO: 394240 - RNA, 32 nt, Homo Sapiens
cccucgcuucccuccucccacuucccgagcuc

SEQ ID NO: 394241 - RNA, 32 nt, Homo Sapiens
aaagcugcaaaacaccuagauacaccguucaa

SEQ ID NO: 394242 - RNA, 32 nt, Homo Sapiens
acuauuaagguucauugaaauguuuucaauca

SEQ ID NO: 394243 - RNA, 32 nt, Homo Sapiens
ccuugguuuggacacagugcuccagcugccug

SEQ ID NO: 394244 - RNA, 32 nt, Homo Sapiens
ggaugacaggcgugcaccuggcagcuuuuuca

SEQ ID NO: 394245 - RNA, 32 nt, Homo Sapiens
acucugaaaaucaacgcagcuggaauguuaac

SEQ ID NO: 394246 - RNA, 32 nt, Homo Sapiens
aggacaguuuaucagucaacuaccuuuccucc

SEQ ID NO: 394247 - RNA, 32 nt, Homo Sapiens
agggauacucagggacagggcaucauggggga

SEQ ID NO: 394248 - RNA, 32 nt, Homo Sapiens
ugacuauuuuuagagaccccgugucugucacu

SEQ ID NO: 394249 - RNA, 32 nt, Homo Sapiens
ggguuuucuauguucuuccuaccuguuaaacc

SEQ ID NO: 394250 - RNA, 32 nt, Homo Sapiens
uguacccguaauuuguaacauaaaguauugca

SEQ ID NO: 394251 - RNA, 32 nt, Homo Sapiens
auauauauucuaaggaagauuuucucaagaaa

SEQ ID NO: 394252 - RNA, 31 nt, Homo Sapiens
gguuugugaaacauuccagucugauuccauc

SEQ ID NO: 394253 - RNA, 32 nt, Homo Sapiens
aaagaugaaaagacaacaaaaguaucuucaua

SEQ ID NO: 394254 - RNA, 32 nt, Homo Sapiens
cacgccccggaacaggccgccgcgcgcugcgc

SEQ ID NO: 394255 - RNA, 32 nt, Homo Sapiens
uggcaggcaccuguagucccagcuacccggga

SEQ ID NO: 394256 - RNA, 32 nt, Homo Sapiens
ugaggccugugcuugguguuccagagcccagg

SEQ ID NO: 394257 - RNA, 32 nt, Homo Sapiens
gacucuccaaauagcauuaguuguuauuauua

SEQ ID NO: 394258 - RNA, 32 nt, Homo Sapiens
uaaauuuacuuaugggugguaaggggcaaaaa

SEQ ID NO: 394259 - RNA, 29 nt, Homo Sapiens
gaaauuguaaacuguauccagauuaucaa

SEQ ID NO: 394260 - RNA, 32 nt, Homo Sapiens
caccgaucccccgcccagcaguucuggccgcu

SEQ ID NO: 394261 - RNA, 32 nt, Homo Sapiens
gacugugcuuugcaaaagcaauuaagaacaaa

SEQ ID NO: 394262 - RNA, 32 nt, Homo Sapiens
cgugcugcgggcugggcugcccgggggagaug

SEQ ID NO: 394263 - RNA, 32 nt, Homo Sapiens
caccgcagcaggucccgagaucggcggcacag

SEQ ID NO: 394264 - RNA, 32 nt, Homo Sapiens
agcuucugucuccccacacauccgaugugcuu

SEQ ID NO: 394265 - RNA, 32 nt, Homo Sapiens
agagcagugcccuggcuguguccuggacgggu

SEQ ID NO: 394266 - RNA, 32 nt, Homo Sapiens
uuuccaaucaccgacuguccugucuacauuag

SEQ ID NO: 394267 - RNA, 32 nt, Homo Sapiens
ucacccaaacccacaaaagaugcugaaaaagc

SEQ ID NO: 394268 - RNA, 32 nt, Homo Sapiens
ccuggagaaaauacuuuuuuuuuuuuuuuuga

SEQ ID NO: 394269 - RNA, 32 nt, Homo Sapiens
ugggaggccaaggggggagaucacuugagguc

SEQ ID NO: 394270 - RNA, 32 nt, Homo Sapiens
acccuucccaccgccugccccauccccauccc

SEQ ID NO: 394271 - RNA, 32 nt, Homo Sapiens
uuucugaauccaauuuaacuuauucuucccuc

SEQ ID NO: 394272 - RNA, 32 nt, Homo Sapiens
aggucaaagccuaacaggacuggcuguugugu

SEQ ID NO: 394273 - RNA, 32 nt, Homo Sapiens
cccgggccgugugcccguggcuccagccgcug

SEQ ID NO: 394274 - RNA, 32 nt, Homo Sapiens
aaaucuguuuaaauccauuuauauuauuuuac

SEQ ID NO: 394275 - RNA, 32 nt, Homo Sapiens
cuucuagggcacccucagcaaaggggcaggug

SEQ ID NO: 394276 - RNA, 32 nt, Homo Sapiens
agcuggcucuuugccuggccccgccuucccau

SEQ ID NO: 394277 - RNA, 32 nt, Homo Sapiens
uguuccuccgaccccaccugucugccucaagc

SEQ ID NO: 394278 - RNA, 32 nt, Homo Sapiens
cugcugccccgcccgcgccggcggaaggagac

SEQ ID NO: 394279 - RNA, 32 nt, Homo Sapiens
ggucacacugggcgaccacgggggccugcuca

SEQ ID NO: 394280 - RNA, 32 nt, Homo Sapiens
acgguucccgggcgaaccggggcccgcgcgcg

SEQ ID NO: 394281 - RNA, 32 nt, Homo Sapiens
gccccggcuccucgccucccccacuucuggcc

SEQ ID NO: 394282 - RNA, 32 nt, Homo Sapiens
gcgggcgacgcgggucucacucguccgcuccg

SEQ ID NO: 394283 - RNA, 32 nt, Homo Sapiens
aacuuuaauaaaugacaauguguaggccaaaa

SEQ ID NO: 394284 - RNA, 32 nt, Homo Sapiens
guggaggcuaagaacacagaaaacacacaaaa

SEQ ID NO: 394285 - RNA, 32 nt, Homo Sapiens
guaaaggccucuagaugauuagcaaucuugau

SEQ ID NO: 394286 - RNA, 32 nt, Homo Sapiens
cugcugcugcgcaccuggcccaugcugucccu

SEQ ID NO: 394287 - RNA, 32 nt, Homo Sapiens
cgggugucacgacugccacgccaucaaaaagu

SEQ ID NO: 394288 - RNA, 32 nt, Homo Sapiens
agccagcacgcgguucugugcuauaggagucu

SEQ ID NO: 394289 - RNA, 32 nt, Homo Sapiens
aaagcuaauauuugauacugugcuugcuguca

SEQ ID NO: 394290 - RNA, 32 nt, Homo Sapiens
agcagugugcagaauauaaugcucuuuuuaaa

SEQ ID NO: 394291 - RNA, 32 nt, Homo Sapiens
aaugauuuuuauuauuauccugcuauucaaau

SEQ ID NO: 394292 - RNA, 32 nt, Homo Sapiens
gacgccgagguccgccgcgaucuuccaggugc

SEQ ID NO: 394293 - RNA, 32 nt, Homo Sapiens
gucagagucggcuugugaaaaguuguuaaaca

SEQ ID NO: 394294 - RNA, 32 nt, Homo Sapiens
cugcccggcggcgccgcgaccgccuuccuucg

SEQ ID NO: 394295 - RNA, 32 nt, Homo Sapiens
aagcauuuuuaaauagauaacaauaggacuug

SEQ ID NO: 394296 - RNA, 32 nt, Homo Sapiens
caggaguuauuaaaguauuuuauuuuuauuau

SEQ ID NO: 394297 - RNA, 32 nt, Homo Sapiens
aaugacugacuucccaguaaggcucucuaagg

SEQ ID NO: 394298 - RNA, 32 nt, Homo Sapiens
ggcugcugccacugcuguugaaauggugcccu

SEQ ID NO: 394299 - RNA, 32 nt, Homo Sapiens
acacagcgcucgccgagggucgcuuggacccu

SEQ ID NO: 394300 - RNA, 32 nt, Homo Sapiens
cuccugcccuucgcuccuggguugguugugag

SEQ ID NO: 394301 - RNA, 32 nt, Homo Sapiens
aauggagacauucugauggaauuugggcaccu

SEQ ID NO: 394302 - RNA, 32 nt, Homo Sapiens
aucggacucuguuuuccaaacucagucauuca

SEQ ID NO: 394303 - RNA, 32 nt, Homo Sapiens
auucagaaacaaaacuguagaacuguguauuu

SEQ ID NO: 394304 - RNA, 32 nt, Homo Sapiens
caaucaaaaugaauaauccuuggauuuuuaua

SEQ ID NO: 394305 - RNA, 32 nt, Homo Sapiens
ucugugcggcuguggucgugggaggguguggu

SEQ ID NO: 394306 - RNA, 32 nt, Homo Sapiens
aaacaaagaugaugauaauguuuucagcagcg

SEQ ID NO: 394307 - RNA, 32 nt, Homo Sapiens
ugguguacccccuacuuuacagauggggaaac

SEQ ID NO: 394308 - RNA, 32 nt, Homo Sapiens
uacuacccuggagggacagcucugcccuugag

SEQ ID NO: 394309 - RNA, 32 nt, Homo Sapiens
ucucuaaaaaauuuuaaaaaaagaaaucugca

SEQ ID NO: 394310 - RNA, 32 nt, Homo Sapiens
gcccccggccugccaugaccgcgcuccccggc

SEQ ID NO: 394311 - RNA, 32 nt, Homo Sapiens
cugaucacucucggggaccaggacauagaccu

SEQ ID NO: 394312 - RNA, 32 nt, Homo Sapiens
aucugucaacuuccgggacgccgcgcgucacu

SEQ ID NO: 394313 - RNA, 32 nt, Homo Sapiens
cagcaguguggggugaggccuccagcuacuug

SEQ ID NO: 394314 - RNA, 32 nt, Homo Sapiens
ccagacccacauuucauccccauccccaucgc

SEQ ID NO: 394315 - RNA, 32 nt, Homo Sapiens
uaccgccgucccgccauggcucugaggcgcgc

SEQ ID NO: 394316 - RNA, 32 nt, Homo Sapiens
uaugaagccagaccuccccggcgggccucagg

SEQ ID NO: 394317 - RNA, 32 nt, Homo Sapiens
augaggaagcggcggcagccacugcggcccgc

SEQ ID NO: 394318 - RNA, 32 nt, Homo Sapiens
uaaggcugcggaaaaugagaugguuugugaaa

SEQ ID NO: 394319 - RNA, 32 nt, Homo Sapiens
guuacauuaucaggcccaucccagauguuugu

SEQ ID NO: 394320 - RNA, 32 nt, Homo Sapiens
gugacucauggagaagaaaugggguaaauuuu

SEQ ID NO: 394321 - RNA, 32 nt, Homo Sapiens
gaacaaaugcucauugcacuauauuauaugca

SEQ ID NO: 394322 - RNA, 32 nt, Homo Sapiens
cuauuccagugggacaguaaaugggaucugcu

SEQ ID NO: 394323 - RNA, 32 nt, Homo Sapiens
cacugucuaaaugugcaauguacaacucuagg

SEQ ID NO: 394324 - RNA, 32 nt, Homo Sapiens
ccccucuccucggcccuuucucuucccagcac

SEQ ID NO: 394325 - RNA, 32 nt, Homo Sapiens
ugaacugaaaagauuaugugaaauuuucacaa

SEQ ID NO: 394326 - RNA, 32 nt, Homo Sapiens
ugugucuugugcuguguguccuaugcugugug

SEQ ID NO: 394327 - RNA, 32 nt, Homo Sapiens
ggguggggaaaggacggggaaggacucgugug

SEQ ID NO: 394328 - RNA, 32 nt, Homo Sapiens
cuccucuugguuucugguugcacaugugaauu

SEQ ID NO: 394329 - RNA, 32 nt, Homo Sapiens
acaagauuaccaugcaauuuugaaagccugcu

SEQ ID NO: 394330 - RNA, 32 nt, Homo Sapiens
caaaggaaagguccuugugugacauuuggaga

SEQ ID NO: 394331 - RNA, 31 nt, Homo Sapiens
ccugugggggcgguguggacuccucccaguu

SEQ ID NO: 394332 - RNA, 32 nt, Homo Sapiens
gguagggcagagaggagggcuugcucaucuga

SEQ ID NO: 394333 - RNA, 32 nt, Homo Sapiens
uggccuggcaggagccgagcuuguuccggaag

SEQ ID NO: 394334 - RNA, 32 nt, Homo Sapiens
ggaguacgacccggagagggccuucgacacuc

SEQ ID NO: 394335 - RNA, 32 nt, Homo Sapiens
gcugcggccccucccccguccuggagguuccc

SEQ ID NO: 394336 - RNA, 32 nt, Homo Sapiens
aauuucacaucagcauguucagcuugugcuag

SEQ ID NO: 394337 - RNA, 32 nt, Homo Sapiens
gucuguucccccagccccuugggcucaccuga

SEQ ID NO: 394338 - RNA, 32 nt, Homo Sapiens
acuagggaugcaaagaugaaugagauaaggcc

SEQ ID NO: 394339 - RNA, 32 nt, Homo Sapiens
acacaacucaguggccugaacacacaccuuca

SEQ ID NO: 394340 - RNA, 32 nt, Homo Sapiens
aaaugcacagaaaagcaaguaagauuauguca

SEQ ID NO: 394341 - RNA, 32 nt, Homo Sapiens
uauguauuaucacuuaaaaugguugccuuuaa

SEQ ID NO: 394342 - RNA, 32 nt, Homo Sapiens
gguucgggaggccgggacccugcccgggagau

SEQ ID NO: 394343 - RNA, 32 nt, Homo Sapiens
auaguauauuauaaagaaaaugucuacauuaa

SEQ ID NO: 394344 - RNA, 32 nt, Homo Sapiens
ggaagucugaccaaguuggagcagaugguuug

SEQ ID NO: 394345 - RNA, 32 nt, Homo Sapiens
cccuccaggaucugguuacagcugagaagccc

SEQ ID NO: 394346 - RNA, 32 nt, Homo Sapiens
aaauucucugaaaguaaaaauaaaaguuuuua

SEQ ID NO: 394347 - RNA, 30 nt, Homo Sapiens
gugagggauaaaagacuacauauuggguac

SEQ ID NO: 394348 - RNA, 32 nt, Homo Sapiens
cggcgcgucucgccgccucgcugccgaacaca

SEQ ID NO: 394349 - RNA, 32 nt, Homo Sapiens
cacagccgccgccuccacccccggccccacuc

SEQ ID NO: 394350 - RNA, 32 nt, Homo Sapiens
agccggacgugguggcgggcgccuguaauccc

SEQ ID NO: 394351 - RNA, 32 nt, Homo Sapiens
gcgcgggcggcaccuccucugcagguaaaugg

SEQ ID NO: 394352 - RNA, 32 nt, Homo Sapiens
gaugaucccaggucuccucgaccuccauacac

SEQ ID NO: 394353 - RNA, 32 nt, Homo Sapiens
ucagagcuaauguguucagaggucuugucucc

SEQ ID NO: 394354 - RNA, 28 nt, Homo Sapiens
agagugguugcauuuauuauaaaaucuu

SEQ ID NO: 394355 - RNA, 32 nt, Homo Sapiens
ucauguuagugagcagacaaauagucacaaau

SEQ ID NO: 394356 - RNA, 32 nt, Homo Sapiens
agagcagaggugauccggccccugccugcugg

SEQ ID NO: 394357 - RNA, 32 nt, Homo Sapiens
cucucuguuucaucagaaacacauacuauaau

SEQ ID NO: 394358 - RNA, 32 nt, Homo Sapiens
guuuuacagguggucaccuuuugucucuuccu

SEQ ID NO: 394359 - RNA, 32 nt, Homo Sapiens
cacagcagcuggaaccucugagucaggugccc

SEQ ID NO: 394360 - RNA, 32 nt, Homo Sapiens
uaagugggcuauucauuugugcucuccucuuu

SEQ ID NO: 394361 - RNA, 32 nt, Homo Sapiens
aucuacugaauagaaaacuuugagaauaauau

SEQ ID NO: 394362 - RNA, 32 nt, Homo Sapiens
aggauaggacaaaggcccuggcugugcccaaa

SEQ ID NO: 394363 - RNA, 32 nt, Homo Sapiens
aaagccuucccagaagucucacugcguguguu

SEQ ID NO: 394364 - RNA, 32 nt, Homo Sapiens
ccaguuuguuuuacagguuuuaaaguucugcu

SEQ ID NO: 394365 - RNA, 32 nt, Homo Sapiens
ccuagaacgcguauggagacauucucuuuuag

SEQ ID NO: 394366 - RNA, 32 nt, Homo Sapiens
gcaaacucaggccaauaagcuccugcccccac

SEQ ID NO: 394367 - RNA, 32 nt, Homo Sapiens
cugcuaugaugaugccagcuggucgggaagga

SEQ ID NO: 394368 - RNA, 32 nt, Homo Sapiens
aaaauugcuuugcagcaagcauuucuccaguu

SEQ ID NO: 394369 - RNA, 32 nt, Homo Sapiens
ggaacugcagcccccugucuccccucagcagu

SEQ ID NO: 394370 - RNA, 32 nt, Homo Sapiens
uuugguccccucccacuucucuaguucgucau

SEQ ID NO: 394371 - RNA, 28 nt, Homo Sapiens
ggaacucaagaaauacauuugaauaauu

SEQ ID NO: 394372 - RNA, 32 nt, Homo Sapiens
uauaguguaauuagaaaaaguacaauauucua

SEQ ID NO: 394373 - RNA, 32 nt, Homo Sapiens
ucuagggcucugcagcagcaguggcucuucga

SEQ ID NO: 394374 - RNA, 32 nt, Homo Sapiens
cucuuccucuccuggguugggggcuggggccc

SEQ ID NO: 394375 - RNA, 32 nt, Homo Sapiens
auuucaauauaaaaaugacacuuuguugccuu

SEQ ID NO: 394376 - RNA, 32 nt, Homo Sapiens
uccccuucucgaaaauucugugccauuuaagu

SEQ ID NO: 394377 - RNA, 32 nt, Homo Sapiens
acauuaaaaugucaguuuuucuugcuaauacc

SEQ ID NO: 394378 - RNA, 32 nt, Homo Sapiens
ugaacaggguccugggcuuuggcaccaaguac

SEQ ID NO: 394379 - RNA, 30 nt, Homo Sapiens
auacaccaugcuccuuuuuccuuuaggauu

SEQ ID NO: 394380 - RNA, 32 nt, Homo Sapiens
uaaggaacccgccgcgugcccaggugccccgc

SEQ ID NO: 394381 - RNA, 29 nt, Homo Sapiens
uuuggaaagaauaaauucugugaugugau

SEQ ID NO: 394382 - RNA, 32 nt, Homo Sapiens
cugugaccugagccccuugguugacccugcac

SEQ ID NO: 394383 - RNA, 32 nt, Homo Sapiens
aagccguugcuugaccccgggcgagggaggcg

SEQ ID NO: 394384 - RNA, 32 nt, Homo Sapiens
gacaccuacuguguuauaaaauauaucaucag

SEQ ID NO: 394385 - RNA, 32 nt, Homo Sapiens
cuuuuggacacuuuacauauggauucuaaaac

SEQ ID NO: 394386 - RNA, 32 nt, Homo Sapiens
cagugacccagcugagcugugcuguucuccua

SEQ ID NO: 394387 - RNA, 32 nt, Homo Sapiens
aucagcgugccucccacccccauccugaaggg

SEQ ID NO: 394388 - RNA, 32 nt, Homo Sapiens
aguguuauugaggugaucaagcaagagcuguu

SEQ ID NO: 394389 - RNA, 32 nt, Homo Sapiens
ccuggcuggugccccucccaggcuccuuuuca

SEQ ID NO: 394390 - RNA, 32 nt, Homo Sapiens
ccaucagcccgcuccccgccuccaggacagag

SEQ ID NO: 394391 - RNA, 32 nt, Homo Sapiens
acaguacagacccuaaauuuuauuauuuguug

SEQ ID NO: 394392 - RNA, 32 nt, Homo Sapiens
acaccucugaagacugcaaacuggauuaguuc

SEQ ID NO: 394393 - RNA, 32 nt, Homo Sapiens
ccucaccuccaggggggaccgcggcggcccgc

SEQ ID NO: 394394 - RNA, 32 nt, Homo Sapiens
agaaaaacaacaacauuuggagaggcugugaa

SEQ ID NO: 394395 - RNA, 32 nt, Homo Sapiens
uuuaaaacaaaguggaaacauuacacaauguc

SEQ ID NO: 394396 - RNA, 32 nt, Homo Sapiens
ugggcccuuccugcugggaaaagcagaagagg

SEQ ID NO: 394397 - RNA, 32 nt, Homo Sapiens
auucuucuuuaaccgaauuaaacaucuuaauu

SEQ ID NO: 394398 - RNA, 32 nt, Homo Sapiens
cuuuguucaagugucaacuuuacuucaugaaa

SEQ ID NO: 394399 - RNA, 32 nt, Homo Sapiens
gaguagcuggaacuacaggugugcgccaccac

SEQ ID NO: 394400 - RNA, 32 nt, Homo Sapiens
ugugugguaguuuuacagacaugaugguuucc

SEQ ID NO: 394401 - RNA, 32 nt, Homo Sapiens
uauaauagauugaguuauuaacuguauuuucu

SEQ ID NO: 394402 - RNA, 32 nt, Homo Sapiens
gggggagcgaacuguuguggugcggagcguuc

SEQ ID NO: 394403 - RNA, 32 nt, Homo Sapiens
uuucgauuuuuggugaaguauuuuguuaccuc

SEQ ID NO: 394404 - RNA, 32 nt, Homo Sapiens
cucaggccccgcuggccgcgggcucgguaccc

SEQ ID NO: 394405 - RNA, 32 nt, Homo Sapiens
caguuauguggucacaugaugugcauagagau

SEQ ID NO: 394406 - RNA, 32 nt, Homo Sapiens
ucuauauauggacguccaaaugaaaccaucaa

SEQ ID NO: 394407 - RNA, 32 nt, Homo Sapiens
cucuuuaucaauuuuacauaaaccaaauaaag

SEQ ID NO: 394408 - RNA, 32 nt, Homo Sapiens
auuuugcccuguguuauauguguuucacgcac

SEQ ID NO: 394409 - RNA, 32 nt, Homo Sapiens
ggguccugccagcuggaucgcugcacauggcc

SEQ ID NO: 394410 - RNA, 32 nt, Homo Sapiens
uuucacuaauacuaaauaaaauuuggggaaca

SEQ ID NO: 394411 - RNA, 32 nt, Homo Sapiens
uuuugaacuuucuuuccaguuuucauaaaagu

SEQ ID NO: 394412 - RNA, 32 nt, Homo Sapiens
ugcugucacauaugcaucaucugaaaucauuu

SEQ ID NO: 394413 - RNA, 32 nt, Homo Sapiens
augaauugauucaauguguacuuaccaguuua

SEQ ID NO: 394414 - RNA, 32 nt, Homo Sapiens
accucagccccaguuuucuccuccucacuagg

SEQ ID NO: 394415 - RNA, 32 nt, Homo Sapiens
aguucccaggacuuccuaaugugcagcuaggg

SEQ ID NO: 394416 - RNA, 32 nt, Homo Sapiens
ggccccagcagcagguccuggugcuggcggag

SEQ ID NO: 394417 - RNA, 32 nt, Homo Sapiens
cuaccugcccucagaccugccacagcccuuca

SEQ ID NO: 394418 - RNA, 32 nt, Homo Sapiens
cgggaccugugcaagcacauucaccaagugca

SEQ ID NO: 394419 - RNA, 32 nt, Homo Sapiens
cacaggagggauccagcaggcauggggaaauu

SEQ ID NO: 394420 - RNA, 32 nt, Homo Sapiens
cccuccccugucaggucucuccuguccuaacc

SEQ ID NO: 394421 - RNA, 32 nt, Homo Sapiens
gucaggaguuggagaccagucuggccaauaug

SEQ ID NO: 394422 - RNA, 32 nt, Homo Sapiens
uuccauccacgcucaagacccgcccuuagacc

SEQ ID NO: 394423 - RNA, 32 nt, Homo Sapiens
uauuccauugcaugacuguccugugcucugau

SEQ ID NO: 394424 - RNA, 32 nt, Homo Sapiens
uuuaaaaauauguggcugugaacuugaaugaa

SEQ ID NO: 394425 - RNA, 32 nt, Homo Sapiens
uguaggagggugggagggagagcugguccagg

SEQ ID NO: 394426 - RNA, 32 nt, Homo Sapiens
uauuuuugacccauauuauuuacaaugucuug

SEQ ID NO: 394427 - RNA, 32 nt, Homo Sapiens
acauugaagauuuuaaacauuugguauuaaaa

SEQ ID NO: 394428 - RNA, 32 nt, Homo Sapiens
agugggccgcccgccgcccccggggccccuuu

SEQ ID NO: 394429 - RNA, 30 nt, Homo Sapiens
aaagagggaggugggaaauagaagagggag

SEQ ID NO: 394430 - RNA, 32 nt, Homo Sapiens
aaaaaaggcagcugcagaaaagaaauuggagu

SEQ ID NO: 394431 - RNA, 32 nt, Homo Sapiens
aauuaauuuuuucauugauuuuauugaucagu

SEQ ID NO: 394432 - RNA, 32 nt, Homo Sapiens
guccuugaaggcugaaugaacagucccuuuca

SEQ ID NO: 394433 - RNA, 32 nt, Homo Sapiens
uuguauauucuauggguauuuuauugauacau

SEQ ID NO: 394434 - RNA, 30 nt, Homo Sapiens
ugcaaaugaaaacacucucuugcugugguc

SEQ ID NO: 394435 - RNA, 32 nt, Homo Sapiens
guuuguacuaauacgcuaaugauucaaccaag

SEQ ID NO: 394436 - RNA, 32 nt, Homo Sapiens
uuacucaaacagcuuugaaauuucugggucgu

SEQ ID NO: 394437 - RNA, 32 nt, Homo Sapiens
uaugaacaaaacaaaaaaacaaggcugccaca

SEQ ID NO: 394438 - RNA, 32 nt, Homo Sapiens
guagggcccgggcgcguccgcgcucugcagcg

SEQ ID NO: 394439 - RNA, 32 nt, Homo Sapiens
guuguucuuuugcagcacucacgccucugaca

SEQ ID NO: 394440 - RNA, 32 nt, Homo Sapiens
aacauuuguuuaaugaugucugcugacaaauc

SEQ ID NO: 394441 - RNA, 32 nt, Homo Sapiens
gcuuccugccauccuaccuuucugagagaggc

SEQ ID NO: 394442 - RNA, 32 nt, Homo Sapiens
gcacaggaggaggacucugugcuggcuucaca

SEQ ID NO: 394443 - RNA, 32 nt, Homo Sapiens
aaaacauuguccuguuuguugcaacagaaaac

SEQ ID NO: 394444 - RNA, 32 nt, Homo Sapiens
uaauaagaagcacaacuuguucacaaacucau

SEQ ID NO: 394445 - RNA, 32 nt, Homo Sapiens
guuacauuuguuugugggauuauuuaaggaau

SEQ ID NO: 394446 - RNA, 32 nt, Homo Sapiens
uccucaaaucucaacccuuccauuccgaggcu

SEQ ID NO: 394447 - RNA, 32 nt, Homo Sapiens
ugcggccgcagccccagcgccccucgccuaac

SEQ ID NO: 394448 - RNA, 32 nt, Homo Sapiens
ggagcgcuggccuuggccuuccgcggagacuu

SEQ ID NO: 394449 - RNA, 32 nt, Homo Sapiens
uuccuuaaaaugcucugcaaagaaauugggac

SEQ ID NO: 394450 - RNA, 32 nt, Homo Sapiens
aggcuuaagauuuggaauaaagucacagaauc

SEQ ID NO: 394451 - RNA, 32 nt, Homo Sapiens
gcugacaguaacacugaugaaugcugauaauc

SEQ ID NO: 394452 - RNA, 32 nt, Homo Sapiens
cuuacagcuuguuuuccaggcaucgaauaacu

SEQ ID NO: 394453 - RNA, 32 nt, Homo Sapiens
uuguuuuuauuccuaaugugugcaacaucaca

SEQ ID NO: 394454 - RNA, 32 nt, Homo Sapiens
gaauuccggcggccucucuccucucccucagu

SEQ ID NO: 394455 - RNA, 31 nt, Homo Sapiens
cuccucucacggaaaggucgcggccugugcc

SEQ ID NO: 394456 - RNA, 32 nt, Homo Sapiens
uucuaugccucccagggagccacguaugucug

SEQ ID NO: 394457 - RNA, 27 nt, Homo Sapiens
ugugaacuuaaaccucuuuguaaaaua

SEQ ID NO: 394458 - RNA, 32 nt, Homo Sapiens
cgcccgcccgacggagacgucccagcuaucug

SEQ ID NO: 394459 - RNA, 32 nt, Homo Sapiens
aaggccuagaaacaaugaucaaugcaacagca

SEQ ID NO: 394460 - RNA, 32 nt, Homo Sapiens
uccugucuuuugcuuuaauuguccuauuugcu

SEQ ID NO: 394461 - RNA, 32 nt, Homo Sapiens
uaggaauuuacuaccaguuaaagagggagaac

SEQ ID NO: 394462 - RNA, 32 nt, Homo Sapiens
ggaauuaauauuuuccucauaauagcaaguag

SEQ ID NO: 394463 - RNA, 32 nt, Homo Sapiens
gcgcugcagggccucacagucugcuuccauuu

SEQ ID NO: 394464 - RNA, 31 nt, Homo Sapiens
uggggcccacccuucucaccagcacuaaaug

SEQ ID NO: 394465 - RNA, 32 nt, Homo Sapiens
uaaaaagcuaauuauugguguuagaacaugac

SEQ ID NO: 394466 - RNA, 32 nt, Homo Sapiens
ucccaggggaauuuugagcauguaucuuaucu

SEQ ID NO: 394467 - RNA, 32 nt, Homo Sapiens
uggagggacaccuggaggccaguuucaggaac

SEQ ID NO: 394468 - RNA, 32 nt, Homo Sapiens
guccgugccguucaguugcccgccauggcuga

SEQ ID NO: 394469 - RNA, 32 nt, Homo Sapiens
cccugcuaaucuccaugcccacguucuuuccc

SEQ ID NO: 394470 - RNA, 32 nt, Homo Sapiens
cccgcgccgccucuuugagacccgggucgucu

SEQ ID NO: 394471 - RNA, 30 nt, Homo Sapiens
augucaucaggacuuccugagucuguguca

SEQ ID NO: 394472 - RNA, 32 nt, Homo Sapiens
ggaagcuggcacugcggggaucuugcccggug

SEQ ID NO: 394473 - RNA, 27 nt, Homo Sapiens
uuccuguccuucuguggccuccauccc

SEQ ID NO: 394474 - RNA, 32 nt, Homo Sapiens
gguuuucuguuguguuacuuugcuuagaauga

SEQ ID NO: 394475 - RNA, 32 nt, Homo Sapiens
cagauacucaugcggauacccauuggaaugac

SEQ ID NO: 394476 - RNA, 32 nt, Homo Sapiens
aaacaucaacaaaaacaaaacccacugugucu

SEQ ID NO: 394477 - RNA, 32 nt, Homo Sapiens
ucacuggcaggcgaggcccagccauaccgcau

SEQ ID NO: 394478 - RNA, 32 nt, Homo Sapiens
cguucccccucccccucuccgaguccucgugg

SEQ ID NO: 394479 - RNA, 32 nt, Homo Sapiens
caccauuguggacuuuuugaguguccaccuga

SEQ ID NO: 394480 - RNA, 32 nt, Homo Sapiens
uucgcgaccgcugcgcgcgagccccguguccc

SEQ ID NO: 394481 - RNA, 32 nt, Homo Sapiens
ggcggggaagauggcggaugacaaggauucuc

SEQ ID NO: 394482 - RNA, 32 nt, Homo Sapiens
aggccauggcaaauuuucauugguuuuaucuu

SEQ ID NO: 394483 - RNA, 32 nt, Homo Sapiens
acaaccuuagcaugaugucuuaucuuaagcaa

SEQ ID NO: 394484 - RNA, 32 nt, Homo Sapiens
uaacuauuugcauauaaugugauuuaauuuau

SEQ ID NO: 394485 - RNA, 32 nt, Homo Sapiens
cuuuauucuggccuggggcacaagagcaaaga

SEQ ID NO: 394486 - RNA, 32 nt, Homo Sapiens
ggcagccacccgcgcccagcgccccgcgcccc

SEQ ID NO: 394487 - RNA, 32 nt, Homo Sapiens
ccgccgcggugguacgcuccaggccgccaggc

SEQ ID NO: 394488 - RNA, 32 nt, Homo Sapiens
agaagugauuuuucauucucuuggauucuuuc

SEQ ID NO: 394489 - RNA, 32 nt, Homo Sapiens
ccagggauauugcauucuguccucacugucuu

SEQ ID NO: 394490 - RNA, 32 nt, Homo Sapiens
cccacaagaagcugguggagcagaguguuccc

SEQ ID NO: 394491 - RNA, 32 nt, Homo Sapiens
cuacaacuccagaacuaacaaugaacuccuau

SEQ ID NO: 394492 - RNA, 32 nt, Homo Sapiens
ucucccgcgggcccuccgcuggccggggcuag

SEQ ID NO: 394493 - RNA, 32 nt, Homo Sapiens
uuucaggcauauaauauuuauguuauauaugg

SEQ ID NO: 394494 - RNA, 32 nt, Homo Sapiens
gcagagcggccgccagcuccugugcuggacau

SEQ ID NO: 394495 - RNA, 32 nt, Homo Sapiens
uggugcuguccuguuuuacuggaccccgccuc

SEQ ID NO: 394496 - RNA, 32 nt, Homo Sapiens
uccaggcccccuccuucccuggaugcugugcu

SEQ ID NO: 394497 - RNA, 32 nt, Homo Sapiens
aucggcugcuccccgguggcccaggccucgga

SEQ ID NO: 394498 - RNA, 32 nt, Homo Sapiens
ccgcagaucaggugcugguagggcugcaggag

SEQ ID NO: 394499 - RNA, 32 nt, Homo Sapiens
cucacauccccucuuggugccugaucuucucu

SEQ ID NO: 394500 - RNA, 32 nt, Homo Sapiens
ucaaauuaaguacauaauaaaguaaaauuuug

SEQ ID NO: 394501 - RNA, 32 nt, Homo Sapiens
ugccuuuuuuuuuuuuuuuuaccugaagcuac

SEQ ID NO: 394502 - RNA, 32 nt, Homo Sapiens
ggcugaaauguuagagaaacagagcaccaagu

SEQ ID NO: 394503 - RNA, 32 nt, Homo Sapiens
acuucaccaguguccuuuuuugccauggaguc

SEQ ID NO: 394504 - RNA, 32 nt, Homo Sapiens
gcccgccccguccguccaucugucccgcugcc

SEQ ID NO: 394505 - RNA, 32 nt, Homo Sapiens
gcuccccgccugcgcccagcgccccgcgcccg

SEQ ID NO: 394506 - RNA, 32 nt, Homo Sapiens
uagugucuccucucugguggcugggcugcucc

SEQ ID NO: 394507 - RNA, 32 nt, Homo Sapiens
ugcucugcaguguccucccaacugaaaacaac

SEQ ID NO: 394508 - RNA, 32 nt, Homo Sapiens
uuguacuggauacauuuuccauuuuucuaaaa

SEQ ID NO: 394509 - RNA, 32 nt, Homo Sapiens
ggguaaagccaugugaagacgugccugccucc

SEQ ID NO: 394510 - RNA, 32 nt, Homo Sapiens
gugaagagaaacaaagguuugaucuuuccuuu

SEQ ID NO: 394511 - RNA, 32 nt, Homo Sapiens
uucugucaccuuccucacggaccuuggucacg

SEQ ID NO: 394512 - RNA, 32 nt, Homo Sapiens
acagcccaugacccgaggcauucucaggguau

SEQ ID NO: 394513 - RNA, 32 nt, Homo Sapiens
gucucucuggaaagauucucgcuaauggauuu

SEQ ID NO: 394514 - RNA, 32 nt, Homo Sapiens
gcaugaaaccacuggaacauggccgucgcugu

SEQ ID NO: 394515 - RNA, 32 nt, Homo Sapiens
agcguguggaagauccgaguguggcacgacaa

SEQ ID NO: 394516 - RNA, 32 nt, Homo Sapiens
uggagcucugugucaacuuugauccuuugucu

SEQ ID NO: 394517 - RNA, 32 nt, Homo Sapiens
auuuaagaaaguaacaaugcagucugcaagcu

SEQ ID NO: 394518 - RNA, 32 nt, Homo Sapiens
ugcauuguagaaccuuuucuuaucucagugga

SEQ ID NO: 394519 - RNA, 32 nt, Homo Sapiens
cuaucacucuaauucggauuugccauagccuu

SEQ ID NO: 394520 - RNA, 32 nt, Homo Sapiens
gaaagucacagcacaugugcccauugauacaa

SEQ ID NO: 394521 - RNA, 32 nt, Homo Sapiens
augucuucccaggcucagggaccuccauuccu

SEQ ID NO: 394522 - RNA, 32 nt, Homo Sapiens
auuuuagucauucugcuucucaucuaaauauu

SEQ ID NO: 394523 - RNA, 32 nt, Homo Sapiens
cagaggaccguggauaccucaguguccacaca

SEQ ID NO: 394524 - RNA, 32 nt, Homo Sapiens
agcaaaggcaucugccuauagggucccccagg

SEQ ID NO: 394525 - RNA, 32 nt, Homo Sapiens
gcugccugugacgcgcggcgcggucgguccug

SEQ ID NO: 394526 - RNA, 32 nt, Homo Sapiens
cucaucuucacagauuguucuaaaguaaaaua

SEQ ID NO: 394527 - RNA, 32 nt, Homo Sapiens
aaacuugauauuucauuuugcguuuuagcuag

SEQ ID NO: 394528 - RNA, 32 nt, Homo Sapiens
uucucuauucccuccuucucauaacugccacc

SEQ ID NO: 394529 - RNA, 32 nt, Homo Sapiens
ucccuguucuccugccuauuacuguauucucu

SEQ ID NO: 394530 - RNA, 32 nt, Homo Sapiens
aaagggucuguggccggaggccccacgagcag

SEQ ID NO: 394531 - RNA, 32 nt, Homo Sapiens
gucuuuuuuaugaaauauuucuuuuaaaagcc

SEQ ID NO: 394532 - RNA, 32 nt, Homo Sapiens
gccacugcacuccagcccgggcgacaguucaa

SEQ ID NO: 394533 - RNA, 32 nt, Homo Sapiens
gaaccguuugugauugccauuugagcucugga

SEQ ID NO: 394534 - RNA, 32 nt, Homo Sapiens
ucaguccgccgcucaccccgcggccgcaccuu

SEQ ID NO: 394535 - RNA, 32 nt, Homo Sapiens
ccagcguugcuguuccuugcagagaaaaggau

SEQ ID NO: 394536 - RNA, 32 nt, Homo Sapiens
uuuuauuuauggcuuggugucuuucuuguuuc

SEQ ID NO: 394537 - RNA, 32 nt, Homo Sapiens
agaagacucuuacuugcaugugucucaggguc

SEQ ID NO: 394538 - RNA, 32 nt, Homo Sapiens
ugaagccauuuucguagagaaauauccuucac

SEQ ID NO: 394539 - RNA, 32 nt, Homo Sapiens
auccuggugggaggagagagggcacaucucca

SEQ ID NO: 394540 - RNA, 31 nt, Homo Sapiens
gacaauuaaaugaaagucagagccugggccg

SEQ ID NO: 394541 - RNA, 32 nt, Homo Sapiens
cuaaauaaaaaguacaaagggcacauauacgu

SEQ ID NO: 394542 - RNA, 31 nt, Homo Sapiens
cugcuggcauguuguauucaagaguggcaga

SEQ ID NO: 394543 - RNA, 32 nt, Homo Sapiens
uguagaagaggauagucagaguucaggcagaa

SEQ ID NO: 394544 - RNA, 32 nt, Homo Sapiens
ggaauuucuauuauuucauugguugggaugcu

SEQ ID NO: 394545 - RNA, 32 nt, Homo Sapiens
ucacacaggauuuuaugauaauaacagagaug

SEQ ID NO: 394546 - RNA, 32 nt, Homo Sapiens
acauuuagaaaaucucuguguuuggauuauau

SEQ ID NO: 394547 - RNA, 32 nt, Homo Sapiens
uuugaggagccucauuggggagugggggguuc

SEQ ID NO: 394548 - RNA, 32 nt, Homo Sapiens
ccagccccucgggucuccgugaggccggguga

SEQ ID NO: 394549 - RNA, 32 nt, Homo Sapiens
uucuucuguguuucuucacuagccaguccaag

SEQ ID NO: 394550 - RNA, 32 nt, Homo Sapiens
agugggccggacgagccgcggggcccgggugc

SEQ ID NO: 394551 - RNA, 32 nt, Homo Sapiens
gaacugaaaggguuuuuguaaauuuuuuggcc

SEQ ID NO: 394552 - RNA, 32 nt, Homo Sapiens
gcgaagcagcgagcugaggcggcggccagcgg

SEQ ID NO: 394553 - RNA, 32 nt, Homo Sapiens
agccugguggagauggagguguguuacaggac

SEQ ID NO: 394554 - RNA, 32 nt, Homo Sapiens
guccaccaaaagacauacguaaguauguccau

SEQ ID NO: 394555 - RNA, 32 nt, Homo Sapiens
gccagggaagcagaggaggccagggaggcagu

SEQ ID NO: 394556 - RNA, 32 nt, Homo Sapiens
caccaccaacaacagcagcagcagcagccaca

SEQ ID NO: 394557 - RNA, 30 nt, Homo Sapiens
caggguggagggcuugaugugauggugauc

SEQ ID NO: 394558 - RNA, 28 nt, Homo Sapiens
aagauggcggaggugcagguccuggugc

SEQ ID NO: 394559 - RNA, 32 nt, Homo Sapiens
auccucagcagggauuaagaaggaacccggug

SEQ ID NO: 394560 - RNA, 32 nt, Homo Sapiens
ugcgugguagguuuaaagaaaagggaauguuu

SEQ ID NO: 394561 - RNA, 32 nt, Homo Sapiens
ccccccagccccacacccuauaucuccgugug

SEQ ID NO: 394562 - RNA, 32 nt, Homo Sapiens
uaucauuuuaauuuguaguuacaauugcuuuc

SEQ ID NO: 394563 - RNA, 32 nt, Homo Sapiens
cccucccauucccccaucgcccccauccccau

SEQ ID NO: 394564 - RNA, 32 nt, Homo Sapiens
uaaaaggaguaggaacguacuuugaacuacau

SEQ ID NO: 394565 - RNA, 32 nt, Homo Sapiens
auugaggagguuaaaaggaagagccuuaagau

SEQ ID NO: 394566 - RNA, 32 nt, Homo Sapiens
auccuuuguuuaacguaugaaccagguuacua

SEQ ID NO: 394567 - RNA, 32 nt, Homo Sapiens
ucggcuuuccuucuccuuccucuagucccagc

SEQ ID NO: 394568 - RNA, 32 nt, Homo Sapiens
gguuuacugugccugcccguguugggggccag

SEQ ID NO: 394569 - RNA, 32 nt, Homo Sapiens
cuuccacagauauaaagaacaaacacuuagca

SEQ ID NO: 394570 - RNA, 32 nt, Homo Sapiens
agcuccgccucccagguucccgccauucuccu

SEQ ID NO: 394571 - RNA, 32 nt, Homo Sapiens
cucauuccaaccccagagaaggaacuucgaaa

SEQ ID NO: 394572 - RNA, 32 nt, Homo Sapiens
guguauauaaugguuguguuuucauggggcua

SEQ ID NO: 394573 - RNA, 32 nt, Homo Sapiens
cggcgucccauggcgcaaccuacggccucggc

SEQ ID NO: 394574 - RNA, 32 nt, Homo Sapiens
gugucuguguauauauugcacaugaggucaau

SEQ ID NO: 394575 - RNA, 32 nt, Homo Sapiens
uaacaaugcgaaugguagucuaaccaaaugca

SEQ ID NO: 394576 - RNA, 32 nt, Homo Sapiens
guggagggcagagccaccccacaucaggaucg

SEQ ID NO: 394577 - RNA, 30 nt, Homo Sapiens
gcggcuauuuuugccaccugccuugggugc

SEQ ID NO: 394578 - RNA, 32 nt, Homo Sapiens
cgcgagacggcggcguuucauacccgagguuc

SEQ ID NO: 394579 - RNA, 32 nt, Homo Sapiens
uguucagagguggcagcccacaugcugaaauc

SEQ ID NO: 394580 - RNA, 32 nt, Homo Sapiens
ggggcugggcgcggccgggcucccacagacug

SEQ ID NO: 394581 - RNA, 32 nt, Homo Sapiens
auauacugaaaagaagaggaggaggagagcga

SEQ ID NO: 394582 - RNA, 32 nt, Homo Sapiens
ugcaaaccaauagaaacauuuagcaguacgua

SEQ ID NO: 394583 - RNA, 32 nt, Homo Sapiens
gcccccgugagccucccucgccgccccucccc

SEQ ID NO: 394584 - RNA, 32 nt, Homo Sapiens
gcuuugccagguccgaagcgggccccucucug

SEQ ID NO: 394585 - RNA, 31 nt, Homo Sapiens
gucuguucaccuucagcucagagagcacucc

SEQ ID NO: 394586 - RNA, 32 nt, Homo Sapiens
gccuucuccucagcccgacacccauggccauc

SEQ ID NO: 394587 - RNA, 32 nt, Homo Sapiens
uuuuuguuuaaccaacguaguguuauuaguag

SEQ ID NO: 394588 - RNA, 32 nt, Homo Sapiens
gcuguggccagcugcugacccagcuccuccug

SEQ ID NO: 394589 - RNA, 32 nt, Homo Sapiens
uuguugguauuguugcagcaucuggcagugag

SEQ ID NO: 394590 - RNA, 32 nt, Homo Sapiens
ugcagugccguggucugcgugcucugcagcug

SEQ ID NO: 394591 - RNA, 32 nt, Homo Sapiens
ccuauuuuauuuuucuuuaaugaaauccuccu

SEQ ID NO: 394592 - RNA, 32 nt, Homo Sapiens
acccccuuacuccacggggagggcgccucaca

SEQ ID NO: 394593 - RNA, 32 nt, Homo Sapiens
aauuuaacaugucauauuuuugaaauagauuu

SEQ ID NO: 394594 - RNA, 32 nt, Homo Sapiens
uuucuugcaacuugggggaaaguuuagaauuc

SEQ ID NO: 394595 - RNA, 32 nt, Homo Sapiens
uaugugccacuacccgcccauguccuggaaga

SEQ ID NO: 394596 - RNA, 32 nt, Homo Sapiens
uucuccucucugagccuuugucuauuguguuc

SEQ ID NO: 394597 - RNA, 32 nt, Homo Sapiens
auauaggguuaccauaugaguauuaagauuac

SEQ ID NO: 394598 - RNA, 32 nt, Homo Sapiens
gaauuaaauuuucacuagguuugaaugaucau

SEQ ID NO: 394599 - RNA, 32 nt, Homo Sapiens
aggaacucaaaauuauuuuggugcaucaaauc

SEQ ID NO: 394600 - RNA, 32 nt, Homo Sapiens
uucugguagcaucuaccauauuucaucaaauc

SEQ ID NO: 394601 - RNA, 27 nt, Homo Sapiens
agguuuuucuucuucaguuuagcucag

SEQ ID NO: 394602 - RNA, 32 nt, Homo Sapiens
guuaucccauucuucuuuaccuggucuccuuc

SEQ ID NO: 394603 - RNA, 32 nt, Homo Sapiens
ugggagccacugggccaggggccccgggucgc

SEQ ID NO: 394604 - RNA, 32 nt, Homo Sapiens
uucugcgguguagucgcucuguccucagggug

SEQ ID NO: 394605 - RNA, 32 nt, Homo Sapiens
gggcucgaggccagcuccuccccaugcccgcu

SEQ ID NO: 394606 - RNA, 32 nt, Homo Sapiens
gcagccgugucugcuuuaauaaaaugcaaaac

SEQ ID NO: 394607 - RNA, 32 nt, Homo Sapiens
accaccucccugcccuguccuccagcuucccc

SEQ ID NO: 394608 - RNA, 32 nt, Homo Sapiens
gacuagcacagaagcuggacuaauugaacaag

SEQ ID NO: 394609 - RNA, 32 nt, Homo Sapiens
ggcagaggagcggaaggcagugggugugacca

SEQ ID NO: 394610 - RNA, 32 nt, Homo Sapiens
aagcacugaaccucacauccacaauucaggca

SEQ ID NO: 394611 - RNA, 32 nt, Homo Sapiens
guuuauuguaaaagugacaugaaaauuacaac

SEQ ID NO: 394612 - RNA, 32 nt, Homo Sapiens
ugaacuucaaaaaacaaucuaagagauacaaa

SEQ ID NO: 394613 - RNA, 32 nt, Homo Sapiens
gggagcagaaaaggaauugaggugggcaggca

SEQ ID NO: 394614 - RNA, 32 nt, Homo Sapiens
cuggucucccccagccuaacccccagccccuc

SEQ ID NO: 394615 - RNA, 32 nt, Homo Sapiens
uuuguaauucauccaugcuguuguguguauca

SEQ ID NO: 394616 - RNA, 32 nt, Homo Sapiens
ucgcugcccucccacccccauucccggccaac

SEQ ID NO: 394617 - RNA, 32 nt, Homo Sapiens
gggacaggcuugagcggcggggcgcgcugccc

SEQ ID NO: 394618 - RNA, 32 nt, Homo Sapiens
guucccaccuugggauucugugugcugccauc

SEQ ID NO: 394619 - RNA, 32 nt, Homo Sapiens
gggauggggcugugggggcggggcggcauggg

SEQ ID NO: 394620 - RNA, 32 nt, Homo Sapiens
ggaaaccuggggugggggugggcuuuggucuu

SEQ ID NO: 394621 - RNA, 32 nt, Homo Sapiens
caggggcagugcauguccugcugcccucucug

SEQ ID NO: 394622 - RNA, 32 nt, Homo Sapiens
agggucugggagaggggccggccccuaccccu

SEQ ID NO: 394623 - RNA, 32 nt, Homo Sapiens
gcugcacccuccacaucagggaacggacugag

SEQ ID NO: 394624 - RNA, 32 nt, Homo Sapiens
cauaccugacccuccuccacuccaccuccacc

SEQ ID NO: 394625 - RNA, 32 nt, Homo Sapiens
uauuuguguuuuucaugguuaaaaaaauaaaa

SEQ ID NO: 394626 - RNA, 32 nt, Homo Sapiens
cuaacauucuauauauucguguuugaaaacca

SEQ ID NO: 394627 - RNA, 32 nt, Homo Sapiens
ggcgggcgggccuggggcacuccgucgccuuu

SEQ ID NO: 394628 - RNA, 32 nt, Homo Sapiens
gguugcuacugcugcggcuaaccaaacagcuc

SEQ ID NO: 394629 - RNA, 32 nt, Homo Sapiens
uaugaagaaaaaaccgauauuuaaggagaugc

SEQ ID NO: 394630 - RNA, 32 nt, Homo Sapiens
gaggaccgugcagggaugccaagcagccggcu

SEQ ID NO: 394631 - RNA, 32 nt, Homo Sapiens
agccuggcccgcggccgccuacacccggaccu

SEQ ID NO: 394632 - RNA, 32 nt, Homo Sapiens
aucagcgggugccucgaccuccccuuucaagc

SEQ ID NO: 394633 - RNA, 32 nt, Homo Sapiens
uggaugaccaacacuggagacucuggccuuac

SEQ ID NO: 394634 - RNA, 32 nt, Homo Sapiens
uccuggaggacccuggccccaggccagcuccc

SEQ ID NO: 394635 - RNA, 32 nt, Homo Sapiens
ccccaccgccccaacacccacuugggaaagga

SEQ ID NO: 394636 - RNA, 32 nt, Homo Sapiens
guugucagcaugaucaucaucuucuagccagg

SEQ ID NO: 394637 - RNA, 32 nt, Homo Sapiens
uaucuucgcgccccuugcguucuugccgcggc

SEQ ID NO: 394638 - RNA, 32 nt, Homo Sapiens
cccuccugacaaaacuaacaaaaauccuguua

SEQ ID NO: 394639 - RNA, 32 nt, Homo Sapiens
uaugauguuauucaaauauuuucuuucuuuuu

SEQ ID NO: 394640 - RNA, 32 nt, Homo Sapiens
uauugcaugugugccuugaauuucauaaaaca

SEQ ID NO: 394641 - RNA, 32 nt, Homo Sapiens
gggaccgcgccaagccgcgccuauuccccggc

SEQ ID NO: 394642 - RNA, 32 nt, Homo Sapiens
aaaauacaaaaauuagccagguaugguggcac

SEQ ID NO: 394643 - RNA, 32 nt, Homo Sapiens
uaugaaagcagugacacugacaaugcagaggu

SEQ ID NO: 394644 - RNA, 32 nt, Homo Sapiens
aucuacauguaugaacuuaacauggaaaaugu

SEQ ID NO: 394645 - RNA, 32 nt, Homo Sapiens
cuacgcugcugccuucuccuccugcuugcagg

SEQ ID NO: 394646 - RNA, 32 nt, Homo Sapiens
aacaccccuuugauaguguucuuaauauucag

SEQ ID NO: 394647 - RNA, 32 nt, Homo Sapiens
uccccuccacccaagccccugcuggccuccug

SEQ ID NO: 394648 - RNA, 32 nt, Homo Sapiens
cuucagucacgaccugccacggggugcuuuca

SEQ ID NO: 394649 - RNA, 32 nt, Homo Sapiens
ugugaagagagccccaggcauuccugauuggu

SEQ ID NO: 394650 - RNA, 32 nt, Homo Sapiens
acagaagguucagucuauggaggaguuuggau

SEQ ID NO: 394651 - RNA, 32 nt, Homo Sapiens
uacuccccauucuuuccaccuuuccugaaaca

SEQ ID NO: 394652 - RNA, 32 nt, Homo Sapiens
cccugccguugaccgcagccucucuggacagg

SEQ ID NO: 394653 - RNA, 32 nt, Homo Sapiens
gugucuuuccaugcccgagggccacgacguca

SEQ ID NO: 394654 - RNA, 32 nt, Homo Sapiens
ggaugcuaacugugugucaggccccacacuaa

SEQ ID NO: 394655 - RNA, 32 nt, Homo Sapiens
gauaacccugucaucuucccaaagcucauuua

SEQ ID NO: 394656 - RNA, 32 nt, Homo Sapiens
guacaugccggugaccugaggacuccacucac

SEQ ID NO: 394657 - RNA, 32 nt, Homo Sapiens
cucaagcagucaucccaccucagccucccaag

SEQ ID NO: 394658 - RNA, 30 nt, Homo Sapiens
ugagagggacgcgugccgcggagccaggcu

SEQ ID NO: 394659 - RNA, 32 nt, Homo Sapiens
uuaccucuuaaauaaacuuagcauuuagaggu

SEQ ID NO: 394660 - RNA, 32 nt, Homo Sapiens
uugucauuuguaaagucuaauaaaauauucuc

SEQ ID NO: 394661 - RNA, 32 nt, Homo Sapiens
aacguuuuccuuuccuucucccauaaacauaa

SEQ ID NO: 394662 - RNA, 32 nt, Homo Sapiens
cacgacgcucuggcccgggccacgcaggggcu

SEQ ID NO: 394663 - RNA, 32 nt, Homo Sapiens
ucaucauuguacaacuaacaacaguaacuagc

SEQ ID NO: 394664 - RNA, 32 nt, Homo Sapiens
agcauccacaacggggugaucgccgucuucca

SEQ ID NO: 394665 - RNA, 32 nt, Homo Sapiens
auuugggaaugggcaggauacuggagcuggga

SEQ ID NO: 394666 - RNA, 32 nt, Homo Sapiens
aggccaagcagugaccaggaagagggagaaac

SEQ ID NO: 394667 - RNA, 32 nt, Homo Sapiens
agggaggcuggguagccagggcuggugcuuaa

SEQ ID NO: 394668 - RNA, 32 nt, Homo Sapiens
ggugugggacuacaggcagcucugccuguggc

SEQ ID NO: 394669 - RNA, 31 nt, Homo Sapiens
auugagauguggaagcuguugcuguggguug

SEQ ID NO: 394670 - RNA, 32 nt, Homo Sapiens
gagaugccgcgugcugggaaggcucuuggggu

SEQ ID NO: 394671 - RNA, 32 nt, Homo Sapiens
uuuuccuuuaagaaagauuaagucuuuauuaa

SEQ ID NO: 394672 - RNA, 32 nt, Homo Sapiens
ugagccucgccccgcccucccugcgccggccc

SEQ ID NO: 394673 - RNA, 32 nt, Homo Sapiens
aaggugguauguuaagaacuagguuugucuga

SEQ ID NO: 394674 - RNA, 32 nt, Homo Sapiens
ugguggauggugugcuggcccugcgcugccug

SEQ ID NO: 394675 - RNA, 32 nt, Homo Sapiens
uuagauucaaaaggggggaaaugggucuuuuc

SEQ ID NO: 394676 - RNA, 32 nt, Homo Sapiens
ucccuucuuccgagccucuccucuggccgccg

SEQ ID NO: 394677 - RNA, 32 nt, Homo Sapiens
cuguaacacucgccgcgaaggucuacagcuuc

SEQ ID NO: 394678 - RNA, 31 nt, Homo Sapiens
cacuaaacaaauuauaacuaugugagguagu

SEQ ID NO: 394679 - RNA, 32 nt, Homo Sapiens
gaaucgcggagccugcggggcuggagguugag

SEQ ID NO: 394680 - RNA, 32 nt, Homo Sapiens
cugccgccgcauuccaccccagccccucacac

SEQ ID NO: 394681 - RNA, 32 nt, Homo Sapiens
uauacaacuauuuugaucuacacuugaugucu

SEQ ID NO: 394682 - RNA, 32 nt, Homo Sapiens
uuaagagcugaauggcucaaagaauuuaaagc

SEQ ID NO: 394683 - RNA, 32 nt, Homo Sapiens
cugccccuguaacaguuacauugucuuaaauc

SEQ ID NO: 394684 - RNA, 32 nt, Homo Sapiens
agacagaaaaugaaagcauguuguuugccagg

SEQ ID NO: 394685 - RNA, 32 nt, Homo Sapiens
uuuuuucuucugucacaaugccauuaauugau

SEQ ID NO: 394686 - RNA, 32 nt, Homo Sapiens
auuaaugguauuucuuuuuuacacucuacaag

SEQ ID NO: 394687 - RNA, 32 nt, Homo Sapiens
ggaccagggcuuuagggcucacggacccaacg

SEQ ID NO: 394688 - RNA, 32 nt, Homo Sapiens
uagauuaaaguacaacucuuuuuugagacaga

SEQ ID NO: 394689 - RNA, 32 nt, Homo Sapiens
ggcccagcgcaggcgcacgggcgucaggaugc

SEQ ID NO: 394690 - RNA, 32 nt, Homo Sapiens
augccagaguucacaaaaauagcugaucuuca

SEQ ID NO: 394691 - RNA, 32 nt, Homo Sapiens
agaugaauauguauuuucaacucucaaaggac

SEQ ID NO: 394692 - RNA, 32 nt, Homo Sapiens
ugacuguggccauagaaguuuccacucagauc

SEQ ID NO: 394693 - RNA, 32 nt, Homo Sapiens
aguuuucuuguccauaucuuuaaaagagaggg

SEQ ID NO: 394694 - RNA, 32 nt, Homo Sapiens
uaaggcgaaaaauaccguuugggaccaggcug

SEQ ID NO: 394695 - RNA, 32 nt, Homo Sapiens
aauuggacaaauuuauaaaacauccaaaaguu

SEQ ID NO: 394696 - RNA, 32 nt, Homo Sapiens
aacugagagaagaaccacaguugaaaccugcu

SEQ ID NO: 394697 - RNA, 32 nt, Homo Sapiens
caauuaaaaaaguuuugaucuuuuaauguaac

SEQ ID NO: 394698 - RNA, 32 nt, Homo Sapiens
aagacuuugacugguuguuugagggcguugaa

SEQ ID NO: 394699 - RNA, 32 nt, Homo Sapiens
cugcauuuuucugcagaagaggaguaaccgcu

SEQ ID NO: 394700 - RNA, 32 nt, Homo Sapiens
ccuggguccccucccagcuccuggggcuccuc

SEQ ID NO: 394701 - RNA, 32 nt, Homo Sapiens
uagaaggucaauuuaaaauagggacuagaaau

SEQ ID NO: 394702 - RNA, 32 nt, Homo Sapiens
aagcuuuaauguuacauaguaaaugguagugu

SEQ ID NO: 394703 - RNA, 32 nt, Homo Sapiens
ugugcggauuaccaagggaaaggucacuaccc

SEQ ID NO: 394704 - RNA, 30 nt, Homo Sapiens
acuuuaugagagagaaggagcaagaaaggg

SEQ ID NO: 394705 - RNA, 32 nt, Homo Sapiens
ggggccuuuuaaaaacuacugaauugucugag

SEQ ID NO: 394706 - RNA, 32 nt, Homo Sapiens
ggcccagcgcacccgcagcagcgcccgcagcu

SEQ ID NO: 394707 - RNA, 32 nt, Homo Sapiens
gauauuugcugcuuuuaagauagagaacccaa

SEQ ID NO: 394708 - RNA, 32 nt, Homo Sapiens
ccugccucagucuuggaguccuguugggugaa

SEQ ID NO: 394709 - RNA, 32 nt, Homo Sapiens
guacaguacaagcagccagcauauggacuaca

SEQ ID NO: 394710 - RNA, 32 nt, Homo Sapiens
acggcugaugucccucgggggauuaaaggauc

SEQ ID NO: 394711 - RNA, 32 nt, Homo Sapiens
cuuuuggaaaucaaccuuuuuuauuugggggg

SEQ ID NO: 394712 - RNA, 32 nt, Homo Sapiens
aagcuguguggacuuugagucagauagacuug

SEQ ID NO: 394713 - RNA, 32 nt, Homo Sapiens
gccggcagucccagcccugucaggugcccuga

SEQ ID NO: 394714 - RNA, 32 nt, Homo Sapiens
gccugaucccccgcucccuccucccugccuuc

SEQ ID NO: 394715 - RNA, 32 nt, Homo Sapiens
acaugucuauuuaacagcaccgauuccaaagg

SEQ ID NO: 394716 - RNA, 32 nt, Homo Sapiens
cucccggccaccccggcccugugccugcucgg

SEQ ID NO: 394717 - RNA, 32 nt, Homo Sapiens
cuacaguagaggucuaauccacagguuacacc

SEQ ID NO: 394718 - RNA, 32 nt, Homo Sapiens
cagagggggaccagcucagccugccuccccaa

SEQ ID NO: 394719 - RNA, 32 nt, Homo Sapiens
uauguuuucugaucacaucacaugacaguagg

SEQ ID NO: 394720 - RNA, 32 nt, Homo Sapiens
gccucggcugcccugccuccccgguaaucugg

SEQ ID NO: 394721 - RNA, 32 nt, Homo Sapiens
cgugcgugcgcggcccggcagagccgugcggg

SEQ ID NO: 394722 - RNA, 32 nt, Homo Sapiens
aagagagaaacaaaaaagugugacauuacaga

SEQ ID NO: 394723 - RNA, 32 nt, Homo Sapiens
ucuccgacaacccccauugcaaugagcuuugc

SEQ ID NO: 394724 - RNA, 32 nt, Homo Sapiens
cacgugggauucggcccgggugcucuugugag

SEQ ID NO: 394725 - RNA, 32 nt, Homo Sapiens
uucgagaggagaagugcgccaauguugucuuu

SEQ ID NO: 394726 - RNA, 32 nt, Homo Sapiens
ggcugcagcccuggugcgacccggcccguugc

SEQ ID NO: 394727 - RNA, 32 nt, Homo Sapiens
uuucuuccacaaaggcaauucaguacagcgcu

SEQ ID NO: 394728 - RNA, 32 nt, Homo Sapiens
auguaaauacagaugcacaauuuuauaaagua

SEQ ID NO: 394729 - RNA, 32 nt, Homo Sapiens
uguacacaaaaauuuuccuuuuagucuagccu

SEQ ID NO: 394730 - RNA, 32 nt, Homo Sapiens
ugcgccauggaguuuuagggucgggcagucuu

SEQ ID NO: 394731 - RNA, 32 nt, Homo Sapiens
uggcuccccaccacagccccagcugccucaga

SEQ ID NO: 394732 - RNA, 32 nt, Homo Sapiens
ccaaaguuaacagauuuugggguuguguuguc

SEQ ID NO: 394733 - RNA, 32 nt, Homo Sapiens
cccugcucugucagccugcuuccccaggacgg

SEQ ID NO: 394734 - RNA, 32 nt, Homo Sapiens
acaugccaauguuugucuuuuccccacuaauu

SEQ ID NO: 394735 - RNA, 32 nt, Homo Sapiens
aauugaugaauaaaaugaaggucugguguaua

SEQ ID NO: 394736 - RNA, 32 nt, Homo Sapiens
caggaagucaaucaucugugacagucucuauu

SEQ ID NO: 394737 - RNA, 32 nt, Homo Sapiens
uccccagggggccccaggcucgccugacugaa

SEQ ID NO: 394738 - RNA, 32 nt, Homo Sapiens
gaguuaauagagcuacuagagugucuaggaac

SEQ ID NO: 394739 - RNA, 32 nt, Homo Sapiens
caacagagaugcaaaaaguaucaucaagaaaa

SEQ ID NO: 394740 - RNA, 32 nt, Homo Sapiens
aguggcuguagcugcccggcgcggcgccgccc

SEQ ID NO: 394741 - RNA, 32 nt, Homo Sapiens
caacucucauuucucuuaaagcaaaaauucau

SEQ ID NO: 394742 - RNA, 32 nt, Homo Sapiens
guauuaucuuguaaaacuuauguaaaaaaaaa

SEQ ID NO: 394743 - RNA, 32 nt, Homo Sapiens
acucuuccuuuuaaguuuucuaaguacgucug

SEQ ID NO: 394744 - RNA, 32 nt, Homo Sapiens
ugagauaccggcaacaacuuugaaaacuugcu

SEQ ID NO: 394745 - RNA, 32 nt, Homo Sapiens
ucaauauuacaaccucuucuucucuuaaccuc

SEQ ID NO: 394746 - RNA, 32 nt, Homo Sapiens
ugaccuggggcuuuuuaccugguggucugaug

SEQ ID NO: 394747 - RNA, 32 nt, Homo Sapiens
gcuuccuucuuuuccguccagugucggcaagg

SEQ ID NO: 394748 - RNA, 32 nt, Homo Sapiens
cuguucuccuuccuuacaggcuaagcccuggc

SEQ ID NO: 394749 - RNA, 32 nt, Homo Sapiens
ggcacgaggcucccuuuucgcgcgcggcagca

SEQ ID NO: 394750 - RNA, 32 nt, Homo Sapiens
gaauuuuguuuauuuuccugucaaugaaagca

SEQ ID NO: 394751 - RNA, 32 nt, Homo Sapiens
uggaguggacaaagcucuguauggaagacuga

SEQ ID NO: 394752 - RNA, 32 nt, Homo Sapiens
uauguuuggcaucauauggacaaaauauuugg

SEQ ID NO: 394753 - RNA, 32 nt, Homo Sapiens
uguuauuuuuauuuuaccuuuuucauuuuaca

SEQ ID NO: 394754 - RNA, 32 nt, Homo Sapiens
aguaaauacuaaaguuacuuguauuagaacau

SEQ ID NO: 394755 - RNA, 32 nt, Homo Sapiens
ggagagcccccauuggaccaguguuugcuuag

SEQ ID NO: 394756 - RNA, 32 nt, Homo Sapiens
gagagaaacaggaaacaaagaaugccgaaaag

SEQ ID NO: 394757 - RNA, 32 nt, Homo Sapiens
gcugcucccuggugccccacuccggaguuauc

SEQ ID NO: 394758 - RNA, 32 nt, Homo Sapiens
gucucugcuucuuccugggcugucauccccuc

SEQ ID NO: 394759 - RNA, 32 nt, Homo Sapiens
uuuucucagucuuuuuugcggcuuugcugugg

SEQ ID NO: 394760 - RNA, 32 nt, Homo Sapiens
uaagaaggaugacagugccuuuguccaguuaa

SEQ ID NO: 394761 - RNA, 32 nt, Homo Sapiens
gcacaccugccaggugaaggugagauugaaga

SEQ ID NO: 394762 - RNA, 32 nt, Homo Sapiens
ccaaccccuaaaaccagguugauuugcucaau

SEQ ID NO: 394763 - RNA, 32 nt, Homo Sapiens
uaugagugucuccucugugccagccacgugug

SEQ ID NO: 394764 - RNA, 32 nt, Homo Sapiens
gacaaucaacuguguccugcccacccuucaag

SEQ ID NO: 394765 - RNA, 32 nt, Homo Sapiens
accugacgcggcaccggcgcaaccacacaggc

SEQ ID NO: 394766 - RNA, 30 nt, Homo Sapiens
ggagcggucaggcgcgugaccccgcgugac

SEQ ID NO: 394767 - RNA, 32 nt, Homo Sapiens
gcucuguugcccagcccaucucggcccacuga

SEQ ID NO: 394768 - RNA, 32 nt, Homo Sapiens
auggccagaggaaugaugggcuuuuguucuga

SEQ ID NO: 394769 - RNA, 32 nt, Homo Sapiens
gacugcgggugcugcgugauguuguuuaggac

SEQ ID NO: 394770 - RNA, 32 nt, Homo Sapiens
uugguuggccuugauuucuucucuggaggcuu

SEQ ID NO: 394771 - RNA, 32 nt, Homo Sapiens
acaaacacagcacuucggcuccucuaaccugu

SEQ ID NO: 394772 - RNA, 32 nt, Homo Sapiens
auuaugauauugucuguggccacauccuucuc

SEQ ID NO: 394773 - RNA, 32 nt, Homo Sapiens
uuagcuuguugaagaaaguagcagaaauuaaa

SEQ ID NO: 394774 - RNA, 30 nt, Homo Sapiens
auggagagaagaaggcauauguucgacugg

SEQ ID NO: 394775 - RNA, 32 nt, Homo Sapiens
uuggcagaugagaguggagguuguaaaucacc

SEQ ID NO: 394776 - RNA, 32 nt, Homo Sapiens
uuuuaaacacuggggacuggaucacagaaaaa

SEQ ID NO: 394777 - RNA, 32 nt, Homo Sapiens
ccucggagccucggcgggacgugggggcucgg

SEQ ID NO: 394778 - RNA, 32 nt, Homo Sapiens
agaaacauuuaaaauugagauguuuucaagaa

SEQ ID NO: 394779 - RNA, 32 nt, Homo Sapiens
caugucuacccucaaugacacucauggaggaa

SEQ ID NO: 394780 - RNA, 32 nt, Homo Sapiens
gccucuuauugucuuauuuuuauauauuuuuc

SEQ ID NO: 394781 - RNA, 32 nt, Homo Sapiens
ccaguggggaccagccucugagcuggucaucc

SEQ ID NO: 394782 - RNA, 32 nt, Homo Sapiens
uugcaccgcaucuggggaacacugcgguggcu

SEQ ID NO: 394783 - RNA, 32 nt, Homo Sapiens
gccccggucuaacugcccccgccccgaggccu

SEQ ID NO: 394784 - RNA, 32 nt, Homo Sapiens
auaauuugcacuuuugagacugguagcuaacc

SEQ ID NO: 394785 - RNA, 32 nt, Homo Sapiens
guuaccuaaaaugaaaaucaacuucauguuuu

SEQ ID NO: 394786 - RNA, 32 nt, Homo Sapiens
cagugggggcggcuacugcucaugugauugug

SEQ ID NO: 394787 - RNA, 32 nt, Homo Sapiens
gggcgaccgcgggcaccagccacgcgcagcgg

SEQ ID NO: 394788 - RNA, 32 nt, Homo Sapiens
ugaacucagaucugucugauaggaaugugaaa

SEQ ID NO: 394789 - RNA, 32 nt, Homo Sapiens
acaugauauuggaaaauaauggaugaaaauag

SEQ ID NO: 394790 - RNA, 32 nt, Homo Sapiens
ucaagcgauccuccugccuuagccucuugagu

SEQ ID NO: 394791 - RNA, 32 nt, Homo Sapiens
agccuuccuuuccacacccucaucagauucau

SEQ ID NO: 394792 - RNA, 32 nt, Homo Sapiens
ugccgaucgaggaggucuguccccugggucag

SEQ ID NO: 394793 - RNA, 32 nt, Homo Sapiens
ugagggggugucccagccccagcccuucccca

SEQ ID NO: 394794 - RNA, 32 nt, Homo Sapiens
cugcuugggugcccuuccgcccuguggaagcu

SEQ ID NO: 394795 - RNA, 32 nt, Homo Sapiens
ccauuuccggcgucagcccgggaagacucaug

SEQ ID NO: 394796 - RNA, 32 nt, Homo Sapiens
uccaccuaaaauugacuguacuguuuaacugu

SEQ ID NO: 394797 - RNA, 32 nt, Homo Sapiens
ugcacauggaaacccaugagcuaggauucuac

SEQ ID NO: 394798 - RNA, 32 nt, Homo Sapiens
cuccucucauuuggaaaguaauccacugcagu

SEQ ID NO: 394799 - RNA, 32 nt, Homo Sapiens
aggacucugaccccagugcagugucuguaggg

SEQ ID NO: 394800 - RNA, 29 nt, Homo Sapiens
acgaggaggaugcggaggacgcggaggac

SEQ ID NO: 394801 - RNA, 32 nt, Homo Sapiens
uuuuguucuccuaaauacaaucuuagagguuu

SEQ ID NO: 394802 - RNA, 32 nt, Homo Sapiens
caugaggcuuguucccggggcuggaccgacau

SEQ ID NO: 394803 - RNA, 32 nt, Homo Sapiens
aaguaagcuggagauccaggcugcuggagauc

SEQ ID NO: 394804 - RNA, 32 nt, Homo Sapiens
uuuuuuuuuuuuucuuuuuuuaggcauaugua

SEQ ID NO: 394805 - RNA, 32 nt, Homo Sapiens
ccgccucgguacggcagagcccggggccggcg

SEQ ID NO: 394806 - RNA, 32 nt, Homo Sapiens
gaaccacgugggaaaacaggacuucguggcgu

SEQ ID NO: 394807 - RNA, 32 nt, Homo Sapiens
uugaauauugcaggguucagucuagauuguca

SEQ ID NO: 394808 - RNA, 32 nt, Homo Sapiens
uuuggagggaagcucuuggagcugugaguucu

SEQ ID NO: 394809 - RNA, 32 nt, Homo Sapiens
aggucccuggagccccaggugggcugaggggc

SEQ ID NO: 394810 - RNA, 32 nt, Homo Sapiens
uaucuguaagcauagaagaauagggugauuug

SEQ ID NO: 394811 - RNA, 32 nt, Homo Sapiens
ugugacaccuucggggacauugaccacucaaa

SEQ ID NO: 394812 - RNA, 32 nt, Homo Sapiens
agaaucacacauggcuuccaacuuaagagcgc

SEQ ID NO: 394813 - RNA, 32 nt, Homo Sapiens
uguugcauuuuuccguuagaggugggaagcuc

SEQ ID NO: 394814 - RNA, 32 nt, Homo Sapiens
gacugcagcuggaccggcaagcuggcugugua

SEQ ID NO: 394815 - RNA, 32 nt, Homo Sapiens
ugcaaaagugaacaaguugaagacuuuuguau

SEQ ID NO: 394816 - RNA, 32 nt, Homo Sapiens
gagaacucaaaguggguugcaaucauuccuaa

SEQ ID NO: 394817 - RNA, 32 nt, Homo Sapiens
gaccccggagugugaugaaaagaaaucccagu

SEQ ID NO: 394818 - RNA, 32 nt, Homo Sapiens
gagcgcucgcccccggccuccggccacuuucc

SEQ ID NO: 394819 - RNA, 32 nt, Homo Sapiens
gucacuauccuugacucauugcacuuugaccu

SEQ ID NO: 394820 - RNA, 32 nt, Homo Sapiens
gaaguuuuugaaaaaggcaucaauuugaugaa

SEQ ID NO: 394821 - RNA, 32 nt, Homo Sapiens
uacuuuuuguuuaaaacaaaauuggaauuugu

SEQ ID NO: 394822 - RNA, 30 nt, Homo Sapiens
cuccgccgcugccgccgccgcugcuacagc

SEQ ID NO: 394823 - RNA, 32 nt, Homo Sapiens
cucggccccgcggaagccccgccgcgccaugu

SEQ ID NO: 394824 - RNA, 32 nt, Homo Sapiens
caaccaggugucguccacgggcgggggcaugg

SEQ ID NO: 394825 - RNA, 30 nt, Homo Sapiens
cuggcucugcugcugccgccggcgaaggag

SEQ ID NO: 394826 - RNA, 32 nt, Homo Sapiens
uggacuccuuucuccuuuucuuuccucucuag

SEQ ID NO: 394827 - RNA, 32 nt, Homo Sapiens
ugacacuucccugcaacccauccaccccuggu

SEQ ID NO: 394828 - RNA, 32 nt, Homo Sapiens
aagacgaucugcacuucgcauuuuggcauuga

SEQ ID NO: 394829 - RNA, 32 nt, Homo Sapiens
gggcaucuguagccagcucgguguuucucacc

SEQ ID NO: 394830 - RNA, 32 nt, Homo Sapiens
auaaaaggggguaauagcuccuuuuuucuucu

SEQ ID NO: 394831 - RNA, 32 nt, Homo Sapiens
caaaugcuaucuuuuuuagaaacuauuagaaa

SEQ ID NO: 394832 - RNA, 32 nt, Homo Sapiens
ugugucuaucccugucugugugucucuguuag

SEQ ID NO: 394833 - RNA, 32 nt, Homo Sapiens
ugagggagauucuucauuuguguuugaaaaga

SEQ ID NO: 394834 - RNA, 32 nt, Homo Sapiens
cagugucuggagaucaucuacccaggcugggg

SEQ ID NO: 394835 - RNA, 32 nt, Homo Sapiens
ccaaggaggggcuuuugcugugcuaauuagga

SEQ ID NO: 394836 - RNA, 32 nt, Homo Sapiens
gcccguuucaggugcaggcugcuccgugccuu

SEQ ID NO: 394837 - RNA, 32 nt, Homo Sapiens
acuuucaauuccacagcauucuaaucacccaa

SEQ ID NO: 394838 - RNA, 32 nt, Homo Sapiens
uaccccuccugcucggccgccgcagucgccgu

SEQ ID NO: 394839 - RNA, 32 nt, Homo Sapiens
uggaggccaggccaagagccacagggcggccu

SEQ ID NO: 394840 - RNA, 32 nt, Homo Sapiens
gagugcacacggugccucuggaugcccgggau

SEQ ID NO: 394841 - RNA, 32 nt, Homo Sapiens
guuagggcucugcccgcagccugaccucuagc

SEQ ID NO: 394842 - RNA, 32 nt, Homo Sapiens
cuuugauauccaugcauauauauaaacucagc

SEQ ID NO: 394843 - RNA, 32 nt, Homo Sapiens
ccucgccccgcgccugcccccaggaugguccg

SEQ ID NO: 394844 - RNA, 32 nt, Homo Sapiens
ugaagggagcagcccucuuuuuuggcaaucac

SEQ ID NO: 394845 - RNA, 31 nt, Homo Sapiens
ugggggugagggcagaaccagccgagggacg

SEQ ID NO: 394846 - RNA, 32 nt, Homo Sapiens
aaaauccuauuuaucugcuguugugugcuuuu

SEQ ID NO: 394847 - RNA, 32 nt, Homo Sapiens
cgcacagccccacaaggucagcauccacauca

SEQ ID NO: 394848 - RNA, 32 nt, Homo Sapiens
aacuauuuacacaacuauucacacaaguuauu

SEQ ID NO: 394849 - RNA, 32 nt, Homo Sapiens
auucucucuuuguuuacugcacaggugguaca

SEQ ID NO: 394850 - RNA, 32 nt, Homo Sapiens
gaugcacuuaggacccccgcggcuggaagaau

SEQ ID NO: 394851 - RNA, 32 nt, Homo Sapiens
aaagauuuuagccuguaaacauccuuuaaaau

SEQ ID NO: 394852 - RNA, 32 nt, Homo Sapiens
gauacuauaugauaugaaccuuuuuugggugg

SEQ ID NO: 394853 - RNA, 32 nt, Homo Sapiens
gaucauagccuccugaggccaagcuccugccu

SEQ ID NO: 394854 - RNA, 32 nt, Homo Sapiens
uguggaguuuugcaugggugcaguuaacaaug

SEQ ID NO: 394855 - RNA, 32 nt, Homo Sapiens
cccgggcggagcgggcggggacccgggcuacu

SEQ ID NO: 394856 - RNA, 31 nt, Homo Sapiens
ccacucagaggcagagacugaguuaagucau

SEQ ID NO: 394857 - RNA, 32 nt, Homo Sapiens
cagaaaaagaaaauagcagagauggguccagu

SEQ ID NO: 394858 - RNA, 32 nt, Homo Sapiens
cuugacaccuccccguggcuccagcaagcccu

SEQ ID NO: 394859 - RNA, 32 nt, Homo Sapiens
gacagguuaugacauuuccaugucaacucuaa

SEQ ID NO: 394860 - RNA, 32 nt, Homo Sapiens
ccuugggacuuccgaagugaaccauuccacca

SEQ ID NO: 394861 - RNA, 32 nt, Homo Sapiens
gcugggaggguggaggugaaggauggggccua

SEQ ID NO: 394862 - RNA, 32 nt, Homo Sapiens
accgccagcugcucggcgcccggguccgccau

SEQ ID NO: 394863 - RNA, 32 nt, Homo Sapiens
cugcagaggaggcaccugaggcccagagacga

SEQ ID NO: 394864 - RNA, 32 nt, Homo Sapiens
aucgcgggucgcagaagcccaggccagcgagc

SEQ ID NO: 394865 - RNA, 32 nt, Homo Sapiens
caggggagaagcugaccuugcuccagaggcuc

SEQ ID NO: 394866 - RNA, 32 nt, Homo Sapiens
cacuuucggcccggcucgggguucucggaguc

SEQ ID NO: 394867 - RNA, 32 nt, Homo Sapiens
auggcuaagaacucuagcugccauggacugag

SEQ ID NO: 394868 - RNA, 32 nt, Homo Sapiens
gcaguuuacuauugcuaucuuuucuggaugau

SEQ ID NO: 394869 - RNA, 32 nt, Homo Sapiens
gaguucuucagaucauagaccaaaaaagucau

SEQ ID NO: 394870 - RNA, 32 nt, Homo Sapiens
cguccuccgcggcucgaggacuccgcuuccuu

SEQ ID NO: 394871 - RNA, 32 nt, Homo Sapiens
cugcccccaggggcuccuccggguugucucag

SEQ ID NO: 394872 - RNA, 32 nt, Homo Sapiens
ugcucaaccucucuccuucuggcgcaagagaa

SEQ ID NO: 394873 - RNA, 32 nt, Homo Sapiens
uguaaagccuacugaccacuaaccucccucac

SEQ ID NO: 394874 - RNA, 30 nt, Homo Sapiens
caaccaaggaguucuuguucucgaagaacc

SEQ ID NO: 394875 - RNA, 32 nt, Homo Sapiens
caguugaggaggagggagcgcuugagggggac

SEQ ID NO: 394876 - RNA, 32 nt, Homo Sapiens
accaacuugggcaacauggugaaacacugucu

SEQ ID NO: 394877 - RNA, 32 nt, Homo Sapiens
aagcaugaucggagaagagauauuuuacuuuu

SEQ ID NO: 394878 - RNA, 32 nt, Homo Sapiens
uucacccugccagaaugugccacuugacuuau

SEQ ID NO: 394879 - RNA, 32 nt, Homo Sapiens
agcucugccagccccagcggucacgcccggcc

SEQ ID NO: 394880 - RNA, 32 nt, Homo Sapiens
aauggugcuucuuuucugcuucucaguagacu

SEQ ID NO: 394881 - RNA, 32 nt, Homo Sapiens
uagcaacaaugcacuauuaauuucauaguugu

SEQ ID NO: 394882 - RNA, 32 nt, Homo Sapiens
uaggaggcaaagcaguggguccuccucaccag

SEQ ID NO: 394883 - RNA, 32 nt, Homo Sapiens
aaugauuaacaaacagaaggacaggaagcggg

SEQ ID NO: 394884 - RNA, 32 nt, Homo Sapiens
caaaccacuuacuaccaggccuuuuucugugu

SEQ ID NO: 394885 - RNA, 32 nt, Homo Sapiens
ggggggagaggcugcuucgaagggcaggacug

SEQ ID NO: 394886 - RNA, 32 nt, Homo Sapiens
guaggucuaaacaucaaagaaaacauuuuuau

SEQ ID NO: 394887 - RNA, 32 nt, Homo Sapiens
uaaaaauaagcaaaaacucugugauaaaaaua

SEQ ID NO: 394888 - RNA, 32 nt, Homo Sapiens
aggcgacggcagcggcggcggcuggggcagcc

SEQ ID NO: 394889 - RNA, 32 nt, Homo Sapiens
cccccuccgagaccagccagccaggcucucag

SEQ ID NO: 394890 - RNA, 32 nt, Homo Sapiens
uaccauuuuuugagcuacaauacuggaacauc

SEQ ID NO: 394891 - RNA, 32 nt, Homo Sapiens
uaauuagcuuaaaaauauaguuuuauguuuug

SEQ ID NO: 394892 - RNA, 32 nt, Homo Sapiens
caguccuccugggcggccccagguccuggaca

SEQ ID NO: 394893 - RNA, 32 nt, Homo Sapiens
aacuguggugagggugcgggcugggguuuucu

SEQ ID NO: 394894 - RNA, 32 nt, Homo Sapiens
uggccaccccccguguuccccauccucaguug

SEQ ID NO: 394895 - RNA, 29 nt, Homo Sapiens
auaauuuagauuauguucuuauaagauuc

SEQ ID NO: 394896 - RNA, 32 nt, Homo Sapiens
gggugacauuuauuuugacaaguuuuaggcau

SEQ ID NO: 394897 - RNA, 32 nt, Homo Sapiens
uuacagugcauuacuacagccagaaguacaua

SEQ ID NO: 394898 - RNA, 32 nt, Homo Sapiens
ccuggugccgccucggccccagccugucccca

SEQ ID NO: 394899 - RNA, 32 nt, Homo Sapiens
ccugcgugccgggaaccccagaggaggucgca

SEQ ID NO: 394900 - RNA, 32 nt, Homo Sapiens
cugggugcggguggaguacugggaggcaggag

SEQ ID NO: 394901 - RNA, 32 nt, Homo Sapiens
uuugccugugggugggggcuagccagccacca

SEQ ID NO: 394902 - RNA, 32 nt, Homo Sapiens
ggcgggggcgggaccagggagaauuaauaaag

SEQ ID NO: 394903 - RNA, 32 nt, Homo Sapiens
uucugucaggcgcuggcggcggcagcggcggu

SEQ ID NO: 394904 - RNA, 32 nt, Homo Sapiens
aaagcagucuuccaucaaaucaccuuaaaaug

SEQ ID NO: 394905 - RNA, 32 nt, Homo Sapiens
auggaccuggccgugggggcccggggccaggu

SEQ ID NO: 394906 - RNA, 32 nt, Homo Sapiens
gcuuauuguauaugagggagccaggccccgag

SEQ ID NO: 394907 - RNA, 32 nt, Homo Sapiens
guucuguuuguguuauuucagaugauucaaau

SEQ ID NO: 394908 - RNA, 32 nt, Homo Sapiens
ucugauuaaacacaaacagaccucagaaaaaa

SEQ ID NO: 394909 - RNA, 32 nt, Homo Sapiens
acucuggaugugguggcuggcuccuugugaag

SEQ ID NO: 394910 - RNA, 32 nt, Homo Sapiens
uucucagggcucuggagggggaggggagaagg

SEQ ID NO: 394911 - RNA, 32 nt, Homo Sapiens
uuuuuuacauauuuuuauaauacuguuagcuc

SEQ ID NO: 394912 - RNA, 32 nt, Homo Sapiens
uugggauuagucauccuaauccccucacuuuu

SEQ ID NO: 394913 - RNA, 32 nt, Homo Sapiens
ggaagaaucuucugccccagcuuugcaggaug

SEQ ID NO: 394914 - RNA, 32 nt, Homo Sapiens
ggcuacauuuucaugauauuguucacugccuc

SEQ ID NO: 394915 - RNA, 32 nt, Homo Sapiens
agcuauagcauuaauuuauuuguucagaauac

SEQ ID NO: 394916 - RNA, 32 nt, Homo Sapiens
gagucccgcgugccgccaccuccccgcggacg

SEQ ID NO: 394917 - RNA, 32 nt, Homo Sapiens
ucuccagcgauaaagucaaucagaguggaugu

SEQ ID NO: 394918 - RNA, 32 nt, Homo Sapiens
guuuuguacuaaaacaguauuaucuuuugaau

SEQ ID NO: 394919 - RNA, 28 nt, Homo Sapiens
gcugggguuacaggugugagccaucgcg

SEQ ID NO: 394920 - RNA, 32 nt, Homo Sapiens
ccuuaaaaagggcuucuuggaacuuuaccagc

SEQ ID NO: 394921 - RNA, 32 nt, Homo Sapiens
cucacgagaaaagaaccuggggauaccucuca

SEQ ID NO: 394922 - RNA, 32 nt, Homo Sapiens
ucccauaguuggauugucaaaacccuauuucc

SEQ ID NO: 394923 - RNA, 32 nt, Homo Sapiens
ucuuuguugcuuaaucuagagcuaugcacacc

SEQ ID NO: 394924 - RNA, 32 nt, Homo Sapiens
ccagcgguggcgcaacggcucucguccccgcc

SEQ ID NO: 394925 - RNA, 32 nt, Homo Sapiens
gccguccuucuucgccccggcgccgggggcug

SEQ ID NO: 394926 - RNA, 32 nt, Homo Sapiens
auaugguuguauacucaaauuguacaucacgu

SEQ ID NO: 394927 - RNA, 32 nt, Homo Sapiens
guacuuggucacaauaucaaguguauuuuugu

SEQ ID NO: 394928 - RNA, 32 nt, Homo Sapiens
cacacacacacacacacacacacacaccaagu

SEQ ID NO: 394929 - RNA, 32 nt, Homo Sapiens
ccacuuuacacuuccuucucaugcacuugguc

SEQ ID NO: 394930 - RNA, 31 nt, Homo Sapiens
acuacucaugacagaaagucagcuuuuacuu

SEQ ID NO: 394931 - RNA, 32 nt, Homo Sapiens
uuuccaugaucauugcugaacucagagcuuuc

SEQ ID NO: 394932 - RNA, 32 nt, Homo Sapiens
gggccccaacuacacacccccaagccacaggg

SEQ ID NO: 394933 - RNA, 32 nt, Homo Sapiens
cuugcgaggugagcauuuccaaggcugugugc

SEQ ID NO: 394934 - RNA, 32 nt, Homo Sapiens
gugggcccgaccuggcucucgcuggaggggca

SEQ ID NO: 394935 - RNA, 32 nt, Homo Sapiens
aggacucggagggcugagacgcggcggcggcg

SEQ ID NO: 394936 - RNA, 32 nt, Homo Sapiens
auuuuuucucaucacuuccccaggagcagcca

SEQ ID NO: 394937 - RNA, 32 nt, Homo Sapiens
aagcaggccaaggccuggccggggcucggggg

SEQ ID NO: 394938 - RNA, 32 nt, Homo Sapiens
guagugguuguaucuguggcugugaugguugu

SEQ ID NO: 394939 - RNA, 32 nt, Homo Sapiens
ucaccaggacccagcucugggagugcagcugg

SEQ ID NO: 394940 - RNA, 32 nt, Homo Sapiens
cccuuugcauguuuguauuuccucccuuucau

SEQ ID NO: 394941 - RNA, 32 nt, Homo Sapiens
guuuacacgcaccaccccugggcgggcugugc

SEQ ID NO: 394942 - RNA, 32 nt, Homo Sapiens
uguagaaaugagaggacugcuaauucuucaga

SEQ ID NO: 394943 - RNA, 32 nt, Homo Sapiens
ugguuccuuagaauauugaggaucucuuuaaa

SEQ ID NO: 394944 - RNA, 32 nt, Homo Sapiens
cugucuugguaguugccgguggacagcauggc

SEQ ID NO: 394945 - RNA, 32 nt, Homo Sapiens
acgagcugcccacguccucuccaggaggggac

SEQ ID NO: 394946 - RNA, 32 nt, Homo Sapiens
guuaaacaucagaacaucaaauuuaauuauuu

SEQ ID NO: 394947 - RNA, 32 nt, Homo Sapiens
gguuccugagcccaaugacacuucugccuagg

SEQ ID NO: 394948 - RNA, 32 nt, Homo Sapiens
ugagguguuuuaaaguuaggucuauuacagaa

SEQ ID NO: 394949 - RNA, 32 nt, Homo Sapiens
auuucauagaaagucuccugcgggagcggaaa

SEQ ID NO: 394950 - RNA, 28 nt, Homo Sapiens
cccuacgugcugcccaggauggccuccu

SEQ ID NO: 394951 - RNA, 32 nt, Homo Sapiens
uacccccgaccucgcgcacgcccuggcccgcu

SEQ ID NO: 394952 - RNA, 32 nt, Homo Sapiens
auuaauuuguacaaaaagaacuagguggcuca

SEQ ID NO: 394953 - RNA, 32 nt, Homo Sapiens
gucugucucccuccccucucagaacauacuga

SEQ ID NO: 394954 - RNA, 32 nt, Homo Sapiens
gucaggcccucccccuuugcagggcagccgag

SEQ ID NO: 394955 - RNA, 32 nt, Homo Sapiens
uguccuugugcguguguuuguuuggacgaaug

SEQ ID NO: 394956 - RNA, 32 nt, Homo Sapiens
gcggucaggcggggucaaggccaggcagcggg

SEQ ID NO: 394957 - RNA, 32 nt, Homo Sapiens
cucccccuugguuuuuucauugacuuuagugc

SEQ ID NO: 394958 - RNA, 32 nt, Homo Sapiens
cauuauacaucauguggacuuauuuuauauua

SEQ ID NO: 394959 - RNA, 32 nt, Homo Sapiens
ggacgccccgguuucggcacagcccggucacu

SEQ ID NO: 394960 - RNA, 32 nt, Homo Sapiens
augguggccgccggcgggggccccagcccagc

SEQ ID NO: 394961 - RNA, 32 nt, Homo Sapiens
acccaggagacggagguugcagugagccgaga

SEQ ID NO: 394962 - RNA, 32 nt, Homo Sapiens
gcgcaggaccauggacuggggguggggcaugg

SEQ ID NO: 394963 - RNA, 32 nt, Homo Sapiens
auuuaaaucucucuggggcaagagggcuagau

SEQ ID NO: 394964 - RNA, 32 nt, Homo Sapiens
ccggccuuucccugugacuuacgugucuguca

SEQ ID NO: 394965 - RNA, 32 nt, Homo Sapiens
agcucgggcggcgcggguggcggcacgucccu

SEQ ID NO: 394966 - RNA, 32 nt, Homo Sapiens
gcugacaaaaugaguucuuaaacuuuuuuuuu

SEQ ID NO: 394967 - RNA, 32 nt, Homo Sapiens
agcaagucugcaggugcaccacuucccgccuc

SEQ ID NO: 394968 - RNA, 32 nt, Homo Sapiens
uuacucucuccucuccuuugagaggucccugu

SEQ ID NO: 394969 - RNA, 32 nt, Homo Sapiens
gaggcuuguuccaaguuugucaaugagguuua

SEQ ID NO: 394970 - RNA, 32 nt, Homo Sapiens
uugcuugccucuuuucucuuucuaccuuacag

SEQ ID NO: 394971 - RNA, 32 nt, Homo Sapiens
uccgcucugcccgcuguguccugggcauggag

SEQ ID NO: 394972 - RNA, 32 nt, Homo Sapiens
uccucgcugcugucaccugcacuauccaauua

SEQ ID NO: 394973 - RNA, 32 nt, Homo Sapiens
ggugccccggauguagcccuggcgcaagcauc

SEQ ID NO: 394974 - RNA, 32 nt, Homo Sapiens
gggcagcuauauaggggccaaacaagugaggu

SEQ ID NO: 394975 - RNA, 32 nt, Homo Sapiens
acaccagccuggccagccuccugugggccuug

SEQ ID NO: 394976 - RNA, 32 nt, Homo Sapiens
gacagagucucaaucuguuacccaggcuggag

SEQ ID NO: 394977 - RNA, 32 nt, Homo Sapiens
gggggcugggcccugccuccccguuacccucc

SEQ ID NO: 394978 - RNA, 32 nt, Homo Sapiens
cacaagcucccucucuugccugccaccaugua

SEQ ID NO: 394979 - RNA, 29 nt, Homo Sapiens
cucuaauauucuuaguaccacaagauaug

SEQ ID NO: 394980 - RNA, 32 nt, Homo Sapiens
gugacaggaccaaaugaaaauauuuuauguuu

SEQ ID NO: 394981 - RNA, 32 nt, Homo Sapiens
gugucuugccagcaacauuccugcuagcauac

SEQ ID NO: 394982 - RNA, 32 nt, Homo Sapiens
ugaacaaaugucauucuaguuuagauagcauu

SEQ ID NO: 394983 - RNA, 32 nt, Homo Sapiens
uugccuucugagcagcucccagugccagggcu

SEQ ID NO: 394984 - RNA, 32 nt, Homo Sapiens
caaaggccccuccccgcccacccgcggcucaa

SEQ ID NO: 394985 - RNA, 32 nt, Homo Sapiens
aaaauguuuuguuucuucuuacaaauggagau

SEQ ID NO: 394986 - RNA, 32 nt, Homo Sapiens
uuugcugaaaaacauuaugagaaggccucccu

SEQ ID NO: 394987 - RNA, 32 nt, Homo Sapiens
ccucgcucagcggcccggcaggccgcacaacu

SEQ ID NO: 394988 - RNA, 32 nt, Homo Sapiens
auagaauuguuuccucuaaguguaguuuuucu

SEQ ID NO: 394989 - RNA, 32 nt, Homo Sapiens
aaauagaauacagcauggaaaauaucagugua

SEQ ID NO: 394990 - RNA, 32 nt, Homo Sapiens
cuaguaauucagaaaaagaugucuuauuugua

SEQ ID NO: 394991 - RNA, 32 nt, Homo Sapiens
gccccgugguugcccaugagaaguguccuugu

SEQ ID NO: 394992 - RNA, 32 nt, Homo Sapiens
gcagccacagaaagaagggccucguuaagaag

SEQ ID NO: 394993 - RNA, 32 nt, Homo Sapiens
uuuugaacuucuaaaucggucccuuuauuuuc

SEQ ID NO: 394994 - RNA, 32 nt, Homo Sapiens
augucauuauauauuuuuaaaaauguguuucu

SEQ ID NO: 394995 - RNA, 32 nt, Homo Sapiens
ugauuacacacucuuucucuuacccuugugua

SEQ ID NO: 394996 - RNA, 32 nt, Homo Sapiens
ggggcugggcggggcgccggugcuaguggaac

SEQ ID NO: 394997 - RNA, 32 nt, Homo Sapiens
agcgaagggcaccaucuuuguauuuuguguca

SEQ ID NO: 394998 - RNA, 32 nt, Homo Sapiens
ugugcgagggggccuugcuggaugcugcugua

SEQ ID NO: 394999 - RNA, 32 nt, Homo Sapiens
gccaguggcgcuggugcgacugccgggcagca

SEQ ID NO: 395000 - RNA, 32 nt, Homo Sapiens
gaucacaccaaaaugggguggggcgcaguggc

SEQ ID NO: 395001 - RNA, 32 nt, Homo Sapiens
ccaaaaguucuguguuauuuugaaagcaugca

SEQ ID NO: 395002 - RNA, 32 nt, Homo Sapiens
uugaauaacaauaccauacagcugugcaacua

SEQ ID NO: 395003 - RNA, 30 nt, Homo Sapiens
uaaucagucaaauaaagugaucugugcauc

SEQ ID NO: 395004 - RNA, 32 nt, Homo Sapiens
ggccgaggacagggcggcaggggugacagugg

SEQ ID NO: 395005 - RNA, 32 nt, Homo Sapiens
agaucaaucuggaggcuucuguuucugcauuc

SEQ ID NO: 395006 - RNA, 32 nt, Homo Sapiens
uuuccagugugcuccuucuuagcaaucaauau

SEQ ID NO: 395007 - RNA, 32 nt, Homo Sapiens
ucccucugucucuggagugcccuacagccccg

SEQ ID NO: 395008 - RNA, 31 nt, Homo Sapiens
uugaguggaguggagggaggaguccggugcu

SEQ ID NO: 395009 - RNA, 29 nt, Homo Sapiens
aggcuagguaagguggcucauaccuauaa

SEQ ID NO: 395010 - RNA, 32 nt, Homo Sapiens
aucugggauacuguucugcugcugaucacgag

SEQ ID NO: 395011 - RNA, 32 nt, Homo Sapiens
ccgaggaggaggaggaggacgcgggccuggug

SEQ ID NO: 395012 - RNA, 32 nt, Homo Sapiens
guauucugccagcugcccugugggccaggcau

SEQ ID NO: 395013 - RNA, 32 nt, Homo Sapiens
cagugcuguguccgccaccagcaccaucaacc

SEQ ID NO: 395014 - RNA, 32 nt, Homo Sapiens
uugaaaacaaguauuucuugugugaacagaaa

SEQ ID NO: 395015 - RNA, 32 nt, Homo Sapiens
ugggucaaguuucagugacuuccuccuuccuc

SEQ ID NO: 395016 - RNA, 32 nt, Homo Sapiens
uguuuagaaaucagcuugacugagaacaggau

SEQ ID NO: 395017 - RNA, 32 nt, Homo Sapiens
cucccacagguggugagcugguggcucucugg

SEQ ID NO: 395018 - RNA, 32 nt, Homo Sapiens
uuuguggggcuuuguagguagacggagccaca

SEQ ID NO: 395019 - RNA, 32 nt, Homo Sapiens
gggcugcuaaaucgcuugcagaugagaucuuc

SEQ ID NO: 395020 - RNA, 32 nt, Homo Sapiens
auuuaagaaaacuauuugauaaguuauaggaa

SEQ ID NO: 395021 - RNA, 32 nt, Homo Sapiens
caauuuuguaucuauuucuuauuaaaaagaaa

SEQ ID NO: 395022 - RNA, 32 nt, Homo Sapiens
cuugcgccccagcgcgcgcccaggcgccuugg

SEQ ID NO: 395023 - RNA, 30 nt, Homo Sapiens
cgccggcccugcgggccgccggugaaauac

SEQ ID NO: 395024 - RNA, 32 nt, Homo Sapiens
uauuccaggcuaaaugcuuuuacucaagacua

SEQ ID NO: 395025 - RNA, 32 nt, Homo Sapiens
gaaaacucaagagcuucgagagccaguguugu

SEQ ID NO: 395026 - RNA, 32 nt, Homo Sapiens
aauucaaucuacucaugauguguuaugcauaa

SEQ ID NO: 395027 - RNA, 32 nt, Homo Sapiens
caaggcacaaccucgaguucuuggggcgcaga

SEQ ID NO: 395028 - RNA, 32 nt, Homo Sapiens
cuugcgcgcgccccaccgaccaaaauggcggc

SEQ ID NO: 395029 - RNA, 32 nt, Homo Sapiens
cuggggggucugaccuaguuaguucuugaguu

SEQ ID NO: 395030 - RNA, 32 nt, Homo Sapiens
uccgagagccaccgacaagucuccugaauccc

SEQ ID NO: 395031 - RNA, 32 nt, Homo Sapiens
gggccaggugucaggagcugcagaagcuuaag

SEQ ID NO: 395032 - RNA, 32 nt, Homo Sapiens
cccuccugucuggcuccuggggcccaugcuua

SEQ ID NO: 395033 - RNA, 32 nt, Homo Sapiens
ccugggccuggcgcugcagaccugagcuggcu

SEQ ID NO: 395034 - RNA, 32 nt, Homo Sapiens
ggccgcgcgcagcagcggcgacgacuuuaucu

SEQ ID NO: 395035 - RNA, 32 nt, Homo Sapiens
ugaucucuaauauauacuuacauacguaaaau

SEQ ID NO: 395036 - RNA, 32 nt, Homo Sapiens
cagcauccuuauauuucuuuaaaauacauaga

SEQ ID NO: 395037 - RNA, 32 nt, Homo Sapiens
agucauauaucgaaaaccagucaagcaucccu

SEQ ID NO: 395038 - RNA, 32 nt, Homo Sapiens
aauuagccaggcaugauggugcaugccugugg

SEQ ID NO: 395039 - RNA, 31 nt, Homo Sapiens
gcggagaugcagcggcuuggggccacccugc

SEQ ID NO: 395040 - RNA, 32 nt, Homo Sapiens
gcuaaccccccuccuuguaggaucgggguauc

SEQ ID NO: 395041 - RNA, 32 nt, Homo Sapiens
cgcgauaguuuggggcaguuccgcgcguugca

SEQ ID NO: 395042 - RNA, 32 nt, Homo Sapiens
uauauguuuuuucuuuuaaauagaacuuguuu

SEQ ID NO: 395043 - RNA, 32 nt, Homo Sapiens
cuguugagauguuucaugggacaguagaacuc

SEQ ID NO: 395044 - RNA, 32 nt, Homo Sapiens
cuuugaagaggcuguggggucugugaucaccc

SEQ ID NO: 395045 - RNA, 32 nt, Homo Sapiens
aauguuuuaaauuuauuuuagcugcagagaaa

SEQ ID NO: 395046 - RNA, 32 nt, Homo Sapiens
ugugguuuaauuuuaauaaacaaaauaucauc

SEQ ID NO: 395047 - RNA, 32 nt, Homo Sapiens
ccugagaaauguucacucuucaauguuccacc

SEQ ID NO: 395048 - RNA, 32 nt, Homo Sapiens
ccgcaggacugucccagggcccguguugacgg

SEQ ID NO: 395049 - RNA, 32 nt, Homo Sapiens
guguguguguggugucuguguuugugauguug

SEQ ID NO: 395050 - RNA, 32 nt, Homo Sapiens
ucugguaucuuugaaaaauguaaauaguuuau

SEQ ID NO: 395051 - RNA, 32 nt, Homo Sapiens
cugaauggauucccggccccaucccucacccc

SEQ ID NO: 395052 - RNA, 32 nt, Homo Sapiens
uuaacuaguuuuauaaauuucuuaauauguua

SEQ ID NO: 395053 - RNA, 32 nt, Homo Sapiens
ugcuucagacucuuaaugcuuuuauauaaagc

SEQ ID NO: 395054 - RNA, 32 nt, Homo Sapiens
gaauaucaggguauaucucagagccuggagaa

SEQ ID NO: 395055 - RNA, 32 nt, Homo Sapiens
uccuuccugauuuggauauucccucaaauccc

SEQ ID NO: 395056 - RNA, 30 nt, Homo Sapiens
cuuugaagaaaauaaaacuuauacaguuca

SEQ ID NO: 395057 - RNA, 32 nt, Homo Sapiens
gugggagggaagcuacugcagacugaaagcaa

SEQ ID NO: 395058 - RNA, 32 nt, Homo Sapiens
gccugcugucucaggaagcuguagaaggagug

SEQ ID NO: 395059 - RNA, 32 nt, Homo Sapiens
caauuuauuucugagacgaucucauuuaccug

SEQ ID NO: 395060 - RNA, 32 nt, Homo Sapiens
uuuuguaaaucaucacugaauuucauaacuug

SEQ ID NO: 395061 - RNA, 32 nt, Homo Sapiens
aucacaccccccagccauugcccucccucucu

SEQ ID NO: 395062 - RNA, 32 nt, Homo Sapiens
gaaaguuccaaagaggugguuucugggaaguc

SEQ ID NO: 395063 - RNA, 32 nt, Homo Sapiens
cgcggugugaccccggccggugccuugguuuu

SEQ ID NO: 395064 - RNA, 32 nt, Homo Sapiens
uuucucaucucugucuacaaaacuagccugga

SEQ ID NO: 395065 - RNA, 32 nt, Homo Sapiens
ugauuagagcucuggaguaaauaacaaagaga

SEQ ID NO: 395066 - RNA, 32 nt, Homo Sapiens
aaaugcuucuaaacacuuuccugcuccucucu

SEQ ID NO: 395067 - RNA, 32 nt, Homo Sapiens
ccuugaaccagugaucuaaggaccccucuuuu

SEQ ID NO: 395068 - RNA, 32 nt, Homo Sapiens
auucucaagcagggcauguuucccuuuguuca

SEQ ID NO: 395069 - RNA, 32 nt, Homo Sapiens
gccucuucugugggugacccagguccuuguuu

SEQ ID NO: 395070 - RNA, 32 nt, Homo Sapiens
ucgguggcucugccccgggacugcaccuggag

SEQ ID NO: 395071 - RNA, 32 nt, Homo Sapiens
auguaucaguuauauuuuuuauaaucaaucua

SEQ ID NO: 395072 - RNA, 29 nt, Homo Sapiens
caaugaaggauuucuuauuuucuuggaau

SEQ ID NO: 395073 - RNA, 32 nt, Homo Sapiens
ucucaucccuuucccaggauuccuuccaaguc

SEQ ID NO: 395074 - RNA, 32 nt, Homo Sapiens
aagagggaacggguccuggcggugcuuugcaa

SEQ ID NO: 395075 - RNA, 32 nt, Homo Sapiens
uuccuuugcccauuugggccagaaggucacca

SEQ ID NO: 395076 - RNA, 30 nt, Homo Sapiens
cuuuuagagaagcaugagacuguuugacua

SEQ ID NO: 395077 - RNA, 32 nt, Homo Sapiens
cauugcacuccagccugggugagaagagcgaa

SEQ ID NO: 395078 - RNA, 32 nt, Homo Sapiens
guguugacagagcugcacucuuaacaucaaga

SEQ ID NO: 395079 - RNA, 31 nt, Homo Sapiens
ccugcagugagagucuugggaguccauagcu

SEQ ID NO: 395080 - RNA, 32 nt, Homo Sapiens
gcgcgcggcgccggagacauguccaggcggaa

SEQ ID NO: 395081 - RNA, 32 nt, Homo Sapiens
ucucuucucgucccuccuccccggagccggca

SEQ ID NO: 395082 - RNA, 32 nt, Homo Sapiens
uaagagcuggcagcugcugaugguguuuccca

SEQ ID NO: 395083 - RNA, 32 nt, Homo Sapiens
gcugguggauccaauccuuucuucaucuguug

SEQ ID NO: 395084 - RNA, 32 nt, Homo Sapiens
ucucagccaaccccccucaccacccuucuccc

SEQ ID NO: 395085 - RNA, 32 nt, Homo Sapiens
gugagacccagccaauccuugggagcaagcag

SEQ ID NO: 395086 - RNA, 32 nt, Homo Sapiens
acuauugcaacuuuucuguaagucugaaauug

SEQ ID NO: 395087 - RNA, 32 nt, Homo Sapiens
cuuguugcuguaauuuagagaggagcucugug

SEQ ID NO: 395088 - RNA, 32 nt, Homo Sapiens
cauucaccaccuggucccagacgugcuucagu

SEQ ID NO: 395089 - RNA, 32 nt, Homo Sapiens
augcuccccucccccacagccucuuccucccu

SEQ ID NO: 395090 - RNA, 32 nt, Homo Sapiens
gugagaccggggaaggacaaaagcagggaaca

SEQ ID NO: 395091 - RNA, 32 nt, Homo Sapiens
gcucgccuaaggagccgagcgcugcggaggcu

SEQ ID NO: 395092 - RNA, 32 nt, Homo Sapiens
gcuuuaggucugguucagggucgggcauucuu

SEQ ID NO: 395093 - RNA, 32 nt, Homo Sapiens
caccaccccucuuuuuauccuggugugaaaca

SEQ ID NO: 395094 - RNA, 32 nt, Homo Sapiens
ugcccgcuuccacccggaaagccccccaggcu

SEQ ID NO: 395095 - RNA, 32 nt, Homo Sapiens
aaguuuaucucauccuuuauuuuuaaucacuu

SEQ ID NO: 395096 - RNA, 32 nt, Homo Sapiens
caacauuuggccagaucuuguuuaucuuucug

SEQ ID NO: 395097 - RNA, 32 nt, Homo Sapiens
ugcagacucuggggcccggcgccccccgggcc

SEQ ID NO: 395098 - RNA, 32 nt, Homo Sapiens
cucuucguaguccagaaagguagaagugggag

SEQ ID NO: 395099 - RNA, 32 nt, Homo Sapiens
aauucagucugcuuauuuuccaaauuucauaa

SEQ ID NO: 395100 - RNA, 32 nt, Homo Sapiens
gcucagggugggauggcagacauggcaggugc

SEQ ID NO: 395101 - RNA, 32 nt, Homo Sapiens
ccacuccgccccauccugcagggccuuguuuu

SEQ ID NO: 395102 - RNA, 32 nt, Homo Sapiens
gagcgcaggcgugccgagguggauguccgucu

SEQ ID NO: 395103 - RNA, 32 nt, Homo Sapiens
cuccuuugaagaaggcaaggcugauaauauga

SEQ ID NO: 395104 - RNA, 32 nt, Homo Sapiens
caagucccacugaucaaguccccacuugacca

SEQ ID NO: 395105 - RNA, 32 nt, Homo Sapiens
ggugcgugugccgcgggcgcccggggcaggca

SEQ ID NO: 395106 - RNA, 32 nt, Homo Sapiens
guaaagccaugugaagacgugccugccucccu

SEQ ID NO: 395107 - RNA, 32 nt, Homo Sapiens
agcaggaggaggaggagaagaaacuauuucgc

SEQ ID NO: 395108 - RNA, 32 nt, Homo Sapiens
agagagaaggaagaggcgaugugagcugggaa

SEQ ID NO: 395109 - RNA, 30 nt, Homo Sapiens
uccuuccagaagcuugguucuacuguaagc

SEQ ID NO: 395110 - RNA, 32 nt, Homo Sapiens
uuguuuauaaugaaaguggcgauuaggcaguu

SEQ ID NO: 395111 - RNA, 32 nt, Homo Sapiens
cucccuuuuuugauuuaguuggaugugcuuuu

SEQ ID NO: 395112 - RNA, 32 nt, Homo Sapiens
ccugaaaggugacugucuaggaugcugaauga

SEQ ID NO: 395113 - RNA, 32 nt, Homo Sapiens
acagccagggagaggagguggcucgugacacc

SEQ ID NO: 395114 - RNA, 32 nt, Homo Sapiens
gccuggcugcggugcucgcgccgugggaaagc

SEQ ID NO: 395115 - RNA, 32 nt, Homo Sapiens
agucagguuguaauacaggccaagcagacggg

SEQ ID NO: 395116 - RNA, 32 nt, Homo Sapiens
ucuguuugauaaaagaugcuggcuuugacaca

SEQ ID NO: 395117 - RNA, 32 nt, Homo Sapiens
ucagugucaaggaagaacuggauggcugagcu

SEQ ID NO: 395118 - RNA, 32 nt, Homo Sapiens
gagguguguccauggcggcgcuugaccugcga

SEQ ID NO: 395119 - RNA, 32 nt, Homo Sapiens
uagccucgcgccccgcccguugcuucugcccu

SEQ ID NO: 395120 - RNA, 32 nt, Homo Sapiens
uguuuauucuauaugaauauuguuucauguuu

SEQ ID NO: 395121 - RNA, 32 nt, Homo Sapiens
auauguuucuuaccuuagccugaaccuucuca

SEQ ID NO: 395122 - RNA, 32 nt, Homo Sapiens
acacugucacccugacugcaggaggcacaggg

SEQ ID NO: 395123 - RNA, 32 nt, Homo Sapiens
acugcauauugaacaauucuaaaagaccagua

SEQ ID NO: 395124 - RNA, 32 nt, Homo Sapiens
ggcuugccugcacuuuacacaauugugggaga

SEQ ID NO: 395125 - RNA, 32 nt, Homo Sapiens
cauucugccaaagcuggaccaaggcuaaccuu

SEQ ID NO: 395126 - RNA, 32 nt, Homo Sapiens
cauuuucaagggcagggaaaagggaguaaaag

SEQ ID NO: 395127 - RNA, 32 nt, Homo Sapiens
cacagccuguacgaggccaggcugggacucaa

SEQ ID NO: 395128 - RNA, 32 nt, Homo Sapiens
uucagauagaagccucgaaauuccuguaaauu

SEQ ID NO: 395129 - RNA, 32 nt, Homo Sapiens
aacagcuuggaaagaguuuggccugcucauug

SEQ ID NO: 395130 - RNA, 32 nt, Homo Sapiens
gugacccagccucccccuacuuuuuuccuaag

SEQ ID NO: 395131 - RNA, 32 nt, Homo Sapiens
ucaggcgaggggcugggccugugcagcugggc

SEQ ID NO: 395132 - RNA, 32 nt, Homo Sapiens
gauucuugcuaauuuccaaccauauugaauaa

SEQ ID NO: 395133 - RNA, 32 nt, Homo Sapiens
ugcauucuuuuaacuuaaaacuauuuaagaac

SEQ ID NO: 395134 - RNA, 32 nt, Homo Sapiens
gagcacacaccuguaguaccagcuacucugga

SEQ ID NO: 395135 - RNA, 32 nt, Homo Sapiens
cacccccuccccacggccccacccacagggac

SEQ ID NO: 395136 - RNA, 32 nt, Homo Sapiens
gaucagcccagcugagugggcagcccuagccu

SEQ ID NO: 395137 - RNA, 32 nt, Homo Sapiens
gcugccccaagccgcgaugcccaggggccccg

SEQ ID NO: 395138 - RNA, 32 nt, Homo Sapiens
ugacauuuacuuuugguuauuaguagguaguc

SEQ ID NO: 395139 - RNA, 32 nt, Homo Sapiens
caaaguauauguuuggcucauuugagcauuuu

SEQ ID NO: 395140 - RNA, 32 nt, Homo Sapiens
cuuagauuuuuggaggcaaaauuuagaccagu

SEQ ID NO: 395141 - RNA, 32 nt, Homo Sapiens
caccucugucuccaguaucaccacaaaauugu

SEQ ID NO: 395142 - RNA, 32 nt, Homo Sapiens
cuguucucauucuccuucccaccaacauccau

SEQ ID NO: 395143 - RNA, 32 nt, Homo Sapiens
uggaaaaggacuauguuaugauuuuguagaaa

SEQ ID NO: 395144 - RNA, 32 nt, Homo Sapiens
uguuuccagaauaaauauguguguauuacuua

SEQ ID NO: 395145 - RNA, 32 nt, Homo Sapiens
ggaugauaucuagacacucugaauagggcagg

SEQ ID NO: 395146 - RNA, 32 nt, Homo Sapiens
ugccagagcuacacucgccuucugcuuccacg

SEQ ID NO: 395147 - RNA, 32 nt, Homo Sapiens
gguaggucaaggaaaagagccccuuugaucca

SEQ ID NO: 395148 - RNA, 32 nt, Homo Sapiens
aagagacaauaggugaugauauuuuuauucgu

SEQ ID NO: 395149 - RNA, 32 nt, Homo Sapiens
uggaggaucugugcaaaggggggcugggcaca

SEQ ID NO: 395150 - RNA, 32 nt, Homo Sapiens
ucuuucuccuccagcccuucucuucaaugguc

SEQ ID NO: 395151 - RNA, 32 nt, Homo Sapiens
uuggcaaacauucauauuuuuacuucauuuuu

SEQ ID NO: 395152 - RNA, 32 nt, Homo Sapiens
acugcuacuugucaauauauucaccauuuccu

SEQ ID NO: 395153 - RNA, 32 nt, Homo Sapiens
uggucuccauggccacuguggaccgggacccu

SEQ ID NO: 395154 - RNA, 32 nt, Homo Sapiens
agaugucacacccaccagcaucaccaaaguga

SEQ ID NO: 395155 - RNA, 32 nt, Homo Sapiens
ccgggggccaagggcgggcugcuugccgcuau

SEQ ID NO: 395156 - RNA, 32 nt, Homo Sapiens
auuccagaugcagcugcagaaaucgcaacacc

SEQ ID NO: 395157 - RNA, 32 nt, Homo Sapiens
gccugaaucuucugucuuguggcuucagaaac

SEQ ID NO: 395158 - RNA, 32 nt, Homo Sapiens
aggaugucuauuaauaugguguuuccugcaaa

SEQ ID NO: 395159 - RNA, 32 nt, Homo Sapiens
guucuuggucccuggcacccccaugcacaccc

SEQ ID NO: 395160 - RNA, 32 nt, Homo Sapiens
aacugcagcugagagugcguugguggggagug

SEQ ID NO: 395161 - RNA, 32 nt, Homo Sapiens
ccuuaauacugaguuggagauuuuguaucugu

SEQ ID NO: 395162 - RNA, 32 nt, Homo Sapiens
uuuuuuaaaaauuauacuuguuauuauucuac

SEQ ID NO: 395163 - RNA, 32 nt, Homo Sapiens
cauuuacuaaguauuucuuuuuuuuuuuuuuu

SEQ ID NO: 395164 - RNA, 32 nt, Homo Sapiens
uccgccccucccuuggccccagcgcccagccc

SEQ ID NO: 395165 - RNA, 32 nt, Homo Sapiens
ugcacucuccucccggaccccuccccaguccc

SEQ ID NO: 395166 - RNA, 32 nt, Homo Sapiens
uuuuaaaaucuugaauccacaaauaaaguucu

SEQ ID NO: 395167 - RNA, 32 nt, Homo Sapiens
acugcuggugauacuuuuuuuaaguuuuguuu

SEQ ID NO: 395168 - RNA, 32 nt, Homo Sapiens
acuggccucucccucaccaccaucaucaucgg

SEQ ID NO: 395169 - RNA, 32 nt, Homo Sapiens
uaauguaucuauuugcugcauuguauauggau

SEQ ID NO: 395170 - RNA, 32 nt, Homo Sapiens
cuucuagaaaucagcuuuuaagcucccaugug

SEQ ID NO: 395171 - RNA, 32 nt, Homo Sapiens
aagaaaugcaaagcuuccaggcuccacuuuuc

SEQ ID NO: 395172 - RNA, 32 nt, Homo Sapiens
aauauuccagaucccuccuccuccccgcagcu

SEQ ID NO: 395173 - RNA, 32 nt, Homo Sapiens
agagucuaucauggcagcucggacuggucaua

SEQ ID NO: 395174 - RNA, 32 nt, Homo Sapiens
acaaaggaaaauuugguaacuauuucuggggu

SEQ ID NO: 395175 - RNA, 32 nt, Homo Sapiens
ugaucaucagaugcccucuggaaugguuagca

SEQ ID NO: 395176 - RNA, 32 nt, Homo Sapiens
cccuggcaaccacugaucuuuuuacugucucu

SEQ ID NO: 395177 - RNA, 32 nt, Homo Sapiens
uguccuaaaaccuuauuuuagaaaauugauca

SEQ ID NO: 395178 - RNA, 32 nt, Homo Sapiens
gccaagcccuccccaucccauguauuuaucuc

SEQ ID NO: 395179 - RNA, 32 nt, Homo Sapiens
uuggggccacuacuggucuccgcgucuuggug

SEQ ID NO: 395180 - RNA, 31 nt, Homo Sapiens
cgccgccgccaugagcugccccgugcccgcc

SEQ ID NO: 395181 - RNA, 32 nt, Homo Sapiens
gauggcugaucaguaauguugcagcuuuuagc

SEQ ID NO: 395182 - RNA, 32 nt, Homo Sapiens
cagguagggcgggcauggggccccagcauggc

SEQ ID NO: 395183 - RNA, 32 nt, Homo Sapiens
cuucucacugguuuuuccaccuuccuccuucc

SEQ ID NO: 395184 - RNA, 32 nt, Homo Sapiens
ugacaaucuaaugccugaugaucgggggugga

SEQ ID NO: 395185 - RNA, 32 nt, Homo Sapiens
gaaaacaaagaaacagacacaaugcacacaga

SEQ ID NO: 395186 - RNA, 32 nt, Homo Sapiens
gauuccgucaagaaagacuggauacuuucuga

SEQ ID NO: 395187 - RNA, 32 nt, Homo Sapiens
ccucagccccacuccagaauagccaagagaac

SEQ ID NO: 395188 - RNA, 32 nt, Homo Sapiens
ggcuucccgcugcccccaucgcgcucacgcaa

SEQ ID NO: 395189 - RNA, 32 nt, Homo Sapiens
gaguguccccccagcccucacuguuucccguu

SEQ ID NO: 395190 - RNA, 32 nt, Homo Sapiens
aggggaggcaccuaaaggaaaagaggaaaggu

SEQ ID NO: 395191 - RNA, 32 nt, Homo Sapiens
aguuaaaaugucauaguuacaaugcaaguaaa

SEQ ID NO: 395192 - RNA, 32 nt, Homo Sapiens
uuccagagauccaacauguugugggaccuugu

SEQ ID NO: 395193 - RNA, 30 nt, Homo Sapiens
uucaccaccaccacugcccaucuugaucuc

SEQ ID NO: 395194 - RNA, 32 nt, Homo Sapiens
cucaucgugcgcggguggggucggcgcuuguc

SEQ ID NO: 395195 - RNA, 32 nt, Homo Sapiens
caccuuguuuguaacagugaaaaauugaaaac

SEQ ID NO: 395196 - RNA, 32 nt, Homo Sapiens
ccacuugucccucucccuccccaggacuucug

SEQ ID NO: 395197 - RNA, 32 nt, Homo Sapiens
gccuuuguuucauagugaggauuuuauuuugc

SEQ ID NO: 395198 - RNA, 32 nt, Homo Sapiens
gugcagagucuaaaggauaacauaucaaggcu

SEQ ID NO: 395199 - RNA, 32 nt, Homo Sapiens
uuucucuggaguguaagcacaaugaagacagg

SEQ ID NO: 395200 - RNA, 32 nt, Homo Sapiens
aucuugcagaaucguccucacugaauugcacu

SEQ ID NO: 395201 - RNA, 32 nt, Homo Sapiens
uccucacggugcuccagcuccacacaccguac

SEQ ID NO: 395202 - RNA, 32 nt, Homo Sapiens
gagcagcucagguacuucagaugugcuuaaua

SEQ ID NO: 395203 - RNA, 32 nt, Homo Sapiens
ugagcggcagcgggcgucccgaagguucucag

SEQ ID NO: 395204 - RNA, 31 nt, Homo Sapiens
guggcauagcacugcccugcaguaccccaag

SEQ ID NO: 395205 - RNA, 31 nt, Homo Sapiens
agagcaggauguuguaacgggaaaugucaga

SEQ ID NO: 395206 - RNA, 32 nt, Homo Sapiens
caggacccuaagucuccuuuccuucugggugg

SEQ ID NO: 395207 - RNA, 32 nt, Homo Sapiens
uuagcacuuucugcccuguggccugcaaugau

SEQ ID NO: 395208 - RNA, 32 nt, Homo Sapiens
ccccugcguggcaacuguguacagcuuacccc

SEQ ID NO: 395209 - RNA, 32 nt, Homo Sapiens
aucauuacaucauauuuaaacauugacucuau

SEQ ID NO: 395210 - RNA, 32 nt, Homo Sapiens
cagagaguuucuaugauguggcagaaaugggc

SEQ ID NO: 395211 - RNA, 32 nt, Homo Sapiens
aaaucucccagggcuuccuccaagggccaaaa

SEQ ID NO: 395212 - RNA, 32 nt, Homo Sapiens
agaacuugaauccaggcugcugcucaucauag

SEQ ID NO: 395213 - RNA, 32 nt, Homo Sapiens
aguaugcuauauugaaugauaauuguuaacag

SEQ ID NO: 395214 - RNA, 32 nt, Homo Sapiens
gcuuaccuuccuuuuuuguuaaugugcuuuua

SEQ ID NO: 395215 - RNA, 30 nt, Homo Sapiens
auuuuaugaugauggggauuuugaccauuu

SEQ ID NO: 395216 - RNA, 32 nt, Homo Sapiens
cgaggccggcuggcugcccuccauggguuacc

SEQ ID NO: 395217 - RNA, 32 nt, Homo Sapiens
acuuugagaaaauggauagcuucuguguuaug

SEQ ID NO: 395218 - RNA, 32 nt, Homo Sapiens
aggcggauauccacgccaaggccuuuggaucg

SEQ ID NO: 395219 - RNA, 32 nt, Homo Sapiens
ccaguccugcuacuucuggggugccugucucc

SEQ ID NO: 395220 - RNA, 32 nt, Homo Sapiens
caaggguacuuuggcagggggugcuggggaag

SEQ ID NO: 395221 - RNA, 32 nt, Homo Sapiens
aucugguccuucccccucccaguguagcugug

SEQ ID NO: 395222 - RNA, 32 nt, Homo Sapiens
auucauugacauuucugugguuugaauccagg

SEQ ID NO: 395223 - RNA, 32 nt, Homo Sapiens
auuuccaguuuucucuguaccuguguguauag

SEQ ID NO: 395224 - RNA, 32 nt, Homo Sapiens
caauaaaacuauugcaccuguccugguuagca

SEQ ID NO: 395225 - RNA, 32 nt, Homo Sapiens
gcuuuuugaaagaacauggucuguggugcugu

SEQ ID NO: 395226 - RNA, 32 nt, Homo Sapiens
ucccaguguucugccgcuccuguggccauguc

SEQ ID NO: 395227 - RNA, 27 nt, Homo Sapiens
uaccaguccuucugccugcccucugag

SEQ ID NO: 395228 - RNA, 32 nt, Homo Sapiens
uuuuaauggcggcagcggcugcugggugagca

SEQ ID NO: 395229 - RNA, 32 nt, Homo Sapiens
cugaauccaaaauaguuuugcauuuguuguuu

SEQ ID NO: 395230 - RNA, 30 nt, Homo Sapiens
cagccugcugugcccgugggucccgagugc

SEQ ID NO: 395231 - RNA, 32 nt, Homo Sapiens
ggaagcggggacccggguuugaauccugcccc

SEQ ID NO: 395232 - RNA, 32 nt, Homo Sapiens
ugagacuuucccuuuuugcuuaaccuggagug

SEQ ID NO: 395233 - RNA, 31 nt, Homo Sapiens
aaacuuuucuaguaaaaauagauuacuugug

SEQ ID NO: 395234 - RNA, 32 nt, Homo Sapiens
uaaaggucugcggucgcaaaugguuugacuaa

SEQ ID NO: 395235 - RNA, 32 nt, Homo Sapiens
acauuuuaauauguaugcauucaccuugccuc

SEQ ID NO: 395236 - RNA, 32 nt, Homo Sapiens
gcccgaucccccagccacuaguggcccccuaa

SEQ ID NO: 395237 - RNA, 32 nt, Homo Sapiens
uagaaagcucagugugaggcagugcguagacc

SEQ ID NO: 395238 - RNA, 32 nt, Homo Sapiens
caagguggcaacacugguucaaagauauuacg

SEQ ID NO: 395239 - RNA, 32 nt, Homo Sapiens
uccaucuuuauucaucuuugucuucccucgga

SEQ ID NO: 395240 - RNA, 32 nt, Homo Sapiens
ggagggcaugcgagaaagaaggggaacagauc

SEQ ID NO: 395241 - RNA, 32 nt, Homo Sapiens
gaaauucaacguuccuuuuaugauaaaaaccc

SEQ ID NO: 395242 - RNA, 32 nt, Homo Sapiens
uucugggaauggggauuaaaggcacccagugu

SEQ ID NO: 395243 - RNA, 32 nt, Homo Sapiens
gcaccagagauuaaaaagcuuuaacuauaaaa

SEQ ID NO: 395244 - RNA, 32 nt, Homo Sapiens
augacucaucgcauauuuccuguucaugucca

SEQ ID NO: 395245 - RNA, 32 nt, Homo Sapiens
guucaaaccugagacuuauuggaaguguacau

SEQ ID NO: 395246 - RNA, 32 nt, Homo Sapiens
aguagccugggcccacagagcugcugggaugu

SEQ ID NO: 395247 - RNA, 32 nt, Homo Sapiens
acuacucuuaaaacuuuuuuuaugucucaagu

SEQ ID NO: 395248 - RNA, 32 nt, Homo Sapiens
uauacuuugucaaaacauuuucuaccauauuu

SEQ ID NO: 395249 - RNA, 32 nt, Homo Sapiens
uccucgccgucucagcgcgggaagggggaaau

SEQ ID NO: 395250 - RNA, 32 nt, Homo Sapiens
auaaaaggaaccaaccaacaaacaaugccauc

SEQ ID NO: 395251 - RNA, 32 nt, Homo Sapiens
caugacagugcuggcaggugggcuugcccuag

SEQ ID NO: 395252 - RNA, 32 nt, Homo Sapiens
aaagucccacuuucgaauugccuuucaaacac

SEQ ID NO: 395253 - RNA, 32 nt, Homo Sapiens
uuuuauuagaguuuauacuguagagaaaucau

SEQ ID NO: 395254 - RNA, 32 nt, Homo Sapiens
agggaaauauccauuuaaaacagguauaucag

SEQ ID NO: 395255 - RNA, 32 nt, Homo Sapiens
gcccccaccucugugacccccauguccuugga

SEQ ID NO: 395256 - RNA, 30 nt, Homo Sapiens
cucccugucuguggcagggacccaagcgcu

SEQ ID NO: 395257 - RNA, 32 nt, Homo Sapiens
ggagguacgaaaagaggggaagagacuuggaa

SEQ ID NO: 395258 - RNA, 32 nt, Homo Sapiens
cucucaaauacgguuuagcagcauccgccuug

SEQ ID NO: 395259 - RNA, 32 nt, Homo Sapiens
aggacgguggcuugccggucugucgugaggca

SEQ ID NO: 395260 - RNA, 32 nt, Homo Sapiens
ugugugugugcgcgcgcgcgcgugcaugcaga

SEQ ID NO: 395261 - RNA, 32 nt, Homo Sapiens
caaccgcgcgccccaccuuuccccacguggcc

SEQ ID NO: 395262 - RNA, 32 nt, Homo Sapiens
gcacugagugggccggggaggcugggagccgg

SEQ ID NO: 395263 - RNA, 32 nt, Homo Sapiens
gccugaccgcaccgugaggcgccaagucggcc

SEQ ID NO: 395264 - RNA, 32 nt, Homo Sapiens
ugauuuuauagcuuuugagcuaacauaacuuu

SEQ ID NO: 395265 - RNA, 32 nt, Homo Sapiens
aggcagaggagcugcgcggacgccgucucuuc

SEQ ID NO: 395266 - RNA, 32 nt, Homo Sapiens
aggcagcagccuucccagccagcccuuguugg

SEQ ID NO: 395267 - RNA, 30 nt, Homo Sapiens
ucugaggagaagcuggagcaggugcugagu

SEQ ID NO: 395268 - RNA, 29 nt, Homo Sapiens
aagaaucuguaccaauaccaugaaguuca

SEQ ID NO: 395269 - RNA, 32 nt, Homo Sapiens
gcagcucccgcacaggcagccacaccacccgg

SEQ ID NO: 395270 - RNA, 32 nt, Homo Sapiens
aauugcccaucccagccguucgauacugaguu

SEQ ID NO: 395271 - RNA, 32 nt, Homo Sapiens
gucuacauuuucuuagugucauuuucacgcug

SEQ ID NO: 395272 - RNA, 32 nt, Homo Sapiens
gggccauacuaaaagauccccuacuuacguuc

SEQ ID NO: 395273 - RNA, 32 nt, Homo Sapiens
aagugcuucuaagucagaacagguucuccaag

SEQ ID NO: 395274 - RNA, 32 nt, Homo Sapiens
cagcggcccagccccagaaagguccuagccaa

SEQ ID NO: 395275 - RNA, 32 nt, Homo Sapiens
gaaggugggcgcgggcgccgggagugagagug

SEQ ID NO: 395276 - RNA, 32 nt, Homo Sapiens
acaccaaccgacaggcccuggcugagggcagc

SEQ ID NO: 395277 - RNA, 32 nt, Homo Sapiens
uuuccuggugaugccuuuggcuccuugagcug

SEQ ID NO: 395278 - RNA, 32 nt, Homo Sapiens
ugagugggguugggggcggggugggcaggguu

SEQ ID NO: 395279 - RNA, 32 nt, Homo Sapiens
auaaggcugucuuggaucccaacaggcaccca

SEQ ID NO: 395280 - RNA, 32 nt, Homo Sapiens
ucgcagugcccgcgcuuuccccggcgccugca

SEQ ID NO: 395281 - RNA, 32 nt, Homo Sapiens
uguuucuaaacugauuagaacuucuagcuaau

SEQ ID NO: 395282 - RNA, 32 nt, Homo Sapiens
ccgccccgcccggcugcuccauggcgcugugc

SEQ ID NO: 395283 - RNA, 32 nt, Homo Sapiens
gcagggaauuguagaccucuauuacuuuuguc

SEQ ID NO: 395284 - RNA, 32 nt, Homo Sapiens
cucagaauaaaccaucaauuuuagguauaggc

SEQ ID NO: 395285 - RNA, 32 nt, Homo Sapiens
uugcuuaggaggaggaaggggaaaguauacuu

SEQ ID NO: 395286 - RNA, 28 nt, Homo Sapiens
uuuuugcaauguugaauguguuuuuuag

SEQ ID NO: 395287 - RNA, 32 nt, Homo Sapiens
aggaagcuugcucuauggauuuaaaugcaaac

SEQ ID NO: 395288 - RNA, 32 nt, Homo Sapiens
uuaguguuauuuaccaagauuaggacgucagu

SEQ ID NO: 395289 - RNA, 32 nt, Homo Sapiens
uuugcacuggcuacugaugauacagccaugcu

SEQ ID NO: 395290 - RNA, 32 nt, Homo Sapiens
gagcggagcgugguggggaggggagcgggaca

SEQ ID NO: 395291 - RNA, 32 nt, Homo Sapiens
cucccuuccaccucacaacuccuuccagccuu

SEQ ID NO: 395292 - RNA, 32 nt, Homo Sapiens
caguaucgcuacuuagacuugcguaguuucca

SEQ ID NO: 395293 - RNA, 32 nt, Homo Sapiens
auauaaacaaucauuacuucuguauuuuuaau

SEQ ID NO: 395294 - RNA, 32 nt, Homo Sapiens
cuggagcauuuaugccuaggcuugucaagaau

SEQ ID NO: 395295 - RNA, 32 nt, Homo Sapiens
aacgaaaaccaucgcaggaaauggcacccucc

SEQ ID NO: 395296 - RNA, 32 nt, Homo Sapiens
uugaaaugcacaaaguuccauuacuguucuga

SEQ ID NO: 395297 - RNA, 32 nt, Homo Sapiens
auacugccccacuuuaauauauguaagcaacu

SEQ ID NO: 395298 - RNA, 32 nt, Homo Sapiens
accgcuguucgcucucgccgccgaggaacaag

SEQ ID NO: 395299 - RNA, 32 nt, Homo Sapiens
auugaaaugcaaacuuaaacauauucuguuca

SEQ ID NO: 395300 - RNA, 32 nt, Homo Sapiens
acagagguaaauaugauuaacuuuacauucca

SEQ ID NO: 395301 - RNA, 32 nt, Homo Sapiens
cuaccuggugcccgcaggugccugcaggaguc

SEQ ID NO: 395302 - RNA, 32 nt, Homo Sapiens
aauaggaauagaugauaauuuuccuguauugu

SEQ ID NO: 395303 - RNA, 29 nt, Homo Sapiens
ugccacuccuguuucagaggaagcaggcc

SEQ ID NO: 395304 - RNA, 32 nt, Homo Sapiens
ggagcagcagcucuaugguuaugaggugggga

SEQ ID NO: 395305 - RNA, 32 nt, Homo Sapiens
cauguaugccaaaugauuuguaaaguguaaaa

SEQ ID NO: 395306 - RNA, 32 nt, Homo Sapiens
gagccuaguccucccccagccccuccagccac

SEQ ID NO: 395307 - RNA, 32 nt, Homo Sapiens
ccucucauacaucaugcccuaaguaccuggua

SEQ ID NO: 395308 - RNA, 32 nt, Homo Sapiens
aaauggggaccagaauaaaucuuagaccccac

SEQ ID NO: 395309 - RNA, 27 nt, Homo Sapiens
acaugaacagacacucuaccacaucag

SEQ ID NO: 395310 - RNA, 32 nt, Homo Sapiens
ccuacaccuuccuggaggagaaagccaggggc

SEQ ID NO: 395311 - RNA, 32 nt, Homo Sapiens
auugaaaucaagucuguaaaccuuuauaugaa

SEQ ID NO: 395312 - RNA, 30 nt, Homo Sapiens
cuggguugcugugcuguagggugaucggcu

SEQ ID NO: 395313 - RNA, 32 nt, Homo Sapiens
cgggagccacgcagaggacgccggaacacccu

SEQ ID NO: 395314 - RNA, 32 nt, Homo Sapiens
uucccaaagggaggguggcagagacagugggc

SEQ ID NO: 395315 - RNA, 32 nt, Homo Sapiens
gcugaaauuuuuguguaaaauaagguauuauc

SEQ ID NO: 395316 - RNA, 32 nt, Homo Sapiens
ugguggcggcgguggcagcgggggcuucaacc

SEQ ID NO: 395317 - RNA, 32 nt, Homo Sapiens
agcggcuacguucuucucggcccgccgagaug

SEQ ID NO: 395318 - RNA, 32 nt, Homo Sapiens
cccuucagcugagacacaaggaguagaggaag

SEQ ID NO: 395319 - RNA, 32 nt, Homo Sapiens
uuuuugcuacugugaugaugacaaccuccaga

SEQ ID NO: 395320 - RNA, 32 nt, Homo Sapiens
accuccccaagccucaguuucuaccauaagag

SEQ ID NO: 395321 - RNA, 32 nt, Homo Sapiens
gcaaaauagauaaguacaacacuccauuuagu

SEQ ID NO: 395322 - RNA, 32 nt, Homo Sapiens
uggcuacaccccgacgccaggguccuggggcc

SEQ ID NO: 395323 - RNA, 32 nt, Homo Sapiens
cuaugugaggggaauggacauuauuaaaagaa

SEQ ID NO: 395324 - RNA, 32 nt, Homo Sapiens
uauuuucucacuuuuccuuuugauggugcgga

SEQ ID NO: 395325 - RNA, 32 nt, Homo Sapiens
cagaaccuggaaaagcuguugcugcuauugau

SEQ ID NO: 395326 - RNA, 32 nt, Homo Sapiens
ccugccugcucgcuccucuccccaucgccugc

SEQ ID NO: 395327 - RNA, 32 nt, Homo Sapiens
uugcccaaacuggcaggggggccaggcugggc

SEQ ID NO: 395328 - RNA, 32 nt, Homo Sapiens
agaaucuuuacaucuggagaucuauagcaggg

SEQ ID NO: 395329 - RNA, 32 nt, Homo Sapiens
gaaguccaagggauuuaggagcucugugucag

SEQ ID NO: 395330 - RNA, 32 nt, Homo Sapiens
ccaauuaacuagagacccuccagcccccaagg

SEQ ID NO: 395331 - RNA, 32 nt, Homo Sapiens
ccuuccccuuccucaggcccagcccgaguucc

SEQ ID NO: 395332 - RNA, 32 nt, Homo Sapiens
gacuuugaccaaauacauguugguauuaucau

SEQ ID NO: 395333 - RNA, 32 nt, Homo Sapiens
aaucccgaagauggccaaagacaacucaacug

SEQ ID NO: 395334 - RNA, 32 nt, Homo Sapiens
aaggaaagaggaaauucccggaggaggcggcg

SEQ ID NO: 395335 - RNA, 32 nt, Homo Sapiens
uuuggaaaaugaaagcacaggaaugauggggu

SEQ ID NO: 395336 - RNA, 32 nt, Homo Sapiens
gcaaggugcaccugggugcccgggccucgggg

SEQ ID NO: 395337 - RNA, 32 nt, Homo Sapiens
acgaggucaggagaucgagaccagccuggcua

SEQ ID NO: 395338 - RNA, 32 nt, Homo Sapiens
gccugggucugucugaggaaggaggggguccc

SEQ ID NO: 395339 - RNA, 32 nt, Homo Sapiens
uagaccgucugcugggggcgccggcaccauuu

SEQ ID NO: 395340 - RNA, 30 nt, Homo Sapiens
aaaugccaugcuccucuccuggaaaacacu

SEQ ID NO: 395341 - RNA, 32 nt, Homo Sapiens
cuaaucucuccacucccuguucaguugguucu

SEQ ID NO: 395342 - RNA, 32 nt, Homo Sapiens
ucaaaauauuuuacuauuucuuguggaguuuu

SEQ ID NO: 395343 - RNA, 32 nt, Homo Sapiens
cacuuguaaucccagcacuuugaggugggcaa

SEQ ID NO: 395344 - RNA, 32 nt, Homo Sapiens
uccaaucuggacagucucugugccccuccuuu

SEQ ID NO: 395345 - RNA, 32 nt, Homo Sapiens
cgcaccccgcucccucccacucucccugcccc

SEQ ID NO: 395346 - RNA, 32 nt, Homo Sapiens
uuuuuggcuuacuuauggaacaagcauuauuu

SEQ ID NO: 395347 - RNA, 32 nt, Homo Sapiens
ucggauggcgaccgcacugagggacccggcuu

SEQ ID NO: 395348 - RNA, 32 nt, Homo Sapiens
ggcaacaaccaccaccaauauuuauucacuga

SEQ ID NO: 395349 - RNA, 32 nt, Homo Sapiens
cgcugcuuccccacucucuccccuccccucag

SEQ ID NO: 395350 - RNA, 32 nt, Homo Sapiens
cuagggagaaagucgaggcagcagcccucgag

SEQ ID NO: 395351 - RNA, 32 nt, Homo Sapiens
caccaccuuuuggagauuuaaccauagcugcc

SEQ ID NO: 395352 - RNA, 32 nt, Homo Sapiens
cgacgcaaacaucaaaccagaugcaaacagau

SEQ ID NO: 395353 - RNA, 32 nt, Homo Sapiens
agaccucaggggaggggcgcgcgguagcgucc

SEQ ID NO: 395354 - RNA, 32 nt, Homo Sapiens
uuuuucauaauuauauacuuaucuguuuauug

SEQ ID NO: 395355 - RNA, 32 nt, Homo Sapiens
cuccagggucauuugacagaauucuccaggug

SEQ ID NO: 395356 - RNA, 32 nt, Homo Sapiens
gcugagcgacaagcuuccuagcgcuaugacug

SEQ ID NO: 395357 - RNA, 32 nt, Homo Sapiens
auuuguuuaugguaaaaaauuuauaacguguu

SEQ ID NO: 395358 - RNA, 32 nt, Homo Sapiens
cauguuaguccucuuagaugacugcuuauuua

SEQ ID NO: 395359 - RNA, 32 nt, Homo Sapiens
agcuccagcgauggaacccacuacagaggagg

SEQ ID NO: 395360 - RNA, 32 nt, Homo Sapiens
ccggucgggcgcgcugggccugcccggaaucc

SEQ ID NO: 395361 - RNA, 32 nt, Homo Sapiens
gcugcccgagggugggccccauggagagcccu

SEQ ID NO: 395362 - RNA, 32 nt, Homo Sapiens
guaugagggcccagagcagagcccugggccaa

SEQ ID NO: 395363 - RNA, 32 nt, Homo Sapiens
gaguggaacaaaaaccaacacauaguuuuaag

SEQ ID NO: 395364 - RNA, 32 nt, Homo Sapiens
ccagugggggaagaggggcuggcucugagacc

SEQ ID NO: 395365 - RNA, 32 nt, Homo Sapiens
agacgccgcgccgcgcugcgacgcuguagugg

SEQ ID NO: 395366 - RNA, 32 nt, Homo Sapiens
cccagaaacaacaacaacaaaacggcaguaua

SEQ ID NO: 395367 - RNA, 32 nt, Homo Sapiens
gaaauaaacaauuacauggaauuuucauaggc

SEQ ID NO: 395368 - RNA, 32 nt, Homo Sapiens
caaagaggcucuuuaaggcagcgggggaggcc

SEQ ID NO: 395369 - RNA, 32 nt, Homo Sapiens
cgccugugugucccgggcacaguucacgccgg

SEQ ID NO: 395370 - RNA, 32 nt, Homo Sapiens
cacuauuccaaauaguaaaauaaagacaaagu

SEQ ID NO: 395371 - RNA, 32 nt, Homo Sapiens
uggaagcgcuaccacaucaaggugcaccuggc

SEQ ID NO: 395372 - RNA, 32 nt, Homo Sapiens
ccacuaagaacaaaagcucugaaguucuuccu

SEQ ID NO: 395373 - RNA, 32 nt, Homo Sapiens
caaggcuuugcauuggcuguaccugaaacuua

SEQ ID NO: 395374 - RNA, 32 nt, Homo Sapiens
ugacaagucuccuuuccaaccccagguucccu

SEQ ID NO: 395375 - RNA, 27 nt, Homo Sapiens
ccacaguccuucuuugacaccacacca

SEQ ID NO: 395376 - RNA, 32 nt, Homo Sapiens
uuacugaaauuucagcuggagaaagguccaca

SEQ ID NO: 395377 - RNA, 32 nt, Homo Sapiens
ggcaaggucuucccccagaggcacauuccucu

SEQ ID NO: 395378 - RNA, 31 nt, Homo Sapiens
ugcggcgggccccagagcccagugccggcac

SEQ ID NO: 395379 - RNA, 32 nt, Homo Sapiens
uggugccagugccccaggggccuccugggcca

SEQ ID NO: 395380 - RNA, 32 nt, Homo Sapiens
caaggcauucuauuucuucaaaaagacuguau

SEQ ID NO: 395381 - RNA, 32 nt, Homo Sapiens
aauuguagaacuuuauacucacuuugcuaugu

SEQ ID NO: 395382 - RNA, 32 nt, Homo Sapiens
cuaguaaaaaauacaauaccacuauucaggau

SEQ ID NO: 395383 - RNA, 32 nt, Homo Sapiens
gggcuguguucccuccggggccccaggaagag

SEQ ID NO: 395384 - RNA, 32 nt, Homo Sapiens
cccagcccauucugcaggucuugcuucuuucu

SEQ ID NO: 395385 - RNA, 32 nt, Homo Sapiens
gcgaguauaugaacaacaaagaggcuuugccc

SEQ ID NO: 395386 - RNA, 32 nt, Homo Sapiens
uaucuucaaaaauacagaauuuauagaauaau

SEQ ID NO: 395387 - RNA, 32 nt, Homo Sapiens
gccugggaggaagggaucgucaugcugcaucg

SEQ ID NO: 395388 - RNA, 32 nt, Homo Sapiens
uuacgguuugugcugcuguuucuggggcucug

SEQ ID NO: 395389 - RNA, 32 nt, Homo Sapiens
ugguggagaggagagggagaaagggaaguccc

SEQ ID NO: 395390 - RNA, 32 nt, Homo Sapiens
agcaucccgcggcgcugacgguccuggggaga

SEQ ID NO: 395391 - RNA, 32 nt, Homo Sapiens
uuuccaaucaguauggauuguauguguauuua

SEQ ID NO: 395392 - RNA, 32 nt, Homo Sapiens
aaguggugugacuucaguuuauuaucuucuug

SEQ ID NO: 395393 - RNA, 32 nt, Homo Sapiens
aggccuguguucccggcccuugcucaaagaca

SEQ ID NO: 395394 - RNA, 32 nt, Homo Sapiens
acugugaacaaguuuaccauuuaguccuuugg

SEQ ID NO: 395395 - RNA, 30 nt, Homo Sapiens
agucccugcugugcugcaggacuuugggca

SEQ ID NO: 395396 - RNA, 32 nt, Homo Sapiens
ggugguggggccccgggcggcguugaccauga

SEQ ID NO: 395397 - RNA, 32 nt, Homo Sapiens
cgcggcgccgaggggacgggguccgacucaga

SEQ ID NO: 395398 - RNA, 32 nt, Homo Sapiens
cuacuuaucagucuuuuaauucuauuagacaa

SEQ ID NO: 395399 - RNA, 32 nt, Homo Sapiens
ggcagaaaauaaauaagaagauaacuuccuuc

SEQ ID NO: 395400 - RNA, 32 nt, Homo Sapiens
aaguagccaagagccuuuuguuuuguuuuuau

SEQ ID NO: 395401 - RNA, 32 nt, Homo Sapiens
auuccacuauacaauucaguacugauuauucu

SEQ ID NO: 395402 - RNA, 32 nt, Homo Sapiens
cugcuauuuacugcucuuauuguuaaggauaa

SEQ ID NO: 395403 - RNA, 32 nt, Homo Sapiens
cggagagcaacgagugggagggggcggacgcc

SEQ ID NO: 395404 - RNA, 32 nt, Homo Sapiens
cgcggggaggccggcgcagcgcagagcgggcu

SEQ ID NO: 395405 - RNA, 32 nt, Homo Sapiens
agcuguucaauacaguauucacucuagaaaca

SEQ ID NO: 395406 - RNA, 32 nt, Homo Sapiens
cacugcaccuagucuuuuuuuuuuucuuaaca

SEQ ID NO: 395407 - RNA, 32 nt, Homo Sapiens
uucuucuugaaccaaagacguguauggagugu

SEQ ID NO: 395408 - RNA, 32 nt, Homo Sapiens
cacucuaauaaggauaaugcugaauuuugaaa

SEQ ID NO: 395409 - RNA, 32 nt, Homo Sapiens
ucgugacagucucuggagaaaucccuuaggaa

SEQ ID NO: 395410 - RNA, 32 nt, Homo Sapiens
guaccuuccucugggcagcugcagcccugagc

SEQ ID NO: 395411 - RNA, 32 nt, Homo Sapiens
ugaaaugaguauaaaaucauguauuggaacga

SEQ ID NO: 395412 - RNA, 32 nt, Homo Sapiens
gacauccaaaaauugcuuggaacugcuucaug

SEQ ID NO: 395413 - RNA, 32 nt, Homo Sapiens
ccaccaaucauuuccuuggggggagggggugu

SEQ ID NO: 395414 - RNA, 32 nt, Homo Sapiens
gagguugcagugagcugaaauccugccacugc

SEQ ID NO: 395415 - RNA, 32 nt, Homo Sapiens
auauuguaguauauuuuguccuucccucuucc

SEQ ID NO: 395416 - RNA, 32 nt, Homo Sapiens
uggggaagacugggcuggcugcgggcaguuug

SEQ ID NO: 395417 - RNA, 32 nt, Homo Sapiens
acuuuagagguagcuugccaucucucaggagc

SEQ ID NO: 395418 - RNA, 32 nt, Homo Sapiens
cagaaagggucaacaaaagaauguccauggug

SEQ ID NO: 395419 - RNA, 32 nt, Homo Sapiens
auccuuucaauauuuuuauaaacuuuugugug

SEQ ID NO: 395420 - RNA, 32 nt, Homo Sapiens
aacauucugaaauuuauuuggaaccagaaaag

SEQ ID NO: 395421 - RNA, 30 nt, Homo Sapiens
aaaucauuaagcagcuuugagucuggaaaa

SEQ ID NO: 395422 - RNA, 32 nt, Homo Sapiens
ugcagggcauguuucaaaguuuagucacagcu

SEQ ID NO: 395423 - RNA, 32 nt, Homo Sapiens
aucaguggcuaaggccagaaauccacaccaaa

SEQ ID NO: 395424 - RNA, 31 nt, Homo Sapiens
acccagaaauaaaggcauauaccuacaacca

SEQ ID NO: 395425 - RNA, 32 nt, Homo Sapiens
aaggguuagugucgagcucacuccagcauccu

SEQ ID NO: 395426 - RNA, 32 nt, Homo Sapiens
uaggagucaggagaacaagucagggauuagga

SEQ ID NO: 395427 - RNA, 32 nt, Homo Sapiens
ucuuguuuuuugcugcuguaacuuaccagaaa

SEQ ID NO: 395428 - RNA, 32 nt, Homo Sapiens
cuucgguaucuaaaguuuuuauugggguuuca

SEQ ID NO: 395429 - RNA, 32 nt, Homo Sapiens
ggaaauuuucuuucaguuuacagauguauuag

SEQ ID NO: 395430 - RNA, 32 nt, Homo Sapiens
uggcuuguuuguuuuucuucuaaacguuuuuu

SEQ ID NO: 395431 - RNA, 32 nt, Homo Sapiens
aaaauagaaaaauuauaaaaaaaaaaaaaaaa

SEQ ID NO: 395432 - RNA, 32 nt, Homo Sapiens
ccgcagguucccgcggacuugggggcgcccgc

SEQ ID NO: 395433 - RNA, 32 nt, Homo Sapiens
ccccagggagccgagggcgggcguggacggga

SEQ ID NO: 395434 - RNA, 32 nt, Homo Sapiens
ucacagucaagcacuccuggagggaucugggu

SEQ ID NO: 395435 - RNA, 30 nt, Homo Sapiens
ugcuucgucugugccgcacguugcucugcg

SEQ ID NO: 395436 - RNA, 32 nt, Homo Sapiens
ggaggcaugugugugauguguacacacaguau

SEQ ID NO: 395437 - RNA, 32 nt, Homo Sapiens
cccagcugaaaauaaaucugucuuaaaugaac

SEQ ID NO: 395438 - RNA, 32 nt, Homo Sapiens
ggcucugugacuguuuuccucugguaaaaucg

SEQ ID NO: 395439 - RNA, 32 nt, Homo Sapiens
ucugcauuugaccccugcugcccuguuucuuc

SEQ ID NO: 395440 - RNA, 32 nt, Homo Sapiens
aaccucuagugagagcucucuuccuggcaugu

SEQ ID NO: 395441 - RNA, 32 nt, Homo Sapiens
gucgccccuagccccagcagcccuggucucgc

SEQ ID NO: 395442 - RNA, 32 nt, Homo Sapiens
aauuguauuuacauaucagggaaucauacaaa

SEQ ID NO: 395443 - RNA, 32 nt, Homo Sapiens
gcuggugcgguggucagcgcgaugcccaaggc

SEQ ID NO: 395444 - RNA, 28 nt, Homo Sapiens
cauaugccgaagagccgagcauugccgc

SEQ ID NO: 395445 - RNA, 32 nt, Homo Sapiens
cuuagauucugugacaaacugauacaggagcu

SEQ ID NO: 395446 - RNA, 32 nt, Homo Sapiens
guugggucauuuccagaaacuucugcagagga

SEQ ID NO: 395447 - RNA, 32 nt, Homo Sapiens
cggcccccucuggugcucccagcccuuccucc

SEQ ID NO: 395448 - RNA, 30 nt, Homo Sapiens
gagaggggagguggcaggacagacagacag

SEQ ID NO: 395449 - RNA, 32 nt, Homo Sapiens
cuccuuccacagccgcaucuucucaugacaca

SEQ ID NO: 395450 - RNA, 32 nt, Homo Sapiens
cagcgccgcaucagagcugcccggccccccuc

SEQ ID NO: 395451 - RNA, 32 nt, Homo Sapiens
uaauucaaacauaaaggcaacaaaauaagcuu

SEQ ID NO: 395452 - RNA, 32 nt, Homo Sapiens
cccccuuuucccuuuuaggguggcuccugucc

SEQ ID NO: 395453 - RNA, 32 nt, Homo Sapiens
uuucgcacucugcgggccguguagagccccau

SEQ ID NO: 395454 - RNA, 32 nt, Homo Sapiens
uaaugagugaguucuugcucuauauuaguuca

SEQ ID NO: 395455 - RNA, 32 nt, Homo Sapiens
gaggaggugacuuggaacagucuuagaggaaa

SEQ ID NO: 395456 - RNA, 32 nt, Homo Sapiens
uaggaguccggggguucgcccgcggaggccgg

SEQ ID NO: 395457 - RNA, 32 nt, Homo Sapiens
gcgccacccaccgacacccccagaacccucug

SEQ ID NO: 395458 - RNA, 32 nt, Homo Sapiens
gccgggacgcggggcucugggccucgggaacu

SEQ ID NO: 395459 - RNA, 32 nt, Homo Sapiens
uacagucuauucacggccccagaguaauccuc

SEQ ID NO: 395460 - RNA, 32 nt, Homo Sapiens
gggcuuguucucugagggagguuccggagacu

SEQ ID NO: 395461 - RNA, 32 nt, Homo Sapiens
uugaaaccacuccuuuucuccucuuggcuaca

SEQ ID NO: 395462 - RNA, 32 nt, Homo Sapiens
gccccacuuccccauaccaucaccuugggggu

SEQ ID NO: 395463 - RNA, 32 nt, Homo Sapiens
ucaccucacagcaucuugcuccacucggcauc

SEQ ID NO: 395464 - RNA, 32 nt, Homo Sapiens
ccgucccgagaccuccugggucccuccguagc

SEQ ID NO: 395465 - RNA, 32 nt, Homo Sapiens
agaggcugcagugagcugggaucguaccacug

SEQ ID NO: 395466 - RNA, 32 nt, Homo Sapiens
ggacaggccccggccuugggagaggacacggg

SEQ ID NO: 395467 - RNA, 32 nt, Homo Sapiens
agcggucuccgcgacccccuaggauccagcca

SEQ ID NO: 395468 - RNA, 32 nt, Homo Sapiens
acagacagagauuggaacaguuuggagggcuc

SEQ ID NO: 395469 - RNA, 32 nt, Homo Sapiens
ucuguagugucugcugcccuccuccuggccuc

SEQ ID NO: 395470 - RNA, 32 nt, Homo Sapiens
uaaguuuuuuaaaaauaaacuuuucagaacag

SEQ ID NO: 395471 - RNA, 32 nt, Homo Sapiens
uuuaggaagaucuguuauucuggaaguacuaa

SEQ ID NO: 395472 - RNA, 32 nt, Homo Sapiens
gggauagugcugcagccaagaacuuaacgacu

SEQ ID NO: 395473 - RNA, 32 nt, Homo Sapiens
uuugcggggucuaaagcuguguguguugaggg

SEQ ID NO: 395474 - RNA, 32 nt, Homo Sapiens
cgugggucucugcggcugcggcgggacccggg

SEQ ID NO: 395475 - RNA, 32 nt, Homo Sapiens
ccguuucucaacugcuccauggauugaaaaaa

SEQ ID NO: 395476 - RNA, 32 nt, Homo Sapiens
gugcaggggcucccauuuugugucucagcugc

SEQ ID NO: 395477 - RNA, 32 nt, Homo Sapiens
ucaguguagcuaugugcugcugcugcucaaga

SEQ ID NO: 395478 - RNA, 32 nt, Homo Sapiens
agccgcgcgggccccagcgacccgcccgccau

SEQ ID NO: 395479 - RNA, 32 nt, Homo Sapiens
auauuuuguaaauuuuuaccuuguaaagucac

SEQ ID NO: 395480 - RNA, 32 nt, Homo Sapiens
aaaguaugaaaaauuuucacuaaguauuacaa

SEQ ID NO: 395481 - RNA, 32 nt, Homo Sapiens
ugcacacgggaaagccuuaaaaauauccuuga

SEQ ID NO: 395482 - RNA, 32 nt, Homo Sapiens
gaugugcccuaccaccugcagauuuggguuaa

SEQ ID NO: 395483 - RNA, 32 nt, Homo Sapiens
gugacuccggugcuguuugccguccccuggcc

SEQ ID NO: 395484 - RNA, 32 nt, Homo Sapiens
caacugaagaucaugcuauauuuuauauauga

SEQ ID NO: 395485 - RNA, 32 nt, Homo Sapiens
ggcaccacgugcagccgcucucgugcaggcgu

SEQ ID NO: 395486 - RNA, 32 nt, Homo Sapiens
agccuggccugggccuggccaccccuucuuuc

SEQ ID NO: 395487 - RNA, 32 nt, Homo Sapiens
caacguuaaaagacaguggaucaugaaaagug

SEQ ID NO: 395488 - RNA, 32 nt, Homo Sapiens
aaauuuguucuauuuuuacaucuuuaaauacc

SEQ ID NO: 395489 - RNA, 32 nt, Homo Sapiens
accuucgcuguaaugagagcucugcaaagcca

SEQ ID NO: 395490 - RNA, 32 nt, Homo Sapiens
cacaaagaugaugagugccaucuuaaaacuua

SEQ ID NO: 395491 - RNA, 32 nt, Homo Sapiens
aagacgguggaaugcucucagaggagccccau

SEQ ID NO: 395492 - RNA, 32 nt, Homo Sapiens
uuaccccauauauggaagaaaguaaaaaaguu

SEQ ID NO: 395493 - RNA, 32 nt, Homo Sapiens
gcugcccuaguuuuccacggaccuuuauuagg

SEQ ID NO: 395494 - RNA, 32 nt, Homo Sapiens
cccguccgggaguccccggcccgcugcggugc

SEQ ID NO: 395495 - RNA, 32 nt, Homo Sapiens
ucauuuggaugaaaaccccuucaacugguggu

SEQ ID NO: 395496 - RNA, 32 nt, Homo Sapiens
ucucagugccuguucccucguuugcaaaauga

SEQ ID NO: 395497 - RNA, 32 nt, Homo Sapiens
agggugaaucuuguuuuuuuuaucuuuaaaau

SEQ ID NO: 395498 - RNA, 31 nt, Homo Sapiens
aacuagagcgagugccugccucggcuguggc

SEQ ID NO: 395499 - RNA, 32 nt, Homo Sapiens
caguuuucauugauuauauggguauauauuca

SEQ ID NO: 395500 - RNA, 32 nt, Homo Sapiens
cuucagagaggagaggccaggagcugcauugu

SEQ ID NO: 395501 - RNA, 32 nt, Homo Sapiens
ugaguggaugacuguugauuuuaugucuguua

SEQ ID NO: 395502 - RNA, 32 nt, Homo Sapiens
caaguauaaccacugcauugcaaguuguuguc

SEQ ID NO: 395503 - RNA, 32 nt, Homo Sapiens
auaucaaaauuuggaugaacaaucaaacuguc

SEQ ID NO: 395504 - RNA, 32 nt, Homo Sapiens
ggcucugcggccgcgccgcgcgucccuaccaa

SEQ ID NO: 395505 - RNA, 32 nt, Homo Sapiens
acgugccugcagggccaggaaagggaaaugau

SEQ ID NO: 395506 - RNA, 32 nt, Homo Sapiens
uuacaaccuccccaucaucucuucccagcauc

SEQ ID NO: 395507 - RNA, 32 nt, Homo Sapiens
gagucggagccagauauugacacacaagccag

SEQ ID NO: 395508 - RNA, 32 nt, Homo Sapiens
cacagacucugcaccccgacgccagagauacc

SEQ ID NO: 395509 - RNA, 31 nt, Homo Sapiens
aaaaaauacaagaaaaauguuaacauuuugu

SEQ ID NO: 395510 - RNA, 32 nt, Homo Sapiens
uggacagagaagacagcagagaccaugggacc

SEQ ID NO: 395511 - RNA, 32 nt, Homo Sapiens
cccgccuccagcaccaagcagugucccuacac

SEQ ID NO: 395512 - RNA, 32 nt, Homo Sapiens
agaugucuuuccuuuaccguuggccuuucugu

SEQ ID NO: 395513 - RNA, 32 nt, Homo Sapiens
gcagcaagaggcuuuagaaauuccuguugcag

SEQ ID NO: 395514 - RNA, 32 nt, Homo Sapiens
gaaugauuucaaagagagguguguacagcaag

SEQ ID NO: 395515 - RNA, 32 nt, Homo Sapiens
ccagaccuuucugccacuuagcacuuguauaa

SEQ ID NO: 395516 - RNA, 32 nt, Homo Sapiens
uccucgcccugggcugcccugauugggucugg

SEQ ID NO: 395517 - RNA, 32 nt, Homo Sapiens
cuuuuguuuacaugaugaaacuuuuuguuguu

SEQ ID NO: 395518 - RNA, 32 nt, Homo Sapiens
aagcuuucauucaaaccaaggaucuuuccaca

SEQ ID NO: 395519 - RNA, 32 nt, Homo Sapiens
uguccuguguugaguguuuucuuauaucaaaa

SEQ ID NO: 395520 - RNA, 32 nt, Homo Sapiens
auguggcugaagaucagaggcucaguuagcaa

SEQ ID NO: 395521 - RNA, 32 nt, Homo Sapiens
uggauauaagauguauuucuuguagugaaguu

SEQ ID NO: 395522 - RNA, 32 nt, Homo Sapiens
cuguguuguuuuguugcccacauccuguuuuc

SEQ ID NO: 395523 - RNA, 32 nt, Homo Sapiens
gaagccagagggguaaaaguggucaauucuug

SEQ ID NO: 395524 - RNA, 32 nt, Homo Sapiens
accccacuaaaaguauuagucuacacauuaca

SEQ ID NO: 395525 - RNA, 32 nt, Homo Sapiens
ccuccacuccaugaacaucauccaccgagacc

SEQ ID NO: 395526 - RNA, 32 nt, Homo Sapiens
aagucuuccuuccagcauuccugcugcuacag

SEQ ID NO: 395527 - RNA, 32 nt, Homo Sapiens
cuucgagacaccuggggacaccuggggacacc

SEQ ID NO: 395528 - RNA, 31 nt, Homo Sapiens
auacuuauguguuguaugucaguguaacaug

SEQ ID NO: 395529 - RNA, 32 nt, Homo Sapiens
uccuucucuaaaguaugguuaccaucagcauc

SEQ ID NO: 395530 - RNA, 32 nt, Homo Sapiens
agucagaaggaagaggcccagcagaagggacu

SEQ ID NO: 395531 - RNA, 32 nt, Homo Sapiens
caguggucagcaugcgacagacagugucccua

SEQ ID NO: 395532 - RNA, 32 nt, Homo Sapiens
uuggauuaugaaaccccauuuaugauuuuuua

SEQ ID NO: 395533 - RNA, 32 nt, Homo Sapiens
ugcugccucuaccugacacucccuugggcucc

SEQ ID NO: 395534 - RNA, 32 nt, Homo Sapiens
gggcucaggugauugaaauguggaugaaacau

SEQ ID NO: 395535 - RNA, 31 nt, Homo Sapiens
ggccuccagcuuccccugccccgggccuggg

SEQ ID NO: 395536 - RNA, 32 nt, Homo Sapiens
auuuacuaacugugugaccuuaggcuggagug

SEQ ID NO: 395537 - RNA, 32 nt, Homo Sapiens
guacucuuucccuccugccacauccugccccc

SEQ ID NO: 395538 - RNA, 32 nt, Homo Sapiens
ugccggcagcgcccgccgugcacgcagcauua

SEQ ID NO: 395539 - RNA, 32 nt, Homo Sapiens
gcucugucccggcuggcuggcuccgagugugg

SEQ ID NO: 395540 - RNA, 32 nt, Homo Sapiens
gggaggcaaaucaugcucacuccggcgggcac

SEQ ID NO: 395541 - RNA, 32 nt, Homo Sapiens
cgagacacagaaccuggaggggugugcacgcu

SEQ ID NO: 395542 - RNA, 32 nt, Homo Sapiens
acuucuagggaugaaaucaacuucugauuuug

SEQ ID NO: 395543 - RNA, 32 nt, Homo Sapiens
uaaauucuuuuucaaaaauuacacuacaaguu

SEQ ID NO: 395544 - RNA, 32 nt, Homo Sapiens
agaaugaaagacuuaagauguucuaauucgua

SEQ ID NO: 395545 - RNA, 32 nt, Homo Sapiens
ggaggaagacugguagcggggagggggcuucc

SEQ ID NO: 395546 - RNA, 32 nt, Homo Sapiens
cugucaaaaaucaauaugcagaauggcauuug

SEQ ID NO: 395547 - RNA, 32 nt, Homo Sapiens
aacacguggcagccggagguguccaugggcac

SEQ ID NO: 395548 - RNA, 32 nt, Homo Sapiens
gacaauucaagccuuagugacuauuuagaaua

SEQ ID NO: 395549 - RNA, 32 nt, Homo Sapiens
auccuuguaaaauuauuugaaauuuucuuguu

SEQ ID NO: 395550 - RNA, 32 nt, Homo Sapiens
ucauuuaguuucacagaacugcucuuuuuguu

SEQ ID NO: 395551 - RNA, 32 nt, Homo Sapiens
aauucccggcgccggccccagcuccucugccg

SEQ ID NO: 395552 - RNA, 32 nt, Homo Sapiens
aacgaagcuccccgcagggucccggccucuag

SEQ ID NO: 395553 - RNA, 32 nt, Homo Sapiens
ccugccuccauggacccgcccgggaacggcca

SEQ ID NO: 395554 - RNA, 32 nt, Homo Sapiens
gguaugaggaucaaaucaugacugcuauagcc

SEQ ID NO: 395555 - RNA, 32 nt, Homo Sapiens
cucaagccagggcuccuccuccugucgugggc

SEQ ID NO: 395556 - RNA, 31 nt, Homo Sapiens
ugggccaugguacagcuggcuccugcggcag

SEQ ID NO: 395557 - RNA, 32 nt, Homo Sapiens
uggccuggcccauuuuauucccuggacccuua

SEQ ID NO: 395558 - RNA, 32 nt, Homo Sapiens
gucaauaaacaaggugcaauauuuucaaaaaa

SEQ ID NO: 395559 - RNA, 32 nt, Homo Sapiens
cuucugcucuucaccuccugcucgcugaugga

SEQ ID NO: 395560 - RNA, 32 nt, Homo Sapiens
aagccuuaucuaaaauccaagaauaauugcca

SEQ ID NO: 395561 - RNA, 32 nt, Homo Sapiens
aguacuuaugaguauaaugaauauugagaaau

SEQ ID NO: 395562 - RNA, 32 nt, Homo Sapiens
gcugcugguuccguugacuagggucaucuuga

SEQ ID NO: 395563 - RNA, 32 nt, Homo Sapiens
ugcuguggggguacagagggagggcuggagaa

SEQ ID NO: 395564 - RNA, 32 nt, Homo Sapiens
cuuuuuuaugaguacuuuuucuuugaaguuuu

SEQ ID NO: 395565 - RNA, 32 nt, Homo Sapiens
cccuuuguauuuccucuuuccaaguugauucc

SEQ ID NO: 395566 - RNA, 32 nt, Homo Sapiens
uccagggucgcugauccuccccggcccagggc

SEQ ID NO: 395567 - RNA, 32 nt, Homo Sapiens
gacucccgcccgcucccgcucgcucccgcggu

SEQ ID NO: 395568 - RNA, 32 nt, Homo Sapiens
gagcuugcggggcgcacagagcccccaggccu

SEQ ID NO: 395569 - RNA, 28 nt, Homo Sapiens
auuuuuaaugucaagauguguuuuccca

SEQ ID NO: 395570 - RNA, 32 nt, Homo Sapiens
agcaguuuucccaguuuuggccaggcagucaa

SEQ ID NO: 395571 - RNA, 32 nt, Homo Sapiens
ccgcucccgcggcaagccagcccgugcaacgg

SEQ ID NO: 395572 - RNA, 32 nt, Homo Sapiens
cgcauugaacucuacaacauucugugggauau

SEQ ID NO: 395573 - RNA, 32 nt, Homo Sapiens
ccucucuagaaccuccuucuguuggaggcccu

SEQ ID NO: 395574 - RNA, 32 nt, Homo Sapiens
caaggcauuucuauauuacuauggaaagauuu

SEQ ID NO: 395575 - RNA, 32 nt, Homo Sapiens
gaagcacuggaucauggaaccauagaaucucg

SEQ ID NO: 395576 - RNA, 32 nt, Homo Sapiens
uaugauauagaaguaauuuagacaauacauca

SEQ ID NO: 395577 - RNA, 32 nt, Homo Sapiens
gggaauauacauuuuucuuaauguuccaacau

SEQ ID NO: 395578 - RNA, 32 nt, Homo Sapiens
ccagccaccgguucuccugaccccgagugugg

SEQ ID NO: 395579 - RNA, 32 nt, Homo Sapiens
auagaacuaugaagauuacuggaucauauuuu

SEQ ID NO: 395580 - RNA, 32 nt, Homo Sapiens
gugggaaaaugaucuaaauuauuguuuuaauu

SEQ ID NO: 395581 - RNA, 32 nt, Homo Sapiens
cagcuugguggcggcugagccggcagcgggcc

SEQ ID NO: 395582 - RNA, 32 nt, Homo Sapiens
acagcuugugcgagacucugggcauuucgguu

SEQ ID NO: 395583 - RNA, 32 nt, Homo Sapiens
guguauguaaggguuggaaugaaaauacaauc

SEQ ID NO: 395584 - RNA, 32 nt, Homo Sapiens
uagaccacaacacucaaacacaguugcugcac

SEQ ID NO: 395585 - RNA, 32 nt, Homo Sapiens
gucagccaguguuucaggcacaggaaguacag

SEQ ID NO: 395586 - RNA, 30 nt, Homo Sapiens
cacccacugccuagaggccaucuuaaagga

SEQ ID NO: 395587 - RNA, 32 nt, Homo Sapiens
gucacauggaaauugggagucuuugaaaaaua

SEQ ID NO: 395588 - RNA, 32 nt, Homo Sapiens
ggcccuuccccuccccacuuuccugguuguuu

SEQ ID NO: 395589 - RNA, 32 nt, Homo Sapiens
gucacaaauuuuucuucaguguuucagccuga

SEQ ID NO: 395590 - RNA, 32 nt, Homo Sapiens
auuccacaugcaauucacucuggcgacccugu

SEQ ID NO: 395591 - RNA, 32 nt, Homo Sapiens
cguuuagguggaaucgcugugcaugugcagga

SEQ ID NO: 395592 - RNA, 32 nt, Homo Sapiens
accggaacaaagugcagaugaacacuuuuguc

SEQ ID NO: 395593 - RNA, 32 nt, Homo Sapiens
gccccagagguccggggcgcgcagccgggucc

SEQ ID NO: 395594 - RNA, 32 nt, Homo Sapiens
guuccacucgcuggcguccgggccgcugguga

SEQ ID NO: 395595 - RNA, 32 nt, Homo Sapiens
gaguccagaccacuuuuugucuaguaguagcu

SEQ ID NO: 395596 - RNA, 32 nt, Homo Sapiens
ugcauuguguaauccacucagaauuaaacaga

SEQ ID NO: 395597 - RNA, 32 nt, Homo Sapiens
cggaaagccucccgcccucccugcagcucccc

SEQ ID NO: 395598 - RNA, 32 nt, Homo Sapiens
ucagcugguucccaagcucgcacagaagguga

SEQ ID NO: 395599 - RNA, 32 nt, Homo Sapiens
ggauuuuauuuuuuccuaggucaagcugugua

SEQ ID NO: 395600 - RNA, 32 nt, Homo Sapiens
gaagacgccuuucuccuccaacccaaccucau

SEQ ID NO: 395601 - RNA, 32 nt, Homo Sapiens
gcucaaguguccaacagggcuauuggugcuuu

SEQ ID NO: 395602 - RNA, 32 nt, Homo Sapiens
cagcaucuuuugcugcuaccuugaccucaagc

SEQ ID NO: 395603 - RNA, 32 nt, Homo Sapiens
caggcguuccaccagcaggauguggagcaggg

SEQ ID NO: 395604 - RNA, 32 nt, Homo Sapiens
caguuagaauaaaguuuuuaaaaacuaaaauc

SEQ ID NO: 395605 - RNA, 32 nt, Homo Sapiens
cuguuacaaaaauuauaaaaugaucucuguuu

SEQ ID NO: 395606 - RNA, 32 nt, Homo Sapiens
aagcuauccaaauaacuggccaacuaguuguu

SEQ ID NO: 395607 - RNA, 32 nt, Homo Sapiens
caaaauucauucagaccgcacauguuagaggc

SEQ ID NO: 395608 - RNA, 31 nt, Homo Sapiens
ugcacgcuucucaguguuccccgcgccccgc

SEQ ID NO: 395609 - RNA, 32 nt, Homo Sapiens
cuucuugucauccuuaaacauucagucauguu

SEQ ID NO: 395610 - RNA, 32 nt, Homo Sapiens
guucuuaaacacaucuugaauugcugggaaaa

SEQ ID NO: 395611 - RNA, 32 nt, Homo Sapiens
guucggcccggcgcggugccucaugccuguaa

SEQ ID NO: 395612 - RNA, 32 nt, Homo Sapiens
ucagguuuuguauuuucuuuucuuguggaaua

SEQ ID NO: 395613 - RNA, 32 nt, Homo Sapiens
ccagaaccgcucuccccuucccugcccagugc

SEQ ID NO: 395614 - RNA, 32 nt, Homo Sapiens
gccagagcaccggccucccagagaaagcccag

SEQ ID NO: 395615 - RNA, 32 nt, Homo Sapiens
caacuuuuuauuguaccccuuaauugucaaca

SEQ ID NO: 395616 - RNA, 32 nt, Homo Sapiens
cugagcucaucaaauuuuucuguagcacagag

SEQ ID NO: 395617 - RNA, 32 nt, Homo Sapiens
ucugaggcgcgugcggcggccaccccagccua

SEQ ID NO: 395618 - RNA, 32 nt, Homo Sapiens
cgcugcgccccggcgggccacuuucccgggac

SEQ ID NO: 395619 - RNA, 32 nt, Homo Sapiens
uaugcucuugguuuuucugccuucugauuucu

SEQ ID NO: 395620 - RNA, 32 nt, Homo Sapiens
ugcguauuuucaaguuuuuuuaucuugcugug

SEQ ID NO: 395621 - RNA, 32 nt, Homo Sapiens
cccaacugacuugccugccucugcuugcugcu

SEQ ID NO: 395622 - RNA, 32 nt, Homo Sapiens
ugcccuaacucggggagggagccacauccuga

SEQ ID NO: 395623 - RNA, 32 nt, Homo Sapiens
ccuuucccaucccacccacauaugauagacag

SEQ ID NO: 395624 - RNA, 32 nt, Homo Sapiens
ucucuugguuaaaucauucagucuguuauuuu

SEQ ID NO: 395625 - RNA, 32 nt, Homo Sapiens
ucacugcgguuuguuuauuacacuuguagggc

SEQ ID NO: 395626 - RNA, 32 nt, Homo Sapiens
gauaaaaacuugaaguucuucagacaugucuc

SEQ ID NO: 395627 - RNA, 32 nt, Homo Sapiens
cuuccuucugaccuccucccaggcacucuuac

SEQ ID NO: 395628 - RNA, 32 nt, Homo Sapiens
gcugaggaugaggaugaugaccuucaguaugc

SEQ ID NO: 395629 - RNA, 32 nt, Homo Sapiens
ggagaggcagggugggauagggaacgucucga

SEQ ID NO: 395630 - RNA, 32 nt, Homo Sapiens
uuggaggaggcuggcucuggucuucgaugcac

SEQ ID NO: 395631 - RNA, 32 nt, Homo Sapiens
caaaggaugguggccgcaggccccacgcgagc

SEQ ID NO: 395632 - RNA, 30 nt, Homo Sapiens
ccgcggcgcgcgcagcugacggacauugag

SEQ ID NO: 395633 - RNA, 32 nt, Homo Sapiens
gccgcgccugacgcgucccgaguuauacagaa

SEQ ID NO: 395634 - RNA, 32 nt, Homo Sapiens
aaaacaaaacaaaaacaaaauguagaaaaagc

SEQ ID NO: 395635 - RNA, 32 nt, Homo Sapiens
ucacucagcaaauccaucccacgccugccacg

SEQ ID NO: 395636 - RNA, 32 nt, Homo Sapiens
ucucuggcacucuucacuuacuccaugacagc

SEQ ID NO: 395637 - RNA, 32 nt, Homo Sapiens
cucuguuuagaaaaaaucaaagaccaugauuu

SEQ ID NO: 395638 - RNA, 32 nt, Homo Sapiens
uucuucaaagccgauggggguuuucuaucuuu

SEQ ID NO: 395639 - RNA, 32 nt, Homo Sapiens
gggauucccucauugacagccucaccugaguc

SEQ ID NO: 395640 - RNA, 32 nt, Homo Sapiens
cuggacagguggcccgugugccccacagggau

SEQ ID NO: 395641 - RNA, 32 nt, Homo Sapiens
ugggcaaacauacacaaaugcaucauacaugu

SEQ ID NO: 395642 - RNA, 32 nt, Homo Sapiens
ccuucgacccucagcccucuggugccgcucug

SEQ ID NO: 395643 - RNA, 32 nt, Homo Sapiens
cgccuggccugggaaacugcaugcccacuuuc

SEQ ID NO: 395644 - RNA, 32 nt, Homo Sapiens
uggccuuaacuguucaguauugcaauaaaaaa

SEQ ID NO: 395645 - RNA, 32 nt, Homo Sapiens
cucaaugacgacgaggcccgacccuucccguc

SEQ ID NO: 395646 - RNA, 32 nt, Homo Sapiens
gcaggggcccucacucuugaaguccaggacug

SEQ ID NO: 395647 - RNA, 32 nt, Homo Sapiens
aaggauguuucauguuuuucuuaaaugacucc

SEQ ID NO: 395648 - RNA, 32 nt, Homo Sapiens
ucauggaaacuggcagggguccuguuaacguc

SEQ ID NO: 395649 - RNA, 32 nt, Homo Sapiens
ugcuugcgugacucugcuccccgauucuccag

SEQ ID NO: 395650 - RNA, 27 nt, Homo Sapiens
uaaaauuucgacuucagccuuugcacu

SEQ ID NO: 395651 - RNA, 32 nt, Homo Sapiens
uggagcaacuggaugaugaucaauaauuauac

SEQ ID NO: 395652 - RNA, 32 nt, Homo Sapiens
uuugucuucuaaauugcaauagcuauaaucac

SEQ ID NO: 395653 - RNA, 32 nt, Homo Sapiens
uccaaaacuuggaguuacaaagaugaucacaa

SEQ ID NO: 395654 - RNA, 32 nt, Homo Sapiens
cuaaaacucaaguuaauggucuguggauccca

SEQ ID NO: 395655 - RNA, 32 nt, Homo Sapiens
auugauuuguuagagcacuuuguauauuguga

SEQ ID NO: 395656 - RNA, 32 nt, Homo Sapiens
ccuuguuuccucuggguuuuauagugauacag

SEQ ID NO: 395657 - RNA, 32 nt, Homo Sapiens
uuugaaguaaucaaaauaauggaaagugucug

SEQ ID NO: 395658 - RNA, 32 nt, Homo Sapiens
gcuggggcaggagaggggccucugggugagag

SEQ ID NO: 395659 - RNA, 32 nt, Homo Sapiens
ccagcugaccccagcccccgacggcuccagcc

SEQ ID NO: 395660 - RNA, 32 nt, Homo Sapiens
ucuauuuuuucugcaucagagcuguaagaggu

SEQ ID NO: 395661 - RNA, 31 nt, Homo Sapiens
acuuucuuccaggccaccugagccuucguuc

SEQ ID NO: 395662 - RNA, 32 nt, Homo Sapiens
gcuccgccuguccugcccuugcucagaccacc

SEQ ID NO: 395663 - RNA, 32 nt, Homo Sapiens
ggugaaggcggccggggccgggacgccauguc

SEQ ID NO: 395664 - RNA, 32 nt, Homo Sapiens
caauaagaauaaaaccgaguagaacaaaauaa

SEQ ID NO: 395665 - RNA, 32 nt, Homo Sapiens
cagguccggauugcggcugucccugugugaca

SEQ ID NO: 395666 - RNA, 28 nt, Homo Sapiens
cagaugggggcgguggcacgggcccaug

SEQ ID NO: 395667 - RNA, 32 nt, Homo Sapiens
gaguugcugccuugcaauuggaggaaggaccu

SEQ ID NO: 395668 - RNA, 32 nt, Homo Sapiens
uaggaaaaauuccaucuucauuacugccuuau

SEQ ID NO: 395669 - RNA, 32 nt, Homo Sapiens
aucgacagaaaagaagaaucagauacuugacu

SEQ ID NO: 395670 - RNA, 32 nt, Homo Sapiens
gggcuuugggguggagcuggggcaagcagagg

SEQ ID NO: 395671 - RNA, 32 nt, Homo Sapiens
gaguuguagcccucacacuacaucaguuugcu

SEQ ID NO: 395672 - RNA, 32 nt, Homo Sapiens
cccacgucaacauugggacggauugugaauuc

SEQ ID NO: 395673 - RNA, 32 nt, Homo Sapiens
auuggugauaauucuuuuuauuucuuccuuau

SEQ ID NO: 395674 - RNA, 32 nt, Homo Sapiens
aguuucucuguaacagcagcucuaccauggug

SEQ ID NO: 395675 - RNA, 32 nt, Homo Sapiens
aguucacugucaaccucuuauaguccauaaca

SEQ ID NO: 395676 - RNA, 32 nt, Homo Sapiens
caaacucugcccggcgcggcuggugacuuugc

SEQ ID NO: 395677 - RNA, 32 nt, Homo Sapiens
ccgcagcgcuggcaccaugacgcucgcccgcu

SEQ ID NO: 395678 - RNA, 32 nt, Homo Sapiens
caggugcccccgcugcuggccucaugcuccuc

SEQ ID NO: 395679 - RNA, 32 nt, Homo Sapiens
agucucccacacuccucccgaagacagguccu

SEQ ID NO: 395680 - RNA, 32 nt, Homo Sapiens
caaaaauaacuuuaaaaggaacaaagaaacuc

SEQ ID NO: 395681 - RNA, 32 nt, Homo Sapiens
cccacacugugccuuuacgaucagcgugacag

SEQ ID NO: 395682 - RNA, 32 nt, Homo Sapiens
aaauuuauauuagaaaaauguaaauaaucggg

SEQ ID NO: 395683 - RNA, 32 nt, Homo Sapiens
gagcuaacugcucuguaaacuacuuuccauga

SEQ ID NO: 395684 - RNA, 32 nt, Homo Sapiens
uggccuccagcagcaggaccugucccaguacc

SEQ ID NO: 395685 - RNA, 32 nt, Homo Sapiens
ccuccacucgacccagaauggagccugcucuc

SEQ ID NO: 395686 - RNA, 32 nt, Homo Sapiens
cccuccucagugccggccgccauggcagaggc

SEQ ID NO: 395687 - RNA, 32 nt, Homo Sapiens
ccucacccuaugaugacaauguuuagacuggc

SEQ ID NO: 395688 - RNA, 32 nt, Homo Sapiens
gcccgaaugauccccaggagcccggcuuccaa

SEQ ID NO: 395689 - RNA, 32 nt, Homo Sapiens
cucuuuggcuggggguucugguggacguuuca

SEQ ID NO: 395690 - RNA, 32 nt, Homo Sapiens
cgggcucugagcgcgccgcggcacagguuucu

SEQ ID NO: 395691 - RNA, 32 nt, Homo Sapiens
aguacagaaaaaagccacaugugggacucaaa

SEQ ID NO: 395692 - RNA, 32 nt, Homo Sapiens
ugaagcuuuugggcucgggggacaggucagug

SEQ ID NO: 395693 - RNA, 25 nt, Homo Sapiens
auggagccucgcauggaguccugcc

SEQ ID NO: 395694 - RNA, 32 nt, Homo Sapiens
uggaaaggggaaacagaagagaagggucucac

SEQ ID NO: 395695 - RNA, 32 nt, Homo Sapiens
agucuauaaaaauuauguuuccucuguuuuuu

SEQ ID NO: 395696 - RNA, 32 nt, Homo Sapiens
gcuggggagugccuggauggugcggugguuga

SEQ ID NO: 395697 - RNA, 32 nt, Homo Sapiens
ggcguugagcucggccggcccggagcgcggac

SEQ ID NO: 395698 - RNA, 32 nt, Homo Sapiens
ucaaaccauguccuauggaucaauaacauucg

SEQ ID NO: 395699 - RNA, 32 nt, Homo Sapiens
aaccacuguuaauauuugaugaaugugcuuuc

SEQ ID NO: 395700 - RNA, 32 nt, Homo Sapiens
uaagauaaacuguaauccagacaccuaauucu

SEQ ID NO: 395701 - RNA, 32 nt, Homo Sapiens
cacagcaagugaauucaugguauuuuacuuuu

SEQ ID NO: 395702 - RNA, 32 nt, Homo Sapiens
cauccagccggacgggcuggugcggggggccu

SEQ ID NO: 395703 - RNA, 30 nt, Homo Sapiens
aggccucacugugcugggggcuucgguguc

SEQ ID NO: 395704 - RNA, 32 nt, Homo Sapiens
ucugauuucuauuucauggaauuugggauuga

SEQ ID NO: 395705 - RNA, 32 nt, Homo Sapiens
ggauuacugauagaaaaucaugcaaaaccucc

SEQ ID NO: 395706 - RNA, 32 nt, Homo Sapiens
uuuaagcggcgguggcggcaaacggcaggagg

SEQ ID NO: 395707 - RNA, 32 nt, Homo Sapiens
uuguucuagguccucugcuugugagggucaaa

SEQ ID NO: 395708 - RNA, 32 nt, Homo Sapiens
ucccucuggaaggcgaggguucgggccacagu

SEQ ID NO: 395709 - RNA, 32 nt, Homo Sapiens
uaaggaaacugggguguagaaaaguguauuga

SEQ ID NO: 395710 - RNA, 32 nt, Homo Sapiens
auacugugcaaucaguucuuugaaaaaaaagu

SEQ ID NO: 395711 - RNA, 32 nt, Homo Sapiens
ucuccuccaaccccacccucuauucuguuucu

SEQ ID NO: 395712 - RNA, 32 nt, Homo Sapiens
ucccccgacauuccagccucuagaaugcucug

SEQ ID NO: 395713 - RNA, 32 nt, Homo Sapiens
ucauuguuuucacagcacuuuuuuauccuaau

SEQ ID NO: 395714 - RNA, 32 nt, Homo Sapiens
cacaccugcaaucccaguacuuugagaggccg

SEQ ID NO: 395715 - RNA, 32 nt, Homo Sapiens
ggcucacgcgcccuugaaaucugccgguacuc

SEQ ID NO: 395716 - RNA, 31 nt, Homo Sapiens
ugugccacucacugccuugagccugcuuccu

SEQ ID NO: 395717 - RNA, 32 nt, Homo Sapiens
acuuacggacacagaaaugcacaggggaggcc

SEQ ID NO: 395718 - RNA, 32 nt, Homo Sapiens
gcaauguaauaacuacaguuuuuuacaaauug

SEQ ID NO: 395719 - RNA, 32 nt, Homo Sapiens
guuuuuaaucauauugauguauauuuguagau

SEQ ID NO: 395720 - RNA, 32 nt, Homo Sapiens
ggauacugccauuuguuuuccuguuccuguuc

SEQ ID NO: 395721 - RNA, 32 nt, Homo Sapiens
ugggcccaucacuguauagacaugcuaccacu

SEQ ID NO: 395722 - RNA, 32 nt, Homo Sapiens
accaggaaaauuccaucagggauuggaugacc

SEQ ID NO: 395723 - RNA, 32 nt, Homo Sapiens
cucugucuccaaggcuccccagcccucagcag

SEQ ID NO: 395724 - RNA, 32 nt, Homo Sapiens
cacuaggaucucuggucuacaguggagggaga

SEQ ID NO: 395725 - RNA, 28 nt, Homo Sapiens
gaaggagaaaaauaaacacuuuugcucg

SEQ ID NO: 395726 - RNA, 32 nt, Homo Sapiens
aaauauauauauauuuggguuuugggggaaaa

SEQ ID NO: 395727 - RNA, 32 nt, Homo Sapiens
gaagaacagaaucuuggugcuuuguggcucac

SEQ ID NO: 395728 - RNA, 32 nt, Homo Sapiens
gagugaagcgccgggaccgagccccgucuccc

SEQ ID NO: 395729 - RNA, 32 nt, Homo Sapiens
agcaaaaacaaaaaacaaaacaauucauuagc

SEQ ID NO: 395730 - RNA, 32 nt, Homo Sapiens
cggcggagacgcccgacccgaaggccggcugc

SEQ ID NO: 395731 - RNA, 32 nt, Homo Sapiens
ugcggugacuccgaagcuccccggcuguggcg

SEQ ID NO: 395732 - RNA, 32 nt, Homo Sapiens
gugugcaggugcuuuuggggccccauagaggc

SEQ ID NO: 395733 - RNA, 32 nt, Homo Sapiens
ucacaaauauuaaagcacuugaagacaauggu

SEQ ID NO: 395734 - RNA, 32 nt, Homo Sapiens
acuguuuccagaaagagcuauuuuaacagaag

SEQ ID NO: 395735 - RNA, 32 nt, Homo Sapiens
uuaauacaucacaucuuauuuauuuuagcaaa

SEQ ID NO: 395736 - RNA, 32 nt, Homo Sapiens
aaggauuuuuaaaaugauuugcacuuuuucac

SEQ ID NO: 395737 - RNA, 32 nt, Homo Sapiens
guggcucugcuguuuucuuaggcugcuugaag

SEQ ID NO: 395738 - RNA, 32 nt, Homo Sapiens
caggcuggccgcggccgguuuggucuggggac

SEQ ID NO: 395739 - RNA, 32 nt, Homo Sapiens
acagauuaagacaaacauuuaugauggucugu

SEQ ID NO: 395740 - RNA, 32 nt, Homo Sapiens
uauucuguuuuaaacauugaaaaguugugguc

SEQ ID NO: 395741 - RNA, 32 nt, Homo Sapiens
uggauggaccagccuuccaugcagcagggaca

SEQ ID NO: 395742 - RNA, 32 nt, Homo Sapiens
gugcaggagggcuauguguccuggaccaugaa

SEQ ID NO: 395743 - RNA, 32 nt, Homo Sapiens
gguuaaggaggggucuaggagcucugucccuu

SEQ ID NO: 395744 - RNA, 32 nt, Homo Sapiens
ccucgaccccuuugugcccccggcccgucucc

SEQ ID NO: 395745 - RNA, 32 nt, Homo Sapiens
cugguauucuuugcuuagguucauuuacaaga

SEQ ID NO: 395746 - RNA, 29 nt, Homo Sapiens
uucacuucuaaauuuuugcaggcuuuguu

SEQ ID NO: 395747 - RNA, 32 nt, Homo Sapiens
acauuuuauuuucucuuauuucuguugugauu

SEQ ID NO: 395748 - RNA, 32 nt, Homo Sapiens
ccaaggaucuccggccaccagcagaagccagc

SEQ ID NO: 395749 - RNA, 32 nt, Homo Sapiens
auuuugaucauuuucugcuuuauuuugcuaau

SEQ ID NO: 395750 - RNA, 32 nt, Homo Sapiens
cugagaucuaaugaagagaaggugguauuguu

SEQ ID NO: 395751 - RNA, 32 nt, Homo Sapiens
agcgucccauucucucugucugguccucuaga

SEQ ID NO: 395752 - RNA, 32 nt, Homo Sapiens
cagguccaguucaaaucuaaaauucuacuuuu

SEQ ID NO: 395753 - RNA, 32 nt, Homo Sapiens
ggagacgcgggaaggguaggaaaauggacugu

SEQ ID NO: 395754 - RNA, 32 nt, Homo Sapiens
ugcucagcauccuccucuuccucggugguggg

SEQ ID NO: 395755 - RNA, 32 nt, Homo Sapiens
uuuguugccuuuuuuauauuagaugaggugca

SEQ ID NO: 395756 - RNA, 32 nt, Homo Sapiens
ugauaagaggaggaagacauaaaguugggggu

SEQ ID NO: 395757 - RNA, 32 nt, Homo Sapiens
uagugcccaaggaaaccuaaucaguacagugg

SEQ ID NO: 395758 - RNA, 32 nt, Homo Sapiens
uggcacaagugaagaagaaggcagugggaaaa

SEQ ID NO: 395759 - RNA, 32 nt, Homo Sapiens
caugggaagaccuuggugaaaaaggaaauccu

SEQ ID NO: 395760 - RNA, 32 nt, Homo Sapiens
ggcuccuggggguggggaggugucacauggug

SEQ ID NO: 395761 - RNA, 32 nt, Homo Sapiens
aaaaauuuuuaaaaauuugaugauccccaaua

SEQ ID NO: 395762 - RNA, 32 nt, Homo Sapiens
agggggugggccgccagucuucagggaggaga

SEQ ID NO: 395763 - RNA, 32 nt, Homo Sapiens
uguacaggcgcgguugucauugcagaaaccgc

SEQ ID NO: 395764 - RNA, 32 nt, Homo Sapiens
cuccucacuucagauuucuguacaucacguuc

SEQ ID NO: 395765 - RNA, 32 nt, Homo Sapiens
ggcaagggaagaggccacacccugcccugcuc

SEQ ID NO: 395766 - RNA, 32 nt, Homo Sapiens
ugcuugagugcacacccggcgccaggcccuga

SEQ ID NO: 395767 - RNA, 32 nt, Homo Sapiens
cugggggcagggugggggaggggcgagaguau

SEQ ID NO: 395768 - RNA, 32 nt, Homo Sapiens
aaagugaacugagaaagaaaaagggaaaauau

SEQ ID NO: 395769 - RNA, 32 nt, Homo Sapiens
ugaggggcugguuuucagaugaguuuucugcu

SEQ ID NO: 395770 - RNA, 32 nt, Homo Sapiens
gagagguggcaccggggcugcagagggcggcu

SEQ ID NO: 395771 - RNA, 32 nt, Homo Sapiens
ugagaaaaugaaauuguuauuuuacaagcuga

SEQ ID NO: 395772 - RNA, 27 nt, Homo Sapiens
ggugacaccuccugcagcccccagcau

SEQ ID NO: 395773 - RNA, 32 nt, Homo Sapiens
caaaugaauuuggccuggcacaggggucacac

SEQ ID NO: 395774 - RNA, 29 nt, Homo Sapiens
gcaccuaugggccagguacgguucuucac

SEQ ID NO: 395775 - RNA, 32 nt, Homo Sapiens
uucaugcuccauuuuuaaccacuugccucuuu

SEQ ID NO: 395776 - RNA, 32 nt, Homo Sapiens
gauaugcaaccugguauacagacauuugugca

SEQ ID NO: 395777 - RNA, 32 nt, Homo Sapiens
ucagccacugggugguucccacugcaugaccc

SEQ ID NO: 395778 - RNA, 32 nt, Homo Sapiens
uuguuccagguggucucacccuccugucccug

SEQ ID NO: 395779 - RNA, 32 nt, Homo Sapiens
uccacucggcuuucccaaaaggcggcacccag

SEQ ID NO: 395780 - RNA, 32 nt, Homo Sapiens
cgucgggggaucgcggccggcgcggggcaggg

SEQ ID NO: 395781 - RNA, 32 nt, Homo Sapiens
guaagccaauucuccuuuuucuuuuugagaua

SEQ ID NO: 395782 - RNA, 32 nt, Homo Sapiens
auuuuauaaagugacuuuuuuauuacuuuaau

SEQ ID NO: 395783 - RNA, 32 nt, Homo Sapiens
agcuccauuuacaaguuuuucuuucaaaauca

SEQ ID NO: 395784 - RNA, 29 nt, Homo Sapiens
aggucauacaaugagugaauggggcaacc

SEQ ID NO: 395785 - RNA, 32 nt, Homo Sapiens
ucugcgugcugcgaaguccgcggcugcccccg

SEQ ID NO: 395786 - RNA, 32 nt, Homo Sapiens
ccccucuuccuccuccucaagggaaagcugcc

SEQ ID NO: 395787 - RNA, 32 nt, Homo Sapiens
gcaacacacccccuccuucucugcuuuggguc

SEQ ID NO: 395788 - RNA, 32 nt, Homo Sapiens
auuuuuacaaauagguagagucauucauauuu

SEQ ID NO: 395789 - RNA, 32 nt, Homo Sapiens
uucuaaugaugaucaauuauaguuucugaggc

SEQ ID NO: 395790 - RNA, 32 nt, Homo Sapiens
uuauauccugguuuucucuauccuugcauuac

SEQ ID NO: 395791 - RNA, 32 nt, Homo Sapiens
uuguuuaagaaacuguuugauuuuagagucua

SEQ ID NO: 395792 - RNA, 32 nt, Homo Sapiens
auucaccggcggcuaccggcggcggcgcgcag

SEQ ID NO: 395793 - RNA, 32 nt, Homo Sapiens
agugcaggggauggagacaggugcugggcugg

SEQ ID NO: 395794 - RNA, 30 nt, Homo Sapiens
aaccugggagguggagcaugcagccagcca

SEQ ID NO: 395795 - RNA, 32 nt, Homo Sapiens
aaaacaaaacaaaacaaagcaaaauauugaug

SEQ ID NO: 395796 - RNA, 32 nt, Homo Sapiens
gaaugagugagauccuggaggacccuggcccc

SEQ ID NO: 395797 - RNA, 32 nt, Homo Sapiens
acagagcaguccuaucaccucccuccaagauc

SEQ ID NO: 395798 - RNA, 32 nt, Homo Sapiens
augucauauaaaaguuaaauguaaaaagauac

SEQ ID NO: 395799 - RNA, 26 nt, Homo Sapiens
aaugcaguauaaccugcgacugaggu

SEQ ID NO: 395800 - RNA, 32 nt, Homo Sapiens
gccugagaggucggcagcagacccggcagcgc

SEQ ID NO: 395801 - RNA, 32 nt, Homo Sapiens
gggcugcuuugccuauggaguagccauucuau

SEQ ID NO: 395802 - RNA, 32 nt, Homo Sapiens
ggcguagauggcaaccccccacccccaccccg

SEQ ID NO: 395803 - RNA, 32 nt, Homo Sapiens
cugagcugugaggccagugcuccagcuuugga

SEQ ID NO: 395804 - RNA, 32 nt, Homo Sapiens
uccacucaccguucacuauauuugaguguucc

SEQ ID NO: 395805 - RNA, 32 nt, Homo Sapiens
acacacuacacacacacacacacacacacaca

SEQ ID NO: 395806 - RNA, 32 nt, Homo Sapiens
cugucugagccaugaacaacuucagggccacc

SEQ ID NO: 395807 - RNA, 32 nt, Homo Sapiens
gauguuugcauucugcuccucgcuugccugaa

SEQ ID NO: 395808 - RNA, 32 nt, Homo Sapiens
ggcaaugccuucuccuuuucuucuccuuucug

SEQ ID NO: 395809 - RNA, 32 nt, Homo Sapiens
ucucucgggggaaccggacagcagcuuggcaa

SEQ ID NO: 395810 - RNA, 32 nt, Homo Sapiens
cgggaacaagcacguuguacccuuggcuggac

SEQ ID NO: 395811 - RNA, 32 nt, Homo Sapiens
cuuccuggccauggagaggagaucuggacccg

SEQ ID NO: 395812 - RNA, 32 nt, Homo Sapiens
auccugcggauaccuguagacacaggcaugug

SEQ ID NO: 395813 - RNA, 32 nt, Homo Sapiens
gauggguccggguggggcgcgcguggacuaug

SEQ ID NO: 395814 - RNA, 32 nt, Homo Sapiens
ugaacauccuugugugggcccauccucugcau

SEQ ID NO: 395815 - RNA, 32 nt, Homo Sapiens
gagaagcgagguagagaagcgagggggugagc

SEQ ID NO: 395816 - RNA, 32 nt, Homo Sapiens
aaaauugacauaagugcuuuuacaagcaccaa

SEQ ID NO: 395817 - RNA, 32 nt, Homo Sapiens
uacaugccaaaauacaagucccugcuggacau

SEQ ID NO: 395818 - RNA, 32 nt, Homo Sapiens
uuaugagccucgauguucccugguaaacuuuu

SEQ ID NO: 395819 - RNA, 32 nt, Homo Sapiens
gcuuaccucuuugaacguuguuuaccuacccc

SEQ ID NO: 395820 - RNA, 32 nt, Homo Sapiens
guagcucuggcaccaccacacuggccucugau

SEQ ID NO: 395821 - RNA, 32 nt, Homo Sapiens
gggcgguggcgggcgcuggugaaggagucucg

SEQ ID NO: 395822 - RNA, 32 nt, Homo Sapiens
uuuuuacuuggggugcugcuuuauuggcuuug

SEQ ID NO: 395823 - RNA, 31 nt, Homo Sapiens
uggcucucuuguaauuaaucuguguuggcaa

SEQ ID NO: 395824 - RNA, 32 nt, Homo Sapiens
ccaaagaacugggauuacaggcaugaggcacc

SEQ ID NO: 395825 - RNA, 32 nt, Homo Sapiens
uguggcggccccagugccauggccaccccaga

SEQ ID NO: 395826 - RNA, 32 nt, Homo Sapiens
ugugcucuucaucuagacccaagccccagguc

SEQ ID NO: 395827 - RNA, 32 nt, Homo Sapiens
uuuucucaguuauuuaauauuuaauguuuucc

SEQ ID NO: 395828 - RNA, 32 nt, Homo Sapiens
ggauggaagaaaugugaaagagaaacagccau

SEQ ID NO: 395829 - RNA, 32 nt, Homo Sapiens
uuuccuacauuuucuuuuuuuauuaaacagau

SEQ ID NO: 395830 - RNA, 32 nt, Homo Sapiens
uacauguuuuaaccucuuuuuuuuuucuaauu

SEQ ID NO: 395831 - RNA, 32 nt, Homo Sapiens
uguuguauuuuuucauuuacauuaauguaauu

SEQ ID NO: 395832 - RNA, 32 nt, Homo Sapiens
uuuuccugcuaggcccuugaugcuggagucac

SEQ ID NO: 395833 - RNA, 28 nt, Homo Sapiens
gacaaggggcggcagcggaggcuggcua

SEQ ID NO: 395834 - RNA, 32 nt, Homo Sapiens
ggaaaauggcggcggcggcggcggcggcugca

SEQ ID NO: 395835 - RNA, 32 nt, Homo Sapiens
agaauuuugagcgcuagccgucucucagucgc

SEQ ID NO: 395836 - RNA, 32 nt, Homo Sapiens
acuaccuagguccaacugcuuauucuuccaac

SEQ ID NO: 395837 - RNA, 32 nt, Homo Sapiens
agccagccgagaccugccgugggaccccagag

SEQ ID NO: 395838 - RNA, 32 nt, Homo Sapiens
gacuucaguaagucacuuaaaugacaagacag

SEQ ID NO: 395839 - RNA, 32 nt, Homo Sapiens
ucaugcauuccuguugcuaguuucacaucagu

SEQ ID NO: 395840 - RNA, 32 nt, Homo Sapiens
gggaauuccuucccuuuucugacugauuacag

SEQ ID NO: 395841 - RNA, 32 nt, Homo Sapiens
gugcccguguccuccuucuugaaccccucagc

SEQ ID NO: 395842 - RNA, 32 nt, Homo Sapiens
cugaauuuuugaaauugacaaacaaaucuuaa

SEQ ID NO: 395843 - RNA, 32 nt, Homo Sapiens
uuuguaaugcaaaaggcugauuacugaaauuu

SEQ ID NO: 395844 - RNA, 32 nt, Homo Sapiens
ggguuucgccgcaaccaagacccagcgagugc

SEQ ID NO: 395845 - RNA, 32 nt, Homo Sapiens
guuauaguagccagaaguugggaaacaaaugc

SEQ ID NO: 395846 - RNA, 32 nt, Homo Sapiens
gaggcucuggagaggagagggugaaggugcca

SEQ ID NO: 395847 - RNA, 32 nt, Homo Sapiens
gcgaggcgggcgcugcggcgccagcagcccug

SEQ ID NO: 395848 - RNA, 32 nt, Homo Sapiens
uaauauuugauuaugcugauugguuuuggugg

SEQ ID NO: 395849 - RNA, 32 nt, Homo Sapiens
cugaggauggggcaggcuggggugugggugug

SEQ ID NO: 395850 - RNA, 32 nt, Homo Sapiens
gaaggauagauaugcacugaaacauguggucu

SEQ ID NO: 395851 - RNA, 32 nt, Homo Sapiens
uaagucucgucuccuguccccagcggccuaca

SEQ ID NO: 395852 - RNA, 32 nt, Homo Sapiens
aagaccacuucuuuccuccccacucccagcuc

SEQ ID NO: 395853 - RNA, 32 nt, Homo Sapiens
caaccucgggaacgggaugggaggcggcccug

SEQ ID NO: 395854 - RNA, 32 nt, Homo Sapiens
gcagucgagagccagccaauagauggaaugga

SEQ ID NO: 395855 - RNA, 32 nt, Homo Sapiens
cuucuacugggagauuaauuauagaagccaca

SEQ ID NO: 395856 - RNA, 32 nt, Homo Sapiens
uauucuuagugugggagaaaaaucagcuuugg

SEQ ID NO: 395857 - RNA, 32 nt, Homo Sapiens
gccaggucugcguuucacccuccagcugcugu

SEQ ID NO: 395858 - RNA, 32 nt, Homo Sapiens
ccccagagcccugcuggagaggaggcagacug

SEQ ID NO: 395859 - RNA, 32 nt, Homo Sapiens
aaauuauuuguuuauaacuuuaaaagaguaga

SEQ ID NO: 395860 - RNA, 29 nt, Homo Sapiens
ccugcccgggagauguggacgccgggcgg

SEQ ID NO: 395861 - RNA, 32 nt, Homo Sapiens
uuauaggugugagccaccaugcccagccccuu

SEQ ID NO: 395862 - RNA, 32 nt, Homo Sapiens
gcaucccacccccaaaccaccgacucucauug

SEQ ID NO: 395863 - RNA, 32 nt, Homo Sapiens
uuaucuggcguuuuagacaaauuugcaaaacu

SEQ ID NO: 395864 - RNA, 32 nt, Homo Sapiens
cuccccugcccagauagcugguggugggcgcu

SEQ ID NO: 395865 - RNA, 32 nt, Homo Sapiens
uuuuaaacuucagaguuuauuuucucaagaaa

SEQ ID NO: 395866 - RNA, 32 nt, Homo Sapiens
auuuugugacagucaaaaggacgugcaaaagu

SEQ ID NO: 395867 - RNA, 32 nt, Homo Sapiens
guggcuggcgccccguucuccuccaguuggga

SEQ ID NO: 395868 - RNA, 32 nt, Homo Sapiens
uguaaaaauacuuuuuaccagucuggaacuug

SEQ ID NO: 395869 - RNA, 32 nt, Homo Sapiens
acaaaaaaaggguaaacuuauucuauugacag

SEQ ID NO: 395870 - RNA, 28 nt, Homo Sapiens
ggcuuucugcggccgcugagggcgcguc

SEQ ID NO: 395871 - RNA, 32 nt, Homo Sapiens
gugggcugccccacccugcacuaccuauuuug

SEQ ID NO: 395872 - RNA, 32 nt, Homo Sapiens
gagacucugggcugcgcagcccccggcgccac

SEQ ID NO: 395873 - RNA, 32 nt, Homo Sapiens
uggugugcaccuguaaucccagcuacucugga

SEQ ID NO: 395874 - RNA, 32 nt, Homo Sapiens
aaaccccuuccagcugagcagggaauccggcc

SEQ ID NO: 395875 - RNA, 32 nt, Homo Sapiens
gagaaggagccacacagcugugugggacccgg

SEQ ID NO: 395876 - RNA, 30 nt, Homo Sapiens
cgaggggaagauggcggcggcggccgggag

SEQ ID NO: 395877 - RNA, 32 nt, Homo Sapiens
ucuccuggccucugcuuuugugucucacaaaa

SEQ ID NO: 395878 - RNA, 32 nt, Homo Sapiens
cuccauuucaucauuguuucugcaugaauauc

SEQ ID NO: 395879 - RNA, 32 nt, Homo Sapiens
ccugguguugggaauucugugcccuaaagaau

SEQ ID NO: 395880 - RNA, 32 nt, Homo Sapiens
uucuggcugcacuucaccugcugcuugagcuu

SEQ ID NO: 395881 - RNA, 32 nt, Homo Sapiens
cuucauccaauauaucauucaaaugcaucuga

SEQ ID NO: 395882 - RNA, 32 nt, Homo Sapiens
ggaccguugcugucacuacucaggcugacugg

SEQ ID NO: 395883 - RNA, 32 nt, Homo Sapiens
gcaucuuuucuguugccccauccaccgccagc

SEQ ID NO: 395884 - RNA, 32 nt, Homo Sapiens
cacaagcagggccuugauuuuccuccaggcuu

SEQ ID NO: 395885 - RNA, 32 nt, Homo Sapiens
ugucuaaacucuauguugcucaguguacuuaa

SEQ ID NO: 395886 - RNA, 32 nt, Homo Sapiens
acaaggggaaaggguugguuaggcaaucauuc

SEQ ID NO: 395887 - RNA, 32 nt, Homo Sapiens
aucugugggaaauuauuuuuuaugauucucca

SEQ ID NO: 395888 - RNA, 32 nt, Homo Sapiens
caagggagaaauguguuguguugucuuagcuu

SEQ ID NO: 395889 - RNA, 32 nt, Homo Sapiens
gagaauugcuugaacccaugagguggagguug

SEQ ID NO: 395890 - RNA, 32 nt, Homo Sapiens
agagcacccugcauucugccucauggugcagu

SEQ ID NO: 395891 - RNA, 32 nt, Homo Sapiens
cuguuuuuaaucuugauguuuuccaacuuucu

SEQ ID NO: 395892 - RNA, 32 nt, Homo Sapiens
cccgugccugcccagcugggaggagucagagc

SEQ ID NO: 395893 - RNA, 32 nt, Homo Sapiens
aauauuacugugccaaaaaucaccuugucuaa

SEQ ID NO: 395894 - RNA, 32 nt, Homo Sapiens
uauaugcuaaauaauuuuaaaauacaagaguu

SEQ ID NO: 395895 - RNA, 32 nt, Homo Sapiens
uacaaccuauauuguuaugcagauggcuucuu

SEQ ID NO: 395896 - RNA, 32 nt, Homo Sapiens
ucuugacagcaccacggcuacuuaggcaaugu

SEQ ID NO: 395897 - RNA, 32 nt, Homo Sapiens
agaagcugugcagcugagagaggguucaaacg

SEQ ID NO: 395898 - RNA, 32 nt, Homo Sapiens
ggaugccgccgacgcggugcugcugccgccgc

SEQ ID NO: 395899 - RNA, 32 nt, Homo Sapiens
auuguuuuuuaaacucugccaugaaauuugga

SEQ ID NO: 395900 - RNA, 32 nt, Homo Sapiens
gagcaggaacagagacucuggaagccccccac

SEQ ID NO: 395901 - RNA, 32 nt, Homo Sapiens
cuaaggaaauuugaaaagacaaacuauggcug

SEQ ID NO: 395902 - RNA, 32 nt, Homo Sapiens
gucuacucugguuugugaacagagagaagaag

SEQ ID NO: 395903 - RNA, 32 nt, Homo Sapiens
aucuaagaaaaugugaauaaacuauagauuuu

SEQ ID NO: 395904 - RNA, 32 nt, Homo Sapiens
aaugguucuucagauucuuccacacugcccaa

SEQ ID NO: 395905 - RNA, 32 nt, Homo Sapiens
agacacagccauuugcagaaaucaggcacagu

SEQ ID NO: 395906 - RNA, 32 nt, Homo Sapiens
acaaagucaggagaucgagaccauccuggcua

SEQ ID NO: 395907 - RNA, 32 nt, Homo Sapiens
cuuccgccuccuggacaauaccugcuccgugu

SEQ ID NO: 395908 - RNA, 32 nt, Homo Sapiens
uguucaacugaaggaauaaaugucuauuaaac

SEQ ID NO: 395909 - RNA, 32 nt, Homo Sapiens
auaaaguagaguggaaauaauguagagucguc

SEQ ID NO: 395910 - RNA, 32 nt, Homo Sapiens
cacugccuuugguuuuagcaguucuuugaaaa

SEQ ID NO: 395911 - RNA, 32 nt, Homo Sapiens
ccagcuguaggguggggggcaggcucccccau

SEQ ID NO: 395912 - RNA, 32 nt, Homo Sapiens
ugccugucuugucccucugccccucccaccug

SEQ ID NO: 395913 - RNA, 32 nt, Homo Sapiens
ucuggucugcccagcccaccccaggggcacug

SEQ ID NO: 395914 - RNA, 32 nt, Homo Sapiens
aacguuuuaauggcccguuuaugucucaugcc

SEQ ID NO: 395915 - RNA, 32 nt, Homo Sapiens
aguuuaaaguuaauuauaucaguuuccuaaug

SEQ ID NO: 395916 - RNA, 32 nt, Homo Sapiens
ccaacagcaccuccccgcugggaagagaagag

SEQ ID NO: 395917 - RNA, 32 nt, Homo Sapiens
uucaaugauguaagagucacacugcuucaacu

SEQ ID NO: 395918 - RNA, 32 nt, Homo Sapiens
aauuauauaaaggaguucaaauacuauagcug

SEQ ID NO: 395919 - RNA, 32 nt, Homo Sapiens
acgcugcuuccccacucucuccccuccccuca

SEQ ID NO: 395920 - RNA, 32 nt, Homo Sapiens
ugagccccgccuguccgcacaguguccgccca

SEQ ID NO: 395921 - RNA, 32 nt, Homo Sapiens
cagaccaaggcuuccauuugcugcugacacau

SEQ ID NO: 395922 - RNA, 32 nt, Homo Sapiens
gagggagcagcaacuggaagguagaauagucu

SEQ ID NO: 395923 - RNA, 32 nt, Homo Sapiens
ucuuucuuucuuucuuuuuuugagacagaauc

SEQ ID NO: 395924 - RNA, 32 nt, Homo Sapiens
cuaaaggacuaacauaaaaucugugaauuaaa

SEQ ID NO: 395925 - RNA, 32 nt, Homo Sapiens
ccauuccuaccuugcauuuuuccugucagugc

SEQ ID NO: 395926 - RNA, 32 nt, Homo Sapiens
cacagugagccugggacgggggcagagcgcac

SEQ ID NO: 395927 - RNA, 32 nt, Homo Sapiens
gcuaucaggagaaagcuugguucugugaacaa

SEQ ID NO: 395928 - RNA, 32 nt, Homo Sapiens
uaagggaaccccggggaaugggaggacaggau

SEQ ID NO: 395929 - RNA, 32 nt, Homo Sapiens
ucugccuggagugggggcgccgggcacugucc

SEQ ID NO: 395930 - RNA, 32 nt, Homo Sapiens
gucucugagaaaaaaggauggaacuauggguu

SEQ ID NO: 395931 - RNA, 32 nt, Homo Sapiens
agguaaggucuugugagcacaacagcaaaaag

SEQ ID NO: 395932 - RNA, 32 nt, Homo Sapiens
gggucagcgcgauuggccggggcccgcgcgag

SEQ ID NO: 395933 - RNA, 32 nt, Homo Sapiens
gaugcccugugcugccucggaaccugcagggu

SEQ ID NO: 395934 - RNA, 32 nt, Homo Sapiens
guuaacaguaaaaauuucuuccacguaauuca

SEQ ID NO: 395935 - RNA, 32 nt, Homo Sapiens
gcugaguugcaggugggaacugucaucacgca

SEQ ID NO: 395936 - RNA, 32 nt, Homo Sapiens
aaguuuacaaugcaguagcauuuuggggugua

SEQ ID NO: 395937 - RNA, 32 nt, Homo Sapiens
ggggggcuccucaggaccuagagaugugccug

SEQ ID NO: 395938 - RNA, 32 nt, Homo Sapiens
gaugcugauugguacauaaaucuuuuacaugg

SEQ ID NO: 395939 - RNA, 32 nt, Homo Sapiens
agggagacaggcccaacccacccccauuugca

SEQ ID NO: 395940 - RNA, 32 nt, Homo Sapiens
caugacccgggcggcggccgcgaaggucgcgg

SEQ ID NO: 395941 - RNA, 32 nt, Homo Sapiens
gguuuuuguguaagauucuugcuguagcgugg

SEQ ID NO: 395942 - RNA, 32 nt, Homo Sapiens
uucugggcuccagccaucuuuguggaaagggg

SEQ ID NO: 395943 - RNA, 32 nt, Homo Sapiens
agugaggaaggaucuuuguugacagguugaau

SEQ ID NO: 395944 - RNA, 32 nt, Homo Sapiens
uucacuucucauaccccuuuccuuccacuuga

SEQ ID NO: 395945 - RNA, 32 nt, Homo Sapiens
auuuguguuucugaaauuucuacaauuaauaa

SEQ ID NO: 395946 - RNA, 32 nt, Homo Sapiens
cucuugggaaauuagcagauagucuuugcucu

SEQ ID NO: 395947 - RNA, 32 nt, Homo Sapiens
ggcuggucucgaacugcugaccucaaguaauc

SEQ ID NO: 395948 - RNA, 32 nt, Homo Sapiens
guggguugcaagacaggaagaaaggaaaagga

SEQ ID NO: 395949 - RNA, 32 nt, Homo Sapiens
ugagcuuugggggcugauacaaagccacugcc

SEQ ID NO: 395950 - RNA, 32 nt, Homo Sapiens
gauagacgauucagagauagauaauguuccaa

SEQ ID NO: 395951 - RNA, 32 nt, Homo Sapiens
auaucacaaaggacacagaugaacuaguuuau

SEQ ID NO: 395952 - RNA, 32 nt, Homo Sapiens
auuuguuuaaguggcuaacauccaaacgacug

SEQ ID NO: 395953 - RNA, 32 nt, Homo Sapiens
uggcugguuucucccuaagcagcccucagcac

SEQ ID NO: 395954 - RNA, 32 nt, Homo Sapiens
uccuccaggagcuucuuguuuccuuguuaggg

SEQ ID NO: 395955 - RNA, 32 nt, Homo Sapiens
ccugugagcugacugaauguugguaggugcuc

SEQ ID NO: 395956 - RNA, 32 nt, Homo Sapiens
aauguagcuggguggcaccuaccuaguugcua

SEQ ID NO: 395957 - RNA, 32 nt, Homo Sapiens
cugggcgccauggcgcuccccggagcccgggc

SEQ ID NO: 395958 - RNA, 32 nt, Homo Sapiens
ccgcgccuggcgggcuccgcccgagccucugg

SEQ ID NO: 395959 - RNA, 32 nt, Homo Sapiens
ugcuuuucuagcuguuuuuaccuaguuagcuu

SEQ ID NO: 395960 - RNA, 32 nt, Homo Sapiens
aaaaaccacacgcuguuuagacccaaaccaag

SEQ ID NO: 395961 - RNA, 32 nt, Homo Sapiens
cuuaguacugucuauuuacaaacacguaaaaa

SEQ ID NO: 395962 - RNA, 32 nt, Homo Sapiens
ggcacggcaucccgaggacagcagccaugugg

SEQ ID NO: 395963 - RNA, 32 nt, Homo Sapiens
aacuguucaggccccagggaaaccagggaaaa

SEQ ID NO: 395964 - RNA, 32 nt, Homo Sapiens
aauuuuauucagauaaucuguaccucaucaau

SEQ ID NO: 395965 - RNA, 32 nt, Homo Sapiens
gacagguuaccauagacuuggggcacuugugg

SEQ ID NO: 395966 - RNA, 32 nt, Homo Sapiens
ccgaguuagucuaucucucuuugccuaucucg

SEQ ID NO: 395967 - RNA, 31 nt, Homo Sapiens
caggagaaucgcuugaaccagggagucagag

SEQ ID NO: 395968 - RNA, 30 nt, Homo Sapiens
gccucggcgcccgggaccgagcgcgucgcu

SEQ ID NO: 395969 - RNA, 32 nt, Homo Sapiens
ccaacauguuacauggagaccuuguauguaaa

SEQ ID NO: 395970 - RNA, 32 nt, Homo Sapiens
uccagcaugagguucuuagaaugacagguguu

SEQ ID NO: 395971 - RNA, 32 nt, Homo Sapiens
ugggcugcccuggcccgggauugauguagccc

SEQ ID NO: 395972 - RNA, 32 nt, Homo Sapiens
ggacgccggcaccgugagauggcgcccguggc

SEQ ID NO: 395973 - RNA, 32 nt, Homo Sapiens
ugaccucaaugagauggccagguauguuuauc

SEQ ID NO: 395974 - RNA, 32 nt, Homo Sapiens
guaacuucagagucauuggauaaaguuuguuc

SEQ ID NO: 395975 - RNA, 32 nt, Homo Sapiens
gugaguggauugcuugaguccuggaguuugag

SEQ ID NO: 395976 - RNA, 32 nt, Homo Sapiens
aaccccgauuaaugucuguacgucaccuuucc

SEQ ID NO: 395977 - RNA, 32 nt, Homo Sapiens
cuuuaggauugugaugguucguucuguuuaca

SEQ ID NO: 395978 - RNA, 32 nt, Homo Sapiens
gcugguugccugcggcguccacuuccuuggcc

SEQ ID NO: 395979 - RNA, 32 nt, Homo Sapiens
accugccccagccccaggacucugagugcagc

SEQ ID NO: 395980 - RNA, 32 nt, Homo Sapiens
acucccgggcugggcuuuugaauuggccuugg

SEQ ID NO: 395981 - RNA, 32 nt, Homo Sapiens
ccuccggcucugcgcucaccugcugccuagug

SEQ ID NO: 395982 - RNA, 32 nt, Homo Sapiens
uuaucugucauucaagauccuuccuucaaccc

SEQ ID NO: 395983 - RNA, 32 nt, Homo Sapiens
uacaugcagauuuuuguaauaaaggcuauuuc

SEQ ID NO: 395984 - RNA, 32 nt, Homo Sapiens
uucgagcuguggaaauccaaacaaagacugau

SEQ ID NO: 395985 - RNA, 32 nt, Homo Sapiens
uggcuaaguuuuuauugaaacacucaaaaaua

SEQ ID NO: 395986 - RNA, 32 nt, Homo Sapiens
ggagaaaauagucagcacaaagggguaagagc

SEQ ID NO: 395987 - RNA, 32 nt, Homo Sapiens
ucccuccuccuaccccaccuccuccaucuggg

SEQ ID NO: 395988 - RNA, 32 nt, Homo Sapiens
uuucccgaagugcccggcccgacgggggcgac

SEQ ID NO: 395989 - RNA, 32 nt, Homo Sapiens
gccugucagaggucgugaacggcugaggcaga

SEQ ID NO: 395990 - RNA, 32 nt, Homo Sapiens
aacuacuaaacuaauaucugcauucuuguuaa

SEQ ID NO: 395991 - RNA, 32 nt, Homo Sapiens
cgguacaggcaaagaggagccuguugucuguu

SEQ ID NO: 395992 - RNA, 32 nt, Homo Sapiens
acgcuccacgcggaagguagagggcaggggcc

SEQ ID NO: 395993 - RNA, 32 nt, Homo Sapiens
cuuuccccaucccuacccccaccccagugucu

SEQ ID NO: 395994 - RNA, 32 nt, Homo Sapiens
agccaagguuuacggagccccggaugguugcc

SEQ ID NO: 395995 - RNA, 32 nt, Homo Sapiens
cagugaagaacugggcucuguucugguaccug

SEQ ID NO: 395996 - RNA, 32 nt, Homo Sapiens
uaaaaggcauauauuuuucaaagaagugagga

SEQ ID NO: 395997 - RNA, 32 nt, Homo Sapiens
gacucgugcccccacucccgggugcugacagc

SEQ ID NO: 395998 - RNA, 32 nt, Homo Sapiens
ccaaaggucaagaacacagugauuuuauuaga

SEQ ID NO: 395999 - RNA, 32 nt, Homo Sapiens
gcccgcggcagccugcgccgcgccauggccac

SEQ ID NO: 396000 - RNA, 32 nt, Homo Sapiens
cccuucuggccaagcauggcggugcugugcag

SEQ ID NO: 396001 - RNA, 32 nt, Homo Sapiens
aguacccagaacuaugccuggagcacgcacga

SEQ ID NO: 396002 - RNA, 32 nt, Homo Sapiens
aaugcagcuuucaaaucauuggggggagaaaa

SEQ ID NO: 396003 - RNA, 32 nt, Homo Sapiens
uugccauaccuugaaauuguccugcaaagucu

SEQ ID NO: 396004 - RNA, 32 nt, Homo Sapiens
gcuccgcggccuggaguggcucugccggggca

SEQ ID NO: 396005 - RNA, 32 nt, Homo Sapiens
cuuucaucuucaggauuuacagugcauucuga

SEQ ID NO: 396006 - RNA, 32 nt, Homo Sapiens
caccugaaggucggccgugauccguuaaagau

SEQ ID NO: 396007 - RNA, 32 nt, Homo Sapiens
gauuugaaugauuuuucauuggcuuagggcag

SEQ ID NO: 396008 - RNA, 32 nt, Homo Sapiens
caaaaucaaacaaacaggaauaaaaaccaaac

SEQ ID NO: 396009 - RNA, 32 nt, Homo Sapiens
ucaagauauggaagcugauuucugaaaaugcu

SEQ ID NO: 396010 - RNA, 32 nt, Homo Sapiens
agcuuggagagccgggggcgcagcuuggagau

SEQ ID NO: 396011 - RNA, 32 nt, Homo Sapiens
gcacccggcccgugaaggucuuuucugaaggg

SEQ ID NO: 396012 - RNA, 32 nt, Homo Sapiens
uauuugauucagagcaugaugcuuacuuguua

SEQ ID NO: 396013 - RNA, 32 nt, Homo Sapiens
augcugccugcgccagaagagcuuugcugggc

SEQ ID NO: 396014 - RNA, 32 nt, Homo Sapiens
uugacaccaaaaugaaccuugcuaucaagaaa

SEQ ID NO: 396015 - RNA, 32 nt, Homo Sapiens
ggugcucauuuuuucuucuccuaaaacuuuaa

SEQ ID NO: 396016 - RNA, 27 nt, Homo Sapiens
aaacauuuuugcuccagcccccauccc

SEQ ID NO: 396017 - RNA, 32 nt, Homo Sapiens
uguucuguagcaagggggaauauuuuaaaaau

SEQ ID NO: 396018 - RNA, 32 nt, Homo Sapiens
uuauucuuaaaauggcgccgcuagaccuggac

SEQ ID NO: 396019 - RNA, 32 nt, Homo Sapiens
cagacaggccuugcuggguuuccccacucagu

SEQ ID NO: 396020 - RNA, 32 nt, Homo Sapiens
caccugccgcgugcaccugcaugacacacgca

SEQ ID NO: 396021 - RNA, 32 nt, Homo Sapiens
ugugucuuuuuuuuuuuuuuuaauguaucuua

SEQ ID NO: 396022 - RNA, 32 nt, Homo Sapiens
caccuggacucugcccauccacagcugacaga

SEQ ID NO: 396023 - RNA, 32 nt, Homo Sapiens
ucuuaaacaugauccuucucuccucauucuuc

SEQ ID NO: 396024 - RNA, 32 nt, Homo Sapiens
aaaguacuuugugggaaccuuuauuacuguga

SEQ ID NO: 396025 - RNA, 32 nt, Homo Sapiens
uggcugggcaaguggaagacagagcacuggcu

SEQ ID NO: 396026 - RNA, 32 nt, Homo Sapiens
agcuugaggagcugggaagcucugguggaugc

SEQ ID NO: 396027 - RNA, 32 nt, Homo Sapiens
gccucagagaugcuaccgcugcugcugccccu

SEQ ID NO: 396028 - RNA, 32 nt, Homo Sapiens
uucaagaugcuucauggugcccgguaccaucu

SEQ ID NO: 396029 - RNA, 32 nt, Homo Sapiens
cucaaaucauaucccucuuauuuuuuaugauu

SEQ ID NO: 396030 - RNA, 32 nt, Homo Sapiens
cacgacugcacuccagccugggcaauggagug

SEQ ID NO: 396031 - RNA, 32 nt, Homo Sapiens
ugcaggucucaacccuuuugucugccucuuag

SEQ ID NO: 396032 - RNA, 32 nt, Homo Sapiens
gcagccucaaguauccguccacuucccacacu

SEQ ID NO: 396033 - RNA, 31 nt, Homo Sapiens
auuuagcaagccacugaauuugaguuuucac

SEQ ID NO: 396034 - RNA, 32 nt, Homo Sapiens
aggcuugaugaugaugguguuggugaaaauaa

SEQ ID NO: 396035 - RNA, 32 nt, Homo Sapiens
ucauaagaugacacuggagaagaauaucaaau

SEQ ID NO: 396036 - RNA, 32 nt, Homo Sapiens
uuaauuuuucuuugaaccuauccagaugguac

SEQ ID NO: 396037 - RNA, 32 nt, Homo Sapiens
ggacuaagagugugggaaauaauugucccauc

SEQ ID NO: 396038 - RNA, 32 nt, Homo Sapiens
uccuccgcccgcucauggcccgggccgccgcg

SEQ ID NO: 396039 - RNA, 32 nt, Homo Sapiens
ccgugaaagcccccaacaccacgacaauccag

SEQ ID NO: 396040 - RNA, 32 nt, Homo Sapiens
uaugaugauaugagauucuuuaugaaagaaca

SEQ ID NO: 396041 - RNA, 32 nt, Homo Sapiens
accucugugcccgacaucagacgcugccagcu

SEQ ID NO: 396042 - RNA, 32 nt, Homo Sapiens
aguauuauauccucaccccacccgugccugug

SEQ ID NO: 396043 - RNA, 32 nt, Homo Sapiens
cucugucccuaggcugccccaggcccugugca

SEQ ID NO: 396044 - RNA, 32 nt, Homo Sapiens
agccugacugggaacaggauccugugaaagcu

SEQ ID NO: 396045 - RNA, 32 nt, Homo Sapiens
cuugauaaaacucuguaauguuacuacaauaa

SEQ ID NO: 396046 - RNA, 32 nt, Homo Sapiens
ccuucuuccgccggccccgccgccggccaugc

SEQ ID NO: 396047 - RNA, 32 nt, Homo Sapiens
guacagggaagucugacacagccucuccagcc

SEQ ID NO: 396048 - RNA, 32 nt, Homo Sapiens
auuuuuugaagaagcauuucuguaaaauuaga

SEQ ID NO: 396049 - RNA, 32 nt, Homo Sapiens
acgcccuccccgagacccuggagacgcggcuc

SEQ ID NO: 396050 - RNA, 32 nt, Homo Sapiens
cggaaagcccgcgccacccgcgcucgcggcag

SEQ ID NO: 396051 - RNA, 32 nt, Homo Sapiens
cgcuucagacugcggggcaagcgggccgcggc

SEQ ID NO: 396052 - RNA, 32 nt, Homo Sapiens
acguggcagggccagcagcagacccugggccu

SEQ ID NO: 396053 - RNA, 32 nt, Homo Sapiens
aggaaagggaggaggggaaucauguuauagac

SEQ ID NO: 396054 - RNA, 32 nt, Homo Sapiens
gucaugugcugguaaauguuaagccauuuaac

SEQ ID NO: 396055 - RNA, 32 nt, Homo Sapiens
ucuaaaugacuuuggguuuugaacucuccauc

SEQ ID NO: 396056 - RNA, 32 nt, Homo Sapiens
aaugcaaaaaacaaaauaaaauaaucuuccug

SEQ ID NO: 396057 - RNA, 32 nt, Homo Sapiens
ugagaucucacagaugucagaacugcuggaac

SEQ ID NO: 396058 - RNA, 30 nt, Homo Sapiens
cacugcaucauuuggcaccaucuuauugag

SEQ ID NO: 396059 - RNA, 32 nt, Homo Sapiens
uguugaugaugaugauauagaauuguggcuuu

SEQ ID NO: 396060 - RNA, 32 nt, Homo Sapiens
cacacugugaaugggagauacuggucggcugc

SEQ ID NO: 396061 - RNA, 32 nt, Homo Sapiens
agucaggaaaauugcacagaccgacagucgug

SEQ ID NO: 396062 - RNA, 32 nt, Homo Sapiens
uauccugcuagugauuuucucaucuuuccuuu

SEQ ID NO: 396063 - RNA, 32 nt, Homo Sapiens
cagcugcgcccgccccaccuuccuucccaccc

SEQ ID NO: 396064 - RNA, 32 nt, Homo Sapiens
ugggguuuaaguggccacccauccaggcccug

SEQ ID NO: 396065 - RNA, 32 nt, Homo Sapiens
cuaauggucuucugcauuuuuugguuuuugau

SEQ ID NO: 396066 - RNA, 32 nt, Homo Sapiens
ccucuccaugcugcaccugcagaagaacagca

SEQ ID NO: 396067 - RNA, 32 nt, Homo Sapiens
uggccuuccgcggagacuucauccaggugggc

SEQ ID NO: 396068 - RNA, 32 nt, Homo Sapiens
aggaugaaaugaaugacugucccagaaugaga

SEQ ID NO: 396069 - RNA, 32 nt, Homo Sapiens
cagauaaaauguacagauguuucauauauuac

SEQ ID NO: 396070 - RNA, 32 nt, Homo Sapiens
agguucccacuggaaaaucaauggaaagcaaa

SEQ ID NO: 396071 - RNA, 32 nt, Homo Sapiens
aacaacuagauuauuuguccuuucucaguaua

SEQ ID NO: 396072 - RNA, 32 nt, Homo Sapiens
ugcucugagacugguuccuagcagccaccuuu

SEQ ID NO: 396073 - RNA, 32 nt, Homo Sapiens
cgggcccugugcugggggugguagaaaggaug

SEQ ID NO: 396074 - RNA, 32 nt, Homo Sapiens
caacacugugaauguaaugaaugccacugaau

SEQ ID NO: 396075 - RNA, 32 nt, Homo Sapiens
cccaggugugguggggaggggaggcaggugug

SEQ ID NO: 396076 - RNA, 32 nt, Homo Sapiens
uguuccuacagguuaaaauaucugcugccuau

SEQ ID NO: 396077 - RNA, 31 nt, Homo Sapiens
cuuuuucuccucucagcucauacauaacaca

SEQ ID NO: 396078 - RNA, 32 nt, Homo Sapiens
ccacugcacccggcgaggcauuuuuuacuguc

SEQ ID NO: 396079 - RNA, 32 nt, Homo Sapiens
gcaggagggaaccauuagcagccugaggagcu

SEQ ID NO: 396080 - RNA, 32 nt, Homo Sapiens
uuaaguucccauuugaaauugcuggcgcugcu

SEQ ID NO: 396081 - RNA, 32 nt, Homo Sapiens
gcgagggcaccucggcagcccccacggguugg

SEQ ID NO: 396082 - RNA, 27 nt, Homo Sapiens
caauucucccgccucagcccccugagu

SEQ ID NO: 396083 - RNA, 32 nt, Homo Sapiens
aguuggccugcgccugcacgcugggaggcuug

SEQ ID NO: 396084 - RNA, 32 nt, Homo Sapiens
gcggccgccgagacguccccggcacgcugaug

SEQ ID NO: 396085 - RNA, 32 nt, Homo Sapiens
cccugaaguggcuuugacguggggccguccca

SEQ ID NO: 396086 - RNA, 32 nt, Homo Sapiens
aagaaagcugucuaggguuuuaccauugaagg

SEQ ID NO: 396087 - RNA, 32 nt, Homo Sapiens
uuaaaugcuuggucugucuugauguucaguac

SEQ ID NO: 396088 - RNA, 32 nt, Homo Sapiens
uagagcaauuuaacaugugaauaggcaaucca

SEQ ID NO: 396089 - RNA, 32 nt, Homo Sapiens
cugauagggaagcucaaguuggccacccaagu

SEQ ID NO: 396090 - RNA, 32 nt, Homo Sapiens
augaggcuccugcucugauuuccuccuugccu

SEQ ID NO: 396091 - RNA, 32 nt, Homo Sapiens
ccuaaugauggacuuuuaaguuguuuccuuuu

SEQ ID NO: 396092 - RNA, 32 nt, Homo Sapiens
uuacauaguguaguguuauauuagccaacccc

SEQ ID NO: 396093 - RNA, 32 nt, Homo Sapiens
cgaaauuucuucugcaccuuggcuauucuguu

SEQ ID NO: 396094 - RNA, 32 nt, Homo Sapiens
accggagccaucuugggcccggcgcgcagacc

SEQ ID NO: 396095 - RNA, 32 nt, Homo Sapiens
gaguuucgcucuugaugcccagcaggcuagag

SEQ ID NO: 396096 - RNA, 32 nt, Homo Sapiens
uacaccuguguucucccaacccuuggaggaaa

SEQ ID NO: 396097 - RNA, 30 nt, Homo Sapiens
uugcuuagguuagggggggaaaaagauuuc

SEQ ID NO: 396098 - RNA, 32 nt, Homo Sapiens
uugcaaagaaccagugugacuccagucaagaa

SEQ ID NO: 396099 - RNA, 32 nt, Homo Sapiens
aucucguacaagccugaugaugcaacaaggau

SEQ ID NO: 396100 - RNA, 32 nt, Homo Sapiens
gcccaccccucccccugucugccugcccuccc

SEQ ID NO: 396101 - RNA, 32 nt, Homo Sapiens
uucucuaccacugcucuuucucaugauuauuu

SEQ ID NO: 396102 - RNA, 32 nt, Homo Sapiens
gcuuuguguuccucucccagcuccaucucuuu

SEQ ID NO: 396103 - RNA, 32 nt, Homo Sapiens
ggaguagaaaagacaaaauaugaauuuaaauu

SEQ ID NO: 396104 - RNA, 32 nt, Homo Sapiens
gccaugucucagcuccagacugagaggacgca

SEQ ID NO: 396105 - RNA, 32 nt, Homo Sapiens
uugaagggauucaacaaaauuaucucuagcau

SEQ ID NO: 396106 - RNA, 32 nt, Homo Sapiens
gggaacugcuccauggggucugggagagcagc

SEQ ID NO: 396107 - RNA, 32 nt, Homo Sapiens
uagaggcccuuacaccaauuauaagcaaccuu

SEQ ID NO: 396108 - RNA, 32 nt, Homo Sapiens
aggaaauguucaacaauucugugaaaggucac

SEQ ID NO: 396109 - RNA, 32 nt, Homo Sapiens
gagccccgugggugggggcagggcaugaguuc

SEQ ID NO: 396110 - RNA, 32 nt, Homo Sapiens
ugaaugaagggagaacaggcacaggacuuaau

SEQ ID NO: 396111 - RNA, 32 nt, Homo Sapiens
cagcucucaggucagcagcagaggcuccuggc

SEQ ID NO: 396112 - RNA, 32 nt, Homo Sapiens
aaauguuuuaucacucaaaaauccauuagaag

SEQ ID NO: 396113 - RNA, 32 nt, Homo Sapiens
cuuuaaacuccaguggcuggccaggcacggua

SEQ ID NO: 396114 - RNA, 32 nt, Homo Sapiens
uuacuuuguaaauucguguguauuuaguacac

SEQ ID NO: 396115 - RNA, 32 nt, Homo Sapiens
gauaugagggaagagccaaauagacuacaaau

SEQ ID NO: 396116 - RNA, 32 nt, Homo Sapiens
gagggcaggaggaagccaggcaugucuuuuau

SEQ ID NO: 396117 - RNA, 32 nt, Homo Sapiens
gugagucaccuguggauaggagggcugaguga

SEQ ID NO: 396118 - RNA, 32 nt, Homo Sapiens
aguggccgcccaggcgcgaccagaucugggug

SEQ ID NO: 396119 - RNA, 32 nt, Homo Sapiens
uuuuauagaaauuuuuuauacugauugguuca

SEQ ID NO: 396120 - RNA, 32 nt, Homo Sapiens
aagccugcacacacacuuccuguccacagggg

SEQ ID NO: 396121 - RNA, 32 nt, Homo Sapiens
auguggcaagcaccacccgccgaccacacgcc

SEQ ID NO: 396122 - RNA, 32 nt, Homo Sapiens
aggaacagacccucacucucucugucagaaaa

SEQ ID NO: 396123 - RNA, 32 nt, Homo Sapiens
ugugggaaagacugcaguccuucacuacaugg

SEQ ID NO: 396124 - RNA, 32 nt, Homo Sapiens
aagaggggaccgagcgcccaccccaggacucc

SEQ ID NO: 396125 - RNA, 32 nt, Homo Sapiens
uucagccgucaucauuggguucuguuuugaca

SEQ ID NO: 396126 - RNA, 32 nt, Homo Sapiens
accacuugcccagacuggggccccucaggcac

SEQ ID NO: 396127 - RNA, 32 nt, Homo Sapiens
cacacacccuuucucgcacacacacacacaca

SEQ ID NO: 396128 - RNA, 32 nt, Homo Sapiens
acaucacucugcagacagcaaugugacucagc

SEQ ID NO: 396129 - RNA, 32 nt, Homo Sapiens
gagcaguguucuauguaugaaugccacauuuu

SEQ ID NO: 396130 - RNA, 32 nt, Homo Sapiens
agcaguccacugacaggauagccuguucugug

SEQ ID NO: 396131 - RNA, 32 nt, Homo Sapiens
ccucccccauucuccagaucucccucugucuc

SEQ ID NO: 396132 - RNA, 32 nt, Homo Sapiens
acugaagaauccagggaguuugaaaguuguug

SEQ ID NO: 396133 - RNA, 32 nt, Homo Sapiens
aucuaaauucugguaacuauuaaaagacagau

SEQ ID NO: 396134 - RNA, 32 nt, Homo Sapiens
auagauaaccaccuuuaauauuacacugcuua

SEQ ID NO: 396135 - RNA, 32 nt, Homo Sapiens
cccgcccucuucuggcagcuuugauugguggg

SEQ ID NO: 396136 - RNA, 32 nt, Homo Sapiens
aaggaaauaugacuuugauucuucggaggugc

SEQ ID NO: 396137 - RNA, 32 nt, Homo Sapiens
ggaggauguggaggggcggggcagaggggucc

SEQ ID NO: 396138 - RNA, 32 nt, Homo Sapiens
cagaagagcgcggcgccccuagccaucuuuau

SEQ ID NO: 396139 - RNA, 32 nt, Homo Sapiens
cugggaaggggaggaaacgcacucacuacagg

SEQ ID NO: 396140 - RNA, 32 nt, Homo Sapiens
cccggcucgguggcuucgcaccggagcccggg

SEQ ID NO: 396141 - RNA, 30 nt, Homo Sapiens
cagccaugaacaccaacgaugccaaggagu

SEQ ID NO: 396142 - RNA, 32 nt, Homo Sapiens
aggacugauucauagccauaccucugauggac

SEQ ID NO: 396143 - RNA, 32 nt, Homo Sapiens
guucagacugaaacuggagaaauuaugacuau

SEQ ID NO: 396144 - RNA, 31 nt, Homo Sapiens
augaaaagcuguagcccuccaaggucuggga

SEQ ID NO: 396145 - RNA, 32 nt, Homo Sapiens
uacucauagaaagggcaaguaacguguucauu

SEQ ID NO: 396146 - RNA, 32 nt, Homo Sapiens
uuuaccuuaaauagcugugacucuucaaagua

SEQ ID NO: 396147 - RNA, 32 nt, Homo Sapiens
gcuacguguacaaagcugugcaacgcugacca

SEQ ID NO: 396148 - RNA, 28 nt, Homo Sapiens
ccuggugggcggccugaggugagagccc

SEQ ID NO: 396149 - RNA, 32 nt, Homo Sapiens
gaucccgaagcacagagacauaaaaaaggucu

SEQ ID NO: 396150 - RNA, 32 nt, Homo Sapiens
uggcguccucccuucgccccagcuagcuugag

SEQ ID NO: 396151 - RNA, 32 nt, Homo Sapiens
cacccgggcugccugccccugcugcuugggac

SEQ ID NO: 396152 - RNA, 32 nt, Homo Sapiens
gaagggccacagccuucauuucuaggagugcu

SEQ ID NO: 396153 - RNA, 32 nt, Homo Sapiens
cccccaccccagcacagcuccuccccugccgc

SEQ ID NO: 396154 - RNA, 31 nt, Homo Sapiens
aaaaggaaauaaaagcuuuuuauuucauggc

SEQ ID NO: 396155 - RNA, 32 nt, Homo Sapiens
ggugucuccgcgucgcugggugggacuuggcu

SEQ ID NO: 396156 - RNA, 32 nt, Homo Sapiens
uuucagugggcguggaggacuggccuuggccc

SEQ ID NO: 396157 - RNA, 32 nt, Homo Sapiens
aacaaggaauaauuucucuaaugguuuauuau

SEQ ID NO: 396158 - RNA, 32 nt, Homo Sapiens
aguaagggacucuggagcuuaaacagaccauc

SEQ ID NO: 396159 - RNA, 32 nt, Homo Sapiens
aauguguuugggacacucuauagucuucugug

SEQ ID NO: 396160 - RNA, 32 nt, Homo Sapiens
guuuauucaaagucagagauagauaacgccuu

SEQ ID NO: 396161 - RNA, 32 nt, Homo Sapiens
uagcuaauuuuuguauuuuuuguagagaugga

SEQ ID NO: 396162 - RNA, 31 nt, Homo Sapiens
agggcagcacacggccagccccgcggccugg

SEQ ID NO: 396163 - RNA, 32 nt, Homo Sapiens
ggggguucccccugcugaggagagaccaggug

SEQ ID NO: 396164 - RNA, 32 nt, Homo Sapiens
aucauuugcaugucuagcuggagaauaaaaau

SEQ ID NO: 396165 - RNA, 32 nt, Homo Sapiens
aagaaguggcugccccuugcuggaccugaauu

SEQ ID NO: 396166 - RNA, 32 nt, Homo Sapiens
ucaacuaauauuuguugaacacuuacauguac

SEQ ID NO: 396167 - RNA, 32 nt, Homo Sapiens
auuauuuucuucauauuguagauuuucugcag

SEQ ID NO: 396168 - RNA, 32 nt, Homo Sapiens
ucucuguuguacacuuucaaucaacacuuuuu

SEQ ID NO: 396169 - RNA, 32 nt, Homo Sapiens
ugagcaagaacaaagaccguaaaugaagaagg

SEQ ID NO: 396170 - RNA, 32 nt, Homo Sapiens
caagaaaugauucaaauugcugcuuggauuuu

SEQ ID NO: 396171 - RNA, 32 nt, Homo Sapiens
ccggggaccuugugggaccagucccacaccgc

SEQ ID NO: 396172 - RNA, 32 nt, Homo Sapiens
aaaauacaaaaauuagccuggugugguggugc

SEQ ID NO: 396173 - RNA, 32 nt, Homo Sapiens
aggccccaggacugugggggccccucagguca

SEQ ID NO: 396174 - RNA, 32 nt, Homo Sapiens
uaagaaauauuuccaaaacuaaaggaauuucu

SEQ ID NO: 396175 - RNA, 32 nt, Homo Sapiens
cacugcccgcggcgccacugaccaugucggag

SEQ ID NO: 396176 - RNA, 32 nt, Homo Sapiens
aggacuagggacagggcugugccggccugggc

SEQ ID NO: 396177 - RNA, 32 nt, Homo Sapiens
ucccaaauauuguauaaccacacacauuauuc

SEQ ID NO: 396178 - RNA, 32 nt, Homo Sapiens
cuggcagcccucacugcaggaggaagggugga

SEQ ID NO: 396179 - RNA, 32 nt, Homo Sapiens
uucacuuaaacucuuauuacuguauagauuaa

SEQ ID NO: 396180 - RNA, 32 nt, Homo Sapiens
uuugggaaauaccaaagaggcuuugauugaau

SEQ ID NO: 396181 - RNA, 32 nt, Homo Sapiens
gacgaccugcccgucuccgccgccggcggccc

SEQ ID NO: 396182 - RNA, 32 nt, Homo Sapiens
ggggcgguggucgggccgcgcaagcggagaug

SEQ ID NO: 396183 - RNA, 32 nt, Homo Sapiens
uuuucagcacccccacccaccuccacccagcc

SEQ ID NO: 396184 - RNA, 32 nt, Homo Sapiens
ugguccccgggcgggggaggggccgugcgcag

SEQ ID NO: 396185 - RNA, 32 nt, Homo Sapiens
cccaacucugcagggcuucucucccugccacc

SEQ ID NO: 396186 - RNA, 32 nt, Homo Sapiens
caggugcuccggaagcagcaucagggcucuug

SEQ ID NO: 396187 - RNA, 32 nt, Homo Sapiens
uuugagugcaguuuggucugaccccucaagag

SEQ ID NO: 396188 - RNA, 32 nt, Homo Sapiens
cuggccccuccaauccuccccgcucugccgcc

SEQ ID NO: 396189 - RNA, 32 nt, Homo Sapiens
uuauuuuuuaugucugauuuaguucacauagg

SEQ ID NO: 396190 - RNA, 32 nt, Homo Sapiens
uauauaaaagucugaguucucuuucuuagucc

SEQ ID NO: 396191 - RNA, 32 nt, Homo Sapiens
aagauggggcaagggacagaaaaaauaucugu

SEQ ID NO: 396192 - RNA, 32 nt, Homo Sapiens
cugagggcuaaaacuuuuuucacuuuucuucu

SEQ ID NO: 396193 - RNA, 32 nt, Homo Sapiens
ucucgcccccggaaacaugacucgcgauuuca

SEQ ID NO: 396194 - RNA, 32 nt, Homo Sapiens
aacaccuucagucccggcagucgcgggcgugg

SEQ ID NO: 396195 - RNA, 32 nt, Homo Sapiens
ugcuucacaucagacugaaauccuaauuacag

SEQ ID NO: 396196 - RNA, 32 nt, Homo Sapiens
uauagaacaaauaaagauaaucuaggauuaua

SEQ ID NO: 396197 - RNA, 27 nt, Homo Sapiens
cgauucuccugccucagccccccaagu

SEQ ID NO: 396198 - RNA, 32 nt, Homo Sapiens
aagggagcggcggggggcaggggccccggauu

SEQ ID NO: 396199 - RNA, 32 nt, Homo Sapiens
uccgagccccaggcagcggugauucagcccug

SEQ ID NO: 396200 - RNA, 32 nt, Homo Sapiens
gacuauuaauaaauaagacuguaguguagaua

SEQ ID NO: 396201 - RNA, 32 nt, Homo Sapiens
aaguggaagaucugcuggguuucaggaaaagg

SEQ ID NO: 396202 - RNA, 32 nt, Homo Sapiens
agccagcauagggacaucccccugcagccuuc

SEQ ID NO: 396203 - RNA, 32 nt, Homo Sapiens
cccggggaaaccgugaaauguuguguacacac

SEQ ID NO: 396204 - RNA, 32 nt, Homo Sapiens
augggguuucaccauguuggacaggcuggucu

SEQ ID NO: 396205 - RNA, 32 nt, Homo Sapiens
cgagcgcacagcccgccuccuuccgcggcgcc

SEQ ID NO: 396206 - RNA, 32 nt, Homo Sapiens
uuuuucagaucuucaauaaauuuuuucuuuaa

SEQ ID NO: 396207 - RNA, 32 nt, Homo Sapiens
aaaucaugucuuugaacauuuauuagguucac

SEQ ID NO: 396208 - RNA, 32 nt, Homo Sapiens
gcugaucccagcugugugucaccagaagcuuu

SEQ ID NO: 396209 - RNA, 32 nt, Homo Sapiens
gauguuuauauguuuuguagagacgagguuuc

SEQ ID NO: 396210 - RNA, 32 nt, Homo Sapiens
cucccuggccccagccauccugaccccucuca

SEQ ID NO: 396211 - RNA, 32 nt, Homo Sapiens
uaguuucauccucucccacaccagcuggguug

SEQ ID NO: 396212 - RNA, 32 nt, Homo Sapiens
cgagaaccugaauaaaucaugccacuauauua

SEQ ID NO: 396213 - RNA, 32 nt, Homo Sapiens
agaaggaaagaugucauucaaguauuuuucaa

SEQ ID NO: 396214 - RNA, 32 nt, Homo Sapiens
uuccuaaaaacaguuuuguaaaauuaguauug

SEQ ID NO: 396215 - RNA, 32 nt, Homo Sapiens
caccucugccuggcagaagguguuaugcuuuu

SEQ ID NO: 396216 - RNA, 32 nt, Homo Sapiens
gccuucucuuucuccuucacugccucaaguua

SEQ ID NO: 396217 - RNA, 32 nt, Homo Sapiens
auuuucaaaggaaaaauaaaaugaaaguacuu

SEQ ID NO: 396218 - RNA, 32 nt, Homo Sapiens
gagcacgggucaccugcggcgccggcccgggc

SEQ ID NO: 396219 - RNA, 32 nt, Homo Sapiens
aaugaaaguacauuucacagggugggaguggc

SEQ ID NO: 396220 - RNA, 32 nt, Homo Sapiens
accuggagagccauuaaaaacaacaacuggca

SEQ ID NO: 396221 - RNA, 32 nt, Homo Sapiens
gaugcacugauauauaugcauuugcuguuuug

SEQ ID NO: 396222 - RNA, 32 nt, Homo Sapiens
auuuuuaaaaauuauuuugguuuggaaaaaaa

SEQ ID NO: 396223 - RNA, 32 nt, Homo Sapiens
cauugggaagggcagccccagggugugggaga

SEQ ID NO: 396224 - RNA, 32 nt, Homo Sapiens
agccccagcuccuugacccccaucuaggugcc

SEQ ID NO: 396225 - RNA, 32 nt, Homo Sapiens
caccuuguccgugagggcgcgcggggaccugc

SEQ ID NO: 396226 - RNA, 32 nt, Homo Sapiens
gucuggacugcugggacucgggccccuggggc

SEQ ID NO: 396227 - RNA, 32 nt, Homo Sapiens
ccccacuccacccuguuaguuuuguaaaaacu

SEQ ID NO: 396228 - RNA, 32 nt, Homo Sapiens
cuuaauugaaacaaaguugagauuuuuaagaa

SEQ ID NO: 396229 - RNA, 32 nt, Homo Sapiens
cagccuauuccuuguucccugguggggucugu

SEQ ID NO: 396230 - RNA, 32 nt, Homo Sapiens
gagugcaccgacagaaaacugucagcucugcu

SEQ ID NO: 396231 - RNA, 32 nt, Homo Sapiens
ucaccaguuggaaggcuugugguuucagagag

SEQ ID NO: 396232 - RNA, 32 nt, Homo Sapiens
cccaguaagaaccuggaacuuggggaguuaag

SEQ ID NO: 396233 - RNA, 32 nt, Homo Sapiens
guagauauaaucugaaaagauuguaggcagua

SEQ ID NO: 396234 - RNA, 29 nt, Homo Sapiens
aauaaggacauuauauauuuuuaaguuac

SEQ ID NO: 396235 - RNA, 32 nt, Homo Sapiens
gacaaauguauaggaagaagcaaagucuacag

SEQ ID NO: 396236 - RNA, 32 nt, Homo Sapiens
aauccaagcagcagaaugagccaggaguagca

SEQ ID NO: 396237 - RNA, 32 nt, Homo Sapiens
gcgaggcccugccugccagccgggaaggaggc

SEQ ID NO: 396238 - RNA, 32 nt, Homo Sapiens
gauccagauaaugcugggaaguguggcuacac

SEQ ID NO: 396239 - RNA, 32 nt, Homo Sapiens
gcgcaccucgcgcggcggccgcucccgcugga

SEQ ID NO: 396240 - RNA, 32 nt, Homo Sapiens
accuuuccuuuagcauuagauguaauaaaaua

SEQ ID NO: 396241 - RNA, 32 nt, Homo Sapiens
auggauccagauuguucugagagacgaagaua

SEQ ID NO: 396242 - RNA, 32 nt, Homo Sapiens
aguuccuggggcgguggcugggaccaggccgg

SEQ ID NO: 396243 - RNA, 32 nt, Homo Sapiens
ccaugucccuccccacaccggcccugggcaua

SEQ ID NO: 396244 - RNA, 28 nt, Homo Sapiens
agagggguugccugcaggaugaucggcu

SEQ ID NO: 396245 - RNA, 32 nt, Homo Sapiens
ugagaacucgggccucucacccgccccccagc

SEQ ID NO: 396246 - RNA, 32 nt, Homo Sapiens
gcuguauauaaaauuugcacuggaaauucugu

SEQ ID NO: 396247 - RNA, 32 nt, Homo Sapiens
uagaaauagugaggcuguugugaggugaguca

SEQ ID NO: 396248 - RNA, 32 nt, Homo Sapiens
guugaaauuauguauguuuacauaucaccuca

SEQ ID NO: 396249 - RNA, 32 nt, Homo Sapiens
uuugcaaaaaauauaaaaagaaauaaacuuca

SEQ ID NO: 396250 - RNA, 32 nt, Homo Sapiens
ucucccucccccagcccuucccugaccccuaa

SEQ ID NO: 396251 - RNA, 32 nt, Homo Sapiens
ucauucaguguuggcccagaaacuacaggcug

SEQ ID NO: 396252 - RNA, 32 nt, Homo Sapiens
ccacucuguccuccccuuccggcaguccaggg

SEQ ID NO: 396253 - RNA, 32 nt, Homo Sapiens
auauaaacuccaauuuuaaaucuuaaaauugc

SEQ ID NO: 396254 - RNA, 32 nt, Homo Sapiens
ucauuucuauauuccuugcuuaauuuuuauaa

SEQ ID NO: 396255 - RNA, 32 nt, Homo Sapiens
cuauccauccaucauccguccauccuccaucc

SEQ ID NO: 396256 - RNA, 32 nt, Homo Sapiens
uaaaagucagcauuuucuuagaccucuucagc

SEQ ID NO: 396257 - RNA, 32 nt, Homo Sapiens
gaacgauguaaaauaugguguagaaauucuug

SEQ ID NO: 396258 - RNA, 32 nt, Homo Sapiens
gaggaacaagguaccucuguuggaaaugcaga

SEQ ID NO: 396259 - RNA, 32 nt, Homo Sapiens
cugaaguuauugugguauauaauccuggauua

SEQ ID NO: 396260 - RNA, 32 nt, Homo Sapiens
ucauaaucaggcccauaggaucaauaauuugg

SEQ ID NO: 396261 - RNA, 31 nt, Homo Sapiens
cagugccugcccucagcucucacacaugacu

SEQ ID NO: 396262 - RNA, 32 nt, Homo Sapiens
uguagguagaucuggucuuuagaggcagauag

SEQ ID NO: 396263 - RNA, 32 nt, Homo Sapiens
ugguagcugaaaaucuucaaggcuacugaugg

SEQ ID NO: 396264 - RNA, 32 nt, Homo Sapiens
uuugucuucuuacuuugauaacucuucuuagu

SEQ ID NO: 396265 - RNA, 32 nt, Homo Sapiens
ucccagggaaaucccggccccacuccugaccu

SEQ ID NO: 396266 - RNA, 32 nt, Homo Sapiens
gcgaaagaaaucaaacccccaacuucuucggc

SEQ ID NO: 396267 - RNA, 32 nt, Homo Sapiens
guuagcuuuccacagacauaaauauaguccau

SEQ ID NO: 396268 - RNA, 32 nt, Homo Sapiens
caugaauaugcuuuauuuauuaaaagaguuau

SEQ ID NO: 396269 - RNA, 32 nt, Homo Sapiens
aaaggccauuuuagaauauuaaaggcucugaa

SEQ ID NO: 396270 - RNA, 32 nt, Homo Sapiens
acuagcaaccucaaacagacaccauggugcau

SEQ ID NO: 396271 - RNA, 32 nt, Homo Sapiens
cucggaagcagggccuggccggcagagcacac

SEQ ID NO: 396272 - RNA, 32 nt, Homo Sapiens
gugugcacccaacgugaugcuaugcaugucug

SEQ ID NO: 396273 - RNA, 31 nt, Homo Sapiens
gcugggucacggaggaggcccgcccuccacg

SEQ ID NO: 396274 - RNA, 32 nt, Homo Sapiens
cagccuggccccagucccagcccccaccuuug

SEQ ID NO: 396275 - RNA, 32 nt, Homo Sapiens
gcuuauagaacagaagcagauggauaugaaga

SEQ ID NO: 396276 - RNA, 32 nt, Homo Sapiens
ucuuucuuucuuucuuuuuaagcucaguggca

SEQ ID NO: 396277 - RNA, 32 nt, Homo Sapiens
ggcgggcucagguuaggucaaucguguuugaa

SEQ ID NO: 396278 - RNA, 32 nt, Homo Sapiens
uggcaccggcucagggcacuaguggugggaug

SEQ ID NO: 396279 - RNA, 32 nt, Homo Sapiens
cuuuggagggggaggcggcggcggcggcggcg

SEQ ID NO: 396280 - RNA, 32 nt, Homo Sapiens
aggcuggcugggcucuccugcuggcugcccug

SEQ ID NO: 396281 - RNA, 32 nt, Homo Sapiens
aacuguaugaggaggaggaggaggaggaugug

SEQ ID NO: 396282 - RNA, 32 nt, Homo Sapiens
uaacucaggagaaucuucuuuacaauuuuacg

SEQ ID NO: 396283 - RNA, 32 nt, Homo Sapiens
uuuuaauguauuuaauuuucuacauagaaaac

SEQ ID NO: 396284 - RNA, 32 nt, Homo Sapiens
gaaagauuuggaacagaagaugauggccacuc

SEQ ID NO: 396285 - RNA, 32 nt, Homo Sapiens
uuucuuuuuuaaauucuuaguguaauugaaac

SEQ ID NO: 396286 - RNA, 32 nt, Homo Sapiens
uacagcgguuguguaauuuaagaguggcaaca

SEQ ID NO: 396287 - RNA, 32 nt, Homo Sapiens
ccagcaauuuuuguuguaugauuuuguuuuuu

SEQ ID NO: 396288 - RNA, 32 nt, Homo Sapiens
uuucaagaugguuuuuccuaaucugaguccau

SEQ ID NO: 396289 - RNA, 32 nt, Homo Sapiens
agccaaagaaacaaaaaaauacuuguggagga

SEQ ID NO: 396290 - RNA, 32 nt, Homo Sapiens
ccaaguggcggcaucuuacggcauugguggaa

SEQ ID NO: 396291 - RNA, 32 nt, Homo Sapiens
cgcgccgugucugaugugucagugcuccggcc

SEQ ID NO: 396292 - RNA, 32 nt, Homo Sapiens
auuucucuuuugcucuaauauuucauuauuuu

SEQ ID NO: 396293 - RNA, 32 nt, Homo Sapiens
ugaagucggggcccgcccuguggccccgcccg

SEQ ID NO: 396294 - RNA, 32 nt, Homo Sapiens
uaaagugcaccucgcccccgcaagccccagcc

SEQ ID NO: 396295 - RNA, 32 nt, Homo Sapiens
cucagccuggggaacauuaagguuuucuacaa

SEQ ID NO: 396296 - RNA, 32 nt, Homo Sapiens
gacuuugcuguaauuuuggucuugaggggcgg

SEQ ID NO: 396297 - RNA, 32 nt, Homo Sapiens
aaaaaccaaauuagccagacaugguggcaugc

SEQ ID NO: 396298 - RNA, 32 nt, Homo Sapiens
acuguagguuguuuuucuacaucuucauuauu

SEQ ID NO: 396299 - RNA, 32 nt, Homo Sapiens
ucucacauuucccgguucugcauuauguccag

SEQ ID NO: 396300 - RNA, 32 nt, Homo Sapiens
guauauugauacaacuuguccuggaacauggg

SEQ ID NO: 396301 - RNA, 32 nt, Homo Sapiens
uguuaaaacacuucuguccugugagguuuccc

SEQ ID NO: 396302 - RNA, 32 nt, Homo Sapiens
ugggcgaucccagccccuccccacccacccuc

SEQ ID NO: 396303 - RNA, 32 nt, Homo Sapiens
cacaggaagcgcagcugaaaacaaauggacgc

SEQ ID NO: 396304 - RNA, 32 nt, Homo Sapiens
cuagcuggggagcagaguuagggugcacgcua

SEQ ID NO: 396305 - RNA, 32 nt, Homo Sapiens
uuccagccucagcggcagcuggaucgcucgac

SEQ ID NO: 396306 - RNA, 30 nt, Homo Sapiens
ccccaggcgcccgugcugcagcagugggau

SEQ ID NO: 396307 - RNA, 32 nt, Homo Sapiens
agcuggagcugcugcuggaggauuaagagcag

SEQ ID NO: 396308 - RNA, 32 nt, Homo Sapiens
ugaagacgaaguucuggcaaauguggaaaacc

SEQ ID NO: 396309 - RNA, 32 nt, Homo Sapiens
uucccaccgcccucccuccccagcuccgccuc

SEQ ID NO: 396310 - RNA, 32 nt, Homo Sapiens
aaaaaaagcagugaagcauuagaugcugguaa

SEQ ID NO: 396311 - RNA, 32 nt, Homo Sapiens
acuugcugaaaauaaaacuuugcuauguauuu

SEQ ID NO: 396312 - RNA, 32 nt, Homo Sapiens
guuuuaaacauguuucaauagauccagauucu

SEQ ID NO: 396313 - RNA, 32 nt, Homo Sapiens
uuuuugagaaaagaaggugggcacuaguauau

SEQ ID NO: 396314 - RNA, 32 nt, Homo Sapiens
uacuuagcaaaauuauuuuuaaauugaaacag

SEQ ID NO: 396315 - RNA, 32 nt, Homo Sapiens
cccugcuucauaauuugcaucauucaagcaua

SEQ ID NO: 396316 - RNA, 32 nt, Homo Sapiens
caucugccuuaacgugaucggagaugccuugu

SEQ ID NO: 396317 - RNA, 32 nt, Homo Sapiens
gccuuucacuuuggaugcucugaaacauuugu

SEQ ID NO: 396318 - RNA, 32 nt, Homo Sapiens
uuuuuuccucugaguucuguacuucaaccagc

SEQ ID NO: 396319 - RNA, 32 nt, Homo Sapiens
gggucccugggucacucuaaccucugaccgac

SEQ ID NO: 396320 - RNA, 32 nt, Homo Sapiens
ggacaucugugaguugucauucucaucuaucc

SEQ ID NO: 396321 - RNA, 32 nt, Homo Sapiens
aagugacaaaaauuguuugcaaauggaagaga

SEQ ID NO: 396322 - RNA, 32 nt, Homo Sapiens
gggcgaccgccgucagcccggaggaggaggag

SEQ ID NO: 396323 - RNA, 32 nt, Homo Sapiens
ucuuguggcauuaagacuauuuugcucuucug

SEQ ID NO: 396324 - RNA, 32 nt, Homo Sapiens
cgagggccacuacauucacugggaccacguca

SEQ ID NO: 396325 - RNA, 32 nt, Homo Sapiens
guguauuuuuaaaagcuuaagagauuucaaac

SEQ ID NO: 396326 - RNA, 32 nt, Homo Sapiens
gcucugcggaaucugagccagcacccaggaag

SEQ ID NO: 396327 - RNA, 32 nt, Homo Sapiens
ccuucuuccuuccuuccccgagaaggccucaa

SEQ ID NO: 396328 - RNA, 32 nt, Homo Sapiens
cugcuguggccucaccccugggccccccaauu

SEQ ID NO: 396329 - RNA, 32 nt, Homo Sapiens
ucuggagaaccagcuuuacaaggacccucacu

SEQ ID NO: 396330 - RNA, 32 nt, Homo Sapiens
cucuauuccagcaaaaaguagaaguaucaaau

SEQ ID NO: 396331 - RNA, 32 nt, Homo Sapiens
gcccucuccugccuggccuggccugggacacc

SEQ ID NO: 396332 - RNA, 32 nt, Homo Sapiens
gacacggggacgggagggccagcaucggcuac

SEQ ID NO: 396333 - RNA, 32 nt, Homo Sapiens
aucugucuucccugacucggcuccucaggucu

SEQ ID NO: 396334 - RNA, 32 nt, Homo Sapiens
aggggcaacaaaugcaucaugaguugcaagau

SEQ ID NO: 396335 - RNA, 32 nt, Homo Sapiens
aaaauacccaccccaaaaugaccuuggccacc

SEQ ID NO: 396336 - RNA, 32 nt, Homo Sapiens
cucgccuccugugcuuuccccgccgcggcgau

SEQ ID NO: 396337 - RNA, 32 nt, Homo Sapiens
acauaauguauauaauugacuuuuauucacuc

SEQ ID NO: 396338 - RNA, 32 nt, Homo Sapiens
aaaaaaaaaaauuuaguaaaaaucaaugguaa

SEQ ID NO: 396339 - RNA, 32 nt, Homo Sapiens
auucuuggcugucccaaggauucuucauguau

SEQ ID NO: 396340 - RNA, 32 nt, Homo Sapiens
gcaggucaccuggggggcccagcccucuccca

SEQ ID NO: 396341 - RNA, 32 nt, Homo Sapiens
aacagccuuggcccagcuuucagaggagaacg

SEQ ID NO: 396342 - RNA, 32 nt, Homo Sapiens
gcaauugacaccuguuuacucaguuacucccu

SEQ ID NO: 396343 - RNA, 32 nt, Homo Sapiens
gagcgagccaguugccggauuauucuauuucc

SEQ ID NO: 396344 - RNA, 32 nt, Homo Sapiens
ucgaggcucucagacuccugcugccuggccag

SEQ ID NO: 396345 - RNA, 31 nt, Homo Sapiens
gcgcugcugccggcugcgccauccagcaccc

SEQ ID NO: 396346 - RNA, 32 nt, Homo Sapiens
gaguccacuuuagcacagggguuucaaaccag

SEQ ID NO: 396347 - RNA, 32 nt, Homo Sapiens
cuccagcccggucucacccaugguccagucuc

SEQ ID NO: 396348 - RNA, 32 nt, Homo Sapiens
accuuugcuuucugcccagaguggccaugagc

SEQ ID NO: 396349 - RNA, 32 nt, Homo Sapiens
aggugagccgugggaagaaaagagggagcagc

SEQ ID NO: 396350 - RNA, 32 nt, Homo Sapiens
uguguccuagaagagggaagaggaaggaaggu

SEQ ID NO: 396351 - RNA, 32 nt, Homo Sapiens
guccugccugcgcucaggaugagggggaaucu

SEQ ID NO: 396352 - RNA, 32 nt, Homo Sapiens
acugaagauuguguguaucgagcuguuucuaa

SEQ ID NO: 396353 - RNA, 32 nt, Homo Sapiens
acuauuucaaagcuacuguuccuaguccagcu

SEQ ID NO: 396354 - RNA, 32 nt, Homo Sapiens
ucgagauguucgcucgugcaguacuguugguu

SEQ ID NO: 396355 - RNA, 32 nt, Homo Sapiens
agccugggaccggagauccagagugucaagga

SEQ ID NO: 396356 - RNA, 32 nt, Homo Sapiens
cucugcuuggacagcaggccuggcacugggag

SEQ ID NO: 396357 - RNA, 32 nt, Homo Sapiens
uaaaauauuuccacaauuaggagaaauaugug

SEQ ID NO: 396358 - RNA, 27 nt, Homo Sapiens
ggcugguccuucuccauggcccccucc

SEQ ID NO: 396359 - RNA, 32 nt, Homo Sapiens
ccuggagcaccugggggcgcgggcgggggacc

SEQ ID NO: 396360 - RNA, 29 nt, Homo Sapiens
guagucguggcugagugaaauggacguca

SEQ ID NO: 396361 - RNA, 32 nt, Homo Sapiens
ggugcuugccccagcucccaccccacagccca

SEQ ID NO: 396362 - RNA, 32 nt, Homo Sapiens
uuuuaccuuaaaagacugaaauguagcugcag

SEQ ID NO: 396363 - RNA, 32 nt, Homo Sapiens
uaguuuauuucugcucuaauuaaaaugucacu

SEQ ID NO: 396364 - RNA, 32 nt, Homo Sapiens
cggcugcugcagugcaguagcugcuggaggcu

SEQ ID NO: 396365 - RNA, 32 nt, Homo Sapiens
cgacuggagacggcaucucguucacagcaccc

SEQ ID NO: 396366 - RNA, 32 nt, Homo Sapiens
gucagugaauggauaucuaaugugcuucuagu

SEQ ID NO: 396367 - RNA, 31 nt, Homo Sapiens
gccaaaaugcugagaacguccacuccuaauc

SEQ ID NO: 396368 - RNA, 32 nt, Homo Sapiens
uccaugaaggcacagacuuuucuuguucucuu

SEQ ID NO: 396369 - RNA, 32 nt, Homo Sapiens
ucuuguuccucauaggaaacugggcaucucug

SEQ ID NO: 396370 - RNA, 32 nt, Homo Sapiens
uauuuaaaaguaccaaacauaacccagaguau

SEQ ID NO: 396371 - RNA, 32 nt, Homo Sapiens
aaaauguucuuugucaagugucauuagcaacu

SEQ ID NO: 396372 - RNA, 31 nt, Homo Sapiens
uuggcuggggcagcccucagagccuggccac

SEQ ID NO: 396373 - RNA, 32 nt, Homo Sapiens
agaucagaugaaacagaagaugauaguaaaag

SEQ ID NO: 396374 - RNA, 32 nt, Homo Sapiens
ccucggcggggcuggcggcggcugggggaugc

SEQ ID NO: 396375 - RNA, 32 nt, Homo Sapiens
ucucccuuucccugucuggcuucucccuuaag

SEQ ID NO: 396376 - RNA, 32 nt, Homo Sapiens
uuuuguuguucuuuuguuuucuuuuuuguacc

SEQ ID NO: 396377 - RNA, 32 nt, Homo Sapiens
ccgagccgccgcuugggucacagugaaagcca

SEQ ID NO: 396378 - RNA, 32 nt, Homo Sapiens
uugcacuccgguacccgacccggcgcccuggc

SEQ ID NO: 396379 - RNA, 32 nt, Homo Sapiens
ccaguguuacuucauggucuggguagaguaua

SEQ ID NO: 396380 - RNA, 32 nt, Homo Sapiens
agaacauucaacauauugacuuaaccaccuga

SEQ ID NO: 396381 - RNA, 32 nt, Homo Sapiens
cuuuaguuuuccacucugccccggggagcacc

SEQ ID NO: 396382 - RNA, 32 nt, Homo Sapiens
ggggugggaggggcugagauggcugcuggccu

SEQ ID NO: 396383 - RNA, 32 nt, Homo Sapiens
aauaaacaguuuuugguaaaucucaaaaaaaa

SEQ ID NO: 396384 - RNA, 32 nt, Homo Sapiens
auuucuccaagagcaggcuuggcgaguccuug

SEQ ID NO: 396385 - RNA, 32 nt, Homo Sapiens
uuugaacggugacacuguucuguauauucccu

SEQ ID NO: 396386 - RNA, 32 nt, Homo Sapiens
aggcaauccacccaccaugaggggaaacgugg

SEQ ID NO: 396387 - RNA, 32 nt, Homo Sapiens
ccaaacauacccacccagggauacauggcguu

SEQ ID NO: 396388 - RNA, 32 nt, Homo Sapiens
aucuucauguccagugagcaguguugcguuuu

SEQ ID NO: 396389 - RNA, 32 nt, Homo Sapiens
uccacagccggcgcuccgcgacccgcuuggcu

SEQ ID NO: 396390 - RNA, 32 nt, Homo Sapiens
cuacacuccagugagacagcucugcauacuca

SEQ ID NO: 396391 - RNA, 32 nt, Homo Sapiens
uucccaaaggagcagaacaaaaauaaaaaaua

SEQ ID NO: 396392 - RNA, 32 nt, Homo Sapiens
gucaugcaacauguuucuggacacguuccuga

SEQ ID NO: 396393 - RNA, 32 nt, Homo Sapiens
ugcagaguuauaauuacauucaaaguauacuu

SEQ ID NO: 396394 - RNA, 32 nt, Homo Sapiens
cgcagcggcgagaggaggcgaagguggcugcg

SEQ ID NO: 396395 - RNA, 32 nt, Homo Sapiens
ggcccuuccuuccucauuguuguuugguaugc

SEQ ID NO: 396396 - RNA, 32 nt, Homo Sapiens
aaaagauaaaugaaacaaaaagcugguucuuu

SEQ ID NO: 396397 - RNA, 32 nt, Homo Sapiens
gcuuuugccugccugugcuauuuuacuuguaa

SEQ ID NO: 396398 - RNA, 29 nt, Homo Sapiens
auucuguuauaaagugauuuucuaaguau

SEQ ID NO: 396399 - RNA, 32 nt, Homo Sapiens
ugccggccgcauccuugcacgccccgcggagc

SEQ ID NO: 396400 - RNA, 32 nt, Homo Sapiens
gaauggggaaaggguaacuuauugcagcagcc

SEQ ID NO: 396401 - RNA, 32 nt, Homo Sapiens
uguguaaauauauucaaggaaaacaccuccac

SEQ ID NO: 396402 - RNA, 32 nt, Homo Sapiens
agucuuucaagcccccacaucacaggcuuagg

SEQ ID NO: 396403 - RNA, 32 nt, Homo Sapiens
aagucaggauuaacuguuaucaccucuccugu

SEQ ID NO: 396404 - RNA, 32 nt, Homo Sapiens
caaccgugccugucucggaccccgcacccaaa

SEQ ID NO: 396405 - RNA, 32 nt, Homo Sapiens
cuuaaugucauuucuuuaaaaauacaugugca

SEQ ID NO: 396406 - RNA, 32 nt, Homo Sapiens
aguggcggcuccuggaggaggggcagagggag

SEQ ID NO: 396407 - RNA, 32 nt, Homo Sapiens
guuacuauuaaauaugcugaaaacacuaaaag

SEQ ID NO: 396408 - RNA, 32 nt, Homo Sapiens
ggcaauuuuuugggcggccccuggacgaaggu

SEQ ID NO: 396409 - RNA, 31 nt, Homo Sapiens
ggagagcugccggccgccccgcuccgccgaa

SEQ ID NO: 396410 - RNA, 32 nt, Homo Sapiens
uggcacugagguguuugguuuggaauagggaa

SEQ ID NO: 396411 - RNA, 32 nt, Homo Sapiens
ccacggccgcacgcucagaggcuggucuccgc

SEQ ID NO: 396412 - RNA, 32 nt, Homo Sapiens
gaguggcacuuccaaaaaauuggcaaagcgga

SEQ ID NO: 396413 - RNA, 32 nt, Homo Sapiens
uuauaauaagagaaacaaauucuuauugugaa

SEQ ID NO: 396414 - RNA, 32 nt, Homo Sapiens
gaagucuugcugugucacccaggcugccaggc

SEQ ID NO: 396415 - RNA, 30 nt, Homo Sapiens
uugucagagaagcugcaugguuucugcaga

SEQ ID NO: 396416 - RNA, 32 nt, Homo Sapiens
agacggggaucagaguuuuuacgacaauuugg

SEQ ID NO: 396417 - RNA, 32 nt, Homo Sapiens
ugcucaacagccuggcccuuucuggggccacc

SEQ ID NO: 396418 - RNA, 32 nt, Homo Sapiens
gcccaugugaaugaggcccacccucgcccugc

SEQ ID NO: 396419 - RNA, 32 nt, Homo Sapiens
gcagauguuuuuguccggaaauaaaaauaaua

SEQ ID NO: 396420 - RNA, 32 nt, Homo Sapiens
gagugagugaggcuugaaaacacaccacauug

SEQ ID NO: 396421 - RNA, 32 nt, Homo Sapiens
aggaccuaaaagaccugugcuagugagcucua

SEQ ID NO: 396422 - RNA, 32 nt, Homo Sapiens
ugauggugagaggaggccgccugagucaggac

SEQ ID NO: 396423 - RNA, 32 nt, Homo Sapiens
ccaaauaaggaaaagcacuccggaagaaugaa

SEQ ID NO: 396424 - RNA, 32 nt, Homo Sapiens
uggauguaagaugcucugaggacccugcccac

SEQ ID NO: 396425 - RNA, 32 nt, Homo Sapiens
ucugccuucugaugcuggacuggccuugcuuc

SEQ ID NO: 396426 - RNA, 32 nt, Homo Sapiens
cagcccguucaccaagccccccgccccgcccc

SEQ ID NO: 396427 - RNA, 32 nt, Homo Sapiens
aagacauuuuuccuguuuuagaaaauauagcc

SEQ ID NO: 396428 - RNA, 32 nt, Homo Sapiens
gugacccaaugcacccaaccaaacuucuuuuu

SEQ ID NO: 396429 - RNA, 30 nt, Homo Sapiens
uggaaucugugcuuugcagaagcaagaggu

SEQ ID NO: 396430 - RNA, 32 nt, Homo Sapiens
cgagccaucgacgagcccgcgaaaccucggcc

SEQ ID NO: 396431 - RNA, 32 nt, Homo Sapiens
auuuuguauauuguguuaaauuaauuuuaaua

SEQ ID NO: 396432 - RNA, 32 nt, Homo Sapiens
aaaccuaagcagcuggaaggaaccauggccaa

SEQ ID NO: 396433 - RNA, 32 nt, Homo Sapiens
aaagaagaaucaaguucugugcugucccguga

SEQ ID NO: 396434 - RNA, 32 nt, Homo Sapiens
uaacugggaaacacaguggccuuggagggcug

SEQ ID NO: 396435 - RNA, 32 nt, Homo Sapiens
cauaaguuuauuuucuuucaguuuaguucagu

SEQ ID NO: 396436 - RNA, 32 nt, Homo Sapiens
gugaaaaucuaaaaauacuucugccaguacaa

SEQ ID NO: 396437 - RNA, 32 nt, Homo Sapiens
guuccuuacagcacuugcuguuguuacaugug

SEQ ID NO: 396438 - RNA, 32 nt, Homo Sapiens
uuagauacugaauaaucauccagcacagccug

SEQ ID NO: 396439 - RNA, 32 nt, Homo Sapiens
uuuaaguuuuuccgcuuuuucaggaaggcgac

SEQ ID NO: 396440 - RNA, 32 nt, Homo Sapiens
aacaagcccagcugcuuuaacugcggugcguu

SEQ ID NO: 396441 - RNA, 32 nt, Homo Sapiens
cauugaucaugauauugcacauaucccugcuu

SEQ ID NO: 396442 - RNA, 32 nt, Homo Sapiens
acgagggcaccucgcugcuccagccucugggg

SEQ ID NO: 396443 - RNA, 32 nt, Homo Sapiens
cuugcuacacagaaauaacaaacacguuauuu

SEQ ID NO: 396444 - RNA, 32 nt, Homo Sapiens
caacucuuccuuugucaccucuaggcuauucc

SEQ ID NO: 396445 - RNA, 32 nt, Homo Sapiens
ucauguccuguaaauuuuuaaguacaguaauu

SEQ ID NO: 396446 - RNA, 32 nt, Homo Sapiens
uguaauaaaacaggcuuagaacaucaauuccu

SEQ ID NO: 396447 - RNA, 32 nt, Homo Sapiens
augaucuggagcaacagcugggaaauaucauu

SEQ ID NO: 396448 - RNA, 32 nt, Homo Sapiens
ugaaaggauuuaugaauaauuaaauggaggcc

SEQ ID NO: 396449 - RNA, 32 nt, Homo Sapiens
ggaggccgccggugccgaugggaccaggcugg

SEQ ID NO: 396450 - RNA, 27 nt, Homo Sapiens
uuaaguccucaccucagcccccagccc

SEQ ID NO: 396451 - RNA, 32 nt, Homo Sapiens
uuaagugugcaaacaaguuagagcuggcagcu

SEQ ID NO: 396452 - RNA, 32 nt, Homo Sapiens
ggaacaaagcguuacugaaaagaagguaaccu

SEQ ID NO: 396453 - RNA, 32 nt, Homo Sapiens
gggggagccaaucccggcagcgccaaagaggg

SEQ ID NO: 396454 - RNA, 32 nt, Homo Sapiens
agacgugccguggcugcgcucaguccagcggg

SEQ ID NO: 396455 - RNA, 32 nt, Homo Sapiens
uaggcaaagggaguggcgaccccagauuuaua

SEQ ID NO: 396456 - RNA, 32 nt, Homo Sapiens
gaguauaaacuuuuauacucugauuuuuaucc

SEQ ID NO: 396457 - RNA, 32 nt, Homo Sapiens
gggacaucaggagacugggcucuggcucuguu

SEQ ID NO: 396458 - RNA, 32 nt, Homo Sapiens
gggugcaugauaagagcaucucuuacgaagag

SEQ ID NO: 396459 - RNA, 32 nt, Homo Sapiens
cugaggggcccgccucgggccauggugcucuc

SEQ ID NO: 396460 - RNA, 32 nt, Homo Sapiens
aauuuuuguuuuuauguugugaaugugcuaau

SEQ ID NO: 396461 - RNA, 32 nt, Homo Sapiens
ucuuuccccucccccacccuuccagaugccau

SEQ ID NO: 396462 - RNA, 32 nt, Homo Sapiens
uguuugguuuugaggugugcugggaugaaagg

SEQ ID NO: 396463 - RNA, 32 nt, Homo Sapiens
gaugcuuccagaagcaccuacucugugcaagg

SEQ ID NO: 396464 - RNA, 32 nt, Homo Sapiens
ccggcacuuugggaggccuaggcgggcguauc

SEQ ID NO: 396465 - RNA, 32 nt, Homo Sapiens
cccagguaggggcaggauggagggcugagccc

SEQ ID NO: 396466 - RNA, 32 nt, Homo Sapiens
gaagauaauucauuuuaaucguaauguauuuu

SEQ ID NO: 396467 - RNA, 32 nt, Homo Sapiens
ccugccucucaccucuaccccaaauaccucug

SEQ ID NO: 396468 - RNA, 32 nt, Homo Sapiens
ggccgggcaggugcugaggugugucaccgagg

SEQ ID NO: 396469 - RNA, 32 nt, Homo Sapiens
ccuggccgcgggggcggcgcgcucgaucuacg

SEQ ID NO: 396470 - RNA, 32 nt, Homo Sapiens
ugaggacuggaauggcccugcauaaaaugaac

SEQ ID NO: 396471 - RNA, 32 nt, Homo Sapiens
ggggcccaacuguguugcuccacccggaccca

SEQ ID NO: 396472 - RNA, 32 nt, Homo Sapiens
ucuccagcacgagcacccacuccuauugccac

SEQ ID NO: 396473 - RNA, 32 nt, Homo Sapiens
ggacucccacccagcaggcagcugugaccgca

SEQ ID NO: 396474 - RNA, 32 nt, Homo Sapiens
ugccaugcuggccuuacgaaauguuuuaauag

SEQ ID NO: 396475 - RNA, 32 nt, Homo Sapiens
aaauacugauaauacauagaacaaucugcaca

SEQ ID NO: 396476 - RNA, 32 nt, Homo Sapiens
cccuccugagcaucagccuguucagaugaggg

SEQ ID NO: 396477 - RNA, 32 nt, Homo Sapiens
auguccacaacacaguaauuggucacuuguua

SEQ ID NO: 396478 - RNA, 32 nt, Homo Sapiens
uccccaucccaggcuugcugugucucacuguc

SEQ ID NO: 396479 - RNA, 32 nt, Homo Sapiens
aaguacguuuucuuauuuaaaugacaacuuug

SEQ ID NO: 396480 - RNA, 32 nt, Homo Sapiens
uucuccuuuuucuuuuugagauauuuaacaca

SEQ ID NO: 396481 - RNA, 32 nt, Homo Sapiens
uccuuaaccuccagcagacuccugcucucuau

SEQ ID NO: 396482 - RNA, 32 nt, Homo Sapiens
ccugcuccgugcccaacacaugcccucucugu

SEQ ID NO: 396483 - RNA, 32 nt, Homo Sapiens
cgugcugcucguccggccccggcccggaaccg

SEQ ID NO: 396484 - RNA, 32 nt, Homo Sapiens
aggccaauauagaaaggauaaaauaccagcau

SEQ ID NO: 396485 - RNA, 32 nt, Homo Sapiens
ugcuuuggacauguggaaagagccuuacuaau

SEQ ID NO: 396486 - RNA, 32 nt, Homo Sapiens
acaugcauucuuucuuggaacccaggccacag

SEQ ID NO: 396487 - RNA, 32 nt, Homo Sapiens
agaaaccugagccccagggaggcggcgcggag

SEQ ID NO: 396488 - RNA, 32 nt, Homo Sapiens
gccaagucccaccgguugcuucugggaagggg

SEQ ID NO: 396489 - RNA, 32 nt, Homo Sapiens
ugcacugacagccuugcccacccccaccaugc

SEQ ID NO: 396490 - RNA, 32 nt, Homo Sapiens
uaggccucugagccagcguccaggguacaggu

SEQ ID NO: 396491 - RNA, 32 nt, Homo Sapiens
agccgagauugugccacugcacucgagccugg

SEQ ID NO: 396492 - RNA, 32 nt, Homo Sapiens
ggauuggagaagggggcggggcagcggcgggg

SEQ ID NO: 396493 - RNA, 32 nt, Homo Sapiens
aauaggagccagccaggaaguaccucucugag

SEQ ID NO: 396494 - RNA, 32 nt, Homo Sapiens
ccugcccuuggagaaccccggauuggcuuccc

SEQ ID NO: 396495 - RNA, 32 nt, Homo Sapiens
cccugcuucuaaccccaaccacuuuucaggau

SEQ ID NO: 396496 - RNA, 32 nt, Homo Sapiens
gacuuuugcgccccgcgccugggguggggggu

SEQ ID NO: 396497 - RNA, 32 nt, Homo Sapiens
ggccaugggacagggaggauccugucuggccu

SEQ ID NO: 396498 - RNA, 32 nt, Homo Sapiens
agugugcccccagcgcccccagcccagcccac

SEQ ID NO: 396499 - RNA, 32 nt, Homo Sapiens
ugguucaagugucuugccgccggccuucggau

SEQ ID NO: 396500 - RNA, 30 nt, Homo Sapiens
cgaacugaaagcggcggcgggagaccaaac

SEQ ID NO: 396501 - RNA, 32 nt, Homo Sapiens
uuagucaaugaaacaaaaacaaaaucacaaga

SEQ ID NO: 396502 - RNA, 32 nt, Homo Sapiens
uguauggggaaaaauggauacuuuuuaaaccu

SEQ ID NO: 396503 - RNA, 32 nt, Homo Sapiens
guucuacauuuuaucuguaaaaugugacuuuu

SEQ ID NO: 396504 - RNA, 28 nt, Homo Sapiens
aaagcagucacaagaccaagcgacucag

SEQ ID NO: 396505 - RNA, 32 nt, Homo Sapiens
aaggagccaaccccggacucaagacucaaggg

SEQ ID NO: 396506 - RNA, 32 nt, Homo Sapiens
aggaguucaaagcugcuggccaagcucagugg

SEQ ID NO: 396507 - RNA, 32 nt, Homo Sapiens
ucuuucuguuauuugcagcuaaacucaguccu

SEQ ID NO: 396508 - RNA, 32 nt, Homo Sapiens
agagaagggucuuuuuuuuuuuaaguauuuca

SEQ ID NO: 396509 - RNA, 32 nt, Homo Sapiens
gacugacccgaccccggcacuaccucgaggcu

SEQ ID NO: 396510 - RNA, 32 nt, Homo Sapiens
agagcauauaauguaaagggcuuuagagugag

SEQ ID NO: 396511 - RNA, 32 nt, Homo Sapiens
gaucucauuucauuuuaauuauuuagguagca

SEQ ID NO: 396512 - RNA, 32 nt, Homo Sapiens
accacccugggcggggagggcugaggucaggg

SEQ ID NO: 396513 - RNA, 32 nt, Homo Sapiens
aaugagcuggugagaagaagcgugaaggggga

SEQ ID NO: 396514 - RNA, 32 nt, Homo Sapiens
ggucuguuuuucugccaauauucuuuuaacug

SEQ ID NO: 396515 - RNA, 32 nt, Homo Sapiens
gaaaugucuccaugauaugaagccaaauauuc

SEQ ID NO: 396516 - RNA, 32 nt, Homo Sapiens
accaccagacucuaaucucagcccuuuaacga

SEQ ID NO: 396517 - RNA, 32 nt, Homo Sapiens
cugcccucucugggcucugaauccccagaggc

SEQ ID NO: 396518 - RNA, 32 nt, Homo Sapiens
caggcugcaucucuuugaaaggugugagaucu

SEQ ID NO: 396519 - RNA, 32 nt, Homo Sapiens
gggacagugcgcggcgccccgcagccaggccc

SEQ ID NO: 396520 - RNA, 32 nt, Homo Sapiens
ucugaguugcugucagggcuguagccugacaa

SEQ ID NO: 396521 - RNA, 32 nt, Homo Sapiens
gucuuuauauuuugugccucauuuuuggaaag

SEQ ID NO: 396522 - RNA, 32 nt, Homo Sapiens
cucgggcgccgcggggcugcaugcggcguacc

SEQ ID NO: 396523 - RNA, 32 nt, Homo Sapiens
aucaugauaaccugaaacauguuacugggacu

SEQ ID NO: 396524 - RNA, 32 nt, Homo Sapiens
uggaaggacaucuucaccgucuccaugaauga

SEQ ID NO: 396525 - RNA, 32 nt, Homo Sapiens
augauaguggagcucauuuacaaauaggcaug

SEQ ID NO: 396526 - RNA, 32 nt, Homo Sapiens
agggugcgcgcucggcgccgggagcgcggcca

SEQ ID NO: 396527 - RNA, 32 nt, Homo Sapiens
ccggccagcgucggcgcagagagcgggcggag

SEQ ID NO: 396528 - RNA, 32 nt, Homo Sapiens
cauaaagaugaaauauaauaauguaauccuca

SEQ ID NO: 396529 - RNA, 32 nt, Homo Sapiens
ugcugugcucugaguucucacuccucaucucc

SEQ ID NO: 396530 - RNA, 32 nt, Homo Sapiens
cuuugcugugcagcugggaccuguuggacgug

SEQ ID NO: 396531 - RNA, 32 nt, Homo Sapiens
ucugugguaggauauuaacgggcucauucaac

SEQ ID NO: 396532 - RNA, 32 nt, Homo Sapiens
gccaugaagaaccgggggacgcaaguuaauug

SEQ ID NO: 396533 - RNA, 32 nt, Homo Sapiens
gccggcaagaauagagcagagaccaggaucgc

SEQ ID NO: 396534 - RNA, 32 nt, Homo Sapiens
gacuuuguccacucacaugcuuuccacccuga

SEQ ID NO: 396535 - RNA, 32 nt, Homo Sapiens
ucuggguguugauuucacgaguauugucaguu

SEQ ID NO: 396536 - RNA, 32 nt, Homo Sapiens
gcccccccuuccacuuuuuuuuguauguuuuu

SEQ ID NO: 396537 - RNA, 32 nt, Homo Sapiens
cccaucuguugccccgguccagcccugauggc

SEQ ID NO: 396538 - RNA, 32 nt, Homo Sapiens
uugcaguacuaaaauuuuuacuuuugaugaag

SEQ ID NO: 396539 - RNA, 32 nt, Homo Sapiens
ccauggggcucugccugcccccgccccugccu

SEQ ID NO: 396540 - RNA, 32 nt, Homo Sapiens
cacauuaugauuauuuuauacuaguucugcua

SEQ ID NO: 396541 - RNA, 32 nt, Homo Sapiens
uuccagugaaaagaagucccaaagggcaguuc

SEQ ID NO: 396542 - RNA, 32 nt, Homo Sapiens
aauaaaauuugauaaacauuccuguugauggg

SEQ ID NO: 396543 - RNA, 32 nt, Homo Sapiens
cugcuggcugggcgcaguggcucccaccugua

SEQ ID NO: 396544 - RNA, 32 nt, Homo Sapiens
cagggccgcugaccgaccgacggaggcgccga

SEQ ID NO: 396545 - RNA, 32 nt, Homo Sapiens
uugugcccguggacguuaauaccgacacgauu

SEQ ID NO: 396546 - RNA, 32 nt, Homo Sapiens
uagcugcugcuucacggcgucuccacugugcg

SEQ ID NO: 396547 - RNA, 32 nt, Homo Sapiens
cuuaacuccaugggcuuuggaccuuggcagag

SEQ ID NO: 396548 - RNA, 32 nt, Homo Sapiens
auuaguuuuacuacuuuaucuuauugaucucu

SEQ ID NO: 396549 - RNA, 32 nt, Homo Sapiens
ggaauuaaugaaaaaauuuucaaguuaaaaua

SEQ ID NO: 396550 - RNA, 32 nt, Homo Sapiens
cuacuggaaaauuuaccacccuuccagaaucc

SEQ ID NO: 396551 - RNA, 28 nt, Homo Sapiens
cauaaagcauaggcagauacuuuugcua

SEQ ID NO: 396552 - RNA, 32 nt, Homo Sapiens
aauuauucuuugaagcucccagagggaaaaaa

SEQ ID NO: 396553 - RNA, 32 nt, Homo Sapiens
uuauuaaacugggauaacuugcagauucuccu

SEQ ID NO: 396554 - RNA, 32 nt, Homo Sapiens
auccccuuccagcucccuccccugcucagaau

SEQ ID NO: 396555 - RNA, 32 nt, Homo Sapiens
ugaaaaucccugacaaguacuuuucaucucau

SEQ ID NO: 396556 - RNA, 32 nt, Homo Sapiens
aacaaaacacuguaacucugguaaauguucug

SEQ ID NO: 396557 - RNA, 32 nt, Homo Sapiens
aaauuuugagcaaagaaacuugugcuuuacca

SEQ ID NO: 396558 - RNA, 32 nt, Homo Sapiens
cgggggaggcggcggccgcagcagaagcagcu

SEQ ID NO: 396559 - RNA, 32 nt, Homo Sapiens
uuagaaaaaaaauuuucuuuuccacaaugugg

SEQ ID NO: 396560 - RNA, 32 nt, Homo Sapiens
aagcacuugauggagagcugcccagcucuccu

SEQ ID NO: 396561 - RNA, 32 nt, Homo Sapiens
ggggcaccaggcuggaggggagggauccccgu

SEQ ID NO: 396562 - RNA, 32 nt, Homo Sapiens
auuuucuugcuguccgccgucugcagagcgcg

SEQ ID NO: 396563 - RNA, 32 nt, Homo Sapiens
uggccgucaucucauuagggccccacaguggc

SEQ ID NO: 396564 - RNA, 32 nt, Homo Sapiens
uggagucuugcucugucgcccaggcuagagug

SEQ ID NO: 396565 - RNA, 32 nt, Homo Sapiens
ggaaagauggaucuugaagcuaauccugcaga

SEQ ID NO: 396566 - RNA, 32 nt, Homo Sapiens
cugucccguaauucuaacacuuuacauuuuuu

SEQ ID NO: 396567 - RNA, 32 nt, Homo Sapiens
uaauucuucuauuuuuaguagagacaggguuu

SEQ ID NO: 396568 - RNA, 32 nt, Homo Sapiens
augggcaggcacccucauuuauagaugucagg

SEQ ID NO: 396569 - RNA, 32 nt, Homo Sapiens
ggcagcucaagaagcagcuggugcuccggauc

SEQ ID NO: 396570 - RNA, 32 nt, Homo Sapiens
auuuucacucacagaagcacgugcuggggccu

SEQ ID NO: 396571 - RNA, 32 nt, Homo Sapiens
cggauucugagcucagugugguguuuggugca

SEQ ID NO: 396572 - RNA, 31 nt, Homo Sapiens
cccuuagaguuacuuuccagagccugggugc

SEQ ID NO: 396573 - RNA, 32 nt, Homo Sapiens
uuguuuuuuaaaaaccugucugaugguguuuu

SEQ ID NO: 396574 - RNA, 30 nt, Homo Sapiens
uuuucaaauaucccugccuuuucccaccug

SEQ ID NO: 396575 - RNA, 32 nt, Homo Sapiens
gacugcccggaccgcgcgauggagucgaccgg

SEQ ID NO: 396576 - RNA, 32 nt, Homo Sapiens
cgcccccagaggccuccacacggcaggggcag

SEQ ID NO: 396577 - RNA, 32 nt, Homo Sapiens
ugaauggauaggaaaagguaacuagaaguugu

SEQ ID NO: 396578 - RNA, 32 nt, Homo Sapiens
ccccgacgaccggauccugaggaggcagcugc

SEQ ID NO: 396579 - RNA, 32 nt, Homo Sapiens
uugggaugaugauaauaaacauuuauugagca

SEQ ID NO: 396580 - RNA, 32 nt, Homo Sapiens
ccuccgccgcgcgaccccaccucggccgccgc

SEQ ID NO: 396581 - RNA, 32 nt, Homo Sapiens
ccaccaaccaagauuucuuuuucuaacuucug

SEQ ID NO: 396582 - RNA, 32 nt, Homo Sapiens
aauuaaguuaguauuaugucaaguaauuuuga

SEQ ID NO: 396583 - RNA, 32 nt, Homo Sapiens
gucuugcccagcugggcugccucaggugucag

SEQ ID NO: 396584 - RNA, 32 nt, Homo Sapiens
uguguccaucccagcggcuggugcagggccuc

SEQ ID NO: 396585 - RNA, 32 nt, Homo Sapiens
cuccuguaugggugcuggacacaguguugggg

SEQ ID NO: 396586 - RNA, 32 nt, Homo Sapiens
ugauuuuaaugccaguaucugcucuaaauauu

SEQ ID NO: 396587 - RNA, 32 nt, Homo Sapiens
cauuugauucugccugguggguucagggcugc

SEQ ID NO: 396588 - RNA, 32 nt, Homo Sapiens
uucuuuuccuugauuucucaguaggugcuaga

SEQ ID NO: 396589 - RNA, 32 nt, Homo Sapiens
uccacgcggcgguugcggcgacuguugguggu

SEQ ID NO: 396590 - RNA, 29 nt, Homo Sapiens
aaggcucggggacaaggauggcuggggga

SEQ ID NO: 396591 - RNA, 32 nt, Homo Sapiens
gacagggugggagaggggacacaugggugucc

SEQ ID NO: 396592 - RNA, 32 nt, Homo Sapiens
agcaggucagaagagggagaggaggggcuggg

SEQ ID NO: 396593 - RNA, 32 nt, Homo Sapiens
aucagaaauaaucauuucuauuuucuggcuua

SEQ ID NO: 396594 - RNA, 32 nt, Homo Sapiens
ggcucgcgccgacucugcaccacgcaggggaa

SEQ ID NO: 396595 - RNA, 32 nt, Homo Sapiens
guagugacacugggguuucugcagucagggag

SEQ ID NO: 396596 - RNA, 32 nt, Homo Sapiens
agccuucucaucccggggcaaagcaggcauca

SEQ ID NO: 396597 - RNA, 29 nt, Homo Sapiens
cucugguguugucacagaggcaagugcua

SEQ ID NO: 396598 - RNA, 32 nt, Homo Sapiens
aaggcacccccuccccgugcagggucaggguu

SEQ ID NO: 396599 - RNA, 30 nt, Homo Sapiens
ucaccaggcaggccuuggaguuccaugaca

SEQ ID NO: 396600 - RNA, 32 nt, Homo Sapiens
aggcuguacaagcaugacaccaacaucugcuc

SEQ ID NO: 396601 - RNA, 32 nt, Homo Sapiens
cuccuccugccagcacccccagcaccugcuag

SEQ ID NO: 396602 - RNA, 29 nt, Homo Sapiens
auauuugugacuuugcucugcuaccugcu

SEQ ID NO: 396603 - RNA, 32 nt, Homo Sapiens
agccauucuggugaagcaguuugggccccaug

SEQ ID NO: 396604 - RNA, 32 nt, Homo Sapiens
uauaugcacauugccaagaauuacugucaaga

SEQ ID NO: 396605 - RNA, 32 nt, Homo Sapiens
gggcgggacaaugccaaugccuugggacucag

SEQ ID NO: 396606 - RNA, 31 nt, Homo Sapiens
cggccccagcgcagcuaugaaccuggagcga

SEQ ID NO: 396607 - RNA, 32 nt, Homo Sapiens
gagguuuugaauaaaaagugaacuuuuguaau

SEQ ID NO: 396608 - RNA, 32 nt, Homo Sapiens
guggaagagggcaugcaaguucugccugucuu

SEQ ID NO: 396609 - RNA, 31 nt, Homo Sapiens
cuccaagagccccagagcugccugcauagca

SEQ ID NO: 396610 - RNA, 32 nt, Homo Sapiens
ucauuucccuuccccgcaccccuugacacuca

SEQ ID NO: 396611 - RNA, 32 nt, Homo Sapiens
cuacagguuggcugcauagaagaaaaagguag

SEQ ID NO: 396612 - RNA, 32 nt, Homo Sapiens
caaauguuuuuuucuuuuuucuuuuuuuuugc

SEQ ID NO: 396613 - RNA, 32 nt, Homo Sapiens
uugucauggcgggucuucguccuaaacugaga

SEQ ID NO: 396614 - RNA, 32 nt, Homo Sapiens
ccuccucaaaaaugacaauucugugucuggug

SEQ ID NO: 396615 - RNA, 32 nt, Homo Sapiens
accuuucagcuggcagaguuagcauuggguag

SEQ ID NO: 396616 - RNA, 32 nt, Homo Sapiens
agcuguccuugcaccccuggucucgggcgcag

SEQ ID NO: 396617 - RNA, 32 nt, Homo Sapiens
ugcaugggaaagggcuguugauauuaaaaaca

SEQ ID NO: 396618 - RNA, 32 nt, Homo Sapiens
cugcagaguccccauggcauggagcuuacacc

SEQ ID NO: 396619 - RNA, 32 nt, Homo Sapiens
aucgaugugaauaaauagacauauaucuuuuc

SEQ ID NO: 396620 - RNA, 32 nt, Homo Sapiens
ccccugccccacugcugaaugaaggccauuuc

SEQ ID NO: 396621 - RNA, 32 nt, Homo Sapiens
agacuuggcugccaaaaucaaucaagacaaua

SEQ ID NO: 396622 - RNA, 32 nt, Homo Sapiens
ggccgagaccuggccuggcaucaggaguccaa

SEQ ID NO: 396623 - RNA, 32 nt, Homo Sapiens
caggggcaugggaaggugggcgggcaggggag

SEQ ID NO: 396624 - RNA, 32 nt, Homo Sapiens
guucgacaaaaugauuucuuuauuuaaauuuu

SEQ ID NO: 396625 - RNA, 32 nt, Homo Sapiens
uaagugggccaaaguggggaaauacuaacagu

SEQ ID NO: 396626 - RNA, 32 nt, Homo Sapiens
aagaguagcauaauaaauauuuucugugaaug

SEQ ID NO: 396627 - RNA, 32 nt, Homo Sapiens
cccccuagcaaccacugguguuuucugucccu

SEQ ID NO: 396628 - RNA, 32 nt, Homo Sapiens
ucccgucgggcgggcuuuccucgggccgagcg

SEQ ID NO: 396629 - RNA, 32 nt, Homo Sapiens
cagccuugacccuggaggaaagucaggugggc

SEQ ID NO: 396630 - RNA, 32 nt, Homo Sapiens
cggugucucgcucucucgcccaggcuggagug

SEQ ID NO: 396631 - RNA, 32 nt, Homo Sapiens
ccuacaacaagaauuucuuaagcuuucuuuua

SEQ ID NO: 396632 - RNA, 32 nt, Homo Sapiens
acuuccccaagccgcaggugagaccuggucca

SEQ ID NO: 396633 - RNA, 32 nt, Homo Sapiens
cauccccaccccaccccuaccucacgccugcc

SEQ ID NO: 396634 - RNA, 32 nt, Homo Sapiens
cuuuuauacugaagaugccaccccaagcagau

SEQ ID NO: 396635 - RNA, 32 nt, Homo Sapiens
ccgcagcccacgugcggccgcugcugcacccg

SEQ ID NO: 396636 - RNA, 32 nt, Homo Sapiens
agagggagaaaguugaauuaaacccaggaaaa

SEQ ID NO: 396637 - RNA, 32 nt, Homo Sapiens
acgccuccucuucuccugguccuucaccuuga

SEQ ID NO: 396638 - RNA, 32 nt, Homo Sapiens
ugaaaugaaauauuagaaauggcuguauauuc

SEQ ID NO: 396639 - RNA, 32 nt, Homo Sapiens
auggucucuccccagccaugggccacccuugc

SEQ ID NO: 396640 - RNA, 32 nt, Homo Sapiens
ugcuauuguuauuauugucauuauuaccacug

SEQ ID NO: 396641 - RNA, 32 nt, Homo Sapiens
gaguguaacguggaggcggcuaccuccguggg

SEQ ID NO: 396642 - RNA, 32 nt, Homo Sapiens
gagcaaccagcuucuuuuuuuuuaaaaguccu

SEQ ID NO: 396643 - RNA, 32 nt, Homo Sapiens
gccuguaaucccaacacuuuaggagaccaagg

SEQ ID NO: 396644 - RNA, 32 nt, Homo Sapiens
acuaagcuccacagugccaguuccuugcccca

SEQ ID NO: 396645 - RNA, 32 nt, Homo Sapiens
caaugugugaauggacaauguugaaugaaugu

SEQ ID NO: 396646 - RNA, 32 nt, Homo Sapiens
guauguauaccuuauuaguaaauauugguugg

SEQ ID NO: 396647 - RNA, 32 nt, Homo Sapiens
uaccucacgcgcauaaauuugcugcuccuauu

SEQ ID NO: 396648 - RNA, 32 nt, Homo Sapiens
agccuugugguuuaugcuuaaauguacauuuu

SEQ ID NO: 396649 - RNA, 32 nt, Homo Sapiens
cuauuauuggacgagaugauauguaaauguga

SEQ ID NO: 396650 - RNA, 32 nt, Homo Sapiens
aacuuagggcaaaucagagucuacacagacgc

SEQ ID NO: 396651 - RNA, 32 nt, Homo Sapiens
cuuccggccgucggaccucauccacggggagg

SEQ ID NO: 396652 - RNA, 32 nt, Homo Sapiens
uggcuuucucauccuucccaaccccgugccgu

SEQ ID NO: 396653 - RNA, 32 nt, Homo Sapiens
acauugaacaaaagaaaaaaguugcauucacu

SEQ ID NO: 396654 - RNA, 32 nt, Homo Sapiens
uagguggguccccccggcacccccagaccugc

SEQ ID NO: 396655 - RNA, 32 nt, Homo Sapiens
cuuagcugugucaucacuagcaucacaaaugg

SEQ ID NO: 396656 - RNA, 32 nt, Homo Sapiens
aaugaaggccuaguuggcacuuuuauuucuau

SEQ ID NO: 396657 - RNA, 32 nt, Homo Sapiens
aauugccauuuucucuaccaugucccccagac

SEQ ID NO: 396658 - RNA, 32 nt, Homo Sapiens
uugaaguuaaaugcauuagaaaacuaccugau

SEQ ID NO: 396659 - RNA, 32 nt, Homo Sapiens
caguccuagccucaacucuacuggucccaauu

SEQ ID NO: 396660 - RNA, 32 nt, Homo Sapiens
aagacagaauaaacaaguauaauaaaugaacc

SEQ ID NO: 396661 - RNA, 32 nt, Homo Sapiens
cuccauuagugucuggagaccacagucaggcu

SEQ ID NO: 396662 - RNA, 32 nt, Homo Sapiens
cuuugcuaacugugcuccucacuuccucuucu

SEQ ID NO: 396663 - RNA, 32 nt, Homo Sapiens
aggcaagcuggcgcgccgcgggggcgucuggg

SEQ ID NO: 396664 - RNA, 32 nt, Homo Sapiens
uuauuauuauuuuuaaaucccccgcggaggag

SEQ ID NO: 396665 - RNA, 32 nt, Homo Sapiens
ccuccuugagagcugagcugccccuaggaccc

SEQ ID NO: 396666 - RNA, 32 nt, Homo Sapiens
gcgugugguccguauggaaaaccugguagccc

SEQ ID NO: 396667 - RNA, 32 nt, Homo Sapiens
aucaauccauucucaugaaccucuguauugcu

SEQ ID NO: 396668 - RNA, 32 nt, Homo Sapiens
ccuguuuugucaauguaucuguuuucugucuu

SEQ ID NO: 396669 - RNA, 32 nt, Homo Sapiens
agccgcucccgguucccuccccagcuccucgu

SEQ ID NO: 396670 - RNA, 32 nt, Homo Sapiens
ccaacuuauagcaaugauguacuuuaagggaa

SEQ ID NO: 396671 - RNA, 32 nt, Homo Sapiens
ccugggccugccuccccaagggcucacuaagc

SEQ ID NO: 396672 - RNA, 30 nt, Homo Sapiens
cgccgcagcagcagcgcgggugucgugcac

SEQ ID NO: 396673 - RNA, 32 nt, Homo Sapiens
ucugcaggccacccccaccucccugcagcuuu

SEQ ID NO: 396674 - RNA, 32 nt, Homo Sapiens
uucagucucucaaacauuuuggcacaguucau

SEQ ID NO: 396675 - RNA, 32 nt, Homo Sapiens
ccuuucccuuggacguugcccgaggcgugugg

SEQ ID NO: 396676 - RNA, 31 nt, Homo Sapiens
uuugugaaauaaaauaacgugcuucauuuga

SEQ ID NO: 396677 - RNA, 32 nt, Homo Sapiens
gggugagggaaaggagauaggggacccuagga

SEQ ID NO: 396678 - RNA, 32 nt, Homo Sapiens
uacagagccaacacuauauaaaauaaaguuau

SEQ ID NO: 396679 - RNA, 32 nt, Homo Sapiens
ggggucuccacuuuuccuuccuccucauuuuu

SEQ ID NO: 396680 - RNA, 32 nt, Homo Sapiens
cauguccuccccuccacccgcacauggggguc

SEQ ID NO: 396681 - RNA, 32 nt, Homo Sapiens
cagagaccucaucugaugucucggccaggcca

SEQ ID NO: 396682 - RNA, 32 nt, Homo Sapiens
ucacuacacaggaauaagcacuuuuuaaaaau

SEQ ID NO: 396683 - RNA, 32 nt, Homo Sapiens
cacaagggauggaugugaagacaacucauucu

SEQ ID NO: 396684 - RNA, 32 nt, Homo Sapiens
cauaacagauuauguauuaacuuguagauuca

SEQ ID NO: 396685 - RNA, 31 nt, Homo Sapiens
aaggugugaaacagcucugguguuuauguga

SEQ ID NO: 396686 - RNA, 32 nt, Homo Sapiens
ucuaguuagcuauauucuugacugcauccgcu

SEQ ID NO: 396687 - RNA, 32 nt, Homo Sapiens
uaugaugggaggcgagacauguuugcagcaau

SEQ ID NO: 396688 - RNA, 32 nt, Homo Sapiens
uucucaaaacaguuuugcaaugagagaauaaa

SEQ ID NO: 396689 - RNA, 32 nt, Homo Sapiens
uggcuucccacagucagacuuauuuuuaccug

SEQ ID NO: 396690 - RNA, 32 nt, Homo Sapiens
aaugacaauggccacacacacacacacacaca

SEQ ID NO: 396691 - RNA, 32 nt, Homo Sapiens
augggcgggugguggggacggcaguggugaug

SEQ ID NO: 396692 - RNA, 32 nt, Homo Sapiens
uuauaaagguaacgagaaaaaauacacuaugu

SEQ ID NO: 396693 - RNA, 32 nt, Homo Sapiens
uugaacaucuacaggcuaaucagcaucuggcc

SEQ ID NO: 396694 - RNA, 32 nt, Homo Sapiens
gaugcuuugucaacugaaaauacuuaugucug

SEQ ID NO: 396695 - RNA, 32 nt, Homo Sapiens
ccaaucuggacagucucugugccccuccuuuc

SEQ ID NO: 396696 - RNA, 32 nt, Homo Sapiens
cuguaacaccgccaugcacauuucauacagcc

SEQ ID NO: 396697 - RNA, 32 nt, Homo Sapiens
cgccgcggacaccggagcugcggccgcucccc

SEQ ID NO: 396698 - RNA, 32 nt, Homo Sapiens
aaacaaacaaacaaacaaaaacuguugcuauu

SEQ ID NO: 396699 - RNA, 32 nt, Homo Sapiens
ucaaaagauaccuuuaccuggcuccaccucca

SEQ ID NO: 396700 - RNA, 32 nt, Homo Sapiens
ggcgggaggaugccgaagccgacgcugcugcu

SEQ ID NO: 396701 - RNA, 32 nt, Homo Sapiens
agcaggagccgggaacugccuucuguggauca

SEQ ID NO: 396702 - RNA, 32 nt, Homo Sapiens
ccagagauauggacacucucuugcuuuauauc

SEQ ID NO: 396703 - RNA, 32 nt, Homo Sapiens
aagugcagaaauuuuuaccuucaaggaucagg

SEQ ID NO: 396704 - RNA, 32 nt, Homo Sapiens
ggaaauccucugugggaccccgagcaagaccc

SEQ ID NO: 396705 - RNA, 32 nt, Homo Sapiens
aaaucaccagcugccauagacacgggggaagc

SEQ ID NO: 396706 - RNA, 32 nt, Homo Sapiens
auggggaugcuugauuuccuggccagguuguc

SEQ ID NO: 396707 - RNA, 32 nt, Homo Sapiens
acccacccauucucaccaccuguuucuuuguu

SEQ ID NO: 396708 - RNA, 32 nt, Homo Sapiens
ggcggccguuggagguggcugcggcagcugau

SEQ ID NO: 396709 - RNA, 32 nt, Homo Sapiens
agagcccuacagagaagcuggcugguaggacc

SEQ ID NO: 396710 - RNA, 32 nt, Homo Sapiens
ggcacaaaaguaggucugcugauaaagaaugg

SEQ ID NO: 396711 - RNA, 32 nt, Homo Sapiens
gagcccgccgucugcggagccuggccucgcgg

SEQ ID NO: 396712 - RNA, 32 nt, Homo Sapiens
ugcuugcuuuccuaccaguccuccccuacaca

SEQ ID NO: 396713 - RNA, 32 nt, Homo Sapiens
guuuauauuguuaaaaugagcuugugcaccau

SEQ ID NO: 396714 - RNA, 32 nt, Homo Sapiens
gggcgggagggcuggcggggcgaacgucuggg

SEQ ID NO: 396715 - RNA, 32 nt, Homo Sapiens
ucuggaggacgcugagggcggaggcgggagag

SEQ ID NO: 396716 - RNA, 32 nt, Homo Sapiens
uaaccugcccucaaaucuguaagaagauuguu

SEQ ID NO: 396717 - RNA, 32 nt, Homo Sapiens
uuucccaauagaacuucaaaucucugaagacg

SEQ ID NO: 396718 - RNA, 32 nt, Homo Sapiens
aaccuuugucaucuguuagacucuguaugugu

SEQ ID NO: 396719 - RNA, 32 nt, Homo Sapiens
acuaagugaaacuuguuaaauaaaucuuccuu

SEQ ID NO: 396720 - RNA, 32 nt, Homo Sapiens
guugaucuuaagcaugucaauucauaaaaaca

SEQ ID NO: 396721 - RNA, 32 nt, Homo Sapiens
aggcccagaagcagcugcagccaagcgugucc

SEQ ID NO: 396722 - RNA, 32 nt, Homo Sapiens
cuugcucauguguugcuguuucccaacacauc

SEQ ID NO: 396723 - RNA, 32 nt, Homo Sapiens
aguauuguuuuuccccucucccuccugcuuuc

SEQ ID NO: 396724 - RNA, 32 nt, Homo Sapiens
aucaacuaauuccuuuuuuuuauuaaaggcau

SEQ ID NO: 396725 - RNA, 32 nt, Homo Sapiens
uuauauuucuuuucuuuuuucuuuuauauuac

SEQ ID NO: 396726 - RNA, 32 nt, Homo Sapiens
ucgcgccuccagccacguccccgccccggcuc

SEQ ID NO: 396727 - RNA, 32 nt, Homo Sapiens
gaguuucagcuuucuucagcugccaguguguu

SEQ ID NO: 396728 - RNA, 32 nt, Homo Sapiens
ccuuuuuucuucugccgucgccuucucugccu

SEQ ID NO: 396729 - RNA, 32 nt, Homo Sapiens
cagcgucggccgcgucggccgcggguuggagc

SEQ ID NO: 396730 - RNA, 32 nt, Homo Sapiens
gaaaucucagggacgaucuggaccccgcugag

SEQ ID NO: 396731 - RNA, 32 nt, Homo Sapiens
auggugagcuuugaaucauaaaaugaaguugg

SEQ ID NO: 396732 - RNA, 32 nt, Homo Sapiens
agaagcaguccugggcuguacccggcgcagcu

SEQ ID NO: 396733 - RNA, 32 nt, Homo Sapiens
agugccccaagccccaucauggaagagggcuu

SEQ ID NO: 396734 - RNA, 32 nt, Homo Sapiens
cauuuacagaguuacaaaaaacaaacaaucaa

SEQ ID NO: 396735 - RNA, 32 nt, Homo Sapiens
guggaggaacagagucuccuggcuggcugcug

SEQ ID NO: 396736 - RNA, 32 nt, Homo Sapiens
gaagaagaugaagaggaagaagaagagucuuu

SEQ ID NO: 396737 - RNA, 32 nt, Homo Sapiens
ugggacaaggaccugacccuccugcccgcaua

SEQ ID NO: 396738 - RNA, 32 nt, Homo Sapiens
cagaguuuuguaugcuuuuuugaaauauguaa

SEQ ID NO: 396739 - RNA, 32 nt, Homo Sapiens
ugugcggaggcaggagcauguaugucugcagg

SEQ ID NO: 396740 - RNA, 32 nt, Homo Sapiens
cugaaagcauauaaaauaucuguaaaaauuaa

SEQ ID NO: 396741 - RNA, 32 nt, Homo Sapiens
gcagaguccugggcccuacaucaauaaaaggu

SEQ ID NO: 396742 - RNA, 31 nt, Homo Sapiens
agggucaggugagaucucagagcugccccgg

SEQ ID NO: 396743 - RNA, 32 nt, Homo Sapiens
cagagcucauuccccaggaaucucuaagacca

SEQ ID NO: 396744 - RNA, 32 nt, Homo Sapiens
caaccccgccuggccaccccaggcucaggcug

SEQ ID NO: 396745 - RNA, 32 nt, Homo Sapiens
ggccguacaccugugcugaacggccagagacu

SEQ ID NO: 396746 - RNA, 32 nt, Homo Sapiens
ugaacugcacgguggagcugccucagggcugu

SEQ ID NO: 396747 - RNA, 32 nt, Homo Sapiens
uggcagguggagaggaggauggggaccagcag

SEQ ID NO: 396748 - RNA, 32 nt, Homo Sapiens
gggcugcaagccaggggaugccugcagccacc

SEQ ID NO: 396749 - RNA, 32 nt, Homo Sapiens
cauguggaccuucaucacuaccucuggccgca

SEQ ID NO: 396750 - RNA, 32 nt, Homo Sapiens
uuuuauuuuuacaacuaacauccauuccccuu

SEQ ID NO: 396751 - RNA, 32 nt, Homo Sapiens
gaagcauauuguuauuauauaauuacauauuu

SEQ ID NO: 396752 - RNA, 32 nt, Homo Sapiens
agcgugagccugggccguugccucgaggcucu

SEQ ID NO: 396753 - RNA, 32 nt, Homo Sapiens
cccuuaguucuaucugaauccaagacagccac

SEQ ID NO: 396754 - RNA, 32 nt, Homo Sapiens
agugagagaagcucugaacgagggcacgcggc

SEQ ID NO: 396755 - RNA, 32 nt, Homo Sapiens
cucuuuuguaaaaagaauagcgaugacauuuu

SEQ ID NO: 396756 - RNA, 32 nt, Homo Sapiens
ucuacuaaaaauacaaaaauuaccugggcgug

SEQ ID NO: 396757 - RNA, 32 nt, Homo Sapiens
cagcccccugagccuggcuguugugugguauu

SEQ ID NO: 396758 - RNA, 32 nt, Homo Sapiens
aaagagaccaaagggaggaaaaucggugggaa

SEQ ID NO: 396759 - RNA, 30 nt, Homo Sapiens
ggcaggcagcuugcagcccaucuucagagg

SEQ ID NO: 396760 - RNA, 32 nt, Homo Sapiens
gcccggaaaaccaugaucuggagaacuuggau

SEQ ID NO: 396761 - RNA, 32 nt, Homo Sapiens
ggucuggcuaggcuacgggccacgcgccgccg

SEQ ID NO: 396762 - RNA, 32 nt, Homo Sapiens
uggacuccgcccuugaguggcuccgacgggag

SEQ ID NO: 396763 - RNA, 32 nt, Homo Sapiens
uccauuuuacacagcaccacagugaauccaga

SEQ ID NO: 396764 - RNA, 32 nt, Homo Sapiens
aggcugacaucuucacauccacugggcauaua

SEQ ID NO: 396765 - RNA, 32 nt, Homo Sapiens
cgcgccgggaacagccagucggugccuaacgc

SEQ ID NO: 396766 - RNA, 32 nt, Homo Sapiens
gagcugcagcuacacagcugcccagugucaua

SEQ ID NO: 396767 - RNA, 32 nt, Homo Sapiens
ucccucugcauuccacuggcucugccauggac

SEQ ID NO: 396768 - RNA, 32 nt, Homo Sapiens
ggcggaccaagaacugugccacagggcagggc

SEQ ID NO: 396769 - RNA, 32 nt, Homo Sapiens
ccacugcccucccagagcucacugucuagccc

SEQ ID NO: 396770 - RNA, 32 nt, Homo Sapiens
aaaccaacaaaauaauauuuauuagggcucga

SEQ ID NO: 396771 - RNA, 32 nt, Homo Sapiens
uucuuuauaaaacuuuaaaugauaccacauau

SEQ ID NO: 396772 - RNA, 32 nt, Homo Sapiens
augugaucuuccuuguugaugcuggagcuuga

SEQ ID NO: 396773 - RNA, 29 nt, Homo Sapiens
ucuuggaauaaagucuauuuucugccuuu

SEQ ID NO: 396774 - RNA, 32 nt, Homo Sapiens
gugugggauauaaauuaguuuuuauuauucuc

SEQ ID NO: 396775 - RNA, 32 nt, Homo Sapiens
ccuggccaaggacaacucuaucuaugucgugg

SEQ ID NO: 396776 - RNA, 32 nt, Homo Sapiens
gugcucuggggauacauagauaagccuggcau

SEQ ID NO: 396777 - RNA, 32 nt, Homo Sapiens
uuugcugugggaacagcacacagugagggugc

SEQ ID NO: 396778 - RNA, 32 nt, Homo Sapiens
ccugccacuagcccggcccugcccuuaacaga

SEQ ID NO: 396779 - RNA, 32 nt, Homo Sapiens
cagaaggagcuuuggggcugagacuauggggu

SEQ ID NO: 396780 - RNA, 32 nt, Homo Sapiens
uuuagugugacacucuuccucaugauaccagu

SEQ ID NO: 396781 - RNA, 32 nt, Homo Sapiens
uucugugaggccaagccacgaccuccaccuau

SEQ ID NO: 396782 - RNA, 32 nt, Homo Sapiens
agccacucuggggcccagccugccugccgcac

SEQ ID NO: 396783 - RNA, 32 nt, Homo Sapiens
uuuggagauugugcuuguugcuuugcuuguug

SEQ ID NO: 396784 - RNA, 32 nt, Homo Sapiens
guuuggacugaauugaaaacauuacucuuaag

SEQ ID NO: 396785 - RNA, 32 nt, Homo Sapiens
gcagugguuuucuuggagucuggugugauuuc

SEQ ID NO: 396786 - RNA, 32 nt, Homo Sapiens
aagaagccacuaccuccaccaccaccagcacc

SEQ ID NO: 396787 - RNA, 32 nt, Homo Sapiens
gaagcccgccugcagagacccgggccggccuc

SEQ ID NO: 396788 - RNA, 32 nt, Homo Sapiens
cggauccuggaaaaucgcuguguuggggagca

SEQ ID NO: 396789 - RNA, 32 nt, Homo Sapiens
cggggcugaggcgaggccccggcggccaucuu

SEQ ID NO: 396790 - RNA, 30 nt, Homo Sapiens
cugauggagaagcuguagaaguuacacaga

SEQ ID NO: 396791 - RNA, 32 nt, Homo Sapiens
uauuuuuauuuuucaauucaguuucucaaauu

SEQ ID NO: 396792 - RNA, 32 nt, Homo Sapiens
ugaucuggggagagggccggggcucgggacug

SEQ ID NO: 396793 - RNA, 32 nt, Homo Sapiens
gcggcugccugcgagucucugcugugccgacc

SEQ ID NO: 396794 - RNA, 32 nt, Homo Sapiens
aaaaaugggcagauggggcugcgacccuaggu

SEQ ID NO: 396795 - RNA, 32 nt, Homo Sapiens
ccacuacgagcugccugccauccugcagcagg

SEQ ID NO: 396796 - RNA, 32 nt, Homo Sapiens
ugcagguccuucccucuucucggcacugcccc

SEQ ID NO: 396797 - RNA, 32 nt, Homo Sapiens
gaccccacucccuccccagagcaucccgaggg

SEQ ID NO: 396798 - RNA, 32 nt, Homo Sapiens
acuagugaggaaagauuuuuguuguuauuucu

SEQ ID NO: 396799 - RNA, 32 nt, Homo Sapiens
uaugucuuucagaauacgugugccaaaauuga

SEQ ID NO: 396800 - RNA, 28 nt, Homo Sapiens
aggggaauggcgaugggauuauaggacu

SEQ ID NO: 396801 - RNA, 32 nt, Homo Sapiens
cgccauuugccgaaagaugcugaaaccggccu

SEQ ID NO: 396802 - RNA, 32 nt, Homo Sapiens
cccggcggagaaugagccggagccggaggugg

SEQ ID NO: 396803 - RNA, 32 nt, Homo Sapiens
gcccggaggcacccggcccugggccuuaggca

SEQ ID NO: 396804 - RNA, 32 nt, Homo Sapiens
uacccucuaauccuaccugaucuuuaacaaag

SEQ ID NO: 396805 - RNA, 32 nt, Homo Sapiens
aguaaacuaugaaugcuggaauuuuuauuuuu

SEQ ID NO: 396806 - RNA, 32 nt, Homo Sapiens
uuaauauauuuuuucuuguacugacugggucu

SEQ ID NO: 396807 - RNA, 32 nt, Homo Sapiens
ucucuguacgcuuauugaucucauccucguac

SEQ ID NO: 396808 - RNA, 32 nt, Homo Sapiens
ccggcaggucccggcccggcggcggcagccau

SEQ ID NO: 396809 - RNA, 32 nt, Homo Sapiens
gguaccggggacaggauugcgagggggacccu

SEQ ID NO: 396810 - RNA, 32 nt, Homo Sapiens
uauuuuaaaaauugucuauuguuaaauuuuga

SEQ ID NO: 396811 - RNA, 32 nt, Homo Sapiens
uggcacuguauauuuagugucuuacuuaagga

SEQ ID NO: 396812 - RNA, 32 nt, Homo Sapiens
gggucggagaagcggauuggguccugggccuc

SEQ ID NO: 396813 - RNA, 31 nt, Homo Sapiens
agggggagcaggagccucaauccgauuuggu

SEQ ID NO: 396814 - RNA, 32 nt, Homo Sapiens
uggcacucccugugccccugcugcugcugggc

SEQ ID NO: 396815 - RNA, 32 nt, Homo Sapiens
gacccagggcuuugacacaaacccagugcuuu

SEQ ID NO: 396816 - RNA, 31 nt, Homo Sapiens
gagccagugacacggaagcaggcaaguauca

SEQ ID NO: 396817 - RNA, 32 nt, Homo Sapiens
auaauccaaggacuaguauagaauuaagcuga

SEQ ID NO: 396818 - RNA, 32 nt, Homo Sapiens
gcggagugguagcgcgcacggccugcggugug

SEQ ID NO: 396819 - RNA, 32 nt, Homo Sapiens
gguagacccgugucuuuccagcccuaaaggaa

SEQ ID NO: 396820 - RNA, 32 nt, Homo Sapiens
cgcccguuuuucgcccucgggcuggcgagaac

SEQ ID NO: 396821 - RNA, 32 nt, Homo Sapiens
gaggggacauggugaugaaacauggcaggagu

SEQ ID NO: 396822 - RNA, 32 nt, Homo Sapiens
ggcgaguugaguggcgacucuuuugaaacaga

SEQ ID NO: 396823 - RNA, 32 nt, Homo Sapiens
acacucuugaguugucaaaacguuaauuuuca

SEQ ID NO: 396824 - RNA, 32 nt, Homo Sapiens
cugcccagcgugguggggcagcagaagcucca

SEQ ID NO: 396825 - RNA, 32 nt, Homo Sapiens
acaauuccgcauuuuguaauuguuaagugcag

SEQ ID NO: 396826 - RNA, 32 nt, Homo Sapiens
gagacgcggucgggggucucuccggguuccug

SEQ ID NO: 396827 - RNA, 32 nt, Homo Sapiens
ccacccccaagccuccaucgcccugguagccc

SEQ ID NO: 396828 - RNA, 32 nt, Homo Sapiens
gguggaucauucgcauacuggauggaaugggg

SEQ ID NO: 396829 - RNA, 32 nt, Homo Sapiens
aaugagagaccauguaaaauauguaaauucua

SEQ ID NO: 396830 - RNA, 32 nt, Homo Sapiens
cagggccccucccccagcuccauuccgcuccc

SEQ ID NO: 396831 - RNA, 32 nt, Homo Sapiens
aucacacacacacacacacacacacacacaca

SEQ ID NO: 396832 - RNA, 32 nt, Homo Sapiens
cucaaaaaaacaaacaaacaaacaaacaaaaa

SEQ ID NO: 396833 - RNA, 32 nt, Homo Sapiens
gccgagcccgcaggaccggcuuccucgccgac

SEQ ID NO: 396834 - RNA, 32 nt, Homo Sapiens
cauguaaacaaauggggacacucuguucagga

SEQ ID NO: 396835 - RNA, 32 nt, Homo Sapiens
agggaacucugcaggacgggccucagaaucca

SEQ ID NO: 396836 - RNA, 32 nt, Homo Sapiens
auuacuacacuggguaccuuugaaagaaucuc

SEQ ID NO: 396837 - RNA, 32 nt, Homo Sapiens
gaugcacagaacaccucuacuuugagacucac

SEQ ID NO: 396838 - RNA, 32 nt, Homo Sapiens
caucaaauugggaaacaaaggccaaaggugua

SEQ ID NO: 396839 - RNA, 32 nt, Homo Sapiens
gacuccccuguccccaggaccaagaugacgcc

SEQ ID NO: 396840 - RNA, 32 nt, Homo Sapiens
aaucugaaagccgagguggcgcggcggcacca

SEQ ID NO: 396841 - RNA, 32 nt, Homo Sapiens
cccuccggcuagcucgcuggcucccggcuccu

SEQ ID NO: 396842 - RNA, 32 nt, Homo Sapiens
gagugacucucgucuggccacagugaagacag

SEQ ID NO: 396843 - RNA, 32 nt, Homo Sapiens
cucacaguuucacuuacaaagccccccgcagu

SEQ ID NO: 396844 - RNA, 32 nt, Homo Sapiens
cugaagacugucagaaucauccuccaucacua

SEQ ID NO: 396845 - RNA, 32 nt, Homo Sapiens
gacacaaaauuugaaaugcucacagaucaggg

SEQ ID NO: 396846 - RNA, 32 nt, Homo Sapiens
ccugacaccugugcaaagaaaaggaggaaaac

SEQ ID NO: 396847 - RNA, 32 nt, Homo Sapiens
uucuccccagggucucucaguuuuccaggaca

SEQ ID NO: 396848 - RNA, 32 nt, Homo Sapiens
aguugauaggauguuuaaaacaucaacacauu

SEQ ID NO: 396849 - RNA, 32 nt, Homo Sapiens
augaaucaaugggaaauacuacuccuguaauu

SEQ ID NO: 396850 - RNA, 32 nt, Homo Sapiens
uggggcacucuggggugcgcgccgaucuucuc

SEQ ID NO: 396851 - RNA, 32 nt, Homo Sapiens
acucuggaauccacuaugguuuaccuugagug

SEQ ID NO: 396852 - RNA, 32 nt, Homo Sapiens
uauccuuuaucugugugugcugauuugaucuu

SEQ ID NO: 396853 - RNA, 32 nt, Homo Sapiens
cuuuccacagagcuauuuacauccuggacuau

SEQ ID NO: 396854 - RNA, 32 nt, Homo Sapiens
gauguuuuacuuuaaauaaaugucuauuguaa

SEQ ID NO: 396855 - RNA, 32 nt, Homo Sapiens
gcggcgcgcgucccugggccuccgcgcgugag

SEQ ID NO: 396856 - RNA, 30 nt, Homo Sapiens
acugcaucacugaccacccaucaggucacc

SEQ ID NO: 396857 - RNA, 32 nt, Homo Sapiens
gaggggcagcucgggagagccggagcgguagc

SEQ ID NO: 396858 - RNA, 32 nt, Homo Sapiens
gcgggaaggggagugguggucucacaauacug

SEQ ID NO: 396859 - RNA, 32 nt, Homo Sapiens
agaaaauggauggacugaaccaauuagaauug

SEQ ID NO: 396860 - RNA, 32 nt, Homo Sapiens
cacacacacacacacacacacacacacgaauc

SEQ ID NO: 396861 - RNA, 32 nt, Homo Sapiens
ugggauccaaccccaaaacaccacuggccuuc

SEQ ID NO: 396862 - RNA, 32 nt, Homo Sapiens
ggcuggucucaaacucccgaccucaagugauc

SEQ ID NO: 396863 - RNA, 32 nt, Homo Sapiens
agccugcauugagcuugcaugcuugcauaaga

SEQ ID NO: 396864 - RNA, 32 nt, Homo Sapiens
ggauuguugaucaucugaugcuaugauucuuu

SEQ ID NO: 396865 - RNA, 32 nt, Homo Sapiens
gggcggaggaggaggcgcccugggcggcgacg

SEQ ID NO: 396866 - RNA, 32 nt, Homo Sapiens
agaguccccucgcggcagcagauguguguggg

SEQ ID NO: 396867 - RNA, 32 nt, Homo Sapiens
ucaauuuuguauccccagucgagaacaucuug

SEQ ID NO: 396868 - RNA, 32 nt, Homo Sapiens
cauguuugaagaaaagaauaaaaguuaggaaa

SEQ ID NO: 396869 - RNA, 32 nt, Homo Sapiens
uuguagggggauguuacuccuaaugucacagu

SEQ ID NO: 396870 - RNA, 32 nt, Homo Sapiens
uucugacauuggauguuauuugcuuauauucu

SEQ ID NO: 396871 - RNA, 32 nt, Homo Sapiens
guuuuuucaaggaauguaauacuggagcuuua

SEQ ID NO: 396872 - RNA, 30 nt, Homo Sapiens
gaaccaugggaggccgcgucuuucucgucu

SEQ ID NO: 396873 - RNA, 32 nt, Homo Sapiens
uuucuaaugagauauuaaaccauguaaagaac

SEQ ID NO: 396874 - RNA, 32 nt, Homo Sapiens
auaugcauauacauuguaaguuaguaaguuag

SEQ ID NO: 396875 - RNA, 32 nt, Homo Sapiens
cuaagccccguccccuaacccccaguccucac

SEQ ID NO: 396876 - RNA, 32 nt, Homo Sapiens
uaaccaggaggccaucacuggauggucacccc

SEQ ID NO: 396877 - RNA, 32 nt, Homo Sapiens
gaacuccuuggaugaaguccacuacagaccag

SEQ ID NO: 396878 - RNA, 32 nt, Homo Sapiens
uuguauauuuaguggagaugggguuucaccau

SEQ ID NO: 396879 - RNA, 32 nt, Homo Sapiens
gagguugcagugagccgagauggugccacugc

SEQ ID NO: 396880 - RNA, 32 nt, Homo Sapiens
cugguuauacuacuccaacugccccccaggca

SEQ ID NO: 396881 - RNA, 32 nt, Homo Sapiens
cugcuggaaucacaccugagaacugagauaua

SEQ ID NO: 396882 - RNA, 32 nt, Homo Sapiens
cuuagacuucgggacucugacacguucuuuau

SEQ ID NO: 396883 - RNA, 32 nt, Homo Sapiens
ggagaauuguuugaaccccggagauggagguu

SEQ ID NO: 396884 - RNA, 32 nt, Homo Sapiens
cugcccaggggugccuuggggaugcugcacug

SEQ ID NO: 396885 - RNA, 32 nt, Homo Sapiens
ccccacccuggguuuggccccuggaaccuuuc

SEQ ID NO: 396886 - RNA, 32 nt, Homo Sapiens
agagcuaaacauugcacagggcaaagaaaaaa

SEQ ID NO: 396887 - RNA, 32 nt, Homo Sapiens
cuuagcagugauugagguggugacuaaauaua

SEQ ID NO: 396888 - RNA, 32 nt, Homo Sapiens
agccucaauauuugucugaagacacuuaaauu

SEQ ID NO: 396889 - RNA, 32 nt, Homo Sapiens
guaaauaaacacacacauuaaggagagauuaa

SEQ ID NO: 396890 - RNA, 31 nt, Homo Sapiens
cugcucccacccuccucccagcagcagacac

SEQ ID NO: 396891 - RNA, 32 nt, Homo Sapiens
ugcagcuucccuuuuaggucuuucucaaugag

SEQ ID NO: 396892 - RNA, 32 nt, Homo Sapiens
ggcugcugcaggugcuggcuggaccccgcugg

SEQ ID NO: 396893 - RNA, 32 nt, Homo Sapiens
ccacggcgggggugggggcgggggguugguac

SEQ ID NO: 396894 - RNA, 32 nt, Homo Sapiens
aguacaaaaguacauucacauuauuuuuucua

SEQ ID NO: 396895 - RNA, 32 nt, Homo Sapiens
uugucuguccccaccuaggacccccacccccg

SEQ ID NO: 396896 - RNA, 32 nt, Homo Sapiens
uaaagaaacacucuacaccucuaaucaagguc

SEQ ID NO: 396897 - RNA, 32 nt, Homo Sapiens
guggucguguaccuucuccaccugcccccagg

SEQ ID NO: 396898 - RNA, 32 nt, Homo Sapiens
aagucgggagcgccacacaaaccuggcuauaa

SEQ ID NO: 396899 - RNA, 32 nt, Homo Sapiens
acacgaaguugcccucaucugcuggagaucga

SEQ ID NO: 396900 - RNA, 32 nt, Homo Sapiens
acaucuagcggggaggugggcggcgagggucc

SEQ ID NO: 396901 - RNA, 32 nt, Homo Sapiens
uuucucccuuucgagccggcgggccacagacg

SEQ ID NO: 396902 - RNA, 32 nt, Homo Sapiens
uccuaccccuccccagcuuggugggcgccucu

SEQ ID NO: 396903 - RNA, 32 nt, Homo Sapiens
agagcaaaaguacuuucaccacagucaaccca

SEQ ID NO: 396904 - RNA, 32 nt, Homo Sapiens
acugcgcggccucgucagucccggggcugacu

SEQ ID NO: 396905 - RNA, 32 nt, Homo Sapiens
agguauucuuaaguauagaaaagagucacuaa

SEQ ID NO: 396906 - RNA, 32 nt, Homo Sapiens
acgaggcgcucgccgggaccuggaaucccugu

SEQ ID NO: 396907 - RNA, 32 nt, Homo Sapiens
uaaaaagccuauuugcacaacuuuuugggaau

SEQ ID NO: 396908 - RNA, 32 nt, Homo Sapiens
gcgggggaggggcugggccgcugcggggcagu

SEQ ID NO: 396909 - RNA, 32 nt, Homo Sapiens
ggcggccgcgaccccggcucccgccccggccc

SEQ ID NO: 396910 - RNA, 32 nt, Homo Sapiens
cuguugguguccucagaagugccggggauucu

SEQ ID NO: 396911 - RNA, 32 nt, Homo Sapiens
gguaaaugcuucaaaucagggugguuuuuaau

SEQ ID NO: 396912 - RNA, 32 nt, Homo Sapiens
ccugagcugcgaggcgggaggaggugaggcuc

SEQ ID NO: 396913 - RNA, 32 nt, Homo Sapiens
gcgcucgcgggccggggcuguauggggcuccc

SEQ ID NO: 396914 - RNA, 32 nt, Homo Sapiens
gaguugggcuuguuugucuccuccuccuccug

SEQ ID NO: 396915 - RNA, 32 nt, Homo Sapiens
ugacucgcaccuguaaucccagcacuuuggga

SEQ ID NO: 396916 - RNA, 32 nt, Homo Sapiens
accuggauuuguuuuucuaaauaaaguuggaa

SEQ ID NO: 396917 - RNA, 32 nt, Homo Sapiens
cugcgaagccggcggcggcgucgggacuccuc

SEQ ID NO: 396918 - RNA, 32 nt, Homo Sapiens
aaaacaugcaguaccuucuuauuacaagccaa

SEQ ID NO: 396919 - RNA, 32 nt, Homo Sapiens
cauguguuugagaucucagaucaguguuuuag

SEQ ID NO: 396920 - RNA, 31 nt, Homo Sapiens
agaugcuauugagacacugucaagggaaugg

SEQ ID NO: 396921 - RNA, 32 nt, Homo Sapiens
ucccucuagugcccucaagcucccaggauuua

SEQ ID NO: 396922 - RNA, 32 nt, Homo Sapiens
augccuggcuaauuuuuuuuuauuuuuuugua

SEQ ID NO: 396923 - RNA, 32 nt, Homo Sapiens
gggaaaugaaaaacaucugcaaugagagguaa

SEQ ID NO: 396924 - RNA, 32 nt, Homo Sapiens
acagaaaugaauugagugacaugagcaggaug

SEQ ID NO: 396925 - RNA, 32 nt, Homo Sapiens
cuaguuccugcaccacccaggauucaaaggaa

SEQ ID NO: 396926 - RNA, 32 nt, Homo Sapiens
cuccagcucccgcaggggucgccccgccggcg

SEQ ID NO: 396927 - RNA, 32 nt, Homo Sapiens
augcaguuuggggcagcuuuuuuaucagccuu

SEQ ID NO: 396928 - RNA, 32 nt, Homo Sapiens
aacagugggaggaggaacugugggacagugug

SEQ ID NO: 396929 - RNA, 32 nt, Homo Sapiens
cauguaccugacaguugaaacugcugagguag

SEQ ID NO: 396930 - RNA, 32 nt, Homo Sapiens
uagaauagauaaaaauuauuuugugaucauaa

SEQ ID NO: 396931 - RNA, 32 nt, Homo Sapiens
aaaagcagccaggagcacuuucuuagaguuua

SEQ ID NO: 396932 - RNA, 32 nt, Homo Sapiens
caagugauuucugucacccgccggcggaccga

SEQ ID NO: 396933 - RNA, 32 nt, Homo Sapiens
uaauucucagaaugaauauuuaauacauuugu

SEQ ID NO: 396934 - RNA, 32 nt, Homo Sapiens
uaaugauacuguaguuauuccaguuacuaguu

SEQ ID NO: 396935 - RNA, 32 nt, Homo Sapiens
ugcuuuuuucuuuuuauaacccaaaaagcagg

SEQ ID NO: 396936 - RNA, 32 nt, Homo Sapiens
guuucuuucuaaauuaugaccaaaaauauuuu

SEQ ID NO: 396937 - RNA, 32 nt, Homo Sapiens
cgccgcugauccgggaggagcuggggugagcc

SEQ ID NO: 396938 - RNA, 32 nt, Homo Sapiens
uaugauuaauuuaugcuauuuaauuuugugaa

SEQ ID NO: 396939 - RNA, 32 nt, Homo Sapiens
caagagcccgcgggcguccggcagccgagcgc

SEQ ID NO: 396940 - RNA, 32 nt, Homo Sapiens
uggccccaccucgcagguccacuuccggcgcc

SEQ ID NO: 396941 - RNA, 32 nt, Homo Sapiens
cccgagcgcgcccuccccgugcggccacucgc

SEQ ID NO: 396942 - RNA, 32 nt, Homo Sapiens
aucaaaaguauuuggagcauccauggauugca

SEQ ID NO: 396943 - RNA, 32 nt, Homo Sapiens
aacugagcucuuagguuuuuuaugacuuguga

SEQ ID NO: 396944 - RNA, 32 nt, Homo Sapiens
guuggagggugagggagucucacgcaccauga

SEQ ID NO: 396945 - RNA, 32 nt, Homo Sapiens
agagaggaagccuucuuagaacucugcuuacu

SEQ ID NO: 396946 - RNA, 32 nt, Homo Sapiens
uauguauuuuuuaguugugcuguaaugggcca

SEQ ID NO: 396947 - RNA, 32 nt, Homo Sapiens
cgcuuuuuaagugauccuuacagugguguuuu

SEQ ID NO: 396948 - RNA, 32 nt, Homo Sapiens
uuauccugcuuggccuggccaggccuggcaca

SEQ ID NO: 396949 - RNA, 32 nt, Homo Sapiens
uccugccgcucgacgccgcggcaggccgccug

SEQ ID NO: 396950 - RNA, 32 nt, Homo Sapiens
aucuauuuucuuuuacagucaucgaauacuuu

SEQ ID NO: 396951 - RNA, 32 nt, Homo Sapiens
aagagcagcauuucccaaaauguguuucauag

SEQ ID NO: 396952 - RNA, 32 nt, Homo Sapiens
ccaggaaguccucuuccuugugccuuaacaua

SEQ ID NO: 396953 - RNA, 32 nt, Homo Sapiens
uuuugugucaaagaagauuucccgcggcugaa

SEQ ID NO: 396954 - RNA, 32 nt, Homo Sapiens
ugugccuggcagcuacacgcccgggguggcca

SEQ ID NO: 396955 - RNA, 32 nt, Homo Sapiens
aaauagacauugccuuuagaaaacugaccuuu

SEQ ID NO: 396956 - RNA, 32 nt, Homo Sapiens
uccaacuguggccucagcaccaucucggauua

SEQ ID NO: 396957 - RNA, 32 nt, Homo Sapiens
uuuuggaugcucaaaaugccauaucuucaacc

SEQ ID NO: 396958 - RNA, 32 nt, Homo Sapiens
ugaugagcgagcucuguaccagcccuugucau

SEQ ID NO: 396959 - RNA, 32 nt, Homo Sapiens
cagaucacgcccuacguccgcuccauugccaa

SEQ ID NO: 396960 - RNA, 29 nt, Homo Sapiens
aaggaaauagugauguaaauaaacauguu

SEQ ID NO: 396961 - RNA, 32 nt, Homo Sapiens
cugccuggugucacaugcccacagcagccucg

SEQ ID NO: 396962 - RNA, 32 nt, Homo Sapiens
uuucaauacgauuuaauaucgaucagaguaau

SEQ ID NO: 396963 - RNA, 32 nt, Homo Sapiens
gagaggagcccccucccuguggagccuguuac

SEQ ID NO: 396964 - RNA, 32 nt, Homo Sapiens
acugaugggaauaaaaguauuaaugcuuugug

SEQ ID NO: 396965 - RNA, 32 nt, Homo Sapiens
uuuaauguucuuuucaaucccaucuagauaau

SEQ ID NO: 396966 - RNA, 32 nt, Homo Sapiens
guguacuucauaguguaaaaauuuauauuauu

SEQ ID NO: 396967 - RNA, 32 nt, Homo Sapiens
agguaaaucucucucugucacccaggcuggag

SEQ ID NO: 396968 - RNA, 30 nt, Homo Sapiens
cagagcggcaggcgagcugggguccggacu

SEQ ID NO: 396969 - RNA, 30 nt, Homo Sapiens
uucuccagauagcugaaugagucugcuuuc

SEQ ID NO: 396970 - RNA, 32 nt, Homo Sapiens
ccaaagcuagcagaagacaagacauaaccaaa

SEQ ID NO: 396971 - RNA, 32 nt, Homo Sapiens
agcucccauuggggucggcgaaccuggugcca

SEQ ID NO: 396972 - RNA, 32 nt, Homo Sapiens
augcuuuguaaauuuuauauuccaaauauugc

SEQ ID NO: 396973 - RNA, 32 nt, Homo Sapiens
agacuuugggaguccaauuugguuucagucau

SEQ ID NO: 396974 - RNA, 32 nt, Homo Sapiens
caacuaauuguaugaaacuuuuauauccuaau

SEQ ID NO: 396975 - RNA, 32 nt, Homo Sapiens
aguggcacaucccaccugcugauuccagcucc

SEQ ID NO: 396976 - RNA, 32 nt, Homo Sapiens
aguagccuccagguuuccuuaagggacaacau

SEQ ID NO: 396977 - RNA, 32 nt, Homo Sapiens
cagccccaguucugccccguccaucucuuucc

SEQ ID NO: 396978 - RNA, 32 nt, Homo Sapiens
ugccagaugcuuauaaaaccaucagaucuugu

SEQ ID NO: 396979 - RNA, 32 nt, Homo Sapiens
acauauggaaaacaauaugguagaacuuagua

SEQ ID NO: 396980 - RNA, 32 nt, Homo Sapiens
ugacucgugugaguucaaaguaaacaccacca

SEQ ID NO: 396981 - RNA, 32 nt, Homo Sapiens
cccguguuugcgcuugaccauguugcacuguu

SEQ ID NO: 396982 - RNA, 32 nt, Homo Sapiens
guucacuuuuacuuuucuuaaacuuaggcuuc

SEQ ID NO: 396983 - RNA, 32 nt, Homo Sapiens
caccuaucaagaaucaagagaauagauuguau

SEQ ID NO: 396984 - RNA, 32 nt, Homo Sapiens
cuuucccuccaaggcugacuccccgcugaccc

SEQ ID NO: 396985 - RNA, 32 nt, Homo Sapiens
ccgggggucccgcccgcgagcuuucuucucgc

SEQ ID NO: 396986 - RNA, 32 nt, Homo Sapiens
ugcauugagagaauaguuguuaauuuguuuag

SEQ ID NO: 396987 - RNA, 32 nt, Homo Sapiens
acugacguggaagccccaaacaacugagaaug

SEQ ID NO: 396988 - RNA, 32 nt, Homo Sapiens
uugggaagcagaguaagcaagugaggagacag

SEQ ID NO: 396989 - RNA, 32 nt, Homo Sapiens
ggugcggcagucugcaccgcgcgucgcuuucc

SEQ ID NO: 396990 - RNA, 32 nt, Homo Sapiens
ccugagcccuccccaugcaaggggcucauccu

SEQ ID NO: 396991 - RNA, 32 nt, Homo Sapiens
ugauucuucaaaucuaaaacuguccuaaaaua

SEQ ID NO: 396992 - RNA, 30 nt, Homo Sapiens
cuacagguuaaaagaccauaagcaaacugg

SEQ ID NO: 396993 - RNA, 32 nt, Homo Sapiens
uuucuuugaugaugaaggcucuggagagucac

SEQ ID NO: 396994 - RNA, 32 nt, Homo Sapiens
gugcaaagaacaaaagagaaauacagugaaaa

SEQ ID NO: 396995 - RNA, 32 nt, Homo Sapiens
cuguuuaguguguucugugaaugugcgggcag

SEQ ID NO: 396996 - RNA, 32 nt, Homo Sapiens
uaaaaauaaaauguuuuucaggaaacuucgua

SEQ ID NO: 396997 - RNA, 32 nt, Homo Sapiens
ugaauuaaauucaaaucacugauuucugaaau

SEQ ID NO: 396998 - RNA, 30 nt, Homo Sapiens
gagaggggagguggcucuccaguguaaaac

SEQ ID NO: 396999 - RNA, 32 nt, Homo Sapiens
uuuggaaaauacuuauacuaaaaaauuauuug

SEQ ID NO: 397000 - RNA, 32 nt, Homo Sapiens
guguuucugucauaaugcaggcaugaagggug

SEQ ID NO: 397001 - RNA, 32 nt, Homo Sapiens
ugagacccgaggggcggcggcgcgguuuuuua

SEQ ID NO: 397002 - RNA, 32 nt, Homo Sapiens
caaacugaaaauaagaaaacaaaaaucaaaug

SEQ ID NO: 397003 - RNA, 32 nt, Homo Sapiens
auauggaagaggaaaaggcugguacaacggag

SEQ ID NO: 397004 - RNA, 32 nt, Homo Sapiens
ugcugaguguuuuuaauaggagucaaaaagaa

SEQ ID NO: 397005 - RNA, 32 nt, Homo Sapiens
cagcuugggagagccccuggggccuagacucu

SEQ ID NO: 397006 - RNA, 32 nt, Homo Sapiens
gccgcuuggagcucguguggggucuccggucc

SEQ ID NO: 397007 - RNA, 32 nt, Homo Sapiens
uuucaguaccucagcuaucaacauuucugagc

SEQ ID NO: 397008 - RNA, 32 nt, Homo Sapiens
ugcucaagaauguacaguggcuccccaaugcc

SEQ ID NO: 397009 - RNA, 32 nt, Homo Sapiens
ggcgaucuggcccaccccggcgcugccguccc

SEQ ID NO: 397010 - RNA, 32 nt, Homo Sapiens
gggaccacgggagggacaaggcuucucugucc

SEQ ID NO: 397011 - RNA, 32 nt, Homo Sapiens
ggggaauugaagccaacaaaccuuccuucuua

SEQ ID NO: 397012 - RNA, 32 nt, Homo Sapiens
uaaauuaagaauagggaaaaacaucuaccuaa

SEQ ID NO: 397013 - RNA, 32 nt, Homo Sapiens
cucuaaacacaacagggcacagcaaauacgac

SEQ ID NO: 397014 - RNA, 32 nt, Homo Sapiens
ucuguuucucugaauaucuucauuucuaucuc

SEQ ID NO: 397015 - RNA, 32 nt, Homo Sapiens
gagacucacagcaccccuuuccuuccucuccu

SEQ ID NO: 397016 - RNA, 32 nt, Homo Sapiens
ggaaaagaggacaugcuccuaagcaaaagccc

SEQ ID NO: 397017 - RNA, 32 nt, Homo Sapiens
cuggccccuuuuccacacuccuccuccgacag

SEQ ID NO: 397018 - RNA, 32 nt, Homo Sapiens
gaucucauauggcaucauagaugcuaaauaaa

SEQ ID NO: 397019 - RNA, 32 nt, Homo Sapiens
auucagauauaaaacaguuuugucagucuuuc

SEQ ID NO: 397020 - RNA, 32 nt, Homo Sapiens
ccacccauagagcucauccucuguggaaucac

SEQ ID NO: 397021 - RNA, 32 nt, Homo Sapiens
acuguaugguggagaaagaagugggaaggauc

SEQ ID NO: 397022 - RNA, 32 nt, Homo Sapiens
ugaagcagauuaacagaagagugaucagugac

SEQ ID NO: 397023 - RNA, 32 nt, Homo Sapiens
uucagauacuaaaauauuauuugaucauaucu

SEQ ID NO: 397024 - RNA, 32 nt, Homo Sapiens
guggacgccaagggggcaacuucucaggccca

SEQ ID NO: 397025 - RNA, 32 nt, Homo Sapiens
aaaugaaggugucaaagaguccauucaccuga

SEQ ID NO: 397026 - RNA, 32 nt, Homo Sapiens
uagcagaguuguggggaaauccugucauauuu

SEQ ID NO: 397027 - RNA, 32 nt, Homo Sapiens
acuuacucaagucuuaugaauucugugccuuu

SEQ ID NO: 397028 - RNA, 32 nt, Homo Sapiens
auaauuggccccaggacauucugagacuccaa

SEQ ID NO: 397029 - RNA, 32 nt, Homo Sapiens
cgucgacggcccgacgcgcauagccccucuuc

SEQ ID NO: 397030 - RNA, 32 nt, Homo Sapiens
gcugccuacaguugacucuccucucccguuuu

SEQ ID NO: 397031 - RNA, 32 nt, Homo Sapiens
uaauuaccugucaucugggccaccagcuccac

SEQ ID NO: 397032 - RNA, 32 nt, Homo Sapiens
agaaguggaagucaaggcuaguucauguaaug

SEQ ID NO: 397033 - RNA, 32 nt, Homo Sapiens
uacuuugucaccccccucccccugccacccuc

SEQ ID NO: 397034 - RNA, 32 nt, Homo Sapiens
gucucuacuaaaauacaaaaauuuagccgggc

SEQ ID NO: 397035 - RNA, 32 nt, Homo Sapiens
gacugcuucuaaaguaauuuuuguaaguaaug

SEQ ID NO: 397036 - RNA, 32 nt, Homo Sapiens
ccugccugccuguuccuucuccuuuauggacg

SEQ ID NO: 397037 - RNA, 32 nt, Homo Sapiens
auaaugggaaacaaaacuaucuauguucauau

SEQ ID NO: 397038 - RNA, 32 nt, Homo Sapiens
uccagacagugcccccaccucccaccgccuug

SEQ ID NO: 397039 - RNA, 29 nt, Homo Sapiens
cagcucucuggccaccauggcaaaugcug

SEQ ID NO: 397040 - RNA, 32 nt, Homo Sapiens
caugcugugcuaaugaaagggaucauaucauc

SEQ ID NO: 397041 - RNA, 32 nt, Homo Sapiens
ucuacuaaaauuacaaaaauuagccggguguc

SEQ ID NO: 397042 - RNA, 32 nt, Homo Sapiens
acgguguuaaaaaaaaucauggugaggcuaca

SEQ ID NO: 397043 - RNA, 32 nt, Homo Sapiens
acaguuuuaugcucuuuuuuacucauugaaau

SEQ ID NO: 397044 - RNA, 32 nt, Homo Sapiens
uauuacugucuccuuuaucuguucaaugucca

SEQ ID NO: 397045 - RNA, 32 nt, Homo Sapiens
uaaggugucugguaauuuuuuguggaugccga

SEQ ID NO: 397046 - RNA, 28 nt, Homo Sapiens
cguccagggcggcccuuggguggccagu

SEQ ID NO: 397047 - RNA, 32 nt, Homo Sapiens
ucaaagucaaacaaaaauauuuuaguuaauaa

SEQ ID NO: 397048 - RNA, 32 nt, Homo Sapiens
aagucggccuccccgggcccagcuccguccuc

SEQ ID NO: 397049 - RNA, 32 nt, Homo Sapiens
uggaggagggggucagcggggagagccugccc

SEQ ID NO: 397050 - RNA, 32 nt, Homo Sapiens
aaggugcacggcauccugggacauguagucug

SEQ ID NO: 397051 - RNA, 32 nt, Homo Sapiens
uucuugugguuuugugauuuuguuguauuuaa

SEQ ID NO: 397052 - RNA, 32 nt, Homo Sapiens
aggacgggacagccuucagcugcaccccggac

SEQ ID NO: 397053 - RNA, 32 nt, Homo Sapiens
uucaaaagggaaggaggcagacaguaaacaaa

SEQ ID NO: 397054 - RNA, 32 nt, Homo Sapiens
cccacacugccccaccagcucuaggcccugga

SEQ ID NO: 397055 - RNA, 31 nt, Homo Sapiens
ccagagccgcgcugccugcagugcgcucuga

SEQ ID NO: 397056 - RNA, 32 nt, Homo Sapiens
ccagccugcagggcugauaagcgaggcauuag

SEQ ID NO: 397057 - RNA, 32 nt, Homo Sapiens
uugcagaugaaaauaaagguguuuuugguuaa

SEQ ID NO: 397058 - RNA, 32 nt, Homo Sapiens
agagaggccgggggcugcucagacucaaugac

SEQ ID NO: 397059 - RNA, 32 nt, Homo Sapiens
uccguuauccacccgauuuccuaauguaauug

SEQ ID NO: 397060 - RNA, 32 nt, Homo Sapiens
gacagggggcgcugcgcgcggccuggggcaac

SEQ ID NO: 397061 - RNA, 32 nt, Homo Sapiens
guagcugggacuacaguugugcucuaccacac

SEQ ID NO: 397062 - RNA, 32 nt, Homo Sapiens
gcuuauuucaacaugaguaauaugagcaaaau

SEQ ID NO: 397063 - RNA, 31 nt, Homo Sapiens
uauugcuauugagccuggggcugugggaguu

SEQ ID NO: 397064 - RNA, 32 nt, Homo Sapiens
cuucuuagggacgugccuggaaccaccucguc

SEQ ID NO: 397065 - RNA, 32 nt, Homo Sapiens
uauaacaaaaggaaacaaaucuaagaaucauu

SEQ ID NO: 397066 - RNA, 32 nt, Homo Sapiens
guucagggccgcgggcccguccgggugccccg

SEQ ID NO: 397067 - RNA, 32 nt, Homo Sapiens
ucccuguuccagggaaggcguugggaugaugg

SEQ ID NO: 397068 - RNA, 32 nt, Homo Sapiens
ugaggggaggaaccggccgggccucgccgcgc

SEQ ID NO: 397069 - RNA, 32 nt, Homo Sapiens
accagugcaggccagcagcagagggcggcgga

SEQ ID NO: 397070 - RNA, 32 nt, Homo Sapiens
uaauaacuuuguuacugugcugugaaagauua

SEQ ID NO: 397071 - RNA, 32 nt, Homo Sapiens
ucaagggugauuuuuucuuaaauaucaagcug

SEQ ID NO: 397072 - RNA, 32 nt, Homo Sapiens
guggaaguacaagggcagcugauaaaaagucc

SEQ ID NO: 397073 - RNA, 32 nt, Homo Sapiens
cgccuccgccaccgccucggcccgcagagcuu

SEQ ID NO: 397074 - RNA, 32 nt, Homo Sapiens
gugccugcgggaagucgggccgggggacucuu

SEQ ID NO: 397075 - RNA, 32 nt, Homo Sapiens
acgcgcgacggcggggggaagauggcggaguc

SEQ ID NO: 397076 - RNA, 31 nt, Homo Sapiens
auauaaaaacugaauaagguauauuaauacc

SEQ ID NO: 397077 - RNA, 32 nt, Homo Sapiens
ccggagcgaagccuuacaaguguugggagugu

SEQ ID NO: 397078 - RNA, 32 nt, Homo Sapiens
aaccagaaauaccacauuuauggaccaugaaa

SEQ ID NO: 397079 - RNA, 32 nt, Homo Sapiens
agccuggagcggaggcacccagugucccuuuc

SEQ ID NO: 397080 - RNA, 32 nt, Homo Sapiens
acucuaauuccacaauaugccaaauacucaua

SEQ ID NO: 397081 - RNA, 32 nt, Homo Sapiens
uccauuaccguaaaacuuaaugguggacaagu

SEQ ID NO: 397082 - RNA, 32 nt, Homo Sapiens
uccuuccuuccuucuuuuuuguuuuugccccc

SEQ ID NO: 397083 - RNA, 32 nt, Homo Sapiens
guucuucuccguguccccccaggccguguaca

SEQ ID NO: 397084 - RNA, 32 nt, Homo Sapiens
ucauaccugagaaaaaccugugaaugugggua

SEQ ID NO: 397085 - RNA, 32 nt, Homo Sapiens
caguugcaacccucucugcccuugcuucaugu

SEQ ID NO: 397086 - RNA, 30 nt, Homo Sapiens
ugcaagccagccgccggugcuguugcccaa

SEQ ID NO: 397087 - RNA, 27 nt, Homo Sapiens
ugcaggucucccuucagccaccuccuu

SEQ ID NO: 397088 - RNA, 32 nt, Homo Sapiens
cuccaaacugcccagcagcaccaagucgggcu

SEQ ID NO: 397089 - RNA, 32 nt, Homo Sapiens
gggaucggagaaugcucccgaaggccaggccc

SEQ ID NO: 397090 - RNA, 32 nt, Homo Sapiens
agcuucccaucccccaccagacagccacagua

SEQ ID NO: 397091 - RNA, 32 nt, Homo Sapiens
gcaaaggaggauguggcaaaaccaaggagaga

SEQ ID NO: 397092 - RNA, 32 nt, Homo Sapiens
ccccugucccccacccugacccucccauggcc

SEQ ID NO: 397093 - RNA, 32 nt, Homo Sapiens
acguguccccuacaagcacagacacagaggcc

SEQ ID NO: 397094 - RNA, 32 nt, Homo Sapiens
gcaggcgcucucgcacccacacugccgcucac

SEQ ID NO: 397095 - RNA, 32 nt, Homo Sapiens
agagaucacaaagcggccaggcaggugggaga

SEQ ID NO: 397096 - RNA, 32 nt, Homo Sapiens
aacaauaagcauucuguacugaaggugccagg

SEQ ID NO: 397097 - RNA, 32 nt, Homo Sapiens
gcaaccaaaaaggucagcacaaaggccuucac

SEQ ID NO: 397098 - RNA, 32 nt, Homo Sapiens
ccacccacugucaucuccauuaccccguccca

SEQ ID NO: 397099 - RNA, 31 nt, Homo Sapiens
gcuggguggcacugccaugcagggccucaca

SEQ ID NO: 397100 - RNA, 32 nt, Homo Sapiens
cccaggccuccggcugcucccggccgaaggug

SEQ ID NO: 397101 - RNA, 32 nt, Homo Sapiens
uauuuugaacaaaaagacacuuauaauuuucc

SEQ ID NO: 397102 - RNA, 32 nt, Homo Sapiens
ccucccggguggcugggaucacaggcgugcac

SEQ ID NO: 397103 - RNA, 32 nt, Homo Sapiens
gccagcgggaggaggccagccuugcccgagau

SEQ ID NO: 397104 - RNA, 32 nt, Homo Sapiens
uggaagcuugggcuugcaaguggauccgggac

SEQ ID NO: 397105 - RNA, 32 nt, Homo Sapiens
aaccguuugagccuuauagaucauuuacauuc

SEQ ID NO: 397106 - RNA, 32 nt, Homo Sapiens
agggcggacugcgcgcgcccccugcgucccgc

SEQ ID NO: 397107 - RNA, 32 nt, Homo Sapiens
agauagauaaccuuacaaggagaauguuuguu

SEQ ID NO: 397108 - RNA, 32 nt, Homo Sapiens
acuauaaaaaggaaacaccauuauaaaguuuc

SEQ ID NO: 397109 - RNA, 30 nt, Homo Sapiens
ucuggaaugcucugcauccggggccccugg

SEQ ID NO: 397110 - RNA, 32 nt, Homo Sapiens
uggggccuggggaaagggcuuggacugugaaa

SEQ ID NO: 397111 - RNA, 32 nt, Homo Sapiens
cgcacagugccaagcccuccugguuuuuaauu

SEQ ID NO: 397112 - RNA, 32 nt, Homo Sapiens
uugauguuaugucugcuaaaguaaauuuguca

SEQ ID NO: 397113 - RNA, 32 nt, Homo Sapiens
aauuccugcaauuuaugcugcaaccaacaucu

SEQ ID NO: 397114 - RNA, 32 nt, Homo Sapiens
agaaacacugaauaaugauaauuaaaugggua

SEQ ID NO: 397115 - RNA, 32 nt, Homo Sapiens
gucugggccccggugcauggccuguugucuuu

SEQ ID NO: 397116 - RNA, 32 nt, Homo Sapiens
agcugcgggucccgcccgccgcgcuccucccu

SEQ ID NO: 397117 - RNA, 32 nt, Homo Sapiens
uccggggcggcccccggcagccagcgcgacgu

SEQ ID NO: 397118 - RNA, 32 nt, Homo Sapiens
ggcaagagaaugaaggaggcuaaggaaaagcg

SEQ ID NO: 397119 - RNA, 32 nt, Homo Sapiens
gcuguaaagccaugguagugucuaagugguau

SEQ ID NO: 397120 - RNA, 32 nt, Homo Sapiens
cuauagcaaaaaagccuugaccaagagcuugg

SEQ ID NO: 397121 - RNA, 32 nt, Homo Sapiens
aaggaaauuaauguuucuuaauaauccuguua

SEQ ID NO: 397122 - RNA, 32 nt, Homo Sapiens
cugagccucgguuuccccaucuaaggaacaga

SEQ ID NO: 397123 - RNA, 32 nt, Homo Sapiens
aacauugucaaguggaaacaugcugaaaucua

SEQ ID NO: 397124 - RNA, 32 nt, Homo Sapiens
uuuuauuuaaguguuauaccuauuucagcaaa

SEQ ID NO: 397125 - RNA, 32 nt, Homo Sapiens
acaggaccggguggaagggauggggugccagu

SEQ ID NO: 397126 - RNA, 32 nt, Homo Sapiens
aaucccaaguguaggaaaaauaugcagacaua

SEQ ID NO: 397127 - RNA, 32 nt, Homo Sapiens
cagccugccuugggccagggccccacgacucc

SEQ ID NO: 397128 - RNA, 32 nt, Homo Sapiens
ggagagucuugacuacaagggucaugucaauu

SEQ ID NO: 397129 - RNA, 32 nt, Homo Sapiens
cuucagucucaguucugaaaauagaucaucau

SEQ ID NO: 397130 - RNA, 32 nt, Homo Sapiens
cauccuccugggauuggcugugaacugaucau

SEQ ID NO: 397131 - RNA, 32 nt, Homo Sapiens
ccgcgggccccggcaccccgcccagcugugca

SEQ ID NO: 397132 - RNA, 32 nt, Homo Sapiens
ggcuuuguauuacuguaguauugaauaguuuu

SEQ ID NO: 397133 - RNA, 32 nt, Homo Sapiens
guuguaaacacaaaaacaaaaauauacuuuaa

SEQ ID NO: 397134 - RNA, 32 nt, Homo Sapiens
cauccccuuucugcugcaggaaccucucauca

SEQ ID NO: 397135 - RNA, 32 nt, Homo Sapiens
gucucuuaaagauaauucugcuaguugcugau

SEQ ID NO: 397136 - RNA, 32 nt, Homo Sapiens
uauaaccguuacaacuucaacaaaaucaaguc

SEQ ID NO: 397137 - RNA, 32 nt, Homo Sapiens
gggaaaaucuuggcuccuuccauaggccuuac

SEQ ID NO: 397138 - RNA, 32 nt, Homo Sapiens
guuuccuggccggggaccaccgggccaacgag

SEQ ID NO: 397139 - RNA, 32 nt, Homo Sapiens
ggcgcgccgcgugcacagccggcgcucguucc

SEQ ID NO: 397140 - RNA, 32 nt, Homo Sapiens
cucuuugccgucggagcgcuuguuugcugccu

SEQ ID NO: 397141 - RNA, 32 nt, Homo Sapiens
cuuuauauuuuuccuuuugauaaagggaugcu

SEQ ID NO: 397142 - RNA, 32 nt, Homo Sapiens
uggagaagaucugcuagauccaaauauugaua

SEQ ID NO: 397143 - RNA, 32 nt, Homo Sapiens
ccugggcccaggugggggucgccugcuuccuu

SEQ ID NO: 397144 - RNA, 32 nt, Homo Sapiens
gccucucuggcauuucagagccagcauccccc

SEQ ID NO: 397145 - RNA, 32 nt, Homo Sapiens
gcagaaagaggacuguggggcuggagcguggu

SEQ ID NO: 397146 - RNA, 32 nt, Homo Sapiens
cucuccacagaaaauuagaaacucagaaaugg

SEQ ID NO: 397147 - RNA, 32 nt, Homo Sapiens
uagaauugaaagacuucagcaguauuaaagca

SEQ ID NO: 397148 - RNA, 32 nt, Homo Sapiens
gcgggacagggcccggggagcggcaggaaaug

SEQ ID NO: 397149 - RNA, 32 nt, Homo Sapiens
ggcagcagcugcagcaucaucuccacccucca

SEQ ID NO: 397150 - RNA, 32 nt, Homo Sapiens
cugagacacugagacucauugagaugacaaga

SEQ ID NO: 397151 - RNA, 32 nt, Homo Sapiens
gaaaccaagaaaccugagaaccaagagaacug

SEQ ID NO: 397152 - RNA, 32 nt, Homo Sapiens
cacgggcgcuuugggcccucgguuggccucag

SEQ ID NO: 397153 - RNA, 32 nt, Homo Sapiens
uuauauugauguucauauuguguaaaauaacu

SEQ ID NO: 397154 - RNA, 32 nt, Homo Sapiens
ccagcauccaugaaacuguggcagacucacuu

SEQ ID NO: 397155 - RNA, 32 nt, Homo Sapiens
uuguuucccuucuauuugaucuuuaaauauug

SEQ ID NO: 397156 - RNA, 32 nt, Homo Sapiens
uggauaugagcaauuuuaaaucugcaaccuga

SEQ ID NO: 397157 - RNA, 32 nt, Homo Sapiens
uaguccagucucuccagcaucaauuccaucag

SEQ ID NO: 397158 - RNA, 32 nt, Homo Sapiens
cccggccggcgccccguccccuucugcauguc

SEQ ID NO: 397159 - RNA, 32 nt, Homo Sapiens
ucucucuuucuuuucccuacagauggacacgc

SEQ ID NO: 397160 - RNA, 32 nt, Homo Sapiens
ccccggccuaagaagcucucuuaucuugcauc

SEQ ID NO: 397161 - RNA, 32 nt, Homo Sapiens
cugauagcucuuugggucccacuguuccauuu

SEQ ID NO: 397162 - RNA, 32 nt, Homo Sapiens
uccugccguagagaaugauagagcagcugcuc

SEQ ID NO: 397163 - RNA, 32 nt, Homo Sapiens
cacgugugugucaucuuccucuuucacacucu

SEQ ID NO: 397164 - RNA, 32 nt, Homo Sapiens
cccgccagccucagccaggugggccuguauau

SEQ ID NO: 397165 - RNA, 32 nt, Homo Sapiens
caggugccaaagagcaggccggccagggcugg

SEQ ID NO: 397166 - RNA, 32 nt, Homo Sapiens
uacuuuagugaacguggacuccagacucucug

SEQ ID NO: 397167 - RNA, 32 nt, Homo Sapiens
gucugcagggggagcucugugccuuaguggcu

SEQ ID NO: 397168 - RNA, 32 nt, Homo Sapiens
accuguuuacauuuagcgauaaaauuauuuuu

SEQ ID NO: 397169 - RNA, 27 nt, Homo Sapiens
cuauggcgguggacaucacgcugcuau

SEQ ID NO: 397170 - RNA, 32 nt, Homo Sapiens
cgccgacggccucucaguggcucccggaggac

SEQ ID NO: 397171 - RNA, 32 nt, Homo Sapiens
gucuuuauaauucaugugguaguuaccuauaa

SEQ ID NO: 397172 - RNA, 32 nt, Homo Sapiens
cgcugcgguaacggagcgguuuggguggcgga

SEQ ID NO: 397173 - RNA, 32 nt, Homo Sapiens
cacacacacacacacacacacacacacagagc

SEQ ID NO: 397174 - RNA, 32 nt, Homo Sapiens
ucccccaccccauuucucuccucacacacaga

SEQ ID NO: 397175 - RNA, 32 nt, Homo Sapiens
agagggcuguugggggcccucagggaggguuc

SEQ ID NO: 397176 - RNA, 32 nt, Homo Sapiens
gcacagaggggagaggggccagggaaguggau

SEQ ID NO: 397177 - RNA, 32 nt, Homo Sapiens
cuucugcagaucaaauaggauaccaagagaag

SEQ ID NO: 397178 - RNA, 32 nt, Homo Sapiens
gguaauuguaaaaauaaauacaguggacgcaa

SEQ ID NO: 397179 - RNA, 32 nt, Homo Sapiens
uugauauuugcaacuuguuuugcuuuuccauu

SEQ ID NO: 397180 - RNA, 32 nt, Homo Sapiens
uauauucacaucugcauucugugagugcgggu

SEQ ID NO: 397181 - RNA, 32 nt, Homo Sapiens
ugugaggccccauugcccagagcacagcuaug

SEQ ID NO: 397182 - RNA, 32 nt, Homo Sapiens
ucuccaaaacaauuuucugcaggaugauugua

SEQ ID NO: 397183 - RNA, 30 nt, Homo Sapiens
ugacccuuaagugccacccuucuuggaaga

SEQ ID NO: 397184 - RNA, 32 nt, Homo Sapiens
gaacuuuugcugucacauaaugcuaaggacau

SEQ ID NO: 397185 - RNA, 32 nt, Homo Sapiens
aggcucugccugugcgaccgccgcccacccga

SEQ ID NO: 397186 - RNA, 32 nt, Homo Sapiens
gaaauuaaucacaacuaucucucuugccuaaa

SEQ ID NO: 397187 - RNA, 32 nt, Homo Sapiens
gagccaggguccugggguuuugugcugggcag

SEQ ID NO: 397188 - RNA, 32 nt, Homo Sapiens
gagcuugcagugagccgagaucgcgccaccgc

SEQ ID NO: 397189 - RNA, 32 nt, Homo Sapiens
accacuucggacacaccagggauugagugcug

SEQ ID NO: 397190 - RNA, 32 nt, Homo Sapiens
auuaagcagggcccuguagcucuacucgugug

SEQ ID NO: 397191 - RNA, 32 nt, Homo Sapiens
ggagaggggaguccgcucuguccugaaggccc

SEQ ID NO: 397192 - RNA, 32 nt, Homo Sapiens
aguccgggcuggagccgaggccggagcagcug

SEQ ID NO: 397193 - RNA, 32 nt, Homo Sapiens
ccuagcauauccuugaagggagcuguguaagc

SEQ ID NO: 397194 - RNA, 32 nt, Homo Sapiens
ccaggagcauuuuuuaaaauacaggauuuuaa

SEQ ID NO: 397195 - RNA, 32 nt, Homo Sapiens
ugcgagggagaaucaugguucugcagucuggu

SEQ ID NO: 397196 - RNA, 32 nt, Homo Sapiens
aaguagcagcccagcccgcccagccccaggug

SEQ ID NO: 397197 - RNA, 32 nt, Homo Sapiens
ugccuuugccgcugggcuuuccgggacugugg

SEQ ID NO: 397198 - RNA, 32 nt, Homo Sapiens
caaaacaaaacaaaaaacucugacagagaugu

SEQ ID NO: 397199 - RNA, 32 nt, Homo Sapiens
aauuugauugaaaauagaaacaucuacagcuc

SEQ ID NO: 397200 - RNA, 32 nt, Homo Sapiens
guagugcgcuccccgcccagccugcagagcuc

SEQ ID NO: 397201 - RNA, 32 nt, Homo Sapiens
gaugggugcccccauccgcacacuguccuuug

SEQ ID NO: 397202 - RNA, 32 nt, Homo Sapiens
caacucaauauuugaauuguugccccauuugc

SEQ ID NO: 397203 - RNA, 32 nt, Homo Sapiens
aagcuaaauggcaucccagcugcuccuuucug

SEQ ID NO: 397204 - RNA, 32 nt, Homo Sapiens
ccuuccugaguuggccccacuccacuuggggg

SEQ ID NO: 397205 - RNA, 32 nt, Homo Sapiens
gcuauugaauaaagaccuucuaucuugaaaaa

SEQ ID NO: 397206 - RNA, 32 nt, Homo Sapiens
uaaggcuuuuccucccuucucugguuucaaag

SEQ ID NO: 397207 - RNA, 32 nt, Homo Sapiens
ccuuccauuucccauccauugcuucaaacaau

SEQ ID NO: 397208 - RNA, 32 nt, Homo Sapiens
gcuuuacauuuguuuguaaaucuaaacaaaua

SEQ ID NO: 397209 - RNA, 32 nt, Homo Sapiens
cacccacauccccaauaaagccgcguccuugg

SEQ ID NO: 397210 - RNA, 32 nt, Homo Sapiens
gaccacagaccccacaccaggucuaucucauu

SEQ ID NO: 397211 - RNA, 32 nt, Homo Sapiens
ucuguuccucaaugugugacauugguggcauc

SEQ ID NO: 397212 - RNA, 32 nt, Homo Sapiens
aaguucucuuugcaucagaucugaaaugucug

SEQ ID NO: 397213 - RNA, 32 nt, Homo Sapiens
cacuauucucugccuuuuuuuuccuauuuauu

SEQ ID NO: 397214 - RNA, 32 nt, Homo Sapiens
acaggcccugucaccaccaauaucuuauuuca

SEQ ID NO: 397215 - RNA, 32 nt, Homo Sapiens
ugugaccuggggaugguggagggucaccaucc

SEQ ID NO: 397216 - RNA, 32 nt, Homo Sapiens
cuggccugagcuggggggaggggugccuuggg

SEQ ID NO: 397217 - RNA, 32 nt, Homo Sapiens
auagcacugcggagcaggcugaagagguccag

SEQ ID NO: 397218 - RNA, 32 nt, Homo Sapiens
cucuggacgaucacggguggacagucugagca

SEQ ID NO: 397219 - RNA, 32 nt, Homo Sapiens
aaacaauauuuuccucuaacaguaaacugcaa

SEQ ID NO: 397220 - RNA, 32 nt, Homo Sapiens
guacaauacuauugaaacuggugaguucugau

SEQ ID NO: 397221 - RNA, 32 nt, Homo Sapiens
aucuucgcauauucugauggcaaaacaagugg

SEQ ID NO: 397222 - RNA, 32 nt, Homo Sapiens
uccucaggucacauuucggggagccagccucc

SEQ ID NO: 397223 - RNA, 32 nt, Homo Sapiens
uuuaaucuuuggaugccugaauuuuaaaaggg

SEQ ID NO: 397224 - RNA, 32 nt, Homo Sapiens
cagagugaagaucaagaaaugucucugcuccu

SEQ ID NO: 397225 - RNA, 32 nt, Homo Sapiens
gcaagugagaccuggugaggguggcucagcag

SEQ ID NO: 397226 - RNA, 32 nt, Homo Sapiens
cugcggcggaggagguggcggcggccgaaucg

SEQ ID NO: 397227 - RNA, 32 nt, Homo Sapiens
uaaggaaugaccuggaacaggccuuagaaaca

SEQ ID NO: 397228 - RNA, 32 nt, Homo Sapiens
agaaaugguuaaauaucuuccagauguugcug

SEQ ID NO: 397229 - RNA, 32 nt, Homo Sapiens
cccugccuugcugcagccccagcccagauggc

SEQ ID NO: 397230 - RNA, 32 nt, Homo Sapiens
acugccugcuggagaaaaaacacacuccuuug

SEQ ID NO: 397231 - RNA, 32 nt, Homo Sapiens
gcugggcagggaugccaggugggcccagccag

SEQ ID NO: 397232 - RNA, 32 nt, Homo Sapiens
aauuugaauaaaaucaacacuaaccagcccua

SEQ ID NO: 397233 - RNA, 32 nt, Homo Sapiens
agucucgcggugcugccgggcucagccccguc

SEQ ID NO: 397234 - RNA, 32 nt, Homo Sapiens
ugcacggaccccaugggagcugcgaguggguc

SEQ ID NO: 397235 - RNA, 32 nt, Homo Sapiens
cuuaugcugucaacugacuguacuugcuacuu

SEQ ID NO: 397236 - RNA, 30 nt, Homo Sapiens
cgggcgcccugcucagccagcgccagcggc

SEQ ID NO: 397237 - RNA, 32 nt, Homo Sapiens
ccucccacucucccaaccccugcuccagccac

SEQ ID NO: 397238 - RNA, 32 nt, Homo Sapiens
cuccggccucagcucccuccccaaagugccug

SEQ ID NO: 397239 - RNA, 26 nt, Homo Sapiens
uuuagcaaaaauacacgugaaaucug

SEQ ID NO: 397240 - RNA, 32 nt, Homo Sapiens
gcagcugagcaaggacuacgcccgcaaggccg

SEQ ID NO: 397241 - RNA, 30 nt, Homo Sapiens
agauugagugcugcgaucgccuugagucca

SEQ ID NO: 397242 - RNA, 32 nt, Homo Sapiens
auccuugagaaagaauaauaccaguacuaaua

SEQ ID NO: 397243 - RNA, 32 nt, Homo Sapiens
ucagguagacaagugauaguguguguaaccca

SEQ ID NO: 397244 - RNA, 32 nt, Homo Sapiens
gaggaauggaggaugccaggaugcaggucaag

SEQ ID NO: 397245 - RNA, 32 nt, Homo Sapiens
augacccgcucuugcgggcucuguccgguuga

SEQ ID NO: 397246 - RNA, 32 nt, Homo Sapiens
ccaccuccuaaaaccugccuacuucaggacuu

SEQ ID NO: 397247 - RNA, 32 nt, Homo Sapiens
acaagcccagaguggaugggcugggggagggg

SEQ ID NO: 397248 - RNA, 32 nt, Homo Sapiens
uuccugcagccgccgccuccgaaggagcgggu

SEQ ID NO: 397249 - RNA, 32 nt, Homo Sapiens
uuguggaugagagacucacacccagucccugg

SEQ ID NO: 397250 - RNA, 32 nt, Homo Sapiens
uugguuuauacuguguuuuaaauagaaguauu

SEQ ID NO: 397251 - RNA, 32 nt, Homo Sapiens
aggaggcugugaggaguguguggaacaggacc

SEQ ID NO: 397252 - RNA, 32 nt, Homo Sapiens
acggagaaaaggacuagguggcugccaacgcg

SEQ ID NO: 397253 - RNA, 32 nt, Homo Sapiens
cccaggaggaggaggcugcagugagcuaagau

SEQ ID NO: 397254 - RNA, 32 nt, Homo Sapiens
gcuguccccucgcaacuccaggauggugugua

SEQ ID NO: 397255 - RNA, 32 nt, Homo Sapiens
ccgaugcaggacucaccucugugccuugcugc

SEQ ID NO: 397256 - RNA, 32 nt, Homo Sapiens
cuggugugcuuggcggucccaggccuguguag

SEQ ID NO: 397257 - RNA, 32 nt, Homo Sapiens
acucuaccucccucacucagcuccuuuccccu

SEQ ID NO: 397258 - RNA, 32 nt, Homo Sapiens
ggaggcucgcuaacuuuccggggcggaagagg

SEQ ID NO: 397259 - RNA, 32 nt, Homo Sapiens
accagagacgucagcaucucaagggcacugug

SEQ ID NO: 397260 - RNA, 32 nt, Homo Sapiens
cacuuucugaggaugccucacuucccugggcu

SEQ ID NO: 397261 - RNA, 32 nt, Homo Sapiens
ccccgcugcaggucgggcgucuccccccgugc

SEQ ID NO: 397262 - RNA, 32 nt, Homo Sapiens
cuccucaucgccaacacccccaugcucugugg

SEQ ID NO: 397263 - RNA, 32 nt, Homo Sapiens
acuugagggcagcugggaaauucauuucaagc

SEQ ID NO: 397264 - RNA, 32 nt, Homo Sapiens
aguggggacgggggcugcuucuccaccucccc

SEQ ID NO: 397265 - RNA, 32 nt, Homo Sapiens
auacauuguauguguuaaaaagaaauuugcaa

SEQ ID NO: 397266 - RNA, 32 nt, Homo Sapiens
aguugaugaugaugguuagauggccucacaag

SEQ ID NO: 397267 - RNA, 32 nt, Homo Sapiens
gcaagucagaggcuaaauuugcaauuguacuu

SEQ ID NO: 397268 - RNA, 32 nt, Homo Sapiens
cugaugggccccacaaggugacagugcuggcu

SEQ ID NO: 397269 - RNA, 32 nt, Homo Sapiens
ggcaugugucgggcuacgcucgggcuuccccu

SEQ ID NO: 397270 - RNA, 32 nt, Homo Sapiens
ggugauuuuaucaauuccaguguuaccaucuc

SEQ ID NO: 397271 - RNA, 32 nt, Homo Sapiens
ccuaauccagcaugacuagaauauaagcaggc

SEQ ID NO: 397272 - RNA, 32 nt, Homo Sapiens
ggggaggggggccucuuuagcucucuuuaucu

SEQ ID NO: 397273 - RNA, 32 nt, Homo Sapiens
ggugcuuuuuaaaauaauuuccauaguuucuu

SEQ ID NO: 397274 - RNA, 32 nt, Homo Sapiens
auuugcucagaugccacccaauaaaaugccug

SEQ ID NO: 397275 - RNA, 32 nt, Homo Sapiens
ccugggucagccgcaucacagacaaugacuug

SEQ ID NO: 397276 - RNA, 32 nt, Homo Sapiens
uacaggcgcccgccaccacaccuggcuaauuu

SEQ ID NO: 397277 - RNA, 32 nt, Homo Sapiens
ggggcaccuuccuggggcccuguuuuucccca

SEQ ID NO: 397278 - RNA, 32 nt, Homo Sapiens
agccugacugacuuuucuuacugguuuuuaug

SEQ ID NO: 397279 - RNA, 32 nt, Homo Sapiens
ggugucucuccuucucugaccgcggccgcagc

SEQ ID NO: 397280 - RNA, 32 nt, Homo Sapiens
gauucccagucuuuuccuguuccuccucuagg

SEQ ID NO: 397281 - RNA, 32 nt, Homo Sapiens
ugucuuuuuguuuuggggcacaacaauacugg

SEQ ID NO: 397282 - RNA, 32 nt, Homo Sapiens
uugaaggcauaguggaugagccacaccauugc

SEQ ID NO: 397283 - RNA, 32 nt, Homo Sapiens
cuccgcucugccagcccucacugcugcccguc

SEQ ID NO: 397284 - RNA, 32 nt, Homo Sapiens
ggcauucuggacccggagggccagagaaacag

SEQ ID NO: 397285 - RNA, 32 nt, Homo Sapiens
gggagguuuguguacacccauguauuuaaaag

SEQ ID NO: 397286 - RNA, 32 nt, Homo Sapiens
acgccgggauccuggaacagcucuucaggucu

SEQ ID NO: 397287 - RNA, 32 nt, Homo Sapiens
cucgugccgccgggcucuugguaccucagcgc

SEQ ID NO: 397288 - RNA, 32 nt, Homo Sapiens
gcguccaccucgccgcucgguucgcuguccca

SEQ ID NO: 397289 - RNA, 32 nt, Homo Sapiens
cuguagcuccuuccuugcuccacuuuccccag

SEQ ID NO: 397290 - RNA, 32 nt, Homo Sapiens
ucuaggaacugggagacauauugagccaucug

SEQ ID NO: 397291 - RNA, 32 nt, Homo Sapiens
guacaugggccgcaccauaaugagaugugagc

SEQ ID NO: 397292 - RNA, 32 nt, Homo Sapiens
ccaggacccgcuuauuuauagaaaguacagug

SEQ ID NO: 397293 - RNA, 32 nt, Homo Sapiens
uugaaaaucaccuugugcugcuccauccacug

SEQ ID NO: 397294 - RNA, 32 nt, Homo Sapiens
aaugaaagauaaauaaccauauaugucuggcu

SEQ ID NO: 397295 - RNA, 32 nt, Homo Sapiens
auguuccguuuacagugacuugcuuuggggga

SEQ ID NO: 397296 - RNA, 32 nt, Homo Sapiens
acaagcuccaagacuaaacaaacagacagguc

SEQ ID NO: 397297 - RNA, 32 nt, Homo Sapiens
ccuaguuuuuaaauaucugaaucuuaagcgug

SEQ ID NO: 397298 - RNA, 32 nt, Homo Sapiens
aacaaugcccagugacugucgcacuugaguuu

SEQ ID NO: 397299 - RNA, 32 nt, Homo Sapiens
cuugauuauugccuguguagucuaaagauucu

SEQ ID NO: 397300 - RNA, 32 nt, Homo Sapiens
uagguaaucugcacuguuuguuugauggauaa

SEQ ID NO: 397301 - RNA, 32 nt, Homo Sapiens
augguugcagaagauccacuuacuacugagaa

SEQ ID NO: 397302 - RNA, 32 nt, Homo Sapiens
ggguucugugacuuucccuacccagcuuugau

SEQ ID NO: 397303 - RNA, 32 nt, Homo Sapiens
ggcugacccacccaugggccaguguuccugca

SEQ ID NO: 397304 - RNA, 32 nt, Homo Sapiens
gacccucucucuauucucccagccccgcacug

SEQ ID NO: 397305 - RNA, 32 nt, Homo Sapiens
agcggggugugccccuccugcugacgagggua

SEQ ID NO: 397306 - RNA, 32 nt, Homo Sapiens
ucuacauuauuaacuuuuuuuuucuauauccu

SEQ ID NO: 397307 - RNA, 32 nt, Homo Sapiens
ugcucgcuuugccuccuucucucuccgcagcu

SEQ ID NO: 397308 - RNA, 32 nt, Homo Sapiens
gcuccgggucguggcgcgaccgcugcggcggc

SEQ ID NO: 397309 - RNA, 32 nt, Homo Sapiens
cgcccacccggccaccguucucuucccacucc

SEQ ID NO: 397310 - RNA, 32 nt, Homo Sapiens
agcucgccagggaugugggcagagcaccagcc

SEQ ID NO: 397311 - RNA, 31 nt, Homo Sapiens
acucaagcucgcugccugccccacgucccac

SEQ ID NO: 397312 - RNA, 32 nt, Homo Sapiens
uaccugaaaccaaaauggauauuuuuagucuc

SEQ ID NO: 397313 - RNA, 32 nt, Homo Sapiens
gcuauacuggaaccgauuuguacaauguggga

SEQ ID NO: 397314 - RNA, 32 nt, Homo Sapiens
aaaauaucaagagacaaugaaaacacugccuu

SEQ ID NO: 397315 - RNA, 32 nt, Homo Sapiens
aacggcccuuuuaguucuuagagcacuuuuaa

SEQ ID NO: 397316 - RNA, 32 nt, Homo Sapiens
ccgggaggcagacuuugcagugagcugagauc

SEQ ID NO: 397317 - RNA, 32 nt, Homo Sapiens
ucugaagcuuguucccucuccuccucccuucu

SEQ ID NO: 397318 - RNA, 32 nt, Homo Sapiens
uuucacauguuaaaugcuggaauauauuauga

SEQ ID NO: 397319 - RNA, 32 nt, Homo Sapiens
gcugaagaaaucagcagaguccugauugccug

SEQ ID NO: 397320 - RNA, 32 nt, Homo Sapiens
guggguucuguaaaaaauggaggcuuuagaga

SEQ ID NO: 397321 - RNA, 32 nt, Homo Sapiens
uggaaaauguggcugggaagacuguuucaucc

SEQ ID NO: 397322 - RNA, 32 nt, Homo Sapiens
aggcggcggcgguggcggaggaagaggagugg

SEQ ID NO: 397323 - RNA, 32 nt, Homo Sapiens
cuuuauauuucugcuuuguagaaauuauaugu

SEQ ID NO: 397324 - RNA, 32 nt, Homo Sapiens
uugccuucaguucaacgcacaaacgcuccugg

SEQ ID NO: 397325 - RNA, 32 nt, Homo Sapiens
gacuggaaacuaguuggaaacaacauacuuau

SEQ ID NO: 397326 - RNA, 32 nt, Homo Sapiens
cagguagaggagguagggaggggucuguccuu

SEQ ID NO: 397327 - RNA, 32 nt, Homo Sapiens
ugugcugugugcucugcaugggguucagugug

SEQ ID NO: 397328 - RNA, 32 nt, Homo Sapiens
uucacucugcccggcuccagccagcguccgcc

SEQ ID NO: 397329 - RNA, 32 nt, Homo Sapiens
cacauaauuaaaaggacuuaugcucugcuguc

SEQ ID NO: 397330 - RNA, 32 nt, Homo Sapiens
aaugguuuacacaauaagccaagaccaaauca

SEQ ID NO: 397331 - RNA, 32 nt, Homo Sapiens
uucuguagaugaaugaaccaaaugguaaccau

SEQ ID NO: 397332 - RNA, 32 nt, Homo Sapiens
gcgugcagagcagcaggaagugagacacgugc

SEQ ID NO: 397333 - RNA, 32 nt, Homo Sapiens
cuuuauacaaauguauccauaaaauaucagag

SEQ ID NO: 397334 - RNA, 32 nt, Homo Sapiens
agguuuacguuugcaucauguacucuggcaau

SEQ ID NO: 397335 - RNA, 32 nt, Homo Sapiens
uuauuacccaccucuuuuuuuuuuuuuuuuaa

SEQ ID NO: 397336 - RNA, 32 nt, Homo Sapiens
uugcuaugggccacaggugcugcugcugugag

SEQ ID NO: 397337 - RNA, 32 nt, Homo Sapiens
uagacguuaccuuuaagcaucaaugaaugcaa

SEQ ID NO: 397338 - RNA, 32 nt, Homo Sapiens
gaaaauguuucacaacuaguggcugcccaauu

SEQ ID NO: 397339 - RNA, 32 nt, Homo Sapiens
gcagccuugagaaaccggcaguucccaagcca

SEQ ID NO: 397340 - RNA, 32 nt, Homo Sapiens
cgaauaggcucuuuuuaaaugugcuuccacau

SEQ ID NO: 397341 - RNA, 32 nt, Homo Sapiens
uauacuacccugggcucuggucuguagguuug

SEQ ID NO: 397342 - RNA, 32 nt, Homo Sapiens
agcucucauucauuguuuuuuaucuuaguuug

SEQ ID NO: 397343 - RNA, 32 nt, Homo Sapiens
cuauuaagcaauagaaauauuuuuguguauaa

SEQ ID NO: 397344 - RNA, 32 nt, Homo Sapiens
ccgucccaaacacagaugggaccaugaacucc

SEQ ID NO: 397345 - RNA, 31 nt, Homo Sapiens
agcugccaagccacccaagggagucugggcc

SEQ ID NO: 397346 - RNA, 32 nt, Homo Sapiens
agucccuaaagguugucaccgagccacccaau

SEQ ID NO: 397347 - RNA, 32 nt, Homo Sapiens
agaagaucccuaaaacagaauaagaacaaaug

SEQ ID NO: 397348 - RNA, 32 nt, Homo Sapiens
ucauccccuuccugcucuggcgcucaccccug

SEQ ID NO: 397349 - RNA, 32 nt, Homo Sapiens
auuucuuuuccacaguuggcugagugccuucg

SEQ ID NO: 397350 - RNA, 32 nt, Homo Sapiens
auuuuaagccuguaguccauuauuacuugggu

SEQ ID NO: 397351 - RNA, 32 nt, Homo Sapiens
guacaaagauuccauauauggcagcucguguu

SEQ ID NO: 397352 - RNA, 32 nt, Homo Sapiens
gacuguuauuuuuguagcugagaacguggaau

SEQ ID NO: 397353 - RNA, 32 nt, Homo Sapiens
guguuuccagagcagcagcaucagcaucacug

SEQ ID NO: 397354 - RNA, 32 nt, Homo Sapiens
ugcccccaaucacccgccccgccccgacgcgc

SEQ ID NO: 397355 - RNA, 32 nt, Homo Sapiens
accaauauucuauuuugcagauagaauuuggc

SEQ ID NO: 397356 - RNA, 32 nt, Homo Sapiens
gaucuuucuaacaaagaaacccacacaggaau

SEQ ID NO: 397357 - RNA, 32 nt, Homo Sapiens
gcggcuggggacgugcgcccgcgccaccaucu

SEQ ID NO: 397358 - RNA, 32 nt, Homo Sapiens
ucccgcgucugaugggggcgcagggccgugcg

SEQ ID NO: 397359 - RNA, 32 nt, Homo Sapiens
aggcuucugugggccuggcugggggcaguuaa

SEQ ID NO: 397360 - RNA, 32 nt, Homo Sapiens
cccuaaccaacugugcgugcuuucucaaauau

SEQ ID NO: 397361 - RNA, 32 nt, Homo Sapiens
gcaguguggaggucguuggagucacuuccgcg

SEQ ID NO: 397362 - RNA, 32 nt, Homo Sapiens
uucugucugaaugaaaggccaaggcuacagua

SEQ ID NO: 397363 - RNA, 32 nt, Homo Sapiens
ggcugaggaggagaagcaggggcaggagcggu

SEQ ID NO: 397364 - RNA, 32 nt, Homo Sapiens
guuacuaaauuaaucauauugucaguuuuggu

SEQ ID NO: 397365 - RNA, 32 nt, Homo Sapiens
caggccaggacuccacaaggcugguccccugc

SEQ ID NO: 397366 - RNA, 32 nt, Homo Sapiens
uacacacaaaauuuuguggaaggcaguuuuaa

SEQ ID NO: 397367 - RNA, 32 nt, Homo Sapiens
gagaggucgcuuugugagaaaccaucagcagg

SEQ ID NO: 397368 - RNA, 32 nt, Homo Sapiens
uccucccucccugcaggguagggcgccugagc

SEQ ID NO: 397369 - RNA, 32 nt, Homo Sapiens
cgucguucccucaguccggacgccacugcuag

SEQ ID NO: 397370 - RNA, 32 nt, Homo Sapiens
uugaaacaaaagacauagaugguagacuuuua

SEQ ID NO: 397371 - RNA, 32 nt, Homo Sapiens
cgccucacucccuccgucccacuccacuccag

SEQ ID NO: 397372 - RNA, 32 nt, Homo Sapiens
agcugaaacugggaccuaauaaaaggaggaaa

SEQ ID NO: 397373 - RNA, 29 nt, Homo Sapiens
uugagcccuuguuucagggcuguggccuc

SEQ ID NO: 397374 - RNA, 32 nt, Homo Sapiens
ccgggucuugucacuugugcaugcuucucagg

SEQ ID NO: 397375 - RNA, 32 nt, Homo Sapiens
ccaaggauuuauuuauacuuaacuaagaauuu

SEQ ID NO: 397376 - RNA, 32 nt, Homo Sapiens
ugaaccugggaaucggagguugcagggccaag

SEQ ID NO: 397377 - RNA, 32 nt, Homo Sapiens
ggaaaaaauuaacugcuccaaauuuaaccaua

SEQ ID NO: 397378 - RNA, 32 nt, Homo Sapiens
aaugcucaauuccuuacaaaaucuucauuuaa

SEQ ID NO: 397379 - RNA, 32 nt, Homo Sapiens
agcacacuggcuaauuuuuuuaaaacuuuuug

SEQ ID NO: 397380 - RNA, 32 nt, Homo Sapiens
ucuuuauuuuuuuuuucuuuuuauugaaaccc

SEQ ID NO: 397381 - RNA, 32 nt, Homo Sapiens
cuuuugccacugaucuuguguacaucuccuuc

SEQ ID NO: 397382 - RNA, 32 nt, Homo Sapiens
gacuacacagaaacuuaaauagaaauagugua

SEQ ID NO: 397383 - RNA, 32 nt, Homo Sapiens
uuauguguccaaugucagucuuucuuccaaau

SEQ ID NO: 397384 - RNA, 32 nt, Homo Sapiens
guccugugacuggacaguggcuccccagcccc

SEQ ID NO: 397385 - RNA, 32 nt, Homo Sapiens
cacuggcugcaggccuccugcugcuccuguuu

SEQ ID NO: 397386 - RNA, 32 nt, Homo Sapiens
accaacgcaggccccagggucuccgggaccuc

SEQ ID NO: 397387 - RNA, 32 nt, Homo Sapiens
aaccaaaauaccaugggauuuaugcuguauug

SEQ ID NO: 397388 - RNA, 32 nt, Homo Sapiens
ccuguagcaucugccacuggcuccagaauaau

SEQ ID NO: 397389 - RNA, 32 nt, Homo Sapiens
uucccaggagggugcucagagaagaccacggg

SEQ ID NO: 397390 - RNA, 32 nt, Homo Sapiens
gugggggagauaaauguuugcuccuaauucuc

SEQ ID NO: 397391 - RNA, 32 nt, Homo Sapiens
gcggugcccgcggcggcguuuccuggggcaac

SEQ ID NO: 397392 - RNA, 32 nt, Homo Sapiens
cacuggucaucucugagggaugggauuucaaa

SEQ ID NO: 397393 - RNA, 32 nt, Homo Sapiens
cgggggcgccgacgugccucagccugccuucg

SEQ ID NO: 397394 - RNA, 32 nt, Homo Sapiens
gacugucaggaaggcaugauugguuuugagau

SEQ ID NO: 397395 - RNA, 32 nt, Homo Sapiens
agcagccgcccggcuggcugcagaggccgagg

SEQ ID NO: 397396 - RNA, 32 nt, Homo Sapiens
ccucucuucacugcucaugacucugugggccu

SEQ ID NO: 397397 - RNA, 30 nt, Homo Sapiens
agaagauggugcugcggcggcugcuggccg

SEQ ID NO: 397398 - RNA, 32 nt, Homo Sapiens
aggcggcagcgggcugagcgcucggccacccc

SEQ ID NO: 397399 - RNA, 32 nt, Homo Sapiens
uggagaccucucggggacucgcagauaccacc

SEQ ID NO: 397400 - RNA, 32 nt, Homo Sapiens
aucagccuuaggagcuggccugugagguugac

SEQ ID NO: 397401 - RNA, 32 nt, Homo Sapiens
ccgaagcucagguggccuucuugcaggucccc

SEQ ID NO: 397402 - RNA, 32 nt, Homo Sapiens
cgccugcccgcccacccgccuuaggacucccg

SEQ ID NO: 397403 - RNA, 32 nt, Homo Sapiens
uccuuaagaaacaaaguuaagucaguuuccuu

SEQ ID NO: 397404 - RNA, 32 nt, Homo Sapiens
aauaaagugucugcuaauucaaggcuuauaca

SEQ ID NO: 397405 - RNA, 32 nt, Homo Sapiens
ccuuuguuuugcuugcuugucuauuuuuacuu

SEQ ID NO: 397406 - RNA, 32 nt, Homo Sapiens
agaggaaagcaucuucacccuggacccuaaua

SEQ ID NO: 397407 - RNA, 32 nt, Homo Sapiens
aucaaaaggagcuuuugucugacuggucaauu

SEQ ID NO: 397408 - RNA, 32 nt, Homo Sapiens
uucaagacuuuuaaaaagcacuucuacuuggu

SEQ ID NO: 397409 - RNA, 32 nt, Homo Sapiens
cagcagcucuuugcccaucucuuuggacagug

SEQ ID NO: 397410 - RNA, 32 nt, Homo Sapiens
aauuuggugugaucauuuucuacauguuuuua

SEQ ID NO: 397411 - RNA, 32 nt, Homo Sapiens
uuauauuaucuaauuuugacuaaagaaauacu

SEQ ID NO: 397412 - RNA, 32 nt, Homo Sapiens
ucaguuucuuuucaaguuuucuuaauugucua

SEQ ID NO: 397413 - RNA, 32 nt, Homo Sapiens
aacaaaagaagugacauacacaauauaaauca

SEQ ID NO: 397414 - RNA, 32 nt, Homo Sapiens
guccucaguggauuacuuaaccacugcugucc

SEQ ID NO: 397415 - RNA, 32 nt, Homo Sapiens
cugccggguaauggcugcuuccaagacccagg

SEQ ID NO: 397416 - RNA, 32 nt, Homo Sapiens
cuuuacauacucaaaaccaagauagaaaaagg

SEQ ID NO: 397417 - RNA, 32 nt, Homo Sapiens
cuaucauccacauuuugaaaugcaaagaaagc

SEQ ID NO: 397418 - RNA, 32 nt, Homo Sapiens
ugcucucacuggggacccuccuccccuuccca

SEQ ID NO: 397419 - RNA, 32 nt, Homo Sapiens
gguaaucuggacuuaaggauugcugggccacc

SEQ ID NO: 397420 - RNA, 32 nt, Homo Sapiens
cuuacauuuuuacaauaaauaaucuguacgua

SEQ ID NO: 397421 - RNA, 32 nt, Homo Sapiens
auccgcuccgcggggagagccgcugcucuggg

SEQ ID NO: 397422 - RNA, 32 nt, Homo Sapiens
caccccaccucuccccaccuuacccccgcccc

SEQ ID NO: 397423 - RNA, 32 nt, Homo Sapiens
gagcacauaauucaacccaugauaaugauuau

SEQ ID NO: 397424 - RNA, 32 nt, Homo Sapiens
caguggaguucgcugcgcgcuguugggggcca

SEQ ID NO: 397425 - RNA, 32 nt, Homo Sapiens
cgagcccccaacugggccccagcucccagccc

SEQ ID NO: 397426 - RNA, 32 nt, Homo Sapiens
gcuuaaauacuguuaaaugcaagacaugucuc

SEQ ID NO: 397427 - RNA, 32 nt, Homo Sapiens
uacagcguguggaggaguggucuccccaacuu

SEQ ID NO: 397428 - RNA, 32 nt, Homo Sapiens
uagagacguaucuaguugucaaaccuggggag

SEQ ID NO: 397429 - RNA, 32 nt, Homo Sapiens
uccuagcuccacccucaccaggaugaaggcgu

SEQ ID NO: 397430 - RNA, 32 nt, Homo Sapiens
cugucuguuucucugucuuaaucuucuguaca

SEQ ID NO: 397431 - RNA, 32 nt, Homo Sapiens
uaaggaaagagggcuuacaaaauguuucguaa

SEQ ID NO: 397432 - RNA, 32 nt, Homo Sapiens
cugccaucgggcuccagaaacuaccugggcuc

SEQ ID NO: 397433 - RNA, 32 nt, Homo Sapiens
ugggauuugggaaauggguuaucccuaaagcu

SEQ ID NO: 397434 - RNA, 32 nt, Homo Sapiens
guuaaauacuauugugcauucagugaaguguu

SEQ ID NO: 397435 - RNA, 32 nt, Homo Sapiens
gugagcgccuugcugggcuuucugggagaugu

SEQ ID NO: 397436 - RNA, 32 nt, Homo Sapiens
agaacuguaauauuauuuuaaaaugcgauuuu

SEQ ID NO: 397437 - RNA, 29 nt, Homo Sapiens
cguggggcgggggagaggacgucucugcg

SEQ ID NO: 397438 - RNA, 32 nt, Homo Sapiens
ggcacauggagagcggcgugccugcugcgggc

SEQ ID NO: 397439 - RNA, 32 nt, Homo Sapiens
auacggacagagcugcaggcuuacauuaagga

SEQ ID NO: 397440 - RNA, 32 nt, Homo Sapiens
cucuuugaagguuuauacuaauucagcaaucc

SEQ ID NO: 397441 - RNA, 32 nt, Homo Sapiens
uucucauaggauuuuucuuuuaguaguggaaa

SEQ ID NO: 397442 - RNA, 32 nt, Homo Sapiens
cgucauuucauggcuaagcauuugcagaaggu

SEQ ID NO: 397443 - RNA, 32 nt, Homo Sapiens
gggcuggcagucccuggcugcagaccccgagc

SEQ ID NO: 397444 - RNA, 32 nt, Homo Sapiens
cgauugaaggagaaaaacuuuuugccugagac

SEQ ID NO: 397445 - RNA, 29 nt, Homo Sapiens
agaaaugucugauguuacauuucugguag

SEQ ID NO: 397446 - RNA, 31 nt, Homo Sapiens
agauggaaauaaaaguuugauguuugcuagc

SEQ ID NO: 397447 - RNA, 32 nt, Homo Sapiens
cauccauguguugauuuccuguuuccuccucc

SEQ ID NO: 397448 - RNA, 32 nt, Homo Sapiens
accgugcccggccgugaugcgcaacuuucuaa

SEQ ID NO: 397449 - RNA, 32 nt, Homo Sapiens
uggagguuuagagucucagggauuaagcacuu

SEQ ID NO: 397450 - RNA, 32 nt, Homo Sapiens
cuauuggagauuacaaugauuaaaucaauaaa

SEQ ID NO: 397451 - RNA, 32 nt, Homo Sapiens
cugagccugugcagcugcuggagcacggccca

SEQ ID NO: 397452 - RNA, 32 nt, Homo Sapiens
gggcgggaggggcuagcgccccugaacuuuug

SEQ ID NO: 397453 - RNA, 32 nt, Homo Sapiens
gauuucuccaggaaaaggaggaauguagccag

SEQ ID NO: 397454 - RNA, 32 nt, Homo Sapiens
aaauaguuucuaaagauucugugaauagugga

SEQ ID NO: 397455 - RNA, 32 nt, Homo Sapiens
cgaccugcccaguccggccgccgccccacguc

SEQ ID NO: 397456 - RNA, 32 nt, Homo Sapiens
uucaaggugaacuggcacaaagguuaaucuca

SEQ ID NO: 397457 - RNA, 30 nt, Homo Sapiens
gccaggcgggggucgacgggucccugaagc

SEQ ID NO: 397458 - RNA, 32 nt, Homo Sapiens
uuauucugguuagccaaauuuacugguuaucu

SEQ ID NO: 397459 - RNA, 32 nt, Homo Sapiens
ccgcccaucccaugugugaggacauggugacu

SEQ ID NO: 397460 - RNA, 32 nt, Homo Sapiens
cucacacccacccacaucacaggauggagucu

SEQ ID NO: 397461 - RNA, 32 nt, Homo Sapiens
auuaugccacuacaggauguaucauuucaagu

SEQ ID NO: 397462 - RNA, 32 nt, Homo Sapiens
cgcauugagaaccuggaagaguacacagggcu

SEQ ID NO: 397463 - RNA, 32 nt, Homo Sapiens
cacccccucccuccccuaagaagauggauguc

SEQ ID NO: 397464 - RNA, 32 nt, Homo Sapiens
agcccagagaaaaacaacagagguuugcggca

SEQ ID NO: 397465 - RNA, 32 nt, Homo Sapiens
aguuuguaaaaagaacaaaacaaccaagacaa

SEQ ID NO: 397466 - RNA, 32 nt, Homo Sapiens
accacccaggcgcagacuuggugcuguguagc

SEQ ID NO: 397467 - RNA, 32 nt, Homo Sapiens
auacacuuguaaauaaagcugauagcauauau

SEQ ID NO: 397468 - RNA, 32 nt, Homo Sapiens
aucuucgauuuuacucuguaauuguuuugggg

SEQ ID NO: 397469 - RNA, 32 nt, Homo Sapiens
ggcaugcuguauguaauugacacaagggaaca

SEQ ID NO: 397470 - RNA, 32 nt, Homo Sapiens
caguuuauguauugcugaauagcaauuuauac

SEQ ID NO: 397471 - RNA, 32 nt, Homo Sapiens
auggaauaauagacauaauuaauucaauacac

SEQ ID NO: 397472 - RNA, 32 nt, Homo Sapiens
auggauuugucaauguaaguauuugucauauc

SEQ ID NO: 397473 - RNA, 32 nt, Homo Sapiens
cgucuuggcguuguccucuccaacccccgccg

SEQ ID NO: 397474 - RNA, 32 nt, Homo Sapiens
ugaaauaauguacaucuggccuugaaaccacc

SEQ ID NO: 397475 - RNA, 32 nt, Homo Sapiens
augcuacugucaaguguuacaacuggauaugu

SEQ ID NO: 397476 - RNA, 32 nt, Homo Sapiens
ccuggauuaaagaauaugcacuuuuuaaaaaa

SEQ ID NO: 397477 - RNA, 28 nt, Homo Sapiens
agcccgggagacagcaagauucugucuc

SEQ ID NO: 397478 - RNA, 32 nt, Homo Sapiens
gcugcguagaugcccuggcccagggcccugac

SEQ ID NO: 397479 - RNA, 32 nt, Homo Sapiens
ucuuccaaccaagcuugcugggcuugcauuua

SEQ ID NO: 397480 - RNA, 32 nt, Homo Sapiens
gcuuggauccugaaacccuggguucugauucu

SEQ ID NO: 397481 - RNA, 32 nt, Homo Sapiens
ccuucugugcgggcuucuccacagcgcgacug

SEQ ID NO: 397482 - RNA, 32 nt, Homo Sapiens
cccgcccgcacgaggggugguggccgaggccc

SEQ ID NO: 397483 - RNA, 32 nt, Homo Sapiens
ugaagcacaacuccccgcagggcccccagccc

SEQ ID NO: 397484 - RNA, 32 nt, Homo Sapiens
gugacuccauuggauugcaccuuuaaaucaaa

SEQ ID NO: 397485 - RNA, 32 nt, Homo Sapiens
ggggcuuagcagaugccugccagcugaccucg

SEQ ID NO: 397486 - RNA, 32 nt, Homo Sapiens
ccacuccgcccggcugcccagagcccggcgag

SEQ ID NO: 397487 - RNA, 32 nt, Homo Sapiens
cuuaaaguaaaccagcagucucugagcucaga

SEQ ID NO: 397488 - RNA, 32 nt, Homo Sapiens
gugaaagcugcugcuuuuuuuauagucaaagg

SEQ ID NO: 397489 - RNA, 32 nt, Homo Sapiens
ggagucugcgggugaccacgggagcgcaggcc

SEQ ID NO: 397490 - RNA, 32 nt, Homo Sapiens
gcgcaccagaagccagcagugggguugcacac

SEQ ID NO: 397491 - RNA, 31 nt, Homo Sapiens
aggcugggggcgguggcucacgccugcgccu

SEQ ID NO: 397492 - RNA, 32 nt, Homo Sapiens
gacuuuucuuuuuaaccuucugcaaaaguaaa

SEQ ID NO: 397493 - RNA, 32 nt, Homo Sapiens
uggcagaaagacagcagagucuguuuucuagc

SEQ ID NO: 397494 - RNA, 32 nt, Homo Sapiens
uaauaaauuaauugcuuuuuuauuuuucuuau

SEQ ID NO: 397495 - RNA, 32 nt, Homo Sapiens
ggugcuucugaugaagugaaaauguauaucug

SEQ ID NO: 397496 - RNA, 32 nt, Homo Sapiens
gaagacgauccggccggugaggcccaggcugg

SEQ ID NO: 397497 - RNA, 32 nt, Homo Sapiens
auguugaagucuuuuucuguaauugcagauuu

SEQ ID NO: 397498 - RNA, 32 nt, Homo Sapiens
gcccuggagagacgcucccugcucuccauacu

SEQ ID NO: 397499 - RNA, 32 nt, Homo Sapiens
cugcuagagcccuuccucucagcccccauguu

SEQ ID NO: 397500 - RNA, 32 nt, Homo Sapiens
uugguggagugaaaaaguuugagcuagugaag

SEQ ID NO: 397501 - RNA, 31 nt, Homo Sapiens
uguacauaauaaaaauguguguauuauauau

SEQ ID NO: 397502 - RNA, 32 nt, Homo Sapiens
acuuugagaaacaaauuuugugagaauaggua

SEQ ID NO: 397503 - RNA, 32 nt, Homo Sapiens
cuggagaggguggcaggcagugguuguggcag

SEQ ID NO: 397504 - RNA, 32 nt, Homo Sapiens
uauugugaaaauaugaauaugauuggauucag

SEQ ID NO: 397505 - RNA, 32 nt, Homo Sapiens
cuaaaugugaauuggugugccacaaaauauuc

SEQ ID NO: 397506 - RNA, 32 nt, Homo Sapiens
auagaauuacagguaagguacaccauacaaaa

SEQ ID NO: 397507 - RNA, 32 nt, Homo Sapiens
aagcuaagggaagagaguagaccgggacagag

SEQ ID NO: 397508 - RNA, 32 nt, Homo Sapiens
aaaaugguaauuacagaauuagcuguggggaa

SEQ ID NO: 397509 - RNA, 32 nt, Homo Sapiens
aggaagucaauauguggaagcaaccaagccug

SEQ ID NO: 397510 - RNA, 31 nt, Homo Sapiens
ggccauggaggagggaccuccacuccauggg

SEQ ID NO: 397511 - RNA, 32 nt, Homo Sapiens
ucccgaggccagcguuccugugcagagcccca

SEQ ID NO: 397512 - RNA, 32 nt, Homo Sapiens
gggguccuucuccacacccacuuuguccauuu

SEQ ID NO: 397513 - RNA, 32 nt, Homo Sapiens
agcugcaaaagaaauaaaaugguguuaauaaa

SEQ ID NO: 397514 - RNA, 32 nt, Homo Sapiens
ccucagaaaagaaguggacaugcugaagaaca

SEQ ID NO: 397515 - RNA, 32 nt, Homo Sapiens
cacguacucucucaucaugaaaacagagcccc

SEQ ID NO: 397516 - RNA, 32 nt, Homo Sapiens
gcguggccuuaaacauugagaagugcugcucu

SEQ ID NO: 397517 - RNA, 32 nt, Homo Sapiens
cccuugcuccgucuuaugagacaggcuuuauu

SEQ ID NO: 397518 - RNA, 32 nt, Homo Sapiens
cuuuccccuucuggagucccugccgggucucu

SEQ ID NO: 397519 - RNA, 32 nt, Homo Sapiens
uugcugugccguggguccugugcggucacuua

SEQ ID NO: 397520 - RNA, 32 nt, Homo Sapiens
uguggccgaugggccaugcgggccccucgcag

SEQ ID NO: 397521 - RNA, 32 nt, Homo Sapiens
uccugcuuugagcugugucaucuagcagaccu

SEQ ID NO: 397522 - RNA, 32 nt, Homo Sapiens
aauaggaagagccugucuaaaaaacuacugcc

SEQ ID NO: 397523 - RNA, 32 nt, Homo Sapiens
cgucguccuccucgcccuccaggccgcccgcg

SEQ ID NO: 397524 - RNA, 29 nt, Homo Sapiens
ucuaaauuuugugauucuauaaaacacau

SEQ ID NO: 397525 - RNA, 32 nt, Homo Sapiens
ccucaauacugagccucuuuggagcauaccca

SEQ ID NO: 397526 - RNA, 32 nt, Homo Sapiens
uauuuguaaaaugcagagauaauggcauguau

SEQ ID NO: 397527 - RNA, 32 nt, Homo Sapiens
cugccagccucuuccuucucaccagcccccuc

SEQ ID NO: 397528 - RNA, 32 nt, Homo Sapiens
caagccugggucugcugugugcggagcugcga

SEQ ID NO: 397529 - RNA, 32 nt, Homo Sapiens
aacugcauuccuuccccaaucaccuuuccugu

SEQ ID NO: 397530 - RNA, 32 nt, Homo Sapiens
gcgccccuggucgacgcggcacucgcuacgca

SEQ ID NO: 397531 - RNA, 32 nt, Homo Sapiens
aauaauuaucuaggagauaguaagaacauagu

SEQ ID NO: 397532 - RNA, 32 nt, Homo Sapiens
aagguaauuaguacaaagacaauauaaaagcc

SEQ ID NO: 397533 - RNA, 32 nt, Homo Sapiens
ugggcuuccgugagcggcgcucugccagaucu

SEQ ID NO: 397534 - RNA, 32 nt, Homo Sapiens
cuggccucagggggcucugcuccuccuuaaca

SEQ ID NO: 397535 - RNA, 32 nt, Homo Sapiens
agagcuagauucuauuccauucuuggaauuca

SEQ ID NO: 397536 - RNA, 32 nt, Homo Sapiens
agaaccaacaugcaagacauugaaagaaaucu

SEQ ID NO: 397537 - RNA, 32 nt, Homo Sapiens
uguaaaauauauguaugaaauaaaauuaguuc

SEQ ID NO: 397538 - RNA, 32 nt, Homo Sapiens
uauaauucuguguauuugauaaauauuucuuc

SEQ ID NO: 397539 - RNA, 32 nt, Homo Sapiens
uggagaaauggcagagcuggcugacucugggg

SEQ ID NO: 397540 - RNA, 29 nt, Homo Sapiens
ggaaccuauuguuucagaagucggugacc

SEQ ID NO: 397541 - RNA, 32 nt, Homo Sapiens
ugcuugagggcuuacugcaugugaggcucugu

SEQ ID NO: 397542 - RNA, 32 nt, Homo Sapiens
cacuaagaauauaacuaacauucacagggccu

SEQ ID NO: 397543 - RNA, 32 nt, Homo Sapiens
ucauauagcccauuuuaacuuguauaaacugu

SEQ ID NO: 397544 - RNA, 32 nt, Homo Sapiens
ucaaagaaaaauuugguaggcgguaguuuaga

SEQ ID NO: 397545 - RNA, 32 nt, Homo Sapiens
gaagggggggauuuauacucauggaaagacua

SEQ ID NO: 397546 - RNA, 32 nt, Homo Sapiens
gugaauacuuuuugcaugaugauuugaagcag

SEQ ID NO: 397547 - RNA, 32 nt, Homo Sapiens
gauaaaggaaauauaaagcauuacuguugcua

SEQ ID NO: 397548 - RNA, 32 nt, Homo Sapiens
gucuuccaaagcagccauuccucccccaguga

SEQ ID NO: 397549 - RNA, 32 nt, Homo Sapiens
ugagaacagccaccuuguuuaccuuguucaug

SEQ ID NO: 397550 - RNA, 32 nt, Homo Sapiens
agcgggccccugcuccuccaugcccccagcuc

SEQ ID NO: 397551 - RNA, 32 nt, Homo Sapiens
cacagccccccucccuucgccaaagcaguguc

SEQ ID NO: 397552 - RNA, 32 nt, Homo Sapiens
uaguucccuaaggcagcuuuauggaaacuaau

SEQ ID NO: 397553 - RNA, 32 nt, Homo Sapiens
guuucccugacaaaucgauaugcugaacccaa

SEQ ID NO: 397554 - RNA, 32 nt, Homo Sapiens
ggcccuguccccauaccccacccagguuccug

SEQ ID NO: 397555 - RNA, 32 nt, Homo Sapiens
auaauuacauucaaauuauauuuuuucuugaa

SEQ ID NO: 397556 - RNA, 32 nt, Homo Sapiens
ggcucccgccgggggaacccggcgaggacaag

SEQ ID NO: 397557 - RNA, 32 nt, Homo Sapiens
ugguuugcuuacauaugugaaaauaguuaucc

SEQ ID NO: 397558 - RNA, 32 nt, Homo Sapiens
aaauuagcugcuugccugauguguguaucauc

SEQ ID NO: 397559 - RNA, 32 nt, Homo Sapiens
gcuagagcucucccggagcauuuuaaauacug

SEQ ID NO: 397560 - RNA, 32 nt, Homo Sapiens
cugggagacagagcaagacuccaucucaaaaa

SEQ ID NO: 397561 - RNA, 32 nt, Homo Sapiens
cggucucacagagcgaagccgacgauuugugc

SEQ ID NO: 397562 - RNA, 32 nt, Homo Sapiens
ccgucggagcagccccuccucacuucaggggu

SEQ ID NO: 397563 - RNA, 32 nt, Homo Sapiens
aauagcccaacccacaccagccucagacacca

SEQ ID NO: 397564 - RNA, 32 nt, Homo Sapiens
agaaagccaagcccucggggagcuggggaccg

SEQ ID NO: 397565 - RNA, 32 nt, Homo Sapiens
ccaaaguguugggauuauaggcacgagccacc

SEQ ID NO: 397566 - RNA, 32 nt, Homo Sapiens
ggggcgaggggucagacaugagucuaagguuc

SEQ ID NO: 397567 - RNA, 32 nt, Homo Sapiens
gggcgcagcggggcccgucugcagcaagugac

SEQ ID NO: 397568 - RNA, 31 nt, Homo Sapiens
agguucaguaugaaacagguauugucaucuc

SEQ ID NO: 397569 - RNA, 32 nt, Homo Sapiens
gagcaguagcagcagcagcaggagaagaugcu

SEQ ID NO: 397570 - RNA, 32 nt, Homo Sapiens
uaucuugucacugagcugaacuguagauccau

SEQ ID NO: 397571 - RNA, 32 nt, Homo Sapiens
ccccgcugcuccagcugcggagcuggucgaca

SEQ ID NO: 397572 - RNA, 32 nt, Homo Sapiens
cuuugcuguggaacacgagagcuccuccucag

SEQ ID NO: 397573 - RNA, 32 nt, Homo Sapiens
ugggaaucugaguaucuagcacuuccuccugg

SEQ ID NO: 397574 - RNA, 32 nt, Homo Sapiens
auccuugcaugggggugauggugcugguaggu

SEQ ID NO: 397575 - RNA, 30 nt, Homo Sapiens
ucaccccuucugacucuggaaaccgcaccu

SEQ ID NO: 397576 - RNA, 32 nt, Homo Sapiens
aggaagcuccagagcccuccugccgcugcccu

SEQ ID NO: 397577 - RNA, 32 nt, Homo Sapiens
guguuuaccugguauuaggagcucagaaugga

SEQ ID NO: 397578 - RNA, 32 nt, Homo Sapiens
gcggcgguggaaccgggcgggcggcgggaguc

SEQ ID NO: 397579 - RNA, 32 nt, Homo Sapiens
auuugguggcagugacugauguuugucucuag

SEQ ID NO: 397580 - RNA, 32 nt, Homo Sapiens
cuuuuugaaaugcaguuuuuacuguaaucuua

SEQ ID NO: 397581 - RNA, 32 nt, Homo Sapiens
gcgcuuggagagcauugcgcgcggcugggccc

SEQ ID NO: 397582 - RNA, 28 nt, Homo Sapiens
cagccaguggcuagcgcaagaccaguca

SEQ ID NO: 397583 - RNA, 32 nt, Homo Sapiens
acuuuguaauuuauugaucaguuucuguuggg

SEQ ID NO: 397584 - RNA, 32 nt, Homo Sapiens
acagagggcucgccgccgccaugucuaccgcc

SEQ ID NO: 397585 - RNA, 32 nt, Homo Sapiens
ugcuccuuuucauugcagaaaauugccagggg

SEQ ID NO: 397586 - RNA, 32 nt, Homo Sapiens
gcgcagcgcgccccacugcauccucgaccuuc

SEQ ID NO: 397587 - RNA, 32 nt, Homo Sapiens
ccaaggugcggaccggagcggcugaggacggg

SEQ ID NO: 397588 - RNA, 32 nt, Homo Sapiens
ggacugugaagccccagggaauggcugcacuu

SEQ ID NO: 397589 - RNA, 32 nt, Homo Sapiens
aaucacuugagcucaggaguucaagaccagcc

SEQ ID NO: 397590 - RNA, 32 nt, Homo Sapiens
ucacagaguaggcugcggcaccacgugcagcc

SEQ ID NO: 397591 - RNA, 32 nt, Homo Sapiens
cuagggcggcgguagcugcaggggucggggau

SEQ ID NO: 397592 - RNA, 32 nt, Homo Sapiens
cauccaccccaccccuuuucgucacgagcaca

SEQ ID NO: 397593 - RNA, 32 nt, Homo Sapiens
gggccuuaaaagaugaagaagauggaacucca

SEQ ID NO: 397594 - RNA, 30 nt, Homo Sapiens
cccacgcguccggggccggcgcacgaaacc

SEQ ID NO: 397595 - RNA, 32 nt, Homo Sapiens
agagacucgccuccgagaggaggaagggacag

SEQ ID NO: 397596 - RNA, 32 nt, Homo Sapiens
uuccacugcccauuuuaccagcucacauuccc

SEQ ID NO: 397597 - RNA, 32 nt, Homo Sapiens
ggcugcugccccagccugacauguguccaggc

SEQ ID NO: 397598 - RNA, 32 nt, Homo Sapiens
uccccaagcaaaacagaaugggcuucgcauag

SEQ ID NO: 397599 - RNA, 32 nt, Homo Sapiens
caguuagggagaaaaauuagauuguacuauuu

SEQ ID NO: 397600 - RNA, 32 nt, Homo Sapiens
cgagucccgcccuggggguccuggacgccgcc

SEQ ID NO: 397601 - RNA, 32 nt, Homo Sapiens
gcugcaggccuggccgugagcgggggcugccu

SEQ ID NO: 397602 - RNA, 32 nt, Homo Sapiens
cucgggggagagggcgggaggaagagggacgc

SEQ ID NO: 397603 - RNA, 32 nt, Homo Sapiens
agucucugccuucagcucccaaaguggguggu

SEQ ID NO: 397604 - RNA, 32 nt, Homo Sapiens
uucuuuuguuuuauuagacccaagacaaguuc

SEQ ID NO: 397605 - RNA, 32 nt, Homo Sapiens
cccccacccccuccuccuguuggcuggggaac

SEQ ID NO: 397606 - RNA, 32 nt, Homo Sapiens
aauuaaacaguuacugaaauuaugacuuaaau

SEQ ID NO: 397607 - RNA, 32 nt, Homo Sapiens
ccuucuccaaagagugaaauauguaaauauau

SEQ ID NO: 397608 - RNA, 32 nt, Homo Sapiens
cucaagaaggcaccgucccucaugcacagcca

SEQ ID NO: 397609 - RNA, 32 nt, Homo Sapiens
aaauaaggucacauuuacaggguaccaugugu

SEQ ID NO: 397610 - RNA, 32 nt, Homo Sapiens
aauauuguugugccauuaagcaauuuagcuaa

SEQ ID NO: 397611 - RNA, 32 nt, Homo Sapiens
gaagguaauacuauaaauauauuguauauuug

SEQ ID NO: 397612 - RNA, 32 nt, Homo Sapiens
cuccauuucucuagaucugugcucuccgaugu

SEQ ID NO: 397613 - RNA, 32 nt, Homo Sapiens
uuggaaauugugccagugguccagcuggagca

SEQ ID NO: 397614 - RNA, 32 nt, Homo Sapiens
uuucuauagaaaguuggguacaguauguaacu

SEQ ID NO: 397615 - RNA, 32 nt, Homo Sapiens
uagcaggucgggcuugugcuggcugcacauug

SEQ ID NO: 397616 - RNA, 30 nt, Homo Sapiens
uugucaccuucuggcggcggcagcccuggc

SEQ ID NO: 397617 - RNA, 32 nt, Homo Sapiens
auuugaccucccucccauggaagugcugucuc

SEQ ID NO: 397618 - RNA, 32 nt, Homo Sapiens
agcugcagaaaagaaauuggaguggaacccca

SEQ ID NO: 397619 - RNA, 32 nt, Homo Sapiens
aacaagugcgguuucggacaagagcgggagag

SEQ ID NO: 397620 - RNA, 32 nt, Homo Sapiens
gaggccuugggauuagccucuuccucauuaug

SEQ ID NO: 397621 - RNA, 32 nt, Homo Sapiens
gcagccaccgcagcccgugcgccccgcgcccu

SEQ ID NO: 397622 - RNA, 32 nt, Homo Sapiens
ucuacuaaaaauacaaaaaauuaccugggugu

SEQ ID NO: 397623 - RNA, 32 nt, Homo Sapiens
aguaauacaucaucuguaauugguaucaacac

SEQ ID NO: 397624 - RNA, 32 nt, Homo Sapiens
ucugaacuaugaagugaguaccuggaggaacu

SEQ ID NO: 397625 - RNA, 32 nt, Homo Sapiens
gagggauccgcgguggacccagggaagcggag

SEQ ID NO: 397626 - RNA, 32 nt, Homo Sapiens
accaaugcccuucucaucccuguuuccccagg

SEQ ID NO: 397627 - RNA, 32 nt, Homo Sapiens
cuauuuaagaguaggaguuuuauuguucugua

SEQ ID NO: 397628 - RNA, 28 nt, Homo Sapiens
cgcggccugacgggaccaaggcggcggg

SEQ ID NO: 397629 - RNA, 32 nt, Homo Sapiens
gucuuuuuaaccucagaaaauuucucaaucua

SEQ ID NO: 397630 - RNA, 32 nt, Homo Sapiens
gggacuugugugaccugcuuugaaauguguga

SEQ ID NO: 397631 - RNA, 32 nt, Homo Sapiens
cacagacucugcaauagguacccuggccucug

SEQ ID NO: 397632 - RNA, 32 nt, Homo Sapiens
uguguauguguggaaauaaaaauguauuguac

SEQ ID NO: 397633 - RNA, 32 nt, Homo Sapiens
gcccggcggccggcgagcauggaggagaagua

SEQ ID NO: 397634 - RNA, 32 nt, Homo Sapiens
cggcgcggucagggcuggccuuggcuucagcu

SEQ ID NO: 397635 - RNA, 32 nt, Homo Sapiens
cacaggacuuggauccugaacuguguaaccug

SEQ ID NO: 397636 - RNA, 32 nt, Homo Sapiens
uaaagaaguauuuuuaauguaguguccacagg

SEQ ID NO: 397637 - RNA, 32 nt, Homo Sapiens
gccucgaucugagggccccggcgcugcggcca

SEQ ID NO: 397638 - RNA, 32 nt, Homo Sapiens
gucgccugguggcuggacccccgggauugacu

SEQ ID NO: 397639 - RNA, 32 nt, Homo Sapiens
gacuaagucuuagguggguugggaagacagau

SEQ ID NO: 397640 - RNA, 32 nt, Homo Sapiens
ucguguuauggaaaaaagugcacugaauuuau

SEQ ID NO: 397641 - RNA, 32 nt, Homo Sapiens
uuaaaaucuucaguuuuucaagucucucuaaa

SEQ ID NO: 397642 - RNA, 30 nt, Homo Sapiens
caccugcagaagcuugagguccugaacgug

SEQ ID NO: 397643 - RNA, 32 nt, Homo Sapiens
gcgcagcgcucccgggcgcccgguucagagcg

SEQ ID NO: 397644 - RNA, 32 nt, Homo Sapiens
guuccgcuccguggagggccaggccgccucug

SEQ ID NO: 397645 - RNA, 32 nt, Homo Sapiens
acacaguauuauaugauuuugcuggacuauuu

SEQ ID NO: 397646 - RNA, 32 nt, Homo Sapiens
gcugcugcagcccugggaaugucuguggaauu

SEQ ID NO: 397647 - RNA, 32 nt, Homo Sapiens
cauuucuguuaggauauuuagauggagguuuu

SEQ ID NO: 397648 - RNA, 32 nt, Homo Sapiens
ccugacugcuggaagggccagggucugggggu

SEQ ID NO: 397649 - RNA, 32 nt, Homo Sapiens
ugagaaguugccuccgcccacaccuuugcccc

SEQ ID NO: 397650 - RNA, 32 nt, Homo Sapiens
aguggcaaugcuuuguuaucagaggacgaaaa

SEQ ID NO: 397651 - RNA, 32 nt, Homo Sapiens
guagaacuuuaaaauuuuuucuuauugugagg

SEQ ID NO: 397652 - RNA, 32 nt, Homo Sapiens
gguuauauauaggauugccaucuucagaggug

SEQ ID NO: 397653 - RNA, 32 nt, Homo Sapiens
gagagaucuaacccaaggccuggguuaugucu

SEQ ID NO: 397654 - RNA, 32 nt, Homo Sapiens
cuggcccugccagcugguaguccaucagcaca

SEQ ID NO: 397655 - RNA, 32 nt, Homo Sapiens
uugccccagggccugauucaggacugacucuc

SEQ ID NO: 397656 - RNA, 32 nt, Homo Sapiens
agugagacagcuugccagcugcaucccugcag

SEQ ID NO: 397657 - RNA, 32 nt, Homo Sapiens
guuuuucucauucuccauaccucccccaagcu

SEQ ID NO: 397658 - RNA, 32 nt, Homo Sapiens
aaaaaagucaagaaccacagcacuugaguuaa

SEQ ID NO: 397659 - RNA, 32 nt, Homo Sapiens
aacuaacaaacagauucuuuuaugugaugcug

SEQ ID NO: 397660 - RNA, 32 nt, Homo Sapiens
auccccaggggccgccucccccggggcggccu

SEQ ID NO: 397661 - RNA, 32 nt, Homo Sapiens
cacaacagacugcccacucagaccccaucuua

SEQ ID NO: 397662 - RNA, 32 nt, Homo Sapiens
acaccaagagccagcuguggccagagcccuuu

SEQ ID NO: 397663 - RNA, 32 nt, Homo Sapiens
gcaggaucauucuuggaugagauggaaaacag

SEQ ID NO: 397664 - RNA, 32 nt, Homo Sapiens
uuccuuugaggcauagagagccagagucuggc

SEQ ID NO: 397665 - RNA, 32 nt, Homo Sapiens
auauuaucccggcuuggagauuuugccagccu

SEQ ID NO: 397666 - RNA, 32 nt, Homo Sapiens
ccagcuuuuccaagcaucauucaccaaagcau

SEQ ID NO: 397667 - RNA, 32 nt, Homo Sapiens
ccacccagagggcgcucuggccucuuggucac

SEQ ID NO: 397668 - RNA, 32 nt, Homo Sapiens
cgcuugcaggacaggcgccgcgcagcgggcag

SEQ ID NO: 397669 - RNA, 32 nt, Homo Sapiens
aucugagaggagaggaugggguaaggcagaag

SEQ ID NO: 397670 - RNA, 32 nt, Homo Sapiens
ugggggacgggaggaggggcacggguuuaagg

SEQ ID NO: 397671 - RNA, 32 nt, Homo Sapiens
agucauuuuauuauuucaggagguuaaaauau

SEQ ID NO: 397672 - RNA, 32 nt, Homo Sapiens
aguacugccucccaggcccugugcucugcgcu

SEQ ID NO: 397673 - RNA, 32 nt, Homo Sapiens
caguaccaugaaaggacucacacuggagagaa

SEQ ID NO: 397674 - RNA, 32 nt, Homo Sapiens
gcagcggccgcauugccagagcccccugcucu

SEQ ID NO: 397675 - RNA, 32 nt, Homo Sapiens
gagcguccucagcgcagccgccgcccgcggag

SEQ ID NO: 397676 - RNA, 32 nt, Homo Sapiens
aaaaauguauuucaaacuauucuuacugugcu

SEQ ID NO: 397677 - RNA, 32 nt, Homo Sapiens
ucuuacuuuuucucuuguggaacuuggccaca

SEQ ID NO: 397678 - RNA, 32 nt, Homo Sapiens
guuugcaacaaauguauucucaugcuucugga

SEQ ID NO: 397679 - RNA, 32 nt, Homo Sapiens
cgagcggagcagagccgaggucgggccgcgag

SEQ ID NO: 397680 - RNA, 32 nt, Homo Sapiens
auaaaaguaaaauuauaaguucaaaaaaaaaa

SEQ ID NO: 397681 - RNA, 32 nt, Homo Sapiens
ggccuccaacuggucggccggccugcuggcau

SEQ ID NO: 397682 - RNA, 32 nt, Homo Sapiens
aggguuuuuuggaaaaccuuuuucacuccaua

SEQ ID NO: 397683 - RNA, 32 nt, Homo Sapiens
aaaaaguauauauacauaucuuuugaaguguu

SEQ ID NO: 397684 - RNA, 32 nt, Homo Sapiens
ugacugccccuuucuagcuggaccuuuaacaa

SEQ ID NO: 397685 - RNA, 32 nt, Homo Sapiens
gcuguagaguuacuauaaaauaaacaugacua

SEQ ID NO: 397686 - RNA, 32 nt, Homo Sapiens
gacagggaaggcgggcccgagauggguuaggg

SEQ ID NO: 397687 - RNA, 32 nt, Homo Sapiens
gaggagacuuguggucugguucugggacuucc

SEQ ID NO: 397688 - RNA, 32 nt, Homo Sapiens
gcagggacucgcgcccacggcaccucugggag

SEQ ID NO: 397689 - RNA, 32 nt, Homo Sapiens
cucauccccacuuuuuucccuuucucucuacu

SEQ ID NO: 397690 - RNA, 32 nt, Homo Sapiens
auucagaaauaccacauugggaauggccacaa

SEQ ID NO: 397691 - RNA, 32 nt, Homo Sapiens
uauuucuacugauaaaguucuuucuccauaca

SEQ ID NO: 397692 - RNA, 32 nt, Homo Sapiens
uuaacagaggagaggaaaaagauggcucagcu

SEQ ID NO: 397693 - RNA, 32 nt, Homo Sapiens
gaauagauaucacaagguugcuuauuaucaaa

SEQ ID NO: 397694 - RNA, 32 nt, Homo Sapiens
cagcuaauuuuuguauuuuuaguggagauggg

SEQ ID NO: 397695 - RNA, 32 nt, Homo Sapiens
ggggagaggggucagggaggcuaaugguugcu

SEQ ID NO: 397696 - RNA, 32 nt, Homo Sapiens
aaugugaacuaaaauugaaauggaaaauguua

SEQ ID NO: 397697 - RNA, 32 nt, Homo Sapiens
uuggggugucccuccggcucuaggcggccucu

SEQ ID NO: 397698 - RNA, 32 nt, Homo Sapiens
uggauggaacagagagacccucgcagcugacu

SEQ ID NO: 397699 - RNA, 32 nt, Homo Sapiens
cuaccuuuaguaagacauauuuuuuagguaua

SEQ ID NO: 397700 - RNA, 32 nt, Homo Sapiens
gaggaaaccguggaaauugaaaaggaagaaac

SEQ ID NO: 397701 - RNA, 32 nt, Homo Sapiens
cuuuuucuuugagaaaggauugagauacgcuc

SEQ ID NO: 397702 - RNA, 32 nt, Homo Sapiens
caauccaagagacuugaauaauaauaauucaa

SEQ ID NO: 397703 - RNA, 32 nt, Homo Sapiens
ggcucggaggagcggcugcugcugcugcugcu

SEQ ID NO: 397704 - RNA, 32 nt, Homo Sapiens
aggguggggguagaaauagacacaauauuauu

SEQ ID NO: 397705 - RNA, 32 nt, Homo Sapiens
ccccugggcugagagaaccucacgcaccuccc

SEQ ID NO: 397706 - RNA, 32 nt, Homo Sapiens
cuucugugcuaagguaagguauccacccucga

SEQ ID NO: 397707 - RNA, 32 nt, Homo Sapiens
uuccuauuggaccuucuaucucauuggcauug

SEQ ID NO: 397708 - RNA, 32 nt, Homo Sapiens
caguccucuagcauggccccagcauucagcca

SEQ ID NO: 397709 - RNA, 32 nt, Homo Sapiens
ccacccccgagccagcuggggcaaucugcuug

SEQ ID NO: 397710 - RNA, 32 nt, Homo Sapiens
acaaucgggaggagggagucuugcuuggcgac

SEQ ID NO: 397711 - RNA, 32 nt, Homo Sapiens
gacuuuguucuuccaaguccuaguggaaaaga

SEQ ID NO: 397712 - RNA, 32 nt, Homo Sapiens
uucccuuuuuuuucuuuuugcaaacaaaacaa

SEQ ID NO: 397713 - RNA, 32 nt, Homo Sapiens
caccguuggaccccuccgcgagccugcccggc

SEQ ID NO: 397714 - RNA, 32 nt, Homo Sapiens
gccuccgcgccuccccucccccgacucucugg

SEQ ID NO: 397715 - RNA, 32 nt, Homo Sapiens
uugguuaaaaggaaguuuguucacuucgauga

SEQ ID NO: 397716 - RNA, 32 nt, Homo Sapiens
cggcacgagcuaggaucugugacugccacccc

SEQ ID NO: 397717 - RNA, 32 nt, Homo Sapiens
ucuccugcucgccucccuucagagcaucugcc

SEQ ID NO: 397718 - RNA, 32 nt, Homo Sapiens
aaggcuagacaagaugcauuugaaagauacca

SEQ ID NO: 397719 - RNA, 32 nt, Homo Sapiens
auauggacucagcucuggcucucugugugacc

SEQ ID NO: 397720 - RNA, 32 nt, Homo Sapiens
ggauaaaucugccuuaaaaaucaauguaacuu

SEQ ID NO: 397721 - RNA, 32 nt, Homo Sapiens
uuucaccaucagcuccuccccuuucaccacca

SEQ ID NO: 397722 - RNA, 32 nt, Homo Sapiens
uguugggaugucugggucuuccuggcuucacc

SEQ ID NO: 397723 - RNA, 32 nt, Homo Sapiens
aauuuuauugguaggauuuauaucuaaguuug

SEQ ID NO: 397724 - RNA, 32 nt, Homo Sapiens
cacggccccuccccagaugcccggcccacgag

SEQ ID NO: 397725 - RNA, 32 nt, Homo Sapiens
cccacaaggcccuguagugcugacuggaagau

SEQ ID NO: 397726 - RNA, 32 nt, Homo Sapiens
guugaggaaugggcugaacguguuggagcugu

SEQ ID NO: 397727 - RNA, 32 nt, Homo Sapiens
ugagcgcugaggagucaagggcccuucuggca

SEQ ID NO: 397728 - RNA, 32 nt, Homo Sapiens
ccggcgaggucuggaaaggccugacucgccuc

SEQ ID NO: 397729 - RNA, 32 nt, Homo Sapiens
aacagacccuccccgcgccccuccccagccca

SEQ ID NO: 397730 - RNA, 32 nt, Homo Sapiens
gucagccacacaccugcccccaucacaccaag

SEQ ID NO: 397731 - RNA, 32 nt, Homo Sapiens
aagguuauaauggcagaccaaauguagaaggg

SEQ ID NO: 397732 - RNA, 32 nt, Homo Sapiens
cggccgggaccccgcgcccaccgcgucuggag

SEQ ID NO: 397733 - RNA, 32 nt, Homo Sapiens
gaauaaucaaggacaaccaaaauccuuuuguu

SEQ ID NO: 397734 - RNA, 32 nt, Homo Sapiens
uacaacaaaaauacaaaaauuagccaagugcg

SEQ ID NO: 397735 - RNA, 32 nt, Homo Sapiens
acuucauuugucuuuuucaacuucuaauaagc

SEQ ID NO: 397736 - RNA, 32 nt, Homo Sapiens
cugugggccugcugugugccaaaccugagcua

SEQ ID NO: 397737 - RNA, 32 nt, Homo Sapiens
aauuaaaauaugucaaguauuuagaggaaggg

SEQ ID NO: 397738 - RNA, 32 nt, Homo Sapiens
gccgcccagccucuccucucgcgccuccuagc

SEQ ID NO: 397739 - RNA, 32 nt, Homo Sapiens
gaaacaauauauaugaaugugauacauguguu

SEQ ID NO: 397740 - RNA, 32 nt, Homo Sapiens
ggcgagcagagcugcgcugcgggcguccuggg

SEQ ID NO: 397741 - RNA, 32 nt, Homo Sapiens
cugcccuuuuauucacuuuuagccucuuuuuu

SEQ ID NO: 397742 - RNA, 32 nt, Homo Sapiens
caggaauuuuccagcuccauuauaaucuuaua

SEQ ID NO: 397743 - RNA, 32 nt, Homo Sapiens
ugguggcuuaugcugcagauucaucugaugaa

SEQ ID NO: 397744 - RNA, 32 nt, Homo Sapiens
auuuuguuuuugucuuuuuucuuaugagcuuu

SEQ ID NO: 397745 - RNA, 32 nt, Homo Sapiens
uucuuuuuuccuuuuuucagaucaccaucuaa

SEQ ID NO: 397746 - RNA, 32 nt, Homo Sapiens
ucccaacuuguaaaaauuaaaaguuaugguac

SEQ ID NO: 397747 - RNA, 32 nt, Homo Sapiens
uaaauauuuuuguagaauaucauaugacugua

SEQ ID NO: 397748 - RNA, 32 nt, Homo Sapiens
ugacauuccugacagcucugcccgccgcagau

SEQ ID NO: 397749 - RNA, 32 nt, Homo Sapiens
ccuauucaaggaauacgugccuuuuucuuaaa

SEQ ID NO: 397750 - RNA, 32 nt, Homo Sapiens
gcggcagcagagaggagcgcugaaacauggcu

SEQ ID NO: 397751 - RNA, 29 nt, Homo Sapiens
acgcgcacggugaagaggacgcccgagcc

SEQ ID NO: 397752 - RNA, 32 nt, Homo Sapiens
auaguguuuuauuggaaauuguaaccacacac

SEQ ID NO: 397753 - RNA, 32 nt, Homo Sapiens
guucacuuuacuacauccugccccacauucug

SEQ ID NO: 397754 - RNA, 32 nt, Homo Sapiens
accucaaauuuauuuuuugcccuuauucauuu

SEQ ID NO: 397755 - RNA, 32 nt, Homo Sapiens
uacucagggguuagcuuccaaggucaguacau

SEQ ID NO: 397756 - RNA, 32 nt, Homo Sapiens
ggccuacugaacaauucaagcugugcaguagu

SEQ ID NO: 397757 - RNA, 32 nt, Homo Sapiens
ucagaaaguggggagcagagacccagccaaau

SEQ ID NO: 397758 - RNA, 32 nt, Homo Sapiens
ccuagggggaugcauggcucugugccuuggag

SEQ ID NO: 397759 - RNA, 32 nt, Homo Sapiens
cuccuaggggaagagcagaaggaaggaugcca

SEQ ID NO: 397760 - RNA, 32 nt, Homo Sapiens
uucuccccugcccccaggacugggccacuucu

SEQ ID NO: 397761 - RNA, 32 nt, Homo Sapiens
ucagggguuccucccccaacucuuuucagcag

SEQ ID NO: 397762 - RNA, 32 nt, Homo Sapiens
ucugguuacuauaaaauagauuuauaaaugca

SEQ ID NO: 397763 - RNA, 32 nt, Homo Sapiens
ugggggcauguaaagaaacuaauuauacuaca

SEQ ID NO: 397764 - RNA, 32 nt, Homo Sapiens
cauaaaguuaguagauauaacuuuuuaguugc

SEQ ID NO: 397765 - RNA, 32 nt, Homo Sapiens
gauauauuugaaagugguaauccugaaucucu

SEQ ID NO: 397766 - RNA, 32 nt, Homo Sapiens
caguugcuucaggccaucuggauguauacaug

SEQ ID NO: 397767 - RNA, 32 nt, Homo Sapiens
guuacucucaguauaugauacucuguaacauu

SEQ ID NO: 397768 - RNA, 32 nt, Homo Sapiens
uugucucuuucccucccugccuggaaaggccu

SEQ ID NO: 397769 - RNA, 32 nt, Homo Sapiens
ccgcguugccaguuccucucccacucgcucgu

SEQ ID NO: 397770 - RNA, 32 nt, Homo Sapiens
auaaucaagcauguaacaccacaugacaauuu

SEQ ID NO: 397771 - RNA, 32 nt, Homo Sapiens
aggcacugcuucuagaauccacuuccuucucg

SEQ ID NO: 397772 - RNA, 32 nt, Homo Sapiens
guggcaccccgcgcuccgugcuccugcugccc

SEQ ID NO: 397773 - RNA, 32 nt, Homo Sapiens
uuuuggaaagacuggcguggcaagcgucgccc

SEQ ID NO: 397774 - RNA, 32 nt, Homo Sapiens
gggacuuugagcucaguguuaaaggaugagga

SEQ ID NO: 397775 - RNA, 32 nt, Homo Sapiens
gaauccagcuuugaccuuuauucaagagacca

SEQ ID NO: 397776 - RNA, 32 nt, Homo Sapiens
gccccugccccgcuccucugcuuacuuuuccu

SEQ ID NO: 397777 - RNA, 32 nt, Homo Sapiens
guccaguccucuaucacuuuugcaugaauuaa

SEQ ID NO: 397778 - RNA, 32 nt, Homo Sapiens
augaaauugaaagagggagaggggagacugua

SEQ ID NO: 397779 - RNA, 32 nt, Homo Sapiens
cagagcggccagagagcagagaagagaccuag

SEQ ID NO: 397780 - RNA, 32 nt, Homo Sapiens
ucccucuugaguuuuugcaaaauacuuuauua

SEQ ID NO: 397781 - RNA, 32 nt, Homo Sapiens
uauauuuuuuaacuuccgucagggcucccgcu

SEQ ID NO: 397782 - RNA, 32 nt, Homo Sapiens
aagcugucauuaauaaaaauucuuauaguacc

SEQ ID NO: 397783 - RNA, 32 nt, Homo Sapiens
cugccuuauuuuuuuucuuuuuguaaguuacu

SEQ ID NO: 397784 - RNA, 31 nt, Homo Sapiens
cacagggagccccgguccuaucuuagagccc

SEQ ID NO: 397785 - RNA, 32 nt, Homo Sapiens
ugucaaccugaauuguuuaaaugggcuuauuc

SEQ ID NO: 397786 - RNA, 25 nt, Homo Sapiens
aaguuuugccccuccuucuucucca

SEQ ID NO: 397787 - RNA, 32 nt, Homo Sapiens
gccuccugcagcgcccgccugccaaugugagg

SEQ ID NO: 397788 - RNA, 32 nt, Homo Sapiens
ccgcagcccagccgagggggucgggcggccug

SEQ ID NO: 397789 - RNA, 32 nt, Homo Sapiens
auagcagcaauagcugguguuuauugagcugu

SEQ ID NO: 397790 - RNA, 32 nt, Homo Sapiens
cuagaagcacgauauuugauaauuauauuugu

SEQ ID NO: 397791 - RNA, 32 nt, Homo Sapiens
gcaacaccaagcccgaccgggccaggccuggg

SEQ ID NO: 397792 - RNA, 32 nt, Homo Sapiens
ccucucccacccaagcuccccauccagcccuu

SEQ ID NO: 397793 - RNA, 32 nt, Homo Sapiens
ucuauuuuagaaggauaaaaaugguaaugaug

SEQ ID NO: 397794 - RNA, 32 nt, Homo Sapiens
ucauuuacugaauaauggauagaugguuuugc

SEQ ID NO: 397795 - RNA, 32 nt, Homo Sapiens
acauauguguauauguauauauacuccuuaug

SEQ ID NO: 397796 - RNA, 32 nt, Homo Sapiens
ucagaagggaauugcucagagaagguaaaaga

SEQ ID NO: 397797 - RNA, 32 nt, Homo Sapiens
gcaccuuugcaugaugaugacucuugaacaga

SEQ ID NO: 397798 - RNA, 32 nt, Homo Sapiens
agguggugagugggggcgugcuugggaggcgc

SEQ ID NO: 397799 - RNA, 32 nt, Homo Sapiens
cuuggacaaaaacacaauaaaaauaguuaauu

SEQ ID NO: 397800 - RNA, 32 nt, Homo Sapiens
ucuauugcaauaauguuagggacauuauauga

SEQ ID NO: 397801 - RNA, 32 nt, Homo Sapiens
ccuugagaaaccggcaguucccaagccagcgc

SEQ ID NO: 397802 - RNA, 32 nt, Homo Sapiens
cuaccuugggacuguuauuuaacugaaucagu

SEQ ID NO: 397803 - RNA, 32 nt, Homo Sapiens
ggagauguguguuguucauguucuauguuuug

SEQ ID NO: 397804 - RNA, 30 nt, Homo Sapiens
ccuccugucccugcugcaggggcuggggcc

SEQ ID NO: 397805 - RNA, 32 nt, Homo Sapiens
uggucaggggagagaggggaggaaagccaagg

SEQ ID NO: 397806 - RNA, 32 nt, Homo Sapiens
aguaguuucuuugcauucucaguaguacacgu

SEQ ID NO: 397807 - RNA, 32 nt, Homo Sapiens
agaaaauucagaucagcaaauaaagaaauauu

SEQ ID NO: 397808 - RNA, 31 nt, Homo Sapiens
agcuuucuugguaagauuaaaucuuacaaau

SEQ ID NO: 397809 - RNA, 31 nt, Homo Sapiens
cgugcuauggcccuguaccacacugaggagc

SEQ ID NO: 397810 - RNA, 32 nt, Homo Sapiens
uggggcucugaaagauuuguaucucugugcuu

SEQ ID NO: 397811 - RNA, 29 nt, Homo Sapiens
auaaugaugaagaugacagugaggugccc

SEQ ID NO: 397812 - RNA, 32 nt, Homo Sapiens
uggccggcuccagccgcaagggcgaugcugug

SEQ ID NO: 397813 - RNA, 32 nt, Homo Sapiens
gagcccgccgcccgcgcgagguguagacgggg

SEQ ID NO: 397814 - RNA, 32 nt, Homo Sapiens
caguggacacugacauugucucucgcuguucc

SEQ ID NO: 397815 - RNA, 32 nt, Homo Sapiens
caaaguugucaaccggccccgcccccacccgc

SEQ ID NO: 397816 - RNA, 32 nt, Homo Sapiens
cggggagcgagccccaggcggguccgggucgc

SEQ ID NO: 397817 - RNA, 32 nt, Homo Sapiens
agacagcauccuccccgccuuccaccuuggua

SEQ ID NO: 397818 - RNA, 32 nt, Homo Sapiens
uaccagcggggacaccaauggcugcaucaaau

SEQ ID NO: 397819 - RNA, 32 nt, Homo Sapiens
uuccaggguuuuuggaggaagggauuagauag

SEQ ID NO: 397820 - RNA, 32 nt, Homo Sapiens
ccuugccucuguuuuucuuguuuuauucccuu

SEQ ID NO: 397821 - RNA, 32 nt, Homo Sapiens
aaaaaaugacauuuuuuaucuuauaccucaga

SEQ ID NO: 397822 - RNA, 32 nt, Homo Sapiens
gcggggaccgcgacgagcccgggucgccguug

SEQ ID NO: 397823 - RNA, 32 nt, Homo Sapiens
uuggauuucuucaaaaauacauguaaaggucu

SEQ ID NO: 397824 - RNA, 32 nt, Homo Sapiens
ucucaaauucaaugugauacaaauauuuacug

SEQ ID NO: 397825 - RNA, 32 nt, Homo Sapiens
agcuuaugggguauuuuaagcauucuuagacu

SEQ ID NO: 397826 - RNA, 32 nt, Homo Sapiens
agguucagcagacgucucaggaucugucauau

SEQ ID NO: 397827 - RNA, 32 nt, Homo Sapiens
gacggccuguugauaugagcucccaguuggga

SEQ ID NO: 397828 - RNA, 32 nt, Homo Sapiens
gcuucucagcggagugacccagggacggagga

SEQ ID NO: 397829 - RNA, 32 nt, Homo Sapiens
caaaaguuguauaaaaauauuuucuauuguag

SEQ ID NO: 397830 - RNA, 32 nt, Homo Sapiens
ugcuggcagcuaggggcgacgaggcgggacgu

SEQ ID NO: 397831 - RNA, 32 nt, Homo Sapiens
ggcuccagcagcaggaggagcggcggcggcug

SEQ ID NO: 397832 - RNA, 32 nt, Homo Sapiens
ugacaagacaaugagaguaauugcuugacaac

SEQ ID NO: 397833 - RNA, 32 nt, Homo Sapiens
uucucgucacacuacauagacauaauuguuau

SEQ ID NO: 397834 - RNA, 32 nt, Homo Sapiens
auagcaaaugcagaaccacaaacaauucgaau

SEQ ID NO: 397835 - RNA, 32 nt, Homo Sapiens
uccuucauuuuaugcuuuauuuccuguuugaa

SEQ ID NO: 397836 - RNA, 32 nt, Homo Sapiens
uuuagaauccggaaggaaaaggaaaugaaaug

SEQ ID NO: 397837 - RNA, 32 nt, Homo Sapiens
ucugcccguccauccauccauccacucuucca

SEQ ID NO: 397838 - RNA, 32 nt, Homo Sapiens
cccaaggagccagcugugguggcggccgaggc

SEQ ID NO: 397839 - RNA, 32 nt, Homo Sapiens
gucggaagggcgucgcgcggccucgggugaca

SEQ ID NO: 397840 - RNA, 32 nt, Homo Sapiens
caauugaaaaaauuauucaacaaguaaaagcu

SEQ ID NO: 397841 - RNA, 32 nt, Homo Sapiens
uccccugacaccuggauuauugcaauaaaaag

SEQ ID NO: 397842 - RNA, 32 nt, Homo Sapiens
gccagcuucgucuguucuuaauuuggagucau

SEQ ID NO: 397843 - RNA, 32 nt, Homo Sapiens
cauccuguccugagccggggccccccagccuc

SEQ ID NO: 397844 - RNA, 32 nt, Homo Sapiens
caaacugcagagcagcucucugaugguguccc

SEQ ID NO: 397845 - RNA, 32 nt, Homo Sapiens
gcgcacaagaaguuuauggaaaaguuagaugc

SEQ ID NO: 397846 - RNA, 32 nt, Homo Sapiens
acaccugccaacauccagaaucuccuaccacg

SEQ ID NO: 397847 - RNA, 32 nt, Homo Sapiens
gucaggaauucaagauuagccuggacaacaug

SEQ ID NO: 397848 - RNA, 32 nt, Homo Sapiens
aagguuauuucugaauguaacaauuuccuuaa

SEQ ID NO: 397849 - RNA, 32 nt, Homo Sapiens
gcggggccccccucugcuccagcccucccgau

SEQ ID NO: 397850 - RNA, 31 nt, Homo Sapiens
cugccugagccccagaggcacccugggcacu

SEQ ID NO: 397851 - RNA, 32 nt, Homo Sapiens
cuaguauuauggagaugaacaugaugauguaa

SEQ ID NO: 397852 - RNA, 32 nt, Homo Sapiens
cacgcgcccgcggcccgcgcgccgagauguuc

SEQ ID NO: 397853 - RNA, 32 nt, Homo Sapiens
ccugugggacccgggcucuuagggucuugaca

SEQ ID NO: 397854 - RNA, 32 nt, Homo Sapiens
uggagggcuucguggaggaagggagaauugag

SEQ ID NO: 397855 - RNA, 32 nt, Homo Sapiens
acaggaaaacaaauggcaguaucccucagaca

SEQ ID NO: 397856 - RNA, 32 nt, Homo Sapiens
aagaaguuacagaacacagagugcucaaaacu

SEQ ID NO: 397857 - RNA, 32 nt, Homo Sapiens
aguuuauguccaacauccugacguauucucuu

SEQ ID NO: 397858 - RNA, 32 nt, Homo Sapiens
gcacagcgcggcagggccuuggcuaccacacg

SEQ ID NO: 397859 - RNA, 32 nt, Homo Sapiens
cacuuaacaaaauaauuacauacuugaaguuu

SEQ ID NO: 397860 - RNA, 32 nt, Homo Sapiens
cauauuguaaaauaaacauguuuuuuaacaaa

SEQ ID NO: 397861 - RNA, 32 nt, Homo Sapiens
guucagugaacaggcucauaucaugacagaau

SEQ ID NO: 397862 - RNA, 32 nt, Homo Sapiens
ugauaucuucuuuuuccaaccuuuauuucuau

SEQ ID NO: 397863 - RNA, 32 nt, Homo Sapiens
cauguguuuucuucuuaguuaugugaguuuuu

SEQ ID NO: 397864 - RNA, 32 nt, Homo Sapiens
ugcucuccuaucugcacucacccaggccuuca

SEQ ID NO: 397865 - RNA, 32 nt, Homo Sapiens
gaacagcucugccagcagccuuccacggggga

SEQ ID NO: 397866 - RNA, 32 nt, Homo Sapiens
caccaggacuccauucuuaagccuaugcgagu

SEQ ID NO: 397867 - RNA, 32 nt, Homo Sapiens
cgcuggucuuaaacuccugaccucaagugauc

SEQ ID NO: 397868 - RNA, 32 nt, Homo Sapiens
gagaggagagguagggggcauucugaaaaaug

SEQ ID NO: 397869 - RNA, 32 nt, Homo Sapiens
cacaggcuugauaaguuugguuuuuaaaaaau

SEQ ID NO: 397870 - RNA, 32 nt, Homo Sapiens
uaauaugauggucuuugcaaaaaggaacaaaa

SEQ ID NO: 397871 - RNA, 32 nt, Homo Sapiens
ccgaugcggcuuguggcacggcugggauguga

SEQ ID NO: 397872 - RNA, 32 nt, Homo Sapiens
agcucagcacccaggcugaacucuguaccauu

SEQ ID NO: 397873 - RNA, 32 nt, Homo Sapiens
uaaucaaugugaugugaagaauuuagauaaau

SEQ ID NO: 397874 - RNA, 32 nt, Homo Sapiens
cuccgggcgcccgaccucuccucccccgcgcc

SEQ ID NO: 397875 - RNA, 32 nt, Homo Sapiens
uuuuuuuuuuuucaauuuuucuuuuuugggau

SEQ ID NO: 397876 - RNA, 32 nt, Homo Sapiens
augaggcagagaauugucagagcugaaguucc

SEQ ID NO: 397877 - RNA, 32 nt, Homo Sapiens
ugcccugccccaccccaccucacagcuacuca

SEQ ID NO: 397878 - RNA, 32 nt, Homo Sapiens
gcucugugaguccgaggccgcggccguggcgc

SEQ ID NO: 397879 - RNA, 32 nt, Homo Sapiens
ccgggcagggcggcgggcgcgcucagucuggc

SEQ ID NO: 397880 - RNA, 32 nt, Homo Sapiens
uguuugcacuuguuauuuuguagcuuuaauga

SEQ ID NO: 397881 - RNA, 32 nt, Homo Sapiens
uauaugcacgauguaauuuaaugcuaaagagu

SEQ ID NO: 397882 - RNA, 32 nt, Homo Sapiens
ccgccggcgacauggccagcuccggagaggac

SEQ ID NO: 397883 - RNA, 32 nt, Homo Sapiens
aucuauuuauuaaguucucaaugugaaaauug

SEQ ID NO: 397884 - RNA, 32 nt, Homo Sapiens
aaaagacuaugaagugaucacucuauauaaaa

SEQ ID NO: 397885 - RNA, 32 nt, Homo Sapiens
uccagguuucuuccacccacgagcacuuuauu

SEQ ID NO: 397886 - RNA, 32 nt, Homo Sapiens
cccaggagugcagacacugcccuaauugcuuc

SEQ ID NO: 397887 - RNA, 32 nt, Homo Sapiens
gggagucuggcuuuuacuaucuuucuuaaaaa

SEQ ID NO: 397888 - RNA, 32 nt, Homo Sapiens
ucucuguaagaaaguucugguuaugcuguuuu

SEQ ID NO: 397889 - RNA, 32 nt, Homo Sapiens
accuucugccacacucugaacaacacuuccau

SEQ ID NO: 397890 - RNA, 30 nt, Homo Sapiens
uuuugccaguugaugggggaagaaaggaag

SEQ ID NO: 397891 - RNA, 32 nt, Homo Sapiens
caaaacccaucuccagucuccucccgggggcc

SEQ ID NO: 397892 - RNA, 32 nt, Homo Sapiens
acaaugcaccucaaggaauuagaguagcauga

SEQ ID NO: 397893 - RNA, 29 nt, Homo Sapiens
acacauauauguauguauacacauauaca

SEQ ID NO: 397894 - RNA, 32 nt, Homo Sapiens
gcugguuugagcucagguucgaagaggaaaug

SEQ ID NO: 397895 - RNA, 32 nt, Homo Sapiens
aaugcucuuuuguaagaaacguuuuaugauuu

SEQ ID NO: 397896 - RNA, 32 nt, Homo Sapiens
gguuucugucucccuaguguucccauccagau

SEQ ID NO: 397897 - RNA, 32 nt, Homo Sapiens
gucguuuuuucuugcugcuccuccccccauca

SEQ ID NO: 397898 - RNA, 32 nt, Homo Sapiens
uggauaugccccacccuguggcuucugcagcu

SEQ ID NO: 397899 - RNA, 32 nt, Homo Sapiens
uauucaugacaagaauugucaauauaagaaug

SEQ ID NO: 397900 - RNA, 32 nt, Homo Sapiens
auccacauuuuucccccugcauuauggaaaau

SEQ ID NO: 397901 - RNA, 32 nt, Homo Sapiens
guccacgcccgcccgcgcccagggcgagucgg

SEQ ID NO: 397902 - RNA, 32 nt, Homo Sapiens
cuuggcugguacuuaaauucguuuugucaggc

SEQ ID NO: 397903 - RNA, 32 nt, Homo Sapiens
gcggaaagaagacccgguccugcccgagcuca

SEQ ID NO: 397904 - RNA, 32 nt, Homo Sapiens
gccagagcugagcggagggcgcggcgcgagaa

SEQ ID NO: 397905 - RNA, 32 nt, Homo Sapiens
ucacuuauuuuuccaauaauugauauuguaca

SEQ ID NO: 397906 - RNA, 32 nt, Homo Sapiens
cccgccaccacgcccguguaauuuuuguauuu

SEQ ID NO: 397907 - RNA, 32 nt, Homo Sapiens
caugaggagccacucagauuccugucacuucu

SEQ ID NO: 397908 - RNA, 32 nt, Homo Sapiens
gccucccuggggcagagcuguuucccagacgg

SEQ ID NO: 397909 - RNA, 32 nt, Homo Sapiens
gcccaccggcuccgcgcugcugccgccgccac

SEQ ID NO: 397910 - RNA, 32 nt, Homo Sapiens
ucugagcaaaucugaaaacucucuaaacucua

SEQ ID NO: 397911 - RNA, 32 nt, Homo Sapiens
acaguuucaauauaucuaauauauacugucgc

SEQ ID NO: 397912 - RNA, 32 nt, Homo Sapiens
ggaggcugucucugccuucucugaugggacug

SEQ ID NO: 397913 - RNA, 32 nt, Homo Sapiens
accagccuggccagcauagugaaaccccaucu

SEQ ID NO: 397914 - RNA, 32 nt, Homo Sapiens
acggugaaaccccgucucuaauaaaaauacaa

SEQ ID NO: 397915 - RNA, 31 nt, Homo Sapiens
cugaggcagcgcaccccugccccggacccca

SEQ ID NO: 397916 - RNA, 32 nt, Homo Sapiens
cagucugccacaccccaucccuuugggccuca

SEQ ID NO: 397917 - RNA, 32 nt, Homo Sapiens
gcgcuggcuugcccuccuguucuccagagcaa

SEQ ID NO: 397918 - RNA, 32 nt, Homo Sapiens
aguucaguuccgauggugcccguggucaaaag

SEQ ID NO: 397919 - RNA, 32 nt, Homo Sapiens
accaggcuuuguuuacacuuggagccaccuug

SEQ ID NO: 397920 - RNA, 32 nt, Homo Sapiens
uuuccuuccuuccuuccuuuccuuggagcacu

SEQ ID NO: 397921 - RNA, 32 nt, Homo Sapiens
ucaaacauagcggacucuggaacugggccaac

SEQ ID NO: 397922 - RNA, 32 nt, Homo Sapiens
uuugaaguugucaucaauugcuuuacuaagau

SEQ ID NO: 397923 - RNA, 32 nt, Homo Sapiens
ggauccacuaggcgaagcuggcugggcuccug

SEQ ID NO: 397924 - RNA, 32 nt, Homo Sapiens
gaagagcgcgcgccagcuucggcacacuuggg

SEQ ID NO: 397925 - RNA, 32 nt, Homo Sapiens
ggcgggcgugggaggagggaggcggccuccau

SEQ ID NO: 397926 - RNA, 32 nt, Homo Sapiens
caauugggcccaauaugggaauuuucauaaua

SEQ ID NO: 397927 - RNA, 32 nt, Homo Sapiens
ucuggucuuaucugugauacauaauuucaaau

SEQ ID NO: 397928 - RNA, 32 nt, Homo Sapiens
cccaucugccgugugucuugcccgccugcccc

SEQ ID NO: 397929 - RNA, 32 nt, Homo Sapiens
ccauugacgaccagcuuuggcuguuccaacuc

SEQ ID NO: 397930 - RNA, 32 nt, Homo Sapiens
gagggguagaccugggcgggguggggccgcga

SEQ ID NO: 397931 - RNA, 32 nt, Homo Sapiens
cacccucuggaggccugggaaccuggcugcag

SEQ ID NO: 397932 - RNA, 32 nt, Homo Sapiens
cucuacuuggggugacagugcucacguggcuc

SEQ ID NO: 397933 - RNA, 32 nt, Homo Sapiens
gcuuuccucagggacucagaucagggcuggca

SEQ ID NO: 397934 - RNA, 32 nt, Homo Sapiens
aauggaaucucacucugucacccaggcgggag

SEQ ID NO: 397935 - RNA, 32 nt, Homo Sapiens
uacaaaauaaacaaaaaauuagccgaccaugg

SEQ ID NO: 397936 - RNA, 32 nt, Homo Sapiens
uuaaaauaugcauuuuuaaaugaauggcuuuu

SEQ ID NO: 397937 - RNA, 32 nt, Homo Sapiens
uccugugccugcugggguggcuguggggcgug

SEQ ID NO: 397938 - RNA, 32 nt, Homo Sapiens
acaaggaaccaaucacaacuacagagguuucu

SEQ ID NO: 397939 - RNA, 32 nt, Homo Sapiens
cucacuaaaugaaguucucauuucucuccaac

SEQ ID NO: 397940 - RNA, 32 nt, Homo Sapiens
uggagaggagaggcacugccggagcccuugcc

SEQ ID NO: 397941 - RNA, 32 nt, Homo Sapiens
uuuuggcugauuuuuuaaaaauuuaaguuuug

SEQ ID NO: 397942 - RNA, 32 nt, Homo Sapiens
uuguugcaggaaauguauuucagauaaaauau

SEQ ID NO: 397943 - RNA, 32 nt, Homo Sapiens
auauuuuugcuaaaccuauuucacaaaucaaa

SEQ ID NO: 397944 - RNA, 32 nt, Homo Sapiens
ccauuuuauucaucagaagccagucacuaagc

SEQ ID NO: 397945 - RNA, 32 nt, Homo Sapiens
aauuacucaguugaguuuuucuuuaaccacag

SEQ ID NO: 397946 - RNA, 32 nt, Homo Sapiens
cguagcugaccaaaaaguaggggaggggcugg

SEQ ID NO: 397947 - RNA, 32 nt, Homo Sapiens
accuuaauauuuacaagaauuauaucacuuaa

SEQ ID NO: 397948 - RNA, 32 nt, Homo Sapiens
ccuggccagaugaaaugcugccgcaauggcug

SEQ ID NO: 397949 - RNA, 32 nt, Homo Sapiens
cgggagcucgccgcgcgccggggaccaggaac

SEQ ID NO: 397950 - RNA, 32 nt, Homo Sapiens
uuuuaaggauauacauaaagauauauuuagaa

SEQ ID NO: 397951 - RNA, 32 nt, Homo Sapiens
agggcacuuggguuaguggcgcggcgggcggc

SEQ ID NO: 397952 - RNA, 32 nt, Homo Sapiens
caccaauguacauuuugaaacuuucuuucagg

SEQ ID NO: 397953 - RNA, 32 nt, Homo Sapiens
cuguccguggugcugagcgccggcgagagcgg

SEQ ID NO: 397954 - RNA, 32 nt, Homo Sapiens
ugacuuuguaaauucugauuucuuuucaccau

SEQ ID NO: 397955 - RNA, 32 nt, Homo Sapiens
gggucaggaaauuuggaggauaaggcccuuca

SEQ ID NO: 397956 - RNA, 32 nt, Homo Sapiens
aagucaggaggcggaggcugcuuuucugagug

SEQ ID NO: 397957 - RNA, 32 nt, Homo Sapiens
acguccccacccacgggggagacggagagaua

SEQ ID NO: 397958 - RNA, 32 nt, Homo Sapiens
ugugagucagguuuuuccaacccaggcccuug

SEQ ID NO: 397959 - RNA, 32 nt, Homo Sapiens
guuuuccuacacaaauacaaaauaauugggga

SEQ ID NO: 397960 - RNA, 32 nt, Homo Sapiens
aaaugaucagaaaaagaaagaagccaaagaga

SEQ ID NO: 397961 - RNA, 32 nt, Homo Sapiens
agggggaaggcacccacugccuaccucacagg

SEQ ID NO: 397962 - RNA, 32 nt, Homo Sapiens
ugugagcaagcacugcucaugugccuggcaag

SEQ ID NO: 397963 - RNA, 32 nt, Homo Sapiens
auggacgagcuccuggcgcgccugcugcaggg

SEQ ID NO: 397964 - RNA, 32 nt, Homo Sapiens
acaaguauuuacuuucauccaguguuuuucuu

SEQ ID NO: 397965 - RNA, 32 nt, Homo Sapiens
acagcuucucaauaaaaccagaccauuucuca

SEQ ID NO: 397966 - RNA, 32 nt, Homo Sapiens
ggcagggagaccugggucuucucuggcugaga

SEQ ID NO: 397967 - RNA, 32 nt, Homo Sapiens
ucuuuuuaugugguuuaauugccaagugucua

SEQ ID NO: 397968 - RNA, 32 nt, Homo Sapiens
ucgccaccgccuuuuccuugccucgcgccgcu

SEQ ID NO: 397969 - RNA, 32 nt, Homo Sapiens
ggccccgcaggaccuuccuuuuccaggaagag

SEQ ID NO: 397970 - RNA, 31 nt, Homo Sapiens
aauaaucauuugagauuuuuaucaaauauga

SEQ ID NO: 397971 - RNA, 32 nt, Homo Sapiens
uaagggaaaaaguuaaaucuuuaauucugacc

SEQ ID NO: 397972 - RNA, 32 nt, Homo Sapiens
uauuuaauuuuuuuuucuuuugcacauuuuuc

SEQ ID NO: 397973 - RNA, 32 nt, Homo Sapiens
ucugaaacuccugugucccgggccccccaggc

SEQ ID NO: 397974 - RNA, 32 nt, Homo Sapiens
gugcagcaggaucccucaaaucaauaaagcau

SEQ ID NO: 397975 - RNA, 32 nt, Homo Sapiens
ggcucaucuuggccggccgugggguccauguu

SEQ ID NO: 397976 - RNA, 32 nt, Homo Sapiens
acugucccaguagccaaggcccgggguuggag

SEQ ID NO: 397977 - RNA, 32 nt, Homo Sapiens
ggccuccaggacuggggcuugccaggcuuguc

SEQ ID NO: 397978 - RNA, 32 nt, Homo Sapiens
acaucuuuuccuuuccccagaagagaucccua

SEQ ID NO: 397979 - RNA, 32 nt, Homo Sapiens
caaaagaaaaggaaauaaucuuuggcuauaaa

SEQ ID NO: 397980 - RNA, 32 nt, Homo Sapiens
cugcccccucccuaccucuacuccccaaaaug

SEQ ID NO: 397981 - RNA, 28 nt, Homo Sapiens
cccacggaagauuaacacaguggcugaa

SEQ ID NO: 397982 - RNA, 32 nt, Homo Sapiens
auguaauggaaauaaaauauuuucuuuuauga

SEQ ID NO: 397983 - RNA, 32 nt, Homo Sapiens
agaaaacccagcucucccaacccugaucgugg

SEQ ID NO: 397984 - RNA, 32 nt, Homo Sapiens
auccuccacaagaagguguuucccuguuguua

SEQ ID NO: 397985 - RNA, 32 nt, Homo Sapiens
guagccuuuuuacuuuugggguuuuguuuuug

SEQ ID NO: 397986 - RNA, 32 nt, Homo Sapiens
uuucccaaccucaucugucagaaauccaugug

SEQ ID NO: 397987 - RNA, 32 nt, Homo Sapiens
uagugauuugguucaaagauguuuacaggaca

SEQ ID NO: 397988 - RNA, 32 nt, Homo Sapiens
ccgaggccagcuucgcggcgcugccccgcggc

SEQ ID NO: 397989 - RNA, 32 nt, Homo Sapiens
ggcuucccgcucagcccucccugccccucccu

SEQ ID NO: 397990 - RNA, 32 nt, Homo Sapiens
uucuacaugguuuaaaucgacuguuuuuaaaa

SEQ ID NO: 397991 - RNA, 32 nt, Homo Sapiens
ugagggcuccgucucccgagugauggcagcgc

SEQ ID NO: 397992 - RNA, 32 nt, Homo Sapiens
aucaaguuaacuggcuuuuucuuaauuucauu

SEQ ID NO: 397993 - RNA, 26 nt, Homo Sapiens
gagucaauuaaaccucuuuauacauu

SEQ ID NO: 397994 - RNA, 32 nt, Homo Sapiens
uaaaccccaagccccugagcuuguguuuaaag

SEQ ID NO: 397995 - RNA, 32 nt, Homo Sapiens
cugaaggaacaauaaugaugagauuuguaacu

SEQ ID NO: 397996 - RNA, 31 nt, Homo Sapiens
cuggccacacgcagccaaauggaggccacug

SEQ ID NO: 397997 - RNA, 32 nt, Homo Sapiens
uaaauguuuaauuuuuuuuuuaaauugacuuu

SEQ ID NO: 397998 - RNA, 32 nt, Homo Sapiens
gggcuggauccgagucggccccggggagcucc

SEQ ID NO: 397999 - RNA, 32 nt, Homo Sapiens
ccuccucaggccagcucuggggucucagcagg

SEQ ID NO: 398000 - RNA, 32 nt, Homo Sapiens
gguggagccccggcggggggcauggggcagga

SEQ ID NO: 398001 - RNA, 32 nt, Homo Sapiens
ugccuucugagcugcacuuuccgugggugccu

SEQ ID NO: 398002 - RNA, 32 nt, Homo Sapiens
uguuguguucagaugggcaggcacucuuccuc

SEQ ID NO: 398003 - RNA, 32 nt, Homo Sapiens
uaggagaguuuugguuuugauuuuuuuuuuuu

SEQ ID NO: 398004 - RNA, 32 nt, Homo Sapiens
ucuuccggccucagccucccaaagugcuggau

SEQ ID NO: 398005 - RNA, 32 nt, Homo Sapiens
gagaagcagcuggcagcggagagagcagcccu

SEQ ID NO: 398006 - RNA, 32 nt, Homo Sapiens
auuuguguaaaauaaucaguauaauaaaauuc

SEQ ID NO: 398007 - RNA, 32 nt, Homo Sapiens
cguugccucucuguguaugacuaacggcucca

SEQ ID NO: 398008 - RNA, 32 nt, Homo Sapiens
uguccaaguggaaagagccaaguuuauuauga

SEQ ID NO: 398009 - RNA, 32 nt, Homo Sapiens
cucaucagaugucagccuuugcucuccauuuu

SEQ ID NO: 398010 - RNA, 32 nt, Homo Sapiens
gacagauacaaacaguuauacucaauguacug

SEQ ID NO: 398011 - RNA, 32 nt, Homo Sapiens
ucuuucuacauucucaucuacucauugucuca

SEQ ID NO: 398012 - RNA, 32 nt, Homo Sapiens
cuacugcccuccccuuccccuuuacucagccc

SEQ ID NO: 398013 - RNA, 32 nt, Homo Sapiens
ccaugggaugugugauaucagcagucuucagc

SEQ ID NO: 398014 - RNA, 32 nt, Homo Sapiens
cacuuagaucaaugucacuccaaacuggaggc

SEQ ID NO: 398015 - RNA, 32 nt, Homo Sapiens
uuauaaugcuaaaauucccugccauuuuguga

SEQ ID NO: 398016 - RNA, 32 nt, Homo Sapiens
uguauauuuauuauuugucaauuaaaagcaaa

SEQ ID NO: 398017 - RNA, 32 nt, Homo Sapiens
aggccuuaaucuguuuagauuaucuuuaaucu

SEQ ID NO: 398018 - RNA, 32 nt, Homo Sapiens
ucuguauuguucugacccugguaaauauauuu

SEQ ID NO: 398019 - RNA, 32 nt, Homo Sapiens
ucaagcuaaaagacaagaaaugaggcggguaa

SEQ ID NO: 398020 - RNA, 32 nt, Homo Sapiens
uucccauuuuucccauuguuuaaaaccaucac

SEQ ID NO: 398021 - RNA, 32 nt, Homo Sapiens
cggggacagggguggccauggcggcggcggcc

SEQ ID NO: 398022 - RNA, 32 nt, Homo Sapiens
ucccuagugucaaaauuaaaucaauaaaacug

SEQ ID NO: 398023 - RNA, 32 nt, Homo Sapiens
ccauuugguuucuacagcuuuuccccaauauc

SEQ ID NO: 398024 - RNA, 32 nt, Homo Sapiens
ggaucucaaaaauuuguuugaugauugaagga

SEQ ID NO: 398025 - RNA, 32 nt, Homo Sapiens
aguccagcgggcaggaauucucuucuuccgaa

SEQ ID NO: 398026 - RNA, 32 nt, Homo Sapiens
ggggccaggccagagaugggccaggcaggggg

SEQ ID NO: 398027 - RNA, 32 nt, Homo Sapiens
gugccuauauauacacaugcgucuauccauac

SEQ ID NO: 398028 - RNA, 29 nt, Homo Sapiens
uaaacagauaucuucaguuuaaugcaaga

SEQ ID NO: 398029 - RNA, 32 nt, Homo Sapiens
agaucagguccgaaaugcugcauugcugcagu

SEQ ID NO: 398030 - RNA, 32 nt, Homo Sapiens
cguccgggaggugaggggcgccucugcccagc

SEQ ID NO: 398031 - RNA, 32 nt, Homo Sapiens
guugucccacuuuuguucgccucucuucgguc

SEQ ID NO: 398032 - RNA, 32 nt, Homo Sapiens
auuugccauaucuauuuuuuuaaauuuccaua

SEQ ID NO: 398033 - RNA, 32 nt, Homo Sapiens
cagucucaaagcaaacaaaagaguauugaaga

SEQ ID NO: 398034 - RNA, 32 nt, Homo Sapiens
ggggaguacagcucucuggaacaugaggugag

SEQ ID NO: 398035 - RNA, 32 nt, Homo Sapiens
ugaggcagcuggaggagugggaguagcucaga

SEQ ID NO: 398036 - RNA, 32 nt, Homo Sapiens
cuaaauauuuagucuuuucaaguuuaccucaa

SEQ ID NO: 398037 - RNA, 32 nt, Homo Sapiens
gucuugugguguguggugggcagacaccacag

SEQ ID NO: 398038 - RNA, 32 nt, Homo Sapiens
ggucuggucuuacuuuuuaagcaggaagaaga

SEQ ID NO: 398039 - RNA, 32 nt, Homo Sapiens
uauugcccaagguuuuguuauugcuucucuuc

SEQ ID NO: 398040 - RNA, 32 nt, Homo Sapiens
uccagggauauuuggguuacuuuuaagaaagc

SEQ ID NO: 398041 - RNA, 32 nt, Homo Sapiens
ccccgccggcgugaagcgcccgaaaacuccgg

SEQ ID NO: 398042 - RNA, 32 nt, Homo Sapiens
ucuggagccaaagggaugcccuaucugaagga

SEQ ID NO: 398043 - RNA, 32 nt, Homo Sapiens
uauuuucacuaugugcuuccuguccccagagg

SEQ ID NO: 398044 - RNA, 32 nt, Homo Sapiens
cuguggacuauuauuacauauaucauuauuau

SEQ ID NO: 398045 - RNA, 32 nt, Homo Sapiens
ccaugggugggucuaacuggcuuuuguggaga

SEQ ID NO: 398046 - RNA, 32 nt, Homo Sapiens
uuuucaucacccccaguaaaaccccguacccu

SEQ ID NO: 398047 - RNA, 32 nt, Homo Sapiens
ccacccacccugcuccuccccaauugcuccca

SEQ ID NO: 398048 - RNA, 32 nt, Homo Sapiens
agguaaaaaguacauuuguauauuacauauau

SEQ ID NO: 398049 - RNA, 32 nt, Homo Sapiens
gggucgccggccugggcgcugucacgucgggg

SEQ ID NO: 398050 - RNA, 32 nt, Homo Sapiens
uccgguucucccugugcccauccaccgguuga

SEQ ID NO: 398051 - RNA, 32 nt, Homo Sapiens
guuaucaaaugagugccugaucaucaacucag

SEQ ID NO: 398052 - RNA, 32 nt, Homo Sapiens
ucugcgcguucccgggcccggaaccggcacac

SEQ ID NO: 398053 - RNA, 32 nt, Homo Sapiens
ggaaccccuucccacacuucuggccuuguuuc

SEQ ID NO: 398054 - RNA, 32 nt, Homo Sapiens
cugcugcccucccuuccuucuacuuaacucug

SEQ ID NO: 398055 - RNA, 32 nt, Homo Sapiens
aucuacuuaggaccccucuuugcccagacuac

SEQ ID NO: 398056 - RNA, 32 nt, Homo Sapiens
ccucgcuugagccuuugccugcgaacgaggua

SEQ ID NO: 398057 - RNA, 32 nt, Homo Sapiens
ucccaggaauggggagggggcauccuacccca

SEQ ID NO: 398058 - RNA, 32 nt, Homo Sapiens
cggccugagagaagaacaccggacccagggga

SEQ ID NO: 398059 - RNA, 32 nt, Homo Sapiens
acacgcauuauuuuuguuacuuugcuucuuuu

SEQ ID NO: 398060 - RNA, 32 nt, Homo Sapiens
acauuugaaaauaaaagaucauucuucaccca

SEQ ID NO: 398061 - RNA, 32 nt, Homo Sapiens
aucuuuuccuuccuuauuccuuccagucaggg

SEQ ID NO: 398062 - RNA, 32 nt, Homo Sapiens
gggcaugagagaauagaaaugugcuuuguaua

SEQ ID NO: 398063 - RNA, 32 nt, Homo Sapiens
uuuucuccaaauacaaaguauauucucuuuau

SEQ ID NO: 398064 - RNA, 30 nt, Homo Sapiens
cuugaagguaaaagacuggaacgaagcacu

SEQ ID NO: 398065 - RNA, 32 nt, Homo Sapiens
uuagcuggauauaauguauuuucagcucaauu

SEQ ID NO: 398066 - RNA, 32 nt, Homo Sapiens
cuuggcugccagcuccgcggcccgggcaaaag

SEQ ID NO: 398067 - RNA, 32 nt, Homo Sapiens
cugcacaaaaggaaaagauuuuuaccacuuuu

SEQ ID NO: 398068 - RNA, 32 nt, Homo Sapiens
cgggggcggccgcggcuuuggguccaggcggg

SEQ ID NO: 398069 - RNA, 32 nt, Homo Sapiens
gccaacgcggguggauugcuugagcccaggag

SEQ ID NO: 398070 - RNA, 32 nt, Homo Sapiens
gcaaccccaucccagaauccuauuuuccuggg

SEQ ID NO: 398071 - RNA, 32 nt, Homo Sapiens
uuggaaacugauguuacauuagguuccaauuc

SEQ ID NO: 398072 - RNA, 32 nt, Homo Sapiens
guauuucaagacugccuuuaugcuggaucaug

SEQ ID NO: 398073 - RNA, 32 nt, Homo Sapiens
ggagguggcagcugugggaggaggcggcgugg

SEQ ID NO: 398074 - RNA, 32 nt, Homo Sapiens
cuccagccaggccgcuuucuuugcggauggug

SEQ ID NO: 398075 - RNA, 32 nt, Homo Sapiens
cuugauggaauugguaauggcagauaggguuu

SEQ ID NO: 398076 - RNA, 32 nt, Homo Sapiens
aacgaaguguggaauuugggguuguccugugu

SEQ ID NO: 398077 - RNA, 32 nt, Homo Sapiens
acaguugucaauugaucuucaagcugcagggu

SEQ ID NO: 398078 - RNA, 32 nt, Homo Sapiens
gacuuaguuaaggauaguuaacuauuauacuc

SEQ ID NO: 398079 - RNA, 32 nt, Homo Sapiens
ucaugggauaaacagcugguauuuguaucuaa

SEQ ID NO: 398080 - RNA, 32 nt, Homo Sapiens
cggggagugacgacugcggcggcugggcgcgc

SEQ ID NO: 398081 - RNA, 32 nt, Homo Sapiens
gccucacuguucucgugaccuggaguuaaccg

SEQ ID NO: 398082 - RNA, 32 nt, Homo Sapiens
agagagaccacuuuucauaaccuagccuuaga

SEQ ID NO: 398083 - RNA, 32 nt, Homo Sapiens
aguguuacuuuuugguauuaagauuguaagaa

SEQ ID NO: 398084 - RNA, 32 nt, Homo Sapiens
cccaccugcccacaagcaaacacaccacacau

SEQ ID NO: 398085 - RNA, 32 nt, Homo Sapiens
cacaaaaauccagcagaaauugugaaaauccu

SEQ ID NO: 398086 - RNA, 32 nt, Homo Sapiens
cccaacuuuguuuggaggaagagacggagguu

SEQ ID NO: 398087 - RNA, 32 nt, Homo Sapiens
agcaacaaacuccucaugauaacugcacacaa

SEQ ID NO: 398088 - RNA, 32 nt, Homo Sapiens
cucuccgugccuuaagggaaaagcgggacagc

SEQ ID NO: 398089 - RNA, 32 nt, Homo Sapiens
gcgccacaguccccggcccucgcccagguuca

SEQ ID NO: 398090 - RNA, 32 nt, Homo Sapiens
aauagccccacucaaaaucaauuggauuaauu

SEQ ID NO: 398091 - RNA, 32 nt, Homo Sapiens
gcaaguaagccaacaaggucuuuucaggauga

SEQ ID NO: 398092 - RNA, 31 nt, Homo Sapiens
uauaaagugcaaacauuucgucccaaagucu

SEQ ID NO: 398093 - RNA, 32 nt, Homo Sapiens
gugcaguagcucacgccugaaaucucagcacu

SEQ ID NO: 398094 - RNA, 32 nt, Homo Sapiens
uaaaugugcuuccaugagacuggcuugagaag

SEQ ID NO: 398095 - RNA, 32 nt, Homo Sapiens
caauaaaugauucucccauucaauguuuaccc

SEQ ID NO: 398096 - RNA, 32 nt, Homo Sapiens
uuucagugcugaauuuuuagacuguaaaugag

SEQ ID NO: 398097 - RNA, 32 nt, Homo Sapiens
cggcgaaggugauaguagucgguuggagcgag

SEQ ID NO: 398098 - RNA, 32 nt, Homo Sapiens
uccuccauguguuccuggaggaccgucccaag

SEQ ID NO: 398099 - RNA, 32 nt, Homo Sapiens
gaaguccuuggauauuugauauuuaccugacc

SEQ ID NO: 398100 - RNA, 32 nt, Homo Sapiens
cuuacuaaaauauauauagaaauauauacgaa

SEQ ID NO: 398101 - RNA, 32 nt, Homo Sapiens
ccuggagcccauaccucaccccugccugguga

SEQ ID NO: 398102 - RNA, 32 nt, Homo Sapiens
cagggaaauauuaaaacugcaagggaaagcaa

SEQ ID NO: 398103 - RNA, 28 nt, Homo Sapiens
aacuccccggggccgccggguugacugc

SEQ ID NO: 398104 - RNA, 32 nt, Homo Sapiens
gagagggaagcagccgugcugucaacaucauc

SEQ ID NO: 398105 - RNA, 32 nt, Homo Sapiens
cguuauguguguauauguauguguguaugggu

SEQ ID NO: 398106 - RNA, 32 nt, Homo Sapiens
gaagagaaauuugauauuuagcaacauuuuug

SEQ ID NO: 398107 - RNA, 32 nt, Homo Sapiens
acauccagugauuguuuugguuucuguucccu

SEQ ID NO: 398108 - RNA, 32 nt, Homo Sapiens
gugaaacauuuuaaacugcagaaauugugguu

SEQ ID NO: 398109 - RNA, 32 nt, Homo Sapiens
uccaggcugcugucacugcauccaggacucug

SEQ ID NO: 398110 - RNA, 32 nt, Homo Sapiens
aucccaggaagcuuuccagugaucuccuacca

SEQ ID NO: 398111 - RNA, 32 nt, Homo Sapiens
gccauucagagguggggucuggggccuggggg

SEQ ID NO: 398112 - RNA, 32 nt, Homo Sapiens
aaaacagguggaagagggaaggguccaauuag

SEQ ID NO: 398113 - RNA, 32 nt, Homo Sapiens
aaauguugacccuauccuguuauuuaaaugug

SEQ ID NO: 398114 - RNA, 32 nt, Homo Sapiens
aaaauuuuacuuugcuuuuaacauuuccuugg

SEQ ID NO: 398115 - RNA, 32 nt, Homo Sapiens
ucccgguguacaaagcacugcugaguucuuau

SEQ ID NO: 398116 - RNA, 32 nt, Homo Sapiens
caggaggggucucauguccugcuggcuuccag

SEQ ID NO: 398117 - RNA, 32 nt, Homo Sapiens
caguucucugucaucguuuaacaaaaccaaca

SEQ ID NO: 398118 - RNA, 32 nt, Homo Sapiens
gcuugaucccuggcugaaucaccuggaugacu

SEQ ID NO: 398119 - RNA, 32 nt, Homo Sapiens
guugcagggcuggccugggcugugggaggcag

SEQ ID NO: 398120 - RNA, 32 nt, Homo Sapiens
ggaucagaauccaggguuuucguuguuuuuaa

SEQ ID NO: 398121 - RNA, 32 nt, Homo Sapiens
ccucaagcuaccagucucuccucuuccgcgua

SEQ ID NO: 398122 - RNA, 32 nt, Homo Sapiens
ugugggcugcugagggggcaagagggauagac

SEQ ID NO: 398123 - RNA, 32 nt, Homo Sapiens
guccaaaccucagaacugacccgccccucccu

SEQ ID NO: 398124 - RNA, 32 nt, Homo Sapiens
auaaaaaucuggaagcaaagaauggggauggg

SEQ ID NO: 398125 - RNA, 32 nt, Homo Sapiens
agaggaaaugucacaggggcuaugaugcaaga

SEQ ID NO: 398126 - RNA, 32 nt, Homo Sapiens
cacagcaggaggacugacaggggccugaugga

SEQ ID NO: 398127 - RNA, 32 nt, Homo Sapiens
uugcuuuuuuccuuuuucuuaccuaucaaaua

SEQ ID NO: 398128 - RNA, 31 nt, Homo Sapiens
gauucucagcuaggaaaguccacacugaacu

SEQ ID NO: 398129 - RNA, 32 nt, Homo Sapiens
cgcggagcugaagagggaggaaggggcggcug

SEQ ID NO: 398130 - RNA, 32 nt, Homo Sapiens
cguuucucuuucuccuucucuuucccuugagg

SEQ ID NO: 398131 - RNA, 32 nt, Homo Sapiens
cugcagcccgcaccuugucacugcugggccaa

SEQ ID NO: 398132 - RNA, 32 nt, Homo Sapiens
guaaagucacaagguucauuuaucuuucugaa

SEQ ID NO: 398133 - RNA, 32 nt, Homo Sapiens
ugaccgagaagcuugcuggcagugcgcugaug

SEQ ID NO: 398134 - RNA, 32 nt, Homo Sapiens
gggcgccggagaccgagggccuggcggccgaa

SEQ ID NO: 398135 - RNA, 32 nt, Homo Sapiens
gagugggcucuggaagcagagagaugccaggg

SEQ ID NO: 398136 - RNA, 32 nt, Homo Sapiens
aguggcuggcaggggggcccaggcccgggacg

SEQ ID NO: 398137 - RNA, 32 nt, Homo Sapiens
auaacugaaaauaaucugguuuaucauaagua

SEQ ID NO: 398138 - RNA, 32 nt, Homo Sapiens
ggccugcacgcgaaugggucagagccagaccc

SEQ ID NO: 398139 - RNA, 32 nt, Homo Sapiens
uucauuuuugggccuuaaccauuugaaauguu

SEQ ID NO: 398140 - RNA, 32 nt, Homo Sapiens
ugcccaggaaagggaugcauugacacucuccu

SEQ ID NO: 398141 - RNA, 32 nt, Homo Sapiens
ugaacuugcacagauaaugcacguuuucuggu

SEQ ID NO: 398142 - RNA, 32 nt, Homo Sapiens
ucacugguaagaguccagugggguccccugau

SEQ ID NO: 398143 - RNA, 32 nt, Homo Sapiens
aaguagacagcccuguucuuugguaacuggga

SEQ ID NO: 398144 - RNA, 32 nt, Homo Sapiens
uuacuauguccuagcucuguccugcuaccuaa

SEQ ID NO: 398145 - RNA, 32 nt, Homo Sapiens
cucuaucauuuuuuguauaccugcuauggugu

SEQ ID NO: 398146 - RNA, 32 nt, Homo Sapiens
cacggaucucgaaggcgccuucuccuccuggg

SEQ ID NO: 398147 - RNA, 31 nt, Homo Sapiens
cacgggaacauauugaaguugaggaaaaaag

SEQ ID NO: 398148 - RNA, 32 nt, Homo Sapiens
auugagucuggugagggaaaggggagacagag

SEQ ID NO: 398149 - RNA, 32 nt, Homo Sapiens
aggggacucacagacugcagaugcacgcugcg

SEQ ID NO: 398150 - RNA, 32 nt, Homo Sapiens
uuaauguacagcauaggugguaauggauguaa

SEQ ID NO: 398151 - RNA, 32 nt, Homo Sapiens
ugcggacaagccugggucugcugugugcggag

SEQ ID NO: 398152 - RNA, 32 nt, Homo Sapiens
cugacugcacuggccuggcagucuggcugcug

SEQ ID NO: 398153 - RNA, 32 nt, Homo Sapiens
aguugccuucagaucauuaacacaucauuaua

SEQ ID NO: 398154 - RNA, 32 nt, Homo Sapiens
gugagaauucagauguaauuuuuuaccuuguu

SEQ ID NO: 398155 - RNA, 32 nt, Homo Sapiens
agggauagguccuugggucaaaaguuguaaau

SEQ ID NO: 398156 - RNA, 32 nt, Homo Sapiens
augaaauagaugauuucuuuuuaaauauauaa

SEQ ID NO: 398157 - RNA, 32 nt, Homo Sapiens
aaaggaaauuuaaauuugauacauaugcuuug

SEQ ID NO: 398158 - RNA, 32 nt, Homo Sapiens
uuguacggaaugcagagcuguuguauccugau

SEQ ID NO: 398159 - RNA, 32 nt, Homo Sapiens
gcuuccagccccaccuuccaaccccucagugc

SEQ ID NO: 398160 - RNA, 32 nt, Homo Sapiens
cacauauauguauauauacauauauauguaua

SEQ ID NO: 398161 - RNA, 32 nt, Homo Sapiens
gcggggucguaucggcguggacauggcuggcc

SEQ ID NO: 398162 - RNA, 32 nt, Homo Sapiens
accacuguacacaaaucuaaucaauaaaaacg

SEQ ID NO: 398163 - RNA, 32 nt, Homo Sapiens
uaccugcagucaacugcaguucaaaaauauua

SEQ ID NO: 398164 - RNA, 32 nt, Homo Sapiens
cgagccgccgcggagccuccucgcccgcuccc

SEQ ID NO: 398165 - RNA, 32 nt, Homo Sapiens
guuaagcaacuuuugaaaauuuucuauuuuga

SEQ ID NO: 398166 - RNA, 32 nt, Homo Sapiens
aaauuuuaacugugucaagucagcuuagugga

SEQ ID NO: 398167 - RNA, 32 nt, Homo Sapiens
ggcugccggagccagcagcggcaacccguucg

SEQ ID NO: 398168 - RNA, 32 nt, Homo Sapiens
uuguguacaauuuuugaauaagugcaucauca

SEQ ID NO: 398169 - RNA, 32 nt, Homo Sapiens
ccagagcccagagaccccggagaugagugaug

SEQ ID NO: 398170 - RNA, 32 nt, Homo Sapiens
guucuuaucccaugggaagcaguugguuacac

SEQ ID NO: 398171 - RNA, 32 nt, Homo Sapiens
auuaacacugcuuuuccagaacauuuucagau

SEQ ID NO: 398172 - RNA, 32 nt, Homo Sapiens
auauuugaugaaauucuacugcagguguuucc

SEQ ID NO: 398173 - RNA, 32 nt, Homo Sapiens
cauuacuaccagaacuguggugccaaauugcu

SEQ ID NO: 398174 - RNA, 32 nt, Homo Sapiens
gcuccggcggccucggcgcgcgaggggcugga

SEQ ID NO: 398175 - RNA, 32 nt, Homo Sapiens
ugacucacccugaggagucuccagggauggag

SEQ ID NO: 398176 - RNA, 32 nt, Homo Sapiens
uuuaucaccuccuuaucaacccuaucuaucuc

SEQ ID NO: 398177 - RNA, 32 nt, Homo Sapiens
ccgcgccggaggagggcggggagaggaccaug

SEQ ID NO: 398178 - RNA, 32 nt, Homo Sapiens
uuucggaaugucuggaacauuucauuuccugu

SEQ ID NO: 398179 - RNA, 32 nt, Homo Sapiens
cucuauuguaaaacaugucaauggugugugaa

SEQ ID NO: 398180 - RNA, 32 nt, Homo Sapiens
gcuguagauaccacccaccucugagucauuua

SEQ ID NO: 398181 - RNA, 32 nt, Homo Sapiens
cccgccugcucgccgcaccugggacgcggcag

SEQ ID NO: 398182 - RNA, 32 nt, Homo Sapiens
uuaaaccaaaaauaaaacuuuucauguauuac

SEQ ID NO: 398183 - RNA, 32 nt, Homo Sapiens
auaaauaguaaccuaaaguucuugcugugcuu

SEQ ID NO: 398184 - RNA, 32 nt, Homo Sapiens
ugcacauauuccaggaaagugucuuuaaaaac

SEQ ID NO: 398185 - RNA, 32 nt, Homo Sapiens
ugggggcagcggggccuggcgggaugggccac

SEQ ID NO: 398186 - RNA, 32 nt, Homo Sapiens
uagaaagcagucugcuuugaggaggcgagaag

SEQ ID NO: 398187 - RNA, 32 nt, Homo Sapiens
ggaagcucauuuccagaagauccuuaaaauga

SEQ ID NO: 398188 - RNA, 30 nt, Homo Sapiens
cucguggugugagugccagaagcugccucc

SEQ ID NO: 398189 - RNA, 32 nt, Homo Sapiens
cccucagguuuaagaauuguuuaagcugcauc

SEQ ID NO: 398190 - RNA, 32 nt, Homo Sapiens
gaaggagaacggaugcuugucuggccaugauc

SEQ ID NO: 398191 - RNA, 32 nt, Homo Sapiens
ccuccugaguagcugggacuacaguuucgugu

SEQ ID NO: 398192 - RNA, 32 nt, Homo Sapiens
ucuugcccuuuccagcagcugcagcugccguu

SEQ ID NO: 398193 - RNA, 32 nt, Homo Sapiens
ugaaggcgucgaggugugggggcacuuggaca

SEQ ID NO: 398194 - RNA, 32 nt, Homo Sapiens
acugcaaaugacuauucaagagcuuuuggaua

SEQ ID NO: 398195 - RNA, 32 nt, Homo Sapiens
guguguucgacagugaauauucaaucugguac

SEQ ID NO: 398196 - RNA, 32 nt, Homo Sapiens
acacgaaaucaucauauugcauaaaaccuuaa

SEQ ID NO: 398197 - RNA, 32 nt, Homo Sapiens
ggucuguuaugcccggccuauguccagggugg

SEQ ID NO: 398198 - RNA, 32 nt, Homo Sapiens
gagaauuacaagucacauuaguaagaagagaa

SEQ ID NO: 398199 - RNA, 32 nt, Homo Sapiens
cccagcacuugcggccgcucagcccuccaacc

SEQ ID NO: 398200 - RNA, 32 nt, Homo Sapiens
ucaacuacauggaaacugaacaaccugcuccu

SEQ ID NO: 398201 - RNA, 32 nt, Homo Sapiens
aggcaacgcuggccccacgacggagugccagg

SEQ ID NO: 398202 - RNA, 32 nt, Homo Sapiens
ccugcuccccccacccccgcaugcgucugucc

SEQ ID NO: 398203 - RNA, 30 nt, Homo Sapiens
caggagagcaagagugaugaguccgcugca

SEQ ID NO: 398204 - RNA, 32 nt, Homo Sapiens
ucucugagugucacguuccucaccugugaaau

SEQ ID NO: 398205 - RNA, 32 nt, Homo Sapiens
ggcugauuuuugguaguccauugaagaagaga

SEQ ID NO: 398206 - RNA, 30 nt, Homo Sapiens
augguuccccccgugcccuugcagccauug

SEQ ID NO: 398207 - RNA, 27 nt, Homo Sapiens
uucauuacuauuuucugguauugaggc

SEQ ID NO: 398208 - RNA, 32 nt, Homo Sapiens
uuuaaauuuccuauaccuucugaugggaguau

SEQ ID NO: 398209 - RNA, 32 nt, Homo Sapiens
ugacuuuguuuuuauaaguuauuaaaugugaa

SEQ ID NO: 398210 - RNA, 32 nt, Homo Sapiens
aaggggcuaccaugauccuuuccuccuauaac

SEQ ID NO: 398211 - RNA, 32 nt, Homo Sapiens
guagaugccacuagcccuccucucccagugac

SEQ ID NO: 398212 - RNA, 32 nt, Homo Sapiens
ccaucugcaagcccagaagagaggccucggaa

SEQ ID NO: 398213 - RNA, 32 nt, Homo Sapiens
aaccaaaucuggaagccaaaauguaggcuuag

SEQ ID NO: 398214 - RNA, 32 nt, Homo Sapiens
aggcaucaugcaaggucacacagcuauaagug

SEQ ID NO: 398215 - RNA, 32 nt, Homo Sapiens
aaagagaugacuuucgugaaaacuuuugcugg

SEQ ID NO: 398216 - RNA, 32 nt, Homo Sapiens
gacucugcccagaggggcagccaggcugcuca

SEQ ID NO: 398217 - RNA, 32 nt, Homo Sapiens
ggcgcuauucuuaggacuucugcaacuuuuaa

SEQ ID NO: 398218 - RNA, 32 nt, Homo Sapiens
guaccuauauaaggauaaaggcauguguauag

SEQ ID NO: 398219 - RNA, 30 nt, Homo Sapiens
ccagcgacgcucgugggggaaacauacuaa

SEQ ID NO: 398220 - RNA, 32 nt, Homo Sapiens
ugaacagcacuggcccaccucccacucacagc

SEQ ID NO: 398221 - RNA, 32 nt, Homo Sapiens
gccugcugccagcggggcagccccucauagga

SEQ ID NO: 398222 - RNA, 32 nt, Homo Sapiens
cauacuguauuguuauuaaaauugaugaaaug

SEQ ID NO: 398223 - RNA, 31 nt, Homo Sapiens
acccacucauccucagcuugcacaaacuggu

SEQ ID NO: 398224 - RNA, 32 nt, Homo Sapiens
augcagaauaccagcuaaaaaauaggcaauaa

SEQ ID NO: 398225 - RNA, 31 nt, Homo Sapiens
accagaccagucaccaccuggacacuuucuu

SEQ ID NO: 398226 - RNA, 32 nt, Homo Sapiens
auacacaaaaauaccaauaugauguguacagg

SEQ ID NO: 398227 - RNA, 32 nt, Homo Sapiens
gcuugcaggaggaggcccagcagcugcgggau

SEQ ID NO: 398228 - RNA, 32 nt, Homo Sapiens
ggaucacacacauggaaggugaugggggcaug

SEQ ID NO: 398229 - RNA, 32 nt, Homo Sapiens
aagcaaaaacaaaaaacaaaacaauucauuag

SEQ ID NO: 398230 - RNA, 32 nt, Homo Sapiens
aaguuugauuuuguguugcaguaucucaacaa

SEQ ID NO: 398231 - RNA, 32 nt, Homo Sapiens
acucagugccaugcagaagccuuuuuuuuaag

SEQ ID NO: 398232 - RNA, 32 nt, Homo Sapiens
uuugauaauacggaauuaauuaauaugaauga

SEQ ID NO: 398233 - RNA, 32 nt, Homo Sapiens
ucagggcucuggagggggaggggagaaggugu

SEQ ID NO: 398234 - RNA, 32 nt, Homo Sapiens
cuugucuccccuuuuccaauaaacuugggacc

SEQ ID NO: 398235 - RNA, 32 nt, Homo Sapiens
agcccgccugacggagccccagcuuaguggag

SEQ ID NO: 398236 - RNA, 32 nt, Homo Sapiens
ccaccauccuaugcagcuuucccuuuauuacu

SEQ ID NO: 398237 - RNA, 32 nt, Homo Sapiens
aauuucauuauguuuuagaaucaucacugccu

SEQ ID NO: 398238 - RNA, 30 nt, Homo Sapiens
augaggggcaggcgaggcagggccgccccu

SEQ ID NO: 398239 - RNA, 32 nt, Homo Sapiens
gauucagaauccuggggggcuuuugaccccua

SEQ ID NO: 398240 - RNA, 32 nt, Homo Sapiens
ucggugauaaaacacacccucucuggugagcc

SEQ ID NO: 398241 - RNA, 32 nt, Homo Sapiens
aaauguagcauuuuauacuuucaaguguuaua

SEQ ID NO: 398242 - RNA, 32 nt, Homo Sapiens
ugcggaacccgcgggaggaugugcacagaggg

SEQ ID NO: 398243 - RNA, 32 nt, Homo Sapiens
gugucugcguccagcgcgcccgggcugagcug

SEQ ID NO: 398244 - RNA, 32 nt, Homo Sapiens
cucccugcucccuguggacaaaagcacauaau

SEQ ID NO: 398245 - RNA, 31 nt, Homo Sapiens
ugcgguaggcccuuugcaggagucagguccc

SEQ ID NO: 398246 - RNA, 32 nt, Homo Sapiens
uugcugagagccgucuccugugccucccccgc

SEQ ID NO: 398247 - RNA, 32 nt, Homo Sapiens
gagacccugcaaacagaacagggucauguuug

SEQ ID NO: 398248 - RNA, 32 nt, Homo Sapiens
augagaaaaacaugcauauuaauuccaucuga

SEQ ID NO: 398249 - RNA, 32 nt, Homo Sapiens
uuaacuuuuuggaguugugaaauggaaugggu

SEQ ID NO: 398250 - RNA, 31 nt, Homo Sapiens
gcccaggcgggcccccuggaauugaugggua

SEQ ID NO: 398251 - RNA, 32 nt, Homo Sapiens
cuggaggcacugggcccugggaacuggcaccc

SEQ ID NO: 398252 - RNA, 32 nt, Homo Sapiens
auacaacaggcaguggaagcaguuucagagaa

SEQ ID NO: 398253 - RNA, 32 nt, Homo Sapiens
ucugagugaagacgauccucucgucucggccu

SEQ ID NO: 398254 - RNA, 32 nt, Homo Sapiens
cgcuuuccggccccgacgcgccgcccaacggg

SEQ ID NO: 398255 - RNA, 28 nt, Homo Sapiens
gcgaagaaucgauaacauuucaagaagu

SEQ ID NO: 398256 - RNA, 32 nt, Homo Sapiens
ucugguguuuuaagauguuauuuuauuggaac

SEQ ID NO: 398257 - RNA, 32 nt, Homo Sapiens
cuacaugccugccuaagaugaccugguauacu

SEQ ID NO: 398258 - RNA, 32 nt, Homo Sapiens
guguuccuuauaagagaagauagggcgggcau

SEQ ID NO: 398259 - RNA, 32 nt, Homo Sapiens
uacugcagacauuuccgaagaguuuauaaagc

SEQ ID NO: 398260 - RNA, 32 nt, Homo Sapiens
ucuugccagcaaggugagauuauggaauccag

SEQ ID NO: 398261 - RNA, 32 nt, Homo Sapiens
caccaaagggaagagugauaacaaggcuccac

SEQ ID NO: 398262 - RNA, 29 nt, Homo Sapiens
gucauguaaauaauugauuuucuaguuca

SEQ ID NO: 398263 - RNA, 32 nt, Homo Sapiens
agugcaggagaguagaaacaaaaggaaaauaa

SEQ ID NO: 398264 - RNA, 32 nt, Homo Sapiens
aggucugagagguagguaugaggaugcuaggg

SEQ ID NO: 398265 - RNA, 32 nt, Homo Sapiens
acuggcccgcggcucccuccgacccugcuccc

SEQ ID NO: 398266 - RNA, 32 nt, Homo Sapiens
uuuaaaaaaacaaaacaaaacaaaacaaaaca

SEQ ID NO: 398267 - RNA, 32 nt, Homo Sapiens
aaauuguguacuuccuccauguuuaucucucu

SEQ ID NO: 398268 - RNA, 32 nt, Homo Sapiens
guauuucaaaacauguuauacaugauaaacau

SEQ ID NO: 398269 - RNA, 32 nt, Homo Sapiens
aacaaauugaguuuagaagugaguguaaucca

SEQ ID NO: 398270 - RNA, 31 nt, Homo Sapiens
aggggaugccauucaaucagagccugggccu

SEQ ID NO: 398271 - RNA, 32 nt, Homo Sapiens
guaggguuaguagguagggcuaguagguaggg

SEQ ID NO: 398272 - RNA, 32 nt, Homo Sapiens
accaauuuccauagucucaugaggccgaaaug

SEQ ID NO: 398273 - RNA, 32 nt, Homo Sapiens
auuucagagcagcccauuuuccucuggauuca

SEQ ID NO: 398274 - RNA, 32 nt, Homo Sapiens
ggcucccggcccgggaggcggcgguggaugcg

SEQ ID NO: 398275 - RNA, 32 nt, Homo Sapiens
aucagaucaaccauauuaauagcaauuaaaag

SEQ ID NO: 398276 - RNA, 32 nt, Homo Sapiens
uaaauggguauauacagccugaacucaggagg

SEQ ID NO: 398277 - RNA, 32 nt, Homo Sapiens
acaaugaggagcuggggccuccucaauuugca

SEQ ID NO: 398278 - RNA, 32 nt, Homo Sapiens
cgcuccccgcagccaccgccacccauuggaau

SEQ ID NO: 398279 - RNA, 32 nt, Homo Sapiens
aaggaagcagagauggacggugaggcaguccg

SEQ ID NO: 398280 - RNA, 32 nt, Homo Sapiens
cagauacacaucaaaaucauaauaauauuuuc

SEQ ID NO: 398281 - RNA, 32 nt, Homo Sapiens
acuaguauagacucaaauuugcuauuuaauuu

SEQ ID NO: 398282 - RNA, 32 nt, Homo Sapiens
aaggauccuucuuaaggucuuaucucaagagc

SEQ ID NO: 398283 - RNA, 32 nt, Homo Sapiens
caagaaaauuagcuccucccucguucuccacc

SEQ ID NO: 398284 - RNA, 32 nt, Homo Sapiens
cuaggggccaagggaaaugcuguuggugagaa

SEQ ID NO: 398285 - RNA, 32 nt, Homo Sapiens
ggaacccggaacugaccccccagagcccaagu

SEQ ID NO: 398286 - RNA, 32 nt, Homo Sapiens
aagugucccuuucccuccuaccucuggggucu

SEQ ID NO: 398287 - RNA, 32 nt, Homo Sapiens
gcugaugcuggaagaggagggcagucaguguc

SEQ ID NO: 398288 - RNA, 32 nt, Homo Sapiens
gggccugggcggugcagcggcggcgggagggu

SEQ ID NO: 398289 - RNA, 32 nt, Homo Sapiens
gggcauaugucacuaacagaaggucuccaaag

SEQ ID NO: 398290 - RNA, 32 nt, Homo Sapiens
cugccaggagaugcaacagucguuuugaaacc

SEQ ID NO: 398291 - RNA, 32 nt, Homo Sapiens
auuucccuuccacuccuccuuucuggagucug

SEQ ID NO: 398292 - RNA, 32 nt, Homo Sapiens
ggcuaccuggaaacauguucuccauuggcugu

SEQ ID NO: 398293 - RNA, 32 nt, Homo Sapiens
guuguuuuucuuuauaugcuucuaaacauugg

SEQ ID NO: 398294 - RNA, 32 nt, Homo Sapiens
cuugugcagaaagaagccauagcaagaaagga

SEQ ID NO: 398295 - RNA, 32 nt, Homo Sapiens
ucaguucuugccacuuuuuuuuuuaaucucca

SEQ ID NO: 398296 - RNA, 32 nt, Homo Sapiens
ccccgggucuuuaucauucaguuuguucugug

SEQ ID NO: 398297 - RNA, 32 nt, Homo Sapiens
guagaggucacuucuucccagcccugccucaa

SEQ ID NO: 398298 - RNA, 32 nt, Homo Sapiens
gggugucucagguucuguguguccuugugugc

SEQ ID NO: 398299 - RNA, 32 nt, Homo Sapiens
aacucagaggccggugcagguccuuggugugc

SEQ ID NO: 398300 - RNA, 32 nt, Homo Sapiens
uuuuccuuaaggaugcugaacauaugugcuua

SEQ ID NO: 398301 - RNA, 32 nt, Homo Sapiens
aaugcuuucuuacuuguuuugugaccuaauuu

SEQ ID NO: 398302 - RNA, 32 nt, Homo Sapiens
cuuuuugaaguaauugugaccacaaaacaucu

SEQ ID NO: 398303 - RNA, 32 nt, Homo Sapiens
ggggcgcucccagccccaccccgggaucuggu

SEQ ID NO: 398304 - RNA, 32 nt, Homo Sapiens
gauaguaacugcacuuaguauuucauagcacu

SEQ ID NO: 398305 - RNA, 32 nt, Homo Sapiens
ucaacacacucuaugaaauauauuccuuugua

SEQ ID NO: 398306 - RNA, 32 nt, Homo Sapiens
agaagcaggaguccccagagccaggcaggggg

SEQ ID NO: 398307 - RNA, 32 nt, Homo Sapiens
acccugcuugcuugcuugcuugcuugcuuacu

SEQ ID NO: 398308 - RNA, 32 nt, Homo Sapiens
ggccggacgacggggcgucgagacaagaagaa

SEQ ID NO: 398309 - RNA, 32 nt, Homo Sapiens
uguccgagcaucacguguggcuccagcccuua

SEQ ID NO: 398310 - RNA, 32 nt, Homo Sapiens
aaaguauaauaaauaugcagcccaguuaaaua

SEQ ID NO: 398311 - RNA, 32 nt, Homo Sapiens
uagucaccuguuguauucuggaucuacacaaa

SEQ ID NO: 398312 - RNA, 32 nt, Homo Sapiens
gaugguagacauugggaccugggggaccucag

SEQ ID NO: 398313 - RNA, 32 nt, Homo Sapiens
caagccagcggggcgaggcggcugggcccugc

SEQ ID NO: 398314 - RNA, 32 nt, Homo Sapiens
augcuuagauuaucuuacugguucaacauuuu

SEQ ID NO: 398315 - RNA, 32 nt, Homo Sapiens
ggguaaagagagaucagccucuguggacucgg

SEQ ID NO: 398316 - RNA, 32 nt, Homo Sapiens
uucaauccaccgaaguguucacugucaucugu

SEQ ID NO: 398317 - RNA, 32 nt, Homo Sapiens
cagguguagagcuggagggggucccuggcugc

SEQ ID NO: 398318 - RNA, 32 nt, Homo Sapiens
ccccucugcccucucccuuccccucccuccuc

SEQ ID NO: 398319 - RNA, 32 nt, Homo Sapiens
uguccacaagacagaagcugaagugcauccaa

SEQ ID NO: 398320 - RNA, 32 nt, Homo Sapiens
aaugaagaccuuuauucaccccugccccguug

SEQ ID NO: 398321 - RNA, 32 nt, Homo Sapiens
aggcugggucugggugcuuggcggcggcggcu

SEQ ID NO: 398322 - RNA, 27 nt, Homo Sapiens
gacagcuguuaauucuggggcuaguga

SEQ ID NO: 398323 - RNA, 32 nt, Homo Sapiens
ucagccccgccuucaaccccgccccguccugc

SEQ ID NO: 398324 - RNA, 32 nt, Homo Sapiens
uggagggccaggccgccucugacgaggaggag

SEQ ID NO: 398325 - RNA, 32 nt, Homo Sapiens
gauggauaaggaugagucuuggaguugcgggc

SEQ ID NO: 398326 - RNA, 32 nt, Homo Sapiens
uuuauugagagaauuuaguuauauuuuaaauc

SEQ ID NO: 398327 - RNA, 32 nt, Homo Sapiens
ccagcgcucccaggccccgccacgcgucgccg

SEQ ID NO: 398328 - RNA, 32 nt, Homo Sapiens
ggaagugcauauaaaauagaguauuuauacaa

SEQ ID NO: 398329 - RNA, 32 nt, Homo Sapiens
ugguugggauggggcgggcaggcggcccacaa

SEQ ID NO: 398330 - RNA, 32 nt, Homo Sapiens
agagauuuaagugaucuucauaagcaagauca

SEQ ID NO: 398331 - RNA, 32 nt, Homo Sapiens
acugcaagcucugccucccgggcucacgccau

SEQ ID NO: 398332 - RNA, 32 nt, Homo Sapiens
acuuccacugaauacacuagaaaauacagaac

SEQ ID NO: 398333 - RNA, 31 nt, Homo Sapiens
cugucucaugguaauuacugggccuggccuc

SEQ ID NO: 398334 - RNA, 32 nt, Homo Sapiens
uugagaaggaucagagcaaaacaucaauuaug

SEQ ID NO: 398335 - RNA, 32 nt, Homo Sapiens
uaaugucaauguuuuguuuucuuauaauuaaa

SEQ ID NO: 398336 - RNA, 32 nt, Homo Sapiens
agaaguccaaacuuuuuuuuuauuacuagcuu

SEQ ID NO: 398337 - RNA, 32 nt, Homo Sapiens
aagcuauuugaacaaagcaaauuaaaacgaua

SEQ ID NO: 398338 - RNA, 32 nt, Homo Sapiens
ccaaacccgcgguggcucugccgccuguuccu

SEQ ID NO: 398339 - RNA, 32 nt, Homo Sapiens
ccacaggugaugucugucuccauccuucccuc

SEQ ID NO: 398340 - RNA, 32 nt, Homo Sapiens
aagcaaaggcagaaacggcaucaggagagaca

SEQ ID NO: 398341 - RNA, 32 nt, Homo Sapiens
gucccauuuucuugaaaaaaugaugaaguuug

SEQ ID NO: 398342 - RNA, 31 nt, Homo Sapiens
aggcgaccgcgggcgcugccaagggcugcgg

SEQ ID NO: 398343 - RNA, 32 nt, Homo Sapiens
agacuaaggcaccuaacuuaugugagugucag

SEQ ID NO: 398344 - RNA, 32 nt, Homo Sapiens
cccgcugccguucgcgaacccuagcagaggac

SEQ ID NO: 398345 - RNA, 32 nt, Homo Sapiens
cgcagcuuguucgagccacgugugccaagcag

SEQ ID NO: 398346 - RNA, 32 nt, Homo Sapiens
uuauuaaaacaauuucuucucuaauguaaaaa

SEQ ID NO: 398347 - RNA, 32 nt, Homo Sapiens
ccuaauuagcuacuuuaagauccuaggauugg

SEQ ID NO: 398348 - RNA, 32 nt, Homo Sapiens
ggagcugauccuaaggguuguuuuccagugau

SEQ ID NO: 398349 - RNA, 32 nt, Homo Sapiens
auaaacagacaaaaacaaguaaauauauaugg

SEQ ID NO: 398350 - RNA, 31 nt, Homo Sapiens
agagaaggcaaguuggcaggaguggagacca

SEQ ID NO: 398351 - RNA, 32 nt, Homo Sapiens
cgaaucccagcugcggggaggcugguugagga

SEQ ID NO: 398352 - RNA, 32 nt, Homo Sapiens
agccuaggucagccaacccccauccaacccuu

SEQ ID NO: 398353 - RNA, 32 nt, Homo Sapiens
cugccuuucucccccaacccaaggcugaccug

SEQ ID NO: 398354 - RNA, 32 nt, Homo Sapiens
cagcgccgccccaucccccagugguccucaug

SEQ ID NO: 398355 - RNA, 32 nt, Homo Sapiens
ccugacuggauggaggcccaccagcuucuguu

SEQ ID NO: 398356 - RNA, 32 nt, Homo Sapiens
gacacacacacauaugcacacacacacacaca

SEQ ID NO: 398357 - RNA, 32 nt, Homo Sapiens
agggcaaacaauuuccaaacuuuucauuuugu

SEQ ID NO: 398358 - RNA, 32 nt, Homo Sapiens
aaacagaucacaggagucaaagggccuugcuc

SEQ ID NO: 398359 - RNA, 32 nt, Homo Sapiens
uuuguauauuuauuaugacaauuucuggcaga

SEQ ID NO: 398360 - RNA, 32 nt, Homo Sapiens
ugugcagccccucuccucucuguccccugaca

SEQ ID NO: 398361 - RNA, 32 nt, Homo Sapiens
agagcaaacaaaugcauaagcaagacugagca

SEQ ID NO: 398362 - RNA, 32 nt, Homo Sapiens
aggcuggggcugucugcagugcgaccccuugg

SEQ ID NO: 398363 - RNA, 32 nt, Homo Sapiens
uaaguuuccugaggccuccccagccauguuga

SEQ ID NO: 398364 - RNA, 32 nt, Homo Sapiens
gccggucuggugccggcggucaccccugcugc

SEQ ID NO: 398365 - RNA, 32 nt, Homo Sapiens
aaauuauagagaaaauaaacauaaucuauacu

SEQ ID NO: 398366 - RNA, 32 nt, Homo Sapiens
ggugacagagcgagacuaucucagaaacaaaa

SEQ ID NO: 398367 - RNA, 32 nt, Homo Sapiens
ggaacggguagucuguccucuuccccauaaaa

SEQ ID NO: 398368 - RNA, 32 nt, Homo Sapiens
accuugugucccagcccugcccuucuucccac

SEQ ID NO: 398369 - RNA, 32 nt, Homo Sapiens
cuucucaccaaaaccagguuaucugcuucugu

SEQ ID NO: 398370 - RNA, 32 nt, Homo Sapiens
cacagaacgggcccgacguguacguccugcca

SEQ ID NO: 398371 - RNA, 32 nt, Homo Sapiens
gccaggaggaggagcucaggcgguaaugcuca

SEQ ID NO: 398372 - RNA, 32 nt, Homo Sapiens
acuuggauucagaaauacaauuuauauuucuu

SEQ ID NO: 398373 - RNA, 32 nt, Homo Sapiens
uacaaggucuaagagggaaaagcaguuugcuc

SEQ ID NO: 398374 - RNA, 32 nt, Homo Sapiens
agaaaccuggccuuauaucauuucauauaaaa

SEQ ID NO: 398375 - RNA, 32 nt, Homo Sapiens
gggcuggagagccggcaacugccagucccacg

SEQ ID NO: 398376 - RNA, 32 nt, Homo Sapiens
aguagaguucaucuuuauauuaaacuuccccu

SEQ ID NO: 398377 - RNA, 32 nt, Homo Sapiens
gccagcuaguugagcgcaccccccgcccgccc

SEQ ID NO: 398378 - RNA, 32 nt, Homo Sapiens
auuuagaguuugggcucuggcucccucaguaa

SEQ ID NO: 398379 - RNA, 32 nt, Homo Sapiens
uccgaguacuuugggaagccaagacaggugga

SEQ ID NO: 398380 - RNA, 32 nt, Homo Sapiens
ggaccccggcgcucggcucccggcgccaugug

SEQ ID NO: 398381 - RNA, 32 nt, Homo Sapiens
caguuucagaucuaaugguuuaauuuagggag

SEQ ID NO: 398382 - RNA, 32 nt, Homo Sapiens
ucagccgccgcccacggcacggcagccaccau

SEQ ID NO: 398383 - RNA, 32 nt, Homo Sapiens
ggcggugccggggucaucgggaugaugcggac

SEQ ID NO: 398384 - RNA, 32 nt, Homo Sapiens
ucccugcggcuccuuagucaccucugauagca

SEQ ID NO: 398385 - RNA, 29 nt, Homo Sapiens
auuuuguaaaguuuaacuucuuagcgaac

SEQ ID NO: 398386 - RNA, 32 nt, Homo Sapiens
gaccauaggaucuugacuccaacagcggcaac

SEQ ID NO: 398387 - RNA, 32 nt, Homo Sapiens
gaguuuggguuccaucuuuucauuuccccagc

SEQ ID NO: 398388 - RNA, 32 nt, Homo Sapiens
gccccuguccccagcccccagcuggcuguggg

SEQ ID NO: 398389 - RNA, 32 nt, Homo Sapiens
gcacagggaauauuuuuguaacuaacuaacug

SEQ ID NO: 398390 - RNA, 32 nt, Homo Sapiens
aagaaauauauuuauaaagcuuagugaaacac

SEQ ID NO: 398391 - RNA, 32 nt, Homo Sapiens
cuugcuuccagaaucuucuggauguuccuaca

SEQ ID NO: 398392 - RNA, 30 nt, Homo Sapiens
cgaucagcugguagcaugcaaaaggccuag

SEQ ID NO: 398393 - RNA, 32 nt, Homo Sapiens
gcugccacuccagcaggcgucgguucaaggcc

SEQ ID NO: 398394 - RNA, 32 nt, Homo Sapiens
cuagucagcuagaggagggaauguugacagua

SEQ ID NO: 398395 - RNA, 32 nt, Homo Sapiens
agugugguuggucaggcccacccuccuguggc

SEQ ID NO: 398396 - RNA, 32 nt, Homo Sapiens
gaguccagaaaacuacguuuugucaguagcaa

SEQ ID NO: 398397 - RNA, 32 nt, Homo Sapiens
aaaggcuguuuguaggcguuuuaaauaugcuu

SEQ ID NO: 398398 - RNA, 32 nt, Homo Sapiens
cuccugccucaucggccugccaugaccugcag

SEQ ID NO: 398399 - RNA, 32 nt, Homo Sapiens
guagagacacauuagauuuugaggaugucaca

SEQ ID NO: 398400 - RNA, 32 nt, Homo Sapiens
guugcccaagaagaugcugaaaaauuaggauu

SEQ ID NO: 398401 - RNA, 32 nt, Homo Sapiens
gcuaagcgggcucagagcgccgcggcauucag

SEQ ID NO: 398402 - RNA, 32 nt, Homo Sapiens
cagggcugacuucaacaggcccagucaaguca

SEQ ID NO: 398403 - RNA, 32 nt, Homo Sapiens
caaaagggguggcaguguaugguucaggaaug

SEQ ID NO: 398404 - RNA, 32 nt, Homo Sapiens
aaugaccacagcagacagaauuugagcccagc

SEQ ID NO: 398405 - RNA, 32 nt, Homo Sapiens
agggguaucucugcuacaggaaugggagugag

SEQ ID NO: 398406 - RNA, 29 nt, Homo Sapiens
uaauaaauauuugauuuuucuuucucuuc

SEQ ID NO: 398407 - RNA, 32 nt, Homo Sapiens
uucauaucuucaguuuaauaugucaguauaau

SEQ ID NO: 398408 - RNA, 32 nt, Homo Sapiens
agcguccacccuguccacccagcccugcccac

SEQ ID NO: 398409 - RNA, 32 nt, Homo Sapiens
guggaaagauaaacuaaguuuuaauguuauuu

SEQ ID NO: 398410 - RNA, 32 nt, Homo Sapiens
guuugucuuucugugccuggcuuauuucacuu

SEQ ID NO: 398411 - RNA, 32 nt, Homo Sapiens
aaaauuguuuuaaugccuggacuuugaaacaa

SEQ ID NO: 398412 - RNA, 32 nt, Homo Sapiens
agcugaggacaaagcuaagacaggcggacaau

SEQ ID NO: 398413 - RNA, 32 nt, Homo Sapiens
ugaucacuaguaucuucuuaauuuugugaaca

SEQ ID NO: 398414 - RNA, 32 nt, Homo Sapiens
gcugcugccaccugaccugcagggaggaggcu

SEQ ID NO: 398415 - RNA, 32 nt, Homo Sapiens
ggagauagcauuaaacuaaauacaaagaaaaa

SEQ ID NO: 398416 - RNA, 32 nt, Homo Sapiens
ugcaggcgcgccgcuuccccgacuacgcggcg

SEQ ID NO: 398417 - RNA, 32 nt, Homo Sapiens
ucacagucacuacucucaccucagcugggaac

SEQ ID NO: 398418 - RNA, 27 nt, Homo Sapiens
augugaccauuuuucugguaugaauaa

SEQ ID NO: 398419 - RNA, 32 nt, Homo Sapiens
uugaguucuuuaaauuacuacuccaugcuuuu

SEQ ID NO: 398420 - RNA, 32 nt, Homo Sapiens
auuauucagcugaugccuggaauugcaugacc

SEQ ID NO: 398421 - RNA, 32 nt, Homo Sapiens
gaugucccugugaacaccugcacuaugagaag

SEQ ID NO: 398422 - RNA, 32 nt, Homo Sapiens
gcaugacacuggccauggugcugcuggagaug

SEQ ID NO: 398423 - RNA, 32 nt, Homo Sapiens
ucccuggccccggcccuucccucacuuccauc

SEQ ID NO: 398424 - RNA, 32 nt, Homo Sapiens
aagaauccucaguuuauuuuuccacuauuaau

SEQ ID NO: 398425 - RNA, 32 nt, Homo Sapiens
agccguguucuucauggaauuuuccaggccac

SEQ ID NO: 398426 - RNA, 32 nt, Homo Sapiens
gugggcagaagauaaggggccagggagcuaga

SEQ ID NO: 398427 - RNA, 32 nt, Homo Sapiens
ucgcccggcaguguuacaagcuccgcagccaa

SEQ ID NO: 398428 - RNA, 32 nt, Homo Sapiens
cacauaugcaagcgcaguggcugucugauaag

SEQ ID NO: 398429 - RNA, 32 nt, Homo Sapiens
cagcaggaaggagagcagaaaaggggaugggc

SEQ ID NO: 398430 - RNA, 32 nt, Homo Sapiens
uaugguuguuuuuauuaaguguauauucuuug

SEQ ID NO: 398431 - RNA, 32 nt, Homo Sapiens
gccccccgcgccgaccagaauccgugaacaug

SEQ ID NO: 398432 - RNA, 32 nt, Homo Sapiens
ucccagaugaaaacugcuguauggaaaaauga

SEQ ID NO: 398433 - RNA, 32 nt, Homo Sapiens
gugcauuccagccugcagaaaaccuuucuccu

SEQ ID NO: 398434 - RNA, 32 nt, Homo Sapiens
uacuuuucaaguacggugucauuuucacaguc

SEQ ID NO: 398435 - RNA, 32 nt, Homo Sapiens
guaccuagaaagacaucagaacaagucgguca

SEQ ID NO: 398436 - RNA, 29 nt, Homo Sapiens
aaaggaauguguaagugaaagcugaaaga

SEQ ID NO: 398437 - RNA, 32 nt, Homo Sapiens
guacggcgccuucugcaaggggcucacgcgca

SEQ ID NO: 398438 - RNA, 32 nt, Homo Sapiens
aacugguuguacaaucaugauguuaguaauag

SEQ ID NO: 398439 - RNA, 32 nt, Homo Sapiens
auauuuuuugucuuuguuugcauuguauaacu

SEQ ID NO: 398440 - RNA, 32 nt, Homo Sapiens
cuucuggaaaauccuuuuuuuuuuuucugaau

SEQ ID NO: 398441 - RNA, 32 nt, Homo Sapiens
acauucuuucuuuuugugccaaaugacuugca

SEQ ID NO: 398442 - RNA, 32 nt, Homo Sapiens
ggaagguagcacagggcagagccacugggcac

SEQ ID NO: 398443 - RNA, 32 nt, Homo Sapiens
cuuuucaucccucuccugggucugcgccccuc

SEQ ID NO: 398444 - RNA, 32 nt, Homo Sapiens
gccaccuccaugccacugccagagcuggccua

SEQ ID NO: 398445 - RNA, 32 nt, Homo Sapiens
ggugccuggccagcuggccuuuucauuguuga

SEQ ID NO: 398446 - RNA, 32 nt, Homo Sapiens
agacaccuuuuggggaagugguugugcauauu

SEQ ID NO: 398447 - RNA, 32 nt, Homo Sapiens
ucaguuuugacugagugaugugagaaacuucu

SEQ ID NO: 398448 - RNA, 32 nt, Homo Sapiens
uggggcuuuguggcccugggggugcuucugca

SEQ ID NO: 398449 - RNA, 27 nt, Homo Sapiens
aaaagguccuucugugcacccuggucg

SEQ ID NO: 398450 - RNA, 32 nt, Homo Sapiens
ugggaucccagcacgugggagccauuauauug

SEQ ID NO: 398451 - RNA, 32 nt, Homo Sapiens
ugcaacuauaaaauaucagagaaauaacaauu

SEQ ID NO: 398452 - RNA, 32 nt, Homo Sapiens
acuggguauuguggaaauaaaacuauauaaac

SEQ ID NO: 398453 - RNA, 32 nt, Homo Sapiens
ccaugugugcuguguguguccaggcacgguuc

SEQ ID NO: 398454 - RNA, 32 nt, Homo Sapiens
uuguuuuuauugcauuugcuguuguuucuaua

SEQ ID NO: 398455 - RNA, 32 nt, Homo Sapiens
cuccccgccuugccggccgcccuugcagcccc

SEQ ID NO: 398456 - RNA, 32 nt, Homo Sapiens
cagaaacaagguggugacaguggcgugcucag

SEQ ID NO: 398457 - RNA, 32 nt, Homo Sapiens
acucauauauauacauguguauaagaugagca

SEQ ID NO: 398458 - RNA, 32 nt, Homo Sapiens
gccgacagcgaacuccgcggccucggagccgg

SEQ ID NO: 398459 - RNA, 32 nt, Homo Sapiens
ccuaaauauccauguacccagcccuggggucg

SEQ ID NO: 398460 - RNA, 32 nt, Homo Sapiens
gagggguccauauggcguuguucuggauuccc

SEQ ID NO: 398461 - RNA, 32 nt, Homo Sapiens
uguccuugacauucugauguggugaaaugguu

SEQ ID NO: 398462 - RNA, 32 nt, Homo Sapiens
auguagacuugggggaggccugccccagaggg

SEQ ID NO: 398463 - RNA, 32 nt, Homo Sapiens
agaagacagacuagcacaaaacacagaauucg

SEQ ID NO: 398464 - RNA, 32 nt, Homo Sapiens
gucccgcccucccguggucacuggcuccgccc

SEQ ID NO: 398465 - RNA, 32 nt, Homo Sapiens
ccagaaauaauaagguccccacaagaugaugc

SEQ ID NO: 398466 - RNA, 32 nt, Homo Sapiens
ggaggugggcuguggccuccccugccccuaca

SEQ ID NO: 398467 - RNA, 32 nt, Homo Sapiens
cugccaagccccacaggcugucaugguggcuc

SEQ ID NO: 398468 - RNA, 32 nt, Homo Sapiens
cgaaucauucauuaaaaucuuuuacauuuaau

SEQ ID NO: 398469 - RNA, 32 nt, Homo Sapiens
cuuggcugccagccuacccugccugcacuccu

SEQ ID NO: 398470 - RNA, 32 nt, Homo Sapiens
ugaaugcagcgggccuccagccacagccugcu

SEQ ID NO: 398471 - RNA, 32 nt, Homo Sapiens
ggaauuguuauugcuguuuuuauuuuuuacuu

SEQ ID NO: 398472 - RNA, 32 nt, Homo Sapiens
gggggaccuggggcccagcugcagcugcagca

SEQ ID NO: 398473 - RNA, 32 nt, Homo Sapiens
agucuaauacccacccugauacgugcaaucau

SEQ ID NO: 398474 - RNA, 32 nt, Homo Sapiens
acgggggccgcgccgcgccuugcugcagggag

SEQ ID NO: 398475 - RNA, 32 nt, Homo Sapiens
agaugccuccucuccaaagagaauuaaaaucg

SEQ ID NO: 398476 - RNA, 30 nt, Homo Sapiens
acgucaugaagauaagagcaaaaguccugc

SEQ ID NO: 398477 - RNA, 32 nt, Homo Sapiens
ugacccuacaggucgugcuaugauauggaguc

SEQ ID NO: 398478 - RNA, 32 nt, Homo Sapiens
gaaugcauagaagauauaaaaauacgcagcuu

SEQ ID NO: 398479 - RNA, 32 nt, Homo Sapiens
uuuuuaugaucaaagaagagaucauuuaaaaa

SEQ ID NO: 398480 - RNA, 32 nt, Homo Sapiens
gcggggcggugcugggacugggcuugcggggu

SEQ ID NO: 398481 - RNA, 32 nt, Homo Sapiens
acaaugauuaaucagauagaaguucuagucaa

SEQ ID NO: 398482 - RNA, 32 nt, Homo Sapiens
caguaaccguccucacugcgccacgcacuccu

SEQ ID NO: 398483 - RNA, 32 nt, Homo Sapiens
cuguggggagacggagggugagcuguuguugg

SEQ ID NO: 398484 - RNA, 32 nt, Homo Sapiens
uaugaugaaugcuaugcagauguugucuuuaa

SEQ ID NO: 398485 - RNA, 29 nt, Homo Sapiens
auuugcauauguauuuuugucauagcagc

SEQ ID NO: 398486 - RNA, 32 nt, Homo Sapiens
aaaauaaauuauaaguuuuaauaaaaaaaaaa

SEQ ID NO: 398487 - RNA, 28 nt, Homo Sapiens
cucccaagugcuaccaggauauuugcga

SEQ ID NO: 398488 - RNA, 32 nt, Homo Sapiens
agaaucucagugcguccacaccgaacaauucc

SEQ ID NO: 398489 - RNA, 32 nt, Homo Sapiens
uuccugucuuaccaaacagugggagggaauuc

SEQ ID NO: 398490 - RNA, 29 nt, Homo Sapiens
cccgacucuauccaccaccaggaagccuc

SEQ ID NO: 398491 - RNA, 32 nt, Homo Sapiens
uggauuacaaaaauaacacuaaacucucaaca

SEQ ID NO: 398492 - RNA, 30 nt, Homo Sapiens
ugccugcccugcuccaggcuccaccugcgc

SEQ ID NO: 398493 - RNA, 32 nt, Homo Sapiens
ggaccaaggagagagaaagcccugccccugag

SEQ ID NO: 398494 - RNA, 32 nt, Homo Sapiens
gcugguuuaucuuuguagauuguaaucgaaug

SEQ ID NO: 398495 - RNA, 32 nt, Homo Sapiens
agcagagcuuccacaagacauuucgaagucau

SEQ ID NO: 398496 - RNA, 32 nt, Homo Sapiens
ucuuggcagcaucagcugggcugcuuucuuug

SEQ ID NO: 398497 - RNA, 32 nt, Homo Sapiens
gccuuuucaguauuuggugccuuuaaagaggc

SEQ ID NO: 398498 - RNA, 32 nt, Homo Sapiens
cauccaggccccaccccgucccuuccugguca

SEQ ID NO: 398499 - RNA, 32 nt, Homo Sapiens
acacacagagagaaaauccuucugccuguuga

SEQ ID NO: 398500 - RNA, 29 nt, Homo Sapiens
uaucuacaucuuguaucuauaaaaaucaa

SEQ ID NO: 398501 - RNA, 32 nt, Homo Sapiens
guuuuuuaaaaauaaacuuuucagaacaguua

SEQ ID NO: 398502 - RNA, 32 nt, Homo Sapiens
ccuuuaugaauagguuaaauauuuuccacagu

SEQ ID NO: 398503 - RNA, 32 nt, Homo Sapiens
cccgacccuccccacacccuaggguaccccag

SEQ ID NO: 398504 - RNA, 31 nt, Homo Sapiens
ccaugucugccgguuccccuggccgccuccu

SEQ ID NO: 398505 - RNA, 30 nt, Homo Sapiens
ccacgacaaccacuuccccaucuucuccuc

SEQ ID NO: 398506 - RNA, 32 nt, Homo Sapiens
ccucagccuagacccuccuccucccccagagg

SEQ ID NO: 398507 - RNA, 32 nt, Homo Sapiens
agagacuguggguggagcugccugcugcacuc

SEQ ID NO: 398508 - RNA, 32 nt, Homo Sapiens
uguaaguccccgcccacccccauggcccuaug

SEQ ID NO: 398509 - RNA, 32 nt, Homo Sapiens
ugaacaagcugaugauucugaaacuggcccaa

SEQ ID NO: 398510 - RNA, 32 nt, Homo Sapiens
cccagcacuuggggagaacuaguuaggaggau

SEQ ID NO: 398511 - RNA, 32 nt, Homo Sapiens
guguuccaggugugaagugcugggacauuggc

SEQ ID NO: 398512 - RNA, 29 nt, Homo Sapiens
cgcgaugcagcgggcggcggcgcuggucc

SEQ ID NO: 398513 - RNA, 32 nt, Homo Sapiens
ugcuugccugugcgcgcgugcgcggacauggc

SEQ ID NO: 398514 - RNA, 32 nt, Homo Sapiens
cuauaugcaucuuuuugguuugucaaaacgag

SEQ ID NO: 398515 - RNA, 32 nt, Homo Sapiens
auacgugcugcucggcuccccccgcccacccc

SEQ ID NO: 398516 - RNA, 32 nt, Homo Sapiens
cagugauagggaaaaaauauuuucacgggcau

SEQ ID NO: 398517 - RNA, 32 nt, Homo Sapiens
cuucaacuaggauuuagaccacuaagaacuug

SEQ ID NO: 398518 - RNA, 32 nt, Homo Sapiens
caagcuggugugcaguggugugaucuuggcuc

SEQ ID NO: 398519 - RNA, 32 nt, Homo Sapiens
uuaccuuuauuacugaauuugaaucuucuuuu

SEQ ID NO: 398520 - RNA, 32 nt, Homo Sapiens
uuacgaauauugcuuuguuuucuguuuaugca

SEQ ID NO: 398521 - RNA, 32 nt, Homo Sapiens
aggccgugagcucggcggcgguggcguccugc

SEQ ID NO: 398522 - RNA, 31 nt, Homo Sapiens
uauguuaaauaaaaaaucaguaucauggaaa

SEQ ID NO: 398523 - RNA, 32 nt, Homo Sapiens
ucugccccuccguacacccccugccccgccaa

SEQ ID NO: 398524 - RNA, 32 nt, Homo Sapiens
cucuaucauggaugcugggugacuuugggaag

SEQ ID NO: 398525 - RNA, 32 nt, Homo Sapiens
acccuugauuuuuucuccccauuugacaccca

SEQ ID NO: 398526 - RNA, 32 nt, Homo Sapiens
caccgcccccggcuccuccagguccugcuggc

SEQ ID NO: 398527 - RNA, 32 nt, Homo Sapiens
cagggugggugaggaagugcacagggguccag

SEQ ID NO: 398528 - RNA, 32 nt, Homo Sapiens
cauuuaagacuacuuuucuuauagguaguuga

SEQ ID NO: 398529 - RNA, 32 nt, Homo Sapiens
gcacccgcaugaggggcuggcuccuccccgug

SEQ ID NO: 398530 - RNA, 32 nt, Homo Sapiens
ugccacagacgggggaugcauuuugggaggca

SEQ ID NO: 398531 - RNA, 32 nt, Homo Sapiens
caguguuugguuauuaugcaaacaaguaaugu

SEQ ID NO: 398532 - RNA, 32 nt, Homo Sapiens
gggggaaaugcucuuugaaagcuccaauuauu

SEQ ID NO: 398533 - RNA, 32 nt, Homo Sapiens
uuuuucauucuggccuggccugguuuugccau

SEQ ID NO: 398534 - RNA, 32 nt, Homo Sapiens
uuucauauauuuuuauucuaccuuucaguaaa

SEQ ID NO: 398535 - RNA, 32 nt, Homo Sapiens
uccaugauuuucgagugcuguaccucuaaaga

SEQ ID NO: 398536 - RNA, 32 nt, Homo Sapiens
caagacucagccgugggaaauaugagugagcu

SEQ ID NO: 398537 - RNA, 32 nt, Homo Sapiens
ggaggcgccuccccggcacccucuuagcagcc

SEQ ID NO: 398538 - RNA, 32 nt, Homo Sapiens
ccccgccugcaccgcgcguccugcacucaacc

SEQ ID NO: 398539 - RNA, 32 nt, Homo Sapiens
ugaaaacuuuuacauuuuucugauggguucau

SEQ ID NO: 398540 - RNA, 32 nt, Homo Sapiens
aggaagugggugugugggaaaccugaagaugg

SEQ ID NO: 398541 - RNA, 32 nt, Homo Sapiens
ugucucagauauauauacuaacacgucuaaua

SEQ ID NO: 398542 - RNA, 32 nt, Homo Sapiens
uaagacagcuuagaguccauggagcccggccc

SEQ ID NO: 398543 - RNA, 32 nt, Homo Sapiens
uuacaugcauuacugcaugcacuucuuacaau

SEQ ID NO: 398544 - RNA, 32 nt, Homo Sapiens
gccauucccuacuucauccuugcugagcuaaa

SEQ ID NO: 398545 - RNA, 32 nt, Homo Sapiens
caaaaaccaaaauaagucaauuaccuguuaac

SEQ ID NO: 398546 - RNA, 32 nt, Homo Sapiens
uccugacccuucgcagacccaggugggggcau

SEQ ID NO: 398547 - RNA, 32 nt, Homo Sapiens
cggcagacgcggagcgugcucuggccaccaug

SEQ ID NO: 398548 - RNA, 32 nt, Homo Sapiens
uggaaagcaagucuuuggaacaauaacgaacg

SEQ ID NO: 398549 - RNA, 32 nt, Homo Sapiens
gucucagccucaccccaccucucgcugcucag

SEQ ID NO: 398550 - RNA, 32 nt, Homo Sapiens
ucauuuuggggauuuucccccuugauguuuug

SEQ ID NO: 398551 - RNA, 32 nt, Homo Sapiens
cuggaacauggaggcccugcccggggcugggg

SEQ ID NO: 398552 - RNA, 30 nt, Homo Sapiens
agugugggaggugggauggguauugguuaa

SEQ ID NO: 398553 - RNA, 32 nt, Homo Sapiens
uuaacaggcuaaaaaugccacuuuuuggcugg

SEQ ID NO: 398554 - RNA, 32 nt, Homo Sapiens
gcaacagcaacaaccacaaauuuaggggaagc

SEQ ID NO: 398555 - RNA, 32 nt, Homo Sapiens
cacucaauuuaaaaaagcaaaucccuaaacca

SEQ ID NO: 398556 - RNA, 32 nt, Homo Sapiens
uuguugccacuccgccaccauguucgaggcgc

SEQ ID NO: 398557 - RNA, 32 nt, Homo Sapiens
cccauggagacacaacgcaauagugacaugag

SEQ ID NO: 398558 - RNA, 32 nt, Homo Sapiens
cuaccagaauaaaacagggucuacaaugggga

SEQ ID NO: 398559 - RNA, 32 nt, Homo Sapiens
agggaggagguggcggcuguggcggccggaac

SEQ ID NO: 398560 - RNA, 32 nt, Homo Sapiens
cagggccggcugggcuggggguugcccuggcc

SEQ ID NO: 398561 - RNA, 32 nt, Homo Sapiens
agaccccaacuggagagaaccuuugccugagc

SEQ ID NO: 398562 - RNA, 32 nt, Homo Sapiens
uccuauuacuuaugauuuaugguaguaauauu

SEQ ID NO: 398563 - RNA, 32 nt, Homo Sapiens
aggcuucacaaauuauuuuaaaagaaaagaua

SEQ ID NO: 398564 - RNA, 32 nt, Homo Sapiens
ccauuuccuggcccaggaccccgggaaugccc

SEQ ID NO: 398565 - RNA, 32 nt, Homo Sapiens
gacuggauucuaucuucauuuuagacuuuugg

SEQ ID NO: 398566 - RNA, 32 nt, Homo Sapiens
gucaucucuugggggauuuucuuaaagugaag

SEQ ID NO: 398567 - RNA, 32 nt, Homo Sapiens
acgagggcacgcggcuugaaggacugugggca

SEQ ID NO: 398568 - RNA, 32 nt, Homo Sapiens
ggccgacuggagcaagguuugcuggcagauga

SEQ ID NO: 398569 - RNA, 32 nt, Homo Sapiens
ccuuuugaagaaaaacagcaugugauaauaua

SEQ ID NO: 398570 - RNA, 32 nt, Homo Sapiens
uugggggugucugcggaauagcgucucgucuu

SEQ ID NO: 398571 - RNA, 32 nt, Homo Sapiens
ucauaaagagaagcuaaacauaaaaaggaauu

SEQ ID NO: 398572 - RNA, 32 nt, Homo Sapiens
uucuaagaccucccuggcacagauggccccuc

SEQ ID NO: 398573 - RNA, 32 nt, Homo Sapiens
aaaacuagauaacuuaaauaauuuaagccaau

SEQ ID NO: 398574 - RNA, 32 nt, Homo Sapiens
cagcucacaccuguaaucccagcacuuuggga

SEQ ID NO: 398575 - RNA, 30 nt, Homo Sapiens
aaggaagggaggcgcgcugugcgccccgcg

SEQ ID NO: 398576 - RNA, 32 nt, Homo Sapiens
cacccuaagaauguauuuuuaaacacaugaaa

SEQ ID NO: 398577 - RNA, 32 nt, Homo Sapiens
uugucagcaggagagccugagggcugaggccc

SEQ ID NO: 398578 - RNA, 32 nt, Homo Sapiens
uuccugcuuccacucuugcuccucuacaauuc

SEQ ID NO: 398579 - RNA, 32 nt, Homo Sapiens
ucccgcgcucugcggcggcaagccccuuggaa

SEQ ID NO: 398580 - RNA, 30 nt, Homo Sapiens
aucuccuugguggugggggaaagagacuua

SEQ ID NO: 398581 - RNA, 32 nt, Homo Sapiens
gagaggggaccuggccggggcccauuccccua

SEQ ID NO: 398582 - RNA, 32 nt, Homo Sapiens
ccagcuguuucaucaccagacuuuggcucccg

SEQ ID NO: 398583 - RNA, 32 nt, Homo Sapiens
agggggagggaggggagacagagccuuuaacc

SEQ ID NO: 398584 - RNA, 32 nt, Homo Sapiens
gucauuggucuccucagauuucuggggccacc

SEQ ID NO: 398585 - RNA, 32 nt, Homo Sapiens
cacacgcagacacacgcacacucgcgcgcgca

SEQ ID NO: 398586 - RNA, 32 nt, Homo Sapiens
agacccagaagaacuucuuuuacuagcuugcu

SEQ ID NO: 398587 - RNA, 32 nt, Homo Sapiens
aaauauagaaauuuauauauauacauauauau

SEQ ID NO: 398588 - RNA, 32 nt, Homo Sapiens
aauuuagcaaugcauucauauuagcugaugaa

SEQ ID NO: 398589 - RNA, 32 nt, Homo Sapiens
gccagugccuucucaccaccacgugccugcgu

SEQ ID NO: 398590 - RNA, 32 nt, Homo Sapiens
ucugggaugugaaaagcguggagcgcauuuag

SEQ ID NO: 398591 - RNA, 32 nt, Homo Sapiens
aaggagcuguuaucuuuuuucuaaucaagugu

SEQ ID NO: 398592 - RNA, 32 nt, Homo Sapiens
cagggcgcccccagccccuccccaggccgcga

SEQ ID NO: 398593 - RNA, 32 nt, Homo Sapiens
cccggccaugauucuccuucuguggguggagg

SEQ ID NO: 398594 - RNA, 32 nt, Homo Sapiens
gaggccaccuccaagccgcgggugcccccuag

SEQ ID NO: 398595 - RNA, 32 nt, Homo Sapiens
cugccgagggccgagaaggcggugccgagccc

SEQ ID NO: 398596 - RNA, 32 nt, Homo Sapiens
agcagaaaaaaaaaccugaggaacgaaucuca

SEQ ID NO: 398597 - RNA, 32 nt, Homo Sapiens
uggaauagaaauuuccaccucccccaaccuuu

SEQ ID NO: 398598 - RNA, 32 nt, Homo Sapiens
agauuggaggucuggaggagaaaggaagccua

SEQ ID NO: 398599 - RNA, 32 nt, Homo Sapiens
gaaauguaugcgccagggugcuuccguggggc

SEQ ID NO: 398600 - RNA, 32 nt, Homo Sapiens
ccucacugcauacauagcaucccagcuccuaa

SEQ ID NO: 398601 - RNA, 32 nt, Homo Sapiens
cuggaauagacagggaccacauccucugggaa

SEQ ID NO: 398602 - RNA, 32 nt, Homo Sapiens
gggcaggugcaaaauaggaauguuguucucaa

SEQ ID NO: 398603 - RNA, 32 nt, Homo Sapiens
auuuuauguauauuuaucaaguaagucugauu

SEQ ID NO: 398604 - RNA, 32 nt, Homo Sapiens
ugcuggcccgcggggcuguccaggcacgcgag

SEQ ID NO: 398605 - RNA, 32 nt, Homo Sapiens
ccagaauuuucaucagaaauggauagcuuuaa

SEQ ID NO: 398606 - RNA, 32 nt, Homo Sapiens
guguuucucacggauggaauucuagucagcug

SEQ ID NO: 398607 - RNA, 32 nt, Homo Sapiens
auuaaaauuucugaaaaccaaugcgacaaaua

SEQ ID NO: 398608 - RNA, 32 nt, Homo Sapiens
cauauuuuacaaacagaagaguagcaucagag

SEQ ID NO: 398609 - RNA, 31 nt, Homo Sapiens
cuccgagaagcggcucagccccgcgccccuc

SEQ ID NO: 398610 - RNA, 32 nt, Homo Sapiens
cugcaccggcuggccuggccccucaggguccc

SEQ ID NO: 398611 - RNA, 32 nt, Homo Sapiens
uguacauacccauuuuagcuuucccaugcaua

SEQ ID NO: 398612 - RNA, 31 nt, Homo Sapiens
ggcugcggggccaucgcuccagaugcgaaag

SEQ ID NO: 398613 - RNA, 32 nt, Homo Sapiens
ggugccgggcgucucccgccuccaggaucucc

SEQ ID NO: 398614 - RNA, 32 nt, Homo Sapiens
ccgagaguucugugguucaaagguccacuacg

SEQ ID NO: 398615 - RNA, 32 nt, Homo Sapiens
ugaauaaugaacugguaaucuucgauaauaug

SEQ ID NO: 398616 - RNA, 32 nt, Homo Sapiens
auuaaguagaaagugagacucaauaauaacug

SEQ ID NO: 398617 - RNA, 32 nt, Homo Sapiens
auuuuucuguaaacaacugaaagaauaauuag

SEQ ID NO: 398618 - RNA, 32 nt, Homo Sapiens
uuauugugccuaaagaauggaacagcaaauau

SEQ ID NO: 398619 - RNA, 32 nt, Homo Sapiens
uccagccccaggaaggacccaggacacccgga

SEQ ID NO: 398620 - RNA, 32 nt, Homo Sapiens
cuuugggggcgcaagagaggcugggguaggaa

SEQ ID NO: 398621 - RNA, 32 nt, Homo Sapiens
ugggcguagaugggggccgggcggcggcggag

SEQ ID NO: 398622 - RNA, 32 nt, Homo Sapiens
guguugaacccugccucccaguuaaagaacuc

SEQ ID NO: 398623 - RNA, 32 nt, Homo Sapiens
guccaccggccgccgagaguccccggccuugg

SEQ ID NO: 398624 - RNA, 32 nt, Homo Sapiens
gagcgcaccgcggcgguggugcccagagcgga

SEQ ID NO: 398625 - RNA, 32 nt, Homo Sapiens
auuugaaguggaaaaagaaauucuguuaaugu

SEQ ID NO: 398626 - RNA, 32 nt, Homo Sapiens
auaaugaacacgcaucacacuuugaagcagag

SEQ ID NO: 398627 - RNA, 32 nt, Homo Sapiens
agauccaucccaugauuuguuccugucugagg

SEQ ID NO: 398628 - RNA, 32 nt, Homo Sapiens
gugcccugugcuaugucgugccugcagggaca

SEQ ID NO: 398629 - RNA, 32 nt, Homo Sapiens
gcaggcagcaugucuuuccuccccugcucucu

SEQ ID NO: 398630 - RNA, 32 nt, Homo Sapiens
cacuugugaagugugccuggaaaaugaaaguu

SEQ ID NO: 398631 - RNA, 32 nt, Homo Sapiens
uaaccugugcuaaaaugagaagguaugcuagg

SEQ ID NO: 398632 - RNA, 32 nt, Homo Sapiens
gcuguuuucuucaguuuuaugcauucucuccu

SEQ ID NO: 398633 - RNA, 32 nt, Homo Sapiens
gcucucagaaaauaaacugcuuuauuggaaaa

SEQ ID NO: 398634 - RNA, 32 nt, Homo Sapiens
uucucgagcccggagccgcugccgccgccccc

SEQ ID NO: 398635 - RNA, 32 nt, Homo Sapiens
ccuccaucguccugcccuuuggccuuuugguu

SEQ ID NO: 398636 - RNA, 32 nt, Homo Sapiens
cucccgccgcugcuccaagacccucugcaagg

SEQ ID NO: 398637 - RNA, 32 nt, Homo Sapiens
ugcuaaauggauuagaugaauguacuucuuuu

SEQ ID NO: 398638 - RNA, 32 nt, Homo Sapiens
gagaucacaguggagcacuuugaaagaccguc

SEQ ID NO: 398639 - RNA, 32 nt, Homo Sapiens
ugcaguccuaccucuuggaacuacccguguuu

SEQ ID NO: 398640 - RNA, 32 nt, Homo Sapiens
auuggacuggcgggcucaggcgcggcaggagg

SEQ ID NO: 398641 - RNA, 32 nt, Homo Sapiens
aguggaaucugaaucuacucugcaucuacucu

SEQ ID NO: 398642 - RNA, 32 nt, Homo Sapiens
auaguguauauuucuuuuuuucuuuuuuuuaa

SEQ ID NO: 398643 - RNA, 32 nt, Homo Sapiens
gagucagugugcagacccccuuucaggccaug

SEQ ID NO: 398644 - RNA, 32 nt, Homo Sapiens
uuuuucaaucugguuccuuuuguauaugaugu

SEQ ID NO: 398645 - RNA, 32 nt, Homo Sapiens
cccaggcccgccgcuccgcagggcugcuggcg

SEQ ID NO: 398646 - RNA, 32 nt, Homo Sapiens
aaggacucagggggaaagaaaucaggggacau

SEQ ID NO: 398647 - RNA, 32 nt, Homo Sapiens
uggcggagcgacccucuauggucccgggccca

SEQ ID NO: 398648 - RNA, 32 nt, Homo Sapiens
uuuuucuucuauucucuauuaaacaauuuagu

SEQ ID NO: 398649 - RNA, 32 nt, Homo Sapiens
ugcuaggcuguaaccaaagaauuuaagauagu

SEQ ID NO: 398650 - RNA, 32 nt, Homo Sapiens
guccuggcagcuuuuggaaugacagcaguggu

SEQ ID NO: 398651 - RNA, 32 nt, Homo Sapiens
uuugcucuggagcagcagcagcuggcggagca

SEQ ID NO: 398652 - RNA, 32 nt, Homo Sapiens
ucuggucauacacaguggaguguaggucgagc

SEQ ID NO: 398653 - RNA, 31 nt, Homo Sapiens
acaucgagggcggcggcggcccgagcgaccc

SEQ ID NO: 398654 - RNA, 30 nt, Homo Sapiens
gcaggacaggaucccggcggcagaaggacg

SEQ ID NO: 398655 - RNA, 32 nt, Homo Sapiens
uggagaaauauuacaaggauaggguaauuuga

SEQ ID NO: 398656 - RNA, 32 nt, Homo Sapiens
cuggcagccgcggaucucaccgccgcucaggg

SEQ ID NO: 398657 - RNA, 28 nt, Homo Sapiens
gcaaugucacgacuuggucuucccgagg

SEQ ID NO: 398658 - RNA, 32 nt, Homo Sapiens
agaagaggaaaggggucguguuugcccuuaga

SEQ ID NO: 398659 - RNA, 32 nt, Homo Sapiens
auauguucauccagagugugucuuaaguaacu

SEQ ID NO: 398660 - RNA, 32 nt, Homo Sapiens
aaugaagucuugcuauuuuacccaggcugguc

SEQ ID NO: 398661 - RNA, 32 nt, Homo Sapiens
gcucacaccaacuucuggccaaugcagggacc

SEQ ID NO: 398662 - RNA, 32 nt, Homo Sapiens
uucuggaacucucuccuuuccuggcuggggcu

SEQ ID NO: 398663 - RNA, 32 nt, Homo Sapiens
uggaauucccacuuagggcucuggucacuaga

SEQ ID NO: 398664 - RNA, 32 nt, Homo Sapiens
auguugaugggaagaacagaagcaggaaaauc

SEQ ID NO: 398665 - RNA, 32 nt, Homo Sapiens
ggaugacuaucccuuucugugucuaguuacag

SEQ ID NO: 398666 - RNA, 32 nt, Homo Sapiens
caauguggggacgagacccccucaucucagag

SEQ ID NO: 398667 - RNA, 32 nt, Homo Sapiens
ugccucuugaguuuguuauaaaagcgaacugu

SEQ ID NO: 398668 - RNA, 32 nt, Homo Sapiens
accaaauuuuaaaaauacuuuuuaccaaaggu

SEQ ID NO: 398669 - RNA, 32 nt, Homo Sapiens
uuugaaaggaacaaaauuaucagggauggcuc

SEQ ID NO: 398670 - RNA, 32 nt, Homo Sapiens
gaggggguaacagucugcaucaucaucacaac

SEQ ID NO: 398671 - RNA, 32 nt, Homo Sapiens
aacagcaucuucuacuucuccaucuagagauu

SEQ ID NO: 398672 - RNA, 32 nt, Homo Sapiens
caguguuagggaucuuggaagcacagccaaca

SEQ ID NO: 398673 - RNA, 32 nt, Homo Sapiens
guguggcccuggccgugaucuccaccuuucug

SEQ ID NO: 398674 - RNA, 32 nt, Homo Sapiens
ucugaaaugcuguugaagcauaucauuugcau

SEQ ID NO: 398675 - RNA, 32 nt, Homo Sapiens
gagauuucacugcauuuccccacucugcccac

SEQ ID NO: 398676 - RNA, 32 nt, Homo Sapiens
aaucagaaaaagacauaccaaguagcuggugc

SEQ ID NO: 398677 - RNA, 32 nt, Homo Sapiens
gauaaugaucugaccuaaccuacuauuggcug

SEQ ID NO: 398678 - RNA, 32 nt, Homo Sapiens
agucccaugugauuuaaacaaacaaacaaaca

SEQ ID NO: 398679 - RNA, 32 nt, Homo Sapiens
aagaagagaaaacaguggcgacuuagagaugg

SEQ ID NO: 398680 - RNA, 32 nt, Homo Sapiens
ggugugagaaaauaaacuucgguugauaaacu

SEQ ID NO: 398681 - RNA, 32 nt, Homo Sapiens
gucugggagagcuucuguccugugcugcaugg

SEQ ID NO: 398682 - RNA, 32 nt, Homo Sapiens
aucaugugauuaaaaguggugauucaguggga

SEQ ID NO: 398683 - RNA, 32 nt, Homo Sapiens
aaaauacaaaaauuagccgggugugguguugg

SEQ ID NO: 398684 - RNA, 32 nt, Homo Sapiens
uaagaaucaaauuuuucgaauggcaaucaacu

SEQ ID NO: 398685 - RNA, 32 nt, Homo Sapiens
gccccuuuccuagucucauccuccccuggcug

SEQ ID NO: 398686 - RNA, 32 nt, Homo Sapiens
cagacaccuuggacauccuccucccacccggc

SEQ ID NO: 398687 - RNA, 32 nt, Homo Sapiens
uacccagguucuauccaaaucuaugugggcau

SEQ ID NO: 398688 - RNA, 32 nt, Homo Sapiens
ugcugucuaaucuuuucaacuauuauccaguc

SEQ ID NO: 398689 - RNA, 32 nt, Homo Sapiens
auaauauugugaaaaugaaucuguuaugauaa

SEQ ID NO: 398690 - RNA, 32 nt, Homo Sapiens
aagggacuugccuugucucagaugagacuuug

SEQ ID NO: 398691 - RNA, 32 nt, Homo Sapiens
uuggaugaauauaaaaauaaaucucaauaaau

SEQ ID NO: 398692 - RNA, 32 nt, Homo Sapiens
ucacucgccccgagguggguggagggaggccu

SEQ ID NO: 398693 - RNA, 32 nt, Homo Sapiens
cuugugucaaggauugguuauaauauaaccag

SEQ ID NO: 398694 - RNA, 32 nt, Homo Sapiens
ucuggucaguggcaagggaggaccccaggcca

SEQ ID NO: 398695 - RNA, 32 nt, Homo Sapiens
ugcagacucuggugcaguagguccuggcggga

SEQ ID NO: 398696 - RNA, 32 nt, Homo Sapiens
gcuccucggaggccagacccaggauggcugca

SEQ ID NO: 398697 - RNA, 32 nt, Homo Sapiens
gcuggcccuggagguggggcccggggucgggg

SEQ ID NO: 398698 - RNA, 32 nt, Homo Sapiens
agacagucaauguggaugagaacuaucccuga

SEQ ID NO: 398699 - RNA, 32 nt, Homo Sapiens
ggucacaaucccauuggauggaaaggacuugg

SEQ ID NO: 398700 - RNA, 32 nt, Homo Sapiens
ccuuggaaaugucugcugguauuucuaauucc

SEQ ID NO: 398701 - RNA, 32 nt, Homo Sapiens
uuuucaaauucuuuuuauuaugacuaugcccu

SEQ ID NO: 398702 - RNA, 32 nt, Homo Sapiens
gguugacauuccugcauaagcauuucucugug

SEQ ID NO: 398703 - RNA, 32 nt, Homo Sapiens
gggguugccaucccgggguacaugucaccagu

SEQ ID NO: 398704 - RNA, 32 nt, Homo Sapiens
acccugguccgccucccuggccuggcucaacc

SEQ ID NO: 398705 - RNA, 32 nt, Homo Sapiens
uggaaugccguggcgcaaucucagcucacugc

SEQ ID NO: 398706 - RNA, 26 nt, Homo Sapiens
aaugacccccucacccuccccccgcu

SEQ ID NO: 398707 - RNA, 25 nt, Homo Sapiens
ggguuccaccgccgcguguccaucg

SEQ ID NO: 398708 - RNA, 32 nt, Homo Sapiens
gaucguggggacgggguccaccccaagaagaa

SEQ ID NO: 398709 - RNA, 32 nt, Homo Sapiens
uuggaaaaaucguugugggaaccauuaaaaga

SEQ ID NO: 398710 - RNA, 32 nt, Homo Sapiens
ccuagauguuacgugaucauggccucugcagg

SEQ ID NO: 398711 - RNA, 32 nt, Homo Sapiens
gcuuggaccgugccggggauagauaggcugcc

SEQ ID NO: 398712 - RNA, 32 nt, Homo Sapiens
uacaaauggaagucaucgaauuuuaucauuua

SEQ ID NO: 398713 - RNA, 32 nt, Homo Sapiens
cugugugcgagcccuccugggcucuggggacu

SEQ ID NO: 398714 - RNA, 32 nt, Homo Sapiens
ccagucagguuggcuuuccugguuucagacau

SEQ ID NO: 398715 - RNA, 32 nt, Homo Sapiens
ccugggugaccacugcccuuuaugagaaucag

SEQ ID NO: 398716 - RNA, 32 nt, Homo Sapiens
agaaaauuguuaaauaauauuacuucuuuucc

SEQ ID NO: 398717 - RNA, 32 nt, Homo Sapiens
gaacugucuauuucuuccuucaauucugucag

SEQ ID NO: 398718 - RNA, 32 nt, Homo Sapiens
gcucaagcaauugucccuccucagccucccaa

SEQ ID NO: 398719 - RNA, 32 nt, Homo Sapiens
ugccaccaaugccccaggacaggcccacccau

SEQ ID NO: 398720 - RNA, 31 nt, Homo Sapiens
cacagaaauggaaaacaggagucgauuuucc

SEQ ID NO: 398721 - RNA, 32 nt, Homo Sapiens
cauggucagcucuggucuagauguaucuaggc

SEQ ID NO: 398722 - RNA, 32 nt, Homo Sapiens
uuuccugccugccccaccugccucauauugug

SEQ ID NO: 398723 - RNA, 32 nt, Homo Sapiens
uucaccugcggagccuuacggcagcugagcgg

SEQ ID NO: 398724 - RNA, 32 nt, Homo Sapiens
aauuauguggaggcgauccagugaugagucgg

SEQ ID NO: 398725 - RNA, 32 nt, Homo Sapiens
cuaguuuggaaguuuuaacaacugaauguuua

SEQ ID NO: 398726 - RNA, 32 nt, Homo Sapiens
uuccaguuuggccuuaugcuuuaugcagacuu

SEQ ID NO: 398727 - RNA, 32 nt, Homo Sapiens
ccauaauuauuagaucuuauuauugacacuaa

SEQ ID NO: 398728 - RNA, 32 nt, Homo Sapiens
uuuuagagugcuucuuuuuuuuuuugagacag

SEQ ID NO: 398729 - RNA, 32 nt, Homo Sapiens
ccgucgcacccacagcgaaggcacaugccccg

SEQ ID NO: 398730 - RNA, 32 nt, Homo Sapiens
cacuggcucugaucuugcuuccugcuuggaaa

SEQ ID NO: 398731 - RNA, 32 nt, Homo Sapiens
guguuccucauggccuaccccagccuuucuuc

SEQ ID NO: 398732 - RNA, 31 nt, Homo Sapiens
uugucagugucugcucucagaguuuacacau

SEQ ID NO: 398733 - RNA, 32 nt, Homo Sapiens
aagaagauccuucgugaucaccaugcuguucu

SEQ ID NO: 398734 - RNA, 32 nt, Homo Sapiens
ugcagagacuuccugccuggaacucaucugug

SEQ ID NO: 398735 - RNA, 32 nt, Homo Sapiens
cucauaguguaaacugaaagaaaaauaguugc

SEQ ID NO: 398736 - RNA, 32 nt, Homo Sapiens
gaacguccagaccguuccccugaccggccacg

SEQ ID NO: 398737 - RNA, 32 nt, Homo Sapiens
gaauggaucccaacuucuccccggcagcucug

SEQ ID NO: 398738 - RNA, 32 nt, Homo Sapiens
aaaguaaaguuccauccugagaauauuucaca

SEQ ID NO: 398739 - RNA, 32 nt, Homo Sapiens
ugcgcugcccucagacaugcaagugaaaggag

SEQ ID NO: 398740 - RNA, 32 nt, Homo Sapiens
uguacuaaaacacaaaaaacugacagcucuga

SEQ ID NO: 398741 - RNA, 32 nt, Homo Sapiens
ccccugcccugcccgcccccagccuccccacc

SEQ ID NO: 398742 - RNA, 32 nt, Homo Sapiens
gugugaggggcguggaggaggaggcgggcugg

SEQ ID NO: 398743 - RNA, 32 nt, Homo Sapiens
cuuccuaauaauaauuaagagauugagacucc

SEQ ID NO: 398744 - RNA, 32 nt, Homo Sapiens
uuaggaagaacuccaaaccaaaauacugugua

SEQ ID NO: 398745 - RNA, 32 nt, Homo Sapiens
ucagcaaccaagggauuguuccugucaaucaa

SEQ ID NO: 398746 - RNA, 32 nt, Homo Sapiens
gguuuugugugcggcgguggacaggcgccagc

SEQ ID NO: 398747 - RNA, 32 nt, Homo Sapiens
uugcugccugucucguggaggugucuauuagc

SEQ ID NO: 398748 - RNA, 32 nt, Homo Sapiens
accugucaauuucauaguuuccacuuucuugu

SEQ ID NO: 398749 - RNA, 32 nt, Homo Sapiens
cgcggacgcucgccgccggccauagcucagcc

SEQ ID NO: 398750 - RNA, 32 nt, Homo Sapiens
aaacuagacaaaugcuaguguguuuuaacuag

SEQ ID NO: 398751 - RNA, 32 nt, Homo Sapiens
cagacuugguccaagcucuuacagaguugaca

SEQ ID NO: 398752 - RNA, 32 nt, Homo Sapiens
uuccuuuuuuuuuuuuuuuuuauugggaaaag

SEQ ID NO: 398753 - RNA, 32 nt, Homo Sapiens
aaaaggcucaaauuauuuuuuucaaaaagcau

SEQ ID NO: 398754 - RNA, 32 nt, Homo Sapiens
ugccuuaaacucccuaaaaucuccgcagcucu

SEQ ID NO: 398755 - RNA, 32 nt, Homo Sapiens
acucaaaauuuguugacagacuauuuaaagcu

SEQ ID NO: 398756 - RNA, 32 nt, Homo Sapiens
auccucaguaguauuucuuacagugagacaac

SEQ ID NO: 398757 - RNA, 29 nt, Homo Sapiens
gaccaucucugggacagaggcaagaaucc

SEQ ID NO: 398758 - RNA, 32 nt, Homo Sapiens
aaggacugggagggauuugcgagggggcugaa

SEQ ID NO: 398759 - RNA, 32 nt, Homo Sapiens
uuuucucacucaugcauacaaagcagcuaaaa

SEQ ID NO: 398760 - RNA, 32 nt, Homo Sapiens
aaagguuuugaaaaacaaacuacuugagaaau

SEQ ID NO: 398761 - RNA, 32 nt, Homo Sapiens
caauaauauacaaagcacuuugagcuucucug

SEQ ID NO: 398762 - RNA, 32 nt, Homo Sapiens
cauucuuaaaagacuuuggacuuaaauccuag

SEQ ID NO: 398763 - RNA, 32 nt, Homo Sapiens
caaugccccuggaucuaccagcauaaauaucu

SEQ ID NO: 398764 - RNA, 32 nt, Homo Sapiens
acccacaggaauauccauggcuuuugugcuca

SEQ ID NO: 398765 - RNA, 32 nt, Homo Sapiens
uacagaagcugaugcuuaccuacaaaucuuga

SEQ ID NO: 398766 - RNA, 32 nt, Homo Sapiens
gaaaugucaucucccuagaaggaaguuagggu

SEQ ID NO: 398767 - RNA, 32 nt, Homo Sapiens
agggccccaucccccacagccaggggggccag

SEQ ID NO: 398768 - RNA, 32 nt, Homo Sapiens
cucugccaccgccccgacccccucuccucuca

SEQ ID NO: 398769 - RNA, 32 nt, Homo Sapiens
agaauugugcuaagugaaauaagccagauaca

SEQ ID NO: 398770 - RNA, 32 nt, Homo Sapiens
aggugugacuuuaggaucauggcuucucccca

SEQ ID NO: 398771 - RNA, 32 nt, Homo Sapiens
agagucgguuuaggaaggaaacgaagggucag

SEQ ID NO: 398772 - RNA, 32 nt, Homo Sapiens
gacccccaaugcauucauauuugccaagccau

SEQ ID NO: 398773 - RNA, 28 nt, Homo Sapiens
uguugcauuggugaaauuauaaauugau

SEQ ID NO: 398774 - RNA, 32 nt, Homo Sapiens
ucucuggagcagccaggcgcucuggagccagc

SEQ ID NO: 398775 - RNA, 32 nt, Homo Sapiens
ugauucuuauguaagguacacuuuuuauuuua

SEQ ID NO: 398776 - RNA, 32 nt, Homo Sapiens
aacaugcugucaacuaugugauucuuuccaag

SEQ ID NO: 398777 - RNA, 32 nt, Homo Sapiens
cauccagagcggcaggcgagcugggguccgga

SEQ ID NO: 398778 - RNA, 32 nt, Homo Sapiens
uuuuguggguacauaguacauguauauauuua

SEQ ID NO: 398779 - RNA, 32 nt, Homo Sapiens
gagcccaggaggaggaggcugcagugagcuaa

SEQ ID NO: 398780 - RNA, 27 nt, Homo Sapiens
aaacgguccuucuguugauccugucag

SEQ ID NO: 398781 - RNA, 32 nt, Homo Sapiens
agaaaccuuuuggccggcugcuuauguugacc

SEQ ID NO: 398782 - RNA, 32 nt, Homo Sapiens
aaaaagccgaucucagauuuuguuugaaguua

SEQ ID NO: 398783 - RNA, 32 nt, Homo Sapiens
augccuucugguggacauuuuauaagugcauu

SEQ ID NO: 398784 - RNA, 32 nt, Homo Sapiens
aaauuguacauuuuuucuuaauguuguggauu

SEQ ID NO: 398785 - RNA, 32 nt, Homo Sapiens
gacuugaguccucagggcuguugacuccaaag

SEQ ID NO: 398786 - RNA, 32 nt, Homo Sapiens
gcugaaaaauggucugucauaaauuauuuccc

SEQ ID NO: 398787 - RNA, 32 nt, Homo Sapiens
aauccacaaaagacagauaugaggaauauaag

SEQ ID NO: 398788 - RNA, 32 nt, Homo Sapiens
aaaagacuuuaagggaggagagccaucuauuu

SEQ ID NO: 398789 - RNA, 32 nt, Homo Sapiens
gccccacucccgccccucccccaucgugcugc

SEQ ID NO: 398790 - RNA, 32 nt, Homo Sapiens
uuaauugccacgugugcacuuacuacucucca

SEQ ID NO: 398791 - RNA, 32 nt, Homo Sapiens
augagcaaagauuuauuugcugaaguguuacu

SEQ ID NO: 398792 - RNA, 32 nt, Homo Sapiens
uauuagcugcauugccaucuucugggagcuug

SEQ ID NO: 398793 - RNA, 32 nt, Homo Sapiens
uguuagucucaaagguaaggaaggcauucacg

SEQ ID NO: 398794 - RNA, 32 nt, Homo Sapiens
cccacgaggccaaggccuccaaugcucaccga

SEQ ID NO: 398795 - RNA, 32 nt, Homo Sapiens
uccagcccuggccaagguucuccuauauggac

SEQ ID NO: 398796 - RNA, 32 nt, Homo Sapiens
ccuuggcugcucguagcgccgggccuucucuc

SEQ ID NO: 398797 - RNA, 32 nt, Homo Sapiens
ccagcccuuguguucccgugccccacacuuuc

SEQ ID NO: 398798 - RNA, 32 nt, Homo Sapiens
auaagugauauuacuauaacaucuaagcauca

SEQ ID NO: 398799 - RNA, 32 nt, Homo Sapiens
gucccauaagauuauacuacuacauuuuggcu

SEQ ID NO: 398800 - RNA, 32 nt, Homo Sapiens
ggcauccugauggcuuaauacacaucacucuu

SEQ ID NO: 398801 - RNA, 32 nt, Homo Sapiens
cccuggucugucucuugcuggcaccaagcugu

SEQ ID NO: 398802 - RNA, 32 nt, Homo Sapiens
gcauauacauauauauuuuuaaauaacauuuu

SEQ ID NO: 398803 - RNA, 32 nt, Homo Sapiens
ggaggccgccugcuagcaagguucccacguaa

SEQ ID NO: 398804 - RNA, 32 nt, Homo Sapiens
cgaagaccuuggcuagguggugagcuuggaag

SEQ ID NO: 398805 - RNA, 32 nt, Homo Sapiens
agaggaaaucacugaggccauaucuuuuuaca

SEQ ID NO: 398806 - RNA, 32 nt, Homo Sapiens
caacuuguuuuaaaguaugaauacauugugaa

SEQ ID NO: 398807 - RNA, 31 nt, Homo Sapiens
agcugcagaggccagugcagagccugggggc

SEQ ID NO: 398808 - RNA, 32 nt, Homo Sapiens
gcagcgcuccgggaaguccgguccgggcgaga

SEQ ID NO: 398809 - RNA, 32 nt, Homo Sapiens
uggcugagcauggcccucccagcccugggccu

SEQ ID NO: 398810 - RNA, 32 nt, Homo Sapiens
cuagaguagugcuuaugcugaaaugauacuuu

SEQ ID NO: 398811 - RNA, 32 nt, Homo Sapiens
uuucaucaguauaaguuuuaaauuuuacuuaa

SEQ ID NO: 398812 - RNA, 32 nt, Homo Sapiens
cuaauuuuucuuuugguauuuuuaguagaaau

SEQ ID NO: 398813 - RNA, 32 nt, Homo Sapiens
agagcauggccuagggugggcggcaccauugu

SEQ ID NO: 398814 - RNA, 32 nt, Homo Sapiens
caguuucuccaaggaugcccaaggccccaugg

SEQ ID NO: 398815 - RNA, 32 nt, Homo Sapiens
uggaauuguugcacggcaaccacuccucccau

SEQ ID NO: 398816 - RNA, 32 nt, Homo Sapiens
uacuguuaauuuuaucuaauaauuacagaguu

SEQ ID NO: 398817 - RNA, 32 nt, Homo Sapiens
gaggucguucagagccgugcccgccccggggc

SEQ ID NO: 398818 - RNA, 32 nt, Homo Sapiens
gaaucucuguggggcgaugcugcagcggcuga

SEQ ID NO: 398819 - RNA, 32 nt, Homo Sapiens
acccagggaggucgaugcugcagugagcuaug

SEQ ID NO: 398820 - RNA, 32 nt, Homo Sapiens
cuacuugggcaugcuugugaugagauaugaaa

SEQ ID NO: 398821 - RNA, 32 nt, Homo Sapiens
uuuuauguugaggaaaggaaaagggcauuugu

SEQ ID NO: 398822 - RNA, 32 nt, Homo Sapiens
aagggaaaauaaaggcaucuuuccaaguacuc

SEQ ID NO: 398823 - RNA, 32 nt, Homo Sapiens
cauacagacauuccccggagccggcugcugug

SEQ ID NO: 398824 - RNA, 31 nt, Homo Sapiens
auaccuuggaggagaaaguaacuucuaaaua

SEQ ID NO: 398825 - RNA, 32 nt, Homo Sapiens
ucaaaauugugucuucaaaauuucacaaguua

SEQ ID NO: 398826 - RNA, 32 nt, Homo Sapiens
auuuccugucuccucucgaacucuauuuuccu

SEQ ID NO: 398827 - RNA, 32 nt, Homo Sapiens
caaacacacauccugggagcaagccacuucau

SEQ ID NO: 398828 - RNA, 32 nt, Homo Sapiens
uguuugagguuugauuuaucuggaagcuuaaa

SEQ ID NO: 398829 - RNA, 32 nt, Homo Sapiens
cugcuugcaaggaaaggaucccaugugauaac

SEQ ID NO: 398830 - RNA, 32 nt, Homo Sapiens
acgcaggggacgggacgcagaggcgauucacg

SEQ ID NO: 398831 - RNA, 32 nt, Homo Sapiens
uuugaugcaaaaggaaaauaugcugaauaguu

SEQ ID NO: 398832 - RNA, 32 nt, Homo Sapiens
gagccagaguuuaaaagggaaccaacaaaaca

SEQ ID NO: 398833 - RNA, 32 nt, Homo Sapiens
ugagaaaggugauugguacagggugccuauuu

SEQ ID NO: 398834 - RNA, 32 nt, Homo Sapiens
cuuuacuuuccauacauagaaauauaaauuua

SEQ ID NO: 398835 - RNA, 32 nt, Homo Sapiens
ccagaugguggggacagacggcagagaaagag

SEQ ID NO: 398836 - RNA, 32 nt, Homo Sapiens
aaguugugcugacaccaaacacauccaguuua

SEQ ID NO: 398837 - RNA, 32 nt, Homo Sapiens
aguggugcagcugcggacucuggagcugccug

SEQ ID NO: 398838 - RNA, 32 nt, Homo Sapiens
aaucagaggcaacuaacacugcggcuuccuga

SEQ ID NO: 398839 - RNA, 32 nt, Homo Sapiens
gaggccagcuuggccaguggcuccgcaggcug

SEQ ID NO: 398840 - RNA, 32 nt, Homo Sapiens
uucgaagcugcuuuguuacagcagcuaugugu

SEQ ID NO: 398841 - RNA, 32 nt, Homo Sapiens
cuggcuggccccaggagccuuugguucaguaa

SEQ ID NO: 398842 - RNA, 32 nt, Homo Sapiens
cgaaaagccggggcgccugcgcugccgccgcc

SEQ ID NO: 398843 - RNA, 32 nt, Homo Sapiens
gcuuugcaggccgccagugucgacaugcugcu

SEQ ID NO: 398844 - RNA, 32 nt, Homo Sapiens
aacaguucaggagaagagaaggaauuugaaga

SEQ ID NO: 398845 - RNA, 32 nt, Homo Sapiens
gaguguguuucauuuguucuggugccaagaau

SEQ ID NO: 398846 - RNA, 32 nt, Homo Sapiens
gacuuguuaagaaugaaacuguaaccaaaauu

SEQ ID NO: 398847 - RNA, 32 nt, Homo Sapiens
gugcggcuccggagcucuguucucgcuccuga

SEQ ID NO: 398848 - RNA, 32 nt, Homo Sapiens
cucgagagccaugguggaccggggcccucugc

SEQ ID NO: 398849 - RNA, 32 nt, Homo Sapiens
gcaaguuuucuuuuuucuucuuaaauugcaau

SEQ ID NO: 398850 - RNA, 32 nt, Homo Sapiens
ugucauaaaaaaguaaacaggauauuuuauuu

SEQ ID NO: 398851 - RNA, 32 nt, Homo Sapiens
uggcacaaaugaaacaaucucucuaucaugau

SEQ ID NO: 398852 - RNA, 32 nt, Homo Sapiens
ugccuguccuucccucggcccugugugccuca

SEQ ID NO: 398853 - RNA, 32 nt, Homo Sapiens
caaacaccaaaaugguauuaaauauugaacuc

SEQ ID NO: 398854 - RNA, 32 nt, Homo Sapiens
cucaaggucuacagggauggaaguggcaccca

SEQ ID NO: 398855 - RNA, 32 nt, Homo Sapiens
gguaaccgcuccugggagcaguggggaaccgu

SEQ ID NO: 398856 - RNA, 32 nt, Homo Sapiens
uuauaaagauaaaaaauugguacacuccucaa

SEQ ID NO: 398857 - RNA, 32 nt, Homo Sapiens
uguguauuuucauuuuucaggguuucaaaugg

SEQ ID NO: 398858 - RNA, 32 nt, Homo Sapiens
cuggacucaggcaugucuauggcugccugucc

SEQ ID NO: 398859 - RNA, 32 nt, Homo Sapiens
guccgggaagcagaggccgccgccggccacag

SEQ ID NO: 398860 - RNA, 32 nt, Homo Sapiens
gagcaggaucccugggucuucccaguugagac

SEQ ID NO: 398861 - RNA, 32 nt, Homo Sapiens
ggacacagcucuucucuccuucucucuucucu

SEQ ID NO: 398862 - RNA, 30 nt, Homo Sapiens
ggcuggggcuccgugccguccagggccggg

SEQ ID NO: 398863 - RNA, 32 nt, Homo Sapiens
agagagcuucggggcgucugucuccgugcucu

SEQ ID NO: 398864 - RNA, 32 nt, Homo Sapiens
caaaucuagcuuugucugaaguuucuuuggaa

SEQ ID NO: 398865 - RNA, 32 nt, Homo Sapiens
ggccagccaaacugggaaccuaggugucuggg

SEQ ID NO: 398866 - RNA, 27 nt, Homo Sapiens
ucauggagccggggcuguggcuccuuu

SEQ ID NO: 398867 - RNA, 32 nt, Homo Sapiens
uguguucaauauauuucauuucuacugauaaa

SEQ ID NO: 398868 - RNA, 32 nt, Homo Sapiens
cuaaagucaacacuauacuguauguagacagg

SEQ ID NO: 398869 - RNA, 32 nt, Homo Sapiens
gugguacucuugccuuagauuuuacacacacu

SEQ ID NO: 398870 - RNA, 32 nt, Homo Sapiens
acuguuucaguuuaagauuaaucuccauuuuc

SEQ ID NO: 398871 - RNA, 32 nt, Homo Sapiens
gaaaguucugguguuuuugcuggugaagguuu

SEQ ID NO: 398872 - RNA, 32 nt, Homo Sapiens
aucuguacuuggaucauggaagcuuguaggga

SEQ ID NO: 398873 - RNA, 32 nt, Homo Sapiens
gcagcugggccccgcaggacaggccgcagcgg

SEQ ID NO: 398874 - RNA, 32 nt, Homo Sapiens
gacuacaaaauauuuuauuugcuuuaaauuug

SEQ ID NO: 398875 - RNA, 32 nt, Homo Sapiens
ccggagccgucucaggucccuggggggaacgg

SEQ ID NO: 398876 - RNA, 32 nt, Homo Sapiens
acagcuuuuaaagugucuucuaucucauugua

SEQ ID NO: 398877 - RNA, 32 nt, Homo Sapiens
cuuggucugagcucagcugaaugcagggaaga

SEQ ID NO: 398878 - RNA, 32 nt, Homo Sapiens
ugggaggcauguuuuauccuaucccucugcgu

SEQ ID NO: 398879 - RNA, 32 nt, Homo Sapiens
cccgcccacuuccaacuaccgccuccggccug

SEQ ID NO: 398880 - RNA, 32 nt, Homo Sapiens
aggccggcgcgcgacgcgggagggcgccgaua

SEQ ID NO: 398881 - RNA, 32 nt, Homo Sapiens
gcucagagaauacguacuucugucccagguca

SEQ ID NO: 398882 - RNA, 32 nt, Homo Sapiens
guggugcgggcacgccagggcuggggugcugc

SEQ ID NO: 398883 - RNA, 32 nt, Homo Sapiens
cacaccugggagagggauagaggagggagagc

SEQ ID NO: 398884 - RNA, 32 nt, Homo Sapiens
acugugauuuguucuccugguggagagagcug

SEQ ID NO: 398885 - RNA, 32 nt, Homo Sapiens
gauuauuaugauuuuggugguaacgauccccc

SEQ ID NO: 398886 - RNA, 32 nt, Homo Sapiens
cagaaacccacgggaaggaaccaguuccggac

SEQ ID NO: 398887 - RNA, 32 nt, Homo Sapiens
caaagaaguuaaaagagaagugucuguguggc

SEQ ID NO: 398888 - RNA, 32 nt, Homo Sapiens
ccucaaggccucuggagcaaccagcaccugcc

SEQ ID NO: 398889 - RNA, 31 nt, Homo Sapiens
agucccagagcacuccugccccuagccuggg

SEQ ID NO: 398890 - RNA, 32 nt, Homo Sapiens
auuaaccaacuggcaccaaggaauugccucca

SEQ ID NO: 398891 - RNA, 32 nt, Homo Sapiens
aaggugggugguggagacggcaccagauguac

SEQ ID NO: 398892 - RNA, 31 nt, Homo Sapiens
ucuuuuaaaaacagucacugaguuaauaaug

SEQ ID NO: 398893 - RNA, 32 nt, Homo Sapiens
gaccauucuacaagaauuguagaaagagcucu

SEQ ID NO: 398894 - RNA, 32 nt, Homo Sapiens
acggggccugggggaccuggggucuggugugc

SEQ ID NO: 398895 - RNA, 32 nt, Homo Sapiens
caucacugcacuccagccugggcgauggagca

SEQ ID NO: 398896 - RNA, 32 nt, Homo Sapiens
ucagcaccgcggagaccccccucgcccggccc

SEQ ID NO: 398897 - RNA, 28 nt, Homo Sapiens
uugauaacuguuuauauguguugaaaac

SEQ ID NO: 398898 - RNA, 32 nt, Homo Sapiens
auucagauuucucuuucuuuuauuauaggcau

SEQ ID NO: 398899 - RNA, 32 nt, Homo Sapiens
ggucgucgcgguuaagcccccggauaggggaa

SEQ ID NO: 398900 - RNA, 32 nt, Homo Sapiens
augauguuucuuuuucaauuuaaauaagcccu

SEQ ID NO: 398901 - RNA, 26 nt, Homo Sapiens
aaugcugucacucucacccauccucc

SEQ ID NO: 398902 - RNA, 32 nt, Homo Sapiens
augaguugcugugcuucaguguguguuuuuua

SEQ ID NO: 398903 - RNA, 32 nt, Homo Sapiens
gugucggacuggggagggauaugauggagagc

SEQ ID NO: 398904 - RNA, 32 nt, Homo Sapiens
gagguagacugaaauuuuuuuaauucauguuu

SEQ ID NO: 398905 - RNA, 32 nt, Homo Sapiens
uccgcuuauuucugccaguauauuuuggacac

SEQ ID NO: 398906 - RNA, 32 nt, Homo Sapiens
auugcugcuccuuagcugccaagccccauccu

SEQ ID NO: 398907 - RNA, 32 nt, Homo Sapiens
gccugcccaagcaugggcgccugaggcugccc

SEQ ID NO: 398908 - RNA, 32 nt, Homo Sapiens
uuuggcuugaguuaugagagaugcuuauuuau

SEQ ID NO: 398909 - RNA, 32 nt, Homo Sapiens
ccccgcgaggccaggugggcggugagaucaau

SEQ ID NO: 398910 - RNA, 32 nt, Homo Sapiens
uggucccaggcccucucccacccccgccccgc

SEQ ID NO: 398911 - RNA, 32 nt, Homo Sapiens
ucauauuuggauaaccuggaaaacacccaaac

SEQ ID NO: 398912 - RNA, 32 nt, Homo Sapiens
cgagggagaugagagacggcggcggccgcggc

SEQ ID NO: 398913 - RNA, 32 nt, Homo Sapiens
cacccugagcuuacagcaagccaggcauuggg

SEQ ID NO: 398914 - RNA, 32 nt, Homo Sapiens
cucccucccccuccuuccccaagagaggaaau

SEQ ID NO: 398915 - RNA, 32 nt, Homo Sapiens
cugaagcgccgggagccaugaagcugcaggac

SEQ ID NO: 398916 - RNA, 32 nt, Homo Sapiens
uuagcagcauggaagagaaguguaaccaugca

SEQ ID NO: 398917 - RNA, 32 nt, Homo Sapiens
uucccucucuacagaacaccucaucuuucaag

SEQ ID NO: 398918 - RNA, 32 nt, Homo Sapiens
uucuccuggggcuacccccaccccuuucuaau

SEQ ID NO: 398919 - RNA, 32 nt, Homo Sapiens
aguucuguggggcaggaaagcgggucucucau

SEQ ID NO: 398920 - RNA, 32 nt, Homo Sapiens
ccauguuuguagauggggcagaggaaucuaga

SEQ ID NO: 398921 - RNA, 32 nt, Homo Sapiens
gcgaggaaggcuuggcguggggacgcccgucg

SEQ ID NO: 398922 - RNA, 32 nt, Homo Sapiens
caaggucgcagacagccaaaagucaucagaag

SEQ ID NO: 398923 - RNA, 32 nt, Homo Sapiens
uccagggacaacgcugcugaaaaaaggccugg

SEQ ID NO: 398924 - RNA, 32 nt, Homo Sapiens
ucaguuuucaacauuuugugaauguugacuac

SEQ ID NO: 398925 - RNA, 32 nt, Homo Sapiens
aagcuucuguggugcgcccuggauugagaacc

SEQ ID NO: 398926 - RNA, 32 nt, Homo Sapiens
aguaguguucccaccuaggaguguuaggaagu

SEQ ID NO: 398927 - RNA, 32 nt, Homo Sapiens
acaacuggcccuugguucccaccacacugagg

SEQ ID NO: 398928 - RNA, 25 nt, Homo Sapiens
ccguaucaguuugaccacgggccuu

SEQ ID NO: 398929 - RNA, 32 nt, Homo Sapiens
aguuacuccaugauugugaacaaucucuugaa

SEQ ID NO: 398930 - RNA, 32 nt, Homo Sapiens
agggaggauaaaacuuucagaaugagcaaaac

SEQ ID NO: 398931 - RNA, 32 nt, Homo Sapiens
caauaugaugcugugcgagaaauauuuacagc

SEQ ID NO: 398932 - RNA, 32 nt, Homo Sapiens
accuuguccagcagccucuccuguuccuccug

SEQ ID NO: 398933 - RNA, 32 nt, Homo Sapiens
guguuagguugccaguuguaucaguguugauu

SEQ ID NO: 398934 - RNA, 32 nt, Homo Sapiens
aggcagugcuguucugcccaccuaccccucuc

SEQ ID NO: 398935 - RNA, 32 nt, Homo Sapiens
agcggagcgcgcccggccccauggacagcucg

SEQ ID NO: 398936 - RNA, 32 nt, Homo Sapiens
caugacugugugcacauacacacacacacacc

SEQ ID NO: 398937 - RNA, 32 nt, Homo Sapiens
ccaggcuggcccagcuuagccacacaugcgcc

SEQ ID NO: 398938 - RNA, 32 nt, Homo Sapiens
ggggcccccgucugcugcuggacaguaagucc

SEQ ID NO: 398939 - RNA, 32 nt, Homo Sapiens
cagugaggaggcuguccaccuugcuuggcuca

SEQ ID NO: 398940 - RNA, 32 nt, Homo Sapiens
aauugaucuuuaaauuuugagacaguauaagg

SEQ ID NO: 398941 - RNA, 32 nt, Homo Sapiens
ggccggagagcaggggacacggugcuagguuc

SEQ ID NO: 398942 - RNA, 32 nt, Homo Sapiens
gcucugcauaauuugucuucugcuacacauac

SEQ ID NO: 398943 - RNA, 32 nt, Homo Sapiens
cugguaacucgcgucccucgcgcuucuccggc

SEQ ID NO: 398944 - RNA, 32 nt, Homo Sapiens
aagguauaauuuaauaaacaaacaaauguacg

SEQ ID NO: 398945 - RNA, 32 nt, Homo Sapiens
uugccuuguguuagcuagcaauaagaaaagaa

SEQ ID NO: 398946 - RNA, 32 nt, Homo Sapiens
caguaaaacaaauucagauguuaacuggccug

SEQ ID NO: 398947 - RNA, 32 nt, Homo Sapiens
cccaguuccucucuccuucccugacccccacc

SEQ ID NO: 398948 - RNA, 32 nt, Homo Sapiens
ccucacugccccaccagccaccucuugggcau

SEQ ID NO: 398949 - RNA, 32 nt, Homo Sapiens
gaggcuguaagaagaggaacgcagcgggcgga

SEQ ID NO: 398950 - RNA, 32 nt, Homo Sapiens
uuuagaaaaguacauggacucuuaugauauug

SEQ ID NO: 398951 - RNA, 32 nt, Homo Sapiens
gcagggacaagaucuugggaucuaaauucagg

SEQ ID NO: 398952 - RNA, 32 nt, Homo Sapiens
ggcgcgcgggcgagcgguugugcuugugcuug

SEQ ID NO: 398953 - RNA, 32 nt, Homo Sapiens
caagagucugcugaugaggacaaccuaaaaga

SEQ ID NO: 398954 - RNA, 32 nt, Homo Sapiens
auacacaaaaucaacauggggauggagaagag

SEQ ID NO: 398955 - RNA, 32 nt, Homo Sapiens
gccaggccgccuggacgcccagcccuucagag

SEQ ID NO: 398956 - RNA, 32 nt, Homo Sapiens
cauagugucacagaagacaaagacugcaaaga

SEQ ID NO: 398957 - RNA, 32 nt, Homo Sapiens
gucugugguguuauagugguaacugcaguucc

SEQ ID NO: 398958 - RNA, 32 nt, Homo Sapiens
aaggaggcagaugaaauugauggagaaacaau

SEQ ID NO: 398959 - RNA, 32 nt, Homo Sapiens
aagcuauuucaggaaauauuuaaugaauuuuc

SEQ ID NO: 398960 - RNA, 32 nt, Homo Sapiens
agaggggcucugccauuaguuggacccugggu

SEQ ID NO: 398961 - RNA, 32 nt, Homo Sapiens
gagcuggguggcggccugccugggggcggggg

SEQ ID NO: 398962 - RNA, 32 nt, Homo Sapiens
ugugcacaugcgccagcauuccagcguccaac

SEQ ID NO: 398963 - RNA, 32 nt, Homo Sapiens
ggggcuaccgaggggcugugggcgcgcagcug

SEQ ID NO: 398964 - RNA, 32 nt, Homo Sapiens
aagggguggaaagugaauucuaucuugcaaug

SEQ ID NO: 398965 - RNA, 32 nt, Homo Sapiens
cuuguaaagcaucuuaugucauugagaauaua

SEQ ID NO: 398966 - RNA, 32 nt, Homo Sapiens
ggcuccccaaccccaggcucggacuguucucu

SEQ ID NO: 398967 - RNA, 32 nt, Homo Sapiens
ccaccaccaaaccaagggauuuauagcaaagg

SEQ ID NO: 398968 - RNA, 32 nt, Homo Sapiens
agcagaguuauuauuuuuuuuauacuccaggu

SEQ ID NO: 398969 - RNA, 30 nt, Homo Sapiens
cgucaggccugugcugagagccgcagcccc

SEQ ID NO: 398970 - RNA, 32 nt, Homo Sapiens
gaauguucuaguuccuagguccagcaagucac

SEQ ID NO: 398971 - RNA, 32 nt, Homo Sapiens
aguuaucuuuaaccccuaauaaaucucuauag

SEQ ID NO: 398972 - RNA, 32 nt, Homo Sapiens
ggagauauaguguacacacuuuuuaucacaga

SEQ ID NO: 398973 - RNA, 32 nt, Homo Sapiens
cuuaugugaacaugcgcugugugcugcuugcu

SEQ ID NO: 398974 - RNA, 32 nt, Homo Sapiens
uuugaaaucuccugucuuuuuaaacuuuuuca

SEQ ID NO: 398975 - RNA, 32 nt, Homo Sapiens
ccaauuccccuguggcagcuguauguguaguu

SEQ ID NO: 398976 - RNA, 32 nt, Homo Sapiens
cucugucugaagaaauuguguucaaaguguuc

SEQ ID NO: 398977 - RNA, 32 nt, Homo Sapiens
gccuaucuacacucacaugauauucuuauuca

SEQ ID NO: 398978 - RNA, 32 nt, Homo Sapiens
cccgcgggcccccuccaggagcuccgggcaag

SEQ ID NO: 398979 - RNA, 32 nt, Homo Sapiens
agagaacaucuuccagcugccuuuuucacacc

SEQ ID NO: 398980 - RNA, 32 nt, Homo Sapiens
uuaaaauaaauuacaggaauauuguuaugaag

SEQ ID NO: 398981 - RNA, 32 nt, Homo Sapiens
ggcuguggaucuuuguuacagcucuaggaaac

SEQ ID NO: 398982 - RNA, 30 nt, Homo Sapiens
ccggagcagucccugccgccgacaccgccg

SEQ ID NO: 398983 - RNA, 32 nt, Homo Sapiens
gcccaaggccccaugggccacuucucccaggg

SEQ ID NO: 398984 - RNA, 32 nt, Homo Sapiens
cugcccucgcucggcguccccggccagccaug

SEQ ID NO: 398985 - RNA, 32 nt, Homo Sapiens
gcucuauaacacaccuaguuaaguuuuauguu

SEQ ID NO: 398986 - RNA, 32 nt, Homo Sapiens
cucauccucauacccacccccacccaagggcc

SEQ ID NO: 398987 - RNA, 32 nt, Homo Sapiens
gcugcuggagggcauguuugugcccaaaacag

SEQ ID NO: 398988 - RNA, 32 nt, Homo Sapiens
cuagaugggcuuucuucgaaugugucagauca

SEQ ID NO: 398989 - RNA, 32 nt, Homo Sapiens
ggccuccuggggcaaugcuccucccucucggg

SEQ ID NO: 398990 - RNA, 32 nt, Homo Sapiens
ccugcucccacccuccucccagcagcagacac

SEQ ID NO: 398991 - RNA, 32 nt, Homo Sapiens
aaauuggcacugauggagcaucagcuguggcc

SEQ ID NO: 398992 - RNA, 32 nt, Homo Sapiens
ugucacacccaaagggaugcucugccaaaggu

SEQ ID NO: 398993 - RNA, 32 nt, Homo Sapiens
gcagcccccuuccccaggagcaaggaccaguu

SEQ ID NO: 398994 - RNA, 32 nt, Homo Sapiens
uuugaucugucauguuuaaacccccuacuucu

SEQ ID NO: 398995 - RNA, 32 nt, Homo Sapiens
ggccaggccugggugaucugcugcugagacgc

SEQ ID NO: 398996 - RNA, 32 nt, Homo Sapiens
cucuaccucccucuuuuacguggacucugcca

SEQ ID NO: 398997 - RNA, 32 nt, Homo Sapiens
ucaggcaauucuccugccccagccuccugauu

SEQ ID NO: 398998 - RNA, 32 nt, Homo Sapiens
uucuacuacguucaccaucucuaguaagaucu

SEQ ID NO: 398999 - RNA, 32 nt, Homo Sapiens
gguccuuggcccccuuucccgggcuguccacu

SEQ ID NO: 399000 - RNA, 32 nt, Homo Sapiens
cuggggugucauugcaccuagguccucuccau

SEQ ID NO: 399001 - RNA, 32 nt, Homo Sapiens
gccuacgcgggaacccaaccgcggcgaccgga

SEQ ID NO: 399002 - RNA, 32 nt, Homo Sapiens
ccaccugccuugcgugcuuuucuggguuuuga

SEQ ID NO: 399003 - RNA, 32 nt, Homo Sapiens
gcaccaagccccacagccaucaccccgggcca

SEQ ID NO: 399004 - RNA, 32 nt, Homo Sapiens
ggguuuuuguaucugaauuugcugucuugaac

SEQ ID NO: 399005 - RNA, 31 nt, Homo Sapiens
ucugcuugauucugggguucaguguagguca

SEQ ID NO: 399006 - RNA, 32 nt, Homo Sapiens
aaacugggggagaggaggccgccagcccggag

SEQ ID NO: 399007 - RNA, 32 nt, Homo Sapiens
aggccgcgcugggacaggugccgguacuacca

SEQ ID NO: 399008 - RNA, 32 nt, Homo Sapiens
uuagccagucaagcuuauucuacugggugucg

SEQ ID NO: 399009 - RNA, 32 nt, Homo Sapiens
auguauguccaacuuccacuuuuccacuucuc

SEQ ID NO: 399010 - RNA, 32 nt, Homo Sapiens
ccaccacuuguccaauaaaguacaucccagac

SEQ ID NO: 399011 - RNA, 32 nt, Homo Sapiens
uccccagcgggcaggcgggcggagccuguaua

SEQ ID NO: 399012 - RNA, 32 nt, Homo Sapiens
uaggguccauguuccuuggacgggaagagaca

SEQ ID NO: 399013 - RNA, 32 nt, Homo Sapiens
uaagggggacagccuuccccuugucagggcuu

SEQ ID NO: 399014 - RNA, 32 nt, Homo Sapiens
augagugaaugaaucaacgaaggagugaguca

SEQ ID NO: 399015 - RNA, 32 nt, Homo Sapiens
gcugcaggagguggagagguaccggcuucucc

SEQ ID NO: 399016 - RNA, 32 nt, Homo Sapiens
ugggguggcuugcaggauuggccuguuuccag

SEQ ID NO: 399017 - RNA, 32 nt, Homo Sapiens
gagggcugcuccaggagaagggccuccugcug

SEQ ID NO: 399018 - RNA, 32 nt, Homo Sapiens
cggcugcagaacuuugugcccauugaccuaga

SEQ ID NO: 399019 - RNA, 32 nt, Homo Sapiens
guuuucagaagacugugacaaguucuggccca

SEQ ID NO: 399020 - RNA, 32 nt, Homo Sapiens
augcaucuucuuccuucccuuuccucuugcug

SEQ ID NO: 399021 - RNA, 32 nt, Homo Sapiens
ugagcagaaguaccuggagcauaauucucuuc

SEQ ID NO: 399022 - RNA, 32 nt, Homo Sapiens
gagugccuggcgggcuccggcuuccgcguccg

SEQ ID NO: 399023 - RNA, 32 nt, Homo Sapiens
uugucucugcaccaucuuccuuuuguccucua

SEQ ID NO: 399024 - RNA, 32 nt, Homo Sapiens
cguggugauacagauagcaugugaggcaggca

SEQ ID NO: 399025 - RNA, 32 nt, Homo Sapiens
ucuccauggccacauggguccuggguguaugu

SEQ ID NO: 399026 - RNA, 32 nt, Homo Sapiens
acuucgccgagcucugcacgcgguggggcuac

SEQ ID NO: 399027 - RNA, 32 nt, Homo Sapiens
cgggagggcaggcuccggggcccgcagccucc

SEQ ID NO: 399028 - RNA, 32 nt, Homo Sapiens
auacaagauugucugccuguuuuucuuuguaa

SEQ ID NO: 399029 - RNA, 32 nt, Homo Sapiens
ggccaacaaccugugcccaggccagcuucgag

SEQ ID NO: 399030 - RNA, 32 nt, Homo Sapiens
cugugcgcuccucgaagcuggugggagccagg

SEQ ID NO: 399031 - RNA, 30 nt, Homo Sapiens
guaugcccuaugaccccccaucuuuccucc

SEQ ID NO: 399032 - RNA, 32 nt, Homo Sapiens
acguugaaacagaaacagaaggaugaaggaca

SEQ ID NO: 399033 - RNA, 32 nt, Homo Sapiens
auguggccuagauauuugauauucuaauugga

SEQ ID NO: 399034 - RNA, 32 nt, Homo Sapiens
aaguuuugaaagauagguauuuauuuuuucua

SEQ ID NO: 399035 - RNA, 32 nt, Homo Sapiens
uccucugaggcaaagcaaauggcuucacuuua

SEQ ID NO: 399036 - RNA, 32 nt, Homo Sapiens
gcccugggagcaccgcucugcagcgcggccgg

SEQ ID NO: 399037 - RNA, 32 nt, Homo Sapiens
uguucucccuccccaaguccuaucacuguauu

SEQ ID NO: 399038 - RNA, 32 nt, Homo Sapiens
gagcauaaccugccucucagaucgaggugugu

SEQ ID NO: 399039 - RNA, 32 nt, Homo Sapiens
cacccagaccgaccuugaccgcccaccuggca

SEQ ID NO: 399040 - RNA, 32 nt, Homo Sapiens
acagaaacuauaugcaaagaaaaaauaaaaau

SEQ ID NO: 399041 - RNA, 32 nt, Homo Sapiens
guuggagacauaggucuaggaugugugaaguu

SEQ ID NO: 399042 - RNA, 32 nt, Homo Sapiens
auuaugcugcuaauuauaucagcucugaggua

SEQ ID NO: 399043 - RNA, 32 nt, Homo Sapiens
uccaguuaugcccagcuccuuccuccuccucc

SEQ ID NO: 399044 - RNA, 32 nt, Homo Sapiens
cagccaguaaucaaaacagacugggaaugaau

SEQ ID NO: 399045 - RNA, 32 nt, Homo Sapiens
cuuuaaaugcagaggaaaaaacauaguugaca

SEQ ID NO: 399046 - RNA, 32 nt, Homo Sapiens
ugcucggugucccagucugucuccucgcugcc

SEQ ID NO: 399047 - RNA, 32 nt, Homo Sapiens
ccuuuauauauuccuuaaaauaggaauuccuc

SEQ ID NO: 399048 - RNA, 32 nt, Homo Sapiens
uggcucuauguaguucuaauuugcauuucucu

SEQ ID NO: 399049 - RNA, 31 nt, Homo Sapiens
gcuggcucacggagacacuucucuauggagc

SEQ ID NO: 399050 - RNA, 32 nt, Homo Sapiens
gucagcagccuggccuggucugugccugccca

SEQ ID NO: 399051 - RNA, 32 nt, Homo Sapiens
aaggagcucccgagucugaggacucacuugug

SEQ ID NO: 399052 - RNA, 32 nt, Homo Sapiens
uugaugggcugagguucccaccccuucacagu

SEQ ID NO: 399053 - RNA, 32 nt, Homo Sapiens
guacgauuggggauauaaugggcuucacuaac

SEQ ID NO: 399054 - RNA, 32 nt, Homo Sapiens
gaagagcugagcaaagagagaaaggagguagu

SEQ ID NO: 399055 - RNA, 32 nt, Homo Sapiens
gucucucuucugcucuccacucagauguggga

SEQ ID NO: 399056 - RNA, 32 nt, Homo Sapiens
ucuugccugcuucuugguuuccucuguucuca

SEQ ID NO: 399057 - RNA, 32 nt, Homo Sapiens
augaccagauaaauaauagauaugcacaugaa

SEQ ID NO: 399058 - RNA, 32 nt, Homo Sapiens
agacccuaugaaaaaauuaguugagaaagaag

SEQ ID NO: 399059 - RNA, 32 nt, Homo Sapiens
guauuauauauucauuuugcagaaucugcacc

SEQ ID NO: 399060 - RNA, 32 nt, Homo Sapiens
cccaccugucacuugcagcaucagaggguguu

SEQ ID NO: 399061 - RNA, 32 nt, Homo Sapiens
ggcggugaagucagccugaggauuuagcccag

SEQ ID NO: 399062 - RNA, 32 nt, Homo Sapiens
cacucaagaaccucaggagcgcugccagcuug

SEQ ID NO: 399063 - RNA, 32 nt, Homo Sapiens
ugcccucugaucccaugucauaugacaguacu

SEQ ID NO: 399064 - RNA, 32 nt, Homo Sapiens
cccaccuuaagccccaaauccggacccccucu

SEQ ID NO: 399065 - RNA, 32 nt, Homo Sapiens
ggcggccgaggguugggcccggcucccagccc

SEQ ID NO: 399066 - RNA, 32 nt, Homo Sapiens
cgcgaccccgaccgccagcaugaucgccgcgc

SEQ ID NO: 399067 - RNA, 32 nt, Homo Sapiens
uugcugccucacgguugcuguugcagacccag

SEQ ID NO: 399068 - RNA, 32 nt, Homo Sapiens
aagcugugaacagaguugugucugaggaaugu

SEQ ID NO: 399069 - RNA, 32 nt, Homo Sapiens
cccgccagcugcggcggcgcgucgggaagugc

SEQ ID NO: 399070 - RNA, 32 nt, Homo Sapiens
gccugccgcucucccgccgccgguccgggcag

SEQ ID NO: 399071 - RNA, 32 nt, Homo Sapiens
ggaucgcucgacggagugccucugguaguugg

SEQ ID NO: 399072 - RNA, 32 nt, Homo Sapiens
cucaggaguggaugcgaucugucucuccuggc

SEQ ID NO: 399073 - RNA, 29 nt, Homo Sapiens
ucaccuucguguuuuaaagaagccucaga

SEQ ID NO: 399074 - RNA, 32 nt, Homo Sapiens
gaagagcuuuuuccuugugaaugggccucuug

SEQ ID NO: 399075 - RNA, 32 nt, Homo Sapiens
cugcauacaauuuucuucugaauaacaaauga

SEQ ID NO: 399076 - RNA, 30 nt, Homo Sapiens
cgcccagugccacugccgccgcuuccucgc

SEQ ID NO: 399077 - RNA, 32 nt, Homo Sapiens
uguuacuuccccaccccuacauuuuuugaaau

SEQ ID NO: 399078 - RNA, 32 nt, Homo Sapiens
ccuugggaagcagaguaagcaagugaggagac

SEQ ID NO: 399079 - RNA, 32 nt, Homo Sapiens
uucaugacacugauaauguuugcaauaaaaau

SEQ ID NO: 399080 - RNA, 32 nt, Homo Sapiens
gauggaggauuggggagguggaugcugucuaa

SEQ ID NO: 399081 - RNA, 32 nt, Homo Sapiens
acuucauucucugaccuuucucucuccucauu

SEQ ID NO: 399082 - RNA, 32 nt, Homo Sapiens
gcuaccugucccagcuggcccugugccuccaa

SEQ ID NO: 399083 - RNA, 32 nt, Homo Sapiens
uuauacuuugcuguugaagaaacuacuaaucu

SEQ ID NO: 399084 - RNA, 32 nt, Homo Sapiens
gcccugggaaagggcaaccucccuuucacugc

SEQ ID NO: 399085 - RNA, 32 nt, Homo Sapiens
uaccaaugucuaggaagcuguggugugaaaau

SEQ ID NO: 399086 - RNA, 32 nt, Homo Sapiens
uaaaaugggaaucuucuugguauuuuaugugu

SEQ ID NO: 399087 - RNA, 32 nt, Homo Sapiens
ggccucuggaggcuacugaugaugccugcugu

SEQ ID NO: 399088 - RNA, 32 nt, Homo Sapiens
gcagggcgccgcguuucugccccgccagcgcc

SEQ ID NO: 399089 - RNA, 32 nt, Homo Sapiens
agaucaagacuacacggucuaugagcaauaau

SEQ ID NO: 399090 - RNA, 32 nt, Homo Sapiens
aaaacaauuaaggaaauacaauacuaagaaaa

SEQ ID NO: 399091 - RNA, 32 nt, Homo Sapiens
cuuuaccacugauuuaccauugccauaaagua

SEQ ID NO: 399092 - RNA, 32 nt, Homo Sapiens
cugccauguuuccaugugccauuucuuacccc

SEQ ID NO: 399093 - RNA, 32 nt, Homo Sapiens
gggaaggaaucgugcccgcgccgccccuggcc

SEQ ID NO: 399094 - RNA, 32 nt, Homo Sapiens
guuguuuucuuucagaguuuccuccuucaaaa

SEQ ID NO: 399095 - RNA, 32 nt, Homo Sapiens
uguacgagggaagagggaggcaggccucuauu

SEQ ID NO: 399096 - RNA, 32 nt, Homo Sapiens
uucuccuuucccuuaugccagguuccagucuu

SEQ ID NO: 399097 - RNA, 32 nt, Homo Sapiens
uuuuuugaauaaaucagaaauguuuguauugg

SEQ ID NO: 399098 - RNA, 32 nt, Homo Sapiens
ugguccaaggucaggcuccaguccucuugagc

SEQ ID NO: 399099 - RNA, 32 nt, Homo Sapiens
uuccccggacccugaugaccgcgcgugcuucu

SEQ ID NO: 399100 - RNA, 32 nt, Homo Sapiens
augcuauuuggaauguuuuaauuuggaaagca

SEQ ID NO: 399101 - RNA, 32 nt, Homo Sapiens
cugcccuugaacaucagacuccagguucuuca

SEQ ID NO: 399102 - RNA, 32 nt, Homo Sapiens
guuagugaggggugggggacacuggcaagguc

SEQ ID NO: 399103 - RNA, 32 nt, Homo Sapiens
uucagcguucaugggagaaauuccuugggaau

SEQ ID NO: 399104 - RNA, 32 nt, Homo Sapiens
uccacgggucaggggaucggagggggauugaa

SEQ ID NO: 399105 - RNA, 32 nt, Homo Sapiens
accugaaacuggguaauuuauaaaagagauuu

SEQ ID NO: 399106 - RNA, 32 nt, Homo Sapiens
aggucaugaguaacauuuuucuuaaugaaauc

SEQ ID NO: 399107 - RNA, 32 nt, Homo Sapiens
ggaguguggcuuccucaucuccaaucagcugc

SEQ ID NO: 399108 - RNA, 32 nt, Homo Sapiens
cgugcuuggccucagggcuggcagccggaucc

SEQ ID NO: 399109 - RNA, 32 nt, Homo Sapiens
cauaucauuuuucuucuucaauguguuaaaau

SEQ ID NO: 399110 - RNA, 32 nt, Homo Sapiens
ccuaaggacuuccacuuuguucaagaaagcug

SEQ ID NO: 399111 - RNA, 32 nt, Homo Sapiens
cuuucauauauucuaugaauaucaauugucag

SEQ ID NO: 399112 - RNA, 32 nt, Homo Sapiens
uacagaggaaaagaaaauaugggauauguaag

SEQ ID NO: 399113 - RNA, 30 nt, Homo Sapiens
cucggccguccugggccgccggacaccccc

SEQ ID NO: 399114 - RNA, 32 nt, Homo Sapiens
ucugggcaaccucgggcaguagugugccacac

SEQ ID NO: 399115 - RNA, 32 nt, Homo Sapiens
uuccgaaaggcaauuauaucuauuauguauaa

SEQ ID NO: 399116 - RNA, 32 nt, Homo Sapiens
auuuacugauuaaaaauaagaacugaccaaua

SEQ ID NO: 399117 - RNA, 30 nt, Homo Sapiens
gagagaggcggcggcggcgggcucccgcga

SEQ ID NO: 399118 - RNA, 32 nt, Homo Sapiens
gcccuuggcccgcugcagccccggcccuccac

SEQ ID NO: 399119 - RNA, 32 nt, Homo Sapiens
ucucacuuugaaccuucuuguuuacagauuuu

SEQ ID NO: 399120 - RNA, 32 nt, Homo Sapiens
ugaagacaaaaauuuuacaguuuaagacuuaa

SEQ ID NO: 399121 - RNA, 32 nt, Homo Sapiens
uuguaaacaauauauacagacuauacaagaau

SEQ ID NO: 399122 - RNA, 31 nt, Homo Sapiens
uuguuguugacucgaaauaaccaguuuucuu

SEQ ID NO: 399123 - RNA, 32 nt, Homo Sapiens
ugcuggguagagccuagguuguccuugggccg

SEQ ID NO: 399124 - RNA, 32 nt, Homo Sapiens
uacauagaaaucagccuaauacuccaugugug

SEQ ID NO: 399125 - RNA, 32 nt, Homo Sapiens
guggcaauauauugacucaggaucucaaagcu

SEQ ID NO: 399126 - RNA, 32 nt, Homo Sapiens
aauuuauaaaaauuaaguuugugaaugugacu

SEQ ID NO: 399127 - RNA, 32 nt, Homo Sapiens
gaagcccuguggggcugucaagagcguguucu

SEQ ID NO: 399128 - RNA, 32 nt, Homo Sapiens
uguggcagaauuaaauuucuaauugagcagau

SEQ ID NO: 399129 - RNA, 32 nt, Homo Sapiens
acagacaauuauaacucaagauaauauaacuu

SEQ ID NO: 399130 - RNA, 32 nt, Homo Sapiens
acagacacaucaccuaugcugcucuugugggg

SEQ ID NO: 399131 - RNA, 32 nt, Homo Sapiens
gagaaagcaaaguuuuagaauauuauguguca

SEQ ID NO: 399132 - RNA, 32 nt, Homo Sapiens
gaccccugccagcacacccugcagccaagggc

SEQ ID NO: 399133 - RNA, 32 nt, Homo Sapiens
aaggaaagcacacaucaccuugaaagagcuaa

SEQ ID NO: 399134 - RNA, 32 nt, Homo Sapiens
ccgccgcccggcccgcgcccaugcaggccauc

SEQ ID NO: 399135 - RNA, 32 nt, Homo Sapiens
guggcacgcggcugcggagccuugaagccgug

SEQ ID NO: 399136 - RNA, 32 nt, Homo Sapiens
auauuuuugaguuucaucaaaugaauguccuu

SEQ ID NO: 399137 - RNA, 32 nt, Homo Sapiens
agcugcgccccggcugcgcuccggauaccccc

SEQ ID NO: 399138 - RNA, 32 nt, Homo Sapiens
aagagagaguagacagaagaaggcgcugucug

SEQ ID NO: 399139 - RNA, 32 nt, Homo Sapiens
gguaaugaggcgauggaguuucaacuguuuua

SEQ ID NO: 399140 - RNA, 32 nt, Homo Sapiens
uagacccacacagccuuggagagaccuucaga

SEQ ID NO: 399141 - RNA, 32 nt, Homo Sapiens
aaguucagcaagaucagcaacaaaaccaagaa

SEQ ID NO: 399142 - RNA, 32 nt, Homo Sapiens
agcauggggcccagcugcagcugugcuuguuc

SEQ ID NO: 399143 - RNA, 32 nt, Homo Sapiens
uugcuguggaccauuguuaaagugacaggagu

SEQ ID NO: 399144 - RNA, 32 nt, Homo Sapiens
ucacacccgccgggccguuguucccgagacgu

SEQ ID NO: 399145 - RNA, 32 nt, Homo Sapiens
accaggggcgucccgcgccaccucugacucgg

SEQ ID NO: 399146 - RNA, 32 nt, Homo Sapiens
caucugaaaucucagcuggucacccaugauaa

SEQ ID NO: 399147 - RNA, 32 nt, Homo Sapiens
gagacaaugaauuaagggaaaaugacaaagaa

SEQ ID NO: 399148 - RNA, 32 nt, Homo Sapiens
cuguucacucuuuggguccacacugcuuuuau

SEQ ID NO: 399149 - RNA, 32 nt, Homo Sapiens
ggggcuuccccucccccaccugguugggguag

SEQ ID NO: 399150 - RNA, 32 nt, Homo Sapiens
accugguacacucugauuuuagauaaaguaag

SEQ ID NO: 399151 - RNA, 32 nt, Homo Sapiens
ggacguuggggcggccuggcucccucagguuu

SEQ ID NO: 399152 - RNA, 32 nt, Homo Sapiens
accuggaggcaagagggaggggacagaggccc

SEQ ID NO: 399153 - RNA, 32 nt, Homo Sapiens
gcuauaguucugucucgggugccauuugcuaa

SEQ ID NO: 399154 - RNA, 32 nt, Homo Sapiens
cacuguccauauucagucccagccccagugcg

SEQ ID NO: 399155 - RNA, 32 nt, Homo Sapiens
aguuugcuggaaccacaucaggccggcccucu

SEQ ID NO: 399156 - RNA, 32 nt, Homo Sapiens
augccugguaaaguccagccaaggcuggucaa

SEQ ID NO: 399157 - RNA, 32 nt, Homo Sapiens
gaaucugccuacugcccaugaacggggcccuc

SEQ ID NO: 399158 - RNA, 32 nt, Homo Sapiens
uccaaaauaugguuacaaauguuucacaagac

SEQ ID NO: 399159 - RNA, 32 nt, Homo Sapiens
ugagaggacaaaucucuagaacacuauugagu

SEQ ID NO: 399160 - RNA, 32 nt, Homo Sapiens
cucuucauuucccugucuucugcauaaucaug

SEQ ID NO: 399161 - RNA, 32 nt, Homo Sapiens
gagcggcugcgcuggcggccagcccgcccacc

SEQ ID NO: 399162 - RNA, 29 nt, Homo Sapiens
ucauguggcuaguguuugccgaaugaaac

SEQ ID NO: 399163 - RNA, 32 nt, Homo Sapiens
gcuuagguuauuugagguuuucguuuugaaua

SEQ ID NO: 399164 - RNA, 32 nt, Homo Sapiens
gugcccuguaucuauuggcagugaccuuggaa

SEQ ID NO: 399165 - RNA, 32 nt, Homo Sapiens
uggaggcaaggugcugcagagcccaggugcac

SEQ ID NO: 399166 - RNA, 32 nt, Homo Sapiens
cucuugcuauuucuuuuuuuuaguuagaggug

SEQ ID NO: 399167 - RNA, 32 nt, Homo Sapiens
agggccccgcccggcgcugcagcuccgccgac

SEQ ID NO: 399168 - RNA, 32 nt, Homo Sapiens
cuacuuccacugguacugaaauccaguauuuc

SEQ ID NO: 399169 - RNA, 32 nt, Homo Sapiens
aaugggucaggagaccgcugcuucugggcaua

SEQ ID NO: 399170 - RNA, 32 nt, Homo Sapiens
gccaccuccagaucagauggggacacacaacc

SEQ ID NO: 399171 - RNA, 32 nt, Homo Sapiens
uagcuccaggacuuuaaaauacuggaaaucug

SEQ ID NO: 399172 - RNA, 32 nt, Homo Sapiens
auucuaacagcauccucuguagugguauaugu

SEQ ID NO: 399173 - RNA, 32 nt, Homo Sapiens
agucugcauauauuaaagcaucaggacccuuc

SEQ ID NO: 399174 - RNA, 32 nt, Homo Sapiens
uccagcucaucucgccuggccucccccugagu

SEQ ID NO: 399175 - RNA, 32 nt, Homo Sapiens
guauacgagaagauggcagagaagaaccgcaa

SEQ ID NO: 399176 - RNA, 32 nt, Homo Sapiens
uaaaaauuaaaauucguuuuugcaauaaugac

SEQ ID NO: 399177 - RNA, 32 nt, Homo Sapiens
ggguggggcugggaccacagguggcuucucuc

SEQ ID NO: 399178 - RNA, 32 nt, Homo Sapiens
uugauggauguuuuauacuaaauaaaacccau

SEQ ID NO: 399179 - RNA, 32 nt, Homo Sapiens
uacuacacagaagcuucaaauuccucauguuu

SEQ ID NO: 399180 - RNA, 32 nt, Homo Sapiens
cuugcuccuuagccaggucuccagguccuccg

SEQ ID NO: 399181 - RNA, 32 nt, Homo Sapiens
acaguuuuuuaaaaaugugucaaaauaaagga

SEQ ID NO: 399182 - RNA, 32 nt, Homo Sapiens
aagguuauauuuuguuuuuuuaagagaauauc

SEQ ID NO: 399183 - RNA, 32 nt, Homo Sapiens
cauuuuuaaaagacaccucuuauagcaauaag

SEQ ID NO: 399184 - RNA, 32 nt, Homo Sapiens
agauccuugaguuuccugaguugaagggaauu

SEQ ID NO: 399185 - RNA, 32 nt, Homo Sapiens
ccuuuaccuccagggcugcugcugccugggua

SEQ ID NO: 399186 - RNA, 32 nt, Homo Sapiens
ucaggagugucugcacacugucucggaagcca

SEQ ID NO: 399187 - RNA, 32 nt, Homo Sapiens
uaccagccagaacgccaauuauagucagugcu

SEQ ID NO: 399188 - RNA, 32 nt, Homo Sapiens
uuuuauuuucccuucauguuuuaacuuauugu

SEQ ID NO: 399189 - RNA, 32 nt, Homo Sapiens
ccuggccccacuuugcccagaguuuggggucc

SEQ ID NO: 399190 - RNA, 32 nt, Homo Sapiens
acccuggacagugcggugggcgauggcccagg

SEQ ID NO: 399191 - RNA, 32 nt, Homo Sapiens
gugcacuacgugggaagugcugauuccacagc

SEQ ID NO: 399192 - RNA, 32 nt, Homo Sapiens
gcaccggcucugcugggcuccuggaugcucca

SEQ ID NO: 399193 - RNA, 32 nt, Homo Sapiens
auugaaguucucgagagugauauaaauacuuu

SEQ ID NO: 399194 - RNA, 32 nt, Homo Sapiens
aauauuuuuuaaagucuauuguuuguugugcu

SEQ ID NO: 399195 - RNA, 32 nt, Homo Sapiens
uuuccugguuuucagggaguugcauuuggucc

SEQ ID NO: 399196 - RNA, 32 nt, Homo Sapiens
cagcagaguccuccuauuuccuuccaccacca

SEQ ID NO: 399197 - RNA, 32 nt, Homo Sapiens
cuuccaacuacauaaauauauuucaauguauu

SEQ ID NO: 399198 - RNA, 32 nt, Homo Sapiens
ccuccaugcugucauuggguucgggggccuac

SEQ ID NO: 399199 - RNA, 31 nt, Homo Sapiens
accacaguguacuuugacagagccugggaag

SEQ ID NO: 399200 - RNA, 32 nt, Homo Sapiens
cacgcggcucugcacccgcgccgccggaccug

SEQ ID NO: 399201 - RNA, 32 nt, Homo Sapiens
ucccuuucuccucgguucugcaaucuauaggc

SEQ ID NO: 399202 - RNA, 32 nt, Homo Sapiens
ccagugugguggccacuagccaaacauggcca

SEQ ID NO: 399203 - RNA, 32 nt, Homo Sapiens
cauacuaugugauucaauaucuguaacuuucu

SEQ ID NO: 399204 - RNA, 32 nt, Homo Sapiens
guuuauaaaauauauauugacaugcauauuug

SEQ ID NO: 399205 - RNA, 32 nt, Homo Sapiens
uccauaaauuugauuuuugcuuugggugggcu

SEQ ID NO: 399206 - RNA, 32 nt, Homo Sapiens
gccgcguggaccgcgggcugggugcuggcggc

SEQ ID NO: 399207 - RNA, 32 nt, Homo Sapiens
aauugucccuggauaauucuuacuuugcuuuu

SEQ ID NO: 399208 - RNA, 32 nt, Homo Sapiens
cgccuucccugcaagacgagaauggggcuggg

SEQ ID NO: 399209 - RNA, 32 nt, Homo Sapiens
uacucaaaacaaaaugaaugcauguguccacg

SEQ ID NO: 399210 - RNA, 32 nt, Homo Sapiens
ccggugccgaggacggccccaggcauugcucu

SEQ ID NO: 399211 - RNA, 32 nt, Homo Sapiens
caucauauaugauauccuuacuugugccaugu

SEQ ID NO: 399212 - RNA, 32 nt, Homo Sapiens
aaucuauugccucucaucagucugaccaaauu

SEQ ID NO: 399213 - RNA, 32 nt, Homo Sapiens
cacgugauguggagggcacauuccuugccugc

SEQ ID NO: 399214 - RNA, 32 nt, Homo Sapiens
ccuguuuucugcuauaauucuuucucggucag

SEQ ID NO: 399215 - RNA, 32 nt, Homo Sapiens
ccuauggcagcuccucauuagauuaaaggaga

SEQ ID NO: 399216 - RNA, 32 nt, Homo Sapiens
guaaugcagugggagccaccuccagcugaaug

SEQ ID NO: 399217 - RNA, 32 nt, Homo Sapiens
ccgagcaaccguggcccuuccuggacagcugu

SEQ ID NO: 399218 - RNA, 31 nt, Homo Sapiens
uuuuauuaaagaaacuuuucccagaaaaaaa

SEQ ID NO: 399219 - RNA, 32 nt, Homo Sapiens
auuacaccacugauugcuuaugcugggcacaa

SEQ ID NO: 399220 - RNA, 32 nt, Homo Sapiens
aagugcccugugcugguugccaggcgcagagg

SEQ ID NO: 399221 - RNA, 32 nt, Homo Sapiens
caguacccugcacaaccccgcggccgucccga

SEQ ID NO: 399222 - RNA, 32 nt, Homo Sapiens
cuaauacuaugugggaaugcugauuuucuuuu

SEQ ID NO: 399223 - RNA, 32 nt, Homo Sapiens
guaaaacacacacacacacacacacacacaca

SEQ ID NO: 399224 - RNA, 32 nt, Homo Sapiens
cggcccgcccuggggaggcgcgcagcagaggc

SEQ ID NO: 399225 - RNA, 32 nt, Homo Sapiens
caaagugccucauaggcaaugcucagcuucuc

SEQ ID NO: 399226 - RNA, 32 nt, Homo Sapiens
guacccggggucugcagagcgccccgcgccgc

SEQ ID NO: 399227 - RNA, 32 nt, Homo Sapiens
ugacuucaaaaauaacugaucaggauagauua

SEQ ID NO: 399228 - RNA, 32 nt, Homo Sapiens
guagccccucaugcugggcucuggaccaugag

SEQ ID NO: 399229 - RNA, 32 nt, Homo Sapiens
cuuuccaccgacaggggcgagggcugcuuccu

SEQ ID NO: 399230 - RNA, 32 nt, Homo Sapiens
gaagcuauuaaacuauuuugugauggcguuua

SEQ ID NO: 399231 - RNA, 31 nt, Homo Sapiens
cggaggccgcaggccgcaggagugcuggugg

SEQ ID NO: 399232 - RNA, 32 nt, Homo Sapiens
ugcaauuccuuccaugucgccccagagugccc

SEQ ID NO: 399233 - RNA, 32 nt, Homo Sapiens
ucgccuuccgcggauucccagcuugagaaaca

SEQ ID NO: 399234 - RNA, 32 nt, Homo Sapiens
uuacuggccccgagaccucagcgucuugagca

SEQ ID NO: 399235 - RNA, 32 nt, Homo Sapiens
acuacagccugauugguccuccaggucagaac

SEQ ID NO: 399236 - RNA, 32 nt, Homo Sapiens
ccuguuucauuuuggguuuucuuccucuuccc

SEQ ID NO: 399237 - RNA, 32 nt, Homo Sapiens
uccagccucagucggacgggcgcggaggcgcu

SEQ ID NO: 399238 - RNA, 30 nt, Homo Sapiens
acaucucugagaaugggggaaauuuucuuu

SEQ ID NO: 399239 - RNA, 32 nt, Homo Sapiens
cuccuuucuuagaauccuccucuucuugggga

SEQ ID NO: 399240 - RNA, 32 nt, Homo Sapiens
caccugcuccagcucaagaaugugcggaucga

SEQ ID NO: 399241 - RNA, 32 nt, Homo Sapiens
guuguuaaaggcaauuucaccaaauucacaca

SEQ ID NO: 399242 - RNA, 32 nt, Homo Sapiens
gccuuucucuccugggcugucucuggucuggu

SEQ ID NO: 399243 - RNA, 32 nt, Homo Sapiens
ccaagggacauaccuuacauuuagcauguaga

SEQ ID NO: 399244 - RNA, 32 nt, Homo Sapiens
uaacuuguauaugcccuauaccucuugggcau

SEQ ID NO: 399245 - RNA, 32 nt, Homo Sapiens
gcgauaagaacaaagacugugccuaaaagugg

SEQ ID NO: 399246 - RNA, 31 nt, Homo Sapiens
ugauggagggcggugaagacguggacgcugu

SEQ ID NO: 399247 - RNA, 32 nt, Homo Sapiens
ucuugugucuuuggaggugcugcuuaauacca

SEQ ID NO: 399248 - RNA, 32 nt, Homo Sapiens
uacuguccuggcauagagagcacugcuuuguu

SEQ ID NO: 399249 - RNA, 32 nt, Homo Sapiens
ccucugaugauuacuacuauggaggacagugg

SEQ ID NO: 399250 - RNA, 32 nt, Homo Sapiens
cacauagagguucuuuucaaaggggcaucuua

SEQ ID NO: 399251 - RNA, 32 nt, Homo Sapiens
uuuacuaugacauaagguuauuguaacaggaa

SEQ ID NO: 399252 - RNA, 32 nt, Homo Sapiens
acgagguuccaaagcugaagacuuuguauaaa

SEQ ID NO: 399253 - RNA, 32 nt, Homo Sapiens
uggcggcuccgcggcgcacgcacgcgcugagc

SEQ ID NO: 399254 - RNA, 32 nt, Homo Sapiens
cugacauuuauguuuuccuguuuauauguugg

SEQ ID NO: 399255 - RNA, 32 nt, Homo Sapiens
ccaucccccacccacccaaggaauggugcugu

SEQ ID NO: 399256 - RNA, 32 nt, Homo Sapiens
caggcggagcugaacggagaggugaagcaggg

SEQ ID NO: 399257 - RNA, 32 nt, Homo Sapiens
uuugccagcccgacacacggaccuuuguaaag

SEQ ID NO: 399258 - RNA, 32 nt, Homo Sapiens
guggcuggcaggaagcccgcccugcccgcccg

SEQ ID NO: 399259 - RNA, 32 nt, Homo Sapiens
uuaguaacaaugcugcaucuagauuggagugc

SEQ ID NO: 399260 - RNA, 32 nt, Homo Sapiens
gaaguuccagagaugugucagcccuuaucagg

SEQ ID NO: 399261 - RNA, 32 nt, Homo Sapiens
uucugcccagggugggugggacugagcaggau

SEQ ID NO: 399262 - RNA, 32 nt, Homo Sapiens
aggucagucauuaugacuuauacuaauuccua

SEQ ID NO: 399263 - RNA, 30 nt, Homo Sapiens
aagugaauuaucccugcuggcuuucuuuuc

SEQ ID NO: 399264 - RNA, 32 nt, Homo Sapiens
gauaauauuuugagugugucagggccauucaa

SEQ ID NO: 399265 - RNA, 32 nt, Homo Sapiens
gaguuaggacaaagacuccugggacagcagcc

SEQ ID NO: 399266 - RNA, 32 nt, Homo Sapiens
uugaaugaugcuuuugaguuggcagcaggaca

SEQ ID NO: 399267 - RNA, 32 nt, Homo Sapiens
cgugcuuggagauaagaccuuuacagaguaac

SEQ ID NO: 399268 - RNA, 32 nt, Homo Sapiens
agagaugugccauaguuuaacuauucaccugu

SEQ ID NO: 399269 - RNA, 32 nt, Homo Sapiens
gccuguggaguugacuuuuuuauuauuauuau

SEQ ID NO: 399270 - RNA, 32 nt, Homo Sapiens
ucuccgcuacugagacacggcggguaggucca

SEQ ID NO: 399271 - RNA, 32 nt, Homo Sapiens
uuccucccgccgcccgcugcgccccgcaagcc

SEQ ID NO: 399272 - RNA, 32 nt, Homo Sapiens
aaccgcggcgccgcggcgcccggguguggauc

SEQ ID NO: 399273 - RNA, 32 nt, Homo Sapiens
aaggagugaaacaucauagaaacugucuagca

SEQ ID NO: 399274 - RNA, 32 nt, Homo Sapiens
cuguuuaggaagaucacuggccaggcggggug

SEQ ID NO: 399275 - RNA, 32 nt, Homo Sapiens
aggcuaagcgugcccacuggggccugugguca

SEQ ID NO: 399276 - RNA, 32 nt, Homo Sapiens
ggugcgcgccuguagcugggacuacaagagug

SEQ ID NO: 399277 - RNA, 32 nt, Homo Sapiens
ucccaggaauuacucuucaaagguacacucgg

SEQ ID NO: 399278 - RNA, 32 nt, Homo Sapiens
ucuuuucuuuugcaugcauuuuuccccuguuu

SEQ ID NO: 399279 - RNA, 32 nt, Homo Sapiens
cccugggcagauuggagagaagagggacgacu

SEQ ID NO: 399280 - RNA, 29 nt, Homo Sapiens
uucccaggacgucucauguuuggcccuuu

SEQ ID NO: 399281 - RNA, 32 nt, Homo Sapiens
uguacuuuacaaucaugccuacauuagugaga

SEQ ID NO: 399282 - RNA, 32 nt, Homo Sapiens
uaagcagaguuauuuguucccauccucucugu

SEQ ID NO: 399283 - RNA, 32 nt, Homo Sapiens
ggaagacaaaauuagcugcaauaaucacugcu

SEQ ID NO: 399284 - RNA, 32 nt, Homo Sapiens
gaacaaugagaacacauggacaaaggaagggg

SEQ ID NO: 399285 - RNA, 32 nt, Homo Sapiens
ggugaagagacaauucaagccuuagugacuau

SEQ ID NO: 399286 - RNA, 32 nt, Homo Sapiens
uccugugagcccaugcccggccccacucacac

SEQ ID NO: 399287 - RNA, 32 nt, Homo Sapiens
uccuuguacaagccaucaaggaggcaaaggag

SEQ ID NO: 399288 - RNA, 32 nt, Homo Sapiens
aaugagagggagggcagccuucugccaccugu

SEQ ID NO: 399289 - RNA, 32 nt, Homo Sapiens
aguaucccaggcugacaagggcuugcccuuua

SEQ ID NO: 399290 - RNA, 32 nt, Homo Sapiens
agugcugaagcagugcgcaacacccucagccu

SEQ ID NO: 399291 - RNA, 32 nt, Homo Sapiens
cuugcaugucauugucuaugacagcgucaaga

SEQ ID NO: 399292 - RNA, 32 nt, Homo Sapiens
ggagacccaagccccaugauguggacuugcuc

SEQ ID NO: 399293 - RNA, 32 nt, Homo Sapiens
agggccgaaggggaggugguguacauaggaac

SEQ ID NO: 399294 - RNA, 32 nt, Homo Sapiens
uuuccuuucucagauccucuuauucuaauuua

SEQ ID NO: 399295 - RNA, 32 nt, Homo Sapiens
cuuccucaccccagcccuccccacucccaggu

SEQ ID NO: 399296 - RNA, 32 nt, Homo Sapiens
uuuuuuguguccaauucuuuuaucaccaaaaa

SEQ ID NO: 399297 - RNA, 32 nt, Homo Sapiens
agggaccucacucuggccuugcugcuucucuc

SEQ ID NO: 399298 - RNA, 32 nt, Homo Sapiens
guggggcgaaacaaaaccggccauggcagcag

SEQ ID NO: 399299 - RNA, 32 nt, Homo Sapiens
gcuguucggcucagcugcacggcucggcucgg

SEQ ID NO: 399300 - RNA, 32 nt, Homo Sapiens
ucuaauugugaacuuuuaaauaaaauacuauu

SEQ ID NO: 399301 - RNA, 32 nt, Homo Sapiens
aaauucuccccuccccuaccccggaguuuacg

SEQ ID NO: 399302 - RNA, 32 nt, Homo Sapiens
gucucugaaacacaggaaauugagauggcaua

SEQ ID NO: 399303 - RNA, 27 nt, Homo Sapiens
ucggguuuuuucuucaguuaacaaaau

SEQ ID NO: 399304 - RNA, 32 nt, Homo Sapiens
gauguuguucagauuuacuuugaaagaaucaa

SEQ ID NO: 399305 - RNA, 32 nt, Homo Sapiens
gagguggaauccacccaguuuugucugcuagc

SEQ ID NO: 399306 - RNA, 32 nt, Homo Sapiens
ggcccaaggagaagagccugguccuggugaag

SEQ ID NO: 399307 - RNA, 32 nt, Homo Sapiens
acaaaaacugcagacaaacaaaaaagagaaaa

SEQ ID NO: 399308 - RNA, 32 nt, Homo Sapiens
uaguguuacuugccuuugacaccugugcauau

SEQ ID NO: 399309 - RNA, 32 nt, Homo Sapiens
agcugggggcagagggcggugccaagugccac

SEQ ID NO: 399310 - RNA, 32 nt, Homo Sapiens
uuuguuucauggcaacaaaacugaagauacac

SEQ ID NO: 399311 - RNA, 32 nt, Homo Sapiens
gcugaagugggaggaguguuugagcccaggag

SEQ ID NO: 399312 - RNA, 32 nt, Homo Sapiens
aacauuagguuuuucucuuuaagggaacauaa

SEQ ID NO: 399313 - RNA, 32 nt, Homo Sapiens
ccugcccugcaacucagcugcccgaccccagg

SEQ ID NO: 399314 - RNA, 32 nt, Homo Sapiens
agacuaacauuaacauuuaaauuaauauguua

SEQ ID NO: 399315 - RNA, 32 nt, Homo Sapiens
acuuggcucccuggcucccgggccccuucgag

SEQ ID NO: 399316 - RNA, 32 nt, Homo Sapiens
gccgugaggcugccuccccgggcccccugccu

SEQ ID NO: 399317 - RNA, 32 nt, Homo Sapiens
acugauuaggauucuuuuuuaauucauuugug

SEQ ID NO: 399318 - RNA, 32 nt, Homo Sapiens
ggggagcccgucuucugcugagugcugccgcc

SEQ ID NO: 399319 - RNA, 32 nt, Homo Sapiens
cugucuggcuccuggggcccaugcuuagagcc

SEQ ID NO: 399320 - RNA, 32 nt, Homo Sapiens
cucccaugcacaacucuccaaaacacuuaucc

SEQ ID NO: 399321 - RNA, 32 nt, Homo Sapiens
ucugcgcaagcgcgaccgaccgagcagcuccg

SEQ ID NO: 399322 - RNA, 32 nt, Homo Sapiens
ggaggcuggccccccuuuuuucugggcccuac

SEQ ID NO: 399323 - RNA, 32 nt, Homo Sapiens
ccugugaaugcauucagaacaugauuggaaug

SEQ ID NO: 399324 - RNA, 32 nt, Homo Sapiens
gcaauuggcgcaacgcuugcugccggguuugg

SEQ ID NO: 399325 - RNA, 32 nt, Homo Sapiens
ccuggacacacacacacagacacacacacuac

SEQ ID NO: 399326 - RNA, 32 nt, Homo Sapiens
ucucuaccggguccgcucuccuccgacacccc

SEQ ID NO: 399327 - RNA, 32 nt, Homo Sapiens
guucuuuccagagccccucccccgccccaccc

SEQ ID NO: 399328 - RNA, 32 nt, Homo Sapiens
uggacuucuguaaaacuucuuaauuuuaagua

SEQ ID NO: 399329 - RNA, 32 nt, Homo Sapiens
acuguaaaccagagcacuuaaaacagaaccuu

SEQ ID NO: 399330 - RNA, 32 nt, Homo Sapiens
aggagaacgauaagaaauggaaagacuccuug

SEQ ID NO: 399331 - RNA, 32 nt, Homo Sapiens
gguagaggggagagguagagguagccacgagc

SEQ ID NO: 399332 - RNA, 32 nt, Homo Sapiens
gucgcggcgccgcagcuagcgcagccagcccg

SEQ ID NO: 399333 - RNA, 32 nt, Homo Sapiens
gguccuucccgggccuggcgugucggagccac

SEQ ID NO: 399334 - RNA, 32 nt, Homo Sapiens
guaacugaagcuuuugggcucgggggacaggu

SEQ ID NO: 399335 - RNA, 32 nt, Homo Sapiens
ggccuccuuggggaagugcgaccgcugggaga

SEQ ID NO: 399336 - RNA, 32 nt, Homo Sapiens
cugggagggggaggaggaggagcucacacccu

SEQ ID NO: 399337 - RNA, 30 nt, Homo Sapiens
acaucagagaagcuguggggcugccugcca

SEQ ID NO: 399338 - RNA, 32 nt, Homo Sapiens
ccuucccgacagagcugccucucgguggccag

SEQ ID NO: 399339 - RNA, 32 nt, Homo Sapiens
acuuuaaacaaguagaaagauaauauuucucc

SEQ ID NO: 399340 - RNA, 32 nt, Homo Sapiens
ccucuucgcccggcuccuggugcuccccagcc

SEQ ID NO: 399341 - RNA, 32 nt, Homo Sapiens
caacgccacuaauuauuaaaauccaucugcuu

SEQ ID NO: 399342 - RNA, 32 nt, Homo Sapiens
uuagaguuuacuauuaauagauaguagccacu

SEQ ID NO: 399343 - RNA, 27 nt, Homo Sapiens
cuccaacucuucuucauccuccuagca

SEQ ID NO: 399344 - RNA, 32 nt, Homo Sapiens
ggcagggcggccugggcuucggccucccuccg

SEQ ID NO: 399345 - RNA, 32 nt, Homo Sapiens
aggguaguauauuauagucaucuguuaugcug

SEQ ID NO: 399346 - RNA, 32 nt, Homo Sapiens
uugccucuauuccagcuccuuaccacagcggu

SEQ ID NO: 399347 - RNA, 32 nt, Homo Sapiens
guuggauagaagagucagcaaaaaucaacaaa

SEQ ID NO: 399348 - RNA, 32 nt, Homo Sapiens
auauaaacaaacaaacaaaaauugcucaaaaa

SEQ ID NO: 399349 - RNA, 32 nt, Homo Sapiens
aguggcuuaugccuguaaucccagcacuuugg

SEQ ID NO: 399350 - RNA, 32 nt, Homo Sapiens
cuguaagaaauaaagagaagauauauuaguuu

SEQ ID NO: 399351 - RNA, 32 nt, Homo Sapiens
guguucaucuguuccgcuucucagcgguccau

SEQ ID NO: 399352 - RNA, 32 nt, Homo Sapiens
cugggagaggcacaaacuggacaucucucucu

SEQ ID NO: 399353 - RNA, 32 nt, Homo Sapiens
ggcagaaaggugaggagaaagcuccucuucuc

SEQ ID NO: 399354 - RNA, 32 nt, Homo Sapiens
gagagccuggaaagauucgaagugucacagag

SEQ ID NO: 399355 - RNA, 32 nt, Homo Sapiens
gacaacuaaaauacccauuuggaccaaaagcc

SEQ ID NO: 399356 - RNA, 32 nt, Homo Sapiens
uuaggaagguggccuuccugcuguuacaugca

SEQ ID NO: 399357 - RNA, 32 nt, Homo Sapiens
ucagccaaauuccauauguaaugccauuggga

SEQ ID NO: 399358 - RNA, 32 nt, Homo Sapiens
cauagcacauccagggcugagcaagaaauaau

SEQ ID NO: 399359 - RNA, 32 nt, Homo Sapiens
ggugggacgggaggcgggagggggcugguggu

SEQ ID NO: 399360 - RNA, 32 nt, Homo Sapiens
uuaauagagucaauuggaauuuuuagagcaua

SEQ ID NO: 399361 - RNA, 32 nt, Homo Sapiens
cagccaccucuaccacugccagcccucuucgg

SEQ ID NO: 399362 - RNA, 31 nt, Homo Sapiens
gauaaagugaauaaaaguacuuugaaaaacu

SEQ ID NO: 399363 - RNA, 32 nt, Homo Sapiens
aaugcaggccuacggagugggugcugggcaag

SEQ ID NO: 399364 - RNA, 32 nt, Homo Sapiens
ccuccuuccccucccugaaccccacaguccgc

SEQ ID NO: 399365 - RNA, 32 nt, Homo Sapiens
ugggggagcucgucgccgccgccggcggcuag

SEQ ID NO: 399366 - RNA, 32 nt, Homo Sapiens
cuucaccuccugaguucaagccauucuccuac

SEQ ID NO: 399367 - RNA, 32 nt, Homo Sapiens
uucgaugucuuuuguuucaucaucauugggca

SEQ ID NO: 399368 - RNA, 30 nt, Homo Sapiens
ucccaaccggugccgccgccggagcuucuc

SEQ ID NO: 399369 - RNA, 32 nt, Homo Sapiens
agaaaugauauuugccaaauuugaugaagugc

SEQ ID NO: 399370 - RNA, 32 nt, Homo Sapiens
aggaugccugacgagguguagccuuuuaucuu

SEQ ID NO: 399371 - RNA, 32 nt, Homo Sapiens
ugcaauuguccaggcgaugacaauggugaugg

SEQ ID NO: 399372 - RNA, 32 nt, Homo Sapiens
ugacugugacuguaaucauugcugaacaacau

SEQ ID NO: 399373 - RNA, 32 nt, Homo Sapiens
acaucucucugacaccaguguggagagguucu

SEQ ID NO: 399374 - RNA, 32 nt, Homo Sapiens
aguguuuaaaaauuaucuucgcuuuuuuaaug

SEQ ID NO: 399375 - RNA, 32 nt, Homo Sapiens
uucuugaacaacauacaaaguuuaaaguaacu

SEQ ID NO: 399376 - RNA, 32 nt, Homo Sapiens
acagcucugaauguauuugcaugggauugguc

SEQ ID NO: 399377 - RNA, 32 nt, Homo Sapiens
aagcggcaguguccugggagccucgaaagccg

SEQ ID NO: 399378 - RNA, 32 nt, Homo Sapiens
aauuagcauaguuauuuuuuuauucacauuua

SEQ ID NO: 399379 - RNA, 32 nt, Homo Sapiens
agaggcagaggguggggaagggcugggcaggg

SEQ ID NO: 399380 - RNA, 32 nt, Homo Sapiens
ccucugcccggcagcgccgcgcaccaugggcu

SEQ ID NO: 399381 - RNA, 32 nt, Homo Sapiens
gccccgggcccuggccggcgucagaccgagcu

SEQ ID NO: 399382 - RNA, 32 nt, Homo Sapiens
ccuccggucucacaagguccuguccaguugac

SEQ ID NO: 399383 - RNA, 32 nt, Homo Sapiens
cugaccccacccagagcaggagcuggcgggug

SEQ ID NO: 399384 - RNA, 32 nt, Homo Sapiens
uucugacacagucagcucccaaguagccccug

SEQ ID NO: 399385 - RNA, 32 nt, Homo Sapiens
aguggauggccccucuauccauccagguccca

SEQ ID NO: 399386 - RNA, 32 nt, Homo Sapiens
gggacgcuuagagauggggcgagggggaggcc

SEQ ID NO: 399387 - RNA, 32 nt, Homo Sapiens
ucacaagcuuggcauugacaugugcugcuagu

SEQ ID NO: 399388 - RNA, 32 nt, Homo Sapiens
caacccuccuucccgacccccucccccuagcc

SEQ ID NO: 399389 - RNA, 32 nt, Homo Sapiens
auacuaugucauuaaugaaugugacucuuaca

SEQ ID NO: 399390 - RNA, 32 nt, Homo Sapiens
aaaaaggaugcaaaauaaaaagcugccuaagg

SEQ ID NO: 399391 - RNA, 32 nt, Homo Sapiens
gcuuuuuacuguuagacuaaucaaaaauaacu

SEQ ID NO: 399392 - RNA, 32 nt, Homo Sapiens
ggggcaagccagggcccagagcccuuggcugu

SEQ ID NO: 399393 - RNA, 32 nt, Homo Sapiens
cacccaucccucugcccuccaccucuaccacu

SEQ ID NO: 399394 - RNA, 32 nt, Homo Sapiens
ucuggcccagugauuuggucucucccagcuuu

SEQ ID NO: 399395 - RNA, 32 nt, Homo Sapiens
aaaaacuagggucaaguucugcagaggcauug

SEQ ID NO: 399396 - RNA, 32 nt, Homo Sapiens
ucucucgccgccggcagaggcuccucgaagag

SEQ ID NO: 399397 - RNA, 32 nt, Homo Sapiens
aaccccaucucuacuaaaaauacgaaacuagg

SEQ ID NO: 399398 - RNA, 32 nt, Homo Sapiens
caggacuagaagaucaugaugcacuuagauaa

SEQ ID NO: 399399 - RNA, 32 nt, Homo Sapiens
acucaugggauuuguaaccagaugaaucauau

SEQ ID NO: 399400 - RNA, 32 nt, Homo Sapiens
ccagugcccuuggcuccuuucggagugugacc

SEQ ID NO: 399401 - RNA, 32 nt, Homo Sapiens
ccggccgccggcccagcggcccucccaaacuu

SEQ ID NO: 399402 - RNA, 32 nt, Homo Sapiens
uaaccuuggcugccgucucuggcuauagauaa

SEQ ID NO: 399403 - RNA, 32 nt, Homo Sapiens
cagcuauaaaagacauccagccaaacucucag

SEQ ID NO: 399404 - RNA, 32 nt, Homo Sapiens
guggggugggguggagucgcagaccagagcug

SEQ ID NO: 399405 - RNA, 32 nt, Homo Sapiens
ugcaugaagauaaagaggaagcuauucagacu

SEQ ID NO: 399406 - RNA, 32 nt, Homo Sapiens
aggcggugggaugcuuguagcuccucacagca

SEQ ID NO: 399407 - RNA, 32 nt, Homo Sapiens
caagaccccacauuuccaacuucugguugaug

SEQ ID NO: 399408 - RNA, 32 nt, Homo Sapiens
acuacaccugcuucugguccuguccacauuuu

SEQ ID NO: 399409 - RNA, 32 nt, Homo Sapiens
ggcgcggcgguaccucacgguggugaagguca

SEQ ID NO: 399410 - RNA, 32 nt, Homo Sapiens
acaucuugacuuguaaucaauuaugaauauuu

SEQ ID NO: 399411 - RNA, 32 nt, Homo Sapiens
ggcgaaugccucucccuccccccacaugcacg

SEQ ID NO: 399412 - RNA, 32 nt, Homo Sapiens
gugugcagacucccaacgccagagcaaaggca

SEQ ID NO: 399413 - RNA, 32 nt, Homo Sapiens
agacucaauauuuacucauuccuucaugaaau

SEQ ID NO: 399414 - RNA, 32 nt, Homo Sapiens
uguauguauuuccaccugaggagaaggccugg

SEQ ID NO: 399415 - RNA, 32 nt, Homo Sapiens
cugcuguacugauaggauuuaguuguguuuua

SEQ ID NO: 399416 - RNA, 32 nt, Homo Sapiens
cucugugacucaggagcagggaucucaggcag

SEQ ID NO: 399417 - RNA, 32 nt, Homo Sapiens
gcacaguggcucaugccuauaauccuagcacu

SEQ ID NO: 399418 - RNA, 30 nt, Homo Sapiens
uuuguuuaguaauagggggaaaaugucaau

SEQ ID NO: 399419 - RNA, 32 nt, Homo Sapiens
cugugcccgggguggggcgugucggcugcuac

SEQ ID NO: 399420 - RNA, 32 nt, Homo Sapiens
gcccccucccccagccuggccuggcucuggcc

SEQ ID NO: 399421 - RNA, 32 nt, Homo Sapiens
ggauuuucaaccagauaacauaccuuuccugc

SEQ ID NO: 399422 - RNA, 32 nt, Homo Sapiens
ccaaagcucccucucuucccacccuggcugca

SEQ ID NO: 399423 - RNA, 32 nt, Homo Sapiens
auguuagaaucaauuugcugaguaugaaauaa

SEQ ID NO: 399424 - RNA, 32 nt, Homo Sapiens
aaguagggaauuuuuaaaaauuauuaaaccac

SEQ ID NO: 399425 - RNA, 32 nt, Homo Sapiens
auuacaccugcuguacacacacuuccucauca

SEQ ID NO: 399426 - RNA, 32 nt, Homo Sapiens
uacauagagucuuguauugucuguguacccag

SEQ ID NO: 399427 - RNA, 32 nt, Homo Sapiens
ugucuggggguucccauucccacacaugugcc

SEQ ID NO: 399428 - RNA, 32 nt, Homo Sapiens
ugagccucaggagcuucccccucccccuuugc

SEQ ID NO: 399429 - RNA, 32 nt, Homo Sapiens
caaauuguuuugauucugaaaaaucauucaac

SEQ ID NO: 399430 - RNA, 32 nt, Homo Sapiens
gcagcagggcgaggccaugcgcugcccccagu

SEQ ID NO: 399431 - RNA, 32 nt, Homo Sapiens
caacguaaauagagcauuuucuuaaucaaaug

SEQ ID NO: 399432 - RNA, 32 nt, Homo Sapiens
gaaacucuaugucuucaacuuucagacccccc

SEQ ID NO: 399433 - RNA, 32 nt, Homo Sapiens
cuagaggccccggcggugaagcgccauacggg

SEQ ID NO: 399434 - RNA, 32 nt, Homo Sapiens
ucggagccgcucucugcagagccagagggcag

SEQ ID NO: 399435 - RNA, 32 nt, Homo Sapiens
cucuuggauuuuuugaaauaaucuucagagga

SEQ ID NO: 399436 - RNA, 32 nt, Homo Sapiens
agggggcugggccacccccuccccucugugca

SEQ ID NO: 399437 - RNA, 32 nt, Homo Sapiens
gaugaaugugccaagcaaaaccacaacugugu

SEQ ID NO: 399438 - RNA, 32 nt, Homo Sapiens
uuaaggacaaggaaaccucugagucuaccuaa

SEQ ID NO: 399439 - RNA, 32 nt, Homo Sapiens
auggggcagguggcugguguuggugucccagc

SEQ ID NO: 399440 - RNA, 32 nt, Homo Sapiens
augguucagaacccagagaggacccuggugcu

SEQ ID NO: 399441 - RNA, 32 nt, Homo Sapiens
uauuuuaacaguuuuucuuauuuauaggaugu

SEQ ID NO: 399442 - RNA, 32 nt, Homo Sapiens
ugggcccucuucugcccuucaugucucuaucc

SEQ ID NO: 399443 - RNA, 32 nt, Homo Sapiens
uucguucugucgcaguacuguuuaauaugagu

SEQ ID NO: 399444 - RNA, 32 nt, Homo Sapiens
cauagcaagguucacuccagccgugcuuucug

SEQ ID NO: 399445 - RNA, 32 nt, Homo Sapiens
gcuggcaccuagaaugaaguuacucuauuacu

SEQ ID NO: 399446 - RNA, 32 nt, Homo Sapiens
ugacagcagaaaggugaugacagaggaaagag

SEQ ID NO: 399447 - RNA, 32 nt, Homo Sapiens
acucugggcuccugcugccugggccccgauuc

SEQ ID NO: 399448 - RNA, 32 nt, Homo Sapiens
guauuagcagugccugggaccuccucaacaac

SEQ ID NO: 399449 - RNA, 32 nt, Homo Sapiens
uggcucccgggacacauagaaaccuguaggaa

SEQ ID NO: 399450 - RNA, 32 nt, Homo Sapiens
cugucuuuuuaaaaucauguauuuaauguguc

SEQ ID NO: 399451 - RNA, 32 nt, Homo Sapiens
gaugaacccacauuuuaaaaguucuugucugc

SEQ ID NO: 399452 - RNA, 32 nt, Homo Sapiens
uauaggcaugcgccaccaugcccggccggcuu

SEQ ID NO: 399453 - RNA, 32 nt, Homo Sapiens
gaaggcccagucccuccucugcucuccucaaa

SEQ ID NO: 399454 - RNA, 32 nt, Homo Sapiens
gaggagcuggaggagggcaggggcugagggag

SEQ ID NO: 399455 - RNA, 30 nt, Homo Sapiens
aaagccauuaguugcuauucucuuagggca

SEQ ID NO: 399456 - RNA, 32 nt, Homo Sapiens
gccgcagccgcagggaggggcgcgucccagac

SEQ ID NO: 399457 - RNA, 32 nt, Homo Sapiens
ccugcaggaugagugaagacguuugccucuca

SEQ ID NO: 399458 - RNA, 32 nt, Homo Sapiens
guucuugacaguuuuuuggacuauagaccuuu

SEQ ID NO: 399459 - RNA, 32 nt, Homo Sapiens
uuuuucugccuucuaacuuauagacucaacua

SEQ ID NO: 399460 - RNA, 31 nt, Homo Sapiens
ugcaucuauugagauaauucauguuguguuu

SEQ ID NO: 399461 - RNA, 32 nt, Homo Sapiens
auggucaguaccagcccuuguccucugccugu

SEQ ID NO: 399462 - RNA, 32 nt, Homo Sapiens
gcuuuaaaaaauaaauaagaaacaacucuuug

SEQ ID NO: 399463 - RNA, 32 nt, Homo Sapiens
uguguugggguggggggacugcaggucaggaa

SEQ ID NO: 399464 - RNA, 32 nt, Homo Sapiens
gccaggccugcagcugggccagugcccaggag

SEQ ID NO: 399465 - RNA, 32 nt, Homo Sapiens
cccugaggcugcugggcccacccucccggaac

SEQ ID NO: 399466 - RNA, 25 nt, Homo Sapiens
augcugguccgcaggggcgcgcgcg

SEQ ID NO: 399467 - RNA, 32 nt, Homo Sapiens
ucucagcuauuaaagauauauacaguuguaca

SEQ ID NO: 399468 - RNA, 32 nt, Homo Sapiens
acugauggaccagugguuuccagucaugagcg

SEQ ID NO: 399469 - RNA, 32 nt, Homo Sapiens
cuaauucugcuuauuuuagaguauuuuucauu

SEQ ID NO: 399470 - RNA, 32 nt, Homo Sapiens
gccaugaucuucuguccucuggguccccacaa

SEQ ID NO: 399471 - RNA, 32 nt, Homo Sapiens
ccuaccugcaacuuauacaccuggcuuugggg

SEQ ID NO: 399472 - RNA, 32 nt, Homo Sapiens
auauaggagaggaaaaguaaggugcaguuccc

SEQ ID NO: 399473 - RNA, 32 nt, Homo Sapiens
ugagcuuuacuuuuaaauuuuauacauaugua

SEQ ID NO: 399474 - RNA, 32 nt, Homo Sapiens
aagacugugacaucagaaguaacucccacucc

SEQ ID NO: 399475 - RNA, 32 nt, Homo Sapiens
ugcaagugaaaguguguuguguguacauuuau

SEQ ID NO: 399476 - RNA, 32 nt, Homo Sapiens
cucgcuagcagcuugggacauuagcgccgaga

SEQ ID NO: 399477 - RNA, 32 nt, Homo Sapiens
agagggcucaccccgggugcugcucugugcuc

SEQ ID NO: 399478 - RNA, 32 nt, Homo Sapiens
gagcuccgggcuccuccacccgccccccaccc

SEQ ID NO: 399479 - RNA, 32 nt, Homo Sapiens
uaucauaucugccuuuguauuaaaccuauugg

SEQ ID NO: 399480 - RNA, 32 nt, Homo Sapiens
auugcgcuuaaacuaugggaagcggcaccucc

SEQ ID NO: 399481 - RNA, 32 nt, Homo Sapiens
uaaaaacauuuuaaaaaauguuuuguaaaucc

SEQ ID NO: 399482 - RNA, 32 nt, Homo Sapiens
agauggucuucagaguugucuuuauaugugaa

SEQ ID NO: 399483 - RNA, 32 nt, Homo Sapiens
acaaaauaaguaagauguuaauuuagaaauuu

SEQ ID NO: 399484 - RNA, 32 nt, Homo Sapiens
accccggucucaugcuccuuaauggcgccaug

SEQ ID NO: 399485 - RNA, 32 nt, Homo Sapiens
gucccagcuccgccugccuuuccuccuucugg

SEQ ID NO: 399486 - RNA, 32 nt, Homo Sapiens
gacaagguguugcauucucacccaggcuggac

SEQ ID NO: 399487 - RNA, 32 nt, Homo Sapiens
uuucuuuucuauggagcaaaacaaagcugauu

SEQ ID NO: 399488 - RNA, 32 nt, Homo Sapiens
aagacucgccccacccaccacugcccagcacc

SEQ ID NO: 399489 - RNA, 32 nt, Homo Sapiens
uucucugcaauaaacucaaaucacaugucugc

SEQ ID NO: 399490 - RNA, 32 nt, Homo Sapiens
uaguucuaaguacacagugauguccucuguag

SEQ ID NO: 399491 - RNA, 32 nt, Homo Sapiens
aaauaaaaaguacaaagggcacauauacguga

SEQ ID NO: 399492 - RNA, 32 nt, Homo Sapiens
uugauccauacaacccagccagcugucagaag

SEQ ID NO: 399493 - RNA, 32 nt, Homo Sapiens
ggggaggaggaucuacugcuguacagcuaaua

SEQ ID NO: 399494 - RNA, 32 nt, Homo Sapiens
uucauggagaagaaccugcagauucuuccauc

SEQ ID NO: 399495 - RNA, 32 nt, Homo Sapiens
acuccuuaauacuagauugaucuaagggggaa

SEQ ID NO: 399496 - RNA, 32 nt, Homo Sapiens
aaagauuugaaccuguaaaugugugugccuuu

SEQ ID NO: 399497 - RNA, 32 nt, Homo Sapiens
cuuauuuaucuaaagggcugaauuuaggagac

SEQ ID NO: 399498 - RNA, 32 nt, Homo Sapiens
gcacacgcgcuuucucacgggcuugauuccug

SEQ ID NO: 399499 - RNA, 32 nt, Homo Sapiens
ugggugcuaauagaaaauuaaaaaguguuugc

SEQ ID NO: 399500 - RNA, 32 nt, Homo Sapiens
uuaggaauuucugauucauuuaaaggauuuac

SEQ ID NO: 399501 - RNA, 32 nt, Homo Sapiens
aauaaugcagcuauuuaagaugauguuuuuaa

SEQ ID NO: 399502 - RNA, 32 nt, Homo Sapiens
gaagaaaacaauuuuuuaaaaauucucauuac

SEQ ID NO: 399503 - RNA, 32 nt, Homo Sapiens
caggccguggcugaggguaugugagccaugcc

SEQ ID NO: 399504 - RNA, 32 nt, Homo Sapiens
acauaaucacuucugaaagaugccuuugucac

SEQ ID NO: 399505 - RNA, 32 nt, Homo Sapiens
ggcugcguuccccucccuguccugccaguuga

SEQ ID NO: 399506 - RNA, 32 nt, Homo Sapiens
uaccuuuucuucaugcugguauuuuuucaaua

SEQ ID NO: 399507 - RNA, 32 nt, Homo Sapiens
cugccaucaaggaagacagcacaggacuggga

SEQ ID NO: 399508 - RNA, 32 nt, Homo Sapiens
uuuuuauaaaaaguuaugcaaaugacuuuuau

SEQ ID NO: 399509 - RNA, 32 nt, Homo Sapiens
caccuguaaucccagcacuuuggggggcugag

SEQ ID NO: 399510 - RNA, 32 nt, Homo Sapiens
cgggcccuggggauuggggagcccucuuguuc

SEQ ID NO: 399511 - RNA, 32 nt, Homo Sapiens
accgccucuucgggcucuggcacuucugcacc

SEQ ID NO: 399512 - RNA, 32 nt, Homo Sapiens
caaguugucccccaaggccaucacaaagcagu

SEQ ID NO: 399513 - RNA, 32 nt, Homo Sapiens
guguuguacaguguuuugggcaugcacgugau

SEQ ID NO: 399514 - RNA, 32 nt, Homo Sapiens
uacugugguaggugcugucuaagcguucguua

SEQ ID NO: 399515 - RNA, 32 nt, Homo Sapiens
uugaccucucugaaagugaauuucuguaaaag

SEQ ID NO: 399516 - RNA, 32 nt, Homo Sapiens
aaacagauacuaguuaacugcccccaccucug

SEQ ID NO: 399517 - RNA, 32 nt, Homo Sapiens
ugggcagagcagagaccaucccugaaggcccc

SEQ ID NO: 399518 - RNA, 32 nt, Homo Sapiens
ggggagguggggccaggcccccugccccgcuc

SEQ ID NO: 399519 - RNA, 32 nt, Homo Sapiens
aucaccuuuacauggagcacaaagaugaugau

SEQ ID NO: 399520 - RNA, 32 nt, Homo Sapiens
ccucuugagauccccuuccucaccugccaauc

SEQ ID NO: 399521 - RNA, 32 nt, Homo Sapiens
agcgucucuucuaccaucuggauggucaggga

SEQ ID NO: 399522 - RNA, 32 nt, Homo Sapiens
ggucuuacuccagcccuuccuggguguuaacu

SEQ ID NO: 399523 - RNA, 32 nt, Homo Sapiens
ugacuucgaucugaucagcaaacaagaaaauu

SEQ ID NO: 399524 - RNA, 32 nt, Homo Sapiens
ccacccaacaaucagagacaugucugguggag

SEQ ID NO: 399525 - RNA, 32 nt, Homo Sapiens
ugggaauauucucugaugcucugacucaccuc

SEQ ID NO: 399526 - RNA, 32 nt, Homo Sapiens
auaggauuugaaagcuguuagagaauuuagcu

SEQ ID NO: 399527 - RNA, 32 nt, Homo Sapiens
uuccgaaagcuaccagcacugcacugugagac

SEQ ID NO: 399528 - RNA, 32 nt, Homo Sapiens
ccaccuggaaaacagccuggaccugcaccuuu

SEQ ID NO: 399529 - RNA, 32 nt, Homo Sapiens
aucagggaggacgggacuuaugcugugguagg

SEQ ID NO: 399530 - RNA, 32 nt, Homo Sapiens
aucagugaaaaaaucuaauguuucaaauguaa

SEQ ID NO: 399531 - RNA, 32 nt, Homo Sapiens
gccccugcccccgaggcuucugugggugcaga

SEQ ID NO: 399532 - RNA, 32 nt, Homo Sapiens
cuccuccuggggcccucagggaucucaugaag

SEQ ID NO: 399533 - RNA, 32 nt, Homo Sapiens
gcuggacagguguuguauauagaguggaaucu

SEQ ID NO: 399534 - RNA, 32 nt, Homo Sapiens
ccaggcccucucuauuugagacugugcccgcc

SEQ ID NO: 399535 - RNA, 32 nt, Homo Sapiens
uuguguucugaacauaaguucuuugucacaua

SEQ ID NO: 399536 - RNA, 32 nt, Homo Sapiens
uguuagauauaaaauuaaaucgaauuuuguug

SEQ ID NO: 399537 - RNA, 29 nt, Homo Sapiens
ggcagagggagucagaggacucugcaucc

SEQ ID NO: 399538 - RNA, 32 nt, Homo Sapiens
cagcacagcacacagcagcacccuuccccuga

SEQ ID NO: 399539 - RNA, 32 nt, Homo Sapiens
gauaccagacugcggcuucugggccacaugcu

SEQ ID NO: 399540 - RNA, 32 nt, Homo Sapiens
uccaccuguggccuuguccagucuguagaguu

SEQ ID NO: 399541 - RNA, 32 nt, Homo Sapiens
gcccccuggggaagccgucagaggucagcagc

SEQ ID NO: 399542 - RNA, 32 nt, Homo Sapiens
uuacugauuucaauguuaaucuauuucaagag

SEQ ID NO: 399543 - RNA, 32 nt, Homo Sapiens
auagcccaaacgcagaagcacugagcaagaga

SEQ ID NO: 399544 - RNA, 32 nt, Homo Sapiens
guaccugucuauaaggaguccugcuuaucaca

SEQ ID NO: 399545 - RNA, 32 nt, Homo Sapiens
ugugacauaguuuuuuuuuuuaauauguggaa

SEQ ID NO: 399546 - RNA, 32 nt, Homo Sapiens
aaaguugaugaacacauuaauccguuaaguaa

SEQ ID NO: 399547 - RNA, 32 nt, Homo Sapiens
aaauauagacauauuucuuuugcuuucuuaaa

SEQ ID NO: 399548 - RNA, 32 nt, Homo Sapiens
gccuaugaggcacuuaaaaugcagcuuuuccg

SEQ ID NO: 399549 - RNA, 32 nt, Homo Sapiens
aggcccucgcugccagcucuguaucaggaccc

SEQ ID NO: 399550 - RNA, 32 nt, Homo Sapiens
gcagcagccagaccucaggggggcguggauac

SEQ ID NO: 399551 - RNA, 32 nt, Homo Sapiens
aaaauggggaagggcugaaagaauuuccuuag

SEQ ID NO: 399552 - RNA, 32 nt, Homo Sapiens
aagauaauuuaaaucuauacugcuuauugguc

SEQ ID NO: 399553 - RNA, 29 nt, Homo Sapiens
aagaagaugaagauaaugaugaaggggag

SEQ ID NO: 399554 - RNA, 32 nt, Homo Sapiens
cuuuccgucccucucuuucugauccaggcccc

SEQ ID NO: 399555 - RNA, 32 nt, Homo Sapiens
cugauguucuuguuguguaauugucuuuuucc

SEQ ID NO: 399556 - RNA, 32 nt, Homo Sapiens
aucugaggagccugggccuugccgggaggggu

SEQ ID NO: 399557 - RNA, 32 nt, Homo Sapiens
cccggcccgaugacagcuuuuccugggacccc

SEQ ID NO: 399558 - RNA, 32 nt, Homo Sapiens
ccccuuucaaggaaagugaaccuuuaaaguaa

SEQ ID NO: 399559 - RNA, 32 nt, Homo Sapiens
agaaaaacugcuaaaagacaaaaaagaccuca

SEQ ID NO: 399560 - RNA, 32 nt, Homo Sapiens
ugugauugugguuaaaugaccuuuuucuugca

SEQ ID NO: 399561 - RNA, 32 nt, Homo Sapiens
acuuuagcauccagaaggaagagagaaccugu

SEQ ID NO: 399562 - RNA, 32 nt, Homo Sapiens
cuuuguggauggcaccaccagugguggggaca

SEQ ID NO: 399563 - RNA, 32 nt, Homo Sapiens
uucccuuauuuucuccuuuucguacccugugu

SEQ ID NO: 399564 - RNA, 32 nt, Homo Sapiens
caagugaaggcacaaacucucaauaucuaaaa

SEQ ID NO: 399565 - RNA, 32 nt, Homo Sapiens
agagcuuaaacuauuucuuuauaauggcaaau

SEQ ID NO: 399566 - RNA, 32 nt, Homo Sapiens
uuuuucugaggucauugccagaugaagcacug

SEQ ID NO: 399567 - RNA, 32 nt, Homo Sapiens
cugccugccgggccugaggagcuccaaccagg

SEQ ID NO: 399568 - RNA, 32 nt, Homo Sapiens
ccccuccccccuccgcaaguucucucuuggaa

SEQ ID NO: 399569 - RNA, 32 nt, Homo Sapiens
uaagccuugcaaacaaaaaacaacaaaaaaga

SEQ ID NO: 399570 - RNA, 32 nt, Homo Sapiens
uuucuccuugaacuuuuuaacuuuauauguaa

SEQ ID NO: 399571 - RNA, 29 nt, Homo Sapiens
aacgauggaugaugacuugauguuggcac

SEQ ID NO: 399572 - RNA, 32 nt, Homo Sapiens
agccucccuagcucaacgauccucucaccuca

SEQ ID NO: 399573 - RNA, 32 nt, Homo Sapiens
accaucgaggcuggaccaaaccacuuuuucca

SEQ ID NO: 399574 - RNA, 32 nt, Homo Sapiens
caggaccggccgcagcauggacgcucccaggc

SEQ ID NO: 399575 - RNA, 32 nt, Homo Sapiens
ccuuucugcuccagacuuggggcuagauaggg

SEQ ID NO: 399576 - RNA, 30 nt, Homo Sapiens
agugaagagaagcuacuguguuuggugcgg

SEQ ID NO: 399577 - RNA, 32 nt, Homo Sapiens
guuuguuuuuaaaaguuuucuauuaauuauag

SEQ ID NO: 399578 - RNA, 32 nt, Homo Sapiens
ggcucaguggagggagacccagcauagccagg

SEQ ID NO: 399579 - RNA, 32 nt, Homo Sapiens
cuugauaccaccuauauagaugcagcauuuug

SEQ ID NO: 399580 - RNA, 32 nt, Homo Sapiens
cccagccggcugcccucguggaugccucccgg

SEQ ID NO: 399581 - RNA, 32 nt, Homo Sapiens
guugggcgcggcagggcgggaggggcgcgcca

SEQ ID NO: 399582 - RNA, 32 nt, Homo Sapiens
uggauuauauuuguuucuuuugggggguaaug

SEQ ID NO: 399583 - RNA, 32 nt, Homo Sapiens
ugacaaugccaaacacuccaccucugaucaga

SEQ ID NO: 399584 - RNA, 32 nt, Homo Sapiens
ggugaccuucccuccaccccaggaagcuauga

SEQ ID NO: 399585 - RNA, 32 nt, Homo Sapiens
uuuccgaaagugacaguguuggucaucccaug

SEQ ID NO: 399586 - RNA, 32 nt, Homo Sapiens
ccccgaaggguuuuaugggaacuaacaucagu

SEQ ID NO: 399587 - RNA, 32 nt, Homo Sapiens
uauuacaaauauuuugaguagacaguguuucc

SEQ ID NO: 399588 - RNA, 32 nt, Homo Sapiens
auuguauauguugaaggagguauaauaaacuc

SEQ ID NO: 399589 - RNA, 32 nt, Homo Sapiens
gggagcgggcgcaggagcaggcggcggcggug

SEQ ID NO: 399590 - RNA, 32 nt, Homo Sapiens
ccugggcgagcagcggcggcgccgggcugagg

SEQ ID NO: 399591 - RNA, 32 nt, Homo Sapiens
uuccccauccucugggguggggagcagagcug

SEQ ID NO: 399592 - RNA, 32 nt, Homo Sapiens
uugucagagaauaaaaggagguuguccauaau

SEQ ID NO: 399593 - RNA, 32 nt, Homo Sapiens
ccggagucauugggaaggaaaaguggagaaau

SEQ ID NO: 399594 - RNA, 32 nt, Homo Sapiens
acaggaaacaaauaaagauagaugugucugag

SEQ ID NO: 399595 - RNA, 32 nt, Homo Sapiens
gaaguuacaauccuaaucauucacauuuucug

SEQ ID NO: 399596 - RNA, 32 nt, Homo Sapiens
aacaugaugauuacugcuauaucuggaaacuc

SEQ ID NO: 399597 - RNA, 32 nt, Homo Sapiens
agcuuuacaaauaaacauacacaugcucaguu

SEQ ID NO: 399598 - RNA, 32 nt, Homo Sapiens
ucuucaaccuccccgucccguugucccauuuu

SEQ ID NO: 399599 - RNA, 32 nt, Homo Sapiens
auuaaaugagauuauuucugcucuucaggaaa

SEQ ID NO: 399600 - RNA, 32 nt, Homo Sapiens
ggguuagcagcugcugcauuuccccggcuggc

SEQ ID NO: 399601 - RNA, 32 nt, Homo Sapiens
uccugaagcugaugugcaucuucccuuucuug

SEQ ID NO: 399602 - RNA, 32 nt, Homo Sapiens
aaauguugaagaaaaaagcuuauagaauaaaa

SEQ ID NO: 399603 - RNA, 32 nt, Homo Sapiens
uggcauuuuuauuuugauaaaauagaccguuu

SEQ ID NO: 399604 - RNA, 32 nt, Homo Sapiens
agcaucccacagcagccaagacgcaacgggaa

SEQ ID NO: 399605 - RNA, 32 nt, Homo Sapiens
uuguacagaaaagcaagaugaaaggaugugaa

SEQ ID NO: 399606 - RNA, 32 nt, Homo Sapiens
aaaauacaaaaauuagcugggcgugauggcga

SEQ ID NO: 399607 - RNA, 32 nt, Homo Sapiens
uccauuccuccauccacccaucuguccauccg

SEQ ID NO: 399608 - RNA, 32 nt, Homo Sapiens
cauggaacaaguaaaggcaacccccuggggac

SEQ ID NO: 399609 - RNA, 32 nt, Homo Sapiens
acugaagacucuaugcucuguaguucuuucca

SEQ ID NO: 399610 - RNA, 32 nt, Homo Sapiens
ccccagccccgggaggcucccggagcuuccug

SEQ ID NO: 399611 - RNA, 28 nt, Homo Sapiens
ccuucuggcugcaacauuauagaauugg

SEQ ID NO: 399612 - RNA, 32 nt, Homo Sapiens
acacagucacgugucccaggaccuccgugggc

SEQ ID NO: 399613 - RNA, 32 nt, Homo Sapiens
cucauggauuuuaagaauguuuuuguaaaauu

SEQ ID NO: 399614 - RNA, 32 nt, Homo Sapiens
gucuagcagcugccggaggaccaagaagguau

SEQ ID NO: 399615 - RNA, 32 nt, Homo Sapiens
uguugaccacgcugcguaugagggcaucuugg

SEQ ID NO: 399616 - RNA, 32 nt, Homo Sapiens
cagcacaggaggagaaaagugacugggacgau

SEQ ID NO: 399617 - RNA, 32 nt, Homo Sapiens
ggcgcccgcaacgcggagccgggaagucgucg

SEQ ID NO: 399618 - RNA, 32 nt, Homo Sapiens
auagugauacauggauauacuuccuuuuaaau

SEQ ID NO: 399619 - RNA, 32 nt, Homo Sapiens
cuuucucacaagguuuuuccuuaucuagcuuc

SEQ ID NO: 399620 - RNA, 32 nt, Homo Sapiens
agcauuugggauaugugcccuuccucaggguc

SEQ ID NO: 399621 - RNA, 32 nt, Homo Sapiens
uucacuugcaaaacagaaguaaauaagaguuc

SEQ ID NO: 399622 - RNA, 32 nt, Homo Sapiens
ucaaaugcagggccccuuucugaucucaccau

SEQ ID NO: 399623 - RNA, 30 nt, Homo Sapiens
acacaggauaaaagguuaaaagugcagagg

SEQ ID NO: 399624 - RNA, 32 nt, Homo Sapiens
gacugcauggugcaugagugaucucagccuag

SEQ ID NO: 399625 - RNA, 32 nt, Homo Sapiens
uaggacuugaaaucggagacgcacgcagggga

SEQ ID NO: 399626 - RNA, 32 nt, Homo Sapiens
cagacucagaaucuguuauauugauuucaguu

SEQ ID NO: 399627 - RNA, 32 nt, Homo Sapiens
ccguuuuuuaucaugucuuaaaaaugcaaucu

SEQ ID NO: 399628 - RNA, 32 nt, Homo Sapiens
gcaguucuggggguuccuguuccuccuuugcg

SEQ ID NO: 399629 - RNA, 32 nt, Homo Sapiens
aggcaggcagccggcgggcgcugcgugugugu

SEQ ID NO: 399630 - RNA, 32 nt, Homo Sapiens
uggggucugaagaaucugcauuuuuuaacaaa

SEQ ID NO: 399631 - RNA, 32 nt, Homo Sapiens
ucuuaacucugcugcuucccaaggauggcugu

SEQ ID NO: 399632 - RNA, 32 nt, Homo Sapiens
cucuuuggauugcuugguaccugcagcacguu

SEQ ID NO: 399633 - RNA, 32 nt, Homo Sapiens
ccccgcccgcccccggcccgcccucuguaucu

SEQ ID NO: 399634 - RNA, 32 nt, Homo Sapiens
auugauccaaaauuauuuacugagugccuacc

SEQ ID NO: 399635 - RNA, 32 nt, Homo Sapiens
cacaaugucacagaugaaacuuaaaugauaac

SEQ ID NO: 399636 - RNA, 32 nt, Homo Sapiens
aagagaacccaagaccaacuaagauuuuaaga

SEQ ID NO: 399637 - RNA, 32 nt, Homo Sapiens
auucaacaauuuuagauuaugguguaagauac

SEQ ID NO: 399638 - RNA, 32 nt, Homo Sapiens
uggagacaaggugggaaaucggauccugucuu

SEQ ID NO: 399639 - RNA, 32 nt, Homo Sapiens
ggacgucacgcaggacagauaccgcuccacac

SEQ ID NO: 399640 - RNA, 32 nt, Homo Sapiens
aguuucugcuggaaguguuuaaugugaggcau

SEQ ID NO: 399641 - RNA, 32 nt, Homo Sapiens
ccagccuucagaccuuauaauacauaaaauaa

SEQ ID NO: 399642 - RNA, 32 nt, Homo Sapiens
cagccuaccucgcuccucggcgccaugaccac

SEQ ID NO: 399643 - RNA, 32 nt, Homo Sapiens
uuuuucuucaccugggccauggagggcuuugu

SEQ ID NO: 399644 - RNA, 32 nt, Homo Sapiens
uggcagcgacagagccaaaaucagagcuggaa

SEQ ID NO: 399645 - RNA, 32 nt, Homo Sapiens
ucccgggccggccgcccgccucugagacuccc

SEQ ID NO: 399646 - RNA, 32 nt, Homo Sapiens
uagggaaaaaaguaguauuuucuuauuaaaca

SEQ ID NO: 399647 - RNA, 32 nt, Homo Sapiens
aagugggaaugggaaagaccaccuuguuagag

SEQ ID NO: 399648 - RNA, 32 nt, Homo Sapiens
cuuucucuucauacuuuuuuucacaguuggcu

SEQ ID NO: 399649 - RNA, 30 nt, Homo Sapiens
ucaggagcacagaugggggaaaccggcagg

SEQ ID NO: 399650 - RNA, 32 nt, Homo Sapiens
uaggacauuguggcugagucuacccagcucaa

SEQ ID NO: 399651 - RNA, 32 nt, Homo Sapiens
aggucugacaccuuucagucucuuuuuauagc

SEQ ID NO: 399652 - RNA, 32 nt, Homo Sapiens
guuuauaguuuauuuagcauguuguccaagcc

SEQ ID NO: 399653 - RNA, 32 nt, Homo Sapiens
auaaauaaaaauucaugugaaaaugaucacug

SEQ ID NO: 399654 - RNA, 32 nt, Homo Sapiens
gcucggugcgacugcgcagcuccucggcgcuu

SEQ ID NO: 399655 - RNA, 32 nt, Homo Sapiens
gaagaauagauagaaauagggauuggagacag

SEQ ID NO: 399656 - RNA, 32 nt, Homo Sapiens
cggacgcucugcauuacccagucuugcguccu

SEQ ID NO: 399657 - RNA, 32 nt, Homo Sapiens
ccgccagccgccuccacccgccccacaccaca

SEQ ID NO: 399658 - RNA, 32 nt, Homo Sapiens
uuaggugacaaugagggucugguuuuuuauuu

SEQ ID NO: 399659 - RNA, 32 nt, Homo Sapiens
uguuccugcgucugcggagcggcccuugucuc

SEQ ID NO: 399660 - RNA, 32 nt, Homo Sapiens
aacacacagauacacacacacacacacacaca

SEQ ID NO: 399661 - RNA, 32 nt, Homo Sapiens
caaaacagacuguguuuaacugcugcaggguc

SEQ ID NO: 399662 - RNA, 32 nt, Homo Sapiens
cuacugaaaaggaacuaggaaguuuggccaau

SEQ ID NO: 399663 - RNA, 32 nt, Homo Sapiens
ugggaagagggguggggagucacggcaaguug

SEQ ID NO: 399664 - RNA, 32 nt, Homo Sapiens
aacuguauaugaugcauccugucuccaugugu

SEQ ID NO: 399665 - RNA, 32 nt, Homo Sapiens
cccaggcugugauuugccaucuacugcaggcu

SEQ ID NO: 399666 - RNA, 32 nt, Homo Sapiens
cacuaauuuuuauugugguuaguuagaaaaau

SEQ ID NO: 399667 - RNA, 32 nt, Homo Sapiens
uuccuugguuccaugagacaccccaaguccuu

SEQ ID NO: 399668 - RNA, 32 nt, Homo Sapiens
guaaagauagaaucuuuuuucuuuuuugucau

SEQ ID NO: 399669 - RNA, 32 nt, Homo Sapiens
uccucacuugacaacuaaugaauaaauugaug

SEQ ID NO: 399670 - RNA, 32 nt, Homo Sapiens
guaaaaaggggaggagaauuagccaaacacug

SEQ ID NO: 399671 - RNA, 32 nt, Homo Sapiens
uccuacacaccuccccgccgggaggccaggcu

SEQ ID NO: 399672 - RNA, 32 nt, Homo Sapiens
gccugcccugaggcugccccggugaauguuau

SEQ ID NO: 399673 - RNA, 32 nt, Homo Sapiens
agcagguggugcccccgcccgggacuccuggu

SEQ ID NO: 399674 - RNA, 32 nt, Homo Sapiens
gggccguccagaagcugcuccuuuacccucuu

SEQ ID NO: 399675 - RNA, 32 nt, Homo Sapiens
uggggcauuuguaaaaaguagauuaaaauauu

SEQ ID NO: 399676 - RNA, 32 nt, Homo Sapiens
gaggucugccccacccacuuccuccccaccac

SEQ ID NO: 399677 - RNA, 32 nt, Homo Sapiens
aagauaauauugcgcuuauuuauuuuuccaug

SEQ ID NO: 399678 - RNA, 32 nt, Homo Sapiens
gucuuucaacuggcaagagucauuuugaccag

SEQ ID NO: 399679 - RNA, 32 nt, Homo Sapiens
gcggcaccucccucacccaaggggccgcggcg

SEQ ID NO: 399680 - RNA, 32 nt, Homo Sapiens
ugguugcauuuauuauaaaaucuuauguaguu

SEQ ID NO: 399681 - RNA, 32 nt, Homo Sapiens
uuccccaucuaccucuuguccuccccccaaca

SEQ ID NO: 399682 - RNA, 32 nt, Homo Sapiens
cuuucuucugggcaucacgggaaugucacaau

SEQ ID NO: 399683 - RNA, 32 nt, Homo Sapiens
cggcuuugacccccauccuugcagaagccucc

SEQ ID NO: 399684 - RNA, 32 nt, Homo Sapiens
aaugaaaaaaucauuguaacacuugauggagu

SEQ ID NO: 399685 - RNA, 32 nt, Homo Sapiens
ugucuguuguacuguauagccuuuaaaaugca

SEQ ID NO: 399686 - RNA, 32 nt, Homo Sapiens
uaugggggagauacuguguuauccccgacgcu

SEQ ID NO: 399687 - RNA, 32 nt, Homo Sapiens
gacaggcagcccggcggccuccgauggccccg

SEQ ID NO: 399688 - RNA, 32 nt, Homo Sapiens
auuggaaaugaaaaacaaaaauucagaaauag

SEQ ID NO: 399689 - RNA, 32 nt, Homo Sapiens
auguguuuuuaaauuuuuauuaaugcacuuga

SEQ ID NO: 399690 - RNA, 32 nt, Homo Sapiens
caguauguaagaacaaauauuuuguauacuuu

SEQ ID NO: 399691 - RNA, 32 nt, Homo Sapiens
agcgaggcagcagugcagcuuucagagggucc

SEQ ID NO: 399692 - RNA, 32 nt, Homo Sapiens
guaaauaugaccucagacaaaaaggaaccaga

SEQ ID NO: 399693 - RNA, 32 nt, Homo Sapiens
gaguccgcuggcccgcgcacucccggaccaug

SEQ ID NO: 399694 - RNA, 32 nt, Homo Sapiens
ucugucugcggcggcccgccagccuggcacag

SEQ ID NO: 399695 - RNA, 32 nt, Homo Sapiens
acgcagguugaagggggaggaauagaaaaaga

SEQ ID NO: 399696 - RNA, 32 nt, Homo Sapiens
ccucguccuucgcgccagagcagguucgcaaa

SEQ ID NO: 399697 - RNA, 32 nt, Homo Sapiens
ccuuaaccucugaacucugaccucaggaggcu

SEQ ID NO: 399698 - RNA, 32 nt, Homo Sapiens
uucccgccguccccggcuccaggagaccccac

SEQ ID NO: 399699 - RNA, 32 nt, Homo Sapiens
caagugcauccacaagcuggaucugaguuuug

SEQ ID NO: 399700 - RNA, 32 nt, Homo Sapiens
guauuuuguauuguacauauuuccuccuacug

SEQ ID NO: 399701 - RNA, 32 nt, Homo Sapiens
aucuggggcuaagggaagggacuucauuucca

SEQ ID NO: 399702 - RNA, 32 nt, Homo Sapiens
caacccagaggauguagacccuguccucaaga

SEQ ID NO: 399703 - RNA, 32 nt, Homo Sapiens
cuaucccuguaagcuaaacaaacaaacaaaca

SEQ ID NO: 399704 - RNA, 32 nt, Homo Sapiens
aaggaggaaggguaaauauuaagucaacaucc

SEQ ID NO: 399705 - RNA, 32 nt, Homo Sapiens
cagaaauuuuccacacccuccucgguauccau

SEQ ID NO: 399706 - RNA, 32 nt, Homo Sapiens
cagauguggaaagacuuuuuacguacacuuca

SEQ ID NO: 399707 - RNA, 29 nt, Homo Sapiens
gcacgugggggacagagguggccgggacg

SEQ ID NO: 399708 - RNA, 32 nt, Homo Sapiens
gagugcuaggauugcaggugugagccaccaca

SEQ ID NO: 399709 - RNA, 32 nt, Homo Sapiens
cuauuucaaaggaaaccaaaccuuaaaaaaaa

SEQ ID NO: 399710 - RNA, 32 nt, Homo Sapiens
ggccuucaucgucuucaccgaggccaucacca

SEQ ID NO: 399711 - RNA, 32 nt, Homo Sapiens
agcaaguccuucccuuucauuuuuuccagucu

SEQ ID NO: 399712 - RNA, 32 nt, Homo Sapiens
gaagcuaagaaacucuaaauccaaggugacau

SEQ ID NO: 399713 - RNA, 32 nt, Homo Sapiens
ggggcgggcuccugccaugccgcuaguccgcu

SEQ ID NO: 399714 - RNA, 32 nt, Homo Sapiens
uauccauuuggaguucuuucugaugcauuaug

SEQ ID NO: 399715 - RNA, 32 nt, Homo Sapiens
gcaugugaggaugaaaggagugaauguauaaa

SEQ ID NO: 399716 - RNA, 32 nt, Homo Sapiens
ccuaaagucugcuauuuauggaaacuaacuuu

SEQ ID NO: 399717 - RNA, 32 nt, Homo Sapiens
aaguugggagggugguggggacagguaagugg

SEQ ID NO: 399718 - RNA, 32 nt, Homo Sapiens
gauugcuugagccauguuguuugaauugcugc

SEQ ID NO: 399719 - RNA, 28 nt, Homo Sapiens
aaagucuuuauucuguuuuucuugaaaa

SEQ ID NO: 399720 - RNA, 32 nt, Homo Sapiens
ugcgucacggguggcgggcgcgggaaggggau

SEQ ID NO: 399721 - RNA, 32 nt, Homo Sapiens
uuccuauucuuacuccccuucugccuaugcuc

SEQ ID NO: 399722 - RNA, 32 nt, Homo Sapiens
accagaagucaggcccuugguugccagcagaa

SEQ ID NO: 399723 - RNA, 32 nt, Homo Sapiens
ucaaaucggucccacggcucucuucucccacu

SEQ ID NO: 399724 - RNA, 32 nt, Homo Sapiens
aggccucccugcccccucccccagcuccggcc

SEQ ID NO: 399725 - RNA, 32 nt, Homo Sapiens
ugggagcgcgucgggcccgggcggaaagugcc

SEQ ID NO: 399726 - RNA, 32 nt, Homo Sapiens
accaagagaauaaaaaucaugcguuauuaaac

SEQ ID NO: 399727 - RNA, 32 nt, Homo Sapiens
cugacuauuggcugggguggguuccggugcug

SEQ ID NO: 399728 - RNA, 32 nt, Homo Sapiens
auagcuucuauuucuguuuuugcuucuuauuu

SEQ ID NO: 399729 - RNA, 32 nt, Homo Sapiens
gccagagguugaagggcgggguagaagagggg

SEQ ID NO: 399730 - RNA, 32 nt, Homo Sapiens
ccagcaggccccaggguccaccaggcucucaa

SEQ ID NO: 399731 - RNA, 32 nt, Homo Sapiens
cuucccuuuccaagccgcuuccgaagugcucc

SEQ ID NO: 399732 - RNA, 32 nt, Homo Sapiens
gauagaacucgugugguuccacuuccccaaga

SEQ ID NO: 399733 - RNA, 32 nt, Homo Sapiens
aaaauaaaaagggucagcuuguccaguuggau

SEQ ID NO: 399734 - RNA, 32 nt, Homo Sapiens
ucuagaaaaaggagaccccucauccgccucug

SEQ ID NO: 399735 - RNA, 32 nt, Homo Sapiens
auguuccaagacaaagaugaacccauacauga

SEQ ID NO: 399736 - RNA, 32 nt, Homo Sapiens
aggggacaccgugccggcuucagacacuccca

SEQ ID NO: 399737 - RNA, 32 nt, Homo Sapiens
agugcaggaccaggucccgcgcggccccgggu

SEQ ID NO: 399738 - RNA, 32 nt, Homo Sapiens
augaacauacaaaugcaucuuugauguguugu

SEQ ID NO: 399739 - RNA, 32 nt, Homo Sapiens
ugcgugugugugcucucgcgcacgugcugucu

SEQ ID NO: 399740 - RNA, 30 nt, Homo Sapiens
uggggguggcuuaugggggagaaaagggaa

SEQ ID NO: 399741 - RNA, 32 nt, Homo Sapiens
gagggugagccgcgcgggaggggcccgccucg

SEQ ID NO: 399742 - RNA, 32 nt, Homo Sapiens
uauguaaaugugcauucuuuuaaaagacaaga

SEQ ID NO: 399743 - RNA, 30 nt, Homo Sapiens
gcaguggcugaugcugcagaacugccaccu

SEQ ID NO: 399744 - RNA, 32 nt, Homo Sapiens
uuuaaauuaugaguuuucuauuagaguuuuuu

SEQ ID NO: 399745 - RNA, 32 nt, Homo Sapiens
agcagaugaacaaaaauaaaaauacaaaaggc

SEQ ID NO: 399746 - RNA, 32 nt, Homo Sapiens
aauuugugaugaugagcugaucuuaaucaaaa

SEQ ID NO: 399747 - RNA, 32 nt, Homo Sapiens
uuggggccccucuucuuuccagcccuucuccu

SEQ ID NO: 399748 - RNA, 32 nt, Homo Sapiens
ccgcgcucgucggccauggcccgggagaacgg

SEQ ID NO: 399749 - RNA, 32 nt, Homo Sapiens
gcaaacuucaucacagcagggauuugggcuag

SEQ ID NO: 399750 - RNA, 32 nt, Homo Sapiens
uaaaugucaaaauuguuuuccuuuaaauugga

SEQ ID NO: 399751 - RNA, 32 nt, Homo Sapiens
caagucaacuauuauuagauauuaacuuauuu

SEQ ID NO: 399752 - RNA, 32 nt, Homo Sapiens
aauuuauauaaaaacccaaauaaauaaaaugg

SEQ ID NO: 399753 - RNA, 32 nt, Homo Sapiens
uggucuggccuggccgcgccggcuccgggagc

SEQ ID NO: 399754 - RNA, 32 nt, Homo Sapiens
ccuacaaauuuaaggacaguugugacaguaau

SEQ ID NO: 399755 - RNA, 32 nt, Homo Sapiens
ugacacaugugccuugagguaugugaggacau

SEQ ID NO: 399756 - RNA, 32 nt, Homo Sapiens
auugcuaguuugcuaggcagcaucuuuuggac

SEQ ID NO: 399757 - RNA, 32 nt, Homo Sapiens
gucucuuugaaagauuuugggaagauuuaaac

SEQ ID NO: 399758 - RNA, 32 nt, Homo Sapiens
ucgcggggaagcugcggccgccucgcacccgg

SEQ ID NO: 399759 - RNA, 32 nt, Homo Sapiens
auucagcagaaucauuucacguuuugaacagc

SEQ ID NO: 399760 - RNA, 32 nt, Homo Sapiens
ugauagaguuuguaucacucaacaucagggga

SEQ ID NO: 399761 - RNA, 32 nt, Homo Sapiens
acaauuuggaguaaacaaaaugcaauaaauuu

SEQ ID NO: 399762 - RNA, 32 nt, Homo Sapiens
caccuggauccggaguucgaggccagccugac

SEQ ID NO: 399763 - RNA, 32 nt, Homo Sapiens
guauaguacuugacagaguaaauacuucaucu

SEQ ID NO: 399764 - RNA, 32 nt, Homo Sapiens
auuugcagguggagauggaaggagaaacagca

SEQ ID NO: 399765 - RNA, 32 nt, Homo Sapiens
gaaaaaggacaaauaaaacauggccagcaaau

SEQ ID NO: 399766 - RNA, 32 nt, Homo Sapiens
uuuuucuuaacauguuaguacuucuacgacuu

SEQ ID NO: 399767 - RNA, 32 nt, Homo Sapiens
uaaugauggcuucugagucaacuuuacuggcu

SEQ ID NO: 399768 - RNA, 32 nt, Homo Sapiens
gucacuuaacguaggccuuguuuaucucgccu

SEQ ID NO: 399769 - RNA, 32 nt, Homo Sapiens
acggcucacgccggccggggccgcgaggccug

SEQ ID NO: 399770 - RNA, 32 nt, Homo Sapiens
acacaggcagugcccucucaggaccacugugg

SEQ ID NO: 399771 - RNA, 32 nt, Homo Sapiens
auucuucaaacacaaguggguagugucauuuu

SEQ ID NO: 399772 - RNA, 32 nt, Homo Sapiens
gagagauucauccaccaaggaugaagaaagga

SEQ ID NO: 399773 - RNA, 32 nt, Homo Sapiens
agacaugcacacuaauacacauacacaccaaa

SEQ ID NO: 399774 - RNA, 32 nt, Homo Sapiens
uaccgggcuggcggccggccggcgcccccuca

SEQ ID NO: 399775 - RNA, 32 nt, Homo Sapiens
agucuucagggccacacccccgccauguccac

SEQ ID NO: 399776 - RNA, 32 nt, Homo Sapiens
gaggagguguggaauaacuuuuucaugggaca

SEQ ID NO: 399777 - RNA, 32 nt, Homo Sapiens
uguuuuauuucuguuuguugcuaguuuuuaaa

SEQ ID NO: 399778 - RNA, 32 nt, Homo Sapiens
uggucaucgugacagcagcagcucaaguuagc

SEQ ID NO: 399779 - RNA, 32 nt, Homo Sapiens
cacagcugugcggugcuggcugucccaaugca

SEQ ID NO: 399780 - RNA, 32 nt, Homo Sapiens
ggacaggaaggacugagggucuggcugguucc

SEQ ID NO: 399781 - RNA, 32 nt, Homo Sapiens
cccggucucacauuuucagugaagucagacuc

SEQ ID NO: 399782 - RNA, 32 nt, Homo Sapiens
uugaaaauugguuacugggucuccucucaaga

SEQ ID NO: 399783 - RNA, 32 nt, Homo Sapiens
cagauggcgagggagcggggcgagcugcuuuu

SEQ ID NO: 399784 - RNA, 32 nt, Homo Sapiens
uuacaaaacugucaaauauaaaaggaguccuu

SEQ ID NO: 399785 - RNA, 32 nt, Homo Sapiens
auucaccaaacacuuguuaaaaauggcaagac

SEQ ID NO: 399786 - RNA, 32 nt, Homo Sapiens
cuaacacuuuacccuuuccacugcucgcagug

SEQ ID NO: 399787 - RNA, 32 nt, Homo Sapiens
ggcagcacuguggcagggauuuuggcuccagu

SEQ ID NO: 399788 - RNA, 32 nt, Homo Sapiens
gagggguaaugcggucauuggagucgggggcu

SEQ ID NO: 399789 - RNA, 32 nt, Homo Sapiens
aagccaagaggaucacugcugcuccuuuuuuc

SEQ ID NO: 399790 - RNA, 32 nt, Homo Sapiens
caaaggcaaaacuacauggacaaauguuucug

SEQ ID NO: 399791 - RNA, 32 nt, Homo Sapiens
ugauuuuuguaaaaauagaacuuuacuuggaa

SEQ ID NO: 399792 - RNA, 32 nt, Homo Sapiens
guaugaacagcaauacacaaaggaguuauuug

SEQ ID NO: 399793 - RNA, 32 nt, Homo Sapiens
agugcagcgcggaaccggcccgagggcccuac

SEQ ID NO: 399794 - RNA, 32 nt, Homo Sapiens
caccuucccguccagagcgcuuucuuucagac

SEQ ID NO: 399795 - RNA, 32 nt, Homo Sapiens
aggacaacgagagggacugcaacaucacggau

SEQ ID NO: 399796 - RNA, 32 nt, Homo Sapiens
gccucugcccagccugccccagccugccccag

SEQ ID NO: 399797 - RNA, 32 nt, Homo Sapiens
gaagugcauccacaucguccccagguccagau

SEQ ID NO: 399798 - RNA, 32 nt, Homo Sapiens
ggugggcuggcagcugacggccugcucagugg

SEQ ID NO: 399799 - RNA, 32 nt, Homo Sapiens
uucuuauuggauacuccucuuauuuauuauuu

SEQ ID NO: 399800 - RNA, 32 nt, Homo Sapiens
gggcccaccaggauguucugcccugugggggg

SEQ ID NO: 399801 - RNA, 32 nt, Homo Sapiens
ugcaaaaggggcaggauggggcugggaagucc

SEQ ID NO: 399802 - RNA, 32 nt, Homo Sapiens
ugcaugguaaggcugugauaauaauaacaaaa

SEQ ID NO: 399803 - RNA, 32 nt, Homo Sapiens
gucgaauggaccccauucccccugcccugccc

SEQ ID NO: 399804 - RNA, 32 nt, Homo Sapiens
uaaaagaaaguagcguuaagauagaucaguaa

SEQ ID NO: 399805 - RNA, 32 nt, Homo Sapiens
uuugaacauuuuaguucuugguuauaaaaaug

SEQ ID NO: 399806 - RNA, 32 nt, Homo Sapiens
gcuggcugcgcgcgcugcuuucggcucccacg

SEQ ID NO: 399807 - RNA, 32 nt, Homo Sapiens
guuuucaauuucaaaucacuccuugaaauaca

SEQ ID NO: 399808 - RNA, 32 nt, Homo Sapiens
ucuguccagguccggaacagugucucaacugg

SEQ ID NO: 399809 - RNA, 32 nt, Homo Sapiens
ugcaaaauacauuuaaugaucucuuucaaaca

SEQ ID NO: 399810 - RNA, 32 nt, Homo Sapiens
acuuuuuuuuuuucuuuuuuucuuuuuucuuu

SEQ ID NO: 399811 - RNA, 32 nt, Homo Sapiens
ggaguggcagcccacccugcagcccucagagc

SEQ ID NO: 399812 - RNA, 32 nt, Homo Sapiens
cuaccucuuccucuccacgcgguugagaagac

SEQ ID NO: 399813 - RNA, 32 nt, Homo Sapiens
cuucguuauuccuccauagaucagagauuacu

SEQ ID NO: 399814 - RNA, 32 nt, Homo Sapiens
aacccgcaugcaguccaguuugaaggugcucu

SEQ ID NO: 399815 - RNA, 32 nt, Homo Sapiens
accccaguuuaaaagaguuugaaggagcaacc

SEQ ID NO: 399816 - RNA, 32 nt, Homo Sapiens
gaggccuuuggaagaaaauuauguaaaguuua

SEQ ID NO: 399817 - RNA, 32 nt, Homo Sapiens
uucccuucucccuuuccaaccccuuccuuccu

SEQ ID NO: 399818 - RNA, 32 nt, Homo Sapiens
caaagugguugagaauauauuuuuuaguaauu

SEQ ID NO: 399819 - RNA, 31 nt, Homo Sapiens
agcauugucauuuuugugccaaaugaagagu

SEQ ID NO: 399820 - RNA, 32 nt, Homo Sapiens
gaacccugcccccaaccccccacagcaaggcu

SEQ ID NO: 399821 - RNA, 32 nt, Homo Sapiens
uaucuacaucugccuguguacacacacaacuu

SEQ ID NO: 399822 - RNA, 32 nt, Homo Sapiens
ucucaggagguagcagguguuuccuugacuca

SEQ ID NO: 399823 - RNA, 29 nt, Homo Sapiens
cgaguauaaaguuuuccucuuuuuuaacu

SEQ ID NO: 399824 - RNA, 32 nt, Homo Sapiens
cucggaauucuaugauuaacaagucaucguuc

SEQ ID NO: 399825 - RNA, 32 nt, Homo Sapiens
gcauuuaaaaauacuguucacacuuuauuacc

SEQ ID NO: 399826 - RNA, 32 nt, Homo Sapiens
uucuugggcugugcuuucagccugcagauaua

SEQ ID NO: 399827 - RNA, 32 nt, Homo Sapiens
cugaaccuccuugccugggcugccccgccugg

SEQ ID NO: 399828 - RNA, 32 nt, Homo Sapiens
ggagggaggugggaaaccucaucauccggugg

SEQ ID NO: 399829 - RNA, 32 nt, Homo Sapiens
gcuuuuguauauauauuuuguaugauggauau

SEQ ID NO: 399830 - RNA, 32 nt, Homo Sapiens
acuuuccagaaucacuuccacggugaucagag

SEQ ID NO: 399831 - RNA, 32 nt, Homo Sapiens
accucuagacugcccucccgggcuggcguccc

SEQ ID NO: 399832 - RNA, 32 nt, Homo Sapiens
uucuaauuaaaauaaaagaagucucaaaaauu

SEQ ID NO: 399833 - RNA, 32 nt, Homo Sapiens
guaguugcugugcacuaggagcugugaucucc

SEQ ID NO: 399834 - RNA, 32 nt, Homo Sapiens
cagaggccgcuccuaggcuccucggaggaggc

SEQ ID NO: 399835 - RNA, 32 nt, Homo Sapiens
caagccgggugcccggccccagcccgagggag

SEQ ID NO: 399836 - RNA, 32 nt, Homo Sapiens
acuuuuucuaaccucccaugaggcuguaaguu

SEQ ID NO: 399837 - RNA, 32 nt, Homo Sapiens
cacaugggccgccgcucauccaaaugcugcug

SEQ ID NO: 399838 - RNA, 32 nt, Homo Sapiens
cuaugaaaaaaguacaacaggaaugaaaacuu

SEQ ID NO: 399839 - RNA, 32 nt, Homo Sapiens
cgggaaguggaggcuggaguaaaccaugaucg

SEQ ID NO: 399840 - RNA, 32 nt, Homo Sapiens
gaaggguuuuuggcugaugcuuugagauucuc

SEQ ID NO: 399841 - RNA, 32 nt, Homo Sapiens
cguagucugaugcgcgcgcaaccaggguggug

SEQ ID NO: 399842 - RNA, 32 nt, Homo Sapiens
aggccagaggucgggccagccgccccauucuu

SEQ ID NO: 399843 - RNA, 32 nt, Homo Sapiens
ccaauuuuuguccaguuuucucucuuccaguc

SEQ ID NO: 399844 - RNA, 31 nt, Homo Sapiens
gcuguggcggacacucucgggguugucugca

SEQ ID NO: 399845 - RNA, 32 nt, Homo Sapiens
cgccuuaaagcccccggcccagcccugcaggu

SEQ ID NO: 399846 - RNA, 32 nt, Homo Sapiens
gauguguaacaaguauuuucuucuaucgugcc

SEQ ID NO: 399847 - RNA, 29 nt, Homo Sapiens
caacaaagauuuguauauuuuugacuuua

SEQ ID NO: 399848 - RNA, 32 nt, Homo Sapiens
ugugcacaccugaguucacagcuucaccacuu

SEQ ID NO: 399849 - RNA, 32 nt, Homo Sapiens
uuuuuguuuggccucccugcccccauguuuuu

SEQ ID NO: 399850 - RNA, 32 nt, Homo Sapiens
ccaggagagaacugaggcgccuucuagcaguu

SEQ ID NO: 399851 - RNA, 32 nt, Homo Sapiens
ccaggguggaagguggggagggggccggcucc

SEQ ID NO: 399852 - RNA, 32 nt, Homo Sapiens
acugacuucuucaggcuucuuagcugcugcua

SEQ ID NO: 399853 - RNA, 32 nt, Homo Sapiens
cuacuugaaaauaccuuuaauauuauuuucau

SEQ ID NO: 399854 - RNA, 32 nt, Homo Sapiens
ucacaccucccggcugcugcugagagcaccac

SEQ ID NO: 399855 - RNA, 32 nt, Homo Sapiens
auuuaagcuauuaaaauuuguacaauauuuac

SEQ ID NO: 399856 - RNA, 32 nt, Homo Sapiens
auugacagaguaaaaguauagauacaaaaccu

SEQ ID NO: 399857 - RNA, 32 nt, Homo Sapiens
uugggugugcaacagcuuucugagaaaagcua

SEQ ID NO: 399858 - RNA, 32 nt, Homo Sapiens
cacucaagcgggaguccaccccugccucagug

SEQ ID NO: 399859 - RNA, 32 nt, Homo Sapiens
cacccagcacaccagacacacccucugaguca

SEQ ID NO: 399860 - RNA, 32 nt, Homo Sapiens
guccuggugacgcacgugauguacaugcaaga

SEQ ID NO: 399861 - RNA, 32 nt, Homo Sapiens
cuguuucaucaccagacuuuggcucccgcuuu

SEQ ID NO: 399862 - RNA, 32 nt, Homo Sapiens
ucaccuuuaacccuagacuauauauguguguu

SEQ ID NO: 399863 - RNA, 32 nt, Homo Sapiens
uugaaaugugcauuuuaagaaguuauaguuaa

SEQ ID NO: 399864 - RNA, 32 nt, Homo Sapiens
ggaucggacacggcccggcccggccauggccu

SEQ ID NO: 399865 - RNA, 32 nt, Homo Sapiens
gaugcugcgggcccggagccgagaggaaagug

SEQ ID NO: 399866 - RNA, 32 nt, Homo Sapiens
auaauacacgggguagcgaaaacagagcgcac

SEQ ID NO: 399867 - RNA, 32 nt, Homo Sapiens
ucagucccggggcccaggcgggcccggcagcu

SEQ ID NO: 399868 - RNA, 32 nt, Homo Sapiens
gcaaaacuuguaaauuagcagaugacuuuuuu

SEQ ID NO: 399869 - RNA, 32 nt, Homo Sapiens
uuauaucugaagaacuuggagguuuuggggca

SEQ ID NO: 399870 - RNA, 32 nt, Homo Sapiens
auuauucaagggacuaggaugaacuaaauaag

SEQ ID NO: 399871 - RNA, 32 nt, Homo Sapiens
ggugggcgccaccccaccuggcuaaaucucuu

SEQ ID NO: 399872 - RNA, 27 nt, Homo Sapiens
cauuugugacccuucagccccugcuga

SEQ ID NO: 399873 - RNA, 32 nt, Homo Sapiens
guauggcacuuuauaguuuucagacaccuuuu

SEQ ID NO: 399874 - RNA, 32 nt, Homo Sapiens
cugugaccacacgcugucucuugagaauuugg

SEQ ID NO: 399875 - RNA, 32 nt, Homo Sapiens
caagcccauuuucaugccccagcugugcugug

SEQ ID NO: 399876 - RNA, 32 nt, Homo Sapiens
gcugagauucagaaggcccaugcuuauaauuu

SEQ ID NO: 399877 - RNA, 32 nt, Homo Sapiens
uggugcguggggaugccuggaaaacaaaauua

SEQ ID NO: 399878 - RNA, 32 nt, Homo Sapiens
acacagagauacuuauuguacucuguguacag

SEQ ID NO: 399879 - RNA, 32 nt, Homo Sapiens
uccauggccagucccuccccagcccagcaguc

SEQ ID NO: 399880 - RNA, 32 nt, Homo Sapiens
cugagcggguggauggguggacagaagggcuc

SEQ ID NO: 399881 - RNA, 32 nt, Homo Sapiens
aauauuggaaaguggaauaaugaccauaucua

SEQ ID NO: 399882 - RNA, 30 nt, Homo Sapiens
ggaacggagcccgugccagggcggcccagu

SEQ ID NO: 399883 - RNA, 32 nt, Homo Sapiens
uggggucugguuauguggaagauucuuagugg

SEQ ID NO: 399884 - RNA, 32 nt, Homo Sapiens
gccgcguggccuucggccccaaggcugucgcc

SEQ ID NO: 399885 - RNA, 32 nt, Homo Sapiens
ugauaaaaguacauauuuuaaauuguuuucag

SEQ ID NO: 399886 - RNA, 32 nt, Homo Sapiens
uagaagauauuguagacuggguccaucaaguc

SEQ ID NO: 399887 - RNA, 32 nt, Homo Sapiens
augauuugaugaagauuaaagacccuuauuuu

SEQ ID NO: 399888 - RNA, 32 nt, Homo Sapiens
uaacaccuggaaagacuagcucuggcuucaga

SEQ ID NO: 399889 - RNA, 32 nt, Homo Sapiens
cagggcagggcuggggcagagaaaggaaggga

SEQ ID NO: 399890 - RNA, 32 nt, Homo Sapiens
auccuaaaauuccuauaacauaguauuuuaca

SEQ ID NO: 399891 - RNA, 32 nt, Homo Sapiens
cacuccccaucccugcuucccaaaaauugcac

SEQ ID NO: 399892 - RNA, 32 nt, Homo Sapiens
guauggcuaaugaguucugauucacccacgaa

SEQ ID NO: 399893 - RNA, 32 nt, Homo Sapiens
gcagcggugaggaggauggaaugacaggcaaa

SEQ ID NO: 399894 - RNA, 32 nt, Homo Sapiens
ccucucugaaggaugugcguggucauccacua

SEQ ID NO: 399895 - RNA, 32 nt, Homo Sapiens
cugcagguagcuuuuguagccagaugcacagu

SEQ ID NO: 399896 - RNA, 32 nt, Homo Sapiens
ccccaucgcauccccauccccauccccauccc

SEQ ID NO: 399897 - RNA, 32 nt, Homo Sapiens
uccucccagagcucagcccaugucacccucca

SEQ ID NO: 399898 - RNA, 32 nt, Homo Sapiens
agaugaaauauguuaaauaugugguugcucuu

SEQ ID NO: 399899 - RNA, 32 nt, Homo Sapiens
uccucuaaacuuaucuggugcauucuccccac

SEQ ID NO: 399900 - RNA, 32 nt, Homo Sapiens
uagguuggguuuuuuucuuauuguuuucuccc

SEQ ID NO: 399901 - RNA, 32 nt, Homo Sapiens
guguuuaaaaauaaaaauauuuauuguguacu

SEQ ID NO: 399902 - RNA, 32 nt, Homo Sapiens
ugagauucugagggacccaugaauuggauuga

SEQ ID NO: 399903 - RNA, 32 nt, Homo Sapiens
cuucagaaaauaaauuugauauuuuucaaaaa

SEQ ID NO: 399904 - RNA, 32 nt, Homo Sapiens
uaagaaucacuggcuucuaugcgcuucuuuuc

SEQ ID NO: 399905 - RNA, 32 nt, Homo Sapiens
uucaaaccggguuuccuucccccuucuuuucg

SEQ ID NO: 399906 - RNA, 32 nt, Homo Sapiens
agguuuggugguucagaguuauacaacuaauc

SEQ ID NO: 399907 - RNA, 32 nt, Homo Sapiens
gccucccgccgggaucugaugccgcggggugg

SEQ ID NO: 399908 - RNA, 32 nt, Homo Sapiens
uggauagugucuaaaaauuugcaaacugccuu

SEQ ID NO: 399909 - RNA, 32 nt, Homo Sapiens
auagggagggauuuuuccugugucauggauaa

SEQ ID NO: 399910 - RNA, 32 nt, Homo Sapiens
ucugggggcggaggggggaggggguggggagg

SEQ ID NO: 399911 - RNA, 32 nt, Homo Sapiens
auaguaaugauugaaguaaaugucuagcucug

SEQ ID NO: 399912 - RNA, 32 nt, Homo Sapiens
ugcaccuugaguugucagaagguagaaacuga

SEQ ID NO: 399913 - RNA, 32 nt, Homo Sapiens
ggcagccgguggagagggacgcggcggacgcc

SEQ ID NO: 399914 - RNA, 32 nt, Homo Sapiens
uucugcuuuccacagcuuugaaggccccuuug

SEQ ID NO: 399915 - RNA, 30 nt, Homo Sapiens
caggcucuggacuuccuccagucggccucu

SEQ ID NO: 399916 - RNA, 32 nt, Homo Sapiens
uuggacugugagauggugggcgugaguccuaa

SEQ ID NO: 399917 - RNA, 32 nt, Homo Sapiens
auaauaacaaaguucaguauugaccauaacug

SEQ ID NO: 399918 - RNA, 32 nt, Homo Sapiens
cuuccuauuaaaaccuuacacccauuauugau

SEQ ID NO: 399919 - RNA, 32 nt, Homo Sapiens
ucccugagcuuuuucacgcgggcccccuccuu

SEQ ID NO: 399920 - RNA, 32 nt, Homo Sapiens
acgugguggaggugcuguccaaggacucgcag

SEQ ID NO: 399921 - RNA, 27 nt, Homo Sapiens
cuugccacuuucuucagucacuuaaau

SEQ ID NO: 399922 - RNA, 32 nt, Homo Sapiens
gccuggcuuauacuuucuuaauaaaaaggaga

SEQ ID NO: 399923 - RNA, 31 nt, Homo Sapiens
ggcggaaacagcagccaaucggcgaucagau

SEQ ID NO: 399924 - RNA, 32 nt, Homo Sapiens
gagacccaacuggccuggaucugcgucccgac

SEQ ID NO: 399925 - RNA, 32 nt, Homo Sapiens
uucuuaguaaauugauacauccauuuuucuua

SEQ ID NO: 399926 - RNA, 32 nt, Homo Sapiens
ggggcugccgcugugucccuggcgaggcacug

SEQ ID NO: 399927 - RNA, 32 nt, Homo Sapiens
aaacagcagaagaacuaacauaacuaacucca

SEQ ID NO: 399928 - RNA, 32 nt, Homo Sapiens
uugucugugcaacaacagaccauccaugucuu

SEQ ID NO: 399929 - RNA, 32 nt, Homo Sapiens
cccugcccucgucacugcccaagcccgggccu

SEQ ID NO: 399930 - RNA, 32 nt, Homo Sapiens
gcaugaggccugugccguguggaccggcggcg

SEQ ID NO: 399931 - RNA, 32 nt, Homo Sapiens
gaggacaugcuaauauuuuguaaagcugggac

SEQ ID NO: 399932 - RNA, 32 nt, Homo Sapiens
cauggccuggccaucuuguugcugcuuggaga

SEQ ID NO: 399933 - RNA, 32 nt, Homo Sapiens
gccucccgccucccuccagcugcgagugcggc

SEQ ID NO: 399934 - RNA, 32 nt, Homo Sapiens
guuugguaaaaugacugccaugaaaggcauug

SEQ ID NO: 399935 - RNA, 32 nt, Homo Sapiens
auguaaaucacucaaaguauaugguguacagu

SEQ ID NO: 399936 - RNA, 31 nt, Homo Sapiens
aacaguaaaugaauaaauuugcugaugauuc

SEQ ID NO: 399937 - RNA, 32 nt, Homo Sapiens
ccucaccccucuauccauuccucccgccccag

SEQ ID NO: 399938 - RNA, 32 nt, Homo Sapiens
gggauuuaucaaaugaguuacuuuuuauuaua

SEQ ID NO: 399939 - RNA, 32 nt, Homo Sapiens
gccgccggacgcccgugaccauguggaggcug

SEQ ID NO: 399940 - RNA, 32 nt, Homo Sapiens
cuugcaauuucuguuuguuuucuauauucaca

SEQ ID NO: 399941 - RNA, 32 nt, Homo Sapiens
cucagaaaacaaguaucgucagguauucucug

SEQ ID NO: 399942 - RNA, 32 nt, Homo Sapiens
aaggagggagaggaaggcaggggaguugaugc

SEQ ID NO: 399943 - RNA, 32 nt, Homo Sapiens
ccuuuuaggauauuauagauuguacauauaug

SEQ ID NO: 399944 - RNA, 32 nt, Homo Sapiens
ggcagggaaggggccagcuacugggcgcagcc

SEQ ID NO: 399945 - RNA, 32 nt, Homo Sapiens
ucaaccuguauauauauuuuuuaaucgacgug

SEQ ID NO: 399946 - RNA, 32 nt, Homo Sapiens
uucccgagcgcggcggcggcggccauggcccg

SEQ ID NO: 399947 - RNA, 32 nt, Homo Sapiens
cuacaagcuccaugcccaagcagagcuggaga

SEQ ID NO: 399948 - RNA, 32 nt, Homo Sapiens
ucgcgccgcgcgcacgugacugcgcccccggc

SEQ ID NO: 399949 - RNA, 32 nt, Homo Sapiens
ugagcauucgcuguacccuuuaagauauccau

SEQ ID NO: 399950 - RNA, 32 nt, Homo Sapiens
uuaacaucuaaauucugguaacuauuaaaaga

SEQ ID NO: 399951 - RNA, 32 nt, Homo Sapiens
acugagugguggccuggggagguugggagcug

SEQ ID NO: 399952 - RNA, 32 nt, Homo Sapiens
caccacucacagauuccucacacuggggaaau

SEQ ID NO: 399953 - RNA, 32 nt, Homo Sapiens
gcuuucagacccggcucccagcccucgaacuc

SEQ ID NO: 399954 - RNA, 32 nt, Homo Sapiens
cucuuuaaagagaagaacuuuuuuauuauuau

SEQ ID NO: 399955 - RNA, 32 nt, Homo Sapiens
guccuucacucaucaguaaaauguaauaauug

SEQ ID NO: 399956 - RNA, 32 nt, Homo Sapiens
ccugggaagugauggaacaggaacucagggug

SEQ ID NO: 399957 - RNA, 32 nt, Homo Sapiens
uaucuaaaaaauaacugugcacuauaagggag

SEQ ID NO: 399958 - RNA, 32 nt, Homo Sapiens
aaaggaaaacaaaaugaacaacuucuacccuu

SEQ ID NO: 399959 - RNA, 32 nt, Homo Sapiens
agugcuguauaaaaucagccaauuauguuaaa

SEQ ID NO: 399960 - RNA, 32 nt, Homo Sapiens
ggccuguucugcuccuaggagaccugagcccg

SEQ ID NO: 399961 - RNA, 32 nt, Homo Sapiens
gucacaggcgcgagauggaguccccaagaggg

SEQ ID NO: 399962 - RNA, 32 nt, Homo Sapiens
gggagcugaggcgggagcggacaggcuggugg

SEQ ID NO: 399963 - RNA, 32 nt, Homo Sapiens
cuccuggcaggggcccuugugugcguccugag

SEQ ID NO: 399964 - RNA, 32 nt, Homo Sapiens
ggaugccaauuuccucuccacugcuguacaug

SEQ ID NO: 399965 - RNA, 32 nt, Homo Sapiens
aaugggcuuuguuagcacuuucaaaaaaaaaa

SEQ ID NO: 399966 - RNA, 32 nt, Homo Sapiens
agagcccccacggauuucugcacacucugggu

SEQ ID NO: 399967 - RNA, 32 nt, Homo Sapiens
cgggcacaacuuucugcccagaaaaaugugca

SEQ ID NO: 399968 - RNA, 32 nt, Homo Sapiens
gccauggcgacacuaaaggaggaggagccggg

SEQ ID NO: 399969 - RNA, 32 nt, Homo Sapiens
gacucagcuuacuacagccaggucuccucucu

SEQ ID NO: 399970 - RNA, 32 nt, Homo Sapiens
gucuagagagggucgucuggccugcuugcugg

SEQ ID NO: 399971 - RNA, 32 nt, Homo Sapiens
cacgacgggcagagagcacggagccgggaagc

SEQ ID NO: 399972 - RNA, 32 nt, Homo Sapiens
cagcuaagccuuuuccucuacucucuuccuug

SEQ ID NO: 399973 - RNA, 32 nt, Homo Sapiens
uccaucucauuucuaaaccccaaacagcucau

SEQ ID NO: 399974 - RNA, 32 nt, Homo Sapiens
accaaagcccgcgcgcagcugcaucccgcauc

SEQ ID NO: 399975 - RNA, 32 nt, Homo Sapiens
agugcgagcuggcggggcgcgcggagaggagg

SEQ ID NO: 399976 - RNA, 32 nt, Homo Sapiens
uuaaagggaaagguuaaugggcuacuuaauau

SEQ ID NO: 399977 - RNA, 29 nt, Homo Sapiens
aaaaguuaaaguuuauggaaguuaaugcu

SEQ ID NO: 399978 - RNA, 32 nt, Homo Sapiens
cacacacacacacacaagcacacacacacaug

SEQ ID NO: 399979 - RNA, 31 nt, Homo Sapiens
ucccggauggacgcucugccccgcagcgggc

SEQ ID NO: 399980 - RNA, 32 nt, Homo Sapiens
aagaggucaaugaccuaggaguaacaaucaac

SEQ ID NO: 399981 - RNA, 32 nt, Homo Sapiens
ccugggggcuccugggguucggaggcagcagg

SEQ ID NO: 399982 - RNA, 32 nt, Homo Sapiens
augugggaugaguuuuuaaaugccacaagaca

SEQ ID NO: 399983 - RNA, 32 nt, Homo Sapiens
auccucacuuugcugccccaccaucuugcuga

SEQ ID NO: 399984 - RNA, 32 nt, Homo Sapiens
agacuccagaauccccagcaucagcgggaacc

SEQ ID NO: 399985 - RNA, 32 nt, Homo Sapiens
gaacuuucagcuuucauguuuucaaccaucau

SEQ ID NO: 399986 - RNA, 32 nt, Homo Sapiens
ucuucgcccacaaagacacacccgcggggaug

SEQ ID NO: 399987 - RNA, 32 nt, Homo Sapiens
aaugaugcacaaaauaaauggcuguugaaauu

SEQ ID NO: 399988 - RNA, 32 nt, Homo Sapiens
cgcgaacccgcggccgcaguucccaggcgucu

SEQ ID NO: 399989 - RNA, 32 nt, Homo Sapiens
gagugcagcugagcagggagcaguggagaagc

SEQ ID NO: 399990 - RNA, 32 nt, Homo Sapiens
ccacugacuucauugaucucuaaucuuuuuua

SEQ ID NO: 399991 - RNA, 32 nt, Homo Sapiens
gcgugaucgggcgggcggccgggcgcaagggu

SEQ ID NO: 399992 - RNA, 32 nt, Homo Sapiens
cauuuucuguugguuugguuucguuucuauga

SEQ ID NO: 399993 - RNA, 32 nt, Homo Sapiens
ggaaugaacaagaaacaaaaugggugggugaa

SEQ ID NO: 399994 - RNA, 32 nt, Homo Sapiens
ucugcuuuuccacauguguguauggcacgccu

SEQ ID NO: 399995 - RNA, 29 nt, Homo Sapiens
cuacuugugacuuuccaaccugguaacuu

SEQ ID NO: 399996 - RNA, 32 nt, Homo Sapiens
ucuggccucccucuugcucccucucuggccau

SEQ ID NO: 399997 - RNA, 32 nt, Homo Sapiens
ccauggcugccacuuuuuuauacuauuuggag

SEQ ID NO: 399998 - RNA, 32 nt, Homo Sapiens
agagucucgcuguauuaucugcucucacacug

SEQ ID NO: 399999 - RNA, 32 nt, Homo Sapiens
uggagauuaagcggguucugugcgauuuuuag

SEQ ID NO: 400000 - RNA, 32 nt, Homo Sapiens
agcaugacaaugagcguguguccauuaccaag

SEQ ID NO: 400001 - RNA, 32 nt, Homo Sapiens
ugauagcaagauaaacaaaaugauuuguuggg

SEQ ID NO: 400002 - RNA, 32 nt, Homo Sapiens
uccuucugccagcagcucacacugcuugaagu

SEQ ID NO: 400003 - RNA, 32 nt, Homo Sapiens
cagagggauggaggagucucugaccaccagcg

SEQ ID NO: 400004 - RNA, 32 nt, Homo Sapiens
gccugugugcucccacccuuuccuccugcugc

SEQ ID NO: 400005 - RNA, 32 nt, Homo Sapiens
ucaaaaccugagcuaaaaccaaugcaucagcu

SEQ ID NO: 400006 - RNA, 32 nt, Homo Sapiens
aucccaacccacccaccucaauccccauggcu

SEQ ID NO: 400007 - RNA, 32 nt, Homo Sapiens
uaaaaguggaauguauuuaaaacuuguugaau

SEQ ID NO: 400008 - RNA, 32 nt, Homo Sapiens
ccccuugggcagacgcugcgcgugcccagagg

SEQ ID NO: 400009 - RNA, 32 nt, Homo Sapiens
acccaggacucuuugggaccugaagaugcucu

SEQ ID NO: 400010 - RNA, 32 nt, Homo Sapiens
uauaauuaggaauuauuucagagacaauguuu

SEQ ID NO: 400011 - RNA, 32 nt, Homo Sapiens
gcaaagggaacuaagggaaaaggguucagccc

SEQ ID NO: 400012 - RNA, 32 nt, Homo Sapiens
cacgggaauuuggagggaaaaggacacggagc

SEQ ID NO: 400013 - RNA, 32 nt, Homo Sapiens
uauucuacaaauuuaucuuagcacuaguuuca

SEQ ID NO: 400014 - RNA, 32 nt, Homo Sapiens
ccccuccccaccuggacacacacacaccagug

SEQ ID NO: 400015 - RNA, 32 nt, Homo Sapiens
gagcauagucaucugagaacuguugccagagg

SEQ ID NO: 400016 - RNA, 32 nt, Homo Sapiens
aagcggguucccuccauauccuguucagccag

SEQ ID NO: 400017 - RNA, 32 nt, Homo Sapiens
auacugacuggcacagaagauaccgaacuggc

SEQ ID NO: 400018 - RNA, 32 nt, Homo Sapiens
aucacagacagagaaagcagaacgguggucac

SEQ ID NO: 400019 - RNA, 32 nt, Homo Sapiens
cuccuggacggccugaccgcggucggccccgc

SEQ ID NO: 400020 - RNA, 32 nt, Homo Sapiens
aauugguucccuuuagcaagggauucagaucu

SEQ ID NO: 400021 - RNA, 32 nt, Homo Sapiens
uccccgucuuggggagguggggaccagcagau

SEQ ID NO: 400022 - RNA, 32 nt, Homo Sapiens
agccaacaaaggguaugggaaugagcacauaa

SEQ ID NO: 400023 - RNA, 32 nt, Homo Sapiens
uacuuuuaaacaacuggaucuuguggaacuca

SEQ ID NO: 400024 - RNA, 32 nt, Homo Sapiens
ccucaggugauccacccgccucgggcucccaa

SEQ ID NO: 400025 - RNA, 32 nt, Homo Sapiens
ugugguggugugagugggaggcggcggcgcug

SEQ ID NO: 400026 - RNA, 32 nt, Homo Sapiens
gggaggagccagcggccggggagguucuaguc

SEQ ID NO: 400027 - RNA, 32 nt, Homo Sapiens
uucuauguuuagucaauauucauuucaguaga

SEQ ID NO: 400028 - RNA, 32 nt, Homo Sapiens
gauaaccagaagcugcaucuuauugacagaug

SEQ ID NO: 400029 - RNA, 32 nt, Homo Sapiens
agggagagggccaauccagacacacucacacu

SEQ ID NO: 400030 - RNA, 32 nt, Homo Sapiens
ggguuaauuuuaaaugugauuccgaaucuccu

SEQ ID NO: 400031 - RNA, 32 nt, Homo Sapiens
gccuucguccauucugcuaccgcggccacauc

SEQ ID NO: 400032 - RNA, 32 nt, Homo Sapiens
ggaaagggaaaggguaggccuguagacuaacg

SEQ ID NO: 400033 - RNA, 32 nt, Homo Sapiens
uuagcacuggccucugcguuggaccggauugc

SEQ ID NO: 400034 - RNA, 32 nt, Homo Sapiens
gcgaaucuuaaccuaacagccuugacaaacug

SEQ ID NO: 400035 - RNA, 32 nt, Homo Sapiens
caucagccacaccaaggucuuggucaguuaac

SEQ ID NO: 400036 - RNA, 32 nt, Homo Sapiens
ucuuuucaugcuucuuuucuuuuuauccccaa

SEQ ID NO: 400037 - RNA, 32 nt, Homo Sapiens
aagaugaacaacacacaguccuugaagaucuu

SEQ ID NO: 400038 - RNA, 32 nt, Homo Sapiens
gagcagcuccgaccacaccauccucacacugc

SEQ ID NO: 400039 - RNA, 31 nt, Homo Sapiens
agacagaagcacccccugccccggcaagaaa

SEQ ID NO: 400040 - RNA, 32 nt, Homo Sapiens
uccggugcugccugcgucaucuccgcgcgucc

SEQ ID NO: 400041 - RNA, 31 nt, Homo Sapiens
uaaacuauugcagguuaucaagauuaacaaa

SEQ ID NO: 400042 - RNA, 32 nt, Homo Sapiens
ccgcgcagccccagccugccucccggcgccca

SEQ ID NO: 400043 - RNA, 32 nt, Homo Sapiens
aucaccuagcagaggggacacuaguugaaaac

SEQ ID NO: 400044 - RNA, 30 nt, Homo Sapiens
gaaagccugguugguggggaaaccucguca

SEQ ID NO: 400045 - RNA, 32 nt, Homo Sapiens
aggcucagaggcugaagcaggaggaaggaagg

SEQ ID NO: 400046 - RNA, 31 nt, Homo Sapiens
caggaaggggaguucgcaggagcuccagucc

SEQ ID NO: 400047 - RNA, 32 nt, Homo Sapiens
aaguccccaggccccaggaagccgugcccugc

SEQ ID NO: 400048 - RNA, 32 nt, Homo Sapiens
agucucagcucacagcaaccacucucuccugg

SEQ ID NO: 400049 - RNA, 32 nt, Homo Sapiens
cccagucgaaggcccaggauggcuuuugcugc

SEQ ID NO: 400050 - RNA, 32 nt, Homo Sapiens
ccuagaaccaguuuuaagauuaugccuacauc

SEQ ID NO: 400051 - RNA, 32 nt, Homo Sapiens
cuggagccgcccggcccggacauggcgaccgu

SEQ ID NO: 400052 - RNA, 32 nt, Homo Sapiens
cucgcggaugcggcuggugcgcaguagcgggc

SEQ ID NO: 400053 - RNA, 32 nt, Homo Sapiens
ugcggcucggaacucggauugcagcucugaac

SEQ ID NO: 400054 - RNA, 32 nt, Homo Sapiens
guacauguacuauuuuucaguauaaauauaau

SEQ ID NO: 400055 - RNA, 32 nt, Homo Sapiens
agagcaugggagaggugggagggguucuugca

SEQ ID NO: 400056 - RNA, 32 nt, Homo Sapiens
uauuuucacacacacacacacacacacacaca

SEQ ID NO: 400057 - RNA, 32 nt, Homo Sapiens
uucuugacaguacauuuuuagaucuggccuuu

SEQ ID NO: 400058 - RNA, 32 nt, Homo Sapiens
uuacagguuacaugaaacauugaaagacuugu

SEQ ID NO: 400059 - RNA, 32 nt, Homo Sapiens
acugaauaauaauuaacacuauuuuccaguag

SEQ ID NO: 400060 - RNA, 32 nt, Homo Sapiens
ggcacccuccuuccuguuuuuaucuaauaaaa

SEQ ID NO: 400061 - RNA, 32 nt, Homo Sapiens
ccucaaauagaauauuauuccuccuccucucu

SEQ ID NO: 400062 - RNA, 32 nt, Homo Sapiens
ggccuccuggcccgcccucaccucugauagac

SEQ ID NO: 400063 - RNA, 32 nt, Homo Sapiens
gcggaaaguacuucacucaacaacaauauucu

SEQ ID NO: 400064 - RNA, 32 nt, Homo Sapiens
guaaucaucuucugcccuuaauugacacuccu

SEQ ID NO: 400065 - RNA, 32 nt, Homo Sapiens
cggccccggccgcccacgccgcgcgucguucu

SEQ ID NO: 400066 - RNA, 32 nt, Homo Sapiens
agaauccucacagaacucaggaaaaugccaua

SEQ ID NO: 400067 - RNA, 32 nt, Homo Sapiens
cauuauagacagcaguguguuuuuuagaaaga

SEQ ID NO: 400068 - RNA, 32 nt, Homo Sapiens
cuguauccgcagaguaguugcaugucauuugg

SEQ ID NO: 400069 - RNA, 32 nt, Homo Sapiens
uuacucagcguagauguguguucacacaaauu

SEQ ID NO: 400070 - RNA, 32 nt, Homo Sapiens
auugguugacauuuugcaaacaaauaaauugu

SEQ ID NO: 400071 - RNA, 32 nt, Homo Sapiens
uaacuuccauucucaguuuccuuguuucuuuu

SEQ ID NO: 400072 - RNA, 32 nt, Homo Sapiens
aaaaaaaaaaaaaaacaaaaaaaaacccugag

SEQ ID NO: 400073 - RNA, 32 nt, Homo Sapiens
gcuuuugucccccaagcuggaguacaaugaca

SEQ ID NO: 400074 - RNA, 32 nt, Homo Sapiens
uggccgccuugaaugccugguccuucaagcuc

SEQ ID NO: 400075 - RNA, 32 nt, Homo Sapiens
augguuuggcuguguccccaugcaaaucucau

SEQ ID NO: 400076 - RNA, 32 nt, Homo Sapiens
cauauuuauacuauuuauauucuuauauaaca

SEQ ID NO: 400077 - RNA, 32 nt, Homo Sapiens
ggccaggcggggcugggcugcagaccucuggg

SEQ ID NO: 400078 - RNA, 32 nt, Homo Sapiens
ccuguaagaacaaaaaucauucuguaggaauu

SEQ ID NO: 400079 - RNA, 32 nt, Homo Sapiens
ccaaggcgugacucauuucucagucucaccau

SEQ ID NO: 400080 - RNA, 32 nt, Homo Sapiens
cgagaaguccagacggcugugcgucugcugcu

SEQ ID NO: 400081 - RNA, 32 nt, Homo Sapiens
ugcuacauaggauucugguauuccacauccaa

SEQ ID NO: 400082 - RNA, 32 nt, Homo Sapiens
agugaugcaauaaccagcauaauaaaaaggca

SEQ ID NO: 400083 - RNA, 32 nt, Homo Sapiens
caguauguuucaucuaggacuuacaauaaaug

SEQ ID NO: 400084 - RNA, 32 nt, Homo Sapiens
cccuggcaaccacuaaucuacuuucugucucu

SEQ ID NO: 400085 - RNA, 32 nt, Homo Sapiens
agcggcucucagggaaggccuggucuccaccc

SEQ ID NO: 400086 - RNA, 32 nt, Homo Sapiens
aggccugaacaaaacaggcuguuugcugugag

SEQ ID NO: 400087 - RNA, 32 nt, Homo Sapiens
gagcugggcgcugcagcugcacugccgaucgc

SEQ ID NO: 400088 - RNA, 32 nt, Homo Sapiens
cuuugccccuggaggagccacuauuccagaag

SEQ ID NO: 400089 - RNA, 32 nt, Homo Sapiens
cauggcaaugcggugggcgcgcgcuugucgug

SEQ ID NO: 400090 - RNA, 32 nt, Homo Sapiens
accacaccugcacuucugccucacuuucuugc

SEQ ID NO: 400091 - RNA, 32 nt, Homo Sapiens
aucucugcccaagcuuccugugcccagggugu

SEQ ID NO: 400092 - RNA, 32 nt, Homo Sapiens
cuucgcauccucucuugcucguggagucuuuu

SEQ ID NO: 400093 - RNA, 32 nt, Homo Sapiens
cuuauugcaggcaagucucuauauuauguccu

SEQ ID NO: 400094 - RNA, 32 nt, Homo Sapiens
uacaguuuauuacaguaaaaggacagagauua

SEQ ID NO: 400095 - RNA, 32 nt, Homo Sapiens
guugcuuucaaauccuucucuuuccuggguug

SEQ ID NO: 400096 - RNA, 32 nt, Homo Sapiens
ugagcuaggaguggagaaucagggccaaguuu

SEQ ID NO: 400097 - RNA, 32 nt, Homo Sapiens
uuuaccguccccagccccccucccacaugguc

SEQ ID NO: 400098 - RNA, 32 nt, Homo Sapiens
aaaaguucauuuccaaggggaaucaggagcga

SEQ ID NO: 400099 - RNA, 32 nt, Homo Sapiens
cucucucuuguggugaagaugaaaaugaggga

SEQ ID NO: 400100 - RNA, 32 nt, Homo Sapiens
cccugcauuugaccgucgagacugcagcagcg

SEQ ID NO: 400101 - RNA, 30 nt, Homo Sapiens
uaggugugcggcccgccgccggacagcccg

SEQ ID NO: 400102 - RNA, 31 nt, Homo Sapiens
cagagcugagggcccuguggaguccagcucu

SEQ ID NO: 400103 - RNA, 32 nt, Homo Sapiens
uauuccagaaauuuuugaaagcaguaaccuua

SEQ ID NO: 400104 - RNA, 32 nt, Homo Sapiens
uugcacugcagcauauacacuaacuagcuuau

SEQ ID NO: 400105 - RNA, 32 nt, Homo Sapiens
ucuuauagcaaccuuaugaggaaggcauuauu

SEQ ID NO: 400106 - RNA, 32 nt, Homo Sapiens
aggcacugacacugaggccuuaccggugacug

SEQ ID NO: 400107 - RNA, 32 nt, Homo Sapiens
gucuaaguccuggcucuuauugguucauauga

SEQ ID NO: 400108 - RNA, 32 nt, Homo Sapiens
cacaucccauugguucuguuucucuggggaaa

SEQ ID NO: 400109 - RNA, 32 nt, Homo Sapiens
cuaguggggacuuggagaauuuuugugucuag

SEQ ID NO: 400110 - RNA, 32 nt, Homo Sapiens
guaaauucaaccacuguaaaaugaaauuacua

SEQ ID NO: 400111 - RNA, 32 nt, Homo Sapiens
aucaguaaugaaaaaacugaugaagucugaau

SEQ ID NO: 400112 - RNA, 32 nt, Homo Sapiens
cuggaacaagacaauucaugugagauaagaaa

SEQ ID NO: 400113 - RNA, 32 nt, Homo Sapiens
aaacagcgagaugaguaaaaacaucagcuucc

SEQ ID NO: 400114 - RNA, 32 nt, Homo Sapiens
accagccugggcaacauagugagacgcccccc

SEQ ID NO: 400115 - RNA, 32 nt, Homo Sapiens
uguguuucuaauuuauaguuuaaguucauuug

SEQ ID NO: 400116 - RNA, 32 nt, Homo Sapiens
aaggcucugagaaggguuuguaaaacuuuauu

SEQ ID NO: 400117 - RNA, 32 nt, Homo Sapiens
agcaagcaggcuuuuuacucauuacacaagaa

SEQ ID NO: 400118 - RNA, 32 nt, Homo Sapiens
ugguuguuugauuuuucuuucuuucuuuguaa

SEQ ID NO: 400119 - RNA, 32 nt, Homo Sapiens
guaccagaccucucugagagacauggauauca

SEQ ID NO: 400120 - RNA, 32 nt, Homo Sapiens
ccuccuggcugguuuaccugcugcugcccauu

SEQ ID NO: 400121 - RNA, 32 nt, Homo Sapiens
gcccggcucgcugucgcagagccgagccuguu

SEQ ID NO: 400122 - RNA, 32 nt, Homo Sapiens
uucgccaccagagggcgccccgggcccugggu

SEQ ID NO: 400123 - RNA, 32 nt, Homo Sapiens
ggguggcaacuccacgcgggagucauuggcug

SEQ ID NO: 400124 - RNA, 32 nt, Homo Sapiens
guuggaaaaaagucuuacaagucuauaauuua

SEQ ID NO: 400125 - RNA, 32 nt, Homo Sapiens
cugggcccacccaagcaggaggcugggacgcu

SEQ ID NO: 400126 - RNA, 32 nt, Homo Sapiens
cgcggggauggaggcagggaggggggacgaug

SEQ ID NO: 400127 - RNA, 32 nt, Homo Sapiens
aagggguaauauaaaaaugugcucguguguuu

SEQ ID NO: 400128 - RNA, 32 nt, Homo Sapiens
aguuuaaacaauugaaauggguauauuucuuc

SEQ ID NO: 400129 - RNA, 32 nt, Homo Sapiens
gggaggaggcacagcuagcugcacaguucucu

SEQ ID NO: 400130 - RNA, 32 nt, Homo Sapiens
gggagcucugagacgccuccugucccacgcuc

SEQ ID NO: 400131 - RNA, 32 nt, Homo Sapiens
aacagacucaggugcuucuggaccucacuccu

SEQ ID NO: 400132 - RNA, 32 nt, Homo Sapiens
gacgacccggccgucccggaggccgcgcgcgu

SEQ ID NO: 400133 - RNA, 32 nt, Homo Sapiens
aaucuuucaauucguuuuucucucuuuuccuc

SEQ ID NO: 400134 - RNA, 32 nt, Homo Sapiens
cuccauccaccccccauccccccgguuuccuc

SEQ ID NO: 400135 - RNA, 32 nt, Homo Sapiens
cccgcgagcucuccucucuccucuggucuccg

SEQ ID NO: 400136 - RNA, 32 nt, Homo Sapiens
uauacgaaaacauguuuauuauuuucauuuuu

SEQ ID NO: 400137 - RNA, 32 nt, Homo Sapiens
agugcacagauaaguaggccauuuuaauuaaa

SEQ ID NO: 400138 - RNA, 32 nt, Homo Sapiens
auggaguugcuucuguugaauuagcucugcca

SEQ ID NO: 400139 - RNA, 32 nt, Homo Sapiens
gccagcugcucccgagguggccuugagaagga

SEQ ID NO: 400140 - RNA, 32 nt, Homo Sapiens
uauaaaauagcugaauaguauuuuaaagccaa

SEQ ID NO: 400141 - RNA, 32 nt, Homo Sapiens
aagaugggaaaguuaggcuugaugacccagaa

SEQ ID NO: 400142 - RNA, 32 nt, Homo Sapiens
gugucugucccucuucagccaagcccaagucu

SEQ ID NO: 400143 - RNA, 32 nt, Homo Sapiens
aucauuauuuaguuaagguuuccucuauuauc

SEQ ID NO: 400144 - RNA, 32 nt, Homo Sapiens
ccaacuuuggauucuuuuuuaguuauauguuu

SEQ ID NO: 400145 - RNA, 32 nt, Homo Sapiens
uucauuuuucuaaaauaaagugaauguauuuu

SEQ ID NO: 400146 - RNA, 32 nt, Homo Sapiens
uggguggccccauuguaaaaaugccugauaga

SEQ ID NO: 400147 - RNA, 29 nt, Homo Sapiens
guauguaguguauguaauuuucuaauaau

SEQ ID NO: 400148 - RNA, 32 nt, Homo Sapiens
ugcggucccgcggcgcugcaguuguguccagc

SEQ ID NO: 400149 - RNA, 32 nt, Homo Sapiens
uuacuaguuaauugaagaaaaaguguaacacu

SEQ ID NO: 400150 - RNA, 32 nt, Homo Sapiens
ucccagcgccuuuuaaaaguuguuaugugguu

SEQ ID NO: 400151 - RNA, 32 nt, Homo Sapiens
ccccuuccaaaauuauacuuguauuuaaaaaa

SEQ ID NO: 400152 - RNA, 32 nt, Homo Sapiens
ccaccucccucuucuucuuuuucauccuucug

SEQ ID NO: 400153 - RNA, 32 nt, Homo Sapiens
gguugccggugguggcaggagcucugggcucc

SEQ ID NO: 400154 - RNA, 32 nt, Homo Sapiens
uugaugaaacaucaacccagugcuaggaauac

SEQ ID NO: 400155 - RNA, 32 nt, Homo Sapiens
agugccucaggaucuuauggcuccuuccucca

SEQ ID NO: 400156 - RNA, 32 nt, Homo Sapiens
agagagguuguccugaggggcugggugauucc

SEQ ID NO: 400157 - RNA, 29 nt, Homo Sapiens
caaaugaagaagguggcuguuauuuagga

SEQ ID NO: 400158 - RNA, 32 nt, Homo Sapiens
auaauccagcucaguauuuuuguuuuguuuuu

SEQ ID NO: 400159 - RNA, 32 nt, Homo Sapiens
ggagggagggccccagcccaccccugcggggg

SEQ ID NO: 400160 - RNA, 32 nt, Homo Sapiens
gacuucugguaucuucuuacuaacauaaauau

SEQ ID NO: 400161 - RNA, 32 nt, Homo Sapiens
gagcuggaccgauuuuaacauucacauugccc

SEQ ID NO: 400162 - RNA, 32 nt, Homo Sapiens
uuagcgcaacgcggcuccacgaccacacgcac

SEQ ID NO: 400163 - RNA, 32 nt, Homo Sapiens
guacauaauguuuuauuggcauagucuaugga

SEQ ID NO: 400164 - RNA, 32 nt, Homo Sapiens
uuuuuugucuuuuuuuuuuuuauaaugcacau

SEQ ID NO: 400165 - RNA, 32 nt, Homo Sapiens
caagcagccucgucucggcgcgcagugucugu

SEQ ID NO: 400166 - RNA, 32 nt, Homo Sapiens
ggcuccugccagcagcugagcuggguagccuc

SEQ ID NO: 400167 - RNA, 32 nt, Homo Sapiens
uacccaaguucaguaaaugucuaucaguaagc

SEQ ID NO: 400168 - RNA, 32 nt, Homo Sapiens
auguguaguggagagaaccuugguaaauguaa

SEQ ID NO: 400169 - RNA, 32 nt, Homo Sapiens
aaugccaggaggaggggucauuggccuuuuug

SEQ ID NO: 400170 - RNA, 30 nt, Homo Sapiens
cuugauaauauaauuggggaaacagaauag

SEQ ID NO: 400171 - RNA, 32 nt, Homo Sapiens
uuagagcguuuuucacgcguccuucccccaug

SEQ ID NO: 400172 - RNA, 32 nt, Homo Sapiens
guuguaaauggcauugacagcugcucuuuagg

SEQ ID NO: 400173 - RNA, 32 nt, Homo Sapiens
cuucaccgcccccucagaccgccccaaggucc

SEQ ID NO: 400174 - RNA, 32 nt, Homo Sapiens
ucucaacccaagaaccuguuuccuggaccagu

SEQ ID NO: 400175 - RNA, 32 nt, Homo Sapiens
acugagauauaaauaaacuuauaaauauuugu

SEQ ID NO: 400176 - RNA, 32 nt, Homo Sapiens
cacuuaagcggcccgggcggguaccgccgucc

SEQ ID NO: 400177 - RNA, 32 nt, Homo Sapiens
uugcuucuagagaaacaaaagcaaggggaugg

SEQ ID NO: 400178 - RNA, 32 nt, Homo Sapiens
ugacuaugucauugucuccacucauuuuugac

SEQ ID NO: 400179 - RNA, 32 nt, Homo Sapiens
augagagcgagcugacgggcuccagcgagcgc

SEQ ID NO: 400180 - RNA, 32 nt, Homo Sapiens
gaggaaaguccucucuuuugcauauucuaaua

SEQ ID NO: 400181 - RNA, 32 nt, Homo Sapiens
agccgcccgcauguggcugccacgguucucca

SEQ ID NO: 400182 - RNA, 32 nt, Homo Sapiens
acuccaguccgucccggcauccauggcagccc

SEQ ID NO: 400183 - RNA, 32 nt, Homo Sapiens
uugauccuugaaaaugggaacuuugacagcca

SEQ ID NO: 400184 - RNA, 32 nt, Homo Sapiens
ugaaacugggguccugaggagauacaaacacu

SEQ ID NO: 400185 - RNA, 32 nt, Homo Sapiens
uuggcuagaaaaaacccacugcuguacucugu

SEQ ID NO: 400186 - RNA, 32 nt, Homo Sapiens
caccagaucugccugcaccuugucuuggacuu

SEQ ID NO: 400187 - RNA, 32 nt, Homo Sapiens
cucugauuuuuacacaguguagaguggccagc

SEQ ID NO: 400188 - RNA, 32 nt, Homo Sapiens
cugaaauuccuccaccaaguugguauucaaaa

SEQ ID NO: 400189 - RNA, 32 nt, Homo Sapiens
cagccagaguugguguucaaguuuacagauau

SEQ ID NO: 400190 - RNA, 32 nt, Homo Sapiens
gaaugaaugguaaaguuuuaccuagugcccca

SEQ ID NO: 400191 - RNA, 30 nt, Homo Sapiens
gcugggggugaaagacggggccacugcagc

SEQ ID NO: 400192 - RNA, 32 nt, Homo Sapiens
aacacacacucagauagcacaaauucuaccau

SEQ ID NO: 400193 - RNA, 32 nt, Homo Sapiens
ccuuccacuccagauccgcaccucagauccag

SEQ ID NO: 400194 - RNA, 32 nt, Homo Sapiens
cucuggucucuuuuccucucuuccaaugcccu

SEQ ID NO: 400195 - RNA, 32 nt, Homo Sapiens
cagggggcggacggccacggcgcggggggcgc

SEQ ID NO: 400196 - RNA, 32 nt, Homo Sapiens
gcccgggcuuugccuccaccagcgcccuggcc

SEQ ID NO: 400197 - RNA, 32 nt, Homo Sapiens
aggcaguaauuuccuuuuggaaaggacucuga

SEQ ID NO: 400198 - RNA, 32 nt, Homo Sapiens
aguccgccgggcggugauccggggccgcuccc

SEQ ID NO: 400199 - RNA, 32 nt, Homo Sapiens
caguaaucggagccccugcacaaaaugaaaua

SEQ ID NO: 400200 - RNA, 32 nt, Homo Sapiens
gcagaggagagauuucaacaaaaguuuggaaa

SEQ ID NO: 400201 - RNA, 32 nt, Homo Sapiens
uaaaaacacaauuuauaaauuuagacaaagaa

SEQ ID NO: 400202 - RNA, 32 nt, Homo Sapiens
gggaaagaagucuauuugaugaauaugugugu

SEQ ID NO: 400203 - RNA, 32 nt, Homo Sapiens
gccccgcccccggcccgcccccgccuuuccau

SEQ ID NO: 400204 - RNA, 32 nt, Homo Sapiens
gcuugagaaacacaaugauauuugugccaucu

SEQ ID NO: 400205 - RNA, 32 nt, Homo Sapiens
cuggccaugugacuucggcccugacgcccgcc

SEQ ID NO: 400206 - RNA, 32 nt, Homo Sapiens
uuguagaccccuccccuccuuugcaaagguau

SEQ ID NO: 400207 - RNA, 32 nt, Homo Sapiens
ggggcugguagcggccggagccgugcgaguuc

SEQ ID NO: 400208 - RNA, 32 nt, Homo Sapiens
cuugggcuccagcccucugccuuuucauccca

SEQ ID NO: 400209 - RNA, 32 nt, Homo Sapiens
ugugagcagcugucuucagagcuccggggugg

SEQ ID NO: 400210 - RNA, 32 nt, Homo Sapiens
cugggggcugagaaggcccaccaucuguguug

SEQ ID NO: 400211 - RNA, 32 nt, Homo Sapiens
gcacugcuccugagacuauuuuaacugggauu

SEQ ID NO: 400212 - RNA, 32 nt, Homo Sapiens
gucugcugccagcugcuggucuccacacccuc

SEQ ID NO: 400213 - RNA, 32 nt, Homo Sapiens
caagcaagagaugguccaugcuuuucugacgu

SEQ ID NO: 400214 - RNA, 32 nt, Homo Sapiens
aacaacucggacugggcugcccggggccaccg

SEQ ID NO: 400215 - RNA, 32 nt, Homo Sapiens
ccccgguggccagggaagccacuuccaagcgc

SEQ ID NO: 400216 - RNA, 32 nt, Homo Sapiens
uauguauuauuuacauuuaauagacuuacagg

SEQ ID NO: 400217 - RNA, 32 nt, Homo Sapiens
ggcggcggcggagacuccggggcugcggcgcc

SEQ ID NO: 400218 - RNA, 32 nt, Homo Sapiens
gacuguuccaacggcucugggccucagugguc

SEQ ID NO: 400219 - RNA, 32 nt, Homo Sapiens
gaauuucuucccucugcuuccuggacacagag

SEQ ID NO: 400220 - RNA, 32 nt, Homo Sapiens
auuuuuaauuauauuucuccuuuagaaaaaaa

SEQ ID NO: 400221 - RNA, 32 nt, Homo Sapiens
ugacgggcuccgucucggagauucuuguccug

SEQ ID NO: 400222 - RNA, 32 nt, Homo Sapiens
gguguuugcauucugugaaaugccucuccacg

SEQ ID NO: 400223 - RNA, 32 nt, Homo Sapiens
aauauauuucuuacuagcaaaauagaaaauug

SEQ ID NO: 400224 - RNA, 32 nt, Homo Sapiens
caaucaagcuaaaagaaucgaagacaucccua

SEQ ID NO: 400225 - RNA, 32 nt, Homo Sapiens
cuucaugugucuuuuugcugcauuuuacucac

SEQ ID NO: 400226 - RNA, 32 nt, Homo Sapiens
agccgggcgugguggcgggcgccuguaguccc

SEQ ID NO: 400227 - RNA, 32 nt, Homo Sapiens
aaugccuguauauaauaacucuuaugugauau

SEQ ID NO: 400228 - RNA, 32 nt, Homo Sapiens
gacgcggcgccggcugccggcgggaggaagcg

SEQ ID NO: 400229 - RNA, 32 nt, Homo Sapiens
ggggauuuuuaaacauuucuuugaacuuugag

SEQ ID NO: 400230 - RNA, 32 nt, Homo Sapiens
cuuuuuacccucaacucaaguagcaaauauca

SEQ ID NO: 400231 - RNA, 32 nt, Homo Sapiens
gcuguucuagccggcccccucuccaggggucg

SEQ ID NO: 400232 - RNA, 32 nt, Homo Sapiens
aagggaaaugucuggaaccuuccaguuguuua

SEQ ID NO: 400233 - RNA, 32 nt, Homo Sapiens
guauuugccuauauugugaacgaauuagcagu

SEQ ID NO: 400234 - RNA, 32 nt, Homo Sapiens
gauuaaugacauuuuuauuuuguguauuaguu

SEQ ID NO: 400235 - RNA, 32 nt, Homo Sapiens
agggcagagaggaggagggaggcugucaggau

SEQ ID NO: 400236 - RNA, 32 nt, Homo Sapiens
aguuaauuauaauuguucuuccauuuguguga

SEQ ID NO: 400237 - RNA, 32 nt, Homo Sapiens
uggcagggaggagagcaagagguggcugaaau

SEQ ID NO: 400238 - RNA, 32 nt, Homo Sapiens
uuugacaaaaauacuugaaucuuggaccucua

SEQ ID NO: 400239 - RNA, 32 nt, Homo Sapiens
uuguuugucuauuuguaaagcaaccaccuucc

SEQ ID NO: 400240 - RNA, 32 nt, Homo Sapiens
aaaaugguggguggcuuuuucuuuuuuguacg

SEQ ID NO: 400241 - RNA, 32 nt, Homo Sapiens
gacauuguuuuuuauuuuuuuaaccuuguccu

SEQ ID NO: 400242 - RNA, 32 nt, Homo Sapiens
aagagaaguuaaagaagauggaauauccauuu

SEQ ID NO: 400243 - RNA, 32 nt, Homo Sapiens
uuuaucucauuucucaauauuagaauacgggu

SEQ ID NO: 400244 - RNA, 30 nt, Homo Sapiens
cggggugaggggcggaagggucccggcgcg

SEQ ID NO: 400245 - RNA, 30 nt, Homo Sapiens
aucucucgauuccguccgguucugagucgg

SEQ ID NO: 400246 - RNA, 32 nt, Homo Sapiens
aucauuauagcuuuuguauaauaagaguaguu

SEQ ID NO: 400247 - RNA, 32 nt, Homo Sapiens
ggccccagcgcugucucccgggcccccuaggg

SEQ ID NO: 400248 - RNA, 32 nt, Homo Sapiens
ccguguuugaaccuggcugaaugaguggaggg

SEQ ID NO: 400249 - RNA, 32 nt, Homo Sapiens
agaaguuugucaggcagagauguuuaugguug

SEQ ID NO: 400250 - RNA, 32 nt, Homo Sapiens
ccaaagagacaagcacuugaaaaaagcaaugg

SEQ ID NO: 400251 - RNA, 32 nt, Homo Sapiens
cauuuacaauuucaaaagaacauucuuauauu

SEQ ID NO: 400252 - RNA, 32 nt, Homo Sapiens
ucuucugcucuuucuucuuccacacaugcaag

SEQ ID NO: 400253 - RNA, 32 nt, Homo Sapiens
cucuuggccauccuucuguguaccacuuccug

SEQ ID NO: 400254 - RNA, 26 nt, Homo Sapiens
gaugaaccuuggauuuggugacgagu

SEQ ID NO: 400255 - RNA, 32 nt, Homo Sapiens
uaaauuuucucauuuaaaaaucaaaaaucuug

SEQ ID NO: 400256 - RNA, 32 nt, Homo Sapiens
cugccauccccuccccguuucaguggacccug

SEQ ID NO: 400257 - RNA, 32 nt, Homo Sapiens
guccucucugcaguuuuauucccuuuagucuu

SEQ ID NO: 400258 - RNA, 32 nt, Homo Sapiens
ccugaacuccaagaugucuuugaaaguagcca

SEQ ID NO: 400259 - RNA, 32 nt, Homo Sapiens
cguuuaaauucuauuauauaaagccccaagug

SEQ ID NO: 400260 - RNA, 32 nt, Homo Sapiens
ccagugcuucuccaacacugaagugcuugcag

SEQ ID NO: 400261 - RNA, 32 nt, Homo Sapiens
uagacgcccagcugcacaacuugauugccuua

SEQ ID NO: 400262 - RNA, 32 nt, Homo Sapiens
cagcacgauggccucccugcucaaggcccugc

SEQ ID NO: 400263 - RNA, 32 nt, Homo Sapiens
ucacuugaggucgggcguuugagaccagccug

SEQ ID NO: 400264 - RNA, 32 nt, Homo Sapiens
acaccuggugggagaacacacucuggaauucu

SEQ ID NO: 400265 - RNA, 32 nt, Homo Sapiens
acuccuugagguuuccuugaagccccugagaa

SEQ ID NO: 400266 - RNA, 32 nt, Homo Sapiens
guuguuguuaacuuauugaauuuagaguugua

SEQ ID NO: 400267 - RNA, 32 nt, Homo Sapiens
ggccggcagggccggacccccuacuugcccuu

SEQ ID NO: 400268 - RNA, 32 nt, Homo Sapiens
caacuaaaacaaauacaaacuaauguaugaua

SEQ ID NO: 400269 - RNA, 32 nt, Homo Sapiens
ccaaauucaaccaucaucugucaagaaauuaa

SEQ ID NO: 400270 - RNA, 32 nt, Homo Sapiens
uccagacccccugcccugucuuggcaaccucu

SEQ ID NO: 400271 - RNA, 32 nt, Homo Sapiens
uggugaaugaauugguucugugaccggggaag

SEQ ID NO: 400272 - RNA, 31 nt, Homo Sapiens
gucugccaagccagcauugagcuaauccugu

SEQ ID NO: 400273 - RNA, 32 nt, Homo Sapiens
uaggaaucugggaagggcuggcccucucuuag

SEQ ID NO: 400274 - RNA, 32 nt, Homo Sapiens
uguuagugguuuuucacuuacuguauauuacc

SEQ ID NO: 400275 - RNA, 32 nt, Homo Sapiens
ucagugcuuugccccaggauugccucaaaucu

SEQ ID NO: 400276 - RNA, 32 nt, Homo Sapiens
ggcacucucagggggcugugucugcgugucag

SEQ ID NO: 400277 - RNA, 32 nt, Homo Sapiens
uaauaaucuuuugcuugguuauacuaggcuag

SEQ ID NO: 400278 - RNA, 32 nt, Homo Sapiens
cacuccucaucccaccucuacccaucuccaug

SEQ ID NO: 400279 - RNA, 32 nt, Homo Sapiens
caguuuuuuaaaauaaauggcuuuuuaaaaau

SEQ ID NO: 400280 - RNA, 32 nt, Homo Sapiens
cugagcucucauggaggcucucucuguucucu

SEQ ID NO: 400281 - RNA, 32 nt, Homo Sapiens
uugcccgggaugcggacagguuccgccgccuc

SEQ ID NO: 400282 - RNA, 32 nt, Homo Sapiens
cuugagaugguuucaggaauggcugcaaucuc

SEQ ID NO: 400283 - RNA, 32 nt, Homo Sapiens
aaacagguguuccuccuccccucuccuaucag

SEQ ID NO: 400284 - RNA, 32 nt, Homo Sapiens
ucugugugugcuguagugaccagcggcuccua

SEQ ID NO: 400285 - RNA, 32 nt, Homo Sapiens
cuucauuuuuaaaacaacugacugauaguucu

SEQ ID NO: 400286 - RNA, 32 nt, Homo Sapiens
gagugcugcccucucccauggugcccgugccu

SEQ ID NO: 400287 - RNA, 32 nt, Homo Sapiens
uuuuaacuugaaagcgauaugcugcaagauaa

SEQ ID NO: 400288 - RNA, 32 nt, Homo Sapiens
auucuaacuauuucuuuuguuucuuacauccu

SEQ ID NO: 400289 - RNA, 32 nt, Homo Sapiens
ccaaguaacucuuauuuggagagaagacgauc

SEQ ID NO: 400290 - RNA, 32 nt, Homo Sapiens
ccggccucugggguccguccccggcucgcgca

SEQ ID NO: 400291 - RNA, 32 nt, Homo Sapiens
guuggagaacagccaguagccuugguaauaug

SEQ ID NO: 400292 - RNA, 32 nt, Homo Sapiens
cuuggaugucauugcuuaaauauagucuugaa

SEQ ID NO: 400293 - RNA, 32 nt, Homo Sapiens
aaugacaugcuucagggaagccuggacacccg

SEQ ID NO: 400294 - RNA, 32 nt, Homo Sapiens
ccaauugagaauuuauaaauugaguccaggag

SEQ ID NO: 400295 - RNA, 32 nt, Homo Sapiens
ggccgccgccuggcugggggaucggggcugug

SEQ ID NO: 400296 - RNA, 28 nt, Homo Sapiens
uggaacaaguauuaacauuuuggaauau

SEQ ID NO: 400297 - RNA, 32 nt, Homo Sapiens
ccagacugauauauuucuguacagaguaagaa

SEQ ID NO: 400298 - RNA, 32 nt, Homo Sapiens
aagaaauugacaaagaaauauuucaucuggcc

SEQ ID NO: 400299 - RNA, 32 nt, Homo Sapiens
ggguggggaagagugagaugggauaacauagc

SEQ ID NO: 400300 - RNA, 32 nt, Homo Sapiens
acccaaagcugaucgauguaaauucuuuaaau

SEQ ID NO: 400301 - RNA, 32 nt, Homo Sapiens
cugggccugcccccggccccauuugugccaua

SEQ ID NO: 400302 - RNA, 30 nt, Homo Sapiens
caaaaucuggacugaagguguccuuuuuaa

SEQ ID NO: 400303 - RNA, 32 nt, Homo Sapiens
agcuuuuacccauucuuuguccuuccccauaa

SEQ ID NO: 400304 - RNA, 32 nt, Homo Sapiens
auuggagcugcagacuccagugcucagagcag

SEQ ID NO: 400305 - RNA, 23 nt, Homo Sapiens
ggcucgcagacacugcuucuccu

SEQ ID NO: 400306 - RNA, 32 nt, Homo Sapiens
aaagcauauaaaauaucuguaaaaauuaaaca

SEQ ID NO: 400307 - RNA, 32 nt, Homo Sapiens
cuacaguuaucauuauuuuaauuccauuacuu

SEQ ID NO: 400308 - RNA, 28 nt, Homo Sapiens
uugucguugauggguauguguuuaaaac

SEQ ID NO: 400309 - RNA, 32 nt, Homo Sapiens
aaaguaauacuaaaaaaucaaacuauaaaccc

SEQ ID NO: 400310 - RNA, 32 nt, Homo Sapiens
aaucccgugcggcgcgcacaggcaggagguug

SEQ ID NO: 400311 - RNA, 32 nt, Homo Sapiens
cuucauaauuuucauggcuuugcuugaucugu

SEQ ID NO: 400312 - RNA, 32 nt, Homo Sapiens
gacccaggagaggagucuggcuccuuuugccu

SEQ ID NO: 400313 - RNA, 32 nt, Homo Sapiens
augugauagcaaaagaaacaaacaaaagccag

SEQ ID NO: 400314 - RNA, 31 nt, Homo Sapiens
uguacaaaauguauauucggauauguaucga

SEQ ID NO: 400315 - RNA, 32 nt, Homo Sapiens
agggaggcggggggcaccuggggcccgccaug

SEQ ID NO: 400316 - RNA, 32 nt, Homo Sapiens
cuccuagagguuaauuaucaucuccuaaucuu

SEQ ID NO: 400317 - RNA, 32 nt, Homo Sapiens
aggaagaggacuuugggggacgggcuuccccu

SEQ ID NO: 400318 - RNA, 32 nt, Homo Sapiens
aggcugcgagcgccagcgccgccagagccgag

SEQ ID NO: 400319 - RNA, 32 nt, Homo Sapiens
ucuucuuuuucuucuuuuucuuuucuuucuuu

SEQ ID NO: 400320 - RNA, 32 nt, Homo Sapiens
gauaccuuauuuuccuccuccuccuuggccua

SEQ ID NO: 400321 - RNA, 32 nt, Homo Sapiens
cucagccucccaaagugccgccgggauuacag

SEQ ID NO: 400322 - RNA, 32 nt, Homo Sapiens
cccuccaauuacugaggcauacguaacagaug

SEQ ID NO: 400323 - RNA, 31 nt, Homo Sapiens
gcggcccagcgcagccccuuuuggcaccgag

SEQ ID NO: 400324 - RNA, 32 nt, Homo Sapiens
ucauuacaauucaaaucgaagaguugugaacu

SEQ ID NO: 400325 - RNA, 32 nt, Homo Sapiens
ugucuuagaaugauuucuuucgcauuaagucu

SEQ ID NO: 400326 - RNA, 32 nt, Homo Sapiens
cccccaagaauaaaagaagaaccgggaggcgu

SEQ ID NO: 400327 - RNA, 32 nt, Homo Sapiens
auuacaaggucaugcugaaauuuuauuuugcu

SEQ ID NO: 400328 - RNA, 32 nt, Homo Sapiens
ucuuucuucuaaaacggacacauuugaaccuc

SEQ ID NO: 400329 - RNA, 32 nt, Homo Sapiens
ucuucccaagauggcagaacauuccuacucga

SEQ ID NO: 400330 - RNA, 29 nt, Homo Sapiens
cagccucggggacugggauggugaggggg

SEQ ID NO: 400331 - RNA, 32 nt, Homo Sapiens
aaauuucaacugauugucgaaaggguaauaug

SEQ ID NO: 400332 - RNA, 32 nt, Homo Sapiens
acaauucugagguuuucgcagaugaaccaaaa

SEQ ID NO: 400333 - RNA, 32 nt, Homo Sapiens
cgcacuuuacacccccaccugccucuuccccc

SEQ ID NO: 400334 - RNA, 30 nt, Homo Sapiens
ucacuguaucacccaggccagaguguagug

SEQ ID NO: 400335 - RNA, 32 nt, Homo Sapiens
ccugcacgucucuucugucauguguucuauuu

SEQ ID NO: 400336 - RNA, 32 nt, Homo Sapiens
agcagagauaaaacgcuuaaaaaauucugaug

SEQ ID NO: 400337 - RNA, 32 nt, Homo Sapiens
cugcuccccaugggcaacugccaggcagggca

SEQ ID NO: 400338 - RNA, 32 nt, Homo Sapiens
ucacgcugggagcugugcaccggagcuguucc

SEQ ID NO: 400339 - RNA, 32 nt, Homo Sapiens
aagggccugagccccagggaccccucaccuga

SEQ ID NO: 400340 - RNA, 32 nt, Homo Sapiens
gcaugguggcccagcccucucugucccucacc

SEQ ID NO: 400341 - RNA, 28 nt, Homo Sapiens
aggauggggcggccguguugaggaaccc

SEQ ID NO: 400342 - RNA, 32 nt, Homo Sapiens
cacagaaggauguuaagcgucuggcuauucuu

SEQ ID NO: 400343 - RNA, 32 nt, Homo Sapiens
cugcccauaguuacacagccagcaaaugaaaa

SEQ ID NO: 400344 - RNA, 32 nt, Homo Sapiens
caagaauagaugugagaaaucuauguaaaaaa

SEQ ID NO: 400345 - RNA, 32 nt, Homo Sapiens
cgcagccccucuaacagcuccugaggugaggg

SEQ ID NO: 400346 - RNA, 32 nt, Homo Sapiens
aagucagcugaaucccgauaguacuagguccc

SEQ ID NO: 400347 - RNA, 32 nt, Homo Sapiens
cauauagaaaaaauagaaggggcuacugugac

SEQ ID NO: 400348 - RNA, 32 nt, Homo Sapiens
gcuguugaugaggccucuuggaccucugcucu

SEQ ID NO: 400349 - RNA, 32 nt, Homo Sapiens
guccugccuugaugaagccugugccaccugca

SEQ ID NO: 400350 - RNA, 32 nt, Homo Sapiens
cugggcauguggacaggaggggcuugcggccg

SEQ ID NO: 400351 - RNA, 31 nt, Homo Sapiens
gcuucccggugacuucucagagccugaaugu

SEQ ID NO: 400352 - RNA, 32 nt, Homo Sapiens
uucugccuauaaauuuacucuguugaauauuu

SEQ ID NO: 400353 - RNA, 32 nt, Homo Sapiens
ucuacucucguuaucugaccucauggaugaac

SEQ ID NO: 400354 - RNA, 32 nt, Homo Sapiens
agcggaugcugcccgcgccggaccccagccgc

SEQ ID NO: 400355 - RNA, 32 nt, Homo Sapiens
ugccugguuguuccccucuuuggcccucucag

SEQ ID NO: 400356 - RNA, 32 nt, Homo Sapiens
ccgggcgcaccccggcuucccggagcgcgacg

SEQ ID NO: 400357 - RNA, 32 nt, Homo Sapiens
gcaacgccuuuccccccuuccaucccggcacc

SEQ ID NO: 400358 - RNA, 32 nt, Homo Sapiens
ggcuuggcuccaccucagggcuccacauuugc

SEQ ID NO: 400359 - RNA, 32 nt, Homo Sapiens
ucuugggaagcaguuucagauaaaucaugggc

SEQ ID NO: 400360 - RNA, 32 nt, Homo Sapiens
ucccaaguuagagaagaagagagaaagcaaaa

SEQ ID NO: 400361 - RNA, 32 nt, Homo Sapiens
cagaacaucuucuguauccugaaagccuccag

SEQ ID NO: 400362 - RNA, 32 nt, Homo Sapiens
guauuccagaaagggcccugacaugugaaagg

SEQ ID NO: 400363 - RNA, 32 nt, Homo Sapiens
ccgcacugcccggcgccgccucgccauggacg

SEQ ID NO: 400364 - RNA, 32 nt, Homo Sapiens
ucccgccuucccagagacguggcgcgaggccc

SEQ ID NO: 400365 - RNA, 32 nt, Homo Sapiens
gcggugguagagagagauaaaagguggaguuu

SEQ ID NO: 400366 - RNA, 32 nt, Homo Sapiens
ggagcgggagaaagaccugaaaaacuaccuac

SEQ ID NO: 400367 - RNA, 32 nt, Homo Sapiens
caggcuccaucgcccuguggccugcagguauu

SEQ ID NO: 400368 - RNA, 32 nt, Homo Sapiens
gcccuuagacugccaggcacagagucgggucg

SEQ ID NO: 400369 - RNA, 30 nt, Homo Sapiens
uauacuuuguugacuugggaaaccuggagc

SEQ ID NO: 400370 - RNA, 32 nt, Homo Sapiens
uuuuccuucuaaaaggucauuuuauuacagua

SEQ ID NO: 400371 - RNA, 32 nt, Homo Sapiens
cggaggaggaccgggcccgggagaaggugcug

SEQ ID NO: 400372 - RNA, 31 nt, Homo Sapiens
ggucucacaaaguuucaaugaguuaauacuu

SEQ ID NO: 400373 - RNA, 32 nt, Homo Sapiens
ugguauaaauuaacagguuaaugucagucauc

SEQ ID NO: 400374 - RNA, 32 nt, Homo Sapiens
caugaaaggcagaagagucuaauugugccugg

SEQ ID NO: 400375 - RNA, 32 nt, Homo Sapiens
gcuggccacgcggcucguucccccgcuccucg

SEQ ID NO: 400376 - RNA, 32 nt, Homo Sapiens
guccuccccccucagccuacagaguagcuggg

SEQ ID NO: 400377 - RNA, 32 nt, Homo Sapiens
ucagcagaggagaugacuauuaacuuagucca

SEQ ID NO: 400378 - RNA, 29 nt, Homo Sapiens
guuguuccauaugaguguuuucuaaaccu

SEQ ID NO: 400379 - RNA, 32 nt, Homo Sapiens
uuuaucaaaccacagccaugcuuacuuguuua

SEQ ID NO: 400380 - RNA, 32 nt, Homo Sapiens
auagagcuugcaggcaggccaagcucuugguu

SEQ ID NO: 400381 - RNA, 32 nt, Homo Sapiens
cacgauaccuguuuuucuuuuccguugcuggc

SEQ ID NO: 400382 - RNA, 32 nt, Homo Sapiens
agcauucuugugaauguuuacauccugcugcu

SEQ ID NO: 400383 - RNA, 32 nt, Homo Sapiens
cggagggugguaccgaucaggaacgcuuuuug

SEQ ID NO: 400384 - RNA, 30 nt, Homo Sapiens
ccuguguacaucccugccauugcucuugcc

SEQ ID NO: 400385 - RNA, 32 nt, Homo Sapiens
cacaggaugaacuguuaguuguuuuuaaaagu

SEQ ID NO: 400386 - RNA, 32 nt, Homo Sapiens
gauuuaaaggauuagagaaaucuacaaaugua

SEQ ID NO: 400387 - RNA, 32 nt, Homo Sapiens
aaauuuaguuuaaugauuguaaugggugcugc

SEQ ID NO: 400388 - RNA, 32 nt, Homo Sapiens
uaagucagcuugaaggguaggcugguuuucuu

SEQ ID NO: 400389 - RNA, 32 nt, Homo Sapiens
acugggcucccucugcuccccgugggccgcuc

SEQ ID NO: 400390 - RNA, 32 nt, Homo Sapiens
gcgcaugcgggaagauggcgggccgggcgacu

SEQ ID NO: 400391 - RNA, 32 nt, Homo Sapiens
gcuuaucuccugggggaccccugguucagagg

SEQ ID NO: 400392 - RNA, 32 nt, Homo Sapiens
ucgugccaagaaucgccugccuuaaagucugg

SEQ ID NO: 400393 - RNA, 32 nt, Homo Sapiens
ugaggguuggaacacauuggccuggcucagug

SEQ ID NO: 400394 - RNA, 32 nt, Homo Sapiens
uuuaauacauuguaggaaaucuucauaauugg

SEQ ID NO: 400395 - RNA, 32 nt, Homo Sapiens
cccagggccccggcaccccggucggcagccug

SEQ ID NO: 400396 - RNA, 32 nt, Homo Sapiens
aacgacaacaacgcccucuuaagggaccaccc

SEQ ID NO: 400397 - RNA, 32 nt, Homo Sapiens
uucaauacagccacugauggaaugcuuccuuu

SEQ ID NO: 400398 - RNA, 32 nt, Homo Sapiens
gaguuguuugguuuuuguuuguauaucuuaau

SEQ ID NO: 400399 - RNA, 32 nt, Homo Sapiens
gaaacgugucgucuggaaugggcuugggggcc

SEQ ID NO: 400400 - RNA, 32 nt, Homo Sapiens
agugaaguaggaagaagaauuagaaaauccag

SEQ ID NO: 400401 - RNA, 32 nt, Homo Sapiens
gucauggaauaauguuuaaguuguuauuugca

SEQ ID NO: 400402 - RNA, 32 nt, Homo Sapiens
auugagguccuucccaccugugaccucaccuc

SEQ ID NO: 400403 - RNA, 32 nt, Homo Sapiens
aaucccauuauguacuuuauucagaauguaga

SEQ ID NO: 400404 - RNA, 32 nt, Homo Sapiens
ucuacagauucugugaggaaaaagcaucucag

SEQ ID NO: 400405 - RNA, 32 nt, Homo Sapiens
cagcuaguuuauggaagaacuguuacuaaaag

SEQ ID NO: 400406 - RNA, 32 nt, Homo Sapiens
gucauuuccaaauauuuccaaguaggcaaugu

SEQ ID NO: 400407 - RNA, 32 nt, Homo Sapiens
agcuacuucugcaguguaguagacuuacauau

SEQ ID NO: 400408 - RNA, 32 nt, Homo Sapiens
agggaucaaaacuuuuucaauugcgauaaaac

SEQ ID NO: 400409 - RNA, 32 nt, Homo Sapiens
ugccaaagauacacucuauagaugcuuaguag

SEQ ID NO: 400410 - RNA, 32 nt, Homo Sapiens
aacaugacagauuugguaaaaugcugguuagg

SEQ ID NO: 400411 - RNA, 32 nt, Homo Sapiens
gacccaacucucuggggugcucaggggcuugg

SEQ ID NO: 400412 - RNA, 32 nt, Homo Sapiens
gccggagcacgcugggaacgccgggcucccgg

SEQ ID NO: 400413 - RNA, 32 nt, Homo Sapiens
ugguuuucucagcggcagcuugacaugugcac

SEQ ID NO: 400414 - RNA, 29 nt, Homo Sapiens
guuguauaacauuuauauuuagucuaauu

SEQ ID NO: 400415 - RNA, 32 nt, Homo Sapiens
uguuuaaugaauuuggaaauaugcacugaaag

SEQ ID NO: 400416 - RNA, 32 nt, Homo Sapiens
ucaccccugcugugucccaucccccgucuguc

SEQ ID NO: 400417 - RNA, 32 nt, Homo Sapiens
guuucucaaaagacaaugagaaaaaaagaaga

SEQ ID NO: 400418 - RNA, 32 nt, Homo Sapiens
aucagggugcuuuggguuuugauuuuguuguu

SEQ ID NO: 400419 - RNA, 29 nt, Homo Sapiens
ugggcuuggggacagaaaugccacucacc

SEQ ID NO: 400420 - RNA, 32 nt, Homo Sapiens
gcugacaggaggaggaaguaguggagaucauu

SEQ ID NO: 400421 - RNA, 32 nt, Homo Sapiens
ucccgaaggagcccgggcgcagggagggucgc

SEQ ID NO: 400422 - RNA, 32 nt, Homo Sapiens
uccagaaacaaggcuccagaguauggucaaga

SEQ ID NO: 400423 - RNA, 32 nt, Homo Sapiens
ccuaguggcccgcccuggggccccagcucggc

SEQ ID NO: 400424 - RNA, 32 nt, Homo Sapiens
ucuucagaaagugugcuuuaugcugaaacaga

SEQ ID NO: 400425 - RNA, 32 nt, Homo Sapiens
aaaacauuuaacaaaaucuauaacugugaagc

SEQ ID NO: 400426 - RNA, 32 nt, Homo Sapiens
gaggucgcuccagcccuaccacaggucugacu

SEQ ID NO: 400427 - RNA, 32 nt, Homo Sapiens
ccuguccugcucauuaugccacuuccuuuuaa

SEQ ID NO: 400428 - RNA, 32 nt, Homo Sapiens
ugaugaugaugaugaugacuccucuucagagg

SEQ ID NO: 400429 - RNA, 32 nt, Homo Sapiens
ugcgugcgugacucauucgcacauccauuucu

SEQ ID NO: 400430 - RNA, 32 nt, Homo Sapiens
guaguucugaagauguugaauaaucauuuuac

SEQ ID NO: 400431 - RNA, 32 nt, Homo Sapiens
acauuagaugagagaacagggcugaagcugug

SEQ ID NO: 400432 - RNA, 32 nt, Homo Sapiens
uuuaauaugauuuaagcuuuuuagaaauuaaa

SEQ ID NO: 400433 - RNA, 32 nt, Homo Sapiens
aaaucuuuucaacgcugaaauguaccuaaucu

SEQ ID NO: 400434 - RNA, 32 nt, Homo Sapiens
augugcucaaggaaugcagaccacugugcuua

SEQ ID NO: 400435 - RNA, 32 nt, Homo Sapiens
acugggaagauaauaacuggugcaauagaugu

SEQ ID NO: 400436 - RNA, 32 nt, Homo Sapiens
aaauuuguugaauauugguaauuaaaagacuc

SEQ ID NO: 400437 - RNA, 32 nt, Homo Sapiens
cucagguguggaaauuucuacugcaauugacu

SEQ ID NO: 400438 - RNA, 32 nt, Homo Sapiens
aacauuaaauguaaccauuuugucagauccau

SEQ ID NO: 400439 - RNA, 32 nt, Homo Sapiens
uacccuucuuucccuuuagaaaacugugauua

SEQ ID NO: 400440 - RNA, 32 nt, Homo Sapiens
uucugaggaaugaaagguucccaucauugacu

SEQ ID NO: 400441 - RNA, 32 nt, Homo Sapiens
guuggggccucuucccuucucuggugcuuuac

SEQ ID NO: 400442 - RNA, 32 nt, Homo Sapiens
uggggaaggcagaccagggucugauggcuucu

SEQ ID NO: 400443 - RNA, 32 nt, Homo Sapiens
guugaggggcuuugucagcaucaggaaggccu

SEQ ID NO: 400444 - RNA, 32 nt, Homo Sapiens
ccguccaagacccucugugcuccccaccaucc

SEQ ID NO: 400445 - RNA, 32 nt, Homo Sapiens
ugaaaguguuuuuucuucguccuuuugguuua

SEQ ID NO: 400446 - RNA, 32 nt, Homo Sapiens
ugcagcaggaauggggcugggcccgugggcca

SEQ ID NO: 400447 - RNA, 32 nt, Homo Sapiens
uucggcgccucgcccggccccgcggccuccag

SEQ ID NO: 400448 - RNA, 32 nt, Homo Sapiens
gucugggcgacagagcgagacucugucucaga

SEQ ID NO: 400449 - RNA, 32 nt, Homo Sapiens
guuguauaaaacuuuaccauaguaaccuuaga

SEQ ID NO: 400450 - RNA, 32 nt, Homo Sapiens
cuacaagcgacuugggagcuucugggaaacau

SEQ ID NO: 400451 - RNA, 32 nt, Homo Sapiens
uagcaccuccgcagccgcucucucuugagucc

SEQ ID NO: 400452 - RNA, 32 nt, Homo Sapiens
ccuaucugcagaugaaauaauguuauauuuac

SEQ ID NO: 400453 - RNA, 32 nt, Homo Sapiens
cuaauaaguguuuuuucuuucuuuuuugcuuc

SEQ ID NO: 400454 - RNA, 32 nt, Homo Sapiens
uuguaagaacuuuauuugaaagacugaauaaa

SEQ ID NO: 400455 - RNA, 32 nt, Homo Sapiens
ugggcucccacuuuggcggcacuugaggagcc

SEQ ID NO: 400456 - RNA, 32 nt, Homo Sapiens
uucuauuagaagcuaucaaucaccuugcauuu

SEQ ID NO: 400457 - RNA, 31 nt, Homo Sapiens
ucuguucuccugguuuggccaagggcuacug

SEQ ID NO: 400458 - RNA, 32 nt, Homo Sapiens
uucuagagaugagaaaaggagaaggaccucgu

SEQ ID NO: 400459 - RNA, 31 nt, Homo Sapiens
gaggaggcaaggucugcuaucaggaguuacu

SEQ ID NO: 400460 - RNA, 32 nt, Homo Sapiens
gucucugugucuccgucagccgugccgagccg

SEQ ID NO: 400461 - RNA, 32 nt, Homo Sapiens
aucaaagcauguccaacuucuguccagaugac

SEQ ID NO: 400462 - RNA, 32 nt, Homo Sapiens
uccaaauacauaguaaucuuuuccaguuaugu

SEQ ID NO: 400463 - RNA, 32 nt, Homo Sapiens
agcgcgagccgcggccggcgccgcugcagagc

SEQ ID NO: 400464 - RNA, 32 nt, Homo Sapiens
cuguaagaccucugagccaccaguauccacgg

SEQ ID NO: 400465 - RNA, 32 nt, Homo Sapiens
uccuauuuaaggauuagguuuauuaauuuagg

SEQ ID NO: 400466 - RNA, 32 nt, Homo Sapiens
acugucaguuccgucccuccccuucagcccuu

SEQ ID NO: 400467 - RNA, 32 nt, Homo Sapiens
gaccuuggguauuugcaauauuccuuugggcc

SEQ ID NO: 400468 - RNA, 32 nt, Homo Sapiens
ucuacucccuucuuccuccccccaaacacgug

SEQ ID NO: 400469 - RNA, 32 nt, Homo Sapiens
aaagugucaggagagugaagaaauuggccaca

SEQ ID NO: 400470 - RNA, 32 nt, Homo Sapiens
cauagagaugacuguagaacaauagaaacuuu

SEQ ID NO: 400471 - RNA, 32 nt, Homo Sapiens
acaagggccaucccuuuccccaggcuucccug

SEQ ID NO: 400472 - RNA, 32 nt, Homo Sapiens
ccgaacacauccugggggcuuguuggggauuu

SEQ ID NO: 400473 - RNA, 32 nt, Homo Sapiens
gcauccucauuucuacccgaacccaggagccg

SEQ ID NO: 400474 - RNA, 32 nt, Homo Sapiens
cuguauaaaugaauguagagugacuuucugca

SEQ ID NO: 400475 - RNA, 32 nt, Homo Sapiens
guuuuuccucuggauucuuuucuuauaacuug

SEQ ID NO: 400476 - RNA, 32 nt, Homo Sapiens
ccccgggccccggggcccuggggcacacacgu

SEQ ID NO: 400477 - RNA, 32 nt, Homo Sapiens
ccuugcguguagcuuccccuccccuacucucg

SEQ ID NO: 400478 - RNA, 32 nt, Homo Sapiens
ucuucacaagguggugauuuccucucccuugg

SEQ ID NO: 400479 - RNA, 32 nt, Homo Sapiens
aagaucuaacacuaaacaaaauuagaaacaug

SEQ ID NO: 400480 - RNA, 32 nt, Homo Sapiens
ggcagggcccacugagggaacaucaguggccc

SEQ ID NO: 400481 - RNA, 32 nt, Homo Sapiens
acguugggcuccuggcgaaccucucggcgcug

SEQ ID NO: 400482 - RNA, 32 nt, Homo Sapiens
agaguccccagcugggagacccucaguuggau

SEQ ID NO: 400483 - RNA, 32 nt, Homo Sapiens
ggauucccggcccagucugaccaucucccucc

SEQ ID NO: 400484 - RNA, 32 nt, Homo Sapiens
ugccgcccgcggcgagguggcccggaccgcag

SEQ ID NO: 400485 - RNA, 32 nt, Homo Sapiens
ucuagaaaaaauuuaaaaauuagccaggcauu

SEQ ID NO: 400486 - RNA, 32 nt, Homo Sapiens
ccaccccacccuugcccccagcccucucuccc

SEQ ID NO: 400487 - RNA, 29 nt, Homo Sapiens
gucccaaugaagauuuucaugagucagcc

SEQ ID NO: 400488 - RNA, 32 nt, Homo Sapiens
ggcggccgccuggcugcuccucggggcggcga

SEQ ID NO: 400489 - RNA, 32 nt, Homo Sapiens
cgacgucgucgacggggguggccgugggagcu

SEQ ID NO: 400490 - RNA, 32 nt, Homo Sapiens
aagaacuuucccuuucaacuucaggcucauuu

SEQ ID NO: 400491 - RNA, 32 nt, Homo Sapiens
gccaaacaaaaauagcuacaaauccacaaaaa

SEQ ID NO: 400492 - RNA, 32 nt, Homo Sapiens
uguaaaaauggcuguugugaucacucagcuca

SEQ ID NO: 400493 - RNA, 32 nt, Homo Sapiens
aaguacuggagcuuaaauucccggccuccucu

SEQ ID NO: 400494 - RNA, 31 nt, Homo Sapiens
cccgagcugccggucugagccugaggcaugg

SEQ ID NO: 400495 - RNA, 32 nt, Homo Sapiens
uuuuauucgguaauaaggaacuuugcauaugu

SEQ ID NO: 400496 - RNA, 32 nt, Homo Sapiens
guuuaggcugggcgcaguggcucacaccugua

SEQ ID NO: 400497 - RNA, 32 nt, Homo Sapiens
ugcaaaaucacuggauuauaaguucuauuuua

SEQ ID NO: 400498 - RNA, 32 nt, Homo Sapiens
auauacaagaugauaaauggugagauuugaau

SEQ ID NO: 400499 - RNA, 32 nt, Homo Sapiens
aaaauguaaaagacaaaaaaaaaauggaggau

SEQ ID NO: 400500 - RNA, 32 nt, Homo Sapiens
ucucaucuggggugggggcccugcuggcaacc

SEQ ID NO: 400501 - RNA, 32 nt, Homo Sapiens
uauuugucugaauauaauaauguaaaacuuaa

SEQ ID NO: 400502 - RNA, 30 nt, Homo Sapiens
cagcgugagaagcuuaacuagcugcauaac

SEQ ID NO: 400503 - RNA, 32 nt, Homo Sapiens
aaaccaugaagauaauagcuauucuuuauuaa

SEQ ID NO: 400504 - RNA, 32 nt, Homo Sapiens
cggacccggccagcaggacccacuggaagggc

SEQ ID NO: 400505 - RNA, 32 nt, Homo Sapiens
accccaacacgugacgucauggccaguaggga

SEQ ID NO: 400506 - RNA, 32 nt, Homo Sapiens
gcaccucuacucgaccaggggcgacggcguac

SEQ ID NO: 400507 - RNA, 32 nt, Homo Sapiens
auguggcaggcaaccucuguguggcagaaaaa

SEQ ID NO: 400508 - RNA, 32 nt, Homo Sapiens
auuaauacagacuuuuugauaauaaaaaaaaa

SEQ ID NO: 400509 - RNA, 32 nt, Homo Sapiens
gcuucgagauaagucccggcgcuugcgcggcg

SEQ ID NO: 400510 - RNA, 32 nt, Homo Sapiens
gaugggugggcccagggcggccucucucugag

SEQ ID NO: 400511 - RNA, 32 nt, Homo Sapiens
caagucuugaguuaagaaggaaagaggaaaaa

SEQ ID NO: 400512 - RNA, 32 nt, Homo Sapiens
ugauugcaauuaccauccgguguucgaggauc

SEQ ID NO: 400513 - RNA, 32 nt, Homo Sapiens
agauagaaaaauuuuuauuacucaaaguaaaa

SEQ ID NO: 400514 - RNA, 32 nt, Homo Sapiens
acacuuugaaagauauauuaguucugacuuau

SEQ ID NO: 400515 - RNA, 32 nt, Homo Sapiens
caagcuuuguuacuuuuguuuccuuguucuuu

SEQ ID NO: 400516 - RNA, 32 nt, Homo Sapiens
augagcaaauauaaaaugaagcaucauaacuu

SEQ ID NO: 400517 - RNA, 27 nt, Homo Sapiens
ccagagucacuguccagcccccacccc

SEQ ID NO: 400518 - RNA, 32 nt, Homo Sapiens
guggugguggcugcgcacacagcuccacaggu

SEQ ID NO: 400519 - RNA, 32 nt, Homo Sapiens
acaaaagcuucucagcugaggacacucaaggc

SEQ ID NO: 400520 - RNA, 32 nt, Homo Sapiens
ucggggcccagacauccugggguccuggucug

SEQ ID NO: 400521 - RNA, 32 nt, Homo Sapiens
cuuaugcauuuuuuggaaggaauaccacagaa

SEQ ID NO: 400522 - RNA, 32 nt, Homo Sapiens
gggggugugggaaggcagaagucccagggauc

SEQ ID NO: 400523 - RNA, 32 nt, Homo Sapiens
cucgccgccgucgccgcagccaggcgcaccgg

SEQ ID NO: 400524 - RNA, 32 nt, Homo Sapiens
gcgcggagacugccggcgcgucccggggguuc

SEQ ID NO: 400525 - RNA, 32 nt, Homo Sapiens
aggagcagaacagcaagcucucugucccugca

SEQ ID NO: 400526 - RNA, 32 nt, Homo Sapiens
uuuuuauuucuaggaauguauccugaggaaau

SEQ ID NO: 400527 - RNA, 32 nt, Homo Sapiens
ugucucugguguuaaccagaggcugcucuucc

SEQ ID NO: 400528 - RNA, 32 nt, Homo Sapiens
auaucuuuuuuaaagaaauaucuauucagauc

SEQ ID NO: 400529 - RNA, 32 nt, Homo Sapiens
gguauuggcgauccauagcuaagacgccaggu

SEQ ID NO: 400530 - RNA, 32 nt, Homo Sapiens
cuacggcccgguuucccguuucuuuccucugu

SEQ ID NO: 400531 - RNA, 32 nt, Homo Sapiens
aagauuucuccuccaaaauacaucucaugggc

SEQ ID NO: 400532 - RNA, 32 nt, Homo Sapiens
gccggggcagaacagcagcauggucucgaacu

SEQ ID NO: 400533 - RNA, 32 nt, Homo Sapiens
aucuuagaugagaaaccuguuauaauugccag

SEQ ID NO: 400534 - RNA, 32 nt, Homo Sapiens
aaauaacauuuuacuucugcgcuucuauguuu

SEQ ID NO: 400535 - RNA, 32 nt, Homo Sapiens
caccccagagcagcugcagccucagccggccg

SEQ ID NO: 400536 - RNA, 32 nt, Homo Sapiens
aagcaggagguaguugugccucaauuauugca

SEQ ID NO: 400537 - RNA, 32 nt, Homo Sapiens
guguguuucugccucauucaguuucugggguc

SEQ ID NO: 400538 - RNA, 32 nt, Homo Sapiens
ugacuccuggggaugggguccugugugugccc

SEQ ID NO: 400539 - RNA, 32 nt, Homo Sapiens
ugaagugcacagacucggcagaggcggcgggc

SEQ ID NO: 400540 - RNA, 32 nt, Homo Sapiens
aggcaggaguugacaucgggcaaccaaagaaa

SEQ ID NO: 400541 - RNA, 32 nt, Homo Sapiens
gcgggcacuggacccccgggccccacggaggc

SEQ ID NO: 400542 - RNA, 32 nt, Homo Sapiens
ggcuggggucaggacaggcugcggaugcuugu

SEQ ID NO: 400543 - RNA, 32 nt, Homo Sapiens
aagacuugaaacaaaaacgaguucugaaucac

SEQ ID NO: 400544 - RNA, 32 nt, Homo Sapiens
ucugauauuuuuguccuuuagauguucaaaua

SEQ ID NO: 400545 - RNA, 32 nt, Homo Sapiens
ugcauucuuguacacugauuugaaaugcugua

SEQ ID NO: 400546 - RNA, 30 nt, Homo Sapiens
ggaggauggugcccucaaccugugaaauaa

SEQ ID NO: 400547 - RNA, 32 nt, Homo Sapiens
agcagaggcggcggcgcgggaccugcagucgc

SEQ ID NO: 400548 - RNA, 32 nt, Homo Sapiens
aacucuugacuucagaugauccaucugccuug

SEQ ID NO: 400549 - RNA, 32 nt, Homo Sapiens
ggcaauuuucccuugguauaagaugugcuaga

SEQ ID NO: 400550 - RNA, 32 nt, Homo Sapiens
gaccaagugucuacugauggcccaaacaugga

SEQ ID NO: 400551 - RNA, 32 nt, Homo Sapiens
cuccccugcaaagcccgguucuacacagauuu

SEQ ID NO: 400552 - RNA, 32 nt, Homo Sapiens
gcuaagacgcccgggagccccuggaagccuag

SEQ ID NO: 400553 - RNA, 32 nt, Homo Sapiens
auagaccuucacuauuuagucuauccuaugau

SEQ ID NO: 400554 - RNA, 32 nt, Homo Sapiens
uuccgcgggaagggcccuggggccucacacuu

SEQ ID NO: 400555 - RNA, 32 nt, Homo Sapiens
gcagccaacugagacuaucuugcugugcccug

SEQ ID NO: 400556 - RNA, 32 nt, Homo Sapiens
ggaacuuccuuccucacucagcuucccacguu

SEQ ID NO: 400557 - RNA, 32 nt, Homo Sapiens
cggcccuguagcgcccucugggccccgguuca

SEQ ID NO: 400558 - RNA, 32 nt, Homo Sapiens
gugugagggucgcguuccugcugucuggacuu

SEQ ID NO: 400559 - RNA, 32 nt, Homo Sapiens
acccgggucugugccagcugugguuggcagug

SEQ ID NO: 400560 - RNA, 32 nt, Homo Sapiens
ggcaagaggaugcggguguccugagcaagcaa

SEQ ID NO: 400561 - RNA, 32 nt, Homo Sapiens
gccgagccgcggcugccucccucgcucacucc

SEQ ID NO: 400562 - RNA, 32 nt, Homo Sapiens
aaucaggaggcugaggcagagaaucacuugaa

SEQ ID NO: 400563 - RNA, 32 nt, Homo Sapiens
aagccgggggagguuuccaaaaauaaaaccgu

SEQ ID NO: 400564 - RNA, 32 nt, Homo Sapiens
ucccucccggcggcccccaucaccucuacugu

SEQ ID NO: 400565 - RNA, 32 nt, Homo Sapiens
cuuugucaaauuauauuccugcaguagacagu

SEQ ID NO: 400566 - RNA, 32 nt, Homo Sapiens
ugaggaaaacgaauucuccccaaguuucauca

SEQ ID NO: 400567 - RNA, 32 nt, Homo Sapiens
uagugaggaguggaaggagacgugugccuggu

SEQ ID NO: 400568 - RNA, 32 nt, Homo Sapiens
guuugguggugucaaguuaugcgcuaguaaca

SEQ ID NO: 400569 - RNA, 32 nt, Homo Sapiens
cuuccccggcgcgccauggagccccgggcggu

SEQ ID NO: 400570 - RNA, 32 nt, Homo Sapiens
gcgggguugcagugacugguggccgcaagccc

SEQ ID NO: 400571 - RNA, 32 nt, Homo Sapiens
uuguccaguggucuggugcucaccuccucuca

SEQ ID NO: 400572 - RNA, 32 nt, Homo Sapiens
cgaucacaggccuucagaaguacaacaucagc

SEQ ID NO: 400573 - RNA, 32 nt, Homo Sapiens
gcugaaccagccagcccugggacgccccagca

SEQ ID NO: 400574 - RNA, 32 nt, Homo Sapiens
aaguaacaggaaagccuggcagaguuaaauau

SEQ ID NO: 400575 - RNA, 30 nt, Homo Sapiens
guccuauaaaaagcaaggauaugcaugauu

SEQ ID NO: 400576 - RNA, 32 nt, Homo Sapiens
cgagacagaaaguuaaaaaaggauauccggga

SEQ ID NO: 400577 - RNA, 32 nt, Homo Sapiens
uucucgcccaauccgucaccacuuccuggcgc

SEQ ID NO: 400578 - RNA, 32 nt, Homo Sapiens
agacuguuaguagaagccaucuggaagcuuuu

SEQ ID NO: 400579 - RNA, 32 nt, Homo Sapiens
gcaagaacagcuuugagcucuacggggcugac

SEQ ID NO: 400580 - RNA, 32 nt, Homo Sapiens
gaaauccaucccacccaccucugucccuccaa

SEQ ID NO: 400581 - RNA, 32 nt, Homo Sapiens
uagugcucuuauuaucuguguuugcucacagc

SEQ ID NO: 400582 - RNA, 32 nt, Homo Sapiens
aaaaaucaauaugcagaauggcauuugcaaua

SEQ ID NO: 400583 - RNA, 32 nt, Homo Sapiens
cugaggggcggagaggccuggcgggccgcugc

SEQ ID NO: 400584 - RNA, 32 nt, Homo Sapiens
cagugcugugagcaggcggggaggaggcugcc

SEQ ID NO: 400585 - RNA, 32 nt, Homo Sapiens
uuucugcuuuuuaaauacaaaaauaccauaaa

SEQ ID NO: 400586 - RNA, 32 nt, Homo Sapiens
cauggauucugccuuuggaccccucucuauua

SEQ ID NO: 400587 - RNA, 32 nt, Homo Sapiens
uguaccucgaccaccuugggcacauguuccca

SEQ ID NO: 400588 - RNA, 32 nt, Homo Sapiens
cauauuacuuuuuccuuaauaaaaugucauua

SEQ ID NO: 400589 - RNA, 32 nt, Homo Sapiens
ggaggccgaggcaggaggaucccuuuagccca

SEQ ID NO: 400590 - RNA, 32 nt, Homo Sapiens
ccccaaaugccuuaauuuuguggacuguuuau

SEQ ID NO: 400591 - RNA, 32 nt, Homo Sapiens
uuuuaauggcaccugggugauucuucagcuaa

SEQ ID NO: 400592 - RNA, 32 nt, Homo Sapiens
acgcccgcuaccgccgcaccugggcuggcugc

SEQ ID NO: 400593 - RNA, 32 nt, Homo Sapiens
uuaguagagacgggguuucgccguguuggcca

SEQ ID NO: 400594 - RNA, 32 nt, Homo Sapiens
caaccuuuuugagcucaagcugugauaaagaa

SEQ ID NO: 400595 - RNA, 32 nt, Homo Sapiens
ugggaggccaagaugggaggagugcuugaggu

SEQ ID NO: 400596 - RNA, 30 nt, Homo Sapiens
aucggggcugucacugcagaagucuuccac

SEQ ID NO: 400597 - RNA, 32 nt, Homo Sapiens
cggacgcagcggggagugggaccggcuuccag

SEQ ID NO: 400598 - RNA, 32 nt, Homo Sapiens
ugagggaggacaggcgggaggaggugugagga

SEQ ID NO: 400599 - RNA, 32 nt, Homo Sapiens
gaccugggacagugaaucgacaaugccgucuu

SEQ ID NO: 400600 - RNA, 32 nt, Homo Sapiens
gcgcugguggccaugcucuuggagcacuacgg

SEQ ID NO: 400601 - RNA, 32 nt, Homo Sapiens
cgaccguggugcccggcccuugggagccuugg

SEQ ID NO: 400602 - RNA, 32 nt, Homo Sapiens
cacauacugaauacuagucaaacaaguuuuua

SEQ ID NO: 400603 - RNA, 32 nt, Homo Sapiens
gcggccuggaagaggccagggcccgggggagg

SEQ ID NO: 400604 - RNA, 32 nt, Homo Sapiens
cuuauuauuuaguuuugcggauacucauggac

SEQ ID NO: 400605 - RNA, 32 nt, Homo Sapiens
gagggaccaaggaaacaugaugggggaggcaa

SEQ ID NO: 400606 - RNA, 32 nt, Homo Sapiens
gacagcgguagcgccuuccucaccgcacgcug

SEQ ID NO: 400607 - RNA, 32 nt, Homo Sapiens
cacgcgugguggcgcgcgccuguaaucccagc

SEQ ID NO: 400608 - RNA, 32 nt, Homo Sapiens
uuuuaaaaaaucaaugcuuuauauuccauaug

SEQ ID NO: 400609 - RNA, 32 nt, Homo Sapiens
cucuaaggaaaugguggcaugaagacccucuc

SEQ ID NO: 400610 - RNA, 32 nt, Homo Sapiens
caugacaaguacuuauuucacauauuaacuca

SEQ ID NO: 400611 - RNA, 32 nt, Homo Sapiens
gcggcgguggagauagcggcggugcugggagg

SEQ ID NO: 400612 - RNA, 32 nt, Homo Sapiens
aggaugaaaaagacaugauaauauuuugggga

SEQ ID NO: 400613 - RNA, 32 nt, Homo Sapiens
aucaccuccucccuccuccccacucacuccag

SEQ ID NO: 400614 - RNA, 32 nt, Homo Sapiens
auaugucuaaaagggcuuuucuuucuugguag

SEQ ID NO: 400615 - RNA, 32 nt, Homo Sapiens
uaugggaggaggagguggccuagaacucuccu

SEQ ID NO: 400616 - RNA, 32 nt, Homo Sapiens
caacccuggcggggguucgcuggcugcggccc

SEQ ID NO: 400617 - RNA, 32 nt, Homo Sapiens
cuccauguuggucaggcuggccucgaacuccc

SEQ ID NO: 400618 - RNA, 32 nt, Homo Sapiens
cguguccuuugcagacacuuucuggggcgagg

SEQ ID NO: 400619 - RNA, 32 nt, Homo Sapiens
aauugucccugccugcuucuggagaaagaaga

SEQ ID NO: 400620 - RNA, 32 nt, Homo Sapiens
ggguguggccuggccguccuccggggccaccg

SEQ ID NO: 400621 - RNA, 32 nt, Homo Sapiens
cuuugccuggauaccucuggcuccuucagcag

SEQ ID NO: 400622 - RNA, 32 nt, Homo Sapiens
cccuggagggugggguuggggggugggacucu

SEQ ID NO: 400623 - RNA, 32 nt, Homo Sapiens
ucacaaaacaauuuauaaaaacuucuuaaaua

SEQ ID NO: 400624 - RNA, 32 nt, Homo Sapiens
ucugaaauggaauagaaaauagaauggauuac

SEQ ID NO: 400625 - RNA, 32 nt, Homo Sapiens
ccugggguaaggggcagagagaaggacuuguc

SEQ ID NO: 400626 - RNA, 32 nt, Homo Sapiens
ucuucaaauauuaauggccagguauuuuagga

SEQ ID NO: 400627 - RNA, 32 nt, Homo Sapiens
caccccgugucccaggcccggccuuucugaca

SEQ ID NO: 400628 - RNA, 32 nt, Homo Sapiens
uguggacgggcagcuuccugugugcuccaagg

SEQ ID NO: 400629 - RNA, 32 nt, Homo Sapiens
cggcguuaggacccggaggcgcgggcggacug

SEQ ID NO: 400630 - RNA, 32 nt, Homo Sapiens
caugccucccggcugcgucucuaggcccgacu

SEQ ID NO: 400631 - RNA, 32 nt, Homo Sapiens
cugaacacauaaauaagugaauaagauaaaaa

SEQ ID NO: 400632 - RNA, 32 nt, Homo Sapiens
cuagaggcaaauuguggcacagagaauaucca

SEQ ID NO: 400633 - RNA, 32 nt, Homo Sapiens
gguucuaucaggggugcauucuggccaagggg

SEQ ID NO: 400634 - RNA, 32 nt, Homo Sapiens
cuccuggccucccagguuucaguugugucuga

SEQ ID NO: 400635 - RNA, 30 nt, Homo Sapiens
aaaugucuuaguccugcagaaucaggaguc

SEQ ID NO: 400636 - RNA, 32 nt, Homo Sapiens
gcuacacccacccugccaugcagcggugucca

SEQ ID NO: 400637 - RNA, 32 nt, Homo Sapiens
gaaggggcaggcuggcugggaaacucagccca

SEQ ID NO: 400638 - RNA, 32 nt, Homo Sapiens
cagcgcgaggcgggcgcugauuggcugcgacg

SEQ ID NO: 400639 - RNA, 32 nt, Homo Sapiens
augaagccaaaauagaugagaucaagaaugac

SEQ ID NO: 400640 - RNA, 32 nt, Homo Sapiens
cguacguggagaagugggaaugcaaaaguacu

SEQ ID NO: 400641 - RNA, 32 nt, Homo Sapiens
cggcuacauuguuuccuccccccgacucccuc

SEQ ID NO: 400642 - RNA, 32 nt, Homo Sapiens
uaacaugaaaauaaacauuuaaacauucuuca

SEQ ID NO: 400643 - RNA, 32 nt, Homo Sapiens
cuggucucccgccccaggcccugcucuuccug

SEQ ID NO: 400644 - RNA, 32 nt, Homo Sapiens
gccaucgcccgccuggugcgccgcccgccagc

SEQ ID NO: 400645 - RNA, 32 nt, Homo Sapiens
uggccugggguagguggcggcugcugacuaca

SEQ ID NO: 400646 - RNA, 32 nt, Homo Sapiens
auaaacuguauguaguuuuuagucuuucuguu

SEQ ID NO: 400647 - RNA, 32 nt, Homo Sapiens
aaguacaggccggcccgggccgccaccgccca

SEQ ID NO: 400648 - RNA, 32 nt, Homo Sapiens
guuauuuccucuaucacuucaaaacuccagcu

SEQ ID NO: 400649 - RNA, 32 nt, Homo Sapiens
gcuaggaggacggaaguugcuggcaggcggca

SEQ ID NO: 400650 - RNA, 32 nt, Homo Sapiens
uagugcccuuaugagaaaaaacaacgaagagc

SEQ ID NO: 400651 - RNA, 32 nt, Homo Sapiens
cagucugaggugcccauuuuaggguuuuugug

SEQ ID NO: 400652 - RNA, 32 nt, Homo Sapiens
aaauuacagaaauuauuacaaacggucucuca

SEQ ID NO: 400653 - RNA, 32 nt, Homo Sapiens
uauuuaacagaccuaaaauaaauccuauuagg

SEQ ID NO: 400654 - RNA, 32 nt, Homo Sapiens
acgucuucggcuccuagaacugcacaagcugu

SEQ ID NO: 400655 - RNA, 32 nt, Homo Sapiens
ccucucgccuggaggaucugugccaucuugga

SEQ ID NO: 400656 - RNA, 32 nt, Homo Sapiens
gugcauaccguggaagggcgccagggucuuug

SEQ ID NO: 400657 - RNA, 32 nt, Homo Sapiens
guuuuguucugcacucccacgacugaaguugu

SEQ ID NO: 400658 - RNA, 32 nt, Homo Sapiens
cugacccaaauucagugcucucgggggguugg

SEQ ID NO: 400659 - RNA, 32 nt, Homo Sapiens
gcagggccccuccuuccuccugucuuuauuua

SEQ ID NO: 400660 - RNA, 32 nt, Homo Sapiens
cggcugcuucccgcccgcgcaggaucaggccg

SEQ ID NO: 400661 - RNA, 32 nt, Homo Sapiens
aaggauuuugcaacaaauucgagcuguccgac

SEQ ID NO: 400662 - RNA, 32 nt, Homo Sapiens
aaaugucauuguuaccucuguguguuaagaaa

SEQ ID NO: 400663 - RNA, 32 nt, Homo Sapiens
uuaggcgauggcaacgcaaccccuccguuugc

SEQ ID NO: 400664 - RNA, 32 nt, Homo Sapiens
guuggagcaauccauccuccgcgcgcacgagc

SEQ ID NO: 400665 - RNA, 32 nt, Homo Sapiens
aaacgauuuuuguagauuauuuuuuguauguu

SEQ ID NO: 400666 - RNA, 32 nt, Homo Sapiens
ggaaaggaacggcgacaaaaccauugugcuca

SEQ ID NO: 400667 - RNA, 32 nt, Homo Sapiens
uauauacagauuauauauaggguguaacuaua

SEQ ID NO: 400668 - RNA, 32 nt, Homo Sapiens
gcccgaagaacaagagggugaaacuguggagg

SEQ ID NO: 400669 - RNA, 31 nt, Homo Sapiens
uagcagcugccgguggcagggaggugccagc

SEQ ID NO: 400670 - RNA, 32 nt, Homo Sapiens
gggcaggugagcuacagggucugggacccaga

SEQ ID NO: 400671 - RNA, 32 nt, Homo Sapiens
uuuauauacuaaaguaugauuucauguauauc

SEQ ID NO: 400672 - RNA, 32 nt, Homo Sapiens
cuauaaucauaucucauggauuuauuuucucc

SEQ ID NO: 400673 - RNA, 32 nt, Homo Sapiens
acaguguuugguucuuuuguuuuguuuuuuaa

SEQ ID NO: 400674 - RNA, 32 nt, Homo Sapiens
uaugaagaguaaugggcaaacuguagccacau

SEQ ID NO: 400675 - RNA, 32 nt, Homo Sapiens
uugauuacugacuccgguuccacacacuguaa

SEQ ID NO: 400676 - RNA, 32 nt, Homo Sapiens
cugagccgagcggacgcccccgggggccgcgu

SEQ ID NO: 400677 - RNA, 32 nt, Homo Sapiens
cuggcuggacaguguucuauuaacucauugaa

SEQ ID NO: 400678 - RNA, 32 nt, Homo Sapiens
cuuuuaaucuuucaggaauacauauaagcagg

SEQ ID NO: 400679 - RNA, 32 nt, Homo Sapiens
augcuggucaguacucagauccucaucgcccu

SEQ ID NO: 400680 - RNA, 32 nt, Homo Sapiens
aaagggguuggaaaaacugauuuuccaguugg

SEQ ID NO: 400681 - RNA, 32 nt, Homo Sapiens
agggggcaggagaggacaggcgucugaagaca

SEQ ID NO: 400682 - RNA, 32 nt, Homo Sapiens
guacuguuguaagugcuuuacaugcuguuaua

SEQ ID NO: 400683 - RNA, 32 nt, Homo Sapiens
caaaacaaaacacaacaaaaccaaaccacaga

SEQ ID NO: 400684 - RNA, 32 nt, Homo Sapiens
agguuaauuaugguagcaaauuuuggaccuaa

SEQ ID NO: 400685 - RNA, 32 nt, Homo Sapiens
aguaguuguagacgcccgccccugccucagag

SEQ ID NO: 400686 - RNA, 32 nt, Homo Sapiens
auuauuuacauaacaauaacuuuuuaucaguu

SEQ ID NO: 400687 - RNA, 32 nt, Homo Sapiens
auuaauguaaauuuauauuuauucauuaaaaa

SEQ ID NO: 400688 - RNA, 32 nt, Homo Sapiens
ugauuuuguaaaagucauaaaugcuuauugua

SEQ ID NO: 400689 - RNA, 32 nt, Homo Sapiens
gugaacuuaaaauaaacagaauuuuaaaggag

SEQ ID NO: 400690 - RNA, 32 nt, Homo Sapiens
gacagcuagagcacauccucuaguuaguuugu

SEQ ID NO: 400691 - RNA, 32 nt, Homo Sapiens
aggcuggcuggguaccggcugucgcugaccca

SEQ ID NO: 400692 - RNA, 32 nt, Homo Sapiens
guugcccuagagugggacccagcccucaccuc

SEQ ID NO: 400693 - RNA, 32 nt, Homo Sapiens
agcauucguuuaucuucguccgccuucucucc

SEQ ID NO: 400694 - RNA, 32 nt, Homo Sapiens
uacauccucacgggcaagguggaggcagaguu

SEQ ID NO: 400695 - RNA, 32 nt, Homo Sapiens
ucccccguuuuaaaaaggaauguaauaaaauu

SEQ ID NO: 400696 - RNA, 32 nt, Homo Sapiens
aaccgccccccgcuccuucucgccgccucgag

SEQ ID NO: 400697 - RNA, 32 nt, Homo Sapiens
aacuuggcugcuuuuucuuucugcaguuagca

SEQ ID NO: 400698 - RNA, 32 nt, Homo Sapiens
aggaacccuacuguugacuugaaaauaaauag

SEQ ID NO: 400699 - RNA, 32 nt, Homo Sapiens
acucagcugaccacgcucuccuuucuggcagg

SEQ ID NO: 400700 - RNA, 30 nt, Homo Sapiens
gcacaggcgcccgacagccgggcugagcgg

SEQ ID NO: 400701 - RNA, 32 nt, Homo Sapiens
uucucucaugguagcucuccaacagcaggagu

SEQ ID NO: 400702 - RNA, 32 nt, Homo Sapiens
ggggaagcucacguaccuggcugacagagugc

SEQ ID NO: 400703 - RNA, 32 nt, Homo Sapiens
auaggcugaucuauguauuuugaaagccugaa

SEQ ID NO: 400704 - RNA, 32 nt, Homo Sapiens
accuguuagggucugcuuuuguccucugggag

SEQ ID NO: 400705 - RNA, 32 nt, Homo Sapiens
cggcggcuggagcggcugagcgaggaggugga

SEQ ID NO: 400706 - RNA, 32 nt, Homo Sapiens
cccaggccacgcgccagccaggcugugggcag

SEQ ID NO: 400707 - RNA, 32 nt, Homo Sapiens
uuguucuuccauguugguuuuuauugagauau

SEQ ID NO: 400708 - RNA, 32 nt, Homo Sapiens
aauguaaacaauauaguugcuuugaaaauugg

SEQ ID NO: 400709 - RNA, 32 nt, Homo Sapiens
gcauuacugcccagguaaggagugcuagaauc

SEQ ID NO: 400710 - RNA, 32 nt, Homo Sapiens
aguaguuuuacuacuuuucauuuagaacagag

SEQ ID NO: 400711 - RNA, 32 nt, Homo Sapiens
ccccaaugccccagcucccucuuggguccugu

SEQ ID NO: 400712 - RNA, 32 nt, Homo Sapiens
cagaacaagaccuugucucaaaaaauaauaau

SEQ ID NO: 400713 - RNA, 32 nt, Homo Sapiens
auagcuggacauuuguuuucagucauuauaca

SEQ ID NO: 400714 - RNA, 32 nt, Homo Sapiens
uccagacggcugugcgucugcugcugccuggg

SEQ ID NO: 400715 - RNA, 29 nt, Homo Sapiens
gcuugggacagucucaguugacacuuguu

SEQ ID NO: 400716 - RNA, 32 nt, Homo Sapiens
ucuggccccuucucacucuccucuccucucag

SEQ ID NO: 400717 - RNA, 32 nt, Homo Sapiens
agaacucaacuggcaaggcugcuuuucugugc

SEQ ID NO: 400718 - RNA, 32 nt, Homo Sapiens
ucuccucgcccgcuccccugggcucagcucgg

SEQ ID NO: 400719 - RNA, 32 nt, Homo Sapiens
uuaggggcaaagagaagaagggcccccgucag

SEQ ID NO: 400720 - RNA, 28 nt, Homo Sapiens
gccaugccgccccgaugggaacuggcac

SEQ ID NO: 400721 - RNA, 32 nt, Homo Sapiens
ggcgcgccauggaggcgccgggucgcgccagu

SEQ ID NO: 400722 - RNA, 32 nt, Homo Sapiens
cccgcgcgcccgagcagggcgacugucauuag

SEQ ID NO: 400723 - RNA, 32 nt, Homo Sapiens
cuucccuggagacgggcggggaggccaaacuu

SEQ ID NO: 400724 - RNA, 32 nt, Homo Sapiens
aacuucacucuggggacacucugccagcaaag

SEQ ID NO: 400725 - RNA, 32 nt, Homo Sapiens
ccaaucaaagacaagcuuuaacuuuacuuuga

SEQ ID NO: 400726 - RNA, 32 nt, Homo Sapiens
cuccaggccugguuauuguucagacauuccau

SEQ ID NO: 400727 - RNA, 32 nt, Homo Sapiens
acgcccugaggguggccacgcugccagguguu

SEQ ID NO: 400728 - RNA, 32 nt, Homo Sapiens
ccucucaccaucugcucuguggcucccagugc

SEQ ID NO: 400729 - RNA, 32 nt, Homo Sapiens
agcuggccccauuccuucugcugcuggguaua

SEQ ID NO: 400730 - RNA, 32 nt, Homo Sapiens
ucaggccucacuuuucuccguaaacaccccgg

SEQ ID NO: 400731 - RNA, 32 nt, Homo Sapiens
ucuggaagcucuuugcgguggcguuggugcug

SEQ ID NO: 400732 - RNA, 32 nt, Homo Sapiens
cucuaaaguccccugacaucagcccucccaac

SEQ ID NO: 400733 - RNA, 32 nt, Homo Sapiens
ccugaucaauugcaaguacuuccacuucuucc

SEQ ID NO: 400734 - RNA, 32 nt, Homo Sapiens
cagcccccucccagcccuugcccagccugggg

SEQ ID NO: 400735 - RNA, 32 nt, Homo Sapiens
uaaauuggaagcauucuuaauuauccaucuaa

SEQ ID NO: 400736 - RNA, 32 nt, Homo Sapiens
augugguggaugccagggcgugcuccaggcac

SEQ ID NO: 400737 - RNA, 32 nt, Homo Sapiens
aagacaucauuuccuuguuccuauuucuuguu

SEQ ID NO: 400738 - RNA, 32 nt, Homo Sapiens
auuuaaccuugaucuaaagacaaguuguaccc

SEQ ID NO: 400739 - RNA, 32 nt, Homo Sapiens
acagcaccuaccucagaagacuguuaugaaga

SEQ ID NO: 400740 - RNA, 32 nt, Homo Sapiens
ucgccuccuccuccaugggaccgcggcgaggg

SEQ ID NO: 400741 - RNA, 32 nt, Homo Sapiens
uucagacaucuucugauuucuucucaccuaua

SEQ ID NO: 400742 - RNA, 32 nt, Homo Sapiens
uagguguaagagaggguggggcuaagugaaug

SEQ ID NO: 400743 - RNA, 32 nt, Homo Sapiens
gacacagcacugggcuggggcagggcucugcg

SEQ ID NO: 400744 - RNA, 32 nt, Homo Sapiens
gcuuauuuuuaaaauuuuaauauggguucuuu

SEQ ID NO: 400745 - RNA, 32 nt, Homo Sapiens
uccggcugccagccagggggccugggccagac

SEQ ID NO: 400746 - RNA, 32 nt, Homo Sapiens
gguuucauuauuuugcacuggauccacccugu

SEQ ID NO: 400747 - RNA, 32 nt, Homo Sapiens
caagguguggaggcuccugugguaguccuccc

SEQ ID NO: 400748 - RNA, 32 nt, Homo Sapiens
guagacugagacaauuuuauuuauauccuaau

SEQ ID NO: 400749 - RNA, 32 nt, Homo Sapiens
cuggaguuuaacuuguaauaucuuauaguuua

SEQ ID NO: 400750 - RNA, 32 nt, Homo Sapiens
acagguaauauagcucuuucuuuuauuaacug

SEQ ID NO: 400751 - RNA, 32 nt, Homo Sapiens
ucuccgcgguccggcccggggccccgggaucu

SEQ ID NO: 400752 - RNA, 32 nt, Homo Sapiens
acauuuacuggccgaguaaacaucuccgaaug

SEQ ID NO: 400753 - RNA, 32 nt, Homo Sapiens
cuguucggcacguacauaguggagcccuucag

SEQ ID NO: 400754 - RNA, 32 nt, Homo Sapiens
gcacaauggaaauuauauuuucuacuuuacug

SEQ ID NO: 400755 - RNA, 32 nt, Homo Sapiens
uccccucuggucuccagaguuuuccuguccuc

SEQ ID NO: 400756 - RNA, 32 nt, Homo Sapiens
agggaagggaagucagcucugggagcagcccu

SEQ ID NO: 400757 - RNA, 32 nt, Homo Sapiens
guuuuguguuuuugcugucaagcugaugcuuc

SEQ ID NO: 400758 - RNA, 32 nt, Homo Sapiens
agccuaugaagucccaggaucaagaugggacc

SEQ ID NO: 400759 - RNA, 32 nt, Homo Sapiens
auaaugauaaccucaagacuaucagaagaaau

SEQ ID NO: 400760 - RNA, 32 nt, Homo Sapiens
aguaccgugggacccaggccugcccggagccc

SEQ ID NO: 400761 - RNA, 32 nt, Homo Sapiens
gggcuucacaugccacuggaaacaacagacuc

SEQ ID NO: 400762 - RNA, 32 nt, Homo Sapiens
ucaacaaaggggauuuuguacacauaacaugg

SEQ ID NO: 400763 - RNA, 32 nt, Homo Sapiens
cuccggaacuucugaccucuguuuccuccguc

SEQ ID NO: 400764 - RNA, 32 nt, Homo Sapiens
gucaccccacuuuaacuuucuaccaggacccc

SEQ ID NO: 400765 - RNA, 30 nt, Homo Sapiens
gccggugccaccugugagccggcgcgggcc

SEQ ID NO: 400766 - RNA, 32 nt, Homo Sapiens
ugaacuuacagaauucucauccuuccacugag

SEQ ID NO: 400767 - RNA, 32 nt, Homo Sapiens
gucagcaaacuccgcggcccgcaagcccggcu

SEQ ID NO: 400768 - RNA, 32 nt, Homo Sapiens
gaaacaagucacuuuacccuccuuaggaccca

SEQ ID NO: 400769 - RNA, 32 nt, Homo Sapiens
accuaugccgugcccuucauccagccagaccu

SEQ ID NO: 400770 - RNA, 32 nt, Homo Sapiens
aucacuaauauuuggaaguauuucauuacuaa

SEQ ID NO: 400771 - RNA, 32 nt, Homo Sapiens
uaacacuccaucugcccuguccauugccuuca

SEQ ID NO: 400772 - RNA, 32 nt, Homo Sapiens
gacauaccagucuuuagcuggugcuauggucu

SEQ ID NO: 400773 - RNA, 32 nt, Homo Sapiens
agcuuagagggaccccaccccgccccugcacc

SEQ ID NO: 400774 - RNA, 32 nt, Homo Sapiens
uauuaaggagaagaaaacauuuuugucaccaa

SEQ ID NO: 400775 - RNA, 32 nt, Homo Sapiens
ucccuccaccucaagacccccauuugucccag

SEQ ID NO: 400776 - RNA, 32 nt, Homo Sapiens
aacguucaacuuuccugagacuguguucacca

SEQ ID NO: 400777 - RNA, 32 nt, Homo Sapiens
ugccuaggccccagcuuacuuggggacccggg

SEQ ID NO: 400778 - RNA, 32 nt, Homo Sapiens
cuagaaaugcccuucacuuucuccugguguuu

SEQ ID NO: 400779 - RNA, 29 nt, Homo Sapiens
uugcuguaaucuuuccuguagaguaauag

SEQ ID NO: 400780 - RNA, 32 nt, Homo Sapiens
aagaaugcauucuggauagcugaacaaaaggc

SEQ ID NO: 400781 - RNA, 32 nt, Homo Sapiens
uuuuagaagcuaaagaaaguaauuaugcuucc

SEQ ID NO: 400782 - RNA, 32 nt, Homo Sapiens
agggaggcgaggcgcugcuugucgacagcuag

SEQ ID NO: 400783 - RNA, 32 nt, Homo Sapiens
aagauaucagggaaaguaaaaaguaaaagaaa

SEQ ID NO: 400784 - RNA, 32 nt, Homo Sapiens
gcaucuaugugagaccauuuagcacacugcuu

SEQ ID NO: 400785 - RNA, 32 nt, Homo Sapiens
cagcagaucccaccccacccugggauccgagg

SEQ ID NO: 400786 - RNA, 32 nt, Homo Sapiens
aggagggcucugaguccucucccggccaggcc

SEQ ID NO: 400787 - RNA, 32 nt, Homo Sapiens
aggcccggcccagccuaggcccgggguggcca

SEQ ID NO: 400788 - RNA, 32 nt, Homo Sapiens
auuugauacuuauuugugaaugaaguaaucuc

SEQ ID NO: 400789 - RNA, 32 nt, Homo Sapiens
uugaggucaggaguucgagaccacccuggcca

SEQ ID NO: 400790 - RNA, 32 nt, Homo Sapiens
gagcucuggcagccauacggcaccaugaagua

SEQ ID NO: 400791 - RNA, 32 nt, Homo Sapiens
aguggcugggagcuugccaggaacccaguggc

SEQ ID NO: 400792 - RNA, 32 nt, Homo Sapiens
ccugccugacauuuggaguguuccccucccac

SEQ ID NO: 400793 - RNA, 28 nt, Homo Sapiens
ugccagguggggaccaggauaugacucc

SEQ ID NO: 400794 - RNA, 27 nt, Homo Sapiens
cuaugaaauaaauuauuuuaaaaccag

SEQ ID NO: 400795 - RNA, 32 nt, Homo Sapiens
uagaacacauuguauugguauuacaaccagau

SEQ ID NO: 400796 - RNA, 32 nt, Homo Sapiens
cuggguugucaccggcgccgccgccgaggaag

SEQ ID NO: 400797 - RNA, 32 nt, Homo Sapiens
gucuaucugaugcugaaaaugucucuaguuuu

SEQ ID NO: 400798 - RNA, 32 nt, Homo Sapiens
ugccuucucauuuaauucugaggaaauaucac

SEQ ID NO: 400799 - RNA, 32 nt, Homo Sapiens
agcugcuucuaccacccucacacuggugaccc

SEQ ID NO: 400800 - RNA, 32 nt, Homo Sapiens
aagguaccagaugccauagaaacacagcuggg

SEQ ID NO: 400801 - RNA, 32 nt, Homo Sapiens
agagcuaucuggagauuaugaguaagcugauu

SEQ ID NO: 400802 - RNA, 32 nt, Homo Sapiens
ccuuuucaaccaguuuucccccaaggggggaa

SEQ ID NO: 400803 - RNA, 32 nt, Homo Sapiens
ucucuaggguuuuuauuuucuucuuucuuugu

SEQ ID NO: 400804 - RNA, 32 nt, Homo Sapiens
aagaguguuauuaaugauuaugaacuuuugcu

SEQ ID NO: 400805 - RNA, 32 nt, Homo Sapiens
gggagcgcaguagcacguggacugggcaggau

SEQ ID NO: 400806 - RNA, 32 nt, Homo Sapiens
auacaacccugcauccagggacacggcccugc

SEQ ID NO: 400807 - RNA, 32 nt, Homo Sapiens
gcuauuuuccuccucuuguuacaagcuucaga

SEQ ID NO: 400808 - RNA, 30 nt, Homo Sapiens
ccaggguccaccccuucucucugggcuugu

SEQ ID NO: 400809 - RNA, 32 nt, Homo Sapiens
ugguuggaacuaaaugucaccaagguggcuuc

SEQ ID NO: 400810 - RNA, 32 nt, Homo Sapiens
gauuaaaagacacgugaaaugauacuuuuauu

SEQ ID NO: 400811 - RNA, 32 nt, Homo Sapiens
ccaggcagcgaggccccccaccccuauccugc

SEQ ID NO: 400812 - RNA, 32 nt, Homo Sapiens
cgccccuugcugggcucuguggcccucacucu

SEQ ID NO: 400813 - RNA, 32 nt, Homo Sapiens
gaucucaaucugucuuagcauuuuguaacuaa

SEQ ID NO: 400814 - RNA, 32 nt, Homo Sapiens
ugacaagcacuuuuugaauaucucaagaguaa

SEQ ID NO: 400815 - RNA, 32 nt, Homo Sapiens
cgguguucuggugcuagaguggagaggcuggc

SEQ ID NO: 400816 - RNA, 32 nt, Homo Sapiens
uggccaagguaacacucaucguauucacggag

SEQ ID NO: 400817 - RNA, 32 nt, Homo Sapiens
ugacuguaaucccagcacuuugggaggccgag

SEQ ID NO: 400818 - RNA, 32 nt, Homo Sapiens
aucacagauuuuacuuuacaaacaagcuaauc

SEQ ID NO: 400819 - RNA, 32 nt, Homo Sapiens
gaauguuuucuuuccagaugaugauucagaag

SEQ ID NO: 400820 - RNA, 32 nt, Homo Sapiens
gccuggcugggggaucggggcugugcugggcg

SEQ ID NO: 400821 - RNA, 32 nt, Homo Sapiens
ucuuaaaaguuuuguuuugauuuguuuccauu

SEQ ID NO: 400822 - RNA, 32 nt, Homo Sapiens
gggucucugggggcgaggagggcgcgucgccc

SEQ ID NO: 400823 - RNA, 32 nt, Homo Sapiens
ucggguggcgguggcgggagcgggaccaggug

SEQ ID NO: 400824 - RNA, 32 nt, Homo Sapiens
gagggccuugcuucacauccgcaggagcacga

SEQ ID NO: 400825 - RNA, 32 nt, Homo Sapiens
gagcagucuuccauuccaacuuuaguuucugc

SEQ ID NO: 400826 - RNA, 32 nt, Homo Sapiens
ccaguuugccagcagcuauuugccuauagaga

SEQ ID NO: 400827 - RNA, 32 nt, Homo Sapiens
gggcggacucuggccaucauguugacagccuu

SEQ ID NO: 400828 - RNA, 32 nt, Homo Sapiens
auuagucuguaucaccauuuauuacaguuaua

SEQ ID NO: 400829 - RNA, 30 nt, Homo Sapiens
ccagaggcccccgugccuccucguuguugg

SEQ ID NO: 400830 - RNA, 32 nt, Homo Sapiens
accugaugccagcacaucuguccacagcugcc

SEQ ID NO: 400831 - RNA, 32 nt, Homo Sapiens
uuugcuauggauuuauacuaacaagaacauuc

SEQ ID NO: 400832 - RNA, 32 nt, Homo Sapiens
ggacaaauuuauuugcaaaaugagucuaguuu

SEQ ID NO: 400833 - RNA, 32 nt, Homo Sapiens
uucuauagcucuucuauuuaaaaaauaaaaaa

SEQ ID NO: 400834 - RNA, 32 nt, Homo Sapiens
aaaugcuuuagguggggagaugaauuaaccua

SEQ ID NO: 400835 - RNA, 32 nt, Homo Sapiens
ggacugcugggcgggggacaucucgggguuuc

SEQ ID NO: 400836 - RNA, 32 nt, Homo Sapiens
gacugcaaggcucugcagccaaugcagaaaau

SEQ ID NO: 400837 - RNA, 32 nt, Homo Sapiens
cuuccuggcuccugggcaguggggaagccccc

SEQ ID NO: 400838 - RNA, 32 nt, Homo Sapiens
uuaaaucaacuacuccacguguuuuuccaucc

SEQ ID NO: 400839 - RNA, 32 nt, Homo Sapiens
ggcuagguucgugaucuggagagacgcucaga

SEQ ID NO: 400840 - RNA, 32 nt, Homo Sapiens
aaggccugccuuucucagugugaucuugcccc

SEQ ID NO: 400841 - RNA, 32 nt, Homo Sapiens
guaguuaaaaauugauauuaaaaaaucuaggu

SEQ ID NO: 400842 - RNA, 32 nt, Homo Sapiens
ucagucucggagggcgaugcucguaggauauu

SEQ ID NO: 400843 - RNA, 32 nt, Homo Sapiens
ccagagguuucccacaaaaaacaaagacucca

SEQ ID NO: 400844 - RNA, 30 nt, Homo Sapiens
gcgugggcgcccgccgagccgaggccaugg

SEQ ID NO: 400845 - RNA, 32 nt, Homo Sapiens
cgaggcgccgcgcgagcgcccugcagccaacg

SEQ ID NO: 400846 - RNA, 32 nt, Homo Sapiens
auaaagaagucuuuaaaugaguaagcuuucuu

SEQ ID NO: 400847 - RNA, 32 nt, Homo Sapiens
ucgauugccccgagacacaugggccaaggagg

SEQ ID NO: 400848 - RNA, 32 nt, Homo Sapiens
auauauuuuuauucuaccuuucaguaaaacua

SEQ ID NO: 400849 - RNA, 32 nt, Homo Sapiens
aaccagaaugugucagaaaaugccaagucaug

SEQ ID NO: 400850 - RNA, 32 nt, Homo Sapiens
uaguugggguguugacuccuguguguuuugca

SEQ ID NO: 400851 - RNA, 32 nt, Homo Sapiens
cucgugugcucaucucacacacaccccccucc

SEQ ID NO: 400852 - RNA, 32 nt, Homo Sapiens
cuuaauaaaaacaucaacauugaaaacaaaaa

SEQ ID NO: 400853 - RNA, 32 nt, Homo Sapiens
ugcugacuuugaagacugugaguugguagcca

SEQ ID NO: 400854 - RNA, 32 nt, Homo Sapiens
guaacaugagcaugaagugauuaaccugcuug

SEQ ID NO: 400855 - RNA, 32 nt, Homo Sapiens
cuuccuagcaguguuaauacaugcaagaagua

SEQ ID NO: 400856 - RNA, 32 nt, Homo Sapiens
uuuaaaacaccucugcuuucugauguugccuu

SEQ ID NO: 400857 - RNA, 32 nt, Homo Sapiens
aacugcacaaaauuauuguuuucagcccccgu

SEQ ID NO: 400858 - RNA, 32 nt, Homo Sapiens
agccaagauugugccacuguacuccagccugg

SEQ ID NO: 400859 - RNA, 30 nt, Homo Sapiens
aggcgagacggcccgaucgcccagggcccc

SEQ ID NO: 400860 - RNA, 32 nt, Homo Sapiens
guuaucaauugguuauuguacuguauaguuuu

SEQ ID NO: 400861 - RNA, 32 nt, Homo Sapiens
guuucgucucccacccauuuucuauggaaaac

SEQ ID NO: 400862 - RNA, 32 nt, Homo Sapiens
cauucacuguggggugucccaaggcugggcac

SEQ ID NO: 400863 - RNA, 32 nt, Homo Sapiens
auggcagccccucccccgcaugcaugcaccuc

SEQ ID NO: 400864 - RNA, 32 nt, Homo Sapiens
gcgggaaggggagugguggcggcugcggcagu

SEQ ID NO: 400865 - RNA, 32 nt, Homo Sapiens
ggaaucccuguggacuuccaaaagcacuucgg

SEQ ID NO: 400866 - RNA, 32 nt, Homo Sapiens
cuagggugccuuaaaaauaacaacaacaaaaa

SEQ ID NO: 400867 - RNA, 32 nt, Homo Sapiens
acuugcuccccucuccuuuucuucucuuuaga

SEQ ID NO: 400868 - RNA, 27 nt, Homo Sapiens
guuguaaccauuuucugguaucacauu

SEQ ID NO: 400869 - RNA, 32 nt, Homo Sapiens
auccugguggggcccgaucugggcugccucca

SEQ ID NO: 400870 - RNA, 32 nt, Homo Sapiens
ugcuuauugaccauuuguacuucuuucuuugu

SEQ ID NO: 400871 - RNA, 32 nt, Homo Sapiens
aaauuagcuggguguaguggcgggugccugua

SEQ ID NO: 400872 - RNA, 32 nt, Homo Sapiens
cuaaugauacuagugaugaagaacaggaggaa

SEQ ID NO: 400873 - RNA, 31 nt, Homo Sapiens
uucgagcugccggguggcuugugguccgguu

SEQ ID NO: 400874 - RNA, 32 nt, Homo Sapiens
aaucacuucuuugccaucuguuagcaaugcag

SEQ ID NO: 400875 - RNA, 32 nt, Homo Sapiens
cacgucccaagccaccuggcccgauuccacag

SEQ ID NO: 400876 - RNA, 32 nt, Homo Sapiens
ccuggggcgagggagcggggagcccuaccccg

SEQ ID NO: 400877 - RNA, 32 nt, Homo Sapiens
ggcacaaaggucgcgggaggagcaggugccca

SEQ ID NO: 400878 - RNA, 32 nt, Homo Sapiens
cagcaugcucuggggaggcggcucuggcucuu

SEQ ID NO: 400879 - RNA, 32 nt, Homo Sapiens
ugaacgaguuugcugucuucccauuggauuca

SEQ ID NO: 400880 - RNA, 32 nt, Homo Sapiens
acagaaauaaaggagggaccaauaucugggac

SEQ ID NO: 400881 - RNA, 32 nt, Homo Sapiens
agagauguuuucuaaaccccagccuugaacuu

SEQ ID NO: 400882 - RNA, 32 nt, Homo Sapiens
guauguuaacacacugaugaugugagccugug

SEQ ID NO: 400883 - RNA, 32 nt, Homo Sapiens
accucgacgagcccggccccagugccccagcu

SEQ ID NO: 400884 - RNA, 32 nt, Homo Sapiens
gaaggacacacuggaggcucuugcugcucuga

SEQ ID NO: 400885 - RNA, 32 nt, Homo Sapiens
ccugcggaugaguggaaggccaagagggcgcc

SEQ ID NO: 400886 - RNA, 32 nt, Homo Sapiens
aauggcauuucacaccucugagcauuauacag

SEQ ID NO: 400887 - RNA, 32 nt, Homo Sapiens
cucauuuuuuauuaaauugcuugcuuuugaaa

SEQ ID NO: 400888 - RNA, 32 nt, Homo Sapiens
gguuugccucuguguccccacccaaaucucau

SEQ ID NO: 400889 - RNA, 32 nt, Homo Sapiens
ggaagcauuuuucccuuagcaaaccauaacag

SEQ ID NO: 400890 - RNA, 32 nt, Homo Sapiens
ggccggcgccccgcccccuuuacugacagguu

SEQ ID NO: 400891 - RNA, 32 nt, Homo Sapiens
ggcuuaccuauuucuauguuuuuagguaguug

SEQ ID NO: 400892 - RNA, 32 nt, Homo Sapiens
uuuggcauauggcauuuucuaacuuaggaagc

SEQ ID NO: 400893 - RNA, 32 nt, Homo Sapiens
ggaaucaugcagcaagauaaccccaagacagu

SEQ ID NO: 400894 - RNA, 32 nt, Homo Sapiens
uuauuuccuacuuuuccacuacuaaaaaacag

SEQ ID NO: 400895 - RNA, 32 nt, Homo Sapiens
caucaacuacaccgugauucucagcagcuaaa

SEQ ID NO: 400896 - RNA, 32 nt, Homo Sapiens
aggucugccuacgggccacgggccacucacca

SEQ ID NO: 400897 - RNA, 32 nt, Homo Sapiens
aguccuucggacuuaaaccugccuaccugagu

SEQ ID NO: 400898 - RNA, 32 nt, Homo Sapiens
uuuuuuguuuuaacuuuuguuucuuaacauuu

SEQ ID NO: 400899 - RNA, 32 nt, Homo Sapiens
uauuauaaaagcuuuguguuauugggagucuu

SEQ ID NO: 400900 - RNA, 32 nt, Homo Sapiens
caucauugcuuugaauugaauuuuuauaucua

SEQ ID NO: 400901 - RNA, 32 nt, Homo Sapiens
ccaguaagaaggcuaaauaaagggcagggaca

SEQ ID NO: 400902 - RNA, 32 nt, Homo Sapiens
gggaggagagagaaugucuuuucgaggcggag

SEQ ID NO: 400903 - RNA, 30 nt, Homo Sapiens
cggcaggauaaaauagcuaugccaggggug

SEQ ID NO: 400904 - RNA, 32 nt, Homo Sapiens
gcugcuacauuuccauuuucauuuucgagcca

SEQ ID NO: 400905 - RNA, 32 nt, Homo Sapiens
cccgugaggagcuucccgcagccgccuggccc

SEQ ID NO: 400906 - RNA, 32 nt, Homo Sapiens
cuucagaggagcuguuuaucccucuccacgcg

SEQ ID NO: 400907 - RNA, 32 nt, Homo Sapiens
aucaaggaccucagccuuauauaaucauuguc

SEQ ID NO: 400908 - RNA, 32 nt, Homo Sapiens
acccuuuucaguucggcaaacgucgcucccuu

SEQ ID NO: 400909 - RNA, 32 nt, Homo Sapiens
cgggacccgggaggaauggaaagggaacccag

SEQ ID NO: 400910 - RNA, 32 nt, Homo Sapiens
cagagcccagagaugcugcugcugccccugcu

SEQ ID NO: 400911 - RNA, 32 nt, Homo Sapiens
aaggugcagcgggcagucugcgugcuaaacaa

SEQ ID NO: 400912 - RNA, 32 nt, Homo Sapiens
gcaaggccaaaggagccuggucugguaaaaaa

SEQ ID NO: 400913 - RNA, 32 nt, Homo Sapiens
ccccaccucaggguuauauuucccucuccccu

SEQ ID NO: 400914 - RNA, 32 nt, Homo Sapiens
cgagcugaauugugucccuaccccuaccuuua

SEQ ID NO: 400915 - RNA, 32 nt, Homo Sapiens
cuggcugcccuucuucuugacccauguucuca

SEQ ID NO: 400916 - RNA, 32 nt, Homo Sapiens
agaaguuaucccauucuucuuuaccuggucuc

SEQ ID NO: 400917 - RNA, 32 nt, Homo Sapiens
cuucugcgcucgccgccgccgcccucagcccg

SEQ ID NO: 400918 - RNA, 32 nt, Homo Sapiens
agcuuguagugggguugggguaggcccccugg

SEQ ID NO: 400919 - RNA, 32 nt, Homo Sapiens
gguuaaaucuucaugguguucuguuuccuagg

SEQ ID NO: 400920 - RNA, 32 nt, Homo Sapiens
aacugcacuccagccugggcuacagagcaaga

SEQ ID NO: 400921 - RNA, 32 nt, Homo Sapiens
ccagguuggaagauuaucucacccggccccag

SEQ ID NO: 400922 - RNA, 32 nt, Homo Sapiens
cuugcauuucaguguguucaccccgcugcucc

SEQ ID NO: 400923 - RNA, 32 nt, Homo Sapiens
cagcuuguacuauuaaaauaauagagaauguu

SEQ ID NO: 400924 - RNA, 32 nt, Homo Sapiens
gugucugccggggcccagggcggcugcugugc

SEQ ID NO: 400925 - RNA, 32 nt, Homo Sapiens
ccccaaaucuguguaaaaucugcugcaaaggu

SEQ ID NO: 400926 - RNA, 32 nt, Homo Sapiens
agcaggcuugcccagcugggaagcccaucaaa

SEQ ID NO: 400927 - RNA, 32 nt, Homo Sapiens
aaauuuguuguaauuuuaucuuuugagaagac

SEQ ID NO: 400928 - RNA, 32 nt, Homo Sapiens
cccggagaccgaucccgccccgcggcccaggc

SEQ ID NO: 400929 - RNA, 32 nt, Homo Sapiens
gugcucucugucagcuccaggucaauucagag

SEQ ID NO: 400930 - RNA, 32 nt, Homo Sapiens
aauuguguccagaaugcuuugcucuuagccac

SEQ ID NO: 400931 - RNA, 32 nt, Homo Sapiens
ugcuuuugaacaucuuuuuuuuuuucauugaa

SEQ ID NO: 400932 - RNA, 32 nt, Homo Sapiens
gaggcugcagugagccgagaucgcgccacugc

SEQ ID NO: 400933 - RNA, 32 nt, Homo Sapiens
caucuccccccuccuagugagcaggggccugc

SEQ ID NO: 400934 - RNA, 32 nt, Homo Sapiens
gaggcugcagcgagccgagauugcgcuacuga

SEQ ID NO: 400935 - RNA, 32 nt, Homo Sapiens
accagccuguggaguucaggaggcgagacauc

SEQ ID NO: 400936 - RNA, 32 nt, Homo Sapiens
uuacagcucccuccccaaaacuggggucccag

SEQ ID NO: 400937 - RNA, 32 nt, Homo Sapiens
cuccaguguggugggagggaaccgcguggcca

SEQ ID NO: 400938 - RNA, 32 nt, Homo Sapiens
gggccccaccgcccccuuggucagcgcaggcc

SEQ ID NO: 400939 - RNA, 32 nt, Homo Sapiens
ucacucugcccagcugcagagugcuguucccu

SEQ ID NO: 400940 - RNA, 32 nt, Homo Sapiens
guuacuucucucccuuacacagaugacuugug

SEQ ID NO: 400941 - RNA, 32 nt, Homo Sapiens
gcauuccagcgucugcuguugauuccacugaa

SEQ ID NO: 400942 - RNA, 32 nt, Homo Sapiens
gcaauggaacaaagcuggacuuugacuuugac

SEQ ID NO: 400943 - RNA, 32 nt, Homo Sapiens
caccugcgccggucgcuggaccgcggggcgcu

SEQ ID NO: 400944 - RNA, 32 nt, Homo Sapiens
agugugcuccugggaaggcuaaggugggagaa

SEQ ID NO: 400945 - RNA, 32 nt, Homo Sapiens
acuguaucauauuguagcuauuagggaagaga

SEQ ID NO: 400946 - RNA, 32 nt, Homo Sapiens
aaaggggagaaugucaaggaagacuuuuggua

SEQ ID NO: 400947 - RNA, 32 nt, Homo Sapiens
cuuagcaaugaaauugcuguuaaaacacaaau

SEQ ID NO: 400948 - RNA, 32 nt, Homo Sapiens
ggcuagccgccggcgccgcccgggucccugca

SEQ ID NO: 400949 - RNA, 32 nt, Homo Sapiens
aggaugacccucacauuuaaaaggaucaaaau

SEQ ID NO: 400950 - RNA, 32 nt, Homo Sapiens
cugggcugugggaggcagcugugccguuuucu

SEQ ID NO: 400951 - RNA, 32 nt, Homo Sapiens
accaaugauacccacaccuccucccaggaaga

SEQ ID NO: 400952 - RNA, 32 nt, Homo Sapiens
aauuuucagugcaauguaaacaaaauaaaaau

SEQ ID NO: 400953 - RNA, 32 nt, Homo Sapiens
uguaaaugcuaaaauaaaucgacagugucuca

SEQ ID NO: 400954 - RNA, 32 nt, Homo Sapiens
uuugcauguuuguuauauaggcaaauuugaga

SEQ ID NO: 400955 - RNA, 27 nt, Homo Sapiens
acaugagugaaagccaggaugaaguuc

SEQ ID NO: 400956 - RNA, 31 nt, Homo Sapiens
ugacguuuacggagaaauggaacaccgacaa

SEQ ID NO: 400957 - RNA, 32 nt, Homo Sapiens
uuagcuuugucaaaauauauuaggaaucacua

SEQ ID NO: 400958 - RNA, 32 nt, Homo Sapiens
uauaacaaacuccgccaaccauuuuuucagaa

SEQ ID NO: 400959 - RNA, 32 nt, Homo Sapiens
agcagcugcgccccggcugcgcuccggauacc

SEQ ID NO: 400960 - RNA, 32 nt, Homo Sapiens
agcgcgggacuuggacacggaccucggcgggc

SEQ ID NO: 400961 - RNA, 32 nt, Homo Sapiens
cacgccagccagacaccccggccagaauggag

SEQ ID NO: 400962 - RNA, 32 nt, Homo Sapiens
ggagagcauaugccugugggggcagugcugau

SEQ ID NO: 400963 - RNA, 32 nt, Homo Sapiens
uauuagagaaggaaaauuuaguugcuauacau

SEQ ID NO: 400964 - RNA, 32 nt, Homo Sapiens
ugcaacaaggaggcaggcccugucccaagcug

SEQ ID NO: 400965 - RNA, 32 nt, Homo Sapiens
aaguagacgagcuucuuagugccuggcggccc

SEQ ID NO: 400966 - RNA, 32 nt, Homo Sapiens
cagaaagcugugccgccaccaccggccgcguc

SEQ ID NO: 400967 - RNA, 32 nt, Homo Sapiens
ucagcagccacccugcagcaucugcccacgaa

SEQ ID NO: 400968 - RNA, 32 nt, Homo Sapiens
gauucacacgagugccucugguaaucauuuuc

SEQ ID NO: 400969 - RNA, 32 nt, Homo Sapiens
ggcaaacccucccagaaaugucucuggcccag

SEQ ID NO: 400970 - RNA, 32 nt, Homo Sapiens
cugccuagcuguguuagaaaaauauuuaacuc

SEQ ID NO: 400971 - RNA, 30 nt, Homo Sapiens
cacagcucuuccgccucuucucgaagcaga

SEQ ID NO: 400972 - RNA, 32 nt, Homo Sapiens
cuccaucugcggccagggaaagggauacaguc

SEQ ID NO: 400973 - RNA, 32 nt, Homo Sapiens
cggcuccagccagcguccgccgccgccguagc

SEQ ID NO: 400974 - RNA, 32 nt, Homo Sapiens
uccaaguagcuaggcuccagauuuaugaggaa

SEQ ID NO: 400975 - RNA, 32 nt, Homo Sapiens
gcucugcagugggggagggaugcagggacauu

SEQ ID NO: 400976 - RNA, 29 nt, Homo Sapiens
cauuguucauaugagaauggcggcugggu

SEQ ID NO: 400977 - RNA, 32 nt, Homo Sapiens
gccagucggccacggccuguccucuuccucgu

SEQ ID NO: 400978 - RNA, 32 nt, Homo Sapiens
gacccaagaguggggcgucgcugcuggccgcc

SEQ ID NO: 400979 - RNA, 32 nt, Homo Sapiens
gggagagccaucucuuaaccuuggguacacca

SEQ ID NO: 400980 - RNA, 32 nt, Homo Sapiens
ugugugugcuuuacguugccucaugugagugc

SEQ ID NO: 400981 - RNA, 32 nt, Homo Sapiens
guggugaaauuaaaagaauuucaacaaaagaa

SEQ ID NO: 400982 - RNA, 32 nt, Homo Sapiens
gggcauccugucaucaucuccacugucccaag

SEQ ID NO: 400983 - RNA, 32 nt, Homo Sapiens
ugcauuuauuaaugaaacuuccuuugaaaaac

SEQ ID NO: 400984 - RNA, 32 nt, Homo Sapiens
acaggaaucugauaucaacauauccuaggguu

SEQ ID NO: 400985 - RNA, 29 nt, Homo Sapiens
ucagcuuggggacaggggcaggaggaagg

SEQ ID NO: 400986 - RNA, 32 nt, Homo Sapiens
gaucggcagggcggggcggaacggugaggcca

SEQ ID NO: 400987 - RNA, 32 nt, Homo Sapiens
cuggaggcggguguagaaguccgaccgcggaa

SEQ ID NO: 400988 - RNA, 31 nt, Homo Sapiens
aacugggucccggugucggcaggccuggggu

SEQ ID NO: 400989 - RNA, 32 nt, Homo Sapiens
ggcacaaauaacugcagacauucugaagcuaa

SEQ ID NO: 400990 - RNA, 32 nt, Homo Sapiens
ggaaaugucagauuuuuuuuuaauuuaaugaa

SEQ ID NO: 400991 - RNA, 32 nt, Homo Sapiens
acugaugcucugugaauucuuccuccuuuuca

SEQ ID NO: 400992 - RNA, 32 nt, Homo Sapiens
cuugcuaauuuucuuugauuggaaaaauauau

SEQ ID NO: 400993 - RNA, 32 nt, Homo Sapiens
ugacaggugugagccacugcgcccagccugaa

SEQ ID NO: 400994 - RNA, 32 nt, Homo Sapiens
accuggugcgggaggcccgggcagggagaagu

SEQ ID NO: 400995 - RNA, 32 nt, Homo Sapiens
uuguuuuauccugucuuugggggcaauguguc

SEQ ID NO: 400996 - RNA, 32 nt, Homo Sapiens
uuggcuaggagaauaagagucuggagacuggg

SEQ ID NO: 400997 - RNA, 32 nt, Homo Sapiens
ccguccugcuaagagugucggugccgcggugg

SEQ ID NO: 400998 - RNA, 32 nt, Homo Sapiens
acgcugaggaggaggaggaggcggaggaggcg

SEQ ID NO: 400999 - RNA, 32 nt, Homo Sapiens
uuauuuugauuguagaagcacuauaauaugug

SEQ ID NO: 401000 - RNA, 32 nt, Homo Sapiens
gaugggguuucgcacuuguugcccaggcugga

SEQ ID NO: 401001 - RNA, 32 nt, Homo Sapiens
aaucccacguacuuauaaagaagguuggugaa

SEQ ID NO: 401002 - RNA, 32 nt, Homo Sapiens
aagcuccaggauaagcgcugcgugccucuugu

SEQ ID NO: 401003 - RNA, 32 nt, Homo Sapiens
aagguggagagggcauaugcauccucuguccu

SEQ ID NO: 401004 - RNA, 30 nt, Homo Sapiens
aaccuggccuucggcggcccggaggucuga

SEQ ID NO: 401005 - RNA, 32 nt, Homo Sapiens
cgcagccgccgccuggggcgcuugggucggcc

SEQ ID NO: 401006 - RNA, 32 nt, Homo Sapiens
caaucaccucaagugacuuucacgucaccagg

SEQ ID NO: 401007 - RNA, 32 nt, Homo Sapiens
uucccucucggaauguuggacaaagggaauaa

SEQ ID NO: 401008 - RNA, 30 nt, Homo Sapiens
cucccugccugugcugguugcagccucaga

SEQ ID NO: 401009 - RNA, 32 nt, Homo Sapiens
cccuguacggagcccucggccgguccuagcag

SEQ ID NO: 401010 - RNA, 32 nt, Homo Sapiens
cuuuauaggccucagauacugaagauuauuuu

SEQ ID NO: 401011 - RNA, 28 nt, Homo Sapiens
gacguggggcggccagcgaugaagccgc

SEQ ID NO: 401012 - RNA, 32 nt, Homo Sapiens
caggcgacaagagcucggugcugagauguguu

SEQ ID NO: 401013 - RNA, 32 nt, Homo Sapiens
agaguacgaugauggcaacuuuauuuuugaug

SEQ ID NO: 401014 - RNA, 32 nt, Homo Sapiens
aaaaauugcauucccuuuguauuucaugugua

SEQ ID NO: 401015 - RNA, 32 nt, Homo Sapiens
aaaaacagucugccuccacuuuugauauggga

SEQ ID NO: 401016 - RNA, 32 nt, Homo Sapiens
cagaggcccagcugcuagaggcccaggcccuc

SEQ ID NO: 401017 - RNA, 32 nt, Homo Sapiens
cacacagugagagucuuaaagauacaaaaugg

SEQ ID NO: 401018 - RNA, 32 nt, Homo Sapiens
uuauucaaaaguaaucaaaaccacaaaugcau

SEQ ID NO: 401019 - RNA, 32 nt, Homo Sapiens
gcccuccucugacaggccccagugaauguguu

SEQ ID NO: 401020 - RNA, 32 nt, Homo Sapiens
cgguagcgaaggcagcagcagcgguggcgaca

SEQ ID NO: 401021 - RNA, 28 nt, Homo Sapiens
cauucaguggcuaacauuaugagcauug

SEQ ID NO: 401022 - RNA, 32 nt, Homo Sapiens
cuccugcaccuguguccccaucugcccuucuu

SEQ ID NO: 401023 - RNA, 32 nt, Homo Sapiens
aauucuaugagcaugccaaggcucugugggag

SEQ ID NO: 401024 - RNA, 32 nt, Homo Sapiens
acagguggcgacggcagaggaauaccuucacu

SEQ ID NO: 401025 - RNA, 32 nt, Homo Sapiens
ccuagccugugcuaauggacauacagauguug

SEQ ID NO: 401026 - RNA, 32 nt, Homo Sapiens
gggugcaccaggccugcccccgccgugagaaa

SEQ ID NO: 401027 - RNA, 32 nt, Homo Sapiens
ggacguccuggcaaagcccgcggugggcauca

SEQ ID NO: 401028 - RNA, 32 nt, Homo Sapiens
aagaaguggagaugcuggccugcgccugcacc

SEQ ID NO: 401029 - RNA, 32 nt, Homo Sapiens
cugagacggugauucggacugacuggacucug

SEQ ID NO: 401030 - RNA, 32 nt, Homo Sapiens
ggggcugagggaggaggcagggccuggcccau

SEQ ID NO: 401031 - RNA, 32 nt, Homo Sapiens
aaugaagaacuggucggacaaaauuuaacguu

SEQ ID NO: 401032 - RNA, 32 nt, Homo Sapiens
agucagguucaccagcagaaacgcgcucacua

SEQ ID NO: 401033 - RNA, 32 nt, Homo Sapiens
aaauuuugauacuuucuauuacuaguaucuaa

SEQ ID NO: 401034 - RNA, 32 nt, Homo Sapiens
gacagcacacacaguggauuccagugcauggg

SEQ ID NO: 401035 - RNA, 32 nt, Homo Sapiens
gcuauauagguauuuuaccaacccauuuuaag

SEQ ID NO: 401036 - RNA, 32 nt, Homo Sapiens
guuucagaaguuauauaugcauguguaugugc

SEQ ID NO: 401037 - RNA, 32 nt, Homo Sapiens
cccggcccaacgugugcagagcccucccacca

SEQ ID NO: 401038 - RNA, 32 nt, Homo Sapiens
caggauucauggagcgggaucagauuaccagg

SEQ ID NO: 401039 - RNA, 32 nt, Homo Sapiens
cgcggcggcaugggggcgcccccgcggcucuc

SEQ ID NO: 401040 - RNA, 32 nt, Homo Sapiens
agaaagcuacauuuauuuuagaguagugcucc

SEQ ID NO: 401041 - RNA, 32 nt, Homo Sapiens
aauguacugacgagccgaggcagcagugcccc

SEQ ID NO: 401042 - RNA, 32 nt, Homo Sapiens
augagcgcguggggugcuuuuucuaagacgca

SEQ ID NO: 401043 - RNA, 32 nt, Homo Sapiens
accacaacgauaaagauauggaacauuuuaug

SEQ ID NO: 401044 - RNA, 32 nt, Homo Sapiens
caaaagcuccauaaaggguuggagacugucug

SEQ ID NO: 401045 - RNA, 32 nt, Homo Sapiens
cccucccccucgcgccugggcagcucucuccc

SEQ ID NO: 401046 - RNA, 31 nt, Homo Sapiens
acccaggcuugugcccuuucaguguaaagcu

SEQ ID NO: 401047 - RNA, 32 nt, Homo Sapiens
caaagcuagugaggggcggggcaggcggcgcg

SEQ ID NO: 401048 - RNA, 32 nt, Homo Sapiens
gaacaguguggccucucuggaacucugcagac

SEQ ID NO: 401049 - RNA, 32 nt, Homo Sapiens
agugucuagauaugccaggcaguguaagucag

SEQ ID NO: 401050 - RNA, 32 nt, Homo Sapiens
uucaucaaccaccuuauucaucagacguggcc

SEQ ID NO: 401051 - RNA, 32 nt, Homo Sapiens
aaaucuggcagccguacccgcggccccgggca

SEQ ID NO: 401052 - RNA, 32 nt, Homo Sapiens
acuccaaauuguagaagcuuuucaggaaccau

SEQ ID NO: 401053 - RNA, 32 nt, Homo Sapiens
aaggcacuugucuacaagugugucccaggcac

SEQ ID NO: 401054 - RNA, 32 nt, Homo Sapiens
uccucaccacauuauacccugcucuuacgcag

SEQ ID NO: 401055 - RNA, 32 nt, Homo Sapiens
ucccugucaucuccaugggaacaggaccauag

SEQ ID NO: 401056 - RNA, 32 nt, Homo Sapiens
guggcaagaaacaaaaugggggaugaucugau

SEQ ID NO: 401057 - RNA, 32 nt, Homo Sapiens
cgcgccccgggcccgcggcgcgauuggcguga

SEQ ID NO: 401058 - RNA, 32 nt, Homo Sapiens
uacucuugugacacauacaaucccuaccuugu

SEQ ID NO: 401059 - RNA, 32 nt, Homo Sapiens
gucugaaaauuugaggcugggugaaguuaaaa

SEQ ID NO: 401060 - RNA, 32 nt, Homo Sapiens
augaaacacacagacacacacacacacaaacu

SEQ ID NO: 401061 - RNA, 32 nt, Homo Sapiens
ucugugugcuuguccuccuccuccucccaccc

SEQ ID NO: 401062 - RNA, 32 nt, Homo Sapiens
uaggcauugaggauucagcucuacacagggcu

SEQ ID NO: 401063 - RNA, 32 nt, Homo Sapiens
uucgcugcuggugaauuguucgaccugacugc

SEQ ID NO: 401064 - RNA, 32 nt, Homo Sapiens
gaucaaucagugugauuagcuuucucagcaga

SEQ ID NO: 401065 - RNA, 32 nt, Homo Sapiens
ugcuguuucggggaccccggcgcccugccuug

SEQ ID NO: 401066 - RNA, 32 nt, Homo Sapiens
cuucccggcuggaaggagcgggcgccugggau

SEQ ID NO: 401067 - RNA, 32 nt, Homo Sapiens
gcccgcggcuucggggaccgcugcggcagcag

SEQ ID NO: 401068 - RNA, 32 nt, Homo Sapiens
augccauacuuuguuauauauguuaguggugu

SEQ ID NO: 401069 - RNA, 32 nt, Homo Sapiens
auaguuuccuuuuccucuucuagaacuuaccu

SEQ ID NO: 401070 - RNA, 32 nt, Homo Sapiens
uggaaagauaaggaccagaacaagcucauagc

SEQ ID NO: 401071 - RNA, 27 nt, Homo Sapiens
uggaguccccgcuucagccgccgcggc

SEQ ID NO: 401072 - RNA, 32 nt, Homo Sapiens
gagccagggcccggccagcagucucgcagacc

SEQ ID NO: 401073 - RNA, 29 nt, Homo Sapiens
aggcagucauaugaucguggcuuauuaua

SEQ ID NO: 401074 - RNA, 32 nt, Homo Sapiens
uugcccugccagcugugccuugcuugcccucu

SEQ ID NO: 401075 - RNA, 27 nt, Homo Sapiens
ggugaggucuucuucagguucucccuc

SEQ ID NO: 401076 - RNA, 32 nt, Homo Sapiens
ugguagacauggagaccccugccuggccccgg

SEQ ID NO: 401077 - RNA, 32 nt, Homo Sapiens
gagccucagcguguucuucugugcggagauca

SEQ ID NO: 401078 - RNA, 32 nt, Homo Sapiens
uauauacauuauuuagaaaagaucucaagucu

SEQ ID NO: 401079 - RNA, 32 nt, Homo Sapiens
gauuauuuaaacagaaucuauaggcagugugu

SEQ ID NO: 401080 - RNA, 32 nt, Homo Sapiens
cagaucagcuggguccagaguuuaaugggcaa

SEQ ID NO: 401081 - RNA, 32 nt, Homo Sapiens
gucaauauaucgaacuguucccaaguuaguca

SEQ ID NO: 401082 - RNA, 32 nt, Homo Sapiens
acaaguggggaaaaaagaaaaauaucagagua

SEQ ID NO: 401083 - RNA, 32 nt, Homo Sapiens
cuucaccuggguuuccucuuaucuacccacca

SEQ ID NO: 401084 - RNA, 32 nt, Homo Sapiens
gcgggucgccagcggggcagggggcgauaagu

SEQ ID NO: 401085 - RNA, 32 nt, Homo Sapiens
ccaggcccagcuccggccuccuggcggccuuu

SEQ ID NO: 401086 - RNA, 32 nt, Homo Sapiens
cggaggugccaaguagcagagaaagcaucccc

SEQ ID NO: 401087 - RNA, 32 nt, Homo Sapiens
gugugaauugccauuuuuuucuuacuggcuuc

SEQ ID NO: 401088 - RNA, 32 nt, Homo Sapiens
ccuggcuccuggcgcgcaccucugcucccuuc

SEQ ID NO: 401089 - RNA, 32 nt, Homo Sapiens
ggagucaagggagcagggcagcucuaccaggc

SEQ ID NO: 401090 - RNA, 32 nt, Homo Sapiens
ccacagugacugaguuugauucccgacacagc

SEQ ID NO: 401091 - RNA, 30 nt, Homo Sapiens
gacuaguaucaccccugagccaguauacag

SEQ ID NO: 401092 - RNA, 32 nt, Homo Sapiens
ugcacgaagucacaaugcaccauccaugagaa

SEQ ID NO: 401093 - RNA, 32 nt, Homo Sapiens
caugcuuuaaaaugauuuuucuugauauuuau

SEQ ID NO: 401094 - RNA, 32 nt, Homo Sapiens
cugcugacauuaccauuauuauuuuaccaagu

SEQ ID NO: 401095 - RNA, 32 nt, Homo Sapiens
agggagccagcaugaagcgagcucaccccgag

SEQ ID NO: 401096 - RNA, 32 nt, Homo Sapiens
uuacaaauggcauuuucuuaauugaaaauccg

SEQ ID NO: 401097 - RNA, 32 nt, Homo Sapiens
gcagcgcgccgacucgggcucggcucggcucu

SEQ ID NO: 401098 - RNA, 32 nt, Homo Sapiens
cccaauuauguacagggagcugucugagagcu

SEQ ID NO: 401099 - RNA, 32 nt, Homo Sapiens
acccggcggcggggcgaggcagcuggcggcgu

SEQ ID NO: 401100 - RNA, 32 nt, Homo Sapiens
auugaggccacgugcaguggcucacuacugua

SEQ ID NO: 401101 - RNA, 32 nt, Homo Sapiens
ggguggcacugacccugggcaggcaaaauugg

SEQ ID NO: 401102 - RNA, 32 nt, Homo Sapiens
gagcugggcuccaagagggaucuagacaccca

SEQ ID NO: 401103 - RNA, 32 nt, Homo Sapiens
uacuauaccuuuugcaccucagcugccacacc

SEQ ID NO: 401104 - RNA, 32 nt, Homo Sapiens
gguuuugugugugagugcaaaauguaaacacg

SEQ ID NO: 401105 - RNA, 32 nt, Homo Sapiens
auauguaggggcauacccugugguguugugcu

SEQ ID NO: 401106 - RNA, 32 nt, Homo Sapiens
cacugauauuuuccucugcuugauccauugug

SEQ ID NO: 401107 - RNA, 32 nt, Homo Sapiens
acccaugauuuccucagcugcuccaccuuggu

SEQ ID NO: 401108 - RNA, 32 nt, Homo Sapiens
gccuaucuuuugcuguagucacuucugagcag

SEQ ID NO: 401109 - RNA, 32 nt, Homo Sapiens
uccaaauuguuaucuaaagaugauucuaggug

SEQ ID NO: 401110 - RNA, 32 nt, Homo Sapiens
ggguggagcaaagggaaccaaugccgaagacc

SEQ ID NO: 401111 - RNA, 32 nt, Homo Sapiens
acauuggcaccuccuacuaccaccacacaaac

SEQ ID NO: 401112 - RNA, 32 nt, Homo Sapiens
uccuuaaguuuaggaaaauagaaauuacuuug

SEQ ID NO: 401113 - RNA, 32 nt, Homo Sapiens
gagccaccuguccaaugauuuauccuguuucu

SEQ ID NO: 401114 - RNA, 32 nt, Homo Sapiens
gcuccugcugcaccguguguccugcugcccga

SEQ ID NO: 401115 - RNA, 32 nt, Homo Sapiens
caguuuagaaauuuauucaaagcuaaagaugu

SEQ ID NO: 401116 - RNA, 32 nt, Homo Sapiens
ccaaggcggagcaaagucgccggggguguggg

SEQ ID NO: 401117 - RNA, 32 nt, Homo Sapiens
acguuuccccuugacuaagaaaagcaccuacc

SEQ ID NO: 401118 - RNA, 32 nt, Homo Sapiens
acccagcccucccgcucaggccacagccggag

SEQ ID NO: 401119 - RNA, 32 nt, Homo Sapiens
cuccgccggccgccgcgcgaugugaggcggcg

SEQ ID NO: 401120 - RNA, 32 nt, Homo Sapiens
ccauuugacaaugaacaucugggcugccuugu

SEQ ID NO: 401121 - RNA, 32 nt, Homo Sapiens
augaaucuagaugcaauuaauuuuauuccuuc

SEQ ID NO: 401122 - RNA, 32 nt, Homo Sapiens
uauguaacagcagaguaacauaaaauaaaagu

SEQ ID NO: 401123 - RNA, 32 nt, Homo Sapiens
cagugaaguggaagcauguguuuuguuuugga

SEQ ID NO: 401124 - RNA, 32 nt, Homo Sapiens
accccccgccccaccccagccccuggcaacca

SEQ ID NO: 401125 - RNA, 32 nt, Homo Sapiens
ggauaugggggcgggggcggggcagggcaggg

SEQ ID NO: 401126 - RNA, 32 nt, Homo Sapiens
gacccagucucagacucugugccuuuaaaguc

SEQ ID NO: 401127 - RNA, 32 nt, Homo Sapiens
cugcucuccgagucugugucuccaggcugugu

SEQ ID NO: 401128 - RNA, 32 nt, Homo Sapiens
gggcagcggacgggcggacugacgggcgccuc

SEQ ID NO: 401129 - RNA, 32 nt, Homo Sapiens
auggugcucuuaaaaauagaaacugaaccggg

SEQ ID NO: 401130 - RNA, 32 nt, Homo Sapiens
guagccguuuccgaggcagcaguugcggccgc

SEQ ID NO: 401131 - RNA, 32 nt, Homo Sapiens
cugccgccuuuucacaccgugugugcccgaag

SEQ ID NO: 401132 - RNA, 32 nt, Homo Sapiens
ggcaccccugcuggcggauagcaagacucugu

SEQ ID NO: 401133 - RNA, 30 nt, Homo Sapiens
ccauugccauuuaucacccaucucugcugc

SEQ ID NO: 401134 - RNA, 32 nt, Homo Sapiens
uuuuuaaugauuuauacaaugacuccaaaggc

SEQ ID NO: 401135 - RNA, 32 nt, Homo Sapiens
aggcuggauguuugugcuccguagcuucuagu

SEQ ID NO: 401136 - RNA, 32 nt, Homo Sapiens
cuccccuuagaauugaaugaaagcauuuuguu

SEQ ID NO: 401137 - RNA, 28 nt, Homo Sapiens
uccauuaaaggcgacauuauaaagccua

SEQ ID NO: 401138 - RNA, 26 nt, Homo Sapiens
gaugggcaugagggcccgggucccua

SEQ ID NO: 401139 - RNA, 32 nt, Homo Sapiens
ugccgccgcgcgcgcagggaaggccgcuucuc

SEQ ID NO: 401140 - RNA, 32 nt, Homo Sapiens
gccuuuagggcuuauggccaggggacacugua

SEQ ID NO: 401141 - RNA, 32 nt, Homo Sapiens
ggcaucuggaggaaacacaaccaagaaaggaa

SEQ ID NO: 401142 - RNA, 32 nt, Homo Sapiens
gcucacugcaaccuccaccucccaguucaagu

SEQ ID NO: 401143 - RNA, 32 nt, Homo Sapiens
caacggggagagcccggggggcggcgcccccu

SEQ ID NO: 401144 - RNA, 32 nt, Homo Sapiens
ugagauuugugcuuguauauuucuaaaaagag

SEQ ID NO: 401145 - RNA, 30 nt, Homo Sapiens
ucauggggcaggcguggggagcuuccuguc

SEQ ID NO: 401146 - RNA, 32 nt, Homo Sapiens
aucuaucuugucaaucccaacguuuuacauaa

SEQ ID NO: 401147 - RNA, 32 nt, Homo Sapiens
cugcaguagcggugcugucccagguggcuuac

SEQ ID NO: 401148 - RNA, 32 nt, Homo Sapiens
aauacuucgagcucaugcugagagaaaaaggc

SEQ ID NO: 401149 - RNA, 32 nt, Homo Sapiens
uuaaucugugauucagccacaugauguuuuug

SEQ ID NO: 401150 - RNA, 32 nt, Homo Sapiens
uuuauuguauauacuuaaaaaauagaacucac

SEQ ID NO: 401151 - RNA, 32 nt, Homo Sapiens
ugccgccaacaccaccugagcugugaaggacg

SEQ ID NO: 401152 - RNA, 32 nt, Homo Sapiens
gacuugggggcgcccgcugagccccggcgccc

SEQ ID NO: 401153 - RNA, 32 nt, Homo Sapiens
agaccagccugggcaauguagcaagacgcugu

SEQ ID NO: 401154 - RNA, 32 nt, Homo Sapiens
ucuuuucucugauguuuuaccuuuaaaagauc

SEQ ID NO: 401155 - RNA, 32 nt, Homo Sapiens
auuagagagggagagacagcgagaucuaucug

SEQ ID NO: 401156 - RNA, 32 nt, Homo Sapiens
uugcuucugcccguugucuuccugccagcugg

SEQ ID NO: 401157 - RNA, 32 nt, Homo Sapiens
uuguugugacuucuuggcauaaacaguuucaa

SEQ ID NO: 401158 - RNA, 32 nt, Homo Sapiens
aucaggaggcugcggaagaauuuuaaaaauac

SEQ ID NO: 401159 - RNA, 32 nt, Homo Sapiens
cguuuagagaaggaaaaggaaauggguucaug

SEQ ID NO: 401160 - RNA, 32 nt, Homo Sapiens
uuuuaaagacaguuuuaauguugaauuuggua

SEQ ID NO: 401161 - RNA, 32 nt, Homo Sapiens
gaaguauguugaauauuucaucacucaaucuu

SEQ ID NO: 401162 - RNA, 32 nt, Homo Sapiens
ggccaggcgcggugauucacgccuguaauccc

SEQ ID NO: 401163 - RNA, 32 nt, Homo Sapiens
aagaugaagauggcccuugguggaugugcccg

SEQ ID NO: 401164 - RNA, 32 nt, Homo Sapiens
aaagaauuauuagcaugaaauguuuacauauc

SEQ ID NO: 401165 - RNA, 32 nt, Homo Sapiens
ucaacaaacuaaaggggaugccagaaaugucu

SEQ ID NO: 401166 - RNA, 32 nt, Homo Sapiens
uguccuguugaugcccuuucugacuguguucu

SEQ ID NO: 401167 - RNA, 32 nt, Homo Sapiens
auuuuaaaauuugacuccucuucaagcuugaa

SEQ ID NO: 401168 - RNA, 32 nt, Homo Sapiens
guggccaggaucuggagcugcaucucuaaggg

SEQ ID NO: 401169 - RNA, 32 nt, Homo Sapiens
guccaggcauaguggcucuugccuguaauccc

SEQ ID NO: 401170 - RNA, 32 nt, Homo Sapiens
acuuugggcuuuggacauuugcuggaaugagu

SEQ ID NO: 401171 - RNA, 32 nt, Homo Sapiens
gucauuugccagcaaugaagagccugucaagu

SEQ ID NO: 401172 - RNA, 32 nt, Homo Sapiens
ucugccagccccagcggucacgcccggcccag

SEQ ID NO: 401173 - RNA, 32 nt, Homo Sapiens
acaugugaacaaacagaaggaaguucacucug

SEQ ID NO: 401174 - RNA, 32 nt, Homo Sapiens
gaaacuugacuucugaaaauccuuaagagacu

SEQ ID NO: 401175 - RNA, 32 nt, Homo Sapiens
ugaacaauuuaguuccuuggcagauccaaaau

SEQ ID NO: 401176 - RNA, 32 nt, Homo Sapiens
uacacuacaucaucaucaucucaugcccaccu

SEQ ID NO: 401177 - RNA, 32 nt, Homo Sapiens
auuguaucaguacuuuuuuuuaagcucuggca

SEQ ID NO: 401178 - RNA, 32 nt, Homo Sapiens
uaggccuccgccccgcaucaccuggccagggg

SEQ ID NO: 401179 - RNA, 29 nt, Homo Sapiens
ccggcccccgaggugcggacgagggcugc

SEQ ID NO: 401180 - RNA, 32 nt, Homo Sapiens
auauauucaauuuuuuaccauuuuauggaaaa

SEQ ID NO: 401181 - RNA, 32 nt, Homo Sapiens
uacuucuaaaauucccauuuucuuuauuuaga

SEQ ID NO: 401182 - RNA, 32 nt, Homo Sapiens
gacguagcucauucuuuuuucacagcugcaua

SEQ ID NO: 401183 - RNA, 32 nt, Homo Sapiens
ccucccuaucucaccugcccagcccugugcug

SEQ ID NO: 401184 - RNA, 32 nt, Homo Sapiens
aaaaagaugcccucugacugccaccauuugag

SEQ ID NO: 401185 - RNA, 32 nt, Homo Sapiens
gccuggccacgcuuuaccgacugcugaccccc

SEQ ID NO: 401186 - RNA, 32 nt, Homo Sapiens
ucucucugcuucuaaccacugaggcucucuaa

SEQ ID NO: 401187 - RNA, 32 nt, Homo Sapiens
ugccuccccacuuugguucagucugucuugug

SEQ ID NO: 401188 - RNA, 32 nt, Homo Sapiens
guacagacauaguggcuugcagacccugaccc

SEQ ID NO: 401189 - RNA, 32 nt, Homo Sapiens
gcccggccgaaucuuguuuucaaacagguccc

SEQ ID NO: 401190 - RNA, 32 nt, Homo Sapiens
ccauggcuggccugggcuucucccuacccuca

SEQ ID NO: 401191 - RNA, 32 nt, Homo Sapiens
agggagaccuccccgcccagcagcccccagag

SEQ ID NO: 401192 - RNA, 32 nt, Homo Sapiens
ccaagcacugucagcaaaucucagguauuaga

SEQ ID NO: 401193 - RNA, 32 nt, Homo Sapiens
gaacuguaaaaugacaccaaagcauuagagga

SEQ ID NO: 401194 - RNA, 32 nt, Homo Sapiens
guccauuuaaaugggaauaaaaacagaaaaac

SEQ ID NO: 401195 - RNA, 32 nt, Homo Sapiens
auucucggggguaaggcucggauggcaaggac

SEQ ID NO: 401196 - RNA, 32 nt, Homo Sapiens
aggguggaucauuugaggccaggaguucgaua

SEQ ID NO: 401197 - RNA, 32 nt, Homo Sapiens
ucuuugcaguuucuucguuacucauauguaag

SEQ ID NO: 401198 - RNA, 32 nt, Homo Sapiens
guuaugucucuucagcugggaaaacuagcucu

SEQ ID NO: 401199 - RNA, 32 nt, Homo Sapiens
acuaauguuuacccccgugacggagugcccau

SEQ ID NO: 401200 - RNA, 32 nt, Homo Sapiens
ggauuauacccagagcacuuugaacaaagguc

SEQ ID NO: 401201 - RNA, 32 nt, Homo Sapiens
uguagacaaaaauaaugaauuuaguauacaca

SEQ ID NO: 401202 - RNA, 32 nt, Homo Sapiens
aguggaaaagguaucuugguuaugacaaaguc

SEQ ID NO: 401203 - RNA, 32 nt, Homo Sapiens
ucggccuggcccggccggcggcuccuaacacc

SEQ ID NO: 401204 - RNA, 32 nt, Homo Sapiens
gcuccccgcccggauccuccugacccugagau

SEQ ID NO: 401205 - RNA, 32 nt, Homo Sapiens
ggaacacccagccccagcgagucuggagacca

SEQ ID NO: 401206 - RNA, 32 nt, Homo Sapiens
uuucaccuuuguucuucagugaucgcuguucu

SEQ ID NO: 401207 - RNA, 32 nt, Homo Sapiens
cauggugguuugcugcacccauuaacccguca

SEQ ID NO: 401208 - RNA, 32 nt, Homo Sapiens
gaaggggugucucaccugagcugacuuuguuc

SEQ ID NO: 401209 - RNA, 32 nt, Homo Sapiens
auccugaugcgaaugggguaacucgaucaugg

SEQ ID NO: 401210 - RNA, 32 nt, Homo Sapiens
gggcacccgcgcucggcuguguccuucgcgua

SEQ ID NO: 401211 - RNA, 32 nt, Homo Sapiens
ucuacagauguagcccugggaauggcacagug

SEQ ID NO: 401212 - RNA, 32 nt, Homo Sapiens
uaaagccuaugagguuuauucaucucucaaau

SEQ ID NO: 401213 - RNA, 32 nt, Homo Sapiens
agacaagcagcgacagcucaucagcagucuaa

SEQ ID NO: 401214 - RNA, 32 nt, Homo Sapiens
guuguucauuucagccucuggauggcuggcug

SEQ ID NO: 401215 - RNA, 32 nt, Homo Sapiens
caaacacaagucuugaaucaguccucagggcc

SEQ ID NO: 401216 - RNA, 32 nt, Homo Sapiens
caggagcuggcgggcuggccuucuggacccug

SEQ ID NO: 401217 - RNA, 32 nt, Homo Sapiens
ucaguuaccuugcagaaagagcuuuguaugac

SEQ ID NO: 401218 - RNA, 32 nt, Homo Sapiens
ucaugcaugagcauuuucaggauaagcgacuu

SEQ ID NO: 401219 - RNA, 32 nt, Homo Sapiens
ugggcccagcuuuaaccagacggaggagcagc

SEQ ID NO: 401220 - RNA, 32 nt, Homo Sapiens
agaaaucugaacauggaaaccacaagaaccag

SEQ ID NO: 401221 - RNA, 32 nt, Homo Sapiens
cccacuguggccauaguuucucuuccuguaaa

SEQ ID NO: 401222 - RNA, 32 nt, Homo Sapiens
acuccuuacggaaauaaaaaauguaggaaaga

SEQ ID NO: 401223 - RNA, 32 nt, Homo Sapiens
auccuguguuccgcccggggcuccaccagggc

SEQ ID NO: 401224 - RNA, 32 nt, Homo Sapiens
uuccccugacuguguccgaugccaaggagucc

SEQ ID NO: 401225 - RNA, 32 nt, Homo Sapiens
augaauugaaagaggaauuaucagaggaagcu

SEQ ID NO: 401226 - RNA, 32 nt, Homo Sapiens
gacucuguuucccccgucccuucugaauuuaa

SEQ ID NO: 401227 - RNA, 32 nt, Homo Sapiens
aagggcagauggacuucuucaguguccuucac

SEQ ID NO: 401228 - RNA, 32 nt, Homo Sapiens
cauggccuccaaggaguagaccccuggaccac

SEQ ID NO: 401229 - RNA, 32 nt, Homo Sapiens
aaacugcgagccagcaucacucccgggaccau

SEQ ID NO: 401230 - RNA, 32 nt, Homo Sapiens
uguuaaucuucucauuuuuuuacugucauaua

SEQ ID NO: 401231 - RNA, 32 nt, Homo Sapiens
gccugcaggaccagcucgcugcccgcgacgcc

SEQ ID NO: 401232 - RNA, 32 nt, Homo Sapiens
auauaaguaaagucuguaaaauucauacuuaa

SEQ ID NO: 401233 - RNA, 32 nt, Homo Sapiens
uggagcaagagggucuucuuccuccuuccccc

SEQ ID NO: 401234 - RNA, 32 nt, Homo Sapiens
cggauacggcuggaccuuacccggcccgccca

SEQ ID NO: 401235 - RNA, 32 nt, Homo Sapiens
ugcugcuggaugaugcccuuuuugggagcauc

SEQ ID NO: 401236 - RNA, 32 nt, Homo Sapiens
uauuuaugaaagauugugauggugcuuuuagc

SEQ ID NO: 401237 - RNA, 32 nt, Homo Sapiens
cgcgccugccgcgcgcccagguuagguguguc

SEQ ID NO: 401238 - RNA, 32 nt, Homo Sapiens
gagaaugggacaacagaagaagugacuucaga

SEQ ID NO: 401239 - RNA, 32 nt, Homo Sapiens
cugcggcuggucugggguggggucuguugugg

SEQ ID NO: 401240 - RNA, 32 nt, Homo Sapiens
acugccucucgcuccucaaccccuccccucca

SEQ ID NO: 401241 - RNA, 32 nt, Homo Sapiens
uuuggguaaaccagcucugaacuuccaagcuc

SEQ ID NO: 401242 - RNA, 32 nt, Homo Sapiens
gauggccgcaaaugcaagcugcuacuuacauc

SEQ ID NO: 401243 - RNA, 32 nt, Homo Sapiens
cugaagacggucuggaggcagaauucccucuu

SEQ ID NO: 401244 - RNA, 32 nt, Homo Sapiens
uaccuguucaacagaccugaaaaugagccaug

SEQ ID NO: 401245 - RNA, 32 nt, Homo Sapiens
aagacauuacuuugaggcaugaaaauauccug

SEQ ID NO: 401246 - RNA, 32 nt, Homo Sapiens
acagaaggaggauagauuuuuacuucugacuu

SEQ ID NO: 401247 - RNA, 32 nt, Homo Sapiens
gggaaguugccggcggccgcgcggccucccgg

SEQ ID NO: 401248 - RNA, 32 nt, Homo Sapiens
acuacaugcuuccccccuuccaguagcgagcc

SEQ ID NO: 401249 - RNA, 32 nt, Homo Sapiens
gccacugcauuccagccugggcgacagagcaa

SEQ ID NO: 401250 - RNA, 32 nt, Homo Sapiens
uuuugccacacauuuuugugguaaauuuguga

SEQ ID NO: 401251 - RNA, 32 nt, Homo Sapiens
auuucauaaacuaauagaaguugaggauuguu

SEQ ID NO: 401252 - RNA, 32 nt, Homo Sapiens
uuuugucuaccuugugagcaggcuuuuggaag

SEQ ID NO: 401253 - RNA, 32 nt, Homo Sapiens
uccagguuucaauuugucuacauccucaucaa

SEQ ID NO: 401254 - RNA, 32 nt, Homo Sapiens
auaaauuucaaauguucucaccacaaaaaaga

SEQ ID NO: 401255 - RNA, 32 nt, Homo Sapiens
aacaaugcuucuuguucauggguuucuuccgu

SEQ ID NO: 401256 - RNA, 32 nt, Homo Sapiens
ugcgcggagauucccggcacaggccaaaguca

SEQ ID NO: 401257 - RNA, 32 nt, Homo Sapiens
accuuggcucuuccuuuuuuucuccugcuucc

SEQ ID NO: 401258 - RNA, 32 nt, Homo Sapiens
cggcggcagcagcugcagcaucaucuccaccc

SEQ ID NO: 401259 - RNA, 31 nt, Homo Sapiens
cuacucccacccucagcgaacugggcagcac

SEQ ID NO: 401260 - RNA, 32 nt, Homo Sapiens
agcuuauuguaggguagaaaagagcuuucuac

SEQ ID NO: 401261 - RNA, 32 nt, Homo Sapiens
uucgggagccgcgcgccuucuccggcguccgg

SEQ ID NO: 401262 - RNA, 32 nt, Homo Sapiens
ugguaggacguguaccucuguguguucaugga

SEQ ID NO: 401263 - RNA, 32 nt, Homo Sapiens
ucgauuccggccgcguucccccggccccccuc

SEQ ID NO: 401264 - RNA, 32 nt, Homo Sapiens
uggcagcguggcagcuuugcaaggggcugggg

SEQ ID NO: 401265 - RNA, 32 nt, Homo Sapiens
cagcugggccucagcccucacggcauuccugc

SEQ ID NO: 401266 - RNA, 27 nt, Homo Sapiens
gggaauaaagguuuuucuuagauucug

SEQ ID NO: 401267 - RNA, 32 nt, Homo Sapiens
uucauuccgacuuuuccaauggaaacucagau

SEQ ID NO: 401268 - RNA, 32 nt, Homo Sapiens
cccccucuuguaaacccggcgccaggcacaga

SEQ ID NO: 401269 - RNA, 32 nt, Homo Sapiens
cauacaguuuucuaaaacaacuucagcaaaug

SEQ ID NO: 401270 - RNA, 32 nt, Homo Sapiens
cuauaguuuugugagagaaauaaaauauuuug

SEQ ID NO: 401271 - RNA, 32 nt, Homo Sapiens
acaaacaagccugaaagugucuggaggagcca

SEQ ID NO: 401272 - RNA, 32 nt, Homo Sapiens
ccacaagaugccauugucccccggccuccugc

SEQ ID NO: 401273 - RNA, 32 nt, Homo Sapiens
guuagcuguaaaaguaauauuaugacauauuu

SEQ ID NO: 401274 - RNA, 32 nt, Homo Sapiens
ggaccucuuucacuacccacgaugaccuccgg

SEQ ID NO: 401275 - RNA, 32 nt, Homo Sapiens
guuagucgaggguggguggggccugggaaucu

SEQ ID NO: 401276 - RNA, 32 nt, Homo Sapiens
uccuuugacaccuggucuucaguucugugccc

SEQ ID NO: 401277 - RNA, 32 nt, Homo Sapiens
gaguggcccugcuuccuccccuagaauggcuu

SEQ ID NO: 401278 - RNA, 32 nt, Homo Sapiens
cccuucccaucaacucuuucugcuugacaaug

SEQ ID NO: 401279 - RNA, 32 nt, Homo Sapiens
cuucauuuuauuuuaaagcuuaccuguaucau

SEQ ID NO: 401280 - RNA, 32 nt, Homo Sapiens
acccagcugaagaucuuaugcacaggacacac

SEQ ID NO: 401281 - RNA, 32 nt, Homo Sapiens
aaugauaucaucccaacaaaauaugaaacuuc

SEQ ID NO: 401282 - RNA, 32 nt, Homo Sapiens
cucccuuuucuaucucuuucuauaggaacaac

SEQ ID NO: 401283 - RNA, 32 nt, Homo Sapiens
ucaacguuucuuuuccuucuacaauaaacacu

SEQ ID NO: 401284 - RNA, 32 nt, Homo Sapiens
cugcgccgcccggacggccugcagagcgcugc

SEQ ID NO: 401285 - RNA, 32 nt, Homo Sapiens
agacgcggcagagcgcguucagcacugacuuu

SEQ ID NO: 401286 - RNA, 32 nt, Homo Sapiens
aagcucuccagccagacugaggucacagaugu

SEQ ID NO: 401287 - RNA, 32 nt, Homo Sapiens
cccuucuuucccuuccacuucuagagcaggga

SEQ ID NO: 401288 - RNA, 32 nt, Homo Sapiens
agugguuggggauccacaggaacgacauucau

SEQ ID NO: 401289 - RNA, 32 nt, Homo Sapiens
uguggcaaagcuuuuaaccaguccucacaccu

SEQ ID NO: 401290 - RNA, 32 nt, Homo Sapiens
gacacuuaaguacaugcuuaaugauauauuuu

SEQ ID NO: 401291 - RNA, 32 nt, Homo Sapiens
uuugcugcaauaaucuuagccuacaucuugga

SEQ ID NO: 401292 - RNA, 32 nt, Homo Sapiens
gccccagcuuugcaggaugaaaagcuuucccg

SEQ ID NO: 401293 - RNA, 28 nt, Homo Sapiens
guauauguaaauaauauguguuuuacca

SEQ ID NO: 401294 - RNA, 32 nt, Homo Sapiens
ugagcuguauuaccauaaguagaauuuuaagu

SEQ ID NO: 401295 - RNA, 32 nt, Homo Sapiens
agguguuugacaaacagaugguugcaauucag

SEQ ID NO: 401296 - RNA, 32 nt, Homo Sapiens
ggcuagaaaaggcggcggggcugggcccagcg

SEQ ID NO: 401297 - RNA, 32 nt, Homo Sapiens
uccuuugguuauggacacauaauccugggcca

SEQ ID NO: 401298 - RNA, 32 nt, Homo Sapiens
ugcauguguguacagcaggagguaauaugcua

SEQ ID NO: 401299 - RNA, 32 nt, Homo Sapiens
auuuuguuccaagaucauuaggauauuuagcc

SEQ ID NO: 401300 - RNA, 32 nt, Homo Sapiens
gcagggggagaggggcagaggguguggguauu

SEQ ID NO: 401301 - RNA, 31 nt, Homo Sapiens
uuucuuguuucugacuuuuagauuagggaua

SEQ ID NO: 401302 - RNA, 32 nt, Homo Sapiens
auaaguuuucagugaauaaaccacuggcaaga

SEQ ID NO: 401303 - RNA, 32 nt, Homo Sapiens
ucggcggcgggugccccgcgcgcacgcgcaaa

SEQ ID NO: 401304 - RNA, 32 nt, Homo Sapiens
gguaagagggaagagcauccagggagaggaga

SEQ ID NO: 401305 - RNA, 32 nt, Homo Sapiens
agccgaugccccagcccugcacgccacccacu

SEQ ID NO: 401306 - RNA, 32 nt, Homo Sapiens
uccccagaugaccccacacccuacucaauuaa

SEQ ID NO: 401307 - RNA, 32 nt, Homo Sapiens
uugcuuacagcuuuucucauuugauauauagc

SEQ ID NO: 401308 - RNA, 32 nt, Homo Sapiens
agcccgcgagggaaugcgagguguguuguccc

SEQ ID NO: 401309 - RNA, 32 nt, Homo Sapiens
cacguccccgcugcguaagacucuguauuugg

SEQ ID NO: 401310 - RNA, 32 nt, Homo Sapiens
gaacagucucuguacacaauuccuccuaaaaa

SEQ ID NO: 401311 - RNA, 32 nt, Homo Sapiens
cauugcagacacaguguugugcauguguguau

SEQ ID NO: 401312 - RNA, 31 nt, Homo Sapiens
acugugugacuacuucucagagcaccugggu

SEQ ID NO: 401313 - RNA, 31 nt, Homo Sapiens
agaucggggccccagaaugacuaaaaguucc

SEQ ID NO: 401314 - RNA, 32 nt, Homo Sapiens
ucaugugagguuccucuuucuuucagcucagu

SEQ ID NO: 401315 - RNA, 32 nt, Homo Sapiens
caaaaaauauuuuuaugugcagcuucugaaca

SEQ ID NO: 401316 - RNA, 32 nt, Homo Sapiens
gcuacugucuuacuauuauagcaacuuuaaga

SEQ ID NO: 401317 - RNA, 32 nt, Homo Sapiens
gcagaauuugaagaucaagaugaugaagccag

SEQ ID NO: 401318 - RNA, 32 nt, Homo Sapiens
aagugagcauccggacaggaaccaucauggau

SEQ ID NO: 401319 - RNA, 32 nt, Homo Sapiens
cccagccuacccugagggccugccgggcugcc

SEQ ID NO: 401320 - RNA, 32 nt, Homo Sapiens
ucaaccacuaaaguauagagaaaaguguauua

SEQ ID NO: 401321 - RNA, 32 nt, Homo Sapiens
aaauugacuuagauauuaaaauuuggugcuua

SEQ ID NO: 401322 - RNA, 32 nt, Homo Sapiens
ucaccaugucauuguuuugguccaaucaggua

SEQ ID NO: 401323 - RNA, 32 nt, Homo Sapiens
gcguguuuuuauuuaucuaauuuuguauucag

SEQ ID NO: 401324 - RNA, 32 nt, Homo Sapiens
aaaaggggaaauguggacacagguccacauau

SEQ ID NO: 401325 - RNA, 32 nt, Homo Sapiens
uuaguaaaacgaauuggaaaacuugacuauga

SEQ ID NO: 401326 - RNA, 32 nt, Homo Sapiens
cgcacugccucccacccugugucugcuuccga

SEQ ID NO: 401327 - RNA, 32 nt, Homo Sapiens
cccgcagccccuggggcccccggagccauggg

SEQ ID NO: 401328 - RNA, 32 nt, Homo Sapiens
cugcgggguuaccaugggaaccgaaccgccgc

SEQ ID NO: 401329 - RNA, 32 nt, Homo Sapiens
aaacagcccccacuccaguccacuccugaccc

SEQ ID NO: 401330 - RNA, 32 nt, Homo Sapiens
aggaggacuccggucuuaacucccacgcuaac

SEQ ID NO: 401331 - RNA, 32 nt, Homo Sapiens
agguggguagaucaccugaggucgggaguuca

SEQ ID NO: 401332 - RNA, 32 nt, Homo Sapiens
ugcagccucacagaucuuugcaacacuccaac

SEQ ID NO: 401333 - RNA, 32 nt, Homo Sapiens
uggucucccccucccccuugagaucgcggcac

SEQ ID NO: 401334 - RNA, 32 nt, Homo Sapiens
ucucuuacauauaaaguaggucauugaguuga

SEQ ID NO: 401335 - RNA, 32 nt, Homo Sapiens
aggauacaaguuguaaaacuagguuuuaugug

SEQ ID NO: 401336 - RNA, 32 nt, Homo Sapiens
agaugucuggagcuguuuggccgagacuacug

SEQ ID NO: 401337 - RNA, 32 nt, Homo Sapiens
ggcugccugccaggugaauggacauagcguga

SEQ ID NO: 401338 - RNA, 32 nt, Homo Sapiens
uccugaccucaggugaucugcccgccuuggcc

SEQ ID NO: 401339 - RNA, 32 nt, Homo Sapiens
cagccaggaaaaaccagacagacuuucacacu

SEQ ID NO: 401340 - RNA, 32 nt, Homo Sapiens
cccgcucgauuuuuccucuucuguuccagccc

SEQ ID NO: 401341 - RNA, 32 nt, Homo Sapiens
ugaccaugaugaucaggauguggugcuuuuua

SEQ ID NO: 401342 - RNA, 32 nt, Homo Sapiens
aauaguguauaaauaucauguaaaugugaugg

SEQ ID NO: 401343 - RNA, 32 nt, Homo Sapiens
gaggccccaagccacggggcaucccccucucc

SEQ ID NO: 401344 - RNA, 32 nt, Homo Sapiens
gcuaugauaaaacuuuuuuacuaaaaggaugu

SEQ ID NO: 401345 - RNA, 32 nt, Homo Sapiens
uaaaaaugcuagcgacagucuuucuuacuggu

SEQ ID NO: 401346 - RNA, 32 nt, Homo Sapiens
gaaggacgggaccacagcugacugcugugucc

SEQ ID NO: 401347 - RNA, 32 nt, Homo Sapiens
uuuuaccucuucuuuagccaagaagcaagauc

SEQ ID NO: 401348 - RNA, 28 nt, Homo Sapiens
cguccaacgguuacaaggaugacccaua

SEQ ID NO: 401349 - RNA, 32 nt, Homo Sapiens
cagcaaaaaaacaaaaacauguucuaaguuaa

SEQ ID NO: 401350 - RNA, 32 nt, Homo Sapiens
uccaccacagagccuccacuuugcaggaguga

SEQ ID NO: 401351 - RNA, 32 nt, Homo Sapiens
ccaaaaucucuuaaaaugaggaaucucuuagc

SEQ ID NO: 401352 - RNA, 32 nt, Homo Sapiens
ugccuguaaucucagcacuuugagggguugag

SEQ ID NO: 401353 - RNA, 32 nt, Homo Sapiens
ggaggaggaguucguggaugacacacuggcca

SEQ ID NO: 401354 - RNA, 32 nt, Homo Sapiens
uguuucauuguuaauugccauccuucagccuu

SEQ ID NO: 401355 - RNA, 32 nt, Homo Sapiens
gcuccgcgcaugccgaggguguggcccggcug

SEQ ID NO: 401356 - RNA, 30 nt, Homo Sapiens
ccggcgggcggccucgcgggucaggacaca

SEQ ID NO: 401357 - RNA, 32 nt, Homo Sapiens
ggggcgagccaaccccaccucuaugcccugag

SEQ ID NO: 401358 - RNA, 32 nt, Homo Sapiens
cucagccugcucagccuucucugagccuuugc

SEQ ID NO: 401359 - RNA, 32 nt, Homo Sapiens
aaggagagauuggccuagccucccagccuaca

SEQ ID NO: 401360 - RNA, 27 nt, Homo Sapiens
cguuucuccuucuucagggcggcccug

SEQ ID NO: 401361 - RNA, 32 nt, Homo Sapiens
auucuucugguaguuuucucuauuuccaagua

SEQ ID NO: 401362 - RNA, 32 nt, Homo Sapiens
cgccguugcgggcgggagcggcugcaacgccg

SEQ ID NO: 401363 - RNA, 32 nt, Homo Sapiens
acuaauccuucuaucaucuaacaugcacuacu

SEQ ID NO: 401364 - RNA, 32 nt, Homo Sapiens
cauuuggaaauacaaaaugguaccucuuucca

SEQ ID NO: 401365 - RNA, 32 nt, Homo Sapiens
guuacuaucucaauucuucaguuuccacguug

SEQ ID NO: 401366 - RNA, 32 nt, Homo Sapiens
ggcggaguggagcuuugggaaccccucggcca

SEQ ID NO: 401367 - RNA, 32 nt, Homo Sapiens
acucuugggaccucgcugaucuaggaugggga

SEQ ID NO: 401368 - RNA, 32 nt, Homo Sapiens
cuucaagaugacccuuugguuuccauuucuuc

SEQ ID NO: 401369 - RNA, 32 nt, Homo Sapiens
guaaagagauucuuuaaaaugcugcuucuucu

SEQ ID NO: 401370 - RNA, 32 nt, Homo Sapiens
agacuaucccacuuauaaaagaauuauuuuua

SEQ ID NO: 401371 - RNA, 32 nt, Homo Sapiens
uggcuuccacacucuugguuacaguguaaagc

SEQ ID NO: 401372 - RNA, 32 nt, Homo Sapiens
gggccaggccuccucuuccccaggcugccacc

SEQ ID NO: 401373 - RNA, 32 nt, Homo Sapiens
gggcgccggggcaguccgccucacuggaggaa

SEQ ID NO: 401374 - RNA, 32 nt, Homo Sapiens
gagcuggugcggcuggccauggagaaagcuga

SEQ ID NO: 401375 - RNA, 32 nt, Homo Sapiens
ugagggggaaccgcgaugagagauacuuucug

SEQ ID NO: 401376 - RNA, 32 nt, Homo Sapiens
ccagccuaaguguugcccugcacuauggcugg

SEQ ID NO: 401377 - RNA, 32 nt, Homo Sapiens
augaaagauaaaauuuuaauauagcuucaguu

SEQ ID NO: 401378 - RNA, 32 nt, Homo Sapiens
cuggugggcuccugggcggccugcgcagaugg

SEQ ID NO: 401379 - RNA, 32 nt, Homo Sapiens
uccccauugacuuuucccaucucuguuaaccc

SEQ ID NO: 401380 - RNA, 32 nt, Homo Sapiens
agcuggcucagaagacaaaccaauuaagaugu

SEQ ID NO: 401381 - RNA, 32 nt, Homo Sapiens
ugugccgcauucuccauggccuuugcacucuu

SEQ ID NO: 401382 - RNA, 32 nt, Homo Sapiens
cuggaagaccgugccugcccagcccucgucac

SEQ ID NO: 401383 - RNA, 32 nt, Homo Sapiens
cccuacauucuucccucuaaauaaaaaguuuu

SEQ ID NO: 401384 - RNA, 32 nt, Homo Sapiens
ccccccaauucuuuccucuccagauccccagc

SEQ ID NO: 401385 - RNA, 32 nt, Homo Sapiens
uugguguagcagcaaucguguuguuuuauuuu

SEQ ID NO: 401386 - RNA, 32 nt, Homo Sapiens
aagagucuguauuuuuaauaaauguuaaauaa

SEQ ID NO: 401387 - RNA, 32 nt, Homo Sapiens
uguacuacaggaguggugcuuaccagggucua

SEQ ID NO: 401388 - RNA, 32 nt, Homo Sapiens
caggguuuucccuuguuuuccucucauugcau

SEQ ID NO: 401389 - RNA, 32 nt, Homo Sapiens
gaaagaaaaaucaaaguagaaacuacuaauuu

SEQ ID NO: 401390 - RNA, 32 nt, Homo Sapiens
cuccccccggagugggggccucgccggccccu

SEQ ID NO: 401391 - RNA, 32 nt, Homo Sapiens
cuuaauccauuucugcagacacaacucaugua

SEQ ID NO: 401392 - RNA, 32 nt, Homo Sapiens
cuuuucuguauauaacaaauuaagucuguaca

SEQ ID NO: 401393 - RNA, 32 nt, Homo Sapiens
guucccauguaggagguaaaaccaauucugga

SEQ ID NO: 401394 - RNA, 32 nt, Homo Sapiens
uugcuucucuuugacuccaugguguuuuuaga

SEQ ID NO: 401395 - RNA, 32 nt, Homo Sapiens
accuuucuuauguccuuuaauagcauagacug

SEQ ID NO: 401396 - RNA, 32 nt, Homo Sapiens
ugucagcgggcucacauguuaugguucaucca

SEQ ID NO: 401397 - RNA, 32 nt, Homo Sapiens
ugagaucgccuggcuggggugcaggcaagcag

SEQ ID NO: 401398 - RNA, 32 nt, Homo Sapiens
caaauguaacugugccaguucuuuccauaaua

SEQ ID NO: 401399 - RNA, 32 nt, Homo Sapiens
agggggagggagaggggaacugauaucuccca

SEQ ID NO: 401400 - RNA, 32 nt, Homo Sapiens
uaguguuagaaacugaauaaauggaaagggaa

SEQ ID NO: 401401 - RNA, 32 nt, Homo Sapiens
accggaaauaccaugcacagaguccuuaaaaa

SEQ ID NO: 401402 - RNA, 32 nt, Homo Sapiens
gggacugcuugcugccucuccuuucuuccucu

SEQ ID NO: 401403 - RNA, 32 nt, Homo Sapiens
uacauacaucuucugcugguguuuuguucaau

SEQ ID NO: 401404 - RNA, 32 nt, Homo Sapiens
cuccacaucuucugccccaguguguccccacc

SEQ ID NO: 401405 - RNA, 32 nt, Homo Sapiens
ggugcugccccagccaggaucuggucgcugcc

SEQ ID NO: 401406 - RNA, 32 nt, Homo Sapiens
gggugaaauacagauagcaaaacaaaucauga

SEQ ID NO: 401407 - RNA, 32 nt, Homo Sapiens
ggguggaugcaugguggggcccgggguucugg

SEQ ID NO: 401408 - RNA, 30 nt, Homo Sapiens
uggaugccgcugcugccgccgccgugggac

SEQ ID NO: 401409 - RNA, 32 nt, Homo Sapiens
cuaauuguguaaagaaaggauauuuuaauaag

SEQ ID NO: 401410 - RNA, 32 nt, Homo Sapiens
acaugccuggaaaguugauguugguuguuguc

SEQ ID NO: 401411 - RNA, 32 nt, Homo Sapiens
cucagcagcccuggacccgcgugcguuacguc

SEQ ID NO: 401412 - RNA, 32 nt, Homo Sapiens
ccuucuugcauucugggucccagccuccugua

SEQ ID NO: 401413 - RNA, 32 nt, Homo Sapiens
guucaaauccacguauuuuuuaaaagagagaa

SEQ ID NO: 401414 - RNA, 32 nt, Homo Sapiens
cgaugauuaagcaacaauguaacuggucuuga

SEQ ID NO: 401415 - RNA, 32 nt, Homo Sapiens
gggccgcgcgcagcagcggcgacgacuuuauc

SEQ ID NO: 401416 - RNA, 32 nt, Homo Sapiens
ugugaaggaccgagacaagaugaagacugugc

SEQ ID NO: 401417 - RNA, 30 nt, Homo Sapiens
auuuucuaucuuacauguucucgaauguuu

SEQ ID NO: 401418 - RNA, 32 nt, Homo Sapiens
auuuaauucagugguuuccaacuuuuuaauca

SEQ ID NO: 401419 - RNA, 32 nt, Homo Sapiens
ucagacuauccugauuaaucuggggaagaaca

SEQ ID NO: 401420 - RNA, 32 nt, Homo Sapiens
uuuggggauauaagcccggccuggggcugcuc

SEQ ID NO: 401421 - RNA, 32 nt, Homo Sapiens
aagguggcugggagccugagccccacaccugc

SEQ ID NO: 401422 - RNA, 32 nt, Homo Sapiens
aagaggaaaaagacaggggccugcuugcccag

SEQ ID NO: 401423 - RNA, 32 nt, Homo Sapiens
uguuaggauauguuuuccuuauugauuacaac

SEQ ID NO: 401424 - RNA, 32 nt, Homo Sapiens
ugugugcacugcuguucuagcugcugaccaua

SEQ ID NO: 401425 - RNA, 32 nt, Homo Sapiens
cauaggacccagagaagaaucccagcguugcu

SEQ ID NO: 401426 - RNA, 32 nt, Homo Sapiens
ccacuccucagcauccuccccacccaccaugg

SEQ ID NO: 401427 - RNA, 32 nt, Homo Sapiens
acuugcccccuacagcagcagcccagauccuc

SEQ ID NO: 401428 - RNA, 32 nt, Homo Sapiens
gauaaaggauaacuuuuuacgguuuuaaaagg

SEQ ID NO: 401429 - RNA, 32 nt, Homo Sapiens
auuauuuucuguguuucaauuguugugccuuu

SEQ ID NO: 401430 - RNA, 32 nt, Homo Sapiens
ggguuccuggguaacuccccacuuccuccugc

SEQ ID NO: 401431 - RNA, 32 nt, Homo Sapiens
guccuuuucuuuucuuuuuaauugcucauuug

SEQ ID NO: 401432 - RNA, 32 nt, Homo Sapiens
uuccuguggggugccuggaccccuuccccauc

SEQ ID NO: 401433 - RNA, 32 nt, Homo Sapiens
cacagccauguacaccaagaagagaguaccaa

SEQ ID NO: 401434 - RNA, 32 nt, Homo Sapiens
gcuaagaugguccuucugugucuugcaaagac

SEQ ID NO: 401435 - RNA, 32 nt, Homo Sapiens
ugucagcuccagccuauucaauuucaauuuuu

SEQ ID NO: 401436 - RNA, 32 nt, Homo Sapiens
cuucagcccuccccuucccagccccaaacuga

SEQ ID NO: 401437 - RNA, 32 nt, Homo Sapiens
uucuuuuuaaaacagagggaagaauauacaga

SEQ ID NO: 401438 - RNA, 32 nt, Homo Sapiens
cuguugugucaacugggccagcuguugcucug

SEQ ID NO: 401439 - RNA, 32 nt, Homo Sapiens
ggcaagaggagaaagguguggugggcagacag

SEQ ID NO: 401440 - RNA, 32 nt, Homo Sapiens
ucggcgucucagcagucuccaguguccacgcg

SEQ ID NO: 401441 - RNA, 32 nt, Homo Sapiens
aguaaauuucagggucugucuaucuuaagcuu

SEQ ID NO: 401442 - RNA, 32 nt, Homo Sapiens
uugucuuaaugaucuaaggcugguguagaaac

SEQ ID NO: 401443 - RNA, 32 nt, Homo Sapiens
auuugcaggcugcgggcaguggcaccgacuug

SEQ ID NO: 401444 - RNA, 32 nt, Homo Sapiens
ccugggccucuuccccuuacccggcccuuaga

SEQ ID NO: 401445 - RNA, 32 nt, Homo Sapiens
gcccccgcccggcccgccccgcucuccuaguc

SEQ ID NO: 401446 - RNA, 31 nt, Homo Sapiens
uucaagaaauaaaaagcaagagaaucagcuu

SEQ ID NO: 401447 - RNA, 32 nt, Homo Sapiens
gcaguaggagugcagacugaaaaaaugcagac

SEQ ID NO: 401448 - RNA, 32 nt, Homo Sapiens
uuaguagacccuccauauauguguguguuuug

SEQ ID NO: 401449 - RNA, 32 nt, Homo Sapiens
aaugcccuccauucuucagggcugagaauuga

SEQ ID NO: 401450 - RNA, 32 nt, Homo Sapiens
uguugacuuuugcaauaaagaugcaauaugga

SEQ ID NO: 401451 - RNA, 32 nt, Homo Sapiens
gauaucuguguaaaaauugaucuacauccacc

SEQ ID NO: 401452 - RNA, 32 nt, Homo Sapiens
ugccccccauccccaccccucaaucucagccc

SEQ ID NO: 401453 - RNA, 32 nt, Homo Sapiens
aaacuuguguggaaaaaacuaacuuauaauuu

SEQ ID NO: 401454 - RNA, 32 nt, Homo Sapiens
cuauuuccuuuauauacuuguuuaucuggacu

SEQ ID NO: 401455 - RNA, 32 nt, Homo Sapiens
gcccccgcaagccccagccccgaggaccgucc

SEQ ID NO: 401456 - RNA, 32 nt, Homo Sapiens
cauucuauuucccccucuauugauccccaccu

SEQ ID NO: 401457 - RNA, 32 nt, Homo Sapiens
ucugauuugaaaauucuaaagaauuaaacugg

SEQ ID NO: 401458 - RNA, 32 nt, Homo Sapiens
agaggacuuccuuugacagcagccaguacuuu

SEQ ID NO: 401459 - RNA, 32 nt, Homo Sapiens
aguuaggcuuccaugauguuacauuaggaaga

SEQ ID NO: 401460 - RNA, 32 nt, Homo Sapiens
gaggcggcguccccuuucccugccuuggcagg

SEQ ID NO: 401461 - RNA, 32 nt, Homo Sapiens
ucccagggggguggagguauccacugcacgug

SEQ ID NO: 401462 - RNA, 32 nt, Homo Sapiens
cucaguuuccacaucugcacaaugggggugac

SEQ ID NO: 401463 - RNA, 32 nt, Homo Sapiens
gcaguauuuguccuucugugacuggcuuauuu

SEQ ID NO: 401464 - RNA, 32 nt, Homo Sapiens
cccuaguguaauaaguuuuauaacuaaaaagg

SEQ ID NO: 401465 - RNA, 32 nt, Homo Sapiens
caagucuaaaauuuuacuaaaaauaauuaaac

SEQ ID NO: 401466 - RNA, 32 nt, Homo Sapiens
agugcaacucgagcuccauccuccuccgauuu

SEQ ID NO: 401467 - RNA, 32 nt, Homo Sapiens
aacauaauguguauauauuuguuugaaauaua

SEQ ID NO: 401468 - RNA, 32 nt, Homo Sapiens
ccaaguguuucaugugaagauguugagccauu

SEQ ID NO: 401469 - RNA, 32 nt, Homo Sapiens
ccugugucugguuuuccuguuuauucccugug

SEQ ID NO: 401470 - RNA, 32 nt, Homo Sapiens
caccuuccucugucugccauggaccaacaagc

SEQ ID NO: 401471 - RNA, 32 nt, Homo Sapiens
aggggaggagagcggccgccucaggaggaucc

SEQ ID NO: 401472 - RNA, 32 nt, Homo Sapiens
cccugagccccuccggccccuggaccucgucc

SEQ ID NO: 401473 - RNA, 32 nt, Homo Sapiens
gcccaggaguccaggcccccagccccuccucc

SEQ ID NO: 401474 - RNA, 32 nt, Homo Sapiens
cacaauucauugauguagaggauuuaugacua

SEQ ID NO: 401475 - RNA, 32 nt, Homo Sapiens
ggcgagcuggacucugucuccaugguggcucu

SEQ ID NO: 401476 - RNA, 32 nt, Homo Sapiens
ugaugccgagagcgggcugugggcggagcugg

SEQ ID NO: 401477 - RNA, 32 nt, Homo Sapiens
caccccuucccgagguggcuccugcuuaccuu

SEQ ID NO: 401478 - RNA, 32 nt, Homo Sapiens
gauggugagcauaucuaauacucucaaaaguu

SEQ ID NO: 401479 - RNA, 32 nt, Homo Sapiens
uauauuacuuuccuggauucucuucuucacuu

SEQ ID NO: 401480 - RNA, 32 nt, Homo Sapiens
cagucaugaggaaagacacagauuucggucau

SEQ ID NO: 401481 - RNA, 32 nt, Homo Sapiens
ucuaguauuuucuuucucaauucauacgcuua

SEQ ID NO: 401482 - RNA, 32 nt, Homo Sapiens
auguuaagaaaauuaugacauaaauuacaugu

SEQ ID NO: 401483 - RNA, 32 nt, Homo Sapiens
uguuugaacccuggacauuccaaauaaagaau

SEQ ID NO: 401484 - RNA, 32 nt, Homo Sapiens
gugcaugggccagugaggacgcacagagaucc

SEQ ID NO: 401485 - RNA, 32 nt, Homo Sapiens
agcuuggucucgggaugccaacuuggggcacg

SEQ ID NO: 401486 - RNA, 32 nt, Homo Sapiens
gaacaaaacaacauauaacagauugacugcag

SEQ ID NO: 401487 - RNA, 32 nt, Homo Sapiens
aagcugcccucccugggaaucacucagaugcc

SEQ ID NO: 401488 - RNA, 32 nt, Homo Sapiens
uuuucaguuauugcaaagaaaugaagagauuc

SEQ ID NO: 401489 - RNA, 32 nt, Homo Sapiens
cgauaaaucaguguacuugacaguguuaucug

SEQ ID NO: 401490 - RNA, 32 nt, Homo Sapiens
gccauguguaagagucuuucuguaugacgaac

SEQ ID NO: 401491 - RNA, 31 nt, Homo Sapiens
ggacuugagcacugccugggaccugugcuga

SEQ ID NO: 401492 - RNA, 32 nt, Homo Sapiens
gagagcauacuguacauucuguccucuguacu

SEQ ID NO: 401493 - RNA, 32 nt, Homo Sapiens
gccagcuccguccucccugccgagggcucucu

SEQ ID NO: 401494 - RNA, 32 nt, Homo Sapiens
cacagacucuguguguguauguguguguuuau

SEQ ID NO: 401495 - RNA, 32 nt, Homo Sapiens
aaguacaaguuauaauuagugugauaccaccc

SEQ ID NO: 401496 - RNA, 32 nt, Homo Sapiens
cgaggucuuugagcucaggaguucaagaccag

SEQ ID NO: 401497 - RNA, 32 nt, Homo Sapiens
uucguguguuugcaugagugugcgcuucaggc

SEQ ID NO: 401498 - RNA, 32 nt, Homo Sapiens
uagugagaucacuucauagguuaugccuggac

SEQ ID NO: 401499 - RNA, 32 nt, Homo Sapiens
gaauauaauucaauauaaaauaaaacuuugug

SEQ ID NO: 401500 - RNA, 32 nt, Homo Sapiens
acguuuucuucuccacccacggcacaggugau

SEQ ID NO: 401501 - RNA, 32 nt, Homo Sapiens
ccaugcccugcuccuuuuuuuuuuuuuuuuuu

SEQ ID NO: 401502 - RNA, 32 nt, Homo Sapiens
ugcguucccgccccggguccccggcgccgcag

SEQ ID NO: 401503 - RNA, 32 nt, Homo Sapiens
gaguagccgagaccacaggucaccccucgcug

SEQ ID NO: 401504 - RNA, 32 nt, Homo Sapiens
cgccccucgugccgccgcugcccgccggaagc

SEQ ID NO: 401505 - RNA, 32 nt, Homo Sapiens
aacugugacaaugauagguagaccugaauaaa

SEQ ID NO: 401506 - RNA, 32 nt, Homo Sapiens
cgccaggacggaggccggcagcuggggggcug

SEQ ID NO: 401507 - RNA, 32 nt, Homo Sapiens
guaaccacaauuuucagguuucuuaaaaacag

SEQ ID NO: 401508 - RNA, 32 nt, Homo Sapiens
uuauuuacgucauuuuaaaucuuucagugaug

SEQ ID NO: 401509 - RNA, 32 nt, Homo Sapiens
ucugguguugacagaggauuuauuuaagcuau

SEQ ID NO: 401510 - RNA, 32 nt, Homo Sapiens
gcccucgccucccaugucuuugaagcaccccu

SEQ ID NO: 401511 - RNA, 32 nt, Homo Sapiens
cuuuaaucuucaguuuuaucuuuaaucuccuc

SEQ ID NO: 401512 - RNA, 32 nt, Homo Sapiens
uugucgggucauuugacagagcuccaugcguc

SEQ ID NO: 401513 - RNA, 32 nt, Homo Sapiens
ccuggcagaaccaugccuucucuagucugggu

SEQ ID NO: 401514 - RNA, 32 nt, Homo Sapiens
aaacugcgaggaggagcuuuacgacuucucgg

SEQ ID NO: 401515 - RNA, 32 nt, Homo Sapiens
cccgcgaggagcugcgccgccaccucgugggc

SEQ ID NO: 401516 - RNA, 32 nt, Homo Sapiens
auauauuuaaucuugugguucaaauaagcuuu

SEQ ID NO: 401517 - RNA, 32 nt, Homo Sapiens
ugguccucaugcugccgaggcuguugcuguug

SEQ ID NO: 401518 - RNA, 32 nt, Homo Sapiens
gagccucugcccggcccucccguucgcccguc

SEQ ID NO: 401519 - RNA, 32 nt, Homo Sapiens
gguucucucugagggccacgggcuuggguagu

SEQ ID NO: 401520 - RNA, 32 nt, Homo Sapiens
cauuccaggucccagagcaaacucucucugcu

SEQ ID NO: 401521 - RNA, 32 nt, Homo Sapiens
aauauauuuuaccuuauuaaaugugugugagu

SEQ ID NO: 401522 - RNA, 32 nt, Homo Sapiens
ccugccccaagccucgcaccuccgcuccacag

SEQ ID NO: 401523 - RNA, 32 nt, Homo Sapiens
uuaaauuuugucacgguuggucuccaaacuuc

SEQ ID NO: 401524 - RNA, 32 nt, Homo Sapiens
uggauugccguggcacaaucuccgcucacugc

SEQ ID NO: 401525 - RNA, 32 nt, Homo Sapiens
ggagaaaaucaucaagaagggcugcaugaugu

SEQ ID NO: 401526 - RNA, 32 nt, Homo Sapiens
gauauuugcauuccucuuaucaggcauuuuca

SEQ ID NO: 401527 - RNA, 32 nt, Homo Sapiens
uaagaugcuguaguucuaucuuugcaaugugu

SEQ ID NO: 401528 - RNA, 32 nt, Homo Sapiens
cauccaagaaugcgauuacugauaagauacug

SEQ ID NO: 401529 - RNA, 32 nt, Homo Sapiens
ccgcggcugaggagcgggaggccguccgggca

SEQ ID NO: 401530 - RNA, 32 nt, Homo Sapiens
uccacugcuucuuauggugguugguuggguuu

SEQ ID NO: 401531 - RNA, 32 nt, Homo Sapiens
ugcuacccauaugugugaagaaaagggggaaa

SEQ ID NO: 401532 - RNA, 32 nt, Homo Sapiens
gcgagcggcgguuuccuugcccggggccgcgg

SEQ ID NO: 401533 - RNA, 30 nt, Homo Sapiens
gagcagggcaggcgugcgggcgggugggug

SEQ ID NO: 401534 - RNA, 32 nt, Homo Sapiens
uuccgccuccugccaccuggaccucccucagu

SEQ ID NO: 401535 - RNA, 32 nt, Homo Sapiens
ggugacccgagcugccgcccgacaugaacucg

SEQ ID NO: 401536 - RNA, 32 nt, Homo Sapiens
aagaggccgcggugcugcgggccgcugugcug

SEQ ID NO: 401537 - RNA, 32 nt, Homo Sapiens
uaauuagagccuccuuccuuucugugagauuu

SEQ ID NO: 401538 - RNA, 32 nt, Homo Sapiens
uguuugccuuugacucccugaccuccagagcc

SEQ ID NO: 401539 - RNA, 32 nt, Homo Sapiens
uuucugaccuuuucuuuuucuccuuugaucug

SEQ ID NO: 401540 - RNA, 32 nt, Homo Sapiens
guccuaaguauuuuauaugaguaccauuugac

SEQ ID NO: 401541 - RNA, 32 nt, Homo Sapiens
ccgccauucuaccugccucaucugugcgcggc

SEQ ID NO: 401542 - RNA, 30 nt, Homo Sapiens
ccacgacccugucggauccaucuuaaucca

SEQ ID NO: 401543 - RNA, 32 nt, Homo Sapiens
aagugcagcgcccucccgccccggcccugccu

SEQ ID NO: 401544 - RNA, 32 nt, Homo Sapiens
aauuccugaugcccaugugauguuguugcccc

SEQ ID NO: 401545 - RNA, 32 nt, Homo Sapiens
agccaaccaagcauggggccgcagcucaggaa

SEQ ID NO: 401546 - RNA, 32 nt, Homo Sapiens
uucccuuaaaauuuauauguauccaguacauu

SEQ ID NO: 401547 - RNA, 32 nt, Homo Sapiens
ccugaccgcuucugacgccgggauggccucgu

SEQ ID NO: 401548 - RNA, 32 nt, Homo Sapiens
cgagcccaguccgcggccccagcagcagcgcc

SEQ ID NO: 401549 - RNA, 32 nt, Homo Sapiens
ucauguuuggcuucucauuacaaccuacacug

SEQ ID NO: 401550 - RNA, 32 nt, Homo Sapiens
cgccagcccagggcacucggcgcggggaucug

SEQ ID NO: 401551 - RNA, 32 nt, Homo Sapiens
guuuuuacagguguuguggaauaaaaacugua

SEQ ID NO: 401552 - RNA, 32 nt, Homo Sapiens
ggcugugagcucagcccucucggccugcgugu

SEQ ID NO: 401553 - RNA, 32 nt, Homo Sapiens
acucuccuugacaugcagucacggccaugauc

SEQ ID NO: 401554 - RNA, 32 nt, Homo Sapiens
uuaaccaaaauguuuguaaaucuuaaccuccu

SEQ ID NO: 401555 - RNA, 32 nt, Homo Sapiens
gggagcgcccgaguccucucggucacgagcug

SEQ ID NO: 401556 - RNA, 32 nt, Homo Sapiens
cuuuuggaaugggaacaucuauccuauacaug

SEQ ID NO: 401557 - RNA, 32 nt, Homo Sapiens
gaagaggaaaauugaaaucucuaaugaagcug

SEQ ID NO: 401558 - RNA, 32 nt, Homo Sapiens
cagaugugucauuguguucauuuagagaaaca

SEQ ID NO: 401559 - RNA, 32 nt, Homo Sapiens
uccuaaaaccaaaaacaacagugacaauagag

SEQ ID NO: 401560 - RNA, 32 nt, Homo Sapiens
agagagagauugguguuaauucuugcuagaac

SEQ ID NO: 401561 - RNA, 32 nt, Homo Sapiens
ugggcacaggccuggugauauccuggugagca

SEQ ID NO: 401562 - RNA, 32 nt, Homo Sapiens
aaguucugaggauuacagcucugcccaggccc

SEQ ID NO: 401563 - RNA, 32 nt, Homo Sapiens
cagaacaguuugguuuuaugcauuguaggaag

SEQ ID NO: 401564 - RNA, 32 nt, Homo Sapiens
gcgacugccccccacaccuucccugccccguc

SEQ ID NO: 401565 - RNA, 32 nt, Homo Sapiens
gcccagcucagguguccugaguggugggaauc

SEQ ID NO: 401566 - RNA, 32 nt, Homo Sapiens
ggauaucagacucuguacacuaaucaauacgu

SEQ ID NO: 401567 - RNA, 32 nt, Homo Sapiens
uguuauggacauuuucagacaugcacagaagu

SEQ ID NO: 401568 - RNA, 32 nt, Homo Sapiens
agaaauuggacuuugguuuucagacaugggac

SEQ ID NO: 401569 - RNA, 32 nt, Homo Sapiens
uggcuguaggcacguuaccagcccuguggcuu

SEQ ID NO: 401570 - RNA, 32 nt, Homo Sapiens
acagggcgggcggacagccgcgcauccccggg

SEQ ID NO: 401571 - RNA, 32 nt, Homo Sapiens
gcacauuaaaaauggugugcugauaaacccca

SEQ ID NO: 401572 - RNA, 32 nt, Homo Sapiens
aguauauagaaagaaaaguuacaguacucugu

SEQ ID NO: 401573 - RNA, 32 nt, Homo Sapiens
gcagccgcagcucgggggcggugccugccuug

SEQ ID NO: 401574 - RNA, 32 nt, Homo Sapiens
agauguugauaaaagcaauuuuaacuugcaga

SEQ ID NO: 401575 - RNA, 32 nt, Homo Sapiens
gccggagccggagucgagccgcggccgggagc

SEQ ID NO: 401576 - RNA, 32 nt, Homo Sapiens
agcaauacuagauguuuauuauuagaaaagau

SEQ ID NO: 401577 - RNA, 32 nt, Homo Sapiens
aauucucuugccucggccucccgaguagcugg

SEQ ID NO: 401578 - RNA, 32 nt, Homo Sapiens
auacaguuuuaacuuuugaaaugugugagagu

SEQ ID NO: 401579 - RNA, 32 nt, Homo Sapiens
aaaauacaaaaauuagcuuggugugguggugc

SEQ ID NO: 401580 - RNA, 32 nt, Homo Sapiens
gagcacccugcccaccaagaagcacuggguga

SEQ ID NO: 401581 - RNA, 32 nt, Homo Sapiens
uagcuaauuuuuccucuuuuuaguagagauac

SEQ ID NO: 401582 - RNA, 32 nt, Homo Sapiens
gcucgguggggcuggagcggcuggcuuaccuc

SEQ ID NO: 401583 - RNA, 32 nt, Homo Sapiens
uucucuauagaauaaaugaaaucuuguuacua

SEQ ID NO: 401584 - RNA, 32 nt, Homo Sapiens
agcauggaucccuccugauuccacucagcccg

SEQ ID NO: 401585 - RNA, 32 nt, Homo Sapiens
aauucuucacgguaagaaaaugaaguucuaau

SEQ ID NO: 401586 - RNA, 29 nt, Homo Sapiens
cuggccuggugggagaggacggcggaggg

SEQ ID NO: 401587 - RNA, 32 nt, Homo Sapiens
ugccucugucuuaaagaauuugaaaguuuccu

SEQ ID NO: 401588 - RNA, 32 nt, Homo Sapiens
ucugcauucccuguuguguuccugcuucuccu

SEQ ID NO: 401589 - RNA, 32 nt, Homo Sapiens
agaugaaaauuccaucaucuuaccauagcuaa

SEQ ID NO: 401590 - RNA, 32 nt, Homo Sapiens
uggcacucucccagcccuguccuugaccgaga

SEQ ID NO: 401591 - RNA, 32 nt, Homo Sapiens
ucgcccauuuuucaaacuuguuacauugaucu

SEQ ID NO: 401592 - RNA, 32 nt, Homo Sapiens
uuccuguucacagauaaagaaagaaagaaaua

SEQ ID NO: 401593 - RNA, 32 nt, Homo Sapiens
ugaacccgggaggcgagcuugcagugagccga

SEQ ID NO: 401594 - RNA, 32 nt, Homo Sapiens
augucuuguaaauacugaguaguauuccuucg

SEQ ID NO: 401595 - RNA, 32 nt, Homo Sapiens
caauauuaacacuucuuaauuugauauauuug

SEQ ID NO: 401596 - RNA, 32 nt, Homo Sapiens
auuucuuuauguuauuauuuuauuuuuucgag

SEQ ID NO: 401597 - RNA, 32 nt, Homo Sapiens
aaauuagacuguaccuguguacacuucuaagg

SEQ ID NO: 401598 - RNA, 32 nt, Homo Sapiens
gcccccaccaccaccacccccaucacugcuuu

SEQ ID NO: 401599 - RNA, 32 nt, Homo Sapiens
cuugggcuuuggaaguagcuguuguaaugaag

SEQ ID NO: 401600 - RNA, 32 nt, Homo Sapiens
gggauuucuggugggacaauggguggugaauu

SEQ ID NO: 401601 - RNA, 32 nt, Homo Sapiens
agcuuggcaucucccuccuacccagcagcucu

SEQ ID NO: 401602 - RNA, 32 nt, Homo Sapiens
cagccacagcggcguggaccgagggucccagc

SEQ ID NO: 401603 - RNA, 32 nt, Homo Sapiens
gggccggccccgggaugcuacacacaacccag

SEQ ID NO: 401604 - RNA, 32 nt, Homo Sapiens
gaggccuguggcggccccagugccauggccac

SEQ ID NO: 401605 - RNA, 32 nt, Homo Sapiens
uccuguauauuggcuucuuuuaaauaaaguga

SEQ ID NO: 401606 - RNA, 32 nt, Homo Sapiens
uuuuuguuuucuucucuuuuugucucaagauu

SEQ ID NO: 401607 - RNA, 32 nt, Homo Sapiens
cuucugggguccacggcggggaggguggggug

SEQ ID NO: 401608 - RNA, 32 nt, Homo Sapiens
gcaugaaaaaauaaacuaaauuugacuauuac

SEQ ID NO: 401609 - RNA, 32 nt, Homo Sapiens
uccaacuaaggcuuaugguauuucauuaaacu

SEQ ID NO: 401610 - RNA, 32 nt, Homo Sapiens
gggcccaggacuccucgcuccuccuggagggc

SEQ ID NO: 401611 - RNA, 32 nt, Homo Sapiens
uggauuaauuuauggcuauuuauaauuugcuu

SEQ ID NO: 401612 - RNA, 32 nt, Homo Sapiens
aggggcagcgugcccuggggcugcugaaaaac

SEQ ID NO: 401613 - RNA, 32 nt, Homo Sapiens
cagaggcagguccuggccugcugcuuagaaca

SEQ ID NO: 401614 - RNA, 31 nt, Homo Sapiens
guaaaaacaaauugugggucaaaguaaaugu

SEQ ID NO: 401615 - RNA, 32 nt, Homo Sapiens
accugcuucuauuagcccuucuccauggcccu

SEQ ID NO: 401616 - RNA, 32 nt, Homo Sapiens
gggcccaccgcgcccacgggggcuuuagggga

SEQ ID NO: 401617 - RNA, 32 nt, Homo Sapiens
uggcugucuucccagacacuuguuaucuuguu

SEQ ID NO: 401618 - RNA, 31 nt, Homo Sapiens
uaggaccaucaagcucugcuaacugaaucuc

SEQ ID NO: 401619 - RNA, 31 nt, Homo Sapiens
cucagcacaaagaagaauuuucugauaacca

SEQ ID NO: 401620 - RNA, 32 nt, Homo Sapiens
auucauuuuuucaaaacacaaugcuggaaaaa

SEQ ID NO: 401621 - RNA, 32 nt, Homo Sapiens
uuacucuugauugugggauacuauuuaauuau

SEQ ID NO: 401622 - RNA, 32 nt, Homo Sapiens
uaaugauagaccugaagucuuauuuaaaauga

SEQ ID NO: 401623 - RNA, 32 nt, Homo Sapiens
ggagcccgcccgguggcggcuggggucggcug

SEQ ID NO: 401624 - RNA, 32 nt, Homo Sapiens
gaccugaccucucuccucuccccucacccucc

SEQ ID NO: 401625 - RNA, 32 nt, Homo Sapiens
cuacgaucaaggaaacuggugugugauucuuc

SEQ ID NO: 401626 - RNA, 32 nt, Homo Sapiens
cgcauggcgagcgccucccacgcccauccgua

SEQ ID NO: 401627 - RNA, 32 nt, Homo Sapiens
aguggaaaggagcagugcugcagcucugaugg

SEQ ID NO: 401628 - RNA, 32 nt, Homo Sapiens
uuuagcaauuuaaaaucuuucuuuacugcaag

SEQ ID NO: 401629 - RNA, 32 nt, Homo Sapiens
cugagcgcgacgcucaguggcucgggccgugc

SEQ ID NO: 401630 - RNA, 32 nt, Homo Sapiens
agccugccugaagagaggaaacuggcgaucuc

SEQ ID NO: 401631 - RNA, 32 nt, Homo Sapiens
gggcacugccucugggaccccugccggccagc

SEQ ID NO: 401632 - RNA, 32 nt, Homo Sapiens
ccgugggauacuggacucgugccucugcgccc

SEQ ID NO: 401633 - RNA, 32 nt, Homo Sapiens
uacuaaauacaauuggugauauuuuacaagaa

SEQ ID NO: 401634 - RNA, 32 nt, Homo Sapiens
ggucagcauugggaaacgacugucccgcugcu

SEQ ID NO: 401635 - RNA, 32 nt, Homo Sapiens
caacguugaaacuuuuucuggugucuacauga

SEQ ID NO: 401636 - RNA, 32 nt, Homo Sapiens
aggcuguccgcucugggcuccgcggccucggc

SEQ ID NO: 401637 - RNA, 32 nt, Homo Sapiens
aagcauguggaggugggaaaggugacagagua

SEQ ID NO: 401638 - RNA, 32 nt, Homo Sapiens
uacagccaccgccgcccggccguuuucucuuc

SEQ ID NO: 401639 - RNA, 32 nt, Homo Sapiens
cagacgcggaacuugccggccuugaagcugcc

SEQ ID NO: 401640 - RNA, 32 nt, Homo Sapiens
uucaccccuuucucucaccccuggagccccgu

SEQ ID NO: 401641 - RNA, 32 nt, Homo Sapiens
uacuacgugagcucagaagagcacugggcacc

SEQ ID NO: 401642 - RNA, 32 nt, Homo Sapiens
auccugcggaagacugagcaguucuugugagu

SEQ ID NO: 401643 - RNA, 32 nt, Homo Sapiens
ccccugaggaggcacagcgccuucugccaccu

SEQ ID NO: 401644 - RNA, 32 nt, Homo Sapiens
uagagaguauaaauaaaaaacagucacaacuu

SEQ ID NO: 401645 - RNA, 32 nt, Homo Sapiens
ccgaggcgggcucccaugcgcucgggccaugg

SEQ ID NO: 401646 - RNA, 32 nt, Homo Sapiens
ugguaccaugaaaggacucacacuggagagaa

SEQ ID NO: 401647 - RNA, 32 nt, Homo Sapiens
ccggcccugccagugcaacgggcacggggacc

SEQ ID NO: 401648 - RNA, 32 nt, Homo Sapiens
guggacauuaugugauuuacuauauaaggagg

SEQ ID NO: 401649 - RNA, 32 nt, Homo Sapiens
uuugccauauguauuuuaaauguauucucuua

SEQ ID NO: 401650 - RNA, 32 nt, Homo Sapiens
ucaaauaaaaauuaaaaagaucacugaagcua

SEQ ID NO: 401651 - RNA, 32 nt, Homo Sapiens
ucuacuugugcucugccuggagcuguuuccau

SEQ ID NO: 401652 - RNA, 32 nt, Homo Sapiens
auccuauguuaauggcuaguuacucuucagau

SEQ ID NO: 401653 - RNA, 32 nt, Homo Sapiens
acugaucaaagcgcuucguagccccggaagcg

SEQ ID NO: 401654 - RNA, 32 nt, Homo Sapiens
uuuuuccuuuuggauaagggaaaacauuauuc

SEQ ID NO: 401655 - RNA, 32 nt, Homo Sapiens
gguagaggaaagggcuagggugacaccacggg

SEQ ID NO: 401656 - RNA, 32 nt, Homo Sapiens
ucacacuggagaaaugcaguguugugugaaau

SEQ ID NO: 401657 - RNA, 32 nt, Homo Sapiens
guuuugcugacuuuuuuuuuuauuuuaaaauu

SEQ ID NO: 401658 - RNA, 32 nt, Homo Sapiens
ucgguccuacagcacuguguaggcugcaucug

SEQ ID NO: 401659 - RNA, 32 nt, Homo Sapiens
cuuccuccugccuguagcccagcccaucuaaa

SEQ ID NO: 401660 - RNA, 32 nt, Homo Sapiens
cauacccgcaguugucucccguuacaauuuga

SEQ ID NO: 401661 - RNA, 32 nt, Homo Sapiens
ucuccaugccuggccggcccggcccaugccug

SEQ ID NO: 401662 - RNA, 32 nt, Homo Sapiens
aaaggggaagaacauuauaaaaauauauucaa

SEQ ID NO: 401663 - RNA, 32 nt, Homo Sapiens
ucuuugcagauaaguauuuaaacuuaccagcc

SEQ ID NO: 401664 - RNA, 32 nt, Homo Sapiens
agguaccucccucucccucuccuggggcauuu

SEQ ID NO: 401665 - RNA, 32 nt, Homo Sapiens
uacuucuuucuaguacccuguacucuaguccc

SEQ ID NO: 401666 - RNA, 32 nt, Homo Sapiens
auguugacaauuagauucuuggaccaagugag

SEQ ID NO: 401667 - RNA, 32 nt, Homo Sapiens
caaggcgcccacucuccacauccugugaaaaa

SEQ ID NO: 401668 - RNA, 32 nt, Homo Sapiens
aaggucccaggccccaggaaacacagggcuuc

SEQ ID NO: 401669 - RNA, 32 nt, Homo Sapiens
cugugcuguggggcuggcaguacucucucuca

SEQ ID NO: 401670 - RNA, 32 nt, Homo Sapiens
gcuucccggacaccccgguccccgcagccagg

SEQ ID NO: 401671 - RNA, 32 nt, Homo Sapiens
ccucucuacccgcuccgcgccugcuccuucuc

SEQ ID NO: 401672 - RNA, 32 nt, Homo Sapiens
auuuaagucuuaguguuugaaauugcaguuau

SEQ ID NO: 401673 - RNA, 32 nt, Homo Sapiens
uugagcagcgguuuguaguucuccuugaagag

SEQ ID NO: 401674 - RNA, 32 nt, Homo Sapiens
ucugaggguucuggaaucugugccaccuuauu

SEQ ID NO: 401675 - RNA, 32 nt, Homo Sapiens
ugcccuugucuccuacccuuguugccauccca

SEQ ID NO: 401676 - RNA, 32 nt, Homo Sapiens
gcuauuuauuuuuuccuuucugcucugguuug

SEQ ID NO: 401677 - RNA, 32 nt, Homo Sapiens
aaacgaaacaagcaaaucauggagaagaaugg

SEQ ID NO: 401678 - RNA, 32 nt, Homo Sapiens
ccuuucuuggggauuguggaggcugggucaga

SEQ ID NO: 401679 - RNA, 32 nt, Homo Sapiens
uugauuucuugucucccuguggcuuguuccac

SEQ ID NO: 401680 - RNA, 32 nt, Homo Sapiens
cagauccuguguuuugagucccaaaggccaug

SEQ ID NO: 401681 - RNA, 31 nt, Homo Sapiens
agcuucgagucuaugguaugaguuaaacaga

SEQ ID NO: 401682 - RNA, 32 nt, Homo Sapiens
gcuauuuacacauuuuaauuguuucucauaaa

SEQ ID NO: 401683 - RNA, 32 nt, Homo Sapiens
ugccauaaaaacagcaugaguuugagugagaa

SEQ ID NO: 401684 - RNA, 32 nt, Homo Sapiens
ugcauugaggugcacagccccugaccaaccau

SEQ ID NO: 401685 - RNA, 32 nt, Homo Sapiens
gaguuaaagcuguguauacauuuuaaaaggca

SEQ ID NO: 401686 - RNA, 32 nt, Homo Sapiens
caucaaaguccucgguguuuuuuaaauuauca

SEQ ID NO: 401687 - RNA, 32 nt, Homo Sapiens
aaaaaauccaaauugacagauauucugcagaa

SEQ ID NO: 401688 - RNA, 32 nt, Homo Sapiens
auuuacagagaaaaaauucuaagacaguugga

SEQ ID NO: 401689 - RNA, 32 nt, Homo Sapiens
gguuccucugugacaagguuggccuugggaau

SEQ ID NO: 401690 - RNA, 32 nt, Homo Sapiens
acaccuccagccucccgggccuugagggagua

SEQ ID NO: 401691 - RNA, 32 nt, Homo Sapiens
aggugaugucauugggccuauugcuucggggc

SEQ ID NO: 401692 - RNA, 32 nt, Homo Sapiens
ggccgugggucgucgcugcagcugccgggaaa

SEQ ID NO: 401693 - RNA, 32 nt, Homo Sapiens
ugagcuuugcgguuaaccugaauucacugaac

SEQ ID NO: 401694 - RNA, 32 nt, Homo Sapiens
cuuuugauucuuuuuucuucccccuccaugua

SEQ ID NO: 401695 - RNA, 32 nt, Homo Sapiens
acaagcuugugauuuaugcuuacucuaagugg

SEQ ID NO: 401696 - RNA, 32 nt, Homo Sapiens
cuaaaaugaaauuauuaauguugguucugaaa

SEQ ID NO: 401697 - RNA, 32 nt, Homo Sapiens
ucgcuuuugaaagggaauuguauuucuguccc

SEQ ID NO: 401698 - RNA, 32 nt, Homo Sapiens
aggguggcccacccauuuccagugugaccugu

SEQ ID NO: 401699 - RNA, 32 nt, Homo Sapiens
uagcucuuaguucuucaaguaaaauuaaaguc

SEQ ID NO: 401700 - RNA, 32 nt, Homo Sapiens
gagcuccgaggccgcacagucacucuggugac

SEQ ID NO: 401701 - RNA, 32 nt, Homo Sapiens
gaugaccgcuccaguucucaucaucucccagg

SEQ ID NO: 401702 - RNA, 31 nt, Homo Sapiens
acuuuugcaagguuccacagaguaagacauu

SEQ ID NO: 401703 - RNA, 32 nt, Homo Sapiens
acccugcugcugccggccgcccagacaccaca

SEQ ID NO: 401704 - RNA, 32 nt, Homo Sapiens
ugcucccuuuccccggccagcucaccucaggc

SEQ ID NO: 401705 - RNA, 32 nt, Homo Sapiens
aauccccuguugccaugguuauggagagcuug

SEQ ID NO: 401706 - RNA, 32 nt, Homo Sapiens
uguucauauaauuuuuuuuuuaauuuaugugu

SEQ ID NO: 401707 - RNA, 32 nt, Homo Sapiens
augcaguauuaaaggggugguagaagcugcug

SEQ ID NO: 401708 - RNA, 32 nt, Homo Sapiens
augagugugagcucgugagugggcgccgccgc

SEQ ID NO: 401709 - RNA, 32 nt, Homo Sapiens
cccuuaauggaaacacgagaucaguagugcua

SEQ ID NO: 401710 - RNA, 32 nt, Homo Sapiens
uaauuccauuauauuuccuuuuguacaccugu

SEQ ID NO: 401711 - RNA, 32 nt, Homo Sapiens
cggagcggucuagggagccgcggccgcggguc

SEQ ID NO: 401712 - RNA, 32 nt, Homo Sapiens
cagucuugguuugguucuaacaaacucucaug

SEQ ID NO: 401713 - RNA, 32 nt, Homo Sapiens
cucgugccugaagcagacgcugcacaagcugg

SEQ ID NO: 401714 - RNA, 32 nt, Homo Sapiens
ucuuuuauauuagccuuaaaaaccaaaaaugc

SEQ ID NO: 401715 - RNA, 32 nt, Homo Sapiens
uccgagaccgcagugggaaguucugaucaccg

SEQ ID NO: 401716 - RNA, 32 nt, Homo Sapiens
aguugucuccguguccccuccucccucugccc

SEQ ID NO: 401717 - RNA, 32 nt, Homo Sapiens
uuggccgggcaccgcgcggcuagcggagguug

SEQ ID NO: 401718 - RNA, 32 nt, Homo Sapiens
agcuuaggaaacauuugguucuuaccaucaca

SEQ ID NO: 401719 - RNA, 32 nt, Homo Sapiens
guggacaaaaucauacaauucagucaauuuua

SEQ ID NO: 401720 - RNA, 32 nt, Homo Sapiens
agaugugauaaggaucagaacagcagagguuc

SEQ ID NO: 401721 - RNA, 32 nt, Homo Sapiens
guuggaggagugauuuggaaaacuauaggcug

SEQ ID NO: 401722 - RNA, 32 nt, Homo Sapiens
uauaugauauauauuuuuuuuaaugcaggaaa

SEQ ID NO: 401723 - RNA, 32 nt, Homo Sapiens
uucuucaccuguuggcuuucucuucugcagca

SEQ ID NO: 401724 - RNA, 32 nt, Homo Sapiens
ugccuuggaccagacaauuccuggacagagac

SEQ ID NO: 401725 - RNA, 32 nt, Homo Sapiens
cuuucaagcauguuuuugauauuuucauccau

SEQ ID NO: 401726 - RNA, 32 nt, Homo Sapiens
uccccugcaggaaguuuggccuuggaggggau

SEQ ID NO: 401727 - RNA, 32 nt, Homo Sapiens
ggaccaagcacaaaaacuuaacaaaagugaug

SEQ ID NO: 401728 - RNA, 32 nt, Homo Sapiens
aaauaaaacaaaacaccuguauggcugccauu

SEQ ID NO: 401729 - RNA, 30 nt, Homo Sapiens
gaaguguccccuuucucccaucuuaagggg

SEQ ID NO: 401730 - RNA, 32 nt, Homo Sapiens
cccaucauugguuuuuuuuugugugucaacug

SEQ ID NO: 401731 - RNA, 32 nt, Homo Sapiens
gcgggcgcgcgagggucggucccgcaggcagc

SEQ ID NO: 401732 - RNA, 32 nt, Homo Sapiens
agcucaguggucaagacuugggcuugggaguc

SEQ ID NO: 401733 - RNA, 32 nt, Homo Sapiens
cuggucaugcagaugguaccaucguuagguau

SEQ ID NO: 401734 - RNA, 32 nt, Homo Sapiens
gcuuguagcaggucccgcacuccagccucucg

SEQ ID NO: 401735 - RNA, 32 nt, Homo Sapiens
ggccuccgacagcgcuccggagggaccggggg

SEQ ID NO: 401736 - RNA, 32 nt, Homo Sapiens
aaggcuauuucugaugcacgauuacacccaug

SEQ ID NO: 401737 - RNA, 32 nt, Homo Sapiens
uauaguagugcaguggugugaucauagcucac

SEQ ID NO: 401738 - RNA, 32 nt, Homo Sapiens
caugaacuuuuguauuuuucauuuuucauuug

SEQ ID NO: 401739 - RNA, 32 nt, Homo Sapiens
gaaaugggauuuuagaaaauggcuguucucug

SEQ ID NO: 401740 - RNA, 32 nt, Homo Sapiens
auaaagugcuuuuauaauccaauauaauugcu

SEQ ID NO: 401741 - RNA, 32 nt, Homo Sapiens
ucuguguacuuugaauuauuuugcaguuaugu

SEQ ID NO: 401742 - RNA, 32 nt, Homo Sapiens
guuguuuucagacucagacuccauuuguauua

SEQ ID NO: 401743 - RNA, 32 nt, Homo Sapiens
gggugagcucauuucauucucuagugucuaaa

SEQ ID NO: 401744 - RNA, 32 nt, Homo Sapiens
cuuguuaaaaauaccuccccaacuccugcuaa

SEQ ID NO: 401745 - RNA, 32 nt, Homo Sapiens
ggccgacggacgggaacccgggccgcgaucgc

SEQ ID NO: 401746 - RNA, 32 nt, Homo Sapiens
ccaagcccuccucugguugccuggacacccuc

SEQ ID NO: 401747 - RNA, 32 nt, Homo Sapiens
aaggacaaauacauuuccagaucuuuucagug

SEQ ID NO: 401748 - RNA, 32 nt, Homo Sapiens
guccuucccccucccaguguagcuguggcuca

SEQ ID NO: 401749 - RNA, 32 nt, Homo Sapiens
ucuacuguaagaagagccauagcugaucaugu

SEQ ID NO: 401750 - RNA, 32 nt, Homo Sapiens
uugagggucacuuuucuaauacuuuuaccuau

SEQ ID NO: 401751 - RNA, 31 nt, Homo Sapiens
cuaccgcggcacucccggcugcaugcucugc

SEQ ID NO: 401752 - RNA, 32 nt, Homo Sapiens
cgcguaccgucgcccggcucuccgccgcucuc

SEQ ID NO: 401753 - RNA, 32 nt, Homo Sapiens
cgugugugucguggcuggccccgcggcgccua

SEQ ID NO: 401754 - RNA, 32 nt, Homo Sapiens
acucuguccauaaauuugauaacuuagcuaaa

SEQ ID NO: 401755 - RNA, 32 nt, Homo Sapiens
cacgggagccaggaugggacuggucguguuug

SEQ ID NO: 401756 - RNA, 32 nt, Homo Sapiens
gucggggcccgcggccgcucgcgccucucgau

SEQ ID NO: 401757 - RNA, 32 nt, Homo Sapiens
cuguguugcacuuuuuaaauggcuauuggccu

SEQ ID NO: 401758 - RNA, 32 nt, Homo Sapiens
ccugacuuucccuaaggacuuccacuuuguuc

SEQ ID NO: 401759 - RNA, 32 nt, Homo Sapiens
ugagcucgcugagacuuccuggaccccgcacc

SEQ ID NO: 401760 - RNA, 32 nt, Homo Sapiens
auuuuccaacuuuaccauggugugaaagaggu

SEQ ID NO: 401761 - RNA, 32 nt, Homo Sapiens
caaauaagauuguuaugucaguauuguuauug

SEQ ID NO: 401762 - RNA, 32 nt, Homo Sapiens
cgucggccgcgggcaagaaggcuggucggcgc

SEQ ID NO: 401763 - RNA, 32 nt, Homo Sapiens
ucucucccggcaguggcugugcuucacagcgc

SEQ ID NO: 401764 - RNA, 32 nt, Homo Sapiens
aagcucacaccuguccuucucaggcuggcauc

SEQ ID NO: 401765 - RNA, 32 nt, Homo Sapiens
augagcagcucuuccagugggcaaagaggacg

SEQ ID NO: 401766 - RNA, 32 nt, Homo Sapiens
auaguccagauauccgggacucgggucccaac

SEQ ID NO: 401767 - RNA, 32 nt, Homo Sapiens
acagcccuucacuuccucucccacuucagcaa

SEQ ID NO: 401768 - RNA, 32 nt, Homo Sapiens
uguccaacucauaaguuuggcugcauuuugaa

SEQ ID NO: 401769 - RNA, 32 nt, Homo Sapiens
auuguauggaaggaaauugaucagaucuguaa

SEQ ID NO: 401770 - RNA, 32 nt, Homo Sapiens
accuucucuucugcacauggagacuuuugcag

SEQ ID NO: 401771 - RNA, 32 nt, Homo Sapiens
gugugaauucucuggcuucuagcugaaaacuu

SEQ ID NO: 401772 - RNA, 32 nt, Homo Sapiens
gaugcuuguuuguaaaaacucaccuuaauaaa

SEQ ID NO: 401773 - RNA, 32 nt, Homo Sapiens
gauacuccaguuccaacaccaucuucugagau

SEQ ID NO: 401774 - RNA, 32 nt, Homo Sapiens
cucauuucggucccuuucuccuuggucccaga

SEQ ID NO: 401775 - RNA, 32 nt, Homo Sapiens
uccuggccagagagcuguccaaggcuguaucu

SEQ ID NO: 401776 - RNA, 32 nt, Homo Sapiens
agacuuguggagcugggcgucuggaucaaaac

SEQ ID NO: 401777 - RNA, 32 nt, Homo Sapiens
guaggcggggcgagccggcugggcucaggguc

SEQ ID NO: 401778 - RNA, 32 nt, Homo Sapiens
ucuuaguugcuuauuuguuuugacucuugugu

SEQ ID NO: 401779 - RNA, 32 nt, Homo Sapiens
gggaaauaugagcacaguacugggaaauggaa

SEQ ID NO: 401780 - RNA, 32 nt, Homo Sapiens
uagcacugcagcucccaccuccuccucccgcc

SEQ ID NO: 401781 - RNA, 32 nt, Homo Sapiens
gcuagcuccagaugagaccguccagcguuccc

SEQ ID NO: 401782 - RNA, 32 nt, Homo Sapiens
uaaguuaauacuuuaaaaauuuucagguuuuu

SEQ ID NO: 401783 - RNA, 32 nt, Homo Sapiens
uggggagggaauguguauuuaggggcauaaua

SEQ ID NO: 401784 - RNA, 32 nt, Homo Sapiens
gccguggcaugggcgccgcgggccugcucggg

SEQ ID NO: 401785 - RNA, 32 nt, Homo Sapiens
uaagcucugcuauuaggccagcaagcggggau

SEQ ID NO: 401786 - RNA, 32 nt, Homo Sapiens
uuuauuuuguuuauuuguuuugcaauaaagga

SEQ ID NO: 401787 - RNA, 30 nt, Homo Sapiens
agcugcagcggcggcggcgcggaggggaag

SEQ ID NO: 401788 - RNA, 32 nt, Homo Sapiens
cgacagcgcccggcccagauccccacgccugc

SEQ ID NO: 401789 - RNA, 32 nt, Homo Sapiens
uguaauacauaaauugucacaaauuauacaug

SEQ ID NO: 401790 - RNA, 32 nt, Homo Sapiens
caccauggccaugaucagaacuguuguuguaa

SEQ ID NO: 401791 - RNA, 32 nt, Homo Sapiens
aaacugaggucuuuuuaaucuugauuacagca

SEQ ID NO: 401792 - RNA, 32 nt, Homo Sapiens
gaagaggaaaaaagccagcaucaggucagggc

SEQ ID NO: 401793 - RNA, 30 nt, Homo Sapiens
ucuauuggagguggaacaaaaaagugugga

SEQ ID NO: 401794 - RNA, 32 nt, Homo Sapiens
ugacaugcuucuuguuuuugucuguuauaaau

SEQ ID NO: 401795 - RNA, 32 nt, Homo Sapiens
uuaggggauuaugacgcgcagcagccauggcc

SEQ ID NO: 401796 - RNA, 31 nt, Homo Sapiens
caaaucuagcccaccaccugguuuuguaaau

SEQ ID NO: 401797 - RNA, 32 nt, Homo Sapiens
aguagcccaagcccugaagucacugcucaucc

SEQ ID NO: 401798 - RNA, 32 nt, Homo Sapiens
aggagccuggaaagcagcugaagcccuggagg

SEQ ID NO: 401799 - RNA, 32 nt, Homo Sapiens
uucgggauauugcaggacgcugcaucaugagc

SEQ ID NO: 401800 - RNA, 32 nt, Homo Sapiens
cuaucacuuuguucuuuuuuuuugugacuccu

SEQ ID NO: 401801 - RNA, 32 nt, Homo Sapiens
ugucaucuguuguaaacauuccaggaggacca

SEQ ID NO: 401802 - RNA, 32 nt, Homo Sapiens
uuggcccaagucuaacacauucuuuaugacug

SEQ ID NO: 401803 - RNA, 32 nt, Homo Sapiens
aggugaugagagauggggagaggccauuggcu

SEQ ID NO: 401804 - RNA, 32 nt, Homo Sapiens
ucugaagugucuguauguggucuuggcuggag

SEQ ID NO: 401805 - RNA, 32 nt, Homo Sapiens
gaauacaaaucguccuuguucuuagauuccug

SEQ ID NO: 401806 - RNA, 32 nt, Homo Sapiens
uuuuagcaguuaaauuuuuuuaacuuuuauuu

SEQ ID NO: 401807 - RNA, 32 nt, Homo Sapiens
cuguuuauugaaccucuuuauuaaaccucuaa

SEQ ID NO: 401808 - RNA, 32 nt, Homo Sapiens
cacaggaugagacaggagagcggcauaagaug

SEQ ID NO: 401809 - RNA, 32 nt, Homo Sapiens
uagccucugcucuuguaagaaguuagcugcag

SEQ ID NO: 401810 - RNA, 32 nt, Homo Sapiens
acccagcuguccgggccacagacccccagcag

SEQ ID NO: 401811 - RNA, 32 nt, Homo Sapiens
accgaggugagcgugggcguugccaguggugc

SEQ ID NO: 401812 - RNA, 32 nt, Homo Sapiens
ggaguuuaaauuguggaaagcaguguggugau

SEQ ID NO: 401813 - RNA, 32 nt, Homo Sapiens
cucucgccugaggccaggcgccaggugucgcc

SEQ ID NO: 401814 - RNA, 32 nt, Homo Sapiens
ugaacccagaaagcggagguugcagugaccug

SEQ ID NO: 401815 - RNA, 32 nt, Homo Sapiens
aacaaaguacucaaggauacaacugcugugaa

SEQ ID NO: 401816 - RNA, 32 nt, Homo Sapiens
ccagugggggacagggccugucugcaugaagu

SEQ ID NO: 401817 - RNA, 32 nt, Homo Sapiens
gugcuuuuuauuuugcagaugaguucauuugc

SEQ ID NO: 401818 - RNA, 32 nt, Homo Sapiens
gaguuugggacuucaggaaaaaucaacccagc

SEQ ID NO: 401819 - RNA, 32 nt, Homo Sapiens
ucacuuuccucagcgggucuccaguccccuga

SEQ ID NO: 401820 - RNA, 32 nt, Homo Sapiens
cuuuugugcugggacagguugcuggcccuccc

SEQ ID NO: 401821 - RNA, 32 nt, Homo Sapiens
aguuauggguugaauuuauuuugaaauuucaa

SEQ ID NO: 401822 - RNA, 32 nt, Homo Sapiens
aauguacaauacuauugaaacuggugaguucu

SEQ ID NO: 401823 - RNA, 32 nt, Homo Sapiens
cuucagauaaaggauaacuuuuuacgguuuua

SEQ ID NO: 401824 - RNA, 32 nt, Homo Sapiens
gugacagaggaugugaguuaucgucuacacac

SEQ ID NO: 401825 - RNA, 32 nt, Homo Sapiens
gccucacaagcaacgccuuaugcugaugugca

SEQ ID NO: 401826 - RNA, 32 nt, Homo Sapiens
cuguugguuacgggacuucucauugucuuaau

SEQ ID NO: 401827 - RNA, 32 nt, Homo Sapiens
gcuguuuugucaaucaauauaaaauauuuaug

SEQ ID NO: 401828 - RNA, 32 nt, Homo Sapiens
ucgccgagccucaguguucucaucugaagaau

SEQ ID NO: 401829 - RNA, 32 nt, Homo Sapiens
gaaauaauucccuuuuuuagucuguucauuuc

SEQ ID NO: 401830 - RNA, 32 nt, Homo Sapiens
gcacguuuauaaguagggcguguauuccaguc

SEQ ID NO: 401831 - RNA, 32 nt, Homo Sapiens
cgggcgugcagggccccgccgccgccaugucg

SEQ ID NO: 401832 - RNA, 32 nt, Homo Sapiens
ucuacuucccauauuucuuuucuuugcccucc

SEQ ID NO: 401833 - RNA, 30 nt, Homo Sapiens
guuacauaggugaugggggaaauuguuaac

SEQ ID NO: 401834 - RNA, 32 nt, Homo Sapiens
agguugagcucuucuuaaaguauucuucucuu

SEQ ID NO: 401835 - RNA, 32 nt, Homo Sapiens
acaggaccuuccagggccucccugccccgaac

SEQ ID NO: 401836 - RNA, 32 nt, Homo Sapiens
cagccuugccuucuccucuccugaaggaaugg

SEQ ID NO: 401837 - RNA, 32 nt, Homo Sapiens
uuaauuuaaaacugucuuucucuguauuuuca

SEQ ID NO: 401838 - RNA, 32 nt, Homo Sapiens
aauuuccagaggacuggccuagcuauaaacac

SEQ ID NO: 401839 - RNA, 32 nt, Homo Sapiens
gugugguaucagcguuaucagugugccuggau

SEQ ID NO: 401840 - RNA, 32 nt, Homo Sapiens
cggaugaccugccuccuaauuuccugagaaaa

SEQ ID NO: 401841 - RNA, 32 nt, Homo Sapiens
guguccugcucgccguccccgccaugcugucu

SEQ ID NO: 401842 - RNA, 32 nt, Homo Sapiens
acgagaggcgcgcucggcacccgcacccccgu

SEQ ID NO: 401843 - RNA, 32 nt, Homo Sapiens
acaauguuauuuacacagugaucauuuuauca

SEQ ID NO: 401844 - RNA, 32 nt, Homo Sapiens
agggaaagcugagauuuugugccauuccuuuu

SEQ ID NO: 401845 - RNA, 32 nt, Homo Sapiens
auuaccuuggauauuguaugcaugcuucaaag

SEQ ID NO: 401846 - RNA, 32 nt, Homo Sapiens
ggggaggccguggugagaggauagcuuaagcc

SEQ ID NO: 401847 - RNA, 32 nt, Homo Sapiens
gaaggaugucaggauaaaaauauacacaccau

SEQ ID NO: 401848 - RNA, 32 nt, Homo Sapiens
cauuuuauaggauauuuacuauguauuuauac

SEQ ID NO: 401849 - RNA, 32 nt, Homo Sapiens
uacuacugauuuuuuuuuuucuuaaaacuaaa

SEQ ID NO: 401850 - RNA, 32 nt, Homo Sapiens
acccuuaggagaaaucuugagaguggacagca

SEQ ID NO: 401851 - RNA, 32 nt, Homo Sapiens
ggccaaacccucagugaacaaccaaaauaucu

SEQ ID NO: 401852 - RNA, 32 nt, Homo Sapiens
uuuaaagaaaauuuguaaaacuaaagacuuuu

SEQ ID NO: 401853 - RNA, 32 nt, Homo Sapiens
aagugcucaugagccagugggccugccacaga

SEQ ID NO: 401854 - RNA, 31 nt, Homo Sapiens
gaacugagaaacacuuuccuggagcugcugg

SEQ ID NO: 401855 - RNA, 32 nt, Homo Sapiens
ccuuaguccguccucccaccgccgggcccugc

SEQ ID NO: 401856 - RNA, 32 nt, Homo Sapiens
uccuuaaaaaauuucggugauuaacagcagca

SEQ ID NO: 401857 - RNA, 32 nt, Homo Sapiens
auaaaaugguguaguauuugcauauaaccuau

SEQ ID NO: 401858 - RNA, 32 nt, Homo Sapiens
ugcuguggaaaacuuugccuggucccucuagc

SEQ ID NO: 401859 - RNA, 32 nt, Homo Sapiens
cgggacaggcagccuccacucugggagcuccc

SEQ ID NO: 401860 - RNA, 32 nt, Homo Sapiens
gccucuucuccauccugcuuggaccagggucc

SEQ ID NO: 401861 - RNA, 32 nt, Homo Sapiens
ucaccccggacuugcaccuuacuuccccaacc

SEQ ID NO: 401862 - RNA, 32 nt, Homo Sapiens
agaugcaggucucucuaaacgcaugaauguau

SEQ ID NO: 401863 - RNA, 32 nt, Homo Sapiens
gagguaucuaaauaauuuauauuuucaaaaaa

SEQ ID NO: 401864 - RNA, 32 nt, Homo Sapiens
gcauucuaaaagauagcaaguaaaaugauguu

SEQ ID NO: 401865 - RNA, 32 nt, Homo Sapiens
guugugaaucuuggaaacucaagccccagugc

SEQ ID NO: 401866 - RNA, 32 nt, Homo Sapiens
ggggagggauggcggguggggguggaauaaaa

SEQ ID NO: 401867 - RNA, 32 nt, Homo Sapiens
gcucuuuggccaugagguuccuggcagugcug

SEQ ID NO: 401868 - RNA, 32 nt, Homo Sapiens
cagcugugggcggcuccuggugcuaacaacaa

SEQ ID NO: 401869 - RNA, 32 nt, Homo Sapiens
gccuucuacagccgagccccccggcccccagc

SEQ ID NO: 401870 - RNA, 32 nt, Homo Sapiens
gcugggucccccugcuccuccucgaccccgca

SEQ ID NO: 401871 - RNA, 32 nt, Homo Sapiens
ggggcgggggucgggcgguagaaaaaagggcc

SEQ ID NO: 401872 - RNA, 32 nt, Homo Sapiens
cugggaaggggaggggaccaugaggcagccag

SEQ ID NO: 401873 - RNA, 32 nt, Homo Sapiens
auaggucacuccuggggccucuuggguccccc

SEQ ID NO: 401874 - RNA, 32 nt, Homo Sapiens
caugcuucuaucuaaaugauaauuaaaaggaa

SEQ ID NO: 401875 - RNA, 29 nt, Homo Sapiens
gagaauuaauaaaguucuggacuuuugcu

SEQ ID NO: 401876 - RNA, 32 nt, Homo Sapiens
auuagaugaaaugugaggaucuuguucaaucg

SEQ ID NO: 401877 - RNA, 32 nt, Homo Sapiens
ggagcucagaaguugggcaaaggucacagcag

SEQ ID NO: 401878 - RNA, 32 nt, Homo Sapiens
cacgguuccugacaagucuagagcagcacuag

SEQ ID NO: 401879 - RNA, 32 nt, Homo Sapiens
aaagaacaaccugccacauugcugcuaucagg

SEQ ID NO: 401880 - RNA, 32 nt, Homo Sapiens
acucgcgcagcgcgggccuccgccggccgcau

SEQ ID NO: 401881 - RNA, 32 nt, Homo Sapiens
uaugcguuaaguguucaucuauguggguacau

SEQ ID NO: 401882 - RNA, 32 nt, Homo Sapiens
gacagacagagaaggcagcaggcggccuuugu

SEQ ID NO: 401883 - RNA, 32 nt, Homo Sapiens
gaugccguacucugcugguugcgcagccaccu

SEQ ID NO: 401884 - RNA, 32 nt, Homo Sapiens
agagacagcaagagauggcaagugacaguuau

SEQ ID NO: 401885 - RNA, 32 nt, Homo Sapiens
uuucaucuguuguauacaaguggaaaggguau

SEQ ID NO: 401886 - RNA, 32 nt, Homo Sapiens
caacacagaaacugaacaaaaugagaugaaag

SEQ ID NO: 401887 - RNA, 32 nt, Homo Sapiens
agacgcuggggaggaaacgugggcacaagggu

SEQ ID NO: 401888 - RNA, 32 nt, Homo Sapiens
uguguguacuuuggacaauaaauggugcuaug

SEQ ID NO: 401889 - RNA, 32 nt, Homo Sapiens
uuuuaaauauuuuuucuuuucuauuguuguac

SEQ ID NO: 401890 - RNA, 32 nt, Homo Sapiens
cugcuucucaacaaccucuuuggacucagugc

SEQ ID NO: 401891 - RNA, 32 nt, Homo Sapiens
auuacccuuauuuugaauugcuccaucuccug

SEQ ID NO: 401892 - RNA, 32 nt, Homo Sapiens
ccaucauuguuauuuuaacgauaguaauucac

SEQ ID NO: 401893 - RNA, 32 nt, Homo Sapiens
uucuuuaaaaauuuaaauuuuaguguguauau

SEQ ID NO: 401894 - RNA, 32 nt, Homo Sapiens
gggaguagguaaacucaaacaucccuaccauc

SEQ ID NO: 401895 - RNA, 32 nt, Homo Sapiens
uucccguuggcgccgcggcccgggcgcuucag

SEQ ID NO: 401896 - RNA, 32 nt, Homo Sapiens
gcuuccugugaauugucuuuuacuggcaucuu

SEQ ID NO: 401897 - RNA, 32 nt, Homo Sapiens
acauuauaaaauggcuucaguugugugaaaag

SEQ ID NO: 401898 - RNA, 32 nt, Homo Sapiens
acgauaaggcaguaaacauggagacacggggg

SEQ ID NO: 401899 - RNA, 32 nt, Homo Sapiens
caggagucggcggaccgcggcgcgggcgaacu

SEQ ID NO: 401900 - RNA, 32 nt, Homo Sapiens
cguuaggccguucuuucacugcuauaaagaaa

SEQ ID NO: 401901 - RNA, 32 nt, Homo Sapiens
aguguauuuucuucuuuuuuuuuuuuuuuuug

SEQ ID NO: 401902 - RNA, 32 nt, Homo Sapiens
cauugauggaauaacucuguggcauuauugca

SEQ ID NO: 401903 - RNA, 32 nt, Homo Sapiens
acagcaaggagcucagccagccgugguggggu

SEQ ID NO: 401904 - RNA, 32 nt, Homo Sapiens
cggagugcgggccgcgcacggugccaggauuc

SEQ ID NO: 401905 - RNA, 32 nt, Homo Sapiens
uacugucuuugccuugucuccucccaaguugg

SEQ ID NO: 401906 - RNA, 32 nt, Homo Sapiens
ugacagacguaacagugcgcauuuaucacgca

SEQ ID NO: 401907 - RNA, 32 nt, Homo Sapiens
gcugugacuccucccugacuaguggccaaggu

SEQ ID NO: 401908 - RNA, 32 nt, Homo Sapiens
uaacacgggucguucugcagcccgcuucagca

SEQ ID NO: 401909 - RNA, 30 nt, Homo Sapiens
gggacggccaccacggcgccggcgcgcagc

SEQ ID NO: 401910 - RNA, 32 nt, Homo Sapiens
ucaggggcuggguaugcuucaugaccuguguu

SEQ ID NO: 401911 - RNA, 32 nt, Homo Sapiens
gaacguguccaggggccgacccggcccguagu

SEQ ID NO: 401912 - RNA, 32 nt, Homo Sapiens
agcaaagaaaaauaaaaaauacugaaaagaaa

SEQ ID NO: 401913 - RNA, 32 nt, Homo Sapiens
gaaacgcgggacagcugauugcucuccuuggc

SEQ ID NO: 401914 - RNA, 32 nt, Homo Sapiens
ccugcccuccgacggcgucuccaggccccaaa

SEQ ID NO: 401915 - RNA, 32 nt, Homo Sapiens
gaggaugaccaucuccacuuucuggaaccaga

SEQ ID NO: 401916 - RNA, 32 nt, Homo Sapiens
ccaggccuaccuuguacuuucccugcugcagc

SEQ ID NO: 401917 - RNA, 32 nt, Homo Sapiens
uagaccuaguuaggaaguaucauuuuaagcua

SEQ ID NO: 401918 - RNA, 32 nt, Homo Sapiens
uuuacagauaauggaggugucuguguauguug

SEQ ID NO: 401919 - RNA, 32 nt, Homo Sapiens
acucaggagaucugggggagguuucauuuaaa

SEQ ID NO: 401920 - RNA, 32 nt, Homo Sapiens
ggcuccccgcggcucgggugacagcgucgcgg

SEQ ID NO: 401921 - RNA, 32 nt, Homo Sapiens
gggaaggagggcgggucggggaggagggaugc

SEQ ID NO: 401922 - RNA, 31 nt, Homo Sapiens
ugugcucccgauagaaagucccccuuggucg

SEQ ID NO: 401923 - RNA, 32 nt, Homo Sapiens
guccucgggaugcagugacugagauaggggcc

SEQ ID NO: 401924 - RNA, 32 nt, Homo Sapiens
uggacuuuaaauuuuaaagagcucauuugcaa

SEQ ID NO: 401925 - RNA, 32 nt, Homo Sapiens
accuuuuacguuaaaauuacuuugaaagauga

SEQ ID NO: 401926 - RNA, 32 nt, Homo Sapiens
gaccaggauugugaaagaguucuucuguuugu

SEQ ID NO: 401927 - RNA, 32 nt, Homo Sapiens
augagucagaacuuaguuuugauguagguaaa

SEQ ID NO: 401928 - RNA, 32 nt, Homo Sapiens
uccauggauaaugcauuugauuuaucagugaa

SEQ ID NO: 401929 - RNA, 32 nt, Homo Sapiens
uuuauaacaggauauuaacauaaguuaaaucc

SEQ ID NO: 401930 - RNA, 32 nt, Homo Sapiens
gaggcggaccccugcauccuucugccuugggc

SEQ ID NO: 401931 - RNA, 32 nt, Homo Sapiens
guggaguugaugacuuucuguuuucuguuugu

SEQ ID NO: 401932 - RNA, 32 nt, Homo Sapiens
ggaucagcacugaaagugacgccauaucccac

SEQ ID NO: 401933 - RNA, 32 nt, Homo Sapiens
ucaacagcaaaauaauauuuugcccacccugu

SEQ ID NO: 401934 - RNA, 32 nt, Homo Sapiens
aaugaaagaaccaaggggaggggugggauggc

SEQ ID NO: 401935 - RNA, 32 nt, Homo Sapiens
aaauauccaucuucuuuuuguggcugcuaaug

SEQ ID NO: 401936 - RNA, 32 nt, Homo Sapiens
acagcaacaaauaagauacauaaaacuacaaa

SEQ ID NO: 401937 - RNA, 32 nt, Homo Sapiens
gagagauguuaccaaagguacaggauuugaga

SEQ ID NO: 401938 - RNA, 32 nt, Homo Sapiens
ggcugcuccgcggagcagcgccuagggcugga

SEQ ID NO: 401939 - RNA, 26 nt, Homo Sapiens
gagccaauuaaaccucuuuaugaauu

SEQ ID NO: 401940 - RNA, 32 nt, Homo Sapiens
cauuauuuaaguguuuauggugcugguguaaa

SEQ ID NO: 401941 - RNA, 32 nt, Homo Sapiens
ccuacaucuguuuugcugaaucuccuaguaaa

SEQ ID NO: 401942 - RNA, 32 nt, Homo Sapiens
ccgcaggacggccucuauuaccucuacugucu

SEQ ID NO: 401943 - RNA, 32 nt, Homo Sapiens
auccgauugaugaagaaaauagauaaucuugu

SEQ ID NO: 401944 - RNA, 32 nt, Homo Sapiens
uaagcaauucuccugcuucaaccucuagagua

SEQ ID NO: 401945 - RNA, 31 nt, Homo Sapiens
acuuugaaauaaaauuguuauguuugaaaga

SEQ ID NO: 401946 - RNA, 31 nt, Homo Sapiens
ugucauaagcagucugauaaccaguuuauug

SEQ ID NO: 401947 - RNA, 32 nt, Homo Sapiens
auauagacggucugcccucccccacucaaacc

SEQ ID NO: 401948 - RNA, 32 nt, Homo Sapiens
cuguguugggccgcaaccuagacuacguuugu

SEQ ID NO: 401949 - RNA, 32 nt, Homo Sapiens
ggucgcggcgucucgcuccggucgggaggacu

SEQ ID NO: 401950 - RNA, 32 nt, Homo Sapiens
gacugguuagacagauuuuguuuuucuucuuc

SEQ ID NO: 401951 - RNA, 32 nt, Homo Sapiens
gauuuugguccuccuccgcugucccccaacac

SEQ ID NO: 401952 - RNA, 32 nt, Homo Sapiens
uuccucagagaagugaggugggaaauaugacc

SEQ ID NO: 401953 - RNA, 32 nt, Homo Sapiens
uaauuauuguauaaguuugguugguauaaugg

SEQ ID NO: 401954 - RNA, 32 nt, Homo Sapiens
ucacgugugaaaguaacaugggacaugccuuu

SEQ ID NO: 401955 - RNA, 32 nt, Homo Sapiens
cagcugggccugguggugggcgccuguaauuc

SEQ ID NO: 401956 - RNA, 32 nt, Homo Sapiens
cuccaaaguucaaaaacucaugaauaccacau

SEQ ID NO: 401957 - RNA, 32 nt, Homo Sapiens
cugcagucgggcacgccgcgggcccggggccu

SEQ ID NO: 401958 - RNA, 32 nt, Homo Sapiens
cucugauuucccuuuggacuucauguauauug

SEQ ID NO: 401959 - RNA, 32 nt, Homo Sapiens
uuucuuuaaaagacaaaucaaagcagauauau

SEQ ID NO: 401960 - RNA, 32 nt, Homo Sapiens
gaagauucucuuaaagaaauuaugaaaaaugu

SEQ ID NO: 401961 - RNA, 32 nt, Homo Sapiens
gaaacauuugauaauguacaaaguagucuaua

SEQ ID NO: 401962 - RNA, 32 nt, Homo Sapiens
gaaaaauuauuucugacuuacuccauggccuc

SEQ ID NO: 401963 - RNA, 32 nt, Homo Sapiens
cucaucuuccccagcccuccccaccugcucac

SEQ ID NO: 401964 - RNA, 32 nt, Homo Sapiens
cgaguggcacaucccaccugcugauuccagcu

SEQ ID NO: 401965 - RNA, 32 nt, Homo Sapiens
ugcagggaugagcuugccuuuccccggggcca

SEQ ID NO: 401966 - RNA, 32 nt, Homo Sapiens
aaacucggauuuuccguuucucucuucuccua

SEQ ID NO: 401967 - RNA, 32 nt, Homo Sapiens
gauacauuuuaauuuuagcuuuauuugcugua

SEQ ID NO: 401968 - RNA, 32 nt, Homo Sapiens
ugcaggagugguccaggcagggggugacgggu

SEQ ID NO: 401969 - RNA, 32 nt, Homo Sapiens
gugucauggauggaucugggggugucagacag

SEQ ID NO: 401970 - RNA, 32 nt, Homo Sapiens
gaaggaaggaggagggcgcccauucgucuguc

SEQ ID NO: 401971 - RNA, 32 nt, Homo Sapiens
cauuauugaacuguuccugcaaugcaaagugu

SEQ ID NO: 401972 - RNA, 32 nt, Homo Sapiens
uggcuccaggccguucuccuccccugagcauc

SEQ ID NO: 401973 - RNA, 32 nt, Homo Sapiens
aagcauuguaccuagugguaccuagugacuuc

SEQ ID NO: 401974 - RNA, 32 nt, Homo Sapiens
cacuacgaaaauuugaaaccaagggacaagac

SEQ ID NO: 401975 - RNA, 32 nt, Homo Sapiens
uggugcuggaucuccuucaggucuuucucaca

SEQ ID NO: 401976 - RNA, 32 nt, Homo Sapiens
gugacgcacacuuccccccuccccuccgccgc

SEQ ID NO: 401977 - RNA, 32 nt, Homo Sapiens
gacccagugucugcuccugucaccuucgccuc

SEQ ID NO: 401978 - RNA, 32 nt, Homo Sapiens
aagguuccaucccauggaagccacguuccaga

SEQ ID NO: 401979 - RNA, 32 nt, Homo Sapiens
uaaaaagguguuuugucuggaacuuagaagca

SEQ ID NO: 401980 - RNA, 32 nt, Homo Sapiens
ugcuggggacggccacugcucccugguguccc

SEQ ID NO: 401981 - RNA, 32 nt, Homo Sapiens
cucacagaagaccccuggaacccagagcaaua

SEQ ID NO: 401982 - RNA, 32 nt, Homo Sapiens
uccuggcugggccagcagcugcaccucuccug

SEQ ID NO: 401983 - RNA, 32 nt, Homo Sapiens
agaaguaaaugcaaaaucaugcugccguguuc

SEQ ID NO: 401984 - RNA, 32 nt, Homo Sapiens
ugccggccgcgguggcucaugccuguaauccc

SEQ ID NO: 401985 - RNA, 32 nt, Homo Sapiens
uccugagccugggccugguacccccaguccgc

SEQ ID NO: 401986 - RNA, 32 nt, Homo Sapiens
ucuucuauguuuagucaauauucauuucagua

SEQ ID NO: 401987 - RNA, 32 nt, Homo Sapiens
ucugugcagcgagcagccggcgcggggaggcc

SEQ ID NO: 401988 - RNA, 28 nt, Homo Sapiens
aagcauguaaaauaaacuggucuucaug

SEQ ID NO: 401989 - RNA, 32 nt, Homo Sapiens
cacaccauucagaacauguacuuuugccaacc

SEQ ID NO: 401990 - RNA, 32 nt, Homo Sapiens
cggccgcaggacucccaccucucuuugccggg

SEQ ID NO: 401991 - RNA, 32 nt, Homo Sapiens
cccgccugagaacugcacacccugcccgcugg

SEQ ID NO: 401992 - RNA, 32 nt, Homo Sapiens
cuacccuccucccccaggaccugccuagugcc

SEQ ID NO: 401993 - RNA, 32 nt, Homo Sapiens
caaaaaguauuuucaaucuugguugcauuggc

SEQ ID NO: 401994 - RNA, 32 nt, Homo Sapiens
auuuccagaucaucuguaaaccuacaacuuua

SEQ ID NO: 401995 - RNA, 32 nt, Homo Sapiens
caucuccagcauuuccucucaccuccguguuc

SEQ ID NO: 401996 - RNA, 32 nt, Homo Sapiens
agcggagggguguguccaccgagcacuuggau

SEQ ID NO: 401997 - RNA, 32 nt, Homo Sapiens
aggccacacagauguugugaccucaacagcuu

SEQ ID NO: 401998 - RNA, 32 nt, Homo Sapiens
gagguagaugggcucccggcccgggaggcggc

SEQ ID NO: 401999 - RNA, 32 nt, Homo Sapiens
ugcacacaugucuuuacccaggagcccagggg

SEQ ID NO: 402000 - RNA, 32 nt, Homo Sapiens
uggcuuuuacuuugccuuuccauaaucaucuu

SEQ ID NO: 402001 - RNA, 32 nt, Homo Sapiens
agguugaaggacccaggcgugucagcccugcu

SEQ ID NO: 402002 - RNA, 32 nt, Homo Sapiens
cacgaggcuuccaggagaugaaggaugcucag

SEQ ID NO: 402003 - RNA, 32 nt, Homo Sapiens
gaggggaggaggagaagcugagcacgugugac

SEQ ID NO: 402004 - RNA, 32 nt, Homo Sapiens
uccucuguguguauuucauaaguuauuacagg

SEQ ID NO: 402005 - RNA, 32 nt, Homo Sapiens
aguuacauaacacuaauacuuauaaccuauca

SEQ ID NO: 402006 - RNA, 32 nt, Homo Sapiens
uucuaucugcaccugcucucaauccugcucuc

SEQ ID NO: 402007 - RNA, 32 nt, Homo Sapiens
uuccuuuuggguguauuuugcuaagugaaacu

SEQ ID NO: 402008 - RNA, 32 nt, Homo Sapiens
cggucccugugcuccaaacgagaagagaagag

SEQ ID NO: 402009 - RNA, 32 nt, Homo Sapiens
cgcgaucuugacucacugcaaucuccaccucc

SEQ ID NO: 402010 - RNA, 32 nt, Homo Sapiens
gaggagaaagacuguaaugaaacuacuagacc

SEQ ID NO: 402011 - RNA, 32 nt, Homo Sapiens
uaauaauuugaaauaaaacuaaggaaauggaa

SEQ ID NO: 402012 - RNA, 32 nt, Homo Sapiens
agacucagcuuuuaucaaaacuuguuuaaaua

SEQ ID NO: 402013 - RNA, 32 nt, Homo Sapiens
cuuccuccuuggcucccuggcuccugcaccug

SEQ ID NO: 402014 - RNA, 32 nt, Homo Sapiens
auuuuauuuuuggcugcucggguaacuuuagc

SEQ ID NO: 402015 - RNA, 32 nt, Homo Sapiens
ugccuuguucccucccuggcccucaggcccuc

SEQ ID NO: 402016 - RNA, 32 nt, Homo Sapiens
uccagacgaaaggggacccccggagcggccgu

SEQ ID NO: 402017 - RNA, 32 nt, Homo Sapiens
gucggugccccggccccucccgcagcguuacu

SEQ ID NO: 402018 - RNA, 32 nt, Homo Sapiens
ggcacuggcccggcccgcaccuuccuagcagc

SEQ ID NO: 402019 - RNA, 32 nt, Homo Sapiens
gagcaguuagacagcuuggauuuuggggggug

SEQ ID NO: 402020 - RNA, 32 nt, Homo Sapiens
cggagccccagccccaggggaccaugccgggg

SEQ ID NO: 402021 - RNA, 32 nt, Homo Sapiens
uuuaguaaugcucagcuggaccaguguuaguu

SEQ ID NO: 402022 - RNA, 32 nt, Homo Sapiens
ugagccucuccggcugccagccagggggccug

SEQ ID NO: 402023 - RNA, 32 nt, Homo Sapiens
gcaguggaauuugaacaaggaagaggagaaaa

SEQ ID NO: 402024 - RNA, 32 nt, Homo Sapiens
uguaggggccaccuccucccccuguucuguug

SEQ ID NO: 402025 - RNA, 32 nt, Homo Sapiens
accccacaacuuggggaucuagcugagacauu

SEQ ID NO: 402026 - RNA, 32 nt, Homo Sapiens
ccaccuucccccucucugucccgagaaggcuu

SEQ ID NO: 402027 - RNA, 32 nt, Homo Sapiens
ggcuguuggagauccaggugcgugccuucaac

SEQ ID NO: 402028 - RNA, 32 nt, Homo Sapiens
cguguauaagagcuacuuccaagugugguuac

SEQ ID NO: 402029 - RNA, 32 nt, Homo Sapiens
cgccgugccugccugcccugccuacugagaag

SEQ ID NO: 402030 - RNA, 32 nt, Homo Sapiens
ggcagcagggaagagggagcaaggcauugucc

SEQ ID NO: 402031 - RNA, 29 nt, Homo Sapiens
accuuuucuaaaguguauuuucugaugug

SEQ ID NO: 402032 - RNA, 32 nt, Homo Sapiens
cacaguggggaugggcugcaaguucuugcaua

SEQ ID NO: 402033 - RNA, 32 nt, Homo Sapiens
cauucacucuggagauucuagcaagaagugcc

SEQ ID NO: 402034 - RNA, 32 nt, Homo Sapiens
cgguagugguccgugaaguccgcggagugggc

SEQ ID NO: 402035 - RNA, 32 nt, Homo Sapiens
aauuuucaaaaauuguguuuagauuuuaugaa

SEQ ID NO: 402036 - RNA, 32 nt, Homo Sapiens
gucccaggacccuggacccagccagaacuugu

SEQ ID NO: 402037 - RNA, 32 nt, Homo Sapiens
cagaacccuaaauuauucuguuauuggaucug

SEQ ID NO: 402038 - RNA, 32 nt, Homo Sapiens
cgaagaauucuauaccucaggauuucaaaaag

SEQ ID NO: 402039 - RNA, 32 nt, Homo Sapiens
uucaugccauucuccugccccagcuucccgag

SEQ ID NO: 402040 - RNA, 32 nt, Homo Sapiens
ccugggacccauggcacaggccaggcagcccg

SEQ ID NO: 402041 - RNA, 32 nt, Homo Sapiens
uucauucugcugccgaagucuucugcuccuug

SEQ ID NO: 402042 - RNA, 32 nt, Homo Sapiens
ucagcgauuugugcuuguuugugcuagaagaa

SEQ ID NO: 402043 - RNA, 32 nt, Homo Sapiens
gggucucugcuucccuaaccacuuccuccucc

SEQ ID NO: 402044 - RNA, 32 nt, Homo Sapiens
ucuuguuuaaguguuuacacaguuugguucaa

SEQ ID NO: 402045 - RNA, 32 nt, Homo Sapiens
caguccagcauucuuagaacagauggguuuag

SEQ ID NO: 402046 - RNA, 32 nt, Homo Sapiens
gagcuuaagguaacuuuugcguagcuacaaag

SEQ ID NO: 402047 - RNA, 32 nt, Homo Sapiens
acauucuucagaagcuuuugaacucuaaaccc

SEQ ID NO: 402048 - RNA, 32 nt, Homo Sapiens
aacaacaauuuaaaguacuuuuuauauauguu

SEQ ID NO: 402049 - RNA, 32 nt, Homo Sapiens
aaaagauuauagaaguagcaaaaaguauugaa

SEQ ID NO: 402050 - RNA, 32 nt, Homo Sapiens
ucucgguaaguccuuuaaaccauuuaggauuu

SEQ ID NO: 402051 - RNA, 32 nt, Homo Sapiens
gaggcggucccggucgcggaccaaguccaagg

SEQ ID NO: 402052 - RNA, 32 nt, Homo Sapiens
agaauaauagcuuugaaauacaauuagguuuu

SEQ ID NO: 402053 - RNA, 32 nt, Homo Sapiens
aaaacacccauuuaaacaaaaacaagagcauu

SEQ ID NO: 402054 - RNA, 32 nt, Homo Sapiens
auagauuccauguuuucuuguuuaucacacau

SEQ ID NO: 402055 - RNA, 32 nt, Homo Sapiens
augaagcacaaguggaauuuaauacauaaaag

SEQ ID NO: 402056 - RNA, 32 nt, Homo Sapiens
acuugcuuaaauugugggcaaaagagaaaaag

SEQ ID NO: 402057 - RNA, 32 nt, Homo Sapiens
gccaucccauagcuccuccucuucuggcugcc

SEQ ID NO: 402058 - RNA, 32 nt, Homo Sapiens
guccuuccuucccacacuagccucccuggggu

SEQ ID NO: 402059 - RNA, 32 nt, Homo Sapiens
gagagccacgugaacauccggcgaaggggacc

SEQ ID NO: 402060 - RNA, 32 nt, Homo Sapiens
gcucugcagccccaagcaucuuuccagugggg

SEQ ID NO: 402061 - RNA, 32 nt, Homo Sapiens
gacgggaaauacacagcauagcuuugaaauaa

SEQ ID NO: 402062 - RNA, 32 nt, Homo Sapiens
guuuauuguuuuuaugaguaaauacaugcauu

SEQ ID NO: 402063 - RNA, 32 nt, Homo Sapiens
uaaugaaaaagaagaacuuuugaaagagcuuc

SEQ ID NO: 402064 - RNA, 32 nt, Homo Sapiens
ugucucaaaaacaguaaaaaaugaaaauggca

SEQ ID NO: 402065 - RNA, 32 nt, Homo Sapiens
gccagaacaaggaaacacaguauuggaauagg

SEQ ID NO: 402066 - RNA, 32 nt, Homo Sapiens
ucgccccagcccaguccaacccggcccagccu

SEQ ID NO: 402067 - RNA, 32 nt, Homo Sapiens
aaucugagagcaaugguuuuuacuucucugug

SEQ ID NO: 402068 - RNA, 32 nt, Homo Sapiens
ugcuucuuuguacuuuuucuacuuuuccuacu

SEQ ID NO: 402069 - RNA, 25 nt, Homo Sapiens
auggcgggggccgugccgggcgcca

SEQ ID NO: 402070 - RNA, 32 nt, Homo Sapiens
aaacaaucuucagauggcuugaacacgugcca

SEQ ID NO: 402071 - RNA, 32 nt, Homo Sapiens
uaauugcacugaccaugucacuaggccacagg

SEQ ID NO: 402072 - RNA, 32 nt, Homo Sapiens
augugccgaagugguugggcuccagcuucuuu

SEQ ID NO: 402073 - RNA, 32 nt, Homo Sapiens
cccugccccccucccaugggcacggacccccc

SEQ ID NO: 402074 - RNA, 31 nt, Homo Sapiens
cgaccagaugcaccagcaggaguccacaucg

SEQ ID NO: 402075 - RNA, 32 nt, Homo Sapiens
caugaauucuugauuuccuuucaguggcccuu

SEQ ID NO: 402076 - RNA, 32 nt, Homo Sapiens
ucaguuaaauagcuuauuccugucccacuuga

SEQ ID NO: 402077 - RNA, 32 nt, Homo Sapiens
caucacucccugcuuccgcagggcgccccuca

SEQ ID NO: 402078 - RNA, 32 nt, Homo Sapiens
ucagugggugcagccugcuugcgagcugaggc

SEQ ID NO: 402079 - RNA, 32 nt, Homo Sapiens
gcacagggcucugcgagugacccggcgggcga

SEQ ID NO: 402080 - RNA, 32 nt, Homo Sapiens
caggauuguggaguuucuuuuacagccacaug

SEQ ID NO: 402081 - RNA, 32 nt, Homo Sapiens
acuaagguuuuagguugacuagugguuguagu

SEQ ID NO: 402082 - RNA, 32 nt, Homo Sapiens
uagcuuggccuuugcgcuuugauuccagauag

SEQ ID NO: 402083 - RNA, 32 nt, Homo Sapiens
ugcgccucacugccacauuggugcuguuguau

SEQ ID NO: 402084 - RNA, 32 nt, Homo Sapiens
aauauaugaagaaauugggucugucuaaagag

SEQ ID NO: 402085 - RNA, 32 nt, Homo Sapiens
agcaauacauaaaugugcagcaaaauguuuac

SEQ ID NO: 402086 - RNA, 32 nt, Homo Sapiens
gaagggcagcauauaaaaacaucagucccgag

SEQ ID NO: 402087 - RNA, 30 nt, Homo Sapiens
ucugggcgcgcgcgacgucaguuugaguuc

SEQ ID NO: 402088 - RNA, 32 nt, Homo Sapiens
ggugaagaaugucuggcuccagcccuuucucu

SEQ ID NO: 402089 - RNA, 32 nt, Homo Sapiens
cgcucuucacuugaaaucaugucccuauuucu

SEQ ID NO: 402090 - RNA, 32 nt, Homo Sapiens
cucugucucaaaaacaaacaaacaaacaaaca

SEQ ID NO: 402091 - RNA, 32 nt, Homo Sapiens
ccaguagcuugcagaguagacacgaugacacc

SEQ ID NO: 402092 - RNA, 32 nt, Homo Sapiens
augguguuggauuauuucaauggugggguuaa

SEQ ID NO: 402093 - RNA, 32 nt, Homo Sapiens
uucccgcaucgcucccucuccugccuuugacc

SEQ ID NO: 402094 - RNA, 32 nt, Homo Sapiens
ggucucacaguguugcccaggcuggucucaaa

SEQ ID NO: 402095 - RNA, 27 nt, Homo Sapiens
aaauguccucggccguggggccccgcg

SEQ ID NO: 402096 - RNA, 32 nt, Homo Sapiens
ccgccuccggugcauggggacuggcugaggag

SEQ ID NO: 402097 - RNA, 32 nt, Homo Sapiens
cuuuaaaaaaaaucauaaaaucuuauagucaa

SEQ ID NO: 402098 - RNA, 32 nt, Homo Sapiens
ccucuccugccagccuccuccucccugcaagu

SEQ ID NO: 402099 - RNA, 32 nt, Homo Sapiens
uauguauuuguaaaaaugguuuccugugucaa

SEQ ID NO: 402100 - RNA, 32 nt, Homo Sapiens
uggggguagugggaggagaacggucagaauca

SEQ ID NO: 402101 - RNA, 32 nt, Homo Sapiens
guguauuugucuuuuuauuuuaucuguauaau

SEQ ID NO: 402102 - RNA, 32 nt, Homo Sapiens
gauugcuugagcccagggauuugagaucagcc

SEQ ID NO: 402103 - RNA, 32 nt, Homo Sapiens
aagggguguugcaccuaaucaucagaggugca

SEQ ID NO: 402104 - RNA, 32 nt, Homo Sapiens
uaggcggagcgggggcucaggcggcggcggcc

SEQ ID NO: 402105 - RNA, 32 nt, Homo Sapiens
uaaaggagaaugaacagaaggugcuggaggac

SEQ ID NO: 402106 - RNA, 32 nt, Homo Sapiens
guacaaauauguaaguaguuuauuuuuaauaa

SEQ ID NO: 402107 - RNA, 32 nt, Homo Sapiens
auuuugcuucuuccuuuccagucuggaugccu

SEQ ID NO: 402108 - RNA, 32 nt, Homo Sapiens
ugugaccucccauggagcccagccccgcccuc

SEQ ID NO: 402109 - RNA, 32 nt, Homo Sapiens
uuuaaagacagaguuugaaacucaucuuggua

SEQ ID NO: 402110 - RNA, 32 nt, Homo Sapiens
gcuacugcacuccagccugggcgacagagcga

SEQ ID NO: 402111 - RNA, 32 nt, Homo Sapiens
cccaagaaaaagaaaaauguuguuacugaaau

SEQ ID NO: 402112 - RNA, 32 nt, Homo Sapiens
ucuuaauauauaaaccauauugaaagaaagaa

SEQ ID NO: 402113 - RNA, 32 nt, Homo Sapiens
ggaauuugcauccagcagcagcacuuagaccu

SEQ ID NO: 402114 - RNA, 32 nt, Homo Sapiens
ggcucaggaaaugacuucaccuauuuuuucca

SEQ ID NO: 402115 - RNA, 32 nt, Homo Sapiens
ccagugcccacccauccccccaggcuggacuu

SEQ ID NO: 402116 - RNA, 32 nt, Homo Sapiens
uuaugauguaaaucucuuucucuauggauuau

SEQ ID NO: 402117 - RNA, 32 nt, Homo Sapiens
cuagaagucuuaauuguguuuauuuuuuaaaa

SEQ ID NO: 402118 - RNA, 32 nt, Homo Sapiens
augucccugucccucucgcccuggccagggcc

SEQ ID NO: 402119 - RNA, 32 nt, Homo Sapiens
gugccugugccccaggucccagcccuggcccu

SEQ ID NO: 402120 - RNA, 32 nt, Homo Sapiens
agccaggugcggcccaggaucccgggaaaggc

SEQ ID NO: 402121 - RNA, 32 nt, Homo Sapiens
ugugcagcuccaucaaccguaagauuuuaguu

SEQ ID NO: 402122 - RNA, 32 nt, Homo Sapiens
agccgggccugccuguuccgcaauguggcuga

SEQ ID NO: 402123 - RNA, 32 nt, Homo Sapiens
auccacaugcguguugugugcucugcggugcc

SEQ ID NO: 402124 - RNA, 32 nt, Homo Sapiens
auccccugcuaaggagcaggagcugcugggcc

SEQ ID NO: 402125 - RNA, 32 nt, Homo Sapiens
agaguucugaauaauuacuuugaaacuguagu

SEQ ID NO: 402126 - RNA, 32 nt, Homo Sapiens
cuaaauauuuuguuuauacuaagggacaauua

SEQ ID NO: 402127 - RNA, 32 nt, Homo Sapiens
gucacuccagcagcacaggggacgcaauggga

SEQ ID NO: 402128 - RNA, 32 nt, Homo Sapiens
ggcagcagcaguaggacuauaaaccacagcug

SEQ ID NO: 402129 - RNA, 32 nt, Homo Sapiens
ucugcaggcgugccccggcggcggcggagagc

SEQ ID NO: 402130 - RNA, 32 nt, Homo Sapiens
cucugccucacaggcucaagcaauucuccugc

SEQ ID NO: 402131 - RNA, 32 nt, Homo Sapiens
agaaaugauuuuuuuucuuaccuuuacauaug

SEQ ID NO: 402132 - RNA, 32 nt, Homo Sapiens
cagauauuagaauugaaaauaagaaucuuccc

SEQ ID NO: 402133 - RNA, 32 nt, Homo Sapiens
agcuacaggaccccgcucuacuccauggccuc

SEQ ID NO: 402134 - RNA, 32 nt, Homo Sapiens
cucaucuucuaggccuuuuccauccaaccagg

SEQ ID NO: 402135 - RNA, 32 nt, Homo Sapiens
agcuuaugguaguucauaaaucuucauguucu

SEQ ID NO: 402136 - RNA, 32 nt, Homo Sapiens
acguggaggagagucaaggaaaacucuuggga

SEQ ID NO: 402137 - RNA, 32 nt, Homo Sapiens
ccacagacugguuuugcaacguuuacaccgac

SEQ ID NO: 402138 - RNA, 31 nt, Homo Sapiens
gcucaaagguggaguacuagagccuggccaa

SEQ ID NO: 402139 - RNA, 32 nt, Homo Sapiens
uauauuuucauauaacauaauuugauauucug

SEQ ID NO: 402140 - RNA, 32 nt, Homo Sapiens
ugaggccugggugauuuauuuauugggaaagu

SEQ ID NO: 402141 - RNA, 32 nt, Homo Sapiens
gagcuucucugcauaauuuaaauguucagaua

SEQ ID NO: 402142 - RNA, 32 nt, Homo Sapiens
caaaacugacuuggucccacuuggaggcccca

SEQ ID NO: 402143 - RNA, 32 nt, Homo Sapiens
agugaccuacccaaaaguuacccaaggagaaa

SEQ ID NO: 402144 - RNA, 32 nt, Homo Sapiens
ucagcgauccugggcuucucgggucaggccaa

SEQ ID NO: 402145 - RNA, 32 nt, Homo Sapiens
uaaguuuccugaggccucccccgccaugugga

SEQ ID NO: 402146 - RNA, 32 nt, Homo Sapiens
gaugaugaagguggcccagccucauuaccaga

SEQ ID NO: 402147 - RNA, 32 nt, Homo Sapiens
uauuuaagguucaaaaucaagugccuagggaa

SEQ ID NO: 402148 - RNA, 32 nt, Homo Sapiens
gggugccuaugccaccaaggcccuggguuuca

SEQ ID NO: 402149 - RNA, 32 nt, Homo Sapiens
gcagucauuaguagaaaauuuuuuaggacucu

SEQ ID NO: 402150 - RNA, 32 nt, Homo Sapiens
cacccccauccacaguugucaguugugaagag

SEQ ID NO: 402151 - RNA, 32 nt, Homo Sapiens
uggccccagaaagcugaggagugugggcuggc

SEQ ID NO: 402152 - RNA, 32 nt, Homo Sapiens
gaaggauuagcccgucauucugaugggguuuu

SEQ ID NO: 402153 - RNA, 32 nt, Homo Sapiens
ugucguggagccauugaacagcugugagccau

SEQ ID NO: 402154 - RNA, 32 nt, Homo Sapiens
agcgaagaacauugugcugaaguuugaaggga

SEQ ID NO: 402155 - RNA, 32 nt, Homo Sapiens
cagcgccugccugcccggggugugcacagagc

SEQ ID NO: 402156 - RNA, 32 nt, Homo Sapiens
guuuaucacaccuuuaucuuggucuuuguuga

SEQ ID NO: 402157 - RNA, 32 nt, Homo Sapiens
uuccccacacccaaagaucccagccuagggau

SEQ ID NO: 402158 - RNA, 32 nt, Homo Sapiens
agaacuuguuaaaaauacauuuuaauuuauga

SEQ ID NO: 402159 - RNA, 32 nt, Homo Sapiens
cucaggcggcucuggcguggcugggguuuggu

SEQ ID NO: 402160 - RNA, 32 nt, Homo Sapiens
cugcacccgagcucacgccccgcggccgcuuu

SEQ ID NO: 402161 - RNA, 32 nt, Homo Sapiens
uuguagaugaagaaacucagcagcgccggcgg

SEQ ID NO: 402162 - RNA, 32 nt, Homo Sapiens
acccuccuuucuuaagcauuagagaccagaca

SEQ ID NO: 402163 - RNA, 32 nt, Homo Sapiens
uauacucacuuugcuauguuaagccucaaagu

SEQ ID NO: 402164 - RNA, 32 nt, Homo Sapiens
ucuuuccaaauuauuucuuaauuauuauaaaa

SEQ ID NO: 402165 - RNA, 32 nt, Homo Sapiens
uccagagucugaugcaagagaagauaaggaag

SEQ ID NO: 402166 - RNA, 32 nt, Homo Sapiens
agccacagaaaugucacauuaagcaaagcagc

SEQ ID NO: 402167 - RNA, 32 nt, Homo Sapiens
aaaauuauauuuaaaauuguaaucaaaaugua

SEQ ID NO: 402168 - RNA, 32 nt, Homo Sapiens
uaaguuacaaauagcaagguacagucagaugu

SEQ ID NO: 402169 - RNA, 32 nt, Homo Sapiens
ccccuuccaaaaaauuucaaugauugugauuu

SEQ ID NO: 402170 - RNA, 32 nt, Homo Sapiens
aaacaguguauuacauagugauauugagagug

SEQ ID NO: 402171 - RNA, 32 nt, Homo Sapiens
guguuuccacuuuauacucuuuguccaaaacu

SEQ ID NO: 402172 - RNA, 31 nt, Homo Sapiens
gagagagaucagcgcagccaggcaagggaac

SEQ ID NO: 402173 - RNA, 32 nt, Homo Sapiens
ugggcugcugcaggccgugugucugucagccc

SEQ ID NO: 402174 - RNA, 32 nt, Homo Sapiens
cuuuuuugucuuucuucucuuaauuuuuaaau

SEQ ID NO: 402175 - RNA, 28 nt, Homo Sapiens
ggcgcaggugaggggccgaggugugcgc

SEQ ID NO: 402176 - RNA, 32 nt, Homo Sapiens
ggcgggcugggugacggucccucugaucacgg

SEQ ID NO: 402177 - RNA, 32 nt, Homo Sapiens
ggugggcaggcggcccgggcgaggggcucgca

SEQ ID NO: 402178 - RNA, 32 nt, Homo Sapiens
uaucugucauauuuauccugugagucauugug

SEQ ID NO: 402179 - RNA, 32 nt, Homo Sapiens
gcauuguuaccccgcccuccccucucucauuu

SEQ ID NO: 402180 - RNA, 32 nt, Homo Sapiens
uauauucucuacaaagaccuuauuuccaaaua

SEQ ID NO: 402181 - RNA, 32 nt, Homo Sapiens
cacugugcuucccugcagacaccuagagcuca

SEQ ID NO: 402182 - RNA, 32 nt, Homo Sapiens
ugcucccuuuuggaacacugccuuccuuacug

SEQ ID NO: 402183 - RNA, 32 nt, Homo Sapiens
ucaccguuggagggccggggggugcugguggu

SEQ ID NO: 402184 - RNA, 32 nt, Homo Sapiens
uuuaaugucaggcuuuagauuagaccagcagu

SEQ ID NO: 402185 - RNA, 32 nt, Homo Sapiens
cauugaauauccacaagcaucaagaccaucca

SEQ ID NO: 402186 - RNA, 32 nt, Homo Sapiens
accaggcugcugucuccuccccagaaagaguc

SEQ ID NO: 402187 - RNA, 32 nt, Homo Sapiens
uuuugugauuaauugcuguuacuaguacuaag

SEQ ID NO: 402188 - RNA, 32 nt, Homo Sapiens
gccucccuccucugcacuguccugcacucuuu

SEQ ID NO: 402189 - RNA, 32 nt, Homo Sapiens
cgccucugagcgcuucuguuccccuuacccgc

SEQ ID NO: 402190 - RNA, 32 nt, Homo Sapiens
gacuaguagcagcuggaaaauucugguuuuua

SEQ ID NO: 402191 - RNA, 32 nt, Homo Sapiens
augucgaaaucccgucucuacugaaaauacaa

SEQ ID NO: 402192 - RNA, 32 nt, Homo Sapiens
gugucuuugccauuuuagaagguuccagugag

SEQ ID NO: 402193 - RNA, 32 nt, Homo Sapiens
cuggcccgccccaccucggaggacggacuaac

SEQ ID NO: 402194 - RNA, 32 nt, Homo Sapiens
augcucuugaaagucuuuuucuuucuuuucuc

SEQ ID NO: 402195 - RNA, 32 nt, Homo Sapiens
guggugccuguaugacgccugcggcugcgacu

SEQ ID NO: 402196 - RNA, 32 nt, Homo Sapiens
caagcugcuuaaguucuuaaguauuguuugua

SEQ ID NO: 402197 - RNA, 32 nt, Homo Sapiens
aauauaguacucaaguauucuugauccugugu

SEQ ID NO: 402198 - RNA, 32 nt, Homo Sapiens
gcaggagucucggcugacauaauccucgaaug

SEQ ID NO: 402199 - RNA, 32 nt, Homo Sapiens
aaguaaugcaggauucugcaaacaaggugucg

SEQ ID NO: 402200 - RNA, 32 nt, Homo Sapiens
ucuucccuuguacaucgauuuuugggcccuag

SEQ ID NO: 402201 - RNA, 32 nt, Homo Sapiens
gaauuacaucugcaugcaauugccacuuuguc

SEQ ID NO: 402202 - RNA, 32 nt, Homo Sapiens
cgccuccucccuccccaagauggcguccuugc

SEQ ID NO: 402203 - RNA, 32 nt, Homo Sapiens
gccuggcuuucccuuccaguuccgggagagcg

SEQ ID NO: 402204 - RNA, 32 nt, Homo Sapiens
gaggacuuuaccugcuggccccgcaggccgcu

SEQ ID NO: 402205 - RNA, 32 nt, Homo Sapiens
ggagccagugccagccaucaccaaacuggucc

SEQ ID NO: 402206 - RNA, 32 nt, Homo Sapiens
cacgaggcugcgccgugccugccucgcgcucc

SEQ ID NO: 402207 - RNA, 32 nt, Homo Sapiens
uucagaugauaggugaauucccugccccuccc

SEQ ID NO: 402208 - RNA, 32 nt, Homo Sapiens
cuuggagcagugcuguuacaaugcgccaucgu

SEQ ID NO: 402209 - RNA, 32 nt, Homo Sapiens
cggccggaagcaccccaccccucugccugcug

SEQ ID NO: 402210 - RNA, 32 nt, Homo Sapiens
gcccggcccguguuggccccaggacuccuuug

SEQ ID NO: 402211 - RNA, 32 nt, Homo Sapiens
gggcgcuccucgccgcccgcacgcccucccca

SEQ ID NO: 402212 - RNA, 32 nt, Homo Sapiens
gugugaaccccauuggggugugcucaggguug

SEQ ID NO: 402213 - RNA, 32 nt, Homo Sapiens
auuucuaauguuuacuauauagaauuuccugu

SEQ ID NO: 402214 - RNA, 32 nt, Homo Sapiens
cagauuuugaccaagcauuuuguaagauugcc

SEQ ID NO: 402215 - RNA, 32 nt, Homo Sapiens
cccccaggaggccccugcugcagagagugcag

SEQ ID NO: 402216 - RNA, 32 nt, Homo Sapiens
gucccaggcccggcccggagcgagucccccag

SEQ ID NO: 402217 - RNA, 32 nt, Homo Sapiens
agcccucugcugagaauguaguauuguuuuuc

SEQ ID NO: 402218 - RNA, 32 nt, Homo Sapiens
cccggccggcccgaccccggccccggcccccg

SEQ ID NO: 402219 - RNA, 32 nt, Homo Sapiens
aaugugaugaauuguggcaaguuaacuucaag

SEQ ID NO: 402220 - RNA, 32 nt, Homo Sapiens
auauuuacuuuuuggaaugguguaagccuaac

SEQ ID NO: 402221 - RNA, 32 nt, Homo Sapiens
uugaacccaugaucugccauuuuuuagcauau

SEQ ID NO: 402222 - RNA, 32 nt, Homo Sapiens
cuuccuaauuuggagacaaaagccuuaauuga

SEQ ID NO: 402223 - RNA, 32 nt, Homo Sapiens
gggguuuccuucccucucuccguagcauccgu

SEQ ID NO: 402224 - RNA, 32 nt, Homo Sapiens
ggcagugcccaccccgcccacuggcgucugcg

SEQ ID NO: 402225 - RNA, 32 nt, Homo Sapiens
cauggugauaccccccuccccccaucucuacu

SEQ ID NO: 402226 - RNA, 32 nt, Homo Sapiens
ccuaacuacuuguuuugaaaguuucuugaaga

SEQ ID NO: 402227 - RNA, 32 nt, Homo Sapiens
acugauucaugggaaagggcuuugaaggaacu

SEQ ID NO: 402228 - RNA, 32 nt, Homo Sapiens
ugugggauuaugagauuaauccuuaaacuagc

SEQ ID NO: 402229 - RNA, 32 nt, Homo Sapiens
cccccaucaagcccuuuuagcuccacaaccua

SEQ ID NO: 402230 - RNA, 32 nt, Homo Sapiens
ccucuccgucugcuagggauaugauuuagggc

SEQ ID NO: 402231 - RNA, 32 nt, Homo Sapiens
uccuauguuuucugcuaguaguuuugcagcuu

SEQ ID NO: 402232 - RNA, 32 nt, Homo Sapiens
ggauccggcugagaccaacccgcggcgcaggu

SEQ ID NO: 402233 - RNA, 32 nt, Homo Sapiens
ugaaacaucuucucccaacacugcuuuaaugg

SEQ ID NO: 402234 - RNA, 32 nt, Homo Sapiens
gggagcggcgucgagugucuccgugcgcccgu

SEQ ID NO: 402235 - RNA, 32 nt, Homo Sapiens
cugggcuuccaaguuccugggggcugcaguga

SEQ ID NO: 402236 - RNA, 32 nt, Homo Sapiens
ccugccucggaagcuccuugggugugggugaa

SEQ ID NO: 402237 - RNA, 32 nt, Homo Sapiens
aaacuucuuuugccagaaguguggccugaguu

SEQ ID NO: 402238 - RNA, 32 nt, Homo Sapiens
cccgcgccagggaaggagcggcugcggccccc

SEQ ID NO: 402239 - RNA, 32 nt, Homo Sapiens
gaggaccucaguggccuauuacggagcccucu

SEQ ID NO: 402240 - RNA, 32 nt, Homo Sapiens
aaauuggaggguggagacuguggggaaggagu

SEQ ID NO: 402241 - RNA, 32 nt, Homo Sapiens
guaaccucaaggaaaccauaaagcuuggagug

SEQ ID NO: 402242 - RNA, 32 nt, Homo Sapiens
guggcccugcggcggcagaagcaagaagcgcu

SEQ ID NO: 402243 - RNA, 25 nt, Homo Sapiens
auggacaggugguaccugggcggca

SEQ ID NO: 402244 - RNA, 32 nt, Homo Sapiens
ccggcgcucaccuccgccaccuccucaggguu

SEQ ID NO: 402245 - RNA, 32 nt, Homo Sapiens
agaagggaagaaagaaacaaugucuaacccaa

SEQ ID NO: 402246 - RNA, 30 nt, Homo Sapiens
cucccggacugugcuggaagcuuagagcca

SEQ ID NO: 402247 - RNA, 32 nt, Homo Sapiens
aucugcuccuugagcaggcagaugaccuuccu

SEQ ID NO: 402248 - RNA, 32 nt, Homo Sapiens
ucugucugucuccagcccugucuuucuguucu

SEQ ID NO: 402249 - RNA, 32 nt, Homo Sapiens
aaguccagaaugagcugggcugguggagaauu

SEQ ID NO: 402250 - RNA, 32 nt, Homo Sapiens
aaaugccuuucuguguuucugaaucagaagca

SEQ ID NO: 402251 - RNA, 32 nt, Homo Sapiens
ggcaacugagaaagaacagagaagugacagcu

SEQ ID NO: 402252 - RNA, 32 nt, Homo Sapiens
aauguguugaugucauccagggucacgggagg

SEQ ID NO: 402253 - RNA, 31 nt, Homo Sapiens
gaaacugcgugacgcgcaggagucagacuuc

SEQ ID NO: 402254 - RNA, 32 nt, Homo Sapiens
auucaugaugugugugcuggagaucuggcacu

SEQ ID NO: 402255 - RNA, 32 nt, Homo Sapiens
gggccgccucugcggcagcgcuagucgccuuc

SEQ ID NO: 402256 - RNA, 32 nt, Homo Sapiens
caaccacucgguuuccuucggauuuuccuccc

SEQ ID NO: 402257 - RNA, 32 nt, Homo Sapiens
aauauaaaugaaugaaauauaaacugugagau

SEQ ID NO: 402258 - RNA, 32 nt, Homo Sapiens
uaaaauaucugcugccuauuagguucuucugu

SEQ ID NO: 402259 - RNA, 31 nt, Homo Sapiens
aguucauuuacucuugugccaaauggcaaca

SEQ ID NO: 402260 - RNA, 32 nt, Homo Sapiens
cagccagggagguguauccuccccggggucug

SEQ ID NO: 402261 - RNA, 32 nt, Homo Sapiens
aacagaaaccgucucuagcacaauauauuucu

SEQ ID NO: 402262 - RNA, 32 nt, Homo Sapiens
agaauaaugaaggcagaagagaaaaacgaagu

SEQ ID NO: 402263 - RNA, 32 nt, Homo Sapiens
gcauuuugaaauaaaaaacuuuuuauaccaaa

SEQ ID NO: 402264 - RNA, 32 nt, Homo Sapiens
caugucuugaugaggggaaccacaaagagcuu

SEQ ID NO: 402265 - RNA, 32 nt, Homo Sapiens
auguuuguccucacgcucccaagacugguuuu

SEQ ID NO: 402266 - RNA, 32 nt, Homo Sapiens
acccaggagcagcaggcuuuacgucuucagcc

SEQ ID NO: 402267 - RNA, 30 nt, Homo Sapiens
cagggugguucccuaccagccaggcuuacu

SEQ ID NO: 402268 - RNA, 32 nt, Homo Sapiens
ucccauucacgcccgccuaccaacaacaaacg

SEQ ID NO: 402269 - RNA, 32 nt, Homo Sapiens
ggugccaacaguguuaggccuggcacaguguc

SEQ ID NO: 402270 - RNA, 32 nt, Homo Sapiens
ccuguccgggggugggggcuaggggagggaua

SEQ ID NO: 402271 - RNA, 32 nt, Homo Sapiens
acaacccuuucccagcucuccuccccaacaaa

SEQ ID NO: 402272 - RNA, 32 nt, Homo Sapiens
ccaugggacuuccagugcuaaaacugggaaag

SEQ ID NO: 402273 - RNA, 32 nt, Homo Sapiens
gugauucugaugcaggcgagaguuggagaacc

SEQ ID NO: 402274 - RNA, 32 nt, Homo Sapiens
uugagaaucuaaaccaagagaagugagacaaa

SEQ ID NO: 402275 - RNA, 32 nt, Homo Sapiens
ugugauggcuuuuuuaucaaguagauugguaa

SEQ ID NO: 402276 - RNA, 32 nt, Homo Sapiens
augcgaaugcgaagguggcggccgagguggcg

SEQ ID NO: 402277 - RNA, 32 nt, Homo Sapiens
gggcuaaguggccgccggcguccggguacccg

SEQ ID NO: 402278 - RNA, 31 nt, Homo Sapiens
ccagaaagucacacucucagaucugugucaa

SEQ ID NO: 402279 - RNA, 32 nt, Homo Sapiens
auucaaaaagaaaaacaguaucuuauaugauu

SEQ ID NO: 402280 - RNA, 32 nt, Homo Sapiens
guagccuccaaccaugcaaugauucaauaaug

SEQ ID NO: 402281 - RNA, 32 nt, Homo Sapiens
gcaaguuucccgggccgcgcgccgcgcucgcu

SEQ ID NO: 402282 - RNA, 32 nt, Homo Sapiens
uuugugucgaagccccagugcucugccuggaa

SEQ ID NO: 402283 - RNA, 32 nt, Homo Sapiens
uaggcuccggugccccugcccggcucccgccg

SEQ ID NO: 402284 - RNA, 32 nt, Homo Sapiens
cauaagguaggcagaaaacuuaaaagaguuug

SEQ ID NO: 402285 - RNA, 32 nt, Homo Sapiens
gccgcuggucacuucgucaucauuuugccccu

SEQ ID NO: 402286 - RNA, 32 nt, Homo Sapiens
agggcgcugggcggggagggacggggcuugcg

SEQ ID NO: 402287 - RNA, 32 nt, Homo Sapiens
ugggagguggagguugcagugagcuaagaucg

SEQ ID NO: 402288 - RNA, 32 nt, Homo Sapiens
uugucuauuccucagacccacccaagggcagg

SEQ ID NO: 402289 - RNA, 32 nt, Homo Sapiens
augcuuuacaagacauagcgaaugagguugcu

SEQ ID NO: 402290 - RNA, 32 nt, Homo Sapiens
cucuuuuccuccgccuccgccggcgcgauggc

SEQ ID NO: 402291 - RNA, 32 nt, Homo Sapiens
acccccccagcaugcuagagagcuaauuccag

SEQ ID NO: 402292 - RNA, 32 nt, Homo Sapiens
uccuguuucuuaauuuuugucuucucauuccu

SEQ ID NO: 402293 - RNA, 32 nt, Homo Sapiens
gcaucaaacagcauccacaaaggagacccacc

SEQ ID NO: 402294 - RNA, 32 nt, Homo Sapiens
agaaaucauggucugccuggaccuagccaggc

SEQ ID NO: 402295 - RNA, 32 nt, Homo Sapiens
ccagaaauucuauaacugaucauagaagaaga

SEQ ID NO: 402296 - RNA, 32 nt, Homo Sapiens
cacacacacacacacacacacacacaccaucu

SEQ ID NO: 402297 - RNA, 32 nt, Homo Sapiens
acacuuugcaacaguaauaccauuucuagcuu

SEQ ID NO: 402298 - RNA, 32 nt, Homo Sapiens
ggccgaggaggcggcccucgaggcaagccgcc

SEQ ID NO: 402299 - RNA, 32 nt, Homo Sapiens
caaauccucuucccuuauucuaaagcugcccc

SEQ ID NO: 402300 - RNA, 32 nt, Homo Sapiens
cugcagagcuuugacaucaagucgcugacucc

SEQ ID NO: 402301 - RNA, 32 nt, Homo Sapiens
ggagccugugcccucagaccgccccgcaccag

SEQ ID NO: 402302 - RNA, 32 nt, Homo Sapiens
guuuauccccauucuuuuuuuuuuucuuacuc

SEQ ID NO: 402303 - RNA, 32 nt, Homo Sapiens
uauuauggcauuucuaaugauguguaacugug

SEQ ID NO: 402304 - RNA, 32 nt, Homo Sapiens
gguaacucugcugugcuggagaucaucuuuaa

SEQ ID NO: 402305 - RNA, 32 nt, Homo Sapiens
guuuccagagcccuccugugucccaggugcgu

SEQ ID NO: 402306 - RNA, 32 nt, Homo Sapiens
aggugguuguuuuuaaaaaaucugcaaaaggg

SEQ ID NO: 402307 - RNA, 32 nt, Homo Sapiens
ccuuuccagggugcugggggcugggguucccu

SEQ ID NO: 402308 - RNA, 32 nt, Homo Sapiens
ccuuugaaggggccuuggggcuggggugggag

SEQ ID NO: 402309 - RNA, 32 nt, Homo Sapiens
aggggcggcccggacgcgggggagcuuuccca

SEQ ID NO: 402310 - RNA, 32 nt, Homo Sapiens
ggugggaggggaggagacauccacuucccugg

SEQ ID NO: 402311 - RNA, 32 nt, Homo Sapiens
aacacacgaaugucucaagcuuugaaaagagc

SEQ ID NO: 402312 - RNA, 32 nt, Homo Sapiens
acuuugggugcuccacuguuacucaaggaaug

SEQ ID NO: 402313 - RNA, 32 nt, Homo Sapiens
uuguuuguuuguuugucuucacuuuuccccca

SEQ ID NO: 402314 - RNA, 32 nt, Homo Sapiens
ucgagucuccagcuccucucccuuccaccugu

SEQ ID NO: 402315 - RNA, 32 nt, Homo Sapiens
auuauucacagcaccccauuuuacucagaagu

SEQ ID NO: 402316 - RNA, 32 nt, Homo Sapiens
uccuuuaaaaauuaaggcugaaaaacuuguau

SEQ ID NO: 402317 - RNA, 32 nt, Homo Sapiens
uugacaagacuaacuuuuuuuuuuuuuuuuuu

SEQ ID NO: 402318 - RNA, 32 nt, Homo Sapiens
cucggcugcguagugcgcuccccgcccagccu

SEQ ID NO: 402319 - RNA, 32 nt, Homo Sapiens
ggaaggaaagagaaauaggccuuuuuauuuuu

SEQ ID NO: 402320 - RNA, 32 nt, Homo Sapiens
cuucgugcuucagauuuguuuaccuacaaaau

SEQ ID NO: 402321 - RNA, 32 nt, Homo Sapiens
uaaaccacauucacugcaggaaauauacaaau

SEQ ID NO: 402322 - RNA, 32 nt, Homo Sapiens
agacuugaauaauagaaagauauuucauucuu

SEQ ID NO: 402323 - RNA, 29 nt, Homo Sapiens
ccuaagcugaagauucccuugagaacaag

SEQ ID NO: 402324 - RNA, 32 nt, Homo Sapiens
ggggaaaguaaugaaauugucucugguuucag

SEQ ID NO: 402325 - RNA, 32 nt, Homo Sapiens
guggggaaggggccaagcugcagacacacaca

SEQ ID NO: 402326 - RNA, 32 nt, Homo Sapiens
cauugagacgagugauggucuuugaaagccag

SEQ ID NO: 402327 - RNA, 32 nt, Homo Sapiens
agagcauuuaggauaauagaugaccuaacuga

SEQ ID NO: 402328 - RNA, 32 nt, Homo Sapiens
aacauaagaugcuuuuauuagaugaucaacua

SEQ ID NO: 402329 - RNA, 32 nt, Homo Sapiens
cggcgcgguccaggcgggaggcgacucccuag

SEQ ID NO: 402330 - RNA, 32 nt, Homo Sapiens
aaagacuaagucagcauuaucucugaguccac

SEQ ID NO: 402331 - RNA, 32 nt, Homo Sapiens
gaaaauguaaaauaaaucagugaauguuaaga

SEQ ID NO: 402332 - RNA, 32 nt, Homo Sapiens
cacuuuuuucuuuuuuaccuuuaaguuuuucu

SEQ ID NO: 402333 - RNA, 32 nt, Homo Sapiens
uaugacuugacaaauuaauauuuuuugaguaa

SEQ ID NO: 402334 - RNA, 32 nt, Homo Sapiens
guccaaaaccaccuuaaguuuuaaguauauua

SEQ ID NO: 402335 - RNA, 32 nt, Homo Sapiens
cuucaccccacuuuaccuugagcuuggaagua

SEQ ID NO: 402336 - RNA, 32 nt, Homo Sapiens
gggcgggagaacucacugaggaugagguggaa

SEQ ID NO: 402337 - RNA, 32 nt, Homo Sapiens
agcgcggugacuguccuugagcgcggaggggc

SEQ ID NO: 402338 - RNA, 32 nt, Homo Sapiens
cggccucaacuaaaaguggccauugaccuuuc

SEQ ID NO: 402339 - RNA, 32 nt, Homo Sapiens
ucuauuuguaaauauacucugucauaaauacc

SEQ ID NO: 402340 - RNA, 32 nt, Homo Sapiens
uuuuccccgacccagugaaagaguguuaagac

SEQ ID NO: 402341 - RNA, 32 nt, Homo Sapiens
uuauuuguaagguggugguaacuaugguuauu

SEQ ID NO: 402342 - RNA, 32 nt, Homo Sapiens
cccgccgcggcggcugccauggaggccaugcc

SEQ ID NO: 402343 - RNA, 32 nt, Homo Sapiens
uaaacuuuucuuucucuuacacaaaugauagu

SEQ ID NO: 402344 - RNA, 32 nt, Homo Sapiens
ucacagagaaaguuggcuuugaugucucuuaa

SEQ ID NO: 402345 - RNA, 32 nt, Homo Sapiens
caaccuuguaaaucaaaugagcaucguuugaa

SEQ ID NO: 402346 - RNA, 32 nt, Homo Sapiens
ccgcuuccacuucuuucuuguuuggaguuuuc

SEQ ID NO: 402347 - RNA, 32 nt, Homo Sapiens
agcccuguggcuccucggcgaccuccagcggg

SEQ ID NO: 402348 - RNA, 32 nt, Homo Sapiens
ccccccgcccccagcccugcaucaggccacag

SEQ ID NO: 402349 - RNA, 32 nt, Homo Sapiens
auuugagguucaacuaccuguagaucaaagcu

SEQ ID NO: 402350 - RNA, 32 nt, Homo Sapiens
uuaaaggugguuuuaauauauguuucauggaa

SEQ ID NO: 402351 - RNA, 32 nt, Homo Sapiens
cuggagaaggagccucuugggacucagacagg

SEQ ID NO: 402352 - RNA, 32 nt, Homo Sapiens
ucacuugcugcgagacuucaggccgcuucugc

SEQ ID NO: 402353 - RNA, 32 nt, Homo Sapiens
ugccaaagcuguggcauagccaacuuuugauu

SEQ ID NO: 402354 - RNA, 32 nt, Homo Sapiens
acccuggaccaacagggagagcaagaagggag

SEQ ID NO: 402355 - RNA, 32 nt, Homo Sapiens
caaagaggaggaccaggccacuucucaaccua

SEQ ID NO: 402356 - RNA, 32 nt, Homo Sapiens
uggucaggguuauuuauuaaauuuuauauaug

SEQ ID NO: 402357 - RNA, 32 nt, Homo Sapiens
uggaguuggaagagucagaaugcguuugccua

SEQ ID NO: 402358 - RNA, 32 nt, Homo Sapiens
cccgacgcaaccauggcugaagaacaaccgca

SEQ ID NO: 402359 - RNA, 32 nt, Homo Sapiens
uggcuaucucacaggcugggaagcucagccuu

SEQ ID NO: 402360 - RNA, 32 nt, Homo Sapiens
auguuuucaaggaauuugaaccauaaaacacu

SEQ ID NO: 402361 - RNA, 32 nt, Homo Sapiens
uccccgaaggccgggcccgcggaggaggggcc

SEQ ID NO: 402362 - RNA, 32 nt, Homo Sapiens
aacgguuccuuccuguccuuuuccucccugaa

SEQ ID NO: 402363 - RNA, 29 nt, Homo Sapiens
agcugggugugaugggcaccgaggccaac

SEQ ID NO: 402364 - RNA, 32 nt, Homo Sapiens
gacaaauguauuaaugcuauacuggaaaugua

SEQ ID NO: 402365 - RNA, 32 nt, Homo Sapiens
aggggguuuguccuuggagccucuuugccucu

SEQ ID NO: 402366 - RNA, 32 nt, Homo Sapiens
ucuggaggccccaagccauguuccccaguuca

SEQ ID NO: 402367 - RNA, 32 nt, Homo Sapiens
uccuacucuccuucuuuuucugcuuucauuuu

SEQ ID NO: 402368 - RNA, 32 nt, Homo Sapiens
ugcuuuccuugugccucccauccaugcacagg

SEQ ID NO: 402369 - RNA, 32 nt, Homo Sapiens
uuuacuugaaaacaagcuccaucccuuuucua

SEQ ID NO: 402370 - RNA, 32 nt, Homo Sapiens
agccuguucagcagaggccccuuuaguauuau

SEQ ID NO: 402371 - RNA, 27 nt, Homo Sapiens
agaauguccuucuuuaaaccuggcuua

SEQ ID NO: 402372 - RNA, 32 nt, Homo Sapiens
gggugccaugaccccugcuuucuggauugagg

SEQ ID NO: 402373 - RNA, 32 nt, Homo Sapiens
cagcggcccuggcgcguggcuccugcauagcu

SEQ ID NO: 402374 - RNA, 32 nt, Homo Sapiens
aguacauggaaaccagaaaugcaacaguuacu

SEQ ID NO: 402375 - RNA, 32 nt, Homo Sapiens
uaauaaugucacucgcauccacuucuuagaac

SEQ ID NO: 402376 - RNA, 32 nt, Homo Sapiens
aucacgucucugaauuuuuucuuuaacguuau

SEQ ID NO: 402377 - RNA, 32 nt, Homo Sapiens
gauugaaauaaaugacuacuugcauguuaugc

SEQ ID NO: 402378 - RNA, 29 nt, Homo Sapiens
auagaucuaacuuucagaggcaaaacaaa

SEQ ID NO: 402379 - RNA, 32 nt, Homo Sapiens
aucagaacuguaaagcuauaauccccagaauu

SEQ ID NO: 402380 - RNA, 29 nt, Homo Sapiens
uauggauaaaguuuaugguuucauuucug

SEQ ID NO: 402381 - RNA, 32 nt, Homo Sapiens
ggauagagaaagugcucaagaauguucacuua

SEQ ID NO: 402382 - RNA, 32 nt, Homo Sapiens
guucaagaaauaaguuuuuguuucacagccua

SEQ ID NO: 402383 - RNA, 32 nt, Homo Sapiens
ugugccguuaugucuuuuuuucuuuguugauc

SEQ ID NO: 402384 - RNA, 32 nt, Homo Sapiens
uuuccuacaugagaagcuucucugccacaaaa

SEQ ID NO: 402385 - RNA, 32 nt, Homo Sapiens
uguauggcauuugugaugcagaauuaugcacu

SEQ ID NO: 402386 - RNA, 32 nt, Homo Sapiens
uugccaggccccagcgccagccagucuggccu

SEQ ID NO: 402387 - RNA, 32 nt, Homo Sapiens
guacuaucaaugccacugauucacagaaaaca

SEQ ID NO: 402388 - RNA, 32 nt, Homo Sapiens
ugcauauauuuuaccgaggauucauaaaaaca

SEQ ID NO: 402389 - RNA, 29 nt, Homo Sapiens
caucgcucuuccucacaccacaaaucuga

SEQ ID NO: 402390 - RNA, 29 nt, Homo Sapiens
caucacucuuccucacaccacaaaucugg

SEQ ID NO: 402391 - RNA, 32 nt, Homo Sapiens
cuaguaauugauuuauuuuucuucaauaaagu

SEQ ID NO: 402392 - RNA, 32 nt, Homo Sapiens
guggaagauaaugaggcucacuguaaacacua

SEQ ID NO: 402393 - RNA, 31 nt, Homo Sapiens
agacugagggcgguggggagaaccaggcuug

SEQ ID NO: 402394 - RNA, 32 nt, Homo Sapiens
cuugcacacugacuucugguuuccacuguauc

SEQ ID NO: 402395 - RNA, 32 nt, Homo Sapiens
acagaaaggagacugugcugcagcuuuggcuc

SEQ ID NO: 402396 - RNA, 32 nt, Homo Sapiens
aaaauccugagcaaacaaaaccaccuggcccu

SEQ ID NO: 402397 - RNA, 32 nt, Homo Sapiens
gaguccuugcaucaauuuuucuuauuucauuu

SEQ ID NO: 402398 - RNA, 32 nt, Homo Sapiens
caaguguauggacuguggaguaagaaguaccu

SEQ ID NO: 402399 - RNA, 32 nt, Homo Sapiens
auucuaaauugaggacuucauuauuaauggca

SEQ ID NO: 402400 - RNA, 32 nt, Homo Sapiens
gggcgagcggcccuuccgcugcccgcucugcc

SEQ ID NO: 402401 - RNA, 32 nt, Homo Sapiens
gcacauccugcagacugcaggugcugggcugc

SEQ ID NO: 402402 - RNA, 29 nt, Homo Sapiens
gagggggcgggacagaggaugcuguucuu

SEQ ID NO: 402403 - RNA, 32 nt, Homo Sapiens
agccugguagagacuagggaagggaggucucc

SEQ ID NO: 402404 - RNA, 32 nt, Homo Sapiens
agaacggccgcccacagcacacguucuccgga

SEQ ID NO: 402405 - RNA, 32 nt, Homo Sapiens
cgagagccagggcgagcgcccguuccaggugg

SEQ ID NO: 402406 - RNA, 32 nt, Homo Sapiens
ccagcuugcagcaggaggagcugcaggccgcc

SEQ ID NO: 402407 - RNA, 32 nt, Homo Sapiens
cggcuggaauggggaauuugugagguaggccg

SEQ ID NO: 402408 - RNA, 32 nt, Homo Sapiens
ugaaccccauucuuuccuucucugaaaguggu

SEQ ID NO: 402409 - RNA, 32 nt, Homo Sapiens
uagugggaaaacuggggugggggugggggugg

SEQ ID NO: 402410 - RNA, 32 nt, Homo Sapiens
acacaguaucagucauauucuccguugaguca

SEQ ID NO: 402411 - RNA, 32 nt, Homo Sapiens
uaauuuuucauauggcuucucaucaauaucau

SEQ ID NO: 402412 - RNA, 32 nt, Homo Sapiens
acuugcaguuuccuguucuccucauugccugc

SEQ ID NO: 402413 - RNA, 32 nt, Homo Sapiens
uucgccaugugcugugcacccgugccacgcgc

SEQ ID NO: 402414 - RNA, 32 nt, Homo Sapiens
ccaacaugggugucuggguuuugacugccuaa

SEQ ID NO: 402415 - RNA, 32 nt, Homo Sapiens
cuguuuuguaaaauguaauguauaugugguuu

SEQ ID NO: 402416 - RNA, 32 nt, Homo Sapiens
uuccuucccauuaggacauccuuuaaauuaua

SEQ ID NO: 402417 - RNA, 32 nt, Homo Sapiens
gggagucuuuccccacaccccagccaucgccg

SEQ ID NO: 402418 - RNA, 32 nt, Homo Sapiens
ggccggagccccacaaggaccaugagggcgcu

SEQ ID NO: 402419 - RNA, 31 nt, Homo Sapiens
uuccaugugcgcagccccacagacguugcug

SEQ ID NO: 402420 - RNA, 32 nt, Homo Sapiens
cauauuuuauuguauuuugaugagauauuaaa

SEQ ID NO: 402421 - RNA, 32 nt, Homo Sapiens
caugaaagauauguuuucauuaauuuuacugg

SEQ ID NO: 402422 - RNA, 32 nt, Homo Sapiens
aguuuaaaacaucauuaaacauuauguaauua

SEQ ID NO: 402423 - RNA, 32 nt, Homo Sapiens
gcccggcugcucugcuuccggucguuaccgac

SEQ ID NO: 402424 - RNA, 32 nt, Homo Sapiens
uccuucaaaaauacaucaagccagcuucauuc

SEQ ID NO: 402425 - RNA, 32 nt, Homo Sapiens
cccccgacccugagcccggaccgcuaggcgag

SEQ ID NO: 402426 - RNA, 32 nt, Homo Sapiens
auaacaguaaaagaaggcaggggaaacuuacg

SEQ ID NO: 402427 - RNA, 32 nt, Homo Sapiens
uggcaaguguagucauugaugaucugcccaaa

SEQ ID NO: 402428 - RNA, 32 nt, Homo Sapiens
gcaucccagcgggcaucucaccacgacuucuc

SEQ ID NO: 402429 - RNA, 32 nt, Homo Sapiens
uuccacuucccaacagcccccaucaagggacc

SEQ ID NO: 402430 - RNA, 32 nt, Homo Sapiens
auaccacaguaguucaagacuuagcacaaguc

SEQ ID NO: 402431 - RNA, 32 nt, Homo Sapiens
cccggccccuauuugaagacgucuuuuguaaa

SEQ ID NO: 402432 - RNA, 32 nt, Homo Sapiens
gcccaggccguccccaggaugcccccaagcac

SEQ ID NO: 402433 - RNA, 32 nt, Homo Sapiens
augacagcagagccaguggccucuacuagauc

SEQ ID NO: 402434 - RNA, 32 nt, Homo Sapiens
aagccugcuugggcaacguagcaagaccuugc

SEQ ID NO: 402435 - RNA, 32 nt, Homo Sapiens
cugaagccagcuugcacaagggcugcuguccc

SEQ ID NO: 402436 - RNA, 32 nt, Homo Sapiens
ccaauggggaaugugcuuugaauuuuuggaac

SEQ ID NO: 402437 - RNA, 32 nt, Homo Sapiens
guaaucucauuguuacauauagcaauuuuuga

SEQ ID NO: 402438 - RNA, 32 nt, Homo Sapiens
uuuuuuggauaccuaaacuucauugagauacu

SEQ ID NO: 402439 - RNA, 32 nt, Homo Sapiens
gcuacacagagcgcuggcaacuucugacaggc

SEQ ID NO: 402440 - RNA, 32 nt, Homo Sapiens
uagcauaacuaaacaaagauuaugagcucuac

SEQ ID NO: 402441 - RNA, 31 nt, Homo Sapiens
aacugaaaaaauaaaagugauugcuccuucc

SEQ ID NO: 402442 - RNA, 32 nt, Homo Sapiens
caguuccuauucaaauauuuggggauuucuua

SEQ ID NO: 402443 - RNA, 32 nt, Homo Sapiens
acuacugccugucccggcaucucucccuccgc

SEQ ID NO: 402444 - RNA, 32 nt, Homo Sapiens
uuuggcagcucuuuucuucugcucagacccuu

SEQ ID NO: 402445 - RNA, 32 nt, Homo Sapiens
uuguggggaaacugaggcccagaugauacaac

SEQ ID NO: 402446 - RNA, 32 nt, Homo Sapiens
aaggggagguucaaacugucaaugcacagacu

SEQ ID NO: 402447 - RNA, 32 nt, Homo Sapiens
acgcugucaaaaaaacaaaacaaaacaaaaaa

SEQ ID NO: 402448 - RNA, 32 nt, Homo Sapiens
cugaugcuggcaaggagggaauagcccugcag

SEQ ID NO: 402449 - RNA, 32 nt, Homo Sapiens
cacuuccuuuugcugccaucaugugaagaagg

SEQ ID NO: 402450 - RNA, 32 nt, Homo Sapiens
aaggggagaaagugggggauggcuaagaaagc

SEQ ID NO: 402451 - RNA, 32 nt, Homo Sapiens
ucuaauuuggaauugaauauuguggauaucuu

SEQ ID NO: 402452 - RNA, 32 nt, Homo Sapiens
uccucagcccugcguccuggggucgcugcugc

SEQ ID NO: 402453 - RNA, 30 nt, Homo Sapiens
cagcgggauaaaagggugaauuuggagcug

SEQ ID NO: 402454 - RNA, 32 nt, Homo Sapiens
guccauggccaggauucugugcuucagaacgg

SEQ ID NO: 402455 - RNA, 32 nt, Homo Sapiens
ugacagcucccucacucuuaagguugcugcua

SEQ ID NO: 402456 - RNA, 32 nt, Homo Sapiens
auuuggcgugagggaagcuggugcacaugggu

SEQ ID NO: 402457 - RNA, 32 nt, Homo Sapiens
uuggcugugaguuuuccuuuccucuaugaacu

SEQ ID NO: 402458 - RNA, 32 nt, Homo Sapiens
uuauucacucccagcccuggcccugaccuuug

SEQ ID NO: 402459 - RNA, 32 nt, Homo Sapiens
aaaaguacaaguagacguauauuguccguuga

SEQ ID NO: 402460 - RNA, 32 nt, Homo Sapiens
uuuugaaaucuguuccucuccccuccccuucc

SEQ ID NO: 402461 - RNA, 28 nt, Homo Sapiens
ccuguguuuauguguauguguuuuuaga

SEQ ID NO: 402462 - RNA, 32 nt, Homo Sapiens
gcgaaucuacagaacaaagaacggcaugugaa

SEQ ID NO: 402463 - RNA, 32 nt, Homo Sapiens
cagaaaugccaaguuguguuuacuuuucauuc

SEQ ID NO: 402464 - RNA, 32 nt, Homo Sapiens
cucugggaaaaauaaaaugcugggugucucac

SEQ ID NO: 402465 - RNA, 32 nt, Homo Sapiens
gcaacaggacauguucucuggaugucagcuga

SEQ ID NO: 402466 - RNA, 31 nt, Homo Sapiens
gguacgaugagaagcuccagagccugcacga

SEQ ID NO: 402467 - RNA, 32 nt, Homo Sapiens
uuagggcugucugauacuuagagcugaaggca

SEQ ID NO: 402468 - RNA, 32 nt, Homo Sapiens
gcaugguggugugacaugaggaccguuccuag

SEQ ID NO: 402469 - RNA, 32 nt, Homo Sapiens
gcaucucuauagaaagugaccaccaaggccag

SEQ ID NO: 402470 - RNA, 32 nt, Homo Sapiens
aaacauuccaaaaacgugaaaaacugcaguag

SEQ ID NO: 402471 - RNA, 32 nt, Homo Sapiens
ccaacacuucgggaggccaaggugagaggaua

SEQ ID NO: 402472 - RNA, 32 nt, Homo Sapiens
ggaccuacuuggaaaggcaugcugggucucuu

SEQ ID NO: 402473 - RNA, 32 nt, Homo Sapiens
acgccggcgcugggcuuggccagucggcagug

SEQ ID NO: 402474 - RNA, 32 nt, Homo Sapiens
ccgggggcgcgcgcucugcgagcuggaugucc

SEQ ID NO: 402475 - RNA, 32 nt, Homo Sapiens
ccucuccccccuccgcccccgccgcggaaagu

SEQ ID NO: 402476 - RNA, 32 nt, Homo Sapiens
uuguuaaagggagcgaggugguuguuccuggg

SEQ ID NO: 402477 - RNA, 32 nt, Homo Sapiens
aggcuggucagagggcggggcuggugaggguu

SEQ ID NO: 402478 - RNA, 32 nt, Homo Sapiens
uccggggcuucugggcagcugggccugcccgg

SEQ ID NO: 402479 - RNA, 32 nt, Homo Sapiens
cagagggcgaggggccgagggcgauguugggc

SEQ ID NO: 402480 - RNA, 31 nt, Homo Sapiens
ucuuucuucauaguguugccaaauauaaaua

SEQ ID NO: 402481 - RNA, 32 nt, Homo Sapiens
accuaagacuggguaguuuauaaagaacagac

SEQ ID NO: 402482 - RNA, 32 nt, Homo Sapiens
gugaucauggaucauuguuauuagcuuugugg

SEQ ID NO: 402483 - RNA, 32 nt, Homo Sapiens
gcucagccccagcaagugugugcucagagcau

SEQ ID NO: 402484 - RNA, 32 nt, Homo Sapiens
uuaccuuguuuucucuauaggucaugauuucu

SEQ ID NO: 402485 - RNA, 32 nt, Homo Sapiens
uaauaauuuaaaaaacagcaggauuuggguga

SEQ ID NO: 402486 - RNA, 32 nt, Homo Sapiens
agaaguaauaaugaguaaaugguaaguacuug

SEQ ID NO: 402487 - RNA, 32 nt, Homo Sapiens
cuugauaaacauaagaaaauucacacuguaga

SEQ ID NO: 402488 - RNA, 32 nt, Homo Sapiens
agaagaguccacaacagcuggugggagggugg

SEQ ID NO: 402489 - RNA, 32 nt, Homo Sapiens
ccguuuccagcaucaacaacagcaacuuguga

SEQ ID NO: 402490 - RNA, 32 nt, Homo Sapiens
uuaacuuaucaaaucuaauuucagauuucugg

SEQ ID NO: 402491 - RNA, 29 nt, Homo Sapiens
cacucguaggccugggacgccggcugccg

SEQ ID NO: 402492 - RNA, 32 nt, Homo Sapiens
gggguagggggcuggaggagcccaggccagga

SEQ ID NO: 402493 - RNA, 32 nt, Homo Sapiens
ucaguuucucauggaaauugguaaauguuagu

SEQ ID NO: 402494 - RNA, 32 nt, Homo Sapiens
gugguucucaaacuuuaguacacaucagcauc

SEQ ID NO: 402495 - RNA, 27 nt, Homo Sapiens
uguccccuucucuucagccccugccca

SEQ ID NO: 402496 - RNA, 32 nt, Homo Sapiens
cuuuauuucuaaaaaucuguuacucuaagaua

SEQ ID NO: 402497 - RNA, 28 nt, Homo Sapiens
gccguugcaauaaauguagaggaaaugc

SEQ ID NO: 402498 - RNA, 32 nt, Homo Sapiens
cugcaggaagcagcaggagacgcccggcagcc

SEQ ID NO: 402499 - RNA, 32 nt, Homo Sapiens
ccucugccagggggcagcugcccgcgugaccg

SEQ ID NO: 402500 - RNA, 32 nt, Homo Sapiens
auuugaugcuuuucuaugcucauuucaacuug

SEQ ID NO: 402501 - RNA, 32 nt, Homo Sapiens
uagaccuuucucucuaaacacuaacaacauua

SEQ ID NO: 402502 - RNA, 32 nt, Homo Sapiens
ccacaucaugacgcccgaggagaacgcgggua

SEQ ID NO: 402503 - RNA, 32 nt, Homo Sapiens
aguuugaggaccgcuuauuccacuuuaaggac

SEQ ID NO: 402504 - RNA, 32 nt, Homo Sapiens
gccccgcccucccaggcacagcugcagccauc

SEQ ID NO: 402505 - RNA, 32 nt, Homo Sapiens
gugaagggcagacaaugcauggcugaucuacu

SEQ ID NO: 402506 - RNA, 32 nt, Homo Sapiens
gugcucaucuucucuugucauucauccaggca

SEQ ID NO: 402507 - RNA, 30 nt, Homo Sapiens
cuuccuggcggcggcggcgcgggcucagag

SEQ ID NO: 402508 - RNA, 32 nt, Homo Sapiens
uuggcugggcugaaucugcugcuuguugguuc

SEQ ID NO: 402509 - RNA, 32 nt, Homo Sapiens
cccaccaccugccugcccacuggucagccuuc

SEQ ID NO: 402510 - RNA, 28 nt, Homo Sapiens
acccggagucggccgccuggugccacag

SEQ ID NO: 402511 - RNA, 31 nt, Homo Sapiens
ggugccaugcggaggggcgcgcuucuggcgg

SEQ ID NO: 402512 - RNA, 32 nt, Homo Sapiens
gggaggaucaaggccuggaucccgggccguua

SEQ ID NO: 402513 - RNA, 32 nt, Homo Sapiens
cugcagaagguuuccuucucuuuuucaacuuc

SEQ ID NO: 402514 - RNA, 32 nt, Homo Sapiens
accccagcagugccagucaguucuggcgagcg

SEQ ID NO: 402515 - RNA, 32 nt, Homo Sapiens
accaacagcguuccuccuccccaaggagcaua

SEQ ID NO: 402516 - RNA, 32 nt, Homo Sapiens
cacuuaccuacuggaaauagucuaaaauuaug

SEQ ID NO: 402517 - RNA, 32 nt, Homo Sapiens
uguuuuacugucuaucaccaccaucuauaaau

SEQ ID NO: 402518 - RNA, 32 nt, Homo Sapiens
cgcgcgcagcgggccggcaguggcggcggaga

SEQ ID NO: 402519 - RNA, 32 nt, Homo Sapiens
ccugaguaacccagaccccccaccgugguucu

SEQ ID NO: 402520 - RNA, 32 nt, Homo Sapiens
uuuugucaaggaugguuguguauguguuuaaa

SEQ ID NO: 402521 - RNA, 32 nt, Homo Sapiens
gugcgcgcacccucuccccucguccaccgcug

SEQ ID NO: 402522 - RNA, 32 nt, Homo Sapiens
ccucucauccgccccuccugcuccaucacugc

SEQ ID NO: 402523 - RNA, 31 nt, Homo Sapiens
uuccaggcuguacuccugccccgugggcccc

SEQ ID NO: 402524 - RNA, 32 nt, Homo Sapiens
uauugaaguuaaagguuacuuuggaguuguuu

SEQ ID NO: 402525 - RNA, 32 nt, Homo Sapiens
guaauuacugcuugucucucaaggcugcuguc

SEQ ID NO: 402526 - RNA, 32 nt, Homo Sapiens
uuuuuacuuccucauucauuauuguaccagca

SEQ ID NO: 402527 - RNA, 32 nt, Homo Sapiens
gcugagucaaucaauaaagagcuuucuuuuga

SEQ ID NO: 402528 - RNA, 32 nt, Homo Sapiens
uucuguugacauugucuuugugguauuuuuau

SEQ ID NO: 402529 - RNA, 32 nt, Homo Sapiens
ccauuuuacacuuuucugaucuccuccuuccc

SEQ ID NO: 402530 - RNA, 32 nt, Homo Sapiens
aaaguuucugaagauuuuauuaucauagauac

SEQ ID NO: 402531 - RNA, 27 nt, Homo Sapiens
gguagucauucaaucugguauugaucu

SEQ ID NO: 402532 - RNA, 29 nt, Homo Sapiens
caggauggcggcggcggcggcugcaggcg

SEQ ID NO: 402533 - RNA, 32 nt, Homo Sapiens
aauguuuguaucuauuucaugcuuuacugucu

SEQ ID NO: 402534 - RNA, 32 nt, Homo Sapiens
cgcgucucggcugccccuuuguacaccgcgcc

SEQ ID NO: 402535 - RNA, 32 nt, Homo Sapiens
ugguagaaacaaaaaugcaauuuuaaaaccuu

SEQ ID NO: 402536 - RNA, 32 nt, Homo Sapiens
ggcggcccgcacccgagcugcugcuccgcggc

SEQ ID NO: 402537 - RNA, 32 nt, Homo Sapiens
cccucgucaccaugauagcaccaucagccuuu

SEQ ID NO: 402538 - RNA, 32 nt, Homo Sapiens
ccagagaagcaucugcagccggcacgagagcc

SEQ ID NO: 402539 - RNA, 32 nt, Homo Sapiens
agcggccgagcgcgcucagcccggcgaccccu

SEQ ID NO: 402540 - RNA, 32 nt, Homo Sapiens
gaaccgaggggaggaggagaagcugagcacgu

SEQ ID NO: 402541 - RNA, 32 nt, Homo Sapiens
gcacccgcggccccgcgcggcgcggacggcgg

SEQ ID NO: 402542 - RNA, 32 nt, Homo Sapiens
ugugggcgcgucaggccgcgacgagggcgcug

SEQ ID NO: 402543 - RNA, 32 nt, Homo Sapiens
auucuugcugucaucucagccauccacaccac

SEQ ID NO: 402544 - RNA, 32 nt, Homo Sapiens
gcgggggcgagggugcgcggcgggucugcgau

SEQ ID NO: 402545 - RNA, 32 nt, Homo Sapiens
acaucgugaugaugacguccucucaacucucu

SEQ ID NO: 402546 - RNA, 29 nt, Homo Sapiens
auccauggcuuccggguacggccagagcc

SEQ ID NO: 402547 - RNA, 32 nt, Homo Sapiens
uccuuucagucuuuuuucaauauuuuuauaaa

SEQ ID NO: 402548 - RNA, 31 nt, Homo Sapiens
ggagccauggugaacgaagccagaggaaaca

SEQ ID NO: 402549 - RNA, 32 nt, Homo Sapiens
ccccuccacccugcaacccccaucccccaccg

SEQ ID NO: 402550 - RNA, 32 nt, Homo Sapiens
cgccucuaaucccagcacuuugggaggucgag

SEQ ID NO: 402551 - RNA, 32 nt, Homo Sapiens
cgccuguaaucccagcacuuugggagguccag

SEQ ID NO: 402552 - RNA, 32 nt, Homo Sapiens
aagguugccgacugaucagaccacguccauau

SEQ ID NO: 402553 - RNA, 32 nt, Homo Sapiens
auggcucaggucugccggggccggcagggggu

SEQ ID NO: 402554 - RNA, 32 nt, Homo Sapiens
auaaaugugcuaauuagcuuuaaggagccaag

SEQ ID NO: 402555 - RNA, 32 nt, Homo Sapiens
agcuggaauaucuaaugcaguguuauucaaac

SEQ ID NO: 402556 - RNA, 32 nt, Homo Sapiens
ccaccagcugucugcuccuggugggagguggc

SEQ ID NO: 402557 - RNA, 32 nt, Homo Sapiens
aggcugagagagaaaaauaugugcaguaucuc

SEQ ID NO: 402558 - RNA, 32 nt, Homo Sapiens
cgagaaucuaaugacuggcaucugagaaccca

SEQ ID NO: 402559 - RNA, 32 nt, Homo Sapiens
cuguguacacaaaaacauaauguaucuuauga

SEQ ID NO: 402560 - RNA, 32 nt, Homo Sapiens
ucugcuacuccaguaacagccucguacaacug

SEQ ID NO: 402561 - RNA, 32 nt, Homo Sapiens
cccagagcuggcauaggaaguaccuuccuccu

SEQ ID NO: 402562 - RNA, 32 nt, Homo Sapiens
uaugauguuaacagagaagaaauauuugaguc

SEQ ID NO: 402563 - RNA, 32 nt, Homo Sapiens
augguggaauccaaacagaucccugccuuaca

SEQ ID NO: 402564 - RNA, 32 nt, Homo Sapiens
gagccaccgcgucuggcugaaaagcacuuuca

SEQ ID NO: 402565 - RNA, 32 nt, Homo Sapiens
cggggugggaagucccugagugcuccgucccu

SEQ ID NO: 402566 - RNA, 32 nt, Homo Sapiens
uuacaggcuuuauuuaaaucugaacaauccca

SEQ ID NO: 402567 - RNA, 32 nt, Homo Sapiens
uguguucuggaaaggcgcauugugcccucgcu

SEQ ID NO: 402568 - RNA, 32 nt, Homo Sapiens
auguaccaagaauguguguguaguuuuaauua

SEQ ID NO: 402569 - RNA, 32 nt, Homo Sapiens
ucguaucuucucacugagcccgggccagaugc

SEQ ID NO: 402570 - RNA, 32 nt, Homo Sapiens
ccagaccaucccgcagcgccccgccccggccc

SEQ ID NO: 402571 - RNA, 32 nt, Homo Sapiens
ugcaguuuacacacauugccuaaaguggggga

SEQ ID NO: 402572 - RNA, 32 nt, Homo Sapiens
uggcaaggcagaccuacaggcgaggccgcagc

SEQ ID NO: 402573 - RNA, 32 nt, Homo Sapiens
gcaugacaguagcaguggauucgggacccacc

SEQ ID NO: 402574 - RNA, 32 nt, Homo Sapiens
agacuguugacgcuucacaaguaaauguuguc

SEQ ID NO: 402575 - RNA, 32 nt, Homo Sapiens
cccugcacuccagccugggugacagcuagacc

SEQ ID NO: 402576 - RNA, 32 nt, Homo Sapiens
ggccuccagcucccucucggccuggaggccuu

SEQ ID NO: 402577 - RNA, 32 nt, Homo Sapiens
auauuguaugcauguaucaaaauaucacaugu

SEQ ID NO: 402578 - RNA, 32 nt, Homo Sapiens
ccacugccccagcgcagccgcccacagccaac

SEQ ID NO: 402579 - RNA, 32 nt, Homo Sapiens
gaaguuuuuuaaauuuauggcuauuuuuacac

SEQ ID NO: 402580 - RNA, 32 nt, Homo Sapiens
cugugggaucccaucauccccaucccugcuca

SEQ ID NO: 402581 - RNA, 32 nt, Homo Sapiens
cgcaaggaccuggagauugugcucugcagcga

SEQ ID NO: 402582 - RNA, 32 nt, Homo Sapiens
cuggggaaggagccaguuugccggauacaaac

SEQ ID NO: 402583 - RNA, 32 nt, Homo Sapiens
cgccugagagccccaggagacaucggcuagag

SEQ ID NO: 402584 - RNA, 32 nt, Homo Sapiens
augaagucaggagaucaagaccauccuggcca

SEQ ID NO: 402585 - RNA, 32 nt, Homo Sapiens
gucuaauggauuuugguccacaggaagcuugu

SEQ ID NO: 402586 - RNA, 32 nt, Homo Sapiens
cccaagccuucuccuuuccccucacacgugag

SEQ ID NO: 402587 - RNA, 32 nt, Homo Sapiens
auccucugucuccuaggaucugcauguuucuc

SEQ ID NO: 402588 - RNA, 32 nt, Homo Sapiens
ccggccgggcccagcccucggagugcugccaa

SEQ ID NO: 402589 - RNA, 32 nt, Homo Sapiens
gagucccaacugggaggggcccuggcagcaug

SEQ ID NO: 402590 - RNA, 32 nt, Homo Sapiens
cuccuucaacuuuuuuuuuuuauauuuagggg

SEQ ID NO: 402591 - RNA, 32 nt, Homo Sapiens
gcuuggaacccaccccaccucccucauugggg

SEQ ID NO: 402592 - RNA, 32 nt, Homo Sapiens
ugauugcuaauuuacauagaaauguauucucu

SEQ ID NO: 402593 - RNA, 32 nt, Homo Sapiens
gugagacggcggggcggugaggggccaccgcg

SEQ ID NO: 402594 - RNA, 32 nt, Homo Sapiens
ggccgcgugcagaggugcaggcagagcagccu

SEQ ID NO: 402595 - RNA, 32 nt, Homo Sapiens
gaacuaguacuuucuucucucauuccgccaaa

SEQ ID NO: 402596 - RNA, 32 nt, Homo Sapiens
ugaaacugaaaauaaacaauuguugaacccuu

SEQ ID NO: 402597 - RNA, 32 nt, Homo Sapiens
ucaugcuggaaccugcaaaaaauacuuuuucu

SEQ ID NO: 402598 - RNA, 32 nt, Homo Sapiens
ccacguggccagagggcggccacccggagcca

SEQ ID NO: 402599 - RNA, 32 nt, Homo Sapiens
cagucagaagagucauaucuuuuacagguugg

SEQ ID NO: 402600 - RNA, 32 nt, Homo Sapiens
gcuggggcuguaaggcgcgcgcggucagcugu

SEQ ID NO: 402601 - RNA, 32 nt, Homo Sapiens
acacaaaaaugaaccucgaagacaugcugagu

SEQ ID NO: 402602 - RNA, 32 nt, Homo Sapiens
ucuagcuagauuaagaaaaaacagaagacaaa

SEQ ID NO: 402603 - RNA, 32 nt, Homo Sapiens
ggggucccuagcagcccucccugcugcuggug

SEQ ID NO: 402604 - RNA, 32 nt, Homo Sapiens
cugagugcagaugaugcuuuuaugauggcacc

SEQ ID NO: 402605 - RNA, 32 nt, Homo Sapiens
gucuuauaaaaaguaaucaguuaaaugauuac

SEQ ID NO: 402606 - RNA, 32 nt, Homo Sapiens
aggacuuggacagagggcccacagggggaugg

SEQ ID NO: 402607 - RNA, 32 nt, Homo Sapiens
aauauuuuaaacaaguaguucacucuuccauu

SEQ ID NO: 402608 - RNA, 32 nt, Homo Sapiens
ugacugcugucugguccacaugguacccuuuu

SEQ ID NO: 402609 - RNA, 32 nt, Homo Sapiens
acccacuagacccugcuccacccaggcaggga

SEQ ID NO: 402610 - RNA, 32 nt, Homo Sapiens
uuucuacaacaacaacaacaaaaaccccuguu

SEQ ID NO: 402611 - RNA, 28 nt, Homo Sapiens
ccaaaaauggcgaaaugaugaaaaaaug

SEQ ID NO: 402612 - RNA, 32 nt, Homo Sapiens
aaguacucuaaaguacuucagagagguaaugc

SEQ ID NO: 402613 - RNA, 32 nt, Homo Sapiens
ucaguggagggugagggugaccccaucugcua

SEQ ID NO: 402614 - RNA, 32 nt, Homo Sapiens
gacugaaacaauuaauuauuuuuaaaugacgc

SEQ ID NO: 402615 - RNA, 32 nt, Homo Sapiens
ggccccguggcacccuccuuuaugacauccau

SEQ ID NO: 402616 - RNA, 32 nt, Homo Sapiens
uuuaauaaugacuuaagggucaagauuuuuuc

SEQ ID NO: 402617 - RNA, 32 nt, Homo Sapiens
aaagagugacagucaccuccaugcccugcccu

SEQ ID NO: 402618 - RNA, 32 nt, Homo Sapiens
agcacgcagggaccccugcugcugcuccugcu

SEQ ID NO: 402619 - RNA, 32 nt, Homo Sapiens
acacaaaauuccuaauuccugaagauaguuag

SEQ ID NO: 402620 - RNA, 32 nt, Homo Sapiens
ugagcacugcauggcagcuggugggcgggcag

SEQ ID NO: 402621 - RNA, 32 nt, Homo Sapiens
caaauacaaaaaugguaacuagguugacagau

SEQ ID NO: 402622 - RNA, 32 nt, Homo Sapiens
ugguuuuauuuuuuagauuucucagucccaaa

SEQ ID NO: 402623 - RNA, 32 nt, Homo Sapiens
aaaaaguugaacaaagaugaacuaauguauua

SEQ ID NO: 402624 - RNA, 32 nt, Homo Sapiens
aaaaauuuuuggauugacaguaacuugguuau

SEQ ID NO: 402625 - RNA, 32 nt, Homo Sapiens
gacuccuguaaaauaugaaauuauaaugcaau

SEQ ID NO: 402626 - RNA, 32 nt, Homo Sapiens
gcagucaccccucccuccucgcgcacggggua

SEQ ID NO: 402627 - RNA, 32 nt, Homo Sapiens
gaacaaagaagcugugaccccagcaggauguc

SEQ ID NO: 402628 - RNA, 32 nt, Homo Sapiens
cuuccuugcagaagcugcuaagcucugcuccu

SEQ ID NO: 402629 - RNA, 32 nt, Homo Sapiens
gacaaauccgccagccccaaaguggccggccc

SEQ ID NO: 402630 - RNA, 32 nt, Homo Sapiens
acucgaaaggcacagucucaaugcgcuacgua

SEQ ID NO: 402631 - RNA, 32 nt, Homo Sapiens
ucacacagacacccccaccuuccuccagccug

SEQ ID NO: 402632 - RNA, 32 nt, Homo Sapiens
cuuccuggucugagacuagcucuggggguggc

SEQ ID NO: 402633 - RNA, 32 nt, Homo Sapiens
gggaggaggaagaagggagcggggucggagcc

SEQ ID NO: 402634 - RNA, 32 nt, Homo Sapiens
uauuucagaauacuacaguacaauauauuaug

SEQ ID NO: 402635 - RNA, 32 nt, Homo Sapiens
gccacugcacuacagccugggcgacaaagugg

SEQ ID NO: 402636 - RNA, 32 nt, Homo Sapiens
uguauuucuuuuuuuucuuuuuuuugagauag

SEQ ID NO: 402637 - RNA, 32 nt, Homo Sapiens
ugacagauaaggaaacugaggcccagaguggu

SEQ ID NO: 402638 - RNA, 32 nt, Homo Sapiens
ucacagucugaauuguaagugaugagacugcu

SEQ ID NO: 402639 - RNA, 32 nt, Homo Sapiens
aucaaaaaaaagcucaaggaaauacagaucgg

SEQ ID NO: 402640 - RNA, 32 nt, Homo Sapiens
cuuccaggcagacagccucagcaacgccccug

SEQ ID NO: 402641 - RNA, 32 nt, Homo Sapiens
agagaaacagaaaauuagacaccaaagacaua

SEQ ID NO: 402642 - RNA, 32 nt, Homo Sapiens
ggacggaagaugagcgcgggaaaggcacucca

SEQ ID NO: 402643 - RNA, 32 nt, Homo Sapiens
uugaaauaaaauuuaacauuuaauaucaugaa

SEQ ID NO: 402644 - RNA, 32 nt, Homo Sapiens
cgcgcccggccccuccaccgcgcaccucuuag

SEQ ID NO: 402645 - RNA, 32 nt, Homo Sapiens
aaaaccuagaguagugcuuaugcugaaaugau

SEQ ID NO: 402646 - RNA, 32 nt, Homo Sapiens
aaaacaacaacaauggaaauuuauguuggcga

SEQ ID NO: 402647 - RNA, 32 nt, Homo Sapiens
agugcaacaaccccagaccugccuuugggggg

SEQ ID NO: 402648 - RNA, 32 nt, Homo Sapiens
acacccaaggcuuguuucuuccccuguaaaaa

SEQ ID NO: 402649 - RNA, 32 nt, Homo Sapiens
uuccuuuuuucuucuuuguuuggauugcagca

SEQ ID NO: 402650 - RNA, 32 nt, Homo Sapiens
acggggcuggggcugagcuuucugggggcgcc

SEQ ID NO: 402651 - RNA, 32 nt, Homo Sapiens
uuacagaaacagaucaagggcuauaauuuaug

SEQ ID NO: 402652 - RNA, 32 nt, Homo Sapiens
uugcuucucugccaucagggucgggaggccau

SEQ ID NO: 402653 - RNA, 32 nt, Homo Sapiens
ggcgaagcuucugcaccugaauuagagcacaa

SEQ ID NO: 402654 - RNA, 32 nt, Homo Sapiens
aggccuuugacaaauaaauguucaauggaugc

SEQ ID NO: 402655 - RNA, 32 nt, Homo Sapiens
acccagugaacaggauguuuugcuuuagcagc

SEQ ID NO: 402656 - RNA, 32 nt, Homo Sapiens
gcccuacagcugccugaggucuccaucaccgu

SEQ ID NO: 402657 - RNA, 32 nt, Homo Sapiens
gaugacugccagcacagggcaucucgggcuug

SEQ ID NO: 402658 - RNA, 32 nt, Homo Sapiens
agaggccuggaaagcuuugguagguucuucgu

SEQ ID NO: 402659 - RNA, 32 nt, Homo Sapiens
uuaacuuaaaaaauucuuucugauauuuuuaa

SEQ ID NO: 402660 - RNA, 32 nt, Homo Sapiens
gacugagcaggucugcccuuucauuggggugu

SEQ ID NO: 402661 - RNA, 32 nt, Homo Sapiens
aaaaaauggaaacaaccgaaaugcccaccaac

SEQ ID NO: 402662 - RNA, 32 nt, Homo Sapiens
gcacauccuagauggagggaguggagugauca

SEQ ID NO: 402663 - RNA, 32 nt, Homo Sapiens
gauauuauuucuauuuaucaagcaaaaggaau

SEQ ID NO: 402664 - RNA, 32 nt, Homo Sapiens
uuugguaauaaucagcucuucuggcccacaag

SEQ ID NO: 402665 - RNA, 32 nt, Homo Sapiens
cugcagaaaaggagggaggacuggcuggggaa

SEQ ID NO: 402666 - RNA, 32 nt, Homo Sapiens
agcagacuuuuggagcaaaaauauuauuuuag

SEQ ID NO: 402667 - RNA, 32 nt, Homo Sapiens
cccaggcccagcaacccgccuucuagcugggc

SEQ ID NO: 402668 - RNA, 32 nt, Homo Sapiens
ugccuggaggcccagcugcccgucaucagagu

SEQ ID NO: 402669 - RNA, 32 nt, Homo Sapiens
ccucuggaaaucaacuuugaccccaaggaccc

SEQ ID NO: 402670 - RNA, 32 nt, Homo Sapiens
auaguaagccccacagucugagaggugacucc

SEQ ID NO: 402671 - RNA, 32 nt, Homo Sapiens
uuauuuuauuuuuuaauuuaugucuggagccu

SEQ ID NO: 402672 - RNA, 32 nt, Homo Sapiens
cgccgaggacgcccggggcucgagagcaggua

SEQ ID NO: 402673 - RNA, 32 nt, Homo Sapiens
gggaugccccugcgcugaccgccaggggcagg

SEQ ID NO: 402674 - RNA, 32 nt, Homo Sapiens
gucuuuaaaaaauuuuuuuuuauuauauuuua

SEQ ID NO: 402675 - RNA, 32 nt, Homo Sapiens
acauguauauugguccuguguuaccaaguuua

SEQ ID NO: 402676 - RNA, 32 nt, Homo Sapiens
agacuguauucucauucaaccaugaccgugcg

SEQ ID NO: 402677 - RNA, 32 nt, Homo Sapiens
ggugaccugcuggagaagacaccugggaggaa

SEQ ID NO: 402678 - RNA, 32 nt, Homo Sapiens
ucuaaagaaguuacuuuguuugcaaugcauca

SEQ ID NO: 402679 - RNA, 32 nt, Homo Sapiens
auuuugaucaaaaaagaugacaauguaaaggc

SEQ ID NO: 402680 - RNA, 32 nt, Homo Sapiens
gaacaacuuagcaaaauguucuuuaugcuaag

SEQ ID NO: 402681 - RNA, 32 nt, Homo Sapiens
gacccgcccucccuccgcuccugcuguugcug

SEQ ID NO: 402682 - RNA, 32 nt, Homo Sapiens
ccuagcgccuuugguccuaagaaugggaggcu

SEQ ID NO: 402683 - RNA, 32 nt, Homo Sapiens
cagcagaguuucaaagaauaugcugaaauaca

SEQ ID NO: 402684 - RNA, 32 nt, Homo Sapiens
uggaagguagaguucauuaagaugaacucccu

SEQ ID NO: 402685 - RNA, 32 nt, Homo Sapiens
ggaggguacuuugcagguuuauuacaugggug

SEQ ID NO: 402686 - RNA, 32 nt, Homo Sapiens
uggcgggaugguuuuucuuagcucugcaacug

SEQ ID NO: 402687 - RNA, 32 nt, Homo Sapiens
cagcugggcgguucuucugcuccauguggcug

SEQ ID NO: 402688 - RNA, 32 nt, Homo Sapiens
ccggaaaugcccucgggcaccuggaugaggcc

SEQ ID NO: 402689 - RNA, 32 nt, Homo Sapiens
gugcuuagggaagagcagagaugcuggagguu

SEQ ID NO: 402690 - RNA, 32 nt, Homo Sapiens
uuaggggcuuuggagaacuuugaaugcuaccc

SEQ ID NO: 402691 - RNA, 32 nt, Homo Sapiens
gauacuuggucacagccaggcgcuagcacagc

SEQ ID NO: 402692 - RNA, 32 nt, Homo Sapiens
aaucagugacauucgaagacguugccgugguu

SEQ ID NO: 402693 - RNA, 32 nt, Homo Sapiens
cccaagagccccugcuggcccauugccuagaa

SEQ ID NO: 402694 - RNA, 32 nt, Homo Sapiens
cgccagauggcugagagcuagcaaggaaaacu

SEQ ID NO: 402695 - RNA, 29 nt, Homo Sapiens
ccuuccccuugcuucagaggccugauggc

SEQ ID NO: 402696 - RNA, 32 nt, Homo Sapiens
uuuuguccgcccggcggcgguggcggggggau

SEQ ID NO: 402697 - RNA, 32 nt, Homo Sapiens
ucccgucccuaucucugacugugcagugagug

SEQ ID NO: 402698 - RNA, 32 nt, Homo Sapiens
gaauuucucuacagaugucccauuuucagacu

SEQ ID NO: 402699 - RNA, 32 nt, Homo Sapiens
uauugcaggcuuucuuucccccauucucccug

SEQ ID NO: 402700 - RNA, 32 nt, Homo Sapiens
agccccagccccaccaugacccucggccgccg

SEQ ID NO: 402701 - RNA, 32 nt, Homo Sapiens
ucgcccccugcccggcuccgcggcgcggagga

SEQ ID NO: 402702 - RNA, 32 nt, Homo Sapiens
ccuccggcagccgcgccgcucccuccgcugca

SEQ ID NO: 402703 - RNA, 32 nt, Homo Sapiens
gcucugucucaccaagcacgugucaacaauuc

SEQ ID NO: 402704 - RNA, 32 nt, Homo Sapiens
agcugcacuaggugauucuuggagcgggccug

SEQ ID NO: 402705 - RNA, 32 nt, Homo Sapiens
ucuaaccagcauccagaagguucguuagccag

SEQ ID NO: 402706 - RNA, 32 nt, Homo Sapiens
ccuccgggccgcggcggccucugggaguugua

SEQ ID NO: 402707 - RNA, 32 nt, Homo Sapiens
uguugcugugccguggguccugugcggucacu

SEQ ID NO: 402708 - RNA, 32 nt, Homo Sapiens
cgggcacacgguucgggcuggcgugcagcucu

SEQ ID NO: 402709 - RNA, 32 nt, Homo Sapiens
uugucugauguuuuuucuuuuguagugucuua

SEQ ID NO: 402710 - RNA, 32 nt, Homo Sapiens
uaaagugcuaaaacagaaggcacuucacaaaa

SEQ ID NO: 402711 - RNA, 32 nt, Homo Sapiens
uguuuauuugaaaaacguauacauuaauaaac

SEQ ID NO: 402712 - RNA, 32 nt, Homo Sapiens
aauaggccgggcuugguggcucaugccuguaa

SEQ ID NO: 402713 - RNA, 32 nt, Homo Sapiens
uuuacauauuuuuucuuuaaugaggaauaaua

SEQ ID NO: 402714 - RNA, 32 nt, Homo Sapiens
auucuccagucucagcucccaaguagcuggga

SEQ ID NO: 402715 - RNA, 32 nt, Homo Sapiens
gccaagagaauaagcagugcuuugaaaggauc

SEQ ID NO: 402716 - RNA, 32 nt, Homo Sapiens
aacuauuggcaauugcaagugucuuuaaacua

SEQ ID NO: 402717 - RNA, 32 nt, Homo Sapiens
acggugaugaagugaaaaaggaguaagacgac

SEQ ID NO: 402718 - RNA, 32 nt, Homo Sapiens
guaugucuuggaauuaacuuguccucuaacaa

SEQ ID NO: 402719 - RNA, 32 nt, Homo Sapiens
ggggccgugcgcgcuccugccucaggccucug

SEQ ID NO: 402720 - RNA, 32 nt, Homo Sapiens
uauuuuacgaauaaaaaauguauuuuucagua

SEQ ID NO: 402721 - RNA, 32 nt, Homo Sapiens
ugcacuguacaauuuucccaguuuacaggucu

SEQ ID NO: 402722 - RNA, 32 nt, Homo Sapiens
uccaugugggcuaguugggcuuccucauaagu

SEQ ID NO: 402723 - RNA, 32 nt, Homo Sapiens
guaauugcaugacaaaccuuauggaaaagggg

SEQ ID NO: 402724 - RNA, 32 nt, Homo Sapiens
caaccccccucccccacccugcccugcucagg

SEQ ID NO: 402725 - RNA, 32 nt, Homo Sapiens
gcgagacuucgggcagagugcgggcuccucuc

SEQ ID NO: 402726 - RNA, 32 nt, Homo Sapiens
gucuaaggccccaggguguggccaauucagau

SEQ ID NO: 402727 - RNA, 32 nt, Homo Sapiens
gauguuuuacacucacguuuguagaugaaaca

SEQ ID NO: 402728 - RNA, 32 nt, Homo Sapiens
ggcuacuccaugaucauuaaacacccaaugga

SEQ ID NO: 402729 - RNA, 32 nt, Homo Sapiens
cuugagaaaaagaaaaguucauacugauuauu

SEQ ID NO: 402730 - RNA, 32 nt, Homo Sapiens
aaaucaaacacuuuacuacaguugugaauuag

SEQ ID NO: 402731 - RNA, 32 nt, Homo Sapiens
gccggccguggcgggccggggacugcgccucu

SEQ ID NO: 402732 - RNA, 32 nt, Homo Sapiens
auugugaacagaaacugaagaugguacaguuc

SEQ ID NO: 402733 - RNA, 32 nt, Homo Sapiens
uauaaagcuggguguaugcuucuauauauuua

SEQ ID NO: 402734 - RNA, 32 nt, Homo Sapiens
caggguucaaaaugucuguagcuccucaacuc

SEQ ID NO: 402735 - RNA, 32 nt, Homo Sapiens
gggccaccccuuccuuccaggcacaucucaca

SEQ ID NO: 402736 - RNA, 32 nt, Homo Sapiens
augucugugauagugguaugcaaaugcuaauu

SEQ ID NO: 402737 - RNA, 32 nt, Homo Sapiens
gucacuuagagaagcaccuugcuagcaugguu

SEQ ID NO: 402738 - RNA, 32 nt, Homo Sapiens
cuacuugauggucagacacaaacaaacaagcu

SEQ ID NO: 402739 - RNA, 32 nt, Homo Sapiens
cggcccugggcccccuuggccccuaggaaaug

SEQ ID NO: 402740 - RNA, 32 nt, Homo Sapiens
cggaaccaggggaggagagcggcggccaucgu

SEQ ID NO: 402741 - RNA, 32 nt, Homo Sapiens
gcucaggaaucauauugauguucugauuuuaa

SEQ ID NO: 402742 - RNA, 32 nt, Homo Sapiens
ggaccaccaaguagccacucuauuauguuugg

SEQ ID NO: 402743 - RNA, 32 nt, Homo Sapiens
gcauguguauuguaucaucccaaacguaaauc

SEQ ID NO: 402744 - RNA, 32 nt, Homo Sapiens
gccuaagugcagguguggggagggauuucaca

SEQ ID NO: 402745 - RNA, 32 nt, Homo Sapiens
gauuucuuuauuuaaugugagaacgcaugccc

SEQ ID NO: 402746 - RNA, 28 nt, Homo Sapiens
cguauggugucugcagucagcgacccuc

SEQ ID NO: 402747 - RNA, 32 nt, Homo Sapiens
cuuucaccuauuucuagaccuuuucuuacagc

SEQ ID NO: 402748 - RNA, 32 nt, Homo Sapiens
gagaaugcuuggaaagguugcauugguugaaa

SEQ ID NO: 402749 - RNA, 32 nt, Homo Sapiens
ucaaaugugucaaauacaaaaaugguaacuag

SEQ ID NO: 402750 - RNA, 32 nt, Homo Sapiens
uggauuuuguacacauauuguagugaaaugug

SEQ ID NO: 402751 - RNA, 32 nt, Homo Sapiens
aaagugaucuuacugcacugaacaagguuuau

SEQ ID NO: 402752 - RNA, 32 nt, Homo Sapiens
aucuugcagacacccaaguuuugugccucacc

SEQ ID NO: 402753 - RNA, 32 nt, Homo Sapiens
caggaaacaagggcucaggauucuucagauga

SEQ ID NO: 402754 - RNA, 32 nt, Homo Sapiens
auuugaaauaauaacauauacaauuaaaagug

SEQ ID NO: 402755 - RNA, 32 nt, Homo Sapiens
acuaagaguugucuuaauucuaaugggauuua

SEQ ID NO: 402756 - RNA, 32 nt, Homo Sapiens
gcucgaggaccgaggccugcuguggaggacac

SEQ ID NO: 402757 - RNA, 32 nt, Homo Sapiens
acuguagccuugacucuggagcuccacugaug

SEQ ID NO: 402758 - RNA, 32 nt, Homo Sapiens
acauagugcuaacaugaagaccuuuuucugca

SEQ ID NO: 402759 - RNA, 32 nt, Homo Sapiens
uaauagauaacuuuuucuugucuuuaagaacc

SEQ ID NO: 402760 - RNA, 32 nt, Homo Sapiens
auuuuauuaaaaauuggugucuggauacuucc

SEQ ID NO: 402761 - RNA, 32 nt, Homo Sapiens
uuauguguggaguuccuucuuaaaagaagaaa

SEQ ID NO: 402762 - RNA, 32 nt, Homo Sapiens
aaggagagggugggacccaguuuugcgugguu

SEQ ID NO: 402763 - RNA, 32 nt, Homo Sapiens
acucugccuggagugggggcgccgggcacugu

SEQ ID NO: 402764 - RNA, 32 nt, Homo Sapiens
uuccugagggcuucuuacugcuuugggcccua

SEQ ID NO: 402765 - RNA, 32 nt, Homo Sapiens
ggggcguccacuagguuuccuguccccugcug

SEQ ID NO: 402766 - RNA, 32 nt, Homo Sapiens
gauaugguauggaucguaaaauuuuaagcacu

SEQ ID NO: 402767 - RNA, 32 nt, Homo Sapiens
aacaagggcaguggaggugcugcauugccugc

SEQ ID NO: 402768 - RNA, 32 nt, Homo Sapiens
cuucuaauggauuuuugagugauaaaacauuu

SEQ ID NO: 402769 - RNA, 32 nt, Homo Sapiens
ucaaagagcugaugaaaucucagucuuuugua

SEQ ID NO: 402770 - RNA, 32 nt, Homo Sapiens
ggcauaauuaagaaauuuuucuucauauuauc

SEQ ID NO: 402771 - RNA, 32 nt, Homo Sapiens
agucccucugacgggagggaagauggcugcac

SEQ ID NO: 402772 - RNA, 32 nt, Homo Sapiens
guauuuuggcauauuauucuccagguguuugc

SEQ ID NO: 402773 - RNA, 32 nt, Homo Sapiens
gucuccuccuccaugaucacuuuggaagccgg

SEQ ID NO: 402774 - RNA, 32 nt, Homo Sapiens
cgggguggaguggucaguggagccagcacccu

SEQ ID NO: 402775 - RNA, 32 nt, Homo Sapiens
agcauguugcuguuauuccugcccugcaccug

SEQ ID NO: 402776 - RNA, 29 nt, Homo Sapiens
ugaacagaaaguuuauauuuuucuguuuu

SEQ ID NO: 402777 - RNA, 29 nt, Homo Sapiens
cggggccggguccggguccgcuugccacg

SEQ ID NO: 402778 - RNA, 32 nt, Homo Sapiens
ccaagugccgaaagaagaauugguugucauaa

SEQ ID NO: 402779 - RNA, 32 nt, Homo Sapiens
gcaagcuccgccuccuggguucacgccauccu

SEQ ID NO: 402780 - RNA, 32 nt, Homo Sapiens
ucaaagcauacauuaccucagcugguuuuuaa

SEQ ID NO: 402781 - RNA, 32 nt, Homo Sapiens
uuucuuuuacuuugcuaagaauacauauuuau

SEQ ID NO: 402782 - RNA, 32 nt, Homo Sapiens
auuucagaggauuuuuauuuugcuuuuuggca

SEQ ID NO: 402783 - RNA, 32 nt, Homo Sapiens
ucuaguuguaucuauuuuuuacuucuucaauu

SEQ ID NO: 402784 - RNA, 32 nt, Homo Sapiens
ucugaguuguccccugggucccugggcaagga

SEQ ID NO: 402785 - RNA, 32 nt, Homo Sapiens
cucccucuuauguuuuuauauuuuacuucuuu

SEQ ID NO: 402786 - RNA, 32 nt, Homo Sapiens
auaggagcccaugcuagaaguacauucucuca

SEQ ID NO: 402787 - RNA, 32 nt, Homo Sapiens
agcuaguggagaggcaggaaaaaggaaaugaa

SEQ ID NO: 402788 - RNA, 31 nt, Homo Sapiens
cugcagccaugaagccaaccgucccgaggca

SEQ ID NO: 402789 - RNA, 32 nt, Homo Sapiens
auaagucauuguauuuuuaacaccagaaagaa

SEQ ID NO: 402790 - RNA, 32 nt, Homo Sapiens
ucgagacucugcaaagcauuacugcugcuucu

SEQ ID NO: 402791 - RNA, 32 nt, Homo Sapiens
aagcccccugcccuccucucccucccacuguu

SEQ ID NO: 402792 - RNA, 32 nt, Homo Sapiens
cugaauuguucuuauauguaaguuuuauuauu

SEQ ID NO: 402793 - RNA, 31 nt, Homo Sapiens
aacauucauuugauucagagcuaaauauuca

SEQ ID NO: 402794 - RNA, 32 nt, Homo Sapiens
uuguuagguggagaagaaaugucucuagagga

SEQ ID NO: 402795 - RNA, 30 nt, Homo Sapiens
cuuugggauaaaagauuuaugagccaacua

SEQ ID NO: 402796 - RNA, 32 nt, Homo Sapiens
uugucuagggucacgcagcuuccucagugggg

SEQ ID NO: 402797 - RNA, 32 nt, Homo Sapiens
aauucuauuuuuguccuugcagacagaauaua

SEQ ID NO: 402798 - RNA, 32 nt, Homo Sapiens
cugugaguguccgggaaccagacccgcuugga

SEQ ID NO: 402799 - RNA, 32 nt, Homo Sapiens
cgucccccuggccucucuucccagcucacaca

SEQ ID NO: 402800 - RNA, 32 nt, Homo Sapiens
gccuguccuggcugcuggcccauccugccugg

SEQ ID NO: 402801 - RNA, 32 nt, Homo Sapiens
cccuauuguugauaaccagaucaaauauaguc

SEQ ID NO: 402802 - RNA, 32 nt, Homo Sapiens
gagccggaugugccacugugacuaccaaaagg

SEQ ID NO: 402803 - RNA, 32 nt, Homo Sapiens
guaucuaaacacagaaaagauacuguaaaaau

SEQ ID NO: 402804 - RNA, 32 nt, Homo Sapiens
gggugacggggggucgcggaggcggccaggcu

SEQ ID NO: 402805 - RNA, 32 nt, Homo Sapiens
uccaauuaaguacauggucaaguguuaacagc

SEQ ID NO: 402806 - RNA, 32 nt, Homo Sapiens
aauuacagauauauuugauagaaaagucacau

SEQ ID NO: 402807 - RNA, 32 nt, Homo Sapiens
auuguagaugacugugguaaauguguaauuau

SEQ ID NO: 402808 - RNA, 32 nt, Homo Sapiens
uaaugccaaccucagcgucaugccagaaugca

SEQ ID NO: 402809 - RNA, 32 nt, Homo Sapiens
acgaggucaggagaucgagaccaucgugacua

SEQ ID NO: 402810 - RNA, 32 nt, Homo Sapiens
gggcaacaaggugcacagaccucagagauggc

SEQ ID NO: 402811 - RNA, 32 nt, Homo Sapiens
caucagcguccccugggguccacacaugcgcg

SEQ ID NO: 402812 - RNA, 32 nt, Homo Sapiens
ugcucucaucgguuggcuucauuuucaagaca

SEQ ID NO: 402813 - RNA, 32 nt, Homo Sapiens
ccaagccaaaucugcuggcccacccaaggagc

SEQ ID NO: 402814 - RNA, 32 nt, Homo Sapiens
augcaugaagcaacgauaaaauuacaaaagag

SEQ ID NO: 402815 - RNA, 32 nt, Homo Sapiens
uaauaguaaaaagcuaggaauaggaugugauu

SEQ ID NO: 402816 - RNA, 32 nt, Homo Sapiens
gugugucucuucuacgugggcgagccaaagau

SEQ ID NO: 402817 - RNA, 32 nt, Homo Sapiens
aaagaaauacugaguuguguccacaacauggc

SEQ ID NO: 402818 - RNA, 32 nt, Homo Sapiens
aguagauuaagugaaaucugauuuaacugagg

SEQ ID NO: 402819 - RNA, 32 nt, Homo Sapiens
caucucugagauacugaugacguuugccuuac

SEQ ID NO: 402820 - RNA, 32 nt, Homo Sapiens
gaaccaucuuucacccggccaagcuccugccc

SEQ ID NO: 402821 - RNA, 32 nt, Homo Sapiens
gggaggagggguguggggaggggucaaggggu

SEQ ID NO: 402822 - RNA, 32 nt, Homo Sapiens
aagaagucaaacaaagaagaagucccuggggc

SEQ ID NO: 402823 - RNA, 32 nt, Homo Sapiens
uguaaaaacaaauuuccauauguuuuauauaa

SEQ ID NO: 402824 - RNA, 32 nt, Homo Sapiens
acgcgagggccccggcggggcuguuagaggcu

SEQ ID NO: 402825 - RNA, 32 nt, Homo Sapiens
cagugccucugcaacagccauugcccucaggu

SEQ ID NO: 402826 - RNA, 32 nt, Homo Sapiens
uuuucuguauuuuucuuuucuggaacaguggg

SEQ ID NO: 402827 - RNA, 32 nt, Homo Sapiens
gcaguuucucgucagcugguguuaccgggcgg

SEQ ID NO: 402828 - RNA, 32 nt, Homo Sapiens
cugggccugcuggccuggagaccagggugccu

SEQ ID NO: 402829 - RNA, 31 nt, Homo Sapiens
cacuugaugggaaucauggcagcauccaggc

SEQ ID NO: 402830 - RNA, 32 nt, Homo Sapiens
guauguaggaccaggaguaucuccucagguga

SEQ ID NO: 402831 - RNA, 32 nt, Homo Sapiens
gggaggggcgggucugggugcggcugccgcau

SEQ ID NO: 402832 - RNA, 32 nt, Homo Sapiens
acugggguauagggccggggccacccaaaugu

SEQ ID NO: 402833 - RNA, 32 nt, Homo Sapiens
agccauagccccaggcccgcccugcccgcgcc

SEQ ID NO: 402834 - RNA, 32 nt, Homo Sapiens
ucacugcuggacaggagccacccccuugggua

SEQ ID NO: 402835 - RNA, 32 nt, Homo Sapiens
uggacacaaaaauaagauaaauguauggcauc

SEQ ID NO: 402836 - RNA, 32 nt, Homo Sapiens
ucccgaggauggugcucugugcaugccccagc

SEQ ID NO: 402837 - RNA, 32 nt, Homo Sapiens
uuuugccuccaacucucuaagcacuaagggcu

SEQ ID NO: 402838 - RNA, 32 nt, Homo Sapiens
uaauauuuuuauuugcagauuucguuuccguc

SEQ ID NO: 402839 - RNA, 32 nt, Homo Sapiens
ugccacagugcccaguccugccccacagggau

SEQ ID NO: 402840 - RNA, 32 nt, Homo Sapiens
uuaauguuaggccccuucuccagucuuuuccu

SEQ ID NO: 402841 - RNA, 32 nt, Homo Sapiens
ucaagagaggauguuauuuagacugaaccucu

SEQ ID NO: 402842 - RNA, 32 nt, Homo Sapiens
guucccagcgaaguccccgcgcggcugggccc

SEQ ID NO: 402843 - RNA, 32 nt, Homo Sapiens
cagaguaaaacacaagcaggacauuucagcaa

SEQ ID NO: 402844 - RNA, 32 nt, Homo Sapiens
ugcaaugaauguuuuucuucuuuaaauuuaaa

SEQ ID NO: 402845 - RNA, 32 nt, Homo Sapiens
ggucacucaauagcuuucaaaauacauuuuug

SEQ ID NO: 402846 - RNA, 32 nt, Homo Sapiens
gccccaguucccucuggguccccuccuaggug

SEQ ID NO: 402847 - RNA, 28 nt, Homo Sapiens
aaugcaugugugaagauuauaaaagcca

SEQ ID NO: 402848 - RNA, 28 nt, Homo Sapiens
ucugaggagugugggaagugcuucgugu

SEQ ID NO: 402849 - RNA, 32 nt, Homo Sapiens
ccagauauuaacaagaauuguuguguaacuca

SEQ ID NO: 402850 - RNA, 32 nt, Homo Sapiens
gagccccgcagccccuggggcccccggagcca

SEQ ID NO: 402851 - RNA, 32 nt, Homo Sapiens
gccccagcccccagccuccucccucagccugg

SEQ ID NO: 402852 - RNA, 32 nt, Homo Sapiens
gcugauguccaugauugugaugaugcucauga

SEQ ID NO: 402853 - RNA, 29 nt, Homo Sapiens
caccucggagugauguuccuaaaaugcaa

SEQ ID NO: 402854 - RNA, 32 nt, Homo Sapiens
ccccccaucucuacaaaagauagaaaaacuua

SEQ ID NO: 402855 - RNA, 32 nt, Homo Sapiens
uggaacuuucuaaaaguuauguuaucagugcc

SEQ ID NO: 402856 - RNA, 32 nt, Homo Sapiens
cauuuuucuaggguauagugccacugacuuac

SEQ ID NO: 402857 - RNA, 32 nt, Homo Sapiens
aguuuuaguaguagaauguuuucaagaaaugu

SEQ ID NO: 402858 - RNA, 32 nt, Homo Sapiens
cagcugcgcagccugcccuucgggacgcugga

SEQ ID NO: 402859 - RNA, 32 nt, Homo Sapiens
cggcuacuucuggugcugcugcuggguggcug

SEQ ID NO: 402860 - RNA, 32 nt, Homo Sapiens
aaaauacaaauuugugaauacaugacaugcug

SEQ ID NO: 402861 - RNA, 32 nt, Homo Sapiens
aagcagggaaaagaagcgugaagaucguagga

SEQ ID NO: 402862 - RNA, 32 nt, Homo Sapiens
gggguggguagucuguguucuaguuccuacau

SEQ ID NO: 402863 - RNA, 32 nt, Homo Sapiens
aaugacuguuuucucucucuauggaaauaaaa

SEQ ID NO: 402864 - RNA, 32 nt, Homo Sapiens
ggcggagcgcagcugcgccgggcuugggcgcc

SEQ ID NO: 402865 - RNA, 32 nt, Homo Sapiens
gcauagugugauuuuuauuuuaucucaggaua

SEQ ID NO: 402866 - RNA, 32 nt, Homo Sapiens
ucucuauccucagacucucaccagagaagaag

SEQ ID NO: 402867 - RNA, 32 nt, Homo Sapiens
agauucauguauauuauagacauaagcacugu

SEQ ID NO: 402868 - RNA, 32 nt, Homo Sapiens
uuuguccuguccuuucccuaggaggcacagac

SEQ ID NO: 402869 - RNA, 32 nt, Homo Sapiens
auccagagccucccggccuucuccgguguccu

SEQ ID NO: 402870 - RNA, 28 nt, Homo Sapiens
cagcgggggcggcuguaacugugaggaa

SEQ ID NO: 402871 - RNA, 32 nt, Homo Sapiens
uacccauuugaaagaauauuaguuguauauaa

SEQ ID NO: 402872 - RNA, 32 nt, Homo Sapiens
acuugggaaucaaagaaaauggaacuucuuuu

SEQ ID NO: 402873 - RNA, 32 nt, Homo Sapiens
ucaaauaauguuuccauucugaacauguuuug

SEQ ID NO: 402874 - RNA, 32 nt, Homo Sapiens
auuacuggucaaguacaucuuuucucuuaaaa

SEQ ID NO: 402875 - RNA, 32 nt, Homo Sapiens
cacugcccguacccuuacccgccccgccaccu

SEQ ID NO: 402876 - RNA, 32 nt, Homo Sapiens
aagagcagugcauccagauucuccucagaagu

SEQ ID NO: 402877 - RNA, 30 nt, Homo Sapiens
cacaacucuggccucaucgcccugggacuc

SEQ ID NO: 402878 - RNA, 32 nt, Homo Sapiens
cagagauuugccuuuucuuaaucaaagaaagg

SEQ ID NO: 402879 - RNA, 32 nt, Homo Sapiens
cucuggcaucuauaaaaguaaauucuagugcc

SEQ ID NO: 402880 - RNA, 32 nt, Homo Sapiens
gauuuccuucucccuuucccugcccacccugu

SEQ ID NO: 402881 - RNA, 32 nt, Homo Sapiens
ccugugggauggucguugggcuuccucguucg

SEQ ID NO: 402882 - RNA, 32 nt, Homo Sapiens
accucauccaggcuaccauccgcacccaguuu

SEQ ID NO: 402883 - RNA, 32 nt, Homo Sapiens
ggcacgagggcuguuugaaaggacuuuaucga

SEQ ID NO: 402884 - RNA, 32 nt, Homo Sapiens
uucuaauaccaauuguaauauuuacaauauuc

SEQ ID NO: 402885 - RNA, 32 nt, Homo Sapiens
ggaggaucaguuuuuuguuuuacaaugucaua

SEQ ID NO: 402886 - RNA, 32 nt, Homo Sapiens
caugcugacguugagggaacaccuggaggugu

SEQ ID NO: 402887 - RNA, 32 nt, Homo Sapiens
aagcuuauaauuuucuuuuuuaauuuuugaag

SEQ ID NO: 402888 - RNA, 32 nt, Homo Sapiens
gguuguuuuucugaagggaaaugccaccggcc

SEQ ID NO: 402889 - RNA, 32 nt, Homo Sapiens
ugccaucauacacuugugauggaugggaacgc

SEQ ID NO: 402890 - RNA, 28 nt, Homo Sapiens
gacugaguuacaggcaaugugggauggg

SEQ ID NO: 402891 - RNA, 31 nt, Homo Sapiens
ggaacagcgcggaguucaggaguccaagcac

SEQ ID NO: 402892 - RNA, 32 nt, Homo Sapiens
uucuaccccucccccuccccgcgguaccuugc

SEQ ID NO: 402893 - RNA, 32 nt, Homo Sapiens
acucagagaccgugagcgccccgcccccaccc

SEQ ID NO: 402894 - RNA, 32 nt, Homo Sapiens
aaacaccucguuuugaaggugaaucuuugguu

SEQ ID NO: 402895 - RNA, 32 nt, Homo Sapiens
gcgggcggcggccccaccauggcgauucgcaa

SEQ ID NO: 402896 - RNA, 32 nt, Homo Sapiens
gaacuucuauuauguaaagaaucucuagugua

SEQ ID NO: 402897 - RNA, 32 nt, Homo Sapiens
ugaauuaauguuuuacuuaauuuauauugaac

SEQ ID NO: 402898 - RNA, 32 nt, Homo Sapiens
acuccucaagggcagagaacugucuuucauuu

SEQ ID NO: 402899 - RNA, 32 nt, Homo Sapiens
uaauggacgaaggaacaacacacacacaaaaa

SEQ ID NO: 402900 - RNA, 32 nt, Homo Sapiens
ugccgccgcgccccgcgcgccgcuugcuccac

SEQ ID NO: 402901 - RNA, 32 nt, Homo Sapiens
uggaguguuucauaagcagaaaagccaugaug

SEQ ID NO: 402902 - RNA, 32 nt, Homo Sapiens
cccugaagccccauauguaguauagagcaaag

SEQ ID NO: 402903 - RNA, 32 nt, Homo Sapiens
ucauuauguaaaagaaaauauauuuuagcccc

SEQ ID NO: 402904 - RNA, 32 nt, Homo Sapiens
gaggaguuguggcuuugugucugcuggcacca

SEQ ID NO: 402905 - RNA, 29 nt, Homo Sapiens
cauugauaaaguuucuuucuuacagaagu

SEQ ID NO: 402906 - RNA, 32 nt, Homo Sapiens
cuuggggugaggggcgggagaguggaauauga

SEQ ID NO: 402907 - RNA, 32 nt, Homo Sapiens
aucuuuucccccugcacccgacaggacagaaa

SEQ ID NO: 402908 - RNA, 32 nt, Homo Sapiens
cgccucugccagcuccccagcccgaaacccag

SEQ ID NO: 402909 - RNA, 32 nt, Homo Sapiens
gccuggccaggaagauucugggaggcaauggg

SEQ ID NO: 402910 - RNA, 32 nt, Homo Sapiens
ugauuuuuaaacaguagacaacuauauuuuag

SEQ ID NO: 402911 - RNA, 32 nt, Homo Sapiens
cacucaaccccaccauuuuccacacguaggca

SEQ ID NO: 402912 - RNA, 32 nt, Homo Sapiens
gcuggagaggcacguggacaugccuccugggg

SEQ ID NO: 402913 - RNA, 32 nt, Homo Sapiens
aagucaacagccaauauuuaaaacuuuguucg

SEQ ID NO: 402914 - RNA, 32 nt, Homo Sapiens
ggcuuggagaagaacuggcagaugaacacguc

SEQ ID NO: 402915 - RNA, 32 nt, Homo Sapiens
ugagaugaaaaaccaaaggagagugggccuaa

SEQ ID NO: 402916 - RNA, 32 nt, Homo Sapiens
cagucgugggagccccucucagcuguggggcu

SEQ ID NO: 402917 - RNA, 32 nt, Homo Sapiens
gguggaggaucuuucuguguguucucugagua

SEQ ID NO: 402918 - RNA, 32 nt, Homo Sapiens
gaacgcuggcucggagcgccggcacccugggc

SEQ ID NO: 402919 - RNA, 32 nt, Homo Sapiens
cuugggaugggucuuucacuguucauggcaga

SEQ ID NO: 402920 - RNA, 32 nt, Homo Sapiens
caucaauaaaacaaaacauagucuagcaauua

SEQ ID NO: 402921 - RNA, 32 nt, Homo Sapiens
accuugauuuuauuuuaggagcuuauaaggca

SEQ ID NO: 402922 - RNA, 32 nt, Homo Sapiens
uuugggagugacucaagaagugaagaaugcac

SEQ ID NO: 402923 - RNA, 32 nt, Homo Sapiens
uacuugucagaacuagaggaaauagccaagac

SEQ ID NO: 402924 - RNA, 32 nt, Homo Sapiens
gggacccacccuggagggaguuguagccacuu

SEQ ID NO: 402925 - RNA, 32 nt, Homo Sapiens
ggcucgggaagacaccgugcccgccccaagag

SEQ ID NO: 402926 - RNA, 32 nt, Homo Sapiens
ucgcagaccugcccugccucaguuggaaaacc

SEQ ID NO: 402927 - RNA, 32 nt, Homo Sapiens
uaguugaacuguaauuucuacucuuaagugag

SEQ ID NO: 402928 - RNA, 32 nt, Homo Sapiens
uuguuccauuuaucucuauccuccccuuaaca

SEQ ID NO: 402929 - RNA, 32 nt, Homo Sapiens
cauguucacacgcugccucucgcugccgcagc

SEQ ID NO: 402930 - RNA, 32 nt, Homo Sapiens
gccacugcgccgggccuaauauaguuuugucg

SEQ ID NO: 402931 - RNA, 32 nt, Homo Sapiens
cuggccaccuacgcccuggucaucucagccaa

SEQ ID NO: 402932 - RNA, 32 nt, Homo Sapiens
auggaaaaacaaauauacaaauaugaaaugag

SEQ ID NO: 402933 - RNA, 32 nt, Homo Sapiens
auacuaacagcuacccuaucccugcccuggga

SEQ ID NO: 402934 - RNA, 32 nt, Homo Sapiens
aauuaugaauuucaaaguaucuuacaaauuug

SEQ ID NO: 402935 - RNA, 32 nt, Homo Sapiens
ugccauuccguauuuuucgucucuaaauuaua

SEQ ID NO: 402936 - RNA, 32 nt, Homo Sapiens
caucaagguggccguggaccgcagcugugaca

SEQ ID NO: 402937 - RNA, 32 nt, Homo Sapiens
guccuccuguuagggguggcgaauauuugagu

SEQ ID NO: 402938 - RNA, 32 nt, Homo Sapiens
gugccagcucacggauccugcugugugagccc

SEQ ID NO: 402939 - RNA, 32 nt, Homo Sapiens
acuaucaugaggaaacacacuggaggccuugg

SEQ ID NO: 402940 - RNA, 32 nt, Homo Sapiens
agauucaauaaaugacuuucuuucaaauaauc

SEQ ID NO: 402941 - RNA, 32 nt, Homo Sapiens
gaguuuucagaaagaaggcuaguagaguugau

SEQ ID NO: 402942 - RNA, 32 nt, Homo Sapiens
auggcuccucccagcccugggcccaagaggag

SEQ ID NO: 402943 - RNA, 31 nt, Homo Sapiens
aacuauugagccuugcauguacuugaggaug

SEQ ID NO: 402944 - RNA, 32 nt, Homo Sapiens
caguggcgcagugcccaacuucuaagccucau

SEQ ID NO: 402945 - RNA, 32 nt, Homo Sapiens
cguccccguccuccgugcagagcaaguugagg

SEQ ID NO: 402946 - RNA, 32 nt, Homo Sapiens
agggcccuaggaaagcagcaucaggugcuggg

SEQ ID NO: 402947 - RNA, 32 nt, Homo Sapiens
caggggugagguggagagggagacaugacagc

SEQ ID NO: 402948 - RNA, 32 nt, Homo Sapiens
gaucucaaacuccugaccucaugauccaccca

SEQ ID NO: 402949 - RNA, 32 nt, Homo Sapiens
caguugacaguguacaaugccuuugaugaacu

SEQ ID NO: 402950 - RNA, 32 nt, Homo Sapiens
cuuugguuaccguggaaaccacugccgccccu

SEQ ID NO: 402951 - RNA, 32 nt, Homo Sapiens
cucuguccaggggucagggacucauccccuca

SEQ ID NO: 402952 - RNA, 32 nt, Homo Sapiens
uuucauuagacaaugcuucuuguguguguucu

SEQ ID NO: 402953 - RNA, 32 nt, Homo Sapiens
gcacagagugaacagaagaauaauuccaugaa

SEQ ID NO: 402954 - RNA, 32 nt, Homo Sapiens
gagagcacuuucuucccagagccccaugcucu

SEQ ID NO: 402955 - RNA, 32 nt, Homo Sapiens
uugggccgcccggggacucuggagcauuggga

SEQ ID NO: 402956 - RNA, 32 nt, Homo Sapiens
cauuaccccgucccaccccugccuaccgcaca

SEQ ID NO: 402957 - RNA, 32 nt, Homo Sapiens
cugcauagguggugcgguccccggggauucug

SEQ ID NO: 402958 - RNA, 32 nt, Homo Sapiens
uaaucauaacucuuuaccaguagugguaaacc

SEQ ID NO: 402959 - RNA, 32 nt, Homo Sapiens
uguuauuuacaauaggaaaauuccuguuuggc

SEQ ID NO: 402960 - RNA, 32 nt, Homo Sapiens
gaccuuggugccucugacgggucagcuccucc

SEQ ID NO: 402961 - RNA, 32 nt, Homo Sapiens
cuauuuaaucaaauaagauacaugauauugaa

SEQ ID NO: 402962 - RNA, 32 nt, Homo Sapiens
cugggauucugggggaauagggucugggcucu

SEQ ID NO: 402963 - RNA, 32 nt, Homo Sapiens
uggaagaacaaaugaagggaguuuuacuucaa

SEQ ID NO: 402964 - RNA, 32 nt, Homo Sapiens
ucuguaagauuuuauuuucaagcaaauauuua

SEQ ID NO: 402965 - RNA, 32 nt, Homo Sapiens
cauucuagccuggauuucuccccacuggaggu

SEQ ID NO: 402966 - RNA, 31 nt, Homo Sapiens
aaaaggcugcacugccaaccaugauuuguga

SEQ ID NO: 402967 - RNA, 32 nt, Homo Sapiens
uucaauggauggauuaauauuuaucccccuuu

SEQ ID NO: 402968 - RNA, 32 nt, Homo Sapiens
uugcaaacaauuuuaaugaugguguuaaagcu

SEQ ID NO: 402969 - RNA, 32 nt, Homo Sapiens
ugggggagugggcgcaguggcucacaccugua

SEQ ID NO: 402970 - RNA, 32 nt, Homo Sapiens
ccgagcccaagccccugcacuugcauuuuauu

SEQ ID NO: 402971 - RNA, 32 nt, Homo Sapiens
guacccuuuguccuggccuccggagcgcuccc

SEQ ID NO: 402972 - RNA, 32 nt, Homo Sapiens
uuaaaagugcaucaucggcacucaauagagau

SEQ ID NO: 402973 - RNA, 32 nt, Homo Sapiens
cuucaucucuaguuuuccuucuuugugaggau

SEQ ID NO: 402974 - RNA, 32 nt, Homo Sapiens
cuccaggguaccacaacagacaauggcucagc

SEQ ID NO: 402975 - RNA, 32 nt, Homo Sapiens
agugucaucuucugcccucccugucccaauag

SEQ ID NO: 402976 - RNA, 29 nt, Homo Sapiens
gcaccucggggacaccagagcugccgacu

SEQ ID NO: 402977 - RNA, 32 nt, Homo Sapiens
cauaaugaguucuuggugauacaauggugaga

SEQ ID NO: 402978 - RNA, 32 nt, Homo Sapiens
cucuuaagggaagaugaggguagaagauguua

SEQ ID NO: 402979 - RNA, 32 nt, Homo Sapiens
gccacgagugacuggcuggauguuacaauguc

SEQ ID NO: 402980 - RNA, 32 nt, Homo Sapiens
gggaaaucaaggaaagaccaguuuccauuuau

SEQ ID NO: 402981 - RNA, 32 nt, Homo Sapiens
auguuuuggcaucuuuagacaccuggaaaguc

SEQ ID NO: 402982 - RNA, 32 nt, Homo Sapiens
gccuaagauagcuucuagcaucagaucaaucc

SEQ ID NO: 402983 - RNA, 32 nt, Homo Sapiens
caggaagaggucugcuggccucugugugggga

SEQ ID NO: 402984 - RNA, 32 nt, Homo Sapiens
auugaagacaccugcucaguaugaugcuucug

SEQ ID NO: 402985 - RNA, 32 nt, Homo Sapiens
uccaaacaaggcuugaauaagguuuacuacag

SEQ ID NO: 402986 - RNA, 32 nt, Homo Sapiens
aggaguuccacuuuuggaggcaaaaaaacaaa

SEQ ID NO: 402987 - RNA, 32 nt, Homo Sapiens
gguuuuaauuuucaguucuauuuaaaauggug

SEQ ID NO: 402988 - RNA, 32 nt, Homo Sapiens
aaagcaaaaagaauacguuugcugguguauau

SEQ ID NO: 402989 - RNA, 32 nt, Homo Sapiens
uccuaggcuuucggugcuuccacacaugcaaa

SEQ ID NO: 402990 - RNA, 32 nt, Homo Sapiens
auggcaccucucagcccucccaggaaacacac

SEQ ID NO: 402991 - RNA, 32 nt, Homo Sapiens
gauagaagggaagaaaggagauucuaggcaga

SEQ ID NO: 402992 - RNA, 32 nt, Homo Sapiens
cugccccacaguccucaggcuccagcuuucuc

SEQ ID NO: 402993 - RNA, 31 nt, Homo Sapiens
gggcucucacggagggccucccagcugcccg

SEQ ID NO: 402994 - RNA, 32 nt, Homo Sapiens
agccagguacuacuccgccagugacccuggac

SEQ ID NO: 402995 - RNA, 27 nt, Homo Sapiens
aaaugaaaacuuucaagauuauacagg

SEQ ID NO: 402996 - RNA, 32 nt, Homo Sapiens
cccucucagaccccccaccugagucuccacag

SEQ ID NO: 402997 - RNA, 32 nt, Homo Sapiens
acuauuugcagucaaacuuugauccuuguuuu

SEQ ID NO: 402998 - RNA, 32 nt, Homo Sapiens
uguuccaucuuuacacuuucucuucugagaug

SEQ ID NO: 402999 - RNA, 32 nt, Homo Sapiens
aagacaagguaacggugaaagcuccucaaaac

SEQ ID NO: 403000 - RNA, 32 nt, Homo Sapiens
gcccaggcuccccaagcuucccugcaucuugg

SEQ ID NO: 403001 - RNA, 31 nt, Homo Sapiens
cugguagagccucgcuggccccgcgccccgg

SEQ ID NO: 403002 - RNA, 32 nt, Homo Sapiens
ccuccgccgccucagcagcagccgaucagaag

SEQ ID NO: 403003 - RNA, 32 nt, Homo Sapiens
cucugcaucccaagccauccagcccuucuccc

SEQ ID NO: 403004 - RNA, 32 nt, Homo Sapiens
ugauucaugugcuugugccuaccuggccgcaa

SEQ ID NO: 403005 - RNA, 32 nt, Homo Sapiens
ucugccccaccuuacuucuccucccugacaga

SEQ ID NO: 403006 - RNA, 32 nt, Homo Sapiens
cuauuaccaacauuuuccugugcauuaaccuc

SEQ ID NO: 403007 - RNA, 32 nt, Homo Sapiens
uaucuaaaucuuccuuuucuuucagaaauauu

SEQ ID NO: 403008 - RNA, 32 nt, Homo Sapiens
cugcccccuccacuuccugcccucuguuccau

SEQ ID NO: 403009 - RNA, 32 nt, Homo Sapiens
accuguaaagucuuaguuuucagacauuaagu

SEQ ID NO: 403010 - RNA, 32 nt, Homo Sapiens
uccuggguacaguacauuguaaaauuuagcag

SEQ ID NO: 403011 - RNA, 32 nt, Homo Sapiens
cuguccuugugucgucuuuuuaauuuuuccuu

SEQ ID NO: 403012 - RNA, 32 nt, Homo Sapiens
aacugaaaacaaaagaacaagaagaugaucua

SEQ ID NO: 403013 - RNA, 32 nt, Homo Sapiens
acaccaauuggaaaaacugccauugcugugau

SEQ ID NO: 403014 - RNA, 32 nt, Homo Sapiens
acacuccuaggcauguguggacaggcugccua

SEQ ID NO: 403015 - RNA, 29 nt, Homo Sapiens
ucuuguucuaaauaacuuuccagauucca

SEQ ID NO: 403016 - RNA, 32 nt, Homo Sapiens
cucugucucaggcagggcaucauucaguaauu

SEQ ID NO: 403017 - RNA, 32 nt, Homo Sapiens
cauaaugagagaauaaacuuauuuuauuuaac

SEQ ID NO: 403018 - RNA, 32 nt, Homo Sapiens
ggugcccuucaccaagcuucccaucgucaggc

SEQ ID NO: 403019 - RNA, 32 nt, Homo Sapiens
ccacccaauaucucgcgagacuugcuauucug

SEQ ID NO: 403020 - RNA, 32 nt, Homo Sapiens
gcccggguuccgaaagucucggggguggguau

SEQ ID NO: 403021 - RNA, 32 nt, Homo Sapiens
guaauaauuuaaaauacaagaacgaauauuua

SEQ ID NO: 403022 - RNA, 32 nt, Homo Sapiens
aaguaaaaaauaaaacagaggauacuacaggc

SEQ ID NO: 403023 - RNA, 32 nt, Homo Sapiens
ggcuggaauuuacguucugauuuuuuguggcc

SEQ ID NO: 403024 - RNA, 32 nt, Homo Sapiens
uaaaauccccgggucuuuaucauucaguuugu

SEQ ID NO: 403025 - RNA, 32 nt, Homo Sapiens
uuuccaagggaagagggcaaaaaguggccugg

SEQ ID NO: 403026 - RNA, 32 nt, Homo Sapiens
gugcacaaggaggcccgggccagggacuucac

SEQ ID NO: 403027 - RNA, 29 nt, Homo Sapiens
aaccauggucagcuggggucguuucaucu

SEQ ID NO: 403028 - RNA, 32 nt, Homo Sapiens
aggcgaggaccgaaucgccucuggugugcguu

SEQ ID NO: 403029 - RNA, 32 nt, Homo Sapiens
aaacuguucagcaaagguaucauuagggagca

SEQ ID NO: 403030 - RNA, 32 nt, Homo Sapiens
cuguugaguugcugccaacaaacaaaaaauac

SEQ ID NO: 403031 - RNA, 32 nt, Homo Sapiens
caagggggugccggugagcgaggcggagugca

SEQ ID NO: 403032 - RNA, 32 nt, Homo Sapiens
agugcaacuaaaucauuuauuaguuguuuuuu

SEQ ID NO: 403033 - RNA, 32 nt, Homo Sapiens
acucguccuguggcggcccccggcguggggcg

SEQ ID NO: 403034 - RNA, 32 nt, Homo Sapiens
ggccacugcagcagccaugaagggcagugggu

SEQ ID NO: 403035 - RNA, 32 nt, Homo Sapiens
ugugccaguuuaguuaacucagucauuagggg

SEQ ID NO: 403036 - RNA, 32 nt, Homo Sapiens
aauaaggggaguagaggaauguuaucauucac

SEQ ID NO: 403037 - RNA, 32 nt, Homo Sapiens
aaggaccccacuugcaccccaccccagccaug

SEQ ID NO: 403038 - RNA, 32 nt, Homo Sapiens
agggaaccaacccccacccucccuccugggac

SEQ ID NO: 403039 - RNA, 32 nt, Homo Sapiens
agguguauuuuugucguaugugauagaauauu

SEQ ID NO: 403040 - RNA, 32 nt, Homo Sapiens
cggcgaccccgggaacccugcucaguccugcc

SEQ ID NO: 403041 - RNA, 32 nt, Homo Sapiens
caaauauaaaagacaacauauuauuuaacaua

SEQ ID NO: 403042 - RNA, 32 nt, Homo Sapiens
cuuugaggcugggaaacugaucugcuggguga

SEQ ID NO: 403043 - RNA, 32 nt, Homo Sapiens
uuaaacaaggcuggcugcagcuggccuccgcc

SEQ ID NO: 403044 - RNA, 32 nt, Homo Sapiens
aggcggugacaggcccagcccgggcugcgggc

SEQ ID NO: 403045 - RNA, 32 nt, Homo Sapiens
gaucuucuauugggucuuucugagguucagag

SEQ ID NO: 403046 - RNA, 32 nt, Homo Sapiens
uguuggcaauccccggccacggagaccaccgu

SEQ ID NO: 403047 - RNA, 32 nt, Homo Sapiens
ucuacgacagcauuuugaaaaacuacaagacu

SEQ ID NO: 403048 - RNA, 32 nt, Homo Sapiens
gaaaaacaacaaaaacaaaaacacaaauuagu

SEQ ID NO: 403049 - RNA, 32 nt, Homo Sapiens
ggcuguggucagcugggaucuucugccaccau

SEQ ID NO: 403050 - RNA, 28 nt, Homo Sapiens
acuuaaguggcuaaagagaugagacaaa

SEQ ID NO: 403051 - RNA, 32 nt, Homo Sapiens
aggaacuccgcggugaaccugggcggccaccc

SEQ ID NO: 403052 - RNA, 32 nt, Homo Sapiens
uaaauaauugcuaguuuauuaaggaauauuuu

SEQ ID NO: 403053 - RNA, 32 nt, Homo Sapiens
uugccacuucgggcuucucacugcagcugggc

SEQ ID NO: 403054 - RNA, 32 nt, Homo Sapiens
cucacugcaaccuccgccucucagguucaagu

SEQ ID NO: 403055 - RNA, 32 nt, Homo Sapiens
gguauucgauacugcgacuuucugccuggagu

SEQ ID NO: 403056 - RNA, 32 nt, Homo Sapiens
ggaccgugcccgggccccggcgcccccagccc

SEQ ID NO: 403057 - RNA, 32 nt, Homo Sapiens
auauuuuugcuaaaccuauuucacaaaucacc

SEQ ID NO: 403058 - RNA, 32 nt, Homo Sapiens
gaaggagguucaagaggcugugcuuuccaagu

SEQ ID NO: 403059 - RNA, 32 nt, Homo Sapiens
ucaauuuguaaaaaaugugauaucuaugaaau

SEQ ID NO: 403060 - RNA, 32 nt, Homo Sapiens
ggcacgaggcgcgagcucggagggcccggcug

SEQ ID NO: 403061 - RNA, 32 nt, Homo Sapiens
ggucucuucaucucagaaaugccaaucagguc

SEQ ID NO: 403062 - RNA, 32 nt, Homo Sapiens
ucagcaaauggcauuagcagcugucaucagaa

SEQ ID NO: 403063 - RNA, 32 nt, Homo Sapiens
augcacauuggggaagaugcgcuccucaggga

SEQ ID NO: 403064 - RNA, 32 nt, Homo Sapiens
gggguggcgugggcuugcaaggcgcugcuggu

SEQ ID NO: 403065 - RNA, 32 nt, Homo Sapiens
uggaugaguuugauuucuuuugcuauuucauu

SEQ ID NO: 403066 - RNA, 32 nt, Homo Sapiens
cagguucacagcacucccucccuccauuguga

SEQ ID NO: 403067 - RNA, 32 nt, Homo Sapiens
gcuuauuccuugcuuuauguccuacuaucugg

SEQ ID NO: 403068 - RNA, 32 nt, Homo Sapiens
gggcgaaagggagaaggaaacgaggguuuauu

SEQ ID NO: 403069 - RNA, 32 nt, Homo Sapiens
auccaguccagcugcaugcccucucucugcuu

SEQ ID NO: 403070 - RNA, 32 nt, Homo Sapiens
aggaggggacgaaggacgagccaugggguuuu

SEQ ID NO: 403071 - RNA, 32 nt, Homo Sapiens
gauuuagggaaacuguggcagaugagugggag

SEQ ID NO: 403072 - RNA, 32 nt, Homo Sapiens
uuuaaucugucuuuuuacauuggcuuuuguuu

SEQ ID NO: 403073 - RNA, 32 nt, Homo Sapiens
agaaauaauauuugaucuucucaguguuggaa

SEQ ID NO: 403074 - RNA, 32 nt, Homo Sapiens
ccaaccuugagccccaggagauaccgcgccca

SEQ ID NO: 403075 - RNA, 32 nt, Homo Sapiens
cgcugagacgguuugggggugggugggcggga

SEQ ID NO: 403076 - RNA, 32 nt, Homo Sapiens
cuaggaccagcuugccacgguuucucagagcc

SEQ ID NO: 403077 - RNA, 32 nt, Homo Sapiens
caggaaacaaagcuagagguggcuccccucuc

SEQ ID NO: 403078 - RNA, 32 nt, Homo Sapiens
aaacccaaacuccgaagacuugacacucacuc

SEQ ID NO: 403079 - RNA, 32 nt, Homo Sapiens
caauauuuguaaaaguugucuuucucaaccuc

SEQ ID NO: 403080 - RNA, 32 nt, Homo Sapiens
gggccgcggaaucggagcgaccuuggugacug

SEQ ID NO: 403081 - RNA, 32 nt, Homo Sapiens
uucaauucaaaauaaguaugugaaucaguagu

SEQ ID NO: 403082 - RNA, 32 nt, Homo Sapiens
gggucacaggggugggggcucucacaaggcga

SEQ ID NO: 403083 - RNA, 32 nt, Homo Sapiens
ucucgcggguuagugcggggucgggcucggcc

SEQ ID NO: 403084 - RNA, 32 nt, Homo Sapiens
ugcuagcagggaagagggacgcgccggcgaau

SEQ ID NO: 403085 - RNA, 32 nt, Homo Sapiens
gaagcagaugacugaggaagggauggacuaag

SEQ ID NO: 403086 - RNA, 32 nt, Homo Sapiens
aaauuuccuaggaaacacagacauaggauagc

SEQ ID NO: 403087 - RNA, 32 nt, Homo Sapiens
gaccacaaaaauugacucaaaucuccaguauu

SEQ ID NO: 403088 - RNA, 32 nt, Homo Sapiens
uuaguauacuaaaguaacccucucuuauaugu

SEQ ID NO: 403089 - RNA, 32 nt, Homo Sapiens
acauucugauucagcaggccugagauucuaca

SEQ ID NO: 403090 - RNA, 32 nt, Homo Sapiens
ucuagaguggaugcugaggaccacguggaaga

SEQ ID NO: 403091 - RNA, 32 nt, Homo Sapiens
ugaucgcgccugcgaacagccauugcacucca

SEQ ID NO: 403092 - RNA, 32 nt, Homo Sapiens
gacuguggcugggacaggaguuguguguagaa

SEQ ID NO: 403093 - RNA, 32 nt, Homo Sapiens
uuucucuuuucugcauaggaagguccuugaag

SEQ ID NO: 403094 - RNA, 32 nt, Homo Sapiens
ccaucggaggcuaggaugccagacacagccau

SEQ ID NO: 403095 - RNA, 32 nt, Homo Sapiens
aacaaaaaauuuaaaaguaaagaauaugauga

SEQ ID NO: 403096 - RNA, 32 nt, Homo Sapiens
aucagacuguauuaaaaauguuaguacauuac

SEQ ID NO: 403097 - RNA, 32 nt, Homo Sapiens
cucuccuaaaauguguuucauucuaguaagaa

SEQ ID NO: 403098 - RNA, 30 nt, Homo Sapiens
gcaagggagaagcugcuggucggacucaca

SEQ ID NO: 403099 - RNA, 27 nt, Homo Sapiens
uuucuucauuaauuuuguguuuaaguu

SEQ ID NO: 403100 - RNA, 32 nt, Homo Sapiens
cuugccugggaagaggggcaggaggccagugg

SEQ ID NO: 403101 - RNA, 32 nt, Homo Sapiens
gcuguguauaaaauauuuaaaauguuguaugg

SEQ ID NO: 403102 - RNA, 32 nt, Homo Sapiens
gcauguuauuguggcaagaauauccuaaaugu

SEQ ID NO: 403103 - RNA, 32 nt, Homo Sapiens
agagcuauauacaugaaaaugagucuuauaaa

SEQ ID NO: 403104 - RNA, 32 nt, Homo Sapiens
ccgguuuuuuauuuucuuuacaauuucacuua

SEQ ID NO: 403105 - RNA, 32 nt, Homo Sapiens
accaccaugugucucacccauuucuaauuuca

SEQ ID NO: 403106 - RNA, 32 nt, Homo Sapiens
aauccagaaugggaaguguccagcaagccuac

SEQ ID NO: 403107 - RNA, 32 nt, Homo Sapiens
uaaacaaugaauuaugaauaccgcagggcagc

SEQ ID NO: 403108 - RNA, 32 nt, Homo Sapiens
augucaaaauauauucuuaaguguuuuauaac

SEQ ID NO: 403109 - RNA, 32 nt, Homo Sapiens
uucaacagcauuaacggaguuugccaagugca

SEQ ID NO: 403110 - RNA, 32 nt, Homo Sapiens
acuaacacaagagcuuccagugccugggccgu

SEQ ID NO: 403111 - RNA, 32 nt, Homo Sapiens
gaauguagcuucucaguucacuguauaugauu

SEQ ID NO: 403112 - RNA, 32 nt, Homo Sapiens
aaaugauccgccacccugaggguggugauggu

SEQ ID NO: 403113 - RNA, 32 nt, Homo Sapiens
ugaaaauuacuacuuaaaaucuuugcaaauug

SEQ ID NO: 403114 - RNA, 32 nt, Homo Sapiens
uuucuccagacucgcccuccccacccgggccu

SEQ ID NO: 403115 - RNA, 32 nt, Homo Sapiens
ucaaaaauuaaaauuuuucauuauuagcuauc

SEQ ID NO: 403116 - RNA, 32 nt, Homo Sapiens
gaccagcagaauccacccggugaccaguggug

SEQ ID NO: 403117 - RNA, 32 nt, Homo Sapiens
cugcagcacccugaucugcacuccaugagggg

SEQ ID NO: 403118 - RNA, 32 nt, Homo Sapiens
gcaaagaagaaagauaaaugugaagugcuggg

SEQ ID NO: 403119 - RNA, 32 nt, Homo Sapiens
aacccucgggacugcgacgagggcgcccgccc

SEQ ID NO: 403120 - RNA, 32 nt, Homo Sapiens
caacucucuccacucucagccaucagugccag

SEQ ID NO: 403121 - RNA, 32 nt, Homo Sapiens
cagccaaaacugggcccugugcaugcuggugg

SEQ ID NO: 403122 - RNA, 32 nt, Homo Sapiens
aggaggaguuagccaaacaacaacaaaaacaa

SEQ ID NO: 403123 - RNA, 32 nt, Homo Sapiens
gacugaggacagagacccagagugaccccugc

SEQ ID NO: 403124 - RNA, 32 nt, Homo Sapiens
ccgguuccccuggccgccuccucugugucauu

SEQ ID NO: 403125 - RNA, 32 nt, Homo Sapiens
agcauccucucugcccuucucugccaccccgg

SEQ ID NO: 403126 - RNA, 32 nt, Homo Sapiens
uggcuuuguauuacuguaguauugaauaguuu

SEQ ID NO: 403127 - RNA, 32 nt, Homo Sapiens
aucaaaaugcaaaacuugggaauaaaucauag

SEQ ID NO: 403128 - RNA, 32 nt, Homo Sapiens
ugagaagcuucaguggagaggccuacucuaau

SEQ ID NO: 403129 - RNA, 32 nt, Homo Sapiens
gaacuccagaaagagcagugugcuuaugcuuc

SEQ ID NO: 403130 - RNA, 32 nt, Homo Sapiens
aggagaaaggcaaaagcaaacaaccagcuacu

SEQ ID NO: 403131 - RNA, 32 nt, Homo Sapiens
gaggaugcaggucccagccaguccucaggacc

SEQ ID NO: 403132 - RNA, 32 nt, Homo Sapiens
ugugcagaaacacuuguguggccugucccugu

SEQ ID NO: 403133 - RNA, 32 nt, Homo Sapiens
gacgcgguggcgguagcgcccgcuguggugga

SEQ ID NO: 403134 - RNA, 32 nt, Homo Sapiens
caaagucaucugccugcuccccgggggagagg

SEQ ID NO: 403135 - RNA, 31 nt, Homo Sapiens
guggggauggggguaucaggagucuagcugc

SEQ ID NO: 403136 - RNA, 32 nt, Homo Sapiens
acauaaauggauuaauuacuaauuucaguuga

SEQ ID NO: 403137 - RNA, 32 nt, Homo Sapiens
ugcccgcgccgccccuggcccgcgccaccuuc

SEQ ID NO: 403138 - RNA, 32 nt, Homo Sapiens
ccaggguuugcucugcagacacaccugggagg

SEQ ID NO: 403139 - RNA, 32 nt, Homo Sapiens
cucucgcuuuuggagcaaguugcauuaacuau

SEQ ID NO: 403140 - RNA, 32 nt, Homo Sapiens
agcaugguacaucucacacuaggauucccucu

SEQ ID NO: 403141 - RNA, 32 nt, Homo Sapiens
cccaaagugaacacugauggaguggucaaaau

SEQ ID NO: 403142 - RNA, 32 nt, Homo Sapiens
gagugacgcugggaacccaggguuguggucca

SEQ ID NO: 403143 - RNA, 32 nt, Homo Sapiens
gaacccccagguccuggugcugcagggacaca

SEQ ID NO: 403144 - RNA, 32 nt, Homo Sapiens
accguuggagggccggggggugcuggugguca

SEQ ID NO: 403145 - RNA, 32 nt, Homo Sapiens
cgguaacgcgcgcgggcagguguccgaccaug

SEQ ID NO: 403146 - RNA, 32 nt, Homo Sapiens
gcuggucgccuacccgugauguucugcccacg

SEQ ID NO: 403147 - RNA, 32 nt, Homo Sapiens
uagaauauuggcuauuucucuuuucugggauu

SEQ ID NO: 403148 - RNA, 32 nt, Homo Sapiens
uguuggggauaccaccuccuggcagagcccug

SEQ ID NO: 403149 - RNA, 32 nt, Homo Sapiens
aagcuaucugucugccuuggguucccaaagua

SEQ ID NO: 403150 - RNA, 30 nt, Homo Sapiens
gacacucgcgcgcagccccgcggccguccc

SEQ ID NO: 403151 - RNA, 32 nt, Homo Sapiens
cauaugauauucuuauuagaaaacagaaguag

SEQ ID NO: 403152 - RNA, 32 nt, Homo Sapiens
gaggaguggaacugaggccccccagauguugc

SEQ ID NO: 403153 - RNA, 32 nt, Homo Sapiens
gaaaacagcccuuuuccaagcccauuguuucu

SEQ ID NO: 403154 - RNA, 32 nt, Homo Sapiens
uuauugaauuguaauguuuaucugcugcuuuu

SEQ ID NO: 403155 - RNA, 32 nt, Homo Sapiens
aaguaggugcuucauguccugagggugcaauc

SEQ ID NO: 403156 - RNA, 32 nt, Homo Sapiens
uuccucugucacuucaaaacuccagcuugccc

SEQ ID NO: 403157 - RNA, 32 nt, Homo Sapiens
aaauauugaagugucuaacaaauggcauugaa

SEQ ID NO: 403158 - RNA, 32 nt, Homo Sapiens
aucccuuaauuuaagucauuuucaugugugug

SEQ ID NO: 403159 - RNA, 32 nt, Homo Sapiens
uaaauuacugucagcagcuaaccaauggcagg

SEQ ID NO: 403160 - RNA, 32 nt, Homo Sapiens
aaucacaaaaauuugaacacuggcuaaagaua

SEQ ID NO: 403161 - RNA, 32 nt, Homo Sapiens
uaaacaaacuggggggagaagaacagcaauug

SEQ ID NO: 403162 - RNA, 32 nt, Homo Sapiens
guguaaugaauucuaacaacucaaauuuugcu

SEQ ID NO: 403163 - RNA, 32 nt, Homo Sapiens
ucuacugagaaauuauuuuaaucagacaccag

SEQ ID NO: 403164 - RNA, 32 nt, Homo Sapiens
cuguuaauuacaucuccauuagggcugaaaag

SEQ ID NO: 403165 - RNA, 32 nt, Homo Sapiens
gaagcugcuuuugucuucaggaaugaugcagg

SEQ ID NO: 403166 - RNA, 32 nt, Homo Sapiens
cggcuuucugucucuggugugaacaggcaauc

SEQ ID NO: 403167 - RNA, 32 nt, Homo Sapiens
uccuuuggaaauaaaucacaggcaucuggaaa

SEQ ID NO: 403168 - RNA, 32 nt, Homo Sapiens
gugaguuguuuucuucucuggcacucuucacu

SEQ ID NO: 403169 - RNA, 32 nt, Homo Sapiens
gcacggagggucacugggcggcauggcggugu

SEQ ID NO: 403170 - RNA, 32 nt, Homo Sapiens
cuuuugaaggcuccucuuucugcccuucccca

SEQ ID NO: 403171 - RNA, 32 nt, Homo Sapiens
cuugcucguucucuagcccacccucgcacacu

SEQ ID NO: 403172 - RNA, 32 nt, Homo Sapiens
uaaacucucuuuucuucuuaauuucuguucgc

SEQ ID NO: 403173 - RNA, 32 nt, Homo Sapiens
gugcggcggcgguugcgagagagaugagccgc

SEQ ID NO: 403174 - RNA, 32 nt, Homo Sapiens
gugaacuguguauaaauuuauucuaacauuua

SEQ ID NO: 403175 - RNA, 32 nt, Homo Sapiens
gaugaugagggcccgggcgccucuugcaaugg

SEQ ID NO: 403176 - RNA, 32 nt, Homo Sapiens
gaugaugacaguuuauuuucuacacuuccccu

SEQ ID NO: 403177 - RNA, 32 nt, Homo Sapiens
aaugucaguacuaccagcacuuugccaaaacu

SEQ ID NO: 403178 - RNA, 32 nt, Homo Sapiens
accugagacuggguaauuuauaaagaaaagag

SEQ ID NO: 403179 - RNA, 32 nt, Homo Sapiens
ccagaccugccagcagaugcugugugagggug

SEQ ID NO: 403180 - RNA, 32 nt, Homo Sapiens
ucaaaugccgugaaacauggcaucaugcucua

SEQ ID NO: 403181 - RNA, 32 nt, Homo Sapiens
caacgggaacgauguggaaggugucagcucug

SEQ ID NO: 403182 - RNA, 32 nt, Homo Sapiens
gaaggagaguaauuuuacaauggauaaauuug

SEQ ID NO: 403183 - RNA, 32 nt, Homo Sapiens
cugcagucgggccagcugucgcaccucagcgg

SEQ ID NO: 403184 - RNA, 32 nt, Homo Sapiens
gcaaguagcucuuuccugccugcuucucagcu

SEQ ID NO: 403185 - RNA, 32 nt, Homo Sapiens
ccacaguuccuucccaugggggccccuacacg

SEQ ID NO: 403186 - RNA, 32 nt, Homo Sapiens
caccauuuucuuucuaaacuuuuccagagaaa

SEQ ID NO: 403187 - RNA, 32 nt, Homo Sapiens
acuuaacccaaggucaagcagaugaguaguga

SEQ ID NO: 403188 - RNA, 32 nt, Homo Sapiens
auggcauuuuucugggagggguggggauuggg

SEQ ID NO: 403189 - RNA, 32 nt, Homo Sapiens
cuuuaauucugcuuacuauuucauggaaaaaa

SEQ ID NO: 403190 - RNA, 32 nt, Homo Sapiens
cugcaguugggccagcugucgcaucucagcgg

SEQ ID NO: 403191 - RNA, 32 nt, Homo Sapiens
ugcuugaagcaaacaguugacaauuuuuaacc

SEQ ID NO: 403192 - RNA, 32 nt, Homo Sapiens
ucuucaauuacaucuacaaguaaguacagcug

SEQ ID NO: 403193 - RNA, 32 nt, Homo Sapiens
ggcuuuuaaaagacuuguuagccaacuucaag

SEQ ID NO: 403194 - RNA, 32 nt, Homo Sapiens
acuucuggaauaucugcaaacaacaauaauau

SEQ ID NO: 403195 - RNA, 32 nt, Homo Sapiens
cagcagcagcagcagcagcagcagcagcacca

SEQ ID NO: 403196 - RNA, 32 nt, Homo Sapiens
aucaccuugccacaguguccccggcuucuaag

SEQ ID NO: 403197 - RNA, 32 nt, Homo Sapiens
gaaaguuauuuacaauauaacacuguaaauaa

SEQ ID NO: 403198 - RNA, 32 nt, Homo Sapiens
caggaaggcagguuuuauuucagggcccuuuu

SEQ ID NO: 403199 - RNA, 32 nt, Homo Sapiens
ccucccugcuccaagugcaccaggaugcaaau

SEQ ID NO: 403200 - RNA, 32 nt, Homo Sapiens
cuaaacugaguuuuuaauaugaacuagucaaa

SEQ ID NO: 403201 - RNA, 32 nt, Homo Sapiens
agcaggcucccuccuucugcagcccggcgaau

SEQ ID NO: 403202 - RNA, 32 nt, Homo Sapiens
gugcauggggacuggcugaggagccagcaugg

SEQ ID NO: 403203 - RNA, 32 nt, Homo Sapiens
aagacaaacuuuucuuuuuuaaaauaaauuuu

SEQ ID NO: 403204 - RNA, 32 nt, Homo Sapiens
caaacaucacgacaggcaucuguggagccugg

SEQ ID NO: 403205 - RNA, 32 nt, Homo Sapiens
accccuagggaagaaagaaggacuggguuuag

SEQ ID NO: 403206 - RNA, 32 nt, Homo Sapiens
agggccucugcuaauuuagagagaccuaucca

SEQ ID NO: 403207 - RNA, 32 nt, Homo Sapiens
cauuuuauaaagguguuuuguauuuuauguua

SEQ ID NO: 403208 - RNA, 32 nt, Homo Sapiens
uaugugugaaugcauacugaauguaaagugga

SEQ ID NO: 403209 - RNA, 32 nt, Homo Sapiens
auuuauuuuuauuuauuuuuuauuuuugagac

SEQ ID NO: 403210 - RNA, 32 nt, Homo Sapiens
cucccacagggagaggccccguggguauucuc

SEQ ID NO: 403211 - RNA, 32 nt, Homo Sapiens
uaaauaauugcuagcuuauuaaggaauauuuu

SEQ ID NO: 403212 - RNA, 31 nt, Homo Sapiens
uuuaucuugcuuaccuuauagauuauaaguc

SEQ ID NO: 403213 - RNA, 32 nt, Homo Sapiens
gcagauuucugcauugguuuuccaguccuguu

SEQ ID NO: 403214 - RNA, 29 nt, Homo Sapiens
acuuagguauguaucagaggcaauaauuu

SEQ ID NO: 403215 - RNA, 32 nt, Homo Sapiens
uggaggcucugcaaccacaguuugagaaacuc

SEQ ID NO: 403216 - RNA, 32 nt, Homo Sapiens
ucucauccuguccuuggugccuuuuucugccc

SEQ ID NO: 403217 - RNA, 32 nt, Homo Sapiens
ggcaggguagagagcgcuugcgggcgccgggc

SEQ ID NO: 403218 - RNA, 32 nt, Homo Sapiens
ugcacaauugguuauauuuaugaccugauauu

SEQ ID NO: 403219 - RNA, 32 nt, Homo Sapiens
ccuuugcuucccuccguccucgcucaguugug

SEQ ID NO: 403220 - RNA, 32 nt, Homo Sapiens
uaacuccaagugcugcgguugauuccagugag

SEQ ID NO: 403221 - RNA, 32 nt, Homo Sapiens
ucuuugaaucuucagucugauuuuuaauguaa

SEQ ID NO: 403222 - RNA, 32 nt, Homo Sapiens
gggcagccugcgccuggguaccgaggcugcug

SEQ ID NO: 403223 - RNA, 32 nt, Homo Sapiens
ggguacuuaagccccagaagauuuugcuacca

SEQ ID NO: 403224 - RNA, 32 nt, Homo Sapiens
cuggagcaccccgugacgggcgagccagccac

SEQ ID NO: 403225 - RNA, 32 nt, Homo Sapiens
aacagaaagaaccuugcugggguuggagguuu

SEQ ID NO: 403226 - RNA, 32 nt, Homo Sapiens
uugaagaaacaaacugaagaaaaaaugcuucc

SEQ ID NO: 403227 - RNA, 32 nt, Homo Sapiens
ugucuucagccagcugaagcuguggggcuggg

SEQ ID NO: 403228 - RNA, 32 nt, Homo Sapiens
ggcguggguagagcaggaauugguuuuccagc

SEQ ID NO: 403229 - RNA, 32 nt, Homo Sapiens
cugcauuuauuuugauuuuuaacguugcauua

SEQ ID NO: 403230 - RNA, 32 nt, Homo Sapiens
agagaugugggaggagaagaggacacgagggc

SEQ ID NO: 403231 - RNA, 32 nt, Homo Sapiens
guggccgccacuuuugaauucucagauugccc

SEQ ID NO: 403232 - RNA, 32 nt, Homo Sapiens
uuggggcuccucugccuauggaguggccauuc

SEQ ID NO: 403233 - RNA, 32 nt, Homo Sapiens
gcgggagcgccggcgcuuggugugcgcgccuu

SEQ ID NO: 403234 - RNA, 32 nt, Homo Sapiens
aagcaggacauggcguggcagcugcgugaaua

SEQ ID NO: 403235 - RNA, 32 nt, Homo Sapiens
uuuaaaaguaaguuuuaaggaguauuucucga

SEQ ID NO: 403236 - RNA, 32 nt, Homo Sapiens
gcauuucucaagacugucuuuaccagaaucug

SEQ ID NO: 403237 - RNA, 32 nt, Homo Sapiens
uuuucaugaacaguuacccucuguccccacaa

SEQ ID NO: 403238 - RNA, 32 nt, Homo Sapiens
cgcacuuuccacuugggacucccggccagaaa

SEQ ID NO: 403239 - RNA, 32 nt, Homo Sapiens
agaauuugaaagagaaaauagaugcauacuga

SEQ ID NO: 403240 - RNA, 32 nt, Homo Sapiens
cuuuauuugcuagggagggaaguccuagggug

SEQ ID NO: 403241 - RNA, 32 nt, Homo Sapiens
cagauuuccuuccacccccagcucuagaugau

SEQ ID NO: 403242 - RNA, 32 nt, Homo Sapiens
uguggagagcacgucuucucugccgcgcccuc

SEQ ID NO: 403243 - RNA, 32 nt, Homo Sapiens
acauuguagaugguuaauuuacagauaaaauc

SEQ ID NO: 403244 - RNA, 32 nt, Homo Sapiens
gugcagaucccggccccugccacccagccuca

SEQ ID NO: 403245 - RNA, 32 nt, Homo Sapiens
ccaagcaaaauggagcuggggaagauaaccaa

SEQ ID NO: 403246 - RNA, 32 nt, Homo Sapiens
gagcuccuuggauuuucuuaucuccaugaguu

SEQ ID NO: 403247 - RNA, 32 nt, Homo Sapiens
gcagacagaaaagauauagcaaaugaagaaau

SEQ ID NO: 403248 - RNA, 31 nt, Homo Sapiens
agaaaccucaaugauuuaaggaaagaaaaug

SEQ ID NO: 403249 - RNA, 32 nt, Homo Sapiens
ggguuuugugggagugcucagcaccgugaguc

SEQ ID NO: 403250 - RNA, 31 nt, Homo Sapiens
gccauaacuauuuaauuuccaaauaauugcu

SEQ ID NO: 403251 - RNA, 32 nt, Homo Sapiens
ggaaaucggcggcuacccggcaccggcgccug

SEQ ID NO: 403252 - RNA, 32 nt, Homo Sapiens
gauguuagggacgaguuccagcccugccacug

SEQ ID NO: 403253 - RNA, 32 nt, Homo Sapiens
aacacuaagggugggggcaggggaguuugggg

SEQ ID NO: 403254 - RNA, 32 nt, Homo Sapiens
ggccagagggcuucccuggaggccgccauugc

SEQ ID NO: 403255 - RNA, 32 nt, Homo Sapiens
aaagucagacugcugggacuggccagguuucu

SEQ ID NO: 403256 - RNA, 32 nt, Homo Sapiens
cuggguggaaaggugcagguccagugaaguac

SEQ ID NO: 403257 - RNA, 32 nt, Homo Sapiens
uguuauaaaugaaaccaaaauauggguuauac

SEQ ID NO: 403258 - RNA, 31 nt, Homo Sapiens
gacccagggcacugccuccccaguacagggg

SEQ ID NO: 403259 - RNA, 32 nt, Homo Sapiens
acagucuaaggccccaggguguggccaauuca

SEQ ID NO: 403260 - RNA, 32 nt, Homo Sapiens
gaucacaauuguggacauuaaaacagaaacug

SEQ ID NO: 403261 - RNA, 32 nt, Homo Sapiens
cccaaaaucugugaaaagauuugaaucugaua

SEQ ID NO: 403262 - RNA, 32 nt, Homo Sapiens
ucugucuacaagugugaugucuccaugaagaa

SEQ ID NO: 403263 - RNA, 29 nt, Homo Sapiens
uagcacuggggacagagcgcucuaugcag

SEQ ID NO: 403264 - RNA, 32 nt, Homo Sapiens
auuuggcuccuccauuucuggaaauugagacu

SEQ ID NO: 403265 - RNA, 32 nt, Homo Sapiens
cacagugcucacugcuggcucugguuauccac

SEQ ID NO: 403266 - RNA, 32 nt, Homo Sapiens
cgcaggugcuggcgcccguucugccugggacc

SEQ ID NO: 403267 - RNA, 28 nt, Homo Sapiens
uuucuuuaaaauguauuuuucacaaagg

SEQ ID NO: 403268 - RNA, 32 nt, Homo Sapiens
guaugugugccagcugugugagaagccgggca

SEQ ID NO: 403269 - RNA, 32 nt, Homo Sapiens
gccacggcacuccagccugggcgacagagcaa

SEQ ID NO: 403270 - RNA, 32 nt, Homo Sapiens
uccauuucccuaucuggcucuuucucucuugu

SEQ ID NO: 403271 - RNA, 32 nt, Homo Sapiens
guggcuguuuuuaugccccagccccgcaaguu

SEQ ID NO: 403272 - RNA, 32 nt, Homo Sapiens
cagugguuauauaaaaauaauaaaauacaagg

SEQ ID NO: 403273 - RNA, 32 nt, Homo Sapiens
cauccgggcaagggcuguccgcuccugcccag

SEQ ID NO: 403274 - RNA, 32 nt, Homo Sapiens
aguauauauaauauguuaucuuuuagaugugg

SEQ ID NO: 403275 - RNA, 32 nt, Homo Sapiens
ccaagcuccgcgggaccgcuucaugccgcuga

SEQ ID NO: 403276 - RNA, 32 nt, Homo Sapiens
aguaacaaaauaggacauuagauggauagaug

SEQ ID NO: 403277 - RNA, 32 nt, Homo Sapiens
ggcuaccaggagagaacagagaagaaaagaca

SEQ ID NO: 403278 - RNA, 32 nt, Homo Sapiens
uuucuccuuauuaucaccuugcccuccuacua

SEQ ID NO: 403279 - RNA, 32 nt, Homo Sapiens
cauccccauggcugcuccugcugcuggucggg

SEQ ID NO: 403280 - RNA, 32 nt, Homo Sapiens
augaaaaagucuuuuaucauuagcucauguau

SEQ ID NO: 403281 - RNA, 32 nt, Homo Sapiens
uaaugccuaccuuggcaagcuucugacuacag

SEQ ID NO: 403282 - RNA, 32 nt, Homo Sapiens
agcagcaggacaguggagguguguggaaggca

SEQ ID NO: 403283 - RNA, 32 nt, Homo Sapiens
aguaugaggagcugcagacgcuggcugggaag

SEQ ID NO: 403284 - RNA, 32 nt, Homo Sapiens
cugucugccuaagagaaucaaccaaaggugau

SEQ ID NO: 403285 - RNA, 32 nt, Homo Sapiens
ugcccagucgucugcggguccugcccugauca

SEQ ID NO: 403286 - RNA, 31 nt, Homo Sapiens
ucaaaaauggaagauuuuaacauggagagug

SEQ ID NO: 403287 - RNA, 32 nt, Homo Sapiens
uaagggagggugugcucuguggucuccucccu

SEQ ID NO: 403288 - RNA, 32 nt, Homo Sapiens
guaugaaaaauauuuaauccaaaauugagucu

SEQ ID NO: 403289 - RNA, 32 nt, Homo Sapiens
cuccuggccgugguuaagcuguguacagauga

SEQ ID NO: 403290 - RNA, 32 nt, Homo Sapiens
ucaccaccacagccccucucagcccucaguag

SEQ ID NO: 403291 - RNA, 32 nt, Homo Sapiens
gacgccucccgcccccgcaguuccuuggagag

SEQ ID NO: 403292 - RNA, 32 nt, Homo Sapiens
ugcccgccaugcccgcgccccacgccauugca

SEQ ID NO: 403293 - RNA, 32 nt, Homo Sapiens
cuuauuggauacuccucuuauuuauuauuuuu

SEQ ID NO: 403294 - RNA, 30 nt, Homo Sapiens
cuagcacgcgcgcaccaucauggaccauua

SEQ ID NO: 403295 - RNA, 32 nt, Homo Sapiens
auggcuaguuuauuaaugauuucccaaaagcc

SEQ ID NO: 403296 - RNA, 32 nt, Homo Sapiens
ugaagauggaaaauaagaagaugcacuuucug

SEQ ID NO: 403297 - RNA, 28 nt, Homo Sapiens
uucgcggaagauuaacuuaaugaaaauc

SEQ ID NO: 403298 - RNA, 27 nt, Homo Sapiens
ccaugauccuggaacaguacguggugg

SEQ ID NO: 403299 - RNA, 32 nt, Homo Sapiens
uuauguacaauuuuauuugugucuuauuuuau

SEQ ID NO: 403300 - RNA, 32 nt, Homo Sapiens
agugaaccuuucccuuuucccaucugccggac

SEQ ID NO: 403301 - RNA, 32 nt, Homo Sapiens
ggagcuacagcagucgcagccaugggacccgc

SEQ ID NO: 403302 - RNA, 32 nt, Homo Sapiens
gugugagcaggaccagcgcagcugagucgggc

SEQ ID NO: 403303 - RNA, 32 nt, Homo Sapiens
cuaggucaagaaugaauguuagcugauaaaau

SEQ ID NO: 403304 - RNA, 32 nt, Homo Sapiens
gcuauaaaauuugaaaauggagaaaggaugga

SEQ ID NO: 403305 - RNA, 32 nt, Homo Sapiens
agcacugcccucgggcgucuggcagccugagg

SEQ ID NO: 403306 - RNA, 32 nt, Homo Sapiens
cuguggcuguaagcccuuggcuuugccccucu

SEQ ID NO: 403307 - RNA, 32 nt, Homo Sapiens
uccaaaauuaacucuguaaaugucagagaauu

SEQ ID NO: 403308 - RNA, 32 nt, Homo Sapiens
agcggugcgcgugcagcggggugggugcccug

SEQ ID NO: 403309 - RNA, 32 nt, Homo Sapiens
uaagaguguuuaucuugguacacaucagaaga

SEQ ID NO: 403310 - RNA, 32 nt, Homo Sapiens
ugguauuucuuacaugauuuuuuguuuuccuc

SEQ ID NO: 403311 - RNA, 32 nt, Homo Sapiens
ccaccggcgcaugaacagccucauggaugaag

SEQ ID NO: 403312 - RNA, 32 nt, Homo Sapiens
uggagaaagagcggaugaaauauuuucucagc

SEQ ID NO: 403313 - RNA, 32 nt, Homo Sapiens
cugaggaggcuuugguaaaacaguuucaucua

SEQ ID NO: 403314 - RNA, 32 nt, Homo Sapiens
gauagugucuugcucugucacccaggcuggag

SEQ ID NO: 403315 - RNA, 32 nt, Homo Sapiens
cugguuugcuuggcugcccauuugccucuuga

SEQ ID NO: 403316 - RNA, 32 nt, Homo Sapiens
aaugguguuucauguaaggaucuuuaaaggga

SEQ ID NO: 403317 - RNA, 32 nt, Homo Sapiens
gggacccaggguccucaguucucaacccucca

SEQ ID NO: 403318 - RNA, 32 nt, Homo Sapiens
ggacgcccaggguggggaggaagagucugcaa

SEQ ID NO: 403319 - RNA, 32 nt, Homo Sapiens
cucagagaaaucagguaacuucccaaaugacc

SEQ ID NO: 403320 - RNA, 32 nt, Homo Sapiens
agguuagcacuugauaaugccauccacccaga

SEQ ID NO: 403321 - RNA, 32 nt, Homo Sapiens
gaggaagaggaugauauuacucccaauacaga

SEQ ID NO: 403322 - RNA, 32 nt, Homo Sapiens
uauuuuaucacgugcucuucagggcaugugga

SEQ ID NO: 403323 - RNA, 32 nt, Homo Sapiens
gaccccugugagauaagucagaggugacuuuc

SEQ ID NO: 403324 - RNA, 32 nt, Homo Sapiens
uacagagauuacuuugcugccuuaaugacauu

SEQ ID NO: 403325 - RNA, 32 nt, Homo Sapiens
cuuuagucaaauguguauuaaaacuuucguua

SEQ ID NO: 403326 - RNA, 32 nt, Homo Sapiens
uugaaacaagacaggaggaaaaguucagaacu

SEQ ID NO: 403327 - RNA, 32 nt, Homo Sapiens
uuuuaguucuuacugcuuaauucaaauaauaa

SEQ ID NO: 403328 - RNA, 32 nt, Homo Sapiens
gggaccagcuggaacuggacaggcugaaagau

SEQ ID NO: 403329 - RNA, 32 nt, Homo Sapiens
gcagucuaaaaugcuucaguacuugugaaaca

SEQ ID NO: 403330 - RNA, 32 nt, Homo Sapiens
cauaauacaaauaaugcuauuguuauugggug

SEQ ID NO: 403331 - RNA, 32 nt, Homo Sapiens
agaggaagaaugcuuuucuugggagccauagg

SEQ ID NO: 403332 - RNA, 32 nt, Homo Sapiens
uggccaaagcaucaacuauagaaaacauaauc

SEQ ID NO: 403333 - RNA, 32 nt, Homo Sapiens
cagaccggccaucaguguggcaugucagagaa

SEQ ID NO: 403334 - RNA, 32 nt, Homo Sapiens
agguucccgggcgggcgggcgcggagagacgc

SEQ ID NO: 403335 - RNA, 32 nt, Homo Sapiens
ccccgggcgguccacccgccucagccucccaa

SEQ ID NO: 403336 - RNA, 32 nt, Homo Sapiens
uguucucgccuggccuggcuaaacagcagggu

SEQ ID NO: 403337 - RNA, 32 nt, Homo Sapiens
uuauuucagucuucuuuuuuuuuuuuuaagag

SEQ ID NO: 403338 - RNA, 32 nt, Homo Sapiens
acucccugcccccagccuggcuugagaacagc

SEQ ID NO: 403339 - RNA, 32 nt, Homo Sapiens
agucaccucagcugcgccccccucccauccuu

SEQ ID NO: 403340 - RNA, 32 nt, Homo Sapiens
uuuuuacaaaugaaaaauaauuccuuuguauu

SEQ ID NO: 403341 - RNA, 32 nt, Homo Sapiens
ucacuggucacggauuugugucugugacuuuu

SEQ ID NO: 403342 - RNA, 32 nt, Homo Sapiens
acagccagcaucuuugcuuaaaaacccaaggu

SEQ ID NO: 403343 - RNA, 32 nt, Homo Sapiens
caugccugccacccuggcaucggcuuucugug

SEQ ID NO: 403344 - RNA, 32 nt, Homo Sapiens
accuccgugggcugcggcuccaggcgggcggg

SEQ ID NO: 403345 - RNA, 32 nt, Homo Sapiens
cacacaguugcaugcauggcaagcuguuaacc

SEQ ID NO: 403346 - RNA, 32 nt, Homo Sapiens
ggaucggguaaagauacagagaagucuaagga

SEQ ID NO: 403347 - RNA, 32 nt, Homo Sapiens
aaucccaaacuuaggaucccucccagccccag

SEQ ID NO: 403348 - RNA, 32 nt, Homo Sapiens
aagggacagcauugccagcugcugcugaguca

SEQ ID NO: 403349 - RNA, 32 nt, Homo Sapiens
guucucauuugccuccuguugagggaaaagaa

SEQ ID NO: 403350 - RNA, 32 nt, Homo Sapiens
ucccacagccccucccucuccucccacuacag

SEQ ID NO: 403351 - RNA, 32 nt, Homo Sapiens
ccagggaugauccugauguggcaggcagggga

SEQ ID NO: 403352 - RNA, 32 nt, Homo Sapiens
uuucagagauaaaaaucauugauuacaaaaaa

SEQ ID NO: 403353 - RNA, 32 nt, Homo Sapiens
gcccuggcaggcacagcccuccccucaugcca

SEQ ID NO: 403354 - RNA, 32 nt, Homo Sapiens
cugacgauuuuguagaacacaacagugacaau

SEQ ID NO: 403355 - RNA, 32 nt, Homo Sapiens
gaaacccuucuucuguaucccaauaauccacc

SEQ ID NO: 403356 - RNA, 32 nt, Homo Sapiens
gcgcccuccgcgggaccagcgccucggaugcg

SEQ ID NO: 403357 - RNA, 32 nt, Homo Sapiens
aaaucuacaaugacaaaaccagcagguggcag

SEQ ID NO: 403358 - RNA, 32 nt, Homo Sapiens
ggcuggugagguccuggugccuaucugccugg

SEQ ID NO: 403359 - RNA, 32 nt, Homo Sapiens
gagaccacgaugggaaagggccuauuuaacuc

SEQ ID NO: 403360 - RNA, 32 nt, Homo Sapiens
gaccagggagcuggcccggccucuggcaggcc

SEQ ID NO: 403361 - RNA, 32 nt, Homo Sapiens
agcaaacaggauauucaaaagauucuuuggug

SEQ ID NO: 403362 - RNA, 32 nt, Homo Sapiens
uucaucgagcuugcuuguuuccgggaccugcu

SEQ ID NO: 403363 - RNA, 32 nt, Homo Sapiens
gcugcuauuauguauauugucauuugugaagg

SEQ ID NO: 403364 - RNA, 32 nt, Homo Sapiens
cgagagcagaggaggaggaggcaugagcgagg

SEQ ID NO: 403365 - RNA, 32 nt, Homo Sapiens
aagaaagcaauaacucaccaaagcucaacgcu

SEQ ID NO: 403366 - RNA, 32 nt, Homo Sapiens
auuuuuauuugaaccuuuggaacuugggaguu

SEQ ID NO: 403367 - RNA, 32 nt, Homo Sapiens
ccucccguguccgagcugggauaccaaagaag

SEQ ID NO: 403368 - RNA, 32 nt, Homo Sapiens
auuugcagccuuagcucuguggugucuggcuc

SEQ ID NO: 403369 - RNA, 32 nt, Homo Sapiens
ugaaugggaaaaguaucuaauauuuuguaaca

SEQ ID NO: 403370 - RNA, 32 nt, Homo Sapiens
cgucuguugucuguacauucuccguuaauguu

SEQ ID NO: 403371 - RNA, 32 nt, Homo Sapiens
cagaccugccggcuaccucgggagggcccacc

SEQ ID NO: 403372 - RNA, 32 nt, Homo Sapiens
ugccauguuauuuccugggucuccaugcagga

SEQ ID NO: 403373 - RNA, 30 nt, Homo Sapiens
uuugauuuuacauauggggaaacugaggcu

SEQ ID NO: 403374 - RNA, 32 nt, Homo Sapiens
ucccauacccaccccuuucucauccccauuug

SEQ ID NO: 403375 - RNA, 32 nt, Homo Sapiens
gcucaguggcugagcagagcuccagcuggcga

SEQ ID NO: 403376 - RNA, 28 nt, Homo Sapiens
acuucaauggcgagcagcguggacgagg

SEQ ID NO: 403377 - RNA, 32 nt, Homo Sapiens
aaagcaaggugggagucuauuuuuguacauga

SEQ ID NO: 403378 - RNA, 30 nt, Homo Sapiens
caaccaugggaggccgcgucuuucucgcau

SEQ ID NO: 403379 - RNA, 32 nt, Homo Sapiens
guggcaagcaauggaucccaaauaucagcgug

SEQ ID NO: 403380 - RNA, 32 nt, Homo Sapiens
acuaauuugaauggaaaacacauggugugagu

SEQ ID NO: 403381 - RNA, 32 nt, Homo Sapiens
ucuuuuuguaccuggugaccccuuuucagcuu

SEQ ID NO: 403382 - RNA, 32 nt, Homo Sapiens
aaaaccaccaaaauacauagcuucgacaagau

SEQ ID NO: 403383 - RNA, 32 nt, Homo Sapiens
uucuucuacuuuccccagcucuucccaccuug

SEQ ID NO: 403384 - RNA, 32 nt, Homo Sapiens
gaaaaacagaaucuuggaacugguuuaguaca

SEQ ID NO: 403385 - RNA, 32 nt, Homo Sapiens
uucaccucgccgggcaucucuaucuugcugga

SEQ ID NO: 403386 - RNA, 32 nt, Homo Sapiens
aaguugaaucaucagacacuagcuacauagac

SEQ ID NO: 403387 - RNA, 32 nt, Homo Sapiens
aggcucuuccuccuccucccgcgacggcaaau

SEQ ID NO: 403388 - RNA, 32 nt, Homo Sapiens
ccacucccucugcugcagcacccccauacggg

SEQ ID NO: 403389 - RNA, 32 nt, Homo Sapiens
uucaucaccagggguuuuaggaggaaggcuug

SEQ ID NO: 403390 - RNA, 32 nt, Homo Sapiens
aaguauuuuuaaaaauaugcuagucauagccc

SEQ ID NO: 403391 - RNA, 32 nt, Homo Sapiens
ggucucucuaagucaggcugggguugaaguuu

SEQ ID NO: 403392 - RNA, 32 nt, Homo Sapiens
guagcguaaacauaguaucugauaaaauuuac

SEQ ID NO: 403393 - RNA, 32 nt, Homo Sapiens
agagaauggucaguuuccauucacccaucuga

SEQ ID NO: 403394 - RNA, 32 nt, Homo Sapiens
cagugacacgaucccggcucacugcaaccucc

SEQ ID NO: 403395 - RNA, 32 nt, Homo Sapiens
uuauaaugucauuguuuuauuaagcauuaugu

SEQ ID NO: 403396 - RNA, 30 nt, Homo Sapiens
ucaccauggaccgccggauguggggggccc

SEQ ID NO: 403397 - RNA, 32 nt, Homo Sapiens
uacgcaagaacuuuccugcagcuccuuuaaau

SEQ ID NO: 403398 - RNA, 32 nt, Homo Sapiens
ccuuuaguuuguagucauauuucuuaguucuu

SEQ ID NO: 403399 - RNA, 32 nt, Homo Sapiens
cuuucugccaagaaacaaaguuuuggaugagc

SEQ ID NO: 403400 - RNA, 32 nt, Homo Sapiens
ugcccuggcguucucacagccucccccuuccc

SEQ ID NO: 403401 - RNA, 32 nt, Homo Sapiens
ccggacgcgcggauccuccgccggcaccgcag

SEQ ID NO: 403402 - RNA, 32 nt, Homo Sapiens
agccaaacugaaugcagaaaagcucaaagauu

SEQ ID NO: 403403 - RNA, 32 nt, Homo Sapiens
aggaggugguggccugugauggcaagagugag

SEQ ID NO: 403404 - RNA, 32 nt, Homo Sapiens
aggagaguucccucugcauaauccccacggag

SEQ ID NO: 403405 - RNA, 32 nt, Homo Sapiens
augagccacagcaaaaaguaaagaacaacaac

SEQ ID NO: 403406 - RNA, 32 nt, Homo Sapiens
ggagaaguauuuuuaugagacucuuuacucag

SEQ ID NO: 403407 - RNA, 32 nt, Homo Sapiens
uuccauauuuuuguuucucuccaauucagaua

SEQ ID NO: 403408 - RNA, 32 nt, Homo Sapiens
uuuuuaagauggagucuuacucuguugcuagg

SEQ ID NO: 403409 - RNA, 32 nt, Homo Sapiens
caauaugaauuuaaaaucaugcuauagugcag

SEQ ID NO: 403410 - RNA, 32 nt, Homo Sapiens
agcuuaugaugaugaguuauguaugccaaaua

SEQ ID NO: 403411 - RNA, 32 nt, Homo Sapiens
uccacccucugaccuuucaguuuuccauagca

SEQ ID NO: 403412 - RNA, 32 nt, Homo Sapiens
ucgcagggacgucuccucccucccggcucgcg

SEQ ID NO: 403413 - RNA, 32 nt, Homo Sapiens
ucagacacaccauuucaccucccuugccaagc

SEQ ID NO: 403414 - RNA, 32 nt, Homo Sapiens
auauguuguaaauauuuagaccauaauuucau

SEQ ID NO: 403415 - RNA, 32 nt, Homo Sapiens
cuucgcugagguuuccuccucccccuccuccc

SEQ ID NO: 403416 - RNA, 32 nt, Homo Sapiens
aaagcucugagaaugggcauuuuuguauuuug

SEQ ID NO: 403417 - RNA, 32 nt, Homo Sapiens
aaagagaauggccugagaaauauuuuggaaaa

SEQ ID NO: 403418 - RNA, 32 nt, Homo Sapiens
cuugcuugauaaaaacaguggcgcaguuugag

SEQ ID NO: 403419 - RNA, 32 nt, Homo Sapiens
ggaaaggaagacuguuagaggcucuuuugaau

SEQ ID NO: 403420 - RNA, 32 nt, Homo Sapiens
uuaguuuuagcuucacauuauuuugcagcucu

SEQ ID NO: 403421 - RNA, 32 nt, Homo Sapiens
guaugcucuugguaccaggagcucugauauau

SEQ ID NO: 403422 - RNA, 32 nt, Homo Sapiens
gcuuugggggaagaggaagaaaagucggauua

SEQ ID NO: 403423 - RNA, 32 nt, Homo Sapiens
uucugccacuaccagcagcaaccaggacgucu

SEQ ID NO: 403424 - RNA, 32 nt, Homo Sapiens
aaaugaguagccaggaaguucaggggaggguc

SEQ ID NO: 403425 - RNA, 32 nt, Homo Sapiens
gccuggaacuucugccuccuuccuccgugauc

SEQ ID NO: 403426 - RNA, 32 nt, Homo Sapiens
aaauauggggcaauuguuagccuuacauguug

SEQ ID NO: 403427 - RNA, 32 nt, Homo Sapiens
cauuauauccguucuuuuuuuuuuuaaaaaaa

SEQ ID NO: 403428 - RNA, 32 nt, Homo Sapiens
acaugggccgagcgcaguggcucacgccugua

SEQ ID NO: 403429 - RNA, 32 nt, Homo Sapiens
caacgcguaaaacagggcaguauuuguguucc

SEQ ID NO: 403430 - RNA, 32 nt, Homo Sapiens
cucggcaagcaggccuggccucccggggccug

SEQ ID NO: 403431 - RNA, 32 nt, Homo Sapiens
caaaccauuuccccuuuggugucucuuugaaa

SEQ ID NO: 403432 - RNA, 32 nt, Homo Sapiens
cucggggugcuuugggugccuggaauugggac

SEQ ID NO: 403433 - RNA, 32 nt, Homo Sapiens
ugaugacagcuauccuuauucgaguagcacuu

SEQ ID NO: 403434 - RNA, 32 nt, Homo Sapiens
acgaccucauccuggagaucgagugucuugcc

SEQ ID NO: 403435 - RNA, 32 nt, Homo Sapiens
gugggguauauagagccacaacacauguuuau

SEQ ID NO: 403436 - RNA, 32 nt, Homo Sapiens
aaugaaaauaauucaugaccaauauuaccuga

SEQ ID NO: 403437 - RNA, 32 nt, Homo Sapiens
ucuaugguggacaaaguucagaauggaagaug

SEQ ID NO: 403438 - RNA, 32 nt, Homo Sapiens
ggggcugagggguggggcuccauggugaaugc

SEQ ID NO: 403439 - RNA, 32 nt, Homo Sapiens
uucuggaaugcaauguaauguuacugagacuu

SEQ ID NO: 403440 - RNA, 32 nt, Homo Sapiens
uggaagagaagcugggguagggagacaggaag

SEQ ID NO: 403441 - RNA, 32 nt, Homo Sapiens
uuugagccauucucuucuaccccuucaguguc

SEQ ID NO: 403442 - RNA, 32 nt, Homo Sapiens
gugaccggcgucgucuuccuggggaguacgac

SEQ ID NO: 403443 - RNA, 32 nt, Homo Sapiens
uugcuaagacuacaggguagagaaucagaggc

SEQ ID NO: 403444 - RNA, 32 nt, Homo Sapiens
ggagcucgcgcgcgacgcccgcggcugcgagc

SEQ ID NO: 403445 - RNA, 32 nt, Homo Sapiens
caucugccuggagucccgccccugcccagaac

SEQ ID NO: 403446 - RNA, 32 nt, Homo Sapiens
gaggggcugcugggguguuugucgcagcgggu

SEQ ID NO: 403447 - RNA, 32 nt, Homo Sapiens
ccucccgcaccucccaagcucauccugcugcc

SEQ ID NO: 403448 - RNA, 32 nt, Homo Sapiens
aucgagcagccagcugugugggauuguaccuc

SEQ ID NO: 403449 - RNA, 32 nt, Homo Sapiens
agguaaucaauuugcaccuuuuuuuauuuuua

SEQ ID NO: 403450 - RNA, 32 nt, Homo Sapiens
acuccuaauguuuggugcuauguuuuccugag

SEQ ID NO: 403451 - RNA, 32 nt, Homo Sapiens
gaaacugaggcaggcuugcccauggugaagug

SEQ ID NO: 403452 - RNA, 31 nt, Homo Sapiens
cagacucauguauuuuugccaaguaaauguc

SEQ ID NO: 403453 - RNA, 32 nt, Homo Sapiens
uugcuguguuuacaugaaaugacauuggaguc

SEQ ID NO: 403454 - RNA, 32 nt, Homo Sapiens
caaggagguccagcuuggggucaggugggccc

SEQ ID NO: 403455 - RNA, 32 nt, Homo Sapiens
aguccaugaagauguagaggagaaacuggaac

SEQ ID NO: 403456 - RNA, 29 nt, Homo Sapiens
uuuaguuuuagcaaacaccacaaauaugu

SEQ ID NO: 403457 - RNA, 32 nt, Homo Sapiens
cccagccacagccuuagagcugcgggaacacc

SEQ ID NO: 403458 - RNA, 32 nt, Homo Sapiens
gcagccccaagcaaguggcugcagggacacug

SEQ ID NO: 403459 - RNA, 32 nt, Homo Sapiens
acagcaagccaggacguccucuacacaaacuc

SEQ ID NO: 403460 - RNA, 32 nt, Homo Sapiens
aacaaagcaaggaaagaaugaagcaacaaaag

SEQ ID NO: 403461 - RNA, 32 nt, Homo Sapiens
accagggcuuugcagauguccuugaaagaccc

SEQ ID NO: 403462 - RNA, 32 nt, Homo Sapiens
ccuagcaguaaagagacauuggucaauugcuc

SEQ ID NO: 403463 - RNA, 32 nt, Homo Sapiens
ucucaccucccuccccgguggagggaggaacu

SEQ ID NO: 403464 - RNA, 32 nt, Homo Sapiens
ccaccccacccccacaucacacacucuucgau

SEQ ID NO: 403465 - RNA, 32 nt, Homo Sapiens
uuguaaauaccccacacccuccccucugcaaa

SEQ ID NO: 403466 - RNA, 32 nt, Homo Sapiens
uucgggcccuccccugcaucccagccggggcc

SEQ ID NO: 403467 - RNA, 32 nt, Homo Sapiens
agcccuacagcuucccuaggcaguaaguaaaa

SEQ ID NO: 403468 - RNA, 32 nt, Homo Sapiens
auggugacuucuccuuuuuuucuguggaucag

SEQ ID NO: 403469 - RNA, 32 nt, Homo Sapiens
ccggccuccucccuuggcgccgcggccauggc

SEQ ID NO: 403470 - RNA, 32 nt, Homo Sapiens
uauguuuuucuauaaccuggauuuuuuaaauc

SEQ ID NO: 403471 - RNA, 32 nt, Homo Sapiens
acacaguggggaucagagaaaaggggcuggaa

SEQ ID NO: 403472 - RNA, 32 nt, Homo Sapiens
ggcagaggacacuugucggcacguucucaccc

SEQ ID NO: 403473 - RNA, 32 nt, Homo Sapiens
gccuuccccgaccacaccccaaugccuuccca

SEQ ID NO: 403474 - RNA, 32 nt, Homo Sapiens
cuauuucuuucaugaaaaaauucacuuuuaug

SEQ ID NO: 403475 - RNA, 32 nt, Homo Sapiens
cuggaggucuggcauaagggccccacccucag

SEQ ID NO: 403476 - RNA, 32 nt, Homo Sapiens
acggggcugcugucuggggcgguagcugcggg

SEQ ID NO: 403477 - RNA, 32 nt, Homo Sapiens
aacuccuaaccucaggugccaaaucccccacg

SEQ ID NO: 403478 - RNA, 32 nt, Homo Sapiens
gcgaagccgagacccgggcuggccccucugcu

SEQ ID NO: 403479 - RNA, 32 nt, Homo Sapiens
uuuuuaacuauuaagaggcagaaaauugcaca

SEQ ID NO: 403480 - RNA, 32 nt, Homo Sapiens
agcccucuggcuuuuccaccacugagacacuu

SEQ ID NO: 403481 - RNA, 32 nt, Homo Sapiens
acaaauuugucaauuuaugggggcuauaauua

SEQ ID NO: 403482 - RNA, 32 nt, Homo Sapiens
uuauuucauuugcuugaauauuaugauaggaa

SEQ ID NO: 403483 - RNA, 32 nt, Homo Sapiens
uguugccugcagcagaggcugccuguggacac

SEQ ID NO: 403484 - RNA, 32 nt, Homo Sapiens
gggaucacagagagagccaacaguccaggcca

SEQ ID NO: 403485 - RNA, 32 nt, Homo Sapiens
ccccuucuuggaauuggcucucuucuucaaag

SEQ ID NO: 403486 - RNA, 32 nt, Homo Sapiens
auuccgcgggcgguguagaggcggcggacggg

SEQ ID NO: 403487 - RNA, 32 nt, Homo Sapiens
ugguaauuauggucugggguaaaauugaguuu

SEQ ID NO: 403488 - RNA, 32 nt, Homo Sapiens
cgcugacuucggguccccggagccuggggcac

SEQ ID NO: 403489 - RNA, 32 nt, Homo Sapiens
ccagccuuucccuaaucucagagcugcagccc

SEQ ID NO: 403490 - RNA, 32 nt, Homo Sapiens
ggaauauucaucuacauaaauuuuauaugcac

SEQ ID NO: 403491 - RNA, 32 nt, Homo Sapiens
gcccgcgaucccggcccggggcuguggcgucg

SEQ ID NO: 403492 - RNA, 32 nt, Homo Sapiens
caaccuaaaaauuaaacugucaucauauuauu

SEQ ID NO: 403493 - RNA, 32 nt, Homo Sapiens
ggagggaggaggaaacuguuuacuuuuuuccu

SEQ ID NO: 403494 - RNA, 32 nt, Homo Sapiens
gccucuccggugcgcggaucggggucaggggu

SEQ ID NO: 403495 - RNA, 32 nt, Homo Sapiens
aguguuuuuuagauacagagacuuggggaaau

SEQ ID NO: 403496 - RNA, 32 nt, Homo Sapiens
agagcuuaaugauaauauuguggugccacaaa

SEQ ID NO: 403497 - RNA, 32 nt, Homo Sapiens
cgcccgccccgccgcuccuccucccuguaaca

SEQ ID NO: 403498 - RNA, 32 nt, Homo Sapiens
caaucacugguccuccugcagaugacccuugg

SEQ ID NO: 403499 - RNA, 32 nt, Homo Sapiens
cuacacaucccacuucugggucuuugccuggg

SEQ ID NO: 403500 - RNA, 32 nt, Homo Sapiens
ucucuccuaagccccaaccccacuccacuccu

SEQ ID NO: 403501 - RNA, 32 nt, Homo Sapiens
agcgccccggcgggagguuuuucuauaugagu

SEQ ID NO: 403502 - RNA, 32 nt, Homo Sapiens
gccugcccagcucagagcugaggugcccccuu

SEQ ID NO: 403503 - RNA, 32 nt, Homo Sapiens
auuguaaugcuugaaauauuugaaagaaaaaa

SEQ ID NO: 403504 - RNA, 32 nt, Homo Sapiens
cuucucggccaucuccugcuucugggaccugc

SEQ ID NO: 403505 - RNA, 32 nt, Homo Sapiens
aucccagauaauggagaauguaucagccagcc

SEQ ID NO: 403506 - RNA, 32 nt, Homo Sapiens
cacccuacaccccccuccccccggccccaagc

SEQ ID NO: 403507 - RNA, 32 nt, Homo Sapiens
ccuuugcaucguccccucccccaccccugcug

SEQ ID NO: 403508 - RNA, 32 nt, Homo Sapiens
gugaggaccccaugguggcucuaguggaagau

SEQ ID NO: 403509 - RNA, 32 nt, Homo Sapiens
ugucugggcuuuauuucaguguauuaauugug

SEQ ID NO: 403510 - RNA, 32 nt, Homo Sapiens
gcccgaguggaccaaucggaagccuaagugac

SEQ ID NO: 403511 - RNA, 28 nt, Homo Sapiens
aacaagaaagauuaaaaauuagggaaau

SEQ ID NO: 403512 - RNA, 32 nt, Homo Sapiens
uuaaaaaaaaaauuaagcuguguggaaucugg

SEQ ID NO: 403513 - RNA, 32 nt, Homo Sapiens
ccaauugggaauuaaagaaauaauuaauuuga

SEQ ID NO: 403514 - RNA, 30 nt, Homo Sapiens
ugcaccuguuaccacuacaucagcagugag

SEQ ID NO: 403515 - RNA, 32 nt, Homo Sapiens
ccagcaaagacuguucuccucccgagggaacc

SEQ ID NO: 403516 - RNA, 32 nt, Homo Sapiens
uguuggacaccaggaaggggccccacagccga

SEQ ID NO: 403517 - RNA, 32 nt, Homo Sapiens
acaugcauuagaauaagagaaaacaguagugu

SEQ ID NO: 403518 - RNA, 32 nt, Homo Sapiens
aaaggggggcgaagaggccuagguuaacauuu

SEQ ID NO: 403519 - RNA, 32 nt, Homo Sapiens
agauugcugauuuaaacuguaauuguauugcc

SEQ ID NO: 403520 - RNA, 32 nt, Homo Sapiens
uucuuggugucugcuuucucagauuccaagga

SEQ ID NO: 403521 - RNA, 32 nt, Homo Sapiens
ggacuaucuccaccacccccaguuagcaccau

SEQ ID NO: 403522 - RNA, 32 nt, Homo Sapiens
ccccuccagcccacagcccccaucccguagcc

SEQ ID NO: 403523 - RNA, 32 nt, Homo Sapiens
cgccaccucgcccgacgcuccacagcucgccg

SEQ ID NO: 403524 - RNA, 32 nt, Homo Sapiens
ucgcccccacccaaacguauugguucgaugaa

SEQ ID NO: 403525 - RNA, 32 nt, Homo Sapiens
ggcaccccguccucccgcagcuccacacggug

SEQ ID NO: 403526 - RNA, 32 nt, Homo Sapiens
uaacuggggcuguuggggacagugcgugauuu

SEQ ID NO: 403527 - RNA, 32 nt, Homo Sapiens
ucggaagcauggggcuuuugagcacacuuaaa

SEQ ID NO: 403528 - RNA, 32 nt, Homo Sapiens
ccuuuucuuuaccaugagacucuugacuauga

SEQ ID NO: 403529 - RNA, 32 nt, Homo Sapiens
ccugcaggaggaggaacagagaagccugggcu

SEQ ID NO: 403530 - RNA, 32 nt, Homo Sapiens
cauauagauuuuuuuucuuaaauauuugacug

SEQ ID NO: 403531 - RNA, 32 nt, Homo Sapiens
uggaauuggacucagggcugguucagggcuga

SEQ ID NO: 403532 - RNA, 32 nt, Homo Sapiens
uuuuuccucucacaggccccagagccuccaca

SEQ ID NO: 403533 - RNA, 32 nt, Homo Sapiens
gaagguagccuggccaggcggggccuccccuu

SEQ ID NO: 403534 - RNA, 32 nt, Homo Sapiens
cgggccagaggcugagccuggguguggcuguc

SEQ ID NO: 403535 - RNA, 32 nt, Homo Sapiens
aggggacaguccugggggcugcaggucagugc

SEQ ID NO: 403536 - RNA, 32 nt, Homo Sapiens
ugcuaugggccacaggugcugcugcugugagg

SEQ ID NO: 403537 - RNA, 32 nt, Homo Sapiens
guggccucugauugcuugggguugaaauaagc

SEQ ID NO: 403538 - RNA, 32 nt, Homo Sapiens
auauacuaugucuugguuuugaggauauugga

SEQ ID NO: 403539 - RNA, 32 nt, Homo Sapiens
uuuagaaaaaaauuauuuuaaaaaauauguuu

SEQ ID NO: 403540 - RNA, 32 nt, Homo Sapiens
gguuuaaaauuugaaaccauaguaauguaugu

SEQ ID NO: 403541 - RNA, 32 nt, Homo Sapiens
cugaugcaggugguucuggggcccuucuacaa

SEQ ID NO: 403542 - RNA, 32 nt, Homo Sapiens
gacugagucucacucugucacccaggcugaag

SEQ ID NO: 403543 - RNA, 32 nt, Homo Sapiens
gugacuuauaaaauaggaugauaaggagagaa

SEQ ID NO: 403544 - RNA, 32 nt, Homo Sapiens
gucuuacuugggguugauaagauuugaguguu

SEQ ID NO: 403545 - RNA, 32 nt, Homo Sapiens
cauuugagagaagguaggguguguauauauaa

SEQ ID NO: 403546 - RNA, 32 nt, Homo Sapiens
ccagaggauguccgggaagcacuacaaggguc

SEQ ID NO: 403547 - RNA, 32 nt, Homo Sapiens
uuagaagaauaaugacuguacaauuaacuauc

SEQ ID NO: 403548 - RNA, 32 nt, Homo Sapiens
agguuugagauuccuguaaaugugacaaaauu

SEQ ID NO: 403549 - RNA, 32 nt, Homo Sapiens
uuauaccugcaugugcucuagcaaggauacca

SEQ ID NO: 403550 - RNA, 32 nt, Homo Sapiens
agauggucuguggcccgggcugccuccuggug

SEQ ID NO: 403551 - RNA, 31 nt, Homo Sapiens
uauuuauuucauagaaagucuccugcgggag

SEQ ID NO: 403552 - RNA, 32 nt, Homo Sapiens
aaagucuuccagggugcggagauggaaccaga

SEQ ID NO: 403553 - RNA, 32 nt, Homo Sapiens
gacugccacaaaaagcagcauuaugagguuga

SEQ ID NO: 403554 - RNA, 32 nt, Homo Sapiens
uccccugcccaggguggcaggggagggguagg

SEQ ID NO: 403555 - RNA, 32 nt, Homo Sapiens
ccagcaugaaauguaauuuacuuggaaguaac

SEQ ID NO: 403556 - RNA, 32 nt, Homo Sapiens
guggaagccaagggggacacugacaggcucac

SEQ ID NO: 403557 - RNA, 32 nt, Homo Sapiens
ucuuuuguuuuauuuaggauuuucauaaucag

SEQ ID NO: 403558 - RNA, 32 nt, Homo Sapiens
ugcaaaacuguuuucuucuuccuucucaaugg

SEQ ID NO: 403559 - RNA, 32 nt, Homo Sapiens
cgccacagucugcgacgggacccggcgugccc

SEQ ID NO: 403560 - RNA, 32 nt, Homo Sapiens
ugucagugcacaauaauagacacacauuucuu

SEQ ID NO: 403561 - RNA, 32 nt, Homo Sapiens
cgacuccgaagugcuccgcgagcuggcaaggg

SEQ ID NO: 403562 - RNA, 32 nt, Homo Sapiens
caccgcagggucuggcuugguacaguugggug

SEQ ID NO: 403563 - RNA, 32 nt, Homo Sapiens
ucagaggcccccgagguguguguaggaggcgg

SEQ ID NO: 403564 - RNA, 32 nt, Homo Sapiens
cucauugagagaaaacaacuuaguauuauguu

SEQ ID NO: 403565 - RNA, 32 nt, Homo Sapiens
auaaacucuggacaaugaccagcacagagccc

SEQ ID NO: 403566 - RNA, 32 nt, Homo Sapiens
cggaggagggugguuggcaguggcuggaagcu

SEQ ID NO: 403567 - RNA, 32 nt, Homo Sapiens
ucaagcaaaaucuucgugaaaagaucugcugc

SEQ ID NO: 403568 - RNA, 32 nt, Homo Sapiens
gcucauuucacuuuacacgcucauggacugag

SEQ ID NO: 403569 - RNA, 32 nt, Homo Sapiens
aguacaucagaaaaacaggaauccgugauuuu

SEQ ID NO: 403570 - RNA, 32 nt, Homo Sapiens
uuagaccgcaaaacagugccacagggguagac

SEQ ID NO: 403571 - RNA, 32 nt, Homo Sapiens
uauuccaacuggauuauuucuuucuccucuua

SEQ ID NO: 403572 - RNA, 32 nt, Homo Sapiens
uuaugcuguauauaguuugaauuauauauaaa

SEQ ID NO: 403573 - RNA, 32 nt, Homo Sapiens
uggugaaggugccugucuaacuuuucuguaaa

SEQ ID NO: 403574 - RNA, 32 nt, Homo Sapiens
gcggccugcaccgaccccgggccggaccugag

SEQ ID NO: 403575 - RNA, 32 nt, Homo Sapiens
ccagcccugagcaucacccaagugccugaugc

SEQ ID NO: 403576 - RNA, 32 nt, Homo Sapiens
gcagaacgcauacucacacguuccugcaggug

SEQ ID NO: 403577 - RNA, 32 nt, Homo Sapiens
ggagauuguaaaagguuaaauauacccacacc

SEQ ID NO: 403578 - RNA, 32 nt, Homo Sapiens
uuuaaguggcuaacauccaaacgauuguuuga

SEQ ID NO: 403579 - RNA, 32 nt, Homo Sapiens
cugugauggccgggaggaugggggcgaggagg

SEQ ID NO: 403580 - RNA, 32 nt, Homo Sapiens
caaggguggcaaaaacggcagcucccacgugc

SEQ ID NO: 403581 - RNA, 32 nt, Homo Sapiens
ugucaccuggggaaaguggaaccuuaggccac

SEQ ID NO: 403582 - RNA, 32 nt, Homo Sapiens
acaacgugguggcacugaaggaggccaucaag

SEQ ID NO: 403583 - RNA, 28 nt, Homo Sapiens
acuugggccccuaccaggaucagcacuc

SEQ ID NO: 403584 - RNA, 30 nt, Homo Sapiens
ccacuaugucccgccgcucuaugcugcuug

SEQ ID NO: 403585 - RNA, 31 nt, Homo Sapiens
aguuauacaaagaaaaauacagaugucucca

SEQ ID NO: 403586 - RNA, 32 nt, Homo Sapiens
caacagagcugugcccugaggacccggccucc

SEQ ID NO: 403587 - RNA, 32 nt, Homo Sapiens
aguucaggcagacacugucaucuaacgccagg

SEQ ID NO: 403588 - RNA, 32 nt, Homo Sapiens
auccuccaggcagcugcaccuccagagcaccu

SEQ ID NO: 403589 - RNA, 32 nt, Homo Sapiens
uccgcucgccuggcccggaccggaagcggcgc

SEQ ID NO: 403590 - RNA, 32 nt, Homo Sapiens
cacuggucuauuucccaguggguuucuaaacc

SEQ ID NO: 403591 - RNA, 32 nt, Homo Sapiens
uaucgauacuaaacaccaucaguucagaggga

SEQ ID NO: 403592 - RNA, 32 nt, Homo Sapiens
cuccgccacugccgcccucccggucuccucgc

SEQ ID NO: 403593 - RNA, 29 nt, Homo Sapiens
agagccauauguaugaaagcguaucugug

SEQ ID NO: 403594 - RNA, 32 nt, Homo Sapiens
cgaaggaagaggguacgacgccggggagggac

SEQ ID NO: 403595 - RNA, 32 nt, Homo Sapiens
auuccucaagacaaaugguaauuugcuaggca

SEQ ID NO: 403596 - RNA, 31 nt, Homo Sapiens
cuaggccaagccaccaagugaaaccuuccag

SEQ ID NO: 403597 - RNA, 30 nt, Homo Sapiens
gaaucaggcaggcguagcuggacugggcuc

SEQ ID NO: 403598 - RNA, 32 nt, Homo Sapiens
agagccggagagcgugcugcuggugcauggcg

SEQ ID NO: 403599 - RNA, 32 nt, Homo Sapiens
gaaaaggucucuuugcagauauauauuuuuua

SEQ ID NO: 403600 - RNA, 32 nt, Homo Sapiens
cuccuuuggccccuaaaaggaccuguuuuuau

SEQ ID NO: 403601 - RNA, 32 nt, Homo Sapiens
aaaaugcaccaaucagcaggauucuaaaagua

SEQ ID NO: 403602 - RNA, 32 nt, Homo Sapiens
gguucugccgacggaugcuggcgaugguugca

SEQ ID NO: 403603 - RNA, 32 nt, Homo Sapiens
aacaucaguugccuuauucuaagauuucauaa

SEQ ID NO: 403604 - RNA, 32 nt, Homo Sapiens
cgagauaaaggccagcucagccgugcugugcc

SEQ ID NO: 403605 - RNA, 32 nt, Homo Sapiens
ggagggauagcauugggagguauaccuaaugc

SEQ ID NO: 403606 - RNA, 32 nt, Homo Sapiens
guaguuuucuuuucuuuuuucuuuuucuuuuu

SEQ ID NO: 403607 - RNA, 32 nt, Homo Sapiens
gcccagccaugcgcgccgccugcugaguccgg

SEQ ID NO: 403608 - RNA, 32 nt, Homo Sapiens
agcuauccagacaaaauacauagggaucagaa

SEQ ID NO: 403609 - RNA, 32 nt, Homo Sapiens
ugugagcacccacucccugugcuaguuagugc

SEQ ID NO: 403610 - RNA, 32 nt, Homo Sapiens
agcacauuaaccaaauaaucccagagcaaaaa

SEQ ID NO: 403611 - RNA, 32 nt, Homo Sapiens
uauguaaaauauuuccacaauuaggagaaaua

SEQ ID NO: 403612 - RNA, 32 nt, Homo Sapiens
aauuuuuaguggugucuuuguaaaagucaccc

SEQ ID NO: 403613 - RNA, 32 nt, Homo Sapiens
aagagacaaaaauuuauuauaacacuaaacac

SEQ ID NO: 403614 - RNA, 32 nt, Homo Sapiens
cugggcagccugaguaaauaugcagaggacau

SEQ ID NO: 403615 - RNA, 32 nt, Homo Sapiens
uuggucuuugauuguucuguccucacagcaga

SEQ ID NO: 403616 - RNA, 32 nt, Homo Sapiens
aggcgggcagcugugcccgggcggcacggcca

SEQ ID NO: 403617 - RNA, 32 nt, Homo Sapiens
uugcuguuguugcagggaagucuuacuuaaaa

SEQ ID NO: 403618 - RNA, 32 nt, Homo Sapiens
gggcugcuagacggaggccuacucuuccaucu

SEQ ID NO: 403619 - RNA, 32 nt, Homo Sapiens
ccccacacgacaccccucuucccucaggaggc

SEQ ID NO: 403620 - RNA, 32 nt, Homo Sapiens
uccagagugaggcccgucccccgccccgcccc

SEQ ID NO: 403621 - RNA, 32 nt, Homo Sapiens
ggaugucagagguccugaaauagucaccaugg

SEQ ID NO: 403622 - RNA, 32 nt, Homo Sapiens
uggggacaaaaauugguucuuggggugaaaaa

SEQ ID NO: 403623 - RNA, 30 nt, Homo Sapiens
ucauuucuggacucuuuaaguucuaccacu

SEQ ID NO: 403624 - RNA, 32 nt, Homo Sapiens
uuuuggaagaagauuuaaaauauuugcccaug

SEQ ID NO: 403625 - RNA, 32 nt, Homo Sapiens
augcacuucuuucucuguagcacauguuaccu

SEQ ID NO: 403626 - RNA, 32 nt, Homo Sapiens
gcugggcuucaccccaccugggaagggcagug

SEQ ID NO: 403627 - RNA, 32 nt, Homo Sapiens
cacuuguguacuuuguguacuuauuauuagcu

SEQ ID NO: 403628 - RNA, 32 nt, Homo Sapiens
gggcagggaaaggggcgccgccgcugcuggaa

SEQ ID NO: 403629 - RNA, 32 nt, Homo Sapiens
cuggggggcucugcccagcugcugcucuccca

SEQ ID NO: 403630 - RNA, 32 nt, Homo Sapiens
aaauuagcaagcauuaauauauuuucagugca

SEQ ID NO: 403631 - RNA, 32 nt, Homo Sapiens
ugcuuaugaguggcaagaauggucagcuauga

SEQ ID NO: 403632 - RNA, 32 nt, Homo Sapiens
uggggggcggcaccuugcucuucugagcggag

SEQ ID NO: 403633 - RNA, 32 nt, Homo Sapiens
gucaggcuagaagaagcauaaggaucuuuuau

SEQ ID NO: 403634 - RNA, 32 nt, Homo Sapiens
gggaggaccagggaggcugugucgcagcgagg

SEQ ID NO: 403635 - RNA, 32 nt, Homo Sapiens
cuggagcacugggccaauauaaaucauccaag

SEQ ID NO: 403636 - RNA, 30 nt, Homo Sapiens
aggguggcgcccgcggcaggcggcggccau

SEQ ID NO: 403637 - RNA, 32 nt, Homo Sapiens
auuauauaaaagacaaaaagauuauaaaagac

SEQ ID NO: 403638 - RNA, 32 nt, Homo Sapiens
ggauguauguaaguguuuuacugcacuguauu

SEQ ID NO: 403639 - RNA, 32 nt, Homo Sapiens
uuuuauuugcugaagaaaauacugucuucuau

SEQ ID NO: 403640 - RNA, 32 nt, Homo Sapiens
ggacgggccaggggcggcgaccccucgcggac

SEQ ID NO: 403641 - RNA, 32 nt, Homo Sapiens
aaaaagauaauuauaaugccugcaauguguca

SEQ ID NO: 403642 - RNA, 32 nt, Homo Sapiens
ucaaguacuggaccgcccugugcguggcgacc

SEQ ID NO: 403643 - RNA, 32 nt, Homo Sapiens
gcaucuuugccagcugaacuugucaugcacua

SEQ ID NO: 403644 - RNA, 32 nt, Homo Sapiens
ccaugaggacccacugggcagcuccuggacag

SEQ ID NO: 403645 - RNA, 32 nt, Homo Sapiens
gaggaggcagcgccggcccaagauggcggacc

SEQ ID NO: 403646 - RNA, 32 nt, Homo Sapiens
ucccugcccgucuucugggagugccgucucac

SEQ ID NO: 403647 - RNA, 32 nt, Homo Sapiens
gccccugcauuucagugggaugucaauacacu

SEQ ID NO: 403648 - RNA, 32 nt, Homo Sapiens
gaaacacucugcuuuaguacagauggugguug

SEQ ID NO: 403649 - RNA, 32 nt, Homo Sapiens
ucguaaggcaacaugcagccuggcgugaagca

SEQ ID NO: 403650 - RNA, 32 nt, Homo Sapiens
uuugaacucuccaucuaguuuacuucuaaaau

SEQ ID NO: 403651 - RNA, 32 nt, Homo Sapiens
uggucuucggccggguccccagcccccgcucc

SEQ ID NO: 403652 - RNA, 32 nt, Homo Sapiens
aaacuuguguguuuuucuuuuucuuuuaagua

SEQ ID NO: 403653 - RNA, 32 nt, Homo Sapiens
agaaguagauuauucaaacaaacaaggcgaag

SEQ ID NO: 403654 - RNA, 32 nt, Homo Sapiens
ucaguucgagccacgcauccaauaccagcagc

SEQ ID NO: 403655 - RNA, 32 nt, Homo Sapiens
gcggcggcagcgccaggagcugcuacagcaga

SEQ ID NO: 403656 - RNA, 32 nt, Homo Sapiens
ccugaagacagagcaaggcuccaucuuaaaaa

SEQ ID NO: 403657 - RNA, 32 nt, Homo Sapiens
ggaagcaaguagccauaguacacacacaacac

SEQ ID NO: 403658 - RNA, 32 nt, Homo Sapiens
gccgggacaucuggugaacauggccucugcua

SEQ ID NO: 403659 - RNA, 32 nt, Homo Sapiens
acguucaggcccggcuccgguuucugcccaga

SEQ ID NO: 403660 - RNA, 32 nt, Homo Sapiens
aaaagacacugcaaauggcauaaaaauuaaag

SEQ ID NO: 403661 - RNA, 31 nt, Homo Sapiens
ucccugcugccggcugcgccauggcguuggc

SEQ ID NO: 403662 - RNA, 32 nt, Homo Sapiens
ccgcauccuucucggagcuggugccuggggcu

SEQ ID NO: 403663 - RNA, 32 nt, Homo Sapiens
gccaggaagaaccgcucucagauaguccuguu

SEQ ID NO: 403664 - RNA, 32 nt, Homo Sapiens
gguuugaccaugcuggccaggcuggucucgaa

SEQ ID NO: 403665 - RNA, 32 nt, Homo Sapiens
gguuucaccauguuggccaggcuggucuucaa

SEQ ID NO: 403666 - RNA, 32 nt, Homo Sapiens
uuuguggaaucugguguuugcacuauagguua

SEQ ID NO: 403667 - RNA, 32 nt, Homo Sapiens
ugcauaccccagcuccuccacaugccacugcu

SEQ ID NO: 403668 - RNA, 32 nt, Homo Sapiens
uuguaucauugagaaugcagcacucugggagg

SEQ ID NO: 403669 - RNA, 32 nt, Homo Sapiens
uuuaaaguucaguugacccagccuuauacuua

SEQ ID NO: 403670 - RNA, 32 nt, Homo Sapiens
ccgggcauugcugggcgccggagggaccuggg

SEQ ID NO: 403671 - RNA, 32 nt, Homo Sapiens
aacuuuaucagggaaacuaagauucuuuuaaa

SEQ ID NO: 403672 - RNA, 32 nt, Homo Sapiens
uucaugggacugaguucugucccugcucugcu

SEQ ID NO: 403673 - RNA, 32 nt, Homo Sapiens
uauugacaauauuuacagaaauccugauuauu

SEQ ID NO: 403674 - RNA, 32 nt, Homo Sapiens
cucgaaugggggugggggcaaggguaagggug

SEQ ID NO: 403675 - RNA, 32 nt, Homo Sapiens
ggcgccucacagcugcagccacuucccgccuu

SEQ ID NO: 403676 - RNA, 32 nt, Homo Sapiens
ggguuaaaaacgcggaaaaaaggcgacgaaga

SEQ ID NO: 403677 - RNA, 32 nt, Homo Sapiens
gguagacuauacauguuagcaaucgugggaau

SEQ ID NO: 403678 - RNA, 32 nt, Homo Sapiens
caguuucagccagcccccacgacucccucucc

SEQ ID NO: 403679 - RNA, 32 nt, Homo Sapiens
ugaucauuccaagaugggauuccucgcggugc

SEQ ID NO: 403680 - RNA, 32 nt, Homo Sapiens
cuuuucuacuaaaauaacucuuuaaaauaagu

SEQ ID NO: 403681 - RNA, 32 nt, Homo Sapiens
aagcuucugaugcacugaauuauguaaagugc

SEQ ID NO: 403682 - RNA, 32 nt, Homo Sapiens
aagguggugguuguggacucggucacugcggu

SEQ ID NO: 403683 - RNA, 32 nt, Homo Sapiens
gccugagguugcagccgagagugugcgccagc

SEQ ID NO: 403684 - RNA, 32 nt, Homo Sapiens
gucccgcauggugggccuggauaucgauuccc

SEQ ID NO: 403685 - RNA, 32 nt, Homo Sapiens
uucgugcuggacuacaaugcaggacugcucuc

SEQ ID NO: 403686 - RNA, 32 nt, Homo Sapiens
caaguugcuugacuauucucagucucaguuuc

SEQ ID NO: 403687 - RNA, 32 nt, Homo Sapiens
aaaccggggcuuuggggaagccauguccuacu

SEQ ID NO: 403688 - RNA, 32 nt, Homo Sapiens
ccuugauccuucccuucuuaguggcuguuguu

SEQ ID NO: 403689 - RNA, 32 nt, Homo Sapiens
cuuuaacuaggggcgcgcagaugugugaggcc

SEQ ID NO: 403690 - RNA, 32 nt, Homo Sapiens
ccuacggaaggggcuuaaugcaugugccugcc

SEQ ID NO: 403691 - RNA, 32 nt, Homo Sapiens
gaguuacagauacacaaucaagaguguucuug

SEQ ID NO: 403692 - RNA, 32 nt, Homo Sapiens
agauauguugcuuuuuacuuaagggauagugu

SEQ ID NO: 403693 - RNA, 32 nt, Homo Sapiens
uagaaaagcuuucacauugaagaucaacucuu

SEQ ID NO: 403694 - RNA, 32 nt, Homo Sapiens
gcaguagcuuauuuccaagccuugcaaaguau

SEQ ID NO: 403695 - RNA, 32 nt, Homo Sapiens
ggguuaccuuggaguugaugccuuggcucaga

SEQ ID NO: 403696 - RNA, 32 nt, Homo Sapiens
ggcuuucaggacuuguuuuuuauccugccuca

SEQ ID NO: 403697 - RNA, 32 nt, Homo Sapiens
aguucucaaaaaucacaaguugcaagaauaug

SEQ ID NO: 403698 - RNA, 32 nt, Homo Sapiens
ccugaaacacuauuaauagcucugccgauagc

SEQ ID NO: 403699 - RNA, 32 nt, Homo Sapiens
accuggcgccgcccgagcugcugcugcuggcg

SEQ ID NO: 403700 - RNA, 32 nt, Homo Sapiens
gcauaugaaaaacaucacuuacguucucccac

SEQ ID NO: 403701 - RNA, 32 nt, Homo Sapiens
ggggcagcacugggcggucgcgugcuggccga

SEQ ID NO: 403702 - RNA, 32 nt, Homo Sapiens
agaugaaccauggcccucccccugcccuucag

SEQ ID NO: 403703 - RNA, 28 nt, Homo Sapiens
gacaggaaagauucacuugaaaacauaa

SEQ ID NO: 403704 - RNA, 32 nt, Homo Sapiens
caaaguucaagcgguaugagucucauccaguc

SEQ ID NO: 403705 - RNA, 32 nt, Homo Sapiens
cuuaaccuugacaacagcacccucuccuacuc

SEQ ID NO: 403706 - RNA, 32 nt, Homo Sapiens
gcuuucaaguucuucauaaaucuugagauuga

SEQ ID NO: 403707 - RNA, 32 nt, Homo Sapiens
gagggacaagauaggacauggccuggaccagg

SEQ ID NO: 403708 - RNA, 32 nt, Homo Sapiens
uuuuaaaagcuagaagacaacuuauguauauu

SEQ ID NO: 403709 - RNA, 32 nt, Homo Sapiens
uaaugucuuuaaguuucauauuacaauuaaaa

SEQ ID NO: 403710 - RNA, 32 nt, Homo Sapiens
uuggucuucucaaugcugggaauccagggagu

SEQ ID NO: 403711 - RNA, 32 nt, Homo Sapiens
gaggggcugcugcggcagcugcaggagccgac

SEQ ID NO: 403712 - RNA, 32 nt, Homo Sapiens
ggugacuuucaaacagaaguuuaaaaaaucaa

SEQ ID NO: 403713 - RNA, 32 nt, Homo Sapiens
agucagccaggauugugagcuguuugggaagu

SEQ ID NO: 403714 - RNA, 32 nt, Homo Sapiens
gccaucugucuccuguaugugggucaaagugc

SEQ ID NO: 403715 - RNA, 32 nt, Homo Sapiens
uguaauaaaaacagaaguccaggaagaguagg

SEQ ID NO: 403716 - RNA, 32 nt, Homo Sapiens
uuccuaaguauuuugaaaaaauguuugcagua

SEQ ID NO: 403717 - RNA, 32 nt, Homo Sapiens
caaguucaguguggauuuuucuuggugcucua

SEQ ID NO: 403718 - RNA, 32 nt, Homo Sapiens
cgcguccuccccccggccacccuuccccacuu

SEQ ID NO: 403719 - RNA, 32 nt, Homo Sapiens
ccgccgccuuccggccgaccgcccggcuuggc

SEQ ID NO: 403720 - RNA, 32 nt, Homo Sapiens
aaaaugaaggcuuuaaauuugcuuaguucugu

SEQ ID NO: 403721 - RNA, 32 nt, Homo Sapiens
ccaagaguaugaggcuccugcucugauuuccu

SEQ ID NO: 403722 - RNA, 32 nt, Homo Sapiens
agccagccugacgccggcggaccccgccugug

SEQ ID NO: 403723 - RNA, 32 nt, Homo Sapiens
aggauacagcacuggaguuggccaccaccucu

SEQ ID NO: 403724 - RNA, 32 nt, Homo Sapiens
cccucccgccguccccgguccgggccaaggag

SEQ ID NO: 403725 - RNA, 32 nt, Homo Sapiens
cuccuggcaacgcugcggccccgcccacguca

SEQ ID NO: 403726 - RNA, 32 nt, Homo Sapiens
uucccuucuaguuuuuagagacuuccuuuugg

SEQ ID NO: 403727 - RNA, 32 nt, Homo Sapiens
ugaaacacauuccuucuagaaagugcuugggg

SEQ ID NO: 403728 - RNA, 31 nt, Homo Sapiens
gugauggagccccugaaggguguguguggag

SEQ ID NO: 403729 - RNA, 32 nt, Homo Sapiens
ccagcaucucccucacugaaaccagguggccg

SEQ ID NO: 403730 - RNA, 32 nt, Homo Sapiens
aacuuuucacauggguuuuucuccaaguuaau

SEQ ID NO: 403731 - RNA, 32 nt, Homo Sapiens
caagauauuauuuauaugaaauccauagcuca

SEQ ID NO: 403732 - RNA, 32 nt, Homo Sapiens
ggugggcugacugugauauacuguauuggaga

SEQ ID NO: 403733 - RNA, 32 nt, Homo Sapiens
auauaacuaauagauaaaaugacuuuguuuca

SEQ ID NO: 403734 - RNA, 32 nt, Homo Sapiens
aaagaagaacagauaucacaggcccagcucuu

SEQ ID NO: 403735 - RNA, 32 nt, Homo Sapiens
uggacuggaacuuuccuccucuaggccgggcc

SEQ ID NO: 403736 - RNA, 32 nt, Homo Sapiens
ucuuagcagggucugcgcuucgcagccgggau

SEQ ID NO: 403737 - RNA, 32 nt, Homo Sapiens
ucucuccaaagcauagucauaggugucaugaa

SEQ ID NO: 403738 - RNA, 32 nt, Homo Sapiens
aacguuaguuaaucccuuugucugucaaucac

SEQ ID NO: 403739 - RNA, 32 nt, Homo Sapiens
uaauuggcauuaaccacaaaaugagaauuaua

SEQ ID NO: 403740 - RNA, 32 nt, Homo Sapiens
ccucugcuucauagguguucugcauuugaggu

SEQ ID NO: 403741 - RNA, 32 nt, Homo Sapiens
ccacaccugggaucgcgcagggcccgcagggc

SEQ ID NO: 403742 - RNA, 32 nt, Homo Sapiens
gauuuucuuugggcauaacagucagacuuguu

SEQ ID NO: 403743 - RNA, 32 nt, Homo Sapiens
ucgcagcccaacccauggccgggucuccuagc

SEQ ID NO: 403744 - RNA, 32 nt, Homo Sapiens
uucagagagcagccuucccggagcaccaacuc

SEQ ID NO: 403745 - RNA, 32 nt, Homo Sapiens
uauaacuuauuauggugauuauacaggcaaga

SEQ ID NO: 403746 - RNA, 32 nt, Homo Sapiens
ggcacagaguagaucuuuugggaaauauauau

SEQ ID NO: 403747 - RNA, 32 nt, Homo Sapiens
gcaacccuggggauugggugccaucucucuag

SEQ ID NO: 403748 - RNA, 32 nt, Homo Sapiens
uaaggcuuuaggaugccucagugcuuauguca

SEQ ID NO: 403749 - RNA, 32 nt, Homo Sapiens
ucgccggcagugccccaacucugcucccagca

SEQ ID NO: 403750 - RNA, 32 nt, Homo Sapiens
gagaggcucugucuccuuccugcugccaggac

SEQ ID NO: 403751 - RNA, 32 nt, Homo Sapiens
gaggggugcauucucccuuuccgcguauuuca

SEQ ID NO: 403752 - RNA, 32 nt, Homo Sapiens
ucgugcugggacaucacccagccuggacgccg

SEQ ID NO: 403753 - RNA, 32 nt, Homo Sapiens
uagcugugcaagauaaaagcagccugggucac

SEQ ID NO: 403754 - RNA, 32 nt, Homo Sapiens
gacccuacuucuuuugcucaucuagcugucug

SEQ ID NO: 403755 - RNA, 32 nt, Homo Sapiens
guccaucuuaugcaaaucuggaugccauaaau

SEQ ID NO: 403756 - RNA, 32 nt, Homo Sapiens
ucucucuagggucuccuguagggcuuaugacu

SEQ ID NO: 403757 - RNA, 32 nt, Homo Sapiens
ugacuuugaugaugaggaagcugaagaaaaag

SEQ ID NO: 403758 - RNA, 32 nt, Homo Sapiens
uucuuuuuaccuaguugcuauagugucuacag

SEQ ID NO: 403759 - RNA, 32 nt, Homo Sapiens
uccugaaucaggaaacaagggacuggugaccu

SEQ ID NO: 403760 - RNA, 32 nt, Homo Sapiens
augcuaucuucagaccuuccacucacuuucau

SEQ ID NO: 403761 - RNA, 32 nt, Homo Sapiens
gaugaccugcugugucccucugagcacuaccc

SEQ ID NO: 403762 - RNA, 32 nt, Homo Sapiens
ggacacaguuaaagcuaaaagaaggaccaguu

SEQ ID NO: 403763 - RNA, 32 nt, Homo Sapiens
uugauggcagugccucaucuucaacuuuugug

SEQ ID NO: 403764 - RNA, 32 nt, Homo Sapiens
gcagagaugccauccacccccaucuaggugag

SEQ ID NO: 403765 - RNA, 32 nt, Homo Sapiens
uguuugggcaggggcugcuggugcugcuuggg

SEQ ID NO: 403766 - RNA, 30 nt, Homo Sapiens
gccuccaccaggcgcggcgucucgacuguu

SEQ ID NO: 403767 - RNA, 32 nt, Homo Sapiens
aauugagaacaugaucucuggaauaugauucc

SEQ ID NO: 403768 - RNA, 32 nt, Homo Sapiens
ccauagaaaguaccuugaaguagcacaguccg

SEQ ID NO: 403769 - RNA, 30 nt, Homo Sapiens
gacucuguuuggcggggccagucgagcagc

SEQ ID NO: 403770 - RNA, 32 nt, Homo Sapiens
caucuguaaaagacuggggugggggugggagg

SEQ ID NO: 403771 - RNA, 32 nt, Homo Sapiens
uuuguuaaucuucaaaaagucaaaacaaggau

SEQ ID NO: 403772 - RNA, 32 nt, Homo Sapiens
uacacuugaugagaauuuccucuuuuaauaau

SEQ ID NO: 403773 - RNA, 32 nt, Homo Sapiens
gguccuggguaccaccuucugagccucaguuu

SEQ ID NO: 403774 - RNA, 32 nt, Homo Sapiens
auguucuacuuaaaaugugaauuguacuucug

SEQ ID NO: 403775 - RNA, 32 nt, Homo Sapiens
ccaggaacccaccagaaggaagaaacuccgaa

SEQ ID NO: 403776 - RNA, 32 nt, Homo Sapiens
uuguaauaaaauguauuaaucauguuauuuga

SEQ ID NO: 403777 - RNA, 32 nt, Homo Sapiens
agaucagaaaucagcacuacacagaaaacccu

SEQ ID NO: 403778 - RNA, 32 nt, Homo Sapiens
cugguguucccaaccccccacccaggcugagu

SEQ ID NO: 403779 - RNA, 32 nt, Homo Sapiens
uaacucaguccgauuauuggugacggaagugu

SEQ ID NO: 403780 - RNA, 32 nt, Homo Sapiens
ugugaugggaggggcugcugugaagaccucug

SEQ ID NO: 403781 - RNA, 32 nt, Homo Sapiens
aggacccggcacuccgaaccccgcgcagccug

SEQ ID NO: 403782 - RNA, 32 nt, Homo Sapiens
cuaaaggaaaucaauuguucacagguaacuac

SEQ ID NO: 403783 - RNA, 32 nt, Homo Sapiens
ucucaagaacucucuugauggugggcacaaga

SEQ ID NO: 403784 - RNA, 32 nt, Homo Sapiens
auaaaaaaaaauuuaaaaaauuaaaaaauaaa

SEQ ID NO: 403785 - RNA, 32 nt, Homo Sapiens
caugaaguaaguagacaagaaaaggaggaaug

SEQ ID NO: 403786 - RNA, 32 nt, Homo Sapiens
auuuaaggaaucaaaucuuacaaaauccugga

SEQ ID NO: 403787 - RNA, 32 nt, Homo Sapiens
ccuucccugggccuuugcuucucuagcacaau

SEQ ID NO: 403788 - RNA, 32 nt, Homo Sapiens
acagcucugaagaucacaacucugacaugggu

SEQ ID NO: 403789 - RNA, 32 nt, Homo Sapiens
ccccuagcauuuccuuguccccucuuccccaa

SEQ ID NO: 403790 - RNA, 30 nt, Homo Sapiens
ucuccugcugagaugggggaaauccggcug

SEQ ID NO: 403791 - RNA, 32 nt, Homo Sapiens
aguaaaaguaacugaaaaugauagccuggcuc

SEQ ID NO: 403792 - RNA, 32 nt, Homo Sapiens
gcuuaaauugaggauuaacagaagcagauuaa

SEQ ID NO: 403793 - RNA, 32 nt, Homo Sapiens
gaauugaaagacuucagcaguauuaaagcauu

SEQ ID NO: 403794 - RNA, 32 nt, Homo Sapiens
cccagcccacagcugccagagccccugggggc

SEQ ID NO: 403795 - RNA, 32 nt, Homo Sapiens
agagcucucuguacuuuccccaugcugccuca

SEQ ID NO: 403796 - RNA, 32 nt, Homo Sapiens
ucuuucccuuuacagcacagaugccauuagaa

SEQ ID NO: 403797 - RNA, 32 nt, Homo Sapiens
ugaauguuucccuuguacagaucccagcuuau

SEQ ID NO: 403798 - RNA, 32 nt, Homo Sapiens
gggggaagaagcugugaagugggcgggcaugg

SEQ ID NO: 403799 - RNA, 32 nt, Homo Sapiens
guagcugggauuacaggcaugcacuaccacgc

SEQ ID NO: 403800 - RNA, 31 nt, Homo Sapiens
agggacccagaggcacaucuaacuggcagca

SEQ ID NO: 403801 - RNA, 29 nt, Homo Sapiens
cacgacccagguauguaccaaguaggcac

SEQ ID NO: 403802 - RNA, 32 nt, Homo Sapiens
cucgguggccagcaggacucugcccagaccac

SEQ ID NO: 403803 - RNA, 32 nt, Homo Sapiens
gauggacucugcaaugggcauaccugggggcu

SEQ ID NO: 403804 - RNA, 32 nt, Homo Sapiens
agggaucggagugcgggccgcgcacggugcca

SEQ ID NO: 403805 - RNA, 32 nt, Homo Sapiens
cacguggaagcagggcauguagcaggccaggc

SEQ ID NO: 403806 - RNA, 32 nt, Homo Sapiens
gugaauuuuuugcuguaauaccaauaaaguuu

SEQ ID NO: 403807 - RNA, 32 nt, Homo Sapiens
ucccccacacagggcucugguuuucacucgcu

SEQ ID NO: 403808 - RNA, 32 nt, Homo Sapiens
acucuuucuaacuuucuuuacuccaucauggc

SEQ ID NO: 403809 - RNA, 32 nt, Homo Sapiens
uagaaagcugucuccuuaaucuuuccacaaag

SEQ ID NO: 403810 - RNA, 32 nt, Homo Sapiens
cagaucggugcguuuacaaaccuuuagcuaga

SEQ ID NO: 403811 - RNA, 32 nt, Homo Sapiens
uauuuuuuuaaaccuauauauggaaaaggaaa

SEQ ID NO: 403812 - RNA, 30 nt, Homo Sapiens
ggcccuucucuggcugcagagccgucuucu

SEQ ID NO: 403813 - RNA, 32 nt, Homo Sapiens
ucgcucagaucguaagguaaccccaagaaucg

SEQ ID NO: 403814 - RNA, 32 nt, Homo Sapiens
gcaaaguguccaaaaggaacaaaagaacaaaa

SEQ ID NO: 403815 - RNA, 32 nt, Homo Sapiens
gauuuauuuuauucccucucuuuuuucuuauu

SEQ ID NO: 403816 - RNA, 32 nt, Homo Sapiens
auguaaccaaauaccaccuguaccccaauaac

SEQ ID NO: 403817 - RNA, 32 nt, Homo Sapiens
aucuaccaccuuaaaacccugaucuagaaaaa

SEQ ID NO: 403818 - RNA, 32 nt, Homo Sapiens
ucgugggguucgggaggccgggacccugcccg

SEQ ID NO: 403819 - RNA, 32 nt, Homo Sapiens
acucugccaagcggcaggaagaauuaaggaaa

SEQ ID NO: 403820 - RNA, 31 nt, Homo Sapiens
aucuucccgcucucagcucugagcaugugca

SEQ ID NO: 403821 - RNA, 32 nt, Homo Sapiens
uaacauaaaaaauaaauuauguugagccauuu

SEQ ID NO: 403822 - RNA, 32 nt, Homo Sapiens
uuaccuagugcaaaaacuguaaaaguguacag

SEQ ID NO: 403823 - RNA, 32 nt, Homo Sapiens
ucucuagcugaucagaauuuuaccaaaauuca

SEQ ID NO: 403824 - RNA, 32 nt, Homo Sapiens
aucuauucucuuuaccauuaugcucgaugguu

SEQ ID NO: 403825 - RNA, 32 nt, Homo Sapiens
uccuagggcaaaacuuuuuuauggugcuguua

SEQ ID NO: 403826 - RNA, 32 nt, Homo Sapiens
auuacuacuuuuagcauucuccaggcuuuuac

SEQ ID NO: 403827 - RNA, 32 nt, Homo Sapiens
aagaaggagcagaauaaauguuuuacaacucc

SEQ ID NO: 403828 - RNA, 32 nt, Homo Sapiens
agacccgggggcaggugcugcagugagggguc

SEQ ID NO: 403829 - RNA, 32 nt, Homo Sapiens
ggaauaugaagauggggaggcccugcggcaug

SEQ ID NO: 403830 - RNA, 32 nt, Homo Sapiens
uccuauugcuugucagccugugugcguguggu

SEQ ID NO: 403831 - RNA, 32 nt, Homo Sapiens
aggacccccuccccaacaugccccagcccacc

SEQ ID NO: 403832 - RNA, 32 nt, Homo Sapiens
augaaaaugcccucuaaguguuauuuugguug

SEQ ID NO: 403833 - RNA, 32 nt, Homo Sapiens
uuaaaggacaaaugcccacucuucuauucuga

SEQ ID NO: 403834 - RNA, 32 nt, Homo Sapiens
ccaaggagacuucaagcuuuaagaagucuagc

SEQ ID NO: 403835 - RNA, 32 nt, Homo Sapiens
gcuuucuggggaagaacagggaagacauccca

SEQ ID NO: 403836 - RNA, 32 nt, Homo Sapiens
accugcucagggcuugccucuagcugccuccg

SEQ ID NO: 403837 - RNA, 32 nt, Homo Sapiens
gcggccagccccacguggugcugcucagccuu

SEQ ID NO: 403838 - RNA, 32 nt, Homo Sapiens
ugaaagccgggcggcgccgcgcaacgccucuu

SEQ ID NO: 403839 - RNA, 30 nt, Homo Sapiens
ggccgggugagcagacggaucggccgacua

SEQ ID NO: 403840 - RNA, 32 nt, Homo Sapiens
agggaugugagcgcaggaauugguuuuugcag

SEQ ID NO: 403841 - RNA, 32 nt, Homo Sapiens
ggauauguuuuuuuuucuuuuaauuuuguuuu

SEQ ID NO: 403842 - RNA, 32 nt, Homo Sapiens
aaaauuauauugccuacuaucccauuuugaaa

SEQ ID NO: 403843 - RNA, 32 nt, Homo Sapiens
gugagacuuuuugucaggaaaaggcaauauau

SEQ ID NO: 403844 - RNA, 32 nt, Homo Sapiens
aggagccgggguugcugcugcugcuuccggug

SEQ ID NO: 403845 - RNA, 32 nt, Homo Sapiens
gcuaaaagguuuccacuauuauagaaauucug

SEQ ID NO: 403846 - RNA, 32 nt, Homo Sapiens
cgugcuuugggguuggugcaaccucaguacac

SEQ ID NO: 403847 - RNA, 32 nt, Homo Sapiens
gcggggaggaggagaaggaugcagccgccgau

SEQ ID NO: 403848 - RNA, 32 nt, Homo Sapiens
aaagcaaaccaaaagaaaaaucugaaauuucc

SEQ ID NO: 403849 - RNA, 32 nt, Homo Sapiens
gucuguugcgguucucccacuuuuccauaagc

SEQ ID NO: 403850 - RNA, 32 nt, Homo Sapiens
cuauuuuucugucuaucaucuaucuaccaucu

SEQ ID NO: 403851 - RNA, 32 nt, Homo Sapiens
gaaauggagaguggaaauauauaguggucaaa

SEQ ID NO: 403852 - RNA, 32 nt, Homo Sapiens
cgccggguuuguggucugcagugucgugaggc

SEQ ID NO: 403853 - RNA, 32 nt, Homo Sapiens
cagccccccacuguucuccucaucuccagccu

SEQ ID NO: 403854 - RNA, 32 nt, Homo Sapiens
ugccgcccgagcugcugguggagaucuucgcg

SEQ ID NO: 403855 - RNA, 32 nt, Homo Sapiens
uuucucaucuuuccaauuugcaggauaauuuu

SEQ ID NO: 403856 - RNA, 32 nt, Homo Sapiens
cagccucccaaguagcugggauuacuggugca

SEQ ID NO: 403857 - RNA, 32 nt, Homo Sapiens
cacaagaucaugcacauagauguccagcccuc

SEQ ID NO: 403858 - RNA, 32 nt, Homo Sapiens
cuugaguacacauacacacacacacacacaga

SEQ ID NO: 403859 - RNA, 32 nt, Homo Sapiens
guuggcugcauaaaugucuucuuuugagaagu

SEQ ID NO: 403860 - RNA, 32 nt, Homo Sapiens
ggccuggugugguggcucaugccugugauccu

SEQ ID NO: 403861 - RNA, 32 nt, Homo Sapiens
ucugugacugcagcuauggccuuguuugcuua

SEQ ID NO: 403862 - RNA, 32 nt, Homo Sapiens
cugugauggaaauucaaaagccccuucucagu

SEQ ID NO: 403863 - RNA, 32 nt, Homo Sapiens
acuuguuacuaaagaaaauaucugaaauguga

SEQ ID NO: 403864 - RNA, 32 nt, Homo Sapiens
gagagcuagggggccccuccccccugccccgu

SEQ ID NO: 403865 - RNA, 32 nt, Homo Sapiens
ucaaacuguccaauuuuuaaauuuauuuauac

SEQ ID NO: 403866 - RNA, 29 nt, Homo Sapiens
gcagacauauguauauggucuggucagca

SEQ ID NO: 403867 - RNA, 32 nt, Homo Sapiens
agagcaggcagagggaaugacguggcaauucu

SEQ ID NO: 403868 - RNA, 32 nt, Homo Sapiens
guagcaccuaaggagcuugaaucuugguuccu

SEQ ID NO: 403869 - RNA, 32 nt, Homo Sapiens
cugcgugggaugcacacggaugacagaaucaa

SEQ ID NO: 403870 - RNA, 32 nt, Homo Sapiens
aacgagcuguuuaaaaugucccauugugacug

SEQ ID NO: 403871 - RNA, 32 nt, Homo Sapiens
cacuggccucacucagaccaauuucugcuuca

SEQ ID NO: 403872 - RNA, 32 nt, Homo Sapiens
ucacuuaagaaaccccuuauugauguauuuca

SEQ ID NO: 403873 - RNA, 32 nt, Homo Sapiens
uacugacaaccugaucucguuuacuccauguu

SEQ ID NO: 403874 - RNA, 32 nt, Homo Sapiens
ggcagcuccacgcucgcgcccgccaugccgga

SEQ ID NO: 403875 - RNA, 31 nt, Homo Sapiens
gauggcgggagagaagaagcgcaggcacagg

SEQ ID NO: 403876 - RNA, 32 nt, Homo Sapiens
gagugcgcuucuuuucucugucuuagaaaagg

SEQ ID NO: 403877 - RNA, 32 nt, Homo Sapiens
gacuggaagaucuagauuuuucuggaagaacu

SEQ ID NO: 403878 - RNA, 32 nt, Homo Sapiens
uuucuucacaaagcugcguuccuccuuucccc

SEQ ID NO: 403879 - RNA, 32 nt, Homo Sapiens
acgugcuugaggccuggcagcugggccaagac

SEQ ID NO: 403880 - RNA, 32 nt, Homo Sapiens
gauaaggucaacauugaagguggagguggaag

SEQ ID NO: 403881 - RNA, 32 nt, Homo Sapiens
cccacauuugauauuucuuauauacuuuguuu

SEQ ID NO: 403882 - RNA, 32 nt, Homo Sapiens
gcccucuccagucccaggagccgugucuagag

SEQ ID NO: 403883 - RNA, 32 nt, Homo Sapiens
uagguugaaaaacacugaagugcuuuucauga

SEQ ID NO: 403884 - RNA, 32 nt, Homo Sapiens
agggagagaguagcagaaggcuuuugauuuuu

SEQ ID NO: 403885 - RNA, 32 nt, Homo Sapiens
ggacaccuucauaguguaguguuuuagugacu

SEQ ID NO: 403886 - RNA, 32 nt, Homo Sapiens
gcgcucuguggaugccagggccgaccagagga

SEQ ID NO: 403887 - RNA, 32 nt, Homo Sapiens
agguccugcugcgcucuccgccgcgcucuacc

SEQ ID NO: 403888 - RNA, 32 nt, Homo Sapiens
aacaucucucucuucugaauuaaacuugcaca

SEQ ID NO: 403889 - RNA, 32 nt, Homo Sapiens
aaaccuucagccagaugacucaucucacacag

SEQ ID NO: 403890 - RNA, 30 nt, Homo Sapiens
aucccagagagaggcugugagucuggaucu

SEQ ID NO: 403891 - RNA, 32 nt, Homo Sapiens
guggcaccgagaccaaacucauucaccaaaug

SEQ ID NO: 403892 - RNA, 32 nt, Homo Sapiens
auagauauuaaaccuugugcucaugcaacuua

SEQ ID NO: 403893 - RNA, 32 nt, Homo Sapiens
ccgaucaugguaguugauuuauuugcucaggu

SEQ ID NO: 403894 - RNA, 32 nt, Homo Sapiens
cucugagcccucgcucguccacggucuucugc

SEQ ID NO: 403895 - RNA, 32 nt, Homo Sapiens
gaguguugagggcaccucuccuccccucuuac

SEQ ID NO: 403896 - RNA, 32 nt, Homo Sapiens
cguccagaaguaccugaagaaugaugugggcc

SEQ ID NO: 403897 - RNA, 32 nt, Homo Sapiens
uggauaaaaauaacauuccaaucacuauugua

SEQ ID NO: 403898 - RNA, 32 nt, Homo Sapiens
gacuaaaucucugugcuuuuguuuccucauuu

SEQ ID NO: 403899 - RNA, 32 nt, Homo Sapiens
ggggacucggggugggggagggggagccuuau

SEQ ID NO: 403900 - RNA, 32 nt, Homo Sapiens
gcgcucuccacgccggcuccgcgcuccagggg

SEQ ID NO: 403901 - RNA, 32 nt, Homo Sapiens
auuauuuugccuuuucuggacugucauauaaa

SEQ ID NO: 403902 - RNA, 32 nt, Homo Sapiens
gguacaugugggcuuuuaaaaacuccauccuu

SEQ ID NO: 403903 - RNA, 32 nt, Homo Sapiens
cccucggcgaagagcggcuuggagcgguugau

SEQ ID NO: 403904 - RNA, 32 nt, Homo Sapiens
gcuagauaucuuuauuugauaucuaaggugca

SEQ ID NO: 403905 - RNA, 32 nt, Homo Sapiens
cuuuucuucagcguccuacccgcggcacuggc

SEQ ID NO: 403906 - RNA, 32 nt, Homo Sapiens
aaaaucuaacuccgccuggcuuacgaacacac

SEQ ID NO: 403907 - RNA, 32 nt, Homo Sapiens
ccauuguaucuaggaaguaacuaacuugcuuu

SEQ ID NO: 403908 - RNA, 32 nt, Homo Sapiens
gacucgcaggauuuuagaacccuaaugcaccc

SEQ ID NO: 403909 - RNA, 32 nt, Homo Sapiens
cagaacuauauuauaccaaguacuuuauuuau

SEQ ID NO: 403910 - RNA, 32 nt, Homo Sapiens
uucuugaucuuaccccaccauccacucagcug

SEQ ID NO: 403911 - RNA, 32 nt, Homo Sapiens
aacgugaaugcuuaagauuuugaaaguacaua

SEQ ID NO: 403912 - RNA, 32 nt, Homo Sapiens
uucucaauucucauuuuguaguaucucaaaca

SEQ ID NO: 403913 - RNA, 32 nt, Homo Sapiens
gcgacuucgccccgcccggcgcgggcccagga

SEQ ID NO: 403914 - RNA, 32 nt, Homo Sapiens
cuguccuggucaggcccccaccccccuuccca

SEQ ID NO: 403915 - RNA, 32 nt, Homo Sapiens
ugggcgaucuggaacagcacgugguggggucc

SEQ ID NO: 403916 - RNA, 32 nt, Homo Sapiens
caagugcuuaaaagccauaaaaaaugacuucu

SEQ ID NO: 403917 - RNA, 32 nt, Homo Sapiens
agcaagcucugcauaucuguaccucuugagau

SEQ ID NO: 403918 - RNA, 32 nt, Homo Sapiens
uuuaaaaugucugcggucugcccuuuugaagc

SEQ ID NO: 403919 - RNA, 32 nt, Homo Sapiens
gccaccuggugccuuaguccuugggcuggggg

SEQ ID NO: 403920 - RNA, 32 nt, Homo Sapiens
augcugaguuuaauuuaauauguaauacauau

SEQ ID NO: 403921 - RNA, 32 nt, Homo Sapiens
ugcaccacuuuaaaauguguaauucaaugcac

SEQ ID NO: 403922 - RNA, 32 nt, Homo Sapiens
agaccucuuuggguaucagggaucucauggac

SEQ ID NO: 403923 - RNA, 32 nt, Homo Sapiens
cacugaacaaacaaaacaauuuaauagccaac

SEQ ID NO: 403924 - RNA, 31 nt, Homo Sapiens
uccuaggagagugaacagguagauuuagacg

SEQ ID NO: 403925 - RNA, 32 nt, Homo Sapiens
ugcuaaguagacaguaugaaaaacacugguga

SEQ ID NO: 403926 - RNA, 32 nt, Homo Sapiens
aacucgaaagcagaaagauggaacagacaccu

SEQ ID NO: 403927 - RNA, 32 nt, Homo Sapiens
ggguugggggagaggcugaggagagugugaca

SEQ ID NO: 403928 - RNA, 30 nt, Homo Sapiens
ccucgugaggcuggcaugcaggauggcagg

SEQ ID NO: 403929 - RNA, 32 nt, Homo Sapiens
ucuaaaguuauuuuaauaggugguauagcagu

SEQ ID NO: 403930 - RNA, 32 nt, Homo Sapiens
gaaauauuuuuagcuuagucaucuguguuugc

SEQ ID NO: 403931 - RNA, 32 nt, Homo Sapiens
aguacuugacaaguacgaagcauggcucuacg

SEQ ID NO: 403932 - RNA, 32 nt, Homo Sapiens
cagaaugcuaauuugcagagacaguuaaucua

SEQ ID NO: 403933 - RNA, 32 nt, Homo Sapiens
uuaaagaaugggagaaaauauuugcaaaguau

SEQ ID NO: 403934 - RNA, 32 nt, Homo Sapiens
uagggcaauuggaauaauguccuguuagauaa

SEQ ID NO: 403935 - RNA, 32 nt, Homo Sapiens
uuugugauuuuuguuucuaaucuugauguaaa

SEQ ID NO: 403936 - RNA, 32 nt, Homo Sapiens
cugaaguauuucuuuauaaacauucuauuuga

SEQ ID NO: 403937 - RNA, 32 nt, Homo Sapiens
cguugaguugguucacauccacauucuggcug

SEQ ID NO: 403938 - RNA, 32 nt, Homo Sapiens
cccgcaccucgcgucccggaucgcucugauuc

SEQ ID NO: 403939 - RNA, 32 nt, Homo Sapiens
gugaccuccagccugccccuugcugccgugug

SEQ ID NO: 403940 - RNA, 32 nt, Homo Sapiens
agaggaaaaaauaaaguuuacauacucuugau

SEQ ID NO: 403941 - RNA, 32 nt, Homo Sapiens
aaacccuuuguacagcacagaacucacacaga

SEQ ID NO: 403942 - RNA, 32 nt, Homo Sapiens
gucaagccccacuuugugcuuucgaagcuuau

SEQ ID NO: 403943 - RNA, 32 nt, Homo Sapiens
gaggcugcggacuugcugcugcugcugcugcc

SEQ ID NO: 403944 - RNA, 32 nt, Homo Sapiens
cggaagauuuuccgucgccgccggggcgacuc

SEQ ID NO: 403945 - RNA, 32 nt, Homo Sapiens
guuaugaugaagugaauagacauaucagugaa

SEQ ID NO: 403946 - RNA, 32 nt, Homo Sapiens
uuuuuuauuucugauuucauaauucagaacua

SEQ ID NO: 403947 - RNA, 32 nt, Homo Sapiens
ucuuggacuucugaauugauccaguugucauc

SEQ ID NO: 403948 - RNA, 32 nt, Homo Sapiens
gcgauggucccccacaccgguucccugaaccc

SEQ ID NO: 403949 - RNA, 32 nt, Homo Sapiens
uaaagggccccgggccgcugcccuuaggccac

SEQ ID NO: 403950 - RNA, 32 nt, Homo Sapiens
auuugcuaagcauauuuucucuaggcuuuuuu

SEQ ID NO: 403951 - RNA, 32 nt, Homo Sapiens
ccaaaucccaguccuccugggggaugggcuga

SEQ ID NO: 403952 - RNA, 32 nt, Homo Sapiens
cuuugcugcuccuggacuccagccagccuuca

SEQ ID NO: 403953 - RNA, 32 nt, Homo Sapiens
ucauaagaucauaauggagcuagaaaauuccu

SEQ ID NO: 403954 - RNA, 32 nt, Homo Sapiens
uugugagaugacugaggggugggggcugaaau

SEQ ID NO: 403955 - RNA, 32 nt, Homo Sapiens
cgauuguguggguugugggaugagaugcagca

SEQ ID NO: 403956 - RNA, 32 nt, Homo Sapiens
ggugcauuuucccuuccacaccugugaccuga

SEQ ID NO: 403957 - RNA, 32 nt, Homo Sapiens
cuuugacauuuuacuauauuuuaugcuacauc

SEQ ID NO: 403958 - RNA, 32 nt, Homo Sapiens
gcagcuucagaauugaggucauuugugagcac

SEQ ID NO: 403959 - RNA, 32 nt, Homo Sapiens
ccguuccccccucccuucucccaugggcauca

SEQ ID NO: 403960 - RNA, 32 nt, Homo Sapiens
agcugaauacucaagggaugaucugccuacag

SEQ ID NO: 403961 - RNA, 32 nt, Homo Sapiens
ggagcccugccaggcccucgggcaccgcagcc

SEQ ID NO: 403962 - RNA, 27 nt, Homo Sapiens
uaaacuguucucuucagcuacugaagu

SEQ ID NO: 403963 - RNA, 32 nt, Homo Sapiens
gaauauuuccaucugcagaaauugaggcccaa

SEQ ID NO: 403964 - RNA, 32 nt, Homo Sapiens
aaacauggaaauaaaucaguuauucagauauc

SEQ ID NO: 403965 - RNA, 32 nt, Homo Sapiens
acgagacccaagcccccugucccggcccagcg

SEQ ID NO: 403966 - RNA, 32 nt, Homo Sapiens
aaccuggcggguggcugcucugggcccacugc

SEQ ID NO: 403967 - RNA, 32 nt, Homo Sapiens
aacugaaaacaaaaucuggaaguguggcugug

SEQ ID NO: 403968 - RNA, 32 nt, Homo Sapiens
uuuugguccacuuuugcccuuccaugacuaau

SEQ ID NO: 403969 - RNA, 32 nt, Homo Sapiens
guacauaaggacccuccuuuggugaaauccgg

SEQ ID NO: 403970 - RNA, 32 nt, Homo Sapiens
cccacucccccauuacccacagcccucacucc

SEQ ID NO: 403971 - RNA, 30 nt, Homo Sapiens
guccggcaccggcagcaccauguugcucau

SEQ ID NO: 403972 - RNA, 32 nt, Homo Sapiens
ccgguccccacacagcgccgcggccgccccuc

SEQ ID NO: 403973 - RNA, 32 nt, Homo Sapiens
agccagccgggcggccgacccguggggcaggc

SEQ ID NO: 403974 - RNA, 32 nt, Homo Sapiens
acaaccacgggguggggguggggcgcgcauca

SEQ ID NO: 403975 - RNA, 32 nt, Homo Sapiens
aaaguauuuucugaauuagaggaauuaugaau

SEQ ID NO: 403976 - RNA, 32 nt, Homo Sapiens
ccuuccaaaggaugcauagacaguauaagcaa

SEQ ID NO: 403977 - RNA, 32 nt, Homo Sapiens
accacugacagcccagaagaacaaagaacgcc

SEQ ID NO: 403978 - RNA, 32 nt, Homo Sapiens
gcuuccggccgcucucgcugcggccgcacccg

SEQ ID NO: 403979 - RNA, 32 nt, Homo Sapiens
ucagugucaccauccucauccccaucuucaug

SEQ ID NO: 403980 - RNA, 32 nt, Homo Sapiens
ggacucugcccgcgacagcgugcgcgcgcgug

SEQ ID NO: 403981 - RNA, 32 nt, Homo Sapiens
augaaagaacugugucugagcagccuaaaagc

SEQ ID NO: 403982 - RNA, 32 nt, Homo Sapiens
gcggagcggcccauguccggcgcgggcgaagc

SEQ ID NO: 403983 - RNA, 32 nt, Homo Sapiens
cuacuacucuugcugcccuccucccccgaccu

SEQ ID NO: 403984 - RNA, 32 nt, Homo Sapiens
uaaaauggaaaucauucuccaacgauauacaa

SEQ ID NO: 403985 - RNA, 32 nt, Homo Sapiens
agaaaaugaguuuuuguuucuacauuuacucc

SEQ ID NO: 403986 - RNA, 32 nt, Homo Sapiens
cgccccgcaaccccggccccucgggccucugc

SEQ ID NO: 403987 - RNA, 32 nt, Homo Sapiens
aucuggucuuccaagacuuugccacucacuua

SEQ ID NO: 403988 - RNA, 32 nt, Homo Sapiens
ucuuccacguggagaagcugcagcucuggaaa

SEQ ID NO: 403989 - RNA, 32 nt, Homo Sapiens
uggcggaaggaacgaggcgccacaccccugcu

SEQ ID NO: 403990 - RNA, 28 nt, Homo Sapiens
gccauggagccccgggcgguugcagaag

SEQ ID NO: 403991 - RNA, 32 nt, Homo Sapiens
accaaaaucuguauauuuuucuuaaggagugg

SEQ ID NO: 403992 - RNA, 32 nt, Homo Sapiens
aaaaagguaaugccucauuuacuaguauuguu

SEQ ID NO: 403993 - RNA, 32 nt, Homo Sapiens
uuccuuauacacuguagggacaaaaggaaaaa

SEQ ID NO: 403994 - RNA, 32 nt, Homo Sapiens
gugaccugacaccugccgcugcuugaguggac

SEQ ID NO: 403995 - RNA, 32 nt, Homo Sapiens
gaccugccugaaguaauacagugguuuguugg

SEQ ID NO: 403996 - RNA, 32 nt, Homo Sapiens
aaagaaaauggaauuuuuauuuuuguacuuua

SEQ ID NO: 403997 - RNA, 32 nt, Homo Sapiens
cguaaauuaauuuuaauuguguaucaagugaa

SEQ ID NO: 403998 - RNA, 31 nt, Homo Sapiens
ucccaucaagagguggaaucugauuccccuc

SEQ ID NO: 403999 - RNA, 32 nt, Homo Sapiens
cuuugccccccucucccggauggaggcugaga

SEQ ID NO: 404000 - RNA, 32 nt, Homo Sapiens
caguaggauaaagcaccaaauuccugccagga

SEQ ID NO: 404001 - RNA, 32 nt, Homo Sapiens
gcugcuccaaccccaagggcccuggagcgcuc

SEQ ID NO: 404002 - RNA, 32 nt, Homo Sapiens
guggagggaagcugaggauagagcuccagaaa

SEQ ID NO: 404003 - RNA, 32 nt, Homo Sapiens
ugauaaagacauuugugcauagcucaugagac

SEQ ID NO: 404004 - RNA, 32 nt, Homo Sapiens
acuguaaaugcacaacuuuuguaaauguggua

SEQ ID NO: 404005 - RNA, 32 nt, Homo Sapiens
ccaugcacuuuguaaucaauaagucuuuuguu

SEQ ID NO: 404006 - RNA, 32 nt, Homo Sapiens
uccuccacucuaagggauaucaacacugccca

SEQ ID NO: 404007 - RNA, 32 nt, Homo Sapiens
cacuguauucauuuauacaccaucagcagaca

SEQ ID NO: 404008 - RNA, 32 nt, Homo Sapiens
aguccccagcgccuccucuggaugcggucgcg

SEQ ID NO: 404009 - RNA, 32 nt, Homo Sapiens
gcugaagaacagagucuugugaugguggaacc

SEQ ID NO: 404010 - RNA, 32 nt, Homo Sapiens
ccauuuccaagccccccuccaucuuggaccua

SEQ ID NO: 404011 - RNA, 32 nt, Homo Sapiens
aguauaaaaauuuccuugaaaacuccuacaau

SEQ ID NO: 404012 - RNA, 32 nt, Homo Sapiens
ugggcagcaggagggaugauaauccuaacucc

SEQ ID NO: 404013 - RNA, 32 nt, Homo Sapiens
ugugcccucacagcaccgcacaucgacacacu

SEQ ID NO: 404014 - RNA, 32 nt, Homo Sapiens
ccucaauaaaagacauaauauuucuccaccug

SEQ ID NO: 404015 - RNA, 29 nt, Homo Sapiens
uuuuguauguuuuucagagacaagguuuc

SEQ ID NO: 404016 - RNA, 32 nt, Homo Sapiens
accacugcacuccagccugggcgacagagaac

SEQ ID NO: 404017 - RNA, 32 nt, Homo Sapiens
gcaggcgagucagccuaggaggaggcagggcu

SEQ ID NO: 404018 - RNA, 32 nt, Homo Sapiens
gcccuuuuucuacagcacauuuagaguuuggg

SEQ ID NO: 404019 - RNA, 32 nt, Homo Sapiens
cgcaugcggaagcucaaguacaagcaccuggc

SEQ ID NO: 404020 - RNA, 32 nt, Homo Sapiens
gcacugaggaagauucagagacguguaaaaca

SEQ ID NO: 404021 - RNA, 32 nt, Homo Sapiens
gguagcguccccccgggcacccggcaugcggg

SEQ ID NO: 404022 - RNA, 31 nt, Homo Sapiens
uuuuugagaagagaugagguauauguuacaa

SEQ ID NO: 404023 - RNA, 32 nt, Homo Sapiens
gcuauguacuaaaaugcauaugaccuugggaa

SEQ ID NO: 404024 - RNA, 32 nt, Homo Sapiens
ccagcgucgagcggcagcaacauggaggaauu

SEQ ID NO: 404025 - RNA, 32 nt, Homo Sapiens
aacagguuuguuuuuuauuuuacaacaacaua

SEQ ID NO: 404026 - RNA, 32 nt, Homo Sapiens
caucuuuuguuacuuuugggacauccugucau

SEQ ID NO: 404027 - RNA, 32 nt, Homo Sapiens
cucugccccguccaagagccucuccgcugucg

SEQ ID NO: 404028 - RNA, 32 nt, Homo Sapiens
cccuccauccucaagcagucucuucuuuaugc

SEQ ID NO: 404029 - RNA, 32 nt, Homo Sapiens
caaagaggcagacaugagcagaugagcucccc

SEQ ID NO: 404030 - RNA, 32 nt, Homo Sapiens
guauuuaauuuucaucuuccuucuuuggaucu

SEQ ID NO: 404031 - RNA, 32 nt, Homo Sapiens
augucacugugaccuccuccacugugaggacu

SEQ ID NO: 404032 - RNA, 32 nt, Homo Sapiens
cucuuuuguaaauucuuaaaaagaccuagcga

SEQ ID NO: 404033 - RNA, 32 nt, Homo Sapiens
ucuuaauuacuaaccucaguacugaaucagga

SEQ ID NO: 404034 - RNA, 32 nt, Homo Sapiens
ucugcacugauauuacauccacaguaccacag

SEQ ID NO: 404035 - RNA, 32 nt, Homo Sapiens
ucauauaaguggaacauagaguauuugcccuu

SEQ ID NO: 404036 - RNA, 32 nt, Homo Sapiens
acugaagaguccacgcacuccccacucugcug

SEQ ID NO: 404037 - RNA, 32 nt, Homo Sapiens
uaggccuaaucacagcacuuugggaggccaag

SEQ ID NO: 404038 - RNA, 32 nt, Homo Sapiens
caacaucugagucaccaagaaguaacacuuuu

SEQ ID NO: 404039 - RNA, 32 nt, Homo Sapiens
ucauaaaugaaacccuuggacuauuuaauaaa

SEQ ID NO: 404040 - RNA, 32 nt, Homo Sapiens
gugcgagccguggaccccggccaggaaccacu

SEQ ID NO: 404041 - RNA, 32 nt, Homo Sapiens
aauaguguacagagccgggagggucggcgucu

SEQ ID NO: 404042 - RNA, 32 nt, Homo Sapiens
aacuauguggacacuuguuucauuggaagguu

SEQ ID NO: 404043 - RNA, 32 nt, Homo Sapiens
uuaaguuuuugcuguuuucguuuucccgcuuu

SEQ ID NO: 404044 - RNA, 32 nt, Homo Sapiens
uggaggggcaacuggaggaaaggggcagacac

SEQ ID NO: 404045 - RNA, 32 nt, Homo Sapiens
auguaaaugcuguguaaauaguucuugugcug

SEQ ID NO: 404046 - RNA, 32 nt, Homo Sapiens
agcggacagggaagggcagagaaggccaccau

SEQ ID NO: 404047 - RNA, 32 nt, Homo Sapiens
ucucuuuuuuuuucuuuuugccuaucugcauc

SEQ ID NO: 404048 - RNA, 32 nt, Homo Sapiens
aggaagugggucuggugggaaacggggagggg

SEQ ID NO: 404049 - RNA, 32 nt, Homo Sapiens
guggugggaugggagggcaggaggcggcgggc

SEQ ID NO: 404050 - RNA, 32 nt, Homo Sapiens
cucccccgccccacccccgcauccuggcuguc

SEQ ID NO: 404051 - RNA, 32 nt, Homo Sapiens
cacuccuucacaaucacuuuggcauucaucgc

SEQ ID NO: 404052 - RNA, 32 nt, Homo Sapiens
ugccaggugggagaagcagagccauggguacg

SEQ ID NO: 404053 - RNA, 32 nt, Homo Sapiens
cugcuuuuuucaugguggggauccaccagguc

SEQ ID NO: 404054 - RNA, 32 nt, Homo Sapiens
cgcuuccugcaugccuggcccggggcacuagc

SEQ ID NO: 404055 - RNA, 32 nt, Homo Sapiens
guaauucacagcaauuuucuucacauuauucc

SEQ ID NO: 404056 - RNA, 32 nt, Homo Sapiens
aauauuuuuaucguugaaaccuugacagguac

SEQ ID NO: 404057 - RNA, 32 nt, Homo Sapiens
ccuuguuuagaaugcuaacaguguugucaacu

SEQ ID NO: 404058 - RNA, 32 nt, Homo Sapiens
cucucugccucgucuuuccccaggacuucgcu

SEQ ID NO: 404059 - RNA, 32 nt, Homo Sapiens
uuggcucacgugauuauggaggcgguuaaauc

SEQ ID NO: 404060 - RNA, 32 nt, Homo Sapiens
ugcacagucuagcugcuucuagucagcaaucu

SEQ ID NO: 404061 - RNA, 32 nt, Homo Sapiens
acuauuggguacugcuguguucccucccuuug

SEQ ID NO: 404062 - RNA, 32 nt, Homo Sapiens
agaaauacaaauaaauacauacacaauuuuaa

SEQ ID NO: 404063 - RNA, 27 nt, Homo Sapiens
gguggggccuccuucagcccccuccuc

SEQ ID NO: 404064 - RNA, 32 nt, Homo Sapiens
uuuuauuucacagauuauuuaaaagggaagag

SEQ ID NO: 404065 - RNA, 32 nt, Homo Sapiens
ugguguggccugaggguggccauggugggaaa

SEQ ID NO: 404066 - RNA, 32 nt, Homo Sapiens
ugcauggucugccucccuguuaauaugugagc

SEQ ID NO: 404067 - RNA, 32 nt, Homo Sapiens
ccacugucucuucaccccggcagcuaaagaaa

SEQ ID NO: 404068 - RNA, 32 nt, Homo Sapiens
gaaccuugcggcccaguggcccgggccaguuc

SEQ ID NO: 404069 - RNA, 32 nt, Homo Sapiens
ggaggcugggccagccugcugcugucugcuuc

SEQ ID NO: 404070 - RNA, 32 nt, Homo Sapiens
ccagcaaccccccacccuccccaugccucucu

SEQ ID NO: 404071 - RNA, 32 nt, Homo Sapiens
auauauuuguuucuaugaaaaauguauugugc

SEQ ID NO: 404072 - RNA, 32 nt, Homo Sapiens
ccucaacucucccucuucuccuaaaagcugag

SEQ ID NO: 404073 - RNA, 32 nt, Homo Sapiens
agaaaugaacaaaagauuggagcugaagaccu

SEQ ID NO: 404074 - RNA, 32 nt, Homo Sapiens
gugacaaggggaggggguggagacugggacau

SEQ ID NO: 404075 - RNA, 32 nt, Homo Sapiens
auuugguagggauuuuaaaaaggucacccaug

SEQ ID NO: 404076 - RNA, 32 nt, Homo Sapiens
uguccaggcacucaagugacuucauauuucuc

SEQ ID NO: 404077 - RNA, 31 nt, Homo Sapiens
uauuuccaagccauagcuugggcugaaggac

SEQ ID NO: 404078 - RNA, 32 nt, Homo Sapiens
uuuauuuuuugaugguaauauucuauccuuau

SEQ ID NO: 404079 - RNA, 32 nt, Homo Sapiens
agaauguucuaccugccuuaauucuaucagcc

SEQ ID NO: 404080 - RNA, 32 nt, Homo Sapiens
caaaaccucauuuaaguaaaagguuagcagag

SEQ ID NO: 404081 - RNA, 32 nt, Homo Sapiens
ucaccauccacgcgcuaagaaggcaggcccca

SEQ ID NO: 404082 - RNA, 32 nt, Homo Sapiens
cgaggccgagacccagcagccgcccgccgcuc

SEQ ID NO: 404083 - RNA, 32 nt, Homo Sapiens
gucccgucuggacgucccuuccugcuacagga

SEQ ID NO: 404084 - RNA, 32 nt, Homo Sapiens
gugugagauacaaauacaucuauuguguaugu

SEQ ID NO: 404085 - RNA, 32 nt, Homo Sapiens
agagucuugggccuggcccgcgucuagcuuag

SEQ ID NO: 404086 - RNA, 30 nt, Homo Sapiens
gacaccucaggugccacccaccuuggcccu

SEQ ID NO: 404087 - RNA, 32 nt, Homo Sapiens
ugcacaggagugccuccaagggugggccaggc

SEQ ID NO: 404088 - RNA, 32 nt, Homo Sapiens
aaauaggccacauccuuggggucuucuuauua

SEQ ID NO: 404089 - RNA, 32 nt, Homo Sapiens
uuaaagaaaauguaucucuugaaauaaaugua

SEQ ID NO: 404090 - RNA, 32 nt, Homo Sapiens
ccagcugccaccucuacugaagugaguagcuc

SEQ ID NO: 404091 - RNA, 32 nt, Homo Sapiens
accccagaaaucacugugaaauuucaugauug

SEQ ID NO: 404092 - RNA, 32 nt, Homo Sapiens
cucaauaaaguuaaguuuuucuucauuagaac

SEQ ID NO: 404093 - RNA, 32 nt, Homo Sapiens
gcaacacagcgagacuccgucucaaggaaaaa

SEQ ID NO: 404094 - RNA, 32 nt, Homo Sapiens
cccuggucagagggggugggggugggggaggg

SEQ ID NO: 404095 - RNA, 32 nt, Homo Sapiens
ucauccaaaagaauaaacuuuuaaauggauau

SEQ ID NO: 404096 - RNA, 30 nt, Homo Sapiens
aauuagaauauccaugaccuaguuuuccau

SEQ ID NO: 404097 - RNA, 32 nt, Homo Sapiens
uguaauaaucgaauucauuuaacaugaaucuu

SEQ ID NO: 404098 - RNA, 32 nt, Homo Sapiens
gcaugaacuugugugaauauaauaccauaaua

SEQ ID NO: 404099 - RNA, 32 nt, Homo Sapiens
gauaaaacagacacagugacagggccaagagc

SEQ ID NO: 404100 - RNA, 32 nt, Homo Sapiens
ggucuuugaaacugacaaucuuugaaauguga

SEQ ID NO: 404101 - RNA, 32 nt, Homo Sapiens
ugcuggucccuccuuuccccccgucccacgag

SEQ ID NO: 404102 - RNA, 32 nt, Homo Sapiens
accccaacccgccccggcauacacagaaaugg

SEQ ID NO: 404103 - RNA, 32 nt, Homo Sapiens
gaagaagaggaaacaccugagugacacucagc

SEQ ID NO: 404104 - RNA, 32 nt, Homo Sapiens
ugaugugacgcacuguauuccagcuggugauc

SEQ ID NO: 404105 - RNA, 32 nt, Homo Sapiens
gacagugcggagcaggauggagggcucagggg

SEQ ID NO: 404106 - RNA, 32 nt, Homo Sapiens
uauaacguuauucuguaggcaaugaaaacaga

SEQ ID NO: 404107 - RNA, 32 nt, Homo Sapiens
cuuccguaauuuccuuuaaaaagcuauucuag

SEQ ID NO: 404108 - RNA, 32 nt, Homo Sapiens
gcccgucgccgggagcaggagcgggcggaaga

SEQ ID NO: 404109 - RNA, 32 nt, Homo Sapiens
aucaaaggggaggugggaaaagaaauguagug

SEQ ID NO: 404110 - RNA, 32 nt, Homo Sapiens
uaacacguccacuuucaacguguaguuuacgc

SEQ ID NO: 404111 - RNA, 32 nt, Homo Sapiens
accuacuguaaauaaacuucaccugaccagau

SEQ ID NO: 404112 - RNA, 32 nt, Homo Sapiens
gaaccagugugauuuggcaugcuggaggcucu

SEQ ID NO: 404113 - RNA, 32 nt, Homo Sapiens
auugucaguucuccauguauuccucaaaagaa

SEQ ID NO: 404114 - RNA, 32 nt, Homo Sapiens
gugcucagcuugggggacccggacccucgccg

SEQ ID NO: 404115 - RNA, 32 nt, Homo Sapiens
ugccgagcagggacucucgucugugggacggg

SEQ ID NO: 404116 - RNA, 32 nt, Homo Sapiens
ggacacuuuucuccuaguaguuuugaauucag

SEQ ID NO: 404117 - RNA, 32 nt, Homo Sapiens
gagugaaccaacaaagaguaccuaggaauggg

SEQ ID NO: 404118 - RNA, 32 nt, Homo Sapiens
gcgcugagggcuugguggcguggggugggggc

SEQ ID NO: 404119 - RNA, 32 nt, Homo Sapiens
accccauuucuccaaggugguuuaccuagcuu

SEQ ID NO: 404120 - RNA, 32 nt, Homo Sapiens
cgucuccucguugcugccccuugagcccggga

SEQ ID NO: 404121 - RNA, 32 nt, Homo Sapiens
ucugcaacccaccguggguccugguugggagu

SEQ ID NO: 404122 - RNA, 32 nt, Homo Sapiens
auauccaauuuaaaaugauguaaagauguaau

SEQ ID NO: 404123 - RNA, 32 nt, Homo Sapiens
ucuuucuuucuuucuuuuuuuuuuuuuuuuga

SEQ ID NO: 404124 - RNA, 32 nt, Homo Sapiens
gcacuagccccagucuggcccggcacgggccu

SEQ ID NO: 404125 - RNA, 32 nt, Homo Sapiens
uuaaaagauacccucauugugucaaagagugu

SEQ ID NO: 404126 - RNA, 32 nt, Homo Sapiens
ggucagcagguucaaauugguuucacaggcuc

SEQ ID NO: 404127 - RNA, 27 nt, Homo Sapiens
gccgcuccuucuuucagcccaucaacc

SEQ ID NO: 404128 - RNA, 30 nt, Homo Sapiens
cggcgcgcggcggcggcaggaagucugugc

SEQ ID NO: 404129 - RNA, 32 nt, Homo Sapiens
guggcuuucuucagguaauuuuugucacuguu

SEQ ID NO: 404130 - RNA, 32 nt, Homo Sapiens
aaucauuuuuguuuuuauauuguuaugucaua

SEQ ID NO: 404131 - RNA, 32 nt, Homo Sapiens
guaucuaccucuucuucacuccuuccaacuua

SEQ ID NO: 404132 - RNA, 32 nt, Homo Sapiens
gcaauaguauuucuuagaaauguaucacauga

SEQ ID NO: 404133 - RNA, 32 nt, Homo Sapiens
aaugggaauauuuuauacugacagaaaucagu

SEQ ID NO: 404134 - RNA, 32 nt, Homo Sapiens
aagcagcaaucgaaucccuuucucacuuuugg

SEQ ID NO: 404135 - RNA, 32 nt, Homo Sapiens
guuguauuugucgguuuguuuuuucauucaug

SEQ ID NO: 404136 - RNA, 32 nt, Homo Sapiens
guuggcuguacuuuuuugauaauguaauuccu

SEQ ID NO: 404137 - RNA, 32 nt, Homo Sapiens
agucuggauguuucauuguaggaauauuuaag

SEQ ID NO: 404138 - RNA, 32 nt, Homo Sapiens
uccucgcccugggcugccccagcugggucugg

SEQ ID NO: 404139 - RNA, 31 nt, Homo Sapiens
agcugugcagcacgucucagagauucuugaa

SEQ ID NO: 404140 - RNA, 31 nt, Homo Sapiens
cuuuuugguaacaugggagugccuaauguug

SEQ ID NO: 404141 - RNA, 32 nt, Homo Sapiens
cagggcgccccgaggacagggggccccgacuu

SEQ ID NO: 404142 - RNA, 32 nt, Homo Sapiens
gcucaaagcaagaugagaaggcccagcuuguu

SEQ ID NO: 404143 - RNA, 32 nt, Homo Sapiens
gacugaucaguucuucaguucuaaaacaaugg

SEQ ID NO: 404144 - RNA, 32 nt, Homo Sapiens
uguaaucuggucugagcugggccugugggagg

SEQ ID NO: 404145 - RNA, 32 nt, Homo Sapiens
uguagaaaccuguagcugcuucugggaucacc

SEQ ID NO: 404146 - RNA, 32 nt, Homo Sapiens
acaucugcauuaccauuacaguaagugccuug

SEQ ID NO: 404147 - RNA, 32 nt, Homo Sapiens
cgccacgugccauucccaugggccagugaggg

SEQ ID NO: 404148 - RNA, 32 nt, Homo Sapiens
cuuuuuggcgaagagggucagggaggcucucu

SEQ ID NO: 404149 - RNA, 32 nt, Homo Sapiens
gccccacuuuccaccaaugcuuccucaaugag

SEQ ID NO: 404150 - RNA, 32 nt, Homo Sapiens
acuguuuguuuagcaaaaucuacagcaagggu

SEQ ID NO: 404151 - RNA, 32 nt, Homo Sapiens
cccucgccccagcccccugcccgccccacuuu

SEQ ID NO: 404152 - RNA, 32 nt, Homo Sapiens
uuggguacaguauguaacugcgggaaacccac

SEQ ID NO: 404153 - RNA, 32 nt, Homo Sapiens
gauguggaccuggcugcggggagacgggcgcc

SEQ ID NO: 404154 - RNA, 32 nt, Homo Sapiens
auacaagaaacaaccuuggaaaaguuauuucc

SEQ ID NO: 404155 - RNA, 32 nt, Homo Sapiens
ggcaggaauggggacccucaccccccaagcag

SEQ ID NO: 404156 - RNA, 32 nt, Homo Sapiens
gggugucccucuauuaaauauuuuaacuuuaa

SEQ ID NO: 404157 - RNA, 32 nt, Homo Sapiens
uauuuaagaauauguagauauagcaaaaagaa

SEQ ID NO: 404158 - RNA, 32 nt, Homo Sapiens
cacgaggguccggcccgccugcccgugcacag

SEQ ID NO: 404159 - RNA, 32 nt, Homo Sapiens
uuguggguuuuuugaagaauuaaugagcaugu

SEQ ID NO: 404160 - RNA, 32 nt, Homo Sapiens
gccccucuuuccucccucuccuaaaguaauuu

SEQ ID NO: 404161 - RNA, 32 nt, Homo Sapiens
auccagccaagugcgguaccagcccuucgggc

SEQ ID NO: 404162 - RNA, 32 nt, Homo Sapiens
ugggcucuggucuccacagauggcucaacguu

SEQ ID NO: 404163 - RNA, 32 nt, Homo Sapiens
gaaagcuuucugugacaguuccaggucuugaa

SEQ ID NO: 404164 - RNA, 32 nt, Homo Sapiens
guaacgucaaggaaguagauacuggcuggcau

SEQ ID NO: 404165 - RNA, 32 nt, Homo Sapiens
aacuaacuggaaagauuguuaaguucuuucug

SEQ ID NO: 404166 - RNA, 32 nt, Homo Sapiens
aucccuuauuaagcaucagaaaauucauaccu

SEQ ID NO: 404167 - RNA, 32 nt, Homo Sapiens
ggcagucggcaucaaggcacccugagcccgug

SEQ ID NO: 404168 - RNA, 32 nt, Homo Sapiens
gcaagagaggggcaagucuggggcuccaacug

SEQ ID NO: 404169 - RNA, 32 nt, Homo Sapiens
ucaggccuggggagguaaaggcucaggcuguu

SEQ ID NO: 404170 - RNA, 32 nt, Homo Sapiens
ucgaauuuccuggcuuauaaacuuuuuaaauu

SEQ ID NO: 404171 - RNA, 32 nt, Homo Sapiens
ggagaggcggugugggggcccgggcccugccc

SEQ ID NO: 404172 - RNA, 30 nt, Homo Sapiens
ggcacgcgggcagcgccgccggcguuggag

SEQ ID NO: 404173 - RNA, 32 nt, Homo Sapiens
ccguaggguggcacugggagggggugggggau

SEQ ID NO: 404174 - RNA, 32 nt, Homo Sapiens
guaaguauuauuauuguucucauuuuauagau

SEQ ID NO: 404175 - RNA, 32 nt, Homo Sapiens
aaaaauuuucuuuuuuccacaagaggaaaugu

SEQ ID NO: 404176 - RNA, 32 nt, Homo Sapiens
gaggagcggcugcugcugcugcugcugcugcu

SEQ ID NO: 404177 - RNA, 32 nt, Homo Sapiens
guccaccauguccuuuucacagcccucuucug

SEQ ID NO: 404178 - RNA, 32 nt, Homo Sapiens
guuggccccaaagcgagcuaugcugaacucuu

SEQ ID NO: 404179 - RNA, 32 nt, Homo Sapiens
uccugaugcccagugccaugaccuccacugga

SEQ ID NO: 404180 - RNA, 32 nt, Homo Sapiens
agguaguucuuggcacuggcaccuggaauucc

SEQ ID NO: 404181 - RNA, 32 nt, Homo Sapiens
cuuaccuuacaaauuucuuuucuaugaauaau

SEQ ID NO: 404182 - RNA, 32 nt, Homo Sapiens
auuguugggggcaaauggaaaugcucuaggcg

SEQ ID NO: 404183 - RNA, 31 nt, Homo Sapiens
cuguacuucaaugaugaucucacggaguugu

SEQ ID NO: 404184 - RNA, 32 nt, Homo Sapiens
gagggguggauggucgugcagucaucaccaau

SEQ ID NO: 404185 - RNA, 32 nt, Homo Sapiens
aaaugaacagaaaaaagcugcuaaaagagaag

SEQ ID NO: 404186 - RNA, 32 nt, Homo Sapiens
ucuauaaaggaagaacaaaacaaaauaaaaac

SEQ ID NO: 404187 - RNA, 32 nt, Homo Sapiens
agccaaacccaccuguguagaagugaugccuu

SEQ ID NO: 404188 - RNA, 32 nt, Homo Sapiens
gauaguauaauggcuaccaguuauugauaaug

SEQ ID NO: 404189 - RNA, 32 nt, Homo Sapiens
gucggugucaugucacuaaguuuaaugcugcu

SEQ ID NO: 404190 - RNA, 32 nt, Homo Sapiens
cugugguagagcuugcauugaucuuuuccaca

SEQ ID NO: 404191 - RNA, 32 nt, Homo Sapiens
uucuaggucuucugccaagugcuuuucucagu

SEQ ID NO: 404192 - RNA, 32 nt, Homo Sapiens
cggcgcuuccccggcgcggagcggcuuuaaaa

SEQ ID NO: 404193 - RNA, 32 nt, Homo Sapiens
ugggauagggugcuggcagcugucccaagcaa

SEQ ID NO: 404194 - RNA, 32 nt, Homo Sapiens
gccccugagggccagcauggaccuugagagcc

SEQ ID NO: 404195 - RNA, 32 nt, Homo Sapiens
cucagccccucgcccaggcaggaaggguccca

SEQ ID NO: 404196 - RNA, 27 nt, Homo Sapiens
uucucagucugcaguucucacagcugu

SEQ ID NO: 404197 - RNA, 32 nt, Homo Sapiens
accagccuggccaacguagugaaaccccgucu

SEQ ID NO: 404198 - RNA, 32 nt, Homo Sapiens
ccaccacuucaggggauggguguggauguaau

SEQ ID NO: 404199 - RNA, 32 nt, Homo Sapiens
uucuucuagugaugcuuuaccaauaugauuua

SEQ ID NO: 404200 - RNA, 32 nt, Homo Sapiens
gcgugccccgagcucuccgccuccccccgccc

SEQ ID NO: 404201 - RNA, 32 nt, Homo Sapiens
cccucuggggacggcuggcucacugucuccag

SEQ ID NO: 404202 - RNA, 32 nt, Homo Sapiens
ggaaggaaaacuacucuagaggccauuuaaaa

SEQ ID NO: 404203 - RNA, 31 nt, Homo Sapiens
cagcccaaagccaccagccuggacaggaaga

SEQ ID NO: 404204 - RNA, 32 nt, Homo Sapiens
ccuuggccaagcaggagggaaccauuagcagc

SEQ ID NO: 404205 - RNA, 32 nt, Homo Sapiens
uacagagaauuuccuaaaguaaaauugaagca

SEQ ID NO: 404206 - RNA, 32 nt, Homo Sapiens
gaagaaacgcguauuccacauuuccuguugau

SEQ ID NO: 404207 - RNA, 32 nt, Homo Sapiens
agcacaugccaaacagaaguagacaaaggucu

SEQ ID NO: 404208 - RNA, 32 nt, Homo Sapiens
auacucugagaagugccugauguugauguacu

SEQ ID NO: 404209 - RNA, 32 nt, Homo Sapiens
uaaaucccugaagagccuaagaauguaaugau

SEQ ID NO: 404210 - RNA, 32 nt, Homo Sapiens
ccgauugacuaaaaaauacauuaucccaugca

SEQ ID NO: 404211 - RNA, 32 nt, Homo Sapiens
ggccgugccugagcugcagcucuccaccagcu

SEQ ID NO: 404212 - RNA, 32 nt, Homo Sapiens
cucuauuuauucccuuauuuuaucuaacacca

SEQ ID NO: 404213 - RNA, 32 nt, Homo Sapiens
ccccagcccugcccggcccggcgaggaaggac

SEQ ID NO: 404214 - RNA, 32 nt, Homo Sapiens
ggaucgccggcugcgagugcugcuggccggcg

SEQ ID NO: 404215 - RNA, 32 nt, Homo Sapiens
uuggcuuuacauuaaguuuagcacuguaucag

SEQ ID NO: 404216 - RNA, 32 nt, Homo Sapiens
gacgccccgccccgccccuccucccugcucuc

SEQ ID NO: 404217 - RNA, 32 nt, Homo Sapiens
gcgguugccucccaccacauucucaggucuca

SEQ ID NO: 404218 - RNA, 32 nt, Homo Sapiens
cgccggcggcaugugcgagggcccgucccgca

SEQ ID NO: 404219 - RNA, 32 nt, Homo Sapiens
aauccccgugacuucuuccucaucaccuugau

SEQ ID NO: 404220 - RNA, 32 nt, Homo Sapiens
gccugcccccaccuccccaguaauuguuuccu

SEQ ID NO: 404221 - RNA, 32 nt, Homo Sapiens
guaccuauaugauaauauauagcugugaaacu

SEQ ID NO: 404222 - RNA, 32 nt, Homo Sapiens
aguucaggggccgcgccgggccgagcugucgc

SEQ ID NO: 404223 - RNA, 32 nt, Homo Sapiens
caaguuguuauuuaacucgacaaaaucauuuc

SEQ ID NO: 404224 - RNA, 32 nt, Homo Sapiens
agcaguaauaaaauaaguaagauguuaagaga

SEQ ID NO: 404225 - RNA, 32 nt, Homo Sapiens
auaaagucucuuaauuugaaagaugcugaagc

SEQ ID NO: 404226 - RNA, 30 nt, Homo Sapiens
aggucgggcccgugcaggccggcgccuugg

SEQ ID NO: 404227 - RNA, 32 nt, Homo Sapiens
cagcccccgccagcugcccucaaaucccgucc

SEQ ID NO: 404228 - RNA, 32 nt, Homo Sapiens
aguucuaccuggguuauguuuaucucaauucc

SEQ ID NO: 404229 - RNA, 32 nt, Homo Sapiens
gcaagcauggagggaggggcuaacuguacuuu

SEQ ID NO: 404230 - RNA, 32 nt, Homo Sapiens
acuagcacuccuccuuccugaccuccaggcuu

SEQ ID NO: 404231 - RNA, 32 nt, Homo Sapiens
cucgggccaccauccgcccaccucgggcugac

SEQ ID NO: 404232 - RNA, 32 nt, Homo Sapiens
caagauauuuuuucuuuuuuauagugugaagc

SEQ ID NO: 404233 - RNA, 32 nt, Homo Sapiens
ugccacugggcuguugguuagaagcauaggua

SEQ ID NO: 404234 - RNA, 32 nt, Homo Sapiens
ccccucuuaggacuguguuucuuaguuagagg

SEQ ID NO: 404235 - RNA, 32 nt, Homo Sapiens
ugaccccacucugccaugcauucuucacuuaa

SEQ ID NO: 404236 - RNA, 32 nt, Homo Sapiens
gccccccgcccggccuccuagccucuccgccc

SEQ ID NO: 404237 - RNA, 32 nt, Homo Sapiens
agcuucccaaaaacagccccccugcugcugcc

SEQ ID NO: 404238 - RNA, 32 nt, Homo Sapiens
aacagagaaagauuuuagcuuuucaauccuau

SEQ ID NO: 404239 - RNA, 32 nt, Homo Sapiens
uuggagcagugcugaggccaaagccgccuacu

SEQ ID NO: 404240 - RNA, 32 nt, Homo Sapiens
ggucuugacccuuccuuucucccggcugucag

SEQ ID NO: 404241 - RNA, 32 nt, Homo Sapiens
cacuacaugaaauaaugcacugaguaugcaau

SEQ ID NO: 404242 - RNA, 32 nt, Homo Sapiens
uaauuuaacaauaccaaauaaaacugugcagc

SEQ ID NO: 404243 - RNA, 32 nt, Homo Sapiens
guuggaaggggaggguuggugagucccagacc

SEQ ID NO: 404244 - RNA, 32 nt, Homo Sapiens
cccccugcucugugcagcugccgcccgggcuu

SEQ ID NO: 404245 - RNA, 32 nt, Homo Sapiens
gggagaaaaacacuuguaaguugcuaaacgag

SEQ ID NO: 404246 - RNA, 32 nt, Homo Sapiens
acgagggacugugggaggaaaagccacaccag

SEQ ID NO: 404247 - RNA, 32 nt, Homo Sapiens
cuggcccguccucuccaugugccagaugcagc

SEQ ID NO: 404248 - RNA, 32 nt, Homo Sapiens
aauagagcaucagcaacccuuuccagguagaa

SEQ ID NO: 404249 - RNA, 32 nt, Homo Sapiens
gcaacgcgcuggaagccucggcagucguggaa

SEQ ID NO: 404250 - RNA, 32 nt, Homo Sapiens
cacuugucaggagugugugugagugugagugu

SEQ ID NO: 404251 - RNA, 32 nt, Homo Sapiens
augauugccuucuuguuuucuguauguauaac

SEQ ID NO: 404252 - RNA, 32 nt, Homo Sapiens
ucauguauaauacucauuuacaauucaauaua

SEQ ID NO: 404253 - RNA, 32 nt, Homo Sapiens
caagucauggauuuuuaauauuccauuuuuau

SEQ ID NO: 404254 - RNA, 32 nt, Homo Sapiens
agagaagauggagcugccauuuagaacaugcc

SEQ ID NO: 404255 - RNA, 32 nt, Homo Sapiens
ugggcucucagagauuugaagauagagaucuc

SEQ ID NO: 404256 - RNA, 32 nt, Homo Sapiens
acccuggcugucuacgggguugguuuccaucu

SEQ ID NO: 404257 - RNA, 32 nt, Homo Sapiens
cccaaccuaugcucucggucuuuccuggaggc

SEQ ID NO: 404258 - RNA, 32 nt, Homo Sapiens
gugaauuugaaaaagaaauguuacuuaaucuu

SEQ ID NO: 404259 - RNA, 32 nt, Homo Sapiens
caccagcagacacugccgggccucccucccgg

SEQ ID NO: 404260 - RNA, 32 nt, Homo Sapiens
ucgccgccgcccagccucuccucucgcgccuc

SEQ ID NO: 404261 - RNA, 32 nt, Homo Sapiens
acgagggucacggcggcggggagagguggagc

SEQ ID NO: 404262 - RNA, 32 nt, Homo Sapiens
cagcgcagucaggggcggggcugggacccaga

SEQ ID NO: 404263 - RNA, 32 nt, Homo Sapiens
aagagagaaauuacaagccauagagaaacugg

SEQ ID NO: 404264 - RNA, 32 nt, Homo Sapiens
gcauugcuccccagcccuccagaaaccuugag

SEQ ID NO: 404265 - RNA, 32 nt, Homo Sapiens
gccaggacgcacccccacugcugcugcaggag

SEQ ID NO: 404266 - RNA, 32 nt, Homo Sapiens
aguagucaguacacuuuucuagauaaaucuug

SEQ ID NO: 404267 - RNA, 32 nt, Homo Sapiens
guagaucaguaauuuccaaacucuucacagag

SEQ ID NO: 404268 - RNA, 32 nt, Homo Sapiens
cuuggauuauauagaaaguaaacuguggucaa

SEQ ID NO: 404269 - RNA, 32 nt, Homo Sapiens
guucugccgagaccccaagaacucgggguguc

SEQ ID NO: 404270 - RNA, 32 nt, Homo Sapiens
agagucuuucguucuuucuggugcagcuuaac

SEQ ID NO: 404271 - RNA, 32 nt, Homo Sapiens
cuagcuugaaagagccugaggacugccuuuaa

SEQ ID NO: 404272 - RNA, 32 nt, Homo Sapiens
gggaauaaaaauuugugcaagucagagaaggg

SEQ ID NO: 404273 - RNA, 30 nt, Homo Sapiens
aggcuaugggcagccaggaggugcugggcc

SEQ ID NO: 404274 - RNA, 32 nt, Homo Sapiens
uauuuuuccuuccuucacuguuguaguaaaga

SEQ ID NO: 404275 - RNA, 32 nt, Homo Sapiens
uuuguguucagaucucuuauguuauaauuaga

SEQ ID NO: 404276 - RNA, 32 nt, Homo Sapiens
ccgcguucgcgccgcgcagagccaggcccgcg

SEQ ID NO: 404277 - RNA, 32 nt, Homo Sapiens
cauucaaccuuccuuacaaacuuugaaacaga

SEQ ID NO: 404278 - RNA, 32 nt, Homo Sapiens
uucuguaccacauacacuucuguggacuuuua

SEQ ID NO: 404279 - RNA, 32 nt, Homo Sapiens
caaaaacgccucuuauggaaaagccagagcgc

SEQ ID NO: 404280 - RNA, 32 nt, Homo Sapiens
uugacauuggcuuuucugagaagagaaauuga

SEQ ID NO: 404281 - RNA, 32 nt, Homo Sapiens
gaauuuggggaagaagucacauaucaguccug

SEQ ID NO: 404282 - RNA, 32 nt, Homo Sapiens
uauuugaaaaagauaugucugcacuuugaggu

SEQ ID NO: 404283 - RNA, 32 nt, Homo Sapiens
uuuaagcagucuuuuuaccugcaggcuauacc

SEQ ID NO: 404284 - RNA, 32 nt, Homo Sapiens
ccagcccaggaaaccauuuuucccuccuaggc

SEQ ID NO: 404285 - RNA, 32 nt, Homo Sapiens
cuuauuagcugacaccauauaaggaaaacaua

SEQ ID NO: 404286 - RNA, 32 nt, Homo Sapiens
aagcugcuggucggacucacaaugaaaacgcu

SEQ ID NO: 404287 - RNA, 32 nt, Homo Sapiens
gacccuggggccccgacccagcccugccuccu

SEQ ID NO: 404288 - RNA, 32 nt, Homo Sapiens
ugcggcucaacgcuaaccccugggcgugcgac

SEQ ID NO: 404289 - RNA, 32 nt, Homo Sapiens
ugaguuuuccuguaaaaauagcacuauaguau

SEQ ID NO: 404290 - RNA, 32 nt, Homo Sapiens
acagcucuguaaacuaccacucagcccugugu

SEQ ID NO: 404291 - RNA, 32 nt, Homo Sapiens
aaacaacauuuuaaguagaagauccagguuuu

SEQ ID NO: 404292 - RNA, 32 nt, Homo Sapiens
uaaagaucuauuucuguuauaauuuagguucu

SEQ ID NO: 404293 - RNA, 28 nt, Homo Sapiens
gguggggcccauccgccgagguggggac

SEQ ID NO: 404294 - RNA, 32 nt, Homo Sapiens
uagcucuucuugcugcauugaucccauuacca

SEQ ID NO: 404295 - RNA, 32 nt, Homo Sapiens
ugaacaagaaguucuauggaaagugagugccu

SEQ ID NO: 404296 - RNA, 30 nt, Homo Sapiens
guucaagcggugcagcaccuucgaagcauc

SEQ ID NO: 404297 - RNA, 31 nt, Homo Sapiens
cacaucuaugguaauuaauggcaaaaaagcu

SEQ ID NO: 404298 - RNA, 32 nt, Homo Sapiens
agagacuccugaacucccucugauggcugaag

SEQ ID NO: 404299 - RNA, 32 nt, Homo Sapiens
auauugcuuauaauuuaauguacaauacuauu

SEQ ID NO: 404300 - RNA, 32 nt, Homo Sapiens
aucuggauaauuuguuaacauggcagaaaaua

SEQ ID NO: 404301 - RNA, 32 nt, Homo Sapiens
gagcaaaagccuuccguggacaucaggccccg

SEQ ID NO: 404302 - RNA, 32 nt, Homo Sapiens
cugucgccaucggcguccugugccccucugcu

SEQ ID NO: 404303 - RNA, 32 nt, Homo Sapiens
ucccuagcaauauucauugacucucaaauaua

SEQ ID NO: 404304 - RNA, 32 nt, Homo Sapiens
gauuuucauuuaauguuaauguuuuccugcuu

SEQ ID NO: 404305 - RNA, 32 nt, Homo Sapiens
uguaggcuguaccccauuuccuuggcucccau

SEQ ID NO: 404306 - RNA, 32 nt, Homo Sapiens
ggggauggaccucggcccccgccccugcaguc

SEQ ID NO: 404307 - RNA, 32 nt, Homo Sapiens
gaguacuacgagugagugaggcugggaggaac

SEQ ID NO: 404308 - RNA, 32 nt, Homo Sapiens
caaaacuucuccccaaacuacaaccucaggaa

SEQ ID NO: 404309 - RNA, 32 nt, Homo Sapiens
auaucugauuggaaaugugugcaugugagucg

SEQ ID NO: 404310 - RNA, 32 nt, Homo Sapiens
ugaaaaaguguuuggacuaguacucuaaaaau

SEQ ID NO: 404311 - RNA, 32 nt, Homo Sapiens
ugcgcucucugcccgcgccgccgccgccucag

SEQ ID NO: 404312 - RNA, 32 nt, Homo Sapiens
uuacaggugugagccaccaugcccggcuaauu

SEQ ID NO: 404313 - RNA, 32 nt, Homo Sapiens
aagucauuuuagacauagcauuuauuaucacu

SEQ ID NO: 404314 - RNA, 32 nt, Homo Sapiens
caguucaccccuuucuuugcuaacuuucuucc

SEQ ID NO: 404315 - RNA, 32 nt, Homo Sapiens
ggacgcuccagucucuuccgugugugucuuga

SEQ ID NO: 404316 - RNA, 32 nt, Homo Sapiens
cgggcugggcacauccucuccucucuccuucu

SEQ ID NO: 404317 - RNA, 32 nt, Homo Sapiens
gcgcugcgaugaagaggacccgcgacgaggug

SEQ ID NO: 404318 - RNA, 32 nt, Homo Sapiens
ucauggagaucacagcagcaugaaguuaguag

SEQ ID NO: 404319 - RNA, 32 nt, Homo Sapiens
uggccgccaucuugcuugugcccccgcuucgc

SEQ ID NO: 404320 - RNA, 32 nt, Homo Sapiens
cucugggaccagcuuucucuccuggacaccga

SEQ ID NO: 404321 - RNA, 32 nt, Homo Sapiens
cuucagcuugagaagcacuucgaagccagagc

SEQ ID NO: 404322 - RNA, 32 nt, Homo Sapiens
cagauaaggaaccucggcaaaagguuuuugag

SEQ ID NO: 404323 - RNA, 32 nt, Homo Sapiens
ggagagaggggaggucugcauaaagagggagu

SEQ ID NO: 404324 - RNA, 32 nt, Homo Sapiens
aaguaacuguuaaaaugugaaauuguaauuuu

SEQ ID NO: 404325 - RNA, 32 nt, Homo Sapiens
ggagaugaacuucagggccuuccgacgccuug

SEQ ID NO: 404326 - RNA, 32 nt, Homo Sapiens
gacucagcccuauccagggagcucccacacuu

SEQ ID NO: 404327 - RNA, 32 nt, Homo Sapiens
agaguuggcaugucaaaugcauccucuagaaa

SEQ ID NO: 404328 - RNA, 32 nt, Homo Sapiens
guugguggacauuuggguucuuucuaccuuuu

SEQ ID NO: 404329 - RNA, 32 nt, Homo Sapiens
uguggcuggaggagcuggccuguggcacagcc

SEQ ID NO: 404330 - RNA, 32 nt, Homo Sapiens
cgucauugcccugagcguggacacgccaccgg

SEQ ID NO: 404331 - RNA, 32 nt, Homo Sapiens
ugcuacuaucaugugcuccugcuguggccugu

SEQ ID NO: 404332 - RNA, 32 nt, Homo Sapiens
ucaacacuuaaauucauaaaauuaagaccaug

SEQ ID NO: 404333 - RNA, 29 nt, Homo Sapiens
ggucaaaacaauuaaauauugucaguuac

SEQ ID NO: 404334 - RNA, 32 nt, Homo Sapiens
ccauuguauuuucaggcauucagauuggagca

SEQ ID NO: 404335 - RNA, 32 nt, Homo Sapiens
ucccuucaauuuccaauggaaauuauagccag

SEQ ID NO: 404336 - RNA, 32 nt, Homo Sapiens
cauauggcccacggggaccuacagacagccuu

SEQ ID NO: 404337 - RNA, 32 nt, Homo Sapiens
agcaaaaccuucaaaacaagacauguaugugu

SEQ ID NO: 404338 - RNA, 32 nt, Homo Sapiens
caccgcugugcagcuuaagauccccgaggugg

SEQ ID NO: 404339 - RNA, 32 nt, Homo Sapiens
gcccuccugugucccaccccucaccccuuuac

SEQ ID NO: 404340 - RNA, 32 nt, Homo Sapiens
agcuacuuagagaacuuaggaacuuggauuca

SEQ ID NO: 404341 - RNA, 31 nt, Homo Sapiens
guggauugcuugagcccaggagucugagacc

SEQ ID NO: 404342 - RNA, 32 nt, Homo Sapiens
gcgccgcgcagcccgcgcacgcccggauggcu

SEQ ID NO: 404343 - RNA, 32 nt, Homo Sapiens
gcccuggcucugcaaugggcacugggaugagc

SEQ ID NO: 404344 - RNA, 32 nt, Homo Sapiens
ccagacuccaggcuccucccacugccaaucac

SEQ ID NO: 404345 - RNA, 31 nt, Homo Sapiens
auuuaaguugggguauuuagagccuguaauc

SEQ ID NO: 404346 - RNA, 32 nt, Homo Sapiens
cucaacuccucuaaccgguaccucugaauggg

SEQ ID NO: 404347 - RNA, 32 nt, Homo Sapiens
gcuuuuauaaagaucauaggaaaacuagaaaa

SEQ ID NO: 404348 - RNA, 32 nt, Homo Sapiens
uucugugccugccuuaugugugugugugagua

SEQ ID NO: 404349 - RNA, 32 nt, Homo Sapiens
ugcaccauacuuucuuguacauuugugucucc

SEQ ID NO: 404350 - RNA, 32 nt, Homo Sapiens
aggacuguccuauaaguuguacacuuuaaaag

SEQ ID NO: 404351 - RNA, 32 nt, Homo Sapiens
guguggauggugcuuauugaaaaacagcugga

SEQ ID NO: 404352 - RNA, 32 nt, Homo Sapiens
accaguuccuacugccuguguugcuacuuuaa

SEQ ID NO: 404353 - RNA, 32 nt, Homo Sapiens
cugaccugugacuguuuuaucuccagggccaa

SEQ ID NO: 404354 - RNA, 32 nt, Homo Sapiens
uccugaccucaagugaucugcccgccucgggc

SEQ ID NO: 404355 - RNA, 32 nt, Homo Sapiens
gcuucuggccacugggaggcgcugcuugaaag

SEQ ID NO: 404356 - RNA, 32 nt, Homo Sapiens
cuccgggucugugagcccggcgcgcgccgucg

SEQ ID NO: 404357 - RNA, 32 nt, Homo Sapiens
uauuuugaagaagcuagggucuggagggacag

SEQ ID NO: 404358 - RNA, 32 nt, Homo Sapiens
cggucgggagagcggcggcagcgagaggcgag

SEQ ID NO: 404359 - RNA, 32 nt, Homo Sapiens
uagacugcaugaaauggaauuucuugacucuu

SEQ ID NO: 404360 - RNA, 32 nt, Homo Sapiens
uuuuuagauuucuuuucuuuugcacuacaauu

SEQ ID NO: 404361 - RNA, 32 nt, Homo Sapiens
agaagcuggaugugcucuggcucucucagcau

SEQ ID NO: 404362 - RNA, 32 nt, Homo Sapiens
aaagaaacuagagcagcagagaagagagacuc

SEQ ID NO: 404363 - RNA, 32 nt, Homo Sapiens
cugaggaccgccucuucgggcucuggcacuuc

SEQ ID NO: 404364 - RNA, 32 nt, Homo Sapiens
aaaacaggucccuaagacaauucuucagauca

SEQ ID NO: 404365 - RNA, 32 nt, Homo Sapiens
caaagcuuuuggcuccuccuuguuccgagccc

SEQ ID NO: 404366 - RNA, 32 nt, Homo Sapiens
cagcagggaggucauguacuuuuuguacaaca

SEQ ID NO: 404367 - RNA, 32 nt, Homo Sapiens
cuggugcugcucuuggaggagagcagcuccca

SEQ ID NO: 404368 - RNA, 30 nt, Homo Sapiens
uucccuggcgcccgcgcgggcugcggcagc

SEQ ID NO: 404369 - RNA, 32 nt, Homo Sapiens
cccgcccccuucuccgcgcgggacgcugcccg

SEQ ID NO: 404370 - RNA, 32 nt, Homo Sapiens
cggcggaugccggaagagugcccgccccgccg

SEQ ID NO: 404371 - RNA, 32 nt, Homo Sapiens
uguuguuacugaaacuuaauucuaucaagaau

SEQ ID NO: 404372 - RNA, 32 nt, Homo Sapiens
gcaguucacauagaguagaauguggaauuucc

SEQ ID NO: 404373 - RNA, 32 nt, Homo Sapiens
uuuuguaaauuuugaauguguuuguuuuagau

SEQ ID NO: 404374 - RNA, 32 nt, Homo Sapiens
aauucugcugucuagaucaggaauuucuaucu

SEQ ID NO: 404375 - RNA, 32 nt, Homo Sapiens
uaggagcaaccacugaauggucuuagcuguuc

SEQ ID NO: 404376 - RNA, 32 nt, Homo Sapiens
ucuguggguuggcaauggcuuugugggaucau

SEQ ID NO: 404377 - RNA, 32 nt, Homo Sapiens
aaaaggcaugcgcucacugcuugcuugucaga

SEQ ID NO: 404378 - RNA, 32 nt, Homo Sapiens
aacuguuuuaaucauggacaaacaaaacucac

SEQ ID NO: 404379 - RNA, 32 nt, Homo Sapiens
gaugcuuauuaagaguaaacccaugaauuuga

SEQ ID NO: 404380 - RNA, 32 nt, Homo Sapiens
uccuagucgugaaugcgugaugguccuucuuu

SEQ ID NO: 404381 - RNA, 32 nt, Homo Sapiens
uuccacuccccucccugccagagucugucuug

SEQ ID NO: 404382 - RNA, 32 nt, Homo Sapiens
gacaacuuaaaagauuuugcagaugagcuggc

SEQ ID NO: 404383 - RNA, 32 nt, Homo Sapiens
gccagaguccgcgcgauggagccccggccgcg

SEQ ID NO: 404384 - RNA, 32 nt, Homo Sapiens
aaaagaauaaaccaagaauugauugggcacau

SEQ ID NO: 404385 - RNA, 31 nt, Homo Sapiens
uguaacacaaauguuuuuaaaugguauucuc

SEQ ID NO: 404386 - RNA, 32 nt, Homo Sapiens
gcucuuucugaaaaugcugaauugccuuuuuu

SEQ ID NO: 404387 - RNA, 32 nt, Homo Sapiens
ugaauuugcugucuugaacauaaagaaucuau

SEQ ID NO: 404388 - RNA, 32 nt, Homo Sapiens
gacaggggccgcgccuccugucgguggagucg

SEQ ID NO: 404389 - RNA, 32 nt, Homo Sapiens
gugauuccucaauuucucccccauugggaagg

SEQ ID NO: 404390 - RNA, 32 nt, Homo Sapiens
uuuucuuuuucuuuuucuuuuuuuuuuuuuuu

SEQ ID NO: 404391 - RNA, 32 nt, Homo Sapiens
acccaucuccuuccgcucucccgccccugcag

SEQ ID NO: 404392 - RNA, 32 nt, Homo Sapiens
ggucccaggaguaggaggagcccgagcaccau

SEQ ID NO: 404393 - RNA, 32 nt, Homo Sapiens
ggugcccagccagccucccagcuaaaggugcu

SEQ ID NO: 404394 - RNA, 32 nt, Homo Sapiens
ucccugcacugugccccgcgggcuuuguugcu

SEQ ID NO: 404395 - RNA, 32 nt, Homo Sapiens
cauuaaauaaggaaacuguaugaaugucugug

SEQ ID NO: 404396 - RNA, 32 nt, Homo Sapiens
ucuauagauaaugaggaagaaaugguaugugu

SEQ ID NO: 404397 - RNA, 28 nt, Homo Sapiens
gcugggggaugacagccgaggugaacuu

SEQ ID NO: 404398 - RNA, 30 nt, Homo Sapiens
cugaugcgcgcgcaaccagggugguggcgg

SEQ ID NO: 404399 - RNA, 32 nt, Homo Sapiens
acuuugcccuugcaauuuuaagcuaugccaua

SEQ ID NO: 404400 - RNA, 32 nt, Homo Sapiens
auacuucuagggacugaacucuauguauuucu

SEQ ID NO: 404401 - RNA, 32 nt, Homo Sapiens
ucaucauaaacuagguauugcauugcuauccg

SEQ ID NO: 404402 - RNA, 32 nt, Homo Sapiens
ccagcccggggccccgggacuccccggcugca

SEQ ID NO: 404403 - RNA, 32 nt, Homo Sapiens
gccucucccugugaccccggcccccucagacu

SEQ ID NO: 404404 - RNA, 32 nt, Homo Sapiens
aaaucccacuguauacuguguguucuaguguu

SEQ ID NO: 404405 - RNA, 32 nt, Homo Sapiens
gcugacgcaggcagggcgcccggccccuccug

SEQ ID NO: 404406 - RNA, 32 nt, Homo Sapiens
gaaccacacaagugcuuaauucauuguuaugu

SEQ ID NO: 404407 - RNA, 32 nt, Homo Sapiens
aucccugugaggagaggugcugucugcuggag

SEQ ID NO: 404408 - RNA, 32 nt, Homo Sapiens
ugccugcuccuggcauuucaauaaaacccggc

SEQ ID NO: 404409 - RNA, 32 nt, Homo Sapiens
cccccaauuaggagcucagugcucucuugggg

SEQ ID NO: 404410 - RNA, 32 nt, Homo Sapiens
acaggauaguggaaaaaccuucaggcagcuuu

SEQ ID NO: 404411 - RNA, 32 nt, Homo Sapiens
caauauuaaaaauuauuuauguaucagagaac

SEQ ID NO: 404412 - RNA, 32 nt, Homo Sapiens
acuuuuuaaaauuuagauguuagauugaaaac

SEQ ID NO: 404413 - RNA, 32 nt, Homo Sapiens
ugguccggccccacucugcgccccucgaucuc

SEQ ID NO: 404414 - RNA, 30 nt, Homo Sapiens
agcaccgacccggugccgccggagcuggcc

SEQ ID NO: 404415 - RNA, 32 nt, Homo Sapiens
cagaguucuuaagcuauugauuguucacugac

SEQ ID NO: 404416 - RNA, 32 nt, Homo Sapiens
gcaggcaucacuuugccauuccguauuuuucg

SEQ ID NO: 404417 - RNA, 32 nt, Homo Sapiens
cacugcgccucccgccgcuuguggcgcuggag

SEQ ID NO: 404418 - RNA, 32 nt, Homo Sapiens
ggccugggaaaccugcccucgcugagaccucc

SEQ ID NO: 404419 - RNA, 32 nt, Homo Sapiens
auucaaaaaugaauuauaguucaggcauaucu

SEQ ID NO: 404420 - RNA, 32 nt, Homo Sapiens
ccgcagagucccagcccccagcccugcucacc

SEQ ID NO: 404421 - RNA, 32 nt, Homo Sapiens
cuucaucauaaggaguuuuucuaguuaacauu

SEQ ID NO: 404422 - RNA, 32 nt, Homo Sapiens
aagggacaccccuacacacacccaggcccacg

SEQ ID NO: 404423 - RNA, 32 nt, Homo Sapiens
uagugaaacaauucuaaaccccuuuuccauag

SEQ ID NO: 404424 - RNA, 32 nt, Homo Sapiens
ggauucaccauguuggccaggcuggucucaac

SEQ ID NO: 404425 - RNA, 29 nt, Homo Sapiens
gacaugaaauaaaagguuaugacuguuau

SEQ ID NO: 404426 - RNA, 32 nt, Homo Sapiens
cauaaagguaacaaagggcagcucagugguua

SEQ ID NO: 404427 - RNA, 32 nt, Homo Sapiens
caacgcaggaggagaaaagaaaugcacuaaga

SEQ ID NO: 404428 - RNA, 32 nt, Homo Sapiens
aggguuccaggguggggcucaggaggggagcg

SEQ ID NO: 404429 - RNA, 32 nt, Homo Sapiens
cccuuccuggcacccuuuugccugacggaccc

SEQ ID NO: 404430 - RNA, 32 nt, Homo Sapiens
cgucccuuucugugagcagggauugugguuuc

SEQ ID NO: 404431 - RNA, 32 nt, Homo Sapiens
aucuuuucauuaacuuacuugcugccuuuuuu

SEQ ID NO: 404432 - RNA, 32 nt, Homo Sapiens
cccgccccaagcccugccccuccuguacauau

SEQ ID NO: 404433 - RNA, 32 nt, Homo Sapiens
cgcgccccucccuccucgcggaccuggcggug

SEQ ID NO: 404434 - RNA, 32 nt, Homo Sapiens
cuaauaagcacuuuaaaaaggaaaaggcagcc

SEQ ID NO: 404435 - RNA, 29 nt, Homo Sapiens
uucgggccgccuuuccugccggaugugug

SEQ ID NO: 404436 - RNA, 32 nt, Homo Sapiens
ugggcgcgugagcacuuaauggcgccggugac

SEQ ID NO: 404437 - RNA, 32 nt, Homo Sapiens
ccaggccucccacuccucccagcccgggagau

SEQ ID NO: 404438 - RNA, 32 nt, Homo Sapiens
gcuggaccauacccccaguccaccagcuccag

SEQ ID NO: 404439 - RNA, 32 nt, Homo Sapiens
ucacugauguucuuguuguguaauugucuuuu

SEQ ID NO: 404440 - RNA, 31 nt, Homo Sapiens
ucagugcccgucagccaacugugggccuuca

SEQ ID NO: 404441 - RNA, 32 nt, Homo Sapiens
caggacacagggaaaucaggguuacaaaucuu

SEQ ID NO: 404442 - RNA, 32 nt, Homo Sapiens
uuauaagggcuuuauucaugccugauuuguuu

SEQ ID NO: 404443 - RNA, 32 nt, Homo Sapiens
gauccucugcuuguacccccagcccuugccuu

SEQ ID NO: 404444 - RNA, 32 nt, Homo Sapiens
uucaacguggaucccucaacuccggcgacucc

SEQ ID NO: 404445 - RNA, 32 nt, Homo Sapiens
uagguaagguaaaauaggaauaaaauagcugu

SEQ ID NO: 404446 - RNA, 32 nt, Homo Sapiens
uccgacucgggcccggcccggaggggacaccu

SEQ ID NO: 404447 - RNA, 32 nt, Homo Sapiens
gugguaucgcccggagcgcgggcuggguggug

SEQ ID NO: 404448 - RNA, 32 nt, Homo Sapiens
uccgagggugagccuuccuggccucuggaagu

SEQ ID NO: 404449 - RNA, 32 nt, Homo Sapiens
cuauuccaguaggaguugugugaauguuagca

SEQ ID NO: 404450 - RNA, 32 nt, Homo Sapiens
aguuccccacccagcgauuagggagcugggcu

SEQ ID NO: 404451 - RNA, 32 nt, Homo Sapiens
acauuauuaguugauuugggguuugucuuuga

SEQ ID NO: 404452 - RNA, 32 nt, Homo Sapiens
uugucugccuccuggggcuguuaugagggcug

SEQ ID NO: 404453 - RNA, 31 nt, Homo Sapiens
aaacuugcaagguucuggggcaggcaccgag

SEQ ID NO: 404454 - RNA, 32 nt, Homo Sapiens
caaggccccacuuucaagaaucagacagcagg

SEQ ID NO: 404455 - RNA, 32 nt, Homo Sapiens
agaucuuaaaaauacaaaauguagacaauuaa

SEQ ID NO: 404456 - RNA, 32 nt, Homo Sapiens
cacccacccuccccccaaucaguguucuuauu

SEQ ID NO: 404457 - RNA, 32 nt, Homo Sapiens
caucucauuguuaacucuuuacugauauguuu

SEQ ID NO: 404458 - RNA, 32 nt, Homo Sapiens
uucguucugaagaucacaguucacagaagcuu

SEQ ID NO: 404459 - RNA, 25 nt, Homo Sapiens
uuguuucgguuugacuacuuuguuc

SEQ ID NO: 404460 - RNA, 32 nt, Homo Sapiens
ccgagaccccagccgggcugccgcccgcgucc

SEQ ID NO: 404461 - RNA, 32 nt, Homo Sapiens
ucaugggauugugagcugcacugcuuguggac

SEQ ID NO: 404462 - RNA, 32 nt, Homo Sapiens
uaauauuuaaugauuucuggaacugccauucc

SEQ ID NO: 404463 - RNA, 32 nt, Homo Sapiens
ggccagcuuguuauuuauaacaaccuaaauuu

SEQ ID NO: 404464 - RNA, 32 nt, Homo Sapiens
cauuuauaaagguugguaaaauacuggcagug

SEQ ID NO: 404465 - RNA, 32 nt, Homo Sapiens
gcagguugcugagccaguggcugccccgugcc

SEQ ID NO: 404466 - RNA, 32 nt, Homo Sapiens
ggcagucuggguccucucaucauccccacuuc

SEQ ID NO: 404467 - RNA, 32 nt, Homo Sapiens
accagaggggaagaggaguuugacauguuagg

SEQ ID NO: 404468 - RNA, 32 nt, Homo Sapiens
cugccuuucaaagcucucucccccaugaccca

SEQ ID NO: 404469 - RNA, 32 nt, Homo Sapiens
ccccuucucuaugaaaauuggugccaccauug

SEQ ID NO: 404470 - RNA, 32 nt, Homo Sapiens
ucuugggcuucacaguguggccccacagcacc

SEQ ID NO: 404471 - RNA, 32 nt, Homo Sapiens
guuuaaaaugaauuauuuuaaaaaaaauuucu

SEQ ID NO: 404472 - RNA, 32 nt, Homo Sapiens
uaguucaucaaaggaaaccaaccgggaugcua

SEQ ID NO: 404473 - RNA, 32 nt, Homo Sapiens
ucgccguggcugccgguccucgaguugggggc

SEQ ID NO: 404474 - RNA, 32 nt, Homo Sapiens
augguacuaucuccugagugcugcaaguugua

SEQ ID NO: 404475 - RNA, 32 nt, Homo Sapiens
gcccagggcgucgugcuuccgcaguagucagu

SEQ ID NO: 404476 - RNA, 32 nt, Homo Sapiens
aacguugcugauuagagcugccgggucagaaa

SEQ ID NO: 404477 - RNA, 32 nt, Homo Sapiens
gccaggcccuccugcuggcugaggcuugggcc

SEQ ID NO: 404478 - RNA, 32 nt, Homo Sapiens
gucaacuuuucucuuggcuaacucuugaagcu

SEQ ID NO: 404479 - RNA, 32 nt, Homo Sapiens
gagaggaccccauucugggacugcucaggcuc

SEQ ID NO: 404480 - RNA, 32 nt, Homo Sapiens
ggggguuccguguccacccccauacauuuauu

SEQ ID NO: 404481 - RNA, 32 nt, Homo Sapiens
agugaccucacagcugccggaacauaaagacu

SEQ ID NO: 404482 - RNA, 32 nt, Homo Sapiens
cccucccccgccacuccugaaccccgucgagg

SEQ ID NO: 404483 - RNA, 32 nt, Homo Sapiens
ucuguggcuccaggccaaagugccggugagac

SEQ ID NO: 404484 - RNA, 32 nt, Homo Sapiens
cuuaguaaaauauuuauuguuccuuuauucuc

SEQ ID NO: 404485 - RNA, 29 nt, Homo Sapiens
gugauugggagagguuauuuucuaccuaa

SEQ ID NO: 404486 - RNA, 32 nt, Homo Sapiens
cugacagcacgcuccagcccucugggaacuga

SEQ ID NO: 404487 - RNA, 32 nt, Homo Sapiens
gacccggcgguggggaagucacuuccucccga

SEQ ID NO: 404488 - RNA, 32 nt, Homo Sapiens
uuacaauaaaaugucaauaugaaggacuguaa

SEQ ID NO: 404489 - RNA, 32 nt, Homo Sapiens
caggcgugguggcucauguauguaauccuagc

SEQ ID NO: 404490 - RNA, 32 nt, Homo Sapiens
cucaaaagguuuuaauaaaucuaauccuauuu

SEQ ID NO: 404491 - RNA, 32 nt, Homo Sapiens
caaguacaaaaauuaaaaaauuacuguagaaa

SEQ ID NO: 404492 - RNA, 32 nt, Homo Sapiens
ccugcaggaugaaagcucucugucuccuccuc

SEQ ID NO: 404493 - RNA, 32 nt, Homo Sapiens
aaggcaaauguuucuucugaccauuuacacug

SEQ ID NO: 404494 - RNA, 32 nt, Homo Sapiens
guguaguaaagagcuucugcuguuccugagaa

SEQ ID NO: 404495 - RNA, 32 nt, Homo Sapiens
cccccagguucaagcgauucugccucagccuc

SEQ ID NO: 404496 - RNA, 32 nt, Homo Sapiens
gcgccacagcuauguguccccgagccgcgcgg

SEQ ID NO: 404497 - RNA, 32 nt, Homo Sapiens
ggggggagagccgggagucgcugggugcgugg

SEQ ID NO: 404498 - RNA, 32 nt, Homo Sapiens
ccaccuucaacugaacucaacaaaaucuucaa

SEQ ID NO: 404499 - RNA, 32 nt, Homo Sapiens
uccccuuuaagugguuuaacaacugacuucau

SEQ ID NO: 404500 - RNA, 32 nt, Homo Sapiens
ggccucuccgcaccaccucagcgggcaggagg

SEQ ID NO: 404501 - RNA, 32 nt, Homo Sapiens
ccgaggacgcagaccaguggcacgacggaaac

SEQ ID NO: 404502 - RNA, 32 nt, Homo Sapiens
cuaaaaagggcuuauuucugaggaaugaaagg

SEQ ID NO: 404503 - RNA, 32 nt, Homo Sapiens
cuauuuaauacuuuguaauaugccaccaagag

SEQ ID NO: 404504 - RNA, 32 nt, Homo Sapiens
aucucucucccucuucuugggccucccuauuc

SEQ ID NO: 404505 - RNA, 32 nt, Homo Sapiens
agagauggaugaauggaaggacacacagaugg

SEQ ID NO: 404506 - RNA, 32 nt, Homo Sapiens
cuacucggguggcagaggagaagaaucgcuug

SEQ ID NO: 404507 - RNA, 32 nt, Homo Sapiens
uugauuuuuguaaaaauagaacuuuacuugga

SEQ ID NO: 404508 - RNA, 32 nt, Homo Sapiens
cucaggcugugaccguguuaacauuuucagau

SEQ ID NO: 404509 - RNA, 32 nt, Homo Sapiens
gccccugagaggugggggccucuccagggcac

SEQ ID NO: 404510 - RNA, 32 nt, Homo Sapiens
cagcgugaagucugaaauaugcaacagaagaa

SEQ ID NO: 404511 - RNA, 32 nt, Homo Sapiens
ccaggaccaauauguucaggccacaccgaugg

SEQ ID NO: 404512 - RNA, 32 nt, Homo Sapiens
gcagcugcuaaguggcagguaagggacuguua

SEQ ID NO: 404513 - RNA, 32 nt, Homo Sapiens
agccagagcagauaacuugggguguguguggg

SEQ ID NO: 404514 - RNA, 32 nt, Homo Sapiens
ggcgacucuggcgacugagcccggggaggacg

SEQ ID NO: 404515 - RNA, 32 nt, Homo Sapiens
ucuccugccuacuugccccuccuuccaggccg

SEQ ID NO: 404516 - RNA, 31 nt, Homo Sapiens
uccaagggcugccuggggccccgcgcccgua

SEQ ID NO: 404517 - RNA, 32 nt, Homo Sapiens
ggaggggagcagcauuuccagccuucugaaca

SEQ ID NO: 404518 - RNA, 32 nt, Homo Sapiens
uauuuucuuuuuauuuugcacucuguaauugc

SEQ ID NO: 404519 - RNA, 27 nt, Homo Sapiens
ccauggccgccuacaaacuggugcuga

SEQ ID NO: 404520 - RNA, 32 nt, Homo Sapiens
aguuuuaacuuuuaauuuuuuauauuuaaaug

SEQ ID NO: 404521 - RNA, 32 nt, Homo Sapiens
gaacaaagcugaugcaacugauuuauacaaaa

SEQ ID NO: 404522 - RNA, 32 nt, Homo Sapiens
gccugccuuccagcguggccgcgcccuggccc

SEQ ID NO: 404523 - RNA, 32 nt, Homo Sapiens
gcggcuggggccucggggggcgcggaccccca

SEQ ID NO: 404524 - RNA, 32 nt, Homo Sapiens
uagaacaaaauauuuaguaaagcuuuauaaau

SEQ ID NO: 404525 - RNA, 32 nt, Homo Sapiens
ugaagaguccggcuggggagccagggauucag

SEQ ID NO: 404526 - RNA, 28 nt, Homo Sapiens
cugaggcaagagaaucauuugaaccugg

SEQ ID NO: 404527 - RNA, 32 nt, Homo Sapiens
cucucauuccagcccaaccuauuuaacuuuuu

SEQ ID NO: 404528 - RNA, 32 nt, Homo Sapiens
gcaguuuaauaaaccugaaccuuuguguguuu

SEQ ID NO: 404529 - RNA, 32 nt, Homo Sapiens
ccaggcuucccugacggggaugacucagcacu

SEQ ID NO: 404530 - RNA, 32 nt, Homo Sapiens
ucaagucaaaccauuauagacaagcauuuggg

SEQ ID NO: 404531 - RNA, 32 nt, Homo Sapiens
ccgcucccaccucggcgucucgucucucgccc

SEQ ID NO: 404532 - RNA, 32 nt, Homo Sapiens
uccucuugacuucaugccacauugacgugaac

SEQ ID NO: 404533 - RNA, 31 nt, Homo Sapiens
agccgcggguuucuuauuuagccagaucgac

SEQ ID NO: 404534 - RNA, 32 nt, Homo Sapiens
auacaguccauauuuaaauuucucugguuauu

SEQ ID NO: 404535 - RNA, 32 nt, Homo Sapiens
gauuugcaaaaguuuuuuuuuauuucuaugag

SEQ ID NO: 404536 - RNA, 32 nt, Homo Sapiens
aaugcugccuucucccuguccuccuccuggau

SEQ ID NO: 404537 - RNA, 32 nt, Homo Sapiens
uguuucucuaaggaauuauuucacacacggac

SEQ ID NO: 404538 - RNA, 32 nt, Homo Sapiens
cugaggcgcgugcggcggccaccccagccuag

SEQ ID NO: 404539 - RNA, 32 nt, Homo Sapiens
gguuucucuguugaggaugcguguuccucagu

SEQ ID NO: 404540 - RNA, 32 nt, Homo Sapiens
guagaacuuuagauacuuuuuaucauacaaua

SEQ ID NO: 404541 - RNA, 32 nt, Homo Sapiens
accuccuggagcauuaguguccuccucugaaa

SEQ ID NO: 404542 - RNA, 32 nt, Homo Sapiens
ccugucggccgcgucggcgcugcugcgguauc

SEQ ID NO: 404543 - RNA, 32 nt, Homo Sapiens
cacccaagauggagucuggcuuugucccccag

SEQ ID NO: 404544 - RNA, 32 nt, Homo Sapiens
gcuugccucucaauucauuccuccucuuccuc

SEQ ID NO: 404545 - RNA, 32 nt, Homo Sapiens
gccuccugucaagguagcuagaggccugggaa

SEQ ID NO: 404546 - RNA, 32 nt, Homo Sapiens
aaauuccuucuaaaccacauuggaacugaccu

SEQ ID NO: 404547 - RNA, 32 nt, Homo Sapiens
agcucuaggaccagucacuaaucucugagacu

SEQ ID NO: 404548 - RNA, 32 nt, Homo Sapiens
uugcagcccuaaugaaauuaugucuaggauga

SEQ ID NO: 404549 - RNA, 32 nt, Homo Sapiens
uuacuggguucuccagucuccucccuuuacuu

SEQ ID NO: 404550 - RNA, 32 nt, Homo Sapiens
cuucagcccuccccgcacagccuacugauucc

SEQ ID NO: 404551 - RNA, 32 nt, Homo Sapiens
ccucccagcucuuugcugucuccgguugucuc

SEQ ID NO: 404552 - RNA, 32 nt, Homo Sapiens
ggcauguaguggggacggagggccaggaggcc

SEQ ID NO: 404553 - RNA, 32 nt, Homo Sapiens
accugauuuuaguucugugauuuuacacuuuu

SEQ ID NO: 404554 - RNA, 32 nt, Homo Sapiens
ugauuauccgcaaaugcaaacaguuucagauc

SEQ ID NO: 404555 - RNA, 32 nt, Homo Sapiens
gagugcuugggguuugacagguagugacgugu

SEQ ID NO: 404556 - RNA, 32 nt, Homo Sapiens
cgcgggagagcucgggcucgcgcggaccccag

SEQ ID NO: 404557 - RNA, 32 nt, Homo Sapiens
uguuuauaaaaauaagacuuacuaaauauaga

SEQ ID NO: 404558 - RNA, 32 nt, Homo Sapiens
aacaagacagauccugacauagcuuuggccug

SEQ ID NO: 404559 - RNA, 32 nt, Homo Sapiens
guugaagugaauuaagguacaugcaaguguag

SEQ ID NO: 404560 - RNA, 32 nt, Homo Sapiens
caugaacacgugugggccucggucacguggcu

SEQ ID NO: 404561 - RNA, 32 nt, Homo Sapiens
ugcacucucagguauucccugcucuuacucca

SEQ ID NO: 404562 - RNA, 32 nt, Homo Sapiens
ccugugcuggcagcuuugcccacacauaccca

SEQ ID NO: 404563 - RNA, 32 nt, Homo Sapiens
gcuaucaaucuggguuuuaaguguggauucau

SEQ ID NO: 404564 - RNA, 32 nt, Homo Sapiens
aauggaggaaaggggcuuucugacuuggagca

SEQ ID NO: 404565 - RNA, 32 nt, Homo Sapiens
uccugagucugcuggcuuccagacugaacuau

SEQ ID NO: 404566 - RNA, 31 nt, Homo Sapiens
agugaucaaguuauuuuuaauuugguuuuca

SEQ ID NO: 404567 - RNA, 32 nt, Homo Sapiens
ucuagaucuacaaccuauuucucuacucuuua

SEQ ID NO: 404568 - RNA, 32 nt, Homo Sapiens
aucuggcuguggauucgccgccguccugcugg

SEQ ID NO: 404569 - RNA, 32 nt, Homo Sapiens
accagugcauagcccaugcugaagauucagac

SEQ ID NO: 404570 - RNA, 32 nt, Homo Sapiens
gaacacguuuauuuauuuuuuauuuucucaac

SEQ ID NO: 404571 - RNA, 32 nt, Homo Sapiens
ccucaugaugccuggugacaaaagaauuucug

SEQ ID NO: 404572 - RNA, 32 nt, Homo Sapiens
uguguguuaaaucaccaauuauauuaaucaaa

SEQ ID NO: 404573 - RNA, 32 nt, Homo Sapiens
auuauuauauuuccacaucaguuucuugugug

SEQ ID NO: 404574 - RNA, 32 nt, Homo Sapiens
cucccaugcucccuaccuguccccucacaggg

SEQ ID NO: 404575 - RNA, 32 nt, Homo Sapiens
ccaggcacccuuugggggcucuguccacggac

SEQ ID NO: 404576 - RNA, 32 nt, Homo Sapiens
ccaccaccuggauuguuuuugggcuuucagcu

SEQ ID NO: 404577 - RNA, 32 nt, Homo Sapiens
cccuagaacuuaaaguauaauaaaauaaauaa

SEQ ID NO: 404578 - RNA, 32 nt, Homo Sapiens
agggggcucuggcccaggauucccaacccugg

SEQ ID NO: 404579 - RNA, 31 nt, Homo Sapiens
agcagguggcacugcagcuccccgcuccugc

SEQ ID NO: 404580 - RNA, 32 nt, Homo Sapiens
uaucuauaaaaauuauaaaaggauuuuugaaa

SEQ ID NO: 404581 - RNA, 32 nt, Homo Sapiens
acaacuuuuccacaguauuuuuuaucccguaa

SEQ ID NO: 404582 - RNA, 32 nt, Homo Sapiens
agaauauuuuuggugaauuacuuuguuguagu

SEQ ID NO: 404583 - RNA, 32 nt, Homo Sapiens
cgccuagagcgcgacccggagcgggcagcggc

SEQ ID NO: 404584 - RNA, 32 nt, Homo Sapiens
acaauggaagcagaggucagagugaugcaauu

SEQ ID NO: 404585 - RNA, 32 nt, Homo Sapiens
cucuuucucucccuccucccuguuuuaaauua

SEQ ID NO: 404586 - RNA, 32 nt, Homo Sapiens
uccgggagggccugggcggucccaggaugagc

SEQ ID NO: 404587 - RNA, 32 nt, Homo Sapiens
ucugcacguccgcucagcccaagccccuccau

SEQ ID NO: 404588 - RNA, 32 nt, Homo Sapiens
caacacugccucacucuuccccucccaccuuc

SEQ ID NO: 404589 - RNA, 30 nt, Homo Sapiens
cggccuggcaggcggcgcgcgguccaaggu

SEQ ID NO: 404590 - RNA, 32 nt, Homo Sapiens
aaaaaugcaacuucuuuuuauuuucuuuugua

SEQ ID NO: 404591 - RNA, 30 nt, Homo Sapiens
gaggggguaucccuaguuagacuuugggaa

SEQ ID NO: 404592 - RNA, 32 nt, Homo Sapiens
gcucauggaauguuuucuuauccuuugaacac

SEQ ID NO: 404593 - RNA, 30 nt, Homo Sapiens
auuccugucagcggcggcggcgguggcggc

SEQ ID NO: 404594 - RNA, 32 nt, Homo Sapiens
uucuaaauauuuuuguaguguucuauacuaac

SEQ ID NO: 404595 - RNA, 32 nt, Homo Sapiens
cgugggccgagggggccggcccgggcugcugu

SEQ ID NO: 404596 - RNA, 32 nt, Homo Sapiens
cccuguguuaguagaauuauuucuggacuuug

SEQ ID NO: 404597 - RNA, 32 nt, Homo Sapiens
uuccggcauccacgucauuguccgcacggagu

SEQ ID NO: 404598 - RNA, 32 nt, Homo Sapiens
ugugguuuaaacaaaauuagauaaaccaugua

SEQ ID NO: 404599 - RNA, 32 nt, Homo Sapiens
ugggcuuaggguggagaugccgccuacccgau

SEQ ID NO: 404600 - RNA, 32 nt, Homo Sapiens
gggucggcgggggcaggggcggggaggugaaa

SEQ ID NO: 404601 - RNA, 32 nt, Homo Sapiens
cuccaccguugguguucaccgcccccacccug

SEQ ID NO: 404602 - RNA, 31 nt, Homo Sapiens
ggcgcggagccccagcugcggaggccgacgg

SEQ ID NO: 404603 - RNA, 30 nt, Homo Sapiens
ggaccuuggccccggcucgcccugaacuac

SEQ ID NO: 404604 - RNA, 32 nt, Homo Sapiens
cagugcaggccaggcccggccggggcgaggca

SEQ ID NO: 404605 - RNA, 32 nt, Homo Sapiens
uaggagcaaccacugaauggucuuagcugucc

SEQ ID NO: 404606 - RNA, 32 nt, Homo Sapiens
guucaagggcccccggccuccugcgcuccugc

SEQ ID NO: 404607 - RNA, 32 nt, Homo Sapiens
gccuccggggucagcccucucucugggucucc

SEQ ID NO: 404608 - RNA, 32 nt, Homo Sapiens
ccugcagggcugggcuuuugcauggcaaugga

SEQ ID NO: 404609 - RNA, 32 nt, Homo Sapiens
cuaagaccccacgaccccgcgcaccggccgcu

SEQ ID NO: 404610 - RNA, 32 nt, Homo Sapiens
ucaggggucuaggaggggcauuuuggagacug

SEQ ID NO: 404611 - RNA, 32 nt, Homo Sapiens
gagagaugggaaguucugugacugcugcuacu

SEQ ID NO: 404612 - RNA, 32 nt, Homo Sapiens
ugaaagcaucacuucuuuuuuauguuguggga

SEQ ID NO: 404613 - RNA, 32 nt, Homo Sapiens
gagggagcuggagaacuuuuucaacuugaacc

SEQ ID NO: 404614 - RNA, 32 nt, Homo Sapiens
ucuugagaauaaagccacugggccaggaacuc

SEQ ID NO: 404615 - RNA, 32 nt, Homo Sapiens
ugacuucccucccccugccagaauacuccuug

SEQ ID NO: 404616 - RNA, 32 nt, Homo Sapiens
ggauucugggcaagguuacugcauuccggauc

SEQ ID NO: 404617 - RNA, 32 nt, Homo Sapiens
aaaucaauuaucaggaaagcuaaagaacuuuu

SEQ ID NO: 404618 - RNA, 32 nt, Homo Sapiens
gacugaggggguggagagaggggaccucuucc

SEQ ID NO: 404619 - RNA, 32 nt, Homo Sapiens
ggacucuuucacuucgaucccuggacaauuau

SEQ ID NO: 404620 - RNA, 32 nt, Homo Sapiens
aagagcggggcaaagaggauggaaaucauaaa

SEQ ID NO: 404621 - RNA, 32 nt, Homo Sapiens
aaccagagggugggagcaggcggaauccaacc

SEQ ID NO: 404622 - RNA, 32 nt, Homo Sapiens
uuuugugaaaauaauaccuaagguuuucuggc

SEQ ID NO: 404623 - RNA, 32 nt, Homo Sapiens
gggacggaccgcggccaaggcgggggcgcugg

SEQ ID NO: 404624 - RNA, 32 nt, Homo Sapiens
uggccccauccccacaccccuuuucugcucuu

SEQ ID NO: 404625 - RNA, 32 nt, Homo Sapiens
guguauauuucuguuacuucauccgguuugca

SEQ ID NO: 404626 - RNA, 32 nt, Homo Sapiens
caccauucugcauuuagcuguauucauauauu

SEQ ID NO: 404627 - RNA, 32 nt, Homo Sapiens
uauuguaccaggaugugcuauuaagagcacgu

SEQ ID NO: 404628 - RNA, 32 nt, Homo Sapiens
aagagcugggcccggcccacggcggcggcggc

SEQ ID NO: 404629 - RNA, 32 nt, Homo Sapiens
ccucccugccuggccugcucagagguucccug

SEQ ID NO: 404630 - RNA, 32 nt, Homo Sapiens
guaggugccgugagccgaggucgcgccacugc

SEQ ID NO: 404631 - RNA, 32 nt, Homo Sapiens
gauuguguggggagcuggguguguguucuggc

SEQ ID NO: 404632 - RNA, 32 nt, Homo Sapiens
gcgccgcugcagagccgagcgaaucccgagcc

SEQ ID NO: 404633 - RNA, 32 nt, Homo Sapiens
gguauacuuuauucucuuucuuguguuguaga

SEQ ID NO: 404634 - RNA, 32 nt, Homo Sapiens
uuauggaggauucugugacucuugccaaauaa

SEQ ID NO: 404635 - RNA, 32 nt, Homo Sapiens
cagaggcucgaguuaccccucuuaccaccguc

SEQ ID NO: 404636 - RNA, 32 nt, Homo Sapiens
uuuugaccaaaauacaaugugaauuuauucug

SEQ ID NO: 404637 - RNA, 32 nt, Homo Sapiens
cucacucccucuucuuuuuuuuccucucucuc

SEQ ID NO: 404638 - RNA, 30 nt, Homo Sapiens
aagggccugugccagcaccaggcagagggc

SEQ ID NO: 404639 - RNA, 32 nt, Homo Sapiens
cgcugcacuccagccugggugacagaaugaga

SEQ ID NO: 404640 - RNA, 32 nt, Homo Sapiens
agaaucuugucccuugggaguuuuugugucug

SEQ ID NO: 404641 - RNA, 32 nt, Homo Sapiens
cucccuaguuccagcccugcccuggucugaug

SEQ ID NO: 404642 - RNA, 32 nt, Homo Sapiens
ccuaugcuuucacuucccaccucucuaccuaa

SEQ ID NO: 404643 - RNA, 32 nt, Homo Sapiens
aguuccccauucuugacauuuuauuucaguuu

SEQ ID NO: 404644 - RNA, 31 nt, Homo Sapiens
guaccuguucacagucauuccacuccuuguc

SEQ ID NO: 404645 - RNA, 32 nt, Homo Sapiens
auuuccuguauauaaacuucuuucaaucuaca

SEQ ID NO: 404646 - RNA, 32 nt, Homo Sapiens
auaugguagcguuuuguuguuguuguuuuuuc

SEQ ID NO: 404647 - RNA, 32 nt, Homo Sapiens
acagauuauuauugaacuuaugcaaauaacca

SEQ ID NO: 404648 - RNA, 32 nt, Homo Sapiens
agaagauucucagaucuacgucagacuguugu

SEQ ID NO: 404649 - RNA, 32 nt, Homo Sapiens
acacauuuuauaaauuugauuuaugcagauuu

SEQ ID NO: 404650 - RNA, 32 nt, Homo Sapiens
aaugccccugaccccuggaagccggccugccu

SEQ ID NO: 404651 - RNA, 32 nt, Homo Sapiens
uggagucucgcucugucgccaaggcuggagug

SEQ ID NO: 404652 - RNA, 32 nt, Homo Sapiens
cucuuugaaguucccccucucuuugcuaaagc

SEQ ID NO: 404653 - RNA, 32 nt, Homo Sapiens
cucuacaaaaauacaaaaauuaggccgggugc

SEQ ID NO: 404654 - RNA, 32 nt, Homo Sapiens
guuagacagaagaagucagagaagugaagaga

SEQ ID NO: 404655 - RNA, 32 nt, Homo Sapiens
agaggccauggagcugagcagcaagaagaagc

SEQ ID NO: 404656 - RNA, 30 nt, Homo Sapiens
aaaugaccacuugcuauggucugaauauuu

SEQ ID NO: 404657 - RNA, 32 nt, Homo Sapiens
agccugauaggcugaggccagcugggaugcug

SEQ ID NO: 404658 - RNA, 32 nt, Homo Sapiens
uuuuuagccuaccauguguacaaaaucuacuu

SEQ ID NO: 404659 - RNA, 32 nt, Homo Sapiens
uguacaacggucccuauauaauacggagaagc

SEQ ID NO: 404660 - RNA, 32 nt, Homo Sapiens
gccacacaagaaaaaagaaguagaaagauucu

SEQ ID NO: 404661 - RNA, 32 nt, Homo Sapiens
gccguugcacuccagccugggcgacaagagca

SEQ ID NO: 404662 - RNA, 32 nt, Homo Sapiens
uguuguagaauauuuucauuagcuuuacauug

SEQ ID NO: 404663 - RNA, 32 nt, Homo Sapiens
uuuuccucagugcguuucuuuacaauuucaaa

SEQ ID NO: 404664 - RNA, 32 nt, Homo Sapiens
cguagaguugcggaagaaccuggccgcagaau

SEQ ID NO: 404665 - RNA, 32 nt, Homo Sapiens
augucucuugugcagucauguguuaaauauuu

SEQ ID NO: 404666 - RNA, 32 nt, Homo Sapiens
ggguuucucauauuggucaggcuggucuugaa

SEQ ID NO: 404667 - RNA, 32 nt, Homo Sapiens
agauuucuguacacauagucaguaauaauaaa

SEQ ID NO: 404668 - RNA, 32 nt, Homo Sapiens
ucuaaaauuuguaugggaauugaaagaaucca

SEQ ID NO: 404669 - RNA, 32 nt, Homo Sapiens
uguagggcugugcaggacgugccuuguuaacc

SEQ ID NO: 404670 - RNA, 32 nt, Homo Sapiens
ccacaaggcacugggcaccaguccuuuuggag

SEQ ID NO: 404671 - RNA, 32 nt, Homo Sapiens
cgcccucugaaucggaguguuucuucuucaca

SEQ ID NO: 404672 - RNA, 32 nt, Homo Sapiens
cagaaggaaagccggguugcagacacagccgc

SEQ ID NO: 404673 - RNA, 31 nt, Homo Sapiens
cgucauuauugagccaaaagaauaaauuuca

SEQ ID NO: 404674 - RNA, 29 nt, Homo Sapiens
uugucuuaguuuguauauuuucugugacu

SEQ ID NO: 404675 - RNA, 32 nt, Homo Sapiens
ugggcuuugucaugucucugguggugcugggg

SEQ ID NO: 404676 - RNA, 32 nt, Homo Sapiens
ucuucuuuuuuuuuuucuuuuuagauagaagu

SEQ ID NO: 404677 - RNA, 32 nt, Homo Sapiens
agggaaaccuucacgaucuaaaacagacagag

SEQ ID NO: 404678 - RNA, 32 nt, Homo Sapiens
agcacacacaucuuuccuuccauguauugaaa

SEQ ID NO: 404679 - RNA, 32 nt, Homo Sapiens
ggccccaugccucuccucccucucuggcaggg

SEQ ID NO: 404680 - RNA, 32 nt, Homo Sapiens
uacaggagaagcuuggcgaggugaaggagacg

SEQ ID NO: 404681 - RNA, 32 nt, Homo Sapiens
aagagcccaaugcauuccauuucuggaaguga

SEQ ID NO: 404682 - RNA, 32 nt, Homo Sapiens
cuacaaugugccagauacauguuuccuaugcc

SEQ ID NO: 404683 - RNA, 32 nt, Homo Sapiens
ggccucugaccggcccagcagugagcgcggcu

SEQ ID NO: 404684 - RNA, 32 nt, Homo Sapiens
gacccgcacguccuguucaaaagcagacucgg

SEQ ID NO: 404685 - RNA, 32 nt, Homo Sapiens
cagcacugacuucuguaucaugucagggauuu

SEQ ID NO: 404686 - RNA, 32 nt, Homo Sapiens
caauggcuggcaucugcuuuauucccauugcu

SEQ ID NO: 404687 - RNA, 32 nt, Homo Sapiens
ugcagaaauuugucuuuuuuuaguuugcaaaa

SEQ ID NO: 404688 - RNA, 32 nt, Homo Sapiens
cgaggcggggcaacacuaaggugcucuuagaa

SEQ ID NO: 404689 - RNA, 32 nt, Homo Sapiens
uuuuuuaaauauauuuauguuuuaaaaaaaaa

SEQ ID NO: 404690 - RNA, 32 nt, Homo Sapiens
aggccccgggguggagucuccggaccgggucc

SEQ ID NO: 404691 - RNA, 32 nt, Homo Sapiens
ugcuucuuaauccuaaaaacacaauggcugaa

SEQ ID NO: 404692 - RNA, 32 nt, Homo Sapiens
guucacaauaagauaggugauaaaacagacua

SEQ ID NO: 404693 - RNA, 32 nt, Homo Sapiens
uuggcauguuugcugcagaaaaggccccagaa

SEQ ID NO: 404694 - RNA, 32 nt, Homo Sapiens
accacguagugcgccagucaucacugguagca

SEQ ID NO: 404695 - RNA, 32 nt, Homo Sapiens
ggaagaggagguucuucgggacacccguggau

SEQ ID NO: 404696 - RNA, 32 nt, Homo Sapiens
agguugagcagagcuccaccgcagucccgggu

SEQ ID NO: 404697 - RNA, 32 nt, Homo Sapiens
ucagagugcagcaaaaucucauuucauaagac

SEQ ID NO: 404698 - RNA, 32 nt, Homo Sapiens
cuuuaucauauauaaauugucuucaguagaug

SEQ ID NO: 404699 - RNA, 32 nt, Homo Sapiens
aggggccuggggcccgggaccggaggcugacg

SEQ ID NO: 404700 - RNA, 32 nt, Homo Sapiens
agaguucuauauuuuaaagauauauguguuca

SEQ ID NO: 404701 - RNA, 32 nt, Homo Sapiens
cuucguucucaggaacaaaaccugaggcagcc

SEQ ID NO: 404702 - RNA, 32 nt, Homo Sapiens
auccaaagauaaaagccagguagauguugaaa

SEQ ID NO: 404703 - RNA, 32 nt, Homo Sapiens
cugccuuggccaaugcgagguccuuccuuauc

SEQ ID NO: 404704 - RNA, 32 nt, Homo Sapiens
gauacaagcagccacuguuuccuccguuaaca

SEQ ID NO: 404705 - RNA, 32 nt, Homo Sapiens
augagcaauauucagagugaaguaaaucugga

SEQ ID NO: 404706 - RNA, 32 nt, Homo Sapiens
auucauguuuuaaagauggaauaauuuuaaua

SEQ ID NO: 404707 - RNA, 32 nt, Homo Sapiens
guccgcacccgcucugcgcugcacccucuuaa

SEQ ID NO: 404708 - RNA, 32 nt, Homo Sapiens
gaucugguuggauaagauuuuaucauaacuuu

SEQ ID NO: 404709 - RNA, 32 nt, Homo Sapiens
gugaaacuaauauauaugguggccagagugua

SEQ ID NO: 404710 - RNA, 32 nt, Homo Sapiens
uuuguuauaauucauucauguauacagacaau

SEQ ID NO: 404711 - RNA, 32 nt, Homo Sapiens
ugcuucaggugucagaaguucauugaugagca

SEQ ID NO: 404712 - RNA, 32 nt, Homo Sapiens
uaguucauucauguauccugguaaagcaucuu

SEQ ID NO: 404713 - RNA, 32 nt, Homo Sapiens
ccguccuccuuuaucugccggaggaagaugcu

SEQ ID NO: 404714 - RNA, 32 nt, Homo Sapiens
cucaaggcagaagaauuuuucuuaguacagaa

SEQ ID NO: 404715 - RNA, 32 nt, Homo Sapiens
ugucuaguucuuccuucaucacacgugcuucu

SEQ ID NO: 404716 - RNA, 32 nt, Homo Sapiens
ggaggcgggagcagaaguagguccugucggcc

SEQ ID NO: 404717 - RNA, 32 nt, Homo Sapiens
cagcacuuucccuuccagcuuuccucaagaca

SEQ ID NO: 404718 - RNA, 32 nt, Homo Sapiens
cgggccucaccagcuuccuggagagucacaug

SEQ ID NO: 404719 - RNA, 32 nt, Homo Sapiens
ccaugucacagcugcuuucucuggcuggagug

SEQ ID NO: 404720 - RNA, 26 nt, Homo Sapiens
aauuaaaaagauucuuuuucugauua

SEQ ID NO: 404721 - RNA, 32 nt, Homo Sapiens
ugcugugcgggcggggguggccuggagcuauu

SEQ ID NO: 404722 - RNA, 32 nt, Homo Sapiens
uggcugcugaaucccuuucucagcucagagca

SEQ ID NO: 404723 - RNA, 32 nt, Homo Sapiens
gugaccaucgccauguacaugaagggcgggua

SEQ ID NO: 404724 - RNA, 32 nt, Homo Sapiens
uucuggcccaaauguuccauuauucagcuggc

SEQ ID NO: 404725 - RNA, 32 nt, Homo Sapiens
gagcucaucacugugggauggugaccugcaga

SEQ ID NO: 404726 - RNA, 32 nt, Homo Sapiens
agguuuccaucuuacaugucacauaaagcuuu

SEQ ID NO: 404727 - RNA, 27 nt, Homo Sapiens
caaauaaagucaugauauuuuccuggc

SEQ ID NO: 404728 - RNA, 32 nt, Homo Sapiens
cacagucacauguggauaguaguuaccuauca

SEQ ID NO: 404729 - RNA, 32 nt, Homo Sapiens
cuuugacuuagucggaaauuucugggaugcaa

SEQ ID NO: 404730 - RNA, 32 nt, Homo Sapiens
ugcaucuuuucuacuucaguacacuuggugua

SEQ ID NO: 404731 - RNA, 32 nt, Homo Sapiens
ggcaauauuuuugcuuuuugaaaugcucuugg

SEQ ID NO: 404732 - RNA, 32 nt, Homo Sapiens
accgugucauuccauggguccugaggucccuu

SEQ ID NO: 404733 - RNA, 32 nt, Homo Sapiens
gggcugcagggccgcggguucacgucccaccu

SEQ ID NO: 404734 - RNA, 32 nt, Homo Sapiens
uugacauugggguggauagucgauucaccugc

SEQ ID NO: 404735 - RNA, 32 nt, Homo Sapiens
aacacuugucuccucuugucaacacagauucu

SEQ ID NO: 404736 - RNA, 32 nt, Homo Sapiens
gauguaaugaacugccauguccaggaagcuug

SEQ ID NO: 404737 - RNA, 32 nt, Homo Sapiens
cccguggcauuuggcuugaugguuugguuugg

SEQ ID NO: 404738 - RNA, 32 nt, Homo Sapiens
auguaaggacaaugacaacugauaagggaugc

SEQ ID NO: 404739 - RNA, 32 nt, Homo Sapiens
gaacuuacgcuuuuuauuucauucacgucuac

SEQ ID NO: 404740 - RNA, 32 nt, Homo Sapiens
uacaauucuaacuuacauauuuuuugaaagua

SEQ ID NO: 404741 - RNA, 32 nt, Homo Sapiens
aauccagcagcggcgagcagcagcugggcagu

SEQ ID NO: 404742 - RNA, 32 nt, Homo Sapiens
uuguuuuuuaaagaauguuuggcacucucuaa

SEQ ID NO: 404743 - RNA, 32 nt, Homo Sapiens
agagaauuuacuauuaaucccagaguuuucuc

SEQ ID NO: 404744 - RNA, 32 nt, Homo Sapiens
ccaaaagagaucauggagaacaguguuaaaau

SEQ ID NO: 404745 - RNA, 32 nt, Homo Sapiens
gcuaugcuguacauuuaacugaucaaauacau

SEQ ID NO: 404746 - RNA, 32 nt, Homo Sapiens
uuucuucagagaagcugaucuuuguuaauguc

SEQ ID NO: 404747 - RNA, 32 nt, Homo Sapiens
gcggcccaccccagcccuugggccuggcucca

SEQ ID NO: 404748 - RNA, 32 nt, Homo Sapiens
ugauuguuugcuagauuuuguuuucuacaauc

SEQ ID NO: 404749 - RNA, 30 nt, Homo Sapiens
ccgcgccaugcucguucucagaagcggccu

SEQ ID NO: 404750 - RNA, 32 nt, Homo Sapiens
cccucugaccaggacugaggggcuuuuucucu

SEQ ID NO: 404751 - RNA, 32 nt, Homo Sapiens
ggacgcagaggcccugcccuugccagacggcg

SEQ ID NO: 404752 - RNA, 32 nt, Homo Sapiens
aaacugugaguccauuaaacuucuuuuucuuu

SEQ ID NO: 404753 - RNA, 32 nt, Homo Sapiens
gcauugauauugugaacauuugugauauaugu

SEQ ID NO: 404754 - RNA, 32 nt, Homo Sapiens
cucucaacauagaugaaaauuaacucaagaua

SEQ ID NO: 404755 - RNA, 32 nt, Homo Sapiens
gagcuugacaccuggugcuuuuaaguagggau

SEQ ID NO: 404756 - RNA, 32 nt, Homo Sapiens
cuauagugaugaugaucucauucagaagaugc

SEQ ID NO: 404757 - RNA, 31 nt, Homo Sapiens
caccaagcuggccaugcaggaguucaugguc

SEQ ID NO: 404758 - RNA, 32 nt, Homo Sapiens
agagcaaacccucccuaguccugggcaauucc

SEQ ID NO: 404759 - RNA, 32 nt, Homo Sapiens
agccucaaaaauauaugugucugcaacccuca

SEQ ID NO: 404760 - RNA, 32 nt, Homo Sapiens
aacaaauggagugaucuguuauccccuggguu

SEQ ID NO: 404761 - RNA, 32 nt, Homo Sapiens
ugagaaggccccagggcagcggucuucuccau

SEQ ID NO: 404762 - RNA, 32 nt, Homo Sapiens
cagauuuguaaaaaauacauauuugaaguauu

SEQ ID NO: 404763 - RNA, 32 nt, Homo Sapiens
cugacacacacacacacacacacacacacaca

SEQ ID NO: 404764 - RNA, 32 nt, Homo Sapiens
cucuuucuuucucuguccccaaggcuggagug

SEQ ID NO: 404765 - RNA, 30 nt, Homo Sapiens
ggacgccgucaugcugcagcagcuccugau

SEQ ID NO: 404766 - RNA, 32 nt, Homo Sapiens
ccaccugaagggaauuugaggaccgccgccag

SEQ ID NO: 404767 - RNA, 32 nt, Homo Sapiens
agauccgcaccucagauccagaccuccugagc

SEQ ID NO: 404768 - RNA, 32 nt, Homo Sapiens
cuuggcccucugaccuggugcucucucuccac

SEQ ID NO: 404769 - RNA, 32 nt, Homo Sapiens
cugacugccuaccugaggcaagcaccacacuu

SEQ ID NO: 404770 - RNA, 32 nt, Homo Sapiens
cuucuuaccacccaccagccccgcuggggugc

SEQ ID NO: 404771 - RNA, 32 nt, Homo Sapiens
uuggccaggcugaguucucaucuggagucucu

SEQ ID NO: 404772 - RNA, 32 nt, Homo Sapiens
uucuucucuggacuccucccucgcccuugaag

SEQ ID NO: 404773 - RNA, 28 nt, Homo Sapiens
gccacugcacuccagccugggcgacaga

SEQ ID NO: 404774 - RNA, 32 nt, Homo Sapiens
cgugugguggguggagccaggcgccggcgucu

SEQ ID NO: 404775 - RNA, 32 nt, Homo Sapiens
ucagcaucaguuccucacaacuggucuucuac

SEQ ID NO: 404776 - RNA, 32 nt, Homo Sapiens
uggcuaggggagaagagcaguuuaacgcucca

SEQ ID NO: 404777 - RNA, 32 nt, Homo Sapiens
ucacaggcauuccucccacagcccuuucauuu

SEQ ID NO: 404778 - RNA, 32 nt, Homo Sapiens
uuugcacagcuuacaugauacuguaugaaugu

SEQ ID NO: 404779 - RNA, 32 nt, Homo Sapiens
gguaggucagaucccccuccccccagguuccu

SEQ ID NO: 404780 - RNA, 32 nt, Homo Sapiens
ccacagcaaacacauucuccaccaugucaguc

SEQ ID NO: 404781 - RNA, 32 nt, Homo Sapiens
gccagaagcccccucaucggcccgcagcuggc

SEQ ID NO: 404782 - RNA, 32 nt, Homo Sapiens
cacuacugcauuccagccugggugacagagug

SEQ ID NO: 404783 - RNA, 32 nt, Homo Sapiens
aucaagguauagacuuuuuugguuaugauaca

SEQ ID NO: 404784 - RNA, 32 nt, Homo Sapiens
uucuggucacucgagcacaucuaagaucaccc

SEQ ID NO: 404785 - RNA, 32 nt, Homo Sapiens
agcucggcuucccccggcaccccucccccucg

SEQ ID NO: 404786 - RNA, 30 nt, Homo Sapiens
aaaagaggcaggcaguggagucucccuguc

SEQ ID NO: 404787 - RNA, 32 nt, Homo Sapiens
uuuccagggugggggagggaaugaauacauag

SEQ ID NO: 404788 - RNA, 32 nt, Homo Sapiens
uggaguguucuggcaacuacacagcaagcaaa

SEQ ID NO: 404789 - RNA, 32 nt, Homo Sapiens
gcgguugauggcgagggggcgcggcgcgggcu

SEQ ID NO: 404790 - RNA, 32 nt, Homo Sapiens
aagagguuugcaagacagagcgcgcagcccgg

SEQ ID NO: 404791 - RNA, 32 nt, Homo Sapiens
aacucccagaaagaaaggcuggugccuggucu

SEQ ID NO: 404792 - RNA, 32 nt, Homo Sapiens
guuugaaucugguccgagcgcgggaaacggcg

SEQ ID NO: 404793 - RNA, 32 nt, Homo Sapiens
ccccuccccuccccccggcacaccucugucua

SEQ ID NO: 404794 - RNA, 32 nt, Homo Sapiens
gcucccccgcggcccccacgcugcagugcggc

SEQ ID NO: 404795 - RNA, 32 nt, Homo Sapiens
ugcgggcuccuuccccgcagaggccggggccu

SEQ ID NO: 404796 - RNA, 32 nt, Homo Sapiens
gacggacgcgcagaccuucggaaggcacugcg

SEQ ID NO: 404797 - RNA, 32 nt, Homo Sapiens
gcuuggggcccccgucugcugcuggacaguaa

SEQ ID NO: 404798 - RNA, 32 nt, Homo Sapiens
aaagcagccuucuguacaacagaugggagggu

SEQ ID NO: 404799 - RNA, 32 nt, Homo Sapiens
ccuauugaagccaguucaguaaucacacacau

SEQ ID NO: 404800 - RNA, 32 nt, Homo Sapiens
aauugccaggccccuucugugcucaaaugagg

SEQ ID NO: 404801 - RNA, 32 nt, Homo Sapiens
aagcauaaauaugcagaagagauggaaccaaa

SEQ ID NO: 404802 - RNA, 32 nt, Homo Sapiens
uucuuagacugcaucaauccuugugauccuua

SEQ ID NO: 404803 - RNA, 32 nt, Homo Sapiens
guuucguccucgccucucuccuccacucgcuc

SEQ ID NO: 404804 - RNA, 32 nt, Homo Sapiens
aggucccgccgcgccaguucgccuccgcaaag

SEQ ID NO: 404805 - RNA, 32 nt, Homo Sapiens
ugguaacuaggauauguauauuuuaauagaau

SEQ ID NO: 404806 - RNA, 32 nt, Homo Sapiens
ggccgaggguccccgggcacccaggucgguca

SEQ ID NO: 404807 - RNA, 32 nt, Homo Sapiens
ccuugccuucauauaacaaacaugcuucguca

SEQ ID NO: 404808 - RNA, 32 nt, Homo Sapiens
gcuuuuuccaccucggaaaugcagcuuucccu

SEQ ID NO: 404809 - RNA, 32 nt, Homo Sapiens
gcagaugacaagaugguacaaccuuuauucuu

SEQ ID NO: 404810 - RNA, 32 nt, Homo Sapiens
acauugugacugcuuucaacauauacuucaug

SEQ ID NO: 404811 - RNA, 32 nt, Homo Sapiens
uuucuaacaacaaacaauggagaaaaagaauu

SEQ ID NO: 404812 - RNA, 32 nt, Homo Sapiens
gucuaaucaaggagaaguuucuguuugacguu

SEQ ID NO: 404813 - RNA, 32 nt, Homo Sapiens
gguuucaccauguuggccaggcuggucucaca

SEQ ID NO: 404814 - RNA, 32 nt, Homo Sapiens
ccuucaaaucaaaauuuggacacacacuauua

SEQ ID NO: 404815 - RNA, 32 nt, Homo Sapiens
aaaaggcgcgauccagagagccaggcaagcgg

SEQ ID NO: 404816 - RNA, 32 nt, Homo Sapiens
ggcaccugccgcggggggcccaggcgcuaaag

SEQ ID NO: 404817 - RNA, 32 nt, Homo Sapiens
uggaggucaggaguuugagaccagccuggcca

SEQ ID NO: 404818 - RNA, 32 nt, Homo Sapiens
cuggagaugagcucaggccagcacggaaccac

SEQ ID NO: 404819 - RNA, 30 nt, Homo Sapiens
aaagacuucauguaccuuuucauaaaggau

SEQ ID NO: 404820 - RNA, 32 nt, Homo Sapiens
cugcgggcagaugugccuccucugguggagag

SEQ ID NO: 404821 - RNA, 32 nt, Homo Sapiens
uuguaagcagaaaaauacuuucaaacaagaau

SEQ ID NO: 404822 - RNA, 32 nt, Homo Sapiens
accagggcccuaccauuaggcauacuuucaga

SEQ ID NO: 404823 - RNA, 32 nt, Homo Sapiens
ugagcccuacugugucucaggugugcccugaa

SEQ ID NO: 404824 - RNA, 32 nt, Homo Sapiens
ugccaggugaauggacauagcgugagaggcgg

SEQ ID NO: 404825 - RNA, 32 nt, Homo Sapiens
agauaaaacaugaaaaguuugccguuaguucc

SEQ ID NO: 404826 - RNA, 32 nt, Homo Sapiens
ggaccugcccuucucucggcucuugccccucg

SEQ ID NO: 404827 - RNA, 32 nt, Homo Sapiens
ggggucugauuugcugagacaccagcuucacc

SEQ ID NO: 404828 - RNA, 32 nt, Homo Sapiens
acaauagcaaggaaauccccauugagccugcc

SEQ ID NO: 404829 - RNA, 32 nt, Homo Sapiens
ugggggucgagcggggcggggaauggggcgca

SEQ ID NO: 404830 - RNA, 32 nt, Homo Sapiens
gacgggcuccgcgcgcuccggcagcgcauucg

SEQ ID NO: 404831 - RNA, 32 nt, Homo Sapiens
guuuguguucugggcaccaccgugacccugcc

SEQ ID NO: 404832 - RNA, 32 nt, Homo Sapiens
ugcuuguuaucuuccaucuaauaaaaaucugc

SEQ ID NO: 404833 - RNA, 32 nt, Homo Sapiens
uugggaaauucaucuggucauuacaucuuuau

SEQ ID NO: 404834 - RNA, 32 nt, Homo Sapiens
uuaaaacuucaaauaucucaccacagugaauu

SEQ ID NO: 404835 - RNA, 32 nt, Homo Sapiens
guaugguuuauuauuuaaauggguaaagccau

SEQ ID NO: 404836 - RNA, 32 nt, Homo Sapiens
cguggccagcgcggccggcgcuggugcuggug

SEQ ID NO: 404837 - RNA, 32 nt, Homo Sapiens
cccagccuuuaccagcagcguacggcagacga

SEQ ID NO: 404838 - RNA, 32 nt, Homo Sapiens
gaccgagcggggaggcugucuugaggcggcac

SEQ ID NO: 404839 - RNA, 32 nt, Homo Sapiens
guaaaaugaacaugugcaguguuaaaggcagg

SEQ ID NO: 404840 - RNA, 30 nt, Homo Sapiens
uuuaauaugcuaauguggaaaauuaauuac

SEQ ID NO: 404841 - RNA, 32 nt, Homo Sapiens
cagguggcucugcugugaaugugccugccugu

SEQ ID NO: 404842 - RNA, 32 nt, Homo Sapiens
aacaauagaaauuuauuuucucaaaauucugg

SEQ ID NO: 404843 - RNA, 32 nt, Homo Sapiens
uuuacgguucuuccuugcccuugcuaauuaca

SEQ ID NO: 404844 - RNA, 32 nt, Homo Sapiens
uaaauuucauagauuauauuugaauuguuaca

SEQ ID NO: 404845 - RNA, 32 nt, Homo Sapiens
ugguauggcugaacaaggagcggcagacaacu

SEQ ID NO: 404846 - RNA, 32 nt, Homo Sapiens
uuuacaacauaaaacuaucugauuuuugugaa

SEQ ID NO: 404847 - RNA, 32 nt, Homo Sapiens
aaggugcucaaggaggacuugguuucaagggc

SEQ ID NO: 404848 - RNA, 32 nt, Homo Sapiens
uacucagcauuaccauugguugaggccaaauu

SEQ ID NO: 404849 - RNA, 32 nt, Homo Sapiens
agcugaaaguaaaagcuagaaaaacauuugau

SEQ ID NO: 404850 - RNA, 32 nt, Homo Sapiens
cauuguugaaagauguuuacauuaugagaaaa

SEQ ID NO: 404851 - RNA, 32 nt, Homo Sapiens
cuuguucuguguuugugguuuuguaaaggcaa

SEQ ID NO: 404852 - RNA, 32 nt, Homo Sapiens
cgggcgcccggcacccucgagggccggcuagg

SEQ ID NO: 404853 - RNA, 32 nt, Homo Sapiens
ugcuccuccagccacaccccuccugcuccccc

SEQ ID NO: 404854 - RNA, 32 nt, Homo Sapiens
cuggccagaaaaguacccugagggcacuccgg

SEQ ID NO: 404855 - RNA, 32 nt, Homo Sapiens
gaugcagcaagcuuugcaaggcugacgagagc

SEQ ID NO: 404856 - RNA, 32 nt, Homo Sapiens
caagucauuguccucugagcugcaguuuccuc

SEQ ID NO: 404857 - RNA, 32 nt, Homo Sapiens
cagcuuuguuuggggagggaagucccuaccau

SEQ ID NO: 404858 - RNA, 32 nt, Homo Sapiens
cuuucuuuguuucaugacuuuaacucauggca

SEQ ID NO: 404859 - RNA, 32 nt, Homo Sapiens
ucccacaggugacagaauguucugccuucccu

SEQ ID NO: 404860 - RNA, 32 nt, Homo Sapiens
ugcucggcccccagcccacccagccaaaaaua

SEQ ID NO: 404861 - RNA, 32 nt, Homo Sapiens
ggcuacccucgccccgcccgcgguccuccguc

SEQ ID NO: 404862 - RNA, 32 nt, Homo Sapiens
cuuaucuuuugguugucucugcuuaauggagg

SEQ ID NO: 404863 - RNA, 32 nt, Homo Sapiens
uuauuuuguaaguuagaacuuucaagggaaac

SEQ ID NO: 404864 - RNA, 32 nt, Homo Sapiens
aaauuauauaaaauucaaauuuuggugucugu

SEQ ID NO: 404865 - RNA, 32 nt, Homo Sapiens
uaaggaaaaacugcugaaguugugaggcugcu

SEQ ID NO: 404866 - RNA, 32 nt, Homo Sapiens
ucugcaaagacuagauccuuuuuuacgcuuug

SEQ ID NO: 404867 - RNA, 32 nt, Homo Sapiens
ccuuuuggugccuugugaggacuuuuagaagg

SEQ ID NO: 404868 - RNA, 32 nt, Homo Sapiens
cacaccugagccccaaacaucaccuuucauuc

SEQ ID NO: 404869 - RNA, 32 nt, Homo Sapiens
ccauuuauucugcuacacuuugaaagauauau

SEQ ID NO: 404870 - RNA, 32 nt, Homo Sapiens
uggugguuccacagggcagaccccgcugcacu

SEQ ID NO: 404871 - RNA, 32 nt, Homo Sapiens
cccagcaacccgccuuggcccgcaggcugugc

SEQ ID NO: 404872 - RNA, 32 nt, Homo Sapiens
uccagguggcagcugggggcuccugacuguag

SEQ ID NO: 404873 - RNA, 32 nt, Homo Sapiens
ccgugugugguggcgucacuguaaccaaagua

SEQ ID NO: 404874 - RNA, 32 nt, Homo Sapiens
uuuuucccugccuucuggacccucagccccug

SEQ ID NO: 404875 - RNA, 32 nt, Homo Sapiens
cagaggggugaggcccuggggaggcagggguu

SEQ ID NO: 404876 - RNA, 32 nt, Homo Sapiens
gugaugagacaguuauacuuucaacugccauu

SEQ ID NO: 404877 - RNA, 32 nt, Homo Sapiens
uggggagguggcugcgcgguggggagguggcu

SEQ ID NO: 404878 - RNA, 32 nt, Homo Sapiens
gauugccuuuauuuugcuuccacauuuuccca

SEQ ID NO: 404879 - RNA, 32 nt, Homo Sapiens
gaauggcaccucuggaagguaugcagcaggca

SEQ ID NO: 404880 - RNA, 32 nt, Homo Sapiens
uuccuagccccgagacuuucaaguccauaugc

SEQ ID NO: 404881 - RNA, 32 nt, Homo Sapiens
aagucuuuagguauauuuuguaccaaauuaaa

SEQ ID NO: 404882 - RNA, 32 nt, Homo Sapiens
guauagcaugaaaccagagguucucagaauga

SEQ ID NO: 404883 - RNA, 32 nt, Homo Sapiens
ucaaggcaccgcggccgccgggccucgccguc

SEQ ID NO: 404884 - RNA, 32 nt, Homo Sapiens
uuuccuagauagaauuuuuuacuguuuuuuac

SEQ ID NO: 404885 - RNA, 32 nt, Homo Sapiens
agggccccacccagugugggccugggcucucu

SEQ ID NO: 404886 - RNA, 32 nt, Homo Sapiens
ggcucugguccacagcacggugccggggcugc

SEQ ID NO: 404887 - RNA, 32 nt, Homo Sapiens
aggugauguccucagaccuggacccccaccag

SEQ ID NO: 404888 - RNA, 32 nt, Homo Sapiens
augaugaugaugacgaugcagcuuagaugauu

SEQ ID NO: 404889 - RNA, 32 nt, Homo Sapiens
cacaucucuccauggugggcuccagucagucu

SEQ ID NO: 404890 - RNA, 32 nt, Homo Sapiens
ggggcgcagcgcggccggcguaggucuauguc

SEQ ID NO: 404891 - RNA, 32 nt, Homo Sapiens
gccgcgaagggcggagcgccgggcuggggaug

SEQ ID NO: 404892 - RNA, 32 nt, Homo Sapiens
agucuguuuucucaucugcaaaacagagguaa

SEQ ID NO: 404893 - RNA, 32 nt, Homo Sapiens
cuuacaaggugcugaccauauuaaauguucaa

SEQ ID NO: 404894 - RNA, 29 nt, Homo Sapiens
aaguguaguaucugggccacagagcacag

SEQ ID NO: 404895 - RNA, 32 nt, Homo Sapiens
gcguccaggcgggacagggcccggggagcggc

SEQ ID NO: 404896 - RNA, 32 nt, Homo Sapiens
acaguuugaaacucugaugcuauauauacaug

SEQ ID NO: 404897 - RNA, 32 nt, Homo Sapiens
augcugaccugccagugccgagucaggacuug

SEQ ID NO: 404898 - RNA, 32 nt, Homo Sapiens
guucuucugaaucaauuugaaaucaccuuuuu

SEQ ID NO: 404899 - RNA, 32 nt, Homo Sapiens
aggucagagggagagaggcuggagaccugggc

SEQ ID NO: 404900 - RNA, 32 nt, Homo Sapiens
acagcauuuagugcuuccugccuggugugaca

SEQ ID NO: 404901 - RNA, 32 nt, Homo Sapiens
agcauauagaaagugcucaauaaacgauaacu

SEQ ID NO: 404902 - RNA, 32 nt, Homo Sapiens
cagacucccuccccuccagcccacaaggacuc

SEQ ID NO: 404903 - RNA, 32 nt, Homo Sapiens
gcccaucccgcaccagcauuuuggaaccugca

SEQ ID NO: 404904 - RNA, 32 nt, Homo Sapiens
gcacuaggggcagccacucagcccuucgagcu

SEQ ID NO: 404905 - RNA, 32 nt, Homo Sapiens
ggggcagccgcagggaggcagggauggcaagg

SEQ ID NO: 404906 - RNA, 32 nt, Homo Sapiens
acauuucacuugcaguuuccuguucuccucau

SEQ ID NO: 404907 - RNA, 32 nt, Homo Sapiens
uugccgggccgcggcguggagccgggcaggag

SEQ ID NO: 404908 - RNA, 31 nt, Homo Sapiens
ggcacgagggcggcauugaggcggacgcguc

SEQ ID NO: 404909 - RNA, 32 nt, Homo Sapiens
accaaguggcuuugggguuucgcccuauccca

SEQ ID NO: 404910 - RNA, 32 nt, Homo Sapiens
cucucguccccugagagcgggcgaaggccagg

SEQ ID NO: 404911 - RNA, 32 nt, Homo Sapiens
aucaauuucagacuucauccugcaucucccau

SEQ ID NO: 404912 - RNA, 32 nt, Homo Sapiens
caagaaaaucaucauaaaucagacaugaaaau

SEQ ID NO: 404913 - RNA, 32 nt, Homo Sapiens
ucaauauguuuuaaucaguauuacuguuauca

SEQ ID NO: 404914 - RNA, 32 nt, Homo Sapiens
auuucauauuguugucuguguuguaauucaua

SEQ ID NO: 404915 - RNA, 32 nt, Homo Sapiens
ggguucauuuuaaugaucaauuuaccugcaua

SEQ ID NO: 404916 - RNA, 32 nt, Homo Sapiens
ccucuucccucaugaccuaaucacugcccaaa

SEQ ID NO: 404917 - RNA, 32 nt, Homo Sapiens
gggcgcugugcgcgccgcgauccgguacgugg

SEQ ID NO: 404918 - RNA, 32 nt, Homo Sapiens
uuuuuuaauguuucaugaccacccauugauug

SEQ ID NO: 404919 - RNA, 32 nt, Homo Sapiens
ggggucuaaggacaagcaguccuuacuuuggg

SEQ ID NO: 404920 - RNA, 32 nt, Homo Sapiens
aggaacagaucuugugggaaccagagaggaca

SEQ ID NO: 404921 - RNA, 32 nt, Homo Sapiens
uucaaugguaaguuuauguaaauaucagagaa

SEQ ID NO: 404922 - RNA, 30 nt, Homo Sapiens
uuccaugucuguguuguggacauuccgcgg

SEQ ID NO: 404923 - RNA, 32 nt, Homo Sapiens
uuuuauaaauacgauaaaaauauagcaccaag

SEQ ID NO: 404924 - RNA, 32 nt, Homo Sapiens
gugggagagcagagguggacgcggccgagagc

SEQ ID NO: 404925 - RNA, 32 nt, Homo Sapiens
cggcucugaucucuccuuucccagagcaguug

SEQ ID NO: 404926 - RNA, 32 nt, Homo Sapiens
auucagugaggaugaugagaucaucaacccag

SEQ ID NO: 404927 - RNA, 32 nt, Homo Sapiens
uggagagcuuugccuccaucacuggugcccac

SEQ ID NO: 404928 - RNA, 32 nt, Homo Sapiens
cggccgcucagguucugcuuuuaccugcggcc

SEQ ID NO: 404929 - RNA, 32 nt, Homo Sapiens
aauuaaauauuuuaaugguucuaaucuuuugc

SEQ ID NO: 404930 - RNA, 28 nt, Homo Sapiens
caugcaugaaggaucauuauaaacaaac

SEQ ID NO: 404931 - RNA, 32 nt, Homo Sapiens
cgaggaucuucagaacucuguaacccagcugc

SEQ ID NO: 404932 - RNA, 32 nt, Homo Sapiens
augagugcggcuagugccagccacuguguugu

SEQ ID NO: 404933 - RNA, 32 nt, Homo Sapiens
cucuggaaacugaguuacaaccaccaauacug

SEQ ID NO: 404934 - RNA, 32 nt, Homo Sapiens
uacugaagacuuaugaaaaggucaauuuuuac

SEQ ID NO: 404935 - RNA, 32 nt, Homo Sapiens
guucuacaguugggauuuuggccaucaucaac

SEQ ID NO: 404936 - RNA, 32 nt, Homo Sapiens
uggaaccucaaugggggcugcuuugcuuuggg

SEQ ID NO: 404937 - RNA, 32 nt, Homo Sapiens
ccacgguagcgcagccgcucugaguagaacuu

SEQ ID NO: 404938 - RNA, 30 nt, Homo Sapiens
augggguuucaccacguuagccaggauggu

SEQ ID NO: 404939 - RNA, 32 nt, Homo Sapiens
cgccccgccgcgccgcgcuccaaccgccuccu

SEQ ID NO: 404940 - RNA, 32 nt, Homo Sapiens
cuggccuuuggagaugccucccugcccaucug

SEQ ID NO: 404941 - RNA, 32 nt, Homo Sapiens
uagcccccaaccccaagccugauccccaccgg

SEQ ID NO: 404942 - RNA, 32 nt, Homo Sapiens
aaaggucaggccgaggccggcgcggagaaucu

SEQ ID NO: 404943 - RNA, 32 nt, Homo Sapiens
augcucuuuuucugugauaacucugcaaaggc

SEQ ID NO: 404944 - RNA, 32 nt, Homo Sapiens
uccucccuuccucccuuucuuaccacagaugg

SEQ ID NO: 404945 - RNA, 32 nt, Homo Sapiens
aguguaagaauaguugaagacuaguugaagac

SEQ ID NO: 404946 - RNA, 32 nt, Homo Sapiens
ugaauuuuaaacaaucgccguuuucaguccca

SEQ ID NO: 404947 - RNA, 32 nt, Homo Sapiens
aucagccuguccgauuccuccucccucuggcc

SEQ ID NO: 404948 - RNA, 32 nt, Homo Sapiens
gaaucauuacaaauauaaaguagauagaauaa

SEQ ID NO: 404949 - RNA, 32 nt, Homo Sapiens
gcugccgcgcaucguccgcagacgccgccacc

SEQ ID NO: 404950 - RNA, 32 nt, Homo Sapiens
ugucucaaaacaaacaaacaaacaaaagaccc

SEQ ID NO: 404951 - RNA, 32 nt, Homo Sapiens
ugggcuggggagaguagaagggaaagcugacc

SEQ ID NO: 404952 - RNA, 32 nt, Homo Sapiens
ggauguuccgccugguuagcugguucucuuca

SEQ ID NO: 404953 - RNA, 32 nt, Homo Sapiens
uuuaggcauaucuauguugaauuucaccuagg

SEQ ID NO: 404954 - RNA, 32 nt, Homo Sapiens
ccugggaugagagcgggucuucugccuucauu

SEQ ID NO: 404955 - RNA, 32 nt, Homo Sapiens
caacaaucucaacucuguacagcggcucagcc

SEQ ID NO: 404956 - RNA, 32 nt, Homo Sapiens
cauggcccuuccccggcccagcgcucggccau

SEQ ID NO: 404957 - RNA, 32 nt, Homo Sapiens
gcgcugccggacgaggcucccgccgccgauug

SEQ ID NO: 404958 - RNA, 32 nt, Homo Sapiens
aacugugagccaaaauacaauuggacaauuag

SEQ ID NO: 404959 - RNA, 32 nt, Homo Sapiens
guccgggcccucgggaagccuuggacagaacc

SEQ ID NO: 404960 - RNA, 32 nt, Homo Sapiens
uauuuauuaugaaaacaacaugcucuuaaugu

SEQ ID NO: 404961 - RNA, 32 nt, Homo Sapiens
guauagguccugugcuuaaaggaggcaaguau

SEQ ID NO: 404962 - RNA, 32 nt, Homo Sapiens
ugcccagcuggcauuuguuaaucuucauuuga

SEQ ID NO: 404963 - RNA, 32 nt, Homo Sapiens
cauuggcauuauuuucaauaaauaucaagcac

SEQ ID NO: 404964 - RNA, 32 nt, Homo Sapiens
cagagccugugucccagggggacccacacgaa

SEQ ID NO: 404965 - RNA, 32 nt, Homo Sapiens
uccuucauccuugcccucuguuggcacaggca

SEQ ID NO: 404966 - RNA, 32 nt, Homo Sapiens
gacucagaagccgaaauuccuagaaaucaggu

SEQ ID NO: 404967 - RNA, 32 nt, Homo Sapiens
acaggggcccccugggguggcaugcggacccu

SEQ ID NO: 404968 - RNA, 32 nt, Homo Sapiens
aacaagccuuacugccuggagggcuuagauuc

SEQ ID NO: 404969 - RNA, 32 nt, Homo Sapiens
gggacaacagagcuccuucauuuuuggacaac

SEQ ID NO: 404970 - RNA, 32 nt, Homo Sapiens
aaaaaguaacaagaaagaacucguuugaaacc

SEQ ID NO: 404971 - RNA, 32 nt, Homo Sapiens
ugacucauauauauacauguguauaagaugag

SEQ ID NO: 404972 - RNA, 32 nt, Homo Sapiens
aaccaaaguugugccaguggcuuucaacuaga

SEQ ID NO: 404973 - RNA, 32 nt, Homo Sapiens
ucaagaaaacauccagguugacagucuaaaau

SEQ ID NO: 404974 - RNA, 32 nt, Homo Sapiens
ggcaggguggguggagggacugaugcgagguc

SEQ ID NO: 404975 - RNA, 32 nt, Homo Sapiens
uuccugugaugcaugaauaacucauugauuua

SEQ ID NO: 404976 - RNA, 32 nt, Homo Sapiens
caaauuuccuuccuauuacagagcucaccuca

SEQ ID NO: 404977 - RNA, 30 nt, Homo Sapiens
cccagggcgcccgcuccucggcgcagcaug

SEQ ID NO: 404978 - RNA, 32 nt, Homo Sapiens
cugcucaaaguaccauuaugguuuccauaugg

SEQ ID NO: 404979 - RNA, 32 nt, Homo Sapiens
gacugcugccagcagggauucucugggcaugg

SEQ ID NO: 404980 - RNA, 32 nt, Homo Sapiens
agaacgaugucaauucaugcuuuuaauuuagc

SEQ ID NO: 404981 - RNA, 32 nt, Homo Sapiens
ggcuggggaggguuuuccccacgacagcccca

SEQ ID NO: 404982 - RNA, 32 nt, Homo Sapiens
agcaagcuuuaucaaaauggcuuauuugcaga

SEQ ID NO: 404983 - RNA, 31 nt, Homo Sapiens
aauccagcaagcacagcaugaguuaaacuca

SEQ ID NO: 404984 - RNA, 32 nt, Homo Sapiens
aaaacucaaaacaugaacaacaauauauauua

SEQ ID NO: 404985 - RNA, 32 nt, Homo Sapiens
gagcgcggcggccgcgaucgggcuuagucgga

SEQ ID NO: 404986 - RNA, 32 nt, Homo Sapiens
uuuggccuccaaaacugcuaucucuaauacgg

SEQ ID NO: 404987 - RNA, 32 nt, Homo Sapiens
ggauacugucccagcccacuacuggcccuuuc

SEQ ID NO: 404988 - RNA, 32 nt, Homo Sapiens
cuccuccccucccccacacucacagucuguuc

SEQ ID NO: 404989 - RNA, 32 nt, Homo Sapiens
gaaaauuucuauuuucaugcaaauauuuuuca

SEQ ID NO: 404990 - RNA, 32 nt, Homo Sapiens
cauguauauaaaagaaugaaauugaaaaauaa

SEQ ID NO: 404991 - RNA, 32 nt, Homo Sapiens
auuguuuuguucaaauaaaauuuuaugaguaa

SEQ ID NO: 404992 - RNA, 32 nt, Homo Sapiens
cccugcucuacgccgcgcuguucgccuuugcc

SEQ ID NO: 404993 - RNA, 32 nt, Homo Sapiens
gcuaaaacugcuuugaguuguuuggaugauua

SEQ ID NO: 404994 - RNA, 32 nt, Homo Sapiens
agaucugugaaccugaggacaagaagaccuug

SEQ ID NO: 404995 - RNA, 32 nt, Homo Sapiens
agcagaaggcgagggauucccagccggacggg

SEQ ID NO: 404996 - RNA, 32 nt, Homo Sapiens
uggucgugguggugcgggccuguggucccagc

SEQ ID NO: 404997 - RNA, 32 nt, Homo Sapiens
acaggauacaagauaaauucugucccacaaag

SEQ ID NO: 404998 - RNA, 32 nt, Homo Sapiens
aaugcuuuagcugcaacuaaauaaaaaaguua

SEQ ID NO: 404999 - RNA, 30 nt, Homo Sapiens
uuagcuccagguggcaggcagagcaggaug

SEQ ID NO: 405000 - RNA, 32 nt, Homo Sapiens
gacucguguuugaaggaucuuauuuaaaauug

SEQ ID NO: 405001 - RNA, 32 nt, Homo Sapiens
caagcaguaguagugagucugauugaaaacuu

SEQ ID NO: 405002 - RNA, 32 nt, Homo Sapiens
ccugucccuggcccuaccuccuucccuguccc

SEQ ID NO: 405003 - RNA, 32 nt, Homo Sapiens
ggacacaugucuaugcccacaaacacugcaga

SEQ ID NO: 405004 - RNA, 32 nt, Homo Sapiens
gcuggagagggagaggcugcuggaagaggugg

SEQ ID NO: 405005 - RNA, 32 nt, Homo Sapiens
accuuuuucgcuugggguggucucucucacuc

SEQ ID NO: 405006 - RNA, 32 nt, Homo Sapiens
cugcgaucuucagagcagggguccuuggugug

SEQ ID NO: 405007 - RNA, 32 nt, Homo Sapiens
uauacaucugaguuuaaauguucuguuuaaug

SEQ ID NO: 405008 - RNA, 32 nt, Homo Sapiens
cagucgcuucggcuguucauuccacuaauauu

SEQ ID NO: 405009 - RNA, 32 nt, Homo Sapiens
cagguaccucauagccagcucuacacagaggu

SEQ ID NO: 405010 - RNA, 32 nt, Homo Sapiens
ggcuauagggagcaucuguggcagcuuaggga

SEQ ID NO: 405011 - RNA, 32 nt, Homo Sapiens
agagaguguuuguaguucaugguuuuucccua

SEQ ID NO: 405012 - RNA, 32 nt, Homo Sapiens
gagaccccaccgcucccuccccuggcccccgg

SEQ ID NO: 405013 - RNA, 32 nt, Homo Sapiens
ccacugcccuccaaaucuacucuucuuuuaag

SEQ ID NO: 405014 - RNA, 32 nt, Homo Sapiens
gagggaagccggggccggggcugcggggcgag

SEQ ID NO: 405015 - RNA, 32 nt, Homo Sapiens
caacugaauucacuuuuucggauaguaauuug

SEQ ID NO: 405016 - RNA, 32 nt, Homo Sapiens
cacgggccauaugaauaacauggugugcuucu

SEQ ID NO: 405017 - RNA, 32 nt, Homo Sapiens
ugucaguuucugccuccauuagacccucaacc

SEQ ID NO: 405018 - RNA, 32 nt, Homo Sapiens
aguauaugacauguauuuuguauuuaaaacua

SEQ ID NO: 405019 - RNA, 32 nt, Homo Sapiens
gcggggugucguucggccggcgugacgcagcc

SEQ ID NO: 405020 - RNA, 32 nt, Homo Sapiens
cggggcugggcgggcugacucccugcuuccuc

SEQ ID NO: 405021 - RNA, 32 nt, Homo Sapiens
guuuugccagcuuugcuucugguuacuagggu

SEQ ID NO: 405022 - RNA, 32 nt, Homo Sapiens
gccacaggcaggcaucguagcuccacagcccg

SEQ ID NO: 405023 - RNA, 32 nt, Homo Sapiens
agcaguccuuggccugcuaaggucuuggaacu

SEQ ID NO: 405024 - RNA, 32 nt, Homo Sapiens
uugagaugaaagaucucugcuuauugaagaug

SEQ ID NO: 405025 - RNA, 32 nt, Homo Sapiens
agcucccuccuuugcucuuccauccugucagu

SEQ ID NO: 405026 - RNA, 32 nt, Homo Sapiens
uguacccugcuucccccaacccugccuuuuuc

SEQ ID NO: 405027 - RNA, 32 nt, Homo Sapiens
cuccugacugucaggauaaacuccgugggggu

SEQ ID NO: 405028 - RNA, 32 nt, Homo Sapiens
uagagcucagcaccacccuaccacaggccuug

SEQ ID NO: 405029 - RNA, 32 nt, Homo Sapiens
agcacgccucccagcccuggccugcagugugg

SEQ ID NO: 405030 - RNA, 32 nt, Homo Sapiens
cuugucugccagcaucagagugcccugguccu

SEQ ID NO: 405031 - RNA, 32 nt, Homo Sapiens
cuugggagggugggggugggggagggucuuau

SEQ ID NO: 405032 - RNA, 32 nt, Homo Sapiens
uuacuguugcuguuauuauuaauuauaauugu

SEQ ID NO: 405033 - RNA, 32 nt, Homo Sapiens
uuggcccagaaagcugcggauuggggugauaa

SEQ ID NO: 405034 - RNA, 32 nt, Homo Sapiens
uccuacuuucccuuuugacauauguaguugga

SEQ ID NO: 405035 - RNA, 32 nt, Homo Sapiens
ucccuguggcgggaagggaagaacuuuugcac

SEQ ID NO: 405036 - RNA, 32 nt, Homo Sapiens
uuccugaucuaauuauguuuuuagacacuuag

SEQ ID NO: 405037 - RNA, 32 nt, Homo Sapiens
uggggggugggaggagagagcggcagagaagc

SEQ ID NO: 405038 - RNA, 32 nt, Homo Sapiens
uauuccuguaauuauugugcccuuuaaguguu

SEQ ID NO: 405039 - RNA, 32 nt, Homo Sapiens
ucgacuaagugaaauugaacuccaucaggcaa

SEQ ID NO: 405040 - RNA, 32 nt, Homo Sapiens
cuuuauuaaguacuuacuacaugcuaagagcu

SEQ ID NO: 405041 - RNA, 28 nt, Homo Sapiens
acuggacucuuugccaggauggcuuuuc

SEQ ID NO: 405042 - RNA, 32 nt, Homo Sapiens
guaaugacgauaaaguguuuuuaguaugcuuu

SEQ ID NO: 405043 - RNA, 32 nt, Homo Sapiens
ugcgagagcgccgguugacgugcggagugcgg

SEQ ID NO: 405044 - RNA, 32 nt, Homo Sapiens
ccccggcgccgacggccacaccgccggacgau

SEQ ID NO: 405045 - RNA, 32 nt, Homo Sapiens
gggggaaacaaggcuuugguauuccgcuggcu

SEQ ID NO: 405046 - RNA, 32 nt, Homo Sapiens
cguuuuaagaaacuagcagauuuguaugguuc

SEQ ID NO: 405047 - RNA, 32 nt, Homo Sapiens
auggauuuguauuuuucuuaauuuuaugcucu

SEQ ID NO: 405048 - RNA, 32 nt, Homo Sapiens
uuguacuuguauuucaugaaauuaaaacagug

SEQ ID NO: 405049 - RNA, 32 nt, Homo Sapiens
acacuuguucuggccugguguucagugcgacu

SEQ ID NO: 405050 - RNA, 32 nt, Homo Sapiens
gucaucauguuaggucuguguacccuaaauca

SEQ ID NO: 405051 - RNA, 32 nt, Homo Sapiens
ggagacuuggaaaaaauauuuaagcuaaugaa

SEQ ID NO: 405052 - RNA, 32 nt, Homo Sapiens
guaucuuugggacagacggcaagauggggauu

SEQ ID NO: 405053 - RNA, 32 nt, Homo Sapiens
cauaucugcuauuuuguauccuugaccuauau

SEQ ID NO: 405054 - RNA, 32 nt, Homo Sapiens
cagggccccuuggagaucuugcagcuggacuu

SEQ ID NO: 405055 - RNA, 32 nt, Homo Sapiens
aagaggaugccaaugucuucgcaagugccaug

SEQ ID NO: 405056 - RNA, 32 nt, Homo Sapiens
ccauagguggaggcgcaguucuuucgaauaaa

SEQ ID NO: 405057 - RNA, 32 nt, Homo Sapiens
guuaagacgacggaggcggggcaacaggcggg

SEQ ID NO: 405058 - RNA, 32 nt, Homo Sapiens
ugagggucuggcacauccuuaauccugugccc

SEQ ID NO: 405059 - RNA, 32 nt, Homo Sapiens
ugagaaauugaacuuugaaauauuuugaagca

SEQ ID NO: 405060 - RNA, 32 nt, Homo Sapiens
ggaggggagacggagcugagcaugcaaggaag

SEQ ID NO: 405061 - RNA, 32 nt, Homo Sapiens
gccgggcccugucgagaagacccgaccgcaga

SEQ ID NO: 405062 - RNA, 32 nt, Homo Sapiens
gauagcaaagauccaggaaauaugaugcgagg

SEQ ID NO: 405063 - RNA, 32 nt, Homo Sapiens
guccuggggaaggcgcugagugcggagucgcg

SEQ ID NO: 405064 - RNA, 32 nt, Homo Sapiens
aguaugcucagccuccuucuuugcuauguccc

SEQ ID NO: 405065 - RNA, 32 nt, Homo Sapiens
aggcugagaggcggcgggagagaugcccauga

SEQ ID NO: 405066 - RNA, 32 nt, Homo Sapiens
agaauaugguuaauauuaaauaauaggccuuu

SEQ ID NO: 405067 - RNA, 32 nt, Homo Sapiens
gcaggacagaaaccucuuucuaauccaguaac

SEQ ID NO: 405068 - RNA, 32 nt, Homo Sapiens
ugugggggccgagggccggggcugggagcggc

SEQ ID NO: 405069 - RNA, 32 nt, Homo Sapiens
uggugccuuggcaucucccaaugggguggcuu

SEQ ID NO: 405070 - RNA, 32 nt, Homo Sapiens
ugauauagaaagaguauaaaaaauaugugcag

SEQ ID NO: 405071 - RNA, 32 nt, Homo Sapiens
uuugacuacauauuguugaccucagugauccu

SEQ ID NO: 405072 - RNA, 32 nt, Homo Sapiens
ccccccucccgccgcucuacucagccaggcag

SEQ ID NO: 405073 - RNA, 32 nt, Homo Sapiens
cagagguaagggggaggcaacccuggaguguc

SEQ ID NO: 405074 - RNA, 32 nt, Homo Sapiens
caugggaauacccagcugguccagccagggau

SEQ ID NO: 405075 - RNA, 32 nt, Homo Sapiens
cucugcacuccagccuaggugacagagugaga

SEQ ID NO: 405076 - RNA, 32 nt, Homo Sapiens
uaaacacugcccuucucuucccugcccgcccg

SEQ ID NO: 405077 - RNA, 32 nt, Homo Sapiens
uaacacuucuaaaaaguuguaacucuugagac

SEQ ID NO: 405078 - RNA, 32 nt, Homo Sapiens
aagucaccaggacaguccacccgcccuguugg

SEQ ID NO: 405079 - RNA, 32 nt, Homo Sapiens
acgcuuccggugcaggaggccuugcucuugug

SEQ ID NO: 405080 - RNA, 32 nt, Homo Sapiens
aaagaccauuguauguuuuucuauuucugaau

SEQ ID NO: 405081 - RNA, 32 nt, Homo Sapiens
uuuggauuuccuuuuaggaaaaguagaaagca

SEQ ID NO: 405082 - RNA, 32 nt, Homo Sapiens
aaacagucaucaucugcugcuauacauaaacc

SEQ ID NO: 405083 - RNA, 32 nt, Homo Sapiens
gaacaugggaauuuauacugagaugcaaucuc

SEQ ID NO: 405084 - RNA, 32 nt, Homo Sapiens
cagauuuucucuucuuuuaggauuagcucagc

SEQ ID NO: 405085 - RNA, 32 nt, Homo Sapiens
gcgacaggcucccgaguggaaagggauguguc

SEQ ID NO: 405086 - RNA, 32 nt, Homo Sapiens
auuuauuacugcccagcauuccuuccaacggg

SEQ ID NO: 405087 - RNA, 32 nt, Homo Sapiens
uuugaauucccuccucaccucccacaaaucuc

SEQ ID NO: 405088 - RNA, 29 nt, Homo Sapiens
uaaagauugaggauucggaauauuuagaa

SEQ ID NO: 405089 - RNA, 32 nt, Homo Sapiens
auggggcccucccaggccccugccccaacuga

SEQ ID NO: 405090 - RNA, 32 nt, Homo Sapiens
guugauuugacugccaugagaaacacagggga

SEQ ID NO: 405091 - RNA, 32 nt, Homo Sapiens
cgggagggcggggagggcgcgcggcgaucgga

SEQ ID NO: 405092 - RNA, 32 nt, Homo Sapiens
uuauguagcucuuugucagggaguguucccua

SEQ ID NO: 405093 - RNA, 32 nt, Homo Sapiens
ggggcugcccaggcuuccugaguggcccaccu

SEQ ID NO: 405094 - RNA, 32 nt, Homo Sapiens
guagggcggugccauccccacccauagggcug

SEQ ID NO: 405095 - RNA, 32 nt, Homo Sapiens
augaaaaggcauucauugcccuuaaugcaggc

SEQ ID NO: 405096 - RNA, 32 nt, Homo Sapiens
gcccagaagccauugugucacuggucaggguc

SEQ ID NO: 405097 - RNA, 30 nt, Homo Sapiens
aguuucuuuaucccugucacuaauuuuacc

SEQ ID NO: 405098 - RNA, 30 nt, Homo Sapiens
acccaucucucccuuacccaucuugcuucc

SEQ ID NO: 405099 - RNA, 32 nt, Homo Sapiens
agggcaagaaaaacuuuuuuguuauugggcuu

SEQ ID NO: 405100 - RNA, 32 nt, Homo Sapiens
uuuguuguuucuaacuaacaugucauguacac

SEQ ID NO: 405101 - RNA, 32 nt, Homo Sapiens
aggcagccaacugcuccugcgccgggcggggu

SEQ ID NO: 405102 - RNA, 31 nt, Homo Sapiens
cuuuaccucaaugguugagauauuuugaaug

SEQ ID NO: 405103 - RNA, 32 nt, Homo Sapiens
aaauugacuucuuuuucuuaguuguauggcca

SEQ ID NO: 405104 - RNA, 32 nt, Homo Sapiens
uuacuccuacuaauuucaguacuaagguggug

SEQ ID NO: 405105 - RNA, 32 nt, Homo Sapiens
gaagaaccuugacugcuugguccucagguauc

SEQ ID NO: 405106 - RNA, 32 nt, Homo Sapiens
ugugacagauauacaauuguaauuuuggcacu

SEQ ID NO: 405107 - RNA, 32 nt, Homo Sapiens
cugucuucuucaaccugggagagacccugaau

SEQ ID NO: 405108 - RNA, 32 nt, Homo Sapiens
uucuacauguaaaacauuucugaugauuuuuu

SEQ ID NO: 405109 - RNA, 32 nt, Homo Sapiens
cucccuggcugcucccggggccuuccaagcac

SEQ ID NO: 405110 - RNA, 32 nt, Homo Sapiens
cuuuggugaacuuuuauguccuuacaacaccu

SEQ ID NO: 405111 - RNA, 32 nt, Homo Sapiens
uuggggccaagaauaugggcuacuucauaugg

SEQ ID NO: 405112 - RNA, 32 nt, Homo Sapiens
acccgagagcuucacagcugccugcuguccuc

SEQ ID NO: 405113 - RNA, 32 nt, Homo Sapiens
cucagagcuugggaaaaguucuccuugguauc

SEQ ID NO: 405114 - RNA, 32 nt, Homo Sapiens
ggcaauuaauaaaucucauuggaccuucccuc

SEQ ID NO: 405115 - RNA, 32 nt, Homo Sapiens
uccuggaaaugacuuccagugugcagaugucu

SEQ ID NO: 405116 - RNA, 32 nt, Homo Sapiens
ggcacuuccuuccuuccugggcccgcaggagg

SEQ ID NO: 405117 - RNA, 32 nt, Homo Sapiens
cuagaaaacaccuuuaaguugccuuuccucuu

SEQ ID NO: 405118 - RNA, 28 nt, Homo Sapiens
uacugccugcaccucagaccucugccug

SEQ ID NO: 405119 - RNA, 32 nt, Homo Sapiens
ucuaaggagagccgggaacaccgcacgcuucc

SEQ ID NO: 405120 - RNA, 32 nt, Homo Sapiens
caagcauauccugugauuccuuuggagagaau

SEQ ID NO: 405121 - RNA, 32 nt, Homo Sapiens
agcucaagcgauccuccugccuuagccucuug

SEQ ID NO: 405122 - RNA, 29 nt, Homo Sapiens
aguuacauauguauacaugugccauguug

SEQ ID NO: 405123 - RNA, 32 nt, Homo Sapiens
auaguuuuuuaaaaauuauacauguagcucaa

SEQ ID NO: 405124 - RNA, 32 nt, Homo Sapiens
aacauguauguaaauuaaauuuuuagcuaauu

SEQ ID NO: 405125 - RNA, 32 nt, Homo Sapiens
ucacaaacagaaaaugaaugaaaauaaagaua

SEQ ID NO: 405126 - RNA, 32 nt, Homo Sapiens
uaagccagauauauuucuuagaggugcuugaa

SEQ ID NO: 405127 - RNA, 32 nt, Homo Sapiens
ccuucaucuugguuacagaaaagggaauagaa

SEQ ID NO: 405128 - RNA, 32 nt, Homo Sapiens
guguagccuguggcacuugguuauagcagccc

SEQ ID NO: 405129 - RNA, 32 nt, Homo Sapiens
acucuggacaaagacgcuuauuaucggugagu

SEQ ID NO: 405130 - RNA, 32 nt, Homo Sapiens
cgcgccccccgccgcugucaccguuuacauac

SEQ ID NO: 405131 - RNA, 32 nt, Homo Sapiens
auugagcgggcucgcggcgcuggguuccuggu

SEQ ID NO: 405132 - RNA, 32 nt, Homo Sapiens
cuguugugucugcgacugcucccggccggagg

SEQ ID NO: 405133 - RNA, 32 nt, Homo Sapiens
cucucugucuucuuggaguuuugaaaaacucc

SEQ ID NO: 405134 - RNA, 32 nt, Homo Sapiens
ucgaauuccugggcucaagugauucaccugcc

SEQ ID NO: 405135 - RNA, 32 nt, Homo Sapiens
aaaaacaaauacuucuacuguuugggugugug

SEQ ID NO: 405136 - RNA, 32 nt, Homo Sapiens
gucucuggggcaggcugcuucaaucccagccu

SEQ ID NO: 405137 - RNA, 32 nt, Homo Sapiens
cugcccccgcggcaaccgcucccacgccugcc

SEQ ID NO: 405138 - RNA, 32 nt, Homo Sapiens
cccgggcugcccuugaggggccugcugcguug

SEQ ID NO: 405139 - RNA, 32 nt, Homo Sapiens
uacgcccaggccuuucuccaccggaggaccag

SEQ ID NO: 405140 - RNA, 32 nt, Homo Sapiens
cuguggaggggagggggauuuccagcgacagg

SEQ ID NO: 405141 - RNA, 32 nt, Homo Sapiens
auuauggguugauucagaaauaaaauuuguga

SEQ ID NO: 405142 - RNA, 32 nt, Homo Sapiens
agcucgggaucccaguccggcgcgcuccgggc

SEQ ID NO: 405143 - RNA, 32 nt, Homo Sapiens
aaagaauugcuucaggacccgagcguuuuuau

SEQ ID NO: 405144 - RNA, 32 nt, Homo Sapiens
cucugaguguaaacuacaugguagguugugaa

SEQ ID NO: 405145 - RNA, 31 nt, Homo Sapiens
uuuccgugaguaccugcaggaguccagccaa

SEQ ID NO: 405146 - RNA, 32 nt, Homo Sapiens
guaagacauuaguaacauaauaaauuaaaagu

SEQ ID NO: 405147 - RNA, 32 nt, Homo Sapiens
cuaaguacacguuggugucugaagauucacac

SEQ ID NO: 405148 - RNA, 32 nt, Homo Sapiens
ccuaauccaaaaaucuuucauuagaaauugga

SEQ ID NO: 405149 - RNA, 32 nt, Homo Sapiens
caggagcagcggggcaguguggggcuuugugu

SEQ ID NO: 405150 - RNA, 32 nt, Homo Sapiens
uaaauguggcagauuuuucagacauuguucau

SEQ ID NO: 405151 - RNA, 32 nt, Homo Sapiens
agcaugaccccauuuuguuaguauguuuuucu

SEQ ID NO: 405152 - RNA, 32 nt, Homo Sapiens
acuucuaguugucaaggcaugcuuaaaaauaa

SEQ ID NO: 405153 - RNA, 32 nt, Homo Sapiens
ccaagcagccucucccuucacccagguuuaug

SEQ ID NO: 405154 - RNA, 32 nt, Homo Sapiens
ccgacauuccuccuggucaccuucaccccugc

SEQ ID NO: 405155 - RNA, 27 nt, Homo Sapiens
ucugcggcuccccucagcccccuugca

SEQ ID NO: 405156 - RNA, 32 nt, Homo Sapiens
uuccuauaaaguuugucuuccucaucaaaaaa

SEQ ID NO: 405157 - RNA, 32 nt, Homo Sapiens
agccaagggaugucagggcagcucugugcauc

SEQ ID NO: 405158 - RNA, 30 nt, Homo Sapiens
aucuugcugcuaaugugugauguugacgcc

SEQ ID NO: 405159 - RNA, 32 nt, Homo Sapiens
ggcuggcgcuggcugucauugugcuggcugug

SEQ ID NO: 405160 - RNA, 32 nt, Homo Sapiens
accuuaaagagauaaaaugcagacauuccuug

SEQ ID NO: 405161 - RNA, 32 nt, Homo Sapiens
guuccugaccucaugggaccagacuccucagg

SEQ ID NO: 405162 - RNA, 32 nt, Homo Sapiens
acccaaaugcccuugucaagauccuccaucac

SEQ ID NO: 405163 - RNA, 32 nt, Homo Sapiens
uccaccccaucccuccccaguucauugcacuu

SEQ ID NO: 405164 - RNA, 32 nt, Homo Sapiens
cuugauuaauaaaacauuuucugaaaucaaaa

SEQ ID NO: 405165 - RNA, 32 nt, Homo Sapiens
ccaaguagcugagacugcaggcacgagccacc

SEQ ID NO: 405166 - RNA, 32 nt, Homo Sapiens
agaaaacagacccaucucuggaggucucagga

SEQ ID NO: 405167 - RNA, 32 nt, Homo Sapiens
gcacuacaauucucugagacauugucuggaaa

SEQ ID NO: 405168 - RNA, 32 nt, Homo Sapiens
gggaucagaaaagugaagaaggaacuuaucaa

SEQ ID NO: 405169 - RNA, 32 nt, Homo Sapiens
acugccuauucgcucuuccuccagccucuggc

SEQ ID NO: 405170 - RNA, 32 nt, Homo Sapiens
ccgucucagaagcucaagugguugaauguuuu

SEQ ID NO: 405171 - RNA, 32 nt, Homo Sapiens
cuggcuggccugaccuaggcgcgcggggucgg

SEQ ID NO: 405172 - RNA, 32 nt, Homo Sapiens
auggggcggagcagggcagaagauggacuggg

SEQ ID NO: 405173 - RNA, 25 nt, Homo Sapiens
augagucggggacaggccagcgggg

SEQ ID NO: 405174 - RNA, 32 nt, Homo Sapiens
guuccccuccuugcggccccaucagcgaaaag

SEQ ID NO: 405175 - RNA, 32 nt, Homo Sapiens
auggcagcccucggcgcuccgggacguggcac

SEQ ID NO: 405176 - RNA, 32 nt, Homo Sapiens
gaggacagucuuucuccgggagcccgcucacu

SEQ ID NO: 405177 - RNA, 32 nt, Homo Sapiens
cuaagcuggcggugcugcuggugacgcuggug

SEQ ID NO: 405178 - RNA, 32 nt, Homo Sapiens
ccacgcaugccucgugugcucaucucacacac

SEQ ID NO: 405179 - RNA, 32 nt, Homo Sapiens
guggggccgggcgagguccgcugcggucccgg

SEQ ID NO: 405180 - RNA, 32 nt, Homo Sapiens
ggccccgccuaggccaucugggugcugggcau

SEQ ID NO: 405181 - RNA, 32 nt, Homo Sapiens
ccuuucugcauucuacauuuucuuuguacuuu

SEQ ID NO: 405182 - RNA, 32 nt, Homo Sapiens
uccucgaccucccuuccuggugacggacgaac

SEQ ID NO: 405183 - RNA, 32 nt, Homo Sapiens
uuuuaacgcugaaaaaguaagaaggacaaccc

SEQ ID NO: 405184 - RNA, 32 nt, Homo Sapiens
ucagauccaagcauauaaaaagccuguauauu

SEQ ID NO: 405185 - RNA, 32 nt, Homo Sapiens
uauauuuugugauuuguaacaaauacccuuua

SEQ ID NO: 405186 - RNA, 32 nt, Homo Sapiens
aucccggcugcugcgcggcgucggcgacggua

SEQ ID NO: 405187 - RNA, 31 nt, Homo Sapiens
uucgcggcggcucuccagccccgcgccucag

SEQ ID NO: 405188 - RNA, 32 nt, Homo Sapiens
uuauugugagcuguucuauacaugcuggggga

SEQ ID NO: 405189 - RNA, 32 nt, Homo Sapiens
gauggggcagugccgugugcugugacggggcu

SEQ ID NO: 405190 - RNA, 32 nt, Homo Sapiens
uauuuccuccaagucagauaagguuucuaaaa

SEQ ID NO: 405191 - RNA, 32 nt, Homo Sapiens
cagcggcagcggcagcagcauccuguccagcg

SEQ ID NO: 405192 - RNA, 32 nt, Homo Sapiens
gauaaacacgguucgccccgccugcaguauug

SEQ ID NO: 405193 - RNA, 30 nt, Homo Sapiens
aagaaaugaagauagcaaacaacacaguag

SEQ ID NO: 405194 - RNA, 32 nt, Homo Sapiens
agggaacaagcuugggcugcgcggcggccggg

SEQ ID NO: 405195 - RNA, 32 nt, Homo Sapiens
gugaaacaggugguaauuuuccuccucggccc

SEQ ID NO: 405196 - RNA, 32 nt, Homo Sapiens
ggccgggcgcgguggcucaugccuguaguccc

SEQ ID NO: 405197 - RNA, 32 nt, Homo Sapiens
ccaggccaugggauuugggaaccaccaugcca

SEQ ID NO: 405198 - RNA, 32 nt, Homo Sapiens
cggagaaaaagccgcacaccgaguguggcuuc

SEQ ID NO: 405199 - RNA, 32 nt, Homo Sapiens
cuuuaguauggacuuaaaguacuuauucauau

SEQ ID NO: 405200 - RNA, 32 nt, Homo Sapiens
agcaccauaaaauggguucuggaaaaacugau

SEQ ID NO: 405201 - RNA, 32 nt, Homo Sapiens
agcaggcagggccaaaccaccuuuucugcccg

SEQ ID NO: 405202 - RNA, 32 nt, Homo Sapiens
cuccgacucccucuuuuucucgcuuguggacu

SEQ ID NO: 405203 - RNA, 32 nt, Homo Sapiens
ugcucagaccugugaccccggcgggaccccca

SEQ ID NO: 405204 - RNA, 32 nt, Homo Sapiens
cagaggcaccucggcuucagucaugcugagca

SEQ ID NO: 405205 - RNA, 32 nt, Homo Sapiens
uccuguaaaaauuuuuuuuguuguuauaaacu

SEQ ID NO: 405206 - RNA, 32 nt, Homo Sapiens
uuuguuuucagccuauggaaugauuuccuuuu

SEQ ID NO: 405207 - RNA, 30 nt, Homo Sapiens
gcgugcgggauucagcaccaggcucuuccc

SEQ ID NO: 405208 - RNA, 32 nt, Homo Sapiens
ccacucaagcuacuggcacauaugaaagauua

SEQ ID NO: 405209 - RNA, 32 nt, Homo Sapiens
aguacugaaaaccugguuugcauaaaagaaau

SEQ ID NO: 405210 - RNA, 32 nt, Homo Sapiens
auuuuauaagugaaacaaaaguauucuccguu

SEQ ID NO: 405211 - RNA, 32 nt, Homo Sapiens
aauaaagccaccacuuggucuuuuccagugcu

SEQ ID NO: 405212 - RNA, 32 nt, Homo Sapiens
ggcugggcgcgguggcucacgccuguaguccc

SEQ ID NO: 405213 - RNA, 32 nt, Homo Sapiens
ggcuucacgugguuuggagaugggugggggaa

SEQ ID NO: 405214 - RNA, 32 nt, Homo Sapiens
uggaguuuucauuuuuaaauggcacaucuuca

SEQ ID NO: 405215 - RNA, 32 nt, Homo Sapiens
gcauacaaaaauuuaguguuaacuguaucaug

SEQ ID NO: 405216 - RNA, 32 nt, Homo Sapiens
gacacaaaaacugaccccuuugaaagugccuc

SEQ ID NO: 405217 - RNA, 32 nt, Homo Sapiens
caggcugaagugcaguggugugaucuuggcuc

SEQ ID NO: 405218 - RNA, 30 nt, Homo Sapiens
uuggcaugauuuauagagccaagcugccca

SEQ ID NO: 405219 - RNA, 31 nt, Homo Sapiens
aaaaugagaucuuugaaccaggaggagaucu

SEQ ID NO: 405220 - RNA, 32 nt, Homo Sapiens
uaggagaggggcucgaugggcugggggaagga

SEQ ID NO: 405221 - RNA, 32 nt, Homo Sapiens
agcuuugaacugaguuucaagggcugccaaag

SEQ ID NO: 405222 - RNA, 32 nt, Homo Sapiens
gccggcccccgccccaggacucugucuuuucu

SEQ ID NO: 405223 - RNA, 32 nt, Homo Sapiens
agaggaggagagggaggcugcagacgccuggg

SEQ ID NO: 405224 - RNA, 32 nt, Homo Sapiens
ggguuggaaaugaaggacuuuuuuaaccuuug

SEQ ID NO: 405225 - RNA, 32 nt, Homo Sapiens
gauggccccucuauccauccaggucccaugcc

SEQ ID NO: 405226 - RNA, 28 nt, Homo Sapiens
cgguggaauuggcccaggaugacagcug

SEQ ID NO: 405227 - RNA, 32 nt, Homo Sapiens
cagacugggcuggugccuccuccgcuucaggg

SEQ ID NO: 405228 - RNA, 32 nt, Homo Sapiens
aaucauuauguuuagaggucuaaugcuauguu

SEQ ID NO: 405229 - RNA, 32 nt, Homo Sapiens
ucauugggguggaggagaaggcggcggcucuc

SEQ ID NO: 405230 - RNA, 32 nt, Homo Sapiens
gggaagaggagcuucagcagcgcuguuguccc

SEQ ID NO: 405231 - RNA, 32 nt, Homo Sapiens
gcuuguggaagagaagcaggcgacccuuccug

SEQ ID NO: 405232 - RNA, 32 nt, Homo Sapiens
gcugcaucugccaguuacaccccaaauggcuu

SEQ ID NO: 405233 - RNA, 32 nt, Homo Sapiens
cauaagcaggcagggagggccaugccaccuac

SEQ ID NO: 405234 - RNA, 32 nt, Homo Sapiens
ugcuuaguucacuuuguaucacauuuccuaag

SEQ ID NO: 405235 - RNA, 32 nt, Homo Sapiens
uucaaacacaaaugcagggauugcugccacuu

SEQ ID NO: 405236 - RNA, 32 nt, Homo Sapiens
cagcccugccugcaugaggggcccggcacgcu

SEQ ID NO: 405237 - RNA, 32 nt, Homo Sapiens
agaguuacaguugucagugaaacuacuuugga

SEQ ID NO: 405238 - RNA, 30 nt, Homo Sapiens
ccgcccaagcccgugccucgucgccgcuua

SEQ ID NO: 405239 - RNA, 32 nt, Homo Sapiens
ggucucuugucagauagcaaaugcuucuucuc

SEQ ID NO: 405240 - RNA, 32 nt, Homo Sapiens
cugcucagugauuaacuuaagauuugcucaug

SEQ ID NO: 405241 - RNA, 32 nt, Homo Sapiens
gugucaucaaggagacucuccuugacaugcag

SEQ ID NO: 405242 - RNA, 32 nt, Homo Sapiens
cuguaguaaauuauguacaauuuuaugacuag

SEQ ID NO: 405243 - RNA, 31 nt, Homo Sapiens
uccacaagaaauacucucagccucaagggaa

SEQ ID NO: 405244 - RNA, 32 nt, Homo Sapiens
aagcugccuucuggaggacugauuccacaugc

SEQ ID NO: 405245 - RNA, 32 nt, Homo Sapiens
uucauguauaaaaugauggaaauagauuaauu

SEQ ID NO: 405246 - RNA, 32 nt, Homo Sapiens
guaaugugguccugagacuggcugggaagugc

SEQ ID NO: 405247 - RNA, 32 nt, Homo Sapiens
agccauaguaaagguugauuuacuucuaccaa

SEQ ID NO: 405248 - RNA, 31 nt, Homo Sapiens
acaauagcaaauuguauaauuguauccagaa

SEQ ID NO: 405249 - RNA, 32 nt, Homo Sapiens
gggccauaaccaaaacucacaugaaacggagg

SEQ ID NO: 405250 - RNA, 32 nt, Homo Sapiens
gggagaagauggcggcgcuaggggaacccgug

SEQ ID NO: 405251 - RNA, 32 nt, Homo Sapiens
uguguuuuuaaaacagaauuaggaauuugaga

SEQ ID NO: 405252 - RNA, 32 nt, Homo Sapiens
aaauuugugauggaaucagauuuuaacagcuc

SEQ ID NO: 405253 - RNA, 32 nt, Homo Sapiens
ggccgccgcucuugucgucgcaguauuuccug

SEQ ID NO: 405254 - RNA, 32 nt, Homo Sapiens
gugcgggagagaaaugguuugugucucccuua

SEQ ID NO: 405255 - RNA, 32 nt, Homo Sapiens
gauuccugguguuuccucucugcuggcucgua

SEQ ID NO: 405256 - RNA, 32 nt, Homo Sapiens
gaacccagggccuggccuucucucccagcagc

SEQ ID NO: 405257 - RNA, 32 nt, Homo Sapiens
gaguacuucucuacuauccuauuauuagcuuc

SEQ ID NO: 405258 - RNA, 32 nt, Homo Sapiens
cagaugaguaaguuaagaguuggucaucugga

SEQ ID NO: 405259 - RNA, 32 nt, Homo Sapiens
caugagccacuacacccagccgauuuuuccuu

SEQ ID NO: 405260 - RNA, 30 nt, Homo Sapiens
gaggccaucuucggugaagcaagggugaug

SEQ ID NO: 405261 - RNA, 32 nt, Homo Sapiens
gauggcaauuucacugauguagguguugugga

SEQ ID NO: 405262 - RNA, 32 nt, Homo Sapiens
ugauuucuugauaguuuggaagucuauugcug

SEQ ID NO: 405263 - RNA, 31 nt, Homo Sapiens
caguuccgcaguggucgucuaaagcgucuaa

SEQ ID NO: 405264 - RNA, 32 nt, Homo Sapiens
gaaaagggucauuggagaauaucuaguccaac

SEQ ID NO: 405265 - RNA, 32 nt, Homo Sapiens
gccuuacuaugaugauaugagauucuuuauga

SEQ ID NO: 405266 - RNA, 32 nt, Homo Sapiens
auuauccaggacuguuuauagcuguuggaagg

SEQ ID NO: 405267 - RNA, 32 nt, Homo Sapiens
aaaaugcugggacuuugagauugcacugauuc

SEQ ID NO: 405268 - RNA, 32 nt, Homo Sapiens
gccuugguuuuguuuuaucuucugggaaagaa

SEQ ID NO: 405269 - RNA, 32 nt, Homo Sapiens
uggcccaggacacuugguguaugcgugacuug

SEQ ID NO: 405270 - RNA, 32 nt, Homo Sapiens
cgcucagacggcuucuccuccuccucuugcuc

SEQ ID NO: 405271 - RNA, 32 nt, Homo Sapiens
gaaacacucacacuacugccugucccggcauc

SEQ ID NO: 405272 - RNA, 32 nt, Homo Sapiens
augcaauuaugaaaauuauauuaaaucuggga

SEQ ID NO: 405273 - RNA, 32 nt, Homo Sapiens
gaaguuguucuucgucacuuaauguugguucc

SEQ ID NO: 405274 - RNA, 32 nt, Homo Sapiens
agauggcaauauacacuuaauguuguuauugu

SEQ ID NO: 405275 - RNA, 32 nt, Homo Sapiens
cuagcaggcagccccuggcgccugcugccuca

SEQ ID NO: 405276 - RNA, 32 nt, Homo Sapiens
ccuagaaaaauauuaauuacaaaaacugauga

SEQ ID NO: 405277 - RNA, 32 nt, Homo Sapiens
ggucccugaggcuucccccauccaccauucug

SEQ ID NO: 405278 - RNA, 32 nt, Homo Sapiens
cauacuuggacaucuguaaaucuuuguacaga

SEQ ID NO: 405279 - RNA, 32 nt, Homo Sapiens
ccucauccccuugcccucccccagcccaggga

SEQ ID NO: 405280 - RNA, 32 nt, Homo Sapiens
gggcgcuuuuucugcccgcggugucucagauu

SEQ ID NO: 405281 - RNA, 32 nt, Homo Sapiens
agcaauaauuuucagguaucucccuuuggcaa

SEQ ID NO: 405282 - RNA, 32 nt, Homo Sapiens
gaauauauuuugcaugauaucucaaauaaauc

SEQ ID NO: 405283 - RNA, 32 nt, Homo Sapiens
ugacccuucaauuuccucuucuuuuuccucug

SEQ ID NO: 405284 - RNA, 32 nt, Homo Sapiens
ggccccggguccgccccagaggaguccacaca

SEQ ID NO: 405285 - RNA, 32 nt, Homo Sapiens
gacaaucucuuugcuaucguccugcugaagca

SEQ ID NO: 405286 - RNA, 32 nt, Homo Sapiens
gagccuggagagcggcggugcugggaggcccg

SEQ ID NO: 405287 - RNA, 32 nt, Homo Sapiens
cugcugcgccccgcuucucgcugcugagggga

SEQ ID NO: 405288 - RNA, 32 nt, Homo Sapiens
ugugaguugcuuaaaugugacauuguuugaaa

SEQ ID NO: 405289 - RNA, 32 nt, Homo Sapiens
acaaaggacuucccucauuaaacugaagagac

SEQ ID NO: 405290 - RNA, 32 nt, Homo Sapiens
gcgccagggcacgcgagcggcgcuggagggag

SEQ ID NO: 405291 - RNA, 32 nt, Homo Sapiens
agaggauggucuccacccaucuuucuauuucc

SEQ ID NO: 405292 - RNA, 32 nt, Homo Sapiens
auucgccugugcugagucuuccugcaggccuu

SEQ ID NO: 405293 - RNA, 32 nt, Homo Sapiens
uuuuuuguugucuccaaucuuaaacuuaaauu

SEQ ID NO: 405294 - RNA, 32 nt, Homo Sapiens
ucgcuuggcgugguggugggcgccuguagucc

SEQ ID NO: 405295 - RNA, 32 nt, Homo Sapiens
uccggcggggaggccgagccggaggccggacc

SEQ ID NO: 405296 - RNA, 32 nt, Homo Sapiens
uucaauugacuucugaaguaaaucugucuuga

SEQ ID NO: 405297 - RNA, 32 nt, Homo Sapiens
ugacacuauauaaaccgcccuuuuuguaugca

SEQ ID NO: 405298 - RNA, 32 nt, Homo Sapiens
cuccgagacagggaagaccggggcccuccucc

SEQ ID NO: 405299 - RNA, 32 nt, Homo Sapiens
acauaagcagcauaaagauagauggaacugca

SEQ ID NO: 405300 - RNA, 32 nt, Homo Sapiens
aauauagagugccagcagcaacuuaguauuuu

SEQ ID NO: 405301 - RNA, 32 nt, Homo Sapiens
uugaaaaauuccuggaaauauaccugauaauu

SEQ ID NO: 405302 - RNA, 32 nt, Homo Sapiens
caggguaggaacgaggccaugaucccuuugca

SEQ ID NO: 405303 - RNA, 32 nt, Homo Sapiens
aagggggcucuggccuuggggaccagcugagu

SEQ ID NO: 405304 - RNA, 32 nt, Homo Sapiens
gcuuagagaacacgcgaugaccacguggagcc

SEQ ID NO: 405305 - RNA, 32 nt, Homo Sapiens
gcauuguggcuucucaguggcuugacagcauc

SEQ ID NO: 405306 - RNA, 32 nt, Homo Sapiens
gcacccacuccucuccuaguccugacguggcg

SEQ ID NO: 405307 - RNA, 32 nt, Homo Sapiens
ccuguagccgggggguuccuggccggaucccg

SEQ ID NO: 405308 - RNA, 29 nt, Homo Sapiens
aaauuuauagugauuuuaaaggauuuugc

SEQ ID NO: 405309 - RNA, 32 nt, Homo Sapiens
cgcgcgcugcccuaacgaugccgcccgccgcg

SEQ ID NO: 405310 - RNA, 32 nt, Homo Sapiens
aggagagaaugggagacaauccuagacuucca

SEQ ID NO: 405311 - RNA, 32 nt, Homo Sapiens
ggcuaaaacuaaaccaccaaaaaacgaucuga

SEQ ID NO: 405312 - RNA, 32 nt, Homo Sapiens
aagaggagggucgggcucggccggggaguccc

SEQ ID NO: 405313 - RNA, 32 nt, Homo Sapiens
agacuaauauguuugggaccaaaaccaucuaa

SEQ ID NO: 405314 - RNA, 32 nt, Homo Sapiens
uccaucucaaaaaaacaaaaaaacaagcaggu

SEQ ID NO: 405315 - RNA, 32 nt, Homo Sapiens
ccuaagcgggagcggcuggcacggcgucacug

SEQ ID NO: 405316 - RNA, 32 nt, Homo Sapiens
gguaaauguuuggcucuucucauuucauuauc

SEQ ID NO: 405317 - RNA, 32 nt, Homo Sapiens
uuacguguuaaccaagacaucccuuuagguga

SEQ ID NO: 405318 - RNA, 32 nt, Homo Sapiens
aaccagccuccaagagggcccgcggugauucu

SEQ ID NO: 405319 - RNA, 32 nt, Homo Sapiens
uucuuagucugcuguaucaaugacacagagag

SEQ ID NO: 405320 - RNA, 32 nt, Homo Sapiens
guuaaaccaaaauauuuuuggugggucuuuuu

SEQ ID NO: 405321 - RNA, 32 nt, Homo Sapiens
uuuauuauuauuauuuuuuucuuuuaagaacu

SEQ ID NO: 405322 - RNA, 32 nt, Homo Sapiens
cugaccauuuccugcuucucaagcugcagaga

SEQ ID NO: 405323 - RNA, 32 nt, Homo Sapiens
caaagaugcagccgacuugauugugguggaua

SEQ ID NO: 405324 - RNA, 32 nt, Homo Sapiens
cuuuaaaaacgaagaauugugcagguuaaaag

SEQ ID NO: 405325 - RNA, 32 nt, Homo Sapiens
uuuaaguguaacuggcaguuuuccauugguuu

SEQ ID NO: 405326 - RNA, 32 nt, Homo Sapiens
uaggaagagccugucuaaaaaacuacugcccc

SEQ ID NO: 405327 - RNA, 32 nt, Homo Sapiens
gcccaucagaaagccugaggcgugcccagagc

SEQ ID NO: 405328 - RNA, 32 nt, Homo Sapiens
acggcggccccaaccggccggaccucagcaau

SEQ ID NO: 405329 - RNA, 32 nt, Homo Sapiens
ugagccggaccgagccgagaggacccgagugg

SEQ ID NO: 405330 - RNA, 32 nt, Homo Sapiens
agaaagccaccacaauaaauauauuuguuaau

SEQ ID NO: 405331 - RNA, 32 nt, Homo Sapiens
ccaggauccgccggaccccggccucgauaugg

SEQ ID NO: 405332 - RNA, 32 nt, Homo Sapiens
cuuugaagaguguuuuuaauucuuguuguaga

SEQ ID NO: 405333 - RNA, 31 nt, Homo Sapiens
augccggagccccaagacucugcucuccucg

SEQ ID NO: 405334 - RNA, 32 nt, Homo Sapiens
ugggugccgcggugcgggcagugaacgcgcgc

SEQ ID NO: 405335 - RNA, 32 nt, Homo Sapiens
gcucgcuccuucccgcccuccccgcagcgccg

SEQ ID NO: 405336 - RNA, 32 nt, Homo Sapiens
uugucucuaguugucuguguauaauauuucca

SEQ ID NO: 405337 - RNA, 32 nt, Homo Sapiens
ggagaccuuucuuggaggaaggagucuuuuuu

SEQ ID NO: 405338 - RNA, 32 nt, Homo Sapiens
aacucugaacucucacaaucuuguuucuucau

SEQ ID NO: 405339 - RNA, 32 nt, Homo Sapiens
accugucuuagaccccaguucccagccugaca

SEQ ID NO: 405340 - RNA, 32 nt, Homo Sapiens
ccuagauguuuugucuucucuuuucugcacuu

SEQ ID NO: 405341 - RNA, 32 nt, Homo Sapiens
ugucccuauuucuaccccggccagaacaugga

SEQ ID NO: 405342 - RNA, 32 nt, Homo Sapiens
uaagaccuuuuggagacuggagcuuucuguuc

SEQ ID NO: 405343 - RNA, 32 nt, Homo Sapiens
ccaaaacucaugcuuuucccagcccugccccg

SEQ ID NO: 405344 - RNA, 32 nt, Homo Sapiens
uucauaucucuuugcccuuccuacuccucaua

SEQ ID NO: 405345 - RNA, 32 nt, Homo Sapiens
aacuucacagaaacaaacaaaaccagccagaa

SEQ ID NO: 405346 - RNA, 32 nt, Homo Sapiens
aucaguggucguguaccuucuccaccugcccc

SEQ ID NO: 405347 - RNA, 32 nt, Homo Sapiens
uuugugcaagcacucacugugcucucugaaag

SEQ ID NO: 405348 - RNA, 32 nt, Homo Sapiens
uuccaauuaaugcuuuuuuauaucuaggcuac

SEQ ID NO: 405349 - RNA, 32 nt, Homo Sapiens
aaaaauauaaauauaaauacauacauacauag

SEQ ID NO: 405350 - RNA, 32 nt, Homo Sapiens
caugggugggaagggaggauggccacuuggcu

SEQ ID NO: 405351 - RNA, 32 nt, Homo Sapiens
aaaaguuagaccuaaaaccauaaaaacccuaa

SEQ ID NO: 405352 - RNA, 32 nt, Homo Sapiens
ugggacccgcggccggcgcggggacguacggc

SEQ ID NO: 405353 - RNA, 32 nt, Homo Sapiens
uguuucaccauguuggucaggcuggucuugaa

SEQ ID NO: 405354 - RNA, 32 nt, Homo Sapiens
ugacuuuagaguaccuuuugggacauagggcc

SEQ ID NO: 405355 - RNA, 32 nt, Homo Sapiens
ugggggaagagaaugcaacaaaaggaagagcu

SEQ ID NO: 405356 - RNA, 32 nt, Homo Sapiens
caaagggagcccagcacugggagccuucuuga

SEQ ID NO: 405357 - RNA, 32 nt, Homo Sapiens
gguguaacuuuuucuuuuuuuuuucagccacu

SEQ ID NO: 405358 - RNA, 32 nt, Homo Sapiens
ccguggggucugaguucagggguguggaggga

SEQ ID NO: 405359 - RNA, 32 nt, Homo Sapiens
ucagaagaaaggaaacaaugugauucaagaua

SEQ ID NO: 405360 - RNA, 32 nt, Homo Sapiens
cauccuggacaagggagacacaacacaaaucc

SEQ ID NO: 405361 - RNA, 32 nt, Homo Sapiens
ccucgggcugaggaaacgugcaagcuuagaac

SEQ ID NO: 405362 - RNA, 32 nt, Homo Sapiens
gccgaggcggguggaucaccaagaccagccug

SEQ ID NO: 405363 - RNA, 32 nt, Homo Sapiens
ucauagcccagcugcuuggauacuccucugag

SEQ ID NO: 405364 - RNA, 32 nt, Homo Sapiens
gcauaagauugaagguauaaauuuauauuauu

SEQ ID NO: 405365 - RNA, 32 nt, Homo Sapiens
acgacugcaugcccgcgcccgccaggugauac

SEQ ID NO: 405366 - RNA, 32 nt, Homo Sapiens
ugucccgggcccuucagccagcccuggauagc

SEQ ID NO: 405367 - RNA, 32 nt, Homo Sapiens
uaaaauguuuuaauauguauugaauuucuuuc

SEQ ID NO: 405368 - RNA, 32 nt, Homo Sapiens
ggggccucugucagcaagaccauggggacuuc

SEQ ID NO: 405369 - RNA, 31 nt, Homo Sapiens
cucuggaaauaaauauaguuauuaaaggauu

SEQ ID NO: 405370 - RNA, 32 nt, Homo Sapiens
uaauaacaagauaaccacaucaagaugguugg

SEQ ID NO: 405371 - RNA, 32 nt, Homo Sapiens
agaagacaaaauuuuuuaaauguuagaaaaag

SEQ ID NO: 405372 - RNA, 32 nt, Homo Sapiens
ccuaauggccuuggacaccagauucuuuccca

SEQ ID NO: 405373 - RNA, 32 nt, Homo Sapiens
caauauucaguauaaugcaguguauuucauca

SEQ ID NO: 405374 - RNA, 32 nt, Homo Sapiens
acacuuaaauugaugccuggaauuggcaccua

SEQ ID NO: 405375 - RNA, 32 nt, Homo Sapiens
acugcagggggaagagccgggaagggacaguc

SEQ ID NO: 405376 - RNA, 32 nt, Homo Sapiens
ggugaaagaaaauaauguauauaagcagacuu

SEQ ID NO: 405377 - RNA, 32 nt, Homo Sapiens
acuacuguugaaaaaauuuccagugaggcuca

SEQ ID NO: 405378 - RNA, 32 nt, Homo Sapiens
gggcccaggugcgcggcgcagagccuuuggga

SEQ ID NO: 405379 - RNA, 32 nt, Homo Sapiens
ccgcugcugacccggcggccggccgccguucc

SEQ ID NO: 405380 - RNA, 32 nt, Homo Sapiens
aucacggagcagccuucaagcauuccauuacg

SEQ ID NO: 405381 - RNA, 32 nt, Homo Sapiens
gucagccccagccccagcgccauccuggagcg

SEQ ID NO: 405382 - RNA, 32 nt, Homo Sapiens
uuucggaugagggaagcagauagcccaccagc

SEQ ID NO: 405383 - RNA, 32 nt, Homo Sapiens
ucguggggaaagguuucugucccuccccagaa

SEQ ID NO: 405384 - RNA, 32 nt, Homo Sapiens
agcugugggggaagaagugggaccuucggagc

SEQ ID NO: 405385 - RNA, 32 nt, Homo Sapiens
auaccauggaaugaggacaaggugauacucug

SEQ ID NO: 405386 - RNA, 32 nt, Homo Sapiens
agaugaugaugaugaugaagaggaggaaggau

SEQ ID NO: 405387 - RNA, 32 nt, Homo Sapiens
uccaccgcagggcuggggacugggcuagaggu

SEQ ID NO: 405388 - RNA, 32 nt, Homo Sapiens
gggccugagagcugcuucuccuucucccuggg

SEQ ID NO: 405389 - RNA, 32 nt, Homo Sapiens
aucccucccagccccagcccuaguccccuugu

SEQ ID NO: 405390 - RNA, 32 nt, Homo Sapiens
agccgauacuggcagccauugcagcuccaaac

SEQ ID NO: 405391 - RNA, 32 nt, Homo Sapiens
gggacuacuggguccuaaggcucuuuuugcuu

SEQ ID NO: 405392 - RNA, 32 nt, Homo Sapiens
uguuucugccucaaccacggaccaauaauaug

SEQ ID NO: 405393 - RNA, 31 nt, Homo Sapiens
gccaccccacccucaccaacagaugcaccgc

SEQ ID NO: 405394 - RNA, 32 nt, Homo Sapiens
aggugcuagagggaauacacuaccugcaccag

SEQ ID NO: 405395 - RNA, 32 nt, Homo Sapiens
ccgccccuucgcgucccgggaaccggcuggcu

SEQ ID NO: 405396 - RNA, 32 nt, Homo Sapiens
cacaaaggcaugaaaaccuuggcuucagccuc

SEQ ID NO: 405397 - RNA, 32 nt, Homo Sapiens
gaguucaguauuuggaaacuaauuuguucuac

SEQ ID NO: 405398 - RNA, 32 nt, Homo Sapiens
ucuuuucugaugcacuggacugaauuuuuacc

SEQ ID NO: 405399 - RNA, 26 nt, Homo Sapiens
uuaauaaauaacauucuagaaagauc

SEQ ID NO: 405400 - RNA, 31 nt, Homo Sapiens
ugcaagaaauaaagaccagaucaccaacauc

SEQ ID NO: 405401 - RNA, 32 nt, Homo Sapiens
ggauuucuagacccucuuucuguuuggauggu

SEQ ID NO: 405402 - RNA, 32 nt, Homo Sapiens
cccuuagcccccacccacuucccugggcaaau

SEQ ID NO: 405403 - RNA, 32 nt, Homo Sapiens
agacaccaaacacagcaaguauuuuaaugaau

SEQ ID NO: 405404 - RNA, 32 nt, Homo Sapiens
ugucccgaagauuugcgccuuuagugccuuuu

SEQ ID NO: 405405 - RNA, 32 nt, Homo Sapiens
guaacagcgaagaggggagaugaauggaaagu

SEQ ID NO: 405406 - RNA, 32 nt, Homo Sapiens
uccggagcccggugccagugccgcccgcagcc

SEQ ID NO: 405407 - RNA, 32 nt, Homo Sapiens
uugauucuauagaaaaccauuuaccaacugaa

SEQ ID NO: 405408 - RNA, 32 nt, Homo Sapiens
uagaaaugaaaagccacgucauauaacucaag

SEQ ID NO: 405409 - RNA, 32 nt, Homo Sapiens
ggcccggcaguggacgcagagccucggccccg

SEQ ID NO: 405410 - RNA, 32 nt, Homo Sapiens
aaccccacccauaaaucaaugggcccuuuauu

SEQ ID NO: 405411 - RNA, 32 nt, Homo Sapiens
gaggaagcaccucugccuccaagccccagaug

SEQ ID NO: 405412 - RNA, 32 nt, Homo Sapiens
ugugccggacuccagccggggcgacgagagau

SEQ ID NO: 405413 - RNA, 32 nt, Homo Sapiens
uccuuuauaaauaacaucacaaaugagaacaa

SEQ ID NO: 405414 - RNA, 32 nt, Homo Sapiens
acaaagucucugucuuaaguguuuccuugcaa

SEQ ID NO: 405415 - RNA, 32 nt, Homo Sapiens
cuguagucccagcuacuuggggugcugaggcg

SEQ ID NO: 405416 - RNA, 32 nt, Homo Sapiens
auaaaggaauggggcgagggcugaggacucuc

SEQ ID NO: 405417 - RNA, 32 nt, Homo Sapiens
ugaaaaacugccaugaugggaauagaaacaau

SEQ ID NO: 405418 - RNA, 32 nt, Homo Sapiens
gcgccgccuucccccaucucuuccucguccuc

SEQ ID NO: 405419 - RNA, 32 nt, Homo Sapiens
ccgcgagugagugcggugcccaggcgcgcuug

SEQ ID NO: 405420 - RNA, 32 nt, Homo Sapiens
guggugggcgcgcgggcagcggugccgcgguc

SEQ ID NO: 405421 - RNA, 32 nt, Homo Sapiens
guagugggagauuguuacauuauucuuuucua

SEQ ID NO: 405422 - RNA, 32 nt, Homo Sapiens
uuuagcuuuagaauucaguaaauaucuugagg

SEQ ID NO: 405423 - RNA, 32 nt, Homo Sapiens
ccagcuacacucgcuucaaccuggacagccau

SEQ ID NO: 405424 - RNA, 32 nt, Homo Sapiens
uuuggcugagaucuuucuuuuacuugugauau

SEQ ID NO: 405425 - RNA, 32 nt, Homo Sapiens
augaugguaugauucuauuauauauuuuauau

SEQ ID NO: 405426 - RNA, 32 nt, Homo Sapiens
ugaggggacgccuggugaaaaugguguuuguu

SEQ ID NO: 405427 - RNA, 32 nt, Homo Sapiens
ucccggaggacaggagaaaaccacggacuggc

SEQ ID NO: 405428 - RNA, 32 nt, Homo Sapiens
caauaauuucuaaaaauguguuugauuguaga

SEQ ID NO: 405429 - RNA, 32 nt, Homo Sapiens
uauuuuaaaaauuauaauacaaaucaucagug

SEQ ID NO: 405430 - RNA, 32 nt, Homo Sapiens
ggagugcacagcucuagauggcuccuagauua

SEQ ID NO: 405431 - RNA, 32 nt, Homo Sapiens
ucaucucaugaggauuucuuuaugaggcaaau

SEQ ID NO: 405432 - RNA, 32 nt, Homo Sapiens
cugggacuucuuucuuuuucacuuaauuuuaa

SEQ ID NO: 405433 - RNA, 32 nt, Homo Sapiens
caagccccaagcacugagccagcaggugccag

SEQ ID NO: 405434 - RNA, 32 nt, Homo Sapiens
ucauggcugucucuccuuucauugucagacuc

SEQ ID NO: 405435 - RNA, 32 nt, Homo Sapiens
aauucagaauaccacaucuguacagcguugac

SEQ ID NO: 405436 - RNA, 32 nt, Homo Sapiens
aagagcuucuauuuuuggaaagggcugcuaug

SEQ ID NO: 405437 - RNA, 32 nt, Homo Sapiens
gcugcgcggagcggcguccccugcagccgcgg

SEQ ID NO: 405438 - RNA, 32 nt, Homo Sapiens
auuugacccuggauugguucucuccuuggacu

SEQ ID NO: 405439 - RNA, 32 nt, Homo Sapiens
cauggccauagcgucuuaauuguuuaauugua

SEQ ID NO: 405440 - RNA, 32 nt, Homo Sapiens
caauggagagaaaaaacugaaaaagaugcugc

SEQ ID NO: 405441 - RNA, 32 nt, Homo Sapiens
cauucgcccagcuguguaggcuaaaacacuaa

SEQ ID NO: 405442 - RNA, 32 nt, Homo Sapiens
cucuuucaauugccacuuucucuucuuuugaa

SEQ ID NO: 405443 - RNA, 32 nt, Homo Sapiens
guuagacgaaguguagaaaauaaaauaaauuu

SEQ ID NO: 405444 - RNA, 32 nt, Homo Sapiens
gagggcggagccggcuucgggacugcggagac

SEQ ID NO: 405445 - RNA, 32 nt, Homo Sapiens
caugacagaagugauucagggauuccuaugaa

SEQ ID NO: 405446 - RNA, 32 nt, Homo Sapiens
uuuuuuccaaaaacaauuagguauuuuaaucu

SEQ ID NO: 405447 - RNA, 32 nt, Homo Sapiens
cuuuggaaauacuguuugauuacuuuucagag

SEQ ID NO: 405448 - RNA, 32 nt, Homo Sapiens
agagcccugagacccgccccagcugccacccg

SEQ ID NO: 405449 - RNA, 32 nt, Homo Sapiens
caaguccgcucccuaggcaucgcugcgcuggc

SEQ ID NO: 405450 - RNA, 32 nt, Homo Sapiens
ccaaagcaagacuuacuaacgcauaucaaaua

SEQ ID NO: 405451 - RNA, 32 nt, Homo Sapiens
uacaacugauaaaaccuuaugauucuuuucuc

SEQ ID NO: 405452 - RNA, 32 nt, Homo Sapiens
ugcuacauaggaagugcuauccagucaacuca

SEQ ID NO: 405453 - RNA, 32 nt, Homo Sapiens
cacggcgcaggcugcccgccuccuggagagcg

SEQ ID NO: 405454 - RNA, 32 nt, Homo Sapiens
ccuauacaaaaauuagcugggcgugguggugc

SEQ ID NO: 405455 - RNA, 32 nt, Homo Sapiens
caguguuuuccuguuuucuucauuuccaaaau

SEQ ID NO: 405456 - RNA, 32 nt, Homo Sapiens
gaaaggaacacuuugaacguguuuuggaagaa

SEQ ID NO: 405457 - RNA, 32 nt, Homo Sapiens
uuguuaggcugugcuuuacugauaaaaccaag

SEQ ID NO: 405458 - RNA, 32 nt, Homo Sapiens
acccgguccucgcagaguugcggccgcccgcc

SEQ ID NO: 405459 - RNA, 32 nt, Homo Sapiens
gugaaagcaaauauuucuucguguuggauggg

SEQ ID NO: 405460 - RNA, 29 nt, Homo Sapiens
ucaauuguauaguuauauuugcugauacu

SEQ ID NO: 405461 - RNA, 32 nt, Homo Sapiens
aaggauagccucagccacaaaacucugucagg

SEQ ID NO: 405462 - RNA, 32 nt, Homo Sapiens
uccaagagugggcacuuccagaguaguggguc

SEQ ID NO: 405463 - RNA, 32 nt, Homo Sapiens
uugcagaauucaaaagugauuaucucuuugau

SEQ ID NO: 405464 - RNA, 32 nt, Homo Sapiens
aaccagccauccccugagggguugccuccaug

SEQ ID NO: 405465 - RNA, 32 nt, Homo Sapiens
ccuacacaccgggcucuagagccauaauuucc

SEQ ID NO: 405466 - RNA, 32 nt, Homo Sapiens
ugucucuguucccugcuuuggccaguggcuau

SEQ ID NO: 405467 - RNA, 32 nt, Homo Sapiens
guuuuuauuauuauuauacuuuaaguuuuagg

SEQ ID NO: 405468 - RNA, 32 nt, Homo Sapiens
cagguuuuuuguuuuuuuuuuauuccaguuuu

SEQ ID NO: 405469 - RNA, 30 nt, Homo Sapiens
cuguagaaccacagugcccaucuugccagc

SEQ ID NO: 405470 - RNA, 29 nt, Homo Sapiens
gugcgccggggacaggcagggccgggucg

SEQ ID NO: 405471 - RNA, 32 nt, Homo Sapiens
auauuuuaauaaaaaucugcacuuugugaguu

SEQ ID NO: 405472 - RNA, 32 nt, Homo Sapiens
agcgcugcggagggcgagggccgcccggaguc

SEQ ID NO: 405473 - RNA, 32 nt, Homo Sapiens
caggacagaaccacugagucuuuuggaggcuc

SEQ ID NO: 405474 - RNA, 29 nt, Homo Sapiens
gagaaaugaaguuuauauuaucaagggga

SEQ ID NO: 405475 - RNA, 32 nt, Homo Sapiens
gacccaggguaacagccccaguucaucccaac

SEQ ID NO: 405476 - RNA, 32 nt, Homo Sapiens
cuuggcugcccccagguauuuacuguggagaa

SEQ ID NO: 405477 - RNA, 32 nt, Homo Sapiens
aucagcggacagcauggaagaugugugcucug

SEQ ID NO: 405478 - RNA, 32 nt, Homo Sapiens
aucuggagcccuuuccucucaccacauugccc

SEQ ID NO: 405479 - RNA, 32 nt, Homo Sapiens
auauccuuuuaaaaguaaaauuucuaaacuuu

SEQ ID NO: 405480 - RNA, 32 nt, Homo Sapiens
uagguauuccgaccgguaauuccuccuauugg

SEQ ID NO: 405481 - RNA, 32 nt, Homo Sapiens
uuucuuuuuuuuucuuuuuacuuuuuuugaga

SEQ ID NO: 405482 - RNA, 32 nt, Homo Sapiens
ugaaaagagagggucagggggaggcuggcugc

SEQ ID NO: 405483 - RNA, 32 nt, Homo Sapiens
uuuuaaauauaucuucagguuauuuucuuacu

SEQ ID NO: 405484 - RNA, 32 nt, Homo Sapiens
aaagugguuuguggaagaaaguuguaaaaucu

SEQ ID NO: 405485 - RNA, 32 nt, Homo Sapiens
aaauaguguggccgagccugcugcugugugaa

SEQ ID NO: 405486 - RNA, 32 nt, Homo Sapiens
cuugggagcaagcagcacuaaaucacaucagg

SEQ ID NO: 405487 - RNA, 32 nt, Homo Sapiens
cuggaggcuucaaggcccugccugcugcacgc

SEQ ID NO: 405488 - RNA, 32 nt, Homo Sapiens
ucccaaaaucauaagauauuuuucaugauuuu

SEQ ID NO: 405489 - RNA, 32 nt, Homo Sapiens
guagagguacgcuuuuuuccucaggcuuaaac

SEQ ID NO: 405490 - RNA, 32 nt, Homo Sapiens
auuugucaaaaauaauguuaaauccagauagu

SEQ ID NO: 405491 - RNA, 32 nt, Homo Sapiens
gccuuucuagaauccaagcuaaagaugucguc

SEQ ID NO: 405492 - RNA, 32 nt, Homo Sapiens
cuuauaauguaccuggaaaauaaaccucuuga

SEQ ID NO: 405493 - RNA, 29 nt, Homo Sapiens
auguguauguguuucauuuacaagcaagc

SEQ ID NO: 405494 - RNA, 32 nt, Homo Sapiens
uuucugccuucacagcacccaucucgcuuuuu

SEQ ID NO: 405495 - RNA, 32 nt, Homo Sapiens
auuuggcccggugugguggcggacgccuguag

SEQ ID NO: 405496 - RNA, 32 nt, Homo Sapiens
uucaguugugaccugugggauuuuaaaauuuu

SEQ ID NO: 405497 - RNA, 32 nt, Homo Sapiens
gugauaaacugauuuugguuugcaauaaaacc

SEQ ID NO: 405498 - RNA, 27 nt, Homo Sapiens
uguagaaguuaauucuguguauaaauc

SEQ ID NO: 405499 - RNA, 32 nt, Homo Sapiens
cggggguggcaccugugagagccuggggcucc

SEQ ID NO: 405500 - RNA, 30 nt, Homo Sapiens
cucccggcgcccgagagaccggcacgccac

SEQ ID NO: 405501 - RNA, 30 nt, Homo Sapiens
auccugaauauccuuugcaacuccccaaga

SEQ ID NO: 405502 - RNA, 32 nt, Homo Sapiens
acugaacuaaaauaaauacaugcuuaauccug

SEQ ID NO: 405503 - RNA, 32 nt, Homo Sapiens
uuaaaaauaaaaauaugaccaauugguaucag

SEQ ID NO: 405504 - RNA, 32 nt, Homo Sapiens
uauauacauacaaauaaagauacauguguaua

SEQ ID NO: 405505 - RNA, 32 nt, Homo Sapiens
uugagauaaacuaaaguguguugaugccagaa

SEQ ID NO: 405506 - RNA, 32 nt, Homo Sapiens
cugggguggcagagggcgagaggcucugugcu

SEQ ID NO: 405507 - RNA, 32 nt, Homo Sapiens
gcgcugggcaaccgcgauccggcgccggacug

SEQ ID NO: 405508 - RNA, 32 nt, Homo Sapiens
ggacagguggccugggcagaucucgcccaggu

SEQ ID NO: 405509 - RNA, 32 nt, Homo Sapiens
ccccaggcagccccuccacacccaccgagcag

SEQ ID NO: 405510 - RNA, 32 nt, Homo Sapiens
auugcagguauuuuauaaaaguuuuaaaccuu

SEQ ID NO: 405511 - RNA, 32 nt, Homo Sapiens
agaagaaggauauuuuuguugcaguaaaaaca

SEQ ID NO: 405512 - RNA, 32 nt, Homo Sapiens
guagaaagcacaggcauagaaaaguacauuuu

SEQ ID NO: 405513 - RNA, 32 nt, Homo Sapiens
ucgggggagcagaauguaccccugccagagag

SEQ ID NO: 405514 - RNA, 32 nt, Homo Sapiens
uaacgugcuugaguccccggcgugauguguuc

SEQ ID NO: 405515 - RNA, 32 nt, Homo Sapiens
ucaguuuggugcauuugcugcugcuguugcua

SEQ ID NO: 405516 - RNA, 32 nt, Homo Sapiens
ggucccgcgggccaggccguggagguguuacc

SEQ ID NO: 405517 - RNA, 32 nt, Homo Sapiens
guggccuguggcucucacuccucccccgacgu

SEQ ID NO: 405518 - RNA, 32 nt, Homo Sapiens
gcucuucuuuugcucuaagguauggguucccu

SEQ ID NO: 405519 - RNA, 32 nt, Homo Sapiens
ccucguucuuugccuuucccuccccuuagcga

SEQ ID NO: 405520 - RNA, 32 nt, Homo Sapiens
ugcugguuuuucuuuuugauccaaauguguga

SEQ ID NO: 405521 - RNA, 32 nt, Homo Sapiens
cccccagugcggccagcuccgcgccaggaugg

SEQ ID NO: 405522 - RNA, 32 nt, Homo Sapiens
auguggaaaauauuuuucaacuuuaauuuucu

SEQ ID NO: 405523 - RNA, 32 nt, Homo Sapiens
auuuccuugauuguguaaggaacuugcuggac

SEQ ID NO: 405524 - RNA, 32 nt, Homo Sapiens
gcaaaaggccacaggauggggaggcugcgggg

SEQ ID NO: 405525 - RNA, 32 nt, Homo Sapiens
acuugcugccuuuuuuuuuucuugguacacau

SEQ ID NO: 405526 - RNA, 32 nt, Homo Sapiens
agaggaggagaauuaagaagaggaugaucggg

SEQ ID NO: 405527 - RNA, 32 nt, Homo Sapiens
agucaucacgggggaugcagacauugaccaug

SEQ ID NO: 405528 - RNA, 32 nt, Homo Sapiens
guaaccaguuuuuuuuuauuuaucucuuuaau

SEQ ID NO: 405529 - RNA, 32 nt, Homo Sapiens
gaaguuuggaguccgcugacgucgccgcccag

SEQ ID NO: 405530 - RNA, 32 nt, Homo Sapiens
uggccggggaggggcggauggaggggccuggg

SEQ ID NO: 405531 - RNA, 32 nt, Homo Sapiens
cgcccagcgucaggggugcgcggccgccgaga

SEQ ID NO: 405532 - RNA, 32 nt, Homo Sapiens
uagugcaucuuagagccauagagcaggugacu

SEQ ID NO: 405533 - RNA, 32 nt, Homo Sapiens
gguggccccggcaggccuggcuccucacaucc

SEQ ID NO: 405534 - RNA, 32 nt, Homo Sapiens
auugagggaaaggccugcuggccugggacacu

SEQ ID NO: 405535 - RNA, 32 nt, Homo Sapiens
cuucuacucagucgacugcagagacgaccgcg

SEQ ID NO: 405536 - RNA, 32 nt, Homo Sapiens
cccagcuaauuuuuuguauuuucauuagagau

SEQ ID NO: 405537 - RNA, 32 nt, Homo Sapiens
acaucaaaaaucaacagacugcacugauaauu

SEQ ID NO: 405538 - RNA, 32 nt, Homo Sapiens
cgcuacggugcugacaagauggcggcuggcgg

SEQ ID NO: 405539 - RNA, 32 nt, Homo Sapiens
ggugaagaggaugugguccuaucagaugcugg

SEQ ID NO: 405540 - RNA, 32 nt, Homo Sapiens
aagacuuauaugcuuugaaaucuguuaagauu

SEQ ID NO: 405541 - RNA, 32 nt, Homo Sapiens
ccccacuggagucaaggcuccgagggaggaga

SEQ ID NO: 405542 - RNA, 32 nt, Homo Sapiens
auaugcagugcuuuuucuuaaacuuggccaau

SEQ ID NO: 405543 - RNA, 32 nt, Homo Sapiens
uaaaguugcuuuuugccuaagaaucagcgagc

SEQ ID NO: 405544 - RNA, 32 nt, Homo Sapiens
uugcucugccagcugagcgaaugaaaggugcc

SEQ ID NO: 405545 - RNA, 32 nt, Homo Sapiens
uguaagcauacuuuguaaauaggauuuuuaga

SEQ ID NO: 405546 - RNA, 32 nt, Homo Sapiens
gcagauuagugguugucaaggcugggggcuca

SEQ ID NO: 405547 - RNA, 32 nt, Homo Sapiens
ugcgcuuaaugaucacugaugcugcccgacac

SEQ ID NO: 405548 - RNA, 32 nt, Homo Sapiens
gggaggggagcgcgggccggccggccgaguuc

SEQ ID NO: 405549 - RNA, 32 nt, Homo Sapiens
ccacuggaccccagccuuggcucuuccucuug

SEQ ID NO: 405550 - RNA, 32 nt, Homo Sapiens
uaaaucacaacacuuaguucucuuccauuuau

SEQ ID NO: 405551 - RNA, 32 nt, Homo Sapiens
uuuaaagacagagauaauaucuucucuauucu

SEQ ID NO: 405552 - RNA, 32 nt, Homo Sapiens
cuguucaauuuaaugugauauaauucuaguau

SEQ ID NO: 405553 - RNA, 32 nt, Homo Sapiens
ggacuuuuacuuuuuauuacauaaaaauauua

SEQ ID NO: 405554 - RNA, 32 nt, Homo Sapiens
cacacccucacagaggcaucaugcaaaggaca

SEQ ID NO: 405555 - RNA, 32 nt, Homo Sapiens
gauaauaaugaaauaaaacuguuuuugaaccu

SEQ ID NO: 405556 - RNA, 32 nt, Homo Sapiens
auggccucuaaagagguauguguaucuuuauu

SEQ ID NO: 405557 - RNA, 32 nt, Homo Sapiens
aggaaauuacaauagcuguuaaggaaaggaaa

SEQ ID NO: 405558 - RNA, 32 nt, Homo Sapiens
cuuccaaccccauuuccccagcccaugagguu

SEQ ID NO: 405559 - RNA, 32 nt, Homo Sapiens
agaacaugaagauaguuugaaucaaaguuauu

SEQ ID NO: 405560 - RNA, 32 nt, Homo Sapiens
gcccuaaucccuugcaggcugccucgcccaug

SEQ ID NO: 405561 - RNA, 32 nt, Homo Sapiens
aguggugacaccugugugcuugcuucccgaag

SEQ ID NO: 405562 - RNA, 32 nt, Homo Sapiens
ucagauugcagaaacccagcccugccccugcc

SEQ ID NO: 405563 - RNA, 32 nt, Homo Sapiens
auaaggucaggagaucaagaccauccuggcua

SEQ ID NO: 405564 - RNA, 32 nt, Homo Sapiens
uguuuuuucugccaugagaccaacaggucacc

SEQ ID NO: 405565 - RNA, 32 nt, Homo Sapiens
auuccaagacucaguauaaacaaguaccaagu

SEQ ID NO: 405566 - RNA, 32 nt, Homo Sapiens
cggcccucggcgcgcgcaggggaccgagcugg

SEQ ID NO: 405567 - RNA, 32 nt, Homo Sapiens
uuagaagauaauguacaauauguguccaugag

SEQ ID NO: 405568 - RNA, 32 nt, Homo Sapiens
ucagauuauagcaaacaguuguugaggggugg

SEQ ID NO: 405569 - RNA, 32 nt, Homo Sapiens
aaauggcagggccaggcgagaaccugggacag

SEQ ID NO: 405570 - RNA, 29 nt, Homo Sapiens
ucgaugaugaagaaucaguggauggaaau

SEQ ID NO: 405571 - RNA, 32 nt, Homo Sapiens
augaggucaggagaucaaaaccauccuggcua

SEQ ID NO: 405572 - RNA, 32 nt, Homo Sapiens
gaccucuguccucccucugauuuuucauauuu

SEQ ID NO: 405573 - RNA, 32 nt, Homo Sapiens
agcauaauuccgaaacaaaacugugacaaucu

SEQ ID NO: 405574 - RNA, 32 nt, Homo Sapiens
acaaacaaacaaaaacuguuaauauauuagcc

SEQ ID NO: 405575 - RNA, 32 nt, Homo Sapiens
aaaugguagaggaaaaggcucgugagccauuu

SEQ ID NO: 405576 - RNA, 32 nt, Homo Sapiens
gauccaaaugagaacagauugguuauugcagg

SEQ ID NO: 405577 - RNA, 32 nt, Homo Sapiens
augccaucucaaccucuuccccgcccguuuua

SEQ ID NO: 405578 - RNA, 30 nt, Homo Sapiens
ugggugcagcaggagcugggucccgagagc

SEQ ID NO: 405579 - RNA, 32 nt, Homo Sapiens
guacacaugauaugcaacaaagggcagcaaga

SEQ ID NO: 405580 - RNA, 32 nt, Homo Sapiens
aauggcuuuccacauccccacccuccccucuc

SEQ ID NO: 405581 - RNA, 32 nt, Homo Sapiens
uggcucuugcagagaguuacagaaauaguuuc

SEQ ID NO: 405582 - RNA, 32 nt, Homo Sapiens
ggccauaccugccuagcccuuuggcuccaucc

SEQ ID NO: 405583 - RNA, 32 nt, Homo Sapiens
cuucuuugaaggaguaaauguguuuuguuccu

SEQ ID NO: 405584 - RNA, 32 nt, Homo Sapiens
aggcccgccccgagggggcagcgagaggagcu

SEQ ID NO: 405585 - RNA, 32 nt, Homo Sapiens
guuauauauuuuauuuaauuuaaaagaaaucu

SEQ ID NO: 405586 - RNA, 32 nt, Homo Sapiens
cacaccacccucggccgucauccuggagacgc

SEQ ID NO: 405587 - RNA, 32 nt, Homo Sapiens
ccugguucuaugguguguggaugugugugcau

SEQ ID NO: 405588 - RNA, 32 nt, Homo Sapiens
gagagaaguuccuuuuacaaaguuauuaaauu

SEQ ID NO: 405589 - RNA, 32 nt, Homo Sapiens
accacuugacacagaagcuggugggcacacag

SEQ ID NO: 405590 - RNA, 32 nt, Homo Sapiens
ugacagggaugaaaagugaaccccucagguca

SEQ ID NO: 405591 - RNA, 32 nt, Homo Sapiens
cccucgucucgcugcccucccgcgccugcaac

SEQ ID NO: 405592 - RNA, 32 nt, Homo Sapiens
cugcuuucugccuccucuuccacacauccugg

SEQ ID NO: 405593 - RNA, 32 nt, Homo Sapiens
ucagcccgggagagggggugggcguguucuuu

SEQ ID NO: 405594 - RNA, 32 nt, Homo Sapiens
gguggcaguugggccuggugaggguuaggacu

SEQ ID NO: 405595 - RNA, 32 nt, Homo Sapiens
augauagcuuuggagacaagcuauguucccgg

SEQ ID NO: 405596 - RNA, 32 nt, Homo Sapiens
cauuaagaauacuguguucuguguuauuguuc

SEQ ID NO: 405597 - RNA, 32 nt, Homo Sapiens
agcacuaaauguuuaaauauguaugaaugcca

SEQ ID NO: 405598 - RNA, 32 nt, Homo Sapiens
uucuuaugguggcccuaccaaugaauacaggu

SEQ ID NO: 405599 - RNA, 32 nt, Homo Sapiens
uacaaauucugauguuaaauagaguaguauuu

SEQ ID NO: 405600 - RNA, 32 nt, Homo Sapiens
uguugucucugcccgguuggaccuccucccuu

SEQ ID NO: 405601 - RNA, 32 nt, Homo Sapiens
ggauaaagcuugggguucauccuccuucccug

SEQ ID NO: 405602 - RNA, 32 nt, Homo Sapiens
gugcaugcuauuauugcugcaauuagaauauu

SEQ ID NO: 405603 - RNA, 32 nt, Homo Sapiens
gcgccucugcccggcugccccuacugggaagu

SEQ ID NO: 405604 - RNA, 32 nt, Homo Sapiens
uggauauguuguucaauuuucuuucugagcca

SEQ ID NO: 405605 - RNA, 32 nt, Homo Sapiens
ccugaacucaccauagagacccaugucagcaa

SEQ ID NO: 405606 - RNA, 32 nt, Homo Sapiens
auagaauguauuacauaacugucacugaagug

SEQ ID NO: 405607 - RNA, 32 nt, Homo Sapiens
gugcgugagccuguguuuguguguguauguuu

SEQ ID NO: 405608 - RNA, 32 nt, Homo Sapiens
ugggaaggaggagaggccugaggguuccccca

SEQ ID NO: 405609 - RNA, 32 nt, Homo Sapiens
gaggaagaaaccucagacagaucgccggcgag

SEQ ID NO: 405610 - RNA, 32 nt, Homo Sapiens
ccuucugccacgugaagacacagugagaagau

SEQ ID NO: 405611 - RNA, 32 nt, Homo Sapiens
ggggaagaccaucauggagagaaggaccacag

SEQ ID NO: 405612 - RNA, 32 nt, Homo Sapiens
aaagaggccagaacccacaggaaaaacuucaa

SEQ ID NO: 405613 - RNA, 32 nt, Homo Sapiens
agccgucagugaaacacuuagagcaguuucug

SEQ ID NO: 405614 - RNA, 32 nt, Homo Sapiens
ugccuguaugauaucaggcacaauuaaugcaa

SEQ ID NO: 405615 - RNA, 32 nt, Homo Sapiens
uugaaaggguuaccuguaaauuucugcccaca

SEQ ID NO: 405616 - RNA, 32 nt, Homo Sapiens
uguacauagauauuguauccugauaaauagau

SEQ ID NO: 405617 - RNA, 32 nt, Homo Sapiens
ucugggucagugauggagagccagguucgucu

SEQ ID NO: 405618 - RNA, 32 nt, Homo Sapiens
uaucccucaucccagacacaggugugccucaa

SEQ ID NO: 405619 - RNA, 32 nt, Homo Sapiens
gugugguucucacagucuccagugacaucaga

SEQ ID NO: 405620 - RNA, 32 nt, Homo Sapiens
gaacagaggagcuuggggcuuccucuccuucg

SEQ ID NO: 405621 - RNA, 31 nt, Homo Sapiens
ccccgcucagccuugcagccccgcgcccgga

SEQ ID NO: 405622 - RNA, 31 nt, Homo Sapiens
augagacgaaagaaaaagucuauuggucagc

SEQ ID NO: 405623 - RNA, 31 nt, Homo Sapiens
cauugugauuuucagaaccacgucagauaua

SEQ ID NO: 405624 - RNA, 32 nt, Homo Sapiens
gaacgacccugcccggcccccuucaccccuuc

SEQ ID NO: 405625 - RNA, 31 nt, Homo Sapiens
cagccuuaaccccagaacucagccaguuucu

SEQ ID NO: 405626 - RNA, 31 nt, Homo Sapiens
aaagguugcaucucccuaggaguccaaugcu

SEQ ID NO: 405627 - RNA, 32 nt, Homo Sapiens
gccaccccaucccuccccuacccaucugucug

SEQ ID NO: 405628 - RNA, 32 nt, Homo Sapiens
aggcgggcagaucaccugaggucaggaguuca

SEQ ID NO: 405629 - RNA, 32 nt, Homo Sapiens
uggucaaacaacauacuaaagaggcgaggcaa

SEQ ID NO: 405630 - RNA, 32 nt, Homo Sapiens
auugaagggagagaaacugaaaaacgcagaaa

SEQ ID NO: 405631 - RNA, 32 nt, Homo Sapiens
cuuugcugucuccaggugccuuuuuauuaauu

SEQ ID NO: 405632 - RNA, 32 nt, Homo Sapiens
aaauuuuguguagcuucuuuuguuauggaaaa

SEQ ID NO: 405633 - RNA, 32 nt, Homo Sapiens
ucaagaccagccugggcaacgugguggugugc

SEQ ID NO: 405634 - RNA, 32 nt, Homo Sapiens
cucaugcuugaagaagcagagggaccaucucg

SEQ ID NO: 405635 - RNA, 32 nt, Homo Sapiens
uaacuuuugucaacuguaguguauacguuguu

SEQ ID NO: 405636 - RNA, 32 nt, Homo Sapiens
cuacccuccgcggacggucuugggucgccugc

SEQ ID NO: 405637 - RNA, 28 nt, Homo Sapiens
aaauaauaauaaauguuauuuggugacu

SEQ ID NO: 405638 - RNA, 32 nt, Homo Sapiens
uaauggagaugucuggacccuuccucacccca

SEQ ID NO: 405639 - RNA, 32 nt, Homo Sapiens
gucuuuaguuuacucagcaucagcuacuaaca

SEQ ID NO: 405640 - RNA, 30 nt, Homo Sapiens
ccuucaggcaggcuggagggauuugccaca

SEQ ID NO: 405641 - RNA, 32 nt, Homo Sapiens
gaguuuccaucccauguugguuugucccaguc

SEQ ID NO: 405642 - RNA, 32 nt, Homo Sapiens
agcugaaaggauuucuugaccuccuugacugc

SEQ ID NO: 405643 - RNA, 32 nt, Homo Sapiens
ccggcgcgcgaccccauccccaucccgguccc

SEQ ID NO: 405644 - RNA, 32 nt, Homo Sapiens
ccuuugugccccacccccuccgcugauugcca

SEQ ID NO: 405645 - RNA, 32 nt, Homo Sapiens
cugggaugcagcgaggcccugccuuccuagca

SEQ ID NO: 405646 - RNA, 32 nt, Homo Sapiens
ucaccacccuccccugucuucucucaaaggga

SEQ ID NO: 405647 - RNA, 32 nt, Homo Sapiens
auucaaaaaugaauguuuuuccaugcauuuac

SEQ ID NO: 405648 - RNA, 32 nt, Homo Sapiens
gaaguacaccccguauucagcacauguugagu

SEQ ID NO: 405649 - RNA, 32 nt, Homo Sapiens
cuggccugcagcucuucccagccccgagagag

SEQ ID NO: 405650 - RNA, 30 nt, Homo Sapiens
cuucgugauaaaagcaugggaaauguaaag

SEQ ID NO: 405651 - RNA, 32 nt, Homo Sapiens
gaaacugcguucucuuuccccagcgcaaccga

SEQ ID NO: 405652 - RNA, 32 nt, Homo Sapiens
accuuccuacuuucccuuuugacauauguagu

SEQ ID NO: 405653 - RNA, 32 nt, Homo Sapiens
gaggggcugugccagccuccgcgcccagcggc

SEQ ID NO: 405654 - RNA, 32 nt, Homo Sapiens
agaauaguugugcagggagggagcacgagaug

SEQ ID NO: 405655 - RNA, 32 nt, Homo Sapiens
cauggugacagaggacaagcagcaugcgugug

SEQ ID NO: 405656 - RNA, 32 nt, Homo Sapiens
uuguuuccaucccacugcccaagcauuggcau

SEQ ID NO: 405657 - RNA, 32 nt, Homo Sapiens
auugguuuuucucuaaaauaugaauuuuauaa

SEQ ID NO: 405658 - RNA, 32 nt, Homo Sapiens
gugcacacugaauuagugaaugcugaaugauu

SEQ ID NO: 405659 - RNA, 32 nt, Homo Sapiens
ucagugcccucauaguguauggcaccagcaga

SEQ ID NO: 405660 - RNA, 32 nt, Homo Sapiens
gugguguaacuguguguuucccuccagcccug

SEQ ID NO: 405661 - RNA, 32 nt, Homo Sapiens
cguuugccgcugccggccccuccucagacucc

SEQ ID NO: 405662 - RNA, 32 nt, Homo Sapiens
ugacacuagccuucucugcaaagcagacugag

SEQ ID NO: 405663 - RNA, 32 nt, Homo Sapiens
cagcgucccgugcgccugccgccccgggacca

SEQ ID NO: 405664 - RNA, 32 nt, Homo Sapiens
augucaaaugucauuguguaugcaugcuuuau

SEQ ID NO: 405665 - RNA, 32 nt, Homo Sapiens
cauguuacuguaaucagucaguuauaaaauca

SEQ ID NO: 405666 - RNA, 32 nt, Homo Sapiens
augauaaucuugaaaucauuuacaauguaauu

SEQ ID NO: 405667 - RNA, 32 nt, Homo Sapiens
agcaagaagggugcaugccaguccuucuccga

SEQ ID NO: 405668 - RNA, 32 nt, Homo Sapiens
aaguggaauggggcggggugggggguggccau

SEQ ID NO: 405669 - RNA, 32 nt, Homo Sapiens
cuccugagcuguuuuuguaaaaugacugcuga

SEQ ID NO: 405670 - RNA, 32 nt, Homo Sapiens
uaguuugcuucuuuccgagagaugucaagucc

SEQ ID NO: 405671 - RNA, 32 nt, Homo Sapiens
aaguauguacauuguucuuuuagacaaaaugu

SEQ ID NO: 405672 - RNA, 32 nt, Homo Sapiens
gaucacuuugccguagaaacuccagcugucac

SEQ ID NO: 405673 - RNA, 32 nt, Homo Sapiens
caacacaggcuaaaacaaaaacaauuuauaga

SEQ ID NO: 405674 - RNA, 32 nt, Homo Sapiens
cugugaacuccauggcugagcuauguaucuug

SEQ ID NO: 405675 - RNA, 32 nt, Homo Sapiens
cugugucucaauucuuuuuuuuuuugcauaua

SEQ ID NO: 405676 - RNA, 32 nt, Homo Sapiens
guccuuccucuccuagccuaaggcgugcaaac

SEQ ID NO: 405677 - RNA, 32 nt, Homo Sapiens
caugugugccuggccgcagggcggggcugggg

SEQ ID NO: 405678 - RNA, 32 nt, Homo Sapiens
ccacccaaccucaccagucaccagccccagac

SEQ ID NO: 405679 - RNA, 32 nt, Homo Sapiens
cagugagcucugcggaaggggucaggcucaac

SEQ ID NO: 405680 - RNA, 32 nt, Homo Sapiens
ccggccacaucuccuccaaacacacacaggac

SEQ ID NO: 405681 - RNA, 31 nt, Homo Sapiens
aagaagaugauaaucacacaaacaagucacu

SEQ ID NO: 405682 - RNA, 32 nt, Homo Sapiens
caacuugagauguaugaaggcuuuuggucucc

SEQ ID NO: 405683 - RNA, 32 nt, Homo Sapiens
uacccuuucuuggucuuaauuuccuuacugau

SEQ ID NO: 405684 - RNA, 32 nt, Homo Sapiens
cccugugugcgcgcccccucugcaauguaugc

SEQ ID NO: 405685 - RNA, 32 nt, Homo Sapiens
cuccgcgcuccccgccugacccggcccagccc

SEQ ID NO: 405686 - RNA, 32 nt, Homo Sapiens
auuagcaaacuuacaaggaauagcuucuuauu

SEQ ID NO: 405687 - RNA, 32 nt, Homo Sapiens
uaucuggaauccauguuguauugcagauaaug

SEQ ID NO: 405688 - RNA, 32 nt, Homo Sapiens
gcugcuaccgcgucugcuggacgcgggagacg

SEQ ID NO: 405689 - RNA, 32 nt, Homo Sapiens
uagugaugucauuuucucccugagcuguaggg

SEQ ID NO: 405690 - RNA, 32 nt, Homo Sapiens
cuauucuguuguuuuucuucaccuacuagccu

SEQ ID NO: 405691 - RNA, 32 nt, Homo Sapiens
ucgcaacgacccgaugaucgaugauccaagca

SEQ ID NO: 405692 - RNA, 32 nt, Homo Sapiens
ggagccggaccgcgcgcagccugaggccgggc

SEQ ID NO: 405693 - RNA, 32 nt, Homo Sapiens
gagacaaguauuuuccuguaguccucauuccu

SEQ ID NO: 405694 - RNA, 32 nt, Homo Sapiens
ugaguagagcaggaaaaguaaacuuuacugaa

SEQ ID NO: 405695 - RNA, 32 nt, Homo Sapiens
cuugggggcacccgcgucgugccuccuggguu

SEQ ID NO: 405696 - RNA, 32 nt, Homo Sapiens
cucugucucaaaaaauaaaauaaaauaaaaua

SEQ ID NO: 405697 - RNA, 32 nt, Homo Sapiens
ggaccaccaaaauaauaaaaggcagcuaaugg

SEQ ID NO: 405698 - RNA, 32 nt, Homo Sapiens
cccuguacaaaguggccugaaugacuguugga

SEQ ID NO: 405699 - RNA, 32 nt, Homo Sapiens
auuaaagccaucucagugaagauaugcgugca

SEQ ID NO: 405700 - RNA, 32 nt, Homo Sapiens
cugggcuucaaaggaaggcuauggaguuugcu

SEQ ID NO: 405701 - RNA, 32 nt, Homo Sapiens
accuguguuccucugcacugggccguggauga

SEQ ID NO: 405702 - RNA, 32 nt, Homo Sapiens
cugaggacugguuuuaaauaggcuuuaaaaua

SEQ ID NO: 405703 - RNA, 32 nt, Homo Sapiens
cugggagaacagagaagcauguuggugagaag

SEQ ID NO: 405704 - RNA, 32 nt, Homo Sapiens
aucuguaucuuaauggccccagcaucugccuc

SEQ ID NO: 405705 - RNA, 32 nt, Homo Sapiens
acccagaucuagugcagggacacacacggggg

SEQ ID NO: 405706 - RNA, 32 nt, Homo Sapiens
uagccacaguucuuccaaauguaaauacuuuu

SEQ ID NO: 405707 - RNA, 32 nt, Homo Sapiens
gccgaggacggggcuccggcccgggauaacca

SEQ ID NO: 405708 - RNA, 32 nt, Homo Sapiens
guaguaaauggcaauucuuugaccucaaccug

SEQ ID NO: 405709 - RNA, 32 nt, Homo Sapiens
uguaaagaugacugcacgacugguaaauuuac

SEQ ID NO: 405710 - RNA, 32 nt, Homo Sapiens
cuaaacagggcacugucuguguccuuccuuga

SEQ ID NO: 405711 - RNA, 32 nt, Homo Sapiens
gcaggagacguuggcuugggccugcuguguug

SEQ ID NO: 405712 - RNA, 32 nt, Homo Sapiens
gggaagccgggcggggccagggggucaaacac

SEQ ID NO: 405713 - RNA, 32 nt, Homo Sapiens
aagccccgcaugcauuagcuauuuauccugau

SEQ ID NO: 405714 - RNA, 32 nt, Homo Sapiens
accuggcagggccagacgcuguaccaucaccc

SEQ ID NO: 405715 - RNA, 32 nt, Homo Sapiens
gcggagccugacgccaggcgcccgcggagcgu

SEQ ID NO: 405716 - RNA, 32 nt, Homo Sapiens
ucaguggccuaaauguagauuaugagaaauac

SEQ ID NO: 405717 - RNA, 32 nt, Homo Sapiens
caugcggccagcugcggggcccugccccaccu

SEQ ID NO: 405718 - RNA, 32 nt, Homo Sapiens
uuuaaagaucuaacugugaaaacauacauacc

SEQ ID NO: 405719 - RNA, 32 nt, Homo Sapiens
cacacacaugcauaugcacacacacacauaug

SEQ ID NO: 405720 - RNA, 32 nt, Homo Sapiens
aaccucugcccccggagcccccagcagugccc

SEQ ID NO: 405721 - RNA, 32 nt, Homo Sapiens
aaugagccaagcaugguggcgggagccuguag

SEQ ID NO: 405722 - RNA, 32 nt, Homo Sapiens
aaggagcagccacgagugucccccgcucccag

SEQ ID NO: 405723 - RNA, 30 nt, Homo Sapiens
uuccugggacucuacacccaucuuaaggug

SEQ ID NO: 405724 - RNA, 32 nt, Homo Sapiens
accccaagacaagagaauuauauuuuauagga

SEQ ID NO: 405725 - RNA, 32 nt, Homo Sapiens
caggaaagaaggggaaaagagauuauuacguc

SEQ ID NO: 405726 - RNA, 32 nt, Homo Sapiens
ugaauccaaaauaguuuugcauuuguuguuua

SEQ ID NO: 405727 - RNA, 32 nt, Homo Sapiens
gaguggagugagaauuucuuuuuuaugaaaag

SEQ ID NO: 405728 - RNA, 32 nt, Homo Sapiens
aguuggacacaggugauuggcuccuggguuuc

SEQ ID NO: 405729 - RNA, 32 nt, Homo Sapiens
gggagcaggcggugcaggagagcgccccgagu

SEQ ID NO: 405730 - RNA, 32 nt, Homo Sapiens
uuguugauuguuaugacugguacacucuggcc

SEQ ID NO: 405731 - RNA, 31 nt, Homo Sapiens
agcaaucuugguagaggauggguuagugggg

SEQ ID NO: 405732 - RNA, 31 nt, Homo Sapiens
gugcugucaugcugccugcuuucuggagcug

SEQ ID NO: 405733 - RNA, 32 nt, Homo Sapiens
cggaaacuccuucacagcggcugcuauguccu

SEQ ID NO: 405734 - RNA, 30 nt, Homo Sapiens
acuggagagaagcccuaugaguguuuacag

SEQ ID NO: 405735 - RNA, 32 nt, Homo Sapiens
aauggacugugcagcgaaaucuguacgguucu

SEQ ID NO: 405736 - RNA, 32 nt, Homo Sapiens
ucaagggccucuugcccucccgaaggccccag

SEQ ID NO: 405737 - RNA, 32 nt, Homo Sapiens
aagaaucagacacuuaaagagguuaagucgcg

SEQ ID NO: 405738 - RNA, 32 nt, Homo Sapiens
aacugcaucgacggacggccgcccagcuacgg

SEQ ID NO: 405739 - RNA, 32 nt, Homo Sapiens
aucagcacaaagacauaauuuaauuccuucua

SEQ ID NO: 405740 - RNA, 32 nt, Homo Sapiens
ccaaggaaaaagauacaagagcagaauaguac

SEQ ID NO: 405741 - RNA, 32 nt, Homo Sapiens
gauucuggauacucugaggccugguuugucag

SEQ ID NO: 405742 - RNA, 32 nt, Homo Sapiens
gacccaccucaccacuauuuuuucuugcaugg

SEQ ID NO: 405743 - RNA, 32 nt, Homo Sapiens
gacuagguaguggcgaaguucuggaagcacau

SEQ ID NO: 405744 - RNA, 32 nt, Homo Sapiens
agucagucacguuccuggacucggggaccucc

SEQ ID NO: 405745 - RNA, 32 nt, Homo Sapiens
auugcuagucgugccaaggagaaacaggaagc

SEQ ID NO: 405746 - RNA, 31 nt, Homo Sapiens
cuucccugcgcuuuucagaccauacucuuua

SEQ ID NO: 405747 - RNA, 32 nt, Homo Sapiens
gacuucuucaacaugcucaucaaguaccaguc

SEQ ID NO: 405748 - RNA, 32 nt, Homo Sapiens
gaauugccuuagagccgaaagagaauguggcg

SEQ ID NO: 405749 - RNA, 32 nt, Homo Sapiens
ugaaguaagccugugaaggaccagcaugggaa

SEQ ID NO: 405750 - RNA, 32 nt, Homo Sapiens
gaguggccugugagcaagagccaggggugucc

SEQ ID NO: 405751 - RNA, 32 nt, Homo Sapiens
aucaucccauucugguucccguucaaguucaa

SEQ ID NO: 405752 - RNA, 32 nt, Homo Sapiens
aaggcacuuaggacgccuuaaauuuguaaaua

SEQ ID NO: 405753 - RNA, 32 nt, Homo Sapiens
agggaaccguccgcagccgccggagccgggag

SEQ ID NO: 405754 - RNA, 32 nt, Homo Sapiens
gccucuuuaauucuccacggugcuaugagaac

SEQ ID NO: 405755 - RNA, 32 nt, Homo Sapiens
aaccacugaaaauuauuuuguuuuaaucccac

SEQ ID NO: 405756 - RNA, 32 nt, Homo Sapiens
ggacaaccugccccuccccagcccuuugcagg

SEQ ID NO: 405757 - RNA, 32 nt, Homo Sapiens
aagccccccaucuccacuuccucccccucgag

SEQ ID NO: 405758 - RNA, 32 nt, Homo Sapiens
caugcuggcugccuccagauaauccuggcucc

SEQ ID NO: 405759 - RNA, 32 nt, Homo Sapiens
gccauggccacuaggggcgcgcggcacccgga

SEQ ID NO: 405760 - RNA, 32 nt, Homo Sapiens
gagcugcccuccccaccagggccgcugugucc

SEQ ID NO: 405761 - RNA, 32 nt, Homo Sapiens
ugcugacuucuuccuuucacugcuguuuauaa

SEQ ID NO: 405762 - RNA, 32 nt, Homo Sapiens
ccuccucaccccagcccuccaccucucgggga

SEQ ID NO: 405763 - RNA, 32 nt, Homo Sapiens
uuaaauauacugucacacugaagcacugguug

SEQ ID NO: 405764 - RNA, 32 nt, Homo Sapiens
ugaggguuuucgaccugggauguacgucugcg

SEQ ID NO: 405765 - RNA, 32 nt, Homo Sapiens
gggguuucuccuuccuauguccugccccugcu

SEQ ID NO: 405766 - RNA, 27 nt, Homo Sapiens
cgaggugccuucuucagggccugguug

SEQ ID NO: 405767 - RNA, 32 nt, Homo Sapiens
aaauaaaggggugauguaaacacacauuguug

SEQ ID NO: 405768 - RNA, 32 nt, Homo Sapiens
caacccuguggaccacgacagggcagaaggag

SEQ ID NO: 405769 - RNA, 32 nt, Homo Sapiens
acgcaccgugcagcaauacucgcagcguggag

SEQ ID NO: 405770 - RNA, 32 nt, Homo Sapiens
gggcucaggcccugggucugccccgcggugug

SEQ ID NO: 405771 - RNA, 32 nt, Homo Sapiens
agaagaagaugaugaugaugaugaagaggagg

SEQ ID NO: 405772 - RNA, 32 nt, Homo Sapiens
uggacuuccaugaauugcugacaaauuuuucu

SEQ ID NO: 405773 - RNA, 32 nt, Homo Sapiens
ggaaaugggagcaaacagcacugggagauagg

SEQ ID NO: 405774 - RNA, 32 nt, Homo Sapiens
ggcgcaggcucccgcgugcucgccggcugugu

SEQ ID NO: 405775 - RNA, 32 nt, Homo Sapiens
cuuucucuaacaaccugugaauauaggagaga

SEQ ID NO: 405776 - RNA, 32 nt, Homo Sapiens
uuagaaaaaucuagggauucuaauggacuaca

SEQ ID NO: 405777 - RNA, 32 nt, Homo Sapiens
ccauucaguuccucagcauuccaggucggcgg

SEQ ID NO: 405778 - RNA, 32 nt, Homo Sapiens
ugcccccugccaguucacuggggccucucagg

SEQ ID NO: 405779 - RNA, 32 nt, Homo Sapiens
aaugugccacacccagacacgcacagaaucag

SEQ ID NO: 405780 - RNA, 32 nt, Homo Sapiens
uguauauguucaguauuaauucuuuuuuuuua

SEQ ID NO: 405781 - RNA, 32 nt, Homo Sapiens
ggauuucuccaaaacuaacugaauuuaagcuu

SEQ ID NO: 405782 - RNA, 32 nt, Homo Sapiens
uccuuucagucuccacggacuggccccucguc

SEQ ID NO: 405783 - RNA, 32 nt, Homo Sapiens
ugugagauaaaacucuccuuuuccuuaccaua

SEQ ID NO: 405784 - RNA, 32 nt, Homo Sapiens
agcagccgcugccgcuuuggcuugcucgggac

SEQ ID NO: 405785 - RNA, 32 nt, Homo Sapiens
ugggagcuggaguccacugggguggccugacu

SEQ ID NO: 405786 - RNA, 32 nt, Homo Sapiens
uuuuucuuuauuaagcuucucacugagaagcc

SEQ ID NO: 405787 - RNA, 32 nt, Homo Sapiens
auccugacuuccuggaggaagcucaugaaugg

SEQ ID NO: 405788 - RNA, 32 nt, Homo Sapiens
agccuccguugaugcugccgcggcugccgcgc

SEQ ID NO: 405789 - RNA, 32 nt, Homo Sapiens
uccauaucuuuguuuuaaccaguacuucuaag

SEQ ID NO: 405790 - RNA, 32 nt, Homo Sapiens
cuguggaguuugacauugaauguaucuauuua

SEQ ID NO: 405791 - RNA, 32 nt, Homo Sapiens
aagggcuggacacagagcugcagaguccugaa

SEQ ID NO: 405792 - RNA, 32 nt, Homo Sapiens
aucuuuggcgauucuccacuggagcggaaggg

SEQ ID NO: 405793 - RNA, 32 nt, Homo Sapiens
aaugacaguuauugaacuaucacaaaacuauu

SEQ ID NO: 405794 - RNA, 32 nt, Homo Sapiens
ucugugagugggguggagcaaagggaaccaau

SEQ ID NO: 405795 - RNA, 32 nt, Homo Sapiens
gccuggccauguggcccuccaguguaugagag

SEQ ID NO: 405796 - RNA, 32 nt, Homo Sapiens
cuccacugacauguauaaucccaugugguucu

SEQ ID NO: 405797 - RNA, 32 nt, Homo Sapiens
ugucacagauaaaaguuuacaacucugaugcu

SEQ ID NO: 405798 - RNA, 32 nt, Homo Sapiens
accgggcagcggcaccauccgggugcucggcu

SEQ ID NO: 405799 - RNA, 30 nt, Homo Sapiens
ggccagucuccccccucccaucuugagguc

SEQ ID NO: 405800 - RNA, 32 nt, Homo Sapiens
aaaacuuuuaaaaaauacauuuagcacaugug

SEQ ID NO: 405801 - RNA, 32 nt, Homo Sapiens
uauuuauuacuuccucauaccacauggcuuuu

SEQ ID NO: 405802 - RNA, 32 nt, Homo Sapiens
uauggccagugcuugaguucuuucuccuucuc

SEQ ID NO: 405803 - RNA, 32 nt, Homo Sapiens
ggagagacgugucagacgauggccgugugcaa

SEQ ID NO: 405804 - RNA, 32 nt, Homo Sapiens
aucucuggaaaacaucauuaucccauuccccg

SEQ ID NO: 405805 - RNA, 32 nt, Homo Sapiens
cagagucugcaccugccgccugcaccuccguu

SEQ ID NO: 405806 - RNA, 32 nt, Homo Sapiens
cccaccugacuucaucuacgccucggcaccac

SEQ ID NO: 405807 - RNA, 32 nt, Homo Sapiens
uuucgaggccuggccggguugggccuacuucu

SEQ ID NO: 405808 - RNA, 32 nt, Homo Sapiens
gccccaccuggaggacacgcugcugcagagga

SEQ ID NO: 405809 - RNA, 32 nt, Homo Sapiens
cuggaccaguggugccuuggagggauaagcca

SEQ ID NO: 405810 - RNA, 32 nt, Homo Sapiens
uggugcacaccuguggccccagcuucucagua

SEQ ID NO: 405811 - RNA, 30 nt, Homo Sapiens
aaccugggagguggagauugcagugaguca

SEQ ID NO: 405812 - RNA, 32 nt, Homo Sapiens
cacacacaaacacacagauacaccuuuugaua

SEQ ID NO: 405813 - RNA, 32 nt, Homo Sapiens
aaguuucuguaaauaaccuggguguggacuuu

SEQ ID NO: 405814 - RNA, 32 nt, Homo Sapiens
gucugugaacagagagacccuuguggguccau

SEQ ID NO: 405815 - RNA, 32 nt, Homo Sapiens
gccaaucccucaugaguugaagcauuaauaga

SEQ ID NO: 405816 - RNA, 32 nt, Homo Sapiens
guauauauguauauauuaugauguuggcugac

SEQ ID NO: 405817 - RNA, 32 nt, Homo Sapiens
aaaucauuuugagagaggagaauagggaauua

SEQ ID NO: 405818 - RNA, 30 nt, Homo Sapiens
aaccugggagguggagguugcagugggcua

SEQ ID NO: 405819 - RNA, 32 nt, Homo Sapiens
cagagguguuccuggggagauggcggaacagc

SEQ ID NO: 405820 - RNA, 30 nt, Homo Sapiens
agcccgggagguggagguugcagugagcca

SEQ ID NO: 405821 - RNA, 32 nt, Homo Sapiens
auuuuaaaauguuuuguucauauucuuguuuu

SEQ ID NO: 405822 - RNA, 32 nt, Homo Sapiens
ucaucaugcccauuuucugcuguuucugaugg

SEQ ID NO: 405823 - RNA, 32 nt, Homo Sapiens
agaagacggaagcuggaguuggacaugguuca

SEQ ID NO: 405824 - RNA, 32 nt, Homo Sapiens
ccuccccagucauguccaacccagaacucugu

SEQ ID NO: 405825 - RNA, 32 nt, Homo Sapiens
acaagaagcgugagacgccaccauuccuggaa

SEQ ID NO: 405826 - RNA, 32 nt, Homo Sapiens
accagccugaccaacauagugaaaccccaucu

SEQ ID NO: 405827 - RNA, 32 nt, Homo Sapiens
ccuucucacagagggucaucauuauuuccaaa

SEQ ID NO: 405828 - RNA, 32 nt, Homo Sapiens
augaagaauauuaaaauuaggggcguccacuc

SEQ ID NO: 405829 - RNA, 32 nt, Homo Sapiens
cauucuuuccauaacaaucuaaucaaaacugg

SEQ ID NO: 405830 - RNA, 32 nt, Homo Sapiens
caaagugccccaaaacagaagcacaaguaaau

SEQ ID NO: 405831 - RNA, 32 nt, Homo Sapiens
gacuagcagcugccucccacucccaaacacua

SEQ ID NO: 405832 - RNA, 32 nt, Homo Sapiens
uguguuugggcaauuugcucaauaucagagua

SEQ ID NO: 405833 - RNA, 32 nt, Homo Sapiens
gaggagcagcuaaaccagcugaccgaggacaa

SEQ ID NO: 405834 - RNA, 32 nt, Homo Sapiens
auggcuuaguauucccuuccaagcuccgaagu

SEQ ID NO: 405835 - RNA, 32 nt, Homo Sapiens
uuugugcuggaacaaugaccagcugccgcugg

SEQ ID NO: 405836 - RNA, 32 nt, Homo Sapiens
uccuaaccaccgggcgcaccaucuuuccuuca

SEQ ID NO: 405837 - RNA, 32 nt, Homo Sapiens
aauuggaagcaggaacaugaaaaaauacuggc

SEQ ID NO: 405838 - RNA, 32 nt, Homo Sapiens
acaaaauuuuuccauaaacuuaucagaagacu

SEQ ID NO: 405839 - RNA, 32 nt, Homo Sapiens
ccggcugccgucugcgcccccgucgaccccgc

SEQ ID NO: 405840 - RNA, 32 nt, Homo Sapiens
ggccagagugcaguggugugaucauagcucac

SEQ ID NO: 405841 - RNA, 32 nt, Homo Sapiens
acggccaaaucccaccaaaaccaagacaguga

SEQ ID NO: 405842 - RNA, 32 nt, Homo Sapiens
caucgcuacuaaaaauauaaaaaauuacccgg

SEQ ID NO: 405843 - RNA, 32 nt, Homo Sapiens
ugauacaagaggucaaugacuuugaaaauaaa

SEQ ID NO: 405844 - RNA, 32 nt, Homo Sapiens
cccuuuuaggaacacaauguuguaccuuaucc

SEQ ID NO: 405845 - RNA, 32 nt, Homo Sapiens
aucuguuaucugaaucaccaaaauagugccuu

SEQ ID NO: 405846 - RNA, 32 nt, Homo Sapiens
cuuaggaaucuuucuuaggaaaacagucagag

SEQ ID NO: 405847 - RNA, 32 nt, Homo Sapiens
agucuuagagauuggaacauacggguuuguau

SEQ ID NO: 405848 - RNA, 32 nt, Homo Sapiens
cuggccggccccgcgcugcucuccuaagaccc

SEQ ID NO: 405849 - RNA, 32 nt, Homo Sapiens
aauaggguuuuguuuuuauuguuuccuuuuuu

SEQ ID NO: 405850 - RNA, 32 nt, Homo Sapiens
cgggggacgaguccggagcagcagccagaaag

SEQ ID NO: 405851 - RNA, 32 nt, Homo Sapiens
cugauccugguuguauuucuguuuccugcuuu

SEQ ID NO: 405852 - RNA, 32 nt, Homo Sapiens
ccgggucccucaggcggccacccagugggcac

SEQ ID NO: 405853 - RNA, 32 nt, Homo Sapiens
cacccuguuucaucagugaccuuuucuucacg

SEQ ID NO: 405854 - RNA, 32 nt, Homo Sapiens
cauucuggaaauguaucccauagaagcugaug

SEQ ID NO: 405855 - RNA, 32 nt, Homo Sapiens
uaccucuacccucuccaacuucuccuggucuu

SEQ ID NO: 405856 - RNA, 32 nt, Homo Sapiens
gugcggugguggccgaccccaugcagccgcca

SEQ ID NO: 405857 - RNA, 32 nt, Homo Sapiens
uaauguuuuuaaaguuucacugcaaaagucua

SEQ ID NO: 405858 - RNA, 32 nt, Homo Sapiens
gcuccccgcgucccaggcgccggcgccuggag

SEQ ID NO: 405859 - RNA, 32 nt, Homo Sapiens
ggaugcccacuuuaguguccuauguacacacc

SEQ ID NO: 405860 - RNA, 32 nt, Homo Sapiens
uugcuuucuuguaguauccuuucacuucuuaa

SEQ ID NO: 405861 - RNA, 32 nt, Homo Sapiens
agaaaugugauguaacugauguaaccauugac

SEQ ID NO: 405862 - RNA, 32 nt, Homo Sapiens
cuggaaggaaaguuagacguaacuucuaauuu

SEQ ID NO: 405863 - RNA, 32 nt, Homo Sapiens
acacugguugauaaagggaagcugcaggacca

SEQ ID NO: 405864 - RNA, 32 nt, Homo Sapiens
ugacuccuaagaugaaugaaguguauaacugu

SEQ ID NO: 405865 - RNA, 32 nt, Homo Sapiens
ucuuuucggaagaacugguucuguggaauuug

SEQ ID NO: 405866 - RNA, 32 nt, Homo Sapiens
aggaggaacaacaucaaagggaacucucucua

SEQ ID NO: 405867 - RNA, 32 nt, Homo Sapiens
gccaagagaaaguuaaaagaauauuggcagag

SEQ ID NO: 405868 - RNA, 32 nt, Homo Sapiens
acucggagcuggagcagcagcugcuggagaga

SEQ ID NO: 405869 - RNA, 32 nt, Homo Sapiens
agguuugggaauccugguuagauuuauaauuu

SEQ ID NO: 405870 - RNA, 32 nt, Homo Sapiens
caugugccugaaaugacauaugcaagguucuc

SEQ ID NO: 405871 - RNA, 32 nt, Homo Sapiens
caggcuggagggcaguggcaggaucucaguuc

SEQ ID NO: 405872 - RNA, 31 nt, Homo Sapiens
uugcaaucagauuggcugggauaugucugcc

SEQ ID NO: 405873 - RNA, 32 nt, Homo Sapiens
uccuuuguauauaaaugaaaaauaccauucau

SEQ ID NO: 405874 - RNA, 32 nt, Homo Sapiens
ccuucaggccccacagugcagcuucuccaggg

SEQ ID NO: 405875 - RNA, 32 nt, Homo Sapiens
augauuaggucuuuaauaguguugaguggcac

SEQ ID NO: 405876 - RNA, 32 nt, Homo Sapiens
ccgcugccccgucugcuccucuaggcuggccc

SEQ ID NO: 405877 - RNA, 32 nt, Homo Sapiens
uuacaauuuuaaaauacaauugagauuccauu

SEQ ID NO: 405878 - RNA, 32 nt, Homo Sapiens
gguugcugccagcucgacuggaggccugcuuc

SEQ ID NO: 405879 - RNA, 29 nt, Homo Sapiens
ugcucugagaaggugguuauuuauacaaa

SEQ ID NO: 405880 - RNA, 32 nt, Homo Sapiens
ccuugccccuaaccucagcccgagggucucca

SEQ ID NO: 405881 - RNA, 32 nt, Homo Sapiens
guuuuaacaacaaaagaguuauugaaaugcau

SEQ ID NO: 405882 - RNA, 32 nt, Homo Sapiens
guagccaacacuguuaaaucugcauaaugggu

SEQ ID NO: 405883 - RNA, 32 nt, Homo Sapiens
ccagagugguggcuguagaauacuuagaaugu

SEQ ID NO: 405884 - RNA, 32 nt, Homo Sapiens
cacugaggaacucacaauuccacacauacaag

SEQ ID NO: 405885 - RNA, 32 nt, Homo Sapiens
gccaagaaaaaguuaaaagaauauuggcagaa

SEQ ID NO: 405886 - RNA, 32 nt, Homo Sapiens
accuuuuggcuauugugacuagugguguugca

SEQ ID NO: 405887 - RNA, 32 nt, Homo Sapiens
aaaucaggggagacucagcacugcgcgcggaa

SEQ ID NO: 405888 - RNA, 31 nt, Homo Sapiens
gacgggguuucacuguguuagccaggauggu

SEQ ID NO: 405889 - RNA, 32 nt, Homo Sapiens
ugggcagggaaggcucugggggucggagacac

SEQ ID NO: 405890 - RNA, 32 nt, Homo Sapiens
acuguaagacauuaguaacauaauaaauuaaa

SEQ ID NO: 405891 - RNA, 32 nt, Homo Sapiens
uaaaucauuucugaggcacaauuaaauauauu

SEQ ID NO: 405892 - RNA, 32 nt, Homo Sapiens
gcagccagccggccgccucccgcgcccaagcg

SEQ ID NO: 405893 - RNA, 32 nt, Homo Sapiens
cucuuccucccggcugcaucuccagggcggac

SEQ ID NO: 405894 - RNA, 32 nt, Homo Sapiens
agcacagaaaaauuacccauuuaauuuauaau

SEQ ID NO: 405895 - RNA, 31 nt, Homo Sapiens
aguuggguuuucuccauucaggauucuguuc

SEQ ID NO: 405896 - RNA, 32 nt, Homo Sapiens
cagcagauccugaagaucuucguggacaaucu

SEQ ID NO: 405897 - RNA, 32 nt, Homo Sapiens
cugcuaaagaacucuucucucugggggcagag

SEQ ID NO: 405898 - RNA, 32 nt, Homo Sapiens
aacccugagagaauccagcagauuauuaaaag

SEQ ID NO: 405899 - RNA, 32 nt, Homo Sapiens
ugaaaacuuaggaagaagguauuuugcaauaa

SEQ ID NO: 405900 - RNA, 32 nt, Homo Sapiens
uuguuuuguuuuucuuuuuuaauuagauaauc

SEQ ID NO: 405901 - RNA, 32 nt, Homo Sapiens
acaucucagcugugucccauccccacugccug

SEQ ID NO: 405902 - RNA, 32 nt, Homo Sapiens
gaugcucuguagaaaaaugaaauggugaaaug

SEQ ID NO: 405903 - RNA, 32 nt, Homo Sapiens
ggaggcugagggaggagaauggugugaacccg

SEQ ID NO: 405904 - RNA, 32 nt, Homo Sapiens
uagcgccgcgcgcagagcacacgcucgcgcuc

SEQ ID NO: 405905 - RNA, 32 nt, Homo Sapiens
ccaccaugaagauggguuaagagucucaaggu

SEQ ID NO: 405906 - RNA, 32 nt, Homo Sapiens
ccauuccauucgaaaagcacuuugaaaaauug

SEQ ID NO: 405907 - RNA, 32 nt, Homo Sapiens
ccuuacuuaaaaguuuuuuaaacuacuagagu

SEQ ID NO: 405908 - RNA, 32 nt, Homo Sapiens
agaacaaagcauccuucauuugagaauaaguu

SEQ ID NO: 405909 - RNA, 32 nt, Homo Sapiens
caggcucacaagagccagacaggcucccacag

SEQ ID NO: 405910 - RNA, 32 nt, Homo Sapiens
cuauccuaccccacccgcuccuugaagggccc

SEQ ID NO: 405911 - RNA, 32 nt, Homo Sapiens
caucgcaccgugcuguaaauguggcagacgca

SEQ ID NO: 405912 - RNA, 32 nt, Homo Sapiens
cuccccuccccuccccccucccaccuguggga

SEQ ID NO: 405913 - RNA, 32 nt, Homo Sapiens
ugcugauccaaauauuaccgaugucuauggca

SEQ ID NO: 405914 - RNA, 32 nt, Homo Sapiens
acgggauaagggaacuuuuucgcuucaccacu

SEQ ID NO: 405915 - RNA, 32 nt, Homo Sapiens
cugaaguccuaucacugccgcucugccccucc

SEQ ID NO: 405916 - RNA, 32 nt, Homo Sapiens
gucucccagggaguccggggcgcacggcaccg

SEQ ID NO: 405917 - RNA, 32 nt, Homo Sapiens
uucuaacuuuaauaaacugcgacugaacgugg

SEQ ID NO: 405918 - RNA, 32 nt, Homo Sapiens
cuagccucccagccuacaucuuucucccaugc

SEQ ID NO: 405919 - RNA, 32 nt, Homo Sapiens
ggaauaacuguaggacuucuguuuccugguaa

SEQ ID NO: 405920 - RNA, 32 nt, Homo Sapiens
gccaaguuggguccuauaggaccugguacuau

SEQ ID NO: 405921 - RNA, 32 nt, Homo Sapiens
uuaaagagaaaguacugauuaucucccaaaug

SEQ ID NO: 405922 - RNA, 28 nt, Homo Sapiens
acauuuuauguaauuauguguuuggacu

SEQ ID NO: 405923 - RNA, 32 nt, Homo Sapiens
aaucugggauaaagguuuugguauuugcccac

SEQ ID NO: 405924 - RNA, 32 nt, Homo Sapiens
ccgccucucugugggccucucuccaggaccac

SEQ ID NO: 405925 - RNA, 32 nt, Homo Sapiens
caccacuguuauauuaccuucuccaggaaccc

SEQ ID NO: 405926 - RNA, 32 nt, Homo Sapiens
aaaaucccaaacaaaauccuguucucccuagc

SEQ ID NO: 405927 - RNA, 32 nt, Homo Sapiens
cucuuaugugccaaguuuuucuuuaagcaaug

SEQ ID NO: 405928 - RNA, 32 nt, Homo Sapiens
uuauugcugaagcucccuauaauccugaaaug

SEQ ID NO: 405929 - RNA, 30 nt, Homo Sapiens
gcaaguagaauaguuucugagucuguguug

SEQ ID NO: 405930 - RNA, 32 nt, Homo Sapiens
ccuugggucccuccaagacucccuggggccca

SEQ ID NO: 405931 - RNA, 32 nt, Homo Sapiens
uaucaccgccgggacuucugguaaggcggcug

SEQ ID NO: 405932 - RNA, 32 nt, Homo Sapiens
gggcagucaaggaauaaacuacaguguaaaca

SEQ ID NO: 405933 - RNA, 32 nt, Homo Sapiens
gaaccaaaggauuugacugcuaauauuuuauu

SEQ ID NO: 405934 - RNA, 32 nt, Homo Sapiens
uuguguuuuuaaguugguuuuacaauucuuuc

SEQ ID NO: 405935 - RNA, 32 nt, Homo Sapiens
aauauuauaguauaugauauuaccaaagagcc

SEQ ID NO: 405936 - RNA, 32 nt, Homo Sapiens
uuaaaauuaucagagcacuuucauguauuuuu

SEQ ID NO: 405937 - RNA, 32 nt, Homo Sapiens
auugcgcucccuccuucuguagaggccgccug

SEQ ID NO: 405938 - RNA, 32 nt, Homo Sapiens
cagauaaaggacccagaucauuucagagcucc

SEQ ID NO: 405939 - RNA, 32 nt, Homo Sapiens
gcuguuucuaggaucagaaacucaagagaggc

SEQ ID NO: 405940 - RNA, 32 nt, Homo Sapiens
acuuccgcccucgcgggacuggcuagggcguu

SEQ ID NO: 405941 - RNA, 32 nt, Homo Sapiens
cuccuggcaccgccagcugcuacuuggcccuc

SEQ ID NO: 405942 - RNA, 32 nt, Homo Sapiens
gugucucugccuugagucaucuauucaagcac

SEQ ID NO: 405943 - RNA, 32 nt, Homo Sapiens
gccaugacggugccgguccgcggcuucucgcu

SEQ ID NO: 405944 - RNA, 32 nt, Homo Sapiens
gaggugauuggcaacaggaacugaagcuuaaa

SEQ ID NO: 405945 - RNA, 32 nt, Homo Sapiens
ucaggucuccucaggacgauggaggccuuaua

SEQ ID NO: 405946 - RNA, 32 nt, Homo Sapiens
cuggccccgggcagggugggugcggagcggcu

SEQ ID NO: 405947 - RNA, 32 nt, Homo Sapiens
cugccuuggucuugcuuggggcguuccagggg

SEQ ID NO: 405948 - RNA, 32 nt, Homo Sapiens
agcuccgccucccggguucacggcauucuccc

SEQ ID NO: 405949 - RNA, 32 nt, Homo Sapiens
gcgacagcagugcuucucccugugcugaggua

SEQ ID NO: 405950 - RNA, 32 nt, Homo Sapiens
ucuauuuuuuaaaguaauguuuuuucuuauga

SEQ ID NO: 405951 - RNA, 32 nt, Homo Sapiens
acagccuuuucuuuccucuucucuaucagagg

SEQ ID NO: 405952 - RNA, 32 nt, Homo Sapiens
cuccacauucccaaaaaaucccaggaacuccu

SEQ ID NO: 405953 - RNA, 32 nt, Homo Sapiens
ccgucaaucuguguuaacugcauaggaggcuc

SEQ ID NO: 405954 - RNA, 32 nt, Homo Sapiens
ggaaugcggugcgggcggggguccgggagaag

SEQ ID NO: 405955 - RNA, 32 nt, Homo Sapiens
ccggaccgcugagacucggggcacggugaagc

SEQ ID NO: 405956 - RNA, 32 nt, Homo Sapiens
gcccgcggggcaagcgggaggugccuaggccu

SEQ ID NO: 405957 - RNA, 32 nt, Homo Sapiens
uccgcuccguggacuggaaagcuguuccgcag

SEQ ID NO: 405958 - RNA, 32 nt, Homo Sapiens
aggguugugagucccggcccagccccuccacc

SEQ ID NO: 405959 - RNA, 32 nt, Homo Sapiens
gcuguuugaucucuaaggaacuccuguugcua

SEQ ID NO: 405960 - RNA, 32 nt, Homo Sapiens
uuugcuuggggaugugcuuggagaggcagaua

SEQ ID NO: 405961 - RNA, 32 nt, Homo Sapiens
uauuuaugcuaaaauauguaaauuacacuaua

SEQ ID NO: 405962 - RNA, 32 nt, Homo Sapiens
auuauaaccaaaacagauguauggaggugaca

SEQ ID NO: 405963 - RNA, 32 nt, Homo Sapiens
aguuagaaagcucucaaaaguaccugguauuu

SEQ ID NO: 405964 - RNA, 32 nt, Homo Sapiens
uuacuuauuuuugacaguguugaaaauguuca

SEQ ID NO: 405965 - RNA, 32 nt, Homo Sapiens
auacugcagucguaucuccggaaagaguccug

SEQ ID NO: 405966 - RNA, 32 nt, Homo Sapiens
auuucccugccagaggccaugcagcugcuuca

SEQ ID NO: 405967 - RNA, 32 nt, Homo Sapiens
ugcauuagaguaugaauuuagcauugggaaaa

SEQ ID NO: 405968 - RNA, 32 nt, Homo Sapiens
uccuauacuuccaugggacucccuauggcuga

SEQ ID NO: 405969 - RNA, 32 nt, Homo Sapiens
gugaagccuauugccugagaucuugcaguugg

SEQ ID NO: 405970 - RNA, 32 nt, Homo Sapiens
uagcucccugugccuggcaucagagggaaggg

SEQ ID NO: 405971 - RNA, 32 nt, Homo Sapiens
gaccuuggaaggggcugcucccaggccugggg

SEQ ID NO: 405972 - RNA, 32 nt, Homo Sapiens
gcuucaacaauucaacgcuguucuuucugaaa

SEQ ID NO: 405973 - RNA, 32 nt, Homo Sapiens
agaauugucauaauuuucccaaggcugcccag

SEQ ID NO: 405974 - RNA, 32 nt, Homo Sapiens
uuaacaguauuuuuaaccuuuuucucuaucug

SEQ ID NO: 405975 - RNA, 32 nt, Homo Sapiens
uccgggugcgaacaaugcugacugauagcgga

SEQ ID NO: 405976 - RNA, 32 nt, Homo Sapiens
ccgugugcagucgccccgcgccccgcgcgacc

SEQ ID NO: 405977 - RNA, 32 nt, Homo Sapiens
agugcccuuaggaugccgcaugggaaaaaucg

SEQ ID NO: 405978 - RNA, 32 nt, Homo Sapiens
uacuuaaaucagaggaaggauuuuauaaagau

SEQ ID NO: 405979 - RNA, 32 nt, Homo Sapiens
cauccguugcagugacaucauccagggagaca

SEQ ID NO: 405980 - RNA, 32 nt, Homo Sapiens
ggcaguuguuuuaaguuuuaaaauacacagag

SEQ ID NO: 405981 - RNA, 32 nt, Homo Sapiens
uuuuuggaaaauuuaagaaacucuccaggcuc

SEQ ID NO: 405982 - RNA, 32 nt, Homo Sapiens
uugccaguccuugaagaauggguucugugugu

SEQ ID NO: 405983 - RNA, 32 nt, Homo Sapiens
aauaaaugucauuucaugaaaucuuuggugau

SEQ ID NO: 405984 - RNA, 32 nt, Homo Sapiens
aaggugggugcacacugcaugcuugggggugc

SEQ ID NO: 405985 - RNA, 32 nt, Homo Sapiens
uucucaguggugcaggauguuggcuuggggca

SEQ ID NO: 405986 - RNA, 32 nt, Homo Sapiens
cugcagaucauuuaagaaguaacaggccgggc

SEQ ID NO: 405987 - RNA, 32 nt, Homo Sapiens
aauuaaaaaauauuuccuagggcuguaguuau

SEQ ID NO: 405988 - RNA, 32 nt, Homo Sapiens
gaggcugcugcugaguggaccuugacuuccuc

SEQ ID NO: 405989 - RNA, 32 nt, Homo Sapiens
acgucugcaaggaaacccuaggaccauggaua

SEQ ID NO: 405990 - RNA, 32 nt, Homo Sapiens
uuuagaugagugaugcauaaaaaggaaugugg

SEQ ID NO: 405991 - RNA, 32 nt, Homo Sapiens
gcccacuggccagggagggcgccgcgcggagg

SEQ ID NO: 405992 - RNA, 32 nt, Homo Sapiens
agcccgcuuaugcguaugugcacggggccgcc

SEQ ID NO: 405993 - RNA, 32 nt, Homo Sapiens
gagcgcgauggcgggggcggcgggacucacgg

SEQ ID NO: 405994 - RNA, 32 nt, Homo Sapiens
ccagcucucuacagggccacauacucuucugg

SEQ ID NO: 405995 - RNA, 32 nt, Homo Sapiens
ccuugguccccauuaugggaugcauuaggacu

SEQ ID NO: 405996 - RNA, 32 nt, Homo Sapiens
accuucugaccaaagcucucugaaucuugggg

SEQ ID NO: 405997 - RNA, 32 nt, Homo Sapiens
uucagaauguaucucuccaagaugagagcuca

SEQ ID NO: 405998 - RNA, 32 nt, Homo Sapiens
cugugaccuuugugaccaacuccaccuacgca

SEQ ID NO: 405999 - RNA, 30 nt, Homo Sapiens
ucaagugaguauccugccuaagcuuccugu

SEQ ID NO: 406000 - RNA, 32 nt, Homo Sapiens
auggacacuuugaaauguguuucuguauaaag

SEQ ID NO: 406001 - RNA, 32 nt, Homo Sapiens
gcaggacccagcuucccacuugccacucuccu

SEQ ID NO: 406002 - RNA, 32 nt, Homo Sapiens
gggccuugccagcaaagcccagggccuuuacu

SEQ ID NO: 406003 - RNA, 32 nt, Homo Sapiens
cuuccuggauauuugggggugacucgccaugc

SEQ ID NO: 406004 - RNA, 32 nt, Homo Sapiens
aaauuaauaaauuuauauaaauucuauuuaaa

SEQ ID NO: 406005 - RNA, 32 nt, Homo Sapiens
uaauuuuauuuuuauuuuuguagagacaggag

SEQ ID NO: 406006 - RNA, 32 nt, Homo Sapiens
aauauuuauauggcuuuuuuucuucgacaaaa

SEQ ID NO: 406007 - RNA, 32 nt, Homo Sapiens
ggccuuuuccuaggugauacaaguaaaauaau

SEQ ID NO: 406008 - RNA, 32 nt, Homo Sapiens
cagggcuaagcaugcauguuaacaggguauau

SEQ ID NO: 406009 - RNA, 32 nt, Homo Sapiens
uuaagaauuuaaaacaccucuuucuaauaaug

SEQ ID NO: 406010 - RNA, 32 nt, Homo Sapiens
aaagacuuuuucugucgacgccaaaugcccgu

SEQ ID NO: 406011 - RNA, 32 nt, Homo Sapiens
caaacgacuuuucuccucgccuccucgccccg

SEQ ID NO: 406012 - RNA, 32 nt, Homo Sapiens
aauuaauauaaaauaaagaauggggcuggaaa

SEQ ID NO: 406013 - RNA, 32 nt, Homo Sapiens
cauuguuaauucaaauaagcugauuuuaauga

SEQ ID NO: 406014 - RNA, 32 nt, Homo Sapiens
guguguuucuuuucuuuuuuuucuuuuuguuu

SEQ ID NO: 406015 - RNA, 32 nt, Homo Sapiens
caccaaacacacaggcaugaaauacacucaug

SEQ ID NO: 406016 - RNA, 32 nt, Homo Sapiens
gggggcugacuucccugccaucucucuccaaa

SEQ ID NO: 406017 - RNA, 32 nt, Homo Sapiens
caugcacccacugacaagagaccuccagcugc

SEQ ID NO: 406018 - RNA, 32 nt, Homo Sapiens
aagcuggaccucugcuggaaacagcaggaaug

SEQ ID NO: 406019 - RNA, 32 nt, Homo Sapiens
cuggcucugccucuccuuguuggcagagauca

SEQ ID NO: 406020 - RNA, 32 nt, Homo Sapiens
agaccaagcaaaugcacucugcuuuuugcugc

SEQ ID NO: 406021 - RNA, 32 nt, Homo Sapiens
agucuucgggagaggaggaggaguaggccgcc

SEQ ID NO: 406022 - RNA, 32 nt, Homo Sapiens
caagcggacagaggggccauggguuguaggau

SEQ ID NO: 406023 - RNA, 32 nt, Homo Sapiens
auguguccguauauuucuguaccugcagugua

SEQ ID NO: 406024 - RNA, 32 nt, Homo Sapiens
gggcggcgagcauggcggcagcggcugcaggc

SEQ ID NO: 406025 - RNA, 32 nt, Homo Sapiens
acccagcccuggaaacggggccccagacgcca

SEQ ID NO: 406026 - RNA, 32 nt, Homo Sapiens
ucccauccaauuguuugguuucagugguccag

SEQ ID NO: 406027 - RNA, 32 nt, Homo Sapiens
cgguugcgugacucgugacgucuccaaguccu

SEQ ID NO: 406028 - RNA, 32 nt, Homo Sapiens
ugguggggggaccgcgaggcgagcgcgggagc

SEQ ID NO: 406029 - RNA, 32 nt, Homo Sapiens
ccagggagggugggagcuggagggggauguca

SEQ ID NO: 406030 - RNA, 32 nt, Homo Sapiens
uaauaugggaauaaaaauuugugcaagucaga

SEQ ID NO: 406031 - RNA, 32 nt, Homo Sapiens
uaccuuauaauggcucaaauuguauuuaauuu

SEQ ID NO: 406032 - RNA, 32 nt, Homo Sapiens
gaggcagggucucuggggacugucggggggua

SEQ ID NO: 406033 - RNA, 32 nt, Homo Sapiens
ccccauccaagaagggcugggaggcgggcagc

SEQ ID NO: 406034 - RNA, 32 nt, Homo Sapiens
ggggaauggcagucggaggcgcaggacaccau

SEQ ID NO: 406035 - RNA, 32 nt, Homo Sapiens
ccuccccugcggugaccccaacuccagcccau

SEQ ID NO: 406036 - RNA, 32 nt, Homo Sapiens
auuaaaauuauuuccuaauuuaugagccucuu

SEQ ID NO: 406037 - RNA, 32 nt, Homo Sapiens
ugccauuugcaauauuaaaaaauaaaaaugca

SEQ ID NO: 406038 - RNA, 32 nt, Homo Sapiens
caugcucuuaggaugucaggaagaggccagga

SEQ ID NO: 406039 - RNA, 32 nt, Homo Sapiens
aggccagguggaccuucggugcacacacaccc

SEQ ID NO: 406040 - RNA, 32 nt, Homo Sapiens
aagggaugaauuguaaaagcaacaucagcuug

SEQ ID NO: 406041 - RNA, 32 nt, Homo Sapiens
agccucugcuccugcugcaaaagcagaaacca

SEQ ID NO: 406042 - RNA, 32 nt, Homo Sapiens
uaaaauaaaaauuucaaauacaauuuuaguuc

SEQ ID NO: 406043 - RNA, 32 nt, Homo Sapiens
guaccgguugucccggucacggcauggggcga

SEQ ID NO: 406044 - RNA, 32 nt, Homo Sapiens
gaauaacaaaaauuauucugcuuauauauucu

SEQ ID NO: 406045 - RNA, 32 nt, Homo Sapiens
cugagaagagguccuugguugggucaaggaca

SEQ ID NO: 406046 - RNA, 32 nt, Homo Sapiens
cggagcgggacuuggagcagccgccgccgcug

SEQ ID NO: 406047 - RNA, 32 nt, Homo Sapiens
acagaaugguuuuguuuuguuuuguuuuguuu

SEQ ID NO: 406048 - RNA, 32 nt, Homo Sapiens
cccagcuccuugagacuggagagcagccagca

SEQ ID NO: 406049 - RNA, 32 nt, Homo Sapiens
ggaacccgcgccccggcuccucggcgauccau

SEQ ID NO: 406050 - RNA, 32 nt, Homo Sapiens
uuguuuguuauauuaaguugacuuuaucaaau

SEQ ID NO: 406051 - RNA, 32 nt, Homo Sapiens
ccuucucggcccgcgccgcagccacuacgagg

SEQ ID NO: 406052 - RNA, 32 nt, Homo Sapiens
ucccgugaggcguugugacuagaacagcugga

SEQ ID NO: 406053 - RNA, 32 nt, Homo Sapiens
uuuuaaacaugauugaaaucacugcuuauaaa

SEQ ID NO: 406054 - RNA, 32 nt, Homo Sapiens
ucauccugguggccuuaacuacaguggaggug

SEQ ID NO: 406055 - RNA, 32 nt, Homo Sapiens
cuucagugcuguguguuuccacagcgccaaca

SEQ ID NO: 406056 - RNA, 32 nt, Homo Sapiens
agucagggucuggacaugcaucuccuaaagga

SEQ ID NO: 406057 - RNA, 32 nt, Homo Sapiens
gcuuuacugaaaacagaauggaagcccugaag

SEQ ID NO: 406058 - RNA, 31 nt, Homo Sapiens
ugggugcagcgcaccagcauggcacauguau

SEQ ID NO: 406059 - RNA, 32 nt, Homo Sapiens
acauuuucaaggauucuuccccagggcagcug

SEQ ID NO: 406060 - RNA, 32 nt, Homo Sapiens
caaagcgucaaauauaaaugauuuguucaguu

SEQ ID NO: 406061 - RNA, 32 nt, Homo Sapiens
ucaucaacucaaagcaauguuaugcacaauau

SEQ ID NO: 406062 - RNA, 32 nt, Homo Sapiens
uguguucuguuguaaaucauuuggcgagacug

SEQ ID NO: 406063 - RNA, 32 nt, Homo Sapiens
acacagggcauggccauccuugugucggagac

SEQ ID NO: 406064 - RNA, 32 nt, Homo Sapiens
uguggugugcauuuuuaggcuguauccuucua

SEQ ID NO: 406065 - RNA, 32 nt, Homo Sapiens
aacaugucccagcccauucuccguugaaacag

SEQ ID NO: 406066 - RNA, 32 nt, Homo Sapiens
aaaacuuagacauugaauaauagaacuuuuag

SEQ ID NO: 406067 - RNA, 32 nt, Homo Sapiens
ccuuuuucagaauauuuugaacaaagaucuuu

SEQ ID NO: 406068 - RNA, 32 nt, Homo Sapiens
acuccugcguagcugggaccacagggguaugc

SEQ ID NO: 406069 - RNA, 32 nt, Homo Sapiens
augcggaacugaccgaccuauugucuugggac

SEQ ID NO: 406070 - RNA, 32 nt, Homo Sapiens
ugucagcugaggaggauguaugucaccucagg

SEQ ID NO: 406071 - RNA, 32 nt, Homo Sapiens
aaugacaaauucacugaugcccaauuaaauga

SEQ ID NO: 406072 - RNA, 32 nt, Homo Sapiens
cugaaccucccgcugcugcugcugcugcuggg

SEQ ID NO: 406073 - RNA, 32 nt, Homo Sapiens
uuuucucaaucuuaggaggaaauaccaaaguu

SEQ ID NO: 406074 - RNA, 30 nt, Homo Sapiens
guggaauguauaggcagagaagcucuuuga

SEQ ID NO: 406075 - RNA, 32 nt, Homo Sapiens
uugcgaaaccgucacauacaccaagagagcca

SEQ ID NO: 406076 - RNA, 32 nt, Homo Sapiens
uuaucauggaaccauggacacaguuucucuca

SEQ ID NO: 406077 - RNA, 30 nt, Homo Sapiens
cagucuuaauuaaagggggaaaaaagcaac

SEQ ID NO: 406078 - RNA, 32 nt, Homo Sapiens
gcugaugccaauguggaaauggggcgcuguug

SEQ ID NO: 406079 - RNA, 27 nt, Homo Sapiens
aucugccauuaaucugauacaugugua

SEQ ID NO: 406080 - RNA, 32 nt, Homo Sapiens
ugcuccaugugaaacucccuggagcggcagcu

SEQ ID NO: 406081 - RNA, 27 nt, Homo Sapiens
gguuguagauucuucagucccuaagcc

SEQ ID NO: 406082 - RNA, 32 nt, Homo Sapiens
ccccagugcuuguuccucucaucuccccaccg

SEQ ID NO: 406083 - RNA, 32 nt, Homo Sapiens
cccaccacucuggguuccauuugugggaggga

SEQ ID NO: 406084 - RNA, 32 nt, Homo Sapiens
cuaacugcaucccacacugcccagaucauucu

SEQ ID NO: 406085 - RNA, 32 nt, Homo Sapiens
uggacaguccccaagaggcccauccucaucca

SEQ ID NO: 406086 - RNA, 32 nt, Homo Sapiens
gcuuggcgcgucuccguuucucuucugagggg

SEQ ID NO: 406087 - RNA, 32 nt, Homo Sapiens
ucuacuaaaaauacagaaauuauccaggcaug

SEQ ID NO: 406088 - RNA, 32 nt, Homo Sapiens
uucugacuuugaaauuuuuaggacgucagcug

SEQ ID NO: 406089 - RNA, 32 nt, Homo Sapiens
uaaagaugacauuuggugaaaacucucuuccu

SEQ ID NO: 406090 - RNA, 30 nt, Homo Sapiens
augacagagaagccuauuuuguuuuguuuu

SEQ ID NO: 406091 - RNA, 32 nt, Homo Sapiens
cccagcucuccggcugggugggcuuggccaug

SEQ ID NO: 406092 - RNA, 32 nt, Homo Sapiens
auuaggggcuccuggguacauuccauugagac

SEQ ID NO: 406093 - RNA, 32 nt, Homo Sapiens
uugauucuaaaauuauucaugguaggauacgu

SEQ ID NO: 406094 - RNA, 32 nt, Homo Sapiens
cauuucaucgggugcauagauacagguaacca

SEQ ID NO: 406095 - RNA, 32 nt, Homo Sapiens
gcagaagaccggguucaggagcuccggaaggu

SEQ ID NO: 406096 - RNA, 32 nt, Homo Sapiens
cugugaguacccaggaagcugcaccguguggc

SEQ ID NO: 406097 - RNA, 32 nt, Homo Sapiens
uguaggaggcggaggcccgcagagcacagagc

SEQ ID NO: 406098 - RNA, 32 nt, Homo Sapiens
cagaaaaggacagguuaauuccaauuguugag

SEQ ID NO: 406099 - RNA, 32 nt, Homo Sapiens
aaaaauagucuauauuuuaaccugcauaaaaa

SEQ ID NO: 406100 - RNA, 32 nt, Homo Sapiens
gcugcgcgccaaccggccggccccugucgcag

SEQ ID NO: 406101 - RNA, 32 nt, Homo Sapiens
acaggaggcugugcuuccauggagcugggugu

SEQ ID NO: 406102 - RNA, 30 nt, Homo Sapiens
ugaagaggcaggcaccccagaguccucaac

SEQ ID NO: 406103 - RNA, 32 nt, Homo Sapiens
gaagaacaguccucgggugauucagaggggaa

SEQ ID NO: 406104 - RNA, 32 nt, Homo Sapiens
cgcuccgcgcagcucaggcuggcaccgcugua

SEQ ID NO: 406105 - RNA, 32 nt, Homo Sapiens
agaauuugauucaucaguggcaggccaugcau

SEQ ID NO: 406106 - RNA, 29 nt, Homo Sapiens
aaggucuccagagggugaaagcuggaguc

SEQ ID NO: 406107 - RNA, 32 nt, Homo Sapiens
gaguguuaauaaaauuuaucuuguucaaugaa

SEQ ID NO: 406108 - RNA, 32 nt, Homo Sapiens
aaaguacauguauuuuuaauauaugcaucccu

SEQ ID NO: 406109 - RNA, 32 nt, Homo Sapiens
gcguuccgcccggccauggcugcgguggcgcu

SEQ ID NO: 406110 - RNA, 32 nt, Homo Sapiens
ugcacccuccgucucucggguucaagcaauug

SEQ ID NO: 406111 - RNA, 32 nt, Homo Sapiens
acaugugcagaugaaaugucaauauaagaaaa

SEQ ID NO: 406112 - RNA, 32 nt, Homo Sapiens
ugacauuaaaauaacuaacaaacagauucuuu

SEQ ID NO: 406113 - RNA, 32 nt, Homo Sapiens
gcaccggcagucucagcccagcccccaccuuu

SEQ ID NO: 406114 - RNA, 32 nt, Homo Sapiens
acaauuaauuuaucuuuugacaaaggggauaa

SEQ ID NO: 406115 - RNA, 32 nt, Homo Sapiens
uugacuguuuugauuuuauuucuuugguggau

SEQ ID NO: 406116 - RNA, 32 nt, Homo Sapiens
gcaguggcgcggucuuggcucacugcaagcuc

SEQ ID NO: 406117 - RNA, 32 nt, Homo Sapiens
aaggaucugaagaggaagcugcggcugugacu

SEQ ID NO: 406118 - RNA, 32 nt, Homo Sapiens
ugcaucacguaccccacugggccagcccugca

SEQ ID NO: 406119 - RNA, 32 nt, Homo Sapiens
uauaaugggacuuaaucuuucucuaaaagcau

SEQ ID NO: 406120 - RNA, 32 nt, Homo Sapiens
auauagaauaaaauaucaaccuaaaucuuuac

SEQ ID NO: 406121 - RNA, 32 nt, Homo Sapiens
gcgggggaggcuggcagggaaagggaaacgcu

SEQ ID NO: 406122 - RNA, 32 nt, Homo Sapiens
ugaggccucacuuuucugcauccauguacucc

SEQ ID NO: 406123 - RNA, 32 nt, Homo Sapiens
caauguuuucauaccacuuucauuugaucuca

SEQ ID NO: 406124 - RNA, 32 nt, Homo Sapiens
ugcuuccucacaguuaccaagaauaaagaaag

SEQ ID NO: 406125 - RNA, 32 nt, Homo Sapiens
uaaggaaacuggguguaaggaaacucuucacu

SEQ ID NO: 406126 - RNA, 32 nt, Homo Sapiens
ccagacugcgcgccgcgccgcugcgcccaaca

SEQ ID NO: 406127 - RNA, 32 nt, Homo Sapiens
acuggcuccgcgggcacaggccucaccaggga

SEQ ID NO: 406128 - RNA, 32 nt, Homo Sapiens
ccuguguccaccuuucucuccucuucccaagc

SEQ ID NO: 406129 - RNA, 29 nt, Homo Sapiens
cgacaccggggacagagcaacuguggaug

SEQ ID NO: 406130 - RNA, 32 nt, Homo Sapiens
ugauaggaaagacauggauggcguuccucucu

SEQ ID NO: 406131 - RNA, 30 nt, Homo Sapiens
gugaaguuuucccagcaccauuuguugaaa

SEQ ID NO: 406132 - RNA, 32 nt, Homo Sapiens
accuuuuccuuccuuuguggauucuguguuuu

SEQ ID NO: 406133 - RNA, 32 nt, Homo Sapiens
uguuuuccuaccuggugaucagaagugucugg

SEQ ID NO: 406134 - RNA, 32 nt, Homo Sapiens
ccgcaaacuccaugcucccccgcggccggagc

SEQ ID NO: 406135 - RNA, 32 nt, Homo Sapiens
uuuuguguacauuuuaucugagguggaaauga

SEQ ID NO: 406136 - RNA, 32 nt, Homo Sapiens
uccccaaaacaucccauuuugcagguguggaa

SEQ ID NO: 406137 - RNA, 32 nt, Homo Sapiens
gggagauuauguucuuuuuucaugucuaagau

SEQ ID NO: 406138 - RNA, 30 nt, Homo Sapiens
agggugcuggacuguauggcugagggcugg

SEQ ID NO: 406139 - RNA, 32 nt, Homo Sapiens
gaggaauaauuaaaugagaauuucauaggagc

SEQ ID NO: 406140 - RNA, 32 nt, Homo Sapiens
ggggcacauagaagcccucacacacacaugcc

SEQ ID NO: 406141 - RNA, 32 nt, Homo Sapiens
cuuuuuaaucaucugguuuuuaaaagauaaac

SEQ ID NO: 406142 - RNA, 32 nt, Homo Sapiens
ccgugaugcuggaagccugugccacuacaucc

SEQ ID NO: 406143 - RNA, 32 nt, Homo Sapiens
accgacccuccuuuaugugagagagaaauaaa

SEQ ID NO: 406144 - RNA, 32 nt, Homo Sapiens
agccucacaaaacacaguugagagucuuuuaa

SEQ ID NO: 406145 - RNA, 32 nt, Homo Sapiens
caaaauguagaaauaaauuacuuaaggcagua

SEQ ID NO: 406146 - RNA, 32 nt, Homo Sapiens
uccauauauauucauauauauuuguugaguga

SEQ ID NO: 406147 - RNA, 32 nt, Homo Sapiens
uauuauucucaguuuccauuaccuguuuggcc

SEQ ID NO: 406148 - RNA, 32 nt, Homo Sapiens
cuggcuuuucuuuagcuucaucaaauaagcau

SEQ ID NO: 406149 - RNA, 32 nt, Homo Sapiens
uaguuuucaguaguucuaccucuuauuuguag

SEQ ID NO: 406150 - RNA, 32 nt, Homo Sapiens
ucaguacugcgguugccaacacugcugccagg

SEQ ID NO: 406151 - RNA, 32 nt, Homo Sapiens
uccaccacaagagcuccuugaugaaggucauc

SEQ ID NO: 406152 - RNA, 32 nt, Homo Sapiens
guuuguuuguuuuuuuaaccguaauguagaug

SEQ ID NO: 406153 - RNA, 32 nt, Homo Sapiens
cccauggaugccccaggccccuggacaguuga

SEQ ID NO: 406154 - RNA, 31 nt, Homo Sapiens
gucgccuuaguccagaaccugacaggccucu

SEQ ID NO: 406155 - RNA, 32 nt, Homo Sapiens
aggaaguguuuccaagccuccaaaaaagaaau

SEQ ID NO: 406156 - RNA, 32 nt, Homo Sapiens
ucuggaugaaugucuuuuuuaauacuccgaaa

SEQ ID NO: 406157 - RNA, 32 nt, Homo Sapiens
uaucuaauaggggcuuuaaauaaauuugguca

SEQ ID NO: 406158 - RNA, 30 nt, Homo Sapiens
uagauuagacuugccacccaucuccccagu

SEQ ID NO: 406159 - RNA, 32 nt, Homo Sapiens
gccuagugguggcccuguguucugaggacaga

SEQ ID NO: 406160 - RNA, 32 nt, Homo Sapiens
gucggaccuuggcaugcuccauucagcugacc

SEQ ID NO: 406161 - RNA, 32 nt, Homo Sapiens
agaagcaugcagagaagaauugguuuguuggc

SEQ ID NO: 406162 - RNA, 32 nt, Homo Sapiens
agacacacugaauucuaaaguaccauuucuuu

SEQ ID NO: 406163 - RNA, 32 nt, Homo Sapiens
aggagccuugggauuaauaaacaugcacugag

SEQ ID NO: 406164 - RNA, 32 nt, Homo Sapiens
auucggcaccgcagcguaggugcuaccaccgc

SEQ ID NO: 406165 - RNA, 32 nt, Homo Sapiens
aauguguuuauacuguauauggaaaccuaaug

SEQ ID NO: 406166 - RNA, 31 nt, Homo Sapiens
uaucauuuuccuuuuuugccaaaaggaccag

SEQ ID NO: 406167 - RNA, 32 nt, Homo Sapiens
ggaugggcaggagagcagagccgcggagucug

SEQ ID NO: 406168 - RNA, 32 nt, Homo Sapiens
ccaccgcaacagcagagccugccauccccaac

SEQ ID NO: 406169 - RNA, 32 nt, Homo Sapiens
caaaaagcacuuucuucuguuuucaaucccug

SEQ ID NO: 406170 - RNA, 32 nt, Homo Sapiens
ucccacccuaaggaauuuuuaucaccaaaaug

SEQ ID NO: 406171 - RNA, 32 nt, Homo Sapiens
ugcugguucccucucugcacccggacuggacc

SEQ ID NO: 406172 - RNA, 32 nt, Homo Sapiens
uccugacuucaugauccguccgccuuggccuc

SEQ ID NO: 406173 - RNA, 32 nt, Homo Sapiens
auuugccuuuuguuguuuucucucuuugguga

SEQ ID NO: 406174 - RNA, 32 nt, Homo Sapiens
auaauagaggcuuuucugcguuaagggagaag

SEQ ID NO: 406175 - RNA, 32 nt, Homo Sapiens
aaugucaucaguguggcaagguuuucagucug

SEQ ID NO: 406176 - RNA, 32 nt, Homo Sapiens
aggcaggaaccaauuugcauuuaaguaguaug

SEQ ID NO: 406177 - RNA, 32 nt, Homo Sapiens
aggauuaaaaauuuaagauguucuaguucugc

SEQ ID NO: 406178 - RNA, 32 nt, Homo Sapiens
aauaguuuucuuuccggggucacauguuuaac

SEQ ID NO: 406179 - RNA, 32 nt, Homo Sapiens
ugugugugcgcgcgcgacgcgcgagugugcug

SEQ ID NO: 406180 - RNA, 32 nt, Homo Sapiens
gagagcauuugccugccuguccuggacggacu

SEQ ID NO: 406181 - RNA, 32 nt, Homo Sapiens
agagugaguugucucaggaccccgucacugcg

SEQ ID NO: 406182 - RNA, 32 nt, Homo Sapiens
agagauccagggcucuuggagagggacaagug

SEQ ID NO: 406183 - RNA, 32 nt, Homo Sapiens
uggagcagcuggaagaugcugucauugcacuc

SEQ ID NO: 406184 - RNA, 32 nt, Homo Sapiens
ccgcgagggguuucuuuccauguguuuuccuc

SEQ ID NO: 406185 - RNA, 32 nt, Homo Sapiens
cugugguggcaccacugagccuagaccaugga

SEQ ID NO: 406186 - RNA, 32 nt, Homo Sapiens
gucuaagaauaaugacguauugugaaauuugu

SEQ ID NO: 406187 - RNA, 32 nt, Homo Sapiens
aauauucuaagugauuuaaugcacuuugacuu

SEQ ID NO: 406188 - RNA, 32 nt, Homo Sapiens
acaaccccugaggagguguagacccagucuga

SEQ ID NO: 406189 - RNA, 30 nt, Homo Sapiens
ugugucuauggugcugcaccuugcuguugu

SEQ ID NO: 406190 - RNA, 32 nt, Homo Sapiens
acgaggacccuggauggguucuauucacuugg

SEQ ID NO: 406191 - RNA, 32 nt, Homo Sapiens
gcauuagaugugagggcuauguugacauggca

SEQ ID NO: 406192 - RNA, 32 nt, Homo Sapiens
gcagucccgggagaaccugcggcggccggagc

SEQ ID NO: 406193 - RNA, 32 nt, Homo Sapiens
gagcagcccuggagcaggagcggcaggagcug

SEQ ID NO: 406194 - RNA, 32 nt, Homo Sapiens
gugacaaagggagacacaaggcagagagagga

SEQ ID NO: 406195 - RNA, 32 nt, Homo Sapiens
ugguuaauucuuaaggcaaggcaaauccaugg

SEQ ID NO: 406196 - RNA, 32 nt, Homo Sapiens
gccuccaggucccgcugcagcuucucgcggag

SEQ ID NO: 406197 - RNA, 32 nt, Homo Sapiens
cagguucacugguacauaaauaccuaggaaau

SEQ ID NO: 406198 - RNA, 32 nt, Homo Sapiens
uauuuuuaaaagugcugcaaaaauauuuuaca

SEQ ID NO: 406199 - RNA, 32 nt, Homo Sapiens
cuuuccccucuccaaugcccagccccagaucu

SEQ ID NO: 406200 - RNA, 32 nt, Homo Sapiens
aagcaagcgaauaucuacuaagaaaaucucuc

SEQ ID NO: 406201 - RNA, 32 nt, Homo Sapiens
acuuugaccugccaggagcucuucugugugcc

SEQ ID NO: 406202 - RNA, 32 nt, Homo Sapiens
aguuccugcaagcagccuacuucaguaugaga

SEQ ID NO: 406203 - RNA, 32 nt, Homo Sapiens
aguauuuucaacaagugaaacuucuggaguuc

SEQ ID NO: 406204 - RNA, 32 nt, Homo Sapiens
uauaaguguguccaguuuugccugucuauaaa

SEQ ID NO: 406205 - RNA, 32 nt, Homo Sapiens
gccacccaaaauguuuuuuaaauacuuuggau

SEQ ID NO: 406206 - RNA, 32 nt, Homo Sapiens
aguucaugauaccaugguggacacagcugaga

SEQ ID NO: 406207 - RNA, 32 nt, Homo Sapiens
ggcaccugcagcccuccuuccucagcaggaaa

SEQ ID NO: 406208 - RNA, 32 nt, Homo Sapiens
aacaaaagcucacagcagcaccauuuacacaa

SEQ ID NO: 406209 - RNA, 32 nt, Homo Sapiens
ggaggcagaugaugcagaugcugcugggaggg

SEQ ID NO: 406210 - RNA, 32 nt, Homo Sapiens
guggagcgccgggagcggcgaauauggacgac

SEQ ID NO: 406211 - RNA, 32 nt, Homo Sapiens
agaauggacaccuuuugguuguuggguuucug

SEQ ID NO: 406212 - RNA, 32 nt, Homo Sapiens
aaccuuugacauuaugucaguccugagagucu

SEQ ID NO: 406213 - RNA, 32 nt, Homo Sapiens
gaauguggagggcguuguguguggggcuggac

SEQ ID NO: 406214 - RNA, 32 nt, Homo Sapiens
acagaggcccugcggcaggaacaugcacucca

SEQ ID NO: 406215 - RNA, 32 nt, Homo Sapiens
cgguagcgccuuccucaccgcacgcugagucc

SEQ ID NO: 406216 - RNA, 32 nt, Homo Sapiens
gagugugggccgggcgggagugcggcgagagc

SEQ ID NO: 406217 - RNA, 32 nt, Homo Sapiens
gauggggcaagucagggaccccugccccuucc

SEQ ID NO: 406218 - RNA, 32 nt, Homo Sapiens
aucugcaacgacccuauuuccaaauaagguua

SEQ ID NO: 406219 - RNA, 32 nt, Homo Sapiens
gaaauuugucacucaugguucuggaugcuggg

SEQ ID NO: 406220 - RNA, 32 nt, Homo Sapiens
uugggagaauauuuuuuuuuuauucauucugu

SEQ ID NO: 406221 - RNA, 32 nt, Homo Sapiens
cuacaaggaagguuuuccauuauacuuuuaaa

SEQ ID NO: 406222 - RNA, 32 nt, Homo Sapiens
cccgcauucccgcucggacacucgcgcgcagc

SEQ ID NO: 406223 - RNA, 32 nt, Homo Sapiens
ucauauucuuuauguggaagaauagauuuuaa

SEQ ID NO: 406224 - RNA, 32 nt, Homo Sapiens
aauaucagauauauuuuuugacuguacauuac

SEQ ID NO: 406225 - RNA, 32 nt, Homo Sapiens
caaugagauaaaauauuuacuauuaugcuuau

SEQ ID NO: 406226 - RNA, 32 nt, Homo Sapiens
ucugcagucaccagcucugccagcucgaggag

SEQ ID NO: 406227 - RNA, 32 nt, Homo Sapiens
ggggauucucggaucuccgaggacaccggacg

SEQ ID NO: 406228 - RNA, 32 nt, Homo Sapiens
ugaguggcaaagagcaaugacaaugcgaaaag

SEQ ID NO: 406229 - RNA, 32 nt, Homo Sapiens
ggaggggaaugggcaggcaagccagucuucug

SEQ ID NO: 406230 - RNA, 32 nt, Homo Sapiens
uugggagaaacaaggaagggugcacuuaacua

SEQ ID NO: 406231 - RNA, 32 nt, Homo Sapiens
aagggugcaagccccauucacggccuggcaug

SEQ ID NO: 406232 - RNA, 32 nt, Homo Sapiens
uucccaaacaauucauuuuucucuucuaaagg

SEQ ID NO: 406233 - RNA, 32 nt, Homo Sapiens
ccuaaugagaacggagacagauaauaaagagg

SEQ ID NO: 406234 - RNA, 32 nt, Homo Sapiens
ugcccuggcugucucucuggcuccugaccugg

SEQ ID NO: 406235 - RNA, 32 nt, Homo Sapiens
gaggugauagucuccgcccaggccaugaggga

SEQ ID NO: 406236 - RNA, 32 nt, Homo Sapiens
cuucuugaaaauaaugauggaacauaucuuua

SEQ ID NO: 406237 - RNA, 32 nt, Homo Sapiens
gcucuguaaaaugugaacaauaacaguauugg

SEQ ID NO: 406238 - RNA, 32 nt, Homo Sapiens
agggaggggcgcuaccugcuuccccggaggac

SEQ ID NO: 406239 - RNA, 32 nt, Homo Sapiens
uggccaaggaggcuccugggguggggaucacc

SEQ ID NO: 406240 - RNA, 32 nt, Homo Sapiens
uuaaauuuuuaaacuaugugggucugugaauu

SEQ ID NO: 406241 - RNA, 32 nt, Homo Sapiens
uuaaaccauuuucucucuuucgguaauagaaa

SEQ ID NO: 406242 - RNA, 32 nt, Homo Sapiens
guccggugaaggugcaggcccggcgccgccac

SEQ ID NO: 406243 - RNA, 30 nt, Homo Sapiens
uucgggaucacugucccccaucuuccgugu

SEQ ID NO: 406244 - RNA, 29 nt, Homo Sapiens
cuauaauaaaguuuaugguucaguucuaa

SEQ ID NO: 406245 - RNA, 32 nt, Homo Sapiens
cuaugucgcuuacuggacgcugaagugauugg

SEQ ID NO: 406246 - RNA, 32 nt, Homo Sapiens
augcagccagaagcucugugccugcugcaaag

SEQ ID NO: 406247 - RNA, 32 nt, Homo Sapiens
ccccaguugcccagguuguccaggcgauuccu

SEQ ID NO: 406248 - RNA, 32 nt, Homo Sapiens
uucauaacugguuuuucuaagccugacaaaau

SEQ ID NO: 406249 - RNA, 32 nt, Homo Sapiens
ccugaagggaagcucaauguagauggauuuuu

SEQ ID NO: 406250 - RNA, 32 nt, Homo Sapiens
ugcuguuagagcacuucugcucugcccugaug

SEQ ID NO: 406251 - RNA, 32 nt, Homo Sapiens
agacucugugcacugaaguaaaugggguuggg

SEQ ID NO: 406252 - RNA, 32 nt, Homo Sapiens
uggacccuucucugcccuuacauuuuuguuuc

SEQ ID NO: 406253 - RNA, 32 nt, Homo Sapiens
aauggccuuauugaugcuuucagcagaauuuc

SEQ ID NO: 406254 - RNA, 32 nt, Homo Sapiens
cugggcuccgcggggccgauucgguuugcccu

SEQ ID NO: 406255 - RNA, 32 nt, Homo Sapiens
cccggcaucggcgccuucccggcgggcaagag

SEQ ID NO: 406256 - RNA, 32 nt, Homo Sapiens
ccaaaggauccggagcgagcuagggcagacac

SEQ ID NO: 406257 - RNA, 32 nt, Homo Sapiens
uugguugacgcccuucagcacacuuacugcua

SEQ ID NO: 406258 - RNA, 32 nt, Homo Sapiens
ggcccuucccccagcccacagccagcuccgug

SEQ ID NO: 406259 - RNA, 32 nt, Homo Sapiens
ucucuucucuacauggugaugcauuucagcaa

SEQ ID NO: 406260 - RNA, 32 nt, Homo Sapiens
ccguucacuccagucccaccccacgccugacu

SEQ ID NO: 406261 - RNA, 32 nt, Homo Sapiens
agccuggagcagcccuccagaccuggguggaa

SEQ ID NO: 406262 - RNA, 32 nt, Homo Sapiens
ccucaaaggaugaagacucaccaccauccagg

SEQ ID NO: 406263 - RNA, 32 nt, Homo Sapiens
uuaguagcaauggcauuaaaaauaccaucaac

SEQ ID NO: 406264 - RNA, 32 nt, Homo Sapiens
aaagauauaacucuuaggaaaaacagaaaccc

SEQ ID NO: 406265 - RNA, 32 nt, Homo Sapiens
aucucuguccuucuccuugggcaucccuauuc

SEQ ID NO: 406266 - RNA, 31 nt, Homo Sapiens
augugcccauccucagcuaaaacccagagcu

SEQ ID NO: 406267 - RNA, 29 nt, Homo Sapiens
uauuuuuccagucucagaggcauaagcca

SEQ ID NO: 406268 - RNA, 32 nt, Homo Sapiens
cccggccgccucccucgccgcgaccccggaug

SEQ ID NO: 406269 - RNA, 32 nt, Homo Sapiens
ucugcacugucaaguaaacuacaguuaggaau

SEQ ID NO: 406270 - RNA, 32 nt, Homo Sapiens
gucugaccaggagauggaggauguguccuugg

SEQ ID NO: 406271 - RNA, 32 nt, Homo Sapiens
ccugggcucaaguaauccuccucccucugccu

SEQ ID NO: 406272 - RNA, 32 nt, Homo Sapiens
gggcugagcugcgugcccuuuaagugaucacc

SEQ ID NO: 406273 - RNA, 32 nt, Homo Sapiens
ggccggguccccagcccccgcuccugccccac

SEQ ID NO: 406274 - RNA, 32 nt, Homo Sapiens
auuuaggguguuaaacuuuuuaccaaguacaa

SEQ ID NO: 406275 - RNA, 32 nt, Homo Sapiens
agccgaggggagagagggacucaagggaaagg

SEQ ID NO: 406276 - RNA, 28 nt, Homo Sapiens
gccauggagguggcgcccgagcagccgc

SEQ ID NO: 406277 - RNA, 32 nt, Homo Sapiens
caaucuauuauuucucuaauuaugcaauuagc

SEQ ID NO: 406278 - RNA, 32 nt, Homo Sapiens
ccccaucccccgccuuuuuuuuuuuuuuuuuu

SEQ ID NO: 406279 - RNA, 32 nt, Homo Sapiens
guguucugagaguggugacuaaggcugaggac

SEQ ID NO: 406280 - RNA, 32 nt, Homo Sapiens
gucgcgccgccucacuggacucauggacucgc

SEQ ID NO: 406281 - RNA, 32 nt, Homo Sapiens
gagcucagagcggaugggcacacacacccgcc

SEQ ID NO: 406282 - RNA, 32 nt, Homo Sapiens
uauuuuaaaaauuuuauguaauacugcacagu

SEQ ID NO: 406283 - RNA, 32 nt, Homo Sapiens
agaacuccucccacccaacuuccccuuagagu

SEQ ID NO: 406284 - RNA, 32 nt, Homo Sapiens
uucagcagauucuguagauagaauuaauagga

SEQ ID NO: 406285 - RNA, 32 nt, Homo Sapiens
aguauaucuaucuauauauacauauacacaaa

SEQ ID NO: 406286 - RNA, 32 nt, Homo Sapiens
cuuauuauuauuacuuuuuuuaucuccaccaa

SEQ ID NO: 406287 - RNA, 32 nt, Homo Sapiens
uccuuccccccucacagcuuuggccccuuuca

SEQ ID NO: 406288 - RNA, 32 nt, Homo Sapiens
gggccggaagugccgcuccuuggugggggcug

SEQ ID NO: 406289 - RNA, 32 nt, Homo Sapiens
gacgaagucaacaguggagugggccaggaugg

SEQ ID NO: 406290 - RNA, 32 nt, Homo Sapiens
uaacuuuauuuuuaauguguuaauuacuugga

SEQ ID NO: 406291 - RNA, 32 nt, Homo Sapiens
acuccagaauccacaaagagaagagggcuugg

SEQ ID NO: 406292 - RNA, 32 nt, Homo Sapiens
auauaauugggaaacauuaaauauucuugaau

SEQ ID NO: 406293 - RNA, 32 nt, Homo Sapiens
uuuuuaaacugcugaaauaaaaugacuguuac

SEQ ID NO: 406294 - RNA, 32 nt, Homo Sapiens
ugagcaggcuguaucuggauucuggcaauaaa

SEQ ID NO: 406295 - RNA, 32 nt, Homo Sapiens
ggacgaaggcccggccggcggcagucugcgca

SEQ ID NO: 406296 - RNA, 32 nt, Homo Sapiens
uuuauagucuuaauaucuuguuuuugcaucac

SEQ ID NO: 406297 - RNA, 32 nt, Homo Sapiens
auaugcagaugcuauuugauaccaagggcuuu

SEQ ID NO: 406298 - RNA, 32 nt, Homo Sapiens
gacccagcucacccauucuccucacagggcgu

SEQ ID NO: 406299 - RNA, 32 nt, Homo Sapiens
ccaguggggcucuggucuuuucccagaggcug

SEQ ID NO: 406300 - RNA, 32 nt, Homo Sapiens
cagcagcucugccugguuggccugcagugccg

SEQ ID NO: 406301 - RNA, 32 nt, Homo Sapiens
uggagucugcacgggaccuauuagaguauuuu

SEQ ID NO: 406302 - RNA, 32 nt, Homo Sapiens
ucaauuuucccauuuuuuccauauaaauuuaa

SEQ ID NO: 406303 - RNA, 32 nt, Homo Sapiens
gccaaguccuucccuuugguuuuaguuuauuc

SEQ ID NO: 406304 - RNA, 32 nt, Homo Sapiens
ggaacccacuagcugcuucuagucagccaucu

SEQ ID NO: 406305 - RNA, 32 nt, Homo Sapiens
gcaucacugucaaaaccagcucugcccguguc

SEQ ID NO: 406306 - RNA, 32 nt, Homo Sapiens
gcuaucacacagacagaauccaaaugcaugug

SEQ ID NO: 406307 - RNA, 32 nt, Homo Sapiens
gguaggcugggcugugaacagcacugcuccac

SEQ ID NO: 406308 - RNA, 32 nt, Homo Sapiens
aaaagggcgaagcacaguggcucacaccugua

SEQ ID NO: 406309 - RNA, 32 nt, Homo Sapiens
cagcccguuucuuauuucuguuuucucacaag

SEQ ID NO: 406310 - RNA, 32 nt, Homo Sapiens
caccuguaaucccagcacuuugggacaccagg

SEQ ID NO: 406311 - RNA, 32 nt, Homo Sapiens
gcaagcuccgccucccggguucaggccauucu

SEQ ID NO: 406312 - RNA, 32 nt, Homo Sapiens
agaccaggcuucccaaaccaagugccuugagc

SEQ ID NO: 406313 - RNA, 32 nt, Homo Sapiens
gucccaggaggacauagucaggagcccaugcu

SEQ ID NO: 406314 - RNA, 32 nt, Homo Sapiens
cccucagugaccuggaucugaccucacaccau

SEQ ID NO: 406315 - RNA, 32 nt, Homo Sapiens
ucaggguuuggauuagcaguggaauaaagaga

SEQ ID NO: 406316 - RNA, 32 nt, Homo Sapiens
gauaaccccuuucuccccuuuggaccaucugc

SEQ ID NO: 406317 - RNA, 32 nt, Homo Sapiens
ucugucagugaauggauaaucuaugugcuucu

SEQ ID NO: 406318 - RNA, 32 nt, Homo Sapiens
guacccuuuauuucuucugaaaucacacugau

SEQ ID NO: 406319 - RNA, 32 nt, Homo Sapiens
ggcgcuagccuggcccgacugggcgagucccc

SEQ ID NO: 406320 - RNA, 32 nt, Homo Sapiens
ggauggaggccaccgagcucucguccuucacc

SEQ ID NO: 406321 - RNA, 32 nt, Homo Sapiens
guucucauaauguauuguuucuuaagaacauu

SEQ ID NO: 406322 - RNA, 32 nt, Homo Sapiens
cguggcagccaguggugacuggauugaccuac

SEQ ID NO: 406323 - RNA, 32 nt, Homo Sapiens
gcugcagugucugccauguccugagggcugca

SEQ ID NO: 406324 - RNA, 32 nt, Homo Sapiens
gauccaaaaaauauauucgugcaauuaaaguu

SEQ ID NO: 406325 - RNA, 32 nt, Homo Sapiens
ugcucgcgcgcccccgccgaucgccauggauc

SEQ ID NO: 406326 - RNA, 32 nt, Homo Sapiens
uggcaaaacaaguggaagaaaagaggaagcau

SEQ ID NO: 406327 - RNA, 32 nt, Homo Sapiens
ggaacccugagcacuuuuuuacaauuggcucu

SEQ ID NO: 406328 - RNA, 32 nt, Homo Sapiens
ccaagaacccaccaauuccagacacaguggga

SEQ ID NO: 406329 - RNA, 32 nt, Homo Sapiens
ccagaucucuccugcccucccuggcagccagg

SEQ ID NO: 406330 - RNA, 32 nt, Homo Sapiens
cccccccccacuucacccccuaccauugaggg

SEQ ID NO: 406331 - RNA, 32 nt, Homo Sapiens
aaauucagaauauacauggauaaagaaccagg

SEQ ID NO: 406332 - RNA, 32 nt, Homo Sapiens
uuucuaggcucauuccucuccuccaccuuccc

SEQ ID NO: 406333 - RNA, 32 nt, Homo Sapiens
gcccauugacauuucagugucaauguauuuua

SEQ ID NO: 406334 - RNA, 32 nt, Homo Sapiens
ugcugccgugucugcggagccaggugccggcg

SEQ ID NO: 406335 - RNA, 32 nt, Homo Sapiens
uuugcccgccuggcccugggacucugacccuc

SEQ ID NO: 406336 - RNA, 32 nt, Homo Sapiens
ggagggaugagaacagaagcaggaccaggauu

SEQ ID NO: 406337 - RNA, 30 nt, Homo Sapiens
cccgcgcucaggugggcggguccugcuccc

SEQ ID NO: 406338 - RNA, 32 nt, Homo Sapiens
gcuguuuguaaauuuucuaugcauuucugcaa

SEQ ID NO: 406339 - RNA, 32 nt, Homo Sapiens
agcucccgccgcggcggcgguuuguucccgcc

SEQ ID NO: 406340 - RNA, 32 nt, Homo Sapiens
uaugccuuuuaaaaauaauuucaguaacccau

SEQ ID NO: 406341 - RNA, 32 nt, Homo Sapiens
cuucggaguuggggguggucagacaccacagg

SEQ ID NO: 406342 - RNA, 32 nt, Homo Sapiens
gauacccucugauuauuggaauccauuggcuu

SEQ ID NO: 406343 - RNA, 32 nt, Homo Sapiens
aaccagcugcccaagcucuuggcugcugcccu

SEQ ID NO: 406344 - RNA, 32 nt, Homo Sapiens
uuuaaaaagaaauuauucucauugcuguauua

SEQ ID NO: 406345 - RNA, 32 nt, Homo Sapiens
ucauaaaucuucauguucuauuaucuuucauc

SEQ ID NO: 406346 - RNA, 31 nt, Homo Sapiens
uaccucguaccagugcuucauccuauuugua

SEQ ID NO: 406347 - RNA, 32 nt, Homo Sapiens
uuuguacuuuugugauuuucuuguuuaugucu

SEQ ID NO: 406348 - RNA, 32 nt, Homo Sapiens
uaccagugggcaggaagaaagagugaggcaaa

SEQ ID NO: 406349 - RNA, 32 nt, Homo Sapiens
aaugcauucacucagcauccccaaccgugcaa

SEQ ID NO: 406350 - RNA, 32 nt, Homo Sapiens
ccugcucauacuugcuaccuccuuccaguggg

SEQ ID NO: 406351 - RNA, 32 nt, Homo Sapiens
gacugacugaaugauagcacaauccaggcugc

SEQ ID NO: 406352 - RNA, 32 nt, Homo Sapiens
uggauugacuuuggaaaaucuacacauauugg

SEQ ID NO: 406353 - RNA, 32 nt, Homo Sapiens
uuaacagaaauauuuuuaaaaaauuagaguga

SEQ ID NO: 406354 - RNA, 32 nt, Homo Sapiens
cuucauuguacacauuauuaaaacagaauuuu

SEQ ID NO: 406355 - RNA, 32 nt, Homo Sapiens
gaacguuggugagggagggcagcucugcgccc

SEQ ID NO: 406356 - RNA, 32 nt, Homo Sapiens
ccgaaagaaaggaaaaggaagccaguauauug

SEQ ID NO: 406357 - RNA, 32 nt, Homo Sapiens
uucacauucucugccccccacccaccgcgccg

SEQ ID NO: 406358 - RNA, 32 nt, Homo Sapiens
cgguccacccaccccaggaaccuggcaccccu

SEQ ID NO: 406359 - RNA, 32 nt, Homo Sapiens
guuucugggcuggcagaaggcucuguagaggg

SEQ ID NO: 406360 - RNA, 32 nt, Homo Sapiens
acugguaugcaaacagauuugauuuugcaucc

SEQ ID NO: 406361 - RNA, 32 nt, Homo Sapiens
guauugugaacuuucuaggaaauauucauuaa

SEQ ID NO: 406362 - RNA, 32 nt, Homo Sapiens
guagaggaagcagcucugaaacacaccgcgau

SEQ ID NO: 406363 - RNA, 31 nt, Homo Sapiens
agcuccggccacugccugccccuggcccugc

SEQ ID NO: 406364 - RNA, 32 nt, Homo Sapiens
augugacagacaccucggcucuccuugaauaa

SEQ ID NO: 406365 - RNA, 32 nt, Homo Sapiens
aguaauauauaaaaacugugucuuguuauagu

SEQ ID NO: 406366 - RNA, 32 nt, Homo Sapiens
acacagaccucgaguuucugguaagacugcug

SEQ ID NO: 406367 - RNA, 32 nt, Homo Sapiens
ccccguugccgggccuggacuguccuagguga

SEQ ID NO: 406368 - RNA, 32 nt, Homo Sapiens
uuugcuccauggaauaaugaugugauagcaaa

SEQ ID NO: 406369 - RNA, 32 nt, Homo Sapiens
gacaggcuggcucagccugucuccagggcugc

SEQ ID NO: 406370 - RNA, 32 nt, Homo Sapiens
gggucggcuacagggagggacccaccguagag

SEQ ID NO: 406371 - RNA, 32 nt, Homo Sapiens
ggaaaggaagguggcacagaccauguucccug

SEQ ID NO: 406372 - RNA, 32 nt, Homo Sapiens
caucucgacuaaaaauacaaaaaauuaauugg

SEQ ID NO: 406373 - RNA, 32 nt, Homo Sapiens
augagacagauaugaaagaacaauuuaaauuu

SEQ ID NO: 406374 - RNA, 32 nt, Homo Sapiens
ucuaggaaaccaaaaacucccaggaugccccg

SEQ ID NO: 406375 - RNA, 32 nt, Homo Sapiens
ucauaacccagcuguggaccacugccugaaag

SEQ ID NO: 406376 - RNA, 32 nt, Homo Sapiens
gagccccccaggccagguuugcuggccauaga

SEQ ID NO: 406377 - RNA, 32 nt, Homo Sapiens
aacggccgucggaccacggcgcggcggccagu

SEQ ID NO: 406378 - RNA, 32 nt, Homo Sapiens
uaacaccuguugcauuuauauucuuuccauuu

SEQ ID NO: 406379 - RNA, 32 nt, Homo Sapiens
cuccucaggcucucuccccugcucucccaccu

SEQ ID NO: 406380 - RNA, 31 nt, Homo Sapiens
ucgguguggagggguggagugcugugaucuc

SEQ ID NO: 406381 - RNA, 32 nt, Homo Sapiens
ggacauugucuccuggagcagugucaguccca

SEQ ID NO: 406382 - RNA, 32 nt, Homo Sapiens
agaaugaagaagacauaaaauuagggcuuuug

SEQ ID NO: 406383 - RNA, 32 nt, Homo Sapiens
cccacgggccgggcugacccccugcccccugg

SEQ ID NO: 406384 - RNA, 32 nt, Homo Sapiens
ccagcccugggguccacugcccggggagcagc

SEQ ID NO: 406385 - RNA, 30 nt, Homo Sapiens
aaaugguucuacugcauccuuuggcugggc

SEQ ID NO: 406386 - RNA, 32 nt, Homo Sapiens
uggagagugugguucccuccccccugcccauc

SEQ ID NO: 406387 - RNA, 32 nt, Homo Sapiens
cauuuuagauacacucuaaauugagaauggug

SEQ ID NO: 406388 - RNA, 32 nt, Homo Sapiens
ggcguuggcugccugcccuccaggggagacac

SEQ ID NO: 406389 - RNA, 32 nt, Homo Sapiens
gcuauagagugucuuuaugcaguggugucagg

SEQ ID NO: 406390 - RNA, 32 nt, Homo Sapiens
gaauugcuugguucuccuccauguggccucuc

SEQ ID NO: 406391 - RNA, 32 nt, Homo Sapiens
guuccaugaaaguuacccaggguccucauguc

SEQ ID NO: 406392 - RNA, 32 nt, Homo Sapiens
ucauguggacauuuccagaaaagcauuauggu

SEQ ID NO: 406393 - RNA, 32 nt, Homo Sapiens
uucacaugaagauguaaggaauuugggugggg

SEQ ID NO: 406394 - RNA, 32 nt, Homo Sapiens
agccauuaccugccacugggaccagcagguga

SEQ ID NO: 406395 - RNA, 32 nt, Homo Sapiens
gaaaccccgucucuacuaaaaauagagaaaau

SEQ ID NO: 406396 - RNA, 32 nt, Homo Sapiens
ccgcgccgccuucagagcccaagccccacgcu

SEQ ID NO: 406397 - RNA, 32 nt, Homo Sapiens
acuuuuuccagaauuugaauauuaacgcuaaa

SEQ ID NO: 406398 - RNA, 32 nt, Homo Sapiens
uaucaacacgucgggaguauguguguuagaag

SEQ ID NO: 406399 - RNA, 31 nt, Homo Sapiens
aaggagugaaacaucauagaaacugucuagc

SEQ ID NO: 406400 - RNA, 32 nt, Homo Sapiens
acccugcuuuaaaggguuguuugacuagguuu

SEQ ID NO: 406401 - RNA, 32 nt, Homo Sapiens
gcucagacacugggcucccagcuggggacugc

SEQ ID NO: 406402 - RNA, 32 nt, Homo Sapiens
ggaggggccccgaugagggguccugggagggg

SEQ ID NO: 406403 - RNA, 32 nt, Homo Sapiens
gaaaaggaaaauuucacucgucuaaacacuuu

SEQ ID NO: 406404 - RNA, 32 nt, Homo Sapiens
ugcagccucagccccaggcacagcgccgcauc

SEQ ID NO: 406405 - RNA, 31 nt, Homo Sapiens
agcaaccggacuugccugccucggccucacc

SEQ ID NO: 406406 - RNA, 32 nt, Homo Sapiens
aaaucaugggccgugcgguagggguugaaaug

SEQ ID NO: 406407 - RNA, 32 nt, Homo Sapiens
gaacugaagaugagaauacuggucaucuaacu

SEQ ID NO: 406408 - RNA, 32 nt, Homo Sapiens
caggcauuguggccagcucugccucucuaaaa

SEQ ID NO: 406409 - RNA, 32 nt, Homo Sapiens
agcccaccaugccccaggcucagccaggagcu

SEQ ID NO: 406410 - RNA, 32 nt, Homo Sapiens
gugugagcaguagaagagaccacauuuacagu

SEQ ID NO: 406411 - RNA, 32 nt, Homo Sapiens
aauaaauaaaaauuauauaccaauuugacugu

SEQ ID NO: 406412 - RNA, 32 nt, Homo Sapiens
cuauuggaauuugaaauaaauaaaaacaucuu

SEQ ID NO: 406413 - RNA, 32 nt, Homo Sapiens
ggaaaagaaugccugggggucuguaauaggag

SEQ ID NO: 406414 - RNA, 32 nt, Homo Sapiens
ccguuucucggcaggucccuggcggugagcgc

SEQ ID NO: 406415 - RNA, 32 nt, Homo Sapiens
uucccuugccuggcccacugcaccugucccca

SEQ ID NO: 406416 - RNA, 32 nt, Homo Sapiens
uaagguugauuaaagggaaaaaaggcuccagu

SEQ ID NO: 406417 - RNA, 32 nt, Homo Sapiens
uucaaucauuauagagaggaaaacaguacuuu

SEQ ID NO: 406418 - RNA, 32 nt, Homo Sapiens
accaucagcagcucaucccugugcauggugau

SEQ ID NO: 406419 - RNA, 32 nt, Homo Sapiens
caaccuacugguuugugaugagccugaaguac

SEQ ID NO: 406420 - RNA, 32 nt, Homo Sapiens
cagagagagaauacaaguuuuguccuguccaa

SEQ ID NO: 406421 - RNA, 32 nt, Homo Sapiens
ggccuggcugagagggcuggguugggggucag

SEQ ID NO: 406422 - RNA, 32 nt, Homo Sapiens
cgcccggucagaagcuguguuuuuaaguggac

SEQ ID NO: 406423 - RNA, 32 nt, Homo Sapiens
aagcuaccgagacuuggacaagccccgucgcu

SEQ ID NO: 406424 - RNA, 32 nt, Homo Sapiens
ugccuguaaucccagcacuuugggaggccgug

SEQ ID NO: 406425 - RNA, 30 nt, Homo Sapiens
agcacugcccugggcuggccggcgccguac

SEQ ID NO: 406426 - RNA, 32 nt, Homo Sapiens
auccuggguuacauggguuauuaaacuguuuc

SEQ ID NO: 406427 - RNA, 32 nt, Homo Sapiens
cgcagggccagccuguuucucuaacaaacaaa

SEQ ID NO: 406428 - RNA, 32 nt, Homo Sapiens
gaaaaauucuaguauuuugauuauuugaaucu

SEQ ID NO: 406429 - RNA, 30 nt, Homo Sapiens
uacagugucugugauguuuggaagcaaagc

SEQ ID NO: 406430 - RNA, 32 nt, Homo Sapiens
cuauuagaacuaauaagcaaguuccgcaaggu

SEQ ID NO: 406431 - RNA, 32 nt, Homo Sapiens
uuaguacguguucuucugucagggccaaaacu

SEQ ID NO: 406432 - RNA, 32 nt, Homo Sapiens
accacaccuggcuaauuuuuuauuuuccuuuu

SEQ ID NO: 406433 - RNA, 32 nt, Homo Sapiens
ucagcucagugacacccauuucagacuucuga

SEQ ID NO: 406434 - RNA, 32 nt, Homo Sapiens
cauggagaucggcaccgagaucagccgcaaga

SEQ ID NO: 406435 - RNA, 32 nt, Homo Sapiens
cgugugagggcaaggcaggggggauuugcucu

SEQ ID NO: 406436 - RNA, 32 nt, Homo Sapiens
gcccgggcagugccauccuggugggggagggc

SEQ ID NO: 406437 - RNA, 32 nt, Homo Sapiens
uuaaucucugcaguuuauucucucuuaaggaa

SEQ ID NO: 406438 - RNA, 32 nt, Homo Sapiens
uaucaccaggaggaucucuuugaaagauucac

SEQ ID NO: 406439 - RNA, 31 nt, Homo Sapiens
gcagagcugccggccgcugcacagcccucag

SEQ ID NO: 406440 - RNA, 32 nt, Homo Sapiens
uuuauagcagugcuguuuccugggcucaggaa

SEQ ID NO: 406441 - RNA, 32 nt, Homo Sapiens
ugcgagugugauucuaucaguagauuuugccu

SEQ ID NO: 406442 - RNA, 32 nt, Homo Sapiens
uugggccaggcucaaugcuguaguuuuaaugc

SEQ ID NO: 406443 - RNA, 32 nt, Homo Sapiens
ucugggaccugccagcaccguuuuugugguua

SEQ ID NO: 406444 - RNA, 32 nt, Homo Sapiens
uuaguggauuuauguccucacuugucacuaau

SEQ ID NO: 406445 - RNA, 32 nt, Homo Sapiens
uagccguacuuugaacucuggccccucagguu

SEQ ID NO: 406446 - RNA, 32 nt, Homo Sapiens
cuggaugguguuggggcaugauguguggagga

SEQ ID NO: 406447 - RNA, 32 nt, Homo Sapiens
cacaguugcuaugauauguaacaagucacaca

SEQ ID NO: 406448 - RNA, 32 nt, Homo Sapiens
uguccaaaacauugugcuuuugcauguagcug

SEQ ID NO: 406449 - RNA, 32 nt, Homo Sapiens
ucuguggugaauggguggccugugauggacgg

SEQ ID NO: 406450 - RNA, 32 nt, Homo Sapiens
aaagaagucuaguaagaauuaauuacacagaa

SEQ ID NO: 406451 - RNA, 32 nt, Homo Sapiens
uccguggcgcuaguccagcacgcccaggguua

SEQ ID NO: 406452 - RNA, 32 nt, Homo Sapiens
caaggaccgagacacagacauggaaggacuuc

SEQ ID NO: 406453 - RNA, 32 nt, Homo Sapiens
cagagcccguucugcgccccacaccaucugga

SEQ ID NO: 406454 - RNA, 32 nt, Homo Sapiens
ccuguaucagcuuccagccuccccucaggcuu

SEQ ID NO: 406455 - RNA, 32 nt, Homo Sapiens
ucuaacgcucuccuucgagggaccaccacgga

SEQ ID NO: 406456 - RNA, 32 nt, Homo Sapiens
guucaugucgauccuuuauuuauuuuguuaaa

SEQ ID NO: 406457 - RNA, 32 nt, Homo Sapiens
cacaccugcaggcaggaugcugucgucaauga

SEQ ID NO: 406458 - RNA, 32 nt, Homo Sapiens
uuuucaaggggagaggaguagugacaagucgu

SEQ ID NO: 406459 - RNA, 32 nt, Homo Sapiens
uagggaaggcugggauaugaugagagauucca

SEQ ID NO: 406460 - RNA, 32 nt, Homo Sapiens
aguguuaggaaaauguuaauagauaauucugc

SEQ ID NO: 406461 - RNA, 32 nt, Homo Sapiens
ccacugcaggaucgauauuugcugccauuucu

SEQ ID NO: 406462 - RNA, 32 nt, Homo Sapiens
ucggccuccuuccccucccggagccgcgcgug

SEQ ID NO: 406463 - RNA, 32 nt, Homo Sapiens
auuuuguacuuuggaacuguaccuuggauggu

SEQ ID NO: 406464 - RNA, 32 nt, Homo Sapiens
aauagaguaagguaaagaagauauuaaguccc

SEQ ID NO: 406465 - RNA, 32 nt, Homo Sapiens
acguggauuugacuuaaagaaguaaagagcau

SEQ ID NO: 406466 - RNA, 32 nt, Homo Sapiens
cgaaugcucugugcagcuggacucuguuuccg

SEQ ID NO: 406467 - RNA, 32 nt, Homo Sapiens
cugcuugccugccugccugccaauggcccuga

SEQ ID NO: 406468 - RNA, 32 nt, Homo Sapiens
agccuucuggcccaacucuggaugccuguuau

SEQ ID NO: 406469 - RNA, 32 nt, Homo Sapiens
ucauuuugcauuacugucuuccguggauguuu

SEQ ID NO: 406470 - RNA, 32 nt, Homo Sapiens
cuucugaagcaucaguuuuuauggaaacuuau

SEQ ID NO: 406471 - RNA, 32 nt, Homo Sapiens
aagauugccgggggcccugauuuuguucucuc

SEQ ID NO: 406472 - RNA, 32 nt, Homo Sapiens
acauuacaucgcccuuguuuuguuugaccugu

SEQ ID NO: 406473 - RNA, 32 nt, Homo Sapiens
ggcugacuggucugcugcccgggcccaggagu

SEQ ID NO: 406474 - RNA, 32 nt, Homo Sapiens
gcccacaaagauuugguuucccucugcccggc

SEQ ID NO: 406475 - RNA, 32 nt, Homo Sapiens
gaauccagguccaguuuguuguuuccuccagg

SEQ ID NO: 406476 - RNA, 32 nt, Homo Sapiens
ucaaaucaacugagugccgccuucucagucug

SEQ ID NO: 406477 - RNA, 32 nt, Homo Sapiens
uuaauuacuuggauugaagacuagccuauuga

SEQ ID NO: 406478 - RNA, 32 nt, Homo Sapiens
ugaauuugauaaaaacccaaaauacagcuaug

SEQ ID NO: 406479 - RNA, 32 nt, Homo Sapiens
uguuuagcuucaguguauuuuacaaucugaug

SEQ ID NO: 406480 - RNA, 32 nt, Homo Sapiens
aauuagcugggcaugguggccggcgccuguaa

SEQ ID NO: 406481 - RNA, 32 nt, Homo Sapiens
guccccagcgccccgcggccucuggagccccu

SEQ ID NO: 406482 - RNA, 32 nt, Homo Sapiens
agugaccuggaaagguccuguuugcaucugac

SEQ ID NO: 406483 - RNA, 32 nt, Homo Sapiens
caggaccacaugaauggaagugccaggaagac

SEQ ID NO: 406484 - RNA, 32 nt, Homo Sapiens
gcagucaccuggagaagcugguaggguaaggg

SEQ ID NO: 406485 - RNA, 32 nt, Homo Sapiens
ugagccgccuccgcggccgccgaggucgugcg

SEQ ID NO: 406486 - RNA, 32 nt, Homo Sapiens
aggucuugggggcacuauagccacuaaacgag

SEQ ID NO: 406487 - RNA, 32 nt, Homo Sapiens
ggugaaaggacaaaagccagacacauuucaac

SEQ ID NO: 406488 - RNA, 32 nt, Homo Sapiens
aaucaaggaaaaucauuaacuacaucaguauc

SEQ ID NO: 406489 - RNA, 32 nt, Homo Sapiens
cacauacgccacuguggaggagguggaugcag

SEQ ID NO: 406490 - RNA, 32 nt, Homo Sapiens
agugaaaguauuuauugagcaucuacuguaua

SEQ ID NO: 406491 - RNA, 29 nt, Homo Sapiens
gaagaugagcuuccucuucagcagccgcu

SEQ ID NO: 406492 - RNA, 32 nt, Homo Sapiens
agauuagaaguccugaugugaaaugggaggac

SEQ ID NO: 406493 - RNA, 32 nt, Homo Sapiens
cuugcucgcuacuuucuagggucuuaauagua

SEQ ID NO: 406494 - RNA, 32 nt, Homo Sapiens
guucuagaauuuucuguaaacccugcuacugg

SEQ ID NO: 406495 - RNA, 32 nt, Homo Sapiens
gagauggguucagugguaugagcagaggaaga

SEQ ID NO: 406496 - RNA, 32 nt, Homo Sapiens
uucccggggcuuugcuggggauucagggagca

SEQ ID NO: 406497 - RNA, 32 nt, Homo Sapiens
cauuucuaaaagacagugaugaccgcacgcau

SEQ ID NO: 406498 - RNA, 32 nt, Homo Sapiens
auugaaugaucaaauauuggauuuaccuuuaa

SEQ ID NO: 406499 - RNA, 32 nt, Homo Sapiens
agaucguucccucucugguugcacgcugggga

SEQ ID NO: 406500 - RNA, 32 nt, Homo Sapiens
aguuuagaacgcaauguuucuagagacauauu

SEQ ID NO: 406501 - RNA, 32 nt, Homo Sapiens
ucaacaugaagaugauaugggccggggcgggg

SEQ ID NO: 406502 - RNA, 32 nt, Homo Sapiens
gaggguauuugcucuuuuuuuuuucucacucc

SEQ ID NO: 406503 - RNA, 32 nt, Homo Sapiens
gggagaggccucuggaggcaagggguaaccua

SEQ ID NO: 406504 - RNA, 32 nt, Homo Sapiens
cugcccggcuccucccgccgccggcuccucag

SEQ ID NO: 406505 - RNA, 32 nt, Homo Sapiens
cugauacaaauagucaagaagauccagcugac

SEQ ID NO: 406506 - RNA, 32 nt, Homo Sapiens
gcuggggcgcggcaccacggacggugccccuu

SEQ ID NO: 406507 - RNA, 32 nt, Homo Sapiens
ugagaagugggcggcgggguggcgggggccau

SEQ ID NO: 406508 - RNA, 28 nt, Homo Sapiens
guguacuacaaaaugagcuaucugaaac

SEQ ID NO: 406509 - RNA, 32 nt, Homo Sapiens
uuucaagucugcuguggcuaauaguggucaag

SEQ ID NO: 406510 - RNA, 32 nt, Homo Sapiens
acauaggauucaagaggaugacacucugugug

SEQ ID NO: 406511 - RNA, 32 nt, Homo Sapiens
guagacccaggagaguugagagggugggggac

SEQ ID NO: 406512 - RNA, 32 nt, Homo Sapiens
gaaccauuaauaaaacaaaacaaaacaaagca

SEQ ID NO: 406513 - RNA, 32 nt, Homo Sapiens
gcacugugcugcgauccguguguccucaaucu

SEQ ID NO: 406514 - RNA, 32 nt, Homo Sapiens
uucacuaguaaccuaaagaggcuauauucauu

SEQ ID NO: 406515 - RNA, 32 nt, Homo Sapiens
aucaauggauuagugcuguuaucaccagagug

SEQ ID NO: 406516 - RNA, 30 nt, Homo Sapiens
ucgcuggagaagcuggaagggcuguugucu

SEQ ID NO: 406517 - RNA, 32 nt, Homo Sapiens
ccccacauucuggcuccaccggggagggacag

SEQ ID NO: 406518 - RNA, 32 nt, Homo Sapiens
cuaaggcggugggacagggacacuuugccugg

SEQ ID NO: 406519 - RNA, 32 nt, Homo Sapiens
acagucccgcccagccccggaccugcagcgcg

SEQ ID NO: 406520 - RNA, 32 nt, Homo Sapiens
auagcagcacaccagacccaacguggguucau

SEQ ID NO: 406521 - RNA, 32 nt, Homo Sapiens
uccagguagugccagcaggcgucuucucuucu

SEQ ID NO: 406522 - RNA, 32 nt, Homo Sapiens
cccccgcgccgaccagaauccgugaacauggc

SEQ ID NO: 406523 - RNA, 32 nt, Homo Sapiens
guuuaaaaauuuggaaugcaaauuacuuccug

SEQ ID NO: 406524 - RNA, 32 nt, Homo Sapiens
gccgccgccaccgcagcagccggagcagcaug

SEQ ID NO: 406525 - RNA, 32 nt, Homo Sapiens
ggugagcgagggugcguggugcgcggcggcgg

SEQ ID NO: 406526 - RNA, 32 nt, Homo Sapiens
auuggcaggaggagagcaccaggacgaggaug

SEQ ID NO: 406527 - RNA, 32 nt, Homo Sapiens
acucaacagaauugagacacguuuguaaucgc

SEQ ID NO: 406528 - RNA, 32 nt, Homo Sapiens
gugcccaggaccagugagagcguucccaguca

SEQ ID NO: 406529 - RNA, 32 nt, Homo Sapiens
aacaucuggaggauuuuagucuuucuuacaca

SEQ ID NO: 406530 - RNA, 32 nt, Homo Sapiens
cucaccuggcucugccucccccgugcucucgg

SEQ ID NO: 406531 - RNA, 32 nt, Homo Sapiens
acuccagucuaauuuaaaucugaccacaguug

SEQ ID NO: 406532 - RNA, 32 nt, Homo Sapiens
ggggagagugcacacaguggggccucaaaggu

SEQ ID NO: 406533 - RNA, 32 nt, Homo Sapiens
caaacuaaaacaaaacagaacaaaagcaaagg

SEQ ID NO: 406534 - RNA, 32 nt, Homo Sapiens
cauuccaaaaauuuauauacugcacaaacugg

SEQ ID NO: 406535 - RNA, 32 nt, Homo Sapiens
ugaggcgccccgcucuucuccucugccccggg

SEQ ID NO: 406536 - RNA, 32 nt, Homo Sapiens
caccagccugaagggccuccuaggggauccuc

SEQ ID NO: 406537 - RNA, 32 nt, Homo Sapiens
uuggguuguaaguggaaguuggauuccaagag

SEQ ID NO: 406538 - RNA, 32 nt, Homo Sapiens
uggcugcagaucuggagguggaggcaguaccc

SEQ ID NO: 406539 - RNA, 32 nt, Homo Sapiens
uguccugggugaaaauggcugucuagacuaaa

SEQ ID NO: 406540 - RNA, 32 nt, Homo Sapiens
aaguaguagcguugggcugcggcagcggagga

SEQ ID NO: 406541 - RNA, 32 nt, Homo Sapiens
gggcaagaagaggacagugauauuuuaaaaca

SEQ ID NO: 406542 - RNA, 32 nt, Homo Sapiens
gcaugagagaauagaaaugugcuuuguauaca

SEQ ID NO: 406543 - RNA, 32 nt, Homo Sapiens
cgacggccgcgugacugccucagcguccccga

SEQ ID NO: 406544 - RNA, 32 nt, Homo Sapiens
cugcauuuugugcuagacaauuacuguucuuu

SEQ ID NO: 406545 - RNA, 32 nt, Homo Sapiens
agcacacugggaagcugugggccacgguggug

SEQ ID NO: 406546 - RNA, 32 nt, Homo Sapiens
gaugugguuuggcucuguggccccacucaaau

SEQ ID NO: 406547 - RNA, 31 nt, Homo Sapiens
guucuaagcagcacugcaggagucccccugu

SEQ ID NO: 406548 - RNA, 32 nt, Homo Sapiens
cgcgcagcgcagcgcagcucagcgcaccgacu

SEQ ID NO: 406549 - RNA, 32 nt, Homo Sapiens
gccacccugcuguuccgcugagguggugggga

SEQ ID NO: 406550 - RNA, 32 nt, Homo Sapiens
ucaggcauucgcgucggacgucuggguuugaa

SEQ ID NO: 406551 - RNA, 32 nt, Homo Sapiens
ugcuagcccccugacccugcauguuuaacacc

SEQ ID NO: 406552 - RNA, 32 nt, Homo Sapiens
caggcuuuuacgagaugagcgacgguggaucc

SEQ ID NO: 406553 - RNA, 32 nt, Homo Sapiens
ccaaaaaacaacugucaguuuuauugagaugg

SEQ ID NO: 406554 - RNA, 32 nt, Homo Sapiens
aguucaaggggcccagguuugcucuccccaag

SEQ ID NO: 406555 - RNA, 32 nt, Homo Sapiens
uugcuguuuugauucccgggcuuaccagguga

SEQ ID NO: 406556 - RNA, 32 nt, Homo Sapiens
agguugugcguggcuccugaccugcugcuaag

SEQ ID NO: 406557 - RNA, 32 nt, Homo Sapiens
ggccuccccccauggccaccgcccccucuuau

SEQ ID NO: 406558 - RNA, 32 nt, Homo Sapiens
guucuccgggagagggggagugcgcggcggcc

SEQ ID NO: 406559 - RNA, 32 nt, Homo Sapiens
cuccccguggccugggacguggcugguagugu

SEQ ID NO: 406560 - RNA, 27 nt, Homo Sapiens
acucugggcaucuucagcccuucuuac

SEQ ID NO: 406561 - RNA, 32 nt, Homo Sapiens
uugcucagucccagcucugccuguugcucuag

SEQ ID NO: 406562 - RNA, 32 nt, Homo Sapiens
ugcaugggcucgccgugucucagccucugcca

SEQ ID NO: 406563 - RNA, 32 nt, Homo Sapiens
ggcaaaggugaacgcagggcggugggcuuuuc

SEQ ID NO: 406564 - RNA, 32 nt, Homo Sapiens
ccccacagcggcugugcucuucugggagguuc

SEQ ID NO: 406565 - RNA, 32 nt, Homo Sapiens
aguaaccauuuaaugucgaggcucuauuucgg

SEQ ID NO: 406566 - RNA, 31 nt, Homo Sapiens
gccuggggcuguugggagccaagggcccccu

SEQ ID NO: 406567 - RNA, 32 nt, Homo Sapiens
gagauucuguuguuuuguuuuuaagcgccaga

SEQ ID NO: 406568 - RNA, 32 nt, Homo Sapiens
ccagcugaauaguuacugcugcacuuucacua

SEQ ID NO: 406569 - RNA, 30 nt, Homo Sapiens
gggcccugcgcgcagcauuuugggaaagag

SEQ ID NO: 406570 - RNA, 32 nt, Homo Sapiens
cacucuaguggaaaagagauccuguuaguuuu

SEQ ID NO: 406571 - RNA, 31 nt, Homo Sapiens
agaggagcacagaauuuuggauauguuucca

SEQ ID NO: 406572 - RNA, 32 nt, Homo Sapiens
aucauuaaugaaauccugaacuuuauucugug

SEQ ID NO: 406573 - RNA, 32 nt, Homo Sapiens
agcagcuggguugggggugguggucauuaaug

SEQ ID NO: 406574 - RNA, 27 nt, Homo Sapiens
ccauggaggagcugcaggaugauuaug

SEQ ID NO: 406575 - RNA, 32 nt, Homo Sapiens
ccccacgggccaugcccggccggcccuaagcg

SEQ ID NO: 406576 - RNA, 32 nt, Homo Sapiens
gaccggaguuaugacaagcuuuccaaauauuu

SEQ ID NO: 406577 - RNA, 32 nt, Homo Sapiens
ucuucccucuucauuucuggccuaucuuuuaa

SEQ ID NO: 406578 - RNA, 32 nt, Homo Sapiens
ggcaccaaccccacccaaucaucccuuugucc

SEQ ID NO: 406579 - RNA, 32 nt, Homo Sapiens
acacguggggcacccggcacccaugcucuggc

SEQ ID NO: 406580 - RNA, 32 nt, Homo Sapiens
gcagagcuuucauuaucaaaguguucuuccuc

SEQ ID NO: 406581 - RNA, 32 nt, Homo Sapiens
uuuucccccuccccgggggccaagggcuccgg

SEQ ID NO: 406582 - RNA, 32 nt, Homo Sapiens
agcuugaguaaaauaaauauugucuuuuugua

SEQ ID NO: 406583 - RNA, 32 nt, Homo Sapiens
uaaaugaggucuuugcauuuaaugaguuuuau

SEQ ID NO: 406584 - RNA, 32 nt, Homo Sapiens
uuaaaguacagcgaagaagaaagggaaguauu

SEQ ID NO: 406585 - RNA, 32 nt, Homo Sapiens
uucucuagcuuagguaucugugacucuugggc

SEQ ID NO: 406586 - RNA, 32 nt, Homo Sapiens
gagcugggagacggcggcagcccagcggccgg

SEQ ID NO: 406587 - RNA, 32 nt, Homo Sapiens
cucugcuggaaguucugccauguguuccacaa

SEQ ID NO: 406588 - RNA, 32 nt, Homo Sapiens
aacucucuucuccucccuagugcgagguuaaa

SEQ ID NO: 406589 - RNA, 32 nt, Homo Sapiens
ugaagaggaaauauaaauuaaauuguaaauac

SEQ ID NO: 406590 - RNA, 32 nt, Homo Sapiens
agccgcagccccugugcacaccuaacacaggg

SEQ ID NO: 406591 - RNA, 32 nt, Homo Sapiens
aauccuaggcauccccauuauguucuuuuuau

SEQ ID NO: 406592 - RNA, 32 nt, Homo Sapiens
gcuguggggccuccgcgccgcggccguuaguc

SEQ ID NO: 406593 - RNA, 32 nt, Homo Sapiens
ucgaaaaugcaaacuuggggagggcggaaaca

SEQ ID NO: 406594 - RNA, 32 nt, Homo Sapiens
gcacgcuggaucgucuaucugauuccaaagcu

SEQ ID NO: 406595 - RNA, 32 nt, Homo Sapiens
acauacuagaauucacaggggagacaaacauu

SEQ ID NO: 406596 - RNA, 32 nt, Homo Sapiens
aaaauacaaaaauuagccgagcgugaugguau

SEQ ID NO: 406597 - RNA, 32 nt, Homo Sapiens
ucuaaccugaugcucuuggagagagauaaccu

SEQ ID NO: 406598 - RNA, 32 nt, Homo Sapiens
ugucuuugcuguucuucagacuccauuuauag

SEQ ID NO: 406599 - RNA, 32 nt, Homo Sapiens
cuggagugugugccgccuucucuugacacugu

SEQ ID NO: 406600 - RNA, 32 nt, Homo Sapiens
ggaaccuugcacuucacacuucuugagucucg

SEQ ID NO: 406601 - RNA, 32 nt, Homo Sapiens
guaaaggcauuuuuuucuuuuuuuuuccagua

SEQ ID NO: 406602 - RNA, 29 nt, Homo Sapiens
cgcuccauucggaugucuaaugaaucucu

SEQ ID NO: 406603 - RNA, 31 nt, Homo Sapiens
uuuuuucauuugauuugucaauaaacgaauc

SEQ ID NO: 406604 - RNA, 32 nt, Homo Sapiens
ccacguacuuuuuacauacauugauucauguc

SEQ ID NO: 406605 - RNA, 32 nt, Homo Sapiens
ccgccaucacggacuuccugugggacaagcgc

SEQ ID NO: 406606 - RNA, 32 nt, Homo Sapiens
uccucacaccaauaucuuccacuguuacugug

SEQ ID NO: 406607 - RNA, 32 nt, Homo Sapiens
ugcauguauaccuguguaacaaaccugcaugu

SEQ ID NO: 406608 - RNA, 32 nt, Homo Sapiens
cacacaacaaaguagcacaaagcaguuuaaca

SEQ ID NO: 406609 - RNA, 32 nt, Homo Sapiens
agcucugaguuccauuuuacagcugaagaaau

SEQ ID NO: 406610 - RNA, 32 nt, Homo Sapiens
aggaaaaauaauuacagucaaaauauuugcaa

SEQ ID NO: 406611 - RNA, 32 nt, Homo Sapiens
cuuuguucuguccccugccccauccccagcac

SEQ ID NO: 406612 - RNA, 31 nt, Homo Sapiens
cccugcacgcugggccuucagaauuaauggc

SEQ ID NO: 406613 - RNA, 30 nt, Homo Sapiens
cuuucgugucaccacuguaauuacaaccua

SEQ ID NO: 406614 - RNA, 32 nt, Homo Sapiens
agagggguggccuggggugcuucaugagaaau

SEQ ID NO: 406615 - RNA, 32 nt, Homo Sapiens
gagcgccugccugccugccgcugcugcgggcg

SEQ ID NO: 406616 - RNA, 32 nt, Homo Sapiens
cggccgagggcuucugccgcccgggcaccccc

SEQ ID NO: 406617 - RNA, 32 nt, Homo Sapiens
gacaaguuugggaagcugaugcccuaauuuug

SEQ ID NO: 406618 - RNA, 32 nt, Homo Sapiens
ggauuauaaaauguaauuauguuuaaaauucc

SEQ ID NO: 406619 - RNA, 32 nt, Homo Sapiens
uugaguuugggguuuccaguaccaucuggaug

SEQ ID NO: 406620 - RNA, 32 nt, Homo Sapiens
uccuguguggugccggaagagcgccagguuca

SEQ ID NO: 406621 - RNA, 32 nt, Homo Sapiens
agauagauaacgccuucauuccaauuaauugu

SEQ ID NO: 406622 - RNA, 32 nt, Homo Sapiens
ugaaaccacauuuuuugguuugauaauaugca

SEQ ID NO: 406623 - RNA, 32 nt, Homo Sapiens
ucaguguaguaauauuuucagacguuucccca

SEQ ID NO: 406624 - RNA, 32 nt, Homo Sapiens
ggguacagacaagaagcaaguuucacaguuaa

SEQ ID NO: 406625 - RNA, 32 nt, Homo Sapiens
cuuggcaucuucugccuuugcuacugagcggu

SEQ ID NO: 406626 - RNA, 32 nt, Homo Sapiens
cuuuuagaauaaagcugcuacuuuaacagagc

SEQ ID NO: 406627 - RNA, 32 nt, Homo Sapiens
auccagaccccaccccacucacgcggccaugg

SEQ ID NO: 406628 - RNA, 32 nt, Homo Sapiens
gaccagccuggggaacacauccugucucuaca

SEQ ID NO: 406629 - RNA, 32 nt, Homo Sapiens
cugcgccuggguguugagagccauccugcaag

SEQ ID NO: 406630 - RNA, 32 nt, Homo Sapiens
ugauccccuggccaaaucuuucuuccucugga

SEQ ID NO: 406631 - RNA, 32 nt, Homo Sapiens
uuacauauauugcuguuacuucugcuuucuuu

SEQ ID NO: 406632 - RNA, 32 nt, Homo Sapiens
uacaagugcccaccaccacaccuagcuaauau

SEQ ID NO: 406633 - RNA, 32 nt, Homo Sapiens
aaaguuucuagagagagaaaacaaaagaucag

SEQ ID NO: 406634 - RNA, 32 nt, Homo Sapiens
ggaggguaaauauuaaagugcguauuauguac

SEQ ID NO: 406635 - RNA, 32 nt, Homo Sapiens
caacacaucagugucauuuggguguuuuggca

SEQ ID NO: 406636 - RNA, 32 nt, Homo Sapiens
agaagaauugucuugguccacacauaaaauac

SEQ ID NO: 406637 - RNA, 32 nt, Homo Sapiens
ucacacaggaaguuggcagcucugcuccaucc

SEQ ID NO: 406638 - RNA, 32 nt, Homo Sapiens
ucuagcgcaggaaaacgcucucccggaucucg

SEQ ID NO: 406639 - RNA, 32 nt, Homo Sapiens
uggcaggaagcagccuugaagacccgucuuuc

SEQ ID NO: 406640 - RNA, 32 nt, Homo Sapiens
gaaugucuucaugccuugaaagaaauugcuaa

SEQ ID NO: 406641 - RNA, 32 nt, Homo Sapiens
cauaaaucugcuuuuccauuauaaggcagaga

SEQ ID NO: 406642 - RNA, 32 nt, Homo Sapiens
cacuaagaugagggcgcaagaaccgguugugu

SEQ ID NO: 406643 - RNA, 32 nt, Homo Sapiens
acuauuuucacagaucucaacuaaaaccccuu

SEQ ID NO: 406644 - RNA, 32 nt, Homo Sapiens
gcucccgcuguggccgcacgccucucccugca

SEQ ID NO: 406645 - RNA, 32 nt, Homo Sapiens
agcggccggcagccggcgaccggcccucaccg

SEQ ID NO: 406646 - RNA, 32 nt, Homo Sapiens
ccuaagaaaaagcgacauaaaaauauacuuau

SEQ ID NO: 406647 - RNA, 32 nt, Homo Sapiens
guacuaggaucuuuuacuugaaucuaaauuua

SEQ ID NO: 406648 - RNA, 32 nt, Homo Sapiens
uuuuacaagggcauaaaguaaauacaugcaua

SEQ ID NO: 406649 - RNA, 32 nt, Homo Sapiens
uccccggccgugacccaggcccggggagcuag

SEQ ID NO: 406650 - RNA, 32 nt, Homo Sapiens
ccaauuuauuuucucccacuuugucauuaaaa

SEQ ID NO: 406651 - RNA, 32 nt, Homo Sapiens
guaccccuuuuccucucagccccucccugugu

SEQ ID NO: 406652 - RNA, 32 nt, Homo Sapiens
gauucugauaaugguuugugugagauuugauc

SEQ ID NO: 406653 - RNA, 32 nt, Homo Sapiens
agagaggguuuacuuaggaagaauugggauag

SEQ ID NO: 406654 - RNA, 32 nt, Homo Sapiens
cugaguucccggaaacaagauacagauuucag

SEQ ID NO: 406655 - RNA, 32 nt, Homo Sapiens
cagcacucaaccaaggagcaaagcucauccca

SEQ ID NO: 406656 - RNA, 32 nt, Homo Sapiens
ucauuugagauuugggagguaaaggcugucuu

SEQ ID NO: 406657 - RNA, 32 nt, Homo Sapiens
gcccugcccuccccaugccuccugcccugcag

SEQ ID NO: 406658 - RNA, 32 nt, Homo Sapiens
guucccugugcccuccucgaggugggcagcca

SEQ ID NO: 406659 - RNA, 32 nt, Homo Sapiens
acuacagcagcuuuugacuguuucccggacac

SEQ ID NO: 406660 - RNA, 32 nt, Homo Sapiens
uuggucagccuggaucaacugcacuugaucuu

SEQ ID NO: 406661 - RNA, 32 nt, Homo Sapiens
gguggcggggccugggucucucgucccacccg

SEQ ID NO: 406662 - RNA, 32 nt, Homo Sapiens
gucuaauccaacagcaaauccccuugaugcua

SEQ ID NO: 406663 - RNA, 32 nt, Homo Sapiens
ucccuccucuucacauuccccccgaccccaaa

SEQ ID NO: 406664 - RNA, 32 nt, Homo Sapiens
caguaagagaagccugcuaagcccuuaccucu

SEQ ID NO: 406665 - RNA, 32 nt, Homo Sapiens
cagguccucacgcugcagacgcccccuagagg

SEQ ID NO: 406666 - RNA, 32 nt, Homo Sapiens
cgcggcugccugcgcgcacgcagggaccggag

SEQ ID NO: 406667 - RNA, 32 nt, Homo Sapiens
ucugaaaugcaaacaaggaaacagaagcuucu

SEQ ID NO: 406668 - RNA, 32 nt, Homo Sapiens
ggucucaaacuccucgguucaagcaauucgcc

SEQ ID NO: 406669 - RNA, 32 nt, Homo Sapiens
caugaggccccggugaguccccuuguucucgc

SEQ ID NO: 406670 - RNA, 32 nt, Homo Sapiens
guaucacggauuacaaugaacgcagugcagag

SEQ ID NO: 406671 - RNA, 32 nt, Homo Sapiens
acgaauuggaucaaucuugaaauacucaacca

SEQ ID NO: 406672 - RNA, 32 nt, Homo Sapiens
uggccuugugcaaauacgauauguugcuuagg

SEQ ID NO: 406673 - RNA, 32 nt, Homo Sapiens
cacccauaucaugcacacaauuagauuucuca

SEQ ID NO: 406674 - RNA, 32 nt, Homo Sapiens
gagccuagcuccugccacauggagcccccucu

SEQ ID NO: 406675 - RNA, 32 nt, Homo Sapiens
acuguucguugaucuuuuuuuuuuuuuuuuuu

SEQ ID NO: 406676 - RNA, 32 nt, Homo Sapiens
ccaacuacccucggcgaucccaggcuuggcgg

SEQ ID NO: 406677 - RNA, 32 nt, Homo Sapiens
ugaacaaauauguuaguaaugauggaacagau

SEQ ID NO: 406678 - RNA, 32 nt, Homo Sapiens
ucacuuuuuuacaacuccaacuucuauguuua

SEQ ID NO: 406679 - RNA, 32 nt, Homo Sapiens
aagcugugggagacagaugacaaugaugcuug

SEQ ID NO: 406680 - RNA, 32 nt, Homo Sapiens
auuugguguuacaagcagcaugaauuccagcc

SEQ ID NO: 406681 - RNA, 32 nt, Homo Sapiens
auauaucauauuuucuuaauucauuguacaca

SEQ ID NO: 406682 - RNA, 32 nt, Homo Sapiens
ggaggcugaggcgggcagaucgcgaggucagg

SEQ ID NO: 406683 - RNA, 32 nt, Homo Sapiens
caccucagccucccaaauuugcugggauucca

SEQ ID NO: 406684 - RNA, 32 nt, Homo Sapiens
uucuaaaaaugguauggccauuagaucugugc

SEQ ID NO: 406685 - RNA, 32 nt, Homo Sapiens
aaucaauauguuguuuauaguuucauugcuuu

SEQ ID NO: 406686 - RNA, 32 nt, Homo Sapiens
cuuuccuuagacuuguucugcauuuuauuuuu

SEQ ID NO: 406687 - RNA, 30 nt, Homo Sapiens
ucugagaacgucccugccuucacuccugcu

SEQ ID NO: 406688 - RNA, 32 nt, Homo Sapiens
ucagccggcggcggcccgggcccagcaaccau

SEQ ID NO: 406689 - RNA, 32 nt, Homo Sapiens
ugcauguaaucccagcacuuugggaggccgag

SEQ ID NO: 406690 - RNA, 32 nt, Homo Sapiens
cuucacugauggugucugguguguagauugcu

SEQ ID NO: 406691 - RNA, 31 nt, Homo Sapiens
aaugaacagaacaguuuuggauauguaugag

SEQ ID NO: 406692 - RNA, 32 nt, Homo Sapiens
ugcuucuugugcagugccuggacccagguauc

SEQ ID NO: 406693 - RNA, 32 nt, Homo Sapiens
uccucugcccucggggcagcccacacaaaagg

SEQ ID NO: 406694 - RNA, 32 nt, Homo Sapiens
augaaugauucugaaacuaacuucuauagaga

SEQ ID NO: 406695 - RNA, 32 nt, Homo Sapiens
gugcaggggggaggcgaccacuccuuaguuuc

SEQ ID NO: 406696 - RNA, 32 nt, Homo Sapiens
aaggaaacugggguguagaaaaguguauugac

SEQ ID NO: 406697 - RNA, 32 nt, Homo Sapiens
ugggugagauguugcuuaugcuuuagcugcag

SEQ ID NO: 406698 - RNA, 32 nt, Homo Sapiens
uugggucuuuugcugugccuccuauguauguc

SEQ ID NO: 406699 - RNA, 32 nt, Homo Sapiens
ucccuucgcuccuggggacccgcgggaaaaaa

SEQ ID NO: 406700 - RNA, 32 nt, Homo Sapiens
agagaugagccccaggaccccuggggagccaa

SEQ ID NO: 406701 - RNA, 32 nt, Homo Sapiens
guguguuuugauuagugagauguuaccacuua

SEQ ID NO: 406702 - RNA, 32 nt, Homo Sapiens
aguaucaauggacaaaaagacuugggaacaga

SEQ ID NO: 406703 - RNA, 32 nt, Homo Sapiens
guccaagcaaucaaaaaguaagauauuuuagg

SEQ ID NO: 406704 - RNA, 32 nt, Homo Sapiens
aguagaaacgaagaagcagauggagagguccc

SEQ ID NO: 406705 - RNA, 32 nt, Homo Sapiens
auccugucaggaggcagauaaugcuggugccu

SEQ ID NO: 406706 - RNA, 32 nt, Homo Sapiens
gaccugcccuguacaugcuaguucaacagaaa

SEQ ID NO: 406707 - RNA, 32 nt, Homo Sapiens
uaauauuguauauagugacugacaaauauugu

SEQ ID NO: 406708 - RNA, 32 nt, Homo Sapiens
ccuccuucccuccucagugucuuucaaaugac

SEQ ID NO: 406709 - RNA, 32 nt, Homo Sapiens
auuuugcacuguagacaacauuuaacaccagu

SEQ ID NO: 406710 - RNA, 32 nt, Homo Sapiens
gggccagcuugccugccgguuuucaggaaucu

SEQ ID NO: 406711 - RNA, 32 nt, Homo Sapiens
uccggcuucgguuucccucggcccagcacgcc

SEQ ID NO: 406712 - RNA, 32 nt, Homo Sapiens
gauacagggcuuugcaugaaccuaaaagucuu

SEQ ID NO: 406713 - RNA, 32 nt, Homo Sapiens
ugcucagcugggucuaugccagccuggcccug

SEQ ID NO: 406714 - RNA, 32 nt, Homo Sapiens
uucuuuggaaaacagcgaacagccuuagagcu

SEQ ID NO: 406715 - RNA, 32 nt, Homo Sapiens
gagcugggggagagcuggagggcccugggauc

SEQ ID NO: 406716 - RNA, 32 nt, Homo Sapiens
gguggaccucgcguccugagucuggaaggcac

SEQ ID NO: 406717 - RNA, 32 nt, Homo Sapiens
uuuuuccagccuuuuuuauuaaggggaagggg

SEQ ID NO: 406718 - RNA, 29 nt, Homo Sapiens
ggggaugggggacaguugacauuucuggu

SEQ ID NO: 406719 - RNA, 32 nt, Homo Sapiens
ccuccugauauuccucuucucacuuuugcaau

SEQ ID NO: 406720 - RNA, 32 nt, Homo Sapiens
ucaggguaaccugcugaguccugggcagauga

SEQ ID NO: 406721 - RNA, 32 nt, Homo Sapiens
ucuccugggccuguguccuuucuggaaauuaa

SEQ ID NO: 406722 - RNA, 32 nt, Homo Sapiens
guuuagauuugugaaggaauaagcaugaugga

SEQ ID NO: 406723 - RNA, 32 nt, Homo Sapiens
uuuuggaaggcacaacuuccugaauggaccau

SEQ ID NO: 406724 - RNA, 32 nt, Homo Sapiens
accgccgccgcgcccugcccccggggcagcuu

SEQ ID NO: 406725 - RNA, 32 nt, Homo Sapiens
cggggcuggugccagugccccaggggccuccu

SEQ ID NO: 406726 - RNA, 32 nt, Homo Sapiens
ucuaggcacuuaguuugcuaccacauuguucc

SEQ ID NO: 406727 - RNA, 32 nt, Homo Sapiens
auagaaauugauuuuucuugguguagaacaac

SEQ ID NO: 406728 - RNA, 32 nt, Homo Sapiens
guuuugggcguccggcuuccacguucccucca

SEQ ID NO: 406729 - RNA, 32 nt, Homo Sapiens
aacguuggcugcugccuuagcugcugaugacg

SEQ ID NO: 406730 - RNA, 32 nt, Homo Sapiens
aacugaauuagaggauucuggaugucagucuu

SEQ ID NO: 406731 - RNA, 32 nt, Homo Sapiens
cucucagccuccccgccuucagcugucagcuu

SEQ ID NO: 406732 - RNA, 32 nt, Homo Sapiens
uggcggggggccacagggaggggacccugaca

SEQ ID NO: 406733 - RNA, 32 nt, Homo Sapiens
uauuaauauuccaucguauagaugugauauaa

SEQ ID NO: 406734 - RNA, 32 nt, Homo Sapiens
agauaaagaaacugaggcccagggaggcuaag

SEQ ID NO: 406735 - RNA, 32 nt, Homo Sapiens
guguguuucuaaaaaguaaaaaucucaagaaa

SEQ ID NO: 406736 - RNA, 32 nt, Homo Sapiens
cccauaauuucucccagagaccaucuaucacc

SEQ ID NO: 406737 - RNA, 32 nt, Homo Sapiens
gacucuuaugcauaaaguuuuacaauggccug

SEQ ID NO: 406738 - RNA, 32 nt, Homo Sapiens
agauagaggaaugucuacguauuucauucccu

SEQ ID NO: 406739 - RNA, 28 nt, Homo Sapiens
agggaggggcggccggcucgcggugacc

SEQ ID NO: 406740 - RNA, 32 nt, Homo Sapiens
uccguuucagcggaagaccugaagagugguca

SEQ ID NO: 406741 - RNA, 32 nt, Homo Sapiens
uuuuuggagaaaaggaacagggcaguggaaug

SEQ ID NO: 406742 - RNA, 32 nt, Homo Sapiens
uugcuuuccuucccuccccuccaaugauaaag

SEQ ID NO: 406743 - RNA, 32 nt, Homo Sapiens
aucaggccuaguccgauuuccuuuccucucuc

SEQ ID NO: 406744 - RNA, 32 nt, Homo Sapiens
ugugcaggcagacacauccucccaccagggcg

SEQ ID NO: 406745 - RNA, 32 nt, Homo Sapiens
ccacguauuuaaaauucugaaucuucugggac

SEQ ID NO: 406746 - RNA, 32 nt, Homo Sapiens
ucauugacacuggaaacacuaguucccauuuu

SEQ ID NO: 406747 - RNA, 32 nt, Homo Sapiens
ugcucuuuuuguuaccuuuguaaaaugaugac

SEQ ID NO: 406748 - RNA, 32 nt, Homo Sapiens
acugcccucucuccugccccagccgacugcug

SEQ ID NO: 406749 - RNA, 32 nt, Homo Sapiens
uauguuauguaguauauccuuucuaaacugcc

SEQ ID NO: 406750 - RNA, 32 nt, Homo Sapiens
uaucugaucuggccucuguagaugaacaauug

SEQ ID NO: 406751 - RNA, 32 nt, Homo Sapiens
agauauuaucuaaauucuucuagaauuuauuu

SEQ ID NO: 406752 - RNA, 32 nt, Homo Sapiens
ggacaaccugugagugcaucucuucuuuccuu

SEQ ID NO: 406753 - RNA, 32 nt, Homo Sapiens
cuagcccuuggguccacauugcuuucaagguc

SEQ ID NO: 406754 - RNA, 32 nt, Homo Sapiens
cauuauaauccaaaaacaauguccacaucaga

SEQ ID NO: 406755 - RNA, 32 nt, Homo Sapiens
ucuuagccaucccaaaccaguaucugucccaa

SEQ ID NO: 406756 - RNA, 32 nt, Homo Sapiens
cuccucuuccuccuggaccccauccucuacca

SEQ ID NO: 406757 - RNA, 32 nt, Homo Sapiens
auccuucggcaaggggcgccuggggcuggggc

SEQ ID NO: 406758 - RNA, 32 nt, Homo Sapiens
gagugagugugugugcuugaaugugagugugu

SEQ ID NO: 406759 - RNA, 32 nt, Homo Sapiens
ccuuagagguuuucuuuuuucuuucauuuguu

SEQ ID NO: 406760 - RNA, 32 nt, Homo Sapiens
gcacacaccuugaggaggaaagcgagaaagaa

SEQ ID NO: 406761 - RNA, 32 nt, Homo Sapiens
aagauggcggcagcgaugccugcccggcuguu

SEQ ID NO: 406762 - RNA, 32 nt, Homo Sapiens
augugagacuggauaauuuauaaagaaaagag

SEQ ID NO: 406763 - RNA, 32 nt, Homo Sapiens
uuucauaaacacauucagaaucauaaaaugau

SEQ ID NO: 406764 - RNA, 32 nt, Homo Sapiens
ugacauucgccagcgcagggccccacaagaga

SEQ ID NO: 406765 - RNA, 32 nt, Homo Sapiens
caggggguacagacuuccuucuuagagagugu

SEQ ID NO: 406766 - RNA, 32 nt, Homo Sapiens
aaccucuuuguaaauaaaugcacaguguaaca

SEQ ID NO: 406767 - RNA, 32 nt, Homo Sapiens
aggccugcggggugggggcaucgcugccuggg

SEQ ID NO: 406768 - RNA, 32 nt, Homo Sapiens
cucuccugcgggaggagggaauguucucagug

SEQ ID NO: 406769 - RNA, 32 nt, Homo Sapiens
gccgagaucccggcgggaccaaggaggugcgg

SEQ ID NO: 406770 - RNA, 32 nt, Homo Sapiens
uuaguauaugagcauuuguaauuucuagaugu

SEQ ID NO: 406771 - RNA, 32 nt, Homo Sapiens
cgcggcgcugagggcgggagcgcgcagagcuc

SEQ ID NO: 406772 - RNA, 32 nt, Homo Sapiens
aacuaacuuacuguccaccaguuuauacagaa

SEQ ID NO: 406773 - RNA, 32 nt, Homo Sapiens
auugggagaguccuacugcuuagcuggcaugu

SEQ ID NO: 406774 - RNA, 32 nt, Homo Sapiens
ucucuacagagauaagaaaacaaguuuggcag

SEQ ID NO: 406775 - RNA, 32 nt, Homo Sapiens
aauuccuagaaaguacaagggaaggauuaugc

SEQ ID NO: 406776 - RNA, 32 nt, Homo Sapiens
aaaauaaauucuuuuuacauuuuccuugguag

SEQ ID NO: 406777 - RNA, 32 nt, Homo Sapiens
gaggaagagguggcggcgguggcgguggucgu

SEQ ID NO: 406778 - RNA, 32 nt, Homo Sapiens
auuuuguuuauaaaccacuugcuacaugaccc

SEQ ID NO: 406779 - RNA, 32 nt, Homo Sapiens
agaauuacggacuuaaaaauuuugcuaauaaa

SEQ ID NO: 406780 - RNA, 32 nt, Homo Sapiens
uugaaauguguuauaauacaaacaaggaagca

SEQ ID NO: 406781 - RNA, 32 nt, Homo Sapiens
uugauaagaguugcuuuuuuuuuuuaggaguu

SEQ ID NO: 406782 - RNA, 32 nt, Homo Sapiens
ugcccccaccccggggacccugugacauggug

SEQ ID NO: 406783 - RNA, 32 nt, Homo Sapiens
aacccaccaaaauuaguuuuagcuguagauca

SEQ ID NO: 406784 - RNA, 32 nt, Homo Sapiens
caucaacaaacacuugagggccuguaugccug

SEQ ID NO: 406785 - RNA, 32 nt, Homo Sapiens
aaaccaggcacaagguucaaguuuagauuuua

SEQ ID NO: 406786 - RNA, 32 nt, Homo Sapiens
auaucgaaucaaucauuuuuuauugcauauua

SEQ ID NO: 406787 - RNA, 32 nt, Homo Sapiens
ucucccugccuugauuuccccuugucugucaa

SEQ ID NO: 406788 - RNA, 32 nt, Homo Sapiens
ucuaugucaucucuggagucuugaucuugauc

SEQ ID NO: 406789 - RNA, 32 nt, Homo Sapiens
aaauagaucuacauuuuguacauauuuauaua

SEQ ID NO: 406790 - RNA, 32 nt, Homo Sapiens
cccaguggcgucucucucaucauccaucuuuu

SEQ ID NO: 406791 - RNA, 32 nt, Homo Sapiens
accaggcaagugugucggggcuggggugugaa

SEQ ID NO: 406792 - RNA, 32 nt, Homo Sapiens
gugaacucugcgcccguuccccgggaccuuca

SEQ ID NO: 406793 - RNA, 32 nt, Homo Sapiens
uaauucacagaaaauuuacagagaaagucucc

SEQ ID NO: 406794 - RNA, 28 nt, Homo Sapiens
gcuccggggcggcauguccgaggcuggc

SEQ ID NO: 406795 - RNA, 32 nt, Homo Sapiens
uauugagugucuacugugugccaggcacuaua

SEQ ID NO: 406796 - RNA, 32 nt, Homo Sapiens
cugcacguccuuccuccguccauccuccgucc

SEQ ID NO: 406797 - RNA, 32 nt, Homo Sapiens
cuguguuguaaauuuuucuccucccuccuccu

SEQ ID NO: 406798 - RNA, 32 nt, Homo Sapiens
guuucauccgcaaauuuucuuccauuucauug

SEQ ID NO: 406799 - RNA, 32 nt, Homo Sapiens
ugcaggguggaaccaggccugccuuccauucc

SEQ ID NO: 406800 - RNA, 32 nt, Homo Sapiens
uucauuuuuaaaccucucuucucuuugacaaa

SEQ ID NO: 406801 - RNA, 32 nt, Homo Sapiens
agccuuagagcaaguuaagcacuuccuuggug

SEQ ID NO: 406802 - RNA, 32 nt, Homo Sapiens
uuuguucacugcuuauuaaaauggaaauccug

SEQ ID NO: 406803 - RNA, 32 nt, Homo Sapiens
aguagauacgugugguuaguggcugccauacu

SEQ ID NO: 406804 - RNA, 32 nt, Homo Sapiens
ugacucuuggaauucugugcuguuauaaacaa

SEQ ID NO: 406805 - RNA, 32 nt, Homo Sapiens
gcuuccaugcuucauucccuggcauaaaaagu

SEQ ID NO: 406806 - RNA, 32 nt, Homo Sapiens
uuuuggggaggggcggggggcuggugcggaau

SEQ ID NO: 406807 - RNA, 32 nt, Homo Sapiens
cucugccuguuuuguucugucaccuuaaaaga

SEQ ID NO: 406808 - RNA, 32 nt, Homo Sapiens
cagugugcggucuuuguucuccuccgugaaaa

SEQ ID NO: 406809 - RNA, 32 nt, Homo Sapiens
uucaguugcugucuuauucucuuuauuucuca

SEQ ID NO: 406810 - RNA, 32 nt, Homo Sapiens
ccuuuaacacgcgaggcuuucaggcgugcaga

SEQ ID NO: 406811 - RNA, 32 nt, Homo Sapiens
uucuuugaagcuguucuaguccuccucuaguu

SEQ ID NO: 406812 - RNA, 32 nt, Homo Sapiens
aacucagcaguuuuccucucccccaguugugu

SEQ ID NO: 406813 - RNA, 32 nt, Homo Sapiens
aucuuuucugaaaacuaaugcuaucaaagucc

SEQ ID NO: 406814 - RNA, 32 nt, Homo Sapiens
aagcucccaugcgggaccgcgcggcccgguga

SEQ ID NO: 406815 - RNA, 30 nt, Homo Sapiens
gcuucggucguuccgauggcaguggagacc

SEQ ID NO: 406816 - RNA, 32 nt, Homo Sapiens
aaauacuugccuccaauaauagaaaaaaccug

SEQ ID NO: 406817 - RNA, 32 nt, Homo Sapiens
gcccuucucugugaccccggaucgcgaaugca

SEQ ID NO: 406818 - RNA, 32 nt, Homo Sapiens
gcgccccucgcaccgcagccagugccgaccgc

SEQ ID NO: 406819 - RNA, 32 nt, Homo Sapiens
auuguuuaauguuuaaagaguuucuauuguuu

SEQ ID NO: 406820 - RNA, 32 nt, Homo Sapiens
cgcugccccaugagcgugcugcaccgcgugug

SEQ ID NO: 406821 - RNA, 32 nt, Homo Sapiens
gcuccacagugcuucacccagcccugcgcacg

SEQ ID NO: 406822 - RNA, 32 nt, Homo Sapiens
aagugcaucuucugcguguucucuauuugaac

SEQ ID NO: 406823 - RNA, 32 nt, Homo Sapiens
gacaagaacgcucccuuuuggccgagguccgc

SEQ ID NO: 406824 - RNA, 32 nt, Homo Sapiens
agggagauuucuuuuuagauugcuggguguug

SEQ ID NO: 406825 - RNA, 32 nt, Homo Sapiens
agggggcacagcccuccucccaagggaaagug

SEQ ID NO: 406826 - RNA, 32 nt, Homo Sapiens
gaaaguaggggagguggaugugacaacaacuu

SEQ ID NO: 406827 - RNA, 32 nt, Homo Sapiens
aauggcagggguaaucugagccuucuucacuc

SEQ ID NO: 406828 - RNA, 32 nt, Homo Sapiens
gucccucugaagauaauuuuggaucaccuuga

SEQ ID NO: 406829 - RNA, 32 nt, Homo Sapiens
guugcuaaacucuuggugaggcacgagcuacc

SEQ ID NO: 406830 - RNA, 32 nt, Homo Sapiens
agcccuggcuggccccacuugguaccaaucca

SEQ ID NO: 406831 - RNA, 30 nt, Homo Sapiens
gagucucaucuacccucuucucgaaguaca

SEQ ID NO: 406832 - RNA, 32 nt, Homo Sapiens
gaaccgggacauuuggucucuggccucucccu

SEQ ID NO: 406833 - RNA, 32 nt, Homo Sapiens
gacugguuugggcagaauauuaaacuuauuuu

SEQ ID NO: 406834 - RNA, 32 nt, Homo Sapiens
uacugaccugccugcuggcaugauagaccaga

SEQ ID NO: 406835 - RNA, 32 nt, Homo Sapiens
ccccucgcagcugcuuccuucugccugggauu

SEQ ID NO: 406836 - RNA, 32 nt, Homo Sapiens
gucuugaaauauuuucugagaaaccaucugcu

SEQ ID NO: 406837 - RNA, 32 nt, Homo Sapiens
uggcggcagaucacaaugaggaccuagggcau

SEQ ID NO: 406838 - RNA, 32 nt, Homo Sapiens
uugcucuauuugucucuccuuaaacuaauauc

SEQ ID NO: 406839 - RNA, 32 nt, Homo Sapiens
ccugagcauaugcccucuuggggcucccucau

SEQ ID NO: 406840 - RNA, 32 nt, Homo Sapiens
acacacugcccccaacccucugccguugccuc

SEQ ID NO: 406841 - RNA, 32 nt, Homo Sapiens
uaccuucaagaucuggugaaaacacuaucucu

SEQ ID NO: 406842 - RNA, 32 nt, Homo Sapiens
cuaucugcugcucugggaaaugagaugguuug

SEQ ID NO: 406843 - RNA, 32 nt, Homo Sapiens
ccccggggccgcggccaccuccuccagugguc

SEQ ID NO: 406844 - RNA, 32 nt, Homo Sapiens
ucccagguucaagagauucuucugccucagcc

SEQ ID NO: 406845 - RNA, 32 nt, Homo Sapiens
gagaagggcggcagugggagggggagguaccu

SEQ ID NO: 406846 - RNA, 32 nt, Homo Sapiens
uggcugggcugccaccccacccggcccgaauc

SEQ ID NO: 406847 - RNA, 32 nt, Homo Sapiens
cuuucuauauauauucucguaugucuuauucu

SEQ ID NO: 406848 - RNA, 32 nt, Homo Sapiens
gccccagaaaagacaucaccagauagagauaa

SEQ ID NO: 406849 - RNA, 32 nt, Homo Sapiens
ggacgugagcgcagagcagagccuggagaagc

SEQ ID NO: 406850 - RNA, 32 nt, Homo Sapiens
agagcccccacagaaaggacugucccagccuc

SEQ ID NO: 406851 - RNA, 32 nt, Homo Sapiens
cuggaauuucaaacagaaagagggaauaagau

SEQ ID NO: 406852 - RNA, 32 nt, Homo Sapiens
acccgccucuuccaccaagacagagacguuag

SEQ ID NO: 406853 - RNA, 32 nt, Homo Sapiens
uucgguggcuaggcuccugcuugcugcacucu

SEQ ID NO: 406854 - RNA, 32 nt, Homo Sapiens
aaauuaacacucaaaaagacaagcaaaaacaa

SEQ ID NO: 406855 - RNA, 32 nt, Homo Sapiens
gaaacaggggcaggagugugggaacggucuuc

SEQ ID NO: 406856 - RNA, 32 nt, Homo Sapiens
cacaaucuugaauuucugaacggaucagaguu

SEQ ID NO: 406857 - RNA, 32 nt, Homo Sapiens
ugcccgcucgcaccccucucccgcgcccgguu

SEQ ID NO: 406858 - RNA, 32 nt, Homo Sapiens
guacucugcugaaguuucagcggugauacugu

SEQ ID NO: 406859 - RNA, 32 nt, Homo Sapiens
cuucucucauucuccgaacuuacuccuuuuua

SEQ ID NO: 406860 - RNA, 32 nt, Homo Sapiens
guagauaaccaaucaguuagcuuaauuaaucu

SEQ ID NO: 406861 - RNA, 32 nt, Homo Sapiens
aauggaagauggaaagaagagaaaucguuuua

SEQ ID NO: 406862 - RNA, 32 nt, Homo Sapiens
gucuuugccuguaauaccaaaauacagggagc

SEQ ID NO: 406863 - RNA, 32 nt, Homo Sapiens
cggccgucgcgugcaccaugucuggcuccucc

SEQ ID NO: 406864 - RNA, 32 nt, Homo Sapiens
ccaguuuauagcaugccuguccuaaguuacag

SEQ ID NO: 406865 - RNA, 32 nt, Homo Sapiens
cuguccucccaggccguccgcgccgcucccug

SEQ ID NO: 406866 - RNA, 32 nt, Homo Sapiens
agcacuucaucgccgcgggggugcugggacuc

SEQ ID NO: 406867 - RNA, 32 nt, Homo Sapiens
acuacacccaccccauagcugaggaggaguca

SEQ ID NO: 406868 - RNA, 32 nt, Homo Sapiens
cuuccucagaagaugcagccugccccugcuga

SEQ ID NO: 406869 - RNA, 32 nt, Homo Sapiens
uugcauccucaagcguuuuucuuauaaggcua

SEQ ID NO: 406870 - RNA, 32 nt, Homo Sapiens
ugccaaggagaccugauguuagaucaaagcca

SEQ ID NO: 406871 - RNA, 32 nt, Homo Sapiens
cucucccaggccuuuacccgcucccuaggauu

SEQ ID NO: 406872 - RNA, 31 nt, Homo Sapiens
caucuuuuuaauuuagauccaaauaaccaug

SEQ ID NO: 406873 - RNA, 32 nt, Homo Sapiens
ccuugagugacaguucuauuugauugccuccg

SEQ ID NO: 406874 - RNA, 32 nt, Homo Sapiens
aaaccuauuggaaagccuuaaccgggaaauuu

SEQ ID NO: 406875 - RNA, 32 nt, Homo Sapiens
ggcgggagggagaggggguguccgagggccac

SEQ ID NO: 406876 - RNA, 32 nt, Homo Sapiens
aaaaugcuauaaauuauguguauguuaaagga

SEQ ID NO: 406877 - RNA, 32 nt, Homo Sapiens
uaucuacaaaaauuuauuauauauuuacagaa

SEQ ID NO: 406878 - RNA, 32 nt, Homo Sapiens
cccuucacucccucccuggcucugccagucgg

SEQ ID NO: 406879 - RNA, 32 nt, Homo Sapiens
gguaauaauagguacuaauaaauauuuauaga

SEQ ID NO: 406880 - RNA, 32 nt, Homo Sapiens
caagagcuuaucgauccuguacaucuaucaua

SEQ ID NO: 406881 - RNA, 32 nt, Homo Sapiens
ugcuggucgugcuguguggccgcggccccagc

SEQ ID NO: 406882 - RNA, 32 nt, Homo Sapiens
aaagucaucuucucgcgaaccuuuaaaaugcc

SEQ ID NO: 406883 - RNA, 32 nt, Homo Sapiens
aauauaagaugauaaagauaucauuaaauguc

SEQ ID NO: 406884 - RNA, 32 nt, Homo Sapiens
gguaaaacuaaaucauugcucucuauacuagg

SEQ ID NO: 406885 - RNA, 32 nt, Homo Sapiens
auuauuuucuagucuuauuuuacaaugucuca

SEQ ID NO: 406886 - RNA, 32 nt, Homo Sapiens
aaggcugcggccccgcgccagagggccggugg

SEQ ID NO: 406887 - RNA, 32 nt, Homo Sapiens
aaugaaauacuuagaagcuggugauuaaauuc

SEQ ID NO: 406888 - RNA, 32 nt, Homo Sapiens
auaacugccuugaaccugugaguaaauauuga

SEQ ID NO: 406889 - RNA, 32 nt, Homo Sapiens
auugaaaccuauucuuuuuuauuuaauguuuu

SEQ ID NO: 406890 - RNA, 32 nt, Homo Sapiens
gugaaggccgccuucuucggccugcugggcua

SEQ ID NO: 406891 - RNA, 32 nt, Homo Sapiens
uuaaagcuuuaaauauugauauguaagguauu

SEQ ID NO: 406892 - RNA, 32 nt, Homo Sapiens
cacacagugucuguggcaauaugcaaauuugu

SEQ ID NO: 406893 - RNA, 32 nt, Homo Sapiens
ugguaugcuacaaaaacaggcacauagaccaa

SEQ ID NO: 406894 - RNA, 32 nt, Homo Sapiens
gccuuugucccauucugccccuggacauguuu

SEQ ID NO: 406895 - RNA, 32 nt, Homo Sapiens
uucaguuuuugugauaaagaaugugaacaguu

SEQ ID NO: 406896 - RNA, 32 nt, Homo Sapiens
cccugggaacagagcccuacagccagggcuua

SEQ ID NO: 406897 - RNA, 32 nt, Homo Sapiens
aacuuaaaaauauccauggcaagcuuuguaua

SEQ ID NO: 406898 - RNA, 32 nt, Homo Sapiens
ugccacuucgccgcugccccggagacuuuuca

SEQ ID NO: 406899 - RNA, 31 nt, Homo Sapiens
augaaugggcacugccugcccuucuagugaa

SEQ ID NO: 406900 - RNA, 30 nt, Homo Sapiens
agauggaacaucccugcugcauucacacug

SEQ ID NO: 406901 - RNA, 32 nt, Homo Sapiens
acuaaaaauaccaaaaugagccaggcauggug

SEQ ID NO: 406902 - RNA, 32 nt, Homo Sapiens
acucgauaauuucuauccagccuguuuccuau

SEQ ID NO: 406903 - RNA, 32 nt, Homo Sapiens
uggaauuguauaauucaauucgauaauugauc

SEQ ID NO: 406904 - RNA, 32 nt, Homo Sapiens
cagugucagacacaaucccauguggaugcaca

SEQ ID NO: 406905 - RNA, 32 nt, Homo Sapiens
agccgaggguauuauuuuuuuauguucaugag

SEQ ID NO: 406906 - RNA, 32 nt, Homo Sapiens
agcuggcagugccgcccaccacgugcacugug

SEQ ID NO: 406907 - RNA, 32 nt, Homo Sapiens
caucugggagcugguccuggggaugcuggaga

SEQ ID NO: 406908 - RNA, 32 nt, Homo Sapiens
ccucaaggagaguuucugcgggugugggaaau

SEQ ID NO: 406909 - RNA, 32 nt, Homo Sapiens
gccucgcugaaaagucacuuggaacucuucug

SEQ ID NO: 406910 - RNA, 32 nt, Homo Sapiens
auggagcggggccgcgagccuguggggaaggg

SEQ ID NO: 406911 - RNA, 32 nt, Homo Sapiens
ucuuauccuuaauauucugccuuuaaauuuuc

SEQ ID NO: 406912 - RNA, 32 nt, Homo Sapiens
uccauggaaugcuugaaaaaugugcaaaacag

SEQ ID NO: 406913 - RNA, 32 nt, Homo Sapiens
ccauaaguacuuucuucucugaaucauuugaa

SEQ ID NO: 406914 - RNA, 32 nt, Homo Sapiens
uggaggauagagugggaacaggaauaagcaga

SEQ ID NO: 406915 - RNA, 32 nt, Homo Sapiens
auuucucaucacaucaugcuguuuuauccuug

SEQ ID NO: 406916 - RNA, 32 nt, Homo Sapiens
ugcgucccugcgcuccaacguccgcgcggcca

SEQ ID NO: 406917 - RNA, 32 nt, Homo Sapiens
uagaggaaacagaggcccaggauacggcaggu

SEQ ID NO: 406918 - RNA, 32 nt, Homo Sapiens
ccugggccgcgguggccaggacagccuuccuu

SEQ ID NO: 406919 - RNA, 32 nt, Homo Sapiens
ccaaagagauaaaacuuuaugcccagauuccc

SEQ ID NO: 406920 - RNA, 32 nt, Homo Sapiens
cuucaguuuaauaugucaguauaauagauauu

SEQ ID NO: 406921 - RNA, 32 nt, Homo Sapiens
aggauugcuuaagcccaggagcucaaguccca

SEQ ID NO: 406922 - RNA, 32 nt, Homo Sapiens
ugccuuuuacuuucguguggauaugugaagca

SEQ ID NO: 406923 - RNA, 32 nt, Homo Sapiens
acacauacuggccacuccuuaucucuuuuucu

SEQ ID NO: 406924 - RNA, 32 nt, Homo Sapiens
agcauaaaucauauauagcauuuucaggcaug

SEQ ID NO: 406925 - RNA, 32 nt, Homo Sapiens
gucgaaaauauuaaauagacuggggacucuau

SEQ ID NO: 406926 - RNA, 32 nt, Homo Sapiens
gaagccugccuggccuguggugcuuuccagug

SEQ ID NO: 406927 - RNA, 30 nt, Homo Sapiens
aguauccaugcucuugaccuuguagagaac

SEQ ID NO: 406928 - RNA, 32 nt, Homo Sapiens
uccuuucuuccauuuuaacacuuccugguugc

SEQ ID NO: 406929 - RNA, 32 nt, Homo Sapiens
ggaauggccacuuuuccaggacuaggaaugaa

SEQ ID NO: 406930 - RNA, 32 nt, Homo Sapiens
cucuuccacagugggcaaugcacggugggucc

SEQ ID NO: 406931 - RNA, 32 nt, Homo Sapiens
ggugagaucaauguggagaugggcgcugcccc

SEQ ID NO: 406932 - RNA, 32 nt, Homo Sapiens
cgacucagcaugcagaaguaaaugcaaaauca

SEQ ID NO: 406933 - RNA, 32 nt, Homo Sapiens
uaauauuggguugcaguuguaguguacuuugu

SEQ ID NO: 406934 - RNA, 32 nt, Homo Sapiens
ggagggcagaggaggagagagccuggcagcgg

SEQ ID NO: 406935 - RNA, 32 nt, Homo Sapiens
uuaauugauuauuugcaugaaacuacucauua

SEQ ID NO: 406936 - RNA, 32 nt, Homo Sapiens
uuuauggaacauaauuuuaaaacagaauauuu

SEQ ID NO: 406937 - RNA, 32 nt, Homo Sapiens
aguuaggauucccugcgccucugcucugcggc

SEQ ID NO: 406938 - RNA, 32 nt, Homo Sapiens
auaaugcuuuugcuuuacugagacauuauuua

SEQ ID NO: 406939 - RNA, 30 nt, Homo Sapiens
gaaagugucugugucgaggcgcugagcucu

SEQ ID NO: 406940 - RNA, 32 nt, Homo Sapiens
uaauuuauauaaacuuuuuaaauguagaaacu

SEQ ID NO: 406941 - RNA, 32 nt, Homo Sapiens
ccaaccuaugucacugucaaagggcagcugag

SEQ ID NO: 406942 - RNA, 32 nt, Homo Sapiens
accugcacuggaggauuucucagacacaugca

SEQ ID NO: 406943 - RNA, 32 nt, Homo Sapiens
cuaggaauacuaguauaucgcucacaccucau

SEQ ID NO: 406944 - RNA, 32 nt, Homo Sapiens
gcacuggccccggcgcccacccgcaccccucc

SEQ ID NO: 406945 - RNA, 32 nt, Homo Sapiens
ugcucagaggccaacccaucacaggggugaga

SEQ ID NO: 406946 - RNA, 32 nt, Homo Sapiens
caaaagcauaauguuuucauaauuuucuauuu

SEQ ID NO: 406947 - RNA, 32 nt, Homo Sapiens
cuguuuuugggggugccuggagaugaacugga

SEQ ID NO: 406948 - RNA, 32 nt, Homo Sapiens
uggcccggccgagcgccgcgcccuccugaccc

SEQ ID NO: 406949 - RNA, 32 nt, Homo Sapiens
cuacuuuucuguucuuuuuuuuuuuuuuuuuc

SEQ ID NO: 406950 - RNA, 32 nt, Homo Sapiens
auuuucugcauuuacacuguauauuauauaua

SEQ ID NO: 406951 - RNA, 32 nt, Homo Sapiens
gaauauucagauuggaggggagccagcuucuc

SEQ ID NO: 406952 - RNA, 32 nt, Homo Sapiens
auuuauagaacaguugauuucccccaucccca

SEQ ID NO: 406953 - RNA, 32 nt, Homo Sapiens
caucuaagauguaucaauaaaaauaaagacaa

SEQ ID NO: 406954 - RNA, 32 nt, Homo Sapiens
gaccuacucucccuccuccccaccauuccucu

SEQ ID NO: 406955 - RNA, 32 nt, Homo Sapiens
caagauuggaaugugagaagaacugugggggg

SEQ ID NO: 406956 - RNA, 32 nt, Homo Sapiens
cagcccugguucuccuuuccccgaucuggccu

SEQ ID NO: 406957 - RNA, 32 nt, Homo Sapiens
ggcccgcccuccccgcuccucagucuuugcgg

SEQ ID NO: 406958 - RNA, 32 nt, Homo Sapiens
guggguagaacaaauggaaauuugguuucaga

SEQ ID NO: 406959 - RNA, 32 nt, Homo Sapiens
cagaaauccagaagccuuuaagccuaagauag

SEQ ID NO: 406960 - RNA, 32 nt, Homo Sapiens
agguaggagguagacccuuuagcucccuucca

SEQ ID NO: 406961 - RNA, 32 nt, Homo Sapiens
ggcaacgccggggcgcccgaggucuggaaggc

SEQ ID NO: 406962 - RNA, 32 nt, Homo Sapiens
ggccaggcgcgguggcucgugccuguaauccc

SEQ ID NO: 406963 - RNA, 32 nt, Homo Sapiens
agcaucuugggauuuauuaaauuauguaagaa

SEQ ID NO: 406964 - RNA, 32 nt, Homo Sapiens
uccugacugucuucuuuuuuaugauuuuacug

SEQ ID NO: 406965 - RNA, 32 nt, Homo Sapiens
gcaaaauaagacuguggggccuaaggcauccc

SEQ ID NO: 406966 - RNA, 32 nt, Homo Sapiens
auuuggugguggcugagaccccauagaaguuu

SEQ ID NO: 406967 - RNA, 32 nt, Homo Sapiens
guggcacuuccacuggacaccgucccucaaag

SEQ ID NO: 406968 - RNA, 32 nt, Homo Sapiens
auuaauuucuaaaaauaaagcuauauacagcc

SEQ ID NO: 406969 - RNA, 32 nt, Homo Sapiens
cagcauuguauauauggucuuaagugccuggc

SEQ ID NO: 406970 - RNA, 32 nt, Homo Sapiens
agggcaggcacgaagaacagugagauugucaa

SEQ ID NO: 406971 - RNA, 32 nt, Homo Sapiens
ccuaggaagagucccaucugagcaggaagaca

SEQ ID NO: 406972 - RNA, 32 nt, Homo Sapiens
acuuuggcugggauuggcagacccgggcuaug

SEQ ID NO: 406973 - RNA, 32 nt, Homo Sapiens
augaaguuuucagaucaguggcaaucucaguc

SEQ ID NO: 406974 - RNA, 32 nt, Homo Sapiens
gcucaucauuuucuauggauagacaauccgcu

SEQ ID NO: 406975 - RNA, 32 nt, Homo Sapiens
gcugguagcauuaaauuagcuuuuuacccuca

SEQ ID NO: 406976 - RNA, 32 nt, Homo Sapiens
cucacugugggugcggguggcgugccugccug

SEQ ID NO: 406977 - RNA, 32 nt, Homo Sapiens
cagaguugucuuaaauuagugguggauagaag

SEQ ID NO: 406978 - RNA, 32 nt, Homo Sapiens
cucggccgcucccuccccuccucccuugcuca

SEQ ID NO: 406979 - RNA, 32 nt, Homo Sapiens
ggguacauguuuaacauuucauuucaaaauca

SEQ ID NO: 406980 - RNA, 32 nt, Homo Sapiens
cauuuucuucaauaauuuuucuucagauuugc

SEQ ID NO: 406981 - RNA, 32 nt, Homo Sapiens
ccuuaauaaacuaaaacauuauuguacauaau

SEQ ID NO: 406982 - RNA, 32 nt, Homo Sapiens
accaggcaaaauugagcagcauuuucauaggg

SEQ ID NO: 406983 - RNA, 32 nt, Homo Sapiens
guguuauauuccaaggaaaauugaaaguauuc

SEQ ID NO: 406984 - RNA, 32 nt, Homo Sapiens
aauguauuuuucugcauucacuuggauauauu

SEQ ID NO: 406985 - RNA, 32 nt, Homo Sapiens
gcaagaauugguugcuggaauuccaagaggag

SEQ ID NO: 406986 - RNA, 32 nt, Homo Sapiens
gaucauugaaggagacaugggaugcacagagg

SEQ ID NO: 406987 - RNA, 32 nt, Homo Sapiens
gagguggggcgaggcaggccgacuguacuaaa

SEQ ID NO: 406988 - RNA, 32 nt, Homo Sapiens
auguggccagagcuaucuuccuaaaaugcauu

SEQ ID NO: 406989 - RNA, 30 nt, Homo Sapiens
caagagcuaccugaggcagaagcuccaggc

SEQ ID NO: 406990 - RNA, 32 nt, Homo Sapiens
ccgcucgcguuucugcagcugcugcagucgcc

SEQ ID NO: 406991 - RNA, 32 nt, Homo Sapiens
ucuguuuaaaagcagccagucaaccuuugugu

SEQ ID NO: 406992 - RNA, 32 nt, Homo Sapiens
cguucuuacaucaaaacagaacuguggcuggg

SEQ ID NO: 406993 - RNA, 32 nt, Homo Sapiens
cuacuaaaaaauacaaaaaauuagccgggcgu

SEQ ID NO: 406994 - RNA, 32 nt, Homo Sapiens
aaugugucacuacucacagucucuuuaaucuu

SEQ ID NO: 406995 - RNA, 32 nt, Homo Sapiens
uaguaauuuuuccaucuugggcaggaaugggu

SEQ ID NO: 406996 - RNA, 32 nt, Homo Sapiens
ucccauccuguguguuaagcucugcuauuagg

SEQ ID NO: 406997 - RNA, 32 nt, Homo Sapiens
ccaaggauggaagccagaggcuguggcgaggg

SEQ ID NO: 406998 - RNA, 32 nt, Homo Sapiens
uuuuuagugucuagucugugaauuuugacaaa

SEQ ID NO: 406999 - RNA, 32 nt, Homo Sapiens
uggaggaggcagagccaugaccaaggggaccu

SEQ ID NO: 407000 - RNA, 32 nt, Homo Sapiens
ggaccuagcagacguugggccggagcacuagc

SEQ ID NO: 407001 - RNA, 32 nt, Homo Sapiens
agauuacuuaggauuccuugacuuuucagaag

SEQ ID NO: 407002 - RNA, 32 nt, Homo Sapiens
uaauguuuuccaacuucuuuuucuucagcuca

SEQ ID NO: 407003 - RNA, 32 nt, Homo Sapiens
cauguguucaguuguggaccuguccguggggc

SEQ ID NO: 407004 - RNA, 32 nt, Homo Sapiens
aacacggaccccagccccugucagggccucug

SEQ ID NO: 407005 - RNA, 31 nt, Homo Sapiens
cagauucuugguacccccuggguuggagacu

SEQ ID NO: 407006 - RNA, 32 nt, Homo Sapiens
aaaggccacgaggagccgcgggggcucaggag

SEQ ID NO: 407007 - RNA, 32 nt, Homo Sapiens
cggagaaguaacucaagucugaguguuguugg

SEQ ID NO: 407008 - RNA, 32 nt, Homo Sapiens
uccuccucuuucugccgacucucccgggcaac

SEQ ID NO: 407009 - RNA, 32 nt, Homo Sapiens
agccacugcacuccagccugggugacugagcg

SEQ ID NO: 407010 - RNA, 32 nt, Homo Sapiens
uuaauuaggaugcauguugauuaaacucgaga

SEQ ID NO: 407011 - RNA, 32 nt, Homo Sapiens
aucacagcacgcgugacaguuaccggcuggag

SEQ ID NO: 407012 - RNA, 32 nt, Homo Sapiens
auagaucugugguugaauuugcuguguuguua

SEQ ID NO: 407013 - RNA, 32 nt, Homo Sapiens
gcgcggggacgcccggguacccgccagagccc

SEQ ID NO: 407014 - RNA, 32 nt, Homo Sapiens
gguucagccccuucuccaaccccuucauaagc

SEQ ID NO: 407015 - RNA, 32 nt, Homo Sapiens
augaugagaaaugaacugagagcauuaagcag

SEQ ID NO: 407016 - RNA, 32 nt, Homo Sapiens
aaauuuuucuaaaagaagacaauauuuuagaa

SEQ ID NO: 407017 - RNA, 32 nt, Homo Sapiens
cuccugacccgcggccgcggaguccggccccc

SEQ ID NO: 407018 - RNA, 32 nt, Homo Sapiens
auuuauugcauaauacuauucuuuaauugcaa

SEQ ID NO: 407019 - RNA, 32 nt, Homo Sapiens
guguugcuaguagcuuggcagcucuucauaaa

SEQ ID NO: 407020 - RNA, 32 nt, Homo Sapiens
acucuggggccugugcugggaaccaucuggac

SEQ ID NO: 407021 - RNA, 32 nt, Homo Sapiens
gugggagggacuaucagagaugcaaaaauuac

SEQ ID NO: 407022 - RNA, 32 nt, Homo Sapiens
gggaggaggaaagagaguuuguaaggucaugc

SEQ ID NO: 407023 - RNA, 32 nt, Homo Sapiens
ccccaucacucuucuugucuuggcucauauuc

SEQ ID NO: 407024 - RNA, 32 nt, Homo Sapiens
agagacucaggagaugagaaacgguuuguaaa

SEQ ID NO: 407025 - RNA, 32 nt, Homo Sapiens
acaaguuuuauuccuuaugugucuuauaagga

SEQ ID NO: 407026 - RNA, 32 nt, Homo Sapiens
ccagcuggacuggccuuacuucugccuuuuuc

SEQ ID NO: 407027 - RNA, 32 nt, Homo Sapiens
gcuuuugucagggaacccuggcugcuggccuu

SEQ ID NO: 407028 - RNA, 32 nt, Homo Sapiens
aauucagauaaaauuuccuuauguucugcugu

SEQ ID NO: 407029 - RNA, 32 nt, Homo Sapiens
caggugugucugcgguacauaugagcgugcuu

SEQ ID NO: 407030 - RNA, 32 nt, Homo Sapiens
aucacauauuccuguuugaugggggucaaagc

SEQ ID NO: 407031 - RNA, 32 nt, Homo Sapiens
ggcagcacuuuugacccagagccccauccuga

SEQ ID NO: 407032 - RNA, 32 nt, Homo Sapiens
acuaaaacuaauuuuguaaaucuguuggcucu

SEQ ID NO: 407033 - RNA, 32 nt, Homo Sapiens
ugugcaagcccacaaccacaccugugaguacc

SEQ ID NO: 407034 - RNA, 32 nt, Homo Sapiens
uuuucucagaacucaauugagggugggcagag

SEQ ID NO: 407035 - RNA, 32 nt, Homo Sapiens
cuuagaaagggaggggauaauuauggggugug

SEQ ID NO: 407036 - RNA, 30 nt, Homo Sapiens
agcccaggcaggcgcucaggaagggugagg

SEQ ID NO: 407037 - RNA, 32 nt, Homo Sapiens
auucugcggaaaguguaaagcauuccaacaaa

SEQ ID NO: 407038 - RNA, 32 nt, Homo Sapiens
auguuuaugggggucuuaguuuucaaacucug

SEQ ID NO: 407039 - RNA, 32 nt, Homo Sapiens
uaagacagccuaagggccacacaggggaugcu

SEQ ID NO: 407040 - RNA, 32 nt, Homo Sapiens
ggugcauuaaggaaacuaaaagcaccacuuac

SEQ ID NO: 407041 - RNA, 32 nt, Homo Sapiens
cugcccgggcuggacgacgucuggccggcucc

SEQ ID NO: 407042 - RNA, 32 nt, Homo Sapiens
aguuggggcugcaauuaaugcuaacauaagag

SEQ ID NO: 407043 - RNA, 32 nt, Homo Sapiens
auauuucuaaugaggaagauuaaugaaagaac

SEQ ID NO: 407044 - RNA, 32 nt, Homo Sapiens
gaaggccagcccuccuccuccucggaauccug

SEQ ID NO: 407045 - RNA, 32 nt, Homo Sapiens
ugaagguuuccucuccuaggcuaguuucaaac

SEQ ID NO: 407046 - RNA, 32 nt, Homo Sapiens
cgagaaggggaagagcaggcugcgccaggguu

SEQ ID NO: 407047 - RNA, 32 nt, Homo Sapiens
auaaacggcgcgccgcgcggagaugacagccg

SEQ ID NO: 407048 - RNA, 32 nt, Homo Sapiens
acugguuucuuacuugacuuuuauaaauagua

SEQ ID NO: 407049 - RNA, 32 nt, Homo Sapiens
ccagcucggaaggugcguggagaaggcuccga

SEQ ID NO: 407050 - RNA, 32 nt, Homo Sapiens
uuucucccuguuugcuggcccagacaggccug

SEQ ID NO: 407051 - RNA, 32 nt, Homo Sapiens
uaauuuuguaaaauaaagauuucuuuuuaacc

SEQ ID NO: 407052 - RNA, 32 nt, Homo Sapiens
cucuaagauguuauauuuuucuuaaaaaguaa

SEQ ID NO: 407053 - RNA, 30 nt, Homo Sapiens
agaggaaaggguuuuaugcaaaagaaagug

SEQ ID NO: 407054 - RNA, 32 nt, Homo Sapiens
agaacggaagcaggcaccacuaacuuaugaaa

SEQ ID NO: 407055 - RNA, 32 nt, Homo Sapiens
gagacuucuguguauuugaugcuucuucaagu

SEQ ID NO: 407056 - RNA, 32 nt, Homo Sapiens
cccggccuucgugugcugcugcugcuauugcu

SEQ ID NO: 407057 - RNA, 32 nt, Homo Sapiens
caggcucuguccuccuucuuccucugcagauu

SEQ ID NO: 407058 - RNA, 32 nt, Homo Sapiens
uaagccacuaaaucacaguaauuuguuauagc

SEQ ID NO: 407059 - RNA, 32 nt, Homo Sapiens
gccuucuugucugacucaacagcaagaaaaau

SEQ ID NO: 407060 - RNA, 32 nt, Homo Sapiens
ccugucaucuucuaaauuguguuccuuucauu

SEQ ID NO: 407061 - RNA, 32 nt, Homo Sapiens
uuuuucucaaaaaacaaacaaacaaaaaacac

SEQ ID NO: 407062 - RNA, 32 nt, Homo Sapiens
acugaaaggugauguguguggaugagcuagga

SEQ ID NO: 407063 - RNA, 32 nt, Homo Sapiens
ccugaggucaggauucaaaaccagccuggcca

SEQ ID NO: 407064 - RNA, 32 nt, Homo Sapiens
ccgccggacguggccuggcugaaggacggcag

SEQ ID NO: 407065 - RNA, 32 nt, Homo Sapiens
ucgacauuuucucccucuuucuucccaugacc

SEQ ID NO: 407066 - RNA, 32 nt, Homo Sapiens
uccccagacacugagagcugguggugccugcu

SEQ ID NO: 407067 - RNA, 32 nt, Homo Sapiens
aaaggggcuucaacaaggaaaagcaguuggag

SEQ ID NO: 407068 - RNA, 32 nt, Homo Sapiens
uuagaugcuuguuuccuauuaaaauacagaca

SEQ ID NO: 407069 - RNA, 32 nt, Homo Sapiens
uuguagccaauacaugguguauagcaccaaaa

SEQ ID NO: 407070 - RNA, 32 nt, Homo Sapiens
ugaauauuuguaaaaauaaugaauggacucau

SEQ ID NO: 407071 - RNA, 32 nt, Homo Sapiens
ucggaaagcaccucaagcuguuucagauacag

SEQ ID NO: 407072 - RNA, 30 nt, Homo Sapiens
gaggaaggcaggcccucccgacucacaggu

SEQ ID NO: 407073 - RNA, 32 nt, Homo Sapiens
gaccagaucccugucuucugaccuccaacauu

SEQ ID NO: 407074 - RNA, 32 nt, Homo Sapiens
aaaaauaaaugaauuuucacuguuggcacaua

SEQ ID NO: 407075 - RNA, 32 nt, Homo Sapiens
gugaagaaaugaauuuuccaguuucaaguacc

SEQ ID NO: 407076 - RNA, 32 nt, Homo Sapiens
cuaucaaagcuucaaaaacuuugggaaagggu

SEQ ID NO: 407077 - RNA, 32 nt, Homo Sapiens
ggccugcccucccggccggggagccuccaggc

SEQ ID NO: 407078 - RNA, 32 nt, Homo Sapiens
gaaaagccggcgggucgggccuugagguggaa

SEQ ID NO: 407079 - RNA, 32 nt, Homo Sapiens
gagcuguggaccgcggcauggccgagccgggg

SEQ ID NO: 407080 - RNA, 32 nt, Homo Sapiens
cucuguugcagggcuaaacguggggauauguc

SEQ ID NO: 407081 - RNA, 32 nt, Homo Sapiens
ugaguugagauuggaccacugcucuccagccu

SEQ ID NO: 407082 - RNA, 32 nt, Homo Sapiens
cacccaaguauuuuaaaguaugugucucuaaa

SEQ ID NO: 407083 - RNA, 32 nt, Homo Sapiens
gaccuuugcaauauauuuuaauuacaaacacu

SEQ ID NO: 407084 - RNA, 32 nt, Homo Sapiens
caauaaaaugcuucagaaugucuccaacugac

SEQ ID NO: 407085 - RNA, 32 nt, Homo Sapiens
auuccccucugauauucaacccuauagaagga

SEQ ID NO: 407086 - RNA, 32 nt, Homo Sapiens
gcuuuguucuuugcaauaaaucuugcuacugc

SEQ ID NO: 407087 - RNA, 32 nt, Homo Sapiens
cuguuuuaauguuugcuuugaacauaauuuaa

SEQ ID NO: 407088 - RNA, 31 nt, Homo Sapiens
gcauauuauuugacuuuuccggacaaguuua

SEQ ID NO: 407089 - RNA, 32 nt, Homo Sapiens
gcaaguugggaggaccugagggcgccccggug

SEQ ID NO: 407090 - RNA, 31 nt, Homo Sapiens
auaaaaacaugagauuuaagagccugaaaaa

SEQ ID NO: 407091 - RNA, 32 nt, Homo Sapiens
aacaaagaucaucaaugcuaacaccucacaau

SEQ ID NO: 407092 - RNA, 32 nt, Homo Sapiens
ugcacccuccgggaagccauggagucugcugg

SEQ ID NO: 407093 - RNA, 32 nt, Homo Sapiens
ggucucccauccccucccuccuucacuccugc

SEQ ID NO: 407094 - RNA, 32 nt, Homo Sapiens
aaggacuuguuuauuuaaaugggacuguaaau

SEQ ID NO: 407095 - RNA, 32 nt, Homo Sapiens
cagugugaagaaagggggugucugcggaucug

SEQ ID NO: 407096 - RNA, 32 nt, Homo Sapiens
aggggcuggucccagaacaggcagucucacaa

SEQ ID NO: 407097 - RNA, 32 nt, Homo Sapiens
guauuacaaacacaaugguauuagcaaagcua

SEQ ID NO: 407098 - RNA, 32 nt, Homo Sapiens
ugcagccagcuggccugcacuggguguggaga

SEQ ID NO: 407099 - RNA, 32 nt, Homo Sapiens
gugauugcugcuaaagucaguaguaucguuuu

SEQ ID NO: 407100 - RNA, 32 nt, Homo Sapiens
cacugugcaccugaggcagaucaugcaucuuu

SEQ ID NO: 407101 - RNA, 32 nt, Homo Sapiens
acaacugcugugcaauucugcugagcaggaau

SEQ ID NO: 407102 - RNA, 32 nt, Homo Sapiens
cugacuucuauagcccucugugucggucccca

SEQ ID NO: 407103 - RNA, 32 nt, Homo Sapiens
ucuggccggcugcgugcagagcccacugggca

SEQ ID NO: 407104 - RNA, 32 nt, Homo Sapiens
ggguuaucuaauguagucuugggguggcugga

SEQ ID NO: 407105 - RNA, 32 nt, Homo Sapiens
ggccucugcgggagcccuccuagaccucugcg

SEQ ID NO: 407106 - RNA, 32 nt, Homo Sapiens
ucaacgcgaggguggugcagguggccccucug

SEQ ID NO: 407107 - RNA, 32 nt, Homo Sapiens
ucuacaaaaaauacaaaaauuagccaggcgug

SEQ ID NO: 407108 - RNA, 32 nt, Homo Sapiens
auggugaaacccuuucucuacugaaaauauaa

SEQ ID NO: 407109 - RNA, 32 nt, Homo Sapiens
agccucccgugccguccucgggccccguggcc

SEQ ID NO: 407110 - RNA, 32 nt, Homo Sapiens
aagaguacagaaauucauuaugcugcuaauuu

SEQ ID NO: 407111 - RNA, 32 nt, Homo Sapiens
gcccgugcgcgcgcucgcggccggguugcagg

SEQ ID NO: 407112 - RNA, 32 nt, Homo Sapiens
gcuucaaggccugggagcuagccagacccagg

SEQ ID NO: 407113 - RNA, 32 nt, Homo Sapiens
caucuguauuuuaucuccgugacuccaacuug

SEQ ID NO: 407114 - RNA, 32 nt, Homo Sapiens
uuaaguauaguugauauaugugaggcaaaaaa

SEQ ID NO: 407115 - RNA, 32 nt, Homo Sapiens
aaagugccccuguggcacuccuccccacacac

SEQ ID NO: 407116 - RNA, 32 nt, Homo Sapiens
ccccacgggcaugcgcacccuguuccagcggg

SEQ ID NO: 407117 - RNA, 32 nt, Homo Sapiens
gccagcuggcagcagaguguggccuucggaca

SEQ ID NO: 407118 - RNA, 32 nt, Homo Sapiens
guuuuuauuucuguuauucacaaaauacucau

SEQ ID NO: 407119 - RNA, 32 nt, Homo Sapiens
cacaugugugcaaauuauggcuucagaggugg

SEQ ID NO: 407120 - RNA, 29 nt, Homo Sapiens
acuuaaugggguuuauauggacuuucuuc

SEQ ID NO: 407121 - RNA, 32 nt, Homo Sapiens
uccuccaauuuccuuuggucuuuccaggagau

SEQ ID NO: 407122 - RNA, 32 nt, Homo Sapiens
gcacccggcuccccggcccauguccucacuug

SEQ ID NO: 407123 - RNA, 32 nt, Homo Sapiens
ccaguuggaaacaguaaagguuguaagcuuug

SEQ ID NO: 407124 - RNA, 32 nt, Homo Sapiens
gccugugagggcggccccgccuugcgggcugg

SEQ ID NO: 407125 - RNA, 32 nt, Homo Sapiens
cacggucacuacgugggugagguggucucaua

SEQ ID NO: 407126 - RNA, 32 nt, Homo Sapiens
ggucaaccaaaaugacguucuaccugaagcug

SEQ ID NO: 407127 - RNA, 32 nt, Homo Sapiens
aggagaggucaucaaagaugauaucuggccaa

SEQ ID NO: 407128 - RNA, 29 nt, Homo Sapiens
gcaccaaaauaaacugauacaaaucuguu

SEQ ID NO: 407129 - RNA, 32 nt, Homo Sapiens
gcaaauagcgauucucuucauguaucuccuaa

SEQ ID NO: 407130 - RNA, 32 nt, Homo Sapiens
uuaauccuuggagcaguaguuuuuauacuuau

SEQ ID NO: 407131 - RNA, 32 nt, Homo Sapiens
ccuccgugcugaaaugucaacaauuaaugcaa

SEQ ID NO: 407132 - RNA, 32 nt, Homo Sapiens
auucauauguucaaauccuaauccccagugug

SEQ ID NO: 407133 - RNA, 32 nt, Homo Sapiens
ccgucgggcuccucggcggcuacugcagagga

SEQ ID NO: 407134 - RNA, 30 nt, Homo Sapiens
ugggcagagaagcggggugagcaggacaua

SEQ ID NO: 407135 - RNA, 32 nt, Homo Sapiens
aggguccaggagagccuggggguggggggacu

SEQ ID NO: 407136 - RNA, 32 nt, Homo Sapiens
auggauucuguacaauacacuagaaaccaaca

SEQ ID NO: 407137 - RNA, 31 nt, Homo Sapiens
gaccgccgcgaguccgcaguaguucgggcca

SEQ ID NO: 407138 - RNA, 32 nt, Homo Sapiens
gccugcaguuuagagaaggcagagccacuggu

SEQ ID NO: 407139 - RNA, 32 nt, Homo Sapiens
uuuugucagagguagagaagacagggauuggg

SEQ ID NO: 407140 - RNA, 32 nt, Homo Sapiens
ggccgcgguagugauauaugcaaccccagucu

SEQ ID NO: 407141 - RNA, 32 nt, Homo Sapiens
uuuccuuucccuuuccucugccaguacaacua

SEQ ID NO: 407142 - RNA, 32 nt, Homo Sapiens
gugguuucuccacuccuccccgcucauguccc

SEQ ID NO: 407143 - RNA, 32 nt, Homo Sapiens
uccaggggcuccuggguuggagggaaccacca

SEQ ID NO: 407144 - RNA, 32 nt, Homo Sapiens
ucuccuuugcuuguccucuuugccuucgguaa

SEQ ID NO: 407145 - RNA, 32 nt, Homo Sapiens
ucuuacaaaaauauauuuuggaaaauuguaua

SEQ ID NO: 407146 - RNA, 32 nt, Homo Sapiens
cauagacuguuauauauagcauauuauuguug

SEQ ID NO: 407147 - RNA, 32 nt, Homo Sapiens
agcaggcgcucuuggcucggcgcggcccgcug

SEQ ID NO: 407148 - RNA, 31 nt, Homo Sapiens
auauggaaauaaacacaccuuuguuaaagau

SEQ ID NO: 407149 - RNA, 32 nt, Homo Sapiens
cuucaaacccucaagaggggaagcaacuccgu

SEQ ID NO: 407150 - RNA, 32 nt, Homo Sapiens
cucuacaaagcuuuauagaacuucuggaucua

SEQ ID NO: 407151 - RNA, 32 nt, Homo Sapiens
caggcucgccuggcgcuggcuggcguggcccu

SEQ ID NO: 407152 - RNA, 32 nt, Homo Sapiens
ugcauuuucugagugaguuacuucuacucacc

SEQ ID NO: 407153 - RNA, 27 nt, Homo Sapiens
ggaugggggcucucacucucugucacc

SEQ ID NO: 407154 - RNA, 32 nt, Homo Sapiens
cuacagcaagaagccagaacuguuggaaugaa

SEQ ID NO: 407155 - RNA, 32 nt, Homo Sapiens
uuuggcaggagacacaucccuucuccugugau

SEQ ID NO: 407156 - RNA, 32 nt, Homo Sapiens
auuucaguccacucugacugacuuucuaaacu

SEQ ID NO: 407157 - RNA, 32 nt, Homo Sapiens
aguauugcaauaagcaaaugcaaaaauauuca

SEQ ID NO: 407158 - RNA, 30 nt, Homo Sapiens
accugccaugcuccugagaaucucgggagu

SEQ ID NO: 407159 - RNA, 32 nt, Homo Sapiens
aucccccgccuggccuggaccccgugggguca

SEQ ID NO: 407160 - RNA, 32 nt, Homo Sapiens
ucagcuuccuccaccucgcuuccacugcacag

SEQ ID NO: 407161 - RNA, 32 nt, Homo Sapiens
aucagagacuuccauaaucaaguaaauuuuaa

SEQ ID NO: 407162 - RNA, 32 nt, Homo Sapiens
cugcuguguuuguugauguaaagauguuuuga

SEQ ID NO: 407163 - RNA, 32 nt, Homo Sapiens
aaaaucuuacaguggcucaucaucucuuuagu

SEQ ID NO: 407164 - RNA, 32 nt, Homo Sapiens
caggaauggugcccaccucggcgaauugaagg

SEQ ID NO: 407165 - RNA, 32 nt, Homo Sapiens
aaaauuugcagagaaaugaugguuguaagugg

SEQ ID NO: 407166 - RNA, 32 nt, Homo Sapiens
cagucuaggaggaggaggagguagggugugaa

SEQ ID NO: 407167 - RNA, 32 nt, Homo Sapiens
gaaaggaaacaaaaaagugaaggaaauauuuu

SEQ ID NO: 407168 - RNA, 32 nt, Homo Sapiens
cccaguaccaugcacacuccugucccgaacuc

SEQ ID NO: 407169 - RNA, 31 nt, Homo Sapiens
uucagcucacggaagggaugcuaguccguga

SEQ ID NO: 407170 - RNA, 32 nt, Homo Sapiens
ugguguuuggcacuuuaaggucaucguugggc

SEQ ID NO: 407171 - RNA, 32 nt, Homo Sapiens
ugacuuauaauuuuaucagggauggauaaaga

SEQ ID NO: 407172 - RNA, 32 nt, Homo Sapiens
gacuccacccuccccaccuggcucauuucccc

SEQ ID NO: 407173 - RNA, 30 nt, Homo Sapiens
ugcgagcccugcugcagagccuccggcugg

SEQ ID NO: 407174 - RNA, 32 nt, Homo Sapiens
aguuuugcuguguuggucaggcuggucuugaa

SEQ ID NO: 407175 - RNA, 32 nt, Homo Sapiens
uauagacuaguuauuucccucuguaaagaagc

SEQ ID NO: 407176 - RNA, 32 nt, Homo Sapiens
ugccuggucacugcucucccagcccugccugg

SEQ ID NO: 407177 - RNA, 32 nt, Homo Sapiens
ccuccugaguagcuaagaccacaggugugugc

SEQ ID NO: 407178 - RNA, 32 nt, Homo Sapiens
cccuauccuacacuacuaggaacuugcacagu

SEQ ID NO: 407179 - RNA, 32 nt, Homo Sapiens
cugcugaggaaguggcagguguguggcccugc

SEQ ID NO: 407180 - RNA, 32 nt, Homo Sapiens
cacccgugguugugaaaauaguauagcaaaaa

SEQ ID NO: 407181 - RNA, 32 nt, Homo Sapiens
ggaagccucaggacaagaagaggcaagcaucu

SEQ ID NO: 407182 - RNA, 32 nt, Homo Sapiens
cccuuaaaaaucacuuguuuuaaaaagaaagu

SEQ ID NO: 407183 - RNA, 32 nt, Homo Sapiens
cugccccucagcucagccucaaucaagaaguu

SEQ ID NO: 407184 - RNA, 32 nt, Homo Sapiens
gguguggguuucccccagcucuucccacacgu

SEQ ID NO: 407185 - RNA, 32 nt, Homo Sapiens
accgguagagaaugguggucuuuccuucauug

SEQ ID NO: 407186 - RNA, 32 nt, Homo Sapiens
cagggaggcagaggacaccuccccaucacuca

SEQ ID NO: 407187 - RNA, 32 nt, Homo Sapiens
uggugugcaccuguagucccagcuauucagga

SEQ ID NO: 407188 - RNA, 32 nt, Homo Sapiens
aagcaaugucuuccuucauccuuuucuuucuu

SEQ ID NO: 407189 - RNA, 32 nt, Homo Sapiens
aagacagcagugcccuucucuggaagaagagg

SEQ ID NO: 407190 - RNA, 32 nt, Homo Sapiens
cuuccauccauggcagcccuguuuccuucacc

SEQ ID NO: 407191 - RNA, 32 nt, Homo Sapiens
gcuuuuguaauaauucacuaucuuaagugaaa

SEQ ID NO: 407192 - RNA, 32 nt, Homo Sapiens
auuugaagaaauucuuuuuauaucuauaccug

SEQ ID NO: 407193 - RNA, 32 nt, Homo Sapiens
agccacugccgccgucgccgcggagcugguuu

SEQ ID NO: 407194 - RNA, 32 nt, Homo Sapiens
augcggagaacaaaugugaagggaguaggaua

SEQ ID NO: 407195 - RNA, 32 nt, Homo Sapiens
gguaauacacaaauaaauccauguuuuagcaa

SEQ ID NO: 407196 - RNA, 32 nt, Homo Sapiens
ggguuccuguggcccaggauggaggccaccgc

SEQ ID NO: 407197 - RNA, 32 nt, Homo Sapiens
cuggaagucuguaucuugacaauuuuaauaaa

SEQ ID NO: 407198 - RNA, 31 nt, Homo Sapiens
ccugaugccagcaccaccugggcugggcccu

SEQ ID NO: 407199 - RNA, 31 nt, Homo Sapiens
cugggagguaacaaacaggucccgcaccuca

SEQ ID NO: 407200 - RNA, 32 nt, Homo Sapiens
augaaauggauuuucaaggucucuaaaccuug

SEQ ID NO: 407201 - RNA, 32 nt, Homo Sapiens
agccggcaaccacugcagauuccuccccuggc

SEQ ID NO: 407202 - RNA, 32 nt, Homo Sapiens
gcuguggcagcauuuccagcggccucugcagg

SEQ ID NO: 407203 - RNA, 32 nt, Homo Sapiens
acuccccacggccaccaagacagggguucccu

SEQ ID NO: 407204 - RNA, 32 nt, Homo Sapiens
aaaaacugcguguuuccacccccgucggccug

SEQ ID NO: 407205 - RNA, 32 nt, Homo Sapiens
aaucucaucacacucugucacccaggccaagu

SEQ ID NO: 407206 - RNA, 32 nt, Homo Sapiens
gcccuaggcgugccggggagggggcgagggcg

SEQ ID NO: 407207 - RNA, 32 nt, Homo Sapiens
uggagccugcggucaccagcacccuucucaca

SEQ ID NO: 407208 - RNA, 32 nt, Homo Sapiens
cauuucugccuugugauggacccaggaggucu

SEQ ID NO: 407209 - RNA, 32 nt, Homo Sapiens
uuauuaguuguaaauauuuucuuauguaccag

SEQ ID NO: 407210 - RNA, 30 nt, Homo Sapiens
cugcaaggcggcggcaggagagguuguggu

SEQ ID NO: 407211 - RNA, 32 nt, Homo Sapiens
uagcaaaagaaaauucuuagugugauacagcu

SEQ ID NO: 407212 - RNA, 32 nt, Homo Sapiens
agccucuucccuccccggcagugggggcgccg

SEQ ID NO: 407213 - RNA, 32 nt, Homo Sapiens
uccgugcggccugguccgggccauguccgcgu

SEQ ID NO: 407214 - RNA, 32 nt, Homo Sapiens
uguggcucauauccagguucauuuucacugag

SEQ ID NO: 407215 - RNA, 32 nt, Homo Sapiens
uuuuuggaaaaguuugacaaagcauaccacau

SEQ ID NO: 407216 - RNA, 32 nt, Homo Sapiens
gacaucguccccagcccuguggcuguucaucc

SEQ ID NO: 407217 - RNA, 32 nt, Homo Sapiens
cacauccugcaggccgguggcugcuggaguuu

SEQ ID NO: 407218 - RNA, 32 nt, Homo Sapiens
acguauuaagugcuuagauuauagaaaugauc

SEQ ID NO: 407219 - RNA, 32 nt, Homo Sapiens
cacaauacuaguacaugaaaugauaggcuuuu

SEQ ID NO: 407220 - RNA, 32 nt, Homo Sapiens
uuccaguuuggccuuaugcuucaugcagacuu

SEQ ID NO: 407221 - RNA, 32 nt, Homo Sapiens
auuuauacaccagcaauuuagacaaagccuua

SEQ ID NO: 407222 - RNA, 32 nt, Homo Sapiens
auauuuaaugaaaguuuauuaauucuuuuucc

SEQ ID NO: 407223 - RNA, 32 nt, Homo Sapiens
augguggugguuuucgcaugucuugcacacau

SEQ ID NO: 407224 - RNA, 32 nt, Homo Sapiens
gaaauaauuaaauuagugauauuuuaaucagg

SEQ ID NO: 407225 - RNA, 32 nt, Homo Sapiens
aaccugaugucaaagcccaaaauacagaacag

SEQ ID NO: 407226 - RNA, 31 nt, Homo Sapiens
ggaugucggcacuguguccccggcucuggga

SEQ ID NO: 407227 - RNA, 32 nt, Homo Sapiens
gccagccgccggugcuguugcccaagggcgug

SEQ ID NO: 407228 - RNA, 32 nt, Homo Sapiens
aaaggaaauaaaucaguguccguuugccagua

SEQ ID NO: 407229 - RNA, 32 nt, Homo Sapiens
auaggcggcucaaaggagcaucaguuucuuuu

SEQ ID NO: 407230 - RNA, 31 nt, Homo Sapiens
uuaucugcaagguggcaagcaguucuuuuca

SEQ ID NO: 407231 - RNA, 32 nt, Homo Sapiens
agaggaaccagauuggaagagggucguaaaug

SEQ ID NO: 407232 - RNA, 32 nt, Homo Sapiens
ugccugcugucauggagauagggugauuucau

SEQ ID NO: 407233 - RNA, 32 nt, Homo Sapiens
aacacacauaagaauacacucuggagaaagac

SEQ ID NO: 407234 - RNA, 32 nt, Homo Sapiens
uucgaaggagucaucacuaggugcuuuguccu

SEQ ID NO: 407235 - RNA, 32 nt, Homo Sapiens
cucgggaggcgaagguugcagugagccgagau

SEQ ID NO: 407236 - RNA, 32 nt, Homo Sapiens
guucuucccccuccucccagagcugggcuacc

SEQ ID NO: 407237 - RNA, 32 nt, Homo Sapiens
caugacagauaagcauaacauuaaagagaacu

SEQ ID NO: 407238 - RNA, 32 nt, Homo Sapiens
gggaacguggguggaggcagagagaccagaaa

SEQ ID NO: 407239 - RNA, 32 nt, Homo Sapiens
cauugggguaaaucuuuuuuuuauuauuuuua

SEQ ID NO: 407240 - RNA, 32 nt, Homo Sapiens
uccagugaaaucaacuacucuggagcggccug

SEQ ID NO: 407241 - RNA, 32 nt, Homo Sapiens
ggccauuacucccacacucaggaaccagacgu

SEQ ID NO: 407242 - RNA, 32 nt, Homo Sapiens
uggggcagggggugucagcugcacagcgggac

SEQ ID NO: 407243 - RNA, 32 nt, Homo Sapiens
uucagcaaaugccuuuucaaaugcagcaaucc

SEQ ID NO: 407244 - RNA, 32 nt, Homo Sapiens
uccaaguucauaugcgugaacaaaagaaaaga

SEQ ID NO: 407245 - RNA, 32 nt, Homo Sapiens
uuaacggaagcuccuuuuuuuucaccucagga

SEQ ID NO: 407246 - RNA, 32 nt, Homo Sapiens
gcgcagcuccucggcgcuuccucgguggcuuc

SEQ ID NO: 407247 - RNA, 32 nt, Homo Sapiens
ggcacuucugggugccaggugcauccuagccc

SEQ ID NO: 407248 - RNA, 32 nt, Homo Sapiens
uuuuacauuucuauuucauaaugaaaaacuau

SEQ ID NO: 407249 - RNA, 32 nt, Homo Sapiens
cuguaccauaguccugggaaaaggguggacuc

SEQ ID NO: 407250 - RNA, 32 nt, Homo Sapiens
agaauagcauauaucuaaaaguagucuucagc

SEQ ID NO: 407251 - RNA, 32 nt, Homo Sapiens
uaaaauauacuucaugcuguuuaugcuauuag

SEQ ID NO: 407252 - RNA, 32 nt, Homo Sapiens
cagucaaauugauaguuuaauucuucaaguga

SEQ ID NO: 407253 - RNA, 32 nt, Homo Sapiens
ccccagccuugcccagcuuucaaaggacaaaa

SEQ ID NO: 407254 - RNA, 32 nt, Homo Sapiens
auccuaaaauuccaaaauuauauugagcaauc

SEQ ID NO: 407255 - RNA, 32 nt, Homo Sapiens
aaaacugaacaaaacccaacgcggccgucgaa

SEQ ID NO: 407256 - RNA, 32 nt, Homo Sapiens
uuuaaacaaacaaacaaacaaacagaaguaac

SEQ ID NO: 407257 - RNA, 32 nt, Homo Sapiens
gucgaaaagggagagaguaaagaccuggcuca

SEQ ID NO: 407258 - RNA, 32 nt, Homo Sapiens
ucuuuauugucaggcgagagccaggcuccccg

SEQ ID NO: 407259 - RNA, 32 nt, Homo Sapiens
guuuugaaaaacaguugugugaauauuucaac

SEQ ID NO: 407260 - RNA, 32 nt, Homo Sapiens
uagcuuuucuuacugguuuuuccaauaaguaa

SEQ ID NO: 407261 - RNA, 32 nt, Homo Sapiens
agguccaggaggaaacggggcggccgcuaggc

SEQ ID NO: 407262 - RNA, 32 nt, Homo Sapiens
uaggagugaggaugagcuuaugcucuuaucag

SEQ ID NO: 407263 - RNA, 32 nt, Homo Sapiens
agaacugccuggggggcaggguuaggaaucuc

SEQ ID NO: 407264 - RNA, 32 nt, Homo Sapiens
aaaauugccaaaacaaagaaaaucuuaaaauc

SEQ ID NO: 407265 - RNA, 31 nt, Homo Sapiens
uucuugcacgaacgacuucgauauuacccug

SEQ ID NO: 407266 - RNA, 28 nt, Homo Sapiens
uauuuugucuguuguauguguuacaaau

SEQ ID NO: 407267 - RNA, 32 nt, Homo Sapiens
uaagugggggagagggaaagcagguauugcag

SEQ ID NO: 407268 - RNA, 32 nt, Homo Sapiens
uccggcagggagaccgggagggguggccacac

SEQ ID NO: 407269 - RNA, 32 nt, Homo Sapiens
uuugaaaguuauuuucuguuuacuacacaaac

SEQ ID NO: 407270 - RNA, 32 nt, Homo Sapiens
ucaagugauccuccugccccagcauuccaaag

SEQ ID NO: 407271 - RNA, 32 nt, Homo Sapiens
cuagacuacuucuuuucuuaucaucaguucau

SEQ ID NO: 407272 - RNA, 32 nt, Homo Sapiens
cacacucaggacaagaaugcccugcccggaac

SEQ ID NO: 407273 - RNA, 32 nt, Homo Sapiens
uaaauuuuggaauuagguaugaggaagcaucu

SEQ ID NO: 407274 - RNA, 32 nt, Homo Sapiens
guuugccugagcucaggaguuugagaccaacu

SEQ ID NO: 407275 - RNA, 32 nt, Homo Sapiens
guccgggaaggggugagucugggucuggaaaa

SEQ ID NO: 407276 - RNA, 32 nt, Homo Sapiens
cgcuucuccguccaaugccaaugccuucagac

SEQ ID NO: 407277 - RNA, 32 nt, Homo Sapiens
ccugacaaauacuacacuuuacaaacaauguu

SEQ ID NO: 407278 - RNA, 32 nt, Homo Sapiens
uacagaggcucuugcccagccacauccauuca

SEQ ID NO: 407279 - RNA, 32 nt, Homo Sapiens
aagagcaguaugccacuucuuaaaacagaaca

SEQ ID NO: 407280 - RNA, 32 nt, Homo Sapiens
cccaaagcccuugugggcggaccuccccugag

SEQ ID NO: 407281 - RNA, 32 nt, Homo Sapiens
cacaacugacuuccaagauccuuuugugacuc

SEQ ID NO: 407282 - RNA, 32 nt, Homo Sapiens
ucugggacauauuuaaauacaaacauauucag

SEQ ID NO: 407283 - RNA, 32 nt, Homo Sapiens
gaaaaacccuuuuguguagaagucugaguggu

SEQ ID NO: 407284 - RNA, 32 nt, Homo Sapiens
aauuauaauuuaauuugaaggacugcagaaca

SEQ ID NO: 407285 - RNA, 32 nt, Homo Sapiens
gucugugaguuugaccugcccagcgugugggc

SEQ ID NO: 407286 - RNA, 32 nt, Homo Sapiens
ugggaaggaaauguccagacuuuucaaaucuc

SEQ ID NO: 407287 - RNA, 32 nt, Homo Sapiens
aaaggggaaaauuugcugcagaaaauuccaaa

SEQ ID NO: 407288 - RNA, 32 nt, Homo Sapiens
uugccuguugucacggcaucuugcacuuuagg

SEQ ID NO: 407289 - RNA, 32 nt, Homo Sapiens
aagaguucuaggucaggugagcagaagucuaa

SEQ ID NO: 407290 - RNA, 31 nt, Homo Sapiens
gcauccacuuuuauuuaucaaacacauuugc

SEQ ID NO: 407291 - RNA, 31 nt, Homo Sapiens
uaaucacccccacuccugccccgcugcccug

SEQ ID NO: 407292 - RNA, 32 nt, Homo Sapiens
caaccucagcugauuguaguacaccugcuagc

SEQ ID NO: 407293 - RNA, 29 nt, Homo Sapiens
gaucaugaaacuaauuaccauccuuuucc

SEQ ID NO: 407294 - RNA, 32 nt, Homo Sapiens
caauuuccaguuauuucuuuggagaauuuuau

SEQ ID NO: 407295 - RNA, 32 nt, Homo Sapiens
ccaaaaugacgaacacaaagggaaagaggaga

SEQ ID NO: 407296 - RNA, 32 nt, Homo Sapiens
ccgcuuugcagggcuccaacuucggcggacgc

SEQ ID NO: 407297 - RNA, 32 nt, Homo Sapiens
gcuuuggagccccagaugccugcccagaggcu

SEQ ID NO: 407298 - RNA, 27 nt, Homo Sapiens
cuucaguccuucuacuguccuggcuac

SEQ ID NO: 407299 - RNA, 32 nt, Homo Sapiens
cacggguagugggauucugcauuaguggggcu

SEQ ID NO: 407300 - RNA, 32 nt, Homo Sapiens
cccacauuugagaagacuguuuugcaucacuc

SEQ ID NO: 407301 - RNA, 32 nt, Homo Sapiens
cuaucugcugcuuguuuuuguaaauagaguuu

SEQ ID NO: 407302 - RNA, 32 nt, Homo Sapiens
ccuuauacugaauaacuacugaauccauuuac

SEQ ID NO: 407303 - RNA, 32 nt, Homo Sapiens
auugcuccgggacugaagaaucuccucacgug

SEQ ID NO: 407304 - RNA, 32 nt, Homo Sapiens
ugcugugaacaacaacaacaaaaaauaaauca

SEQ ID NO: 407305 - RNA, 31 nt, Homo Sapiens
ccugagccccacugccugucccuccccaucc

SEQ ID NO: 407306 - RNA, 32 nt, Homo Sapiens
caguccccagguccucagggccccagagcggg

SEQ ID NO: 407307 - RNA, 32 nt, Homo Sapiens
cagaaaugcaggauuugacucugggcaugaaa

SEQ ID NO: 407308 - RNA, 32 nt, Homo Sapiens
aggccgaaaauuuagaggaaaaugaagagccc

SEQ ID NO: 407309 - RNA, 32 nt, Homo Sapiens
ugcgcggcaucccaggccggcccgaacguccg

SEQ ID NO: 407310 - RNA, 30 nt, Homo Sapiens
uugacugaaaguggcaugcaagauaaauuu

SEQ ID NO: 407311 - RNA, 32 nt, Homo Sapiens
agcagcccaagccgcaggaauugcugagacag

SEQ ID NO: 407312 - RNA, 32 nt, Homo Sapiens
uaauugcauguuuuuaaaaauuccuuggaggc

SEQ ID NO: 407313 - RNA, 32 nt, Homo Sapiens
gucguucucacuccuuuuccugucccguuucc

SEQ ID NO: 407314 - RNA, 32 nt, Homo Sapiens
ccaacccacgcuccaacacacacacacacaca

SEQ ID NO: 407315 - RNA, 32 nt, Homo Sapiens
agagcugacaauaaauacgagucucaaggucu

SEQ ID NO: 407316 - RNA, 32 nt, Homo Sapiens
ccgcggacaggaagaacaccagcacgaggguc

SEQ ID NO: 407317 - RNA, 32 nt, Homo Sapiens
gcaccgccaccucuccuccuccacuugccccu

SEQ ID NO: 407318 - RNA, 30 nt, Homo Sapiens
gucuaucuggacuugcccuugucuguucgu

SEQ ID NO: 407319 - RNA, 32 nt, Homo Sapiens
uuagguguuacucauggaugaggaggcuguuc

SEQ ID NO: 407320 - RNA, 32 nt, Homo Sapiens
aauuuaaaggaucuguuaauucuuauauuuuu

SEQ ID NO: 407321 - RNA, 32 nt, Homo Sapiens
gaauggaugaaacuuuuuuaaaguuucagaug

SEQ ID NO: 407322 - RNA, 32 nt, Homo Sapiens
ggcagcguucugguuuucuggauggcagcaga

SEQ ID NO: 407323 - RNA, 30 nt, Homo Sapiens
uguuuggauaaaauggaugggucaaugccu

SEQ ID NO: 407324 - RNA, 31 nt, Homo Sapiens
ugaaacuauugagauauuaaaauuuuugaaa

SEQ ID NO: 407325 - RNA, 32 nt, Homo Sapiens
ccagcacuuugggaggccgagaaccacucacg

SEQ ID NO: 407326 - RNA, 32 nt, Homo Sapiens
aacagcaccaaaacaggauuagcagagcucuu

SEQ ID NO: 407327 - RNA, 32 nt, Homo Sapiens
gcugggcgggcaccugucggccucgucggccc

SEQ ID NO: 407328 - RNA, 32 nt, Homo Sapiens
gcugucaaccaaauaaaggaaugccauuuucu

SEQ ID NO: 407329 - RNA, 32 nt, Homo Sapiens
ccuuggcuguggagaagcacuccaggccgcua

SEQ ID NO: 407330 - RNA, 32 nt, Homo Sapiens
cuuaaaugaggugagagugaagagacuagagc

SEQ ID NO: 407331 - RNA, 32 nt, Homo Sapiens
uuucuccugugcuugguuguguauaauggagc

SEQ ID NO: 407332 - RNA, 32 nt, Homo Sapiens
guguguauauauaugacguuguacauugcaca

SEQ ID NO: 407333 - RNA, 32 nt, Homo Sapiens
acauuauguaaaaauaaauggaauaaucacug

SEQ ID NO: 407334 - RNA, 32 nt, Homo Sapiens
gaccacauauuuuuauucagcaguguucuuua

SEQ ID NO: 407335 - RNA, 32 nt, Homo Sapiens
agcgguggcugccgggcguggugucggugggu

SEQ ID NO: 407336 - RNA, 31 nt, Homo Sapiens
gaaagcccacccuugguucaggcccaagguu

SEQ ID NO: 407337 - RNA, 32 nt, Homo Sapiens
agggaccgacagacuugacaacggugacagca

SEQ ID NO: 407338 - RNA, 32 nt, Homo Sapiens
cuuucugcucuuccuccacugcugaacugguc

SEQ ID NO: 407339 - RNA, 32 nt, Homo Sapiens
ggagagccuaguccucccccagccccuccagc

SEQ ID NO: 407340 - RNA, 32 nt, Homo Sapiens
aacuguccuguaggauauucucuuccugaugg

SEQ ID NO: 407341 - RNA, 32 nt, Homo Sapiens
aggagaggccgcugccuagagccccuccccac

SEQ ID NO: 407342 - RNA, 32 nt, Homo Sapiens
ugggccuuauuaaagagcaacuucuauuucca

SEQ ID NO: 407343 - RNA, 32 nt, Homo Sapiens
aauguccugccaguuuaaggguacauuguaga

SEQ ID NO: 407344 - RNA, 32 nt, Homo Sapiens
uuuuguauaaaacuguaacauuacuguacaga

SEQ ID NO: 407345 - RNA, 32 nt, Homo Sapiens
uucuuuuguaaaucacagccaccauucauuau

SEQ ID NO: 407346 - RNA, 32 nt, Homo Sapiens
gguaaagaggaugucgcaucuuuagaauuuca

SEQ ID NO: 407347 - RNA, 32 nt, Homo Sapiens
ugaugcugcugccgcccggccacggcccaccc

SEQ ID NO: 407348 - RNA, 32 nt, Homo Sapiens
ucucuguguuuggccucucacacacacacagg

SEQ ID NO: 407349 - RNA, 32 nt, Homo Sapiens
guggcugaggcccccacccuccccuggaacgc

SEQ ID NO: 407350 - RNA, 32 nt, Homo Sapiens
gcucggagccagggucggccugcccaccgggc

SEQ ID NO: 407351 - RNA, 32 nt, Homo Sapiens
ccucugcuguguuuuucuugaguccuugcacu

SEQ ID NO: 407352 - RNA, 32 nt, Homo Sapiens
uaucucccauccuguggaacccgccccauugg

SEQ ID NO: 407353 - RNA, 32 nt, Homo Sapiens
gcgacggggacggugagggcgagggcgagggc

SEQ ID NO: 407354 - RNA, 32 nt, Homo Sapiens
uggcagaaauaaaaccacagguagauucugcc

SEQ ID NO: 407355 - RNA, 32 nt, Homo Sapiens
gcuuuuguucuuccccacaauuccauuacuaa

SEQ ID NO: 407356 - RNA, 32 nt, Homo Sapiens
gcucuuccccuagaccucccccucacuuacau

SEQ ID NO: 407357 - RNA, 32 nt, Homo Sapiens
cagauacggggacaacuuuaugacauuguuuu

SEQ ID NO: 407358 - RNA, 32 nt, Homo Sapiens
acaugggccuccugaggccucggggcuguccu

SEQ ID NO: 407359 - RNA, 32 nt, Homo Sapiens
gcagugacuuaaggcuaaguguagaagauaau

SEQ ID NO: 407360 - RNA, 32 nt, Homo Sapiens
gugcuaaggaaagcagcagagagagacguccg

SEQ ID NO: 407361 - RNA, 32 nt, Homo Sapiens
accagagaucucgccccucgugaugucagggg

SEQ ID NO: 407362 - RNA, 32 nt, Homo Sapiens
aaguaggcaggggcgaggcggcuggggaccgc

SEQ ID NO: 407363 - RNA, 32 nt, Homo Sapiens
agaucaguaagccccaguguccccccagcccc

SEQ ID NO: 407364 - RNA, 32 nt, Homo Sapiens
gugaaacccgcacccuagccaggccccaggga

SEQ ID NO: 407365 - RNA, 32 nt, Homo Sapiens
ggaaagccuucagaucugccucaauccuucaa

SEQ ID NO: 407366 - RNA, 26 nt, Homo Sapiens
gaugguaggcggcggcggggucggcg

SEQ ID NO: 407367 - RNA, 32 nt, Homo Sapiens
uuguaugacaacauuacaaaggaaggaggagg

SEQ ID NO: 407368 - RNA, 32 nt, Homo Sapiens
ccuggucagguggcugugucagguccccuagg

SEQ ID NO: 407369 - RNA, 32 nt, Homo Sapiens
acagacaaauaugcaggacacgcccaucuugg

SEQ ID NO: 407370 - RNA, 32 nt, Homo Sapiens
auuccugaggaagacuagcugcugcugcugcu

SEQ ID NO: 407371 - RNA, 32 nt, Homo Sapiens
ggaccagcugggugucagccacggaugagccg

SEQ ID NO: 407372 - RNA, 31 nt, Homo Sapiens
aacauggguggcugccugccugccugccugc

SEQ ID NO: 407373 - RNA, 32 nt, Homo Sapiens
aagauacugugauucucucaccguucucugga

SEQ ID NO: 407374 - RNA, 32 nt, Homo Sapiens
cacuuaaacuuucagcuaaggaucuuagaucc

SEQ ID NO: 407375 - RNA, 32 nt, Homo Sapiens
ugcccaauaaagcagaaacaugcugaauugaa

SEQ ID NO: 407376 - RNA, 32 nt, Homo Sapiens
auuuacuguauauaauaucuugaguuuguuua

SEQ ID NO: 407377 - RNA, 32 nt, Homo Sapiens
ccauuuacagcuucuucauugacacuguaucu

SEQ ID NO: 407378 - RNA, 32 nt, Homo Sapiens
uccccagagccuccccgcgcggaccccgcugc

SEQ ID NO: 407379 - RNA, 32 nt, Homo Sapiens
uuuuugauuaggguuacaaaauuuagagacca

SEQ ID NO: 407380 - RNA, 32 nt, Homo Sapiens
ggcguccugguagcggccuccugggugcucac

SEQ ID NO: 407381 - RNA, 27 nt, Homo Sapiens
uuuuccuauuaauucuuaaguacucug

SEQ ID NO: 407382 - RNA, 32 nt, Homo Sapiens
caaaacuguacaaagaagacgacuguuuucca

SEQ ID NO: 407383 - RNA, 32 nt, Homo Sapiens
cuuuccucuguguuuaccaccaccugucuucc

SEQ ID NO: 407384 - RNA, 32 nt, Homo Sapiens
cauuucuuaaaauuauuacaugcugcaucuuu

SEQ ID NO: 407385 - RNA, 32 nt, Homo Sapiens
ugguuuuauuuuuggcuuauuccaagggguaa

SEQ ID NO: 407386 - RNA, 31 nt, Homo Sapiens
gcagccaugcuucccggggugggcguguucg

SEQ ID NO: 407387 - RNA, 31 nt, Homo Sapiens
ugguagcgauguggcccagugagacggcaca

SEQ ID NO: 407388 - RNA, 32 nt, Homo Sapiens
uuguuacagguuguagaguauuugcagaagga

SEQ ID NO: 407389 - RNA, 32 nt, Homo Sapiens
ccugcuuugcuugccugcuuuuuccagaaucg

SEQ ID NO: 407390 - RNA, 32 nt, Homo Sapiens
agccacugccagcuggggggaucugcagcucc

SEQ ID NO: 407391 - RNA, 32 nt, Homo Sapiens
cugcgcccggccaauuuuaacuuuucauaaua

SEQ ID NO: 407392 - RNA, 32 nt, Homo Sapiens
ggcaggcccucccgacucacaggucaccucgc

SEQ ID NO: 407393 - RNA, 32 nt, Homo Sapiens
cacagugcuguacugcacacaccacagaaugu

SEQ ID NO: 407394 - RNA, 32 nt, Homo Sapiens
ucagagguacuagucaugcagucugguaccga

SEQ ID NO: 407395 - RNA, 32 nt, Homo Sapiens
ccagcgaauuuaugcuacaacugguaacaaug

SEQ ID NO: 407396 - RNA, 32 nt, Homo Sapiens
auaaaaguuuggaaacaaugaccacuucucua

SEQ ID NO: 407397 - RNA, 32 nt, Homo Sapiens
cagaaguucccucucugacccaggcugagucc

SEQ ID NO: 407398 - RNA, 32 nt, Homo Sapiens
aguagugaagacaaggaugaaaaaauaaguga

SEQ ID NO: 407399 - RNA, 32 nt, Homo Sapiens
uuuuuuacuuggauaaaaaccuaugaugauuu

SEQ ID NO: 407400 - RNA, 32 nt, Homo Sapiens
guacuguguauguguuuccuauauuguuauau

SEQ ID NO: 407401 - RNA, 32 nt, Homo Sapiens
uucuucauggguuuauguuuucguuucauuuu

SEQ ID NO: 407402 - RNA, 32 nt, Homo Sapiens
acaauguugucaugaaaagguauuauaguaag

SEQ ID NO: 407403 - RNA, 32 nt, Homo Sapiens
ucucccgggaacucagcccggcugagugacag

SEQ ID NO: 407404 - RNA, 32 nt, Homo Sapiens
gacggccugucuugcgcuccacuuccuucaca

SEQ ID NO: 407405 - RNA, 32 nt, Homo Sapiens
gagguucaguuauaagauucaucauacuacua

SEQ ID NO: 407406 - RNA, 32 nt, Homo Sapiens
cgacggagugaauggcggcggcggcugggaug

SEQ ID NO: 407407 - RNA, 32 nt, Homo Sapiens
acccuacuaaccagcaggcucaucucaccucc

SEQ ID NO: 407408 - RNA, 28 nt, Homo Sapiens
cuuguccugaaauuauuuucaguucuug

SEQ ID NO: 407409 - RNA, 32 nt, Homo Sapiens
agucucuguguaaaccacucgacucaucuugu

SEQ ID NO: 407410 - RNA, 32 nt, Homo Sapiens
gcugaggccucgggucaagauuuugaucugag

SEQ ID NO: 407411 - RNA, 32 nt, Homo Sapiens
gaggagucgaggagccuguaauuaauuuuccu

SEQ ID NO: 407412 - RNA, 32 nt, Homo Sapiens
ccuguuggguggcaauuaauuaauccugugaa

SEQ ID NO: 407413 - RNA, 32 nt, Homo Sapiens
aagaguuuuugacuaguuucuuuuucuugaca

SEQ ID NO: 407414 - RNA, 32 nt, Homo Sapiens
gaccauuuauuaccaauguaauugcacuuuau

SEQ ID NO: 407415 - RNA, 32 nt, Homo Sapiens
cgggauggugccuacaacaugguccgugccua

SEQ ID NO: 407416 - RNA, 32 nt, Homo Sapiens
gagaaucuaagcccuccgauguguguuucuaa

SEQ ID NO: 407417 - RNA, 32 nt, Homo Sapiens
ggacauggcuuggccuggggucccagggcccu

SEQ ID NO: 407418 - RNA, 32 nt, Homo Sapiens
uacucaguucccucacgauucccgaucacggg

SEQ ID NO: 407419 - RNA, 32 nt, Homo Sapiens
ccuuuuuguaauccuguacaauugcaucacgg

SEQ ID NO: 407420 - RNA, 32 nt, Homo Sapiens
ugcacauuauuuguauuuuucuuuguauauga

SEQ ID NO: 407421 - RNA, 32 nt, Homo Sapiens
accuguuccugaugaauaaaaaguguguuaaa

SEQ ID NO: 407422 - RNA, 32 nt, Homo Sapiens
uccgaccccucggaccccggccgcgcauucca

SEQ ID NO: 407423 - RNA, 32 nt, Homo Sapiens
gcgccuggccuauugaagguuuuuaaucuuca

SEQ ID NO: 407424 - RNA, 31 nt, Homo Sapiens
ggggaagcgccccagaagccgaagugcccac

SEQ ID NO: 407425 - RNA, 32 nt, Homo Sapiens
agauggaaagggagugggagggggccugggcc

SEQ ID NO: 407426 - RNA, 32 nt, Homo Sapiens
ggaagugaaaaacgacggaggccgguugggag

SEQ ID NO: 407427 - RNA, 32 nt, Homo Sapiens
gcagagccauccucaucucauuuuuucacguc

SEQ ID NO: 407428 - RNA, 32 nt, Homo Sapiens
gggaauccgcacucacaaaagcacaggaugcu

SEQ ID NO: 407429 - RNA, 32 nt, Homo Sapiens
guaguagccugggcuuccagcagguggcgagc

SEQ ID NO: 407430 - RNA, 32 nt, Homo Sapiens
gcagcauuccaagaggcgacagucccaaaaga

SEQ ID NO: 407431 - RNA, 32 nt, Homo Sapiens
ccacuuucuuugggggcgacccccgauccaug

SEQ ID NO: 407432 - RNA, 32 nt, Homo Sapiens
uuaaaauaucuguagaagccauggcuugcuuu

SEQ ID NO: 407433 - RNA, 32 nt, Homo Sapiens
ugcuucccgcaccgugggucuuuccugauagc

SEQ ID NO: 407434 - RNA, 32 nt, Homo Sapiens
uugagcccaacacuuuaauuuauucuuucugg

SEQ ID NO: 407435 - RNA, 32 nt, Homo Sapiens
ggugccuaaaucuucggguccuccuccuugga

SEQ ID NO: 407436 - RNA, 32 nt, Homo Sapiens
caagccuugugucugccccuaugugacagcuc

SEQ ID NO: 407437 - RNA, 32 nt, Homo Sapiens
augaaagcuaugucaagcauucauuauucuga

SEQ ID NO: 407438 - RNA, 32 nt, Homo Sapiens
ugcugggguaggggcgggaggggacggggugg

SEQ ID NO: 407439 - RNA, 32 nt, Homo Sapiens
gggaaggggcgacuccacggaaagcccagacg

SEQ ID NO: 407440 - RNA, 32 nt, Homo Sapiens
caagguggcagagcugcuugcucugcagauca

SEQ ID NO: 407441 - RNA, 32 nt, Homo Sapiens
ccaccuggggacggccccucaucaccugaagu

SEQ ID NO: 407442 - RNA, 32 nt, Homo Sapiens
guauucauucagugaguuaaacacgaauugau

SEQ ID NO: 407443 - RNA, 32 nt, Homo Sapiens
gaaaacucaaaaugguggcaguucuuauuacc

SEQ ID NO: 407444 - RNA, 32 nt, Homo Sapiens
auuuaggaagccuugcuuugacuuuaucgggc

SEQ ID NO: 407445 - RNA, 32 nt, Homo Sapiens
gacuggcaggccagcccuucgccucuccauga

SEQ ID NO: 407446 - RNA, 32 nt, Homo Sapiens
gcugccacuuuuuaacuauuaagaggcagaaa

SEQ ID NO: 407447 - RNA, 32 nt, Homo Sapiens
uauuuuagcucuuaauuaguugcuuucacuau

SEQ ID NO: 407448 - RNA, 32 nt, Homo Sapiens
agaaggcugugcuggcggcuaaugggcugacu

SEQ ID NO: 407449 - RNA, 32 nt, Homo Sapiens
guccagaucgaccagcagaggcagauccugga

SEQ ID NO: 407450 - RNA, 32 nt, Homo Sapiens
caggggcucccacuugccaugggacucgcagc

SEQ ID NO: 407451 - RNA, 32 nt, Homo Sapiens
aaaggcgugcagguguuggccgcggccucuga

SEQ ID NO: 407452 - RNA, 32 nt, Homo Sapiens
uauuaguccaauguuaaacauuuuaaaugccu

SEQ ID NO: 407453 - RNA, 31 nt, Homo Sapiens
uugauuuugugcuguuguuuggacuguaaca

SEQ ID NO: 407454 - RNA, 32 nt, Homo Sapiens
gaagaagcccgaaaagcggaccaagaaaguug

SEQ ID NO: 407455 - RNA, 32 nt, Homo Sapiens
agguucucgggacaggcuaaccaggaggacag

SEQ ID NO: 407456 - RNA, 32 nt, Homo Sapiens
cgugaugcuguauaaauuggauuacaaaccau

SEQ ID NO: 407457 - RNA, 32 nt, Homo Sapiens
agauacuucacuuuuccagagugaaauguagg

SEQ ID NO: 407458 - RNA, 32 nt, Homo Sapiens
ucuccguggcugccauucccuucuuccuccuc

SEQ ID NO: 407459 - RNA, 32 nt, Homo Sapiens
ggaaaagaaaucaccuacucccugacacugug

SEQ ID NO: 407460 - RNA, 32 nt, Homo Sapiens
uaucuggcagagaacaguuaaucccuaagguc

SEQ ID NO: 407461 - RNA, 32 nt, Homo Sapiens
acauuuaguaaaugcugaaauaaaaugauuaa

SEQ ID NO: 407462 - RNA, 32 nt, Homo Sapiens
uguacacaaccuguacaacuaaaccacauuau

SEQ ID NO: 407463 - RNA, 32 nt, Homo Sapiens
gauuauccucaauuuccauauguuacugaauc

SEQ ID NO: 407464 - RNA, 32 nt, Homo Sapiens
ccacagcggccgcgcuccggccucgcuccgcc

SEQ ID NO: 407465 - RNA, 32 nt, Homo Sapiens
ugauauaaaaauuuacuugauauuuuuauuug

SEQ ID NO: 407466 - RNA, 32 nt, Homo Sapiens
aaugcuuuuuaaaaauaaacuucugaaaaccc

SEQ ID NO: 407467 - RNA, 32 nt, Homo Sapiens
gaagaauaaagagagcaaacuaccacaaccaa

SEQ ID NO: 407468 - RNA, 32 nt, Homo Sapiens
ucuccucaccugcacccaccggaccagguguc

SEQ ID NO: 407469 - RNA, 32 nt, Homo Sapiens
guugugcauucugggggcucccggucagccug

SEQ ID NO: 407470 - RNA, 29 nt, Homo Sapiens
acugaauaaaguuugacuuuuugaaaaaa

SEQ ID NO: 407471 - RNA, 31 nt, Homo Sapiens
ugagacgagacaauccugccccgccgccggg

SEQ ID NO: 407472 - RNA, 32 nt, Homo Sapiens
ccagcgccccuggccuguggacgcccugccug

SEQ ID NO: 407473 - RNA, 32 nt, Homo Sapiens
ggaggcuaugcccuccucuccagccccugcgu

SEQ ID NO: 407474 - RNA, 32 nt, Homo Sapiens
cuucuggccgccguccuggugcccuggccacc

SEQ ID NO: 407475 - RNA, 32 nt, Homo Sapiens
ugccccaggcccacccagggggcucugaaugu

SEQ ID NO: 407476 - RNA, 32 nt, Homo Sapiens
gaguaaugugugcugugcugauuuccuuuauu

SEQ ID NO: 407477 - RNA, 32 nt, Homo Sapiens
caagugcccccgcccuuccccccgguuccggg

SEQ ID NO: 407478 - RNA, 32 nt, Homo Sapiens
gggccugaggggcgucccgggcggcggugcuc

SEQ ID NO: 407479 - RNA, 32 nt, Homo Sapiens
gguuuuuuuuuuaaguuuuuauuuaauuuugu

SEQ ID NO: 407480 - RNA, 32 nt, Homo Sapiens
gaauuggucagcuacuuauucuuaccacccua

SEQ ID NO: 407481 - RNA, 32 nt, Homo Sapiens
uagagaccaaaaucugguucugaaggugugua

SEQ ID NO: 407482 - RNA, 32 nt, Homo Sapiens
ggaacucuccagccggggucuuucucugaguc

SEQ ID NO: 407483 - RNA, 32 nt, Homo Sapiens
cagcggugagaucacauacugguaggaccgug

SEQ ID NO: 407484 - RNA, 32 nt, Homo Sapiens
gucuuuugaauauagguuuccaauuaaguaca

SEQ ID NO: 407485 - RNA, 32 nt, Homo Sapiens
cagucaggagacaguuuuauuuuuguccccac

SEQ ID NO: 407486 - RNA, 32 nt, Homo Sapiens
ggaugugauuugucauccaguauuaaguucuu

SEQ ID NO: 407487 - RNA, 32 nt, Homo Sapiens
cuacugagggucaugcggaguucugcugagug

SEQ ID NO: 407488 - RNA, 32 nt, Homo Sapiens
uauuuaaucugcuccgcccugcucggguuugc

SEQ ID NO: 407489 - RNA, 32 nt, Homo Sapiens
agcgucugcccccgagccauucccuggagacc

SEQ ID NO: 407490 - RNA, 32 nt, Homo Sapiens
aagggggcguggcugcgucccgggggccgagg

SEQ ID NO: 407491 - RNA, 32 nt, Homo Sapiens
uauaaaccaggaauuucuuucuuaaggaccuu

SEQ ID NO: 407492 - RNA, 32 nt, Homo Sapiens
uuauaaagccuucuugucagaagugcugcucc

SEQ ID NO: 407493 - RNA, 32 nt, Homo Sapiens
ccccauuggauuacuuuuuuuuuuuuuuuuuu

SEQ ID NO: 407494 - RNA, 32 nt, Homo Sapiens
uccccuggccccagcccucuccugccuggccu

SEQ ID NO: 407495 - RNA, 32 nt, Homo Sapiens
gcgccacgagagcgggcagcggaggagauuga

SEQ ID NO: 407496 - RNA, 32 nt, Homo Sapiens
ugaggaggaaaagaagaaaugggcacaacagg

SEQ ID NO: 407497 - RNA, 32 nt, Homo Sapiens
uaggagacugguucuucuacauacaaggauuu

SEQ ID NO: 407498 - RNA, 32 nt, Homo Sapiens
ccucuuccuccuccuggugggugccauguuuc

SEQ ID NO: 407499 - RNA, 32 nt, Homo Sapiens
ugacucagugcagacuggucucucuuauguga

SEQ ID NO: 407500 - RNA, 32 nt, Homo Sapiens
cgcugucugaggggugggggugccgcucucuc

SEQ ID NO: 407501 - RNA, 32 nt, Homo Sapiens
acgaguaaaaauggccauauauuguuauguau

SEQ ID NO: 407502 - RNA, 32 nt, Homo Sapiens
cuaccgccacuagcgcugcuuccacugcuucu

SEQ ID NO: 407503 - RNA, 32 nt, Homo Sapiens
ucauucauaagaacaagagcucugcucuuaaa

SEQ ID NO: 407504 - RNA, 32 nt, Homo Sapiens
gagcucacagacauggugaggacccuggcugu

SEQ ID NO: 407505 - RNA, 32 nt, Homo Sapiens
cgggaggcgggugagggauaaaaaacuacaca

SEQ ID NO: 407506 - RNA, 32 nt, Homo Sapiens
uacgggcagaaucaagguggacagcuucugag

SEQ ID NO: 407507 - RNA, 32 nt, Homo Sapiens
uuuugauagaauuaaauuuaaauuuauccucc

SEQ ID NO: 407508 - RNA, 32 nt, Homo Sapiens
gcagcauauaccuucacacuagguuucagagc

SEQ ID NO: 407509 - RNA, 32 nt, Homo Sapiens
ggggggcaccaccuguggacagcccuccuguc

SEQ ID NO: 407510 - RNA, 32 nt, Homo Sapiens
auaagacguggaacuuaauguuguguguguuc

SEQ ID NO: 407511 - RNA, 32 nt, Homo Sapiens
cgccaggccgucugccucacccgccaccucac

SEQ ID NO: 407512 - RNA, 32 nt, Homo Sapiens
cucuaaccaaaauauacguguagccauuacca

SEQ ID NO: 407513 - RNA, 32 nt, Homo Sapiens
gaaccacuggucuagcuagaccugcacugucc

SEQ ID NO: 407514 - RNA, 32 nt, Homo Sapiens
cuaagaagaaagaaacagagauaauauauaua

SEQ ID NO: 407515 - RNA, 32 nt, Homo Sapiens
caugcccagcuaauuuuuuuuaauuuuuagua

SEQ ID NO: 407516 - RNA, 32 nt, Homo Sapiens
cucauucauuuuuauauugaccacuaagaaaa

SEQ ID NO: 407517 - RNA, 32 nt, Homo Sapiens
ggacuaaugcaccagcagcccauccaccccag

SEQ ID NO: 407518 - RNA, 32 nt, Homo Sapiens
gcagauguguggcaaugucuggcugugucucu

SEQ ID NO: 407519 - RNA, 32 nt, Homo Sapiens
cugcucucacccacccaggacuucucgcuccc

SEQ ID NO: 407520 - RNA, 32 nt, Homo Sapiens
gcccccgccucccagguucgagcacuuuucau

SEQ ID NO: 407521 - RNA, 32 nt, Homo Sapiens
cugaaagaugaaguucaagagaagggacaaac

SEQ ID NO: 407522 - RNA, 32 nt, Homo Sapiens
agguggagaagcauuucuuuuaacaaacugau

SEQ ID NO: 407523 - RNA, 32 nt, Homo Sapiens
uuauacucagaauggaaauaccugaucuuggc

SEQ ID NO: 407524 - RNA, 32 nt, Homo Sapiens
uucucuucagccccugcccacccacuggugga

SEQ ID NO: 407525 - RNA, 32 nt, Homo Sapiens
cucauggcucugcugggccuggcagccccugu

SEQ ID NO: 407526 - RNA, 32 nt, Homo Sapiens
cugggggcaaaauaauauaugugaaauugcuu

SEQ ID NO: 407527 - RNA, 32 nt, Homo Sapiens
gaaaaugagagaaaauaaagcagcugaggaua

SEQ ID NO: 407528 - RNA, 32 nt, Homo Sapiens
aguuuucaaaacaaaagcaucuucccuagaaa

SEQ ID NO: 407529 - RNA, 32 nt, Homo Sapiens
gggaggaggaggagcuagcagacacauccagu

SEQ ID NO: 407530 - RNA, 32 nt, Homo Sapiens
gaaggggcucaggcuggcagggggagguggca

SEQ ID NO: 407531 - RNA, 32 nt, Homo Sapiens
agcgggggacgccaggcgugggcuggcggcgg

SEQ ID NO: 407532 - RNA, 32 nt, Homo Sapiens
uaucucgcagggcaucuugcuagugugcacag

SEQ ID NO: 407533 - RNA, 32 nt, Homo Sapiens
aguuaccacagugcuccaugugauucauugac

SEQ ID NO: 407534 - RNA, 32 nt, Homo Sapiens
uccuaguagggauuucucuccucgguccugau

SEQ ID NO: 407535 - RNA, 30 nt, Homo Sapiens
aggacuaaugaaauaaaugcuagacugcug

SEQ ID NO: 407536 - RNA, 32 nt, Homo Sapiens
cugacugaaggguggggguggguugugaguca

SEQ ID NO: 407537 - RNA, 32 nt, Homo Sapiens
augugcuguuuuccuuguuuuucaucaaacau

SEQ ID NO: 407538 - RNA, 32 nt, Homo Sapiens
cgcgucggguggcacagaagauguuggcaauu

SEQ ID NO: 407539 - RNA, 32 nt, Homo Sapiens
cggggaggggaccgggaagcgcuggggcuugu

SEQ ID NO: 407540 - RNA, 32 nt, Homo Sapiens
ucaaauauaugauaaccuguauccuccauuau

SEQ ID NO: 407541 - RNA, 32 nt, Homo Sapiens
cagaggagggaauuacagcaaaaauugaacca

SEQ ID NO: 407542 - RNA, 32 nt, Homo Sapiens
ggugaagagggcggagagagggggcaggcucg

SEQ ID NO: 407543 - RNA, 32 nt, Homo Sapiens
guuguuuuuagauauaguccacugcauucuua

SEQ ID NO: 407544 - RNA, 32 nt, Homo Sapiens
guuggggccagaaauguccacguccugagcuu

SEQ ID NO: 407545 - RNA, 32 nt, Homo Sapiens
gcccuaaggagagugcggcgcuucccgaggcg

SEQ ID NO: 407546 - RNA, 32 nt, Homo Sapiens
auucaaggaaaacaccuccacuaccucacuga

SEQ ID NO: 407547 - RNA, 32 nt, Homo Sapiens
ggcaccgcgcugccggccgcagagccgggcca

SEQ ID NO: 407548 - RNA, 29 nt, Homo Sapiens
ugggauccguguuucaggcgggacuccag

SEQ ID NO: 407549 - RNA, 32 nt, Homo Sapiens
agaguccccagccccagaucacagauacggca

SEQ ID NO: 407550 - RNA, 29 nt, Homo Sapiens
ugccaugccccgccaccacgcgggaggag

SEQ ID NO: 407551 - RNA, 32 nt, Homo Sapiens
caauagcucuacugcccuccccuuccccuuua

SEQ ID NO: 407552 - RNA, 32 nt, Homo Sapiens
cacgcgcccuccccucugaccccggccugggc

SEQ ID NO: 407553 - RNA, 32 nt, Homo Sapiens
ccuuuuguuccagaauaucuuuccaaggaugu

SEQ ID NO: 407554 - RNA, 32 nt, Homo Sapiens
acagagggcagacauucucuuuggagcacacc

SEQ ID NO: 407555 - RNA, 32 nt, Homo Sapiens
uauuccucagaauuuuguuacguggguuuaug

SEQ ID NO: 407556 - RNA, 32 nt, Homo Sapiens
uuguucuauuuuggguaauauuauuagaaacu

SEQ ID NO: 407557 - RNA, 32 nt, Homo Sapiens
ccaacacuccccagccuugcuucugccuaacc

SEQ ID NO: 407558 - RNA, 32 nt, Homo Sapiens
cuccagccugaauaacacguggcacaaauggg

SEQ ID NO: 407559 - RNA, 28 nt, Homo Sapiens
guuuggaaagauucauaauucugagaga

SEQ ID NO: 407560 - RNA, 32 nt, Homo Sapiens
caauugucauaauaaacuuaugucauugaaaa

SEQ ID NO: 407561 - RNA, 32 nt, Homo Sapiens
aguucucuggggauggacgggacccagccuuc

SEQ ID NO: 407562 - RNA, 32 nt, Homo Sapiens
ucagauguuuaaugggacuuugaaaagauagg

SEQ ID NO: 407563 - RNA, 32 nt, Homo Sapiens
cucuuguacccaccaccccaucaagagcaaga

SEQ ID NO: 407564 - RNA, 32 nt, Homo Sapiens
aaugccuuaauuucacucuccucccuucucca

SEQ ID NO: 407565 - RNA, 32 nt, Homo Sapiens
aaguggucgcagugucugcgaccggggcugcc

SEQ ID NO: 407566 - RNA, 32 nt, Homo Sapiens
aauaaauauaauauuucucuaguuagguuuuc

SEQ ID NO: 407567 - RNA, 32 nt, Homo Sapiens
agccuuccaaaguguuccaacuucugcccauu

SEQ ID NO: 407568 - RNA, 32 nt, Homo Sapiens
gcccuuccugacgcucagccucggggccucuc

SEQ ID NO: 407569 - RNA, 32 nt, Homo Sapiens
aggggcgcacgcccggaagcggcgaggguagc

SEQ ID NO: 407570 - RNA, 32 nt, Homo Sapiens
ccgaaccucacuuuuccuggggccccucuccc

SEQ ID NO: 407571 - RNA, 32 nt, Homo Sapiens
cacaaaaauguuuuucagcaaaacuuuguuuc

SEQ ID NO: 407572 - RNA, 32 nt, Homo Sapiens
cucaggccaagccccuuggcaccauccuggcu

SEQ ID NO: 407573 - RNA, 32 nt, Homo Sapiens
uauguucuaaucuauauuaagcaauaaugcca

SEQ ID NO: 407574 - RNA, 32 nt, Homo Sapiens
uggugcgcacgcgccaaaggcacacgauaaag

SEQ ID NO: 407575 - RNA, 32 nt, Homo Sapiens
uuucagucacuguccuagcuacacuuaauuug

SEQ ID NO: 407576 - RNA, 32 nt, Homo Sapiens
uugcugaaaguaccagcauaacuguaugauuu

SEQ ID NO: 407577 - RNA, 32 nt, Homo Sapiens
acuguaggauucaagucugcagggcaggcacu

SEQ ID NO: 407578 - RNA, 32 nt, Homo Sapiens
ucugccaucaaggcccuuaaugcuacaggaca

SEQ ID NO: 407579 - RNA, 32 nt, Homo Sapiens
aaagaaggaaaugcagaauuuuauuaucaaag

SEQ ID NO: 407580 - RNA, 32 nt, Homo Sapiens
ugacagggaaagcuagcgagaguuggccaugg

SEQ ID NO: 407581 - RNA, 32 nt, Homo Sapiens
agguugaauacaagaacuauuuuugugacuag

SEQ ID NO: 407582 - RNA, 32 nt, Homo Sapiens
aggcgguggcggcggaggcggcaccgauugcu

SEQ ID NO: 407583 - RNA, 32 nt, Homo Sapiens
uaaauaaaaaaauaaauaguguuguaucuuua

SEQ ID NO: 407584 - RNA, 32 nt, Homo Sapiens
ccaggcccgcggcggccgaaauccgcgguuca

SEQ ID NO: 407585 - RNA, 32 nt, Homo Sapiens
uaugggcucccucucccaccugucugcauaga

SEQ ID NO: 407586 - RNA, 32 nt, Homo Sapiens
augucaugauuucuaacaauaaaugauguuuu

SEQ ID NO: 407587 - RNA, 32 nt, Homo Sapiens
uuggcgaaccggccccaccacccccuccuacc

SEQ ID NO: 407588 - RNA, 32 nt, Homo Sapiens
aaucuggacagagaauagcaagggcagcuuga

SEQ ID NO: 407589 - RNA, 32 nt, Homo Sapiens
cgagcggccaggcuuggcacccgccaaaugug

SEQ ID NO: 407590 - RNA, 32 nt, Homo Sapiens
agcuccaugaggguagggguguguacauugcu

SEQ ID NO: 407591 - RNA, 32 nt, Homo Sapiens
cuggacagcgccauccaccugugcaacaacgc

SEQ ID NO: 407592 - RNA, 32 nt, Homo Sapiens
cauuuagcuggcaacugccuuuauugcagacc

SEQ ID NO: 407593 - RNA, 29 nt, Homo Sapiens
uuaaggcuucaaaagcauggcaaagaugu

SEQ ID NO: 407594 - RNA, 30 nt, Homo Sapiens
ggcagggacgcgcagcaucggggcgggcgu

SEQ ID NO: 407595 - RNA, 32 nt, Homo Sapiens
aggagaguuaguaaaaagugaaucuuucacuu

SEQ ID NO: 407596 - RNA, 32 nt, Homo Sapiens
ugggggcuggagaggaaccgugcgcccccucc

SEQ ID NO: 407597 - RNA, 32 nt, Homo Sapiens
cugaaagaaaauaaaagcaucucuaguucugu

SEQ ID NO: 407598 - RNA, 32 nt, Homo Sapiens
gugcggcacggcacggugggagugucuccggc

SEQ ID NO: 407599 - RNA, 32 nt, Homo Sapiens
ccagggcccggcaccuccugcugcgagacccg

SEQ ID NO: 407600 - RNA, 32 nt, Homo Sapiens
aauuuagaugagaauucacuuguucugucagu

SEQ ID NO: 407601 - RNA, 32 nt, Homo Sapiens
ggagucaguggaagaauaguucucuagcuaag

SEQ ID NO: 407602 - RNA, 32 nt, Homo Sapiens
cauauuugauucagaucaguuuuuugacaaua

SEQ ID NO: 407603 - RNA, 32 nt, Homo Sapiens
acuuuguucaauaucagggaauuuauauugaa

SEQ ID NO: 407604 - RNA, 32 nt, Homo Sapiens
caacucagccaguuuaaaucucgcugcugugg

SEQ ID NO: 407605 - RNA, 32 nt, Homo Sapiens
uauucucagaacuuauggcauuuuacuaugug

SEQ ID NO: 407606 - RNA, 29 nt, Homo Sapiens
ggucauauaaaugagugaaacaggccucu

SEQ ID NO: 407607 - RNA, 32 nt, Homo Sapiens
ccuguggaccucagugacuccucccccagugg

SEQ ID NO: 407608 - RNA, 32 nt, Homo Sapiens
cgggaggggaagggcugcucagcucaaggugu

SEQ ID NO: 407609 - RNA, 32 nt, Homo Sapiens
uggcgcugggcccuuccccuccccacuuuccu

SEQ ID NO: 407610 - RNA, 32 nt, Homo Sapiens
ugcgcuucaggacguagcgccacggcuucagg

SEQ ID NO: 407611 - RNA, 32 nt, Homo Sapiens
ugaaugaacaaccucggcuccuggacucauug

SEQ ID NO: 407612 - RNA, 32 nt, Homo Sapiens
uguaugaguacccggcagaugcgcgucacaga

SEQ ID NO: 407613 - RNA, 32 nt, Homo Sapiens
ggagccaaggccagggagagccgucaagguca

SEQ ID NO: 407614 - RNA, 32 nt, Homo Sapiens
cgagcaagcugguuuucuuauuuuuguauccu

SEQ ID NO: 407615 - RNA, 32 nt, Homo Sapiens
uuacucagaauuuucaauuugcuauaaagaug

SEQ ID NO: 407616 - RNA, 32 nt, Homo Sapiens
ucucugcagugcccuccucgccugugcagccc

SEQ ID NO: 407617 - RNA, 32 nt, Homo Sapiens
aggucaguuguccuauguaucaucauuuacuc

SEQ ID NO: 407618 - RNA, 31 nt, Homo Sapiens
cugcagcagcgcagucucagaucacugcaac

SEQ ID NO: 407619 - RNA, 32 nt, Homo Sapiens
aucuuggcuaacacagugaaaccccgucucua

SEQ ID NO: 407620 - RNA, 32 nt, Homo Sapiens
aaagauacaaauauuuacauaguuuuaaucau

SEQ ID NO: 407621 - RNA, 32 nt, Homo Sapiens
caguuuacaaaauuauuuucugcaaaaaagaa

SEQ ID NO: 407622 - RNA, 32 nt, Homo Sapiens
uguuuauaauuuccuuucagcauuuacaguga

SEQ ID NO: 407623 - RNA, 32 nt, Homo Sapiens
agggcugaaacacuguggaggcagugguugug

SEQ ID NO: 407624 - RNA, 32 nt, Homo Sapiens
ugcgugcagggcccgcgccgccgccgguaucu

SEQ ID NO: 407625 - RNA, 32 nt, Homo Sapiens
guaauaauggacugggauauauuguauuucuc

SEQ ID NO: 407626 - RNA, 32 nt, Homo Sapiens
ggcgcuguuaucagcggggaaauguacuauuu

SEQ ID NO: 407627 - RNA, 32 nt, Homo Sapiens
gugggcugccagcugggccaccugucuuccac

SEQ ID NO: 407628 - RNA, 32 nt, Homo Sapiens
gaaccuccauuuaugcaggucugcagggguau

SEQ ID NO: 407629 - RNA, 32 nt, Homo Sapiens
aacauaaguacaaaaacuaugaaacagaugca

SEQ ID NO: 407630 - RNA, 32 nt, Homo Sapiens
aucuaauaaaugucaaccaacauugacauugu

SEQ ID NO: 407631 - RNA, 32 nt, Homo Sapiens
cucgguguaaacaaguccaggcgccugcgaac

SEQ ID NO: 407632 - RNA, 32 nt, Homo Sapiens
gagggccugggcggacgcgggaugcugggggu

SEQ ID NO: 407633 - RNA, 32 nt, Homo Sapiens
ucucuuaucccugaggguggguaagaaggacu

SEQ ID NO: 407634 - RNA, 32 nt, Homo Sapiens
uagccuucauggguauucuggauggucgacca

SEQ ID NO: 407635 - RNA, 32 nt, Homo Sapiens
cccacaggcaggcggcggcgcuccacaucugc

SEQ ID NO: 407636 - RNA, 32 nt, Homo Sapiens
uccagaucccuccuccuccccgcagcucuucu

SEQ ID NO: 407637 - RNA, 32 nt, Homo Sapiens
uaaaagcacacacacacacacacacacacaca

SEQ ID NO: 407638 - RNA, 32 nt, Homo Sapiens
aaagagggagcacacagcauuauucugaugga

SEQ ID NO: 407639 - RNA, 32 nt, Homo Sapiens
ccccaaugcaacaauacaaagaaauagggucu

SEQ ID NO: 407640 - RNA, 32 nt, Homo Sapiens
uugaggucaggaguucaagagcagccuggcca

SEQ ID NO: 407641 - RNA, 32 nt, Homo Sapiens
uuccuuagagagagauggauuuuuguuggcaa

SEQ ID NO: 407642 - RNA, 32 nt, Homo Sapiens
caaaacccacugagauccaugggcuuuggcuc

SEQ ID NO: 407643 - RNA, 32 nt, Homo Sapiens
uaaauaauugaguugcuaauuacuucuaaucu

SEQ ID NO: 407644 - RNA, 30 nt, Homo Sapiens
cgugcaacggcgagggcgccggcggggcau

SEQ ID NO: 407645 - RNA, 32 nt, Homo Sapiens
aggcccagccugggggagaauuuuggaaaagg

SEQ ID NO: 407646 - RNA, 30 nt, Homo Sapiens
cagacccuggacugcauccgguuccccaaa

SEQ ID NO: 407647 - RNA, 32 nt, Homo Sapiens
auccuaggagaaugauaauccuggacaugggu

SEQ ID NO: 407648 - RNA, 32 nt, Homo Sapiens
ccccacccgcguugcugccuguggugugcgug

SEQ ID NO: 407649 - RNA, 32 nt, Homo Sapiens
cuuuuuuuuucuuuuucuuuuuuuuuuugaga

SEQ ID NO: 407650 - RNA, 32 nt, Homo Sapiens
cuggaauacuuauaauugucuaguauuaugua

SEQ ID NO: 407651 - RNA, 32 nt, Homo Sapiens
aacaguaucucaccucccuaaacugguuaaua

SEQ ID NO: 407652 - RNA, 32 nt, Homo Sapiens
ucuuaaucaaggacauucccauggagcccaag

SEQ ID NO: 407653 - RNA, 32 nt, Homo Sapiens
cuaguaccucgcgagcuccgcgaggaucauuc

SEQ ID NO: 407654 - RNA, 32 nt, Homo Sapiens
acauaugacaauguugcauuuaugaugcaguu

SEQ ID NO: 407655 - RNA, 32 nt, Homo Sapiens
acagcaguggaaaggacgcucuggguccuguu

SEQ ID NO: 407656 - RNA, 32 nt, Homo Sapiens
cggagcgcgcaccgcaggccggcggccgagcu

SEQ ID NO: 407657 - RNA, 32 nt, Homo Sapiens
uccuugcccaggccccaccucuccucccuaag

SEQ ID NO: 407658 - RNA, 32 nt, Homo Sapiens
gaagaggcccugaaacuacguagagagggaga

SEQ ID NO: 407659 - RNA, 32 nt, Homo Sapiens
ugagcacgccuggccuccggggccacgcuucg

SEQ ID NO: 407660 - RNA, 32 nt, Homo Sapiens
gccugugucugggacagggggcugcccuugcu

SEQ ID NO: 407661 - RNA, 32 nt, Homo Sapiens
ccgccagggcugggaaaggaacucaaaacacu

SEQ ID NO: 407662 - RNA, 32 nt, Homo Sapiens
ggcauguucuauuucccaggaaugauugacac

SEQ ID NO: 407663 - RNA, 32 nt, Homo Sapiens
accagcccaacuuaaucucaccagugaaaaca

SEQ ID NO: 407664 - RNA, 32 nt, Homo Sapiens
gcugcguggcuacgacagcgggcccgagggcg

SEQ ID NO: 407665 - RNA, 32 nt, Homo Sapiens
cugcauugccuggcccccgagguuccaggguc

SEQ ID NO: 407666 - RNA, 32 nt, Homo Sapiens
aaggaacugaagauuuuaaaccuuaguaagaa

SEQ ID NO: 407667 - RNA, 32 nt, Homo Sapiens
aauugugccuaccucagauagacagugccaga

SEQ ID NO: 407668 - RNA, 32 nt, Homo Sapiens
auaugcacguuuuuaaacuuccaaguucugaa

SEQ ID NO: 407669 - RNA, 32 nt, Homo Sapiens
cuagaaacacacauuucuuugaauuuagguga

SEQ ID NO: 407670 - RNA, 32 nt, Homo Sapiens
uaaagucauuuauauuugauuuugaaauguau

SEQ ID NO: 407671 - RNA, 32 nt, Homo Sapiens
auacaggcaugcaaugcauaauaaucacauca

SEQ ID NO: 407672 - RNA, 32 nt, Homo Sapiens
ugguuucuuuuaaaaguucauguaauauuucu

SEQ ID NO: 407673 - RNA, 32 nt, Homo Sapiens
uaugguccgccuuuggcauuguguguacaucu

SEQ ID NO: 407674 - RNA, 32 nt, Homo Sapiens
uuucucugcagaagcucuaucuuugauugcug

SEQ ID NO: 407675 - RNA, 32 nt, Homo Sapiens
aucuuccuggcugcucagaaggaggcagauuu

SEQ ID NO: 407676 - RNA, 32 nt, Homo Sapiens
cugucggggaagcagacacauaaacagaugau

SEQ ID NO: 407677 - RNA, 32 nt, Homo Sapiens
ccaggcccugaacuuucucaagucgaccucac

SEQ ID NO: 407678 - RNA, 32 nt, Homo Sapiens
acuccagccucgaggaagcuuuuacacagucu

SEQ ID NO: 407679 - RNA, 32 nt, Homo Sapiens
ucuaaaccuuccuggaggaagggcacauauuu

SEQ ID NO: 407680 - RNA, 32 nt, Homo Sapiens
uguacauauuaagauaaaugucauguguaaga

SEQ ID NO: 407681 - RNA, 32 nt, Homo Sapiens
uugccaggguggaggaggagcauuguccaggc

SEQ ID NO: 407682 - RNA, 32 nt, Homo Sapiens
cccugcgccccggccggggccccacacacaau

SEQ ID NO: 407683 - RNA, 32 nt, Homo Sapiens
cucccguguuuuguaggagacuugccagagcc

SEQ ID NO: 407684 - RNA, 32 nt, Homo Sapiens
ugaggucaacaaugaauggaugguguucacaa

SEQ ID NO: 407685 - RNA, 32 nt, Homo Sapiens
cuggcuggcuguguccucuccagcuuucccuc

SEQ ID NO: 407686 - RNA, 32 nt, Homo Sapiens
ccucacuucgcgcacgcgccgcuaggcugggg

SEQ ID NO: 407687 - RNA, 31 nt, Homo Sapiens
ggugcacaagagggaggugauuugcaucaug

SEQ ID NO: 407688 - RNA, 32 nt, Homo Sapiens
guuugcuugauauuugugaacauuuacugcau

SEQ ID NO: 407689 - RNA, 32 nt, Homo Sapiens
acacgagagcucaacacugccuccgaccaguc

SEQ ID NO: 407690 - RNA, 23 nt, Homo Sapiens
gagucagaaaccggccaaggagg

SEQ ID NO: 407691 - RNA, 32 nt, Homo Sapiens
accucaugaaauuuauucacuaucaugaaaac

SEQ ID NO: 407692 - RNA, 32 nt, Homo Sapiens
uuuuaauaaauagaaacacugauaaggaagaa

SEQ ID NO: 407693 - RNA, 32 nt, Homo Sapiens
cgccgcccgcggcccucucgcucucgcagcaa

SEQ ID NO: 407694 - RNA, 32 nt, Homo Sapiens
uuggaaugaguacacauccaggagugaagaag

SEQ ID NO: 407695 - RNA, 29 nt, Homo Sapiens
aggaggagggcgaggacgaggcguaaugc

SEQ ID NO: 407696 - RNA, 32 nt, Homo Sapiens
uuuucuuuugaauguuuuguauguaaaauagc

SEQ ID NO: 407697 - RNA, 32 nt, Homo Sapiens
uccugcugcaacaucuucuccuccaggaaggc

SEQ ID NO: 407698 - RNA, 32 nt, Homo Sapiens
aagcaaagggaagacuucagaaagaggacaaa

SEQ ID NO: 407699 - RNA, 32 nt, Homo Sapiens
cguggccugagcccaggaauguucuaucuggg

SEQ ID NO: 407700 - RNA, 32 nt, Homo Sapiens
acuuccauuuuuuugcagauugucugcagaaa

SEQ ID NO: 407701 - RNA, 30 nt, Homo Sapiens
agugugggagguggaugcgggagggugcac

SEQ ID NO: 407702 - RNA, 29 nt, Homo Sapiens
auaugcauauguauaucaugaagugggau

SEQ ID NO: 407703 - RNA, 32 nt, Homo Sapiens
aaauuauauaacuuaggauacuucugacuggu

SEQ ID NO: 407704 - RNA, 32 nt, Homo Sapiens
gacuugugcucaaggaaucggcuggggacugc

SEQ ID NO: 407705 - RNA, 32 nt, Homo Sapiens
cagccuucguccuccuggcccgcuccucucau

SEQ ID NO: 407706 - RNA, 32 nt, Homo Sapiens
gguauuugaaagauagaagcauuauuuauaac

SEQ ID NO: 407707 - RNA, 32 nt, Homo Sapiens
cgugcagugcaccgggcacgccgcgccaggcu

SEQ ID NO: 407708 - RNA, 32 nt, Homo Sapiens
ccuguaauauccacauugugaagcuguguaug

SEQ ID NO: 407709 - RNA, 32 nt, Homo Sapiens
ucagcacaacaaggaacaaaacaaagcuuuga

SEQ ID NO: 407710 - RNA, 32 nt, Homo Sapiens
aaaauuuuggaaagugugaaucaauaacuauu

SEQ ID NO: 407711 - RNA, 32 nt, Homo Sapiens
aauugccguccauuuuaaaaauuuagguuugu

SEQ ID NO: 407712 - RNA, 32 nt, Homo Sapiens
gccucgccagaccucgcugggaccccggggcc

SEQ ID NO: 407713 - RNA, 32 nt, Homo Sapiens
ucaaaaaauuaauauguguacaauuaaaauga

SEQ ID NO: 407714 - RNA, 32 nt, Homo Sapiens
ccuccccgcgcggucccggccccuggcuccca

SEQ ID NO: 407715 - RNA, 32 nt, Homo Sapiens
cgucugacuugagucccugcugcugcagugca

SEQ ID NO: 407716 - RNA, 32 nt, Homo Sapiens
ggaugcagcaagcagcagcaggggcugacagc

SEQ ID NO: 407717 - RNA, 32 nt, Homo Sapiens
ucugaccuuuuacggcgacaaacaagugaacu

SEQ ID NO: 407718 - RNA, 32 nt, Homo Sapiens
caaggcaagagaugauaagcuguuuaaauagu

SEQ ID NO: 407719 - RNA, 32 nt, Homo Sapiens
guugcaagaugaauggcuaauauuuuggugca

SEQ ID NO: 407720 - RNA, 32 nt, Homo Sapiens
ggguggaagaagauggcgucgggugguggugg

SEQ ID NO: 407721 - RNA, 32 nt, Homo Sapiens
uagccccgggacuuggggccaauacggaaacc

SEQ ID NO: 407722 - RNA, 30 nt, Homo Sapiens
ccaggccaugcuccuugaacuuggaaaugu

SEQ ID NO: 407723 - RNA, 32 nt, Homo Sapiens
uuuggaacucuuuuuuuuuuuaaauuauagua

SEQ ID NO: 407724 - RNA, 32 nt, Homo Sapiens
gcagugagccaaggucgugcugcugcacccca

SEQ ID NO: 407725 - RNA, 32 nt, Homo Sapiens
aguagacuaugacuuuugauaauuagcagaau

SEQ ID NO: 407726 - RNA, 32 nt, Homo Sapiens
gaguuucgucgaggcccggcaggcuugggcca

SEQ ID NO: 407727 - RNA, 32 nt, Homo Sapiens
guuaggugagggucuaacuuuauucuuuuuca

SEQ ID NO: 407728 - RNA, 32 nt, Homo Sapiens
caaaugauaauagcuagugacaauguguuucc

SEQ ID NO: 407729 - RNA, 32 nt, Homo Sapiens
cccaguccgcggugccccggcgggugaugcca

SEQ ID NO: 407730 - RNA, 32 nt, Homo Sapiens
agugacucagaauaaaaagaagcugaggaagc

SEQ ID NO: 407731 - RNA, 32 nt, Homo Sapiens
uuguaucuuuccuuuuaauuuaaacuuuaaug

SEQ ID NO: 407732 - RNA, 32 nt, Homo Sapiens
ccucuguccccuuggcucuucagacagggcca

SEQ ID NO: 407733 - RNA, 32 nt, Homo Sapiens
gugucgcggggacggaaggaggcgacgcaggc

SEQ ID NO: 407734 - RNA, 32 nt, Homo Sapiens
gucauuucacauuccauuuggaugccucuuga

SEQ ID NO: 407735 - RNA, 32 nt, Homo Sapiens
cccgguucuccaugaucccgcuggccggggcc

SEQ ID NO: 407736 - RNA, 32 nt, Homo Sapiens
aaccagagccggcggcauggacuucgucauga

SEQ ID NO: 407737 - RNA, 32 nt, Homo Sapiens
gucagggcccgcggccggguccagcuuggugg

SEQ ID NO: 407738 - RNA, 32 nt, Homo Sapiens
gcaugacgaaguuuuauuucucaugcuacaug

SEQ ID NO: 407739 - RNA, 32 nt, Homo Sapiens
ccaauaccaaaauagaaaauauuuuaggaaua

SEQ ID NO: 407740 - RNA, 32 nt, Homo Sapiens
ccccuggguugcaccuggagcuucgggggcca

SEQ ID NO: 407741 - RNA, 32 nt, Homo Sapiens
cagauuccuaaagauuagagaucauuucucau

SEQ ID NO: 407742 - RNA, 32 nt, Homo Sapiens
cgggaauaugcacugcccuuuggcuggugcag

SEQ ID NO: 407743 - RNA, 32 nt, Homo Sapiens
ccauacaccacacaggcauuuguaagcacagu

SEQ ID NO: 407744 - RNA, 32 nt, Homo Sapiens
ucugucauuugaacauuauauuugagugugau

SEQ ID NO: 407745 - RNA, 32 nt, Homo Sapiens
uggacaugagagccccuuggugccacagaggg

SEQ ID NO: 407746 - RNA, 32 nt, Homo Sapiens
ggccacuggaagcucagccuccggguggcaug

SEQ ID NO: 407747 - RNA, 32 nt, Homo Sapiens
aacucgucauuuccuccagcuagaggagcuca

SEQ ID NO: 407748 - RNA, 32 nt, Homo Sapiens
ggcccggcacgguggcucacgccuguaauccc

SEQ ID NO: 407749 - RNA, 32 nt, Homo Sapiens
gccugugccaccugcaagugcccgcccugccc

SEQ ID NO: 407750 - RNA, 32 nt, Homo Sapiens
gggggaaggagagaggcguggguaagggacau

SEQ ID NO: 407751 - RNA, 32 nt, Homo Sapiens
ggcggcagggcuggcacagacagacggaagca

SEQ ID NO: 407752 - RNA, 32 nt, Homo Sapiens
caacuggcaaauuggaauauagacagucaauc

SEQ ID NO: 407753 - RNA, 32 nt, Homo Sapiens
gggaucaggggugcuuacauuuaacauugauc

SEQ ID NO: 407754 - RNA, 32 nt, Homo Sapiens
guaaagugcaaucuucguuguuuuuguauuua

SEQ ID NO: 407755 - RNA, 32 nt, Homo Sapiens
caaacaaaucauacaagaaaguuuuaugauuu

SEQ ID NO: 407756 - RNA, 32 nt, Homo Sapiens
accacaccaaaaugagucuacgugaugcuagu

SEQ ID NO: 407757 - RNA, 32 nt, Homo Sapiens
uaguugaauggaugaaacuuuuuuaaaguuuc

SEQ ID NO: 407758 - RNA, 32 nt, Homo Sapiens
cggcaaugccuggcccacuccugagagcucua

SEQ ID NO: 407759 - RNA, 32 nt, Homo Sapiens
agugcacggggagaggcccaggcagcggcggc

SEQ ID NO: 407760 - RNA, 32 nt, Homo Sapiens
cuugucuauuuucucuuucuuuaaaugccuuu

SEQ ID NO: 407761 - RNA, 32 nt, Homo Sapiens
ccccaagaguuccugcugcugcugggggcugg

SEQ ID NO: 407762 - RNA, 32 nt, Homo Sapiens
ccacagaagaugccaugugcuccacgaugucg

SEQ ID NO: 407763 - RNA, 32 nt, Homo Sapiens
uuuggcccuaaaauuuauaugaaaugaaaagg

SEQ ID NO: 407764 - RNA, 32 nt, Homo Sapiens
ugagguccaucgggcuggccccagcccaucug

SEQ ID NO: 407765 - RNA, 32 nt, Homo Sapiens
cuacacacaauuuugacauguuuuccaagcuc

SEQ ID NO: 407766 - RNA, 32 nt, Homo Sapiens
gauacauaaaacuagauaacuuugaaaaaagc

SEQ ID NO: 407767 - RNA, 32 nt, Homo Sapiens
ccgagggaaaacugaggcugccaucaaaaacu

SEQ ID NO: 407768 - RNA, 32 nt, Homo Sapiens
ugcaggugagaaaaaacaugacgaugggcccu

SEQ ID NO: 407769 - RNA, 32 nt, Homo Sapiens
ucuguuuuagucuuugcaggagacaguuuucu

SEQ ID NO: 407770 - RNA, 32 nt, Homo Sapiens
ugaauauucuauuugcuugcaguaucuguuuc

SEQ ID NO: 407771 - RNA, 32 nt, Homo Sapiens
cagcucuuuccucucaggauccugcucuuucc

SEQ ID NO: 407772 - RNA, 32 nt, Homo Sapiens
gagagcacccaauuuacccagacccagcgaga

SEQ ID NO: 407773 - RNA, 32 nt, Homo Sapiens
acagcuguccccccguccuccuccccagccca

SEQ ID NO: 407774 - RNA, 32 nt, Homo Sapiens
aacauugcagauuucccuucuaccugcaguac

SEQ ID NO: 407775 - RNA, 32 nt, Homo Sapiens
acuuggguucagguggcuuucagaccacucau

SEQ ID NO: 407776 - RNA, 32 nt, Homo Sapiens
cggugggacagagggaaccuacaaccaaaaac

SEQ ID NO: 407777 - RNA, 32 nt, Homo Sapiens
cggcgccaccuccggccccgggcccgucaagu

SEQ ID NO: 407778 - RNA, 32 nt, Homo Sapiens
cuguucugcagacacgccuuccccucagccac

SEQ ID NO: 407779 - RNA, 32 nt, Homo Sapiens
gcccgccugccaccucucccagcccucagcau

SEQ ID NO: 407780 - RNA, 32 nt, Homo Sapiens
aagcuuaaaaacauuggguacugaaagaagag

SEQ ID NO: 407781 - RNA, 32 nt, Homo Sapiens
gggcaggggugauuccaacuucugccugugga

SEQ ID NO: 407782 - RNA, 32 nt, Homo Sapiens
cgcccucucgccacccugcccucccgucagaa

SEQ ID NO: 407783 - RNA, 32 nt, Homo Sapiens
cgacccccuuccccggccccucggccuuuccc

SEQ ID NO: 407784 - RNA, 32 nt, Homo Sapiens
gccuucucuaaagugcuguuggagcauggagg

SEQ ID NO: 407785 - RNA, 32 nt, Homo Sapiens
acagaggaucgacgaggcccuaggaaugggug

SEQ ID NO: 407786 - RNA, 32 nt, Homo Sapiens
gguaaagcagugccuccucacuuaagugaaca

SEQ ID NO: 407787 - RNA, 32 nt, Homo Sapiens
caccuuggcagccaggccccuccggaggggcc

SEQ ID NO: 407788 - RNA, 32 nt, Homo Sapiens
augaagaggaagaugaugauguaguggcuccu

SEQ ID NO: 407789 - RNA, 32 nt, Homo Sapiens
uguccccgccgggaagcagccccggcuccuga

SEQ ID NO: 407790 - RNA, 32 nt, Homo Sapiens
aaaguuuguaaguacuguggagucagcuaucu

SEQ ID NO: 407791 - RNA, 32 nt, Homo Sapiens
aaaacacuuccacgcccguuauuccauuuaga

SEQ ID NO: 407792 - RNA, 32 nt, Homo Sapiens
accgccucggaaccgggcugcauccgagcugc

SEQ ID NO: 407793 - RNA, 32 nt, Homo Sapiens
cggguccgagggcgcuggaaacccagcggcgg

SEQ ID NO: 407794 - RNA, 32 nt, Homo Sapiens
ucauucauauccucaaacacggugcucugagc

SEQ ID NO: 407795 - RNA, 32 nt, Homo Sapiens
caaaaugguacacuuuuugaaguauaaucuua

SEQ ID NO: 407796 - RNA, 32 nt, Homo Sapiens
gcaaugcgagcuuccucuccugucccauguug

SEQ ID NO: 407797 - RNA, 32 nt, Homo Sapiens
aacgcgcccugggccgagccgccgggcccucc

SEQ ID NO: 407798 - RNA, 32 nt, Homo Sapiens
gcagugcccagccacuaaccugcacaagaucg

SEQ ID NO: 407799 - RNA, 32 nt, Homo Sapiens
cucuuugcauggauuucuuugaaaaaaaauaa

SEQ ID NO: 407800 - RNA, 32 nt, Homo Sapiens
gcagauaaaacaacuauaaacaauauuaggca

SEQ ID NO: 407801 - RNA, 32 nt, Homo Sapiens
cacacgccugccagaagcuggaggggugcugg

SEQ ID NO: 407802 - RNA, 32 nt, Homo Sapiens
auuaaacuuuacuuuuucagacugccccuccc

SEQ ID NO: 407803 - RNA, 32 nt, Homo Sapiens
ccauuucaggggucgucaccaccucuccuuug

SEQ ID NO: 407804 - RNA, 32 nt, Homo Sapiens
cgcgugggcucgccgccggggcgcucccguga

SEQ ID NO: 407805 - RNA, 32 nt, Homo Sapiens
auugaacucuauuuaaugcauuuuuaaaccaa

SEQ ID NO: 407806 - RNA, 32 nt, Homo Sapiens
cacgugacuuuuccagcuccauuuuugaacag

SEQ ID NO: 407807 - RNA, 32 nt, Homo Sapiens
auguaucuuaaaacgugugcccuuuuauauua

SEQ ID NO: 407808 - RNA, 32 nt, Homo Sapiens
aggaggaggcauugccagcucuccaggcuguu

SEQ ID NO: 407809 - RNA, 32 nt, Homo Sapiens
cuucuuaacaagauuucuuaguccucaguauu

SEQ ID NO: 407810 - RNA, 32 nt, Homo Sapiens
auuguaaauaaauuguuuagcuguguuucuuu

SEQ ID NO: 407811 - RNA, 32 nt, Homo Sapiens
ucuucuguucccucuucuuccauccaugugcc

SEQ ID NO: 407812 - RNA, 32 nt, Homo Sapiens
cuggguaccuggagauucugaagugccuuugc

SEQ ID NO: 407813 - RNA, 32 nt, Homo Sapiens
uuaagcccagcaugcauuagcucuuuuuccug

SEQ ID NO: 407814 - RNA, 31 nt, Homo Sapiens
ggcagugcaaggugucugaggcccauucuca

SEQ ID NO: 407815 - RNA, 32 nt, Homo Sapiens
uaacuaauauauuauuucuuuaagguuacuca

SEQ ID NO: 407816 - RNA, 32 nt, Homo Sapiens
uccaccuuuucccccuaaucucuaccaaucag

SEQ ID NO: 407817 - RNA, 32 nt, Homo Sapiens
ccgcgucuccugcccucuguccuuccaaccca

SEQ ID NO: 407818 - RNA, 32 nt, Homo Sapiens
cccgcacucccccagcagcugaugaacaugcu

SEQ ID NO: 407819 - RNA, 32 nt, Homo Sapiens
uacuacuuguaugcagaagagaauuaguugau

SEQ ID NO: 407820 - RNA, 32 nt, Homo Sapiens
aucgcagcugucugaacucuugaucaucugcc

SEQ ID NO: 407821 - RNA, 32 nt, Homo Sapiens
aacugaugcauugauuugauaaaguauuuuac

SEQ ID NO: 407822 - RNA, 32 nt, Homo Sapiens
uuucaaaaaauauuuuuaugugcagcuucuga

SEQ ID NO: 407823 - RNA, 31 nt, Homo Sapiens
gcuuuccaauaauaaacucagggggacaugc

SEQ ID NO: 407824 - RNA, 32 nt, Homo Sapiens
aagaguuguaaauuugcuucuggccuuccccu

SEQ ID NO: 407825 - RNA, 32 nt, Homo Sapiens
uccaaggggggaauaguauccuugacuuuggc

SEQ ID NO: 407826 - RNA, 32 nt, Homo Sapiens
ccgccugcccacucccgccgccgccccgcucu

SEQ ID NO: 407827 - RNA, 32 nt, Homo Sapiens
aaaugcguucucuaaguuccuaccuccuugac

SEQ ID NO: 407828 - RNA, 32 nt, Homo Sapiens
ccauggccucaauaaacucucugcuuggugug

SEQ ID NO: 407829 - RNA, 32 nt, Homo Sapiens
ugcagccuggggucugacguggccccuagugc

SEQ ID NO: 407830 - RNA, 32 nt, Homo Sapiens
uugauagugauguauuuuauuauuuucuuuuu

SEQ ID NO: 407831 - RNA, 32 nt, Homo Sapiens
uccucgcccccggccugccuaccugaaaacca

SEQ ID NO: 407832 - RNA, 30 nt, Homo Sapiens
caguucaucccaaugggggaaguauucccu

SEQ ID NO: 407833 - RNA, 32 nt, Homo Sapiens
gcugggcccuuuagcuccuuggcacuuccaag

SEQ ID NO: 407834 - RNA, 32 nt, Homo Sapiens
uggucucauuugggggcguucgggagguuugg

SEQ ID NO: 407835 - RNA, 32 nt, Homo Sapiens
gccccagccccagccuggcccgcugcaaugcc

SEQ ID NO: 407836 - RNA, 32 nt, Homo Sapiens
gccagcugcuugggaggcugaggugggaggau

SEQ ID NO: 407837 - RNA, 32 nt, Homo Sapiens
cccaacugguaucaaagguugguuacaaaucu

SEQ ID NO: 407838 - RNA, 32 nt, Homo Sapiens
acaaacuaaauuauugcuuaugcuuguacuaa

SEQ ID NO: 407839 - RNA, 32 nt, Homo Sapiens
ucaauuuauuauaaguuucuacugcaaagcuc

SEQ ID NO: 407840 - RNA, 32 nt, Homo Sapiens
uauuguccugaagagaggugaugacuuaaaaa

SEQ ID NO: 407841 - RNA, 32 nt, Homo Sapiens
ggauggucucgaacucuugaccucagguaguc

SEQ ID NO: 407842 - RNA, 30 nt, Homo Sapiens
uccgugcgucagguuggggaaaccaccguc

SEQ ID NO: 407843 - RNA, 32 nt, Homo Sapiens
ccagcacuuugggaggccuaggcgggcgguca

SEQ ID NO: 407844 - RNA, 32 nt, Homo Sapiens
cuuggcaggagucgccugaggagcuaagaucc

SEQ ID NO: 407845 - RNA, 32 nt, Homo Sapiens
agugagcugcccgugugcccuggcccuggcug

SEQ ID NO: 407846 - RNA, 32 nt, Homo Sapiens
agagauucacaaaaacaaagaaucacaaugua

SEQ ID NO: 407847 - RNA, 32 nt, Homo Sapiens
cgucggggcccuuggggcucaagcccccuucc

SEQ ID NO: 407848 - RNA, 32 nt, Homo Sapiens
ggagcgcgggugcagcaguugugucccgaccc

SEQ ID NO: 407849 - RNA, 32 nt, Homo Sapiens
aacauuuuucgugcaagaaugaugccuuguaa

SEQ ID NO: 407850 - RNA, 32 nt, Homo Sapiens
gauccuaaaauaauaguuuaugcugggccauu

SEQ ID NO: 407851 - RNA, 32 nt, Homo Sapiens
caagacaauuuaauuuauuuacaugcugucug

SEQ ID NO: 407852 - RNA, 32 nt, Homo Sapiens
gugugccgacagaaggaaccagcguguauaug

SEQ ID NO: 407853 - RNA, 32 nt, Homo Sapiens
ccgagccgcccgggcccccagcccguagcugc

SEQ ID NO: 407854 - RNA, 32 nt, Homo Sapiens
ccuuagcucccucccgcaccccgauguggacc

SEQ ID NO: 407855 - RNA, 32 nt, Homo Sapiens
cauugaaauguuaaaauggcuuacacuugcag

SEQ ID NO: 407856 - RNA, 32 nt, Homo Sapiens
uuuuaguagagacacaguuuugccauguuggc

SEQ ID NO: 407857 - RNA, 32 nt, Homo Sapiens
uaccuggauucugguuucuccuccauuauuac

SEQ ID NO: 407858 - RNA, 30 nt, Homo Sapiens
agguacugggcgcgcgcggcuccggcucgg

SEQ ID NO: 407859 - RNA, 32 nt, Homo Sapiens
gaaaagagagagaucuggggcugggguaugga

SEQ ID NO: 407860 - RNA, 32 nt, Homo Sapiens
gaagagacacgcugcauggcucggaacgcauc

SEQ ID NO: 407861 - RNA, 32 nt, Homo Sapiens
cugucaggaaauguaacuuugguuuuauuuuu

SEQ ID NO: 407862 - RNA, 32 nt, Homo Sapiens
acacugcugugaagaucugaauguuugacccu

SEQ ID NO: 407863 - RNA, 32 nt, Homo Sapiens
uagaagacaaugagaagucauaccauaacaau

SEQ ID NO: 407864 - RNA, 32 nt, Homo Sapiens
gugccugucacuccuauuguccuuccaaacuc

SEQ ID NO: 407865 - RNA, 32 nt, Homo Sapiens
agugccugggggugggggcggaggguucgccu

SEQ ID NO: 407866 - RNA, 32 nt, Homo Sapiens
gcagcccuugaugugccaaggcuggagcguga

SEQ ID NO: 407867 - RNA, 32 nt, Homo Sapiens
uuaaaauaauuucuuuuucuuuuguuuaugca

SEQ ID NO: 407868 - RNA, 32 nt, Homo Sapiens
gccugccccacuccugcccacccagugggcac

SEQ ID NO: 407869 - RNA, 32 nt, Homo Sapiens
ccuuuuaauuguuuuucuuuggucuuuaguca

SEQ ID NO: 407870 - RNA, 32 nt, Homo Sapiens
acgugggccuuuugcucaguuccauggcaauu

SEQ ID NO: 407871 - RNA, 32 nt, Homo Sapiens
aagaguggaaauauaccugaguucguguccua

SEQ ID NO: 407872 - RNA, 32 nt, Homo Sapiens
augucauucauccauccauuuauucaucaucc

SEQ ID NO: 407873 - RNA, 27 nt, Homo Sapiens
caauguccuuggucagcuuccuggcaa

SEQ ID NO: 407874 - RNA, 32 nt, Homo Sapiens
ccugucuccugucgccgccgccgccgccacca

SEQ ID NO: 407875 - RNA, 32 nt, Homo Sapiens
uggagaagauucacgaaaaggucuaaugaauu

SEQ ID NO: 407876 - RNA, 32 nt, Homo Sapiens
ucuuauguguuuucuuuuuaauuuuuugauug

SEQ ID NO: 407877 - RNA, 32 nt, Homo Sapiens
uuccuggggugcccggugguguguagagaaaa

SEQ ID NO: 407878 - RNA, 32 nt, Homo Sapiens
cagcucucgcgugcaggucggcugggugggug

SEQ ID NO: 407879 - RNA, 32 nt, Homo Sapiens
gaagccagacugccucccugaaacccaucagc

SEQ ID NO: 407880 - RNA, 32 nt, Homo Sapiens
aagaguacacauggaggguaaauauuaaagug

SEQ ID NO: 407881 - RNA, 32 nt, Homo Sapiens
gagcuucuauuaugaggaauugucuaugcuac

SEQ ID NO: 407882 - RNA, 32 nt, Homo Sapiens
ggcgcgccugagggugcuggcugcuggcaucu

SEQ ID NO: 407883 - RNA, 32 nt, Homo Sapiens
aguaacaaaugcaugaaaaauuaaugcuucac

SEQ ID NO: 407884 - RNA, 32 nt, Homo Sapiens
ccgagccccagcccggccgccauggacgacaa

SEQ ID NO: 407885 - RNA, 32 nt, Homo Sapiens
augacaaaaagcauaaguaaaaauauuugaga

SEQ ID NO: 407886 - RNA, 32 nt, Homo Sapiens
gccugagaaccgaauuauuccacuaguauuau

SEQ ID NO: 407887 - RNA, 32 nt, Homo Sapiens
gccagccucuugggggcaguuccggccucucc

SEQ ID NO: 407888 - RNA, 32 nt, Homo Sapiens
gaguaacguuuuccuugugacuaaguugcaag

SEQ ID NO: 407889 - RNA, 32 nt, Homo Sapiens
ugguagcagcagcggggguggcugggaaguga

SEQ ID NO: 407890 - RNA, 32 nt, Homo Sapiens
guuagaagaaccugacauccacuguuugccuu

SEQ ID NO: 407891 - RNA, 32 nt, Homo Sapiens
uuuauuuccggucuaugggacccggcugcgau

SEQ ID NO: 407892 - RNA, 32 nt, Homo Sapiens
uaacuugaucagauauaggacaugacacugaa

SEQ ID NO: 407893 - RNA, 32 nt, Homo Sapiens
gggaaaguccugagacacgaucacagccacug

SEQ ID NO: 407894 - RNA, 32 nt, Homo Sapiens
ugguaagugucugcacaucugccugucccugu

SEQ ID NO: 407895 - RNA, 32 nt, Homo Sapiens
ugcuucaccauuuuuuuuucucucucuuuuca

SEQ ID NO: 407896 - RNA, 32 nt, Homo Sapiens
cauggaggccccagcugagucccuuuccauga

SEQ ID NO: 407897 - RNA, 32 nt, Homo Sapiens
gcucgaguccaccagcagcgccguccgcuuga

SEQ ID NO: 407898 - RNA, 32 nt, Homo Sapiens
ggcggcggcaacggcgguggugacggcggcga

SEQ ID NO: 407899 - RNA, 32 nt, Homo Sapiens
aucuuuuaugguuuuuccugcuucugagcguc

SEQ ID NO: 407900 - RNA, 32 nt, Homo Sapiens
agccccuccucuccccgccuucugggaggagg

SEQ ID NO: 407901 - RNA, 32 nt, Homo Sapiens
cguucagcugucuguacgucugucugcuggcc

SEQ ID NO: 407902 - RNA, 32 nt, Homo Sapiens
uagagggaaaggaaagaaguuguaguugacac

SEQ ID NO: 407903 - RNA, 32 nt, Homo Sapiens
acuuacacuuuaugcacaaaauguaggguuau

SEQ ID NO: 407904 - RNA, 32 nt, Homo Sapiens
ggacccaccagcugcacgggcugcugcugcgc

SEQ ID NO: 407905 - RNA, 32 nt, Homo Sapiens
agcauaaacauaaaacaaauuuuuuacuuaac

SEQ ID NO: 407906 - RNA, 32 nt, Homo Sapiens
uaauugccaauauaaguaaauauagauuauau

SEQ ID NO: 407907 - RNA, 32 nt, Homo Sapiens
ucuugaucucucucuucucgcgcgcgcacucu

SEQ ID NO: 407908 - RNA, 32 nt, Homo Sapiens
auccuguccccucuccuuucuccuggcagcag

SEQ ID NO: 407909 - RNA, 32 nt, Homo Sapiens
ggcggggcccucgccacccgcgucggggugau

SEQ ID NO: 407910 - RNA, 32 nt, Homo Sapiens
cauauaaguauuuuauuccugcuuucguguua

SEQ ID NO: 407911 - RNA, 32 nt, Homo Sapiens
aaaggagcugaaaugauauugcagcuuuuucu

SEQ ID NO: 407912 - RNA, 32 nt, Homo Sapiens
uuaaauccugaagagcauuugggguaauacuu

SEQ ID NO: 407913 - RNA, 32 nt, Homo Sapiens
gccguccagauccccaggauaagagaccacuu

SEQ ID NO: 407914 - RNA, 32 nt, Homo Sapiens
gugaggaaaaagauggcacaaugcuaauaaau

SEQ ID NO: 407915 - RNA, 32 nt, Homo Sapiens
uugcggcgcgcucgcgcccgcgggccaugccc

SEQ ID NO: 407916 - RNA, 32 nt, Homo Sapiens
cuggcccaagcacugcagcugccugcaccccc

SEQ ID NO: 407917 - RNA, 32 nt, Homo Sapiens
acuugcuuucccuguuuucuggcacauucuac

SEQ ID NO: 407918 - RNA, 32 nt, Homo Sapiens
acccccuccgagucccgcgcugucuucaaagg

SEQ ID NO: 407919 - RNA, 32 nt, Homo Sapiens
ccuugccuugugaccccuggaacuggcuuucu

SEQ ID NO: 407920 - RNA, 32 nt, Homo Sapiens
aaaaaaaguuccaaguuuuucuuucuucccuc

SEQ ID NO: 407921 - RNA, 32 nt, Homo Sapiens
uccucccccgcccgccgccgccgcugugauug

SEQ ID NO: 407922 - RNA, 32 nt, Homo Sapiens
ggaucucaggugcccaggaucguuaggacuga

SEQ ID NO: 407923 - RNA, 32 nt, Homo Sapiens
aggggucgcgggagcgggagggaggcgcugcc

SEQ ID NO: 407924 - RNA, 32 nt, Homo Sapiens
ccgcugcgguggaugugaauccauugaaacua

SEQ ID NO: 407925 - RNA, 32 nt, Homo Sapiens
uccugggcugaauuauguagacuuguguuuga

SEQ ID NO: 407926 - RNA, 32 nt, Homo Sapiens
cagagaaccagcucugaguccugaggagacac

SEQ ID NO: 407927 - RNA, 32 nt, Homo Sapiens
cgagaggggaaggcuaaagcggagcgagccca

SEQ ID NO: 407928 - RNA, 32 nt, Homo Sapiens
agacucuacuuugaaaauggaacuuguuugau

SEQ ID NO: 407929 - RNA, 32 nt, Homo Sapiens
agagcggagccagcgucggacacgcgcaacca

SEQ ID NO: 407930 - RNA, 32 nt, Homo Sapiens
ugaccaaauuucuguauuacgauuuuauguua

SEQ ID NO: 407931 - RNA, 32 nt, Homo Sapiens
auucaggaagcagcagauaaaagcauccaguc

SEQ ID NO: 407932 - RNA, 32 nt, Homo Sapiens
ucauaguguuauuuuucuacucucuucaugaa

SEQ ID NO: 407933 - RNA, 32 nt, Homo Sapiens
auggaccagagucacuucuccuccuccuuucu

SEQ ID NO: 407934 - RNA, 32 nt, Homo Sapiens
uuucaugcuucuuuucuuuuuauccccaaagu

SEQ ID NO: 407935 - RNA, 32 nt, Homo Sapiens
gggcaccucccucucuuucaggggcugccugg

SEQ ID NO: 407936 - RNA, 32 nt, Homo Sapiens
aaucuaggaaaauuauucuauaauuuccauuu

SEQ ID NO: 407937 - RNA, 32 nt, Homo Sapiens
guuaguguuaauuaguuuuucuuccuuugauu

SEQ ID NO: 407938 - RNA, 32 nt, Homo Sapiens
uaccuuucaaagcuuggagggaagccgugaau

SEQ ID NO: 407939 - RNA, 32 nt, Homo Sapiens
gugccggccucacaggccuugccaucugcaag

SEQ ID NO: 407940 - RNA, 32 nt, Homo Sapiens
uugaugaagaaauaaacuucagcugaagauuu

SEQ ID NO: 407941 - RNA, 32 nt, Homo Sapiens
auggcguugggucuguuuacagccuggucuac

SEQ ID NO: 407942 - RNA, 32 nt, Homo Sapiens
agagaucuuauuuuuuuuuuuauacuuggcgu

SEQ ID NO: 407943 - RNA, 32 nt, Homo Sapiens
ggaguguugcagugacugaaaagcuucauaag

SEQ ID NO: 407944 - RNA, 32 nt, Homo Sapiens
ccccuggcuaugguuuuuguucuuauaacaga

SEQ ID NO: 407945 - RNA, 32 nt, Homo Sapiens
aagagccaucagcuccagauuauggccacccc

SEQ ID NO: 407946 - RNA, 32 nt, Homo Sapiens
auccaagcaaaauaauacugcaauugccagca

SEQ ID NO: 407947 - RNA, 32 nt, Homo Sapiens
gagcaugaggaguucuagggguccuggcaccu

SEQ ID NO: 407948 - RNA, 32 nt, Homo Sapiens
gcagcccugacccucccucuccagguugccuc

SEQ ID NO: 407949 - RNA, 32 nt, Homo Sapiens
gggcgcagggaagaagagggacguccacugug

SEQ ID NO: 407950 - RNA, 32 nt, Homo Sapiens
gcugggagagggagcagggcggcggcccgggg

SEQ ID NO: 407951 - RNA, 32 nt, Homo Sapiens
guccuccuccccagcccagccugcucagagaa

SEQ ID NO: 407952 - RNA, 32 nt, Homo Sapiens
cacgcguccggugacggacccccgccgcccgc

SEQ ID NO: 407953 - RNA, 32 nt, Homo Sapiens
ucauguauuuuuccauugaagguggaguuuuu

SEQ ID NO: 407954 - RNA, 32 nt, Homo Sapiens
ccaccaucccuggccuuguuguggggcucagg

SEQ ID NO: 407955 - RNA, 32 nt, Homo Sapiens
auuuaaagcaacagacaggcuuggcaacugug

SEQ ID NO: 407956 - RNA, 31 nt, Homo Sapiens
gcuccugagccccacgacccagucaaauuug

SEQ ID NO: 407957 - RNA, 32 nt, Homo Sapiens
cgcccagggaucuggaaguaucccuagaggag

SEQ ID NO: 407958 - RNA, 32 nt, Homo Sapiens
agugaccuucuagaaaggaacugugagcucug

SEQ ID NO: 407959 - RNA, 32 nt, Homo Sapiens
ugguccggccgcugcgccacgcccccgcucgc

SEQ ID NO: 407960 - RNA, 32 nt, Homo Sapiens
ccgaagacagcugggaggugacugcuguacug

SEQ ID NO: 407961 - RNA, 32 nt, Homo Sapiens
guggagacguucuuguaaaguuauuucaguua

SEQ ID NO: 407962 - RNA, 32 nt, Homo Sapiens
cuuguuuauaugcauuuaacuuucaguuaacc

SEQ ID NO: 407963 - RNA, 32 nt, Homo Sapiens
uggaggcagcggggagcuaggguccuucaccc

SEQ ID NO: 407964 - RNA, 32 nt, Homo Sapiens
gucggacaccccagcccuuucucccucacuca

SEQ ID NO: 407965 - RNA, 32 nt, Homo Sapiens
gagugucuucauguuucauguaagucaaucuu

SEQ ID NO: 407966 - RNA, 32 nt, Homo Sapiens
ggggucccggcggggaccgcuucccgacccga

SEQ ID NO: 407967 - RNA, 32 nt, Homo Sapiens
aguggcuugcucugggucacacagcaaggacu

SEQ ID NO: 407968 - RNA, 32 nt, Homo Sapiens
ugggauugccuggguucccuuuggagaagaaa

SEQ ID NO: 407969 - RNA, 32 nt, Homo Sapiens
ucaccaaaugcugucuucucuuucuccaauca

SEQ ID NO: 407970 - RNA, 31 nt, Homo Sapiens
ugaauauguuaagccauucuugauuggaccu

SEQ ID NO: 407971 - RNA, 32 nt, Homo Sapiens
cccagcgaggggcgcgcgugggcgcggccaug

SEQ ID NO: 407972 - RNA, 32 nt, Homo Sapiens
uaacauuuuucuuaaugaaaucaaaaagaaag

SEQ ID NO: 407973 - RNA, 32 nt, Homo Sapiens
aucacccugcucucauuucuaccuguucugug

SEQ ID NO: 407974 - RNA, 29 nt, Homo Sapiens
cucaggagcuuuacucauggcagaaggca

SEQ ID NO: 407975 - RNA, 32 nt, Homo Sapiens
gcugcaacaacaacuucaucaccuggacaaac

SEQ ID NO: 407976 - RNA, 32 nt, Homo Sapiens
caacagcaaaagcccuaacuucuuauacgucu

SEQ ID NO: 407977 - RNA, 32 nt, Homo Sapiens
ggggagagauuugaacaagcagaauuaagugu

SEQ ID NO: 407978 - RNA, 32 nt, Homo Sapiens
guccuggccauggucucucgggccccccacac

SEQ ID NO: 407979 - RNA, 32 nt, Homo Sapiens
guuccaccccuaccaaaagcaaguagugguuu

SEQ ID NO: 407980 - RNA, 32 nt, Homo Sapiens
ucuacuaaaaauacaaaaauuagucaggcgcg

SEQ ID NO: 407981 - RNA, 32 nt, Homo Sapiens
uuuuauaugcuuguagcaaauugauguucuaa

SEQ ID NO: 407982 - RNA, 32 nt, Homo Sapiens
ccuuccaaaguuccccauuuccccucaacucu

SEQ ID NO: 407983 - RNA, 32 nt, Homo Sapiens
ccgggagggaggaggggagggucgcuccaccc

SEQ ID NO: 407984 - RNA, 32 nt, Homo Sapiens
guggaccggcggcuggagcggcugagcgagga

SEQ ID NO: 407985 - RNA, 32 nt, Homo Sapiens
uuuagauuuuugcaggaccuggauaugaacug

SEQ ID NO: 407986 - RNA, 32 nt, Homo Sapiens
gaauccgccgugguguuucaagcgagucaaga

SEQ ID NO: 407987 - RNA, 32 nt, Homo Sapiens
uccaccaugagcaacagauuugagguaccagu

SEQ ID NO: 407988 - RNA, 30 nt, Homo Sapiens
uuuguggcucuugccacccauggucaccuc

SEQ ID NO: 407989 - RNA, 32 nt, Homo Sapiens
gaguucaagaccagccuggacaauauagugaa

SEQ ID NO: 407990 - RNA, 32 nt, Homo Sapiens
agcaccaucucggaguucugcacaggagagac

SEQ ID NO: 407991 - RNA, 32 nt, Homo Sapiens
cuaucuuugaaauuauucuaagccaaagaaaa

SEQ ID NO: 407992 - RNA, 32 nt, Homo Sapiens
uauuuucaucuuuuuugguuuucuuggcauga

SEQ ID NO: 407993 - RNA, 32 nt, Homo Sapiens
ucuaauuuuuauucauaagccaauuuuucugc

SEQ ID NO: 407994 - RNA, 32 nt, Homo Sapiens
cccagaugccuucuagauucacugucuuuuga

SEQ ID NO: 407995 - RNA, 32 nt, Homo Sapiens
ggugaucuaggauaaaaucuugagagucccau

SEQ ID NO: 407996 - RNA, 32 nt, Homo Sapiens
auauguuggaguuauaaagaaauacacuaagg

SEQ ID NO: 407997 - RNA, 32 nt, Homo Sapiens
gcacgggguacggacgugcccgggcagauggg

SEQ ID NO: 407998 - RNA, 32 nt, Homo Sapiens
ucaggcucauccacgcagcugcuggguucuug

SEQ ID NO: 407999 - RNA, 32 nt, Homo Sapiens
cucaagaacuggaaaccaacuaaaugccuucu

SEQ ID NO: 408000 - RNA, 32 nt, Homo Sapiens
ggacacuguauauugcaaauugcugauuaugg

SEQ ID NO: 408001 - RNA, 32 nt, Homo Sapiens
gcuuuauucuauaguugaaucaccucugaaua

SEQ ID NO: 408002 - RNA, 30 nt, Homo Sapiens
aauucagagaagccuucuuaguccucagag

SEQ ID NO: 408003 - RNA, 32 nt, Homo Sapiens
gcgcuacagcaaguuuuuugaccuccagaugc

SEQ ID NO: 408004 - RNA, 32 nt, Homo Sapiens
caacuuuucccuccucccuuuuugcggaugag

SEQ ID NO: 408005 - RNA, 32 nt, Homo Sapiens
cauaggaucauuuggaacaggaguucugagga

SEQ ID NO: 408006 - RNA, 32 nt, Homo Sapiens
augagcgcccgcgaccccgggcccagggcggc

SEQ ID NO: 408007 - RNA, 32 nt, Homo Sapiens
gccggcgccuccccgccucgcgcggacugucu

SEQ ID NO: 408008 - RNA, 32 nt, Homo Sapiens
ugagguguucuucaugagaguacuagccuccu

SEQ ID NO: 408009 - RNA, 32 nt, Homo Sapiens
gaggguuaugauuugugucaaaaauugacaua

SEQ ID NO: 408010 - RNA, 32 nt, Homo Sapiens
uuaaauaaauuacaguaugucuauaugaugaa

SEQ ID NO: 408011 - RNA, 32 nt, Homo Sapiens
ggcuuggaggccgggugcaguggcucacaccu

SEQ ID NO: 408012 - RNA, 32 nt, Homo Sapiens
aaaacuaugugaugaaacuuugaaaaagauau

SEQ ID NO: 408013 - RNA, 32 nt, Homo Sapiens
ucccauuugggaacugauguuccuaagauccg

SEQ ID NO: 408014 - RNA, 32 nt, Homo Sapiens
agacagcuacaaaaaugaagguuuucauaaug

SEQ ID NO: 408015 - RNA, 30 nt, Homo Sapiens
aggauauuuggucggaucgcccggcggcgc

SEQ ID NO: 408016 - RNA, 32 nt, Homo Sapiens
uggugucaguugauauuuaguuucauuugcug

SEQ ID NO: 408017 - RNA, 32 nt, Homo Sapiens
gaauuggaaaguuggacuuguuuucuaugauc

SEQ ID NO: 408018 - RNA, 32 nt, Homo Sapiens
uuccaauuuacuaucaaauuauaguaacugag

SEQ ID NO: 408019 - RNA, 32 nt, Homo Sapiens
aggcaccuaccuucauuuuuaacgcuuauucu

SEQ ID NO: 408020 - RNA, 32 nt, Homo Sapiens
caaauauuugaaaggaugguauugaaucuaaa

SEQ ID NO: 408021 - RNA, 32 nt, Homo Sapiens
ggcccccggggaagagcggggugccggugucc

SEQ ID NO: 408022 - RNA, 32 nt, Homo Sapiens
agggcauucauuuucacaauccuaggaugccc

SEQ ID NO: 408023 - RNA, 32 nt, Homo Sapiens
uucaguuuuaguuucaaaauguuaacaacuug

SEQ ID NO: 408024 - RNA, 32 nt, Homo Sapiens
gauggcugucuucgccuuaguacucgugugaa

SEQ ID NO: 408025 - RNA, 32 nt, Homo Sapiens
uccagagaucauaacuucuuugcaagaaaaca

SEQ ID NO: 408026 - RNA, 32 nt, Homo Sapiens
uaccaguauuuuucuuuuuuuuuuuuuugaga

SEQ ID NO: 408027 - RNA, 32 nt, Homo Sapiens
aggauggagcagccaccccggcccgggacugg

SEQ ID NO: 408028 - RNA, 32 nt, Homo Sapiens
aagaacuagaaaauaugucugguaguuuuccu

SEQ ID NO: 408029 - RNA, 32 nt, Homo Sapiens
uaaaacaaaucgaugguaaaccagagaagccu

SEQ ID NO: 408030 - RNA, 32 nt, Homo Sapiens
aaauacuguaaaacguguagugaauguuucuu

SEQ ID NO: 408031 - RNA, 32 nt, Homo Sapiens
gcuggcaaaagaagaggauguugcaacaaaaa

SEQ ID NO: 408032 - RNA, 32 nt, Homo Sapiens
uagcagggggucacgugugcaugugaugggac

SEQ ID NO: 408033 - RNA, 32 nt, Homo Sapiens
gucaauucagaauugacuugaguuugaguuga

SEQ ID NO: 408034 - RNA, 32 nt, Homo Sapiens
uuuugguguuauauuucaaauguuguugcuua

SEQ ID NO: 408035 - RNA, 32 nt, Homo Sapiens
auaacaaagauaucuuuucuuuagagaacuga

SEQ ID NO: 408036 - RNA, 32 nt, Homo Sapiens
cggccucucccaccccagcagugacgcgccgc

SEQ ID NO: 408037 - RNA, 32 nt, Homo Sapiens
gagagcccagcuugcucugaaguuggacuaaa

SEQ ID NO: 408038 - RNA, 32 nt, Homo Sapiens
ggaaaggauguauuuauuuguauuuucauaua

SEQ ID NO: 408039 - RNA, 32 nt, Homo Sapiens
uugcaguaauuuauuugacagaucucuauucu

SEQ ID NO: 408040 - RNA, 32 nt, Homo Sapiens
aauuuaaugaauucacaugaaagggguagucu

SEQ ID NO: 408041 - RNA, 31 nt, Homo Sapiens
gagaaucauuugaaccugggagguggagguu

SEQ ID NO: 408042 - RNA, 32 nt, Homo Sapiens
uggagaacagaaaaaacgcaagcagcagagaa

SEQ ID NO: 408043 - RNA, 32 nt, Homo Sapiens
auagcuaauaucaacacuuaauguugggacag

SEQ ID NO: 408044 - RNA, 32 nt, Homo Sapiens
agaguccccuuuaggguucccggagcuccggg

SEQ ID NO: 408045 - RNA, 32 nt, Homo Sapiens
aacuaguuuuucugccagcuauguugaaugca

SEQ ID NO: 408046 - RNA, 32 nt, Homo Sapiens
gccuaaaacauucaaacuuguuuucuuuuuuc

SEQ ID NO: 408047 - RNA, 32 nt, Homo Sapiens
ugaaucacaccuguaaucccagcacuuuggga

SEQ ID NO: 408048 - RNA, 32 nt, Homo Sapiens
ggguaauuagggcaaaaguaaauaaaucauua

SEQ ID NO: 408049 - RNA, 32 nt, Homo Sapiens
ccuggggaggcagaggaggaugaugaggaagg

SEQ ID NO: 408050 - RNA, 32 nt, Homo Sapiens
cucagauucuauuggcuaauaagauuuaauua

SEQ ID NO: 408051 - RNA, 32 nt, Homo Sapiens
aagggacacacacacacacacacacacacaca

SEQ ID NO: 408052 - RNA, 32 nt, Homo Sapiens
ggcugacaggggaaacaaaacacacaauaaac

SEQ ID NO: 408053 - RNA, 32 nt, Homo Sapiens
gggaacagccccacugcaaacaacccauuccu

SEQ ID NO: 408054 - RNA, 32 nt, Homo Sapiens
gaauuuuugucuauuuauuauauccugaaugu

SEQ ID NO: 408055 - RNA, 32 nt, Homo Sapiens
aucaacguagaaaugccuggaggcugcugggu

SEQ ID NO: 408056 - RNA, 32 nt, Homo Sapiens
ccggggagccccguuggagccauuguacccag

SEQ ID NO: 408057 - RNA, 32 nt, Homo Sapiens
gacaaacaacaauuaauguuucccuuggaugu

SEQ ID NO: 408058 - RNA, 32 nt, Homo Sapiens
gguagugagcagcaaaugccuuucaagaaaau

SEQ ID NO: 408059 - RNA, 32 nt, Homo Sapiens
ggaauccugccugccuucagcagagaauucac

SEQ ID NO: 408060 - RNA, 32 nt, Homo Sapiens
guuuaauuuuauaaacaaaacugauuauacca

SEQ ID NO: 408061 - RNA, 32 nt, Homo Sapiens
auaagcaaaaggaaacauuuaaaugcuaucuu

SEQ ID NO: 408062 - RNA, 32 nt, Homo Sapiens
aaaauuauauaaaauucaaauuuuggugucug

SEQ ID NO: 408063 - RNA, 32 nt, Homo Sapiens
gcuccccuuguuuguccucccggagccuggcg

SEQ ID NO: 408064 - RNA, 32 nt, Homo Sapiens
ucuugcugugcaaacucaauuuccuguauccu

SEQ ID NO: 408065 - RNA, 32 nt, Homo Sapiens
uuccuuuguuugcggggggcuggggaugcagu

SEQ ID NO: 408066 - RNA, 32 nt, Homo Sapiens
cgcccgccgcucccggccccgcuccgcucaca

SEQ ID NO: 408067 - RNA, 32 nt, Homo Sapiens
auuuuugucacagagcaagcuggccaugaacg

SEQ ID NO: 408068 - RNA, 32 nt, Homo Sapiens
gagacauauggacaaugaaucugcaaagauac

SEQ ID NO: 408069 - RNA, 32 nt, Homo Sapiens
cccaauauaggacuuuuaugggcucggcaguu

SEQ ID NO: 408070 - RNA, 32 nt, Homo Sapiens
aagacaguccucgucagcacugacuuucagcu

SEQ ID NO: 408071 - RNA, 32 nt, Homo Sapiens
ccaugccucacagcacacaaaugugccagaag

SEQ ID NO: 408072 - RNA, 30 nt, Homo Sapiens
cgcgagaucuucgguggggguacggguguu

SEQ ID NO: 408073 - RNA, 32 nt, Homo Sapiens
gauggaguuggaggggcggggugcuggcggug

SEQ ID NO: 408074 - RNA, 32 nt, Homo Sapiens
ucgacguccuucuucccggcggccgagcccuc

SEQ ID NO: 408075 - RNA, 31 nt, Homo Sapiens
aagauuucaggguguuuucuaacugaaaucu

SEQ ID NO: 408076 - RNA, 32 nt, Homo Sapiens
gccccaacacaagcuccagucuuccucuucgg

SEQ ID NO: 408077 - RNA, 32 nt, Homo Sapiens
aaacuaaaacaaaauuuguccagauauuuuga

SEQ ID NO: 408078 - RNA, 32 nt, Homo Sapiens
ugucauuuaaaaauaguuggugaaugucacaa

SEQ ID NO: 408079 - RNA, 32 nt, Homo Sapiens
gcuccgcgcugacagcgccgggcuggggcggg

SEQ ID NO: 408080 - RNA, 32 nt, Homo Sapiens
caacauuuguguucuuucuacuuuugggcuau

SEQ ID NO: 408081 - RNA, 32 nt, Homo Sapiens
aaaggggcccuauuuuccugcugcuucccagc

SEQ ID NO: 408082 - RNA, 32 nt, Homo Sapiens
uggcacacagaguucauguuugccgcccucuc

SEQ ID NO: 408083 - RNA, 32 nt, Homo Sapiens
uuccuggugucugagccuggcgcggaggcuau

SEQ ID NO: 408084 - RNA, 32 nt, Homo Sapiens
cauuggcuuuugcuggaugauccaccuaaaga

SEQ ID NO: 408085 - RNA, 32 nt, Homo Sapiens
uuuaaauuaauuuacccuuaagaguauguuac

SEQ ID NO: 408086 - RNA, 30 nt, Homo Sapiens
caagaggauaaaagaagcaugaaugaaaag

SEQ ID NO: 408087 - RNA, 32 nt, Homo Sapiens
gugucgccaggcccgcgccagcugaggccuca

SEQ ID NO: 408088 - RNA, 32 nt, Homo Sapiens
aggcagggcgcgggggcagagccucgccuggg

SEQ ID NO: 408089 - RNA, 32 nt, Homo Sapiens
gagccccggacuuugucuucuaugcucccugg

SEQ ID NO: 408090 - RNA, 32 nt, Homo Sapiens
aaucuuauauccucuauaccaaacuuugcuua

SEQ ID NO: 408091 - RNA, 32 nt, Homo Sapiens
agagaaaauggcaccugguugucuucgugcug

SEQ ID NO: 408092 - RNA, 32 nt, Homo Sapiens
ugguuccugaugcuuugcuagccucagacacu

SEQ ID NO: 408093 - RNA, 32 nt, Homo Sapiens
gggaagaacuuaagcauauacuguguaaacag

SEQ ID NO: 408094 - RNA, 32 nt, Homo Sapiens
uccuuuuuuuuuucuuuuuugcuuuucuuuuc

SEQ ID NO: 408095 - RNA, 32 nt, Homo Sapiens
acacccagcucuuccucaccuuccugucuagu

SEQ ID NO: 408096 - RNA, 32 nt, Homo Sapiens
aaugacaaaccuuguuaaaugcuuccacuucc

SEQ ID NO: 408097 - RNA, 32 nt, Homo Sapiens
uguguuuucuucaguguaauuguucuugguaa

SEQ ID NO: 408098 - RNA, 32 nt, Homo Sapiens
gaccccgcacucggcguccgccgccgccgggu

SEQ ID NO: 408099 - RNA, 32 nt, Homo Sapiens
cccccgggccccagccuuccaccugugcuagc

SEQ ID NO: 408100 - RNA, 32 nt, Homo Sapiens
agucuuuuuaaaucuuuuuuguuguuguucuu

SEQ ID NO: 408101 - RNA, 32 nt, Homo Sapiens
gauuacugauguccauggcaagugaucuguuc

SEQ ID NO: 408102 - RNA, 32 nt, Homo Sapiens
gccugaacaacuuuuccacuuuccacgugcuu

SEQ ID NO: 408103 - RNA, 31 nt, Homo Sapiens
ggaccugacaaaacagucagagccugagugc

SEQ ID NO: 408104 - RNA, 32 nt, Homo Sapiens
acugugggaacggcuuggcccagcggggccuu

SEQ ID NO: 408105 - RNA, 32 nt, Homo Sapiens
acagcaucuugugaccuuggcacuauauuauc

SEQ ID NO: 408106 - RNA, 31 nt, Homo Sapiens
acagugcuauuaaagaauaugugcuccuuuu

SEQ ID NO: 408107 - RNA, 32 nt, Homo Sapiens
caccaaagacaucagucuccaacauguuucug

SEQ ID NO: 408108 - RNA, 32 nt, Homo Sapiens
cgcaacaucccccaccaauaccuuucugaagu

SEQ ID NO: 408109 - RNA, 32 nt, Homo Sapiens
uggccucugggggcuccaggugcuccuugaug

SEQ ID NO: 408110 - RNA, 32 nt, Homo Sapiens
uuccgacugcaucgcccagcaccagagcccga

SEQ ID NO: 408111 - RNA, 32 nt, Homo Sapiens
uccacaccacccccaaacagggcucugcuucc

SEQ ID NO: 408112 - RNA, 32 nt, Homo Sapiens
gggagcuggaagccaccugcugcugcacuccc

SEQ ID NO: 408113 - RNA, 32 nt, Homo Sapiens
ggcuggggagggagaggaugggaccagguugg

SEQ ID NO: 408114 - RNA, 32 nt, Homo Sapiens
acgaggucaggagauggagacaauccugguuu

SEQ ID NO: 408115 - RNA, 32 nt, Homo Sapiens
aucagagaaaugcaaaucaaaacuacaaugag

SEQ ID NO: 408116 - RNA, 32 nt, Homo Sapiens
ugauuguuauuuaaauacauauuaguuuuaac

SEQ ID NO: 408117 - RNA, 32 nt, Homo Sapiens
acaugcguccccucccuccccccgccaagugc

SEQ ID NO: 408118 - RNA, 32 nt, Homo Sapiens
gacugccuagugcgccagcugcaucuggagga

SEQ ID NO: 408119 - RNA, 32 nt, Homo Sapiens
ucuuaaugucauuguaaccaucacuuaucucc

SEQ ID NO: 408120 - RNA, 32 nt, Homo Sapiens
gguacuggcgcacccuggugcugcugcuacug

SEQ ID NO: 408121 - RNA, 32 nt, Homo Sapiens
guuaaacuuguacauuucuguugaucacgccg

SEQ ID NO: 408122 - RNA, 32 nt, Homo Sapiens
uuaugcuagcaugauuuuuuuauauauagaag

SEQ ID NO: 408123 - RNA, 32 nt, Homo Sapiens
caccugagauuaguggcgugggacagggcagu

SEQ ID NO: 408124 - RNA, 32 nt, Homo Sapiens
uagggacggucaugacuuuuuuauguugggca

SEQ ID NO: 408125 - RNA, 32 nt, Homo Sapiens
ugugcggguggcggccggcgcgcgguggggca

SEQ ID NO: 408126 - RNA, 32 nt, Homo Sapiens
agagcaacuaucagggcagcucugccuccucc

SEQ ID NO: 408127 - RNA, 32 nt, Homo Sapiens
cuuuucuuuacuauaauugaguaauucauauu

SEQ ID NO: 408128 - RNA, 32 nt, Homo Sapiens
agcuuuacuagguuuuuuuuuaauugugaaau

SEQ ID NO: 408129 - RNA, 32 nt, Homo Sapiens
uaucaaucgcaguagucuuuccccugugugag

SEQ ID NO: 408130 - RNA, 32 nt, Homo Sapiens
aagaucagugguuaucuuugcagacgccgcca

SEQ ID NO: 408131 - RNA, 32 nt, Homo Sapiens
uacuuucuugucaaacaaaaccaauggcucug

SEQ ID NO: 408132 - RNA, 32 nt, Homo Sapiens
acuacguucagcgcuccgccuacugcagcauu

SEQ ID NO: 408133 - RNA, 32 nt, Homo Sapiens
ucuucaaauauuuggagagcuacaccaucaaa

SEQ ID NO: 408134 - RNA, 32 nt, Homo Sapiens
uacauguugcauuauuacaaaauacauuugcu

SEQ ID NO: 408135 - RNA, 32 nt, Homo Sapiens
gucccgggccccagcauuuugccccgggcucc

SEQ ID NO: 408136 - RNA, 32 nt, Homo Sapiens
cccgucuccuucuugucuccccggcccagguc

SEQ ID NO: 408137 - RNA, 30 nt, Homo Sapiens
ugcugcugcugcggcggcggcagcggcguc

SEQ ID NO: 408138 - RNA, 32 nt, Homo Sapiens
ccccauuuuuucugcaugcaguuugcaacaaa

SEQ ID NO: 408139 - RNA, 32 nt, Homo Sapiens
cagcacaacuuugaaaacuguuaaguauuuug

SEQ ID NO: 408140 - RNA, 32 nt, Homo Sapiens
acauguaaacacacgucucccacacgugagcu

SEQ ID NO: 408141 - RNA, 32 nt, Homo Sapiens
gaccuccugauuuuuuuuuucuuuucucaaau

SEQ ID NO: 408142 - RNA, 32 nt, Homo Sapiens
gcugcagccuucugcugguccucccugacuac

SEQ ID NO: 408143 - RNA, 32 nt, Homo Sapiens
cccugagcccagcagccgcgggucccgggauc

SEQ ID NO: 408144 - RNA, 32 nt, Homo Sapiens
auacagagaaggacaagaagcccucaugcaca

SEQ ID NO: 408145 - RNA, 32 nt, Homo Sapiens
aguaccgcccucggggcccggucauugacuuc

SEQ ID NO: 408146 - RNA, 32 nt, Homo Sapiens
ccucuucccagggcuuccuuuagggcgaaaca

SEQ ID NO: 408147 - RNA, 32 nt, Homo Sapiens
gccagcaaagcacaacugaacuaaauccaccu

SEQ ID NO: 408148 - RNA, 32 nt, Homo Sapiens
gggcuucguuucugcucuccccggcaugccug

SEQ ID NO: 408149 - RNA, 32 nt, Homo Sapiens
agaacagugccuucucgucuuaaaagagaggu

SEQ ID NO: 408150 - RNA, 32 nt, Homo Sapiens
ccuggagaggggcuguccauggcagcuggucu

SEQ ID NO: 408151 - RNA, 32 nt, Homo Sapiens
uuuguaccccauaaguuaucccuuaugcccug

SEQ ID NO: 408152 - RNA, 32 nt, Homo Sapiens
auccaggccagggcuccuguggcagcugcccc

SEQ ID NO: 408153 - RNA, 32 nt, Homo Sapiens
cgguggaagaacugaauuucaggaugcucaca

SEQ ID NO: 408154 - RNA, 32 nt, Homo Sapiens
gaacauauauaaaauuauuuuuguucugcagg

SEQ ID NO: 408155 - RNA, 32 nt, Homo Sapiens
ggaccucagguggccccaguucaaucucccgc

SEQ ID NO: 408156 - RNA, 32 nt, Homo Sapiens
uguuguagacaacgggcccauuugagcaugug

SEQ ID NO: 408157 - RNA, 32 nt, Homo Sapiens
caugauguuuguauauugauuaggaguaaaaa

SEQ ID NO: 408158 - RNA, 32 nt, Homo Sapiens
gacuaucaagaugcaugaaaagagaaacauca

SEQ ID NO: 408159 - RNA, 32 nt, Homo Sapiens
gcaccaguacgauaguuccggcaccggaaaag

SEQ ID NO: 408160 - RNA, 32 nt, Homo Sapiens
uguaaggaaaauugaagguguucucaagugug

SEQ ID NO: 408161 - RNA, 25 nt, Homo Sapiens
aaugccaguuuugaccacagaagaa

SEQ ID NO: 408162 - RNA, 32 nt, Homo Sapiens
guugcaagaaagaucauuaaagaagguuauua

SEQ ID NO: 408163 - RNA, 32 nt, Homo Sapiens
aaaaaauggcaucaccugucaaaaauggaguu

SEQ ID NO: 408164 - RNA, 32 nt, Homo Sapiens
cccuacagaacuccucaagaaaacagagauca

SEQ ID NO: 408165 - RNA, 32 nt, Homo Sapiens
aguuaguuugcgggaacucagcuccuccagcc

SEQ ID NO: 408166 - RNA, 32 nt, Homo Sapiens
ugcuuuacugucaaaauaauuuuauggcucac

SEQ ID NO: 408167 - RNA, 32 nt, Homo Sapiens
caaaaagccacgucgugcugcugcuggaagcc

SEQ ID NO: 408168 - RNA, 32 nt, Homo Sapiens
guguggaauucugugaaaaauauuugagaaaa

SEQ ID NO: 408169 - RNA, 32 nt, Homo Sapiens
cagccaacccugcccucuuccuccccuguccc

SEQ ID NO: 408170 - RNA, 32 nt, Homo Sapiens
ccaccucuccucuggaguucugaugacgcugc

SEQ ID NO: 408171 - RNA, 32 nt, Homo Sapiens
ggcccugcuucuuuuccuaagagucugaaacc

SEQ ID NO: 408172 - RNA, 32 nt, Homo Sapiens
gcccggccgccccgucugagaagugaggagac

SEQ ID NO: 408173 - RNA, 32 nt, Homo Sapiens
gccacugcacuccagccugggcgacagagcca

SEQ ID NO: 408174 - RNA, 32 nt, Homo Sapiens
cccuguggaggagcgucgccaacaucaugccc

SEQ ID NO: 408175 - RNA, 32 nt, Homo Sapiens
agcuuuuccuuccaucuccuucucuccacccg

SEQ ID NO: 408176 - RNA, 32 nt, Homo Sapiens
aucuacuugacaagguggauguaacauuucaa

SEQ ID NO: 408177 - RNA, 32 nt, Homo Sapiens
aauucaauuuaaauaugugugugucucaucca

SEQ ID NO: 408178 - RNA, 29 nt, Homo Sapiens
auacuucaggaugagugaaggcuggagcc

SEQ ID NO: 408179 - RNA, 32 nt, Homo Sapiens
gaauaucuaguccaacacucuaaugggauaga

SEQ ID NO: 408180 - RNA, 32 nt, Homo Sapiens
auuuaacauguguauucuuuuaauuguuucag

SEQ ID NO: 408181 - RNA, 32 nt, Homo Sapiens
uaauaaauauauauuuucuggaaaaaaaaaaa

SEQ ID NO: 408182 - RNA, 32 nt, Homo Sapiens
acaaccaaagacaagccuuuauggaaaaggaa

SEQ ID NO: 408183 - RNA, 32 nt, Homo Sapiens
ccgagccgcccggcauccccgccgccucugcg

SEQ ID NO: 408184 - RNA, 32 nt, Homo Sapiens
acugcacccacccacgccuggcugauguuuuu

SEQ ID NO: 408185 - RNA, 32 nt, Homo Sapiens
agggggccaccugugcuccccccgcuacccuc

SEQ ID NO: 408186 - RNA, 32 nt, Homo Sapiens
cagcugcagagcaucaaagacgccugcugcac

SEQ ID NO: 408187 - RNA, 32 nt, Homo Sapiens
gucccccacguggacucugugcucacccauug

SEQ ID NO: 408188 - RNA, 32 nt, Homo Sapiens
cgcagugugcuuagggccugaggugugaaagc

SEQ ID NO: 408189 - RNA, 32 nt, Homo Sapiens
cuaacucgugaccuccagccugccccuugcug

SEQ ID NO: 408190 - RNA, 32 nt, Homo Sapiens
aucauuuacauuuaggaaagugaggcaaacac

SEQ ID NO: 408191 - RNA, 32 nt, Homo Sapiens
aucuacugcuuccuaagagucuccauggaguc

SEQ ID NO: 408192 - RNA, 32 nt, Homo Sapiens
ugcgcacccgcacuggggccugggcggugcag

SEQ ID NO: 408193 - RNA, 32 nt, Homo Sapiens
uuuguaugucagauuauacaaggauguauucu

SEQ ID NO: 408194 - RNA, 32 nt, Homo Sapiens
augccaaggggaggagcgacaccuccaggcuu

SEQ ID NO: 408195 - RNA, 32 nt, Homo Sapiens
uauaguaaaaauuuauuguauauaguuucuau

SEQ ID NO: 408196 - RNA, 32 nt, Homo Sapiens
aucaguggggcggccgggagggcgagcgaggg

SEQ ID NO: 408197 - RNA, 32 nt, Homo Sapiens
cccgcugccauggagugccaccucaagaccca

SEQ ID NO: 408198 - RNA, 32 nt, Homo Sapiens
aggguuacaaaauaaaugccauuugaacagug

SEQ ID NO: 408199 - RNA, 32 nt, Homo Sapiens
ucauaucucucuccacccacccaaccgccccc

SEQ ID NO: 408200 - RNA, 32 nt, Homo Sapiens
cccgggagacccaggaggagcccgcagauaac

SEQ ID NO: 408201 - RNA, 32 nt, Homo Sapiens
aucggaaucugugccguauugauaaggagaug

SEQ ID NO: 408202 - RNA, 32 nt, Homo Sapiens
uuuagcuuaaauugcaccucucagucugcaug

SEQ ID NO: 408203 - RNA, 32 nt, Homo Sapiens
cagccgagccccccggcccccagcuuccccag

SEQ ID NO: 408204 - RNA, 32 nt, Homo Sapiens
ggggaggccccgcccccuccccacaccccugc

SEQ ID NO: 408205 - RNA, 32 nt, Homo Sapiens
ccuaagcuuaccuucacaacucuucuuuuuga

SEQ ID NO: 408206 - RNA, 32 nt, Homo Sapiens
uuuaacugcagccuugaacacacacaaaaaua

SEQ ID NO: 408207 - RNA, 32 nt, Homo Sapiens
ucuuuauuuaugcugguaaaaaauugccaucc

SEQ ID NO: 408208 - RNA, 32 nt, Homo Sapiens
gaggacuuuuccccuggccucuucccaucccu

SEQ ID NO: 408209 - RNA, 32 nt, Homo Sapiens
ucagugcccucgccgccgccggcacugccucg

SEQ ID NO: 408210 - RNA, 32 nt, Homo Sapiens
uuacuaauguuuacaaggcugcgcaguaggga

SEQ ID NO: 408211 - RNA, 32 nt, Homo Sapiens
agcugaagaugagaagcagagggacaaggcgu

SEQ ID NO: 408212 - RNA, 32 nt, Homo Sapiens
gauuuuaccauguuggccaggcuggucucgaa

SEQ ID NO: 408213 - RNA, 32 nt, Homo Sapiens
ccuggcgaguccucggugucgguggccggcag

SEQ ID NO: 408214 - RNA, 32 nt, Homo Sapiens
gggaccugggguggugugugucugcggagcuu

SEQ ID NO: 408215 - RNA, 32 nt, Homo Sapiens
auuugacacuuacugcuagcucugcuuuuuau

SEQ ID NO: 408216 - RNA, 32 nt, Homo Sapiens
uucacuuguauucauuuguaaaacuuuguauu

SEQ ID NO: 408217 - RNA, 32 nt, Homo Sapiens
cccacuaccguaaauguccauuuauaucauuu

SEQ ID NO: 408218 - RNA, 32 nt, Homo Sapiens
ccaccgcugccuuuugcugcugcugcugcggc

SEQ ID NO: 408219 - RNA, 32 nt, Homo Sapiens
auugauucuggugguagacugguagugagcag

SEQ ID NO: 408220 - RNA, 32 nt, Homo Sapiens
uguuucugauuuaauguacggaacuuuauuug

SEQ ID NO: 408221 - RNA, 32 nt, Homo Sapiens
cagccagucgugcacagagacacacccacacu

SEQ ID NO: 408222 - RNA, 32 nt, Homo Sapiens
gaggccgguuccuggucugugcugcucuccug

SEQ ID NO: 408223 - RNA, 32 nt, Homo Sapiens
caaacaguauuugugaaacuguguguauacac

SEQ ID NO: 408224 - RNA, 32 nt, Homo Sapiens
ugauauauuuuacaauuuuuuaucaugcaugu

SEQ ID NO: 408225 - RNA, 32 nt, Homo Sapiens
aucgcccaggacuaagaguggcagcguaugag

SEQ ID NO: 408226 - RNA, 32 nt, Homo Sapiens
cauuucuacuacgucggccauaaacagcuauc

SEQ ID NO: 408227 - RNA, 32 nt, Homo Sapiens
uaccagcgcuuuauguuaauuaccaaaacucu

SEQ ID NO: 408228 - RNA, 32 nt, Homo Sapiens
uguacuggcucccaggccuccucagacuuggc

SEQ ID NO: 408229 - RNA, 32 nt, Homo Sapiens
cucaaaugaucaauaagcuuuaaauuaaacuc

SEQ ID NO: 408230 - RNA, 32 nt, Homo Sapiens
guagccaugcuucacggggaggucagagcugg

SEQ ID NO: 408231 - RNA, 25 nt, Homo Sapiens
augucuuaucaacagcagcagugca

SEQ ID NO: 408232 - RNA, 32 nt, Homo Sapiens
uaaagugggaucuggaaagucucuggauaauu

SEQ ID NO: 408233 - RNA, 32 nt, Homo Sapiens
uggggacugucaagugcuuuaucuuaucuaag

SEQ ID NO: 408234 - RNA, 29 nt, Homo Sapiens
ccgaauguuccuguccauaaaaacagaag

SEQ ID NO: 408235 - RNA, 32 nt, Homo Sapiens
gcguccuggccgcugcagcccggagcagggug

SEQ ID NO: 408236 - RNA, 32 nt, Homo Sapiens
cuaagacagacgggcacaaaacagcauggcuu

SEQ ID NO: 408237 - RNA, 32 nt, Homo Sapiens
gacagaggaaagggcuggcucccccuccccag

SEQ ID NO: 408238 - RNA, 32 nt, Homo Sapiens
augguggcgggugccuguagucccagcuacuc

SEQ ID NO: 408239 - RNA, 32 nt, Homo Sapiens
cagcugccucuucaucugggaaugagcuaagc

SEQ ID NO: 408240 - RNA, 32 nt, Homo Sapiens
acucacuugccuggcaggugacaggcuguugg

SEQ ID NO: 408241 - RNA, 32 nt, Homo Sapiens
uuguuuuaaaaauuaaauuaauccuugauaag

SEQ ID NO: 408242 - RNA, 32 nt, Homo Sapiens
cuuaagguuugugaagaguauuugcauugugu

SEQ ID NO: 408243 - RNA, 32 nt, Homo Sapiens
gugguggcgggugccuauagucccagcuacuc

SEQ ID NO: 408244 - RNA, 32 nt, Homo Sapiens
caaccuuggggccagcaucucccacugccucc

SEQ ID NO: 408245 - RNA, 32 nt, Homo Sapiens
gcacgccagcccgcuuuggucuguggcugagg

SEQ ID NO: 408246 - RNA, 32 nt, Homo Sapiens
augugcacugucagucauguguccaccaggcc

SEQ ID NO: 408247 - RNA, 30 nt, Homo Sapiens
ccggagguggcgccuccgccggccgcagcu

SEQ ID NO: 408248 - RNA, 32 nt, Homo Sapiens
agggugcagggccuaggucucuuccagguggg

SEQ ID NO: 408249 - RNA, 32 nt, Homo Sapiens
uuaacuaauauuuguacauuuucuuagucucu

SEQ ID NO: 408250 - RNA, 32 nt, Homo Sapiens
gugcuccaggauaacaaagaagggcagguuga

SEQ ID NO: 408251 - RNA, 32 nt, Homo Sapiens
uauuauuacugauuuacagcuuaguuauuaau

SEQ ID NO: 408252 - RNA, 32 nt, Homo Sapiens
ccgagguucauuugauuguuguaugcaaauag

SEQ ID NO: 408253 - RNA, 32 nt, Homo Sapiens
uucuacuaaaauucacacugaaacuuuaucuu

SEQ ID NO: 408254 - RNA, 32 nt, Homo Sapiens
auaaauucuauuguuuugaacucugauuuaaa

SEQ ID NO: 408255 - RNA, 32 nt, Homo Sapiens
gggaagcaaaaauuggaauuauuguagcuuuu

SEQ ID NO: 408256 - RNA, 32 nt, Homo Sapiens
auggagccaaggugcugugcuugugggcaccc

SEQ ID NO: 408257 - RNA, 32 nt, Homo Sapiens
cccaaccucugcacagcucuccaggugcugag

SEQ ID NO: 408258 - RNA, 32 nt, Homo Sapiens
aagagguggaggaggugacagggagcuaggca

SEQ ID NO: 408259 - RNA, 32 nt, Homo Sapiens
aaggauauuuauauauuuucuuaaaacagcag

SEQ ID NO: 408260 - RNA, 32 nt, Homo Sapiens
gcggaccaggauucccgcggguccuggcggcu

SEQ ID NO: 408261 - RNA, 32 nt, Homo Sapiens
gguggggcggguggggccauaaacgguuccug

SEQ ID NO: 408262 - RNA, 32 nt, Homo Sapiens
cacccgaguccgcuggcccgcgcacucccgga

SEQ ID NO: 408263 - RNA, 32 nt, Homo Sapiens
uuguaguaguacucaagaaucaccugauguuu

SEQ ID NO: 408264 - RNA, 32 nt, Homo Sapiens
caggcaugucucugagcugcuauaccugcuca

SEQ ID NO: 408265 - RNA, 32 nt, Homo Sapiens
aaugaaugucgaagcuaucugcucuguuaaau

SEQ ID NO: 408266 - RNA, 32 nt, Homo Sapiens
uccuuucucuaccuggacuuuuaaaaaaucaa

SEQ ID NO: 408267 - RNA, 32 nt, Homo Sapiens
uauuuaacagauuacuucuugauaaaauuuaa

SEQ ID NO: 408268 - RNA, 32 nt, Homo Sapiens
uuggccccggucuggcuuccccggcgcgcacc

SEQ ID NO: 408269 - RNA, 32 nt, Homo Sapiens
gcccaguuccgcaggagccgucccacagcgug

SEQ ID NO: 408270 - RNA, 32 nt, Homo Sapiens
ccagcccggucaggccucggcgcggccuacac

SEQ ID NO: 408271 - RNA, 32 nt, Homo Sapiens
uugauguuuugacagauugaagugagcuuuag

SEQ ID NO: 408272 - RNA, 32 nt, Homo Sapiens
uaguugauauuuuguaaaaugcacuuuuugug

SEQ ID NO: 408273 - RNA, 32 nt, Homo Sapiens
uauagaaaauuugugaagucagaccagaauuu

SEQ ID NO: 408274 - RNA, 32 nt, Homo Sapiens
cgcccaaagggaggugccaaggccaggaaccc

SEQ ID NO: 408275 - RNA, 32 nt, Homo Sapiens
gcgggacgacgcgccccuggucgacgcggcac

SEQ ID NO: 408276 - RNA, 32 nt, Homo Sapiens
uuauguuugaaugauuuacauaaaagagaaga

SEQ ID NO: 408277 - RNA, 32 nt, Homo Sapiens
uuuuuggauugcaauaaauuuaugauuuaacu

SEQ ID NO: 408278 - RNA, 32 nt, Homo Sapiens
aagaagcugaugcaacaaggugugguaugacu

SEQ ID NO: 408279 - RNA, 32 nt, Homo Sapiens
cccugguacucaugucuguuaucccuccagug

SEQ ID NO: 408280 - RNA, 32 nt, Homo Sapiens
cuuucaggggagaggaacagcaugggcaaagu

SEQ ID NO: 408281 - RNA, 32 nt, Homo Sapiens
aaaugcagaagcugcugcgcggaagucggcca

SEQ ID NO: 408282 - RNA, 32 nt, Homo Sapiens
ggcacugcuuugggcgcgagacuugcggagcu

SEQ ID NO: 408283 - RNA, 32 nt, Homo Sapiens
agccagaaacaaaauggcagaaugguaugacu

SEQ ID NO: 408284 - RNA, 32 nt, Homo Sapiens
uccuuuccuugccuaugagcuggaacauaaca

SEQ ID NO: 408285 - RNA, 32 nt, Homo Sapiens
cgacugcccgccccuucccccggagacgccca

SEQ ID NO: 408286 - RNA, 32 nt, Homo Sapiens
uuucaagaggcugacaauccaggccgcugcuu

SEQ ID NO: 408287 - RNA, 32 nt, Homo Sapiens
caagugaggggaggaggaagcagauagauggu

SEQ ID NO: 408288 - RNA, 32 nt, Homo Sapiens
uugaacuuuguaaaaaugauguguggaggcua

SEQ ID NO: 408289 - RNA, 32 nt, Homo Sapiens
cacaggcuugagcccagucccacagccuuccu

SEQ ID NO: 408290 - RNA, 32 nt, Homo Sapiens
gcgggcgcgggcggccggccaugaucgcgucg

SEQ ID NO: 408291 - RNA, 32 nt, Homo Sapiens
cacugcacuccagccuaggugacagggcaaga

SEQ ID NO: 408292 - RNA, 32 nt, Homo Sapiens
gaacugggcacgccuguugugagugcccuuuc

SEQ ID NO: 408293 - RNA, 32 nt, Homo Sapiens
ccauuuuagcuaaacugucauugugcaucucu

SEQ ID NO: 408294 - RNA, 32 nt, Homo Sapiens
cuuuggaacggaauucuuuaucaauaaaguuu

SEQ ID NO: 408295 - RNA, 32 nt, Homo Sapiens
aagggcccagccuggguucugcuggaagcuga

SEQ ID NO: 408296 - RNA, 32 nt, Homo Sapiens
uaaucauucauacccuuuaccuuuagguuuuu

SEQ ID NO: 408297 - RNA, 32 nt, Homo Sapiens
aacggguaaggggaccauuucugcauugcugg

SEQ ID NO: 408298 - RNA, 32 nt, Homo Sapiens
uuuuaucuaaaggacuuuggcuuuuguaaauc

SEQ ID NO: 408299 - RNA, 32 nt, Homo Sapiens
gauggggaaaacacccugaaaacuacaauaau

SEQ ID NO: 408300 - RNA, 32 nt, Homo Sapiens
gcuccauggccagucccuccccagcccagcag

SEQ ID NO: 408301 - RNA, 32 nt, Homo Sapiens
uuaguuguuguagagaaaacaugcagaacaaa

SEQ ID NO: 408302 - RNA, 32 nt, Homo Sapiens
aauuuuacaguucaaaaaccacuuacaugccu

SEQ ID NO: 408303 - RNA, 32 nt, Homo Sapiens
caaugauaccuaguaaucuuccuggcagcuag

SEQ ID NO: 408304 - RNA, 32 nt, Homo Sapiens
uccagugguauaaagaauugugccgcuuuaag

SEQ ID NO: 408305 - RNA, 32 nt, Homo Sapiens
aaggcuggcuggaagaggcaggaagguacuuc

SEQ ID NO: 408306 - RNA, 32 nt, Homo Sapiens
auaagcuugcaccuaaucguccuucccuaggg

SEQ ID NO: 408307 - RNA, 32 nt, Homo Sapiens
ggucacuggaauaguuugucuuguuuuaaaau

SEQ ID NO: 408308 - RNA, 32 nt, Homo Sapiens
aauugcaggcaagaagaagagaagagagaagg

SEQ ID NO: 408309 - RNA, 32 nt, Homo Sapiens
cgccagggcuggggugcugcugcugcacucac

SEQ ID NO: 408310 - RNA, 32 nt, Homo Sapiens
guacuuuuacacagauugguaaaguucagguu

SEQ ID NO: 408311 - RNA, 32 nt, Homo Sapiens
uugggaugagaacacaucagcugggcgcuaug

SEQ ID NO: 408312 - RNA, 32 nt, Homo Sapiens
agggcucuucugggcguccgggcagcugcagc

SEQ ID NO: 408313 - RNA, 32 nt, Homo Sapiens
ucugaggaccagcaagucauggcccaaggacc

SEQ ID NO: 408314 - RNA, 32 nt, Homo Sapiens
ggugcuggagaugccaagugaguguguacauu

SEQ ID NO: 408315 - RNA, 32 nt, Homo Sapiens
ucucaggucuucagggucuuccaucuggaacu

SEQ ID NO: 408316 - RNA, 32 nt, Homo Sapiens
agcuccgcucugcgccgcugcugccaucgccg

SEQ ID NO: 408317 - RNA, 32 nt, Homo Sapiens
uaagauguguuccuugguuguauaaagcaaaa

SEQ ID NO: 408318 - RNA, 32 nt, Homo Sapiens
aacagugggaauuaaggcuacugcaugcauca

SEQ ID NO: 408319 - RNA, 32 nt, Homo Sapiens
ucccgugggcauaucuggggagcccuguuccc

SEQ ID NO: 408320 - RNA, 32 nt, Homo Sapiens
cuggcccccgaguccccacgggcuggcgggug

SEQ ID NO: 408321 - RNA, 32 nt, Homo Sapiens
cagggucaguacaagucaggacaggcuucaug

SEQ ID NO: 408322 - RNA, 32 nt, Homo Sapiens
acacagcuggucccugugaugugucucgacac

SEQ ID NO: 408323 - RNA, 32 nt, Homo Sapiens
gagcagguggaagaggaacuuugagcacagga

SEQ ID NO: 408324 - RNA, 32 nt, Homo Sapiens
uagcuauuuuugggacagaauuuuauuuuaau

SEQ ID NO: 408325 - RNA, 32 nt, Homo Sapiens
cgcgacuaaggcuuuuuuuuuuucucccucug

SEQ ID NO: 408326 - RNA, 32 nt, Homo Sapiens
ccggaagugagcugcgcagcgccggaagcggc

SEQ ID NO: 408327 - RNA, 32 nt, Homo Sapiens
ugccuuguuucauggcagugaaaugccucuug

SEQ ID NO: 408328 - RNA, 32 nt, Homo Sapiens
uauacuuuuguaaacaaaaauugaaacauuug

SEQ ID NO: 408329 - RNA, 32 nt, Homo Sapiens
ugcgggcggaggaggucuggaaggagggggcg

SEQ ID NO: 408330 - RNA, 32 nt, Homo Sapiens
cucuggaacauuagacaggaugcugaucuucu

SEQ ID NO: 408331 - RNA, 32 nt, Homo Sapiens
uguucaggcagagggaacagcgugugcaaaag

SEQ ID NO: 408332 - RNA, 32 nt, Homo Sapiens
gcacuguccccacagccuuccacacccugugc

SEQ ID NO: 408333 - RNA, 32 nt, Homo Sapiens
guuggcggaguggucuugggacaccccucugu

SEQ ID NO: 408334 - RNA, 32 nt, Homo Sapiens
ugguguguuuggugugccaaaauguaucuauu

SEQ ID NO: 408335 - RNA, 32 nt, Homo Sapiens
caaagacauauuucuuuuuucuuuguuugaga

SEQ ID NO: 408336 - RNA, 32 nt, Homo Sapiens
gucuaaauauauuuaauaacuguauugagaaa

SEQ ID NO: 408337 - RNA, 32 nt, Homo Sapiens
ucaggagucugaggcaggagaauggcaugaac

SEQ ID NO: 408338 - RNA, 32 nt, Homo Sapiens
ugcccagcaugacauggguccucgggaagcau

SEQ ID NO: 408339 - RNA, 32 nt, Homo Sapiens
gccccuguucuucgcucaggagcagccauuaa

SEQ ID NO: 408340 - RNA, 32 nt, Homo Sapiens
cucaccccgggcuggcgccccgugccaugcgg

SEQ ID NO: 408341 - RNA, 30 nt, Homo Sapiens
ccuucucuggacucaguuuccccgucugag

SEQ ID NO: 408342 - RNA, 32 nt, Homo Sapiens
ccucccgaguagcugggaccacaggggcccac

SEQ ID NO: 408343 - RNA, 32 nt, Homo Sapiens
gagaagaagaaauuauuguucaugguaaaaga

SEQ ID NO: 408344 - RNA, 32 nt, Homo Sapiens
uauagaaaaaauaaaaacuacaaucauuagca

SEQ ID NO: 408345 - RNA, 30 nt, Homo Sapiens
cucaugaauaucccccuuccucugcaauuc

SEQ ID NO: 408346 - RNA, 32 nt, Homo Sapiens
auggccucuucagaucucuaacuucaccauau

SEQ ID NO: 408347 - RNA, 32 nt, Homo Sapiens
gcagcggucagagguccugucuggauggaggc

SEQ ID NO: 408348 - RNA, 32 nt, Homo Sapiens
gaggagggauuaagauccccuugcuccacuaa

SEQ ID NO: 408349 - RNA, 32 nt, Homo Sapiens
ccuuauuaguuauaacaugauaggugcugaau

SEQ ID NO: 408350 - RNA, 32 nt, Homo Sapiens
gucuccguuuuggaagacccgccucggcacag

SEQ ID NO: 408351 - RNA, 29 nt, Homo Sapiens
uaccaugcagugaugugaauaaaaugcau

SEQ ID NO: 408352 - RNA, 32 nt, Homo Sapiens
ggaauccccccucugucugcuccaggggcucc

SEQ ID NO: 408353 - RNA, 32 nt, Homo Sapiens
uauguuuccucccagauuguuuucugcaugaa

SEQ ID NO: 408354 - RNA, 32 nt, Homo Sapiens
uaaugguccucaaauaaugaucauugccugcc

SEQ ID NO: 408355 - RNA, 30 nt, Homo Sapiens
uggcuccuccgcgcgucgccggcgcuccac

SEQ ID NO: 408356 - RNA, 32 nt, Homo Sapiens
cggggacccuccccccgcccacacagcccacu

SEQ ID NO: 408357 - RNA, 32 nt, Homo Sapiens
cagauugcuuugaaauaaagcuuauuuuucua

SEQ ID NO: 408358 - RNA, 31 nt, Homo Sapiens
gcccaggauuacaagaaccagaagagcaaau

SEQ ID NO: 408359 - RNA, 32 nt, Homo Sapiens
acauuguugaagaucuauaacauggaaugccu

SEQ ID NO: 408360 - RNA, 32 nt, Homo Sapiens
uggaguguaguguuuucuuaguucuucaaagg

SEQ ID NO: 408361 - RNA, 32 nt, Homo Sapiens
gcucccuuaggacaaggcucugucccucagag

SEQ ID NO: 408362 - RNA, 32 nt, Homo Sapiens
gcucagggccgcgcccugggcuggcgucgugc

SEQ ID NO: 408363 - RNA, 32 nt, Homo Sapiens
cuauagaucaguguguuaggaaugggaggccc

SEQ ID NO: 408364 - RNA, 32 nt, Homo Sapiens
ccuucugcaacguuuacccacccugguucaga

SEQ ID NO: 408365 - RNA, 32 nt, Homo Sapiens
aagccacgaauaugguagaugccucgcguuga

SEQ ID NO: 408366 - RNA, 32 nt, Homo Sapiens
cuggaggguuccccggcaccccagccucccgu

SEQ ID NO: 408367 - RNA, 32 nt, Homo Sapiens
aaccaccccaaacaauaaagcacugccuuucc

SEQ ID NO: 408368 - RNA, 32 nt, Homo Sapiens
ccggguccucccugcagacucccuccccucca

SEQ ID NO: 408369 - RNA, 32 nt, Homo Sapiens
gcugcugccagccuucuugcugcugucaaguc

SEQ ID NO: 408370 - RNA, 32 nt, Homo Sapiens
cggcggcgacgggugcggcggcaccggcaguu

SEQ ID NO: 408371 - RNA, 32 nt, Homo Sapiens
guccuuccucgcgggggcucgguggguccuga

SEQ ID NO: 408372 - RNA, 27 nt, Homo Sapiens
aagguccccagcuucagccccaggccc

SEQ ID NO: 408373 - RNA, 32 nt, Homo Sapiens
ucugcccucucuccuacuuuggcugacucuuc

SEQ ID NO: 408374 - RNA, 32 nt, Homo Sapiens
gcucccauuuuuccacccacccauucccccau

SEQ ID NO: 408375 - RNA, 32 nt, Homo Sapiens
uagccccagaauacggucccucuucaccuucu

SEQ ID NO: 408376 - RNA, 32 nt, Homo Sapiens
cagcucccccgcagccagaagccgggccugca

SEQ ID NO: 408377 - RNA, 32 nt, Homo Sapiens
accccaaauuccuaggauggcaucugccuuca

SEQ ID NO: 408378 - RNA, 32 nt, Homo Sapiens
uccacagccucucguuucuccuccaucugugc

SEQ ID NO: 408379 - RNA, 32 nt, Homo Sapiens
agaggagggaggagggaaccuggcgggggugu

SEQ ID NO: 408380 - RNA, 32 nt, Homo Sapiens
gacucuucaccuucgacccauccauuguccca

SEQ ID NO: 408381 - RNA, 32 nt, Homo Sapiens
ccccccagccuggcagacuggggagcuggggg

SEQ ID NO: 408382 - RNA, 32 nt, Homo Sapiens
acgcuuagcucuuaaaagauuuuuuuuuuaug

SEQ ID NO: 408383 - RNA, 32 nt, Homo Sapiens
uucugacccacuuuuuccuuugaaaauacaau

SEQ ID NO: 408384 - RNA, 32 nt, Homo Sapiens
ggcccaggcuacuggaggaguagaaggauggg

SEQ ID NO: 408385 - RNA, 32 nt, Homo Sapiens
ucuggucauuggcauauccaagugaacaaagc

SEQ ID NO: 408386 - RNA, 32 nt, Homo Sapiens
auaaugcaucuuccuguucuuucuaccauuug

SEQ ID NO: 408387 - RNA, 32 nt, Homo Sapiens
caggcggcccgcgggggccgauccggcggaga

SEQ ID NO: 408388 - RNA, 32 nt, Homo Sapiens
gguuuuaaaaauugaaugcaauaccagaaacc

SEQ ID NO: 408389 - RNA, 32 nt, Homo Sapiens
uuucaaaaguuguuuuacaucaauguuaaaau

SEQ ID NO: 408390 - RNA, 32 nt, Homo Sapiens
ugucucaucuucauuguuuucacucuuaacuu

SEQ ID NO: 408391 - RNA, 32 nt, Homo Sapiens
gguuugcugaagauuuucuagacugcuucugg

SEQ ID NO: 408392 - RNA, 32 nt, Homo Sapiens
uuuuuuccacaagaucuguaauguuauuucca

SEQ ID NO: 408393 - RNA, 32 nt, Homo Sapiens
agauacacaauuuugucaguuuacuuacagug

SEQ ID NO: 408394 - RNA, 30 nt, Homo Sapiens
acggguucgcggcugccgccggacugcggc

SEQ ID NO: 408395 - RNA, 32 nt, Homo Sapiens
ugucuugacaccacugaugucgagugucuggg

SEQ ID NO: 408396 - RNA, 32 nt, Homo Sapiens
agagggggugccgcacacuuugaaacaaccag

SEQ ID NO: 408397 - RNA, 32 nt, Homo Sapiens
gcugagaggagcugcgcgugcgcgaacaugua

SEQ ID NO: 408398 - RNA, 32 nt, Homo Sapiens
cccccgccaacccaccagcaguguauuuauug

SEQ ID NO: 408399 - RNA, 32 nt, Homo Sapiens
ccaacacugcacccuucugcccugccccccuc

SEQ ID NO: 408400 - RNA, 32 nt, Homo Sapiens
uucauucuucacuuucuuucugcuuuuacaaa

SEQ ID NO: 408401 - RNA, 32 nt, Homo Sapiens
acccagcugcccguaugaccgcgccgggcgcc

SEQ ID NO: 408402 - RNA, 32 nt, Homo Sapiens
ccuggaagggaaggggggcuuuaaacuaccuc

SEQ ID NO: 408403 - RNA, 32 nt, Homo Sapiens
gggcggcggucuccgacucaagacccuggggc

SEQ ID NO: 408404 - RNA, 32 nt, Homo Sapiens
aggacgccacugcccugucgccccgccugugc

SEQ ID NO: 408405 - RNA, 31 nt, Homo Sapiens
gaaccaaaacuccccaccugagcugagccca

SEQ ID NO: 408406 - RNA, 32 nt, Homo Sapiens
gagccagcccggugcgccccuccaccuccugc

SEQ ID NO: 408407 - RNA, 32 nt, Homo Sapiens
cuaauuugccuuugccugggguguucagcuug

SEQ ID NO: 408408 - RNA, 32 nt, Homo Sapiens
ccucgggcggguugggguuuguccucagugca

SEQ ID NO: 408409 - RNA, 32 nt, Homo Sapiens
cagaggcggugggacagccuggccacagaggg

SEQ ID NO: 408410 - RNA, 32 nt, Homo Sapiens
uuuauuaacagcaacuaaaauuuuauauauug

SEQ ID NO: 408411 - RNA, 32 nt, Homo Sapiens
cuguuuucaauccugguaauauuaggggcacu

SEQ ID NO: 408412 - RNA, 32 nt, Homo Sapiens
ggaagggccccauaggcagagccccagggcag

SEQ ID NO: 408413 - RNA, 32 nt, Homo Sapiens
guauacuuguuugggacauuuuagucacugaa

SEQ ID NO: 408414 - RNA, 32 nt, Homo Sapiens
ugcucucuccccuguuuuuuggugagaaccac

SEQ ID NO: 408415 - RNA, 32 nt, Homo Sapiens
cucacuuuggcccuucuccacccaucccaacc

SEQ ID NO: 408416 - RNA, 32 nt, Homo Sapiens
aaaaggcauuguucucucaauugggagcgccu

SEQ ID NO: 408417 - RNA, 32 nt, Homo Sapiens
uuuacauacugaaguccuaaauuuauauuaga

SEQ ID NO: 408418 - RNA, 32 nt, Homo Sapiens
cggccauccccacuuccuccucuaccccaaca

SEQ ID NO: 408419 - RNA, 32 nt, Homo Sapiens
acgauccggccgcugcacgcagggcgggaggc

SEQ ID NO: 408420 - RNA, 32 nt, Homo Sapiens
gagauuccuucuggcuggucuuucuccuugac

SEQ ID NO: 408421 - RNA, 32 nt, Homo Sapiens
aucugacauuuggggauucacugcaugaaguu

SEQ ID NO: 408422 - RNA, 32 nt, Homo Sapiens
ucaugauuccgggcaguuuucauuuuacugug

SEQ ID NO: 408423 - RNA, 32 nt, Homo Sapiens
gcuuaggacaaaccucucugaugaaggucagc

SEQ ID NO: 408424 - RNA, 32 nt, Homo Sapiens
ccacuuggcaguggggcugcugcaagcucaga

SEQ ID NO: 408425 - RNA, 32 nt, Homo Sapiens
gcgcgucgggccgcagcacgccgcuguucgga

SEQ ID NO: 408426 - RNA, 32 nt, Homo Sapiens
cuucccauggguggagguggcccaggugguca

SEQ ID NO: 408427 - RNA, 32 nt, Homo Sapiens
ggaaauauuuucaggaaguuuuucucaaccua

SEQ ID NO: 408428 - RNA, 32 nt, Homo Sapiens
cuuuuugccuugucuggcauguuuguuuuaaa

SEQ ID NO: 408429 - RNA, 32 nt, Homo Sapiens
augcugcuuuccccuguggggaucucaggggc

SEQ ID NO: 408430 - RNA, 32 nt, Homo Sapiens
gcagucucggcucgcugcaaccucugacuccc

SEQ ID NO: 408431 - RNA, 32 nt, Homo Sapiens
auuguaacaucugacaccauguagaagcuaaa

SEQ ID NO: 408432 - RNA, 32 nt, Homo Sapiens
acuuaauuaaucagccggcagcuccgucgauc

SEQ ID NO: 408433 - RNA, 32 nt, Homo Sapiens
ugcuagaagcacgauccgccaaugcaccccca

SEQ ID NO: 408434 - RNA, 32 nt, Homo Sapiens
aagccugaugguuugucuuauuucauucauac

SEQ ID NO: 408435 - RNA, 32 nt, Homo Sapiens
gacgugugagguggcggccuggugcccggugg

SEQ ID NO: 408436 - RNA, 32 nt, Homo Sapiens
uguugaaagcagaaauuaagauaauaauugag

SEQ ID NO: 408437 - RNA, 32 nt, Homo Sapiens
aagaaagagcaaaaagcuguguguuuuagaaa

SEQ ID NO: 408438 - RNA, 32 nt, Homo Sapiens
cuacagguccucccggcccggcccgaacaugc

SEQ ID NO: 408439 - RNA, 32 nt, Homo Sapiens
ugcaagagaauauuagugguagcuuuagaaga

SEQ ID NO: 408440 - RNA, 32 nt, Homo Sapiens
uaauaguggcuuucauuucuuauuaaccaaau

SEQ ID NO: 408441 - RNA, 32 nt, Homo Sapiens
ccccuuugcuccagcccugcggccgucccuuu

SEQ ID NO: 408442 - RNA, 32 nt, Homo Sapiens
acaaaagugacagagggaaaacgcuucacuca

SEQ ID NO: 408443 - RNA, 32 nt, Homo Sapiens
uaucuccaguguuacuucauggucuggguaga

SEQ ID NO: 408444 - RNA, 32 nt, Homo Sapiens
agagcugggcccuggaggacaacgcgguccuc

SEQ ID NO: 408445 - RNA, 32 nt, Homo Sapiens
gaggcccccagcuggaagugccuuguugccuc

SEQ ID NO: 408446 - RNA, 32 nt, Homo Sapiens
ggaggggaaaggcugccgaggacccuccccac

SEQ ID NO: 408447 - RNA, 32 nt, Homo Sapiens
gguggauucacuuagcucuccuccccuuuuag

SEQ ID NO: 408448 - RNA, 28 nt, Homo Sapiens
aagaaaguggcuaccaaccaggguccca

SEQ ID NO: 408449 - RNA, 32 nt, Homo Sapiens
cucauggggcccuccugggcacugggugaccu

SEQ ID NO: 408450 - RNA, 32 nt, Homo Sapiens
agcuuuaaagaccccugagacucuaggacucg

SEQ ID NO: 408451 - RNA, 32 nt, Homo Sapiens
ugcccagucucagucagguaugucuuuaucag

SEQ ID NO: 408452 - RNA, 32 nt, Homo Sapiens
gugugagucccaugugcuuggugggaggcgcu

SEQ ID NO: 408453 - RNA, 32 nt, Homo Sapiens
gcccugggcagacagcccccagaugcgcgugg

SEQ ID NO: 408454 - RNA, 32 nt, Homo Sapiens
ugaaggccaaggaggaggagcucaggaaagcc

SEQ ID NO: 408455 - RNA, 32 nt, Homo Sapiens
agccuucaggagccccgugcgucugccgccac

SEQ ID NO: 408456 - RNA, 32 nt, Homo Sapiens
ugcaugcaauuagcucccuccuccucaccuac

SEQ ID NO: 408457 - RNA, 32 nt, Homo Sapiens
accucaaccccucaucaucuccaggaaaguuu

SEQ ID NO: 408458 - RNA, 32 nt, Homo Sapiens
aaguuugcacagucaucugacuucugaucaag

SEQ ID NO: 408459 - RNA, 32 nt, Homo Sapiens
cuaaaauagauauuaagcugcuguuguaaagu

SEQ ID NO: 408460 - RNA, 32 nt, Homo Sapiens
caacaaauaaauagaaagcaaaaagaucuggg

SEQ ID NO: 408461 - RNA, 32 nt, Homo Sapiens
uuuaugccuccauugccccaguucuuaucugu

SEQ ID NO: 408462 - RNA, 32 nt, Homo Sapiens
agccgggucgucgugcggcugcggcucugagc

SEQ ID NO: 408463 - RNA, 32 nt, Homo Sapiens
cccucccugccagcccgcggaccucgcaugcu

SEQ ID NO: 408464 - RNA, 32 nt, Homo Sapiens
uguuauguaucaaagacuguugaaagagacag

SEQ ID NO: 408465 - RNA, 32 nt, Homo Sapiens
agaggcagugaacaccacagcuucuccccagc

SEQ ID NO: 408466 - RNA, 31 nt, Homo Sapiens
auuuguaacaaguucccaggauauguugauu

SEQ ID NO: 408467 - RNA, 32 nt, Homo Sapiens
cucaucuucuaaaaucugugcauuuccauggu

SEQ ID NO: 408468 - RNA, 32 nt, Homo Sapiens
cucccacaugaccuuauuuuaccuguucucuc

SEQ ID NO: 408469 - RNA, 32 nt, Homo Sapiens
caacgggagcagccaauccuaacccagaucaa

SEQ ID NO: 408470 - RNA, 32 nt, Homo Sapiens
uggucacgauuuucuucaguguuuaugauuau

SEQ ID NO: 408471 - RNA, 32 nt, Homo Sapiens
aacucuaaauacuuuuuaaaucuuaaaaauau

SEQ ID NO: 408472 - RNA, 32 nt, Homo Sapiens
ggaauucaaagauaaggcaacaaaaugguuua

SEQ ID NO: 408473 - RNA, 32 nt, Homo Sapiens
gguuucaccauguugaccaggcuggucucaaa

SEQ ID NO: 408474 - RNA, 32 nt, Homo Sapiens
agauuagcacugggcaucuguggucaucucca

SEQ ID NO: 408475 - RNA, 32 nt, Homo Sapiens
cauuuuacuuccauuuuaauucucauaacagc

SEQ ID NO: 408476 - RNA, 32 nt, Homo Sapiens
gagggccugccagcuccguccucccugccgag

SEQ ID NO: 408477 - RNA, 32 nt, Homo Sapiens
gccgaguugggucuccgugguucaggccggcu

SEQ ID NO: 408478 - RNA, 32 nt, Homo Sapiens
gugguggggugggaaacaugggaucucacccc

SEQ ID NO: 408479 - RNA, 32 nt, Homo Sapiens
aggaacaaacagggcugccuucuggccuugua

SEQ ID NO: 408480 - RNA, 32 nt, Homo Sapiens
uuuucacauucauacuaacaaguuuuguucca

SEQ ID NO: 408481 - RNA, 32 nt, Homo Sapiens
ccgaguggccccgcagcguccaggaggcgccc

SEQ ID NO: 408482 - RNA, 32 nt, Homo Sapiens
augacaucaucucuguuccccauccccaguag

SEQ ID NO: 408483 - RNA, 32 nt, Homo Sapiens
ucaugggcagugcccuggccugaggcccacaa

SEQ ID NO: 408484 - RNA, 32 nt, Homo Sapiens
cccaggcagcgaagcagggcccugcugccccc

SEQ ID NO: 408485 - RNA, 32 nt, Homo Sapiens
uaaagaacgagaacaaggaagucauuggcuag

SEQ ID NO: 408486 - RNA, 32 nt, Homo Sapiens
gcagagucagugcucgggaucccgggcccagc

SEQ ID NO: 408487 - RNA, 32 nt, Homo Sapiens
uugcucuucuaccucccuaguuaguggaaauu

SEQ ID NO: 408488 - RNA, 32 nt, Homo Sapiens
uccuaacuguucucaagccugauccaucagcu

SEQ ID NO: 408489 - RNA, 32 nt, Homo Sapiens
uaaaacuccacacaaucuuguuagcaacagug

SEQ ID NO: 408490 - RNA, 32 nt, Homo Sapiens
aauguuagcaauaaguuuuuuucuucuguaau

SEQ ID NO: 408491 - RNA, 32 nt, Homo Sapiens
aauucuguacccaaagcagaauccccagcaug

SEQ ID NO: 408492 - RNA, 32 nt, Homo Sapiens
ccuauccaugagcauggaauguuuuuccauuu

SEQ ID NO: 408493 - RNA, 32 nt, Homo Sapiens
guauauuaaaauuuaucuuuuaaggaaacaau

SEQ ID NO: 408494 - RNA, 32 nt, Homo Sapiens
aggugggcaaaucaccugaggucaggaguucc

SEQ ID NO: 408495 - RNA, 32 nt, Homo Sapiens
cuguauucauucuguuguuugggauagaaaaa

SEQ ID NO: 408496 - RNA, 32 nt, Homo Sapiens
uuuccuguuuucaugucuuugcuucaucugga

SEQ ID NO: 408497 - RNA, 32 nt, Homo Sapiens
ggucccauccccuucccuccccccugcccuaa

SEQ ID NO: 408498 - RNA, 32 nt, Homo Sapiens
aauggcucacaccuauaaucccagcacuuugg

SEQ ID NO: 408499 - RNA, 32 nt, Homo Sapiens
gcuuguagacucuguguucucccuuuguccuc

SEQ ID NO: 408500 - RNA, 32 nt, Homo Sapiens
cucucuguagccagacagcucaauagccuagg

SEQ ID NO: 408501 - RNA, 31 nt, Homo Sapiens
uugcccacacggagaaacguacuaucuaaua

SEQ ID NO: 408502 - RNA, 32 nt, Homo Sapiens
guuuuguugucauggaaacuucggggcuggug

SEQ ID NO: 408503 - RNA, 32 nt, Homo Sapiens
cuuuucagcuuugcaccuggaacucuguagua

SEQ ID NO: 408504 - RNA, 32 nt, Homo Sapiens
ggccaggccugguuugaagaccaucugaggga

SEQ ID NO: 408505 - RNA, 32 nt, Homo Sapiens
uaaucauccaaugcucaagaaacaacuucuac

SEQ ID NO: 408506 - RNA, 32 nt, Homo Sapiens
gauguauuaaacaaacaaaaacccuucaaaaa

SEQ ID NO: 408507 - RNA, 32 nt, Homo Sapiens
ggucucaaacuccugaccucaggcaaucugcc

SEQ ID NO: 408508 - RNA, 32 nt, Homo Sapiens
ucugggaggaugacgcagaugucugcugcaga

SEQ ID NO: 408509 - RNA, 32 nt, Homo Sapiens
ccucugcccagcugcugccccgucugggaagu

SEQ ID NO: 408510 - RNA, 32 nt, Homo Sapiens
aaugauacggcaauuucuuuagaaaugaaaua

SEQ ID NO: 408511 - RNA, 32 nt, Homo Sapiens
cagaauggugccuguggcaugaugccagcuuu

SEQ ID NO: 408512 - RNA, 32 nt, Homo Sapiens
cggcggagccgcgccgcagccgggccagcuuc

SEQ ID NO: 408513 - RNA, 32 nt, Homo Sapiens
gacucggugcccucggccccagccgggcuccg

SEQ ID NO: 408514 - RNA, 32 nt, Homo Sapiens
ccggagagcgaagggcgggcgggucccggagc

SEQ ID NO: 408515 - RNA, 28 nt, Homo Sapiens
gccagguugguuggaccaagggaaagca

SEQ ID NO: 408516 - RNA, 32 nt, Homo Sapiens
gcaggagccgacggggcccgaccaggauggug

SEQ ID NO: 408517 - RNA, 32 nt, Homo Sapiens
ccaggugaguggcauccaggugggugguaccg

SEQ ID NO: 408518 - RNA, 32 nt, Homo Sapiens
auaccaaaaucuggcagacacacacacacaca

SEQ ID NO: 408519 - RNA, 32 nt, Homo Sapiens
ugaucaauacaauaacaaaccuuuuuccuuug

SEQ ID NO: 408520 - RNA, 32 nt, Homo Sapiens
acgccgacgccuuuuugacccucgcugugccc

SEQ ID NO: 408521 - RNA, 32 nt, Homo Sapiens
ugcgcucggcccggcccgcgcaggcggcgagu

SEQ ID NO: 408522 - RNA, 32 nt, Homo Sapiens
acaaaaucaucauauuaauauuugaguuauuu

SEQ ID NO: 408523 - RNA, 32 nt, Homo Sapiens
cauuucugucuaaagaagaugugaguccuaag

SEQ ID NO: 408524 - RNA, 32 nt, Homo Sapiens
uuaaaugugaauuuuuuaaauuuugcuucuua

SEQ ID NO: 408525 - RNA, 32 nt, Homo Sapiens
cgauaauuuaugucucguugaaauaauuuugu

SEQ ID NO: 408526 - RNA, 32 nt, Homo Sapiens
caagagaguaucaugaaguaaacuacaaacuu

SEQ ID NO: 408527 - RNA, 32 nt, Homo Sapiens
ccuggaauguacuggcugggguaggccucagu

SEQ ID NO: 408528 - RNA, 32 nt, Homo Sapiens
ucaggacauuugcacugacuguuuccucugcc

SEQ ID NO: 408529 - RNA, 32 nt, Homo Sapiens
acagagccaugccccggcaccucugcccugug

SEQ ID NO: 408530 - RNA, 32 nt, Homo Sapiens
aucuggccuucauccuucucccuuuauugucc

SEQ ID NO: 408531 - RNA, 32 nt, Homo Sapiens
ccgacccgagcuccaguaguccgcccgcuggu

SEQ ID NO: 408532 - RNA, 32 nt, Homo Sapiens
aaucagguuacaauuuucaaggguaaacaaac

SEQ ID NO: 408533 - RNA, 32 nt, Homo Sapiens
gcaauugugaaugggauugcauuccugauuug

SEQ ID NO: 408534 - RNA, 32 nt, Homo Sapiens
agaccugcaauaauccagaauggcuacucuga

SEQ ID NO: 408535 - RNA, 32 nt, Homo Sapiens
accgccucgugccagcagccucgcacaggccc

SEQ ID NO: 408536 - RNA, 31 nt, Homo Sapiens
acuguuuugggaggaaaauagauuuuuauug

SEQ ID NO: 408537 - RNA, 32 nt, Homo Sapiens
cucauuaacccuuuagagacaagcuuugcccc

SEQ ID NO: 408538 - RNA, 32 nt, Homo Sapiens
ggucugccgggcgaucguccuccgaggcuggc

SEQ ID NO: 408539 - RNA, 32 nt, Homo Sapiens
auaaaaugaaggauuaauuuccaucaggaauc

SEQ ID NO: 408540 - RNA, 32 nt, Homo Sapiens
gggcgcgugcgcgggcggucgcuaccugcggc

SEQ ID NO: 408541 - RNA, 32 nt, Homo Sapiens
ggggcuccucauuggggugcuuggggcgcacc

SEQ ID NO: 408542 - RNA, 30 nt, Homo Sapiens
cccaggggcaggcggccccuccuggcuucu

SEQ ID NO: 408543 - RNA, 32 nt, Homo Sapiens
ccuucucgcucauaaugacacccagcuccuuu

SEQ ID NO: 408544 - RNA, 32 nt, Homo Sapiens
gaugggcugagggaguggagggggaccucaga

SEQ ID NO: 408545 - RNA, 32 nt, Homo Sapiens
uuucucaaauaccaacucuuggcuauguuaaa

SEQ ID NO: 408546 - RNA, 32 nt, Homo Sapiens
ggaggaagaccuggggugggggugguacaggg

SEQ ID NO: 408547 - RNA, 32 nt, Homo Sapiens
gcucuuguggaggacuugggagaaggaugggg

SEQ ID NO: 408548 - RNA, 32 nt, Homo Sapiens
gaagggcagagcuucuuggaugaugauggacg

SEQ ID NO: 408549 - RNA, 32 nt, Homo Sapiens
cucccccaaacacacacacacacacacacaca

SEQ ID NO: 408550 - RNA, 32 nt, Homo Sapiens
gacaauggaaauguauauagaacucuuaguuc

SEQ ID NO: 408551 - RNA, 32 nt, Homo Sapiens
auagggagaaaucuugggccugagucaaugga

SEQ ID NO: 408552 - RNA, 32 nt, Homo Sapiens
acagauccaaccccaaggaacucugcuucuac

SEQ ID NO: 408553 - RNA, 32 nt, Homo Sapiens
uucucucugcuaaaccuacuggcaacgcccaa

SEQ ID NO: 408554 - RNA, 32 nt, Homo Sapiens
cugcugugugccugcaccaccccacugccuuc

SEQ ID NO: 408555 - RNA, 32 nt, Homo Sapiens
aauacauccaaauauggcuguccuggauggga

SEQ ID NO: 408556 - RNA, 32 nt, Homo Sapiens
aggcagucaggaggccaaaugucugauucuuu

SEQ ID NO: 408557 - RNA, 32 nt, Homo Sapiens
caguugucauauacaaacaaaauacacauguu

SEQ ID NO: 408558 - RNA, 32 nt, Homo Sapiens
acaucuggcagccccaggccugguccugggug

SEQ ID NO: 408559 - RNA, 32 nt, Homo Sapiens
caugccaggcgaagaggaagggcaagguggcu

SEQ ID NO: 408560 - RNA, 32 nt, Homo Sapiens
gggcgggggcagcugugucaucuuucuggggc

SEQ ID NO: 408561 - RNA, 31 nt, Homo Sapiens
ggaaaguaaaaauaaagccaaauaacuuccc

SEQ ID NO: 408562 - RNA, 32 nt, Homo Sapiens
agagcaggucuggauuaccugugcaggugggc

SEQ ID NO: 408563 - RNA, 32 nt, Homo Sapiens
ccauugucacuaacguccggcuccaucggcac

SEQ ID NO: 408564 - RNA, 32 nt, Homo Sapiens
caaugaccccuacagggacagacuuuauacug

SEQ ID NO: 408565 - RNA, 32 nt, Homo Sapiens
uuaauccugccacuguaaucucuucuaauuug

SEQ ID NO: 408566 - RNA, 31 nt, Homo Sapiens
accuggggggcgguggcggucaaugccgggu

SEQ ID NO: 408567 - RNA, 32 nt, Homo Sapiens
gucucuacagaaaaaauuuaaaaacagaucag

SEQ ID NO: 408568 - RNA, 32 nt, Homo Sapiens
augguauaauuuuuuuuuuuuaauaucuggag

SEQ ID NO: 408569 - RNA, 32 nt, Homo Sapiens
ggucguuuccaagucacccguuuuggaugugc

SEQ ID NO: 408570 - RNA, 32 nt, Homo Sapiens
gaccuuguauauauuuaauuucagguaaggaa

SEQ ID NO: 408571 - RNA, 32 nt, Homo Sapiens
gggcgccacagcugcgagcccggccccugcug

SEQ ID NO: 408572 - RNA, 32 nt, Homo Sapiens
gcugggcugggggacuccaugcgggggcgaug

SEQ ID NO: 408573 - RNA, 32 nt, Homo Sapiens
uucaugaauuaugugaauaauuuuuuaaagaa

SEQ ID NO: 408574 - RNA, 32 nt, Homo Sapiens
aguacuccccucggggauaugacacaugccca

SEQ ID NO: 408575 - RNA, 32 nt, Homo Sapiens
uuuagaauguuuacauuuacuaaggugugcug

SEQ ID NO: 408576 - RNA, 32 nt, Homo Sapiens
gccuagcucgguuccgccuccuccucgcgcgg

SEQ ID NO: 408577 - RNA, 32 nt, Homo Sapiens
gacuuguccaaguuuacacacgacacuaaucu

SEQ ID NO: 408578 - RNA, 32 nt, Homo Sapiens
agaaggauccccaguacccagcccucugccug

SEQ ID NO: 408579 - RNA, 29 nt, Homo Sapiens
aucaguugaugucagaguuuaacgggcag

SEQ ID NO: 408580 - RNA, 32 nt, Homo Sapiens
guaccuguuuccuacagacacccaucgggugg

SEQ ID NO: 408581 - RNA, 32 nt, Homo Sapiens
acugaggcaggguggggacacccacgggugag

SEQ ID NO: 408582 - RNA, 32 nt, Homo Sapiens
guuuuuguuucauaaucacuaacuuuaaacca

SEQ ID NO: 408583 - RNA, 32 nt, Homo Sapiens
aaaagcugccuccugcccuuuuuggcaagcua

SEQ ID NO: 408584 - RNA, 32 nt, Homo Sapiens
ccgccacccuccacccucccccggcagggcgg

SEQ ID NO: 408585 - RNA, 32 nt, Homo Sapiens
gaggacauacuuuuccagccucauggguaugg

SEQ ID NO: 408586 - RNA, 32 nt, Homo Sapiens
aacaguauacccagcuaacaaaccugcccaug

SEQ ID NO: 408587 - RNA, 32 nt, Homo Sapiens
caagagcccgucugcuccugcgaggcuaugag

SEQ ID NO: 408588 - RNA, 32 nt, Homo Sapiens
agaaugaaaguauccagaauugccagaaguca

SEQ ID NO: 408589 - RNA, 32 nt, Homo Sapiens
guaccuuuuacuguugauacaaauuguaucuu

SEQ ID NO: 408590 - RNA, 32 nt, Homo Sapiens
ugucugagccugugaauccagauuucagugca

SEQ ID NO: 408591 - RNA, 32 nt, Homo Sapiens
acacagggaggcauccuuggggcuuggcccca

SEQ ID NO: 408592 - RNA, 32 nt, Homo Sapiens
gugacaccagugguucgucagcuccugugcau

SEQ ID NO: 408593 - RNA, 32 nt, Homo Sapiens
ugcugcuucuugcuucccgucccccagcccca

SEQ ID NO: 408594 - RNA, 32 nt, Homo Sapiens
cuaaagguauuugauuugaucuguuagcuucc

SEQ ID NO: 408595 - RNA, 32 nt, Homo Sapiens
gauaguccacucuguaugcccagccgcuuuca

SEQ ID NO: 408596 - RNA, 32 nt, Homo Sapiens
caaaccuggaaaaaaaucaugaaccaucugac

SEQ ID NO: 408597 - RNA, 32 nt, Homo Sapiens
ccuguccaaagccacacugaaaacagaggcag

SEQ ID NO: 408598 - RNA, 32 nt, Homo Sapiens
cagaguuuacuuuggggagauuauuauacaag

SEQ ID NO: 408599 - RNA, 32 nt, Homo Sapiens
uuuauuuaucauacaggcuuugaaacauuaag

SEQ ID NO: 408600 - RNA, 32 nt, Homo Sapiens
uguauucagggguucagauaagguaauguuuu

SEQ ID NO: 408601 - RNA, 32 nt, Homo Sapiens
cauauugccacugugcuauccuugaacuacca

SEQ ID NO: 408602 - RNA, 32 nt, Homo Sapiens
cuugacagaauuccaaaccaacuuggugccgu

SEQ ID NO: 408603 - RNA, 31 nt, Homo Sapiens
auaccucauuugaaacucagccuaguaagga

SEQ ID NO: 408604 - RNA, 32 nt, Homo Sapiens
cggcguugagcugugcagcugcgcccugggcu

SEQ ID NO: 408605 - RNA, 32 nt, Homo Sapiens
acccccaaagacuuccugaggacccccuaggc

SEQ ID NO: 408606 - RNA, 32 nt, Homo Sapiens
accaaacaacaggcccuugggugaaaggugcu

SEQ ID NO: 408607 - RNA, 32 nt, Homo Sapiens
gucucagugcauuuuguuuuccugcuuccuac

SEQ ID NO: 408608 - RNA, 27 nt, Homo Sapiens
guaagaauaaagcagcauuugaaaucg

SEQ ID NO: 408609 - RNA, 32 nt, Homo Sapiens
guuucacgugacucagcagugcccgccgccgu

SEQ ID NO: 408610 - RNA, 30 nt, Homo Sapiens
cccuggggcaggcgucgugucucaggcggg

SEQ ID NO: 408611 - RNA, 32 nt, Homo Sapiens
ucacggugcacccaacaagaccugcaggugca

SEQ ID NO: 408612 - RNA, 32 nt, Homo Sapiens
uccaaccccuuaaaauucauagaggagcaaac

SEQ ID NO: 408613 - RNA, 32 nt, Homo Sapiens
gauccugcauuucuaacaagcucccagguaag

SEQ ID NO: 408614 - RNA, 30 nt, Homo Sapiens
ucacugagagguggcgucuauguuccuccc

SEQ ID NO: 408615 - RNA, 32 nt, Homo Sapiens
accugaaggguggaugugcuggagggguggcc

SEQ ID NO: 408616 - RNA, 32 nt, Homo Sapiens
ccagugaggcucggcccggggaaagugaaagu

SEQ ID NO: 408617 - RNA, 32 nt, Homo Sapiens
ggccugcccuaccccaccaucagcugguucca

SEQ ID NO: 408618 - RNA, 32 nt, Homo Sapiens
ugugaacaaaaauugagacauuuacauuuucu

SEQ ID NO: 408619 - RNA, 32 nt, Homo Sapiens
guuagguuacagcuggagguguguauauauac

SEQ ID NO: 408620 - RNA, 32 nt, Homo Sapiens
uugcccaggcuggucucgaacuucugagcucg

SEQ ID NO: 408621 - RNA, 32 nt, Homo Sapiens
cauugugagguucuacuagugaaauauuugaa

SEQ ID NO: 408622 - RNA, 31 nt, Homo Sapiens
agcugcaggcacugcagccucgggagaaguu

SEQ ID NO: 408623 - RNA, 32 nt, Homo Sapiens
ccuuuuauauugcaucugcuguuacccaguga

SEQ ID NO: 408624 - RNA, 28 nt, Homo Sapiens
aucaggaaagauuagaaaaggaacccaa

SEQ ID NO: 408625 - RNA, 30 nt, Homo Sapiens
ggcggguugggguccgcggguccucacacc

SEQ ID NO: 408626 - RNA, 32 nt, Homo Sapiens
uuugcaaaacaaaacagcuguauguaaucauu

SEQ ID NO: 408627 - RNA, 32 nt, Homo Sapiens
augcugccuggacacacgcagauaugcugucu

SEQ ID NO: 408628 - RNA, 32 nt, Homo Sapiens
gcacagaugguaguuuuacugguguugcagua

SEQ ID NO: 408629 - RNA, 32 nt, Homo Sapiens
uugguggagacgggguuucgcuguguuggccg

SEQ ID NO: 408630 - RNA, 32 nt, Homo Sapiens
ucccuuucuucuauccauguguacucaguguu

SEQ ID NO: 408631 - RNA, 32 nt, Homo Sapiens
uucugugauaaaauguaauuucaacuauuuug

SEQ ID NO: 408632 - RNA, 32 nt, Homo Sapiens
cuccagcgggcggggcugcugcuacucuuggg

SEQ ID NO: 408633 - RNA, 32 nt, Homo Sapiens
aaucucuacccuuccccaacccuccauaaaaa

SEQ ID NO: 408634 - RNA, 32 nt, Homo Sapiens
gcauggaggaggagggaggcgcugcugguguu

SEQ ID NO: 408635 - RNA, 32 nt, Homo Sapiens
gcaugaggcugaaguggcaacccuggggucuu

SEQ ID NO: 408636 - RNA, 27 nt, Homo Sapiens
cuauuuuccuucuuuagucaauaugac

SEQ ID NO: 408637 - RNA, 32 nt, Homo Sapiens
ugcaaagacacuaguuugauaauauauacugu

SEQ ID NO: 408638 - RNA, 32 nt, Homo Sapiens
gcugcuauuuuuguuuuagauaauuggccagu

SEQ ID NO: 408639 - RNA, 32 nt, Homo Sapiens
aaaagaaggggagaagucagcuacucuaguuc

SEQ ID NO: 408640 - RNA, 32 nt, Homo Sapiens
uauucucuguauauuucugcuacauuguuucu

SEQ ID NO: 408641 - RNA, 32 nt, Homo Sapiens
ccuaaacagcucauggcuucucaggaagcuuu

SEQ ID NO: 408642 - RNA, 32 nt, Homo Sapiens
cgucugccaucggcgccauccugcaaucuaag

SEQ ID NO: 408643 - RNA, 32 nt, Homo Sapiens
ccaggcaccuuggccgccggcgcacggacgcg

SEQ ID NO: 408644 - RNA, 32 nt, Homo Sapiens
uguccaaaaaaguaagaaaaugaauaaaauuu

SEQ ID NO: 408645 - RNA, 32 nt, Homo Sapiens
uguuugacgcggacuaaaucauuuucauuuaa

SEQ ID NO: 408646 - RNA, 32 nt, Homo Sapiens
uccaaacagagcaacaacaaguacgcggccag

SEQ ID NO: 408647 - RNA, 32 nt, Homo Sapiens
acggcccauggcgccgccagccgcccgccucg

SEQ ID NO: 408648 - RNA, 32 nt, Homo Sapiens
cuggaccuuuggguucuuucuggggggauauu

SEQ ID NO: 408649 - RNA, 32 nt, Homo Sapiens
uccagugacggagccgcccggccgacagcccc

SEQ ID NO: 408650 - RNA, 32 nt, Homo Sapiens
guuguacugaacaauugaaacugcaugcagcc

SEQ ID NO: 408651 - RNA, 32 nt, Homo Sapiens
uuuuuuauucugcaauuuuuuauuuuuguucu

SEQ ID NO: 408652 - RNA, 32 nt, Homo Sapiens
cccgugaggaggaaaagguguguccgcugcca

SEQ ID NO: 408653 - RNA, 32 nt, Homo Sapiens
agccucuccuccccgccgcccuccaccccugc

SEQ ID NO: 408654 - RNA, 32 nt, Homo Sapiens
cuuuggguuuugguuuaccauucugcaaaaug

SEQ ID NO: 408655 - RNA, 32 nt, Homo Sapiens
aggcucugauguauuucuuuuaguaguuucua

SEQ ID NO: 408656 - RNA, 32 nt, Homo Sapiens
ucacagugggagagguuucaccaccgcauucu

SEQ ID NO: 408657 - RNA, 32 nt, Homo Sapiens
ucaaugaaaaccucaugguuuugcuggcuguu

SEQ ID NO: 408658 - RNA, 32 nt, Homo Sapiens
cccucucccuuccuuuuaaaucuccuggggcu

SEQ ID NO: 408659 - RNA, 32 nt, Homo Sapiens
uugaggcccucccucagcucucuguggguagg

SEQ ID NO: 408660 - RNA, 32 nt, Homo Sapiens
cggacgguagccgugccagagcccggggcgcu

SEQ ID NO: 408661 - RNA, 32 nt, Homo Sapiens
guaacuacauauagaacuguuacaaugguagc

SEQ ID NO: 408662 - RNA, 32 nt, Homo Sapiens
acccuccgcugccgccgccgccgcccccucag

SEQ ID NO: 408663 - RNA, 32 nt, Homo Sapiens
uuauucccuggccccuuguauuuuccuuaucu

SEQ ID NO: 408664 - RNA, 32 nt, Homo Sapiens
uguagauuaagacuuagaagauauaucaacca

SEQ ID NO: 408665 - RNA, 32 nt, Homo Sapiens
ucuauacuccaggucuuaaaauuguggauuaa

SEQ ID NO: 408666 - RNA, 32 nt, Homo Sapiens
uguuuuuuacuuugggaacugauuauaacacc

SEQ ID NO: 408667 - RNA, 32 nt, Homo Sapiens
aaacuugucaauuuagaguuuauuuuucuaug

SEQ ID NO: 408668 - RNA, 32 nt, Homo Sapiens
cccagagcucgggucuccggggaccgagccuu

SEQ ID NO: 408669 - RNA, 32 nt, Homo Sapiens
gcagauggcccauuuggagaucuugacaaagc

SEQ ID NO: 408670 - RNA, 32 nt, Homo Sapiens
auugcuuagaaaggagcagagaaggacgggag

SEQ ID NO: 408671 - RNA, 32 nt, Homo Sapiens
aaguauuuucuuuuuagaagaucuuauaaguu

SEQ ID NO: 408672 - RNA, 32 nt, Homo Sapiens
ggccuuucgcaguguuugugucccuggguacu

SEQ ID NO: 408673 - RNA, 32 nt, Homo Sapiens
ucuucuuauuuaaugugguuuauuuugggcuc

SEQ ID NO: 408674 - RNA, 32 nt, Homo Sapiens
ugcuguagacauuugcuaugagcuggggaugu

SEQ ID NO: 408675 - RNA, 32 nt, Homo Sapiens
cguggccgggcuggggggcacccuggccggac

SEQ ID NO: 408676 - RNA, 32 nt, Homo Sapiens
cuuuauuucgcccccacccccauccccugccu

SEQ ID NO: 408677 - RNA, 32 nt, Homo Sapiens
gcacuaauauauauuucuuccagccuuugauu

SEQ ID NO: 408678 - RNA, 32 nt, Homo Sapiens
agccagguggguggagggagggagaucaugag

SEQ ID NO: 408679 - RNA, 28 nt, Homo Sapiens
gccagcggcggucagccgaggucgagac

SEQ ID NO: 408680 - RNA, 32 nt, Homo Sapiens
gggggaaaacuggauuaacuuaauaagaguau

SEQ ID NO: 408681 - RNA, 31 nt, Homo Sapiens
aaucaacaaagcaaacagagagccuguggga

SEQ ID NO: 408682 - RNA, 32 nt, Homo Sapiens
acuccuucacucuacccuaagaacacagaucu

SEQ ID NO: 408683 - RNA, 32 nt, Homo Sapiens
aaggaacaaagcguuacugaaaagaagguaac

SEQ ID NO: 408684 - RNA, 32 nt, Homo Sapiens
gaauguccacaggccuggccugggggcugugg

SEQ ID NO: 408685 - RNA, 32 nt, Homo Sapiens
ccugccugagcccgggccggccucgggccacc

SEQ ID NO: 408686 - RNA, 32 nt, Homo Sapiens
uuuuagacagcuguaggauauuuuauuucaug

SEQ ID NO: 408687 - RNA, 32 nt, Homo Sapiens
aucaguaaggguuugguccacaugagccaacu

SEQ ID NO: 408688 - RNA, 32 nt, Homo Sapiens
aagucugcagaggaagcuucuaucuucccuuc

SEQ ID NO: 408689 - RNA, 30 nt, Homo Sapiens
ggggcggucugugcuuccugagcagccuca

SEQ ID NO: 408690 - RNA, 32 nt, Homo Sapiens
aaaauagauaaaacagaccagaggcucuccuu

SEQ ID NO: 408691 - RNA, 32 nt, Homo Sapiens
uuuuuauguucacuuuuuuuuauauaguuuaa

SEQ ID NO: 408692 - RNA, 32 nt, Homo Sapiens
ugcaucuguacucacccuguaccacaaacaca

SEQ ID NO: 408693 - RNA, 32 nt, Homo Sapiens
aacuguugcauucacuguuucaacauguguac

SEQ ID NO: 408694 - RNA, 32 nt, Homo Sapiens
gaggagcgcggcacgccgcgcaccauggucca

SEQ ID NO: 408695 - RNA, 32 nt, Homo Sapiens
ccuuuccuccuccuugggccaugcaacgggau

SEQ ID NO: 408696 - RNA, 32 nt, Homo Sapiens
gccgccugacgaaauggaaacacacacagaca

SEQ ID NO: 408697 - RNA, 32 nt, Homo Sapiens
agcugaaaauaauaguucuacugcccgugucu

SEQ ID NO: 408698 - RNA, 32 nt, Homo Sapiens
gaaauaaugaauuaacaaccaauaaaauuaau

SEQ ID NO: 408699 - RNA, 32 nt, Homo Sapiens
gggagaaucaguaauccaagcgaguuacaggu

SEQ ID NO: 408700 - RNA, 32 nt, Homo Sapiens
gugccuggaaaaguagcagacacaacaccagc

SEQ ID NO: 408701 - RNA, 32 nt, Homo Sapiens
ucauuuguggauagcucuguccaucucuguca

SEQ ID NO: 408702 - RNA, 32 nt, Homo Sapiens
uguugucugccagcugggucuagcaucacagg

SEQ ID NO: 408703 - RNA, 32 nt, Homo Sapiens
uuuggguggcagcugggagaacuucucuccca

SEQ ID NO: 408704 - RNA, 32 nt, Homo Sapiens
ccagugcccucccuugaccaucuccuagcauu

SEQ ID NO: 408705 - RNA, 32 nt, Homo Sapiens
uugaaaaagaccacagaagaaaauccugaaag

SEQ ID NO: 408706 - RNA, 32 nt, Homo Sapiens
guagagccaagagcucaugggcccgggugcga

SEQ ID NO: 408707 - RNA, 32 nt, Homo Sapiens
ucuaaaaguagcccucuuucuccuggaucuug

SEQ ID NO: 408708 - RNA, 32 nt, Homo Sapiens
uuugagucauccuggggugccccuggccccca

SEQ ID NO: 408709 - RNA, 32 nt, Homo Sapiens
aggagcccacuucuaaagucauuucaccccuc

SEQ ID NO: 408710 - RNA, 32 nt, Homo Sapiens
acagccgcaucuugucaggcuuucucaagccc

SEQ ID NO: 408711 - RNA, 32 nt, Homo Sapiens
cuucugagugcauggcagccucaugugggaaa

SEQ ID NO: 408712 - RNA, 32 nt, Homo Sapiens
aauaauacagaaaaagaagacaguugaugaau

SEQ ID NO: 408713 - RNA, 32 nt, Homo Sapiens
guguuauagguaacuucaguauauuaugaaca

SEQ ID NO: 408714 - RNA, 32 nt, Homo Sapiens
uguaaacuggacauaacuuaugccaaaagacg

SEQ ID NO: 408715 - RNA, 32 nt, Homo Sapiens
agaucuauauuguaccagaacuauuuauuuca

SEQ ID NO: 408716 - RNA, 32 nt, Homo Sapiens
uguggauuggcaccccacagcccuucaccuuc

SEQ ID NO: 408717 - RNA, 32 nt, Homo Sapiens
uuggacacagagcugcaagcugcgcuggggug

SEQ ID NO: 408718 - RNA, 32 nt, Homo Sapiens
uugggaugcauaauacacaaaggccagggagc

SEQ ID NO: 408719 - RNA, 32 nt, Homo Sapiens
ugaaaaugguauauagguuuccaguaggucaa

SEQ ID NO: 408720 - RNA, 32 nt, Homo Sapiens
auguucccacccaacaaaugugauaagugauu

SEQ ID NO: 408721 - RNA, 32 nt, Homo Sapiens
uauauuuuuuacuaaggugucaccuuauaagc

SEQ ID NO: 408722 - RNA, 32 nt, Homo Sapiens
uguauucaaaaauuaucuauagcuaaguacac

SEQ ID NO: 408723 - RNA, 32 nt, Homo Sapiens
auguguuuauagagauacacacacauauauau

SEQ ID NO: 408724 - RNA, 32 nt, Homo Sapiens
cacaaguaccauuugcgguccaaauacuugag

SEQ ID NO: 408725 - RNA, 32 nt, Homo Sapiens
gaacauggccucagcccagagaagccacugcu

SEQ ID NO: 408726 - RNA, 32 nt, Homo Sapiens
cauuccaaguuguauauuuguuuuccaauaaa

SEQ ID NO: 408727 - RNA, 31 nt, Homo Sapiens
uuaacccaucccucagcaaacgcagcucuuc

SEQ ID NO: 408728 - RNA, 32 nt, Homo Sapiens
ugcuucagggugacgcagaacuauaagcccug

SEQ ID NO: 408729 - RNA, 32 nt, Homo Sapiens
gacgcggcgcugggaggacgcggcggcgcugg

SEQ ID NO: 408730 - RNA, 32 nt, Homo Sapiens
ugaccaagagccccgcauccaaugcacggcgu

SEQ ID NO: 408731 - RNA, 32 nt, Homo Sapiens
ucacacacuccaucagcaaaauguauuugagc

SEQ ID NO: 408732 - RNA, 32 nt, Homo Sapiens
auuuaaugcauucuucaaguuuugcucugaaa

SEQ ID NO: 408733 - RNA, 32 nt, Homo Sapiens
aggcuaccaaaggagcguuucacucuuaagug

SEQ ID NO: 408734 - RNA, 32 nt, Homo Sapiens
uauauguauauauuuuguaccaaaaaagagug

SEQ ID NO: 408735 - RNA, 32 nt, Homo Sapiens
uucaagcacugucuuccaucugcaucuuccag

SEQ ID NO: 408736 - RNA, 32 nt, Homo Sapiens
cccugaaaguagggguggcggcggcggcgcug

SEQ ID NO: 408737 - RNA, 32 nt, Homo Sapiens
auguaaaauaauuuauacaaguaauauaaacu

SEQ ID NO: 408738 - RNA, 32 nt, Homo Sapiens
uucccacgcaagaugugacaauguuugagaaa

SEQ ID NO: 408739 - RNA, 32 nt, Homo Sapiens
cgugcgagaaugccucugcccuggagccuugc

SEQ ID NO: 408740 - RNA, 32 nt, Homo Sapiens
uccuagggaaguccugcguggagucuugccuc

SEQ ID NO: 408741 - RNA, 32 nt, Homo Sapiens
aucccaugcagacaggaaaacaauauuguaua

SEQ ID NO: 408742 - RNA, 32 nt, Homo Sapiens
gucuuuuccuagagcuggucaccacuaggcug

SEQ ID NO: 408743 - RNA, 32 nt, Homo Sapiens
ccugcaacaccccucccccacccaacugcucu

SEQ ID NO: 408744 - RNA, 32 nt, Homo Sapiens
uugaaagcuggguguaggcacugcagggagag

SEQ ID NO: 408745 - RNA, 32 nt, Homo Sapiens
uguccccuaccuuuauguuauguuuacugaug

SEQ ID NO: 408746 - RNA, 32 nt, Homo Sapiens
aggggcaggccauucugcaaaagcaggaccuc

SEQ ID NO: 408747 - RNA, 32 nt, Homo Sapiens
auggugugaacccaggaggcggugcuugcagg

SEQ ID NO: 408748 - RNA, 32 nt, Homo Sapiens
gggaagaggaggaggagggccgaucguccugg

SEQ ID NO: 408749 - RNA, 32 nt, Homo Sapiens
ugccaucuuuugcuguagacuaaacugcaacu

SEQ ID NO: 408750 - RNA, 32 nt, Homo Sapiens
ccuaccaucucuauagccccagcucccucaca

SEQ ID NO: 408751 - RNA, 32 nt, Homo Sapiens
agggaugccugggcacuaccgccccgcgcugg

SEQ ID NO: 408752 - RNA, 32 nt, Homo Sapiens
uuccuggauaaugcguuaaauuucuguaucug

SEQ ID NO: 408753 - RNA, 31 nt, Homo Sapiens
ucauccaguuuaggaaaacacacaugcucag

SEQ ID NO: 408754 - RNA, 32 nt, Homo Sapiens
aauaagcaucacaauugccucaucucaucacu

SEQ ID NO: 408755 - RNA, 32 nt, Homo Sapiens
aaaagaaaaauauuuuuuaaaccgaaaucugu

SEQ ID NO: 408756 - RNA, 32 nt, Homo Sapiens
caccuccaccuccaccucccccugccacagag

SEQ ID NO: 408757 - RNA, 32 nt, Homo Sapiens
gcggagggagacgguggcgucguccgcggggc

SEQ ID NO: 408758 - RNA, 32 nt, Homo Sapiens
uguguugcagcuuuuaacaacagauggcauuc

SEQ ID NO: 408759 - RNA, 32 nt, Homo Sapiens
gcuuccuucuuugcuucuguuccuccugaccc

SEQ ID NO: 408760 - RNA, 32 nt, Homo Sapiens
guaugucuguguguguuuuaugugucaccacc

SEQ ID NO: 408761 - RNA, 32 nt, Homo Sapiens
gcucugccuaaaugaccacgggccagugacuu

SEQ ID NO: 408762 - RNA, 32 nt, Homo Sapiens
cccccagucacagggaccacaaacauggaggc

SEQ ID NO: 408763 - RNA, 32 nt, Homo Sapiens
agugcugcuguaaagcagagccauuuucuugu

SEQ ID NO: 408764 - RNA, 32 nt, Homo Sapiens
gagaagccuuccugggggaggcuggugggcca

SEQ ID NO: 408765 - RNA, 32 nt, Homo Sapiens
uucuccaaauuugacagcagaauaaaaacccu

SEQ ID NO: 408766 - RNA, 32 nt, Homo Sapiens
gugaagcugugacaccaacagaaaagcucagc

SEQ ID NO: 408767 - RNA, 32 nt, Homo Sapiens
cggaggcuggacugcgagccucgucugggacu

SEQ ID NO: 408768 - RNA, 32 nt, Homo Sapiens
gcugccccgcccccgcccggcgcgagccccag

SEQ ID NO: 408769 - RNA, 32 nt, Homo Sapiens
auuugcccuuuugauucuuccacaaucagggu

SEQ ID NO: 408770 - RNA, 32 nt, Homo Sapiens
uucuuccauagcaaaacugagaaaauaccuug

SEQ ID NO: 408771 - RNA, 32 nt, Homo Sapiens
cuggagaagaggaagccuggaaucuacagggu

SEQ ID NO: 408772 - RNA, 32 nt, Homo Sapiens
agcugcagccuucgagggccagcccucuccga

SEQ ID NO: 408773 - RNA, 32 nt, Homo Sapiens
ggcccagccagcgcccaauggaugacaaaaag

SEQ ID NO: 408774 - RNA, 32 nt, Homo Sapiens
cagauggauaaaggaagugcuggucacccugg

SEQ ID NO: 408775 - RNA, 32 nt, Homo Sapiens
acucuggagaaccugaagagagaggcugcaga

SEQ ID NO: 408776 - RNA, 32 nt, Homo Sapiens
ugcacaccacaaggggcucugcucuucugucu

SEQ ID NO: 408777 - RNA, 32 nt, Homo Sapiens
agccuuguguuucuuuccugcagacgugagau

SEQ ID NO: 408778 - RNA, 32 nt, Homo Sapiens
uucucaugucauuauggauuuggaguuuguca

SEQ ID NO: 408779 - RNA, 32 nt, Homo Sapiens
ccugccucacaucucccuuccaccucacaacu

SEQ ID NO: 408780 - RNA, 32 nt, Homo Sapiens
agggcggaggagagggcaggggaacggcggug

SEQ ID NO: 408781 - RNA, 32 nt, Homo Sapiens
accaccaagccccuccucucccccuccacacc

SEQ ID NO: 408782 - RNA, 32 nt, Homo Sapiens
uacccucccuccccccagcaguacagcugaaa

SEQ ID NO: 408783 - RNA, 32 nt, Homo Sapiens
ggggcugggucagaaagugucuggacuuguaa

SEQ ID NO: 408784 - RNA, 32 nt, Homo Sapiens
gccaaauuuuuggguagaucggugacaauuaa

SEQ ID NO: 408785 - RNA, 29 nt, Homo Sapiens
aagacaucgcuaacgaggacgcuguauac

SEQ ID NO: 408786 - RNA, 32 nt, Homo Sapiens
ccggaggcucugcuggugcaggccccgcauug

SEQ ID NO: 408787 - RNA, 32 nt, Homo Sapiens
gacauaaugcaaaugugggcuggaauucacgu

SEQ ID NO: 408788 - RNA, 32 nt, Homo Sapiens
ggaaccaaaaacaggaucaaauaugaaaaccc

SEQ ID NO: 408789 - RNA, 32 nt, Homo Sapiens
ggugucaggcugucacggacauaggauaaacu

SEQ ID NO: 408790 - RNA, 32 nt, Homo Sapiens
gcucaucuguucuugcaccaccauccagaaug

SEQ ID NO: 408791 - RNA, 32 nt, Homo Sapiens
guuuuuuguuuaaaaaccuuguuucacuguca

SEQ ID NO: 408792 - RNA, 32 nt, Homo Sapiens
ucccaccgagagucauggccccauuggcccug

SEQ ID NO: 408793 - RNA, 32 nt, Homo Sapiens
agucccccaucccuuccucccuuacccagcua

SEQ ID NO: 408794 - RNA, 32 nt, Homo Sapiens
aaggaggcuccagccauagcgccugguguauc

SEQ ID NO: 408795 - RNA, 32 nt, Homo Sapiens
uaugcuguauauaguuugaauuauauauaaau

SEQ ID NO: 408796 - RNA, 32 nt, Homo Sapiens
gggaaaaugaaguggcucuugcagcuagaguu

SEQ ID NO: 408797 - RNA, 32 nt, Homo Sapiens
ccagcccuuaaagcugcagaaaaggugucaca

SEQ ID NO: 408798 - RNA, 32 nt, Homo Sapiens
cccuacgggaugcccacggccguucaucaucu

SEQ ID NO: 408799 - RNA, 32 nt, Homo Sapiens
gaggcggcggccucaggccggagcgggcgcac

SEQ ID NO: 408800 - RNA, 32 nt, Homo Sapiens
cuccagaccgugccagacccaggugccccagu

SEQ ID NO: 408801 - RNA, 32 nt, Homo Sapiens
aggacaaugcugccagaggccugguccucaga

SEQ ID NO: 408802 - RNA, 32 nt, Homo Sapiens
accaagcaagcaugcacauuaugggcaguuac

SEQ ID NO: 408803 - RNA, 32 nt, Homo Sapiens
cagauggguggacagcugcugcugcccugcug

SEQ ID NO: 408804 - RNA, 32 nt, Homo Sapiens
ggcccuccugucaucacaucaccggcugucac

SEQ ID NO: 408805 - RNA, 32 nt, Homo Sapiens
gccggggccagggcgcuggcccucgugcugga

SEQ ID NO: 408806 - RNA, 32 nt, Homo Sapiens
cuccugaggucccagguuggcacuucucccug

SEQ ID NO: 408807 - RNA, 32 nt, Homo Sapiens
cgcacuaggggauauaggagaggaaaaguaag

SEQ ID NO: 408808 - RNA, 32 nt, Homo Sapiens
caaaagaauagcuacagcuaagugaagccacu

SEQ ID NO: 408809 - RNA, 32 nt, Homo Sapiens
guguucaugcuuugggaaaauguuagacuaca

SEQ ID NO: 408810 - RNA, 32 nt, Homo Sapiens
ucuugauccagccccagggggaugggcuucac

SEQ ID NO: 408811 - RNA, 32 nt, Homo Sapiens
ugcacugaggacccggugccggaggccguggg

SEQ ID NO: 408812 - RNA, 32 nt, Homo Sapiens
cacacauacacaccccugaacacacacacaga

SEQ ID NO: 408813 - RNA, 32 nt, Homo Sapiens
ugaaggcuaugaaagaagucacaggaggauuu

SEQ ID NO: 408814 - RNA, 32 nt, Homo Sapiens
aagacuccaaaaaguagaaauuuaaaaagugc

SEQ ID NO: 408815 - RNA, 32 nt, Homo Sapiens
uaugauuacagagaaggcuuuuucucagguca

SEQ ID NO: 408816 - RNA, 32 nt, Homo Sapiens
gaugugccugguuccccuuccgccaugauugu

SEQ ID NO: 408817 - RNA, 32 nt, Homo Sapiens
cuguauuaauaaauucaguguguagcuucaau

SEQ ID NO: 408818 - RNA, 32 nt, Homo Sapiens
gcaugucagaucugguccccugaggacccuug

SEQ ID NO: 408819 - RNA, 32 nt, Homo Sapiens
gcugccugcuccaugugucuuaugagagcccg

SEQ ID NO: 408820 - RNA, 32 nt, Homo Sapiens
augucuucuccuuuuccaaacaccacacguug

SEQ ID NO: 408821 - RNA, 32 nt, Homo Sapiens
uucaguggugaaaucuuguuuguuacugucau

SEQ ID NO: 408822 - RNA, 32 nt, Homo Sapiens
aguggggcggggcgggggaggggcaccacggg

SEQ ID NO: 408823 - RNA, 32 nt, Homo Sapiens
ggguagcuuuuuaaaaccauuauucuagaugg

SEQ ID NO: 408824 - RNA, 32 nt, Homo Sapiens
guauccacaugguacaagccuuucucacccua

SEQ ID NO: 408825 - RNA, 32 nt, Homo Sapiens
uggccugcagccagggagagccagagccuuug

SEQ ID NO: 408826 - RNA, 32 nt, Homo Sapiens
uguuuuuauauuaaaaauguuuggucugaaaa

SEQ ID NO: 408827 - RNA, 32 nt, Homo Sapiens
gcucagauaccacaauccuuugcagguuaaau

SEQ ID NO: 408828 - RNA, 32 nt, Homo Sapiens
cagacaggcagaccccuccagaggcccgccag

SEQ ID NO: 408829 - RNA, 32 nt, Homo Sapiens
ggcgggggcgggggcggggggaggugcacaac

SEQ ID NO: 408830 - RNA, 32 nt, Homo Sapiens
gauaaaggccccagcccgccugccccagcccg

SEQ ID NO: 408831 - RNA, 32 nt, Homo Sapiens
gauaguuacucacaaguaaguaccuuaaugcu

SEQ ID NO: 408832 - RNA, 32 nt, Homo Sapiens
gucuguguguggaaguuuuauccgguccuuca

SEQ ID NO: 408833 - RNA, 32 nt, Homo Sapiens
cgccacacgcacccgguagggcucaggacgcu

SEQ ID NO: 408834 - RNA, 30 nt, Homo Sapiens
cgcaggcccugcuggauccgcgccuagcuc

SEQ ID NO: 408835 - RNA, 32 nt, Homo Sapiens
uguccaaaacuguauugaaaaaauauuguuua

SEQ ID NO: 408836 - RNA, 32 nt, Homo Sapiens
aaacuuuaaugauccuagaaagcugguuugaa

SEQ ID NO: 408837 - RNA, 32 nt, Homo Sapiens
aauucaaggaccagccuuuuuaccacugcaga

SEQ ID NO: 408838 - RNA, 32 nt, Homo Sapiens
ggugggcagcagagaccugcucugccaaguug

SEQ ID NO: 408839 - RNA, 32 nt, Homo Sapiens
auauaaaucuucaaagcuuuuuucaucuauuu

SEQ ID NO: 408840 - RNA, 32 nt, Homo Sapiens
ccuuguguuguaauaauccccaugugucaagg

SEQ ID NO: 408841 - RNA, 32 nt, Homo Sapiens
cgcccccgggccccgcuguccucccccaccug

SEQ ID NO: 408842 - RNA, 32 nt, Homo Sapiens
uaauggugcagguugagagcaucccaaauccg

SEQ ID NO: 408843 - RNA, 32 nt, Homo Sapiens
ugauguugcauucaucuuuuggaacauaagca

SEQ ID NO: 408844 - RNA, 32 nt, Homo Sapiens
gcagagaacuuaggagagaagcacggaggagc

SEQ ID NO: 408845 - RNA, 32 nt, Homo Sapiens
ucuaccuccccaucccacccaggcccccagcu

SEQ ID NO: 408846 - RNA, 32 nt, Homo Sapiens
uugacagcugagagccgagcgggcggcgcggg

SEQ ID NO: 408847 - RNA, 32 nt, Homo Sapiens
ucuguauuguuaugauuugacuuuuuagaguc

SEQ ID NO: 408848 - RNA, 32 nt, Homo Sapiens
gaaccuggccccaguucuucucugcccucucu

SEQ ID NO: 408849 - RNA, 32 nt, Homo Sapiens
auggagacauuuugagauucaaugcaaucugu

SEQ ID NO: 408850 - RNA, 32 nt, Homo Sapiens
aaggaucuuguuucgcucucccauuggccccc

SEQ ID NO: 408851 - RNA, 32 nt, Homo Sapiens
augggaacggaagcaucuccgacuccuuaccu

SEQ ID NO: 408852 - RNA, 30 nt, Homo Sapiens
caggcaugucccgcccggggaccgcuaccc

SEQ ID NO: 408853 - RNA, 32 nt, Homo Sapiens
auuucccugguuugagacucacuuccucaucu

SEQ ID NO: 408854 - RNA, 32 nt, Homo Sapiens
cauuauucauuauauggaugauauacuuugug

SEQ ID NO: 408855 - RNA, 32 nt, Homo Sapiens
guuagcagauggugguuggcucccucugcuuu

SEQ ID NO: 408856 - RNA, 32 nt, Homo Sapiens
caggggcaggcuggacuuucccugcccccuau

SEQ ID NO: 408857 - RNA, 32 nt, Homo Sapiens
uuggcuuugaaaucagacaaccccaguuucaa

SEQ ID NO: 408858 - RNA, 32 nt, Homo Sapiens
aaauugcacugugugcaguuugcaacaaagaa

SEQ ID NO: 408859 - RNA, 32 nt, Homo Sapiens
aacaguguuucaucauguuggucucaaacucc

SEQ ID NO: 408860 - RNA, 32 nt, Homo Sapiens
uaggccucaucugccggcaagggcgcccgaaa

SEQ ID NO: 408861 - RNA, 32 nt, Homo Sapiens
aauccaaaaguuuaauaaaaugcuaugucagg

SEQ ID NO: 408862 - RNA, 32 nt, Homo Sapiens
uugauccccauuaaaaaucaaggaauuagggg

SEQ ID NO: 408863 - RNA, 32 nt, Homo Sapiens
acacaaaugcuguuaaaaugugaucaaaccau

SEQ ID NO: 408864 - RNA, 32 nt, Homo Sapiens
ccgcuuuaaggggaggaggggcggcgggcugc

SEQ ID NO: 408865 - RNA, 29 nt, Homo Sapiens
aggguuuggggacagaguguccuuccucu

SEQ ID NO: 408866 - RNA, 32 nt, Homo Sapiens
aucaauaguaaauuuuggguuuuuuaggaugu

SEQ ID NO: 408867 - RNA, 32 nt, Homo Sapiens
gaaugucccagaggcuagucucuucucagagc

SEQ ID NO: 408868 - RNA, 32 nt, Homo Sapiens
caaagcccccauguucucugcacuguuuggcc

SEQ ID NO: 408869 - RNA, 32 nt, Homo Sapiens
ccugagccugguccuggccgucccuaagcaug

SEQ ID NO: 408870 - RNA, 32 nt, Homo Sapiens
cuggccaccaagcgccuccguggacacgcacu

SEQ ID NO: 408871 - RNA, 32 nt, Homo Sapiens
ggcagugaccucccaaaccagccugccugguc

SEQ ID NO: 408872 - RNA, 32 nt, Homo Sapiens
cauccuggacuuuuccucucaugucuuugcug

SEQ ID NO: 408873 - RNA, 32 nt, Homo Sapiens
ggcugcuccgcgcugacagcgccgggcugggg

SEQ ID NO: 408874 - RNA, 32 nt, Homo Sapiens
cuugcacggugggccacggccguggcgggugc

SEQ ID NO: 408875 - RNA, 32 nt, Homo Sapiens
aggagccaucuuggacucuccuccccagguuu

SEQ ID NO: 408876 - RNA, 32 nt, Homo Sapiens
guuucguaaggagccagaggcagcauagugaa

SEQ ID NO: 408877 - RNA, 32 nt, Homo Sapiens
uuuuaaaguauuucuuuuuuuaacuggaugaa

SEQ ID NO: 408878 - RNA, 32 nt, Homo Sapiens
gcaaaagaguguuuuuaaaaaauaucaaaguu

SEQ ID NO: 408879 - RNA, 32 nt, Homo Sapiens
gcaagcaucaguucuacggaucaucaacaaga

SEQ ID NO: 408880 - RNA, 32 nt, Homo Sapiens
cacugugaccugccgaaguccacugccuuugc

SEQ ID NO: 408881 - RNA, 32 nt, Homo Sapiens
gaaguugggccggguuggggguugcuagaagg

SEQ ID NO: 408882 - RNA, 32 nt, Homo Sapiens
agaaaccuugcucuccucaucuccaaggcagg

SEQ ID NO: 408883 - RNA, 32 nt, Homo Sapiens
agaagcccugucagcaacucaacgaccaggug

SEQ ID NO: 408884 - RNA, 32 nt, Homo Sapiens
uccugggugccuucggaccccugucggauagu

SEQ ID NO: 408885 - RNA, 32 nt, Homo Sapiens
ucuuuuguaacacuuauacacugcugguggga

SEQ ID NO: 408886 - RNA, 32 nt, Homo Sapiens
ucccuugccagccucccuggggucuggggacc

SEQ ID NO: 408887 - RNA, 32 nt, Homo Sapiens
gauauagaauaaaacaagaguguagauuuggg

SEQ ID NO: 408888 - RNA, 32 nt, Homo Sapiens
agacaaaaccaggguccauacugcuugccucc

SEQ ID NO: 408889 - RNA, 32 nt, Homo Sapiens
cccgccaaccucagugacguggugcagcucgu

SEQ ID NO: 408890 - RNA, 32 nt, Homo Sapiens
auauuucuuauagucuuaauuuuguuauccau

SEQ ID NO: 408891 - RNA, 32 nt, Homo Sapiens
gucuguuuuuaaauacuuaauuugaacagcuc

SEQ ID NO: 408892 - RNA, 32 nt, Homo Sapiens
ccaggaguguggcagagcuucucagcggccac

SEQ ID NO: 408893 - RNA, 32 nt, Homo Sapiens
acagggaaggcacagacauccacuuuagcaaa

SEQ ID NO: 408894 - RNA, 32 nt, Homo Sapiens
agacucuucuagacucuuauuuuuauauuucu

SEQ ID NO: 408895 - RNA, 32 nt, Homo Sapiens
uguuaaauagucccugcuuuaagggacuacga

SEQ ID NO: 408896 - RNA, 32 nt, Homo Sapiens
ugcuacaggcagcuggaucuguuugcaugcag

SEQ ID NO: 408897 - RNA, 29 nt, Homo Sapiens
uuucaauaaaguuuauaauuuucuccaua

SEQ ID NO: 408898 - RNA, 32 nt, Homo Sapiens
guccccccagagcggaugccgcggcgggccug

SEQ ID NO: 408899 - RNA, 32 nt, Homo Sapiens
aauauuuuuuaaauaggcuuacugucaaauug

SEQ ID NO: 408900 - RNA, 32 nt, Homo Sapiens
gggacugcucacucugcagagccaacgggcuu

SEQ ID NO: 408901 - RNA, 32 nt, Homo Sapiens
gacauuuuagggucuucaguuacacauacacc

SEQ ID NO: 408902 - RNA, 32 nt, Homo Sapiens
agaaaucuuuguagaguuaauuuuauggaaau

SEQ ID NO: 408903 - RNA, 29 nt, Homo Sapiens
gguuagaggguuuaauauuuucugcaaug

SEQ ID NO: 408904 - RNA, 32 nt, Homo Sapiens
ucucaagguggucuuuucugcugcuagcaacu

SEQ ID NO: 408905 - RNA, 32 nt, Homo Sapiens
ggcaagcaucuucauuuugcuagcuuugcaga

SEQ ID NO: 408906 - RNA, 32 nt, Homo Sapiens
ccugguugaagaagaugaucaguggacagucu

SEQ ID NO: 408907 - RNA, 32 nt, Homo Sapiens
cuuauucagccuaauuauuguuuucuacacuc

SEQ ID NO: 408908 - RNA, 32 nt, Homo Sapiens
aucggaaaaauuaucaaacaucugaagauggu

SEQ ID NO: 408909 - RNA, 32 nt, Homo Sapiens
gccucuuucucuguuucccugggugagggggc

SEQ ID NO: 408910 - RNA, 32 nt, Homo Sapiens
aguccacuugggucaucagcucugccaagcug

SEQ ID NO: 408911 - RNA, 32 nt, Homo Sapiens
cagaauuuuuauuucuguucaugucuucuacu

SEQ ID NO: 408912 - RNA, 32 nt, Homo Sapiens
uccuuagucaauaccaguauuuuuccagugag

SEQ ID NO: 408913 - RNA, 32 nt, Homo Sapiens
gccaacggccuggccuucccugccggcccgcg

SEQ ID NO: 408914 - RNA, 32 nt, Homo Sapiens
auauauauauauauuuuuuuuuuuuuuuuuuu

SEQ ID NO: 408915 - RNA, 32 nt, Homo Sapiens
uuccuuccugaacauauucugcaccucgucag

SEQ ID NO: 408916 - RNA, 32 nt, Homo Sapiens
ucaaccccaagccccacuuccucccugaccuc

SEQ ID NO: 408917 - RNA, 32 nt, Homo Sapiens
aacuuccuggaaacagauucagugaccaaaua

SEQ ID NO: 408918 - RNA, 32 nt, Homo Sapiens
gucgugcuccgucuccugcgggcgaggucuga

SEQ ID NO: 408919 - RNA, 32 nt, Homo Sapiens
gguuuucauggagcggcccaccugcuccccac

SEQ ID NO: 408920 - RNA, 32 nt, Homo Sapiens
aaucuagcaugaaagguuaaaaaggaaauacu

SEQ ID NO: 408921 - RNA, 32 nt, Homo Sapiens
uccauagaggagaggaaaagguguaggccugc

SEQ ID NO: 408922 - RNA, 32 nt, Homo Sapiens
gacuuuaaaaauuuccagaaguucaggaauuu

SEQ ID NO: 408923 - RNA, 32 nt, Homo Sapiens
uaaccauccugggcuuccuguccugugucccu

SEQ ID NO: 408924 - RNA, 32 nt, Homo Sapiens
cuggaaaacaaagaucuuucugauguugcaau

SEQ ID NO: 408925 - RNA, 32 nt, Homo Sapiens
cacacacacacacauacacacacacacacaaa

SEQ ID NO: 408926 - RNA, 32 nt, Homo Sapiens
cacagacuucugggcagagcugagagacaaug

SEQ ID NO: 408927 - RNA, 32 nt, Homo Sapiens
uggcucaggccccugucacgcuucucugugcc

SEQ ID NO: 408928 - RNA, 32 nt, Homo Sapiens
gugggagagaugugacugcugcuggcugggug

SEQ ID NO: 408929 - RNA, 32 nt, Homo Sapiens
ggcggcugaccacaggcaccccggccucuccg

SEQ ID NO: 408930 - RNA, 32 nt, Homo Sapiens
ggccuggagcccaagcccuguguuccugggga

SEQ ID NO: 408931 - RNA, 32 nt, Homo Sapiens
gugacuagaaaguuucuaggagcaccuccagg

SEQ ID NO: 408932 - RNA, 32 nt, Homo Sapiens
agagcccccguccugcccucuggggcuccaca

SEQ ID NO: 408933 - RNA, 32 nt, Homo Sapiens
aaagagcuuaccccuuucccccggaaaacuug

SEQ ID NO: 408934 - RNA, 32 nt, Homo Sapiens
uggguaugaaacuauuugauuucuagucuucu

SEQ ID NO: 408935 - RNA, 32 nt, Homo Sapiens
uaaagagagauucauauaaagaauuauauuca

SEQ ID NO: 408936 - RNA, 32 nt, Homo Sapiens
aucugugugucugacagugugagauguuagac

SEQ ID NO: 408937 - RNA, 32 nt, Homo Sapiens
ucagagcccaccguuccuaucaucaucuagca

SEQ ID NO: 408938 - RNA, 32 nt, Homo Sapiens
guucauguucuuggacugcgggcccucagucc

SEQ ID NO: 408939 - RNA, 32 nt, Homo Sapiens
gagcgucagguggcaaaaguccuucuguuacu

SEQ ID NO: 408940 - RNA, 30 nt, Homo Sapiens
uuuuuuuuuuuaaugggggacaaaagagag

SEQ ID NO: 408941 - RNA, 32 nt, Homo Sapiens
aggcaggaggaucaccugaggucaggaguuug

SEQ ID NO: 408942 - RNA, 32 nt, Homo Sapiens
ccaaguccacugacagcuaucuccuccccuuc

SEQ ID NO: 408943 - RNA, 32 nt, Homo Sapiens
caucuggccuugggggacgaugauggaggcau

SEQ ID NO: 408944 - RNA, 32 nt, Homo Sapiens
uaaccuuuuuucccuuuuaugaaguugagagg

SEQ ID NO: 408945 - RNA, 32 nt, Homo Sapiens
uuuuugcaccuuuccauccuccagguuucaaa

SEQ ID NO: 408946 - RNA, 32 nt, Homo Sapiens
cugaacacuaguauugagguccagcacuacuu

SEQ ID NO: 408947 - RNA, 32 nt, Homo Sapiens
guuucuauuguaaauuuggauuuacgacugaa

SEQ ID NO: 408948 - RNA, 32 nt, Homo Sapiens
auguagugaaauguauuuuuaaaaacuauauu

SEQ ID NO: 408949 - RNA, 32 nt, Homo Sapiens
agagacccacggaggcuucgcgggaagacgcg

SEQ ID NO: 408950 - RNA, 32 nt, Homo Sapiens
uuuacuacuguaaacaguaaauauaguuuggu

SEQ ID NO: 408951 - RNA, 32 nt, Homo Sapiens
agugggcccuccccuucuucaggccuugaauc

SEQ ID NO: 408952 - RNA, 32 nt, Homo Sapiens
cuacagaggguccgccauguuccccggcggcg

SEQ ID NO: 408953 - RNA, 32 nt, Homo Sapiens
gguuggagggcagggggcgcuggccaucaggg

SEQ ID NO: 408954 - RNA, 32 nt, Homo Sapiens
auuucaagcuauaaaagcaggagguuaucugu

SEQ ID NO: 408955 - RNA, 32 nt, Homo Sapiens
agccacgcugcuccccgcaaugcugauggggc

SEQ ID NO: 408956 - RNA, 32 nt, Homo Sapiens
aauggccugcaaaccuuuuuuaugaugcuauu

SEQ ID NO: 408957 - RNA, 32 nt, Homo Sapiens
ugggaguaaaauaaaaauaucgagguauagac

SEQ ID NO: 408958 - RNA, 32 nt, Homo Sapiens
cauuuucaacuuaaguuuuuacuccauuaugc

SEQ ID NO: 408959 - RNA, 32 nt, Homo Sapiens
uagcaugugguguugaaguauuacuguagauc

SEQ ID NO: 408960 - RNA, 32 nt, Homo Sapiens
ggcuagguuuggcuagaugcuuucuggguaua

SEQ ID NO: 408961 - RNA, 30 nt, Homo Sapiens
cuagcggcgcccgggcgcggagugcgcagg

SEQ ID NO: 408962 - RNA, 32 nt, Homo Sapiens
gcucuuucuggcugugugguuuggagaaagca

SEQ ID NO: 408963 - RNA, 32 nt, Homo Sapiens
auuuugauuuauucucuuucuucugaccuccu

SEQ ID NO: 408964 - RNA, 32 nt, Homo Sapiens
gggcagucuugcaacagugccauguuaggguu

SEQ ID NO: 408965 - RNA, 32 nt, Homo Sapiens
cgccccacacgcgcccugguggcuccuugggu

SEQ ID NO: 408966 - RNA, 32 nt, Homo Sapiens
gucggccucacagguagugaugcgccgccugg

SEQ ID NO: 408967 - RNA, 32 nt, Homo Sapiens
cacacacgagcaugcacaggcagagaacacaa

SEQ ID NO: 408968 - RNA, 32 nt, Homo Sapiens
cgugugcuccgucugccaugggguucucaaga

SEQ ID NO: 408969 - RNA, 32 nt, Homo Sapiens
agcuuucauacaccaagcaguugauugauaaa

SEQ ID NO: 408970 - RNA, 32 nt, Homo Sapiens
cuaagaggaaaugucacaggggcuaugaugca

SEQ ID NO: 408971 - RNA, 32 nt, Homo Sapiens
cuaggcggagcucagcugggccagcaagcacu

SEQ ID NO: 408972 - RNA, 32 nt, Homo Sapiens
agcucaucuauuucuuuuuaauuucugcaaag

SEQ ID NO: 408973 - RNA, 32 nt, Homo Sapiens
gcuggcaucugcuucccuccccugccucguuu

SEQ ID NO: 408974 - RNA, 32 nt, Homo Sapiens
aagcucugaaugugauuuguguuuccuuaaag

SEQ ID NO: 408975 - RNA, 32 nt, Homo Sapiens
gggagcgagggagcugggagggggugguaaga

SEQ ID NO: 408976 - RNA, 32 nt, Homo Sapiens
aggaggaggaggaggauacgccagucagcccc

SEQ ID NO: 408977 - RNA, 30 nt, Homo Sapiens
cuuuuuggggaggaguugauaugcaacugc

SEQ ID NO: 408978 - RNA, 32 nt, Homo Sapiens
cuguugcucaggugaccagcuugugucucugg

SEQ ID NO: 408979 - RNA, 32 nt, Homo Sapiens
aaacaccgguaguucuagcacagcuaaaaugg

SEQ ID NO: 408980 - RNA, 27 nt, Homo Sapiens
ccauggaggaggaggcgagccgcagcg

SEQ ID NO: 408981 - RNA, 32 nt, Homo Sapiens
cacuuucgccuucuccauccccugccgugggg

SEQ ID NO: 408982 - RNA, 32 nt, Homo Sapiens
gcaagugaaaauaacaaugguccuuacacuac

SEQ ID NO: 408983 - RNA, 32 nt, Homo Sapiens
acccacccucuccacacccagccugucccacu

SEQ ID NO: 408984 - RNA, 32 nt, Homo Sapiens
cgacccccucccccuagcccagccccagucac

SEQ ID NO: 408985 - RNA, 32 nt, Homo Sapiens
uggggccuccucacuaggggccccaaguucaa

SEQ ID NO: 408986 - RNA, 32 nt, Homo Sapiens
ccuugaaagagacccaaggaaacccugaauuc

SEQ ID NO: 408987 - RNA, 32 nt, Homo Sapiens
ggagcgcucugcccggccgccgcuaccugcgg

SEQ ID NO: 408988 - RNA, 32 nt, Homo Sapiens
ccucuuuaaauacagcuagaaaauaaaaccaa

SEQ ID NO: 408989 - RNA, 32 nt, Homo Sapiens
agaguauuuuuccucguaguucgagaauaaaa

SEQ ID NO: 408990 - RNA, 32 nt, Homo Sapiens
cauaucuugauuuuuaagcuuaucuugauuuu

SEQ ID NO: 408991 - RNA, 32 nt, Homo Sapiens
ggcccuagauaguuuugccaucuuagaccccu

SEQ ID NO: 408992 - RNA, 32 nt, Homo Sapiens
caacuguuuauuauuuaucuauuuauuauccu

SEQ ID NO: 408993 - RNA, 32 nt, Homo Sapiens
uauaauuuguuggguguaauguguguagaccu

SEQ ID NO: 408994 - RNA, 32 nt, Homo Sapiens
ucgagguuuucugcaugccuggaagugcacau

SEQ ID NO: 408995 - RNA, 32 nt, Homo Sapiens
uagaccagcagcuacagcucuggaaauugaaa

SEQ ID NO: 408996 - RNA, 32 nt, Homo Sapiens
uuuggaggugaccggcgcggcggccgcucuau

SEQ ID NO: 408997 - RNA, 32 nt, Homo Sapiens
gccacucgggaauaaugauaccccuugugcua

SEQ ID NO: 408998 - RNA, 32 nt, Homo Sapiens
uuuccaaucaacuguauauuaagguacucaua

SEQ ID NO: 408999 - RNA, 32 nt, Homo Sapiens
ccaaaggaggugaugggaggcuuuucaagacg

SEQ ID NO: 409000 - RNA, 32 nt, Homo Sapiens
auuuuuucacuuuaauuguuaccauguuuucu

SEQ ID NO: 409001 - RNA, 32 nt, Homo Sapiens
aggcccucuguuccauggaauugggaaucucc

SEQ ID NO: 409002 - RNA, 32 nt, Homo Sapiens
gcacaguggcucaugucugcaaucccagcgau

SEQ ID NO: 409003 - RNA, 32 nt, Homo Sapiens
aggucguuuuaaaaacaaaaauuauugauugc

SEQ ID NO: 409004 - RNA, 32 nt, Homo Sapiens
ugacugggagcuucuuuuuguuuacauauauu

SEQ ID NO: 409005 - RNA, 32 nt, Homo Sapiens
uguggguuauuuauucaacugaagccagcacu

SEQ ID NO: 409006 - RNA, 32 nt, Homo Sapiens
agccccagguccuucugagacugcuuucccuc

SEQ ID NO: 409007 - RNA, 32 nt, Homo Sapiens
guuugaccuuggaguuguucauuuaaugaaaa

SEQ ID NO: 409008 - RNA, 32 nt, Homo Sapiens
ucacacagcucagaagcagcagaacugacauu

SEQ ID NO: 409009 - RNA, 32 nt, Homo Sapiens
caaggaggugacaggaggagcccccgcacagg

SEQ ID NO: 409010 - RNA, 32 nt, Homo Sapiens
ugacagacaaugcuaucuaaccauaguucaug

SEQ ID NO: 409011 - RNA, 32 nt, Homo Sapiens
uuaaauuaaucugcaguuuuuaccaagagcua

SEQ ID NO: 409012 - RNA, 32 nt, Homo Sapiens
acuaccggcccagccccucuuccuccuccagc

SEQ ID NO: 409013 - RNA, 32 nt, Homo Sapiens
cuccguuuacacagacaaagugacaucagaag

SEQ ID NO: 409014 - RNA, 32 nt, Homo Sapiens
ccgacgcggagcgaggccggccgccgggcacu

SEQ ID NO: 409015 - RNA, 32 nt, Homo Sapiens
accuugugauucaaccauuucauuccuagaua

SEQ ID NO: 409016 - RNA, 32 nt, Homo Sapiens
gccuauagggucccccagggccccaccugucu

SEQ ID NO: 409017 - RNA, 32 nt, Homo Sapiens
ucauacuuguuuuguuuaauucuuuuagcagc

SEQ ID NO: 409018 - RNA, 32 nt, Homo Sapiens
uauuuauaaaauguuuauuaaggcuagaaaaa

SEQ ID NO: 409019 - RNA, 32 nt, Homo Sapiens
cagggguacuagaggagaaggguggggauugg

SEQ ID NO: 409020 - RNA, 32 nt, Homo Sapiens
aaaaagaugcucagauauuaugugucaaggau

SEQ ID NO: 409021 - RNA, 32 nt, Homo Sapiens
gucuaacuuugguucauuucugcacagguaca

SEQ ID NO: 409022 - RNA, 32 nt, Homo Sapiens
gaacugccuuuaucuguaaauuuuaaaguuug

SEQ ID NO: 409023 - RNA, 32 nt, Homo Sapiens
auugcaucuacuuauaagugagaauguggggu

SEQ ID NO: 409024 - RNA, 32 nt, Homo Sapiens
gucugcuuuccaccgaguacuguguuuauucu

SEQ ID NO: 409025 - RNA, 32 nt, Homo Sapiens
cuuccccaacaucaggucugcagagcugcagg

SEQ ID NO: 409026 - RNA, 32 nt, Homo Sapiens
aguguuaaaaauuagauuagugauugccuggg

SEQ ID NO: 409027 - RNA, 32 nt, Homo Sapiens
ucacuccaggacaguggagagagaaaggcuuc

SEQ ID NO: 409028 - RNA, 32 nt, Homo Sapiens
uucugagcuggcuuucccuucuccaggcucgc

SEQ ID NO: 409029 - RNA, 32 nt, Homo Sapiens
uaaggggcugcggggaggccgcagcaccuucu

SEQ ID NO: 409030 - RNA, 32 nt, Homo Sapiens
ucuuagcaugagcuaccucaucucuagaagcu

SEQ ID NO: 409031 - RNA, 32 nt, Homo Sapiens
uaacuccagugcuacaaaaagaauuaguaaug

SEQ ID NO: 409032 - RNA, 32 nt, Homo Sapiens
cuggaagaggaagaggaaagcaaaggagucag

SEQ ID NO: 409033 - RNA, 32 nt, Homo Sapiens
gaaaauugggaacucauaucaacauggcaaac

SEQ ID NO: 409034 - RNA, 32 nt, Homo Sapiens
ccacucaggaggaguggaggcagguuguagau

SEQ ID NO: 409035 - RNA, 32 nt, Homo Sapiens
gggaugggugcugagcagaaccaagagaggaa

SEQ ID NO: 409036 - RNA, 32 nt, Homo Sapiens
aaaguugaaaugaccauucuguguagucauaa

SEQ ID NO: 409037 - RNA, 32 nt, Homo Sapiens
uuggcgcaaaauguuggagaucugccugaagc

SEQ ID NO: 409038 - RNA, 32 nt, Homo Sapiens
agauagaaugcguuugcaauggcugcuacugu

SEQ ID NO: 409039 - RNA, 32 nt, Homo Sapiens
uuaccccccguccugcacgccguggagcauca

SEQ ID NO: 409040 - RNA, 32 nt, Homo Sapiens
aggcgccgccgccauugccgcucucucgguga

SEQ ID NO: 409041 - RNA, 32 nt, Homo Sapiens
cccucuaaaaauuuccucagaucugaaguaug

SEQ ID NO: 409042 - RNA, 32 nt, Homo Sapiens
cggcucagacgaccucugcugccgccgccccc

SEQ ID NO: 409043 - RNA, 31 nt, Homo Sapiens
gcuccugggcuugggaggccccgcgccacug

SEQ ID NO: 409044 - RNA, 32 nt, Homo Sapiens
caauuguugcuuaugaaagaaagcuuuagcug

SEQ ID NO: 409045 - RNA, 32 nt, Homo Sapiens
cugaggugguggcugcggccuuugaacaagua

SEQ ID NO: 409046 - RNA, 32 nt, Homo Sapiens
guugacucuaaaguugauuuaaggccaggcau

SEQ ID NO: 409047 - RNA, 32 nt, Homo Sapiens
agccacaucucucacaccccuguggccugggc

SEQ ID NO: 409048 - RNA, 32 nt, Homo Sapiens
gaagaaccgaguucaacaccaggauguguuuc

SEQ ID NO: 409049 - RNA, 30 nt, Homo Sapiens
acugacacaggccagccccaucuugguccu

SEQ ID NO: 409050 - RNA, 32 nt, Homo Sapiens
cuguguaaucucugauuaaauuuaauauacug

SEQ ID NO: 409051 - RNA, 32 nt, Homo Sapiens
agaauggaagcagugcaaauaaauuacauuuu

SEQ ID NO: 409052 - RNA, 32 nt, Homo Sapiens
aguuugucuccauggaaacacguagccgcugc

SEQ ID NO: 409053 - RNA, 32 nt, Homo Sapiens
agauuucaauaaaacuaaaaaaucuauucaaa

SEQ ID NO: 409054 - RNA, 32 nt, Homo Sapiens
aguccuuuuuugcccuucuccaaaaaauaacc

SEQ ID NO: 409055 - RNA, 29 nt, Homo Sapiens
acauauauauguauauacauaucaccucc

SEQ ID NO: 409056 - RNA, 32 nt, Homo Sapiens
uuguuacaaugcuuuaccaaaucuaugacuuc

SEQ ID NO: 409057 - RNA, 32 nt, Homo Sapiens
cgcgggccugccccggccaccgcuuuaacguc

SEQ ID NO: 409058 - RNA, 32 nt, Homo Sapiens
uugaucauuuccccucaugguacucugcucag

SEQ ID NO: 409059 - RNA, 32 nt, Homo Sapiens
caggcgaucugccugccuuggcaucccaaagu

SEQ ID NO: 409060 - RNA, 32 nt, Homo Sapiens
cucaauguucccuccugcucuccugccccaug

SEQ ID NO: 409061 - RNA, 32 nt, Homo Sapiens
ucuccuccgcgccgccgccgccggugcgcagg

SEQ ID NO: 409062 - RNA, 32 nt, Homo Sapiens
acguuggccccuccucugccaagcccccaggg

SEQ ID NO: 409063 - RNA, 32 nt, Homo Sapiens
uuaaagauucuaugcccauuuccuugauugaa

SEQ ID NO: 409064 - RNA, 32 nt, Homo Sapiens
cagaaacuucaauaaaacaacaaauucaccca

SEQ ID NO: 409065 - RNA, 32 nt, Homo Sapiens
cagaccgcccugcuccuccgagccuuugagaa

SEQ ID NO: 409066 - RNA, 32 nt, Homo Sapiens
gcuggauuccaagaggagggaauuagaagcgu

SEQ ID NO: 409067 - RNA, 32 nt, Homo Sapiens
uguguuugcagacuggcugggcccgugaccca

SEQ ID NO: 409068 - RNA, 32 nt, Homo Sapiens
caccuccauuuugccaugucugaaacagaauu

SEQ ID NO: 409069 - RNA, 32 nt, Homo Sapiens
gcgcucugugggcgacuaagugccacucacgc

SEQ ID NO: 409070 - RNA, 32 nt, Homo Sapiens
agcgcaaccugccugucccgggagcuugcggg

SEQ ID NO: 409071 - RNA, 32 nt, Homo Sapiens
ugugcacguacacacacacacacacacacaca

SEQ ID NO: 409072 - RNA, 32 nt, Homo Sapiens
uggaaagucuuuggauggaaaagcaauaaaag

SEQ ID NO: 409073 - RNA, 32 nt, Homo Sapiens
ccccaggaccucugggcagaguggacugcuca

SEQ ID NO: 409074 - RNA, 32 nt, Homo Sapiens
ucugcucuuccgcaucaccccauccaccuuac

SEQ ID NO: 409075 - RNA, 32 nt, Homo Sapiens
ccggaggcgcauccugcagcccaugcuugaug

SEQ ID NO: 409076 - RNA, 32 nt, Homo Sapiens
gcuggcgggggaggggcgccugggggugcaag

SEQ ID NO: 409077 - RNA, 32 nt, Homo Sapiens
uaccugguucguguaaauaagaauaaucaagg

SEQ ID NO: 409078 - RNA, 32 nt, Homo Sapiens
uuccuguagcauauggggagacuaaggccugg

SEQ ID NO: 409079 - RNA, 32 nt, Homo Sapiens
gcccagcguccgccgcgccucgccaaggcuuc

SEQ ID NO: 409080 - RNA, 32 nt, Homo Sapiens
uuugcaguacuauuuauaaaauggacccugau

SEQ ID NO: 409081 - RNA, 32 nt, Homo Sapiens
gccccccagcccuggcuccccagcugcgcugc

SEQ ID NO: 409082 - RNA, 32 nt, Homo Sapiens
uacagaaaauuuaaacuauuuuauaaaaacug

SEQ ID NO: 409083 - RNA, 32 nt, Homo Sapiens
augacauuuuaaaagccaugaauuuauuuugg

SEQ ID NO: 409084 - RNA, 30 nt, Homo Sapiens
aauauuggcucaccugcagaaagcuccaga

SEQ ID NO: 409085 - RNA, 32 nt, Homo Sapiens
gaaucaaagagccuuggugaaggucagagcua

SEQ ID NO: 409086 - RNA, 32 nt, Homo Sapiens
caagccgagcgcggccgggacgugcaccaugg

SEQ ID NO: 409087 - RNA, 32 nt, Homo Sapiens
agaugauuucccuuucgcagauugucagcugu

SEQ ID NO: 409088 - RNA, 32 nt, Homo Sapiens
gaagcagcaagagcuucugggacagagacugc

SEQ ID NO: 409089 - RNA, 32 nt, Homo Sapiens
gcccaucggcccgggguccgaggggcccgcug

SEQ ID NO: 409090 - RNA, 32 nt, Homo Sapiens
uuuuuauaaacuacaaaaacuuuuuguuguuu

SEQ ID NO: 409091 - RNA, 32 nt, Homo Sapiens
cacucuggaggacuuuccccugacagcuaauc

SEQ ID NO: 409092 - RNA, 32 nt, Homo Sapiens
cccaaaaccaaaugacccaccaccacgacagc

SEQ ID NO: 409093 - RNA, 32 nt, Homo Sapiens
ggccccagcugagagcaguccacuggauguug

SEQ ID NO: 409094 - RNA, 32 nt, Homo Sapiens
cauaccuuccccccgcccccacuuccuuuacu

SEQ ID NO: 409095 - RNA, 32 nt, Homo Sapiens
cggccccauacaccugucgugaggauagaagg

SEQ ID NO: 409096 - RNA, 32 nt, Homo Sapiens
uauccaacuuauauuucugcuuucaaaguuaa

SEQ ID NO: 409097 - RNA, 32 nt, Homo Sapiens
uacaggcaugacccaccgcucccggccuuguu

SEQ ID NO: 409098 - RNA, 32 nt, Homo Sapiens
accgguuucauuuauucauguaauaaagcaaa

SEQ ID NO: 409099 - RNA, 32 nt, Homo Sapiens
acucaugugcagguuuugaaaauguacaauau

SEQ ID NO: 409100 - RNA, 32 nt, Homo Sapiens
uaaguaaauaauaaauaaaauaaagccaaccu

SEQ ID NO: 409101 - RNA, 32 nt, Homo Sapiens
cucugagagcaucuuauuuuguuuaaaggcaa

SEQ ID NO: 409102 - RNA, 32 nt, Homo Sapiens
uaagugaugagaacauuuaacuuuggugacua

SEQ ID NO: 409103 - RNA, 32 nt, Homo Sapiens
gcacugggccacggaggagggaugcugcuccg

SEQ ID NO: 409104 - RNA, 32 nt, Homo Sapiens
gaaccuuggggaugugccuagacccggcgcag

SEQ ID NO: 409105 - RNA, 32 nt, Homo Sapiens
augguguugaccaagucagcagggagcugagu

SEQ ID NO: 409106 - RNA, 32 nt, Homo Sapiens
uugaggauuaaaugaagcaaggugauguauau

SEQ ID NO: 409107 - RNA, 32 nt, Homo Sapiens
uuuucuuuuugccaaggguugcaugugaauua

SEQ ID NO: 409108 - RNA, 32 nt, Homo Sapiens
agcuaaaauggcaaauugucuguuaucucuuu

SEQ ID NO: 409109 - RNA, 32 nt, Homo Sapiens
cugacauagggucaugaauuagggccgagugg

SEQ ID NO: 409110 - RNA, 32 nt, Homo Sapiens
gauuucuuuuguaucugcaauguaaugaguua

SEQ ID NO: 409111 - RNA, 32 nt, Homo Sapiens
caugucugaccauuaguuuucuucucuuuccu

SEQ ID NO: 409112 - RNA, 32 nt, Homo Sapiens
ccgucuugggcagcuccucccgggugucugca

SEQ ID NO: 409113 - RNA, 32 nt, Homo Sapiens
uuuggaaauaaucauugcuggaaauucuguua

SEQ ID NO: 409114 - RNA, 32 nt, Homo Sapiens
cuuucagggcuuuuccgaagauuuucaacauc

SEQ ID NO: 409115 - RNA, 32 nt, Homo Sapiens
uccauucuucucugucucugucuugcaugucu

SEQ ID NO: 409116 - RNA, 32 nt, Homo Sapiens
uaacauugccuugaagacuccuggacaccgag

SEQ ID NO: 409117 - RNA, 32 nt, Homo Sapiens
ugcuggcucauuaauuuuuuuagucuuuuuuu

SEQ ID NO: 409118 - RNA, 32 nt, Homo Sapiens
cgggguuccccucauuguacagauggggcagg

SEQ ID NO: 409119 - RNA, 32 nt, Homo Sapiens
aacaacuaagcgcuccagcacaucagucccga

SEQ ID NO: 409120 - RNA, 32 nt, Homo Sapiens
uagcaggcucuucuggccuccuuggccucauu

SEQ ID NO: 409121 - RNA, 32 nt, Homo Sapiens
acagcgggccccagcgcgcggcucggggcugg

SEQ ID NO: 409122 - RNA, 32 nt, Homo Sapiens
cucagacaccccugaggccuagcagucaacuc

SEQ ID NO: 409123 - RNA, 32 nt, Homo Sapiens
ugucugaacuacacaaaugccuuuaaaaaacc

SEQ ID NO: 409124 - RNA, 32 nt, Homo Sapiens
ugugucuucagcgcccagcccugcguguuccu

SEQ ID NO: 409125 - RNA, 32 nt, Homo Sapiens
uuauuucccguccaaugccugcaugcugcuug

SEQ ID NO: 409126 - RNA, 30 nt, Homo Sapiens
agcugccguaccgugccgcgucgcagccgc

SEQ ID NO: 409127 - RNA, 30 nt, Homo Sapiens
gguuuuggcugugcugguucagcuagcucu

SEQ ID NO: 409128 - RNA, 32 nt, Homo Sapiens
uugcugggaauuucuguaaauuugagacuacc

SEQ ID NO: 409129 - RNA, 32 nt, Homo Sapiens
ucauccugaaaagaaggagacagggauuuuuu

SEQ ID NO: 409130 - RNA, 32 nt, Homo Sapiens
uauaaaugaagacacaugguugugaauacaau

SEQ ID NO: 409131 - RNA, 32 nt, Homo Sapiens
gaugugacugggcuugcggaggcgcugacucc

SEQ ID NO: 409132 - RNA, 32 nt, Homo Sapiens
cacuaucuauauuuaagcuuauacaaaauggg

SEQ ID NO: 409133 - RNA, 32 nt, Homo Sapiens
aaucaacuguuuuguauacuuguuuucaguuu

SEQ ID NO: 409134 - RNA, 32 nt, Homo Sapiens
guggcucucagcaguggcugcauauuaaaauc

SEQ ID NO: 409135 - RNA, 32 nt, Homo Sapiens
uucugcacagagcuaccagcccgggcagacac

SEQ ID NO: 409136 - RNA, 32 nt, Homo Sapiens
gcgcuuccccagcgcgggcgcuuccugggccc

SEQ ID NO: 409137 - RNA, 32 nt, Homo Sapiens
ccauucuacucuucuggugggcuuugggguau

SEQ ID NO: 409138 - RNA, 32 nt, Homo Sapiens
gaaagggagagccauacugcacggacguagcg

SEQ ID NO: 409139 - RNA, 32 nt, Homo Sapiens
guuauuacaaauauuuuauacauaaaucucuu

SEQ ID NO: 409140 - RNA, 32 nt, Homo Sapiens
ccugccguucccuccgccgcgcugcgccaugg

SEQ ID NO: 409141 - RNA, 32 nt, Homo Sapiens
aaggguggugacugggguggugaaggggcagc

SEQ ID NO: 409142 - RNA, 32 nt, Homo Sapiens
cgcaccucucugagccuccgcggccuucucua

SEQ ID NO: 409143 - RNA, 32 nt, Homo Sapiens
uuaagaaaacaauaugugggaaaugauuuaau

SEQ ID NO: 409144 - RNA, 32 nt, Homo Sapiens
caucaguuugcaagagugggaacaaccagaau

SEQ ID NO: 409145 - RNA, 32 nt, Homo Sapiens
cccagggcacugccagcccacccccuuugacu

SEQ ID NO: 409146 - RNA, 32 nt, Homo Sapiens
uuggugaaaccccgucucuaauaaaaacacaa

SEQ ID NO: 409147 - RNA, 32 nt, Homo Sapiens
ucuuacugucaacagagauauuuuaaaagaga

SEQ ID NO: 409148 - RNA, 30 nt, Homo Sapiens
ccuggcagggauguugaugagcugaggaag

SEQ ID NO: 409149 - RNA, 32 nt, Homo Sapiens
ugcccuuccagaaacugugcuaaaaagagaaa

SEQ ID NO: 409150 - RNA, 32 nt, Homo Sapiens
agggaggagaaaguauaaggccugcuguaccc

SEQ ID NO: 409151 - RNA, 32 nt, Homo Sapiens
ugugcacuggaugaagcugcugcugcacugac

SEQ ID NO: 409152 - RNA, 32 nt, Homo Sapiens
agaacuuuaaacaauauaguauuuauggcgag

SEQ ID NO: 409153 - RNA, 32 nt, Homo Sapiens
uuggaaaacacuuuaacaguucauuuugcaug

SEQ ID NO: 409154 - RNA, 32 nt, Homo Sapiens
uccucccauuuucuugucuguucugccgcugu

SEQ ID NO: 409155 - RNA, 32 nt, Homo Sapiens
cgcaggaggcgcuccuuggcggugccuggagc

SEQ ID NO: 409156 - RNA, 32 nt, Homo Sapiens
uuucaacccuguacaugacucguguucaccau

SEQ ID NO: 409157 - RNA, 32 nt, Homo Sapiens
gaggcugagagaggaagaaaacacggagccuu

SEQ ID NO: 409158 - RNA, 32 nt, Homo Sapiens
auuacuucaaaugggaaaaaucuuuuuguaga

SEQ ID NO: 409159 - RNA, 32 nt, Homo Sapiens
uuaucauaauguuuuaaauuuauuuuagcugc

SEQ ID NO: 409160 - RNA, 32 nt, Homo Sapiens
ugaaaacauguucaggaugcccucucuccccu

SEQ ID NO: 409161 - RNA, 32 nt, Homo Sapiens
ugcagaauauaguguaucaaaaacuuuuuucu

SEQ ID NO: 409162 - RNA, 32 nt, Homo Sapiens
caggacgcggcggcgcccggugaccgaggccu

SEQ ID NO: 409163 - RNA, 32 nt, Homo Sapiens
gaacagguuggaggucuuaucuguggacuguc

SEQ ID NO: 409164 - RNA, 32 nt, Homo Sapiens
auugaagaacuaauguaaauuucacaagaucu

SEQ ID NO: 409165 - RNA, 32 nt, Homo Sapiens
aaacagcaggauguugaauugaucaucagaug

SEQ ID NO: 409166 - RNA, 32 nt, Homo Sapiens
gcggagccaggcggcagcauggaccgggcugg

SEQ ID NO: 409167 - RNA, 32 nt, Homo Sapiens
cagaaucaaugaguaaauuucuaccaagaguc

SEQ ID NO: 409168 - RNA, 32 nt, Homo Sapiens
ccaacauuuuuggcuuugaauuuucuaaauua

SEQ ID NO: 409169 - RNA, 30 nt, Homo Sapiens
gcagaaugggccaccagggucugucuggag

SEQ ID NO: 409170 - RNA, 32 nt, Homo Sapiens
uccugcauuucccucuggcgucucugcugacu

SEQ ID NO: 409171 - RNA, 32 nt, Homo Sapiens
uaccucaggacccagggcugcagacacaggcu

SEQ ID NO: 409172 - RNA, 32 nt, Homo Sapiens
gguggccugccagcacagccagugccaucagg

SEQ ID NO: 409173 - RNA, 31 nt, Homo Sapiens
gcugugugcugcgucucaggagucugugagc

SEQ ID NO: 409174 - RNA, 32 nt, Homo Sapiens
cugcagccugcaucccuucgccugcagccuac

SEQ ID NO: 409175 - RNA, 32 nt, Homo Sapiens
acugccuaucgcuugucuucuauucaccaugg

SEQ ID NO: 409176 - RNA, 32 nt, Homo Sapiens
cuuggauuuuuagauuccccagugucuaauuc

SEQ ID NO: 409177 - RNA, 32 nt, Homo Sapiens
auagauuuuuuaaugaauuaaucuuaacauag

SEQ ID NO: 409178 - RNA, 32 nt, Homo Sapiens
cccucacaagcaugaagugcuguggcuguucc

SEQ ID NO: 409179 - RNA, 32 nt, Homo Sapiens
auauuaaaaaauaucaccaaagaaguccugcu

SEQ ID NO: 409180 - RNA, 32 nt, Homo Sapiens
uuuucuuuucuuuuuacauauguacaaauugu

SEQ ID NO: 409181 - RNA, 32 nt, Homo Sapiens
acuuccaaaugggucuccuggugcgggggcgu

SEQ ID NO: 409182 - RNA, 32 nt, Homo Sapiens
ggaggcaggaggaggccgagggccccaggaug

SEQ ID NO: 409183 - RNA, 32 nt, Homo Sapiens
acaaauuagggaagaaguagggggaaaagaug

SEQ ID NO: 409184 - RNA, 29 nt, Homo Sapiens
auggggagcagcugggcacugggccggca

SEQ ID NO: 409185 - RNA, 31 nt, Homo Sapiens
agccccgugggccccacggagugagcggcau

SEQ ID NO: 409186 - RNA, 32 nt, Homo Sapiens
uuuggacuauaaagcauuauugaacuguuccu

SEQ ID NO: 409187 - RNA, 32 nt, Homo Sapiens
cguccggcucggaagggacgccggcagacacg

SEQ ID NO: 409188 - RNA, 32 nt, Homo Sapiens
uuuaaggcuauuuuaaaauauguacaauacua

SEQ ID NO: 409189 - RNA, 32 nt, Homo Sapiens
ggggauuuguagaagcuuuaugucuagcuaag

SEQ ID NO: 409190 - RNA, 32 nt, Homo Sapiens
acugggaagcgguggcucgggcagagcagcuc

SEQ ID NO: 409191 - RNA, 32 nt, Homo Sapiens
cuaauucauauauuuaacaaacaugauggugc

SEQ ID NO: 409192 - RNA, 31 nt, Homo Sapiens
accauggagccccagagaaucaugccacccu

SEQ ID NO: 409193 - RNA, 32 nt, Homo Sapiens
ccagcgucucggaccugugcgccccgccccgc

SEQ ID NO: 409194 - RNA, 32 nt, Homo Sapiens
aaacggauguucuaugagucuaggcggcaccg

SEQ ID NO: 409195 - RNA, 32 nt, Homo Sapiens
ggagcgcacagccagagcaggugcuggggaga

SEQ ID NO: 409196 - RNA, 32 nt, Homo Sapiens
ugaaguaaggccagcuguugaacgguuaaacu

SEQ ID NO: 409197 - RNA, 32 nt, Homo Sapiens
uaccaggcccuuccucucccccugucuguuuc

SEQ ID NO: 409198 - RNA, 32 nt, Homo Sapiens
ggaggcccaagccacugugccuggcccuuuau

SEQ ID NO: 409199 - RNA, 32 nt, Homo Sapiens
aagaccaucaguguuagcacaaacugagcaga

SEQ ID NO: 409200 - RNA, 32 nt, Homo Sapiens
uguuauuugcucuaauaagaaaauucuaaauc

SEQ ID NO: 409201 - RNA, 32 nt, Homo Sapiens
uuggcuuugcuggugagaucagagcccuccug

SEQ ID NO: 409202 - RNA, 32 nt, Homo Sapiens
gaaaauguguuucuuuaaauuuggauuuuggu

SEQ ID NO: 409203 - RNA, 32 nt, Homo Sapiens
uuuaccuacauauguaugucauuccaguauaa

SEQ ID NO: 409204 - RNA, 32 nt, Homo Sapiens
ucuguccuggaacacauugcuccaggccuccg

SEQ ID NO: 409205 - RNA, 31 nt, Homo Sapiens
ugcuaugaaaagaaaaaucaugauauuaaau

SEQ ID NO: 409206 - RNA, 32 nt, Homo Sapiens
ggcaggaagggagaaggacagccccuccggcu

SEQ ID NO: 409207 - RNA, 32 nt, Homo Sapiens
augcagcguguuuuccuuugccuuuuuugcac

SEQ ID NO: 409208 - RNA, 32 nt, Homo Sapiens
aggccagugacgaagagagggacagaggaggg

SEQ ID NO: 409209 - RNA, 32 nt, Homo Sapiens
ucccggugacauucuauuuccaggaaaauccg

SEQ ID NO: 409210 - RNA, 32 nt, Homo Sapiens
aguugugaaaauaacaugacgcucguccaagg

SEQ ID NO: 409211 - RNA, 32 nt, Homo Sapiens
guguucacagcaauaaaaccacuuccugcugc

SEQ ID NO: 409212 - RNA, 32 nt, Homo Sapiens
uucuggagggugggaggcaucuuggccugcag

SEQ ID NO: 409213 - RNA, 32 nt, Homo Sapiens
aaggcggcgggggaagauggcgguccuggggu

SEQ ID NO: 409214 - RNA, 32 nt, Homo Sapiens
acgggacacggggucggaggaaccaggaucua

SEQ ID NO: 409215 - RNA, 32 nt, Homo Sapiens
agcccggacagcuucuuugggagugcugcuaa

SEQ ID NO: 409216 - RNA, 32 nt, Homo Sapiens
agcugggaaaauucauuucaacuuauuuuaag

SEQ ID NO: 409217 - RNA, 32 nt, Homo Sapiens
uggacuucaguggccaucccaggccuccacgg

SEQ ID NO: 409218 - RNA, 32 nt, Homo Sapiens
ugucagggcccuuuccuguguacacgugacag

SEQ ID NO: 409219 - RNA, 32 nt, Homo Sapiens
gaucucuacauugggaaaaaacauggagucag

SEQ ID NO: 409220 - RNA, 32 nt, Homo Sapiens
aaaauguuauuuaaucuuugucucuguauuuu

SEQ ID NO: 409221 - RNA, 32 nt, Homo Sapiens
caggaacuggugucauuccuuaaaagauacgu

SEQ ID NO: 409222 - RNA, 32 nt, Homo Sapiens
guccgccggcgccucagguuucccccggacag

SEQ ID NO: 409223 - RNA, 32 nt, Homo Sapiens
cgucgcuguccggcugccuugggcugccgaac

SEQ ID NO: 409224 - RNA, 32 nt, Homo Sapiens
auuggcacaaaauaaaauaauuuuauuuuauu

SEQ ID NO: 409225 - RNA, 32 nt, Homo Sapiens
uaauuguuuuaaucugcaguucaccaauaaua

SEQ ID NO: 409226 - RNA, 32 nt, Homo Sapiens
uaugaauugagccccauguuuuagguguuacu

SEQ ID NO: 409227 - RNA, 32 nt, Homo Sapiens
cauggaauggggcagcagggccugcuguauuu

SEQ ID NO: 409228 - RNA, 32 nt, Homo Sapiens
aaggggacccuuugcuggccccugaggcugga

SEQ ID NO: 409229 - RNA, 32 nt, Homo Sapiens
ccuuuuuucuuuucuuuuuuuuuuuuuuuuuu

SEQ ID NO: 409230 - RNA, 32 nt, Homo Sapiens
uguguuguguucuuuauuuuuaauuuucaaag

SEQ ID NO: 409231 - RNA, 32 nt, Homo Sapiens
uuuuuuuuucuuucuuuuuuuuuuuuuuuuuu

SEQ ID NO: 409232 - RNA, 32 nt, Homo Sapiens
uccucccuguccuccuucuuggucucacacuu

SEQ ID NO: 409233 - RNA, 32 nt, Homo Sapiens
uuaaaauaaaagaucaauauuaucauaaugcu

SEQ ID NO: 409234 - RNA, 32 nt, Homo Sapiens
uuacauagcuguacgugugccauggugguuug

SEQ ID NO: 409235 - RNA, 32 nt, Homo Sapiens
ugguguccagcauggaugaaaccuuugaguuu

SEQ ID NO: 409236 - RNA, 32 nt, Homo Sapiens
cucccacuaucccacaaugucccacugggccc

SEQ ID NO: 409237 - RNA, 32 nt, Homo Sapiens
cacagccaucuucaccuucccuccucacucug

SEQ ID NO: 409238 - RNA, 32 nt, Homo Sapiens
uaugggggcuggaaguuccaggauagguuguc

SEQ ID NO: 409239 - RNA, 32 nt, Homo Sapiens
gcacccugucgccugagcugccugacagugac

SEQ ID NO: 409240 - RNA, 31 nt, Homo Sapiens
augcucagguagagaaagucuccauaguaua

SEQ ID NO: 409241 - RNA, 32 nt, Homo Sapiens
cgucaagcugucagcacuucagguguuugcaa

SEQ ID NO: 409242 - RNA, 32 nt, Homo Sapiens
ggaacaagccccagaggcaguauuugauuucc

SEQ ID NO: 409243 - RNA, 32 nt, Homo Sapiens
gucuauuuuuauuccuugauauuuuuucuuuc

SEQ ID NO: 409244 - RNA, 32 nt, Homo Sapiens
ggcccccauacuugcccucccuugcucccccu

SEQ ID NO: 409245 - RNA, 32 nt, Homo Sapiens
cucaagcgaaaacaccgcuuuauccugcugcg

SEQ ID NO: 409246 - RNA, 32 nt, Homo Sapiens
gcgccgggggaccuggggacucgggugcuggg

SEQ ID NO: 409247 - RNA, 32 nt, Homo Sapiens
uuuuuauguuuucuuucucacccaggcaaucu

SEQ ID NO: 409248 - RNA, 32 nt, Homo Sapiens
ggcauauuaaaagaaaaaucuuaauagcagug

SEQ ID NO: 409249 - RNA, 32 nt, Homo Sapiens
caucuaaaaacuuucuguuuucuggggucugg

SEQ ID NO: 409250 - RNA, 32 nt, Homo Sapiens
gagggggugaccagcuuggagucucugguggg

SEQ ID NO: 409251 - RNA, 32 nt, Homo Sapiens
ugagagggguccugggguguuucagacccuuc

SEQ ID NO: 409252 - RNA, 32 nt, Homo Sapiens
auaaauuauguuucaaaucuuuacauuuugga

SEQ ID NO: 409253 - RNA, 32 nt, Homo Sapiens
auuuccagccccagcaucuugcuggagccguu

SEQ ID NO: 409254 - RNA, 32 nt, Homo Sapiens
cagcacguagggcguaguuggugcuggaugga

SEQ ID NO: 409255 - RNA, 32 nt, Homo Sapiens
cuccagaccgaggacagcuguccgccaugccc

SEQ ID NO: 409256 - RNA, 32 nt, Homo Sapiens
uguguaaucagcugccuauuuggaaauugggc

SEQ ID NO: 409257 - RNA, 32 nt, Homo Sapiens
gcagcggcagacccuccagcgugucucccgag

SEQ ID NO: 409258 - RNA, 32 nt, Homo Sapiens
gaaauuaaggcauuuguuuaauuuauacuggu

SEQ ID NO: 409259 - RNA, 32 nt, Homo Sapiens
agggcucgggucaucccggcgcccagggucac

SEQ ID NO: 409260 - RNA, 32 nt, Homo Sapiens
uuccuuccaagccccuccucagaugggccugc

SEQ ID NO: 409261 - RNA, 32 nt, Homo Sapiens
caaaccaucuucugccucuucccuugagaaaa

SEQ ID NO: 409262 - RNA, 29 nt, Homo Sapiens
ucuuguucugggaagaggacggucuuuuu

SEQ ID NO: 409263 - RNA, 32 nt, Homo Sapiens
ccuggggcggccgccacccacccccagauggu

SEQ ID NO: 409264 - RNA, 32 nt, Homo Sapiens
aaaucccaggcauguuccugugcagaauaauc

SEQ ID NO: 409265 - RNA, 32 nt, Homo Sapiens
aauagcugccccccacuucucacuugcacacc

SEQ ID NO: 409266 - RNA, 32 nt, Homo Sapiens
aaauccuaauuucaaaacaucaccuugccacc

SEQ ID NO: 409267 - RNA, 32 nt, Homo Sapiens
gcucaccccucgccgcaccagcguccgcagca

SEQ ID NO: 409268 - RNA, 32 nt, Homo Sapiens
gauaaaaguaaaauaaauaaaauuuuagcaag

SEQ ID NO: 409269 - RNA, 32 nt, Homo Sapiens
cgcgaccacgcgggcugcagccugcagcacau

SEQ ID NO: 409270 - RNA, 32 nt, Homo Sapiens
uuuuaacuucaaaggcuucuuucucuuuaaaa

SEQ ID NO: 409271 - RNA, 32 nt, Homo Sapiens
uuuauuaauauuuggaaaauauacuuccauca

SEQ ID NO: 409272 - RNA, 32 nt, Homo Sapiens
uccugcucaguuaucuaaugucuuagaucagu

SEQ ID NO: 409273 - RNA, 32 nt, Homo Sapiens
gcuacucugaguguuauagguucaaguucacu

SEQ ID NO: 409274 - RNA, 32 nt, Homo Sapiens
gggacgcgguuacuccacaggauccgcugaac

SEQ ID NO: 409275 - RNA, 32 nt, Homo Sapiens
ggcggcggcggcggcggcagcugcuugggcgc

SEQ ID NO: 409276 - RNA, 32 nt, Homo Sapiens
augaugaaaaaagaagcuacaaggauaaagga

SEQ ID NO: 409277 - RNA, 30 nt, Homo Sapiens
gcgcgauggcuagcggcagcgccgggaagc

SEQ ID NO: 409278 - RNA, 32 nt, Homo Sapiens
gacuguauuucagugagcugcccccaaaucaa

SEQ ID NO: 409279 - RNA, 32 nt, Homo Sapiens
cagcacuccgcggcggggccgccgccagcucc

SEQ ID NO: 409280 - RNA, 32 nt, Homo Sapiens
aucauguguacaaaaaguuuucuuguuauuaa

SEQ ID NO: 409281 - RNA, 32 nt, Homo Sapiens
guuuacaaccccccacccccagcccucccccg

SEQ ID NO: 409282 - RNA, 32 nt, Homo Sapiens
gaaagaaaacaauuaaggaaauacaauacuaa

SEQ ID NO: 409283 - RNA, 32 nt, Homo Sapiens
ucuaguggagacggggauucaggccgcuugaa

SEQ ID NO: 409284 - RNA, 32 nt, Homo Sapiens
caagcccgccuuaucacccauuccagcucacc

SEQ ID NO: 409285 - RNA, 32 nt, Homo Sapiens
gaucucugucuccuuuauacaccucuaucccc

SEQ ID NO: 409286 - RNA, 32 nt, Homo Sapiens
gaagaugcuggacauuggauucuagcacuggg

SEQ ID NO: 409287 - RNA, 32 nt, Homo Sapiens
agcagacaccaaucggaugcucauuagagguu

SEQ ID NO: 409288 - RNA, 32 nt, Homo Sapiens
aaauuuggcaauggggucugggaaauguuugu

SEQ ID NO: 409289 - RNA, 32 nt, Homo Sapiens
agcaaaucuuggagcugcuggugcuggagcaa

SEQ ID NO: 409290 - RNA, 32 nt, Homo Sapiens
uucugguauucacuuuacuaugugauagaagu

SEQ ID NO: 409291 - RNA, 32 nt, Homo Sapiens
ugcugcacuccagccuaggcaacauagugaga

SEQ ID NO: 409292 - RNA, 32 nt, Homo Sapiens
guacgggccuuuuaauaagauauuguauuuua

SEQ ID NO: 409293 - RNA, 32 nt, Homo Sapiens
uacccaggccccaaggaguaucugcuucccaa

SEQ ID NO: 409294 - RNA, 32 nt, Homo Sapiens
cgccgggcacugggcuccugcacagagggacc

SEQ ID NO: 409295 - RNA, 32 nt, Homo Sapiens
gcaacuuggagccagccaggauggggugggga

SEQ ID NO: 409296 - RNA, 32 nt, Homo Sapiens
cggggaaauucugcccugaggaaggaauaguu

SEQ ID NO: 409297 - RNA, 32 nt, Homo Sapiens
ggaugacagacucagcuaauguuuccuugucc

SEQ ID NO: 409298 - RNA, 32 nt, Homo Sapiens
acaagaaaaauauuugagaguccucaaagcuu

SEQ ID NO: 409299 - RNA, 32 nt, Homo Sapiens
auugcuaauaaugaugacauggcauuaugcuu

SEQ ID NO: 409300 - RNA, 32 nt, Homo Sapiens
gacaagacuaaaucauucuuuuuuaugguuca

SEQ ID NO: 409301 - RNA, 32 nt, Homo Sapiens
auuuuugaauguucuuuuuaucuuaccgaccu

SEQ ID NO: 409302 - RNA, 32 nt, Homo Sapiens
ugauaccccccucugucuugugaaggcagggg

SEQ ID NO: 409303 - RNA, 32 nt, Homo Sapiens
ugcugggcuggcgggcgggcagagcacggcac

SEQ ID NO: 409304 - RNA, 32 nt, Homo Sapiens
ugcccccggccauggcgugcggagccacucug

SEQ ID NO: 409305 - RNA, 32 nt, Homo Sapiens
cugaauagucaucaaaauggcuuaucaaaaag

SEQ ID NO: 409306 - RNA, 32 nt, Homo Sapiens
aauucuuuuaucaaucccagcauuuugagauc

SEQ ID NO: 409307 - RNA, 32 nt, Homo Sapiens
cgccuggcagcugucggaacuccggagaccac

SEQ ID NO: 409308 - RNA, 32 nt, Homo Sapiens
caugcaaaauauguuuaaaauaaaaugaaaau

SEQ ID NO: 409309 - RNA, 32 nt, Homo Sapiens
ggaggcgggcgcgggcggccggccaugaucgc

SEQ ID NO: 409310 - RNA, 29 nt, Homo Sapiens
ugcaaugcaaggucaggaaugccacaauc

SEQ ID NO: 409311 - RNA, 32 nt, Homo Sapiens
aaugugugaccgugauauagugagaaagauuc

SEQ ID NO: 409312 - RNA, 32 nt, Homo Sapiens
uuuaaauuaaaauaaaaccuugaaaaaaguca

SEQ ID NO: 409313 - RNA, 32 nt, Homo Sapiens
gccaugcuccaccaccugggcgcccagcuaca

SEQ ID NO: 409314 - RNA, 32 nt, Homo Sapiens
agcccucagacccugggguccuggagcugccu

SEQ ID NO: 409315 - RNA, 32 nt, Homo Sapiens
acccucgccccgcucucugcgcucugccgccg

SEQ ID NO: 409316 - RNA, 32 nt, Homo Sapiens
aaucaguacuuuguuuccccagguagaguggg

SEQ ID NO: 409317 - RNA, 32 nt, Homo Sapiens
augccucaguuauguguuugucaauguacugg

SEQ ID NO: 409318 - RNA, 32 nt, Homo Sapiens
ccggaccggcgcgccagggcuguccgucgcgu

SEQ ID NO: 409319 - RNA, 32 nt, Homo Sapiens
cuggcagcuuucuucaagagacuugcauaaaa

SEQ ID NO: 409320 - RNA, 32 nt, Homo Sapiens
gauucugguuuuuuuucuuucuuuuuuuuuuu

SEQ ID NO: 409321 - RNA, 32 nt, Homo Sapiens
ggccggacgcgguggcucacgccuguaaucgc

SEQ ID NO: 409322 - RNA, 32 nt, Homo Sapiens
uuuuagcccugcaguuuucaccaccagcacca

SEQ ID NO: 409323 - RNA, 32 nt, Homo Sapiens
ggcucccccucccccgaucccucgggucccgg

SEQ ID NO: 409324 - RNA, 32 nt, Homo Sapiens
aaaagaaaacaucucugcuguagccuacagcc

SEQ ID NO: 409325 - RNA, 32 nt, Homo Sapiens
ucaaaauuuuucccaaauauaaagaaaacuaa

SEQ ID NO: 409326 - RNA, 32 nt, Homo Sapiens
cugacagccaaagaugaaaaacaaacagaaaa

SEQ ID NO: 409327 - RNA, 32 nt, Homo Sapiens
gcauaguuauuuuaaauuuaauggagaugaau

SEQ ID NO: 409328 - RNA, 32 nt, Homo Sapiens
cuggguagagaauggcugaggaggagauuacc

SEQ ID NO: 409329 - RNA, 32 nt, Homo Sapiens
auucacaguagcuuccaugugcucuuaguucu

SEQ ID NO: 409330 - RNA, 32 nt, Homo Sapiens
ucagaaacccucacaauaaaccagaccagaag

SEQ ID NO: 409331 - RNA, 32 nt, Homo Sapiens
caggugaaauguaugugugcaaugcgacgaga

SEQ ID NO: 409332 - RNA, 32 nt, Homo Sapiens
auccgagaugaccagcucugagccaacuucug

SEQ ID NO: 409333 - RNA, 32 nt, Homo Sapiens
ugucuugagucugguuggcuucugggaacuug

SEQ ID NO: 409334 - RNA, 32 nt, Homo Sapiens
ggcugggugcgguggcucaugcacguaauccc

SEQ ID NO: 409335 - RNA, 32 nt, Homo Sapiens
auuuuccugagguuuuucacuccaccaaaucu

SEQ ID NO: 409336 - RNA, 32 nt, Homo Sapiens
cugacuugcagugauaaagaaaagcauggagc

SEQ ID NO: 409337 - RNA, 32 nt, Homo Sapiens
uuuuaguagagacgggguuuugccauguugcc

SEQ ID NO: 409338 - RNA, 32 nt, Homo Sapiens
auugcgcuuccagccgcccuugggugcugcgu

SEQ ID NO: 409339 - RNA, 32 nt, Homo Sapiens
ggggcacacggacccauccggugggucaggac

SEQ ID NO: 409340 - RNA, 32 nt, Homo Sapiens
aacccaaucuuccugaugauccauucaaaaac

SEQ ID NO: 409341 - RNA, 32 nt, Homo Sapiens
uacacuaaaacuuuggcaucuacauuacauuu

SEQ ID NO: 409342 - RNA, 32 nt, Homo Sapiens
ucucaccuuauuacacuuuaauuaaaauaucg

SEQ ID NO: 409343 - RNA, 32 nt, Homo Sapiens
agcaaggcaguccagaugcgugucucgagcgc

SEQ ID NO: 409344 - RNA, 32 nt, Homo Sapiens
uguaaacauuuuaauuuuaguuucaugagucu

SEQ ID NO: 409345 - RNA, 32 nt, Homo Sapiens
gcagugcagccacagcucccccggccuucagg

SEQ ID NO: 409346 - RNA, 32 nt, Homo Sapiens
uaucaauuccucccauuucaauucaguuaaga

SEQ ID NO: 409347 - RNA, 32 nt, Homo Sapiens
cccagaagcagcccccaccccacacaugaccc

SEQ ID NO: 409348 - RNA, 32 nt, Homo Sapiens
agggcauccgcaauguugguuucacugagagc

SEQ ID NO: 409349 - RNA, 32 nt, Homo Sapiens
ugggggguaaggaaacaaguuacagaaauuac

SEQ ID NO: 409350 - RNA, 32 nt, Homo Sapiens
ucccuacccccagcugacacuggaccccaaca

SEQ ID NO: 409351 - RNA, 32 nt, Homo Sapiens
cuuuauugcaaauauggaugacaagggucucu

SEQ ID NO: 409352 - RNA, 29 nt, Homo Sapiens
ggaaauggcugcuucaucaucauccuccu

SEQ ID NO: 409353 - RNA, 32 nt, Homo Sapiens
ugacuucuguacucugguggccacuggaucuu

SEQ ID NO: 409354 - RNA, 32 nt, Homo Sapiens
ccuuaggaauaaaauuguugagcaaugcaaaa

SEQ ID NO: 409355 - RNA, 32 nt, Homo Sapiens
uagauaucuauuucuguuacauuuuauuacug

SEQ ID NO: 409356 - RNA, 32 nt, Homo Sapiens
agcaaacccaagucuuaguugcuacaagaaaa

SEQ ID NO: 409357 - RNA, 32 nt, Homo Sapiens
uuucuaaucugugccuugagucgggugggggg

SEQ ID NO: 409358 - RNA, 32 nt, Homo Sapiens
uuguucauuuguaauuuuaacaaguugaacau

SEQ ID NO: 409359 - RNA, 32 nt, Homo Sapiens
gccauuagaucugugcuuuuuaucucugcucu

SEQ ID NO: 409360 - RNA, 32 nt, Homo Sapiens
cggcccggcucggcguggccccggccuccaag

SEQ ID NO: 409361 - RNA, 32 nt, Homo Sapiens
ggucucaugagcaaaaucuucaccuaugaucc

SEQ ID NO: 409362 - RNA, 32 nt, Homo Sapiens
ggagggugguggccauuacuagagggggccug

SEQ ID NO: 409363 - RNA, 32 nt, Homo Sapiens
aggguaauuacacagcauuuugaaagcgaagc

SEQ ID NO: 409364 - RNA, 32 nt, Homo Sapiens
ggacauggugguggacgagugcggcugccgcu

SEQ ID NO: 409365 - RNA, 32 nt, Homo Sapiens
aauauuauauauauguauauacgacauauuca

SEQ ID NO: 409366 - RNA, 32 nt, Homo Sapiens
cuaaacaaacaaaaauugaauaauuuauucac

SEQ ID NO: 409367 - RNA, 32 nt, Homo Sapiens
augucccauuuucuggauuugucugaucguuu

SEQ ID NO: 409368 - RNA, 32 nt, Homo Sapiens
uggccuggccaagcugacgucccuccauuuuc

SEQ ID NO: 409369 - RNA, 32 nt, Homo Sapiens
ggaaauugugucugcgguacagugaggagaca

SEQ ID NO: 409370 - RNA, 27 nt, Homo Sapiens
cugaaguccuucuucggaacugggugg

SEQ ID NO: 409371 - RNA, 32 nt, Homo Sapiens
gcccaggcaguguugcugcgguugccuaaguu

SEQ ID NO: 409372 - RNA, 32 nt, Homo Sapiens
gccgccugccccuccuucuccagccucuucuc

SEQ ID NO: 409373 - RNA, 32 nt, Homo Sapiens
cucccuggagggcaagccuuuguggccccuuc

SEQ ID NO: 409374 - RNA, 29 nt, Homo Sapiens
uagcuugugacuuugcugaaugguaugua

SEQ ID NO: 409375 - RNA, 32 nt, Homo Sapiens
gcacugguaccccgggcgccacguucucaguu

SEQ ID NO: 409376 - RNA, 32 nt, Homo Sapiens
agcguggauaggauuuguuucuuaaugggugu

SEQ ID NO: 409377 - RNA, 32 nt, Homo Sapiens
aggucaagacaauuuaauuuauuuacaugcug

SEQ ID NO: 409378 - RNA, 32 nt, Homo Sapiens
aaagagaaggaccugugaaacuacugaggcca

SEQ ID NO: 409379 - RNA, 32 nt, Homo Sapiens
accccccauuuuuucuuuucaccacccuguug

SEQ ID NO: 409380 - RNA, 32 nt, Homo Sapiens
cagggacucucgucugugggacgggauccaag

SEQ ID NO: 409381 - RNA, 32 nt, Homo Sapiens
gcuggaggagucucucuucugcucuccacuca

SEQ ID NO: 409382 - RNA, 32 nt, Homo Sapiens
agaauacuucauccugauucucuuuuucuuau

SEQ ID NO: 409383 - RNA, 31 nt, Homo Sapiens
acgacacugccgguuccagagggcacgggaa

SEQ ID NO: 409384 - RNA, 32 nt, Homo Sapiens
gccuucaaaauuuuuguuuagaucaucaggua

SEQ ID NO: 409385 - RNA, 32 nt, Homo Sapiens
uaauuuugauucagaaguagucccagcucaua

SEQ ID NO: 409386 - RNA, 32 nt, Homo Sapiens
gacagagucucgcucugucacccagguuggag

SEQ ID NO: 409387 - RNA, 32 nt, Homo Sapiens
cccuggggcuccuguacccgccccacagaugu

SEQ ID NO: 409388 - RNA, 32 nt, Homo Sapiens
aaaagaauugguucugugacccgggaagcuuu

SEQ ID NO: 409389 - RNA, 32 nt, Homo Sapiens
ugucuguguuuguuuuaaaagucacuuauuuc

SEQ ID NO: 409390 - RNA, 32 nt, Homo Sapiens
guuccuuuucuuuuuuggacucugaguaugag

SEQ ID NO: 409391 - RNA, 32 nt, Homo Sapiens
gauggagucucacucugucacccaggcuggag

SEQ ID NO: 409392 - RNA, 28 nt, Homo Sapiens
cccauggcgcccgucgccgucugggccg

SEQ ID NO: 409393 - RNA, 32 nt, Homo Sapiens
auaaaguguugagauuugucuauggagaaagc

SEQ ID NO: 409394 - RNA, 32 nt, Homo Sapiens
ccuucucaguuauucuggaauaaggcaaggag

SEQ ID NO: 409395 - RNA, 32 nt, Homo Sapiens
ugagcccauguucugcccccagcccaaagggg

SEQ ID NO: 409396 - RNA, 32 nt, Homo Sapiens
gacagagucuugcucugucacccaggcuggag

SEQ ID NO: 409397 - RNA, 32 nt, Homo Sapiens
ugucuucguucacauccucuuuguuuccucuu

SEQ ID NO: 409398 - RNA, 32 nt, Homo Sapiens
cauucauaaccaaaguuguaggggcauggagg

SEQ ID NO: 409399 - RNA, 32 nt, Homo Sapiens
uauuaggagcagcgcuuauauuuuuccauaau

SEQ ID NO: 409400 - RNA, 32 nt, Homo Sapiens
gcuugagcccaggaguucaagagcagccuggg

SEQ ID NO: 409401 - RNA, 32 nt, Homo Sapiens
uuuuuuggguuuuuuuuuuuuacugcagaaaa

SEQ ID NO: 409402 - RNA, 32 nt, Homo Sapiens
cuagucccauucuugugggcuuuauucucacc

SEQ ID NO: 409403 - RNA, 32 nt, Homo Sapiens
aaagcaaauacaaaacagaacagaggauucaa

SEQ ID NO: 409404 - RNA, 32 nt, Homo Sapiens
uguacacauugcauuuugauaaaauuaauuuu

SEQ ID NO: 409405 - RNA, 32 nt, Homo Sapiens
aggcucuuagcagcuuccagauugacgacaag

SEQ ID NO: 409406 - RNA, 32 nt, Homo Sapiens
ggucuuaaaaauuuaaagaaauauaaagcugg

SEQ ID NO: 409407 - RNA, 30 nt, Homo Sapiens
ggaugucuucuagcugcagaugccucugcg

SEQ ID NO: 409408 - RNA, 32 nt, Homo Sapiens
acgaggucaggaguucaaaaccagccugucca

SEQ ID NO: 409409 - RNA, 32 nt, Homo Sapiens
uuggccuuugugaaaugaaauuuuuggcucuu

SEQ ID NO: 409410 - RNA, 32 nt, Homo Sapiens
guaaugaaacuaaauaaaaauguuucaccuuu

SEQ ID NO: 409411 - RNA, 32 nt, Homo Sapiens
ccugaccucaggugaucugugugccccagccu

SEQ ID NO: 409412 - RNA, 32 nt, Homo Sapiens
aacugucucacgugacuauuaagcaacuauac

SEQ ID NO: 409413 - RNA, 32 nt, Homo Sapiens
gggcaggugacgggcgggcgcgggcgucgcag

SEQ ID NO: 409414 - RNA, 32 nt, Homo Sapiens
gcccaccucccucucuacgucucuguaccgag

SEQ ID NO: 409415 - RNA, 32 nt, Homo Sapiens
uggggaccgggggagggcuggugcucccgcgg

SEQ ID NO: 409416 - RNA, 32 nt, Homo Sapiens
ugcccagccaacauacuaaaaccccgucucua

SEQ ID NO: 409417 - RNA, 32 nt, Homo Sapiens
gccucggguggcagcgaccaguccuucccaga

SEQ ID NO: 409418 - RNA, 32 nt, Homo Sapiens
accagccugggcuacauagugagaccacaucu

SEQ ID NO: 409419 - RNA, 32 nt, Homo Sapiens
ugccacuggugaugauagauuucaaaaaacaa

SEQ ID NO: 409420 - RNA, 32 nt, Homo Sapiens
auuguaaccacugggccuuccaacuuugcugg

SEQ ID NO: 409421 - RNA, 32 nt, Homo Sapiens
guauucugguagugccucucugggcccugguu

SEQ ID NO: 409422 - RNA, 32 nt, Homo Sapiens
gcugggacccggccccggccugcccgaugggg

SEQ ID NO: 409423 - RNA, 30 nt, Homo Sapiens
gcgucggugcuaaugguggcagcagcagca

SEQ ID NO: 409424 - RNA, 32 nt, Homo Sapiens
ugguugggaggaccagagccugucucagggaa

SEQ ID NO: 409425 - RNA, 32 nt, Homo Sapiens
gcgcuggaggucgaagcuuccagcucuggaca

SEQ ID NO: 409426 - RNA, 29 nt, Homo Sapiens
caccaugugaagauugggaucaugugacc

SEQ ID NO: 409427 - RNA, 32 nt, Homo Sapiens
cccccuccaacccccacccccaugcucuggac

SEQ ID NO: 409428 - RNA, 32 nt, Homo Sapiens
gcugggccagggaaacaaaguuuacauugucc

SEQ ID NO: 409429 - RNA, 32 nt, Homo Sapiens
ucucuuugauuucauguaaucucuccuuaaau

SEQ ID NO: 409430 - RNA, 31 nt, Homo Sapiens
uugaagggggcgguguuggccuggcuucugg

SEQ ID NO: 409431 - RNA, 32 nt, Homo Sapiens
ggcuggggacgccagggcagggacagcgagca

SEQ ID NO: 409432 - RNA, 32 nt, Homo Sapiens
cuccugggccggggcucuggcccccaacgugu

SEQ ID NO: 409433 - RNA, 32 nt, Homo Sapiens
uucagccccagucacccucuuuuacacaugug

SEQ ID NO: 409434 - RNA, 32 nt, Homo Sapiens
agcugaguaagggcuccuggggguuggcugga

SEQ ID NO: 409435 - RNA, 32 nt, Homo Sapiens
cacuguuuacuaaaagagcugccaucauggcc

SEQ ID NO: 409436 - RNA, 32 nt, Homo Sapiens
cucuuuccguggcuggggguagacuuaauaaa

SEQ ID NO: 409437 - RNA, 32 nt, Homo Sapiens
gugccuucuaaagauuccaacagagaugugag

SEQ ID NO: 409438 - RNA, 32 nt, Homo Sapiens
cccucuuccaucuauagacuuugucauuuuug

SEQ ID NO: 409439 - RNA, 32 nt, Homo Sapiens
gcgcgcggccccgaugcuggacaugagcgagg

SEQ ID NO: 409440 - RNA, 32 nt, Homo Sapiens
guugaggagacaaagaaaaagcgcucugauuc

SEQ ID NO: 409441 - RNA, 32 nt, Homo Sapiens
guguagggcccggcccguguuggccccaggac

SEQ ID NO: 409442 - RNA, 32 nt, Homo Sapiens
cagacaugcagcagcgggcccgggccaccuca

SEQ ID NO: 409443 - RNA, 32 nt, Homo Sapiens
gguugccagggauaaagagcuuccucacugga

SEQ ID NO: 409444 - RNA, 32 nt, Homo Sapiens
ccggccucagccagcccugggaccucugcgga

SEQ ID NO: 409445 - RNA, 32 nt, Homo Sapiens
uuauguuuuuauucgcuuucugguaacuucug

SEQ ID NO: 409446 - RNA, 32 nt, Homo Sapiens
ugccuaggucccuccgcccguagcugucgggu

SEQ ID NO: 409447 - RNA, 32 nt, Homo Sapiens
auuggagugucuguuucuuuaagcugugaaua

SEQ ID NO: 409448 - RNA, 32 nt, Homo Sapiens
cgcggcccgaggggcggacgcgagcggacuga

SEQ ID NO: 409449 - RNA, 32 nt, Homo Sapiens
ucaguauuuuaaaaaauaaaacuaugaaagca

SEQ ID NO: 409450 - RNA, 32 nt, Homo Sapiens
uucuuuuucuucacuagaggcaucucaggugc

SEQ ID NO: 409451 - RNA, 32 nt, Homo Sapiens
gcuaaaaugcccuguguaguaucauguaaaau

SEQ ID NO: 409452 - RNA, 32 nt, Homo Sapiens
ccucucugcgaagaauguaaucuccuacagag

SEQ ID NO: 409453 - RNA, 32 nt, Homo Sapiens
cugugggccaagggcacccugggaaguaaaag

SEQ ID NO: 409454 - RNA, 32 nt, Homo Sapiens
accuaggacugaugcuguggggugcuggugga

SEQ ID NO: 409455 - RNA, 31 nt, Homo Sapiens
cacacaaaauaaaaacaguaucucgcuucug

SEQ ID NO: 409456 - RNA, 32 nt, Homo Sapiens
gcgggcggcgcccuggccgccggcagccuugu

SEQ ID NO: 409457 - RNA, 32 nt, Homo Sapiens
gugccucggaggaggagggccgguccggcagu

SEQ ID NO: 409458 - RNA, 32 nt, Homo Sapiens
uagaucauuuguucugggaguauaaagccacc

SEQ ID NO: 409459 - RNA, 32 nt, Homo Sapiens
gagauuuucugcagugguugcguuucacugua

SEQ ID NO: 409460 - RNA, 32 nt, Homo Sapiens
uuugugugguuuuaguagaggugggguuucac

SEQ ID NO: 409461 - RNA, 32 nt, Homo Sapiens
guggaccuuaggccuuccucucuccagauguu

SEQ ID NO: 409462 - RNA, 32 nt, Homo Sapiens
caccuggacccaggccaggcccggcccggcga

SEQ ID NO: 409463 - RNA, 32 nt, Homo Sapiens
gcugguaugcuucagcuugcuggcaaugaugu

SEQ ID NO: 409464 - RNA, 32 nt, Homo Sapiens
gcacuguucaguuuuccaaccacuuggugguu

SEQ ID NO: 409465 - RNA, 32 nt, Homo Sapiens
uaaaaucuuuacaguucucaccauuucacgua

SEQ ID NO: 409466 - RNA, 32 nt, Homo Sapiens
gcacuucccacuuuguccaggaggagccugag

SEQ ID NO: 409467 - RNA, 32 nt, Homo Sapiens
cauuuuccauuuuuguuuaaucaaauacuugc

SEQ ID NO: 409468 - RNA, 32 nt, Homo Sapiens
guuuuaacugggguagcacuccugcuaggagu

SEQ ID NO: 409469 - RNA, 32 nt, Homo Sapiens
uuacuuuuuaacuggcuucauuuuaggaauaa

SEQ ID NO: 409470 - RNA, 32 nt, Homo Sapiens
aggggacagaggcuggcggcagacgggccggg

SEQ ID NO: 409471 - RNA, 32 nt, Homo Sapiens
agcuaaggauaaaacauuucuuaccacuugau

SEQ ID NO: 409472 - RNA, 32 nt, Homo Sapiens
cauaaugucaucacuguaauaugacaagaauu

SEQ ID NO: 409473 - RNA, 32 nt, Homo Sapiens
cccuggggauaaaggaacaggaucuuagggaa

SEQ ID NO: 409474 - RNA, 32 nt, Homo Sapiens
cugggcugggagggagagaccggagcagcgcc

SEQ ID NO: 409475 - RNA, 30 nt, Homo Sapiens
uguggucaacggcgcgcgggucuccaggcu

SEQ ID NO: 409476 - RNA, 32 nt, Homo Sapiens
uuaucauuaucaucaucaucgucaucaucaua

SEQ ID NO: 409477 - RNA, 32 nt, Homo Sapiens
gggccugaauauauuucacaauuuccauagug

SEQ ID NO: 409478 - RNA, 32 nt, Homo Sapiens
auuugagaaaauaaacaucugagucauucaaa

SEQ ID NO: 409479 - RNA, 32 nt, Homo Sapiens
uacacagaaaacuacaagauguguggcguugc

SEQ ID NO: 409480 - RNA, 32 nt, Homo Sapiens
cgcggaggaggaagaggguagacaggggcgac

SEQ ID NO: 409481 - RNA, 32 nt, Homo Sapiens
gcccugccuggauuuguauccuuggcuucgug

SEQ ID NO: 409482 - RNA, 32 nt, Homo Sapiens
acagccugcccccguccauccaugagccagca

SEQ ID NO: 409483 - RNA, 32 nt, Homo Sapiens
cagaaggauuacauuucuaacacaugaacuuu

SEQ ID NO: 409484 - RNA, 32 nt, Homo Sapiens
guucacugggccagcucugaaauccaaaauca

SEQ ID NO: 409485 - RNA, 32 nt, Homo Sapiens
aucugcugaacuuaacaaaacuguucauccug

SEQ ID NO: 409486 - RNA, 28 nt, Homo Sapiens
ucaaugggggcuaccaccaggaggagcu

SEQ ID NO: 409487 - RNA, 32 nt, Homo Sapiens
ccugcuguuccugcugauguaccuguucacgc

SEQ ID NO: 409488 - RNA, 32 nt, Homo Sapiens
uuuacacucuugauucuacaauguagaaaaug

SEQ ID NO: 409489 - RNA, 32 nt, Homo Sapiens
uggguagagaagaaguuccacuuuuugcccaa

SEQ ID NO: 409490 - RNA, 32 nt, Homo Sapiens
auuauauguguauauauacagacacauaugua

SEQ ID NO: 409491 - RNA, 32 nt, Homo Sapiens
uuuugcuaagacuuaaacggacuugagugcag

SEQ ID NO: 409492 - RNA, 32 nt, Homo Sapiens
cacuaaagagggaagaucuugauccuuucaaa

SEQ ID NO: 409493 - RNA, 32 nt, Homo Sapiens
ucgggccuggggaucuggcuguccccgucccc

SEQ ID NO: 409494 - RNA, 32 nt, Homo Sapiens
uguacccauccagcgaccagccaggcugcggc

SEQ ID NO: 409495 - RNA, 32 nt, Homo Sapiens
auuaacggccuggauuuaucauuggguugggg

SEQ ID NO: 409496 - RNA, 32 nt, Homo Sapiens
agaugguuguggcccucugaugagaugugugc

SEQ ID NO: 409497 - RNA, 32 nt, Homo Sapiens
uuguagcuuccacucacuuauucuugcauuca

SEQ ID NO: 409498 - RNA, 32 nt, Homo Sapiens
cuccugggcuaagggagcucagcuauauuuuc

SEQ ID NO: 409499 - RNA, 32 nt, Homo Sapiens
ugugugcgcacgcgcgcacgcgcacacacuca

SEQ ID NO: 409500 - RNA, 32 nt, Homo Sapiens
cugcugccaugaccgacucuccccucagagga

SEQ ID NO: 409501 - RNA, 32 nt, Homo Sapiens
gucuggggagccgagccccgcuucucgcugcg

SEQ ID NO: 409502 - RNA, 32 nt, Homo Sapiens
agagaacccaguucuagguacugucugggccu

SEQ ID NO: 409503 - RNA, 32 nt, Homo Sapiens
cucauuuuacucucauguucuaaacagcaaca

SEQ ID NO: 409504 - RNA, 31 nt, Homo Sapiens
agaacauggcacuggcaucaggcaaggguca

SEQ ID NO: 409505 - RNA, 31 nt, Homo Sapiens
cuuccugugucccagaacucggcguccagcu

SEQ ID NO: 409506 - RNA, 32 nt, Homo Sapiens
gaucgagcccucgccgaggccugccgccaugg

SEQ ID NO: 409507 - RNA, 32 nt, Homo Sapiens
cacuccugccugggaggggaaugcagcauuca

SEQ ID NO: 409508 - RNA, 32 nt, Homo Sapiens
guuagggcagugaaagguucuguaugacacug

SEQ ID NO: 409509 - RNA, 32 nt, Homo Sapiens
guaaugauagugcagaaauuggaaccaagagu

SEQ ID NO: 409510 - RNA, 32 nt, Homo Sapiens
ggcagcuuuuucuguggaggacagacggccgg

SEQ ID NO: 409511 - RNA, 32 nt, Homo Sapiens
agugaugccccucagcugaguguccaaggcug

SEQ ID NO: 409512 - RNA, 32 nt, Homo Sapiens
uacuuagagaauaaauaugucuauuguucaag

SEQ ID NO: 409513 - RNA, 32 nt, Homo Sapiens
ucuacuaaaaauucaaaaaaaaaauuagcugg

SEQ ID NO: 409514 - RNA, 32 nt, Homo Sapiens
auuccucugacuuuauacuguuauuacugcau

SEQ ID NO: 409515 - RNA, 32 nt, Homo Sapiens
auuuaauuuuuccucauuauucuaaaacuuag

SEQ ID NO: 409516 - RNA, 32 nt, Homo Sapiens
uaggccaggcacaguggcuacgccuguaaucc

SEQ ID NO: 409517 - RNA, 32 nt, Homo Sapiens
uaaggcccugucagcauggcucccuuuauccc

SEQ ID NO: 409518 - RNA, 32 nt, Homo Sapiens
gaaucuuuuuucuuuuuugucauucugccaug

SEQ ID NO: 409519 - RNA, 32 nt, Homo Sapiens
auaggaagggaagcuuuuuuuuuucuuuuuuu

SEQ ID NO: 409520 - RNA, 32 nt, Homo Sapiens
acaggccaccgccccagggcguggccgcuguu

SEQ ID NO: 409521 - RNA, 32 nt, Homo Sapiens
ggcgcgacacucgggcucgggcggccgggaag

SEQ ID NO: 409522 - RNA, 32 nt, Homo Sapiens
cggccgccggacgcgcccucgcagcuuccgcc

SEQ ID NO: 409523 - RNA, 32 nt, Homo Sapiens
agucucuuaggcuuccuucucauuuccacuac

SEQ ID NO: 409524 - RNA, 32 nt, Homo Sapiens
ccucgggagacaccccggccccucaugccucc

SEQ ID NO: 409525 - RNA, 32 nt, Homo Sapiens
acugaugauaaauuauuuccagauucaaucag

SEQ ID NO: 409526 - RNA, 31 nt, Homo Sapiens
cugaaggugugggugucgagcccucuggcag

SEQ ID NO: 409527 - RNA, 32 nt, Homo Sapiens
cuuccucagcugacaaggaauuuuggucccug

SEQ ID NO: 409528 - RNA, 32 nt, Homo Sapiens
ccugcucccuucugccagccugcauccucucc

SEQ ID NO: 409529 - RNA, 32 nt, Homo Sapiens
agaauccaaccuggcuuuaugcaccuagaugu

SEQ ID NO: 409530 - RNA, 32 nt, Homo Sapiens
gccaggaaagagaaggaaugucaugccagggu

SEQ ID NO: 409531 - RNA, 32 nt, Homo Sapiens
ggggggcgcagcacgcgccgcgcagccauggg

SEQ ID NO: 409532 - RNA, 32 nt, Homo Sapiens
caggcuucuuccuacaucuucuucccaguaag

SEQ ID NO: 409533 - RNA, 32 nt, Homo Sapiens
aaagcuuggaauacaagaagacucucaaaauc

SEQ ID NO: 409534 - RNA, 32 nt, Homo Sapiens
auauuuuacacguaucucuugguaugcaucuu

SEQ ID NO: 409535 - RNA, 32 nt, Homo Sapiens
agccucuggacuggaugccuucuguccuagcu

SEQ ID NO: 409536 - RNA, 32 nt, Homo Sapiens
gcauaaaggaggaaacaaagcauauagaauac

SEQ ID NO: 409537 - RNA, 32 nt, Homo Sapiens
ucucugcuggcgggacugaauuuucucaaggc

SEQ ID NO: 409538 - RNA, 32 nt, Homo Sapiens
aacacaccguuugguuagauugugcagucagc

SEQ ID NO: 409539 - RNA, 32 nt, Homo Sapiens
aaucagacucacccgaaccccugggguuuugg

SEQ ID NO: 409540 - RNA, 32 nt, Homo Sapiens
ggguuagugaauguucuacuauuaucucucag

SEQ ID NO: 409541 - RNA, 32 nt, Homo Sapiens
caguggcucugauucacuccagcccuagccuc

SEQ ID NO: 409542 - RNA, 29 nt, Homo Sapiens
guucagaugaagaugcaggugcuagcacg

SEQ ID NO: 409543 - RNA, 32 nt, Homo Sapiens
ggagcuggaugaucuaaauggucucacuccua

SEQ ID NO: 409544 - RNA, 32 nt, Homo Sapiens
ugcccgcgccuggcggcccgauguggcugcag

SEQ ID NO: 409545 - RNA, 32 nt, Homo Sapiens
caugucuacuaaaaauacaaaaaaucagcugg

SEQ ID NO: 409546 - RNA, 32 nt, Homo Sapiens
cagcugaaggaccccgucugcaggagagucgg

SEQ ID NO: 409547 - RNA, 32 nt, Homo Sapiens
ccggccugccuggcccugugaaggccacucug

SEQ ID NO: 409548 - RNA, 32 nt, Homo Sapiens
ucugugggcgcccaaggccagcagccauaucu

SEQ ID NO: 409549 - RNA, 32 nt, Homo Sapiens
auguggucuuauuuuuacccuugcacucccug

SEQ ID NO: 409550 - RNA, 32 nt, Homo Sapiens
acuugaaaacgaauaucuaucauaugaccccu

SEQ ID NO: 409551 - RNA, 32 nt, Homo Sapiens
gaucuccagcgccggccuccucagugcgaaga

SEQ ID NO: 409552 - RNA, 32 nt, Homo Sapiens
gguaauggcugcuuccaagacccagggggcug

SEQ ID NO: 409553 - RNA, 32 nt, Homo Sapiens
ggcggcgggggcaggaggaugucgcagccgcc

SEQ ID NO: 409554 - RNA, 32 nt, Homo Sapiens
cucaagccaaacuugaaaccauucugaaccaa

SEQ ID NO: 409555 - RNA, 32 nt, Homo Sapiens
aucugcggcagacaacugccagugcccaucaa

SEQ ID NO: 409556 - RNA, 32 nt, Homo Sapiens
uuuuccauuauguacucauguuuuuaugaaau

SEQ ID NO: 409557 - RNA, 32 nt, Homo Sapiens
ccacucccccugggcucugcugaacaacucga

SEQ ID NO: 409558 - RNA, 32 nt, Homo Sapiens
gcuagggcgaggggggugaaugguugaugagu

SEQ ID NO: 409559 - RNA, 32 nt, Homo Sapiens
aaaagcauugguuuuuuaaaauuagagaauaa

SEQ ID NO: 409560 - RNA, 32 nt, Homo Sapiens
ggcggcgcgggccagaggcugagccugggugu

SEQ ID NO: 409561 - RNA, 32 nt, Homo Sapiens
aaaagauccacauuuucuaaauuucaacaaaa

SEQ ID NO: 409562 - RNA, 30 nt, Homo Sapiens
gcagggcgcgcgcugcacgcacaguacuag

SEQ ID NO: 409563 - RNA, 32 nt, Homo Sapiens
uuccagaaggcacaggccacugcaaacccugc

SEQ ID NO: 409564 - RNA, 32 nt, Homo Sapiens
ggugggauucagagugcuuagucugcucacug

SEQ ID NO: 409565 - RNA, 32 nt, Homo Sapiens
cagcugggcgcgcagcaguucucagcccugac

SEQ ID NO: 409566 - RNA, 32 nt, Homo Sapiens
ucaaggucacaaguuugagaccagucuggcca

SEQ ID NO: 409567 - RNA, 32 nt, Homo Sapiens
uccuggguggcacagcagcaggaccuugucau

SEQ ID NO: 409568 - RNA, 32 nt, Homo Sapiens
agccacauauccuugcaccugacacugucccc

SEQ ID NO: 409569 - RNA, 32 nt, Homo Sapiens
gauaaacaguuucuuuguuuucgauuuugauu

SEQ ID NO: 409570 - RNA, 32 nt, Homo Sapiens
gcuccuggccugggcucugauuucacugugug

SEQ ID NO: 409571 - RNA, 32 nt, Homo Sapiens
auuauuauaauggacaauacuuuuaccuuugu

SEQ ID NO: 409572 - RNA, 32 nt, Homo Sapiens
uuugaaauuuaaaagcuuauauuuucuaacuu

SEQ ID NO: 409573 - RNA, 32 nt, Homo Sapiens
gucccacccaaacugcacguggcaccagaagc

SEQ ID NO: 409574 - RNA, 32 nt, Homo Sapiens
ucugucucaaaauaauauuaaugauaauaaua

SEQ ID NO: 409575 - RNA, 32 nt, Homo Sapiens
ugaaugaagaucuuuuaugcaucuugccacua

SEQ ID NO: 409576 - RNA, 32 nt, Homo Sapiens
aucucacucccagcucugaccaaauacagaau

SEQ ID NO: 409577 - RNA, 32 nt, Homo Sapiens
cguccuucuucccggcggccgagcccuccucc

SEQ ID NO: 409578 - RNA, 32 nt, Homo Sapiens
aucugaacagucacuguaaaucauucuuaagc

SEQ ID NO: 409579 - RNA, 32 nt, Homo Sapiens
aauaugacuguuuuuauaugcacauguaaccc

SEQ ID NO: 409580 - RNA, 32 nt, Homo Sapiens
gcagcucuccccucacucuccuccaccugccc

SEQ ID NO: 409581 - RNA, 32 nt, Homo Sapiens
gugcaauacugugaggaacaaaaggaagccuc

SEQ ID NO: 409582 - RNA, 32 nt, Homo Sapiens
auuauguaaaucccaugauuucaacuguaaac

SEQ ID NO: 409583 - RNA, 32 nt, Homo Sapiens
cuggcaccaauauacugauuacucauuuuaug

SEQ ID NO: 409584 - RNA, 32 nt, Homo Sapiens
uuauggggagacugagggauaggacuggguaa

SEQ ID NO: 409585 - RNA, 32 nt, Homo Sapiens
gcccgccugccaguccuagcugcacagggcag

SEQ ID NO: 409586 - RNA, 32 nt, Homo Sapiens
ccugcaggaaguggggcuaaaguggcauucag

SEQ ID NO: 409587 - RNA, 32 nt, Homo Sapiens
aguugauuuuaauuacuuucugaauaacggaa

SEQ ID NO: 409588 - RNA, 28 nt, Homo Sapiens
ccuggaggggguaccccgaggugcuccg

SEQ ID NO: 409589 - RNA, 32 nt, Homo Sapiens
gucugucauuggcagaucuugguagcacuuua

SEQ ID NO: 409590 - RNA, 32 nt, Homo Sapiens
gucuuuucucuguugcagaaacccaccuuguc

SEQ ID NO: 409591 - RNA, 32 nt, Homo Sapiens
uggugggaggagcgguugcccagcggccucuu

SEQ ID NO: 409592 - RNA, 32 nt, Homo Sapiens
gugagugaagacauauuuuagcacugaauaga

SEQ ID NO: 409593 - RNA, 32 nt, Homo Sapiens
ugcacaaggacugggugggcugucccagcucu

SEQ ID NO: 409594 - RNA, 32 nt, Homo Sapiens
augaggcccuccccauggcuuuagcugacuug

SEQ ID NO: 409595 - RNA, 32 nt, Homo Sapiens
guugaaccaaugcuuucucaugucucaauucu

SEQ ID NO: 409596 - RNA, 32 nt, Homo Sapiens
agacaccuccuggaggccccaguccccagaca

SEQ ID NO: 409597 - RNA, 32 nt, Homo Sapiens
ggacccugaggagggagggcagccaggcuucg

SEQ ID NO: 409598 - RNA, 32 nt, Homo Sapiens
aaccugggagacggagguugcagugagccaug

SEQ ID NO: 409599 - RNA, 32 nt, Homo Sapiens
gccucgggauggggcgcccacccccugcccug

SEQ ID NO: 409600 - RNA, 32 nt, Homo Sapiens
ucugggauguggaaccauggcguccagcccua

SEQ ID NO: 409601 - RNA, 30 nt, Homo Sapiens
cacacgugcacacagcaccagcugagccga

SEQ ID NO: 409602 - RNA, 32 nt, Homo Sapiens
gaugcgggcgggcaucucugccgaaaacaccu

SEQ ID NO: 409603 - RNA, 32 nt, Homo Sapiens
ucacaguuggaguuguauaugccaagucauuu

SEQ ID NO: 409604 - RNA, 32 nt, Homo Sapiens
cagaccagccccaccaugcaacuuccuuugac

SEQ ID NO: 409605 - RNA, 32 nt, Homo Sapiens
uuguuuuaauucuguuaggugggauaauacca

SEQ ID NO: 409606 - RNA, 32 nt, Homo Sapiens
cgcuguucagagcugugacugcggcugcacuc

SEQ ID NO: 409607 - RNA, 32 nt, Homo Sapiens
ccucaacaaauuacacauugagggaacauacu

SEQ ID NO: 409608 - RNA, 32 nt, Homo Sapiens
caucugccaaacuucgggcaucuacccugcaa

SEQ ID NO: 409609 - RNA, 32 nt, Homo Sapiens
uauacauauauauaaauagaucucuauauagu

SEQ ID NO: 409610 - RNA, 32 nt, Homo Sapiens
gggacaauugacaagcuccaagggucuggcag

SEQ ID NO: 409611 - RNA, 32 nt, Homo Sapiens
agucuggggagaggccuggggaggcgugguau

SEQ ID NO: 409612 - RNA, 32 nt, Homo Sapiens
cuucagcaaccuggcuuuugaugcccggauug

SEQ ID NO: 409613 - RNA, 32 nt, Homo Sapiens
caaaacuacccgcccccgccccgcccccgcuu

SEQ ID NO: 409614 - RNA, 28 nt, Homo Sapiens
uacagagauacaggacagugagaccagg

SEQ ID NO: 409615 - RNA, 32 nt, Homo Sapiens
uaucuuuaugccacgaaucgucuaaauugccc

SEQ ID NO: 409616 - RNA, 30 nt, Homo Sapiens
ugcggaggggcgugugugccggcgcgcgcg

SEQ ID NO: 409617 - RNA, 32 nt, Homo Sapiens
gcgccccgugcccaccucugcgcggacgaccc

SEQ ID NO: 409618 - RNA, 32 nt, Homo Sapiens
gugagauuguuuucuuuuucuaccuuaaaggg

SEQ ID NO: 409619 - RNA, 32 nt, Homo Sapiens
uaucgcccagcagcucuguuucucuggagaac

SEQ ID NO: 409620 - RNA, 32 nt, Homo Sapiens
guguccacuccaggggcccuggguuuuggaaa

SEQ ID NO: 409621 - RNA, 32 nt, Homo Sapiens
ggcugagagggccgggccgggcggcggggaca

SEQ ID NO: 409622 - RNA, 32 nt, Homo Sapiens
accgcgagccgcgcgcgccgggaccuuggcuc

SEQ ID NO: 409623 - RNA, 32 nt, Homo Sapiens
aggugacacccauugggcccuuccggcaugcc

SEQ ID NO: 409624 - RNA, 32 nt, Homo Sapiens
uacagcccggcgggggcuggccgagccacacc

SEQ ID NO: 409625 - RNA, 32 nt, Homo Sapiens
uguaccaauccccgggccagugucucauuucc

SEQ ID NO: 409626 - RNA, 32 nt, Homo Sapiens
acuugauauuuuuuaauuacaauggaaguuua

SEQ ID NO: 409627 - RNA, 32 nt, Homo Sapiens
gcugcagagcugcuacugcugugauggccggg

SEQ ID NO: 409628 - RNA, 32 nt, Homo Sapiens
agaaauccacccaaaagagaucauggagaaca

SEQ ID NO: 409629 - RNA, 32 nt, Homo Sapiens
acuuuuucaugucauuuuuuuaucccaaaaaa

SEQ ID NO: 409630 - RNA, 32 nt, Homo Sapiens
gcuccagugccgcuccugcuuccccucccuac

SEQ ID NO: 409631 - RNA, 32 nt, Homo Sapiens
agacaaggugugaggaauauagagauucauaa

SEQ ID NO: 409632 - RNA, 32 nt, Homo Sapiens
ugacuuaguuuauggguuauucaaggauguuu

SEQ ID NO: 409633 - RNA, 32 nt, Homo Sapiens
ugcuauuuucuuuuuucuuuuucuuuucuuuu

SEQ ID NO: 409634 - RNA, 32 nt, Homo Sapiens
uauaaaaguauuuugagucagugucuuacaug

SEQ ID NO: 409635 - RNA, 32 nt, Homo Sapiens
aauuuugaauugucaauuuguauuuugcuacu

SEQ ID NO: 409636 - RNA, 32 nt, Homo Sapiens
caggaagaaaccgacuggcccagggccacccc

SEQ ID NO: 409637 - RNA, 32 nt, Homo Sapiens
gaaggcaggacacaggacacagcagcuuucuu

SEQ ID NO: 409638 - RNA, 32 nt, Homo Sapiens
cacagucacugcaggcuucagcaacuuaucuu

SEQ ID NO: 409639 - RNA, 32 nt, Homo Sapiens
gggugccacccucucccugccaggggccuggg

SEQ ID NO: 409640 - RNA, 32 nt, Homo Sapiens
ccccacccaucaccaucugucaucucacuacc

SEQ ID NO: 409641 - RNA, 32 nt, Homo Sapiens
gagugcaggggucugagacagcagccacuggg

SEQ ID NO: 409642 - RNA, 32 nt, Homo Sapiens
guaauucugaauuuucugcccuuuuauucauu

SEQ ID NO: 409643 - RNA, 32 nt, Homo Sapiens
ggaccccagugcccuccucagaagaagcacau

SEQ ID NO: 409644 - RNA, 32 nt, Homo Sapiens
uggcagccacccaagugcugaggggagcccuc

SEQ ID NO: 409645 - RNA, 32 nt, Homo Sapiens
uuaugucuuagucgagacaucaucaucugaga

SEQ ID NO: 409646 - RNA, 32 nt, Homo Sapiens
aaaauuuugugaucuacauaaacuaaaacaaa

SEQ ID NO: 409647 - RNA, 32 nt, Homo Sapiens
gggacagagaaguuaagagcuuucauccuuuc

SEQ ID NO: 409648 - RNA, 32 nt, Homo Sapiens
guucauagcagcacugugaggacccccaaguu

SEQ ID NO: 409649 - RNA, 32 nt, Homo Sapiens
uccgcacaaguuccucacaaaauucacaagca

SEQ ID NO: 409650 - RNA, 30 nt, Homo Sapiens
cgccggcgcgcgcacgacuugagaccugcc

SEQ ID NO: 409651 - RNA, 32 nt, Homo Sapiens
gacuacuauaaaugcacugaaacuauguuaug

SEQ ID NO: 409652 - RNA, 32 nt, Homo Sapiens
aggagcggcugcugcugcugcugcugcugcug

SEQ ID NO: 409653 - RNA, 32 nt, Homo Sapiens
auuuguccagcaugaaaccguuugcagauucc

SEQ ID NO: 409654 - RNA, 32 nt, Homo Sapiens
uuuuagaauauuaaaggcucugaaaauuucug

SEQ ID NO: 409655 - RNA, 32 nt, Homo Sapiens
gacagaacaaaguagaggacgggaaaauaaau

SEQ ID NO: 409656 - RNA, 32 nt, Homo Sapiens
cggcucuggggccaugcugacaugcugacauc

SEQ ID NO: 409657 - RNA, 32 nt, Homo Sapiens
gaaauagucacucaucccacuccacauaaggg

SEQ ID NO: 409658 - RNA, 32 nt, Homo Sapiens
cuucaaauacucagcauuaccauugguugagg

SEQ ID NO: 409659 - RNA, 32 nt, Homo Sapiens
uauagucucucuccuaacuucauuccauugua

SEQ ID NO: 409660 - RNA, 32 nt, Homo Sapiens
gaaaaaacaaacuaaagacaugugacuuauuc

SEQ ID NO: 409661 - RNA, 32 nt, Homo Sapiens
ugcaagcuacccagagucaugcagcuugugua

SEQ ID NO: 409662 - RNA, 32 nt, Homo Sapiens
cagaaauccugggauaagagaauaguuuccug

SEQ ID NO: 409663 - RNA, 32 nt, Homo Sapiens
auauggaaaauauugcuguuauuuuuggugaa

SEQ ID NO: 409664 - RNA, 32 nt, Homo Sapiens
ccgagacgauuggugggggcgcggcggcggcg

SEQ ID NO: 409665 - RNA, 32 nt, Homo Sapiens
uuuuaaaauaaucaaacauauuuaucuuuucc

SEQ ID NO: 409666 - RNA, 32 nt, Homo Sapiens
gccuuacagcuggagggcagggggcuggggaa

SEQ ID NO: 409667 - RNA, 32 nt, Homo Sapiens
cgcauauucacacacccagacacacaccccgc

SEQ ID NO: 409668 - RNA, 32 nt, Homo Sapiens
aacccgguccggaggcagcaguguccaccuuu

SEQ ID NO: 409669 - RNA, 32 nt, Homo Sapiens
gauuggcagcaccagcgcugugacggaaggau

SEQ ID NO: 409670 - RNA, 32 nt, Homo Sapiens
auuuucauacuuuuaccuuccauggcucuuuu

SEQ ID NO: 409671 - RNA, 32 nt, Homo Sapiens
ggaaguaggguggauguggguagggcugggag

SEQ ID NO: 409672 - RNA, 32 nt, Homo Sapiens
auuucagccuuucccccucaguuuugcauuga

SEQ ID NO: 409673 - RNA, 32 nt, Homo Sapiens
gcaguuuacaaagccagugucuaaaugaagua

SEQ ID NO: 409674 - RNA, 32 nt, Homo Sapiens
cgugagaccccaucucuacaaaaauacaaauu

SEQ ID NO: 409675 - RNA, 32 nt, Homo Sapiens
aacagguaaaagagaaaagacaauauaggcca

SEQ ID NO: 409676 - RNA, 32 nt, Homo Sapiens
uccuagcccagcugguccuaggccccgccuag

SEQ ID NO: 409677 - RNA, 32 nt, Homo Sapiens
cucacgugauaauucagaaaauccuugcucgu

SEQ ID NO: 409678 - RNA, 32 nt, Homo Sapiens
uccugccuucccuccucaagcaggcacccagg

SEQ ID NO: 409679 - RNA, 32 nt, Homo Sapiens
guaaacacuuuaguugcuuucagggaugacac

SEQ ID NO: 409680 - RNA, 32 nt, Homo Sapiens
gagaaaucucaaccaguuguuaccugauagga

SEQ ID NO: 409681 - RNA, 32 nt, Homo Sapiens
agucuugacaacauauccacaaugucugaugu

SEQ ID NO: 409682 - RNA, 32 nt, Homo Sapiens
aaacaaaaacaaaaacagaacucugccucaua

SEQ ID NO: 409683 - RNA, 32 nt, Homo Sapiens
gugaauguguguauaugagucuuugagugugu

SEQ ID NO: 409684 - RNA, 32 nt, Homo Sapiens
aaaguuuguuuuaguuauuuugaaagacuauu

SEQ ID NO: 409685 - RNA, 32 nt, Homo Sapiens
uuccuccaggacuugggacccuggaggacuga

SEQ ID NO: 409686 - RNA, 30 nt, Homo Sapiens
aaagucugugacucgggggaaaguggaagg

SEQ ID NO: 409687 - RNA, 32 nt, Homo Sapiens
acuaaguuagaauugcaagucaucuuuucuga

SEQ ID NO: 409688 - RNA, 32 nt, Homo Sapiens
uucacuucucacucuuauggucucaaagcuuc

SEQ ID NO: 409689 - RNA, 32 nt, Homo Sapiens
ccccugcccagcugcagucucccagccuccac

SEQ ID NO: 409690 - RNA, 32 nt, Homo Sapiens
ccuauugaagcuaguucaguaaucacacacau

SEQ ID NO: 409691 - RNA, 29 nt, Homo Sapiens
cuggcguccggguagaggacgcggaggau

SEQ ID NO: 409692 - RNA, 32 nt, Homo Sapiens
accacacccagccccuccauguguguagauau

SEQ ID NO: 409693 - RNA, 32 nt, Homo Sapiens
aagcggcggcggugguggcuuguggugcggcc

SEQ ID NO: 409694 - RNA, 32 nt, Homo Sapiens
ugguuuuuauuuugauuucacuauacucauuu

SEQ ID NO: 409695 - RNA, 32 nt, Homo Sapiens
gggggugaaggggagugugugcagcguuuuua

SEQ ID NO: 409696 - RNA, 32 nt, Homo Sapiens
gcaccucuuugacuaggucccaggauccccuu

SEQ ID NO: 409697 - RNA, 32 nt, Homo Sapiens
cuccaaauaauuucaucuguaugagaaugaug

SEQ ID NO: 409698 - RNA, 32 nt, Homo Sapiens
aucuggauacaucuauagaaguauaugcauau

SEQ ID NO: 409699 - RNA, 32 nt, Homo Sapiens
gcuucgacugguuauaucuucgguguucuuuu

SEQ ID NO: 409700 - RNA, 32 nt, Homo Sapiens
uuuauaaacagaaaacaaaaaaaagcguugag

SEQ ID NO: 409701 - RNA, 32 nt, Homo Sapiens
gauacucaucuuaaauaauguguguugcaaau

SEQ ID NO: 409702 - RNA, 32 nt, Homo Sapiens
uugaucucauaaaaggaaaaacaaaagauuua

SEQ ID NO: 409703 - RNA, 32 nt, Homo Sapiens
gcguguuggucccagcgguucagcugagguag

SEQ ID NO: 409704 - RNA, 32 nt, Homo Sapiens
gcagcuagaacacacuugcuuccacuacuaaa

SEQ ID NO: 409705 - RNA, 32 nt, Homo Sapiens
guuggagaaaauguuuacaaaaaugguuuugu

SEQ ID NO: 409706 - RNA, 32 nt, Homo Sapiens
gaaacagaacuaaaagugcugggcuguguggg

SEQ ID NO: 409707 - RNA, 30 nt, Homo Sapiens
guuaaaggcaggccuuaggcuccuucaugu

SEQ ID NO: 409708 - RNA, 32 nt, Homo Sapiens
uagacaugcaccaauuaauuuggagccaagag

SEQ ID NO: 409709 - RNA, 32 nt, Homo Sapiens
gcagcuuggggcgggguggguaguggucacug

SEQ ID NO: 409710 - RNA, 32 nt, Homo Sapiens
ucagccuagaaaugucuguguuaagugguuuu

SEQ ID NO: 409711 - RNA, 32 nt, Homo Sapiens
cauccccgcuccccgaggccggccgccugguc

SEQ ID NO: 409712 - RNA, 32 nt, Homo Sapiens
uuaucccugccuccugcccccgaugcccaaag

SEQ ID NO: 409713 - RNA, 32 nt, Homo Sapiens
acagcaaaauaaaagcacuuuaagauauaauu

SEQ ID NO: 409714 - RNA, 27 nt, Homo Sapiens
ugauccacccacuucagccucccaaaa

SEQ ID NO: 409715 - RNA, 32 nt, Homo Sapiens
aaacagaugucuaugaucaucucagcugaagu

SEQ ID NO: 409716 - RNA, 32 nt, Homo Sapiens
uuguuuuuucagauuauagcaaacaguuguug

SEQ ID NO: 409717 - RNA, 32 nt, Homo Sapiens
guaccauuuauuuuaugacauuuuacaaugua

SEQ ID NO: 409718 - RNA, 32 nt, Homo Sapiens
gagcugucagcuucauuacgggcccugcagcc

SEQ ID NO: 409719 - RNA, 32 nt, Homo Sapiens
cggaggcaggcgccagcggggcgacgggacug

SEQ ID NO: 409720 - RNA, 32 nt, Homo Sapiens
ccugagcccucccgugacagccggcaggccca

SEQ ID NO: 409721 - RNA, 32 nt, Homo Sapiens
cuggccccgcaugagccucggccaucucuccc

SEQ ID NO: 409722 - RNA, 32 nt, Homo Sapiens
agcacucuuucagucagcaucguuccuggauu

SEQ ID NO: 409723 - RNA, 32 nt, Homo Sapiens
cuaacucacucuagugggaccuugacuggaga

SEQ ID NO: 409724 - RNA, 32 nt, Homo Sapiens
ccuugaccaccucuggaccacuaacaaguucu

SEQ ID NO: 409725 - RNA, 32 nt, Homo Sapiens
uuuccaggccucuccccaggcuugccaucagc

SEQ ID NO: 409726 - RNA, 32 nt, Homo Sapiens
ugauauucgaauggaaauggcauuucaugagg

SEQ ID NO: 409727 - RNA, 32 nt, Homo Sapiens
ggagaucgagaccgcccuggcuaacaugguga

SEQ ID NO: 409728 - RNA, 32 nt, Homo Sapiens
gcccuuugcugcgccgcgacagcgccggaaca

SEQ ID NO: 409729 - RNA, 32 nt, Homo Sapiens
cacagggcuccaccacccagggccaccuucug

SEQ ID NO: 409730 - RNA, 32 nt, Homo Sapiens
gaugacucuaaugugaaaauaggguuggaaag

SEQ ID NO: 409731 - RNA, 27 nt, Homo Sapiens
ugauccacccgcuucagccucccaaag

SEQ ID NO: 409732 - RNA, 32 nt, Homo Sapiens
ccccgucuuuugccagagcccacguccccugc

SEQ ID NO: 409733 - RNA, 32 nt, Homo Sapiens
auauucuucgguuugaauaauuaaaaugaacc

SEQ ID NO: 409734 - RNA, 32 nt, Homo Sapiens
aguugaaugauuauuccagauacuguauaacc

SEQ ID NO: 409735 - RNA, 32 nt, Homo Sapiens
aaagagcccucccccauguugguugacugccc

SEQ ID NO: 409736 - RNA, 32 nt, Homo Sapiens
ccacuggagauaaguaauggugccauuugaac

SEQ ID NO: 409737 - RNA, 32 nt, Homo Sapiens
gaaccgccuuucucuccgcgugucucacccuu

SEQ ID NO: 409738 - RNA, 32 nt, Homo Sapiens
gcagcccagccagcuggucuggcccuggacgu

SEQ ID NO: 409739 - RNA, 32 nt, Homo Sapiens
gccucgucccgcacacacaacaugacaggcca

SEQ ID NO: 409740 - RNA, 32 nt, Homo Sapiens
aucagccagggcagcucuguccccuccugcuc

SEQ ID NO: 409741 - RNA, 32 nt, Homo Sapiens
cugcaucucccucuccucugucuucacaucac

SEQ ID NO: 409742 - RNA, 32 nt, Homo Sapiens
aagucagcaguaaaauguauggcauuaagaaa

SEQ ID NO: 409743 - RNA, 32 nt, Homo Sapiens
aaacauuggccuucccuuggagggauccucuu

SEQ ID NO: 409744 - RNA, 30 nt, Homo Sapiens
uaccaugucugugauagggaagaaggccug

SEQ ID NO: 409745 - RNA, 32 nt, Homo Sapiens
uagagacugaagauuguuagggcaccuuagaa

SEQ ID NO: 409746 - RNA, 32 nt, Homo Sapiens
ccccuucccuccccccugcccuaagccaccuc

SEQ ID NO: 409747 - RNA, 32 nt, Homo Sapiens
ucaguuaagugaugcugaugcugcugaucuag

SEQ ID NO: 409748 - RNA, 32 nt, Homo Sapiens
uaaugacuuaggcauagcgagaucugacuacc

SEQ ID NO: 409749 - RNA, 32 nt, Homo Sapiens
uuuucuuuaaacaauuaaaguuuuccauuuua

SEQ ID NO: 409750 - RNA, 32 nt, Homo Sapiens
auaugugguugccuccuuaauaaacagccuga

SEQ ID NO: 409751 - RNA, 32 nt, Homo Sapiens
auuauggccacucgagucaggaugcucuauuu

SEQ ID NO: 409752 - RNA, 32 nt, Homo Sapiens
gaacggggcucuucucauuucaccccucccuu

SEQ ID NO: 409753 - RNA, 32 nt, Homo Sapiens
uauugucgccugguggcauuggugugggguag

SEQ ID NO: 409754 - RNA, 32 nt, Homo Sapiens
guucucaguagcggcaucauggccaguagugu

SEQ ID NO: 409755 - RNA, 32 nt, Homo Sapiens
ugacuugccuucucccaccccguggaccgcuu

SEQ ID NO: 409756 - RNA, 32 nt, Homo Sapiens
aggccaccagggugggcguccgcgccauuguu

SEQ ID NO: 409757 - RNA, 32 nt, Homo Sapiens
uuuuucauauauauuuguuuuuuuuuuuuuuu

SEQ ID NO: 409758 - RNA, 32 nt, Homo Sapiens
uauguuacaaauaauaacaucucuauucuuac

SEQ ID NO: 409759 - RNA, 32 nt, Homo Sapiens
aacauguuuuguacuuuuuuuuguuguuaaga

SEQ ID NO: 409760 - RNA, 32 nt, Homo Sapiens
auuaaaaugcuguaaccaacuuaucuaauaaa

SEQ ID NO: 409761 - RNA, 32 nt, Homo Sapiens
gaaugucaggacuuuaucagcagggguaaaac

SEQ ID NO: 409762 - RNA, 31 nt, Homo Sapiens
ccgagucuguccuggaaccaggcuugccugg

SEQ ID NO: 409763 - RNA, 32 nt, Homo Sapiens
cuaacauuuccuuacagaacuacuucuuacuu

SEQ ID NO: 409764 - RNA, 32 nt, Homo Sapiens
agggaaggggagaugugugcaacaccuuccag

SEQ ID NO: 409765 - RNA, 32 nt, Homo Sapiens
gggugucugucuccagaggggagggacaaauc

SEQ ID NO: 409766 - RNA, 32 nt, Homo Sapiens
gcugggcagcucagccauguuacauugucuau

SEQ ID NO: 409767 - RNA, 32 nt, Homo Sapiens
uuugccccuuuggaauucugcacuccaguuac

SEQ ID NO: 409768 - RNA, 32 nt, Homo Sapiens
gggaagugcauucucgcuuccguagcggucuc

SEQ ID NO: 409769 - RNA, 32 nt, Homo Sapiens
gaggguccuggaagcgcccacccaggcgccgc

SEQ ID NO: 409770 - RNA, 32 nt, Homo Sapiens
auguugaagauaaugacacuaaaucuauggac

SEQ ID NO: 409771 - RNA, 32 nt, Homo Sapiens
auugugugugcacguucauguacacaugugca

SEQ ID NO: 409772 - RNA, 32 nt, Homo Sapiens
ggaauggaauaaaaugauggcagaaguacaaa

SEQ ID NO: 409773 - RNA, 32 nt, Homo Sapiens
aaugcuggucuaggagcugucuccaggauggu

SEQ ID NO: 409774 - RNA, 32 nt, Homo Sapiens
ugagugcagaagggugcgccucuucccucuac

SEQ ID NO: 409775 - RNA, 32 nt, Homo Sapiens
aacccacauuuucucuuuuaauauuuuaugau

SEQ ID NO: 409776 - RNA, 32 nt, Homo Sapiens
ugcagcgguggcggcggcugguugcgggccgg

SEQ ID NO: 409777 - RNA, 32 nt, Homo Sapiens
gauuuugaagaaguguuuuucuuaaagcagau

SEQ ID NO: 409778 - RNA, 32 nt, Homo Sapiens
gaggagauucuucauuguuuucuuuccuucuc

SEQ ID NO: 409779 - RNA, 32 nt, Homo Sapiens
cuuggacccacgagcagggcugcgucgguuug

SEQ ID NO: 409780 - RNA, 32 nt, Homo Sapiens
ucacuaaagagauaaauguuucuuauauacau

SEQ ID NO: 409781 - RNA, 32 nt, Homo Sapiens
aggaggaggagaagcggaugagaucguggggc

SEQ ID NO: 409782 - RNA, 32 nt, Homo Sapiens
uugucugccaaccucccugggguccugccugu

SEQ ID NO: 409783 - RNA, 32 nt, Homo Sapiens
ugccuucaaaaaugugcugccuagaaacagac

SEQ ID NO: 409784 - RNA, 32 nt, Homo Sapiens
ucuucaaguguggcccucuuuggagucaaccc

SEQ ID NO: 409785 - RNA, 32 nt, Homo Sapiens
gcugcacuggagguugcaucagagccauuccg

SEQ ID NO: 409786 - RNA, 32 nt, Homo Sapiens
gagagggugggcaaacuguaccucuuuguauc

SEQ ID NO: 409787 - RNA, 32 nt, Homo Sapiens
aaugacuuaaguuauguuguaacugguagcug

SEQ ID NO: 409788 - RNA, 32 nt, Homo Sapiens
acaaguuuccaagaguggaacauggugucugu

SEQ ID NO: 409789 - RNA, 32 nt, Homo Sapiens
agcucaaaggauuauauaguaacuauaucugc

SEQ ID NO: 409790 - RNA, 32 nt, Homo Sapiens
cuggucauuuccccauauucguagucuuuuuu

SEQ ID NO: 409791 - RNA, 32 nt, Homo Sapiens
caaacuacugauuugaaaggcaugucagaucu

SEQ ID NO: 409792 - RNA, 32 nt, Homo Sapiens
ccauccccaucccggucccugcagagcgaucc

SEQ ID NO: 409793 - RNA, 32 nt, Homo Sapiens
ggaaaaccuuuguguccacacucuguauccgg

SEQ ID NO: 409794 - RNA, 32 nt, Homo Sapiens
ggcaggcccucgcgaugagcagugggucagcu

SEQ ID NO: 409795 - RNA, 32 nt, Homo Sapiens
cucgaccucaggugaucugcccgccucggccu

SEQ ID NO: 409796 - RNA, 32 nt, Homo Sapiens
caguccauuuccccuuccuauuucagcuguuc

SEQ ID NO: 409797 - RNA, 32 nt, Homo Sapiens
cgacucccauccccaucuaucugugcccugag

SEQ ID NO: 409798 - RNA, 32 nt, Homo Sapiens
ccagugucaucucugcaaagaagguccugauu

SEQ ID NO: 409799 - RNA, 32 nt, Homo Sapiens
guucuuguacauucuacugauuaagucaggau

SEQ ID NO: 409800 - RNA, 32 nt, Homo Sapiens
acaaaaaaccucaggccuggaggaaguuuugg

SEQ ID NO: 409801 - RNA, 32 nt, Homo Sapiens
aaaaaagcuuccaucucccagcccuucuugca

SEQ ID NO: 409802 - RNA, 32 nt, Homo Sapiens
uuaucuuuucccuccucucacccgacagccug

SEQ ID NO: 409803 - RNA, 32 nt, Homo Sapiens
ggaaauuuauaaccaaccaaaccaagaaggac

SEQ ID NO: 409804 - RNA, 32 nt, Homo Sapiens
auuauuuuuuauuccuuuuucuacugugucuu

SEQ ID NO: 409805 - RNA, 32 nt, Homo Sapiens
cauuagcaucugggguuauagcaagaagagug

SEQ ID NO: 409806 - RNA, 32 nt, Homo Sapiens
uaaggagagaugauuuuaaaaaaggaaucaau

SEQ ID NO: 409807 - RNA, 32 nt, Homo Sapiens
agccguggccccagagguccuggccaaauaug

SEQ ID NO: 409808 - RNA, 32 nt, Homo Sapiens
auggagcguccgcccgcgccgccgucguccgc

SEQ ID NO: 409809 - RNA, 32 nt, Homo Sapiens
uaauaaaaaaucaggcuggacguggugguuca

SEQ ID NO: 409810 - RNA, 32 nt, Homo Sapiens
cucccgguguugcaaggaggacagagccaaug

SEQ ID NO: 409811 - RNA, 30 nt, Homo Sapiens
ugggaggguuccccaguccagaaucccuaa

SEQ ID NO: 409812 - RNA, 29 nt, Homo Sapiens
gagcuccgggguguguggacgccgcuuug

SEQ ID NO: 409813 - RNA, 32 nt, Homo Sapiens
aggggaguuaaagcacaugaaaaagacagugg

SEQ ID NO: 409814 - RNA, 32 nt, Homo Sapiens
gggaguccaauuucccaagguagaacgguggc

SEQ ID NO: 409815 - RNA, 32 nt, Homo Sapiens
ccaggcggcagggcaaggagcggcaaggggau

SEQ ID NO: 409816 - RNA, 32 nt, Homo Sapiens
guuugucuuuugccuggccaccaucaauguag

SEQ ID NO: 409817 - RNA, 32 nt, Homo Sapiens
caaauugugguugccuuaauaaacuaaaacau

SEQ ID NO: 409818 - RNA, 32 nt, Homo Sapiens
ggauagcagauaaccugcuuugaaagagggcu

SEQ ID NO: 409819 - RNA, 32 nt, Homo Sapiens
aagggaggguucccggccugcaggugcucuuu

SEQ ID NO: 409820 - RNA, 28 nt, Homo Sapiens
ucgcuggggcggcugugagaugagccca

SEQ ID NO: 409821 - RNA, 32 nt, Homo Sapiens
cagagaagucuuuuuucccaauugagugcuaa

SEQ ID NO: 409822 - RNA, 32 nt, Homo Sapiens
ccucccgccccgucucguacugucgccgucac

SEQ ID NO: 409823 - RNA, 32 nt, Homo Sapiens
cuugaccucaggugaucugcccgccuuggccu

SEQ ID NO: 409824 - RNA, 32 nt, Homo Sapiens
aauauuuuuauagauuugaccuacaaucaauc

SEQ ID NO: 409825 - RNA, 32 nt, Homo Sapiens
uugaugguggcagaaggcaggcuccugggugg

SEQ ID NO: 409826 - RNA, 32 nt, Homo Sapiens
aagugacaauuaugaacuaauguucuacagca

SEQ ID NO: 409827 - RNA, 32 nt, Homo Sapiens
gcucggcuuugagcgaucauggagcucugcaa

SEQ ID NO: 409828 - RNA, 32 nt, Homo Sapiens
uuccugcacgugcugggccugcuggagcugcu

SEQ ID NO: 409829 - RNA, 32 nt, Homo Sapiens
aagggguucagcauuuaagaauuugaggaaug

SEQ ID NO: 409830 - RNA, 32 nt, Homo Sapiens
uuugccuugauggcugaugacaguaaccaccc

SEQ ID NO: 409831 - RNA, 32 nt, Homo Sapiens
cuuucaugaguuccucaauuucaaagacucac

SEQ ID NO: 409832 - RNA, 32 nt, Homo Sapiens
uagaacugcccauuuccauggugcaaaaacuc

SEQ ID NO: 409833 - RNA, 32 nt, Homo Sapiens
auagggaagguucagcucuccugucuggggca

SEQ ID NO: 409834 - RNA, 32 nt, Homo Sapiens
ucacuguguauauaauguuuugaagugacauc

SEQ ID NO: 409835 - RNA, 32 nt, Homo Sapiens
aagggugcauguccccugcuugaacccugaag

SEQ ID NO: 409836 - RNA, 30 nt, Homo Sapiens
cuccucaggcagcgugugggucccgcacuc

SEQ ID NO: 409837 - RNA, 32 nt, Homo Sapiens
ccuuguguuacuaaguuuuuauggcuuuugug

SEQ ID NO: 409838 - RNA, 32 nt, Homo Sapiens
ugaaugcuccugacaucucaguucuugucagu

SEQ ID NO: 409839 - RNA, 31 nt, Homo Sapiens
uacaucccaccagccucuccaagggugguga

SEQ ID NO: 409840 - RNA, 32 nt, Homo Sapiens
guuuacaugacccuccucuccuuucccuaccc

SEQ ID NO: 409841 - RNA, 32 nt, Homo Sapiens
ucggcuucccggcuaccccccggacggugaag

SEQ ID NO: 409842 - RNA, 32 nt, Homo Sapiens
caaaugcccccauuuuaaccuucagcauggga

SEQ ID NO: 409843 - RNA, 32 nt, Homo Sapiens
aggaagggugacaaguaccuucugccuccucc

SEQ ID NO: 409844 - RNA, 32 nt, Homo Sapiens
ccgcaacgcgccggcccaacugcaggaagguc

SEQ ID NO: 409845 - RNA, 32 nt, Homo Sapiens
gcccgcgcaguccgcgcagcccucaucgcaac

SEQ ID NO: 409846 - RNA, 32 nt, Homo Sapiens
cuuccugcauguauuucacugcaggcugaaga

SEQ ID NO: 409847 - RNA, 32 nt, Homo Sapiens
ucgcaccccucgccgcccaccagggccaugcu

SEQ ID NO: 409848 - RNA, 32 nt, Homo Sapiens
ucaguaauagaaaaaagaaucugggaucuaag

SEQ ID NO: 409849 - RNA, 32 nt, Homo Sapiens
uuucugguacaacuuuuuuccauuccaguugg

SEQ ID NO: 409850 - RNA, 32 nt, Homo Sapiens
uuucuucaucuaugcauugacucucagauuac

SEQ ID NO: 409851 - RNA, 32 nt, Homo Sapiens
uauuaaaugcccuauccaucauuaaaagguuu

SEQ ID NO: 409852 - RNA, 32 nt, Homo Sapiens
aucagccucauaagaaaaccaggccaagugug

SEQ ID NO: 409853 - RNA, 32 nt, Homo Sapiens
accuucgccucccagcuucaagcgauucucau

SEQ ID NO: 409854 - RNA, 32 nt, Homo Sapiens
uacagacgugagcuaccacaccuggcuuuuca

SEQ ID NO: 409855 - RNA, 32 nt, Homo Sapiens
agauuuacauauauuugaauaguuaauuugcu

SEQ ID NO: 409856 - RNA, 32 nt, Homo Sapiens
cugcgucucccucucugcagccuguguaagcu

SEQ ID NO: 409857 - RNA, 32 nt, Homo Sapiens
caccucucccuccucagcuccagggcaguguc

SEQ ID NO: 409858 - RNA, 32 nt, Homo Sapiens
uagcagugagccauauagucugacauacauag

SEQ ID NO: 409859 - RNA, 32 nt, Homo Sapiens
cguucuccauucucuagcaucccuccccaugc

SEQ ID NO: 409860 - RNA, 30 nt, Homo Sapiens
ucuaauaaucugguauuaaauccuuaagag

SEQ ID NO: 409861 - RNA, 32 nt, Homo Sapiens
cagacggugucugaccggaggauguggccgug

SEQ ID NO: 409862 - RNA, 32 nt, Homo Sapiens
gaauuggaacaucauguuaaaaacaguuauga

SEQ ID NO: 409863 - RNA, 32 nt, Homo Sapiens
caaagccugcuuuuccucucucuguucuccuu

SEQ ID NO: 409864 - RNA, 32 nt, Homo Sapiens
gucuccugcgccuccuccuccggagcgucgcu

SEQ ID NO: 409865 - RNA, 32 nt, Homo Sapiens
uccgcggccgcggcgggaacauggaggagcug

SEQ ID NO: 409866 - RNA, 32 nt, Homo Sapiens
acagacccaauaagaugugugcaugugugugu

SEQ ID NO: 409867 - RNA, 32 nt, Homo Sapiens
uccaggaagucugagccaccucuggcuacacc

SEQ ID NO: 409868 - RNA, 32 nt, Homo Sapiens
cugguugugcauaggaugugggaggaggggcu

SEQ ID NO: 409869 - RNA, 32 nt, Homo Sapiens
gaaggcaggcgccuuugagguacgcaccuacc

SEQ ID NO: 409870 - RNA, 23 nt, Homo Sapiens
gagcagcggggcggcguccggga

SEQ ID NO: 409871 - RNA, 32 nt, Homo Sapiens
augaggcagaggauggagcaggcugagccagg

SEQ ID NO: 409872 - RNA, 32 nt, Homo Sapiens
aaauaauaccuaaauauauuuacaauaauaau

SEQ ID NO: 409873 - RNA, 32 nt, Homo Sapiens
cugcugugcuguugccaggggagcacggaggc

SEQ ID NO: 409874 - RNA, 32 nt, Homo Sapiens
cugcuccucuacucagccgaugacucggguuu

SEQ ID NO: 409875 - RNA, 32 nt, Homo Sapiens
uaguguucuuucaguguuuaaucuugcaaugc

SEQ ID NO: 409876 - RNA, 32 nt, Homo Sapiens
cuccgguguuugccuuuucagauuauagaagu

SEQ ID NO: 409877 - RNA, 32 nt, Homo Sapiens
gcaaaauccaacaugaaaauccucguggccuu

SEQ ID NO: 409878 - RNA, 32 nt, Homo Sapiens
ccagugucucuaauggugacaccacccuccuc

SEQ ID NO: 409879 - RNA, 32 nt, Homo Sapiens
ccggguucaagcgauuuuccugccucagccuc

SEQ ID NO: 409880 - RNA, 32 nt, Homo Sapiens
guaugugugaauguaguuauaaugcuuuugaa

SEQ ID NO: 409881 - RNA, 32 nt, Homo Sapiens
cuguugcgggugaggcggcugcucucuauuuu

SEQ ID NO: 409882 - RNA, 32 nt, Homo Sapiens
gcccugggcucuucucuggccuccucaccagg

SEQ ID NO: 409883 - RNA, 32 nt, Homo Sapiens
cugcaggagcggggcggcugccgacuccccca

SEQ ID NO: 409884 - RNA, 32 nt, Homo Sapiens
aagagcaaccucagagacuugagcccuacuaa

SEQ ID NO: 409885 - RNA, 32 nt, Homo Sapiens
ccccuguaaucccagcacuuugggaggccaaa

SEQ ID NO: 409886 - RNA, 32 nt, Homo Sapiens
gguugcaggccgagaugcugcagauggaccug

SEQ ID NO: 409887 - RNA, 32 nt, Homo Sapiens
augauaacaacaaucugucagccagguguggu

SEQ ID NO: 409888 - RNA, 32 nt, Homo Sapiens
gucugcccccgucuucucuccauccucaaagc

SEQ ID NO: 409889 - RNA, 32 nt, Homo Sapiens
cuuaaaagugaacauaaauuauagaguggaag

SEQ ID NO: 409890 - RNA, 32 nt, Homo Sapiens
auauaauguucaauauuaaaaggauaauucac

SEQ ID NO: 409891 - RNA, 32 nt, Homo Sapiens
gagaaaaacaacacauagaggauccauucccu

SEQ ID NO: 409892 - RNA, 32 nt, Homo Sapiens
caaagaccgugggcucaagggugcugggggca

SEQ ID NO: 409893 - RNA, 32 nt, Homo Sapiens
aucauauuaaaugaauauuuuauuuuaaaggc

SEQ ID NO: 409894 - RNA, 32 nt, Homo Sapiens
caucuauagaaagcuauauaagacaagaacuc

SEQ ID NO: 409895 - RNA, 32 nt, Homo Sapiens
gcuggcuucaacaaagaccuccuuaaagcaca

SEQ ID NO: 409896 - RNA, 32 nt, Homo Sapiens
gcugagaggaccagggaccugugcuucaagcu

SEQ ID NO: 409897 - RNA, 32 nt, Homo Sapiens
cccauugcccucaucacccugacacccccaca

SEQ ID NO: 409898 - RNA, 32 nt, Homo Sapiens
uuuuuuaagcucaucagcuaucaucaguguua

SEQ ID NO: 409899 - RNA, 32 nt, Homo Sapiens
aauggaaaaugaauacuggagguaacacuguc

SEQ ID NO: 409900 - RNA, 32 nt, Homo Sapiens
auuguuaaugagguaggaagggcgcguuuguc

SEQ ID NO: 409901 - RNA, 32 nt, Homo Sapiens
gcggggcgcgcgccauggcgaaggcgaagaag

SEQ ID NO: 409902 - RNA, 32 nt, Homo Sapiens
ggggcccccacuuuuuaccaaacuaguaaacc

SEQ ID NO: 409903 - RNA, 32 nt, Homo Sapiens
aagcccggagacgccgcgccgcgcucagcccc

SEQ ID NO: 409904 - RNA, 32 nt, Homo Sapiens
agugccuuuccuggggaggaugagauggucca

SEQ ID NO: 409905 - RNA, 32 nt, Homo Sapiens
ucggcagaauaaaaucaaacagauuaccuauu

SEQ ID NO: 409906 - RNA, 32 nt, Homo Sapiens
aagacuacaauuuuaguauaaugacauuugag

SEQ ID NO: 409907 - RNA, 32 nt, Homo Sapiens
uugauuuaaacacacagauacacacacacaca

SEQ ID NO: 409908 - RNA, 32 nt, Homo Sapiens
gggaacuguuggccgcgcggccucgggaacgg

SEQ ID NO: 409909 - RNA, 32 nt, Homo Sapiens
accaauccucugguuauauaaaaacaaauaau

SEQ ID NO: 409910 - RNA, 32 nt, Homo Sapiens
uugucaaacuccuccuggagaaguguauggua

SEQ ID NO: 409911 - RNA, 32 nt, Homo Sapiens
gucacaccgaccgcucucagggcccgcugccc

SEQ ID NO: 409912 - RNA, 32 nt, Homo Sapiens
ggacccaggcucccuucucaccauccugaaua

SEQ ID NO: 409913 - RNA, 32 nt, Homo Sapiens
ccaggcugccuucccuggggucgggagcggcc

SEQ ID NO: 409914 - RNA, 32 nt, Homo Sapiens
agccuggccaacacggugaaaccccgucucua

SEQ ID NO: 409915 - RNA, 32 nt, Homo Sapiens
accaguguuccgaaggugcaucuggugaucug

SEQ ID NO: 409916 - RNA, 32 nt, Homo Sapiens
acauccacagaaacagagaggcguagguggcc

SEQ ID NO: 409917 - RNA, 32 nt, Homo Sapiens
cccaccaucaggccagucaacugcacaauaca

SEQ ID NO: 409918 - RNA, 32 nt, Homo Sapiens
gugagggcgggcgggcgggcgggagggaggga

SEQ ID NO: 409919 - RNA, 32 nt, Homo Sapiens
aacagaaaucaggucuuaauagacaaaauguu

SEQ ID NO: 409920 - RNA, 32 nt, Homo Sapiens
caaaagcuuacugucuccaggaccacaaacca

SEQ ID NO: 409921 - RNA, 31 nt, Homo Sapiens
auuaaaaucaaugauuaauugaacuggcuag

SEQ ID NO: 409922 - RNA, 32 nt, Homo Sapiens
uccaccaccguggaauguguccccgucaccag

SEQ ID NO: 409923 - RNA, 32 nt, Homo Sapiens
ccuucagcccucuccuucggagggacgugguc

SEQ ID NO: 409924 - RNA, 32 nt, Homo Sapiens
uaacucaaggguuuaaauuuucuuacuagcuu

SEQ ID NO: 409925 - RNA, 32 nt, Homo Sapiens
gcaguauuugaaaauaaauaaaaagugggaga

SEQ ID NO: 409926 - RNA, 32 nt, Homo Sapiens
gaaaugggcauagaguagagaauagcuucaua

SEQ ID NO: 409927 - RNA, 32 nt, Homo Sapiens
guuucaagugcugauuuguaacuuuucucccc

SEQ ID NO: 409928 - RNA, 32 nt, Homo Sapiens
uugggaaucugcaagaaccucccuuucccccu

SEQ ID NO: 409929 - RNA, 32 nt, Homo Sapiens
ccccagccgcgggcgggcgggcggcgaagaug

SEQ ID NO: 409930 - RNA, 32 nt, Homo Sapiens
agucagagcuugaagaaaagcuuauuuauuuu

SEQ ID NO: 409931 - RNA, 32 nt, Homo Sapiens
ugcccauuccuccagguguugaucuugauucc

SEQ ID NO: 409932 - RNA, 32 nt, Homo Sapiens
ggguaagaaauaaauggaaauaugacaucgga

SEQ ID NO: 409933 - RNA, 32 nt, Homo Sapiens
uguuccccuaaaauuuguguguugaaacuuaa

SEQ ID NO: 409934 - RNA, 32 nt, Homo Sapiens
ugaauugaggcuucuccuucacuggagugcac

SEQ ID NO: 409935 - RNA, 32 nt, Homo Sapiens
cagauugggauuaacauaaaagaguggaacua

SEQ ID NO: 409936 - RNA, 32 nt, Homo Sapiens
aauguagucucuuuucuuucuguguuucacau

SEQ ID NO: 409937 - RNA, 32 nt, Homo Sapiens
ccaugggugacacgucccacucuuucugaugg

SEQ ID NO: 409938 - RNA, 32 nt, Homo Sapiens
aaugaaaacauuuggggcaauuagaccuacag

SEQ ID NO: 409939 - RNA, 32 nt, Homo Sapiens
acuguucauguacauccacaaauacaccuugu

SEQ ID NO: 409940 - RNA, 32 nt, Homo Sapiens
caccuccuguccucccucccagcccgucaagc

SEQ ID NO: 409941 - RNA, 32 nt, Homo Sapiens
agccuaccaauauauauccaugugccuggauu

SEQ ID NO: 409942 - RNA, 32 nt, Homo Sapiens
uuuuuugggguuucuuuuuuuuuuccaugcug

SEQ ID NO: 409943 - RNA, 32 nt, Homo Sapiens
agguuuuggggaagaacucuacaaaagggaaa

SEQ ID NO: 409944 - RNA, 32 nt, Homo Sapiens
uuaaaacugucuuuuuaguuuuggcuuuuuau

SEQ ID NO: 409945 - RNA, 32 nt, Homo Sapiens
aagagaagcuggaagccuagaugggcacugcc

SEQ ID NO: 409946 - RNA, 30 nt, Homo Sapiens
gucgccuucugugcuguggaaguuuuguug

SEQ ID NO: 409947 - RNA, 32 nt, Homo Sapiens
gcccggcuguugcucugggcaacgcggucugc

SEQ ID NO: 409948 - RNA, 32 nt, Homo Sapiens
gacaucagggacagaccacacccauggggcag

SEQ ID NO: 409949 - RNA, 32 nt, Homo Sapiens
cacucacucgccccaggccccauccuagccca

SEQ ID NO: 409950 - RNA, 32 nt, Homo Sapiens
ccaacgaucccucggcggcgaugucggccgcc

SEQ ID NO: 409951 - RNA, 32 nt, Homo Sapiens
cuugacgccuacauuucuaggcacaugugagg

SEQ ID NO: 409952 - RNA, 32 nt, Homo Sapiens
caagggcucugggaugagucuuggcuuccaag

SEQ ID NO: 409953 - RNA, 31 nt, Homo Sapiens
uuuucuggcucuggggcuccaaggacucaca

SEQ ID NO: 409954 - RNA, 32 nt, Homo Sapiens
acaaccuggcugaaaaccuggaggucacaaca

SEQ ID NO: 409955 - RNA, 32 nt, Homo Sapiens
cgcucaugagaaaaggaauguacaauaaauag

SEQ ID NO: 409956 - RNA, 32 nt, Homo Sapiens
uuuccaauacugcgugacaucuaguaaaugag

SEQ ID NO: 409957 - RNA, 32 nt, Homo Sapiens
uugggaaucugcaagaaccuccccuuuccccu

SEQ ID NO: 409958 - RNA, 32 nt, Homo Sapiens
guauuuuagggucaaugagagccauaaaaaua

SEQ ID NO: 409959 - RNA, 32 nt, Homo Sapiens
cgcgggccgagggcuccugcagcugcucgcgc

SEQ ID NO: 409960 - RNA, 32 nt, Homo Sapiens
gauauaugaagaaaaggaaauaaaaaacugua

SEQ ID NO: 409961 - RNA, 32 nt, Homo Sapiens
cugcuacagucauguuucugcaugucagcgag

SEQ ID NO: 409962 - RNA, 32 nt, Homo Sapiens
aaauuuuugauaaaguuuuucuuacuaaaaaa

SEQ ID NO: 409963 - RNA, 32 nt, Homo Sapiens
aacugugcauuuucccugcauuuuuucccaac

SEQ ID NO: 409964 - RNA, 32 nt, Homo Sapiens
ucagacgcccugcggcaccggcaccgucugcu

SEQ ID NO: 409965 - RNA, 32 nt, Homo Sapiens
gcaccgaggcagcggcggggcucugggcgcgc

SEQ ID NO: 409966 - RNA, 32 nt, Homo Sapiens
ggccggagggugccggcucuggcugucccugu

SEQ ID NO: 409967 - RNA, 32 nt, Homo Sapiens
cugcccacuccagcuccaucccuuauuuauuc

SEQ ID NO: 409968 - RNA, 32 nt, Homo Sapiens
aacuccugucauugguauuagcaauaucuggc

SEQ ID NO: 409969 - RNA, 32 nt, Homo Sapiens
gaugucagugauucagauaacucuugaccuug

SEQ ID NO: 409970 - RNA, 32 nt, Homo Sapiens
gccauugcacuccagccugggcgacaagagca

SEQ ID NO: 409971 - RNA, 32 nt, Homo Sapiens
cccuccuacuugcgcgcggagccgagcucuug

SEQ ID NO: 409972 - RNA, 32 nt, Homo Sapiens
aagacuuccagagccucaaaugagaaaauguc

SEQ ID NO: 409973 - RNA, 32 nt, Homo Sapiens
cuagauccugcaccccagcauuccagcucugc

SEQ ID NO: 409974 - RNA, 32 nt, Homo Sapiens
aggaccugguuccgccauagccacggagcccc

SEQ ID NO: 409975 - RNA, 32 nt, Homo Sapiens
ggaugaucaacuucccaaaauagguugugucu

SEQ ID NO: 409976 - RNA, 32 nt, Homo Sapiens
aaauuccuuuuggagacaauuguuucaagugc

SEQ ID NO: 409977 - RNA, 32 nt, Homo Sapiens
gcagggcagggccaguugccuggggccaucug

SEQ ID NO: 409978 - RNA, 32 nt, Homo Sapiens
acaccaugauuguaagaugccauuccaguuuu

SEQ ID NO: 409979 - RNA, 32 nt, Homo Sapiens
aauauuucuuaauuuuggcauacucaaauuua

SEQ ID NO: 409980 - RNA, 32 nt, Homo Sapiens
aggcauuccuuucuaucgauaauuacucuuuc

SEQ ID NO: 409981 - RNA, 32 nt, Homo Sapiens
gaggcccccuggauggcaccaagaucggcccu

SEQ ID NO: 409982 - RNA, 32 nt, Homo Sapiens
cuaagaauccugguccuucuccacucuccacc

SEQ ID NO: 409983 - RNA, 32 nt, Homo Sapiens
auacaugcuguaauuugacauucugggucaca

SEQ ID NO: 409984 - RNA, 32 nt, Homo Sapiens
gcauuucuaaaauuauaauugaaaacaaaauc

SEQ ID NO: 409985 - RNA, 32 nt, Homo Sapiens
gggggcagguggcaaggccuggccgggccuuc

SEQ ID NO: 409986 - RNA, 32 nt, Homo Sapiens
aauuuuauauagaggacaaaacagcauuaaac

SEQ ID NO: 409987 - RNA, 32 nt, Homo Sapiens
agugccuucugcaguuuccccagagcuccuca

SEQ ID NO: 409988 - RNA, 32 nt, Homo Sapiens
agaggugagaauguguuaaaaaaaaaaaaaaa

SEQ ID NO: 409989 - RNA, 32 nt, Homo Sapiens
aucuggaaccucagccuggccagacacaggcc

SEQ ID NO: 409990 - RNA, 32 nt, Homo Sapiens
aaguuacuggcuuuuauacuuaccaaacauca

SEQ ID NO: 409991 - RNA, 32 nt, Homo Sapiens
cucucuucccagcugcagaugccacaccugcu

SEQ ID NO: 409992 - RNA, 32 nt, Homo Sapiens
uuucucuuuucucugcauugaacuagaaaaac

SEQ ID NO: 409993 - RNA, 32 nt, Homo Sapiens
uuuuucuaaaagaagacaauauuuuagaacug

SEQ ID NO: 409994 - RNA, 32 nt, Homo Sapiens
gcccggugaccuuuaccccagcccccucuccg

SEQ ID NO: 409995 - RNA, 32 nt, Homo Sapiens
aggugaacacaauuauuuuaaggcaguuaaau

SEQ ID NO: 409996 - RNA, 32 nt, Homo Sapiens
gaauucuucaaguuuaaaucuggacacaaaaa

SEQ ID NO: 409997 - RNA, 32 nt, Homo Sapiens
gaggcggggcuuugcuggcuucccagagagag

SEQ ID NO: 409998 - RNA, 32 nt, Homo Sapiens
ggacucuuuggagaaagaagauauuuuaaaac

SEQ ID NO: 409999 - RNA, 32 nt, Homo Sapiens
auugggagggcuucuugcaggcugcugggcug

SEQ ID NO: 410000 - RNA, 32 nt, Homo Sapiens
gccacaacccacccuagguugauguaugggag

SEQ ID NO: 410001 - RNA, 32 nt, Homo Sapiens
ggacgauggcgagaggggagggggagcgaguu

SEQ ID NO: 410002 - RNA, 32 nt, Homo Sapiens
agagcaggugggggcggggagccgagggggcg

SEQ ID NO: 410003 - RNA, 32 nt, Homo Sapiens
gccucacacaggauguggcacaugacagugcc

SEQ ID NO: 410004 - RNA, 32 nt, Homo Sapiens
uugcagaauggaguuuccauggauuucuacca

SEQ ID NO: 410005 - RNA, 32 nt, Homo Sapiens
agaguaaguccagaguccucgaaacugagcuc

SEQ ID NO: 410006 - RNA, 32 nt, Homo Sapiens
ggccgggugcgguggcucaugccuggaauccc

SEQ ID NO: 410007 - RNA, 32 nt, Homo Sapiens
cggccccggggcaaagaggggugcagagggag

SEQ ID NO: 410008 - RNA, 32 nt, Homo Sapiens
auuucacauaucuguuuaugccuacuucaaua

SEQ ID NO: 410009 - RNA, 32 nt, Homo Sapiens
augccagcucugugccagacacauuggacaug

SEQ ID NO: 410010 - RNA, 32 nt, Homo Sapiens
guccuauggcacccccaccccaucccuuucgu

SEQ ID NO: 410011 - RNA, 32 nt, Homo Sapiens
cuuuuaaaaauauguccaaaucuuaaaauugu

SEQ ID NO: 410012 - RNA, 32 nt, Homo Sapiens
aagcucaggaccaggcaaugugacuuugcauc

SEQ ID NO: 410013 - RNA, 32 nt, Homo Sapiens
ggguucacaaaacucaaauuugugucauucua

SEQ ID NO: 410014 - RNA, 32 nt, Homo Sapiens
gaggaggcccuccauuccugguuucuguagcu

SEQ ID NO: 410015 - RNA, 32 nt, Homo Sapiens
gggcacugcagauggggaagcaugucaccuug

SEQ ID NO: 410016 - RNA, 32 nt, Homo Sapiens
aaggagauggggagggcgcuuuuguacguuaa

SEQ ID NO: 410017 - RNA, 32 nt, Homo Sapiens
gacgugacagagcuaucauuaucgacuuggga

SEQ ID NO: 410018 - RNA, 32 nt, Homo Sapiens
ugagaugucauucacaugccauucaguuuacc

SEQ ID NO: 410019 - RNA, 32 nt, Homo Sapiens
uacuuuuuaaaaaacuauuuuauguucagaaa

SEQ ID NO: 410020 - RNA, 32 nt, Homo Sapiens
gaacaaauggcuggaugagugaaacaggaaug

SEQ ID NO: 410021 - RNA, 32 nt, Homo Sapiens
ucuugccagcccagcccugccuccccggucuc

SEQ ID NO: 410022 - RNA, 32 nt, Homo Sapiens
cagauucagaucugucugauguuccagaacug

SEQ ID NO: 410023 - RNA, 32 nt, Homo Sapiens
gucuacucuaggacugggcccgagggugguuu

SEQ ID NO: 410024 - RNA, 32 nt, Homo Sapiens
uggaucagaaccagagagcaugcugaaugccc

SEQ ID NO: 410025 - RNA, 32 nt, Homo Sapiens
gcagaugguaccaggcaguucugcucucgaca

SEQ ID NO: 410026 - RNA, 30 nt, Homo Sapiens
guuacauguguaaugggggauauuggacuu

SEQ ID NO: 410027 - RNA, 32 nt, Homo Sapiens
cugcugcugcugccugcggcccggggcugaag

SEQ ID NO: 410028 - RNA, 32 nt, Homo Sapiens
guaaagagauauauuuuuguaagaggaauaug

SEQ ID NO: 410029 - RNA, 32 nt, Homo Sapiens
aucccuagugucagcagauucagcgguacugg

SEQ ID NO: 410030 - RNA, 32 nt, Homo Sapiens
ccuuuucccagcuggagcccugucauucauuc

SEQ ID NO: 410031 - RNA, 32 nt, Homo Sapiens
auguauaauaugcuuuuucuuagcuuuccuau

SEQ ID NO: 410032 - RNA, 32 nt, Homo Sapiens
ugggcggcgagcaccccugcgccgggcgccug

SEQ ID NO: 410033 - RNA, 32 nt, Homo Sapiens
ggaagagggaggcucccgccgcgcucacuucc

SEQ ID NO: 410034 - RNA, 32 nt, Homo Sapiens
aauaaaacuacauuuuuuccucuuccauacug

SEQ ID NO: 410035 - RNA, 32 nt, Homo Sapiens
uuguuuaucuagcauagcacaaacguuuuucc

SEQ ID NO: 410036 - RNA, 32 nt, Homo Sapiens
ugcuuggaacagaggccuuggcugcuccgcag

SEQ ID NO: 410037 - RNA, 32 nt, Homo Sapiens
uuuucuuggcaucucaguuaaucuucauucuu

SEQ ID NO: 410038 - RNA, 32 nt, Homo Sapiens
agcuccgcgggaacccggcgcggcugccugcg

SEQ ID NO: 410039 - RNA, 32 nt, Homo Sapiens
uguugucaaauuauggauauuacugguuaguu

SEQ ID NO: 410040 - RNA, 32 nt, Homo Sapiens
uugacuaguuugggggcggcugggcgcuuggc

SEQ ID NO: 410041 - RNA, 32 nt, Homo Sapiens
ugaaaugucucaaagaggcagauucauagaaa

SEQ ID NO: 410042 - RNA, 32 nt, Homo Sapiens
acucaacuucaagcugcucaucuguuaguaag

SEQ ID NO: 410043 - RNA, 30 nt, Homo Sapiens
ccuccuggaugugcuuacuaacucugggcu

SEQ ID NO: 410044 - RNA, 32 nt, Homo Sapiens
acuacagagaaggcagggacugcuaugaagac

SEQ ID NO: 410045 - RNA, 32 nt, Homo Sapiens
guaacuuuuuuuuuuugccugugaauugagug

SEQ ID NO: 410046 - RNA, 32 nt, Homo Sapiens
aaaaucugggccuacauaaaauuugagaauua

SEQ ID NO: 410047 - RNA, 32 nt, Homo Sapiens
aguggcugcuccuuccuucaccucugaaaacg

SEQ ID NO: 410048 - RNA, 32 nt, Homo Sapiens
ccugccuucugcucccuccccagcugguuugg

SEQ ID NO: 410049 - RNA, 32 nt, Homo Sapiens
cccggaugaaacagauauauggagugaucacu

SEQ ID NO: 410050 - RNA, 32 nt, Homo Sapiens
gcgccgguguugagagaggcggcggccgccgc

SEQ ID NO: 410051 - RNA, 32 nt, Homo Sapiens
gauaacuuuucuguuucuuuuauguuuuuuuc

SEQ ID NO: 410052 - RNA, 32 nt, Homo Sapiens
caauaaagcuugauuuaacaaacaagaaaaaa

SEQ ID NO: 410053 - RNA, 32 nt, Homo Sapiens
uuauuuuuaauuacugaauauuucuuagacgu

SEQ ID NO: 410054 - RNA, 32 nt, Homo Sapiens
ggaguagcugggugaauggacgaugguggcgu

SEQ ID NO: 410055 - RNA, 32 nt, Homo Sapiens
accucccucacagaacagggaagcagugacag

SEQ ID NO: 410056 - RNA, 32 nt, Homo Sapiens
auuaggaagggagagcugcaguacguuagggc

SEQ ID NO: 410057 - RNA, 32 nt, Homo Sapiens
gucaguccagcaugguagggguuaacgugggu

SEQ ID NO: 410058 - RNA, 32 nt, Homo Sapiens
gggcccccaagccuugguaacccagacaugcc

SEQ ID NO: 410059 - RNA, 32 nt, Homo Sapiens
uccccucaauuccacaccccagacccaaccua

SEQ ID NO: 410060 - RNA, 32 nt, Homo Sapiens
aacacauaaucucaugaagaaauaaugaggua

SEQ ID NO: 410061 - RNA, 32 nt, Homo Sapiens
accacuuccgguugccggcccgcgccucauaa

SEQ ID NO: 410062 - RNA, 32 nt, Homo Sapiens
ccaggaguaggaagaagggugggcuuccaagu

SEQ ID NO: 410063 - RNA, 32 nt, Homo Sapiens
guaccaaagcaucuuggaagcaaagagagaag

SEQ ID NO: 410064 - RNA, 32 nt, Homo Sapiens
ggcaugagggucacaggucagcaaggugugag

SEQ ID NO: 410065 - RNA, 32 nt, Homo Sapiens
cuguugccaggcuggaaugcaguggcgugauc

SEQ ID NO: 410066 - RNA, 32 nt, Homo Sapiens
ggccagccccagcggucagucuauaaauacuc

SEQ ID NO: 410067 - RNA, 32 nt, Homo Sapiens
uccagccaccucagucccucuuugggagguga

SEQ ID NO: 410068 - RNA, 32 nt, Homo Sapiens
ccagcugcaagcggcgcgugcucggugucggc

SEQ ID NO: 410069 - RNA, 29 nt, Homo Sapiens
gaccagccugaacaacauggcaaaacccu

SEQ ID NO: 410070 - RNA, 32 nt, Homo Sapiens
aacccucucccccaccacccagcccacugcac

SEQ ID NO: 410071 - RNA, 30 nt, Homo Sapiens
uaccugccacuugcccacccacuccccuca

SEQ ID NO: 410072 - RNA, 32 nt, Homo Sapiens
gguauugcaggcgcuugcucuccggggccgcc

SEQ ID NO: 410073 - RNA, 32 nt, Homo Sapiens
cacagcaggaggaggcugugugaaaccuggga

SEQ ID NO: 410074 - RNA, 32 nt, Homo Sapiens
accuagaggauuguccaccuucugccaaggcc

SEQ ID NO: 410075 - RNA, 32 nt, Homo Sapiens
aaaauaauaugaggucaucaagggcagagaac

SEQ ID NO: 410076 - RNA, 32 nt, Homo Sapiens
aauuagcagaagugaccaaauugggagauaau

SEQ ID NO: 410077 - RNA, 32 nt, Homo Sapiens
cagccuccaucccugucccccaucuuggugcu

SEQ ID NO: 410078 - RNA, 32 nt, Homo Sapiens
uccugcgcgcagcugcaggcgacuccgcucug

SEQ ID NO: 410079 - RNA, 32 nt, Homo Sapiens
uuucccuuuuauuuggagggaaugggaggaag

SEQ ID NO: 410080 - RNA, 32 nt, Homo Sapiens
acccucucagguauauuuaccugguagaaaaa

SEQ ID NO: 410081 - RNA, 32 nt, Homo Sapiens
uaugcuaguuuauuggaaguguucaagaaaua

SEQ ID NO: 410082 - RNA, 29 nt, Homo Sapiens
aauaaaguucuguuauauuuccuugcucg

SEQ ID NO: 410083 - RNA, 32 nt, Homo Sapiens
ggccucgugcuucaucugccacaagcggugcc

SEQ ID NO: 410084 - RNA, 32 nt, Homo Sapiens
ccagccucaccccaucccacgacccccgcaac

SEQ ID NO: 410085 - RNA, 32 nt, Homo Sapiens
guucacuguauggaauuuaauaaaauuauaau

SEQ ID NO: 410086 - RNA, 32 nt, Homo Sapiens
uccaagccggugccgggcgcccagggguugcc

SEQ ID NO: 410087 - RNA, 32 nt, Homo Sapiens
uccacugugccgagguugaacucuuuuuuguu

SEQ ID NO: 410088 - RNA, 32 nt, Homo Sapiens
uaccgucaguccccggccgcgcggagccggga

SEQ ID NO: 410089 - RNA, 31 nt, Homo Sapiens
gccuucuauuuuuuacuucaagauuguuuca

SEQ ID NO: 410090 - RNA, 32 nt, Homo Sapiens
cacuugaagccaaagaaagaaacucacacuua

SEQ ID NO: 410091 - RNA, 32 nt, Homo Sapiens
aaacaucaaaaauuguuaaaaucauuguguua

SEQ ID NO: 410092 - RNA, 32 nt, Homo Sapiens
cgacuggagacggggagcccgcgagacccggg

SEQ ID NO: 410093 - RNA, 32 nt, Homo Sapiens
caccgacacucuaagugacuaguggaaaagcu

SEQ ID NO: 410094 - RNA, 32 nt, Homo Sapiens
auugaccccaagcucaccccagccuuccuucc

SEQ ID NO: 410095 - RNA, 32 nt, Homo Sapiens
gugguggagggaaagcacuuugaagggaagua

SEQ ID NO: 410096 - RNA, 32 nt, Homo Sapiens
ucccagccugggaggaucaaggccuggauccc

SEQ ID NO: 410097 - RNA, 32 nt, Homo Sapiens
gugaggacucccucaggucggccacgggaccu

SEQ ID NO: 410098 - RNA, 32 nt, Homo Sapiens
ggaggcgaggacccgagcgaguguagggggug

SEQ ID NO: 410099 - RNA, 28 nt, Homo Sapiens
aaacaagagcuauggcauuugaaaaagu

SEQ ID NO: 410100 - RNA, 32 nt, Homo Sapiens
uucuucucuaucuguguauauuuuauaagaug

SEQ ID NO: 410101 - RNA, 32 nt, Homo Sapiens
uaaaucagggauuuuuccccuuuccgaguauu

SEQ ID NO: 410102 - RNA, 32 nt, Homo Sapiens
ucugggcaacgcggucugcugguucccacguc

SEQ ID NO: 410103 - RNA, 32 nt, Homo Sapiens
gaccaagaaagacguggaccuggaugauguac

SEQ ID NO: 410104 - RNA, 32 nt, Homo Sapiens
ccuguccagugaggaagaaacacugaaccaga

SEQ ID NO: 410105 - RNA, 32 nt, Homo Sapiens
uaccccaggguuuauuagcauccuacuucugc

SEQ ID NO: 410106 - RNA, 32 nt, Homo Sapiens
aagcccaggaggaggaagaggaggcugguugg

SEQ ID NO: 410107 - RNA, 32 nt, Homo Sapiens
cgaggggcacugcacccacggugaccucugcg

SEQ ID NO: 410108 - RNA, 32 nt, Homo Sapiens
ugcuggaaauaaaaccuugguuugucaaggcu

SEQ ID NO: 410109 - RNA, 32 nt, Homo Sapiens
cagugugcagaugucuacaccagucaugugga

SEQ ID NO: 410110 - RNA, 32 nt, Homo Sapiens
uuccacccuuuuccucuuccgcugugcaacug

SEQ ID NO: 410111 - RNA, 32 nt, Homo Sapiens
auccccugaggcuggaggcauucugcucagga

SEQ ID NO: 410112 - RNA, 32 nt, Homo Sapiens
gcagcgauggugagcauuuugguuuccuuaag

SEQ ID NO: 410113 - RNA, 32 nt, Homo Sapiens
caaaagugcaagauggggagugagaggcuggg

SEQ ID NO: 410114 - RNA, 32 nt, Homo Sapiens
uaggcuauguugaguacguaggcugugggaag

SEQ ID NO: 410115 - RNA, 30 nt, Homo Sapiens
aagguuuucggaggcggcgguguuaugggu

SEQ ID NO: 410116 - RNA, 32 nt, Homo Sapiens
aaaagauaaggucuucugaggacauuccauuu

SEQ ID NO: 410117 - RNA, 32 nt, Homo Sapiens
uguguggguggucacgggagggugugagucag

SEQ ID NO: 410118 - RNA, 32 nt, Homo Sapiens
uuuguuuuaacuuuucugugcugaagagagga

SEQ ID NO: 410119 - RNA, 32 nt, Homo Sapiens
cugguccugggcggggccuguggguggaguag

SEQ ID NO: 410120 - RNA, 32 nt, Homo Sapiens
uuugaaagccucuggaaaacucaggauucuca

SEQ ID NO: 410121 - RNA, 32 nt, Homo Sapiens
uuucauuuguugcauuuccaguuuccaauacc

SEQ ID NO: 410122 - RNA, 32 nt, Homo Sapiens
uugugugugaggaaauccucaucuuguauuuu

SEQ ID NO: 410123 - RNA, 32 nt, Homo Sapiens
auauaaugggugauuauauaaguuagauuuau

SEQ ID NO: 410124 - RNA, 32 nt, Homo Sapiens
aaauacuuaaucuauuuuaaauuuauaaaauc

SEQ ID NO: 410125 - RNA, 32 nt, Homo Sapiens
accccacgcacccccaggaccuucgccgucuc

SEQ ID NO: 410126 - RNA, 32 nt, Homo Sapiens
gcccuaguaauggccaauuauuuguacagcaa

SEQ ID NO: 410127 - RNA, 32 nt, Homo Sapiens
cuggagggaaccgugaugaagagacacuuucu

SEQ ID NO: 410128 - RNA, 32 nt, Homo Sapiens
ggggaggccucccaggcuggucugcuccacug

SEQ ID NO: 410129 - RNA, 32 nt, Homo Sapiens
gcugucuccaugacgucuguggcaggaguccc

SEQ ID NO: 410130 - RNA, 32 nt, Homo Sapiens
aauguaauuucaacuauuuuguacauuuaaau

SEQ ID NO: 410131 - RNA, 32 nt, Homo Sapiens
aaggaggcagaaaaauaugaaaagagagacug

SEQ ID NO: 410132 - RNA, 28 nt, Homo Sapiens
ccccaggggcggcugcagaggcagugcc

SEQ ID NO: 410133 - RNA, 32 nt, Homo Sapiens
ugguuuugauuugcauuucucuaauaauuugu

SEQ ID NO: 410134 - RNA, 32 nt, Homo Sapiens
acucgaacuggcucuccuugcuccucagcuug

SEQ ID NO: 410135 - RNA, 32 nt, Homo Sapiens
cacaguccagccuucuaggugaucagcuugaa

SEQ ID NO: 410136 - RNA, 32 nt, Homo Sapiens
aaacauuaucccaaggcuuuaccuuuugauca

SEQ ID NO: 410137 - RNA, 32 nt, Homo Sapiens
ggcaacuggacuucuccaccgcccgcuuccgg

SEQ ID NO: 410138 - RNA, 32 nt, Homo Sapiens
uccagacaccagcaagccucuaucuugucuaa

SEQ ID NO: 410139 - RNA, 32 nt, Homo Sapiens
gguggcggagggcaguguggguucugugucug

SEQ ID NO: 410140 - RNA, 32 nt, Homo Sapiens
aaguugcccuguaaaguuauuuggugucauug

SEQ ID NO: 410141 - RNA, 32 nt, Homo Sapiens
caucaguacuuuguaugggauauuaaagagau

SEQ ID NO: 410142 - RNA, 32 nt, Homo Sapiens
aacuauaagagcuuuguuucugaugggggugu

SEQ ID NO: 410143 - RNA, 32 nt, Homo Sapiens
gaccccugcaccagcccuucccugcuuugagg

SEQ ID NO: 410144 - RNA, 32 nt, Homo Sapiens
ggccucaggugacaccgccuucuagcccaggc

SEQ ID NO: 410145 - RNA, 32 nt, Homo Sapiens
auaaaaucuuggcgagucauuaaacuuaugaa

SEQ ID NO: 410146 - RNA, 32 nt, Homo Sapiens
ucucaguacaacaugaaaauuguugcuucuca

SEQ ID NO: 410147 - RNA, 32 nt, Homo Sapiens
cacuuaaaacucccaguaaaucuuggaauaaa

SEQ ID NO: 410148 - RNA, 32 nt, Homo Sapiens
ccugacauaaaauaauuuugcauauacuauac

SEQ ID NO: 410149 - RNA, 32 nt, Homo Sapiens
cggccucacaggccuugccaucugcaagaugu

SEQ ID NO: 410150 - RNA, 32 nt, Homo Sapiens
cgggaccaauacuacugcguccucccugaucc

SEQ ID NO: 410151 - RNA, 32 nt, Homo Sapiens
agccccggcaugcucugcggccgcccgcgguc

SEQ ID NO: 410152 - RNA, 32 nt, Homo Sapiens
cccaauguugaaucucaucccaauguuguuuu

SEQ ID NO: 410153 - RNA, 32 nt, Homo Sapiens
ugguaacaacaguagcagcaguagcaauucug

SEQ ID NO: 410154 - RNA, 32 nt, Homo Sapiens
cgcugagcugggugcacggugugauuccagga

SEQ ID NO: 410155 - RNA, 32 nt, Homo Sapiens
gguugguagcuucuuuggagacuugugauaac

SEQ ID NO: 410156 - RNA, 32 nt, Homo Sapiens
guuuuguacuuugguagugaagugauuuuuac

SEQ ID NO: 410157 - RNA, 32 nt, Homo Sapiens
cccacccccugccugcccagccugggcccugc

SEQ ID NO: 410158 - RNA, 32 nt, Homo Sapiens
agguuccccgcaccuccgcgccguaguugcgc

SEQ ID NO: 410159 - RNA, 32 nt, Homo Sapiens
uggagaagcucgccggccgcggaagacuaggg

SEQ ID NO: 410160 - RNA, 32 nt, Homo Sapiens
cucccagcaucuucaucuuaaaacagaucaga

SEQ ID NO: 410161 - RNA, 32 nt, Homo Sapiens
augucccggagcaagguggcugggagccugag

SEQ ID NO: 410162 - RNA, 28 nt, Homo Sapiens
guucccaaagaaugacauuugaacacag

SEQ ID NO: 410163 - RNA, 32 nt, Homo Sapiens
uugaaaagggauagcauaaauauuuuaaguaa

SEQ ID NO: 410164 - RNA, 32 nt, Homo Sapiens
cgaggacgcuguagacgacauugcuuauaagg

SEQ ID NO: 410165 - RNA, 32 nt, Homo Sapiens
cuggcgcgcgcccuccgaaacuacgccaagac

SEQ ID NO: 410166 - RNA, 32 nt, Homo Sapiens
gugaaaccucaucuguaagaccucugagccac

SEQ ID NO: 410167 - RNA, 32 nt, Homo Sapiens
accaagaagcagcagcagcagcagcaacaguu

SEQ ID NO: 410168 - RNA, 32 nt, Homo Sapiens
ggcucagcuaucaagguuugcuccaucuuccu

SEQ ID NO: 410169 - RNA, 32 nt, Homo Sapiens
aggaccugggcuucacacaccaccgccugccc

SEQ ID NO: 410170 - RNA, 32 nt, Homo Sapiens
guuaccucuguuaucucuguaccuggggagga

SEQ ID NO: 410171 - RNA, 32 nt, Homo Sapiens
uugagcauuuccaauuauauggaagaguuacu

SEQ ID NO: 410172 - RNA, 32 nt, Homo Sapiens
cauuugauuguccuuuuacauagagaauaacu

SEQ ID NO: 410173 - RNA, 32 nt, Homo Sapiens
acggcucgcacgaguccggggccgauguacca

SEQ ID NO: 410174 - RNA, 32 nt, Homo Sapiens
ucuuaccuauauauuucuuaauaaauaaauuu

SEQ ID NO: 410175 - RNA, 32 nt, Homo Sapiens
ccaaugcucugugccccuaaagaagggaaaag

SEQ ID NO: 410176 - RNA, 32 nt, Homo Sapiens
auuuuguacuuugaacacacacauaauauaua

SEQ ID NO: 410177 - RNA, 32 nt, Homo Sapiens
gaggcagcggcggggcucugggcgcgcggcug

SEQ ID NO: 410178 - RNA, 32 nt, Homo Sapiens
uuugaccggccccagagcuaaaagcaccagag

SEQ ID NO: 410179 - RNA, 32 nt, Homo Sapiens
caccugcauaugucagggcuccagucagcaaa

SEQ ID NO: 410180 - RNA, 32 nt, Homo Sapiens
uaggaagauggaagaaauagggaaagagcccu

SEQ ID NO: 410181 - RNA, 32 nt, Homo Sapiens
acagcuucggagggcauggggguguagggagu

SEQ ID NO: 410182 - RNA, 32 nt, Homo Sapiens
gugugucaaauuauaaaaauguguucagcaua

SEQ ID NO: 410183 - RNA, 32 nt, Homo Sapiens
ggcucucaaaggaaacaagacagauggaaguc

SEQ ID NO: 410184 - RNA, 32 nt, Homo Sapiens
uuugaugaaguuucuguauuuucauguuguaa

SEQ ID NO: 410185 - RNA, 32 nt, Homo Sapiens
cggggcccuuauuucccgggggugugggcgag

SEQ ID NO: 410186 - RNA, 32 nt, Homo Sapiens
aaacuugaucuucagcagcauaaugacaaucc

SEQ ID NO: 410187 - RNA, 32 nt, Homo Sapiens
cauacuugaauauguuuaaguuuauaaguaac

SEQ ID NO: 410188 - RNA, 32 nt, Homo Sapiens
gacgcuggacuccaggcuccccugccugcaua

SEQ ID NO: 410189 - RNA, 32 nt, Homo Sapiens
acauauaaagauugcauauuuuauuaugacau

SEQ ID NO: 410190 - RNA, 32 nt, Homo Sapiens
gaaacaauaagguaucucuguauguacugaua

SEQ ID NO: 410191 - RNA, 32 nt, Homo Sapiens
guuacacgggucugccauuccaaacaagucag

SEQ ID NO: 410192 - RNA, 32 nt, Homo Sapiens
ggcuuguaauuuccucugugaagcaacuuagc

SEQ ID NO: 410193 - RNA, 32 nt, Homo Sapiens
uggagcagagcugggacgcggcuggagagucu

SEQ ID NO: 410194 - RNA, 32 nt, Homo Sapiens
ugguccccugccucuacugccggcgccugcgg

SEQ ID NO: 410195 - RNA, 32 nt, Homo Sapiens
ucucauacagguuauaggucuuucucucucua

SEQ ID NO: 410196 - RNA, 32 nt, Homo Sapiens
aaagugccguaagaaacagaaacuauuuguuc

SEQ ID NO: 410197 - RNA, 32 nt, Homo Sapiens
gcguuccuuccacuucugcacgucuuccuuuc

SEQ ID NO: 410198 - RNA, 32 nt, Homo Sapiens
uaagacaggacagaagcagacagcagguggau

SEQ ID NO: 410199 - RNA, 29 nt, Homo Sapiens
uuuggcauuuauuauuaccacaaauuaug

SEQ ID NO: 410200 - RNA, 32 nt, Homo Sapiens
gguugggaagggagggagagggggcgcagcuc

SEQ ID NO: 410201 - RNA, 32 nt, Homo Sapiens
uaaaagcccuguaucguauucaccuucaguuu

SEQ ID NO: 410202 - RNA, 32 nt, Homo Sapiens
ugcauacuucugcccuccccagccccagcuca

SEQ ID NO: 410203 - RNA, 32 nt, Homo Sapiens
uuuccuuccgcaggaacuggacacggcaguga

SEQ ID NO: 410204 - RNA, 32 nt, Homo Sapiens
cccucgugucagcccggcacuggccagaaucg

SEQ ID NO: 410205 - RNA, 32 nt, Homo Sapiens
uguugcaggaccagcucugcccccuaauuaua

SEQ ID NO: 410206 - RNA, 32 nt, Homo Sapiens
ggacagaggccugcccgggcgcggccagcccc

SEQ ID NO: 410207 - RNA, 32 nt, Homo Sapiens
cacucaaaauuccagcaaugaccauugcuaag

SEQ ID NO: 410208 - RNA, 32 nt, Homo Sapiens
acuggcaaaaugacaggagaagggcagccaca

SEQ ID NO: 410209 - RNA, 32 nt, Homo Sapiens
aaccccaucucuacuaaaaaugcggaagaguu

SEQ ID NO: 410210 - RNA, 32 nt, Homo Sapiens
uagcccucugagccucuuggggcccccucaga

SEQ ID NO: 410211 - RNA, 32 nt, Homo Sapiens
uccucccgcaccauccucccccagacagcaga

SEQ ID NO: 410212 - RNA, 32 nt, Homo Sapiens
uucacuaaaaauaaauaugucauugugcuuua

SEQ ID NO: 410213 - RNA, 32 nt, Homo Sapiens
cugugggagcaccaccugguggcugaggcauu

SEQ ID NO: 410214 - RNA, 32 nt, Homo Sapiens
uaggagcgcucgccucgcugcggugcccgcug

SEQ ID NO: 410215 - RNA, 32 nt, Homo Sapiens
cuuuuucccaggguugacuacaagaaagaaaa

SEQ ID NO: 410216 - RNA, 32 nt, Homo Sapiens
auauugugauuucagagaaaaagcaggacaug

SEQ ID NO: 410217 - RNA, 32 nt, Homo Sapiens
gguccacauggcauuugggaaagcagaugggu

SEQ ID NO: 410218 - RNA, 32 nt, Homo Sapiens
aaaagucacaguacucaaccuacuucaaggga

SEQ ID NO: 410219 - RNA, 32 nt, Homo Sapiens
acuuccagcuggaugucuggaugacuccugaa

SEQ ID NO: 410220 - RNA, 32 nt, Homo Sapiens
gccucaaaacaaaaaccccacaaaacaguaua

SEQ ID NO: 410221 - RNA, 32 nt, Homo Sapiens
cuccacuuugaaaugcagaaauacaggcauaa

SEQ ID NO: 410222 - RNA, 32 nt, Homo Sapiens
auaggaaacagucauuggaauguugcacagag

SEQ ID NO: 410223 - RNA, 32 nt, Homo Sapiens
ugugugcgccuguggggugcgugcucucugug

SEQ ID NO: 410224 - RNA, 32 nt, Homo Sapiens
ugcuguggcuggccagagacaccuccaggccg

SEQ ID NO: 410225 - RNA, 32 nt, Homo Sapiens
guuuagaugauuauuuguaagaucuggugacu

SEQ ID NO: 410226 - RNA, 32 nt, Homo Sapiens
cccuccuuccccaccccauaagcccugagacu

SEQ ID NO: 410227 - RNA, 32 nt, Homo Sapiens
auuuaccuaauccuaaggauccacaguuucag

SEQ ID NO: 410228 - RNA, 32 nt, Homo Sapiens
gcuuuucuggguuuugaggggugucuggggga

SEQ ID NO: 410229 - RNA, 32 nt, Homo Sapiens
uuaugauuggugcuuuuuuaugcuucuccuaa

SEQ ID NO: 410230 - RNA, 32 nt, Homo Sapiens
gcugcucccuggcccaggaaagagggacuacc

SEQ ID NO: 410231 - RNA, 32 nt, Homo Sapiens
ggggaacggcggugcagcucccccgcuguccc

SEQ ID NO: 410232 - RNA, 32 nt, Homo Sapiens
ugguuaaaaaucaucccaugcucugagaugag

SEQ ID NO: 410233 - RNA, 32 nt, Homo Sapiens
augauguuuuaaguuccaaugaguauuacuag

SEQ ID NO: 410234 - RNA, 32 nt, Homo Sapiens
cagaugcccaggcgcaggauccacggaaguca

SEQ ID NO: 410235 - RNA, 32 nt, Homo Sapiens
cacaaaauuggugccaagacugggugagaaau

SEQ ID NO: 410236 - RNA, 32 nt, Homo Sapiens
cggugccaaccaaggcuuaugauucaacaguu

SEQ ID NO: 410237 - RNA, 32 nt, Homo Sapiens
gguuaugacacgggaccccugaccaggcuucu

SEQ ID NO: 410238 - RNA, 32 nt, Homo Sapiens
cagagccgcccgguggucguguccgggcgaug

SEQ ID NO: 410239 - RNA, 32 nt, Homo Sapiens
uuuuccuugcaucugacuugccacuagcacag

SEQ ID NO: 410240 - RNA, 32 nt, Homo Sapiens
aucacuucucaauaaacgugagauccuguuga

SEQ ID NO: 410241 - RNA, 32 nt, Homo Sapiens
cccugcgucuucugccacugcccuguucuggg

SEQ ID NO: 410242 - RNA, 32 nt, Homo Sapiens
caucgccugggaagagaaaguguccaguaggg

SEQ ID NO: 410243 - RNA, 32 nt, Homo Sapiens
aguucugaaaauagaucaucaugguggcacca

SEQ ID NO: 410244 - RNA, 32 nt, Homo Sapiens
cuuuaucacaauuuacugaccaaauaccuagc

SEQ ID NO: 410245 - RNA, 32 nt, Homo Sapiens
cauauugccaucucaguugcugcagugcagug

SEQ ID NO: 410246 - RNA, 32 nt, Homo Sapiens
uuuuaaaaauuccaacuaucugcuugcauugg

SEQ ID NO: 410247 - RNA, 32 nt, Homo Sapiens
uuaaagggguuccugaaccacaaaccauagca

SEQ ID NO: 410248 - RNA, 32 nt, Homo Sapiens
uaaggguauguggaaaaacaggcuuuaggcaa

SEQ ID NO: 410249 - RNA, 32 nt, Homo Sapiens
agacugugccuaaagaauuuuguggaauacac

SEQ ID NO: 410250 - RNA, 32 nt, Homo Sapiens
agggacucaaggugccugccacuuccucagcg

SEQ ID NO: 410251 - RNA, 32 nt, Homo Sapiens
ccacgugaggcuccgcaucagcagccaggggc

SEQ ID NO: 410252 - RNA, 32 nt, Homo Sapiens
cguccucgaccccaaggacgcucacgugcagu

SEQ ID NO: 410253 - RNA, 32 nt, Homo Sapiens
uugcuacaaccuggugucucagcuuauuauuu

SEQ ID NO: 410254 - RNA, 32 nt, Homo Sapiens
uucaaauauguugauucaaacuugcuucuaag

SEQ ID NO: 410255 - RNA, 32 nt, Homo Sapiens
cagcuuguccacccgccggccggaccagaagc

SEQ ID NO: 410256 - RNA, 32 nt, Homo Sapiens
cugcccggcggcggcccggcugggaggaggug

SEQ ID NO: 410257 - RNA, 32 nt, Homo Sapiens
auauuuacccuauuaugguuauaacagaagac

SEQ ID NO: 410258 - RNA, 32 nt, Homo Sapiens
uaacauuaacuccuauuuugacuuacaaaucu

SEQ ID NO: 410259 - RNA, 32 nt, Homo Sapiens
ggggauggggagaggcuuugccuccaccauuc

SEQ ID NO: 410260 - RNA, 32 nt, Homo Sapiens
ggacugcggggacccgcuccgcgcacaguggc

SEQ ID NO: 410261 - RNA, 32 nt, Homo Sapiens
ccuggccagccgugcagcugcccaggcgcuau

SEQ ID NO: 410262 - RNA, 32 nt, Homo Sapiens
cuuuuuuguguuuuguuaagcaugucccuugg

SEQ ID NO: 410263 - RNA, 32 nt, Homo Sapiens
cuagaagggcuaugcaggugaggugggcugag

SEQ ID NO: 410264 - RNA, 32 nt, Homo Sapiens
uuauggauuaaaaagaaaauucuaauauaaag

SEQ ID NO: 410265 - RNA, 32 nt, Homo Sapiens
uaaugacggggaaagcacgaugaaaagaugua

SEQ ID NO: 410266 - RNA, 32 nt, Homo Sapiens
aggugaccaauguuuccaacuguuggaccugc

SEQ ID NO: 410267 - RNA, 32 nt, Homo Sapiens
aucccagcuacuugggaggcugagagaggaga

SEQ ID NO: 410268 - RNA, 32 nt, Homo Sapiens
auggugauguuuuuauucucucaggcagucua

SEQ ID NO: 410269 - RNA, 32 nt, Homo Sapiens
gugucugucuccagcccuucgggccucccacg

SEQ ID NO: 410270 - RNA, 32 nt, Homo Sapiens
agucccuagagcugggggcggggcggacccag

SEQ ID NO: 410271 - RNA, 30 nt, Homo Sapiens
gggugucuggacuggaaccucugggcccac

SEQ ID NO: 410272 - RNA, 32 nt, Homo Sapiens
gguugcagaaaagauggaaaaaaggacaugug

SEQ ID NO: 410273 - RNA, 32 nt, Homo Sapiens
acccgggccccgggcaggggcgcgcuccacuu

SEQ ID NO: 410274 - RNA, 32 nt, Homo Sapiens
ucuggcauuuccccugcuggcacucauucucu

SEQ ID NO: 410275 - RNA, 32 nt, Homo Sapiens
aaaaacagugaacacaagugcuuacuugugga

SEQ ID NO: 410276 - RNA, 32 nt, Homo Sapiens
caauauaaaaccaaaugaaauaaaagcaguuc

SEQ ID NO: 410277 - RNA, 32 nt, Homo Sapiens
aaggcccagguuugagagagcccagaggggca

SEQ ID NO: 410278 - RNA, 32 nt, Homo Sapiens
uauagacgggcaagucuguuuccucccaucaa

SEQ ID NO: 410279 - RNA, 32 nt, Homo Sapiens
ccacauugcccauuuuucagauaaagaaacaa

SEQ ID NO: 410280 - RNA, 32 nt, Homo Sapiens
acugcagaggacaugcuuuaucaguagguccu

SEQ ID NO: 410281 - RNA, 32 nt, Homo Sapiens
aggugccuuguauuuuaaaucugugacaaacc

SEQ ID NO: 410282 - RNA, 32 nt, Homo Sapiens
cuguuagaaaauuuuaaaguauuacuaaaacc

SEQ ID NO: 410283 - RNA, 32 nt, Homo Sapiens
uuaacuguaauagaaaugcaauacaaauaaaa

SEQ ID NO: 410284 - RNA, 32 nt, Homo Sapiens
cguuguuguaaaccucuuuauuuuggugacug

SEQ ID NO: 410285 - RNA, 32 nt, Homo Sapiens
agagcuuugcuuguucuucagaaagacuugcc

SEQ ID NO: 410286 - RNA, 32 nt, Homo Sapiens
agccuaggaauggauagucagagagcagcggc

SEQ ID NO: 410287 - RNA, 32 nt, Homo Sapiens
ccccgccgcccgccgcgccauggcccgaagac

SEQ ID NO: 410288 - RNA, 32 nt, Homo Sapiens
uuuaagaucauggcauuuuaauuuacauuaga

SEQ ID NO: 410289 - RNA, 32 nt, Homo Sapiens
caccuucagccagauggaauccaauuauacau

SEQ ID NO: 410290 - RNA, 32 nt, Homo Sapiens
ugauuauugaauguuauaucaucaauacuuuu

SEQ ID NO: 410291 - RNA, 32 nt, Homo Sapiens
gugguucugugccucuuaucaaguguuacaga

SEQ ID NO: 410292 - RNA, 32 nt, Homo Sapiens
aaaagaaacaaaugaaauaaauauuguguugu

SEQ ID NO: 410293 - RNA, 32 nt, Homo Sapiens
cucaaaugaaauguaugcauucacauuuagaa

SEQ ID NO: 410294 - RNA, 32 nt, Homo Sapiens
aaaaaugcauauauuuucuuucauauuuguaa

SEQ ID NO: 410295 - RNA, 32 nt, Homo Sapiens
gggcugggacccagagcgggaccccggcugcc

SEQ ID NO: 410296 - RNA, 32 nt, Homo Sapiens
aggcuagcuauuucuaaauauuuuaaauuagc

SEQ ID NO: 410297 - RNA, 32 nt, Homo Sapiens
uccagauugugaaaauguacaauaaaugugua

SEQ ID NO: 410298 - RNA, 32 nt, Homo Sapiens
acugagucccgggaccccgggagagcggucag

SEQ ID NO: 410299 - RNA, 32 nt, Homo Sapiens
uaucuacaaaaauauggagaagagcaauuuga

SEQ ID NO: 410300 - RNA, 32 nt, Homo Sapiens
aggaggaggaggagcgcgagcucagcgauaca

SEQ ID NO: 410301 - RNA, 32 nt, Homo Sapiens
ccuaacaacuguacuuaaauuuuguuuucuag

SEQ ID NO: 410302 - RNA, 32 nt, Homo Sapiens
uugaccggagaauugaguugccggggaacaga

SEQ ID NO: 410303 - RNA, 32 nt, Homo Sapiens
ggcccugugucuccucaccucugcuccugucu

SEQ ID NO: 410304 - RNA, 32 nt, Homo Sapiens
uacuguuucauugcauaacaugguagcaucug

SEQ ID NO: 410305 - RNA, 32 nt, Homo Sapiens
uguauuuuucauacuuugauaauucugaaauc

SEQ ID NO: 410306 - RNA, 32 nt, Homo Sapiens
gagcgaugaugccuuacagguugcauagcacu

SEQ ID NO: 410307 - RNA, 32 nt, Homo Sapiens
cggagcuggagcggcggggcggcggcggaguc

SEQ ID NO: 410308 - RNA, 32 nt, Homo Sapiens
accuggauguuuucuuucuccucuuugcuucc

SEQ ID NO: 410309 - RNA, 32 nt, Homo Sapiens
agaaauaauaaaccucacuuuacuuguuaaaa

SEQ ID NO: 410310 - RNA, 32 nt, Homo Sapiens
cuuuuggaaggagguugacauauuuuaaauaa

SEQ ID NO: 410311 - RNA, 32 nt, Homo Sapiens
cacaaggccuuuuccugcccccugccuugcca

SEQ ID NO: 410312 - RNA, 32 nt, Homo Sapiens
gaccccccaagccaagcucccaaccuuucagc

SEQ ID NO: 410313 - RNA, 32 nt, Homo Sapiens
aaaugcuuccugcuccucccgcccuccccacc

SEQ ID NO: 410314 - RNA, 32 nt, Homo Sapiens
aagcgugggcguugcuggucuguccgaggagg

SEQ ID NO: 410315 - RNA, 32 nt, Homo Sapiens
ugcucgguggggcuggagcggcuggcuuacgu

SEQ ID NO: 410316 - RNA, 32 nt, Homo Sapiens
aguagauaucuagaggugaaauuacugaguca

SEQ ID NO: 410317 - RNA, 32 nt, Homo Sapiens
ucaucaggaagccuguggugugcggagucucc

SEQ ID NO: 410318 - RNA, 32 nt, Homo Sapiens
ccuccuggagaaugaggcgcagaggccucgcc

SEQ ID NO: 410319 - RNA, 32 nt, Homo Sapiens
accagcugcugugccccaccacgucuggcucc

SEQ ID NO: 410320 - RNA, 29 nt, Homo Sapiens
aacaaauaaaguugaacuuguuuuucuca

SEQ ID NO: 410321 - RNA, 32 nt, Homo Sapiens
ccccgcccaagccaccagggagccaaucucag

SEQ ID NO: 410322 - RNA, 32 nt, Homo Sapiens
agcugugcauagugguuggcaccuguaguccc

SEQ ID NO: 410323 - RNA, 32 nt, Homo Sapiens
ggcucgcggagcggccagaucgcggcggaguc

SEQ ID NO: 410324 - RNA, 32 nt, Homo Sapiens
cggcgccgucuucuccuccuugucacccgcgg

SEQ ID NO: 410325 - RNA, 32 nt, Homo Sapiens
aauauauuuacuauucauuaaauggaaguggg

SEQ ID NO: 410326 - RNA, 32 nt, Homo Sapiens
uugggagccaagggcccccugguacucaguuc

SEQ ID NO: 410327 - RNA, 32 nt, Homo Sapiens
ggauacucagggcuggagaaacaaagauuaua

SEQ ID NO: 410328 - RNA, 32 nt, Homo Sapiens
aggcaacagaacuucauguccuggauguggca

SEQ ID NO: 410329 - RNA, 32 nt, Homo Sapiens
cauccaggaggauguuucuguugucgggcaga

SEQ ID NO: 410330 - RNA, 32 nt, Homo Sapiens
gccaggcgugguagcgcacgccuguaauccca

SEQ ID NO: 410331 - RNA, 32 nt, Homo Sapiens
agaagggcaauagccauuauuuuuguggauga

SEQ ID NO: 410332 - RNA, 32 nt, Homo Sapiens
aguacugccggggcauccgcggaaggcgucug

SEQ ID NO: 410333 - RNA, 32 nt, Homo Sapiens
uggcacagaaacacaucccaaauacuaugaua

SEQ ID NO: 410334 - RNA, 32 nt, Homo Sapiens
gggagagaggggcuauuccaucuugcuuccug

SEQ ID NO: 410335 - RNA, 32 nt, Homo Sapiens
acuguuuuguuucacucagauuagcucaguuu

SEQ ID NO: 410336 - RNA, 32 nt, Homo Sapiens
ccaaucccugucacuugggccccuaccaggau

SEQ ID NO: 410337 - RNA, 32 nt, Homo Sapiens
ccucucuucagcgcggggugcccacaaguugc

SEQ ID NO: 410338 - RNA, 32 nt, Homo Sapiens
ugccgagcggcagcugcaggucaucagcagca

SEQ ID NO: 410339 - RNA, 32 nt, Homo Sapiens
cuguuuggcuuguggauagcaguuccaagaug

SEQ ID NO: 410340 - RNA, 32 nt, Homo Sapiens
uugcagauucaacaaaaagaguguuucaaagc

SEQ ID NO: 410341 - RNA, 32 nt, Homo Sapiens
gcgagauggaggaggggcgcgcugcggcaccc

SEQ ID NO: 410342 - RNA, 32 nt, Homo Sapiens
acaccuaguccuugcugcauuguacaguagcu

SEQ ID NO: 410343 - RNA, 32 nt, Homo Sapiens
uugucuuauaacaugacccagcccuauuuuac

SEQ ID NO: 410344 - RNA, 32 nt, Homo Sapiens
gccaucagaagcugggagagagguaugggaca

SEQ ID NO: 410345 - RNA, 32 nt, Homo Sapiens
ugaacuaucauuaagaacauacuaaagaagaa

SEQ ID NO: 410346 - RNA, 32 nt, Homo Sapiens
ugagaccucagagcuucagaucgaggccuugg

SEQ ID NO: 410347 - RNA, 32 nt, Homo Sapiens
gaccccuggagcuauccggguacucuaaaggc

SEQ ID NO: 410348 - RNA, 32 nt, Homo Sapiens
uucucaucaguucuuccucccacaauguagga

SEQ ID NO: 410349 - RNA, 32 nt, Homo Sapiens
aaaagagugcaaacagacagccuaaauucaca

SEQ ID NO: 410350 - RNA, 32 nt, Homo Sapiens
acauaggauucugguauuccacauccaauaug

SEQ ID NO: 410351 - RNA, 32 nt, Homo Sapiens
gcagugagcugagauggcgccacugcacucca

SEQ ID NO: 410352 - RNA, 32 nt, Homo Sapiens
ugcucgccucuggcggagcagcagccacucgc

SEQ ID NO: 410353 - RNA, 32 nt, Homo Sapiens
acauaguggugcuuuuuaaauuuauuuuuaac

SEQ ID NO: 410354 - RNA, 32 nt, Homo Sapiens
gcuggcgcugcagcugcagaauggucggcggu

SEQ ID NO: 410355 - RNA, 32 nt, Homo Sapiens
caguggcagcccacccaccucugcucucuggc

SEQ ID NO: 410356 - RNA, 32 nt, Homo Sapiens
ggaugagcagcaugacaccaucaaaauuuaag

SEQ ID NO: 410357 - RNA, 32 nt, Homo Sapiens
gaguucugguccggcuuguagcagaagaagga

SEQ ID NO: 410358 - RNA, 32 nt, Homo Sapiens
ccccugucauguaccgccuguuugcucaaauc

SEQ ID NO: 410359 - RNA, 32 nt, Homo Sapiens
ggagagcggcggugcccccgagccccucugcg

SEQ ID NO: 410360 - RNA, 32 nt, Homo Sapiens
gacugggagucgacuuccuucucuuuaaagau

SEQ ID NO: 410361 - RNA, 32 nt, Homo Sapiens
gucgucuuuauguccgcccaccuagugcuucc

SEQ ID NO: 410362 - RNA, 32 nt, Homo Sapiens
ggauagcguggagugacggugccaccgcggcg

SEQ ID NO: 410363 - RNA, 32 nt, Homo Sapiens
ggcgggugggaagggaugggacacagcuucug

SEQ ID NO: 410364 - RNA, 32 nt, Homo Sapiens
auggauaguauaggaagacauuaauccuagca

SEQ ID NO: 410365 - RNA, 32 nt, Homo Sapiens
uauuuauagaaagcuucaauagaacuguuuca

SEQ ID NO: 410366 - RNA, 32 nt, Homo Sapiens
agccgaaaggcacaaucacuguuucagauuua

SEQ ID NO: 410367 - RNA, 32 nt, Homo Sapiens
agaauaauguuuuuuucuucaagagacgcaau

SEQ ID NO: 410368 - RNA, 32 nt, Homo Sapiens
gaagugggaguccauccuguacaucucaagca

SEQ ID NO: 410369 - RNA, 32 nt, Homo Sapiens
uggauuuuaagugauagcuaagcuuccaagcu

SEQ ID NO: 410370 - RNA, 32 nt, Homo Sapiens
ucugccuggugagcgcccgccggcccacacaa

SEQ ID NO: 410371 - RNA, 30 nt, Homo Sapiens
ggagguacugggcgcgcgcggcuccggcuc

SEQ ID NO: 410372 - RNA, 32 nt, Homo Sapiens
cucccaauacuggcucugucugaguaagaaac

SEQ ID NO: 410373 - RNA, 32 nt, Homo Sapiens
ucuccccacgggggcugcauuucacacuccuc

SEQ ID NO: 410374 - RNA, 32 nt, Homo Sapiens
cuucucuuuccucugcccuucccacagggcag

SEQ ID NO: 410375 - RNA, 32 nt, Homo Sapiens
agacucacaauuuuuauuugcuuuuauauuuu

SEQ ID NO: 410376 - RNA, 32 nt, Homo Sapiens
ucaguuacaaccuagagagauuuugagccuca

SEQ ID NO: 410377 - RNA, 32 nt, Homo Sapiens
gcacaucgagagcaaacacaucggagacaaau

SEQ ID NO: 410378 - RNA, 32 nt, Homo Sapiens
aguagcuucuucacagacuuggcacuucucca

SEQ ID NO: 410379 - RNA, 32 nt, Homo Sapiens
cauuagcaauucauucagauggucaauaacuu

SEQ ID NO: 410380 - RNA, 32 nt, Homo Sapiens
ccuugggcuuucuucucgcccaggcucccaac

SEQ ID NO: 410381 - RNA, 32 nt, Homo Sapiens
augggguaucucuguccauacuucuagaaucc

SEQ ID NO: 410382 - RNA, 32 nt, Homo Sapiens
aucagaguggcugagggcaguugcucuguguu

SEQ ID NO: 410383 - RNA, 32 nt, Homo Sapiens
cgaugcucugaggggacgucagggccucagga

SEQ ID NO: 410384 - RNA, 32 nt, Homo Sapiens
ucaagaaguuaccaaagcuggugagggcuugu

SEQ ID NO: 410385 - RNA, 32 nt, Homo Sapiens
aggcagaggggcgguaaggaagggcagguucu

SEQ ID NO: 410386 - RNA, 32 nt, Homo Sapiens
ccaccaucauugggcuuucagggaggagaagg

SEQ ID NO: 410387 - RNA, 32 nt, Homo Sapiens
cugaggugguggcugcggccuuugaacaaaca

SEQ ID NO: 410388 - RNA, 32 nt, Homo Sapiens
acugacagcuccugggguucaucuuuguaucc

SEQ ID NO: 410389 - RNA, 32 nt, Homo Sapiens
cuccacguuguuauuucagauauuaggagauu

SEQ ID NO: 410390 - RNA, 32 nt, Homo Sapiens
uuugcaaggagcuuuucccccuuuugcucagg

SEQ ID NO: 410391 - RNA, 32 nt, Homo Sapiens
ucguuuccuuccacccucuuugguuccuugug

SEQ ID NO: 410392 - RNA, 32 nt, Homo Sapiens
ugaaggaaaaaauuauguuuuucaguuuaauu

SEQ ID NO: 410393 - RNA, 32 nt, Homo Sapiens
ugagaaaguauuugaagaaacuguugcacaac

SEQ ID NO: 410394 - RNA, 32 nt, Homo Sapiens
auuuuaccgacauaauacauggagccaaagaa

SEQ ID NO: 410395 - RNA, 32 nt, Homo Sapiens
uguuaauaaaggcauuuaauagauaaaaacau

SEQ ID NO: 410396 - RNA, 32 nt, Homo Sapiens
gcccaaaaauuccuuuucaaagaaacaaaaag

SEQ ID NO: 410397 - RNA, 32 nt, Homo Sapiens
cuucucaggauccucaucuccauccucauccu

SEQ ID NO: 410398 - RNA, 32 nt, Homo Sapiens
ucaaggucuuaauggacgagaaccagaccagc

SEQ ID NO: 410399 - RNA, 32 nt, Homo Sapiens
agugagcauucucagcacauugccucaacagc

SEQ ID NO: 410400 - RNA, 32 nt, Homo Sapiens
aaaaccaaaaacaacuaacaagaaaccaagua

SEQ ID NO: 410401 - RNA, 32 nt, Homo Sapiens
uggaaaauucaaggaguuaauaaaauuuguuu

SEQ ID NO: 410402 - RNA, 32 nt, Homo Sapiens
cuuuccagcucuuccgaaguucguucuugcgc

SEQ ID NO: 410403 - RNA, 32 nt, Homo Sapiens
aauacagaaaaaauugacagguauuauaaauu

SEQ ID NO: 410404 - RNA, 32 nt, Homo Sapiens
cccgggaacggcgggcggugagcauuccggga

SEQ ID NO: 410405 - RNA, 32 nt, Homo Sapiens
ucccuguucucuguccucuacuccacucaugc

SEQ ID NO: 410406 - RNA, 32 nt, Homo Sapiens
auuagauaguugagucauauauuuucaacauu

SEQ ID NO: 410407 - RNA, 32 nt, Homo Sapiens
cugcccagucccccaaccccagccgcucggag

SEQ ID NO: 410408 - RNA, 32 nt, Homo Sapiens
ugaaauccuuugcaugcagccgacugggaagc

SEQ ID NO: 410409 - RNA, 32 nt, Homo Sapiens
cucccagccucccagcccucugcccccucaga

SEQ ID NO: 410410 - RNA, 32 nt, Homo Sapiens
ggguacgccagaggaagcugggcgcucggccu

SEQ ID NO: 410411 - RNA, 32 nt, Homo Sapiens
cucaguuucuucaucuguaacaucaaaugaau

SEQ ID NO: 410412 - RNA, 32 nt, Homo Sapiens
caugcuccgggccccgacggcgcggacgcccc

SEQ ID NO: 410413 - RNA, 32 nt, Homo Sapiens
ccuaaagcuuuagacucagagcccaggguccc

SEQ ID NO: 410414 - RNA, 32 nt, Homo Sapiens
cauucauuucuguugggaccagacgcggagcc

SEQ ID NO: 410415 - RNA, 27 nt, Homo Sapiens
agucagucuuucuucagcuucccuuuc

SEQ ID NO: 410416 - RNA, 32 nt, Homo Sapiens
gagggagagcuugguccaucuggucaccaagg

SEQ ID NO: 410417 - RNA, 32 nt, Homo Sapiens
ucagcccugcugucaccaccuugucaugcacc

SEQ ID NO: 410418 - RNA, 32 nt, Homo Sapiens
agacagacaaaauccugaaacuaugacggccu

SEQ ID NO: 410419 - RNA, 32 nt, Homo Sapiens
ggaggccaagccugcagcuuucuggaaauucu

SEQ ID NO: 410420 - RNA, 32 nt, Homo Sapiens
accaacuccaacuccuucucccuccagcucca

SEQ ID NO: 410421 - RNA, 32 nt, Homo Sapiens
aagacucugccugcuuaauugugcuagaaaua

SEQ ID NO: 410422 - RNA, 32 nt, Homo Sapiens
gcgacacugccccucuccgagagcugagaagg

SEQ ID NO: 410423 - RNA, 32 nt, Homo Sapiens
auaaacuauuacagauacuuaaaaaaaaaaaa

SEQ ID NO: 410424 - RNA, 32 nt, Homo Sapiens
augaugcccuggcgcgcagcgcccgcuuccgu

SEQ ID NO: 410425 - RNA, 32 nt, Homo Sapiens
uuggauuccugggccuggcccagguggcuguu

SEQ ID NO: 410426 - RNA, 32 nt, Homo Sapiens
uaagccgcggcggacaacuaugcugaaagcca

SEQ ID NO: 410427 - RNA, 32 nt, Homo Sapiens
uguuaggggugguguggagauuguuaaucuug

SEQ ID NO: 410428 - RNA, 32 nt, Homo Sapiens
aaaguuuuguuuugauuuguuuccauuuccuu

SEQ ID NO: 410429 - RNA, 32 nt, Homo Sapiens
uguaaaaugcaaaagcacauagagagggaugg

SEQ ID NO: 410430 - RNA, 32 nt, Homo Sapiens
ggugucccgucggucucggcgccgggaagagg

SEQ ID NO: 410431 - RNA, 32 nt, Homo Sapiens
aggcacguugauccuuguuuuguugucaugga

SEQ ID NO: 410432 - RNA, 32 nt, Homo Sapiens
agagcugccggggcucccuaaacugggugggg

SEQ ID NO: 410433 - RNA, 30 nt, Homo Sapiens
gccgccauggagcagccgccggcgccuaag

SEQ ID NO: 410434 - RNA, 32 nt, Homo Sapiens
gaacuugcacagcaaaaacaaacaaacgcaag

SEQ ID NO: 410435 - RNA, 32 nt, Homo Sapiens
ucuugaugaggcucagaaaugccuguaccacg

SEQ ID NO: 410436 - RNA, 32 nt, Homo Sapiens
ccaguagcacagugaauguaugccaaaugcaa

SEQ ID NO: 410437 - RNA, 32 nt, Homo Sapiens
cucacuacaaccuccgccucccagguucaagg

SEQ ID NO: 410438 - RNA, 32 nt, Homo Sapiens
cgggcaccccccgagcaagcgggcccggggcu

SEQ ID NO: 410439 - RNA, 32 nt, Homo Sapiens
guucgcaaaauauaggucaaauuuaugguuau

SEQ ID NO: 410440 - RNA, 32 nt, Homo Sapiens
uguuguacauucaaugaaguguuauuaugcca

SEQ ID NO: 410441 - RNA, 32 nt, Homo Sapiens
cuuucacgccgggcgaaggacccggcgcugcg

SEQ ID NO: 410442 - RNA, 32 nt, Homo Sapiens
ucggugccggcucgcgcgaucggugggacaga

SEQ ID NO: 410443 - RNA, 32 nt, Homo Sapiens
cgagacuccuccuccacuccgccccgaggcag

SEQ ID NO: 410444 - RNA, 32 nt, Homo Sapiens
agagccaggaccaggugggggugcggcccugu

SEQ ID NO: 410445 - RNA, 32 nt, Homo Sapiens
ugcccauggagaaguuuagagaggaacucuug

SEQ ID NO: 410446 - RNA, 32 nt, Homo Sapiens
cggcacgagcugaguucuaaaguuccuguugc

SEQ ID NO: 410447 - RNA, 32 nt, Homo Sapiens
cugggguauaguuuguccuacaauagaaaaaa

SEQ ID NO: 410448 - RNA, 32 nt, Homo Sapiens
ugagcugugaaauagaucauggcaguuuggaa

SEQ ID NO: 410449 - RNA, 32 nt, Homo Sapiens
caauuuugcuucacuuuuuuuuuuguucuugc

SEQ ID NO: 410450 - RNA, 32 nt, Homo Sapiens
ugcuuuagcauuaaaaauuguuuugaaagaag

SEQ ID NO: 410451 - RNA, 32 nt, Homo Sapiens
gaagaagaauaaaaucacucgagacuucaagc

SEQ ID NO: 410452 - RNA, 32 nt, Homo Sapiens
ggguugggccccaagagugacuuccgacagac

SEQ ID NO: 410453 - RNA, 32 nt, Homo Sapiens
ugcugccccccucugccaggcgcuagacaugu

SEQ ID NO: 410454 - RNA, 32 nt, Homo Sapiens
cacaaacugcuacuccacuauaauuucccuuc

SEQ ID NO: 410455 - RNA, 32 nt, Homo Sapiens
ggccuggccguccuccggggccaccgaccgca

SEQ ID NO: 410456 - RNA, 32 nt, Homo Sapiens
cauuguaugagaaagcacuguaaaaacuuuuu

SEQ ID NO: 410457 - RNA, 32 nt, Homo Sapiens
ugaccagggcuuugccugccgcccucagcagu

SEQ ID NO: 410458 - RNA, 32 nt, Homo Sapiens
agaucaucaaagcuaaaugaauugggcuauaa

SEQ ID NO: 410459 - RNA, 32 nt, Homo Sapiens
ggcggcgaccccgcggcgggcgcggagaugug

SEQ ID NO: 410460 - RNA, 32 nt, Homo Sapiens
uguacuugugccugcuaaaucugugaaauuaa

SEQ ID NO: 410461 - RNA, 32 nt, Homo Sapiens
agcgagggucccuggcuuccccggcuuucucc

SEQ ID NO: 410462 - RNA, 30 nt, Homo Sapiens
uucacuggucaccuuguccaucuuacuuaa

SEQ ID NO: 410463 - RNA, 32 nt, Homo Sapiens
guguggcaucucucccuucucucucuugcucu

SEQ ID NO: 410464 - RNA, 32 nt, Homo Sapiens
ccaguuugauguuugucucuaguugucugugu

SEQ ID NO: 410465 - RNA, 32 nt, Homo Sapiens
gaaaccuggaggccugcagcucugccagccca

SEQ ID NO: 410466 - RNA, 32 nt, Homo Sapiens
gaggagacaauauuuuuucaaacuuuuugggg

SEQ ID NO: 410467 - RNA, 32 nt, Homo Sapiens
uacugucauugucugguuucugucccaguuua

SEQ ID NO: 410468 - RNA, 32 nt, Homo Sapiens
aaauuguagauauaggguaaucaauaaaaucc

SEQ ID NO: 410469 - RNA, 32 nt, Homo Sapiens
gcucacuugugcuacaagacaguccaccguuu

SEQ ID NO: 410470 - RNA, 32 nt, Homo Sapiens
ugauuuugauucaacaacaggagaauucuacu

SEQ ID NO: 410471 - RNA, 32 nt, Homo Sapiens
gagcgcggguggcggcuguggcggcggagggg

SEQ ID NO: 410472 - RNA, 32 nt, Homo Sapiens
cguucucagguggucuuguggcugucuuucgg

SEQ ID NO: 410473 - RNA, 32 nt, Homo Sapiens
aauacaaucggauuuaauaauuuuguggccag

SEQ ID NO: 410474 - RNA, 32 nt, Homo Sapiens
ggcggugggagcuuuucuccccggagagcgac

SEQ ID NO: 410475 - RNA, 32 nt, Homo Sapiens
cgugguacaaaauaaacguguauuuguuguuc

SEQ ID NO: 410476 - RNA, 32 nt, Homo Sapiens
cauuuagcugaauauaggaauacaguaaaacu

SEQ ID NO: 410477 - RNA, 30 nt, Homo Sapiens
gagaaaggcaggcagccggcgggcgcugcg

SEQ ID NO: 410478 - RNA, 32 nt, Homo Sapiens
cuuucagaaaauauaagcuuuuuuagugaaga

SEQ ID NO: 410479 - RNA, 32 nt, Homo Sapiens
cacggcugccucuccagccaccucugauacuu

SEQ ID NO: 410480 - RNA, 32 nt, Homo Sapiens
aacaagucuuccugagacccaggcuggugugg

SEQ ID NO: 410481 - RNA, 32 nt, Homo Sapiens
ucuucuuccagaagcuucugcagauucucauu

SEQ ID NO: 410482 - RNA, 30 nt, Homo Sapiens
agagggcucugugcugacauggcucuggac

SEQ ID NO: 410483 - RNA, 32 nt, Homo Sapiens
uaccugaggucaagcagacgguuuauggucag

SEQ ID NO: 410484 - RNA, 30 nt, Homo Sapiens
caguccgccugugcuguaugcucccugcag

SEQ ID NO: 410485 - RNA, 32 nt, Homo Sapiens
acugugaucuagaaggcaucacacacagcuuu

SEQ ID NO: 410486 - RNA, 32 nt, Homo Sapiens
cucauaguguuauuuuucuacucucuucauga

SEQ ID NO: 410487 - RNA, 32 nt, Homo Sapiens
aaagcugguugugaaauacauacugcgguuca

SEQ ID NO: 410488 - RNA, 32 nt, Homo Sapiens
auaguccuguacaauuccaauuuguuucuuuu

SEQ ID NO: 410489 - RNA, 32 nt, Homo Sapiens
ccauuuaaacaaaaacaagagcauuuguaaua

SEQ ID NO: 410490 - RNA, 32 nt, Homo Sapiens
uacggcacuucggagaucuccuccuucgccgg

SEQ ID NO: 410491 - RNA, 32 nt, Homo Sapiens
ucauugaaaggaaaggauaauauuuuaaaaga

SEQ ID NO: 410492 - RNA, 32 nt, Homo Sapiens
gagcgucucgcuugcgccccgggcccgcggcg

SEQ ID NO: 410493 - RNA, 32 nt, Homo Sapiens
gugcagugcucgcugccauggaugccaccaag

SEQ ID NO: 410494 - RNA, 32 nt, Homo Sapiens
ucccgccgacagaccuugggaccggggccaac

SEQ ID NO: 410495 - RNA, 32 nt, Homo Sapiens
uugcaauuggagauguuugugaggaaaaaaau

SEQ ID NO: 410496 - RNA, 32 nt, Homo Sapiens
uaaaagguuuguggaaauacauuaggauauca

SEQ ID NO: 410497 - RNA, 32 nt, Homo Sapiens
ccaaguacgcagagacccccucgucguccugg

SEQ ID NO: 410498 - RNA, 32 nt, Homo Sapiens
agcccaagaucaaugcucaaguuuuggaggac

SEQ ID NO: 410499 - RNA, 32 nt, Homo Sapiens
uucuguuucuaaaacacagaacuuacaagagc

SEQ ID NO: 410500 - RNA, 32 nt, Homo Sapiens
auuucuacuuauauuucuacucuuauauuauu

SEQ ID NO: 410501 - RNA, 31 nt, Homo Sapiens
gcucgggagccccgggggacauggccuccuu

SEQ ID NO: 410502 - RNA, 32 nt, Homo Sapiens
ucucccaggggcugcauucucaguaucuuuuc

SEQ ID NO: 410503 - RNA, 32 nt, Homo Sapiens
aauacuagguaguauaaggcuuucucaaucag

SEQ ID NO: 410504 - RNA, 32 nt, Homo Sapiens
aggagccgcccgggcugugggggcgccgcgag

SEQ ID NO: 410505 - RNA, 32 nt, Homo Sapiens
ggccugggaggcauugagaaaaaggaaguggg

SEQ ID NO: 410506 - RNA, 32 nt, Homo Sapiens
aggugguggcuuuguaagacaguuggaaccca

SEQ ID NO: 410507 - RNA, 32 nt, Homo Sapiens
cacaccguauacguucacacacaugcacuaug

SEQ ID NO: 410508 - RNA, 32 nt, Homo Sapiens
guuucacuaggauuuugggggguugggggagc

SEQ ID NO: 410509 - RNA, 32 nt, Homo Sapiens
aggcauccuaggggcugaaauccuggaaaccg

SEQ ID NO: 410510 - RNA, 32 nt, Homo Sapiens
caggcauuuucccccuuggcucucaaugcugu

SEQ ID NO: 410511 - RNA, 32 nt, Homo Sapiens
aagcuuuccgagucuggugggcaggacuucuc

SEQ ID NO: 410512 - RNA, 32 nt, Homo Sapiens
uucuuuaaugaaauuuauaaauaugcuucuug

SEQ ID NO: 410513 - RNA, 32 nt, Homo Sapiens
ugcagcugcagcaguguucuaccggaaguguu

SEQ ID NO: 410514 - RNA, 32 nt, Homo Sapiens
uccccaaaauuccaccuugcauuugcaucaca

SEQ ID NO: 410515 - RNA, 32 nt, Homo Sapiens
cucacugccagugccaaaccgccccucagcag

SEQ ID NO: 410516 - RNA, 32 nt, Homo Sapiens
gcaccucccucgcgucugugccugccucaacg

SEQ ID NO: 410517 - RNA, 32 nt, Homo Sapiens
aggauggaagcagggggacacaacagaaauga

SEQ ID NO: 410518 - RNA, 32 nt, Homo Sapiens
uuguuguugucauggaugguggugacauggac

SEQ ID NO: 410519 - RNA, 32 nt, Homo Sapiens
cgggaguaucauuugagccaggagguugaggu

SEQ ID NO: 410520 - RNA, 32 nt, Homo Sapiens
ucccucccaucccauauuuguccaaguguucc

SEQ ID NO: 410521 - RNA, 32 nt, Homo Sapiens
cagagggguagcaguagcuguugugccaagcu

SEQ ID NO: 410522 - RNA, 32 nt, Homo Sapiens
cagaggaagcuaggauugaaagaauaacugcu

SEQ ID NO: 410523 - RNA, 32 nt, Homo Sapiens
aaagcuuucugcaggagggugaaugccgcagc

SEQ ID NO: 410524 - RNA, 32 nt, Homo Sapiens
acacacaaaccaugcucuacuccacccccaaa

SEQ ID NO: 410525 - RNA, 32 nt, Homo Sapiens
ccccuugguuguuuuucucugauuuuuaaaua

SEQ ID NO: 410526 - RNA, 32 nt, Homo Sapiens
gucaauuuauggaguuugugggaaauagggca

SEQ ID NO: 410527 - RNA, 32 nt, Homo Sapiens
gagggagugacgagucaaggaggagacaggga

SEQ ID NO: 410528 - RNA, 32 nt, Homo Sapiens
ucuagagaugguuuuuguuaaaucuacuaaua

SEQ ID NO: 410529 - RNA, 32 nt, Homo Sapiens
gcuugggcaaaguggcaagaccuccaucucuu

SEQ ID NO: 410530 - RNA, 32 nt, Homo Sapiens
uuugggaucugccugcaucgguguuggccacu

SEQ ID NO: 410531 - RNA, 32 nt, Homo Sapiens
acuacuguuuacugcuuucuccgucucuuuug

SEQ ID NO: 410532 - RNA, 32 nt, Homo Sapiens
accacagaagaagaagcaaacauggaaacuaa

SEQ ID NO: 410533 - RNA, 32 nt, Homo Sapiens
ggcagucuuuuuaaucuuuuuaucauaugcuu

SEQ ID NO: 410534 - RNA, 32 nt, Homo Sapiens
ucgccguuugaauugcugcgggcccgggcccu

SEQ ID NO: 410535 - RNA, 32 nt, Homo Sapiens
gcgcugggcgucuugggggugcgcgccgggag

SEQ ID NO: 410536 - RNA, 32 nt, Homo Sapiens
accuccuagcuacuuauccaucucuugaacuu

SEQ ID NO: 410537 - RNA, 32 nt, Homo Sapiens
gccaccuggagcaucauaauggacucuguggu

SEQ ID NO: 410538 - RNA, 26 nt, Homo Sapiens
cacugcacuccagcgagacucugucu

SEQ ID NO: 410539 - RNA, 32 nt, Homo Sapiens
ccagggaaacaaaauuuuaaaaauaauaaaau

SEQ ID NO: 410540 - RNA, 32 nt, Homo Sapiens
ucucaguaacauugccauuuguuuuuugccuu

SEQ ID NO: 410541 - RNA, 32 nt, Homo Sapiens
ugcaagaacuuagcaggaauaguucuggcuaa

SEQ ID NO: 410542 - RNA, 32 nt, Homo Sapiens
uaaggcuguguucccuuguuggugaggaaauu

SEQ ID NO: 410543 - RNA, 32 nt, Homo Sapiens
ggagggcuugcggcuagccggaggaagcuuug

SEQ ID NO: 410544 - RNA, 32 nt, Homo Sapiens
uguaugcuauccucuuauuccuuuaaagugag

SEQ ID NO: 410545 - RNA, 32 nt, Homo Sapiens
uaaaaggagaauuuaaauacugugcuuacugu

SEQ ID NO: 410546 - RNA, 32 nt, Homo Sapiens
ggacgguagauggugagaucgcagaugcgcua

SEQ ID NO: 410547 - RNA, 30 nt, Homo Sapiens
aggauacuauuugccaccuuuuuuaaaaau

SEQ ID NO: 410548 - RNA, 32 nt, Homo Sapiens
uucccucugcacccucuggaacccuggcccaa

SEQ ID NO: 410549 - RNA, 32 nt, Homo Sapiens
aacucccccgugccaaggcccgcgccgcccgg

SEQ ID NO: 410550 - RNA, 32 nt, Homo Sapiens
ucccagcuacucuggaggcugaggcaggagag

SEQ ID NO: 410551 - RNA, 32 nt, Homo Sapiens
cuucuuagaaaagaaucuuauaguacauguua

SEQ ID NO: 410552 - RNA, 32 nt, Homo Sapiens
gagguccuggaggcuggagggggguuggggcu

SEQ ID NO: 410553 - RNA, 32 nt, Homo Sapiens
uggcccggccccacccagccgacauguuuucu

SEQ ID NO: 410554 - RNA, 32 nt, Homo Sapiens
gccagacagggcggggugugguggcucacacc

SEQ ID NO: 410555 - RNA, 32 nt, Homo Sapiens
ucuccacacgggggagagacgcaguccgccca

SEQ ID NO: 410556 - RNA, 32 nt, Homo Sapiens
uugaacugaggaguaaaaguguguacauauau

SEQ ID NO: 410557 - RNA, 32 nt, Homo Sapiens
aaggggcgggacgcgccgcgcucgggaugucg

SEQ ID NO: 410558 - RNA, 32 nt, Homo Sapiens
ugcggccaugggggcguccgcgcggcugcugc

SEQ ID NO: 410559 - RNA, 32 nt, Homo Sapiens
uacgcggccucucugugccgcuucauuuguag

SEQ ID NO: 410560 - RNA, 32 nt, Homo Sapiens
agcugugccgugguguccagcuccggccaaau

SEQ ID NO: 410561 - RNA, 32 nt, Homo Sapiens
caaggcagugcucucugguuugccacagucuc

SEQ ID NO: 410562 - RNA, 32 nt, Homo Sapiens
gugccuaggcuggggcugccggaccgugaggc

SEQ ID NO: 410563 - RNA, 32 nt, Homo Sapiens
cggacaccguguuccucgugggcgagggcgcc

SEQ ID NO: 410564 - RNA, 32 nt, Homo Sapiens
cugacaacccucauucaauaaagaccagugaa

SEQ ID NO: 410565 - RNA, 32 nt, Homo Sapiens
agaguaaugaucaaaucaggguaauuagcaua

SEQ ID NO: 410566 - RNA, 32 nt, Homo Sapiens
gacagcagacugccgguacgcgcggccggggc

SEQ ID NO: 410567 - RNA, 32 nt, Homo Sapiens
uucacuguucaguggccuaaauguagauuaug

SEQ ID NO: 410568 - RNA, 28 nt, Homo Sapiens
cuaauaguuggcaccauuauaagcuaua

SEQ ID NO: 410569 - RNA, 32 nt, Homo Sapiens
agcucguaacacaacuaaaaaaaaaaaaaaaa

SEQ ID NO: 410570 - RNA, 32 nt, Homo Sapiens
aagagaauuuucccuuuuuuuuuuuuuuuuug

SEQ ID NO: 410571 - RNA, 31 nt, Homo Sapiens
cuuuuccuuucauaaaauuccacuccuaaga

SEQ ID NO: 410572 - RNA, 32 nt, Homo Sapiens
cuccccacuccagcauccccaaacugguacuc

SEQ ID NO: 410573 - RNA, 32 nt, Homo Sapiens
ugguagaacacuuucaaagagguuugagaaac

SEQ ID NO: 410574 - RNA, 32 nt, Homo Sapiens
uuuguagaugggaagacuaagguccaagcuug

SEQ ID NO: 410575 - RNA, 32 nt, Homo Sapiens
gcggccccggcgggcaccaugagcccucugcu

SEQ ID NO: 410576 - RNA, 32 nt, Homo Sapiens
caccccuagcuggcuucucaccagccuggccc

SEQ ID NO: 410577 - RNA, 32 nt, Homo Sapiens
augcuccugaggaccuguaccaccacaugcag

SEQ ID NO: 410578 - RNA, 32 nt, Homo Sapiens
gauucauuuauuauuucaaugugacuuuaauu

SEQ ID NO: 410579 - RNA, 32 nt, Homo Sapiens
gcguccgggcucccagcccgccccuccucccg

SEQ ID NO: 410580 - RNA, 32 nt, Homo Sapiens
aaaagaaaaaaaaaucuguguuucgagguuga

SEQ ID NO: 410581 - RNA, 32 nt, Homo Sapiens
cccacucaccucagcccucaggcagccccucc

SEQ ID NO: 410582 - RNA, 32 nt, Homo Sapiens
cugaauuucuggaguucucaucagugcacauu

SEQ ID NO: 410583 - RNA, 32 nt, Homo Sapiens
auuaaauuuguuucuauuuauucuuuuuugcc

SEQ ID NO: 410584 - RNA, 32 nt, Homo Sapiens
ggugcucugaccacacccagcucaggacucga

SEQ ID NO: 410585 - RNA, 32 nt, Homo Sapiens
ccaaguuggacucuaaguuauucuucauguag

SEQ ID NO: 410586 - RNA, 32 nt, Homo Sapiens
cguugaggcgguuuccugaauuuccccaucug

SEQ ID NO: 410587 - RNA, 32 nt, Homo Sapiens
ggccuauuugcaacuucuuuuuagagccaaug

SEQ ID NO: 410588 - RNA, 32 nt, Homo Sapiens
gaaaagaacaaagaagcacgugucuuacaaag

SEQ ID NO: 410589 - RNA, 32 nt, Homo Sapiens
gguauggccauuagaucugugcuuuuuaucuc

SEQ ID NO: 410590 - RNA, 32 nt, Homo Sapiens
gaggagcugucucggcucggcccgcgggggag

SEQ ID NO: 410591 - RNA, 32 nt, Homo Sapiens
ucacaucagcaucuuucugcuuugaaaacucu

SEQ ID NO: 410592 - RNA, 32 nt, Homo Sapiens
aaguuccuugcuuuuuugcugcuguuugguga

SEQ ID NO: 410593 - RNA, 32 nt, Homo Sapiens
cacugaggcccaggucgccgccgcggcgcguu

SEQ ID NO: 410594 - RNA, 32 nt, Homo Sapiens
gauugaaccggggaugucuggaugcugacaag

SEQ ID NO: 410595 - RNA, 32 nt, Homo Sapiens
aguauccuucaucuuauuuagcacuggagcaa

SEQ ID NO: 410596 - RNA, 32 nt, Homo Sapiens
ccgcagcucccucagcuuguccugagucccuu

SEQ ID NO: 410597 - RNA, 32 nt, Homo Sapiens
gacuugaagaccaaagacuuugaaauuugcga

SEQ ID NO: 410598 - RNA, 32 nt, Homo Sapiens
ucaacagcccccagagaguggugcuggcugag

SEQ ID NO: 410599 - RNA, 32 nt, Homo Sapiens
aacugaucauuuggugacuggagagguggauu

SEQ ID NO: 410600 - RNA, 32 nt, Homo Sapiens
uggcacuucuauuugcagauauuaucucugcc

SEQ ID NO: 410601 - RNA, 31 nt, Homo Sapiens
cguguggcagugaugcugccccgagugccug

SEQ ID NO: 410602 - RNA, 32 nt, Homo Sapiens
uggaguuaagaaguuuccauuauuuugcucca

SEQ ID NO: 410603 - RNA, 32 nt, Homo Sapiens
cauaacucuaaccaaaauuaagauauguuugg

SEQ ID NO: 410604 - RNA, 32 nt, Homo Sapiens
guggcucccagcuguggcaacuuugcccccca

SEQ ID NO: 410605 - RNA, 32 nt, Homo Sapiens
uggcggaggcggaggcggagguugcagugagc

SEQ ID NO: 410606 - RNA, 32 nt, Homo Sapiens
ccuguucggaagcaguggcugaauuuaucccc

SEQ ID NO: 410607 - RNA, 32 nt, Homo Sapiens
gcagcuugagccccgcgcugcccgccgagcac

SEQ ID NO: 410608 - RNA, 32 nt, Homo Sapiens
gggauacaggggaggcgguggggggugguggg

SEQ ID NO: 410609 - RNA, 32 nt, Homo Sapiens
ucauuagcugaauugagcuagaaaucacaaga

SEQ ID NO: 410610 - RNA, 32 nt, Homo Sapiens
aaagacaggaccaacuucagauucccaaagaa

SEQ ID NO: 410611 - RNA, 32 nt, Homo Sapiens
gaggcucugcuacuuuauccauugauuuuuaa

SEQ ID NO: 410612 - RNA, 32 nt, Homo Sapiens
gcuagggacugauguuauguucgacucagcac

SEQ ID NO: 410613 - RNA, 32 nt, Homo Sapiens
acagcccaucccagcccucagaggcucagagg

SEQ ID NO: 410614 - RNA, 32 nt, Homo Sapiens
caaggaggggauuuuuauuuggccagcagucu

SEQ ID NO: 410615 - RNA, 32 nt, Homo Sapiens
caccugcaaaggacagggacugggaccguuac

SEQ ID NO: 410616 - RNA, 32 nt, Homo Sapiens
agccucaaggacccugccugaaagaaaugaca

SEQ ID NO: 410617 - RNA, 32 nt, Homo Sapiens
cagcucuguccacagccacaauguccauagga

SEQ ID NO: 410618 - RNA, 32 nt, Homo Sapiens
cucgagucaucuuuggacuugcuugagauuug

SEQ ID NO: 410619 - RNA, 32 nt, Homo Sapiens
ucccaaggaccugaugcucacccaggcuccaa

SEQ ID NO: 410620 - RNA, 32 nt, Homo Sapiens
gauuauaacaauagcuccaucccuaaaugagg

SEQ ID NO: 410621 - RNA, 32 nt, Homo Sapiens
uacaaauaaaaagugcaggcuggaaugaucuc

SEQ ID NO: 410622 - RNA, 32 nt, Homo Sapiens
cgagacuacuguuucagcgugauuccaaacac

SEQ ID NO: 410623 - RNA, 32 nt, Homo Sapiens
cccuggguccucgaggguuauggcuugucccu

SEQ ID NO: 410624 - RNA, 32 nt, Homo Sapiens
acuggcaugucuuuuauguguucaguugccau

SEQ ID NO: 410625 - RNA, 32 nt, Homo Sapiens
agccaggcccgcgagaaguuggcgcuguacgu

SEQ ID NO: 410626 - RNA, 32 nt, Homo Sapiens
cccagaagagaauaguaagagaagguucauau

SEQ ID NO: 410627 - RNA, 32 nt, Homo Sapiens
ucugggagggaagaugggugcugggagagggu

SEQ ID NO: 410628 - RNA, 32 nt, Homo Sapiens
caccuacagauuuuuagcacaaaaauagccau

SEQ ID NO: 410629 - RNA, 32 nt, Homo Sapiens
aaauuuuugggcaaagaucagaggagaugccc

SEQ ID NO: 410630 - RNA, 32 nt, Homo Sapiens
gaggugguagagggcauggauaucucuacucg

SEQ ID NO: 410631 - RNA, 32 nt, Homo Sapiens
ccaaccccuggccucaauuucccuuucuauaa

SEQ ID NO: 410632 - RNA, 32 nt, Homo Sapiens
ggagcuggugaggagugagguggcucuggccu

SEQ ID NO: 410633 - RNA, 32 nt, Homo Sapiens
uugaagaaugaccaccuggcuacgccggcucu

SEQ ID NO: 410634 - RNA, 32 nt, Homo Sapiens
uucuggaacugaauucuuaaacauaaaacaga

SEQ ID NO: 410635 - RNA, 32 nt, Homo Sapiens
gucagggugaggggcgccugcggucuugggcc

SEQ ID NO: 410636 - RNA, 32 nt, Homo Sapiens
gcuuuauacauacaucugucauuuucauuuca

SEQ ID NO: 410637 - RNA, 32 nt, Homo Sapiens
gagcugggaaaagggaggcagaggaggcagag

SEQ ID NO: 410638 - RNA, 32 nt, Homo Sapiens
uuucuggauuggggguucuggggaccagggag

SEQ ID NO: 410639 - RNA, 32 nt, Homo Sapiens
gagcagcuugcugggucuccggaggcugcugg

SEQ ID NO: 410640 - RNA, 32 nt, Homo Sapiens
caacugcucccuccuuccugaggggccucagg

SEQ ID NO: 410641 - RNA, 32 nt, Homo Sapiens
uguaguuguuuaauuguucucuaauuaaugga

SEQ ID NO: 410642 - RNA, 32 nt, Homo Sapiens
cuuuacaaaaauaauuuuuaaaugcuuaauua

SEQ ID NO: 410643 - RNA, 32 nt, Homo Sapiens
ccccagcccucagucacccccacuucccacuu

SEQ ID NO: 410644 - RNA, 32 nt, Homo Sapiens
uuagaaauauuuuuuauuuuuccccaagaauu

SEQ ID NO: 410645 - RNA, 32 nt, Homo Sapiens
gcugcgcagcgcuggcugcuggcuggccucgc

SEQ ID NO: 410646 - RNA, 32 nt, Homo Sapiens
cuccccgcgccgggcgcccagccugagcgucc

SEQ ID NO: 410647 - RNA, 32 nt, Homo Sapiens
agauuuugccagccuggugggugugaagugga

SEQ ID NO: 410648 - RNA, 32 nt, Homo Sapiens
gcucuucucccucuucaggccauaauuucccu

SEQ ID NO: 410649 - RNA, 32 nt, Homo Sapiens
ucgggcgcucagagcuggccucggguccucgg

SEQ ID NO: 410650 - RNA, 32 nt, Homo Sapiens
aggaggcaauaaucuuuuaacaguguuuugca

SEQ ID NO: 410651 - RNA, 32 nt, Homo Sapiens
cggggcccgcggcuggguggcggguaguuccc

SEQ ID NO: 410652 - RNA, 32 nt, Homo Sapiens
ucuauuccacuuuaaauacuuuuaucuacuga

SEQ ID NO: 410653 - RNA, 32 nt, Homo Sapiens
cugugucaguuauuauauuuauguuuuuacau

SEQ ID NO: 410654 - RNA, 32 nt, Homo Sapiens
gcuuuguuauuuagaaagaugacucaguggca

SEQ ID NO: 410655 - RNA, 32 nt, Homo Sapiens
uucaacuauaugcagaaauugccuagccaugg

SEQ ID NO: 410656 - RNA, 32 nt, Homo Sapiens
acuucuucaggcuucuuagcugcugcuaucca

SEQ ID NO: 410657 - RNA, 32 nt, Homo Sapiens
gauguacuuaauauuaccugaguuugaaaugg

SEQ ID NO: 410658 - RNA, 32 nt, Homo Sapiens
caaaguccugggaguucacaucugugugauga

SEQ ID NO: 410659 - RNA, 32 nt, Homo Sapiens
ugauauaguuauugagaauuuauauuaacuuu

SEQ ID NO: 410660 - RNA, 32 nt, Homo Sapiens
ucucuacuaaaaauacaaaaauuuagccaggc

SEQ ID NO: 410661 - RNA, 32 nt, Homo Sapiens
ugacugccuuggaguagguggcauaaccuugu

SEQ ID NO: 410662 - RNA, 32 nt, Homo Sapiens
ggaccacgcagcagagucccccacgggccuga

SEQ ID NO: 410663 - RNA, 32 nt, Homo Sapiens
ugaguugaaaaugcagaagaggagaggcaggu

SEQ ID NO: 410664 - RNA, 28 nt, Homo Sapiens
uaucguaauagauaacauuugaauaucu

SEQ ID NO: 410665 - RNA, 32 nt, Homo Sapiens
gggcagggcgcugaccugcugcugagcuggcu

SEQ ID NO: 410666 - RNA, 32 nt, Homo Sapiens
ggccuuauguaaggagagguagcuacacagca

SEQ ID NO: 410667 - RNA, 32 nt, Homo Sapiens
uccuaaguagaguauugaagucguggcaaaga

SEQ ID NO: 410668 - RNA, 32 nt, Homo Sapiens
uugcuuuaggacuuagggaugauguucugggg

SEQ ID NO: 410669 - RNA, 32 nt, Homo Sapiens
gcaacauagaaagucacauuuugaaaggcuau

SEQ ID NO: 410670 - RNA, 32 nt, Homo Sapiens
gagcuguaauugcaucacugcacuccaaccug

SEQ ID NO: 410671 - RNA, 32 nt, Homo Sapiens
acagcuuccucagggcuuuuguuuccucaagc

SEQ ID NO: 410672 - RNA, 32 nt, Homo Sapiens
aacacacuaugaagaauuccagguguacuagu

SEQ ID NO: 410673 - RNA, 32 nt, Homo Sapiens
guaacgaugaacaaucaggagacggcuccagg

SEQ ID NO: 410674 - RNA, 32 nt, Homo Sapiens
auaaauauacuucuuuuugauuugguucuguu

SEQ ID NO: 410675 - RNA, 32 nt, Homo Sapiens
ccucucuucaucuucccaggacuuccauuacc

SEQ ID NO: 410676 - RNA, 32 nt, Homo Sapiens
ugcaaacauaacaaaaucacuuccauagugac

SEQ ID NO: 410677 - RNA, 32 nt, Homo Sapiens
ggagggcaguugcacgcugggcugguuugggc

SEQ ID NO: 410678 - RNA, 32 nt, Homo Sapiens
gcccgcccgcggccccgcagcagcuccaagaa

SEQ ID NO: 410679 - RNA, 32 nt, Homo Sapiens
ccgcucgggccccggcucucgguuauaagaug

SEQ ID NO: 410680 - RNA, 32 nt, Homo Sapiens
agguagcauaaggauuaucauugcuaauacuu

SEQ ID NO: 410681 - RNA, 32 nt, Homo Sapiens
cggugggacccggcccccacccaugcauggug

SEQ ID NO: 410682 - RNA, 32 nt, Homo Sapiens
cuccaacaaaacaaaacuuugcuggcuuccug

SEQ ID NO: 410683 - RNA, 32 nt, Homo Sapiens
ccgggccgggcgcccgcggcggcaccaugagu

SEQ ID NO: 410684 - RNA, 32 nt, Homo Sapiens
cccucccccacuuucaagacagaugagcagga

SEQ ID NO: 410685 - RNA, 30 nt, Homo Sapiens
augggguuucaucguguuagccaggauggu

SEQ ID NO: 410686 - RNA, 32 nt, Homo Sapiens
uucuauaccacccuuguccucaucucagguaa

SEQ ID NO: 410687 - RNA, 32 nt, Homo Sapiens
uggggcuuucccuuuguagccauccaaugggc

SEQ ID NO: 410688 - RNA, 32 nt, Homo Sapiens
uugcccaaaucaacuguaaaugacacuugugu

SEQ ID NO: 410689 - RNA, 32 nt, Homo Sapiens
uauaacaccucuuuuccgugaaucacaguggu

SEQ ID NO: 410690 - RNA, 32 nt, Homo Sapiens
gggugcgcgggccugagcgcagguuguuuugu

SEQ ID NO: 410691 - RNA, 32 nt, Homo Sapiens
cgaggggagcaccauggaucugacaaaaaugg

SEQ ID NO: 410692 - RNA, 32 nt, Homo Sapiens
ggcagcggcggcgaaggcgggcggcggccuac

SEQ ID NO: 410693 - RNA, 32 nt, Homo Sapiens
uauuuguauggacucugaauaaagaagaauuc

SEQ ID NO: 410694 - RNA, 32 nt, Homo Sapiens
cacugcacccucacuagccaggguguucauga

SEQ ID NO: 410695 - RNA, 32 nt, Homo Sapiens
aaaauugaaucuguacauccacaaaaauaugc

SEQ ID NO: 410696 - RNA, 32 nt, Homo Sapiens
agaaacgguggauguggaacacacaggaccag

SEQ ID NO: 410697 - RNA, 32 nt, Homo Sapiens
ugccuuucugcacugcaacugugugauugaaa

SEQ ID NO: 410698 - RNA, 32 nt, Homo Sapiens
ccuguaggauacugcuuguuacuuauuacagc

SEQ ID NO: 410699 - RNA, 32 nt, Homo Sapiens
ggcucagucuuagagauuucuaugcccucaug

SEQ ID NO: 410700 - RNA, 32 nt, Homo Sapiens
uuauugccacuaccccacgcucgucuaguccu

SEQ ID NO: 410701 - RNA, 32 nt, Homo Sapiens
agcgauuucucaaagacauaaaagcacauagc

SEQ ID NO: 410702 - RNA, 32 nt, Homo Sapiens
gcagccucuaggccaguucagcagccacaaca

SEQ ID NO: 410703 - RNA, 32 nt, Homo Sapiens
ugaaauugccugcgaaauuaugcgugcguuug

SEQ ID NO: 410704 - RNA, 32 nt, Homo Sapiens
cccugacaaacgcccaccugaccugaggcccc

SEQ ID NO: 410705 - RNA, 32 nt, Homo Sapiens
uuguuaauuauguacaacauuuauauauuguc

SEQ ID NO: 410706 - RNA, 32 nt, Homo Sapiens
uuagcaaaaugaaguuucuauaaagaggacuc

SEQ ID NO: 410707 - RNA, 32 nt, Homo Sapiens
gcuagcucgcuggcucccggcuccucccgacg

SEQ ID NO: 410708 - RNA, 32 nt, Homo Sapiens
ugccaaaaaauagaaaagcuauaauauuucaa

SEQ ID NO: 410709 - RNA, 32 nt, Homo Sapiens
ucagacucacagcuugauacccuaacaaagca

SEQ ID NO: 410710 - RNA, 32 nt, Homo Sapiens
gugaaguauguggugggcauacaaggcgcaca

SEQ ID NO: 410711 - RNA, 32 nt, Homo Sapiens
gugcaauccaacaaugauugguauacucagag

SEQ ID NO: 410712 - RNA, 32 nt, Homo Sapiens
ccccagaacucgucugugaaccaccuuuucca

SEQ ID NO: 410713 - RNA, 32 nt, Homo Sapiens
agaaggucuugguggcccuggaucuuguggcu

SEQ ID NO: 410714 - RNA, 32 nt, Homo Sapiens
aucugugagaugcacugcuaccugguacugcu

SEQ ID NO: 410715 - RNA, 32 nt, Homo Sapiens
uucacccgcaugcccagagggcggccgggaug

SEQ ID NO: 410716 - RNA, 32 nt, Homo Sapiens
ugcucugcugccccggcccagguccccuugug

SEQ ID NO: 410717 - RNA, 32 nt, Homo Sapiens
gcagagggcaagggcugccugagccuugugaa

SEQ ID NO: 410718 - RNA, 32 nt, Homo Sapiens
uuucauaaacaauggccuuugaguaugagugu

SEQ ID NO: 410719 - RNA, 32 nt, Homo Sapiens
cgcugagcucacggcucagucccuacauauuu

SEQ ID NO: 410720 - RNA, 32 nt, Homo Sapiens
agaggacgauuccauuccuucucaggaaccua

SEQ ID NO: 410721 - RNA, 32 nt, Homo Sapiens
ucccaagacccagccgccgccguugagggcug

SEQ ID NO: 410722 - RNA, 32 nt, Homo Sapiens
ggacccaggggcucuguccaguccucacccua

SEQ ID NO: 410723 - RNA, 32 nt, Homo Sapiens
auauauuuuuuuucuuuuuauccuuaaaaaug

SEQ ID NO: 410724 - RNA, 32 nt, Homo Sapiens
gggccuuccccagccuuuuuucuggggcaccu

SEQ ID NO: 410725 - RNA, 32 nt, Homo Sapiens
ggaaccacagaaagagagacaucaugaccagg

SEQ ID NO: 410726 - RNA, 32 nt, Homo Sapiens
cuucucuggugaugaagaggcgaggaaucaag

SEQ ID NO: 410727 - RNA, 32 nt, Homo Sapiens
cagagucccaucugcccaaaggucuugaagcu

SEQ ID NO: 410728 - RNA, 32 nt, Homo Sapiens
cccuggcccacucuccucucuccuucugcagu

SEQ ID NO: 410729 - RNA, 32 nt, Homo Sapiens
caaaaccagugaacuuuuuuuuuuaauguuuu

SEQ ID NO: 410730 - RNA, 31 nt, Homo Sapiens
ggcgcccgaccucuccucccccgcgccggcu

SEQ ID NO: 410731 - RNA, 32 nt, Homo Sapiens
uguacuuugugauuuaguaugcuguaucgugg

SEQ ID NO: 410732 - RNA, 32 nt, Homo Sapiens
gucauccuuguacagcaaucuccuccuccacu

SEQ ID NO: 410733 - RNA, 32 nt, Homo Sapiens
ggugcuggguuggccgugacucgggggcgggg

SEQ ID NO: 410734 - RNA, 32 nt, Homo Sapiens
ccgggcgcgccgcgccauugccugcaggcuag

SEQ ID NO: 410735 - RNA, 32 nt, Homo Sapiens
auucuaacagaauaaaccgagaaggaaaccag

SEQ ID NO: 410736 - RNA, 32 nt, Homo Sapiens
cacugguuagauguuguagcaacaucauaaaa

SEQ ID NO: 410737 - RNA, 32 nt, Homo Sapiens
gacugcggccuuucccagcuuuauugaagcag

SEQ ID NO: 410738 - RNA, 32 nt, Homo Sapiens
ucugcuuaucuuccccaaaggcaaauucacau

SEQ ID NO: 410739 - RNA, 32 nt, Homo Sapiens
ccgcaucccagcugugggccugccggucaggu

SEQ ID NO: 410740 - RNA, 32 nt, Homo Sapiens
gcggcggcggcacagagccggugguggagccg

SEQ ID NO: 410741 - RNA, 32 nt, Homo Sapiens
aagccaaaggacuuaaaauggccaacaaagcc

SEQ ID NO: 410742 - RNA, 32 nt, Homo Sapiens
uugugucugugcuaaccugggaacuggccacc

SEQ ID NO: 410743 - RNA, 32 nt, Homo Sapiens
uuuuuucuuuuuccuuuugccauggaaucugg

SEQ ID NO: 410744 - RNA, 32 nt, Homo Sapiens
uagccagguucucauuagguuuugcuugggcc

SEQ ID NO: 410745 - RNA, 32 nt, Homo Sapiens
cacaaacaccuccaucucaggcacaugguacu

SEQ ID NO: 410746 - RNA, 32 nt, Homo Sapiens
uuauauacuuuaaaauguaauuuuugcuuuuc

SEQ ID NO: 410747 - RNA, 32 nt, Homo Sapiens
cucuccaauacucagguuaaugcugaaaaauc

SEQ ID NO: 410748 - RNA, 32 nt, Homo Sapiens
acugaagaacgcaauugcuuuaaagaaagaaa

SEQ ID NO: 410749 - RNA, 32 nt, Homo Sapiens
ggagcccugccaggggcugugggccuacaagg

SEQ ID NO: 410750 - RNA, 32 nt, Homo Sapiens
gucuuauugaaaugcagauugcuacuagaaau

SEQ ID NO: 410751 - RNA, 32 nt, Homo Sapiens
agucggcgucucagcagucuccaguguccacg

SEQ ID NO: 410752 - RNA, 30 nt, Homo Sapiens
uguggagcagcucggcuugagucuguugcc

SEQ ID NO: 410753 - RNA, 32 nt, Homo Sapiens
gggcuagaaggugaaaacuuuuuuggcucuca

SEQ ID NO: 410754 - RNA, 32 nt, Homo Sapiens
acuacucccccuccucugcugacacuuuggaa

SEQ ID NO: 410755 - RNA, 32 nt, Homo Sapiens
auuauuauugguuaauacuaaguaugauugaa

SEQ ID NO: 410756 - RNA, 32 nt, Homo Sapiens
uuuggugcagaaacagucaagaggaaccauug

SEQ ID NO: 410757 - RNA, 32 nt, Homo Sapiens
uaggucacuuugcauuagcuacacuggccuuc

SEQ ID NO: 410758 - RNA, 32 nt, Homo Sapiens
cuuuuuauuucuguaaaaucaguuguaauguc

SEQ ID NO: 410759 - RNA, 32 nt, Homo Sapiens
uguuuuaauguuuaacuuuuaugugcauauga

SEQ ID NO: 410760 - RNA, 32 nt, Homo Sapiens
acaagccccugguuacugcagaugagcuggga

SEQ ID NO: 410761 - RNA, 32 nt, Homo Sapiens
gcgaagggagugcgaguauguguuugugugug

SEQ ID NO: 410762 - RNA, 32 nt, Homo Sapiens
acacugucuuuaauacccccagcccaggagcu

SEQ ID NO: 410763 - RNA, 32 nt, Homo Sapiens
ugcagugucuuuggaccugagaguggcuacuc

SEQ ID NO: 410764 - RNA, 32 nt, Homo Sapiens
ccagucagguuauuuaaugaugagguaauaau

SEQ ID NO: 410765 - RNA, 32 nt, Homo Sapiens
aagggcccgcgcacaaagcaguguuucuucgc

SEQ ID NO: 410766 - RNA, 32 nt, Homo Sapiens
uuuucugcuguaauuguucuggguagauggag

SEQ ID NO: 410767 - RNA, 32 nt, Homo Sapiens
acucuuuggcuagcuuuuuuuuuuuuuuuuuu

SEQ ID NO: 410768 - RNA, 32 nt, Homo Sapiens
ugcagccuugguuuccugcugagcuccaguau

SEQ ID NO: 410769 - RNA, 28 nt, Homo Sapiens
accauccuggcgaacauggugaaacccc

SEQ ID NO: 410770 - RNA, 32 nt, Homo Sapiens
gggagccuugggccgcugcaugucguuaugca

SEQ ID NO: 410771 - RNA, 32 nt, Homo Sapiens
ucaggcaugcauuuuucccacuucugaaauga

SEQ ID NO: 410772 - RNA, 32 nt, Homo Sapiens
uucuuuuauggggcuccuggcggugcuauuca

SEQ ID NO: 410773 - RNA, 32 nt, Homo Sapiens
uguuaauaccggaucuuaauuuuuauguuauu

SEQ ID NO: 410774 - RNA, 32 nt, Homo Sapiens
uuuuccagaaaguuaguuauuuucuccucuuu

SEQ ID NO: 410775 - RNA, 32 nt, Homo Sapiens
guauguaauuuuccagccuuuugagaaaacaa

SEQ ID NO: 410776 - RNA, 32 nt, Homo Sapiens
uacccacgguggggcggguggggggagccugg

SEQ ID NO: 410777 - RNA, 32 nt, Homo Sapiens
gacaucuugaguuguagcugcagacggggacc

SEQ ID NO: 410778 - RNA, 32 nt, Homo Sapiens
cauuguacauuaugaacaauagauagagauga

SEQ ID NO: 410779 - RNA, 32 nt, Homo Sapiens
aaauuagcugggugugguggcggcgccuguaa

SEQ ID NO: 410780 - RNA, 32 nt, Homo Sapiens
auuaugcagcuauacuugugaaaucgugcaug

SEQ ID NO: 410781 - RNA, 32 nt, Homo Sapiens
uuuuuucuauuuuuaguagaaaugggguuuca

SEQ ID NO: 410782 - RNA, 32 nt, Homo Sapiens
augcuggagacuuuuuacccuccugugacagc

SEQ ID NO: 410783 - RNA, 32 nt, Homo Sapiens
uuguguugcaguuuaaaguuaaagugacuuuu

SEQ ID NO: 410784 - RNA, 32 nt, Homo Sapiens
auagguucaaagcugguucuaguggccacuug

SEQ ID NO: 410785 - RNA, 32 nt, Homo Sapiens
ucguuuauauuguagcaguuacagcucuguag

SEQ ID NO: 410786 - RNA, 32 nt, Homo Sapiens
cacauccaccaacugcacuuugggaggcugag

SEQ ID NO: 410787 - RNA, 32 nt, Homo Sapiens
gagucuugccagcaguggccuguuuguucucu

SEQ ID NO: 410788 - RNA, 32 nt, Homo Sapiens
uggacgaggucuuccaaggaagugcuuugcac

SEQ ID NO: 410789 - RNA, 32 nt, Homo Sapiens
augaggcacguccaguguuggaccucacagca

SEQ ID NO: 410790 - RNA, 32 nt, Homo Sapiens
ugauuuugauuuggaggccuaauuuguagauu

SEQ ID NO: 410791 - RNA, 32 nt, Homo Sapiens
ccaaaagcauaaaaaaccacagcaaauuucuu

SEQ ID NO: 410792 - RNA, 32 nt, Homo Sapiens
caccauaggcagugugcccagaguaguagcuc

SEQ ID NO: 410793 - RNA, 32 nt, Homo Sapiens
aacggccugacgucggcggagggaagcaggcg

SEQ ID NO: 410794 - RNA, 32 nt, Homo Sapiens
gcaccaccggccuggccuugccugcagacuau

SEQ ID NO: 410795 - RNA, 32 nt, Homo Sapiens
cacgcggauuuucgaagcuggggcuggcaaga

SEQ ID NO: 410796 - RNA, 32 nt, Homo Sapiens
aaggaagcugaaucuuauaucuuaucuaugcu

SEQ ID NO: 410797 - RNA, 32 nt, Homo Sapiens
auguauauggaaauagggaacaacaacaacaa

SEQ ID NO: 410798 - RNA, 32 nt, Homo Sapiens
uauaauaaugcugaaucuuaauuuagagggua

SEQ ID NO: 410799 - RNA, 32 nt, Homo Sapiens
aguuaaaauuaaauguaguuggaauagcuagc

SEQ ID NO: 410800 - RNA, 32 nt, Homo Sapiens
gccggugugugagggugacuaguguugggggc

SEQ ID NO: 410801 - RNA, 32 nt, Homo Sapiens
caccagcucagaugguugaucuuaccauaccc

SEQ ID NO: 410802 - RNA, 32 nt, Homo Sapiens
caguuggggggccucguuguuuugcgucuuag

SEQ ID NO: 410803 - RNA, 32 nt, Homo Sapiens
gauaaaggaaacaaauauaacuguaaaugaau

SEQ ID NO: 410804 - RNA, 32 nt, Homo Sapiens
aguauuuucaacaaagcgugcuucauuugaca

SEQ ID NO: 410805 - RNA, 32 nt, Homo Sapiens
uuuuucugaaaucuugguuugaucaaaucuuu

SEQ ID NO: 410806 - RNA, 32 nt, Homo Sapiens
aucguaauguaaaauucuuuuaccaugucaag

SEQ ID NO: 410807 - RNA, 32 nt, Homo Sapiens
cugauggacaaagcaggagauucacugucagc

SEQ ID NO: 410808 - RNA, 32 nt, Homo Sapiens
gaucuacaaaacaaaaucauagugacuaggac

SEQ ID NO: 410809 - RNA, 32 nt, Homo Sapiens
acuggaaauaaucagggcaauuuuuuucuuuc

SEQ ID NO: 410810 - RNA, 32 nt, Homo Sapiens
acguuaaguccucgguacauauuuccaguucc

SEQ ID NO: 410811 - RNA, 32 nt, Homo Sapiens
cugaggcggagguuguugcggaugcuucucuc

SEQ ID NO: 410812 - RNA, 32 nt, Homo Sapiens
cucugaaaacagguuggaaagacuuccugaag

SEQ ID NO: 410813 - RNA, 32 nt, Homo Sapiens
uggcccagcaagcccacugggaccccgacacc

SEQ ID NO: 410814 - RNA, 32 nt, Homo Sapiens
guacuuugacauuucugauguaaaaccuauau

SEQ ID NO: 410815 - RNA, 32 nt, Homo Sapiens
aaugccccacugaccuguuguucugccaucuc

SEQ ID NO: 410816 - RNA, 32 nt, Homo Sapiens
uaauuugcauuacucugguggauuguucuagu

SEQ ID NO: 410817 - RNA, 32 nt, Homo Sapiens
agcaggcuggagaggagauggcuaauagcugu

SEQ ID NO: 410818 - RNA, 32 nt, Homo Sapiens
uucuccauuuuucucaucaacaaaagguggau

SEQ ID NO: 410819 - RNA, 32 nt, Homo Sapiens
cuauuguucuaaauaaauacauguuuuugaau

SEQ ID NO: 410820 - RNA, 32 nt, Homo Sapiens
gcugaccaaauggcccgaggugguaugcagcc

SEQ ID NO: 410821 - RNA, 32 nt, Homo Sapiens
uuuucaaucaggaauagauuugccaugaagcc

SEQ ID NO: 410822 - RNA, 32 nt, Homo Sapiens
ccagaaggcagaccuugaggaggagccacugc

SEQ ID NO: 410823 - RNA, 32 nt, Homo Sapiens
ucugagcgccuggcgcgccccgcgcccucccu

SEQ ID NO: 410824 - RNA, 32 nt, Homo Sapiens
acagucgggcggggagcucggcggcggcgggc

SEQ ID NO: 410825 - RNA, 32 nt, Homo Sapiens
ggugcucuugucacagguagaacagcuuguuu

SEQ ID NO: 410826 - RNA, 32 nt, Homo Sapiens
uggcucacaccuguaaucccagcacucuggga

SEQ ID NO: 410827 - RNA, 32 nt, Homo Sapiens
uggguguggguggaagggcugggugucgaaau

SEQ ID NO: 410828 - RNA, 30 nt, Homo Sapiens
guuccgcugcccgugcuucgguagcuuaag

SEQ ID NO: 410829 - RNA, 32 nt, Homo Sapiens
uccuaaagggaagugggugcuggauuuauuag

SEQ ID NO: 410830 - RNA, 32 nt, Homo Sapiens
gaguauuagaaaugucuguuaugucaguaaca

SEQ ID NO: 410831 - RNA, 32 nt, Homo Sapiens
gcauacaucgucugcgucuguggucugugucg

SEQ ID NO: 410832 - RNA, 32 nt, Homo Sapiens
auccugagccucgcacucugccgcccgcacca

SEQ ID NO: 410833 - RNA, 32 nt, Homo Sapiens
cuugacccaagcaugcagggcccaccccgcag

SEQ ID NO: 410834 - RNA, 32 nt, Homo Sapiens
ccuugggccucaccuccuccaggaagccuucc

SEQ ID NO: 410835 - RNA, 32 nt, Homo Sapiens
auguaaugaugauucuauuccauuuugaaaag

SEQ ID NO: 410836 - RNA, 32 nt, Homo Sapiens
auccuugagaaaauauaucuugcaccuuauug

SEQ ID NO: 410837 - RNA, 32 nt, Homo Sapiens
ucgcaagguaaucucgcuccgcgcagcugagc

SEQ ID NO: 410838 - RNA, 32 nt, Homo Sapiens
cacaugcauacuuacagacuggaauaguggca

SEQ ID NO: 410839 - RNA, 32 nt, Homo Sapiens
ucucacuccccgcuccucuccgccgcgcacuc

SEQ ID NO: 410840 - RNA, 32 nt, Homo Sapiens
guguggagcccuagcccuccauucucgacauu

SEQ ID NO: 410841 - RNA, 32 nt, Homo Sapiens
ugauuuuuacacacguaucacagggagaauca

SEQ ID NO: 410842 - RNA, 32 nt, Homo Sapiens
uucugagaaaucacaaaauucacgguaugcuu

SEQ ID NO: 410843 - RNA, 32 nt, Homo Sapiens
ucugugaagcgagaaugucugaaaauaaauag

SEQ ID NO: 410844 - RNA, 32 nt, Homo Sapiens
uggaggagaggccggcuugggguggggccucg

SEQ ID NO: 410845 - RNA, 32 nt, Homo Sapiens
guuuuuaucuggauuguuuuuguccuagguuu

SEQ ID NO: 410846 - RNA, 32 nt, Homo Sapiens
gcugccaccgccgcccucccccggcuccaugc

SEQ ID NO: 410847 - RNA, 31 nt, Homo Sapiens
aaagccgccggugcucugacggccucguucc

SEQ ID NO: 410848 - RNA, 32 nt, Homo Sapiens
cagugagaggaggcgguaaagcagaagggagg

SEQ ID NO: 410849 - RNA, 32 nt, Homo Sapiens
uuuucacaacuuacccuguuaagucaaaauuu

SEQ ID NO: 410850 - RNA, 32 nt, Homo Sapiens
gaugugacuacaacauucacuaccucuacuac

SEQ ID NO: 410851 - RNA, 32 nt, Homo Sapiens
cguggucuugccgucagcacaucccgcugcag

SEQ ID NO: 410852 - RNA, 32 nt, Homo Sapiens
ugcccaggcccuugggggagggggugcauggu

SEQ ID NO: 410853 - RNA, 32 nt, Homo Sapiens
ugacuuaugauauucaugauaauuaaaacguu

SEQ ID NO: 410854 - RNA, 32 nt, Homo Sapiens
uuauaaagguuuuuggagcugcacugaagcau

SEQ ID NO: 410855 - RNA, 30 nt, Homo Sapiens
cucucuggcucugcugcaggucucugcacu

SEQ ID NO: 410856 - RNA, 32 nt, Homo Sapiens
gagcgccccucgccaccccgugucccaggccc

SEQ ID NO: 410857 - RNA, 32 nt, Homo Sapiens
uggcucacaccuguaaucucagcacuuuggga

SEQ ID NO: 410858 - RNA, 32 nt, Homo Sapiens
auuaauugcaaguguggugccuuggauguggc

SEQ ID NO: 410859 - RNA, 32 nt, Homo Sapiens
aggaacuccaugaagagaaugugccaauacau

SEQ ID NO: 410860 - RNA, 32 nt, Homo Sapiens
cuuccagaacuaaaauuuuauuguucauucua

SEQ ID NO: 410861 - RNA, 32 nt, Homo Sapiens
agccauguucuuuaccaucugugcaguuauug

SEQ ID NO: 410862 - RNA, 29 nt, Homo Sapiens
cccuucuauaugugcuaccauagauguga

SEQ ID NO: 410863 - RNA, 32 nt, Homo Sapiens
ucauaguugcuguaucauuguacauucucaau

SEQ ID NO: 410864 - RNA, 30 nt, Homo Sapiens
augcaggagcccgugccgccucuggugcca

SEQ ID NO: 410865 - RNA, 32 nt, Homo Sapiens
agcagucccuggauggcagucugccuaaagau

SEQ ID NO: 410866 - RNA, 32 nt, Homo Sapiens
acaaaacacaugccaccugagcaaaacugccu

SEQ ID NO: 410867 - RNA, 32 nt, Homo Sapiens
guguauuuuaccacaauuuuuauaaaaagagg

SEQ ID NO: 410868 - RNA, 32 nt, Homo Sapiens
agagcgcuuucacugcgccucuuuuuucuccu

SEQ ID NO: 410869 - RNA, 32 nt, Homo Sapiens
aggauaagccaauuuuaacuuucuacaauggg

SEQ ID NO: 410870 - RNA, 32 nt, Homo Sapiens
ugaugggagacggggaggccaacccuucucug

SEQ ID NO: 410871 - RNA, 32 nt, Homo Sapiens
aaucaggagucagcucugacaaugaagaugau

SEQ ID NO: 410872 - RNA, 32 nt, Homo Sapiens
aaggccccugucuggaggaaauggccuagcua

SEQ ID NO: 410873 - RNA, 32 nt, Homo Sapiens
gauggaaucugugguuugggaaugugguugau

SEQ ID NO: 410874 - RNA, 32 nt, Homo Sapiens
uggcucagaguuuuuucuuuuuguugucacuu

SEQ ID NO: 410875 - RNA, 32 nt, Homo Sapiens
gcaguuuucuucauaaugugucagugauugug

SEQ ID NO: 410876 - RNA, 32 nt, Homo Sapiens
ccggcagggaagaucgccuggacguggagcca

SEQ ID NO: 410877 - RNA, 32 nt, Homo Sapiens
cucaccaaggaccuggucguccagcagcuugg

SEQ ID NO: 410878 - RNA, 32 nt, Homo Sapiens
ggggaaugaggaauuuuaaacacacauuugau

SEQ ID NO: 410879 - RNA, 32 nt, Homo Sapiens
aaaaaauacugauguuccuagugaaagaggca

SEQ ID NO: 410880 - RNA, 32 nt, Homo Sapiens
aaugaucaugauuuucuugaaaaggaccuugu

SEQ ID NO: 410881 - RNA, 32 nt, Homo Sapiens
caucuccuuggaucauuauauugagugguuuu

SEQ ID NO: 410882 - RNA, 32 nt, Homo Sapiens
uuguguguuuguuuguuuuuugagacagagcc

SEQ ID NO: 410883 - RNA, 32 nt, Homo Sapiens
cuucaaauaucuaugugcuuggagccacaguu

SEQ ID NO: 410884 - RNA, 32 nt, Homo Sapiens
gcgguaacggaggcacucccccugcugcaccc

SEQ ID NO: 410885 - RNA, 31 nt, Homo Sapiens
gaauggagaggccccaucgugaauuaaagau

SEQ ID NO: 410886 - RNA, 32 nt, Homo Sapiens
acgcuuuuugggagaaugauguccccguugua

SEQ ID NO: 410887 - RNA, 32 nt, Homo Sapiens
accagagcuucgacuacauaccucuggugucu

SEQ ID NO: 410888 - RNA, 32 nt, Homo Sapiens
accugguucucaauuugacacccucucaacau

SEQ ID NO: 410889 - RNA, 32 nt, Homo Sapiens
caacacuccgaguucugcuuuauucucuagca

SEQ ID NO: 410890 - RNA, 32 nt, Homo Sapiens
gaccaccacccaaaaaaucaacugaugucacu

SEQ ID NO: 410891 - RNA, 32 nt, Homo Sapiens
uggcaguucugcauugcaucucauggaagugg

SEQ ID NO: 410892 - RNA, 32 nt, Homo Sapiens
agggaguuuccaaacagcaacaacaacagaaa

SEQ ID NO: 410893 - RNA, 32 nt, Homo Sapiens
ggccucuuuucucgguaagaucucuccacagc

SEQ ID NO: 410894 - RNA, 32 nt, Homo Sapiens
ccccagccccaccacucaccagcccugagccc

SEQ ID NO: 410895 - RNA, 32 nt, Homo Sapiens
gcauggauagaguauugagauacuuuuucuuu

SEQ ID NO: 410896 - RNA, 32 nt, Homo Sapiens
caaccaggagucaguacaggcuuuauucaccu

SEQ ID NO: 410897 - RNA, 32 nt, Homo Sapiens
cuucucccggaccccaggagccggcgcccccg

SEQ ID NO: 410898 - RNA, 32 nt, Homo Sapiens
cccagcccauccccucccucauccucgucugu

SEQ ID NO: 410899 - RNA, 32 nt, Homo Sapiens
ucucacccccaggccuggcugggggccggcag

SEQ ID NO: 410900 - RNA, 31 nt, Homo Sapiens
acuuccugaugcccaaaguccaccugggcaa

SEQ ID NO: 410901 - RNA, 32 nt, Homo Sapiens
caccucccuccccacaccucccuacuccccug

SEQ ID NO: 410902 - RNA, 32 nt, Homo Sapiens
augauuuacauucauaggaauaaaauaaaaua

SEQ ID NO: 410903 - RNA, 32 nt, Homo Sapiens
agaggcaugacagcuguuccacaggggcuauc

SEQ ID NO: 410904 - RNA, 32 nt, Homo Sapiens
auucugccaccuuguuucucccugcucaugag

SEQ ID NO: 410905 - RNA, 32 nt, Homo Sapiens
acaggccuccuggaaacuuccacauauuuuuc

SEQ ID NO: 410906 - RNA, 32 nt, Homo Sapiens
acccucucaaguccaucaaguaccucaucugc

SEQ ID NO: 410907 - RNA, 32 nt, Homo Sapiens
uuuaagaggucucauaguaguacccuguggcu

SEQ ID NO: 410908 - RNA, 32 nt, Homo Sapiens
uuuccaggaauaucuuuuuuucauuugaguga

SEQ ID NO: 410909 - RNA, 32 nt, Homo Sapiens
ugggcugcggugagucccacuccaccugggcg

SEQ ID NO: 410910 - RNA, 32 nt, Homo Sapiens
acucgucaccccagcccucggguccauagaga

SEQ ID NO: 410911 - RNA, 32 nt, Homo Sapiens
agcugagugcgggcgccggcgccgucuacgca

SEQ ID NO: 410912 - RNA, 32 nt, Homo Sapiens
cugaaagcccaccuuaauuuuuauauaacugu

SEQ ID NO: 410913 - RNA, 32 nt, Homo Sapiens
gcuggcucucaauccccgccucgcgggggugc

SEQ ID NO: 410914 - RNA, 27 nt, Homo Sapiens
cauccucgucccuacagcccccacauu

SEQ ID NO: 410915 - RNA, 32 nt, Homo Sapiens
aaauaaaaaauauuuuagagccaaguuaacaa

SEQ ID NO: 410916 - RNA, 32 nt, Homo Sapiens
guggguucucaggacuggcauucuuggaauaa

SEQ ID NO: 410917 - RNA, 32 nt, Homo Sapiens
ucccagaccccucuauucugcuccaggacagc

SEQ ID NO: 410918 - RNA, 32 nt, Homo Sapiens
agagggcugugcugggguggcuggcagagcaa

SEQ ID NO: 410919 - RNA, 32 nt, Homo Sapiens
ucggcuucugguuuuucuuucuuuuugguaga

SEQ ID NO: 410920 - RNA, 32 nt, Homo Sapiens
gaaucucgacagagucagaugaaaauacuacu

SEQ ID NO: 410921 - RNA, 32 nt, Homo Sapiens
gugcagauauuuaaggauugcauauuguuccu

SEQ ID NO: 410922 - RNA, 32 nt, Homo Sapiens
uugagauauagccuuuacauuucuacacaaau

SEQ ID NO: 410923 - RNA, 32 nt, Homo Sapiens
gguuucccaagccuuuguccaucucagccccc

SEQ ID NO: 410924 - RNA, 32 nt, Homo Sapiens
uggcauuuaagugcacaaaugauaacaagagg

SEQ ID NO: 410925 - RNA, 32 nt, Homo Sapiens
ggcuggagccgaggauggguccuccaguuuuu

SEQ ID NO: 410926 - RNA, 32 nt, Homo Sapiens
uuuaagccaaggaaaauauuguggauuuaaua

SEQ ID NO: 410927 - RNA, 32 nt, Homo Sapiens
agaaggugcugcugaggauagacugacuuugg

SEQ ID NO: 410928 - RNA, 32 nt, Homo Sapiens
acccgugauucucagggugcugugauggggug

SEQ ID NO: 410929 - RNA, 32 nt, Homo Sapiens
uuuguaccaauauuuuuuaugcacuucagugc

SEQ ID NO: 410930 - RNA, 32 nt, Homo Sapiens
uaguuggagacucaagauauuuuuguugcauc

SEQ ID NO: 410931 - RNA, 32 nt, Homo Sapiens
auugauauugaauaauuugucuuuuauucaga

SEQ ID NO: 410932 - RNA, 32 nt, Homo Sapiens
cccagguccuccccugccccccagcgacggag

SEQ ID NO: 410933 - RNA, 32 nt, Homo Sapiens
cagaccccuaaauucuccuccucccccauuuu

SEQ ID NO: 410934 - RNA, 32 nt, Homo Sapiens
ccuuccuauucucauuuuuucuuaauuuucuu

SEQ ID NO: 410935 - RNA, 32 nt, Homo Sapiens
ccuguucucuccuuaccuuuggcauccuuugg

SEQ ID NO: 410936 - RNA, 32 nt, Homo Sapiens
gcccugacaagccaccugaggagaggcucgga

SEQ ID NO: 410937 - RNA, 32 nt, Homo Sapiens
ugagccgcauggagccccgggcggcggacggc

SEQ ID NO: 410938 - RNA, 32 nt, Homo Sapiens
uaaauuacaagccccagccgccagccccgccu

SEQ ID NO: 410939 - RNA, 32 nt, Homo Sapiens
accaaaacaauaaaacaaaauucucuaacacu

SEQ ID NO: 410940 - RNA, 32 nt, Homo Sapiens
ggcuuggccccggagcuucaccgaccgaucuc

SEQ ID NO: 410941 - RNA, 32 nt, Homo Sapiens
uuuuacaccaaaaggucugcagggugugguaa

SEQ ID NO: 410942 - RNA, 32 nt, Homo Sapiens
gcagcagugggugugggggcgcugcugggcuc

SEQ ID NO: 410943 - RNA, 32 nt, Homo Sapiens
ccaauccgggggcuccuggggugugguguguc

SEQ ID NO: 410944 - RNA, 32 nt, Homo Sapiens
ccauucaccucugaaacuuauccugaaucugg

SEQ ID NO: 410945 - RNA, 32 nt, Homo Sapiens
ccgugcccuuccccggcgcgcucaccccguuc

SEQ ID NO: 410946 - RNA, 32 nt, Homo Sapiens
cccaacccuaacaauuauuuuuaaaaggagga

SEQ ID NO: 410947 - RNA, 32 nt, Homo Sapiens
cucacuaaaagcugguugcacuuugagaucug

SEQ ID NO: 410948 - RNA, 32 nt, Homo Sapiens
cgagagcaaaggggcguccucaguccucaacc

SEQ ID NO: 410949 - RNA, 32 nt, Homo Sapiens
gcggcucugcugucaucucaagcagccccugu

SEQ ID NO: 410950 - RNA, 32 nt, Homo Sapiens
agcaaggggcucugcccucccuccuuccuucu

SEQ ID NO: 410951 - RNA, 30 nt, Homo Sapiens
aaacucacuaaguuuacuucucgaauugaa

SEQ ID NO: 410952 - RNA, 32 nt, Homo Sapiens
ccuguaagguuaucugguuuuaaaagaaaaaa

SEQ ID NO: 410953 - RNA, 32 nt, Homo Sapiens
aggggucugaccaggcaagcugugaucugaaa

SEQ ID NO: 410954 - RNA, 32 nt, Homo Sapiens
ccaguggucucuggguccgccggcguccguuu

SEQ ID NO: 410955 - RNA, 28 nt, Homo Sapiens
cuaaggaggauguaacauuuguuuuagu

SEQ ID NO: 410956 - RNA, 32 nt, Homo Sapiens
cgagcuccgcugccggcccuggacacucggcu

SEQ ID NO: 410957 - RNA, 32 nt, Homo Sapiens
uguguuacagaaauuggcagcaaguauccaau

SEQ ID NO: 410958 - RNA, 32 nt, Homo Sapiens
gugccgagggauggacaggcgagguggcagcg

SEQ ID NO: 410959 - RNA, 32 nt, Homo Sapiens
gagguggggugagggugagcuuacucagggcc

SEQ ID NO: 410960 - RNA, 32 nt, Homo Sapiens
caggcaaggaacugaggcuccucugaguucuu

SEQ ID NO: 410961 - RNA, 32 nt, Homo Sapiens
aaaauauguacaaauugaccucuguucuuauu

SEQ ID NO: 410962 - RNA, 32 nt, Homo Sapiens
gaaauucacuucauuguaccccaugaccugag

SEQ ID NO: 410963 - RNA, 32 nt, Homo Sapiens
caacuucaaggaucugggacauuuuggugugc

SEQ ID NO: 410964 - RNA, 31 nt, Homo Sapiens
ugaugagagcauucagugagagccugguguu

SEQ ID NO: 410965 - RNA, 32 nt, Homo Sapiens
agagccgcuccggccccggcccugagggaagc

SEQ ID NO: 410966 - RNA, 32 nt, Homo Sapiens
cggccgggcuugaggccgggccccagacgucc

SEQ ID NO: 410967 - RNA, 32 nt, Homo Sapiens
ccuggacuccccagccuucccaccccauaccu

SEQ ID NO: 410968 - RNA, 32 nt, Homo Sapiens
cuucuuaugacugucuaugggugcauugccuu

SEQ ID NO: 410969 - RNA, 32 nt, Homo Sapiens
cccgcggcccccagccagagccagcaugcaga

SEQ ID NO: 410970 - RNA, 32 nt, Homo Sapiens
cacgaggacccucagcugcuggaggccacccu

SEQ ID NO: 410971 - RNA, 32 nt, Homo Sapiens
aaaguacaaaaauuagcuggaugugguggugg

SEQ ID NO: 410972 - RNA, 32 nt, Homo Sapiens
uuuuagcagacaccagagccacacucaaaugg

SEQ ID NO: 410973 - RNA, 32 nt, Homo Sapiens
augcuuauuuuuccuuuaucagagagaguuaa

SEQ ID NO: 410974 - RNA, 30 nt, Homo Sapiens
auaccaugggccgcacucgggaagcuggcu

SEQ ID NO: 410975 - RNA, 32 nt, Homo Sapiens
caguguuuuuggcagauaguguuccauaagcu

SEQ ID NO: 410976 - RNA, 32 nt, Homo Sapiens
uacaugaagauaagauacucacuguucaugaa

SEQ ID NO: 410977 - RNA, 32 nt, Homo Sapiens
cugcaggacuucuuccaguaugguaguuaugu

SEQ ID NO: 410978 - RNA, 32 nt, Homo Sapiens
ccuccgcugucaugccugcuuccgcuuccaug

SEQ ID NO: 410979 - RNA, 32 nt, Homo Sapiens
uucuggaucuguucuuuuuuuaaaaaaacuuc

SEQ ID NO: 410980 - RNA, 32 nt, Homo Sapiens
cuggaggagccagcggcugcgggugcgcaaag

SEQ ID NO: 410981 - RNA, 32 nt, Homo Sapiens
cgcugagacagagauggaagccaggacaaggg

SEQ ID NO: 410982 - RNA, 32 nt, Homo Sapiens
cgcagaggagcgcgugcucguacgggacuucc

SEQ ID NO: 410983 - RNA, 32 nt, Homo Sapiens
uaaccaaaaugaaugggcaauugacauaacau

SEQ ID NO: 410984 - RNA, 32 nt, Homo Sapiens
ggaugguuauauaaugagaugacuccaaaacu

SEQ ID NO: 410985 - RNA, 32 nt, Homo Sapiens
guucagcugucugugucuccagugcucccauu

SEQ ID NO: 410986 - RNA, 32 nt, Homo Sapiens
cuccucccaucccuugcuccgaucccagcccc

SEQ ID NO: 410987 - RNA, 32 nt, Homo Sapiens
uagacugccucuggggaagcaaguuggcaguu

SEQ ID NO: 410988 - RNA, 32 nt, Homo Sapiens
cuuccucccuccccgaagcccagacaguucag

SEQ ID NO: 410989 - RNA, 32 nt, Homo Sapiens
ggugccugagggugguuggggaggugaggccc

SEQ ID NO: 410990 - RNA, 32 nt, Homo Sapiens
cuggaugcaugaauuccacuccuuccagaacc

SEQ ID NO: 410991 - RNA, 32 nt, Homo Sapiens
ucuucuucaaaaggaaauugcaucuugugacu

SEQ ID NO: 410992 - RNA, 32 nt, Homo Sapiens
ugucucugcuaagagacuuaaaagcacucaua

SEQ ID NO: 410993 - RNA, 32 nt, Homo Sapiens
cugcuucauauuauuuuaccuauuaguacacu

SEQ ID NO: 410994 - RNA, 32 nt, Homo Sapiens
auaauuaauguaagugggcaaguuguaugggg

SEQ ID NO: 410995 - RNA, 32 nt, Homo Sapiens
ucagccucaaagcugcugacagucaugaacug

SEQ ID NO: 410996 - RNA, 32 nt, Homo Sapiens
cuccucguacuucuucuguguggcugacaguc

SEQ ID NO: 410997 - RNA, 32 nt, Homo Sapiens
ucccuguaaaaugucuguagcauuaaagagau

SEQ ID NO: 410998 - RNA, 32 nt, Homo Sapiens
gaacagaaaaagaucaguaaugaaaaaacuga

SEQ ID NO: 410999 - RNA, 32 nt, Homo Sapiens
guauaguucccugcaccccuucugggaaagaa

SEQ ID NO: 411000 - RNA, 32 nt, Homo Sapiens
gcuggcgucugucuucaagggcuuacacgugg

SEQ ID NO: 411001 - RNA, 32 nt, Homo Sapiens
uacugagcaccucggcuucggagcacccugcc

SEQ ID NO: 411002 - RNA, 32 nt, Homo Sapiens
acccagugacaccagcacugauuggacugccc

SEQ ID NO: 411003 - RNA, 32 nt, Homo Sapiens
ucaagugcuuaaaaauacuucuaugacucucu

SEQ ID NO: 411004 - RNA, 32 nt, Homo Sapiens
uauuuugaaagaguuucuuuuacugagaauaa

SEQ ID NO: 411005 - RNA, 32 nt, Homo Sapiens
uugcuggagcagcugccgccucccgacaccuu

SEQ ID NO: 411006 - RNA, 32 nt, Homo Sapiens
cuggcucgaugccucauggaucuuucucccca

SEQ ID NO: 411007 - RNA, 32 nt, Homo Sapiens
ccuacucccagcugguggccgugcuggucuac

SEQ ID NO: 411008 - RNA, 32 nt, Homo Sapiens
ugcugugagaaccccuuuauuccaggaagccc

SEQ ID NO: 411009 - RNA, 32 nt, Homo Sapiens
cuugcucuccuacaauauucaguacaugacca

SEQ ID NO: 411010 - RNA, 32 nt, Homo Sapiens
uuuucauccuuccccaacuucccuaguccccg

SEQ ID NO: 411011 - RNA, 32 nt, Homo Sapiens
uggaauaauguuuguuuuccucauuucuuccu

SEQ ID NO: 411012 - RNA, 32 nt, Homo Sapiens
auuuuuucaccaucuuucccucaaucuccagg

SEQ ID NO: 411013 - RNA, 32 nt, Homo Sapiens
guacaguggucuaugaggaagagaaaagguac

SEQ ID NO: 411014 - RNA, 32 nt, Homo Sapiens
accaugcucaucugcugguccgugggacggug

SEQ ID NO: 411015 - RNA, 32 nt, Homo Sapiens
gcuggacacucaggggaccccccacagcccuc

SEQ ID NO: 411016 - RNA, 32 nt, Homo Sapiens
uuuaaaucaagagcuuacauaauuuuaaccag

SEQ ID NO: 411017 - RNA, 32 nt, Homo Sapiens
ucucugggagggcgcugcuuuccccggccacc

SEQ ID NO: 411018 - RNA, 32 nt, Homo Sapiens
acaccacacacacacacacacacacacagaca

SEQ ID NO: 411019 - RNA, 32 nt, Homo Sapiens
cagacucucccgagacaugggccacacugaua

SEQ ID NO: 411020 - RNA, 32 nt, Homo Sapiens
acaggggccacuuuucgagaccgaguagagac

SEQ ID NO: 411021 - RNA, 32 nt, Homo Sapiens
gcagggccgccggcugcuccuguccuacagca

SEQ ID NO: 411022 - RNA, 32 nt, Homo Sapiens
ccucccaucccccggcgcguguguguagagcc

SEQ ID NO: 411023 - RNA, 32 nt, Homo Sapiens
agcaaggcaggggcuugaugggcuugucuucc

SEQ ID NO: 411024 - RNA, 32 nt, Homo Sapiens
aagcuuccaggcugcauagaaggaggagaggg

SEQ ID NO: 411025 - RNA, 32 nt, Homo Sapiens
guggcacaccccuaggaaaggcacuaaaugca

SEQ ID NO: 411026 - RNA, 32 nt, Homo Sapiens
cuugucacuccagguucuggugaccccaucuc

SEQ ID NO: 411027 - RNA, 32 nt, Homo Sapiens
ccagccguguggaacugugaguccauuaaacc

SEQ ID NO: 411028 - RNA, 32 nt, Homo Sapiens
gcccugucuuuaggaaaucacaacacagagaa

SEQ ID NO: 411029 - RNA, 32 nt, Homo Sapiens
gccuauuguuccuccaguuccuccucuucguc

SEQ ID NO: 411030 - RNA, 32 nt, Homo Sapiens
gaaaagugauauagaaaauauguaggagacug

SEQ ID NO: 411031 - RNA, 32 nt, Homo Sapiens
gcuacaguggugagagcucaccacugagcuuc

SEQ ID NO: 411032 - RNA, 32 nt, Homo Sapiens
ucccagacaagaauuauuuaaucuucccuguu

SEQ ID NO: 411033 - RNA, 32 nt, Homo Sapiens
uguggccugcaugcgccccucacgccccugga

SEQ ID NO: 411034 - RNA, 32 nt, Homo Sapiens
auguuuuuucuuuuaaauagaacuuguuuuua

SEQ ID NO: 411035 - RNA, 32 nt, Homo Sapiens
agaaagaaagagauugacauuuuggguuugau

SEQ ID NO: 411036 - RNA, 32 nt, Homo Sapiens
ccaauagcucugccaguauuggguuuugccau

SEQ ID NO: 411037 - RNA, 32 nt, Homo Sapiens
cgccuccgcgagggcaccauggaggugaaugc

SEQ ID NO: 411038 - RNA, 32 nt, Homo Sapiens
uuucugacgaugccgaagaaggcucaucccuc

SEQ ID NO: 411039 - RNA, 32 nt, Homo Sapiens
aaugcccugugcuagagugucagagaggaagc

SEQ ID NO: 411040 - RNA, 32 nt, Homo Sapiens
aggcucugagagggcacagacuuguggagcug

SEQ ID NO: 411041 - RNA, 32 nt, Homo Sapiens
ccuuggaaguggcuguaacauguaugaaaaga

SEQ ID NO: 411042 - RNA, 32 nt, Homo Sapiens
aaguuagucacuucuuuugucuugauugcuuu

SEQ ID NO: 411043 - RNA, 32 nt, Homo Sapiens
auuccuacuggagaaaaaugucaguguuuucc

SEQ ID NO: 411044 - RNA, 32 nt, Homo Sapiens
aagaugugcuauuuauucuugcacgauuuagg

SEQ ID NO: 411045 - RNA, 32 nt, Homo Sapiens
guuucuugcuggugacucauugccuucacacc

SEQ ID NO: 411046 - RNA, 32 nt, Homo Sapiens
ccccauuucuuugcuccuggcaccucgucccu

SEQ ID NO: 411047 - RNA, 32 nt, Homo Sapiens
gccaagagugggugggugcugcugagggauug

SEQ ID NO: 411048 - RNA, 32 nt, Homo Sapiens
guauuugagucuuuucccauuuccucccacuu

SEQ ID NO: 411049 - RNA, 32 nt, Homo Sapiens
agaccugccccucccccccgaccuccaccccc

SEQ ID NO: 411050 - RNA, 32 nt, Homo Sapiens
guagcuugcagcaauaugugggacacacuugc

SEQ ID NO: 411051 - RNA, 32 nt, Homo Sapiens
cuugagaaauauaucaaguuugugaaagaaag

SEQ ID NO: 411052 - RNA, 32 nt, Homo Sapiens
cuacgacguggccugugcugcugcagcugcug

SEQ ID NO: 411053 - RNA, 32 nt, Homo Sapiens
cucccagggugggagaccccaggccuuucugg

SEQ ID NO: 411054 - RNA, 32 nt, Homo Sapiens
cccuccuccagcccccucugguggcaugccau

SEQ ID NO: 411055 - RNA, 32 nt, Homo Sapiens
aacauuucaaggaaaugaauauauuguuagac

SEQ ID NO: 411056 - RNA, 32 nt, Homo Sapiens
ggagcggccccggggaccccgcgcugcugacg

SEQ ID NO: 411057 - RNA, 32 nt, Homo Sapiens
gccucuggccuuccuacugaaagcagacacag

SEQ ID NO: 411058 - RNA, 32 nt, Homo Sapiens
cucccugcccugccauccugaccuccagagcc

SEQ ID NO: 411059 - RNA, 32 nt, Homo Sapiens
cagccucccaagcagcuaagacuacaguuauu

SEQ ID NO: 411060 - RNA, 32 nt, Homo Sapiens
auguaauguaguucuuuguuccugcuuucucu

SEQ ID NO: 411061 - RNA, 32 nt, Homo Sapiens
aaucgucucccuccccuucucuugcuguacag

SEQ ID NO: 411062 - RNA, 32 nt, Homo Sapiens
gccgcacugacaucuuucaggaccacaucccc

SEQ ID NO: 411063 - RNA, 32 nt, Homo Sapiens
acaguaguccugcuuugaaaagcuaucuucaa

SEQ ID NO: 411064 - RNA, 32 nt, Homo Sapiens
uccagcgucccucuacucuccucugcagcuuc

SEQ ID NO: 411065 - RNA, 32 nt, Homo Sapiens
guugagcagagggaaggcaugggggcaggaag

SEQ ID NO: 411066 - RNA, 32 nt, Homo Sapiens
auaauaccaagguuguucuacaugacgggauc

SEQ ID NO: 411067 - RNA, 32 nt, Homo Sapiens
cguguuugacuccuaggagcgcccaguucaug

SEQ ID NO: 411068 - RNA, 32 nt, Homo Sapiens
uggccuccacacugggggugccaccaacuccc

SEQ ID NO: 411069 - RNA, 32 nt, Homo Sapiens
accaagccaagagcacccuguccccauuccaa

SEQ ID NO: 411070 - RNA, 32 nt, Homo Sapiens
gccguacccgcggccccgggcagggagggagc

SEQ ID NO: 411071 - RNA, 32 nt, Homo Sapiens
gcacagaggagaugggagccugccuggugagg

SEQ ID NO: 411072 - RNA, 32 nt, Homo Sapiens
accuuggguucaauguuuacuuucucauucgg

SEQ ID NO: 411073 - RNA, 32 nt, Homo Sapiens
ugcugccacugcugcuaccacaggaagacaca

SEQ ID NO: 411074 - RNA, 32 nt, Homo Sapiens
acuccuccagcucaguugccgucagcccgaac

SEQ ID NO: 411075 - RNA, 32 nt, Homo Sapiens
cccuguuuuggaagagacagacuguggaagag

SEQ ID NO: 411076 - RNA, 32 nt, Homo Sapiens
uaauaaaacacuuuaagaagauuguauuuaug

SEQ ID NO: 411077 - RNA, 32 nt, Homo Sapiens
agaguucuuaauuuauaacuaauuuuaaaaga

SEQ ID NO: 411078 - RNA, 32 nt, Homo Sapiens
gguggcaugguugcggggcuccuccuugccug

SEQ ID NO: 411079 - RNA, 32 nt, Homo Sapiens
uuuguguagcaaacuucuugugaauguggauu

SEQ ID NO: 411080 - RNA, 32 nt, Homo Sapiens
cagaagccuuggggacaggaaaagcaugacca

SEQ ID NO: 411081 - RNA, 32 nt, Homo Sapiens
acugaucuaaucuuucucauaauuaucuccuu

SEQ ID NO: 411082 - RNA, 32 nt, Homo Sapiens
ccugaggcagcugggauggucuuucuuguguc

SEQ ID NO: 411083 - RNA, 32 nt, Homo Sapiens
ugaucgaaaggagaaagauacaugaccgugug

SEQ ID NO: 411084 - RNA, 32 nt, Homo Sapiens
agauaagccuagccaguacauauuucagcaca

SEQ ID NO: 411085 - RNA, 32 nt, Homo Sapiens
cuguuuguacuuuuggaaauuauuuaacugcu

SEQ ID NO: 411086 - RNA, 30 nt, Homo Sapiens
ccugaugucugugcucguuaugcuaugcca

SEQ ID NO: 411087 - RNA, 32 nt, Homo Sapiens
cacucccaugccagcccucccuggcagcccau

SEQ ID NO: 411088 - RNA, 32 nt, Homo Sapiens
uccaucuccugugcucaagccauccucccacc

SEQ ID NO: 411089 - RNA, 32 nt, Homo Sapiens
caucuucacaugcacauguugcaacaagagcu

SEQ ID NO: 411090 - RNA, 32 nt, Homo Sapiens
gauauuccuucccccauauuuucgaugccagg

SEQ ID NO: 411091 - RNA, 32 nt, Homo Sapiens
acagaagauacucuuuuuuaugcuccuuacug

SEQ ID NO: 411092 - RNA, 32 nt, Homo Sapiens
guuuagcaaaucuguucacaguucuugaugau

SEQ ID NO: 411093 - RNA, 32 nt, Homo Sapiens
cucucauaauuucaauaugguuuacagaugug

SEQ ID NO: 411094 - RNA, 32 nt, Homo Sapiens
cugcacgcccccacugcccccgcacgaaucac

SEQ ID NO: 411095 - RNA, 32 nt, Homo Sapiens
uccagagagaaugucuuuuagauucuuguaua

SEQ ID NO: 411096 - RNA, 32 nt, Homo Sapiens
uccuuguaucaaaauucccaggucuugcuaca

SEQ ID NO: 411097 - RNA, 32 nt, Homo Sapiens
gguuuuggauguaaguuuuaaagaaugguauu

SEQ ID NO: 411098 - RNA, 32 nt, Homo Sapiens
uaagaggaacaucaggcauugcaaucaguauu

SEQ ID NO: 411099 - RNA, 32 nt, Homo Sapiens
auuuucaggcuuuauggccuauuuuccauugu

SEQ ID NO: 411100 - RNA, 32 nt, Homo Sapiens
cagucuggccccagcaaacccggaggccgcca

SEQ ID NO: 411101 - RNA, 32 nt, Homo Sapiens
gcagauucauucccuggugggugucggggacc

SEQ ID NO: 411102 - RNA, 32 nt, Homo Sapiens
cagcuguguucccugcagacugggcucagccc

SEQ ID NO: 411103 - RNA, 32 nt, Homo Sapiens
ccaaaacccuuuucuucaguaucgacaaagau

SEQ ID NO: 411104 - RNA, 29 nt, Homo Sapiens
aggcugaggggccucaguuuacccagcau

SEQ ID NO: 411105 - RNA, 32 nt, Homo Sapiens
uaaaugaaaugucuuauuuuuguagaaaauua

SEQ ID NO: 411106 - RNA, 32 nt, Homo Sapiens
acacccgagcgcgcgcagccaggugcgcuccu

SEQ ID NO: 411107 - RNA, 32 nt, Homo Sapiens
gccuuccacucccaccugagggccauggcugu

SEQ ID NO: 411108 - RNA, 32 nt, Homo Sapiens
uccuuuaugaugugcauguccuugaaggcuga

SEQ ID NO: 411109 - RNA, 32 nt, Homo Sapiens
gagacgggguuggggugcuucuccguggcacu

SEQ ID NO: 411110 - RNA, 32 nt, Homo Sapiens
uugggagcagugcccaccuuccuuggcccaca

SEQ ID NO: 411111 - RNA, 32 nt, Homo Sapiens
uuucagucuacgucuaaaagugaggugagucu

SEQ ID NO: 411112 - RNA, 32 nt, Homo Sapiens
cgcccauaaucccagcacuuugggaggccgag

SEQ ID NO: 411113 - RNA, 32 nt, Homo Sapiens
auuccaccaaggaaaagcagaacaccugaaag

SEQ ID NO: 411114 - RNA, 32 nt, Homo Sapiens
aucuguuucgugucuaauuacauauugaacuu

SEQ ID NO: 411115 - RNA, 32 nt, Homo Sapiens
guguagacggagcccuggcaugucaacagcgu

SEQ ID NO: 411116 - RNA, 32 nt, Homo Sapiens
cuuuuacaagugcaacucagucuaggacagcc

SEQ ID NO: 411117 - RNA, 32 nt, Homo Sapiens
gacuuaaaaauauccaaauaaacuuuugcagc

SEQ ID NO: 411118 - RNA, 32 nt, Homo Sapiens
cgccuguaaucccggcacuuugggaggcugag

SEQ ID NO: 411119 - RNA, 30 nt, Homo Sapiens
uucaggaccacaggauggauaugcagacau

SEQ ID NO: 411120 - RNA, 32 nt, Homo Sapiens
cauccaagccuucaucguuuguccuccggguu

SEQ ID NO: 411121 - RNA, 32 nt, Homo Sapiens
caccuguaaucccagcacuuugggaagcuaag

SEQ ID NO: 411122 - RNA, 32 nt, Homo Sapiens
cagagccggcuggcccgggagcuccuugccug

SEQ ID NO: 411123 - RNA, 32 nt, Homo Sapiens
cugucuuuuuaaaaauauuaaauucuggaaaa

SEQ ID NO: 411124 - RNA, 32 nt, Homo Sapiens
cccugaggacacggaggccgccaggcaggcca

SEQ ID NO: 411125 - RNA, 32 nt, Homo Sapiens
acacuacauaucuaaagcuuugacaaguccuu

SEQ ID NO: 411126 - RNA, 32 nt, Homo Sapiens
ccugguggaugcccuccucccucagagcuggg

SEQ ID NO: 411127 - RNA, 32 nt, Homo Sapiens
gaugggagggugggaggccucggggucugggg

SEQ ID NO: 411128 - RNA, 32 nt, Homo Sapiens
cacacccuguacacacagaaaaugguauaaaa

SEQ ID NO: 411129 - RNA, 32 nt, Homo Sapiens
ugagauggguggccagcuuguacaccaguccc

SEQ ID NO: 411130 - RNA, 32 nt, Homo Sapiens
cgccuguaauccuagcacuuugggaggccaag

SEQ ID NO: 411131 - RNA, 32 nt, Homo Sapiens
augggaacugugaagaggcacccuggcaagca

SEQ ID NO: 411132 - RNA, 32 nt, Homo Sapiens
cgccuauaauccuagcacuuugggaggccgag

SEQ ID NO: 411133 - RNA, 32 nt, Homo Sapiens
uuucucaaucuuccuccauguuguguucuuug

SEQ ID NO: 411134 - RNA, 32 nt, Homo Sapiens
aaaaaaaaaaagacaaaaaaaaaaggcuggcg

SEQ ID NO: 411135 - RNA, 32 nt, Homo Sapiens
caacccacagaaauggugagauaaaccauagg

SEQ ID NO: 411136 - RNA, 32 nt, Homo Sapiens
cgccuguaaucccagcacuuugggaggcuaag

SEQ ID NO: 411137 - RNA, 32 nt, Homo Sapiens
aacccuucccaaaccucccccauccccucucg

SEQ ID NO: 411138 - RNA, 32 nt, Homo Sapiens
cucuccaaggacccaggcgccagcagccccgg

SEQ ID NO: 411139 - RNA, 32 nt, Homo Sapiens
uguuuauaguuucauugcuuuaaacuuuauaa

SEQ ID NO: 411140 - RNA, 32 nt, Homo Sapiens
agcagccugcaagcugggagcuugcaugggug

SEQ ID NO: 411141 - RNA, 32 nt, Homo Sapiens
cucaaccccuuccuccucccucuggggaugaa

SEQ ID NO: 411142 - RNA, 32 nt, Homo Sapiens
cgccuauaaucccagcacuuugggaggcugag

SEQ ID NO: 411143 - RNA, 28 nt, Homo Sapiens
ucaguggggcggccgggagggcgagcga

SEQ ID NO: 411144 - RNA, 31 nt, Homo Sapiens
ggguaagagauggcaagugugagacgggcug

SEQ ID NO: 411145 - RNA, 32 nt, Homo Sapiens
cauucuuauggguaaguuuuacuaguccagcu

SEQ ID NO: 411146 - RNA, 32 nt, Homo Sapiens
gaagaaggagaggaauacuaaguuaaaacguc

SEQ ID NO: 411147 - RNA, 32 nt, Homo Sapiens
cccuccccgcgccccuccccagcccaucuuac

SEQ ID NO: 411148 - RNA, 32 nt, Homo Sapiens
aggggcugcuggaaguggcauuucguucagag

SEQ ID NO: 411149 - RNA, 32 nt, Homo Sapiens
uacucuagcugccuugucgccaucgcaucugg

SEQ ID NO: 411150 - RNA, 32 nt, Homo Sapiens
ccccugcccccgcucccgcucccagguucccc

SEQ ID NO: 411151 - RNA, 32 nt, Homo Sapiens
uuccacuaguauuauuucauuuuuuauuacuc

SEQ ID NO: 411152 - RNA, 32 nt, Homo Sapiens
cauaguauguagucuuuuuuauuuauuuauuu

SEQ ID NO: 411153 - RNA, 32 nt, Homo Sapiens
ccuucagggucucuugugcauccaggagguca

SEQ ID NO: 411154 - RNA, 32 nt, Homo Sapiens
agccugaccaacauggagaaaccccgucucug

SEQ ID NO: 411155 - RNA, 32 nt, Homo Sapiens
acuugcaggacucacuggauagaugguauucg

SEQ ID NO: 411156 - RNA, 32 nt, Homo Sapiens
auuaucugcuagugucauccacagcaguucau

SEQ ID NO: 411157 - RNA, 32 nt, Homo Sapiens
agugcugguacaucuuuuuucuuuuguggacc

SEQ ID NO: 411158 - RNA, 30 nt, Homo Sapiens
cggucauguaccgcuccaccaagggcgccu

SEQ ID NO: 411159 - RNA, 32 nt, Homo Sapiens
augugcuuauuggggauccgggugugguggcu

SEQ ID NO: 411160 - RNA, 32 nt, Homo Sapiens
auucugaaacaguuuuacauguuauuauauaa

SEQ ID NO: 411161 - RNA, 32 nt, Homo Sapiens
uauuaauguugacuguuaauucuuaagcaaga

SEQ ID NO: 411162 - RNA, 32 nt, Homo Sapiens
uaccuugaauauaaauaucaggaaucaugcaa

SEQ ID NO: 411163 - RNA, 32 nt, Homo Sapiens
ccaguaaaaugguuuugggcgauaacuucuag

SEQ ID NO: 411164 - RNA, 32 nt, Homo Sapiens
uacuguauauauacauauauauacgugugugu

SEQ ID NO: 411165 - RNA, 32 nt, Homo Sapiens
augccgaucugugucuugcauuuuggguaaaa

SEQ ID NO: 411166 - RNA, 32 nt, Homo Sapiens
uuuaacacguuuagauagcuuauuuaaauucu

SEQ ID NO: 411167 - RNA, 32 nt, Homo Sapiens
gaagagcaaccuggcccacagccugcaggugg

SEQ ID NO: 411168 - RNA, 32 nt, Homo Sapiens
aaagagaaaauguccacauaugauguuaauug

SEQ ID NO: 411169 - RNA, 32 nt, Homo Sapiens
cuagaaacacugaguuuuaaccaauaugagac

SEQ ID NO: 411170 - RNA, 30 nt, Homo Sapiens
uuuuuaagacagagucccacucugucgccc

SEQ ID NO: 411171 - RNA, 32 nt, Homo Sapiens
ccccucuccgagugacaagucccggccuccgg

SEQ ID NO: 411172 - RNA, 32 nt, Homo Sapiens
uggcccggguggcagcggggaggcgcugcaug

SEQ ID NO: 411173 - RNA, 32 nt, Homo Sapiens
gcaguguaguaugcagagcugcuguuuuaaug

SEQ ID NO: 411174 - RNA, 32 nt, Homo Sapiens
uuguuuuucuuuuagacacauuagcucuggag

SEQ ID NO: 411175 - RNA, 28 nt, Homo Sapiens
agaauggcggcaccugacuugcuggauc

SEQ ID NO: 411176 - RNA, 32 nt, Homo Sapiens
gagcacuggaagggcuggugcagaucuacuuc

SEQ ID NO: 411177 - RNA, 32 nt, Homo Sapiens
ccagccuaggcacaacuuguccugguccaagu

SEQ ID NO: 411178 - RNA, 32 nt, Homo Sapiens
cacaauuucauguuuuugcacuaaaaaccuuc

SEQ ID NO: 411179 - RNA, 32 nt, Homo Sapiens
cauggcgaaaaacaacuuuguuccuuccuccu

SEQ ID NO: 411180 - RNA, 32 nt, Homo Sapiens
gucauuugacauuuuuuguuugcugaagugaa

SEQ ID NO: 411181 - RNA, 32 nt, Homo Sapiens
ucuaguucugcggaagaaaaggaugcgguauu

SEQ ID NO: 411182 - RNA, 32 nt, Homo Sapiens
uugauggcacugggcugugcucaggugaagcc

SEQ ID NO: 411183 - RNA, 32 nt, Homo Sapiens
uagaggaucaagacauaaugggagcauuuuua

SEQ ID NO: 411184 - RNA, 32 nt, Homo Sapiens
gaguaggugugcggcccgccgccggacagccc

SEQ ID NO: 411185 - RNA, 32 nt, Homo Sapiens
auggguuuggcaagacaguuaacuuuucuaca

SEQ ID NO: 411186 - RNA, 32 nt, Homo Sapiens
aagauguugcuuaauacagucuggaauacucu

SEQ ID NO: 411187 - RNA, 32 nt, Homo Sapiens
aguucgggugguggagaugcaguagaaaaauc

SEQ ID NO: 411188 - RNA, 32 nt, Homo Sapiens
uuuucauuuucauucucagacuugccaccccc

SEQ ID NO: 411189 - RNA, 32 nt, Homo Sapiens
ucauacagucucuauuugauuugcaacacugg

SEQ ID NO: 411190 - RNA, 32 nt, Homo Sapiens
auccucgugaaagugcacacacuucauggagg

SEQ ID NO: 411191 - RNA, 32 nt, Homo Sapiens
uuuaguauuuaugggagggagcaagaagggaa

SEQ ID NO: 411192 - RNA, 32 nt, Homo Sapiens
ggcucugcaggggacaugagaggcacaccgaa

SEQ ID NO: 411193 - RNA, 32 nt, Homo Sapiens
uuucccacugugcuuuccucuaaccaaaauau

SEQ ID NO: 411194 - RNA, 32 nt, Homo Sapiens
aaagaaauucaauccaaugacacacaccacau

SEQ ID NO: 411195 - RNA, 32 nt, Homo Sapiens
uacauccuuauacaauaaaagggacacauuug

SEQ ID NO: 411196 - RNA, 32 nt, Homo Sapiens
cuugggggaaaugugugugucaguucugucag

SEQ ID NO: 411197 - RNA, 32 nt, Homo Sapiens
agacccacccucaagcagcagaugugcagcaa

SEQ ID NO: 411198 - RNA, 32 nt, Homo Sapiens
cgccuguaaucucagcacuuugggaggccaag

SEQ ID NO: 411199 - RNA, 30 nt, Homo Sapiens
uccucuguaaaugcugcagcagccagaggc

SEQ ID NO: 411200 - RNA, 32 nt, Homo Sapiens
uuuaccaaguucagaaguuaacaaagacucug

SEQ ID NO: 411201 - RNA, 32 nt, Homo Sapiens
aaggcucagaggaggaaggggccacgucgggg

SEQ ID NO: 411202 - RNA, 32 nt, Homo Sapiens
aaggcagagcagugucugugcugccagguccu

SEQ ID NO: 411203 - RNA, 32 nt, Homo Sapiens
ugaauugaaaagaaacaaauguauugaagaag

SEQ ID NO: 411204 - RNA, 32 nt, Homo Sapiens
auuccaugaauuaaaucuguuuccuguguuag

SEQ ID NO: 411205 - RNA, 32 nt, Homo Sapiens
ucucucgugcuuaauuaauagcuuuaucuuuu

SEQ ID NO: 411206 - RNA, 32 nt, Homo Sapiens
ccagaacucugcauaaagacuggcgcuugcag

SEQ ID NO: 411207 - RNA, 32 nt, Homo Sapiens
uggaugaugucugauugguuccacaacugcuu

SEQ ID NO: 411208 - RNA, 32 nt, Homo Sapiens
uccugcagccccacccagaagcgguucagcac

SEQ ID NO: 411209 - RNA, 32 nt, Homo Sapiens
gcacgaggccccgguuccggcgcgguugaggc

SEQ ID NO: 411210 - RNA, 32 nt, Homo Sapiens
ccagacacccucgccggggacucgggaacgcc

SEQ ID NO: 411211 - RNA, 32 nt, Homo Sapiens
gcucauuaaaagacaauuacaaagcuuaucac

SEQ ID NO: 411212 - RNA, 32 nt, Homo Sapiens
ccuuugcaaaauuuauauuaaagcauugguaa

SEQ ID NO: 411213 - RNA, 32 nt, Homo Sapiens
aaaacugaccagcuaaucuggaccucagagau

SEQ ID NO: 411214 - RNA, 32 nt, Homo Sapiens
uauuaaaguggaaaaaugaucuugugaauaag

SEQ ID NO: 411215 - RNA, 32 nt, Homo Sapiens
gaccacagcgaggaugcggggcuggucugcac

SEQ ID NO: 411216 - RNA, 32 nt, Homo Sapiens
agccauccaagcauauagagcucauuucccug

SEQ ID NO: 411217 - RNA, 32 nt, Homo Sapiens
ccagaagacagacccacagcccugcccuuguc

SEQ ID NO: 411218 - RNA, 31 nt, Homo Sapiens
auuagucaauaaaaauugaugucagugcagg

SEQ ID NO: 411219 - RNA, 32 nt, Homo Sapiens
aaguguaauuuaauuuaaaagagccuaauuua

SEQ ID NO: 411220 - RNA, 32 nt, Homo Sapiens
agucuccgcucccgcagcgggcgcgggacagg

SEQ ID NO: 411221 - RNA, 32 nt, Homo Sapiens
acagcaucaauauauaugugagguugcacuaa

SEQ ID NO: 411222 - RNA, 32 nt, Homo Sapiens
gaaaauuauagcaacaguacuuaggagaauag

SEQ ID NO: 411223 - RNA, 32 nt, Homo Sapiens
ccuuggcaaccacugaucuuguuacccucuuc

SEQ ID NO: 411224 - RNA, 32 nt, Homo Sapiens
cggugcccccagcccaggaucgggcacucagu

SEQ ID NO: 411225 - RNA, 32 nt, Homo Sapiens
ugaccgauggucccuggucugugcaggacuca

SEQ ID NO: 411226 - RNA, 32 nt, Homo Sapiens
uucagacucacagccgcgcuaguuaggguacc

SEQ ID NO: 411227 - RNA, 32 nt, Homo Sapiens
cggacgcgaccucagccugcggcggcuaacug

SEQ ID NO: 411228 - RNA, 32 nt, Homo Sapiens
cugcagggccgcggguucacgucccaccucag

SEQ ID NO: 411229 - RNA, 32 nt, Homo Sapiens
caguaccugaaagauuugauagaagagguccg

SEQ ID NO: 411230 - RNA, 32 nt, Homo Sapiens
gcuacagauuucugccuuguuuugcgacauug

SEQ ID NO: 411231 - RNA, 32 nt, Homo Sapiens
caccaccgacucagcccucugcagcuacccaa

SEQ ID NO: 411232 - RNA, 32 nt, Homo Sapiens
aaagauugacauuuuaaguacaacuuuuaagg

SEQ ID NO: 411233 - RNA, 32 nt, Homo Sapiens
aguccauccgagggagccugccggcaaagcgu

SEQ ID NO: 411234 - RNA, 32 nt, Homo Sapiens
cuuuuacuuuuugccccuuccacuuugaguac

SEQ ID NO: 411235 - RNA, 32 nt, Homo Sapiens
auagcaguggggaagcaucauguaucugggag

SEQ ID NO: 411236 - RNA, 29 nt, Homo Sapiens
ccccaugcaccugccgggcugcgcgccag

SEQ ID NO: 411237 - RNA, 32 nt, Homo Sapiens
guuucagagcacaugcacacugucagggcuag

SEQ ID NO: 411238 - RNA, 32 nt, Homo Sapiens
gcugagauuauuagugauacaaaguuaaaauu

SEQ ID NO: 411239 - RNA, 32 nt, Homo Sapiens
caggcucucgcggaaggccuggcugagcacau

SEQ ID NO: 411240 - RNA, 32 nt, Homo Sapiens
aauaacuuguugacuuuuuuuuuuucucuuuu

SEQ ID NO: 411241 - RNA, 32 nt, Homo Sapiens
gaaaugcauccaccacacuugcagacugacug

SEQ ID NO: 411242 - RNA, 32 nt, Homo Sapiens
ucacagggcggcucuggagagaucugaaggcu

SEQ ID NO: 411243 - RNA, 32 nt, Homo Sapiens
uuauaaaagcuguguuauuguuuucuauuauu

SEQ ID NO: 411244 - RNA, 32 nt, Homo Sapiens
acucaagagggagaagugacuccagcuaccuu

SEQ ID NO: 411245 - RNA, 32 nt, Homo Sapiens
uuccugucuuugcuguauuuugaaaaacacgu

SEQ ID NO: 411246 - RNA, 32 nt, Homo Sapiens
agaugaaugaagaacauggacucauguggaug

SEQ ID NO: 411247 - RNA, 32 nt, Homo Sapiens
caaugggacuuccggggcugugaugggaaggg

SEQ ID NO: 411248 - RNA, 32 nt, Homo Sapiens
gaaaggcccggccgacugcugcucgcugaucc

SEQ ID NO: 411249 - RNA, 32 nt, Homo Sapiens
cgcugacuccugguggcaaggaucaucccuuc

SEQ ID NO: 411250 - RNA, 32 nt, Homo Sapiens
cugaggucaggaguucgagaccagccugggag

SEQ ID NO: 411251 - RNA, 32 nt, Homo Sapiens
ggaucccugcagagaccccuccaguccgggau

SEQ ID NO: 411252 - RNA, 32 nt, Homo Sapiens
ccugagcucaggugauccaccugccccggccu

SEQ ID NO: 411253 - RNA, 31 nt, Homo Sapiens
aggacugucugucuccugccccaugaugacc

SEQ ID NO: 411254 - RNA, 32 nt, Homo Sapiens
aucauugaaaacaaaacaugcccgucaacaug

SEQ ID NO: 411255 - RNA, 32 nt, Homo Sapiens
ucucucccuuauaguccuaagccaagacauuu

SEQ ID NO: 411256 - RNA, 32 nt, Homo Sapiens
gcugcuuucuucucugccuccuccucacgcaa

SEQ ID NO: 411257 - RNA, 32 nt, Homo Sapiens
aggaaggaaaggaaacugccuuccccaugcag

SEQ ID NO: 411258 - RNA, 32 nt, Homo Sapiens
cgaggcagcaguggggcggggauggaggcggc

SEQ ID NO: 411259 - RNA, 32 nt, Homo Sapiens
gcccgacucuacccggcccggucccugcgcgg

SEQ ID NO: 411260 - RNA, 32 nt, Homo Sapiens
aguuacccuuucuccuuuucucuucagugguu

SEQ ID NO: 411261 - RNA, 32 nt, Homo Sapiens
ucuuucuccugcuguucuggguuccuggaugg

SEQ ID NO: 411262 - RNA, 32 nt, Homo Sapiens
cuugaaaaaucaggugucaaccuagauggaaa

SEQ ID NO: 411263 - RNA, 32 nt, Homo Sapiens
acauguaaucugaaaaagaaauccaaauguag

SEQ ID NO: 411264 - RNA, 32 nt, Homo Sapiens
uugaggcuucugaggaggaaaaacaaaccuaa

SEQ ID NO: 411265 - RNA, 32 nt, Homo Sapiens
gguugggggugggacagcacggccaggaguag

SEQ ID NO: 411266 - RNA, 30 nt, Homo Sapiens
gcccgcggucccggcggcgccaggugcguu

SEQ ID NO: 411267 - RNA, 32 nt, Homo Sapiens
gccgcugugcaggcccaccucuuuggcucuuu

SEQ ID NO: 411268 - RNA, 32 nt, Homo Sapiens
ggcaucuuaucauuuaaagucaacuggaaaua

SEQ ID NO: 411269 - RNA, 32 nt, Homo Sapiens
gccggcgggccaagaggacgauccggccgcug

SEQ ID NO: 411270 - RNA, 32 nt, Homo Sapiens
ggagcccgccgccccaggauggcugcagcucc

SEQ ID NO: 411271 - RNA, 32 nt, Homo Sapiens
uuaaggaggggagguuacccaagaaacaaagc

SEQ ID NO: 411272 - RNA, 32 nt, Homo Sapiens
ggcccuggaaaggguugacagccagccuuggc

SEQ ID NO: 411273 - RNA, 32 nt, Homo Sapiens
acaggacuucugugcauuguaaacauaaacag

SEQ ID NO: 411274 - RNA, 32 nt, Homo Sapiens
ugcuuucuaaaaugaaugcaauugaaagaaag

SEQ ID NO: 411275 - RNA, 32 nt, Homo Sapiens
ggcugagggcgcuggucagagcccucccauga

SEQ ID NO: 411276 - RNA, 30 nt, Homo Sapiens
cggcuccacuauggcggcggcggggagggg

SEQ ID NO: 411277 - RNA, 32 nt, Homo Sapiens
gacugugauccgauucuuuccagcggcuucug

SEQ ID NO: 411278 - RNA, 32 nt, Homo Sapiens
ggugugcagggccaggagcuagaaucuuccac

SEQ ID NO: 411279 - RNA, 32 nt, Homo Sapiens
ccacaggaagcgagagagcugcugccacugcu

SEQ ID NO: 411280 - RNA, 32 nt, Homo Sapiens
uuguugcauaucuaucaaggacuuauucacuc

SEQ ID NO: 411281 - RNA, 32 nt, Homo Sapiens
cauaguucaacacuauggguccuccucugaag

SEQ ID NO: 411282 - RNA, 32 nt, Homo Sapiens
auggaguuucacucuuuuuacccaggcuggag

SEQ ID NO: 411283 - RNA, 32 nt, Homo Sapiens
cuaucuuaagauuuaauggaaaaguuuaauuu

SEQ ID NO: 411284 - RNA, 31 nt, Homo Sapiens
uagauuccacccucaguacuagugaugcauc

SEQ ID NO: 411285 - RNA, 32 nt, Homo Sapiens
auggcuacuuggauguaccucacuuaaagaug

SEQ ID NO: 411286 - RNA, 32 nt, Homo Sapiens
uugcaaacuugacuaguagcucaagauaaauu

SEQ ID NO: 411287 - RNA, 32 nt, Homo Sapiens
cuagcuagucguucugaagcggcggccagaga

SEQ ID NO: 411288 - RNA, 32 nt, Homo Sapiens
uauauuuuagugaagaaacaaguucucgggug

SEQ ID NO: 411289 - RNA, 32 nt, Homo Sapiens
cauguuuuuaucacuuugaucaauguuuguag

SEQ ID NO: 411290 - RNA, 32 nt, Homo Sapiens
agaugggaaaguucaaauaccauccacaagaa

SEQ ID NO: 411291 - RNA, 32 nt, Homo Sapiens
agaagaggcagacagugacgaugguaggggua

SEQ ID NO: 411292 - RNA, 32 nt, Homo Sapiens
uuuuuugaauccaaaucuguccucuguaguau

SEQ ID NO: 411293 - RNA, 32 nt, Homo Sapiens
uuaucaguaccugcaugacuugguaaauucau

SEQ ID NO: 411294 - RNA, 32 nt, Homo Sapiens
acccucugggaggaggaccccugggaugcccu

SEQ ID NO: 411295 - RNA, 32 nt, Homo Sapiens
ugaacuaccuucuguucacguuaucaugacgc

SEQ ID NO: 411296 - RNA, 32 nt, Homo Sapiens
uaacgauuaucugcccauguccugccugaaau

SEQ ID NO: 411297 - RNA, 32 nt, Homo Sapiens
ugagcugagcgcgggggagaagagugcgcagg

SEQ ID NO: 411298 - RNA, 32 nt, Homo Sapiens
gaaugccggcguggggagcugcacugcaccag

SEQ ID NO: 411299 - RNA, 32 nt, Homo Sapiens
cuuuucugacuauuuuucagaaucucucuucu

SEQ ID NO: 411300 - RNA, 31 nt, Homo Sapiens
accgcagcgggccgcagcucaggacucggag

SEQ ID NO: 411301 - RNA, 32 nt, Homo Sapiens
ugggaggaggauguuguguuacacacgcauca

SEQ ID NO: 411302 - RNA, 32 nt, Homo Sapiens
aaagaaauauaaagccuguuaaauuugugauu

SEQ ID NO: 411303 - RNA, 32 nt, Homo Sapiens
caacacugaagaggugugggaguucugugcca

SEQ ID NO: 411304 - RNA, 32 nt, Homo Sapiens
uccugcugcuccuguuugucugauguggcaaa

SEQ ID NO: 411305 - RNA, 32 nt, Homo Sapiens
cuucccaaccccgaggggcuugcagggacaag

SEQ ID NO: 411306 - RNA, 32 nt, Homo Sapiens
cuaaaacaaaaauaagcauaaaauuugggauu

SEQ ID NO: 411307 - RNA, 32 nt, Homo Sapiens
cucucucauuuucuuuguauaacuaugcagcc

SEQ ID NO: 411308 - RNA, 28 nt, Homo Sapiens
uucucuguggcuacaagggacccacaga

SEQ ID NO: 411309 - RNA, 32 nt, Homo Sapiens
auucuauccucaucuuuuuuugguucuuuggu

SEQ ID NO: 411310 - RNA, 32 nt, Homo Sapiens
gguuuuguuucaucacugcguucuucaaggga

SEQ ID NO: 411311 - RNA, 32 nt, Homo Sapiens
cauguugccgguuucccacuuuucuuuuuaca

SEQ ID NO: 411312 - RNA, 32 nt, Homo Sapiens
ggugagcgcguuagcccgaguggaucuaggcg

SEQ ID NO: 411313 - RNA, 32 nt, Homo Sapiens
gcacggagcuugucugcgccggccagcacugg

SEQ ID NO: 411314 - RNA, 32 nt, Homo Sapiens
gaugagucaacagguuucacuaauauuuguca

SEQ ID NO: 411315 - RNA, 32 nt, Homo Sapiens
ucugucucugagggagucgacuucuacuccga

SEQ ID NO: 411316 - RNA, 32 nt, Homo Sapiens
gugccgcgggacucugcaccuaccucacaggg

SEQ ID NO: 411317 - RNA, 32 nt, Homo Sapiens
ugagccgggagggugaaggcgagggacugcag

SEQ ID NO: 411318 - RNA, 32 nt, Homo Sapiens
gacugccuuguacuauacagaaguguuugaaa

SEQ ID NO: 411319 - RNA, 32 nt, Homo Sapiens
aggauggggcaggacaggacgcggccacccca

SEQ ID NO: 411320 - RNA, 30 nt, Homo Sapiens
gucucaucacuugccuucuugcauucuggg

SEQ ID NO: 411321 - RNA, 32 nt, Homo Sapiens
ugccccuggugccucuuccccagcccuaaagc

SEQ ID NO: 411322 - RNA, 32 nt, Homo Sapiens
gacauguuauauauuuuuuguaggggucaaag

SEQ ID NO: 411323 - RNA, 32 nt, Homo Sapiens
uuucuuuuucccuuguguauaaaacuucucua

SEQ ID NO: 411324 - RNA, 32 nt, Homo Sapiens
gccuuccucugcgacagcggcgcagccaaggg

SEQ ID NO: 411325 - RNA, 32 nt, Homo Sapiens
aucuccacaaaguguuaccaguuuacaaaaau

SEQ ID NO: 411326 - RNA, 29 nt, Homo Sapiens
caccauggacgaagcuggcagcucugcga

SEQ ID NO: 411327 - RNA, 32 nt, Homo Sapiens
gccuggugugucugaaaguugcaucaguccuc

SEQ ID NO: 411328 - RNA, 32 nt, Homo Sapiens
aggcggcauggaggcgcgaggaggaggaccug

SEQ ID NO: 411329 - RNA, 32 nt, Homo Sapiens
uguuggcaggaaggcugccccaaacauggacc

SEQ ID NO: 411330 - RNA, 32 nt, Homo Sapiens
gaagggccaaacuagcuggacccgucaccuuc

SEQ ID NO: 411331 - RNA, 32 nt, Homo Sapiens
uuaaaaaaaaagacauauaagguugauuaaag

SEQ ID NO: 411332 - RNA, 32 nt, Homo Sapiens
cuugccaacuaccaccuaccucgagcaucuca

SEQ ID NO: 411333 - RNA, 32 nt, Homo Sapiens
acuuuugagaugaucacuaauuuuauggagug

SEQ ID NO: 411334 - RNA, 32 nt, Homo Sapiens
cgcucguggugaugucaggagcuccucggagg

SEQ ID NO: 411335 - RNA, 32 nt, Homo Sapiens
guuggggggcuccgguggaaaccugcgacccc

SEQ ID NO: 411336 - RNA, 32 nt, Homo Sapiens
uugaggaggcuuugguugcacuucuuuggcug

SEQ ID NO: 411337 - RNA, 32 nt, Homo Sapiens
gcugagcaacugggcuguagggcagggccacu

SEQ ID NO: 411338 - RNA, 32 nt, Homo Sapiens
acugcagcacagugcuggcccuaaugccaggu

SEQ ID NO: 411339 - RNA, 32 nt, Homo Sapiens
gcgaggcggcgacgaggcgccggggacccgcg

SEQ ID NO: 411340 - RNA, 32 nt, Homo Sapiens
uuuugggcuaguuauuuuuuuaaucuucauau

SEQ ID NO: 411341 - RNA, 32 nt, Homo Sapiens
cuucugugguuuaugaaugaucuuaagguaau

SEQ ID NO: 411342 - RNA, 32 nt, Homo Sapiens
gccugccccguccacuccugcuugguuguccc

SEQ ID NO: 411343 - RNA, 32 nt, Homo Sapiens
aaccgcaaugaaaacugacuugaaauaaugcu

SEQ ID NO: 411344 - RNA, 32 nt, Homo Sapiens
gagaguucuccauuuuaauguuucuaaaguuu

SEQ ID NO: 411345 - RNA, 32 nt, Homo Sapiens
aauucuuuacucaagagaggcugcuuagaaag

SEQ ID NO: 411346 - RNA, 32 nt, Homo Sapiens
augugugugaugucuacgugcuaaggcaagac

SEQ ID NO: 411347 - RNA, 32 nt, Homo Sapiens
aguaacccggugccuccuccuccccaggaagc

SEQ ID NO: 411348 - RNA, 32 nt, Homo Sapiens
agacccugcccagggacccccaucaccagcuc

SEQ ID NO: 411349 - RNA, 32 nt, Homo Sapiens
cugccucuuaaauaaaccuuuuuggacacaca

SEQ ID NO: 411350 - RNA, 32 nt, Homo Sapiens
cuugcacgcuugaguuugaaaaacacugagua

SEQ ID NO: 411351 - RNA, 32 nt, Homo Sapiens
gcgcagcagaaagccagaggcaggcaguggug

SEQ ID NO: 411352 - RNA, 32 nt, Homo Sapiens
cagugugugggguucgcggggcggcggguaga

SEQ ID NO: 411353 - RNA, 32 nt, Homo Sapiens
agcaccacacgcgccagcgucuuccgcacaca

SEQ ID NO: 411354 - RNA, 32 nt, Homo Sapiens
cauggagauuuuuguuuucuguucccaauaaa

SEQ ID NO: 411355 - RNA, 32 nt, Homo Sapiens
gaagccuuauuuuauuucucucuucuuuacca

SEQ ID NO: 411356 - RNA, 32 nt, Homo Sapiens
cuuuccugugacucuccucccucccgggagug

SEQ ID NO: 411357 - RNA, 32 nt, Homo Sapiens
uuuaaauguaaaauauuugagaauaaguucau

SEQ ID NO: 411358 - RNA, 32 nt, Homo Sapiens
uugagucuuuaacaaagugauuaagagcuugg

SEQ ID NO: 411359 - RNA, 32 nt, Homo Sapiens
ggaagaaguuagagucagggaacuuguauacc

SEQ ID NO: 411360 - RNA, 32 nt, Homo Sapiens
auuuagagauacuguuguuacuucugcauguu

SEQ ID NO: 411361 - RNA, 32 nt, Homo Sapiens
uggcugucauauauguuaaaaaucauuaaaag

SEQ ID NO: 411362 - RNA, 32 nt, Homo Sapiens
uuggggagggaacacagagguguugggaaggu

SEQ ID NO: 411363 - RNA, 32 nt, Homo Sapiens
caaauuugauaaauuaagaauuaucugcauuu

SEQ ID NO: 411364 - RNA, 32 nt, Homo Sapiens
ccgucccagcacgacguggagccccgcggaga

SEQ ID NO: 411365 - RNA, 32 nt, Homo Sapiens
ugaggccuaaaaugaauaaggaaagaagagaa

SEQ ID NO: 411366 - RNA, 28 nt, Homo Sapiens
agaugguaaagaccacauuugaauaagu

SEQ ID NO: 411367 - RNA, 32 nt, Homo Sapiens
cauauguugcuuaaauuuccuuaugagcccca

SEQ ID NO: 411368 - RNA, 32 nt, Homo Sapiens
uggaucuggagagagcagcugcugcugcccca

SEQ ID NO: 411369 - RNA, 32 nt, Homo Sapiens
cgugagcccucccccuugggaucccgcagcug

SEQ ID NO: 411370 - RNA, 32 nt, Homo Sapiens
cuuaaauaauaagaguagaauacuuucugugu

SEQ ID NO: 411371 - RNA, 32 nt, Homo Sapiens
uggaaagagcaaaugagaagugguuuggauac

SEQ ID NO: 411372 - RNA, 32 nt, Homo Sapiens
aucaaagcacaagcucaccaucaaugagccug

SEQ ID NO: 411373 - RNA, 32 nt, Homo Sapiens
ggccaggcaaggggagggaggggcguggggag

SEQ ID NO: 411374 - RNA, 32 nt, Homo Sapiens
uccccgugcuggcgccugagaagccugcagca

SEQ ID NO: 411375 - RNA, 32 nt, Homo Sapiens
gaaaaaccaaaauauguaauuuuaaaaaacua

SEQ ID NO: 411376 - RNA, 32 nt, Homo Sapiens
agauuagccacacaugcaaacaucaguguccu

SEQ ID NO: 411377 - RNA, 32 nt, Homo Sapiens
aaaccgcuuuggaguucguguaauugggacuu

SEQ ID NO: 411378 - RNA, 32 nt, Homo Sapiens
uuuuauuuucuuucacucuguauuaaaaguaa

SEQ ID NO: 411379 - RNA, 32 nt, Homo Sapiens
acgaucccgcggcgcucugcggccuggucugg

SEQ ID NO: 411380 - RNA, 32 nt, Homo Sapiens
uguucccacuguaucugcacuguucuuacuuc

SEQ ID NO: 411381 - RNA, 32 nt, Homo Sapiens
augagcagaaggaaacaaaaaaaaaaagaaga

SEQ ID NO: 411382 - RNA, 32 nt, Homo Sapiens
gaauugaaguuaaaaacccauccaccauuucu

SEQ ID NO: 411383 - RNA, 32 nt, Homo Sapiens
aggaggugaugggcgcgcaggggggcgucacg

SEQ ID NO: 411384 - RNA, 32 nt, Homo Sapiens
uaccagcugaugcaucuccugauucuaagugu

SEQ ID NO: 411385 - RNA, 32 nt, Homo Sapiens
cagacccgccggggucccuggggacgcgccag

SEQ ID NO: 411386 - RNA, 32 nt, Homo Sapiens
ccagggcgccgcgaggcccggggcuagcggga

SEQ ID NO: 411387 - RNA, 32 nt, Homo Sapiens
gcaguggcgggggcggaggggugguucuuuuc

SEQ ID NO: 411388 - RNA, 32 nt, Homo Sapiens
auccaggcaagugaauccagccaggcaguuuu

SEQ ID NO: 411389 - RNA, 32 nt, Homo Sapiens
uuuuuucuuuugcaagacaccuguuuaucacc

SEQ ID NO: 411390 - RNA, 32 nt, Homo Sapiens
agaagaaggaaagcggcuggccugguguggag

SEQ ID NO: 411391 - RNA, 32 nt, Homo Sapiens
guguaauuuuuggugggugaaaggaauuuugc

SEQ ID NO: 411392 - RNA, 32 nt, Homo Sapiens
ucugcccucccucccccgaaguucucuguggu

SEQ ID NO: 411393 - RNA, 32 nt, Homo Sapiens
acuccucaaugccguuuccccaguugcucuga

SEQ ID NO: 411394 - RNA, 32 nt, Homo Sapiens
caauaaggcaggccagcucguuuuucucucug

SEQ ID NO: 411395 - RNA, 32 nt, Homo Sapiens
ggccuccaccccaaccccggcucagagacugg

SEQ ID NO: 411396 - RNA, 32 nt, Homo Sapiens
auuucuauaauuuuuaaggacucuucauaagg

SEQ ID NO: 411397 - RNA, 32 nt, Homo Sapiens
uaagagucuauucaaauuggcuucugagucca

SEQ ID NO: 411398 - RNA, 32 nt, Homo Sapiens
ggcggcagcaagacgacuucuccggagccgcc

SEQ ID NO: 411399 - RNA, 32 nt, Homo Sapiens
uuugauggggaaaagcauaucaacagauaccu

SEQ ID NO: 411400 - RNA, 32 nt, Homo Sapiens
gguggaggcccggcccaggcggcgcccgccau

SEQ ID NO: 411401 - RNA, 32 nt, Homo Sapiens
uaccuccaacccccauuacccaccuguggcug

SEQ ID NO: 411402 - RNA, 32 nt, Homo Sapiens
auucguguuguaaaucagacuccagcaauuuu

SEQ ID NO: 411403 - RNA, 28 nt, Homo Sapiens
uaguugguuacagggugagugagauaac

SEQ ID NO: 411404 - RNA, 32 nt, Homo Sapiens
ucuauuucaauuaaagugacccuuuuaucauu

SEQ ID NO: 411405 - RNA, 32 nt, Homo Sapiens
gccuguucugauuaauaaaggaucgugaaaaa

SEQ ID NO: 411406 - RNA, 32 nt, Homo Sapiens
ugauagucggagcuuauauacugugacuucug

SEQ ID NO: 411407 - RNA, 32 nt, Homo Sapiens
uugauaauccaaagcgaucaugucaguuggcc

SEQ ID NO: 411408 - RNA, 32 nt, Homo Sapiens
ucccacccacuaagcacugugcauguaaacag

SEQ ID NO: 411409 - RNA, 32 nt, Homo Sapiens
uauucauauaaaaauuaccuaaagcaaaguaa

SEQ ID NO: 411410 - RNA, 32 nt, Homo Sapiens
gaucagacuccggaguuuggcccgggagcugg

SEQ ID NO: 411411 - RNA, 32 nt, Homo Sapiens
cacucaaacuugcucuucaacucuguauacaa

SEQ ID NO: 411412 - RNA, 32 nt, Homo Sapiens
gugcgggccgcccaggcccacuccagcuggcu

SEQ ID NO: 411413 - RNA, 32 nt, Homo Sapiens
agacuugaaaauaaaguauaaaacauuuccaa

SEQ ID NO: 411414 - RNA, 32 nt, Homo Sapiens
gcagcaaagucuucaagaagugcaauggcuac

SEQ ID NO: 411415 - RNA, 32 nt, Homo Sapiens
ccagcccgccgcgcccgcaccucgcgguccuu

SEQ ID NO: 411416 - RNA, 32 nt, Homo Sapiens
ucccugagucccgggcgggcugcauucgucgg

SEQ ID NO: 411417 - RNA, 32 nt, Homo Sapiens
uccugguuugggggaagaaaaacaacggcccu

SEQ ID NO: 411418 - RNA, 32 nt, Homo Sapiens
gggggcugcugcggccggcggucucgggaaaa

SEQ ID NO: 411419 - RNA, 32 nt, Homo Sapiens
caggcccgucucccggcccguggcagucgggg

SEQ ID NO: 411420 - RNA, 32 nt, Homo Sapiens
gauuuaauguuauucccuuuuuagucacugug

SEQ ID NO: 411421 - RNA, 32 nt, Homo Sapiens
ugccugcuuccacuucgccuucugccaugacu

SEQ ID NO: 411422 - RNA, 32 nt, Homo Sapiens
gggcgaucuccaagcggcgaucucuaagcgcu

SEQ ID NO: 411423 - RNA, 32 nt, Homo Sapiens
ccucugagaagcugauuugaaaaggaauguuu

SEQ ID NO: 411424 - RNA, 32 nt, Homo Sapiens
caucugugauucccuccugcuacucuguuccu

SEQ ID NO: 411425 - RNA, 32 nt, Homo Sapiens
ggucgccgccgggagaagcgugaggggacaga

SEQ ID NO: 411426 - RNA, 32 nt, Homo Sapiens
gggguuguggggggcgcagcauccacgccuug

SEQ ID NO: 411427 - RNA, 32 nt, Homo Sapiens
aaaggggagggauucuucugcaaccaagaggc

SEQ ID NO: 411428 - RNA, 32 nt, Homo Sapiens
uuuuaaacugguuuuuuauaaugaaaauauac

SEQ ID NO: 411429 - RNA, 32 nt, Homo Sapiens
ucaggcacuggcaggggcuggugcggccccac

SEQ ID NO: 411430 - RNA, 32 nt, Homo Sapiens
acugcagacauucugaagcuaacacugcucaa

SEQ ID NO: 411431 - RNA, 32 nt, Homo Sapiens
gggaaggaccucugggcaaaaaguucccaggc

SEQ ID NO: 411432 - RNA, 30 nt, Homo Sapiens
uguggaggagguggcuuccagcagggugcu

SEQ ID NO: 411433 - RNA, 32 nt, Homo Sapiens
ccucuccuagcuggagcucuccugcuugccac

SEQ ID NO: 411434 - RNA, 32 nt, Homo Sapiens
agcuucggggcccuggccgccggccucccagc

SEQ ID NO: 411435 - RNA, 32 nt, Homo Sapiens
gaauacacguucuugaaaaauguuguuaaucu

SEQ ID NO: 411436 - RNA, 32 nt, Homo Sapiens
guucccgccccaccggggcccgggcgagcaug

SEQ ID NO: 411437 - RNA, 32 nt, Homo Sapiens
gcccuguuccccacccuaccucagcugggguc

SEQ ID NO: 411438 - RNA, 32 nt, Homo Sapiens
cccgccggccucagcacagcccggcccggagc

SEQ ID NO: 411439 - RNA, 32 nt, Homo Sapiens
ugaggcaaaaauuuauuuuuauuucuauagug

SEQ ID NO: 411440 - RNA, 32 nt, Homo Sapiens
gacagcugacuucuagagugagcauucuaaga

SEQ ID NO: 411441 - RNA, 32 nt, Homo Sapiens
agcuggucucaaacuccugaccucaggugauc

SEQ ID NO: 411442 - RNA, 32 nt, Homo Sapiens
cuucugagcagcgggcggcugcugcggcgccu

SEQ ID NO: 411443 - RNA, 32 nt, Homo Sapiens
uggggaaggugauuugugggagacucuagugu

SEQ ID NO: 411444 - RNA, 32 nt, Homo Sapiens
ccaaaaaagagauuuauuuaugaaauauuuaa

SEQ ID NO: 411445 - RNA, 32 nt, Homo Sapiens
uucucugaaauauuuagaagugcuaauuucug

SEQ ID NO: 411446 - RNA, 32 nt, Homo Sapiens
cauggguucauuucauuuuuguuuuuuguguu

SEQ ID NO: 411447 - RNA, 32 nt, Homo Sapiens
cauccccucacagcugucuuuggaccuaauaa

SEQ ID NO: 411448 - RNA, 32 nt, Homo Sapiens
aggcgguugggguucugacagcugcgcgcgau

SEQ ID NO: 411449 - RNA, 32 nt, Homo Sapiens
uagauaacagaaaagacugagagaggacagag

SEQ ID NO: 411450 - RNA, 32 nt, Homo Sapiens
ucacucuagaggaggauggcacgagggcagug

SEQ ID NO: 411451 - RNA, 32 nt, Homo Sapiens
gcaacauagcaagaucccaucuacacacaaaa

SEQ ID NO: 411452 - RNA, 32 nt, Homo Sapiens
uuucucaagaauaagucccuuuuuguaugugu

SEQ ID NO: 411453 - RNA, 32 nt, Homo Sapiens
cacuuuuggaaucccugcagaaugggugggag

SEQ ID NO: 411454 - RNA, 32 nt, Homo Sapiens
caagcacucccccaccaacgggugcaucacag

SEQ ID NO: 411455 - RNA, 32 nt, Homo Sapiens
gaaucgcccucccaugggaaucccagcacucc

SEQ ID NO: 411456 - RNA, 32 nt, Homo Sapiens
ucagcuuaucuaaaccuaaugaaauuccuuuu

SEQ ID NO: 411457 - RNA, 32 nt, Homo Sapiens
uccacagagagggaagggccgaggggagaggg

SEQ ID NO: 411458 - RNA, 32 nt, Homo Sapiens
agaaugugggaaggccuuuagcacuagcucac

SEQ ID NO: 411459 - RNA, 32 nt, Homo Sapiens
cguugguggauacuuaccuugguuccaugacc

SEQ ID NO: 411460 - RNA, 32 nt, Homo Sapiens
uuuaaaugucauuuaaguguagauuaugccau

SEQ ID NO: 411461 - RNA, 32 nt, Homo Sapiens
ccgccuucauccccggccugucuccugagccc

SEQ ID NO: 411462 - RNA, 32 nt, Homo Sapiens
cuaaagccugacugucacgugccuugcuugau

SEQ ID NO: 411463 - RNA, 32 nt, Homo Sapiens
auuguuuagugucuauuuauucuuggguggcc

SEQ ID NO: 411464 - RNA, 32 nt, Homo Sapiens
auucauucccccucuuccuaagagaaacucaa

SEQ ID NO: 411465 - RNA, 32 nt, Homo Sapiens
aauuguuuucuuucuucaauaauaaauuaccc

SEQ ID NO: 411466 - RNA, 32 nt, Homo Sapiens
aaaauaggaacagaguucuuguccuuuagucc

SEQ ID NO: 411467 - RNA, 32 nt, Homo Sapiens
ccgauuuccgcggaaccgagucccgcgccgcg

SEQ ID NO: 411468 - RNA, 32 nt, Homo Sapiens
guuugcuauuuuuucucccaguuucuuaugua

SEQ ID NO: 411469 - RNA, 32 nt, Homo Sapiens
cuccuaaugcucucccucccccagccccccac

SEQ ID NO: 411470 - RNA, 32 nt, Homo Sapiens
aagauagacucuucuuuuguaaaguaaauaaa

SEQ ID NO: 411471 - RNA, 32 nt, Homo Sapiens
uuaacuuuuugcguguucugcuucuguaaaaa

SEQ ID NO: 411472 - RNA, 32 nt, Homo Sapiens
cccugcacugaggcagauuggugcuguucgca

SEQ ID NO: 411473 - RNA, 32 nt, Homo Sapiens
acuggcggcaaggcccuggaccuggccgcccu

SEQ ID NO: 411474 - RNA, 32 nt, Homo Sapiens
gacaaaaacuaaauaugcuucucaaaccucua

SEQ ID NO: 411475 - RNA, 32 nt, Homo Sapiens
auuuuuggaaagggcugcuaugauugagaaaa

SEQ ID NO: 411476 - RNA, 32 nt, Homo Sapiens
gagcaagcugucaguucucacccccaccgugu

SEQ ID NO: 411477 - RNA, 32 nt, Homo Sapiens
uggcagugggagacaccgcgcguggcgugggu

SEQ ID NO: 411478 - RNA, 32 nt, Homo Sapiens
uggauugaugagacuccuccaguggaccagcc

SEQ ID NO: 411479 - RNA, 32 nt, Homo Sapiens
gacccugcccucugccacccaggcugcgucca

SEQ ID NO: 411480 - RNA, 32 nt, Homo Sapiens
caccugagccccacagaaaguugugcauaaaa

SEQ ID NO: 411481 - RNA, 32 nt, Homo Sapiens
ucagaacugugcuacccaggagggcagccucc

SEQ ID NO: 411482 - RNA, 32 nt, Homo Sapiens
cuugaaaucgcauuauuuugaaugugaaggga

SEQ ID NO: 411483 - RNA, 32 nt, Homo Sapiens
gcucaugaugacagaacacaucuuggaaagac

SEQ ID NO: 411484 - RNA, 32 nt, Homo Sapiens
aaccgcauccuuaugaauagguacucuuagga

SEQ ID NO: 411485 - RNA, 32 nt, Homo Sapiens
ggacucuccuugacaagggcugagcucucggg

SEQ ID NO: 411486 - RNA, 32 nt, Homo Sapiens
ggaugugccgugggcagugccuuccuccagcc

SEQ ID NO: 411487 - RNA, 32 nt, Homo Sapiens
gagaggggaguugugagauaccacguggcugu

SEQ ID NO: 411488 - RNA, 29 nt, Homo Sapiens
uuucucuaguuuacuuauuuucuacuuua

SEQ ID NO: 411489 - RNA, 32 nt, Homo Sapiens
ugucuuuccaugaaacgaaguugagaaaauga

SEQ ID NO: 411490 - RNA, 32 nt, Homo Sapiens
uuuuaauuuggcuuuucuuauuuaaaauucca

SEQ ID NO: 411491 - RNA, 32 nt, Homo Sapiens
gaccccaacgaccuuccugcugggggcagggg

SEQ ID NO: 411492 - RNA, 32 nt, Homo Sapiens
caacaauuuuuggggaaauacuggcaaaagac

SEQ ID NO: 411493 - RNA, 32 nt, Homo Sapiens
cacccgcaccuccucacccauccagccugacc

SEQ ID NO: 411494 - RNA, 32 nt, Homo Sapiens
acuggaugaaaugaaauuguucacuugaggga

SEQ ID NO: 411495 - RNA, 27 nt, Homo Sapiens
uccuucuucauucugcaguuggugcca

SEQ ID NO: 411496 - RNA, 32 nt, Homo Sapiens
uauauuuugugauucauccugucuauuaauua

SEQ ID NO: 411497 - RNA, 29 nt, Homo Sapiens
accugcauuaaaccuauuuuuuuaaugug

SEQ ID NO: 411498 - RNA, 32 nt, Homo Sapiens
uuccaagcaaugcauuaccucccccaggagga

SEQ ID NO: 411499 - RNA, 32 nt, Homo Sapiens
uugugugcacaaaauugcuuuuuccaccucgg

SEQ ID NO: 411500 - RNA, 32 nt, Homo Sapiens
cugaccucccugggaccccggcgucugaggcu

SEQ ID NO: 411501 - RNA, 32 nt, Homo Sapiens
aagcagggucuaaagaaauuaccaaccaacuu

SEQ ID NO: 411502 - RNA, 32 nt, Homo Sapiens
agcgcccgaggaaacgagggccugcuggcuga

SEQ ID NO: 411503 - RNA, 32 nt, Homo Sapiens
gggcacauuccuugccugcacaaacucaccau

SEQ ID NO: 411504 - RNA, 32 nt, Homo Sapiens
auuaguguuuagaguccuuucauuuuaagauu

SEQ ID NO: 411505 - RNA, 32 nt, Homo Sapiens
aucccggcgcaucaguucugacuugccuuacc

SEQ ID NO: 411506 - RNA, 32 nt, Homo Sapiens
aauuugcagacccagccccuccccuacuuuuu

SEQ ID NO: 411507 - RNA, 32 nt, Homo Sapiens
ccgugcugcagucgggcacgccgcgggcccgg

SEQ ID NO: 411508 - RNA, 32 nt, Homo Sapiens
caguccauagaguauuagcuacagaaaccuuu

SEQ ID NO: 411509 - RNA, 32 nt, Homo Sapiens
caaguguggucuuuuucuuuccuccuaauguu

SEQ ID NO: 411510 - RNA, 32 nt, Homo Sapiens
ccuuccugcagaaacaguuucuccuccucccc

SEQ ID NO: 411511 - RNA, 32 nt, Homo Sapiens
gauccagccauccuccacggcaagcucagacc

SEQ ID NO: 411512 - RNA, 29 nt, Homo Sapiens
cagggagcaguguucagaggcaaagcagc

SEQ ID NO: 411513 - RNA, 32 nt, Homo Sapiens
accacuguauuuaauacuguaccuuguucuca

SEQ ID NO: 411514 - RNA, 32 nt, Homo Sapiens
aaguuucgguaaugcauaguaacaacuguagu

SEQ ID NO: 411515 - RNA, 32 nt, Homo Sapiens
aucucacacuaacaggcaaauucagaugcugg

SEQ ID NO: 411516 - RNA, 32 nt, Homo Sapiens
uuucuaaauccuugauuuaggaucucaguuaa

SEQ ID NO: 411517 - RNA, 32 nt, Homo Sapiens
uuaucuuguaauuuauauuugaaaugaacaug

SEQ ID NO: 411518 - RNA, 32 nt, Homo Sapiens
ccgcagugaggaggaauguaccacugaggcag

SEQ ID NO: 411519 - RNA, 32 nt, Homo Sapiens
gcgcugcggccggggacccgcugcugagauag

SEQ ID NO: 411520 - RNA, 32 nt, Homo Sapiens
gcguucuccgcggagucugugcuacaccgugg

SEQ ID NO: 411521 - RNA, 32 nt, Homo Sapiens
ucuuucagaagcugggcugggaugagaauuuu

SEQ ID NO: 411522 - RNA, 32 nt, Homo Sapiens
agagaguuugugggggcgcggucgaagggagg

SEQ ID NO: 411523 - RNA, 32 nt, Homo Sapiens
aaaauuggugaaaucugaguaagggcuguagu

SEQ ID NO: 411524 - RNA, 32 nt, Homo Sapiens
uuucuuuaaaagacaagcauuucaguaagcua

SEQ ID NO: 411525 - RNA, 32 nt, Homo Sapiens
guuaucaccuguccuuaaauagauaaaagaau

SEQ ID NO: 411526 - RNA, 32 nt, Homo Sapiens
gggccauccagccgugccccagccuggacccc

SEQ ID NO: 411527 - RNA, 32 nt, Homo Sapiens
gugccauuccuguccuuaaggcacagucucau

SEQ ID NO: 411528 - RNA, 32 nt, Homo Sapiens
cguggaagugcuucuuuuaaugauuuuccagu

SEQ ID NO: 411529 - RNA, 32 nt, Homo Sapiens
uacucaaaaugugcaaggaagaauaauggaag

SEQ ID NO: 411530 - RNA, 32 nt, Homo Sapiens
uuacaggugugagccacugcacccgaccgaua

SEQ ID NO: 411531 - RNA, 32 nt, Homo Sapiens
auauaguuugucauccugugaaaaccaccucg

SEQ ID NO: 411532 - RNA, 32 nt, Homo Sapiens
caaggaugucuccagacacugccccgugucca

SEQ ID NO: 411533 - RNA, 31 nt, Homo Sapiens
ucugcccagccuggcuuaccaagggcuaccu

SEQ ID NO: 411534 - RNA, 32 nt, Homo Sapiens
uuaacaucuugagaaauuugggacauaaaguu

SEQ ID NO: 411535 - RNA, 32 nt, Homo Sapiens
cuccgccucccgcuccgggcccucgaaccagc

SEQ ID NO: 411536 - RNA, 31 nt, Homo Sapiens
aucuugauuagauuagauuagauuagauugu

SEQ ID NO: 411537 - RNA, 32 nt, Homo Sapiens
aaguggggugagaggagaaaggaaauguuggc

SEQ ID NO: 411538 - RNA, 30 nt, Homo Sapiens
gcugaggaagagcuugaugaucuugacucc

SEQ ID NO: 411539 - RNA, 32 nt, Homo Sapiens
uuugcaaaaaucaauuauuuaucaugaguaua

SEQ ID NO: 411540 - RNA, 31 nt, Homo Sapiens
cagcaaacaaagaaaacaugguauuuugaaa

SEQ ID NO: 411541 - RNA, 32 nt, Homo Sapiens
caagcucccacucaccucaucaucacugagau

SEQ ID NO: 411542 - RNA, 32 nt, Homo Sapiens
aaagcauuaaaauaaaugauccuagagcaugu

SEQ ID NO: 411543 - RNA, 32 nt, Homo Sapiens
agcccucgccccacagggacgccugagcaagg

SEQ ID NO: 411544 - RNA, 32 nt, Homo Sapiens
ggagaacuaauagacacaggagugacagggac

SEQ ID NO: 411545 - RNA, 32 nt, Homo Sapiens
uuguuacagcuaugcacuguaaaugcagccuu

SEQ ID NO: 411546 - RNA, 32 nt, Homo Sapiens
ccaguuuuucccuuuuggcggccucuccaggc

SEQ ID NO: 411547 - RNA, 32 nt, Homo Sapiens
cgcauuuggaauguggcucugccacacagcuc

SEQ ID NO: 411548 - RNA, 32 nt, Homo Sapiens
aacuggagggugggcuggggagggguggauuu

SEQ ID NO: 411549 - RNA, 32 nt, Homo Sapiens
uuggagucaucucugagagcaaauguauguuc

SEQ ID NO: 411550 - RNA, 32 nt, Homo Sapiens
uucauaauuucugcucagauaauugaauaguu

SEQ ID NO: 411551 - RNA, 32 nt, Homo Sapiens
auugcuuugcuacagcucaguauugccuggcc

SEQ ID NO: 411552 - RNA, 32 nt, Homo Sapiens
ugauacagggaagagcugggagagacacagga

SEQ ID NO: 411553 - RNA, 32 nt, Homo Sapiens
caaacugacagggacugcuuugaaagacagua

SEQ ID NO: 411554 - RNA, 32 nt, Homo Sapiens
acuggcaguguggggcagcugcaauuguaucu

SEQ ID NO: 411555 - RNA, 32 nt, Homo Sapiens
auauucuauggcuguuuguaauuucucuuuuu

SEQ ID NO: 411556 - RNA, 32 nt, Homo Sapiens
cuccgccugggcccgcgcgacaggagcgcggu

SEQ ID NO: 411557 - RNA, 32 nt, Homo Sapiens
gccagucccagaucacacaucaucaucgaagu

SEQ ID NO: 411558 - RNA, 32 nt, Homo Sapiens
ggcgagugacgcgcaaggaacggagcagggga

SEQ ID NO: 411559 - RNA, 32 nt, Homo Sapiens
gacaauagauaugaacuguauuuuaaaucaua

SEQ ID NO: 411560 - RNA, 27 nt, Homo Sapiens
ggaugucccuccuccuucuccucuugc

SEQ ID NO: 411561 - RNA, 32 nt, Homo Sapiens
gaacagggauuuaauaccuuuuuuaugcuuau

SEQ ID NO: 411562 - RNA, 32 nt, Homo Sapiens
aucaaagauauguuuaguuuagacuuuauacc

SEQ ID NO: 411563 - RNA, 32 nt, Homo Sapiens
auuguuuuccagaagccuccccugccuggcug

SEQ ID NO: 411564 - RNA, 32 nt, Homo Sapiens
acaaaugguggcauacuauacaugcuguucug

SEQ ID NO: 411565 - RNA, 32 nt, Homo Sapiens
uaugagugaugaugaggccuucaucuacugac

SEQ ID NO: 411566 - RNA, 32 nt, Homo Sapiens
ccaagaggacagaauuacaugaaugacagugc

SEQ ID NO: 411567 - RNA, 32 nt, Homo Sapiens
cacaccuaaucccagcacuuugggaggcugag

SEQ ID NO: 411568 - RNA, 32 nt, Homo Sapiens
ugagagugccggccgcggggcccucgcagcuu

SEQ ID NO: 411569 - RNA, 32 nt, Homo Sapiens
uauuugcauuuacgaaugaucuucccaucccu

SEQ ID NO: 411570 - RNA, 32 nt, Homo Sapiens
cuccaucccagcauagagaauggggacucccu

SEQ ID NO: 411571 - RNA, 32 nt, Homo Sapiens
aagaucacccuaaauuuacucaucucucuagu

SEQ ID NO: 411572 - RNA, 32 nt, Homo Sapiens
cuguuccccguccugagccgccacuuccagcg

SEQ ID NO: 411573 - RNA, 32 nt, Homo Sapiens
gucugcugaauaaauuuggcuuuuguuuugga

SEQ ID NO: 411574 - RNA, 32 nt, Homo Sapiens
gcugcccuacccacccacccaccuuuguagag

SEQ ID NO: 411575 - RNA, 32 nt, Homo Sapiens
uuugcauauguauagaggauaauuauauuuaa

SEQ ID NO: 411576 - RNA, 32 nt, Homo Sapiens
gacuuuugaaagauugaaauuuuuguuacagu

SEQ ID NO: 411577 - RNA, 32 nt, Homo Sapiens
uauaaugccuccuuaaggcaugauggagucac

SEQ ID NO: 411578 - RNA, 31 nt, Homo Sapiens
ccccuagcccggccccugccccacgcgcagg

SEQ ID NO: 411579 - RNA, 32 nt, Homo Sapiens
aaggauuaacaacaaggauuaauagcauugcu

SEQ ID NO: 411580 - RNA, 32 nt, Homo Sapiens
gcccagucaaguugaccuguaaaauuaaccau

SEQ ID NO: 411581 - RNA, 32 nt, Homo Sapiens
gcugggcgcuccaugauuuagccugaggcucu

SEQ ID NO: 411582 - RNA, 32 nt, Homo Sapiens
cccgcagaguccggcugccgcgcaucguccgc

SEQ ID NO: 411583 - RNA, 32 nt, Homo Sapiens
uauuauaaggaauuggcuuacacaauaaugga

SEQ ID NO: 411584 - RNA, 32 nt, Homo Sapiens
ggagguggggcggcccgggccccuggacucua

SEQ ID NO: 411585 - RNA, 32 nt, Homo Sapiens
uacaugcaguggucaucccggucgcucccaca

SEQ ID NO: 411586 - RNA, 32 nt, Homo Sapiens
caugggaucugccugcaaaugcuguuuagguc

SEQ ID NO: 411587 - RNA, 32 nt, Homo Sapiens
uguaauuauuugcugcugcugcugugcucugu

SEQ ID NO: 411588 - RNA, 32 nt, Homo Sapiens
caaagacaagguggcuuuggccgauguccacc

SEQ ID NO: 411589 - RNA, 32 nt, Homo Sapiens
aaggguaauauuuuaauaguagucaauaaucu

SEQ ID NO: 411590 - RNA, 32 nt, Homo Sapiens
ugagcauuuaagaagcauccucugccaagacc

SEQ ID NO: 411591 - RNA, 31 nt, Homo Sapiens
gggcagcugccgggcgagucagcggaguagc

SEQ ID NO: 411592 - RNA, 32 nt, Homo Sapiens
cacagggagcuccaccuucucuggucuucagu

SEQ ID NO: 411593 - RNA, 32 nt, Homo Sapiens
acagacuuaacagcccagcacuucauacgauu

SEQ ID NO: 411594 - RNA, 32 nt, Homo Sapiens
uccuuuagcuaguggauuuaauuuuguugugc

SEQ ID NO: 411595 - RNA, 32 nt, Homo Sapiens
ccuaugucccuucucaugccuuucccuccaac

SEQ ID NO: 411596 - RNA, 32 nt, Homo Sapiens
ggcccccugcccucucccccacuuccccccgg

SEQ ID NO: 411597 - RNA, 32 nt, Homo Sapiens
ugagggaaccggaaggaaagugcuagguguuu

SEQ ID NO: 411598 - RNA, 32 nt, Homo Sapiens
cugaauucuucaaugacagggaugccaacacc

SEQ ID NO: 411599 - RNA, 32 nt, Homo Sapiens
gcggcccgccucggucaccgcggccaggccca

SEQ ID NO: 411600 - RNA, 32 nt, Homo Sapiens
agaugcauuauuaggucauacuggcuagaaug

SEQ ID NO: 411601 - RNA, 32 nt, Homo Sapiens
agagccuccuuccccuccguccagccagcaag

SEQ ID NO: 411602 - RNA, 32 nt, Homo Sapiens
gccucacuuccuugaccuuguuuuccucucuu

SEQ ID NO: 411603 - RNA, 32 nt, Homo Sapiens
aaaagucagacugcugggacuggccagguuuc

SEQ ID NO: 411604 - RNA, 32 nt, Homo Sapiens
gcauggcuauaagacaacuauauuuuauuaua

SEQ ID NO: 411605 - RNA, 31 nt, Homo Sapiens
agcuacccgagaacuaccugaguucugugca

SEQ ID NO: 411606 - RNA, 32 nt, Homo Sapiens
ggcuguugauucaucagagucuagcaggagga

SEQ ID NO: 411607 - RNA, 32 nt, Homo Sapiens
uguuuguaaaauggauagcugggguuggcaga

SEQ ID NO: 411608 - RNA, 32 nt, Homo Sapiens
cuccuuaaaucccacagucccccagacccucc

SEQ ID NO: 411609 - RNA, 32 nt, Homo Sapiens
uauuuugacaacauuacuuggguaauaucuau

SEQ ID NO: 411610 - RNA, 32 nt, Homo Sapiens
agcucaaaucucuccuuccuucucuuacaagg

SEQ ID NO: 411611 - RNA, 32 nt, Homo Sapiens
ugcuucauucuuuuuucuuucuuuuugucuga

SEQ ID NO: 411612 - RNA, 32 nt, Homo Sapiens
uguuuuuaagauucgcugaugaacuaguagga

SEQ ID NO: 411613 - RNA, 32 nt, Homo Sapiens
cauugggccgcgaugcaacagcagcagcagga

SEQ ID NO: 411614 - RNA, 32 nt, Homo Sapiens
gcuucuucagacucagcccaaauuaggaagug

SEQ ID NO: 411615 - RNA, 32 nt, Homo Sapiens
agccuccccccuccccuccguggguuccugcg

SEQ ID NO: 411616 - RNA, 32 nt, Homo Sapiens
aauccaagguguaggcccggcgcggggcgcgg

SEQ ID NO: 411617 - RNA, 32 nt, Homo Sapiens
cggacucgcccaagugugacugcuaccuugac

SEQ ID NO: 411618 - RNA, 32 nt, Homo Sapiens
ccuggcaggaccagagccuuaccuuucccagu

SEQ ID NO: 411619 - RNA, 32 nt, Homo Sapiens
cuuuuccuuuauucuuuucauagucuucuuug

SEQ ID NO: 411620 - RNA, 32 nt, Homo Sapiens
gacccugacuuucccuaaggacuuccacuuug

SEQ ID NO: 411621 - RNA, 32 nt, Homo Sapiens
aggcgggaggccggcugugcugcaggaaccca

SEQ ID NO: 411622 - RNA, 30 nt, Homo Sapiens
aauccugucugugcucugauucucccugau

SEQ ID NO: 411623 - RNA, 32 nt, Homo Sapiens
augcucuguggcuacauauacacacacguauu

SEQ ID NO: 411624 - RNA, 32 nt, Homo Sapiens
auguucccggagcagaagacgucuccccuucu

SEQ ID NO: 411625 - RNA, 32 nt, Homo Sapiens
gcuuggacagagcucaggggcucagagcagag

SEQ ID NO: 411626 - RNA, 32 nt, Homo Sapiens
agggauggcagcguccugggaaugucauuucu

SEQ ID NO: 411627 - RNA, 32 nt, Homo Sapiens
gggagaugggcaauugacagggaugcaaucca

SEQ ID NO: 411628 - RNA, 32 nt, Homo Sapiens
gauggagucucgcucugucacccaggcuguag

SEQ ID NO: 411629 - RNA, 32 nt, Homo Sapiens
uauuuuugacauagccagcuuggaccuggaac

SEQ ID NO: 411630 - RNA, 32 nt, Homo Sapiens
ggcugcuugagacgugccgccgugccacaccu

SEQ ID NO: 411631 - RNA, 32 nt, Homo Sapiens
agcuuaccugugcaauguguccaugccuucau

SEQ ID NO: 411632 - RNA, 32 nt, Homo Sapiens
ugcucccuugguuuuucuuaaucuuuguguau

SEQ ID NO: 411633 - RNA, 32 nt, Homo Sapiens
ugcauuuuugaaaaauaauugaugcuucuugu

SEQ ID NO: 411634 - RNA, 32 nt, Homo Sapiens
aggaagcaaaugccucaacauuucauagaagg

SEQ ID NO: 411635 - RNA, 32 nt, Homo Sapiens
ccagcauucugauauagcacaaaaagcuauuu

SEQ ID NO: 411636 - RNA, 32 nt, Homo Sapiens
uaguuggccaacccuguuuagagcagucaaaa

SEQ ID NO: 411637 - RNA, 32 nt, Homo Sapiens
cauuaugaaacacuuaaguuccuuucagcuca

SEQ ID NO: 411638 - RNA, 32 nt, Homo Sapiens
ggcgcuggacagaggggcaggggagugccaag

SEQ ID NO: 411639 - RNA, 32 nt, Homo Sapiens
ggaacaccugaacagggucaaaauggucagcu

SEQ ID NO: 411640 - RNA, 32 nt, Homo Sapiens
auguugaaaugaauuuuuguaugugccagguu

SEQ ID NO: 411641 - RNA, 32 nt, Homo Sapiens
caguacugcgcgcgcccugcggcuguccgggg

SEQ ID NO: 411642 - RNA, 32 nt, Homo Sapiens
gcaauuucuuugacuuucuuuuaagggcagaa

SEQ ID NO: 411643 - RNA, 32 nt, Homo Sapiens
aaacaaauauuuauuucuuucuuuuacgggga

SEQ ID NO: 411644 - RNA, 32 nt, Homo Sapiens
ugguacuuagaggagaucuuuccagaaaagua

SEQ ID NO: 411645 - RNA, 32 nt, Homo Sapiens
uggaggggcaguggagaucaggagugacagau

SEQ ID NO: 411646 - RNA, 32 nt, Homo Sapiens
ugcugccuacgcgccauggagcaucgcaucgu

SEQ ID NO: 411647 - RNA, 31 nt, Homo Sapiens
aaguuguaaaaguagcauggauauguugaaa

SEQ ID NO: 411648 - RNA, 32 nt, Homo Sapiens
aggcccaggaucugcucugugccgguccucug

SEQ ID NO: 411649 - RNA, 32 nt, Homo Sapiens
ggggaagaggggcuggcucucagucugcgccu

SEQ ID NO: 411650 - RNA, 32 nt, Homo Sapiens
cccucacugcugugucccuauugccuucugca

SEQ ID NO: 411651 - RNA, 32 nt, Homo Sapiens
caacccauugccauccuucaaacaucugaccu

SEQ ID NO: 411652 - RNA, 32 nt, Homo Sapiens
uuuccaugccacgagaucaacacacacuccca

SEQ ID NO: 411653 - RNA, 32 nt, Homo Sapiens
ccugugucuuccaugauuuggaggugguggga

SEQ ID NO: 411654 - RNA, 32 nt, Homo Sapiens
ccggugcucaucuccgcccccggguccgcccc

SEQ ID NO: 411655 - RNA, 32 nt, Homo Sapiens
uuagaaaugcaaauuaaaacauaauuauuuga

SEQ ID NO: 411656 - RNA, 32 nt, Homo Sapiens
agucaaugauaaaaacagauguauuauggcaa

SEQ ID NO: 411657 - RNA, 32 nt, Homo Sapiens
uuccuguuaacuuuauauuacaaaauccguuc

SEQ ID NO: 411658 - RNA, 32 nt, Homo Sapiens
ccucccacugauuccuuugaccaucuggcuua

SEQ ID NO: 411659 - RNA, 32 nt, Homo Sapiens
uucagugggugcagaccugcaagaucauauuc

SEQ ID NO: 411660 - RNA, 32 nt, Homo Sapiens
ucggggcugcggcucacagaagucuaaccugc

SEQ ID NO: 411661 - RNA, 32 nt, Homo Sapiens
uuucacacagaaaccaaggacaacaagauaca

SEQ ID NO: 411662 - RNA, 32 nt, Homo Sapiens
aaaaacggacauuuggcuaggugucucucacg

SEQ ID NO: 411663 - RNA, 32 nt, Homo Sapiens
agguugcgguuugcucuuccaguguucggggg

SEQ ID NO: 411664 - RNA, 32 nt, Homo Sapiens
ugccauauuuaaaauaauuugucuaacaguag

SEQ ID NO: 411665 - RNA, 32 nt, Homo Sapiens
auguuggagccgucugcaaaguguccccggca

SEQ ID NO: 411666 - RNA, 32 nt, Homo Sapiens
guucggggcacuugggucccacagucuggucc

SEQ ID NO: 411667 - RNA, 32 nt, Homo Sapiens
agaagcaaaaaaggcugccaaaauauuaagag

SEQ ID NO: 411668 - RNA, 32 nt, Homo Sapiens
aagguuucugaaucucucugguagauuaacua

SEQ ID NO: 411669 - RNA, 32 nt, Homo Sapiens
cuuuuaagugaacacuuuuuccccauugagca

SEQ ID NO: 411670 - RNA, 32 nt, Homo Sapiens
cuccauugauagacgaucauaguucucuugaa

SEQ ID NO: 411671 - RNA, 32 nt, Homo Sapiens
acucccuuaucacuaacccccauccaaauggc

SEQ ID NO: 411672 - RNA, 32 nt, Homo Sapiens
cugcucuucagacaccuuguggcugccccaac

SEQ ID NO: 411673 - RNA, 27 nt, Homo Sapiens
ccccaguccuucuggaggccugggcug

SEQ ID NO: 411674 - RNA, 32 nt, Homo Sapiens
aaacuuaaacauugaauugcccgaacuucuuu

SEQ ID NO: 411675 - RNA, 32 nt, Homo Sapiens
ccggucccgccucccuugacgccccgccccgc

SEQ ID NO: 411676 - RNA, 32 nt, Homo Sapiens
ugugaauguaaaccucucuuuaagauaaaagc

SEQ ID NO: 411677 - RNA, 32 nt, Homo Sapiens
cugguggccucugaagacccaaaucguccucc

SEQ ID NO: 411678 - RNA, 32 nt, Homo Sapiens
aaaggguggguggucauuugaccccagaaggc

SEQ ID NO: 411679 - RNA, 32 nt, Homo Sapiens
caccacacuaaaucuuuaauuuuuugggggga

SEQ ID NO: 411680 - RNA, 32 nt, Homo Sapiens
guccuaucauucagagauaaccacuguauguu

SEQ ID NO: 411681 - RNA, 32 nt, Homo Sapiens
cuuaggccccucaggacccagggaaugccagg

SEQ ID NO: 411682 - RNA, 32 nt, Homo Sapiens
uacaugguaugugaaagcauuucuggcacugc

SEQ ID NO: 411683 - RNA, 32 nt, Homo Sapiens
ggccaccgcucccagaaaugcaugcgaccgau

SEQ ID NO: 411684 - RNA, 32 nt, Homo Sapiens
ccauaagcuuuauuccuucucucuaccugcca

SEQ ID NO: 411685 - RNA, 32 nt, Homo Sapiens
uacauguuauuuacaucauuucucauccucac

SEQ ID NO: 411686 - RNA, 32 nt, Homo Sapiens
cuccuuucuucuucuuuuucuucuccuccucc

SEQ ID NO: 411687 - RNA, 32 nt, Homo Sapiens
cugccugcuggcucucccccagccccacaucc

SEQ ID NO: 411688 - RNA, 32 nt, Homo Sapiens
aagcacaggccuauuucuuucucaagacggaa

SEQ ID NO: 411689 - RNA, 32 nt, Homo Sapiens
gcccauagaucuaauuacaaaagguauguagu

SEQ ID NO: 411690 - RNA, 32 nt, Homo Sapiens
cucuacaaaaauuuuuaaaaaaauaagccagg

SEQ ID NO: 411691 - RNA, 32 nt, Homo Sapiens
uagagcccaucccgcaccagcauuuuggaacc

SEQ ID NO: 411692 - RNA, 32 nt, Homo Sapiens
gccaacggccccagcuucucagcucgcuggau

SEQ ID NO: 411693 - RNA, 32 nt, Homo Sapiens
cucuacaaaaauuuuuuaaaaaauuagccagg

SEQ ID NO: 411694 - RNA, 32 nt, Homo Sapiens
uuuuaaaguggacuuauuaaaauuggaugcua

SEQ ID NO: 411695 - RNA, 32 nt, Homo Sapiens
uuuguuuggcuuucuuccauuguuguuuuugu

SEQ ID NO: 411696 - RNA, 32 nt, Homo Sapiens
cccgccgccggugccgaaccccuucggugcag

SEQ ID NO: 411697 - RNA, 32 nt, Homo Sapiens
ucucugguucucuggagcagaguucucugaau

SEQ ID NO: 411698 - RNA, 32 nt, Homo Sapiens
augcugguuuauuugcaaaaucaccaguauau

SEQ ID NO: 411699 - RNA, 32 nt, Homo Sapiens
cugucaucaccaguggccuugguccuuaaucc

SEQ ID NO: 411700 - RNA, 32 nt, Homo Sapiens
ccauguacccccagcccggcccggaccugagg

SEQ ID NO: 411701 - RNA, 32 nt, Homo Sapiens
gcccacugucugcuaccaggggcucacccucu

SEQ ID NO: 411702 - RNA, 32 nt, Homo Sapiens
uucacaaaaaggaagacaguuugcccacucuu

SEQ ID NO: 411703 - RNA, 32 nt, Homo Sapiens
uaaaggguaaaauauuaauguuuagaaugaca

SEQ ID NO: 411704 - RNA, 32 nt, Homo Sapiens
gccuuuaauuuucuuguuuguuugagcuuagg

SEQ ID NO: 411705 - RNA, 32 nt, Homo Sapiens
agccagcagaacugaagugugcugugacaagc

SEQ ID NO: 411706 - RNA, 32 nt, Homo Sapiens
gauuaaaguauuuuuaagucucaccaaaaagg

SEQ ID NO: 411707 - RNA, 32 nt, Homo Sapiens
aauaaacgaacucuccucuuguccuacaauga

SEQ ID NO: 411708 - RNA, 32 nt, Homo Sapiens
gguguauggggaccagagccugcaccgggagu

SEQ ID NO: 411709 - RNA, 32 nt, Homo Sapiens
cuguagguggccccccugguguagccauuagu

SEQ ID NO: 411710 - RNA, 32 nt, Homo Sapiens
ggggcaaagggaucgccggggagggggaccag

SEQ ID NO: 411711 - RNA, 30 nt, Homo Sapiens
uuauauuggaucaugggggaagcaaaugug

SEQ ID NO: 411712 - RNA, 32 nt, Homo Sapiens
aacccuugugccucccaguucuuccaaguguc

SEQ ID NO: 411713 - RNA, 32 nt, Homo Sapiens
ggaugacaaccugguaugggagccaggagucc

SEQ ID NO: 411714 - RNA, 32 nt, Homo Sapiens
cucuacaaagcacaacgaaaaacaacaaaugg

SEQ ID NO: 411715 - RNA, 32 nt, Homo Sapiens
aauguaaauagaauaauagcuuugaaauacaa

SEQ ID NO: 411716 - RNA, 32 nt, Homo Sapiens
auccuugucgcucguguccuucucaugcccgg

SEQ ID NO: 411717 - RNA, 32 nt, Homo Sapiens
aggcccacggucuccugggucccggccaccug

SEQ ID NO: 411718 - RNA, 32 nt, Homo Sapiens
uugcuugcagcuaggaggaccuugaagagaaa

SEQ ID NO: 411719 - RNA, 32 nt, Homo Sapiens
uauugucuuaggagcaucaucauggggucuag

SEQ ID NO: 411720 - RNA, 32 nt, Homo Sapiens
uuugaaagcaaaucauucuguauauaugcucu

SEQ ID NO: 411721 - RNA, 30 nt, Homo Sapiens
caguuuugguggaugggggaccuccacugg

SEQ ID NO: 411722 - RNA, 32 nt, Homo Sapiens
aucccucgccucccggccgccgccguugcgcu

SEQ ID NO: 411723 - RNA, 32 nt, Homo Sapiens
ccuguggugcggccucaaccacucccuggugc

SEQ ID NO: 411724 - RNA, 32 nt, Homo Sapiens
agagggaagaucugguauuuccuggccuaaau

SEQ ID NO: 411725 - RNA, 32 nt, Homo Sapiens
ucucccuccuucccagcccacccgggcagcag

SEQ ID NO: 411726 - RNA, 32 nt, Homo Sapiens
gauaggcaccugaauucucaccaacuucacag

SEQ ID NO: 411727 - RNA, 32 nt, Homo Sapiens
uuggucccuccagaaccaccccggcccccugc

SEQ ID NO: 411728 - RNA, 32 nt, Homo Sapiens
caugcucugcagugggccuguuuuguggaaga

SEQ ID NO: 411729 - RNA, 32 nt, Homo Sapiens
cagaaacaggagugggucuuguccuguugcag

SEQ ID NO: 411730 - RNA, 32 nt, Homo Sapiens
ccagguuuuuguguguuuuucuuuauacugca

SEQ ID NO: 411731 - RNA, 32 nt, Homo Sapiens
gcccacacuccgcgcgacuccaggcgcacgcc

SEQ ID NO: 411732 - RNA, 32 nt, Homo Sapiens
augaacucugguugcaaucccucccccuccca

SEQ ID NO: 411733 - RNA, 32 nt, Homo Sapiens
caugaguuaauuacaaaagagucauauuuaca

SEQ ID NO: 411734 - RNA, 32 nt, Homo Sapiens
uaugaauuacuauacauauacaugcauagaaa

SEQ ID NO: 411735 - RNA, 32 nt, Homo Sapiens
auuaauacaauuuuuucuuaauuucuuagacu

SEQ ID NO: 411736 - RNA, 32 nt, Homo Sapiens
cugucauagaagaaaccugggauacuuguaaa

SEQ ID NO: 411737 - RNA, 31 nt, Homo Sapiens
uugcaaaugggucccaaaggauauguuugga

SEQ ID NO: 411738 - RNA, 32 nt, Homo Sapiens
gcauaaaaauuuauguauugaaauauacuuaa

SEQ ID NO: 411739 - RNA, 32 nt, Homo Sapiens
caaaccaaccucaggcugaccuaggccgguaa

SEQ ID NO: 411740 - RNA, 32 nt, Homo Sapiens
accacuuuuuaaagcuagcugugucgaguuaa

SEQ ID NO: 411741 - RNA, 32 nt, Homo Sapiens
ugcacacacacacauaugcacacacacacaca

SEQ ID NO: 411742 - RNA, 32 nt, Homo Sapiens
cacacacacacacauacacacacacacacaca

SEQ ID NO: 411743 - RNA, 32 nt, Homo Sapiens
gggccagcacaagcuuucacuccaccaagaaa

SEQ ID NO: 411744 - RNA, 32 nt, Homo Sapiens
agaggcagggaccuaaagggacuaccucugug

SEQ ID NO: 411745 - RNA, 32 nt, Homo Sapiens
cacacacacacacacacacacacacacacaua

SEQ ID NO: 411746 - RNA, 32 nt, Homo Sapiens
ccuggcauuuaggcagcagagccccugaccgu

SEQ ID NO: 411747 - RNA, 32 nt, Homo Sapiens
ggcuggggccgcgcagguagugucccugcacu

SEQ ID NO: 411748 - RNA, 32 nt, Homo Sapiens
cuuccaccugucauucccaccacccugaggcc

SEQ ID NO: 411749 - RNA, 32 nt, Homo Sapiens
agcuguuugugaugaugccaguauuuggcgcu

SEQ ID NO: 411750 - RNA, 32 nt, Homo Sapiens
aaguaaauuuauuguuuuuuuauuuuuaaaug

SEQ ID NO: 411751 - RNA, 32 nt, Homo Sapiens
agaggggcguuuucgaggaagaaccuguccca

SEQ ID NO: 411752 - RNA, 32 nt, Homo Sapiens
gagaaguuguggugucugcuguccuuggcacc

SEQ ID NO: 411753 - RNA, 32 nt, Homo Sapiens
ccccugugugcgcccgccccagcccaggagua

SEQ ID NO: 411754 - RNA, 32 nt, Homo Sapiens
cugauauucacccaccaaacagaaaaagugaa

SEQ ID NO: 411755 - RNA, 32 nt, Homo Sapiens
uuuuuucuuuuuccuuuuuuuuuuuuuuccuu

SEQ ID NO: 411756 - RNA, 32 nt, Homo Sapiens
gucagcccgccagcccgccagcucgucagccc

SEQ ID NO: 411757 - RNA, 32 nt, Homo Sapiens
aaggguggacuccgagccggccugucaggcaa

SEQ ID NO: 411758 - RNA, 32 nt, Homo Sapiens
ucuaauguugaaauuauaucaggcuuuaccgg

SEQ ID NO: 411759 - RNA, 32 nt, Homo Sapiens
aagaaaacuuucuuuacccacuuauaaacaga

SEQ ID NO: 411760 - RNA, 32 nt, Homo Sapiens
cccaccccaagccacagugagcuuggugcacu

SEQ ID NO: 411761 - RNA, 32 nt, Homo Sapiens
ucugaggaggucugguggggcugggggagcac

SEQ ID NO: 411762 - RNA, 32 nt, Homo Sapiens
ucugaacuuuuagaaaaagauccuaaugcacu

SEQ ID NO: 411763 - RNA, 32 nt, Homo Sapiens
gccagaacuguagacaccaaaauggaaagcaa

SEQ ID NO: 411764 - RNA, 27 nt, Homo Sapiens
cuuaacccacccaacagccaauuuuag

SEQ ID NO: 411765 - RNA, 32 nt, Homo Sapiens
cgccggccgaauccggcccgggaaccaccucc

SEQ ID NO: 411766 - RNA, 32 nt, Homo Sapiens
gauucaugguuugauaaauuuguuguauucca

SEQ ID NO: 411767 - RNA, 32 nt, Homo Sapiens
uggaugucgcaauaauacaaaccaauguaccu

SEQ ID NO: 411768 - RNA, 32 nt, Homo Sapiens
auuggauacuauugcaacuugggaauacuggu

SEQ ID NO: 411769 - RNA, 32 nt, Homo Sapiens
gacagggucucgcucugucacccaggcuggag

SEQ ID NO: 411770 - RNA, 32 nt, Homo Sapiens
acaccgcuuuguccuucaguaccuggcucccu

SEQ ID NO: 411771 - RNA, 32 nt, Homo Sapiens
aaagcacauacacauaaaccagcacagugggu

SEQ ID NO: 411772 - RNA, 32 nt, Homo Sapiens
gaauguugauaaaauugaaacauuugguugug

SEQ ID NO: 411773 - RNA, 32 nt, Homo Sapiens
uuaggugguagaacauagcaaaaauauaaccg

SEQ ID NO: 411774 - RNA, 32 nt, Homo Sapiens
aaaaaccgggugccggcaggcgccagucgcag

SEQ ID NO: 411775 - RNA, 32 nt, Homo Sapiens
ugaaagacugaucuguucaaaauauuugcuau

SEQ ID NO: 411776 - RNA, 32 nt, Homo Sapiens
augcuauccaccauuuauuugugauuuuguaa

SEQ ID NO: 411777 - RNA, 32 nt, Homo Sapiens
agccaggcugccugggcuccaaugccagcucu

SEQ ID NO: 411778 - RNA, 32 nt, Homo Sapiens
gcagcacccgggccagcucccuguguacucga

SEQ ID NO: 411779 - RNA, 32 nt, Homo Sapiens
cuccagaggguggacggagcggggcccauucu

SEQ ID NO: 411780 - RNA, 32 nt, Homo Sapiens
cgcgugccaggcccgcggcggccgaaauccgc

SEQ ID NO: 411781 - RNA, 32 nt, Homo Sapiens
uaaaggaggaagauggcggggugcaggggguc

SEQ ID NO: 411782 - RNA, 32 nt, Homo Sapiens
cugccuccaggcccggcccucaccacugccca

SEQ ID NO: 411783 - RNA, 32 nt, Homo Sapiens
ugagcuuucuaaaaugauagcucucuauuuuu

SEQ ID NO: 411784 - RNA, 32 nt, Homo Sapiens
uagagacgagguuucaccauguugaccaggcu

SEQ ID NO: 411785 - RNA, 32 nt, Homo Sapiens
aaauuuuuuaaaauuucuuuuauaauaugcuu

SEQ ID NO: 411786 - RNA, 32 nt, Homo Sapiens
aggcuuggggcccccgucugcugcuggacaca

SEQ ID NO: 411787 - RNA, 32 nt, Homo Sapiens
guccaccucacaggugcgccaggacuaccacc

SEQ ID NO: 411788 - RNA, 32 nt, Homo Sapiens
uuguuuuaaaagaccugaaauuauaauacuga

SEQ ID NO: 411789 - RNA, 32 nt, Homo Sapiens
auaauaggggguggggggaggggcggugggag

SEQ ID NO: 411790 - RNA, 32 nt, Homo Sapiens
uccucuguugccaggcuggaaugccguggcgc

SEQ ID NO: 411791 - RNA, 32 nt, Homo Sapiens
uaaggcuuaacagauccaauuccagaaauuau

SEQ ID NO: 411792 - RNA, 32 nt, Homo Sapiens
uucuccuggaggacgaaucacuuuacagacaa

SEQ ID NO: 411793 - RNA, 32 nt, Homo Sapiens
agaugggcucccucgguuagcuccaucaacau

SEQ ID NO: 411794 - RNA, 32 nt, Homo Sapiens
ggcucacuggaggcccgugucaauggcuuccg

SEQ ID NO: 411795 - RNA, 32 nt, Homo Sapiens
gugcagcccucccaauccagucuacccucaaa

SEQ ID NO: 411796 - RNA, 32 nt, Homo Sapiens
aacagaagggagaaagugucagugacacaguu

SEQ ID NO: 411797 - RNA, 32 nt, Homo Sapiens
ucccaggccaccugcacagcuggaugguggaa

SEQ ID NO: 411798 - RNA, 32 nt, Homo Sapiens
uugguggagagguugcggagucugcacagaag

SEQ ID NO: 411799 - RNA, 32 nt, Homo Sapiens
ugggcucugcccacgccgggccccaaagugac

SEQ ID NO: 411800 - RNA, 32 nt, Homo Sapiens
ugcugucucucugucaucuacuugacauucua

SEQ ID NO: 411801 - RNA, 32 nt, Homo Sapiens
uauuaaccaucauauauagcauauauguguau

SEQ ID NO: 411802 - RNA, 32 nt, Homo Sapiens
guaccuccaacccccauuacccaccuguggcu

SEQ ID NO: 411803 - RNA, 32 nt, Homo Sapiens
caaaauuauaagaagaggaaauuaaagucuuc

SEQ ID NO: 411804 - RNA, 28 nt, Homo Sapiens
cuugaauugucuaaagugguuuuaauuu

SEQ ID NO: 411805 - RNA, 32 nt, Homo Sapiens
cgcucgcugcccggcccuccccggcuaugacg

SEQ ID NO: 411806 - RNA, 27 nt, Homo Sapiens
uccaccuacuucuucagcugacacccc

SEQ ID NO: 411807 - RNA, 32 nt, Homo Sapiens
ccagaaccuugugaaaaccuggccguagcagg

SEQ ID NO: 411808 - RNA, 32 nt, Homo Sapiens
ucagugaccccucgguucuccagcucaccccc

SEQ ID NO: 411809 - RNA, 32 nt, Homo Sapiens
gcuggcgaugaagacguagcugagagagaaga

SEQ ID NO: 411810 - RNA, 32 nt, Homo Sapiens
agugugcgcgcccagugacugcaccccggccc

SEQ ID NO: 411811 - RNA, 32 nt, Homo Sapiens
uguucauguaaauuuugaauacauucauacaa

SEQ ID NO: 411812 - RNA, 32 nt, Homo Sapiens
gagaacauucacgagucaccugucccaggggc

SEQ ID NO: 411813 - RNA, 32 nt, Homo Sapiens
ugcuuggaguuagugaggaagggcugagugaa

SEQ ID NO: 411814 - RNA, 31 nt, Homo Sapiens
auugugaaaaucaauaaauuacuugaauuga

SEQ ID NO: 411815 - RNA, 28 nt, Homo Sapiens
gauaugauuggcaauauguguuuauguu

SEQ ID NO: 411816 - RNA, 32 nt, Homo Sapiens
uuuaauuguaccccaucuuccacaucuuuaaa

SEQ ID NO: 411817 - RNA, 32 nt, Homo Sapiens
agugauccaguacggcuucaccaccaucuucg

SEQ ID NO: 411818 - RNA, 32 nt, Homo Sapiens
uaaaggaagaaaccauuuuuaaugagaugaaa

SEQ ID NO: 411819 - RNA, 32 nt, Homo Sapiens
ccuaauuaaguacaaaaacagagucgcuuuug

SEQ ID NO: 411820 - RNA, 32 nt, Homo Sapiens
ucagaggcccugucauggcccgcccccagcca

SEQ ID NO: 411821 - RNA, 32 nt, Homo Sapiens
gaguucccaaaauagauauauuaucugaauga

SEQ ID NO: 411822 - RNA, 32 nt, Homo Sapiens
uguuguaauaauuuaauguuuuuacccauuaa

SEQ ID NO: 411823 - RNA, 32 nt, Homo Sapiens
aauuaacuuguccucuaacaaucuucaugggg

SEQ ID NO: 411824 - RNA, 32 nt, Homo Sapiens
uccacuuaacccccaaacccagccccccuucc

SEQ ID NO: 411825 - RNA, 32 nt, Homo Sapiens
agggcuuauguccaacggucccauugggagca

SEQ ID NO: 411826 - RNA, 32 nt, Homo Sapiens
ugccaaagcucgguacuggacacaacgaggga

SEQ ID NO: 411827 - RNA, 32 nt, Homo Sapiens
cucagagccauggaggcaaguaccuuaauuag

SEQ ID NO: 411828 - RNA, 32 nt, Homo Sapiens
agccgaggagucuucagcaucuccagccgaga

SEQ ID NO: 411829 - RNA, 32 nt, Homo Sapiens
gccaggccucugcugcccuuucugugcccccc

SEQ ID NO: 411830 - RNA, 32 nt, Homo Sapiens
ccuugggacaccuugacuccaagcccagcagu

SEQ ID NO: 411831 - RNA, 32 nt, Homo Sapiens
gaaaaugagagacagaagccacaggggaagca

SEQ ID NO: 411832 - RNA, 32 nt, Homo Sapiens
cggggccggcccggggacagugcgcugcuggu

SEQ ID NO: 411833 - RNA, 32 nt, Homo Sapiens
gggcagcuucuuuggguccuaaauguggacuc

SEQ ID NO: 411834 - RNA, 32 nt, Homo Sapiens
ccuuuucuuaaauggcuucaugugcuauuccc

SEQ ID NO: 411835 - RNA, 32 nt, Homo Sapiens
acacacacacacacacacacaaacaggggcau

SEQ ID NO: 411836 - RNA, 32 nt, Homo Sapiens
cgcuucugacagggcaggccgugaugauguuu

SEQ ID NO: 411837 - RNA, 32 nt, Homo Sapiens
augucugugguuguggggguguuccaucccuc

SEQ ID NO: 411838 - RNA, 32 nt, Homo Sapiens
cugcccugggacgcucaccccugggcaagagg

SEQ ID NO: 411839 - RNA, 32 nt, Homo Sapiens
ccagacucuggggagacgggcgcuagauuugg

SEQ ID NO: 411840 - RNA, 32 nt, Homo Sapiens
cguguuccgaccccuuucccagcccacagggc

SEQ ID NO: 411841 - RNA, 32 nt, Homo Sapiens
ccagagacaggcccuccuccucaucuuugugg

SEQ ID NO: 411842 - RNA, 32 nt, Homo Sapiens
aucaaaguucccauuccauggaucccuuaggu

SEQ ID NO: 411843 - RNA, 32 nt, Homo Sapiens
gggagggacugggaugagagaaagugggaccu

SEQ ID NO: 411844 - RNA, 32 nt, Homo Sapiens
uaaauuggaaauuuaaccaaaaauauuuucca

SEQ ID NO: 411845 - RNA, 32 nt, Homo Sapiens
aaguccaaaaauuuuuucuuuaguaacagacu

SEQ ID NO: 411846 - RNA, 32 nt, Homo Sapiens
cccagaagccugggcuuaggguggagaugccg

SEQ ID NO: 411847 - RNA, 32 nt, Homo Sapiens
uuuuucagcauggcacggcagcuccccaugaa

SEQ ID NO: 411848 - RNA, 32 nt, Homo Sapiens
ugcacauccaaugguuccuaaagggccacaga

SEQ ID NO: 411849 - RNA, 32 nt, Homo Sapiens
aucagaggaaaugugacgacagaagcaggggu

SEQ ID NO: 411850 - RNA, 32 nt, Homo Sapiens
cacugcacuccagccugggugacggugagacu

SEQ ID NO: 411851 - RNA, 32 nt, Homo Sapiens
cuggagugguggccucugucggaagggggcgc

SEQ ID NO: 411852 - RNA, 32 nt, Homo Sapiens
gagaauggagaaagauuggucaacagacgcug

SEQ ID NO: 411853 - RNA, 32 nt, Homo Sapiens
ggcaaaaauauguacaaauugaccucuguucu

SEQ ID NO: 411854 - RNA, 32 nt, Homo Sapiens
auucuagggcaggaagaaguacaggauaggaa

SEQ ID NO: 411855 - RNA, 32 nt, Homo Sapiens
ccuggaagcgcugacgcagagcgcagggagag

SEQ ID NO: 411856 - RNA, 32 nt, Homo Sapiens
ggaggggaugucucaccgggcugggggugaga

SEQ ID NO: 411857 - RNA, 32 nt, Homo Sapiens
ucuaggacaaggcgcagccagauggaagggag

SEQ ID NO: 411858 - RNA, 32 nt, Homo Sapiens
cgccaggcugaugucgaguaugagcuccggug

SEQ ID NO: 411859 - RNA, 32 nt, Homo Sapiens
agggcuuuuggcacuuucagcuuuaccuuuac

SEQ ID NO: 411860 - RNA, 32 nt, Homo Sapiens
accuggcuucacugauucaguaccucacuucc

SEQ ID NO: 411861 - RNA, 32 nt, Homo Sapiens
cccuguggucccuagagcaccccucaugcugu

SEQ ID NO: 411862 - RNA, 32 nt, Homo Sapiens
aggagauuuuucuauuuguucacuuuaauuua

SEQ ID NO: 411863 - RNA, 30 nt, Homo Sapiens
ucacuccuggacugaaguccggugccucug

SEQ ID NO: 411864 - RNA, 32 nt, Homo Sapiens
uauuuuaaccccccgucccccauccauaauuc

SEQ ID NO: 411865 - RNA, 32 nt, Homo Sapiens
ggaagggcgggucaggcccacagccuuccugc

SEQ ID NO: 411866 - RNA, 32 nt, Homo Sapiens
gggcgccguccgccagcuccgugcuccccgcg

SEQ ID NO: 411867 - RNA, 32 nt, Homo Sapiens
gcuguuuucuaccuuuuuguagucuuucuuaa

SEQ ID NO: 411868 - RNA, 32 nt, Homo Sapiens
uuuuguggucauuguuucucuucgauaaauuu

SEQ ID NO: 411869 - RNA, 32 nt, Homo Sapiens
agagcugcuguguuacuuagaccgcugccgug

SEQ ID NO: 411870 - RNA, 32 nt, Homo Sapiens
agugguucugucaucaucauucauguuuuuua

SEQ ID NO: 411871 - RNA, 32 nt, Homo Sapiens
auuauuuugguuaauguaauaauccuaaaauc

SEQ ID NO: 411872 - RNA, 32 nt, Homo Sapiens
ccugccccacuuugauuuaauccuuuggcugu

SEQ ID NO: 411873 - RNA, 32 nt, Homo Sapiens
aaagucugaaauuuauaaguauaaaaaaagac

SEQ ID NO: 411874 - RNA, 32 nt, Homo Sapiens
gaaggcauaacauuuacggacucauccccagc

SEQ ID NO: 411875 - RNA, 32 nt, Homo Sapiens
aucugaaccauuuuauuuuuuauuuaccaaag

SEQ ID NO: 411876 - RNA, 32 nt, Homo Sapiens
gggcagccgguucuccaccuccccauccgccc

SEQ ID NO: 411877 - RNA, 32 nt, Homo Sapiens
caacacugucuggccugucucggguccggcac

SEQ ID NO: 411878 - RNA, 32 nt, Homo Sapiens
uucuggaaacauaucaauauaauuacaguguu

SEQ ID NO: 411879 - RNA, 32 nt, Homo Sapiens
cgaguauaucagaacacacccuuccaagguau

SEQ ID NO: 411880 - RNA, 30 nt, Homo Sapiens
acaggguuucacuguguuagccaggguggu

SEQ ID NO: 411881 - RNA, 32 nt, Homo Sapiens
aaauuuugcaauguuaaagaugcacagaauau

SEQ ID NO: 411882 - RNA, 32 nt, Homo Sapiens
cccacgugugaacaucugucuuggucacagag

SEQ ID NO: 411883 - RNA, 32 nt, Homo Sapiens
gacuguaguuuauugauuaguucaagcccauc

SEQ ID NO: 411884 - RNA, 32 nt, Homo Sapiens
caguagaaacuuguaccagaagcaaaauccca

SEQ ID NO: 411885 - RNA, 32 nt, Homo Sapiens
auuuauauauugucuguaaaaaauguaugcua

SEQ ID NO: 411886 - RNA, 32 nt, Homo Sapiens
ugagcucaggugucuggcuauuuuaaaacuac

SEQ ID NO: 411887 - RNA, 32 nt, Homo Sapiens
guugcagucagaagaucuuucuuaauagaaag

SEQ ID NO: 411888 - RNA, 32 nt, Homo Sapiens
gacgcuuggccuuuuuuguugcugccaggacu

SEQ ID NO: 411889 - RNA, 32 nt, Homo Sapiens
uuugauccugguuuuugauauuugucauuccc

SEQ ID NO: 411890 - RNA, 32 nt, Homo Sapiens
cuucccucacucucugccucauuuucucaagg

SEQ ID NO: 411891 - RNA, 32 nt, Homo Sapiens
aaaugaaguguguuaaggggucggcuaagugg

SEQ ID NO: 411892 - RNA, 32 nt, Homo Sapiens
caauaaccaaaauugaauaaggcaauauccua

SEQ ID NO: 411893 - RNA, 32 nt, Homo Sapiens
gcucacagcuggaacccuggugucuccuccag

SEQ ID NO: 411894 - RNA, 32 nt, Homo Sapiens
ucgccgaggccggucccccggguguggggugc

SEQ ID NO: 411895 - RNA, 32 nt, Homo Sapiens
gaugcaauuguugaaagcuuugaaauaaaaua

SEQ ID NO: 411896 - RNA, 32 nt, Homo Sapiens
ugagcagaauacuggucucaggccaagcccaa

SEQ ID NO: 411897 - RNA, 32 nt, Homo Sapiens
cauguugcuaaucucaugauccugugcaugug

SEQ ID NO: 411898 - RNA, 32 nt, Homo Sapiens
gcugcaaacacuuaauaacuagaggagaauuu

SEQ ID NO: 411899 - RNA, 32 nt, Homo Sapiens
acuggugacacguggcuguacauucagcacag

SEQ ID NO: 411900 - RNA, 32 nt, Homo Sapiens
caucgcauucauagaagcugcuugcagggucg

SEQ ID NO: 411901 - RNA, 32 nt, Homo Sapiens
accacacccacacucagauccuccucauucac

SEQ ID NO: 411902 - RNA, 32 nt, Homo Sapiens
ggugggggguggcaggacucaggcaugcagag

SEQ ID NO: 411903 - RNA, 32 nt, Homo Sapiens
guggaaucaccaucugacugcugucaauaaaa

SEQ ID NO: 411904 - RNA, 32 nt, Homo Sapiens
caacaguguauugauucauauucuccuagggc

SEQ ID NO: 411905 - RNA, 32 nt, Homo Sapiens
gucuaugguuggaaagcauuugggcgcaagaa

SEQ ID NO: 411906 - RNA, 30 nt, Homo Sapiens
gguguucucugugcugugaauucagugggg

SEQ ID NO: 411907 - RNA, 32 nt, Homo Sapiens
augacauuaauaccucuagaaagggcugcugu

SEQ ID NO: 411908 - RNA, 32 nt, Homo Sapiens
uaagaaaucugaaagcaccucugacauuccuu

SEQ ID NO: 411909 - RNA, 32 nt, Homo Sapiens
uagagucagacuccuagacucacuuguucuca

SEQ ID NO: 411910 - RNA, 32 nt, Homo Sapiens
uccaaaauauauauugagauaaaugaacuggu

SEQ ID NO: 411911 - RNA, 32 nt, Homo Sapiens
acagccagcucccgagcacagccgcacuccug

SEQ ID NO: 411912 - RNA, 32 nt, Homo Sapiens
caguuugcugguuuuuuuuuuuuuuuuuuuuu

SEQ ID NO: 411913 - RNA, 32 nt, Homo Sapiens
cacgucccccgagccccacgggccaugcccgg

SEQ ID NO: 411914 - RNA, 32 nt, Homo Sapiens
gauacaaaaugagggccucugcucuugauuua

SEQ ID NO: 411915 - RNA, 32 nt, Homo Sapiens
uccgccggggaacgugugaggcugggacgccu

SEQ ID NO: 411916 - RNA, 32 nt, Homo Sapiens
ugacauccugguuuuuggcaccggaggaaaau

SEQ ID NO: 411917 - RNA, 32 nt, Homo Sapiens
gaaaaaucucaaagccuguaucguucuugaag

SEQ ID NO: 411918 - RNA, 25 nt, Homo Sapiens
cgacccuccccgcuccucugucauu

SEQ ID NO: 411919 - RNA, 32 nt, Homo Sapiens
uuggugccaacuuacacccccacgcaccagaa

SEQ ID NO: 411920 - RNA, 32 nt, Homo Sapiens
acugcucgccuggcgucggagccggcccuggc

SEQ ID NO: 411921 - RNA, 32 nt, Homo Sapiens
cuagggagggucacagaggcaggauguaagac

SEQ ID NO: 411922 - RNA, 32 nt, Homo Sapiens
aguuggggaaacugaggccuugucucacaguu

SEQ ID NO: 411923 - RNA, 32 nt, Homo Sapiens
gaaauuuaucuuuucuucuauggggcuuauaa

SEQ ID NO: 411924 - RNA, 32 nt, Homo Sapiens
gcagccacuuucugccagcaucugcagccacu

SEQ ID NO: 411925 - RNA, 32 nt, Homo Sapiens
ccccggccugggcaucugaccucccccacccc

SEQ ID NO: 411926 - RNA, 32 nt, Homo Sapiens
aguguuuugaaaauauugacuaacauaauauu

SEQ ID NO: 411927 - RNA, 32 nt, Homo Sapiens
gagagaaggcaaacagacaaaaagggugauag

SEQ ID NO: 411928 - RNA, 32 nt, Homo Sapiens
ugcuaucccgcccucccuccccgcgcgccccg

SEQ ID NO: 411929 - RNA, 32 nt, Homo Sapiens
gaagcucggacuuggcacuccuggacaaccug

SEQ ID NO: 411930 - RNA, 32 nt, Homo Sapiens
gguaaaugcuuugagugaauuaauggaagguc

SEQ ID NO: 411931 - RNA, 32 nt, Homo Sapiens
gauggagauaauuuuuuuuucuucucagcuuu

SEQ ID NO: 411932 - RNA, 32 nt, Homo Sapiens
ugagcuuaaaauuuauccaagacguauaucca

SEQ ID NO: 411933 - RNA, 32 nt, Homo Sapiens
cagagcugaccagggagauggugcuggcccag

SEQ ID NO: 411934 - RNA, 32 nt, Homo Sapiens
ugugggcgauuuccuccggacccaggcucccc

SEQ ID NO: 411935 - RNA, 32 nt, Homo Sapiens
gcacauggaguauggaagggggcauguugauu

SEQ ID NO: 411936 - RNA, 32 nt, Homo Sapiens
uugacuuuuuaaaauucugagugauccagggu

SEQ ID NO: 411937 - RNA, 32 nt, Homo Sapiens
uggugcggccccacuccccucccccgcuccca

SEQ ID NO: 411938 - RNA, 32 nt, Homo Sapiens
cccuucaggagggccuccugugccgcagggag

SEQ ID NO: 411939 - RNA, 32 nt, Homo Sapiens
agcaaacauuuuacacaguuuuauuucuaaua

SEQ ID NO: 411940 - RNA, 32 nt, Homo Sapiens
ucgcucugacagcugaggaacuggcaagaucc

SEQ ID NO: 411941 - RNA, 32 nt, Homo Sapiens
uuuuaaaaugucuugcuugauuguaugguggg

SEQ ID NO: 411942 - RNA, 32 nt, Homo Sapiens
uagccauguuucccuggcauccgagagcccaa

SEQ ID NO: 411943 - RNA, 32 nt, Homo Sapiens
uaauauaaauuaacaugugggucauuauauuu

SEQ ID NO: 411944 - RNA, 32 nt, Homo Sapiens
ucccacucugggugggggccuggcgguguggg

SEQ ID NO: 411945 - RNA, 32 nt, Homo Sapiens
ucccggcuuccaccccucuccucagagucccg

SEQ ID NO: 411946 - RNA, 32 nt, Homo Sapiens
ggccaguggacaagaacaccucagucucucca

SEQ ID NO: 411947 - RNA, 29 nt, Homo Sapiens
ggaaugagggucugggcauugcucccagc

SEQ ID NO: 411948 - RNA, 32 nt, Homo Sapiens
augguauuuguaaaguuuuuuuuuuaauuuau

SEQ ID NO: 411949 - RNA, 32 nt, Homo Sapiens
auacgacacaugcccaugaugagaagcagaac

SEQ ID NO: 411950 - RNA, 32 nt, Homo Sapiens
gauauggacauucccacuggggagauucccug

SEQ ID NO: 411951 - RNA, 32 nt, Homo Sapiens
cacaauaauuuucaacucugugcagaagaaua

SEQ ID NO: 411952 - RNA, 32 nt, Homo Sapiens
augugcaaucucaagugcacaagcauuuggcg

SEQ ID NO: 411953 - RNA, 31 nt, Homo Sapiens
gcagccaugggccccagccaggacaugcugg

SEQ ID NO: 411954 - RNA, 32 nt, Homo Sapiens
ugaaauuaauaaaacuuaucugagucacuuga

SEQ ID NO: 411955 - RNA, 26 nt, Homo Sapiens
uaugucgcgccgggcccuccggaggc

SEQ ID NO: 411956 - RNA, 32 nt, Homo Sapiens
uguuuuuuuuuuuuuucuuuuuggaugugaag

SEQ ID NO: 411957 - RNA, 32 nt, Homo Sapiens
uuuggaccacauuuguguuugcucuuagagau

SEQ ID NO: 411958 - RNA, 32 nt, Homo Sapiens
aauucuaauuuucauaaucuauuagaagauga

SEQ ID NO: 411959 - RNA, 32 nt, Homo Sapiens
uaucaguacuaacauuuaugcaugucaauauc

SEQ ID NO: 411960 - RNA, 32 nt, Homo Sapiens
gcccacucuugacgugauacuuaccgucaaug

SEQ ID NO: 411961 - RNA, 32 nt, Homo Sapiens
gugcuggcccagaucaagagccagaaagugca

SEQ ID NO: 411962 - RNA, 32 nt, Homo Sapiens
cggagcucccccuuccucucggucucccucuc

SEQ ID NO: 411963 - RNA, 32 nt, Homo Sapiens
aggcagaggguggggaagggcugggcaggggg

SEQ ID NO: 411964 - RNA, 32 nt, Homo Sapiens
ucucuacuucugugccuuuguaaaacguguag

SEQ ID NO: 411965 - RNA, 32 nt, Homo Sapiens
ggcaauggugccucuugaagggcagggcacac

SEQ ID NO: 411966 - RNA, 32 nt, Homo Sapiens
caccccacccaaggaagcccagcacagaccau

SEQ ID NO: 411967 - RNA, 32 nt, Homo Sapiens
aagguguaugacaaaauggacaaaaugaaaca

SEQ ID NO: 411968 - RNA, 32 nt, Homo Sapiens
gcugagagcuuaaaccacagguaccauggcug

SEQ ID NO: 411969 - RNA, 32 nt, Homo Sapiens
uugucacacgguauaccauacuccucuccuuc

SEQ ID NO: 411970 - RNA, 32 nt, Homo Sapiens
caccgccgcucccggcaacccggagcgcgcac

SEQ ID NO: 411971 - RNA, 32 nt, Homo Sapiens
gaacccaggaggaagagguugcagugagccaa

SEQ ID NO: 411972 - RNA, 32 nt, Homo Sapiens
gcagaggcagaggucagcacuggccaugacuu

SEQ ID NO: 411973 - RNA, 32 nt, Homo Sapiens
acagucccuggcccugcuucccauccuccucu

SEQ ID NO: 411974 - RNA, 32 nt, Homo Sapiens
uacauaguaccgauaacagccaugcacugugc

SEQ ID NO: 411975 - RNA, 32 nt, Homo Sapiens
uaauuauagaaaugauuuuucuuuuaauuuuu

SEQ ID NO: 411976 - RNA, 32 nt, Homo Sapiens
gcggccgcucgccccucggggaauauggcgcc

SEQ ID NO: 411977 - RNA, 32 nt, Homo Sapiens
gcugugggcuccuggggagauggaggggccgg

SEQ ID NO: 411978 - RNA, 32 nt, Homo Sapiens
uuuuuaguaacccuucuuucugaacccagggc

SEQ ID NO: 411979 - RNA, 32 nt, Homo Sapiens
caugcuuuuuuugcuuuuuuuuuuuucuccua

SEQ ID NO: 411980 - RNA, 32 nt, Homo Sapiens
ccucugacaaugaaauaauguguauauauugc

SEQ ID NO: 411981 - RNA, 32 nt, Homo Sapiens
uuccaggugcugggccuagggaggcgcgcggc

SEQ ID NO: 411982 - RNA, 32 nt, Homo Sapiens
aaaaugcuuauaauguaguacaauuaaaaaca

SEQ ID NO: 411983 - RNA, 32 nt, Homo Sapiens
agacuuuguauucaacuuaguuuaauguagau

SEQ ID NO: 411984 - RNA, 32 nt, Homo Sapiens
auacauuguaaaacauagacguuuauuuaugu

SEQ ID NO: 411985 - RNA, 32 nt, Homo Sapiens
gggcccagacugcgcuccggccgcggcccucg

SEQ ID NO: 411986 - RNA, 32 nt, Homo Sapiens
augucuccguauuugcagaacugagcucugua

SEQ ID NO: 411987 - RNA, 32 nt, Homo Sapiens
caucaccaccgguucuguuguuucacauugaa

SEQ ID NO: 411988 - RNA, 32 nt, Homo Sapiens
ugauugccuuugugucccugcuucaccuuuug

SEQ ID NO: 411989 - RNA, 32 nt, Homo Sapiens
gggagcugggaugauaaagaugaggcuugcgg

SEQ ID NO: 411990 - RNA, 32 nt, Homo Sapiens
ucuucguugggauauaauggugaucaaggaga

SEQ ID NO: 411991 - RNA, 32 nt, Homo Sapiens
aagaugucucuuaaaugcaguuagagugagag

SEQ ID NO: 411992 - RNA, 32 nt, Homo Sapiens
ccgacgccucagccgcuuggggcccgcacgga

SEQ ID NO: 411993 - RNA, 32 nt, Homo Sapiens
cugaggugcucucugcugggggccguaaguga

SEQ ID NO: 411994 - RNA, 32 nt, Homo Sapiens
gggggaaguuccuggggcgguggcugggacca

SEQ ID NO: 411995 - RNA, 32 nt, Homo Sapiens
gcccggaagccagucccucccccuagaccccg

SEQ ID NO: 411996 - RNA, 32 nt, Homo Sapiens
guccaucuauugagccagcagcuguuguaccu

SEQ ID NO: 411997 - RNA, 32 nt, Homo Sapiens
ccaggccuuuccuggaggaaacacccagggcc

SEQ ID NO: 411998 - RNA, 32 nt, Homo Sapiens
accauucaagaccagaagcuuuuugacagaaa

SEQ ID NO: 411999 - RNA, 32 nt, Homo Sapiens
gaagagggaaaaacuuuuacuuuucugauuuu

SEQ ID NO: 412000 - RNA, 32 nt, Homo Sapiens
ccucuuucuuagaaacaaaaaccaaagaaacc

SEQ ID NO: 412001 - RNA, 32 nt, Homo Sapiens
gagacagcuucaggacacgcaggccgcagcga

SEQ ID NO: 412002 - RNA, 32 nt, Homo Sapiens
cuaaauauauuccugagauuuccuccuggccu

SEQ ID NO: 412003 - RNA, 32 nt, Homo Sapiens
ccuagccuuggucgucgccgccaccaugaaca

SEQ ID NO: 412004 - RNA, 32 nt, Homo Sapiens
gagagcaagcaguguuguccucacgggaggag

SEQ ID NO: 412005 - RNA, 32 nt, Homo Sapiens
aaacauuuucaguuuuuuuuuaaaaaacguac

SEQ ID NO: 412006 - RNA, 32 nt, Homo Sapiens
gaaaaaccuucuauuacaugcaaaaaaucauu

SEQ ID NO: 412007 - RNA, 29 nt, Homo Sapiens
gaauuugugacuuaguucugcccuuugga

SEQ ID NO: 412008 - RNA, 32 nt, Homo Sapiens
gaugugaggcggcggcgcccccggcccgagag

SEQ ID NO: 412009 - RNA, 32 nt, Homo Sapiens
cuuacaugccaggcucauguccagucaggcca

SEQ ID NO: 412010 - RNA, 32 nt, Homo Sapiens
aucuugugaaacuuauucacuaucacaagaau

SEQ ID NO: 412011 - RNA, 32 nt, Homo Sapiens
ugaggcaguuuuuuccugggaauccacacguu

SEQ ID NO: 412012 - RNA, 32 nt, Homo Sapiens
cagguccuccccuucuguguccugcagaugga

SEQ ID NO: 412013 - RNA, 32 nt, Homo Sapiens
ccuguccaggacacuaaaaugugagaacagcu

SEQ ID NO: 412014 - RNA, 32 nt, Homo Sapiens
uuucauuaccuguuaguaacuacuucaaugau

SEQ ID NO: 412015 - RNA, 32 nt, Homo Sapiens
ugugugauuauuaucuuuuuuauucuuaucac

SEQ ID NO: 412016 - RNA, 32 nt, Homo Sapiens
uucccuccagaugaggugcgcaaccaguggug

SEQ ID NO: 412017 - RNA, 32 nt, Homo Sapiens
agcugauugacaggagggcaucugaaauugag

SEQ ID NO: 412018 - RNA, 32 nt, Homo Sapiens
aagggcucagaauagcaccauugcugguuugu

SEQ ID NO: 412019 - RNA, 32 nt, Homo Sapiens
uccacacagcugucccuuccuguccuuggcua

SEQ ID NO: 412020 - RNA, 32 nt, Homo Sapiens
ggaacaaaaauauuuguagcauuuuguguaaa

SEQ ID NO: 412021 - RNA, 32 nt, Homo Sapiens
cgcccgggcacgaaggcccagcccuggcccug

SEQ ID NO: 412022 - RNA, 32 nt, Homo Sapiens
aguuaggcuuugcauaagcaugugagaugcca

SEQ ID NO: 412023 - RNA, 32 nt, Homo Sapiens
aaauaggcaugaugauaagcuaugcagauuau

SEQ ID NO: 412024 - RNA, 32 nt, Homo Sapiens
ggacgccgcuggugcuggccgcccccagcccc

SEQ ID NO: 412025 - RNA, 32 nt, Homo Sapiens
ugccaggaauuuuaagaaagugcuaaagaacu

SEQ ID NO: 412026 - RNA, 32 nt, Homo Sapiens
aagaggugguggcccugcuuucaggggagacc

SEQ ID NO: 412027 - RNA, 32 nt, Homo Sapiens
auuuaaaaguggaccaacuugcucuuaaucac

SEQ ID NO: 412028 - RNA, 32 nt, Homo Sapiens
ccaucacauucagaugucuugguugugacuua

SEQ ID NO: 412029 - RNA, 32 nt, Homo Sapiens
gggcacuggcacggaacacacccugaggccag

SEQ ID NO: 412030 - RNA, 32 nt, Homo Sapiens
guuuaauguauuauauuuauuuggggccgaca

SEQ ID NO: 412031 - RNA, 32 nt, Homo Sapiens
ugaaucaaagaauaaugaaaacaggauaugga

SEQ ID NO: 412032 - RNA, 32 nt, Homo Sapiens
gagaaggcgaggcggcagcgaugcugucucuu

SEQ ID NO: 412033 - RNA, 32 nt, Homo Sapiens
ggaaggauaugcuaagugaugaaaguugcgag

SEQ ID NO: 412034 - RNA, 32 nt, Homo Sapiens
aaucccaauuuaacucauguuaucaucauuag

SEQ ID NO: 412035 - RNA, 32 nt, Homo Sapiens
gcugagaagaccgcgcggggcuggagacaggu

SEQ ID NO: 412036 - RNA, 32 nt, Homo Sapiens
uauauaaggggcagcucaugcugcugcucugc

SEQ ID NO: 412037 - RNA, 32 nt, Homo Sapiens
uugcggucaaaggaguugaauucuugcugauc

SEQ ID NO: 412038 - RNA, 32 nt, Homo Sapiens
guuugcacaaaagaacaaaaaauauauauguc

SEQ ID NO: 412039 - RNA, 32 nt, Homo Sapiens
uggacagauaaaaaagauuuuacguuugucuu

SEQ ID NO: 412040 - RNA, 30 nt, Homo Sapiens
gcaaagaauauccugaacucuuuaucuugu

SEQ ID NO: 412041 - RNA, 32 nt, Homo Sapiens
aaauuugcaguuuuaugucuuuuaccaaacuu

SEQ ID NO: 412042 - RNA, 32 nt, Homo Sapiens
uggaaagaaaaacaacuuucuguucucauuua

SEQ ID NO: 412043 - RNA, 32 nt, Homo Sapiens
cgcggacccccuuuccugcccucccccaaccc

SEQ ID NO: 412044 - RNA, 32 nt, Homo Sapiens
cugcuuccccugccugguccagcccugguugg

SEQ ID NO: 412045 - RNA, 32 nt, Homo Sapiens
gguaagaauccauuuuaauguuuuaagcaaag

SEQ ID NO: 412046 - RNA, 32 nt, Homo Sapiens
cucugagauaggaucuuccaacuuuuuagccc

SEQ ID NO: 412047 - RNA, 32 nt, Homo Sapiens
acccacccacccaguuuaauugugcuuagagc

SEQ ID NO: 412048 - RNA, 27 nt, Homo Sapiens
aaugugaauuucuucagacuuccaugc

SEQ ID NO: 412049 - RNA, 32 nt, Homo Sapiens
auccugugagccccacucccagccccacucac

SEQ ID NO: 412050 - RNA, 32 nt, Homo Sapiens
ugaaggaaauauggucagcauuuuauaacacc

SEQ ID NO: 412051 - RNA, 32 nt, Homo Sapiens
gccaacagaagcugcagugggcauugugugga

SEQ ID NO: 412052 - RNA, 32 nt, Homo Sapiens
ccucccccuggccaagccuccuucccuuguuc

SEQ ID NO: 412053 - RNA, 32 nt, Homo Sapiens
uccuugccaaauaguuugugccuugucuugaa

SEQ ID NO: 412054 - RNA, 32 nt, Homo Sapiens
gaacaagcggcugguguugaaagaguggguug

SEQ ID NO: 412055 - RNA, 32 nt, Homo Sapiens
guaauaaucaccucauggagaaugggguaccc

SEQ ID NO: 412056 - RNA, 32 nt, Homo Sapiens
uuucuuuuucuuuucauuacaucagguauauu

SEQ ID NO: 412057 - RNA, 32 nt, Homo Sapiens
gcgaaauugguaguuaggucuauggaaagugg

SEQ ID NO: 412058 - RNA, 32 nt, Homo Sapiens
ggccuaacaaggaaaccugggcccuccaagcc

SEQ ID NO: 412059 - RNA, 32 nt, Homo Sapiens
auuguuccaagugaaggcacaaacucucaaua

SEQ ID NO: 412060 - RNA, 32 nt, Homo Sapiens
aggccgucaacauggcgagcgccucguaccac

SEQ ID NO: 412061 - RNA, 32 nt, Homo Sapiens
gugcgggcgcggcaggggaaaaggggggcgcu

SEQ ID NO: 412062 - RNA, 32 nt, Homo Sapiens
gcugcgaagauaauugagguaacuggggauga

SEQ ID NO: 412063 - RNA, 32 nt, Homo Sapiens
uuugcauagaaaguuuuaggaacuuuaacuuu

SEQ ID NO: 412064 - RNA, 32 nt, Homo Sapiens
ucaguucauagaaaagauuauuugcuucauca

SEQ ID NO: 412065 - RNA, 32 nt, Homo Sapiens
aacagggucugcuuggccacucagugcagcug

SEQ ID NO: 412066 - RNA, 32 nt, Homo Sapiens
uugacagccccucccacaggaugugggcucug

SEQ ID NO: 412067 - RNA, 32 nt, Homo Sapiens
gccagggucgccgagccuccccugccuccugg

SEQ ID NO: 412068 - RNA, 32 nt, Homo Sapiens
gauuuccauuucugaugucuccagauuggcac

SEQ ID NO: 412069 - RNA, 32 nt, Homo Sapiens
guuagacacagaagcugaagucucuccauuuu

SEQ ID NO: 412070 - RNA, 32 nt, Homo Sapiens
uuguguaugugcucugugccauggcuggugua

SEQ ID NO: 412071 - RNA, 32 nt, Homo Sapiens
uauuuggucucugagaucuauacuuaacccuc

SEQ ID NO: 412072 - RNA, 32 nt, Homo Sapiens
ggugcccagaaaggaacagugugcgggccuga

SEQ ID NO: 412073 - RNA, 28 nt, Homo Sapiens
acuuuucugucuaauuucuguuuuauac

SEQ ID NO: 412074 - RNA, 32 nt, Homo Sapiens
aaaauagggaaauuauuugaagugauauauuu

SEQ ID NO: 412075 - RNA, 32 nt, Homo Sapiens
ggauaaagaauuggcucacagguccaaggucc

SEQ ID NO: 412076 - RNA, 32 nt, Homo Sapiens
gcggcuucgggcggccucggcccagcucgggc

SEQ ID NO: 412077 - RNA, 32 nt, Homo Sapiens
gacguauacucuauaguccacucucuacacag

SEQ ID NO: 412078 - RNA, 32 nt, Homo Sapiens
ggcaucacuguguugccaaggcuggucuugaa

SEQ ID NO: 412079 - RNA, 32 nt, Homo Sapiens
cugcaguuaaauauauauuucuccaugauauc

SEQ ID NO: 412080 - RNA, 32 nt, Homo Sapiens
uaagaagugcgugugagaguguguguauaugu

SEQ ID NO: 412081 - RNA, 32 nt, Homo Sapiens
gagguggccgggacgugagcugugaggcuugu

SEQ ID NO: 412082 - RNA, 32 nt, Homo Sapiens
gaugggaagucccgucgagccuggacaggcaa

SEQ ID NO: 412083 - RNA, 32 nt, Homo Sapiens
guaguuaguguuucauuacauuauaaagaaua

SEQ ID NO: 412084 - RNA, 32 nt, Homo Sapiens
acuguauagauuuacuaggaaccaucaaauug

SEQ ID NO: 412085 - RNA, 32 nt, Homo Sapiens
ccccacagggucacgcaggacucggacacugc

SEQ ID NO: 412086 - RNA, 32 nt, Homo Sapiens
gaaauuucugaaucgagcuagagcgagagagc

SEQ ID NO: 412087 - RNA, 32 nt, Homo Sapiens
caucugggaagacagcggcgaguuuucugaag

SEQ ID NO: 412088 - RNA, 32 nt, Homo Sapiens
gggccugugagccucccuggccugcuccaccu

SEQ ID NO: 412089 - RNA, 32 nt, Homo Sapiens
guggcgcccccuuuccucuugucccagagcgc

SEQ ID NO: 412090 - RNA, 32 nt, Homo Sapiens
uaguugguuucccuguccacccgccccacuuc

SEQ ID NO: 412091 - RNA, 32 nt, Homo Sapiens
uuaagcuaugucauugucuacugcauaguuuc

SEQ ID NO: 412092 - RNA, 32 nt, Homo Sapiens
cugccucauuuccuccucuccugccugugaaa

SEQ ID NO: 412093 - RNA, 32 nt, Homo Sapiens
aauuauguuuaaaauuccaugugaucuaaaau

SEQ ID NO: 412094 - RNA, 32 nt, Homo Sapiens
cggccccauccacagccgcugcguccuuuugu

SEQ ID NO: 412095 - RNA, 32 nt, Homo Sapiens
aucccgcgccgacggggcugugccggagcagc

SEQ ID NO: 412096 - RNA, 32 nt, Homo Sapiens
cccaggccaaacuuuucccuuucaucguaggu

SEQ ID NO: 412097 - RNA, 32 nt, Homo Sapiens
uuggaauagugauaauaaugcauauugauauu

SEQ ID NO: 412098 - RNA, 32 nt, Homo Sapiens
gguaggccuuggcccaccugaggccccaggug

SEQ ID NO: 412099 - RNA, 32 nt, Homo Sapiens
cucacccuccugaguaaccccaucccccuagc

SEQ ID NO: 412100 - RNA, 32 nt, Homo Sapiens
uaagaugcaugaugaaaaccugagugaagagg

SEQ ID NO: 412101 - RNA, 28 nt, Homo Sapiens
uaucauuuagauuaacauuuggggccug

SEQ ID NO: 412102 - RNA, 32 nt, Homo Sapiens
uguauacaaauauuuaauuuggugauugauaa

SEQ ID NO: 412103 - RNA, 32 nt, Homo Sapiens
uaugauuauuauugaaugauagcugauaauua

SEQ ID NO: 412104 - RNA, 32 nt, Homo Sapiens
ccucccgcuccagccaugcucuccgcccucgc

SEQ ID NO: 412105 - RNA, 32 nt, Homo Sapiens
uuugagaaagacaauuuuaauguuuacaacaa

SEQ ID NO: 412106 - RNA, 32 nt, Homo Sapiens
gcagccaggacacugcccacuggagccuguca

SEQ ID NO: 412107 - RNA, 32 nt, Homo Sapiens
gguggugaugugaaaggagagaauuacacuuu

SEQ ID NO: 412108 - RNA, 32 nt, Homo Sapiens
ggugugugauuuuuauuuucuucuuuggucau

SEQ ID NO: 412109 - RNA, 32 nt, Homo Sapiens
caaaggcuuggcucaugguugacagcucagag

SEQ ID NO: 412110 - RNA, 32 nt, Homo Sapiens
aauuauuaauaaaugaauucugugcuuuuaaa

SEQ ID NO: 412111 - RNA, 32 nt, Homo Sapiens
ucaucuuuugugauuucuuuuaaauacuauuc

SEQ ID NO: 412112 - RNA, 32 nt, Homo Sapiens
uugcuuguuuuuguuucuuuuucuuucuuguu

SEQ ID NO: 412113 - RNA, 32 nt, Homo Sapiens
agacccccaggugcccaaggccugcugcugga

SEQ ID NO: 412114 - RNA, 32 nt, Homo Sapiens
uuaguuguuuuaauagcuguauaauagcaucu

SEQ ID NO: 412115 - RNA, 32 nt, Homo Sapiens
gaggccucccccaagcccaacccaggcggaca

SEQ ID NO: 412116 - RNA, 32 nt, Homo Sapiens
ggggaggaaauggaaugaaaagagucucagca

SEQ ID NO: 412117 - RNA, 30 nt, Homo Sapiens
guggaucgcgcgcagcacccaggguucgga

SEQ ID NO: 412118 - RNA, 32 nt, Homo Sapiens
agaagaucacagcagggccuucugccugcuga

SEQ ID NO: 412119 - RNA, 32 nt, Homo Sapiens
ggcggcccgcggcggaccauggcccuggcccu

SEQ ID NO: 412120 - RNA, 32 nt, Homo Sapiens
agaaugugcacccucuuucucuagugcugugg

SEQ ID NO: 412121 - RNA, 32 nt, Homo Sapiens
ugaaauuuaccauugagagucaaugaaguugc

SEQ ID NO: 412122 - RNA, 32 nt, Homo Sapiens
cagcagauauugugugccagucauaguccuaa

SEQ ID NO: 412123 - RNA, 32 nt, Homo Sapiens
cuaaagccacaaguuucuuuucuauacaguca

SEQ ID NO: 412124 - RNA, 32 nt, Homo Sapiens
uaacgaacaucauguucguugauggucaucaa

SEQ ID NO: 412125 - RNA, 32 nt, Homo Sapiens
uguugucugaucuauuuaauaauuuaauaagg

SEQ ID NO: 412126 - RNA, 32 nt, Homo Sapiens
agcuacaaucaucaagacauuaugaaacuggc

SEQ ID NO: 412127 - RNA, 32 nt, Homo Sapiens
gagaacaaagauuccauuugcaccaugccaca

SEQ ID NO: 412128 - RNA, 32 nt, Homo Sapiens
caguggguccacguuucuccccggcuccucug

SEQ ID NO: 412129 - RNA, 32 nt, Homo Sapiens
ccguccccuugugaccuccccccucugaccuc

SEQ ID NO: 412130 - RNA, 32 nt, Homo Sapiens
aauauuucaaccagagacacaacuuucuggca

SEQ ID NO: 412131 - RNA, 32 nt, Homo Sapiens
caccacaauggaccgggcguccgagcugcucu

SEQ ID NO: 412132 - RNA, 32 nt, Homo Sapiens
guacaaugacaacuuuuuuggauuguacugca

SEQ ID NO: 412133 - RNA, 32 nt, Homo Sapiens
cuuacuguauaauaaaauaaucuuacaguaaa

SEQ ID NO: 412134 - RNA, 32 nt, Homo Sapiens
cagaaaggacaaagacauucgaagacugcggg

SEQ ID NO: 412135 - RNA, 32 nt, Homo Sapiens
cccagggcucugcagcaccucaccugagaccu

SEQ ID NO: 412136 - RNA, 32 nt, Homo Sapiens
caaacauguacaaaaucgauuggcuuuaaaca

SEQ ID NO: 412137 - RNA, 32 nt, Homo Sapiens
uuuuauucacaauugaauaaaaugaaaacuuc

SEQ ID NO: 412138 - RNA, 32 nt, Homo Sapiens
caaaaauaaaaccuucuuucuguaaucuacca

SEQ ID NO: 412139 - RNA, 32 nt, Homo Sapiens
ucaaaccaauaggacaauuugcugaggucuga

SEQ ID NO: 412140 - RNA, 32 nt, Homo Sapiens
aaguacuauuugcuagauucaugccucaaaag

SEQ ID NO: 412141 - RNA, 32 nt, Homo Sapiens
cagcaccucccgguaccccggcuggagggcgu

SEQ ID NO: 412142 - RNA, 32 nt, Homo Sapiens
cgcuugaggagcuucagaggaaucuuagcaaa

SEQ ID NO: 412143 - RNA, 32 nt, Homo Sapiens
gaugaaucagaauugucgggcauggagcucaa

SEQ ID NO: 412144 - RNA, 32 nt, Homo Sapiens
acuaguugaaagauucacuacaagguccaagu

SEQ ID NO: 412145 - RNA, 32 nt, Homo Sapiens
augcgcccaaggcgggcgcccggccuguuccc

SEQ ID NO: 412146 - RNA, 32 nt, Homo Sapiens
uuguuagacauuuguuuccaguuucuuacuau

SEQ ID NO: 412147 - RNA, 32 nt, Homo Sapiens
gucucugcagaccucggguccuggacccagag

SEQ ID NO: 412148 - RNA, 32 nt, Homo Sapiens
gccgucagggucacgccacucgcuggaaaccc

SEQ ID NO: 412149 - RNA, 32 nt, Homo Sapiens
acaguagaaguggaauugaauuccuagauuuc

SEQ ID NO: 412150 - RNA, 29 nt, Homo Sapiens
gcuuuauggagaguauauuuucauaugaa

SEQ ID NO: 412151 - RNA, 32 nt, Homo Sapiens
caccucuuagccuuguucuccucacuagcagu

SEQ ID NO: 412152 - RNA, 32 nt, Homo Sapiens
ccucuggacaaagcguucacucccaaccugac

SEQ ID NO: 412153 - RNA, 32 nt, Homo Sapiens
uaaaaaaaucaaaaacaaaaaaauguauuguu

SEQ ID NO: 412154 - RNA, 32 nt, Homo Sapiens
guaugccaaaaauauaugcuaagcauaauuaa

SEQ ID NO: 412155 - RNA, 32 nt, Homo Sapiens
cugcuacuuugugcaagaacuuugaaggucaa

SEQ ID NO: 412156 - RNA, 32 nt, Homo Sapiens
uugaagaggggguuuuguuccuuuuucauuuu

SEQ ID NO: 412157 - RNA, 32 nt, Homo Sapiens
acuuccgauuuacggacaucauuuuauugcua

SEQ ID NO: 412158 - RNA, 32 nt, Homo Sapiens
gaagcaaaggagaggaggaugggucagcccuc

SEQ ID NO: 412159 - RNA, 32 nt, Homo Sapiens
cuuauggcgcuugcauuuugguggaggaagac

SEQ ID NO: 412160 - RNA, 32 nt, Homo Sapiens
uucuauucugaucugcaaauagcuuaaauguc

SEQ ID NO: 412161 - RNA, 32 nt, Homo Sapiens
ggcccgagcccggcugcggcucucggaggcuu

SEQ ID NO: 412162 - RNA, 32 nt, Homo Sapiens
cuuuggagaugcuuucacucuguccgucuucu

SEQ ID NO: 412163 - RNA, 32 nt, Homo Sapiens
cugcaacccacuuuuaggucucccaccagggg

SEQ ID NO: 412164 - RNA, 32 nt, Homo Sapiens
gauccuucaaggauaaaguugaggaucacaug

SEQ ID NO: 412165 - RNA, 32 nt, Homo Sapiens
cccgcagacuguccuccggauaaacagcauug

SEQ ID NO: 412166 - RNA, 32 nt, Homo Sapiens
aguauauauacaagcggccaauaaagacauga

SEQ ID NO: 412167 - RNA, 32 nt, Homo Sapiens
ccaggcccuggagaggcccacuccuuccaccc

SEQ ID NO: 412168 - RNA, 32 nt, Homo Sapiens
gacuugccuggcccuccucccccuccgccccc

SEQ ID NO: 412169 - RNA, 32 nt, Homo Sapiens
uccccgcgccuggcucaggagugcuggaaaag

SEQ ID NO: 412170 - RNA, 32 nt, Homo Sapiens
uuguuauauuucuuuucuuuuuucuuuuauau

SEQ ID NO: 412171 - RNA, 32 nt, Homo Sapiens
cguggugcugaggagcggccucccucagcugg

SEQ ID NO: 412172 - RNA, 32 nt, Homo Sapiens
uuuguacugucaacugcauuaucuuuaauuau

SEQ ID NO: 412173 - RNA, 32 nt, Homo Sapiens
guuucucccccucccucaggaugacgcuaguu

SEQ ID NO: 412174 - RNA, 32 nt, Homo Sapiens
ucaagucacaugcacgcggauagcaguaagcc

SEQ ID NO: 412175 - RNA, 32 nt, Homo Sapiens
aacugagccaagggcucccucccucaccaaug

SEQ ID NO: 412176 - RNA, 32 nt, Homo Sapiens
guauucagaaaaguggauuuugccagauagcc

SEQ ID NO: 412177 - RNA, 32 nt, Homo Sapiens
acuuccuaugcaaauauuuuaccaccagucaa

SEQ ID NO: 412178 - RNA, 32 nt, Homo Sapiens
cuguauugacugccuucacugccuggugaucc

SEQ ID NO: 412179 - RNA, 27 nt, Homo Sapiens
cccccgaucuucuucagcuucaguuau

SEQ ID NO: 412180 - RNA, 32 nt, Homo Sapiens
uaaauguacagauaugcaaauuccauagcuca

SEQ ID NO: 412181 - RNA, 32 nt, Homo Sapiens
ucuucagggucucuuuccacagcggauaaaug

SEQ ID NO: 412182 - RNA, 32 nt, Homo Sapiens
ugcucacccgccccggcccgggaagggaauuu

SEQ ID NO: 412183 - RNA, 32 nt, Homo Sapiens
gcggggcucaggugccuggcagcgcggccggg

SEQ ID NO: 412184 - RNA, 32 nt, Homo Sapiens
ggaaggaaaacuauguauuaauuuagaauggu

SEQ ID NO: 412185 - RNA, 32 nt, Homo Sapiens
uccaguccaagcccacccccgccucgccuucc

SEQ ID NO: 412186 - RNA, 32 nt, Homo Sapiens
aggugggguacucgggaagcuggagcgggccg

SEQ ID NO: 412187 - RNA, 32 nt, Homo Sapiens
gugcuggcaggagcuucagacacgccaagugg

SEQ ID NO: 412188 - RNA, 32 nt, Homo Sapiens
auccagcaguauuugcagauuccgauuuggag

SEQ ID NO: 412189 - RNA, 32 nt, Homo Sapiens
agcgcgcacccaccgcgccggagccuugcccc

SEQ ID NO: 412190 - RNA, 32 nt, Homo Sapiens
agggauuucuuccaauaggaaaccugauguuu

SEQ ID NO: 412191 - RNA, 32 nt, Homo Sapiens
ggaguagagggagagggcagguggaacugggg

SEQ ID NO: 412192 - RNA, 32 nt, Homo Sapiens
gcucggauacuggguucccuuccuggagcauu

SEQ ID NO: 412193 - RNA, 28 nt, Homo Sapiens
uuucaccugguauccauuauaaacaauc

SEQ ID NO: 412194 - RNA, 32 nt, Homo Sapiens
auucuccauguccccuucucccucuucucaga

SEQ ID NO: 412195 - RNA, 32 nt, Homo Sapiens
uaaccuggucugacuugggugugagcagaucu

SEQ ID NO: 412196 - RNA, 32 nt, Homo Sapiens
uuuauuuaaauggucgaucaacuucccacaaa

SEQ ID NO: 412197 - RNA, 32 nt, Homo Sapiens
gggaugaagcagcuggguauuuucauaaagca

SEQ ID NO: 412198 - RNA, 32 nt, Homo Sapiens
ccagucacgcuucauggggacuagggcauguu

SEQ ID NO: 412199 - RNA, 32 nt, Homo Sapiens
cuuccugguggagcccgaggauguguacaucg

SEQ ID NO: 412200 - RNA, 32 nt, Homo Sapiens
acucucgccccgccagccccagcccugcagcc

SEQ ID NO: 412201 - RNA, 32 nt, Homo Sapiens
ccaggcuaaggggacaggggucuguuucugcu

SEQ ID NO: 412202 - RNA, 32 nt, Homo Sapiens
ccguccugagcucccacuuccacaccuacucc

SEQ ID NO: 412203 - RNA, 32 nt, Homo Sapiens
uacuguagcaaccugaaauuaacucagacaca

SEQ ID NO: 412204 - RNA, 32 nt, Homo Sapiens
auuauugcaacaaccuuugugagagaggacac

SEQ ID NO: 412205 - RNA, 32 nt, Homo Sapiens
uacuacaaaugggacaggaggugucucuucuu

SEQ ID NO: 412206 - RNA, 32 nt, Homo Sapiens
ggcggugggcgggagcggucggcggccucagc

SEQ ID NO: 412207 - RNA, 32 nt, Homo Sapiens
caggcugcugcucguugcggagaugaacagca

SEQ ID NO: 412208 - RNA, 32 nt, Homo Sapiens
aggcugggagugccgccuuccugugccaaauu

SEQ ID NO: 412209 - RNA, 31 nt, Homo Sapiens
cuuuaggaucgugucugcuuauaauauucac

SEQ ID NO: 412210 - RNA, 32 nt, Homo Sapiens
aguagugcacaaaauaugcugcuuacgugccc

SEQ ID NO: 412211 - RNA, 32 nt, Homo Sapiens
cuucuuguuguaaauugcaguacgaacuuaag

SEQ ID NO: 412212 - RNA, 32 nt, Homo Sapiens
agguggggaggguggggguagggaccacgcau

SEQ ID NO: 412213 - RNA, 32 nt, Homo Sapiens
cuccccaaucucugcccuccccacccauggug

SEQ ID NO: 412214 - RNA, 32 nt, Homo Sapiens
gcauuggucagagggacagagcaaggaaugca

SEQ ID NO: 412215 - RNA, 30 nt, Homo Sapiens
ugugaagccacccuuccucuucuggaccca

SEQ ID NO: 412216 - RNA, 32 nt, Homo Sapiens
uccucacauuuuacuaacuagcaauguucaua

SEQ ID NO: 412217 - RNA, 29 nt, Homo Sapiens
guuacuuuguguuucagccauguauuugc

SEQ ID NO: 412218 - RNA, 32 nt, Homo Sapiens
aaaagggucuaguuuuccccuuguuucuaaag

SEQ ID NO: 412219 - RNA, 32 nt, Homo Sapiens
ccucuggaggccggugugcuguagcuccagcc

SEQ ID NO: 412220 - RNA, 32 nt, Homo Sapiens
cggcgcguuuugcaugaagauggcggcuccca

SEQ ID NO: 412221 - RNA, 32 nt, Homo Sapiens
gggacacauuuuaacgucuucuuauguugacu

SEQ ID NO: 412222 - RNA, 32 nt, Homo Sapiens
agccggaggcugggagccgcggcggccugggg

SEQ ID NO: 412223 - RNA, 32 nt, Homo Sapiens
aaguccauuuuaaggcaugguuuucuauuaag

SEQ ID NO: 412224 - RNA, 32 nt, Homo Sapiens
aggaagaccccaccucacuccuccuuccccag

SEQ ID NO: 412225 - RNA, 32 nt, Homo Sapiens
cuugagaaauacuauauauacaauauauaugg

SEQ ID NO: 412226 - RNA, 31 nt, Homo Sapiens
ucaauaucucuuauuguucuauguugaaaaa

SEQ ID NO: 412227 - RNA, 32 nt, Homo Sapiens
uugcugcccuguggacacuggcugggaaggca

SEQ ID NO: 412228 - RNA, 32 nt, Homo Sapiens
ggacugcugaugccccggugcugcugagcgcc

SEQ ID NO: 412229 - RNA, 32 nt, Homo Sapiens
agaaauuucuucacucucauuuuuauagaaau

SEQ ID NO: 412230 - RNA, 32 nt, Homo Sapiens
cccugucuucgacccagcccagcccccucugu

SEQ ID NO: 412231 - RNA, 32 nt, Homo Sapiens
guguccuaacuuucccgagccuacuguacuga

SEQ ID NO: 412232 - RNA, 32 nt, Homo Sapiens
aacuuacagaugauuacgcauuuugaauucua

SEQ ID NO: 412233 - RNA, 32 nt, Homo Sapiens
ucaggaggaaauguggcucucuccaucuugca

SEQ ID NO: 412234 - RNA, 32 nt, Homo Sapiens
ucagccuggcucccuucccuggagcggcaggg

SEQ ID NO: 412235 - RNA, 32 nt, Homo Sapiens
ugaagagcagacacuuagaggcuggucgggaa

SEQ ID NO: 412236 - RNA, 32 nt, Homo Sapiens
uugaaaguucugccacccucugcugauuuuag

SEQ ID NO: 412237 - RNA, 32 nt, Homo Sapiens
ccaggugcggagaggaggcuccgugagauggg

SEQ ID NO: 412238 - RNA, 32 nt, Homo Sapiens
aacucaugagcgcccacuccaagcuguguccu

SEQ ID NO: 412239 - RNA, 32 nt, Homo Sapiens
gaguggacauagugucuugaggcuugcagggu

SEQ ID NO: 412240 - RNA, 32 nt, Homo Sapiens
cuguugguuccggccgcaccgugugggcugua

SEQ ID NO: 412241 - RNA, 32 nt, Homo Sapiens
aagcaauggaaauguuauauguuuuugacauu

SEQ ID NO: 412242 - RNA, 32 nt, Homo Sapiens
ugcugcucucaacuaaccuccacacaauggug

SEQ ID NO: 412243 - RNA, 32 nt, Homo Sapiens
caagaaagauguacacugucagagcauuguua

SEQ ID NO: 412244 - RNA, 32 nt, Homo Sapiens
augcaguaacaagcauaaaacucacaucuuaa

SEQ ID NO: 412245 - RNA, 32 nt, Homo Sapiens
cuuagauuaaaauaaaauaugcuauugaaacu

SEQ ID NO: 412246 - RNA, 32 nt, Homo Sapiens
uauauaaauauauguuucuuuuccugugaaaa

SEQ ID NO: 412247 - RNA, 32 nt, Homo Sapiens
ccccgccggcggcgcgcacggcaacuuuggag

SEQ ID NO: 412248 - RNA, 32 nt, Homo Sapiens
uugaggccugacgugggcaucauuuuaacagg

SEQ ID NO: 412249 - RNA, 32 nt, Homo Sapiens
ccccacuuucuuccuuccccagcuccacuaaa

SEQ ID NO: 412250 - RNA, 31 nt, Homo Sapiens
acuuguuauuugacuuagcaggugcaacaaa

SEQ ID NO: 412251 - RNA, 32 nt, Homo Sapiens
gucugccugcccccggccccgcgccccuacag

SEQ ID NO: 412252 - RNA, 32 nt, Homo Sapiens
cgcucugggcacccgggcgccuugcccggugc

SEQ ID NO: 412253 - RNA, 32 nt, Homo Sapiens
ccuuuuguacuauaugcaacuaacuugauuuc

SEQ ID NO: 412254 - RNA, 32 nt, Homo Sapiens
guguccaauuuuguauuuuaaaauguaaucca

SEQ ID NO: 412255 - RNA, 32 nt, Homo Sapiens
ccaucacaauacuccuucuuccuucagguccc

SEQ ID NO: 412256 - RNA, 32 nt, Homo Sapiens
acgggucgccgcugcgccgggccgggauggcg

SEQ ID NO: 412257 - RNA, 32 nt, Homo Sapiens
ccaacagagcccccauggagaaguggaggaug

SEQ ID NO: 412258 - RNA, 32 nt, Homo Sapiens
cgaggcacaggccuuccaccggcugcuggcug

SEQ ID NO: 412259 - RNA, 32 nt, Homo Sapiens
uuuguauccaacagcaaagucuacaauaaaac

SEQ ID NO: 412260 - RNA, 32 nt, Homo Sapiens
gauaucuagacaauuucuucuaauaaagucau

SEQ ID NO: 412261 - RNA, 32 nt, Homo Sapiens
uaacuuacuagauuucuguuugucuguguuuc

SEQ ID NO: 412262 - RNA, 32 nt, Homo Sapiens
accugcccgcggcccgccggcgugugcaagga

SEQ ID NO: 412263 - RNA, 32 nt, Homo Sapiens
uacaugguagaacuuuuucuucuuacaacuuu

SEQ ID NO: 412264 - RNA, 32 nt, Homo Sapiens
aggaugagaucuuaaguuuacaauuaaaaacu

SEQ ID NO: 412265 - RNA, 32 nt, Homo Sapiens
uugcucgcugggggcgggggacgauggcgaga

SEQ ID NO: 412266 - RNA, 32 nt, Homo Sapiens
augcucuaaacugaacuugaccucaauccagg

SEQ ID NO: 412267 - RNA, 32 nt, Homo Sapiens
ggcuucucucgccucccugucuugggguaguc

SEQ ID NO: 412268 - RNA, 32 nt, Homo Sapiens
ccccagccugcaccccaacugucuaccacccu

SEQ ID NO: 412269 - RNA, 32 nt, Homo Sapiens
ccagaguugaagaucugguuguuggaagcugg

SEQ ID NO: 412270 - RNA, 32 nt, Homo Sapiens
uuauuuuuuggacagagucucccuuugucacc

SEQ ID NO: 412271 - RNA, 32 nt, Homo Sapiens
cugucccuucccuccuggcccgcuggcaacuc

SEQ ID NO: 412272 - RNA, 32 nt, Homo Sapiens
uccaggagcuggaacccagagagcguccuguc

SEQ ID NO: 412273 - RNA, 32 nt, Homo Sapiens
cugucauguggaagaaaagagccuuggagaag

SEQ ID NO: 412274 - RNA, 32 nt, Homo Sapiens
ggaguauccaaguuuuaaaaguauauagaauu

SEQ ID NO: 412275 - RNA, 32 nt, Homo Sapiens
aucacuuauuuuccuuacugguagacugucgu

SEQ ID NO: 412276 - RNA, 32 nt, Homo Sapiens
ggaagcagcuggaggugacgccgggcagauua

SEQ ID NO: 412277 - RNA, 32 nt, Homo Sapiens
guucauaaaaauuuccauaauaaaaguucuau

SEQ ID NO: 412278 - RNA, 32 nt, Homo Sapiens
auauuuugaauucagucuacuuugaaaguaua

SEQ ID NO: 412279 - RNA, 32 nt, Homo Sapiens
uuucccucucgcgucucuggcugcaggugaaa

SEQ ID NO: 412280 - RNA, 32 nt, Homo Sapiens
ucuuggagagauggggaaggcuuucagcugau

SEQ ID NO: 412281 - RNA, 32 nt, Homo Sapiens
caacauaacuuucauuuuacuaauguauuuuu

SEQ ID NO: 412282 - RNA, 32 nt, Homo Sapiens
aaaggaggggagaacccagcgcaccccucccc

SEQ ID NO: 412283 - RNA, 32 nt, Homo Sapiens
gucgcgcaccccagccccaccgcccaccccgc

SEQ ID NO: 412284 - RNA, 32 nt, Homo Sapiens
auuuauacuagauuuuuuauuuccacuuauca

SEQ ID NO: 412285 - RNA, 32 nt, Homo Sapiens
uaagaugaacucucuguguucuguggucagac

SEQ ID NO: 412286 - RNA, 32 nt, Homo Sapiens
cagaccgaaguggagaucuuguagccuagaua

SEQ ID NO: 412287 - RNA, 32 nt, Homo Sapiens
gauuugggagacggugucuccacugagcaccu

SEQ ID NO: 412288 - RNA, 32 nt, Homo Sapiens
cauaguucagcugaggaagagaaucagcugau

SEQ ID NO: 412289 - RNA, 32 nt, Homo Sapiens
gggugccggcaucuccagccagcccugugaua

SEQ ID NO: 412290 - RNA, 32 nt, Homo Sapiens
ggggcgccgagcucggcagcagagagcgguag

SEQ ID NO: 412291 - RNA, 32 nt, Homo Sapiens
gcgugcaggguggacgcgugggguuccguguc

SEQ ID NO: 412292 - RNA, 32 nt, Homo Sapiens
aauguaaaauugguuaaaaauaaaaucugaaa

SEQ ID NO: 412293 - RNA, 32 nt, Homo Sapiens
uauuggaaagcagucccccaacuacccccagc

SEQ ID NO: 412294 - RNA, 30 nt, Homo Sapiens
ugaaagcagcuuuugggggaaacugaggca

SEQ ID NO: 412295 - RNA, 32 nt, Homo Sapiens
cccuuuuagaggaaacauuaucacccuccuaa

SEQ ID NO: 412296 - RNA, 32 nt, Homo Sapiens
agauggagauaggcuccugaguauuuugaaaa

SEQ ID NO: 412297 - RNA, 32 nt, Homo Sapiens
aaaagaaaaaauagacaugaaaaaccugcuuc

SEQ ID NO: 412298 - RNA, 32 nt, Homo Sapiens
cggccgcagggccaugcuagccuugcgcgugg

SEQ ID NO: 412299 - RNA, 32 nt, Homo Sapiens
uggaacugagggaaacagaaauaggagcagag

SEQ ID NO: 412300 - RNA, 32 nt, Homo Sapiens
ucugauuaugccagugcauuccagccaggaug

SEQ ID NO: 412301 - RNA, 32 nt, Homo Sapiens
cccuccgaaccucggcuggacucccuguggcc

SEQ ID NO: 412302 - RNA, 32 nt, Homo Sapiens
ggguggguagcuaaggucauuccuccuggguu

SEQ ID NO: 412303 - RNA, 32 nt, Homo Sapiens
aauguggcauagccucuucccaguucucaacu

SEQ ID NO: 412304 - RNA, 32 nt, Homo Sapiens
agcucuuuguuuaaguuuuguguuagaggcuc

SEQ ID NO: 412305 - RNA, 32 nt, Homo Sapiens
uuagauuugacugguuuugcagaagauuacag

SEQ ID NO: 412306 - RNA, 32 nt, Homo Sapiens
uggagggagcggggcgcggauccggcccagau

SEQ ID NO: 412307 - RNA, 32 nt, Homo Sapiens
augaaaggccccagcugggggcuccuugccac

SEQ ID NO: 412308 - RNA, 32 nt, Homo Sapiens
ugugcauagaaagguuuaguaggguacuuuuu

SEQ ID NO: 412309 - RNA, 32 nt, Homo Sapiens
ugcaugcgcccgaggcagacgucugucagggg

SEQ ID NO: 412310 - RNA, 32 nt, Homo Sapiens
auaaauauauaaauaaauacgagaacgaaauc

SEQ ID NO: 412311 - RNA, 32 nt, Homo Sapiens
agcuuuuuacuuuauuaagauuuuacagcgaa

SEQ ID NO: 412312 - RNA, 32 nt, Homo Sapiens
acagcaguauuuuuuaaaaaucaaaauuaaug

SEQ ID NO: 412313 - RNA, 32 nt, Homo Sapiens
gauuggcccagcuuggagugcuuguguggucc

SEQ ID NO: 412314 - RNA, 32 nt, Homo Sapiens
acgggcuagaaaaggauuucuacggcuaccag

SEQ ID NO: 412315 - RNA, 32 nt, Homo Sapiens
cagaggcucgggcuuguuugaggguucacgac

SEQ ID NO: 412316 - RNA, 32 nt, Homo Sapiens
agagaccacauccacccagggauuaggguuca

SEQ ID NO: 412317 - RNA, 32 nt, Homo Sapiens
aacgccacccccacccccuccuccuguuggcu

SEQ ID NO: 412318 - RNA, 32 nt, Homo Sapiens
uggauccugugaguucuuugggaaauacauuu

SEQ ID NO: 412319 - RNA, 28 nt, Homo Sapiens
ucugggccuucucgccagcacaucguug

SEQ ID NO: 412320 - RNA, 32 nt, Homo Sapiens
auaaggaaaagagucuauguauuuucaguaua

SEQ ID NO: 412321 - RNA, 32 nt, Homo Sapiens
ugccccgcggcacgcugccccugcacgcgcug

SEQ ID NO: 412322 - RNA, 32 nt, Homo Sapiens
ggccuguuacacuuguuugauaccuuuuucau

SEQ ID NO: 412323 - RNA, 32 nt, Homo Sapiens
agauggguucuaaugcagcugcuggggccuga

SEQ ID NO: 412324 - RNA, 32 nt, Homo Sapiens
ucaugugucauuccaagguuucuucaugaguc

SEQ ID NO: 412325 - RNA, 32 nt, Homo Sapiens
gguccaucgcccacuggacgccgcccgcggcc

SEQ ID NO: 412326 - RNA, 32 nt, Homo Sapiens
ccuuuuccacacuccuccuccgacagcagcuc

SEQ ID NO: 412327 - RNA, 32 nt, Homo Sapiens
uuacagacaaggaaaucaagacccagcuuggg

SEQ ID NO: 412328 - RNA, 32 nt, Homo Sapiens
ccagggaagagccgcugcagccgcacaaccua

SEQ ID NO: 412329 - RNA, 32 nt, Homo Sapiens
uuguaaaaaaaauuauuuuuuuaauuuugugg

SEQ ID NO: 412330 - RNA, 32 nt, Homo Sapiens
ggauccuggcugggccucccccgggaacagcu

SEQ ID NO: 412331 - RNA, 32 nt, Homo Sapiens
cucuauucccaaggcguccgcgcgccagcaca

SEQ ID NO: 412332 - RNA, 32 nt, Homo Sapiens
caagaguauaguauauuuauuugaaaugggaa

SEQ ID NO: 412333 - RNA, 30 nt, Homo Sapiens
ugggcucugcucagcuauucuugggccaga

SEQ ID NO: 412334 - RNA, 32 nt, Homo Sapiens
uauaagcaaaaggagauagagaucugaaauaa

SEQ ID NO: 412335 - RNA, 32 nt, Homo Sapiens
ucaggcauuccagccacagaacaucaaaguga

SEQ ID NO: 412336 - RNA, 32 nt, Homo Sapiens
ugcaggcaugagccacugcucccggcccuauu

SEQ ID NO: 412337 - RNA, 32 nt, Homo Sapiens
uagucgggcgggguugugagacgccgcgcuca

SEQ ID NO: 412338 - RNA, 32 nt, Homo Sapiens
acaugagguuuuuuguuuuuuauccagaaaua

SEQ ID NO: 412339 - RNA, 32 nt, Homo Sapiens
uauaacucuuagaguugagacgcuaauguuca

SEQ ID NO: 412340 - RNA, 32 nt, Homo Sapiens
uucaccagaaaagguaaugagugaaggaaaga

SEQ ID NO: 412341 - RNA, 32 nt, Homo Sapiens
aucaucauuagaagaucacauaaaaaugaagc

SEQ ID NO: 412342 - RNA, 32 nt, Homo Sapiens
ccagucgcuccuuaccgugacuccugcccuug

SEQ ID NO: 412343 - RNA, 32 nt, Homo Sapiens
gccuucuauacuuauaauuuaaaggauuggug

SEQ ID NO: 412344 - RNA, 32 nt, Homo Sapiens
ugcugggaauaccacugaugagacagacaagg

SEQ ID NO: 412345 - RNA, 32 nt, Homo Sapiens
gcucaaaggagagucaaggaaaccgcuggcag

SEQ ID NO: 412346 - RNA, 32 nt, Homo Sapiens
auauacaaacuuaaaggacucucucugagguu

SEQ ID NO: 412347 - RNA, 32 nt, Homo Sapiens
acuguuuuuugguuuuuccuuaauguuuuuaa

SEQ ID NO: 412348 - RNA, 32 nt, Homo Sapiens
gucaaguuauuucuccuucucucugcuucaug

SEQ ID NO: 412349 - RNA, 32 nt, Homo Sapiens
aggagaaagaucuggaaacuauuuggguuuug

SEQ ID NO: 412350 - RNA, 32 nt, Homo Sapiens
agaccugugugcucugcugcauuuauaggguu

SEQ ID NO: 412351 - RNA, 32 nt, Homo Sapiens
gcaugauagagcucguguguuucuuuucuuuu

SEQ ID NO: 412352 - RNA, 32 nt, Homo Sapiens
cccuguguccuacagaccgacggcacaacaga

SEQ ID NO: 412353 - RNA, 32 nt, Homo Sapiens
aauuucaguuuaggacacugaauaacuuggcu

SEQ ID NO: 412354 - RNA, 32 nt, Homo Sapiens
uauccuacuuuuuucuguugaacauaugacuu

SEQ ID NO: 412355 - RNA, 32 nt, Homo Sapiens
ggaggaggaagccauggaugacaugcugacca

SEQ ID NO: 412356 - RNA, 32 nt, Homo Sapiens
caaaagaaacgcaucuggccugcgagucccgg

SEQ ID NO: 412357 - RNA, 32 nt, Homo Sapiens
ucuguucuguuuuuuauucagaaugaaaugaa

SEQ ID NO: 412358 - RNA, 32 nt, Homo Sapiens
aaggcuguucaggugggaccauggugcucuuu

SEQ ID NO: 412359 - RNA, 32 nt, Homo Sapiens
ugcgcucuagccugggcaacaacagcaaaacu

SEQ ID NO: 412360 - RNA, 32 nt, Homo Sapiens
gagagcuagcugagcgaaugggccggcgacug

SEQ ID NO: 412361 - RNA, 32 nt, Homo Sapiens
ugccgggcgugguggcucacgcccauaaucca

SEQ ID NO: 412362 - RNA, 32 nt, Homo Sapiens
augacuauuuuguuaggaacauuugaguuacu

SEQ ID NO: 412363 - RNA, 32 nt, Homo Sapiens
uuaauuuuuucuuuuccugguucuacuaauua

SEQ ID NO: 412364 - RNA, 32 nt, Homo Sapiens
ccaauaaugcaaacaaaauugggcuaauaaaa

SEQ ID NO: 412365 - RNA, 32 nt, Homo Sapiens
gccucugcugccgccguccgcgggaugcucag

SEQ ID NO: 412366 - RNA, 32 nt, Homo Sapiens
uuaaacuccgguuucaaacucccucgcuuugc

SEQ ID NO: 412367 - RNA, 32 nt, Homo Sapiens
gcaaagccagacccgggcgcugccgagacccc

SEQ ID NO: 412368 - RNA, 32 nt, Homo Sapiens
cggagcuggugaggacagccugccagagucug

SEQ ID NO: 412369 - RNA, 32 nt, Homo Sapiens
auggaccacgauagcaucguggcaccguaagg

SEQ ID NO: 412370 - RNA, 32 nt, Homo Sapiens
ccuuccuucucagcccucgaggaugcauauag

SEQ ID NO: 412371 - RNA, 32 nt, Homo Sapiens
agcucggccgcgcgucucagccgccggggccc

SEQ ID NO: 412372 - RNA, 32 nt, Homo Sapiens
caucuguuggucacaggugaaauggugucuga

SEQ ID NO: 412373 - RNA, 32 nt, Homo Sapiens
uuucuaucucaaaauauuaccuuauacuugcu

SEQ ID NO: 412374 - RNA, 32 nt, Homo Sapiens
auuuuuuaaaaauuaauaaacaaauugucuaa

SEQ ID NO: 412375 - RNA, 32 nt, Homo Sapiens
uugacaggagugcacaguguugugaaauacuu

SEQ ID NO: 412376 - RNA, 32 nt, Homo Sapiens
cugggaggaggcugaggccugugaagccaaac

SEQ ID NO: 412377 - RNA, 30 nt, Homo Sapiens
ugggagggcaggcguugguuccaagccggu

SEQ ID NO: 412378 - RNA, 32 nt, Homo Sapiens
ccagccuucuugcgccggagacgaacccgcug

SEQ ID NO: 412379 - RNA, 32 nt, Homo Sapiens
gccuuccacgggggagggagccugccagcugc

SEQ ID NO: 412380 - RNA, 32 nt, Homo Sapiens
gcagccagggccgcucggggccccccgggaac

SEQ ID NO: 412381 - RNA, 32 nt, Homo Sapiens
gcgcgcgacccggcggcgggacaggcuugcug

SEQ ID NO: 412382 - RNA, 32 nt, Homo Sapiens
gagcguccgcccgcgccgccgucguccgcagc

SEQ ID NO: 412383 - RNA, 32 nt, Homo Sapiens
gaagcaauuacauuuacuuauuuacaacaucc

SEQ ID NO: 412384 - RNA, 32 nt, Homo Sapiens
auuucgccuccggacagcggcgucugggcagg

SEQ ID NO: 412385 - RNA, 32 nt, Homo Sapiens
auuggcaaaagaccacuuuuaccacucaggcu

SEQ ID NO: 412386 - RNA, 32 nt, Homo Sapiens
uuuucugagaauaaagguuuuguuauaucaaa

SEQ ID NO: 412387 - RNA, 32 nt, Homo Sapiens
aaugaaaaacgcaucucauuguaggcauuuuu

SEQ ID NO: 412388 - RNA, 32 nt, Homo Sapiens
aaaagagaaaaauuauuucagugauuugucaa

SEQ ID NO: 412389 - RNA, 32 nt, Homo Sapiens
acuuggcgggccagaugugggcggcggggcgc

SEQ ID NO: 412390 - RNA, 31 nt, Homo Sapiens
ggggaggagugcgcugcgacggccguggcga

SEQ ID NO: 412391 - RNA, 32 nt, Homo Sapiens
gcaggggccccggauugagcccuccccgcccg

SEQ ID NO: 412392 - RNA, 32 nt, Homo Sapiens
ggcagcccugaacacccauuugugcucacagg

SEQ ID NO: 412393 - RNA, 32 nt, Homo Sapiens
ucgaguccagcccccaggaagccugcuccccu

SEQ ID NO: 412394 - RNA, 31 nt, Homo Sapiens
ccugguuaguacauucucagaggauucugaa

SEQ ID NO: 412395 - RNA, 32 nt, Homo Sapiens
guccuaagaauuuuuacccagggccugucuuc

SEQ ID NO: 412396 - RNA, 32 nt, Homo Sapiens
uuuucuuuacuuuucugaaccauaaugaaaau

SEQ ID NO: 412397 - RNA, 31 nt, Homo Sapiens
cuccccgggcccucagcuugaagcagggccu

SEQ ID NO: 412398 - RNA, 32 nt, Homo Sapiens
guggugagcugcggccgggucgcugcaacucg

SEQ ID NO: 412399 - RNA, 32 nt, Homo Sapiens
uaaaauuguaaauaaauaauguuauguaucag

SEQ ID NO: 412400 - RNA, 32 nt, Homo Sapiens
ccacgcccucugauucccaccccuccccaacu

SEQ ID NO: 412401 - RNA, 32 nt, Homo Sapiens
aaaauacaaaaaauuacccagccgugguggcu

SEQ ID NO: 412402 - RNA, 32 nt, Homo Sapiens
aaauguggcuaaacagaagaguuagagagcuc

SEQ ID NO: 412403 - RNA, 30 nt, Homo Sapiens
ccauguaagcucucuucuucucgaaaaggu

SEQ ID NO: 412404 - RNA, 32 nt, Homo Sapiens
agugcaaaauggucaguauuaucuaaaugaau

SEQ ID NO: 412405 - RNA, 32 nt, Homo Sapiens
cccaucuucaucugcccugcacucacaggagc

SEQ ID NO: 412406 - RNA, 32 nt, Homo Sapiens
ggagagagggggagaccccuuugccuuccccc

SEQ ID NO: 412407 - RNA, 30 nt, Homo Sapiens
gaacgcgcccucucgccgcgcgcgcccucg

SEQ ID NO: 412408 - RNA, 32 nt, Homo Sapiens
uaacuuuuuacuacuuuuuguuacuguuucug

SEQ ID NO: 412409 - RNA, 32 nt, Homo Sapiens
agggggagacugggcgaucuggaacagcacgu

SEQ ID NO: 412410 - RNA, 29 nt, Homo Sapiens
aaacgauuagugauguccuuaaaaugugg

SEQ ID NO: 412411 - RNA, 32 nt, Homo Sapiens
uggcucccaagagccucuugaucggggcagga

SEQ ID NO: 412412 - RNA, 32 nt, Homo Sapiens
caugacagauucuggaggauaaccagcaggag

SEQ ID NO: 412413 - RNA, 32 nt, Homo Sapiens
ccugggcccacugugccucuccccucaguguc

SEQ ID NO: 412414 - RNA, 32 nt, Homo Sapiens
uugaaaugucauuucauuuuguggcuccagcc

SEQ ID NO: 412415 - RNA, 32 nt, Homo Sapiens
ucaguguaaaaugucuuagauaauaaaacuaa

SEQ ID NO: 412416 - RNA, 32 nt, Homo Sapiens
uauacuuugaguuucauaugaaauugaaaaau

SEQ ID NO: 412417 - RNA, 32 nt, Homo Sapiens
gugaggcugcugccauccaugugcuagucacu

SEQ ID NO: 412418 - RNA, 32 nt, Homo Sapiens
ccaaugcuguuguaaauugaauuuaaaguggu

SEQ ID NO: 412419 - RNA, 32 nt, Homo Sapiens
auauugccuuuuacugcucuuuauggcuuauu

SEQ ID NO: 412420 - RNA, 32 nt, Homo Sapiens
uuugagaauuuauguaucacugaguuuuuugg

SEQ ID NO: 412421 - RNA, 32 nt, Homo Sapiens
cucucuagaaccugggcugugcugcuuuugag

SEQ ID NO: 412422 - RNA, 32 nt, Homo Sapiens
uacaguggcuguaaaaaguuuguauuuauuau

SEQ ID NO: 412423 - RNA, 32 nt, Homo Sapiens
gucaggguuccuuaaucuccucuucuuucauc

SEQ ID NO: 412424 - RNA, 32 nt, Homo Sapiens
uuuuguuucuuacgcuugcuaucauggcagca

SEQ ID NO: 412425 - RNA, 32 nt, Homo Sapiens
aucagguacaacuccgcccgccuacauuggag

SEQ ID NO: 412426 - RNA, 32 nt, Homo Sapiens
gcaugagcgggcaggcuggggguauguguggc

SEQ ID NO: 412427 - RNA, 32 nt, Homo Sapiens
guuuucuuucccuuaauuuccuuuccuaagcu

SEQ ID NO: 412428 - RNA, 32 nt, Homo Sapiens
caagcaguggaguggagaaggggccagggguu

SEQ ID NO: 412429 - RNA, 32 nt, Homo Sapiens
ucuagccuggggaauagagugagauccugccu

SEQ ID NO: 412430 - RNA, 32 nt, Homo Sapiens
gggugagccaagggcacuuugcugccaccgcu

SEQ ID NO: 412431 - RNA, 32 nt, Homo Sapiens
accaccuuaaugaaauuaaaagaauugagaag

SEQ ID NO: 412432 - RNA, 32 nt, Homo Sapiens
aaaauggcacccuucugacauucugaggcagc

SEQ ID NO: 412433 - RNA, 32 nt, Homo Sapiens
cuacuauucaggacuaaucuauacuuauucug

SEQ ID NO: 412434 - RNA, 32 nt, Homo Sapiens
cucuggcgagggcuccagcaucacaggcggcg

SEQ ID NO: 412435 - RNA, 32 nt, Homo Sapiens
ggcgcugccuacgugcagcaucagggaugucg

SEQ ID NO: 412436 - RNA, 32 nt, Homo Sapiens
aaaaggccuccauuuuaaaugucauucauaua

SEQ ID NO: 412437 - RNA, 32 nt, Homo Sapiens
gguguuuuuauuuuuuuuuucuuauggaaaaa

SEQ ID NO: 412438 - RNA, 32 nt, Homo Sapiens
aggggagauugugaccuauugcuggccccaac

SEQ ID NO: 412439 - RNA, 32 nt, Homo Sapiens
uugcaauauacaauuuuaaaaauacacauaca

SEQ ID NO: 412440 - RNA, 32 nt, Homo Sapiens
uggcugccaucggcuguugaugccaugaauga

SEQ ID NO: 412441 - RNA, 32 nt, Homo Sapiens
cacugcacuccagccugggugacagcgagacc

SEQ ID NO: 412442 - RNA, 32 nt, Homo Sapiens
gcucuaaaaaucagagcucucaaugaaaacaa

SEQ ID NO: 412443 - RNA, 32 nt, Homo Sapiens
ggcccagccaugccgaagccacucagccccag

SEQ ID NO: 412444 - RNA, 32 nt, Homo Sapiens
gaugaucagaggucuugaggucuugacaucuu

SEQ ID NO: 412445 - RNA, 32 nt, Homo Sapiens
gcgggucccagaggcauggguguccaguccaa

SEQ ID NO: 412446 - RNA, 32 nt, Homo Sapiens
caaaguugguuucuguuuuuuguuuucuuugu

SEQ ID NO: 412447 - RNA, 32 nt, Homo Sapiens
uguugugcuuagaauugcuggaugcauuuuua

SEQ ID NO: 412448 - RNA, 32 nt, Homo Sapiens
uugcaaagcacuuuuccauauguguguccucu

SEQ ID NO: 412449 - RNA, 32 nt, Homo Sapiens
aauuauaaacagcucggcuuguccuuguccca

SEQ ID NO: 412450 - RNA, 32 nt, Homo Sapiens
cuaccugggugcccucccccuccgggagccug

SEQ ID NO: 412451 - RNA, 32 nt, Homo Sapiens
auccccagccccagccccagcccagucccuuu

SEQ ID NO: 412452 - RNA, 32 nt, Homo Sapiens
ggcgggggccggggagcgccagaugauggauu

SEQ ID NO: 412453 - RNA, 32 nt, Homo Sapiens
gguggauguucccggcgugugccgggccugaa

SEQ ID NO: 412454 - RNA, 32 nt, Homo Sapiens
acaaggcaggauaugugggaagaauauguaca

SEQ ID NO: 412455 - RNA, 32 nt, Homo Sapiens
uugcccacacugugggaagacggaguggacca

SEQ ID NO: 412456 - RNA, 32 nt, Homo Sapiens
cccuggcgugacucggcacugagagucccggg

SEQ ID NO: 412457 - RNA, 32 nt, Homo Sapiens
uugaugauugcuaugucaggcuuucaucuaau

SEQ ID NO: 412458 - RNA, 32 nt, Homo Sapiens
ccgcugggaccucggcgcgccccgcgucugcg

SEQ ID NO: 412459 - RNA, 32 nt, Homo Sapiens
auuccuugacuucccuccugcugguguuuuaa

SEQ ID NO: 412460 - RNA, 28 nt, Homo Sapiens
ccuggacaacagagcuagacuccaucuc

SEQ ID NO: 412461 - RNA, 32 nt, Homo Sapiens
uuaguagaauucuagaaguuuacuucuaauca

SEQ ID NO: 412462 - RNA, 32 nt, Homo Sapiens
aggccccucagccccaggagcaguacucgcuc

SEQ ID NO: 412463 - RNA, 31 nt, Homo Sapiens
aacauagugugaaugaaagucuggccaacag

SEQ ID NO: 412464 - RNA, 32 nt, Homo Sapiens
guugcuucuaaagaugaauggccuucagagaa

SEQ ID NO: 412465 - RNA, 28 nt, Homo Sapiens
gagaugcuacugccacugcugcuguccu

SEQ ID NO: 412466 - RNA, 31 nt, Homo Sapiens
agcgccucggccgcccugccccagccucgua

SEQ ID NO: 412467 - RNA, 32 nt, Homo Sapiens
guagaucacagccagcagcagggccaacacca

SEQ ID NO: 412468 - RNA, 32 nt, Homo Sapiens
caugccuuucaaaaguuuuuauuaucugaaag

SEQ ID NO: 412469 - RNA, 32 nt, Homo Sapiens
cuugauccuauuaauuuauaugcugauauugu

SEQ ID NO: 412470 - RNA, 32 nt, Homo Sapiens
acugcgguguugcccgguuaucuagaugagca

SEQ ID NO: 412471 - RNA, 32 nt, Homo Sapiens
gcugccaugggguugggucccugaggccuucc

SEQ ID NO: 412472 - RNA, 32 nt, Homo Sapiens
auacauggacaccgacacaggcacauguacau

SEQ ID NO: 412473 - RNA, 32 nt, Homo Sapiens
aauccuuaauaauaaguaaaucuuguguuauc

SEQ ID NO: 412474 - RNA, 32 nt, Homo Sapiens
gccuggccgggcgugguggcgugagccugucg

SEQ ID NO: 412475 - RNA, 32 nt, Homo Sapiens
uccuggaggacgggaccaccacagucccagag

SEQ ID NO: 412476 - RNA, 32 nt, Homo Sapiens
ucuuuuuuauuacacuucgaauuuuaggguac

SEQ ID NO: 412477 - RNA, 32 nt, Homo Sapiens
gguauauggaaacacauugcucuacccugcua

SEQ ID NO: 412478 - RNA, 32 nt, Homo Sapiens
cuggcccuggggacuguuggcugcucucccaa

SEQ ID NO: 412479 - RNA, 32 nt, Homo Sapiens
uaaguuagaggugugcaccgggauaaaucugc

SEQ ID NO: 412480 - RNA, 32 nt, Homo Sapiens
ugccuggggcggugcugcaccaggugcgggug

SEQ ID NO: 412481 - RNA, 32 nt, Homo Sapiens
ugccuccuguucccaucccccagcccuggcuc

SEQ ID NO: 412482 - RNA, 32 nt, Homo Sapiens
uuaaucaucuucucuuuuuccagaauuuggaa

SEQ ID NO: 412483 - RNA, 32 nt, Homo Sapiens
caggcuggcccuuccuucuccucaccgccacc

SEQ ID NO: 412484 - RNA, 32 nt, Homo Sapiens
ugugugugcgcgcgcuaguguguggacaagga

SEQ ID NO: 412485 - RNA, 32 nt, Homo Sapiens
gcaacccaguguccauggauagaugaauagau

SEQ ID NO: 412486 - RNA, 32 nt, Homo Sapiens
cagaaaccaauuuucuuuuuuauacucaauca

SEQ ID NO: 412487 - RNA, 32 nt, Homo Sapiens
caguccguaucugugaggccagcaaauauuuu

SEQ ID NO: 412488 - RNA, 32 nt, Homo Sapiens
gcgggcaugugagugcacaagauggaaagagc

SEQ ID NO: 412489 - RNA, 32 nt, Homo Sapiens
gagcugagaucaccccacuguccuccagccug

SEQ ID NO: 412490 - RNA, 32 nt, Homo Sapiens
ccacgcggccgagaggcugggaggcgccccgg

SEQ ID NO: 412491 - RNA, 29 nt, Homo Sapiens
cuggcucggggacagccgcugggugucgg

SEQ ID NO: 412492 - RNA, 32 nt, Homo Sapiens
cuggcccccggagagcgaagggcgggcggguc

SEQ ID NO: 412493 - RNA, 32 nt, Homo Sapiens
aauugaaauguuuggaaccuuuagcacagauu

SEQ ID NO: 412494 - RNA, 32 nt, Homo Sapiens
ggaaggcauuauuuuuuaaaauacuuaguaaa

SEQ ID NO: 412495 - RNA, 32 nt, Homo Sapiens
cuagcuuagaauuuauaaucagauuagguuuu

SEQ ID NO: 412496 - RNA, 32 nt, Homo Sapiens
ggugggggacuucccgagucugccgggaccau

SEQ ID NO: 412497 - RNA, 31 nt, Homo Sapiens
caagggaaaccacuauccugaguucuaagcg

SEQ ID NO: 412498 - RNA, 32 nt, Homo Sapiens
uugaaaacaaaguuuugaauuggcuauaggac

SEQ ID NO: 412499 - RNA, 32 nt, Homo Sapiens
uuaaggucaggaguucgagaccagccuggcca

SEQ ID NO: 412500 - RNA, 32 nt, Homo Sapiens
guggggagggugguuuacaggggugcucugug

SEQ ID NO: 412501 - RNA, 32 nt, Homo Sapiens
gggcuuuggaagcucuguugcagguguccggg

SEQ ID NO: 412502 - RNA, 32 nt, Homo Sapiens
guaggaagagcuguaaucaauauuuuucaaac

SEQ ID NO: 412503 - RNA, 32 nt, Homo Sapiens
uggcagcacggcccggccccucacccucuguc

SEQ ID NO: 412504 - RNA, 32 nt, Homo Sapiens
gcaccaaagaugauucauaacucuguauaggu

SEQ ID NO: 412505 - RNA, 32 nt, Homo Sapiens
agagcacuuuagcagaugugguuucaaaguaa

SEQ ID NO: 412506 - RNA, 32 nt, Homo Sapiens
guuucaugaaacaauuuuacaaauggcagaga

SEQ ID NO: 412507 - RNA, 32 nt, Homo Sapiens
cgcccgcuucccucaccuccuuuuccagccuu

SEQ ID NO: 412508 - RNA, 30 nt, Homo Sapiens
aucuaggagucucuugaugagcauuggucg

SEQ ID NO: 412509 - RNA, 32 nt, Homo Sapiens
uggcaaauggggaauaaaaagauuuuguguca

SEQ ID NO: 412510 - RNA, 32 nt, Homo Sapiens
augggggccucacaagccccagccucagcuau

SEQ ID NO: 412511 - RNA, 32 nt, Homo Sapiens
aguaaggcuuuuguucagaaaucaccuuuagu

SEQ ID NO: 412512 - RNA, 32 nt, Homo Sapiens
cagcagagauggagagugacucuguuggcaga

SEQ ID NO: 412513 - RNA, 32 nt, Homo Sapiens
ccacuagaggggcuacaagaacugcaaugugc

SEQ ID NO: 412514 - RNA, 32 nt, Homo Sapiens
cccugccaggacugggacgcugcugcuggcgc

SEQ ID NO: 412515 - RNA, 32 nt, Homo Sapiens
cuguaccauuuuauaucagggauuugagcauc

SEQ ID NO: 412516 - RNA, 32 nt, Homo Sapiens
agagggaaaguaaccaucuaugcugaaaugau

SEQ ID NO: 412517 - RNA, 32 nt, Homo Sapiens
gugaugaugucuuaacucuacuuagagagugu

SEQ ID NO: 412518 - RNA, 32 nt, Homo Sapiens
cugccucccucugcuguguucccacagacaga

SEQ ID NO: 412519 - RNA, 29 nt, Homo Sapiens
uccauuucuaaauaccagacuucaaaaga

SEQ ID NO: 412520 - RNA, 32 nt, Homo Sapiens
ggucacucacugacacggugcccccuuugcuu

SEQ ID NO: 412521 - RNA, 32 nt, Homo Sapiens
gguccagguaagaagggaaaauagacugggag

SEQ ID NO: 412522 - RNA, 32 nt, Homo Sapiens
uaugauuucagugggguugacaguguugccua

SEQ ID NO: 412523 - RNA, 32 nt, Homo Sapiens
gaggaaccuggggcccgcuccuccccccucca

SEQ ID NO: 412524 - RNA, 32 nt, Homo Sapiens
aagaaaaggggagggggaaggcaagaaucacu

SEQ ID NO: 412525 - RNA, 32 nt, Homo Sapiens
aaacaguagagcuagcaaugacaccuugcauu

SEQ ID NO: 412526 - RNA, 32 nt, Homo Sapiens
cuguuuuuauagcacauagaugucuguaacca

SEQ ID NO: 412527 - RNA, 32 nt, Homo Sapiens
acguugcucaauaaaacaaaucuugcaacugu

SEQ ID NO: 412528 - RNA, 32 nt, Homo Sapiens
uuucugcccucaaguugcucuaucuccugaaa

SEQ ID NO: 412529 - RNA, 32 nt, Homo Sapiens
aagcucccaagagcuuccagagcucugaccca

SEQ ID NO: 412530 - RNA, 32 nt, Homo Sapiens
cugcgaugggccgcacauuuucgccgccaguc

SEQ ID NO: 412531 - RNA, 32 nt, Homo Sapiens
uucuccccagagcgggacccucuuacuucccc

SEQ ID NO: 412532 - RNA, 32 nt, Homo Sapiens
gcaccgagcaaaccaagugccggagcaccagc

SEQ ID NO: 412533 - RNA, 32 nt, Homo Sapiens
cgcugccaugcggcuggcgcugcucugggccc

SEQ ID NO: 412534 - RNA, 32 nt, Homo Sapiens
ucacugccaagagcccugaacaggagccacca

SEQ ID NO: 412535 - RNA, 32 nt, Homo Sapiens
cagucauuuuauuuggaggaaauauuugaaca

SEQ ID NO: 412536 - RNA, 32 nt, Homo Sapiens
auuccacaaccugguuugccaguucaucuuuu

SEQ ID NO: 412537 - RNA, 32 nt, Homo Sapiens
acuugaugaugaugugcaggcacaaaucuuug

SEQ ID NO: 412538 - RNA, 32 nt, Homo Sapiens
caauuagcguuaccaaaauuaaaguucaaauu

SEQ ID NO: 412539 - RNA, 32 nt, Homo Sapiens
ggcggcgccggcgccccgcccgggaaaguaaa

SEQ ID NO: 412540 - RNA, 32 nt, Homo Sapiens
cccguuccuucugccuacaaauaaaaagugca

SEQ ID NO: 412541 - RNA, 32 nt, Homo Sapiens
cucccuggagagagggcggcgagggcgcaggg

SEQ ID NO: 412542 - RNA, 32 nt, Homo Sapiens
ccggccgggcagagacccuuuuuaaagccacg

SEQ ID NO: 412543 - RNA, 32 nt, Homo Sapiens
uccuuuuguuaacgugaugugccacuauauuu

SEQ ID NO: 412544 - RNA, 32 nt, Homo Sapiens
gggcggcgggcuccgcgcagccgucuguccuu

SEQ ID NO: 412545 - RNA, 32 nt, Homo Sapiens
ccacaaaccugcugcuguggguucuggccguu

SEQ ID NO: 412546 - RNA, 32 nt, Homo Sapiens
augagcuauacugauaaugacaauggugauag

SEQ ID NO: 412547 - RNA, 32 nt, Homo Sapiens
ucgcacaaugcaugugcugucuccaugcugga

SEQ ID NO: 412548 - RNA, 32 nt, Homo Sapiens
ucauguccugaacaacaucacugugguuacuc

SEQ ID NO: 412549 - RNA, 32 nt, Homo Sapiens
aauacuuuuaucaccgauauccuuuuaugaaa

SEQ ID NO: 412550 - RNA, 32 nt, Homo Sapiens
uucagacguuugcggcuuacagaggcagcgcc

SEQ ID NO: 412551 - RNA, 32 nt, Homo Sapiens
ucagugugugccuguuuacagcacuaucuauc

SEQ ID NO: 412552 - RNA, 32 nt, Homo Sapiens
uuguguacaaguuugucugugacuugaagacu

SEQ ID NO: 412553 - RNA, 32 nt, Homo Sapiens
uugugaccuguguggggaccaacuucgugcuc

SEQ ID NO: 412554 - RNA, 32 nt, Homo Sapiens
caaugaacuuuuaugacuuuuaacuuucucug

SEQ ID NO: 412555 - RNA, 32 nt, Homo Sapiens
cagccuggaagacauggcagcggguagcuccu

SEQ ID NO: 412556 - RNA, 32 nt, Homo Sapiens
accaaacacugcuuugaauuauaggaggagaa

SEQ ID NO: 412557 - RNA, 32 nt, Homo Sapiens
gauuccacaccucucuuccccagccggcaacg

SEQ ID NO: 412558 - RNA, 32 nt, Homo Sapiens
aauauauuuaauguggaaugucaaugccagga

SEQ ID NO: 412559 - RNA, 32 nt, Homo Sapiens
accccccgccgaucaugcgccggcgccccugg

SEQ ID NO: 412560 - RNA, 32 nt, Homo Sapiens
cagagugcugccaucaccaaguauguggcgga

SEQ ID NO: 412561 - RNA, 32 nt, Homo Sapiens
ggccaagagugcuuucuuggggccccagcuuu

SEQ ID NO: 412562 - RNA, 32 nt, Homo Sapiens
aaaugaaaugguaucuaaaauaaacaagcugu

SEQ ID NO: 412563 - RNA, 32 nt, Homo Sapiens
uuaucugauagaacaagcugguggcugauggg

SEQ ID NO: 412564 - RNA, 32 nt, Homo Sapiens
ggaaaaucccuugccacccccccucccuuggu

SEQ ID NO: 412565 - RNA, 32 nt, Homo Sapiens
uuuaauuaucuaaguuuuaauacaagaacgau

SEQ ID NO: 412566 - RNA, 32 nt, Homo Sapiens
gccccgacggcugcgggccccggagccaagag

SEQ ID NO: 412567 - RNA, 32 nt, Homo Sapiens
cgaaggcgccgcugcgcaagccgcgcagccgg

SEQ ID NO: 412568 - RNA, 32 nt, Homo Sapiens
caaguagagauuacacccagcacaccauuccu

SEQ ID NO: 412569 - RNA, 32 nt, Homo Sapiens
cucuguuuuuugcugugucaucucugccuuga

SEQ ID NO: 412570 - RNA, 32 nt, Homo Sapiens
cuaaauuuguaauuucuuucuccuuucaaaaa

SEQ ID NO: 412571 - RNA, 32 nt, Homo Sapiens
ccuguuuuuagagcuuccaaaugugucagaau

SEQ ID NO: 412572 - RNA, 32 nt, Homo Sapiens
gggcugucgaccucuccucccgugggggcuuc

SEQ ID NO: 412573 - RNA, 32 nt, Homo Sapiens
cccaccccuccuccccgcgccaugcuuggaag

SEQ ID NO: 412574 - RNA, 32 nt, Homo Sapiens
accgggggugcuggcgaccgggaccucgaggc

SEQ ID NO: 412575 - RNA, 32 nt, Homo Sapiens
agauacugcacggagagcagugccaagccugu

SEQ ID NO: 412576 - RNA, 32 nt, Homo Sapiens
ccauuuaugaacuggucuaaaucccaagaaug

SEQ ID NO: 412577 - RNA, 32 nt, Homo Sapiens
auuuugugaugcugaagggaaauguacaagag

SEQ ID NO: 412578 - RNA, 32 nt, Homo Sapiens
augggggaaagugcuaugaugaauuuuaugca

SEQ ID NO: 412579 - RNA, 32 nt, Homo Sapiens
ugucugacaaaggcagaaugcuugugagauua

SEQ ID NO: 412580 - RNA, 32 nt, Homo Sapiens
cuuaguuaucaguccuguccugucccacucag

SEQ ID NO: 412581 - RNA, 30 nt, Homo Sapiens
ggccuugcuuuuccccgcggcaggaagagu

SEQ ID NO: 412582 - RNA, 32 nt, Homo Sapiens
cccgaccuccguccugacccagggcgccggag

SEQ ID NO: 412583 - RNA, 32 nt, Homo Sapiens
uucugagaaaagaucgaaaauauuuaacaaga

SEQ ID NO: 412584 - RNA, 32 nt, Homo Sapiens
aaaaauugaaaauaaacuugugcuuauauuuu

SEQ ID NO: 412585 - RNA, 32 nt, Homo Sapiens
agugauuccuuuuguauuaauuucuaguguau

SEQ ID NO: 412586 - RNA, 32 nt, Homo Sapiens
gauucuuggauauccuaaaauaugauuuggga

SEQ ID NO: 412587 - RNA, 32 nt, Homo Sapiens
cugguucugcaucacccgccccuggacuucuu

SEQ ID NO: 412588 - RNA, 32 nt, Homo Sapiens
aaagaugggagcaguccuggguccuggucuua

SEQ ID NO: 412589 - RNA, 29 nt, Homo Sapiens
gccacgaugaagauuggaacgagggucau

SEQ ID NO: 412590 - RNA, 32 nt, Homo Sapiens
uaaauuccagagauucagcaacaaagaggccu

SEQ ID NO: 412591 - RNA, 32 nt, Homo Sapiens
uuuaguagaagggugaaucguauuuuacacag

SEQ ID NO: 412592 - RNA, 32 nt, Homo Sapiens
cugacaccugucauauuuauggaccagacacu

SEQ ID NO: 412593 - RNA, 32 nt, Homo Sapiens
aaguaauuaaugcuacucuuggagaagagaua

SEQ ID NO: 412594 - RNA, 32 nt, Homo Sapiens
aaagacaggcaaaaagcggaccuggucuuaac

SEQ ID NO: 412595 - RNA, 32 nt, Homo Sapiens
uuaauuccacuaggggcucucaucucacaccu

SEQ ID NO: 412596 - RNA, 32 nt, Homo Sapiens
uguccucgggcagcugcaacuccccgcgagac

SEQ ID NO: 412597 - RNA, 32 nt, Homo Sapiens
uauaggauaaauaaauguauaauagauuaucu

SEQ ID NO: 412598 - RNA, 32 nt, Homo Sapiens
ggcggcggccccaaucccuguccucuccucuc

SEQ ID NO: 412599 - RNA, 32 nt, Homo Sapiens
gacuuggcccccggacaagacucgcccagcac

SEQ ID NO: 412600 - RNA, 32 nt, Homo Sapiens
caagccauggcagucguggcccggggaucauu

SEQ ID NO: 412601 - RNA, 32 nt, Homo Sapiens
gcuacccccggccccagggcacuguucggaca

SEQ ID NO: 412602 - RNA, 32 nt, Homo Sapiens
agcagcuguauagccugugacucuccgugugu

SEQ ID NO: 412603 - RNA, 32 nt, Homo Sapiens
cauagggucacuucaccugacccaggccucuc

SEQ ID NO: 412604 - RNA, 32 nt, Homo Sapiens
gcaccaucuaauguuuuaaaaggcacuaguuu

SEQ ID NO: 412605 - RNA, 32 nt, Homo Sapiens
ugauacuugacaauuuguuuuauuauguaauu

SEQ ID NO: 412606 - RNA, 32 nt, Homo Sapiens
uuaauggacaaauugacugcaauguaauacua

SEQ ID NO: 412607 - RNA, 32 nt, Homo Sapiens
gucagcuccgaguggcucccgugucguaacag

SEQ ID NO: 412608 - RNA, 32 nt, Homo Sapiens
aaacucaucuggaguucucaaagaccuggggc

SEQ ID NO: 412609 - RNA, 32 nt, Homo Sapiens
cccuccucacgcgggcgggauuuucuugccuu

SEQ ID NO: 412610 - RNA, 32 nt, Homo Sapiens
gacuucccaagcccuggugaccagaccaaggc

SEQ ID NO: 412611 - RNA, 32 nt, Homo Sapiens
ccagucccacccagcacaccugggcgagacaa

SEQ ID NO: 412612 - RNA, 32 nt, Homo Sapiens
auuuuacuaaaaggcagcuauuagugugggac

SEQ ID NO: 412613 - RNA, 32 nt, Homo Sapiens
cuaugccgccgggaacugccguccguccugcc

SEQ ID NO: 412614 - RNA, 32 nt, Homo Sapiens
gaauaagaaaauaaucaucugguaaccaucau

SEQ ID NO: 412615 - RNA, 32 nt, Homo Sapiens
uuuuuuuuuaagucagcacugaugccacccuc

SEQ ID NO: 412616 - RNA, 32 nt, Homo Sapiens
ucuuuacagggguguucucaccagguagaaau

SEQ ID NO: 412617 - RNA, 32 nt, Homo Sapiens
ccucgucuccgcuccugggggaccgcagaaau

SEQ ID NO: 412618 - RNA, 32 nt, Homo Sapiens
ccgccgugggucccggcccuacccacccuagc

SEQ ID NO: 412619 - RNA, 32 nt, Homo Sapiens
ucggguggccgcggggacccgggcgacgucgg

SEQ ID NO: 412620 - RNA, 32 nt, Homo Sapiens
uccaaaaagaucuccagcuccacacauguuuc

SEQ ID NO: 412621 - RNA, 32 nt, Homo Sapiens
auuuuaaaggaauaacaaaacugucuggcuca

SEQ ID NO: 412622 - RNA, 32 nt, Homo Sapiens
cauggcgcuccgauccccuccucccucucucc

SEQ ID NO: 412623 - RNA, 32 nt, Homo Sapiens
ccgggcaggaggggaaggaaggcggccgcggc

SEQ ID NO: 412624 - RNA, 32 nt, Homo Sapiens
gcagugacuuuguauagagaauuuaaguagaa

SEQ ID NO: 412625 - RNA, 32 nt, Homo Sapiens
ucggaggaccugggaagcaagcaaaaguggau

SEQ ID NO: 412626 - RNA, 32 nt, Homo Sapiens
ugaacaucauaguguacuuacacacaccuaga

SEQ ID NO: 412627 - RNA, 32 nt, Homo Sapiens
uuuaucaaauuuccucucuguagacgccugca

SEQ ID NO: 412628 - RNA, 32 nt, Homo Sapiens
cggacggcggcacccccucccucggguugcuu

SEQ ID NO: 412629 - RNA, 32 nt, Homo Sapiens
ucaaaagcaagccccccaggcccagcccacgu

SEQ ID NO: 412630 - RNA, 32 nt, Homo Sapiens
aagauugagaagugcauaugacaggcugagag

SEQ ID NO: 412631 - RNA, 32 nt, Homo Sapiens
uccccuuacucuuguuucuccuccgccgaggc

SEQ ID NO: 412632 - RNA, 32 nt, Homo Sapiens
uauucuaaaaaaguaagaagauccucuaaugg

SEQ ID NO: 412633 - RNA, 32 nt, Homo Sapiens
ucuuaaacaucauauuacuuuauuuagauuuc

SEQ ID NO: 412634 - RNA, 32 nt, Homo Sapiens
cuccccacccaggaugaccccugggcaggugu

SEQ ID NO: 412635 - RNA, 32 nt, Homo Sapiens
uuuguaaugaauuugucgcaaagacguaauaa

SEQ ID NO: 412636 - RNA, 32 nt, Homo Sapiens
uauuaauggaucuuaaaugauaaaccuugccu

SEQ ID NO: 412637 - RNA, 32 nt, Homo Sapiens
caguggcuggggugggggcugaggggcagccc

SEQ ID NO: 412638 - RNA, 32 nt, Homo Sapiens
caccugggucugggaccuggcuccacaccagu

SEQ ID NO: 412639 - RNA, 32 nt, Homo Sapiens
ccucuggggggcccucuauggccaccacuugc

SEQ ID NO: 412640 - RNA, 32 nt, Homo Sapiens
gggcugcugcccgugcgcuggauggcccccga

SEQ ID NO: 412641 - RNA, 32 nt, Homo Sapiens
gccgcggcgggugcugggagccagcgccugcc

SEQ ID NO: 412642 - RNA, 32 nt, Homo Sapiens
cacaaguguuuguaaccaugggguuguucauc

SEQ ID NO: 412643 - RNA, 32 nt, Homo Sapiens
ugcuggccagcauuuucauucauuuuaaggaa

SEQ ID NO: 412644 - RNA, 32 nt, Homo Sapiens
gagaggacgggcuggcggggcuggggacccgc

SEQ ID NO: 412645 - RNA, 32 nt, Homo Sapiens
ggaacggaugaaugugagauacagcaaaucac

SEQ ID NO: 412646 - RNA, 32 nt, Homo Sapiens
agaccagccuggccaaccaacauggugaaacc

SEQ ID NO: 412647 - RNA, 32 nt, Homo Sapiens
uuuuaaagacccagcccuucccaaucucaaag

SEQ ID NO: 412648 - RNA, 32 nt, Homo Sapiens
guggccucucugacaaguuacccuuuuggcac

SEQ ID NO: 412649 - RNA, 32 nt, Homo Sapiens
ggagccaccgagcgagcagcucgguccaguga

SEQ ID NO: 412650 - RNA, 32 nt, Homo Sapiens
ugaggugcuucuucuguaggggcugucaccag

SEQ ID NO: 412651 - RNA, 32 nt, Homo Sapiens
ccuggcuugggccccagggagcccaggaaccu

SEQ ID NO: 412652 - RNA, 32 nt, Homo Sapiens
auggagcaagcacugagaaaaaacagauuaca

SEQ ID NO: 412653 - RNA, 32 nt, Homo Sapiens
gugguucucagugcuagggccggagcagcccc

SEQ ID NO: 412654 - RNA, 30 nt, Homo Sapiens
ccuggaggagguggugcuucagaugagacu

SEQ ID NO: 412655 - RNA, 32 nt, Homo Sapiens
agcugugcgugguguggagugugugucuuucc

SEQ ID NO: 412656 - RNA, 32 nt, Homo Sapiens
cccaauccgggggcuccugggguguggugugu

SEQ ID NO: 412657 - RNA, 32 nt, Homo Sapiens
caagguucaaccacaguacacacgugcuuccu

SEQ ID NO: 412658 - RNA, 32 nt, Homo Sapiens
aauaguacguacuuugcuuugguauguagcaa

SEQ ID NO: 412659 - RNA, 32 nt, Homo Sapiens
ccaaauggagggcgcaggguuuuaggagcucg

SEQ ID NO: 412660 - RNA, 32 nt, Homo Sapiens
ucacagugaacaugaauuguaauaauugguua

SEQ ID NO: 412661 - RNA, 32 nt, Homo Sapiens
cugcaucagcuuccaacuccaccugacagucc

SEQ ID NO: 412662 - RNA, 32 nt, Homo Sapiens
cagguggagccccuguuguugcugaaggcagc

SEQ ID NO: 412663 - RNA, 32 nt, Homo Sapiens
ugcuaggaagccagcucuggggugccauaggc

SEQ ID NO: 412664 - RNA, 32 nt, Homo Sapiens
aggcaaugguuauaauuaaaaugauaugcugu

SEQ ID NO: 412665 - RNA, 32 nt, Homo Sapiens
aaguuaaauuaaacccccucuccacgauuccc

SEQ ID NO: 412666 - RNA, 32 nt, Homo Sapiens
aggugccgcucccggagggugggccggaggcg

SEQ ID NO: 412667 - RNA, 32 nt, Homo Sapiens
gaaaucuugugaaaccacugcccaaccagagc

SEQ ID NO: 412668 - RNA, 32 nt, Homo Sapiens
cagggggcccugccaccccauccagccagacc

SEQ ID NO: 412669 - RNA, 32 nt, Homo Sapiens
gagcagcagcgaaagcaccuugaggccuuucu

SEQ ID NO: 412670 - RNA, 32 nt, Homo Sapiens
cgcugccaccgccgcccucccccggcuccaug

SEQ ID NO: 412671 - RNA, 32 nt, Homo Sapiens
gguauauauguggcagcagcugcaccugggag

SEQ ID NO: 412672 - RNA, 30 nt, Homo Sapiens
gagacucuccgaggcggcggcagagacaga

SEQ ID NO: 412673 - RNA, 32 nt, Homo Sapiens
uuacuauacauauacaugcauagaaaugaaau

SEQ ID NO: 412674 - RNA, 32 nt, Homo Sapiens
acacuguugugcgaugaaacugcuuuuagcug

SEQ ID NO: 412675 - RNA, 32 nt, Homo Sapiens
ugugggcuuuuugggugacacucccuuaaggg

SEQ ID NO: 412676 - RNA, 32 nt, Homo Sapiens
cugauucuccagcgacaggacccggcgccggg

SEQ ID NO: 412677 - RNA, 32 nt, Homo Sapiens
caggagagauucaacagcauuaccucagcuua

SEQ ID NO: 412678 - RNA, 32 nt, Homo Sapiens
gggcuguucccucuccaaucuuccagccuuug

SEQ ID NO: 412679 - RNA, 32 nt, Homo Sapiens
aguccgcccuccccuccagccauaucugcauc

SEQ ID NO: 412680 - RNA, 32 nt, Homo Sapiens
acacauguuaaccagacacaggacuuacugag

SEQ ID NO: 412681 - RNA, 32 nt, Homo Sapiens
agaaggaaacaugaaaauaaaaauaagacagu

SEQ ID NO: 412682 - RNA, 32 nt, Homo Sapiens
cauaucuuggcuauugugaauaagcugcaaug

SEQ ID NO: 412683 - RNA, 32 nt, Homo Sapiens
cuccaaaggaaaucggaacuuucuuauugacu

SEQ ID NO: 412684 - RNA, 32 nt, Homo Sapiens
uuuuugguggugcuauuuuuauacagugaagc

SEQ ID NO: 412685 - RNA, 32 nt, Homo Sapiens
cuguuauauaaauuauuaucuauuuuugcaau

SEQ ID NO: 412686 - RNA, 32 nt, Homo Sapiens
uuugugaacaaggcauuuguagccauuuuuaa

SEQ ID NO: 412687 - RNA, 32 nt, Homo Sapiens
ugucaagcccuucccagcuccuccuccaauga

SEQ ID NO: 412688 - RNA, 32 nt, Homo Sapiens
gaaaagacgcaccagcccagaagugcagaacu

SEQ ID NO: 412689 - RNA, 32 nt, Homo Sapiens
ggagggggagacgcaagauggcggcagccgcg

SEQ ID NO: 412690 - RNA, 32 nt, Homo Sapiens
uccauguuucuuuucuaaucuucaaauggaau

SEQ ID NO: 412691 - RNA, 32 nt, Homo Sapiens
aauaccaagagaaguucuauuuuuguaaagac

SEQ ID NO: 412692 - RNA, 32 nt, Homo Sapiens
uggcugggggcugucccugcccugcccugagc

SEQ ID NO: 412693 - RNA, 32 nt, Homo Sapiens
cagacagacaacacugggaaacagaggcuauu

SEQ ID NO: 412694 - RNA, 32 nt, Homo Sapiens
agagcccuggggauguggagaagccacccccc

SEQ ID NO: 412695 - RNA, 32 nt, Homo Sapiens
gaggccgaggggcgcggccgugggguggggag

SEQ ID NO: 412696 - RNA, 32 nt, Homo Sapiens
uuuaacaaaaauaaagggaaaaaauugcuuga

SEQ ID NO: 412697 - RNA, 32 nt, Homo Sapiens
ugcuacacaaaauuauucuuauugggcuuaug

SEQ ID NO: 412698 - RNA, 32 nt, Homo Sapiens
guuguggcgggugccuguagucccagcuacuc

SEQ ID NO: 412699 - RNA, 32 nt, Homo Sapiens
ugcucacccucacacucgccccggcccgcugc

SEQ ID NO: 412700 - RNA, 32 nt, Homo Sapiens
agccuggguguccguggguccgucugcccagc

SEQ ID NO: 412701 - RNA, 32 nt, Homo Sapiens
guaccauaggacuuaaaggugauuuggaugcg

SEQ ID NO: 412702 - RNA, 32 nt, Homo Sapiens
caagcucccuugagcucagaucagcuugacuc

SEQ ID NO: 412703 - RNA, 32 nt, Homo Sapiens
cccaccuucugcaggcuucccuggacgcuggc

SEQ ID NO: 412704 - RNA, 32 nt, Homo Sapiens
auucccuacucccagucccuggcacucacucu

SEQ ID NO: 412705 - RNA, 32 nt, Homo Sapiens
gaguuucuguaccuaacagcuauguuugcaau

SEQ ID NO: 412706 - RNA, 32 nt, Homo Sapiens
caggcaaugaacuugugcuguagcccauggug

SEQ ID NO: 412707 - RNA, 32 nt, Homo Sapiens
cagcacaacaaggaacaaaacaaagcuuugaa

SEQ ID NO: 412708 - RNA, 32 nt, Homo Sapiens
gacuguucaggugauaaaagacugugaaaguc

SEQ ID NO: 412709 - RNA, 32 nt, Homo Sapiens
gacaggaguauuuugauugaguguccaguucu

SEQ ID NO: 412710 - RNA, 32 nt, Homo Sapiens
uaucuauguggaagagaagaguuguucucaug

SEQ ID NO: 412711 - RNA, 32 nt, Homo Sapiens
ccucugcgcggcagcccgucgcgggcccucaa

SEQ ID NO: 412712 - RNA, 32 nt, Homo Sapiens
uacaagacugcuuuuuaccuuaaacuuuguag

SEQ ID NO: 412713 - RNA, 32 nt, Homo Sapiens
aauuguuagugucucaguaauccugauuuaga

SEQ ID NO: 412714 - RNA, 32 nt, Homo Sapiens
caucaaaaguucccaaagagggcuugcucucu

SEQ ID NO: 412715 - RNA, 32 nt, Homo Sapiens
acagagacacauacuugguuucugggacugag

SEQ ID NO: 412716 - RNA, 32 nt, Homo Sapiens
uaggcuuuuucugcaaugagcagcagcugacu

SEQ ID NO: 412717 - RNA, 32 nt, Homo Sapiens
uggagcgccgcgccgcgcccgagccucuugcc

SEQ ID NO: 412718 - RNA, 32 nt, Homo Sapiens
agcgauccaugggcaggggaauuuggagagag

SEQ ID NO: 412719 - RNA, 32 nt, Homo Sapiens
gagagagaccucuggauccacacuggggcugc

SEQ ID NO: 412720 - RNA, 32 nt, Homo Sapiens
guggggacagcaugagcggcgguuggauggcg

SEQ ID NO: 412721 - RNA, 32 nt, Homo Sapiens
guuuuucaguguucuuuuuuuaaauuguagau

SEQ ID NO: 412722 - RNA, 32 nt, Homo Sapiens
augcuugauuuaaaaauaauaauaauagagga

SEQ ID NO: 412723 - RNA, 32 nt, Homo Sapiens
ggcuggagagaaugauugcuuuuuguacaguu

SEQ ID NO: 412724 - RNA, 32 nt, Homo Sapiens
acccuuugaaaaaguauaaauaaaaugagcaa

SEQ ID NO: 412725 - RNA, 32 nt, Homo Sapiens
ugggaaggaauguggauagcuuuggaacucua

SEQ ID NO: 412726 - RNA, 32 nt, Homo Sapiens
agguggccaagcccauccuggccucagaacau

SEQ ID NO: 412727 - RNA, 32 nt, Homo Sapiens
cgcugacgcccggcagcggcuggcacgggcgc

SEQ ID NO: 412728 - RNA, 31 nt, Homo Sapiens
acuuguggcuuauggccagugcuguuuggug

SEQ ID NO: 412729 - RNA, 32 nt, Homo Sapiens
gugcccuauguaagcuucuacaucuugauuua

SEQ ID NO: 412730 - RNA, 32 nt, Homo Sapiens
ggagaaaaguauuuuccauauuuucaauaaau

SEQ ID NO: 412731 - RNA, 32 nt, Homo Sapiens
aauguucuaaagauaauuucugauugaaagaa

SEQ ID NO: 412732 - RNA, 32 nt, Homo Sapiens
gaauuucaacgccugccuuuggcacucugacu

SEQ ID NO: 412733 - RNA, 32 nt, Homo Sapiens
ucuuguuucucauagauauuuugugagcauuu

SEQ ID NO: 412734 - RNA, 32 nt, Homo Sapiens
gagcugguggaggugagggaggcgcugagccg

SEQ ID NO: 412735 - RNA, 32 nt, Homo Sapiens
uaaguggcccaaguauuuuuguuuacauucuc

SEQ ID NO: 412736 - RNA, 32 nt, Homo Sapiens
gagagguaaaggaaaauguaggcacaauaagc

SEQ ID NO: 412737 - RNA, 32 nt, Homo Sapiens
gagcagcccccuccuccuucagggcaggaacu

SEQ ID NO: 412738 - RNA, 32 nt, Homo Sapiens
accuccgccucccagguucaagugauucccuu

SEQ ID NO: 412739 - RNA, 32 nt, Homo Sapiens
guacagcgaagaagaaagggaaguauuucuua

SEQ ID NO: 412740 - RNA, 32 nt, Homo Sapiens
uacuaagugauacaguacuuugaaucuaguug

SEQ ID NO: 412741 - RNA, 32 nt, Homo Sapiens
uuauauucaaggaaaaucuagcaucaagauua

SEQ ID NO: 412742 - RNA, 32 nt, Homo Sapiens
cugcagauguuuggccuuuggaccuccaagug

SEQ ID NO: 412743 - RNA, 32 nt, Homo Sapiens
aguugugauuugcuauuuugccuagagcuuug

SEQ ID NO: 412744 - RNA, 32 nt, Homo Sapiens
ucaacagaugagaacuggugguuaauauguga

SEQ ID NO: 412745 - RNA, 32 nt, Homo Sapiens
augaagaugaugcagaagaugaaaauaacauu

SEQ ID NO: 412746 - RNA, 32 nt, Homo Sapiens
uugaggucaggaguuugagaccagccuagcca

SEQ ID NO: 412747 - RNA, 29 nt, Homo Sapiens
cuugaugacagcauccgcguccuccuuuu

SEQ ID NO: 412748 - RNA, 32 nt, Homo Sapiens
ugcguuacaguuucacucgaggaggcaguagu

SEQ ID NO: 412749 - RNA, 32 nt, Homo Sapiens
ugagacaaagaagaugcuugggaaauaugugg

SEQ ID NO: 412750 - RNA, 32 nt, Homo Sapiens
gucuacaggagcuuugggccugagggaaggca

SEQ ID NO: 412751 - RNA, 32 nt, Homo Sapiens
agccagaaaaagaaagguuagggcagguccug

SEQ ID NO: 412752 - RNA, 32 nt, Homo Sapiens
ucacacauuuuucuguauacaucacagaggcu

SEQ ID NO: 412753 - RNA, 32 nt, Homo Sapiens
gagaucugucucccagcaaaugccaagugcuc

SEQ ID NO: 412754 - RNA, 32 nt, Homo Sapiens
gaccccagagagggcugcugcagucuggaaca

SEQ ID NO: 412755 - RNA, 32 nt, Homo Sapiens
cgccagguuuuucuucacugcuuauuucuagg

SEQ ID NO: 412756 - RNA, 32 nt, Homo Sapiens
auuuuagacauuaguuacaugugcaguuuuua

SEQ ID NO: 412757 - RNA, 32 nt, Homo Sapiens
agacuuucugugguguuucauacucuacucag

SEQ ID NO: 412758 - RNA, 32 nt, Homo Sapiens
augcugccgugcacugcagauguccuugauga

SEQ ID NO: 412759 - RNA, 32 nt, Homo Sapiens
gauggggagcagcuugguccaugugccuucag

SEQ ID NO: 412760 - RNA, 32 nt, Homo Sapiens
ggcuuggggcacucuggggugcgcgccgaucu

SEQ ID NO: 412761 - RNA, 32 nt, Homo Sapiens
aagucccgcgcgcgcccauugggccgaggccc

SEQ ID NO: 412762 - RNA, 32 nt, Homo Sapiens
aacauguuguacaauuuuaauuuacaacuguu

SEQ ID NO: 412763 - RNA, 32 nt, Homo Sapiens
auuuuggaugaauaaacuuuaugccuaaaaca

SEQ ID NO: 412764 - RNA, 32 nt, Homo Sapiens
cagugaagacugaggauuuggauuauaugcuu

SEQ ID NO: 412765 - RNA, 32 nt, Homo Sapiens
gaggaaauugcagaagcaggaaggugacucug

SEQ ID NO: 412766 - RNA, 32 nt, Homo Sapiens
ggugccugcuucuccuuugccuuuugccauga

SEQ ID NO: 412767 - RNA, 32 nt, Homo Sapiens
aguccgccgcccggcgccauggcgggcugcgc

SEQ ID NO: 412768 - RNA, 32 nt, Homo Sapiens
uauacaaagaugucuguaaaaaguauaccagu

SEQ ID NO: 412769 - RNA, 32 nt, Homo Sapiens
gagcaacuaaagauuauuucuauuauacuucu

SEQ ID NO: 412770 - RNA, 32 nt, Homo Sapiens
ucauuaauugauuuuucuuguuaaucagaauu

SEQ ID NO: 412771 - RNA, 32 nt, Homo Sapiens
aagaaaacccaacuccucuccuccccccaagc

SEQ ID NO: 412772 - RNA, 32 nt, Homo Sapiens
agugaggaaguuucuuuuuuuuuuuuaaaugg

SEQ ID NO: 412773 - RNA, 32 nt, Homo Sapiens
cuggagcuuggggaccccucccugccccuggc

SEQ ID NO: 412774 - RNA, 32 nt, Homo Sapiens
auucuuguaucuuuuuuggugugugggcgggg

SEQ ID NO: 412775 - RNA, 32 nt, Homo Sapiens
ugcugauugcaaauaggcauuuaaaaugugaa

SEQ ID NO: 412776 - RNA, 32 nt, Homo Sapiens
aagaacugauacaggaguaacaauaugaagaa

SEQ ID NO: 412777 - RNA, 32 nt, Homo Sapiens
gaaguauuuuuaauguaguguccacaggcuca

SEQ ID NO: 412778 - RNA, 32 nt, Homo Sapiens
auuggcgugcuucauauggcgugcuuggagcc

SEQ ID NO: 412779 - RNA, 32 nt, Homo Sapiens
aaucuuacccuuagcccucccaaccauuaugc

SEQ ID NO: 412780 - RNA, 32 nt, Homo Sapiens
acugucuacauauguguauacauuugggaaac

SEQ ID NO: 412781 - RNA, 32 nt, Homo Sapiens
gacgcggccccgguaccggggguucaggcagu

SEQ ID NO: 412782 - RNA, 32 nt, Homo Sapiens
agagggacaaauuuaaaguguagaguuuuggu

SEQ ID NO: 412783 - RNA, 30 nt, Homo Sapiens
acuuuugucugugcuugaaacgagcaaugc

SEQ ID NO: 412784 - RNA, 32 nt, Homo Sapiens
agugcucucagucagguuuuucccuccauauu

SEQ ID NO: 412785 - RNA, 32 nt, Homo Sapiens
gggagccggcccgacgcggaccgcuucccugc

SEQ ID NO: 412786 - RNA, 32 nt, Homo Sapiens
acccuccauucccacacgguucccaggucucc

SEQ ID NO: 412787 - RNA, 32 nt, Homo Sapiens
uuuccaagaugaucggaagcaguuuugagcau

SEQ ID NO: 412788 - RNA, 32 nt, Homo Sapiens
gcacuuuuaagugaagaaaaugauacugcuag

SEQ ID NO: 412789 - RNA, 32 nt, Homo Sapiens
ccaggcuccacuuuucacugaugaaauuggca

SEQ ID NO: 412790 - RNA, 32 nt, Homo Sapiens
uaggcaggaccuguggccaaguucuuaguugc

SEQ ID NO: 412791 - RNA, 32 nt, Homo Sapiens
uccagaaaugcccaccugaacaugagccugga

SEQ ID NO: 412792 - RNA, 32 nt, Homo Sapiens
agcaucauggguuuuguuuucucccuuaaccc

SEQ ID NO: 412793 - RNA, 32 nt, Homo Sapiens
ccaggaggagaugccugguucugcccaaaaua

SEQ ID NO: 412794 - RNA, 32 nt, Homo Sapiens
uccaucgagacuaucugguaugcguuauguau

SEQ ID NO: 412795 - RNA, 31 nt, Homo Sapiens
guauauuuuuggguuacuucaguguguuuga

SEQ ID NO: 412796 - RNA, 32 nt, Homo Sapiens
uaauccagauaaauaaaugcaagggcaaauug

SEQ ID NO: 412797 - RNA, 32 nt, Homo Sapiens
gugauggugaccaacaugcuuaugauaauuaa

SEQ ID NO: 412798 - RNA, 32 nt, Homo Sapiens
cgugggcgcgccccugcggcucccgagggucc

SEQ ID NO: 412799 - RNA, 32 nt, Homo Sapiens
aguagugucugagacucugcucugcagggccu

SEQ ID NO: 412800 - RNA, 32 nt, Homo Sapiens
auaagcccuugcuaagucccagccccuucaug

SEQ ID NO: 412801 - RNA, 32 nt, Homo Sapiens
gucggccccuccccaacaccaccccgggccuc

SEQ ID NO: 412802 - RNA, 32 nt, Homo Sapiens
ucgcgguguguuacaguucuuaaagauggugu

SEQ ID NO: 412803 - RNA, 32 nt, Homo Sapiens
guuucucuuuuggaucacuagcugcaaauuaa

SEQ ID NO: 412804 - RNA, 32 nt, Homo Sapiens
cggcagaagaguaccgugagggaggcggggac

SEQ ID NO: 412805 - RNA, 32 nt, Homo Sapiens
guuuucacuguaaauugaacuuauaauuuaug

SEQ ID NO: 412806 - RNA, 32 nt, Homo Sapiens
gacgcagggguaugaggcagggagagggugug

SEQ ID NO: 412807 - RNA, 32 nt, Homo Sapiens
ccgccagagcagccuucgcgcuauggaggagc

SEQ ID NO: 412808 - RNA, 32 nt, Homo Sapiens
uggucuuugaaaucuauaaaucaauaaagguu

SEQ ID NO: 412809 - RNA, 32 nt, Homo Sapiens
ucccaguuaccuuuuuuguggcuuguuuggag

SEQ ID NO: 412810 - RNA, 32 nt, Homo Sapiens
uucaguacuauccacaaacucaccuuauguua

SEQ ID NO: 412811 - RNA, 32 nt, Homo Sapiens
caucagcaccaaucaauuuacaaaaccagcga

SEQ ID NO: 412812 - RNA, 32 nt, Homo Sapiens
guuuuagaauggacagcccuccccucaccacu

SEQ ID NO: 412813 - RNA, 32 nt, Homo Sapiens
cuguauuucuucagaaguguuucauuuugugu

SEQ ID NO: 412814 - RNA, 32 nt, Homo Sapiens
ggauuuaaaacaaaaaguuguuacgguuucau

SEQ ID NO: 412815 - RNA, 32 nt, Homo Sapiens
uagcucugagcccuccuucuugcccugagcuu

SEQ ID NO: 412816 - RNA, 32 nt, Homo Sapiens
acacucacauucagguuacuggcuuugguuug

SEQ ID NO: 412817 - RNA, 32 nt, Homo Sapiens
agugcagaaacaaaaagauacugguugcauug

SEQ ID NO: 412818 - RNA, 32 nt, Homo Sapiens
uaauuguacucuaugggaaaauuucuuuggaa

SEQ ID NO: 412819 - RNA, 32 nt, Homo Sapiens
gggcuccgggccugcacgcaugcgcgcggcuc

SEQ ID NO: 412820 - RNA, 32 nt, Homo Sapiens
gccugcagccuggacucggcacucacagcugc

SEQ ID NO: 412821 - RNA, 32 nt, Homo Sapiens
auuauuuaaauauuauuuuauuuauuuaaaua

SEQ ID NO: 412822 - RNA, 32 nt, Homo Sapiens
uucugcuggacuuuuuaacauagcaaauccga

SEQ ID NO: 412823 - RNA, 32 nt, Homo Sapiens
uucaaaauuuacuuugucaaauaaaaauuugu

SEQ ID NO: 412824 - RNA, 32 nt, Homo Sapiens
ggcaagggcaggaugaggcugcaccgcuggga

SEQ ID NO: 412825 - RNA, 32 nt, Homo Sapiens
uuaaaauucuuuaucuuuuucuuggcaaaacc

SEQ ID NO: 412826 - RNA, 32 nt, Homo Sapiens
cacaacugucuacauagcaugacaguagcagu

SEQ ID NO: 412827 - RNA, 32 nt, Homo Sapiens
gaggucgagguggggagggggaggcgggcuuc

SEQ ID NO: 412828 - RNA, 32 nt, Homo Sapiens
ccgaggagggucacgcagcacaaugccagcuc

SEQ ID NO: 412829 - RNA, 31 nt, Homo Sapiens
gggcgauggggaaggucaggaguccagccca

SEQ ID NO: 412830 - RNA, 32 nt, Homo Sapiens
ugcuguaaaauuuauacuaaaauguggacuau

SEQ ID NO: 412831 - RNA, 32 nt, Homo Sapiens
caguucugucaucacugugaucuuuaaaaacc

SEQ ID NO: 412832 - RNA, 32 nt, Homo Sapiens
cugcugauugggcagggaaaacauccuuucau

SEQ ID NO: 412833 - RNA, 32 nt, Homo Sapiens
guaacucuccagccauuguaauuugaagaugu

SEQ ID NO: 412834 - RNA, 32 nt, Homo Sapiens
caucaucuucgaggaucugcaggccgccguga

SEQ ID NO: 412835 - RNA, 32 nt, Homo Sapiens
guccuuccccuucucuucccaggccugggagg

SEQ ID NO: 412836 - RNA, 32 nt, Homo Sapiens
accaggaaaaaauuaauucaaagagcaaagcc

SEQ ID NO: 412837 - RNA, 32 nt, Homo Sapiens
auuccugcuguuuguuauguuuucucaaauua

SEQ ID NO: 412838 - RNA, 32 nt, Homo Sapiens
ccaccuguugcucugagccccacgcgcaugcu

SEQ ID NO: 412839 - RNA, 30 nt, Homo Sapiens
uugguucucugugcuuggaacucgccugca

SEQ ID NO: 412840 - RNA, 32 nt, Homo Sapiens
cuaacugacagccgccacuggugcugagcugc

SEQ ID NO: 412841 - RNA, 32 nt, Homo Sapiens
cagaugcgcucuugccaaagcagcauaaagca

SEQ ID NO: 412842 - RNA, 32 nt, Homo Sapiens
guguaaauaaauuuauauaaagugagaauuag

SEQ ID NO: 412843 - RNA, 32 nt, Homo Sapiens
ugcguugcuagagucaugugaauagaauaagc

SEQ ID NO: 412844 - RNA, 32 nt, Homo Sapiens
gcccgcggguggcuggagccccaucgccuggg

SEQ ID NO: 412845 - RNA, 32 nt, Homo Sapiens
guuaggugagaugggcaaauaggcuuaacuau

SEQ ID NO: 412846 - RNA, 32 nt, Homo Sapiens
uagccugagugacagagcaugauuccaucuca

SEQ ID NO: 412847 - RNA, 32 nt, Homo Sapiens
ccuccuuccuucccuggcccuuggcugugaca

SEQ ID NO: 412848 - RNA, 31 nt, Homo Sapiens
agacugagggcggggauacugauucagaaau

SEQ ID NO: 412849 - RNA, 32 nt, Homo Sapiens
ccauucaccggcggcuaccggcggcggcgcgc

SEQ ID NO: 412850 - RNA, 32 nt, Homo Sapiens
gacuuucucuaacccaguggcugugcggugca

SEQ ID NO: 412851 - RNA, 32 nt, Homo Sapiens
gggggcaucguggggugugcugccugccagga

SEQ ID NO: 412852 - RNA, 32 nt, Homo Sapiens
acuucugaauggugaauucaucuuacaaaaug

SEQ ID NO: 412853 - RNA, 32 nt, Homo Sapiens
acagcccccauccuaacccugguggugcagug

SEQ ID NO: 412854 - RNA, 32 nt, Homo Sapiens
auagccaagggauuggaagaaguugaaauuga

SEQ ID NO: 412855 - RNA, 30 nt, Homo Sapiens
ccggugccacuugccacucggaaaaccuca

SEQ ID NO: 412856 - RNA, 32 nt, Homo Sapiens
ccuuguaagccuugaagaaguaugugagaggg

SEQ ID NO: 412857 - RNA, 32 nt, Homo Sapiens
caaaacaaaaauauucuacaaaaugacauaaa

SEQ ID NO: 412858 - RNA, 32 nt, Homo Sapiens
cagccugggacacacacacacacacacacaca

SEQ ID NO: 412859 - RNA, 32 nt, Homo Sapiens
ggugaagaugaucacuuuuuaauucgggccuc

SEQ ID NO: 412860 - RNA, 32 nt, Homo Sapiens
cuggcuccugcccacaccuuucccuccacacc

SEQ ID NO: 412861 - RNA, 32 nt, Homo Sapiens
cccauuuguuuuuauggcuuucuuaucuaaac

SEQ ID NO: 412862 - RNA, 32 nt, Homo Sapiens
aauuaccaaagauuauuuuaauggccgugcau

SEQ ID NO: 412863 - RNA, 32 nt, Homo Sapiens
agcucugaaaauuugaaaauguguaaccaccc

SEQ ID NO: 412864 - RNA, 32 nt, Homo Sapiens
cugccaggguucuuccucuccaagcccuccuc

SEQ ID NO: 412865 - RNA, 32 nt, Homo Sapiens
ucuuuccggcggugcucgcaagcgaggcagcc

SEQ ID NO: 412866 - RNA, 32 nt, Homo Sapiens
agccuaggaaugccucucuccaggcccaaguc

SEQ ID NO: 412867 - RNA, 32 nt, Homo Sapiens
uuuguguuugguuuuuuuguuuuuguuuuuau

SEQ ID NO: 412868 - RNA, 32 nt, Homo Sapiens
uucacaauauaaaguucuacaguuaauuaugu

SEQ ID NO: 412869 - RNA, 32 nt, Homo Sapiens
acaugcucacucccuuaaucuguccgucuaga

SEQ ID NO: 412870 - RNA, 32 nt, Homo Sapiens
gacaaacaucgaagugaaaaacaauguagagc

SEQ ID NO: 412871 - RNA, 32 nt, Homo Sapiens
uccccccggcccaggcggccgacgaugucuac

SEQ ID NO: 412872 - RNA, 32 nt, Homo Sapiens
uucuucucugggaaaaguuuugucuuagagca

SEQ ID NO: 412873 - RNA, 32 nt, Homo Sapiens
uaacagaaggguccggaagcagggaccccaga

SEQ ID NO: 412874 - RNA, 32 nt, Homo Sapiens
acauuacuugagcaugacacuucuuucaguau

SEQ ID NO: 412875 - RNA, 32 nt, Homo Sapiens
guuacuuuuccuugcauacaaacaagcauaua

SEQ ID NO: 412876 - RNA, 32 nt, Homo Sapiens
gcaauuuaaugauuagugaguaagauacuguu

SEQ ID NO: 412877 - RNA, 32 nt, Homo Sapiens
acggaacuggggauugcgaugauugaucuggg

SEQ ID NO: 412878 - RNA, 32 nt, Homo Sapiens
ccgaggagcaggcgggggcgccggggcuuuug

SEQ ID NO: 412879 - RNA, 32 nt, Homo Sapiens
acuuuuuauugggugacauaucauaugagcac

SEQ ID NO: 412880 - RNA, 32 nt, Homo Sapiens
cagaaaaaacaaaacuggauacaugugcagaa

SEQ ID NO: 412881 - RNA, 32 nt, Homo Sapiens
aacuauauucuuaugaaggaauuuguaccuuu

SEQ ID NO: 412882 - RNA, 32 nt, Homo Sapiens
agggagaguaagucagcaucgguauaaaaucg

SEQ ID NO: 412883 - RNA, 32 nt, Homo Sapiens
ucaaaagcagaaaacaaaaacaacaguccuac

SEQ ID NO: 412884 - RNA, 32 nt, Homo Sapiens
gcagccccgggcgguccauggggcgggcacgg

SEQ ID NO: 412885 - RNA, 32 nt, Homo Sapiens
guccaggcccagaagcagcugcagccaagcgu

SEQ ID NO: 412886 - RNA, 32 nt, Homo Sapiens
augauugugcuauaacuuaaaauaaugauguu

SEQ ID NO: 412887 - RNA, 32 nt, Homo Sapiens
guggugacccccgccccccaccccacccuccc

SEQ ID NO: 412888 - RNA, 32 nt, Homo Sapiens
ucaaacagaacaaauaaguuauauuuuauguc

SEQ ID NO: 412889 - RNA, 32 nt, Homo Sapiens
ccucccacgguuggugcuggcuccuuggcucc

SEQ ID NO: 412890 - RNA, 32 nt, Homo Sapiens
acaucccacuuagccgcacccugcaccugcug

SEQ ID NO: 412891 - RNA, 31 nt, Homo Sapiens
uccauuccagcacccaccugaguuccgagga

SEQ ID NO: 412892 - RNA, 32 nt, Homo Sapiens
ggaugcgcuaacauucacucuuguuugucccu

SEQ ID NO: 412893 - RNA, 32 nt, Homo Sapiens
ccugcaccuccaccugccccagccccugccuc

SEQ ID NO: 412894 - RNA, 32 nt, Homo Sapiens
gaguguuuuccauuuuacaguuuauauuccag

SEQ ID NO: 412895 - RNA, 32 nt, Homo Sapiens
caggcugagugagccacagaccaccugcuucu

SEQ ID NO: 412896 - RNA, 32 nt, Homo Sapiens
cuaaguagaguauauugaaaagaaaaagaaga

SEQ ID NO: 412897 - RNA, 32 nt, Homo Sapiens
aagucuguguuccuccccguccuugccagugg

SEQ ID NO: 412898 - RNA, 29 nt, Homo Sapiens
aagaacaugucuauguacccguuucuagg

SEQ ID NO: 412899 - RNA, 32 nt, Homo Sapiens
gagcggcaccgggguuggggcgcggaggagga

SEQ ID NO: 412900 - RNA, 32 nt, Homo Sapiens
ggcagacacuccagccccuuucugggauccug

SEQ ID NO: 412901 - RNA, 32 nt, Homo Sapiens
uuauauucaaggaaauuaacgaaacauccugu

SEQ ID NO: 412902 - RNA, 32 nt, Homo Sapiens
aagccggcaacgcuugcuauuuauuuuacaaa

SEQ ID NO: 412903 - RNA, 32 nt, Homo Sapiens
gcugaguuccuaucaagcaccauucuuggcac

SEQ ID NO: 412904 - RNA, 32 nt, Homo Sapiens
ccaggaggcagacguugcagcgagccaaauuu

SEQ ID NO: 412905 - RNA, 32 nt, Homo Sapiens
gaaaaauacguggaguugaugagaaaggggag

SEQ ID NO: 412906 - RNA, 32 nt, Homo Sapiens
uuuugugcguuccucuccagagcgccucucgu

SEQ ID NO: 412907 - RNA, 32 nt, Homo Sapiens
guuugggauacguaucuguugaaugaaugaau

SEQ ID NO: 412908 - RNA, 32 nt, Homo Sapiens
cugaggucaggaguuugagaccagccuggcua

SEQ ID NO: 412909 - RNA, 32 nt, Homo Sapiens
agucgcugccgcucgagggaccgcggacccgg

SEQ ID NO: 412910 - RNA, 32 nt, Homo Sapiens
gcagauauaucgaucaauggaaucaaauaguc

SEQ ID NO: 412911 - RNA, 30 nt, Homo Sapiens
ccuggccaaguuggguccuauaggaccugg

SEQ ID NO: 412912 - RNA, 32 nt, Homo Sapiens
cgggggccgggcggugcgcugcaggccaucug

SEQ ID NO: 412913 - RNA, 32 nt, Homo Sapiens
gaguguccaucccaaagcugcccugcagccua

SEQ ID NO: 412914 - RNA, 32 nt, Homo Sapiens
uugaacccaggaauuugagaccagucugggca

SEQ ID NO: 412915 - RNA, 32 nt, Homo Sapiens
aggcaggcgccccuuccaccuuuccccgagag

SEQ ID NO: 412916 - RNA, 32 nt, Homo Sapiens
guguuuggguuuuguuuuuucuuuaagaaaaa

SEQ ID NO: 412917 - RNA, 32 nt, Homo Sapiens
cuguggacaaaagguuaucugcucuuggccau

SEQ ID NO: 412918 - RNA, 32 nt, Homo Sapiens
agcaauggaaaaggaaacuaaaaaauauacau

SEQ ID NO: 412919 - RNA, 32 nt, Homo Sapiens
aaguuccgcgcgcaggccaggcugcaaccuga

SEQ ID NO: 412920 - RNA, 32 nt, Homo Sapiens
cugggcucauguaucugcgcagcucugguacc

SEQ ID NO: 412921 - RNA, 32 nt, Homo Sapiens
cugggggaaggggcagcugugggcacagcuuc

SEQ ID NO: 412922 - RNA, 32 nt, Homo Sapiens
ggggccuaugagagggcggaaggugggaggag

SEQ ID NO: 412923 - RNA, 32 nt, Homo Sapiens
guguuuauaaauauuucuauaauaguuucaca

SEQ ID NO: 412924 - RNA, 32 nt, Homo Sapiens
cuuaaaaauacaguuuccuggaccuuauccaa

SEQ ID NO: 412925 - RNA, 32 nt, Homo Sapiens
auuucacuaauaggauaagacaaauuuuuugc

SEQ ID NO: 412926 - RNA, 32 nt, Homo Sapiens
ucaucagucuagaauugauauuugaguauagu

SEQ ID NO: 412927 - RNA, 32 nt, Homo Sapiens
ggggcugggggagagggaagguacagagagcg

SEQ ID NO: 412928 - RNA, 32 nt, Homo Sapiens
aggugacgggagaggagguuggagguguagcg

SEQ ID NO: 412929 - RNA, 32 nt, Homo Sapiens
cuacaguugcuuagccaauaaaccuuuccugg

SEQ ID NO: 412930 - RNA, 32 nt, Homo Sapiens
cguauuccgggcggcccgcggcccacggggau

SEQ ID NO: 412931 - RNA, 32 nt, Homo Sapiens
gacggggucuuguugugucacccagguuagag

SEQ ID NO: 412932 - RNA, 32 nt, Homo Sapiens
cagcagugauaugacagauuugaucagaaauu

SEQ ID NO: 412933 - RNA, 32 nt, Homo Sapiens
cagggagcccaaggggacccugacaccgggcc

SEQ ID NO: 412934 - RNA, 32 nt, Homo Sapiens
uuuaaaagaugaaugacucaaaaguucgaguu

SEQ ID NO: 412935 - RNA, 32 nt, Homo Sapiens
ccaguucugccucucugacaaccaucagccac

SEQ ID NO: 412936 - RNA, 32 nt, Homo Sapiens
uccuucagaaauagcagcaggcugguugcucu

SEQ ID NO: 412937 - RNA, 32 nt, Homo Sapiens
aauuugaaaaagauccuauauacaauguauaa

SEQ ID NO: 412938 - RNA, 32 nt, Homo Sapiens
uggccaccgcacgcgacaccuacggucacgug

SEQ ID NO: 412939 - RNA, 32 nt, Homo Sapiens
ccuacauacauuagcuguggacaccccgcccu

SEQ ID NO: 412940 - RNA, 32 nt, Homo Sapiens
ccaauacucuccuaaaauaaacaugaagcaca

SEQ ID NO: 412941 - RNA, 32 nt, Homo Sapiens
gguacuaccucccagcucuguuuuccaucccc

SEQ ID NO: 412942 - RNA, 32 nt, Homo Sapiens
ugcuuuccggccgcccucuggucggccaccca

SEQ ID NO: 412943 - RNA, 32 nt, Homo Sapiens
cuucugaggacucccacccccaucccaguauc

SEQ ID NO: 412944 - RNA, 32 nt, Homo Sapiens
cauucuggcuguguagccacuccacagauggg

SEQ ID NO: 412945 - RNA, 32 nt, Homo Sapiens
gaggaaugcaggagcaggaguugagcuuggga

SEQ ID NO: 412946 - RNA, 32 nt, Homo Sapiens
aggcuuugggggcccuuccgcggcagccccgg

SEQ ID NO: 412947 - RNA, 32 nt, Homo Sapiens
cggaagggaaaaaacaggcaaaaacuaaggaa

SEQ ID NO: 412948 - RNA, 32 nt, Homo Sapiens
ccucagccgggcggcuccgcuaguggcuaaag

SEQ ID NO: 412949 - RNA, 30 nt, Homo Sapiens
uuauccccacuugcagcccugucuuccuac

SEQ ID NO: 412950 - RNA, 32 nt, Homo Sapiens
ugccugcuccuucacuuuuguaaaaccauccc

SEQ ID NO: 412951 - RNA, 30 nt, Homo Sapiens
cacccccugggaaugggggguacucacgca

SEQ ID NO: 412952 - RNA, 32 nt, Homo Sapiens
cagccaauuuggaaaauccuucuaaggcuuau

SEQ ID NO: 412953 - RNA, 32 nt, Homo Sapiens
cacccuuucccuaccuucagacucuauucuuu

SEQ ID NO: 412954 - RNA, 32 nt, Homo Sapiens
agguuuuaggguuuuguaaaucuucauaguaa

SEQ ID NO: 412955 - RNA, 32 nt, Homo Sapiens
gcagagagaagcccuccccacccaggacugag

SEQ ID NO: 412956 - RNA, 32 nt, Homo Sapiens
ucagccccagguuuccuguacuucagcucaua

SEQ ID NO: 412957 - RNA, 32 nt, Homo Sapiens
cugccaucucucuuucugggaguuuagacaau

SEQ ID NO: 412958 - RNA, 26 nt, Homo Sapiens
gaugcggcuguggaaggcgguggugg

SEQ ID NO: 412959 - RNA, 32 nt, Homo Sapiens
gugacaaaggauugugaagagcuuuccaucuu

SEQ ID NO: 412960 - RNA, 32 nt, Homo Sapiens
aggaaagccugcagccccccacuuccuuccag

SEQ ID NO: 412961 - RNA, 32 nt, Homo Sapiens
gagccagugaugcaggaucgcugagcggagau

SEQ ID NO: 412962 - RNA, 32 nt, Homo Sapiens
ucaccccucccuccccaaaagacaagagaaau

SEQ ID NO: 412963 - RNA, 32 nt, Homo Sapiens
caaggaaggcagcggcagcuccacucagccag

SEQ ID NO: 412964 - RNA, 32 nt, Homo Sapiens
uaaggguaggauguugcucugaaucacuguga

SEQ ID NO: 412965 - RNA, 32 nt, Homo Sapiens
acuccuugccccagggacccaggcucaugcuc

SEQ ID NO: 412966 - RNA, 32 nt, Homo Sapiens
ugaccacuuucccccacccuucccacccucua

SEQ ID NO: 412967 - RNA, 32 nt, Homo Sapiens
aaauagcccaaccaagcgaguggaugucccca

SEQ ID NO: 412968 - RNA, 32 nt, Homo Sapiens
cgacacugagccccgcugggcuucggagcagg

SEQ ID NO: 412969 - RNA, 32 nt, Homo Sapiens
gccagugaagggcgagucagggcacgcguccu

SEQ ID NO: 412970 - RNA, 32 nt, Homo Sapiens
gcccagcccagcccugcccccgggcacugcac

SEQ ID NO: 412971 - RNA, 32 nt, Homo Sapiens
aauucagaucaucaaacugauuauauagaaga

SEQ ID NO: 412972 - RNA, 32 nt, Homo Sapiens
aauucggcacgaggaaagcuuccagcccuccu

SEQ ID NO: 412973 - RNA, 32 nt, Homo Sapiens
caucgagugucccucaccacccgcccgucuga

SEQ ID NO: 412974 - RNA, 32 nt, Homo Sapiens
accuaucaaaaauuauucuauaaucacuacua

SEQ ID NO: 412975 - RNA, 32 nt, Homo Sapiens
acuaggauaaaauaaaagaugaaggucugagg

SEQ ID NO: 412976 - RNA, 32 nt, Homo Sapiens
gaggagaggaacguguguccagugucccgauc

SEQ ID NO: 412977 - RNA, 32 nt, Homo Sapiens
ucaaagggaagcugcgaggauuccaagguccc

SEQ ID NO: 412978 - RNA, 32 nt, Homo Sapiens
caaaaggagggcugggucuuggagacguggag

SEQ ID NO: 412979 - RNA, 32 nt, Homo Sapiens
auucucucaauccccaugaccaucuccaugcc

SEQ ID NO: 412980 - RNA, 32 nt, Homo Sapiens
gagacaaacugggcucauaugacgggguugca

SEQ ID NO: 412981 - RNA, 32 nt, Homo Sapiens
ugaaggcaaacacagcaucgugaucacugagc

SEQ ID NO: 412982 - RNA, 32 nt, Homo Sapiens
auaaagcuucuguggucuuguuuuuaauggcu

SEQ ID NO: 412983 - RNA, 30 nt, Homo Sapiens
aaccugcucugugcugggaaccugcucugu

SEQ ID NO: 412984 - RNA, 32 nt, Homo Sapiens
cgcgaguuccugagcuggugccaggcagguga

SEQ ID NO: 412985 - RNA, 32 nt, Homo Sapiens
aaaaccggccugggcccuggcggccgcaggag

SEQ ID NO: 412986 - RNA, 32 nt, Homo Sapiens
uuaaaaguuucaucagaaacuuuacauaucuu

SEQ ID NO: 412987 - RNA, 32 nt, Homo Sapiens
ccgaacucgccggcggagucgccgcgccagau

SEQ ID NO: 412988 - RNA, 32 nt, Homo Sapiens
uauuguucugcaaugaauauaaagucacuuau

SEQ ID NO: 412989 - RNA, 32 nt, Homo Sapiens
ugcugacuuccacuccaguaaauuuucuucca

SEQ ID NO: 412990 - RNA, 32 nt, Homo Sapiens
gaccuucugaagaucucagauaaagugaccag

SEQ ID NO: 412991 - RNA, 32 nt, Homo Sapiens
ucuuuuucuuuuucuuuuuuuuuuuaauguga

SEQ ID NO: 412992 - RNA, 32 nt, Homo Sapiens
aacugguagacauggagaccccugccuggccc

SEQ ID NO: 412993 - RNA, 32 nt, Homo Sapiens
cgcgaucuuguuccuuuccccuccgcuucucu

SEQ ID NO: 412994 - RNA, 32 nt, Homo Sapiens
aggcuaccaaaauauuucuuauuugcuaggag

SEQ ID NO: 412995 - RNA, 31 nt, Homo Sapiens
acuuggagggcgguggucuguuacagggugu

SEQ ID NO: 412996 - RNA, 28 nt, Homo Sapiens
cccaauaaacgaauucugucuccccgug

SEQ ID NO: 412997 - RNA, 32 nt, Homo Sapiens
acauuuaagcucauagagauacagagcauaug

SEQ ID NO: 412998 - RNA, 32 nt, Homo Sapiens
aauaggaguggguauuaugcaacaucauggag

SEQ ID NO: 412999 - RNA, 32 nt, Homo Sapiens
aauuuugguaucucaagcuuguuuuccagagu

SEQ ID NO: 413000 - RNA, 32 nt, Homo Sapiens
cgagacacaaaauaaaguuuguuugaagcauc

SEQ ID NO: 413001 - RNA, 32 nt, Homo Sapiens
ugcggggagggcugcgggagggcagcgggagc

SEQ ID NO: 413002 - RNA, 32 nt, Homo Sapiens
ccuggacuuuacuaccacaucuacagagccau

SEQ ID NO: 413003 - RNA, 32 nt, Homo Sapiens
gagugaaggagcucguggauaggcucugcgag

SEQ ID NO: 413004 - RNA, 32 nt, Homo Sapiens
ggagcuuggggguagcagccucauggaagaug

SEQ ID NO: 413005 - RNA, 32 nt, Homo Sapiens
acacgcugccccaagggucuuuauuaccuggg

SEQ ID NO: 413006 - RNA, 32 nt, Homo Sapiens
guugaggcauuugggugguaagagaauguuau

SEQ ID NO: 413007 - RNA, 32 nt, Homo Sapiens
auuccugcauucaaaugucagccguuuguaaa

SEQ ID NO: 413008 - RNA, 32 nt, Homo Sapiens
uuccaggugaugcuguuguugcuggucuagag

SEQ ID NO: 413009 - RNA, 32 nt, Homo Sapiens
uggccccgcucccagaggcgggugccgcgcug

SEQ ID NO: 413010 - RNA, 32 nt, Homo Sapiens
aaauucaagcauuugugauacauggcuggaau

SEQ ID NO: 413011 - RNA, 32 nt, Homo Sapiens
uuugccuuaugaaugugauugcagcuuugaac

SEQ ID NO: 413012 - RNA, 32 nt, Homo Sapiens
uagcuugcggccugugucuauggucgggcccu

SEQ ID NO: 413013 - RNA, 32 nt, Homo Sapiens
augaaauccacccuaggagacggagucaaacu

SEQ ID NO: 413014 - RNA, 30 nt, Homo Sapiens
cucugaggcggcggcggcggcggggaucgu

SEQ ID NO: 413015 - RNA, 32 nt, Homo Sapiens
ccuucagucaccugguggcuaauuagaccccu

SEQ ID NO: 413016 - RNA, 32 nt, Homo Sapiens
aaaaaacugguucuccaccccucccccauaca

SEQ ID NO: 413017 - RNA, 32 nt, Homo Sapiens
ggugcacugcucaauuaacaaaccuacaugga

SEQ ID NO: 413018 - RNA, 32 nt, Homo Sapiens
aacuugguguagccgguuccccggccacgacu

SEQ ID NO: 413019 - RNA, 32 nt, Homo Sapiens
gcggagguagacaguuucaaacaucacaguuu

SEQ ID NO: 413020 - RNA, 31 nt, Homo Sapiens
gugggucauuugacuugauuuuuuaagcuac

SEQ ID NO: 413021 - RNA, 30 nt, Homo Sapiens
gcgggcgcagcgcagcacagcccggccaug

SEQ ID NO: 413022 - RNA, 32 nt, Homo Sapiens
augaacucauucagguuggacggaguuucacc

SEQ ID NO: 413023 - RNA, 32 nt, Homo Sapiens
aagcaaagcgaaaagagguuuuggaggaauau

SEQ ID NO: 413024 - RNA, 32 nt, Homo Sapiens
cuagaccuguuuugcuuuuguaacuugaagau

SEQ ID NO: 413025 - RNA, 32 nt, Homo Sapiens
ccauuguaaccucagucaugaaaaauacauca

SEQ ID NO: 413026 - RNA, 32 nt, Homo Sapiens
cuaaccugaaauaagauuagauaauugugagg

SEQ ID NO: 413027 - RNA, 32 nt, Homo Sapiens
aaauuguuugauauuucuuaaugucugcucug

SEQ ID NO: 413028 - RNA, 32 nt, Homo Sapiens
uucccaggcagggaugacuccuggacagugaa

SEQ ID NO: 413029 - RNA, 32 nt, Homo Sapiens
gugaugaugauuauuuauuaguaacugguuau

SEQ ID NO: 413030 - RNA, 32 nt, Homo Sapiens
uugcugauuucuaguguauacucuguagucuc

SEQ ID NO: 413031 - RNA, 32 nt, Homo Sapiens
agaacaggacaaugacgggguggggaggcauc

SEQ ID NO: 413032 - RNA, 32 nt, Homo Sapiens
uacaggcaugcgccaccacacccggguaauuu

SEQ ID NO: 413033 - RNA, 32 nt, Homo Sapiens
cacgccugccagcaaagccucgcuaaccccau

SEQ ID NO: 413034 - RNA, 32 nt, Homo Sapiens
gaugaaggcagacaguaggagguuggcagaug

SEQ ID NO: 413035 - RNA, 32 nt, Homo Sapiens
acccuggccuaccacacccucauucugugccu

SEQ ID NO: 413036 - RNA, 32 nt, Homo Sapiens
uguguauauugauguuuauauaaguaacucuu

SEQ ID NO: 413037 - RNA, 32 nt, Homo Sapiens
cugaucauaaaaagacauuacgacuccuguaa

SEQ ID NO: 413038 - RNA, 32 nt, Homo Sapiens
agauaaguguuugaaucagauuucagaacauc

SEQ ID NO: 413039 - RNA, 32 nt, Homo Sapiens
augagaaaucuaaaaaacgaaaagucuccaaa

SEQ ID NO: 413040 - RNA, 32 nt, Homo Sapiens
ggguggaggggagggauggggggcacaggagc

SEQ ID NO: 413041 - RNA, 32 nt, Homo Sapiens
gguagaggggguauuucugagucaaucugagg

SEQ ID NO: 413042 - RNA, 32 nt, Homo Sapiens
cccuguuccuagcucugccccagccaguccag

SEQ ID NO: 413043 - RNA, 32 nt, Homo Sapiens
cucaaagggcucuggaguaacuaaucagaagc

SEQ ID NO: 413044 - RNA, 32 nt, Homo Sapiens
uccuuucccguguccgcccaccccagcgucug

SEQ ID NO: 413045 - RNA, 32 nt, Homo Sapiens
gcgacuguaaauuguaucuuauaacuuauuaa

SEQ ID NO: 413046 - RNA, 32 nt, Homo Sapiens
ggccuacugagucaaaucuacauucaguguaa

SEQ ID NO: 413047 - RNA, 32 nt, Homo Sapiens
agaugaugaaagugccugaugaaaaugguuca

SEQ ID NO: 413048 - RNA, 32 nt, Homo Sapiens
ccgagcaggaggaggaggaagccggagcugcc

SEQ ID NO: 413049 - RNA, 29 nt, Homo Sapiens
ggaggacggggacagagcgucacuuuccu

SEQ ID NO: 413050 - RNA, 32 nt, Homo Sapiens
uccuucuuccagaaggagguguggccggucau

SEQ ID NO: 413051 - RNA, 32 nt, Homo Sapiens
uaaaauuguggacuuuuaaaaccuguugacua

SEQ ID NO: 413052 - RNA, 32 nt, Homo Sapiens
acccaaaaaguguguuggaaauccacggugau

SEQ ID NO: 413053 - RNA, 32 nt, Homo Sapiens
gaggcacacagacgcgauguggcugcccgucu

SEQ ID NO: 413054 - RNA, 32 nt, Homo Sapiens
aagcauacacaaguaucaauagcugaauugau

SEQ ID NO: 413055 - RNA, 32 nt, Homo Sapiens
cauugcuuuuaaaggaaauuaauagaaagccu

SEQ ID NO: 413056 - RNA, 32 nt, Homo Sapiens
aaugggggcuguaugaauauuauuuaaaacua

SEQ ID NO: 413057 - RNA, 32 nt, Homo Sapiens
cgcuucccagcagcugcccagugccucugucc

SEQ ID NO: 413058 - RNA, 32 nt, Homo Sapiens
guuucaaugcuguuaugauaaaaucauaucuc

SEQ ID NO: 413059 - RNA, 32 nt, Homo Sapiens
cagcguccgugcccggccgccugugccuaccg

SEQ ID NO: 413060 - RNA, 32 nt, Homo Sapiens
uuugguuuucuuuuuuauuauuaaaggaaaaa

SEQ ID NO: 413061 - RNA, 32 nt, Homo Sapiens
agcgcgcccuccccacgcuccgccccugggug

SEQ ID NO: 413062 - RNA, 32 nt, Homo Sapiens
auuuuuuggagaaggguuaauaggggaagcag

SEQ ID NO: 413063 - RNA, 32 nt, Homo Sapiens
ucugauucuugacaccagaugcaggauggugu

SEQ ID NO: 413064 - RNA, 32 nt, Homo Sapiens
cagcuggacuguguggcuggggccugacacug

SEQ ID NO: 413065 - RNA, 27 nt, Homo Sapiens
ccugcuucagccuccugaguagcugua

SEQ ID NO: 413066 - RNA, 30 nt, Homo Sapiens
ggcagagagaagcugguggaguccuguggc

SEQ ID NO: 413067 - RNA, 32 nt, Homo Sapiens
gggaagucuccauggugaaguauaggcugagg

SEQ ID NO: 413068 - RNA, 32 nt, Homo Sapiens
uauggagauauaauucuuaugccauauaauuc

SEQ ID NO: 413069 - RNA, 32 nt, Homo Sapiens
acuggcaaaaauuuucagggugcacuucuuuc

SEQ ID NO: 413070 - RNA, 32 nt, Homo Sapiens
uucuggaacuggaccccgcagcugcgugggca

SEQ ID NO: 413071 - RNA, 32 nt, Homo Sapiens
ucccagcuacucuggaggcuggggcaggagaa

SEQ ID NO: 413072 - RNA, 31 nt, Homo Sapiens
agacacaggcgcuggcugccccguccgcucu

SEQ ID NO: 413073 - RNA, 32 nt, Homo Sapiens
ucuucaauauucuggcuaaaucuugguaugug

SEQ ID NO: 413074 - RNA, 32 nt, Homo Sapiens
ucccaacuacucuggaggcugaggcaggagaa

SEQ ID NO: 413075 - RNA, 32 nt, Homo Sapiens
aagacauacucaguucuuggaacuuaguauua

SEQ ID NO: 413076 - RNA, 32 nt, Homo Sapiens
gccccaccuccgccgugggucccggcccuacc

SEQ ID NO: 413077 - RNA, 32 nt, Homo Sapiens
uacugcaccuugggucccacuuucuccaggau

SEQ ID NO: 413078 - RNA, 32 nt, Homo Sapiens
uauaaaacaaaauuauuuuacacaugcagaau

SEQ ID NO: 413079 - RNA, 32 nt, Homo Sapiens
aggccgaggcggagaaggggcuuccugagcgu

SEQ ID NO: 413080 - RNA, 32 nt, Homo Sapiens
gccaucccgcggcgccucucgggguccgcucc

SEQ ID NO: 413081 - RNA, 32 nt, Homo Sapiens
cagacgggacgcccaguccagagcuggugagc

SEQ ID NO: 413082 - RNA, 32 nt, Homo Sapiens
ccguccuggugcccuggccaccuucuccaccu

SEQ ID NO: 413083 - RNA, 32 nt, Homo Sapiens
uuuauaacaaaguggaagauuucaagaaagga

SEQ ID NO: 413084 - RNA, 32 nt, Homo Sapiens
acuuaauguugugccaaaguuaaacuacugca

SEQ ID NO: 413085 - RNA, 32 nt, Homo Sapiens
cuuaccugagucuuuagaacugucccaggaaa

SEQ ID NO: 413086 - RNA, 32 nt, Homo Sapiens
cgggaguaggggcccgggcggaggcgguggcg

SEQ ID NO: 413087 - RNA, 32 nt, Homo Sapiens
caacauuuucuuuuuaaaggaaaaaauauaua

SEQ ID NO: 413088 - RNA, 32 nt, Homo Sapiens
cagccccugugcuuuagggagcaaccgugagc

SEQ ID NO: 413089 - RNA, 32 nt, Homo Sapiens
cuuuccucugcucugcugcccagcggcccacg

SEQ ID NO: 413090 - RNA, 32 nt, Homo Sapiens
ugcauccuuuauaaaaauaaguacaaauucca

SEQ ID NO: 413091 - RNA, 32 nt, Homo Sapiens
ggucccaucuucugcacccauugcccagucuu

SEQ ID NO: 413092 - RNA, 32 nt, Homo Sapiens
gcguuuucaguggaguuggcuccuccccgcac

SEQ ID NO: 413093 - RNA, 32 nt, Homo Sapiens
uuagcuuagcauaaguuuauuuuucuaaauaa

SEQ ID NO: 413094 - RNA, 32 nt, Homo Sapiens
gaagcaggcagacuagccuggcuggaccauga

SEQ ID NO: 413095 - RNA, 32 nt, Homo Sapiens
aguuucaccauguugaccaggcuggucuugaa

SEQ ID NO: 413096 - RNA, 32 nt, Homo Sapiens
ccggugaagcugcaggacuucuuccaguaugg

SEQ ID NO: 413097 - RNA, 32 nt, Homo Sapiens
auauaaaauauguuuuaaaaugccugacaaug

SEQ ID NO: 413098 - RNA, 32 nt, Homo Sapiens
cggcuccccagccccaggccgggaggcccaga

SEQ ID NO: 413099 - RNA, 32 nt, Homo Sapiens
ccucuucugccagccuccuccuccccugccag

SEQ ID NO: 413100 - RNA, 32 nt, Homo Sapiens
aagcagcaaagagcaaguccccugcccagugg

SEQ ID NO: 413101 - RNA, 32 nt, Homo Sapiens
cacuguacuccagccuaggugacagagcaaga

SEQ ID NO: 413102 - RNA, 32 nt, Homo Sapiens
agucuagagaacuguuccuuaauagcauugua

SEQ ID NO: 413103 - RNA, 32 nt, Homo Sapiens
acauucagauuugaaauggucaauuguucaca

SEQ ID NO: 413104 - RNA, 32 nt, Homo Sapiens
gaacaccugagggaggaaggggcuugcaguuu

SEQ ID NO: 413105 - RNA, 32 nt, Homo Sapiens
guuauuaaaugguuaaucauggccuuuuaaaa

SEQ ID NO: 413106 - RNA, 32 nt, Homo Sapiens
uaguguuuugguucgauuuuggagcauccacc

SEQ ID NO: 413107 - RNA, 32 nt, Homo Sapiens
gggcgcccgguaccucugcccgcgguccucgc

SEQ ID NO: 413108 - RNA, 32 nt, Homo Sapiens
gccgaagcaguggcucucggagggggaacaaa

SEQ ID NO: 413109 - RNA, 32 nt, Homo Sapiens
gcgcuaggaugggaaacagugcgcuccgcgcu

SEQ ID NO: 413110 - RNA, 32 nt, Homo Sapiens
cgcucgcagcggggacugcgcccgcgggggag

SEQ ID NO: 413111 - RNA, 32 nt, Homo Sapiens
guguuguauaaaaucuugaaaguagaauaguu

SEQ ID NO: 413112 - RNA, 32 nt, Homo Sapiens
ccaaaguccccauucaguauauuccauauuug

SEQ ID NO: 413113 - RNA, 32 nt, Homo Sapiens
uacacuguaaagaggcaauaugucuagcuugu

SEQ ID NO: 413114 - RNA, 30 nt, Homo Sapiens
aacauguaucaccacuucugugauuucauc

SEQ ID NO: 413115 - RNA, 32 nt, Homo Sapiens
gcagguggugggagagcgucaggcuugaacaa

SEQ ID NO: 413116 - RNA, 30 nt, Homo Sapiens
cagagacauguuaccuacaagaguucuggg

SEQ ID NO: 413117 - RNA, 32 nt, Homo Sapiens
aaucaggcgcgucccucuggcgcuggagccag

SEQ ID NO: 413118 - RNA, 32 nt, Homo Sapiens
ggcagcuucugucgcuggcccuggggucccca

SEQ ID NO: 413119 - RNA, 32 nt, Homo Sapiens
uuaauguaaaauguuuuguugaaguauauggc

SEQ ID NO: 413120 - RNA, 32 nt, Homo Sapiens
uuggggaaauaugaacuguauuuuaaauuugu

SEQ ID NO: 413121 - RNA, 32 nt, Homo Sapiens
ggagccggccccaggugcuccccugacagucc

SEQ ID NO: 413122 - RNA, 32 nt, Homo Sapiens
uacggaagaccacguccuagaagugcuguguc

SEQ ID NO: 413123 - RNA, 32 nt, Homo Sapiens
cuuuuacugcuaaaaugucucaaagcaguuca

SEQ ID NO: 413124 - RNA, 32 nt, Homo Sapiens
agaauggugcuaaaguaaaacuaguuuaauaa

SEQ ID NO: 413125 - RNA, 32 nt, Homo Sapiens
cccucccugggaagauucuuggaguuacugag

SEQ ID NO: 413126 - RNA, 32 nt, Homo Sapiens
ugcagggugaagaccgcuucccugagacaggg

SEQ ID NO: 413127 - RNA, 32 nt, Homo Sapiens
aaauauaccuuaacuuuuuuucuuuuacacug

SEQ ID NO: 413128 - RNA, 32 nt, Homo Sapiens
guucaugcuuuaauuuuuucugauuuguuuca

SEQ ID NO: 413129 - RNA, 32 nt, Homo Sapiens
uuuucugguuuauuucuacuguaaucucucaa

SEQ ID NO: 413130 - RNA, 32 nt, Homo Sapiens
cccuuaagaguauguuacauuugauuaccuga

SEQ ID NO: 413131 - RNA, 32 nt, Homo Sapiens
auuuuguauuuuuuccuguaagacaauaggcc

SEQ ID NO: 413132 - RNA, 30 nt, Homo Sapiens
gcuuccucucaugccacccguguuauuucu

SEQ ID NO: 413133 - RNA, 32 nt, Homo Sapiens
ggggcgugcagguagccggccggccggggguc

SEQ ID NO: 413134 - RNA, 32 nt, Homo Sapiens
uguggagcuuguuggggggaugucuaggaagc

SEQ ID NO: 413135 - RNA, 32 nt, Homo Sapiens
cuuagaauguauauagauaugaucaagucuuu

SEQ ID NO: 413136 - RNA, 32 nt, Homo Sapiens
cguguuuuaagugcagagaauauucgagcugg

SEQ ID NO: 413137 - RNA, 32 nt, Homo Sapiens
cucuaucuccaguuuuuuuucuuauuugaaug

SEQ ID NO: 413138 - RNA, 32 nt, Homo Sapiens
uguguauaucuaagauagaaaauguacaguaa

SEQ ID NO: 413139 - RNA, 32 nt, Homo Sapiens
caaguggaaaauucccuaagguguuggacaga

SEQ ID NO: 413140 - RNA, 32 nt, Homo Sapiens
ccauugauaguuuuaggauaguaaaucauuuc

SEQ ID NO: 413141 - RNA, 32 nt, Homo Sapiens
ggaaugagccaugcugcacuguucaagaaggu

SEQ ID NO: 413142 - RNA, 32 nt, Homo Sapiens
cgugucuuguuaaccagcaguuccuguucaac

SEQ ID NO: 413143 - RNA, 31 nt, Homo Sapiens
ccuggcgggcacugcuucccggccugcgaug

SEQ ID NO: 413144 - RNA, 32 nt, Homo Sapiens
auccagugagagauaauuugaaucaagggggc

SEQ ID NO: 413145 - RNA, 32 nt, Homo Sapiens
ccccacaguggggaagcagaacggggagaccu

SEQ ID NO: 413146 - RNA, 32 nt, Homo Sapiens
augauauucuuauuagaaaacagaaguagcua

SEQ ID NO: 413147 - RNA, 32 nt, Homo Sapiens
uauuuggguuuucuugcgguguccggcucccg

SEQ ID NO: 413148 - RNA, 32 nt, Homo Sapiens
ggagccaaauguguggaggucugugggaagag

SEQ ID NO: 413149 - RNA, 32 nt, Homo Sapiens
cuccgggcggccgggcgggcgcacaccauccc

SEQ ID NO: 413150 - RNA, 32 nt, Homo Sapiens
gugucccaagacccuaucuccuccccaacauu

SEQ ID NO: 413151 - RNA, 32 nt, Homo Sapiens
gcgagccuccagcagagaccgccuuuacccgc

SEQ ID NO: 413152 - RNA, 32 nt, Homo Sapiens
ccauucaggcaaacaagggcagugguuuuguu

SEQ ID NO: 413153 - RNA, 32 nt, Homo Sapiens
auucccuaaaacaaaauuagggagucaaacgu

SEQ ID NO: 413154 - RNA, 32 nt, Homo Sapiens
uccccucugcggcagaaauuugugacugagau

SEQ ID NO: 413155 - RNA, 32 nt, Homo Sapiens
auuaauggugucuaaaugccucagucagugcc

SEQ ID NO: 413156 - RNA, 32 nt, Homo Sapiens
gcugcagcauauagaccaggaaaucagguagc

SEQ ID NO: 413157 - RNA, 32 nt, Homo Sapiens
uuagaucauacaaaaaucuuuauuggguccgu

SEQ ID NO: 413158 - RNA, 32 nt, Homo Sapiens
cgaggggcugugggcgcgcagcuggaaccucc

SEQ ID NO: 413159 - RNA, 32 nt, Homo Sapiens
acugggguguagaacaaaaugguuccacagau

SEQ ID NO: 413160 - RNA, 32 nt, Homo Sapiens
cccaggguguugcugaaaaugucagaugcaaa

SEQ ID NO: 413161 - RNA, 32 nt, Homo Sapiens
cuucuuucuugccccagucuccaguucuccag

SEQ ID NO: 413162 - RNA, 32 nt, Homo Sapiens
caauauucugcgugcugucccucccccacccc

SEQ ID NO: 413163 - RNA, 32 nt, Homo Sapiens
augcucugaccaagccgagaugccauucucuu

SEQ ID NO: 413164 - RNA, 32 nt, Homo Sapiens
acauuacccagcuggucucgagcuccuggccu

SEQ ID NO: 413165 - RNA, 32 nt, Homo Sapiens
cagaaccucagagcuucccuggugggcucccc

SEQ ID NO: 413166 - RNA, 32 nt, Homo Sapiens
ugggaggugucgggcgggacagaauggggagc

SEQ ID NO: 413167 - RNA, 30 nt, Homo Sapiens
gagccaucguucaugggggacacaaggcuu

SEQ ID NO: 413168 - RNA, 32 nt, Homo Sapiens
cugccuuuccuucucccauccuuuuucuggau

SEQ ID NO: 413169 - RNA, 32 nt, Homo Sapiens
guguucaggaagcucauucugaugcccugggc

SEQ ID NO: 413170 - RNA, 32 nt, Homo Sapiens
uucuuccuuuuauaagaguaauuauauuuaaa

SEQ ID NO: 413171 - RNA, 32 nt, Homo Sapiens
uagaggcuuuccgguuugccuacgccaagagg

SEQ ID NO: 413172 - RNA, 32 nt, Homo Sapiens
accgagccugacggagccggaggcugggagcc

SEQ ID NO: 413173 - RNA, 32 nt, Homo Sapiens
uuauuuucuuccccuaccucucuuccuucuuc

SEQ ID NO: 413174 - RNA, 32 nt, Homo Sapiens
accauucggaagcuccagaacccaggcccuaa

SEQ ID NO: 413175 - RNA, 30 nt, Homo Sapiens
ccuuagcgggcgcagcagcuggaacgggag

SEQ ID NO: 413176 - RNA, 32 nt, Homo Sapiens
gagugacuccaccgcccggagcagcggugcag

SEQ ID NO: 413177 - RNA, 32 nt, Homo Sapiens
aauauuuacuuucccaccuccuugcuuuuucu

SEQ ID NO: 413178 - RNA, 32 nt, Homo Sapiens
cacacacacaaacacacacacacacacacacu

SEQ ID NO: 413179 - RNA, 32 nt, Homo Sapiens
gagagagcuuauauauuauuuauauuuauauu

SEQ ID NO: 413180 - RNA, 31 nt, Homo Sapiens
gugaucacuuugacuugagcaaaugguuuaa

SEQ ID NO: 413181 - RNA, 32 nt, Homo Sapiens
ugaaggaaucaucacauaagcuuauuaaauac

SEQ ID NO: 413182 - RNA, 32 nt, Homo Sapiens
ccgaguagcugggauuacagggugaagaggga

SEQ ID NO: 413183 - RNA, 32 nt, Homo Sapiens
ccagggcaaaaggguccaaacacaugguuuuc

SEQ ID NO: 413184 - RNA, 32 nt, Homo Sapiens
ucgguccugggcuggcugugguguagggcguu

SEQ ID NO: 413185 - RNA, 32 nt, Homo Sapiens
auuuggggucauauuaucuuuauuuucuuuaa

SEQ ID NO: 413186 - RNA, 32 nt, Homo Sapiens
gaccucacugcucagauccccuucgccaacug

SEQ ID NO: 413187 - RNA, 32 nt, Homo Sapiens
ugaauuuuguuuaaacucuacuguauauugaa

SEQ ID NO: 413188 - RNA, 32 nt, Homo Sapiens
aauguaaaggauuaagugcugugcuuuuagau

SEQ ID NO: 413189 - RNA, 32 nt, Homo Sapiens
gcgauuguuccuuguugccgcuccgcuuagug

SEQ ID NO: 413190 - RNA, 32 nt, Homo Sapiens
uggugggcgaggguggcgcaugggaggccgag

SEQ ID NO: 413191 - RNA, 32 nt, Homo Sapiens
aacccccagcuguccacccauccccugcccca

SEQ ID NO: 413192 - RNA, 32 nt, Homo Sapiens
gaguuuacuguaagcuggaaaucuaaaguuag

SEQ ID NO: 413193 - RNA, 32 nt, Homo Sapiens
augagaaaacugugucacucuucaauuuuuuu

SEQ ID NO: 413194 - RNA, 32 nt, Homo Sapiens
uuacugugcuuggucaugagcugcugggaagu

SEQ ID NO: 413195 - RNA, 32 nt, Homo Sapiens
uagugacaaaaauaugcuaccauuaugcauug

SEQ ID NO: 413196 - RNA, 32 nt, Homo Sapiens
agagggccuccaguugccauuacucacuccaa

SEQ ID NO: 413197 - RNA, 32 nt, Homo Sapiens
uuugggcugugacgucucccaccugccccaau

SEQ ID NO: 413198 - RNA, 32 nt, Homo Sapiens
cuaguaucauuuucuuuuuuaauuuuugacuu

SEQ ID NO: 413199 - RNA, 32 nt, Homo Sapiens
auggccggcgccgcgccgcggguccgcuaccu

SEQ ID NO: 413200 - RNA, 32 nt, Homo Sapiens
ucgagugaauuggaaccugaaugugaccagug

SEQ ID NO: 413201 - RNA, 32 nt, Homo Sapiens
ugaaaaucaaaggaggcaaaauuuugacaggg

SEQ ID NO: 413202 - RNA, 32 nt, Homo Sapiens
uuaugcuagguuuaucucuccucuucuguuuu

SEQ ID NO: 413203 - RNA, 32 nt, Homo Sapiens
cugucuccugggggguuugaggcugggcuggg

SEQ ID NO: 413204 - RNA, 32 nt, Homo Sapiens
acacccccaagaaugcaggcucugccuggcac

SEQ ID NO: 413205 - RNA, 32 nt, Homo Sapiens
gagcgcuccucggaagaccggggccaacaugc

SEQ ID NO: 413206 - RNA, 32 nt, Homo Sapiens
uaauuuuccaagguccaauugacugcgcccuu

SEQ ID NO: 413207 - RNA, 32 nt, Homo Sapiens
cuguacucuucuaaauggaauuuuaaaaguca

SEQ ID NO: 413208 - RNA, 32 nt, Homo Sapiens
ugaaguucacaguugacaaacaacaauuaaug

SEQ ID NO: 413209 - RNA, 32 nt, Homo Sapiens
cgcgaggcggggaagcgcggggccgcggcggu

SEQ ID NO: 413210 - RNA, 30 nt, Homo Sapiens
cuccuccgcugccugccgccgccgccucca

SEQ ID NO: 413211 - RNA, 32 nt, Homo Sapiens
ggugauuuuaaaccuguuuauuuguaaggauu

SEQ ID NO: 413212 - RNA, 32 nt, Homo Sapiens
gcaguugggagugaguuuaggcagcuucucug

SEQ ID NO: 413213 - RNA, 32 nt, Homo Sapiens
uaaaaguaaaauuacagaaauuauuacaaacg

SEQ ID NO: 413214 - RNA, 32 nt, Homo Sapiens
cucguggcuccggccacucggcgugggcauua

SEQ ID NO: 413215 - RNA, 32 nt, Homo Sapiens
ggaaaauguccucauucuuaggagauagaugc

SEQ ID NO: 413216 - RNA, 32 nt, Homo Sapiens
uguuuccuuucugcucuuacacagcauuguuu

SEQ ID NO: 413217 - RNA, 32 nt, Homo Sapiens
uguucaucgcaguugcuccggaucuuugcaca

SEQ ID NO: 413218 - RNA, 32 nt, Homo Sapiens
cccuggacaucacugccucuccagggcauucu

SEQ ID NO: 413219 - RNA, 32 nt, Homo Sapiens
cauucuauaauuauguuacauaaaagcaaugu

SEQ ID NO: 413220 - RNA, 32 nt, Homo Sapiens
cuggucaaauuggauuucuuucauuuuuccac

SEQ ID NO: 413221 - RNA, 32 nt, Homo Sapiens
uucuucccagcucuuugauuugccauauauaa

SEQ ID NO: 413222 - RNA, 32 nt, Homo Sapiens
ccaguggcgagggaugcuggggcggggcuugg

SEQ ID NO: 413223 - RNA, 32 nt, Homo Sapiens
cggacagaggggcugcugccccuggaggagac

SEQ ID NO: 413224 - RNA, 32 nt, Homo Sapiens
cauacuugaaacaaaauaggaaaauggcagca

SEQ ID NO: 413225 - RNA, 32 nt, Homo Sapiens
uauguugagaaaccacuuaaauguauucagau

SEQ ID NO: 413226 - RNA, 32 nt, Homo Sapiens
uucacaaaaugaauuugugugagagcuguaca

SEQ ID NO: 413227 - RNA, 32 nt, Homo Sapiens
gacaguuuagcauggagcuauuccuuggugca

SEQ ID NO: 413228 - RNA, 32 nt, Homo Sapiens
cgggauacagcuuuuacgucuuccauggugaa

SEQ ID NO: 413229 - RNA, 32 nt, Homo Sapiens
uaaguuucucccugggcuucaccucuucaccu

SEQ ID NO: 413230 - RNA, 26 nt, Homo Sapiens
uaaaauggcugguucuuuuguuuucc

SEQ ID NO: 413231 - RNA, 32 nt, Homo Sapiens
cgucacuuccgcugggggcggagcggggcggg

SEQ ID NO: 413232 - RNA, 32 nt, Homo Sapiens
uggauugaggcuaggaaagguugaagcaagag

SEQ ID NO: 413233 - RNA, 32 nt, Homo Sapiens
gccccuguggcacuccuccccacacaccugcu

SEQ ID NO: 413234 - RNA, 32 nt, Homo Sapiens
ugccgccgcccggccccacaguugucuuugcc

SEQ ID NO: 413235 - RNA, 32 nt, Homo Sapiens
ccucccguccccagcccgcugcaccuccgggc

SEQ ID NO: 413236 - RNA, 32 nt, Homo Sapiens
uuuuuguguuggacaguagugaaaucuuguga

SEQ ID NO: 413237 - RNA, 32 nt, Homo Sapiens
ggugcggggccagcugcuaugugguggccgcu

SEQ ID NO: 413238 - RNA, 32 nt, Homo Sapiens
gacccucaacugcuccuccugccaccacacag

SEQ ID NO: 413239 - RNA, 32 nt, Homo Sapiens
cccgcccugaggugggggcccaccaggaugag

SEQ ID NO: 413240 - RNA, 32 nt, Homo Sapiens
uuucaugaaugugccgagugacuucugacucu

SEQ ID NO: 413241 - RNA, 32 nt, Homo Sapiens
uucuccaaccccacccaucguuuugaggguua

SEQ ID NO: 413242 - RNA, 32 nt, Homo Sapiens
ugccuccgccccacaccagcguccccuccuuc

SEQ ID NO: 413243 - RNA, 31 nt, Homo Sapiens
agggggccacgcagccagccagaugccuggc

SEQ ID NO: 413244 - RNA, 30 nt, Homo Sapiens
cugucugaggaaggagggggucccgccuuc

SEQ ID NO: 413245 - RNA, 32 nt, Homo Sapiens
ggaaggacguggaggacucggaggcggagggg

SEQ ID NO: 413246 - RNA, 32 nt, Homo Sapiens
uaugccaguggucugcaugcgcaggcaguaaa

SEQ ID NO: 413247 - RNA, 32 nt, Homo Sapiens
ugguguauugaggugacugaugagaaugugcu

SEQ ID NO: 413248 - RNA, 31 nt, Homo Sapiens
cuccagccugggcaacagagccagacaucuc

SEQ ID NO: 413249 - RNA, 32 nt, Homo Sapiens
uauuuaaguaaaaaguaacaaaaacucugcaa

SEQ ID NO: 413250 - RNA, 32 nt, Homo Sapiens
aacauuguauaaaaacuaagagugucuuuaag

SEQ ID NO: 413251 - RNA, 32 nt, Homo Sapiens
uguauccauucgucugugucuuuauauauuca

SEQ ID NO: 413252 - RNA, 32 nt, Homo Sapiens
ggagaguuggaacacaucuuuccuuuaagugc

SEQ ID NO: 413253 - RNA, 32 nt, Homo Sapiens
aaauggugguggcacuuauccugaagucauca

SEQ ID NO: 413254 - RNA, 32 nt, Homo Sapiens
gcaucuuuuugaaaugcauauuugugcugggu

SEQ ID NO: 413255 - RNA, 32 nt, Homo Sapiens
acccugucucaaaacaaacaaacaaacaaaca

SEQ ID NO: 413256 - RNA, 32 nt, Homo Sapiens
agaugucccucauuaaugagcauucucuucau

SEQ ID NO: 413257 - RNA, 32 nt, Homo Sapiens
caguaggcgagggcgcggcugcgggguuccug

SEQ ID NO: 413258 - RNA, 32 nt, Homo Sapiens
ccuuacuauuguauuauaguacugcuuuacug

SEQ ID NO: 413259 - RNA, 32 nt, Homo Sapiens
ccuuuuguauuuuuauuuuuguucaucugcug

SEQ ID NO: 413260 - RNA, 32 nt, Homo Sapiens
gaccuguuuagagaagccggcucuucaaagac

SEQ ID NO: 413261 - RNA, 32 nt, Homo Sapiens
gcgggagcucugcgccgguggcguuccgcucc

SEQ ID NO: 413262 - RNA, 32 nt, Homo Sapiens
gcccgccucgcaccagcugcaccugccuagca

SEQ ID NO: 413263 - RNA, 32 nt, Homo Sapiens
ccacaggccuacagcuucuccucagugggaaa

SEQ ID NO: 413264 - RNA, 32 nt, Homo Sapiens
uguccugggcccagcccugagccccgggccgg

SEQ ID NO: 413265 - RNA, 32 nt, Homo Sapiens
gacauagaugaagcauuuuaucaucauuagac

SEQ ID NO: 413266 - RNA, 32 nt, Homo Sapiens
gaggcguauguggcaaaauguuacagaaucua

SEQ ID NO: 413267 - RNA, 32 nt, Homo Sapiens
uucuuuaucccauuuuaucauccuuucaguuu

SEQ ID NO: 413268 - RNA, 32 nt, Homo Sapiens
caauacucagugcgguacucaguaacacagug

SEQ ID NO: 413269 - RNA, 30 nt, Homo Sapiens
agcuuuguuuugccugcagaagcagcccug

SEQ ID NO: 413270 - RNA, 32 nt, Homo Sapiens
cagcggucccagcggcagcagcagcggcggga

SEQ ID NO: 413271 - RNA, 32 nt, Homo Sapiens
ggguguguuucggccuggccugggcaggcgcu

SEQ ID NO: 413272 - RNA, 32 nt, Homo Sapiens
ugcauaaaauguuauuuuugcauggcaugaac

SEQ ID NO: 413273 - RNA, 32 nt, Homo Sapiens
agagucuaggcagucgucugccaggcaugcug

SEQ ID NO: 413274 - RNA, 32 nt, Homo Sapiens
ugcacacucacacaugcacacacacacacaca

SEQ ID NO: 413275 - RNA, 32 nt, Homo Sapiens
gcuaccugcccccagguggccaccaaguugug

SEQ ID NO: 413276 - RNA, 32 nt, Homo Sapiens
aggauggcuggggguacaaguccccaaacuac

SEQ ID NO: 413277 - RNA, 32 nt, Homo Sapiens
uucagaagaaaccaguuaauucuuaaaaaauc

SEQ ID NO: 413278 - RNA, 32 nt, Homo Sapiens
uuauaauuuaaugucuuaauuguaaugcucua

SEQ ID NO: 413279 - RNA, 32 nt, Homo Sapiens
cgugcuaaacucgggggcccccugcccgcacc

SEQ ID NO: 413280 - RNA, 32 nt, Homo Sapiens
cgcggcuaugggaacccgcgggcccuccgcgc

SEQ ID NO: 413281 - RNA, 32 nt, Homo Sapiens
ugauguuaauuacauagcauacuauuucaaua

SEQ ID NO: 413282 - RNA, 32 nt, Homo Sapiens
cccucccuccccacccaagccucaccucccca

SEQ ID NO: 413283 - RNA, 32 nt, Homo Sapiens
ggaugguuuaacaaaaugaaggcacucauugc

SEQ ID NO: 413284 - RNA, 32 nt, Homo Sapiens
ggcugcagugauugugauucucauccuggugu

SEQ ID NO: 413285 - RNA, 32 nt, Homo Sapiens
ugaugaugaagauaaagaugagagcagacauc

SEQ ID NO: 413286 - RNA, 32 nt, Homo Sapiens
uacaauuccagaaagugaacucauauuucuaa

SEQ ID NO: 413287 - RNA, 32 nt, Homo Sapiens
cggggcgcggauccggcccagaugggcagcuc

SEQ ID NO: 413288 - RNA, 32 nt, Homo Sapiens
gaucagaaauuucaaagagaacuuauacagaa

SEQ ID NO: 413289 - RNA, 32 nt, Homo Sapiens
auuuauucacacucauaagcaucaaauauuua

SEQ ID NO: 413290 - RNA, 32 nt, Homo Sapiens
ggccuguaaucccagcacuuugggaagcccag

SEQ ID NO: 413291 - RNA, 32 nt, Homo Sapiens
cuauguggaaaaggguugagcaaaaauuugua

SEQ ID NO: 413292 - RNA, 32 nt, Homo Sapiens
aaauugcuuccacuuauuacccauccuuccuc

SEQ ID NO: 413293 - RNA, 32 nt, Homo Sapiens
ucagugguggguggggcagggcagaugaaagg

SEQ ID NO: 413294 - RNA, 32 nt, Homo Sapiens
guucuagcccucccuggcaugucagagccagg

SEQ ID NO: 413295 - RNA, 32 nt, Homo Sapiens
aacucuaaucgaaaaacacaggaggacuaaga

SEQ ID NO: 413296 - RNA, 32 nt, Homo Sapiens
cuuuaccuccgccuuguuccuguccucaccac

SEQ ID NO: 413297 - RNA, 32 nt, Homo Sapiens
aaaaucaaagcucuccucuccccauccccaac

SEQ ID NO: 413298 - RNA, 32 nt, Homo Sapiens
aaaaccuacacgagcaccgugauuucaaguaa

SEQ ID NO: 413299 - RNA, 31 nt, Homo Sapiens
caguaggaauaaaaaaucuauauucucagaa

SEQ ID NO: 413300 - RNA, 32 nt, Homo Sapiens
gaaguggucggcgcgcggcgcggcgcgccugg

SEQ ID NO: 413301 - RNA, 32 nt, Homo Sapiens
uuuacaaggccagggauagaaaacacuccaua

SEQ ID NO: 413302 - RNA, 32 nt, Homo Sapiens
guuccucccuccccaccugcccuccuagcucc

SEQ ID NO: 413303 - RNA, 32 nt, Homo Sapiens
gguucuaaugcagcugcuggggccugaugccc

SEQ ID NO: 413304 - RNA, 32 nt, Homo Sapiens
cucucuauuguuaaacagugggauaucuugug

SEQ ID NO: 413305 - RNA, 32 nt, Homo Sapiens
agcugggugugguggcucaagccuguaguucc

SEQ ID NO: 413306 - RNA, 32 nt, Homo Sapiens
cuuuccccaucccggcuccgucacccucccgu

SEQ ID NO: 413307 - RNA, 32 nt, Homo Sapiens
ugugguuugccuuugucccccuggauagaacg

SEQ ID NO: 413308 - RNA, 32 nt, Homo Sapiens
cagccuccagcaugcaggauaccguaacgaca

SEQ ID NO: 413309 - RNA, 32 nt, Homo Sapiens
cuucuugcucagucccucugggugggaaccau

SEQ ID NO: 413310 - RNA, 32 nt, Homo Sapiens
aagaugugauaaaaaaugugcaugugccauaa

SEQ ID NO: 413311 - RNA, 32 nt, Homo Sapiens
cuccagcaguuacagcagcagcagcuccagca

SEQ ID NO: 413312 - RNA, 31 nt, Homo Sapiens
cgcagccaggagccaugggcaacaucuccuc

SEQ ID NO: 413313 - RNA, 32 nt, Homo Sapiens
gagcaaagguaacucauguuuaaguaauuaac

SEQ ID NO: 413314 - RNA, 32 nt, Homo Sapiens
ucauaagaggggcuucgcuggcagucugaacg

SEQ ID NO: 413315 - RNA, 32 nt, Homo Sapiens
cgaagauuacuuaagaauguguugacacauuu

SEQ ID NO: 413316 - RNA, 32 nt, Homo Sapiens
ccgggggacuucaauccagaaagcagagaaga

SEQ ID NO: 413317 - RNA, 32 nt, Homo Sapiens
agcggcgguggcggcggcguagggaggccggg

SEQ ID NO: 413318 - RNA, 32 nt, Homo Sapiens
ccaauuccuucuccccgccuuggccacgugua

SEQ ID NO: 413319 - RNA, 32 nt, Homo Sapiens
gguggcguuuccuugaggaagagugaggguuc

SEQ ID NO: 413320 - RNA, 32 nt, Homo Sapiens
cuuagcgagccuugcuugcaguugucacacac

SEQ ID NO: 413321 - RNA, 32 nt, Homo Sapiens
ucuucccucggaggggcggggcggggcggggc

SEQ ID NO: 413322 - RNA, 32 nt, Homo Sapiens
auggaggacuuccgaggguuccaaguauacuc

SEQ ID NO: 413323 - RNA, 32 nt, Homo Sapiens
uguaaauuccuccugaaauguuuuuucaugca

SEQ ID NO: 413324 - RNA, 32 nt, Homo Sapiens
uuaugguagugggcuaacauaacagccccuuu

SEQ ID NO: 413325 - RNA, 32 nt, Homo Sapiens
uugauuaaggcaacagcagaagggcagggcaa

SEQ ID NO: 413326 - RNA, 32 nt, Homo Sapiens
ggccaagcucucggaggagaucucggcuccag

SEQ ID NO: 413327 - RNA, 32 nt, Homo Sapiens
cugucuccaaaaaagguuggugaugacauugc

SEQ ID NO: 413328 - RNA, 32 nt, Homo Sapiens
cuaggaauaggauacagaaauagaauaggaua

SEQ ID NO: 413329 - RNA, 32 nt, Homo Sapiens
cuggguucaggugauucuccugucccagccuu

SEQ ID NO: 413330 - RNA, 32 nt, Homo Sapiens
caacaaugucuuaaaugugaaaauggaaacaa

SEQ ID NO: 413331 - RNA, 32 nt, Homo Sapiens
ugaucauuuauaucuauauacauauauauacu

SEQ ID NO: 413332 - RNA, 32 nt, Homo Sapiens
ggaggcgucacccccaucuuguccccccaaga

SEQ ID NO: 413333 - RNA, 32 nt, Homo Sapiens
uuaugaaaaauauaauacaaaacucuuugacc

SEQ ID NO: 413334 - RNA, 32 nt, Homo Sapiens
cgcucagucuggcggcggcugccgugagcuga

SEQ ID NO: 413335 - RNA, 32 nt, Homo Sapiens
gauguguuuggccuuaccaaagcaaaagaggg

SEQ ID NO: 413336 - RNA, 32 nt, Homo Sapiens
cuccuggauaaacuuuucuuuuuucccugagu

SEQ ID NO: 413337 - RNA, 32 nt, Homo Sapiens
ucuuucgcuuggcaggaugaugcugucauuag

SEQ ID NO: 413338 - RNA, 32 nt, Homo Sapiens
uggcggugcugcuggugacgcugguggccgcc

SEQ ID NO: 413339 - RNA, 32 nt, Homo Sapiens
guuggagcucccggggcgcccgggacgagcuu

SEQ ID NO: 413340 - RNA, 32 nt, Homo Sapiens
aucucaguuauaaucuaaauuaccacaaguua

SEQ ID NO: 413341 - RNA, 32 nt, Homo Sapiens
uguuaacccgugaggaggcggcggcggcggca

SEQ ID NO: 413342 - RNA, 32 nt, Homo Sapiens
acggguuguguccgccauguuggugaagucaa

SEQ ID NO: 413343 - RNA, 32 nt, Homo Sapiens
aagugccuucagggcuggccucggccucgagu

SEQ ID NO: 413344 - RNA, 32 nt, Homo Sapiens
ggaagucccgccucucucuccucaggcagcag

SEQ ID NO: 413345 - RNA, 32 nt, Homo Sapiens
aacccaccucuugugcuccccaucccgccucc

SEQ ID NO: 413346 - RNA, 32 nt, Homo Sapiens
uuuaauuuuuuuucuuuuuuuuucuuuuucuu

SEQ ID NO: 413347 - RNA, 32 nt, Homo Sapiens
ugucuguuguacauagaguucagcuuguuuuu

SEQ ID NO: 413348 - RNA, 32 nt, Homo Sapiens
ucuccuggccuggccugaccgggcuuccuguc

SEQ ID NO: 413349 - RNA, 32 nt, Homo Sapiens
ggagaaccagcuggccgagauccgcugcgacc

SEQ ID NO: 413350 - RNA, 32 nt, Homo Sapiens
auggaagccaaaguauucauauuucuuaagau

SEQ ID NO: 413351 - RNA, 32 nt, Homo Sapiens
gucuagaaagaauuguuuuaaauugcuuuuuu

SEQ ID NO: 413352 - RNA, 32 nt, Homo Sapiens
uuauacuaugccuauuugaaaaugauauuagu

SEQ ID NO: 413353 - RNA, 32 nt, Homo Sapiens
aucucugcuaguaauuaugaauuuaagaccau

SEQ ID NO: 413354 - RNA, 32 nt, Homo Sapiens
uacuugucugguuuuuguuuguuuuuauuuug

SEQ ID NO: 413355 - RNA, 32 nt, Homo Sapiens
ccacagcccucccagguaccuagcagaggcug

SEQ ID NO: 413356 - RNA, 32 nt, Homo Sapiens
uuaaagagauuauugaaacaauguaaaugagc

SEQ ID NO: 413357 - RNA, 32 nt, Homo Sapiens
augucacccacccaccgcaggcuggccgggcc

SEQ ID NO: 413358 - RNA, 32 nt, Homo Sapiens
aagcggcugcacuuccgguccccgcccggaga

SEQ ID NO: 413359 - RNA, 32 nt, Homo Sapiens
auuuaaaaagucaacacuuagauuaaauuuag

SEQ ID NO: 413360 - RNA, 32 nt, Homo Sapiens
uuaaaacaaaaauuaggagguuguaugauaua

SEQ ID NO: 413361 - RNA, 32 nt, Homo Sapiens
gccgagaaggggagggggcgccgccgccgcug

SEQ ID NO: 413362 - RNA, 32 nt, Homo Sapiens
cugcaaaccagcgcuuccugagacggggccag

SEQ ID NO: 413363 - RNA, 32 nt, Homo Sapiens
gcggguaggaggagcccgagccguaagggaag

SEQ ID NO: 413364 - RNA, 32 nt, Homo Sapiens
gggcugaguaaauaaacauguucugucauaaa

SEQ ID NO: 413365 - RNA, 32 nt, Homo Sapiens
guccuaacuaaauuucucaacuguuaugaauu

SEQ ID NO: 413366 - RNA, 32 nt, Homo Sapiens
ucuuccuuucuccgccaucgugguguguucuu

SEQ ID NO: 413367 - RNA, 32 nt, Homo Sapiens
ccauuagagcaacuuucuggggccuaauaaaa

SEQ ID NO: 413368 - RNA, 32 nt, Homo Sapiens
ccuccuuuaucccagcagcagcgucuccuuca

SEQ ID NO: 413369 - RNA, 32 nt, Homo Sapiens
auugugcauuguaucuggauagcaugccuaau

SEQ ID NO: 413370 - RNA, 32 nt, Homo Sapiens
cuucucugcauuuguuacaucaucucuucauc

SEQ ID NO: 413371 - RNA, 32 nt, Homo Sapiens
aaaucuucacuuucuuaagcaacaauggauau

SEQ ID NO: 413372 - RNA, 32 nt, Homo Sapiens
gguuugaaagauuaugaugcauacaguuuucu

SEQ ID NO: 413373 - RNA, 32 nt, Homo Sapiens
cccgggccuuugcggcagcuacuggcagggcc

SEQ ID NO: 413374 - RNA, 32 nt, Homo Sapiens
gccaggccuggaagcgcuggugcacgcagauc

SEQ ID NO: 413375 - RNA, 32 nt, Homo Sapiens
uauacaacaagaaagcacauugaaaauaauuu

SEQ ID NO: 413376 - RNA, 32 nt, Homo Sapiens
uugccuuuucuuuuaaaguucuccagauggag

SEQ ID NO: 413377 - RNA, 32 nt, Homo Sapiens
ugauaggcauauuuuguauuucguguugcacu

SEQ ID NO: 413378 - RNA, 32 nt, Homo Sapiens
agcugggcugccugggugagaugcuggggccu

SEQ ID NO: 413379 - RNA, 32 nt, Homo Sapiens
aaagaucuucuuccaagaaaugcaaacagacc

SEQ ID NO: 413380 - RNA, 32 nt, Homo Sapiens
cggcugcagcgaaucgguggcgcgcggcgccu

SEQ ID NO: 413381 - RNA, 32 nt, Homo Sapiens
ggagacgcgggaaugcagggagcuugcaaagg

SEQ ID NO: 413382 - RNA, 32 nt, Homo Sapiens
accagaaauuagaagaggcaagaaacaacucc

SEQ ID NO: 413383 - RNA, 32 nt, Homo Sapiens
auaaaauuuuucagugcuguccuuccacauuu

SEQ ID NO: 413384 - RNA, 32 nt, Homo Sapiens
accguuauccgcgccgggcgcccgccagaccc

SEQ ID NO: 413385 - RNA, 32 nt, Homo Sapiens
uaagguuacaguuauguuaccgaaacacaaaa

SEQ ID NO: 413386 - RNA, 32 nt, Homo Sapiens
ucugaccauuugcucccuuccauucuugaaac

SEQ ID NO: 413387 - RNA, 32 nt, Homo Sapiens
aguacuagagauauuuuguaaaauguauuaug

SEQ ID NO: 413388 - RNA, 32 nt, Homo Sapiens
cuccgccucgguuucccaacucugcgccgucg

SEQ ID NO: 413389 - RNA, 31 nt, Homo Sapiens
cggacugauuugacugauucuuaaaauaaua

SEQ ID NO: 413390 - RNA, 32 nt, Homo Sapiens
uuguauuuauguugauuuacuaaauuggguuc

SEQ ID NO: 413391 - RNA, 32 nt, Homo Sapiens
cccuggccgaucagauccuggcugggaaugcg

SEQ ID NO: 413392 - RNA, 32 nt, Homo Sapiens
cagggcuggccugaagcccccggacggcagug

SEQ ID NO: 413393 - RNA, 32 nt, Homo Sapiens
aauuucuuaugcaguaaaauuacuacacaaac

SEQ ID NO: 413394 - RNA, 32 nt, Homo Sapiens
gcguccaaggucggggauggagaggacgcgag

SEQ ID NO: 413395 - RNA, 32 nt, Homo Sapiens
uuuucccuuaaacuucuuucugucaaauuaga

SEQ ID NO: 413396 - RNA, 32 nt, Homo Sapiens
ucagggccaugcugaggccugggccgcugcca

SEQ ID NO: 413397 - RNA, 32 nt, Homo Sapiens
cacuggcacugccugccuugggacccgcuucc

SEQ ID NO: 413398 - RNA, 32 nt, Homo Sapiens
cucagagcauagagacccucuccuugccaccc

SEQ ID NO: 413399 - RNA, 32 nt, Homo Sapiens
ccucccccgcccgccuggccuguccugagugc

SEQ ID NO: 413400 - RNA, 32 nt, Homo Sapiens
uauuuuguucauaacugaucuaaucuuucuca

SEQ ID NO: 413401 - RNA, 32 nt, Homo Sapiens
caucccagguuccucgcccaccuacccccgcc

SEQ ID NO: 413402 - RNA, 32 nt, Homo Sapiens
cugucucccagcaaucgcaucccggcugaccc

SEQ ID NO: 413403 - RNA, 32 nt, Homo Sapiens
ccucauaggggagguugugaggccaccaucac

SEQ ID NO: 413404 - RNA, 32 nt, Homo Sapiens
gaucucggcucacuccaccuccaccucccagg

SEQ ID NO: 413405 - RNA, 32 nt, Homo Sapiens
uacaagugccugacccucacuccaguuggcgg

SEQ ID NO: 413406 - RNA, 32 nt, Homo Sapiens
gaggguguguggcuccggggcccuggggaccg

SEQ ID NO: 413407 - RNA, 32 nt, Homo Sapiens
ugugccauuuaaaaacugaaaauauuuuaaaa

SEQ ID NO: 413408 - RNA, 32 nt, Homo Sapiens
cugccaccuuggccugcuccucugggccaccu

SEQ ID NO: 413409 - RNA, 31 nt, Homo Sapiens
uucagaaaauaaaagcagggauaacacuucc

SEQ ID NO: 413410 - RNA, 32 nt, Homo Sapiens
acuagugcauauauuuuaccgaggauucauaa

SEQ ID NO: 413411 - RNA, 32 nt, Homo Sapiens
ggagcucguuuucuuuuccucuaggcagagaa

SEQ ID NO: 413412 - RNA, 32 nt, Homo Sapiens
uuuaguuccuuauucucauuuaucuuuuauau

SEQ ID NO: 413413 - RNA, 32 nt, Homo Sapiens
aaaaaguucagcaauccauuauuaaugucugu

SEQ ID NO: 413414 - RNA, 32 nt, Homo Sapiens
agaaagggcaacaauaaaauagcaauccuaaa

SEQ ID NO: 413415 - RNA, 32 nt, Homo Sapiens
uuuccuuggggaugaggguugggugcuauggc

SEQ ID NO: 413416 - RNA, 32 nt, Homo Sapiens
gugaagccugggugaugaggcugcuggaagcu

SEQ ID NO: 413417 - RNA, 32 nt, Homo Sapiens
uguaagguuugugacaaggauuucggguguga

SEQ ID NO: 413418 - RNA, 32 nt, Homo Sapiens
uucagacaagcaauuacccaguuuccuuaucu

SEQ ID NO: 413419 - RNA, 32 nt, Homo Sapiens
auuaaccacagacuguccucuccaccuuuagc

SEQ ID NO: 413420 - RNA, 32 nt, Homo Sapiens
aagucuuucuuacacacucuauccucugcacu

SEQ ID NO: 413421 - RNA, 32 nt, Homo Sapiens
augcaugaggcgggcugcaggccuccuuaggc

SEQ ID NO: 413422 - RNA, 32 nt, Homo Sapiens
ccgcuccuuauccccuggcccuggccuugcag

SEQ ID NO: 413423 - RNA, 32 nt, Homo Sapiens
auuauguguuaagaaaauaccauucauagcau

SEQ ID NO: 413424 - RNA, 32 nt, Homo Sapiens
caagcaugaagaugagaucaggcauggggaag

SEQ ID NO: 413425 - RNA, 32 nt, Homo Sapiens
gugcucccaucgccuggggccuccucacuagg

SEQ ID NO: 413426 - RNA, 32 nt, Homo Sapiens
gagcccugcucgggagcugguccccaacgagg

SEQ ID NO: 413427 - RNA, 32 nt, Homo Sapiens
cuucagaugggaagaagucagaggaaccagaa

SEQ ID NO: 413428 - RNA, 32 nt, Homo Sapiens
ccgccgcggcgcugucgccggagagggagggc

SEQ ID NO: 413429 - RNA, 32 nt, Homo Sapiens
aaauauuugaugaaauucuacugcagguguuu

SEQ ID NO: 413430 - RNA, 32 nt, Homo Sapiens
cccgcaaccucgcgccucccgucccgucgccg

SEQ ID NO: 413431 - RNA, 32 nt, Homo Sapiens
cauuaaugagugcaaaauaacacauaaaauga

SEQ ID NO: 413432 - RNA, 32 nt, Homo Sapiens
ggccucucccacaccccagccauccacacauc

SEQ ID NO: 413433 - RNA, 31 nt, Homo Sapiens
uuaugaagagguuacaacugaguuagaagaa

SEQ ID NO: 413434 - RNA, 32 nt, Homo Sapiens
augcuugucuuacuccuugcugggcacauaua

SEQ ID NO: 413435 - RNA, 32 nt, Homo Sapiens
ccguuagauacacuuggcuaccuaguuggugc

SEQ ID NO: 413436 - RNA, 32 nt, Homo Sapiens
uggguccccgagcccccuccccuggcccagcc

SEQ ID NO: 413437 - RNA, 32 nt, Homo Sapiens
ugugaaauaaaccagcccauuuuauagaauua

SEQ ID NO: 413438 - RNA, 31 nt, Homo Sapiens
aggcuggacuuggaggcauagauuagaagac

SEQ ID NO: 413439 - RNA, 32 nt, Homo Sapiens
auuuugcuaugucucugagcugcgagauaauc

SEQ ID NO: 413440 - RNA, 32 nt, Homo Sapiens
uugcucugucuccucaguuaaguguuuccuuc

SEQ ID NO: 413441 - RNA, 32 nt, Homo Sapiens
cgcaggcuucgggaggcgagggggcgggggga

SEQ ID NO: 413442 - RNA, 32 nt, Homo Sapiens
guaucauaugugcuuuuucuguauccugagcg

SEQ ID NO: 413443 - RNA, 32 nt, Homo Sapiens
caaacucagacacguggacagggauagacaga

SEQ ID NO: 413444 - RNA, 32 nt, Homo Sapiens
cguuguggcaguggcggcgcuccgaggccgcc

SEQ ID NO: 413445 - RNA, 32 nt, Homo Sapiens
uagacaccaaaauagcuguuuugaaacuguuu

SEQ ID NO: 413446 - RNA, 32 nt, Homo Sapiens
gcugcagagggagaggacaacagcuccaguaa

SEQ ID NO: 413447 - RNA, 32 nt, Homo Sapiens
gcaggccugugcucacaguggcaccagcaacc

SEQ ID NO: 413448 - RNA, 32 nt, Homo Sapiens
ugauucaagauacugaaaaauagagcugggac

SEQ ID NO: 413449 - RNA, 32 nt, Homo Sapiens
gcuuguacuaccccaaacauuaacccugagcu

SEQ ID NO: 413450 - RNA, 32 nt, Homo Sapiens
gcagacugaccaucucccagaccgccagugac

SEQ ID NO: 413451 - RNA, 32 nt, Homo Sapiens
gugaagaggucauaacgaaagcaagcgaguga

SEQ ID NO: 413452 - RNA, 32 nt, Homo Sapiens
guggggggcguggaaggcgggaggggcugaca

SEQ ID NO: 413453 - RNA, 32 nt, Homo Sapiens
gaagaagaccaaggacagaacagagacuaggu

SEQ ID NO: 413454 - RNA, 32 nt, Homo Sapiens
augaagaaaaauuugaaaaugauaaaagcuaa

SEQ ID NO: 413455 - RNA, 32 nt, Homo Sapiens
aggagcaucugcccuccuccuucucaggaauc

SEQ ID NO: 413456 - RNA, 32 nt, Homo Sapiens
aaaacaaaacaaaaaacuuuuaaugccuucca

SEQ ID NO: 413457 - RNA, 32 nt, Homo Sapiens
uugcccaggcuggccucaaauuccugggcuca

SEQ ID NO: 413458 - RNA, 32 nt, Homo Sapiens
uaauaucaugaauuuaauuugcuuaagauuua

SEQ ID NO: 413459 - RNA, 32 nt, Homo Sapiens
ggcucuacuuuauguagacuuaaauuaaugug

SEQ ID NO: 413460 - RNA, 32 nt, Homo Sapiens
uguuggggagcagcaggcucucccuugcuccc

SEQ ID NO: 413461 - RNA, 32 nt, Homo Sapiens
ugugaggcgcugggugcacguccccagggcuc

SEQ ID NO: 413462 - RNA, 32 nt, Homo Sapiens
ugcugcccacccagagcagcugugaccaaggg

SEQ ID NO: 413463 - RNA, 32 nt, Homo Sapiens
cucacaacuauuuuuguaacuauuucugcaag

SEQ ID NO: 413464 - RNA, 32 nt, Homo Sapiens
ggccucucauaucaugaccagacggcgggucu

SEQ ID NO: 413465 - RNA, 32 nt, Homo Sapiens
uuugugagggcaaggcuugggaggcggggccc

SEQ ID NO: 413466 - RNA, 32 nt, Homo Sapiens
uggaugaccucuacucggggucgggcucgggc

SEQ ID NO: 413467 - RNA, 32 nt, Homo Sapiens
aauagggcugaauaaauguguuugaaucucua

SEQ ID NO: 413468 - RNA, 32 nt, Homo Sapiens
cuccacacggcagcuuuggccuugaccaggag

SEQ ID NO: 413469 - RNA, 32 nt, Homo Sapiens
cuucugaccucagugauccccccgccucggcc

SEQ ID NO: 413470 - RNA, 32 nt, Homo Sapiens
ugcgggcggcggcggcguacccggcccgagac

SEQ ID NO: 413471 - RNA, 32 nt, Homo Sapiens
gaaaauggauagacaaacuacaauauagucag

SEQ ID NO: 413472 - RNA, 32 nt, Homo Sapiens
ugagaugaccgggaaccgggcugggggaggau

SEQ ID NO: 413473 - RNA, 32 nt, Homo Sapiens
acaucuuuuuuggaacggggucucucuacaua

SEQ ID NO: 413474 - RNA, 32 nt, Homo Sapiens
ccagcugagcccuugugugagccccgccccuc

SEQ ID NO: 413475 - RNA, 32 nt, Homo Sapiens
uggacagcaggcguugcucuggcacgccgccc

SEQ ID NO: 413476 - RNA, 32 nt, Homo Sapiens
uugcccaggcuggucucaaauuccugggccca

SEQ ID NO: 413477 - RNA, 32 nt, Homo Sapiens
accaugucuaggcccggcagccccacauuuac

SEQ ID NO: 413478 - RNA, 32 nt, Homo Sapiens
ccacgcguccgcgcuccccucagcuccugcag

SEQ ID NO: 413479 - RNA, 32 nt, Homo Sapiens
cuugguccacacauaaaauacaugaacacuaa

SEQ ID NO: 413480 - RNA, 32 nt, Homo Sapiens
uacuuuccaaaauaacuugacauagauguauu

SEQ ID NO: 413481 - RNA, 32 nt, Homo Sapiens
aaaguaaauauguauaaaauuugaaggaaucg

SEQ ID NO: 413482 - RNA, 32 nt, Homo Sapiens
accucgguuugugcgugcauaugugccgggua

SEQ ID NO: 413483 - RNA, 32 nt, Homo Sapiens
cccuagggcauugcucuccuauucccacgccu

SEQ ID NO: 413484 - RNA, 32 nt, Homo Sapiens
aaaaaauaugauauacacacacauuauauaua

SEQ ID NO: 413485 - RNA, 32 nt, Homo Sapiens
cagugucaggauggaccgcgcugccagaagcc

SEQ ID NO: 413486 - RNA, 30 nt, Homo Sapiens
gggguguggggcgguguggcgggcgcacac

SEQ ID NO: 413487 - RNA, 32 nt, Homo Sapiens
ccccuaauccgccccguccugcccggaggguc

SEQ ID NO: 413488 - RNA, 32 nt, Homo Sapiens
cccccuccugucauucuuuccucuaccugagc

SEQ ID NO: 413489 - RNA, 32 nt, Homo Sapiens
cuugggccacggcggcggcccugggagcagag

SEQ ID NO: 413490 - RNA, 32 nt, Homo Sapiens
ugguaucugaugcaggaaggacugcaguggau

SEQ ID NO: 413491 - RNA, 32 nt, Homo Sapiens
uauaugcauacguaaaaagggaccacagugac

SEQ ID NO: 413492 - RNA, 32 nt, Homo Sapiens
uggccacuuaggagagcugaauuuauggaccu

SEQ ID NO: 413493 - RNA, 32 nt, Homo Sapiens
gcugucuguguccucggagccccgcccugaca

SEQ ID NO: 413494 - RNA, 32 nt, Homo Sapiens
guggcucauuuucuuuugcacaagggcaugac

SEQ ID NO: 413495 - RNA, 32 nt, Homo Sapiens
cuaaugacaaugagacaaauaguuacuucuuu

SEQ ID NO: 413496 - RNA, 32 nt, Homo Sapiens
gauuuuggaaguuaaaucaugucuguuauuug

SEQ ID NO: 413497 - RNA, 32 nt, Homo Sapiens
uaguguaaauguucaaauacuguuauaauuau

SEQ ID NO: 413498 - RNA, 32 nt, Homo Sapiens
uauacuauagccacaauucugucaaagauaag

SEQ ID NO: 413499 - RNA, 32 nt, Homo Sapiens
auuuuuggcgcuuucgauccacccuccucccu

SEQ ID NO: 413500 - RNA, 32 nt, Homo Sapiens
gccauguauuccagaaaggccauguacaagag

SEQ ID NO: 413501 - RNA, 32 nt, Homo Sapiens
guuauggggcacccugggggccccgagucugc

SEQ ID NO: 413502 - RNA, 32 nt, Homo Sapiens
uccacaccuuggcaucaguugcauaaaugcua

SEQ ID NO: 413503 - RNA, 32 nt, Homo Sapiens
guuaguugcacauuucaugacucuuuaaggag

SEQ ID NO: 413504 - RNA, 32 nt, Homo Sapiens
ugaccuucugaacaugagugucaacuccagga

SEQ ID NO: 413505 - RNA, 32 nt, Homo Sapiens
cuuagggagacaaagaauuucucuuagaaaag

SEQ ID NO: 413506 - RNA, 32 nt, Homo Sapiens
ccuuuugacaccugcuugaccaggauuuggau

SEQ ID NO: 413507 - RNA, 32 nt, Homo Sapiens
cuguuacagguggucaagacguccggccgccu

SEQ ID NO: 413508 - RNA, 32 nt, Homo Sapiens
gucagagacuaugugguccaucgccuucauug

SEQ ID NO: 413509 - RNA, 32 nt, Homo Sapiens
ugcugugugcugcaauuguccaggcgaugaca

SEQ ID NO: 413510 - RNA, 32 nt, Homo Sapiens
cucaccaaacuccgcgcccuugcgcuagcggu

SEQ ID NO: 413511 - RNA, 32 nt, Homo Sapiens
ugcuugagaucuguuucuggggccucuggcgg

SEQ ID NO: 413512 - RNA, 32 nt, Homo Sapiens
gagacaggcguggaaggugcaggggugugugu

SEQ ID NO: 413513 - RNA, 32 nt, Homo Sapiens
gcuuugcagggaagagggcccccugugcacgc

SEQ ID NO: 413514 - RNA, 32 nt, Homo Sapiens
ucaagacccucgagauuaacggugcuaacccc

SEQ ID NO: 413515 - RNA, 32 nt, Homo Sapiens
aaaauaagauuuaguuguguuuucucagagcc

SEQ ID NO: 413516 - RNA, 32 nt, Homo Sapiens
gccaguucuaagucagagacaaaauuccacug

SEQ ID NO: 413517 - RNA, 32 nt, Homo Sapiens
aaggagcagggccugcugcuucccuggcgcug

SEQ ID NO: 413518 - RNA, 32 nt, Homo Sapiens
cucauguguuuguugguaaaacacuugucacu

SEQ ID NO: 413519 - RNA, 32 nt, Homo Sapiens
cuggcaaaaaggagccuugugcucucugugac

SEQ ID NO: 413520 - RNA, 32 nt, Homo Sapiens
acucaggaaacgggagacccagaaguucugcc

SEQ ID NO: 413521 - RNA, 32 nt, Homo Sapiens
guggguuaaagcaaagagcccuugggaccuga

SEQ ID NO: 413522 - RNA, 32 nt, Homo Sapiens
uuugcaccaaaauaaacuagugcuagucuguu

SEQ ID NO: 413523 - RNA, 32 nt, Homo Sapiens
gcucaggacccacuaccuccccggcccacugc

SEQ ID NO: 413524 - RNA, 32 nt, Homo Sapiens
aagugcccagugcaauuucucuuaaacagaug

SEQ ID NO: 413525 - RNA, 32 nt, Homo Sapiens
cuggaaguggagguggcugugugcugcgaugg

SEQ ID NO: 413526 - RNA, 32 nt, Homo Sapiens
uuuucuaaaguauggcucugaauagaaugcac

SEQ ID NO: 413527 - RNA, 32 nt, Homo Sapiens
gaguggguuguggcgccuccucucucugugug

SEQ ID NO: 413528 - RNA, 32 nt, Homo Sapiens
gcaccaaagaaccuguaaaaguuaucuuuuuc

SEQ ID NO: 413529 - RNA, 32 nt, Homo Sapiens
gaacauauuaagcauuugauaaauaauagcug

SEQ ID NO: 413530 - RNA, 28 nt, Homo Sapiens
uuaauacaucgcaucuuauuuauuuuag

SEQ ID NO: 413531 - RNA, 32 nt, Homo Sapiens
ugaccuuuauuuucuauuuuugugcuuuuuug

SEQ ID NO: 413532 - RNA, 32 nt, Homo Sapiens
gccaagccccagagccacggacuccagaauga

SEQ ID NO: 413533 - RNA, 32 nt, Homo Sapiens
caaagcaacaaguccuaggagcacacaaagca

SEQ ID NO: 413534 - RNA, 32 nt, Homo Sapiens
ggagggcccugcugcuggcuguccuggccugc

SEQ ID NO: 413535 - RNA, 32 nt, Homo Sapiens
cccccagccucccgaggcccagcccuugccuc

SEQ ID NO: 413536 - RNA, 32 nt, Homo Sapiens
gcuauuucugaaaauaaauuuauuuuguugaa

SEQ ID NO: 413537 - RNA, 32 nt, Homo Sapiens
uaccgggacgcccccgcccaccugcggcgggc

SEQ ID NO: 413538 - RNA, 32 nt, Homo Sapiens
uuaaggccacagugugugauaaauucuucauu

SEQ ID NO: 413539 - RNA, 32 nt, Homo Sapiens
cguuugagugccagcucugugccgggugccau

SEQ ID NO: 413540 - RNA, 32 nt, Homo Sapiens
uucgaauguauaauacuuccacagcaacaggu

SEQ ID NO: 413541 - RNA, 32 nt, Homo Sapiens
cauccuuugucuuggaaccaccagucuagucc

SEQ ID NO: 413542 - RNA, 32 nt, Homo Sapiens
ugccccaguaaauggaaauguuuucuaacaua

SEQ ID NO: 413543 - RNA, 31 nt, Homo Sapiens
ucugguuuucuuugaccucaagauugacaau

SEQ ID NO: 413544 - RNA, 32 nt, Homo Sapiens
ucugugcccccggcccggccaccgacggccgc

SEQ ID NO: 413545 - RNA, 32 nt, Homo Sapiens
ucugaaucaaagguuuuguaaaacuuuugaaa

SEQ ID NO: 413546 - RNA, 32 nt, Homo Sapiens
aggacuguuuuaaaugauuugggaacuuuugg

SEQ ID NO: 413547 - RNA, 32 nt, Homo Sapiens
acucugaugaagaugacgauuauugacuacaa

SEQ ID NO: 413548 - RNA, 32 nt, Homo Sapiens
ugucuuuuuacauuuuacucugucccaguuug

SEQ ID NO: 413549 - RNA, 32 nt, Homo Sapiens
gggccccccgguuugccucccuagagccugac

SEQ ID NO: 413550 - RNA, 32 nt, Homo Sapiens
cuguuccuucccccuuuccccuccauaaugua

SEQ ID NO: 413551 - RNA, 32 nt, Homo Sapiens
caguggugccacauguggcagcuccuguggaa

SEQ ID NO: 413552 - RNA, 32 nt, Homo Sapiens
cguccagcaugcucugcccaccccacgccgag

SEQ ID NO: 413553 - RNA, 32 nt, Homo Sapiens
guuccccuggcauuggccccagccuucugaaa

SEQ ID NO: 413554 - RNA, 32 nt, Homo Sapiens
cacuauuuguugcacugugccuugaagggcag

SEQ ID NO: 413555 - RNA, 32 nt, Homo Sapiens
aguauacuugaaaggagccuuuuuacgguuca

SEQ ID NO: 413556 - RNA, 32 nt, Homo Sapiens
guguggcagggccugcuggcccucaagaauga

SEQ ID NO: 413557 - RNA, 32 nt, Homo Sapiens
cccccagagcuggaagagggagggauccuccc

SEQ ID NO: 413558 - RNA, 32 nt, Homo Sapiens
aggaggauccugaggacccccugguugcagcc

SEQ ID NO: 413559 - RNA, 32 nt, Homo Sapiens
ggggggugggguauccugagucguccgugguc

SEQ ID NO: 413560 - RNA, 32 nt, Homo Sapiens
agugaggcauccacaaaguaaacguuucaaga

SEQ ID NO: 413561 - RNA, 32 nt, Homo Sapiens
uuaguucuuacaagauaaugucuuaauuuugu

SEQ ID NO: 413562 - RNA, 32 nt, Homo Sapiens
cccgaggcccuagacccccaccccccgccagu

SEQ ID NO: 413563 - RNA, 32 nt, Homo Sapiens
uacaggaguccuccuuucugagcuccagcccc

SEQ ID NO: 413564 - RNA, 32 nt, Homo Sapiens
aucucagcgcccugccgccgccgccgcggccc

SEQ ID NO: 413565 - RNA, 32 nt, Homo Sapiens
cguuccuccuucugccuccccggagccacagg

SEQ ID NO: 413566 - RNA, 32 nt, Homo Sapiens
ucucccggcuggcaauguggugaagcugaguu

SEQ ID NO: 413567 - RNA, 32 nt, Homo Sapiens
aaaucuuguaggagcucuguuagcucuaaaau

SEQ ID NO: 413568 - RNA, 32 nt, Homo Sapiens
ucggaggccuccuggggaugggggcugcagcu

SEQ ID NO: 413569 - RNA, 32 nt, Homo Sapiens
aagcgggcacgugaccccggucagccaaucug

SEQ ID NO: 413570 - RNA, 32 nt, Homo Sapiens
aauucggggucaaggcgaagcucgcggggggc

SEQ ID NO: 413571 - RNA, 32 nt, Homo Sapiens
uaaugaaaaaaguugcagugaauuacaggaag

SEQ ID NO: 413572 - RNA, 32 nt, Homo Sapiens
uauuaacauggccauuauaagaauaaaauaug

SEQ ID NO: 413573 - RNA, 32 nt, Homo Sapiens
acacaucaaaauaaauaauggcguuuguugua

SEQ ID NO: 413574 - RNA, 32 nt, Homo Sapiens
ggugggguuuguggguaguggugaaggaccga

SEQ ID NO: 413575 - RNA, 32 nt, Homo Sapiens
ucaccugauaaggagucguggcugcuuggaca

SEQ ID NO: 413576 - RNA, 32 nt, Homo Sapiens
cuuaacaugagggcuacaugugcaucaacaua

SEQ ID NO: 413577 - RNA, 32 nt, Homo Sapiens
uuguuuucauucaacuaacaaacauauuccaa

SEQ ID NO: 413578 - RNA, 32 nt, Homo Sapiens
cugguuuuuguuuguuuuuauuuuggaaugcu

SEQ ID NO: 413579 - RNA, 32 nt, Homo Sapiens
agaaagccuaccugcuggcccgggagcguucg

SEQ ID NO: 413580 - RNA, 32 nt, Homo Sapiens
ggggauauuuuuccuuccuuaaguaguuuuac

SEQ ID NO: 413581 - RNA, 32 nt, Homo Sapiens
agcucggccuccccgaccugcagccccagacu

SEQ ID NO: 413582 - RNA, 32 nt, Homo Sapiens
ucagccucugguguagcugggaccacagaugc

SEQ ID NO: 413583 - RNA, 32 nt, Homo Sapiens
aggauaugguguucauuuuaugauauuacgca

SEQ ID NO: 413584 - RNA, 32 nt, Homo Sapiens
cuucagcuaaugaguuuuguuaucucaguagg

SEQ ID NO: 413585 - RNA, 32 nt, Homo Sapiens
aagcaauucucaacaaauuacaaaaucaaaaa

SEQ ID NO: 413586 - RNA, 32 nt, Homo Sapiens
agcaaugcuccuuccuucucaggguccacagg

SEQ ID NO: 413587 - RNA, 32 nt, Homo Sapiens
cauggagaaaucagccggcugcaccuguucuc

SEQ ID NO: 413588 - RNA, 32 nt, Homo Sapiens
gucaagccaccuccggaacgugucuacacucc

SEQ ID NO: 413589 - RNA, 32 nt, Homo Sapiens
uggacuagguguucccugguauucugugaucu

SEQ ID NO: 413590 - RNA, 32 nt, Homo Sapiens
gcuauuuuguaaaaauaaacuacaaaagccug

SEQ ID NO: 413591 - RNA, 32 nt, Homo Sapiens
caguauaugacuucucuuucuccgugguuagu

SEQ ID NO: 413592 - RNA, 32 nt, Homo Sapiens
agucucuuuaguaccacaucuaccauagugua

SEQ ID NO: 413593 - RNA, 32 nt, Homo Sapiens
uauuguaguuuaaugauugaauguagacaggg

SEQ ID NO: 413594 - RNA, 28 nt, Homo Sapiens
gggcagcaguguccgccgaggagagggu

SEQ ID NO: 413595 - RNA, 32 nt, Homo Sapiens
ucaagaaauuuucaagcccuuggauguaggga

SEQ ID NO: 413596 - RNA, 32 nt, Homo Sapiens
gaagacugacuagcugcagaaaguguggccau

SEQ ID NO: 413597 - RNA, 32 nt, Homo Sapiens
aggggcuggguuccggcccaugggccacuauu

SEQ ID NO: 413598 - RNA, 32 nt, Homo Sapiens
gccucuauccuaugcgaggucccuuuaagaac

SEQ ID NO: 413599 - RNA, 32 nt, Homo Sapiens
cagggccugccagcagccuuggagaaaccacg

SEQ ID NO: 413600 - RNA, 32 nt, Homo Sapiens
augcacaggaagauauugguggcuggugguuu

SEQ ID NO: 413601 - RNA, 32 nt, Homo Sapiens
cuuguuuuucuuuucuucuuucaaauaaaugg

SEQ ID NO: 413602 - RNA, 32 nt, Homo Sapiens
gggacuugggggcaucccagagugcucccucc

SEQ ID NO: 413603 - RNA, 32 nt, Homo Sapiens
agccaagauugugccacuguacuccagccagg

SEQ ID NO: 413604 - RNA, 30 nt, Homo Sapiens
aaucuguccuguggcaugcaaaagaaagca

SEQ ID NO: 413605 - RNA, 32 nt, Homo Sapiens
ccacagaaagagaagagccuuaauuuuuaaaa

SEQ ID NO: 413606 - RNA, 32 nt, Homo Sapiens
cagucuuuggaccacuauuuuacuggccuuug

SEQ ID NO: 413607 - RNA, 32 nt, Homo Sapiens
cugucuggugccuggaggugugggagggaaga

SEQ ID NO: 413608 - RNA, 32 nt, Homo Sapiens
uaaacacccacccaaugggagaggcugauacu

SEQ ID NO: 413609 - RNA, 32 nt, Homo Sapiens
gcaguggauuccaugaaaggagucauuuuagu

SEQ ID NO: 413610 - RNA, 32 nt, Homo Sapiens
ggcuccugguggcugugcugcugcugugagcg

SEQ ID NO: 413611 - RNA, 32 nt, Homo Sapiens
cuccagggcagaagucgcggugggcucagugg

SEQ ID NO: 413612 - RNA, 32 nt, Homo Sapiens
gugcacggggagaggcccaggcagcggcggcg

SEQ ID NO: 413613 - RNA, 32 nt, Homo Sapiens
cccuugaagauaaggauggucaaacaaaauaa

SEQ ID NO: 413614 - RNA, 32 nt, Homo Sapiens
agacagaauuguaccuuuagcacauucuggug

SEQ ID NO: 413615 - RNA, 32 nt, Homo Sapiens
ugaauggcuccaccccucccccagcccugcuu

SEQ ID NO: 413616 - RNA, 32 nt, Homo Sapiens
gaugauuucagaaugugaaggcugguuugccu

SEQ ID NO: 413617 - RNA, 32 nt, Homo Sapiens
uuuucuuacuaggauauauaaaacagggacuc

SEQ ID NO: 413618 - RNA, 32 nt, Homo Sapiens
gcucuguccaguccucacccuaagcuaagccc

SEQ ID NO: 413619 - RNA, 32 nt, Homo Sapiens
gagaugaguaacaguucucacugaugacccac

SEQ ID NO: 413620 - RNA, 32 nt, Homo Sapiens
uucggguccguucuccggacaguuaaggggcu

SEQ ID NO: 413621 - RNA, 32 nt, Homo Sapiens
agcagagggauaacccaaacaaaaaugacucu

SEQ ID NO: 413622 - RNA, 32 nt, Homo Sapiens
ucauguuguaaauuuuuggagcaagcagucaa

SEQ ID NO: 413623 - RNA, 32 nt, Homo Sapiens
uggccuuucacuugaggaguacucaguuuuca

SEQ ID NO: 413624 - RNA, 30 nt, Homo Sapiens
gcacgaggcugcggcggguccgggcccaug

SEQ ID NO: 413625 - RNA, 30 nt, Homo Sapiens
ccuugugugguucuugccuaacucuguggu

SEQ ID NO: 413626 - RNA, 32 nt, Homo Sapiens
acccuaaaguuccauuuacuaauaauuuauaa

SEQ ID NO: 413627 - RNA, 32 nt, Homo Sapiens
cugcaccauguccccggaccagcccuugcucu

SEQ ID NO: 413628 - RNA, 32 nt, Homo Sapiens
uucacaauugcuaaugguuguuuucugugagu

SEQ ID NO: 413629 - RNA, 32 nt, Homo Sapiens
agcagcaaagcgucuuaauguucaaaacgccu

SEQ ID NO: 413630 - RNA, 32 nt, Homo Sapiens
ggaaagagggugggcacggggagggcuuggcc

SEQ ID NO: 413631 - RNA, 32 nt, Homo Sapiens
cccgccgugaccccugcagauagcaccgguau

SEQ ID NO: 413632 - RNA, 32 nt, Homo Sapiens
acaggccuggacuaaauugauuuuacguuccu

SEQ ID NO: 413633 - RNA, 32 nt, Homo Sapiens
ccucgggcugaccccaccuccuccauggacag

SEQ ID NO: 413634 - RNA, 32 nt, Homo Sapiens
gggccuuccuucccaggucgccccucagucuc

SEQ ID NO: 413635 - RNA, 32 nt, Homo Sapiens
aagccaaaggauuuaagaguuuuguuguuguu

SEQ ID NO: 413636 - RNA, 32 nt, Homo Sapiens
cuugaauacaaauguuugauaagucuuuuucu

SEQ ID NO: 413637 - RNA, 32 nt, Homo Sapiens
aguagcugggacuacaggccuccaucaccaug

SEQ ID NO: 413638 - RNA, 32 nt, Homo Sapiens
auaacaacuugaacaugaaaugcuaaauuuuc

SEQ ID NO: 413639 - RNA, 32 nt, Homo Sapiens
uuuaggaaugugacggauaagaaugauccccg

SEQ ID NO: 413640 - RNA, 32 nt, Homo Sapiens
caagccagggcugugacaccuucuuuggggcu

SEQ ID NO: 413641 - RNA, 32 nt, Homo Sapiens
uggucccggucucgccccgcagcccucgaucu

SEQ ID NO: 413642 - RNA, 32 nt, Homo Sapiens
gcucauccagaucuuaaugaugccacaacccu

SEQ ID NO: 413643 - RNA, 32 nt, Homo Sapiens
ggccgggugcgguggcucacaccugcaauccc

SEQ ID NO: 413644 - RNA, 29 nt, Homo Sapiens
uggagauguggucugucuauaaaaggccg

SEQ ID NO: 413645 - RNA, 32 nt, Homo Sapiens
uguuguuugcuuuuagaaauuuuuaaaaauac

SEQ ID NO: 413646 - RNA, 32 nt, Homo Sapiens
caagaggucuucugccuuuccuuuccccguga

SEQ ID NO: 413647 - RNA, 32 nt, Homo Sapiens
gcgguucaucuccuucgugccucgaugagcuu

SEQ ID NO: 413648 - RNA, 32 nt, Homo Sapiens
cgaggggacagcgcccucuggagcucgcuggg

SEQ ID NO: 413649 - RNA, 32 nt, Homo Sapiens
ggccaggugugguggcucacgccuguaauccc

SEQ ID NO: 413650 - RNA, 32 nt, Homo Sapiens
aaaggaauugagagauuuuucuuaguaaauag

SEQ ID NO: 413651 - RNA, 32 nt, Homo Sapiens
caucugaucacuggauggauagcucagccugg

SEQ ID NO: 413652 - RNA, 32 nt, Homo Sapiens
uugggccccauccgcccucuggaccuguguag

SEQ ID NO: 413653 - RNA, 32 nt, Homo Sapiens
aagauacccacuuuucaggaugggacaguauc

SEQ ID NO: 413654 - RNA, 32 nt, Homo Sapiens
cagguugugaggaaccgcagcgcccgcaggac

SEQ ID NO: 413655 - RNA, 32 nt, Homo Sapiens
cacaggguugccugggugguguuugaagggua

SEQ ID NO: 413656 - RNA, 32 nt, Homo Sapiens
cugccuggcuagucccugccugaauaaaguaa

SEQ ID NO: 413657 - RNA, 32 nt, Homo Sapiens
guggagucgggguggcagcggcggcgguugcc

SEQ ID NO: 413658 - RNA, 32 nt, Homo Sapiens
aaaggaauuacucacagcugugcugugugcau

SEQ ID NO: 413659 - RNA, 32 nt, Homo Sapiens
uguaaauauauugucuuucucuuaauauuugc

SEQ ID NO: 413660 - RNA, 32 nt, Homo Sapiens
gcucugguaccuggccuuuccuggacagacug

SEQ ID NO: 413661 - RNA, 32 nt, Homo Sapiens
gguuaugugggucaugaauuuauuuuggacac

SEQ ID NO: 413662 - RNA, 32 nt, Homo Sapiens
gcaucgaauuguauacuuuaaauaggugaauu

SEQ ID NO: 413663 - RNA, 32 nt, Homo Sapiens
uccccgcggcccggccgcgccugguccugagc

SEQ ID NO: 413664 - RNA, 32 nt, Homo Sapiens
gcugucuccagggcuaacgugggcagcgcagg

SEQ ID NO: 413665 - RNA, 32 nt, Homo Sapiens
cucgagccccccagcccccuccccgggauccg

SEQ ID NO: 413666 - RNA, 32 nt, Homo Sapiens
uuagaugaguaauuguuauugaagauagucag

SEQ ID NO: 413667 - RNA, 32 nt, Homo Sapiens
caacaggaggucguccugcaccgggacgucag

SEQ ID NO: 413668 - RNA, 32 nt, Homo Sapiens
uaaagggagugcuuugugaucuaguaaagcug

SEQ ID NO: 413669 - RNA, 32 nt, Homo Sapiens
cuuguuugaaaauaaaucuuuauuuugaacuu

SEQ ID NO: 413670 - RNA, 32 nt, Homo Sapiens
aaaauuugcuucaagacuuuggacuugaggcu

SEQ ID NO: 413671 - RNA, 32 nt, Homo Sapiens
caaucugaauuuuuuucuuagccuugagugac

SEQ ID NO: 413672 - RNA, 32 nt, Homo Sapiens
auuauguauaaaauaccauugaaaagauauua

SEQ ID NO: 413673 - RNA, 32 nt, Homo Sapiens
uuggcuuuggguggggggaggggcaggugaca

SEQ ID NO: 413674 - RNA, 32 nt, Homo Sapiens
gaauauuguaagucagccacugggacccgagg

SEQ ID NO: 413675 - RNA, 32 nt, Homo Sapiens
uuuguuaaugaaauaaaaacauggacugagug

SEQ ID NO: 413676 - RNA, 32 nt, Homo Sapiens
ggugaaaggaaauuauuaaacuauauugaaaa

SEQ ID NO: 413677 - RNA, 32 nt, Homo Sapiens
uuuacauuuucuaagggccauuuuuucacaga

SEQ ID NO: 413678 - RNA, 32 nt, Homo Sapiens
gguguggccccauagcgaagucuaaaugccug

SEQ ID NO: 413679 - RNA, 32 nt, Homo Sapiens
ggaagauggguuugauugagguccugguuucc

SEQ ID NO: 413680 - RNA, 32 nt, Homo Sapiens
cucccauggaagugcugucuccagcucacucc

SEQ ID NO: 413681 - RNA, 32 nt, Homo Sapiens
auuuaucucacagaagcaccgggaagacuuag

SEQ ID NO: 413682 - RNA, 32 nt, Homo Sapiens
aaauuauuuuauucuuucuucuucauguauuc

SEQ ID NO: 413683 - RNA, 32 nt, Homo Sapiens
uucacaucauuucugaguuuaaucacuuuagg

SEQ ID NO: 413684 - RNA, 32 nt, Homo Sapiens
cuuggcaaacuuaguucuggugauuucuugau

SEQ ID NO: 413685 - RNA, 32 nt, Homo Sapiens
cugcacaguccucugcccucuguccgucucuu

SEQ ID NO: 413686 - RNA, 32 nt, Homo Sapiens
aaaaacuugaagaucucacagaccuaauagac

SEQ ID NO: 413687 - RNA, 31 nt, Homo Sapiens
acagucagccuggcacagucgcucaugccuc

SEQ ID NO: 413688 - RNA, 32 nt, Homo Sapiens
aauaaaugaaugaauaacuaagauauagaaac

SEQ ID NO: 413689 - RNA, 32 nt, Homo Sapiens
uguuuuacaucauguccugagccuaccuuucc

SEQ ID NO: 413690 - RNA, 32 nt, Homo Sapiens
aaaaaucuacgauuuucuucuacauucauuga

SEQ ID NO: 413691 - RNA, 32 nt, Homo Sapiens
ggguuagcgggugcagacaaauucagcaauag

SEQ ID NO: 413692 - RNA, 32 nt, Homo Sapiens
cccuuacuauccuccuuuuuuguuuucaguau

SEQ ID NO: 413693 - RNA, 32 nt, Homo Sapiens
gagggucacauguuaacacuagagucugucga

SEQ ID NO: 413694 - RNA, 32 nt, Homo Sapiens
ugucccuuagcagagcugacgugcugugcugg

SEQ ID NO: 413695 - RNA, 32 nt, Homo Sapiens
cuggcgcgcugggaccugcacaggccggagag

SEQ ID NO: 413696 - RNA, 32 nt, Homo Sapiens
guuguuugcacaucuuuuuaaauuuuacaccu

SEQ ID NO: 413697 - RNA, 32 nt, Homo Sapiens
ggguucagcucuucacagcuuucggcaucucu

SEQ ID NO: 413698 - RNA, 32 nt, Homo Sapiens
ucaggaagggcagcccggauguuccauguuaa

SEQ ID NO: 413699 - RNA, 32 nt, Homo Sapiens
gcacuuucaaacuuagggacauuauuaaauug

SEQ ID NO: 413700 - RNA, 32 nt, Homo Sapiens
ccgucaucacuauggcaggaaaacagagaugg

SEQ ID NO: 413701 - RNA, 32 nt, Homo Sapiens
ggggaagggucucccuuggccaucacgggaau

SEQ ID NO: 413702 - RNA, 32 nt, Homo Sapiens
guaacgggcugcccggccugcgccgcggaguc

SEQ ID NO: 413703 - RNA, 32 nt, Homo Sapiens
ugggaguguuugucccaucgguagcuugaaau

SEQ ID NO: 413704 - RNA, 32 nt, Homo Sapiens
cccccgagcaguggcccggcaucggcgccuuc

SEQ ID NO: 413705 - RNA, 32 nt, Homo Sapiens
uggcguggagauucuuuuuuauuaauuugagc

SEQ ID NO: 413706 - RNA, 32 nt, Homo Sapiens
ugccggcccggcggcugcugcugcugcugacg

SEQ ID NO: 413707 - RNA, 32 nt, Homo Sapiens
agccgagauugugccacugcacacuccaaucu

SEQ ID NO: 413708 - RNA, 32 nt, Homo Sapiens
aaggcugggcccagaacacauaguccuagggu

SEQ ID NO: 413709 - RNA, 32 nt, Homo Sapiens
uuugaucgaauccuaaucacagugagcucuuc

SEQ ID NO: 413710 - RNA, 32 nt, Homo Sapiens
cagcgggcgccaagaccccggccugggccagc

SEQ ID NO: 413711 - RNA, 32 nt, Homo Sapiens
cucucggccggagcuuccugugcccugugccc

SEQ ID NO: 413712 - RNA, 32 nt, Homo Sapiens
auuucacuggcuucccaaaugugugcccagcu

SEQ ID NO: 413713 - RNA, 32 nt, Homo Sapiens
gccaccacuauaaaaugucuucaaggcuucag

SEQ ID NO: 413714 - RNA, 32 nt, Homo Sapiens
aaagccagugcuaaucuaucagagacuguaac

SEQ ID NO: 413715 - RNA, 32 nt, Homo Sapiens
ugucugccuuccccaaaccaaucugugguuuu

SEQ ID NO: 413716 - RNA, 32 nt, Homo Sapiens
ccuggucgguuacgaugugcgccaggcgcugc

SEQ ID NO: 413717 - RNA, 32 nt, Homo Sapiens
cccuguuguccuccucucuccuccaccgggac

SEQ ID NO: 413718 - RNA, 32 nt, Homo Sapiens
aaaugguguuggguuuggucuccagcuccaau

SEQ ID NO: 413719 - RNA, 32 nt, Homo Sapiens
gccacugcacuccagccugggcgacagagcag

SEQ ID NO: 413720 - RNA, 32 nt, Homo Sapiens
uuaauccuuuaaaauuguggucuccagagcuu

SEQ ID NO: 413721 - RNA, 32 nt, Homo Sapiens
aaccuauaaauaacccuuucaauauaccuggu

SEQ ID NO: 413722 - RNA, 32 nt, Homo Sapiens
aauguuacuguaacuuggguauuauguuaaau

SEQ ID NO: 413723 - RNA, 32 nt, Homo Sapiens
acuauaaauaccauuuugagugagaaaguacu

SEQ ID NO: 413724 - RNA, 30 nt, Homo Sapiens
acugggcgugguggcaugcaccuguagucc

SEQ ID NO: 413725 - RNA, 32 nt, Homo Sapiens
acauauugccagcacggcagaggagguggcau

SEQ ID NO: 413726 - RNA, 32 nt, Homo Sapiens
aaaagcagauguagacccccucccucggaucc

SEQ ID NO: 413727 - RNA, 32 nt, Homo Sapiens
aagggcugcauuccaugaugcuaucagugccu

SEQ ID NO: 413728 - RNA, 32 nt, Homo Sapiens
uuugcugcuuuggcaagaacuacauuuuguuu

SEQ ID NO: 413729 - RNA, 32 nt, Homo Sapiens
gugaggaagagaaaagcagagauaagcaaggc

SEQ ID NO: 413730 - RNA, 32 nt, Homo Sapiens
caagagcgcucgcccccggccuccggccacuu

SEQ ID NO: 413731 - RNA, 32 nt, Homo Sapiens
gcugcuuucuaaaauauuaauugccuuauauu

SEQ ID NO: 413732 - RNA, 32 nt, Homo Sapiens
uugggagcagagcuaaguggcuucccauuaac

SEQ ID NO: 413733 - RNA, 32 nt, Homo Sapiens
ccacuaaaauauggacuaauuuuuuggacaaa

SEQ ID NO: 413734 - RNA, 32 nt, Homo Sapiens
ggcuggggaagggguuggagggggcuguugau

SEQ ID NO: 413735 - RNA, 32 nt, Homo Sapiens
uuccauucucaguuuccuuguuucuuuugauu

SEQ ID NO: 413736 - RNA, 32 nt, Homo Sapiens
gguuuugagaaaguacagcaguagacuggggc

SEQ ID NO: 413737 - RNA, 32 nt, Homo Sapiens
caguggugcaaucacagcucacagcaacuuca

SEQ ID NO: 413738 - RNA, 32 nt, Homo Sapiens
acgcugagaugggggcggcggcggcggaagcg

SEQ ID NO: 413739 - RNA, 32 nt, Homo Sapiens
guggucguaccaggauaggagcugaaagggcc

SEQ ID NO: 413740 - RNA, 32 nt, Homo Sapiens
gagggcaccuccuuuucugugcuuucuucccu

SEQ ID NO: 413741 - RNA, 32 nt, Homo Sapiens
uauucucggcuauuuauccccagcugcgggag

SEQ ID NO: 413742 - RNA, 32 nt, Homo Sapiens
cuccacauaaaagaaaaauaacuugggacugu

SEQ ID NO: 413743 - RNA, 32 nt, Homo Sapiens
cagcuuccuaguuuguaaauagacuuacuugg

SEQ ID NO: 413744 - RNA, 32 nt, Homo Sapiens
ggcaaggaggugugcuaaggcugcccuccaca

SEQ ID NO: 413745 - RNA, 32 nt, Homo Sapiens
cccaccgagcuaaucacccccacuccugcccc

SEQ ID NO: 413746 - RNA, 32 nt, Homo Sapiens
uaacaccaccacugggacgugccauguuggga

SEQ ID NO: 413747 - RNA, 32 nt, Homo Sapiens
cgccugccggugaagagcugcagaugccgaga

SEQ ID NO: 413748 - RNA, 32 nt, Homo Sapiens
agcuuuuuuaagaaaauaauugggcagugaaa

SEQ ID NO: 413749 - RNA, 26 nt, Homo Sapiens
auuaaauauauucugugguuuauaug

SEQ ID NO: 413750 - RNA, 32 nt, Homo Sapiens
gccgcccccuccccagggcccugccuccuccc

SEQ ID NO: 413751 - RNA, 32 nt, Homo Sapiens
ccaucucccagaagccugcuuuuuaaugcccg

SEQ ID NO: 413752 - RNA, 32 nt, Homo Sapiens
aacucaggcuucuggucugcaguggagccugu

SEQ ID NO: 413753 - RNA, 32 nt, Homo Sapiens
ucaaagagcauaauuaacuuuuuaaaagaagc

SEQ ID NO: 413754 - RNA, 32 nt, Homo Sapiens
gggcagguuuguuguuuuuuuaauagcuuuau

SEQ ID NO: 413755 - RNA, 32 nt, Homo Sapiens
ccacguggggcggaacggaaaccucgcagggu

SEQ ID NO: 413756 - RNA, 25 nt, Homo Sapiens
auggcccggccgcagaggacuccgg

SEQ ID NO: 413757 - RNA, 32 nt, Homo Sapiens
auuaguucauuuccaaucccagaacacaugga

SEQ ID NO: 413758 - RNA, 32 nt, Homo Sapiens
uaauuuuauuuuuaguuuugagacauggucuc

SEQ ID NO: 413759 - RNA, 32 nt, Homo Sapiens
gugcuguaucacggggaaugaggugggggugc

SEQ ID NO: 413760 - RNA, 32 nt, Homo Sapiens
cuccccaguuuagggauggcacuggaaagucc

SEQ ID NO: 413761 - RNA, 32 nt, Homo Sapiens
gguugggucuuuagccauuauauguguauaua

SEQ ID NO: 413762 - RNA, 32 nt, Homo Sapiens
gcuaauuguaaaugggaauaaaacacaccaca

SEQ ID NO: 413763 - RNA, 32 nt, Homo Sapiens
augaccaggaccagucucuggugccugacaag

SEQ ID NO: 413764 - RNA, 32 nt, Homo Sapiens
aagcccucuguugccuuuccucccucagagca

SEQ ID NO: 413765 - RNA, 32 nt, Homo Sapiens
guucccugcccugcacacguagagugggagcg

SEQ ID NO: 413766 - RNA, 32 nt, Homo Sapiens
aaccagucuugaugaagagaucauuuuaaagg

SEQ ID NO: 413767 - RNA, 32 nt, Homo Sapiens
uuacucccuccucuggccccaguagccuauau

SEQ ID NO: 413768 - RNA, 32 nt, Homo Sapiens
cccucauccccucucccaggcugggcuggccc

SEQ ID NO: 413769 - RNA, 31 nt, Homo Sapiens
cuguccaauuugacuuauacaacauagucag

SEQ ID NO: 413770 - RNA, 32 nt, Homo Sapiens
cuguuguggaccgggggucggggcuggcagga

SEQ ID NO: 413771 - RNA, 32 nt, Homo Sapiens
ccagaaaucacagauacugcuuucacuuaaau

SEQ ID NO: 413772 - RNA, 32 nt, Homo Sapiens
gcucagcaccuuccucucuccuccagcucucc

SEQ ID NO: 413773 - RNA, 32 nt, Homo Sapiens
ucuagagaguuugagccuuugcuggucacauu

SEQ ID NO: 413774 - RNA, 32 nt, Homo Sapiens
aggguccgaugugacagcaagcaagugaaaua

SEQ ID NO: 413775 - RNA, 32 nt, Homo Sapiens
agcugcuuuuuggagaagaugaugcauaaagc

SEQ ID NO: 413776 - RNA, 32 nt, Homo Sapiens
gaaaugggaaagggaauugcuguccuugcccu

SEQ ID NO: 413777 - RNA, 32 nt, Homo Sapiens
uguccucacagaugaaugaggucaugcuggga

SEQ ID NO: 413778 - RNA, 32 nt, Homo Sapiens
gaagucuugagaaaaagauuauuguaguguuc

SEQ ID NO: 413779 - RNA, 32 nt, Homo Sapiens
ucugucugaggacaguggguguguacuggccu

SEQ ID NO: 413780 - RNA, 32 nt, Homo Sapiens
agaacuucgcggcuaaggcgcggugcucugcg

SEQ ID NO: 413781 - RNA, 32 nt, Homo Sapiens
cgccgcgugcgccugcagacgcuccgcucgcu

SEQ ID NO: 413782 - RNA, 32 nt, Homo Sapiens
cccccacccacccccauccccuucccaauuga

SEQ ID NO: 413783 - RNA, 32 nt, Homo Sapiens
aggacaggcuccugaggaccccucaggcccug

SEQ ID NO: 413784 - RNA, 32 nt, Homo Sapiens
cuaaagaucuucuguacuucugucuuccauag

SEQ ID NO: 413785 - RNA, 32 nt, Homo Sapiens
uuggguucugugcuccuccucucuuccuauag

SEQ ID NO: 413786 - RNA, 29 nt, Homo Sapiens
acggcaugaggacagagggaggggcacgg

SEQ ID NO: 413787 - RNA, 32 nt, Homo Sapiens
guaguuuuucuuuuuuaacuuaaagacaacuu

SEQ ID NO: 413788 - RNA, 32 nt, Homo Sapiens
gcacggcaaaaauaucgaucaguguuaaguga

SEQ ID NO: 413789 - RNA, 32 nt, Homo Sapiens
cccaugccccagucggccccaucucucauccu

SEQ ID NO: 413790 - RNA, 32 nt, Homo Sapiens
gugugaaucacuucauauaucacgugcuguaa

SEQ ID NO: 413791 - RNA, 32 nt, Homo Sapiens
ggagagucaagaauaaauuugcaggucaaaca

SEQ ID NO: 413792 - RNA, 32 nt, Homo Sapiens
aaggcugguucgaauugugaugaccauuuuug

SEQ ID NO: 413793 - RNA, 32 nt, Homo Sapiens
gcuucgaaccguggccaacaguuccaguggac

SEQ ID NO: 413794 - RNA, 32 nt, Homo Sapiens
guuccuuuaauaccauauucucuucauccaga

SEQ ID NO: 413795 - RNA, 32 nt, Homo Sapiens
gggacccuggugagcaggccuggggagcuggu

SEQ ID NO: 413796 - RNA, 32 nt, Homo Sapiens
aguuagccauauaaaugcaaggguauaucaua

SEQ ID NO: 413797 - RNA, 32 nt, Homo Sapiens
aucaaaugucauuuguucaauuguuaauguca

SEQ ID NO: 413798 - RNA, 32 nt, Homo Sapiens
gagugugcgcgagcuaccgcuucacuuucucc

SEQ ID NO: 413799 - RNA, 32 nt, Homo Sapiens
uuucacuuaaaauuauuaugcaaaaaugaaug

SEQ ID NO: 413800 - RNA, 32 nt, Homo Sapiens
accuuucagcccaagauagcuacaugucuuua

SEQ ID NO: 413801 - RNA, 32 nt, Homo Sapiens
uguuuaacaaaauaauuguagguuucucucug

SEQ ID NO: 413802 - RNA, 32 nt, Homo Sapiens
acacugauuaaaucauaaauauuuucaguaug

SEQ ID NO: 413803 - RNA, 32 nt, Homo Sapiens
uucgccgccgccgccgccgccggccaagcucc

SEQ ID NO: 413804 - RNA, 32 nt, Homo Sapiens
cauuguuaauggccugugacaugaugagcaca

SEQ ID NO: 413805 - RNA, 32 nt, Homo Sapiens
uagagccggccgccgccgcccgccgcgguaag

SEQ ID NO: 413806 - RNA, 32 nt, Homo Sapiens
cugaggaagaacuuggcugaggaguaccugca

SEQ ID NO: 413807 - RNA, 32 nt, Homo Sapiens
auuaguauuucugugaaaucaguugauucuug

SEQ ID NO: 413808 - RNA, 32 nt, Homo Sapiens
guugugacagaguuucuuucugacaccugagu

SEQ ID NO: 413809 - RNA, 31 nt, Homo Sapiens
uccuccugugcuauuuguacaaauaaccuga

SEQ ID NO: 413810 - RNA, 32 nt, Homo Sapiens
gauuuauuuuaaaagagauugcucugaaauuu

SEQ ID NO: 413811 - RNA, 32 nt, Homo Sapiens
agaugugguauugcucugaggaccaggcagga

SEQ ID NO: 413812 - RNA, 32 nt, Homo Sapiens
auauauaugaagacuguaaauguuaagacgac

SEQ ID NO: 413813 - RNA, 32 nt, Homo Sapiens
ucccgcggcggaacuugccggagguggggcug

SEQ ID NO: 413814 - RNA, 32 nt, Homo Sapiens
cuauugaaguuauaauuguauuaaauuaaugc

SEQ ID NO: 413815 - RNA, 32 nt, Homo Sapiens
gccgggaaggaggauggacgccgcuggcaugu

SEQ ID NO: 413816 - RNA, 32 nt, Homo Sapiens
auuacuuauuagucuguaauuuuguaguacau

SEQ ID NO: 413817 - RNA, 32 nt, Homo Sapiens
gauuugcuguuugucuucugucucaugggucu

SEQ ID NO: 413818 - RNA, 32 nt, Homo Sapiens
ugacuggcaugaccuccucccuaggaaucucu

SEQ ID NO: 413819 - RNA, 32 nt, Homo Sapiens
agcaaacaugucucccagccccugagagcccc

SEQ ID NO: 413820 - RNA, 32 nt, Homo Sapiens
uucuaagccagacugcuggagaucacccuguu

SEQ ID NO: 413821 - RNA, 32 nt, Homo Sapiens
cucacuauuaggaauaaauguacaacgaguua

SEQ ID NO: 413822 - RNA, 32 nt, Homo Sapiens
cuaauauuuuaucuuucuuuuuuuaugaccaa

SEQ ID NO: 413823 - RNA, 32 nt, Homo Sapiens
gguguagaaggagcuaaagagaucugguugga

SEQ ID NO: 413824 - RNA, 32 nt, Homo Sapiens
cagaagccaaacucggggucaucuuuguuuuu

SEQ ID NO: 413825 - RNA, 32 nt, Homo Sapiens
cagccccagccaugggcgcccgggcucggucc

SEQ ID NO: 413826 - RNA, 32 nt, Homo Sapiens
agcuuucugaauugagauacuuugaaauucca

SEQ ID NO: 413827 - RNA, 32 nt, Homo Sapiens
cagugguaacccaagaggcaauacucauuauc

SEQ ID NO: 413828 - RNA, 32 nt, Homo Sapiens
uauuggaaucugccacuuucucccagagcugc

SEQ ID NO: 413829 - RNA, 29 nt, Homo Sapiens
uuucauauagcuuuauauuauuuuacauc

SEQ ID NO: 413830 - RNA, 31 nt, Homo Sapiens
cguggugagcgcagccacucaggcugguccu

SEQ ID NO: 413831 - RNA, 32 nt, Homo Sapiens
aaguuuuaaaguuacauuucuauacaucuaau

SEQ ID NO: 413832 - RNA, 32 nt, Homo Sapiens
aauuaaggaaagaaacaaaccacgacacccaa

SEQ ID NO: 413833 - RNA, 32 nt, Homo Sapiens
caagccggcagagaaucccccacacgcucuga

SEQ ID NO: 413834 - RNA, 32 nt, Homo Sapiens
guccauauuuuucaaacaucacguucucuauu

SEQ ID NO: 413835 - RNA, 32 nt, Homo Sapiens
auggggagagccuucuaauaagagggaagaga

SEQ ID NO: 413836 - RNA, 32 nt, Homo Sapiens
augcaucaauuucuugaaggagauucauguuu

SEQ ID NO: 413837 - RNA, 32 nt, Homo Sapiens
cugauuacagaaaaauaccauuaaggggaacc

SEQ ID NO: 413838 - RNA, 32 nt, Homo Sapiens
gcugagcccagcuccuucucgccucagccgcg

SEQ ID NO: 413839 - RNA, 32 nt, Homo Sapiens
ucaugucugagcucagcauauaucggagccac

SEQ ID NO: 413840 - RNA, 32 nt, Homo Sapiens
ugcuucuagguauacuguggucucacuaguca

SEQ ID NO: 413841 - RNA, 32 nt, Homo Sapiens
gcccugcuccucugcuggggucggccccgcac

SEQ ID NO: 413842 - RNA, 32 nt, Homo Sapiens
acugagcccucccuacacaagccauaacuacu

SEQ ID NO: 413843 - RNA, 32 nt, Homo Sapiens
ucaguacacacaccgaugcacacacacucucu

SEQ ID NO: 413844 - RNA, 32 nt, Homo Sapiens
uaacagguaccacuucugaucacccuguacau

SEQ ID NO: 413845 - RNA, 32 nt, Homo Sapiens
aggaggaagacauaaaguuggggguggagagg

SEQ ID NO: 413846 - RNA, 32 nt, Homo Sapiens
uaaacaauauaaauaaaugauccuguaggccc

SEQ ID NO: 413847 - RNA, 32 nt, Homo Sapiens
ugguuugugucugaugaguuuuuuaacauuca

SEQ ID NO: 413848 - RNA, 32 nt, Homo Sapiens
cuauggccaaacuugcacuguuacguguuaac

SEQ ID NO: 413849 - RNA, 32 nt, Homo Sapiens
ccaccagcacgcugaccugugaaccccagccu

SEQ ID NO: 413850 - RNA, 32 nt, Homo Sapiens
acaaggacuccagccugcuggcuggugagagc

SEQ ID NO: 413851 - RNA, 32 nt, Homo Sapiens
ugggaauagaaucgagaaagcaaccaagagag

SEQ ID NO: 413852 - RNA, 32 nt, Homo Sapiens
gggcccagcucuuuguguacugguguccaggc

SEQ ID NO: 413853 - RNA, 32 nt, Homo Sapiens
gauugaaugauaaagugaauaagaaagcucua

SEQ ID NO: 413854 - RNA, 32 nt, Homo Sapiens
gcaauggaagugucccccacuccaguggugga

SEQ ID NO: 413855 - RNA, 32 nt, Homo Sapiens
uguuuuucuuuuuuuucuuucuuuuuuuuuuu

SEQ ID NO: 413856 - RNA, 32 nt, Homo Sapiens
aaauuauacuaaagugagaugcauuuuuucuc

SEQ ID NO: 413857 - RNA, 32 nt, Homo Sapiens
auuuucucucauccaauaauguaaaacuaucg

SEQ ID NO: 413858 - RNA, 32 nt, Homo Sapiens
aguggcuuccagcagaguugccugggauuucu

SEQ ID NO: 413859 - RNA, 32 nt, Homo Sapiens
gccauuuggucccauaggaucccaggacccaa

SEQ ID NO: 413860 - RNA, 32 nt, Homo Sapiens
caaggcuaugcucacgggaggcugggcaccac

SEQ ID NO: 413861 - RNA, 32 nt, Homo Sapiens
ggacacagcugagagauagaggaggcugugaa

SEQ ID NO: 413862 - RNA, 32 nt, Homo Sapiens
ccgccucccgucuuccgggacccggcacuucg

SEQ ID NO: 413863 - RNA, 32 nt, Homo Sapiens
ccucaguauaguuauauauaaaauggacacgg

SEQ ID NO: 413864 - RNA, 32 nt, Homo Sapiens
aaggcagauaaaucuguaaauuauuuuauccu

SEQ ID NO: 413865 - RNA, 32 nt, Homo Sapiens
uggaaggugacaucuguguuucguuuuagcug

SEQ ID NO: 413866 - RNA, 32 nt, Homo Sapiens
ccuccccuccgccagagcugccuguggccaga

SEQ ID NO: 413867 - RNA, 32 nt, Homo Sapiens
caaugauaauuuuauauguuaguuuaucaaac

SEQ ID NO: 413868 - RNA, 32 nt, Homo Sapiens
cccuuggggcucaucacccuuccacauccucc

SEQ ID NO: 413869 - RNA, 32 nt, Homo Sapiens
uccguuuccugaggccuccccagccaugcuuc

SEQ ID NO: 413870 - RNA, 32 nt, Homo Sapiens
agucauaggcuucuuucagucuuuaugucacc

SEQ ID NO: 413871 - RNA, 32 nt, Homo Sapiens
cgccgcaggaccgcggacccgaguuggaggca

SEQ ID NO: 413872 - RNA, 32 nt, Homo Sapiens
agggcaaggaacugucuuucugguucaauaga

SEQ ID NO: 413873 - RNA, 32 nt, Homo Sapiens
agcgccccucggcuacccucggcccaggcccg

SEQ ID NO: 413874 - RNA, 32 nt, Homo Sapiens
auaugcaucacacaccacuuugacaaacccau

SEQ ID NO: 413875 - RNA, 32 nt, Homo Sapiens
augaaaugccccaccuuugcccauggacccuc

SEQ ID NO: 413876 - RNA, 32 nt, Homo Sapiens
agcuucuguguuugucuaaaaauguggcauau

SEQ ID NO: 413877 - RNA, 32 nt, Homo Sapiens
uagauacugacaaaaugaaacucauaguagaa

SEQ ID NO: 413878 - RNA, 32 nt, Homo Sapiens
aggcaguucuaugccuuggagcuccugacugc

SEQ ID NO: 413879 - RNA, 32 nt, Homo Sapiens
ccuccggcacacucuuuccacucuguauuugc

SEQ ID NO: 413880 - RNA, 32 nt, Homo Sapiens
ugcccaagguuaguaaauaucaucauuuucca

SEQ ID NO: 413881 - RNA, 32 nt, Homo Sapiens
agaagaaguaaaaaccauuuaguauuaguauu

SEQ ID NO: 413882 - RNA, 32 nt, Homo Sapiens
cuccaacccugcuuccucagcaauggcucucc

SEQ ID NO: 413883 - RNA, 32 nt, Homo Sapiens
gaaaauaaauaaauaauaagugcgagcuacaa

SEQ ID NO: 413884 - RNA, 32 nt, Homo Sapiens
gagcuguuauguuuuucuugaacuuuagaggg

SEQ ID NO: 413885 - RNA, 32 nt, Homo Sapiens
aaaccauguugaaugaauccacguucuggaac

SEQ ID NO: 413886 - RNA, 32 nt, Homo Sapiens
ugucguucaccgugagagucugcauagaacuc

SEQ ID NO: 413887 - RNA, 32 nt, Homo Sapiens
uucagagguagugguagaacauccuacugauu

SEQ ID NO: 413888 - RNA, 32 nt, Homo Sapiens
agaacaaacuacacuuuuuuucccucuauugu

SEQ ID NO: 413889 - RNA, 32 nt, Homo Sapiens
agaagaaaucauaaauaucucucaucuacaug

SEQ ID NO: 413890 - RNA, 32 nt, Homo Sapiens
cugcacaggaccacgcggggguuugccauggu

SEQ ID NO: 413891 - RNA, 32 nt, Homo Sapiens
aaaaauuaucuaagaaguuaaaaaugaaagug

SEQ ID NO: 413892 - RNA, 32 nt, Homo Sapiens
uugucagauuuguggucuaauagagguagaaa

SEQ ID NO: 413893 - RNA, 32 nt, Homo Sapiens
uauuaauagaaugauaaauguacagaguaacc

SEQ ID NO: 413894 - RNA, 32 nt, Homo Sapiens
acucaugugauuauggaggcugagaagucuca

SEQ ID NO: 413895 - RNA, 32 nt, Homo Sapiens
augaacagagacaccaggaugcucuccugaga

SEQ ID NO: 413896 - RNA, 32 nt, Homo Sapiens
ucgugucuuacucaucuuuguaucuccagugu

SEQ ID NO: 413897 - RNA, 32 nt, Homo Sapiens
uauuucuaugugugccacacacaaugcaguau

SEQ ID NO: 413898 - RNA, 32 nt, Homo Sapiens
uauuauuauuauuugcagucauggagaaccac

SEQ ID NO: 413899 - RNA, 32 nt, Homo Sapiens
accagacuucucauaaugcucuuaauauauug

SEQ ID NO: 413900 - RNA, 32 nt, Homo Sapiens
cauauauuuucguguuacuuaagcaaaaucaa

SEQ ID NO: 413901 - RNA, 32 nt, Homo Sapiens
accaagugacccaaagugaccuggacaagauu

SEQ ID NO: 413902 - RNA, 32 nt, Homo Sapiens
uaauacuuuugguuauuccaaucuucaauguu

SEQ ID NO: 413903 - RNA, 32 nt, Homo Sapiens
uuggaacaugauuuauaguuaaaagccuaaua

SEQ ID NO: 413904 - RNA, 32 nt, Homo Sapiens
ccggcaccccgagcccuuccuccggagcugcu

SEQ ID NO: 413905 - RNA, 31 nt, Homo Sapiens
cuugagcuggcggugucaucguccgucacuu

SEQ ID NO: 413906 - RNA, 32 nt, Homo Sapiens
gcaaaggagacggcacuggcagcuacagagaa

SEQ ID NO: 413907 - RNA, 32 nt, Homo Sapiens
gggagcugugcugacucuucccggggccaccu

SEQ ID NO: 413908 - RNA, 32 nt, Homo Sapiens
cuugcccggaagcuggaccucacggagaugaa

SEQ ID NO: 413909 - RNA, 32 nt, Homo Sapiens
gccagcggcucccccuucuccucggcgggccu

SEQ ID NO: 413910 - RNA, 32 nt, Homo Sapiens
auauuuuguagaacccaaaagauuggagccuu

SEQ ID NO: 413911 - RNA, 32 nt, Homo Sapiens
gccgcugcgcccccgccuccucgcgggaggac

SEQ ID NO: 413912 - RNA, 32 nt, Homo Sapiens
auucuacagcauauuccuggcggggcugaaau

SEQ ID NO: 413913 - RNA, 32 nt, Homo Sapiens
ucuuuauucacucccagccuguccuguggccu

SEQ ID NO: 413914 - RNA, 32 nt, Homo Sapiens
ucuccaggcucaggugccaagugaguugucaa

SEQ ID NO: 413915 - RNA, 32 nt, Homo Sapiens
acuagaaaaaauuuaauaucaaggacuauuac

SEQ ID NO: 413916 - RNA, 32 nt, Homo Sapiens
gaauugaugcaacaggggauauuagcuguagu

SEQ ID NO: 413917 - RNA, 32 nt, Homo Sapiens
cacagucagcccuggggguggggggugguggg

SEQ ID NO: 413918 - RNA, 32 nt, Homo Sapiens
cauagacaaggugaacauuucucaaaacacca

SEQ ID NO: 413919 - RNA, 32 nt, Homo Sapiens
ccuuuccuuuuggagaugauugugcuauuauu

SEQ ID NO: 413920 - RNA, 32 nt, Homo Sapiens
agcaaucagcgagacuccgugggcguaggacc

SEQ ID NO: 413921 - RNA, 32 nt, Homo Sapiens
accgcuuccgggcuggggacugggggcggggc

SEQ ID NO: 413922 - RNA, 31 nt, Homo Sapiens
cccaggcugccggcgauccuggggacaacga

SEQ ID NO: 413923 - RNA, 32 nt, Homo Sapiens
uguugccagaaaggaagugggcaugucguaag

SEQ ID NO: 413924 - RNA, 32 nt, Homo Sapiens
uuuucuuucaaucagcauguucaccaaaaaua

SEQ ID NO: 413925 - RNA, 32 nt, Homo Sapiens
aggcuuguuuccaccaauagugccaaaaagau

SEQ ID NO: 413926 - RNA, 32 nt, Homo Sapiens
gaucagagggaauaaacaucuuagaggcauga

SEQ ID NO: 413927 - RNA, 32 nt, Homo Sapiens
agucucuccugucacacccccagcggcucccu

SEQ ID NO: 413928 - RNA, 32 nt, Homo Sapiens
ccucugaaaaauuuguaguuuaauauuuguuu

SEQ ID NO: 413929 - RNA, 32 nt, Homo Sapiens
gccucagcccgcgcagaaugugcuugcugccc

SEQ ID NO: 413930 - RNA, 32 nt, Homo Sapiens
uaaguuugggagaggaucugugugugauuucu

SEQ ID NO: 413931 - RNA, 32 nt, Homo Sapiens
aaauuaucagugcucugcuuuuagucacgugu

SEQ ID NO: 413932 - RNA, 32 nt, Homo Sapiens
cugagccauggugucgagugaagaguaguucu

SEQ ID NO: 413933 - RNA, 32 nt, Homo Sapiens
ucacuugcuugugguguuuucguuucuuuuuc

SEQ ID NO: 413934 - RNA, 32 nt, Homo Sapiens
caggacugacaccuacagcaucagguacacag

SEQ ID NO: 413935 - RNA, 32 nt, Homo Sapiens
aauuuuaaaauguuuaggaaauuuauacaaag

SEQ ID NO: 413936 - RNA, 32 nt, Homo Sapiens
ugaaacaggacugacagaauagacuuauccau

SEQ ID NO: 413937 - RNA, 32 nt, Homo Sapiens
cagcccucaaagaauggggucugugggcuagu

SEQ ID NO: 413938 - RNA, 32 nt, Homo Sapiens
ccucuggcgcccugcugccacccagugacugg

SEQ ID NO: 413939 - RNA, 32 nt, Homo Sapiens
uuuaaggaaaauaaauuguguaaacauuuaaa

SEQ ID NO: 413940 - RNA, 32 nt, Homo Sapiens
aagugcaauauuuucccuaaccuucaaaugug

SEQ ID NO: 413941 - RNA, 32 nt, Homo Sapiens
uacaagaauuaaaagagauacaguaccugaag

SEQ ID NO: 413942 - RNA, 32 nt, Homo Sapiens
uaucuccagauccuaauuuaugccuaugcaaa

SEQ ID NO: 413943 - RNA, 32 nt, Homo Sapiens
cauuuccuggcugaaguuucucuucucgcugc

SEQ ID NO: 413944 - RNA, 32 nt, Homo Sapiens
cugccccugcucugcccucccuggcuccugga

SEQ ID NO: 413945 - RNA, 32 nt, Homo Sapiens
cgggaauaaaauuuaugaugcaaaaaaaaaaa

SEQ ID NO: 413946 - RNA, 32 nt, Homo Sapiens
ccaagcagacauuucagaggauucacacuaau

SEQ ID NO: 413947 - RNA, 32 nt, Homo Sapiens
cagauaagcuuucucuucagacuuuuccuuca

SEQ ID NO: 413948 - RNA, 32 nt, Homo Sapiens
gugaccuuuguccucacauauguuaucacucg

SEQ ID NO: 413949 - RNA, 32 nt, Homo Sapiens
uccacucagccugcaacacaaaagcacagaac

SEQ ID NO: 413950 - RNA, 32 nt, Homo Sapiens
gggccggagcgaggcggggcccggggcuguca

SEQ ID NO: 413951 - RNA, 32 nt, Homo Sapiens
uuucccuuauuagaacaaacccuaacucgggu

SEQ ID NO: 413952 - RNA, 32 nt, Homo Sapiens
ugcuauuuccuccucccuuuagaagacaggcu

SEQ ID NO: 413953 - RNA, 32 nt, Homo Sapiens
aagggccugcgaggggaucccguaagugcacg

SEQ ID NO: 413954 - RNA, 32 nt, Homo Sapiens
cugacgacaccgugagccugccuuuguacuuu

SEQ ID NO: 413955 - RNA, 32 nt, Homo Sapiens
gaagguaaaaagacacagccagaaagaaaagg

SEQ ID NO: 413956 - RNA, 32 nt, Homo Sapiens
uucugccuuucugucucaagaugcaugucuuu

SEQ ID NO: 413957 - RNA, 32 nt, Homo Sapiens
ucuaagacgcagaaacgacgucgccguaaagc

SEQ ID NO: 413958 - RNA, 32 nt, Homo Sapiens
aaccagcuuuucugcagccaauugccuguugc

SEQ ID NO: 413959 - RNA, 32 nt, Homo Sapiens
gagcaugagaaaguauuugaagaaacuguugc

SEQ ID NO: 413960 - RNA, 32 nt, Homo Sapiens
aaaauacaaaaaucaauauacgauauacaaaa

SEQ ID NO: 413961 - RNA, 32 nt, Homo Sapiens
gggguuaccccggcucugggccccaucagaac

SEQ ID NO: 413962 - RNA, 32 nt, Homo Sapiens
acuaccuuugaacaguccuuugugaaaucuaa

SEQ ID NO: 413963 - RNA, 32 nt, Homo Sapiens
auuuuguagaucauuuuuuuuaaauacugugu

SEQ ID NO: 413964 - RNA, 32 nt, Homo Sapiens
cauuucgcgugcacugaggaccucugaggacc

SEQ ID NO: 413965 - RNA, 32 nt, Homo Sapiens
gcuuuucuagaauuugauguuugaccauuuau

SEQ ID NO: 413966 - RNA, 32 nt, Homo Sapiens
ccgcccuuccagcccuuccccagccccuccuc

SEQ ID NO: 413967 - RNA, 32 nt, Homo Sapiens
acuccuauuaaaccccuauuagaggaagagau

SEQ ID NO: 413968 - RNA, 32 nt, Homo Sapiens
acagacagugauucagauugguccugaggcau

SEQ ID NO: 413969 - RNA, 32 nt, Homo Sapiens
aucauuaagacgugaaugaaacaucauccuaa

SEQ ID NO: 413970 - RNA, 32 nt, Homo Sapiens
gauauuuuuccgcuuggcaauuuccuuuccug

SEQ ID NO: 413971 - RNA, 32 nt, Homo Sapiens
ccuuggagggugggcaggugcauggaggguga

SEQ ID NO: 413972 - RNA, 32 nt, Homo Sapiens
ugcgcccgccccaccuuccuucccacccacau

SEQ ID NO: 413973 - RNA, 32 nt, Homo Sapiens
auggggugauggggcgggaugcuugggccugg

SEQ ID NO: 413974 - RNA, 32 nt, Homo Sapiens
agcaggggaggagggccugcugagagacucug

SEQ ID NO: 413975 - RNA, 32 nt, Homo Sapiens
cucguuggaagacaggagaggaguguuuaguu

SEQ ID NO: 413976 - RNA, 32 nt, Homo Sapiens
ccugggcggcccggcuagcucugccuacgcgc

SEQ ID NO: 413977 - RNA, 32 nt, Homo Sapiens
accugaugaugcaacuaacacuugccucccca

SEQ ID NO: 413978 - RNA, 32 nt, Homo Sapiens
uaggaaaaauacauaaucaugcucagauaugu

SEQ ID NO: 413979 - RNA, 32 nt, Homo Sapiens
acaugaaguauuuuuucaguauuauauguacc

SEQ ID NO: 413980 - RNA, 32 nt, Homo Sapiens
ggcuggacggugugauccugaggugggccgag

SEQ ID NO: 413981 - RNA, 32 nt, Homo Sapiens
gucaguggguggcagggggcuggcaaugagcu

SEQ ID NO: 413982 - RNA, 32 nt, Homo Sapiens
ugaauuuuguaaacagaaguauuaaaugucuc

SEQ ID NO: 413983 - RNA, 32 nt, Homo Sapiens
ugccauuauuaaucggcaaaauguggagugua

SEQ ID NO: 413984 - RNA, 32 nt, Homo Sapiens
uacagacaaggccaaggcaaucccagggcauu

SEQ ID NO: 413985 - RNA, 32 nt, Homo Sapiens
ucagcauaaaguuccucuuauuuucaguaucu

SEQ ID NO: 413986 - RNA, 32 nt, Homo Sapiens
uucaaauuuuaagcaaucauauuuucaauuua

SEQ ID NO: 413987 - RNA, 29 nt, Homo Sapiens
ccgaggaggaggaggaggacgcgggccug

SEQ ID NO: 413988 - RNA, 32 nt, Homo Sapiens
cagucagcaccucggcauccacccaguccauc

SEQ ID NO: 413989 - RNA, 32 nt, Homo Sapiens
aauagauguuauauuucuaaagaauuucauga

SEQ ID NO: 413990 - RNA, 32 nt, Homo Sapiens
auuucuuucuucccuuucuugcuacacaguga

SEQ ID NO: 413991 - RNA, 32 nt, Homo Sapiens
uccacggugcuaugagaacaccauaggaagua

SEQ ID NO: 413992 - RNA, 32 nt, Homo Sapiens
ugcauagcaccuuuuggaauuuucaucauguu

SEQ ID NO: 413993 - RNA, 32 nt, Homo Sapiens
cagugcuggcccagccccugcggcuuaggcuu

SEQ ID NO: 413994 - RNA, 32 nt, Homo Sapiens
ucuuggaagaagagacccaccuucaccagaca

SEQ ID NO: 413995 - RNA, 31 nt, Homo Sapiens
ccucgugugggaagccugcccuggcccagcc

SEQ ID NO: 413996 - RNA, 32 nt, Homo Sapiens
uggugcucaaagucaaacaaaaauauuuuagu

SEQ ID NO: 413997 - RNA, 30 nt, Homo Sapiens
gaaugucuuuacaugggggaaagagggaac

SEQ ID NO: 413998 - RNA, 32 nt, Homo Sapiens
cugcgugggaccggcgggaucccggccagccg

SEQ ID NO: 413999 - RNA, 32 nt, Homo Sapiens
acccccgaggaccuccucuccucgcccugugg

SEQ ID NO: 414000 - RNA, 32 nt, Homo Sapiens
cauuuaguuauauacauaacagaaaaguauga

SEQ ID NO: 414001 - RNA, 32 nt, Homo Sapiens
gaugcagcucaccucccuccuguucacacccc

SEQ ID NO: 414002 - RNA, 32 nt, Homo Sapiens
cauaagcauucaacccccugcacaugucuucu

SEQ ID NO: 414003 - RNA, 32 nt, Homo Sapiens
gcucauucuucagaucuucucagugaauuuaa

SEQ ID NO: 414004 - RNA, 32 nt, Homo Sapiens
aaggagccgcggcugcugcgggaaguggccag

SEQ ID NO: 414005 - RNA, 32 nt, Homo Sapiens
cauauuuauucuccucuuucuucccuuagaac

SEQ ID NO: 414006 - RNA, 32 nt, Homo Sapiens
aagcuggcauguguuaauuauauccgaggucu

SEQ ID NO: 414007 - RNA, 32 nt, Homo Sapiens
accuucuauuggucucccuucucuacacucuu

SEQ ID NO: 414008 - RNA, 32 nt, Homo Sapiens
gagacucuucaagagaggcaucaacuucuaau

SEQ ID NO: 414009 - RNA, 32 nt, Homo Sapiens
ucuacuauauauuauaguuuaauugauagcgu

SEQ ID NO: 414010 - RNA, 32 nt, Homo Sapiens
cagaggagucaauucccuacccgcccuuccag

SEQ ID NO: 414011 - RNA, 31 nt, Homo Sapiens
aaaaugaaauaaagaaaauuguguucacaau

SEQ ID NO: 414012 - RNA, 32 nt, Homo Sapiens
aaugaauaaacauuuguagcauccucuuuaau

SEQ ID NO: 414013 - RNA, 32 nt, Homo Sapiens
gcagccuggaagcucgaacuggguggagccca

SEQ ID NO: 414014 - RNA, 32 nt, Homo Sapiens
aaaucuuaucccauuauuucuuuaccuaggcg

SEQ ID NO: 414015 - RNA, 32 nt, Homo Sapiens
ccuggcugcccucuccagauuccccaggcucu

SEQ ID NO: 414016 - RNA, 30 nt, Homo Sapiens
acuccggggccugugccgccagaaccgggc

SEQ ID NO: 414017 - RNA, 32 nt, Homo Sapiens
acgcguggcuccgaccuucgguggaaaugcau

SEQ ID NO: 414018 - RNA, 32 nt, Homo Sapiens
aucaucuuugcauauaaugcacaaucuaucau

SEQ ID NO: 414019 - RNA, 32 nt, Homo Sapiens
agaacauuaaaacacaggcucguggucuaaaa

SEQ ID NO: 414020 - RNA, 32 nt, Homo Sapiens
gcuuuguacgaauucuaaguauucuuguugca

SEQ ID NO: 414021 - RNA, 32 nt, Homo Sapiens
uuuuccuuuuugucacuguguacauuaaaauu

SEQ ID NO: 414022 - RNA, 32 nt, Homo Sapiens
cuccccgcaccugaggcgccugucgcgcgccg

SEQ ID NO: 414023 - RNA, 31 nt, Homo Sapiens
acuguggagccccaauuucugcugagcacug

SEQ ID NO: 414024 - RNA, 32 nt, Homo Sapiens
uuuuuuuuuuuuuuuuuuuuuauuaaauggua

SEQ ID NO: 414025 - RNA, 32 nt, Homo Sapiens
aauacuuuaaaacauuuagaaaacaccccagg

SEQ ID NO: 414026 - RNA, 32 nt, Homo Sapiens
gggaagcagcggccucggccaaggcccacccc

SEQ ID NO: 414027 - RNA, 32 nt, Homo Sapiens
uaguaugacuaauucauuuguuugucaaggac

SEQ ID NO: 414028 - RNA, 32 nt, Homo Sapiens
uagccuguggagagggcgaggccaagguuggg

SEQ ID NO: 414029 - RNA, 32 nt, Homo Sapiens
ccuaaugcuaucccucccuccucccccuaccc

SEQ ID NO: 414030 - RNA, 32 nt, Homo Sapiens
ucucaccugccagcaugacaagcuccagcauc

SEQ ID NO: 414031 - RNA, 32 nt, Homo Sapiens
uuuucccuuuuggggcaagacagacucauuaa

SEQ ID NO: 414032 - RNA, 32 nt, Homo Sapiens
cccaaacugcuuuuuccaacucagaaauucaa

SEQ ID NO: 414033 - RNA, 32 nt, Homo Sapiens
agcaacacaagaaagggcaacaaaauuacuaa

SEQ ID NO: 414034 - RNA, 32 nt, Homo Sapiens
uccaguugacuucugucuucucauuuccaagc

SEQ ID NO: 414035 - RNA, 32 nt, Homo Sapiens
ggcucugccggggcauuggugggaccccugcu

SEQ ID NO: 414036 - RNA, 32 nt, Homo Sapiens
uggugagguugcugccaacaguccuggccucc

SEQ ID NO: 414037 - RNA, 32 nt, Homo Sapiens
caggaaugauugacacuuuggugcugggguuu

SEQ ID NO: 414038 - RNA, 32 nt, Homo Sapiens
gaaagaacaaaguuuacuucaacuaaaauguu

SEQ ID NO: 414039 - RNA, 32 nt, Homo Sapiens
uauuugucucaaagcuaccaaguuugugcaau

SEQ ID NO: 414040 - RNA, 32 nt, Homo Sapiens
ccgcugccccccacccacccugcaccccucgc

SEQ ID NO: 414041 - RNA, 32 nt, Homo Sapiens
uuuuuuuuucuuucuuuuuuucaauuuugaac

SEQ ID NO: 414042 - RNA, 32 nt, Homo Sapiens
aguaauauuuauuugcauagucuauuuauugu

SEQ ID NO: 414043 - RNA, 32 nt, Homo Sapiens
ugaacaguguuaauuuagaugcacuaaagcaa

SEQ ID NO: 414044 - RNA, 32 nt, Homo Sapiens
aaguaugaaaauaaagauauauguacagacuu

SEQ ID NO: 414045 - RNA, 32 nt, Homo Sapiens
uaagcauuccaagauaaaccuaucuguaucug

SEQ ID NO: 414046 - RNA, 32 nt, Homo Sapiens
uaaaaaacuggguguaguugugaguauaguga

SEQ ID NO: 414047 - RNA, 32 nt, Homo Sapiens
cuucccacaguguucagauuuguccugugugu

SEQ ID NO: 414048 - RNA, 32 nt, Homo Sapiens
ggacccccgugauggggacagugucggggagg

SEQ ID NO: 414049 - RNA, 32 nt, Homo Sapiens
cccgacaccuguaaagggucugugcuaaggug

SEQ ID NO: 414050 - RNA, 32 nt, Homo Sapiens
aacgggcccggagggaggagcaggccaagcug

SEQ ID NO: 414051 - RNA, 32 nt, Homo Sapiens
gaggagaugauuaaauaaaaaucccagaagga

SEQ ID NO: 414052 - RNA, 28 nt, Homo Sapiens
ugagaagggugcggcccgaggugcuccc

SEQ ID NO: 414053 - RNA, 32 nt, Homo Sapiens
auggauguaggacagugccauguuucaagaug

SEQ ID NO: 414054 - RNA, 32 nt, Homo Sapiens
uccuggggcugcuggccccgggucccagcagu

SEQ ID NO: 414055 - RNA, 32 nt, Homo Sapiens
aguucgagaccagcaccagccuggccaacacg

SEQ ID NO: 414056 - RNA, 32 nt, Homo Sapiens
gucccggcucugcagguggagacaucgcagag

SEQ ID NO: 414057 - RNA, 32 nt, Homo Sapiens
gcuuuuuguaagucuuucaagggccaucaugu

SEQ ID NO: 414058 - RNA, 32 nt, Homo Sapiens
uccucgcccugggccucagcuuccucaucaau

SEQ ID NO: 414059 - RNA, 32 nt, Homo Sapiens
uauuuuacugucaguugucucaacucuugaau

SEQ ID NO: 414060 - RNA, 32 nt, Homo Sapiens
ggcagcuucuccacagccccagcuucgcacag

SEQ ID NO: 414061 - RNA, 32 nt, Homo Sapiens
caaacagcucagggccaaaccaaaagacaaaa

SEQ ID NO: 414062 - RNA, 32 nt, Homo Sapiens
agccacucuuggaaaaagcacaaccuaacaaa

SEQ ID NO: 414063 - RNA, 32 nt, Homo Sapiens
agaagcugaagaaaacaaaauuuugaagcacu

SEQ ID NO: 414064 - RNA, 32 nt, Homo Sapiens
gugcuggauagaggagccuuauuuuuuauuau

SEQ ID NO: 414065 - RNA, 32 nt, Homo Sapiens
gguaugguucucagcacaaaccuuucaaguau

SEQ ID NO: 414066 - RNA, 32 nt, Homo Sapiens
ggguccuugcccccuuuccccacuuuggaguu

SEQ ID NO: 414067 - RNA, 32 nt, Homo Sapiens
uuuaucccaguggcucaacaacuuuuuugccc

SEQ ID NO: 414068 - RNA, 32 nt, Homo Sapiens
gaucaguguuuuagaaaauccacacaucuuga

SEQ ID NO: 414069 - RNA, 32 nt, Homo Sapiens
guugccgaccuccagcagcagucggcuucucu

SEQ ID NO: 414070 - RNA, 32 nt, Homo Sapiens
gagggagagugagaucuuggggcuuagaggaa

SEQ ID NO: 414071 - RNA, 32 nt, Homo Sapiens
caaguauacauuucuuuuuucuaucagauauu

SEQ ID NO: 414072 - RNA, 32 nt, Homo Sapiens
cugaucucauuucugauguugagggcuguuug

SEQ ID NO: 414073 - RNA, 32 nt, Homo Sapiens
guuuccugucugccugcaaacacaugcagaca

SEQ ID NO: 414074 - RNA, 32 nt, Homo Sapiens
caguccugucagccaguuaauccaccagcucu

SEQ ID NO: 414075 - RNA, 32 nt, Homo Sapiens
aaaaggaaaaagaaaaggaguugcuugaugug

SEQ ID NO: 414076 - RNA, 32 nt, Homo Sapiens
aauacucuucgcgcuccugaaaagcaggucug

SEQ ID NO: 414077 - RNA, 32 nt, Homo Sapiens
ccaaccauaguacuaguuuacuuuuuagagcc

SEQ ID NO: 414078 - RNA, 32 nt, Homo Sapiens
gcauuucccuucccuguagggccagcuguagc

SEQ ID NO: 414079 - RNA, 32 nt, Homo Sapiens
cauggcugccagccccgccucccacccccacc

SEQ ID NO: 414080 - RNA, 32 nt, Homo Sapiens
caguguggugccagagaggaucuuuaagcugg

SEQ ID NO: 414081 - RNA, 32 nt, Homo Sapiens
uagaaaaaccugguuuagugguuuaagccuug

SEQ ID NO: 414082 - RNA, 32 nt, Homo Sapiens
gaagaagggacccaaaucauguuauuggugug

SEQ ID NO: 414083 - RNA, 32 nt, Homo Sapiens
caaccucagcucucuuccccagccuuuauccg

SEQ ID NO: 414084 - RNA, 32 nt, Homo Sapiens
cuuaaaaagagaauauaacauuuuaugucacu

SEQ ID NO: 414085 - RNA, 32 nt, Homo Sapiens
gcccugcaaacacaaccaucuacacacaucua

SEQ ID NO: 414086 - RNA, 32 nt, Homo Sapiens
cacuuuaauguuuuauucuuguacauaaaaau

SEQ ID NO: 414087 - RNA, 32 nt, Homo Sapiens
uccucuggugagcuauagaggagaacguggcu

SEQ ID NO: 414088 - RNA, 32 nt, Homo Sapiens
gccacgcucccuccugucucucacaccuuuca

SEQ ID NO: 414089 - RNA, 32 nt, Homo Sapiens
gguucagcuuaaaaauauaauuugccuacugc

SEQ ID NO: 414090 - RNA, 32 nt, Homo Sapiens
gagagcgagggagggagcgcagggccagagcg

SEQ ID NO: 414091 - RNA, 32 nt, Homo Sapiens
ucgggcugccagcccagcuggccggaaggaga

SEQ ID NO: 414092 - RNA, 32 nt, Homo Sapiens
ggaugcuguggugcccucuccuucucccuuug

SEQ ID NO: 414093 - RNA, 32 nt, Homo Sapiens
aacaccuggcaugguagauuauagaaagagac

SEQ ID NO: 414094 - RNA, 32 nt, Homo Sapiens
cgcccccaaccagcugcccccagcucucccug

SEQ ID NO: 414095 - RNA, 32 nt, Homo Sapiens
cacacacacacacacacacacacacacagaac

SEQ ID NO: 414096 - RNA, 32 nt, Homo Sapiens
ccucaauggagacaccaccuggcugcccaucc

SEQ ID NO: 414097 - RNA, 32 nt, Homo Sapiens
acucucugaggagggagggacacuuacccaag

SEQ ID NO: 414098 - RNA, 32 nt, Homo Sapiens
ggggggacguugagaagaggggugugggaagg

SEQ ID NO: 414099 - RNA, 32 nt, Homo Sapiens
gucagccauuuaccuuuuuuauacaaaugugg

SEQ ID NO: 414100 - RNA, 32 nt, Homo Sapiens
caaaagaaggcacaugucuuauauauugauua

SEQ ID NO: 414101 - RNA, 32 nt, Homo Sapiens
caacugaauaaauagggaccaauucagagaag

SEQ ID NO: 414102 - RNA, 32 nt, Homo Sapiens
ccuaccuucauuucaggagggauuggccgcuu

SEQ ID NO: 414103 - RNA, 32 nt, Homo Sapiens
uccagggcugagaaaucguagagcagugaggc

SEQ ID NO: 414104 - RNA, 32 nt, Homo Sapiens
ugcccaggccugccucccuucccuaggccugg

SEQ ID NO: 414105 - RNA, 32 nt, Homo Sapiens
ggacugaacuguggucaugaaagccaagcaac

SEQ ID NO: 414106 - RNA, 32 nt, Homo Sapiens
uuuuauuauuuuuauuuuguuuaaugucuggu

SEQ ID NO: 414107 - RNA, 32 nt, Homo Sapiens
cccacuccagcauggcuugaacucuuaggggu

SEQ ID NO: 414108 - RNA, 32 nt, Homo Sapiens
cgggaggacaggagaccgcugcugcugcugcc

SEQ ID NO: 414109 - RNA, 32 nt, Homo Sapiens
cagaaacauuugcuggauggaaaauccauaaa

SEQ ID NO: 414110 - RNA, 32 nt, Homo Sapiens
ggugcggcucucggacucugcuccucacucac

SEQ ID NO: 414111 - RNA, 32 nt, Homo Sapiens
ugccuuggagggcugggggaaggagugugugg

SEQ ID NO: 414112 - RNA, 32 nt, Homo Sapiens
gagcugggcaggcacagcguggggaccacgug

SEQ ID NO: 414113 - RNA, 32 nt, Homo Sapiens
ggugcgaggagcggcaggcccgggccgagggc

SEQ ID NO: 414114 - RNA, 32 nt, Homo Sapiens
guaguuaccaaaacucuauuuuuaaaagcuuu

SEQ ID NO: 414115 - RNA, 32 nt, Homo Sapiens
gcccuguuucccuuccuuagcgcuuuuaaguu

SEQ ID NO: 414116 - RNA, 32 nt, Homo Sapiens
cacaaaaaaaauuuuuaaaaauuagcugggca

SEQ ID NO: 414117 - RNA, 32 nt, Homo Sapiens
gacccauagugacaccaguuuugggagauguc

SEQ ID NO: 414118 - RNA, 32 nt, Homo Sapiens
uuguacauguauaaaugucuuguauuuuaauu

SEQ ID NO: 414119 - RNA, 32 nt, Homo Sapiens
acggcagagaucuggaaagacguggagggcau

SEQ ID NO: 414120 - RNA, 32 nt, Homo Sapiens
aacacuuuuuaugacaaaaauuggguggaggg

SEQ ID NO: 414121 - RNA, 32 nt, Homo Sapiens
cugaugcuaucauagcucccaacacugugucu

SEQ ID NO: 414122 - RNA, 32 nt, Homo Sapiens
uuuuuuuuucuuuuuucuuuuucuuuuuuuuu

SEQ ID NO: 414123 - RNA, 32 nt, Homo Sapiens
aagauaauugaaauauuauacuguaacccuuu

SEQ ID NO: 414124 - RNA, 32 nt, Homo Sapiens
uucccuuuaaaaacaucuuuuacaaaucuguc

SEQ ID NO: 414125 - RNA, 32 nt, Homo Sapiens
gagggacuuugccugcccagucuuuggagagc

SEQ ID NO: 414126 - RNA, 32 nt, Homo Sapiens
cucccuuugggaauucauuuuauuaaaaauug

SEQ ID NO: 414127 - RNA, 32 nt, Homo Sapiens
ggcccgggacucgcucgcuccucccuccuucc

SEQ ID NO: 414128 - RNA, 32 nt, Homo Sapiens
caagcugcccagcccuggcccaggugccccga

SEQ ID NO: 414129 - RNA, 32 nt, Homo Sapiens
aaaaccuguauuuauuugagcuauuuaaggau

SEQ ID NO: 414130 - RNA, 32 nt, Homo Sapiens
aggauugcugucagccuaguuucuuucuggga

SEQ ID NO: 414131 - RNA, 32 nt, Homo Sapiens
cuuuuggaggauucuuuuuguauaacuucaau

SEQ ID NO: 414132 - RNA, 32 nt, Homo Sapiens
guccccucgccgaggcugcagcaccgcccccc

SEQ ID NO: 414133 - RNA, 32 nt, Homo Sapiens
agagcugccgccaggccuccucauggugaugc

SEQ ID NO: 414134 - RNA, 32 nt, Homo Sapiens
gccaaccccugaaaauuuuacaugacauagaa

SEQ ID NO: 414135 - RNA, 32 nt, Homo Sapiens
caaugcaacuccucggccccagacgguaaaaa

SEQ ID NO: 414136 - RNA, 32 nt, Homo Sapiens
ugugccuggugcaccucuggcuuuuaauaaau

SEQ ID NO: 414137 - RNA, 32 nt, Homo Sapiens
auuuuuaauaacaugcaugggucccucucacu

SEQ ID NO: 414138 - RNA, 32 nt, Homo Sapiens
aaacaaaugaacgauuaucgagacaagucacc

SEQ ID NO: 414139 - RNA, 32 nt, Homo Sapiens
cucagcccucccccacccacaggcccagccuc

SEQ ID NO: 414140 - RNA, 32 nt, Homo Sapiens
agcacugguuugcaugaguuuguuuccacgcc

SEQ ID NO: 414141 - RNA, 32 nt, Homo Sapiens
agugcugggcuccagauggcgccgggucccaa

SEQ ID NO: 414142 - RNA, 31 nt, Homo Sapiens
gcggccucacggagauggcucuugacucgga

SEQ ID NO: 414143 - RNA, 27 nt, Homo Sapiens
ucuagauccuucuuuugcugccagcug

SEQ ID NO: 414144 - RNA, 32 nt, Homo Sapiens
caggaggcuggguauuguccugccucugccuu

SEQ ID NO: 414145 - RNA, 32 nt, Homo Sapiens
auaauccgccccugguggguggcacucucagg

SEQ ID NO: 414146 - RNA, 32 nt, Homo Sapiens
uauaugcaauuaacaugcauaugaaaaacauc

SEQ ID NO: 414147 - RNA, 32 nt, Homo Sapiens
agucuguguuaauaaacuuguguaucacucug

SEQ ID NO: 414148 - RNA, 32 nt, Homo Sapiens
guguugcugucauggccucggacaggcagagg

SEQ ID NO: 414149 - RNA, 31 nt, Homo Sapiens
gcacugcugccggguggccaggguauggggc

SEQ ID NO: 414150 - RNA, 32 nt, Homo Sapiens
aaagcaucuacuguggcggcggcuccucuucu

SEQ ID NO: 414151 - RNA, 32 nt, Homo Sapiens
aggagucucgcugagcucgaggagguggcgcg

SEQ ID NO: 414152 - RNA, 32 nt, Homo Sapiens
uguggaggagaaccaccugcaggacccucacc

SEQ ID NO: 414153 - RNA, 32 nt, Homo Sapiens
ggcggggcuggcggcagcggcggaggaggagu

SEQ ID NO: 414154 - RNA, 32 nt, Homo Sapiens
gacagagucucgcucuuucacccaggcuggag

SEQ ID NO: 414155 - RNA, 32 nt, Homo Sapiens
cacagcugccagccaucuguccauucacccau

SEQ ID NO: 414156 - RNA, 32 nt, Homo Sapiens
caggaauguauuuauccuuucaaaucaauaug

SEQ ID NO: 414157 - RNA, 32 nt, Homo Sapiens
cgccgcagcgcgacucgggagccccgggccac

SEQ ID NO: 414158 - RNA, 32 nt, Homo Sapiens
cucucucaggaagagggcaggucagggauugg

SEQ ID NO: 414159 - RNA, 32 nt, Homo Sapiens
agaggccauaccuaauaaaaauauugacauca

SEQ ID NO: 414160 - RNA, 32 nt, Homo Sapiens
uuccccaggcuugucccagcacugccgcuccc

SEQ ID NO: 414161 - RNA, 30 nt, Homo Sapiens
uaacccgagaugcugcugccggcgcccgcg

SEQ ID NO: 414162 - RNA, 32 nt, Homo Sapiens
gcagagucugcggacccggcgccgaggcggcc

SEQ ID NO: 414163 - RNA, 32 nt, Homo Sapiens
ucuuuggcucugcuguagucugauuggaggag

SEQ ID NO: 414164 - RNA, 32 nt, Homo Sapiens
aagcagucaucccaccucagccucccaaguag

SEQ ID NO: 414165 - RNA, 32 nt, Homo Sapiens
cggggcagccccagcccugggaccaccauucc

SEQ ID NO: 414166 - RNA, 32 nt, Homo Sapiens
gaacugucaguuccugcaugaagcacagacuu

SEQ ID NO: 414167 - RNA, 32 nt, Homo Sapiens
ugcgaauuugaaagaagaaaaccagauggaac

SEQ ID NO: 414168 - RNA, 32 nt, Homo Sapiens
cccaccuuguuaauuuuuaagcacuaaaauuu

SEQ ID NO: 414169 - RNA, 32 nt, Homo Sapiens
aaucaaucucaacaagauauucuucaagaaaa

SEQ ID NO: 414170 - RNA, 32 nt, Homo Sapiens
uuucagugccauuuguuaaaaagacuguuauu

SEQ ID NO: 414171 - RNA, 32 nt, Homo Sapiens
gcaacauggacacaaacuuaugauagggccag

SEQ ID NO: 414172 - RNA, 32 nt, Homo Sapiens
guucccauagcucugggaauuccuccagacuu

SEQ ID NO: 414173 - RNA, 32 nt, Homo Sapiens
cgucaaaucugugccuuauggagggguccggc

SEQ ID NO: 414174 - RNA, 32 nt, Homo Sapiens
uugcagugucguaggcugugugugucuguaaa

SEQ ID NO: 414175 - RNA, 32 nt, Homo Sapiens
gccaugagccagcagacuguuucccauuggcc

SEQ ID NO: 414176 - RNA, 32 nt, Homo Sapiens
agcgcuccacucgcugccgccggagggccggu

SEQ ID NO: 414177 - RNA, 32 nt, Homo Sapiens
agacccucagagcuggaggugugcagacuggu

SEQ ID NO: 414178 - RNA, 31 nt, Homo Sapiens
cacagggaagugacuuugcuacaaauaaugu

SEQ ID NO: 414179 - RNA, 32 nt, Homo Sapiens
uguuuaugguaaaaaauuuauaacguguucaa

SEQ ID NO: 414180 - RNA, 32 nt, Homo Sapiens
gccacuguuggaagcugcuugugaugcgccug

SEQ ID NO: 414181 - RNA, 32 nt, Homo Sapiens
cuuaaauuugguuuguuaauucuuauuuuaga

SEQ ID NO: 414182 - RNA, 32 nt, Homo Sapiens
uaauaccucugggcagaauccaaauacugggu

SEQ ID NO: 414183 - RNA, 32 nt, Homo Sapiens
aggcuaaagggaggccuggaacgguggggcgu

SEQ ID NO: 414184 - RNA, 32 nt, Homo Sapiens
ccaccagcaucccuccucuccccaaggugaag

SEQ ID NO: 414185 - RNA, 32 nt, Homo Sapiens
augccugccuucuaauauauuugggugaguaa

SEQ ID NO: 414186 - RNA, 32 nt, Homo Sapiens
agaggcagagagcggucucaggcuggugggag

SEQ ID NO: 414187 - RNA, 32 nt, Homo Sapiens
aggggccgccuccggcucguggcaccuggcgu

SEQ ID NO: 414188 - RNA, 32 nt, Homo Sapiens
cgaaaccgcggcgcgccgcccuccgccguuau

SEQ ID NO: 414189 - RNA, 32 nt, Homo Sapiens
ggggcgcucguaggguugggggacgccugugg

SEQ ID NO: 414190 - RNA, 32 nt, Homo Sapiens
cauaagaaguuaaucaccuugccaguggggug

SEQ ID NO: 414191 - RNA, 32 nt, Homo Sapiens
aaauucucguccuuuuucauuacuaucaaacu

SEQ ID NO: 414192 - RNA, 32 nt, Homo Sapiens
gagaagaggugauaaacauaguagggaaggga

SEQ ID NO: 414193 - RNA, 32 nt, Homo Sapiens
gggucgggggguaacuguggggaucacugccu

SEQ ID NO: 414194 - RNA, 32 nt, Homo Sapiens
ccggaaggggcuuguagcuuuuuuacgucaac

SEQ ID NO: 414195 - RNA, 32 nt, Homo Sapiens
acgccagggacacgugggcugaagagccaggg

SEQ ID NO: 414196 - RNA, 32 nt, Homo Sapiens
cagaagagguaacagcucagucuuccagggga

SEQ ID NO: 414197 - RNA, 32 nt, Homo Sapiens
ucuuugauuugccauauauaaaauaggugggu

SEQ ID NO: 414198 - RNA, 32 nt, Homo Sapiens
uggggaaauauuccaccugauaauagcccaga

SEQ ID NO: 414199 - RNA, 32 nt, Homo Sapiens
auauauuaucuaaaauguccaguuucucacaa

SEQ ID NO: 414200 - RNA, 32 nt, Homo Sapiens
ggaacagcccucgcaagcagcagggaucagcc

SEQ ID NO: 414201 - RNA, 32 nt, Homo Sapiens
aguggaagaguuguaaauuugcuucuggccuu

SEQ ID NO: 414202 - RNA, 32 nt, Homo Sapiens
gaaggaacaaagucuaugaguccuaaaauuuu

SEQ ID NO: 414203 - RNA, 32 nt, Homo Sapiens
guguggguguucgucggggggcagaugacacg

SEQ ID NO: 414204 - RNA, 32 nt, Homo Sapiens
cugaguccucugcaugaguucugcaccccaag

SEQ ID NO: 414205 - RNA, 32 nt, Homo Sapiens
ccuuauucauucaaaccauacguuuuccucug

SEQ ID NO: 414206 - RNA, 32 nt, Homo Sapiens
gcugccuccugggagcccagaacuugcaguaa

SEQ ID NO: 414207 - RNA, 32 nt, Homo Sapiens
gagccagaccuggcccggggacacaucuccug

SEQ ID NO: 414208 - RNA, 32 nt, Homo Sapiens
gccacagguacugcugauuauaaggccaguaa

SEQ ID NO: 414209 - RNA, 32 nt, Homo Sapiens
aucccccacgcaggaccaacuaccuccgucag

SEQ ID NO: 414210 - RNA, 32 nt, Homo Sapiens
gccaguucuccucuucucucuaauccauccgu

SEQ ID NO: 414211 - RNA, 32 nt, Homo Sapiens
ucccugucugaagagggagaugagacagcucu

SEQ ID NO: 414212 - RNA, 32 nt, Homo Sapiens
acccaggcuacgagcgggagggaggcgggagu

SEQ ID NO: 414213 - RNA, 32 nt, Homo Sapiens
uuuuuugugguuuuuuuuuuuaaacaaauuuu

SEQ ID NO: 414214 - RNA, 32 nt, Homo Sapiens
auaacacauaucuagauuuuucugcucgcaug

SEQ ID NO: 414215 - RNA, 32 nt, Homo Sapiens
auaaccuaaaaauaaauuuuaguuugcuaaaa

SEQ ID NO: 414216 - RNA, 32 nt, Homo Sapiens
ucugucucuaaaggguuaaauguaucaauugg

SEQ ID NO: 414217 - RNA, 32 nt, Homo Sapiens
aauucuuuuccacagcuuaagaguaccucauc

SEQ ID NO: 414218 - RNA, 32 nt, Homo Sapiens
uucuccucuggggaagaccuugucccaacucg

SEQ ID NO: 414219 - RNA, 32 nt, Homo Sapiens
cuaaacucagaaacaauuaccaaaaaauacau

SEQ ID NO: 414220 - RNA, 32 nt, Homo Sapiens
ccuucucugccagccgcguguauccuaaggag

SEQ ID NO: 414221 - RNA, 32 nt, Homo Sapiens
gcggaggaccgagaggcgacggccaggcugcg

SEQ ID NO: 414222 - RNA, 32 nt, Homo Sapiens
ugagguuuuuauuuuuguuuacuucagauacg

SEQ ID NO: 414223 - RNA, 32 nt, Homo Sapiens
guagcauuuugugucuuuacuccacccuucac

SEQ ID NO: 414224 - RNA, 32 nt, Homo Sapiens
cucaggaagauaaccaacaguaucccuugaaa

SEQ ID NO: 414225 - RNA, 32 nt, Homo Sapiens
ccccugcaggccaagaucuuugcuaaaggcca

SEQ ID NO: 414226 - RNA, 32 nt, Homo Sapiens
aucccuuucuucccuucccaucucaggcucuc

SEQ ID NO: 414227 - RNA, 31 nt, Homo Sapiens
gaaggcagcagagggucuccaagggcaucac

SEQ ID NO: 414228 - RNA, 32 nt, Homo Sapiens
gaccgugaccaccuggcaugggcuucguggcc

SEQ ID NO: 414229 - RNA, 32 nt, Homo Sapiens
gcccacuguguuuuuaaaccacuuccacuuuc

SEQ ID NO: 414230 - RNA, 32 nt, Homo Sapiens
aauuauaaaaauugaggcaaagagagccccau

SEQ ID NO: 414231 - RNA, 32 nt, Homo Sapiens
ccucuuugaagacggagcugccccagcugugg

SEQ ID NO: 414232 - RNA, 32 nt, Homo Sapiens
uggcccagacugccagcccugacgggacagag

SEQ ID NO: 414233 - RNA, 32 nt, Homo Sapiens
ggacucagcacacuccugggaaucuuguacga

SEQ ID NO: 414234 - RNA, 32 nt, Homo Sapiens
ugcagcaggacacgccgacaguggccucgggu

SEQ ID NO: 414235 - RNA, 32 nt, Homo Sapiens
gagaaaacaaaauaaaucaacuuuuuaaaaaa

SEQ ID NO: 414236 - RNA, 32 nt, Homo Sapiens
ggggccugaugagacuccacucaggugcacac

SEQ ID NO: 414237 - RNA, 32 nt, Homo Sapiens
uuaauaagugaauaaguaaauguaucaaguug

SEQ ID NO: 414238 - RNA, 32 nt, Homo Sapiens
gcugucaagguagauuccaggguguggaagug

SEQ ID NO: 414239 - RNA, 31 nt, Homo Sapiens
caggcgagcacucucgugccccgccggagcg

SEQ ID NO: 414240 - RNA, 32 nt, Homo Sapiens
uuuagagaugacuguggaaggcugccuggaag

SEQ ID NO: 414241 - RNA, 32 nt, Homo Sapiens
aauauuucaaauaugcagaaaaauaauaauau

SEQ ID NO: 414242 - RNA, 32 nt, Homo Sapiens
auugguuugacuguaccaugguuugauaugua

SEQ ID NO: 414243 - RNA, 29 nt, Homo Sapiens
aaguacauagugaauuuuaaaauguagaa

SEQ ID NO: 414244 - RNA, 32 nt, Homo Sapiens
ucuccauuuuuagcacuuggcagccucaugau

SEQ ID NO: 414245 - RNA, 32 nt, Homo Sapiens
accaaagaugaccugugguaagcaaccuggca

SEQ ID NO: 414246 - RNA, 32 nt, Homo Sapiens
uaucugggacaggguuuagaucaugacucuac

SEQ ID NO: 414247 - RNA, 32 nt, Homo Sapiens
ucuuuuuguuuuuggaggaaaagccagggcug

SEQ ID NO: 414248 - RNA, 32 nt, Homo Sapiens
caacugggccccagcucccagcccugggcggc

SEQ ID NO: 414249 - RNA, 32 nt, Homo Sapiens
uggugccaaagaacaacucagcuccuccgcug

SEQ ID NO: 414250 - RNA, 32 nt, Homo Sapiens
uuugaugcuggagagguuaaggugcaauaaga

SEQ ID NO: 414251 - RNA, 32 nt, Homo Sapiens
ggccccaagaucagcucuguccuuugucaucu

SEQ ID NO: 414252 - RNA, 32 nt, Homo Sapiens
agaacggaggggcugacaacugcguguccagu

SEQ ID NO: 414253 - RNA, 32 nt, Homo Sapiens
cgcaaaucaaccccagacucaaacucaagguc

SEQ ID NO: 414254 - RNA, 32 nt, Homo Sapiens
uuuuuucuuucuuuuuuuuuuauuaugguuag

SEQ ID NO: 414255 - RNA, 32 nt, Homo Sapiens
cauggcccacccaaggagagccggcccagcau

SEQ ID NO: 414256 - RNA, 31 nt, Homo Sapiens
gacaguggguucccuauuucaggagaagaaa

SEQ ID NO: 414257 - RNA, 32 nt, Homo Sapiens
ugaaauucaaucaguauaauucaccauagaau

SEQ ID NO: 414258 - RNA, 32 nt, Homo Sapiens
gcaucagggagagcuuccugggggaaguggca

SEQ ID NO: 414259 - RNA, 32 nt, Homo Sapiens
uccugaaguuggggcagugggaugcugacagg

SEQ ID NO: 414260 - RNA, 32 nt, Homo Sapiens
gacuuguuuguucugcuucucuucauauaacu

SEQ ID NO: 414261 - RNA, 32 nt, Homo Sapiens
ccccauucucauuaauaaagguauccauggag

SEQ ID NO: 414262 - RNA, 32 nt, Homo Sapiens
ggugcugaaggcuguggcgcgcggcugucccc

SEQ ID NO: 414263 - RNA, 32 nt, Homo Sapiens
uuucaaaaagcagagagggaaaaacggagagu

SEQ ID NO: 414264 - RNA, 32 nt, Homo Sapiens
guuuuaauugguugcccacaggauugacuugg

SEQ ID NO: 414265 - RNA, 32 nt, Homo Sapiens
uccaccuuccccggaagccucccuuugccagg

SEQ ID NO: 414266 - RNA, 32 nt, Homo Sapiens
uuguguacaccugcaagcacuagccuacugcc

SEQ ID NO: 414267 - RNA, 32 nt, Homo Sapiens
ggccgcuacuagacugcccccggacccugcga

SEQ ID NO: 414268 - RNA, 32 nt, Homo Sapiens
cggacuccgucuccgcggcagggaagcagcau

SEQ ID NO: 414269 - RNA, 32 nt, Homo Sapiens
aaaauaccaccucgagaugggugcugguccug

SEQ ID NO: 414270 - RNA, 32 nt, Homo Sapiens
ccuauggcucccucaaucuucacccacuagga

SEQ ID NO: 414271 - RNA, 32 nt, Homo Sapiens
ugcacaaaucaucgagaucuuguuaaaaugua

SEQ ID NO: 414272 - RNA, 32 nt, Homo Sapiens
acggcccagcuugcgucucuucugccugagug

SEQ ID NO: 414273 - RNA, 31 nt, Homo Sapiens
auggagaaauaaaaguuguuauagucauugc

SEQ ID NO: 414274 - RNA, 32 nt, Homo Sapiens
uaauucuaaaagaagcaugaccucaacagccu

SEQ ID NO: 414275 - RNA, 32 nt, Homo Sapiens
gugaguccagccucaggaacuguccuuucaaa

SEQ ID NO: 414276 - RNA, 32 nt, Homo Sapiens
uacuggugcuccaggcggacaaggcugacaag

SEQ ID NO: 414277 - RNA, 32 nt, Homo Sapiens
agggccagugcagcucagggccacagcuggga

SEQ ID NO: 414278 - RNA, 32 nt, Homo Sapiens
cccuccgucgccgcugccuccucccccacccc

SEQ ID NO: 414279 - RNA, 30 nt, Homo Sapiens
cuacaaugcugcgucucccaucuuaacucu

SEQ ID NO: 414280 - RNA, 32 nt, Homo Sapiens
agacccacuccagauuccggggagugggaaug

SEQ ID NO: 414281 - RNA, 32 nt, Homo Sapiens
uagagucucauaaaagcugccuuuaaauaucc

SEQ ID NO: 414282 - RNA, 32 nt, Homo Sapiens
ugcuguguuccaguuuacuuugaauguuucag

SEQ ID NO: 414283 - RNA, 32 nt, Homo Sapiens
aaaauggaaaccaaacaaaacaacuucaggaa

SEQ ID NO: 414284 - RNA, 32 nt, Homo Sapiens
cuccacacccucacauaaagcauuuggguuug

SEQ ID NO: 414285 - RNA, 32 nt, Homo Sapiens
gaugccggcagagcuuccagaucuuucagacu

SEQ ID NO: 414286 - RNA, 32 nt, Homo Sapiens
cacgguggcugagacugaaugaaaggugaggu

SEQ ID NO: 414287 - RNA, 32 nt, Homo Sapiens
uuggaagaauacugagaacggcauaaagugaa

SEQ ID NO: 414288 - RNA, 32 nt, Homo Sapiens
ggaucccagcaucucagaguccagucaaguuc

SEQ ID NO: 414289 - RNA, 32 nt, Homo Sapiens
acucuccucacagauagugaaaacaggcuauu

SEQ ID NO: 414290 - RNA, 32 nt, Homo Sapiens
auucuugccuuauaccucagucuauuauguaa

SEQ ID NO: 414291 - RNA, 32 nt, Homo Sapiens
gcguccgugcugagccugccugucgucugugg

SEQ ID NO: 414292 - RNA, 32 nt, Homo Sapiens
accauguugaagcccuuggcagccugagagcu

SEQ ID NO: 414293 - RNA, 32 nt, Homo Sapiens
aucugaggcagacccuuggggguguaaaagag

SEQ ID NO: 414294 - RNA, 32 nt, Homo Sapiens
gaaauaaaaguauuuuugugcggggacugcaa

SEQ ID NO: 414295 - RNA, 32 nt, Homo Sapiens
cauuuuauuuuuguucaagauuaucuggcguu

SEQ ID NO: 414296 - RNA, 32 nt, Homo Sapiens
gucauccgcuccgacgaguuguacucccuccu

SEQ ID NO: 414297 - RNA, 32 nt, Homo Sapiens
uggagcauaaaacucugcaagggcuccucuau

SEQ ID NO: 414298 - RNA, 32 nt, Homo Sapiens
gaggguuccuucccagcacucccagccuggga

SEQ ID NO: 414299 - RNA, 32 nt, Homo Sapiens
acaucauaggaugcuaaaaaacaaggacaauc

SEQ ID NO: 414300 - RNA, 32 nt, Homo Sapiens
gugcgcagccugggucggggucgggccggggu

SEQ ID NO: 414301 - RNA, 32 nt, Homo Sapiens
cacacacacacacacacacacacacacaaugu

SEQ ID NO: 414302 - RNA, 32 nt, Homo Sapiens
aaaaucggauacaggaagaaaagggagaggug

SEQ ID NO: 414303 - RNA, 32 nt, Homo Sapiens
aauaauauaucucaugucauuuuuuagaagaa

SEQ ID NO: 414304 - RNA, 32 nt, Homo Sapiens
acugaauauguuuauuaguuccaguuguauuu

SEQ ID NO: 414305 - RNA, 32 nt, Homo Sapiens
ugauguaagucuuuugccugucuucuugagac

SEQ ID NO: 414306 - RNA, 32 nt, Homo Sapiens
cuagaucuccuauuuuucagaaugcucuucua

SEQ ID NO: 414307 - RNA, 32 nt, Homo Sapiens
ccugggguuugaccacccaccugaccaggggc

SEQ ID NO: 414308 - RNA, 32 nt, Homo Sapiens
uauggacccugcugaaagcaguguauugacgc

SEQ ID NO: 414309 - RNA, 32 nt, Homo Sapiens
gcgcggcgccacugcgccugcgccacagcagc

SEQ ID NO: 414310 - RNA, 32 nt, Homo Sapiens
uacaauggcauucaauaaaguguauauguuuc

SEQ ID NO: 414311 - RNA, 30 nt, Homo Sapiens
aagccggagcccgcggggccggcgcucuca

SEQ ID NO: 414312 - RNA, 32 nt, Homo Sapiens
cugcagucagcuugcugcaggccuacaggagu

SEQ ID NO: 414313 - RNA, 32 nt, Homo Sapiens
ucaauuuugucaaaacuguccauuucaucugg

SEQ ID NO: 414314 - RNA, 32 nt, Homo Sapiens
uagagcucaaccuuucccacucuaauuuucca

SEQ ID NO: 414315 - RNA, 32 nt, Homo Sapiens
agugugguuuuugucuggagauguuuucauuu

SEQ ID NO: 414316 - RNA, 29 nt, Homo Sapiens
augaaauaaaguuauuuucucauuccaaa

SEQ ID NO: 414317 - RNA, 32 nt, Homo Sapiens
acccucccuaccugaggccuaucugagacuau

SEQ ID NO: 414318 - RNA, 32 nt, Homo Sapiens
uaaauauaucuaguuuccucuauuaaacacuu

SEQ ID NO: 414319 - RNA, 32 nt, Homo Sapiens
gccccucugccagcagcuccggcgccaccucg

SEQ ID NO: 414320 - RNA, 32 nt, Homo Sapiens
uuuuccagcaugguauuauuaagggauuuaaa

SEQ ID NO: 414321 - RNA, 32 nt, Homo Sapiens
agcuccacccaacuuucccccuccucaaagga

SEQ ID NO: 414322 - RNA, 32 nt, Homo Sapiens
gagggauccagaaguaaugagaugcuaaugag

SEQ ID NO: 414323 - RNA, 32 nt, Homo Sapiens
cgggucuccgccgcucgggacccggcuaggcg

SEQ ID NO: 414324 - RNA, 32 nt, Homo Sapiens
aggugucugucucuggcugagguuuugucuau

SEQ ID NO: 414325 - RNA, 29 nt, Homo Sapiens
gaggucgagugguucugccccccgcugcc

SEQ ID NO: 414326 - RNA, 32 nt, Homo Sapiens
gacugucaauaauaaugauggagaucauuaug

SEQ ID NO: 414327 - RNA, 30 nt, Homo Sapiens
cucagcaucugugcugcgaggccuucucag

SEQ ID NO: 414328 - RNA, 32 nt, Homo Sapiens
ugccugccucccccgcccccagccggugcuca

SEQ ID NO: 414329 - RNA, 32 nt, Homo Sapiens
acagaagauaaaauugucugguuuuuauuuca

SEQ ID NO: 414330 - RNA, 32 nt, Homo Sapiens
acaggaaagacaaacguguuucauaaaauucg

SEQ ID NO: 414331 - RNA, 32 nt, Homo Sapiens
gcuggccucccccaguccccaagccccacugu

SEQ ID NO: 414332 - RNA, 32 nt, Homo Sapiens
accaugcacccguccacgccggucacggccca

SEQ ID NO: 414333 - RNA, 32 nt, Homo Sapiens
uugugaauaauaaggucauacaggcaagaccu

SEQ ID NO: 414334 - RNA, 32 nt, Homo Sapiens
cccccaccgaggcggccuguccccaagggacu

SEQ ID NO: 414335 - RNA, 32 nt, Homo Sapiens
gagagaagccccacugggaucugaguauuccc

SEQ ID NO: 414336 - RNA, 32 nt, Homo Sapiens
uugugauagugacaugauacaaacacuacaga

SEQ ID NO: 414337 - RNA, 32 nt, Homo Sapiens
aggguguuggagcccucggucugccccguccg

SEQ ID NO: 414338 - RNA, 32 nt, Homo Sapiens
agcaaucaacucgugagacauaaagaaggucc

SEQ ID NO: 414339 - RNA, 32 nt, Homo Sapiens
aguagaaauuuaaaaagugcuauacauugcau

SEQ ID NO: 414340 - RNA, 32 nt, Homo Sapiens
cccuuccugcugugucauccgaaacaauaaau

SEQ ID NO: 414341 - RNA, 32 nt, Homo Sapiens
aaagugcuggaacccaaggggacauggagaaa

SEQ ID NO: 414342 - RNA, 32 nt, Homo Sapiens
gaucacuugagcucaggaguucaagaccagcu

SEQ ID NO: 414343 - RNA, 32 nt, Homo Sapiens
auuggggaagggguucugggcugccgcaggca

SEQ ID NO: 414344 - RNA, 32 nt, Homo Sapiens
agagaaagugaugugcgccuucuaaagccucg

SEQ ID NO: 414345 - RNA, 32 nt, Homo Sapiens
ggcggcuccagccccagacaacagcccaggca

SEQ ID NO: 414346 - RNA, 32 nt, Homo Sapiens
uggugcacagggccagauggacaggcgggagg

SEQ ID NO: 414347 - RNA, 32 nt, Homo Sapiens
aauuuuaaaaauuauaaagauguaaauggaau

SEQ ID NO: 414348 - RNA, 32 nt, Homo Sapiens
gccccuuucccuuguagcuccuccccuggagg

SEQ ID NO: 414349 - RNA, 31 nt, Homo Sapiens
cuggggcagcgcagacccucuagcuggggca

SEQ ID NO: 414350 - RNA, 32 nt, Homo Sapiens
uggcaugcaccuguagucccagcuacucagga

SEQ ID NO: 414351 - RNA, 32 nt, Homo Sapiens
ggauugaaagcuucaaaauuugaaagaauucc

SEQ ID NO: 414352 - RNA, 32 nt, Homo Sapiens
gaucuuagguuccaagauuuuacuucaaauua

SEQ ID NO: 414353 - RNA, 32 nt, Homo Sapiens
agcgggcgguauucgcggacuccggcggcccu

SEQ ID NO: 414354 - RNA, 32 nt, Homo Sapiens
cccauggauuugaaagaagcugcugcacccga

SEQ ID NO: 414355 - RNA, 32 nt, Homo Sapiens
uuccuccacccgcuccucuuguggccagaaga

SEQ ID NO: 414356 - RNA, 32 nt, Homo Sapiens
agauaaugcugggauuuugaccugaagaagca

SEQ ID NO: 414357 - RNA, 32 nt, Homo Sapiens
ugaggaucccgucaugggggaagguccuugag

SEQ ID NO: 414358 - RNA, 32 nt, Homo Sapiens
agcgggcucugcgucccgggagcuggggacac

SEQ ID NO: 414359 - RNA, 32 nt, Homo Sapiens
ggagaccuggggaggggguaguacuugggccg

SEQ ID NO: 414360 - RNA, 32 nt, Homo Sapiens
cuugucuuucuaaauuuuuuggauggccauca

SEQ ID NO: 414361 - RNA, 32 nt, Homo Sapiens
gaagugguguauaaaaaugucaaauaaacagg

SEQ ID NO: 414362 - RNA, 32 nt, Homo Sapiens
auugacucaaucccacauauauuuacauuuga

SEQ ID NO: 414363 - RNA, 32 nt, Homo Sapiens
uuccacccuggcugcuggcccuuugcccuuga

SEQ ID NO: 414364 - RNA, 32 nt, Homo Sapiens
aacaagaaauccggacuuuugcucuccauccu

SEQ ID NO: 414365 - RNA, 32 nt, Homo Sapiens
uccuggagcagcagcagcugcccgugcaggcc

SEQ ID NO: 414366 - RNA, 32 nt, Homo Sapiens
auccuaaauuuaugacuaaaaauucccccaaa

SEQ ID NO: 414367 - RNA, 32 nt, Homo Sapiens
uggagauugacugucagcgcauggucgugcgg

SEQ ID NO: 414368 - RNA, 32 nt, Homo Sapiens
gccccgucaccuggggccccagcaccucuccu

SEQ ID NO: 414369 - RNA, 32 nt, Homo Sapiens
gcauaucauuggcguauggcacucauuaaaaa

SEQ ID NO: 414370 - RNA, 32 nt, Homo Sapiens
ucuuggaugauuaacugacucugagaauauug

SEQ ID NO: 414371 - RNA, 32 nt, Homo Sapiens
uuauuauucacagauggggagaaccuaucugc

SEQ ID NO: 414372 - RNA, 32 nt, Homo Sapiens
agaagauaucugcaugagaccuuaagaacucu

SEQ ID NO: 414373 - RNA, 32 nt, Homo Sapiens
caagauaaauuaaaguuauuauaacagugauu

SEQ ID NO: 414374 - RNA, 32 nt, Homo Sapiens
uucucagcaaauuuauaucaccaucuuagaau

SEQ ID NO: 414375 - RNA, 32 nt, Homo Sapiens
ccucccuccucgcgcacgggguacugaggcgg

SEQ ID NO: 414376 - RNA, 32 nt, Homo Sapiens
uauauucauaauuuauauaauaauuuguuccu

SEQ ID NO: 414377 - RNA, 32 nt, Homo Sapiens
accgaggucccacuucuguuucgaggcagaag

SEQ ID NO: 414378 - RNA, 32 nt, Homo Sapiens
gucuucucccucugcccuccaacagcuucuua

SEQ ID NO: 414379 - RNA, 32 nt, Homo Sapiens
gacccggcgagcgcgcccucggcuggcgagcg

SEQ ID NO: 414380 - RNA, 32 nt, Homo Sapiens
auggucuagggaugcaggauccccgcccuggg

SEQ ID NO: 414381 - RNA, 32 nt, Homo Sapiens
uucuuauuugaaaaguugaaauuuaugagcuu

SEQ ID NO: 414382 - RNA, 32 nt, Homo Sapiens
ggcugagcccuucuuuucccucuuuuuuccug

SEQ ID NO: 414383 - RNA, 32 nt, Homo Sapiens
aaaucagaacugugucucccuccugcacgaau

SEQ ID NO: 414384 - RNA, 32 nt, Homo Sapiens
ggccggcuccguugcugaccgccgacugucaa

SEQ ID NO: 414385 - RNA, 27 nt, Homo Sapiens
ugauccaccugccucagccccccaaag

SEQ ID NO: 414386 - RNA, 32 nt, Homo Sapiens
gucagagugagagccaguggccacagcugcag

SEQ ID NO: 414387 - RNA, 32 nt, Homo Sapiens
ucccuggugggguggggcccccuggggcagga

SEQ ID NO: 414388 - RNA, 32 nt, Homo Sapiens
cuuuuguucccccuccuucuuuuguaaaggca

SEQ ID NO: 414389 - RNA, 32 nt, Homo Sapiens
ggaaacuaucuaugaaacauguuuugcauuag

SEQ ID NO: 414390 - RNA, 32 nt, Homo Sapiens
ccuccuuucaaucgcugcggaccucagagugg

SEQ ID NO: 414391 - RNA, 32 nt, Homo Sapiens
ugugcucacuauuucuggucuuuucagaggau

SEQ ID NO: 414392 - RNA, 32 nt, Homo Sapiens
gaauuccacagacacauauguuguguacauac

SEQ ID NO: 414393 - RNA, 32 nt, Homo Sapiens
ccugcucugcaccagacccugacccagauguu

SEQ ID NO: 414394 - RNA, 32 nt, Homo Sapiens
gguuaaaaacaaaaacaaaacacuggaaggaa

SEQ ID NO: 414395 - RNA, 32 nt, Homo Sapiens
cugugcccgucgcguccccugcuugaguuuug

SEQ ID NO: 414396 - RNA, 32 nt, Homo Sapiens
aucuucagagagcucagacucucuaaugaugc

SEQ ID NO: 414397 - RNA, 32 nt, Homo Sapiens
uggacgcaaagauaggugucuucagcuuugca

SEQ ID NO: 414398 - RNA, 32 nt, Homo Sapiens
agcgauuccgauggguccuuugaaagcuuuuc

SEQ ID NO: 414399 - RNA, 32 nt, Homo Sapiens
gccgcgccggacgcgccgucucccgggacaag

SEQ ID NO: 414400 - RNA, 32 nt, Homo Sapiens
cugcggacauaaauaggcagccagcagaggca

SEQ ID NO: 414401 - RNA, 32 nt, Homo Sapiens
cccccgcgcgcccacccacacucacuccaugc

SEQ ID NO: 414402 - RNA, 32 nt, Homo Sapiens
uucuaagggcuuuagaguaagcagccuuuuca

SEQ ID NO: 414403 - RNA, 32 nt, Homo Sapiens
uuuccuauuuuugaaaucugaacaugaaucau

SEQ ID NO: 414404 - RNA, 32 nt, Homo Sapiens
acaaucucggcuccccacaaccucugacucca

SEQ ID NO: 414405 - RNA, 32 nt, Homo Sapiens
aaaauguaguagugauaccuauauuuccacau

SEQ ID NO: 414406 - RNA, 32 nt, Homo Sapiens
cuuccgagagggcaaugcugcccgccuguucc

SEQ ID NO: 414407 - RNA, 32 nt, Homo Sapiens
aucauaauuuaaaauuaaauucuaagaagagg

SEQ ID NO: 414408 - RNA, 32 nt, Homo Sapiens
accggcugccagccaucuggcccaccccaccc

SEQ ID NO: 414409 - RNA, 32 nt, Homo Sapiens
gcugggcaccguucuguuuucuuucuuuucuu

SEQ ID NO: 414410 - RNA, 32 nt, Homo Sapiens
aguggagacagacugauguguauacguaggaa

SEQ ID NO: 414411 - RNA, 32 nt, Homo Sapiens
uguuccaggaggagguuugagcugagcucagg

SEQ ID NO: 414412 - RNA, 32 nt, Homo Sapiens
cagaaaaaaaaauuagcugggagugguggcac

SEQ ID NO: 414413 - RNA, 31 nt, Homo Sapiens
uuccagaguuacuguugaaaucugcaucacc

SEQ ID NO: 414414 - RNA, 32 nt, Homo Sapiens
acgaagucaggagaucgagaccaucuuggcua

SEQ ID NO: 414415 - RNA, 32 nt, Homo Sapiens
gagcaggaagcgagcagaggcuccacaggcuu

SEQ ID NO: 414416 - RNA, 32 nt, Homo Sapiens
agugcuccuuggccugggaccccguccagugu

SEQ ID NO: 414417 - RNA, 32 nt, Homo Sapiens
auaaaaacaacaaauacuuccauauggagcau

SEQ ID NO: 414418 - RNA, 32 nt, Homo Sapiens
cuguguauuuugauuuccuguguaugcaaaug

SEQ ID NO: 414419 - RNA, 32 nt, Homo Sapiens
acaacagucuuuucuucaggacucaaguugcu

SEQ ID NO: 414420 - RNA, 32 nt, Homo Sapiens
agggagacucagccuuccuccucauccucccu

SEQ ID NO: 414421 - RNA, 32 nt, Homo Sapiens
ccgcugcugggcuggcgggcgggcagagcacg

SEQ ID NO: 414422 - RNA, 32 nt, Homo Sapiens
aaggaacaaaaauuauauguuucaggccgggc

SEQ ID NO: 414423 - RNA, 32 nt, Homo Sapiens
gagggaugcuggaaccaguuacgacugaaguc

SEQ ID NO: 414424 - RNA, 32 nt, Homo Sapiens
ucccagagguggauccucccucauggcucugg

SEQ ID NO: 414425 - RNA, 32 nt, Homo Sapiens
gugugucuuccuccccggcgggagcccacaug

SEQ ID NO: 414426 - RNA, 32 nt, Homo Sapiens
acucugcuuuugcuagaacuuucccccaucag

SEQ ID NO: 414427 - RNA, 32 nt, Homo Sapiens
uccucucacugcuagaauauucaccaaggguu

SEQ ID NO: 414428 - RNA, 32 nt, Homo Sapiens
gaacuucgaccacuuccagauccuucgggcca

SEQ ID NO: 414429 - RNA, 32 nt, Homo Sapiens
uggaccuccagcugcccugacuccccucugga

SEQ ID NO: 414430 - RNA, 32 nt, Homo Sapiens
ccucugaaguaaauuauaucauugaaagacca

SEQ ID NO: 414431 - RNA, 32 nt, Homo Sapiens
cccaggaggcagccuucccuuuugccuuaagu

SEQ ID NO: 414432 - RNA, 32 nt, Homo Sapiens
ggggucccacugacuaacuuuucugagagugg

SEQ ID NO: 414433 - RNA, 32 nt, Homo Sapiens
caagugggccugauuuagcaggugguccugcg

SEQ ID NO: 414434 - RNA, 32 nt, Homo Sapiens
cauguugucuguguuguguuaugugagaauuu

SEQ ID NO: 414435 - RNA, 32 nt, Homo Sapiens
uuaaauggaaguauuuuugggaaaagagaaac

SEQ ID NO: 414436 - RNA, 30 nt, Homo Sapiens
gagggaccgguugccaccgccauacuucug

SEQ ID NO: 414437 - RNA, 32 nt, Homo Sapiens
acuugucaugauuuugacgguaagccaccaug

SEQ ID NO: 414438 - RNA, 28 nt, Homo Sapiens
uuaaugugggaauucagaggaaagcuau

SEQ ID NO: 414439 - RNA, 32 nt, Homo Sapiens
ugugauggacggguguucugugguggaugguu

SEQ ID NO: 414440 - RNA, 32 nt, Homo Sapiens
gaugcaucuuucccuuuccuauaauguauuuc

SEQ ID NO: 414441 - RNA, 32 nt, Homo Sapiens
cgucgucccggccacgcucgacgcugcugcag

SEQ ID NO: 414442 - RNA, 32 nt, Homo Sapiens
cgggagaagggagaggagugacauccguuugu

SEQ ID NO: 414443 - RNA, 32 nt, Homo Sapiens
gggggaauuugugacccuggaacauccccaga

SEQ ID NO: 414444 - RNA, 32 nt, Homo Sapiens
aucagcuuugaaaaacaggaugauaaaaugga

SEQ ID NO: 414445 - RNA, 31 nt, Homo Sapiens
uagugggaauuaaaacagguucagagaagag

SEQ ID NO: 414446 - RNA, 32 nt, Homo Sapiens
ucuaucuguguccggcggccccagcuccagcc

SEQ ID NO: 414447 - RNA, 32 nt, Homo Sapiens
ccgaagagcugggauuacacgcauacaagacc

SEQ ID NO: 414448 - RNA, 30 nt, Homo Sapiens
gccagugcagguggcaugaacugcauggag

SEQ ID NO: 414449 - RNA, 32 nt, Homo Sapiens
ucaaguugcuaagagugaucugucccagaaaa

SEQ ID NO: 414450 - RNA, 32 nt, Homo Sapiens
agaccuuccccucccuauccccaacuuuaaag

SEQ ID NO: 414451 - RNA, 32 nt, Homo Sapiens
cugcgcuaaaccccggccccagcgcaccuugg

SEQ ID NO: 414452 - RNA, 32 nt, Homo Sapiens
guggauucacaugauccaauuuuuuaauuguc

SEQ ID NO: 414453 - RNA, 32 nt, Homo Sapiens
uccggcgugccgcucuucuccuccaggccggc

SEQ ID NO: 414454 - RNA, 32 nt, Homo Sapiens
ugggagaggcacugcucuggggccugaacugc

SEQ ID NO: 414455 - RNA, 32 nt, Homo Sapiens
aaacuguauauuucauauguaccuguuaaggu

SEQ ID NO: 414456 - RNA, 32 nt, Homo Sapiens
aguauggacuuccagugaaguagugacggaag

SEQ ID NO: 414457 - RNA, 32 nt, Homo Sapiens
cucugcccaucccugcccucugcacacaaagc

SEQ ID NO: 414458 - RNA, 32 nt, Homo Sapiens
cagcuuugucuccucagcacucugcugucacu

SEQ ID NO: 414459 - RNA, 32 nt, Homo Sapiens
gacuguucagagacugcccagcccuagggcac

SEQ ID NO: 414460 - RNA, 32 nt, Homo Sapiens
agugcgccugcgccgcgucggcgugcggaacg

SEQ ID NO: 414461 - RNA, 32 nt, Homo Sapiens
accagguuuguguuuucuuaaaauaaaaugca

SEQ ID NO: 414462 - RNA, 32 nt, Homo Sapiens
ucuuaacuuuucaaagaaauuuuuagauggag

SEQ ID NO: 414463 - RNA, 32 nt, Homo Sapiens
uacauuucccuaaugauuuaugaugcugaacu

SEQ ID NO: 414464 - RNA, 32 nt, Homo Sapiens
cuaaaguuauuuacugaaaauuucaguaaaau

SEQ ID NO: 414465 - RNA, 32 nt, Homo Sapiens
uuuuuuagcaauuuauaauuuuaaaauggaau

SEQ ID NO: 414466 - RNA, 32 nt, Homo Sapiens
agcccagugagcucagcuuuaaggauggaguc

SEQ ID NO: 414467 - RNA, 32 nt, Homo Sapiens
ucacuuuuuuaaaauguauguauuuuuuauag

SEQ ID NO: 414468 - RNA, 32 nt, Homo Sapiens
aggucugggugccccuuuuccuccccugggaa

SEQ ID NO: 414469 - RNA, 32 nt, Homo Sapiens
gaacaaaaguggaauaaauaaaaacuaacugu

SEQ ID NO: 414470 - RNA, 32 nt, Homo Sapiens
cacuccuccccucccccacacucacagucugu

SEQ ID NO: 414471 - RNA, 32 nt, Homo Sapiens
cuuccgugcccgcuccaccucuguucuguugu

SEQ ID NO: 414472 - RNA, 31 nt, Homo Sapiens
gcaggaaugcagcagagaggacucgccaucg

SEQ ID NO: 414473 - RNA, 32 nt, Homo Sapiens
ucccuuuuucccuuuuaaaaugcuuccucaac

SEQ ID NO: 414474 - RNA, 32 nt, Homo Sapiens
gucagggaaagagaggagacugucccagagac

SEQ ID NO: 414475 - RNA, 32 nt, Homo Sapiens
ggaaagggcuagagacacgaagaacgcaaacc

SEQ ID NO: 414476 - RNA, 32 nt, Homo Sapiens
uuccuauuaaauguucuuucugagaaaaaaaa

SEQ ID NO: 414477 - RNA, 32 nt, Homo Sapiens
aagaagaauuggagccuaauagcugauuccuc

SEQ ID NO: 414478 - RNA, 32 nt, Homo Sapiens
ucucacgugucuguguaagaucaugcaagaga

SEQ ID NO: 414479 - RNA, 32 nt, Homo Sapiens
gggaggaggaggagggacugagcggcggcggc

SEQ ID NO: 414480 - RNA, 32 nt, Homo Sapiens
aacuucagugcuuccuaaauguuuauacucau

SEQ ID NO: 414481 - RNA, 32 nt, Homo Sapiens
guagacagaaugugauuguguauuuugugcau

SEQ ID NO: 414482 - RNA, 32 nt, Homo Sapiens
guucaggguuccuuaugcagagaaauaaagca

SEQ ID NO: 414483 - RNA, 32 nt, Homo Sapiens
cgcggccuggggcgcugacuccccucacuugg

SEQ ID NO: 414484 - RNA, 32 nt, Homo Sapiens
ugcccaagcugaucuugaacuccugguuucaa

SEQ ID NO: 414485 - RNA, 32 nt, Homo Sapiens
cgugggaagaccggggcgccugggcggggaga

SEQ ID NO: 414486 - RNA, 32 nt, Homo Sapiens
acuaaccguuccgccgcccacccucugcuaga

SEQ ID NO: 414487 - RNA, 32 nt, Homo Sapiens
uuccauauuuuuccccacuaugguagacaacc

SEQ ID NO: 414488 - RNA, 32 nt, Homo Sapiens
uccugcucuccucugcccuuucugaaaaggac

SEQ ID NO: 414489 - RNA, 32 nt, Homo Sapiens
guggccagcaacgcaacccgggcggacagcgu

SEQ ID NO: 414490 - RNA, 32 nt, Homo Sapiens
cacggggaauggggcugagagccgguucccgc

SEQ ID NO: 414491 - RNA, 32 nt, Homo Sapiens
agccgagcccggcuggaaggcagagcuccgaa

SEQ ID NO: 414492 - RNA, 32 nt, Homo Sapiens
aauaauauuuauauuucuguaaauguaaacug

SEQ ID NO: 414493 - RNA, 30 nt, Homo Sapiens
cgcacgggguggcgcgcgugggacccgagg

SEQ ID NO: 414494 - RNA, 32 nt, Homo Sapiens
uguuuauagugcucuguaaauguuccuuuccu

SEQ ID NO: 414495 - RNA, 32 nt, Homo Sapiens
uuaucaacuaauuuuuucagaucaguaucuuc

SEQ ID NO: 414496 - RNA, 32 nt, Homo Sapiens
agaacuccugacgcccagcccuguccccuacc

SEQ ID NO: 414497 - RNA, 28 nt, Homo Sapiens
aaaugguuaaguuuacauuugaacugaa

SEQ ID NO: 414498 - RNA, 32 nt, Homo Sapiens
acgaggucagcaaacuaucauguucuuaugua

SEQ ID NO: 414499 - RNA, 32 nt, Homo Sapiens
cagauuguaacagauagcuucaugcacacucu

SEQ ID NO: 414500 - RNA, 32 nt, Homo Sapiens
guguccacgacaagaaaaauaguuuuuacaaa

SEQ ID NO: 414501 - RNA, 32 nt, Homo Sapiens
uguggaggcggccagcgugugcauggggcaga

SEQ ID NO: 414502 - RNA, 32 nt, Homo Sapiens
aagagaagauggaccggcucuugcucccagcu

SEQ ID NO: 414503 - RNA, 32 nt, Homo Sapiens
ccagaguuucggacagcccagccccgcccuuu

SEQ ID NO: 414504 - RNA, 32 nt, Homo Sapiens
auacaggccacaucgccgucuccaacgucagg

SEQ ID NO: 414505 - RNA, 32 nt, Homo Sapiens
uguuuguuuuguuucuuuucuacauuuuuaag

SEQ ID NO: 414506 - RNA, 32 nt, Homo Sapiens
uuacugccuuguacuuuucucauacaccaaaa

SEQ ID NO: 414507 - RNA, 32 nt, Homo Sapiens
auggcaaauugucuguuaucucuuuuuaacca

SEQ ID NO: 414508 - RNA, 32 nt, Homo Sapiens
gauaggcaagaagcugguuucuccucgcagcc

SEQ ID NO: 414509 - RNA, 32 nt, Homo Sapiens
uagaucuguuucuuuuuucagacauucaaaug

SEQ ID NO: 414510 - RNA, 32 nt, Homo Sapiens
ucaaaacauaccacagaaugggauugauucug

SEQ ID NO: 414511 - RNA, 32 nt, Homo Sapiens
ccuuuaaagggagggggagaagccagggugau

SEQ ID NO: 414512 - RNA, 32 nt, Homo Sapiens
acugccuggugguuaaaauacgauuccucaua

SEQ ID NO: 414513 - RNA, 32 nt, Homo Sapiens
gcgcagccccgcccuccauccuccccacaucc

SEQ ID NO: 414514 - RNA, 32 nt, Homo Sapiens
aagcugcaaaaauuauauauugcaagguguga

SEQ ID NO: 414515 - RNA, 30 nt, Homo Sapiens
aaaaaucaugcucguaauggcugaauaaac

SEQ ID NO: 414516 - RNA, 32 nt, Homo Sapiens
ccugaaaacugauaggauuuuguuugucauuu

SEQ ID NO: 414517 - RNA, 32 nt, Homo Sapiens
gaguuggaaaggaaaauuuuggaagucaagaa

SEQ ID NO: 414518 - RNA, 32 nt, Homo Sapiens
acuguggagauaauacugaugaaaaugagugu

SEQ ID NO: 414519 - RNA, 32 nt, Homo Sapiens
uugacugcuuugcauuuugggcucuucuauau

SEQ ID NO: 414520 - RNA, 32 nt, Homo Sapiens
gcaagaaugucuuagcgagccuugcuugcagu

SEQ ID NO: 414521 - RNA, 32 nt, Homo Sapiens
ccacuagaguuuugcccucagcuccucccugc

SEQ ID NO: 414522 - RNA, 32 nt, Homo Sapiens
ugaaagggcuucagugggaaccucugagagca

SEQ ID NO: 414523 - RNA, 32 nt, Homo Sapiens
agcaaguagggcuauuuccaucgguauuuuaa

SEQ ID NO: 414524 - RNA, 32 nt, Homo Sapiens
gggaguuccagccaugcucuucuggcacacgc

SEQ ID NO: 414525 - RNA, 32 nt, Homo Sapiens
uguguuccaggaaguucuuaugcuggucuagg

SEQ ID NO: 414526 - RNA, 32 nt, Homo Sapiens
agcgcgggcgcgcggcgccgggagcccguuca

SEQ ID NO: 414527 - RNA, 32 nt, Homo Sapiens
uauuuuuugguucucucucguuuuuuagggag

SEQ ID NO: 414528 - RNA, 32 nt, Homo Sapiens
guggggucaggaggccaagaaagggaauauga

SEQ ID NO: 414529 - RNA, 32 nt, Homo Sapiens
aaggagaauccauuuagcaccuccucagccug

SEQ ID NO: 414530 - RNA, 32 nt, Homo Sapiens
uuuucuuuuccauuuuaaaagcaauauagguu

SEQ ID NO: 414531 - RNA, 32 nt, Homo Sapiens
guaagguuauucucuuuuuuuuuuuuuuuggu

SEQ ID NO: 414532 - RNA, 32 nt, Homo Sapiens
cuggcagacagagggaagauauguuugacaua

SEQ ID NO: 414533 - RNA, 32 nt, Homo Sapiens
uuguauuuuaucaucagcuucaguauauacuu

SEQ ID NO: 414534 - RNA, 32 nt, Homo Sapiens
aagccgcgcccggccggcccgagccacucgcc

SEQ ID NO: 414535 - RNA, 32 nt, Homo Sapiens
uaaaaauagauauauucuaauaggauagaaag

SEQ ID NO: 414536 - RNA, 32 nt, Homo Sapiens
gcuuggagaagcugugaguugagcugaagcug

SEQ ID NO: 414537 - RNA, 32 nt, Homo Sapiens
ggauggggguggcaaugacacccugcagggga

SEQ ID NO: 414538 - RNA, 32 nt, Homo Sapiens
uugggggaaggggagauuauugcaaauugcag

SEQ ID NO: 414539 - RNA, 32 nt, Homo Sapiens
caccaguggcagcuggugacuguggacagugg

SEQ ID NO: 414540 - RNA, 32 nt, Homo Sapiens
auugaaguuugugauauucaucaauaaaaaug

SEQ ID NO: 414541 - RNA, 32 nt, Homo Sapiens
auaucauuaaaauaaaucugaaguugaagugg

SEQ ID NO: 414542 - RNA, 32 nt, Homo Sapiens
ccagcucuacgcgccucucauucagagaggug

SEQ ID NO: 414543 - RNA, 32 nt, Homo Sapiens
gggcugggaaauuuaagaagauuccucugaac

SEQ ID NO: 414544 - RNA, 25 nt, Homo Sapiens
auggggccgcggcggcugcugcugg

SEQ ID NO: 414545 - RNA, 32 nt, Homo Sapiens
gucaacucuaaggaugacagacacuguguaac

SEQ ID NO: 414546 - RNA, 32 nt, Homo Sapiens
ugugaggacagaggcagggacuggagcgucgg

SEQ ID NO: 414547 - RNA, 32 nt, Homo Sapiens
ugggaucuauagaagguuaaguaccacauucu

SEQ ID NO: 414548 - RNA, 32 nt, Homo Sapiens
uaaaggugagggaaaaucauggcauuuucagg

SEQ ID NO: 414549 - RNA, 32 nt, Homo Sapiens
cacuaauagaaagccccugaagcuggacugau

SEQ ID NO: 414550 - RNA, 32 nt, Homo Sapiens
cucuuguaguugcagucagauggcagcuggaa

SEQ ID NO: 414551 - RNA, 32 nt, Homo Sapiens
ugcagcacacugaguuuguacaauuguguuaa

SEQ ID NO: 414552 - RNA, 32 nt, Homo Sapiens
aauguccgacucaauuauuucuacugggaaug

SEQ ID NO: 414553 - RNA, 32 nt, Homo Sapiens
ccacgcgcccgcggcccgcgcgccgagauguu

SEQ ID NO: 414554 - RNA, 32 nt, Homo Sapiens
gguuuagaucauaugacacucgagcacagaag

SEQ ID NO: 414555 - RNA, 32 nt, Homo Sapiens
uguaagcaugggguuuguuucucuaaauugau

SEQ ID NO: 414556 - RNA, 32 nt, Homo Sapiens
gcuaugugugucugcggcgcugccucagcgug

SEQ ID NO: 414557 - RNA, 32 nt, Homo Sapiens
uccgccggccgcccggcuccacuacagcucca

SEQ ID NO: 414558 - RNA, 32 nt, Homo Sapiens
aaguuaguguuaaaaauuuagaauuaaaaaac

SEQ ID NO: 414559 - RNA, 32 nt, Homo Sapiens
gcucacuuuuucugcccacacccucacucaca

SEQ ID NO: 414560 - RNA, 32 nt, Homo Sapiens
accaugagacuggcuuuccacaaacucucauc

SEQ ID NO: 414561 - RNA, 32 nt, Homo Sapiens
cucuucccugucugcugccucuccaguccaaa

SEQ ID NO: 414562 - RNA, 32 nt, Homo Sapiens
gccacgacuccagccaccacccacugacguua

SEQ ID NO: 414563 - RNA, 32 nt, Homo Sapiens
ggcggcauugugcgcgcaccagcagcccggcc

SEQ ID NO: 414564 - RNA, 32 nt, Homo Sapiens
aagguggaaagugguagaagcugaccccugag

SEQ ID NO: 414565 - RNA, 32 nt, Homo Sapiens
uuauaggugugagccaccgcacccagccaaac

SEQ ID NO: 414566 - RNA, 32 nt, Homo Sapiens
auucuuggaugaugauggaucagaaggagaag

SEQ ID NO: 414567 - RNA, 32 nt, Homo Sapiens
guuuccagggcugaggggacugagugagcugc

SEQ ID NO: 414568 - RNA, 32 nt, Homo Sapiens
acuucuaaaaauuuucuguuaugaaaaccuau

SEQ ID NO: 414569 - RNA, 32 nt, Homo Sapiens
ucaugucugcuguaaaauauuauuuaaaugcu

SEQ ID NO: 414570 - RNA, 32 nt, Homo Sapiens
gggauccggagcaagcgggcgagggcagcgcc

SEQ ID NO: 414571 - RNA, 32 nt, Homo Sapiens
gggcuuugcggcugucgucaagcgcggcguug

SEQ ID NO: 414572 - RNA, 32 nt, Homo Sapiens
uacaauuuuucuucuuuucuauauuacaaggg

SEQ ID NO: 414573 - RNA, 32 nt, Homo Sapiens
guaaauguuauuuauggaaauaccuuccaaug

SEQ ID NO: 414574 - RNA, 32 nt, Homo Sapiens
auuuauccuuguuuuuuuucugaugcuaauua

SEQ ID NO: 414575 - RNA, 32 nt, Homo Sapiens
uauuguuaaauccuuugcuucauuccaaaugc

SEQ ID NO: 414576 - RNA, 32 nt, Homo Sapiens
cacuaugcccaaccaccauuaagauuuuggca

SEQ ID NO: 414577 - RNA, 32 nt, Homo Sapiens
gccgccaccauggcuucacgugggguuguugg

SEQ ID NO: 414578 - RNA, 30 nt, Homo Sapiens
uucagucuggacugugagcugcugcugguu

SEQ ID NO: 414579 - RNA, 32 nt, Homo Sapiens
cagacccgccgcugccuaugaggaggcccugc

SEQ ID NO: 414580 - RNA, 32 nt, Homo Sapiens
ucuggggccaaguuucuguccuguauagccua

SEQ ID NO: 414581 - RNA, 30 nt, Homo Sapiens
gacuugggcugggcggucgcccugccccac

SEQ ID NO: 414582 - RNA, 32 nt, Homo Sapiens
ugugaggaagcaggagucagccaccaaguguc

SEQ ID NO: 414583 - RNA, 32 nt, Homo Sapiens
uucauuaaaaauuauuuuuggcugaaggagaa

SEQ ID NO: 414584 - RNA, 30 nt, Homo Sapiens
ccccuaggcaggcccugcaggucccacacu

SEQ ID NO: 414585 - RNA, 32 nt, Homo Sapiens
aaauucuaaauauuacgguuagcugauauuca

SEQ ID NO: 414586 - RNA, 32 nt, Homo Sapiens
aaaggccaugauacugagguucaccaauaugg

SEQ ID NO: 414587 - RNA, 32 nt, Homo Sapiens
auguggccucauccucccccaaggcugugcuu

SEQ ID NO: 414588 - RNA, 32 nt, Homo Sapiens
gugguggcaagcgcccuuggguccagcuacuc

SEQ ID NO: 414589 - RNA, 32 nt, Homo Sapiens
gcagcauccgcaacaucuacaauggccuugac

SEQ ID NO: 414590 - RNA, 32 nt, Homo Sapiens
ggagagacugucauguguaucauuccaccuga

SEQ ID NO: 414591 - RNA, 32 nt, Homo Sapiens
ccaggagaaagaugaaacugaaagcauaugaa

SEQ ID NO: 414592 - RNA, 32 nt, Homo Sapiens
uugcgagccccccaagcuggccacagaugcca

SEQ ID NO: 414593 - RNA, 32 nt, Homo Sapiens
aguucuucauuuccugucuccaacagaaaauu

SEQ ID NO: 414594 - RNA, 32 nt, Homo Sapiens
cucgaggcgggguggggcugcccgggccacuc

SEQ ID NO: 414595 - RNA, 32 nt, Homo Sapiens
caaagaaguugaaauauaacccuuacaagaau

SEQ ID NO: 414596 - RNA, 32 nt, Homo Sapiens
cgcaguacugcagcaggcgucgucuauucagg

SEQ ID NO: 414597 - RNA, 32 nt, Homo Sapiens
uguggcaagcaccacccgccgaccacacgccg

SEQ ID NO: 414598 - RNA, 32 nt, Homo Sapiens
ccggcucugcaucgcgucgccaugaugggcca

SEQ ID NO: 414599 - RNA, 31 nt, Homo Sapiens
cuacagcagccccaggacgcugaaauaguuc

SEQ ID NO: 414600 - RNA, 32 nt, Homo Sapiens
cuugaggggucuuuaguaaugcaucuggguag

SEQ ID NO: 414601 - RNA, 32 nt, Homo Sapiens
gaaggggccauccuaggccccauccuaucccc

SEQ ID NO: 414602 - RNA, 32 nt, Homo Sapiens
ggaugggacauuccgaagagcucccagccaac

SEQ ID NO: 414603 - RNA, 30 nt, Homo Sapiens
aggagaaggcggcgcgcggguccccgcggg

SEQ ID NO: 414604 - RNA, 32 nt, Homo Sapiens
ugacugggagagcgggcugaaugcgauggagu

SEQ ID NO: 414605 - RNA, 32 nt, Homo Sapiens
aacugauuuaucuauuuaaauauuuauuuaac

SEQ ID NO: 414606 - RNA, 32 nt, Homo Sapiens
cuggcuugggacgaggccacucagaggccccc

SEQ ID NO: 414607 - RNA, 32 nt, Homo Sapiens
cggccacuuggcaguggggcugcugcaagcuc

SEQ ID NO: 414608 - RNA, 32 nt, Homo Sapiens
uuccugggcggcaaccggcugagcuuggaccu

SEQ ID NO: 414609 - RNA, 32 nt, Homo Sapiens
auaguuaggcuuccaugauguuacauuaggaa

SEQ ID NO: 414610 - RNA, 32 nt, Homo Sapiens
acuuuuuaaugauuggaaugggcuauaagaua

SEQ ID NO: 414611 - RNA, 32 nt, Homo Sapiens
cccaccuuggccucccaaagugccaggauuac

SEQ ID NO: 414612 - RNA, 32 nt, Homo Sapiens
uaguggaaaaaugugacccaaaaacuccuuuu

SEQ ID NO: 414613 - RNA, 32 nt, Homo Sapiens
gaggugacaaaauuauugaaaugaagaacaga

SEQ ID NO: 414614 - RNA, 32 nt, Homo Sapiens
gugaaacagaauauaugaaauguguagggagg

SEQ ID NO: 414615 - RNA, 32 nt, Homo Sapiens
ucguggugugucuauuuguaggauacacucga

SEQ ID NO: 414616 - RNA, 32 nt, Homo Sapiens
cuucuuguugcauccugucaggaggcagauaa

SEQ ID NO: 414617 - RNA, 32 nt, Homo Sapiens
cuuccggugguuucagugcggcggcggaaccc

SEQ ID NO: 414618 - RNA, 32 nt, Homo Sapiens
auaaacaucuccuuuccaacaaaaaaaaaaaa

SEQ ID NO: 414619 - RNA, 32 nt, Homo Sapiens
agcaccuucauagcccguuucaaccuauauau

SEQ ID NO: 414620 - RNA, 32 nt, Homo Sapiens
gaggcagaggccaggccuccucaaguuggccu

SEQ ID NO: 414621 - RNA, 32 nt, Homo Sapiens
aaagguacuuggauaauaaugaaauaaaacug

SEQ ID NO: 414622 - RNA, 32 nt, Homo Sapiens
caagugauuuuggcuauucucuaaugaagaua

SEQ ID NO: 414623 - RNA, 32 nt, Homo Sapiens
ggaguucgcccggcguuuccucugcagcgggu

SEQ ID NO: 414624 - RNA, 29 nt, Homo Sapiens
agcaauaugaagauuaaggugaaagcauu

SEQ ID NO: 414625 - RNA, 32 nt, Homo Sapiens
ucccagcagagcagcaggauccccagccagac

SEQ ID NO: 414626 - RNA, 32 nt, Homo Sapiens
cauuucuaaauugcaggcuauaccuucuuuuc

SEQ ID NO: 414627 - RNA, 32 nt, Homo Sapiens
gcugaagcucacggugacucagcagugcccaa

SEQ ID NO: 414628 - RNA, 32 nt, Homo Sapiens
ucauugccuggcaagagcugcccaguggccuu

SEQ ID NO: 414629 - RNA, 32 nt, Homo Sapiens
ccaucuugcuccaugaagggugaaucgaaacg

SEQ ID NO: 414630 - RNA, 32 nt, Homo Sapiens
gaggcggcgggggcgcggccagccggaccucu

SEQ ID NO: 414631 - RNA, 32 nt, Homo Sapiens
uccuauacuuuuauuuccuguuuauucuuagg

SEQ ID NO: 414632 - RNA, 32 nt, Homo Sapiens
agccucagauauuugcagauauuuacuuuuug

SEQ ID NO: 414633 - RNA, 32 nt, Homo Sapiens
uacuuauggaaauuuuauuuugauugaaaaca

SEQ ID NO: 414634 - RNA, 32 nt, Homo Sapiens
gccgccagcgagccggagcugccgccgccccu

SEQ ID NO: 414635 - RNA, 32 nt, Homo Sapiens
cugcugcggggccguggggucuuccacaacgg

SEQ ID NO: 414636 - RNA, 32 nt, Homo Sapiens
cagcuuaagccucuccacggugacggguggcu

SEQ ID NO: 414637 - RNA, 32 nt, Homo Sapiens
gggcgggcagugccggcguccgcggcuggaau

SEQ ID NO: 414638 - RNA, 32 nt, Homo Sapiens
ugccaguacccgcucccucugcucauccaucc

SEQ ID NO: 414639 - RNA, 32 nt, Homo Sapiens
gcgccguggcgcggcccggcugacagguucuu

SEQ ID NO: 414640 - RNA, 32 nt, Homo Sapiens
cugggcacaggagcucccagcuuuuguccacg

SEQ ID NO: 414641 - RNA, 32 nt, Homo Sapiens
cgggggcuggaacauuaugagugcucaauaaa

SEQ ID NO: 414642 - RNA, 32 nt, Homo Sapiens
gcucagaucaccguagacaacuggacacucag

SEQ ID NO: 414643 - RNA, 32 nt, Homo Sapiens
gaagauacauguacuauagaucauugucucau

SEQ ID NO: 414644 - RNA, 32 nt, Homo Sapiens
cgucagacuccagcagccaagauggugaagca

SEQ ID NO: 414645 - RNA, 32 nt, Homo Sapiens
caugagaaguguccuuguucauuuucacccaa

SEQ ID NO: 414646 - RNA, 32 nt, Homo Sapiens
gaauaagucauucagaguaggugcugguggga

SEQ ID NO: 414647 - RNA, 32 nt, Homo Sapiens
aaacagugaugaaaugagaagaaagccaauug

SEQ ID NO: 414648 - RNA, 32 nt, Homo Sapiens
uggaacucaggccccagguugagcuuaaacaa

SEQ ID NO: 414649 - RNA, 32 nt, Homo Sapiens
ucugaaaggaauggaagcacaaaaugaugaau

SEQ ID NO: 414650 - RNA, 32 nt, Homo Sapiens
ggcuaugcaaugaggugggcgaggcuuuccgc

SEQ ID NO: 414651 - RNA, 32 nt, Homo Sapiens
aggcagaggacacgucaauagagaaucaccuu

SEQ ID NO: 414652 - RNA, 32 nt, Homo Sapiens
aaaaauaucuauguggaagagaagaguuguuc

SEQ ID NO: 414653 - RNA, 32 nt, Homo Sapiens
uucuagauuguuaagccucucuguucagccug

SEQ ID NO: 414654 - RNA, 32 nt, Homo Sapiens
auagaugaggauaagaaaaaauccacaaaaga

SEQ ID NO: 414655 - RNA, 32 nt, Homo Sapiens
caaaagggaugccggugguggcagaugcuucc

SEQ ID NO: 414656 - RNA, 32 nt, Homo Sapiens
cugggcuccuggcugggccagcagcugcaccu

SEQ ID NO: 414657 - RNA, 32 nt, Homo Sapiens
cuccaaggacaaagccauccauguucuagaug

SEQ ID NO: 414658 - RNA, 32 nt, Homo Sapiens
acacacuaauuugaauugaaagcuaagaguaa

SEQ ID NO: 414659 - RNA, 32 nt, Homo Sapiens
augcccaucccacacaccccacccagcuguuc

SEQ ID NO: 414660 - RNA, 32 nt, Homo Sapiens
ugaugaagaaauuuaugaagcagauuuauuuu

SEQ ID NO: 414661 - RNA, 32 nt, Homo Sapiens
ugucccgcaagaugcggaugcugcuggcgcuc

SEQ ID NO: 414662 - RNA, 32 nt, Homo Sapiens
guaagaggccugccuccagggcuggacugagg

SEQ ID NO: 414663 - RNA, 32 nt, Homo Sapiens
uaaauacuauguuuacuucaugcugaauguuu

SEQ ID NO: 414664 - RNA, 32 nt, Homo Sapiens
ccucuacagguccucccggcccggcccgaaca

SEQ ID NO: 414665 - RNA, 29 nt, Homo Sapiens
caguuuuuauguauguauguauuauaaaa

SEQ ID NO: 414666 - RNA, 31 nt, Homo Sapiens
ggaugucauuugacucaucagagaaaaucug

SEQ ID NO: 414667 - RNA, 32 nt, Homo Sapiens
uacugcacuccagccugggugacagugugaaa

SEQ ID NO: 414668 - RNA, 32 nt, Homo Sapiens
gagcccaccagccccagcacugaccuccaagc

SEQ ID NO: 414669 - RNA, 32 nt, Homo Sapiens
uugcuauguuccccccagggcccuggggggag

SEQ ID NO: 414670 - RNA, 32 nt, Homo Sapiens
guaggguuuuauuuuauuuuuauuuuuugacc

SEQ ID NO: 414671 - RNA, 32 nt, Homo Sapiens
gugccgugcagcucagcaugcauagguggggu

SEQ ID NO: 414672 - RNA, 32 nt, Homo Sapiens
ggccucgggcgggggcuggcccgggguuccag

SEQ ID NO: 414673 - RNA, 32 nt, Homo Sapiens
uucaugaaguuccaauaguugagugaguuaaa

SEQ ID NO: 414674 - RNA, 32 nt, Homo Sapiens
cuaaaagccccucccuucucccggggagcugg

SEQ ID NO: 414675 - RNA, 32 nt, Homo Sapiens
aggcuucugccuggccgccgccgccuauaagc

SEQ ID NO: 414676 - RNA, 32 nt, Homo Sapiens
aauuuguguaguuuuucuuuuuuaacuuaaag

SEQ ID NO: 414677 - RNA, 32 nt, Homo Sapiens
cugcgguaauuuccaguucuauaauguuucau

SEQ ID NO: 414678 - RNA, 32 nt, Homo Sapiens
cugagguuuacaacaugaugcuauggaauaua

SEQ ID NO: 414679 - RNA, 32 nt, Homo Sapiens
gaaauuugcaacaauuugaaaaacuuugcaga

SEQ ID NO: 414680 - RNA, 32 nt, Homo Sapiens
uuuagauauuauuuccuagaaaacaggaugcc

SEQ ID NO: 414681 - RNA, 32 nt, Homo Sapiens
auacugugaaacaaaauugauguuguuuaacu

SEQ ID NO: 414682 - RNA, 32 nt, Homo Sapiens
ccauuuugaaagacaauuaaaaagaaaggaaa

SEQ ID NO: 414683 - RNA, 32 nt, Homo Sapiens
ucuggagccagacuucuggggcuaaauccugg

SEQ ID NO: 414684 - RNA, 32 nt, Homo Sapiens
guuggauaaauuuucauaagauauucaauauc

SEQ ID NO: 414685 - RNA, 32 nt, Homo Sapiens
gucagaggaagcugaggccaaguuacuccagu

SEQ ID NO: 414686 - RNA, 32 nt, Homo Sapiens
caacuuguguacugauaaaauacucuagccug

SEQ ID NO: 414687 - RNA, 32 nt, Homo Sapiens
acuugcuguucacguuaugacucucaugcaag

SEQ ID NO: 414688 - RNA, 31 nt, Homo Sapiens
augauauuugguaauuagguugggccuauaa

SEQ ID NO: 414689 - RNA, 32 nt, Homo Sapiens
cgugaggccccggcccuccaaauccaaaucca

SEQ ID NO: 414690 - RNA, 32 nt, Homo Sapiens
agcauuuguuuuauugcaguaaaguuugucca

SEQ ID NO: 414691 - RNA, 32 nt, Homo Sapiens
ggucuguccuccccgucuggacccucccagcc

SEQ ID NO: 414692 - RNA, 32 nt, Homo Sapiens
uugugugucucuagaagagaaaagcaucuauc

SEQ ID NO: 414693 - RNA, 32 nt, Homo Sapiens
agcccugccuccccggucucccacccuguccu

SEQ ID NO: 414694 - RNA, 32 nt, Homo Sapiens
guugauaaaagcaauuuuaacuugcagaugug

SEQ ID NO: 414695 - RNA, 32 nt, Homo Sapiens
cagcgccacucugccaggcucccggccaucgc

SEQ ID NO: 414696 - RNA, 32 nt, Homo Sapiens
ggccuguuucccuuuuucucccuucccugaaa

SEQ ID NO: 414697 - RNA, 32 nt, Homo Sapiens
ggugccuuguauuuuaaaucugugacaaacca

SEQ ID NO: 414698 - RNA, 32 nt, Homo Sapiens
gagaaccauggcagggaacggcaccggggccu

SEQ ID NO: 414699 - RNA, 32 nt, Homo Sapiens
gggaccccugcaguuggcugggcccgcagcac

SEQ ID NO: 414700 - RNA, 32 nt, Homo Sapiens
ggucagggggccuggguucugccuucucgauu

SEQ ID NO: 414701 - RNA, 32 nt, Homo Sapiens
guauuaaaaguucauacauuagacaguaucag

SEQ ID NO: 414702 - RNA, 32 nt, Homo Sapiens
uuucaaagauaaaugagauucuaucuuugcca

SEQ ID NO: 414703 - RNA, 32 nt, Homo Sapiens
ggggagacgacagaggaugaagggcagcugag

SEQ ID NO: 414704 - RNA, 32 nt, Homo Sapiens
ccuuucgccucccaccaugacucugaggccua

SEQ ID NO: 414705 - RNA, 32 nt, Homo Sapiens
ggcugugggggacgggauggccuguugcuucu

SEQ ID NO: 414706 - RNA, 32 nt, Homo Sapiens
auauaucaguuauuguacaugauugcuuugug

SEQ ID NO: 414707 - RNA, 32 nt, Homo Sapiens
cuuuuuugucaucuuuguuuucuucaaaugcc

SEQ ID NO: 414708 - RNA, 32 nt, Homo Sapiens
caaugcacgccccugcaugcagcccucccgcc

SEQ ID NO: 414709 - RNA, 32 nt, Homo Sapiens
ggcaccgauucggggccugcccggacuucgcc

SEQ ID NO: 414710 - RNA, 32 nt, Homo Sapiens
gcugucuucccucucccucaggccauacucuc

SEQ ID NO: 414711 - RNA, 32 nt, Homo Sapiens
cugcggcagaaauuugugacugagaugugaca

SEQ ID NO: 414712 - RNA, 32 nt, Homo Sapiens
auuagaggccgucuucgaggcugacucccaua

SEQ ID NO: 414713 - RNA, 32 nt, Homo Sapiens
guuccuuucuaaaauaagguuuuaugaagcug

SEQ ID NO: 414714 - RNA, 32 nt, Homo Sapiens
ggucucaaacucccagccucaagcgaugcucc

SEQ ID NO: 414715 - RNA, 32 nt, Homo Sapiens
ccuuuuuucuucauucagcuuagccuuucugu

SEQ ID NO: 414716 - RNA, 30 nt, Homo Sapiens
aagagcgagcugcgccugggucccggccag

SEQ ID NO: 414717 - RNA, 32 nt, Homo Sapiens
guugucugucuccuuaaauccuuuuccuggug

SEQ ID NO: 414718 - RNA, 31 nt, Homo Sapiens
aauccauggcacugccccacuggccuucuuu

SEQ ID NO: 414719 - RNA, 32 nt, Homo Sapiens
guauauggggauuguuucguuuuuccuagcag

SEQ ID NO: 414720 - RNA, 32 nt, Homo Sapiens
gacccucaccauauggguuucuuucuucuucg

SEQ ID NO: 414721 - RNA, 32 nt, Homo Sapiens
aggaaaguccucacuggaacccgcccauaaua

SEQ ID NO: 414722 - RNA, 32 nt, Homo Sapiens
ucuauuuguauucgaagacaagucauuccuau

SEQ ID NO: 414723 - RNA, 32 nt, Homo Sapiens
acuguuuuuggggccaagauggcugcccuagc

SEQ ID NO: 414724 - RNA, 32 nt, Homo Sapiens
guuccaagaccaaagauuaaauuaauaaaagg

SEQ ID NO: 414725 - RNA, 32 nt, Homo Sapiens
aucagcggcagcggcagcggccucgggcgggg

SEQ ID NO: 414726 - RNA, 32 nt, Homo Sapiens
cagauaaaaguaccuuguaagauaaauauaaa

SEQ ID NO: 414727 - RNA, 32 nt, Homo Sapiens
gagaauagaagccaagacuaagauucucaaaa

SEQ ID NO: 414728 - RNA, 32 nt, Homo Sapiens
uucccggccagcggagcggcgaggguggggac

SEQ ID NO: 414729 - RNA, 32 nt, Homo Sapiens
uuucucaauaaucaacuuauagugcugacaga

SEQ ID NO: 414730 - RNA, 32 nt, Homo Sapiens
cuuaucuugcugcauguucugcucuugugccc

SEQ ID NO: 414731 - RNA, 32 nt, Homo Sapiens
gauggguuaugcucccugguuaacuaaaacgu

SEQ ID NO: 414732 - RNA, 32 nt, Homo Sapiens
uuggcacugagauuuaaaugcaaccagaauug

SEQ ID NO: 414733 - RNA, 32 nt, Homo Sapiens
gugaaaaagcuacgucuuuacugcauaaauua

SEQ ID NO: 414734 - RNA, 32 nt, Homo Sapiens
uauucagauaaugcaagagaagcaauucguca

SEQ ID NO: 414735 - RNA, 32 nt, Homo Sapiens
uauugacaggaaaccccauccagaguuuagcc

SEQ ID NO: 414736 - RNA, 32 nt, Homo Sapiens
cugguggagagcgugcggcggcugggguuggg

SEQ ID NO: 414737 - RNA, 32 nt, Homo Sapiens
cuuuugugggccaauacuaagaauaacaagaa

SEQ ID NO: 414738 - RNA, 32 nt, Homo Sapiens
ggcacgggguauuguccggcuccggcggcggc

SEQ ID NO: 414739 - RNA, 31 nt, Homo Sapiens
ucuuggcuuuggcgaaggucaguguacagac

SEQ ID NO: 414740 - RNA, 32 nt, Homo Sapiens
gcuccuccaaaaauggauuuggguucaaacag

SEQ ID NO: 414741 - RNA, 32 nt, Homo Sapiens
cccucgcagccccuugcuccccggcagccgcc

SEQ ID NO: 414742 - RNA, 32 nt, Homo Sapiens
gaucaccagauggcugccccagagccaaaugu

SEQ ID NO: 414743 - RNA, 32 nt, Homo Sapiens
cggggaggggguaguuguacucugcuuguaca

SEQ ID NO: 414744 - RNA, 32 nt, Homo Sapiens
cagauggguugccccaggauccggcugccagc

SEQ ID NO: 414745 - RNA, 32 nt, Homo Sapiens
ggucuuuuucuuauuagcacauuugagaaaaa

SEQ ID NO: 414746 - RNA, 32 nt, Homo Sapiens
uuuaaauguacacuuugaaaacuggucauuuu

SEQ ID NO: 414747 - RNA, 32 nt, Homo Sapiens
cuucugagagagugcuuaggcccugucucucu

SEQ ID NO: 414748 - RNA, 32 nt, Homo Sapiens
gaucacacuuuguaauaagaucagaggcagag

SEQ ID NO: 414749 - RNA, 32 nt, Homo Sapiens
agccauuaccuuuuaugcuucaucucaacauu

SEQ ID NO: 414750 - RNA, 32 nt, Homo Sapiens
ugcaaagggcagucacauccaacuuuaauaaa

SEQ ID NO: 414751 - RNA, 32 nt, Homo Sapiens
ggucuucagauaaacuaaaccaauugucaacc

SEQ ID NO: 414752 - RNA, 32 nt, Homo Sapiens
gcacccaggccucagaguuucagggcuaaccc

SEQ ID NO: 414753 - RNA, 32 nt, Homo Sapiens
gcuucuggccacugggaggcgcugcucgaaag

SEQ ID NO: 414754 - RNA, 32 nt, Homo Sapiens
ucuucugcaggcggcagaacuacaucggggcc

SEQ ID NO: 414755 - RNA, 32 nt, Homo Sapiens
gcaggccauugcaggccguccaggggcugagc

SEQ ID NO: 414756 - RNA, 32 nt, Homo Sapiens
ggucgucauuggcaugggguggauauagggca

SEQ ID NO: 414757 - RNA, 32 nt, Homo Sapiens
gcagccagacugugcggacggcagugaugagu

SEQ ID NO: 414758 - RNA, 32 nt, Homo Sapiens
cuucuagaaggagcacgccucuggccagggug

SEQ ID NO: 414759 - RNA, 32 nt, Homo Sapiens
gcccgagcccgagccggcgccaccgcgccccc

SEQ ID NO: 414760 - RNA, 32 nt, Homo Sapiens
uauaucuggguguuggcacccagccacuauuc

SEQ ID NO: 414761 - RNA, 32 nt, Homo Sapiens
ugucauuccgcucacugagcucuucuucauuc

SEQ ID NO: 414762 - RNA, 32 nt, Homo Sapiens
ucugucuccuacgacuccaugagcagcgccag

SEQ ID NO: 414763 - RNA, 32 nt, Homo Sapiens
cgguucagguccagaccuccccgucuuccggc

SEQ ID NO: 414764 - RNA, 32 nt, Homo Sapiens
ugcaaaagugacuuugcuuguuuacuuucugc

SEQ ID NO: 414765 - RNA, 32 nt, Homo Sapiens
uuacaauauauuccuuguagguucuucacuca

SEQ ID NO: 414766 - RNA, 31 nt, Homo Sapiens
gaucuacuuaguggugaauagauuggcuauu

SEQ ID NO: 414767 - RNA, 32 nt, Homo Sapiens
cgggccgcgcagcuccgccaacucccgggccg

SEQ ID NO: 414768 - RNA, 32 nt, Homo Sapiens
ucugggugggggcuuaucuccucccccaggag

SEQ ID NO: 414769 - RNA, 32 nt, Homo Sapiens
caauagggaagcaacuucauuuuuguuuuaua

SEQ ID NO: 414770 - RNA, 32 nt, Homo Sapiens
aucaccagacugccuaagagacuugaugacac

SEQ ID NO: 414771 - RNA, 32 nt, Homo Sapiens
cccagccuuucugugguaucugaugcaggaag

SEQ ID NO: 414772 - RNA, 32 nt, Homo Sapiens
uaauguacauaaauagaguguaaauaaaauag

SEQ ID NO: 414773 - RNA, 32 nt, Homo Sapiens
agugacuuccucgggggauucccaggacacag

SEQ ID NO: 414774 - RNA, 32 nt, Homo Sapiens
caggccagccuguguccccucccgcaggccuc

SEQ ID NO: 414775 - RNA, 32 nt, Homo Sapiens
uuuggcaguacagauaacaaaauacacuuuac

SEQ ID NO: 414776 - RNA, 32 nt, Homo Sapiens
cgggggcugggcggggaccgggcuugucggug

SEQ ID NO: 414777 - RNA, 32 nt, Homo Sapiens
ccgggccccuccccgacaagccucccagggcc

SEQ ID NO: 414778 - RNA, 32 nt, Homo Sapiens
aacaagauagaguauaauaucaauacugcuaa

SEQ ID NO: 414779 - RNA, 32 nt, Homo Sapiens
uggagguaguaucaaaauuuuacuucuuuggu

SEQ ID NO: 414780 - RNA, 32 nt, Homo Sapiens
ggguccuccagaugaguucugugacuucagga

SEQ ID NO: 414781 - RNA, 32 nt, Homo Sapiens
gaaaacauuuccccugcuguucucuuucuaac

SEQ ID NO: 414782 - RNA, 32 nt, Homo Sapiens
gugagccaaggucgugcugcugcaccccagcc

SEQ ID NO: 414783 - RNA, 32 nt, Homo Sapiens
gaauugugagccaaaauaaaugucuuuucuuu

SEQ ID NO: 414784 - RNA, 32 nt, Homo Sapiens
guuuuuguuuuugcugcaauugcuuauguuau

SEQ ID NO: 414785 - RNA, 32 nt, Homo Sapiens
uuugugauuugcgccuuccuccuccgugccuu

SEQ ID NO: 414786 - RNA, 32 nt, Homo Sapiens
ccacaggugcugugcuuugugcucuuggcugc

SEQ ID NO: 414787 - RNA, 32 nt, Homo Sapiens
auucucauuguaaaaauaauuauaugccaaaa

SEQ ID NO: 414788 - RNA, 32 nt, Homo Sapiens
guaaauagugauugcuaaauuuggucagauuu

SEQ ID NO: 414789 - RNA, 32 nt, Homo Sapiens
aguuccuagcgaggaggcgccgccgccauugc

SEQ ID NO: 414790 - RNA, 32 nt, Homo Sapiens
cuaagacgccgggacccccuggaagccuagaa

SEQ ID NO: 414791 - RNA, 32 nt, Homo Sapiens
cgaucuuucacuucugcccacuccaugcuaug

SEQ ID NO: 414792 - RNA, 31 nt, Homo Sapiens
cuggucucauacucggccucgagccauccuc

SEQ ID NO: 414793 - RNA, 28 nt, Homo Sapiens
guggguggccgggccaggaugcagcggg

SEQ ID NO: 414794 - RNA, 27 nt, Homo Sapiens
accacugcuggcuucagccccuugagc

SEQ ID NO: 414795 - RNA, 32 nt, Homo Sapiens
uucagccucccgcuccgccgcgcuccagccuc

SEQ ID NO: 414796 - RNA, 31 nt, Homo Sapiens
gcauaugaguuguacuguucaguguacaucc

SEQ ID NO: 414797 - RNA, 32 nt, Homo Sapiens
gaccacuuauccucauugcuuaccccgagccg

SEQ ID NO: 414798 - RNA, 32 nt, Homo Sapiens
augagggcgagggcgcggggaggggugggggu

SEQ ID NO: 414799 - RNA, 32 nt, Homo Sapiens
ggcagauguacuugaguagacacgacagacgg

SEQ ID NO: 414800 - RNA, 32 nt, Homo Sapiens
cugaccccaccuucccaguucuaggccaggca

SEQ ID NO: 414801 - RNA, 29 nt, Homo Sapiens
cgucaugcaguccccggcggugcucguca

SEQ ID NO: 414802 - RNA, 32 nt, Homo Sapiens
ucucucaucucgcucggcugcgggaaaucggg

SEQ ID NO: 414803 - RNA, 32 nt, Homo Sapiens
auguccacuuggauguccugagccaccugaaa

SEQ ID NO: 414804 - RNA, 32 nt, Homo Sapiens
cuuugggggaggggaggcucucuuaaccgauu

SEQ ID NO: 414805 - RNA, 32 nt, Homo Sapiens
aaaggggaagcagguacccaauaaaguuuaga

SEQ ID NO: 414806 - RNA, 31 nt, Homo Sapiens
auaaauucauugacuuuaaauaaauuucuga

SEQ ID NO: 414807 - RNA, 32 nt, Homo Sapiens
ccagcucaaaaauauugucauuccugugacau

SEQ ID NO: 414808 - RNA, 32 nt, Homo Sapiens
ucaucucuguuucaaaucaacauccuggauac

SEQ ID NO: 414809 - RNA, 32 nt, Homo Sapiens
uuuguguuuuucugcguccagagcugcaguuc

SEQ ID NO: 414810 - RNA, 32 nt, Homo Sapiens
aguaaugugugcuugcagaaaugcaacugguc

SEQ ID NO: 414811 - RNA, 30 nt, Homo Sapiens
gcuggccagcccgugcugcccugguggggu

SEQ ID NO: 414812 - RNA, 32 nt, Homo Sapiens
uuaguuuucuuguguuucagacuuuaugcagc

SEQ ID NO: 414813 - RNA, 31 nt, Homo Sapiens
uggucacaagaggaaauuucugaccuguacg

SEQ ID NO: 414814 - RNA, 32 nt, Homo Sapiens
aaauacuguaguaaauuauguacaauuuuaug

SEQ ID NO: 414815 - RNA, 32 nt, Homo Sapiens
aagaggcaaguugacuucauccugucauucca

SEQ ID NO: 414816 - RNA, 32 nt, Homo Sapiens
aagauuucucaaagauuagguauauauuuaaa

SEQ ID NO: 414817 - RNA, 32 nt, Homo Sapiens
aagauuuugucaaaaacuaaauuuaugauuau

SEQ ID NO: 414818 - RNA, 29 nt, Homo Sapiens
aauaaugaaaauaaaggcaauggcaucca

SEQ ID NO: 414819 - RNA, 32 nt, Homo Sapiens
aauguugauaaaauaugacuaguuuugaauuu

SEQ ID NO: 414820 - RNA, 32 nt, Homo Sapiens
ggaauuuuaaauaguuugacacuugaaaaaag

SEQ ID NO: 414821 - RNA, 31 nt, Homo Sapiens
cauuucaaacuguccaaaugaguuaacauua

SEQ ID NO: 414822 - RNA, 29 nt, Homo Sapiens
gaaaacucuaaauauaacagacccuacag

SEQ ID NO: 414823 - RNA, 32 nt, Homo Sapiens
uuccaagcagucucuggugcuuuucuucucuc

SEQ ID NO: 414824 - RNA, 32 nt, Homo Sapiens
ggccugggaaaacuccacggagguuccgaggg

SEQ ID NO: 414825 - RNA, 32 nt, Homo Sapiens
ggaggaccgcucagucucuccucucucacuuc

SEQ ID NO: 414826 - RNA, 32 nt, Homo Sapiens
auauuugcauuauauuuagcgguugaguaucc

SEQ ID NO: 414827 - RNA, 32 nt, Homo Sapiens
aggaggcagagguugguccacagcacuccauu

SEQ ID NO: 414828 - RNA, 32 nt, Homo Sapiens
caccaugcccuccuccucgugcuguguuuucu

SEQ ID NO: 414829 - RNA, 32 nt, Homo Sapiens
cacggccugggccccagggguaccaaggcuau

SEQ ID NO: 414830 - RNA, 32 nt, Homo Sapiens
gaagcaaaaaucagcugagugaagaugaggaa

SEQ ID NO: 414831 - RNA, 32 nt, Homo Sapiens
uuggccuuaggacccaacuucucuuaccgcca

SEQ ID NO: 414832 - RNA, 32 nt, Homo Sapiens
cugcaucccaaaaugcccaggaucucauaggc

SEQ ID NO: 414833 - RNA, 32 nt, Homo Sapiens
uacaaaaguggugaaauggccacggagaaggg

SEQ ID NO: 414834 - RNA, 32 nt, Homo Sapiens
ggcuguaggggaggggagaccacacccaaggu

SEQ ID NO: 414835 - RNA, 32 nt, Homo Sapiens
cugggcaugguuggcuugggggucugugguuu

SEQ ID NO: 414836 - RNA, 32 nt, Homo Sapiens
gaaauuagcauuauaguugauaugccagaaau

SEQ ID NO: 414837 - RNA, 32 nt, Homo Sapiens
uuuacaaaaauuucuguaaaacagguuauaac

SEQ ID NO: 414838 - RNA, 32 nt, Homo Sapiens
ugaacaggaaagggucacguggucccauguug

SEQ ID NO: 414839 - RNA, 32 nt, Homo Sapiens
cccaguauacuuuaacuuucuuucuuucuuuu

SEQ ID NO: 414840 - RNA, 32 nt, Homo Sapiens
ugggagcagagaaaauugugaaagugacucuc

SEQ ID NO: 414841 - RNA, 32 nt, Homo Sapiens
uguaaauuaauaugaagaagauauaucccuaa

SEQ ID NO: 414842 - RNA, 32 nt, Homo Sapiens
cugcggggccgcgggggucgaauguucguggc

SEQ ID NO: 414843 - RNA, 32 nt, Homo Sapiens
cccauaaaaauauuuguguaauucuuaugaaa

SEQ ID NO: 414844 - RNA, 32 nt, Homo Sapiens
gguuaggacaaaguggauggaugccgggaagu

SEQ ID NO: 414845 - RNA, 32 nt, Homo Sapiens
agaaagaucucaaaaagcaacuucugcccugc

SEQ ID NO: 414846 - RNA, 32 nt, Homo Sapiens
gauagcuugcucucugagugugucucauugau

SEQ ID NO: 414847 - RNA, 32 nt, Homo Sapiens
auuuacuuuuucugcguguacauccugcgugu

SEQ ID NO: 414848 - RNA, 32 nt, Homo Sapiens
ucaccacccccuccuggcgagaugcgguuuca

SEQ ID NO: 414849 - RNA, 32 nt, Homo Sapiens
ucguuuguucauuuucaccaccauagaguauu

SEQ ID NO: 414850 - RNA, 32 nt, Homo Sapiens
uauucauugugguuauuuuuauacaguaguga

SEQ ID NO: 414851 - RNA, 32 nt, Homo Sapiens
caauccuaaaauuuauaugggaaccacaaaag

SEQ ID NO: 414852 - RNA, 32 nt, Homo Sapiens
ccauagauggauuuuugccccuucuuaauuuu

SEQ ID NO: 414853 - RNA, 29 nt, Homo Sapiens
uuguuuuuuaaauauaucaggcguaguua

SEQ ID NO: 414854 - RNA, 32 nt, Homo Sapiens
acggauguucuaugagucuaggcggcaccguu

SEQ ID NO: 414855 - RNA, 32 nt, Homo Sapiens
agauuguauuucucugcuuucauuucaauuuc

SEQ ID NO: 414856 - RNA, 32 nt, Homo Sapiens
cccgcugcaaccaccguuuuugaaauaagaag

SEQ ID NO: 414857 - RNA, 32 nt, Homo Sapiens
gauuaagauuuucaaaguaacauuucuuauau

SEQ ID NO: 414858 - RNA, 32 nt, Homo Sapiens
gccuguaaucccaacacuuuugggagguccag

SEQ ID NO: 414859 - RNA, 32 nt, Homo Sapiens
agcgcgaccccggcccgcgcccgccccgcccg

SEQ ID NO: 414860 - RNA, 32 nt, Homo Sapiens
aaguauaauguuuauuaaaugcuucauuugua

SEQ ID NO: 414861 - RNA, 32 nt, Homo Sapiens
uuuuaagcugucuaccuaauugcugucuccca

SEQ ID NO: 414862 - RNA, 32 nt, Homo Sapiens
ggcugccaggcugcagccugcugcuccaggga

SEQ ID NO: 414863 - RNA, 32 nt, Homo Sapiens
aaguuuaaagcaucuguaaauuuggacuguuu

SEQ ID NO: 414864 - RNA, 28 nt, Homo Sapiens
gugucagggcggccaccggggaacgggg

SEQ ID NO: 414865 - RNA, 32 nt, Homo Sapiens
cggcacauugccgggccgcggcguggagccgg

SEQ ID NO: 414866 - RNA, 32 nt, Homo Sapiens
guuacaucccaauaaacuuauuuuauuugccu

SEQ ID NO: 414867 - RNA, 32 nt, Homo Sapiens
gaaagaggugaauugcggugacuucuguggug

SEQ ID NO: 414868 - RNA, 32 nt, Homo Sapiens
gcagacgcuccccggcgccgggcaugggcgcc

SEQ ID NO: 414869 - RNA, 32 nt, Homo Sapiens
auccuguaucuuauauggauauauguaugugu

SEQ ID NO: 414870 - RNA, 32 nt, Homo Sapiens
agccgggaaugggagacggcaacaaucccugu

SEQ ID NO: 414871 - RNA, 32 nt, Homo Sapiens
aguagaggccccacaaggaccugcuuggguga

SEQ ID NO: 414872 - RNA, 32 nt, Homo Sapiens
gaaaaaagaacugaggacuagaaggacaauug

SEQ ID NO: 414873 - RNA, 32 nt, Homo Sapiens
gaguggcugagaccgaccacgguucuugacuu

SEQ ID NO: 414874 - RNA, 32 nt, Homo Sapiens
ccguggccuaggcccaaacucugcucugagaa

SEQ ID NO: 414875 - RNA, 32 nt, Homo Sapiens
acuuaggauugugagacuuuuuaauguuuguc

SEQ ID NO: 414876 - RNA, 32 nt, Homo Sapiens
uggcgaccgcguuggcuggguggccuccauug

SEQ ID NO: 414877 - RNA, 32 nt, Homo Sapiens
cugggucagcaccucuaggucauuccacagac

SEQ ID NO: 414878 - RNA, 32 nt, Homo Sapiens
aguggcacguugguuuccugugcgucuguguc

SEQ ID NO: 414879 - RNA, 32 nt, Homo Sapiens
uuuuucauuugaaaaauaagcuaauguguaag

SEQ ID NO: 414880 - RNA, 32 nt, Homo Sapiens
cccuguccggugagggggcagaaggacucagc

SEQ ID NO: 414881 - RNA, 32 nt, Homo Sapiens
auuagaguaggaaggcuacuggcauuaauuau

SEQ ID NO: 414882 - RNA, 32 nt, Homo Sapiens
gggcggggcggccauuggggcuccucauuggg

SEQ ID NO: 414883 - RNA, 32 nt, Homo Sapiens
uccacacugucaauuacucuucccuuaacuuu

SEQ ID NO: 414884 - RNA, 31 nt, Homo Sapiens
ugcccauguggggccgcaggaauccccugua

SEQ ID NO: 414885 - RNA, 32 nt, Homo Sapiens
agacgaagccccacgagccacacccuacucua

SEQ ID NO: 414886 - RNA, 32 nt, Homo Sapiens
cgcguaccacacuccagccugggugacagagc

SEQ ID NO: 414887 - RNA, 32 nt, Homo Sapiens
augccacuucaugaggggaggggcgaggggaa

SEQ ID NO: 414888 - RNA, 32 nt, Homo Sapiens
gccugcaggagaaacacacuccccuccugggu

SEQ ID NO: 414889 - RNA, 32 nt, Homo Sapiens
ccugaggggacagugagucuccaggucugcca

SEQ ID NO: 414890 - RNA, 32 nt, Homo Sapiens
uucagggccccauugcuacuuaugccauauuu

SEQ ID NO: 414891 - RNA, 32 nt, Homo Sapiens
cccugccgccugaccgccauggagacgaagcu

SEQ ID NO: 414892 - RNA, 32 nt, Homo Sapiens
ucaacagaauacuuuggcuugaagccggcaca

SEQ ID NO: 414893 - RNA, 32 nt, Homo Sapiens
uggugcugccagcugugcucacucugguuuuc

SEQ ID NO: 414894 - RNA, 32 nt, Homo Sapiens
gaagcuggggacgccaccgucugucucaccau

SEQ ID NO: 414895 - RNA, 32 nt, Homo Sapiens
uuuauucaugauaaaaccuuauaggaauagua

SEQ ID NO: 414896 - RNA, 32 nt, Homo Sapiens
accaucagguggaagaaguauucuucagagag

SEQ ID NO: 414897 - RNA, 32 nt, Homo Sapiens
aacaccccucauuccacccccauacacaugca

SEQ ID NO: 414898 - RNA, 32 nt, Homo Sapiens
auggcaaacacuuucaaauacuguauauuagg

SEQ ID NO: 414899 - RNA, 32 nt, Homo Sapiens
cuuagugaauauuuauacuaagguagugacug

SEQ ID NO: 414900 - RNA, 32 nt, Homo Sapiens
aggaaaaaacaaaagugaaagauuaucaauau

SEQ ID NO: 414901 - RNA, 32 nt, Homo Sapiens
aaaaguuuacagcacacuggcgcagaagaugg

SEQ ID NO: 414902 - RNA, 32 nt, Homo Sapiens
ggugguaccggggacaggauugcgagggggac

SEQ ID NO: 414903 - RNA, 31 nt, Homo Sapiens
ccagggcccgagagccguugaguuaagugcg

SEQ ID NO: 414904 - RNA, 32 nt, Homo Sapiens
aguuggggcuggcgcuccggaguugcugggcu

SEQ ID NO: 414905 - RNA, 32 nt, Homo Sapiens
uuuaaugucauauucaucugguaaauaucuac

SEQ ID NO: 414906 - RNA, 32 nt, Homo Sapiens
gaccaauccaaaggcuaagugauagugacuca

SEQ ID NO: 414907 - RNA, 32 nt, Homo Sapiens
agucucaccgcgcagcagcacccccagcccgg

SEQ ID NO: 414908 - RNA, 32 nt, Homo Sapiens
guucauccuauaagaagcaggauuguauaggc

SEQ ID NO: 414909 - RNA, 28 nt, Homo Sapiens
gaacagggagcggccaggaugcugaauc

SEQ ID NO: 414910 - RNA, 32 nt, Homo Sapiens
cugcagaaggccccgugcacucgggggccucc

SEQ ID NO: 414911 - RNA, 32 nt, Homo Sapiens
cauaacagaaacaaaaucauguugguuacaaa

SEQ ID NO: 414912 - RNA, 29 nt, Homo Sapiens
caggugucauaugacugauuacucagagc

SEQ ID NO: 414913 - RNA, 32 nt, Homo Sapiens
cucucugcugucauguuuucuaccuuauucca

SEQ ID NO: 414914 - RNA, 32 nt, Homo Sapiens
gcuugggaaggggccuuugucuugucaagguu

SEQ ID NO: 414915 - RNA, 32 nt, Homo Sapiens
gggccuacagcuuugaucccugacaucuggaa

SEQ ID NO: 414916 - RNA, 32 nt, Homo Sapiens
guuaagaaugaaauccuucaaguguuaaaaac

SEQ ID NO: 414917 - RNA, 32 nt, Homo Sapiens
ccaacuugcugcaugguaagguggcuuugauu

SEQ ID NO: 414918 - RNA, 32 nt, Homo Sapiens
cuuaaagcuaaguuuacccaaguacuuucagc

SEQ ID NO: 414919 - RNA, 32 nt, Homo Sapiens
ucaaacucaccauccaguugccuguuacagaa

SEQ ID NO: 414920 - RNA, 32 nt, Homo Sapiens
gcugugagccuggggacgacauggcaggcugg

SEQ ID NO: 414921 - RNA, 32 nt, Homo Sapiens
uucagccugccagcucuggcuggucagagaca

SEQ ID NO: 414922 - RNA, 32 nt, Homo Sapiens
aaaagauacauuuuuacccaccauaaauguua

SEQ ID NO: 414923 - RNA, 32 nt, Homo Sapiens
acuuugaaacuggaaucuguaacugggaacaa

SEQ ID NO: 414924 - RNA, 32 nt, Homo Sapiens
gcacaaaguuuaugcauuuuuucaugcauuuu

SEQ ID NO: 414925 - RNA, 32 nt, Homo Sapiens
ccaguuuaagaaauaaaacauuagcaaauaca

SEQ ID NO: 414926 - RNA, 32 nt, Homo Sapiens
ccccgacggacgggaccggcucccuggcgguc

SEQ ID NO: 414927 - RNA, 31 nt, Homo Sapiens
accccggcgcagcagaaccauggauggcccg

SEQ ID NO: 414928 - RNA, 32 nt, Homo Sapiens
gacauuuuuuauuuugacuaucuauggcuuuu

SEQ ID NO: 414929 - RNA, 32 nt, Homo Sapiens
auagaagaugcugugacugcuuuugaaucuau

SEQ ID NO: 414930 - RNA, 32 nt, Homo Sapiens
gcuucaauuuggaaacguuuugucuagaaguu

SEQ ID NO: 414931 - RNA, 32 nt, Homo Sapiens
aaacugaggcuuugggaggacucacugacaua

SEQ ID NO: 414932 - RNA, 32 nt, Homo Sapiens
ugagucaggccagagcgagaggacaguaucug

SEQ ID NO: 414933 - RNA, 32 nt, Homo Sapiens
uuauacuaaaacuauauaauccuuagauuuag

SEQ ID NO: 414934 - RNA, 32 nt, Homo Sapiens
agauggccagggugggaggcaggcagcugccu

SEQ ID NO: 414935 - RNA, 32 nt, Homo Sapiens
uucuccuuggcuuuuucuucucuuucauacau

SEQ ID NO: 414936 - RNA, 32 nt, Homo Sapiens
ugggaaccuuggagugaauucgucggcgggug

SEQ ID NO: 414937 - RNA, 32 nt, Homo Sapiens
caaauuucccuuaggauuucguuaucucaccu

SEQ ID NO: 414938 - RNA, 32 nt, Homo Sapiens
ugauuuacauauauuauuuauuucugguaacu

SEQ ID NO: 414939 - RNA, 32 nt, Homo Sapiens
gagaagaccugcccuccucacugggauccccu

SEQ ID NO: 414940 - RNA, 32 nt, Homo Sapiens
cauuauguaaaaauaaauggaauaaucacuga

SEQ ID NO: 414941 - RNA, 32 nt, Homo Sapiens
caaagcgcuccaagagaaagugccaggaaggg

SEQ ID NO: 414942 - RNA, 32 nt, Homo Sapiens
ggguaacagucaaagugaaggaaugauggguu

SEQ ID NO: 414943 - RNA, 32 nt, Homo Sapiens
aacacacauaaguuacaccaguccucugucaa

SEQ ID NO: 414944 - RNA, 32 nt, Homo Sapiens
uuguguaucuuacuggucugaagggaccaagu

SEQ ID NO: 414945 - RNA, 32 nt, Homo Sapiens
uaaacauggccucucccuccccuaggcuacca

SEQ ID NO: 414946 - RNA, 32 nt, Homo Sapiens
accuucagcugagacugcagcccugccaauac

SEQ ID NO: 414947 - RNA, 32 nt, Homo Sapiens
gaugcuuugugauauaaauguacuuuuucaau

SEQ ID NO: 414948 - RNA, 31 nt, Homo Sapiens
uauuguacaaagaaauugcgauguauauuuu

SEQ ID NO: 414949 - RNA, 32 nt, Homo Sapiens
cccaccgccugggcccgagggacgcgugaucg

SEQ ID NO: 414950 - RNA, 32 nt, Homo Sapiens
aaauggccuggccacuuggcucucuuuaaaau

SEQ ID NO: 414951 - RNA, 32 nt, Homo Sapiens
ccaaacuugaaaacagaaucaguguuaaauuc

SEQ ID NO: 414952 - RNA, 32 nt, Homo Sapiens
uuuuacgcccggaaacaaagagacuaagccag

SEQ ID NO: 414953 - RNA, 32 nt, Homo Sapiens
gggggugcgggacgugaguucuuccccaugcc

SEQ ID NO: 414954 - RNA, 31 nt, Homo Sapiens
ccucuccucaggagaaaguacccucuuuuac

SEQ ID NO: 414955 - RNA, 32 nt, Homo Sapiens
ugcacgcagccaccggccccgcucccggagcc

SEQ ID NO: 414956 - RNA, 32 nt, Homo Sapiens
uggaggcucccucccugccuucacuccccguc

SEQ ID NO: 414957 - RNA, 29 nt, Homo Sapiens
gcaaauggaaguauuucagucggggguuu

SEQ ID NO: 414958 - RNA, 31 nt, Homo Sapiens
uucaagggccuugcccugccccggucugucc

SEQ ID NO: 414959 - RNA, 32 nt, Homo Sapiens
uuccugugccacccuuuccccgccccucaaau

SEQ ID NO: 414960 - RNA, 32 nt, Homo Sapiens
ccccggccaccucggggcugccugggccucug

SEQ ID NO: 414961 - RNA, 32 nt, Homo Sapiens
augauaaaacaaaaggugcaaaaccauguaaa

SEQ ID NO: 414962 - RNA, 32 nt, Homo Sapiens
ucugauagccuaguuaaauauuucaguguugu

SEQ ID NO: 414963 - RNA, 32 nt, Homo Sapiens
gugcgugugggcccggccuggccacagcgggg

SEQ ID NO: 414964 - RNA, 32 nt, Homo Sapiens
gacuggggauuccacauguuugccuugggagu

SEQ ID NO: 414965 - RNA, 32 nt, Homo Sapiens
uucuuuaguuggaguucucauuuuuauucucc

SEQ ID NO: 414966 - RNA, 32 nt, Homo Sapiens
accucggugacaaccggcaccugcgcucgcug

SEQ ID NO: 414967 - RNA, 32 nt, Homo Sapiens
gggugaauaagggcuuccuguggacuggcaau

SEQ ID NO: 414968 - RNA, 30 nt, Homo Sapiens
acaaggaaggugaugugugagucuggcagg

SEQ ID NO: 414969 - RNA, 32 nt, Homo Sapiens
ugccaaaacaaaugggaaaaaauacacacaca

SEQ ID NO: 414970 - RNA, 32 nt, Homo Sapiens
aucuuagugucugagguugacuguggguaaau

SEQ ID NO: 414971 - RNA, 32 nt, Homo Sapiens
gauuuauuaaauauaaugaauaugagaaaacu

SEQ ID NO: 414972 - RNA, 32 nt, Homo Sapiens
aaaaugguuuccugugucaaguauuugugcag

SEQ ID NO: 414973 - RNA, 32 nt, Homo Sapiens
gagagagaaacggggagaaugugugugagaca

SEQ ID NO: 414974 - RNA, 32 nt, Homo Sapiens
agacccugcuucucuucccccaucaccaccug

SEQ ID NO: 414975 - RNA, 32 nt, Homo Sapiens
cacuuuugauaugugaaaauagauguauuuuc

SEQ ID NO: 414976 - RNA, 32 nt, Homo Sapiens
ucucagcccugucagaagaaccccaagaaaca

SEQ ID NO: 414977 - RNA, 32 nt, Homo Sapiens
aggacagucugcuagcaagauggaaguuacca

SEQ ID NO: 414978 - RNA, 32 nt, Homo Sapiens
caggaugcaaggaugacgccuccggaggcccu

SEQ ID NO: 414979 - RNA, 32 nt, Homo Sapiens
caguucacagcuuuuuaucuauaauagcuuua

SEQ ID NO: 414980 - RNA, 32 nt, Homo Sapiens
ugaaagcaaugacuggaauccuugacucuuau

SEQ ID NO: 414981 - RNA, 32 nt, Homo Sapiens
uuggagcagaacuuaagagaguguguggggug

SEQ ID NO: 414982 - RNA, 32 nt, Homo Sapiens
agaugcuaauauauuuaucucauuguuuacau

SEQ ID NO: 414983 - RNA, 32 nt, Homo Sapiens
cagacuuggggagggagggguguggcucccac

SEQ ID NO: 414984 - RNA, 32 nt, Homo Sapiens
cgucggggucggggcugcagccgucaugccgg

SEQ ID NO: 414985 - RNA, 32 nt, Homo Sapiens
cugcgccccguccccagccagacccacucgcu

SEQ ID NO: 414986 - RNA, 32 nt, Homo Sapiens
ccguaggcaccaacugcaaggaccccuccccc

SEQ ID NO: 414987 - RNA, 32 nt, Homo Sapiens
cacccagaaaucagaaauauuuuguauuugga

SEQ ID NO: 414988 - RNA, 32 nt, Homo Sapiens
ucuccucccugcgcugcagaccaacgcguggc

SEQ ID NO: 414989 - RNA, 32 nt, Homo Sapiens
uauaggaagacaggacucuauuagauuaagac

SEQ ID NO: 414990 - RNA, 32 nt, Homo Sapiens
ggaaauggagcuugcuucuuuuuguuuugccu

SEQ ID NO: 414991 - RNA, 32 nt, Homo Sapiens
guauuauaagaggauagcuauauuuuauuucu

SEQ ID NO: 414992 - RNA, 28 nt, Homo Sapiens
gacuagggggcgccgccgagagaagccg

SEQ ID NO: 414993 - RNA, 30 nt, Homo Sapiens
cuagaauggauguguguggcuggaaagaaa

SEQ ID NO: 414994 - RNA, 32 nt, Homo Sapiens
uuuuguuuacuuugcauuuaccgugagcaaag

SEQ ID NO: 414995 - RNA, 32 nt, Homo Sapiens
ugagacccagagcuccagggcuugucagaggc

SEQ ID NO: 414996 - RNA, 32 nt, Homo Sapiens
ucuccauuugaagagauucuucuggugauguu

SEQ ID NO: 414997 - RNA, 32 nt, Homo Sapiens
ucccugccucuugccugugucccagccugggu

SEQ ID NO: 414998 - RNA, 32 nt, Homo Sapiens
cuaaguaaaggcagugaauucuccauuuccua

SEQ ID NO: 414999 - RNA, 32 nt, Homo Sapiens
agagaauguuaccaccugaacaguccucggug

SEQ ID NO: 415000 - RNA, 32 nt, Homo Sapiens
uucuacuugucuaugaaugacaacuugaauua

SEQ ID NO: 415001 - RNA, 32 nt, Homo Sapiens
gucccagcccgcggcccucccccuccucggcg

SEQ ID NO: 415002 - RNA, 32 nt, Homo Sapiens
cgcgagccucucccggccccugcccgcgauga

SEQ ID NO: 415003 - RNA, 32 nt, Homo Sapiens
cuaaaaauagagcuaccauaugauccagcaau

SEQ ID NO: 415004 - RNA, 32 nt, Homo Sapiens
ugggccccauucucccuccauggcaggaaggc

SEQ ID NO: 415005 - RNA, 32 nt, Homo Sapiens
agaccugcggcacccacucugcucuccaagcg

SEQ ID NO: 415006 - RNA, 32 nt, Homo Sapiens
ucaguggguaaaacaaauucugauguacauuc

SEQ ID NO: 415007 - RNA, 32 nt, Homo Sapiens
caaggggcucagggcugcugccuuccuguccu

SEQ ID NO: 415008 - RNA, 32 nt, Homo Sapiens
agaaaagucugaaugagaagauggcaggacgu

SEQ ID NO: 415009 - RNA, 32 nt, Homo Sapiens
aauuuaaagauaaguguagaauugaucauuua

SEQ ID NO: 415010 - RNA, 32 nt, Homo Sapiens
acauugauuuucugugucguuguuaugaaagc

SEQ ID NO: 415011 - RNA, 32 nt, Homo Sapiens
ccgggguccuucccgaacggcagcggcugcgg

SEQ ID NO: 415012 - RNA, 32 nt, Homo Sapiens
cugucccuuccagccuggggcccccagaagca

SEQ ID NO: 415013 - RNA, 32 nt, Homo Sapiens
agaacuagauaaaacuauuuuaaaauucauac

SEQ ID NO: 415014 - RNA, 32 nt, Homo Sapiens
uggccuuucacugagccuccacagcagugggg

SEQ ID NO: 415015 - RNA, 32 nt, Homo Sapiens
uacugagauugugccacugcacuccagccugg

SEQ ID NO: 415016 - RNA, 32 nt, Homo Sapiens
guacaacaaaaauuucauuucugaauuuuaaa

SEQ ID NO: 415017 - RNA, 32 nt, Homo Sapiens
guuuuauuuuuaccugcgggcaucaugggcga

SEQ ID NO: 415018 - RNA, 32 nt, Homo Sapiens
guacauacaaauuacccagggauuuuguugaa

SEQ ID NO: 415019 - RNA, 32 nt, Homo Sapiens
uacugauuggaauacuuucauaaagaggcaau

SEQ ID NO: 415020 - RNA, 32 nt, Homo Sapiens
cgcgugucccggcucauccgcggccgcgccug

SEQ ID NO: 415021 - RNA, 32 nt, Homo Sapiens
ugguuguuucccuuuggacauucucagcaaau

SEQ ID NO: 415022 - RNA, 32 nt, Homo Sapiens
cuguagaaauuugagaugggcaaauggcuauu

SEQ ID NO: 415023 - RNA, 32 nt, Homo Sapiens
ggcccgccugcgcuugaggccugucugcguuu

SEQ ID NO: 415024 - RNA, 32 nt, Homo Sapiens
aagucugcaccucgguggcugagcauggcggg

SEQ ID NO: 415025 - RNA, 32 nt, Homo Sapiens
cccugggcgugggggugucaagcaugagucag

SEQ ID NO: 415026 - RNA, 32 nt, Homo Sapiens
uuguuuguauaaauaugccuggauuuucauua

SEQ ID NO: 415027 - RNA, 31 nt, Homo Sapiens
gggaguagaaaauuuuguguauaucagggca

SEQ ID NO: 415028 - RNA, 32 nt, Homo Sapiens
gucaguguuucuaugauuguaaacuauuaaau

SEQ ID NO: 415029 - RNA, 32 nt, Homo Sapiens
cgcccuuauuagacacauccaggacagaauga

SEQ ID NO: 415030 - RNA, 32 nt, Homo Sapiens
ucuaagaaucauuccuguacuacagaaggguu

SEQ ID NO: 415031 - RNA, 32 nt, Homo Sapiens
auuaacaguuccagcucuauguguuuccucua

SEQ ID NO: 415032 - RNA, 32 nt, Homo Sapiens
gguuucuggcauuuuccacaccuguccacucc

SEQ ID NO: 415033 - RNA, 32 nt, Homo Sapiens
gagaccagccuggccaacacaaugaaaccgug

SEQ ID NO: 415034 - RNA, 32 nt, Homo Sapiens
aaaguuaacuaaaugguugacacacacgaauu

SEQ ID NO: 415035 - RNA, 32 nt, Homo Sapiens
accaguuccuccugcugagcagcccuccugcc

SEQ ID NO: 415036 - RNA, 32 nt, Homo Sapiens
uuccuuuauuuuuucuuuucuaugcaagauaa

SEQ ID NO: 415037 - RNA, 32 nt, Homo Sapiens
aggugggaggggcaggaagcagccggagugag

SEQ ID NO: 415038 - RNA, 32 nt, Homo Sapiens
ccugacccgucuaauauauaaauauagagaug

SEQ ID NO: 415039 - RNA, 32 nt, Homo Sapiens
aaguauuuauugagcuucugucauaugcccag

SEQ ID NO: 415040 - RNA, 32 nt, Homo Sapiens
ugagaaauuccgacugcgggaccccagucucc

SEQ ID NO: 415041 - RNA, 32 nt, Homo Sapiens
ccaaacuaaaguuuacagucuuucuuucugaa

SEQ ID NO: 415042 - RNA, 32 nt, Homo Sapiens
uuuaaguuaaaaguuuugugauuuucuuauau

SEQ ID NO: 415043 - RNA, 31 nt, Homo Sapiens
gacaguggaucaugaaaagugcuguuuuguc

SEQ ID NO: 415044 - RNA, 32 nt, Homo Sapiens
ccugcgcuccucugcagccugagcuccacccu

SEQ ID NO: 415045 - RNA, 32 nt, Homo Sapiens
cagccugggagacagaguuagacuccgucuca

SEQ ID NO: 415046 - RNA, 32 nt, Homo Sapiens
uuuuacugacagucaaauggugaaggugggca

SEQ ID NO: 415047 - RNA, 32 nt, Homo Sapiens
uaucugaagucuagcaucucaaggcugaucug

SEQ ID NO: 415048 - RNA, 32 nt, Homo Sapiens
gccagccgccuggccuguggcaggccauuccc

SEQ ID NO: 415049 - RNA, 32 nt, Homo Sapiens
ggcucagggcaaugggcugaggucuugugucc

SEQ ID NO: 415050 - RNA, 32 nt, Homo Sapiens
gauuuguuuuaaaggugauucuuggguuugaa

SEQ ID NO: 415051 - RNA, 32 nt, Homo Sapiens
aaacccgaaccaaaaacugcaaagguggcagg

SEQ ID NO: 415052 - RNA, 32 nt, Homo Sapiens
cuauaagguucaaagucuugcuucaacuauuu

SEQ ID NO: 415053 - RNA, 32 nt, Homo Sapiens
ggauucgcgcgaaggggaggugucugggcgug

SEQ ID NO: 415054 - RNA, 32 nt, Homo Sapiens
cccggccuccaagccagcaucuuuaaucuuac

SEQ ID NO: 415055 - RNA, 32 nt, Homo Sapiens
ucuuaauuuuaaaaacuuaauuucaaagagga

SEQ ID NO: 415056 - RNA, 32 nt, Homo Sapiens
cugccgcccacgggcucugccccuuccagcug

SEQ ID NO: 415057 - RNA, 32 nt, Homo Sapiens
cucagagaaaucacugaaccucucaggaucaa

SEQ ID NO: 415058 - RNA, 32 nt, Homo Sapiens
aagcaaaacuaaaggcagguagccuggcgccu

SEQ ID NO: 415059 - RNA, 32 nt, Homo Sapiens
aucugguuucagccccgcugccgugcacggcg

SEQ ID NO: 415060 - RNA, 32 nt, Homo Sapiens
guaauuucagaugaauuauuaagcaaacauuu

SEQ ID NO: 415061 - RNA, 32 nt, Homo Sapiens
guuacugaaaugcugucucaacuuuuguuuua

SEQ ID NO: 415062 - RNA, 32 nt, Homo Sapiens
uaauuuuacuauuugcauucagucccagcgca

SEQ ID NO: 415063 - RNA, 32 nt, Homo Sapiens
acugcccucgacagcuuuaccucccccggacc

SEQ ID NO: 415064 - RNA, 32 nt, Homo Sapiens
gacccuccccugccggccugcgccagcuggac

SEQ ID NO: 415065 - RNA, 32 nt, Homo Sapiens
cauaauuuuuaaaauuuaaagaaugugucuuc

SEQ ID NO: 415066 - RNA, 32 nt, Homo Sapiens
ucugucauaggcauagagaguugcacauaaaa

SEQ ID NO: 415067 - RNA, 32 nt, Homo Sapiens
cacaugcgagcgggcgccuggcggcggcggcg

SEQ ID NO: 415068 - RNA, 32 nt, Homo Sapiens
ugauucuaagacaacagacaaacaacaacaag

SEQ ID NO: 415069 - RNA, 32 nt, Homo Sapiens
ggcgagggcgagcggcggggacuggggaaggg

SEQ ID NO: 415070 - RNA, 32 nt, Homo Sapiens
caccacauccagccuaauuuaagauuuuuaaa

SEQ ID NO: 415071 - RNA, 32 nt, Homo Sapiens
gcuguuuuguuauaaugccugauacacaucuu

SEQ ID NO: 415072 - RNA, 32 nt, Homo Sapiens
aacacucuggaacaaucuagaagggcuguggc

SEQ ID NO: 415073 - RNA, 32 nt, Homo Sapiens
caaagggaauaaaaaagucgccugacaguuaa

SEQ ID NO: 415074 - RNA, 32 nt, Homo Sapiens
caagcuucccagcagagccccacauccagcaa

SEQ ID NO: 415075 - RNA, 32 nt, Homo Sapiens
gauuuuuagauauaaagaugaaaaacucagau

SEQ ID NO: 415076 - RNA, 32 nt, Homo Sapiens
auuucuauacaacaggcaguggaagcaguuuc

SEQ ID NO: 415077 - RNA, 32 nt, Homo Sapiens
gcccuggcaguugaauggggcggcaauugcgg

SEQ ID NO: 415078 - RNA, 32 nt, Homo Sapiens
aaaccuucgaggggcgaguagggaguggggga

SEQ ID NO: 415079 - RNA, 32 nt, Homo Sapiens
uuucuguaauuuccaaauuuuccacauuuugu

SEQ ID NO: 415080 - RNA, 30 nt, Homo Sapiens
uauaaguaaaaauaaacuuucuguaaacca

SEQ ID NO: 415081 - RNA, 32 nt, Homo Sapiens
cccgcugccagagcccaccucuccuccuaggc

SEQ ID NO: 415082 - RNA, 32 nt, Homo Sapiens
gaucaccauggcggccucauugguggggaaga

SEQ ID NO: 415083 - RNA, 32 nt, Homo Sapiens
cgaaguccugucccaaguuccagccgcguccc

SEQ ID NO: 415084 - RNA, 32 nt, Homo Sapiens
gggcauucucaggcccgggggucuccuucccu

SEQ ID NO: 415085 - RNA, 32 nt, Homo Sapiens
agccccccugggugggggcaucaggagcaggg

SEQ ID NO: 415086 - RNA, 32 nt, Homo Sapiens
ucagaggaaugggggcugggccacucccuugg

SEQ ID NO: 415087 - RNA, 32 nt, Homo Sapiens
cuggaaaaaugaacacuucccugccaguuugu

SEQ ID NO: 415088 - RNA, 32 nt, Homo Sapiens
uuccuaugagagaauaauguaaugaauguagg

SEQ ID NO: 415089 - RNA, 32 nt, Homo Sapiens
gaggagccggguggugcagagccggagccgga

SEQ ID NO: 415090 - RNA, 32 nt, Homo Sapiens
ucaguaaaaagcuacuauauauuguuguuugu

SEQ ID NO: 415091 - RNA, 32 nt, Homo Sapiens
aacuguucagugagcugaaaaucugaaucaga

SEQ ID NO: 415092 - RNA, 32 nt, Homo Sapiens
aucauucuuagaaagccaggcuaaaucagagu

SEQ ID NO: 415093 - RNA, 32 nt, Homo Sapiens
ugaccggcucuucuccccguguaggggagccc

SEQ ID NO: 415094 - RNA, 29 nt, Homo Sapiens
ucuggcuccgcgggcaggacgccgccucg

SEQ ID NO: 415095 - RNA, 32 nt, Homo Sapiens
gccaugcucccucuccccccacuggcgucaca

SEQ ID NO: 415096 - RNA, 32 nt, Homo Sapiens
ggcgaugguggaggugauagggacuucaagag

SEQ ID NO: 415097 - RNA, 32 nt, Homo Sapiens
augauugcagaacagaaagagaagguggucaa

SEQ ID NO: 415098 - RNA, 32 nt, Homo Sapiens
ccccauucucagcuccuccuucgcggcgguac

SEQ ID NO: 415099 - RNA, 32 nt, Homo Sapiens
gcccuuauaggaacagaagaggaaagagagac

SEQ ID NO: 415100 - RNA, 32 nt, Homo Sapiens
gcugucuguccuguuuccuucauguuuugagu

SEQ ID NO: 415101 - RNA, 32 nt, Homo Sapiens
uuaaacuuguuuacaaagguuuaguuuuguaa

SEQ ID NO: 415102 - RNA, 32 nt, Homo Sapiens
gccauucagcaucuucuucugagaagcccaga

SEQ ID NO: 415103 - RNA, 32 nt, Homo Sapiens
cagaagggcuucugcaagcugcacagaacugg

SEQ ID NO: 415104 - RNA, 32 nt, Homo Sapiens
uuccucgugucuccgauucugagagaggggga

SEQ ID NO: 415105 - RNA, 32 nt, Homo Sapiens
cacaccuccaugaccaagggcgccagagugcu

SEQ ID NO: 415106 - RNA, 32 nt, Homo Sapiens
aaguuugcaauaacagaguacacaaguauagu

SEQ ID NO: 415107 - RNA, 32 nt, Homo Sapiens
uguauauuuacuauauggaguucugaguuaaa

SEQ ID NO: 415108 - RNA, 32 nt, Homo Sapiens
caguggcagaugacacaccaccccccgagcgu

SEQ ID NO: 415109 - RNA, 32 nt, Homo Sapiens
acacacugcccggcucagugcagugccccgcg

SEQ ID NO: 415110 - RNA, 30 nt, Homo Sapiens
gggacguggggcgaguaugggagccgccac

SEQ ID NO: 415111 - RNA, 32 nt, Homo Sapiens
cagcgcgcucugugcuggcgggcgcagaggcc

SEQ ID NO: 415112 - RNA, 32 nt, Homo Sapiens
caggugucacccacacuuuccucgguaucuug

SEQ ID NO: 415113 - RNA, 32 nt, Homo Sapiens
ucucuuggggucagggaggggcugggaagggc

SEQ ID NO: 415114 - RNA, 32 nt, Homo Sapiens
gcuuacuccacgggaacagccucuagauaauc

SEQ ID NO: 415115 - RNA, 32 nt, Homo Sapiens
gacuccuaacaauggaauauggccugggauga

SEQ ID NO: 415116 - RNA, 32 nt, Homo Sapiens
uugaaauuggcugaugaaaaaauauacauaaa

SEQ ID NO: 415117 - RNA, 32 nt, Homo Sapiens
cauacaaaagaaaaaauaacuggagagaucgu

SEQ ID NO: 415118 - RNA, 32 nt, Homo Sapiens
cguccucggcgugcucgacgccgccgccuggc

SEQ ID NO: 415119 - RNA, 32 nt, Homo Sapiens
acaacaaagaugggacaaaacccacuaauacu

SEQ ID NO: 415120 - RNA, 28 nt, Homo Sapiens
agagagaugaaccacauuauaaaguaau

SEQ ID NO: 415121 - RNA, 32 nt, Homo Sapiens
uaauacguucuggagaucuuaucuagucagcc

SEQ ID NO: 415122 - RNA, 32 nt, Homo Sapiens
ugcuuguguucguggccacgcugcugaucguc

SEQ ID NO: 415123 - RNA, 32 nt, Homo Sapiens
gaaccagugcuaaagaaaaugaaaacaccagg

SEQ ID NO: 415124 - RNA, 32 nt, Homo Sapiens
aggcugggcggcggguccugcugugccaucuc

SEQ ID NO: 415125 - RNA, 32 nt, Homo Sapiens
gagagccgccccccaaaccccccucccugcac

SEQ ID NO: 415126 - RNA, 32 nt, Homo Sapiens
uggugguaaggguaggaguugaaacagugaag

SEQ ID NO: 415127 - RNA, 32 nt, Homo Sapiens
ugcccuccgcagggagcagcuccagcugccug

SEQ ID NO: 415128 - RNA, 32 nt, Homo Sapiens
cucacgguuacauugcaaagccuuacucuaaa

SEQ ID NO: 415129 - RNA, 32 nt, Homo Sapiens
ugugacucugccggggacccuggcagcccccc

SEQ ID NO: 415130 - RNA, 32 nt, Homo Sapiens
auaccagccuacuguacuauuuaaaaugcuca

SEQ ID NO: 415131 - RNA, 32 nt, Homo Sapiens
gaacagguauuuuuauacaugcuuuuuguaaa

SEQ ID NO: 415132 - RNA, 32 nt, Homo Sapiens
uuuagccagcagugcccugcccugcccugcag

SEQ ID NO: 415133 - RNA, 32 nt, Homo Sapiens
gacauuuaagcuaaaggcaacucguacccaaa

SEQ ID NO: 415134 - RNA, 32 nt, Homo Sapiens
gugaagaugacaccccuccccaccaccucuca

SEQ ID NO: 415135 - RNA, 32 nt, Homo Sapiens
cagcuccuccagccccaccucccagcauggug

SEQ ID NO: 415136 - RNA, 32 nt, Homo Sapiens
uucuucgcgcccugguguggacacugccagcg

SEQ ID NO: 415137 - RNA, 32 nt, Homo Sapiens
ggaugggaggagaggacaagggaaaugucagg

SEQ ID NO: 415138 - RNA, 32 nt, Homo Sapiens
cccgcgcgccgcccgcuccgggugcugaaucc

SEQ ID NO: 415139 - RNA, 32 nt, Homo Sapiens
aaguaguugcuucauggcucugugcacucccu

SEQ ID NO: 415140 - RNA, 32 nt, Homo Sapiens
uaaauaccaaaauuuauuuaaagugcuuguuu

SEQ ID NO: 415141 - RNA, 32 nt, Homo Sapiens
ggcugcuugagauugguucugcucuuuucuuc

SEQ ID NO: 415142 - RNA, 32 nt, Homo Sapiens
uuucucuccaaauaaaugcaucuaaagauuga

SEQ ID NO: 415143 - RNA, 32 nt, Homo Sapiens
aauauaacaaguauaauuacauccuccaaugu

SEQ ID NO: 415144 - RNA, 32 nt, Homo Sapiens
ugaugcugcccauuccacugaaguucugaaau

SEQ ID NO: 415145 - RNA, 32 nt, Homo Sapiens
ccgugaugugacuucaagacuuucaggcugug

SEQ ID NO: 415146 - RNA, 32 nt, Homo Sapiens
guggguccugggugagcccauccagcugaugg

SEQ ID NO: 415147 - RNA, 32 nt, Homo Sapiens
cauuauaaacucuaggaaagauugaauaaaau

SEQ ID NO: 415148 - RNA, 32 nt, Homo Sapiens
agaauguggccucuccuguucucaggccccua

SEQ ID NO: 415149 - RNA, 32 nt, Homo Sapiens
uuguuaccaagaugugaaaaucuuauaagaaa

SEQ ID NO: 415150 - RNA, 32 nt, Homo Sapiens
ugccagggcuggaagcuuucauuugccgggac

SEQ ID NO: 415151 - RNA, 32 nt, Homo Sapiens
uguguaugaggccuucaugaacgguuaccuuc

SEQ ID NO: 415152 - RNA, 32 nt, Homo Sapiens
cggcaguuuuuuucuucuuaauuccacaugac

SEQ ID NO: 415153 - RNA, 32 nt, Homo Sapiens
uccuaccaaauauaaacuuguguaugauccaa

SEQ ID NO: 415154 - RNA, 32 nt, Homo Sapiens
aaaggugcuggguggcucuccggacaggagcu

SEQ ID NO: 415155 - RNA, 32 nt, Homo Sapiens
caucaaugccccaguucacauccaccugcuuc

SEQ ID NO: 415156 - RNA, 32 nt, Homo Sapiens
ggacccgccgggccgccgucguuuccagaaag

SEQ ID NO: 415157 - RNA, 32 nt, Homo Sapiens
ggcucuauguggcucacgcagccagaauccuu

SEQ ID NO: 415158 - RNA, 32 nt, Homo Sapiens
cgaccaggccccaagcggaaggccauuuuccc

SEQ ID NO: 415159 - RNA, 32 nt, Homo Sapiens
aucuuuagacuacacaggcaauaaucaagucu

SEQ ID NO: 415160 - RNA, 32 nt, Homo Sapiens
ucuguuccuugacugucuuuguguuucuguac

SEQ ID NO: 415161 - RNA, 28 nt, Homo Sapiens
gcucuggggcggcccgcuaggccagugc

SEQ ID NO: 415162 - RNA, 32 nt, Homo Sapiens
aguauuuuguccuagcagcauaaagaccuagc

SEQ ID NO: 415163 - RNA, 32 nt, Homo Sapiens
guagauuuuuaaauuucccuuuuggagagaaa

SEQ ID NO: 415164 - RNA, 32 nt, Homo Sapiens
gauuguuccacugucuggaagcaccauccccu

SEQ ID NO: 415165 - RNA, 32 nt, Homo Sapiens
uuucuucuccucccuauuucgcagauaucccg

SEQ ID NO: 415166 - RNA, 32 nt, Homo Sapiens
ugggccccaagccuuggacaaauccugggaaa

SEQ ID NO: 415167 - RNA, 32 nt, Homo Sapiens
caucucaaaaauucucuuuccauccuaccagc

SEQ ID NO: 415168 - RNA, 32 nt, Homo Sapiens
cucgccacgaacucagcccgccacagaagcgc

SEQ ID NO: 415169 - RNA, 32 nt, Homo Sapiens
agaggcccugcacguggauauuagaguuugcu

SEQ ID NO: 415170 - RNA, 32 nt, Homo Sapiens
cagcauaggaacaauaagaacaauagguaaag

SEQ ID NO: 415171 - RNA, 32 nt, Homo Sapiens
aauaauaaaaauuaaaacaacuagcaaguaug

SEQ ID NO: 415172 - RNA, 32 nt, Homo Sapiens
ggaccaauuaccucuuuuuugcucucccucga

SEQ ID NO: 415173 - RNA, 32 nt, Homo Sapiens
agaggucaaggaccuuccuguguaguuggugc

SEQ ID NO: 415174 - RNA, 32 nt, Homo Sapiens
agcaguguguuuauuaaccauccacuaagcua

SEQ ID NO: 415175 - RNA, 32 nt, Homo Sapiens
gcugucccaagccccacuccauggggccaggu

SEQ ID NO: 415176 - RNA, 32 nt, Homo Sapiens
gcuccguguuuagggagggcagugaucacgca

SEQ ID NO: 415177 - RNA, 32 nt, Homo Sapiens
cuccugguguggaagagcuccuugauauccuc

SEQ ID NO: 415178 - RNA, 30 nt, Homo Sapiens
cuuggcugucacccgaucgccagcaaaacu

SEQ ID NO: 415179 - RNA, 32 nt, Homo Sapiens
ucccucccauccccgcccgcuucccugucuaa

SEQ ID NO: 415180 - RNA, 32 nt, Homo Sapiens
caucuagguaaauuauuauuuuaauaagaacu

SEQ ID NO: 415181 - RNA, 32 nt, Homo Sapiens
ugcaaggcucuaggugugacaacagcaguugc

SEQ ID NO: 415182 - RNA, 32 nt, Homo Sapiens
gagaugaaucagggcccugcccugcccaccaa

SEQ ID NO: 415183 - RNA, 32 nt, Homo Sapiens
aaacuuguauaaauaacaauuguguaaugugu

SEQ ID NO: 415184 - RNA, 32 nt, Homo Sapiens
uacugggaaguauguuacagucuuagccagga

SEQ ID NO: 415185 - RNA, 32 nt, Homo Sapiens
cggcugcgcugcggcccggggcagugcggagc

SEQ ID NO: 415186 - RNA, 32 nt, Homo Sapiens
guuacugugucuaucgggucauuugggaaugg

SEQ ID NO: 415187 - RNA, 32 nt, Homo Sapiens
auguagcuggcguuuauaacuaccuucuuucg

SEQ ID NO: 415188 - RNA, 32 nt, Homo Sapiens
uuccaguccuuccucccaccagcccuuggucc

SEQ ID NO: 415189 - RNA, 32 nt, Homo Sapiens
gggugugcaucuucugcuucugcauccuuggu

SEQ ID NO: 415190 - RNA, 32 nt, Homo Sapiens
accacccuccugucacccggaccucaguggaa

SEQ ID NO: 415191 - RNA, 32 nt, Homo Sapiens
ucuacuaagcugaacccggacucaaugcuaac

SEQ ID NO: 415192 - RNA, 32 nt, Homo Sapiens
ugcaggcuuccacuuggucugaucagacuggu

SEQ ID NO: 415193 - RNA, 32 nt, Homo Sapiens
agcuuuggagaauggggugugagugggguagg

SEQ ID NO: 415194 - RNA, 32 nt, Homo Sapiens
aacagcaggugucaaggcuggcagcagugacu

SEQ ID NO: 415195 - RNA, 32 nt, Homo Sapiens
aauuaucugaagagucuuggacuuucauuucu

SEQ ID NO: 415196 - RNA, 32 nt, Homo Sapiens
aaacugccaauauagaaaaauaaaaaucucuu

SEQ ID NO: 415197 - RNA, 30 nt, Homo Sapiens
cgagggcagugcgugccgcuggcuaugcuc

SEQ ID NO: 415198 - RNA, 32 nt, Homo Sapiens
gcuggcuaaugcgguaccggcuagcguggcuu

SEQ ID NO: 415199 - RNA, 32 nt, Homo Sapiens
ccauauuuuaauugaugccuuuauugucccaa

SEQ ID NO: 415200 - RNA, 32 nt, Homo Sapiens
ccccgaccucuggcaggagccggcgccaguag

SEQ ID NO: 415201 - RNA, 32 nt, Homo Sapiens
ugggcacauacacccucccaagacuaaaucag

SEQ ID NO: 415202 - RNA, 32 nt, Homo Sapiens
gaagggaaggguggggggcagcugcggugggg

SEQ ID NO: 415203 - RNA, 30 nt, Homo Sapiens
acgcagcagccgcugccgccgccgcgggag

SEQ ID NO: 415204 - RNA, 32 nt, Homo Sapiens
gaaagccaagaaaacccagagaaggcaaaacu

SEQ ID NO: 415205 - RNA, 32 nt, Homo Sapiens
ggaguuuucuauuuuaaagaggaaucugaaag

SEQ ID NO: 415206 - RNA, 32 nt, Homo Sapiens
augaauagcagaacugacuuugaaggaaggaa

SEQ ID NO: 415207 - RNA, 28 nt, Homo Sapiens
gugucauggcggccggcgucgaguuggc

SEQ ID NO: 415208 - RNA, 32 nt, Homo Sapiens
aaagauggcagaaagaagaugaaaauaaauaa

SEQ ID NO: 415209 - RNA, 32 nt, Homo Sapiens
cagguggcugcacccuaggccaggcgcagagg

SEQ ID NO: 415210 - RNA, 32 nt, Homo Sapiens
aaagagcccugccggacuuuggcagucuguaa

SEQ ID NO: 415211 - RNA, 32 nt, Homo Sapiens
caaacaggccaguuuuaaccagcaugaugaag

SEQ ID NO: 415212 - RNA, 30 nt, Homo Sapiens
gugugagcccccgugccuggcccacaauaa

SEQ ID NO: 415213 - RNA, 32 nt, Homo Sapiens
aaugaauuuauuauauuuuucuuaguaaagug

SEQ ID NO: 415214 - RNA, 32 nt, Homo Sapiens
cucagucccgugggcucugaugcuuguuacua

SEQ ID NO: 415215 - RNA, 32 nt, Homo Sapiens
uguuacagcaaccugauuuuugaaaagaaaaa

SEQ ID NO: 415216 - RNA, 32 nt, Homo Sapiens
uagccuggccccagcuccugaucacugggaau

SEQ ID NO: 415217 - RNA, 32 nt, Homo Sapiens
ccgucggcacuaccacccugcuccaucaucac

SEQ ID NO: 415218 - RNA, 30 nt, Homo Sapiens
gaagugggaggugcuaugcacuuuuaaaca

SEQ ID NO: 415219 - RNA, 32 nt, Homo Sapiens
uugaauugccaguuuucagccuccucaugccu

SEQ ID NO: 415220 - RNA, 32 nt, Homo Sapiens
ugagaauuuuguaaggaacaaacauguuuuug

SEQ ID NO: 415221 - RNA, 32 nt, Homo Sapiens
ugcagaacugcccauucucauuacuguguccu

SEQ ID NO: 415222 - RNA, 32 nt, Homo Sapiens
aguacagguaguacugaaaaacaucuguuccu

SEQ ID NO: 415223 - RNA, 32 nt, Homo Sapiens
acaacgaucauuaaaucuuauguuguucguau

SEQ ID NO: 415224 - RNA, 32 nt, Homo Sapiens
aggagcugacagagccagaggcaccuaaacuu

SEQ ID NO: 415225 - RNA, 32 nt, Homo Sapiens
cauacuguauccucgaaacugcuaguuucaau

SEQ ID NO: 415226 - RNA, 32 nt, Homo Sapiens
auuucuuuuuuuucuuuuuuuugagauagagu

SEQ ID NO: 415227 - RNA, 32 nt, Homo Sapiens
uccuggucguugcgguuuucugcaucuugugg

SEQ ID NO: 415228 - RNA, 32 nt, Homo Sapiens
cuccggcucgggacgccucgggacgccucggg

SEQ ID NO: 415229 - RNA, 32 nt, Homo Sapiens
cuuugaguaacuucuugguugugcagucugca

SEQ ID NO: 415230 - RNA, 32 nt, Homo Sapiens
acugcaagauuauuugauaaagaguagcauga

SEQ ID NO: 415231 - RNA, 32 nt, Homo Sapiens
uucacacaccauauuucuuucaccuuuaaacu

SEQ ID NO: 415232 - RNA, 32 nt, Homo Sapiens
auaugucagucuauuaaauguacaccaaguaa

SEQ ID NO: 415233 - RNA, 32 nt, Homo Sapiens
aaaaauuguaaaucugaucauaucaacaugua

SEQ ID NO: 415234 - RNA, 32 nt, Homo Sapiens
cacccugcccacaaaacauugcucuuaacuuc

SEQ ID NO: 415235 - RNA, 32 nt, Homo Sapiens
cuguccuccgcggcgcccccuuccgccugacg

SEQ ID NO: 415236 - RNA, 32 nt, Homo Sapiens
ugguggggacgccucucagugccagucccgcc

SEQ ID NO: 415237 - RNA, 32 nt, Homo Sapiens
ugucucuggauuuuauuaagcaucucacuagu

SEQ ID NO: 415238 - RNA, 32 nt, Homo Sapiens
ucuuggggaaaggugccuuguugugaugaauu

SEQ ID NO: 415239 - RNA, 32 nt, Homo Sapiens
uuggccuaaugaaaauacauacuucuucauuc

SEQ ID NO: 415240 - RNA, 32 nt, Homo Sapiens
ccgggcccucgccggcccggccgcccgugccc

SEQ ID NO: 415241 - RNA, 32 nt, Homo Sapiens
aggacaaaaaauuuaaacugcuuauaauaauc

SEQ ID NO: 415242 - RNA, 32 nt, Homo Sapiens
gaaggcccagcauguaugaccccugccuccac

SEQ ID NO: 415243 - RNA, 32 nt, Homo Sapiens
ccccaagccaaggagaaguaucacuuuuagag

SEQ ID NO: 415244 - RNA, 32 nt, Homo Sapiens
uaagaggaagagaaggagagccaggcauggcu

SEQ ID NO: 415245 - RNA, 32 nt, Homo Sapiens
uuucagagacuuuggaggaaaaauuauuuuaa

SEQ ID NO: 415246 - RNA, 30 nt, Homo Sapiens
aggguaugggaagagaaaugaagaagacug

SEQ ID NO: 415247 - RNA, 32 nt, Homo Sapiens
ccucccacagccuccuucucaccuuuuccaua

SEQ ID NO: 415248 - RNA, 32 nt, Homo Sapiens
aucaagaguuauaauuacauuucaucacuaaa

SEQ ID NO: 415249 - RNA, 32 nt, Homo Sapiens
ugaacccacgguuucuuaauuucuuuucucuc

SEQ ID NO: 415250 - RNA, 32 nt, Homo Sapiens
gcucgccgcucccgccucacccgcaggggcuc

SEQ ID NO: 415251 - RNA, 32 nt, Homo Sapiens
ggaaaucugucuucuuuuuaaacucacuuaau

SEQ ID NO: 415252 - RNA, 32 nt, Homo Sapiens
aaggaaccagccagcucuuaccuccuccuggu

SEQ ID NO: 415253 - RNA, 32 nt, Homo Sapiens
cugcuacugcccaccaggccagguacugaguu

SEQ ID NO: 415254 - RNA, 32 nt, Homo Sapiens
gaauuugguugaagucacuuugauuucuuuaa

SEQ ID NO: 415255 - RNA, 32 nt, Homo Sapiens
ccugcugcaacagacccuccccgcgccccucc

SEQ ID NO: 415256 - RNA, 32 nt, Homo Sapiens
gaauaaagggcgcccgcggucccccagcaccu

SEQ ID NO: 415257 - RNA, 32 nt, Homo Sapiens
aaacaacagucaagccuaaaauuugagacccc

SEQ ID NO: 415258 - RNA, 32 nt, Homo Sapiens
gcagcauuuggaaaauuuuucuuauuuaccag

SEQ ID NO: 415259 - RNA, 32 nt, Homo Sapiens
aguuucucaaugccacucuuuuucagaguuuu

SEQ ID NO: 415260 - RNA, 32 nt, Homo Sapiens
gacaguagugaaaucuugugauuuuuaaucgc

SEQ ID NO: 415261 - RNA, 32 nt, Homo Sapiens
aggggcgccgcgcgcaagcccgcgggcucuuc

SEQ ID NO: 415262 - RNA, 30 nt, Homo Sapiens
gucagagagaagcgagucugggaggaggga

SEQ ID NO: 415263 - RNA, 32 nt, Homo Sapiens
uguaauuuguuuucuucaguguauuuuuaaaa

SEQ ID NO: 415264 - RNA, 30 nt, Homo Sapiens
gcucuucuggacucuucucucaggcaagaa

SEQ ID NO: 415265 - RNA, 32 nt, Homo Sapiens
aacucaucugcacuuccagguugaagcaaagc

SEQ ID NO: 415266 - RNA, 32 nt, Homo Sapiens
accagccuggccaacauggugaaacaccgucu

SEQ ID NO: 415267 - RNA, 32 nt, Homo Sapiens
cgagcgugguggcucacgccuguaaucccaac

SEQ ID NO: 415268 - RNA, 32 nt, Homo Sapiens
cagaaaagaggguccucacagauuuuuccuga

SEQ ID NO: 415269 - RNA, 32 nt, Homo Sapiens
caguagccguggcagcagccgcggcggcuccg

SEQ ID NO: 415270 - RNA, 32 nt, Homo Sapiens
caucaucuuccaugggcuuuccaggucacacg

SEQ ID NO: 415271 - RNA, 32 nt, Homo Sapiens
ccggggcucacucuccuuucagucauuccuca

SEQ ID NO: 415272 - RNA, 32 nt, Homo Sapiens
ccgguuucccccacccacugcccuccuucccu

SEQ ID NO: 415273 - RNA, 32 nt, Homo Sapiens
uccccugcucuucugagcugcccagucuugaa

SEQ ID NO: 415274 - RNA, 32 nt, Homo Sapiens
agguaaggggagaggauggaaugcuugccucc

SEQ ID NO: 415275 - RNA, 32 nt, Homo Sapiens
cagcugccgggcgagucagcggaguagcggcc

SEQ ID NO: 415276 - RNA, 31 nt, Homo Sapiens
acuuaacacaggaaaaaacuagguguuguuu

SEQ ID NO: 415277 - RNA, 32 nt, Homo Sapiens
cauuguggccacaggaggaaagggccgggggg

SEQ ID NO: 415278 - RNA, 32 nt, Homo Sapiens
ccuaaacccugccccaggaagcccacagccuc

SEQ ID NO: 415279 - RNA, 28 nt, Homo Sapiens
gcuauggcucccagcagcccccggcccg

SEQ ID NO: 415280 - RNA, 32 nt, Homo Sapiens
ugaugaugaugaugauaucuagaacuccaggu

SEQ ID NO: 415281 - RNA, 32 nt, Homo Sapiens
uauuuuguuaauaaaaucauuuucauaaugga

SEQ ID NO: 415282 - RNA, 32 nt, Homo Sapiens
agccagccaaaggcaaauaaaguuauugagug

SEQ ID NO: 415283 - RNA, 32 nt, Homo Sapiens
aaacagaugcaaauccuaccccugcccuuaau

SEQ ID NO: 415284 - RNA, 32 nt, Homo Sapiens
ucauauauguuuaagguugucuuucuagugag

SEQ ID NO: 415285 - RNA, 32 nt, Homo Sapiens
uugccauguacaaauuacugcuugacauguug

SEQ ID NO: 415286 - RNA, 30 nt, Homo Sapiens
uagcugggugugguggcggguccagcuacu

SEQ ID NO: 415287 - RNA, 31 nt, Homo Sapiens
ggugcaaugcaaggucaggaaugccacaauc

SEQ ID NO: 415288 - RNA, 32 nt, Homo Sapiens
gagccuguccugccugauggccccacagccau

SEQ ID NO: 415289 - RNA, 32 nt, Homo Sapiens
ccaauccuuaucaauucucaccaccccauaaa

SEQ ID NO: 415290 - RNA, 32 nt, Homo Sapiens
guucccuccgcggauucuccggggcugguuca

SEQ ID NO: 415291 - RNA, 32 nt, Homo Sapiens
ucgccguugcugucggccgaggccaccaagag

SEQ ID NO: 415292 - RNA, 32 nt, Homo Sapiens
agcccccaccaccccaggacugugggcccacg

SEQ ID NO: 415293 - RNA, 32 nt, Homo Sapiens
acccuugcagcuacccaauagcccuuggagcu

SEQ ID NO: 415294 - RNA, 32 nt, Homo Sapiens
ucccggcucuccgcagggaagccuccucuucg

SEQ ID NO: 415295 - RNA, 32 nt, Homo Sapiens
guacaauuaauagugauauuuuggacaaggag

SEQ ID NO: 415296 - RNA, 32 nt, Homo Sapiens
gcagccaaucccagagaagcagacgggauggc

SEQ ID NO: 415297 - RNA, 32 nt, Homo Sapiens
agucaagugucugauacacaucaucuugacug

SEQ ID NO: 415298 - RNA, 31 nt, Homo Sapiens
augagcuagacaagcuugccauagacauaau

SEQ ID NO: 415299 - RNA, 32 nt, Homo Sapiens
accuacauucagaauugaaagguguugguuaa

SEQ ID NO: 415300 - RNA, 32 nt, Homo Sapiens
gaagggacggucgggcuuccccggcccgcuga

SEQ ID NO: 415301 - RNA, 32 nt, Homo Sapiens
acauaacauagcgcggucaggcuuguggcaca

SEQ ID NO: 415302 - RNA, 32 nt, Homo Sapiens
ccacgcguccgggggugcugggccuggcgggc

SEQ ID NO: 415303 - RNA, 32 nt, Homo Sapiens
cgcuggcuguggaaaccccaguucuuggggga

SEQ ID NO: 415304 - RNA, 32 nt, Homo Sapiens
agaguccuggugacuuugaacaugcuggugcc

SEQ ID NO: 415305 - RNA, 32 nt, Homo Sapiens
guccuugcuccccaguuguccuguuucuguaa

SEQ ID NO: 415306 - RNA, 32 nt, Homo Sapiens
cuccagaggcagaacacauguuuucagagaag

SEQ ID NO: 415307 - RNA, 32 nt, Homo Sapiens
ccucagcagggccagccccaggagucuuuccc

SEQ ID NO: 415308 - RNA, 32 nt, Homo Sapiens
ggaauccauuuggagcagauaccguguuuucg

SEQ ID NO: 415309 - RNA, 32 nt, Homo Sapiens
ccagucccgagaccggcuggaucgcggccggc

SEQ ID NO: 415310 - RNA, 30 nt, Homo Sapiens
gggagcugggagcugggggaaacgacgcca

SEQ ID NO: 415311 - RNA, 32 nt, Homo Sapiens
gcauguccugugcuuuguggacgcugcugugu

SEQ ID NO: 415312 - RNA, 32 nt, Homo Sapiens
ucagggcagcauuuuccaggcggguuuguuuu

SEQ ID NO: 415313 - RNA, 32 nt, Homo Sapiens
cagccagaaaucaaaucuuauugaucaugaaa

SEQ ID NO: 415314 - RNA, 32 nt, Homo Sapiens
gagcugucaguuuugucuuguauccaacuugc

SEQ ID NO: 415315 - RNA, 32 nt, Homo Sapiens
agcagagccgaagcucgccggagaagaggagc

SEQ ID NO: 415316 - RNA, 28 nt, Homo Sapiens
uuacuaaggacugaucauuugaaauagu

SEQ ID NO: 415317 - RNA, 32 nt, Homo Sapiens
aaagacagucccagcccauucuccugucuggc

SEQ ID NO: 415318 - RNA, 31 nt, Homo Sapiens
guccucuaggccagcgagccccgcgcucucc

SEQ ID NO: 415319 - RNA, 32 nt, Homo Sapiens
aacuuuuucuuuccuuuuuuuuaauuuuagac

SEQ ID NO: 415320 - RNA, 32 nt, Homo Sapiens
acuuguacccucacuguaucuuggaaauaauu

SEQ ID NO: 415321 - RNA, 32 nt, Homo Sapiens
ggagugugcagggauggaguuuugcauuucua

SEQ ID NO: 415322 - RNA, 32 nt, Homo Sapiens
guuguuaauuuaacaaccaacccauccucaug

SEQ ID NO: 415323 - RNA, 32 nt, Homo Sapiens
ccugcccccacuuccuguuugggcccucuccc

SEQ ID NO: 415324 - RNA, 32 nt, Homo Sapiens
uccugccuuucccagacgaccgugcugagaag

SEQ ID NO: 415325 - RNA, 32 nt, Homo Sapiens
ggggguuucugcauccgggucaacgcucagcu

SEQ ID NO: 415326 - RNA, 32 nt, Homo Sapiens
aggugaugauauuuuuauucguugcuuuuuac

SEQ ID NO: 415327 - RNA, 32 nt, Homo Sapiens
auugccuguucuuuuccagccugauuuuuuuu

SEQ ID NO: 415328 - RNA, 32 nt, Homo Sapiens
gacagccuccucggagcccccgggacccagcg

SEQ ID NO: 415329 - RNA, 32 nt, Homo Sapiens
ucaacauggauacauauuucaguucuuucuuu

SEQ ID NO: 415330 - RNA, 32 nt, Homo Sapiens
aaacaaacaaacaaacaaaacuugcaucuuaa

SEQ ID NO: 415331 - RNA, 32 nt, Homo Sapiens
uuuuuaauuuaaaaagauauuaaccucaucac

SEQ ID NO: 415332 - RNA, 32 nt, Homo Sapiens
agggcgcggguggggggcgcugccggccucgu

SEQ ID NO: 415333 - RNA, 32 nt, Homo Sapiens
gcaaagguacucaggaccucauaggagucuua

SEQ ID NO: 415334 - RNA, 32 nt, Homo Sapiens
uuaugcacagcaaaaugugucuuguauuaaau

SEQ ID NO: 415335 - RNA, 32 nt, Homo Sapiens
ggcuuccagagaguccucuggauggcaccaga

SEQ ID NO: 415336 - RNA, 32 nt, Homo Sapiens
aaugaaguguauuuuauaagcauuuaauauuu

SEQ ID NO: 415337 - RNA, 32 nt, Homo Sapiens
aguaguguauuuucauuuugcauacuauucca

SEQ ID NO: 415338 - RNA, 32 nt, Homo Sapiens
aaacaaagguggcacuuuuuuauguuaaccuu

SEQ ID NO: 415339 - RNA, 32 nt, Homo Sapiens
caugcagagaggaggagguggagcaggagugg

SEQ ID NO: 415340 - RNA, 32 nt, Homo Sapiens
ucugcagaccucuagauggaggaggcacaauu

SEQ ID NO: 415341 - RNA, 32 nt, Homo Sapiens
ucuucccaauacuauucccacuccuccagaug

SEQ ID NO: 415342 - RNA, 32 nt, Homo Sapiens
acggggccgcugugcgcacgcgccgccgcaca

SEQ ID NO: 415343 - RNA, 32 nt, Homo Sapiens
gcagcucgcggccuccucccucgucguucccg

SEQ ID NO: 415344 - RNA, 32 nt, Homo Sapiens
uggaaaaugaacaauaaaaacuguagcagcau

SEQ ID NO: 415345 - RNA, 32 nt, Homo Sapiens
uaaacugucaugguuuaguuuacaauuuuuaa

SEQ ID NO: 415346 - RNA, 32 nt, Homo Sapiens
uaucugcugauugugcccuacucuuugcaccu

SEQ ID NO: 415347 - RNA, 32 nt, Homo Sapiens
uugucuuuaugugaagauauuuccuuuuccau

SEQ ID NO: 415348 - RNA, 32 nt, Homo Sapiens
gugcccagagcaugcagggaacccucgugcag

SEQ ID NO: 415349 - RNA, 28 nt, Homo Sapiens
guaaaaggagauaaacauuugagucagu

SEQ ID NO: 415350 - RNA, 32 nt, Homo Sapiens
gaauuuuugugauuaauugcuguuacuaguac

SEQ ID NO: 415351 - RNA, 32 nt, Homo Sapiens
caaaauccucuccuuguggaaauaucccaugc

SEQ ID NO: 415352 - RNA, 32 nt, Homo Sapiens
auuuacagcaccuaaaauuugcuuccuauaua

SEQ ID NO: 415353 - RNA, 31 nt, Homo Sapiens
cuggagugaaacacggggaccugaaggaugg

SEQ ID NO: 415354 - RNA, 32 nt, Homo Sapiens
uguuagcaauugaggugugcagagcacuguac

SEQ ID NO: 415355 - RNA, 32 nt, Homo Sapiens
cucugcuggucagucacgcaguugaggucagg

SEQ ID NO: 415356 - RNA, 32 nt, Homo Sapiens
cuggccccucccagccccgcgccaaugagugc

SEQ ID NO: 415357 - RNA, 32 nt, Homo Sapiens
augcccucccucccuuuccuaccacugcugag

SEQ ID NO: 415358 - RNA, 32 nt, Homo Sapiens
ccaggggaaugaauucaagagagauguccacg

SEQ ID NO: 415359 - RNA, 32 nt, Homo Sapiens
ccugagucaggaggucagugggcccuggaagg

SEQ ID NO: 415360 - RNA, 32 nt, Homo Sapiens
agccagucaccagcccucugccugcagccaug

SEQ ID NO: 415361 - RNA, 32 nt, Homo Sapiens
uccaaacaaccgacuccuuuccaggugaaggg

SEQ ID NO: 415362 - RNA, 32 nt, Homo Sapiens
uuuaucucccuguguccccuuccugcuuugag

SEQ ID NO: 415363 - RNA, 32 nt, Homo Sapiens
augaaauaauacuguauaagcauuccauauuu

SEQ ID NO: 415364 - RNA, 32 nt, Homo Sapiens
agugucuacauauauuauaugaauucaugaca

SEQ ID NO: 415365 - RNA, 32 nt, Homo Sapiens
uguugccugucgucuguaacucuaguguucga

SEQ ID NO: 415366 - RNA, 32 nt, Homo Sapiens
acuggagggcuuucugaaaacuccuggagcca

SEQ ID NO: 415367 - RNA, 32 nt, Homo Sapiens
ggcggcggcggcggcgcggacugggugcgcgg

SEQ ID NO: 415368 - RNA, 32 nt, Homo Sapiens
agacaugugcugagacacggcauggcauugaa

SEQ ID NO: 415369 - RNA, 32 nt, Homo Sapiens
ccucuguuuacuguguggcacccaggcaaaac

SEQ ID NO: 415370 - RNA, 32 nt, Homo Sapiens
uuucugcccuucuccuuugccuuccuucagca

SEQ ID NO: 415371 - RNA, 32 nt, Homo Sapiens
guuuccaaccucagcccaucugcgggcagaga

SEQ ID NO: 415372 - RNA, 32 nt, Homo Sapiens
cugaacucuucacccaaugaugaccugaccau

SEQ ID NO: 415373 - RNA, 32 nt, Homo Sapiens
agggcccaaagagggacaggggcuugccaggu

SEQ ID NO: 415374 - RNA, 32 nt, Homo Sapiens
ucuucuggaaaacccagauuauccaaagagag

SEQ ID NO: 415375 - RNA, 32 nt, Homo Sapiens
acgccugcaccgggcccuccagcccuccccug

SEQ ID NO: 415376 - RNA, 32 nt, Homo Sapiens
cagugacacgggggaccagugcuauaucugag

SEQ ID NO: 415377 - RNA, 32 nt, Homo Sapiens
uggcagcaggucggccgcccucccguccuccc

SEQ ID NO: 415378 - RNA, 32 nt, Homo Sapiens
gccacaaaccagucaccaaauucccagcaagu

SEQ ID NO: 415379 - RNA, 32 nt, Homo Sapiens
auuauccuugaagaccuucucccuuuucuuug

SEQ ID NO: 415380 - RNA, 32 nt, Homo Sapiens
uuuaauggaaaacacuccccucucccucuuuc

SEQ ID NO: 415381 - RNA, 32 nt, Homo Sapiens
cccucuccucuccgcccucccgcucgccaguc

SEQ ID NO: 415382 - RNA, 32 nt, Homo Sapiens
ccaaucuauauuagccucauuuguuuccucua

SEQ ID NO: 415383 - RNA, 32 nt, Homo Sapiens
ucauuagaaguuacagaaacuaaagcaauaaa

SEQ ID NO: 415384 - RNA, 32 nt, Homo Sapiens
aagacuauaucccacaccuggcucagaggguc

SEQ ID NO: 415385 - RNA, 32 nt, Homo Sapiens
gaccuagcuccauguuccuccuccucucuccc

SEQ ID NO: 415386 - RNA, 32 nt, Homo Sapiens
caagggagcgcgcccgcguuauccucguaccu

SEQ ID NO: 415387 - RNA, 32 nt, Homo Sapiens
caggucugcucgucuuuuuuguguuuuauauu

SEQ ID NO: 415388 - RNA, 32 nt, Homo Sapiens
agcaugcuucauaaaucaggguuuggcccucu

SEQ ID NO: 415389 - RNA, 30 nt, Homo Sapiens
uguauccaacuugccaaauuaucuuaagua

SEQ ID NO: 415390 - RNA, 32 nt, Homo Sapiens
aaggcccuggguccgcgcgcgguuugaccacg

SEQ ID NO: 415391 - RNA, 32 nt, Homo Sapiens
uccacgcggcucacucgaugccugcaggcccc

SEQ ID NO: 415392 - RNA, 32 nt, Homo Sapiens
guuugucuuucugugccuggcuuauuucacuc

SEQ ID NO: 415393 - RNA, 31 nt, Homo Sapiens
aaagaauggauugaaaggauauguauauacu

SEQ ID NO: 415394 - RNA, 32 nt, Homo Sapiens
gcugccagcugcugcuguccucgugcacugca

SEQ ID NO: 415395 - RNA, 32 nt, Homo Sapiens
cugucugcugucagccccuccuggugcuggug

SEQ ID NO: 415396 - RNA, 32 nt, Homo Sapiens
uaauaaacagaaaauaacauuugaagacucca

SEQ ID NO: 415397 - RNA, 32 nt, Homo Sapiens
aggaaagcucacgaucugggagaacuccaggc

SEQ ID NO: 415398 - RNA, 27 nt, Homo Sapiens
gggaaucauuaauuauugguuccugua

SEQ ID NO: 415399 - RNA, 32 nt, Homo Sapiens
uauuuugaguuaaaauaucuuuuggggaggau

SEQ ID NO: 415400 - RNA, 32 nt, Homo Sapiens
gcggagagggcuucuuuuccccaagggcagcg

SEQ ID NO: 415401 - RNA, 32 nt, Homo Sapiens
cagagggcuccugcuuugccaagccucgggga

SEQ ID NO: 415402 - RNA, 32 nt, Homo Sapiens
ucuggcauuuuuccaagccaagagaagaucga

SEQ ID NO: 415403 - RNA, 32 nt, Homo Sapiens
acagagguuugcggcagaaguggccaaugucg

SEQ ID NO: 415404 - RNA, 32 nt, Homo Sapiens
cucaaucuuuaauguguauccaaaucaccugg

SEQ ID NO: 415405 - RNA, 32 nt, Homo Sapiens
caaagccuaccuagauggauagaggacccaag

SEQ ID NO: 415406 - RNA, 32 nt, Homo Sapiens
cuccuauucacuuuucuucuccuuuccucuug

SEQ ID NO: 415407 - RNA, 32 nt, Homo Sapiens
acauccgcgaggucagaugcuuuccaacauga

SEQ ID NO: 415408 - RNA, 32 nt, Homo Sapiens
cucagaucaaagacauaagugaagccgcccug

SEQ ID NO: 415409 - RNA, 32 nt, Homo Sapiens
gugcuuccuggccacuugcuacucuagcuagg

SEQ ID NO: 415410 - RNA, 32 nt, Homo Sapiens
uuagaugaugaaauggacguugauuuggagcc

SEQ ID NO: 415411 - RNA, 32 nt, Homo Sapiens
ucccucugcccccuuccauccccaaccacauu

SEQ ID NO: 415412 - RNA, 32 nt, Homo Sapiens
cccguagccccggcccccgcccagccccaggu

SEQ ID NO: 415413 - RNA, 32 nt, Homo Sapiens
ucacggugagggaauggaccgacacggguauu

SEQ ID NO: 415414 - RNA, 32 nt, Homo Sapiens
aaaacuguaaguuuauacuugaggacugaagu

SEQ ID NO: 415415 - RNA, 32 nt, Homo Sapiens
ugggggccagcacagcugaggacccucagccc

SEQ ID NO: 415416 - RNA, 32 nt, Homo Sapiens
guuugaaauuuauuccugguaugacuuguguc

SEQ ID NO: 415417 - RNA, 32 nt, Homo Sapiens
aaauuuuuuguuuugcauccgaaaccgaaaga

SEQ ID NO: 415418 - RNA, 32 nt, Homo Sapiens
acuacugccccauuggaagaagaaccaggcau

SEQ ID NO: 415419 - RNA, 32 nt, Homo Sapiens
gacagcugugaggaucaaaaaauauaugaaag

SEQ ID NO: 415420 - RNA, 32 nt, Homo Sapiens
uucucugugggagggagggaguccuguguguu

SEQ ID NO: 415421 - RNA, 32 nt, Homo Sapiens
ccucgccagggaaccccaaacacacaggaccu

SEQ ID NO: 415422 - RNA, 32 nt, Homo Sapiens
cggggacucgcggcgccgccaggccgcgcuuu

SEQ ID NO: 415423 - RNA, 32 nt, Homo Sapiens
uguguacacacacccacuugcacaccccugua

SEQ ID NO: 415424 - RNA, 32 nt, Homo Sapiens
aaaagaccacgauccuccuugacgaguuuugu

SEQ ID NO: 415425 - RNA, 32 nt, Homo Sapiens
uaucaggaugccuuaaauuuauaguaguagac

SEQ ID NO: 415426 - RNA, 32 nt, Homo Sapiens
auauuccauuauaguuugugccacauuuuguu

SEQ ID NO: 415427 - RNA, 32 nt, Homo Sapiens
ucccaagggucucacugcucaccugaggauaa

SEQ ID NO: 415428 - RNA, 32 nt, Homo Sapiens
uuacugauagauguacuuaaguaaaucaugaa

SEQ ID NO: 415429 - RNA, 32 nt, Homo Sapiens
ggcugaaggcuccugggccaucuucaugugcu

SEQ ID NO: 415430 - RNA, 32 nt, Homo Sapiens
aagcuuuuucuuuuucucuaagguucuuuuuu

SEQ ID NO: 415431 - RNA, 32 nt, Homo Sapiens
gcuuuggaaggaucuuuuuuucuuuaacuaga

SEQ ID NO: 415432 - RNA, 32 nt, Homo Sapiens
ggcccgaggcucccggagcaucgcgcugggag

SEQ ID NO: 415433 - RNA, 32 nt, Homo Sapiens
gcagagcaccagccugggcaucaggaagccaa

SEQ ID NO: 415434 - RNA, 32 nt, Homo Sapiens
aaguuaaaacgaaugaaaaugaccagcucuga

SEQ ID NO: 415435 - RNA, 32 nt, Homo Sapiens
ggguuuuucuaaaaauaaaagauuacauuuac

SEQ ID NO: 415436 - RNA, 32 nt, Homo Sapiens
aaacucuccacucuccuccccuagaugccaug

SEQ ID NO: 415437 - RNA, 32 nt, Homo Sapiens
caccuccuagggauauaauucuggagacaugg

SEQ ID NO: 415438 - RNA, 32 nt, Homo Sapiens
ugguggugaaacaaaaucaaaacagauuugau

SEQ ID NO: 415439 - RNA, 32 nt, Homo Sapiens
guaaaauaauaacuagaacagaagaaaaagaa

SEQ ID NO: 415440 - RNA, 32 nt, Homo Sapiens
uacagcuucagcgugccugcgauggcguucau

SEQ ID NO: 415441 - RNA, 32 nt, Homo Sapiens
aauacugaaacacaaaacugcuuuugcucucu

SEQ ID NO: 415442 - RNA, 32 nt, Homo Sapiens
aacuagaugaaacuuuuaaaaaugauuuaaug

SEQ ID NO: 415443 - RNA, 32 nt, Homo Sapiens
ugcaauguuucauuaaaaucuucaguuuuuca

SEQ ID NO: 415444 - RNA, 32 nt, Homo Sapiens
ugaccaaagggagaauggagauaacaggggug

SEQ ID NO: 415445 - RNA, 32 nt, Homo Sapiens
cucaaagcugaauugagaucaggguuucuuuu

SEQ ID NO: 415446 - RNA, 32 nt, Homo Sapiens
ucaacugaccucuggacgcagaacuucagcca

SEQ ID NO: 415447 - RNA, 32 nt, Homo Sapiens
gauuaaaguugucauuggcaugcugcaguuuc

SEQ ID NO: 415448 - RNA, 32 nt, Homo Sapiens
uucuaaaaauuugggaggggaauauaguagua

SEQ ID NO: 415449 - RNA, 32 nt, Homo Sapiens
aacaagguggauccagagcuuuucuccuucga

SEQ ID NO: 415450 - RNA, 32 nt, Homo Sapiens
ucauauuguuuuauuuuaauuuuuucuggauc

SEQ ID NO: 415451 - RNA, 32 nt, Homo Sapiens
uaaggaaaauguuuucuuaaugagaugaugua

SEQ ID NO: 415452 - RNA, 32 nt, Homo Sapiens
cuuuaaauuuuuaaguuuuuuuucuuuuuagu

SEQ ID NO: 415453 - RNA, 32 nt, Homo Sapiens
agcauuuuuuaaaggauucuuuccaagcgaga

SEQ ID NO: 415454 - RNA, 32 nt, Homo Sapiens
ccucagugugcacgucugucuguccgucugug

SEQ ID NO: 415455 - RNA, 32 nt, Homo Sapiens
aaagggguggcuacuggucaucgugccacugg

SEQ ID NO: 415456 - RNA, 32 nt, Homo Sapiens
uucugcuuuaagccagaggcaccuggaacccu

SEQ ID NO: 415457 - RNA, 32 nt, Homo Sapiens
uggggaagcuggcuuucuggcugcuggaggcu

SEQ ID NO: 415458 - RNA, 32 nt, Homo Sapiens
caccaugcuggccagacugaggucucgaacug

SEQ ID NO: 415459 - RNA, 32 nt, Homo Sapiens
cgaggauuauaggcgucaccuaccacauccag

SEQ ID NO: 415460 - RNA, 32 nt, Homo Sapiens
cugaaaacaaaacaggcacagagcaccuccug

SEQ ID NO: 415461 - RNA, 32 nt, Homo Sapiens
uuuguccgcccggcggcgguggcggggggaug

SEQ ID NO: 415462 - RNA, 32 nt, Homo Sapiens
uuuuccauuauguauucauaauaauguuaauu

SEQ ID NO: 415463 - RNA, 32 nt, Homo Sapiens
cacaaguuuaaaaauauuauuaacuuguauuu

SEQ ID NO: 415464 - RNA, 32 nt, Homo Sapiens
caaccacuagccuccugccccgcggcgcugcc

SEQ ID NO: 415465 - RNA, 32 nt, Homo Sapiens
aauagaaaaagacaaacugccuuggaggagau

SEQ ID NO: 415466 - RNA, 32 nt, Homo Sapiens
gauucugagggacccaugaauuggauugaggc

SEQ ID NO: 415467 - RNA, 32 nt, Homo Sapiens
auugagcuuggggugggagauggggaacaggc

SEQ ID NO: 415468 - RNA, 32 nt, Homo Sapiens
aauaaacaaaaaugacacaauauaugugggug

SEQ ID NO: 415469 - RNA, 32 nt, Homo Sapiens
ccucagggcggagggggcggcgcugccgggcu

SEQ ID NO: 415470 - RNA, 32 nt, Homo Sapiens
ggucucaaacuccugaccucaagcgaucugcc

SEQ ID NO: 415471 - RNA, 32 nt, Homo Sapiens
cucuccuuucccuuucccucacuuaacccaga

SEQ ID NO: 415472 - RNA, 30 nt, Homo Sapiens
cuuccggccgcgcagcggugggcugagcua

SEQ ID NO: 415473 - RNA, 32 nt, Homo Sapiens
ugcguggccccggccuggggagccggaggccc

SEQ ID NO: 415474 - RNA, 32 nt, Homo Sapiens
gaaaaggugacagggagcugcccucgcucaag

SEQ ID NO: 415475 - RNA, 32 nt, Homo Sapiens
agagcucacuucccuuuccugccgcggagucu

SEQ ID NO: 415476 - RNA, 32 nt, Homo Sapiens
ugugcgcgaagauggcgggccggagcaugcaa

SEQ ID NO: 415477 - RNA, 32 nt, Homo Sapiens
caggcgacaagugggggacaaagcagaggcuc

SEQ ID NO: 415478 - RNA, 32 nt, Homo Sapiens
ggcgcaucgcggcgcgcacagacccaggauuu

SEQ ID NO: 415479 - RNA, 32 nt, Homo Sapiens
cuugcucccucuucagcccgcugaggagcuuu

SEQ ID NO: 415480 - RNA, 32 nt, Homo Sapiens
ugguggccugugccuguaaacccagcuacuca

SEQ ID NO: 415481 - RNA, 32 nt, Homo Sapiens
ggacccagggccagcugaaggugcugggugcc

SEQ ID NO: 415482 - RNA, 32 nt, Homo Sapiens
cuggugaggccucccccuucccaaguccauuc

SEQ ID NO: 415483 - RNA, 32 nt, Homo Sapiens
ugcuugcgccaggcgccggccgccccacugcg

SEQ ID NO: 415484 - RNA, 32 nt, Homo Sapiens
auagggcaccucaggcagaguccugaggcccc

SEQ ID NO: 415485 - RNA, 32 nt, Homo Sapiens
caaaaauuagccagacgugguggugggugccu

SEQ ID NO: 415486 - RNA, 32 nt, Homo Sapiens
ucaggguuaagcggcaggcaggauugggcuuu

SEQ ID NO: 415487 - RNA, 32 nt, Homo Sapiens
uaccaaugacuuccauauuuuaaaagagaaaa

SEQ ID NO: 415488 - RNA, 32 nt, Homo Sapiens
uaggaaacccucaggucugagauaggaguucu

SEQ ID NO: 415489 - RNA, 32 nt, Homo Sapiens
uuuauucugcuaaagaagaggaucauugauuu

SEQ ID NO: 415490 - RNA, 32 nt, Homo Sapiens
ugcacucaagcagagaagaaauccacaaagac

SEQ ID NO: 415491 - RNA, 32 nt, Homo Sapiens
aaacugugaaagcuagacugaaccauuggaaa

SEQ ID NO: 415492 - RNA, 32 nt, Homo Sapiens
caccauucagugaagguugugaacuuuauagu

SEQ ID NO: 415493 - RNA, 32 nt, Homo Sapiens
cccggaggaggaagaagaaguguuauacgucc

SEQ ID NO: 415494 - RNA, 32 nt, Homo Sapiens
ccaggcccacugaagcauguuccauuucuaaa

SEQ ID NO: 415495 - RNA, 32 nt, Homo Sapiens
uuuaaaauauuguaacugauaauuuccauaaa

SEQ ID NO: 415496 - RNA, 32 nt, Homo Sapiens
acaauggcauguauguacugugaugaaauuaa

SEQ ID NO: 415497 - RNA, 32 nt, Homo Sapiens
caccaauggaaugugcagaaauccaucccuau

SEQ ID NO: 415498 - RNA, 32 nt, Homo Sapiens
uuuguuguucuuccuccauucuaaacugcuaa

SEQ ID NO: 415499 - RNA, 32 nt, Homo Sapiens
ucugucuucauuuuggccccagcauucuuaau

SEQ ID NO: 415500 - RNA, 32 nt, Homo Sapiens
ggucccgcagaagaaaacauggcugccaaagu

SEQ ID NO: 415501 - RNA, 32 nt, Homo Sapiens
aacccacugugggucaggggaaugggaccagc

SEQ ID NO: 415502 - RNA, 32 nt, Homo Sapiens
caggcacagcagcucacgccuguaaucccauc

SEQ ID NO: 415503 - RNA, 32 nt, Homo Sapiens
auagaguuucacucuugucacccaggcuggag

SEQ ID NO: 415504 - RNA, 32 nt, Homo Sapiens
ucaguucccacuugcuuggguuccuggggguu

SEQ ID NO: 415505 - RNA, 32 nt, Homo Sapiens
ccaugccccccucccccaggcagcuccaagaa

SEQ ID NO: 415506 - RNA, 32 nt, Homo Sapiens
uuucauucaacacauuuuuaagaugcaugucu

SEQ ID NO: 415507 - RNA, 32 nt, Homo Sapiens
uaaaaauauaauuuauacuaugugaaaaaaua

SEQ ID NO: 415508 - RNA, 32 nt, Homo Sapiens
ggguuaaguacaugggugaauuuuauauguga

SEQ ID NO: 415509 - RNA, 32 nt, Homo Sapiens
uuucuuuucuaaaauugaugcuaugaaaauuu

SEQ ID NO: 415510 - RNA, 32 nt, Homo Sapiens
cccugggaaacccaccacaccaccacaaaaug

SEQ ID NO: 415511 - RNA, 32 nt, Homo Sapiens
ccucagcucaccgccacgaagaacgcgacuaa

SEQ ID NO: 415512 - RNA, 32 nt, Homo Sapiens
ugggaauugcuaucauguaaaauaucaaaguu

SEQ ID NO: 415513 - RNA, 28 nt, Homo Sapiens
acgcccgggcggcccugaaggggacggg

SEQ ID NO: 415514 - RNA, 32 nt, Homo Sapiens
gcugggaugaaugugacauagaccacagcagc

SEQ ID NO: 415515 - RNA, 32 nt, Homo Sapiens
aguacuguuucauagacagugggcucacaugu

SEQ ID NO: 415516 - RNA, 32 nt, Homo Sapiens
agaagacccuauacucagaggcgacaagcuua

SEQ ID NO: 415517 - RNA, 32 nt, Homo Sapiens
caucuaaaggucaacaaacauuuuauaccauc

SEQ ID NO: 415518 - RNA, 32 nt, Homo Sapiens
gaccacagaaaagugcugaggaugcuggccag

SEQ ID NO: 415519 - RNA, 29 nt, Homo Sapiens
gguaugucuacugggcgaaagcuaccugc

SEQ ID NO: 415520 - RNA, 32 nt, Homo Sapiens
ccaggauggagccccaggaaaccagguccugg

SEQ ID NO: 415521 - RNA, 32 nt, Homo Sapiens
agaacuuugccuucuuuuuuuaaugucuucca

SEQ ID NO: 415522 - RNA, 32 nt, Homo Sapiens
ggucugaugcugagucccacuuagcuuggggu

SEQ ID NO: 415523 - RNA, 32 nt, Homo Sapiens
uccuagcacugccccacaugcaugucugccua

SEQ ID NO: 415524 - RNA, 30 nt, Homo Sapiens
cggcacuggcccgugcugccugagaaggau

SEQ ID NO: 415525 - RNA, 32 nt, Homo Sapiens
ggaggcaaacaacccaucucucuuggagaauc

SEQ ID NO: 415526 - RNA, 32 nt, Homo Sapiens
uuaucuucugucagcauuuaugggauguuuaa

SEQ ID NO: 415527 - RNA, 32 nt, Homo Sapiens
caacaacaaaacaccucugucaauguaagaag

SEQ ID NO: 415528 - RNA, 32 nt, Homo Sapiens
uauaaaugaaacaacuaaugagaaaagaaaag

SEQ ID NO: 415529 - RNA, 32 nt, Homo Sapiens
aauuacucauuuccucagauaagaagaaauca

SEQ ID NO: 415530 - RNA, 32 nt, Homo Sapiens
cccauaaaauacaccucaugggcuccuacccc

SEQ ID NO: 415531 - RNA, 32 nt, Homo Sapiens
agauggcaugugcuuugaaaagaagauauugc

SEQ ID NO: 415532 - RNA, 32 nt, Homo Sapiens
gggaugggaaagggccuuguucuagcugaauc

SEQ ID NO: 415533 - RNA, 32 nt, Homo Sapiens
ggggggggggcgcuagggccgagaucaugucu

SEQ ID NO: 415534 - RNA, 32 nt, Homo Sapiens
aggguuuggucuuauuccauuuucuucugguc

SEQ ID NO: 415535 - RNA, 32 nt, Homo Sapiens
aaaagcagauuaaauuacaugauaaauguagc

SEQ ID NO: 415536 - RNA, 29 nt, Homo Sapiens
cucuauuaaggaagacauuuucuaauugc

SEQ ID NO: 415537 - RNA, 32 nt, Homo Sapiens
ucaacagaagaaagguuaaauauuacauuuuu

SEQ ID NO: 415538 - RNA, 32 nt, Homo Sapiens
auauaugaaacacuucaucagugcuuagcaua

SEQ ID NO: 415539 - RNA, 32 nt, Homo Sapiens
uuauauauaauaaagcaagauuguagguuugu

SEQ ID NO: 415540 - RNA, 32 nt, Homo Sapiens
aucugggagcagccuggguucccuggcaucga

SEQ ID NO: 415541 - RNA, 32 nt, Homo Sapiens
aucucuguggccucuggagagugacgucuccc

SEQ ID NO: 415542 - RNA, 32 nt, Homo Sapiens
acauaauaagcacuucuuuuuacuuguaucaa

SEQ ID NO: 415543 - RNA, 32 nt, Homo Sapiens
aaaggcagcaaaaacaaguaaaugacucagug

SEQ ID NO: 415544 - RNA, 32 nt, Homo Sapiens
aggcuucccgcuccccgcagcugguuugcaca

SEQ ID NO: 415545 - RNA, 32 nt, Homo Sapiens
cggcgcaggcacccgugccuccccucugccag

SEQ ID NO: 415546 - RNA, 32 nt, Homo Sapiens
aaucagugugcagcuggggucccaggcagcgc

SEQ ID NO: 415547 - RNA, 32 nt, Homo Sapiens
gaggagaggguguuuuuguaaaauugaauuca

SEQ ID NO: 415548 - RNA, 32 nt, Homo Sapiens
ugucuuaagucuuuuuguuuuguuuuguuuuu

SEQ ID NO: 415549 - RNA, 32 nt, Homo Sapiens
gaaaccauuggguucagcgaaaauggaaagau

SEQ ID NO: 415550 - RNA, 32 nt, Homo Sapiens
augcugggccagcgcaguggcucacaccugua

SEQ ID NO: 415551 - RNA, 32 nt, Homo Sapiens
uucaggguugccaugcugcugcugagcugauc

SEQ ID NO: 415552 - RNA, 32 nt, Homo Sapiens
uucaucuuauucugccuauugggaagaacaug

SEQ ID NO: 415553 - RNA, 32 nt, Homo Sapiens
aaaauacaaaaaugagcugggugugaugauac

SEQ ID NO: 415554 - RNA, 32 nt, Homo Sapiens
accgucucggcggcugcccccgccuccucugc

SEQ ID NO: 415555 - RNA, 32 nt, Homo Sapiens
guagcucuguguccugagaaauccagagugug

SEQ ID NO: 415556 - RNA, 32 nt, Homo Sapiens
cggcucugucuccugcgcucagcucugcucgg

SEQ ID NO: 415557 - RNA, 32 nt, Homo Sapiens
acccugggagcagucggcacagugcagcaagc

SEQ ID NO: 415558 - RNA, 32 nt, Homo Sapiens
ccccuucacacgcccccuaccggcccauguuu

SEQ ID NO: 415559 - RNA, 32 nt, Homo Sapiens
gagcaguguuccauuccauuaagcuuccuugc

SEQ ID NO: 415560 - RNA, 32 nt, Homo Sapiens
uuaaaauugagcuuuuuuuuuaaaggcccaaa

SEQ ID NO: 415561 - RNA, 32 nt, Homo Sapiens
uaccccuccugcgcugccccagagccugggaa

SEQ ID NO: 415562 - RNA, 32 nt, Homo Sapiens
agccggggcgccuccggucccgugccagcggu

SEQ ID NO: 415563 - RNA, 32 nt, Homo Sapiens
gcuugcucuguuaguucuuuguuuccuucccu

SEQ ID NO: 415564 - RNA, 32 nt, Homo Sapiens
uucuuugacauaaagaaaauaacuucugcuag

SEQ ID NO: 415565 - RNA, 32 nt, Homo Sapiens
cagcgcccgagggccgaggccuggacacggaa

SEQ ID NO: 415566 - RNA, 32 nt, Homo Sapiens
caguuuggaggcuugauguggguuuugaccug

SEQ ID NO: 415567 - RNA, 32 nt, Homo Sapiens
aauccugagguagaagacagaaugcagaaguc

SEQ ID NO: 415568 - RNA, 32 nt, Homo Sapiens
gcuuuauguggaccuauaaauaaaaauccaau

SEQ ID NO: 415569 - RNA, 32 nt, Homo Sapiens
uauuuccuguuuucauagacuauucaaauguu

SEQ ID NO: 415570 - RNA, 32 nt, Homo Sapiens
uuacauuauucuucuuuccccagucuccccuc

SEQ ID NO: 415571 - RNA, 32 nt, Homo Sapiens
gggcuauguguuggggcccuucuuccucauca

SEQ ID NO: 415572 - RNA, 32 nt, Homo Sapiens
gcucagggaaaggccagugugaaccgaggggc

SEQ ID NO: 415573 - RNA, 32 nt, Homo Sapiens
ggaggcugccccugcccuccccccaccaguug

SEQ ID NO: 415574 - RNA, 32 nt, Homo Sapiens
gcuucuucuucuaccaguggguucucauuuuc

SEQ ID NO: 415575 - RNA, 32 nt, Homo Sapiens
uuaaauauuuaguuugaaggucauucucacuu

SEQ ID NO: 415576 - RNA, 32 nt, Homo Sapiens
auagcccgguggaguucuccagccccgcguag

SEQ ID NO: 415577 - RNA, 32 nt, Homo Sapiens
cauaguguucccucucauccccaggguucguc

SEQ ID NO: 415578 - RNA, 32 nt, Homo Sapiens
gucagugggaaaaaaggagguuuuuagacuuu

SEQ ID NO: 415579 - RNA, 32 nt, Homo Sapiens
ugucaggacacucuucuauaauaaucucaauu

SEQ ID NO: 415580 - RNA, 32 nt, Homo Sapiens
cgggaacagccggcucagcagcuccugaguuc

SEQ ID NO: 415581 - RNA, 32 nt, Homo Sapiens
auucauuucccuggccccacagaugcuucccu

SEQ ID NO: 415582 - RNA, 32 nt, Homo Sapiens
ccaaguuuugggcuugcuauauaauccauuuu

SEQ ID NO: 415583 - RNA, 32 nt, Homo Sapiens
gggcacggacggccgggcgcgcgccucugcga

SEQ ID NO: 415584 - RNA, 32 nt, Homo Sapiens
ugguagaggcagccccgcccccggcccgcccc

SEQ ID NO: 415585 - RNA, 32 nt, Homo Sapiens
ugcggcuggcuaggcugucaaguacucccagg

SEQ ID NO: 415586 - RNA, 32 nt, Homo Sapiens
cgcuaaagccugaggcccgaggucagaggauu

SEQ ID NO: 415587 - RNA, 32 nt, Homo Sapiens
uuugagcaguugccuggaaggcugggcauuuc

SEQ ID NO: 415588 - RNA, 32 nt, Homo Sapiens
cucuaguagggagaggcucuggacagaugaau

SEQ ID NO: 415589 - RNA, 32 nt, Homo Sapiens
cucuggggguuucuccuuccuauguccugccc

SEQ ID NO: 415590 - RNA, 32 nt, Homo Sapiens
cgaccccgacccggcccggucaggccccauac

SEQ ID NO: 415591 - RNA, 32 nt, Homo Sapiens
aaagagucauauuuacaaaaaucuguacacac

SEQ ID NO: 415592 - RNA, 32 nt, Homo Sapiens
aaaguagaugccaggccacauaaaaauaaaug

SEQ ID NO: 415593 - RNA, 32 nt, Homo Sapiens
cuuucccccuccccuuuccccaccccgggcgc

SEQ ID NO: 415594 - RNA, 32 nt, Homo Sapiens
aaugucagaaggaaaagagaauuuuggccauc

SEQ ID NO: 415595 - RNA, 32 nt, Homo Sapiens
cuucucucacccagagcaccaacagcacccag

SEQ ID NO: 415596 - RNA, 32 nt, Homo Sapiens
guaguugcuaaugcagaacaaguucugucuug

SEQ ID NO: 415597 - RNA, 32 nt, Homo Sapiens
agcagccgagcugggggcgcgggcgggcggca

SEQ ID NO: 415598 - RNA, 32 nt, Homo Sapiens
ccacaugccgugggugcuggagcucagaagau

SEQ ID NO: 415599 - RNA, 32 nt, Homo Sapiens
agaacaguuaaaaccaaauguguuaugguaag

SEQ ID NO: 415600 - RNA, 32 nt, Homo Sapiens
uaauguauuuaguaaagaucauaagaaauccu

SEQ ID NO: 415601 - RNA, 32 nt, Homo Sapiens
guuauuaaaaauuugauacacacagaaaaucu

SEQ ID NO: 415602 - RNA, 32 nt, Homo Sapiens
caguucccaagccagcgccuggcuguucucuc

SEQ ID NO: 415603 - RNA, 31 nt, Homo Sapiens
gugugguagcgcagcugcuaccuagggaauu

SEQ ID NO: 415604 - RNA, 32 nt, Homo Sapiens
cacacacacacauacacacacacacacaaaac

SEQ ID NO: 415605 - RNA, 32 nt, Homo Sapiens
aggaugauuuaaaagaugcuuucuaucucugg

SEQ ID NO: 415606 - RNA, 32 nt, Homo Sapiens
caaccaguuggaaugaguuuucccuccuggca

SEQ ID NO: 415607 - RNA, 32 nt, Homo Sapiens
agcuggccagugcagagcugcugcucuuuuac

SEQ ID NO: 415608 - RNA, 32 nt, Homo Sapiens
aacugcacccugguccucuccccaguccccag

SEQ ID NO: 415609 - RNA, 32 nt, Homo Sapiens
cuacuccugugcucuggaggcugcagagcuga

SEQ ID NO: 415610 - RNA, 32 nt, Homo Sapiens
caagggacucuacuccauucuccccucucccc

SEQ ID NO: 415611 - RNA, 32 nt, Homo Sapiens
ugaggauguguccaguuugugcucuacgggug

SEQ ID NO: 415612 - RNA, 32 nt, Homo Sapiens
gcugguuauaaaacagauguuuuuuagauuau

SEQ ID NO: 415613 - RNA, 30 nt, Homo Sapiens
ccuuccgcgcccgugacgcggggccugaga

SEQ ID NO: 415614 - RNA, 31 nt, Homo Sapiens
cugggcucucggagaaagaagcuccuggcuc

SEQ ID NO: 415615 - RNA, 32 nt, Homo Sapiens
ggauuacaugggcuccuucuugguuuuugcug

SEQ ID NO: 415616 - RNA, 32 nt, Homo Sapiens
acccuguguaacaacuaaaguagaauuaucuc

SEQ ID NO: 415617 - RNA, 32 nt, Homo Sapiens
uaccccugucuccucuccuccuccagccccca

SEQ ID NO: 415618 - RNA, 32 nt, Homo Sapiens
uggaggucaguaauuuccaaugggcgggaggc

SEQ ID NO: 415619 - RNA, 32 nt, Homo Sapiens
augaaugaacaaaccugugaucuaguccuugu

SEQ ID NO: 415620 - RNA, 32 nt, Homo Sapiens
auccuuuccagaaugaucuauucugagcuuuc

SEQ ID NO: 415621 - RNA, 32 nt, Homo Sapiens
gcguauagaacaccccacucuccuuuaguaaa

SEQ ID NO: 415622 - RNA, 32 nt, Homo Sapiens
uauaaagauaaaaaauugguacacuccucaaa

SEQ ID NO: 415623 - RNA, 32 nt, Homo Sapiens
ucagaacgucuggguucuagucuugacugcca

SEQ ID NO: 415624 - RNA, 32 nt, Homo Sapiens
uuuaaccuggaaaguucuguauuuacagucug

SEQ ID NO: 415625 - RNA, 32 nt, Homo Sapiens
ggaaaauacaaaucuuaaccguacaauauugg

SEQ ID NO: 415626 - RNA, 32 nt, Homo Sapiens
ccuucauucuuacuaguuucauucuaaucaag

SEQ ID NO: 415627 - RNA, 32 nt, Homo Sapiens
acucugccaugaaaagcauccaggcguccuug

SEQ ID NO: 415628 - RNA, 32 nt, Homo Sapiens
gugggagacagagagacaagugugcucagagg

SEQ ID NO: 415629 - RNA, 32 nt, Homo Sapiens
ugggcucucugcccggcccaccccuccaaggg

SEQ ID NO: 415630 - RNA, 32 nt, Homo Sapiens
ucaauaucuauuuguugagcacuuauugauua

SEQ ID NO: 415631 - RNA, 32 nt, Homo Sapiens
gacaugcuaaaauggcuucugaaugaaauacg

SEQ ID NO: 415632 - RNA, 32 nt, Homo Sapiens
cugagcacgcgcaccuggcgccgcccgagcug

SEQ ID NO: 415633 - RNA, 32 nt, Homo Sapiens
gucccagccccaaccacgucccggcccccgac

SEQ ID NO: 415634 - RNA, 32 nt, Homo Sapiens
gucaaugcuuugcauucucaguccucugcaua

SEQ ID NO: 415635 - RNA, 32 nt, Homo Sapiens
agauggguuugugaauacggggugugggguug

SEQ ID NO: 415636 - RNA, 32 nt, Homo Sapiens
gugauucugcuaaagcuucucugucuuucccu

SEQ ID NO: 415637 - RNA, 32 nt, Homo Sapiens
cccgucucaacucuccaggguccugugcccuu

SEQ ID NO: 415638 - RNA, 32 nt, Homo Sapiens
uaaaaauaaaaugucgcauguaaaggcugaag

SEQ ID NO: 415639 - RNA, 32 nt, Homo Sapiens
cugaggccugacgccgccugcgucccggcuag

SEQ ID NO: 415640 - RNA, 32 nt, Homo Sapiens
gagacgauacagaaguccaagaugaacgccga

SEQ ID NO: 415641 - RNA, 32 nt, Homo Sapiens
ccugggccgagcuguuauuauuuauuauauaa

SEQ ID NO: 415642 - RNA, 32 nt, Homo Sapiens
ugccuaagaaugccucuucuuggggaaaagga

SEQ ID NO: 415643 - RNA, 32 nt, Homo Sapiens
uaagcuguuggaccuugcuaccuaaagccucu

SEQ ID NO: 415644 - RNA, 32 nt, Homo Sapiens
cucuuauguaccagcacuucugauggagaagc

SEQ ID NO: 415645 - RNA, 32 nt, Homo Sapiens
gcagccuugaacugugcugaagcgaucauccu

SEQ ID NO: 415646 - RNA, 32 nt, Homo Sapiens
acgaagaguauuuuugacagaauauguuucaa

SEQ ID NO: 415647 - RNA, 32 nt, Homo Sapiens
gcugcaucucgaacugcaucuaaucccagcac

SEQ ID NO: 415648 - RNA, 32 nt, Homo Sapiens
cgccccgccagacgucugcaucuuuaaggggc

SEQ ID NO: 415649 - RNA, 28 nt, Homo Sapiens
aucauggcagcagaugaugacaauggug

SEQ ID NO: 415650 - RNA, 32 nt, Homo Sapiens
agcgggaccugcccaucaguccugggccagga

SEQ ID NO: 415651 - RNA, 32 nt, Homo Sapiens
guugaggggacgaagggaccccugccccuguc

SEQ ID NO: 415652 - RNA, 32 nt, Homo Sapiens
acccccuuuccccacaccucccccugcugcug

SEQ ID NO: 415653 - RNA, 32 nt, Homo Sapiens
uggaaucaccgacuacugaaucuccuacaugu

SEQ ID NO: 415654 - RNA, 32 nt, Homo Sapiens
aucuagccaucuaaaauggagagaugaaucau

SEQ ID NO: 415655 - RNA, 32 nt, Homo Sapiens
cucuccagcagcugcuccugccugauucaacu

SEQ ID NO: 415656 - RNA, 32 nt, Homo Sapiens
cuccagagcugggaaaccuaccacaagaucua

SEQ ID NO: 415657 - RNA, 32 nt, Homo Sapiens
agagaaguuuacacagaaaugcugcuggccaa

SEQ ID NO: 415658 - RNA, 32 nt, Homo Sapiens
auuauaugucauuucacauuguaugccagaaa

SEQ ID NO: 415659 - RNA, 32 nt, Homo Sapiens
cccuuuuguaaaaauaaaggaacuggacccgu

SEQ ID NO: 415660 - RNA, 32 nt, Homo Sapiens
gaauuaugucucuggagaaggacaggaaauca

SEQ ID NO: 415661 - RNA, 32 nt, Homo Sapiens
ucagggcugaggggcugcgccacgccacggcc

SEQ ID NO: 415662 - RNA, 29 nt, Homo Sapiens
uuuauuuuucaauaaacuuuucuugugug

SEQ ID NO: 415663 - RNA, 32 nt, Homo Sapiens
ucucauucgccuuugucuuguacuucuguguu

SEQ ID NO: 415664 - RNA, 32 nt, Homo Sapiens
ccccauguugugugcacccccagcccaugcac

SEQ ID NO: 415665 - RNA, 31 nt, Homo Sapiens
aaauuucacagaagaggaaaguugccugcuc

SEQ ID NO: 415666 - RNA, 32 nt, Homo Sapiens
cuauuucuagggugcugucaggaccgaugaaa

SEQ ID NO: 415667 - RNA, 32 nt, Homo Sapiens
gagagacguaugagcuucuacugcacacaugc

SEQ ID NO: 415668 - RNA, 32 nt, Homo Sapiens
ugagauccugucaucacugccucucgagucgc

SEQ ID NO: 415669 - RNA, 30 nt, Homo Sapiens
cgagggcgcgcgcggggaggauggacgggu

SEQ ID NO: 415670 - RNA, 32 nt, Homo Sapiens
aacagggguucaguugggcagagucuaugagc

SEQ ID NO: 415671 - RNA, 32 nt, Homo Sapiens
ucaaauugagacuuuggggaaacuacacagca

SEQ ID NO: 415672 - RNA, 32 nt, Homo Sapiens
uguagcggggaccucugcugcagaugcuaggg

SEQ ID NO: 415673 - RNA, 30 nt, Homo Sapiens
cgggcgcccuuguucccgccggccaggucc

SEQ ID NO: 415674 - RNA, 32 nt, Homo Sapiens
augccuaucuccucaucucccccucccuuuug

SEQ ID NO: 415675 - RNA, 32 nt, Homo Sapiens
cuggcgcggagcuucgcgcugcugcugcccgu

SEQ ID NO: 415676 - RNA, 32 nt, Homo Sapiens
gagaguuccagccccagacgcccaccugugcc

SEQ ID NO: 415677 - RNA, 32 nt, Homo Sapiens
gccuccacccuggccuggggccccacucccuu

SEQ ID NO: 415678 - RNA, 32 nt, Homo Sapiens
uuauucaggcuuaugaagguaagcaugccaug

SEQ ID NO: 415679 - RNA, 32 nt, Homo Sapiens
gguggccaguguuggggucugcaccguguggc

SEQ ID NO: 415680 - RNA, 32 nt, Homo Sapiens
aacuuuuccccucacccuccagcccuggaggc

SEQ ID NO: 415681 - RNA, 32 nt, Homo Sapiens
uaucagacaguccucuauaacucuguacuacc

SEQ ID NO: 415682 - RNA, 32 nt, Homo Sapiens
uguucccuuuguaccacuguuuugccuuccuu

SEQ ID NO: 415683 - RNA, 32 nt, Homo Sapiens
gaauuccggcgucgcggacgcaucccagucug

SEQ ID NO: 415684 - RNA, 32 nt, Homo Sapiens
aggcucuguauccguggcagcggccguggcag

SEQ ID NO: 415685 - RNA, 32 nt, Homo Sapiens
acaguuuuguaucucauauuauauggacuuua

SEQ ID NO: 415686 - RNA, 32 nt, Homo Sapiens
auccuuuaaugaucugguggucuccucgucaa

SEQ ID NO: 415687 - RNA, 32 nt, Homo Sapiens
gccgggagacugggcucugccuaggcuucuug

SEQ ID NO: 415688 - RNA, 32 nt, Homo Sapiens
aggaccagcgguucugcgaguuuccggaaagg

SEQ ID NO: 415689 - RNA, 32 nt, Homo Sapiens
auggagaauuaaaacuuuguagacauuuugaa

SEQ ID NO: 415690 - RNA, 32 nt, Homo Sapiens
aaucagaaucauggagaaaaugggcgggggug

SEQ ID NO: 415691 - RNA, 32 nt, Homo Sapiens
gaaaucacugugguccaaauguaauucuuaca

SEQ ID NO: 415692 - RNA, 29 nt, Homo Sapiens
caaggugucuuugaaggaaagcuaagucu

SEQ ID NO: 415693 - RNA, 32 nt, Homo Sapiens
cacaugauaaaacccuaauuuucagcucuggc

SEQ ID NO: 415694 - RNA, 32 nt, Homo Sapiens
auuaugguuauaacagaagacauucaggaugg

SEQ ID NO: 415695 - RNA, 32 nt, Homo Sapiens
gugccacuggugccggugccugagagccucgc

SEQ ID NO: 415696 - RNA, 32 nt, Homo Sapiens
acuuugugcuuggagaaguuaauuauaggaau

SEQ ID NO: 415697 - RNA, 32 nt, Homo Sapiens
aguguggggcgcuauucccaccccugggccug

SEQ ID NO: 415698 - RNA, 32 nt, Homo Sapiens
agaauagguggaggaaucauggccaaaucaaa

SEQ ID NO: 415699 - RNA, 32 nt, Homo Sapiens
gggcugcccggcgggggcucuccuggcaaguc

SEQ ID NO: 415700 - RNA, 27 nt, Homo Sapiens
gaccuuuuggucuucagccucccucag

SEQ ID NO: 415701 - RNA, 32 nt, Homo Sapiens
gcuuugugcugggcgccggccgcgccagccac

SEQ ID NO: 415702 - RNA, 32 nt, Homo Sapiens
uacuccgcgccgccgggacgccgcgcggcugc

SEQ ID NO: 415703 - RNA, 32 nt, Homo Sapiens
uucaaccauggacuuuauaagccaguguugcc

SEQ ID NO: 415704 - RNA, 32 nt, Homo Sapiens
gugggugguuuuuugucuucuguuguccacag

SEQ ID NO: 415705 - RNA, 32 nt, Homo Sapiens
ccgcucaugucccacaccugccauauugaacc

SEQ ID NO: 415706 - RNA, 32 nt, Homo Sapiens
gagcuccggcgccugucguucuaauuggguuu

SEQ ID NO: 415707 - RNA, 32 nt, Homo Sapiens
gacauuuggggaucuggugggcagucgaacca

SEQ ID NO: 415708 - RNA, 30 nt, Homo Sapiens
ucgggacgauggcgcgcgguggccgcggcc

SEQ ID NO: 415709 - RNA, 32 nt, Homo Sapiens
ugauggggauggcauugaaucuguaaauuacc

SEQ ID NO: 415710 - RNA, 32 nt, Homo Sapiens
ucuuccagccccagcugcagccugcucugugg

SEQ ID NO: 415711 - RNA, 32 nt, Homo Sapiens
ccuaccaguuaucggaggcugcgggacuguuc

SEQ ID NO: 415712 - RNA, 32 nt, Homo Sapiens
ucuuggcuucggguugagaugagggacaggga

SEQ ID NO: 415713 - RNA, 32 nt, Homo Sapiens
aaauuuauauuaccaccagcauugaaaaugcc

SEQ ID NO: 415714 - RNA, 32 nt, Homo Sapiens
aggaucgcaguggucagaauccacgugcuuuc

SEQ ID NO: 415715 - RNA, 32 nt, Homo Sapiens
caggcaaagcgccagcagcccugcacuccacg

SEQ ID NO: 415716 - RNA, 32 nt, Homo Sapiens
gcccggggcuccugagccucugcgugugcccu

SEQ ID NO: 415717 - RNA, 32 nt, Homo Sapiens
uggcucugccagcagagugaaugaauuggagc

SEQ ID NO: 415718 - RNA, 32 nt, Homo Sapiens
gguaggacucggcagucugugcuuaacaagcc

SEQ ID NO: 415719 - RNA, 32 nt, Homo Sapiens
uacauuuuacugaaauguugcuccaucauauc

SEQ ID NO: 415720 - RNA, 32 nt, Homo Sapiens
gaggagcugucaugggggacuuccugccuguc

SEQ ID NO: 415721 - RNA, 32 nt, Homo Sapiens
guuccagaaggggaaauucucuucaagguaca

SEQ ID NO: 415722 - RNA, 32 nt, Homo Sapiens
guccagaaccagaaccagaggcacauaaauag

SEQ ID NO: 415723 - RNA, 32 nt, Homo Sapiens
cuuuuacugagaaaaauagauuaaugugaggu

SEQ ID NO: 415724 - RNA, 32 nt, Homo Sapiens
aaagggguaucagucuaaucucauggagaaaa

SEQ ID NO: 415725 - RNA, 32 nt, Homo Sapiens
cccugggcucucagggacccccugggucggcu

SEQ ID NO: 415726 - RNA, 32 nt, Homo Sapiens
cuuaaacaucuuuuucuuuucuuaauaaggga

SEQ ID NO: 415727 - RNA, 32 nt, Homo Sapiens
cccggaccgggcgggggcgccgacgugccuca

SEQ ID NO: 415728 - RNA, 32 nt, Homo Sapiens
ggaagccaccgccuugcuccaagccccugcag

SEQ ID NO: 415729 - RNA, 32 nt, Homo Sapiens
auaauaccuaccucacaggguuguugugagga

SEQ ID NO: 415730 - RNA, 32 nt, Homo Sapiens
cuucgccgugacccagcgugcgggcggcggga

SEQ ID NO: 415731 - RNA, 32 nt, Homo Sapiens
aaucuauucacugucaagguuuauugaaguca

SEQ ID NO: 415732 - RNA, 31 nt, Homo Sapiens
ccuaccccacccucaaugcuuguaaacacua

SEQ ID NO: 415733 - RNA, 32 nt, Homo Sapiens
cagcgugguaaaccucuguauauugagaccuu

SEQ ID NO: 415734 - RNA, 32 nt, Homo Sapiens
ucuucucucuuucuccuucaaacuugcucugc

SEQ ID NO: 415735 - RNA, 32 nt, Homo Sapiens
ggggaugggcggggcgcgcggccguuagcgcg

SEQ ID NO: 415736 - RNA, 32 nt, Homo Sapiens
uucuuucuuugcaccaaagacaucagucucca

SEQ ID NO: 415737 - RNA, 32 nt, Homo Sapiens
ggacagggccugguacagaacauaugacugag

SEQ ID NO: 415738 - RNA, 32 nt, Homo Sapiens
aaaucaaaacaucucucaagccaaaggagaag

SEQ ID NO: 415739 - RNA, 32 nt, Homo Sapiens
acugcggcgcuguugaauaaagggcaguccua

SEQ ID NO: 415740 - RNA, 31 nt, Homo Sapiens
uguuaguguaacaugaaaauugcaaagucag

SEQ ID NO: 415741 - RNA, 32 nt, Homo Sapiens
accaaaucuucagcuuccuucuccucaucccu

SEQ ID NO: 415742 - RNA, 32 nt, Homo Sapiens
acaccuuaauuaugaauuaaucuucguuccuc

SEQ ID NO: 415743 - RNA, 32 nt, Homo Sapiens
uccagggcaggcggcuucucagagcacaacag

SEQ ID NO: 415744 - RNA, 32 nt, Homo Sapiens
uccguugacauaggaauuuuacgauucccaaa

SEQ ID NO: 415745 - RNA, 32 nt, Homo Sapiens
agacugcauaugugguagaaagaaauggaggg

SEQ ID NO: 415746 - RNA, 32 nt, Homo Sapiens
cccauccuguuggacucaacacuuccucugaa

SEQ ID NO: 415747 - RNA, 32 nt, Homo Sapiens
ccagcgccggaccggccuccuccaugcgcucu

SEQ ID NO: 415748 - RNA, 31 nt, Homo Sapiens
acuuuucaauaaaaagaauaucauggucaaa

SEQ ID NO: 415749 - RNA, 32 nt, Homo Sapiens
accacacaagguguaaaaccaucaucagcuaa

SEQ ID NO: 415750 - RNA, 32 nt, Homo Sapiens
uugagaaaaaauauucuugcagcuaucaaagc

SEQ ID NO: 415751 - RNA, 32 nt, Homo Sapiens
cucugccaccauugcccucccgcccgcacaag

SEQ ID NO: 415752 - RNA, 32 nt, Homo Sapiens
aucuagaaaguaccguaagauaacaucuaauc

SEQ ID NO: 415753 - RNA, 32 nt, Homo Sapiens
gaccuguucugagccuggcccccgcccuagag

SEQ ID NO: 415754 - RNA, 32 nt, Homo Sapiens
guuuuaagcauaaaucccuguuuaguguuaca

SEQ ID NO: 415755 - RNA, 32 nt, Homo Sapiens
gacuggguuuguuuaaagucaggcagggcugg

SEQ ID NO: 415756 - RNA, 32 nt, Homo Sapiens
gggcgggcccuguggcugggcggcagccaguc

SEQ ID NO: 415757 - RNA, 32 nt, Homo Sapiens
agcuguacaaccaccaccaucuaguuccaaac

SEQ ID NO: 415758 - RNA, 32 nt, Homo Sapiens
ggcucauuccggaggaggagccaggcagcagg

SEQ ID NO: 415759 - RNA, 32 nt, Homo Sapiens
cccuuacaucuucauguauuguugguuuguuu

SEQ ID NO: 415760 - RNA, 32 nt, Homo Sapiens
ggugcuaaugcuuugcuuggggccuacaggug

SEQ ID NO: 415761 - RNA, 26 nt, Homo Sapiens
cauggguuccccuucagccuguccau

SEQ ID NO: 415762 - RNA, 32 nt, Homo Sapiens
cagaaaaugacaaaaccauauuuugacaaguu

SEQ ID NO: 415763 - RNA, 32 nt, Homo Sapiens
uucuaaacauauaaaugugaauuuaaucaauu

SEQ ID NO: 415764 - RNA, 32 nt, Homo Sapiens
gagacuaauuauugcacuuaaauauuugccug

SEQ ID NO: 415765 - RNA, 32 nt, Homo Sapiens
ccaugaccauagcugggugcuccaccugcugu

SEQ ID NO: 415766 - RNA, 31 nt, Homo Sapiens
acccacaguggcugccugccuccgggaggga

SEQ ID NO: 415767 - RNA, 32 nt, Homo Sapiens
auuuaacccaguaaguuuaugauccuuuuagg

SEQ ID NO: 415768 - RNA, 32 nt, Homo Sapiens
cgcgccgggaagggcugcgaagacucgcucuu

SEQ ID NO: 415769 - RNA, 32 nt, Homo Sapiens
cuggagcccgcacccuagcauccugcugccuu

SEQ ID NO: 415770 - RNA, 31 nt, Homo Sapiens
gaaucuuugugcucuugcugcaguuccaugu

SEQ ID NO: 415771 - RNA, 32 nt, Homo Sapiens
acaaccuuagaguauuucugauacaaaaugag

SEQ ID NO: 415772 - RNA, 32 nt, Homo Sapiens
agucuggucugaagaacauaacaggucuguga

SEQ ID NO: 415773 - RNA, 32 nt, Homo Sapiens
uugaucucuuucuagauucucuagguaauguu

SEQ ID NO: 415774 - RNA, 32 nt, Homo Sapiens
aggcuggguuuuccuccugcgucuccucugug

SEQ ID NO: 415775 - RNA, 32 nt, Homo Sapiens
ugcaagagggagaggggaaggagcugguagug

SEQ ID NO: 415776 - RNA, 32 nt, Homo Sapiens
gccaccuuccuaauuccuuacuucuacgccac

SEQ ID NO: 415777 - RNA, 32 nt, Homo Sapiens
cucacacaugacuccaaagggauugugagaau

SEQ ID NO: 415778 - RNA, 32 nt, Homo Sapiens
cccagcucccaaccgccuuucuaggccccgaa

SEQ ID NO: 415779 - RNA, 32 nt, Homo Sapiens
gcuauagagagaaagauaacuuauuguguguu

SEQ ID NO: 415780 - RNA, 30 nt, Homo Sapiens
aggugcccaggcuaugaugagucugcuuuu

SEQ ID NO: 415781 - RNA, 32 nt, Homo Sapiens
caacauggaaaacaggccuccccucccucucu

SEQ ID NO: 415782 - RNA, 32 nt, Homo Sapiens
cauugcacuccagccugggugacagagugaga

SEQ ID NO: 415783 - RNA, 32 nt, Homo Sapiens
cuuggagccaaagggauguggugugaguugcg

SEQ ID NO: 415784 - RNA, 32 nt, Homo Sapiens
cgcacgagccccacgagccgcucaccccgccg

SEQ ID NO: 415785 - RNA, 32 nt, Homo Sapiens
aucaacacuaaacuuuuaaaguuuacaaguuu

SEQ ID NO: 415786 - RNA, 32 nt, Homo Sapiens
acucgggugggggucccggcggcgguagcggc

SEQ ID NO: 415787 - RNA, 32 nt, Homo Sapiens
ccgguuaaacucugccauuaugccucuuacug

SEQ ID NO: 415788 - RNA, 32 nt, Homo Sapiens
ggucccuccucucgugccccagcggccugccc

SEQ ID NO: 415789 - RNA, 32 nt, Homo Sapiens
aaagcugaaaauaaaaccaggguuucuauuua

SEQ ID NO: 415790 - RNA, 32 nt, Homo Sapiens
augccagugaggcugugcugcggcugagcggg

SEQ ID NO: 415791 - RNA, 32 nt, Homo Sapiens
aacaaaccauuuugugugucuaauggaaguca

SEQ ID NO: 415792 - RNA, 32 nt, Homo Sapiens
cauagguuucuaacuuuuuuuauggcccugac

SEQ ID NO: 415793 - RNA, 32 nt, Homo Sapiens
cacugggcccugcaugagaagccugccaaggc

SEQ ID NO: 415794 - RNA, 32 nt, Homo Sapiens
ggacggcuccgucuucacauugugcacagauc

SEQ ID NO: 415795 - RNA, 32 nt, Homo Sapiens
ccuggggccccucuccccaacccuggggccac

SEQ ID NO: 415796 - RNA, 32 nt, Homo Sapiens
gggguuauaguucaugaggguuuucuaagaaa

SEQ ID NO: 415797 - RNA, 32 nt, Homo Sapiens
cguuguacugucuacauuggacagggcuguuc

SEQ ID NO: 415798 - RNA, 32 nt, Homo Sapiens
cacugcacuccagccugggugacagaacgaga

SEQ ID NO: 415799 - RNA, 32 nt, Homo Sapiens
cucccgcagccugcgaucuccagucuguggcu

SEQ ID NO: 415800 - RNA, 32 nt, Homo Sapiens
auuaacuugggaauauuuguuguuaaaaacuu

SEQ ID NO: 415801 - RNA, 32 nt, Homo Sapiens
ucucuucauaucuauuagggggaaaggaaaaa

SEQ ID NO: 415802 - RNA, 32 nt, Homo Sapiens
ccauucugcaugcccuccccacuucccccgau

SEQ ID NO: 415803 - RNA, 32 nt, Homo Sapiens
ggugcacggggaagagugggcggcggacgugg

SEQ ID NO: 415804 - RNA, 32 nt, Homo Sapiens
cuuccucccgaccccaggaccaggcuacuucu

SEQ ID NO: 415805 - RNA, 32 nt, Homo Sapiens
ucuaguaaugagaaacaaacuauuagucugcc

SEQ ID NO: 415806 - RNA, 32 nt, Homo Sapiens
cacugcacuccagccuggacgacagagugaga

SEQ ID NO: 415807 - RNA, 32 nt, Homo Sapiens
acccuaugcaucucuucaucugcaucucuugc

SEQ ID NO: 415808 - RNA, 32 nt, Homo Sapiens
gucgccgguccgacuguccucggcgguugguc

SEQ ID NO: 415809 - RNA, 32 nt, Homo Sapiens
auugguucgugugagcagcugcccagccccag

SEQ ID NO: 415810 - RNA, 32 nt, Homo Sapiens
aaaauacaaaaauuggucgggcaugguggugg

SEQ ID NO: 415811 - RNA, 32 nt, Homo Sapiens
aggcugcccaggugcuccggaauaggcagcaa

SEQ ID NO: 415812 - RNA, 32 nt, Homo Sapiens
cuugugucuuaguauauagugaauacagaaac

SEQ ID NO: 415813 - RNA, 32 nt, Homo Sapiens
ggcugugcaccgagacuauuccaggaagaaga

SEQ ID NO: 415814 - RNA, 32 nt, Homo Sapiens
cagaccuaaaaauaaucucugauucauauaaa

SEQ ID NO: 415815 - RNA, 32 nt, Homo Sapiens
ccagcugcuccggaugugccugcccacauugg

SEQ ID NO: 415816 - RNA, 32 nt, Homo Sapiens
guuacuuaaaaauacuuucugaggaagacaau

SEQ ID NO: 415817 - RNA, 32 nt, Homo Sapiens
ucucuguaaaaagcaggugacuuuccuaugac

SEQ ID NO: 415818 - RNA, 32 nt, Homo Sapiens
cucuggagugaagggauuaauauugaccagag

SEQ ID NO: 415819 - RNA, 32 nt, Homo Sapiens
agaucaguugacaguggcaauuaaacuguaaa

SEQ ID NO: 415820 - RNA, 32 nt, Homo Sapiens
ugguccccugacaccugggcagauggggucuc

SEQ ID NO: 415821 - RNA, 32 nt, Homo Sapiens
ucauaacaaauauaccagcauucaugauagca

SEQ ID NO: 415822 - RNA, 29 nt, Homo Sapiens
ugccuuuuauaugagugcugaggguaguu

SEQ ID NO: 415823 - RNA, 30 nt, Homo Sapiens
gucaccagagagcuugauauuucuccuaug

SEQ ID NO: 415824 - RNA, 32 nt, Homo Sapiens
uuucccacgcuucuccuuccaccuuccaugau

SEQ ID NO: 415825 - RNA, 32 nt, Homo Sapiens
cccaccccgagcuccugaagccggggucugag

SEQ ID NO: 415826 - RNA, 32 nt, Homo Sapiens
gugcuagcccuggcaggcacagcccuccccuc

SEQ ID NO: 415827 - RNA, 32 nt, Homo Sapiens
cccagugucaggaugguaauucuuauucuuuc

SEQ ID NO: 415828 - RNA, 32 nt, Homo Sapiens
aaguaaagguuugcaccuauuaaacuuaaaac

SEQ ID NO: 415829 - RNA, 32 nt, Homo Sapiens
gccacugcacuccagcuugggcgacagagcga

SEQ ID NO: 415830 - RNA, 32 nt, Homo Sapiens
uccggccgcucccgcggcccguggaugggggu

SEQ ID NO: 415831 - RNA, 32 nt, Homo Sapiens
auuucuaggucacuggggacuccggcagcaca

SEQ ID NO: 415832 - RNA, 27 nt, Homo Sapiens
uggacagauggauucugguguggggaa

SEQ ID NO: 415833 - RNA, 32 nt, Homo Sapiens
uuccaaaugcccucuccuagccugguuugacc

SEQ ID NO: 415834 - RNA, 32 nt, Homo Sapiens
ugaccugggaugcagcccucaggcugggcggc

SEQ ID NO: 415835 - RNA, 32 nt, Homo Sapiens
gaaaauugucuaucucaaaaucuuaccuuaua

SEQ ID NO: 415836 - RNA, 32 nt, Homo Sapiens
ccuuuuggcagcacaacuguuacucuagggag

SEQ ID NO: 415837 - RNA, 32 nt, Homo Sapiens
gagagaaacccacugaagacgucugcgugaga

SEQ ID NO: 415838 - RNA, 32 nt, Homo Sapiens
auaacucugaccacacagaaccagggcugccc

SEQ ID NO: 415839 - RNA, 32 nt, Homo Sapiens
uuuguguguucuuuucaccaccccuuuggcuc

SEQ ID NO: 415840 - RNA, 32 nt, Homo Sapiens
uauccuuugaugcacaggaguuuuaaaguuug

SEQ ID NO: 415841 - RNA, 32 nt, Homo Sapiens
ucguagcccuggagggucgugaucuccuacaa

SEQ ID NO: 415842 - RNA, 32 nt, Homo Sapiens
ucggcugcguccuccugcgagcgccggagagg

SEQ ID NO: 415843 - RNA, 32 nt, Homo Sapiens
ucauauuauccuguguucuuuccugacuggua

SEQ ID NO: 415844 - RNA, 32 nt, Homo Sapiens
aaagcaagacccauaaccauuaugcaaguguu

SEQ ID NO: 415845 - RNA, 32 nt, Homo Sapiens
agccugguucccucuuuccugugccaggacuc

SEQ ID NO: 415846 - RNA, 32 nt, Homo Sapiens
cuguggggagcuuggcggggcagacucugggu

SEQ ID NO: 415847 - RNA, 32 nt, Homo Sapiens
gugaguuuccggggcgacccagguccuccggc

SEQ ID NO: 415848 - RNA, 27 nt, Homo Sapiens
gaagggccuguguccagcccccaagga

SEQ ID NO: 415849 - RNA, 32 nt, Homo Sapiens
cuuugggcuugacaccugucuugaauaagagu

SEQ ID NO: 415850 - RNA, 32 nt, Homo Sapiens
gcagcuccaaggcaggaagagaauugggcauc

SEQ ID NO: 415851 - RNA, 32 nt, Homo Sapiens
ugaagacaauuuugauuuaauaugguaaugca

SEQ ID NO: 415852 - RNA, 32 nt, Homo Sapiens
guuuucuucagcgcccaggaugcagccggcua

SEQ ID NO: 415853 - RNA, 32 nt, Homo Sapiens
ggacauugaugucaagggauagccagacgccu

SEQ ID NO: 415854 - RNA, 32 nt, Homo Sapiens
cuucacugcagccccaucuccuccuccucccc

SEQ ID NO: 415855 - RNA, 32 nt, Homo Sapiens
cuggggaagacgcagaaggugaaggugcucac

SEQ ID NO: 415856 - RNA, 32 nt, Homo Sapiens
acagaacgcagacucccagaggaggcaggggu

SEQ ID NO: 415857 - RNA, 26 nt, Homo Sapiens
caugaccuccucggggccuggacccc

SEQ ID NO: 415858 - RNA, 32 nt, Homo Sapiens
acaaauaucagcaaagaacuuuuuuaaaaaga

SEQ ID NO: 415859 - RNA, 32 nt, Homo Sapiens
cauaaaaucuuccugcagaccacaauuccaga

SEQ ID NO: 415860 - RNA, 32 nt, Homo Sapiens
cucacuggcaaaggcuagcccggagcacccua

SEQ ID NO: 415861 - RNA, 32 nt, Homo Sapiens
aaguggauaaaacuuucauuggacuggaaugu

SEQ ID NO: 415862 - RNA, 32 nt, Homo Sapiens
uucaugcuuugauuuuuuuuuaaauuuuuuag

SEQ ID NO: 415863 - RNA, 32 nt, Homo Sapiens
gccgaaugucuccucagcauaagcuuucuuaa

SEQ ID NO: 415864 - RNA, 32 nt, Homo Sapiens
acgagggcgagggcacggccggguccuggcug

SEQ ID NO: 415865 - RNA, 32 nt, Homo Sapiens
uugacuuauuuucucuaauaguuuauuugcca

SEQ ID NO: 415866 - RNA, 32 nt, Homo Sapiens
aaaauuagagguuuuucuucgggugcauuuau

SEQ ID NO: 415867 - RNA, 32 nt, Homo Sapiens
ccgguccccagcugagugcccagcgcugagcu

SEQ ID NO: 415868 - RNA, 32 nt, Homo Sapiens
gaaguuguauugaaacaauuuaaugaaaauau

SEQ ID NO: 415869 - RNA, 32 nt, Homo Sapiens
ggugucaaggcaggauggaaaaggggacucuc

SEQ ID NO: 415870 - RNA, 32 nt, Homo Sapiens
ccagaacugccgccaccuucccugccccucac

SEQ ID NO: 415871 - RNA, 31 nt, Homo Sapiens
uacuucaaugcacagaaccagcagagucucc

SEQ ID NO: 415872 - RNA, 32 nt, Homo Sapiens
gauaguuugaccaagucguagaagcugaucca

SEQ ID NO: 415873 - RNA, 32 nt, Homo Sapiens
gagccccccacuuuucaucuguaaaaugguca

SEQ ID NO: 415874 - RNA, 32 nt, Homo Sapiens
ggcuggcagcggggacggugcgccggggcgca

SEQ ID NO: 415875 - RNA, 32 nt, Homo Sapiens
uccugaagucaucaaaugaaacauuaucugga

SEQ ID NO: 415876 - RNA, 32 nt, Homo Sapiens
uuuuuuaauuaaauuuuuuuuaauuuuuauag

SEQ ID NO: 415877 - RNA, 32 nt, Homo Sapiens
cugaaauguuucccaauucuuuauaugucuuu

SEQ ID NO: 415878 - RNA, 32 nt, Homo Sapiens
agccugaccaacauggagaaaccccgugucua

SEQ ID NO: 415879 - RNA, 32 nt, Homo Sapiens
gaccugggugaaaucauguuuucccuuuguua

SEQ ID NO: 415880 - RNA, 31 nt, Homo Sapiens
cccgggacaagcucgaacuccggccgccucg

SEQ ID NO: 415881 - RNA, 32 nt, Homo Sapiens
caacucucggugccguccccugcccucgcucg

SEQ ID NO: 415882 - RNA, 32 nt, Homo Sapiens
gcaggugcccggcagcucggcgccacggcuug

SEQ ID NO: 415883 - RNA, 27 nt, Homo Sapiens
cgaugcggccgcggcuguggcuccucc

SEQ ID NO: 415884 - RNA, 32 nt, Homo Sapiens
auugggguggggggagguuaaagggaauacca

SEQ ID NO: 415885 - RNA, 32 nt, Homo Sapiens
ggcguuggacucuuugcgaggaccccggcggc

SEQ ID NO: 415886 - RNA, 32 nt, Homo Sapiens
ccccuucccuccccagauauuuaugugaaaug

SEQ ID NO: 415887 - RNA, 32 nt, Homo Sapiens
gcggccacccucggguccccaugcucucuggg

SEQ ID NO: 415888 - RNA, 32 nt, Homo Sapiens
uugcuuuuuuauuccucacagcuccucccguc

SEQ ID NO: 415889 - RNA, 32 nt, Homo Sapiens
augcagucugcacuuuuuauguacuuuuuaag

SEQ ID NO: 415890 - RNA, 32 nt, Homo Sapiens
ggaaguguggguuugucuccagaacagaagag

SEQ ID NO: 415891 - RNA, 32 nt, Homo Sapiens
gcucugugagggccagagucagggccagucau

SEQ ID NO: 415892 - RNA, 32 nt, Homo Sapiens
ugcugcucaguuccuacgcuucgcaucccuuc

SEQ ID NO: 415893 - RNA, 32 nt, Homo Sapiens
cuuaggaagagaucacccaaccagagacuucg

SEQ ID NO: 415894 - RNA, 32 nt, Homo Sapiens
guuuccuaggacucacccacuccauucaaugu

SEQ ID NO: 415895 - RNA, 32 nt, Homo Sapiens
uccuggaacuucugccuccaccucgcugggga

SEQ ID NO: 415896 - RNA, 32 nt, Homo Sapiens
ugaagcccauggugaaucccacuaccgugucu

SEQ ID NO: 415897 - RNA, 32 nt, Homo Sapiens
uguucuucaaggauucugagacugaauauugu

SEQ ID NO: 415898 - RNA, 32 nt, Homo Sapiens
ugaacccgcgucugccugccgccccgccaugc

SEQ ID NO: 415899 - RNA, 29 nt, Homo Sapiens
ccucaugcuaucugacuucaaacuauacu

SEQ ID NO: 415900 - RNA, 32 nt, Homo Sapiens
acgucacggcagccuccgcagaugaggcuacu

SEQ ID NO: 415901 - RNA, 32 nt, Homo Sapiens
uauuaccccgguucuuuccccaccccaggucu

SEQ ID NO: 415902 - RNA, 32 nt, Homo Sapiens
uuuuaauuuuguuauuugauacuacugguugc

SEQ ID NO: 415903 - RNA, 32 nt, Homo Sapiens
ccaggccccaagcccaggauuggggucuccag

SEQ ID NO: 415904 - RNA, 32 nt, Homo Sapiens
acagaacgacuuuagacaagcacauguuacac

SEQ ID NO: 415905 - RNA, 32 nt, Homo Sapiens
uguguuucaaccaugucacaaaaaucauauaa

SEQ ID NO: 415906 - RNA, 32 nt, Homo Sapiens
gggauaagggaugcuuccugugacaacuugaa

SEQ ID NO: 415907 - RNA, 32 nt, Homo Sapiens
agccuccuccuucucccgcccuccucaccucg

SEQ ID NO: 415908 - RNA, 32 nt, Homo Sapiens
auuugaguauauuuucucuuagacauuaaauu

SEQ ID NO: 415909 - RNA, 32 nt, Homo Sapiens
uguuguuuuaugucuuuguuauauaauuguac

SEQ ID NO: 415910 - RNA, 32 nt, Homo Sapiens
gacucuucucaccuuaaauagucauauauuaa

SEQ ID NO: 415911 - RNA, 32 nt, Homo Sapiens
cuucgcccccaggccuaggaccgcggugggug

SEQ ID NO: 415912 - RNA, 32 nt, Homo Sapiens
uuuguuggaaagauuaucucuagaguuauauu

SEQ ID NO: 415913 - RNA, 32 nt, Homo Sapiens
gguuuuuccauguuggccaggcuggucuugaa

SEQ ID NO: 415914 - RNA, 32 nt, Homo Sapiens
gcugcccccgccagcucuggcuguuuagcuug

SEQ ID NO: 415915 - RNA, 32 nt, Homo Sapiens
ccgucuguuguccguccgcccgcgggugccau

SEQ ID NO: 415916 - RNA, 28 nt, Homo Sapiens
aacauggcggguguggaggagguagcgg

SEQ ID NO: 415917 - RNA, 32 nt, Homo Sapiens
aaccaaaccacccaaggccagcccuuaagccu

SEQ ID NO: 415918 - RNA, 32 nt, Homo Sapiens
acaaaacaaaacaaaauuuguguuuggcuaag

SEQ ID NO: 415919 - RNA, 32 nt, Homo Sapiens
aguaauccaacccacaccugagaacucgucuc

SEQ ID NO: 415920 - RNA, 32 nt, Homo Sapiens
ugcuccugaucccccuucuccuugcaucaccc

SEQ ID NO: 415921 - RNA, 32 nt, Homo Sapiens
aucucucaccuuccaauaccaauaagaaacaa

SEQ ID NO: 415922 - RNA, 32 nt, Homo Sapiens
uaaguaauguacuuguuauccaaacacuagca

SEQ ID NO: 415923 - RNA, 32 nt, Homo Sapiens
cucucccggcgcggccgccgccgaucacagca

SEQ ID NO: 415924 - RNA, 32 nt, Homo Sapiens
uuuagauuauuauuauuuuguaucaugggacu

SEQ ID NO: 415925 - RNA, 32 nt, Homo Sapiens
ccuccauccucucucuccuuggcacuuuccac

SEQ ID NO: 415926 - RNA, 32 nt, Homo Sapiens
agcccaggaguccucggccagcccugccugcc

SEQ ID NO: 415927 - RNA, 29 nt, Homo Sapiens
uuggcugugacuuucauacucugcucuua

SEQ ID NO: 415928 - RNA, 32 nt, Homo Sapiens
ccugauauauauacaauuaaaauaucuguaua

SEQ ID NO: 415929 - RNA, 32 nt, Homo Sapiens
uguuaaaaugauaacuaacaugugaauaaaau

SEQ ID NO: 415930 - RNA, 32 nt, Homo Sapiens
aggcacucggcacaauccgcuuaauagcucuc

SEQ ID NO: 415931 - RNA, 32 nt, Homo Sapiens
ccuuugguuaauuuauaacugauauaaaacua

SEQ ID NO: 415932 - RNA, 32 nt, Homo Sapiens
ccgccccagccagcugauuggaugcuggcugg

SEQ ID NO: 415933 - RNA, 32 nt, Homo Sapiens
cuaaacaaagggaagaacuuuuuaugaacucc

SEQ ID NO: 415934 - RNA, 32 nt, Homo Sapiens
acuuuaccuuccagaacaaaaugacuccugau

SEQ ID NO: 415935 - RNA, 32 nt, Homo Sapiens
caagacuaacuaguuauaaucauucccuuaaa

SEQ ID NO: 415936 - RNA, 32 nt, Homo Sapiens
uccggagcuggguugcuucugcugcaguacag

SEQ ID NO: 415937 - RNA, 32 nt, Homo Sapiens
ggagaaauguguucuucaguaccaucagauca

SEQ ID NO: 415938 - RNA, 32 nt, Homo Sapiens
agcaacaguccccagccgcggguucccuaagu

SEQ ID NO: 415939 - RNA, 32 nt, Homo Sapiens
accugggaggaacguuccccuuugcaaggcau

SEQ ID NO: 415940 - RNA, 32 nt, Homo Sapiens
ugacucacauuuauauuuccuguuuuucccuu

SEQ ID NO: 415941 - RNA, 32 nt, Homo Sapiens
gagaagccuucaguaacauaugcaacauaucg

SEQ ID NO: 415942 - RNA, 32 nt, Homo Sapiens
aagugcuccgaaguggagaucaccuugaagac

SEQ ID NO: 415943 - RNA, 32 nt, Homo Sapiens
gccaagaguccagguuuuuagagaacaggcca

SEQ ID NO: 415944 - RNA, 32 nt, Homo Sapiens
uauggucauuccauuuugaaauguagaaaauc

SEQ ID NO: 415945 - RNA, 32 nt, Homo Sapiens
cccucacgcaggcccauggcggcggccgcggc

SEQ ID NO: 415946 - RNA, 32 nt, Homo Sapiens
gagggauguacuuucagaucauguaaccuauu

SEQ ID NO: 415947 - RNA, 32 nt, Homo Sapiens
uguugggagguggagggaaagaacuacuauuu

SEQ ID NO: 415948 - RNA, 32 nt, Homo Sapiens
aaggcaggcagacaguggaggccucccuuccu

SEQ ID NO: 415949 - RNA, 32 nt, Homo Sapiens
aagugcagccagcagcccugcccugccaggug

SEQ ID NO: 415950 - RNA, 32 nt, Homo Sapiens
ccucccucgucguucccggccccggcccccca

SEQ ID NO: 415951 - RNA, 32 nt, Homo Sapiens
ugaccucccccaagccaaccacuuucaccugg

SEQ ID NO: 415952 - RNA, 32 nt, Homo Sapiens
acuguagggggaggauuugaaggugugggacu

SEQ ID NO: 415953 - RNA, 32 nt, Homo Sapiens
uggaggaagaguugcguccggcugggauucca

SEQ ID NO: 415954 - RNA, 32 nt, Homo Sapiens
acuuuacuaucauuuuaguggaugcaagagga

SEQ ID NO: 415955 - RNA, 32 nt, Homo Sapiens
gcccgcgcaccgaggcgcuaggggcaccgcgc

SEQ ID NO: 415956 - RNA, 32 nt, Homo Sapiens
ucuuauuuuuauucucuuaagucuuuauuaac

SEQ ID NO: 415957 - RNA, 32 nt, Homo Sapiens
gaccagacauaaaacuuuuggugcucaaguca

SEQ ID NO: 415958 - RNA, 32 nt, Homo Sapiens
gggaaaggggagaggguuuuucucacugugcc

SEQ ID NO: 415959 - RNA, 32 nt, Homo Sapiens
gcugggucaauacucaacuuggcaaacuccag

SEQ ID NO: 415960 - RNA, 29 nt, Homo Sapiens
aagggauggugauauggaugauagucgag

SEQ ID NO: 415961 - RNA, 32 nt, Homo Sapiens
guguucuauauuucuuuuugcuccauuuuagu

SEQ ID NO: 415962 - RNA, 32 nt, Homo Sapiens
auaaguguaucgauauauacuuggcaaauguu

SEQ ID NO: 415963 - RNA, 32 nt, Homo Sapiens
aaguguggggagagcagaggcgcagcucugcu

SEQ ID NO: 415964 - RNA, 27 nt, Homo Sapiens
ucauggccuuugcauggagaggcugga

SEQ ID NO: 415965 - RNA, 32 nt, Homo Sapiens
ggccuucccggcucagccagugaggcucagaa

SEQ ID NO: 415966 - RNA, 32 nt, Homo Sapiens
uguaaaccacucucuuuuuuuuugacagaguc

SEQ ID NO: 415967 - RNA, 32 nt, Homo Sapiens
gggccccaucuugaucuuugagcccauucuuc

SEQ ID NO: 415968 - RNA, 32 nt, Homo Sapiens
auugugccaucccaaaccucguuccagccgcc

SEQ ID NO: 415969 - RNA, 32 nt, Homo Sapiens
guuuuaagcaaaugcauucuaucguuauuaua

SEQ ID NO: 415970 - RNA, 32 nt, Homo Sapiens
gcaaauauuuuugugccucgggacagauggau

SEQ ID NO: 415971 - RNA, 32 nt, Homo Sapiens
auguuuacagaaaaauuaggcacaaagggauu

SEQ ID NO: 415972 - RNA, 32 nt, Homo Sapiens
aaagugcauuuuacuguauuuuguguauuuug

SEQ ID NO: 415973 - RNA, 32 nt, Homo Sapiens
ggcuuaggacccccagcuccgacaugucgccc

SEQ ID NO: 415974 - RNA, 32 nt, Homo Sapiens
ucccgcucaggccacagccggagccuccgcau

SEQ ID NO: 415975 - RNA, 32 nt, Homo Sapiens
ccauaaguaauuuuaauucauuucaaauguuu

SEQ ID NO: 415976 - RNA, 32 nt, Homo Sapiens
ccuacccagguccccggcccccgccccgggcc

SEQ ID NO: 415977 - RNA, 32 nt, Homo Sapiens
ucuugucagggugucuccuugugcuucugaga

SEQ ID NO: 415978 - RNA, 32 nt, Homo Sapiens
uccaauaugucuucuuuuguuauuuucuuucg

SEQ ID NO: 415979 - RNA, 32 nt, Homo Sapiens
cuuggggcaccaggcuccccagagacaaugcu

SEQ ID NO: 415980 - RNA, 32 nt, Homo Sapiens
cgguucccugaacagcacccagaucgccccau

SEQ ID NO: 415981 - RNA, 29 nt, Homo Sapiens
accacuguuuugaacuaccacaaaaguau

SEQ ID NO: 415982 - RNA, 32 nt, Homo Sapiens
aagcugauagggcccuggucuuucugcaccag

SEQ ID NO: 415983 - RNA, 32 nt, Homo Sapiens
aggucuggaacagcucuagaaugaacacauaa

SEQ ID NO: 415984 - RNA, 28 nt, Homo Sapiens
uaggggaacauugggcauuugaacauau

SEQ ID NO: 415985 - RNA, 32 nt, Homo Sapiens
acauuguauuugaacacaaaacauuaacaacu

SEQ ID NO: 415986 - RNA, 32 nt, Homo Sapiens
ccuccccucccaugcaggccgaugacaacugc

SEQ ID NO: 415987 - RNA, 32 nt, Homo Sapiens
gccucauggcaguuggaucagcuccuuuacaa

SEQ ID NO: 415988 - RNA, 32 nt, Homo Sapiens
gccacauuuccuuauugaucgaucuuuuccca

SEQ ID NO: 415989 - RNA, 32 nt, Homo Sapiens
uguuugcacuacuacuuuuuuauuaaacgaug

SEQ ID NO: 415990 - RNA, 32 nt, Homo Sapiens
uguagugugacaaagaauuguuuucucuguuu

SEQ ID NO: 415991 - RNA, 32 nt, Homo Sapiens
uaucuuuggggaaacuaacaauaugauugcac

SEQ ID NO: 415992 - RNA, 32 nt, Homo Sapiens
uguccauggagaguuuaacauaaggaagaaga

SEQ ID NO: 415993 - RNA, 32 nt, Homo Sapiens
aaagcuaaaucagaagaaaauaucaaggaagg

SEQ ID NO: 415994 - RNA, 32 nt, Homo Sapiens
uuuugccaaaaauauuaauauaagaagcuuuc

SEQ ID NO: 415995 - RNA, 32 nt, Homo Sapiens
auauuucuggguucccacgaugaugugaaaaa

SEQ ID NO: 415996 - RNA, 32 nt, Homo Sapiens
ucaagagacuacacaugguuauuuaaucuccg

SEQ ID NO: 415997 - RNA, 31 nt, Homo Sapiens
ccuuaugcccucacuuccugaguuaaccucc

SEQ ID NO: 415998 - RNA, 32 nt, Homo Sapiens
uuauuaucacucacugugugccaggcaccgug

SEQ ID NO: 415999 - RNA, 32 nt, Homo Sapiens
auggcuuuagguuuuucuugaagaauuaggaa

SEQ ID NO: 416000 - RNA, 32 nt, Homo Sapiens
cccccucaggguggccaggcccugcucaacau

SEQ ID NO: 416001 - RNA, 32 nt, Homo Sapiens
aggaggugcuggagcuaggucuccaggugggc

SEQ ID NO: 416002 - RNA, 32 nt, Homo Sapiens
cugcggguuauugauuuguucuuuacaacuau

SEQ ID NO: 416003 - RNA, 32 nt, Homo Sapiens
ucgcccucggaguaggggguagcggcuugggu

SEQ ID NO: 416004 - RNA, 32 nt, Homo Sapiens
guaagcacaaugaagacaggaauuuuguauau

SEQ ID NO: 416005 - RNA, 32 nt, Homo Sapiens
uuccuggaagcagaguaaauaaagcucauggc

SEQ ID NO: 416006 - RNA, 32 nt, Homo Sapiens
gugaugucaaaccagauugcaaagaguuaugg

SEQ ID NO: 416007 - RNA, 32 nt, Homo Sapiens
gcagcugcuacucagugccaaccccguggggc

SEQ ID NO: 416008 - RNA, 32 nt, Homo Sapiens
ucaaaucuuuuccccuuuauuuaagauuuccu

SEQ ID NO: 416009 - RNA, 32 nt, Homo Sapiens
gcucggggaggugggagcagggaccaucucug

SEQ ID NO: 416010 - RNA, 32 nt, Homo Sapiens
gaggcuggccagaggaggaaaggagaauaacu

SEQ ID NO: 416011 - RNA, 32 nt, Homo Sapiens
uaaugaagcagaaauaaucugaagauaauacc

SEQ ID NO: 416012 - RNA, 32 nt, Homo Sapiens
caucacccuaaaaagucauuucuuggagaagc

SEQ ID NO: 416013 - RNA, 32 nt, Homo Sapiens
ccuuggaagauaggccuggaagagacuguuga

SEQ ID NO: 416014 - RNA, 32 nt, Homo Sapiens
accaugagagggugggagggcccagggagggc

SEQ ID NO: 416015 - RNA, 29 nt, Homo Sapiens
uauuugucauaugaaugaaaaaauaaacg

SEQ ID NO: 416016 - RNA, 32 nt, Homo Sapiens
aguguuuaauucaugaauauuguauacugcau

SEQ ID NO: 416017 - RNA, 32 nt, Homo Sapiens
cgcgucgcccgcggcccggccggcaguugcag

SEQ ID NO: 416018 - RNA, 31 nt, Homo Sapiens
cguggccgucuggaguccgugagacugaaag

SEQ ID NO: 416019 - RNA, 32 nt, Homo Sapiens
uuucugaauaaauucugaaccauccucaucuc

SEQ ID NO: 416020 - RNA, 32 nt, Homo Sapiens
ucacauacaccugguggccaagccucugcugg

SEQ ID NO: 416021 - RNA, 32 nt, Homo Sapiens
aacuugccaagaacuuuuuuucaauuucaguu

SEQ ID NO: 416022 - RNA, 32 nt, Homo Sapiens
ugcuguucccaggcaccaccacagcaggugcu

SEQ ID NO: 416023 - RNA, 32 nt, Homo Sapiens
cgcgagggaggcgggagugagcagaaaggcuu

SEQ ID NO: 416024 - RNA, 32 nt, Homo Sapiens
cuggauguggaccuuugcuaccuguauuaaua

SEQ ID NO: 416025 - RNA, 32 nt, Homo Sapiens
ugugaaaacuggguccauuuuugagagaugug

SEQ ID NO: 416026 - RNA, 31 nt, Homo Sapiens
aggggaagaaacacuuucucuucuuguuucu

SEQ ID NO: 416027 - RNA, 32 nt, Homo Sapiens
uuuguuuuaauauuuuuuuucuuuuuuuuuuu

SEQ ID NO: 416028 - RNA, 32 nt, Homo Sapiens
ggcugggaauggggagcaagucacgucagcuc

SEQ ID NO: 416029 - RNA, 32 nt, Homo Sapiens
guuaaauuuaugucuuauuuuguguuuucuga

SEQ ID NO: 416030 - RNA, 32 nt, Homo Sapiens
ugaagauuuacuaugcaauaggguaacuuuga

SEQ ID NO: 416031 - RNA, 32 nt, Homo Sapiens
gcacgcgcuggcccugccacuccagccuggcc

SEQ ID NO: 416032 - RNA, 32 nt, Homo Sapiens
uuucccccauucucccugcauccuuguccuug

SEQ ID NO: 416033 - RNA, 32 nt, Homo Sapiens
gauggcggcugcaggguugcugccgccccauc

SEQ ID NO: 416034 - RNA, 32 nt, Homo Sapiens
agacuagacagagaucaggucaucaggggagc

SEQ ID NO: 416035 - RNA, 32 nt, Homo Sapiens
ggaacggggaucugucugugcuugcaggaaag

SEQ ID NO: 416036 - RNA, 32 nt, Homo Sapiens
cgccgcggcccgggcgcuucagguagccucuc

SEQ ID NO: 416037 - RNA, 32 nt, Homo Sapiens
guacugccccucagcagggaugacucagcacu

SEQ ID NO: 416038 - RNA, 32 nt, Homo Sapiens
uaagaacuuacagaaugcaaacacgagcacac

SEQ ID NO: 416039 - RNA, 32 nt, Homo Sapiens
gcagccgcuccugccugagccuggacaugggg

SEQ ID NO: 416040 - RNA, 32 nt, Homo Sapiens
agcagacuguggaaaugcuggugcaggagcaa

SEQ ID NO: 416041 - RNA, 32 nt, Homo Sapiens
gggcagagcuucuauuuauggcacauagacau

SEQ ID NO: 416042 - RNA, 32 nt, Homo Sapiens
agugaugcucugaaaugaaaguuugucuucac

SEQ ID NO: 416043 - RNA, 32 nt, Homo Sapiens
uccuguuugcccuccugauuccugcuuucuuu

SEQ ID NO: 416044 - RNA, 32 nt, Homo Sapiens
gcgcggcuuuaaagagggggcagcggaggguc

SEQ ID NO: 416045 - RNA, 32 nt, Homo Sapiens
gugcagaggcccuggcaggugcccugagcaaa

SEQ ID NO: 416046 - RNA, 32 nt, Homo Sapiens
aguuuuucuauuaucaacagguuaauguguuu

SEQ ID NO: 416047 - RNA, 32 nt, Homo Sapiens
agcccugcguccuggggucgcugcugcauccc

SEQ ID NO: 416048 - RNA, 32 nt, Homo Sapiens
ggcagagauaaaacauugacaagggugugcau

SEQ ID NO: 416049 - RNA, 32 nt, Homo Sapiens
acugccugucucccugguccugccauauucau

SEQ ID NO: 416050 - RNA, 32 nt, Homo Sapiens
cucuugcccucccugccuaagagcuacuggga

SEQ ID NO: 416051 - RNA, 32 nt, Homo Sapiens
acugguugcggagugagcugggcgcgcggcgc

SEQ ID NO: 416052 - RNA, 32 nt, Homo Sapiens
uuggugcccuccccucaccccacuguagcugu

SEQ ID NO: 416053 - RNA, 32 nt, Homo Sapiens
ggugcccgcccggggcucugggcugugaggcc

SEQ ID NO: 416054 - RNA, 32 nt, Homo Sapiens
gcagaguacagcucccaggcucccgaagcuuc

SEQ ID NO: 416055 - RNA, 32 nt, Homo Sapiens
ccaagcugacggcaccccacuccacccccccc

SEQ ID NO: 416056 - RNA, 30 nt, Homo Sapiens
ugccucuccugugcugugggagcucgcugc

SEQ ID NO: 416057 - RNA, 30 nt, Homo Sapiens
cccucugccucugcugcagacauggcgucu

SEQ ID NO: 416058 - RNA, 32 nt, Homo Sapiens
cugggcagccgcgcgcuggccgcgcagcggac

SEQ ID NO: 416059 - RNA, 32 nt, Homo Sapiens
ucgcuggaggccggcagugaugugcgcuauuc

SEQ ID NO: 416060 - RNA, 32 nt, Homo Sapiens
ggacccaggaucuucuccuuucugggcauccc

SEQ ID NO: 416061 - RNA, 32 nt, Homo Sapiens
ggaaaauguauuaaaauggcauauggaaaagc

SEQ ID NO: 416062 - RNA, 32 nt, Homo Sapiens
guuucucuguuguuugguucagggauuuuauu

SEQ ID NO: 416063 - RNA, 32 nt, Homo Sapiens
gggcuaugagagauuucaggugagaaguuaaa

SEQ ID NO: 416064 - RNA, 32 nt, Homo Sapiens
uugccaggaggaggcgggagcggggaggcgcc

SEQ ID NO: 416065 - RNA, 31 nt, Homo Sapiens
cgguccugggccugccugcucuggccaagag

SEQ ID NO: 416066 - RNA, 32 nt, Homo Sapiens
aaagaaaccuaaaacuugcauuagagugaaca

SEQ ID NO: 416067 - RNA, 32 nt, Homo Sapiens
uacccuguugcuuagcaaccacuugaaaagcu

SEQ ID NO: 416068 - RNA, 32 nt, Homo Sapiens
uggcuuguggaaggacucucuauuucuggucg

SEQ ID NO: 416069 - RNA, 32 nt, Homo Sapiens
gugaaguucuugcaaacucuuacuacagaaau

SEQ ID NO: 416070 - RNA, 32 nt, Homo Sapiens
ccuucccucuccuuccucucgcagauuacacu

SEQ ID NO: 416071 - RNA, 32 nt, Homo Sapiens
cuacuaggacaguucugugcuucaccaugagg

SEQ ID NO: 416072 - RNA, 32 nt, Homo Sapiens
gaagcauccuucccuguagcugcuguccaguc

SEQ ID NO: 416073 - RNA, 32 nt, Homo Sapiens
ugauuuuacguaucuucuaucuacgcccuucc

SEQ ID NO: 416074 - RNA, 32 nt, Homo Sapiens
ugccccaucuucuggcacaggccaucccgagu

SEQ ID NO: 416075 - RNA, 32 nt, Homo Sapiens
gcgucgccgggcccgcgccgggaugggguagg

SEQ ID NO: 416076 - RNA, 32 nt, Homo Sapiens
caggggagggucagccagggccugcgagggca

SEQ ID NO: 416077 - RNA, 32 nt, Homo Sapiens
ugaucuguuuuguagcugagguuuugcauacg

SEQ ID NO: 416078 - RNA, 32 nt, Homo Sapiens
uggugagacaaagggcgcuggcuggcagggag

SEQ ID NO: 416079 - RNA, 32 nt, Homo Sapiens
uuccugccugcucauuucccagcccucuucuu

SEQ ID NO: 416080 - RNA, 32 nt, Homo Sapiens
cauaaaaacaauucagcaaauauuuccaauau

SEQ ID NO: 416081 - RNA, 32 nt, Homo Sapiens
uuaaaaaucguaugaaagucuacaucagcuga

SEQ ID NO: 416082 - RNA, 32 nt, Homo Sapiens
caaucucaauauuagucuuguuuacuucuucu

SEQ ID NO: 416083 - RNA, 32 nt, Homo Sapiens
gaacugucucuggauuuuauuaagcaucucac

SEQ ID NO: 416084 - RNA, 32 nt, Homo Sapiens
caggaggcgggugcccguuugucccaggccug

SEQ ID NO: 416085 - RNA, 32 nt, Homo Sapiens
gucgcuuugugccucugagugcgcugcugugu

SEQ ID NO: 416086 - RNA, 32 nt, Homo Sapiens
aauccugucauggcucugaacugcacaaugca

SEQ ID NO: 416087 - RNA, 32 nt, Homo Sapiens
aggcugggaaaggccuggcugcccacugccuc

SEQ ID NO: 416088 - RNA, 32 nt, Homo Sapiens
gaggcccugcuuccauccuuucgaggcugggg

SEQ ID NO: 416089 - RNA, 32 nt, Homo Sapiens
cagcauuacugugucgucuccgugccagaugu

SEQ ID NO: 416090 - RNA, 32 nt, Homo Sapiens
uggcaucuuaaaaauauugagugucccagucc

SEQ ID NO: 416091 - RNA, 32 nt, Homo Sapiens
gugggcugaagggcuccucaagugcugccaaa

SEQ ID NO: 416092 - RNA, 32 nt, Homo Sapiens
gcuccggcccccagccccggcacucgcucucc

SEQ ID NO: 416093 - RNA, 32 nt, Homo Sapiens
uuuaugaaggcauggccugaaaauggaagauu

SEQ ID NO: 416094 - RNA, 32 nt, Homo Sapiens
ccugcuucucccuggccuucaucccuaguugc

SEQ ID NO: 416095 - RNA, 32 nt, Homo Sapiens
gaggcagguauuagaaaugaaaaggaaacuug

SEQ ID NO: 416096 - RNA, 32 nt, Homo Sapiens
ugcuguuuuuaaaguaaaugucuuuuagugug

SEQ ID NO: 416097 - RNA, 32 nt, Homo Sapiens
cuuuaacauuuuacugugcuguuaacuuggaa

SEQ ID NO: 416098 - RNA, 30 nt, Homo Sapiens
acagaagagcugcuaagggaaaccaaaggu

SEQ ID NO: 416099 - RNA, 32 nt, Homo Sapiens
uuauuaagguuuucuaaaaccaaaagaaaaac

SEQ ID NO: 416100 - RNA, 32 nt, Homo Sapiens
uaucaucgcacuuuucaucuugguaauaucaa

SEQ ID NO: 416101 - RNA, 32 nt, Homo Sapiens
gcucucugccagccaggccuuuccugcaagcu

SEQ ID NO: 416102 - RNA, 32 nt, Homo Sapiens
cuggcggcucugcggccgucaccaugccacag

SEQ ID NO: 416103 - RNA, 32 nt, Homo Sapiens
auaaauaguaaauaaugauucaaugugaauuu

SEQ ID NO: 416104 - RNA, 32 nt, Homo Sapiens
aaaaccaugucuuuuaugcuauaaucauucca

SEQ ID NO: 416105 - RNA, 32 nt, Homo Sapiens
ugagggcuagaaacaugcaguacuuugcccaa

SEQ ID NO: 416106 - RNA, 32 nt, Homo Sapiens
aucaugcccguuugcuuggguuugaccacucc

SEQ ID NO: 416107 - RNA, 32 nt, Homo Sapiens
ugaugucucgcaccuaaaucuucacaagaccu

SEQ ID NO: 416108 - RNA, 32 nt, Homo Sapiens
ggcaaaguugaagggacaaggcacugugaggg

SEQ ID NO: 416109 - RNA, 32 nt, Homo Sapiens
acaguuuaucacauagaaacuccauuaaucau

SEQ ID NO: 416110 - RNA, 32 nt, Homo Sapiens
agcgggcggcgggcuccgcgcagccgucuguc

SEQ ID NO: 416111 - RNA, 32 nt, Homo Sapiens
uucugggagugaacccugacuccaucccccua

SEQ ID NO: 416112 - RNA, 32 nt, Homo Sapiens
ccccccgcugcucccaugcgcgcggguggguc

SEQ ID NO: 416113 - RNA, 32 nt, Homo Sapiens
cugcucagggacccggacucugcaguuucucc

SEQ ID NO: 416114 - RNA, 32 nt, Homo Sapiens
ucuuaguaaaaugaaaucaaaguauugaucag

SEQ ID NO: 416115 - RNA, 32 nt, Homo Sapiens
gucaccccugaacgccuccgcaggcagauuca

SEQ ID NO: 416116 - RNA, 32 nt, Homo Sapiens
gaccaagaaagauauugaaaggguuuuauauu

SEQ ID NO: 416117 - RNA, 32 nt, Homo Sapiens
gccacugggggaagagaaugcaacaaaaggaa

SEQ ID NO: 416118 - RNA, 32 nt, Homo Sapiens
gaaaacaaaaauagaguguggcagccacuggu

SEQ ID NO: 416119 - RNA, 32 nt, Homo Sapiens
uagugauucuaugcagaaguuacuuuagagga

SEQ ID NO: 416120 - RNA, 32 nt, Homo Sapiens
cgccaugcggugagcgccccaggccgccagag

SEQ ID NO: 416121 - RNA, 32 nt, Homo Sapiens
cacuggccucugcgguggugccugccagaaug

SEQ ID NO: 416122 - RNA, 28 nt, Homo Sapiens
ucuuuaggauuauaucauuugaaaaaau

SEQ ID NO: 416123 - RNA, 32 nt, Homo Sapiens
guguauacauaaacuaaaaauuaggguugauu

SEQ ID NO: 416124 - RNA, 32 nt, Homo Sapiens
cuguccuuuaaauaugucaagauccagacuuu

SEQ ID NO: 416125 - RNA, 32 nt, Homo Sapiens
agugaggaagcagagugccaggcagcacaucc

SEQ ID NO: 416126 - RNA, 32 nt, Homo Sapiens
uaauaacaaaauuuucuguguucuuagauuac

SEQ ID NO: 416127 - RNA, 32 nt, Homo Sapiens
aaucccuuguaucuccuuucucgggaauugua

SEQ ID NO: 416128 - RNA, 32 nt, Homo Sapiens
gcgcgggggaaccugaggaagcgggagagacg

SEQ ID NO: 416129 - RNA, 32 nt, Homo Sapiens
gugaugucugucugcugccaggauggagcaga

SEQ ID NO: 416130 - RNA, 32 nt, Homo Sapiens
agacugcuggggauuggguuugauuuguuuug

SEQ ID NO: 416131 - RNA, 32 nt, Homo Sapiens
ucgauuuuuuauuuauuuaagcuguucauucu

SEQ ID NO: 416132 - RNA, 32 nt, Homo Sapiens
aaccauuguaaaaaugaaacgggaugacccca

SEQ ID NO: 416133 - RNA, 32 nt, Homo Sapiens
accccuaccugcuuccuccccaccgcagcugg

SEQ ID NO: 416134 - RNA, 32 nt, Homo Sapiens
ugugccgagagccgcgccgacccgcugcgauc

SEQ ID NO: 416135 - RNA, 32 nt, Homo Sapiens
ugggagaggguugggggcagggggcaaggaaa

SEQ ID NO: 416136 - RNA, 32 nt, Homo Sapiens
ccagggcccacccaccugacggacagcgugaa

SEQ ID NO: 416137 - RNA, 32 nt, Homo Sapiens
aauggaggaggcaggcggggcuggagacggga

SEQ ID NO: 416138 - RNA, 32 nt, Homo Sapiens
uugggggcugcuuuccagcagcugcgucagac

SEQ ID NO: 416139 - RNA, 28 nt, Homo Sapiens
guggaguggccaggaccaagacagcaag

SEQ ID NO: 416140 - RNA, 32 nt, Homo Sapiens
uggugugcugcuuuuccaggcucucuucucuc

SEQ ID NO: 416141 - RNA, 32 nt, Homo Sapiens
aguagcuuucccuucacuugauucuauugugu

SEQ ID NO: 416142 - RNA, 32 nt, Homo Sapiens
uacagcugcccacuuccuuuccugagcaggag

SEQ ID NO: 416143 - RNA, 32 nt, Homo Sapiens
ccacaaggccagcagccccuggcccccagucc

SEQ ID NO: 416144 - RNA, 32 nt, Homo Sapiens
uuaccugaguuuucucuggggucugcacagag

SEQ ID NO: 416145 - RNA, 32 nt, Homo Sapiens
cauguugccggggcccugggcgggacgguugu

SEQ ID NO: 416146 - RNA, 32 nt, Homo Sapiens
ucgacaauuuaaagaaagcuaaauaaaaaugu

SEQ ID NO: 416147 - RNA, 32 nt, Homo Sapiens
uucaggcuccacgcacagaaucucgcagauag

SEQ ID NO: 416148 - RNA, 32 nt, Homo Sapiens
auguagacagauuaauauauuuuuguacaaca

SEQ ID NO: 416149 - RNA, 32 nt, Homo Sapiens
gaugugcuuuuguauuaaauuuaaauuuucac

SEQ ID NO: 416150 - RNA, 32 nt, Homo Sapiens
cgccacggccuucaccgccgcgcgcucugacg

SEQ ID NO: 416151 - RNA, 32 nt, Homo Sapiens
cagagcaagaaguuacauguaucgauggaggc

SEQ ID NO: 416152 - RNA, 32 nt, Homo Sapiens
aaucugaaggcacuggaaucacuccacacacc

SEQ ID NO: 416153 - RNA, 32 nt, Homo Sapiens
uauauaaagggagccuuaauggauugguuuuc

SEQ ID NO: 416154 - RNA, 32 nt, Homo Sapiens
acauauagaaaagagcaagaaugcacauguau

SEQ ID NO: 416155 - RNA, 32 nt, Homo Sapiens
caauaggcauucugacuggaugagaugguauc

SEQ ID NO: 416156 - RNA, 32 nt, Homo Sapiens
gaacaggagaaucacuugauggcugccaggaa

SEQ ID NO: 416157 - RNA, 30 nt, Homo Sapiens
uaugucuuagagugaggggaaacugaggca

SEQ ID NO: 416158 - RNA, 32 nt, Homo Sapiens
uuguguugucuccuuagacuugugcaccaugg

SEQ ID NO: 416159 - RNA, 31 nt, Homo Sapiens
acacagccccacugucugccccgcguuuaca

SEQ ID NO: 416160 - RNA, 32 nt, Homo Sapiens
uacaucuucaauguggauaagauaaagaacaa

SEQ ID NO: 416161 - RNA, 32 nt, Homo Sapiens
ggucuucauuucuccuuagucuccuccaggcu

SEQ ID NO: 416162 - RNA, 32 nt, Homo Sapiens
ugugugucagcugguagcugggggcgcagagg

SEQ ID NO: 416163 - RNA, 32 nt, Homo Sapiens
cacauguggccugcggccccccggccggaagc

SEQ ID NO: 416164 - RNA, 32 nt, Homo Sapiens
agcgccccgcggccucuggagccccuucagug

SEQ ID NO: 416165 - RNA, 32 nt, Homo Sapiens
gaaggugcaaaagggauucaagacgucugacu

SEQ ID NO: 416166 - RNA, 32 nt, Homo Sapiens
caaauacugagaccgauagaugaagaugcuuu

SEQ ID NO: 416167 - RNA, 32 nt, Homo Sapiens
guuucuaguuuuucacuuuuuucauguuauau

SEQ ID NO: 416168 - RNA, 32 nt, Homo Sapiens
gacuuugcauuuccugauuuaagcaaauaauc

SEQ ID NO: 416169 - RNA, 32 nt, Homo Sapiens
ugauagccugugucuucuuaauuuacugggaa

SEQ ID NO: 416170 - RNA, 32 nt, Homo Sapiens
gucuaccugcucaggucuggguuccggcugac

SEQ ID NO: 416171 - RNA, 32 nt, Homo Sapiens
gcucaacaccgggaucuauguuuaaguuuuaa

SEQ ID NO: 416172 - RNA, 32 nt, Homo Sapiens
agguugucaucuuaagaaaaaauauccauuuu

SEQ ID NO: 416173 - RNA, 32 nt, Homo Sapiens
uacuuaucucaaaggagauacauauaauuuau

SEQ ID NO: 416174 - RNA, 32 nt, Homo Sapiens
gcgcugagggucacgcgaacaccgcagaugac

SEQ ID NO: 416175 - RNA, 32 nt, Homo Sapiens
uaaaaaacaaauugaagaggaaauauaaauua

SEQ ID NO: 416176 - RNA, 32 nt, Homo Sapiens
gacugucccuggaucugcggagguagacaguu

SEQ ID NO: 416177 - RNA, 32 nt, Homo Sapiens
cugagaagggaaggcggagggcggcggggaca

SEQ ID NO: 416178 - RNA, 32 nt, Homo Sapiens
aaauugcuuaagccuggcauguuuuguaauga

SEQ ID NO: 416179 - RNA, 32 nt, Homo Sapiens
ugaaccugucaggaggaguccuggaggcuggu

SEQ ID NO: 416180 - RNA, 32 nt, Homo Sapiens
uccucauccaacaaaugaaacuaccccuguga

SEQ ID NO: 416181 - RNA, 32 nt, Homo Sapiens
cauccccuugaguggaauuggaugccucuagg

SEQ ID NO: 416182 - RNA, 32 nt, Homo Sapiens
ggugcccugccaggcccugguggggccuccag

SEQ ID NO: 416183 - RNA, 32 nt, Homo Sapiens
uggcuaauuuuuguacuuuucauagagauggg

SEQ ID NO: 416184 - RNA, 32 nt, Homo Sapiens
gcccauguuuccugacauagcucuacaccuaa

SEQ ID NO: 416185 - RNA, 32 nt, Homo Sapiens
augaaauugacccccaaauacauccugcggaa

SEQ ID NO: 416186 - RNA, 32 nt, Homo Sapiens
ccgggcuccagggacauggcggcggccucugc

SEQ ID NO: 416187 - RNA, 29 nt, Homo Sapiens
uaaauauaaaguuguagauucuuaugugu

SEQ ID NO: 416188 - RNA, 32 nt, Homo Sapiens
ggaacuggacacaauaggucuuucucucagug

SEQ ID NO: 416189 - RNA, 32 nt, Homo Sapiens
uacuauugguguauuaauuuuaucuuucuuag

SEQ ID NO: 416190 - RNA, 32 nt, Homo Sapiens
gagagaaggggaggagggcggggggcaccuac

SEQ ID NO: 416191 - RNA, 32 nt, Homo Sapiens
cucgccugccagccuggaguucuuccugugcu

SEQ ID NO: 416192 - RNA, 32 nt, Homo Sapiens
cuuggcgggaacugaccacgcgccagucaggc

SEQ ID NO: 416193 - RNA, 32 nt, Homo Sapiens
uaggcacauuuuaaacccacuguauaugaugu

SEQ ID NO: 416194 - RNA, 32 nt, Homo Sapiens
uggaggcccucuccgaggcagcuugauggaac

SEQ ID NO: 416195 - RNA, 29 nt, Homo Sapiens
ccaguuucuauccaggaauguucacaucc

SEQ ID NO: 416196 - RNA, 32 nt, Homo Sapiens
ggugaugcaccucgggauccgcucugcccgcu

SEQ ID NO: 416197 - RNA, 32 nt, Homo Sapiens
auguaaagaguguaacaaaaccuuuaaacagc

SEQ ID NO: 416198 - RNA, 32 nt, Homo Sapiens
ugcagaucagaaaaaacaaauagaagaaaaug

SEQ ID NO: 416199 - RNA, 32 nt, Homo Sapiens
uuacugucugcacuugaaguuuugguucuuca

SEQ ID NO: 416200 - RNA, 32 nt, Homo Sapiens
ucuagaacagauguucuuaauauuuuucuuac

SEQ ID NO: 416201 - RNA, 32 nt, Homo Sapiens
ccaggacaaaaaugaacaugaauggaguggca

SEQ ID NO: 416202 - RNA, 32 nt, Homo Sapiens
cggaggaucgcggagggcgcgccgaggaugga

SEQ ID NO: 416203 - RNA, 32 nt, Homo Sapiens
uuauauggcuaauaaacuuaugaaaaaaagcu

SEQ ID NO: 416204 - RNA, 32 nt, Homo Sapiens
aacuggagugccucacacuaacuauuauuaca

SEQ ID NO: 416205 - RNA, 27 nt, Homo Sapiens
agacucugcuucuucaccuucuccuuc

SEQ ID NO: 416206 - RNA, 32 nt, Homo Sapiens
cagaaauuauaagcacaaguggcugccaguuu

SEQ ID NO: 416207 - RNA, 32 nt, Homo Sapiens
ggagguugaagcuacagugagccuugauugug

SEQ ID NO: 416208 - RNA, 32 nt, Homo Sapiens
uggcucacaccuguauucccaacacuuuugga

SEQ ID NO: 416209 - RNA, 32 nt, Homo Sapiens
cgccgccuucuccagcugcgacgcugcggccc

SEQ ID NO: 416210 - RNA, 32 nt, Homo Sapiens
aaaauaugagagaacuauuguuuggggaaguu

SEQ ID NO: 416211 - RNA, 32 nt, Homo Sapiens
ccugucccuuggugacucaucccugagcuucc

SEQ ID NO: 416212 - RNA, 32 nt, Homo Sapiens
cugcaggcaugcccuuccuucccuugggcagg

SEQ ID NO: 416213 - RNA, 32 nt, Homo Sapiens
gaaguuuguacauugucaaaguaaauuuuaau

SEQ ID NO: 416214 - RNA, 32 nt, Homo Sapiens
cuacuaugaaaacaacauaaaucucucaauuu

SEQ ID NO: 416215 - RNA, 32 nt, Homo Sapiens
gcuagaauggcuuguuccugcuggggcugacc

SEQ ID NO: 416216 - RNA, 32 nt, Homo Sapiens
gaguuuuccuucccagaaucucacugcucuuu

SEQ ID NO: 416217 - RNA, 32 nt, Homo Sapiens
gaaagaaaaauauagauuaaaauugcugggca

SEQ ID NO: 416218 - RNA, 31 nt, Homo Sapiens
augauaaucacauguaugccaaaugauuugu

SEQ ID NO: 416219 - RNA, 32 nt, Homo Sapiens
uuugguacaccugucaacugagcaguguacac

SEQ ID NO: 416220 - RNA, 32 nt, Homo Sapiens
gggugggcaguggggguggggcugggacgcug

SEQ ID NO: 416221 - RNA, 30 nt, Homo Sapiens
ccacuggauaaaaaacauauaaauguaaga

SEQ ID NO: 416222 - RNA, 32 nt, Homo Sapiens
cgacgucggaagcauacagguauacuaugcaa

SEQ ID NO: 416223 - RNA, 32 nt, Homo Sapiens
uuuauuggacacacucagagagagggagugug

SEQ ID NO: 416224 - RNA, 32 nt, Homo Sapiens
uugucauaguuacuugcuauaacucagcuuga

SEQ ID NO: 416225 - RNA, 32 nt, Homo Sapiens
cuauuccugguuaucucaccaacgaaggcuag

SEQ ID NO: 416226 - RNA, 32 nt, Homo Sapiens
ccugcuaaaacaaugaauaaaaacucaaggag

SEQ ID NO: 416227 - RNA, 32 nt, Homo Sapiens
ucccuagucuuuuguagauugcacuaauuuac

SEQ ID NO: 416228 - RNA, 32 nt, Homo Sapiens
ugagcuucccucgcaccgcacaguccugggag

SEQ ID NO: 416229 - RNA, 32 nt, Homo Sapiens
gggccaaaaauaaucagggauuuuaaauuggg

SEQ ID NO: 416230 - RNA, 32 nt, Homo Sapiens
aaagauggcugccaaggaguccuucaauuccu

SEQ ID NO: 416231 - RNA, 32 nt, Homo Sapiens
ccguccugugcugggggcaugcugggaccagc

SEQ ID NO: 416232 - RNA, 32 nt, Homo Sapiens
cagaggagggcagagggaagauugauuugcuc

SEQ ID NO: 416233 - RNA, 32 nt, Homo Sapiens
gcagacccggggguguccucccugcccucugc

SEQ ID NO: 416234 - RNA, 32 nt, Homo Sapiens
gcaggcuguacuuucauggugcucucuaccuu

SEQ ID NO: 416235 - RNA, 32 nt, Homo Sapiens
guuaagguaucugguaucugcauguaaaaucu

SEQ ID NO: 416236 - RNA, 32 nt, Homo Sapiens
agacccugcccaugauccugaccuccaccagc

SEQ ID NO: 416237 - RNA, 32 nt, Homo Sapiens
cccaacugaagggacuccaugagguugguucc

SEQ ID NO: 416238 - RNA, 32 nt, Homo Sapiens
gguguaccuuggccccuuuuaccuauggcagg

SEQ ID NO: 416239 - RNA, 32 nt, Homo Sapiens
ccagcccggccagcagucccuucugggacagc

SEQ ID NO: 416240 - RNA, 32 nt, Homo Sapiens
agacauauugaaugcaaaguucuuuagauauc

SEQ ID NO: 416241 - RNA, 32 nt, Homo Sapiens
uauuaggagccacuugugacuccaugaccugu

SEQ ID NO: 416242 - RNA, 32 nt, Homo Sapiens
cuugaaaugcuguuaguaaauuucugugauuu

SEQ ID NO: 416243 - RNA, 32 nt, Homo Sapiens
cuuugccagcuagaggccgccacgcaagugaa

SEQ ID NO: 416244 - RNA, 32 nt, Homo Sapiens
cuuuuugagagaaacaaaugagcauuguaaag

SEQ ID NO: 416245 - RNA, 32 nt, Homo Sapiens
cccuuggaagccccuaggaucccuguuucuac

SEQ ID NO: 416246 - RNA, 32 nt, Homo Sapiens
cuaccccgccccaccuugccccacuacuuuag

SEQ ID NO: 416247 - RNA, 32 nt, Homo Sapiens
agcaaguccuauucagaauccggagcagagag

SEQ ID NO: 416248 - RNA, 31 nt, Homo Sapiens
uuuuccacaaagaauuagguguuaagaguuu

SEQ ID NO: 416249 - RNA, 32 nt, Homo Sapiens
cggcgcuggaggggcgggucggguaggucucc

SEQ ID NO: 416250 - RNA, 32 nt, Homo Sapiens
ucaagucugacucuccacuccuccucacuaaa

SEQ ID NO: 416251 - RNA, 32 nt, Homo Sapiens
accaggggucuccuuucuuacccaggacuccu

SEQ ID NO: 416252 - RNA, 29 nt, Homo Sapiens
cauuuuccugaaagucuuucuguuuuagu

SEQ ID NO: 416253 - RNA, 32 nt, Homo Sapiens
caaugugcucuggucugacaugguuucucucu

SEQ ID NO: 416254 - RNA, 32 nt, Homo Sapiens
cccgggaggcggagauugcagugagcugagau

SEQ ID NO: 416255 - RNA, 32 nt, Homo Sapiens
gucagcccagcccagccuccucugcguccucc

SEQ ID NO: 416256 - RNA, 32 nt, Homo Sapiens
aucgauguaggccuaaucacuuccucaacccu

SEQ ID NO: 416257 - RNA, 32 nt, Homo Sapiens
cugccuuuaagccccagaauggauucuccagg

SEQ ID NO: 416258 - RNA, 32 nt, Homo Sapiens
aaaguggcucugcuucagaaguacuugccagu

SEQ ID NO: 416259 - RNA, 32 nt, Homo Sapiens
gcaacuauauauauguuuuuccauuauauaua

SEQ ID NO: 416260 - RNA, 32 nt, Homo Sapiens
uguucagaaauggcaaauacaauauaaaagug

SEQ ID NO: 416261 - RNA, 32 nt, Homo Sapiens
caagggacacaucucacgcagcugggaacaug

SEQ ID NO: 416262 - RNA, 32 nt, Homo Sapiens
ggugccugugaagccuggccccacugccugcc

SEQ ID NO: 416263 - RNA, 32 nt, Homo Sapiens
aaggcucucggcgcgccgcggcccgcaggcac

SEQ ID NO: 416264 - RNA, 29 nt, Homo Sapiens
aggacugugacuuucccacccacauggcu

SEQ ID NO: 416265 - RNA, 32 nt, Homo Sapiens
cugcuuuugaaauuauuauuauaauaaaucug

SEQ ID NO: 416266 - RNA, 32 nt, Homo Sapiens
caggcacgguggcucacgccuguaaucccacc

SEQ ID NO: 416267 - RNA, 32 nt, Homo Sapiens
ucgcuugcccuggccuccaggcaguccugcag

SEQ ID NO: 416268 - RNA, 32 nt, Homo Sapiens
ggauugacugguuggaauuaaacugcaaggaa

SEQ ID NO: 416269 - RNA, 32 nt, Homo Sapiens
aaagauacaaaguggcaugagccaugauuuaa

SEQ ID NO: 416270 - RNA, 32 nt, Homo Sapiens
uuuacagauaaaacaugugaagcucagagagg

SEQ ID NO: 416271 - RNA, 32 nt, Homo Sapiens
uaggaggaguguauguacaaaaauguaaaauu

SEQ ID NO: 416272 - RNA, 32 nt, Homo Sapiens
uuagcugaauuccggcagggggacugcaaagg

SEQ ID NO: 416273 - RNA, 32 nt, Homo Sapiens
ccucauucauauuauguugauacaaaagaccu

SEQ ID NO: 416274 - RNA, 32 nt, Homo Sapiens
agccccauugccccggcagcucuggccugugg

SEQ ID NO: 416275 - RNA, 32 nt, Homo Sapiens
cugccucuugucacaaacugccccagcaagaa

SEQ ID NO: 416276 - RNA, 32 nt, Homo Sapiens
ugcuggccguguuccucagcgagcaggaugag

SEQ ID NO: 416277 - RNA, 32 nt, Homo Sapiens
cugccugucuacauauuuuuuauuuuuuucug

SEQ ID NO: 416278 - RNA, 32 nt, Homo Sapiens
ccagugagaggggcaguucucuggccacaccc

SEQ ID NO: 416279 - RNA, 32 nt, Homo Sapiens
cuuuaggacauuaguccaccaucuucuugguu

SEQ ID NO: 416280 - RNA, 32 nt, Homo Sapiens
aggccaggcagacagugggggcucccuugaag

SEQ ID NO: 416281 - RNA, 32 nt, Homo Sapiens
caggccgcccccagccucuucugcccuuccau

SEQ ID NO: 416282 - RNA, 32 nt, Homo Sapiens
gccaauauuaaacacucuucuagaaucuggcu

SEQ ID NO: 416283 - RNA, 32 nt, Homo Sapiens
caaaauggaaguauaaugggaauauauuuuug

SEQ ID NO: 416284 - RNA, 32 nt, Homo Sapiens
uuuuagagccacuguuaagagagaauauaaaa

SEQ ID NO: 416285 - RNA, 32 nt, Homo Sapiens
aauccgagccagcagggccuucugcuugccug

SEQ ID NO: 416286 - RNA, 32 nt, Homo Sapiens
gccaggcgcucuuccuccccagccuccaacuc

SEQ ID NO: 416287 - RNA, 32 nt, Homo Sapiens
gggccuucuaauuuccucucuuggcccacaag

SEQ ID NO: 416288 - RNA, 32 nt, Homo Sapiens
ucgggcuuuuuuucuuuuuuuggugguuggau

SEQ ID NO: 416289 - RNA, 32 nt, Homo Sapiens
uccuugcccuccccaccccaucccagagcgca

SEQ ID NO: 416290 - RNA, 32 nt, Homo Sapiens
uggagguggggggugccugcagugcgcuggcu

SEQ ID NO: 416291 - RNA, 32 nt, Homo Sapiens
guggccuucaugcacuagccacuuccgcaggu

SEQ ID NO: 416292 - RNA, 32 nt, Homo Sapiens
uaaacugaacaaaucacuacuuuugggauauu

SEQ ID NO: 416293 - RNA, 32 nt, Homo Sapiens
ucaaaacuauuuccaaucacaaggaaagauuu

SEQ ID NO: 416294 - RNA, 32 nt, Homo Sapiens
ggcuauuagggcucuuuuuuuugguuccauau

SEQ ID NO: 416295 - RNA, 32 nt, Homo Sapiens
ggucccgugggagaggccagacuggauuauuc

SEQ ID NO: 416296 - RNA, 32 nt, Homo Sapiens
uacgugugcaggggaguacauggcagaagugg

SEQ ID NO: 416297 - RNA, 32 nt, Homo Sapiens
agcugaccccccgcccugucagagggaggcac

SEQ ID NO: 416298 - RNA, 32 nt, Homo Sapiens
gguuuacauaggauuucuuuucucuauuucuc

SEQ ID NO: 416299 - RNA, 32 nt, Homo Sapiens
cucaucggagaagaaagaauggcugucagcca

SEQ ID NO: 416300 - RNA, 32 nt, Homo Sapiens
cgcucgcuucggccucccggggugcugggauu

SEQ ID NO: 416301 - RNA, 32 nt, Homo Sapiens
aaaauggacauuaaacagaaauauaacuuggu

SEQ ID NO: 416302 - RNA, 32 nt, Homo Sapiens
aagacuuccagaaauauguacuuuaauuauua

SEQ ID NO: 416303 - RNA, 32 nt, Homo Sapiens
ucauucuggugccugugcucccggcuccgcaa

SEQ ID NO: 416304 - RNA, 32 nt, Homo Sapiens
aauguguagacgcacucucaaaaacugcacgg

SEQ ID NO: 416305 - RNA, 32 nt, Homo Sapiens
gccggaagagacuggaacaguuuccauggugc

SEQ ID NO: 416306 - RNA, 32 nt, Homo Sapiens
uauuauaaauauauuuuuuacaagccccagcu

SEQ ID NO: 416307 - RNA, 32 nt, Homo Sapiens
ucgaaucugcggcggcgacccggcgccgcguc

SEQ ID NO: 416308 - RNA, 30 nt, Homo Sapiens
ccacuggccaccccucccucugguccugug

SEQ ID NO: 416309 - RNA, 32 nt, Homo Sapiens
ucacaaucagggccgggguuucccugcucacu

SEQ ID NO: 416310 - RNA, 32 nt, Homo Sapiens
caacugaaaaggaaaccuggucauuuuuaugg

SEQ ID NO: 416311 - RNA, 32 nt, Homo Sapiens
agaagagacggcaacaaaacuucuggcaaggc

SEQ ID NO: 416312 - RNA, 32 nt, Homo Sapiens
cuaaagccgcaggcgccgcgguacccuggcug

SEQ ID NO: 416313 - RNA, 32 nt, Homo Sapiens
agaugcugggcaggaaggugucugcauguggg

SEQ ID NO: 416314 - RNA, 32 nt, Homo Sapiens
cuucaguagaaaguggaaaugcugucucccga

SEQ ID NO: 416315 - RNA, 32 nt, Homo Sapiens
caccagacgccgcgccccgucccggccucccc

SEQ ID NO: 416316 - RNA, 32 nt, Homo Sapiens
gaacuucagagaucguguauugagauuucuua

SEQ ID NO: 416317 - RNA, 32 nt, Homo Sapiens
aggacaaaggauuuuaaaaucugagcacuuag

SEQ ID NO: 416318 - RNA, 32 nt, Homo Sapiens
gucugaauuuuaaguauguacucauugucucu

SEQ ID NO: 416319 - RNA, 32 nt, Homo Sapiens
uuacaauggcauaauuuuaaaaauauauacaa

SEQ ID NO: 416320 - RNA, 32 nt, Homo Sapiens
gguugugcacgggcuacgcacgaagacugaau

SEQ ID NO: 416321 - RNA, 32 nt, Homo Sapiens
guuauccaaacacuagcagacauuuaacugga

SEQ ID NO: 416322 - RNA, 32 nt, Homo Sapiens
agcacccccaccugcuggcuuggccucaaggu

SEQ ID NO: 416323 - RNA, 32 nt, Homo Sapiens
ccucgggccgacggacgggaacccgggccgcg

SEQ ID NO: 416324 - RNA, 32 nt, Homo Sapiens
acagcgcacuaugcgugcuauuagucugugcc

SEQ ID NO: 416325 - RNA, 32 nt, Homo Sapiens
uuguuuacuuuuuagagagauggggucuugcc

SEQ ID NO: 416326 - RNA, 32 nt, Homo Sapiens
uguuccagucccuccacccacccaccgggcuc

SEQ ID NO: 416327 - RNA, 32 nt, Homo Sapiens
gaggccaaggaccgggacucgggccgugagca

SEQ ID NO: 416328 - RNA, 27 nt, Homo Sapiens
uguugguccuucuguugccaucacaga

SEQ ID NO: 416329 - RNA, 32 nt, Homo Sapiens
ccccgcgcgcccacccacccaguccggcugga

SEQ ID NO: 416330 - RNA, 32 nt, Homo Sapiens
aggugaauuuucuuuuccuccaauucauuugu

SEQ ID NO: 416331 - RNA, 32 nt, Homo Sapiens
agcuaagcaccaugcauagacaacaguuuguu

SEQ ID NO: 416332 - RNA, 32 nt, Homo Sapiens
cucgcucgccccacagguauggcccaccugga

SEQ ID NO: 416333 - RNA, 30 nt, Homo Sapiens
uuuccaccacuuguacuuuggcaugucuac

SEQ ID NO: 416334 - RNA, 32 nt, Homo Sapiens
cgauaaauuauuuuugaggacuguauauagug

SEQ ID NO: 416335 - RNA, 32 nt, Homo Sapiens
augccacuaagccccauggcccuuggggccug

SEQ ID NO: 416336 - RNA, 32 nt, Homo Sapiens
uuuuccauuauguucaucacccuuauaucaug

SEQ ID NO: 416337 - RNA, 32 nt, Homo Sapiens
augguugcuucuucauagaauugucugcuuuu

SEQ ID NO: 416338 - RNA, 32 nt, Homo Sapiens
uucuguagcaaauaaauccuuugaaagagcuc

SEQ ID NO: 416339 - RNA, 32 nt, Homo Sapiens
ugcacuggcuugaucucggcucacugcaagcu

SEQ ID NO: 416340 - RNA, 32 nt, Homo Sapiens
aaaguaaaauuugaagauauccagaaaaauca

SEQ ID NO: 416341 - RNA, 32 nt, Homo Sapiens
caaaauaauguuuucuacauuuucauuuggac

SEQ ID NO: 416342 - RNA, 30 nt, Homo Sapiens
ugccugguacuggugggggaaauaguccgu

SEQ ID NO: 416343 - RNA, 32 nt, Homo Sapiens
uguggauuauaaauuucuuucauacgguugua

SEQ ID NO: 416344 - RNA, 32 nt, Homo Sapiens
acugggaaaaacuacauacuuggacaucugua

SEQ ID NO: 416345 - RNA, 32 nt, Homo Sapiens
uuuuuauucuaauaaacuuuuguguuccagau

SEQ ID NO: 416346 - RNA, 32 nt, Homo Sapiens
aagguggugcugggccucucggugcugcugac

SEQ ID NO: 416347 - RNA, 32 nt, Homo Sapiens
cccccaguuccaaacccgagacuucaggcccg

SEQ ID NO: 416348 - RNA, 32 nt, Homo Sapiens
gucucugccacuggcaauguccuguccugaac

SEQ ID NO: 416349 - RNA, 32 nt, Homo Sapiens
guaaacaauuuagagcagguccuugaugugcc

SEQ ID NO: 416350 - RNA, 29 nt, Homo Sapiens
cacuauucuauccucuuaacaaagcuggg

SEQ ID NO: 416351 - RNA, 32 nt, Homo Sapiens
uacaggcauguaccaccacaccuggcuauuuu

SEQ ID NO: 416352 - RNA, 32 nt, Homo Sapiens
aagaauauguuguuaaaguccauugggccucc

SEQ ID NO: 416353 - RNA, 32 nt, Homo Sapiens
cuguaguugaagccagaaaacacugucauuua

SEQ ID NO: 416354 - RNA, 32 nt, Homo Sapiens
ggaagaugacugugacuauuaaguuuacaccc

SEQ ID NO: 416355 - RNA, 32 nt, Homo Sapiens
gagacaaaggcacaaauguggcuguugauuaa

SEQ ID NO: 416356 - RNA, 32 nt, Homo Sapiens
uguacggccugcagaacugcccggcccgggcc

SEQ ID NO: 416357 - RNA, 32 nt, Homo Sapiens
uaaucagaaaagacauguauuauuuucacaac

SEQ ID NO: 416358 - RNA, 32 nt, Homo Sapiens
uugggaauguacuaucaggauuuuacagcaau

SEQ ID NO: 416359 - RNA, 32 nt, Homo Sapiens
gccacagcugggugagugcagccacugugggc

SEQ ID NO: 416360 - RNA, 32 nt, Homo Sapiens
auaaacgaugcuauuuuaauauuuucaaauaa

SEQ ID NO: 416361 - RNA, 32 nt, Homo Sapiens
guccccgugcgagccgcgcugccgccgccucc

SEQ ID NO: 416362 - RNA, 32 nt, Homo Sapiens
agccucccacuuucaccagagcagccucacug

SEQ ID NO: 416363 - RNA, 32 nt, Homo Sapiens
cguggggcagaggcugcagagccccaggaggg

SEQ ID NO: 416364 - RNA, 32 nt, Homo Sapiens
uaauauagccgcugccauaguuuucuaacuug

SEQ ID NO: 416365 - RNA, 32 nt, Homo Sapiens
ccccacccgaaacacacucagcccuugcacug

SEQ ID NO: 416366 - RNA, 32 nt, Homo Sapiens
ggccccgcaccucgcgucccggaucgcucuga

SEQ ID NO: 416367 - RNA, 32 nt, Homo Sapiens
ggugggacugucagaagcuggcccaggguggu

SEQ ID NO: 416368 - RNA, 32 nt, Homo Sapiens
cuuuauugugcagcuuugagacuagugccuau

SEQ ID NO: 416369 - RNA, 32 nt, Homo Sapiens
cucagagacacgcaguuacacacacacaucgc

SEQ ID NO: 416370 - RNA, 32 nt, Homo Sapiens
cgccuccuggguucaagcaguucucuugccuc

SEQ ID NO: 416371 - RNA, 32 nt, Homo Sapiens
ccaagggagcagcuuucuauccuggccacacu

SEQ ID NO: 416372 - RNA, 32 nt, Homo Sapiens
aagcuggaaaggaaaauugcugagauucacaa

SEQ ID NO: 416373 - RNA, 32 nt, Homo Sapiens
uacgguuuaggagucacgcagcuggaggcuac

SEQ ID NO: 416374 - RNA, 32 nt, Homo Sapiens
agcaggauccugaagcccaugcaggcucugaa

SEQ ID NO: 416375 - RNA, 32 nt, Homo Sapiens
uguuugcccauauauauacguaugccauaugu

SEQ ID NO: 416376 - RNA, 32 nt, Homo Sapiens
auucccuuuuuuuuuucuuuuuuuugagaugu

SEQ ID NO: 416377 - RNA, 32 nt, Homo Sapiens
ucacucuuuggguccacacugcuuuuaccagc

SEQ ID NO: 416378 - RNA, 28 nt, Homo Sapiens
cgagcggggcggcucgugguguuucuaa

SEQ ID NO: 416379 - RNA, 32 nt, Homo Sapiens
aaaggaaguugcugaggccaagguagccaagg

SEQ ID NO: 416380 - RNA, 32 nt, Homo Sapiens
ucggucagucagucggcggccggcgcccggcu

SEQ ID NO: 416381 - RNA, 32 nt, Homo Sapiens
uuguuugacgccggcccggcggcgggucacgu

SEQ ID NO: 416382 - RNA, 32 nt, Homo Sapiens
ucuuggggcacaauuacccagagauauauuua

SEQ ID NO: 416383 - RNA, 30 nt, Homo Sapiens
aaaaacugucuuggcuauucuuggauauuu

SEQ ID NO: 416384 - RNA, 32 nt, Homo Sapiens
aaaguugguuuucaggugagauugaaaaugaa

SEQ ID NO: 416385 - RNA, 32 nt, Homo Sapiens
agguuucugcccugacauucucuugucugcua

SEQ ID NO: 416386 - RNA, 32 nt, Homo Sapiens
aaauccaucucaccccauauuggucuuaaaua

SEQ ID NO: 416387 - RNA, 32 nt, Homo Sapiens
gcuccuucccagcuccuccccgugcccgcuaa

SEQ ID NO: 416388 - RNA, 32 nt, Homo Sapiens
uggguaagaaugcuucuguuccuggaagaccc

SEQ ID NO: 416389 - RNA, 32 nt, Homo Sapiens
ucccucugcaagcccaggaugcccgggccaca

SEQ ID NO: 416390 - RNA, 32 nt, Homo Sapiens
guggagaaagggaaaggcaggucuggggugug

SEQ ID NO: 416391 - RNA, 32 nt, Homo Sapiens
ucaucucuuuugccgagacuguauauuuauca

SEQ ID NO: 416392 - RNA, 32 nt, Homo Sapiens
ucggccuccaggucuuuuuuucccaguucauu

SEQ ID NO: 416393 - RNA, 32 nt, Homo Sapiens
cuuccauuccccugaaaccugcaugagagcuc

SEQ ID NO: 416394 - RNA, 32 nt, Homo Sapiens
uuugagcaguguucuaauuggauaaaugaagg

SEQ ID NO: 416395 - RNA, 32 nt, Homo Sapiens
uagagucuguugucauuucacuaauaggauaa

SEQ ID NO: 416396 - RNA, 32 nt, Homo Sapiens
auucugcccacuuuuuauaaaaacuuacagcg

SEQ ID NO: 416397 - RNA, 32 nt, Homo Sapiens
uuugucucucucucuuuuuuuuuuuacuuucu

SEQ ID NO: 416398 - RNA, 32 nt, Homo Sapiens
cugagcugcgccgugccaggccgcccgccggg

SEQ ID NO: 416399 - RNA, 32 nt, Homo Sapiens
uuucagcagacacucuguucuaauuucuuaaa

SEQ ID NO: 416400 - RNA, 32 nt, Homo Sapiens
ccucacagccuacuuccccuuccccggggcug

SEQ ID NO: 416401 - RNA, 32 nt, Homo Sapiens
uauagagagagaauaagccacuuuuauauuuc

SEQ ID NO: 416402 - RNA, 32 nt, Homo Sapiens
ccagagcgucgccccaggacccuucccaccug

SEQ ID NO: 416403 - RNA, 31 nt, Homo Sapiens
cagccccagcccucagcccagucaaugcaua

SEQ ID NO: 416404 - RNA, 32 nt, Homo Sapiens
agguccgccucccaggcucaaagcuggcucug

SEQ ID NO: 416405 - RNA, 32 nt, Homo Sapiens
uuggcauuuauuucaauuaacaauacuuccuu

SEQ ID NO: 416406 - RNA, 32 nt, Homo Sapiens
gagucugagaauuaaaauauuuuaguauaagc

SEQ ID NO: 416407 - RNA, 32 nt, Homo Sapiens
cuccugagaagcugggagucuuccucgcucag

SEQ ID NO: 416408 - RNA, 32 nt, Homo Sapiens
aggaccacaaggcaaucugggguguggacaga

SEQ ID NO: 416409 - RNA, 32 nt, Homo Sapiens
ggccucaguucccagcuccccccgcccaccca

SEQ ID NO: 416410 - RNA, 32 nt, Homo Sapiens
aucuuaagguauguauggaaaggaacucauuu

SEQ ID NO: 416411 - RNA, 32 nt, Homo Sapiens
uaggguuuggugcaaucugugguuucaaacau

SEQ ID NO: 416412 - RNA, 32 nt, Homo Sapiens
augggaaaauguuuucuguagguuuauuuguu

SEQ ID NO: 416413 - RNA, 32 nt, Homo Sapiens
caaauuugcauuuuugauuccuuuaaacaguu

SEQ ID NO: 416414 - RNA, 31 nt, Homo Sapiens
ugggccgagccccaguugaaggcaaugaaag

SEQ ID NO: 416415 - RNA, 32 nt, Homo Sapiens
accaugcaguucggcggccgcggcugggcccu

SEQ ID NO: 416416 - RNA, 32 nt, Homo Sapiens
ucaagucucaccaguucugcucucccaucaag

SEQ ID NO: 416417 - RNA, 32 nt, Homo Sapiens
acgugggcccagcaguccugugcuuggaaaug

SEQ ID NO: 416418 - RNA, 32 nt, Homo Sapiens
cucagagcagugccagccccaccgcaacugca

SEQ ID NO: 416419 - RNA, 32 nt, Homo Sapiens
cucaaaaaacaaaaacagauugacaacaaaga

SEQ ID NO: 416420 - RNA, 32 nt, Homo Sapiens
aguaaaaaggcacaacucaaaucucagagaca

SEQ ID NO: 416421 - RNA, 32 nt, Homo Sapiens
aaccagcaaccuccagcaugggugucauagcc

SEQ ID NO: 416422 - RNA, 32 nt, Homo Sapiens
aaaugaaacauuuuaccuucucucuuucuaau

SEQ ID NO: 416423 - RNA, 32 nt, Homo Sapiens
ucaguccuggggaagaacccaggcgccugagc

SEQ ID NO: 416424 - RNA, 32 nt, Homo Sapiens
cgccugcaaucccagcacuuugggagacugag

SEQ ID NO: 416425 - RNA, 32 nt, Homo Sapiens
uaaauuuuaaacaaauugguuaguuauuugga

SEQ ID NO: 416426 - RNA, 32 nt, Homo Sapiens
cggggcugcugcggcaggccgauccccagcac

SEQ ID NO: 416427 - RNA, 32 nt, Homo Sapiens
uuucuguauuccuauauuaaccaucuaaacca

SEQ ID NO: 416428 - RNA, 29 nt, Homo Sapiens
cagaauggggguucaggcagggcuguuug

SEQ ID NO: 416429 - RNA, 32 nt, Homo Sapiens
gguggcgagcgcggccagaacugcggucacuu

SEQ ID NO: 416430 - RNA, 32 nt, Homo Sapiens
ggcaccagacuggaggcccccgggcgcuggcc

SEQ ID NO: 416431 - RNA, 32 nt, Homo Sapiens
cgguacuugucauggagcuggcacugcggcgc

SEQ ID NO: 416432 - RNA, 32 nt, Homo Sapiens
ccuuuucuuuugcuucaggcuaagagcugccu

SEQ ID NO: 416433 - RNA, 32 nt, Homo Sapiens
gccucggaggggcuccucgcggugcugcgcgc

SEQ ID NO: 416434 - RNA, 32 nt, Homo Sapiens
accgcuccccacuucugaugccaaucgcaagc

SEQ ID NO: 416435 - RNA, 32 nt, Homo Sapiens
gaguugcaacuacagcuggguuauauggcucu

SEQ ID NO: 416436 - RNA, 32 nt, Homo Sapiens
gaaaacaacgauggcauggaaaacacuuccca

SEQ ID NO: 416437 - RNA, 32 nt, Homo Sapiens
acuaaaaucaguagcuaagaaaggguccuuga

SEQ ID NO: 416438 - RNA, 32 nt, Homo Sapiens
uugggaaauuuaucuaacucucugggccccuu

SEQ ID NO: 416439 - RNA, 32 nt, Homo Sapiens
cugggccugcaucuccuggcgccggcugcuuc

SEQ ID NO: 416440 - RNA, 32 nt, Homo Sapiens
gagcccgccucgcaccagcugcaccugccuag

SEQ ID NO: 416441 - RNA, 32 nt, Homo Sapiens
gcagagcguccugcaaccccagcccucaccag

SEQ ID NO: 416442 - RNA, 32 nt, Homo Sapiens
cuggcaacugccccagcuccaggccaucccau

SEQ ID NO: 416443 - RNA, 32 nt, Homo Sapiens
agaacacugaagauuugaauuugauauuuaag

SEQ ID NO: 416444 - RNA, 32 nt, Homo Sapiens
gccccuggugccucuuccccagcccuaaagcc

SEQ ID NO: 416445 - RNA, 32 nt, Homo Sapiens
ucucugccaggggaagauuccuugacuucugg

SEQ ID NO: 416446 - RNA, 30 nt, Homo Sapiens
uucccuggcugugcuggcggaggcugcgcc

SEQ ID NO: 416447 - RNA, 32 nt, Homo Sapiens
ucaacaucagaguuuauauuaauagcauuaaa

SEQ ID NO: 416448 - RNA, 32 nt, Homo Sapiens
cuucguugacuuccaggacguugggauaauuu

SEQ ID NO: 416449 - RNA, 32 nt, Homo Sapiens
gugugcugucuuuauauuaagaauagagaaac

SEQ ID NO: 416450 - RNA, 32 nt, Homo Sapiens
gguuaucuuucaaugucuauuucaguaucuac

SEQ ID NO: 416451 - RNA, 32 nt, Homo Sapiens
agaaguguguugcaugaauuucuaagaaaugu

SEQ ID NO: 416452 - RNA, 32 nt, Homo Sapiens
aagaaaagaaucaacaaaauaaugcucuugaa

SEQ ID NO: 416453 - RNA, 32 nt, Homo Sapiens
ggaagaaauauuagcaaucaugggaaaaguca

SEQ ID NO: 416454 - RNA, 32 nt, Homo Sapiens
guaccuugguuuagggagauguagaagaggau

SEQ ID NO: 416455 - RNA, 32 nt, Homo Sapiens
uugcaaucguagguauaguuuauaaccugaua

SEQ ID NO: 416456 - RNA, 32 nt, Homo Sapiens
uaggcaggcagacugagcucaggagcuugaga

SEQ ID NO: 416457 - RNA, 32 nt, Homo Sapiens
aagguggggaguagcuugggacugggcagggu

SEQ ID NO: 416458 - RNA, 32 nt, Homo Sapiens
ugagagagacuauaagaagaagggcagauaau

SEQ ID NO: 416459 - RNA, 32 nt, Homo Sapiens
ggauugaaggauuggguuuucucuuucccaug

SEQ ID NO: 416460 - RNA, 32 nt, Homo Sapiens
ggaggguggggucucuaggagcucugcaggcc

SEQ ID NO: 416461 - RNA, 32 nt, Homo Sapiens
caggcuccgagccagcuggauucucugccugc

SEQ ID NO: 416462 - RNA, 32 nt, Homo Sapiens
gcagcauucugaaacaucugagcuaaauauuc

SEQ ID NO: 416463 - RNA, 32 nt, Homo Sapiens
auuuuuugagacggaguuuugcucuuguugcc

SEQ ID NO: 416464 - RNA, 32 nt, Homo Sapiens
auccugcccauccuccucccgcccgucccauu

SEQ ID NO: 416465 - RNA, 32 nt, Homo Sapiens
cacagcagaaauggaagaaaaacaggucucag

SEQ ID NO: 416466 - RNA, 32 nt, Homo Sapiens
uaaagcguacacaacuggaaagacugcuguaa

SEQ ID NO: 416467 - RNA, 32 nt, Homo Sapiens
uuuccaucuucccacacaucucauugaauuug

SEQ ID NO: 416468 - RNA, 32 nt, Homo Sapiens
ucuugggagagaaauuugucuauguuucuagu

SEQ ID NO: 416469 - RNA, 32 nt, Homo Sapiens
guauauaaaaagcagccaaagcucaggggaaa

SEQ ID NO: 416470 - RNA, 32 nt, Homo Sapiens
ucauguggccccacccaaucaagggaagaagg

SEQ ID NO: 416471 - RNA, 32 nt, Homo Sapiens
cguggcccacucccggcccaggcugcuuuccg

SEQ ID NO: 416472 - RNA, 32 nt, Homo Sapiens
aggcagcccucccaagucagacaccuccuucg

SEQ ID NO: 416473 - RNA, 32 nt, Homo Sapiens
cggcagcggcgguguccgagcggcggucggag

SEQ ID NO: 416474 - RNA, 32 nt, Homo Sapiens
uggguggacgcugggagguggaugcugcagug

SEQ ID NO: 416475 - RNA, 32 nt, Homo Sapiens
guccugugguggccauuugcagcuucuguguu

SEQ ID NO: 416476 - RNA, 32 nt, Homo Sapiens
cuaacaaaacugggcaaaguccugcuggucuc

SEQ ID NO: 416477 - RNA, 32 nt, Homo Sapiens
cagcucugguuuccucucccaggcucacccag

SEQ ID NO: 416478 - RNA, 32 nt, Homo Sapiens
ccuccucccuccccuuagccaucacuucuggg

SEQ ID NO: 416479 - RNA, 32 nt, Homo Sapiens
uauucacauuuuauguuuuguuauggccacau

SEQ ID NO: 416480 - RNA, 32 nt, Homo Sapiens
aggguucccgcuauugucucuacuccaucuuc

SEQ ID NO: 416481 - RNA, 30 nt, Homo Sapiens
guggcggcgcccgaagacgccagccgcgcc

SEQ ID NO: 416482 - RNA, 32 nt, Homo Sapiens
gggagggcagacggaggcccgagagccucccc

SEQ ID NO: 416483 - RNA, 32 nt, Homo Sapiens
caccacagggcuggcuuugugcccuaaccccu

SEQ ID NO: 416484 - RNA, 32 nt, Homo Sapiens
agaguggguuccugcuggccagggugcagccu

SEQ ID NO: 416485 - RNA, 32 nt, Homo Sapiens
caaccaacaccguccgggcaggccugaggcug

SEQ ID NO: 416486 - RNA, 32 nt, Homo Sapiens
cgacgcacgcccucgggccgggaugucggggc

SEQ ID NO: 416487 - RNA, 32 nt, Homo Sapiens
gauaagcgcuuccuuuuuuuuagcccaggaga

SEQ ID NO: 416488 - RNA, 32 nt, Homo Sapiens
auccugugacuugccuguuucuccccgcucca

SEQ ID NO: 416489 - RNA, 32 nt, Homo Sapiens
gagagcaccgacaccgccuguguggggcccac

SEQ ID NO: 416490 - RNA, 32 nt, Homo Sapiens
ucugaugccuucccuccacggcccaggucucc

SEQ ID NO: 416491 - RNA, 32 nt, Homo Sapiens
cagcucuacugcaccaccccagcccuucccca

SEQ ID NO: 416492 - RNA, 32 nt, Homo Sapiens
cacagugcucugcuaacagccagcauagaaga

SEQ ID NO: 416493 - RNA, 32 nt, Homo Sapiens
uggcggcgguggaggcugaggcggcggccgag

SEQ ID NO: 416494 - RNA, 32 nt, Homo Sapiens
gcccuuagcaccagcuuagacaccuccaagaa

SEQ ID NO: 416495 - RNA, 32 nt, Homo Sapiens
gauguguaaaauguacacuggaauuuaaagac

SEQ ID NO: 416496 - RNA, 32 nt, Homo Sapiens
cugcagggccagggggugcaggugauaauaaa

SEQ ID NO: 416497 - RNA, 32 nt, Homo Sapiens
gaaaauguaaauuuauaaauauauucaggagu

SEQ ID NO: 416498 - RNA, 32 nt, Homo Sapiens
cucccggacggagcggcuggccgggcagaggg

SEQ ID NO: 416499 - RNA, 32 nt, Homo Sapiens
cuacuaaaaauacaaaacaauuagccgggcgu

SEQ ID NO: 416500 - RNA, 32 nt, Homo Sapiens
uauaugucuagcucaucuaguuccucuucuua

SEQ ID NO: 416501 - RNA, 32 nt, Homo Sapiens
uguucugugcuaacagauaacugggacaccac

SEQ ID NO: 416502 - RNA, 32 nt, Homo Sapiens
ggcuauugugaaaaaugaugcuauaaauguga

SEQ ID NO: 416503 - RNA, 32 nt, Homo Sapiens
gaaauauaaaaauuauguguguauguguaugu

SEQ ID NO: 416504 - RNA, 29 nt, Homo Sapiens
ggaagggugggucucaguuagcagggguc

SEQ ID NO: 416505 - RNA, 32 nt, Homo Sapiens
uccugccuccauuaaauccauccaccaggguu

SEQ ID NO: 416506 - RNA, 32 nt, Homo Sapiens
gcuggccacccuccccccgccagcuccauccc

SEQ ID NO: 416507 - RNA, 32 nt, Homo Sapiens
ugccaaguauccgcuuccuguggaagcaagac

SEQ ID NO: 416508 - RNA, 32 nt, Homo Sapiens
cugcgaggagucacauuaacuuugcucuagaa

SEQ ID NO: 416509 - RNA, 32 nt, Homo Sapiens
gcaccgugacuucuaaggggcgcggauuucag

SEQ ID NO: 416510 - RNA, 32 nt, Homo Sapiens
aggagguuuaucugcuggccuugcaucagcca

SEQ ID NO: 416511 - RNA, 32 nt, Homo Sapiens
uaacucucuccagugagaaccaaaaauuaauu

SEQ ID NO: 416512 - RNA, 32 nt, Homo Sapiens
ggacaaacccacccgagucacucuacugcugu

SEQ ID NO: 416513 - RNA, 32 nt, Homo Sapiens
aaagggugaaaauuauuuuguucauacauauu

SEQ ID NO: 416514 - RNA, 26 nt, Homo Sapiens
cuuguucgccuggacggcgccgggga

SEQ ID NO: 416515 - RNA, 32 nt, Homo Sapiens
cggagccccccggagcugcgcgcgggcuugca

SEQ ID NO: 416516 - RNA, 30 nt, Homo Sapiens
uaccauucaacugugauccaucuuauaaca

SEQ ID NO: 416517 - RNA, 32 nt, Homo Sapiens
uaaccaacccucaaaccuuaauaaaccuaaga

SEQ ID NO: 416518 - RNA, 27 nt, Homo Sapiens
gauaguuuuuucuucaguuuucucuug

SEQ ID NO: 416519 - RNA, 32 nt, Homo Sapiens
cuucccaggcugccuccccagugggucugcac

SEQ ID NO: 416520 - RNA, 32 nt, Homo Sapiens
uaagauggaaaacagugccaaaccuccacagc

SEQ ID NO: 416521 - RNA, 32 nt, Homo Sapiens
cuggauccgagcccguguggaggucaaagcua

SEQ ID NO: 416522 - RNA, 32 nt, Homo Sapiens
acuugggagagccagauuuucucugugcucuu

SEQ ID NO: 416523 - RNA, 32 nt, Homo Sapiens
ucuuagguguaugugucugaccucaggccuuu

SEQ ID NO: 416524 - RNA, 32 nt, Homo Sapiens
gcguccgcucccccgcgccacugcgccgcucc

SEQ ID NO: 416525 - RNA, 32 nt, Homo Sapiens
uuggagcugucucagccugcaguugcuuuaua

SEQ ID NO: 416526 - RNA, 32 nt, Homo Sapiens
ccuaauauuuaaaauuuacacuucuaagacua

SEQ ID NO: 416527 - RNA, 32 nt, Homo Sapiens
uuuuguuauaauguacaauuuagaaguuugau

SEQ ID NO: 416528 - RNA, 32 nt, Homo Sapiens
uuaauggcacuuuaaccaguuaacuuggugca

SEQ ID NO: 416529 - RNA, 32 nt, Homo Sapiens
ccaaucagugacuuaaauuguugauuuuuguu

SEQ ID NO: 416530 - RNA, 32 nt, Homo Sapiens
cuggcugcagcccaggcgccauguccucugag

SEQ ID NO: 416531 - RNA, 32 nt, Homo Sapiens
cauuggauagaaaagcacugugaaaaucccua

SEQ ID NO: 416532 - RNA, 32 nt, Homo Sapiens
cucuguugacauucuaugcaauguuuuucauu

SEQ ID NO: 416533 - RNA, 32 nt, Homo Sapiens
gguggagagacacccauguggcuccccuuagg

SEQ ID NO: 416534 - RNA, 32 nt, Homo Sapiens
gcuccgaagcuacuucuccacugucccguuca

SEQ ID NO: 416535 - RNA, 32 nt, Homo Sapiens
cuucgcucugcuagaagcuggagggugcuagg

SEQ ID NO: 416536 - RNA, 32 nt, Homo Sapiens
cgacuucuccaucuccuguguaaucaaggcca

SEQ ID NO: 416537 - RNA, 32 nt, Homo Sapiens
caaacaggaaaaaacaaacaaacaaacaaaaa

SEQ ID NO: 416538 - RNA, 32 nt, Homo Sapiens
uaccucucccacacugguuuuauuuguaauuu

SEQ ID NO: 416539 - RNA, 27 nt, Homo Sapiens
cgggacugucccuccagcccccagcuu

SEQ ID NO: 416540 - RNA, 32 nt, Homo Sapiens
agccggagccccacaggcaccuacuaaaccgc

SEQ ID NO: 416541 - RNA, 32 nt, Homo Sapiens
gcuuuaauauauucgguuuguauguaauggaa

SEQ ID NO: 416542 - RNA, 32 nt, Homo Sapiens
gauuccuuuuucuguagaauacuuugccucga

SEQ ID NO: 416543 - RNA, 32 nt, Homo Sapiens
gacuucaguauauuccugggaaugccauagga

SEQ ID NO: 416544 - RNA, 32 nt, Homo Sapiens
ggaaggaucccucuccucucugccauuucuug

SEQ ID NO: 416545 - RNA, 32 nt, Homo Sapiens
auccauucagaacacgaggcaauauugcaguc

SEQ ID NO: 416546 - RNA, 32 nt, Homo Sapiens
cccccuugcugugccuggaccagcccaccgug

SEQ ID NO: 416547 - RNA, 32 nt, Homo Sapiens
uuuuauuuacacaaagcgagcugagaccacag

SEQ ID NO: 416548 - RNA, 32 nt, Homo Sapiens
uuaagcccaucccucgcccccagccugaggug

SEQ ID NO: 416549 - RNA, 32 nt, Homo Sapiens
gaagccggagucagcaucuccaggcgcgggau

SEQ ID NO: 416550 - RNA, 32 nt, Homo Sapiens
ggaguaggagauggggccuuugauaaccccag

SEQ ID NO: 416551 - RNA, 32 nt, Homo Sapiens
uccucuuugacaaaagauguuuuggcuauucu

SEQ ID NO: 416552 - RNA, 32 nt, Homo Sapiens
cuguaacaaaaauguacuuuauagagauggag

SEQ ID NO: 416553 - RNA, 32 nt, Homo Sapiens
caacuccuggcacacaucaugggcuuuggagg

SEQ ID NO: 416554 - RNA, 32 nt, Homo Sapiens
ggacgcuggagcccuccuuuaaaggauggagg

SEQ ID NO: 416555 - RNA, 32 nt, Homo Sapiens
ggguuucaagacagggaacuguggggcccacg

SEQ ID NO: 416556 - RNA, 32 nt, Homo Sapiens
ugcccgucccugcguggugcugucccauguca

SEQ ID NO: 416557 - RNA, 27 nt, Homo Sapiens
ggauggcggagacugugagcugcgagg

SEQ ID NO: 416558 - RNA, 32 nt, Homo Sapiens
ggacuccucuugggauccgaugauggauccca

SEQ ID NO: 416559 - RNA, 32 nt, Homo Sapiens
cuucagagggcgcugccuguccuccuuggcau

SEQ ID NO: 416560 - RNA, 32 nt, Homo Sapiens
cucaucucacgcagaggaugccaggcaggaaa

SEQ ID NO: 416561 - RNA, 32 nt, Homo Sapiens
ggcagauggggucaaggcugggccagucccag

SEQ ID NO: 416562 - RNA, 32 nt, Homo Sapiens
uuugccgcuuccgacgcgugaccccggcgcgc

SEQ ID NO: 416563 - RNA, 32 nt, Homo Sapiens
ucuguuuccuucccccucaaccuuaccccacc

SEQ ID NO: 416564 - RNA, 32 nt, Homo Sapiens
ccucgccggccgcgcgcuggaugcugugaucc

SEQ ID NO: 416565 - RNA, 32 nt, Homo Sapiens
ggggcuggguaccaaugcugcaggucaacagc

SEQ ID NO: 416566 - RNA, 32 nt, Homo Sapiens
ccauuaaucaguucauuagaaauauuuuaaaa

SEQ ID NO: 416567 - RNA, 29 nt, Homo Sapiens
uggcucauauguauaaucuuagcacuuug

SEQ ID NO: 416568 - RNA, 32 nt, Homo Sapiens
uugccaagguaacagaauugcugacaucuguc

SEQ ID NO: 416569 - RNA, 32 nt, Homo Sapiens
gguuuagaaagauggacuuuucugauaaaucu

SEQ ID NO: 416570 - RNA, 32 nt, Homo Sapiens
ccugcacaaggugcagcaugaccuuaacucgg

SEQ ID NO: 416571 - RNA, 32 nt, Homo Sapiens
uagaagccagcaggcacccaugugcuacugac

SEQ ID NO: 416572 - RNA, 32 nt, Homo Sapiens
acuuuuaucuucugcuccuaaucaguuugucg

SEQ ID NO: 416573 - RNA, 28 nt, Homo Sapiens
gugguuaugacuuguauuauaaacuuuc

SEQ ID NO: 416574 - RNA, 32 nt, Homo Sapiens
uugugccuauuuuauuucuaaucuaucacuuc

SEQ ID NO: 416575 - RNA, 32 nt, Homo Sapiens
gaaagccaggcugagcacugcagaccacagag

SEQ ID NO: 416576 - RNA, 32 nt, Homo Sapiens
cugccucuuauuuccaaccccaucccauguuu

SEQ ID NO: 416577 - RNA, 32 nt, Homo Sapiens
cgcggcagccccagcucuaccgcguccagcgc

SEQ ID NO: 416578 - RNA, 32 nt, Homo Sapiens
acucaggcacugggcuaggugcuugggauaca

SEQ ID NO: 416579 - RNA, 32 nt, Homo Sapiens
gugaagauacuaguauaaguuuaaaggaacac

SEQ ID NO: 416580 - RNA, 32 nt, Homo Sapiens
uuccggcccgcggcgaccgccggcaacuguug

SEQ ID NO: 416581 - RNA, 32 nt, Homo Sapiens
caaccccuuauacagcuccucugguggaaucc

SEQ ID NO: 416582 - RNA, 32 nt, Homo Sapiens
gaaccaugggcucggggugcuuugggugccug

SEQ ID NO: 416583 - RNA, 32 nt, Homo Sapiens
acauggguagccuacuuuagaaaugaggccuu

SEQ ID NO: 416584 - RNA, 32 nt, Homo Sapiens
aagagaagucugagaaacucacagcaaagaug

SEQ ID NO: 416585 - RNA, 32 nt, Homo Sapiens
agguauuaaaggaaaccacuggucuugucagu

SEQ ID NO: 416586 - RNA, 31 nt, Homo Sapiens
cauaauugagagaauuccugaguugauagcu

SEQ ID NO: 416587 - RNA, 32 nt, Homo Sapiens
gucauggccuggaagaucagagucacagaggg

SEQ ID NO: 416588 - RNA, 32 nt, Homo Sapiens
cauaauauauaggauaaauuguuuacaugauu

SEQ ID NO: 416589 - RNA, 32 nt, Homo Sapiens
ugugaccuuucugcuccacugcucagcaagau

SEQ ID NO: 416590 - RNA, 32 nt, Homo Sapiens
gaaaugucaguuuaucuccccuccucaguaua

SEQ ID NO: 416591 - RNA, 32 nt, Homo Sapiens
ugaauaauuauuguaaacuauauuuuacaacu

SEQ ID NO: 416592 - RNA, 32 nt, Homo Sapiens
ccaccacguccaucuaaauuucuuuauuauuu

SEQ ID NO: 416593 - RNA, 32 nt, Homo Sapiens
cggagucaggcaggaaggagaagcacagcaau

SEQ ID NO: 416594 - RNA, 32 nt, Homo Sapiens
caagcaccugguuccuugggcuggaugacuuc

SEQ ID NO: 416595 - RNA, 32 nt, Homo Sapiens
cuuugcagaaguuaucucuaaaguaggauuuc

SEQ ID NO: 416596 - RNA, 32 nt, Homo Sapiens
gcccaguggaggaggggguacaguccugguua

SEQ ID NO: 416597 - RNA, 32 nt, Homo Sapiens
ucacuucaucccaaaaaugggauugugaaugu

SEQ ID NO: 416598 - RNA, 32 nt, Homo Sapiens
caaccauggcucauucacagccaggcagccaa

SEQ ID NO: 416599 - RNA, 32 nt, Homo Sapiens
aaaauauguagggcagguugacaggcuggaga

SEQ ID NO: 416600 - RNA, 32 nt, Homo Sapiens
ucauggucaggagcuggacgauucugguaacu

SEQ ID NO: 416601 - RNA, 32 nt, Homo Sapiens
gagggcgccccgccgcgcagagaccagagcuc

SEQ ID NO: 416602 - RNA, 32 nt, Homo Sapiens
cacauguucugcggaugcugcagaagugugga

SEQ ID NO: 416603 - RNA, 32 nt, Homo Sapiens
ugaccucugcagcaauaaagcagcguuucuau

SEQ ID NO: 416604 - RNA, 32 nt, Homo Sapiens
cugcgguguaguccagcuccgcggcucugaga

SEQ ID NO: 416605 - RNA, 32 nt, Homo Sapiens
aaguuuccucugcucagcaucauuucaugcca

SEQ ID NO: 416606 - RNA, 32 nt, Homo Sapiens
ccgcgcccucccuccgccucccaucccgcuua

SEQ ID NO: 416607 - RNA, 32 nt, Homo Sapiens
auggccuuaaguuuucuaauucaagcggguuu

SEQ ID NO: 416608 - RNA, 32 nt, Homo Sapiens
ucugccaccacagauaagcaaaaaaguccuug

SEQ ID NO: 416609 - RNA, 32 nt, Homo Sapiens
gacggcgugggaagagaauggcuucugcaagg

SEQ ID NO: 416610 - RNA, 32 nt, Homo Sapiens
caccgaggcauaguguagaacagucccgguca

SEQ ID NO: 416611 - RNA, 32 nt, Homo Sapiens
aauauaaaucauauuuauuuuaauaagguugg

SEQ ID NO: 416612 - RNA, 26 nt, Homo Sapiens
caugaauccuguuuauaguccuggau

SEQ ID NO: 416613 - RNA, 32 nt, Homo Sapiens
gauguuuaauauacuuuuuuuuuucuuuucuu

SEQ ID NO: 416614 - RNA, 32 nt, Homo Sapiens
aaaacgcaccaaucaaugcucugugucuagcu

SEQ ID NO: 416615 - RNA, 32 nt, Homo Sapiens
acggcggcgcgugcagcagcuccagaaagcag

SEQ ID NO: 416616 - RNA, 32 nt, Homo Sapiens
acacccaggcggccaguaaccaaaccagccag

SEQ ID NO: 416617 - RNA, 32 nt, Homo Sapiens
agaaguagcagagaagcagggggccagagcua

SEQ ID NO: 416618 - RNA, 32 nt, Homo Sapiens
cuccuggcagagcugaggucugagagaucugg

SEQ ID NO: 416619 - RNA, 32 nt, Homo Sapiens
cggcccagcaaccgugaggagaaacaaaagcc

SEQ ID NO: 416620 - RNA, 32 nt, Homo Sapiens
cuguccgcuggcaaccacugaucuccuuuuua

SEQ ID NO: 416621 - RNA, 32 nt, Homo Sapiens
uuuucucaagcacuucugcucuccucuaccag

SEQ ID NO: 416622 - RNA, 32 nt, Homo Sapiens
cucaauagcgagucccuggcgaccacagucug

SEQ ID NO: 416623 - RNA, 32 nt, Homo Sapiens
cccuccgggaugcggagcuacucgaccgccgg

SEQ ID NO: 416624 - RNA, 32 nt, Homo Sapiens
uguagcagcguuggcggcaggaggcggcggcc

SEQ ID NO: 416625 - RNA, 32 nt, Homo Sapiens
ucgaaaauaguaggagccuaaaacuuuguuca

SEQ ID NO: 416626 - RNA, 32 nt, Homo Sapiens
cuggauuuuccucaucuuuguggauuuaucuc

SEQ ID NO: 416627 - RNA, 32 nt, Homo Sapiens
gaccugaugcucucauuacagaucaggaaauu

SEQ ID NO: 416628 - RNA, 32 nt, Homo Sapiens
gcgcuucggaauuuuuuuuucuuuuuuuuuuu

SEQ ID NO: 416629 - RNA, 32 nt, Homo Sapiens
ccaguggugugugggggcaagaucugauggaa

SEQ ID NO: 416630 - RNA, 32 nt, Homo Sapiens
gagaucgaccucagugccuggaccaccaacgg

SEQ ID NO: 416631 - RNA, 32 nt, Homo Sapiens
guugaagauaaauuauuuuuaaagguuaugaa

SEQ ID NO: 416632 - RNA, 32 nt, Homo Sapiens
caguaugaguggcugucaccacagggcgccau

SEQ ID NO: 416633 - RNA, 32 nt, Homo Sapiens
ugccugggaagucccagcccgcgcucuccgga

SEQ ID NO: 416634 - RNA, 32 nt, Homo Sapiens
gcugacucaacugaaaucauggcguuugacag

SEQ ID NO: 416635 - RNA, 32 nt, Homo Sapiens
ccgcgacucggccagagcggcgcuggcagagg

SEQ ID NO: 416636 - RNA, 32 nt, Homo Sapiens
cuccuccagcuguuguugcugcuggauuugcc

SEQ ID NO: 416637 - RNA, 32 nt, Homo Sapiens
gacccagagcgggaccccggcugccgagucca

SEQ ID NO: 416638 - RNA, 32 nt, Homo Sapiens
aaaaaccuuugcuuaaauucaugcuguucuaa

SEQ ID NO: 416639 - RNA, 32 nt, Homo Sapiens
gggaaggaggauguaauuccaucauauacucu

SEQ ID NO: 416640 - RNA, 32 nt, Homo Sapiens
ccaccuccuccagacccccuccccuccugugu

SEQ ID NO: 416641 - RNA, 32 nt, Homo Sapiens
gcagccuauaaaauaguucugaaguauuuuau

SEQ ID NO: 416642 - RNA, 32 nt, Homo Sapiens
augggcuuuaguuuccuccucucuaaaggguu

SEQ ID NO: 416643 - RNA, 32 nt, Homo Sapiens
uauuaaucccagcguguguaaaacagaacagu

SEQ ID NO: 416644 - RNA, 32 nt, Homo Sapiens
ggagaaacuauauuuuaaagaacaagacauac

SEQ ID NO: 416645 - RNA, 32 nt, Homo Sapiens
uauagcaggccuaaaaggaaaagcgaaaauag

SEQ ID NO: 416646 - RNA, 32 nt, Homo Sapiens
acucauauuuuuccuuccuucacuguuguagu

SEQ ID NO: 416647 - RNA, 32 nt, Homo Sapiens
cugccuugguuccuggaccccugggcccaucc

SEQ ID NO: 416648 - RNA, 31 nt, Homo Sapiens
cuucaagccacacccaccugaaaucaaacca

SEQ ID NO: 416649 - RNA, 32 nt, Homo Sapiens
cuguuuuaagaaaaaacaacaaggaaguaaaa

SEQ ID NO: 416650 - RNA, 32 nt, Homo Sapiens
uucuccuguaacucaacuaacaaaaucaagcc

SEQ ID NO: 416651 - RNA, 32 nt, Homo Sapiens
gaugaauacauuuuguuaaaaaaaaaaaaaaa

SEQ ID NO: 416652 - RNA, 30 nt, Homo Sapiens
ccaggaggcaggcugcgggguaggagaggg

SEQ ID NO: 416653 - RNA, 32 nt, Homo Sapiens
cacccagcaagaguuauuuucuuaacuugaaa

SEQ ID NO: 416654 - RNA, 32 nt, Homo Sapiens
ucaucacguggcugucaucuggucaaugaacu

SEQ ID NO: 416655 - RNA, 32 nt, Homo Sapiens
uaaaccugugauaaguuucuaagaauaugaga

SEQ ID NO: 416656 - RNA, 32 nt, Homo Sapiens
uguuuuguguuucaguaguucuccuugcugaa

SEQ ID NO: 416657 - RNA, 32 nt, Homo Sapiens
uguguucucugugggagggagggaguccugug

SEQ ID NO: 416658 - RNA, 32 nt, Homo Sapiens
aaauuggauuugcgguggaagagacaggggag

SEQ ID NO: 416659 - RNA, 32 nt, Homo Sapiens
agguucagaaacaaaacuguugcuggcuacug

SEQ ID NO: 416660 - RNA, 32 nt, Homo Sapiens
caaauaccaaaauacuacuaugccuuauaaaa

SEQ ID NO: 416661 - RNA, 32 nt, Homo Sapiens
uuccauauguauauauuauggucucaauguuu

SEQ ID NO: 416662 - RNA, 32 nt, Homo Sapiens
ugucaguucagacagcagcaggaauagcugac

SEQ ID NO: 416663 - RNA, 32 nt, Homo Sapiens
cgcgcggggcugggggcgcccagaagacgugc

SEQ ID NO: 416664 - RNA, 32 nt, Homo Sapiens
uauuauucaaccaagcuucuauaaaauuguac

SEQ ID NO: 416665 - RNA, 32 nt, Homo Sapiens
ccaaaguucuugucaccuccucaugcaaagcc

SEQ ID NO: 416666 - RNA, 32 nt, Homo Sapiens
agcgccgcgcccuccugacccgcggccgcgga

SEQ ID NO: 416667 - RNA, 32 nt, Homo Sapiens
auucuguucacuuuuguuuuguuuccuugugu

SEQ ID NO: 416668 - RNA, 32 nt, Homo Sapiens
aaaaauaaagcuuggucaaagcagaaggccaa

SEQ ID NO: 416669 - RNA, 32 nt, Homo Sapiens
uuuguaacuuaacaugccuuguccugauguug

SEQ ID NO: 416670 - RNA, 32 nt, Homo Sapiens
uauguuuauugcaaaauccuuucgaaauaaac

SEQ ID NO: 416671 - RNA, 32 nt, Homo Sapiens
uccccacagcauuucugcuccucccucaagac

SEQ ID NO: 416672 - RNA, 32 nt, Homo Sapiens
ucauccaacugggacccucaccacgaaucuca

SEQ ID NO: 416673 - RNA, 32 nt, Homo Sapiens
ccaauaaaccuguuuugucauacucuacuuaa

SEQ ID NO: 416674 - RNA, 32 nt, Homo Sapiens
uuccagaaaaucaacaauggaaaugauaggca

SEQ ID NO: 416675 - RNA, 29 nt, Homo Sapiens
ugcucucggggaccggggcgcugcucgga

SEQ ID NO: 416676 - RNA, 32 nt, Homo Sapiens
uauuuucacauacauucuuuuagaacugaguc

SEQ ID NO: 416677 - RNA, 32 nt, Homo Sapiens
ucaccugagccugggaggcugaggcgggagaa

SEQ ID NO: 416678 - RNA, 32 nt, Homo Sapiens
gcagcacccauccaccguccccucccagggag

SEQ ID NO: 416679 - RNA, 32 nt, Homo Sapiens
cggccccaccgggcgccgcgagggaucauguc

SEQ ID NO: 416680 - RNA, 32 nt, Homo Sapiens
ugugaaaguguugggucuuccuccaggaugcc

SEQ ID NO: 416681 - RNA, 32 nt, Homo Sapiens
cguauguaaugcaaagaacaaacaaauaaagg

SEQ ID NO: 416682 - RNA, 32 nt, Homo Sapiens
ucuggcaagauuaguggcuuccccucacccac

SEQ ID NO: 416683 - RNA, 32 nt, Homo Sapiens
uagugauugaauucuacuuuugccaucugaau

SEQ ID NO: 416684 - RNA, 32 nt, Homo Sapiens
gccccacuucugcuccacuccucccccgacug

SEQ ID NO: 416685 - RNA, 31 nt, Homo Sapiens
cugcgaccggggcugccaacggccucaacaa

SEQ ID NO: 416686 - RNA, 32 nt, Homo Sapiens
acuuaggacgccuuaaauuuguaaauaaaaug

SEQ ID NO: 416687 - RNA, 32 nt, Homo Sapiens
aaaaaggcgaguuugucuuuucuuaccugaga

SEQ ID NO: 416688 - RNA, 32 nt, Homo Sapiens
cuucuuuccaggccuuucccaaggaguagcug

SEQ ID NO: 416689 - RNA, 32 nt, Homo Sapiens
ccucagauucuguuaaccaaaauugcagaaug

SEQ ID NO: 416690 - RNA, 32 nt, Homo Sapiens
aaagagcuuccaugugcguguuccucaguguu

SEQ ID NO: 416691 - RNA, 32 nt, Homo Sapiens
gacuccggaccuggaaagaaucuccuaggagg

SEQ ID NO: 416692 - RNA, 32 nt, Homo Sapiens
uccgccagccccuccaccccagccugccugcu

SEQ ID NO: 416693 - RNA, 32 nt, Homo Sapiens
caagcgcggccgcggaguggccuaccggggac

SEQ ID NO: 416694 - RNA, 32 nt, Homo Sapiens
cacuaaagacuggguuacauaugccuccagua

SEQ ID NO: 416695 - RNA, 32 nt, Homo Sapiens
caaaacccagacccccaggucccggccaaugg

SEQ ID NO: 416696 - RNA, 32 nt, Homo Sapiens
ccgggagcgagugccguuucccccgcucaccg

SEQ ID NO: 416697 - RNA, 32 nt, Homo Sapiens
aaucagcuguugcaggcagugucuuaaggaga

SEQ ID NO: 416698 - RNA, 32 nt, Homo Sapiens
ccaagcuaacugucucauccauguguugauuu

SEQ ID NO: 416699 - RNA, 32 nt, Homo Sapiens
ucuacagcaaugugcagaacaagcauucccac

SEQ ID NO: 416700 - RNA, 32 nt, Homo Sapiens
cccaagaagagggaaggcaggaggggccuaca

SEQ ID NO: 416701 - RNA, 32 nt, Homo Sapiens
agaccuguggggugggggccgggcugcaccug

SEQ ID NO: 416702 - RNA, 32 nt, Homo Sapiens
ggcuaugucucagauuucucauauuuaaaaaa

SEQ ID NO: 416703 - RNA, 32 nt, Homo Sapiens
gaaugccaaggcaacacaguuuugccauaaag

SEQ ID NO: 416704 - RNA, 32 nt, Homo Sapiens
ggaggcgccagagcgcggggcagacgcaaagu

SEQ ID NO: 416705 - RNA, 32 nt, Homo Sapiens
aaaauauuauuuaaaucaggaaacuaaaaaua

SEQ ID NO: 416706 - RNA, 32 nt, Homo Sapiens
agagguccgugcuacaucgucacaguuccucc

SEQ ID NO: 416707 - RNA, 32 nt, Homo Sapiens
ucacccuguaucccuugagaauaucuguagug

SEQ ID NO: 416708 - RNA, 30 nt, Homo Sapiens
cuuuugccuuaagucacccaucuuccagua

SEQ ID NO: 416709 - RNA, 32 nt, Homo Sapiens
ugugccgcccucgcuggcgaggcuccugugug

SEQ ID NO: 416710 - RNA, 32 nt, Homo Sapiens
ugucauuauaugcuuauuuguuuugucauuua

SEQ ID NO: 416711 - RNA, 32 nt, Homo Sapiens
uccuaagggauuacaacacagugguuuccugg

SEQ ID NO: 416712 - RNA, 32 nt, Homo Sapiens
uaaaagccaccugcuuccccagcccugacuug

SEQ ID NO: 416713 - RNA, 32 nt, Homo Sapiens
ugaaucaucacaugccaccacacuguaccaug

SEQ ID NO: 416714 - RNA, 32 nt, Homo Sapiens
ccaagugugcaaguaggcugcccgccaagagg

SEQ ID NO: 416715 - RNA, 32 nt, Homo Sapiens
cucccggacggggcggcuggccaggcagaggg

SEQ ID NO: 416716 - RNA, 32 nt, Homo Sapiens
gagccuccccgguuccuccccugcggugaccc

SEQ ID NO: 416717 - RNA, 32 nt, Homo Sapiens
uccuuauuccucccccgaccuaauugucuuug

SEQ ID NO: 416718 - RNA, 32 nt, Homo Sapiens
guauccugccugggcucuggccccugcucugu

SEQ ID NO: 416719 - RNA, 32 nt, Homo Sapiens
uuguaccuucaucuuucauuuaauuuucuggc

SEQ ID NO: 416720 - RNA, 32 nt, Homo Sapiens
gcaggccgagggugguggcucacgcauguaau

SEQ ID NO: 416721 - RNA, 32 nt, Homo Sapiens
caccaguguggagggcaucgcagacgcauccg

SEQ ID NO: 416722 - RNA, 32 nt, Homo Sapiens
gcacauuagccauacaucgugugaaaguauaa

SEQ ID NO: 416723 - RNA, 32 nt, Homo Sapiens
ccaaaugaaaaauaaaccuauuuaugaguuag

SEQ ID NO: 416724 - RNA, 32 nt, Homo Sapiens
cuacuuugagaagaaaagaaaaauauuagaau

SEQ ID NO: 416725 - RNA, 32 nt, Homo Sapiens
uuggauccaaaagcagcaaaaauacuacacuu

SEQ ID NO: 416726 - RNA, 32 nt, Homo Sapiens
cccagugcugcccagccuccccgcccgcuccc

SEQ ID NO: 416727 - RNA, 32 nt, Homo Sapiens
ggcagcccagcagcggcugacccucugccugc

SEQ ID NO: 416728 - RNA, 32 nt, Homo Sapiens
ugugauuugggcaaaucauuccaggucuuugg

SEQ ID NO: 416729 - RNA, 32 nt, Homo Sapiens
auauauacuucacaaagagaugaccuauauaa

SEQ ID NO: 416730 - RNA, 32 nt, Homo Sapiens
aagaauacauucaaagcacugauguaggagau

SEQ ID NO: 416731 - RNA, 31 nt, Homo Sapiens
aaaaagaaauaaacuuaagaaaucagagauu

SEQ ID NO: 416732 - RNA, 32 nt, Homo Sapiens
cuguaccgggcggggggcgccuacgggccggg

SEQ ID NO: 416733 - RNA, 31 nt, Homo Sapiens
auuacuggauaaaaacaguugugucaguguc

SEQ ID NO: 416734 - RNA, 32 nt, Homo Sapiens
agauuguggucuauguuugaucugugucccca

SEQ ID NO: 416735 - RNA, 32 nt, Homo Sapiens
gucuguccuucaggacuuccaaggcucccaaa

SEQ ID NO: 416736 - RNA, 32 nt, Homo Sapiens
ucagcuccucugucugguuguuuaccuguucc

SEQ ID NO: 416737 - RNA, 32 nt, Homo Sapiens
uggaaguugagacuaagaauaauccuagggau

SEQ ID NO: 416738 - RNA, 32 nt, Homo Sapiens
gagcuauggagucaaggcauguuuaagauggg

SEQ ID NO: 416739 - RNA, 32 nt, Homo Sapiens
aaaguucuaucaaggaguucuaucaaggcauc

SEQ ID NO: 416740 - RNA, 32 nt, Homo Sapiens
uugugggaguuaggggaugcuucuuuuuucca

SEQ ID NO: 416741 - RNA, 32 nt, Homo Sapiens
gccuggucucgugugugcaccugggaccggug

SEQ ID NO: 416742 - RNA, 32 nt, Homo Sapiens
gggggcucggugccgcuccgcacugcccggcc

SEQ ID NO: 416743 - RNA, 32 nt, Homo Sapiens
agcaaugucaccuggaucugcccucccuccca

SEQ ID NO: 416744 - RNA, 32 nt, Homo Sapiens
caaaaagcccaugaaaaaucugcagcagccuc

SEQ ID NO: 416745 - RNA, 32 nt, Homo Sapiens
gcugccgaugucccggggcugagcagcgccca

SEQ ID NO: 416746 - RNA, 32 nt, Homo Sapiens
gguacugaacauccacaguguuguguaaccau

SEQ ID NO: 416747 - RNA, 31 nt, Homo Sapiens
gagccgccgaaaccugcaggagucuacuaug

SEQ ID NO: 416748 - RNA, 32 nt, Homo Sapiens
guuacuucagugauuacacuuuugcucauauu

SEQ ID NO: 416749 - RNA, 32 nt, Homo Sapiens
uucugacaguauuauguaauuuuuuagcgugg

SEQ ID NO: 416750 - RNA, 32 nt, Homo Sapiens
cguugggaacagaggacacuccaggcgcugac

SEQ ID NO: 416751 - RNA, 32 nt, Homo Sapiens
augacgggagaaugauggggggaguuggggag

SEQ ID NO: 416752 - RNA, 32 nt, Homo Sapiens
auagugguucuaugacucugcgagggacaggc

SEQ ID NO: 416753 - RNA, 32 nt, Homo Sapiens
aggccacccugccuccucccguccgccccaga

SEQ ID NO: 416754 - RNA, 29 nt, Homo Sapiens
agcuacuugggaggcagaggcaggagaau

SEQ ID NO: 416755 - RNA, 32 nt, Homo Sapiens
ucaacucauaaacgugauugauagguggcuga

SEQ ID NO: 416756 - RNA, 32 nt, Homo Sapiens
uguagcucuguggucagccuacuugucugcuc

SEQ ID NO: 416757 - RNA, 32 nt, Homo Sapiens
aaagagaaagagaaaaucugguauuugcaaug

SEQ ID NO: 416758 - RNA, 32 nt, Homo Sapiens
uauaacauaaccucagaguaucuuuaccaaag

SEQ ID NO: 416759 - RNA, 32 nt, Homo Sapiens
cuccuaaugcuaucccuccccccucccccuaa

SEQ ID NO: 416760 - RNA, 32 nt, Homo Sapiens
cucuguguauauccuugcuuuauuuucuugga

SEQ ID NO: 416761 - RNA, 32 nt, Homo Sapiens
uaucaccaacuuuuccuuaaaaguguuccuuu

SEQ ID NO: 416762 - RNA, 32 nt, Homo Sapiens
uaauuuuuaagagauuaaagugccagauggag

SEQ ID NO: 416763 - RNA, 32 nt, Homo Sapiens
cugggagaauucugagcacagauuccagaggu

SEQ ID NO: 416764 - RNA, 32 nt, Homo Sapiens
accuuuugaaaauggaugggugauaaugaaag

SEQ ID NO: 416765 - RNA, 29 nt, Homo Sapiens
agcucugaguguuucaggaagaagagagc

SEQ ID NO: 416766 - RNA, 32 nt, Homo Sapiens
ucaacuguuuaagugaauauuaaagggcuugg

SEQ ID NO: 416767 - RNA, 32 nt, Homo Sapiens
aucuggagcucagccgagccccggccggcgga

SEQ ID NO: 416768 - RNA, 32 nt, Homo Sapiens
gggaagaaaguacgagcugaaaaaagggcaug

SEQ ID NO: 416769 - RNA, 32 nt, Homo Sapiens
augucgaggaugaaggcgcccgggucaaugau

SEQ ID NO: 416770 - RNA, 32 nt, Homo Sapiens
cuucucaugguccacacccaucacaccaugga

SEQ ID NO: 416771 - RNA, 32 nt, Homo Sapiens
caaaggaucacugcuuaaaaauacugaauuua

SEQ ID NO: 416772 - RNA, 32 nt, Homo Sapiens
gccuucugugcagucgcggcccgggcggacgg

SEQ ID NO: 416773 - RNA, 32 nt, Homo Sapiens
ggggaaggaggagaagcgcuuaaagcggcggg

SEQ ID NO: 416774 - RNA, 24 nt, Homo Sapiens
uggcggcggcugccgccgagaccc

SEQ ID NO: 416775 - RNA, 32 nt, Homo Sapiens
ccaugccucuccagcccuccugcugcccacgg

SEQ ID NO: 416776 - RNA, 32 nt, Homo Sapiens
gcaggcugggaaggcuagacuuccucagcccg

SEQ ID NO: 416777 - RNA, 32 nt, Homo Sapiens
gcuauacccaaguagauuuacauguauaugaa

SEQ ID NO: 416778 - RNA, 32 nt, Homo Sapiens
acuagaaccaccaaauaucaaauaaaauuauu

SEQ ID NO: 416779 - RNA, 32 nt, Homo Sapiens
gaucuaggagaggagaaccagauucuauccuc

SEQ ID NO: 416780 - RNA, 32 nt, Homo Sapiens
gcuguuuaaagucuuuguagcguuuaaaaaau

SEQ ID NO: 416781 - RNA, 32 nt, Homo Sapiens
cagcccgcgggccucggagccguuuacgcggc

SEQ ID NO: 416782 - RNA, 32 nt, Homo Sapiens
ucguggaggacacagcagcaugggacagucag

SEQ ID NO: 416783 - RNA, 30 nt, Homo Sapiens
gacucaugucccgccgcaaggccggcagcg

SEQ ID NO: 416784 - RNA, 32 nt, Homo Sapiens
ggauugcucauugguugccuucaucaguuaca

SEQ ID NO: 416785 - RNA, 32 nt, Homo Sapiens
caugaacuuugauguuauaaagggcaagccag

SEQ ID NO: 416786 - RNA, 32 nt, Homo Sapiens
gcagugacuggaauuucccaucugcaaagcau

SEQ ID NO: 416787 - RNA, 32 nt, Homo Sapiens
aauuuuucagaauuuuaagaaaggggaaguuc

SEQ ID NO: 416788 - RNA, 32 nt, Homo Sapiens
uuugagugacuucuuaucugaaauuuugcuac

SEQ ID NO: 416789 - RNA, 32 nt, Homo Sapiens
agaguugcuggguugaagacgucaugcguauu

SEQ ID NO: 416790 - RNA, 32 nt, Homo Sapiens
cugcaaccuccacuucccggguucaagcgauu

SEQ ID NO: 416791 - RNA, 32 nt, Homo Sapiens
uucagcaacaaggcuggcuuggugcccuccaa

SEQ ID NO: 416792 - RNA, 32 nt, Homo Sapiens
ccgcagugaacagaggcgggccugccgacuga

SEQ ID NO: 416793 - RNA, 32 nt, Homo Sapiens
guguuuuuucccuuuuuauguaaacucuuuua

SEQ ID NO: 416794 - RNA, 27 nt, Homo Sapiens
cccugguacuucuucaguccugggaug

SEQ ID NO: 416795 - RNA, 32 nt, Homo Sapiens
auguaauggugucccccuccccucuuagcccc

SEQ ID NO: 416796 - RNA, 32 nt, Homo Sapiens
uauacaaauuuuaggccauaaacaaguguaag

SEQ ID NO: 416797 - RNA, 26 nt, Homo Sapiens
uaugccggugcagcugacgacagccc

SEQ ID NO: 416798 - RNA, 32 nt, Homo Sapiens
gaauuuuaacuccuuuuaugauacaucacagu

SEQ ID NO: 416799 - RNA, 32 nt, Homo Sapiens
gaccuaggauuucaugauuucauuucaacugu

SEQ ID NO: 416800 - RNA, 32 nt, Homo Sapiens
aaucacauuguggccucuuuuaauuuuuaugu

SEQ ID NO: 416801 - RNA, 32 nt, Homo Sapiens
uuuuuaaaauauuuauacucaaagaaauugua

SEQ ID NO: 416802 - RNA, 32 nt, Homo Sapiens
cccgcugcgggagccuucugggaaaugcugcc

SEQ ID NO: 416803 - RNA, 32 nt, Homo Sapiens
ccccgcgccagcccagccccagccugagugca

SEQ ID NO: 416804 - RNA, 32 nt, Homo Sapiens
ucagcucucgcacugcccaucuuugcaguuuu

SEQ ID NO: 416805 - RNA, 32 nt, Homo Sapiens
uuauaaacagucggcuuuuucuuaauaagccc

SEQ ID NO: 416806 - RNA, 32 nt, Homo Sapiens
cuguguggauguucaggccuagcuccaaccaa

SEQ ID NO: 416807 - RNA, 32 nt, Homo Sapiens
ccagagcgccuucgggggccgcggcggaaggc

SEQ ID NO: 416808 - RNA, 32 nt, Homo Sapiens
uuuuugauacuucuuccucauuugggacauuc

SEQ ID NO: 416809 - RNA, 32 nt, Homo Sapiens
ucagacugucuccucucaugguuugaaacugc

SEQ ID NO: 416810 - RNA, 32 nt, Homo Sapiens
uggcuagaaucuaguggacaagggcaggcaca

SEQ ID NO: 416811 - RNA, 32 nt, Homo Sapiens
gagggcuauguuccugggacucgggcgcuuuu

SEQ ID NO: 416812 - RNA, 30 nt, Homo Sapiens
aggguguugggggauggcggcagagagaca

SEQ ID NO: 416813 - RNA, 32 nt, Homo Sapiens
cucugagaagcagcacuaggccuguugaaaug

SEQ ID NO: 416814 - RNA, 32 nt, Homo Sapiens
ccuccgccgggcccgcauuuuugcucggaaga

SEQ ID NO: 416815 - RNA, 32 nt, Homo Sapiens
uuuguccgcgggccggagcggcggcggcagcg

SEQ ID NO: 416816 - RNA, 32 nt, Homo Sapiens
gguggccuuucccugccacguguccaguauca

SEQ ID NO: 416817 - RNA, 32 nt, Homo Sapiens
gggaccucaccccccuggauuucugcagggcu

SEQ ID NO: 416818 - RNA, 32 nt, Homo Sapiens
ccucuauugguuuuuguaaugacuccaucaau

SEQ ID NO: 416819 - RNA, 31 nt, Homo Sapiens
guacaugccaacauaaauauggcgauuguau

SEQ ID NO: 416820 - RNA, 32 nt, Homo Sapiens
cuccgaacgcggaccccgcacacacacacccg

SEQ ID NO: 416821 - RNA, 32 nt, Homo Sapiens
caaagguguugaccaagagggaugugugggga

SEQ ID NO: 416822 - RNA, 32 nt, Homo Sapiens
ugcagcggcgggcugaagggcuccucaagugc

SEQ ID NO: 416823 - RNA, 32 nt, Homo Sapiens
auugggauuuuugucuacuuuggauaaggcag

SEQ ID NO: 416824 - RNA, 32 nt, Homo Sapiens
ucucccugcugacaucgucccuuaguuguggu

SEQ ID NO: 416825 - RNA, 32 nt, Homo Sapiens
cccacgacgacgucaccucgggcacgcccaag

SEQ ID NO: 416826 - RNA, 32 nt, Homo Sapiens
agaaaccugugcugcagguuggaguggcagga

SEQ ID NO: 416827 - RNA, 32 nt, Homo Sapiens
ggaugcccaucccacacaccccacccagcugu

SEQ ID NO: 416828 - RNA, 32 nt, Homo Sapiens
uuguaaauggacauugaacaaacaaacuacca

SEQ ID NO: 416829 - RNA, 32 nt, Homo Sapiens
gccccgcccggcgcccuccccgugccagcaca

SEQ ID NO: 416830 - RNA, 32 nt, Homo Sapiens
uuuccgcuccacggugaccuccgugcggccgg

SEQ ID NO: 416831 - RNA, 32 nt, Homo Sapiens
cccuuucuguuuggacccauggucaucucugu

SEQ ID NO: 416832 - RNA, 32 nt, Homo Sapiens
aaugacacauuuuguaaauaacuuuuuguuaa

SEQ ID NO: 416833 - RNA, 32 nt, Homo Sapiens
cgagaguaaaaagcuaaugacgaggaaccgaa

SEQ ID NO: 416834 - RNA, 32 nt, Homo Sapiens
uccccugugaaaauaaaauuuucaauguuuuu

SEQ ID NO: 416835 - RNA, 32 nt, Homo Sapiens
cucucuuguuuuuucuauaaaauggguaggca

SEQ ID NO: 416836 - RNA, 32 nt, Homo Sapiens
ugagacgcuucggaccccgggaaaggccauac

SEQ ID NO: 416837 - RNA, 32 nt, Homo Sapiens
uuauauagacauuuuuguuaagcccugucuaa

SEQ ID NO: 416838 - RNA, 32 nt, Homo Sapiens
ugagcaggaaacaaaaaaggccuugcgaccca

SEQ ID NO: 416839 - RNA, 32 nt, Homo Sapiens
auccgccguuugcgcugaggcaauggcggcag

SEQ ID NO: 416840 - RNA, 32 nt, Homo Sapiens
cugggggagaauaaaguuacccuuguacugca

SEQ ID NO: 416841 - RNA, 31 nt, Homo Sapiens
ggcaggagggcggcgccgccgaggcccagau

SEQ ID NO: 416842 - RNA, 32 nt, Homo Sapiens
agcucaggaguucaaggcugcagagagcuagg

SEQ ID NO: 416843 - RNA, 32 nt, Homo Sapiens
ucucagguauaacacauagaaacaccaagauu

SEQ ID NO: 416844 - RNA, 32 nt, Homo Sapiens
gaacucaauuaugaacccuauuuuaaaacacc

SEQ ID NO: 416845 - RNA, 32 nt, Homo Sapiens
uuguuuuaccuuaugcccucacuuccugaguu

SEQ ID NO: 416846 - RNA, 32 nt, Homo Sapiens
uaucauguaaaugugauggauuucuuaaucau

SEQ ID NO: 416847 - RNA, 32 nt, Homo Sapiens
aguggcaaacgauuugaguuguuuugggucag

SEQ ID NO: 416848 - RNA, 32 nt, Homo Sapiens
gaaucagcauauaagaaaauaaaugauaucug

SEQ ID NO: 416849 - RNA, 32 nt, Homo Sapiens
uuuuuucuccuuuggaggaagggaaugaaaca

SEQ ID NO: 416850 - RNA, 32 nt, Homo Sapiens
cugcuuaauuguuaaggcaacugaccuuucaa

SEQ ID NO: 416851 - RNA, 32 nt, Homo Sapiens
caauuuuucuauuugcuucagccuacucagau

SEQ ID NO: 416852 - RNA, 32 nt, Homo Sapiens
aaggauccaagcauggaaugcugccgucgggc

SEQ ID NO: 416853 - RNA, 32 nt, Homo Sapiens
ucucauuccuuccuuucagagccuaaaaccuc

SEQ ID NO: 416854 - RNA, 32 nt, Homo Sapiens
aggagcugucucccagcucauuuuuaacacug

SEQ ID NO: 416855 - RNA, 32 nt, Homo Sapiens
agcgcggagacaguggccgccggcggcccaac

SEQ ID NO: 416856 - RNA, 32 nt, Homo Sapiens
ggcccugguggccgucggggcccugggauugg

SEQ ID NO: 416857 - RNA, 32 nt, Homo Sapiens
ccacucagacauugggaagcaaguuugucaag

SEQ ID NO: 416858 - RNA, 32 nt, Homo Sapiens
acuuccccaagaggcaacaaccccagggcgug

SEQ ID NO: 416859 - RNA, 32 nt, Homo Sapiens
guccggaccgugacugcccccguugugcccag

SEQ ID NO: 416860 - RNA, 32 nt, Homo Sapiens
gauaacauuuucuuuucuuaguccuccugcuc

SEQ ID NO: 416861 - RNA, 32 nt, Homo Sapiens
cuaggaccagccaccccuccccauggccucca

SEQ ID NO: 416862 - RNA, 32 nt, Homo Sapiens
aggugcugcugcuggaggagaggcuaggugcc

SEQ ID NO: 416863 - RNA, 32 nt, Homo Sapiens
ucauaauggaaaugaacuuauuaucuugagag

SEQ ID NO: 416864 - RNA, 32 nt, Homo Sapiens
gcgaaccccaaccuuucgucccggcccuuucg

SEQ ID NO: 416865 - RNA, 32 nt, Homo Sapiens
uuuucuagaguuguaggcaaguaguuggacaa

SEQ ID NO: 416866 - RNA, 32 nt, Homo Sapiens
cuccagcccucgccgcccucgccaccgcuccc

SEQ ID NO: 416867 - RNA, 32 nt, Homo Sapiens
guuguuuucuccugaggacacccaggcugccu

SEQ ID NO: 416868 - RNA, 32 nt, Homo Sapiens
cccacgguccucccgcgccccggaggccugcc

SEQ ID NO: 416869 - RNA, 32 nt, Homo Sapiens
ccagcuccuggaagagccuggcacauaaaagg

SEQ ID NO: 416870 - RNA, 32 nt, Homo Sapiens
acuccgggguuuuaagacccaaggcacauuca

SEQ ID NO: 416871 - RNA, 32 nt, Homo Sapiens
agcauccuuuugcucuguccuccccaccccga

SEQ ID NO: 416872 - RNA, 32 nt, Homo Sapiens
uccuggcccgucuguccagccuggacucccga

SEQ ID NO: 416873 - RNA, 32 nt, Homo Sapiens
ggaacaagggaagagagagcaggagcuggggc

SEQ ID NO: 416874 - RNA, 32 nt, Homo Sapiens
cuggccucauuucaaacacuggagaagcccca

SEQ ID NO: 416875 - RNA, 31 nt, Homo Sapiens
cauuuacaagaggaauauauuuggcuucucu

SEQ ID NO: 416876 - RNA, 32 nt, Homo Sapiens
cgcuuggaagcaggacugggaacauccacgcu

SEQ ID NO: 416877 - RNA, 32 nt, Homo Sapiens
acccugcuuugccuguccguccuucccagaag

SEQ ID NO: 416878 - RNA, 32 nt, Homo Sapiens
cuccaagaggacuguaggaaccguuaucauug

SEQ ID NO: 416879 - RNA, 32 nt, Homo Sapiens
ggaaguaacuacaacuaaugaucauggcaaac

SEQ ID NO: 416880 - RNA, 32 nt, Homo Sapiens
uguuuuuguuuccauguuuucuugucacacac

SEQ ID NO: 416881 - RNA, 32 nt, Homo Sapiens
agggaaaaacuuauuaaauucuccuucgcugc

SEQ ID NO: 416882 - RNA, 32 nt, Homo Sapiens
cugaaagguuuuuuuuuuuuuaucacuaaauu

SEQ ID NO: 416883 - RNA, 32 nt, Homo Sapiens
uggcaccucacagaacaaauuagcccauaaau

SEQ ID NO: 416884 - RNA, 32 nt, Homo Sapiens
ggacuacccgcaggugcagauccugcgcgccc

SEQ ID NO: 416885 - RNA, 32 nt, Homo Sapiens
aguccaccgagcggccucugaggagcagccgc

SEQ ID NO: 416886 - RNA, 32 nt, Homo Sapiens
gccuuuuauguaaauuuuuuacguagcuauuu

SEQ ID NO: 416887 - RNA, 32 nt, Homo Sapiens
uuagaacaaagcuaaggcaauuccuauugcuu

SEQ ID NO: 416888 - RNA, 32 nt, Homo Sapiens
gccgagggcagguggcucagccaguucugccu

SEQ ID NO: 416889 - RNA, 32 nt, Homo Sapiens
guuuuaaaucauacagucagguuuguauuucu

SEQ ID NO: 416890 - RNA, 32 nt, Homo Sapiens
ccgacaggcagcccaagggccuggacaccccu

SEQ ID NO: 416891 - RNA, 32 nt, Homo Sapiens
gccucuagaucgucugaaaacauuaaaaagac

SEQ ID NO: 416892 - RNA, 32 nt, Homo Sapiens
gcauguauauauagacauacaugccuauguug

SEQ ID NO: 416893 - RNA, 32 nt, Homo Sapiens
uucaucuguaucugcccuguauuuuucaugug

SEQ ID NO: 416894 - RNA, 32 nt, Homo Sapiens
ccugugggaggugucuggugucugcucaagac

SEQ ID NO: 416895 - RNA, 32 nt, Homo Sapiens
gcucucuccuccccgccaccccacgcacucag

SEQ ID NO: 416896 - RNA, 32 nt, Homo Sapiens
gacacugccgccugcgccccagcucaggcccc

SEQ ID NO: 416897 - RNA, 32 nt, Homo Sapiens
aacugagguguaaauggaagugagauggcaag

SEQ ID NO: 416898 - RNA, 32 nt, Homo Sapiens
uaucuuucgugauaaacuuugcuguguaccag

SEQ ID NO: 416899 - RNA, 32 nt, Homo Sapiens
ugaaagccaaaggauuuaagaguuuuguuguu

SEQ ID NO: 416900 - RNA, 32 nt, Homo Sapiens
ucuggaggcucugagggagaugggcuuggggg

SEQ ID NO: 416901 - RNA, 32 nt, Homo Sapiens
guucugcgcggcgggggccguacccgcggcgg

SEQ ID NO: 416902 - RNA, 32 nt, Homo Sapiens
augaaucuuggugguggcuuugguaaaacgac

SEQ ID NO: 416903 - RNA, 32 nt, Homo Sapiens
cccuugcugugcccucuccugggacaggccug

SEQ ID NO: 416904 - RNA, 32 nt, Homo Sapiens
cacucagcaaaauuauuuugagauucauucau

SEQ ID NO: 416905 - RNA, 32 nt, Homo Sapiens
ggcucuucucgcuuccccggcggcggcaaggg

SEQ ID NO: 416906 - RNA, 32 nt, Homo Sapiens
uccguuggucccuguucaucccgcccugcagu

SEQ ID NO: 416907 - RNA, 32 nt, Homo Sapiens
aaguaauuuuuguuuguuuguuuaauguaucc

SEQ ID NO: 416908 - RNA, 32 nt, Homo Sapiens
ccccaacugcugccagaccaugugcugccgcc

SEQ ID NO: 416909 - RNA, 32 nt, Homo Sapiens
uuuuuuguuaucuauuuauuuucaucaauaca

SEQ ID NO: 416910 - RNA, 32 nt, Homo Sapiens
cuuggugcaguauaaauuuacuguauguauuu

SEQ ID NO: 416911 - RNA, 32 nt, Homo Sapiens
uuuagccucacagaugacuuuagaaucuugua

SEQ ID NO: 416912 - RNA, 32 nt, Homo Sapiens
gcggcggcggguguacuguagguggucggucc

SEQ ID NO: 416913 - RNA, 32 nt, Homo Sapiens
ugguggggcugcucucgaucucucccacgcug

SEQ ID NO: 416914 - RNA, 32 nt, Homo Sapiens
ucuaguaaauguugagacaccguuuugcuuuu

SEQ ID NO: 416915 - RNA, 32 nt, Homo Sapiens
aagaauguauauauauuuugaaauauggcuga

SEQ ID NO: 416916 - RNA, 32 nt, Homo Sapiens
uacucauucagggauagcacugagcaaagcau

SEQ ID NO: 416917 - RNA, 32 nt, Homo Sapiens
cucugaggacagagcugguggggcgcgggggg

SEQ ID NO: 416918 - RNA, 32 nt, Homo Sapiens
gaccuccaggcaggacggccauccucuccaga

SEQ ID NO: 416919 - RNA, 32 nt, Homo Sapiens
uuggagguggagguuguggugagccaugaucg

SEQ ID NO: 416920 - RNA, 31 nt, Homo Sapiens
uugguucauuugauuucuaaaaauaccauga

SEQ ID NO: 416921 - RNA, 32 nt, Homo Sapiens
accagcaggaggaggaggagaagaaacuauuu

SEQ ID NO: 416922 - RNA, 32 nt, Homo Sapiens
gacacgcgggccuuuggugggugagcgggacu

SEQ ID NO: 416923 - RNA, 32 nt, Homo Sapiens
cauguccucccucugucccucuuguggugcug

SEQ ID NO: 416924 - RNA, 32 nt, Homo Sapiens
gaaaaugaagugagaccccuccccuuaggccu

SEQ ID NO: 416925 - RNA, 32 nt, Homo Sapiens
cuuuugggggagggcugcgacgcuugcucugu

SEQ ID NO: 416926 - RNA, 32 nt, Homo Sapiens
ggagagauugacaacagcccggacccugcggc

SEQ ID NO: 416927 - RNA, 32 nt, Homo Sapiens
uggucucugucucggccucacccgccgggaga

SEQ ID NO: 416928 - RNA, 31 nt, Homo Sapiens
acaaagcuuuagagaaaguuuccuauucucu

SEQ ID NO: 416929 - RNA, 32 nt, Homo Sapiens
uggaggcacugacgcauucgccaacucaccgu

SEQ ID NO: 416930 - RNA, 32 nt, Homo Sapiens
ccugccugccccucugcccaccccggucacau

SEQ ID NO: 416931 - RNA, 32 nt, Homo Sapiens
aaauaaagaaaagagcaaaaguggccaaaaaa

SEQ ID NO: 416932 - RNA, 32 nt, Homo Sapiens
ggaugcacagauucugauggggugugcugaag

SEQ ID NO: 416933 - RNA, 32 nt, Homo Sapiens
aggagguuuuaaaacuuguuagugcucguucu

SEQ ID NO: 416934 - RNA, 32 nt, Homo Sapiens
gcuaacugacugccucuccagguucggaguuu

SEQ ID NO: 416935 - RNA, 32 nt, Homo Sapiens
gcauauuugaccaagcaacaagcuuauaauua

SEQ ID NO: 416936 - RNA, 32 nt, Homo Sapiens
ggacagggguggccauggcggcggcggccggg

SEQ ID NO: 416937 - RNA, 32 nt, Homo Sapiens
aaguaaaaauguuuaucugauaauguuuaaau

SEQ ID NO: 416938 - RNA, 32 nt, Homo Sapiens
caaacuagugacgagaaccuugccauagccau

SEQ ID NO: 416939 - RNA, 32 nt, Homo Sapiens
caucauuccuuccuuacccccuuucuagcugu

SEQ ID NO: 416940 - RNA, 32 nt, Homo Sapiens
gcucggggccggccgccucaggcucgccgcca

SEQ ID NO: 416941 - RNA, 32 nt, Homo Sapiens
ucgcgacugcugcugcugcugcccggacgugg

SEQ ID NO: 416942 - RNA, 32 nt, Homo Sapiens
gcagucaagauuugcuuuuccauccuugucuu

SEQ ID NO: 416943 - RNA, 32 nt, Homo Sapiens
caauuagaucucuuuucagaagugucuauaga

SEQ ID NO: 416944 - RNA, 32 nt, Homo Sapiens
gcuggucagcagcuguugggauguguacaucg

SEQ ID NO: 416945 - RNA, 32 nt, Homo Sapiens
uguugggaggggcuggcggcuuggcuguuggg

SEQ ID NO: 416946 - RNA, 32 nt, Homo Sapiens
uccauuauguccacaguacucccuuuggcaac

SEQ ID NO: 416947 - RNA, 32 nt, Homo Sapiens
gggccguggacacacacccccuuuccaggagg

SEQ ID NO: 416948 - RNA, 32 nt, Homo Sapiens
ugcucccugggguggagaagggaccagggauu

SEQ ID NO: 416949 - RNA, 32 nt, Homo Sapiens
aggaggcuuugaccgccgcggccccgggggcu

SEQ ID NO: 416950 - RNA, 32 nt, Homo Sapiens
ggaggccaccaccaggccccagcucuccaccc

SEQ ID NO: 416951 - RNA, 32 nt, Homo Sapiens
cucugcagaccaccucuucuucugggagcugu

SEQ ID NO: 416952 - RNA, 32 nt, Homo Sapiens
cucccgucccucuccaggggccccgcauacac

SEQ ID NO: 416953 - RNA, 32 nt, Homo Sapiens
cucuaccccccucuccccuuguaggugacaca

SEQ ID NO: 416954 - RNA, 32 nt, Homo Sapiens
gccgccggaaguauugacggaaagcuugaauu

SEQ ID NO: 416955 - RNA, 32 nt, Homo Sapiens
uguuucucccccugccagucucuucugauuaa

SEQ ID NO: 416956 - RNA, 32 nt, Homo Sapiens
aaauccgauaaggaauaucugggacaggguuu

SEQ ID NO: 416957 - RNA, 32 nt, Homo Sapiens
ccuagucuaauaaacuaaggugaugagauaua

SEQ ID NO: 416958 - RNA, 32 nt, Homo Sapiens
ugccuguaauccuagcacuuugggaagccaaa

SEQ ID NO: 416959 - RNA, 32 nt, Homo Sapiens
ccucggaccccggccgcgcauuccauucugcc

SEQ ID NO: 416960 - RNA, 32 nt, Homo Sapiens
gaccagucugacucacuccaaaguccugcugg

SEQ ID NO: 416961 - RNA, 32 nt, Homo Sapiens
cuccaggagaaagaagcagaagaagaacucca

SEQ ID NO: 416962 - RNA, 32 nt, Homo Sapiens
aaugaccagcuaggcuucccuggaggccaggc

SEQ ID NO: 416963 - RNA, 32 nt, Homo Sapiens
uaauauauguauauuucuaacguaaaaacaau

SEQ ID NO: 416964 - RNA, 32 nt, Homo Sapiens
auaaagcaaaucauaauuuaauucucagauua

SEQ ID NO: 416965 - RNA, 32 nt, Homo Sapiens
acucuagggucugcgaccucccgcuggacugc

SEQ ID NO: 416966 - RNA, 32 nt, Homo Sapiens
uuuccaccccaguccccuccccagggaaccac

SEQ ID NO: 416967 - RNA, 32 nt, Homo Sapiens
uccuguguccuggccuggcccugcaguaagaa

SEQ ID NO: 416968 - RNA, 32 nt, Homo Sapiens
ucaagacccaaguuuugaaucucaaccgaggu

SEQ ID NO: 416969 - RNA, 32 nt, Homo Sapiens
guuaugauuauuugguuacauuuugggauuau

SEQ ID NO: 416970 - RNA, 32 nt, Homo Sapiens
caagugggugaggacuccauggccacggcagc

SEQ ID NO: 416971 - RNA, 32 nt, Homo Sapiens
cauuugugccuaaugcaucccacacaugugga

SEQ ID NO: 416972 - RNA, 32 nt, Homo Sapiens
uauuuauuuuuggugaagaaauggauucgguu

SEQ ID NO: 416973 - RNA, 32 nt, Homo Sapiens
aggaccgagcaucagcagcauccacuguccuu

SEQ ID NO: 416974 - RNA, 32 nt, Homo Sapiens
uaccccagauccagaaagauggcugccaaugc

SEQ ID NO: 416975 - RNA, 32 nt, Homo Sapiens
gguuacugaccaccccacccucccaccacaca

SEQ ID NO: 416976 - RNA, 32 nt, Homo Sapiens
aagucagcugucuccugcuuucuugcccuuaa

SEQ ID NO: 416977 - RNA, 32 nt, Homo Sapiens
aucggugaggauguugugcucagaaaugucac

SEQ ID NO: 416978 - RNA, 32 nt, Homo Sapiens
ucaaaacaaacaaacaaacaaacaaacaaaca

SEQ ID NO: 416979 - RNA, 32 nt, Homo Sapiens
guggcagggguuucucugucuguccgugggca

SEQ ID NO: 416980 - RNA, 32 nt, Homo Sapiens
gaggcggaacugcuguguccucacguggcgca

SEQ ID NO: 416981 - RNA, 32 nt, Homo Sapiens
cagccgggccccggcugcagaagugcuguugg

SEQ ID NO: 416982 - RNA, 32 nt, Homo Sapiens
guuuuguucuaauuucauuucauuuggagcua

SEQ ID NO: 416983 - RNA, 32 nt, Homo Sapiens
ggacagagaagcuuuauuuuuaguaugagaca

SEQ ID NO: 416984 - RNA, 32 nt, Homo Sapiens
aaaagccacagaggcagagcaagcauuccccu

SEQ ID NO: 416985 - RNA, 32 nt, Homo Sapiens
acaaacaaacaaacaaaacaacuagcuaggga

SEQ ID NO: 416986 - RNA, 32 nt, Homo Sapiens
cccccgccgacccauggggagggcgcaaggcg

SEQ ID NO: 416987 - RNA, 32 nt, Homo Sapiens
acaacacauacacacacacacacacacacaca

SEQ ID NO: 416988 - RNA, 32 nt, Homo Sapiens
gacgggcggcggucuggaggcagcggccaugg

SEQ ID NO: 416989 - RNA, 32 nt, Homo Sapiens
ccucacugacuauaaaagaauagagaaggaag

SEQ ID NO: 416990 - RNA, 32 nt, Homo Sapiens
gcuuguaguguugggcaaaaaauauaaaugca

SEQ ID NO: 416991 - RNA, 32 nt, Homo Sapiens
gccggcaggaggaggcacgggccaggacuuac

SEQ ID NO: 416992 - RNA, 32 nt, Homo Sapiens
uuuuaggaaaauuuuugggcaaagaucagagg

SEQ ID NO: 416993 - RNA, 32 nt, Homo Sapiens
gccccaugcaguugcacagcucaugugcccag

SEQ ID NO: 416994 - RNA, 32 nt, Homo Sapiens
guaauugugcuacugaaauugucacaaaacgu

SEQ ID NO: 416995 - RNA, 32 nt, Homo Sapiens
uacauagauaagccuggcaugacuugggucac

SEQ ID NO: 416996 - RNA, 32 nt, Homo Sapiens
uaccacacaaccaaauacacauugagauuuca

SEQ ID NO: 416997 - RNA, 32 nt, Homo Sapiens
agcugaggacugguuuuaaauaggcuuuaaaa

SEQ ID NO: 416998 - RNA, 32 nt, Homo Sapiens
ggagguugagggaagcuuuucuuaauuguguc

SEQ ID NO: 416999 - RNA, 28 nt, Homo Sapiens
uaguaggggcggccgggcagaggcgccc

SEQ ID NO: 417000 - RNA, 32 nt, Homo Sapiens
ggacaaagcugguuuguuugggaaauggacug

SEQ ID NO: 417001 - RNA, 32 nt, Homo Sapiens
caaccccugcucugcugagaaccaucaagcgc

SEQ ID NO: 417002 - RNA, 32 nt, Homo Sapiens
gucgggccgcggcaggaugauugccucgcauc

SEQ ID NO: 417003 - RNA, 32 nt, Homo Sapiens
aggccgagaggagcuagcgcgcgggccccggc

SEQ ID NO: 417004 - RNA, 32 nt, Homo Sapiens
uuugguacaaauaaaaacuguauaucuauaua

SEQ ID NO: 417005 - RNA, 32 nt, Homo Sapiens
gcuugcagauauuuuuaaaugacagcaauuuu

SEQ ID NO: 417006 - RNA, 32 nt, Homo Sapiens
ccucucucuccuggcucugggacaucuguccc

SEQ ID NO: 417007 - RNA, 32 nt, Homo Sapiens
gccccgcugcgcgcucugcucuucgcagcucc

SEQ ID NO: 417008 - RNA, 32 nt, Homo Sapiens
gagggacaguuucugguacccauccucugauu

SEQ ID NO: 417009 - RNA, 32 nt, Homo Sapiens
acggaguaccccagcccccgccacaccacccc

SEQ ID NO: 417010 - RNA, 32 nt, Homo Sapiens
ggacacugccuggcagaggcugcgagcauggg

SEQ ID NO: 417011 - RNA, 32 nt, Homo Sapiens
gagccuugccagcaguggggagucugcacaag

SEQ ID NO: 417012 - RNA, 32 nt, Homo Sapiens
uguuagacuaaucaaaaauaacuuuaaaagga

SEQ ID NO: 417013 - RNA, 32 nt, Homo Sapiens
ccugguguucuucaucauucuugcuauggauu

SEQ ID NO: 417014 - RNA, 32 nt, Homo Sapiens
ccaaguuagcuacugucugagagguuuuacau

SEQ ID NO: 417015 - RNA, 32 nt, Homo Sapiens
acuuccgccccucccugcugagccagagaagc

SEQ ID NO: 417016 - RNA, 32 nt, Homo Sapiens
aaacaacuuaguuuuucuuuuuuccugaaugc

SEQ ID NO: 417017 - RNA, 32 nt, Homo Sapiens
cugccuuuggagguggagaugguggagguggu

SEQ ID NO: 417018 - RNA, 32 nt, Homo Sapiens
acccugcugaucacacggagaagagccaggac

SEQ ID NO: 417019 - RNA, 32 nt, Homo Sapiens
caauccauugcaugcauuagcaguucaaagau

SEQ ID NO: 417020 - RNA, 32 nt, Homo Sapiens
acagacaggcgcuccccgcagcuccgcacggg

SEQ ID NO: 417021 - RNA, 32 nt, Homo Sapiens
ggaucagagcagacauaaagcuagaaaaauuu

SEQ ID NO: 417022 - RNA, 32 nt, Homo Sapiens
cuugggggaaaaugcuaggagauucuuuuuuc

SEQ ID NO: 417023 - RNA, 32 nt, Homo Sapiens
ugagcuccgcggcuccgcgagccgguuccguc

SEQ ID NO: 417024 - RNA, 32 nt, Homo Sapiens
auacuucauacaaaaagaaauguaaaugaccu

SEQ ID NO: 417025 - RNA, 32 nt, Homo Sapiens
gcucuggagcagccggcuuccuggaaaaccuc

SEQ ID NO: 417026 - RNA, 32 nt, Homo Sapiens
agugugugguggccgugggggagggacaugcu

SEQ ID NO: 417027 - RNA, 28 nt, Homo Sapiens
gauuuaaagggaucacauuugaagacaa

SEQ ID NO: 417028 - RNA, 32 nt, Homo Sapiens
cucuuggacaaaaacacaauaaaaauaguuaa

SEQ ID NO: 417029 - RNA, 32 nt, Homo Sapiens
gcucuagggcuuucgguuuccccuucuuccgg

SEQ ID NO: 417030 - RNA, 32 nt, Homo Sapiens
gcagcucuuuccucucggggucugccaggggu

SEQ ID NO: 417031 - RNA, 32 nt, Homo Sapiens
ugcugcaccucccaugauguccuggcuuugug

SEQ ID NO: 417032 - RNA, 32 nt, Homo Sapiens
uugauacauuaaacuuuuauucuucaugcauc

SEQ ID NO: 417033 - RNA, 32 nt, Homo Sapiens
uggcugagcuggaggacgcccugcagaaggcc

SEQ ID NO: 417034 - RNA, 32 nt, Homo Sapiens
aaagcugccuauguuucuuuuuaaagcucgca

SEQ ID NO: 417035 - RNA, 32 nt, Homo Sapiens
ugacucugauuguccuucagcagggaugaguc

SEQ ID NO: 417036 - RNA, 27 nt, Homo Sapiens
cagcuuucauacuucagcccuuaaguu

SEQ ID NO: 417037 - RNA, 32 nt, Homo Sapiens
gggcaagcgggcgggcggcaacagcauguccc

SEQ ID NO: 417038 - RNA, 32 nt, Homo Sapiens
ugacuuuucuucugcucucucuaagcuuucuc

SEQ ID NO: 417039 - RNA, 30 nt, Homo Sapiens
cgagucggucucgagccgccggccggccgu

SEQ ID NO: 417040 - RNA, 32 nt, Homo Sapiens
uuguccacgucuuuucucauaucaugguaguc

SEQ ID NO: 417041 - RNA, 32 nt, Homo Sapiens
ggacacaauauuaaaggagcuacagaaggaag

SEQ ID NO: 417042 - RNA, 32 nt, Homo Sapiens
ggagcugcuggcggggggcuuggccgcugacc

SEQ ID NO: 417043 - RNA, 32 nt, Homo Sapiens
aaauaugaacagaagaaaaugguugcuugccc

SEQ ID NO: 417044 - RNA, 32 nt, Homo Sapiens
guaaccgcugccccggccgccgcccgcuccuu

SEQ ID NO: 417045 - RNA, 32 nt, Homo Sapiens
gcaauauuauaguaaucagaaacuacauaagg

SEQ ID NO: 417046 - RNA, 32 nt, Homo Sapiens
aacuguuccugugguugcuuugaaagaacccu

SEQ ID NO: 417047 - RNA, 32 nt, Homo Sapiens
aguguuuaagauuugucuuuuauuuuuaauuu

SEQ ID NO: 417048 - RNA, 32 nt, Homo Sapiens
uauuucuuuagaaaauggggaucugccauauu

SEQ ID NO: 417049 - RNA, 32 nt, Homo Sapiens
cuauucuuccaagauuccagaugugucuguga

SEQ ID NO: 417050 - RNA, 32 nt, Homo Sapiens
uucaggaaggauuuuacccuuuuguucuuccc

SEQ ID NO: 417051 - RNA, 32 nt, Homo Sapiens
cacauguucucugccuucaguggggagggggu

SEQ ID NO: 417052 - RNA, 31 nt, Homo Sapiens
gguugugggcaacuccugcccccuguggggg

SEQ ID NO: 417053 - RNA, 31 nt, Homo Sapiens
ccgaggaacugggcacccucgagccgugcau

SEQ ID NO: 417054 - RNA, 32 nt, Homo Sapiens
uucaccugaaaagaagacuccaggaagggcag

SEQ ID NO: 417055 - RNA, 32 nt, Homo Sapiens
cgaccgcgaccaccgcccggcgcgagccugcc

SEQ ID NO: 417056 - RNA, 32 nt, Homo Sapiens
cagggcgugaggaggaggaggaagggcaugag

SEQ ID NO: 417057 - RNA, 32 nt, Homo Sapiens
cugccuaggaaaaccagagaccuuuguucacu

SEQ ID NO: 417058 - RNA, 32 nt, Homo Sapiens
aacuagagcuggaaggaucuagguugaccugu

SEQ ID NO: 417059 - RNA, 32 nt, Homo Sapiens
cuccacuucugcgccucaacccuaacccaccc

SEQ ID NO: 417060 - RNA, 32 nt, Homo Sapiens
gguggugaugguggugguuggcggcggcugcc

SEQ ID NO: 417061 - RNA, 32 nt, Homo Sapiens
aaauaugaacuauaguuuuuacuaguaucacc

SEQ ID NO: 417062 - RNA, 32 nt, Homo Sapiens
aauaauuuggagcucauaaaauuaaaaguugu

SEQ ID NO: 417063 - RNA, 32 nt, Homo Sapiens
aggaacaugugaaggauaaauaaaaauuugau

SEQ ID NO: 417064 - RNA, 32 nt, Homo Sapiens
cgcugugcgguacgguaagacccggcguccgc

SEQ ID NO: 417065 - RNA, 32 nt, Homo Sapiens
gaagccaggaggaagggcauucacauucugug

SEQ ID NO: 417066 - RNA, 32 nt, Homo Sapiens
aggucuugcuuguguccccaggcaccaguaau

SEQ ID NO: 417067 - RNA, 32 nt, Homo Sapiens
gagaacucaguggccuuugucuguggugaaug

SEQ ID NO: 417068 - RNA, 32 nt, Homo Sapiens
ccucagaaggcacuauucuguuggugguuuua

SEQ ID NO: 417069 - RNA, 28 nt, Homo Sapiens
gaaacagcacagaggaugacucuagggu

SEQ ID NO: 417070 - RNA, 32 nt, Homo Sapiens
gauggcagcaggauacagcacugcacaagaug

SEQ ID NO: 417071 - RNA, 32 nt, Homo Sapiens
guggucaaccaccuuucugacuuuuuauuuuu

SEQ ID NO: 417072 - RNA, 32 nt, Homo Sapiens
ggugauuccagagacucugugcucucguuaaa

SEQ ID NO: 417073 - RNA, 32 nt, Homo Sapiens
uccucucccgaccugugauacaaaagaucuuc

SEQ ID NO: 417074 - RNA, 32 nt, Homo Sapiens
auuuguauuuaguaguguaucucauagauaca

SEQ ID NO: 417075 - RNA, 32 nt, Homo Sapiens
uagcucgggccucagggcuggggucuccugga

SEQ ID NO: 417076 - RNA, 32 nt, Homo Sapiens
agccauauucugguaccuuccauuuugaaaag

SEQ ID NO: 417077 - RNA, 32 nt, Homo Sapiens
ggaacugguuuucagggaauuugggagagaau

SEQ ID NO: 417078 - RNA, 32 nt, Homo Sapiens
gcccaccaagcccugcccccagcccaagagga

SEQ ID NO: 417079 - RNA, 32 nt, Homo Sapiens
cggcuugaaaggaaaggagaagaugcuguguc

SEQ ID NO: 417080 - RNA, 32 nt, Homo Sapiens
gccccuaggaugagcagaaguaccuggagcau

SEQ ID NO: 417081 - RNA, 32 nt, Homo Sapiens
ucuccauuccgggggccuucccucgggucccu

SEQ ID NO: 417082 - RNA, 32 nt, Homo Sapiens
uaugugcauuuugaaucaaucauguguauguc

SEQ ID NO: 417083 - RNA, 32 nt, Homo Sapiens
cucaguagcaggggcugcgggaggaagugaag

SEQ ID NO: 417084 - RNA, 32 nt, Homo Sapiens
cagggaguccggggcgcacggcaccgaggaga

SEQ ID NO: 417085 - RNA, 32 nt, Homo Sapiens
caauccguaaaaagucuuuuugaaaggcaaag

SEQ ID NO: 417086 - RNA, 32 nt, Homo Sapiens
cggcaugcgauggggaacugcugcuggacgca

SEQ ID NO: 417087 - RNA, 32 nt, Homo Sapiens
augcuggaagccugaggccucccuggacugag

SEQ ID NO: 417088 - RNA, 32 nt, Homo Sapiens
ggagcagcucaggugcggccccgccccgcccg

SEQ ID NO: 417089 - RNA, 32 nt, Homo Sapiens
guccagaguaccaugaagaauuaugaggaugu

SEQ ID NO: 417090 - RNA, 32 nt, Homo Sapiens
guuacuggcucuuugugugucuccagguaacu

SEQ ID NO: 417091 - RNA, 32 nt, Homo Sapiens
augguagaugacucuuguuauucuuuucccac

SEQ ID NO: 417092 - RNA, 30 nt, Homo Sapiens
ggaaaagagaagcuggacacagcuguacuc

SEQ ID NO: 417093 - RNA, 32 nt, Homo Sapiens
ugaggagaacagaagcucugguaagcgaauga

SEQ ID NO: 417094 - RNA, 32 nt, Homo Sapiens
aaaacucagaggugcucagcaugccaugcuaa

SEQ ID NO: 417095 - RNA, 29 nt, Homo Sapiens
cuacugaacauccaggaccacaaaagaaa

SEQ ID NO: 417096 - RNA, 32 nt, Homo Sapiens
agauuauagaaagacauugugaaacuucccgg

SEQ ID NO: 417097 - RNA, 32 nt, Homo Sapiens
aaaaggaagcaggguugguuucccuucuuuuu

SEQ ID NO: 417098 - RNA, 32 nt, Homo Sapiens
cacauucugguuuuuguuuucuuccagucuuc

SEQ ID NO: 417099 - RNA, 32 nt, Homo Sapiens
uagagugaaauauuuguaaaacuccuaauuag

SEQ ID NO: 417100 - RNA, 32 nt, Homo Sapiens
ccacaccccuccccagucuucuucaagaccug

SEQ ID NO: 417101 - RNA, 31 nt, Homo Sapiens
ccacggcugauggucccuccaaggccgacuc

SEQ ID NO: 417102 - RNA, 32 nt, Homo Sapiens
aaaaaagcugaauuauuggacagucucaccuc

SEQ ID NO: 417103 - RNA, 32 nt, Homo Sapiens
gaagaccugccaggaggcagccacaggcgagu

SEQ ID NO: 417104 - RNA, 32 nt, Homo Sapiens
ugaacauuaugaaaaccaccuuccuauguuug

SEQ ID NO: 417105 - RNA, 32 nt, Homo Sapiens
aaauuaguuuguauauuuuguugacaauaaag

SEQ ID NO: 417106 - RNA, 32 nt, Homo Sapiens
uggaggagaaaacacaugaguguguggucagg

SEQ ID NO: 417107 - RNA, 32 nt, Homo Sapiens
cugcugcagcugccagccccccugcccgugcu

SEQ ID NO: 417108 - RNA, 27 nt, Homo Sapiens
cuaugagucugcuaaacugugaaaaca

SEQ ID NO: 417109 - RNA, 32 nt, Homo Sapiens
aauuuuacuuuuuauuucuaaaguuguaguga

SEQ ID NO: 417110 - RNA, 32 nt, Homo Sapiens
gaaagaacauguguccauuuggaccaaacguu

SEQ ID NO: 417111 - RNA, 32 nt, Homo Sapiens
uuuagcagaacucuugguggugggauagagac

SEQ ID NO: 417112 - RNA, 32 nt, Homo Sapiens
gcauggugggcacaguucucccugccccucag

SEQ ID NO: 417113 - RNA, 32 nt, Homo Sapiens
agccccaguagcagcgccauggccggguggaa

SEQ ID NO: 417114 - RNA, 32 nt, Homo Sapiens
ccaccccaacccggaucgccagcccucgagag

SEQ ID NO: 417115 - RNA, 32 nt, Homo Sapiens
gggaugcgcuccccggccccucuagccccgug

SEQ ID NO: 417116 - RNA, 32 nt, Homo Sapiens
uccgaacaucagaaggaacaaacucccgucag

SEQ ID NO: 417117 - RNA, 32 nt, Homo Sapiens
agggggugaugugguaccucgaaugcugugga

SEQ ID NO: 417118 - RNA, 32 nt, Homo Sapiens
guauaguccaggcgcaguggcucaacaccugu

SEQ ID NO: 417119 - RNA, 32 nt, Homo Sapiens
cuccuuuuaauuuugguguaucaaauauuuga

SEQ ID NO: 417120 - RNA, 32 nt, Homo Sapiens
uggcggcggcagcccuggccccggccuccaag

SEQ ID NO: 417121 - RNA, 32 nt, Homo Sapiens
auauuuuuaagugguaugugaucgugucauua

SEQ ID NO: 417122 - RNA, 29 nt, Homo Sapiens
gauuucaaaaguuuauuuucugugccuuc

SEQ ID NO: 417123 - RNA, 32 nt, Homo Sapiens
cccggcguacccagcccccagcccgacgugac

SEQ ID NO: 417124 - RNA, 32 nt, Homo Sapiens
cuucauuauaguucauuuuucuuguauaucuc

SEQ ID NO: 417125 - RNA, 32 nt, Homo Sapiens
gggugcggggacugaagaagggcgagggcgag

SEQ ID NO: 417126 - RNA, 32 nt, Homo Sapiens
cacuucacuaauuuauaacuaaaauuucucau

SEQ ID NO: 417127 - RNA, 32 nt, Homo Sapiens
gauccagguucagggacuaaauacacuuggca

SEQ ID NO: 417128 - RNA, 32 nt, Homo Sapiens
acagguuguagacacacccuccccuaacaaaa

SEQ ID NO: 417129 - RNA, 32 nt, Homo Sapiens
ugcgucgcaggccggcccggcggccgugacaa

SEQ ID NO: 417130 - RNA, 32 nt, Homo Sapiens
ggggcgcgccgcggaacccggaaguggucacg

SEQ ID NO: 417131 - RNA, 32 nt, Homo Sapiens
cccaagcucccucuccugagaagccaccagca

SEQ ID NO: 417132 - RNA, 31 nt, Homo Sapiens
ugaagggaaguugagaaccaggaaagcugcu

SEQ ID NO: 417133 - RNA, 32 nt, Homo Sapiens
uuucuuuuuaacuaagaauggggcuguuguac

SEQ ID NO: 417134 - RNA, 32 nt, Homo Sapiens
aucugcuccagaugaaaccugucccuacugac

SEQ ID NO: 417135 - RNA, 32 nt, Homo Sapiens
uguuuugcuaaauuauuuuuacuuggaauguu

SEQ ID NO: 417136 - RNA, 30 nt, Homo Sapiens
guguagugugguaggacccggcgggugugc

SEQ ID NO: 417137 - RNA, 32 nt, Homo Sapiens
ccagaaaggugauucuucucuuuaccauuucu

SEQ ID NO: 417138 - RNA, 32 nt, Homo Sapiens
acauuaagauaauauuggaccaaacuacuuac

SEQ ID NO: 417139 - RNA, 32 nt, Homo Sapiens
gcacugccgggcgcuguggcucacgccaguaa

SEQ ID NO: 417140 - RNA, 32 nt, Homo Sapiens
uguuacuuacugaaaacugaaaggauaugaca

SEQ ID NO: 417141 - RNA, 32 nt, Homo Sapiens
uuuccaaaauauauuaguauauuguugaacau

SEQ ID NO: 417142 - RNA, 32 nt, Homo Sapiens
gcugugauuugaugaaguggaaaugaaugguu

SEQ ID NO: 417143 - RNA, 32 nt, Homo Sapiens
accagcucaagccccaggucuccuggaucccc

SEQ ID NO: 417144 - RNA, 32 nt, Homo Sapiens
gucuggggcuccuguuuuuuagcugcuguucu

SEQ ID NO: 417145 - RNA, 32 nt, Homo Sapiens
cgcgcgcgggucgggccgcgacgagggaagcu

SEQ ID NO: 417146 - RNA, 32 nt, Homo Sapiens
aaccgggguggcaaagagggcaggacccagca

SEQ ID NO: 417147 - RNA, 32 nt, Homo Sapiens
uugcucccugaacauugcuguuauccuguucu

SEQ ID NO: 417148 - RNA, 32 nt, Homo Sapiens
cucaacgggaacgauguggaaggugucagcuc

SEQ ID NO: 417149 - RNA, 32 nt, Homo Sapiens
gcuggaggcagacuagccuugcacaugacaaa

SEQ ID NO: 417150 - RNA, 32 nt, Homo Sapiens
auaaugcucuuugccuuggcuaggcagguuuc

SEQ ID NO: 417151 - RNA, 32 nt, Homo Sapiens
aggugguuggggcacagcuugguuuuacacau

SEQ ID NO: 417152 - RNA, 32 nt, Homo Sapiens
gcuuaacucgaguugucuucucagcccucaaa

SEQ ID NO: 417153 - RNA, 32 nt, Homo Sapiens
ccagacgucuuacuugugaaacuauaagcagc

SEQ ID NO: 417154 - RNA, 32 nt, Homo Sapiens
auucaugugauuaugcugcugaggaccaguca

SEQ ID NO: 417155 - RNA, 32 nt, Homo Sapiens
cauccaugauaaaaauuuauuuuauaucguac

SEQ ID NO: 417156 - RNA, 32 nt, Homo Sapiens
gaaaacacaccucggcgacaaugucuugcugc

SEQ ID NO: 417157 - RNA, 32 nt, Homo Sapiens
cucaguaccucgggauguggcguuguuuggag

SEQ ID NO: 417158 - RNA, 32 nt, Homo Sapiens
uauucauguacaauuuugguuacuugaauugu

SEQ ID NO: 417159 - RNA, 32 nt, Homo Sapiens
gucggacgguuccgaggcguugccgggagccg

SEQ ID NO: 417160 - RNA, 32 nt, Homo Sapiens
ucugcuuacauuuccuucuccccucaggcuuu

SEQ ID NO: 417161 - RNA, 32 nt, Homo Sapiens
acccacuauaccuugcauuugcugaguacacc

SEQ ID NO: 417162 - RNA, 32 nt, Homo Sapiens
cuucugccagcuugcuaacggccuugccccau

SEQ ID NO: 417163 - RNA, 32 nt, Homo Sapiens
uucauguaaugugcuuuuuuuuuuuuuugcca

SEQ ID NO: 417164 - RNA, 32 nt, Homo Sapiens
ucuuuugaggacuuauagguugauugcccaca

SEQ ID NO: 417165 - RNA, 30 nt, Homo Sapiens
gcacuggcugagauggcagaagcuucugug

SEQ ID NO: 417166 - RNA, 32 nt, Homo Sapiens
aggaggaaauaauucacaaguuggccaugcag

SEQ ID NO: 417167 - RNA, 32 nt, Homo Sapiens
ugucuguacaauagaaaccaaaccaaaugggc

SEQ ID NO: 417168 - RNA, 32 nt, Homo Sapiens
cggacagucccucaccccggccugcgcugcug

SEQ ID NO: 417169 - RNA, 32 nt, Homo Sapiens
cuucaguugccugguauuaagguuggauaaau

SEQ ID NO: 417170 - RNA, 32 nt, Homo Sapiens
aggaagggccagaacuucucucucccaguucu

SEQ ID NO: 417171 - RNA, 32 nt, Homo Sapiens
ccccaucccucccauucccccaucgcccccau

SEQ ID NO: 417172 - RNA, 32 nt, Homo Sapiens
gucauuuuggccaaacaaaagacacugaguag

SEQ ID NO: 417173 - RNA, 32 nt, Homo Sapiens
auuuuguacuaaaaucauuuggaaaugauugu

SEQ ID NO: 417174 - RNA, 32 nt, Homo Sapiens
acacguggcuauaaaacaccauauaagagaug

SEQ ID NO: 417175 - RNA, 32 nt, Homo Sapiens
aauauuuuuuaaaagcucuuccuuaaaaaucu

SEQ ID NO: 417176 - RNA, 32 nt, Homo Sapiens
uaaacacugaacuuauucaaccuacaggaggc

SEQ ID NO: 417177 - RNA, 30 nt, Homo Sapiens
ugggcaggcaggccauggggcauggaggag

SEQ ID NO: 417178 - RNA, 32 nt, Homo Sapiens
ccugcggggggaggaggccggacucagcgggu

SEQ ID NO: 417179 - RNA, 32 nt, Homo Sapiens
agaugauguuucccucuuuuuaacuuuuccuc

SEQ ID NO: 417180 - RNA, 32 nt, Homo Sapiens
cgcugggcggcgggcgcgacgugaucguggac

SEQ ID NO: 417181 - RNA, 32 nt, Homo Sapiens
cgaccccgcccuaucgcuccccggcuucccug

SEQ ID NO: 417182 - RNA, 32 nt, Homo Sapiens
ucgccggagcugcgccgagagccccagggagg

SEQ ID NO: 417183 - RNA, 32 nt, Homo Sapiens
aaugugcuucggagccgcucucugcagagcca

SEQ ID NO: 417184 - RNA, 32 nt, Homo Sapiens
ucaguucuucuuagccucugucuccuucccug

SEQ ID NO: 417185 - RNA, 32 nt, Homo Sapiens
acugagucuugcuucccucaucuuuaaaaugu

SEQ ID NO: 417186 - RNA, 32 nt, Homo Sapiens
auaaauguuguaauuaguguacacguuuguau

SEQ ID NO: 417187 - RNA, 32 nt, Homo Sapiens
ucuuaaugagagacaagugagguggagggccu

SEQ ID NO: 417188 - RNA, 32 nt, Homo Sapiens
gugaaauuuuuccguguagagguuacagccuu

SEQ ID NO: 417189 - RNA, 32 nt, Homo Sapiens
ugaauucccucccccugggccgggcccuuccg

SEQ ID NO: 417190 - RNA, 32 nt, Homo Sapiens
aggaauauauuccaaaacauuuuugugaauau

SEQ ID NO: 417191 - RNA, 32 nt, Homo Sapiens
ggcggguggcacgcugcagcccggaguccccg

SEQ ID NO: 417192 - RNA, 32 nt, Homo Sapiens
cggccguccagcuggaaucaaccgauggaggc

SEQ ID NO: 417193 - RNA, 32 nt, Homo Sapiens
caaacagcagccuguuugauaauaacugcuuu

SEQ ID NO: 417194 - RNA, 32 nt, Homo Sapiens
auaagguacaaagggagacaauaaaaaauaua

SEQ ID NO: 417195 - RNA, 32 nt, Homo Sapiens
gugggagaagauucucuggggguccccacauc

SEQ ID NO: 417196 - RNA, 32 nt, Homo Sapiens
aagccccugccagcuuccuggggacccaacug

SEQ ID NO: 417197 - RNA, 32 nt, Homo Sapiens
ggacuucaaugcccaguccccagcucgccagc

SEQ ID NO: 417198 - RNA, 32 nt, Homo Sapiens
agcuuggugcccuggugaugguugcuauggag

SEQ ID NO: 417199 - RNA, 32 nt, Homo Sapiens
gcagggcucugcgcuggugcugccugccaucc

SEQ ID NO: 417200 - RNA, 32 nt, Homo Sapiens
cucagcuuaauguuuuugauaauuuuauauua

SEQ ID NO: 417201 - RNA, 32 nt, Homo Sapiens
cugauuggcccgcgcgggagggcgcgcggcgc

SEQ ID NO: 417202 - RNA, 27 nt, Homo Sapiens
uuaguccauuaauucaugggggaacca

SEQ ID NO: 417203 - RNA, 32 nt, Homo Sapiens
uucuuucuaaaaugaacaugggggcaaggggc

SEQ ID NO: 417204 - RNA, 32 nt, Homo Sapiens
auuccugucuuccucuccaaucuugauggaug

SEQ ID NO: 417205 - RNA, 32 nt, Homo Sapiens
gagagccugggcucagccuucugcaucaggac

SEQ ID NO: 417206 - RNA, 32 nt, Homo Sapiens
ucuguggaagcagugcuguaguuacuggaaga

SEQ ID NO: 417207 - RNA, 32 nt, Homo Sapiens
aaggccaccugacuccuaucacgacgcaccca

SEQ ID NO: 417208 - RNA, 32 nt, Homo Sapiens
caaauaaacaauuccugaagacaguuuuucau

SEQ ID NO: 417209 - RNA, 32 nt, Homo Sapiens
uagacggggcuucccgucccucacgcgggccc

SEQ ID NO: 417210 - RNA, 32 nt, Homo Sapiens
cagcccuuuccccuagacaucuacccaaaugc

SEQ ID NO: 417211 - RNA, 32 nt, Homo Sapiens
auuugcaguuuaggaacuauuaggaaugucag

SEQ ID NO: 417212 - RNA, 32 nt, Homo Sapiens
agccaauguuuccuuaaauucauuuuuaaacu

SEQ ID NO: 417213 - RNA, 32 nt, Homo Sapiens
acauucccaagaccuuuuuuuuuuuuuuuuuu

SEQ ID NO: 417214 - RNA, 32 nt, Homo Sapiens
gaucccagggccagcugcccucuggcucuggc

SEQ ID NO: 417215 - RNA, 32 nt, Homo Sapiens
aucauuacccuaaaaauaggcuguuaugcguu

SEQ ID NO: 417216 - RNA, 32 nt, Homo Sapiens
cagugagucagaucgugccacugcacuccagc

SEQ ID NO: 417217 - RNA, 32 nt, Homo Sapiens
cguccggacagucccucaccccggccugcgcu

SEQ ID NO: 417218 - RNA, 32 nt, Homo Sapiens
aggagccuuucuguaaagagugguagagaaug

SEQ ID NO: 417219 - RNA, 32 nt, Homo Sapiens
cauuucaaauauauuuuuuaaauuacucuauu

SEQ ID NO: 417220 - RNA, 32 nt, Homo Sapiens
uguauuuuacuuugcauacuagcaugugauug

SEQ ID NO: 417221 - RNA, 32 nt, Homo Sapiens
ucuguggugaauggguggccugugaugaauga

SEQ ID NO: 417222 - RNA, 32 nt, Homo Sapiens
aaaagaggagagaucucaagagggauaaccaa

SEQ ID NO: 417223 - RNA, 32 nt, Homo Sapiens
aaaacaaaauuugaauccuuuggucagguucc

SEQ ID NO: 417224 - RNA, 32 nt, Homo Sapiens
gagcaggcgggugaaaaugaaagccggcugua

SEQ ID NO: 417225 - RNA, 32 nt, Homo Sapiens
guugcagaacuaaaaggcucuguggcuuacau

SEQ ID NO: 417226 - RNA, 32 nt, Homo Sapiens
uggaacuagaauuuaggggcaguuggaugaaa

SEQ ID NO: 417227 - RNA, 32 nt, Homo Sapiens
uuauuuuaccuuguucucccacuuccugaaga

SEQ ID NO: 417228 - RNA, 32 nt, Homo Sapiens
ugacuaacagagcuggaggucaagucccugcg

SEQ ID NO: 417229 - RNA, 32 nt, Homo Sapiens
aagagccagaaguugaugugggaagaaguaaa

SEQ ID NO: 417230 - RNA, 32 nt, Homo Sapiens
gauaccuucauuuaauauaucaauauugggcc

SEQ ID NO: 417231 - RNA, 32 nt, Homo Sapiens
cuccagugccuggccggccugguuggucaaaa

SEQ ID NO: 417232 - RNA, 32 nt, Homo Sapiens
uuccauuuacuuuuagaugaauggcauuguga

SEQ ID NO: 417233 - RNA, 32 nt, Homo Sapiens
cucugcucuuuugagcagcccucgcuggaaca

SEQ ID NO: 417234 - RNA, 32 nt, Homo Sapiens
uucccuaccccaccccaguccugguccccguc

SEQ ID NO: 417235 - RNA, 32 nt, Homo Sapiens
gcaaucagauaaauaaauaucacugaaugcag

SEQ ID NO: 417236 - RNA, 32 nt, Homo Sapiens
acugaaggccagagagauuaauuugccaaagc

SEQ ID NO: 417237 - RNA, 32 nt, Homo Sapiens
ggcgggagcuggaagccucaagcagccggcgc

SEQ ID NO: 417238 - RNA, 32 nt, Homo Sapiens
gcggcggcgucccggcugcuaaggcgggcccc

SEQ ID NO: 417239 - RNA, 32 nt, Homo Sapiens
gcggccggguuugucaccagguccuggggucu

SEQ ID NO: 417240 - RNA, 32 nt, Homo Sapiens
gggucccagcgucccagccgcggcccgcgcuc

SEQ ID NO: 417241 - RNA, 32 nt, Homo Sapiens
guucgcugucuuugguuggcugaaacuuagug

SEQ ID NO: 417242 - RNA, 32 nt, Homo Sapiens
uggggugaagugggcaggagaauagauacgcu

SEQ ID NO: 417243 - RNA, 32 nt, Homo Sapiens
gcucaucccccgcuauaccuccccuuccuccu

SEQ ID NO: 417244 - RNA, 32 nt, Homo Sapiens
cugaggccuggagagguuaaagagacccguuc

SEQ ID NO: 417245 - RNA, 32 nt, Homo Sapiens
cugugauuccuucucagcaggcacaugucaau

SEQ ID NO: 417246 - RNA, 32 nt, Homo Sapiens
gccacuucccccagccccaccucuggucccuu

SEQ ID NO: 417247 - RNA, 32 nt, Homo Sapiens
ccggacuggagggcccucgccggcgucgugcu

SEQ ID NO: 417248 - RNA, 32 nt, Homo Sapiens
ccgagacguggagcgcgccggcucgcugcagc

SEQ ID NO: 417249 - RNA, 32 nt, Homo Sapiens
gguggagccgccgcaucagcggccucggggaa

SEQ ID NO: 417250 - RNA, 32 nt, Homo Sapiens
auucucuaaaauuccuauauuguaacuugccu

SEQ ID NO: 417251 - RNA, 32 nt, Homo Sapiens
cacgguguccacccggccccgccccguggaac

SEQ ID NO: 417252 - RNA, 32 nt, Homo Sapiens
aggaccagcugugggcgggcgcccugggcaga

SEQ ID NO: 417253 - RNA, 32 nt, Homo Sapiens
gaaugggcccucacuaagaagugggucugaca

SEQ ID NO: 417254 - RNA, 32 nt, Homo Sapiens
agcgcccagcgagcagcggcggugcccacacg

SEQ ID NO: 417255 - RNA, 32 nt, Homo Sapiens
gcgugcggguggccuggaucccgcgcaguggc

SEQ ID NO: 417256 - RNA, 32 nt, Homo Sapiens
uuuauuagaccuggggcuaaccaggugaagau

SEQ ID NO: 417257 - RNA, 32 nt, Homo Sapiens
auacugcuuagaaaagcagagggucagggaaa

SEQ ID NO: 417258 - RNA, 31 nt, Homo Sapiens
auugggagggcggagcccgcugcucucacga

SEQ ID NO: 417259 - RNA, 32 nt, Homo Sapiens
gguauugcucauuuccuucucuacccaaccug

SEQ ID NO: 417260 - RNA, 32 nt, Homo Sapiens
gggggcaggaggacggcaagaccuauuuauaa

SEQ ID NO: 417261 - RNA, 32 nt, Homo Sapiens
auaaaguucaaaaguauuuuuaccaaagugua

SEQ ID NO: 417262 - RNA, 32 nt, Homo Sapiens
ccaaagccaaagcuaggccuggccagaugcac

SEQ ID NO: 417263 - RNA, 32 nt, Homo Sapiens
ccuccuccuggcccugcugcugcccucgcugc

SEQ ID NO: 417264 - RNA, 32 nt, Homo Sapiens
auaccuaguguuucucuuucugaaaagagaac

SEQ ID NO: 417265 - RNA, 32 nt, Homo Sapiens
cuccaccccccgcauucccugccgagugagag

SEQ ID NO: 417266 - RNA, 32 nt, Homo Sapiens
cuacaaugauauagacaaaauaaaauauuucu

SEQ ID NO: 417267 - RNA, 32 nt, Homo Sapiens
uagccgggcaugguggugggcgccuguaaucc

SEQ ID NO: 417268 - RNA, 32 nt, Homo Sapiens
gcucuucugagaacuuccaaccacccaugcuc

SEQ ID NO: 417269 - RNA, 32 nt, Homo Sapiens
cuccuggccucaguauccuucucugggagaug

SEQ ID NO: 417270 - RNA, 32 nt, Homo Sapiens
uaaccuggugccugcugcugugcagccacaua

SEQ ID NO: 417271 - RNA, 32 nt, Homo Sapiens
uugcucugaaucaacagccaugauguaauaua

SEQ ID NO: 417272 - RNA, 32 nt, Homo Sapiens
gaugcccucgugaggucggggaccagcaggca

SEQ ID NO: 417273 - RNA, 32 nt, Homo Sapiens
guguccggguggcaguuggguaccugcucacg

SEQ ID NO: 417274 - RNA, 32 nt, Homo Sapiens
uaucacuugggcuaguuagagauccagauucu

SEQ ID NO: 417275 - RNA, 32 nt, Homo Sapiens
aagccaaaaugggaaaggaaaagacucauauc

SEQ ID NO: 417276 - RNA, 32 nt, Homo Sapiens
caguuuccugcuaguucccaccuguugugccc

SEQ ID NO: 417277 - RNA, 32 nt, Homo Sapiens
gcuuggcccuggcccuggcccagaucuuagau

SEQ ID NO: 417278 - RNA, 32 nt, Homo Sapiens
aaccugggcuggaagucaaagccgucgguuac

SEQ ID NO: 417279 - RNA, 32 nt, Homo Sapiens
acugagcaccucggcuucggagcacccugcca

SEQ ID NO: 417280 - RNA, 32 nt, Homo Sapiens
caggacagugcugcugcccccggcgggccuuc

SEQ ID NO: 417281 - RNA, 32 nt, Homo Sapiens
uccagucagcucucuugccagucugggaacug

SEQ ID NO: 417282 - RNA, 32 nt, Homo Sapiens
aaaaaccugcaaagaugaugugagauuuuuuc

SEQ ID NO: 417283 - RNA, 30 nt, Homo Sapiens
agaaaaacaaaccacuugauaauaagggag

SEQ ID NO: 417284 - RNA, 32 nt, Homo Sapiens
cugugguuagugaguuaaaauuccuggaguaa

SEQ ID NO: 417285 - RNA, 32 nt, Homo Sapiens
cagaagacaaggaaacugaagaagcuuuuuag

SEQ ID NO: 417286 - RNA, 32 nt, Homo Sapiens
cgaccgcagccggggggacgcgggaggaugga

SEQ ID NO: 417287 - RNA, 32 nt, Homo Sapiens
ggucuaauuaacaaagaaauuaauuccuagga

SEQ ID NO: 417288 - RNA, 32 nt, Homo Sapiens
uuaaacaaauguugcauagagauaauagaaca

SEQ ID NO: 417289 - RNA, 31 nt, Homo Sapiens
gugcagagaagccagucaccauagaaggcaa

SEQ ID NO: 417290 - RNA, 32 nt, Homo Sapiens
gcacagaaccuggugcguaguagaugcucaau

SEQ ID NO: 417291 - RNA, 32 nt, Homo Sapiens
cgaggccccugcgugcggcgcuucucccaggc

SEQ ID NO: 417292 - RNA, 32 nt, Homo Sapiens
gaugaauuugguuccuagucucuucuucauug

SEQ ID NO: 417293 - RNA, 32 nt, Homo Sapiens
uugucacugaaauaaaagauggcauuaugugg

SEQ ID NO: 417294 - RNA, 32 nt, Homo Sapiens
agauguuuauagaacuguuugaauugcagcca

SEQ ID NO: 417295 - RNA, 32 nt, Homo Sapiens
ccgccggcucuuccccgccccccgucaugggg

SEQ ID NO: 417296 - RNA, 32 nt, Homo Sapiens
uaagacaaauguuuaaguuuaguuauguucac

SEQ ID NO: 417297 - RNA, 32 nt, Homo Sapiens
cucgccucagccccggccccugguccccagcc

SEQ ID NO: 417298 - RNA, 32 nt, Homo Sapiens
aucugauugucuauguaaaccuggaaguaguc

SEQ ID NO: 417299 - RNA, 32 nt, Homo Sapiens
ggccaagaaugggaggcugacucaaaacuaga

SEQ ID NO: 417300 - RNA, 32 nt, Homo Sapiens
uugaguguucuucaucagcugaccuuaaacuu

SEQ ID NO: 417301 - RNA, 32 nt, Homo Sapiens
uguaacaaagauugucaaaaaaguauguuuuu

SEQ ID NO: 417302 - RNA, 32 nt, Homo Sapiens
agugccagggcccugaggaagaaauggggacu

SEQ ID NO: 417303 - RNA, 32 nt, Homo Sapiens
guaaaacuagauucacagggcacagauucccc

SEQ ID NO: 417304 - RNA, 32 nt, Homo Sapiens
gcccugggcucaggcugcuaccucuggggccc

SEQ ID NO: 417305 - RNA, 32 nt, Homo Sapiens
guguauauuuucucccccaaugacucaauuga

SEQ ID NO: 417306 - RNA, 32 nt, Homo Sapiens
aguuuggccuuggaggggaugaaaaugaaggg

SEQ ID NO: 417307 - RNA, 32 nt, Homo Sapiens
cagggacagaaguggugguagauggaaggauc

SEQ ID NO: 417308 - RNA, 32 nt, Homo Sapiens
uuaauuuugucaagauguaaguauuuauauuc

SEQ ID NO: 417309 - RNA, 32 nt, Homo Sapiens
cacauguguaagagccgcggagggagcgagcg

SEQ ID NO: 417310 - RNA, 32 nt, Homo Sapiens
cuaacacuaaacaaaauuagaaacaugugaaa

SEQ ID NO: 417311 - RNA, 32 nt, Homo Sapiens
uagugagagcuguucuaguggagcauuugaga

SEQ ID NO: 417312 - RNA, 32 nt, Homo Sapiens
aucaaaaugcauaugguaaaaugauugcuuuc

SEQ ID NO: 417313 - RNA, 32 nt, Homo Sapiens
cgguggggccgcguauggagcccccgcccccc

SEQ ID NO: 417314 - RNA, 32 nt, Homo Sapiens
ucauuuuuccaccgugggucaccaaugccaga

SEQ ID NO: 417315 - RNA, 32 nt, Homo Sapiens
cagaauauuuuuguugaaccuucuugagaauu

SEQ ID NO: 417316 - RNA, 32 nt, Homo Sapiens
cugauccccacuuucgacucgguggccaugca

SEQ ID NO: 417317 - RNA, 32 nt, Homo Sapiens
ugaaucccaagcccuuaaucccugguuucuga

SEQ ID NO: 417318 - RNA, 32 nt, Homo Sapiens
uucaguuucccccaaggaucucuucuuugagg

SEQ ID NO: 417319 - RNA, 32 nt, Homo Sapiens
cauucuacuguaaaggagagauuuuauuuucu

SEQ ID NO: 417320 - RNA, 32 nt, Homo Sapiens
uaauuugaugagaaaaaggagucgucuuaccg

SEQ ID NO: 417321 - RNA, 32 nt, Homo Sapiens
uuacuaaaaucguauucuaauucuucauuaua

SEQ ID NO: 417322 - RNA, 32 nt, Homo Sapiens
uaaauaaaaaauuuacccuaagugagcuguag

SEQ ID NO: 417323 - RNA, 32 nt, Homo Sapiens
caagcggggggcccggcucccguccucccccg

SEQ ID NO: 417324 - RNA, 32 nt, Homo Sapiens
uggaagauuccuucuuuccccuuuugucuugc

SEQ ID NO: 417325 - RNA, 32 nt, Homo Sapiens
auuguagcggcccuuccugcagcgccugccgc

SEQ ID NO: 417326 - RNA, 32 nt, Homo Sapiens
ucauacugugagaugcaauguuaggauggaua

SEQ ID NO: 417327 - RNA, 32 nt, Homo Sapiens
cugcacagccccacaggcccucccuggcacug

SEQ ID NO: 417328 - RNA, 32 nt, Homo Sapiens
ccuuuccaggccuuaagagaaguaaaacuuag

SEQ ID NO: 417329 - RNA, 32 nt, Homo Sapiens
aaauaaaaguacaaagcauauuuuaguuagua

SEQ ID NO: 417330 - RNA, 32 nt, Homo Sapiens
gggcacgcgggcagcgccgccggcguuggagg

SEQ ID NO: 417331 - RNA, 32 nt, Homo Sapiens
ugguucucauuucgugccgaaaugagacagaa

SEQ ID NO: 417332 - RNA, 32 nt, Homo Sapiens
cuccaaccugcgggcgggagguggguggcugc

SEQ ID NO: 417333 - RNA, 32 nt, Homo Sapiens
aauuuacaagaaaaaaaacaaacaaccccauc

SEQ ID NO: 417334 - RNA, 32 nt, Homo Sapiens
acugccugcuggaaagaaaacacacuccuuug

SEQ ID NO: 417335 - RNA, 32 nt, Homo Sapiens
gcuuuuggguggcaaugagaaagagucacagu

SEQ ID NO: 417336 - RNA, 32 nt, Homo Sapiens
cauguauuuuuggcucgaaguuucucuagugu

SEQ ID NO: 417337 - RNA, 32 nt, Homo Sapiens
uacuuucuucuauucuuucuuaauuuagacag

SEQ ID NO: 417338 - RNA, 32 nt, Homo Sapiens
uaacuggcgggugugacaggcggaccgcccuc

SEQ ID NO: 417339 - RNA, 32 nt, Homo Sapiens
gcaaugugguauauccauacaguggaauauua

SEQ ID NO: 417340 - RNA, 32 nt, Homo Sapiens
uuuaaaaugcuacauccauguuguguaauuuu

SEQ ID NO: 417341 - RNA, 32 nt, Homo Sapiens
gagggugggagguggggggcauuuagaggguu

SEQ ID NO: 417342 - RNA, 32 nt, Homo Sapiens
aaaacaggaccagccggcaccaggcccgucuc

SEQ ID NO: 417343 - RNA, 29 nt, Homo Sapiens
auaaguuaaaguuuauaaccacuagucug

SEQ ID NO: 417344 - RNA, 32 nt, Homo Sapiens
uuauucaaaguuuuacuggaagcaaaacugug

SEQ ID NO: 417345 - RNA, 32 nt, Homo Sapiens
gcugaaugucauuucucguuuguagcuuucug

SEQ ID NO: 417346 - RNA, 32 nt, Homo Sapiens
aauugacaggugguuccugggguccugagauc

SEQ ID NO: 417347 - RNA, 32 nt, Homo Sapiens
aggcaguugcggguugcaggaguucaggaaag

SEQ ID NO: 417348 - RNA, 32 nt, Homo Sapiens
gauugccugagcucaggaguucgagaccagcc

SEQ ID NO: 417349 - RNA, 32 nt, Homo Sapiens
gccggccgccgggcgacaccacgaguuauuuc

SEQ ID NO: 417350 - RNA, 32 nt, Homo Sapiens
cucuccuuugcucgugguuagcaagauacacu

SEQ ID NO: 417351 - RNA, 32 nt, Homo Sapiens
uuuaauaaaaauuguuaugaacuauaguauuu

SEQ ID NO: 417352 - RNA, 32 nt, Homo Sapiens
ucugguuccuccccuccuccuggacuccugca

SEQ ID NO: 417353 - RNA, 32 nt, Homo Sapiens
cuguuugcaaaccugccuguaccugaggcccu

SEQ ID NO: 417354 - RNA, 32 nt, Homo Sapiens
uggaaacagaaugaagcagaggaaacucuuaa

SEQ ID NO: 417355 - RNA, 32 nt, Homo Sapiens
aauauuguugcucugacaaaaauacauguauu

SEQ ID NO: 417356 - RNA, 32 nt, Homo Sapiens
acacaagaugaccuuucuaaugagcuguauga

SEQ ID NO: 417357 - RNA, 30 nt, Homo Sapiens
ggacggggcaggcgcugcggacaccguggc

SEQ ID NO: 417358 - RNA, 32 nt, Homo Sapiens
uuguggcaaaccccaaagagagcacuguccaa

SEQ ID NO: 417359 - RNA, 32 nt, Homo Sapiens
agaaaagagggagcagcuagggcgcgggucuc

SEQ ID NO: 417360 - RNA, 32 nt, Homo Sapiens
ggccuggaccagaggcagcugccaccgugccc

SEQ ID NO: 417361 - RNA, 32 nt, Homo Sapiens
uuacacucuaauaaggauaaugcugaauuuug

SEQ ID NO: 417362 - RNA, 32 nt, Homo Sapiens
aauuguacaaauaacuaagaguauaauuggau

SEQ ID NO: 417363 - RNA, 32 nt, Homo Sapiens
auggcgcggcccggcgccggggaggcucgcga

SEQ ID NO: 417364 - RNA, 32 nt, Homo Sapiens
ggguuaaagggaggugacagggugaagaggga

SEQ ID NO: 417365 - RNA, 32 nt, Homo Sapiens
uuuuuauucuacuacuuggaaggaaaaggaau

SEQ ID NO: 417366 - RNA, 32 nt, Homo Sapiens
ucuggugauaaaaauaaagcugucugaacugu

SEQ ID NO: 417367 - RNA, 32 nt, Homo Sapiens
gugaauugaccucuaaaauaguuuacaaauuu

SEQ ID NO: 417368 - RNA, 32 nt, Homo Sapiens
cuauggcggcgccccagggccuggcugccacc

SEQ ID NO: 417369 - RNA, 32 nt, Homo Sapiens
ccugaaccuuucugcccccacuuucagacaca

SEQ ID NO: 417370 - RNA, 31 nt, Homo Sapiens
acacaugggagcugccugccugcugcugcug

SEQ ID NO: 417371 - RNA, 32 nt, Homo Sapiens
ucgugcuccuuucgggcaaggaucucacauua

SEQ ID NO: 417372 - RNA, 32 nt, Homo Sapiens
ucgcgaacgcugagagcagcacccaguggauu

SEQ ID NO: 417373 - RNA, 28 nt, Homo Sapiens
gccauggggcggcugguggcugugggcu

SEQ ID NO: 417374 - RNA, 32 nt, Homo Sapiens
agcagcaggaggaggagcccgguggcggcggu

SEQ ID NO: 417375 - RNA, 32 nt, Homo Sapiens
gaaaagcgugcaucaccucccgcuucauucuc

SEQ ID NO: 417376 - RNA, 32 nt, Homo Sapiens
agccugugggucuaagaacauccagagcauau

SEQ ID NO: 417377 - RNA, 32 nt, Homo Sapiens
aagugcgguaccagcccuucgggccucgagau

SEQ ID NO: 417378 - RNA, 32 nt, Homo Sapiens
cguacacaucagagacauggaauacugugcca

SEQ ID NO: 417379 - RNA, 32 nt, Homo Sapiens
ugaaggcccagcagcaggccaaggcugugcuc

SEQ ID NO: 417380 - RNA, 32 nt, Homo Sapiens
ucaucuccggcgggcagggcuaccgcaacuuu

SEQ ID NO: 417381 - RNA, 32 nt, Homo Sapiens
cauuccuguuacuuucauuucauuuugauuaa

SEQ ID NO: 417382 - RNA, 32 nt, Homo Sapiens
gcagaaggcaaaguacaggccaagaauugggg

SEQ ID NO: 417383 - RNA, 32 nt, Homo Sapiens
ccuggagauccuccugcagaccacgcccgucc

SEQ ID NO: 417384 - RNA, 32 nt, Homo Sapiens
cagggagccccgaggcccgcuggaggccgauc

SEQ ID NO: 417385 - RNA, 32 nt, Homo Sapiens
gaucaaauacuaauaaacaauuagaaaucuua

SEQ ID NO: 417386 - RNA, 32 nt, Homo Sapiens
guuguuuccaaugcaaucaacucuguauuaua

SEQ ID NO: 417387 - RNA, 32 nt, Homo Sapiens
cccgugcggugucccugagcuccugcuccccg

SEQ ID NO: 417388 - RNA, 32 nt, Homo Sapiens
ucaauaggguggccagaaaacaccucucugaa

SEQ ID NO: 417389 - RNA, 32 nt, Homo Sapiens
ugccauuuuccagccgcgcucccaggagagug

SEQ ID NO: 417390 - RNA, 32 nt, Homo Sapiens
uuccugccugccagcucugaagagagcagcag

SEQ ID NO: 417391 - RNA, 32 nt, Homo Sapiens
gugggauuuacuauguugauguaagggggcag

SEQ ID NO: 417392 - RNA, 32 nt, Homo Sapiens
uuguagaccugccuuaugcaccuuacugccua

SEQ ID NO: 417393 - RNA, 32 nt, Homo Sapiens
guggaaaaauuuaaauaaaguaugaaaugacu

SEQ ID NO: 417394 - RNA, 32 nt, Homo Sapiens
auauuacuuacaagaugaaaugauuagauuag

SEQ ID NO: 417395 - RNA, 32 nt, Homo Sapiens
cuccuccaucagaaagccuccucuacccggcc

SEQ ID NO: 417396 - RNA, 32 nt, Homo Sapiens
ccaaccuugacuaccccggcccagggcucacc

SEQ ID NO: 417397 - RNA, 32 nt, Homo Sapiens
cacaugccuuucuggggugaagcccuuuggcu

SEQ ID NO: 417398 - RNA, 32 nt, Homo Sapiens
ggggcucuguggugaauggguggccugugaug

SEQ ID NO: 417399 - RNA, 30 nt, Homo Sapiens
gcaugguggggcgugccuguagucccaugu

SEQ ID NO: 417400 - RNA, 32 nt, Homo Sapiens
ccucuccuggcgggcccggcggcgggcaagug

SEQ ID NO: 417401 - RNA, 32 nt, Homo Sapiens
caucauccugacugccagcagucuggccagac

SEQ ID NO: 417402 - RNA, 32 nt, Homo Sapiens
aggugaaaauuugcauauauucaagaaaaauc

SEQ ID NO: 417403 - RNA, 32 nt, Homo Sapiens
cauugcacuccagcuugggugacagagugaga

SEQ ID NO: 417404 - RNA, 31 nt, Homo Sapiens
cagccugggcgacagagcaagacucggucuc

SEQ ID NO: 417405 - RNA, 32 nt, Homo Sapiens
aucuaaaguaaauuauuugacauauaaaaaga

SEQ ID NO: 417406 - RNA, 32 nt, Homo Sapiens
uauucugcaagaauuucuuuuaaauaaaaagu

SEQ ID NO: 417407 - RNA, 32 nt, Homo Sapiens
cagggcugaccaccagccucucauggaggcau

SEQ ID NO: 417408 - RNA, 32 nt, Homo Sapiens
gccauugcacuccagccugggcgacagagcga

SEQ ID NO: 417409 - RNA, 32 nt, Homo Sapiens
cugguuccuaggggaaugagggggcucaguuc

SEQ ID NO: 417410 - RNA, 32 nt, Homo Sapiens
uucauuuugauuuuggauaauaaaccuggcuc

SEQ ID NO: 417411 - RNA, 32 nt, Homo Sapiens
ucucuccuuuguuauuauucaacagcaaaucu

SEQ ID NO: 417412 - RNA, 32 nt, Homo Sapiens
gcugcagagguggcgccuccccggcccgggac

SEQ ID NO: 417413 - RNA, 32 nt, Homo Sapiens
ggauuaauuugcaucugaaauaggaaacaagu

SEQ ID NO: 417414 - RNA, 32 nt, Homo Sapiens
gccacugcacucuagccugggcgacagagcga

SEQ ID NO: 417415 - RNA, 32 nt, Homo Sapiens
caugacagaauggacuuuuaaaaguuaguacu

SEQ ID NO: 417416 - RNA, 32 nt, Homo Sapiens
auucaucaugauuuaaauuuucuagagauuuu

SEQ ID NO: 417417 - RNA, 32 nt, Homo Sapiens
ccagaagucccuacucuuggaccuccuggaga

SEQ ID NO: 417418 - RNA, 32 nt, Homo Sapiens
ccuccaaccccagauaugcugcugcugcugcu

SEQ ID NO: 417419 - RNA, 32 nt, Homo Sapiens
cugcauuguuaccccgcccuccccucucucau

SEQ ID NO: 417420 - RNA, 32 nt, Homo Sapiens
cacccuagucuggcgcucgccggcgugggcgg

SEQ ID NO: 417421 - RNA, 32 nt, Homo Sapiens
gauguaugugacuuaaaugauuguuucauauu

SEQ ID NO: 417422 - RNA, 29 nt, Homo Sapiens
ccacaaacguaugaguggauguuauagug

SEQ ID NO: 417423 - RNA, 32 nt, Homo Sapiens
acuaaccacauccacucucaaccccguccccu

SEQ ID NO: 417424 - RNA, 32 nt, Homo Sapiens
aagaugaagaucuagaggucugagagagcuuc

SEQ ID NO: 417425 - RNA, 32 nt, Homo Sapiens
ggagccagcgcucaaggcagcucccuagggca

SEQ ID NO: 417426 - RNA, 32 nt, Homo Sapiens
uaugggccacaggugcugcugcugugaggaca

SEQ ID NO: 417427 - RNA, 32 nt, Homo Sapiens
gaauuauagaccgagucuuguuguuuagccua

SEQ ID NO: 417428 - RNA, 32 nt, Homo Sapiens
accaaagagauauggagacauaaaccuguaau

SEQ ID NO: 417429 - RNA, 32 nt, Homo Sapiens
aaggucagccucuuaaagauuguggucgcugg

SEQ ID NO: 417430 - RNA, 32 nt, Homo Sapiens
guuauugccaucuuagcuuugcuggaaauguc

SEQ ID NO: 417431 - RNA, 32 nt, Homo Sapiens
uccuugguuacaugguuuuucuuguaaaacuu

SEQ ID NO: 417432 - RNA, 32 nt, Homo Sapiens
ccccagcuucugccccaauacacauaccuccc

SEQ ID NO: 417433 - RNA, 32 nt, Homo Sapiens
gcaauucauauacuuuuggagaugaacguaga

SEQ ID NO: 417434 - RNA, 32 nt, Homo Sapiens
ggggaugaccuuguguggcugcugcugggucc

SEQ ID NO: 417435 - RNA, 32 nt, Homo Sapiens
acuuugugucucugaaucucuguucuaaugug

SEQ ID NO: 417436 - RNA, 32 nt, Homo Sapiens
ggugcgcuggucccggucgcgcgcucagaccu

SEQ ID NO: 417437 - RNA, 32 nt, Homo Sapiens
gcccugcgcauaaauacacucugcguuauugg

SEQ ID NO: 417438 - RNA, 32 nt, Homo Sapiens
gguccuccaaauaauuagcaguccuucguagg

SEQ ID NO: 417439 - RNA, 32 nt, Homo Sapiens
ggggccgugaccagcccucugccuccagggag

SEQ ID NO: 417440 - RNA, 32 nt, Homo Sapiens
ucacagacccucuuuggcccccugcccuccuc

SEQ ID NO: 417441 - RNA, 32 nt, Homo Sapiens
ucacccaauuuaauuagccauuugcaugaugc

SEQ ID NO: 417442 - RNA, 32 nt, Homo Sapiens
acuauucaauagcaugugucuuucugagaguu

SEQ ID NO: 417443 - RNA, 32 nt, Homo Sapiens
guugcacagcgguauucucaccaggcccugca

SEQ ID NO: 417444 - RNA, 32 nt, Homo Sapiens
ccggccggugguuggaggccgcggcggcugcg

SEQ ID NO: 417445 - RNA, 32 nt, Homo Sapiens
acagauagguuaugaagaaaaaugcaaaguag

SEQ ID NO: 417446 - RNA, 32 nt, Homo Sapiens
gcugcccgccggggcgggguggagcugaucag

SEQ ID NO: 417447 - RNA, 32 nt, Homo Sapiens
aaaucugagggaccaugcuuugaaauagacug

SEQ ID NO: 417448 - RNA, 32 nt, Homo Sapiens
guauaaccaacccacugaacccuccacaacau

SEQ ID NO: 417449 - RNA, 32 nt, Homo Sapiens
ucaguguucuacucagaaaugucucacagccc

SEQ ID NO: 417450 - RNA, 32 nt, Homo Sapiens
auuucagucuuuccccaagguuuuccaaaaaa

SEQ ID NO: 417451 - RNA, 32 nt, Homo Sapiens
ucaucuguugguggugggugggggguggacug

SEQ ID NO: 417452 - RNA, 32 nt, Homo Sapiens
augagucccagugggaggcgcgagccaugaug

SEQ ID NO: 417453 - RNA, 32 nt, Homo Sapiens
ugcccucacgccgccgggcucuggccggcccg

SEQ ID NO: 417454 - RNA, 32 nt, Homo Sapiens
uaagguagaaauuaaaauaacaaaauugucua

SEQ ID NO: 417455 - RNA, 32 nt, Homo Sapiens
ucaagucggucugggcccguugccaccgacuc

SEQ ID NO: 417456 - RNA, 32 nt, Homo Sapiens
aaagugccauuucgccauuauuugugaucggu

SEQ ID NO: 417457 - RNA, 32 nt, Homo Sapiens
aacgucagggaggcuuccuggaggagguggug

SEQ ID NO: 417458 - RNA, 32 nt, Homo Sapiens
cugaucggguccgccgcgcgccagagccagag

SEQ ID NO: 417459 - RNA, 32 nt, Homo Sapiens
gguuugcggagcagcuagcuacucggcgggau

SEQ ID NO: 417460 - RNA, 29 nt, Homo Sapiens
uuaauaaauauguuuucuguugagucugu

SEQ ID NO: 417461 - RNA, 32 nt, Homo Sapiens
ggcaggcgccgguggcuucugucacaggaggg

SEQ ID NO: 417462 - RNA, 32 nt, Homo Sapiens
acggaaggugcugagaaaaaacagcagauggc

SEQ ID NO: 417463 - RNA, 32 nt, Homo Sapiens
auacaaaacugaauucuucccuguaaauuccc

SEQ ID NO: 417464 - RNA, 32 nt, Homo Sapiens
agcgggccgaguggccaccuccuucagagcug

SEQ ID NO: 417465 - RNA, 32 nt, Homo Sapiens
agggcuuccccauugggauucugcagaagucc

SEQ ID NO: 417466 - RNA, 32 nt, Homo Sapiens
uugcugcuauggugguuguauuagagaacuga

SEQ ID NO: 417467 - RNA, 32 nt, Homo Sapiens
gauggugcagacgcggcggggacucggagggu

SEQ ID NO: 417468 - RNA, 32 nt, Homo Sapiens
guguggcuaugucaacaauaauaaucaaagcu

SEQ ID NO: 417469 - RNA, 32 nt, Homo Sapiens
aaaggcuaugacuuaaauuugaagaugaagua

SEQ ID NO: 417470 - RNA, 32 nt, Homo Sapiens
gaacaugacaagaugggggaagcuccuguucc

SEQ ID NO: 417471 - RNA, 32 nt, Homo Sapiens
ggccauccugccccuccaacccgacaugugua

SEQ ID NO: 417472 - RNA, 32 nt, Homo Sapiens
gagggccgagcgcugccggucccggcggugcg

SEQ ID NO: 417473 - RNA, 32 nt, Homo Sapiens
ggcggagccagcaggggcccccgugggcugcc

SEQ ID NO: 417474 - RNA, 32 nt, Homo Sapiens
gacacgcagaccagcugaggaggacaaagaua

SEQ ID NO: 417475 - RNA, 32 nt, Homo Sapiens
cuguuaaauaagaugugcaaagggcuugcagg

SEQ ID NO: 417476 - RNA, 32 nt, Homo Sapiens
uugcagaucaggaaacagagcucagugcagcc

SEQ ID NO: 417477 - RNA, 32 nt, Homo Sapiens
cuggauucuggcaauaaaaguacucuggaugc

SEQ ID NO: 417478 - RNA, 32 nt, Homo Sapiens
ccccagacggagcccagaccuugcuggucaca

SEQ ID NO: 417479 - RNA, 32 nt, Homo Sapiens
caccauugcaguccagccagguugacagaaug

SEQ ID NO: 417480 - RNA, 32 nt, Homo Sapiens
cugugagucugggugagacaagaagggauucu

SEQ ID NO: 417481 - RNA, 32 nt, Homo Sapiens
ucgccggcccauguggggucuuucuggcgggc

SEQ ID NO: 417482 - RNA, 32 nt, Homo Sapiens
gccgcccgcuucccgccccuggcgccucacag

SEQ ID NO: 417483 - RNA, 32 nt, Homo Sapiens
acuccagccuggcgacaagagcgagacuccgu

SEQ ID NO: 417484 - RNA, 32 nt, Homo Sapiens
gacccagacgggggcugaccaccaccaccugg

SEQ ID NO: 417485 - RNA, 32 nt, Homo Sapiens
aggaacaccccgcuccccccauccccgccgcc

SEQ ID NO: 417486 - RNA, 32 nt, Homo Sapiens
ccacuuauuccagccgcgcuccccagucgccu

SEQ ID NO: 417487 - RNA, 32 nt, Homo Sapiens
auuuuucuggggauugaaaucuuuaguccuug

SEQ ID NO: 417488 - RNA, 32 nt, Homo Sapiens
uuuggagagauccucugagucuguggaguugu

SEQ ID NO: 417489 - RNA, 30 nt, Homo Sapiens
uaccuccucugugcucaggugacuccacau

SEQ ID NO: 417490 - RNA, 32 nt, Homo Sapiens
uuuaaauguagacuuuuaaaauaaacuguuuu

SEQ ID NO: 417491 - RNA, 32 nt, Homo Sapiens
aaggacagacugugucccagaagccaaaauga

SEQ ID NO: 417492 - RNA, 32 nt, Homo Sapiens
cucucaagggcuucguuucugcucuccccggc

SEQ ID NO: 417493 - RNA, 32 nt, Homo Sapiens
cucagaugauccaugauuggaaggaugugguc

SEQ ID NO: 417494 - RNA, 32 nt, Homo Sapiens
agagcuggccggguugaggcgccggcuuuccc

SEQ ID NO: 417495 - RNA, 32 nt, Homo Sapiens
ccucccagcuggaaagcuagggcaggucuccc

SEQ ID NO: 417496 - RNA, 32 nt, Homo Sapiens
cuuuucagaauaggagcagagagaagcccaga

SEQ ID NO: 417497 - RNA, 32 nt, Homo Sapiens
ucacauggaaucuacauguguuugaacuauug

SEQ ID NO: 417498 - RNA, 32 nt, Homo Sapiens
aauuauagaaaucaguagcaaaaagaaucuug

SEQ ID NO: 417499 - RNA, 32 nt, Homo Sapiens
gaagugaagaucuggaagacuuucuuuuucac

SEQ ID NO: 417500 - RNA, 31 nt, Homo Sapiens
augaggugaaacaggcuggcccuggugagag

SEQ ID NO: 417501 - RNA, 32 nt, Homo Sapiens
ucuacucauuucuauuuguuacuccuuuuuac

SEQ ID NO: 417502 - RNA, 32 nt, Homo Sapiens
ggacacagcaggugcuggacauccuugcagcu

SEQ ID NO: 417503 - RNA, 32 nt, Homo Sapiens
agcccagauugugccacugcucuccagccugg

SEQ ID NO: 417504 - RNA, 32 nt, Homo Sapiens
ccugucuucuccguucuuuuuacaaucaucuu

SEQ ID NO: 417505 - RNA, 32 nt, Homo Sapiens
agagcaaacuagaaaacagaaaacagaagugg

SEQ ID NO: 417506 - RNA, 32 nt, Homo Sapiens
aucacacaguguuccugcuggagagaggagac

SEQ ID NO: 417507 - RNA, 32 nt, Homo Sapiens
gucugguugguuuuguuugcccgggaauguuu

SEQ ID NO: 417508 - RNA, 32 nt, Homo Sapiens
cacggaccagguuuucccccaaggcuuggcuu

SEQ ID NO: 417509 - RNA, 32 nt, Homo Sapiens
agguugugugcagggcaccccagccacuccag

SEQ ID NO: 417510 - RNA, 32 nt, Homo Sapiens
aggagcccacgcgggggccgcgguccagcacc

SEQ ID NO: 417511 - RNA, 32 nt, Homo Sapiens
acauugagaagucccaugagugaaagagaugu

SEQ ID NO: 417512 - RNA, 32 nt, Homo Sapiens
cccuuuguggccugcaaccagaggaacugcaa

SEQ ID NO: 417513 - RNA, 30 nt, Homo Sapiens
ugugcuucacuauaguaaccauuucacaaa

SEQ ID NO: 417514 - RNA, 32 nt, Homo Sapiens
caggcucuuggggaggcagagaagccaccuuc

SEQ ID NO: 417515 - RNA, 32 nt, Homo Sapiens
ccagcucaguauuuuuguuuuguuuuuuguuu

SEQ ID NO: 417516 - RNA, 32 nt, Homo Sapiens
cugaacccauucuauuuugaaucuccccuuuc

SEQ ID NO: 417517 - RNA, 32 nt, Homo Sapiens
uucuagguucugagugaagugaaacagaaucu

SEQ ID NO: 417518 - RNA, 32 nt, Homo Sapiens
uuaaucaauuccuuucauaguuuuauaauucu

SEQ ID NO: 417519 - RNA, 32 nt, Homo Sapiens
gccccggaagcagguguguccagagucagcug

SEQ ID NO: 417520 - RNA, 32 nt, Homo Sapiens
aaaaaugcuuuuuaguacuuuuucauauuuua

SEQ ID NO: 417521 - RNA, 32 nt, Homo Sapiens
caaaggcuuggccggcggccccggcccgcugc

SEQ ID NO: 417522 - RNA, 32 nt, Homo Sapiens
ucaugaucacuuaaaucaggggucagcaaacu

SEQ ID NO: 417523 - RNA, 32 nt, Homo Sapiens
cucaccaggcuugggacugcugccgguggaug

SEQ ID NO: 417524 - RNA, 32 nt, Homo Sapiens
ggauuaucaaggaacuucagaucagggaaauc

SEQ ID NO: 417525 - RNA, 32 nt, Homo Sapiens
aacuuucuuaucuauagauuauuauuuugaga

SEQ ID NO: 417526 - RNA, 32 nt, Homo Sapiens
aucaaaauaaaauuauuaaugagauugguuac

SEQ ID NO: 417527 - RNA, 31 nt, Homo Sapiens
cagagcucaccucacaccugaguuaagacga

SEQ ID NO: 417528 - RNA, 32 nt, Homo Sapiens
cuauucaucuucuguuugcugcuuuaauuggg

SEQ ID NO: 417529 - RNA, 32 nt, Homo Sapiens
caccacuuuggauugauuuugcucuccaggac

SEQ ID NO: 417530 - RNA, 32 nt, Homo Sapiens
gugucccuuccuccccgagucagggcgacuuc

SEQ ID NO: 417531 - RNA, 32 nt, Homo Sapiens
uccguccucgggggcucugggugcugcggagu

SEQ ID NO: 417532 - RNA, 32 nt, Homo Sapiens
cgguucuggacgcauggcugauucugaaugau

SEQ ID NO: 417533 - RNA, 32 nt, Homo Sapiens
uuugugugcaggguuuucagauguguuuuugu

SEQ ID NO: 417534 - RNA, 30 nt, Homo Sapiens
ggugaugucuguggauuagagaccugcucc

SEQ ID NO: 417535 - RNA, 32 nt, Homo Sapiens
gaucugccugccccggccucccaaagugccag

SEQ ID NO: 417536 - RNA, 32 nt, Homo Sapiens
gaccccaucucuauaaauaauaaaaagaagua

SEQ ID NO: 417537 - RNA, 32 nt, Homo Sapiens
aagcacccacuuuugcaauguuguucuaagcu

SEQ ID NO: 417538 - RNA, 32 nt, Homo Sapiens
ggcuggcugcuggugggaggccggcgacugag

SEQ ID NO: 417539 - RNA, 32 nt, Homo Sapiens
caaugccuuguacaucuuauauacaacacugc

SEQ ID NO: 417540 - RNA, 32 nt, Homo Sapiens
guauuguuguuugcuuuuuuuuaaccaugagu

SEQ ID NO: 417541 - RNA, 32 nt, Homo Sapiens
uaucaguuauuuaguaaauaaucucaauaaau

SEQ ID NO: 417542 - RNA, 27 nt, Homo Sapiens
uuaagccauuaauuguuggugugaauu

SEQ ID NO: 417543 - RNA, 32 nt, Homo Sapiens
aguuaauuguuaaagaaaacuucuuguagccu

SEQ ID NO: 417544 - RNA, 32 nt, Homo Sapiens
cgggaccggcaagauggcggcgcggacagcgu

SEQ ID NO: 417545 - RNA, 32 nt, Homo Sapiens
agugaccacuuugccuaaaaucaaauagccau

SEQ ID NO: 417546 - RNA, 32 nt, Homo Sapiens
gguaguuugcugucaccaacauggcugggccu

SEQ ID NO: 417547 - RNA, 32 nt, Homo Sapiens
uaauuuguaacuuuguugcauuuuggcaacaa

SEQ ID NO: 417548 - RNA, 32 nt, Homo Sapiens
ucgguuuguuuuuauucuuucauuuuuacaag

SEQ ID NO: 417549 - RNA, 32 nt, Homo Sapiens
agcagaaggcggcugauuguugguaagucagu

SEQ ID NO: 417550 - RNA, 32 nt, Homo Sapiens
gucucaggguggcagaggggggaccagaaccc

SEQ ID NO: 417551 - RNA, 32 nt, Homo Sapiens
agcccuuucguaugguguuacuccaugaaacc

SEQ ID NO: 417552 - RNA, 32 nt, Homo Sapiens
caggcccugcaaucggugggccacagugccgg

SEQ ID NO: 417553 - RNA, 32 nt, Homo Sapiens
aaauuuacuguucuuugucgaugcuauauaag

SEQ ID NO: 417554 - RNA, 32 nt, Homo Sapiens
uguuucgccauguuggcuaggcuggucucgaa

SEQ ID NO: 417555 - RNA, 32 nt, Homo Sapiens
uugaauucuaagacuugaaacaaccugaucau

SEQ ID NO: 417556 - RNA, 32 nt, Homo Sapiens
cuaccgggcguggacuucgggcgcuggaccca

SEQ ID NO: 417557 - RNA, 32 nt, Homo Sapiens
uucagguggguaugugcugugcugauauaaaa

SEQ ID NO: 417558 - RNA, 32 nt, Homo Sapiens
ggcagggcacgguggcucacgccuguaauccc

SEQ ID NO: 417559 - RNA, 32 nt, Homo Sapiens
ucuucaaaugaaaauuccauuuuuguaagcca

SEQ ID NO: 417560 - RNA, 32 nt, Homo Sapiens
aguuguuuuuaaaguuguaagauagcccuuuu

SEQ ID NO: 417561 - RNA, 32 nt, Homo Sapiens
guugaaugacauuuuagggacaugguguuuuu

SEQ ID NO: 417562 - RNA, 32 nt, Homo Sapiens
gaggcggugcagggcgggaaggggaguggugg

SEQ ID NO: 417563 - RNA, 31 nt, Homo Sapiens
ugcacccggcacuguaggagucacgugcagc

SEQ ID NO: 417564 - RNA, 32 nt, Homo Sapiens
ggcacgcagggccggccaccucucuccugaag

SEQ ID NO: 417565 - RNA, 32 nt, Homo Sapiens
uguuaucgucauauaauuuucauguacaaaug

SEQ ID NO: 417566 - RNA, 32 nt, Homo Sapiens
ucuucuagguuaucuuaguuguaugacgaacu

SEQ ID NO: 417567 - RNA, 32 nt, Homo Sapiens
ucuucuaacuuucuucuuucugugauaauuca

SEQ ID NO: 417568 - RNA, 32 nt, Homo Sapiens
aaaugccugucuccccgcggaucaugggcucc

SEQ ID NO: 417569 - RNA, 32 nt, Homo Sapiens
gcuugacuucuuaaauauggcauugaugaauc

SEQ ID NO: 417570 - RNA, 32 nt, Homo Sapiens
cggaggaugccgccgcggcugcugccgccgcc

SEQ ID NO: 417571 - RNA, 28 nt, Homo Sapiens
gucggggcagggccgccgaggcugggag

SEQ ID NO: 417572 - RNA, 32 nt, Homo Sapiens
gaacaggucugucccccucuuuccugauggcu

SEQ ID NO: 417573 - RNA, 32 nt, Homo Sapiens
accacccacaucagcuucuguuuaccuuuuug

SEQ ID NO: 417574 - RNA, 32 nt, Homo Sapiens
aauuuuuauuugccuuguuuuguuuuaauuga

SEQ ID NO: 417575 - RNA, 28 nt, Homo Sapiens
ccggcaggaugucggaggugcggcugcc

SEQ ID NO: 417576 - RNA, 32 nt, Homo Sapiens
gguggcuggcccggcccccgcccacgccaagg

SEQ ID NO: 417577 - RNA, 31 nt, Homo Sapiens
ugcuagaaggaaaaacaggugugaccugauc

SEQ ID NO: 417578 - RNA, 32 nt, Homo Sapiens
gcuacuagcaaaauaaaacauagcaaaugaaa

SEQ ID NO: 417579 - RNA, 32 nt, Homo Sapiens
caugcuuguacuuucccuuccaauccuuggau

SEQ ID NO: 417580 - RNA, 29 nt, Homo Sapiens
cugcucuaauuugagugaaaguuauuagc

SEQ ID NO: 417581 - RNA, 32 nt, Homo Sapiens
agacaggcagaucaccugagcucaggagucca

SEQ ID NO: 417582 - RNA, 32 nt, Homo Sapiens
guggaggaucaaugcaguggcugaacacuggg

SEQ ID NO: 417583 - RNA, 32 nt, Homo Sapiens
gggucagaccuguccugaggcuuuuacaaauu

SEQ ID NO: 417584 - RNA, 32 nt, Homo Sapiens
cccagaagugaagaagcagauacacaaggccu

SEQ ID NO: 417585 - RNA, 32 nt, Homo Sapiens
ccugaggccacugugaauuugcugauguucuu

SEQ ID NO: 417586 - RNA, 24 nt, Homo Sapiens
ugccauuaaauauucuggucugug

SEQ ID NO: 417587 - RNA, 32 nt, Homo Sapiens
aggagcagugucgggccugggccggggccgcc

SEQ ID NO: 417588 - RNA, 32 nt, Homo Sapiens
cgcccucuggcccggccgccccgccccagagc

SEQ ID NO: 417589 - RNA, 32 nt, Homo Sapiens
gcccggcacuuacgcgggggccccccaacccg

SEQ ID NO: 417590 - RNA, 32 nt, Homo Sapiens
aaguuaagggaaggacagguggacacaggaga

SEQ ID NO: 417591 - RNA, 32 nt, Homo Sapiens
uauacaugccuaaauucuuuuaaaauguagag

SEQ ID NO: 417592 - RNA, 32 nt, Homo Sapiens
aaugcauagcuggcauuuuaauuuaaauucaa

SEQ ID NO: 417593 - RNA, 32 nt, Homo Sapiens
aaaaaugaaaauauguucaucauuaaagacuu

SEQ ID NO: 417594 - RNA, 32 nt, Homo Sapiens
gaucuucuucagaacauuuuaucaccaauuaa

SEQ ID NO: 417595 - RNA, 32 nt, Homo Sapiens
accccuucuaaaugaauggucuguggaagauu

SEQ ID NO: 417596 - RNA, 32 nt, Homo Sapiens
ggcagacgcgccggaaccgggacgcgauaaau

SEQ ID NO: 417597 - RNA, 32 nt, Homo Sapiens
ugcccucccgucugugagcucccugcccagca

SEQ ID NO: 417598 - RNA, 32 nt, Homo Sapiens
ggggagcgcagcgaguuuuggccaguggucgu

SEQ ID NO: 417599 - RNA, 32 nt, Homo Sapiens
guugacagcucaaagcacuuguaacugcugcc

SEQ ID NO: 417600 - RNA, 32 nt, Homo Sapiens
aagauauaugccuuagaaaacaccagaguuua

SEQ ID NO: 417601 - RNA, 32 nt, Homo Sapiens
uccuggacgccuccacccugccccacaaggcu

SEQ ID NO: 417602 - RNA, 32 nt, Homo Sapiens
acuuuuucagaauuggguuuauugcgagcagg

SEQ ID NO: 417603 - RNA, 32 nt, Homo Sapiens
cuuuuuauggcugcauaguauuucauggugua

SEQ ID NO: 417604 - RNA, 32 nt, Homo Sapiens
cccuccccggggcgcucugcccgggggacucc

SEQ ID NO: 417605 - RNA, 32 nt, Homo Sapiens
aagugauaucuggucucagggauugcuccuau

SEQ ID NO: 417606 - RNA, 32 nt, Homo Sapiens
cuugacacagacagaagaggggucccuuggug

SEQ ID NO: 417607 - RNA, 32 nt, Homo Sapiens
acacucaggaggagcuggaggaccuggcccag

SEQ ID NO: 417608 - RNA, 32 nt, Homo Sapiens
ccagguuauuucuauaagccaccuggaaagcu

SEQ ID NO: 417609 - RNA, 32 nt, Homo Sapiens
gccccacugcaggcugccugggacgccuucuc

SEQ ID NO: 417610 - RNA, 32 nt, Homo Sapiens
uucaaguuaacucuagcccagcccagaucaac

SEQ ID NO: 417611 - RNA, 32 nt, Homo Sapiens
cuuuccuucccucucugaugucccagugcuca

SEQ ID NO: 417612 - RNA, 32 nt, Homo Sapiens
uugcugaacacacacacacacacacacacaca

SEQ ID NO: 417613 - RNA, 32 nt, Homo Sapiens
ugcuuaguuuaugaggaccggcugcuuuccag

SEQ ID NO: 417614 - RNA, 32 nt, Homo Sapiens
ucuacuaaaaauacacaaaaaauuagccgggg

SEQ ID NO: 417615 - RNA, 32 nt, Homo Sapiens
uaauuugaagcagucuuugaaaauaacaaaaa

SEQ ID NO: 417616 - RNA, 32 nt, Homo Sapiens
aaggucucaagccccacccccagacccucuga

SEQ ID NO: 417617 - RNA, 32 nt, Homo Sapiens
cagaguauuucugggugggcaucgauugucua

SEQ ID NO: 417618 - RNA, 32 nt, Homo Sapiens
ggccgagccagccgugcgccgcgcuccagggc

SEQ ID NO: 417619 - RNA, 32 nt, Homo Sapiens
agggagggcaaagggaugagaagacaaguuuc

SEQ ID NO: 417620 - RNA, 32 nt, Homo Sapiens
ccaccaggguugggggcgccacagcugcgagc

SEQ ID NO: 417621 - RNA, 32 nt, Homo Sapiens
guuggggcgcggaggaggagcagcagcgggag

SEQ ID NO: 417622 - RNA, 32 nt, Homo Sapiens
augacaaauuuaauguauguaauugucuaugc

SEQ ID NO: 417623 - RNA, 32 nt, Homo Sapiens
uacaccucagaaugugacuguauauagaaaua

SEQ ID NO: 417624 - RNA, 32 nt, Homo Sapiens
cuggcuaugucugcguguuggcuccucccaug

SEQ ID NO: 417625 - RNA, 32 nt, Homo Sapiens
cguaccaauauuuggaguccuuagacauuaga

SEQ ID NO: 417626 - RNA, 32 nt, Homo Sapiens
gggucuggugcuaacacccccuucccagccuc

SEQ ID NO: 417627 - RNA, 31 nt, Homo Sapiens
caucugggcuucacagcuugaguuaaccuug

SEQ ID NO: 417628 - RNA, 32 nt, Homo Sapiens
gccaugccguguguaggcuuagccucaggugg

SEQ ID NO: 417629 - RNA, 32 nt, Homo Sapiens
cugaagggaauguguacugaauguuagagugu

SEQ ID NO: 417630 - RNA, 32 nt, Homo Sapiens
ccaaaaacauauaugauguuucucagugauaa

SEQ ID NO: 417631 - RNA, 32 nt, Homo Sapiens
ugggccggccccaggcccuuugcggagcgugu

SEQ ID NO: 417632 - RNA, 32 nt, Homo Sapiens
agcuccuuggaaagacucugguuacuuuuaca

SEQ ID NO: 417633 - RNA, 32 nt, Homo Sapiens
uuuugcccugucacuguccauagccaugauua

SEQ ID NO: 417634 - RNA, 32 nt, Homo Sapiens
gaaguccuuucuggugugagaauguguccauu

SEQ ID NO: 417635 - RNA, 32 nt, Homo Sapiens
ugugccagacuuaugacuuuguuuucaagcac

SEQ ID NO: 417636 - RNA, 32 nt, Homo Sapiens
ugggcggaacuaccaaucauggcugcagucug

SEQ ID NO: 417637 - RNA, 32 nt, Homo Sapiens
uucuucccacccacgcggcagaugggacuccu

SEQ ID NO: 417638 - RNA, 32 nt, Homo Sapiens
gugaacucgaacaacaguggugaagggaaauu

SEQ ID NO: 417639 - RNA, 32 nt, Homo Sapiens
uucuacccgcauggguagaguucugccucugg

SEQ ID NO: 417640 - RNA, 32 nt, Homo Sapiens
acaauaaauauuaggagacacagggaaguggg

SEQ ID NO: 417641 - RNA, 32 nt, Homo Sapiens
auaugucauacuauauuuuaaauaguuaaaaa

SEQ ID NO: 417642 - RNA, 32 nt, Homo Sapiens
aggagcaaggagagagggaagaaggaccccgu

SEQ ID NO: 417643 - RNA, 32 nt, Homo Sapiens
cacgugcaccgcgauguacugcgaggaaaggg

SEQ ID NO: 417644 - RNA, 32 nt, Homo Sapiens
aucuucccugugucccugggggccccugaugc

SEQ ID NO: 417645 - RNA, 32 nt, Homo Sapiens
cuuuaauacuaaaagcacuuuccauuauauac

SEQ ID NO: 417646 - RNA, 32 nt, Homo Sapiens
gcucccaucuacuuucuucucuagaauccacg

SEQ ID NO: 417647 - RNA, 32 nt, Homo Sapiens
accuuauguauuaaauagaaaucggaauguac

SEQ ID NO: 417648 - RNA, 32 nt, Homo Sapiens
cguccccaccaggcugcccuugggauggaccu

SEQ ID NO: 417649 - RNA, 30 nt, Homo Sapiens
ggacaggcugggcgcgcgcccgugugagug

SEQ ID NO: 417650 - RNA, 32 nt, Homo Sapiens
gcucaauuauauauuuuuguugaguuuuuuaa

SEQ ID NO: 417651 - RNA, 32 nt, Homo Sapiens
accccaccuuggagggucugaccaucuucacc

SEQ ID NO: 417652 - RNA, 32 nt, Homo Sapiens
uccuaccaucccucacuuggaccugggggugu

SEQ ID NO: 417653 - RNA, 32 nt, Homo Sapiens
ggaagcgcccgcugccugccugucccaacccg

SEQ ID NO: 417654 - RNA, 32 nt, Homo Sapiens
ggaauguaaaaugauucuguauuaauguaaau

SEQ ID NO: 417655 - RNA, 32 nt, Homo Sapiens
aaucuaguaaaugucacauaauuuauaaggca

SEQ ID NO: 417656 - RNA, 32 nt, Homo Sapiens
uuaugguuauuuaauguaauuauuacuucaaa

SEQ ID NO: 417657 - RNA, 32 nt, Homo Sapiens
ccaauacugcuuaauuauagcacuuuauuuuu

SEQ ID NO: 417658 - RNA, 32 nt, Homo Sapiens
ccgccgcccucccaggaccccgagcugcuguc

SEQ ID NO: 417659 - RNA, 30 nt, Homo Sapiens
ccacugcccugcuuacaggucgccugcgag

SEQ ID NO: 417660 - RNA, 32 nt, Homo Sapiens
aacuuccccguccauuauuccuugcacuauaa

SEQ ID NO: 417661 - RNA, 32 nt, Homo Sapiens
gcuggcugguccgcaucucucagacucacucu

SEQ ID NO: 417662 - RNA, 32 nt, Homo Sapiens
ugauacaucuuuucucagugaacauaaaacua

SEQ ID NO: 417663 - RNA, 32 nt, Homo Sapiens
ggcccucucuacaucucuucccuccaucuccu

SEQ ID NO: 417664 - RNA, 32 nt, Homo Sapiens
uuuacauaggcagccagaggaacuuggcgaag

SEQ ID NO: 417665 - RNA, 32 nt, Homo Sapiens
cuuaaauuuucccuuccuucugcauuuugaau

SEQ ID NO: 417666 - RNA, 32 nt, Homo Sapiens
uggagcuacagagauggagagaagggcccuuc

SEQ ID NO: 417667 - RNA, 32 nt, Homo Sapiens
uacagaguucccucugcugucuggccgucugc

SEQ ID NO: 417668 - RNA, 32 nt, Homo Sapiens
guguauggcuguugggaacagcaaccaaaagg

SEQ ID NO: 417669 - RNA, 32 nt, Homo Sapiens
ggcggcggcaggccuagcagcacgggaaccgu

SEQ ID NO: 417670 - RNA, 32 nt, Homo Sapiens
caugggccuuugucgucguuucugggccagga

SEQ ID NO: 417671 - RNA, 32 nt, Homo Sapiens
cuaccaucauccgguuuagucauccaacagga

SEQ ID NO: 417672 - RNA, 32 nt, Homo Sapiens
ugggcaugcaucugggacccccguggagcuga

SEQ ID NO: 417673 - RNA, 32 nt, Homo Sapiens
aaauucuuguaucuuuaaaagagaaaaucuua

SEQ ID NO: 417674 - RNA, 32 nt, Homo Sapiens
ccagggccaagccccgcugccuuccccaggcc

SEQ ID NO: 417675 - RNA, 32 nt, Homo Sapiens
cacaggccccaggcuuccugccagggccccga

SEQ ID NO: 417676 - RNA, 32 nt, Homo Sapiens
uugccugugccauguggaacuacagaaccuug

SEQ ID NO: 417677 - RNA, 31 nt, Homo Sapiens
agcgccggcccugccugcugcucugcccagg

SEQ ID NO: 417678 - RNA, 32 nt, Homo Sapiens
gauccccuccucuucacccccagggcagguug

SEQ ID NO: 417679 - RNA, 32 nt, Homo Sapiens
caagugguggugaaacaaaaucaaaacagauu

SEQ ID NO: 417680 - RNA, 32 nt, Homo Sapiens
uggguauuuugugugcuacuguaucuugugaa

SEQ ID NO: 417681 - RNA, 32 nt, Homo Sapiens
gagauucuuacuaauauguugaacuaaaauag

SEQ ID NO: 417682 - RNA, 32 nt, Homo Sapiens
cuuccugagcccagugggagccccacaucaga

SEQ ID NO: 417683 - RNA, 32 nt, Homo Sapiens
ugggaaacguaugugugcaggagccucccugc

SEQ ID NO: 417684 - RNA, 32 nt, Homo Sapiens
cuccagauuaaaaacuaaccaauucaucuuug

SEQ ID NO: 417685 - RNA, 32 nt, Homo Sapiens
auaaccuguuuccauucuccauucaaauaaag

SEQ ID NO: 417686 - RNA, 32 nt, Homo Sapiens
cuuguguaauauggugaauuagagugguauuu

SEQ ID NO: 417687 - RNA, 32 nt, Homo Sapiens
cccucggcgcuccgggacguggcaccuccucg

SEQ ID NO: 417688 - RNA, 32 nt, Homo Sapiens
cagaagcccucggacugcccggaccgcgcgau

SEQ ID NO: 417689 - RNA, 32 nt, Homo Sapiens
ggaaaaaaauggugucuaugaauuucuucuua

SEQ ID NO: 417690 - RNA, 32 nt, Homo Sapiens
auccauggaguuuuuucuuggcuuuuguacca

SEQ ID NO: 417691 - RNA, 32 nt, Homo Sapiens
caaacucagguggaccugugaugcccucggau

SEQ ID NO: 417692 - RNA, 32 nt, Homo Sapiens
uucugcaaaccagccauagauacaucuugcuc

SEQ ID NO: 417693 - RNA, 28 nt, Homo Sapiens
cacauggagcagcgauuuauuguauggg

SEQ ID NO: 417694 - RNA, 32 nt, Homo Sapiens
guccaaacaaacaaacaaaaacuaaacacaca

SEQ ID NO: 417695 - RNA, 32 nt, Homo Sapiens
uguaauagagcaauaauuguaaaugguuacca

SEQ ID NO: 417696 - RNA, 32 nt, Homo Sapiens
gaaagcccaagccccgggagaagaugccggcc

SEQ ID NO: 417697 - RNA, 30 nt, Homo Sapiens
ugaggugaugaggaugaagaccuuuaugau

SEQ ID NO: 417698 - RNA, 32 nt, Homo Sapiens
ugcccacagagugagcuggaugcugaaacugu

SEQ ID NO: 417699 - RNA, 32 nt, Homo Sapiens
ugaccuuucuguucuuuuuaucugaaggaaau

SEQ ID NO: 417700 - RNA, 32 nt, Homo Sapiens
uuggaagagcugacaugaugagcauuauugua

SEQ ID NO: 417701 - RNA, 32 nt, Homo Sapiens
gcuuuccuggggagagauuaagcgcucauuaa

SEQ ID NO: 417702 - RNA, 32 nt, Homo Sapiens
ccaucccaaaggaaaauguagacaucaccugu

SEQ ID NO: 417703 - RNA, 32 nt, Homo Sapiens
gugacagaaucccaaggauuugaaagcucggg

SEQ ID NO: 417704 - RNA, 32 nt, Homo Sapiens
uccuggagaaccgggacacggggacgggaggg

SEQ ID NO: 417705 - RNA, 32 nt, Homo Sapiens
ucaguuagcaaccuguguuguagcagugaugu

SEQ ID NO: 417706 - RNA, 32 nt, Homo Sapiens
ucacuugggaggggcggagguagcaguaaagc

SEQ ID NO: 417707 - RNA, 32 nt, Homo Sapiens
cagacaggccuggcccugguucccaggguggc

SEQ ID NO: 417708 - RNA, 32 nt, Homo Sapiens
ucuccguggaugaacugcgucuggacucuuag

SEQ ID NO: 417709 - RNA, 31 nt, Homo Sapiens
gccaagauggcgucggccuccucccaaccgu

SEQ ID NO: 417710 - RNA, 32 nt, Homo Sapiens
ggcuuggguggguucagcacuagcucgggacg

SEQ ID NO: 417711 - RNA, 29 nt, Homo Sapiens
ccccagccuauccaagugccaggaaggga

SEQ ID NO: 417712 - RNA, 32 nt, Homo Sapiens
gggauacuauaaaugugcuaaguuauuugaga

SEQ ID NO: 417713 - RNA, 32 nt, Homo Sapiens
accuguucugcuuuccucuuccugaauuuuau

SEQ ID NO: 417714 - RNA, 32 nt, Homo Sapiens
guuuuuauuuaguuuugggaauaggcaucaau

SEQ ID NO: 417715 - RNA, 32 nt, Homo Sapiens
gaccgacucuauuuuaaaucucagaauuuuaa

SEQ ID NO: 417716 - RNA, 32 nt, Homo Sapiens
cuaaacaaacaauaaacuacugaugucugcag

SEQ ID NO: 417717 - RNA, 32 nt, Homo Sapiens
uuugguuacauggaugaauugucuagugguga

SEQ ID NO: 417718 - RNA, 32 nt, Homo Sapiens
agccggcauccugagccuccucaugcccugga

SEQ ID NO: 417719 - RNA, 32 nt, Homo Sapiens
auuuuuauuguuaaugcucuucuuauggauac

SEQ ID NO: 417720 - RNA, 31 nt, Homo Sapiens
cuuuauucaaagaaaaauauauugguuacug

SEQ ID NO: 417721 - RNA, 32 nt, Homo Sapiens
ucucucuuuucucuaacaguguuagaaguuug

SEQ ID NO: 417722 - RNA, 32 nt, Homo Sapiens
auguucccgcaguaauguucugcacaacagua

SEQ ID NO: 417723 - RNA, 32 nt, Homo Sapiens
aauucagauaauguauaaguuucccagugauu

SEQ ID NO: 417724 - RNA, 32 nt, Homo Sapiens
acaauaacgauaaaagacagugaaagaaaaua

SEQ ID NO: 417725 - RNA, 32 nt, Homo Sapiens
aucuucacaauuuauguucagagauugcagua

SEQ ID NO: 417726 - RNA, 32 nt, Homo Sapiens
cuaguuggggugccacugcugccuggacugcu

SEQ ID NO: 417727 - RNA, 32 nt, Homo Sapiens
uuccuggaaaggaggccacagauucuuuccca

SEQ ID NO: 417728 - RNA, 32 nt, Homo Sapiens
ccagccuugacaacguuaggaaucucuccacu

SEQ ID NO: 417729 - RNA, 32 nt, Homo Sapiens
uuugccugucaugcgcaacuggagccagcaac

SEQ ID NO: 417730 - RNA, 32 nt, Homo Sapiens
cagauggguggggagggucagcuccuuccagc

SEQ ID NO: 417731 - RNA, 32 nt, Homo Sapiens
aaaaaacuaauuuuuggugcugauuggcaugu

SEQ ID NO: 417732 - RNA, 32 nt, Homo Sapiens
acguuuacacgacuugaguuuugaaccccgau

SEQ ID NO: 417733 - RNA, 32 nt, Homo Sapiens
aacaaucugagccaugagaacgaggggaucug

SEQ ID NO: 417734 - RNA, 32 nt, Homo Sapiens
cugcagcuggggauagggggcccaugccuucu

SEQ ID NO: 417735 - RNA, 32 nt, Homo Sapiens
aacuuuguaaauaaguuuuuuuucuggguuca

SEQ ID NO: 417736 - RNA, 32 nt, Homo Sapiens
gcuccugccacccuggcagaugacucacugug

SEQ ID NO: 417737 - RNA, 32 nt, Homo Sapiens
caaaacugucuccuaguuauccacauuaacau

SEQ ID NO: 417738 - RNA, 32 nt, Homo Sapiens
gaagaucucacagaccuaauagacacggccuu

SEQ ID NO: 417739 - RNA, 32 nt, Homo Sapiens
uaccuuuaucauuucuuuuucuuagcuuucuu

SEQ ID NO: 417740 - RNA, 32 nt, Homo Sapiens
cauauuuuacaggcagaugcuuuucuuauaau

SEQ ID NO: 417741 - RNA, 32 nt, Homo Sapiens
gaaggcgcgggcugcgaucugcucucuguucc

SEQ ID NO: 417742 - RNA, 30 nt, Homo Sapiens
cauuauccacuaauggggcagagacaggaa

SEQ ID NO: 417743 - RNA, 32 nt, Homo Sapiens
aauaagaauaagcagcccacacaacugggcau

SEQ ID NO: 417744 - RNA, 32 nt, Homo Sapiens
aggacucggacaccggacucggacaccggcuu

SEQ ID NO: 417745 - RNA, 32 nt, Homo Sapiens
ccagcggcugggggcgggggcggaccuuguga

SEQ ID NO: 417746 - RNA, 32 nt, Homo Sapiens
agauuucaugucuaacuaacuaacuuuauaca

SEQ ID NO: 417747 - RNA, 32 nt, Homo Sapiens
gacgcugguuguccuggagcccgggaagcuca

SEQ ID NO: 417748 - RNA, 32 nt, Homo Sapiens
aagaccauuuuucuccaagccaugggggacug

SEQ ID NO: 417749 - RNA, 32 nt, Homo Sapiens
cgacucgggagcuccgggagcggcccgcgcag

SEQ ID NO: 417750 - RNA, 32 nt, Homo Sapiens
ggaggcggguuauggcggcggcggcagugaga

SEQ ID NO: 417751 - RNA, 32 nt, Homo Sapiens
uuuccauugugucaagugcaaaacuacccugg

SEQ ID NO: 417752 - RNA, 32 nt, Homo Sapiens
uauuuugcauuacuuugaguuaaauuugaaua

SEQ ID NO: 417753 - RNA, 32 nt, Homo Sapiens
agcccacgccuggcaccuggcuccauggcaua

SEQ ID NO: 417754 - RNA, 32 nt, Homo Sapiens
cgggucacugccucauccaccggagcgauggc

SEQ ID NO: 417755 - RNA, 32 nt, Homo Sapiens
gguacuguauccucugacuuuauuuuccaugu

SEQ ID NO: 417756 - RNA, 32 nt, Homo Sapiens
gugcucuuuacuucuuuuucuccacaucuucu

SEQ ID NO: 417757 - RNA, 32 nt, Homo Sapiens
caauagagauaaaacagaugauguacugacaa

SEQ ID NO: 417758 - RNA, 32 nt, Homo Sapiens
cugugagggcuuugggggcgucagguugggua

SEQ ID NO: 417759 - RNA, 32 nt, Homo Sapiens
gggaggaggggaggagagauggauauuucagc

SEQ ID NO: 417760 - RNA, 32 nt, Homo Sapiens
ugggcaggugaguggcagcugugcuccagcuc

SEQ ID NO: 417761 - RNA, 32 nt, Homo Sapiens
uuagaaaaugucaaguauuauaagcugguauu

SEQ ID NO: 417762 - RNA, 32 nt, Homo Sapiens
ggggauuauagcaauaucccacaauaccucug

SEQ ID NO: 417763 - RNA, 32 nt, Homo Sapiens
caguuaauuuuuuguauuuguuuguagagaug

SEQ ID NO: 417764 - RNA, 32 nt, Homo Sapiens
cucuguacguuauaaauuugcuuaaagauuuu

SEQ ID NO: 417765 - RNA, 32 nt, Homo Sapiens
aguagcugacuguguccgccgagcccaucccc

SEQ ID NO: 417766 - RNA, 32 nt, Homo Sapiens
ccuucacgguaugccagacucccuccucccug

SEQ ID NO: 417767 - RNA, 32 nt, Homo Sapiens
gaacccccagcuaacuggucucucagaggagu

SEQ ID NO: 417768 - RNA, 32 nt, Homo Sapiens
auauauuugucaacauuccucaugcuguaugu

SEQ ID NO: 417769 - RNA, 32 nt, Homo Sapiens
ugcuaugaauaauaauaacaaacacugccuuc

SEQ ID NO: 417770 - RNA, 32 nt, Homo Sapiens
ccaaaaauauaaaacaguucuguauaccaaag

SEQ ID NO: 417771 - RNA, 27 nt, Homo Sapiens
cuuuaguuuuucuucagcuuaggagug

SEQ ID NO: 417772 - RNA, 32 nt, Homo Sapiens
uuguuugccaguaucucaaccacagccaggaa

SEQ ID NO: 417773 - RNA, 30 nt, Homo Sapiens
guaaggcgcgcgcggucagcuguuggcggu

SEQ ID NO: 417774 - RNA, 32 nt, Homo Sapiens
accugaaggcuuugcaaaauuuguaccauaac

SEQ ID NO: 417775 - RNA, 32 nt, Homo Sapiens
ucuuuuugaaagaucaagaaugaagaggaaga

SEQ ID NO: 417776 - RNA, 28 nt, Homo Sapiens
uguugagggcaaaauauuauaaaucuau

SEQ ID NO: 417777 - RNA, 32 nt, Homo Sapiens
ugccuggucucuggggguguugagugaggggu

SEQ ID NO: 417778 - RNA, 32 nt, Homo Sapiens
ggagauagaaaggaauucaacaauauaucaaa

SEQ ID NO: 417779 - RNA, 32 nt, Homo Sapiens
aguugugcucuaaaggacacuaucaagaaaau

SEQ ID NO: 417780 - RNA, 32 nt, Homo Sapiens
cacaaguaaaucauugaacuacagaaaaaugu

SEQ ID NO: 417781 - RNA, 32 nt, Homo Sapiens
cacagagguggcaagagaagggcugaagcugg

SEQ ID NO: 417782 - RNA, 32 nt, Homo Sapiens
gucuaguuuguuucgacgccggaccgcguaag

SEQ ID NO: 417783 - RNA, 32 nt, Homo Sapiens
ugaaaaucuguuaccguacuuauuuaacaaua

SEQ ID NO: 417784 - RNA, 32 nt, Homo Sapiens
ccgccucugauccaagccaccucccgccagag

SEQ ID NO: 417785 - RNA, 32 nt, Homo Sapiens
agugggaggugauuggaucauggggguggauu

SEQ ID NO: 417786 - RNA, 30 nt, Homo Sapiens
cccccaugccuuggugcggguccuggaggc

SEQ ID NO: 417787 - RNA, 32 nt, Homo Sapiens
gagauuauauuuucuguuuuuaaaagauuuuu

SEQ ID NO: 417788 - RNA, 32 nt, Homo Sapiens
caccuguauucccagcacuuugggaggccuag

SEQ ID NO: 417789 - RNA, 32 nt, Homo Sapiens
acuuaauggaagauuaucaauuguccuauuuu

SEQ ID NO: 417790 - RNA, 32 nt, Homo Sapiens
gcgugggcgugagauggcggcggcagcgguga

SEQ ID NO: 417791 - RNA, 32 nt, Homo Sapiens
ccugcgcccccucuccugguucuccauaaaga

SEQ ID NO: 417792 - RNA, 32 nt, Homo Sapiens
agcucaucuuccggcccucugauuggccggcu

SEQ ID NO: 417793 - RNA, 32 nt, Homo Sapiens
agcugugcuccuggggccggcgcggguuuugg

SEQ ID NO: 417794 - RNA, 32 nt, Homo Sapiens
gacacucccuucccgccuuccuccucccaccu

SEQ ID NO: 417795 - RNA, 32 nt, Homo Sapiens
ccuagauaccucgggagcgcaggccgcggccg

SEQ ID NO: 417796 - RNA, 32 nt, Homo Sapiens
cucccgggauaggcugccccggagagggagag

SEQ ID NO: 417797 - RNA, 32 nt, Homo Sapiens
agaauccuuauccuaauuuuacaaccagggaa

SEQ ID NO: 417798 - RNA, 32 nt, Homo Sapiens
ccagagggccgguggcuccuccgggcuucuga

SEQ ID NO: 417799 - RNA, 32 nt, Homo Sapiens
aggcggccggccuggacuggcccgagagggau

SEQ ID NO: 417800 - RNA, 32 nt, Homo Sapiens
cgagugcgacccguuccuuuguuuccuugcaa

SEQ ID NO: 417801 - RNA, 32 nt, Homo Sapiens
gagaggaauuauauuuaaguugugagacugag

SEQ ID NO: 417802 - RNA, 32 nt, Homo Sapiens
auuuccugcccggcucuaugccccugagcagc

SEQ ID NO: 417803 - RNA, 32 nt, Homo Sapiens
cagugggaggccgguggaaaggcgcaggggcc

SEQ ID NO: 417804 - RNA, 32 nt, Homo Sapiens
cauuugauuaaaaauaaacaaacagcaucucc

SEQ ID NO: 417805 - RNA, 32 nt, Homo Sapiens
ugugaagaugaaaaacagugauauuauacugc

SEQ ID NO: 417806 - RNA, 32 nt, Homo Sapiens
gagguuauaauggacuuaaccaauguuugaca

SEQ ID NO: 417807 - RNA, 32 nt, Homo Sapiens
ccacugagcccuacuuuuuuuuuuuaaagcaa

SEQ ID NO: 417808 - RNA, 32 nt, Homo Sapiens
cgccggccgggggacgaguccggagcagcagc

SEQ ID NO: 417809 - RNA, 32 nt, Homo Sapiens
ggagcucagcaccucuuccagcccuuaaagcu

SEQ ID NO: 417810 - RNA, 32 nt, Homo Sapiens
ggcacugugggaacagacacagagauggagaa

SEQ ID NO: 417811 - RNA, 32 nt, Homo Sapiens
ucccggcccuucugccccgccgccuucccuca

SEQ ID NO: 417812 - RNA, 32 nt, Homo Sapiens
gguuucgccauguuggccaggcuggucuugaa

SEQ ID NO: 417813 - RNA, 32 nt, Homo Sapiens
aaagcuagauagagguuaagaaucaagauaua

SEQ ID NO: 417814 - RNA, 32 nt, Homo Sapiens
cccaggggcuggccccaccuuucccucgguca

SEQ ID NO: 417815 - RNA, 32 nt, Homo Sapiens
cauugaaauaaaucuuggguuuguuuuuuucc

SEQ ID NO: 417816 - RNA, 32 nt, Homo Sapiens
gccugucgccccgcccuucgcggggcagcccc

SEQ ID NO: 417817 - RNA, 32 nt, Homo Sapiens
cagcagcagacacucuguacaguuuuuucaau

SEQ ID NO: 417818 - RNA, 32 nt, Homo Sapiens
ggcgccggggaggggggcgcgaugggccaagg

SEQ ID NO: 417819 - RNA, 32 nt, Homo Sapiens
ucuagccucuuccugggaccagcccuucgaag

SEQ ID NO: 417820 - RNA, 32 nt, Homo Sapiens
ucgcaaccacccaaugaucgauucaggagaaa

SEQ ID NO: 417821 - RNA, 32 nt, Homo Sapiens
gcauccucccugcaguagccacggccaggccc

SEQ ID NO: 417822 - RNA, 32 nt, Homo Sapiens
auuuaaaaggaauauauaagacuuuacccaug

SEQ ID NO: 417823 - RNA, 32 nt, Homo Sapiens
cucgggccgggaagaagccagcaaaguccccc

SEQ ID NO: 417824 - RNA, 32 nt, Homo Sapiens
uauagauauugcacaacagacugcacagggca

SEQ ID NO: 417825 - RNA, 32 nt, Homo Sapiens
aggggaggggagaggccauggccgucccagcc

SEQ ID NO: 417826 - RNA, 32 nt, Homo Sapiens
uuacaucaaaggacuuguuuuuguuuuaacug

SEQ ID NO: 417827 - RNA, 32 nt, Homo Sapiens
auaaggaacaacaugaagauaaaucggcaguc

SEQ ID NO: 417828 - RNA, 32 nt, Homo Sapiens
cccggugccugccuggcagaugugcccacgga

SEQ ID NO: 417829 - RNA, 32 nt, Homo Sapiens
uaggaccugguccugcccugcugcaggaguga

SEQ ID NO: 417830 - RNA, 32 nt, Homo Sapiens
cccauguuuuccaggcccccagccucccacuc

SEQ ID NO: 417831 - RNA, 32 nt, Homo Sapiens
gcgggacccuaggcagcaggccaggcaccgcc

SEQ ID NO: 417832 - RNA, 31 nt, Homo Sapiens
aaagaaacaaagaaacucuaauauugaaucu

SEQ ID NO: 417833 - RNA, 32 nt, Homo Sapiens
caauuaucaagguuuuaacaauuuauaauucu

SEQ ID NO: 417834 - RNA, 32 nt, Homo Sapiens
aaauauguaaugcagggcuuguccuggaggug

SEQ ID NO: 417835 - RNA, 30 nt, Homo Sapiens
ggauuguguugugcugccuaagcugccggc

SEQ ID NO: 417836 - RNA, 32 nt, Homo Sapiens
gccugguuucccuucuucggcuuauuguucca

SEQ ID NO: 417837 - RNA, 32 nt, Homo Sapiens
ugaauugacaaaugcauuguaacuacaaauuu

SEQ ID NO: 417838 - RNA, 32 nt, Homo Sapiens
aggacaacucugcaugagauguagacuuaagc

SEQ ID NO: 417839 - RNA, 32 nt, Homo Sapiens
auggcacucuggguccucuccucacucuccag

SEQ ID NO: 417840 - RNA, 32 nt, Homo Sapiens
cucccggcacaagaacccggcgccgcccgagg

SEQ ID NO: 417841 - RNA, 32 nt, Homo Sapiens
ugucucggcccgcaaccuccccgaagccgucg

SEQ ID NO: 417842 - RNA, 32 nt, Homo Sapiens
cgcgcagaugacuccgauuagcaagcuuucaa

SEQ ID NO: 417843 - RNA, 32 nt, Homo Sapiens
gagagugguccuucccuuugccugugguguaa

SEQ ID NO: 417844 - RNA, 32 nt, Homo Sapiens
ccaagaaugacauuuuucaaaaagguguugau

SEQ ID NO: 417845 - RNA, 32 nt, Homo Sapiens
ucaaguacuaccccggccccagcacccgccag

SEQ ID NO: 417846 - RNA, 32 nt, Homo Sapiens
gcccccucaccuccccgaaguguggugaagga

SEQ ID NO: 417847 - RNA, 32 nt, Homo Sapiens
cccccggcgcucacgcucucggggcggacucc

SEQ ID NO: 417848 - RNA, 32 nt, Homo Sapiens
uuacuuuaaugcuaggauagucuaaaucuuca

SEQ ID NO: 417849 - RNA, 30 nt, Homo Sapiens
agcgggagguggaggcgagcgaacagaggg

SEQ ID NO: 417850 - RNA, 32 nt, Homo Sapiens
ucauugagucauuuuuaaucacuguaaaacau

SEQ ID NO: 417851 - RNA, 32 nt, Homo Sapiens
caccaaaccuugcuuuuucucaucugcaaaau

SEQ ID NO: 417852 - RNA, 32 nt, Homo Sapiens
caaaagaaaaagaaauuaaggcaggaacugag

SEQ ID NO: 417853 - RNA, 32 nt, Homo Sapiens
uuauuucaaagacuuguaaaaacuacucacuc

SEQ ID NO: 417854 - RNA, 32 nt, Homo Sapiens
uuuuuguuuugucucauucaguuuacuuuccu

SEQ ID NO: 417855 - RNA, 32 nt, Homo Sapiens
aagaugacugcauagggaccaacacugccuga

SEQ ID NO: 417856 - RNA, 32 nt, Homo Sapiens
gcucagucucagagaggcuggcacggccuggc

SEQ ID NO: 417857 - RNA, 32 nt, Homo Sapiens
ccaucaaugagugcaagaucuucuaaccccaa

SEQ ID NO: 417858 - RNA, 32 nt, Homo Sapiens
uuuaagccaaaagauaaaugugugaaaaugua

SEQ ID NO: 417859 - RNA, 32 nt, Homo Sapiens
uuuaauacaguuuuugaguuuugugugacuug

SEQ ID NO: 417860 - RNA, 32 nt, Homo Sapiens
uuuucuuauggcauuaaaaauuuuacaaaaac

SEQ ID NO: 417861 - RNA, 32 nt, Homo Sapiens
gaaucauauggaaaaaguuugauuuguaauuu

SEQ ID NO: 417862 - RNA, 32 nt, Homo Sapiens
cauuuauguaagucaggucggcucaggucuug

SEQ ID NO: 417863 - RNA, 32 nt, Homo Sapiens
uguaaaauacggaucauuuguauuuuggggug

SEQ ID NO: 417864 - RNA, 32 nt, Homo Sapiens
cagugugagauuuuuuaccagguauugcgcuu

SEQ ID NO: 417865 - RNA, 32 nt, Homo Sapiens
ucuaauguaguaauaaaguaaccaauauaauc

SEQ ID NO: 417866 - RNA, 32 nt, Homo Sapiens
ccuuucuugcagagaacaagucugcccagauu

SEQ ID NO: 417867 - RNA, 32 nt, Homo Sapiens
guuuaaauguguguuauacugauaaaauuuca

SEQ ID NO: 417868 - RNA, 32 nt, Homo Sapiens
ggugaggagguggaaggagccggguggaugcc

SEQ ID NO: 417869 - RNA, 32 nt, Homo Sapiens
aucuauuuucuuuuuuaucagauaugugagag

SEQ ID NO: 417870 - RNA, 29 nt, Homo Sapiens
auauuuucuaucccaugacucuacaauug

SEQ ID NO: 417871 - RNA, 32 nt, Homo Sapiens
agugagaaacuuaugggauguucguuagagag

SEQ ID NO: 417872 - RNA, 32 nt, Homo Sapiens
agcuaguggccaagagaugcagugccaggaac

SEQ ID NO: 417873 - RNA, 32 nt, Homo Sapiens
cuguucuccgcgucgcggugguggacucugga

SEQ ID NO: 417874 - RNA, 32 nt, Homo Sapiens
accucugccucccagguucagagugauucucc

SEQ ID NO: 417875 - RNA, 32 nt, Homo Sapiens
aagagggagacuucaucucaaaaggaaaagaa

SEQ ID NO: 417876 - RNA, 32 nt, Homo Sapiens
accuccgccucccagguucaagagauucuccu

SEQ ID NO: 417877 - RNA, 32 nt, Homo Sapiens
augaaaaauaaauauugcuuuugaacaaaaaa

SEQ ID NO: 417878 - RNA, 32 nt, Homo Sapiens
agucuaaugguguaucucuggauacacaaaga

SEQ ID NO: 417879 - RNA, 32 nt, Homo Sapiens
auaugggugcguguucaucucuggccaaaacu

SEQ ID NO: 417880 - RNA, 32 nt, Homo Sapiens
gaccggcugcccgugugcccggcagguggagc

SEQ ID NO: 417881 - RNA, 32 nt, Homo Sapiens
cuacaaaaaauauaauuuuacuuuuucugauu

SEQ ID NO: 417882 - RNA, 32 nt, Homo Sapiens
uucgcuguguguuagacguagggccuagagcu

SEQ ID NO: 417883 - RNA, 32 nt, Homo Sapiens
aaaauggccuauucauuauauguauauuuuuu

SEQ ID NO: 417884 - RNA, 32 nt, Homo Sapiens
ucagaggccggggguccugccaacuuucauuu

SEQ ID NO: 417885 - RNA, 32 nt, Homo Sapiens
ggggaaggagaugauccuuggacuuuuuuacc

SEQ ID NO: 417886 - RNA, 32 nt, Homo Sapiens
ugccugccugcccugcccugugcuguggagag

SEQ ID NO: 417887 - RNA, 32 nt, Homo Sapiens
cccaacaacuuaacaaaucaacuuggcuggaa

SEQ ID NO: 417888 - RNA, 32 nt, Homo Sapiens
ggccccacccucagaacgagcugcagcagauc

SEQ ID NO: 417889 - RNA, 32 nt, Homo Sapiens
acaaaaaacaaaaacaauagcaggauguggug

SEQ ID NO: 417890 - RNA, 32 nt, Homo Sapiens
ucccuggaagagaucaagccaucggagcugcu

SEQ ID NO: 417891 - RNA, 32 nt, Homo Sapiens
agggaggcaaggggcugcuuuccacugugggu

SEQ ID NO: 417892 - RNA, 32 nt, Homo Sapiens
ugaaaaaauaaucacuacuuaagcuaauuaau

SEQ ID NO: 417893 - RNA, 32 nt, Homo Sapiens
uuaccuuuauggugaggccugucggauggcua

SEQ ID NO: 417894 - RNA, 30 nt, Homo Sapiens
accgagucucauucugucgcccuggcugga

SEQ ID NO: 417895 - RNA, 32 nt, Homo Sapiens
gguaaauggacauuaaacuuuuuuaaaguaaa

SEQ ID NO: 417896 - RNA, 32 nt, Homo Sapiens
aaaugcaaaaucuaaaauaaaaaauggaaagg

SEQ ID NO: 417897 - RNA, 32 nt, Homo Sapiens
cauuugaggucauuuaaaaucugugaagcaaa

SEQ ID NO: 417898 - RNA, 32 nt, Homo Sapiens
gaaucugccuugcagcucuacucugccccagg

SEQ ID NO: 417899 - RNA, 32 nt, Homo Sapiens
caaagaauauaaaagcuauauuuugaagacuu

SEQ ID NO: 417900 - RNA, 30 nt, Homo Sapiens
gaacuugucuguguguccagaggaggaguc

SEQ ID NO: 417901 - RNA, 32 nt, Homo Sapiens
ggccuccucuucccuucgcuccggcccgguga

SEQ ID NO: 417902 - RNA, 32 nt, Homo Sapiens
uccaacuguauauuuuuuacuuuuauagauuu

SEQ ID NO: 417903 - RNA, 32 nt, Homo Sapiens
uccuccucucgcgaccgcccuccgcagcgaug

SEQ ID NO: 417904 - RNA, 32 nt, Homo Sapiens
ugcauugugggauauauaacugaggaagcaua

SEQ ID NO: 417905 - RNA, 32 nt, Homo Sapiens
aagauuuuuuuuucuuuuuugcucugcgauag

SEQ ID NO: 417906 - RNA, 32 nt, Homo Sapiens
aauuagccgggugugguggcgagcaccuguaa

SEQ ID NO: 417907 - RNA, 32 nt, Homo Sapiens
aguuucugcggccuuccaccgggccugaacca

SEQ ID NO: 417908 - RNA, 32 nt, Homo Sapiens
cugcagccauggagaggcucucugccgccccu

SEQ ID NO: 417909 - RNA, 32 nt, Homo Sapiens
auguuuguaauuuguauuugcauagaucuuug

SEQ ID NO: 417910 - RNA, 32 nt, Homo Sapiens
gagcuccugugccagcagcugcgccccggcug

SEQ ID NO: 417911 - RNA, 32 nt, Homo Sapiens
acguccuucucgcgcacguuggaaggcucacc

SEQ ID NO: 417912 - RNA, 32 nt, Homo Sapiens
uuauugucaggagaaagaacacucugaaaggu

SEQ ID NO: 417913 - RNA, 32 nt, Homo Sapiens
gcaggacgacagcagcagcagcgcgucuccuu

SEQ ID NO: 417914 - RNA, 32 nt, Homo Sapiens
aaacauuuuaucauucuaaauggugacucucu

SEQ ID NO: 417915 - RNA, 32 nt, Homo Sapiens
gguucaccuccuccuccuccaggaaaucccac

SEQ ID NO: 417916 - RNA, 32 nt, Homo Sapiens
aauaugguuaauuucauguaaaacagaaaaaa

SEQ ID NO: 417917 - RNA, 32 nt, Homo Sapiens
agaauaucaaaauaauuuguggcuguggauuu

SEQ ID NO: 417918 - RNA, 32 nt, Homo Sapiens
uacaggcgugagcuaccaccaugccuggcuuc

SEQ ID NO: 417919 - RNA, 32 nt, Homo Sapiens
acuguaacucuagaagauuaaccuuccagcca

SEQ ID NO: 417920 - RNA, 32 nt, Homo Sapiens
aacugaaauggcaagugcuguggaccuuccag

SEQ ID NO: 417921 - RNA, 32 nt, Homo Sapiens
uucacgguaaaauuauguugguuugaaaggag

SEQ ID NO: 417922 - RNA, 32 nt, Homo Sapiens
cgcccaaccguggccugguccggccccucccg

SEQ ID NO: 417923 - RNA, 32 nt, Homo Sapiens
aaguugcgagcggcgagcggcgagcggcgagc

SEQ ID NO: 417924 - RNA, 32 nt, Homo Sapiens
cccugaaguaccacauccugcuaugcucccgg

SEQ ID NO: 417925 - RNA, 32 nt, Homo Sapiens
cucaggccggcagguccuauguccuugacaca

SEQ ID NO: 417926 - RNA, 32 nt, Homo Sapiens
guucuuuuuuauuuggucauaucuuccauucu

SEQ ID NO: 417927 - RNA, 32 nt, Homo Sapiens
uaaccuuuucguuuaacuucucucuucacugc

SEQ ID NO: 417928 - RNA, 32 nt, Homo Sapiens
acccgcugcugccccagggggcgggccugcgg

SEQ ID NO: 417929 - RNA, 32 nt, Homo Sapiens
cuacaaaaaaaauuaaaagauuauccaggugu

SEQ ID NO: 417930 - RNA, 32 nt, Homo Sapiens
agugaucaaauuaaauucauuauggacagucu

SEQ ID NO: 417931 - RNA, 32 nt, Homo Sapiens
auauugaugauuagggccagaggaucucacuu

SEQ ID NO: 417932 - RNA, 32 nt, Homo Sapiens
uaccacagaaaucaccugagugucaauugaaa

SEQ ID NO: 417933 - RNA, 32 nt, Homo Sapiens
guccccuaaaacuugacuguggcacucagggu

SEQ ID NO: 417934 - RNA, 32 nt, Homo Sapiens
ccaacccccguccagaaucucccuuugcagug

SEQ ID NO: 417935 - RNA, 32 nt, Homo Sapiens
uguacaauucuguugaaacuggaccaaggcuc

SEQ ID NO: 417936 - RNA, 32 nt, Homo Sapiens
gcccucgggacuguccucgggcggcaaggagg

SEQ ID NO: 417937 - RNA, 32 nt, Homo Sapiens
ugcgugugucggaaucacugguaaauguuggc

SEQ ID NO: 417938 - RNA, 32 nt, Homo Sapiens
ccaagguuacuuucuuguuuuuggaaaaacaa

SEQ ID NO: 417939 - RNA, 32 nt, Homo Sapiens
cucacuuuuuaaagcauugauauuaguaucuu

SEQ ID NO: 417940 - RNA, 32 nt, Homo Sapiens
cauuuuucaaagauuaaguaggaggagagggg

SEQ ID NO: 417941 - RNA, 32 nt, Homo Sapiens
aaacccuuugaaaaauauucuaaaugaaaaug

SEQ ID NO: 417942 - RNA, 32 nt, Homo Sapiens
acuacuaaaaggaaaaauuguguuacuuuuuu

SEQ ID NO: 417943 - RNA, 32 nt, Homo Sapiens
cccauuagucucagaaauugucuuaagcaaca

SEQ ID NO: 417944 - RNA, 32 nt, Homo Sapiens
cacacaagcucuucuuaucucuacuagaauua

SEQ ID NO: 417945 - RNA, 32 nt, Homo Sapiens
ugggagguagauuaauaaaguauauuccuuca

SEQ ID NO: 417946 - RNA, 32 nt, Homo Sapiens
ucccggcagcauaccguguggcuucacacugc

SEQ ID NO: 417947 - RNA, 32 nt, Homo Sapiens
gcuagagcuugagcuguugcucuucuucaggg

SEQ ID NO: 417948 - RNA, 32 nt, Homo Sapiens
agaccuuugcaaacagagaggggagauuuucu

SEQ ID NO: 417949 - RNA, 30 nt, Homo Sapiens
uagucaugcuccgucccggcgcgcagcugc

SEQ ID NO: 417950 - RNA, 32 nt, Homo Sapiens
gagccgggcgcggcgacacgcggccauggagc

SEQ ID NO: 417951 - RNA, 32 nt, Homo Sapiens
ccagaauucagauaaaaugugcuuauguucug

SEQ ID NO: 417952 - RNA, 32 nt, Homo Sapiens
cuuucaacuuguuguuuacuucuuauacugga

SEQ ID NO: 417953 - RNA, 32 nt, Homo Sapiens
ccaugcacuccagcacacagcccgggaccccg

SEQ ID NO: 417954 - RNA, 32 nt, Homo Sapiens
acgcguguuuuuuccuuuucauuucagccuga

SEQ ID NO: 417955 - RNA, 32 nt, Homo Sapiens
uuauuguuuuuuuaaaauccacaguaggaaua

SEQ ID NO: 417956 - RNA, 32 nt, Homo Sapiens
ggggagaugccagugacaacauacaguucaug

SEQ ID NO: 417957 - RNA, 32 nt, Homo Sapiens
auguacauaaagauuucuuuucaguuguaaau

SEQ ID NO: 417958 - RNA, 29 nt, Homo Sapiens
augaauuuguguuucaaauugauaaaaua

SEQ ID NO: 417959 - RNA, 32 nt, Homo Sapiens
gcugcuucugcuuugaaggcggaggcuccaug

SEQ ID NO: 417960 - RNA, 32 nt, Homo Sapiens
ugggguucacugaugcugaguguaguugggag

SEQ ID NO: 417961 - RNA, 32 nt, Homo Sapiens
cuuuagaacaaggccuguuucuuuucugccau

SEQ ID NO: 417962 - RNA, 32 nt, Homo Sapiens
acugaauacuuugaaccacaaauaaguguuua

SEQ ID NO: 417963 - RNA, 32 nt, Homo Sapiens
gauuucuagauugacagcuguuuuaguacuuu

SEQ ID NO: 417964 - RNA, 32 nt, Homo Sapiens
gggagagaccgcggcuucgagacaccugggga

SEQ ID NO: 417965 - RNA, 32 nt, Homo Sapiens
cgcgaaggcagagcagcguucuccucagcaca

SEQ ID NO: 417966 - RNA, 32 nt, Homo Sapiens
gaaaacugaccgugugauguuugauuugggcu

SEQ ID NO: 417967 - RNA, 32 nt, Homo Sapiens
ccaguguauguaaagaaaauguuccagccagg

SEQ ID NO: 417968 - RNA, 31 nt, Homo Sapiens
cacggggccaugggcagcucgagccaggcag

SEQ ID NO: 417969 - RNA, 32 nt, Homo Sapiens
ucaucuuaggauaguguuugauauaucuaaga

SEQ ID NO: 417970 - RNA, 32 nt, Homo Sapiens
cauguaccaggaaccauuuaacaaagaauaua

SEQ ID NO: 417971 - RNA, 32 nt, Homo Sapiens
ggagaggacaaaggcagcuucugacacaccag

SEQ ID NO: 417972 - RNA, 32 nt, Homo Sapiens
aucccccacaguccuggaguaaaucaaaauca

SEQ ID NO: 417973 - RNA, 32 nt, Homo Sapiens
gaaauaaugacaccccacugucuccuugcccu

SEQ ID NO: 417974 - RNA, 32 nt, Homo Sapiens
uuauuuugaaauuuaucuggguauuaaagaau

SEQ ID NO: 417975 - RNA, 32 nt, Homo Sapiens
guuacucaaauuauguuacuuguuuggcuguu

SEQ ID NO: 417976 - RNA, 32 nt, Homo Sapiens
cucuuacuuugucggccccauccacagccgcu

SEQ ID NO: 417977 - RNA, 32 nt, Homo Sapiens
caggaaggaccccaggucuucccuggaggcag

SEQ ID NO: 417978 - RNA, 32 nt, Homo Sapiens
augccgggguggccaucuaugguagggcugga

SEQ ID NO: 417979 - RNA, 32 nt, Homo Sapiens
uccgugccucugcuuaccccaggccuccaucu

SEQ ID NO: 417980 - RNA, 32 nt, Homo Sapiens
gauauaccaagaauaauaaugauaaaauguuu

SEQ ID NO: 417981 - RNA, 32 nt, Homo Sapiens
uuuaaaauuggaagaguuuaauuugucaucua

SEQ ID NO: 417982 - RNA, 32 nt, Homo Sapiens
cugggcaugguuuugguugccauuccauaggu

SEQ ID NO: 417983 - RNA, 32 nt, Homo Sapiens
ggauaaaauuuucaagauuucguugaauuuga

SEQ ID NO: 417984 - RNA, 32 nt, Homo Sapiens
gggguggcugaauuuugaggcugggauuggca

SEQ ID NO: 417985 - RNA, 27 nt, Homo Sapiens
cagcccuacaucuucagcucccauagc

SEQ ID NO: 417986 - RNA, 32 nt, Homo Sapiens
ucucugugucugcuccaaauguagacagcaau

SEQ ID NO: 417987 - RNA, 32 nt, Homo Sapiens
uuguguuuagauuguucaucuuugguagcuuu

SEQ ID NO: 417988 - RNA, 32 nt, Homo Sapiens
cuugcguaugucuguuaccaugucacuguggu

SEQ ID NO: 417989 - RNA, 32 nt, Homo Sapiens
aaaaccugccagcuaguggaacagccuucuau

SEQ ID NO: 417990 - RNA, 32 nt, Homo Sapiens
uguguuacauauauuuuuaaaauuguuuaucu

SEQ ID NO: 417991 - RNA, 32 nt, Homo Sapiens
uccuguaacgugcuucuguuuguuaugguaga

SEQ ID NO: 417992 - RNA, 32 nt, Homo Sapiens
cuccccauucccuccgguuccgggcucucccu

SEQ ID NO: 417993 - RNA, 32 nt, Homo Sapiens
augaauuagagcagucucuggugaaaggcucu

SEQ ID NO: 417994 - RNA, 32 nt, Homo Sapiens
acuuuaccuuuagacaguggcucuucagggcc

SEQ ID NO: 417995 - RNA, 32 nt, Homo Sapiens
cucaugccaaccccgcccuaggccuggcaugg

SEQ ID NO: 417996 - RNA, 32 nt, Homo Sapiens
acaaaaacugauacuucgucuuucuggacuuu

SEQ ID NO: 417997 - RNA, 32 nt, Homo Sapiens
agaaggucaauuuaaaauagggacuagaaauu

SEQ ID NO: 417998 - RNA, 32 nt, Homo Sapiens
cugucuguccccuucuccaucgcccucuccca

SEQ ID NO: 417999 - RNA, 32 nt, Homo Sapiens
aaaacacuacaggugaacuggaugccacagaa

SEQ ID NO: 418000 - RNA, 32 nt, Homo Sapiens
cccagcacacccacucccgcagcccuccagug

SEQ ID NO: 418001 - RNA, 32 nt, Homo Sapiens
uuuaucuguuauacaacugauuuuacauaucu

SEQ ID NO: 418002 - RNA, 32 nt, Homo Sapiens
uaccaagcagccgaagaccacccacgaauggu

SEQ ID NO: 418003 - RNA, 32 nt, Homo Sapiens
acaccaaagggaggaggcaaucccagaugagg

SEQ ID NO: 418004 - RNA, 32 nt, Homo Sapiens
agauggaauuuugcucgucacccaggcuggag

SEQ ID NO: 418005 - RNA, 32 nt, Homo Sapiens
caaggguuggugcagccuccucgccgcgcugc

SEQ ID NO: 418006 - RNA, 32 nt, Homo Sapiens
uucgcagcagugcgccucccuuuuccagccac

SEQ ID NO: 418007 - RNA, 32 nt, Homo Sapiens
aagauacuaucauuuucccaauaaaauaaaug

SEQ ID NO: 418008 - RNA, 32 nt, Homo Sapiens
aauauucaaauuauaucuuaggacaucccuuc

SEQ ID NO: 418009 - RNA, 32 nt, Homo Sapiens
acacacucauucuccugcuccucuuuucccuu

SEQ ID NO: 418010 - RNA, 32 nt, Homo Sapiens
cccuuccagcccgcccucuguguguccagugu

SEQ ID NO: 418011 - RNA, 32 nt, Homo Sapiens
aaaauacaaaaauuagccaggugugauggcgg

SEQ ID NO: 418012 - RNA, 32 nt, Homo Sapiens
aauugaggauuaacagaagcagauuaaccuca

SEQ ID NO: 418013 - RNA, 32 nt, Homo Sapiens
gugggaaugaauuggcauugcaggaaagacag

SEQ ID NO: 418014 - RNA, 32 nt, Homo Sapiens
aggguggcgaggggcggccaggacccgcagcc

SEQ ID NO: 418015 - RNA, 32 nt, Homo Sapiens
acuucugccccggcgggggguccccgcuggaa

SEQ ID NO: 418016 - RNA, 32 nt, Homo Sapiens
gaguaggcauuugguagagcuugggggugugu

SEQ ID NO: 418017 - RNA, 32 nt, Homo Sapiens
uauaauugagaguuaagaaugaaauccuucaa

SEQ ID NO: 418018 - RNA, 32 nt, Homo Sapiens
cuguaaaacaauuuaucuuuguuucauuguuc

SEQ ID NO: 418019 - RNA, 32 nt, Homo Sapiens
ggccggacuacacuucccgucggcccgccugc

SEQ ID NO: 418020 - RNA, 32 nt, Homo Sapiens
gccaccugccugucccauacgccccgcccacc

SEQ ID NO: 418021 - RNA, 32 nt, Homo Sapiens
cucucagcaaaauaaaacugugaugugucuuc

SEQ ID NO: 418022 - RNA, 32 nt, Homo Sapiens
cucgaccucguccuccuccccgcuccggacga

SEQ ID NO: 418023 - RNA, 32 nt, Homo Sapiens
guguauuuucuuuguguagaacagaauguaca

SEQ ID NO: 418024 - RNA, 32 nt, Homo Sapiens
gaccuucggcccgaggcaccggggcgccggga

SEQ ID NO: 418025 - RNA, 32 nt, Homo Sapiens
aaaaaaucagcaaauuucuucuauguuauaaa

SEQ ID NO: 418026 - RNA, 32 nt, Homo Sapiens
cuggagagcugcuuauauacuuucgaaaguaa

SEQ ID NO: 418027 - RNA, 32 nt, Homo Sapiens
gggcaagagccccauguguccuggaagcugag

SEQ ID NO: 418028 - RNA, 31 nt, Homo Sapiens
ggagguggcagcugccugcccugccaaggau

SEQ ID NO: 418029 - RNA, 32 nt, Homo Sapiens
uugagucuaauguucguaagcaucauagaaau

SEQ ID NO: 418030 - RNA, 32 nt, Homo Sapiens
aaucuggagaucuggacugcugccccuuagau

SEQ ID NO: 418031 - RNA, 32 nt, Homo Sapiens
gccgacccaagcaccgggcgcuaaggcggccg

SEQ ID NO: 418032 - RNA, 32 nt, Homo Sapiens
gccuggcccucccucccuagcccuuccagccu

SEQ ID NO: 418033 - RNA, 32 nt, Homo Sapiens
gaggggagccaggggagaaggguguggggauc

SEQ ID NO: 418034 - RNA, 32 nt, Homo Sapiens
gaaacgugaacaggcuugaaguauggcauguu

SEQ ID NO: 418035 - RNA, 32 nt, Homo Sapiens
aguuguuccucccccaccucagcccucuccug

SEQ ID NO: 418036 - RNA, 32 nt, Homo Sapiens
aagauucuugaucugcuucagagcagcuuuga

SEQ ID NO: 418037 - RNA, 32 nt, Homo Sapiens
guggagucggagccacugguccugcugcuggc

SEQ ID NO: 418038 - RNA, 32 nt, Homo Sapiens
cccaagguaucuuuccucucuugguguucuag

SEQ ID NO: 418039 - RNA, 32 nt, Homo Sapiens
ccgcacacuuauuccuccuccccucuucccgg

SEQ ID NO: 418040 - RNA, 32 nt, Homo Sapiens
aagguuuguuuuauauuucacugaauuguucu

SEQ ID NO: 418041 - RNA, 32 nt, Homo Sapiens
uuuauauacuaaagaaaaagcuuuacaagaua

SEQ ID NO: 418042 - RNA, 32 nt, Homo Sapiens
ggauagggaauauuuuaguucuuuaaauauau

SEQ ID NO: 418043 - RNA, 32 nt, Homo Sapiens
gaauaauuuuuaauuuuugucucuaaaauuag

SEQ ID NO: 418044 - RNA, 32 nt, Homo Sapiens
ugcuccagcuguucauaccacaucaguguuuc

SEQ ID NO: 418045 - RNA, 32 nt, Homo Sapiens
uaaauguguauauaugugaauaaaccuauagc

SEQ ID NO: 418046 - RNA, 32 nt, Homo Sapiens
uuuuccuguuuuuauuuugguauuaagucguu

SEQ ID NO: 418047 - RNA, 32 nt, Homo Sapiens
aaauauuccaguugguaaaucuaacauugcua

SEQ ID NO: 418048 - RNA, 32 nt, Homo Sapiens
ccuugccuagauucacagaaauccaaagcugu

SEQ ID NO: 418049 - RNA, 32 nt, Homo Sapiens
acuugguuuuuuuuuucuuaaauauguauaug

SEQ ID NO: 418050 - RNA, 32 nt, Homo Sapiens
aaguauaucccauggauauacuuaugucuucu

SEQ ID NO: 418051 - RNA, 32 nt, Homo Sapiens
uggccuugagggugggagagagccagcuccuc

SEQ ID NO: 418052 - RNA, 32 nt, Homo Sapiens
guuguguucgaaauugguggguucuuggucuc

SEQ ID NO: 418053 - RNA, 32 nt, Homo Sapiens
auaggucaguuauuuuauaguauuucccucaa

SEQ ID NO: 418054 - RNA, 32 nt, Homo Sapiens
aguaaaucuuuuaucaacuauauacugguguu

SEQ ID NO: 418055 - RNA, 32 nt, Homo Sapiens
uugaauuagagcauuuuugaaacguugggguu

SEQ ID NO: 418056 - RNA, 31 nt, Homo Sapiens
ucggguuguggcuuagguucagugcgaucca

SEQ ID NO: 418057 - RNA, 32 nt, Homo Sapiens
aguuauguggaaaaaguaaggcugggaagucg

SEQ ID NO: 418058 - RNA, 32 nt, Homo Sapiens
gggcgcuaccccugcgcccccacacacaguag

SEQ ID NO: 418059 - RNA, 32 nt, Homo Sapiens
augccuggccccagcccugaaucuugucuacu

SEQ ID NO: 418060 - RNA, 32 nt, Homo Sapiens
cacuggaaaggggucuguggcuggggaauaga

SEQ ID NO: 418061 - RNA, 32 nt, Homo Sapiens
uuccugugaagcggcauaauuugucuccauug

SEQ ID NO: 418062 - RNA, 32 nt, Homo Sapiens
acaugugagcuguuuuuggaaaacgaagaugg

SEQ ID NO: 418063 - RNA, 32 nt, Homo Sapiens
ccauauuugccggcgcggcccgagccgccgac

SEQ ID NO: 418064 - RNA, 32 nt, Homo Sapiens
auuguggucuggcuuccacuuccuucacuuca

SEQ ID NO: 418065 - RNA, 32 nt, Homo Sapiens
uaaucacagcucugggaaaaacaacgaaacuu

SEQ ID NO: 418066 - RNA, 32 nt, Homo Sapiens
cuuuucaaaaauuugauuaaaugguuuuauag

SEQ ID NO: 418067 - RNA, 32 nt, Homo Sapiens
cuugaaguucccucugcugagucgcccuugug

SEQ ID NO: 418068 - RNA, 32 nt, Homo Sapiens
ggccaagcugaggaggugcugcaggucccguc

SEQ ID NO: 418069 - RNA, 32 nt, Homo Sapiens
cucagcgcuccgcuccucccaguuccuaagag

SEQ ID NO: 418070 - RNA, 32 nt, Homo Sapiens
aagugaagaauauuuuauuuggauuuuguuuc

SEQ ID NO: 418071 - RNA, 32 nt, Homo Sapiens
ucugaguuaaugcugaugugugacaaagaaca

SEQ ID NO: 418072 - RNA, 32 nt, Homo Sapiens
aaaguucuuuauuugcauuaaaguauguccaa

SEQ ID NO: 418073 - RNA, 32 nt, Homo Sapiens
aauuauggcuuauauuuagaaaugacugcauu

SEQ ID NO: 418074 - RNA, 32 nt, Homo Sapiens
ccuagagguuacaaccacaggauguagcuugg

SEQ ID NO: 418075 - RNA, 32 nt, Homo Sapiens
ggacgccccgucuggauuugucccguaggccc

SEQ ID NO: 418076 - RNA, 32 nt, Homo Sapiens
cacccugcugcugcuccucccugugacccaga

SEQ ID NO: 418077 - RNA, 32 nt, Homo Sapiens
ccggagccgcgugagccugcggggccauggag

SEQ ID NO: 418078 - RNA, 32 nt, Homo Sapiens
ccaaggacagacuguagaggauccacaucagg

SEQ ID NO: 418079 - RNA, 32 nt, Homo Sapiens
ucucauguauaaaugcuaucacaugcaaaaag

SEQ ID NO: 418080 - RNA, 29 nt, Homo Sapiens
ggauccauauguauuuacuauccuuucuu

SEQ ID NO: 418081 - RNA, 32 nt, Homo Sapiens
agcaagcuauacuguccagagcccucccuccc

SEQ ID NO: 418082 - RNA, 32 nt, Homo Sapiens
agccaauggaaaugcguggaaguuuuaaccuu

SEQ ID NO: 418083 - RNA, 32 nt, Homo Sapiens
cccaaaaguauuucaauucuacuucauuaaaa

SEQ ID NO: 418084 - RNA, 32 nt, Homo Sapiens
gcggcagcggcuuuggacgagggcagaaccac

SEQ ID NO: 418085 - RNA, 32 nt, Homo Sapiens
cggcggcccaaccggcgugagagcgcggggcc

SEQ ID NO: 418086 - RNA, 32 nt, Homo Sapiens
gaauguuuuucugcaacagccaaaauagaaug

SEQ ID NO: 418087 - RNA, 32 nt, Homo Sapiens
gugagcaguguaaagaaagaaugguaauuaua

SEQ ID NO: 418088 - RNA, 32 nt, Homo Sapiens
aaauaaaaacaacagcagcaggcugucccuga

SEQ ID NO: 418089 - RNA, 32 nt, Homo Sapiens
cacuggggauaccauggcgaaaaacaacuuug

SEQ ID NO: 418090 - RNA, 32 nt, Homo Sapiens
gguuaccaguguuugaaagauguauggugauc

SEQ ID NO: 418091 - RNA, 32 nt, Homo Sapiens
ugagccugcuucugccugcuuuccaccucccc

SEQ ID NO: 418092 - RNA, 32 nt, Homo Sapiens
ccgcgggccuuccuagccgccauggaggacgg

SEQ ID NO: 418093 - RNA, 32 nt, Homo Sapiens
cauuagugugaacacaggacagcuucgcucuu

SEQ ID NO: 418094 - RNA, 29 nt, Homo Sapiens
ugcgggcggggacaugguaaccuggucca

SEQ ID NO: 418095 - RNA, 32 nt, Homo Sapiens
ugcuccuuugauuuaaugggguguacuggggc

SEQ ID NO: 418096 - RNA, 32 nt, Homo Sapiens
aaaugccagaugcuuauaaaaccaucagaucu

SEQ ID NO: 418097 - RNA, 32 nt, Homo Sapiens
gggguaggcccaaaauauauacaggaucuuac

SEQ ID NO: 418098 - RNA, 32 nt, Homo Sapiens
ggccuccucacagacugccaagucccagagcc

SEQ ID NO: 418099 - RNA, 32 nt, Homo Sapiens
ggaaccccagcccacucccccaucccuccucc

SEQ ID NO: 418100 - RNA, 32 nt, Homo Sapiens
cgggcugccaaugggaaaugcagggcagugug

SEQ ID NO: 418101 - RNA, 32 nt, Homo Sapiens
agugguuacccucaaggcaacaaguauuaucc

SEQ ID NO: 418102 - RNA, 32 nt, Homo Sapiens
gggucccgaggguagcgucccagagccgcggg

SEQ ID NO: 418103 - RNA, 32 nt, Homo Sapiens
aggugcuagguagcagccucccggcccucggg

SEQ ID NO: 418104 - RNA, 32 nt, Homo Sapiens
auccguggagagcgggcuuagaaguggcgguu

SEQ ID NO: 418105 - RNA, 32 nt, Homo Sapiens
ugcugcuuuacuaacugacguguuggaccacc

SEQ ID NO: 418106 - RNA, 32 nt, Homo Sapiens
uuuuaucgaaggaaacugagagucaccuucuu

SEQ ID NO: 418107 - RNA, 32 nt, Homo Sapiens
agccgccgcugggaccucggcgcgccccgcgu

SEQ ID NO: 418108 - RNA, 32 nt, Homo Sapiens
aacuuuucauauuuaguuuauuuuguuagcgu

SEQ ID NO: 418109 - RNA, 31 nt, Homo Sapiens
uuguucugggaggugguuccaagggugucug

SEQ ID NO: 418110 - RNA, 32 nt, Homo Sapiens
ccggguuaugacgacccccaauaaaggaaaca

SEQ ID NO: 418111 - RNA, 32 nt, Homo Sapiens
ccuggcugccagcacgguaccugccaccagcc

SEQ ID NO: 418112 - RNA, 32 nt, Homo Sapiens
ccgagccgagcgagaagagcggcagagccuua

SEQ ID NO: 418113 - RNA, 32 nt, Homo Sapiens
ccccuccuuagcccaaggucuuccucaugcuu

SEQ ID NO: 418114 - RNA, 32 nt, Homo Sapiens
auaaauaaaaauuuauacagcauguauaauuu

SEQ ID NO: 418115 - RNA, 32 nt, Homo Sapiens
acacaggccuggcgcgggguggcugcugcccc

SEQ ID NO: 418116 - RNA, 32 nt, Homo Sapiens
caauacugacacaaaugcuggugcccauucag

SEQ ID NO: 418117 - RNA, 32 nt, Homo Sapiens
cuaaugaaugcucaaauuucuaaugagaaacu

SEQ ID NO: 418118 - RNA, 32 nt, Homo Sapiens
gcccguggacagagccagagggcaguggcgcu

SEQ ID NO: 418119 - RNA, 32 nt, Homo Sapiens
aauaguaaaggccucaacguuauucuuuacuu

SEQ ID NO: 418120 - RNA, 32 nt, Homo Sapiens
uguuaaauauccaaguuucuugaugcagagac

SEQ ID NO: 418121 - RNA, 32 nt, Homo Sapiens
acuuccuucccagccaggauccugccccaagu

SEQ ID NO: 418122 - RNA, 32 nt, Homo Sapiens
aggcugucggcgcgccgcggcccgcaggcacc

SEQ ID NO: 418123 - RNA, 32 nt, Homo Sapiens
acugugugaauucagacuauuaaaaacaucau

SEQ ID NO: 418124 - RNA, 32 nt, Homo Sapiens
ccauccuaccccacccaaagcugccuuccugg

SEQ ID NO: 418125 - RNA, 32 nt, Homo Sapiens
ggcccuccacacuuccugggaggucagagaca

SEQ ID NO: 418126 - RNA, 32 nt, Homo Sapiens
agagagaaaaagacacaggaaagcacacauau

SEQ ID NO: 418127 - RNA, 32 nt, Homo Sapiens
cauuaagagaaugucauuucucauaguguuuc

SEQ ID NO: 418128 - RNA, 32 nt, Homo Sapiens
agcgggcccgggcggcgcgcgaucgaggucgg

SEQ ID NO: 418129 - RNA, 32 nt, Homo Sapiens
gggguggguauuuggguccgacugagacuugg

SEQ ID NO: 418130 - RNA, 32 nt, Homo Sapiens
ucaaacuguaaaaauaacauaauauguaauuu

SEQ ID NO: 418131 - RNA, 32 nt, Homo Sapiens
caggucuucauacuuuuacuuaauuuucuuua

SEQ ID NO: 418132 - RNA, 32 nt, Homo Sapiens
gggacugaccugggcuugggggaagggacguc

SEQ ID NO: 418133 - RNA, 32 nt, Homo Sapiens
agauacaaaacuuauuuccauguuucugaauc

SEQ ID NO: 418134 - RNA, 32 nt, Homo Sapiens
gcugccacccgggccuggagccccacacccga

SEQ ID NO: 418135 - RNA, 32 nt, Homo Sapiens
guuaagagggucauguggcaugauuggagaac

SEQ ID NO: 418136 - RNA, 32 nt, Homo Sapiens
ugauaucaugaauaaacuuacacuggacagaa

SEQ ID NO: 418137 - RNA, 32 nt, Homo Sapiens
cagaugguggaauugcacgacuuagaguauuc

SEQ ID NO: 418138 - RNA, 32 nt, Homo Sapiens
cccaauuucuuacaucauaucugugcuacccu

SEQ ID NO: 418139 - RNA, 32 nt, Homo Sapiens
acccucgcgucgucgccgccgccgccgcccag

SEQ ID NO: 418140 - RNA, 32 nt, Homo Sapiens
agaagaauucuauguaucuuaaacuaugaucu

SEQ ID NO: 418141 - RNA, 32 nt, Homo Sapiens
uguuucaaccaaucggaagugauuuaacuaga

SEQ ID NO: 418142 - RNA, 32 nt, Homo Sapiens
acccugggacuggggauucacugugaaacccu

SEQ ID NO: 418143 - RNA, 32 nt, Homo Sapiens
caguguguggaggggcaggagcgugaugcaga

SEQ ID NO: 418144 - RNA, 29 nt, Homo Sapiens
agcuauacuguagcuuuuuuuuuuuuuuu

SEQ ID NO: 418145 - RNA, 32 nt, Homo Sapiens
uaaacuuugacaaaaaugguuuugaauagauc

SEQ ID NO: 418146 - RNA, 32 nt, Homo Sapiens
accauaagauaaaaauacuuucuaccuacagc

SEQ ID NO: 418147 - RNA, 32 nt, Homo Sapiens
auuagcugggugucguggugcgugccuauaau

SEQ ID NO: 418148 - RNA, 32 nt, Homo Sapiens
uuuuuucuuuuuguuuuuuuaaguaagauagg

SEQ ID NO: 418149 - RNA, 32 nt, Homo Sapiens
uuugccuuuucucagggcaaaucuucaguguu

SEQ ID NO: 418150 - RNA, 32 nt, Homo Sapiens
cuggacgggccgggaaaggagccgggcgccug

SEQ ID NO: 418151 - RNA, 32 nt, Homo Sapiens
uccuccaggacacaugugugcagaaacggugg

SEQ ID NO: 418152 - RNA, 32 nt, Homo Sapiens
ggccugaaggauagccccccuugcgcuucccu

SEQ ID NO: 418153 - RNA, 32 nt, Homo Sapiens
ugcggucgccugggagcugccgccagggccag

SEQ ID NO: 418154 - RNA, 32 nt, Homo Sapiens
ggggcacugucauguaggagucugcuuaggcu

SEQ ID NO: 418155 - RNA, 32 nt, Homo Sapiens
augggaguuaagugcugcuugucuucccagug

SEQ ID NO: 418156 - RNA, 32 nt, Homo Sapiens
ucacguccugaacaugagccuccuccucuccu

SEQ ID NO: 418157 - RNA, 32 nt, Homo Sapiens
gcuaauauugacagaaggugcaguuuuugggu

SEQ ID NO: 418158 - RNA, 32 nt, Homo Sapiens
cagagcucccugcgcucgcucaucuccgcucu

SEQ ID NO: 418159 - RNA, 32 nt, Homo Sapiens
accuggcugucaucgggcuggaugccuaccug

SEQ ID NO: 418160 - RNA, 32 nt, Homo Sapiens
agggcuuucugcucuggccuuaacucacaugg

SEQ ID NO: 418161 - RNA, 32 nt, Homo Sapiens
guuuacaaacuuccugaauauuaucaaugcag

SEQ ID NO: 418162 - RNA, 32 nt, Homo Sapiens
ugacugcccacccagcuguggcgggaggugca

SEQ ID NO: 418163 - RNA, 32 nt, Homo Sapiens
acagaagcagugcugcccggggccucaucugg

SEQ ID NO: 418164 - RNA, 32 nt, Homo Sapiens
agaccuaccuagcuggcccccaucugcagagc

SEQ ID NO: 418165 - RNA, 32 nt, Homo Sapiens
gacgcuggggccggagcugcugccgccgucua

SEQ ID NO: 418166 - RNA, 32 nt, Homo Sapiens
acaugauguguccaagucuguaucacuucugg

SEQ ID NO: 418167 - RNA, 32 nt, Homo Sapiens
uggccaaaguaccaccuuugagaccuaaguuc

SEQ ID NO: 418168 - RNA, 32 nt, Homo Sapiens
ucuuuuguuuuauuuaggauuuucauaaucac

SEQ ID NO: 418169 - RNA, 32 nt, Homo Sapiens
gaucuuccaggccuauggauaaucaggaggca

SEQ ID NO: 418170 - RNA, 32 nt, Homo Sapiens
guacugaaugugggaaaggcuacacuugucuu

SEQ ID NO: 418171 - RNA, 32 nt, Homo Sapiens
aaugucacuccuuuugagggacagcacagccu

SEQ ID NO: 418172 - RNA, 32 nt, Homo Sapiens
gcggcgagcgagcuggggagggggcuucuccg

SEQ ID NO: 418173 - RNA, 32 nt, Homo Sapiens
ggcuagagugcaguagcgugaucauagcuuac

SEQ ID NO: 418174 - RNA, 32 nt, Homo Sapiens
agaaauacaaaaugaaauaaaaaggaugcaaa

SEQ ID NO: 418175 - RNA, 32 nt, Homo Sapiens
uacuuuaugcaaacaggcaaaauugguaccaa

SEQ ID NO: 418176 - RNA, 32 nt, Homo Sapiens
gccccucucuggcugcagagcccucuccucag

SEQ ID NO: 418177 - RNA, 32 nt, Homo Sapiens
ccggagagaacgaagccucggcugggagcgga

SEQ ID NO: 418178 - RNA, 32 nt, Homo Sapiens
uuacauucuuuuucuuuuuuuuuuucucuaau

SEQ ID NO: 418179 - RNA, 32 nt, Homo Sapiens
aagggugcccuccaccucucccuccugcuggu

SEQ ID NO: 418180 - RNA, 32 nt, Homo Sapiens
accgccacagccccgcuuuguaaccagggaau

SEQ ID NO: 418181 - RNA, 32 nt, Homo Sapiens
cuccacgauaaggacaugcaacacguguuucu

SEQ ID NO: 418182 - RNA, 32 nt, Homo Sapiens
cgaauugcucacaaggaaguguagccauuugu

SEQ ID NO: 418183 - RNA, 32 nt, Homo Sapiens
uuucacccagcaugugaagaacacagucaagu

SEQ ID NO: 418184 - RNA, 32 nt, Homo Sapiens
gggugccucugugagggugcugccaaaagaga

SEQ ID NO: 418185 - RNA, 32 nt, Homo Sapiens
auuguaucuaucuguagucguuuaaugugaau

SEQ ID NO: 418186 - RNA, 32 nt, Homo Sapiens
gaucacaaguacauaaacagauacaaaguauu

SEQ ID NO: 418187 - RNA, 32 nt, Homo Sapiens
accaagaucuccaacagccaguguguguuucc

SEQ ID NO: 418188 - RNA, 32 nt, Homo Sapiens
cuuuuagaaaauaaaaugguuuuuaaagcaua

SEQ ID NO: 418189 - RNA, 32 nt, Homo Sapiens
gcuuuuucacaagugacaaaacacauuaaaag

SEQ ID NO: 418190 - RNA, 32 nt, Homo Sapiens
cucucagaggaaugagcggggagguuggauuu

SEQ ID NO: 418191 - RNA, 32 nt, Homo Sapiens
gguuaagaugagagaggcuagaguuauauaca

SEQ ID NO: 418192 - RNA, 32 nt, Homo Sapiens
ccacaucgagaagacccucaugcugaaugagg

SEQ ID NO: 418193 - RNA, 32 nt, Homo Sapiens
ugagaccucacuguuccuggcucuucauccuc

SEQ ID NO: 418194 - RNA, 32 nt, Homo Sapiens
accacacuugugacaaggcuuucuguucacaa

SEQ ID NO: 418195 - RNA, 32 nt, Homo Sapiens
agggaagaccucucugcagagguagugacuug

SEQ ID NO: 418196 - RNA, 32 nt, Homo Sapiens
ugugagcccagaugaagacugggugugcaacu

SEQ ID NO: 418197 - RNA, 32 nt, Homo Sapiens
ggagagaauacaauaacuacuacaguaaaguc

SEQ ID NO: 418198 - RNA, 32 nt, Homo Sapiens
acacgacagauuucuagauacuuuuugcugcu

SEQ ID NO: 418199 - RNA, 32 nt, Homo Sapiens
agugacaaaaagaaaaaugaaguaaaagaaua

SEQ ID NO: 418200 - RNA, 32 nt, Homo Sapiens
auggcaaaggguggggccuggucgccaagagg

SEQ ID NO: 418201 - RNA, 32 nt, Homo Sapiens
cgcgccccgagcccgcgcucuccuucccccgc

SEQ ID NO: 418202 - RNA, 32 nt, Homo Sapiens
auugaaguuacaguacaaaaauucucugaaug

SEQ ID NO: 418203 - RNA, 32 nt, Homo Sapiens
ucuuuguuuucuucuuuuguguucuaaaaaaa

SEQ ID NO: 418204 - RNA, 32 nt, Homo Sapiens
gcauccccuuguagccuuucucaguguccgug

SEQ ID NO: 418205 - RNA, 29 nt, Homo Sapiens
ggugaugugacuuuucuucuuacaugcug

SEQ ID NO: 418206 - RNA, 32 nt, Homo Sapiens
aacuucuguauucguggaccaaacugaagcua

SEQ ID NO: 418207 - RNA, 29 nt, Homo Sapiens
ugugaaauauguauacuuuggggggaucu

SEQ ID NO: 418208 - RNA, 32 nt, Homo Sapiens
aagcugagugacccugaggccuuaagcuuccc

SEQ ID NO: 418209 - RNA, 32 nt, Homo Sapiens
uccagggccacuuuugaccuuaauccauguug

SEQ ID NO: 418210 - RNA, 32 nt, Homo Sapiens
ugagcuacuaguguggcugugccugugggucu

SEQ ID NO: 418211 - RNA, 32 nt, Homo Sapiens
guaccuggaaaugugaaucuggacucuuaccu

SEQ ID NO: 418212 - RNA, 32 nt, Homo Sapiens
uugccggacucuuuucuggccucuguucuguc

SEQ ID NO: 418213 - RNA, 32 nt, Homo Sapiens
ccccacacccucaggccgagauccgugagaga

SEQ ID NO: 418214 - RNA, 32 nt, Homo Sapiens
uuuggucuccaccccccuccccccgccccgca

SEQ ID NO: 418215 - RNA, 32 nt, Homo Sapiens
aacacgcaccucacacagcuguaaagggagga

SEQ ID NO: 418216 - RNA, 27 nt, Homo Sapiens
cauucuccaagcuucagcccccuccuu

SEQ ID NO: 418217 - RNA, 32 nt, Homo Sapiens
aaagacaacuguggggccgggcggcggcaagg

SEQ ID NO: 418218 - RNA, 32 nt, Homo Sapiens
gugucuccugggucugcccacccguggccaag

SEQ ID NO: 418219 - RNA, 32 nt, Homo Sapiens
cugggacgaaguuacagaacugagauucucgg

SEQ ID NO: 418220 - RNA, 32 nt, Homo Sapiens
uuuaagaauguuucugaaguuacguuuuguga

SEQ ID NO: 418221 - RNA, 32 nt, Homo Sapiens
ugguuuuacuuuuaaccuauuuaugcuuucau

SEQ ID NO: 418222 - RNA, 32 nt, Homo Sapiens
accacccuggaaauucugccuuauuauuucuu

SEQ ID NO: 418223 - RNA, 32 nt, Homo Sapiens
ucacuuaaaaauuaaaaacaucaguacuacca

SEQ ID NO: 418224 - RNA, 32 nt, Homo Sapiens
ucugugcuuugaaagcacuggauaaauuguuu

SEQ ID NO: 418225 - RNA, 32 nt, Homo Sapiens
gacuugcucccucccgggcugcggcugcugca

SEQ ID NO: 418226 - RNA, 32 nt, Homo Sapiens
gauauuccaaaauaaaaggacucuggaagauu

SEQ ID NO: 418227 - RNA, 32 nt, Homo Sapiens
cugcaguuuuuccgcgauaguuuggggcaguu

SEQ ID NO: 418228 - RNA, 32 nt, Homo Sapiens
guucgucguggcggggagccggagccugaccg

SEQ ID NO: 418229 - RNA, 32 nt, Homo Sapiens
gccuguuugcugcacaucugccugcagagcca

SEQ ID NO: 418230 - RNA, 32 nt, Homo Sapiens
caaauuacugaagagggagggagggaggagug

SEQ ID NO: 418231 - RNA, 32 nt, Homo Sapiens
agguauuuuccauuuuaauguguaauggagcc

SEQ ID NO: 418232 - RNA, 32 nt, Homo Sapiens
gaacagccauuccggcagcaucaggauggggc

SEQ ID NO: 418233 - RNA, 32 nt, Homo Sapiens
gcagccuuuucuccagugaggagugaacagug

SEQ ID NO: 418234 - RNA, 32 nt, Homo Sapiens
uuucugccacagaaacaaaauauugggaaaga

SEQ ID NO: 418235 - RNA, 32 nt, Homo Sapiens
aggacucaucucccuuccuucucagggggucc

SEQ ID NO: 418236 - RNA, 32 nt, Homo Sapiens
guagcuuuucaaagcuuuaaauuuguagaacu

SEQ ID NO: 418237 - RNA, 30 nt, Homo Sapiens
caaccacgcugugcugcgcgcgcucaugca

SEQ ID NO: 418238 - RNA, 32 nt, Homo Sapiens
uuucucaggccuuuuuuggauaccuuuaguag

SEQ ID NO: 418239 - RNA, 32 nt, Homo Sapiens
cccugauggcagaaaaucaugauacaaaaaug

SEQ ID NO: 418240 - RNA, 32 nt, Homo Sapiens
agccaaguguaaauuggugauuuagagugcuu

SEQ ID NO: 418241 - RNA, 32 nt, Homo Sapiens
gguuucaccguguuggccaggcuggucucaaa

SEQ ID NO: 418242 - RNA, 32 nt, Homo Sapiens
cuccccuuccuggcccucccccaaccccaagu

SEQ ID NO: 418243 - RNA, 32 nt, Homo Sapiens
agguguuauugguuuucauauuaagauaguga

SEQ ID NO: 418244 - RNA, 32 nt, Homo Sapiens
caauggcacaaccuccaccuccuggguucaag

SEQ ID NO: 418245 - RNA, 32 nt, Homo Sapiens
cuacgucccgccgccgucgccaucgccgcggc

SEQ ID NO: 418246 - RNA, 32 nt, Homo Sapiens
gauuucaccauguuggccaggcuggucucaaa

SEQ ID NO: 418247 - RNA, 32 nt, Homo Sapiens
aaccuaucuuuauuagaggaaaaucucaaucu

SEQ ID NO: 418248 - RNA, 32 nt, Homo Sapiens
uucagcauauccucaugccagaugaugaaggu

SEQ ID NO: 418249 - RNA, 32 nt, Homo Sapiens
aauucugugcuaauuuuguggccagaaugcgg

SEQ ID NO: 418250 - RNA, 32 nt, Homo Sapiens
ggaaacuuuucucuucaaauuugaaagcuguu

SEQ ID NO: 418251 - RNA, 32 nt, Homo Sapiens
uccauuuuacagauaugaucauguaaaacuua

SEQ ID NO: 418252 - RNA, 32 nt, Homo Sapiens
ccacgcaggggcucugagcccgggccacgcag

SEQ ID NO: 418253 - RNA, 32 nt, Homo Sapiens
ugauggcagccagaagacgucucuauguugcg

SEQ ID NO: 418254 - RNA, 32 nt, Homo Sapiens
uucuaacaaaaauaaaugcaugaagagacaua

SEQ ID NO: 418255 - RNA, 32 nt, Homo Sapiens
gacguagacaggaugccaggggccugaccagc

SEQ ID NO: 418256 - RNA, 32 nt, Homo Sapiens
uuuauuuguaaaccauuguaacuauuaaccuu

SEQ ID NO: 418257 - RNA, 32 nt, Homo Sapiens
agggcuucaucccugugaaggcacagggccug

SEQ ID NO: 418258 - RNA, 30 nt, Homo Sapiens
aauucuaaggagcuugaucaggagggcugg

SEQ ID NO: 418259 - RNA, 32 nt, Homo Sapiens
uucuguuuccuuuauggaucucaaauuuucau

SEQ ID NO: 418260 - RNA, 32 nt, Homo Sapiens
ugguuucugccuaccacuuccuccccuaccac

SEQ ID NO: 418261 - RNA, 32 nt, Homo Sapiens
cuccacccucuaacccccacuccagcugcaga

SEQ ID NO: 418262 - RNA, 32 nt, Homo Sapiens
guggagcuagaguauggagaacaaaacuaaca

SEQ ID NO: 418263 - RNA, 32 nt, Homo Sapiens
uugagacaggcuggaguccagagccuucauuc

SEQ ID NO: 418264 - RNA, 30 nt, Homo Sapiens
ugcccgauggggcgcgcggccccggagaug

SEQ ID NO: 418265 - RNA, 32 nt, Homo Sapiens
auugcucugaagacugcacugguugcugcaaa

SEQ ID NO: 418266 - RNA, 32 nt, Homo Sapiens
agaugaccugaccaaaaacuuuacaggauuca

SEQ ID NO: 418267 - RNA, 32 nt, Homo Sapiens
accugccaaauggcaagaguuuccaagcaaac

SEQ ID NO: 418268 - RNA, 31 nt, Homo Sapiens
ccgggcaguuaggaucgucuauuggauguga

SEQ ID NO: 418269 - RNA, 32 nt, Homo Sapiens
ugugggugcaucuggauguacacacaccugaa

SEQ ID NO: 418270 - RNA, 32 nt, Homo Sapiens
uucgcuccuacugugagacaagaugcggugau

SEQ ID NO: 418271 - RNA, 32 nt, Homo Sapiens
acgagaucaggaaacugagaccauccuagcca

SEQ ID NO: 418272 - RNA, 32 nt, Homo Sapiens
agaagggggcuuugugggguccuaaauuuuaa

SEQ ID NO: 418273 - RNA, 32 nt, Homo Sapiens
aacaauggcaaugccaguggaaccacacugcu

SEQ ID NO: 418274 - RNA, 32 nt, Homo Sapiens
ucuccuuuucuuuucuucaauaaaaagaauua

SEQ ID NO: 418275 - RNA, 32 nt, Homo Sapiens
ccaacccgcgcgccagacacugcccuaaccau

SEQ ID NO: 418276 - RNA, 32 nt, Homo Sapiens
uaaacagccgcggcgggcaggccaggacuguc

SEQ ID NO: 418277 - RNA, 32 nt, Homo Sapiens
aaaaaacaaaaguaacaacgaaauacucccag

SEQ ID NO: 418278 - RNA, 32 nt, Homo Sapiens
agcacuaaaaauuuuuucauaaccuuucauaa

SEQ ID NO: 418279 - RNA, 32 nt, Homo Sapiens
aagagacccccgcuccagcccgcaggccggcu

SEQ ID NO: 418280 - RNA, 32 nt, Homo Sapiens
uugaggcaagcacuucuuuaucacaggugucu

SEQ ID NO: 418281 - RNA, 32 nt, Homo Sapiens
guauauuggauguuaaauccauauaugaugua

SEQ ID NO: 418282 - RNA, 32 nt, Homo Sapiens
uaggaucaagacauuuuuuaauguuaggcaga

SEQ ID NO: 418283 - RNA, 32 nt, Homo Sapiens
cuucagcauuuuucuuuuuucauuucauaauu

SEQ ID NO: 418284 - RNA, 32 nt, Homo Sapiens
ugguuuguuuuaauaucagguggauuuuuguu

SEQ ID NO: 418285 - RNA, 32 nt, Homo Sapiens
gcauaucagagcugaucuccuccaccuuucuc

SEQ ID NO: 418286 - RNA, 32 nt, Homo Sapiens
uguucggcuggaacugacccaggcuggacuug

SEQ ID NO: 418287 - RNA, 32 nt, Homo Sapiens
acaaaaccugguuuucccuaagcaccuuauuu

SEQ ID NO: 418288 - RNA, 32 nt, Homo Sapiens
gggaaagaggugggaaggagguccugggaggg

SEQ ID NO: 418289 - RNA, 32 nt, Homo Sapiens
aguguggggcuuugugucaucacaacauuaaa

SEQ ID NO: 418290 - RNA, 32 nt, Homo Sapiens
gucugucugucgcccuucucccggcccucacu

SEQ ID NO: 418291 - RNA, 32 nt, Homo Sapiens
uaaccacgcggcacguggcagagccacagcgc

SEQ ID NO: 418292 - RNA, 32 nt, Homo Sapiens
gccccguuugccucccgcacccgcuccugcgc

SEQ ID NO: 418293 - RNA, 32 nt, Homo Sapiens
gccuugccgcccccugcccccggccuccgacc

SEQ ID NO: 418294 - RNA, 32 nt, Homo Sapiens
aagcugccauauauuuuguagacaaguauggc

SEQ ID NO: 418295 - RNA, 32 nt, Homo Sapiens
uaggaagaggccgcugcaggguggcaucuuag

SEQ ID NO: 418296 - RNA, 32 nt, Homo Sapiens
ucugcauuccugcaggauuggcuguuccuugg

SEQ ID NO: 418297 - RNA, 32 nt, Homo Sapiens
guaaaccccacuucccugacacuagccagcaa

SEQ ID NO: 418298 - RNA, 32 nt, Homo Sapiens
ggccgcggccgccgcgcacgcccucggaagac

SEQ ID NO: 418299 - RNA, 32 nt, Homo Sapiens
aaaaagugaacaguugcuguucuuacaucugu

SEQ ID NO: 418300 - RNA, 32 nt, Homo Sapiens
caguuauagguuuagagaaaaauugaagggaa

SEQ ID NO: 418301 - RNA, 32 nt, Homo Sapiens
aucggccagcagcuggggaugacguucaucag

SEQ ID NO: 418302 - RNA, 32 nt, Homo Sapiens
cccuugugucaacuccggcagcucaagacccc

SEQ ID NO: 418303 - RNA, 32 nt, Homo Sapiens
uucccaaagggagcagggagaugggaauagaa

SEQ ID NO: 418304 - RNA, 32 nt, Homo Sapiens
gccuggagcugcgugagagugaaaccaagaag

SEQ ID NO: 418305 - RNA, 32 nt, Homo Sapiens
cccuuguaccccaucccuuccuccccagucua

SEQ ID NO: 418306 - RNA, 32 nt, Homo Sapiens
gucuuugugggaaaaagcuugugaaaaucuca

SEQ ID NO: 418307 - RNA, 32 nt, Homo Sapiens
gcggacaccagccuugcagagcccagggagau

SEQ ID NO: 418308 - RNA, 32 nt, Homo Sapiens
cgagcgcggguggcggcuguggcggcggaggg

SEQ ID NO: 418309 - RNA, 32 nt, Homo Sapiens
ugcaaggaggaagagggcgagggauaacuugg

SEQ ID NO: 418310 - RNA, 32 nt, Homo Sapiens
gugcucuguuuccuuuuggaguuucuucucca

SEQ ID NO: 418311 - RNA, 32 nt, Homo Sapiens
ugucucuuaaaaaacgaugaugaugaacacag

SEQ ID NO: 418312 - RNA, 32 nt, Homo Sapiens
uacaugcugcgcauguuuucuucauucguaug

SEQ ID NO: 418313 - RNA, 32 nt, Homo Sapiens
acaguagcuaugauggugccacuacacuccag

SEQ ID NO: 418314 - RNA, 32 nt, Homo Sapiens
gcaggcggggaagaggucggagaggcagcgcu

SEQ ID NO: 418315 - RNA, 32 nt, Homo Sapiens
ucacgugugaccucagacaagucacgcccucu

SEQ ID NO: 418316 - RNA, 32 nt, Homo Sapiens
uguuggggucuguacagaugaugcuacccaau

SEQ ID NO: 418317 - RNA, 32 nt, Homo Sapiens
aggcgccaggugacccuguuuccccgggcugg

SEQ ID NO: 418318 - RNA, 32 nt, Homo Sapiens
uugaggcaaaaauuuauuuuuauuucuauagu

SEQ ID NO: 418319 - RNA, 32 nt, Homo Sapiens
acacagggacccagcccuucucuucuucccca

SEQ ID NO: 418320 - RNA, 32 nt, Homo Sapiens
cgcccggccaguucaauggauuuuaaaaauua

SEQ ID NO: 418321 - RNA, 32 nt, Homo Sapiens
ugauccaaugccuauacccccauuguaucuug

SEQ ID NO: 418322 - RNA, 32 nt, Homo Sapiens
gcaugccuuguacccccaccgugcagguugug

SEQ ID NO: 418323 - RNA, 32 nt, Homo Sapiens
gccgcgccggaucugcucggccgcccgggacc

SEQ ID NO: 418324 - RNA, 32 nt, Homo Sapiens
uuuuuuugcucuucucaucuuuuccaacagug

SEQ ID NO: 418325 - RNA, 32 nt, Homo Sapiens
gggugcucugggauugugcccaacuuccuaac

SEQ ID NO: 418326 - RNA, 32 nt, Homo Sapiens
auagauuuuaauuuauacauaucaagaaaagu

SEQ ID NO: 418327 - RNA, 32 nt, Homo Sapiens
cugcugcacucugcuugggccuugaggucugu

SEQ ID NO: 418328 - RNA, 32 nt, Homo Sapiens
uugggaucuggggcuuccuggccuggccagag

SEQ ID NO: 418329 - RNA, 32 nt, Homo Sapiens
ucucauguguuucuuuccccugugcuggauua

SEQ ID NO: 418330 - RNA, 32 nt, Homo Sapiens
ccgacaguagcagaauggcauucuacaacaaa

SEQ ID NO: 418331 - RNA, 32 nt, Homo Sapiens
cucgugggggucggugaucuggagccgggccc

SEQ ID NO: 418332 - RNA, 32 nt, Homo Sapiens
cacugggguugggcuggggagaggaacaggcc

SEQ ID NO: 418333 - RNA, 32 nt, Homo Sapiens
ggugcucuggucugaccgaugugucucccaga

SEQ ID NO: 418334 - RNA, 32 nt, Homo Sapiens
ccuacucaggucucuggagcuccucucuucac

SEQ ID NO: 418335 - RNA, 32 nt, Homo Sapiens
cuuggcuuccaccccacccccacagugucccc

SEQ ID NO: 418336 - RNA, 32 nt, Homo Sapiens
ccaguacuuccacguuuuucaugccuuucucc

SEQ ID NO: 418337 - RNA, 32 nt, Homo Sapiens
uacccugccccuuugucuuauauccaauaaau

SEQ ID NO: 418338 - RNA, 32 nt, Homo Sapiens
ccccugccugagcuaagggaggucuuaucucu

SEQ ID NO: 418339 - RNA, 32 nt, Homo Sapiens
augggaaaguuccuuuuuuggcuuaacacuca

SEQ ID NO: 418340 - RNA, 32 nt, Homo Sapiens
ugagcagugggugcugcccagcagccccugag

SEQ ID NO: 418341 - RNA, 32 nt, Homo Sapiens
auuuuuugcucuucuugucuuuguaaucuauu

SEQ ID NO: 418342 - RNA, 32 nt, Homo Sapiens
gccccgcccccgcuuuccuaaccuugcugcuu

SEQ ID NO: 418343 - RNA, 30 nt, Homo Sapiens
ggcaagugggcgcagcaccagggaaaugua

SEQ ID NO: 418344 - RNA, 32 nt, Homo Sapiens
gccgaccacccuccccaaaaaagaaugacauc

SEQ ID NO: 418345 - RNA, 32 nt, Homo Sapiens
aaacacgaauguaggucagggauagaguggaa

SEQ ID NO: 418346 - RNA, 32 nt, Homo Sapiens
guagcaaauauguuccuugguuugguuaacau

SEQ ID NO: 418347 - RNA, 32 nt, Homo Sapiens
uucgccccgcagccucgcccccugcccacccg

SEQ ID NO: 418348 - RNA, 32 nt, Homo Sapiens
gccccagcgaggggcuguggggcaccuagagu

SEQ ID NO: 418349 - RNA, 32 nt, Homo Sapiens
ugccaguucacagaugcagaaacugagguaaa

SEQ ID NO: 418350 - RNA, 31 nt, Homo Sapiens
cucucacucuccuccgcucaaacucagcuca

SEQ ID NO: 418351 - RNA, 31 nt, Homo Sapiens
cguugcaguccucggaaccaggaccucggcg

SEQ ID NO: 418352 - RNA, 32 nt, Homo Sapiens
aaggaucccuucuccuucuguugacucuuucu

SEQ ID NO: 418353 - RNA, 32 nt, Homo Sapiens
auguguggacauccacacacagcgcugguugu

SEQ ID NO: 418354 - RNA, 32 nt, Homo Sapiens
ucgggacgcgccgagcuucgccgcucuuccag

SEQ ID NO: 418355 - RNA, 32 nt, Homo Sapiens
ggaguggaauaauucugaaguguguguuuugc

SEQ ID NO: 418356 - RNA, 32 nt, Homo Sapiens
ucugagguagaaguguuggggguggggggugg

SEQ ID NO: 418357 - RNA, 31 nt, Homo Sapiens
ggccuugugggccccacauaggguuuugggu

SEQ ID NO: 418358 - RNA, 32 nt, Homo Sapiens
gagauuuuuaccauuagugguuugauuuuaau

SEQ ID NO: 418359 - RNA, 32 nt, Homo Sapiens
cuagggcucagcagcugcuugugggcucaaaa

SEQ ID NO: 418360 - RNA, 30 nt, Homo Sapiens
cugcuaugaugaugaaugcugucuuuguaa

SEQ ID NO: 418361 - RNA, 32 nt, Homo Sapiens
cccgugaaaccuuuccuucuccuacucggcca

SEQ ID NO: 418362 - RNA, 32 nt, Homo Sapiens
uuaaaagaauaaaaugacuugguuugcgcuug

SEQ ID NO: 418363 - RNA, 32 nt, Homo Sapiens
auggcgcaggcaccccuguucuccucccagag

SEQ ID NO: 418364 - RNA, 28 nt, Homo Sapiens
ucuaaugugcugcccaggauggccucuu

SEQ ID NO: 418365 - RNA, 32 nt, Homo Sapiens
caaaugcugaagauuguuuggagucagaagug

SEQ ID NO: 418366 - RNA, 32 nt, Homo Sapiens
gaaacuuuucuuucuggagccagauaccaaua

SEQ ID NO: 418367 - RNA, 32 nt, Homo Sapiens
gguggggaagcagcagaacuagguuuugagcc

SEQ ID NO: 418368 - RNA, 32 nt, Homo Sapiens
caugacuucuauuuggcaccggcccgucuguc

SEQ ID NO: 418369 - RNA, 32 nt, Homo Sapiens
cucagcauggucuuaugcacaggaacuaaagg

SEQ ID NO: 418370 - RNA, 32 nt, Homo Sapiens
ccggcgccacacuccgggagcacagcauccuc

SEQ ID NO: 418371 - RNA, 32 nt, Homo Sapiens
agaacuguaagaaauaaauguuuguuguuuaa

SEQ ID NO: 418372 - RNA, 32 nt, Homo Sapiens
aagcaggagggagaggggccgccgggcuggcc

SEQ ID NO: 418373 - RNA, 32 nt, Homo Sapiens
aaguaaccccauaaguuuauuucccuauuuca

SEQ ID NO: 418374 - RNA, 32 nt, Homo Sapiens
ucacagagguaccgugcuccgcgcuccccgcc

SEQ ID NO: 418375 - RNA, 32 nt, Homo Sapiens
gauuuuccgucgccgccggggcgacucggagu

SEQ ID NO: 418376 - RNA, 32 nt, Homo Sapiens
uauuacaggagggacuuucagagccaugggga

SEQ ID NO: 418377 - RNA, 32 nt, Homo Sapiens
caaccucagggcuugucuauguggguuggagg

SEQ ID NO: 418378 - RNA, 32 nt, Homo Sapiens
cccugauccaaauugacuuaugcccuuauaag

SEQ ID NO: 418379 - RNA, 32 nt, Homo Sapiens
ggucuucaaaaauucaagaaaaguugaugauu

SEQ ID NO: 418380 - RNA, 32 nt, Homo Sapiens
aagcagcagcgggccggcaaggccauaccucg

SEQ ID NO: 418381 - RNA, 32 nt, Homo Sapiens
uggcuauacauuccaaaccaaucuaaacgcua

SEQ ID NO: 418382 - RNA, 32 nt, Homo Sapiens
aauaguacaacugugugaaauguggagcagcc

SEQ ID NO: 418383 - RNA, 32 nt, Homo Sapiens
gucagaggaaacagccucugggugugggaaag

SEQ ID NO: 418384 - RNA, 32 nt, Homo Sapiens
cccuaauuuuuagugugccccaaguuuggugu

SEQ ID NO: 418385 - RNA, 32 nt, Homo Sapiens
ggagagccugcuugccagcaccccgcuaccag

SEQ ID NO: 418386 - RNA, 31 nt, Homo Sapiens
ggacuucagucuucggagcaggcaagaacgg

SEQ ID NO: 418387 - RNA, 32 nt, Homo Sapiens
uggcugauaugaagaacauuuaugaaucucuu

SEQ ID NO: 418388 - RNA, 32 nt, Homo Sapiens
gccguccggccgcuaccccuccugcucggccg

SEQ ID NO: 418389 - RNA, 32 nt, Homo Sapiens
acuuugcucucuucuucuuuuuuguucauggg

SEQ ID NO: 418390 - RNA, 32 nt, Homo Sapiens
ggagagggaaaaggagggagggggugucugca

SEQ ID NO: 418391 - RNA, 32 nt, Homo Sapiens
cagucuacuuugggguucucgcaguggauaau

SEQ ID NO: 418392 - RNA, 32 nt, Homo Sapiens
ucucggacuugaacucuacuguaacuguuuuc

SEQ ID NO: 418393 - RNA, 32 nt, Homo Sapiens
ugagggaggugauugcaguugcuuggagaugc

SEQ ID NO: 418394 - RNA, 32 nt, Homo Sapiens
caauugcaugcagguagcaagcaagaaagcag

SEQ ID NO: 418395 - RNA, 32 nt, Homo Sapiens
cagacccggcgguggggggcccagggugcugg

SEQ ID NO: 418396 - RNA, 30 nt, Homo Sapiens
gagggcuagcccgugcccccgccugccacc

SEQ ID NO: 418397 - RNA, 32 nt, Homo Sapiens
ucccacggacgggggcucgggcgcggacuaag

SEQ ID NO: 418398 - RNA, 32 nt, Homo Sapiens
gaguaccggcgggaggagguguacauccgcag

SEQ ID NO: 418399 - RNA, 32 nt, Homo Sapiens
gcugaaaggaugauccuggggaagguggagca

SEQ ID NO: 418400 - RNA, 32 nt, Homo Sapiens
ggggacugcuccauggccauggagauagacag

SEQ ID NO: 418401 - RNA, 32 nt, Homo Sapiens
acgacgcgcccuuccccaaggcuggccggguc

SEQ ID NO: 418402 - RNA, 32 nt, Homo Sapiens
gccacuucccucgggcccuuaugaaggacuga

SEQ ID NO: 418403 - RNA, 32 nt, Homo Sapiens
aguaugguacucaguaaagcaaugcaaugcuc

SEQ ID NO: 418404 - RNA, 32 nt, Homo Sapiens
ugagcggagucccagggugcucagcucuucag

SEQ ID NO: 418405 - RNA, 32 nt, Homo Sapiens
cucugacccacccagccccugugguagcccca

SEQ ID NO: 418406 - RNA, 32 nt, Homo Sapiens
agcauccacacugcaaugauauaggaaugagg

SEQ ID NO: 418407 - RNA, 32 nt, Homo Sapiens
gugccauggguguggggccagcagcugguggg

SEQ ID NO: 418408 - RNA, 32 nt, Homo Sapiens
guuuaguuuuaaaggcaugacuguuauuuaca

SEQ ID NO: 418409 - RNA, 32 nt, Homo Sapiens
uugacugcauccuuuucuguccuuccccuucc

SEQ ID NO: 418410 - RNA, 32 nt, Homo Sapiens
gaacuguauuuugaauccuuaaaggugagccc

SEQ ID NO: 418411 - RNA, 32 nt, Homo Sapiens
cccuugacguuuacuuucaaguaacacaaacu

SEQ ID NO: 418412 - RNA, 32 nt, Homo Sapiens
ucugcccuguuguucagcagugaugaggagga

SEQ ID NO: 418413 - RNA, 32 nt, Homo Sapiens
cagugaugucauuccuuacuaggcuuccaaag

SEQ ID NO: 418414 - RNA, 32 nt, Homo Sapiens
aauagacaaauuuuauuuuuuauuuccacuug

SEQ ID NO: 418415 - RNA, 32 nt, Homo Sapiens
caagaacucugcacagcaacugccuggaugua

SEQ ID NO: 418416 - RNA, 32 nt, Homo Sapiens
cuuucucuuuaacgccgaaggacuuggugcag

SEQ ID NO: 418417 - RNA, 32 nt, Homo Sapiens
ggccaggcucugcuggccgcaucugccuggcc

SEQ ID NO: 418418 - RNA, 32 nt, Homo Sapiens
gccucacaccucacuaggugcagagagcccag

SEQ ID NO: 418419 - RNA, 32 nt, Homo Sapiens
ugaugccugccaggaggagcuggcacugaagg

SEQ ID NO: 418420 - RNA, 32 nt, Homo Sapiens
agauucaucugugccuuggacauggugauggu

SEQ ID NO: 418421 - RNA, 32 nt, Homo Sapiens
gggcaagcucugccauagcgggugaucagguc

SEQ ID NO: 418422 - RNA, 32 nt, Homo Sapiens
cuuggcuugucgucgcaucauuccagucucag

SEQ ID NO: 418423 - RNA, 32 nt, Homo Sapiens
guggccggcccuccccagcccagagcgggcag

SEQ ID NO: 418424 - RNA, 32 nt, Homo Sapiens
uccucuuuugugcugcuucucaauuagcguuu

SEQ ID NO: 418425 - RNA, 32 nt, Homo Sapiens
gguugagaauaugaaaaacuaguugaguugca

SEQ ID NO: 418426 - RNA, 32 nt, Homo Sapiens
acuagcgaaauauuuuuccacuuugcucgucc

SEQ ID NO: 418427 - RNA, 32 nt, Homo Sapiens
gauguucaucaugguugagugaggauaaggga

SEQ ID NO: 418428 - RNA, 32 nt, Homo Sapiens
acaucaggcuccccggccaccaugauugggau

SEQ ID NO: 418429 - RNA, 32 nt, Homo Sapiens
gaaacaaguauuucucuucugguauacaugua

SEQ ID NO: 418430 - RNA, 32 nt, Homo Sapiens
aaaacugaggcgcagaaugaugaaaugacuuc

SEQ ID NO: 418431 - RNA, 32 nt, Homo Sapiens
guaacugccccggccgcggggcgcgcccgcuc

SEQ ID NO: 418432 - RNA, 32 nt, Homo Sapiens
aagcuauaaaugccucugggcucaccugaaug

SEQ ID NO: 418433 - RNA, 32 nt, Homo Sapiens
cucacuucccaguagcgcggccaggcagaggc

SEQ ID NO: 418434 - RNA, 32 nt, Homo Sapiens
ugcccggagcagcucccuucgcuguggaagcg

SEQ ID NO: 418435 - RNA, 32 nt, Homo Sapiens
ugaccgccggggggugcccccgggacguagcg

SEQ ID NO: 418436 - RNA, 32 nt, Homo Sapiens
uccucguggaaagccaggcccggacaccucuc

SEQ ID NO: 418437 - RNA, 32 nt, Homo Sapiens
cugucccucccucucugaaccugcuuccuccg

SEQ ID NO: 418438 - RNA, 32 nt, Homo Sapiens
cgccccaccguucuucucugcugcauuuggac

SEQ ID NO: 418439 - RNA, 32 nt, Homo Sapiens
ugggacccgggcuggaaggcagggcaucagcu

SEQ ID NO: 418440 - RNA, 32 nt, Homo Sapiens
gacaagaaguuaauuugcuuuaguaaaaaucc

SEQ ID NO: 418441 - RNA, 32 nt, Homo Sapiens
ccuucgccgcguggaccgcgggcugggugcug

SEQ ID NO: 418442 - RNA, 32 nt, Homo Sapiens
cuggcuccaaucagacaggggccacagccugc

SEQ ID NO: 418443 - RNA, 32 nt, Homo Sapiens
agcuaaugucauuauauauguaacuuaaaucu

SEQ ID NO: 418444 - RNA, 32 nt, Homo Sapiens
gcuucucacagaagcugcgacucuagaccagg

SEQ ID NO: 418445 - RNA, 32 nt, Homo Sapiens
ucaaaacugagcucaguuaaaguaagauucaa

SEQ ID NO: 418446 - RNA, 32 nt, Homo Sapiens
gugaaaaggggaggggaugugguaagcagaaa

SEQ ID NO: 418447 - RNA, 31 nt, Homo Sapiens
cuucccccacccuccaccaagcacaccuguu

SEQ ID NO: 418448 - RNA, 32 nt, Homo Sapiens
gagcugccuuuuaauuuuuauucucagagcau

SEQ ID NO: 418449 - RNA, 32 nt, Homo Sapiens
gccauuugggauacuuccucauauacucgaau

SEQ ID NO: 418450 - RNA, 32 nt, Homo Sapiens
ggccggggucggggagguuggggggugucagc

SEQ ID NO: 418451 - RNA, 30 nt, Homo Sapiens
augacugucugugcaccgagaagaggcggc

SEQ ID NO: 418452 - RNA, 32 nt, Homo Sapiens
gacggugccccuugcgcgccaucggugcgccg

SEQ ID NO: 418453 - RNA, 32 nt, Homo Sapiens
aaaugaacauguuuauugcagauucuucuuuu

SEQ ID NO: 418454 - RNA, 32 nt, Homo Sapiens
ugcccugguugcaagcagcggcugggagcagc

SEQ ID NO: 418455 - RNA, 32 nt, Homo Sapiens
gaagggccaggagagagaucuagaaagugggu

SEQ ID NO: 418456 - RNA, 32 nt, Homo Sapiens
uugauucaaaaauaauaccuacaugaaaacau

SEQ ID NO: 418457 - RNA, 32 nt, Homo Sapiens
cauguuuucuauuuccgacaaugccaggaggc

SEQ ID NO: 418458 - RNA, 32 nt, Homo Sapiens
gccacgucccgccguccucggcugcugagccu

SEQ ID NO: 418459 - RNA, 32 nt, Homo Sapiens
gcccugcagcagggcacccuggcguguucuua

SEQ ID NO: 418460 - RNA, 32 nt, Homo Sapiens
guuaagaguuuugagggaaauucugagaaauc

SEQ ID NO: 418461 - RNA, 32 nt, Homo Sapiens
gauaugucauguucucaacaguuucuuuauag

SEQ ID NO: 418462 - RNA, 32 nt, Homo Sapiens
uuucuuugaaagauaaaauacaugaguuucua

SEQ ID NO: 418463 - RNA, 31 nt, Homo Sapiens
ggccuagcaaauuguguugguuaugugagug

SEQ ID NO: 418464 - RNA, 30 nt, Homo Sapiens
augcgagccacccccugagcucugaccuuu

SEQ ID NO: 418465 - RNA, 32 nt, Homo Sapiens
ucaaguccagcauggauggggaaaugucucug

SEQ ID NO: 418466 - RNA, 32 nt, Homo Sapiens
acauuucuguuguuuaagccacccaguuugug

SEQ ID NO: 418467 - RNA, 32 nt, Homo Sapiens
gcgaagauuaaccggaccuucuguggaacucc

SEQ ID NO: 418468 - RNA, 32 nt, Homo Sapiens
gcgcgucgggagcgggccgcgcggcaccaugu

SEQ ID NO: 418469 - RNA, 32 nt, Homo Sapiens
agaacugaaauuuugaugcuuacagcacuugg

SEQ ID NO: 418470 - RNA, 32 nt, Homo Sapiens
ccuggggagccacuggggaggggguggcggcc

SEQ ID NO: 418471 - RNA, 32 nt, Homo Sapiens
uagggggcuugggggcugggggugcugaguac

SEQ ID NO: 418472 - RNA, 28 nt, Homo Sapiens
accauggcgggacguggcgccauggugc

SEQ ID NO: 418473 - RNA, 32 nt, Homo Sapiens
ggugaaugaaaauuauuccuugcuuucaucac

SEQ ID NO: 418474 - RNA, 32 nt, Homo Sapiens
cccagcuccaugaauggaaaucggcuccgcag

SEQ ID NO: 418475 - RNA, 32 nt, Homo Sapiens
aggcuaaggggaggagagcaucaucacuuucc

SEQ ID NO: 418476 - RNA, 32 nt, Homo Sapiens
uaaugugaaaauguauucuaugaaaauaauuu

SEQ ID NO: 418477 - RNA, 32 nt, Homo Sapiens
caucuggucccucccccuccucugcauggagg

SEQ ID NO: 418478 - RNA, 32 nt, Homo Sapiens
gcaugcuacuuggcaagacuucauauuuuuua

SEQ ID NO: 418479 - RNA, 32 nt, Homo Sapiens
gagaauuccaugaacccaggaugcggagguug

SEQ ID NO: 418480 - RNA, 32 nt, Homo Sapiens
uauguauguacuuuagcauuaucaugaaagua

SEQ ID NO: 418481 - RNA, 32 nt, Homo Sapiens
gacguguuggguuuuucuuccuuacacuauau

SEQ ID NO: 418482 - RNA, 32 nt, Homo Sapiens
gcccuucuaccggccucuggcuccggagcugc

SEQ ID NO: 418483 - RNA, 32 nt, Homo Sapiens
ggacuaguacucuaaaaauguucuaaugauaa

SEQ ID NO: 418484 - RNA, 32 nt, Homo Sapiens
aaaggcagcugggcccgggggaccacuaccac

SEQ ID NO: 418485 - RNA, 32 nt, Homo Sapiens
uaccccuaucucuacaaaaaauaaaaaauagc

SEQ ID NO: 418486 - RNA, 32 nt, Homo Sapiens
aggguguagcagcugugcccaucccaggcuga

SEQ ID NO: 418487 - RNA, 32 nt, Homo Sapiens
uuacaggugugagccacugcacccagcugaga

SEQ ID NO: 418488 - RNA, 32 nt, Homo Sapiens
gagacuugccagagccgggcacauugagcugu

SEQ ID NO: 418489 - RNA, 32 nt, Homo Sapiens
gaaguauuuacuauguaagaacuaaugaaucu

SEQ ID NO: 418490 - RNA, 32 nt, Homo Sapiens
uuuugaaugagaaagaggcaugucugagggug

SEQ ID NO: 418491 - RNA, 32 nt, Homo Sapiens
guggaugaaugccaaggcaacacaguuuugcc

SEQ ID NO: 418492 - RNA, 32 nt, Homo Sapiens
ugaagaaacugagacucaaagcagcugaguga

SEQ ID NO: 418493 - RNA, 32 nt, Homo Sapiens
uguuaaccaaggaaacagggucagccuugaaa

SEQ ID NO: 418494 - RNA, 32 nt, Homo Sapiens
gcucagacaccaagcugggccugcagaggagg

SEQ ID NO: 418495 - RNA, 28 nt, Homo Sapiens
ugaaaguccaaauaaaacuuaccuguuc

SEQ ID NO: 418496 - RNA, 30 nt, Homo Sapiens
gcccguuuuauuccuucccaucuuaauaau

SEQ ID NO: 418497 - RNA, 32 nt, Homo Sapiens
ugaggaaaacuaaacugagaggcuacuuccug

SEQ ID NO: 418498 - RNA, 32 nt, Homo Sapiens
cauggucaucauaauugguuuuuuggagacag

SEQ ID NO: 418499 - RNA, 32 nt, Homo Sapiens
ucaggugcagggggcgcuuccccagcgcgggc

SEQ ID NO: 418500 - RNA, 32 nt, Homo Sapiens
ggaacaccuugauuggggaagauaugcaaaua

SEQ ID NO: 418501 - RNA, 32 nt, Homo Sapiens
aaugaugaggccgggugcgguggcucacaccu

SEQ ID NO: 418502 - RNA, 32 nt, Homo Sapiens
uugccaaaacaaugucuuguuaauauuauuuc

SEQ ID NO: 418503 - RNA, 32 nt, Homo Sapiens
gaaggagcccccagccucuccccuccuccucc

SEQ ID NO: 418504 - RNA, 32 nt, Homo Sapiens
ccauucaaaaucucaccuuguuucaucugucu

SEQ ID NO: 418505 - RNA, 32 nt, Homo Sapiens
aaagguugcaggaaacaaggucaauauacaca

SEQ ID NO: 418506 - RNA, 30 nt, Homo Sapiens
ugagcauauaucucugccuaacacuuuagu

SEQ ID NO: 418507 - RNA, 32 nt, Homo Sapiens
ugcccaaggggagggcgggugggcagcugggg

SEQ ID NO: 418508 - RNA, 32 nt, Homo Sapiens
gccuccugcccucuccucucucaggaggggga

SEQ ID NO: 418509 - RNA, 32 nt, Homo Sapiens
ccaagaaguguaaccgccuugaagagcugaug

SEQ ID NO: 418510 - RNA, 32 nt, Homo Sapiens
aucaagaaagugaaaagacagcuuacagaaug

SEQ ID NO: 418511 - RNA, 32 nt, Homo Sapiens
gguggggugggagaggucuuuuuuaaaaggaa

SEQ ID NO: 418512 - RNA, 32 nt, Homo Sapiens
aaagccccaagcagcugccccagggacauggg

SEQ ID NO: 418513 - RNA, 32 nt, Homo Sapiens
guuucuccccguccccuccccccgaccguagc

SEQ ID NO: 418514 - RNA, 32 nt, Homo Sapiens
cagucagaauuuauauauaaauguaugcaccc

SEQ ID NO: 418515 - RNA, 31 nt, Homo Sapiens
uuuuggagcaaaggcaacggauacugcugag

SEQ ID NO: 418516 - RNA, 32 nt, Homo Sapiens
uugguuuaaaggagccuucucaucucuggccg

SEQ ID NO: 418517 - RNA, 32 nt, Homo Sapiens
cgugccaaagacugugcaccuugccaacauua

SEQ ID NO: 418518 - RNA, 31 nt, Homo Sapiens
uuuguuuucaaugaucauuuagcauucaaug

SEQ ID NO: 418519 - RNA, 32 nt, Homo Sapiens
aacucccaguugcaagcuccuuggcucccccg

SEQ ID NO: 418520 - RNA, 32 nt, Homo Sapiens
cuuucccccacuuucucacuuauucuagguac

SEQ ID NO: 418521 - RNA, 32 nt, Homo Sapiens
acuuaauugugccuuccacgccuucacaaaau

SEQ ID NO: 418522 - RNA, 32 nt, Homo Sapiens
gaggaagaaaaaugucugaaaagcagaugaag

SEQ ID NO: 418523 - RNA, 32 nt, Homo Sapiens
gugaucugcccuccuuggccucccagagugcu

SEQ ID NO: 418524 - RNA, 32 nt, Homo Sapiens
aaauaugugaaaacagaaauuaaagauuuaaa

SEQ ID NO: 418525 - RNA, 32 nt, Homo Sapiens
gcgggggugggggauuagauguugacacugcc

SEQ ID NO: 418526 - RNA, 32 nt, Homo Sapiens
uauauuaaccaucuaaaccaacuguaaugaca

SEQ ID NO: 418527 - RNA, 32 nt, Homo Sapiens
cacuugccucagccucccagaagugcuaggau

SEQ ID NO: 418528 - RNA, 32 nt, Homo Sapiens
ggugugagaaagugguggugagaaccuuagag

SEQ ID NO: 418529 - RNA, 30 nt, Homo Sapiens
gagcgagcccugcggccgccggagcagcuc

SEQ ID NO: 418530 - RNA, 32 nt, Homo Sapiens
uugaguucugagggcaucauggcccuaugauu

SEQ ID NO: 418531 - RNA, 32 nt, Homo Sapiens
ucgcugcugucaucccacuccggcuccucuuu

SEQ ID NO: 418532 - RNA, 32 nt, Homo Sapiens
gccucccaggaguacuagagggcccgcgccgc

SEQ ID NO: 418533 - RNA, 30 nt, Homo Sapiens
aaaucagagaagcuugucugcuuggacuga

SEQ ID NO: 418534 - RNA, 32 nt, Homo Sapiens
gggcgagauuucgggggcggggcggggggcgg

SEQ ID NO: 418535 - RNA, 32 nt, Homo Sapiens
ucaccucaaaagacagauaaaggaugcagagc

SEQ ID NO: 418536 - RNA, 32 nt, Homo Sapiens
ccaggggucuuagguguccccuccuagcccug

SEQ ID NO: 418537 - RNA, 32 nt, Homo Sapiens
ggagagaggcagaggcagcuggagcgccguuc

SEQ ID NO: 418538 - RNA, 32 nt, Homo Sapiens
aggacuaugagcauacauuuauguuauuucua

SEQ ID NO: 418539 - RNA, 32 nt, Homo Sapiens
ggucccuucuccagccacccagccccaagaug

SEQ ID NO: 418540 - RNA, 32 nt, Homo Sapiens
guaaacguuccccgcuuucuguucucaguguc

SEQ ID NO: 418541 - RNA, 32 nt, Homo Sapiens
accaccucggaacgcuugccuuuccucccucc

SEQ ID NO: 418542 - RNA, 32 nt, Homo Sapiens
ucagcacucaucugcgcagccauggaggcccu

SEQ ID NO: 418543 - RNA, 32 nt, Homo Sapiens
cccuugcacagcuggaggaaaugaguaggaaa

SEQ ID NO: 418544 - RNA, 32 nt, Homo Sapiens
augugagacagaaaccuaaacaugguacuuga

SEQ ID NO: 418545 - RNA, 32 nt, Homo Sapiens
gccuauaaucccaacacuucgggaggccaagg

SEQ ID NO: 418546 - RNA, 32 nt, Homo Sapiens
ggucucugcuccagcaagcaaacaggguggcc

SEQ ID NO: 418547 - RNA, 32 nt, Homo Sapiens
uucugaauuauuuuaucuuaaauugugauuuu

SEQ ID NO: 418548 - RNA, 32 nt, Homo Sapiens
ggggcgucgcggggccccggcgaaugcgcccc

SEQ ID NO: 418549 - RNA, 32 nt, Homo Sapiens
gcuggcuuuccacagugucaugcuuuggcacu

SEQ ID NO: 418550 - RNA, 32 nt, Homo Sapiens
ggccgggugcgguggcucacgccuguaauccu

SEQ ID NO: 418551 - RNA, 32 nt, Homo Sapiens
cguacauauuuuaauagaaagauacaaccuuu

SEQ ID NO: 418552 - RNA, 32 nt, Homo Sapiens
uuuuaaacugucaggucauuaucaggcauagg

SEQ ID NO: 418553 - RNA, 32 nt, Homo Sapiens
ccagcucuauuagagcagcuuuuccugugugc

SEQ ID NO: 418554 - RNA, 32 nt, Homo Sapiens
ccgggaccaauaucuuggcacauggcagagag

SEQ ID NO: 418555 - RNA, 28 nt, Homo Sapiens
aaggcccgggggucuccgaggugccggu

SEQ ID NO: 418556 - RNA, 32 nt, Homo Sapiens
ggagaaggcagaaaugcuggggccuggaauaa

SEQ ID NO: 418557 - RNA, 32 nt, Homo Sapiens
ucuuccuagcuccacccuccccgugcugcugu

SEQ ID NO: 418558 - RNA, 32 nt, Homo Sapiens
ugagggcagggccagggcuggugucccuaagg

SEQ ID NO: 418559 - RNA, 32 nt, Homo Sapiens
guauauucaaccaaauacuuuaauguauaaaa

SEQ ID NO: 418560 - RNA, 31 nt, Homo Sapiens
cccgccucugccggaaaguccgcgccgccgc

SEQ ID NO: 418561 - RNA, 32 nt, Homo Sapiens
caaacauaacugugcuugucucagucaaacuu

SEQ ID NO: 418562 - RNA, 32 nt, Homo Sapiens
cugccgucuugccucacuuccccuccugucac

SEQ ID NO: 418563 - RNA, 32 nt, Homo Sapiens
ggccaccuuuugcuccacggaggugggagaaa

SEQ ID NO: 418564 - RNA, 32 nt, Homo Sapiens
gcuucucaguugcagaaaaugaacugcuuugg

SEQ ID NO: 418565 - RNA, 32 nt, Homo Sapiens
guguacccauacugcagccccaucccaugggg

SEQ ID NO: 418566 - RNA, 32 nt, Homo Sapiens
ggcccggagcagccucccuuuggucugcuucu

SEQ ID NO: 418567 - RNA, 32 nt, Homo Sapiens
ugggcagucugugguguggagagcagccaucu

SEQ ID NO: 418568 - RNA, 32 nt, Homo Sapiens
ggcugggugcgguggcucaugccuguaauccu

SEQ ID NO: 418569 - RNA, 32 nt, Homo Sapiens
cagugggggagauaaauguuugcuccuaauuc

SEQ ID NO: 418570 - RNA, 32 nt, Homo Sapiens
gacucguuccggaccccagcccggcccggaac

SEQ ID NO: 418571 - RNA, 32 nt, Homo Sapiens
gccgccccgcgcccgcgcccgcugggaaugau

SEQ ID NO: 418572 - RNA, 32 nt, Homo Sapiens
agcuuuguucuuucacucuuugcaauaaaucu

SEQ ID NO: 418573 - RNA, 32 nt, Homo Sapiens
ggcugggcgcgguggcucaugccuguaauccc

SEQ ID NO: 418574 - RNA, 32 nt, Homo Sapiens
gccuguaaucccaacacuuugggaggcugagg

SEQ ID NO: 418575 - RNA, 32 nt, Homo Sapiens
cuaucacuuccacugcaccccgucucauuccu

SEQ ID NO: 418576 - RNA, 32 nt, Homo Sapiens
aaccgugaacucauuuucuccucaauaaccuu

SEQ ID NO: 418577 - RNA, 32 nt, Homo Sapiens
gauuuugauuuuuucuucagaauaugguauac

SEQ ID NO: 418578 - RNA, 32 nt, Homo Sapiens
ggccgggcgcgguggcucacgccuguaauccc

SEQ ID NO: 418579 - RNA, 32 nt, Homo Sapiens
gccaaauagccuggcccuccccuccuuggcau

SEQ ID NO: 418580 - RNA, 32 nt, Homo Sapiens
cccaguaucuucugugccaugguucccacauu

SEQ ID NO: 418581 - RNA, 29 nt, Homo Sapiens
acauaugguguccacguguguacaccugc

SEQ ID NO: 418582 - RNA, 32 nt, Homo Sapiens
ucuacuaaaaauacaaaaaacuagccggccug

SEQ ID NO: 418583 - RNA, 32 nt, Homo Sapiens
gcuacagugaucuuagcuuccuugcuuacaau

SEQ ID NO: 418584 - RNA, 32 nt, Homo Sapiens
uuuccuacuuuguaaacaucaguaguggccag

SEQ ID NO: 418585 - RNA, 32 nt, Homo Sapiens
uaguucauacccacucagaguuauaauggcaa

SEQ ID NO: 418586 - RNA, 32 nt, Homo Sapiens
ucuucccggucuccuuucccggccgcacaggg

SEQ ID NO: 418587 - RNA, 32 nt, Homo Sapiens
uguacuuagaagaaaugcaugcacugcgguuu

SEQ ID NO: 418588 - RNA, 32 nt, Homo Sapiens
uuccuucaaggaacugggugccuccuuccguc

SEQ ID NO: 418589 - RNA, 32 nt, Homo Sapiens
aaaauaaaagaguuuuacuucucuggacugau

SEQ ID NO: 418590 - RNA, 32 nt, Homo Sapiens
cagauaccccaugcccaccucauuaagagaau

SEQ ID NO: 418591 - RNA, 32 nt, Homo Sapiens
gcagucgagaccccccuccccaucccagcgca

SEQ ID NO: 418592 - RNA, 32 nt, Homo Sapiens
agugcucugggagggcccggcgcagaggauug

SEQ ID NO: 418593 - RNA, 32 nt, Homo Sapiens
gauuuugugcuugauuuuaagaauggaauugu

SEQ ID NO: 418594 - RNA, 32 nt, Homo Sapiens
aggguccccccucaagaguacagaagcuuuag

SEQ ID NO: 418595 - RNA, 32 nt, Homo Sapiens
cgaaggugcgggugcuggugccucgcagcagg

SEQ ID NO: 418596 - RNA, 32 nt, Homo Sapiens
gaaucaggccccaagacagaaguacuuggagg

SEQ ID NO: 418597 - RNA, 32 nt, Homo Sapiens
uuuccuauaaaaucuuaaaauaaaauuaggag

SEQ ID NO: 418598 - RNA, 32 nt, Homo Sapiens
ugcaauagcauuaugucuaacaaauguacaaa

SEQ ID NO: 418599 - RNA, 32 nt, Homo Sapiens
acugguggcaugcccaguggcuuugggggcaa

SEQ ID NO: 418600 - RNA, 32 nt, Homo Sapiens
auauuugaaaauagcaguguguucucugaugg

SEQ ID NO: 418601 - RNA, 32 nt, Homo Sapiens
ggguuuuuggguuuuucuguguuuucaucuuu

SEQ ID NO: 418602 - RNA, 32 nt, Homo Sapiens
uuggccaucuucuuccuucgucgucucuccuc

SEQ ID NO: 418603 - RNA, 32 nt, Homo Sapiens
uuggacugcuugcauuuccccggagaaaaagg

SEQ ID NO: 418604 - RNA, 32 nt, Homo Sapiens
uugaggucaagcgccaugcaucccaagccuuu

SEQ ID NO: 418605 - RNA, 32 nt, Homo Sapiens
caggcggcgcugaagugaaggaugcuggcggg

SEQ ID NO: 418606 - RNA, 32 nt, Homo Sapiens
uccccggugcuccagagugccggcgcagggcc

SEQ ID NO: 418607 - RNA, 32 nt, Homo Sapiens
cuaugccuggccagccuccagcuccucagacc

SEQ ID NO: 418608 - RNA, 32 nt, Homo Sapiens
guccucugcuccuagaggccaagccuaugugu

SEQ ID NO: 418609 - RNA, 32 nt, Homo Sapiens
ccccaccccaggcuaccagggccgcuuugucc

SEQ ID NO: 418610 - RNA, 32 nt, Homo Sapiens
acaucuccaucugcacagagguccuggcugga

SEQ ID NO: 418611 - RNA, 30 nt, Homo Sapiens
ucugacugucaccacugccaguggcugugg

SEQ ID NO: 418612 - RNA, 32 nt, Homo Sapiens
ugagccacuggccacuccuggcuucuccuugu

SEQ ID NO: 418613 - RNA, 32 nt, Homo Sapiens
uaauaaguagaagaaauaauuuaaaugaacug

SEQ ID NO: 418614 - RNA, 30 nt, Homo Sapiens
cacuaugucugugcuuggagaggggaggug

SEQ ID NO: 418615 - RNA, 32 nt, Homo Sapiens
aacuucauuucagauagcaaacgcaggacaca

SEQ ID NO: 418616 - RNA, 32 nt, Homo Sapiens
ccuccuuccacguugucuccuccaccuagcag

SEQ ID NO: 418617 - RNA, 32 nt, Homo Sapiens
ucgcucacucccucgcgcacucgcccgccccc

SEQ ID NO: 418618 - RNA, 32 nt, Homo Sapiens
cacaucccccacuugccucagagccgguccuc

SEQ ID NO: 418619 - RNA, 30 nt, Homo Sapiens
aggaaccaagauggcggcggcagggcggcg

SEQ ID NO: 418620 - RNA, 32 nt, Homo Sapiens
ccucuccccugggagcaaccacuuaggguccu

SEQ ID NO: 418621 - RNA, 32 nt, Homo Sapiens
ggggacacaagcauggagcggcuuuggggucu

SEQ ID NO: 418622 - RNA, 32 nt, Homo Sapiens
gaugaggaacaaugaaaaagagguaguguaag

SEQ ID NO: 418623 - RNA, 32 nt, Homo Sapiens
caccccuccaugauuccaagggcccagagggg

SEQ ID NO: 418624 - RNA, 32 nt, Homo Sapiens
agcgggauuugcgucccggaagcggcgguggc

SEQ ID NO: 418625 - RNA, 30 nt, Homo Sapiens
acguguaauaucccuccccauucuucucuu

SEQ ID NO: 418626 - RNA, 32 nt, Homo Sapiens
uggagacucgccgugacacgggccuaagccgc

SEQ ID NO: 418627 - RNA, 31 nt, Homo Sapiens
acuguucuugguaacugauuaccugccaauu

SEQ ID NO: 418628 - RNA, 32 nt, Homo Sapiens
auuaucauuuuucuauuuuguuagauucaauu

SEQ ID NO: 418629 - RNA, 32 nt, Homo Sapiens
uaaccucuacucccuugggauuguagaauuau

SEQ ID NO: 418630 - RNA, 32 nt, Homo Sapiens
aucaaagacucagagagacauaaaggagaaga

SEQ ID NO: 418631 - RNA, 32 nt, Homo Sapiens
uaaggaguggggugcagcgucuggucagccga

SEQ ID NO: 418632 - RNA, 32 nt, Homo Sapiens
uucauggaaugaaauggcuuucugccuccauu

SEQ ID NO: 418633 - RNA, 32 nt, Homo Sapiens
uuucacacgucuuuuuauaguuacuucaucuu

SEQ ID NO: 418634 - RNA, 32 nt, Homo Sapiens
ccugcccuugaacaucagacuccagguucuuc

SEQ ID NO: 418635 - RNA, 32 nt, Homo Sapiens
cucagcucccgcaacacccuggccuucucaau

SEQ ID NO: 418636 - RNA, 32 nt, Homo Sapiens
cauucugaaauucauuuguaagcaaaaaugga

SEQ ID NO: 418637 - RNA, 32 nt, Homo Sapiens
cauaauuaccaacguagaauuuuucaguacau

SEQ ID NO: 418638 - RNA, 32 nt, Homo Sapiens
cuuucugcccuuggacgccgccgaagaagcau

SEQ ID NO: 418639 - RNA, 32 nt, Homo Sapiens
aaauuuuaaaagacauugauuccgcauguaag

SEQ ID NO: 418640 - RNA, 32 nt, Homo Sapiens
guggugcaccugcccaccuggcccagugcugc

SEQ ID NO: 418641 - RNA, 32 nt, Homo Sapiens
uuugccauuguuuucuuuuguaccugaagcau

SEQ ID NO: 418642 - RNA, 32 nt, Homo Sapiens
uaggggcagacacaacagcguggcuuagauug

SEQ ID NO: 418643 - RNA, 32 nt, Homo Sapiens
gcucaggugacuccacaucuucugccccagug

SEQ ID NO: 418644 - RNA, 32 nt, Homo Sapiens
aacugugcgguuugagugaugugcuacaaagu

SEQ ID NO: 418645 - RNA, 32 nt, Homo Sapiens
uuggauacaaaguggaauaagauucuagaucc

SEQ ID NO: 418646 - RNA, 32 nt, Homo Sapiens
cucccccaccgcccacucuccaccucacuagc

SEQ ID NO: 418647 - RNA, 32 nt, Homo Sapiens
aagcgaagggaagagggugggagaaguagcuu

SEQ ID NO: 418648 - RNA, 32 nt, Homo Sapiens
cuuccuucugucuacaccccauacugacaauc

SEQ ID NO: 418649 - RNA, 32 nt, Homo Sapiens
gaccuuuaccccagcccccucuccgaguccuu

SEQ ID NO: 418650 - RNA, 30 nt, Homo Sapiens
cacccgaggggcgauacaagcaggaugugu

SEQ ID NO: 418651 - RNA, 32 nt, Homo Sapiens
cucauccccuugcccucccccagcccagggac

SEQ ID NO: 418652 - RNA, 32 nt, Homo Sapiens
auacuuacagauguugagauggcugcccugca

SEQ ID NO: 418653 - RNA, 32 nt, Homo Sapiens
cuguggggaaaggccugucccuugucuucugg

SEQ ID NO: 418654 - RNA, 32 nt, Homo Sapiens
cuccggagggcccagcuggggcaaccacgcuc

SEQ ID NO: 418655 - RNA, 32 nt, Homo Sapiens
cggucagcgccggggcccggagauggagcugg

SEQ ID NO: 418656 - RNA, 32 nt, Homo Sapiens
ugugcucuuuuggaaaauaguugguuagcagg

SEQ ID NO: 418657 - RNA, 32 nt, Homo Sapiens
agcaggauacaaaauuacaugacacauaguaa

SEQ ID NO: 418658 - RNA, 32 nt, Homo Sapiens
agauccuuuuugcuguuuuaccauuuuaaguc

SEQ ID NO: 418659 - RNA, 30 nt, Homo Sapiens
ccccacaaccccccagcccaucuuaacuuc

SEQ ID NO: 418660 - RNA, 32 nt, Homo Sapiens
uccucccgagaccuaauggucccugcugggcu

SEQ ID NO: 418661 - RNA, 32 nt, Homo Sapiens
acucagagaucauggcugaaaagcagcaaaug

SEQ ID NO: 418662 - RNA, 32 nt, Homo Sapiens
gacucuggggagaggaacaugguggccacagc

SEQ ID NO: 418663 - RNA, 32 nt, Homo Sapiens
auaccaugaaauuuauagguagauaaccagau

SEQ ID NO: 418664 - RNA, 32 nt, Homo Sapiens
cagcgcugguccucccggggccaacucacagc

SEQ ID NO: 418665 - RNA, 32 nt, Homo Sapiens
aaucaaagaaccucagagaacaccagaugcua

SEQ ID NO: 418666 - RNA, 32 nt, Homo Sapiens
aaguuaauccaucaauccuuaguagaauccag

SEQ ID NO: 418667 - RNA, 32 nt, Homo Sapiens
auggacucuguccucagcaacacuccacagca

SEQ ID NO: 418668 - RNA, 32 nt, Homo Sapiens
gguugggcugugacgcugcugcuggggucaga

SEQ ID NO: 418669 - RNA, 32 nt, Homo Sapiens
agaugcagacauuuugcaaggcugccggguag

SEQ ID NO: 418670 - RNA, 32 nt, Homo Sapiens
uuuugaggaaacaaagauuugugguaacugaa

SEQ ID NO: 418671 - RNA, 32 nt, Homo Sapiens
acucagcgggcguggaggucgcggcggacgga

SEQ ID NO: 418672 - RNA, 32 nt, Homo Sapiens
ccagugcaccccggcccaccgccccggggcca

SEQ ID NO: 418673 - RNA, 30 nt, Homo Sapiens
ggguagcgcgcgcgagucgacaaguaagag

SEQ ID NO: 418674 - RNA, 30 nt, Homo Sapiens
aggacaugcugaagaacacccccaggggcc

SEQ ID NO: 418675 - RNA, 32 nt, Homo Sapiens
auguaggagcagcuuuucuucuaguuugaugu

SEQ ID NO: 418676 - RNA, 32 nt, Homo Sapiens
caagcugauuuggaugugauauuuuuucaaaa

SEQ ID NO: 418677 - RNA, 32 nt, Homo Sapiens
cagcuggaauggaaagaaugugagauggaacc

SEQ ID NO: 418678 - RNA, 32 nt, Homo Sapiens
gccuccgaggccgccggccgcuucucucuccc

SEQ ID NO: 418679 - RNA, 32 nt, Homo Sapiens
gggacugugagguguuugaggguguggacugg

SEQ ID NO: 418680 - RNA, 32 nt, Homo Sapiens
ccuugauccugccugcccggccgcccgacaag

SEQ ID NO: 418681 - RNA, 32 nt, Homo Sapiens
gguagaugacucuaagaaaugcugaaguaucg

SEQ ID NO: 418682 - RNA, 32 nt, Homo Sapiens
auuuauaaaaauugauuuuaagaauuuauuug

SEQ ID NO: 418683 - RNA, 32 nt, Homo Sapiens
gucccuucucaguggccaaagaugcuauuuua

SEQ ID NO: 418684 - RNA, 32 nt, Homo Sapiens
aaagauauaaucuauuuuauuaugguuucccu

SEQ ID NO: 418685 - RNA, 31 nt, Homo Sapiens
uaaaucucacggagggucucggccgccagug

SEQ ID NO: 418686 - RNA, 32 nt, Homo Sapiens
cuguauucuuauucuucagauauuuauuuuuc

SEQ ID NO: 418687 - RNA, 32 nt, Homo Sapiens
ugcacguacacacacauacacacacacgcgug

SEQ ID NO: 418688 - RNA, 32 nt, Homo Sapiens
aaaauuguuauucaaauuguuaugcacagaau

SEQ ID NO: 418689 - RNA, 32 nt, Homo Sapiens
ccaguugaauuuauggaaucuaccaacuguuu

SEQ ID NO: 418690 - RNA, 32 nt, Homo Sapiens
ucccagaugguuaugaugcugcugguccaugg

SEQ ID NO: 418691 - RNA, 32 nt, Homo Sapiens
gcacucaggauccagaagugcaagcagacaaa

SEQ ID NO: 418692 - RNA, 32 nt, Homo Sapiens
acaguaggaaaggguaaguggggcccaggggc

SEQ ID NO: 418693 - RNA, 32 nt, Homo Sapiens
ccugaucagguggccuggcuguuucuuuggau

SEQ ID NO: 418694 - RNA, 32 nt, Homo Sapiens
auauugggcuuccaauauguuugaauuucaau

SEQ ID NO: 418695 - RNA, 32 nt, Homo Sapiens
gcaccugcagacagagcuggugcugggugcca

SEQ ID NO: 418696 - RNA, 32 nt, Homo Sapiens
uaccuggggaggagugagaaaaggagagcagg

SEQ ID NO: 418697 - RNA, 32 nt, Homo Sapiens
cacaacaaauuaaugauauuuuugugucaaag

SEQ ID NO: 418698 - RNA, 32 nt, Homo Sapiens
ucccuccccagaaacagugugcauggguuauu

SEQ ID NO: 418699 - RNA, 32 nt, Homo Sapiens
gugcggucuccauggcagugcugggcgcagcc

SEQ ID NO: 418700 - RNA, 32 nt, Homo Sapiens
gcgggcugcucgcgccggugaggccugcgcgg

SEQ ID NO: 418701 - RNA, 32 nt, Homo Sapiens
gccacuugugcgugaguccgcggcuggcccuu

SEQ ID NO: 418702 - RNA, 32 nt, Homo Sapiens
agcagucuuacuauccacagcaguauaugucu

SEQ ID NO: 418703 - RNA, 32 nt, Homo Sapiens
uauuucacucauucucuccugcacgcuguuag

SEQ ID NO: 418704 - RNA, 32 nt, Homo Sapiens
guuccggaccccagcccggcccggaacacucu

SEQ ID NO: 418705 - RNA, 32 nt, Homo Sapiens
gagaagcaggauucagagcugcucuccccagu

SEQ ID NO: 418706 - RNA, 28 nt, Homo Sapiens
cugcuccguggucccaggaugccuaugc

SEQ ID NO: 418707 - RNA, 32 nt, Homo Sapiens
aaguaauguuuuauuucaguacuuagcaauua

SEQ ID NO: 418708 - RNA, 32 nt, Homo Sapiens
cugcccgccucggccucccaacgugcugggau

SEQ ID NO: 418709 - RNA, 32 nt, Homo Sapiens
uugggucagguggcucuggguucugacccuga

SEQ ID NO: 418710 - RNA, 32 nt, Homo Sapiens
ucccgcccuggcucagcucccgcggccccgcc

SEQ ID NO: 418711 - RNA, 32 nt, Homo Sapiens
acccgcgccgcgccgcgccgauuugauuugua

SEQ ID NO: 418712 - RNA, 32 nt, Homo Sapiens
gugcacuucucgcacuggggcauggagugccc

SEQ ID NO: 418713 - RNA, 32 nt, Homo Sapiens
guggcccgcccuggggccccagcucggccccu

SEQ ID NO: 418714 - RNA, 31 nt, Homo Sapiens
uuaguucuugguaggaauucaguugggcaau

SEQ ID NO: 418715 - RNA, 32 nt, Homo Sapiens
aauuguggguugaacuacuuaucccuguguga

SEQ ID NO: 418716 - RNA, 29 nt, Homo Sapiens
ccccuguuuuaucaauaccaccugccugc

SEQ ID NO: 418717 - RNA, 32 nt, Homo Sapiens
cuuugcacucaaaauguuuuuacaaugcuucu

SEQ ID NO: 418718 - RNA, 32 nt, Homo Sapiens
acucacuaaauauuuauauaacuuugauauag

SEQ ID NO: 418719 - RNA, 32 nt, Homo Sapiens
ucaguaaccagggcccugggaauauaauagga

SEQ ID NO: 418720 - RNA, 32 nt, Homo Sapiens
uccuuauacucuauuauauaguguuauucaug

SEQ ID NO: 418721 - RNA, 32 nt, Homo Sapiens
gugcuuguuuucuucaacaaauaaaaaauagu

SEQ ID NO: 418722 - RNA, 32 nt, Homo Sapiens
aggcagccugggagagauaggagucccggcuc

SEQ ID NO: 418723 - RNA, 32 nt, Homo Sapiens
cgcucuaccuacauaugaaacuucucuaccua

SEQ ID NO: 418724 - RNA, 32 nt, Homo Sapiens
aggagccgccgcguccccucgccgaguccccu

SEQ ID NO: 418725 - RNA, 32 nt, Homo Sapiens
ggggcucagaggaggaggacaaagacggcggg

SEQ ID NO: 418726 - RNA, 32 nt, Homo Sapiens
ucaggacaauuccauuuggggaccagagaugg

SEQ ID NO: 418727 - RNA, 32 nt, Homo Sapiens
uccacgcagccgccggccggccagcacccagg

SEQ ID NO: 418728 - RNA, 32 nt, Homo Sapiens
ggagucuuuccccacaccccagccaucgccgc

SEQ ID NO: 418729 - RNA, 32 nt, Homo Sapiens
aggcagguggguggagggggaugcugggaauu

SEQ ID NO: 418730 - RNA, 32 nt, Homo Sapiens
uguggauuacaauccucauuuacuuccaaugu

SEQ ID NO: 418731 - RNA, 32 nt, Homo Sapiens
acgggaacccugaccgcguccuggagcugcuc

SEQ ID NO: 418732 - RNA, 32 nt, Homo Sapiens
cuuggaauucuuggagagcauuccuuguaguu

SEQ ID NO: 418733 - RNA, 32 nt, Homo Sapiens
aagucuucuauuauuauacuuuaguauuggaa

SEQ ID NO: 418734 - RNA, 32 nt, Homo Sapiens
ggguucuccagucuccucccuuuacuuuaucu

SEQ ID NO: 418735 - RNA, 32 nt, Homo Sapiens
ucagugcugcuauauuuaagacggugcagucu

SEQ ID NO: 418736 - RNA, 32 nt, Homo Sapiens
ggggaggggacgggacacagaaccggccgugg

SEQ ID NO: 418737 - RNA, 32 nt, Homo Sapiens
uguaauuuagugguggugaaaguucuacacuc

SEQ ID NO: 418738 - RNA, 32 nt, Homo Sapiens
cuagcagauaaaauuuuaaaggauugauuuca

SEQ ID NO: 418739 - RNA, 27 nt, Homo Sapiens
gugaauugcuucuucagcccccucaga

SEQ ID NO: 418740 - RNA, 32 nt, Homo Sapiens
uugacaaugaauugcaauaaaacuaagaaaua

SEQ ID NO: 418741 - RNA, 32 nt, Homo Sapiens
aagaccaaggcucggcugggccccaccccaga

SEQ ID NO: 418742 - RNA, 27 nt, Homo Sapiens
acagaguccuucuggcguccuaggggu

SEQ ID NO: 418743 - RNA, 32 nt, Homo Sapiens
auauauugaaauaaagaauuauguaaaagcca

SEQ ID NO: 418744 - RNA, 31 nt, Homo Sapiens
caaggcauuaugguuuuuaaucuugaaacuu

SEQ ID NO: 418745 - RNA, 32 nt, Homo Sapiens
uagacaagaaacaaaauucauuuaguagugga

SEQ ID NO: 418746 - RNA, 32 nt, Homo Sapiens
cagugguagucgcuggccccaggacccccucc

SEQ ID NO: 418747 - RNA, 32 nt, Homo Sapiens
gagaggaaagacugcacugggaguggcuggcc

SEQ ID NO: 418748 - RNA, 32 nt, Homo Sapiens
aggcugccggggguccggggccccaggcauuc

SEQ ID NO: 418749 - RNA, 32 nt, Homo Sapiens
cccagaucaaggaggggaaacguguacugauu

SEQ ID NO: 418750 - RNA, 32 nt, Homo Sapiens
gccgcagcugccucccuucucucggaacccac

SEQ ID NO: 418751 - RNA, 32 nt, Homo Sapiens
gccuccagcuggaggcccugguacccuguucu

SEQ ID NO: 418752 - RNA, 32 nt, Homo Sapiens
aaaagcauaaaaacaaaaccagaagugauccc

SEQ ID NO: 418753 - RNA, 32 nt, Homo Sapiens
uauuuuuccacuuugcucguccugcuuaagcc

SEQ ID NO: 418754 - RNA, 32 nt, Homo Sapiens
uuccggccugaaagcccucccugcaagaaggu

SEQ ID NO: 418755 - RNA, 32 nt, Homo Sapiens
ccagauggaauucaaacuuaugccugcucuca

SEQ ID NO: 418756 - RNA, 32 nt, Homo Sapiens
uuuaaucuggcacaacacuaauuaccauuuuu

SEQ ID NO: 418757 - RNA, 30 nt, Homo Sapiens
gggagauggaggggccggggcugggcucgc

SEQ ID NO: 418758 - RNA, 32 nt, Homo Sapiens
ggucccuucugaacccucugggccugcgcuaa

SEQ ID NO: 418759 - RNA, 32 nt, Homo Sapiens
acccaaagaugaugacuuugauuggauaauua

SEQ ID NO: 418760 - RNA, 32 nt, Homo Sapiens
agcauguuuuaacuuuguuguuuuacuauccu

SEQ ID NO: 418761 - RNA, 32 nt, Homo Sapiens
uuagaagcugcuaaaaaguuauuaaagaauau

SEQ ID NO: 418762 - RNA, 32 nt, Homo Sapiens
ucaaggagugagauuauaaauaaaaugaugca

SEQ ID NO: 418763 - RNA, 32 nt, Homo Sapiens
aacaauuuaguguagauauuuuauucuggaga

SEQ ID NO: 418764 - RNA, 32 nt, Homo Sapiens
caauaauuccaaguggagagugucauugaccc

SEQ ID NO: 418765 - RNA, 32 nt, Homo Sapiens
ugcuguagcugagacuugucuagaguccuuug

SEQ ID NO: 418766 - RNA, 32 nt, Homo Sapiens
aaagccaugagcugcuuuuaugcugaaaaugg

SEQ ID NO: 418767 - RNA, 32 nt, Homo Sapiens
acgaggaaaccuggucucccggagccaggugg

SEQ ID NO: 418768 - RNA, 32 nt, Homo Sapiens
gagaacucagcccgugaguccuugaaaccagc

SEQ ID NO: 418769 - RNA, 32 nt, Homo Sapiens
gaagugaaaauauuagccuuaacuuuaaaauu

SEQ ID NO: 418770 - RNA, 32 nt, Homo Sapiens
gaguggccgccgcugcggggcccaaguccuug

SEQ ID NO: 418771 - RNA, 32 nt, Homo Sapiens
cgccccuuucucuuucccacucaguuuugcac

SEQ ID NO: 418772 - RNA, 32 nt, Homo Sapiens
cagaucccauccccccagcuagaccucacccu

SEQ ID NO: 418773 - RNA, 32 nt, Homo Sapiens
ucccacuggucuuuaaaucaaugucuagaucu

SEQ ID NO: 418774 - RNA, 32 nt, Homo Sapiens
cagaaaccgccacuuaaaaugcacuggccacc

SEQ ID NO: 418775 - RNA, 32 nt, Homo Sapiens
gauguagucuuacucugucacccaggcuagag

SEQ ID NO: 418776 - RNA, 32 nt, Homo Sapiens
ugugcucaaauuacuaaugauuuaguguuguc

SEQ ID NO: 418777 - RNA, 32 nt, Homo Sapiens
ugccccagccccaccaugcucauggcguccac

SEQ ID NO: 418778 - RNA, 32 nt, Homo Sapiens
ugagauaauuuucauauuccugagaaacugga

SEQ ID NO: 418779 - RNA, 32 nt, Homo Sapiens
uuacaaaugacagaagcuaauuccuauugaac

SEQ ID NO: 418780 - RNA, 32 nt, Homo Sapiens
guggccugacuucauuaacggauuuagucauu

SEQ ID NO: 418781 - RNA, 32 nt, Homo Sapiens
cuuggagaggaaagaggcucuguccaccacuc

SEQ ID NO: 418782 - RNA, 32 nt, Homo Sapiens
ucagugugcuuuucccaaaugauguguguggu

SEQ ID NO: 418783 - RNA, 32 nt, Homo Sapiens
uacugggagagggagacaaaaccucauggcaa

SEQ ID NO: 418784 - RNA, 32 nt, Homo Sapiens
accuugauaacaaagcuauaaauauuuaaguu

SEQ ID NO: 418785 - RNA, 32 nt, Homo Sapiens
cccugguguacaaacugcugacugcagacaga

SEQ ID NO: 418786 - RNA, 32 nt, Homo Sapiens
agaucuuguaaauauuugugaauagaaugaau

SEQ ID NO: 418787 - RNA, 32 nt, Homo Sapiens
gaagucuuaacauuuuaacauuuauagugcuu

SEQ ID NO: 418788 - RNA, 32 nt, Homo Sapiens
cuaacgcucccuggcccggccggggccgcgca

SEQ ID NO: 418789 - RNA, 32 nt, Homo Sapiens
cgcucggugcugaccgcccccggggucgagua

SEQ ID NO: 418790 - RNA, 32 nt, Homo Sapiens
uguaguggcaugaucucggcucacugcaaucu

SEQ ID NO: 418791 - RNA, 32 nt, Homo Sapiens
cagacaccccagcuuuugagggugcugggggu

SEQ ID NO: 418792 - RNA, 32 nt, Homo Sapiens
gcagauuuuaaguuaaagaauauggaauauag

SEQ ID NO: 418793 - RNA, 32 nt, Homo Sapiens
uggagggugggaagagaagggagucagcucug

SEQ ID NO: 418794 - RNA, 32 nt, Homo Sapiens
gauuccaaccuccagcuccccccacccgcugc

SEQ ID NO: 418795 - RNA, 32 nt, Homo Sapiens
ucuccccuauuauaaauuuggcacuucuauac

SEQ ID NO: 418796 - RNA, 30 nt, Homo Sapiens
cucccagucugugcaauaaaggucgugaag

SEQ ID NO: 418797 - RNA, 32 nt, Homo Sapiens
cuuugcuggugaacagccuguuugcuggaaug

SEQ ID NO: 418798 - RNA, 32 nt, Homo Sapiens
agacacugcuggcccggcucuccagcugcaga

SEQ ID NO: 418799 - RNA, 30 nt, Homo Sapiens
ggaagucaugcucgcuucacggaggcaaua

SEQ ID NO: 418800 - RNA, 32 nt, Homo Sapiens
gcagggacaccagacucuugcuuugagucucc

SEQ ID NO: 418801 - RNA, 31 nt, Homo Sapiens
cccaauaagcuuuacagccuucugcaaagua

SEQ ID NO: 418802 - RNA, 32 nt, Homo Sapiens
aacagugucaguuuuucuuuuacaauggagaa

SEQ ID NO: 418803 - RNA, 32 nt, Homo Sapiens
uggccagccacgcucaguggcugaacagcauu

SEQ ID NO: 418804 - RNA, 32 nt, Homo Sapiens
uaggacgguuuuugcaaagcaccuggagaugu

SEQ ID NO: 418805 - RNA, 32 nt, Homo Sapiens
acuuuuaauguuuauuauuuucuucuccgcac

SEQ ID NO: 418806 - RNA, 32 nt, Homo Sapiens
auacugugaaaugaguuggccagauugugggg

SEQ ID NO: 418807 - RNA, 32 nt, Homo Sapiens
cuaggucuuuccaaaauuaaauuuauguaaau

SEQ ID NO: 418808 - RNA, 32 nt, Homo Sapiens
acaaaagaagugacauacacaauauaaaucau

SEQ ID NO: 418809 - RNA, 32 nt, Homo Sapiens
cgagcccggcccgggaucccgagcagcgagag

SEQ ID NO: 418810 - RNA, 32 nt, Homo Sapiens
gcaccuuaauuucaagcaaauguauuauaauu

SEQ ID NO: 418811 - RNA, 32 nt, Homo Sapiens
gaaaugacugucagaaaugccuccacggcugu

SEQ ID NO: 418812 - RNA, 32 nt, Homo Sapiens
ucggccucccugcgcuccuggcugacggugug

SEQ ID NO: 418813 - RNA, 32 nt, Homo Sapiens
ccugcagaaggacuguugaugcgacccaaaga

SEQ ID NO: 418814 - RNA, 32 nt, Homo Sapiens
uuucugucucguguguaucaguggcauuuucu

SEQ ID NO: 418815 - RNA, 32 nt, Homo Sapiens
cacuaaaagcuacugcuuuuccaggguggggg

SEQ ID NO: 418816 - RNA, 32 nt, Homo Sapiens
agacuguugaaucuuguuuucuuucuucuuuu

SEQ ID NO: 418817 - RNA, 32 nt, Homo Sapiens
acugagaguauaacagaagagaacuauaauuu

SEQ ID NO: 418818 - RNA, 30 nt, Homo Sapiens
gcgaccccaccucugccgccgccgccugcg

SEQ ID NO: 418819 - RNA, 32 nt, Homo Sapiens
auguuuccugcauuuucuuuuuuuuauuauuu

SEQ ID NO: 418820 - RNA, 32 nt, Homo Sapiens
ggcaaucacuucaccuuggacaaaggaucagc

SEQ ID NO: 418821 - RNA, 32 nt, Homo Sapiens
aagagaaacauucaacucugugagaugaaugc

SEQ ID NO: 418822 - RNA, 32 nt, Homo Sapiens
gguacagucauaagagccaucugucacggacc

SEQ ID NO: 418823 - RNA, 32 nt, Homo Sapiens
accgggcacccucgcccccuccccucgggccg

SEQ ID NO: 418824 - RNA, 31 nt, Homo Sapiens
cguucccagccugcccugcccccgccuccuu

SEQ ID NO: 418825 - RNA, 32 nt, Homo Sapiens
gaggaucauguggaucuuuggugccuuccggu

SEQ ID NO: 418826 - RNA, 31 nt, Homo Sapiens
gaagaccaagagguuuacuauugaugcuuag

SEQ ID NO: 418827 - RNA, 32 nt, Homo Sapiens
ccagaugucccuaguaaaucuugcuuccuucu

SEQ ID NO: 418828 - RNA, 32 nt, Homo Sapiens
aaacaauuguuugugguuucucucuuucuggu

SEQ ID NO: 418829 - RNA, 32 nt, Homo Sapiens
ggaagagggaggccauggcggaggcgggcgug

SEQ ID NO: 418830 - RNA, 32 nt, Homo Sapiens
uuuauugaaacacgugaagauuuguuuaaaag

SEQ ID NO: 418831 - RNA, 32 nt, Homo Sapiens
agcaguggcgucaucucaggaugugcugggca

SEQ ID NO: 418832 - RNA, 32 nt, Homo Sapiens
acccggaucugcgacccccuguggacagaggu

SEQ ID NO: 418833 - RNA, 32 nt, Homo Sapiens
ugggccucucucccuuucucccugugagaucu

SEQ ID NO: 418834 - RNA, 32 nt, Homo Sapiens
augucgauuacuucuuuuucuuggcuuauuga

SEQ ID NO: 418835 - RNA, 32 nt, Homo Sapiens
ucaaacauaggaguauuccugauaaagugacc

SEQ ID NO: 418836 - RNA, 32 nt, Homo Sapiens
gugcucugagagagggcagaguggaugcccca

SEQ ID NO: 418837 - RNA, 32 nt, Homo Sapiens
cagcucucccaauguuucuccucuccuuccca

SEQ ID NO: 418838 - RNA, 32 nt, Homo Sapiens
cuuuaccuuuuguuuuuccuuggaccuaaaca

SEQ ID NO: 418839 - RNA, 32 nt, Homo Sapiens
ugguggccgagaccccguccacggagggugau

SEQ ID NO: 418840 - RNA, 32 nt, Homo Sapiens
cucaguugucgcccucacgagaggaaggagcu

SEQ ID NO: 418841 - RNA, 32 nt, Homo Sapiens
cauagcccauaggcauuaacugccauugcaca

SEQ ID NO: 418842 - RNA, 32 nt, Homo Sapiens
guguaggaggggcugcagcagaggccugagga

SEQ ID NO: 418843 - RNA, 32 nt, Homo Sapiens
aguucuugauauugucuagacuugcaucuaga

SEQ ID NO: 418844 - RNA, 32 nt, Homo Sapiens
aggcggggccgcgaccccggcgcggguggggc

SEQ ID NO: 418845 - RNA, 29 nt, Homo Sapiens
gcugucauagugaacaauuuauaaguguc

SEQ ID NO: 418846 - RNA, 32 nt, Homo Sapiens
uuccugucacgacuaucacuugagauuauauu

SEQ ID NO: 418847 - RNA, 32 nt, Homo Sapiens
ugaaaggaauaaaaccuacacacaagguugga

SEQ ID NO: 418848 - RNA, 32 nt, Homo Sapiens
acccugagcucugcaagcugugaucugucugg

SEQ ID NO: 418849 - RNA, 32 nt, Homo Sapiens
cuuuuuuaaaaguuuaaauuaaauauuuaggc

SEQ ID NO: 418850 - RNA, 30 nt, Homo Sapiens
uugccucggugcccgccgccggagccuccg

SEQ ID NO: 418851 - RNA, 32 nt, Homo Sapiens
ggaggguguugcacucugcuaacgcugguccu

SEQ ID NO: 418852 - RNA, 32 nt, Homo Sapiens
ccguggagugguuuuugccaagucauacaaca

SEQ ID NO: 418853 - RNA, 32 nt, Homo Sapiens
uugaaggauaaaugcagggguuucacugaggg

SEQ ID NO: 418854 - RNA, 32 nt, Homo Sapiens
uacacugugauaaguucuuuuacaaauaucua

SEQ ID NO: 418855 - RNA, 32 nt, Homo Sapiens
caugcauuaaaauuuugcuuggcauuacucaa

SEQ ID NO: 418856 - RNA, 32 nt, Homo Sapiens
agaccagcagugccucacaccuuguucucuuc

SEQ ID NO: 418857 - RNA, 32 nt, Homo Sapiens
gcagugaguguuacaguucuuaaaggcggugu

SEQ ID NO: 418858 - RNA, 32 nt, Homo Sapiens
aaaauuguaccauaaacuuguguuuacucuuu

SEQ ID NO: 418859 - RNA, 32 nt, Homo Sapiens
aggaaaggaacaaaagaaaaacauucaguuuu

SEQ ID NO: 418860 - RNA, 32 nt, Homo Sapiens
guacauuuucuuuuuagaaaaccaaauguacu

SEQ ID NO: 418861 - RNA, 32 nt, Homo Sapiens
aaccaucccaucuggcugagaagugauggaca

SEQ ID NO: 418862 - RNA, 32 nt, Homo Sapiens
cucuugauaaagguacagcaaacuacuauucu

SEQ ID NO: 418863 - RNA, 32 nt, Homo Sapiens
aaggcuagugauaugcaguaugaugcucucuc

SEQ ID NO: 418864 - RNA, 32 nt, Homo Sapiens
uaccuacccagcucucauucucuucuagguug

SEQ ID NO: 418865 - RNA, 32 nt, Homo Sapiens
guauccuuguccguuucauuuauuuuuuaagu

SEQ ID NO: 418866 - RNA, 32 nt, Homo Sapiens
cugccccaucauugcaccugcaggcuuagguc

SEQ ID NO: 418867 - RNA, 32 nt, Homo Sapiens
accacugccggggacuggaguuuguuggaugu

SEQ ID NO: 418868 - RNA, 32 nt, Homo Sapiens
ccgcccuggggagggaggggagccccggagag

SEQ ID NO: 418869 - RNA, 32 nt, Homo Sapiens
ugagcacuuaauggcgccggugacagagugag

SEQ ID NO: 418870 - RNA, 32 nt, Homo Sapiens
gccccgccgcuccuccucccuguaacaugcca

SEQ ID NO: 418871 - RNA, 32 nt, Homo Sapiens
ugcguugaacaaauagcuuuugaaauagccac

SEQ ID NO: 418872 - RNA, 32 nt, Homo Sapiens
uuauuuuugugccaauuauucaccuuaucgug

SEQ ID NO: 418873 - RNA, 32 nt, Homo Sapiens
uagaaauuagcuuuugucuaggcaacuagugg

SEQ ID NO: 418874 - RNA, 32 nt, Homo Sapiens
gaggcuuugcgguggcuguuggcuuggcggug

SEQ ID NO: 418875 - RNA, 31 nt, Homo Sapiens
gugacgcggcacugcgucuccagccuaccuc

SEQ ID NO: 418876 - RNA, 32 nt, Homo Sapiens
auguagauguugcccuacuaccuaccauugug

SEQ ID NO: 418877 - RNA, 32 nt, Homo Sapiens
ggggcagggcugccuccagccugcacgcuggc

SEQ ID NO: 418878 - RNA, 32 nt, Homo Sapiens
auuuucauaaugaagcacuuugcuauguagcu

SEQ ID NO: 418879 - RNA, 32 nt, Homo Sapiens
caguuuaggcuagagaggaaaaaacuacugua

SEQ ID NO: 418880 - RNA, 31 nt, Homo Sapiens
aaaccgcggcacugcccgguuugagcguagc

SEQ ID NO: 418881 - RNA, 32 nt, Homo Sapiens
gugaugcucuggcuugccccaggacucuggca

SEQ ID NO: 418882 - RNA, 32 nt, Homo Sapiens
aacagcgcccccucccuuccagcccugagccg

SEQ ID NO: 418883 - RNA, 32 nt, Homo Sapiens
ccauccugaguuauuaauaauuuuauuaagaa

SEQ ID NO: 418884 - RNA, 32 nt, Homo Sapiens
cagaacuacugacgauagcuaagauuuggaag

SEQ ID NO: 418885 - RNA, 32 nt, Homo Sapiens
cuccuucagacacccucaaccucuucuggcuc

SEQ ID NO: 418886 - RNA, 32 nt, Homo Sapiens
gcucacucgcgcacgcccgcccggcccgagaa

SEQ ID NO: 418887 - RNA, 32 nt, Homo Sapiens
gccaguuagugccaccugaguacagcacucgu

SEQ ID NO: 418888 - RNA, 32 nt, Homo Sapiens
guagagaucugugcuuuuggaaggaggggcaa

SEQ ID NO: 418889 - RNA, 32 nt, Homo Sapiens
guuguauuugaaacauaguucaugguuuuauc

SEQ ID NO: 418890 - RNA, 32 nt, Homo Sapiens
caccauccuguggugagcuagcggauucccug

SEQ ID NO: 418891 - RNA, 32 nt, Homo Sapiens
aaccaggcuuugcugggugcugcccaaccuga

SEQ ID NO: 418892 - RNA, 31 nt, Homo Sapiens
uauuguuugugcuaagcauuguguuagauuu

SEQ ID NO: 418893 - RNA, 32 nt, Homo Sapiens
cggccccgagacgcgccuggcgcggauccuaa

SEQ ID NO: 418894 - RNA, 32 nt, Homo Sapiens
gcuuccgccccguagugaccgccuggugccgc

SEQ ID NO: 418895 - RNA, 32 nt, Homo Sapiens
aaagggauauuguauccaugguaaauuaauug

SEQ ID NO: 418896 - RNA, 32 nt, Homo Sapiens
caauauggugcugguucaaaccagagaauuca

SEQ ID NO: 418897 - RNA, 32 nt, Homo Sapiens
ggugccugcagggcucuccgugcccgcucggg

SEQ ID NO: 418898 - RNA, 32 nt, Homo Sapiens
caagcaucauaucauuucacccaaguauuuua

SEQ ID NO: 418899 - RNA, 32 nt, Homo Sapiens
aguccucaaugagagugaggugguuugagaaa

SEQ ID NO: 418900 - RNA, 32 nt, Homo Sapiens
acaagcuuauuuccaaagccaccucauuucca

SEQ ID NO: 418901 - RNA, 32 nt, Homo Sapiens
aaggaaggcagacaucuccgcagccacuccug

SEQ ID NO: 418902 - RNA, 32 nt, Homo Sapiens
auggaagccugaacugaggccuugugugucag

SEQ ID NO: 418903 - RNA, 32 nt, Homo Sapiens
aagaaucugaccaguaucuugcaguguugacg

SEQ ID NO: 418904 - RNA, 31 nt, Homo Sapiens
aaacuuauucaacuuuggccaaauacaaaug

SEQ ID NO: 418905 - RNA, 32 nt, Homo Sapiens
guccggccagccgugcgcugcugcuggugucu

SEQ ID NO: 418906 - RNA, 32 nt, Homo Sapiens
gguccuuuaucaggugcaagugccaaagagaa

SEQ ID NO: 418907 - RNA, 32 nt, Homo Sapiens
uucggcccauauuuuguguguuuggacaaggu

SEQ ID NO: 418908 - RNA, 32 nt, Homo Sapiens
ccuccugcccccaccccgccuuugggucgcug

SEQ ID NO: 418909 - RNA, 32 nt, Homo Sapiens
gacuugcuuccauaguggagacuugcuuuuca

SEQ ID NO: 418910 - RNA, 32 nt, Homo Sapiens
ggaggugcuggcacaugagaucgagcggcugc

SEQ ID NO: 418911 - RNA, 31 nt, Homo Sapiens
gagccaccgcacccagccugaguuucucuuu

SEQ ID NO: 418912 - RNA, 32 nt, Homo Sapiens
ccacucaaaggccagaccugcagacgcccaga

SEQ ID NO: 418913 - RNA, 30 nt, Homo Sapiens
uuucuugucugugugcaggucuucauauaa

SEQ ID NO: 418914 - RNA, 32 nt, Homo Sapiens
uaauauagcauuaagcaaauggucaguuauuu

SEQ ID NO: 418915 - RNA, 32 nt, Homo Sapiens
cuguccucauccccggcuuagcugacggccca

SEQ ID NO: 418916 - RNA, 32 nt, Homo Sapiens
uuauauuaguuauguuugauaaaugucucagu

SEQ ID NO: 418917 - RNA, 32 nt, Homo Sapiens
aauacuauguucugaccucuggcacucuuucu

SEQ ID NO: 418918 - RNA, 32 nt, Homo Sapiens
acaauggccacacacacacacacacacacaca

SEQ ID NO: 418919 - RNA, 32 nt, Homo Sapiens
uuggcguaaggucuuccacuaguuagaugguu

SEQ ID NO: 418920 - RNA, 32 nt, Homo Sapiens
uuuuacaggucgcgcugcaaugggcccccacu

SEQ ID NO: 418921 - RNA, 32 nt, Homo Sapiens
cggggccuggcuggggguccugccgggcucac

SEQ ID NO: 418922 - RNA, 32 nt, Homo Sapiens
gggacuuuucaucgucacgucagcugcugugu

SEQ ID NO: 418923 - RNA, 32 nt, Homo Sapiens
auuuaauuucaaacaacgauccuuccagauau

SEQ ID NO: 418924 - RNA, 32 nt, Homo Sapiens
cuguaaugccagcacuuugggaggccaaggcg

SEQ ID NO: 418925 - RNA, 32 nt, Homo Sapiens
cacugagcagcccugccaggggugcuguuuca

SEQ ID NO: 418926 - RNA, 32 nt, Homo Sapiens
agccagugccaaguccucccccugcccauucu

SEQ ID NO: 418927 - RNA, 32 nt, Homo Sapiens
cuaugagaaaacugaggccaagugaggaaaga

SEQ ID NO: 418928 - RNA, 32 nt, Homo Sapiens
uguuggaauuuuuacggcuuuuguguagucau

SEQ ID NO: 418929 - RNA, 32 nt, Homo Sapiens
ucauaagggaaugugaccauguuuggagauag

SEQ ID NO: 418930 - RNA, 32 nt, Homo Sapiens
cgaugauggaucccacccggugaucgggaaug

SEQ ID NO: 418931 - RNA, 32 nt, Homo Sapiens
gauucccgcgcuccggcuccggaccggcgcug

SEQ ID NO: 418932 - RNA, 32 nt, Homo Sapiens
guuaugugaauauuucuuuaaaacuuuuaugu

SEQ ID NO: 418933 - RNA, 32 nt, Homo Sapiens
uccuguuuaucuuuaagccugauucuuuugag

SEQ ID NO: 418934 - RNA, 32 nt, Homo Sapiens
gagucacccaaaauagagagaugaggguaaaa

SEQ ID NO: 418935 - RNA, 30 nt, Homo Sapiens
aggggccuggagugcggcggcggcgggacc

SEQ ID NO: 418936 - RNA, 32 nt, Homo Sapiens
gcggagcuccccggccggcggugcguccccac

SEQ ID NO: 418937 - RNA, 32 nt, Homo Sapiens
caauaacaggagaggaaagagaagaguaaaac

SEQ ID NO: 418938 - RNA, 32 nt, Homo Sapiens
gccggccgccgggacccgaagcggaggucggc

SEQ ID NO: 418939 - RNA, 32 nt, Homo Sapiens
accuaccuccaaggcagcugcccuccugaaca

SEQ ID NO: 418940 - RNA, 32 nt, Homo Sapiens
auuccagaugagucacuguaacucuagaagau

SEQ ID NO: 418941 - RNA, 32 nt, Homo Sapiens
ccauaguauguagaagauuagauagauagaua

SEQ ID NO: 418942 - RNA, 32 nt, Homo Sapiens
cgcgcgugaccccacacccacccacucaucca

SEQ ID NO: 418943 - RNA, 32 nt, Homo Sapiens
uugcuacccaaguggauucugagacaggcacc

SEQ ID NO: 418944 - RNA, 32 nt, Homo Sapiens
uucauaggagaugauuuuugagguuugcacuc

SEQ ID NO: 418945 - RNA, 32 nt, Homo Sapiens
augccugccucccagaacguaccuggugcccc

SEQ ID NO: 418946 - RNA, 32 nt, Homo Sapiens
gccgcccaugcugcugccccuagccugccugc

SEQ ID NO: 418947 - RNA, 32 nt, Homo Sapiens
uagcuuucugaaaguucccuaucccucuuuac

SEQ ID NO: 418948 - RNA, 32 nt, Homo Sapiens
uagugcggggagagggagcgagcagaagagga

SEQ ID NO: 418949 - RNA, 32 nt, Homo Sapiens
gcacugggggaggggagggagugaggggcagu

SEQ ID NO: 418950 - RNA, 30 nt, Homo Sapiens
ccgcggcgcgcgcgauccggcugacgcauc

SEQ ID NO: 418951 - RNA, 32 nt, Homo Sapiens
agggccgcgcgcccggccgccggugcugacga

SEQ ID NO: 418952 - RNA, 32 nt, Homo Sapiens
aaucaucuggaaagaaacuauuuugugcccuu

SEQ ID NO: 418953 - RNA, 32 nt, Homo Sapiens
gggagcagacugcuccuccaggcuguauagac

SEQ ID NO: 418954 - RNA, 32 nt, Homo Sapiens
agcugcacaacacaguccuuccacuagcagcu

SEQ ID NO: 418955 - RNA, 30 nt, Homo Sapiens
acgggguuucaccguguuagccaggauguu

SEQ ID NO: 418956 - RNA, 32 nt, Homo Sapiens
gaaauuuuaaacaaaauuuaguaucuuuuggu

SEQ ID NO: 418957 - RNA, 32 nt, Homo Sapiens
cacuguuuugucugcauagaauuuuccugaac

SEQ ID NO: 418958 - RNA, 32 nt, Homo Sapiens
cugaggcccauacuccacggagaggagcccca

SEQ ID NO: 418959 - RNA, 31 nt, Homo Sapiens
agaacuuauuccucuugucuaacugaaaaug

SEQ ID NO: 418960 - RNA, 32 nt, Homo Sapiens
agaagacuucucagccuguuauggaaauagaa

SEQ ID NO: 418961 - RNA, 32 nt, Homo Sapiens
aauggagaugcagauauagauaccauagucaa

SEQ ID NO: 418962 - RNA, 32 nt, Homo Sapiens
uuugacuucaucuauuuuuuauuuguuuuuau

SEQ ID NO: 418963 - RNA, 32 nt, Homo Sapiens
aggagucacccagcuuccuucucugcgcuguu

SEQ ID NO: 418964 - RNA, 32 nt, Homo Sapiens
agacucuaaauauuuuuucuucaauuuuugaa

SEQ ID NO: 418965 - RNA, 32 nt, Homo Sapiens
cagucagaacuaagacaugguccguuuuacua

SEQ ID NO: 418966 - RNA, 32 nt, Homo Sapiens
cgggaacccggauccuuccgggacgcuucguu

SEQ ID NO: 418967 - RNA, 32 nt, Homo Sapiens
cagcgccuaccuccccgaaucgcggccgcugg

SEQ ID NO: 418968 - RNA, 32 nt, Homo Sapiens
aaccaugcuuuaaagaaccugcucuuuacgca

SEQ ID NO: 418969 - RNA, 32 nt, Homo Sapiens
cagcuuuguaaguaaguggcugccuccaaugu

SEQ ID NO: 418970 - RNA, 32 nt, Homo Sapiens
cgacucucauugauucuucaguuuuuuggguc

SEQ ID NO: 418971 - RNA, 32 nt, Homo Sapiens
cuuauacaaaaauuaauucaagauggauuaaa

SEQ ID NO: 418972 - RNA, 32 nt, Homo Sapiens
gccgcagccucccggcggcccugcgggucucc

SEQ ID NO: 418973 - RNA, 32 nt, Homo Sapiens
caccaauccaaugcgugcacccgcuccuuuau

SEQ ID NO: 418974 - RNA, 32 nt, Homo Sapiens
caauggucauuuccagacaaauuuaaaggaaa

SEQ ID NO: 418975 - RNA, 32 nt, Homo Sapiens
cuuccacccagcuguggggacugcuguggugg

SEQ ID NO: 418976 - RNA, 32 nt, Homo Sapiens
gagacagguauuuuuucuucaugccugcucua

SEQ ID NO: 418977 - RNA, 32 nt, Homo Sapiens
gaggagaguggaaacuuuuacauuuguuucuc

SEQ ID NO: 418978 - RNA, 32 nt, Homo Sapiens
uagaguuugaguuucuguagggcugaaugacu

SEQ ID NO: 418979 - RNA, 32 nt, Homo Sapiens
ccuagccauagagcuuccuuuccagaacccuu

SEQ ID NO: 418980 - RNA, 32 nt, Homo Sapiens
augagucucagcaaauucuugaauaaacuccc

SEQ ID NO: 418981 - RNA, 32 nt, Homo Sapiens
guccuauguguggcaaggucuucaguccgagg

SEQ ID NO: 418982 - RNA, 32 nt, Homo Sapiens
cuuccaagcugauguuuguacuuuuguguuac

SEQ ID NO: 418983 - RNA, 32 nt, Homo Sapiens
cccgaacggucgccgcggccaacugccucgcc

SEQ ID NO: 418984 - RNA, 32 nt, Homo Sapiens
cugggcuucauggcugcagagcagggcaugca

SEQ ID NO: 418985 - RNA, 32 nt, Homo Sapiens
acucaaaccuuuguuuagcauauccuaaauac

SEQ ID NO: 418986 - RNA, 32 nt, Homo Sapiens
caaaaauauggacugauguauccucgccugga

SEQ ID NO: 418987 - RNA, 32 nt, Homo Sapiens
cacagggcagguggggaagcaguuuggcccag

SEQ ID NO: 418988 - RNA, 32 nt, Homo Sapiens
ccuggccucuucuccuucugaagaaaggaaca

SEQ ID NO: 418989 - RNA, 32 nt, Homo Sapiens
gucuuugaggaggcucacaaaauacuaaagcu

SEQ ID NO: 418990 - RNA, 28 nt, Homo Sapiens
gcuauggggagcuuucauuugaaccugc

SEQ ID NO: 418991 - RNA, 32 nt, Homo Sapiens
gccucuacaaaacaugcaaaaauuagcugggc

SEQ ID NO: 418992 - RNA, 32 nt, Homo Sapiens
uguaaagaugucuaggacgaaauauuuuaugu

SEQ ID NO: 418993 - RNA, 30 nt, Homo Sapiens
ggccaaggcaggcagguggaucaccugagg

SEQ ID NO: 418994 - RNA, 32 nt, Homo Sapiens
uucaaaaggagcaaaaauggccugcgguuggg

SEQ ID NO: 418995 - RNA, 32 nt, Homo Sapiens
gcaucucucugaaagcaauuauauaauauggc

SEQ ID NO: 418996 - RNA, 32 nt, Homo Sapiens
uggaccgcaccucaagguugaccagccggcca

SEQ ID NO: 418997 - RNA, 32 nt, Homo Sapiens
cucccuuggaucuccacauuuuuccagaugga

SEQ ID NO: 418998 - RNA, 32 nt, Homo Sapiens
gucuauuaaaauugucauuugacuuuuuucug

SEQ ID NO: 418999 - RNA, 32 nt, Homo Sapiens
guccgggaguccccggcccgcugcggugccgu

SEQ ID NO: 419000 - RNA, 32 nt, Homo Sapiens
ggucaccugccagcgacugucucagacugggc

SEQ ID NO: 419001 - RNA, 32 nt, Homo Sapiens
aauauauagauauauauguccaccaguauaau

SEQ ID NO: 419002 - RNA, 32 nt, Homo Sapiens
aagccugccuggcgucucugugccccugugag

SEQ ID NO: 419003 - RNA, 32 nt, Homo Sapiens
aggggaggagaugacuuugcuucugugcacag

SEQ ID NO: 419004 - RNA, 32 nt, Homo Sapiens
aagaugaccugugguaagcaaccuggcaucuu

SEQ ID NO: 419005 - RNA, 32 nt, Homo Sapiens
gaauguaauguuucuuguuuguuuguuuuguu

SEQ ID NO: 419006 - RNA, 32 nt, Homo Sapiens
cuaaugcuacuuucauuuauauuuuuaaaugu

SEQ ID NO: 419007 - RNA, 32 nt, Homo Sapiens
uauuuuuuaagugugaauguaacaacauacug

SEQ ID NO: 419008 - RNA, 32 nt, Homo Sapiens
uacccaagguaacagugucuugcuucauccca

SEQ ID NO: 419009 - RNA, 32 nt, Homo Sapiens
gccaucaaagaauuauuuugaugucuucuguc

SEQ ID NO: 419010 - RNA, 32 nt, Homo Sapiens
ucaagugacaaagggagggaccagagaauccg

SEQ ID NO: 419011 - RNA, 32 nt, Homo Sapiens
ccucugaggaaagcgguugaacuuguggaggg

SEQ ID NO: 419012 - RNA, 32 nt, Homo Sapiens
ccuguggauaccaagggaugacaguguauuuu

SEQ ID NO: 419013 - RNA, 32 nt, Homo Sapiens
cccgguucacaggcagagacucgggggugcuc

SEQ ID NO: 419014 - RNA, 32 nt, Homo Sapiens
aucugugcuugcagcucgaucuccaguuuuua

SEQ ID NO: 419015 - RNA, 32 nt, Homo Sapiens
agccaguugucacucagcccagcccaucaguu

SEQ ID NO: 419016 - RNA, 32 nt, Homo Sapiens
ccuggaacauauauaguuaguacuugauguca

SEQ ID NO: 419017 - RNA, 32 nt, Homo Sapiens
agaauaagaggugagaaucucaugauuugucu

SEQ ID NO: 419018 - RNA, 32 nt, Homo Sapiens
uguuuuuaucuuacucuuucuguacagauaua

SEQ ID NO: 419019 - RNA, 32 nt, Homo Sapiens
gaaaggagggugguuuccgugggggcucaucc

SEQ ID NO: 419020 - RNA, 32 nt, Homo Sapiens
ccaaaacuuccuucaaauaccuuugaauccug

SEQ ID NO: 419021 - RNA, 32 nt, Homo Sapiens
gacacaggagccuggggugcaggugccuccca

SEQ ID NO: 419022 - RNA, 32 nt, Homo Sapiens
uugugaaauaccaaacuuauggauuaucacua

SEQ ID NO: 419023 - RNA, 32 nt, Homo Sapiens
cugggcguucgcguccugcugcgcuuccagcg

SEQ ID NO: 419024 - RNA, 32 nt, Homo Sapiens
cgcuggccgcggugcugaaacggcgcccuccg

SEQ ID NO: 419025 - RNA, 32 nt, Homo Sapiens
aaggaaagccaggccuugugggcccccuucuu

SEQ ID NO: 419026 - RNA, 30 nt, Homo Sapiens
uguauuucacuugccaaccugauuuauacu

SEQ ID NO: 419027 - RNA, 32 nt, Homo Sapiens
ggagcaacucucgggcagccugcccaagggag

SEQ ID NO: 419028 - RNA, 32 nt, Homo Sapiens
ccaucaucuccuuucuucuccuguuagugaug

SEQ ID NO: 419029 - RNA, 32 nt, Homo Sapiens
ggaagaaggggcguuuguuuuauucuuggugu

SEQ ID NO: 419030 - RNA, 32 nt, Homo Sapiens
cacucuaaguggacagcucagaauaauuuagc

SEQ ID NO: 419031 - RNA, 32 nt, Homo Sapiens
ccugcugccgacggacgucgccccggcguccg

SEQ ID NO: 419032 - RNA, 32 nt, Homo Sapiens
ccgccccacugugaagagugugcucguuuuaa

SEQ ID NO: 419033 - RNA, 32 nt, Homo Sapiens
ccagggccccugugugcugugcuccagagccu

SEQ ID NO: 419034 - RNA, 32 nt, Homo Sapiens
aaauuaacugaugcauucauaagauuucaaua

SEQ ID NO: 419035 - RNA, 32 nt, Homo Sapiens
gcagcgcucuuucucuggcccgcggagcgguc

SEQ ID NO: 419036 - RNA, 32 nt, Homo Sapiens
uguaauugcuaaggcaugauaugucagguuau

SEQ ID NO: 419037 - RNA, 32 nt, Homo Sapiens
aaugacaaauaaauuuuuuuuauuucucaaug

SEQ ID NO: 419038 - RNA, 32 nt, Homo Sapiens
ugccaaggaaagggacggccugucaguugugu

SEQ ID NO: 419039 - RNA, 32 nt, Homo Sapiens
gagacgcagucggcugccaccccgggaugggu

SEQ ID NO: 419040 - RNA, 32 nt, Homo Sapiens
gaggagugggagaggggacacaggcaugggcc

SEQ ID NO: 419041 - RNA, 32 nt, Homo Sapiens
ggggaguaggagggcuuuggggccuggcccag

SEQ ID NO: 419042 - RNA, 32 nt, Homo Sapiens
guguuaugaccgcggcugcugcccccagccca

SEQ ID NO: 419043 - RNA, 32 nt, Homo Sapiens
ccuggacaccgggccaguaucuauauaugugu

SEQ ID NO: 419044 - RNA, 32 nt, Homo Sapiens
cagcccaguccgagcgcggacccggcgcccgc

SEQ ID NO: 419045 - RNA, 32 nt, Homo Sapiens
uacaggcaugcgccacuaagggaggagaccac

SEQ ID NO: 419046 - RNA, 32 nt, Homo Sapiens
uuggaaacacagcucccauauuugagugugca

SEQ ID NO: 419047 - RNA, 32 nt, Homo Sapiens
cacuggcaaggucugccuuccauucuccacga

SEQ ID NO: 419048 - RNA, 32 nt, Homo Sapiens
ggagccugucugcccgauggccccacagccau

SEQ ID NO: 419049 - RNA, 32 nt, Homo Sapiens
ucaagcaguccucccaccuuagcuucucaaag

SEQ ID NO: 419050 - RNA, 32 nt, Homo Sapiens
acuggcuaaagcuugauguggucacagcugua

SEQ ID NO: 419051 - RNA, 32 nt, Homo Sapiens
ucccucccccgcugcaccccgccccggcgcga

SEQ ID NO: 419052 - RNA, 30 nt, Homo Sapiens
gugaugguggucagggaagaccucucugca

SEQ ID NO: 419053 - RNA, 32 nt, Homo Sapiens
cgagcggcggcgccauggcccgagguagcgcg

SEQ ID NO: 419054 - RNA, 31 nt, Homo Sapiens
auguuagcaaguccuauucagaauccggagc

SEQ ID NO: 419055 - RNA, 32 nt, Homo Sapiens
cgucuucucgccaugggcuccgggccgcgcgg

SEQ ID NO: 419056 - RNA, 32 nt, Homo Sapiens
acgcccgcgccggcugugcugcacagggggag

SEQ ID NO: 419057 - RNA, 32 nt, Homo Sapiens
guugugaagaacuaagguggggagcaguacua

SEQ ID NO: 419058 - RNA, 31 nt, Homo Sapiens
cccuccccacccucuacccaguauacgaagc

SEQ ID NO: 419059 - RNA, 32 nt, Homo Sapiens
uuagugacacauagcugagaaguaaaaugacg

SEQ ID NO: 419060 - RNA, 27 nt, Homo Sapiens
cacuccgccuugcucagccccuccaug

SEQ ID NO: 419061 - RNA, 32 nt, Homo Sapiens
cccacaucucccuuccuucucucugggucccu

SEQ ID NO: 419062 - RNA, 32 nt, Homo Sapiens
cagguuggcacuguguggucuuucacaucggg

SEQ ID NO: 419063 - RNA, 32 nt, Homo Sapiens
ggacagggcuguggagauggcuccggcggcuu

SEQ ID NO: 419064 - RNA, 32 nt, Homo Sapiens
cgcuugcgcggguugagggcgguggcucaguc

SEQ ID NO: 419065 - RNA, 32 nt, Homo Sapiens
aaggcuguaauguuaauuuaaugggaaaaaag

SEQ ID NO: 419066 - RNA, 32 nt, Homo Sapiens
agcggccuuccccgcccggggcgcucccagag

SEQ ID NO: 419067 - RNA, 32 nt, Homo Sapiens
uguuuauuacuuuguaauaugccacuaugagu

SEQ ID NO: 419068 - RNA, 32 nt, Homo Sapiens
auuuggaguuugaaccuguuuugguugcauuu

SEQ ID NO: 419069 - RNA, 32 nt, Homo Sapiens
ccugcuuaacuggcacaaaugcauguccucug

SEQ ID NO: 419070 - RNA, 32 nt, Homo Sapiens
uuuuuuccuugucauugguuccuggcacucgg

SEQ ID NO: 419071 - RNA, 32 nt, Homo Sapiens
gaccugcgagcugcccaccacccccaguuguu

SEQ ID NO: 419072 - RNA, 32 nt, Homo Sapiens
gcgguacuacagagaccggcugcccgugugcc

SEQ ID NO: 419073 - RNA, 32 nt, Homo Sapiens
uugucauaguaaauaaaacucuaagcaaaugu

SEQ ID NO: 419074 - RNA, 32 nt, Homo Sapiens
gggaacccacccagcggcugccugggacaggc

SEQ ID NO: 419075 - RNA, 32 nt, Homo Sapiens
acugcagcaaacuuugguguaaaauuccacca

SEQ ID NO: 419076 - RNA, 27 nt, Homo Sapiens
guuuuauucuucuucacuaucuguggc

SEQ ID NO: 419077 - RNA, 32 nt, Homo Sapiens
augacuccaucugggauucagaauacaguguu

SEQ ID NO: 419078 - RNA, 32 nt, Homo Sapiens
cuaggcaaguguauauuuuguauuuuauauac

SEQ ID NO: 419079 - RNA, 32 nt, Homo Sapiens
aagggggccuggggcccuggggugggguaggc

SEQ ID NO: 419080 - RNA, 32 nt, Homo Sapiens
ugagagccgaugcccguccccgggccagcagg

SEQ ID NO: 419081 - RNA, 32 nt, Homo Sapiens
gcacuccgcgccccggccuagaagcucucucu

SEQ ID NO: 419082 - RNA, 32 nt, Homo Sapiens
cucagaaacaacagcaacagaugcagaaccug

SEQ ID NO: 419083 - RNA, 32 nt, Homo Sapiens
acaaaauguuccaagcacuuuaggcagacacc

SEQ ID NO: 419084 - RNA, 32 nt, Homo Sapiens
uagcauugcccccaaccucauuuuaguugcgu

SEQ ID NO: 419085 - RNA, 32 nt, Homo Sapiens
uuuuauaaacugaguuucuuagcauucguuaa

SEQ ID NO: 419086 - RNA, 32 nt, Homo Sapiens
cggacucccuccccagccggccaguccucccg

SEQ ID NO: 419087 - RNA, 32 nt, Homo Sapiens
ccucuaccaaaagaagaggaggggcucaaccu

SEQ ID NO: 419088 - RNA, 32 nt, Homo Sapiens
uuaaagaggucacguggaggguacguucauau

SEQ ID NO: 419089 - RNA, 32 nt, Homo Sapiens
accacacggacggggaggcuccuggagcugcu

SEQ ID NO: 419090 - RNA, 32 nt, Homo Sapiens
aaaaaaguucuauuuucccuguauugguaucu

SEQ ID NO: 419091 - RNA, 32 nt, Homo Sapiens
uugcccacugggugggggcccgugcuaggagu

SEQ ID NO: 419092 - RNA, 30 nt, Homo Sapiens
gcaauucccgauucuuccgcccugaauaac

SEQ ID NO: 419093 - RNA, 32 nt, Homo Sapiens
ucacacaauuuaagauagguucuggaguccuc

SEQ ID NO: 419094 - RNA, 32 nt, Homo Sapiens
aguuugcucaaggagaaauugaagccauaguc

SEQ ID NO: 419095 - RNA, 32 nt, Homo Sapiens
uacuauacuguaaggagaagcugagaaaugau

SEQ ID NO: 419096 - RNA, 32 nt, Homo Sapiens
caaccagaaugggaaucuggauuacccugggg

SEQ ID NO: 419097 - RNA, 32 nt, Homo Sapiens
aucaggcuccagggggacccaggcccuagcug

SEQ ID NO: 419098 - RNA, 32 nt, Homo Sapiens
guagcuucaaccaaagcuaauagagcccaagu

SEQ ID NO: 419099 - RNA, 32 nt, Homo Sapiens
acccgccugccggcaccaugaagugcucccug

SEQ ID NO: 419100 - RNA, 32 nt, Homo Sapiens
uccuguucaccccuaacccagccccuaagcaa

SEQ ID NO: 419101 - RNA, 32 nt, Homo Sapiens
guuuguguuucaauaaaguccuauguuaaagu

SEQ ID NO: 419102 - RNA, 29 nt, Homo Sapiens
ccgguccgggugccaccucucccugcuug

SEQ ID NO: 419103 - RNA, 32 nt, Homo Sapiens
agaagguucagccuuuauucugaugaugccac

SEQ ID NO: 419104 - RNA, 32 nt, Homo Sapiens
cagcaccagaaagagagauuguguggggguag

SEQ ID NO: 419105 - RNA, 32 nt, Homo Sapiens
aguugcuccgauuugaagaccuugcuucucau

SEQ ID NO: 419106 - RNA, 32 nt, Homo Sapiens
auaaaaugaagauaauaaugccuaccucagag

SEQ ID NO: 419107 - RNA, 32 nt, Homo Sapiens
uccucugaaaagaaacaaaaauacagugauca

SEQ ID NO: 419108 - RNA, 32 nt, Homo Sapiens
auggagagaacacacuggagaucacaaaugca

SEQ ID NO: 419109 - RNA, 32 nt, Homo Sapiens
uagaacuugaccaaaauagaaguaaauuaaag

SEQ ID NO: 419110 - RNA, 32 nt, Homo Sapiens
uuguggacaaguuucccaaauucccuggaccu

SEQ ID NO: 419111 - RNA, 32 nt, Homo Sapiens
caccugaagccggggcucccccugccugccuc

SEQ ID NO: 419112 - RNA, 32 nt, Homo Sapiens
uaaauuuccaaaccucuuuucuuauuggaaau

SEQ ID NO: 419113 - RNA, 32 nt, Homo Sapiens
uggaauugagggcacauccuuuguguguaucc

SEQ ID NO: 419114 - RNA, 32 nt, Homo Sapiens
ccguucgagggucagaggagccuggaugcuaa

SEQ ID NO: 419115 - RNA, 32 nt, Homo Sapiens
uguggcucaugcuuuuuuuuuaggguuacaug

SEQ ID NO: 419116 - RNA, 32 nt, Homo Sapiens
gcuaccaggcagugcuggccucugggcgggug

SEQ ID NO: 419117 - RNA, 32 nt, Homo Sapiens
agacgcgugcgcgugcacagaugcacacacac

SEQ ID NO: 419118 - RNA, 32 nt, Homo Sapiens
acggauuccaaagaguagaauugcauugacca

SEQ ID NO: 419119 - RNA, 32 nt, Homo Sapiens
acagcgaagcgcggggaggggcagggcccccu

SEQ ID NO: 419120 - RNA, 30 nt, Homo Sapiens
acgguguuucacuguguuagccaggauggu

SEQ ID NO: 419121 - RNA, 32 nt, Homo Sapiens
accguuugcuucuuuaacuccagccgcggaau

SEQ ID NO: 419122 - RNA, 32 nt, Homo Sapiens
cccgagucucguuuccucucaguccauccacc

SEQ ID NO: 419123 - RNA, 32 nt, Homo Sapiens
acugaugccauccccagaccccauucagguuu

SEQ ID NO: 419124 - RNA, 32 nt, Homo Sapiens
cacccccaaacacaaaacauucauguaacucu

SEQ ID NO: 419125 - RNA, 32 nt, Homo Sapiens
cuaucugaaacacugaaucuccuuuuguaacu

SEQ ID NO: 419126 - RNA, 32 nt, Homo Sapiens
cauauguuuuaaccuuaugguaauacuuugcu

SEQ ID NO: 419127 - RNA, 32 nt, Homo Sapiens
gcucgcacggaggcaagaacuuauucaacaag

SEQ ID NO: 419128 - RNA, 32 nt, Homo Sapiens
guaaauguucacuuaaaugaaauugaaaacgc

SEQ ID NO: 419129 - RNA, 32 nt, Homo Sapiens
gccucucaagccuugacucccugguauucuuu

SEQ ID NO: 419130 - RNA, 32 nt, Homo Sapiens
guggggacgcucaggugccggcguggggcccc

SEQ ID NO: 419131 - RNA, 32 nt, Homo Sapiens
augguaacagauuugcuccuaaaccauugagc

SEQ ID NO: 419132 - RNA, 32 nt, Homo Sapiens
ccuaaguugcuguccagccucagugacccccu

SEQ ID NO: 419133 - RNA, 32 nt, Homo Sapiens
guugaguuaguagaaucugaggaugaugcuuc

SEQ ID NO: 419134 - RNA, 32 nt, Homo Sapiens
ccagcacuuucugcauuccaaacagcauccua

SEQ ID NO: 419135 - RNA, 32 nt, Homo Sapiens
cuuuauauagcauacagccaugauucuaaaua

SEQ ID NO: 419136 - RNA, 28 nt, Homo Sapiens
ucaccggcgccgccgccgaggaagccac

SEQ ID NO: 419137 - RNA, 32 nt, Homo Sapiens
gucuuuuuauuuuaaacuuuuguuaugaaauu

SEQ ID NO: 419138 - RNA, 32 nt, Homo Sapiens
uccgccuggagcucguggcgcuguguuuccgu

SEQ ID NO: 419139 - RNA, 32 nt, Homo Sapiens
cuacgacuucgggccucccgccgggaucugau

SEQ ID NO: 419140 - RNA, 32 nt, Homo Sapiens
uuauuuuaaaagguuuguuguuagaacuaagc

SEQ ID NO: 419141 - RNA, 32 nt, Homo Sapiens
ugccgagagcgggcugugggcggagcuggguc

SEQ ID NO: 419142 - RNA, 32 nt, Homo Sapiens
gugguacaagcacguggcgaguccccgcuacc

SEQ ID NO: 419143 - RNA, 32 nt, Homo Sapiens
uaauccgcaugacagauaauauguagaaauau

SEQ ID NO: 419144 - RNA, 32 nt, Homo Sapiens
cugcauugauaaaaggugaauauauuagcauu

SEQ ID NO: 419145 - RNA, 32 nt, Homo Sapiens
ccccagaucucaggucugaggacccccacucc

SEQ ID NO: 419146 - RNA, 32 nt, Homo Sapiens
auccuuggucuccaccacgacaucucaguacc

SEQ ID NO: 419147 - RNA, 32 nt, Homo Sapiens
gggucauggaaauguguauuuucuccaaaccu

SEQ ID NO: 419148 - RNA, 32 nt, Homo Sapiens
gccugcuuuuccugagccagugcccaucaccc

SEQ ID NO: 419149 - RNA, 32 nt, Homo Sapiens
gaugaggaggcagaugaugcagaugcugcugg

SEQ ID NO: 419150 - RNA, 32 nt, Homo Sapiens
cucaaguuccucuuucagcugcacccaggguu

SEQ ID NO: 419151 - RNA, 32 nt, Homo Sapiens
gguuuugugaaggcauuuauggucauuaccaa

SEQ ID NO: 419152 - RNA, 32 nt, Homo Sapiens
acugaaaggaagggcugguccugccccuuuga

SEQ ID NO: 419153 - RNA, 32 nt, Homo Sapiens
gcugcgcgccgcggcggcggaagauggcugcg

SEQ ID NO: 419154 - RNA, 30 nt, Homo Sapiens
gcgcgccaugcgcagcaccacgcuccuggc

SEQ ID NO: 419155 - RNA, 32 nt, Homo Sapiens
cuuuauaaugaaaaauacauuugcaaagguau

SEQ ID NO: 419156 - RNA, 31 nt, Homo Sapiens
aucaccgugugcucaggccaggugugaaucc

SEQ ID NO: 419157 - RNA, 32 nt, Homo Sapiens
aucagcuugugacuuacaaaccuuguuuaaaa

SEQ ID NO: 419158 - RNA, 32 nt, Homo Sapiens
uaaucacaccucauuucuuucaucagcaguug

SEQ ID NO: 419159 - RNA, 32 nt, Homo Sapiens
gagccccgcagaccuccccagccccuagccca

SEQ ID NO: 419160 - RNA, 30 nt, Homo Sapiens
agguagagcgggcgcgcggcagcgcgggga

SEQ ID NO: 419161 - RNA, 32 nt, Homo Sapiens
acacccugccccagcccagcugccuccagacc

SEQ ID NO: 419162 - RNA, 32 nt, Homo Sapiens
agcauaucaagcauaucgggcggcaccauccc

SEQ ID NO: 419163 - RNA, 32 nt, Homo Sapiens
cugcugcaccaccagcaggaggaggaggagaa

SEQ ID NO: 419164 - RNA, 32 nt, Homo Sapiens
agugugaggaagaguguguaggugugaguguc

SEQ ID NO: 419165 - RNA, 32 nt, Homo Sapiens
aaggaaaaacacacacaaaagaaaaagacuuu

SEQ ID NO: 419166 - RNA, 32 nt, Homo Sapiens
gcccaggcggcggcgaguacucgggauauauu

SEQ ID NO: 419167 - RNA, 28 nt, Homo Sapiens
gccaugcgcccccgagccccagccugcg

SEQ ID NO: 419168 - RNA, 32 nt, Homo Sapiens
ugugcggcgguggacaggcgccagcacauuuc

SEQ ID NO: 419169 - RNA, 25 nt, Homo Sapiens
auaaagcucuucuucaucgucuuca

SEQ ID NO: 419170 - RNA, 32 nt, Homo Sapiens
ugcaacaacaccuggacgcaacuggcggagag

SEQ ID NO: 419171 - RNA, 32 nt, Homo Sapiens
aucuccccauucucuuuggcucuguccccugg

SEQ ID NO: 419172 - RNA, 32 nt, Homo Sapiens
augcuccccgaucuccuuccucuaccacucug

SEQ ID NO: 419173 - RNA, 32 nt, Homo Sapiens
cccgugguuuguguacuggaacuaaagcggaa

SEQ ID NO: 419174 - RNA, 32 nt, Homo Sapiens
uguuauagaagcuuagagagccagccagcaau

SEQ ID NO: 419175 - RNA, 32 nt, Homo Sapiens
uuauaaaaaaaaguuguuuauaaaaaccccua

SEQ ID NO: 419176 - RNA, 32 nt, Homo Sapiens
acugaaaugcugucucaacuuuuguuuuauga

SEQ ID NO: 419177 - RNA, 32 nt, Homo Sapiens
ucaucgugagauucauuuuucuuaaauuuugg

SEQ ID NO: 419178 - RNA, 32 nt, Homo Sapiens
acauggggaaaacacaagguugcggggacuuu

SEQ ID NO: 419179 - RNA, 32 nt, Homo Sapiens
aggcaagagugcagugguaugaucucagcuca

SEQ ID NO: 419180 - RNA, 32 nt, Homo Sapiens
caccaugccuggcccuuaagaagugcucaaua

SEQ ID NO: 419181 - RNA, 28 nt, Homo Sapiens
gggcucgagcggccgcccgggcagguga

SEQ ID NO: 419182 - RNA, 32 nt, Homo Sapiens
aucacaggcugagggacagagcaaagaccccu

SEQ ID NO: 419183 - RNA, 32 nt, Homo Sapiens
ggcauuuggaugccucucuguuggggccuggg

SEQ ID NO: 419184 - RNA, 32 nt, Homo Sapiens
uaacaaaguauuuaaaugguugucacacuuga

SEQ ID NO: 419185 - RNA, 32 nt, Homo Sapiens
aggaauuauaugccaggaagcaggaucgaaga

SEQ ID NO: 419186 - RNA, 32 nt, Homo Sapiens
aaauaaaguaacagcagacaucgggcugggga

SEQ ID NO: 419187 - RNA, 32 nt, Homo Sapiens
acagacgugcuagcagaaugugcuauuaguaa

SEQ ID NO: 419188 - RNA, 32 nt, Homo Sapiens
aaauugagauaaacauuuuguucaccauuaaa

SEQ ID NO: 419189 - RNA, 32 nt, Homo Sapiens
ugcuuucuauagagcaugcaccaaauccagug

SEQ ID NO: 419190 - RNA, 32 nt, Homo Sapiens
cccagaauauccuucaaguuccacuucccagg

SEQ ID NO: 419191 - RNA, 32 nt, Homo Sapiens
aaaaccucucuccucagccuuccaccuccaag

SEQ ID NO: 419192 - RNA, 32 nt, Homo Sapiens
gcaggaagcccacgcagcacagcccuccagcu

SEQ ID NO: 419193 - RNA, 32 nt, Homo Sapiens
aaaaaucagacaaacaggaacuggguaguggu

SEQ ID NO: 419194 - RNA, 32 nt, Homo Sapiens
cugcucccugucacuuuuuaaaagccagggua

SEQ ID NO: 419195 - RNA, 32 nt, Homo Sapiens
ugccuugccucucaggaccuggcacaguggcu

SEQ ID NO: 419196 - RNA, 32 nt, Homo Sapiens
gauuucagacagcaaucaaaacaucaaguaca

SEQ ID NO: 419197 - RNA, 32 nt, Homo Sapiens
ucuccuuccugggcgagcugcggggauggggc

SEQ ID NO: 419198 - RNA, 32 nt, Homo Sapiens
guaugugcuaagaagccaaaaauuaaaaauac

SEQ ID NO: 419199 - RNA, 28 nt, Homo Sapiens
gggcauuggcggccgcccuggcgugacc

SEQ ID NO: 419200 - RNA, 32 nt, Homo Sapiens
augcuucacaagauaauaagauaucacaaggc

SEQ ID NO: 419201 - RNA, 32 nt, Homo Sapiens
gcuguuagcucgccgguccucggcacgccgcc

SEQ ID NO: 419202 - RNA, 32 nt, Homo Sapiens
uucucugccccucccugcccgcguuucagggc

SEQ ID NO: 419203 - RNA, 32 nt, Homo Sapiens
uccuccccagucuccgaccccaucccccagcc

SEQ ID NO: 419204 - RNA, 32 nt, Homo Sapiens
aaagcacgccgggagcuccagccagccgggga

SEQ ID NO: 419205 - RNA, 32 nt, Homo Sapiens
aaaaccauuuuucuaauaagagacaucauguu

SEQ ID NO: 419206 - RNA, 32 nt, Homo Sapiens
aucacuacaaccuugaauuuaauuucaggucu

SEQ ID NO: 419207 - RNA, 32 nt, Homo Sapiens
ucuuccuguccucauuucuaccccgagucucc

SEQ ID NO: 419208 - RNA, 32 nt, Homo Sapiens
cagccacgcuuccuguacagccugcagaacug

SEQ ID NO: 419209 - RNA, 32 nt, Homo Sapiens
gcccagcucacaugugaguccuggcagaagcc

SEQ ID NO: 419210 - RNA, 32 nt, Homo Sapiens
aaaucucuguuguuuuaggccaccuagcuugu

SEQ ID NO: 419211 - RNA, 32 nt, Homo Sapiens
agacucagagggaaaaggaaaagagccucaaa

SEQ ID NO: 419212 - RNA, 32 nt, Homo Sapiens
cgccgcgaugcuggcaacacggcggcugcucg

SEQ ID NO: 419213 - RNA, 32 nt, Homo Sapiens
uaaauacugacgcaauccuuaauggaaaagag

SEQ ID NO: 419214 - RNA, 32 nt, Homo Sapiens
auguccaguuucugugguuaaucccuuacuug

SEQ ID NO: 419215 - RNA, 32 nt, Homo Sapiens
gagaaucucuucaggauuauaaaaguuguaaa

SEQ ID NO: 419216 - RNA, 32 nt, Homo Sapiens
uucggucucuuggcuuuuaaagccuuccauga

SEQ ID NO: 419217 - RNA, 32 nt, Homo Sapiens
uccaggacuauggaaaccuuacaggauacuga

SEQ ID NO: 419218 - RNA, 32 nt, Homo Sapiens
ggaguuccccguggacagagccagagggcagu

SEQ ID NO: 419219 - RNA, 32 nt, Homo Sapiens
aagcaaaaaaccacaagagccucagccaguuu

SEQ ID NO: 419220 - RNA, 32 nt, Homo Sapiens
ucuguacgugugucuggauaauaaaaaagaca

SEQ ID NO: 419221 - RNA, 32 nt, Homo Sapiens
gggugaaggggaggucugggauacaaagagaa

SEQ ID NO: 419222 - RNA, 32 nt, Homo Sapiens
gcagcucggccgcguggaggugaccgggcgga

SEQ ID NO: 419223 - RNA, 32 nt, Homo Sapiens
cccaggugggggcauccgggaauucaggggag

SEQ ID NO: 419224 - RNA, 32 nt, Homo Sapiens
agauugcaugaaaucuauagauugcuuuggac

SEQ ID NO: 419225 - RNA, 32 nt, Homo Sapiens
gguccaaacuuuaaguuuuucuuauaaaaaua

SEQ ID NO: 419226 - RNA, 32 nt, Homo Sapiens
ccggcccugucaagaaucacauacucagcauu

SEQ ID NO: 419227 - RNA, 32 nt, Homo Sapiens
cucuacaaaaauacaaaaauuaggugggugug

SEQ ID NO: 419228 - RNA, 32 nt, Homo Sapiens
uuaagccaacugaguuccuuuccuuguggggg

SEQ ID NO: 419229 - RNA, 32 nt, Homo Sapiens
ccgacagccccgagacgacagcccggcgcguc

SEQ ID NO: 419230 - RNA, 32 nt, Homo Sapiens
acugaucacaaauaaacugcuuuguuguaaca

SEQ ID NO: 419231 - RNA, 32 nt, Homo Sapiens
ccuguaucuaaagaaauacgguuggggucauu

SEQ ID NO: 419232 - RNA, 32 nt, Homo Sapiens
cugugggcagcgccugggcuagagccacuuga

SEQ ID NO: 419233 - RNA, 31 nt, Homo Sapiens
cgaucccaguuugccuugccaaauaaacucu

SEQ ID NO: 419234 - RNA, 32 nt, Homo Sapiens
ucugauuccaggcuauguauuaucuccuuucu

SEQ ID NO: 419235 - RNA, 32 nt, Homo Sapiens
ugacucuucuaaucuugaaccaaaaggaaaac

SEQ ID NO: 419236 - RNA, 32 nt, Homo Sapiens
auaucaggaaaacaaaguuguugagccuugcu

SEQ ID NO: 419237 - RNA, 32 nt, Homo Sapiens
accacgagccccagccucacaguguccacuca

SEQ ID NO: 419238 - RNA, 32 nt, Homo Sapiens
ggagccugccagccgcuuccugccuccuuccu

SEQ ID NO: 419239 - RNA, 30 nt, Homo Sapiens
ggacauguuccugcugcagauaacuagcca

SEQ ID NO: 419240 - RNA, 32 nt, Homo Sapiens
uauggaguuuccucauaccuuaucucauucag

SEQ ID NO: 419241 - RNA, 32 nt, Homo Sapiens
guauguacguauauuucuguaucuauguaugu

SEQ ID NO: 419242 - RNA, 32 nt, Homo Sapiens
ccagacaggaugcuucuguuccuggaaacaug

SEQ ID NO: 419243 - RNA, 32 nt, Homo Sapiens
cuuuuuaaagauucuuaagugauuccagugug

SEQ ID NO: 419244 - RNA, 32 nt, Homo Sapiens
ucucccgcgggcccuccgccggccggggcuag

SEQ ID NO: 419245 - RNA, 32 nt, Homo Sapiens
acaaaggaagugcccccuccccggcacccucu

SEQ ID NO: 419246 - RNA, 32 nt, Homo Sapiens
guguaccccacuuucccgaccucccuauacca

SEQ ID NO: 419247 - RNA, 32 nt, Homo Sapiens
agauucagcucuucucuccuuacauuuuacau

SEQ ID NO: 419248 - RNA, 32 nt, Homo Sapiens
ggccccacacccagcccugccuuggucccuga

SEQ ID NO: 419249 - RNA, 32 nt, Homo Sapiens
acugaccucucuaucaggccucccccgccuca

SEQ ID NO: 419250 - RNA, 32 nt, Homo Sapiens
auuugcagcaccagcucagcaugcgguguccu

SEQ ID NO: 419251 - RNA, 32 nt, Homo Sapiens
ucgccugggcaggggcagccaaggcugggaaa

SEQ ID NO: 419252 - RNA, 30 nt, Homo Sapiens
ucaguaugacuugccacccaccugauaccu

SEQ ID NO: 419253 - RNA, 32 nt, Homo Sapiens
ggcccaggauuccgggaagcuggagauuccag

SEQ ID NO: 419254 - RNA, 32 nt, Homo Sapiens
uucuuucuuuuuuuuuuuuuuacaauuuugag

SEQ ID NO: 419255 - RNA, 32 nt, Homo Sapiens
caagacaagcacuuauuuuuauuuucagaaga

SEQ ID NO: 419256 - RNA, 32 nt, Homo Sapiens
guaaagggccgguuuauaaauauuuuagacuu

SEQ ID NO: 419257 - RNA, 32 nt, Homo Sapiens
ccccuacugcuuacauuccccucccccuggcc

SEQ ID NO: 419258 - RNA, 32 nt, Homo Sapiens
uuuaauccaaauaauaaauggcuguuucaaaa

SEQ ID NO: 419259 - RNA, 32 nt, Homo Sapiens
uccucuggguaccaacucuauugcgcagcucg

SEQ ID NO: 419260 - RNA, 32 nt, Homo Sapiens
cgauaccaaaauaauuucccuuucucaucuug

SEQ ID NO: 419261 - RNA, 32 nt, Homo Sapiens
uaaguuaggacaguguuaaaucuuagacaauc

SEQ ID NO: 419262 - RNA, 32 nt, Homo Sapiens
guuccucccaggguuuccagggaaacaacaug

SEQ ID NO: 419263 - RNA, 32 nt, Homo Sapiens
aaaaaaugcuauaaaauggugaaagcuuccuu

SEQ ID NO: 419264 - RNA, 32 nt, Homo Sapiens
ccaggaguucccucagcuuauuuauugccaga

SEQ ID NO: 419265 - RNA, 32 nt, Homo Sapiens
uugaauguagcggccagagaggcacucgcggc

SEQ ID NO: 419266 - RNA, 32 nt, Homo Sapiens
ggggagcgcuggcgaggcacggacggcgggcg

SEQ ID NO: 419267 - RNA, 32 nt, Homo Sapiens
uggccucacucccaccugggcgcuaggagcca

SEQ ID NO: 419268 - RNA, 32 nt, Homo Sapiens
uucccucucuuuccccagacaccuacuugaga

SEQ ID NO: 419269 - RNA, 32 nt, Homo Sapiens
gaaaguggggcuuuacauuugcugagcacaua

SEQ ID NO: 419270 - RNA, 32 nt, Homo Sapiens
uaaaaaaugaauuccaggaccauuaaaucagg

SEQ ID NO: 419271 - RNA, 32 nt, Homo Sapiens
acagacaaugaaauaaguaggacugaguauuu

SEQ ID NO: 419272 - RNA, 32 nt, Homo Sapiens
gcgcgggcuuccuggggcguccuucuuuguga

SEQ ID NO: 419273 - RNA, 32 nt, Homo Sapiens
uuauuauucugugaguauaaaguucuauuuua

SEQ ID NO: 419274 - RNA, 32 nt, Homo Sapiens
guuuugaggguggaaugaggugaagggcaagu

SEQ ID NO: 419275 - RNA, 32 nt, Homo Sapiens
ggagggugcugaggcagcagggggcuggugua

SEQ ID NO: 419276 - RNA, 32 nt, Homo Sapiens
gcuccacccccucccgucccagcccccaacgc

SEQ ID NO: 419277 - RNA, 32 nt, Homo Sapiens
ggggagcagggcggggugacgcccggagagcg

SEQ ID NO: 419278 - RNA, 32 nt, Homo Sapiens
gcugaaagggaagagaacuuagauuugaccug

SEQ ID NO: 419279 - RNA, 32 nt, Homo Sapiens
accagccgccccagccccuucucccagcacac

SEQ ID NO: 419280 - RNA, 32 nt, Homo Sapiens
ugcugucauuuucuuuucuuuugggugguggg

SEQ ID NO: 419281 - RNA, 32 nt, Homo Sapiens
aaccgacaauauauuuauuuauaaagcacaua

SEQ ID NO: 419282 - RNA, 32 nt, Homo Sapiens
aucuggcugugcaaggaagacccggcuuugcc

SEQ ID NO: 419283 - RNA, 32 nt, Homo Sapiens
cgucucuucuaaaaauacaaaaaauuagcccg

SEQ ID NO: 419284 - RNA, 32 nt, Homo Sapiens
ucuguggagguaguugcugguggcacugggua

SEQ ID NO: 419285 - RNA, 32 nt, Homo Sapiens
cgcugcuccaggagaucugcagcugggccaug

SEQ ID NO: 419286 - RNA, 32 nt, Homo Sapiens
ggugugcccagcccuccagacccggccuuucu

SEQ ID NO: 419287 - RNA, 32 nt, Homo Sapiens
gcuccccgccuggccuggcccuccccaggcgg

SEQ ID NO: 419288 - RNA, 32 nt, Homo Sapiens
gggacuuugaguuuguauggggagggaaaagg

SEQ ID NO: 419289 - RNA, 32 nt, Homo Sapiens
uauguggcaguuccucacuagggaauuugguc

SEQ ID NO: 419290 - RNA, 32 nt, Homo Sapiens
gccgaacgcgaugcccgagggcgcugugagcg

SEQ ID NO: 419291 - RNA, 32 nt, Homo Sapiens
uuuauguuuccagagaaauuggauggccacag

SEQ ID NO: 419292 - RNA, 32 nt, Homo Sapiens
aaauaaaaccaaucagucaguuagccuaaacc

SEQ ID NO: 419293 - RNA, 31 nt, Homo Sapiens
uucuauuugugcuuuuaaagugugucuguug

SEQ ID NO: 419294 - RNA, 32 nt, Homo Sapiens
gagaugggcuucccaagggcugccggggcagc

SEQ ID NO: 419295 - RNA, 32 nt, Homo Sapiens
gccaccuaugcucuggcaggcauccucccugg

SEQ ID NO: 419296 - RNA, 32 nt, Homo Sapiens
aucucuuuuuaaaauguuaucuccuaguugcc

SEQ ID NO: 419297 - RNA, 32 nt, Homo Sapiens
cagucuguagagcagcucccagaggcugcccu

SEQ ID NO: 419298 - RNA, 32 nt, Homo Sapiens
cucgcccuccgcuggccgcgggucagcuccga

SEQ ID NO: 419299 - RNA, 32 nt, Homo Sapiens
uggucuuucucugcaguccccagccaauacgu

SEQ ID NO: 419300 - RNA, 32 nt, Homo Sapiens
gaaaaaaucggguaucuguuaagcaaaaaucc

SEQ ID NO: 419301 - RNA, 32 nt, Homo Sapiens
agagccaaaaggauagagaaagagacccagaa

SEQ ID NO: 419302 - RNA, 32 nt, Homo Sapiens
uccagaugaugauucagaagcuaauuuuaaaa
